(19) United States
(12) Patent Application Publication
(10) Pub. No.: US 2003/0073623 A1
(43) Pub. Date: Apr. 17, 2003

(54) Novel nucleic acid sequences obtained from various cDNA libraries

(76) Inventors: Radoje T. Drmanac, Palo Alto, CA (US); Ivan Labat, San Francisco, CA (US); Birgit Stache-Crain, Sunnyvale, CA (US); Mark C. Dickson, Hollister, CA (US); Lee William Jones, Sunnyvale, CA (US)

Correspondence Address: MINTZ, LEVIN, COHN, FERRIS, GLOVSKY, AND POPEO, P.C., ONE FINANCIAL CENTER, BOSTON, MA, 02111, US

(21) Appl. No.: 09/918,995

(22) Filed: Jul. 30, 2001

(51) Int. Cl. C12Q 1/68; A61K 38/17; C12P 21/02; C12N 5/06; C07K 14/435; C07H 21/04

(52) U.S. Cl. 514/12; 435/6; 435/69.1; 435/183; 435/320.1; 435/325; 530/350; 536/23.2

(57) ABSTRACT

The present invention provides a plurality of novel nucleic acids isolated from cDNA libraries for adult brain, adult heart, adult lung, adult lymph node, adult liver, adult ovary, adult spleen, testis, bone marrow, endothelial cell, fetal kidney, fetal liver/spleen, fetal liver, fetal brain, infant brain, lung tumor, leukocyte, and mammary gland. These expressed sequence tags were determined to be novel by their failure to match any known sequences in several publicly available databases, including the dbEST database.

### 1. FIELD OF THE INVENTION

[0001] This invention relates in general to novel nucleic acid sequences isolated from human cDNA libraries of adult brain, adult heart, adult lung, adult lymph node, adult liver, adult ovary, adult spleen, testis, bone marrow, endothelial cell, fetal kidney, fetal liver/spleen, fetal liver, fetal brain, infant brain, lung tumor, leukocyte, and mammary gland.

### 2. BACKGROUND

[0002] The rate of determining the sequence of the four nucleotides in DNA samples is a major technical obstacle for further advancement of molecular biology, medicine, and biotechnology. Nucleic acid sequencing methods which involve separation of DNA molecules in a gel have been in use since 1978. The other proven method for sequencing nucleic acids is sequencing by hybridization (SBH).

[0003] The traditional method of determining a sequence of nucleotides (i.e., the order of the A, G, C and T nucleotides in a sample) is performed by preparing a mixture of randomly-terminated, differentially labelled DNA fragments by degradation at specific nucleotides, or by dideoxy chain termination of replicating strands. Resulting DNA fragments in the range of 1 to 500 bp are then separated on a gel to produce a ladder of bands wherein the adjacent samples differ in length by one nucleotide.

[0004] The array-based approach of SBH does not require single base resolution in separation, degradation, synthesis or imaging of a DNA molecule. Using mismatch discriminative hybridization of short oligonucleotides K bases in length, lists of constituent K-mer oligonucleotides may be determined for target DNA. DNA sequence for the target DNA may be assembled by uniquely overlapping scored oligonucleotides.

[0005] There are several approaches available to achieve sequencing by hybridization. In a process called SBH Format 1, DNA samples are arrayed, and labeled probes are hybridized with the samples. Replica membranes with the same sets of sample DNAs may be used for parallel scoring of several probes and/or probes may be multiplexed. DNA samples may be arrayed and hybridized on nylon membranes. Each membrane array may be reused many times. Format 1 is especially efficient for batch processing large numbers of samples.

[0006] In SBH Format 2, probes are arrayed at locations on a substrate which correspond to their respective sequences, and a labelled DNA sample fragment is hybridized to the arrayed probes. In this case, sequence information about a fragment may be determined in a simultaneous hybridization reaction with all of the arrayed probes. For sequencing other DNA fragments, the same oligonucleotide array may be reused. The arrays may be produced by spotting or by in situ synthesis of probes.

[0007] In Format 3 SBH, two sets of probes are used. One set may be in the form of arrays of probes with known positions, and another, labelled set may be stored in multiwell plates. In this case, target DNA need not be labelled. Target DNA and one or more labelled probes are added to the arrayed sets of probes. If one attached probe and one labelled probe both hybridize contiguously on the target DNA, they are covalently ligated, producing a detected sequence equal to the sum of the length of the ligated probes. The process allows for sequencing long DNA fragments, e.g. a complete bacterial genome, without DNA subcloning in smaller pieces.

[0008] In the present invention, SBH is applied to the efficient identification and sequencing of one or more DNA samples. The procedure has many applications in DNA diagnostics, forensics, and gene mapping. It also may be used to identify mutations responsible for genetic disorders and other traits, to assess biodiversity and to produce many other types of data dependent on DNA sequence.

### 3. SUMMARY OF THE INVENTION

[0009] The invention relates to novel nucleic acid sequences isolated from the cDNA libraries prepared from adult brain, adult heart, adult lung, adult lymph node, adult liver, adult ovary, adult spleen, testis, bone marrow, endothelial cell, fetal kidney, fetal liver/spleen, fetal liver, fetal brain, infant brain, lung tumor, leukocyte, and mammary gland. The inserts of the library were amplified with PCR using primers specific for the vector sequences which flank the inserts. These inserts were analyzed by SBH to produce signatures for grouping together related insert clones. Single representative clones from each group were then selected for sequencing. The 5′ sequence of the inserts was then deduced using a primer specific for M13 in a typical Sanger sequencing protocol. These sequences are designated as SEQ ID NO: 1-38,043 and are provided in the Sequence Listing. In the nucleic acids provided in the Sequence Listing A is adenosine; C is cytosine; G is guanosine; T is thymine; and N is any of the four bases.

[0010] In preferred embodiments, these novel nucleic acid sequences are used in diagnostics as expressed sequence tags for identifying expressed genes, or as well known in the art, and exemplified by Vollrath et al., Science 258:52-59 (1992), as expressed sequence tags for physical mapping of the human genome.

[0011] Aspects of the invention include the antisense of the nucleic acid sequences; cloning or expression vectors containing the nucleic acid sequences; host cells or organisms transformed with these expression vectors; a method for the production and recovery of purified polypeptides from host cells; and purified proteins which may be used to generate antibodies for diagnosis or therapy of activated or inflamed cells and/or tissues.

[0012] The nucleotide sequences encoding SEQ ID NO: 1-38,043 (or their complements) have numerous applications in techniques known to those skilled in the art of molecular biology. These techniques include use as hybridizationprobes, use as oligomers for PCR, use for chromosome and gene mapping, use in the recombinant production of protein, and use in generation of anti-sense DNA or RNA, their chemical analogs and the like. In a preferred embodiment, the polynucleotides of the invention are used as probes in expression assays that are well known in the art. In a most preferred embodiment, the polynucleotides or their fragments are attached to a suitable substrate and used in expression assays that are well known in the art. Furthermore, the nucleotide sequences disclosed herein may be used in molecular biology techniques that have not yet been developed, provided the new techniques rely on properties of nucleotide sequences that are currently known such as the triplet genetic code, specific base pair interactions, and the like.

TABLE 1
Correlation of Libraries and Sequence Identification Nos.

| LIBRARY/SOURCE | SEQUENCE ID NOS. |
|---|---|
| Adult Brain (Invitrogen) | 1-2,898 |
| Adult Heart (GIBCO) | 2,899-6,209 |
| Adult Lung (GIBCO) | 6,210-7,461 |
| Adult Lymph Node (Clontech) | 7,462-7,600 |
| Adult Liver (GIBCO) | 7,601-8,832 |
| Adult Ovary (Invitrogen) | 8,833-16,193 |
| Adult Spleen (GIBCO) | 16,194-16,826 |
| Testis (GIBCO) | 16,827-17,921 |
| Bone Marrow (Clontech) | 17,922-19,079 |
| Endothelial Cell* (Strategene) | 19,080-25,845 |
| Fetal Brain (Invitrogen) | 25,846-29,678 |
| Fetal Kidney (Clontech) | 29,679-29,996 |
| Fetal Liver/Spleen | 29,997-30,320 |
| Fetal Liver (Invitrogen) | 30,321-32,898 |
| Fetal Brain (GIBCO) | 32,899-33,149 |
| Infant Brain | 33,150-35,079 |
| Lung Tumor (Invitrogen) | 35,080-35,618 |
| Leukocyte (GIBCO) | 35,619-37,389 |
| Leukocyte** (Clontech) | 37,390-37,807 |
| Mammary Gland (Invitrogen) | 37,808-38,043 |

*Library is from a cell line derived from umbilical cord vein
**Library is a pool of 6 hour and 24 hour PHA stimulated leukocytes

[0013] The present invention further includes isolated polypeptides, proteins and nucleic acid molecules which are substantially equivalent to those herein described. As used herein, substantially equivalent can refer both to nucleic acid and amino acid sequences, for example a mutant sequence, that varies from a reference sequence by one or more substitutions, deletions, or additions, the net effect of which does not result in an adverse functional dissimilarity between reference and subject sequences. Typically, such a mutant sequence varies from one of those listed herein by no more than about 20% (i.e., the number of amino acid substitutions, additions, and/or deletions in a mutant sequence, as compared to the corresponding listed sequence, divided by the total number of amino acids in the mutant sequence is about 0.2 or less). In one embodiment, a mutant sequence of the invention varies from a listed sequence by no more than 10%, and in a variation of this embodiment, by no more than 5%. For purposes of the present invention, sequences having equivalent biological activity, and equivalent expression characteristics are considered substantially equivalent. For purposes of determining equivalence, truncation of the mature sequence should be disregarded.

[0014] As described here, the proteins of the present invention, as well as homologs thereof, can be used in a variety of procedures and methods known in the art which are currently applied to other proteins. The proteins of the present invention can further be used to generate an antibody which selectively binds the protein. Such antibodies can be either monoclonal or polyclonal antibodies, as well fragments of these antibodies, and humanized forms.

[0015] The invention further provides antibodies which selectively bind to one of the proteins of the present invention and hybridomas which produce these antibodies. A hybridoma is an immortalized cell line which is capable of secreting a specific monoclonal antibody.

[0016] The nucleotide sequences may be joined to a variety of other nucleotide sequences by means of well established recombinant DNA techniques (cf Sambrook J et al. (1989) Molecular Cloning: A Laboratory Manual, Cold Spring Harbor Laboratory, N.Y.). Useful nucleotide sequences for joining to polypeptides include an assortment of cloning vectors, e.g., plasmids, cosmids, lambda phage derivatives, phagemids, and the like, that are well known in the art. Vectors of interest include expression vectors, replication vectors, probe generation vectors, and sequencing vectors. In general, vectors of interest will contain an origin of replication functional in at least one organism, convenient restriction endonuclease sensitive sites, and selectable markers for the host cell.

### 5. DETAILED DESCRIPTION

[0017] 5.1 Definitions

[0018] The term “nucleotide sequence” refers to a heteropolymer of deoxyribonucleotides. Generally, nucleic acid segments provided by this invention may be assembled from fragments of the genome and short oligonucleotide linkers, or from a series of oligonucleotides, to provide a synthetic nucleic acid which is capable of being expressed in a recombinant transcriptional unit comprising regulatory elements derived from a microbial or viral operon.

[0019] An “oligonucleotide fragment” or a “polynucleotide fragment”, “portion,” or “segment” is a stretch of polypeptide nucleotide residues which is long enough to use in polymerase chain reaction (PCR) or various hybridization procedures to identify or amplify identical or related parts of mRNA or DNA molecules.

[0020] “Oligonucleotides” or “nucleic acid probes” are prepared based on the cDNA sequence provided in the present invention. Oligonucleotides comprise portions of the DNA sequence having at least about 15 nucleotides and usually at least about 20 nucleotides. Nucleic acid probes comprise portions of the sequence having fewer nucleotides than about 6 kb, usually fewer than about 1 kb. After appropriate testing to eliminate false positives, these probes may be used to determine whether mRNAs are present in a cell or tissue or to isolate similar nucleic acid sequences from chromosomal DNA as described by Walsh PS et al (1992 PCR Methods Appl 1:241-250).

[0021] The term “probes” includes naturally occurring or recombinant single- or double-stranded nucleic acids or chemically synthesized nucleic acids. They may be labeled by nick translation, Klenow fill-in reaction, PCR or other methods well known in the art. Probes of the present invention, their preparation and/or labeling are elaborated in Sambrook J et al (1989) Molecular Cloning: A Laboratory Manual, Cold Spring Harbor Laboratory, N.Y.; or Ausubel F M et al (1989) Current Protocols in Molecular Biology, John Wiley & Sons, New York N.Y., both incorporated herein by reference.

[0022] The term “stringent” is used to refer to conditions that are commonly understood in the art as stringent. An exemplary set of conditions include a temperature of 60-70° C., (preferably about 65° C.) and a salt concentration of 0.70 M to 0.80 M (preferably about 0.75M). Further exemplary conditions include, hybridizing conditions that (1) employ low ionic strength and high temperature for washing, for example, 0.015 M NaCl/0.0015 M sodium citrate/0.1%SDS at 50 (C.; (2) employ during hybridizationa denaturing agent such as formamide, for example, 50% (vol/vol) formamide with 0.1% bovine serum albumin/0.1% Ficoll/0.1% polyvinylpyrrolidone/50 mM sodium phosphate buffer at pH 6.5 with 750 mM NaCl, 75 mM sodium citrate at 42 (C; or (3) employ 50% formamide, 5×SSC (0.75 M NaCl, 0.075 M Sodium pyrophosphate, 5× Denhardt's solution, sonicated salmon sperm DNA (50 g/ml), 0.1% SDS, and 10% dextran sulfate at 42 (C, with washes at 42(C in 0.2×SSC and 0.1% SDS.

[0023] The term “recombinant,” as used herein, means that a polypeptide or protein is derived from recombinant (e.g., microbial or mammalian) expression systems. “Microbial” refers to recombinant polypeptides or proteins made in bacterial or fungal (e.g., yeast) expression systems. As a product, “recombinant microbial” defines a polypeptide or protein essentially free of native endogenous substances and unaccompanied by associated native glycosylation. Polypeptides or proteins expressed in most bacterial cultures, e.g., E. coli, will be free of glycosylation modifications; polypeptides or proteins expressed in yeast will have a glycosylation pattern different from that expressed in mammalian cells.

[0024] The term “recombinant expression vehicle or vector” refers to a plasmid or phage or virus or vector, for expressing a polypeptide from a DNA (RNA) sequence. The expression vehicle can comprise a transcriptional unit comprising an assembly of (1) a genetic element or elements having a regulatory role in gene expression, for example, promoters or enhancers, (2) a structural or coding sequence which is transcribed into mRNA and translated into protein, and (3) appropriate transcription initiation and termination sequences. Structural units intended for use in yeast or eukaryotic expression systems preferably include a leader sequence enabling extracellular secretion of translated protein by a host cell. Alternatively, where recombinant protein is expressed without a leader or transport sequence, it may include an N-terminal methionine residue. This residue may or may not be subsequently cleaved from the expressed recombinant protein to provide a final product.

[0025] “Recombinant expression system” means host cells which have stably integrated a recombinant transcriptional unit into chromosomal DNA or carry the recombinant transcriptional unit extrachromosomally. The cells can be prokaryotic or eukaryotic. Recombinant expression systems as defined herein will express heterologous polypeptides or proteins upon induction of the regulatory elements linked to the DNA segment or synthetic gene to be expressed.

[0026] The term “open reading frame,” ORF, means a series of triplets coding for amino acids without any termination codons and is a sequence translatable into protein.

[0027] The term “expression modulating fragment,” EMF, means a series of nucleotide molecules which modulates the expression of an operably linked ORF or ENF.

[0028] As used herein, a sequence is said to “modulate the expression of an operably linked sequence” when the expression of the sequence is altered by the presence of the EMF. EMFs include, but are not limited to, promoters, and promoter modulating sequences (inducible elements). One class of EMFs are fragments which induce the expression or an operably linked ORF in response to a specific regulatory factor or physiological event.

[0029] As used herein, an “uptake modulating fragment,” UMF, means a series of nucleotide molecules which mediate the uptake of a linked DNA fragment into a cell. UMFs can be readily identified using known UMFs as a target sequence or target motif with the computer-based systems described above.

[0030] The presence and activity of a UMF can be confirmed by attaching the suspected UMF to a marker sequence. The resulting nucleic acid molecule is then incubated with an appropriate host under appropriate conditions and the uptake of the marker sequence is determined. As described above, a UMF will increase the frequency of uptake of a linked marker sequence.

[0031] “Active” refers to those forms of the polypeptide which retain the biologic and/or immunologic activities of any naturally occurring polypeptide.

[0032] “Naturally occurring polypeptide” refers to polypeptides produced by cells that have not been genetically engineered and specifically contemplates various polypeptides arising from post-translational modifications of the polypeptide including, but not limited to, acetylation, carboxylation, glycosylation, phosphorylation, lipidation and acylation.

[0033] “Derivative” refers to polypeptides chemically modified by such techniques as ubiquitination, labeling (e.g., with radionuclides or various enzymes), pegylation (derivatization with polyethylene glycol) and insertion or substitution by chemical synthesis of amino acids such as omithine, which do not normally occur in human proteins.

[0034] “Recombinant variant” refers to any polypeptide differing from naturally occurring polypeptides by amino acid insertions, deletions, and substitutions, created using recombinant DNA techniques. Guidance in determining which amino acid residues may be replaced, added or deleted without abolishing activities of interest, such as cellular trafficking, may be found by comparing the sequence of the particular polypeptide with that of homologous peptides and minimizing the number of amino acid sequence changes made in regions of high homology.

[0035] Preferably, amino acid “substitutions” are the result of replacing one amino acid with another amino acid having similar structural and/or chemical properties, such as the replacement of a leucine with an isoleucine or valine, an aspartate with a glutamate, or a threonine with a serine, i.e., conservative amino acid replacements. “Insertions” or “deletions” are typically in the range of about 1 to 5 amino acids. The variation allowed may be experimentally determined by systematically making insertions, deletions, or substitutions of amino acids in a polypeptide molecule using recombinant DNA techniques and assaying the resulting recombinant variants for activity.

[0036] Where desired. an expression vector may be designed to contain a “signal or leader sequence” which will direct the polypeptide through the membrane of a cell. Such a sequence may be naturally present on the polypeptides of the present invention or provided from heterologous protein sources by recombinant DNA techniques.

[0037] A polypeptide “fragment,” “portion,” or “segment” is a stretch of amino acid residues of at least about 5 amino acids, often at least about 7 amino acids, typically at least about 9 to 13 amino acids, and, in various embodiments, at least about 17 or more amino acids. To be active, any polypeptide must have sufficient length to display biologic and/or immunologic activity.

[0038] Alternatively, recombinant variants encoding these same or similar polypeptides may be synthesized or selected by making use of the “redundancy” in the genetic code. Various codon substitutions, such as the silent changes which produce various restriction sites, may be introduced to optimize cloning into a plasmid or viral vector or expression in a particular prokaryotic or eukaryotic system. Mutations in the polypeptide sequence may be reflected in the polypeptide or domains of other peptides added to the polypeptide to modify the properties of any part of the polypeptide, to change characteristics such as ligand-binding affinities, interchain affinities, or degradation/turnoverrate.

[0039] “Activated” cells as used in this application are those which are engaged in extracellular or intracellular membrane trafficking, including the export of neurosecretory or enzymatic molecules as part of a normal or disease process.

[0040] The term “purified” as used herein denotes that the indicated nucleic acid or polypeptide is present in the substantial absence of other biological macromolecules, e.g., polynucleotides, proteins, and the like. In one embodiment, the nucleic acid or polypeptide is purified such that it constitutes at least 95% by weight, more preferably at least 99.8% by weight, of the biological macromolecules present (but water, buffers, and other small molecules, especially molecules having a molecular weight of less than 1000 daltons, can be present).

[0041] The term “isolated” as used herein refers to a nucleic acid or polypeptide separated from at least one other component (e.g., nucleic acid or polypeptide) present with the nucleic acid or polypeptide in its natural source. In one embodiment, the nucleic acid or polypeptide is found in the presence of (if anything) only a solvent, buffer, ion, or other component normally present in a solution of the same. The terms “isolated” and “purified” do not encompass nucleic acids or polypeptides present in their natural source.

[0042] The term “infection” refers to the introduction of nucleic acids into a suitable host cell by use of a virus or viral vector.

[0043] The term “transformation” means introducing DNA into a suitable host cell so that the DNA is replicable, either as an extrachromosomal element, or by chromosomal integration.

[0044] The term “transfection” refers to the taking up of an expression vector by a suitable host cell, whether or not any coding sequences are in fact expressed.

[0045] The term “intermediate fragment” means a nucleic acid between 5 and 1000 bases in length, and preferably between 10 and 40 bp in length.

[0046] Each of the above terms is meant to encompasses all that is described for each, unless the context dictates otherwise.

[0047] 5.2 Sequencing by Hybridization

[0048] SBH is a well developed technology that may be practiced by a number of methods known to those skilled in the art. Specifically, techniques related to sequencing by hybridization of the following documents is incorporated by reference herein: Drmanac et al., U.S. Pat. No. 5,202,231 (hereby incorporated by reference herein)—Issued Apr. 13, 1993; Drmanac et al., U.S. Pat. No. 5,525,464 (hereby incorporated by reference herein)—Issued Jun. 11, 1996; Drmanac, PCT Patent Appln. No. WO 95/09248 (hereby incorporated by reference); Drmanac et al., Genomics, 4, 114-128 (1989); Drmanac et al., Proceedings of the First Int'l. Conf. Electrophoresis Supercomputing Human Genome Cantor et al. eds, World Scientific Pub. Co., Singapore, 47-59 (1991); Drmanac et al., Science, 260, 1649-1652(1993); Lehrachet al., Genome Analysis: Genetic and Physical Mapping, 1, 39-81 (1990), Cold Spring Harbor Laboratory Press; Drmanac et al., Nucl. Acids Res., 4691 (1986); Stevanovic et al., Gene, 79,139 (1989); Panusku et al., Mol. Biol. Evol., 1, 607 (1990); Nizetic et al., Nucl. Acids Res., 19, 182 (1991); Dnnanac et al., J. Biomol. Struct. Dyn., 5, 1085 (1991); Hoheisel et al., Mol. Gen., 4, 125-132 (1991); Strezoska et al., Proc. Nat'l. Acad. Sci. (USA), 88, 10089 (1991); Drmanac et al., Nucl. Acids Res., 19, 5839 (1991); and Drmanac et al., Int. J. Genome Res., 1, 59-79 (1992).

[0049] Format 1 SBH is appropriate for the simultaneous analysis of a large set of samples. Parallel scoring of thousands of samples on large arrays may be performed are in thousands of independent hybridization reactions using small pieces of membranes. The identification of DNA may involve 1-20 probes per reaction and the identification of mutations may in some cases involve more than 1000 probes specifically selected or designed for each sample. For identification of the nature of the mutated DNA segments, specific probes may be synthesized or selected for each mutation detected in the first round of hybridizations.

[0050] DNA samples may be prepared in small arrays which may be separated by appropriate spacers, and which may be simultaneously tested with probes selected from a set of oligonucleotides which may be arrayed in multiwell plates. Small arrays may consist of one or more samples. DNA samples in each small array may include mutants or individual samples of a sequence. Consecutive small arrays may be organized into larger arrays. Such larger arrays may include replication of the same small array or may include arrays of samples of different DNA fragments. A universal set of probes includes sufficient probes to analyze a DNA fragment with prespecified precision, e.g. with respect to the redundancy of reading each base pair (“bp”). These sets may include more probes than are necessary for one specific fragment, but may include fewer probes than are necessary for testing thousands of DNA samples of different sequence.

[0051] DNA or allele identification and a diagnostic sequencing process may include the steps of:

[0052] 1) Selection of a subset of probes from a dedicated, representative or universal set to be hybridized with each of a plurality small arrays;

[0053] 2) Adding a first probe to each subarray on each of the arrays to be analyzed in parallel;

[0054] 3) Performing hybridization and scoring of the hybridization results;

[0055] 4) Stripping off previously used probes;

[0056] 5) Repeating hybridization, scoring and stripping steps for the remaining probes which are to be scored;

[0057] 5) Processing the obtained results to obtain a final analysis or to determine additional probes to be hybridized;

[0058] 6) Performing additional hybridizations for certain subarrays; and

[0059] 7) Processing complete sets of data and computing obtaining a final analysis.

[0060] This approach provides fast identification and sequencing of a small number of nucleic acid samples of one type (e.g. DNA, RNA), and also provides parallel analysis of many sample types in the form of subarrays by using a presynthesized set of probes of manageable size. Two approaches have been combined to produce an efficient and versatile process for the determination of DNA identity, for DNA diagnostics, and for identification of mutations.

[0061] For the identification of known sequences, a small set of shorter probes may be used in place of a longer unique probe. In this approach, although there may be more probes to be scored, a universal set of probes may be synthesized to cover any type of sequence. For example, a full set of 6-mers includes only 4,096 probes, and a complete set of 7-mers includes only 16,384 probes.

[0062] Full sequencing of a DNA fragment may be performed with two levels of hybridization. One level is hybridization of a sufficient set of probes that cover every base at least once. For this purpose, a specific set of probes may be synthesized for a standard sample. The results of hybridization with such a set of probes reveal whether and where mutations (differences) occur in non-standard samples. To determine the identity of the changes, additional specific probes may be hybridized to the sample.

[0063] In another embodiment, all probes from a universal set may be scored. A universal set of probes allows scoring of a relatively small number of probes per sample in a two step process without an undesirable expenditure of time. The hybridization process may involve successive probings, in a first step of computing an optimal subset of probes to be hybridized first and, then, on the basis of the obtained results, a second step of determining additional probes to be scored from among those in a universal set.

[0064] In SBH sequence assembly, K−1 oligonucleotides which occur repeatedly in analyzed DNA fragments due to chance or biological reasons may be subject to special consideration. If there is no additional information, relatively small fragments of DNA may be fully assembled in as much as every base pair is read several times.

[0065] 5.2.1 Solving Branch Points for Sequence Assembly

[0066] In the assembly of relatively longer fragments, ambiguities may arise due to the repeated occurrence in a set of positively-scored probes of a K−1 sequence (i.e., a sequence shorter than the length of the probe). This problem does not exist if mutated or similar sequences have to be determined (i.e., the K−1 sequence is not identically repeated). Knowledge of one sequence may be used as a template to correctly assemble a sequence known to be similar (e.g. by its presence in a database) by arraying the positive probes for the unknown sequence to display the best fit on the template.

[0067] Within DNA, the location of certain probes may be interchangeable when determined by overlapping the sequence data, resulting in an ambiguity as to the position of the partial sequence. Although the sequence information is determined by SBH, either: (i) long read length, single-pass gel sequencing at a fraction of the cost of complete gel sequencing; or (ii) comparison to related sequences, may be used to order hybridization data where such ambiguities (“branch points”) occur. In addition, segments in junk DNA (which is not found in genes) may be repeated many times in tandem. Although the sequence of the segments is determined by SBH, single-pass gel sequencing may be used to determine the number of tandem repeats where tandemly-repeated segments occur. As tandem repeats occur rarely in protein-encoding portions of a gene, the gel-sequencing step will be performed only when a commercial value for the sequence is determined.

[0068] 5.2.2 Sequencing of Mutants

[0069] The use of an array of sample arrays avoids consecutive scoring of many oligonucleotides on a single sample or on a small set of samples. This approach allows the scoring of more probes in parallel by manipulation of only one physical object. Subarrays of DNA samples 1000 bp in length may be sequenced in a relatively short period of time. If the samples are spotted at 50 subarrays in an array and the array is reprobed 10 times, 500 probes may be scored. In screening for the occurrence of a mutation, approximately 335 probes may be used to cover each base three times. If a mutation is present, several covering probes will be affected. The use of information about the identity of negative probes may map the mutation with a two base precision. To solve a single base mutation mapped with this precision, an additional 15 probes may be employed. These probes cover any base combination for two questionable positions (assuming that deletions and insertions are not involved). These probes may be scored in one cycle on 50 subarrays which contain a given sample. In the implementation of a multiple label color scheme (i.e., multiplexing), two to six probes, each having a different label such as a different fluorescent dye, may be used as a pool, thereby reducing the number of hybridization cycles and shortening the sequencing process.

[0070] In more complicated cases, there may be two close mutations or insertions. They may be handled with more probes. For example, a three base insertion may be solved with 64 probes. The most complicated cases may be approached by several steps of hybridization, and the selecting of a new set of probes on the basis of results of previous hybridizations.

[0071] If subarrays to be analyzed include tens or hundreds of samples of one type, then several of them may be found to contain one or more changes (mutations, insertions, or deletions). For each segment where mutation occurs, a specific set of probes may be scored. The total number of probes to be scored for a type of sample may be several hundreds. The scoring of replica arrays in parallel facilitates scoring of hundreds of probes in a relatively small number of cycles. In addition, compatible probes may be pooled. Positive hybridizations may be assigned to the probes selected to check particular DNA segments O because these segments usually differ in 75% of their constituent bases.

[0072] By using a larger set of longer probes, longer targets may be conveniently analyzed. These targets may represent pools of shorter fragments such as pools of exon clones.

[0073] 5.23 Identification of Heterozygotes Using SBH

[0074] A specific hybridization scoring method may be employed to define the presence of heterozygotes (sequence variants) in a genomic segment to be sequenced from a diploid chromosomal set. Two variations are where: i) the sequence from one chromosome represents a basic type and the sequence from the other represents a new variant; or, ii) both chromosomes contain new, but different variants. In the first case, the scanning step designed to map changes gives a maximal signal difference of two-fold at the heterozygotic position. In the second case, there is no masking, but a more complicated selection of the probes for the subsequent rounds of hybridizations may be indicated.

[0075] Scoring two-fold signal differences required in the first case may be achieved efficiently by comparing corresponding signals with controls containing only the basic sequence type and with the signals from other analyzed samples. This approach allows determination of a relative reduction in the hybridization signal for each particular probe in a given sample. This is significant because hybridization efficiency may vary more than two-fold for a particular probe hybridized with different DNA fragments having the same full match target. In addition, heterozygotic sites may affect more than one probe depending upon the number of oligonucleotide probes. Decrease of the signal for two to four consecutive probes produces a more significant indication of heterozygotic sites. Results may be checked by testing with small sets of selected probes among which one or few probes selected to give a full match signal which is on average eight-fold stronger than the signals coming from mismatch-containing duplexes.

[0076] Partitioned membranes allow a very flexible organization of experiments to accommodate relatively larger numbers of samples representing a given sequence type, or many different types of samples represented with relatively small numbers of samples. A range of 4-256 samples can be handled with particular efficiency. Subarrays within this range of numbers of dots may be designed to match the configuration and size of standard multiwell plates used for storing and labelling oligonucleotides. The size of the subarrays may be adjusted for different number of samples, or a few standard subarray sizes may be used. If all samples of a type do not fit in one subarray, additional subarrays or membranes may be used and processed with the same probes. In addition, by adjusting the number of replicas for each subarray, the time for completion of identification or sequencing process may be varied.

[0077] 5.2.4 Signature Analysis with SBH

[0078] Obtaining information about the degree of hybridization exhibited for a set of only about 200 oligonucleotides probes (about 5% of the effort required for complete sequencing) defines a unique signature of each gene and may be used for sorting the cDNAs from a library to determine if the library contains multiple copies of the same gene. By such signatures, identical, similar and different cDNAs can be distinguished and inventoried.

[0079] 5.3 Format III Sequencing by Hybridization

[0080] In Format 3, a first set of oligonucleotide probes of known sequence is immobilized on a solid support under conditions which permit them to hybridize with nucleic acids having respectively complementary sequences. A labeled, second set of oligonucleotide probes is provided in solution. Both within the sets and between the sets the probes may be of the same length or of different lengths. A nucleic acid to be sequenced or intermediate fragments thereof may be applied to the first set of probes in double-stranded form (especially where a recA protein is present to permit hybridization under non-denaturing conditions), or in single-stranded form and under conditions which permit hybrids of different degrees of complementarity (for example, under conditions which discriminate between full match and one base pair mismatch hybrids). The nucleic acid to be sequenced or intermediate fragments thereof may be applied to the first set of probes before, after or simultaneously with the second set of probes. A ligase or other means of causing chemical bond formation between adjacent, but not between nonadjacent, probes may be applied before, after or simultaneously with the second set of probes. After permitting adjacent probes to be chemically bonded, fragments and probes which are not immobilized to the surface by chemical bonding to a member of the first set of probe are washed away, for example, using a high temperature (up to 100 degrees C.) wash solution which melts hybrids. The bound probes from the second set may then be detected using means appropriate to the label employed (which may be chemiluminescent, fluorescent, radioactive, enzymatic or densitometric, for example).

[0081] Herein, nucleotide bases “match” or are “complementary” if they form a stable duplex by hydrogen bonding under specified conditions. For example. under conditions commonly employed in hybridization assays, adenine (“A”) matches thymine (“T”), but not guanine (“G”) or cytosine (“C”). Similarly, G matches C, but not A or T. Other bases which will hydrogen bond in less specific fashion, such as inosine or the Universal Base (“M” base, Nichols et al 1994), or other modified bases, such as methylated bases, for example, are complementary to those bases for which they form a stable duplex under specified conditions. A probe is said to be “perfectly complementary” or is said to be a “perfectly match” if each base in the probe forms a duplex by hydrogen bonding to a base in the nucleic acid to be sequenced. Each base in a probe that does not form a stable duplex is said to be a “mismatch” under the specified hybridization conditions.

[0082] A list of probes may be assembled wherein each probe is a perfect match to the nucleic acid to be sequenced. The probes on this list may then be analyzed to order them in maximal overlap fashion. Such ordering may be accomplished by comparing a first probe to each of the other probes on the list to determine which probe has a 3′ end which has the longest sequence of bases identical to the sequence of bases at the 5′ end of a second probe. The first and second probes may then be overlapped, and the process may be repeated by comparing the 5′ end of the second probe to the 3′ end of all of the remaining probes and by comparing the 3′ end of the first probe with the 5′ end of all of the remaining probes. The process may be continued until there are no probes on the list which have not been overlapped with other probes. Alternatively, more than one probe may be selected from the list of positive probes, and more than one set of overlapped probes (“sequence nucleus”) may be generated in parallel. The list of probes for either such process of sequence assembly may be the list of all probes which are perfectly complementary to the nucleic acid to be sequenced or may be any subset thereof.

[0083] The 5′ and 3′ ends of sequence nuclei may be overlapped to generate longer stretches of sequence. Where ambiguities arise in sequence assembly due to the availability of alternative proper overlaps with probes or sequence nuclei, hybridization with longer probes spanning the site of overlap alternatives, competitive hybridization, ligation of alternative end to end pairs of probes spanning the site of ambiguity or single pass gel analysis (to provide an unambiguous framework for sequence assembly) may be used.

[0084] By employing the above procedures, one may obtain any desired level of sequence, from a pattern of hybridization (which may be correlated with the identity of a nucleic acid sample to serve as a signature for identifying the nucleic acid sample) to overlapping or non-overlapping probes up through assembled sequence nuclei and on to complete sequence for an intermediate fragment or an entire source DNA molecule (e.g. a chromosome).

[0085] Sequencing may generally comprise the following steps:

[0086] (a) contacting an array of immobilized oligonucleotide probes with a nucleic acid fragment under conditions effective to allow a fragment with a sequence complementary to that of an immobilized probe to form a primary complex with the immobilized probe such that the fragment has a hybridized and a non-hybridized portion;

[0087] (b) contacting a primary complex with a set of labeled oligonucleotide probes in solution under conditions effective to allow a primary complex including an unhybridized sequence complementary to that of a labeled probe to hybridize to the labeled probe, thereby forming a secondary complex wherein the fragment is hybridized with both an immobilized probe and a labeled probe;

[0088] (c) removing from a secondary complex any labeled probe that has not hybridized adjacent to an immobilized probe;

[0089] (d) detecting the presence of adjacent labeled and unlabeled probes by detecting the presence of the label; and

[0090] (e) determining a nucleotide sequence of the fragment by connecting the known sequence of the immobilized and labeled probes.

[0091] In this embodiment of SBH, ligation may be implemented by a chemical ligating agent (e.g. water-soluble carbodiimide or cyanogen bromide). A ligase enzyme, such as the commercially available T₄ DNA ligase from T₄ bacteriophage, may be employed. The washing conditions which are selected to distinguish between adjacent versus nonadjacent labeled and immobilized probes are selected to make use of the difference in stability of continuously stacked or ligated adjacent probes.

[0092] 5.4 Hybridization Conditions

[0093] Hybridization and washing conditions may be selected to detect substantially perfect match hybrids (such as those wherein the fragment and probe hybridize at six out of seven positions), or may be selected to permit detection only of perfect match hybrids by the use of more stringent hybridization conditions.

[0094] Suitable hybridization conditions may be routinely determined by optimization procedures or pilot studies. Such procedures and studies are routinely conducted by those skilled in the art to establish protocols for use in a laboratory. See e.g., Ausubel et al., Current Protocols in Molecular Biology, Vol. 1-2, John Wiley & Sons (1989); Sambrook et al., Molecular Cloning A Laboratory Manual, 2nd Ed., Vols. 1-3, Cold Springs Harbor Press (1989); and Maniatis et al., Molecular Cloning: A Laboratory Manual, Cold Spring Harbor Laboratory Cold Spring Harbor, N.Y. (1982), all of which are incorporated by reference herein. For example, conditions such as temperature, concentration of components, hybridization and washing times, buffer components, and their pH and ionic strength may be varied.

[0095] In embodiments wherein the labeled and immobilized probes are not physically or chemically linked, detection may rely solely on washing steps of controlled stringency. Under such conditions, adjacent probes remain hybridized due to a stability afforded by stacking interactions. Conditions may be varied to optimize the process as described above.

[0096] 5.5 Probes and Labeling of Probes

[0097] Oligonucleotide probes may be labeled with fluorescent dyes, chemiluminescent systems, radioactive labels (e.g., ³⁵S, ³H, ³²P or ³³P) or with isotopes detectable by mass spectrometry, by any of a variety of methods that are well known in the art.

[0098] Other variations include the use of modified oligonucleotides to increase specificity or efficiency, cycling hybridizations to increase the hybridization signal, for example by performing a hybridization cycle under conditions (e.g. temperature) optimally selected for a first set of labeled probes followed by hybridization under conditions optimally selected for a second set of labeled probes. Shifts in reading frame may be determined by using mixtures (preferably mixtures of equimolar amounts) of probes ending in each of the four nucleotide bases A, T, C and G.

[0099] 5.6 Preparation of Sample Nucleic Acid

[0100] Where a nucleic acid molecule of unknown sequence is longer than about 45 or 50 bp, the molecule may be fragmented and the sequences of the fragments determined. Fragmentation may be accomplished by restriction enzyme digestion, shearing or NaOH. Fragments may be separated by size (e.g. by gel electrophoresis) to obtain a preferred fragment length of about ten to forty bps.

[0101] Oligonucleotides may be immobilized, by a number of methods known to those skilled in the art, such as laser-activated photodeprotection attachment through a phosphate group using reagents such as a nucleoside phosphoramidite or a nucleoside hydrogen phosphorate. Glass, nylon, silicon and fluorocarbon supports may be used.

[0102] Oligonucleotides may be organized into an array or arrays including all or a subset of all probes of a given length, or of sets of probes of selected lengths. Hydrophobic partitions may be used to separate probes or arrays of probes. Arrays may be designed for various applications (e.g. mapping, partial sequencing, sequencing of targeted regions for diagnostic purposes, mRNA sequencing and large scale sequencing). A specific chip may be designed to be dedicated to a particular application by selecting a combination and arrangement of probes on a substrate.

[0103] For example, 1000 immobilized probe arrays of all oligonucleotide probes 5 bases in length (each array containing 1000 distinct probes) may be constructed. A second set of 1000 oligonucleotide probes may be labeled, and one of each labeled probe may be applied to an array of immobilized probes along with a fragment to be sequenced. In this example, 1000 of the arrays would be combined in a large superarray, or “superchip.” In those instances where an immobilized probe and one of the labeled probes hybridize end -to-end along a nucleic acid fragment., the two probes are joined, for example by ligation, and, after washing to remove unbound label, 10-mers complementary to the sample fragment are detected by the correlation of the presence of a label at a point in an array having an immobilized probe of known sequence to which was applied a labeled probe of known sequence. The sequence of the sample fragment is simply the sequence of the immobilized probe continued in the sequence of the labeled probe. In this way, all one million possible 10-mers may be tested by a combinatorial process which employs only 5-mers and which thus involves one thousandth of the amount of effort for oligonucleotide synthesis and quality control.

[0104] A nucleic acid sample to be sequenced may be fragmented or otherwise treated (for example, by the use of recA) to avoid hindrance to hybridization from secondary structure in the sample. The sample may be fragmented by, for example, digestion with a restriction enzyme such as the Cvi JI, physical shearing (e.g. by ultrasound), or by NaOH treatment. The resulting fragments may be separated by gel electrophoresis and fragments of an appropriate length, such as between about 10 bp and about 40 bp, may be extracted from the gel.

[0105] For-example, a reusable Format 3 SBH array may be produced by introducing a specifically cleavable bond between the probes and then by cleaving the bond after detection. The labeled probes may be ribonucleotides or a ribonucleotide may be used as the joining base in the labeled probe so that this probe may subsequently be removed by RNAse or uracil-DNA glycosylate treatment. In addition, bonds produced by chemical ligation may be selectively cut.

[0106] 5.7 Nucleic Acids of the Invention

[0107] The nucleic acids of the invention, which were obtained from cDNA libraries of adult brain, adult heart, adult lung, adult lymph node, adult liver, adult ovary, adult spleen, testis, bone marrow, endothelial cell, fetal kidney, fetal liver/spleen, fetal liver, fetal brain, infant brain, lung tumor, leukocyte, and mammary gland using standard pcr, sequencing by hybridization signature analysis, and single pass gel sequencing technology. These sequences are designated as SEQ ID NO 1-38,043 and provided in the Sequence Listing. Table 1 shows which nucleic acids (identified by SEQ ID NO) where obtained from each cDNA library.

[0108] The sequences falling within the scope of the present invention are not limited to these specific sequences, but also include allelic and species variations thereof. Allelic and species variations can be routinely determined by comparing the sequence provided in SEQ ID NO: 1-38,043, a representative fragment thereof, or a nucleotide sequence at least 99.9% identical to SEQ ID NO: 1-38,043 with a sequence from another isolate of the same species. Furthermore, to accommodate codon variability, the invention includes nucleic acid molecules coding for the same amino acid sequences as do the specific ORFs disclosed herein. In other words, in the coding region of an ORF, substitution of one codon for another which encodes the same amino acid is expressly contemplated.

[0109] Any specific sequence disclosed herein can be readily screened for errors by resequencing a particular fragment, such as an ORF, in both directions (i.e., sequence both strands).

[0110] The present invention further provides recombinant constructs comprising a nucleic acid having the sequence of any one of SEQ ID NO: 1-38,043 or a fragment thereof. The recombinant constructs of the present invention comprise a vector, such as a plasmid or viral vector, into which a nucleic acid having the sequence of any one of SEQ ID NO: 1-38,043 or a fragment thereof is inserted, in a forward or reverse orientation. In the case of a vector comprising one of the ORFs of the present invention, the vector may further comprise regulatory sequences, including for example, a promoter, operably linked to the ORF. For vectors comprising the EMFs and UMFs of the present invention, the vector may further comprise a marker sequence or heterologous ORF operably linked to the EMF or UMF. Large numbers of suitable vectors and promoters are known to those of skill in the art and are commercially available for generating the recombinant constructs of the present invention. The following vectors are provided by way of example. Bacterial: pBs, phagescript, PsiX174, pBluescript SK, pBs KS, pNH8a, pNH16a, pNH18a, pNH46a (Stratagene); pTrc99A, pKK223-3, pKK233-3, pDR540, pRIT5 (Pharmacia). Eukaryotic: pWLneo, pSV2cat, pOG44, PXTI, pSG (Stratagene) pSVK3, pBPV, pMSG, pSVL (Pharmacia).

[0111] Promoter regions can be selected from any desired gene using CAT (chloramphenicol transferase) vectors or other vectors with selectable markers. Two appropriate vectors are pKK232-8 and pCM7. Particular named bacterial promoters include lacI, lacZ, T3, T7, gpt, lambda P_{R}, and trc. Eukaryotic promoters include CMV immediate early, HSV thymidine kinase, early and late SV40, LTRs from retrovirus, and mouse metallothionein-I. Selection of the appropriate vector and promoter is well within the level of ordinary skill in the art.

[0112] Generally, recombinant expression vectors will include origins of replication and selectable markers permitting transformation of the host cell, e.g., the ampicillin resistance gene of E. coli and S. cerevisiae TRP1 gene, and a promoter derived from a highly-expressed gene to direct transcription of a downstream structural sequence. Such promoters can be derived from operons encoding glycolytic enzymes such as 3-phosphoglycerate kinase (PGK), a-factor, acid phosphatase, or heat shock proteins, among others. The heterologous structural sequence is assembled in appropriate phase with translation initiation and termination sequences, and preferably, a leader sequence capable of directing secretion of translated protein into the periplasmic space or extracellular medium. Optionally, the heterologous sequence can encode a fusion protein including an N-terminal identification peptide imparting desired characteristics, e.g., stabilization or simplified purification of expressed recombinant product.

[0113] Useful expression vectors for bacterial use are constructed by inserting a structural DNA sequence encoding a desired protein together with suitable translation initiation and termination signals in operable reading phase with a functional promoter. The vector will comprise one or more phenotypic selectable markers and an origin of replication to ensure maintenance of the vector and to, if desirable, provide amplification within the host. Suitable prokaryotic hosts for transformation include E. coli, Bacillus subtilis, Salmonella typhimurium and various species within the genera Pseudomonas, Streptomyces, and Staphylococcus, although others may also be employed as a matter of choice.

[0114] As a representative but nonlimiting example, useful expression vectors for bacterial use can comprise a selectable marker and bacterial origin of replication derived from commercially available plasmids comprising genetic elements of the well known cloning vector pBR322 (ATCC 37017). Such commercial vectors include, for example, pKK223-3 (Pharmacia Fine Chemicals, Uppsala, Sweden) and GEM 1 (Promega Biotec, Madison, Wis., USA). These pBR322 “backbone” sections are combined with an appropriate promoter and the structural sequence to be expressed.

[0115] Following transformation of a suitable host strain and growth of the host strain to an appropriate cell density, the selected promoter is derepressed by appropriate means (e.g., temperature shift or chemical induction) and cells are cultured for an additional period. Cells are typically harvested by centrifugation, disrupted by physical or chemical means, and the resulting crude extract retained for further purification.

[0116] Included within the scope of the nucleic acid sequences of the invention are nucleic acid sequences that hybridize under stringent conditions to a fragment of the DNA sequences provided in the Sequence Listing, which fragment is greater than about 10 bp, preferably 20-50 bp, and even greater than 100 bp.

[0117] In accordance with the invention, polynucleotide sequences which encode the novel nucleic acids, or functional equivalents thereof, may be used to generate recombinant DNA molecules that direct the expression of that nucleic acid, or a functional equivalent thereof, in appropriate host cells.

[0118] The nucleic acid sequences of the invention are further directed to sequences which encode variants of the described nucleic acids. These amino acid sequence variants may be prepared by methods known in the art by introducing appropriate nucleotide changes into a native or variant polynucleotide. There are two variables in the construction of amino acid sequence variants: the location of the mutation and the nature of the mutation. The amino acid sequence variants of the nucleic acids are preferably constructed by mutating the polynucleotide to give an amino acid sequence that does not occur in nature. These amino acid alterations can be made at sites that differ in the nucleic acids from different species (variable positions) or in highly conserved regions (constant regions). Sites at such locations will typically be modified in series, e.g., by substituting first with conservative choices (e.g., hydrophobic amino acid to a different hydrophobic amino acid) and then with more distant choices (e.g., hydrophobic amino acid to a charged amino acid), and then deletions or insertions may be made at the target site.

[0119] Amino acid sequence deletions generally range from about 1 to 30 residues, preferably about 1 to 10 residues, and are typically contiguous. Amino acid insertions include amino- and/or carboxyl-terminal fusions ranging in length from one to one hundred or more residues, as well as intrasequence insertions of single or multiple amino acid residues. Intrasequence insertions may range generally from about 1 to 10 amino residues, preferably from 1 to 5 residues. Examples of terminal insertions include the heterologous signal sequences necessary for secretion or for intracellular targeting in different host cells.

[0120] In a preferred method, polynucleotides encoding the novel nucleic acids are changed via site-directed mutagenesis. This method uses oligonucleotide sequences that encode the polynucleotide sequence of the desired amino acid variant, as well as a sufficient adjacent nucleotide on both sides of the changed amino acid to form a stable duplex on either side of the site of being changed. In general, the techniques of site-directed mutagenesis are well known to those of skill in the art and this technique is exemplified by publications such as, Edelman et al., DNA 2:183 (1983). A versatile and efficient method for producing site-specific changes in a polynucleotide sequence was published by Zoller and Smith, Nucleic Acids Res. 10:6487-6500(1982).

[0121] PCR may also be used to create amino acid sequence variants of the novel nucleic acids. When small amounts of template DNA are used as starting material, primer(s) that differs slightly in sequence from the corresponding region in the template DNA can generate the desired amino acid variant. PCR amplification results in a population of product DNA fragments that differ from the polynucleotide template encoding the collagen at the position specified by the primer. The product DNA fragments replace the corresponding region in the plasmid and this gives the desired amino acid variant.

[0122] A further technique for generating amino acid variants is the cassette mutagenesis technique described in Wells et al., Gene 34:315 (1985); and other mutagenesis techniques well known in the art, such as, for example, the techniques in Sambrook et al., supra, and Current Protocols in Molecular Biology, Ausubel et al.

[0123] Due to the inherent degeneracy of the genetic code, other DNA sequences which encode substantially the same or a functionally equivalent amino acid sequence may be used in the practice of the invention for the cloning and expression of these novel nucleic acids. Such DNA sequences include those which are capable of hybridizing to the appropriate novel nucleic acid sequence under stringent conditions.

[0124] 5.8 Hosts

[0125] The present invention further provides host cells containing SEQ ID NO: 1-38,043 of the present invention, wherein the nucleic acid has been introduced into the host cell using known transformation, transfection or infection methods. The host cell can be a higher eukaryotic host cell, such as a mammalian cell, a lower eukaryotic host cell, such as a yeast cell, or the host cell can be a prokaryotic cell, such as a bacterial cell. Introduction of the recombinant construct into the host cell can be effected by calcium phosphate transfection, DEAE, dextran mediated transfection, or electroporation (Davis, L. et al., Basic Methods in Molecular Biology (1986)).

[0126] The host cells containing one of SEQ ID NO: 1-38,043 of the present invention, can be used in conventional manners to produce the gene product encoded by the isolated fragment (in the case of an ORF) or can be used to produce a heterologous protein under the control of the EMF.

[0127] Any host/vector system can be used to express one or more of the ORFs of the present invention. These include, but are not limited to, eukaryotic hosts such as HeLa cells, Cv-1 cell, COS cells, and Sf9 cells, as well as prokaryotic host such as E. coli and B. subtilis. The most preferred cells are those which do not normally express the particular polypeptide or protein or which expresses the polypeptide or protein at low natural level.

[0128] Mature proteins can be expressed in mammalian cells, yeast, bacteria, or other cells under the control of appropriate promoters. Cell-free translation systems can also be employed to produce such proteins using RNAs derived from the DNA constructs of the present invention. Appropriate cloning and expression vectors for use with prokaryotic and eukaryotic hosts are described by Sambrook, et al, in Molecular Cloning: A Laboratory Manual, Second Edition, Cold Spring Harbor, N.Y. (1989), the disclosure of which is hereby incorporated by reference.

[0129] Various mammalian cell culture systems can also be employed to express recombinant protein. Examples of mammalian expression systems include the COS-7 lines of monkey kidney fibroblasts, described by Gluzman, Cell 23:175 (1981), and other cell lines capable of expressing a compatible vector, for example, the C127, 3T3, CHO, HeLa and BHK cell tines. Mammalian expression vectors will comprise an origin of replication, a suitable promoter and, and also any necessary ribosome binding sites, polyadenylation site, splice donor and acceptor sites, transcriptional termination sequences, and 5′ flanking nontranscribed sequences. DNA sequences derived from the SV40 viral genome, for example, SV40 origin, early promoter, enhancer, splice, and polyadenylation sites may be used to provide the required nontranscribed genetic elements.

[0130] Recombinant polypeptides and proteins produced in bacterial culture are usually isolated by initial extraction from cell pellets, followed by one or more salting-out, aqueous ion exchange or size exclusion chromatography steps. Protein refolding steps can be used, as necessary, in completing configuration of the mature protein. Finally, high performance liquid chromatography (HPLC) can be employed for final purification steps. Microbial cells employed in expression of proteins can be disrupted by any convenient method, including freeze-thaw cycling, sonication, mechanical disruption, or use of cell lysing agents.

[0131] 5.9 Peptides

[0132] The present invention further provides isolated polypeptides encoded by the nucleic acid fragments of the present invention or by degenerate variants of the nucleic acid fragments of the present invention. By “degenerate variant” is intended nucleotide fragments which differ from a nucleic acid fragment of the present invention (e.g., an ORF) by nucleotide sequence but, due to the degeneracy of the Genetic Code, encode an identical polypeptide sequence. Preferred nucleic acid fragments of the present invention are the ORFs which encode proteins.

[0133] A variety of methodologies known in the art can be utilized to obtain any one of the isolated polypeptides or proteins of the present invention. At the simplest level, the amino acid sequence can be synthesized using commercially available peptide synthesizers. This is particularly useful in producing small peptides and fragments of larger polypeptides. Fragments are useful, for example, in generating antibodies against the native polypeptide. In an alternative method, the polypeptide or protein is purified from bacterial cells which naturally produce the polypeptide or protein. One skilled in the art can readily follow known methods for isolating polypeptides and proteins in order to obtain one of the isolated polypeptides or proteins of the present invention. These include, but are not limited to, immunochromatography, HPLC, size-exclusion chromatography, ion-exchange chromatography, and immuno-affinity chromatography.

[0134] The polypeptides and proteins of the present invention can alternatively be purified from cells which have been altered to express the desired polypeptide or protein. As used herein, a cell is said to be altered to express a desired polypeptide or protein when the cell, through genetic manipulation, is made to produce a polypeptide or protein which it normally does not produce or which the cell normally produces at a lower level. One skilled in the art can readily adapt procedures for introducing and expressing either recombinant or synthetic sequences into eukaryotic or prokaryotic cells in order to generate a cell which produces one of the polypeptides or proteins of the present invention.

[0135] 5.10 Antibodies

[0136] In general, techniques for preparing polyclonal and monoclonal antibodies as well as hybridomas capable of producing the desired antibody are well known in the art (Campbell, A. M., Monoclonal Antibodies Technology: Laboratory Techniques in Biochemistry and Molecular Biology, Elsevier Science Publishers, Amsterdam, The Netherlands (1984); St. Groth et al., J. Immunol. 35:1-21 (1990); Kohler and Milstein, Nature 256:495-497(1975)), the trioma technique, the human B-cell hybridoma technique (Kozbor et al., Immunology Today 4:72(1983); Cole et al., in Monoclonal Antibodies and Cancer Therapy, Alan R. Liss, Inc. (1985), pp. 77-96).

[0137] Any animal (mouse, rabbit, etc.) which is known to produce antibodies can be immunized with the pseudogene polypeptide. Methods for immunization are well known in the art. Such methods include subcutaneous or interperitoneal injection of the polypeptide. One skilled in the art will recognize that the amount of the protein encoded by the ORF of the present invention used for immunization will vary based on the animal which is immunized, the antigenicity of the peptide and the site of injection.

[0138] The protein which is used as an immunogen may be modified or administered in an adjuvant in order to increase the protein's antigenicity. Methods of increasing the antigenicity of a protein are well known in the art and include, but are not limited to, coupling the antigen with a heterologous protein (such as globulin or β-galactosidase) or through the inclusion of an adjuvant during immunization.

[0139] For monoclonal antibodies, spleen cells from the immunized animals are removed, fused with myeloma cells, such as SP2/0-Ag14 myeloma cells, and allowed to become monoclonal antibody producing hybridoma cells.

[0140] Any one of a number of methods well known in the art can be used to identify the hybridoma cell which produces an antibody with the desired characteristics. These include screening the hybridomas with an ELISA assay, western blot analysis, or radioimmunoassay (Lutz et al., Exp. Cell Research. 175:109-124 (1988)).

[0141] Hybridomas secreting the desired antibodies are cloned and the class and subclass is determined using procedures known in the art (Campbell, A. M., Monoclonal Antibody Technology: Laboratory Techniques in Biochemistry and Molecular Biology, Elsevier Science Publishers, Amsterdam, The Netherlands (1984)).

[0142] Techniques described for the production of single chain antibodies (U.S. Pat. No. 4,946,778) can be adapted to produce single chain antibodies to proteins of the present invention.

[0143] For polyclonal antibodies, antibody containing antisera is isolated from the immunized animal and is screened for the presence of antibodies with the desired specificity using one of the above-described procedures.

[0144] The present invention further provides the above-described antibodies in delectably labeled form. Antibodies can be delectably labeled through the use of radioisotopes, affinity labels (such as biotin, avidin, etc.), enzymatic labels (such as horseradish peroxidase, alkaline phosphatase, etc.) fluorescent labels (such as FITC or rhodamine, etc.), paramagnetic atoms, etc. Procedures for accomplishing such labeling are well-known in the art, for example, see (Sternberger, L. A. et al., J. Histochem. Cytochem. 18:315 (1970); Bayer, E. A. et al, Meth. Enzym. 62:308 (1979); Engval, E. et al., Immunol. 109:129 (1972); Goding, J. W. J. Immunol. Meth. 13:215 (1976)).

[0145] The labeled antibodies of the present invention can be used for in vitro, in vivo, and in situ assays to identify cells or tissues in which a fragment of the polypeptide of interest is expressed. The antibodies may also be used directly in therapies or other diagnostics.

[0146] The present invention further provides the above-described antibodies immobilized on a solid support. Examples of such solid supports include plastics such as polycarbonate, complex carbohydrates such as agarose and sepharose, acrylic resins and such as polyacrylamide and latex beads. Techniques for coupling antibodies to such solid supports are well known in the art (Weir, D. M. et al., “Handbook of Experimental Immunology” 4th Ed., Blackwell Scientific Publications, Oxford, England, Chapter 10 (1986); Jacoby, W. D. et al., Meth Enzym. 34 Academic Press, N.Y. (1974)). The immobilized antibodies of the present invention can be used for in vitro, in vivo, and in situ assays as well as for immuno-affinity purification of the proteins of the present invention.

[0147] 5.11 Computer Readable Sequences

[0148] In one application of this embodiment, a nucleotide sequence of the present invention can be recorded on computer readable media. As used herein, “computer readable media” refers to any medium which can be read and accessed directly by a computer. Such media include, but are not limited to: magnetic storage media, such as floppy discs, hard disc storage medium, and magnetic tape; optical storage media such as CD-ROM; electrical storage media such as RAM and ROM; and hybrids of these categories such as magnetic/optical storage media. A skilled artisan can readily appreciate how any of the presently known computer readable mediums can be used to create a manufacture comprising computer readable medium having recorded thereon a nucleotide sequence of the present invention.

[0149] As used herein, “recorded” refers to a process for storing information on computer readable medium. A skilled artisan can readily adopt any of the presently known methods for recording information on computer readable medium to generate manufactures comprising the nucleotide sequence information of the present invention.

[0150] A variety of data storage structures are available to a skilled artisan for creating a computer readable medium having recorded thereon a nucleotide sequence of the present invention. The choice of the data storage structure will generally be based on the means chosen to access the stored information. In addition, a variety of data processor programs and formats can be used to store the nucleotide sequence information of the present invention on computer readable medium. The sequence information can be represented in a word processing text file, formatted in commercially-availablesoftware such as WordPerfect and MicroSoft Word, or represented in the form of an ASCII file, stored in a database application, such as DB2, Sybase, Oracle, or the like. A skilled artisan can readily adapt any number of dataprocessor structuring formats (e.g. text file or database) in order to obtain computer readable medium having recorded thereon the nucleotide sequence information of the present invention.

[0151] By providing the nucleotide sequence of SEQ ID NO: 1-38,043, a representative fragment thereof, or a nucleotide sequence at least 99.9% identical to SEQ ID NO: 1-38,043 in computer readable form, a skilled artisan can routinely access the sequence information for a variety of purposes. Computer software is publicly available which allows a skilled artisan to access sequence information provided in a computer readable medium. The examples which follow demonstrate how software which implements the BLAST (Altschul et al., J. Mol. Biol. 215:403-410(1990)) and BLAZE (Brutlag et al., Comp. Chem. 17:203-207 (1993)) search algorithms on a Sybase system is used to identify open reading frames (ORFs) within a nucleic acid sequence. Such ORFs may be protein encoding fragments and may be useful in producing commercially important proteins such as enzymes used in fermentation reactions and in the production of commercially useful metabolites.

[0152] As used herein, “a computer-based system” refers to the hardware means, software means, and data storage means used to analyze the nucleotide sequence information of the present invention. The minimum hardware means of the computer-based systems of the present invention comprises a central processing unit (CPU), input means, output means, and data storage means. A skilled artisan can readily appreciate that any one of the currently available computer-based systems are suitable for use in the present invention.

[0153] As stated above, the computer-based systems of the present invention comprise a data storage means having stored therein a nucleotide sequence of the present invention and the necessary hardware means and software means for supporting and implementing a search means. As used herein, “data storage means” refers to memory which can store nucleotide sequence information of the present invention, or a memory access means which can access manufactures having recorded thereon the nucleotide sequence information of the present invention.

[0154] As used herein, “search means” refers to one or more programs which are implemented on the computer-based system to compare a target sequence or target structural motif with the sequence information stored within the data storage means. Search means are used to identify fragments or regions of a known sequence which match a particular target sequence or target motif. A variety of known algorithms are disclosed publicly and a variety of commercially available software for conducting search means are and can be used in the computer-based systems of the present invention. Examples of such software includes, but is not limited to, MacPattern (EMBL), BLASTN and BLASTA (NPOLYPEPTIDEIA). A skilled artisan can readily recognize that any one of the available algorithms or implementing software packages for conducting homology searches can be adapted for use in the present computer-based systems.

[0155] As used herein, a “target sequence” can be any nucleic acid or amino acid sequence of six or more nucleotides or two or more amino acids. A skilled artisan can readily recognize that the longer a target sequence is, the less likely a target sequence will be present as a random occurrence in the database. The most preferred sequence length of a target sequence is from about 10 to 100 amino acids or from about 30 to 300 nucleotide residues. However, it is well recognized that searches for commercially important fragments, such as sequence fragments involved in gene expression and protein processing, may be of shorter length.

[0156] As used herein, “a target structural motif,” or “target motif,” refers to any rationally selected sequence or combination of sequences in which the sequence(s) are chosen based on a three-dimensional configuration which is formed upon the folding of the target motif. There are a variety of target motifs known in the art. Protein target motifs include, but are not limited to, enzyme active sites and signal sequences. Nucleic acid target motifs include, but are not limited to, promoter sequences, hairpin structures and inducible expression elements (protein binding sequences).

[0157] 5.12 Expression Modulating Sequences

[0158] EMF sequences can be identified within a genome by their proximity to the ORFs. An intergenic segment, or a fragment of the intergenic segment, from about 10 to 200 nucleotides in length, taken 5′ from any ORF will modulate the expression of an operably linked 3′ ORF in a fashion similar to that found with the naturally linked ORF sequence. As used herein, an “intergenic segment” refers to the fragments of a genome which are between two ORF(S) herein described. Alternatively, EMFs can be identified using known EMFs as a target sequence or target motif in the computer-based systems of the present invention.

[0159] The presence and activity of an EMF can be confirmed using an EMF trap vector. An EMF trap vector contains a cloning site 5′ to a marker sequence. A marker sequence encodes an identifiable phenotype, such as antibiotic resistance or a complementing nutrition auxotrophic factor, which can be identified or assayed when the EMF trap vector is placed within an appropriate host under appropriate conditions. As described above, an EMF will modulate the expression of an operably linked marker sequence. A more detailed discussion of various marker sequences is provided below.

[0160] A sequence which is suspected as being an EMF is cloned in all three reading frames in one or more restriction sites upstream from the marker sequence in the EMF trap vector. The vector is then transformed into an appropriate host using known procedures and the phenotype of the transformed host is examined under appropriate conditions. As described above, an EMF will modulate the expression of an operably linked marker sequence.

[0161] 5.13 Triplex Helix Formation

[0162] In addition, the fragments of the present invention, as broadly described, can be used to control gene expression through triple helix formation or antisense DNA or RNA, both of which methods are based on the binding of a polynucleotide sequence to DNA or RNA. Polynucleotides suitable for use in these methods are usually 20 to 40 bases in length and are designed to be complementary to a region of the gene involved in transcription (triple helix—see Lee et al., Nucl. Acids Res. 6:3073 (1979); Cooney et al., Science 15241:456 (1988); and Dervan et al., Science 251:1360 (1991)) or to the mRNA itself (antisense—Olmno, J. Neurochem. 56:560 (1991); Oligodeoxynucleotides as Antisense Inhibitors of Gene Expression, CRC Press, Boca Raton, Fla. (1988)).

[0163] Triple helix—formation optimally results in a shut-off of RNA transcription from DNA, while antisense RNA hybridization blocks translation of an mRNA molecule into polypeptide. Both techniques have been demonstrated to be effective in model systems. Information contained in the sequences of the present invention is necessary for the design of an antisense or triple helix oligonucleotide.

[0164] 5.14 Diagnostics Assays and Kits

[0165] The present invention further provides methods to identify the expression of one of the ORFs of the present invention, or homolog thereof, in a test sample, using a nucleic acid probe or antibodies of the present invention.

[0166] In detail, such methods comprise incubating a test sample with one or more of the antibodies or one or more of nucleic acid probes of the present invention and assaying for binding of the nucleic acid probes or antibodies to components within the test sample.

[0167] Conditions for incubating a nucleic acid probe or antibody with a test sample vary. Incubation conditions depend on the format employed in the assay, the detection methods employed, and the type and nature of the nucleic acid probe or antibody used in the assay. One skilled in the art will recognize that any one of the commonly available hybridization, amplification or immunological assay formats can readily be adapted to employ the nucleic acid probes or antibodies of the present invention. Examples of such assays can be found in Chard, T., An Introduction to Radioimmunoassay and Related Techniques, Elsevier Science Publishers, Amsterdam, The Netherlands (1986); Bullock, G. R. et al., Techniques in Immunocytochemistry, Academic Press, Orlando, Fla. Vol. 1 (1982), Vol. 2 (1983), Vol. 3 (1985); Tijssen, P., Practice and Theory of immunoassays: Laboratory Techniques in Biochemistry and Molecular Biology, Elsevier Science Publishers, Amsterdam, The Netherlands (1985).

[0168] The test samples of the present invention include cells, protein or membrane extracts of cells, or biological fluids such as sputum, blood, serum, plasma, or urine. The test sample used in the above-described method will vary based on the assay format, nature of the detection method and the tissues, cells or extracts used as the sample to be assayed. Methods for preparing protein extracts or membrane extracts of cells are well known in the art and can be readily be adapted in order to obtain a sample which is compatible with the system utilized.

[0169] In another embodiment of the present invention, kits are provided which contain the necessary reagents to carry out the assays of the present invention.

[0170] Specifically, the invention provides a compartment kit to receive, in close confinement, one or more containers which comprises: (a) a first container comprising one of the probes or antibodies of the present invention; and (b) one or more other containers comprising one or more of the following: wash reagents, reagents capable of detecting presence of a bound probe or antibody.

[0171] In detail, a compartment kit includes any kit in which reagents are contained in separate containers. Such containers include small glass containers, plastic containers or strips of plastic or paper. Such containers allows one to efficiently transfer reagents from one compartment to another compartment such that the samples and reagents are not cross-contaminated, and the agents or solutions of each container can be added in a quantitative fashion from one compartment to another. Such containers will include a container which will accept the test sample, a container which contains the antibodies used in the assay, containers which contain wash reagents (such as phosphate buffered saline, Tris-buffers, etc.), and containers which contain the reagents used to detect the bound antibody or probe.

[0172] Types of detection reagents include labeled nucleic acid probes, labeled secondary antibodies, or in the alternative, if the primary antibody is labeled, the enzymatic, or antibody binding reagents which are capable of reacting with the labeled antibody. One skilled in the art will readily recognize that the disclosed probes and antibodies of the present invention can be readily incorporated into one of the established kit formats which are well known in the art.

[0173] 5.15 Screening Assays

[0174] Using the isolated proteins of the present invention, the present invention further provides methods of obtaining and identifying agents which bind to a protein encoded by one of the ORFs from a nucleic acid with a sequence of one of SEQ ID NO: 1-38,043, or to a nucleic acid with a sequence of one of SEQ ID NO: 1-38,043.

[0175] In detail, said method comprises the steps of:

[0176] (a) contacting an agent with an isolated protein encoded by one of the ORFs of the present invention, or nucleic acid of the invention; and

[0177] (b) determining whether the agent binds to said protein or said nucleic acid.

[0178] The agents screened in the above assay can be, but are not limited to, peptides, carbohydrates, vitamin derivatives, or other pharmaceutical agents. The agents can be selected and screened at random or rationally selected or designed using protein modeling techniques.

[0179] For random screening, agents such as peptides, carbohydrates, pharmaceutical agents and the like are selected at random and are assayed for their ability to bind to the protein encoded by the ORF of the present invention.

[0180] Alternatively, agents may be rationally selected or designed. As used herein, an agent is said to be “rationally selected or designed” when the agent is chosen based on the configuration of the particular protein. For example, one skilled in the art can readily adapt currently available procedures to generate peptides, pharmaceutical agents and the like capable of binding to a specific peptide sequence in order to generate rationally designed antipeptide peptides, for example see Hurby et al., Application of Synthetic Peptides: Antisense Peptides,” In Synthetic Peptides, A User 's Guide, W. H. Freeman, N.Y. (1992), pp. 289-307, and Kaspczak et al., Biochemistry 28:9230-8 (1989), or pharmaceutical agents, or the like.

[0181] In addition to the foregoing, one class of agents of the present invention, as broadly described, can be used to control gene expression through binding to one of the ORFs or EMFs of the present invention. As described above, such agents can be randomly screened or rationally designed/selected. Targeting the ORF or EMF allows a skilled artisan to design sequence specific or element specific agents, modulating the expression of either a single ORF or multiple ORFs which rely on the same EMF for expression control.

[0182] One class of DNA binding agents are agents which contain base residues which hybridize or form a triple helix formation by binding to DNA or RNA. Such agents can be based on the classic phosphodiester, ribonucleic acid backbone, or can be a variety of sulfhydryl or polymeric derivatives which have base attachment capacity.

[0183] Agents suitable for use in these methods usually contain 20 to 40 bases and are designed to be complementary to a region of the gene involved in transcription (triple helix—see Lee et al., Nucl. Acids Res. 6:3073 (1979); Cooney et al., Science 241:456 (1988); and Dervan et al., Science 251:1360 (1991)) or to the mRNA itself (antisense—Okano, J. Neurochem. 56:560 (1991); Oligodeoxynucleotidesas Antisense Inhibitors of Gene Expression, CRC Press, Boca Raton, Fla. (1988)). Triple helix—formation optimally result.—. in a shut-off of RNA transcription from DNA, while antisense RNA hybridization blocks translation of an mRNA molecule into polypeptide. Both techniques have been demonstrated to be effective in model systems. Information contained in the sequences of the present invention is necessary for the design of an anti sense or triple helix oligonucleotide and other DNA binding agents.

[0184] Agents which bind to a protein encoded by one of the ORFs of the present invention can be used as a diagnostic agent, in the control of bacterial infection by modulating the activity of the protein encoded by the ORF. Agents which bind to a protein encoded by one of the ORFs of the present invention can be formulated using known techniques to generate a pharmaceutical composition.

[0185] 5.16 Use of Nucleic Acids as Probes

[0186] Another aspect of the subject invention is to provide for polypeptide-specific nucleic acid hybridization probes capable of hybridizing with naturally occurring nucleotide sequences. The hybridizationprobes of the subject invention may be derived from the nucleotide sequence of SEQ ID NO: 1-38,043.

[0187] PCR as described U.S. Pat. Nos. 4,683,195 and 4,965,188 provide additional uses for oligonucleotides based upon the nucleotide sequences. Such probes used in PCR may be of recombinant origin, may be chemically synthesized, or a mixture of both. The probe will comprise a discrete nucleotide sequence for the detection of identical sequences or a degenerate pool of possible sequences for identification of closely related genomic sequences.

[0188] Other means for producing specific hybridization probes for nucleic acids include the cloning of nucleic acid sequences into vectors for the production of mRNA probes. Such vectors are known in the art and are commercially available and may be used to synthesize RNA probes in vitro by means of the addition of the appropriate RNA polymerase as T7 or SP6 RNA polymerase and the appropriate radioactively labeled nucleotides.

[0189] The nucleotide sequences may be used to construct hybridization probes for mapping their respective genomic sequences. The nucleotide sequence provided herein may be mapped to a chromosome or specific regions of a chromosome using well known genetic and/or chromosomal mapping techniques. These techniques include in situ hybridization, linkage analysis against known chromosomal markers, hybridization screening with libraries or flow-sorted chromosomal preparations specific to known chromosomes, and the like. The technique of fluorescent in situ hybridization of chromosome spreads has been described, among other places, in Verma et al (1988) Human Chromosomes: A Manual of Basic Techniques, Pergamon Press, New York N.Y.

[0190] Fluorescent in situ hybridization of chromosomal preparations and other physical chromosome mapping techniques may be correlated with additional genetic map data. Examples of genetic map data can be found in the 1994 Genome Issue of Science (265:1981f). Correlation between the location of a nucleic acid on a physical chromosomal map and a specific disease (or predisposition to a specific disease) may help delimit the region of DNA associated with that genetic disease. The nucleotide sequences of the subject invention may be used to detect differences in gene sequences between normal, carrier or affected individuals.

[0191] The nucleotide sequence may be used to produce purified polypeptides using well known methods of recombinant DNA technology. Among the many publications that teach methods for the expression of genes after they have been isolated is Goeddel (1990) Gene Expression Technology, Methods and Enzymology, Vol 185, Academic Press, San Diego. Polypeptides may be expressed in a variety of host cells, either prokaryotic or eukaryotic. Host cells may be from the same species from which a particular polypeptide nucleotide sequence was isolated or from a different species. Advantages of producing polypeptides by recombinant DNA technology include obtaining adequate amounts of the protein for purification and the availability of simplified purification procedures.

[0192] Each sequence so obtained was compared to sequences in GenBank using a search algorithm developed by Applied Biosystems and incorporated into the INHERIT™ 670 Sequence Analysis System. In this algorithm, Pattern Specification Language (developed by TRW Inc., Los Angeles, Calif.) was used to determine regions of homology. The three parameters that determine how the sequence comparisons run were window size, window offset, and error tolerance. Using a combination of these three parameters, the DNA database was searched for sequences containing regions of homology to the query sequence, and the appropriate sequences were scored with an initial value. Subsequently, these homologous regions were examined using dot matrix homology plots to distinguish regions of homology from chance matches. Smith-Waterman alignments were used to display the results of the homology search.

[0193] Peptide and protein sequence homologies were ascertained using the INHERIT™ 670 Sequence Analysis System in a way similar to that used in DNA sequence homologies. Pattern Specification Language and parameter windows were used to search protein databases for sequences containing regions of homology which were scored with an initial value. Dot-matrix homology plots were examined to distinguish regions of significant homology from chance matches.

[0194] Alternatively, BLAST, which stands for Basic Local Alignment Search Tool, is used to search for local sequence alignments (Altschul S F (1993) J Mol Evol 36:290-300; Altschul, S F et al (1990) J Mol Biol 215:403-10). BLAST produces alignments of both nucleotide and amino acid sequences to determine sequence similarity. Because of the local nature of the alignments, BLAST is especially useful in determining exact matches or in identifying homologs Whereas it is ideal for matches which do not contain gaps, it is inappropriate for performing motif-style searching. The fundamental unit of BLAST algorithm output is the High-scoring Segment Pair (HSP).

[0195] An HSP consists of two sequence fragments of arbitrary but equal lengths whose alignment is locally maximal and for which the alignment score meets or exceeds a threshold or cutoff score set by the user. The BLAST approach is to look for HSPs between a query sequence and a database sequence, to evaluate the statistical significance of any matches found, and to report only those matches which satisfy the user-selected threshold of significance. The parameter E establishes the statistically significant threshold for reporting database sequence matches. E is interpreted as the upper bound of the expected frequency of chance occurrence of an HSP (or set of HSPs) within the context of the entire database search. Any database sequence whose match satisfies E is reported in the program output.

[0196] In addition, BLAST analysis was used to search for related molecules within the libraries of the LIFESEQ™ database. This process, an “electronic northern” analysis is analogous to northern blot analysis in that it uses one cellubrevin sequence at a time to search for identical or homologous molecules at a set stringency. The stringency of the electronic northern is based on “product score”. The product score is defined as (% nucleotide or amino acid [between the query and reference sequences] in Blast multiplied by the % maximum possible BLAST score [based on the lengths of query and reference sequences]) divided by 100. At a product score of 40, the match will be exact within a 1-2% error; and at 70, the match will be exact. Homologous or related molecules can be identified by selecting those which show product scores between approximately 15 and 30.

[0197] The present invention is illustrated in the following examples. Upon consideration of the present disclosure, one of skill in the art will appreciate that many other embodiments and variations may be made in the scope of the present invention. Accordingly, it is intended that the broader aspects of the present invention not be limited to the disclosure of the following examples.

### EXAMPLE 1

[0198] Preparation of a Universal Set of Probes

[0199] Two types of universal sets of probes may be prepared. The first is a complete set (or at least a noncomplementary subset) of relatively short probes, for example all 4096 (or about 2000 non-complementary) 6-mers, or all 16,384 (or about 8,000 non-complementary) 7-mers. Full noncomplementary subsets of 8-mers and longer probes are less convenient inasmuch as they include 32,000 or more probes.

[0200] A second type of probe set is selected as a small subset of probes still sufficient for reading every bp in any sequence with at least with one probe. For example, 12 of 16 dimers are sufficient. A small subset for 7-mers, 8-mer and 9-mers for sequencing double stranded DNA may be about 3000, 10,000 and 30,000 probes, respectively.

[0201] Probes may be prepared using standard chemistry with one to three non-specified (mixed A,T,C and G) or universal (e.g. M base or inosine) bases at the ends. If radiolabelling is used, probes may have an OH group at the 5′ end for kinasing by radiolabelled phosphorous groups. Alternatively, probes labelled with any compatible system, such as fluorescent dyes, may be employed. Other types of probes, such as PNA (Protein Nucleic Acids)or probes containing modified bases which change duplex stability also may be used.

[0202] Probes may be stored in bar-coded multiwell plates. For small numbers of probes, 96-well plates may be used; for 10,000 or more probes, storage in 384-or 864-well plates is preferred. Stacks of 5 to 50 plates are enough to store all probes. Approximately 5 pg of a probe may be sufficient for hybridization with one DNA sample. Thus, from a small synthesis of about 50 mg per probe, ten million samples may be analyzed. If each probe is used for every third sample, and if each sample is 1000 bp in length, then over 30 billion bases (10 human genomes) may be sequenced by a set of 5,000 probes.

### EXAMPLE 2

[0203] Probes Having Modified Oligonucleotides

[0204] Modified oligonucleotides may be introduced into hybridization probes and used under appropriate conditions therefor. For example, pyrimidines with a halogen at the C⁵-position may be used to improve duplex stability by influencing base stacking. 2,6-diaminopurine may be used to provide a third hydrogen bond in base pairing with thymine, thereby thermally stabilizing DNA-duplexes. Using 2,5-diaminopurine may increase duplex stability to allow more stringent conditions for annealing, thereby improving the specificity of duplex formation, suppressing background problems and permitting the use of shorter oligomers.

[0205] The synthesis of the triphosphate versions of these modified nucleotides is disclosed by Hoheisel & Lehrach (1990).

[0206] One may also use the non-discriminatory base analogue, or universal base, as designed by Nichols et al. (1994). This new analogue, 1-(2-deoxy-D-ribfuranosyl)-3-nitropyrrole (designated M), was generated for use in oligonucleotide probes and primers for solving the design problems that arise as a result of the degeneracy of the genetic code, or when only fragmentary peptide sequence data are available. This analogue maximizes stacking while minimizing hydrogen-bonding interactions without sterically disrupting a DNA duplex.

[0207] The M nucleoside analogue was designed to maximize stacking interactions using aprotic polar substituents linked to heteroaromatic rings, enhancing intra- and inter-stand stacking interactions to lessen the role of hydrogen bonding in base-pairing specificity. Nichols et al. (1994) favored 3-nitropyrrole 2-deoxyribonucleoside because of its structural and electronic resemblance to p-nitroaniline, whose derivatives are among the smallest known intercaltors of double-stranded DNA.

[0208] The dimethoxytrityl-protected phosphoramidite of nucleoside M is also available for incorporation into nucleotides used as primers for sequencing and polymerase chain reaction (PCR). Nichols et al. (1994) showed that a substantial number of nucleotides can be replaced by M without loss of primer specificity.

[0209] A unique property of M is its ability to replace long strings of contiguous nucleosides and still yield functional sequencing primers. Sequences with three, six and nine M substitutions have all been reported to give readable sequencing ladders, and PCR with three different M-containing primers all resulted in amplification of the correct product (Nichols et al., 1994).

[0210] The ability of 3-nitropyrrole-containing oligonucleotides to function as primers strongly suggests that a duplex structure must form with complementary strands. Optical thermal profiles obtained for the oligonucleotide pairs d(5-C₂-T₅XT₅G₂-3) (SEQ ID NO.: 38,044) and d(5-C₂A₅YA₅G2-3) (SEQ ID NO.: 38,045) (where X and Y can be A, C, G, T or M) were reported to fit the normal sigmoidal pattern observed for the DNA double-to single strand transition. The Tm values of the oligonucleotides containing X M base pairs (where X was A, C, G or T, and Y was M) were reported to all fall within a 3° C. range (Nichols et al., 1994).

### EXAMPLE 3

[0211] Selection and Labeling of Probes

[0212] When an array of subarrays is produced, the sets of probes to be hybridized in each of the hybridization cycles on each of the subarrays is defined. For example, a set of 384 probes may be selected from the universal set, and 96 probings may be performed in each of 4 cycles. Probes selected to be hybridized in one cycle preferably have similar G+C contents.

[0213] Selected probes for each cycle are transferred to a 96-well plate and then are labelled by kinasing or by other labelling procedures if they are not labelled (e.g. with stable fluorescent dyes) before they are stored.

[0214] On the basis of the first round of hybridizations, a new set of probes may be defined for each of the subarrays for additional cycles. Some of the arrays may not be used in some of the cycles. For example, if only 8 of 64 patient samples exhibit a mutation and 8 probes are scored first for each mutation, then all 64 probes may be scored in one cycle and 32 subarrays are not used. These unused subarrays may then be treated with hybridization buffer to prevent drying of the filters.

[0215] Probes may be retrieved from the storing plates by any convenient approach, such as a single channel pipetting device, or a robotic station, such as a Beckman Biomek 1000 (Beckman Instruments, Fullerton, Calif.) or a Mega Two robot (Megamation, Lawrenceville, N.J.). A robotic station may be integrated with data analysis programs and probe managing programs. Outputs of these programs may be inputs for one or more robotic stations.

[0216] Probes may be retrieved one by one and added to subarrays covered by hybridization buffer. It is preferred that retrieved probes be placed in a new plate and labelled or mixed with hybridization buffer. The preferred method of retrieval is by accessing stored plates one by one and pipetting (or transferring by metal pins) a sufficient amount of each selected probe from each plate to specific wells in an intermediary plate. An array of individually addressable pipettes or pins may be used to speed up the retrieval process.

### EXAMPLE 4

[0217] Preparation of Labeled Probes

[0218] The oligonucleotide probes may be prepared by automated synthesis, which is routine to those of skill in the art, for example, using and Applied Biosystems system. Alternatively, probes may be prepared using Genosys Biotechnologies Inc. Methods using stacks of porous Teflon wafers.

[0219] Oligonucleotide probes may be labeled with, for example, radioactive labels (³⁵S, ³²P, ³³P, and preferably, ³³P) for arrays with 100-200 um or 100-400 um spots; non-radioactive isotopes (Jacobsen et al., 1990); or fluorophores (Brumbaugh et al., 1988). All such labeling methods are routine in the art, as exemplified by the relevant sections in Sambrook et al. (1989) and by further references such as Schubert et al. (1990), Murakami et al. (1991) and Cate et al. (1991), all articles being specifically incorporated herein by reference.

[0220] In regard to radiolabelling, the common methods are end-labeling using T4 polynucleotide kinase or high specific activity labeling using Klenow or even T7 polymerase. These are described as follows.

[0221] Synthetic oligonucleotides are synthesized without a phosphate group at their 5 termini and are therefore easily labeled by transfer of the -³²P or -³³P from [-³²P]ATP or [-³³P]ATP using the enzyme bacteriophage T4 polynucleotide kinase. If the reaction is carried out efficiently, the specificity activity of such probes can be as high as the specific activity of the [-³²P]ATP or [-³³P]ATP itself. The reaction described below is designed to label 10 pmoles of an oligonucleotide to high specific activity. Labeling of different amounts of oligonucleotide can easily be achieved by increasing or decreasing the size of the reaction, keeping the concentrations of all components constant.

[0222] A reaction mixture would be created using 1.0 ul of oligonucleotide (10 pmoles/ul); 2.0 ul of 10×bacteriophage T4 polynucleotide kinase buffer; 5.0 ul of [-³²P]ATP or [-³³P]ATP (sp. Act. 5000 Ci/mmole; 10 mCi/ml in aqueous solution) (10 pmoles); and 11.4 ul of water. Eight (8) units (˜1 ul) of bacteriophage T4 polynucleotide kinase is added to the reaction mixture mixed well, and incubated for 45 minutes at 37° C. The reaction is heated for 10 minutes at 68° C. to inactivate the bacteriophage T4 polynucleotide kinase.

[0223] The efficiency of transfer of ³²P or ³³P to the oligonucleotide and its specific activity is then determined. If the specific activity of the probe is acceptable, it is purified. If the specific activity is too low, an additional 8 units of enzyme is added and incubated for a further 30 minutes at 37° C. before heating the reaction for 10 minutes at 68° C. to inactivate the enzyme.

[0224] Purification of radiolabeled oligonucleotides can be achieved by precipitation with ethanol; precipitation with cetylpyridinium bromide; by chromatography through bio-gel P-60; or by chromatography on a Sep-Pak C₁₈ column.

[0225] Probes of higher specific activities can be obtained using the Klenow fragment of E. coli. DNA polymerase I to synthesize a strand of DNA complementary to the synthetic oligonucleotide. A short primer is hybridized to an oligonucleotide template whose sequence is the complement of the desired radiolabeled probe. The primer is then extended using the Klenow fragment of E. coli DNA polymerase I to incorporate [-³²P] dNTPs or [-³³ P] dNTPs in a template-directed manner. After the reaction, the template and product are separated by denaturation followed by electrophoresis through a polyacrylamide gel under denaturing conditions. With this method, it is possible to generate oligonucleotide probes that contain several radioactive atoms per molecule of oligonucleotide, if desired.

[0226] To use this method, one would mix in a microfuge tube the calculated amounts of [a-32P]dNTPs or [a-33P]dNTPs necessary to achieve the desired specific activity and sufficient to allow complete synthesis of all template strands. The concentration of dNTPs should not be less than 1 uM at any stage during the reaction. Then add to the tube the appropriate amounts of primer and template DNAs, with the primer being in three- to tenfold molar excess over the template.

[0227] 0.1 volume of 10×Klenow buffer would then be added and mixed well. 2-4 units of the Klenow fragment of E.coli DNA polymerase I would then be added per 5 ul of reaction volume, mixed and incubated for 2-3 hours at 4° C. If desired, the process of the reaction may be monitored by removing small (0.1 ul) aliquots and measuring the proportion of radioactivity that has become precipitable with 10% trichloroacetic acid (TCA).

[0228] The reaction would be diluted with an equal volume of gel-loading buffer, heated to 80° C. for 3 minutes, and then the entire sample loaded on a denaturing polyacrylamide gel. Following electrophoresis, the gel is autoradiographed, allowing the probe to be localized and removed from the gel. Various methods for fluorphobic labeling are also available, as follows. Brumbaugh et al. (1988) describe the synthesis of fluorescently labeled primers. A deoxyuridine analog with a primary amine “linker arm” of 12 atoms attached at C-5 is synthesized. Synthesis of the analog consists of derivatizing 2-deoxyuridine through organometallic intermediates to give 5 (methyl propenoyl)-2-deoxyuridine. Reaction with dimethoxytrityl-chloride produces the corresponding 5-dimethoxytrityl adduct. The methyl ester is hydrolyzed, activated, and reacted with an appropriately monoacylated alkyl diamine. After purification, the resultant linker arm nucleosides are converted to nucleoside analogs suitable for chemical oligonucleotide synthesis.

[0229] Oligonucleotides would then be made that include one or two linker arm bases by using modified phosphoridite chemistry. To a solution of 50 nmol of the linker arm oligonucleotide in 25 ul of 500 mM sodium biocarbonate (pH 9.4) is added 20 ul of 300 mM FITC in dimethyl sulfoxide. The mixture is agitated at room temperature for 6 hrs. The oligonucleotide is separated from free FITC by elution form a 1×30 cm Sephadex G-25 column with 20 mM ammonium acetate (pH 6), combining fractions in the first UV-absorbing peak.

[0230] In general, fluorescent labeling of an oligonucleotide at it s 5-end initially involved two steps. First, a N-protected aminoalkyl phosphoramidite derivative is added to the 5-end of an oligonucleotide during automated DNA synthesis. After removal of all protecting groups, the NHS ester of an appropriate fluorescent dye is coupled to the 5-amino group overnight followed by purification of the labeled oligonucleotide from the excess of dye using reverse phase HPLC or PAGE.

[0231] Schubert et al. (1990) described the synthesis of a phosphoramidite that enables oligonucleotides labeled with fluorescein to be produced during automated DNA synthesis.

[0232] Murakami et al. also described the preparation of flurescein-labeled oligonucleotides.

[0233] Cate et al. (1991) describe the use of oligonucleotide probes directly conjugated to alkaline phosphatase in combination with a direct chemiluminescent substrate (AMPPD) to allow probe detection.

[0234] Labeled probes could readily be purchased form a variety of commercial sources, including GENSET, rather then synthesized.

[0235] Other labels include ligands which can serve as specific binding members to a labeled antibody, chemiluminescers, enzymes, antibodies which can serve as a specific binding pair member for a labeled ligand, and the like. A wide variety of labels have been employed in immunoassays which can readily be employed. Still other labels include antigens, groups with specific reactivity, and electrochemically detectable moeities.

[0236] In general, labeling of nucleic acids with electrophore mass labels (“EML”) is described, for example, in Xu et al., J. Chromatography 764:95-102 (1997). Electrophores are compounds that can be detected with high sensitivity by electron capture mass spectrometry (EC-MS). EMLs can be attached to a probe using chemistry that is well known in the art for reversibly modifying a nucleotide (e.g., well known nucleotide synthesis chemistry teaches a variety of methods for attaching molecules to nucleotides as protecting groups). EMLs are detected using a variety of well known electron capture mass spectrometry devices (e.g., devices sold by Finnigan Corporation). Further, techniques that may be used in the detection of EMLs include, for example, fast atomic bombardment mass spectrometry (see, e.g., Koster et al., Biomedical Environ. Mass Spec. 14:111-116 (1987)); plasma desorption mass spectrometry; electrospray/ionspray(see, e.g., Fenn et al., J. Phys. Chem. 88:4451-59(1984), PCT Appln. No. WO 90/14148, Smith et al., Anal. Chem. 62:882-89 (1990)); and matrix-assisted laser desorption/ionization (Hillenkamp, et al., “Matrix Assisted UV-Laser Desorption/Ionization:A New Approach to Mass Spectrometry of Large Biomolecules,” Biological Mass Spectrometry (Burlingame and McCloskey, eds.), Elsevier Science Publishers, Amsterdam, pp. 49-60, 1990); Huth-Fehre et al., “Matrix Assisted Laser Desorption Mass Spectrometry of Oligodeoxythymidylic Acids,” Rapid Communications in Mass Spectrometry, 6:209-13 (1992)).

[0237] In preferred embodmients, the EMLs are attached to a probe by a covalent bond that is light sensitive. The EML is released from the probe after hybridization with a target nucleic acid by a laser or other light source emitting the desired wavelength of light. The EML is then fed into a GC-MS (gas chromatogrph-mass spectrometer) or other appropiate device, and identified by its mass.

### EXAMPLE 5

[0238] Preparation of Sequencing Chips and Arrays

[0239] A basic example is using 6-mers attached to 50 micron surfaces to give a chip with dimensions of 3×3 mm which can be combined to give an array of 20×20 cm. Another example is using 9-mer oligonucleotides attached to 10×10 microns surface to create a 9-mer chip, with dimensions of 5×5 mm. 4000 units of such chips may be used to create a 30×30 cm array. In an array in which 4,000 to 16,000 oligochips are arranged into a square array. A plate, or collection of tubes, as also depicted, may be packaged with the array as part of the sequencing kit.

[0240] The arrays may be separated physically from each other or by hydrophobic surfaces. One possible way to utilize the hydrophobic strip separation is to use technology such as the Iso-Grid Microbiology System produced by QA Laboratories, Toronto, Canada.

[0241] Hydrophobic grid membrane filters (HGMF) have been in use in analytical food microbiology for about a decade where they exhibit unique attractions of extended numerical range and automated counting of colonies. One commercially-available grid is ISO-GRID™ from QA Laboratories Ltd. (Toronto, Canada) which consists of a square (60×60 cm) of polysulfone polymer (Gelman Tuffryn HT-450, 0.45u pore size) on which is printed a black hydrophobic ink grid consisting of 1600 (40×40) square cells. HGMF have previously been inoculated with bacterial suspensions by vacuum filtration and incubated on the differential or selective media of choice.

[0242] Because the microbial growth is confined to grid cells of known position and size on the membrane, the HGMF functions more like an MPN apparatus than a conventional plate or membrane filter. Peterkin et al. (1987) reported that these HGMFs can be used to propagate and store genomic libraries when used with a HGMF replicator. One such instrument replicates growth from each of the 1600 cells of the ISO-GRID and enables many copies of the master HGMF to be made (Peterkin et al., 1987).

[0243] Sharpe et al. (1989) also used ISO-GRID HGMF form QA Laboratories and an automated HGMF counter (MI-100 Interpreter) and RP-100 Replicator. They reported a technique for maintaining and screening many microbial cultures.

[0244] Peterkin and colleagues later described a method for screening DNA probes using the hydrophobic grid-membrane filter (Peterkin et al., 1989). These authors reported methods for effective colony hybridization directly on HGMFs. Previously, poor results had been obtained due to the low DNA binding capacity of the epoxysulfone polymer on which the HGMFs are printed. However, Peterkin et at (1989) reported that the binding of DNA to the surface of the membrane was improved by treating the replicated and incubated HGMF with polyethyleneimine, a polycation, prior to contact with DNA. Although this early work uses cellular DNA attachment, and has a different objective to the present invention, the methodology described may be readily adapted for Format 3 SBH.

[0245] In order to identify useful sequences rapidly, Peterkin et al (1989) used radiolabeled plasmid DNA from various clones and tested its specificity against the DNA on the prepared HGMFs. In this way, DNA from recombinant plasmids was rapidly screened by colony hybridization against 100 organisms on HGMF replicates which can be easily and reproducibly prepared.

[0246] Manipulation with small (2-3 mm) chips, and parallel execution of thousands of the reactions. The solution of the invention is to keep the chips and the probes in the corresponding arrays. In one example, chips containing 250,000 9-mers are synthesized on a silicon wafer in the form of 8×8 mM plates (15 uM/oligonucleotide, Pease et al., 1994) arrayed in 8×12 format (96 chips) with a 1 mM groove in between. Probes are added either by multichannel pipette or pin array, one probe on one chip. To score all 4000 6-mers, 42 chip arrays have to be used, either using different ones, or by reusing one set of chip arrays several times.

[0247] In the above case, using the earlier nomenclature of the application, F=9; P=6; and F+P=15. Chips may have probes of formula BxNn, where x is a number of specified bases B; and n is a number of non-specified bases, so that x=4 to 10 and n=1 to 4. To achieve more efficient hybridization, and to avoid potential influence of any support oligonucleotides, the specified bases can be surrounded by unspecified bases, thus represented by a formula such as (N)nBx(N)m.

### EXAMPLE 6

[0248] Preparation of Support Bound Oligonucleotides

[0249] Oligonucleotides, i.e., small nucleic acid segments, may be readily prepared by, for example, directly synthesizing the oligonucleotide by chemical means, as is commonly practiced using an automated oligonucleotide synthesizer.

[0250] Support bound oligonucleotides may be prepared by any of the methods known to those of skill in the art using any suitable support such as glass, polystyrene or Teflon. One strategy is to precisely spot oligonucleotides synthesized by standard synthesizers. Immobilization can be achieved using passive adsorption (Inouye & Hondo, 1990); using UV light (Nagata et al., 1985; Dahlen et al., 1987; Morriey & Collins, 1989) or by covalent binding of base modified DNA (Keller et al., 1988; 1989); all references being specifically incorporated herein.

[0251] Another strategy that may be employed is the use of the strong biotin-streptavidin interaction as a linker. For example, Broude et al. (1994) describe the use of Biotinylated probes, although these are duplex probes, that are immobilized on streptavidin-coated magnetic beads. Streptavidin-coated beads may be purchased from Dynal, Oslo. Of course, this same linking chemistry is applicable to coating any surface with streptavidin. Biotinylated probes may be purchased from various sources, such as, e.g., Operon Technologies (Alameda, Calif.).

[0252] Nunc Laboratories (Naperville, Ill.) is also selling suitable material that could be used. Nunc Laboratories have developed a method by which DNA can be covalently bound to the microwell surface termed Covalink NH. CovaLink NH is a polystyrene surface grafted with secondary amino groups (>NH) that serve as bridge-heads for further covalent coupling. CovaLink Modules may be purchased from Nunc Laboratories. DNA molecules may be bound to CovaLink exclusively at the 5′-end by a phosphoramidate bond, allowing immobilization of more than 1 pmol of DNA (Rasmussen et al., 1991).

[0253] The use of CovaLink NH strips for covalent binding of DNA molecules at the 5′-end has been described (Rasmussen et al., 1991). In this technology, a phosphoramidate bond is employed (Chu et al., 1983). This is beneficial as immobilization using only a single covalent bond is preferred. The phosphoramidate bond joins the DNA to the CovaLink NH secondary amino groups that are positioned at the end of spacer arms covalently grafted onto the polystyrene surface through a 2 nm long spacer arm. To link an oligonucleotide to CovaLink NH via an phosphoramidate bond, the oligonucleotide terminus must have a 5′-end phosphate group. It is, perhaps, even possible for biotin to be covalently bound to CovaLink and then streptavidin used to bind the probes.

[0254] More specifically, the linkage method includes dissolving DNA in water (7.5 ng/ul) and denaturing for 10 min. at 95° C. and cooling on ice for 10 min. Ice-cold 0.1 M 1-methylimidazole, pH 7.0 (1-MeIm₇), is then added to a final concentration of 10 mM 1-MeIm₇. A ss DNA solution is then dispensed into CovaLink NH strips (75 ul/well) standing on ice.

[0255] Carbodiimide 0.2 M 1-ethyl-3-(3-dimethylaminopropyl)-carbodiimide (EDC), dissolved in 10 mM 1-MeIm₇, is made fresh and 25 ul added per well. The strips are incubated for 5 hours at 50° C. After incubation the strips are washed using, e.g., Nunc-Immuno Wash; first the wells are washed 3 times, then they are soaked with washing solution for 5 min., and finally they are washed 3 times (where in the washing solution is-0.4 N NaOH, 0.25% SDS heated to 50° C.).

[0256] It is contemplated that a further suitable method for use with the present invention is that described in PCT Patent Application WO 90/033 82 (Southern & Maskos), incorporated herein by reference. This method of preparing an oligonucleotide bound to a support involves attaching a nucleoside 3′-reagent through the phosphate group by a covalent phosphodiester link to aliphatic hydroxyl groups carried by the support. The oligonucleotide is then synthesized on the supported nucleoside and protecting groups removed from the synthetic oligonucleotide chain under standard conditions that do not cleave the oligonucleotide from the support. Suitable reagents include nucleoside phosphoramidite and nucleoside hydrogen phosphorate.

[0257] An on-chip strategy for the preparation of DNA probe for the preparation of DNA probe arrays may be employed. For example, addressable laser-activated photodeprotection may be employed in the chemical synthesis of oligonucleotides directly on a glass surface, as described by Fodor et al. (1991), incorporated herein by reference. Probes may also be immobilized on nylon supports as described by Van Ness et al. (1991); or linked to Teflon using the method of Duncan & Cavalier (1988); all references being specifically incorporated herein.

[0258] To link an oligonucleotide to a nylon support, as described by Van Ness et al. (1991), requires activation of the nylon surface via alkylation and selective activation of the 5′-amine of oligonucleotides with cyanuric chloride.

[0259] One particular way to prepare support bound oligonucleotides is to utilize the light-generated synthesis described by Pease et al., (1994, incorporated herein by reference). These authors used current photolithographic techniques to generate arrays of immobilized oligonucleotide probes (DNA chips). These methods, in which light is used to direct the synthesis of oligonucleotide probes in high-density, miniaturized arrays, utilize photolabile 5′-protected N-acyl-deoxynucleoside phosphoramidites, surface linker chemistry and versatile combinatorial synthesis strategies. A matrix of 256 spatially defined oligonucleotide probes may be generated in this manner and then used in the advantageous Format 3 sequencing, as described herein.

[0260] Of course, one could easily purchase a DNA chip, such as one of the light-activated chips described above, from a commercial source. In this regard, one may contact Affymetrix of Santa Clara, Calif. 95051, and Beckman.

### EXAMPLE 7

[0261] Preparation of Nucleic Acid Fragments

[0262] The nucleic acids to be sequenced may be obtained from any appropriate source, such as cDNAs, genomic DNA, chromosomal DNA, microdissected chromosome bands, cosmid or YAC inserts, and RNA, including mRNA without any amplification steps. For example, Sambrook et al. (1989) describes three protocols for the isolation of high molecular weight DNA from mammalian cells (p. 9.14-9.23).

[0263] DNA fragments may be prepared as clones in M13, plasmid or lambda vectors and/or prepared directly from genomic DNA or cDNA by PCR or other amplification methods. Samples may be prepared or dispensed in multiwell plates. About 100-1000 ng of DNA samples may be prepared in 2-500 ml of final volume.

[0264] The nucleic acids would then be fragmented by any of the methods known to those of skill in the art including, for example, using restriction enzymes as described at 9.24-9.28 of Sambrook et al. (1989), shearing by ultrasound and NaOH treatment.

[0265] Low pressure shearing is also appropriate, as described by Schriefer et al. (1990, incorporated herein by reference). In this method, DNA samples are passed through a small French pressure cell at a variety of low to intermediate pressures. A lever device allows controlled application of low to intermediate pressures to the cell. The results of these studies indicate that low-pressure shearing is a useful alternative to sonic and enzymatic DNA fragmentation methods.

[0266] One particularly suitable way for fragmenting DNA is contemplated to be that using the two base recognition endonuclease, CviJI, described by Fitzgerald et al. (1992). These authors described an approach for the rapid fragmentation and fractionation of DNA into particular sizes that they contemplated to be suitable for shotgun cloning and sequencing. The present inventor envisions that this will also be particularly useful for generating random, but relatively small, fragments of DNA for use in the present sequencing technology.

[0267] The restriction endonuclease CviJI normally cleaves the recognition sequence PuGCPy between the G and C to leave blunt ends. Atypical reaction conditions, which alter the specificity of this enzyme (CviJI**), yield a quasi-random distribution of DNA fragments form the small molecule pUC19 (2688 base pairs). Fitzgerald et al. (1992) quantitatively evaluated the randomness of this fragmentation strategy, using a CviJI** digest of pUC19 that was size fractionated by a rapid gel filtration method and directly ligated, without end repair, to a lac Z minus M13 cloning vector. Sequence analysis of 76 clones showed that CviJl** restricts pyGCPy and PuGCPu, in addition to PuGCPy sites, and that new sequence data is accumulated at a rate consistent with random fragmentation.

[0268] As reported in the literature, advantages of this approach compared to sonication and agarose gel fractionation include: smaller amounts of DNA are required (0.2-0.5 ug instead of 2-5 ug); and fewer steps are involved (no preligation, end repair, chemical extraction, or agarose gel electrophoresis and elution are needed). These advantages are also proposed to be of use when preparing DNA for sequencing by Format 3.

[0269] Irrespective of the manner in which the nucleic acid fragments are obtained or prepared, it is important to denature the DNA to give single stranded pieces available for hybridization. This is achieved by incubating the DNA solution for 2-5 minutes at 80-90° C. The solution is then cooled quickly to 2° C. to prevent renaturation of the DNA fragments before they are contacted with the chip. Phosphate groups must also be removed from genomic DNA, as described in Example VI.

### EXAMPLE 8

[0270] 15 Preparation of DNA Arrays

[0271] Arrays may be prepared by spotting DNA samples on a support such as a nylon membrane. Spotting may be performed by using arrays of metal pins (the positions of which correspond to an array of wells in a microtiter plate) to repeated by transfer of about 20 nl of a DNA solution to a nylon membrane. By offset printing, a density of dots higher than the density of the wells is achieved. One to 25 dots may be accommodated in 1 mm², depending on the type of label used. By avoiding spotting in some preselected number of rows and columns, separate subsets (subarrays) may be formed. Samples in one subarray may be the same genomic segment of DNA (or the same gene) from different individuals, or may be different, overlapped genomic clones. Each of the subarrays may represent replica spotting of the same samples. In one example, a selected gene segment may be amplified from 64 patients. For each patient, the amplified gene segment may be in one 96-well plate (all 96 wells containing the same sample). A plate for each of the 64 patients is prepared. By using a 96-pin device, all samples may be spotted on one 8×12 cm membrane. Subarrays may contain 64 samples, one from each patient. Where the 96 subarrays are identical, the dot span may be 1 mm² and there may be a 1 mm space between subarrays.

[0272] Another approach is to use membranes or plates (available from NUNC, Naperville, Ill.) which may be partitioned by physical spacers e.g. a plastic grid molded over the membrane, the grid being similar to the sort of membrane applied to the bottom of multiwell plates, or hydrophobic strips. A fixed physical spacer is not preferred for imaging by exposure to flat phosphor-storage screens or x-ray films.

### EXAMPLE 9

[0273] Hybridization and Scoring Process

[0274] Labeled probes may be mixed with hybridization buffer and pipetted, preferably by multichannel pipettes, to the subarrays. To prevent mixing of the probes between subarrays (if there are no hydrophobic strips or physical barriers imprinted in the membrane), a corresponding plastic, metal or ceramic grid may be firmly pressed to the membrane. Also, the volume of the buffer may be reduced to about 1 ml or less per mm². The concentration of the probes and hybridization conditions used may be as described previously except that the washing buffer may be quickly poured over the array of subarrays to allow fast dilution of probes and thus prevent significant cross-hybridization. For the same reason, a minimal concentration of the probes may be used and hybridization time extended to the maximal practical level. For DNA detection and sequencing, knowledge of a “normal” sequence allows the use of the continuous stacking interaction phenomenon to increase the signal. In addition to the labelled probe, additional unlabelled probes which hybridize back to back with a labelled one may be added in the hybridization reaction. The amount of the hybrid may be increased several times. The probes may be connected by ligation. This approach may be important for resolving DNA regions forming “compressions”.

[0275] In the case of radiolabelled probes, images of the filters may be obtained, preferably by phosphorstorage technology. Fluorescent labels may be scored by CCD cameras, confocal microscopy or otherwise. In order to properly scale and integrate data from different hybridization experiments, raw signals are normalized based on the amount of target in each dot. Differences in the amount of target DNA per dot may be corrected for by dividing signals of each probe by an average signal for all probes scored on one dot. The normalized signals maybe scaled, usually from 1-100, to compare data from different experiments. Also, in each subarray, several control DNAs may be used to determine an average background signal in those samples which do not contain a full match target. For samples obtained from diploid (polyploid) scores, homozygotic controls may be used to allow recognition of heterozygotes in the samples.

### EXAMPLE 10

[0276] Hybridization With Oligonucleotides

[0277] Oligonucleotides were either purchased from Genosys Inc., Houston, Tex. or made on an Applied Biosystems 381A DNA synthesizer. Most of the probes used were not purified by HPLC or gel electrophoresis. For example, probes were designed to have both a single perfectly complementary target in interferon, a M13 clone containing a 921 bp Eco RI-Bgl II human B1-interferon fragment (Ohno and Tangiuchi, Proc. Natl. Acad. Sci. 74: 4370-4374 (1981)], and at least one target with an end base mismatch in M13 vector itself.

[0278] End labelling of oligonucleotides was performed as described [Maniatis et al., Molecular Cloning: A Laboratory Manual, Cold Spring Harbor Laboratory Cold Spring Harbor, N.Y. (1982)] in 10 ml containing T4-polynucleotidekinase (5 units Amersham), g^{32p}-ATP (3.3 pM, 10 mCi Amersham 3000 Ci/mM) and oligonucleotide(4 pM, 10 ng). Specific activities of the probes were 2.5-5×10 9 cpm/nM.

[0279] Single stranded DNA (2 to 4 ml in 0.5 NaOH, 1.5 M NaCl) was spotted on a Gene Screen membrane wetted with the same solution, the filters were neutralized in 0.05 M Na₂HPO₄ pH 6.5, baked in an oven at 80° C. for 60 min. and UV irradiated for 1 min. Then, the filters were incubated in hybridization solution (0.5 M Na₂HPO₄ pH 7.2, 7% sodium lauroyl sarcosine for 5 min at room temperature and placed on the surface of a plastic Petri dish. A drop of hybridization solution (10 ml, 0.5 M Na₂HPO₄ pH 7.2, 7% sodium lauroyl sarcosine) with a ³²P end-labeled oligomer probe at 4 nM concentration was placed over 1-6 dots per filter, overlaid with a square piece of polyethylene (approximately 1×1 cm.), and incubated in a moist chamber at the indicated temperatures for 3 hr. Hybridization was stopped by placing the filter in 6×SSC washing solution for 3×5 minute at 0° C. to remove unhybridized probe. The filter was either dried, or further washed for the indicated times and temperatures, and autoradiographed. For discrimination measurements, the dots were excised from the dried filters after autoradiography [a phosphoimager (Molecular Dynamics, Sunnyvale, Calif.) may be used] placed in liquid scintillation cocktail and counted. The uncorrected ratio of cpms for IF and M13 dots is given as D.

[0280] The conditions reported herein allow hybridization with very short oligonucleotides but ensure discriminations between matched and mismatched oligonucleotides that are complementary to and therefore bind to a target nucleic acid. Factors which influence the efficient detection of hybridization of specific short sequences based on the degree of discriminations (D) between a perfectly complementary target and an imperfectly complementary target with a single mismatch in the hybrid are defined. In experimental tests, dot blot hybridization of twenty-eight probes that were 6 to 8 nucleotides in length to two M13 clones or to model oligonucleotides bound to membrane filters was accomplished. The principles guiding the experimental procedures are given below.

[0281] Oligonucleotide hybridization to filter bound target nucleic acids only a few nucleotides longer than the probe in conditions of probe excess is a pseudo-first order reaction with respect to target concentration. This reaction is defined by:

Sₜ/Sₒ=e^{-kh[OP t}

[0282] Wherein Sₜ and Sₒ are target sequence concentrations at time t and t₀, respectively. (OP) is probe concentration and t is temperature. The rate constant for hybrid formation, kₕ increases only slightly in the 0° C. to 30° C. range (Porschke and Eigen, J. Mol. Biol. 62: 361 (1971); Craig et al., J. Mol. Biol. 62: 383 (1971)]. Hybrid melting is a first order reaction with respect to hybrid concentration (here replaced by mass due to filter bound state) as shown in:

Hₜ/Hₒ=e^{-kmt}

[0283] In this equation, Hₜ and Hₒ are hybrid concentrations at times t and tₒ, respectively; kₘ is a rate constant for hybrid melting which is dependent on temperature and salt concentration [Ikuta et al., Nucl. Acids Res. 15: 797 (1987); Porsclike and Eigen, J. Mol. Biol. 62: 361 (1971); Craig et al., J. Mol. Biol. 62: 303 (1971)]. During hybridization, which is a strand association process, the back, melting, or strand dissociation, reaction takes place as well. Thus, the amount of hybrid formed in time is result of forward and back reactions. The equilibrium may be moved towards hybrid formation by increasing probe concentration and/or decreasing temperature. However, during washing cycles in large volumes of buffer, the melting reaction is dominant and the back reaction hybridization is insignificant, since the probe is absent. This analysis indicates workable Short Oligonucleotide Hybridization (SOH) conditions call be varied for probe concentration or temperature.

[0284] D or discrimination is defined in equation four:

[0285] ti D=Hₚ(t_{w})/Hᵢ(t_{w})

[0286] Hₚ (t_{w}) and Hᵢ (t_{w}) are the amounts hybrids remaining after a washing time, t_{w}, for the identical amounts of perfectly and imperfectly complementary duplex, respectively. For a given temperature, the discrimination D changes with the 10 length of washing time and reaches the maximal value when Hᵢ=B which is equation five.

[0287] The background, B, represents the lowest hybridization signal detectable in the system. Since any further decrease of Hᵢ may not be examined, D increases upon continued washing. Washing past t_{w} just decreases Hₚ relative to B, and is seen as a decrease in D. The optimal washing time, t_{w}, for imperfect hybrids, from equation three and equation five is:

t_{w}=−ln(B/Hᵢ(t₀))/k_{m.i}

[0288] Since Hₚ is being washed for the same t_{w}, combining equations, one obtains the optimal discrimination function:

D=e^{ln(B/Hi(t0))km,p/km,i}X Hₚ(t₀)/B

[0289] The change of D as a function, of T is important because of the choice of an optimal washing temperature. It is obtained by substituting the Arhenius equation which is:

K−=Ae^{-Ea/RT}

[0290] into the previous equation to form the final equation:

D=Hₚ((t₀)/BX(B/Hᵢ(t₀))^{(Ap/Ai)e(E}^{_{a,i}}^{-E}^{_{a,p}}^{)/RT};

[0291] Wherein B is less than Hᵢ (t₀).

[0292] Since the activation energy for perfect hybrids, E_{a,p}, and the activation energy for imperfect hybrids, E_{a,i}, can be either equal, or E_{a,i} less than E_{a,p} D is temperature independent, or decreases with increasing temperature, respectively. This result implies that the search for stringent temperature conditions for good discrimination in SOH is unjustified. By washing at lower temperatures, one obtains equal or better discrimination, but the time of washing exponentially increases with the decrease of temperature. Discrimination more strongly decreases with T, if Hᵢ(tₒ) increases relative to Hₚ (t₀).

[0293] D at lower temperatures depends to a higher degree on the Hₚ (t₀)/B ratio than on the Hₚ (t₀)/Hᵢ (t₀) ratio. This result indicates that it is better to obtain a sufficient quantity of Hₚ in the hybridization regardless of the discrimination that can be achieved in this step. Better discrimination can then be obtained by washing, since the higher amounts of perfect hybrid allow more time for differential melting to show an effect. Similarly, using larger amounts of target nucleic acid a necessary discrimination can be obtained even with small differences between K_{m,p} and K_{m,i}.

[0294] Extrapolated to a more complex situation than covered in this simple model, the result is that washing at lower temperatures is even more important for obtaining discrimination in the case of hybridization of a probe having many end-mismatches within a given nucleic acid target.

[0295] Using the described theoretical principles as a guide for experiments, reliable hybridizations have been obtained with probes six to eight nucleotides in length. All experiments were performed with a floating plastic sheet providing a film of hybridization solution above the filter. This procedure allows maximal reduction in the amount of probe, and thus reduced label costs in dot blot hybridizations. The high concentration of sodium lauroyl sarcosine instead of sodium lauroyl sulfate in the phosphate hybridization buffer allows dropping the reaction from room temperature down to 12° C. Similarly, the 4-6×SSC, 10% sodium lauroyl sarcosine buffer allows hybridization at temperatures as low as 2° C. The detergent in these buffers is for obtaining tolerable background with up to 40 nM concentrations of labelled probe. Preliminary characterization of the thermal stability of short oligonucleotide hybrids was determined on a prototype octamer with 50% G+C content, i.e. probe of sequence TGCTCATG. The theoretical expectation is that this probe is among the less stable octamers. Its transition enthalpy is similar to those of more stable heptamers or, even to probes 6 nucleotides in length (Bresslaueret al., Proc. Natl. Acad. Sci. U.S.A. 83: 3746 (1986)). Parameter T_{d}, the temperature at which 50% of the hybrid is melted in unit time of a minute is 18° C. The result shows that T_{d} is 15° C. lower for the 8 bp hybrid than for an 11 bp duplex [Wallace et al., Nucleic Acids Res. 6: 3543 (1979)].

[0296] In addition to experiments with model oligonucleotides, an M13 vector was chosen as a system for a practical demonstration of short oligonucleotide hybridization. The main aim was to show useful end-mismatch discrimination with a target similar to the ones which will be used in various applications of the method of the invention. Oligonucleotide probes for the M13 model were chosen in such a way that the M13 vector itself contains the end mismatched base. Vector IF, an M13 recombinant containing a 921 bp human interferon gene insert, carries single perfectly matched target. Thus, IF has either the identical or a higher number of mismatched targets in comparison to the M13 vector itself.

[0297] Using low temperature conditions and dot blots, sufficient differences in hybridization signals were obtained between tie dot containing the perfect and the mismatched targets and the dot containing the mismatched targets only. This was true for the 6-mer oligonucleotides and was also true for the 7 and 8-mer oligonucleotides hybridized to the large IF-M13 pair of nucleic acids.

[0298] The hybridization signal depends on the amount of target available on the filter for reaction with the probe. A necessary control is to show that the difference in sign intensity is not a reflection of varying amounts of nucleic acid in the two dots. Hybridization with a probe that has the same number and kind of targets in both IF and M13 shows that there is an equal amount of DNA in the dots. Since the efficiency of hybrid formation increases with hybrid length, the signal for a duplex having six nucleotides was best detected with a high mass of oligonucleotide target bound to the filter. Due to their lower molecular weight, a larger number of oligonucleotide target molecules can be bound to a given surface area when compared to large molecules of nucleic acid that serves as target.

[0299] To measure the sensitivity of detection with unpurified DNA, various amounts of phage supernatants were spotted on the filter and hybridized with a ³² P-labelled octamer. As little as 50 million unpurified phage containing no more than 0.5 ng of DNA gave a detectable signal indicating that sensitivity of the short oligonucleotide hybridization method is sufficient. Reaction time is short, adding to the practicality.

[0300] As mentioned in the theoretical section above, the equilibrium yield of hybrid depends oil probe concentration and/or temperature of reaction. For instance, the signal level for the same amount of target with 4 nM octamer at 13° C. is 3 times lower than with a probe concentration of 40 nM, and is decreased 4.5-times by raising the hybridization temperature to 25° C.

[0301] The utility of the low temperature wash for achieving maximal discrimination is demonstrated. To make the phenomenon visually obvious, 50 times more DNA was put in the M13 dot than in the IF dot using hybridization with a vector specific probe. In this way, the signal after the hybridization step with the actual probe was made stronger in the, mismatched that in the matched case. The Hₚ/Hᵢ ratio was 1:4. Inversion of signal intensities after prolonged washing at 7° C. was achieved without a massive loss of perfect hybrid, resulting in a ratio of 2:1. In contrast, it is impossible to achieve any discrimination at 25° C., since the matched target signal is already brought down to the background level with 2 minute washing; at the same time, the signal from the mismatched hybrid is still detectable. The loss of discrimination at 13° C. compared to 7° C. is not so great but is clearly visible. If one considers the 90 minute point at 7° C. and the 15 minute point at 13° C. when, the mismatched hybrid signal is near the background level, which represents optimal washing times for the respective conditions, it is obvious that the amount of several times greater at 7° C. than at 13° C. To illustrate this further, the time course of the change discrimination with washing of the same amount of starting hybrid at the two temperatures shows the higher maximal D at the lower temperature. These results confirm the trend in the change of D with temperature and the ratio of amounts of the two types of hybrid at the start of the washing step.

[0302] In order to show the general utility of the short oligonucleotide hybridization conditions, we have looked hybridization of 4 heptamers, 10 octamers and an additional 14 probes up to 12 nucleotides in length in our simple M13 system. These include-the nonamer GTTTTTTAA and octamer GGCAGGCG representing the two extremes of GC content. Although GC content and sequence are expected to influence the stability of short hybrids [Bresslaueret al., Proc. Natl. Acad. Sci. U.S.A. 83: 3746 (1986)], the low temperature short oligonucleotide conditions were applicable to all tested probes in achieving sufficient discrimination. Since the best discrimination value obtained with probes 13 nucleotides in length was 20, a several fold drop due to sequence variation is easily tolerated.

[0303] The M13 system has the advantage of showing the effects of target DNA complexity on the levels of discrimination. For two octamers having either none or five mismatched targets and differing in only one GC pair the observed discriminations were 18.3 and 1.7, respectively.

[0304] In order to show the utility of this method, three probes 8 nucleotides in length were tested on a collection of 51 plasmid DNA dots made from a library in Bluescript vector. One probe was present and specific for Bluescript vector but was absent in M13, while the other two probes had targets that were inserts of known sequence. This system allowed the use of hybridization negative or positive control DNAs with each probe. This probe sequence (CTCCCTTT) also had a complementary target in the interferon insert. Since the M13 dot is negative while the interferon insert in either M13 or Bluescript was positive, the hybridization is sequence specific. Similarly, probes that detect the target sequence in only one of 51 inserts, or in none of the examined inserts along with controls that confirm that hybridization would have occurred if the appropriate targets were present in the clones.

[0305] Thermal stability curves for very short oligonucleotide hybrids that are 6-8 nucleotides in length are at least 15° C. lower than for hybrids 11-12 nucleotides in length [Wallace et al., Nucleic Acids Res. 6: 3543-3557(1979)]. However, performing the hybridization reaction at a low temperature and with a very practical 0.4-40 nM concentration of oligonucleotide probe allows the detection of complementary sequence in a known or unknown nucleic acid target. To determine an unknown nucleic acid sequence completely, an entire set containing 65,535 8-mer probes may be used. Sufficient amounts of nucleic acid for this purpose are present in convenient biological samples such as a few microliters of M13 culture, a plasmid prep from 10 ml of bacterial culture or a single colony of bacteria, or less than 1 ml of a standard PCR reaction.

[0306] Short oligonucleotides 6-10 nucleotides long give excellent discrimination. The relative decrease in hybrid stability with a single end mismatch is greater than for longer probes. Results with the octamer TGCTCATG support this conclusion. In the experiments, the target with a G/T end mismatch, hybridization to the target of this type of mismatch is the most stable of all other types of oligonucleotide. This discrimination achieved is the same as or greater than an internal G/T mismatch in a 19 base paired duplex greater than an internal G/T mismatch in a 19 paired duplex [Ikuta et al., Nucl. Acids res. 15: 797 (1987)]. Exploiting these discrimination properties using the described hybridization conditions for short oligonucleotide hybridization allows a very precise determination of oligonucleotide targets. In contrast to the ease of detecting discrimination between perfect and imperfect hybrids, a problem that may exist with using very short oligonucleotides is the preparation of sufficient amounts of hybrids. In practice, the need to discriminate Hp and Hi is aided by increasing the amount of DNA in the dot and/or the probe concentration, or by decreasing the hybridization temperature. However, higher probe concentrations usually increase background. Moreover, there are limits to the amounts of target nucleic acid that are practical to use. This problems was solved by the higher concentration of the detergent Sarcosyl which gave an effective background with 4 nM of probe. Further improvements may be effected either in the use of competitors for unspecific binding of probe to filter, or by changing the hybridization support material. Moreover, for probes having Ea less than 45 Kcal/mol (e.g. for many heptamers and a majority of hexamers, modified oligonucleotides give a more stable hybrid [Asseline, et al., Proc. Nat'l Acad. Sci. 81: 3297 (1984)] than their unmodified counterparts. The hybridization conditions described in this invention for short oligonucleotide hybridization using low temperatures give better discriminating for all sequences and duplex hybrid inputs. The only price paid in achieving uniformity in hybridization conditions for different sequences is an increase in washing time from minutes to up to 24 hours depending on the sequence. Moreover, the washing time can be further reduced by decreasing the salt concentration.

[0307] Although there is excellent discrimination of one matched hybrid over a mismatched hybrids, in short oligonucleotide hybridization, signals from mismatched hybrids exist, with the majority of the mismatch hybrids resulting from end mismatch. This may limit insert sizes that may be effectively examined by a probe of a certain length.

[0308] The influence of sequence complexity on discrimination cannot be ignored. However, the complexity effects are more significant when defining sequence information by short oligonucleotide hybridization for specific, nonrandom sequences, and can be overcome by using an appropriate probe to target length ratio. The length ratio is chosen to make unlikely, on statistical grounds, the occurrence of specific sequences which have a number of end-mismatches which would be able to eliminate or falsely invert discrimination. Results suggest the use of oligonucleotides6, 7, and 8 nucleotides in length on target nucleic acid inserts shorter than 0.6, 2.5, and 10 kb, respectively.

### EXAMPLE 11

[0309] DNA Sequencing

[0310] An array of subarrays allows for efficient sequencing of a small set of samples arrayed in the form of replicated subarrays; For example, 64 samples may be arrayed on a 8×8 mm subarray and 16×24 subarrays may be replicated on a 15×23 cm membrane with 1 mm wide spacers between the subarrays. Several replica membranes may be made. For example, probes from a universal set of three thousand seventy-two 7-mers may be divided in thirty-two 96-well plates and labelled by kinasing. Four membranes may be processed in parallel during one hybridization cycle. On each membrane, 384 probes may be scored. All probes may be scored in two hybridization cycles. Hybridization intensities may be scored and the sequence assembled as described below.

[0311] If a single sample subarray or subarrays contains several unknowns, especially when similar samples are used, a smaller number of probes may be sufficient if they are intelligently selected on the basis of results of previously scored probes. For example, if probe AAAAAAA is not positive, there is a small chance that any of 8 overlapping probes are positive. If AAAAAAA is positive, then two probes are usually positive. The sequencing process in this case consists of first hybridizing a subset of minimally overlapped probes to define positive anchors and then to successively select probes which confirms one of the most likely hypotheses about the order of anchors and size and type of gaps between them. In this second phase, pools of 2-10 probes may be used where each probe is selected to be positive in only one DNA sample which is different from the samples expected to be positive with other probes from the pool.

[0312] The subarray approach allows efficient implementation of probe competition (overlapped probes) or probe cooperation (continuous stacking of probes) in solving branching problems. After hybridization of a universal set of probes the sequence assembly program determines candidate sequence subfragments (SFs). For the further assembly of SFs, additional information has to be provided (from overlapped sequences of DNA fragments, similar sequences, single pass gel sequences, or from other hybridization or restriction mapping data). Competitive hybridization and continuous stacking interactions have been proposed for SF assembly. These approaches are of limited practical value for sequencing of large numbers of samples by SBH wherein a labelled probe is applied to a sample affixed to an array if a uniform array is used. Fortunately, analysis of small numbers of samples using replica subarrays allows efficient implementation of both approaches. On each of the replica subarrays, one branching point may be tested for one or more DNA samples using pools of probes similarly as in solving mutated sequences in different samples spotted in the same subarray (see above).

[0313] If in each of 64 samples described in this example, there are about 100 branching points, and if 8 samples are analyzed in parallel in each subarray, then at least 800 subarray probings solve all branches. This means that for the 3072 basic probings an additional 800 probings (25%) are employed. More preferably, two probings are used for one branching point. If the subarrays are smaller, less additional probings are used. For example, if subarrays consist of 16 samples, 200 additional probings may be scored (6%). By using 7-mer probes (N₁₋₂B₇N₁₋₂) and competitive or collaborative branching solving approaches or both, fragments of about 1000 bp fragments may be assembled by about 4000 probings. Furthermore, using 8-mer probes (NB₈N) 4 kb or longer fragments may be assembled with 12,000 probings. Gapped probes, for example, NB₄NB₃N or NB₄NB₄N may be used to reduce the number of branching points.

### EXAMPLE 12

[0314] DNA Analysis by Transient Attachment to Subarrays of Probes and Ligation of Labelled Probes

[0315] Oligonucleotide probes having an informative length of four to 40 bases are synthesized by standard chemistry and stored in tubes or in multiwell plates. Specific sets of probes comprising one to 10,000 probes are arrayed by deposition or in situ synthesis on separate supports or distinct sections of a larger support. In the last case, sections or subarrays may be separated by physical or hydrophobic barriers. The probe arrays may be prepared by in situ synthesis. A sample DNA of appropriate size is hybridized with one or more specific arrays. Many samples may be interrogated as pools at the same subarrays or independently with different subarrays within one support. Simultaneously with the sample or subsequently, a single labeled probe or a pool of labelled probes is added on each of the subarrays. If attached and labelled probes hybridize back to back on the complementary target in the sample DNA they are ligated. Occurrence of ligation will be measured by detecting a label from the probe.

[0316] This procedure is a variant of the described DNA analysis process in which DNA samples are not permanently attached to the support. Transient attachment is provided by probes fixed to the support. In this case there is no need for a target DNA arraying process. In addition, ligation allows detection of longer oligonucleotide sequences by combining short labelled probes with short fixed probes.

[0317] The process has several unique features. Basically, the transient attachment of the target allows its reuse. After ligation occur the target may be released and the label will stay covalently attached to the support. This feature allows cycling the target and production of detectable signal with a small quantity of the target. Under optimal conditions, targets do not need to be amplified, e.g. natural sources of the DNA samples may be directly used for diagnostics and sequencing purposes. Targets may be released by cycling the temperature between efficient hybridization and efficient melting of duplexes. More preferablly, there is no cycling. The temperature and concentrations of components may be defined to have an equilibrium between free targets and targets entered in hybrids at about 50:50% level. In this case there is a continuous production of ligated products. For different purposes different equilibrium ratios are optimal.

[0318] An electric field may be used to enhance target use. At the beginning, a horizontal field pulsing within each subarray may be employed to provide for faster target sorting. In this phase, the equilibrium is moved toward hybrid formation, and unlabelled probes may be used. After a target sorting phase, an appropriate washing (which may be helped by a vertical electric field for restricting movement of the samples) may be performed. Several cycles of discriminative hybrid melting, target harvesting by hybridization and ligation and removing of unused targets may be introduced to increase specificity. In the next step, labelled probes are added and vertical electrical pulses may be applied. By increasing temperature, an optimal free and hybridized target ratio may be achieved. The vertical electric field prevents diffusion of the sorted targets.

[0319] The subarrays of fixed probes and sets of labelled probes (specially designed or selected from a universal probe set) may be arranged in various ways to allow an efficient and flexible sequencing and diagnostics process. For example, if a short fragment (about 100-500 bp) of a bacterial genome is to be partially or completely sequenced, small arrays of probes (5-30 bases in length) designed on the bases of known sequence may be used. If interrogated with a different pool of 10 labelled probes per subarray, an array of 10 subarrays each having 10 probes, allows checking of 200 bases, assuming that only two bases connected by ligation are scored. Under the conditions where mismatches are discriminated throughout the hybrid, probes may be displaced by more than one base to cover the longer target with the same number of probes. By using long probes, the target may be interrogated directly without amplification or isolation from the rest of DNA in the sample: Also, several targets may be analyzed (screened for) in one sample simultaneously. If the obtained results indicate occurrence of a mutation (or a pathogen), additional pools of probes may be used to detect type of the mutation or subtype of pathogen. This is a desirable feature of the process which may be very cost effective in preventive diagnosis where only a small fraction of patients is expected to have an infection or mutation.

[0320] In the processes described in the examples, various detection methods may be used, for example, radiolabels, fluorescent labels, enzymes or antibodies (chemiluminescence), large molecules or particles detectable by light scattering or interferometric procedures.

### EXAMPLE 13

[0321] Sequencing a Target Using Octamers and Nonamers

[0322] Data resulting from the hybridization of octamer and nonamer oligonucleotides shows that sequencing by hybridization provides an extremely high degree of accuracy. In this experiment, a known sequence was used to predict a series of contiguous overlapping component octamer and nonamer oligonucleotides.

[0323] In addition to the perfectly matching oligonucleotides, mismatch oligonucleotides, mismatch oligonucleotides wherein internal or end mismatches occur in the duplex formed by the oligonucleotide and the target were examined. In these analyses, the lowest practical temperature was used to maximize hybridization formation. Washes were accomplished at the same or lower temperatures to ensure maximal discrimination by utilizing the greater dissociation rate of mismatch versus matched oligonucleotide/targethybridization. These conditions are shown to be applicable to all sequences although the absolute hybridization yield is shown to be sequence dependent.

[0324] The least destabilizing mismatch that can be postulated is a simple end mismatch, so that the test of sequencing by hybridization is the ability to discriminate perfectly matched oligonucleotide/targetduplexes from end-mismatched oligonucleotide/targetduplexes.

[0325] The discriminative values for 102 of 105 hybridizing oligonucleotides in a dot blot format were greater than 2 allowing a highly accurate generation of the sequence. This system also allowed an analysis of the effect of sequence on hybridization formation and hybridization instability.

[0326] One hundred base pairs of a known portion of a human-interferon genes prepared by PCR, i.e. a 100 bp target sequence, was generated with data resulting from the hybridization of 105 oligonucleotides probes of known sequence to the target nucleic acid. The oligonucleotide probes used included 72 octamer and 21 nonamer oligonucleotides whose sequence was perfectly complementary to the target. The set of 93 probes provided consecutive overlapping frames of the target sequence e displaced by one or two bases.

[0327] To evaluate the effect of mismatches, hybridization was examined for 12 additional probes that contained at least one end mismatch when hybridized to the 100 bp test target sequence. Also tested was the hybridization of twelve probes with target end-mismatched to four other control nucleic acid sequences chosen so that the 12 oligonucleotides formed perfectly matched duplex hybrids with the four control DNAs. Thus, the hybridization of internal mismatched, end-mismatched and perfectly matched duplex pairs of oligonucleotide and target were evaluated for each oligonucleotide used in the experiment. The effect of absolute DNA target concentration on the hybridization with the test octamer and nonamer oligonucleotides was determined by defining target DNA concentration by detecting hybridization of a different oligonucleotide probe to a single occurrence non-target site within the co-amplified plasmid DNA.

[0328] The results of this experiment showed that all oligonucleotides containing perfect matching complementary sequence to the target or control DNA hybridized more strongly than those oligonucleotides having mismatches. To come to this conclusion, we examined Hₚ and D values for each probe. Hₚ defines the amount of hybrid duplex formed between a test target and an oligonucleotide probe. By assigning values of between 0 and 10 to the hybridization obtained for the 105 probes, it was apparent that 68.5% of the 105 probes had an Hₚ greater than 2.

[0329] Discrimination (D) values were obtained where D was defined as the ratio of signal intensities between 1) the dot containing a perfect matched duplex formed between test oligonucleotide and target or control nucleic acid and 2) the dot containing a mismatch duplex formed between the same oligonucleotide and a different site within the target or control nucleic acid. Variations in the value of D result from either 1) perturbations in the hybridization efficiency which allows visualization of signal over background, or 2) the type of mismatch found between the test oligonucleotide and the target. The D values obtained in this experiment were between 2 and 40 for 102 of the 105 oligonucleotide probes examined. Calculations of D for the group of 102 oligonucleotides as a whole showed the average D was 10.6.

[0330] There were 20 cases where oligonucleotide/targetduplexes exhibited an end-mismatch. In five of these, D was greater than 10. The large D value in these cases is most likely due to hybridization destabilization caused by other than the most stable (G/T and G/A) end mismatches. The other possibility is there was an error in the sequence of either the oligonucleotides or the target.

[0331] Error in the target for probes with low Hₚ was excluded as a possibility because such an error would have affected the hybridization of each of the other eight overlapping oligonucleotides. There was no apparent instability due to sequence mismatch for the other overlapping oligonucleotides, indicating the target sequence was correct. Error in the oligonucleotide sequence was excluded as a possibility after the hybridization of seven newly synthesized oligonucleotides was re-examined. Only 1 of the seven oligonucleotides resulted in a better D value. Low hybrid formation values may result from hybrid instability or from an inability to form hybrid duplex. An inability to form hybrid duplexes would result from either 1) self complementarity of the chosen probe or 2) target/target self hybridization. Oligonucleotide/oligonucleotideduplex formation may be favored over oligonucleotide/targethybrid duplex formation if the probe was self-complementary. Similarly, target/target association may be favored if the target was self-complementary or may form internal palindromes. In evaluating these possibilities, it was apparent from probe analysis that the questionable probes did not form hybrids with themselves. Moreover, in examining the contribution of target/targethybridization, it was determined that one of the questionable oligonucleotide probes hybridized inefficiently with two different DNAs containing the same target. The low probability that two different DNAs have a self-complementary region for the same target sequence leads to the conclusion that target/target hybridization did not contribute to low hybridization formation. Thus, these results indicate that hybrid instability and not the inability to form hybrids was the cause of the low hybrid formation observed for specific oligonucleotides. The results also indicate that low hybrid formation is due to the specific sequences of certain oligonucleotides. Moreover, the results indicate that reliable results may be obtained to generate sequences if octamer and nonamer oligonucleotides are used.

[0332] These results show that using the methods described long sequences of any specific target nucleic acid may be generated by maximal and unique overlap of constituent oligonucleotides. Such sequencing methods are dependent on the content of the individual component oligomers regardless of their frequency and their position.

[0333] The sequence which is generated using the algorithm described below is of high fidelity. The algorithm tolerates false positive signals from the hybridization dots as is indicated from the fact the sequence generated from the 105 hybridization values, which included four less reliable values, was correct. This fidelity in sequencing by hybridization is due to the “all or none” kinetics of short oligonucleotide hybridization and the difference in duplex stability that exists between perfectly matched duplexes and mismatched duplexes. The ratio of duplex stability of matched and end-mismatched duplexes increases with decreasing duplex length. Moreover, binding energy decreases with decreasing duplex length resulting in a lower hybridization efficiency. However, the results provided show that octamer hybridization allows the balancing of the factors affecting duplex stability and discrimination to produce a highly accurate method of sequencing by hybridization. Results presented in other examples show that oligonucleotides that are 6, 7, or 8 nucleotides can be effectively used to generate reliable sequence on targets that are 0.5 kb (for hexamers) 2 kb (for septamers) and 6 kb (for octamers). The sequence of long fragments may be overlapped to generate a complete genome sequence.

### EXAMPLE 14

[0334] Analyzing the Data Obtained

[0335] Image files are analyzed by an image analysis program, like DOTS program (Drmanac et al., 1993), and scaled and evaluated by statistical functions included, e.g., in SCORES program (Drmanac et al 1994). From the distribution of the signals an optimal threshold is determined for transforming signal into +/− output. From the position of the label detected, F+P nucleotide sequences from the fragments would be determined by combining the known sequences of the immobilized and labeled probes corresponding to the labeled positions. The complete nucleic acid sequence or sequence subfragments of the original molecule, such as a human chromosome, would then be assembled from the overlapping F+P sequence determined by computational deduction.

[0336] One option is to transform hybridization signals e.g., scores, into +/− output during the sequence assembly process. In this case, assembly will start with a F+P sequence with a very high score, for example F+P sequence AAAAAATTTTTT (SEQ ID NO.: 38,046). Scores of all four possible overlapping probes AAAAATTTTTTA (SEQ ID NO.: 38,047), AAAAATTTTTT (SEQ ID NO.: 38,048), AAAAATTTTTTC (SEQ ID NO.: 38,049), and AAAAATTTTTTG (SEQ ID NO.: 38,050), and three additional probes that are different at the beginning TAAAAATTTTTT (SEQ ID NO.: 38,051), CAAAAATTTTTT (SEQ ID NO.: 38,052), GAAAAATTTTTT (SEQ ID NO.: 38,053), are compared and three outcomes defined: (i) only the starting probe and only one of the four overlapping proves have scores that are significantly positive relatively to the other six probes, in this case the AAAAAATTTTTT (SEQ ID NO.: 38,046) sequence will be extended for one nucleotide to the right; (ii) no one probe except the starting probe has a significantly positive score, assembly will stop, e.g., the AAAAAATTTTT (SEQ ID NO.: 38,054) sequence is at the end of the DNA molecule that is sequenced; (iii) more than one significantly positive probe among the overlapped and/or other three probes is found; assembly is stopped because of the error or branching (Drmanac et al, 1989). The processes of computational deduction would employ computer programs using existing algorithms (see, e.g., Pevzner, 1989; Drmanac et al., 1991; Labat and Drmanac, 1993; each incorporated herein by reference).

[0337] If, in addition to F+P, F (space 1)P, F (space 2)P, F(space 3)P or F(space 4)P are determined, algorithms will be used to match all data sets to correct potential errors or to solve the situation where there is a branching problem (see, e.g., Drmanac et al., 1989; Bains et al., 1988; each incorporated herein by reference).

### EXAMPLE 15

[0338] Conducting Sequencing by Two Step Hybridization

[0339] Following the certain examples to describe the execution of the sequencing methodology contemplated by the inventor. First, the whole chip would be hybridized with mixture of DNA as complex as 100 million of bp (one human chromosome). Guidelines for conducting hybridization can be found in papers such as Drmanac et al. (1990); Khrapko et al. (1991); and Broude et al. (1994). These articles teach the ranges of hybridization temperatures, buffers and washing steps that are appropriate for use in the initial steps of Format 3 SBH.

[0340] The present inventor particularly contemplates that hybridization is to be carried out for up to several hours in high salt concentrations at a low temperature (−2° C. to 5° C.) because of a relatively low concentration of target DNA that can be provided. For this purpose, SSC buffer is used instead of sodium phosphate buffer (Drmanac et al, 1990), which precipitates at 10° C. Washing does not have to be extensive (a few minutes) because of the second step, and can be completely eliminated when the hybridization cycling is used for the sequencing of highly complex DNA samples. The same buffer is used for hybridization and washing steps to be able to continue with the second hybridization step with labeled probes.

[0341] After proper washing using a simple robotic device on each array, e.g., a 8×8 mm array, one labeled, probe, e.g., a 6-mer, would be added. A 96-tip or 96-pin device would be used, performing this in 42 operations. Again, a range of discriminatory conditions could be employed, as previously described in the scientific literature.

[0342] The present inventor particularly contemplates the use of the following conditions. First, after adding labeled probes and incubating for several minutes only (because of the high concentration of added oligonucleotides)at a low temperature (0-5° C.), the temperature is increased to 3-10° C., depending on F+P length, and the washing buffer is added. At this time, the washing buffer used is one compatible with any ligation reaction (e.g., 100 mM salt concentration range). After adding ligase, the temperate is increased again to 15-37° C. to allow fast ligation (less than 30 min) and further discrimination of full match and mismatch hybrids.

[0343] The use of cationic detergents is also contemplated for use in Format 3 SBH, as described by Pontius & Berg (1991, incorporated herein by reference). These authors describe the use of two simple cationic detergents, dodecy- and cetyltrimethylammonium bromide (DTAB and CTAB) in DNA renaturation.

[0344] DTAB and CTAB are variants of the quaternary amine tetramethylammonium bromide (TMAB) in which one of the methyl groups is replaced by either a 12-carbon (DTAB) or a 16-carbon (CTAB) alkyl group. TMAB is the bromide salt of the tetrarnethylammoniumion, a reagent used in nucleic acid renaturation experiments to decrease the G-C content bias of the melting temperature. DTAB and CTAB are similar in structure to sodium dodecyl sulfate (SDS), with the replacement of the negatively charged sulfate of SDS by a positively charged quaternary amine. While SDS is commonly used-in hybridization buffers to reduce nonspecific binding and inhibit nucleases, it does not greatly affect the rate of renaturation.

[0345] When using a ligation process, the enzyme could be added with the labeled probes or after the proper washing step to reduce the background. Although not previously proposed for use in any SBH method, ligase technology is well established within the field of molecular biology. For example, Hood and colleagues described a ligase-mediated gene detection technique (Landegren et al., 1988), the methodology of which can be readily adapted for use in Format 3 SBH. Wu & Wallace also describe the use of bacteriophage T4 DNA ligase to join two adjacent, short synthetic olignucleotides. Their oligo ligation reactions were carried out in 50 mM Tris HCl pH 7.6, 10 mM MgCl₂, 1 MM ATP, 1 mM DTT, and 5% PEG. Ligation reactions were heated to 100° C. for 5-10 min followed by cooling to 0° C. prior to the addition of T4 DNA ligase (1 unit; Bethesda Research Laboratory). Most ligation reactions were carried out at 30° C. and terminated by heating to 100° C. for 5 min.

[0346] Final washing appropriate for discriminating detection of hybridized adjacent, or ligated, oligonucleotides of length (F+P), is then performed. This washing step is done in water for several minutes at 40-60° C. to wash out all the non-ligated labeled probes, and all other compounds, to maximally reduce background. Because of the covalently bound labeled oligonucleotides, detection is simplified (it does not have time and low temperature constrains).

[0347] Depending on the label used, imaging of the chips is done with different apparati. For radioactive labels, phosphor storage screen technology and PhosphorImager as a scanner may be used (Molecular Dynamics, Sunnyvale, Calif.). Chips are put in a cassette and covered by a phosphorous screen. After 1-4 hours of exposure, the screen is scanned and the image file stored at a computer hard disc. For the detection of fluorescent labels, CCD cameras and epifluorescent or confocal microscopy are used. For the chips generated directly on the pixels of a CCD camera, detection can be performed as described by Eggers et al. (1994, incorporated herein by reference).

[0348] Charge-coupled device (CCD) detectors serve as active solid supports that quantitatively detect and image the distribution of labeled target molecules in probe-based assays. These devices use the inherent characteristics of microelectronics that accommodate highly parallel assays, ultrasensitive detection, high throughput, integrated data acquisition and computation. Eggers et al. (1994) describe CCDs for use with probe-based assays, such as Format 3 SBH of the present invention, that allow quantitative assessment within seconds due to the high sensitivity and direct coupling employed.

[0349] The integrated CCD detection approach enables the detection of molecular binding events on chips. The detector rapidly generates a two-dimensional pattern that uniquely characterizes the sample. In the specific operation of the CCD-based molecular detector, distinct biological probes are immobilized directly on the pixels of a CCD or can be attached to a disposable cover slip placed on the CCD surface. The sample molecules can be labeled with radioisotope, chemiluminescent or fluorescent tags.

[0350] Upon exposure of the sample to the CCD-based probe array, photons or radioisotope decay products are emitted at the pixel locations where the sample has bound, in the case of Format 3, to two complementary probes. In turn, electron-hole pairs are generated in the silicon when the charged particles, or radiation from the labeled sample, are incident on the CCD gates. Electrons are then collected beneath adjacent CCD gates and sequentially read out on a display module. The number of photoelectrons generated at each pixel is directly proportional to the number of molecular binding events in such proximity. Consequently, molecular binding can be quantitatively determined (Eggers et al., 1994).

[0351] By placing the imaging array in proximity to the sample, the collection efficiency is improved by a factor of at least 10 over lens-based techniques such as those found in conventional CCD cameras. That is, the sample (emitter) is in near contact with the detector (imaging array), and this eliminates conventional imaging optics such as lenses and mirrors.

[0352] When radioisotopes are attached as reporter groups to the target molecules, energetic particles are detected. Several reporter groups that emit particles of varying energies have been successfully utilized with the micro-fabricated detectors, including ³²P, ³³P, ³⁵S, ¹⁴C and ¹²⁵L. The higher energy particles, such as from ³²P, provide the highest molecular detection sensitivity, whereas the lower energy particles, such as from ³⁵ S, provide better resolution. Hence the choice of the radioisotope reporter can be tailored as required. Once the particular radioisotope label is selected, the detection performance can be predicted by calculating the signal-to-noise ration (SNR), as described by Eggers et al. (1994).

[0353] An alternative luminescent detection procedure involves the use of fluorescent or chemiluminescent reporter groups attached to the target molecules. The fluorescent labels can be attached covalently or through interaction. Fluorescent dyes, such as ethidium bromide, with intense absorption bands in the near UV (300-350 nm) range and principal emission bands in the visible (500-650 nm) range, are most suited for the CCD devices employed since the quantum efficiency is several orders of magnitude lower at the excitation wavelength then at the fluorescent signal wavelength.

[0354] From the perspective of detecting luminescence, the polysilicon CCD gates have the built-in capacity to filter away the contribution of incident light in the UV range, yet are very sensitive to the visible luminescence generated by the fluorescent reporter groups. Such inherently large discrimination against UV excitation enables large SNRs (greater than 100) to be achieved by the CCDs as formulated in the incorporated paper by Eggers et al (1994).

[0355] For probe immobilization on the detector, hybridization matrices may be produced on inexpensive SiO₂ wafers, which are subsequently placed on the surface of the CCD following hybridization and drying. This format is economically efficient since the hybridization of the DNA is conducted on inexpensive disposable SiO₂ wafers, thus allowing reuse of the more expensive CCD detector. Alternatively, the probes can be immobilized directly on the CCD to create a dedicated probe matrix.

[0356] To immobilize probes upon the SiO₂ coating, a uniform epoxide layer is linked to the film surface, employing an epoxy-silane reagent and standard SiO₂ modification chemistry. Amine-modified oligonucleotide probes are then linked to the SiO₂ surface by means of secondary amine formation with the epoxide ring. The resulting linkage provides 17 rotatable bonds of separation between the 3 base of the oligonucleotide and the SiO₂ surface. To ensure complete amine deprotonation and to minimize secondary structure formation during coupling, the reaction is performed in 0.1 M KOH and incubated at 37° C. for 6 hours.

[0357] In Format 3 SBH in general, signals are scored per each of billion points. It would not be necessary to hybridize all arrays, e.g., 4000 5×5 mm, at a time and the successive use of smaller number of arrays is possible.

[0358] Cycling hybridizations are one possible method for increasing the hybridization signal. In one cycle, most of the fixed probes will hybridize with DNA fragments with tail sequences non-complementary for labeled probes. By increasing the temperature, those hybrids will be melted. In the next cycle, some of them (˜0.1%) will hybridize with an appropriate DNA fragment and additional labeled probes will be ligated. In this case, there occurs a discriminative melting of DNA hybrids with mismatches for both probe sets simultaneously.

[0359] In the cycle hybridization, all components are added before the cycling starts, at the 37° C. for T4, or a higher temperature for a thermostable ligase. Then the temperature is decreased to 15-37° C. and the chip is incubated for up to 10 minutes, and then the temperature is increased to 37° C. or higher for a few minutes and then again reduced. Cycles can be repeated up to 10 times. In one variant, an optimal higher temperature (10-50° C.) can be used without cycling and longer ligation reaction can be performed (1-3 hours).

[0360] The procedure described herein allows complex chip manufacturing using standard synthesis and precise spotting of oligonucleotides because a relatively small number of oligonucleotides are necessary. For example, if all 7-mer oligos are synthesized(16384 probes), lists of 256 million 14-mers can be determined.

[0361] One important variant of the invented method is to use more than one differently labeled probe per base array. This can be executed with two purposes in mind; multiplexing to reduce number of separately hybridized arrays; or to determine a list of even longer oligosequences such as 3×6 or 3×7. In this case, if two labels are used, the specificity of the 3 consecutive oligonucleotides can be almost absolute because positive sites must have enough signals of both labels.

[0362] A further and additional variant is to use chips containing BxNy probes with y being from 1 to 4. Those chips allow sequence reading in different frames. This can also be achieved by using appropriate sets of labeled probes or both F and P probes could have some unspecified end positions (i.e., some element of terminal degeneracy). Universal bases may also be employed as part of a linker to join the probes of defined sequence to the solid support. This makes the probe more available to hybridization and makes the construct more stable. If a probe has 5 bases, one may, e.g., use 3 universal bases as a linker.

### EXAMPLE 16

[0363] Determining Sequence from Hybridization Data

[0364] Sequence assembly may be interrupted where ever a given overlapping (N−1) mer is duplicated two or more times. Then either of the two N-mers differing in the last nucleotide may be used in extending the sequence. This branching point limits unambiguous assembly of sequence.

[0365] Reassembling the sequence of known oligonucleotides that hybridize to the target nucleic acid to generate the complete sequence of the target nucleic acid may not be accomplished in some cases. This is because some information may be lost if the target nucleic acid is not in fragments of appropriate size in relation to the size of oligonucleotide that is used for hybridizing. The quantity of information lost is proportional to the length of a target being sequenced. However, if sufficiently short targets are used, their sequence msy be unambiguously determined.

[0366] The probable frequency of duplicated sequences that would interfere with sequence assembly which is distributed along a certain length of DNA may be calculated. This derivation requires the introduction of the definition of a parameter having to do with sequence organization: the sequence subfragment (SF). A sequence subfragment results if any part of the sequence of a target nucleic acid starts and ends with an (N−1)mer that is repeated two or more times within the target sequence. Thus, subfragments are sequences generated between two points of branching in the process of assembly of the sequences in the method of the invention. The sum of all subfragments is longer than the actual target nucleic acid because of overlapping short ends. Generally, subfragments may not be assembled in a linear order without additional information since they have shared (N−1)mers at their ends and starts. Different numbers of subfragments are obtained for each nucleic acid target depending on the number of its repeated (N−1) mers. The number depends on the value of N−1 and the length of the target.

[0367] Probability calculations can estimate the interrelationship of the two factors. If the ordering of positive N-mers is accomplished by using overlapping sequences of length N−1 or at an average distance of Aₒ, the N−1 of a fragment Lf bases long is given by equation one:

N_{sf}=1+Aₒ×K×P(K, L_{f})

[0368] Where K greater than or=2, and P (K, L_{f}) represents the probability of an N-mer occurring K-times on a fragment L_{f} base long. Also, a computer program that is able to form subfragments from the content of N-mers for any given sequence is described below in Example 18.

[0369] The number of subfragments increases with the increase of lengths of fragments for a given length of probe. Obtained subfragments may not be uniquely ordered among themselves. Although not complete, this information is very useful for comparative sequence analysis and the recognition of functional sequence characteristics. This type of information may be called partial sequence. Another way of obtaining partial sequence is the use of only a subset of oligonucleotide probes of a given length.

[0370] There may be relatively good agreement between predicted sequence according to theory and a computer simulation for a random DNA sequence. For instance, for N−1=7, [using an 8-mer or groups of sixteen 10-mers of type 5′ (A,T,C,G) B₈ (A,T,C,G) 3′] a target nucleic acid of 200 bases will have an average of three subfragments. However, because of the dispersion around the mean, a library of target nucleic acid should have inserts of 500 bp so that less than 1 in 2000 targets have more than three subfragments. Thus, in an ideal case of sequence determination of a long nucleic acid of random sequence, a representative library with sufficiently short inserts of target nucleic acid may be used. For such inserts, it is possible to reconstruct the individual target by the method of the invention. The entire sequence of a large nucleic acid is then obtained by overlapping of the defined individual insert sequences.

[0371] To reduce the need for very short fragments, e.g. 50 bases for 8-mer probes. The information contained in the overlapped fragments present in every random DNA fragmentation process like cloning, or random PCR is used. It is also possible to use pools of short physical nucleic acid fragments. Using 8-mers or 11-mers like 5′ (A, T, C, G) N₈ (A, T, C, G)3′ for sequencing 1 megabase, instead of needing 20,000 50 bp fragments only 2,100 samples are sufficient. This number consists of 700 random 7 kb clones (basic library), 1250 pools of 20 clones of 500 bp (subfragments ordering library) and 150 clones from jumping (or similar) library. The developed algorithm (see Example 18) regenerates sequence using hybridization data of these described samples.

### EXAMPLE 17

[0372] Algorithm

[0373] This example describes an algorithm for generation of a long sequence written in a four letter alphabet from constituent k-tuple words in a minimal number of separate, randomly defined fragments of a starting nucleic acid sequence where K is the length of an oligonucleotide probe. The algorithm is primarily intended for use in the sequencing by hybridization (SBH) process. The algorithm is based on subfragments (SF), informative fragments (IF) and the possibility of using pools of physical nucleic sequences for defining informative fragments.

[0374] As described, subfragments may be caused by branch points in the assembly process resulting from the repetition of a K−1 oligomer sequence in a target nucleic acid. Subfragments are sequence fragments found between any two repetitive words of the length K−1 that occur in a sequence. Multiple occurrences of K−1 words are the cause of interruption of ordering the overlap of K-words in the process of sequence generation. Interruption leads to a sequence remaining in the form of subfragments. Thus, the unambiguous segments between branching points whose order is not uniquely determined are called sequence subfragments.

[0375] Informative fragments are defined as fragments of a sequence that are determined by the nearest ends of overlapped physical sequence fragments.

[0376] A certain number of physical fragments may be pooled without losing the possibility of defining informative fragments. The total length of randomly pooled fragments depends on the length of k-tuples that are used in the sequencing process.

[0377] The algorithm consists of two main units. The first part is used for generation of subfragments from the set of k-tuples contained in a sequence. Subfragments may be generated within the coding region of physical nucleic acid sequence of certain sizes, or within the informative fragments defined within long nucleic acid sequences. Both types of fragments are members of the basic library. This algorithm does not describe the determination of the content of the k-tuples of the informative fragments of the basic library, i.e. the step of preparation of informative fragments to be used in the sequence generation process.

[0378] The second part of the algorithm determines the linear order of obtained subfragments with the purpose of regenerating the complete sequence of the nucleic acid fragments of the basic library. For this purpose a second, ordering library is used, made of randomly pooled fragments of the starting sequence. The algorithm does not include the step of combining sequences of basic fragments to regenerate an entire, megabase plus sequence. This may be accomplished using the link-up of fragments of the basic library which is a prerequisite for informative fragment generation. Alternatively, it may be accomplished after generation of sequences of fragments of the basic library by this algorithm, using search for their overlap, based on the presence of common end-sequences.

[0379] The algorithm requires neither knowledge of the number of appearances of a given k-tuple in a nucleic acid sequence of the basic and ordering libraries, nor does it require the information of which k-tuple words are present on the ends of a fragment. The algorithm operates with the mixed content of k-tuples of various length. The concept of the algorithm enables operations with the k-tuple sets that contain false positive and false negative k-tuples. Only in specific cases does the content of the false k-tuples primarily influence the completeness and correctness of the generated sequence. The algorithm may be used for optimization of parameters in simulation experiments, as well as for sequence generation in the actual SBH experiments e.g. generation of the genomic DNA sequence. In optimization of parameters, the choice of the oligonucleotide probes (k-tuples) for practical and convenient fragments and/or the choice of the optimal lengths and the number of fragments for the defined probes are especially important.

[0380] This part of the algorithm has a central role in the process of the generation of the sequence from the content of k-tuples. It is based on the unique ordering of k-tuples by means of maximal overlap. The main obstacles in sequence generation are specific repeated sequences and false positive and/or negative k-tuples. The aim of this part of the algorithm is to obtain the minimal number of the longest possible subfragments, with correct sequence. This part of the algorithm consists of one basic, and several control steps. A two-stage process is necessary since certain information can be used only after generation of all primary subfragments.

[0381] The main problem of sequence generation is obtaining a repeated sequence from word contents that by definition do not carry information on the number of occurrences of the particular k-tuples. The concept of the entire algorithm depends on the basis on which this problem is solved. In principle, there are two opposite approaches: 1) repeated sequences may be obtained at the beginning, in the process of generation of pSFs, or 2) repeated sequences can be obtained later, in the process of the final ordering of the subfragments. In the first case, pSFs contain an excess of sequences and in the second case, they contain a deficit of sequences. The first approach requires elimination of the excess sequences generated, and the second requires permitting multiple use of some of the subfragments in the process of the final assembling of the sequence.

[0382] The difference in the two approaches in the degree of strictness of the rule of unique overlap of k-tuples. The less severe rule is: k-tuple X is unambiguously maximally overlapped with k-tuple Y if and only if, the rightmost k−1 end of k-tuple X is present only on the leftmost end of k-tuple Y. This rule allows the generation of repetitive sequences and the formation of surplus sequences.

[0383] A stricter rule which is used in the second approach has an addition caveat: k-tuple X is unambiguously maximally overlapped with k-tuple Y if and only if, the rightmost K−1 end of k-tuple X is present only on the leftmost end of k-tuple Y and if the leftmost K-1 end of k-tuple Y is not present on the rightmost end of any other k-tuple. The algorithm based on the stricter rule is simpler, and is described herein.

[0384] The process of elongation of a given subfragment is stopped when the right k−1 end of the last k-tuple included is not present on the left end of any k-tuple or is present on two or more k-tuples. If it is present on only one k-tuple the second part of the rule is tested. If in addition there is a k-tuple which differs from the previously included one, the assembly of the given subfragment is terminated only on the first leftmost position. If this additional k-tuple does not exist, the conditions are met for unique k−1 overlap and a given subfragment is extended to the right by one element.

[0385] Beside the basic rule, a supplementary one is used to allow the usage of k-tuples of different lengths. The maximal overlap is the length of k−1 of the shorter k-tuple of the overlapping pair. Generation of the pSFs is performed starting from the first k-tuple from the file in which k-tuples are displayed randomly and independently from their order in a nucleic acid sequence. Thus, the first k-tuple in the file is not necessarily on the beginning of the sequence, nor on the start of the particular subfragment. The process of subfragment generation is performed by ordering the k-tuples by means of unique overlap, which is defined by the described rule. Each used k-tuple is erased from the file. At the point when there are no further k-tuples unambiguously overlapping with the last one included, the building of subfragment is terminated and the buildup of another pSF is started. Since generation of a majority of subfragments does not begin from their actual starts, the formed pSF are added to the k-tuple file and are considered as a longer k-tuple. Another possibility is to form subfragments going in both directions from the starting k-tuple. The process ends when further overlap, i.e. the extension of any of the subfragments, is not possible.

[0386] The pSFs can be divided in three groups: 1) Subfragments of the maximal length and correct sequence in cases of exact k-tuple set; 2) short subfragments, formed due to the used of the maximal and unambiguous overlap rule on the incomplete set, and/or the set with some false positive k-tuples; and 3) pSFs of an incorrect sequence. The incompleteness of the set in 2) is caused by false negative results of a hybridization experiment, as well as by using an incorrect set of k-tuples. These are formed due to the false positive and false negative k-tuples and can be: a) misconnected subfragments; b) subfragments with the wrong end; and c) false positive k-tuples which appears as false minimal subfragments.

[0387] Considering false positive k-tuples, there is the possibility for the presence of a k-tuple containing more than one wrong base or containing one wrong base somewhere in the middle, as well as the possibility for a k-tuple with a wrong base on the end. Generation of short, erroneous or misconnected subfragments is caused by the latter k-tuples. The k-tuples of the former two kinds represent wrong pSFs with length equal to k-tuple length.

[0388] In the case of one false negative k-tuple, pSFs are generated because of the impossibility of maximal overlapping. In the case of the presence of one false positive k-tuple with the wrong base on its leftmost or rightmost end, pSFs are generated because of the impossibility of unambiguous overlapping. When both false positive and false negative k-tuples with a common k−1 sequence are present in the file, pSFs are generated, and one of these pSFs contains the wrong k-tuple at the relevant end.

[0389] The process of correcting subfragments with errors in sequence and the linking of unambiguously connected pSF is performed after subfragment generation and in the process of subfragment ordering. The first step which consists of cutting the misconnected pSFs and obtaining the final subfragments by unambiguous connection of pSFs is described below.

[0390] There are two approaches for the formation of misconnected subfragments. In the first a mistake occurs when an erroneous k-tuple appears on the points of assembly of the repeated sequences of lengths k−1. In the second, the repeated sequences are shorter than k−1. These situations can occur in two variants each. In the first variant, one of the repeated sequences represents the end of a fragment. In the second variant, the repeated sequence occurs at any position within the fragment. For the first possibility, the absence of some k-tuples from the file (false negatives) is required to generate a misconnection. The second possibility requires the presence of both false negative and false positive k-tuples in the file. Considering the repetitions of k−1 sequence, the lack of only one k-tuple is sufficient when either end is repeated internally. The lack of two is needed for strictly internal repetition. The reason is that the end of a sequence can be considered informatically as an endless linear array of false negative k-tuples. From the “smaller than k−1 case”, only the repeated sequence of the length of k−2, which requires two or three specific erroneous k-tuples, will be considered. It is very likely that these will be the only cases which will be detected in a real experiment, the others being much less frequent.

[0391] Recognition of the misconnected subfragments is more strictly defined when a repeated sequence does not appear at the end of the fragment. In this situation, one can detect further two subfragments, one of which contains on its leftmost, and the other on its rightmost end k−2 sequences which are also present in the misconnected subfragment. When the repeated sequence is on the end of the fragment, there is only one subfragment which contains k−2 sequence causing the mistake in subfragment formation on its leftmost or rightmost end.

[0392] The removal of misconnected subframents by their cutting is performed according to the common rule: If the leftmost or rightmost sequence of the length of k−2 of any subfragments is present in any other subfragment, the subfragment is to be cut into two subfragments, each of them containing k−2 sequence. This rule does not cover rarer situations of a repeated end when there are more than one false negative k-tuple on the point of repeated k−1 sequence. Misconnected subfragments of this kind can be recognized by using the information from the overlapped fragments, or informative fragments of both the basic and ordering libraries. In addition, the misconnected subfragment will remain when two or more false negative k-tuples occur on both positions which contain the identical k−1 sequence. This is a very rare situation since it requires at least 4 specific false k-tuples. An additional rule can be introduced to cut these subfragments on sequences of length k if the given sequence can be obtained by combination of sequences shorter than k−2 from the end of one subfragment and the start of another.

[0393] By strict application of the described rule, some completeness is lost to ensure the accuracy of the output. Some of the subfragments will be cut although they are not misconnected since they fit into the pattern of a misconnected subfragment. There are several situations of this kind. For example, a fragment, beside at least two identical k−1 sequences, contains any k−2 sequence from k−1 or a fragment contains k−2 sequence repeated at least twice and at least one false negative k-tuple containing given k−2 sequence in the middle, etc.

[0394] The aim of this part of the algorithm is to reduce the number of pSFs to a minimal number of longer subfragments with correct sequence. The generation of unique longer subfragments or a complete sequence is possible in two situations. The first situation concerns the specific order of repeated k−1 words. There are cases in which some or all maximally extended pSFs (the first group of pSFs) can be uniquely ordered. For example, in fragment S-R1-a-R2-b-R1-c-R2-E where S and E are the start and end of a fragment, a, b and c are different sequences specific to respective subfragments and R1 and R2 are two k−1 sequences that are tandemly repeated, five subfragments are generated (S-R1, R1-a-R2, R2-b-R1, R1-c-R2, and R-E). They may be ordered in two ways; the original sequence above or S-R1-c-R-b-R1-a-R-E. In contrast, in a fragment with the same number and types of repeated sequences but ordered differently, i.e. S-R1-a-R1-b-R-c-R-E, there is no other sequence which includes all subfragments. Examples of this type can be recognized only after the process of generation of pSFs. They represent the necessity for two steps in the process of pSF generation. The second situation of generation of false short subfragments on positions of nonrepeated k−1 sequences when the files contain false negative and/or positive k-tuples is more important.

[0395] The solution for both pSF groups consists of two parts. First, the false positive k-tuples appearing as the nonexisting minimal subfragments are eliminated. All k-tuple subfragments of length k which do not have an overlap on either end, of the length of longer than k−a on one end and longer than k−b on the other end, are eliminated to enable formation of the maximal number of connections. In our experiments, the values for a and b of 2 and 3, respectively, appeared to be adequate to eliminate a sufficient number of false positive k-tuples.

[0396] The merging of subfragments that can be uniquely connected is accomplished in the second step. The rule for connection is: two subfragments may be unambiguously connected if, and only if, the overlapping sequence at the relevant end or start of two subfragments is not present at the start and/or end of any other subfragment.

[0397] The exception is if one subfragment from the considered pair has the identical beginning and end. In that case connection is permitted, even if there is another subfragment with the same end present in the file. The main problem here is the precise definition of overlapping sequence. The connection is not permitted if the overlapping sequence unique for only one pair of subfragments is shorter than k−2, of it is k−2 or longer but an additional subfragment exists with the overlapping sequence of any length longer than k−4. Also, both the canonical ends of pSFs and the ends after omitting one (or few) last bases are considered as the overlapping sequences.

[0398] After this step some false positive k-tuples (as minimal subfragments) and some subfragments with a wrong end may survive. In addition, in very rare occasions where a certain number of some specific false k-tuples are simultaneously present, an erroneous connection may take place. These cases will be detected and solved in the subfragment ordering process, and in the additional control steps along with the handling of uncut “misconnected” subfragments.

[0399] The short subfragments that are obtained are of two kinds. In the common case, these subfragments may be unambiguously connected among themselves because of the distribution of repeated k−1 sequences. This may be done after the process of generation of pSFs and is a good example of the necessity for two steps in the process of pSF generation.

[0400] In the case of using the file containing false positive and/or false negative k-tuples, short pSFs are obtained on the sites of nonrepeated k−1 sequences. Considering false positive k-tuples, a k-tuple may contain more than one wrong base (or containing one wrong base somewhere in the middle), as well as k-tuple on the end. Generation of short and erroneous (or misconnected) subfragments is caused by the latter k-tuples. The k-tuples of the former kind represent wrong pSFs with length equal to k-tuple length.

[0401] The aim of merging pSF part of the algorithm is the reduction of the number of pSFs to the minimal number of longer subfragments with the correct sequence. All k-tuple subfragments that do not have an overlap on either end, of the length of longer than k−a on one, and longer than k−b on the other end, are eliminated to enable the maximal number of connections. In this way, the majority of false positive k-tuples are discarded. The rule for connection is: two subfragments can be unambiguously connected if, and only if the overlapping sequence of the relevant end or start of two subfragments is not present on the start and/or end of any other subfragment. The exception is a subfragment with the identical beginning and end. In that case connection is permitted, provided that there is another subfragment with the same end present in the file. The main problem here is of precise definition of overlapping sequence. The presence of at least two specific false negative k-tuples on the points of repetition of k−1 or k−2 sequences, as well as combining of the false positive and false negative k-tuples may destroy or “mask” some overlapping sequences and can produce an unambiguous, but wrong connection of pSFs. To prevent this, completeness must be sacrificed on account of exactness: the connection is not permitted on the end-sequences shorter than k−2, and in the presence of an extra overlapping sequence longer than k−4. The overlapping sequences are defined from the end of the pSFs, or omitting one, or few last bases.

[0402] In the very rare situations, with the presence of a certain number of some specific false positive and false negative k-tuples, some subfragments with the wrong end can survive, some false positive k-tuples (as minimal subfragments) can remain, or the erroneous connection can take place. These cases are detected and solved in the subfragments ordering process, and in the additional control steps along with the handling of uncut, misconnected subfragments.

[0403] The process of ordering of subfragments is similar to the process of their generation. If one considers subfragments as longer k-tuples, ordering is performed by their unambiguous connection via overlapping ends. The informational basis for unambiguous connection is the division of subfragments generated in fragments of the basic library into groups representing segments of those fragments. The method is analogous to the biochemical solution of this problem based on hybridization with longer oligonucleotides with relevant connecting sequence. The connecting sequences are generated as subfragments using the k-tuple sets of the appropriate segments of basic library fragments. Relevant segments are defined by the fragments of the ordering library that overlap with the respective fragments of the basic library. The shortest segments are informative fragments of the ordering library. The longer ones are several neighboring informative fragments or total overlapping portions of fragments corresponding of the ordering and basic libraries. In order to decrease the number of separate samples, fragments of the ordering library are randomly pooled, and the unique k-tuple content is determined.

[0404] By using the large number of fragments in the ordering library very short segments are generated, thus reducing the chance of the multiple appearance of the k−1 sequences which are the reasons for generation of the subfragments. Furthermore, longer segments, consisting of the various regions of the given fragment of the basic library, do not contain some of the repeated k−1 sequences. In every segment a connecting sequence (a connecting subfragment) is generated for a certain pair of the subfragments from the given fragment. The process of ordering consists of three steps: (1) generation of the k-tuple contents of each segment; (2) generation of subfragments in each segment; and (3) connection of the subfragments of the segments. Primary segments are defined as significant intersections and differences of k-tuple contents of a given fragment of the basic library with the k-tuple contents of the pools of the ordering library. Secondary (shorter) segments are defined as intersections and differences of the k-tuple contents of the primary segments.

[0405] There is a problem of accumulating both false positive and negative k-tuples in both the differences and intersections. The false negative k-tuples from starting sequences accumulate in the intersections (overlapping parts), as well as false positive k-tuples occurring randomly in both sequences, but not in the relevant overlapping region. On the other hand, the majority of false positives from either of the starting sequences is not taken up into intersections. This is an example of the reduction of experimental errors from individual fragments by using information from fragments overlapping with them. The false k-tuples accumulate in the differences for another reason. The set of false negatives from the original sequences are enlarged for false positives from intersections and the set of false positives for those k-tuples which are not included in the intersection by error, i.e. are false negative in the intersection. If the starting sequences contain 10% false negative data, the primary and secondary intersections will contain 19% and 28% false negative k-tuples, respectively. On the other hand, a mathematical expectation of 77 false positives may be predicted if the basic fragment and the pools have lengths of 500 bp and 10,000 bp, respectively. However, there is a possibility of recovering most of the “lost” k-tuples and of eliminating most of the false positive k-tuples.

[0406] First, one has to determine a basic content of the k-tuples for a given segment as the intersection of a given pair of the k-tuple contents. This is followed by including all k-tuples of the starting k-tuple contents in the intersection, which contain at one end k−1 and at the other end k-+ sequences which occur at the ends of two k-tuples of the basic set. This is done before generation of the differences thus preventing the accumulation of false positives in that process. Following that, the same type of enlargement of k-tuple set is applied to differences with the distinction that the borrowing is from the intersections. All borrowed k-tuples are eliminated from the intersection files as false positives.

[0407] The intersection, i.e. a set of common k-tuples, is defined for each pair (a basic fragment)×(a pool of ordering library). If the number of k-tuples in the set is significant it is enlarged with the false negatives according to the described rule. The primary difference set is obtained by subtracting from a given basic fragment the obtained intersection set. The false negative k-tuples are appended to the difference set by borrowing from the intersection set according to the described rule and, at the same time, removed from the intersection set as false positive k-tuples. When the basic fragment is longer than the pooled fragments, this difference can represent the two separate segments which somewhat reduces its utility in further steps. The primary segments are all generated intersections and differences of pairs (a basic fragment)×(a pool of ordering library) containing the significant number of k-tuples. K-tuple sets of secondary segments are obtained by comparison of k-tuple sets of all possible pairs of primary segments. The two differences are defined from each pair which produces the intersection with the significant number of k-tuples. The majority of available information from overlapped fragments is recovered in this step so that there is little to be gained from the third round of forming intersections. and differences.

[0408] (2) Generation of the subfragments of the segments is performed identically as described for the fragments of the basic library.

[0409] (3) The method of connection of subfragments consists of sequentially determining the correctly linked pairs of subfragments among the subfragments from a given basic library fragment which have some overlapped ends. In the case of 4 relevant subfragments, two of which contain the same beginning and two having the same end, there are 4 different pairs of subfragments that can be connected. In general 2 are correct and 2 are wrong. To find correct ones, the presence of the connecting sequences of each pair is tested in the subfragments generated from all primary and secondary segments for a given basic fragment. The length and the position of the connecting sequence are chosen to avoid interference with sequences which occur by chance. They are k+2 or longer, and include at least one element 2 beside overlapping sequence in both subfragments of a given pair. The connection is permitted only if the two connecting sequences are found and the remaining two do not exist. The two linked subfragments replace former subfragments in the file and the process is cyclically repeated.

[0410] Repeated sequences are generated in this step. This means that some subfragments are included in linked subfragments more than once. They will be recognized by finding the relevant connecting sequence which engages one subfragment in connection with two different subfragments.

[0411] The recognition of misconnected subfragments generated in the processes of building pSFs and merging pSFs into longer subfragments is based on testing whether the sequences of subfragments from a given basic fragment exist in the sequences of subfragments generated in the segments for the fragment. The sequences from an incorrectly connected position will not be found indicating the misconnected subfragments.

[0412] Beside the described three steps in ordering of subfragments some additional control steps or steps applicable to specific sequences will be necessary for the generation of more complete sequence without mistakes.

[0413] The determination of which subfragment belongs to which segment is performed b comparison of contents of k-tuples in segments and subfragments. Because of the errors in the k-tuple contents (due to the primary error in pools and statistical errors due to the frequency of occurrences of k-tuples) the exact partitioning of subfragments is impossible. Thus, instead of “all or none” partition, the chance of coming from the given segment. (P(sf,s)) is determined for each subfragment. This possibility is the function of the lengths of k-tuples, the lengths of subfragments, the lengths of fragments of ordering library, the size of the pool, and of the percentage of false k-tuples in the file:

P(sf,s)=(Ck−F)/Lsf,

[0414] where Lsf is the length of subfragment, Ck is the number of common k-tuples for a given subfragment/segment pair, and F is the parameter that includes relations between lengths of k-tuples, fragments of basic library, the size of the pool, and the error percentage.

[0415] Subfragments attributed to a particular segment are treated as redundant short pSFs and are submitted to a process of unambiguous connection. The definition of unambiguous connection is slightly different in this case, since it is based on a probability that subfragments with overlapping end(s) belong to the segment considered. Besides, the accuracy of unambiguous connection is controlled by following the connection of these subfragments in other segments. After the connection in different segments, all of the obtained subfragments are merged together, shorter subfragments included within longer ones are eliminated, and the remaining ones are submitted to the ordinary connecting process. If the sequence is not regenerated completely, the process of partition and connection of subfragments is repeated with the same or less severe criterions of probability of belonging to the particular segment, followed by unambiguous connection.

[0416] Using severe criteria for defining unambiguous overlap, some information is not used. Instead of a complete sequence, several subfragments that define a number of possibilities for a given fragment are obtained. Using less severe criteria an accurate and complete sequence is generated. In a certain number of situations, e.g. an erroneous connection, it is possible to generate a complete, but an incorrect sequence, or to generate “monster” subfragments with no connection among them. Thus, for each fragment of the basic library one obtains: a) several possible solutions where one is correct and b) the most probable correct solution. Also, in a very small number of cases, due to the mistake in the subfragment generation process or due to the specific ratio of the probabilities of belonging, no unambiguous solution is generated or one, the most probable solution. These cases remain as incomplete sequences, or the unambiguous solution is obtained by comparing these data with other, overlapped fragments of basic library.

[0417] The described algorithm was tested on a randomly generated, 50 kb sequence, containing 40% GC to simulate the GC content of the human genome. In the middle part of this sequence were inserted various All, and some other repetitive sequences, of a total length of about 4 kb. To simulate an in vitro SBH experiment, the following operations were performed to prepare appropriate data.

[0418] Positions of sixty 5 kb overlapping “clones” were randomly defined, to simulate preparation of a basic library:

[0419] Positions of one thousand 500 bp “clones” were randomly determined to simulate making the ordering library. These fragments were extracted from the sequence. Random pools of 20 fragments were made, and k-tuple sets of pools were determined and stored on the hard disk. These data are used in the subfragment ordering phase: For the same density of clones 4 million clones in basic library and 3 million clones in ordering library are used for the entire human genome. The total number of 7 million clones is several fold smaller than the number of clones a few kb long for random cloning of almost all of genomic DNA and sequencing by a gel-based method.

[0420] From the data on the starts and ends of 5 kb fragments, 117 “informative fragments” were determined to be in the sequence. This was followed by determination of sets of overlapping k-tuples of which the single “informative fragment” consist. Only the subset of k-tuples matching a predetermined list were used. The list contained 65% 8-mers, 30% 9-mers, and 5% 10-12-mers. Processes of generation and the ordering of subfragments were performed on these data.

[0421] The testing of the algorithm was performed on the simulated data in two experiments. The sequence of 50 informative fragments was regenerated with the 100% correct data set (over 20,000 bp), and 26 informative fragments (about 10,000 bp) with 10% false k-tuples (5% positive and 5% negative ones).

[0422] In the first experiment, all subfragments were correct and in only one out of 50 informative fragments the sequence was not completely regenerated but remained in the form of 5 subfragments. The analysis of positions of overlapped fragments of ordering library has shown that they lack the information for the unique ordering of the 5 subfragments. The subfragments may be connected in two ways based on overlapping ends, 1-2-3-4-5 and 1-4-3-2-5. The only difference is the exchange of positions of subfragments 2 and 4. Since subfragments 2,3, and 4 are relatively short (total of about 100 bp), the relatively greater chance existed, and occurred in this case, that none of the fragments of ordering library started or ended in the subfragment 3 region.

[0423] To simulate real sequencing, some false (“hybridization”) data was included as input in a number of experiments. In oligomer hybridization experiments, under proposed conditions, the only situation producing unreliable data is the end mismatch versus fill match hybridization. Therefore, in simulation only those k-tuples differing in a single element on either end from the real one were considered to be false positives. These “false” sets are made as follows. On the original set of a k-tuples of the informative fragment, a subset of 5% false positive k-tuples are added. False positive k-tuples are made by randomly picking a k-tuple from the set, copying it and altering a nucleotide on its beginning or end. This is followed by subtraction of a subset of 5% randomly chosen k-tuples. In this way the statistically expected number of the most complicated cases is generated in which the correct k-tuple is replaced with a k-tuple with the wrong base on the end.

[0424] Production of k-tuple sets as described leads to up to 10% of false data. This value varies from case to case, due to the randomness of choice of k-tuples to be copied, altered, and erased. Nevertheless, this percentage 3-4 times exceeds the amount of unreliable data in real hybridization experiments. The introduced error of 10% leads to the two fold increase in the number of subfragments both in fragments of basic library (basic library informative fragments) and in segments. About 10% of the final subfragments have a wrong base at the end as expected for the k-tuple set which contains false positives (see generation of primary subfragments). Neither the cases of misconnection of subfragments nor subfragments with the wrong sequence were observed. In 4 informative fragments out of 26 examined in the ordering process the complete sequence was not regenerated. In all 4 cases the sequence was obtained in the form of several longer subfragments and several shorter subfragments contained in the same segment. This result shows that the algorithmic principles allow working with a large percentage of false data.

[0425] The success of the generation of the sequence from its k-tuple content may be described in terms of completeness and accuracy. In the process of generation, two particular situations can be defined: 1) Some part of the information is missing in the generated sequence, but one knows where the ambiguities are and to which type they belong, and 2) the regenerated sequence that is obtained does not match the sequence from which the k-tuple content is generated, but the mistake can not be detected. Assuming the algorithm is developed to its theoretical limits, as in the use of the exact k-tuple sets, only the first situation can take place. There the incompleteness results in a certain number of subfragments that may not be ordered unambiguously and the problem of determination of the exact length of monotonous sequences, i.e. the number of perfect tandem repeats.

[0426] With false k-tuples, incorrect sequence may be generated. The reason for mistakes does not lie in the shortcomings of the algorithm, but in the fact that a given content of k-tuples unambiguously represents the sequence that differs from the original one. One may define three classes of error, depending on the kind of the false k-tuples present in the file. False negative k-tuples (which are not accompanied with the false positives) produce “deletions”. False positive k-tuples are producing “elongations (unequal crossing over)”. False positives accompanied with false negatives are the reason for generation of “insertions”, alone or combined with “deletions”. The deletions are produced when all of the k-tuples (or their majority) between two possible starts of the subfragments are false negatives. Since every position in the sequence is defined by k k-tuples, the occurrence of the deletions in a common case requires k consecutive false negatives. (With 10% of the false negatives and k=8, this situation takes place after every 108 elements). This situation is extremely infrequent even in mammalian genome sequencing using random libraries containing ten genome equivalents.

[0427] Elongation of the end of the sequence caused by false positive k-tuples is the special case of “insertions”, since the end of the sequence can be considered as the endless linear array of false negative k-tuples. One may consider a group of false positive k-tuples producing subfragments longer than one k-tuple. Situations of this kind may be detected if subfragments are generated in overlapped fragments, like random physical fragments of the ordering library. An insertion, or insertion in place of a deletion, can arise as a result of specific combinations of false positive and false negative k-tuples. In the first case, the number of consecutive false negatives is smaller than k. Both cases require several overlapping false positive k-tuples. The insertions and deletions are mostly theoretical possibilities without sizable practical repercussions since the requirements in the number and specificity of false k-tuples are simply too high.

[0428] In every other situation of not meeting the theoretical requirement of the minimal number an the kind of the false positive and/or negatives, mistakes in the k-tuples content may produce only the lesser completeness of a generated sequence.

[0429] SBH, a sample nucleic acid is sequenced by exposing the sample to a support-bound probe of known sequence and a labeled probe or probes in solution. Wherever the probes ligase is introduced into the mixture of probes and sample, such that, wherever a support has a bound probe and a labeled probe hybridized back to back along the sample, the two probes will be chemically linked by the action of the ligase. After washing, only chemically linked support-bound and labeled probes are detected by the presence of the labeled probe. By knowing the identity of the support-bound probe at a particular location in an array, and the identity of the labeled probe, a portion of the sequence of the sample may be determined by the presence of a label at a point in an array on a Format with a sample of three substrate. And not chances not working are maximally overlapping sequences of all of the ligated probe pairs, the sequence of the sample may be reconstructed. Not of the sample to be sequenced may be a nucleic acid fragment or oligonucleotide often base pairs (“bp”). The sample is preferably four to one thousand bases in length.

[0430] The length of the probe is a fragment less than ten bases in length, and, preferably, is between four and nine bases in length. In this way, arrays of support-bound probes may include all oligonucleotides of a given length or may include only oligonucleotides selected for a particular test. Where all oligonucleotides of a given length are used, the number of central oligonucleotides may be calculated by 4 where N is the length of the probe.

### EXAMPLE 18

[0431] Re-Using Sequencing Chips

[0432] When ligation is employed in the sequencing process, then the ordinary oligonucleotide chip cannot be immediately reused. The inventor contemplates that this may be overcome in various ways.

[0433] One may employ ribonucleotides for the second probe, probe P, so that this probe may subsequently be removed by RNAse treatment. RNAse treatment may utilize RNAse A an endoribonuclease that specifically attacks single-stranded RNA 3 to pyrimidine residues and cleaves the phosphate linkage to the adjacent nucleotide. The end products are pyrimidine 3 phosphates and oligonucleotides with terminal pyrimidine 3 phosphates. RNAse A works in the absence of cofactors and divalent cations.

[0434] To utilize an RNAse, one would generally incubate the chip in any appropriate RNAse-containing buffer, as described by Sambrook et al. (1989; incorporated herein by reference). The use of 30-50 ul of RNAse-containing buffer per 8×8 mm or 9×9 mm array at 37° C. for between 10 and 60 minutes is appropriate. One would then wash with hybridization buffer.

[0435] Although not widely applicable, one could also use the uracil base, as described by Craig et al. (1989), incorporated herein by reference, in specific embodiments. Destruction of the ligated probe combination, to yield a re-usable chip, would be achieved by digestion with the E. Coli repair enzyme, uracil-DNA glycosylase which removes uracil from DNA.

[0436] One could also generate a specifically cleavable bond between the probes and then cleave the bond after detection. For example, this may be achieved by chemical ligation as described by Shabarova et al., (1991) and Dolinnaya et al, (1988), both references being specifically incorporated herein by reference.

[0437] Shabarova et al. (1991) describe the condensation of oligodeoxyribo nucleotides with cyanogen bromide as a condensing agent. In their one step chemical ligation reaction, the oligonucleotides are heated to 97° C., slowly cooled to 0° C., then 1 ul 10 mM BrCN in acetonitrile is added.

[0438] Dolinnaya et al. (1988) show how to incorporate phosphoramidiate and pyrophosphate internucleotide bonds in DNA duplexes. They also use a chemical ligation method for modification of the sugar phosphate backbone of DNA, with a water-soluble carbodiimide (CDI) as a coupling agent. The selective cleavage of a phosphoamide bond involves contact with 15% CH₃COOH for 5 min at 95° C. The selective cleavage of a pyrophosphate bond involves contact with a pyridine-water mixture (9:1) and freshly distilled (CF₃CO)₂O.

### EXAMPLE 19

[0439] Diagnostics—Scoring Known Mutations or Full Gene Resequencing

[0440] In a simple case, the goal may be to discover whether selected, known mutations occur in a DNA segment. Less than 12 probes may suffice for this purpose, for example, 5 probes positive for one allele, 5 positive for the other, and 2 negative for both. Because of the small number of probes to be scored per sample, large numbers of samples may be analyzed in parallel. For example, with 12 probes in 3 hybridization cycles, 96 different genomic loci or gene segments from 64 patient may be analyzed on one 6×9 in membrane containing 12×24 subarrays each with 64 dots representing the same DNA segment from 64 patients. In this example, samples may be prepared in sixty-four 96-well plates. Each plate may represent one patient, and each well may represent one of the DNA segments to be analyzed. The samples from 64 plates may be spotted in four replicas as four quarters of the same membrane.

[0441] A set of 12 probes may be selected by single channel pipetting or by a single pin transferring device (or by an array of individually-controlled pipets or pins) for each of the 96 segments, and the selected probes may be arrayed in twelve 96-well plates. Probes may be labelled, if they are not prelabelled, and then probes from four plates may be mixed with hybridization buffer and added to the subarrays preferentially by a 96-channel pipeting device. After one hybridization cycle it is possible to strip off previously-applied probes by incubating the membrane at 37° to 55° C. in the preferably undiluted hybridization or washing buffer.

[0442] The likelihood that probes positive for one allele are positive and probes positive for the other allele are negative may be used to determine which of the two alleles is present. In this redundant scoring scheme, some level (about 10%) of errors in hybridization of each probe may be tolerated.

[0443] An incomplete set of probes may be used for scoring most of the alleles, especially if the smaller redundancy is sufficient, e.g. one or two probes which prove the presence or absence in a sample of one of the two alleles. For example, with a set of four thousand 8-mers there is a 91% chance of finding at least one positive probe for one of the two alleles for a randomly selected locus. The incomplete set of probes may be optimized to reflect G+C content and other biases in the analyzed samples.

[0444] For full gene sequencing, genes may be amplified in an appropriate number of segments. For each segment, a set of probes (about one probe per 2-4 bases) may be selected and hybridized. These probes may identify whether there is a mutation anywhere in the analyzed segments. Segments (i.e., subarrays which contain these segments) where one or more mutated sites are detected may be hybridized with additional probes to find the exact sequence at the mutated sites. If a DNA sample is tested by every second 6-mer, and a mutation is localized at the position that is surrounded by positively hybridized probes TGCAAA and TATTCC and covered by three negative probes: CAAAAC, AAACTA and ACTATT, the mutated nucleotides must be A and/or C occurring in the normal sequence at that position. They may be changed by a single base mutation, or by a one or two nucleotide deletion and/or insertion between bases AA, AC or CT.

[0445] One approach is to select a probe that extends the positively hybridized probe TGCAAA for one nucleotide to the right, and which extends the probe TATTCC one nucleotide to the left. With these 8 probes (GCAAAA, GCAAAT, GCAAAC, GCAAAG and ATATTC, TTATTC, CTATTC, GTATTC) two questionable nucleotides are determined.

[0446] The most likely hypothesis about the mutation may be determined. For example, A is found to be mutated to G. There are two solutions satisfied by these results. Either replacement of A with G is the only change or there is in addition to that change an insertion of some number of bases between newly determined G and the following C. If the result with bridging probes is negative these options may then be checked first by at least one bridging probe comprising the mutated position (AAGCTA) and with an additional 8 probes: CAAAGA, CAAAGT, CAAAGC, CAAAGG and ACTATT, TCTATT, CCTATT, GCTATT, I There are many other ways to select mutation-solving probes.

[0447] In the case of diploid, particular comparisons of scores for the test samples and homozygotic control may be performed to identify heterozygotes (see above). A few consecutive probes are expected to have roughly twice smaller signals if the segment covered by these probes is mutated on one of the two chromosomes.

### EXAMPLE 20

[0448] Identification of Genes (Mutations) Responsible for GeneticDisorders and Other Traits

[0449] Using universal sets of longer probes (8-mers or 9-mers) on immobilized arrays of samples, DNA fragments as long as 5-20 kb may be sequenced without subcloning. Furthermore, the speed of sequencing readily may be about 10 million bp/day/hybridization instrument. This performance allows for resequencing a large fraction of human genes or the human genome repeatedly from scientifically or medically interesting individuals. To resequence 50% of the human genes, about 100 million bp is checked. That may be done in a relatively short period of time at an affordable cost.

[0450] This enormous resequencing capability may be used in several ways to identify mutations and/or genes that encode for disorders or any other traits. Basically, mRNAs (which may be converted into cDNAs) from particular tissues or genomic DNA of patients with particular disorders may be used as starting materials. From both sources of DNA, separate genes or genomic fragments of appropriate length may be prepared either by cloning procedures or by in vitro amplification procedures (for example by PCR). If cloning is used, the minimal set of clones to be analyzed may be selected from the libraries before sequencing. That may be done efficiently by hybridization of a small number of probes, especially if a small number of clones longer than 5 kb is to be sorted. Cloning may increase the amount of hybridization data about two times, but does not require tens of thousands of PCR primers.

[0451] In one variant of the procedure, gene or genomic fragments may be prepared by restriction cutting with enzymes like Hga I which cuts DNA in following way: GACGC(N5′)/CTGCG(N 10′). Protruding ends of five bases are different for different fragments. One enzyme produces appropriate fragments for a certain number of genes. By cutting cDNA or genomic DNA with several enzymes in separate reactions, every gene of interest may be excised appropriately. In one approach, the cut DNA is fractionated by size. DNA fragments prepared in this way (and optionally treated with Exonuclease III which individually removes nucleotides from the 3′ end and increases length and specificity of the ends) may be dispensed in the tubes or in multiwell plates. From a relatively small set of DNA adapters with a common portion and a variable protruding end of appropriate length, a pair of adapters may be selected for every gene fragment that needs to be amplified. These adapters are ligated and then PCR is performed by universal primers. From 1000 adapters, a million pairs may be generated, thus a million different fragments may be specifically amplified in the identical conditions with a universal pair of primers complementary to the common end of the adapters.

[0452] If a DNA difference is found to be repeated in several patients, and that sequence change is nonsense or can change function of the corresponding protein, then the mutated gene may be responsible for the disorder. By analyzing a significant number of individuals with particular traits, functional allelic variations of particular genes could be associated by specific traits.

[0453] This approach may be used to eliminate the need for very expensive genetic mapping on extensive pedigrees and has special value when there is no such genetic data or material.

### EXAMPLE 21

[0454] Scoring Single Nucleotide Polymorphisms in Genetic Mapping

[0455] Techniques disclosed in this application are appropriate for an efficient identification of genomic fragments with single nucleotide polymorphisms (SNUPs). In 10 individuals by applying the described sequencing process on a large number of genomic fragments of known sequence that may be amplified by cloning or by in vitro amplification, a sufficient number of DNA segments with SNUPs may be identified. The polymorphic fragments are further used as SNUP markers. These markers are either mapped previously (for example they represent mapped STSs) or they may be mapped through the screening procedure described below.

[0456] SNUPs may be scored in every individual from relevant families or populations by amplifying markers and arraying them in the form of the array of subarrays. Subarrays contain the same marker amplified from the analyzed individuals. For each marker, as in the diagnostics of known mutations, a set of 6 or less probes positive for one allele and 6 or less probes positive for the other allele may be selected and scored. From the significant association of one or a group of the markers with the disorder, chromosomal position of the responsible gene(s) may be determined. Because of the high throughput and low cost, thousands of markers may be scored for thousands of individuals. This amount of data allows localization of a gene at a resolution level of less than one million bp as well as localization of genes involved in polygenic diseases. Localized genes may be identified by sequencing particular regions from relevant normal and affected individuals to score a mutation(s).

[0457] PCR is preferred for amplification of markers from genomic DNA. Each of the markers require a specific pair of primers. The existing markers may be convertible or new markers may be defined which may be prepared by cutting genomic DNA by Hga I type restriction enzymes, and by ligation with a pair of adapters.

[0458] SNUP markers can be amplified or spotted as pools to reduce the number of independent amplification reactions. In this case, more probes are scored per one sample. When 4 markers are pooled and spotted on 12 replica membranes, then 48 probes (12 per marker) may be scored in 4 cycles.

### EXAMPLE 22

[0459] Detection and Verification of Identity of DNA Fragments

[0460] DNA fragments generated by restriction cutting, cloning or in vitro amplification (e.g. PCR) frequently may be identified in a experiment. Identification may be performed by verifying the presence of a DNA band of specific size on gel electrophoresis. Alternatively, a specific oligonucleotide may be prepared and used to verify a DNA sample in question by hybridization. The procedure developed here allows for more efficient identification of a large number of samples without preparing a specific oligonucleotide for each fragment. A set of positive and negative probes may be selected from the universal set for each fragment on the basis of the known sequences. Probes that are selected to be positive usually are able to form one or a few overlapping groups and negative probes are spread over the whole insert.

[0461] This technology may be used for identification of STSs in the process of their mapping on the YAC clones. Each of the STSs may be tested on about 100 YAC clones or pools of YAC clones. DNAs from these 100 reactions possibly are spotted in one subarray. Different STSs may represent consecutive subarrays. In several hybridization cycles, a signature may be generated for each of the DNA samples, which signature proves or disproves existence of the particular STS in the given YAC clone with necessary confidence.

[0462] To reduce the number of independent PCR reactions or the number of independent samples for spotting, several STSs may be amplified simultaneously in a reaction or PCR samples may be mixed, respectively. In this case more probes have to be scored per one dot. The pooling of STSs is independent of pooling YACs and may be used on single YACs or pools of YACs. This scheme is especially attractive when several probes labelled with different colors are hybridized together.

[0463] In addition to confirmation of the existence of a DNA fragment in a sample, the amount of DNA may be estimated using intensities of the hybridization of several separate probes or one or more pools of probes. By comparing obtained intensities with intensities for control samples having a known amount of DNA, the quantity of DNA in all spotted samples is determined simultaneously. Because only a few probes are necessary for identification of a DNA fragment, and there are N possible probes that may be used for DNA N bases long, this application does not require a large set of probes to be sufficient for identification of any DNA segment. From one thousand 8-mers, on average about 30 full matching probes may be selected for a 1000 bp fragment.

### EXAMPLE 23

[0464] Identification of Infectious Disease Organisms and Their Variants

[0465] DNA-based tests for the detection of viral, bacterial, fungal and other parasitic organisms in patients are usually more reliable and less expensive than alternatives. The major advantage of DNA tests is to be able to identify specific strains and mutants, and eventually be able to apply more effective treatment. Two applications are described below.

[0466] The presence of 12 known antibiotic resistance genes in bacterial infections may be tested by amplifying these genes. The amplified products from 128 patients may be spotted in two subarrays and 24 subarrays for 12 genes may then be repeated four times on a 8×12 cm membrane. For each gene, 12 probes may be selected for positive and negative scoring. Hybridizations may be performed in 3 cycles. For these tests, a much smaller set of probes is most likely to be universal. For example, from a set of one thousand 8-mers, on average 30 probes are positive in 1000 bp fragments, and 10 positive probes are usually sufficient for a highly reliable identification. As described in Example 9, several genes may be amplified and/or spotted together and the amount of the given DNA may be determined. The amount of amplified gene may be used as an indicator of the level of infection.

[0467] Another example involves possible sequencing of one gene or the whole genome of an HIV virus. Because of rapid diversification, the virus poses many difficulties for selection of an optimal therapy. DNA fragments may be amplified from isolated viruses from up to 64 patients and resequenced by the described procedure. On the basis of the obtained sequence the optimal therapy may be selected. If there is a mixture of two virus types of which one has the basic sequence (similar to the case of heterozygotes), the mutant may be identified by quantitative comparisons of its hybridization scores with scores of other samples, especially control samples containing the basic virus type only. Scores twice as small may be obtained for three to four probes that cover the site mutated in one of the two virus types present in the sample (see above).

### EXAMPLE 24

[0468] Forensic and Parental Identification

[0469] Sequence polymorphisms make an individual genomic DNA unique. This permits analysis of blood or other body fluids or tissues from a crime scene and comparison with samples from criminal suspects. A sufficient number of polymorphic sites are scored to produce a unique signature of a sample. SBH may easily score single nucleotide polymorphisms to produce such signatures.

[0470] A set of DNA fragments (10-1000) may be amplified from samples and suspects. DNAs from samples and suspects representing one fragment are spotted in one or several subarrays and each subarray may be replicated 4 times. In three cycles, 12 probes may determine the presence of allele A or B in each of the samples, including suspects, for each DNA locus. Matching the patterns of samples and suspects may lead to discovery of the suspect responsible for the crime.

[0471] The same procedure may be applicable to prove or disprove the identity of parents of a child. DNA may be prepared and polymorphic loci amplified from the child and adults; patterns of A or B alleles may be determined by hybridization for each. Comparisons of the obtained patterns, along with positive and negative controls, aide in the determination of familial relationships. In this case, only a significant portion of the alleles need match with one parent for identification. Large numbers of scored loci allow for the avoidance of statistical errors in the procedure or of masking effects of de novo mutations.

### EXAMPLE 25

[0472] Assessing Genetic Diversity of Populations or Species and Biological Diversity of Ecological Niches

[0473] Measuring the frequency of allelic variations on a significant number of loci (for example, several genes or entire mitochondrial DNA) permits development of different types of conclusions, such as conclusions regarding the impact of the environment on the genotypes, history and evolution of a population or its susceptibility to diseases or extinction, and others. These assessments may be performed by testing specific known alleles or by full resequencing of some loci to be able to define de novo mutations which may reveal fine variations or presence of mutagens in the environment.

[0474] Additionally, biodiversity in the microbial world may be surveyed by resequencing evolutionarily conserved DNA sequences, such as the genes for ribosomal RNAs or genes for highly conservative proteins. DNA may be prepared from the environment and particular genes amplified using primers corresponding to conservative sequences. DNA fragments may be cloned preferentially in a plasmid vector (or diluted to the level of one molecule per well in multiwell plates and than amplified in vitro). Clones prepared this way may be resequenced as described above. Two types of information are obtained. First of all, a catalogue of different species may be defined as well as the density of the individuals for each species. Another segment of information may be used to measure the influence of ecological factors or pollution on the ecosystem. It may reveal whether some species are eradicated or whether the abundance ratios among species is altered due to the pollution. The method also is applicable for sequencing DNAs from fossils.

### EXAMPLE 26

[0475] Detection or Quantification of Nucleic Acid Species

[0476] DNA or RNA species may be detected and quantified by employing a probe pair including an unlabeled probe fixed to a substrate and a labeled probe in a solution. The species may be detected and quantified by exposure to the unlabeled probe in the presence of the labeled probe and ligase. Specifically, the formation of an extended probe by ligation of the labeled and unlabeled probe on the sample nucleic acid backbone is indicative of the presence of the species to be detected. Thus, the presence of label at a specific point in the array on the substrate after removing unligated labeled probe indicates the presence of a sample species while the quantity of label indicates the expression level of the species.

[0477] Alternatively, one or more unlabeled probes may be arrayed on a substrate as first members of pairs with one or more labeled probes to be introduced in solution. According to one method, multiplexing of the label on the array may be carried out by using dyes which fluoresce at distinguishable wavelengths. In this manner, a mixture of cDNAs applied to an array with pairs of labeled and unlabeled probes specific for species to be identified may be examined for the presence of and expression level of cDNA species. According to a preferred embodiment this approach may be carried out to sequence portions of cDNAs by selecting pairs of unlabeled and labeled probes pairs comprising sequences which overlap along the sequence of a cDNA to be detected.

[0478] Probes may be selected to detect the presence and quantity of particular pathogenic organisms genome by including in the composition selected probe pairs which appear in combination only in target pathogenic genome organisms. Thus, while no single probe pair may necessarily be specific for the pathogenic organism genome, the combination of pairs is. Similarly, in detecting or sequencing cDNAs, it might occur that a particular probe is not be specific for a cDNA or other type of species. Nevertheless, the presence and quantity of a particular species may be determined by a result wherein a combination of selected probes situated at distinct array locations is indicative of the presence of a particular species.

[0479] An infectious agent with about 10 kb or more of DNA may be detected using a support-bound detection chip without the use of polymerase chain reaction (PCR) or other target amplification procedures. According to other methods, the genomes of infectious agents including bacteria and viruses are assayed by amplification of a single target nucleotide sequence through PCR and detection of the presence of target by hybridization of a labelled probe specific for the target sequence. Because such an assay is specific for only a single target sequence it therefore is necessary to amplify the gene by methods such as PCR to provide sufficient target to provide a detectable signal.

[0480] According to this example, an improved method of detecting nucleotide sequences characteristic of infectious agents through a Format 3-type reaction is provided wherein a solid phase detection chip is prepared which comprises an array of multiple different immobilized oligonucleotide probes specific for the infectious agent of interest. A single dot comprising a mixture of many unlabeled probes complementary to the target nucleic acid concentrates the label specific to a species at one location thereby improving sensitivity over diffuse or single probe labeling. Such multiple probes may be of overlapping sequences of the target nucleotide sequence but may also be non-overlapping sequences as well as non-adjacent. Such probes preferably have a length of about 5 to 12 nucleotides.

[0481] A nucleic acid sample exposed to the probe array and target sequences present in the sample will hybridize with the multiple immobilized probes. A pool of multiple labeled probes selected to specifically bind to the target sequences adjacent to the immobilized probes is then applied with the sample to an array of unlabeled oligonucleotide probe mixtures. Ligase enzyme is then applied to the chip to ligate the adjacent probes on the sample. The detection chip is then washed to remove unhybridized and unligated probe and sample nucleic acids and the presence of sample nucleic acid may be determined by the presence or absence of label. This method provides reliable sample detection with about a 1000-fold reduction of molarity of the sample agent.

[0482] As a further aspect of the invention, the signal of the labelled probes may be amplified by means such as providing a common tail to the free probe which itself comprises multiple chromogenic, enzymatic or radioactive labels or which is itself susceptible to specific binding by a further probe agent which is multiply labelled. In this way, a second round of signal amplification may be carried out. Labeled or unlabeled probes may be used in a second round of amplification. In this second round of amplification, a lengthy DNA sample with multiple labels may result in an increased amplification intensity signal between 10 to 100 fold which may result in a total signal amplification of 100,000 fold. Through the use of both aspects of this example, an intensity signal approximately 100,000 fold may give a positive result of probe-DNA ligation without having to employ PCR or other amplification procedures.

[0483] According to a further aspect of the invention an array or super array may be prepared which consists of a complete set of probes, for example 4096 6-mer probes. Arrays of this type are universal in a sense that they can be used for detection or partial to complete sequencing of any nucleic acid species. Individual spots in an array may contain single probe species or mixtures of probes, for example N(1-3) B(4-6) N(1-3) type of mixtures that are synthesized in the single reaction (N represents all four nucleotides, B one specific nucleotide and where the associated numbers are a range of numbers of bases i.e., 1-3 means “from one to three bases”.) These mixtures provide stronger signal for a nucleic acid species present at low concentration by collecting signal from different parts of the same long nucleic acid species molecule. The universal set of probes may be subdivided in many subsets which are spotted as unit arrays separated by barriers that prevent spreading of hybridization buffer with sample and labeled probe(s).

[0484] For detection of a nucleic acid species with a known sequence one of more oligonucleotide sequences comprising both unlabelled fixed and labeled probes in solution may be selected. Labeled probes are synthesized or selected from the presynthesized complete sets of, for example, 7-mers. The labeled probes are added to corresponding unit arrays of fixed probes such that a pair of fixed and labeled probes will adjacently hybridize to the target sequence such that upon administration of ligase the probes will be covalently bound.

[0485] If a unit array contains more than one fixed probe (as separated spots or within the same spot) that are positive in a given nucleic acid species all corresponding labeled probes may be mixed and added to the same unit array. The mixtures of labeled probes are even more important when mixtures of nucleic acid species are tested. One example of a complex mixture of nucleic acid species are mRNAs in one cell or tissue.

[0486] According to one embodiment of the invention unit arrays of fixed probes allow use of every possible immobilized probe with cocktails of a relatively small number of labeled probes. More complex cocktails of labeled probes may be used if a multiplex labeling scheme is implemented. Preferred multiplexing methods may use different fluorescent dyes or molecular tags that may be separated by mass spectroscopy.

[0487] Alternatively, according to a preferred embodiment of the invention, relatively short fixed probes may be selected which frequently hybridize to many nucleic acid sequences. Such short probes are used in combination with a cocktail of labeled probes which may be prepared such that at least one labeled probe corresponds to each of the fixed proves. Preferred cocktails are those in which none of the labeled probes corresponds to more than one fixed probe.

### EXAMPLE 27

[0488] Interrogation of Segments of the HIV Virus with All Possible 10-mers

[0489] In this example of Format III SBH, an array was generated on nylon membranes (e.g., Gene Screen) of all possible bound 5-mers (1024 possible pentamers). The bound 5-mer oligonucleotides were synthesized with 5′ tails of 5′-TTTTTT-NNN-3′ (N=all four bases A, C, G, T, at this step in the synthesis equal molar amounts of all four bases are added). These oligonucleotides were precisely spotted onto the nylon membrane, the spots were allowed to dry, and the oligonucleotides were immobilized by treating the dried spots with UV light. Oligonucleotide densities of up to 18 oligonucleotides per square nanometer were obtained using this method. After the UV treatment, the nylon membranes were treated with a detergent containing buffer at 60-80° C. The spots of oligonucleotides were gridded in subarrays of 10 by 10 spots, and each subarray has 64 5-mer spots and 36 control spots. 16 subarrays give 1024 5-mers which encompasses all possible 5-mers.

[0490] The subarrays in the array were partitioned from each other by physical barriers, e.g., a hydrophobic strip, that allowed each subarray to be hybridized to a sample without cross-contamination from adjacent subarrays. In a preferred embodiment, the hydrophobic strip is made from a solution of silicone (e.g., household silicone glue and seal paste) in an appropriate solvent (such solvents are well known in the art). This solution of silicone grease is applied between the subarrays to form lines which after the solvent evaporates act as hydrophobic strips separating the cells.

[0491] In this Format III example, the free or solution (nonbound) 5-mers were synthesized with 3′ tails of 5′-NN-3′ (N=all four bases A, C, G, T). In this embodiment, the free 5-mers and the bound 5-mers are combined to produce all possible 10-mers for sequencing a known DNA sequence of less than 20 kb. 20 kb of double stranded DNA is denatured into 40 kb of single-stranded DNA. This 40 kb of ss DNA hybridizes to about 4% of all possible 10-mers. This low frequency of 10-mer binding and the known target sequence allow the pooling of free or solution (nonbound) 5-mers for treatment of each subarray, without a loss of sequence information. In a preferred embodiment, 16 probes are pooled for each subarray, and all possible 5-mers are represented in 64 total pools of free 5-mers.

[0492] Thus, all possible 10-mers may be probed against a DNA sample using 1024 subarrays (16 subarrays for each pool of free 5-mers).

[0493] The target DNA in this embodiment represents two-600 bp segments of the HIV virus. These 600 bp segments are represented by pools of 60 overlapping 30-mers (the 30-mers overlap each adjacent 30 mer by 20 nucleotides). The pools of 30-mers mimic a target DNA that has been treated using techniques well known in the art to shear, digest, and/or random PCR the target DNA to produce a random pool of very small fragments.

[0494] As described above in the previous Format III examples, the free 5-mers are labeled with radioactive isotopes, biotin, fluorescent dyes, etc. The labeled free 5-mers are then hybridized along with the bound 5-mers to the target DNA, and ligated. In a preferred embodiment, 300-1000 units of ligase are added to the reaction. The hybridization conditions were worked out following the teachings of the previous examples. Following ligation and removal of the target DNA and excess free probe, the array is assayed to determine the location of labeled probes (using the techniques described in the examples above).

[0495] The known DNA sequence of the target, and the known free and bound 5-mers in each subarray, predict which bound 5-mers will be ligated to a labeled free 5-mer in each subarray. The signal from 20 of these predicted dots were lost and 20 new signals were gained for each change in the target DNA from the predicted sequence. The overlapping sequence of the bound 5-mers in these ten new dots identifies which free, labeled 5-mer is bound in each new dot.

[0496] Using the described methods, arrays and pools of free, labeled 5-mers, the test HIV DNA sequence was probed with all possible 10-mers. Using this Format III approach, we properly identified the “wild-type” sequence of the segments tested, as well as several sequence “mutants” that were introduced into these segments.

### EXAMPLE 28

[0497] Sequencing of Repetitive DNA Sequences

[0498] In one embodiment, repetitive DNA sequences in the target DNA are sequenced with “spacer oligonucleotides” in a modified Format III approach. Spacer oligonucleotides of varying lengths of the repetitive DNA sequence (the repeating sequence is identified on a first SBH run) are hybridized to the target DNA along with a first known adjoining oligonucleotide and a second known, or group of possible oligonucleotides adjoining the other side of the spacer (known from the first SBH run). When a spacer matching the length of the repetitive DNA segment is hybridized to the target, the two adjacent oligonucleotides can be ligated to the spacer. If the first known oligonucleotide is fixed to a substrate, and the second known or possible oligonucleotide(s)is labeled, a bound ligation product including the labeled second known or possible oligonucleotide(s)is formed when a spacer of the proper length is hybridized to the target DNA.

### EXAMPLE 29

[0499] Sequencing Through Branch Points with Format III SBH

[0500] In one embodiment, branch points in the target DNA are sequenced using a third set of oligonucleotides and a modified Format III approach. After a first SBH run, several branch points may be identified when the sequence is compiled. These can be solved by hybridizing oligonucleotide(s) that overlap partially with one of the known sequences leading into the branch point and then hybridizing to the target an additional oligonucleotide that is labeled and corresponds to one of the sequences that comes out of the branch point. When the proper oligonucleotides are hybridized to the target DNA, the labeled oligonucleotide can be ligated to the other(s). In a preferred embodiment, a first oligonucleotide that is offset by one to several nucleotides from the branch point is selected (so that it reads into one of the branch sequences), a second oligonucleotide reading from the first and into the branch point sequence is also selected, and a set of third oligonucleotides that correspond to all the possible branch sequences with an overlap of the branch point sequence by one or a few nucleotides (corresponding to the first oligonucleotide) is selected. These oligonucleotides are hybridized to the target DNA, and only the third oligonucleotide with the proper branch sequence (that matches the branch sequence of the first oligonucleotide) will produce a ligation product with the first and second oligonucleotides.

### EXAMPLE 30

[0501] Multiplexing Probes for Analyzing a Target Nucleic Acid

[0502] In this Example, sets of probes are labeled with different labels so that each probe of a set can be differentiated from the other probes in the set. Thus, the set of probes may be contacted with target nucleic acid in a single hybridization reaction without the loss of any probe information. In preferred embodiments, the different labels are different radioisotopes, or different flourescent labels, or different EMLs. These sets of probes may be used in either Format I, Format II or Format III SBH.

[0503] In Format I SBH, the set of differently lableled probes are hybridized to target nucleic acid which is fixed to a substrate under conditions that allow differentiation between perfect matches one base-pair mismatches. Specific probes which bind to the target nucleic acid are identified by their different labels and perfect matches are determined, at least in part, from this binding information.

[0504] In Format II SBH, the target nucleic acids are labeled with different probes and hybridized to arrays of probes. Specific target nucleic acids which bind to the probes are identified by their different labels and perfect matches are determined, at least in part, form this binding information.

[0505] In Format III SBH, the set of differently labeled probes and fixed probes are hybridized to a target nucleic acid under conditions that allow perfect matches to be differentiated from one base-pair mismatches. Labeled probes that are adjacent, on the target, to a fixed probe are bound to the fixed probe, and these products are detected and differentiated by their different labels.

[0506] In a preferred embodiment, the different labels are EMLs, which can be detected by electron capture mass spectrometry (EC-MS). EMLs may be prepared from a variety of backbone molecules, with certain aromatic backbones being particularly preferred, e.g., see Xu et al., J. Chromatog. 764:95-102 (1997). The EML is attached to a probe in a reversible and stable manner, and after the rpobe is hybridized to target nucleic acid, the EML is reomved from the probe and identified by standard EC-MS (e.g., the EC-MS may be done by a gas chromotograph-mass spectrometer).

### EXAMPLE 31

[0507] Detection of Low Frequency Target Nucleic Acids

[0508] Format III SBH has sufficient discrimination power to identify a sequence that is present in a sample at 1 part to 99 parts of a similar sequence that differs by a single nucleotide. Thus, Format III can be used to identify a nucleic acid present at a very low concentration in a sample of nucleic acids, e.g., a sample derived from blood.

[0509] In one embodiment, the two sequences are for cystic fibrosis and the sequences differ from each other by a deletion of three nucleotides. Probes for the two sequences were as follows, probes distinguishing the deletion from wild type were fixed to a substrate, and a labeled contiguous probe was common to both. Using these targets and probes, the deletion mutant could be detected with Format III SBH when it was present at one part to ninety nine parts of the wild-type.

### EXAMPLE 32

[0510] Polaroid Apparatus and Method for Analyzing a Target Nucleic Acid

[0511] An apparatus for analyzing a nucleic acid can be constructed with two arrays of nucleic acids, and an optional material that prevents the nucleic acids of the two arrays from mixing until such mixing is desired. The arrays of the apparatus may be supported by a variety of substrates, including but not limited to, nylon membranes, nitrocellulose membranes, or other materials disclosed above. In preferred embodiments, one of the substrate is a membrane separated into sectors by hydrophobic strips, or a suitable support material with wells which may contain a gel or sponge. In this embodiment, probes are placed on a sector of the membrane, or in the well, the gel, or sponge, and a solution (with or without target nucleic acids) is added to the membrane or well so that the probes are solubilized. The solution with the solubilized probes is then allowed to contact the second array of nucleic acids. The nucleic acids may be, but are not limited to, oligonucleotide probes, or target nucleic acids, and the probes or target nucleic acids may be labeled. The nucleic acids may be labeled with any labels conventionally used in the art, including but not limited to radioisotopes, flourscent labels or electrophore mass labels.

[0512] The material which prevents mixing of the nucleic acids may be disposed between the two arrays in such a way that when the material is removed the nucleic acids of the two arrays mix together. This material may be in the form of a sheet, membrane, or other barrier, and this material may be comprised of any material that prevents the mixing of the nucleic acids.

[0513] This apparatus may be used in Format I SBH as follows: a first array of the apparatus has target nucleic acids that are fixed to the substrate, and a second array of the apparatus has nucleic acid probes that are labeled and can be removed to interrogate the target nucleic acid of the first array. The two arrays are optionally separated by a sheet of material that prevents the probes from contacting the target nucleic acid, and when this sheet is removed the probes can interrogate the target. After appropiate incubation and (optionally) washing steps the array of targets may be “read” to determine which probes formed perfect matches with the target. This reading may be automated or can be done manually (e.g., by eye with an autoradiogram). In Format II SBH, the procedure followed would be similar to that described above except that the target is labeled and the probes are fixed.

[0514] Alternatively, the apparatus may be used in Format III SBH as follows: two arrays of nucleic acid probes are formed, the nucleic acid probes of either or both arrays may be labeled, and one of the arrays may be fixed to its substrate. The two arrays are separated by a sheet of material that prevents the probes from mixing. A Format II reaction is initiated by adding target nucleic acid and removing the sheet allowing the probes to mix with each other and the target. Probes which bind to adjacent sites on the target are bound together (e.g., by base-stacking interactions or by covalently joining the backbones), and the results are read to determine which probes bound to the target at adjacent sites. When one set of probes is fixed to the substrate, the fixed array can be read to determine which probes from the other array are bound together with the fixed probes. As with the above method, this reading may be automated (e.g., with an ELISA reader) or can be done manually (e.g., by eye with an autoradiogram).

### EXAMPLE 33

[0515] Novel Nucleic Acid Sequences Obtained From Various cDNA Libraries

[0516] A plurality of novel nucleic acids were obtained from cDNA libraries prepared from adult brain, adult heart, adult lung, adult lymph node, adult liver, adult ovary, adult spleen, testis, bone marrow, endothelial cell, fetal kidney, fetal liver/spleen, fetal liver, fetal brain, infant brain, lung tumor, leukocyte, and mammary gland using standard PCR, SBH sequence signature analysis and Sanger sequencing techniques. The inserts of the library were amplified with PCR using primers specific for vector sequences which flank the inserts. These samples were spotted onto nylon membranes and interrogated with oligonucleotide probes to give sequence signatures. The clones were clustered into groups of similar or identical sequences, and single representative clones were selected from each group for gel sequencing. The 5′ sequence of the amplified inserts was then deduced using the reverse M13 sequencing primer in a typical Sanger sequencing protocol. PCR products were purified and subjected to fluorescent dye terminator cycle sequencing. Single pass gel sequencing was done using a 377 Applied Biosystems (ABI) sequencer. 38,043 of these inserts have been identifed as novel sequences not previously obtained from this library, and not previously reported in public databases. These sequences are shown in Table 1 as SEQ ID NO: 1-38,043.

[0517] The present invention is not to be limited in scope by the exemplified embodiments which are intended as illustrations of single aspects of the invention, and compositions and methods which are functionally equivalent are within the scope of the invention. Indeed, numerous modifications and variations in the practice of the invention are expected to occur to those skilled in the art upon consideration of the present preferred embodiments. Consequently, the only limitations which should be placed upon the scope of the invention are those which appear in the appended claims.

[0518] All references cited within the body of the instant specification are hereby incorporated by reference in their entirety.

The application's sequence listing, which the Patent Office published only in electronic form, follows.

SEQUENCE LISTING (38054 sequences)

SEQ ID NO: 1 - DNA, 430 bp, Homo sapiens
gaagatcagtcgcaaggagggggcgggacctacacctcaggaaagccggagaattggggcacgaagcggggctttgatgacccgcaaagggcgaggcatgcaggaggtggaggaattaagtgaaacagggaaggttgttaaacagcaccgtgtgggcgaggccttaagggtcgtggtccttgtctgggcggggtctttgggcgtcgaccaggcctggttctgggtaggcggggctactacggggcggtgcctgctgtggaaatgcctgcccgcgcgcttctgcccaggcgcatggggcatcgtactctagcctccactcctgccctgtgggcctccatcccgtgccctcgctctgagctgcgcctggacctggttcttgcttctggacaatctttccggtggagggagcaaagtcctgcacactggagtg

SEQ ID NO: 2 - DNA, 503 bp, Homo sapiens
  misc_feature (1)...(503): n = A,T,C or G
agtggccnnnnnagccgcccaatagagaccntngactgatgacactaggacagngcggtggaantcgnatcttgtatttctcttccccacccccacctaactcagtgatgtttgcaaaacatttgaaatttaaagaaacaaaatatatataatatatttttaataaacagcagaagaatgcccaagaaaagagctaataggggcaacaccaagggaaaaaaatgtctgggcattatctgagctagagatttcttttaaggcaaccaaaagatgggggaaatggggagaagttaagactacaaaatgccagacaggatgcttttctagacctttggctttagagcctggcagaggaatgggcttccccacactgtgacgagcaaacctagggccctgggcccagcatctacagcacctctgtgggcagccgggcagccctcttatacgtgggcactcttcgcatgagtcggngagctagagcccgcagtgtagtagaaacggtt

SEQ ID NO: 3 - DNA, 479 bp, Homo sapiens
  misc_feature (1)...(479): n = A,T,C or G
agagagtcncaacccgataccctaattgatgagccgtaattaccgacgccctcgctgcggccttccgggcccctcggttgataaaaggactaaatagtgacggacatttttaaggctacttaagaaatggcaaaaatacatttagaggtgtgaacccgaacacactgcgcgctttaagccccgcgagagccggggccgcccgcttccgtgcgcccgtagctcctttctcgggtccgggattcgccggtgccggggacagaaacctcctgccttcttagttcatgacgcttgtagatgaacttccctgttttctgcactgcttagaccagaagacgggaaaccgtgactgccgcacccttccctgaagcaggcactgcccgtcgtccatcaaacgcgaggactgcgcccacctcgtaggaaggacgccgcggtcctgctaaaagcctccgcctctgcctgcccgagggcacccttcccct

SEQ ID NO: 4 - DNA, 473 bp, Homo sapiens
cttgaaaccccatcgaagaccctagtccatgtggtggaattcagaacacttaaatatagttaatgtattcgaataataaggaagaaatttccctctctgtttccaaagcaaaagtataaacaaccttttacttggcagggacttcactctgtttctaaaaagccagcaagcaccgttcctgaaatagaccgatctgttcctctgcatagaccctattaacattttagctacatctctgctgtatcttgatatgatagattatagaaaatgtcttgctactggaactttacgatgctttccttttaaacatcaggtagaaagtatggatagtaaatctcagattagttgccattcttggtcttggtagagctgccatcgacagcctccgtcagttacaacagagtgtgtctctccagcaacccagcttagattgcagactgagtctggctcacccaggattcagtgcaacgtct

SEQ ID NO: 5 - DNA, 471 bp, Homo sapiens
  misc_feature (1)...(471): n = A,T,C or G
nttcgaagaccacttttgcatgccgtggaattccaggattgagtttctttgaggggatactgctcgttcgggggccctacagaaggctgagggtatctactcagtaaaatcgtaccgaactgaaagttcctctgaaatgattttgactctgccatccatcacttcataaaaattcatcttgtatccttcagtttgtagctatgtggcacattaagcttcctttcttctccccactgaaacttcgaacagtacaaaacggggaacttggcttgcgatgactaaaattggggatatgagactgggggcgggcgcggtggctcatgcctgtggtcccagcactttgggaggccagggctggcagatcacctgaggtcaggagagactagcctggccaacatggtggggccccgtctctgctgaaaatgcaaagattagctgggtgtggtgacgcgtgcttgcaatcccggctat

SEQ ID NO: 6 - DNA, 466 bp, Homo sapiens
  misc_feature (1)...(466): n = A,T,C or G
aattgacaacccgtgattaacctaggacagngcgnggaattcttaatttgattttggatgaaagccatgaacgagtattcagctcttcatttggggtattatcaagtggtactaggattatacattgtaagaggtgacaacgtgtaagtaaaatatatctgttaaaattataaatgatactgccttactttatggagaagaggttttccccaaaataccctactgtattgtccatacatagttaatagaatcttgcattcatttctttcgtaaatataccttttcttatgtttgtgtaaaataaggcatatgtatacattttatgtcaacacttctttaggtttcaaccaaagctgtctctctacaaattaaacttttacctgagatttgcccgtttttctactagttaagtagcctgggtagagtccagaaagggctctgccttatattaaatacttcattagag

SEQ ID NO: 7 - DNA, 460 bp, Homo sapiens
  misc_feature (1)...(460): n = A,T,C or G
agcggantnnnnnnnncctgagttgcctatcaattgncgnggacttcgaagaataactcaggggagaaagcacttccaccctggcgatcttctgataagcacccattagatatcattcgttttaattacctagacaaccgtgaccccatggagactgtccagcaaggaagaagaaaaagaaaccaaataaccccagacttcagccgacagtcacatgataagaaaaataaattgcaggacagaactaggctaagaaaagcacaatcaatgagacagagtctcgctctgttgcccattctggactggagcagtgcagtcagagctcactgcagctttggcctcctgggctcaagtgatcttcctgccttggcctcctgagtagctgggactacagatgcgcaccaccacacctggntaatttttcaaattttggtagagacagggtctcactgtgttgccn

SEQ ID NO: 8 - DNA, 483 bp, Homo sapiens
  misc_feature (1)...(483): n = A,T,C or G
agagagccccccaatcgagaccattggacatcggtgggaattcctttnttacatttttaaacaaatagcacaaatatgaacttgggctcggaccaagacagtagttctgagcttagtgaaattcacagcactagggtgaagtgactgggcacggcagtctcttgctgacagcctgtccttttatttgacatcatccttcgcctggctcctgctgtcactctcttgcgtgtaggtttttgtaagcattggcactttcaatgatcccttctggaaaccagccccccgcctgagctttcaggaatgtatctgtttccaccacctttcagcgattcttcctgctccctctgccaaggtctgtttctccaggatcggagggggtcgtgtgaatcagcccagatgctttcagcagtgaacaagaggccccagcacccggcttccgccccggggcgttggttctctggcgtctctgtggccatgggatgc

SEQ ID NO: 9 - DNA, 489 bp, Homo sapiens
  misc_feature (1)...(489): n = A,T,C or G
tggggtannnnnnntttgagnaccctttcgtagaccatagtccatgtggtggaattcctgaagacgagaggatttggaggaatctatggggttggcaaagccgccctgcatcccccagccctggccgtcctcagccacaccccagatggagccacgcagaccatcgcctgggtgggcaaaggcatcgtctatgacactggaggcctcagcatcaaagggaagactaccatgccagggatgaagcgagactgcgggggtgctgcggccgtcctgggggccttcagagccgcaatcaagcagggtttcaaagacaacctccacgctgtgttctgcttggctgagaactcggtggggcccaatgcgacaaggccagatgacatccacctgctgtactcagggaagacggtggaaatcaacaacacggatgccgagggcaggctggtgctggcagatggcgtgtcctatgcttgcaaggacctgggggccgac

SEQ ID NO: 10 - DNA, 437 bp, Homo sapiens
  misc_feature (1)...(437): n = A,T,C or G
gcgatgnnnnaatgatacctgcattgcgggcttcctcggctacctgagaggtttggctctgggaggacgcgggacccgaggcctttgcctagccgggtactgtggacgctgaggtagaaggtaaacttctcgcggcttagccgtctccatcccggccacccggctcccggtgaaacttattaaagatgcctaacgggccccgcgccggcccaccgagtccatccacgtcgaccaggcttctccgctccaccctccagcctgaggaccgccggaccaagagatgcctcggcagagggcgctggggacctccagacccagaaagacgccagagccccatatggggacaagcgcatcacagaaaaccgaaaaaatgaggatctgcgatgagaggaagacaatgatccataatcaatacacgcagaatcaacatgacttct

SEQ ID NO: 11 - DNA, 502 bp, Homo sapiens
  misc_feature (1)...(502): n = A,T,C or G
nggatagannccntnnnnnnnnnattgatgtccctagtcagngtggnggaattcgctgagcctgaggtcacataccacaggctgaggccccaggataagttccttgtgctggcctcagatggcctgtgggacatgctgagcaatgaggacgtggtaaggctggtggtggggcacctggctgaggcagattggcacaagacagacctggcccagagacccgccaacttggggctcatgcagagcctgctgctgcagaggaaagccagcgggctccacgaggctgaccaaaatgcagccacgcggctgatcagacatgccatcgggaacaatgagtatggggagatggaggcagagcggctggcggcgatgctgacattgccagaggacttggcgaggatgtacagggatgatatcactgtcactgtggtgtattttaactcagaatcaatcggtgcatattacaaggggggttaagaatctcccatcctattgtcaaggttan

SEQ ID NO: 12 - DNA, 481 bp, Homo sapiens
  misc_feature (1)...(481): n = A,T,C or G
agagcgtgnccacctgagaccctaattgatgtgccgtaattcgggagacaggcacagaggggttgaggggctttatctggggcacacagaggccatggtgttctctagatttctgatctgatgtccagcgtgcctgtctccagccagggttgggtctcaaatactccaaggccttcctgtcttccctgtcattgagcacagcagagatttgagcgcatagaagcaaaaaggcttggaagctcagcctggtttcgaccagcctatgtggcgctgtggtgtgatgtggcctctagctgggagtgtccactcgccttccaccagcatggcaacgtcttcacagtaccgccagctgctcagtgactacgggccaccgtccctaggctacacccagggaactgggaacagccaggtgccccaaagcaaatacgcggagctgctggccatcattgaagagctggggaaggagatcagacccacgtcn

SEQ ID NO: 13 - DNA, 478 bp, Homo sapiens
  misc_feature (1)...(478): n = A,T,C or G
gcggttancnnnaatcgagacctatggaagncgctggaattaactaagttcttcactttaatgaagaagaaagctctttgaagtgagaagaagaaagggaattccagaatactggaggccacccaccatagccaagaaacactgcatttactggctggaagtaaaatttacccttctttgaaaagatcctgatattatctgtgtttctgatgtatacacacggaggtatcaccattttcacagtagttataccttttacatctttggatcatttggttatctttaatgttgaatatgcaactctgtttcaagtggacactatattctcattttaataaacagaatggtgtctgtttctgctccacaagaagacaaaaatgtttaagcatatattatgtgtaaactactgtacagaacttaaagttgaagatgagatctcagtttcaaaactatcctaaatggaattttaagcactgta

SEQ ID NO: 14 - DNA, 468 bp, Homo sapiens
agacgcgccatagagaccctatagtaggccatgagtacaaacagagtgattatagtaagtttataatcctcaagtgaggaggaattaaagacagttggctcaaattcaggtaagaaacccaagttagagaatcaaggataatggcaagacccccagaaacaatgccttcatagggcagaagttaggacagggcttcctatccgcccagagtgtccccaggtcttccgagtgacgtcacgccgggccacagaagggctgggcgaacacctcaggtgcaaaccttagccagtgggactcaggaactggagggagccccagagctgcccgtgccatattgaggcttcttccctgcattgggaccacatggatgatccaggaaaattcccctctgtcaaggtcaacagacaacctttaaatcacctgcctccttaattcccatttgtcacataacacagtctattcacaggt

SEQ ID NO: 15 - DNA, 468 bp, Homo sapiens
  misc_feature (1)...(468): n = A,T,C or G
gccgcccaatgaaccctatagagaccctaggccanngcgnggaattctaaaaaagtaataaaaataaaacctatttctccaagtatgtattttcttgtctaagattttcatattacctaatggatgctttttggatatcttcgatggtgccacttgtcccatgaatcagcagggttccctagtggccggcagtgtctggaagcctcagcatactctagcacatgcaccaggaagtcagtcaacatacctggtgattaggagtgttctaatgacctaggcccagtgacaggtttccttaaatttccttgaaccaatgtcattctctgtcaaagtttgtctgcctaagaacctcctacttacctgcactccgtggtgcactttcttcatttcccctcagccttattcccccttccccatcctcttgactctgagttcacttcactgcagtgaaactaatgaggtgctgcn

SEQ ID NO: 16 - DNA, 454 bp, Homo sapiens
  misc_feature (1)...(454): n = A,T,C or G
ggggcggnnnnntttgaactgattccctatgcagngncgnggaattcgagaaaatcaagaacctcacgcgggaaaacgtggaaatgaaagaaaagctgtcatcgcatgcgtctctgaagcggcatacctccttgaatgacctcagcctgacgagggatgagcaggagatcgagttcctgaggctgcaggtgctggagcagcagcacgtcattgacgacctctcactggagagagaacggctgttgcgctccaaaaggcatcgagggaaaagtctgaaaccgcccaagaagcatgttgtggagacattttttggatttgatgaggagtctgtggactcagaaacgttgtccgaaacatcctacaacacagacaggacagacaggaccccagccacgcccgaagaagacttggacgatgccacagcccgagaggaggctgacctgcgcttctgccn

SEQ ID NO: 17 - DNA, 495 bp, Homo sapiens
  misc_feature (1)...(495): n = A,T,C or G
natcgagaccctagtccagngnggttgaattccacgtgtattcgcttcaccgggactaagttcctcctgcgcggtctatggcggactatgttaggtcttaatggtgggaggacgcccgagtgctcggcccgtttcaccccgaggaggaaggacactgggtcatgacgccatcagagggcgccagagcagggaccggacgcgagttggagatgttggactcgctgttggccttgggcggcctggtgctgcttcgggattccgtggagtgggaggggcgcagtctcttgaaggcgcttgtcaagaaatctgcactgtgtggggagcaagtgcatatcctgggctgtgaagtgagcgaggaagagtttcgtgaaggttttgactctgatatcaacaatcggctggtttaccatgacttcttcagagaccctctcaactggtcaaaaactgaggaggcctttcctggggggccgctgggagccttgagagccatgtgca

SEQ ID NO: 18 - DNA, 460 bp, Homo sapiens
  misc_feature (1)...(460): n = A,T,C or G
cttgagccctncatagagagccgttcaanaccgacagcaaactggtgcaggaggccctggaggcggtgcccaggggcgagattgaagtgttcacctcctcttttcctgaactgtatgtggagaaagtgctggagtttttagcttcctcctttgaagtgtctcgccacctggaattctacctcctctggactcacaaactgctcatgttgcacggacagaagctgaagtccaggtagagggtctcccccgcagttcatcggtggctcaggtcactggaccagcttgtcctgctggataaaagggaactttgacatgccaatgcagcatgaagtgagcccactgtaccacggggtgagccccgcacgcttagggagtctccctttcagagccgggacgctgctgcctgtcattcagttcctccagaagagcatccagcggcacctggacgacctgtcgaaan

SEQ ID NO: 19 - DNA, 502 bp, Homo sapiens
  misc_feature (1)...(502): n = A,T,C or G
ggatagaaaccntcggnnnnnncnatgatgaccctagtccangncgnggaattcccctcactcctttgcactgatcagctatcagcacaaattccaagatgacgatcagactcgtgtgaaaggatccctcaaagcaggcttctttgggacggtggtggagtacggagctgagaggaagatctccaggcacagcgttttgggtgcagctgtcagcgttggagttccacagggcgtttctctcaaagtcaagctcaacagggccagtcagacatacttcttccctattcacttgacggaccagcttctgcccagcgccatgttctatgccaccgtggggcctctagtggtctactttgccatgcaccgtctgatcatcaaaccatacctcagggctcagaaagagaaggaattggagaagcagagggaaagcgccgccaccgatgtgctgcagaagaagcaagaggcggagtccgctgtccggctgatgcaggaatctgtccga

SEQ ID NO: 20 - DNA, 461 bp, Homo sapiens
  misc_feature (1)...(461): n = A,T,C or G
naatgagaccacattgagngcgtggaaanccgcgnggctgncggacagcagcgtgttgatggcgttgagcacgcccaccacgcgctccgggtagcacgtgtccagcccggtgacctccagcaccacgcgcagcctgcgccgctggtagatctccaggaagcacaggaagtcggtgagcagctccacctccttcttcacctcgcacatgaaacccagctggctgccgaacttttcacgcgacaccagccgctcgatcttcttgcgctggcttacgaacaggtgcttgcccaccgagtacacggccatgagcagccccgagcccgacagtgtggtggccgcgccgccaaacaccttgagcaggctgccgctcgggctgccgtggcccagcgcgtggccgcccagtgacaagtagagcagccccacacccaggcccagcgccgccagcagcgccagcagccccg

SEQ ID NO: 21 - DNA, 457 bp, Homo sapiens
  misc_feature (1)...(457): n = A,T,C or G
tgcggctgnnnnnncctgagtagcctatcntgtgncgnggactncaaaaagggaagcaaatgtagagcaggggaaaggaggtcaggagttttgaaaactaagatgtcgtgttaacttctagggtgagagaaagccttgttaaagcctgaattccaattctgtctctgcagcttccaagttgttcgaatctggtcatgtgaaaaacctatttaagccttggtttccacatctgaagaatggaggcagcagcatgaaattcatagctatcaattattgagtgcttcatatgtgatagtgctgagcactttgtatacatgatctcattcttaataagaacccagtgcatacttcttgttcaccaggtctgaagaaaaatataaaaaacagtgaagtgggtactgttactacccccattttgcagatgtgaagagcacacaggttagatgacttccctaag

SEQ ID NO: 22 - DNA, 470 bp, Homo sapiens
  misc_feature (1)...(470): n = A,T,C or G
cggntttccnnncatagagaccactatcagtgtcgtggaattctagaaacagggtggaatattacaaagcttagaactaaaaactgaatcaccatttgaaccagcaatcccattactggctatctacccaaaggaaaataaactgctctaccaaaaagacacttgccctcacatgttcaatgcagcactattcacaacagcaaagacatggaatcaacccaggtgcccatcaatggtaaatacgatacagaaaatgtggcacatacacaccatgaaatactatgcagccataaaaaagaacaaaatcatgtcctctgcagcaacatggatgcagctggaggccattatcttaagcaaattaacacagaaacagaaaatcaaacaccatgttctcacttataagcgggagctaaacactgggtacttatggacacaaagatgggaacaataaacactggggattccaaaag

SEQ ID NO: 23 - DNA, 487 bp, Homo sapiens
  misc_feature (1)...(487): n = A,T,C or G
gggggggnattgaaatcgtagaacctaggcagngtggtggaattcgcttctgccaggaatggtgaggcggagggagcgggtgatgttagaaggcgggcgaggaatggctccagaactaacccctggcacctccccctccccacagtaacaacatgctgtaccccaaggaagacaaggagaaccgcattctgctctacgcggtgagcgccggggtcttccccggcaggtccacctgttcccagcgtggccccgccctgccccctgcctctgtgatcggactccctgttcgccctccgctgcacctcaagtgatcctgactctcatgtcctgcccatccccaaagagagtcctgtcgtcatatcctccgggatcaccctgccctctcctcccaatcttgtctggaatccttccgtgaccccctttcccccacactcgccctctcgtagtgccggaactgtgattaccagcaggaggccgacaacagctg

SEQ ID NO: 24 - DNA, 477 bp, Homo sapiens
atgggacaccccatttgagaccactatccatgtggtggaattcgacagctgcgcttcttctttcagctgttcgttcaaggctatgccctgcaactgcaccagttacaggtgctttacaaggccaagtacggtccaatgtggatgtcctacttagggcctcagatgcacgtgaacctggccagtgccccgctcttggagcaagtgatgcggcaagagggcaagtacccagtacggaacgacatggagctatggaaggagcaccgggaccagcacgacctgacctatgggccgttcaccacggaaggacaccactggtaccagctgcgccaggctctgaaccagcggttgctgaagccagcggaagcagcgctctatacggatgctttcaatgaggtgattgatgactttatgactcgactggaccagctgcgggcagagagtgcttcggggaaccaggtgtcggacatggctcaactc

SEQ ID NO: 25 - DNA, 481 bp, Homo sapiens
  misc_feature (1)...(481): n = A,T,C or G
agggcccagggggcccggcaaatgganncccactgatnactctaggacannnncnnggaattcgaggacaatgaggaggaggaaagaagccgaggcaaggagcagcggaagctggcacgactgatgagccgggcatggctgaaagagggcggtggggatgagcccctcaacttactggatcccaaggtggcccaacgagtcctggccacgcagccagggccaggccggggcaggaagaaggaccacggcttcaaggtgagcgccgatggccggctgatcataagggaggaggcagacggcaacaagatggaggaagaggaaggtgccaaaggcgaagatgaagagatggctgacccaatggaagatgtgatcatcatgaataaaaagcaccagaagctcaagcaccagaaagaggctgaggaggaggagctggagataccccctcagtaccaagctggaggctctggcattcatcgccctg

SEQ ID NO: 26 - DNA, 476 bp, Homo sapiens
  misc_feature (1)...(476): n = A,T,C or G
aggagtncccaggagtgcccnncatagagacccatgagagcgcttggaattcccaacatctgtctttctggcttcacttttttcttgctagttggtacaaacaaaaatatcagttaacattcatgttggaactacattcatttatcagttacaactgtaggctggttatagattcagcaggttggcaaaaatcaatgaaagcatcctgtaagacccaactggccatatgcaatttacagtaaagagtagtatatattttttattatttgtaaattattagccatcctttatgtcaataaaatttatcataaatgtatgtatgtgtatatatgcatgcattttccccagagagctcattgttaattaaacatctaccagcatactactgggcaggttgccttagtctgaggagtggccagagatttgactctggaaagattcccacaagagggtgggaatggctgatggaaagaggc

SEQ ID NO: 27 - DNA, 481 bp, Homo sapiens
  misc_feature (1)...(481): n = A,T,C or G
agaagtncccagaagggcccccatagagaccaatagatgaccactcggacagngcggaggaattccggcattacgggtggcggcggtcggggcaaggctcagcgttctggcgagcggtctccgtgccgcggtccgcagcctttgcagccaggccacctctgttaacgaacgcatcgaaaacaagcgccggaccgcgctgctgggagggggccaacgccgtattgacgcgcagcacaagcgagtgagtcctgaggggcctaaggaaagctaacagccagggagaggatcagtctcttgctggaccctggcagctttgttgagagcgacatgtttgtggaacacagatgtgcagattttggaatggctgctgataagaataagtttcctggagacagcgtggtcactggacgaggccgaatcaatggaagattggtttatgtcttcagtcaggattttacagtttttggaggcagtctgtcag

SEQ ID NO: 28 - DNA, 488 bp, Homo sapiens
  misc_feature (1)...(488): n = A,T,C or G
aggggannttcgaaattggagaacatagccagngtgctggaattcccttcacccacattgcccctgccaatggagggctttgaggagaagaaaggcgcgtcaggggagtccttctccaaggacccctatgtgctttctaagcagcatgagaagcgaggtcctcacgctttgcagtcatctggtccgcctagcactccctcctctcctcggctgttgatgaaacagagcacttcggaagacagcctaaacgcaacagagcgggaacaggaggaaaatatacagacttgtacaaaagccattgcctctctccggattgccacggaagaggcagctctgctcgggccagatcagccagcgcgggtgcaggagccccaccagaaccccctgggaagtgcacatgttagcattagacactttagtagacctgagccaggtcagccctgtacctcagccacccaccctgacttgcatgatggtgaaaaggacan

SEQ ID NO: 29 - DNA, 479 bp, Homo sapiens
  misc_feature (1)...(479): n = A,T,C or G
attcgaagaccactattcgagtgtcgtggaattccgcgagcagnggcagcccggagcacctgcagaagccccggagcgagggcagcccggagcactccaagcacaggagcgccagccccgagcatccacagaaacccagagcctgtggaaccccagatcgccccaaagcactcaaaggacctagcccggagcaccacaaacccttgtgcaagggcagccccgaacagcaaaggcacccgcatccagggagcagccccgaaacgctgcccaagcacgtgctgagtgggagcccggaacacttccagaagcaccggtcagggagcagccctgaacacgccaggcacagtggagggagcccggagcatcttcagaaacacgctcttggggggagcctagagcatcttcccagagccaggggcaccagcccggagcacctcanacaacattatggagggagccctgatcacaaacacggaggg

SEQ ID NO: 30 - DNA, 474 bp, Homo sapiens
  misc_feature (1)...(474): n = A,T,C or G
atcgangccccatcgagatccctgtccangtggnggaattcgggcttgtcccgcggagcctgcagagctagacgttggggtgtgtccgtgatgatatgggggccaggctgggagtagggcctttctagcagggttgggtggctcagtgagggtgtggaagtgggggacccacggggcctggctttgggactagacatgccagccccagctgggctggagggagcctgagtgagccccgacatacgctgggcctttcagctcgccgtgctctggtgacacacaggcggccaggttgggatttgtgtcaattctaggagccatcaagcatgaaagtggttctgtctcctgagcgcaagcctcgccggacccctgggcgaaggcctggacttgcagatgtgtgttccctgtgcgggtggacagagggggcccttatgacccacattgcagccccattccaccaccccttcctcccca

SEQ ID NO: 31 - DNA, 483 bp, Homo sapiens
  misc_feature (1)...(483): n = A,T,C or G
aggaagagccncnnttcgagatccctattcgagtgtcgtggaattcagttccgccatttgtgaggccagaggtttccggactgttggcctcgccaggcagccgtctcccgccccaggcggcatcccccagtccctcccgcctccacgagagcctggagctctcagcctcgcccggggctccactctctcctccggctccctgggctgttttgctctaacgatcttgccagatccctccctctgtagacaaccaccaacctctgtttgctgttgaattctctcctcacattacccaggtctgctcaagacatgattttggttttggtttctgagggttctagtgggcagaaggttggagggacacttatgagggtggccgggggtctgacgctgcactttggaaaaactcacacagctgaatttccaaagaaatctgccctttgccctctttgcacctttgatacattctggaagttttctcaa

SEQ ID NO: 32 - DNA, 478 bp, Homo sapiens
  misc_feature (1)...(478): n = A,T,C or G
atcgaaganccctattccagtgncgtggaattcctggagcgcgagcaggagcagcgacggcacacggcctacatttcggagctcaaggccaagctgcatgaggagaagaccaaggagctgcaggcgctgcgcgaggggctcatccggcagcacgagcaggaggcggcgcgcaccgccaagatcaaggagggcgagctgcagcggctgcaggccacgctgaacgtgctgcgcgacggcgcggccgacaaggtcaagacggcgctgctgaccgaggcgcgcgaggaggcgcgcagggccttcgatggagagcgcctgcggctgcagcaggagatcctggagctcaaggcagcgcgcaagcaggcagaggaggcgctcagtaactgcatgcaggctgacaagaccaaggcagccgacctgcgtgccgcctaccaggcgcaccaagacgaggtgcaccgcatcaagcgcgagtgcgagcgcg

SEQ ID NO: 33 - DNA, 488 bp, Homo sapiens
  misc_feature (1)...(488): n = A,T,C or G
cccccccccggngnnaatgagaccatngaaatgagagcctaggccagngcggnggaantcgngccgtcgagtacctgcatggtctggagatcatccacagcaacgtcaagagctctaatgtcttgctggaccaaaatctcacccccaaacttgctcacccaatggctcatctgtgtcctgtcaacaaaaggtcaaaatacaccatgatgaagactcacctgctccggacgtcagccgcgtatctgccagaggatttcatccgggtggggcagctgacaaagcgagtggacatcttcagctgtggaatagtgttggccgaggtcctcacgggcatccctgcaatggataacaaccgaagcccggtttacctgaaggacttactcctcagtgaaattccaagcagcaccgcctcgctctgctccaggaagacgggcgtggagaacgtgatggcaaaggagatctgccagaagtaccttgagaagggcgcg

SEQ ID NO: 34 - DNA, 472 bp, Homo sapiens
  misc_feature (1)...(472): n = A,T,C or G
catcgatgaccntaggcnatggacgngcatatncncnngacgcacggngatgacggngtcagcacagttctagggcggggatatcatctgtggccatgccctgggcacccctgggtcactccggctcccaccagctctgtgtaactttctcctccctccactgtttgaccaggcgcaacatgcatcagatgacggacgggctggataagccaggtcagatccgctggccactggccatcacgctggccatcgcctggatccttgtgtatttctgtatctggaagggtgttggctggactggaaaggtggtctacttttcagccacatacccctacatcatgctgatcatcctgttcttccgtggagtgacgctgcccggggccaaggagggcatcctcttctacatcacacccaacttccgcaagctgtctgactccgaggtgtggctggatgcggcaacccagatcttctt

SEQ ID NO: 35 - DNA, 474 bp, Homo sapiens
  misc_feature (1)...(474): n = A,T,C or G
tggcggcannnnnnnnnnttcgagtttcgtatgcagtgtggaggaattccagcaacaataatatggcattgcttcccatactaccacaataagtaataaaacattttgtaattcattctgtaacaagaacagcagatcatttatcatggattgcctagagaaaccttttcaggaggattaagtgttcgcacttcatttaggaactgcttttagtagagctgagttgggaacttagtttttggtttattattgctaaggttctaaatgttacatagaaattttctctttgtactagatttacagatgaaaataattatttcagaatcatttccctcattttttattacacatgttgctttatgataaaagcaaaaaatataaattgctattctaaacttggggattttactttagtgattgttttatgtaatacccaactaagtttgtatatttagaaatccagaaacaatgcaa

SEQ ID NO: 36 - DNA, 479 bp, Homo sapiens
  misc_feature (1)...(479): n = A,T,C or G
agggaagccgggccggannnnttttgacctcgattacactantccatgtgctggaattcgcggaagatggcggcgtccaagggaggttgagggctctgaggaggcgttgagaggtttccgtacagcccgaccgtgcggctttggggatcccatcgctctgtgtttcctgctccaggtttcgcgtctcgcatcttcccagaccctcgggcgcgatgtggaggagctgcctccggctgcgggacgggggacgccgtctcctgaatcggccggcgggtggccccagcgcttctatgagtccggggccaaccatcccgtctccagcccgggcttacgccccgccgacagaaaggaagaggttttatcagaatgtcagcatcacacagggtgaagaccacattgtgcaacacatcattggacaacccaacccagagaaacaaggatcagctgatccgggcagccgtgaagtttctggacaccga

SEQ ID NO: 37 - DNA, 462 bp, Homo sapiens
  misc_feature (1)...(462): n = A,T,C or G
tgcgcctgnnnnntttttgactagagtaccntaggccangncgnggaattccgggcttcaccaggaaaactcgtcagcatagccagaaggacacaaaagctctactcatttccagtgaaatgaggaagcccacttcagctgctgccgtccccgctggcagctctcaccagggactgttcagaggcaccgatggggtcttgctctgttgcccaggatggagtgcagtggcgcgatctcggctcgctccaacgtctgcctcccgggttcgagccattctcctgcctcagtcccaccccagctccctgtccctagtggctgggactacagacgtacgccgtttcattctgaaatgtgtctcccggtctcggaggtggggcctgctgggaggtgatcggatcatggcggcagatcccttatgaatggtttagcactatccccttggtgatgagtgacttctcactc

SEQ ID NO: 38 - DNA, 491 bp, Homo sapiens
  misc_feature (1)...(491): n = A,T,C or G
gtcgcnnanagggcggnaaatgagacctatngaactgagagcctaggcagnngcgnggaattcgcctgaggtccgctgctgccagctgggttatgctgtctccaaagctatctgcagggggggaggccctgagcctgggcaggggagggtacagaggcctcaacccatgggacctgggggtgatctgaactctgcactttactttttttcaggagaaaccgcgccccaccctaaaggaggaggaaatagagtctgtcccaccctaagccccagtccctctccccaggtctctttggcatctcccagctggtctggggctgaaggcccttctctggggttggccacagtgaggccaggatctggctgggcaggtggcagtgttccgcctgtgggctgggtgcggaggcgggcctgggggtcttagagagagagcggcggatgtgactgcgggccaggaggaagcctgggcccaagatgtcaccattttcccg

SEQ ID NO: 39 - DNA, 480 bp, Homo sapiens
  misc_feature (1)...(480): n = A,T,C or G
agaaaaagaaaaacaaaaaanntttcgagtttcgatatccgtgtgcaggaattcgttggagggtccgggcggaggcccgctcgtgtggaagtcgtcgacgccgccgctcgtccgtcctcccgtccgttctcgctcccggccgccatcatgctggcgctcatctcccgcctgctggactggttccgttcgctcttctggaaggaagagatggagctgacgctcgtggggctgcagtactcgggcaagaccaccttcgtcaatgtcatcgcgtcaggtcaattcagtgaaaatatgatacccacagtgggcttcaacatgaggaaggtaactaaaggtaacgtcacaataaagatctgggacataggaggacaaccccgatttcgaagcatgtgggagcggtattgcagaggagtcaatgctattgtttacatgatagatgctgcagatcgtgaaaagatagaagcttcccgaaatgagcta

SEQ ID NO: 40 - DNA, 489 bp, Homo sapiens
  misc_feature (1)...(489): n = A,T,C or G
agggcngnnnggggnnnaaactgagacctatggcagtgacgncgatttcttccactcgtccaagggacagcccacggtctggaggccgaggaccaccagcaggcaggtggactgactgtgttgggcaagacctcttccctctgggcctgttctcttggctgcaaataaggacagcagctggtgccccacctgcctggtgcattgctgtgtgaatccaggaggcagtggacatcgtaggcagccacggccccgggtccaggagaagtgctccctggaggcacgcaccactgcttcccactggggccggcggggcccacgcacgacgtcagcctcttaccttcccgcctcggctaggggtcctcgggatgccgntctgttccaacctcctgctctgggaggtggacatgcctcaaggatacagggagccggcggcctctcgacggcacgcacttgcctgttggctgctgcggctgtgggcgagcatggngg

SEQ ID NO: 41 - DNA, 481 bp, Homo sapiens
  misc_feature (1)...(481): n = A,T,C or G
gggcngnnngnggncatgagaccatagcaggagggcatttccgnngcccaagctggtcttgaattcctgggctcaagtagtcttcctgtctcagcctcccaaagtgttgggattactggtgtgagcatcgtgcccagccttggtgtcttatttagtttgtttgatgaggtcatgtttccttggatggtcttgatgcttatggatgtttgttcatgtctgggcattgaagagttaggtatttcttgtagtctttctagtctgggcttgtttgtatttgtctttcttgggaaggccttgcagatattcaaaaggacttggattttgtaatctaagccatacctgcagtaaaggacaacccaatcccagtaacactgtagttctagtagacttgtagaggtacgtccttggtggtcttcaataagatccaaaagaattccctgtatcataggcagnctcttattctcttcctttactttttccn

SEQ ID NO: 42 - DNA, 490 bp, Homo sapiens
  misc_feature (1)...(490): n = A,T,C or G
cggcgcncnnaggggnnnaattgagacctntnnaactgagaccctatcagngcggggaattcgccaggaatgctgcttgctctgtgaactctgcagcctcagtgtcctcatttgtggtgacagctccctcttaaggtcattgtaaagatttaaggagatgctgaatgcccaagtcctgcctccagtatatgtgcttttctccttaacttcccactcattaccttttgggccttgagttttcatctgtgaacccacataggataatagtgggactgacttccaaggggttgttgtgaggaatgggtatgagaattcaagtaaagcaccaaagagactgccagacacagtaggggtaccataagcagtagctgttattacgatatgattgtagtgaggtgaaactataatttcttcctttcactgacagaaaactctcaagcagctggtccaaagagcataaacagcacaaggcaagtagcaggatgttgct

SEQ ID NO: 43 - DNA, 442 bp, Homo sapiens
  misc_feature (1)...(442): n = A,T,C or G
catcgacatcgactnacgcncggccggnggaannccactgacagagctttgggggccgtgatgtgattgcagctcctgaggtggcctgtttaccccaggtctaggaatgaacttctttggaacttgcataggcgcctagaatggggctgatgagaacatcgtgaccatcagacctacttgggagagaacgcagagctcccagcctgctgtggaggcagctgagaagtggtggcctcaggactgagagcccggacgttgctggactgtcttgtttagtgtagaagggaagagaattggtgctgcagaagtgtacccgccatgaagccgatgagaaacctcgtgttagtctgacatgcactcactcatccatttctataggatgcacaatgcatgtgggccctaatattgaggccttatccctgcagctaggagggggaggggg

SEQ ID NO: 44 - DNA, 470 bp, Homo sapiens
  misc_feature (1)...(470): n = A,T,C or G
aatgagaccataggcattgtggnccaattcctacagccagatgcggatccgggccaagcagtgggccgagggcatgacgtccttgatgaaggccgcgctggacctcacctaccccatcacgtccatgttctccggagccggcttcaacagcagcatcttcagcgtcttcaaggaccagcagatcgaggacctgtggattccttatttcgccatcaccaccgacatcacagcctcggccatgcgggtccacaccgacggctccctgtggcggtacgtgcgtgccagcatgtccctgtccggttacatgccccctctctgtgacccgaaggacggacacctgctgatggacgggggctacatcaacaacctcccagcggatgtggcccggtccatgggggcaaaagtggtgatcgccattgacgtgggcagccgagatgagacggacctcaccaactatggggatgcgctgt

SEQ ID NO: 45 - DNA, 477 bp, Homo sapiens
  misc_feature (1)...(477): n = A,T,C or G
natcgaganccctagtccagnatcgagtaccatagggcgtgagccggaattcagcaataccaggcccaccgggccttcggggaccgcaggaatggtgtcatcagagcccgcacctacttctacgccaatgaggccaagtgcgacagccacatggagacattcttgcgctgcatcgaagcctcaggtagagtcagcgatgacggcttcatagccattaagctcacagcactggggagaccccagtttctgctgcagttctcagaggtgctggccaagtggaggtgcttctttcaccaaatggctgtggagcaagggcaggcgggcctggctgccatggacaccaagctggaggtggcggtgctgcaggaaagtgtcgcaaagttgggcatcgcatccagggctgagattgaggactggttcacggcagagaccctgggagtgtctggcaccatggacctgctggactggagcagcctc

SEQ ID NO: 46 - DNA, 493 bp, Homo sapiens
  misc_feature (1)...(493): n = A,T,C or G
cggcgcnnnnnnnnnaggacatcgaagaccataggaaactgagggcatttcaagaggcaaaggtaaatgtacagaatttactttttcttctataaaacccgagtcagtaccaagaagagtcaatttattagttttctaaaataaaaaaaaatcaaaatcaccaaaaaagagcaatatccaagaaaacattgaaaatgaaacacaacatttagtaagaatagaaaacttgggcactgtatcaccctgttcctagataccgatttactggtggccatttaaatagaatttttttctatctaattcatttatacttccagagttcgaaattacatttcacctgcaataaatgagataacacttgtaaattatatggcactctgcctaacacacgttaataactcaatacatgttagcaataaacttttagtatagtagtcaaagtattaatttctcacattgcaatttccttcaaagacatgaatacaacctttct

SEQ ID NO: 47 - DNA, 493 bp, Homo sapiens
  misc_feature (1)...(493): n = A,T,C or G
agggcnnnnnggnagggaattgagaccatnngaactgagagcctaggccagngcggnggaattcccacctcctgtcctgtcccctgcaggtagtattcacagtgtggtgttacctgggaggagggaggaaggagctgagatgaaggagattcaggtaaacagtagccacagtggccaggacccccttcctgaggatccctgtccttcctcgcagcaggtgcttagtcctctcctagggagaagcacggaaagattcctcaaggcctcagtcccatgtccaaggcatacctaggttagaaatgtcctttacttgtttctcagttactatttctcctcttcctccctccccctgccttctcttggctgtcatttagctctctggcccacagaaatactccatccaaggagctggtcctcagtcagcctgatgaggacaggtcagtggccaacccttttgccccagtccttcatctggagacagtcacatagtcac

SEQ ID NO: 48 - DNA, 472 bp, Homo sapiens
  misc_feature (1)...(472): n = A,T,C or G
nttcgaganccctattccagngtggtggaacttcangcatcagccatggcacccagcctgtgatgtacatatttaaagaaaactgtataacctgacttgggaacataatagtctaaggacatattcatattataaataattttcctcaaatgtatatgtaagtttaacacagtcttaacatttgggatttgacaaaatgattctaattaccagtaagaataaacaaacatgtgaaaggaactagtaacatttcaaaatagaaaagtctgagcaaagcgtgccttaccacatatatagctacagtaattaaaactatgggtcctggtgcagggatggacaaaccacagaaataaaatagcacatggacagtccaatatatacaggaaattagcgtgtgatatggtttgaattttcccctccacaattcaggtgttgccaatgtggcagtattaaaaggtggggccggccgggc

SEQ ID NO: 49 - DNA, 476 bp, Homo sapiens
  misc_feature (1)...(476): n = A,T,C or G
nccgataccttttgcangngcttgtgttccctgtctgctctccctgcgttgcctagggtaaagcctccagatttgccatactgagcccctcttcctagcatcaggcgatacatctgagttcaaatgtcttcccaggctcagggacctccattccttgagattgtcttggcatggcccagccctgcctcatgggatggacaatgcatggggtggtctttatttttccctttcaaataaaacactagtcaggtaccgttttatcccagtcgtactcttccaggtttggaagacccagagaggccaagatcccacccttagccatagcgagcggtggtggtggatagcatcacaagaaacgagcctgaaaatcaggtccagccggtccaagcacatggcctcccatctgggagagcccactgtcccactcccacatgtctgggcacctgccctgggctgaggccaggctgctccacggg

SEQ ID NO: 50 - DNA, 500 bp, Homo sapiens
  misc_feature (1)...(500): n = A,T,C or G
natcgagncccctgngnngaatcgtagtccctagtcagtgtggtggaattcctgcgagctcagcaaccccagcgccagcagagtcagctgtgccgggcagatgctggaagtgcagccaggattgtatttcggtggggccgcggccgtcgcggagccagatcacctgagggaagcgggcatcacggccgtgctaacagtggactcggaggagcccagcttcaaggcggggcctggggtcgaggatctatggcgcctcttcgtgccagcgctggacaaacccgagacggacctactcagccatctggaccggtgcgtggccttcatcggtcaggcccgcgctgagggccgtgcggtgttggtgcactggtctctttttcagtcatgcaggagtcagtcgaagtgtggccataataactgcttttctcatgaagactgaccaacttccctttgaaaaagcctatgaaaagctccagattctcaaaccagaggctaagatgaan

SEQ ID NO: 51 - DNA, 495 bp, Homo sapiens
  misc_feature (1)...(495): n = A,T,C or G
nattgaganccntatccagaatcgaggaacantcgtgcatcgacagcgaggcacgggccgccaactacaccagctccttgaatttgccagacaagacgctgcagttcgttaaagaccaccctttgatggatgactcggtaaccccaatagacaacaggcccaggttaatcaagaaagatgtgaactacacccagatcgtggtggaccggacccaggccctggatgggactgtctatgatgtcatgtttgtcagcacagaccggggagctctgcacaaagccatcagcctcgagcacgctgttcacatcatcgaggagacccagctcttccaggactttgagccagtccagaccctgctgctgtcttcaaagaagcctcgtctcctaagcccctccctcctcctggctcctcttccctgtcctgtctgggccatgtgggggacaggaggctttcctctccctggaccccctggccagcctcgggtgcggagcccga

SEQ ID NO: 52 - DNA, 477 bp, Homo sapiens
  misc_feature (1)...(477): n = A,T,C or G
cattgataacctacgcatggcgggaactgattacgctccctggccttcgcgcatctcccaggttagctgcgtgtccgggtgctaggctgcagacccgccgccatgacgctgcgcgcggccgtcttcgaccttgacggggtgctggcgctgccagcggtgttcggcgtcctcggccgcacggaggaggccctggcgctgcccagaggacttctgaatgatgctttccagaaagggggaccagagggtgccactacccggcttatgaaaggagagatcacactttcccagtggataccactcatggaagaaaactgcaggaagtgctccgagaccgctaaagtctgcctccccaagaatttctccataaaagaaatctttgacaaggcgatttcagccagaaagatcaaccgccccatgctccaggcagctctcatgctcaggaagaaaggattcactactgccatcctcaccaacacn

SEQ ID NO: 53 - DNA, 541 bp, Homo sapiens
  misc_feature (1)...(541): n = A,T,C or G
ctggcgaaagatangatgtctctaggtacgtcactagactagtttacgttgccttctaaaatcttcttcaatgtaggaagcagnnnnnnnnnnttcgagacctgaacactgtcgnggaantcgnccaagctctagctttgtgcttaacccagtgggaggctattggggaattttatgtgatcagtgccttggctcacaacagcgatcttggtcatcctcagcacatgggagctatggaaggccctaagttgacctatggtttggtgcagtgggagagaagaacagaggatgaaaccccgaggaagggcataagcccgtaaagcaactgagaggttcccagcagcccaagcgagcgaatgtttcagagtgatggagcgggaagcgcccaggctctggtgtcagatggccctccgtgcgtccccctgctctcagctctgcaacccgggcaagatacatgacctctctgtgcctccgtttcctcatctgtaaaacagggatagtaatacctccctcccagaagtattatgaagatgagaaatgc

SEQ ID NO: 54 - DNA, 448 bp, Homo sapiens
  misc_feature (1)...(448): n = A,T,C or G
natggagtccatagcacagngcggnggaattcgctgagctctttgatcctttgagagatggtttgacttttcccgagcaaagagcctttgttgaaaagcgggggtggaattcagtcctcacagataatgaggggacaagacctaattgaaccgagtattgccgggaaggaaaaggcaacgggccaagcctttgacagggtgcgaaactgacttttatcatcgttatagtctttaaatcctgggaaacgagttggcaaccccaaaataaagaagtgtaatgacgtctgatgacttcacccaaatacagaccattccaagaaagacttgcgcagttctcatgcgtggttgcgtttttgcataaaactaagatttcctttgtccgcatgtttaatagctntaaaataaattgaggtttttatcggataaaagtagccaggacaaagtgatg

SEQ ID NO: 55 - DNA, 449 bp, Homo sapiens
  misc_feature (1)...(449): n = A,T,C or G
natgagacctgaggactgtcgnggaattcgaggaggagtgcaggcctgctcccagcccagcgcctcccaccccttttcatagcaggataagccggagcccagggagggaacggacctgcgagtcacacaactggtgacccacaccagcggctggagcaggaccctcttggggagaagagcatcctgcccgcagccagggcccctcatcaaagtcctcggtgttttttaaattatcagaactgcccaggaccacgtttcccaggccctgcccagctgggactcctcggtccttgcctcctagtttctcaggcctggccctctcaaggcccaggcaccccaggccggttggaggccccgacttccactctggagaaccgtccaccctggaaagaagagctcagattcctcttggctctcggagccgcagggagtgtgtcttcccgcgccan

SEQ ID NO: 56 - DNA, 484 bp, Homo sapiens
  misc_feature (1)...(484): n = A,T,C or G
cttagatcccttncagnnggcgganntttagattnccctagtcagagtggaggaattcctcatttggttctcatttgaccattttataatcattattttggtctcatttttattcttcttattcatcccatgaactagatcaacttgtattattttactagatcaacctgtattattaacgtcatttacatgtaaattgatgggattcagatattttatcaactgtttttccattagtgattttaagtaattttaaagaaggaaaattatattacagataataaaaatgaaagaaagttataaatattggacatggcttttttaaatgggaaagtcttcttaagcaccaatataagcaccttaaattgatacatagaaaagaatgacataacgttttgtggtctttgttctcttaaatatgaatatagctagttagcctaaaatttacacaaaatgtattcaagatcaaattagtgaacaaagc

SEQ ID NO: 57 - DNA, 496 bp, Homo sapiens
  misc_feature (1)...(496): n = A,T,C or G
cgggggagnnnnnnnatcgaganccnnatctgagtccctagtccgtgtggtggaattcgcggcccggctccgggacgagatcaacgagaagcagaagaccattgatgagctcaaagacctaaatcagaagctccagttagagctagagaagcttcaggctgactacgagaagctgaagagcgaagaacacgagaagagcaccaagctgcaggagctgacatttctgtacgagcgacatgagcagtccaagcaggacctcaagggtctggaggagacagttgcccgggaactccagaccctccacaaccttcgcaagctgttcgttcaagacgtcacgactcgagtcaagaaaagtgcagaaatggagcccgaagacagtggggggattcactcccaaaagcagaagatttcctttcttgagaacaacctggaacagcttacaaaggttcacaaacagctggtacgtgacaatgcagatctgcgttgtgagcttccn

SEQ ID NO: 58 - DNA, 506 bp, Homo sapiens
  misc_feature (1)...(506): n = A,T,C or G
cgcccccccccccncgcgcaatagaagaccactaggaatagtatgaccattagncagagcggcggaattccacacacacacacacacacacacacacggtgacataatattcctgggggtcccagccctgaccaggaagaatctggacaggtggtggagaagaaggctgccaatccctcccacaatcccactctgcaagacagaagggtgagcaacatttttttctgctgcaagaggaagttggaagctccatccccacaacagatctcgatgggaggacatagaggaaggagctttctatcccctttctcagaggggacaggaaccagcagagtgtagttttggcttgaaggagcaatggggaggggacttcatcaggatgaacagacttatgggtccaggggtaaatccatcgacctctttcccgtggagcaagaagttgctccacgggaaacatgtcagatgttggttgagacatcgtgcaaagtgcttgagtgccaggtgcn

SEQ ID NO: 59 - DNA, 443 bp, Homo sapiens
  misc_feature (1)...(443): n = A,T,C or G
gatccatatacagagtggnggaattccccagcgccccttcatacagtgccctggaccctcggatgggtagcgccaccagagcgaccaaacgtcccgcgccttccaggccgcactccagagccaaaagagctacatggcggcggcggccaagcccaacaacctttccctggtggtgcacggaccgggggacttgcgcctggagaactatcctatccctgaaccaggcccaaatgaggtcttgctgaggatgcattctgttggaatctgtggctcacatgtccactactgggagtatggtcgaattgggaattttattgtgaaaaagcccatggtgctgggacatgaagcttcgggaacagtcgaaaaagtgggatcatcggtaaagcacctaaaaccaggtgatcgtgttgccatcgagcctggtgctccccgagaaaatgatg

SEQ ID NO: 60 - DNA, 453 bp, Homo sapiens
  misc_feature (1)...(453): n = A,T,C or G
ntttgaaaactgatgaccactagnccgngcggtggaattctaaagagaacaatgaaagctgggccggctccttcaagacccgcctcaaggtgcaccgcggcggcttggggaccaccatgagacccctgctggggaaaaaaaaactcactgatattggcctgagtgcctacgccggagctgcgcgcagatcatcatgtacggggcatttttttctacacggggattgctctgaacccaggctggagttcagcagtgcgatcttggctcattgcagccttgaacctcccgggctcaagtgatcctccctcctcaacctcccaagtagctgggactacagctgggtgagctatgaacaggccaactgcaagggcgagcagtttgtgtttgagaagggcgagtacgcccactgggactggtggaccagcagccagaggacagactcagcagcctgag

SEQ ID NO: 61 - DNA, 555 bp, Homo sapiens
  misc_feature (1)...(555): n = A,T,C or G
cacctagcgtgcactataacactacgtcatacgtgcagcacggatgcagtagcaagacacgaaattcaacatcattatacgtcacaaaaagcccgggagcgggagaannnnaatggaaacctgagaacgtcnggaanccnnactcangcaatctccgcctccagggttcaagcgattctcctgcctcagcctcctgagtagctggaattacaggcatgtgccaccactctcagctaatttttgtatattgattagagacagagtttcaccgtgttgaccaggctgggcttgaactcctgacctcacgtgagccatctgcctctggctcccaaagtactgggattacaggcatgagtcaccacaccaggccagaatgttagattctttttggagattagatcagtaaaggtagggacagtcaataaaaggagtattatgtaaacacttacatgatgcactcaatttcctactctacgacattaaggaggaaaaactatttttttctactttgccttttagatcactgcctgagcttactttgtttctttaactcgg

SEQ ID NO: 62 - DNA, 469 bp, Homo sapiens
  misc_feature (1)...(469): n = A,T,C or G
nttttagtccctagtccagtgggtcgagatccctagtcagtgtggtggaattcctacagtcctcagtcgccttggacaaagaagggtggatcctcacattccatctttttcaactccaaggagggggctccctgcctgatagcctgcggcgggtccaggagctgacaggccgctctgtggagtttgaggagatggacattctggaccagggagccctacagcgtctcttcaaaaagtacagctttatggcggtcatccactttgcggggctcaaggccgtgggcgagtcggtgcagaagcctctggattattacagagctaacctgaccgggaccatccagcttctggagatcatgaaggcccacggggtgaagaacctggcgttcagcaactcagccactgtgtacgggaacccccagtacctgccccttgatgaggcccaccccacgggtggatgcaccgacccttn

SEQ ID NO: 63 - DNA, 453 bp, Homo sapiens
  misc_feature (1)...(453): n = A,T,C or G
nttgactacgtagaacatcgcacangcggnggaattcggggtaggtagggaagtgcagcctgccactgttgcctcccaatatgggcttggtgggcattgatggtgggtgccctgtgcaggagtgctgagtctgcaagagttctccaacatggaccttcgggacttccacaagtacatgaggagccacaaggcagagtccagtgagctggtgcggaacagccaccatacctggctctaccagggtgagggtgcccaccacatcatgcgtgccatccgccagaggtgagcacctgaagctgttctcactggagcagggggagaagactgggcagggcctccacagaagtccttgtctggggccaagaggacagaatggattaacccatttgggattaagttccatttgttagaccaggattgggacccactgaaagacaggcaattaacaaaggt

SEQ ID NO: 64 - DNA, 445 bp, Homo sapiens
  misc_feature (1)...(445): n = A,T,C or G
nttgacgaccccttggtcgacccctagtccatgtggtggaattcgcatgagctgggctcatccagttgggctccaggctgtgatgctgtggcaggggccaagtgacttggtgcagaggggctgctgccgagctaaggctctgaaccagagcttgccatggcccagaagtgaaatgcgaaccccgtgccagccctgggctggccccaggacccactccaactgcttaaggatccccctgtgggcttcaggccccgtgagatggaggtggagggttcacaggacctcccatgaggttaagtgggtggggaggctgcctgtcatcctgggtggccactcgagttctccattcccaggcgggaagctgccatctggtgaagaaatggcagagaaaggctcagagtagaggacgcagctgggcaggttctaccctcccttctgcccagtg

SEQ ID NO: 65 - DNA, 442 bp, Homo sapiens
  misc_feature (1)...(442): n = A,T,C or G
nttgaagacccactggacagctggtggaattcctgctggggaggatggggggatgttatataaatatagatataattttattttcggagctaagatggtgttatttaagggtggtgatgggtgagcgctctggcccaggctgggccagactcccgcccaagcatgaacaggacttgaccatctttccaacccctggggaagacatttgcaactgacttggggaggacacagcttcagcacagcctctcctgcgggccagcccgctgcgaaccctccaccagctaccggagggaggagggaggatgcgctgtggggttgtttttgccataagcgaactttgtgcctgtcctagaagtgaaaattgttcagtccaagaaactgatgttatttgatttatttaaaggctaaaatttgtttttttattctttgcacaattggttcn

SEQ ID NO: 66 - DNA, 483 bp, Homo sapiens
  misc_feature (1)...(483): n = A,T,C or G
agagaggaccncctgatnccntcctgatnaccntatgcagngtcgtggaattcatgcatgactggcatgtaaggtgttcaggaaaaccaggaaaaggtggaacagactgctacctctgtctgaagtggtttggagggaaggcctcagggacagggcatacctagcagtagctggcaagcccatgggagaaaaggcaagggggcaaccatctgccagggcacagaggccaggggatggccacaaggagtctccagaggccagtgggagtcatgcaaactggaacggggcctgggaaaggcccttctgtgtgcccaggcctgcctccccaacaccgtgagcctagaaacaaaggggccattctctctaggatttgatgctgccatctccggctggcagtgccaggtggtgggggcatcgggggtgtcaatccattatcccccccaactcctaagtcctctgaagctggatgttgttggagagtgg

SEQ ID NO: 67 - DNA, 480 bp, Homo sapiens
  misc_feature (1)...(480): n = A,T,C or G
gatggtcnnnacatgagaccctgctcgatgtgcctgaattcgggcactgcccgctgagacagaaaaggcagaggcaggacaatacccagcctcctggatggacagcctcacccaccccacctgggcccagccaggagccccgcctggccatcagtatttattgcctccgtccgtgccgtccctgggccactggcctggcgcctgttcccccaggctctcagtgccaccacccccggcaggccttccctgacccagccaggaacaaacaagggaccaagtgcacacattgctgagagccgtctcctgtgcctcccccgccccatccccggtcttcgtgttgtgtctgccaggctcaggcagaggcgcctgtccctgcttcttttctgaccgggaaataaatgcccctgaaggaaaaaaaaaaaaaaaaaaaaaaaaaaaaaannggcggcccgttcaattttaaagggccgtttaaacccc

SEQ ID NO: 68 - DNA, 466 bp, Homo sapiens
  misc_feature (1)...(466): n = A,T,C or G
agaggtccncatcgagccccatgagaaccctaggaagcgcgagctacaggacacaggtcaggtgtatgcagccctgcaccaccgcatcctggccctgcgcagccgcgtggagcaggagcaggaggccaagatgcccgcgcctgagcctggggcagccccatccaacgaggaggacgacagcgacgatgacgatgtcctggctccttcaggggccaccgcagctggtgctggtgacgaaggggacgggcagacgaccgggagcacatagcggccgggagcccggctgcacaccaggctgctgctttgtccgtntatcacccgcccacccgcccccaccccaccggcagcgtccaggtgcggggccgggaaccacacaccccactgggccggccacagtctggacccgcacgtcctgttcaaaagcagactcgggaactgcctgaatgtggtttgggacacgagacct

SEQ ID NO: 69 - DNA, 475 bp, Homo sapiens
  misc_feature (1)...(475): n = A,T,C or G
agtgcctcnccattgaaaaccaactgattactctcggaanncgcgnggaactccgagaacgtgaaggcattcttcagccgcgtagccgccctggcattcgagcagtcggtgctgcaggacctggagaggcagagcagtgcccggctccaggtcggcgatggagacctaatccaaatggaagggagtccgcccgagacccaggagagcaagaggccctccagcctgggctgctgctaactggagcctgcgtggaaggcctccgctccctgcacacacacggacaggaatttccgtgactgtggtgcggagactggagcccaagctctgcagcgtgtcgccctcaagctgtaggcccgtgttccagtccctccacccacccaccgggctcagctccagggcacagtcacttgtccgttgcaggttgggcactagaaaaggcccccactggctgcctgggagccccacaccaccgggc

SEQ ID NO: 70 - DNA, 445 bp, Homo sapiens
acaggctgtaaacaagtactcgtggacagcatgcagagggagatggagagaaataactcacgagagtgtacgactggcccagaaacaatgggcgtccactgcatgcaaaatacgtggaagccctcatggttgggtgactgggtctctgcccacaaggccataggagagctaagggttaagcaccagccagagcaaggaggctgcctgtggctccacctccttccgccacccgagcccgccagccccaggcccagctgggatagcagcttctccctactctggcagacacagaccagagctggagggagggtgtgggggcccatgagcacagagccaggagatctgggcacccctgacacctggccagccgtaagaggccaggcccacccactgtcccaggctggggttggtcttcagcctcccagtgggtcacagcagtgtggcg

SEQ ID NO: 71 - DNA, 421 bp, Homo sapiens
agatgaggagagctcctccgagggcttggaggctgaggactgggcccagggagtagtggaggccggtggcagcttcggggcttatggtgcccaggaggaagcccagtgccctactctgcatttcctggaaggtggggaggactctgattcagacagtgaggaagaggacgatgaggaagaggatgatgaagatgaagacgacgatgatgatgaggaggatggtgatgaggtgcctgtacccagctttggggaggccatggcttactttgccatggtcaagaggtacctgacctccttccccattgatgaccgcgtgcagagccacatcctccacttggaacacgatctggttcatgtgaccaggaagaaccacgccaggcaggcgggagttcgaggtcttggacatcaaagctgagtcact

SEQ ID NO: 72 - DNA, 495 bp, Homo sapiens
  misc_feature (1)...(495): n = A,T,C or G
tgaggganaatcagaccctangcatcgagagccattcctctggacggcaccatcaagcagtaggagagtgacgacagcctgctgtactatggcgagggtggctagggtcatttcaatgaagacggctccttcatcggccagtacacggtcaaaaaggacaaggaggaaacagagggcaacgaaagctcagaggccacgtcacctgtcaatgctatctactctctggcctaacggagcccacccaggcacagccaccactttgcaagtgggaggaggggagaaggggagacaaaaccactgcagacctaccacgaagccaccaccaccttcagtaacaaggcgctgatctgtccctggagttcccaggttcccagctccccccctgcaagccttgaagcctccagcaacgtctatctccaggagagcagggcaacctatgcaagtgttccggcaggaccagaagtggccactcaacacacgttctcaccagtcacn

SEQ ID NO: 73 - DNA, 216 bp, Homo sapiens
  misc_feature (1)...(216): n = A,T,C or G
ctggcangannangannnagntntgagntcaccgaacagcagaaagaatttcaagctactgctcgtaaatttgccagagaggaaatcatcccagtggctgcagaatatgataaaactggtgaatatccagcccccctaattagaagagcctgggaacttggtttaatgaacacacacatttcacagaactgtggaggtcttggacttggaactttc

SEQ ID NO: 74 - DNA, 442 bp, Homo sapiens
  misc_feature (1)...(442): n = A,T,C or G
ntagaagacccttttgtagcccgtnggaatncgggataccaagagaaccggaccagctgctggcagggaaactgtcttccttttctccaagatgtacagaaccaaagtgggcttgaaggaccgccagcagctctacaagctgatcattagccagctgctatatgacggctacatcagcatcgccaatggcctcatcaatgaaatcaagcctcagtctgtgtgtgcaccctcggagcagctcctgcatctcatcaaactcggaatggaaaacgatgacaccgcagttcagtatgcaattggtcgttcagatactgttgcccctggcacagggattgacctggaatttgatgcagatgttcagactatgtccccagaggcttctgagtacgaaacatgctatgtcacatcacataaaggaccatgccgcgtaactacctatagg

SEQ ID NO: 75 - DNA, 442 bp, Homo sapiens
cccacgggaagggcaggtgaagcaggggctgctgggggattgctggttcctgtgtgcctgcgccgcgctgcagaagagcaggcacctcctggaccaggtcattcctccgggacagccgagctgggccgaccaggagtaccggggctccttcacctgtcgcatttggcagtttggacgctgggtggaggtgaccacagatgaccgcctgccgtgccttgcagggagactctgtttctcccgctgccagagggaggatgtgttctggctccccttactggaaaaggtctacgccaaggtccatgggtcctacgagcacctgtgggccgggcaggtggcggatgccctggtggacctgaccggcggcctggcagaaagatggaacctgaagggcgtagcaggaagcggaggccagcaggacaggccaggccgctgggagcacagg

SEQ ID NO: 76 - DNA, 470 bp, Homo sapiens
  misc_feature (1)...(470): n = A,T,C or G
ggatgccggggngcnnnncatcgagtccctantcagtgtgcaggaattccctgcctcgcagctgggcgaggggacttggaggacagggtgaagctgcagaagacctggggtgggatggctagagaggacgccaaggactggggaaggggaagttaggaataccttacatccaatgcccacccgtgctccgcagggcaagggcagccgtcgcctcggccgcgtgcacccagctcaggctgttcccagggatttagtctggggggacaacccatggcgagatgtggtggcattttacctcagagtggagctgaagatggataaacaagttctggagaccagaaggccaaaatcaaaagtatgggcaggcttgatttctttagaagactccagcggagaactgtgtctccttgcttctgattctacatctccatccatgggccactgtttcagcaacctcagccagtgcaaca

SEQ ID NO: 77 - DNA, 422 bp, Homo sapiens
gccagtgagtcagacacgggtttcgcagccatgtttcctggctccgaggacacgggtggcaggcccgttgcagcccagagccactggtccctacagggcgccgccacaccagcaggaaggaggatggctgtgtccggagcctggcggggaggcggcctccccagtatgtgagtgcagggatctgccagaaccacctggccctctgtagggcgtttaactggaaataccctcactgccaagtggagactggggcgtgtgccacattgccagccaccaggaaagcttttctttttctttttttttttttttaaacccccaaaaccccttttagcggggggaaaaaaaccaaaaggtttttttgcccggggggcgggggaaaaccccaccttgaaaccccggggtcggggggggaactctttctc

SEQ ID NO: 78 - DNA, 488 bp, Homo sapiens
  misc_feature (1)...(488): n = A,T,C or G
tggagntncncggggtggccgaataccatttgtcancgtaaaaactnnngaanncngggaannnannangaccaaaggccgcccgaggggcttgcgccttcggcaggccttgtatggacacacacaggctgtcacgtgcctggcagggtcagtgaccttcagcctcctggtgagcggctcccaggactgcacctgtatcctgtgggatctggaccacctcacccacgtgacccgcctgcccgcccatcgggaaggcatctcagccatcaccatcagtgacgtctcaggcaccattgtctcctgtgcgggagcacacttgtccctgtggaatgtcaatggacagcccctggccagcatcaccacagcctggggcccagaaggagccataacctgttgctgcctgatggagggcccagcatgggacacaagccagatcatcatcaccgggagtcaagacggcatggtccgggtttggaagactgaggatg

SEQ ID NO: 79 - DNA, 478 bp, Homo sapiens
  misc_feature (1)...(478): n = A,T,C or G
gagtgccgggtnncaaacctgaaagcctaactngccagcanngncnggaancctcatgcaggtgaagccctgtggaaacagcctggcagtcccttgaaaaatgaagtcataaaccccagcaattgcactcctgggcctctgacagagcttgcacgtcccctccaaagctcgtgttaagctgtgagccccagtgccggaggtggggcctggtgtgtttgggttctgggggtggatccctcatggctgggtgccatgaacccactcaccacagtgagttctcacgagatctggttgttgagaagtgtgtcatacctcccccacaactctctgtcttttgttccggctctggccatgtaacaagcctgctcctccttcgccttctgccatgactgtaagctttctgagggctgaccagaagcccagcagatgccagcaccatgcttcctatacagcctgcagaaccgtgagccagctaaan

SEQ ID NO: 80 - DNA, 420 bp, Homo sapiens
  misc_feature (1)...(420): n = A,T,C or G
cacactctgtgctcccagccttgaggctgcagtaggactctgatctcacctgccagaagagaggcggggccgcgtcctcctggcgtcaccggcgtcactgtcattccttggtgtctgtgctgggcatggttggcttgggggtctgtggtttcctgggccttgtggcagggtttctcccgtgggagaatttggtgtggaaagcataggaggccccttccgaggttgacaccgtgtcctccgcggtgtttctcgcctggtcgtctcgtcgtgtggacgctgccgttctggttctcggaggtgtgtccttcgccgtgttggggttatttgtctgtgttcctgcacttttcccgggctctgagctggattgatggggccagtctcccccctcccatcttgaggtcgttctccacattccttccn

SEQ ID NO: 81 - DNA, 467 bp, Homo sapiens
  misc_feature (1)...(467): n = A,T,C or G
ggcggcccggnaaantttgaatcgattacatagtccatgtggtggaattcgtcctgggttctgggttatcaaggtgagagaaaccagaggttgccagttgtaggtgggcgtcaggactagagtgatgcttccagaagtttctgcaagtgggccgagtctaaggtagggcagggtacgccagaagttgaggggcactaggtagacaggccgagctggtggctgggtgctcccctcaccctccatgctgctaggagcccgtgagcagggacttgctctcctctccctccctcctggggcctgcctgtctgtctgtgaactcttgtcggccagcgaggccgggagcaggtggccttcatctgcaactgtgtctctctcagcctccacagccacggggacaccctgcacctattcccacgggacaggctggacccagagactctggacccggggcctccccttgagtagag

SEQ ID NO: 82 - DNA, 470 bp, Homo sapiens
  misc_feature (1)...(470): n = A,T,C or G
tggagggcnngnnnnnnttcgagattcctantcagtgtggtggaattcgtcctgtgttctgggttatcaaggtgagagaaaccagaggttgccagttgtaggtgggcgtcaggactagagtgatgcttccagaagtttctgcaagtgggccgagtctaaggtagggcagggtacgccagaagttgaggggcactaggtagacaggccgagctggtggctgggtgctcccctcaccctccatgctgctaggagcccgtgagcagggacttgctctcctctccctccctcctggggcctgcctgtctgtctgtgaactcttgtcggccagcgaggccgggagcaggtggccttcatctgcaactgtgtctctctcagcctccacagccacggggacaccctgcacctattctcacgggacaggctggacccagagactctggacccggggcctccccttgagtagagacccc

SEQ ID NO: 83 - DNA, 454 bp, Homo sapiens
attgatttcgtgatccctagtccgtgtggtggaattccaatgccagagcaaagaaactcattgacagctaaagctactgctgttcttctttatcatttattcacttccgtagctcctccttgaaagttattaccttttcagagtttaagttttcggttccacgctcttctaattgggagataatatggaagaagggccagagcagttacagccctccttcttttttgttttctgttgagggccgactgctgctctgccttccttctagtattttctttctcaattcatacgcttagattggttttcatatgtcatgtttagtgttttcatcctcctcatatacttcagcaggttcttttgctttcaagatttggaagcattgccaaagacagccatgaagaaggaagctgtagaggtgttttttgttgttgtttatttttgcttttgtggttga

SEQ ID NO: 84 - DNA, 418 bp, Homo sapiens
gtatacattaatattttcttccaaagatatatctttggttagaaacacaaaaaaataaaactagtaatattgtatgtttatctatctctacatatttccagcatatgtagcgttaatagatctgtcctggtaactgtgtctttgggatttcattttggttccatcaaattaggaaaagaaatggcttagttgtatatgattagctagagatttttggagccagacacctgctgtttagtagataacttagtacagaccctaaacttgtcatttgtttttctcacagaatagccatttcctgctgtcttcccaatgatcactgccctttcaataacactcttgcctctagaatcatatgttcaaagtatgaatacacacctagcacatagtaggtgctcaaatattaatttcctccttg

SEQ ID NO: 85 - DNA, 252 bp, Homo sapiens
tcccatcaccatcttccaggagcgagatccctccaaaatcaagtggggcgatgctggcgctgagtacgtcgtggagtccactggcgtcttcaccaccatggagaaggctggtgctcatttgcaggggggagccaaaagggtcatcatctctgccccctctgctgacgcccccatgttcgtcatgggtgtgaaccatgagaagtatgacaacagcctcaagatcatcagcaatgcctcctgcaccaccaactg

SEQ ID NO: 86 - DNA, 447 bp, Homo sapiens
  misc_feature (1)...(447): n = A,T,C or G
caagctgtcattcgcctatacactgcggtggcatggccgagcctcagccatcactgcacgtgntcctagagccaacacatgaaagtcgtacctaattcgggcaccacgtgaacgcgcatcgatcgcacatctccctcctccttcctaaagctcagattgacactgcccactcactgctggtggggtggagtgcacctagtagaggcagagctcagcctggacttggcctgggaaaactggcctgcatgtggaggtgctcccctcaaccacccagcttccaatcccctgagaatcactgagctgctttgtctgagtttcctaagtgccatccctggggaggtcagtgaagtggggaggggaggtcaacttttctcccaggcccccacattgagtctaattcccttctggngccatacatagagcaggtgtggttgggggttgactgan

SEQ ID NO: 87 - DNA, 422 bp, Homo sapiens
  misc_feature (1)...(422): n = A,T,C or G
ctttgtggctcatccgtaaagtagtattaaaagcattttacctgctaacagtatgcagggctcattggagctgttccataaatacatgttgaagtgactatagtagggcgtgccccagggagggtcacctggatgttgtcccaccaacctttgccatcttagtggtttggatctaggtactgatgtttcccatttcttgccaggatgagtacagcattctgccctattcattcatcattggggtccatggttatgtgcttgtgtattctgtcacctctctgcataggtaagtgaccaaggttgtgagtgcgggacttgggagaacctgaggactgtctcataaagttatagctccaattcttgtgtttaaagcttccaagtcattgagagtctgtaccanaagctacatgaaggccatgggg

SEQ ID NO: 88 - DNA, 461 bp, Homo sapiens
  misc_feature (1)...(461): n = A,T,C or G
tttgagtccatatcagnngggtgaagtccatgataatagatgaggaatttacagngcttgcaatgtcaaggaggcaacacctgcaaacagatggctcaagaatcgctgggagtgccggcctctttccctcttggtcgcctgctcagcagcatgactgtgtattgatagaccattatgggcataggatgttaccctaactggtgcccacagtgaacaaggggctgagccctgtctttcgtctggtcttaggagggcttctgtttaatgggctgaacttaaaggtccttccctgcaacccccacacagccacagcccatgggctgaaagctcagctgaactcccattgtacctccccagctcatcctagtgaatgtgccaaggcccagagggagaggtcaggctgtgccagctcagtgctatactgcaggcacatggatccccaaccctgggccctattttga

SEQ ID NO: 89 - DNA, 496 bp, Homo sapiens
  misc_feature (1)...(496): n = A,T,C or G
ccccccccccccccncccccccatcgatcaccntcgatagtagacattagnccangcggtggaattcgtctggtttgaccctgaacctatgtgaatgtcaagcgtttgcttttcgtatttgatttggttatatataaccttgctcctgtggaatcaagtagcagccttctttttgacaagtcctgagatctgactcaagtctcagtgtttacagtgtaaagatatgacatttattgattttccactctgtgtgccagtccttgtgaagaatgaagcctggcatccaatataggaggaggggcacgaaacccccaggaaactgtttgtgatgagccctggcacaggtgtgggacgatcatcaaactgacatgtttagagaccaagggttctggtgatagcagtgctactgcccctggcttgtaaaacagcagtaggccagtgaagagggggcacagatcctgcggtgtccagagctgattggaatcaccggactcat

SEQ ID NO: 90 - DNA, 483 bp, Homo sapiens
  misc_feature (1)...(483): n = A,T,C or G
agtgccnnnnnaggcccatgagaccttgatagaggccgtattccatcctccgggacaccctcccagcagtgtgcttggctcccacatcagcccttccctctccctggggcgcctccccatggctcctcccaccctgagcatagcctcctggacccacctctgcccccatttatagcacgacttcccgaccccctctcttttctccccatttcccttgatccgtctattgcatgaggcttctgcggctggcactgacttgagggggtggtgctggtccagcactggggtggcctccctgctgcagatggtgggccactgtggcttccttggccaccagcggtagaggcacgggtccctgacccccacaaatccagtggcccttggctcccaggacgtgctccctcctcacctcccagccccgaaacatgaagtgctggggggcgcagggctccgagccatccacacttgaagatgcaccccatn

SEQ ID NO: 91 - DNA, 470 bp, Homo sapiens
  misc_feature (1)...(470): n = A,T,C or G
ctcgaganccntangnagngngttgtagaccctagtccatgtggtggaattcgcttcagtaagttccaagccgagctctccctgcattgcgagaccaatctagacgggtcgtgtagcagcaactcaccgccggtgacaatgctggggctggggggcctgaggatcaagtgtgactcttcctcggacattgagtatgaccttgaccgaaaccccaatagtgcaacagactcggatggtagtacgctgtccaacagccagccttccttaccagtggagatcttgcccttcctctacttgggctgtgccaaagactccaccaacttggacgtgttggaggaattcggcatcaagtacatattgaacgtcacccccaatttgccgaatctctttgagaacgcacgagagtttaaatacaagcaaatccccatctcggatcactggagccaaaacctgtcccagattttccctga

SEQ ID NO: 92 - DNA, 465 bp, Homo sapiens
  misc_feature (1)...(465): n = A,T,C or G
tctcgagatccctagtccangtggtgtaagtcctgcaggctatcttagcggcacagagacgaggagaagatgtggagacttccaagaaatgggctgatggccagaacaaacaacactctattagcaacaacacggccaagctggaccgggagacagaggagctgcaccatgacagggtgaccctggaggtgggcaaggtgatccagcaaggtcggcagagcaaggggcttacgcagaaggacctggccacgaaaatcaatgagaagccacaggtgatcgcggactatgagagcggacgggccatacccaataaccaggtgcttggcaaaatcgagcgggccattggtgagtgtccctccacccttcgccgggtccgctgaacagggaggctacccgctcccagctggggttggtgagagtgggactcggaggaagatgatggccctgggggtccactgttctctg

SEQ ID NO: 93 - DNA, 492 bp, Homo sapiens
  misc_feature (1)...(492): n = A,T,C or G
agggcccggnnnncgcgcccactgagaccntcgatagagcgccttcgnaccccccgaccatgcctctggagtttgtttgctgcatcggcggatgcgacgacaccctgagggagatcctggacctgagattttcagggggcccccccagggctagccagccctctggccgcctgcaggctaaccagtccctgaacaggatggacaacagccagcacccccagcctgctgacagcagacagactgggtcctcaaaggctctggcccagaccctcccaccacccacggctgctggtgaaagcaattctgtgacctgcaactgtggccaggaggctgtgctgctcactgtccgtaaggagggccccaaccggggccggcagttctttaagtgcaacggaggtagctgcaacttcttcctgtgggcagacagccccaatccgggagcaggagggcctcctgccttggcatatagacccctgggcgcctccctgggat

SEQ ID NO: 94 - DNA, 457 bp, Homo sapiens
  misc_feature (1)...(457): n = A,T,C or G
agaggctnnnnnnaactgtttgcctctcaatngncgnggacnncctctgctgccccctccacgcgctgcgtcctctgtgccgtgtcctctcgtccagaccctcttttgttccctccacgcgctgcgtactctgtgccgtgtcctctcgtccagccctgtgctgccccctccatgcgctgtgtcccatgtgccgcgtcctctcgtcccaaccctctgctgcccgctgctctctttgggacttccattgtttctccttccccttcctttcctgggtttcttccctagggaggtgcccttcctgctgctgcggggccctgctgtggcctctgccttccgtccctggcgggagtgagactggctgagacccaggggaagctaggagactgtcctagatttccgagatggcggtacacaggcttgctggcttgggatagggctctatgcccctgcttcgggt

SEQ ID NO: 95 - DNA, 495 bp, Homo sapiens
  misc_feature (1)...(495): n = A,T,C or G
ggtgcccgnnnnagcgcccactgagaccntcgactgagcactctaggacangcggnggaantcgaagagatagaggaacatgcttttgacgacaataaatcagtcaagggggtcaattttgaggcagttctgagggtggaggaagaagaggccaattctaagcaaaatataacaaaacgagaagtggaggatgacttgggtcttagcatgctgattgactcccagaacaaccagtatattttgaccaagcccagagattcaaccatcccacgtgcagatcaccactttataaaggacattgttaccataggaatgctgtccttgccttgtggctggctatgtacagccataggattgcctacaatgtttgggtatattatttgtggtgtacttctgggaccttcaggactaaatagtattaagtctattgtgcaagtggagacattaggagaatctggggtgttttttactctttttcttggtggcttagaattn

SEQ ID NO: 96 - DNA, 494 bp, Homo sapiens
  misc_feature (1)...(494): n = A,T,C or G
agtggccngnnnnnagcgcccaatgtagaccctagatagagcgccgtaattcgcctcttccagaagcatgtcagggagacggacaggtgctctccttctcgtgcaccacatccaagtccacccaccgtggacgcagtgtgactaaatgctggccttgaagagaaaccctcagccagcttgtctgttgtccaggtccctcagtgtctctggtttccctgccctgcataatttaagcattagtgccaaatacatctgtcatattcctctccctggagactgcgaaatgtccagactttttcagactagtggagggaaggaatgttacataactaagtggaggcctggaactgtcaggatttgacagggctggaccagagacccttccgcctctgcctagtgtgtctgtcaggcaggcagcagccatcaatccaagaatgagccatggcggcaagcactgtgtggagaaaggaacccagccgaggtctgagtttcaa

SEQ ID NO: 97 - DNA, 482 bp, Homo sapiens
  misc_feature (1)...(482): n = A,T,C or G
agccggcntcactgagcctgnnggcatggcaagaactcccannactcgagcagacagactggccataggttttagcactgttcagaaagaagccgtattggtgcgagtggacagttcttcaggcttgggtgactacctagaactgcatatacaccagggaaaaattggagttaagtttaatgttgggacagatgacatcgccattgaagaatccaatgcaatcattaatgatgggaaataccatgtagttcgtttcacgaggagtggtggcaatgccacgttgcaggtggacagctggccagtgatcgagcgctaccctgcagggcgtcagctcacaatcttcaatagccaagcaaccataataattggcgggaaagagcagggccagcccttccagggccagctctctgggctgtactacaatggcttgaaagttctgaatatggcagccgaaaacgatgccaacatcgccatagtgggaa

SEQ ID NO: 98 - DNA, 493 bp, Homo sapiens
  misc_feature (1)...(493): n = A,T,C or G
tggcnnnncccaggcgnnccattgccttgaganncctacntggctacgaagngccgcggaattccaggccttcttggagccatatagccctgcagtgtgggtgatgatgtttgtcatgtgcctcactgtggtggccatcaccgtcttcatgttcgagtacttcagccctgtcagctacaaccagaacctcaccagaggcaagaagtccgggggcccagctttcactatcggcaagtccgtgtggctgctgtgggcgctggtcttcaacaactcagtgcccatcgagaacccgcggggcaccaccagcaagatcatggttctggtctgggccttctttgctgtcatcttcctcgccagctacacggccaacctggccgccttcatgatccaagagcaatacatcgacactgtgtcgggcctcaatgacaagaagcggcctcaagatcagtacccacctttccgcttcggcacggtgcccaacggcagcacggan

SEQ ID NO: 99 - DNA, 485 bp, Homo sapiens
  misc_feature (1)...(485): n = A,T,C or G
aggcgggnnnngggggnattgagaccctagcaaactgagggcattcctacaaccatgatgaaggttgagtagcacactcatctgactttgaaacttaaattcttctggagtttctcagcttctcaagtctccttcatgagaatagatcctgaaaacaaatccagatcccggtagagggtgatgatttctccctatggatgcggggtctgattctaggccagcttcgtacgcagctcagtgaccaaccacgggatggatgggatcactatcatcctaactgagtatctaggacaccattgagtttaaagactccaactcatcatcactgtaaaccatccaagtatcctgcaaaccctggcactttagcatctgaaagacacctgccagactgcctgtggcagtccctcatgcttgacttttggtgcctagggtcctgttctcctggttagagggaacttggtgtgctcacactgagggaaagtgaa

SEQ ID NO: 100 - DNA, 490 bp, Homo sapiens
  misc_feature (1)...(490): n = A,T,C or G
cgggcngnnnnnaggggcctganncccctnnttactgagaccntcatcagtgtcgtggaattccccggctcgagcggccatctgagacccggtagtaccgcccatgctgcagcgggaaagagaacagagagtcctggggacaggtaccgtgcagagggcttgagaaggggccgggtcgcgggggcaagggtatgaggggagggctgcagaccgccgctcttccagttcccgccatcctccgcgagctcaggcgttggcatttcggggcctggcaaatccccgccccgcctccgcgcaggggctactgggagttggagtttgcttctctgtagttgggcagctgctcttggtctagtgaccaccagcctggacagctacggagaacccgccttaggtagaaagaaagtgatttttttcctttgcaagaatttgacccgggaccctaactgcttaatgcatatttagatcgttttctgtacgttgtcagttc

SEQ ID NO: 101 - DNA, 484 bp, Homo sapiens
  misc_feature (1)...(484): n = A,T,C or G
ggcgggnnnngggggaactgagacctatccgactgagggcatncgaaggagtcgagcaatagctgttcttattttctgggctgagaggaaggaatgggtagaggggagaagagctgctgaccacacaaaagagggctgggccagtgggagaggggctcctgcagagatggagggttctagagctgggtgggggccccccactcccaggcggtcagcaggtggggtgaggactgagagctgcaaagctggtggccggaggggaggccaaagggccctgtccaatggactctcctctctgcaatagaggaggggtgtcacgagtgtacggcttcagggggtttactgtctctactgaaggtcccagaagaaggaagccttgttgaccacaaagggtgggtggtgctgggtgagggcccacatgccactgctgggctgagtggaatgtcccgtatgaaacaaggttgttctttctcttctgagagct

SEQ ID NO: 102 - DNA, 498 bp, Homo sapiens
  misc_feature (1)...(498): n = A,T,C or G
cggcgnnnnnnnnagggggaattganncccctnnnnttactgcagtccnctgtgcagtgtcgtggaattccaaattcatggccttcaagtcctttgccgacctcccccaccgccctctgctggtcgacctgacagtagaggaggggcagcggctcaaggtcatctatggctccagtgctggcttccatgctgtggatgtcgactcggggaacagctatgacacctacatccctgtgcacatccagagccagatcacgccccatgccatcatcttcctccccaacaccgacggcatggagatgctgctgtgctacgaggacgagggtgtctacgtcaacacgtacgggcgcatcattaaggatgtggtgctgcagtggggggagatgcctacttctgtggcctacatctgctccaaccagataatgggctggggtgagaaagccattgagatccgctctgtggagacgggccacctcgacggggtcttcatgcacaaan

SEQ ID NO: 103 - DNA, 503 bp, Homo sapiens
  misc_feature (1)...(503): n = A,T,C or G
nggggatagaaaaccnntnnnnnnnnncactgatgtntcctagtccagtgtcgtggaattcctcagagggaggaaacctggccgtccagctcagagaacaccccatctaaggggacaggcacaggccactgctcttccgcaggaagcccttggttggaaagggcaaggcatgggtgtttgcgtgcgcgttctggtggcagtggaggtggatcccagccgctgttttccacgacagggtgtggagaggagactgtgcatctctctctcctcaggagactgtttttgctgtcaggggttccaggtggaggggagtagaaagcgcatggacgctccagggttttctgtagcttgaagggacgggtccgggccttgagggctgggaaaccccttgcggagggggaggggcgcgttcctgtgtggccaggagcggatggggaagcgaagcgggtggaaaaaatcaagacagctctttggcctggcgtggtggctcacacctgtaatcc

SEQ ID NO: 104 - DNA, 232 bp, Homo sapiens
  misc_feature (1)...(232): n = A,T,C or G
ggacccatcaccctccgaggctcacacccactgcccacctctcctcctggcgctcgagtcccttgcctcattccttgggctgtctctggcacccatcgcttcggatgcctcctcatcctgaacgattgcttttcttttctcaagaggaagttcacaatcacaaagaactttacaaagctgaaatccagaaagttctaaaagaaaaagaccaacttaccacagatctgaactn

SEQ ID NO: 105 - DNA, 473 bp, Homo sapiens
  misc_feature (1)...(473): n = A,T,C or G
nctgaaccctggccagggcgtttganaccgtcgccaggagctacacacctgtccccactagtgtcccctggttgacagagcccccttagcctccccaaggctgtcactgcggctgtgacagctgaggagtgccgcctttgaaagccagtggacagtcgctccactagggggagaggccctggccctggcgcaaaggaggcgttgcgaggcgggacgggggctggaggggctgagcagccttcagggcagggactgggccctgggtcactggagacgttgatattagtccgtctgctgccaaattgctccccaccacatgagccccaggggtttatgtcccaggaaggcgagggtgcccatctgagcggaattgggaggggacggcaccagctcatctccctcagggcctttgcctcctggtgctgccctggtggctgctcctgcaccacagcccctgatggctgctgctagtc

SEQ ID NO: 106 - DNA, 498 bp, Homo sapiens
  misc_feature (1)...(498): n = A,T,C or G
ctcgatggccctcnnnntttgtagaccctagtcagtgtggtggaattctgtgagtatgccagccgagacagcccacatctcttcaccccaccatgagctccggcggccggtgctgcaacgccagacgtccatcacacagaccatccgcagggggaccgccgactggtttggagtgagcaaggacagtgacagcacccagaaatggcagcgcaagagcatccgtcactgcagccagcgctacgggaagctgaagccccaggtcctccgggagctggacctgcccagccaggacaacgtgtcgctgaccagcaccgagacgccacccccactctacgtggggccatgccagctgggcatgcagaagatcatagaccccctggcccgtggccgtgccttccgtgtggcagatgacactgcggaaggcctgagtgccccacacactcccgtcacgccgggtgctgcctccctctgctccttctccagctcccgctcaggttn

SEQ ID NO: 107 - DNA, 492 bp, Homo sapiens
  misc_feature (1)...(492): n = A,T,C or G
natcgagacccctagtccagngncgtggaattccagaggttccacacttgtctggacatctgggcgtcagaatgtgaagggcctcgggaacatggacctggcgagagcaggtggccggctctgatccccaggcaagagggaggtgtgcagggtggtgccctctgggaccagctcagtgctccatgcctcccccagctgaaagctggacatgtgtgaggtttctgccttgccacgaaggtaacaaagttctgcttctctggacataattggaatcagcaggggaggatgatgggtgaaaggaaatgacaggaaccttcagagacagcagctgtgtcacctgagaagggttagcagcacaggctggggtcaccgggcacagctggacgtgctccctcaacttcangagagtggattgtggatggtgtgtccagagtctcccgggagggaagatgacccgagaggattttagaaagcacatgttgcagaagtggt

SEQ ID NO: 108 - DNA, 478 bp, Homo sapiens
  misc_feature (1)...(478): n = A,T,C or G
gcgcccttcgancctttcgagatccatagtcagtgtggtggaattccacattctctgaattatcctcatgtttagcattttatttatttattatatcacccagcctggaatgcagtgatgccatttcagctcactgcaacctccgtctcctgggctcaagggatcctcctgcctcagcctcccaagtggctggggctacaggtgtgcaccaccacaactggcaaatttttgtattttttgtagagatggggttttgccgtgttgcccaggctggtctcggactcctgagctcaatcttcctgcctcagcctcccaaagtgtcgggattaccggcgtgagccaccgcacctggccagcattttccatccatgatttgagtgagcacaggaatgctatgaggcatacataccaattggccccattttacaggcgatcaaactgaggtcccaaggagatgtcacctgcctagatgactgcg

SEQ ID NO: 109 - DNA, 495 bp, Homo sapiens
  misc_feature (1)...(495): n = A,T,C or G
tgcagggcccaattggggcctaactgataccctagtcagngnggtggaattcggaccctcaagctgactgacgtgcagaagggcatggatgagggggagtacctgtgcagtgtcctcatccagccccagctctccatcagccagagcgttcacgtagccgtcaaagtgccccctctgatccagcccttcgaattcccacccgcctccatcggccagctgctctacattccctgtgtggtgtcctcgggggacatgcccatccgtatcacctggaggaaggacggacaggtgatcatctcaggctcgggcgtgaccatcgagagcaaggaattcatgagctccctgcagatctctagcgtctccctcaagcacaacggcaactatacatgcatcgccagcaacgcagccgccaccgtgagccgggagcgccagctcatcgtgcgtgtgccccctcgatttgtggtggcaccccaacaccaggatggcatctacggc

SEQ ID NO: 110 - DNA, 454 bp, Homo sapiens
  misc_feature (1)...(454): n = A,T,C or G
nattgaaaactgatgaccactagtccangcggnggaattccacggctctggcgggctgacaagtgctgaagccccgtttgaacgcactcaagagcctgtactgtgccggatgaaagacacacacataagggaccgcgctgccgcatgcgttctttggcgctgaaagggaaccgtgaccccggactttcgtaggatatggactaaattgcatggacgggcatgcggaccccacattctatgggagagcacagctgggtggagagcaggcccttcagcaaggcaggcactctggactcagctcggcttttctgtttcttaggaattggccctgtattctgtgtgctgggaggtacccagctggtgcctgtggggcctctcttggcaccttgaggtagttgctcgtttcctccaccgggcctttattttcccttctgggcgtttccagccctgtgtn

SEQ ID NO: 111 - DNA, 399 bp, Homo sapiens
cctttgccatgtgtgctcccaagaatttggagctggaggataccgatccaatggtgaatcctccagattccccagagactgaatctcctctccagggcagcctgcactcagatggctccagcgggggcagcagtggcaatacccatgatgactttgttatgatagactttaaaccagctttttctaaagatgacattcttccgatggacctggggaccttctatcgggagtttcagaacccacctcagctgagcagcctctccatagatattggagcacagtccatggctgaagacttggactcattaccagagaagctggctgtgcatgagaagaatgtccgcgagtttgatgcctttgtggaaaccctgcagtaaaagtatccttgagtcccagcag

SEQ ID NO: 112 - DNA, 479 bp, Homo sapiens
  misc_feature (1)...(479): n = A,T,C or G
gaagtgggtttggaccttcgtagtccctagtcagtgtggtggaattcccagggctggcgtcccaccttccaggtgggggctggcacatcacagactgtcgagagcgccatgtcccatggcatgcagaggatgcacctagagacgttgcagcaagtggacaagtggccgctgtgcgggcccctcgcttgtagtgagctgttgcagcttacggtccgttccctggaggggtggaggaaggaggtgttagccagcatcaaaggtgctgggacatcccagggtggtgagatccatccacgatccagctccggtggagaaagggcccatgtcaagccttgttctgcaccccaagcattggtggtaggactgggtcctggctgatcgtccttgttcccagtggggtacatgtgagcccctgccagggccaagtcactctcccgaacccagggtcctgggaactgcagatcccggngggattcagc

SEQ ID NO: 113 - DNA, 480 bp, Homo sapiens
  misc_feature (1)...(480): n = A,T,C or G
gggagcggcntttgagatcatattcagtgcggtggaattcggctggagtgatcatggctcactgcagactcaacctcctgggctcaagtgatcctcccaccttagactcctgagtagctggaactacaggcttgcaccaccatgcccagctaatgttttaactttttgtagaaatagggtctcctgggctcaagtggtcctctgtctcggcatccgaaagtgagccactgtacccagcctgatttatgtttttaagagatgtcctggctgctgtgtggagaacagatggaggccaggcaaggctgaggagaacaattcagagcctggtacaacagactgagctagagatgacggtggcttgaaacagagcagtaataataacggaggaggagaaaactggtcagataaaggaaattacctgaaggcagagctgacaggatttgcacacggactggatgaggaacgcaacagaaagggaga

SEQ ID NO: 114 - DNA, 471 bp, Homo sapiens
  misc_feature (1)...(471): n = A,T,C or G
cggtttattcaaatcatcgacatcgggaantttngttgaaaccactctgtgttcctgtcattttagatcgaacaccagggggacattctggagatggcgagagagaaacatcaggcttcccagaaggaaaataaacagctgagtctgaaggtggatgaactggagaggaaactggaggcgaccagtgcccanaatatcgagttcctacaggtgattgccaagagggaggaggcaatccaccagtcccagctgcggctggaggagaaaacacgggaatgtgggaccctggcaaggcagttggagagtgccattgaagatgcgaggaggcaggtggaacaaaccaaggagcacgcactctccaaggagcgagcagcccagaacaaaatcctggaccttgagacccagctgagcagaaccaaaacggaattgagccagctgcggcggagccgtgatgatgcggaccgccgctac

SEQ ID NO: 115 - DNA, 580 bp, Homo sapiens
  misc_feature (1)...(580): n = A,T,C or G
actatccgacaccgcagctatatcacataatagtacaaagcagcaggaccgtagaggaatgtgcgtgagtactcaangacgtcaacaataaggcagacaagaaaaannaaaaaannttttgaaagcactttggaannccgtnggaannnacanccnacaccaccacccaacagggcctggacctgctgatcaaaaggaacggnagatttgacgcccttacggcctcctctagatacggcggcatcctcccctattccgacgaggatggtggaccccaggaccaacttaaaaatgccatctcctccatcctgggcacctggctggaccagtactcggaggatttctgtcaacctccggactttccctgcctcaagcagctggtggcctacgagcagctcaacatgccaggctcagacctggagcgccgtgcccaccttctcctggcccagctggagcactcggaacccattgaggcagagcctgaggctctgtcaccagtgccagctctaaaaccaactccagagctcgagctagctctaacaccagctcgagcacccagcccagggccggcttcagcccg

SEQ ID NO: 116 - DNA, 468 bp, Homo sapiens
  misc_feature (1)...(468): n = A,T,C or G
nagggagccggccggnnnnncctgaactgagtgcataggcangngcnggaattcccagccttctgtttgcaaaccagaaactggctgaactctatgaaagaaatgtttcaacacttgaaattatatctagagatgttttacaagactgctctgttaccagtggcaacttttacaatgaggaaattaaagaaaatgggtgctgattttgaggtatctgaaggtttaacatctttactaaacccaatttcacctttttcttgcagatactatcttttctaagaatctatgatactagaaaagattttacatctgttgggaagctaaatacaagcaccacttgtcatagtaaaataaagtagcctgccccttatttataataaaattgatttttaaaaatcctattttctgtgtgagattttatgacacagcacatagtctttccagtaagtgcagcagaactgctgcctt

SEQ ID NO: 117 - DNA, 479 bp, Homo sapiens
  misc_feature (1)...(479): n = A,T,C or G
aggagtggnttttgagtccatattcagtgcggtggaattccttaacttgtacagtggcaactgaaatgcatttcagaaataggaggtttcgtccagcaccctctgcagccttggtgcctgtagctctggacttccctgggcctttccctgtgggagggccctgtagaccacatcagggtggggtgggggtcacttggcaaaaagggccgaggtctggtgatgtggttcccaggatctggaacctctcccacccctcctgcagttggactgaattcttccctttcatccgaagaaacccacttgctgtttccagccgctgaatctgctgagtgtgcagcctgcatcacctgctgtatgccgatcatctcagaaagggctgtgtagagtagggccctgttctccttaagatgttgcttcttgatttttttttttttttaggggggggccagggttgtgacacaccagcccaggtgagagcg

SEQ ID NO: 118 - DNA, 481 bp, Homo sapiens
agaagggggtttcggaccttctgagtccctagtcagtgtggtggaattcccggactggagaagacgcgggtggcaccgtgcgagctccaggagccccgggtccactgcgaggcctcggggggcgcagacctgcagagactgcggccaacgggaagaaataaagggattatagtccacccaattcacagacttctgagactcagacacgaggagagatagagaaccgccaatctctagatcaacaagcaaaggaggtgccaagcctgtttgtcttcattgtgacactggaggttttggatgctcttccatagatatccttccatacatatgtatgtgtatatatccttcttaacaaaggggagcttactttacactgttctccattgtcccactttcacttggaaatgctttttatatcagtgcatcaacagttgcccgtatttctttctaaggatgtactataattttactgtcttccaat

SEQ ID NO: 119 - DNA, 479 bp, Homo sapiens
  misc_feature (1)...(479): n = A,T,C or G
cgcgcccttagatnccnttagagatccctagtcagtgtggtggaattcctgagtggaatgcccctacttaggggaggtgcacgatggcgtccttgatccacttacggtaatgcaccaccttggggtacagggaatgcctttgtgtcatggcacatgtttcactgccccatgacgtgataccttgaagcacaccattacaaacaagtggggcccctcaatcacccgagcaggtgcttttgccccctgtccagcgtacaacacacactatgaacttggtcaccttctgagggtgaacttgcgcacacacgttattggaaataacatggaggtccacacactgaactttctttggggtcaagaactcctctggttcaatgctgccccagcctgaggcgtatcacgtggtccccagagctggctcctgggtgggcaggtccatgaccttcacagcatccgtgagctcggcaggctctgacagg

SEQ ID NO: 120 - DNA, 503 bp, Homo sapiens
  misc_feature (1)...(503): n = A,T,C or G
tgaggccnnnnnnaggggagaatcgaacccctnganctganancntatgcagngccgnggaattcccaagcttgacagccccccagacaatacacagagcctggacccagacgagacctccccacccccccatctttgtccccaccaggacaaagagctcttgccagtcttcccactggccagtggtccagctgtccccctagttctcctgccagggaccccaaggctgggaccaccccgccagcctgatgccccaggcacccactctgcggcaagcttttctgccacggcagccccctctagtggacacttggagccctgccgcggaggcgggggctggaggcttgtggagcccttcccaggggtcctccctagaccccggtggagcagagagggcgggggccggcccagggtcactgcccttctgcacccacagaagctgcagctggtgctggccccactgcacagcctggcctcgcaggcactggagcatgggctcccgg

SEQ ID NO: 121 - DNA, 505 bp, Homo sapiens
  misc_feature (1)...(505): n = A,T,C or G
ggagtgccnnnnnnnaggggnagaactcgaancccctttgagattgacggccntncggangcaacgaaaattagggtactcaacctaagttcggttccgatgaattcttatcccctgccccttcctttaaataacttagtgacaaaatagacaatttgcacatcttagctatgtaattcttgtaatttttatttaggaagtgttgaagggaggtggcaagagtgtggaggctgacgtgtgagggaggacaggcgggaggaggtgtgaggaggaggctcccgaggggaaggggcggtgcccacaccggggacaggccgcagctccattttcttattgcgctgctaccgttgacttccaggcacggtttggaaatattcacatcgcttctgtgtatctctttcacattgtttgctgctattggaggatcagttttttgttttacaatgtcatatactgccatgtactagttttagttttctcttagaacattgtattacagatgcct

SEQ ID NO: 122 - DNA, 485 bp, Homo sapiens
  misc_feature (1)...(485): n = A,T,C or G
agcgagcccccctgagaccctgtttgatggcgtaagacnncccggccaccacctctgaggctttcttcggcatctttgcagagttcatgagcaaattttagttacagtgaagacatcagccaaggctgcattcatctgaaggcttgactggggctggagtcttccttccaggatgggttaatcatttgtctgctggcagaacgcccccttctggctgctaataagaagactgtttcttaccacgtggatttttacagatggctgctttggtgtcctcatgagcagacagctagctttccccacagggagtggtttgacagagaggggaggaagctgcaacaccttttagacctagactcagaagtgacaagctggcatctctatcatattctttttattagaagacagncagccaggtgtggtgactcacacctgtaatcccaacactttgggaggctgaggtgggtggatcacgaggccatgag

SEQ ID NO: 123 - DNA, 505 bp, Homo sapiens
  misc_feature (1)...(505): n = A,T,C or G
tgagatcccggnnnnggggnnngaaattgaatcccatttgaactganggcatctgnangnccnggaanncctgaaccctcatcagggcttcgacctgaccaacggaggtcctcttcttgggctccacctgttctcccaggtgccctgcttgcgggtgctggtgtgtggtggcgatggcactgtgggctgggtgcttggcgccctggaggagacacggtaccgactggcctgcccggagccttctgtggccatcctgcccctgggcacagggaatgaccttggtcgagtcctccgctggggggcgggctacagcggcgaggacccgttctccgtactgctgtctgtggacgaggccgacgccgtgctcatggaccgctggaccatcctgctggatgcccacgaggctggcagtgcagagaacgacacggcagacgcagagccccccaagatcgtgcagatgagtaactactgtggcattggcatcgacgcggagctgagcctggac

SEQ ID NO: 124 - DNA, 479 bp, Homo sapiens
  misc_feature (1)...(479): n = A,T,C or G
nattggacctctgtgagattganggccntcggtgngcacactgnaggaggagtgcgaccggaagctcatcacgctgcgagacgagatctccattgacctctacgagctggaggaggagtattactcgtccagctcaagcctttgcgaagctaatgacctgcctctgtgcgaagcttacgggaggctggacctcgacacagactctgctgatggcctctcggcccctctgctggcgtccccggagcccagtgctggccccctacaggtggcagcccctgcccactcccatgctggtggccctggccccactgagcacgcctgagcctccggggccacgcttcgttctcaggaacaaaacctgaggcagccctttggatgccctcacagccttgcttctctcagcctaggttcccatttggggacttcaggaccccagagccactaggacttccttgggaagcccgttagcccagggtggg

SEQ ID NO: 125 - DNA, 489 bp, Homo sapiens
  misc_feature (1)...(489): n = A,T,C or G
ngcggtncaattgagaccntnnaaacggatgagcatacgccangncgnggaattcattgtgtcctcgttaagatttctatggaagaaatattttgacagctttaaagaagtttgatatccgctgctctagaagaacaaattccctagctggagtcaagaagtctgtgttctttaaggtcttgttttcaaatacagtaaagagttgcatctttcgatttttcttgacgcacaatgacagtgattttgtagtgccatggaaagaacacaggcctcagagccatagagcttgggggagaatctctgtttcattacttcactgctctaaggctttgcgcaagtcacttatcctccctgcatatcagtttccttattcttacaaaagcagtaatcatacctgctatgttaggttgctataaagattggagataagatacataaagtacctagtacaaagtttgccatctaataacactcaatgaaagctattaa

SEQ ID NO: 126 - DNA, 487 bp, Homo sapiens
  misc_feature (1)...(487): n = A,T,C or G
nggcgtcaacatcgagaccatatngcattgtagcngcaattcgaagnaccaattactacccacctccatctgataattgtcagcatcgattcaactcggtgcacggctcttgcttctgcttcccagcaaagtctgaaatgtattccaaggatttcagaaccaaatgaaaatgcagctgctgtgatctttagtaacctcattctctgttgggagagctcacttactcttcaacttaatggcagactgtgatcgctaactgcatctggcacaaaaacatgatcattatttttagcttcttttgcttaattggaaacttgcttcacaaaaaacacaaaaaggctacgctgggtctcagctgatgagctcgtggcggccctgtgcttgatgagggcggtgaggcagcccaagctccttgtgactgccctggcttgtgcaatggggaagggaccangcagcgcgctcattctcaaaacaaacaaaacagtgg

SEQ ID NO: 127 - DNA, 493 bp, Homo sapiens
  misc_feature (1)...(493): n = A,T,C or G
aggcgagtncccccatcgagaccctagttagagagccgtaattccctgctaggcggcctgcccagctgccgcccccggactctgatctctgtagtggccccctcctccccggccccttttcgccccctgcctgccatactgcgcctaactcggtattaatccaaagcttattttgtaagagtgagctctggtggagacaaatgaggtctattacgtgggtgccctctccaaaggcggggtggcggtggaccaaaggaaggaagcaagcatctccgcatcgcatcctcttccattaaccagtggccggntgccactctcctcccctccctcagagacaccaaactgccaaaaacaagacgcgtagcagcacacacttcacaaagccaagcctaggccgccctgagcatcctggttcaaacgggtgcctggtcagaaggccagccgcccacttcccgtttcctctttaactgaggagaagctgatccagtttccc

SEQ ID NO: 128 - DNA, 458 bp, Homo sapiens
  misc_feature (1)...(458): n = A,T,C or G
ntttgagatcattagnccttgaggngcgtttccttcattttgaatgaagccaataacttgggactgttagaccccaactccgtctcgctgatcattttggtttctgatggagatccaacagtgggcgaactaaaactgtcaaaaattcagaaaaacgttaaggagaacatccaagacaatatctccttgttcagtttgggcatgggatttgatgtggactatgattttttgaagagactgtccaatgaaaaccatggaattgcacaaaggatttatggaaaccaggacacgtcttcccagcttaagaaattctacaaccaggtctccactccattgctccggaatgttcagttcaactatccccatacatcagtcacggacgtcactcaaaacaatttccataactactttggaggctcagagattgtggtggcaggaaaatttgaccctgctaaatt

SEQ ID NO: 129 - DNA, 461 bp, Homo sapiens
  misc_feature (1)...(461): n = A,T,C or G
nactgtagatcgtaggccattgcggnggaattcggctttggaattcgtcgacttaggggttggccacgatggtgtccttgatccacttccggtaatgcaccaccttggtgtacagggaaggcctttcgggcagggcacatggttcactgccccatgacgtgataccttgaagcacaccattacagacaagtggggccccagaatcacccgagcaggtgcttttgccccctgtccagcgtccagcacacagcatgaacttggtcaccttctgagggtgaacttgcgcacacacgtcattggaaataacatggaggtccacacactgaagtttctttggggtcaagaactcctctggttcaatgctgccccagcctgaggcgtagcaggtggtccccagtgctggctcctgggtgggcaggtccatgaccttcacagcatccgtgagctcggcaggctctgac

SEQ ID NO: 130 - DNA, 432 bp, Homo sapiens
cgggccagctgctcatcgtggtcgcctggctggtggtggaggcaccgggcacaggcaaggagacagcccccgaacggcgggaggtggtgacactgcgctgcaaccaccgcgatgcaagtatgttgggctcgctggcctacaatgtgctcctcatcgcgctctgcacgctttatgccttcaagactcgcaagtgccccgaaaacttcaacgaggccaagttcattggcttcaccatgtacaccacctgcatcatctggctggcattcctgcccatcttctatgtcacctccagtgactaccgggtacagaccaccaccatgtgcgtgtcagtcagcctcagcggctccgtggtgcttggctgcctctttgcgcccaagctgcacatcatcctcttccagccgcagaagaacgtggttagccaccgggcaccca

SEQ ID NO: 131 - DNA, 474 bp, Homo sapiens
  misc_feature (1)...(474): n = A,T,C or G
nggactgtaccctatgcagggcgatgagaccctgtccaaactctgtagccctgacccgggccatgctgagccgacagggaggacggttaggtgggcggccgtcacaaactctgtagccctgacccgggccaggccaacaacagtgaaggcagcgaccatgactacctgcccttggtgcggctgcaggaggcaccaggctccttccgcctggacgcgcccttctgcgccgctgtgcgcatctcgcaggagcgcctctgccgtgcctcgccctttgccgtgcaccgcgccagcctcagccccacctcggcctcattgccctgggcacttctgggccctggtgttggccagggtgacagtgccacggcctcctgcagcccgtcccccagctcgggctctgaggggccaggccaggtggacagtgggcggngctcagacaccgaggcctccgagggggcggaagggctgggcggcacc

SEQ ID NO: 132 - DNA, 384 bp, Homo sapiens
gatagattgaaaaaaaaagtggttatattttgcagcttctctcatcaagagagtctatttctcctctctttgaatcttgaattggccatatgacttgctttgggcaaatgttggtgccttcgcaaacctggcagaagagaggcttgcacatgggaggattacctgcttttttcttcacttgaaatcctgaggccatgatctgaagatcccccaaagctagcctgctagagagatcacatgaagaaaaagatccatgcatcccactttttccaaccaatccacctataccccagatgtgtgaggccatcctagaccatccagccccaaatgaatcagcttggactagaagaatttccaagccaactcacagaatcactaaaaata

SEQ ID NO: 133 - DNA, 469 bp, Homo sapiens
  misc_feature (1)...(469): n = A,T,C or G
ngaaagaaanaatttgagttcgatgcccatgtggtggaattagcataggggccagggactgagtgagtggctaagcaggggagggtgatgtgaaggtgatctcctgtttgccaggggtgggctgaacaggagaagatgaacaaaggatccctgtctcaaaagggcttggcagggactggatgctgggtacagaagcgcgcccttgggcttcatgctcctgagctggcagcacggaagggagagctccatccatgtcgcaggagcccaggaagctcagcccctgggtaaaaagtgctcactgcagctcagatcagtcctcaggtcacatttcggggagccagcctcccctcttcccctccccagccccgctcctccctctgtggacacactccgggccctcagccagctggctgcatgaggagcagctntgtgctgtgggagagaccggctctgggagaatgggttcatc

SEQ ID NO: 134 - DNA, 499 bp, Homo sapiens
  misc_feature (1)...(499): n = A,T,C or G
agggcgaggggncccnattgganncccttcctcgatgtccctagtcagtgtggnggaattcggtaaagacacgcgtggagaagctgtgccaggccttcgagaacggcaaggagctggtcgagctgtcgcaggcctcgccccacgacatcagcaacgtcctcaagctctacctgcgtcagcttcccgagccgctcatctccttccgcctctaccacgagctcgtagggctggccaaggacggcctgaaggcagaggccgaggccaaggcggcgtcccggggccggcaggacggctcggagagcgaggcagtggcggtggccctggcaggtcggctgcgggagctcctgcgggacctgccgcctgagaaccgggcctcgctgcagtacctgctgcgtcacctacgcangatcgtggaggtggagcaggacaacaagatgacccccgggaacctgggcatcgtgttcgggcccacgctgcttcggccacggcccaccgaggc

SEQ ID NO: 135 - DNA, 489 bp, Homo sapiens
  misc_feature (1)...(489): n = A,T,C or G
ggcgagggccccatcgagaccctaactgtgaggcagtaattccagaatcggctntgcagtgcactttggggagcagatattaacttatttttgtgttggacagtagcgaaatcttgtgatttttaatcgctttgataatacttccaaattttatgatttttctgaaggaaataatgcaaacattttaaatatgtttctccccctttccaaaaactgttaaactaatgagcaagtaacactaactttgaatgtctctacaatacccgctgataactcagtggagccaggctttggggtagcggccctgagcttgcagggtttctcgccactggggctgaccacgcccccagctgtgaccgtgggtgtggctggctctcggccctgcccagctttgttctgaggacgtggtgacttcctgaacatcagcttcaatcctccatcattaatgtgaagcaaaacacaaaaaccgccccaatccctcaggattgc

SEQ ID NO: 136 - DNA, 489 bp, Homo sapiens
  misc_feature (1)...(489): n = A,T,C or G
ggaggtccccaggcgtcccaaaactgatacccctgattnactaaggacangccgcggaattctgatttcctattctgagaggctattgctcagcggtttccgtggcaacagtaaagcgtgggaattacagataaattaaaactgtggaacccctttcctcggctgccgccaaggtgttcggtccttccgaggaagctaaggccgcgttggggtgagaccctcacttcatccgttttgtctgcagctcgatttcttggttccctgactgggaagcgaggtgaatggcggatggtcaaggcagctccttaggcggcttaaacctgccctgtggaacatccctgcaggggactccaaccagcccgagcaacacggatcctgagggcgctcctggttaggcatttgccccactgggacgcctcgccagagcactgtatggcaggcccccatggaggatcaacgcagtggctgaacaccgggaaggaacgggca

SEQ ID NO: 137 - DNA, 242 bp, Homo sapiens
agtggcctgattccaccaagagaaggcccaggaggaagaagagaaaaagatgctgtggttactagtgccaaaaatgctggcaggaacaaggaggagaagacaatcataaaaaagctggagggaaactgacgcacaaggagactacgtacctgcccaagttacacagcagtggatttgaagcagaggttttgttccagcaaccacatgtcccctccaaggtgaagctataatactgatgcctg

SEQ ID NO: 138 - DNA, 479 bp, Homo sapiens
  misc_feature (1)...(479): n = A,T,C or G
ggaatggtnaccttctgcangnccgatggataccataaccaaaaccaaaaccaaccaaacaaaattcatctaagcgccaagataaagcacttctttatgtaagtcactgatatatatttgttgaaatctcaatttgcatcctcatagagtatgtgtacacatgttttgaaaacactatagttggccgggcgcggtggctcacgcctgtaatcccagcactttgggaggccaaggcgggcggatcacaaggtcaggagatcgagaccatcctggctaacatggtgaaaccccatctctactaaatatacaaaaaattagccgggcgtggtggcgggcgcctgtagtcccagccatgggaggctgaggcaggagaatggcgtgaacctgggaggcggagcttgcagtgagccgagatcgcgccactgcactccagcctgggcgacagagtgagactcagtctcaaaagaaaaaaaaaaaan

SEQ ID NO: 139 - DNA, 483 bp, Homo sapiens
  misc_feature (1)...(483): n = A,T,C or G
ggatcgaaacccctngnannnncnactgattacatactcagngncgnggaattcctgctggcctcagccatcctcttccgggagtggagcaacgtgggcctggtggacttcttgttgatggcctgtggattcacgaccgtctccgtggggattgtccttatacaggtgttcaaagagttcaatttcaaccttggggagatgaacaaatctaatatgaaaacagactagattgcaataggagcttggatggttcgaggaataggcattggaggtggtttctggccgtgattggatgtgaagtagaagaggtcctcgatcatggtgttagaattgactggatagtaacaggtggtctggtggatagcggggagcatggctcatcaccagagcagaggcccagccagccctctgcagcccaaacgtccccaacggttgcctggcaccatctctctctgatgagacgaatctcattntcatttccat

SEQ ID NO: 140 - DNA, 488 bp, Homo sapiens
  misc_feature (1)...(488): n = A,T,C or G
gcgggcccattgagcccctnnnaactgagaccataggccagngncgnggaantcacatcatccacgtgcagacgctgacccaggtgagaggccccagcagacacacagcagggaaggtcgattggaaaccacttcctttgtcctggtgcccagcaggtttctgtcccccactccagaagtgcgtctctggagacccagctcttctgaggactgtgctcaggaggaatcagtgtcccattgtacagacagggcctaaggaaggagggctcgcaagtgccctcaggtcacaggctgacttgcaggccagtgctctccccgcctcccccatgtccacgtccctcacaccttctgccctgctgggctttggaatcggacctgaggctgcccaactccctcactgaatagtcatgcagccttcccttctctgagcctcctgcccctcttttctagagtgagggtgatcttagcacctctcagaggtggtcttn

SEQ ID NO: 141 - DNA, 229 bp, Homo sapiens
  misc_feature (1)...(229): n = A,T,C or G
cttggggangnggacagctatgactcggatgatgccaccgccctatgcacgctggagtttgaccttctctacgaccgggcctcctgcactctgcactgtagcatcctcagggccaagggcctcaagcccatggatttcaatggcctcgccgacccctacgtcaagctgcacttgctggcttgacctgtaaggccaataagctaaaaacgaagactcagaggaacacact

SEQ ID NO: 142 - DNA, 495 bp, Homo sapiens
  misc_feature (1)...(495): n = A,T,C or G
tgaatgtccggggggnnnnnncctgagaccctatgagtgtgcgggcattcctcccactcgctgagctgcctgagcctaaagtttggagtgtcactgaaatcctgcagacactctgcttgaaaatgcgaagaagcaccatgtggaggtggtgggtgtgagttttcacattggcagaggctgtcctgaccctcaggcctatgctcagtccatcgcagacgcccggctcgtgtttgaaatgggcaccgagctgggtcacaagatgcacgttctggaccttggtggtggcttccctggcacagaaggggccaaagtgagatttgaagagattgcttccgtgatcaactcagccttggacctgtacttcccagagggctgtggcgtggacatctttgctgagctggggcgctactacgtgacctcggccttcactgtggcagtcagcatcattgccaagaaggaggttctgctagaccagcctggcagggaggaggaaaa

SEQ ID NO: 143 - DNA, 472 bp, Homo sapiens
  misc_feature (1)...(472): n = A,T,C or G
agccgggcaagannaaantttgatttccgataccctagtccatgtggtggaattcctcctgcagctcttgatagtgcagactctggctcctgcagcatcctggtttcctctggctcagcaagaatagggcgtgcactgagaccagcactccccctagggtgaaggcctcagcactgagttccagcaccagcaagccagcatgctgcaggtagacagggctgagaatgcagggaccccgcacctgtttgcccctgcccttttcccttcccacctcctcttgcctccttatcctcccaccttctccttcattgaccagtacctgggaggaggcagttggggcaggccccaaggctgtcttcatcacctcgaccaccaccacgatgaaacccaagatcaagttgaaggtgttgaatatcatcatggcccgcacctgccagtgagccagctcagccctgcccagcctaggggagtn

SEQ ID NO: 144 - DNA, 502 bp, Homo sapiens
  misc_feature (1)...(502): n = A,T,C or G
agtatgggccnggnnaagnnnnnnnaatcgagatccttatgcagtgtacnggcattcccagnttctcatctgtcctttcctcatccaccctgcacatgtgtatgtgaacggcttcgtggccggtgtggtggtttctcatttcataagatagttgaagggccatgccttgtctggatgttatttaataggcactactgcggtgtcctcagatggtactgagggggccttctggtccttcaaaggaaaataacacaggcatgagttcatttgggagtgtgaactttcagaacacctaataagagagtggtgtcagagtaaaaacggccccaggtctggagcatagaagtgtatctctgtgaagagagagccggtgtgttgacatgtggttcttctcacacccctctactcctcgagggctttgaatccttgggctgatttttgtgccagaaattgctgttcccgatggccaaaaggggaacctgaactggatttcagaactgcg

SEQ ID NO: 145 - DNA, 478 bp, Homo sapiens
  misc_feature (1)...(478): n = A,T,C or G
natcgaganccntttccagnggcggtagttccctttctagctaagtttgtaatttctctcgctttagcaatggataaactcagggaagttaagcatgttcggccctccagatttgcggattcatcatccaaattcagctaaccacggatgagaaacatttgaggaaaaaaagaatgcttgcatctgtacggaacatgtacggacttttttttccttgtcatcattccctaaataatccaatgtaacaactacttatgtaacaattacatagtacttgatattacaaggaatctggagatgacgtgaattatagaagaggatgtgcaaatactgtatactacaccatttaatataagggccttgagcatctgtggattttggtatccaggaggttcctggaaccaattctccatggatacctaccgccgactgtaacttgtcagaggtcacaatctcccttcctgatagatgcaaaatc

SEQ ID NO: 146 - DNA, 425 bp, Homo sapiens
  misc_feature (1)...(425): n = A,T,C or G
atctttgtcctttgggatttctgaacttcagaaagccagtgttgatggctggtttaagttactgagccaggaggaaggcgagtacttcaatgtgcctgtgccaccagaaggaagtgaggccaatgaagaactgcggcagaaatttgagagggccaagatcagtcagggaaccaaggtcccggaagaaaagacgaccaacactgtctccaaatttgacaacaatggcaacagagaccggatgaaactgaccgattttaacttcctaatggtgctggggaaaggcagctttggcaaggtcatgctttcagaacgaaaaggcacagatgagctctatgctgtgaagatcctgaagaaggacgttgtgatccaagatgatgacgtggagtgcactatggtggagaagcgggtgttggccctgcctgggn

SEQ ID NO: 147 - DNA, 506 bp, Homo sapiens
  misc_feature (1)...(506): n = A,T,C or G
gattgtttccnnnnnaggggngnnaatcganncccctnnnnnactgatgtacactagtccangtggtggaattccttcacatcactgccgtgaggctctcagatggcttcacctttgtcatctatgagttctgggagacagaggaggcgtggaagaggcacctgcagagccccctgtgtaaggcgttccggcacgtcaaggtggacacactgagccagcctgaggccctctccaggatcttagtgccagctgcttggtgcacggtgggacgggactgacagcctcccagaggcccgtggaggagcccaccagccccttcttcttgtgaaggaaatcccctgtttttttctagacagacactttggtgcagaagcttcttttcaatccatcctccacaagaaggtgtttccctgttgttaagtgaaggaggccgcccctgcccccacctgagaaggcagagcagtgtctgtgctgccaggtcctggtgaagcccaaggttgaagggn

SEQ ID NO: 148 - DNA, 504 bp, Homo sapiens
  misc_feature (1)...(504): n = A,T,C or G
agaaatgtccnngnnnnagnnnnnnnaactcgagatccctgtgcagtggacggcaatcctcgctgcgcatgttgaacctaccataaaacaccctcagcagataatgagagggcacgatttatgtcagcagagcctctgcggactcttcatgggagggaggactctcatgctgacttgcaaggaggcacccctgaagcccccagttcatgagtgacatgggaagggtagttcacaggcaggtttctgacccctctggtctccatcaaagccaccgcaaaaattccacctgttaaataaaaacggactgaggccgtggtgcactcctgtaatcccagccctttgggaggccaaggtgggaggatcgcttgaacccaggagctcaagaccagcttgggcaacatagcaagactccacctctacaaaaaaattatccgggtgtggtggcgtgtgcccttggtcccagctacccangaggccgaggcgggaggattgctttggcccatn

SEQ ID NO: 149 - DNA, 489 bp, Homo sapiens
  misc_feature (1)...(489): n = A,T,C or G
ggggcganaattgaaaaccctnnnnnactgagaacctagtccagngncgnggaattcgttacttctatcacacaaattcagctgcacccctaaaggtcttcataagaattatcttatgtggactattccaagatgatcttaaccatttccaaattgttctctgagagaagccactttgtttgcaggcatcagtaattttgtgttttgttttaaatctacccttggctccactcctgtctgcctgaggctattcctgcacccacaagctgtctggggtgtgcgccctcattctctccagccctggctgccttgcagagccccagttctcagatgctcaggaaacaaagccttattctcagtccagctctggctcaaggcaggtagctggtcagagtctgggctatgagaggggagtcctgaggctggaggcattggccctgcaccctgaggacaggtgcaggcccccaaactgtgtccgagagaatcatc

SEQ ID NO: 150 - DNA, 493 bp, Homo sapiens
  misc_feature (1)...(493): n = A,T,C or G
ggtatannnnnnttcgagaccatatcgtagtccctagtcagtgtggtggaattcatcacttgaggtcaggagttcaagaccagcctggccagcatggcgagaccacatctctgctaaaaatacaaaaaatagccagacatggtggtacgtgcctgtagtcccagctgctggggaggctgaggcgggagaatcgcttgggcctgggaagcggaggttgcagtgagccaagattgcggcactgcactccagcctgggcgacggagtgagattctgcctcaaaaaaattaagtaagtaaaataacaataatgaatcacccaggtgattccagtaacctgcccttggccctgcagcagggaagcagcttctgtctgaacttggataacagggtaatcatgtcagagcagaagccatggtttgtggggaacaatcctagaaaacactgactgctttacatttattggaaaaccaggctttggtttttaccataatgtg

SEQ ID NO: 151 - DNA, 478 bp, Homo sapiens
  misc_feature (1)...(478): n = A,T,C or G
natcgaganccntatgcagtgtagtggcattcctctcggcgactactatcgctgtcatgtctggtcgtggcaagcaaggaggcaaggcccgcgccaaggccaagtcgcgctcgtcccgcgctggccttcagttcccggtagggcgagtgcatcgcttgctgcgcaaaggcaactacgcggagcgagtgggggccggcgcgcccgtctacatggctgcggtcctcgagtatctgaccgccgagatcctggagctggcgggcaacgcggctcgggacaacaagaagacgcgcatcatccctcgtcacctccagctggccatccgcaacgacgaggaactgaacaagctgctgggcaaagtcaccatcgcccagggcggcgtcttgcctaacatccaggccgtactgctccctaagaagacggagagtcaccacaaggcaaagggcaagtgaggctgacgtccggcccaagtgggcccagc

SEQ ID NO: 152 - DNA, 490 bp, Homo sapiens
  misc_feature (1)...(490): n = A,T,C or G
ggggattnnnnnctttggtccatatggagtgtcgtggaattccggccgctttgcagcaggaaggtctcctctcccgttacaagcagcagcgactgttgacagttcttccttccctactggataagaagaaatctgtggtgtccagccccaggcctccagagtgttcagcatctgcacctgtagcagcagcagtgcccaccagggagtccataaaagggtccctctctgtcctgctcgatgacctgcaggacctgagtgaagccatttccaaagaggaagctgtttgtcaaggagacaaccttgacagatgctccagctccaatccccagatgagcagctaagcagctgacagtttggagggaaagccagcctgggggctgggaggattctggagaagtgggtggggacagaccacccctttcccatcctggggttgccctggnggataccagctgagtctgaattctgctctaaataaagacgactacag

SEQ ID NO: 153 - DNA, 422 bp, Homo sapiens
ctttaaatcctcacaactcctcttgttgtcatcaacgcccttaactcgctttcgttccctgtaagccctctttgccaccataggtcgtaatcgctccctttaaattcgtcatcgccatatgttacctgcatcctgcttttgttgccatttctcctttataaaatcctcatttctctttaaaccctcatcatacccccaagtcaccttcgcatggctactgtccccatcgctcttcttaaatcgcgctaatgcaactcttacgtcatcattaccccttgtgtctttgtccctcccttggcatcactgttcctctgaccagtcaccatccactcctcatgtttccagttttccccataaggagccacccagccttacagttatttttcttccctccgtgtcttcgtcatttccccgtgtcacaa

SEQ ID NO: 154 - DNA, 452 bp, Homo sapiens
  misc_feature (1)...(452): n = A,T,C or G
ggaagnnnnntttgagccctctatgaagctgtgggaattcggctttggaattcgtcgacttaggggttggccacgatggtgtccttgatccacttccggtaatgcaccaccttggtgtacagggaaggcctttcgggcagggcacatggttcactgccccatgacgtgataccttgaagcacaccattacagacaagtggggccccagaatcacccgagcaggtgcttttgccccctgtccagcgtccagcacacagcatgaacttggtcaccttctgagggtgaacttgcgcacacacgtcattggaaataacatggaggtccacacactgaagtttctttggggtcaagaactcctctggttcaatgctgccccagcctgaggcgtagcaggtggtccccagtgctggctcctgggtgggcaggtccatgaccttcacagcatccgtgag

SEQ ID NO: 155 - DNA, 456 bp, Homo sapiens
  misc_feature (1)...(456): n = A,T,C or G
agcggntgnnnnnaactgatagctaccatgngacgnggcanncggcggatacgactccggaggagctggcagccctctttgcgccctacggcacggtcatgtgctgttccgtcatgaaacagttcgccttcgtgcacatgcgcgagaacgcgggcgcgctgcgcgccatcgaagccctgcacggccacgagctgcggccggggcgcgcgctcgtggtggagatgtcgcgcccaaggcctcttaatacttggaagattttcgtgggcaatgtgtcggctgcatgcacgagccaggaactgcgcagcctcttcgagcgccgcggacgcgtcatcgagtgtgacgtggtgaaaggctcttgtcaggatggtgaagctgttcatcggaaacctgccccgggaggctacagagcaggagattcgctcactcttcgagcagtatgggaaggtgctggaatgg

SEQ ID NO: 156 - DNA, 490 bp, Homo sapiens
  misc_feature (1)...(490): n = A,T,C or G
ngagcggttttnnncccctggggactgactgctgtgncgaggaacnccananagcagccaggattgtgctcatggacgatgccatggactgcttgatgtctttttcagatttcctctttgccttccagatccagttttactactcagaattcctggacagtgtggctgccatctatgaggacctgctgtcaggcaagaaccccaacacagtgattgtgccgacgtcgtccagtgggcagcaccgccaacgacctgccttgggcggggccggcacgctggagggcgtggaggcgtcgctgttctaccagtgtctggaaaacctgtgtgatcggcacaagtacagctgcccacccccagcacttgtcaaagaggccctcagcaatgttcagagactgaccttctatggattcctcatggctctctcaaagcaccgtggaatcaaccaagccctcgcagccactaggaaggagaagccaattagcaactgggt

SEQ ID NO: 157 - DNA, 484 bp, Homo sapiens
  misc_feature (1)...(484): n = A,T,C or G
aagaaagaaaagaaaagaaaannnttcgaaattcgtagtcagtgtggaggaattccctggcccggcctgcgcgagccccgcaagctctgcaggctggctagcgggcagaccccagccccacgtcctgctacccacctacgaaggatccggggatgggcagcgccacccggcccgctccagagtcagcatgggtctccgtgaggccgggtgacgctccagaatgggagacaagccaatttgggagcagattggatccagcttcattcaacattactaccagttatttgataatgatagaacccaactaggcgcaatttacattgacgcgtcatgccttacgtgggaaggacaacagttccaggggaaagctgccattgtggagaagttgtctagccttccgttccagaaaattcagcacagcatcaccgcgcaggaccatcagcccactccagatagctgcatcatcagcatggttgtgggccag

SEQ ID NO: 158 - DNA, 499 bp, Homo sapiens
  misc_feature (1)...(499): n = A,T,C or G
agcggnntnnnngnngactgaaaccctatgcagntactgagaacactagtccacgaggaggaattccctgcccaagcgctgcctggagactctcctgatcctctgtggacacaggcggctcccagcccggacacccctttttggggttgacttcctgcagctacccagggacttcccggaggaggtaccctttgtggtcacgaagtgcacggctgagatagaacaccgtgccctggatgtgcagggcatttaccgggtcagcgggtcccgggtccgtgtggagcggctgtgccaggctttcgagaatggccgagcgttggtggagctgtcggggaactcgcctcatgacgtctcgagtgtcctcaagcgatttcttcaggagctcaccgagcccgtgatccccttccacctctacgacgccttcatctctctggctaagaccttgcatgcagaccctggggacgaccctgggacccccagccccagccctgaggttatc

SEQ ID NO: 159 - DNA, 489 bp, Homo sapiens
  misc_feature (1)...(489): n = A,T,C or G
agcggttnnnngnngctgagaccttggcagnactgagaacacttgaaacgacgaggaaaacgaagtgcctaatccccgctggacgctaactgcagggcaagctccccagcgttgtacatgtgtttccgaggccgagaaccgctatcgggcttcctcggactctggccctggaggggggaaacggcgagggacaaggcgaaacgagtctccagagcgttcttggggcctggtgcgaggcccatagaattctctgcaggcctttgcccgggcactgattaaggctgcgaatagacgcaccgggctgcgggcttaggagcttcaggcttctgaagccagagggagggctgagagcttacacttatggagctccccgggagacggcaactacccaaccgtgtgggtgtgttgtcacccataaatactctccacaccatgctgcactgctgcggatgagggactgatggcgtcagcgcttcaagactgtttttc

SEQ ID NO: 160 - DNA, 479 bp, Homo sapiens
  misc_feature (1)...(479): n = A,T,C or G
ngggggaaactgcagaccttggcagttnacgtggcattccttgactcttccaactcttcttaaaggccaaatggaagaacctggaggaaaagggacacaattaattcactttctatcttcttccaaaacactttggaggtggcactccccaaatgcaaattgttattgttatttatttattttgagatggagtcttactctgtcacccagggtggagtgcagtggcgcaatctcggttcactggaacctccccctcctgggttcaggcgattctcctgcctcggcctcctgagtggttgggattgcagatgcctggctgatttttgtatttttggtagagatggggtttcacccatgtggccangcngnnnacnaacttctggcccaaaccggcttccttagcctcccaatgtgatgagaatacgggcatgagccaccacacctggtcttaaatgcatattgtatcacaaaaaataaag

SEQ ID NO: 161 - DNA, 474 bp, Homo sapiens
  misc_feature (1)...(474): n = A,T,C or G
nactgaaccnttgcanggcatagattnccatcccanctggcgcgcgatgtcaaaggtcgggacagctgtgccgggaggcagccacagggaagctcacacatcctgtcagtgtcaccttggtttgcaaaacccatatccccggtaaaatgaggccggacagaggggctgttaggacagcaaagcagcagtgtccagagacccctcaatccccaaaggtccgcaccctgtcctgcacaccctgggccacgccggccacacccctctgctgcaacaagctcatccctggacttctgggagaatgaacccgaggttggtttggggagacaggtgaggcggtcggatctacagaacaacccaccatttctgggggccgcagaggatccatcacagacggatactgnggagtaaacggcccaggccaggtgcccaggaaaggacggctgatcatgtggagcgagagggaggcaggtggan

SEQ ID NO: 162 - DNA, 478 bp, Homo sapiens
  misc_feature (1)...(478): n = A,T,C or G
ccactgaaaacctccgcagnggcgggaactgatggctttcggcctaaccacctggaaagatagagtagccagccattaactaagattggaaggactgctggagcaacatttttttctgattggatctagaagtgaagttgaaagtctcataaatttctactactggaattgttaatgactgctcattgacagaggcacaataaataggtgaactgtcaaatttttctcatttcagaacagctttggttaatctgattaacataacagatggtttgcataggtcttcaccactatttcacgttaaataaccattaccactagaatggcttctaaaaatgttataaagccaactttataaaattacagatctgctgctaataattctcaaaacataaccttgctccagaagctttcaggaaaatagcctaaaattatgagataaagacattcctataaaaagggaccctgtattaatagn

SEQ ID NO: 163 - DNA, 500 bp, Homo sapiens
  misc_feature (1)...(500): n = A,T,C or G
gggcntcagccgatcagaccatatcagattggagaccttcaaactcttgggggcccagcaggactgagccaacgacacgcttcctctttcttgtggtggcaggagcccaagttctggttgtttggtttttaattcttacagtgtactaacggcttggcctgagctggtcactggaatcgctggctgaatttggtcaggcagcccaggcattgagatctttagagctcccccgggattatgtggtgctgtggtgttgagacaggctgccctggagtcctgggtggctgtagaggaagaaggaggccaaatgtccctcccctgcagccaacacaaatgagggctctctgtctgctgttcacacctcagtgaaaatgttccgtgaggaggacaacttcagcctcaatttttccagcctgtccagaaaataattgcccccctcctccccagagagcagacaacctccaggtcccgccaggcccagcaaggaagccccagctgcn

SEQ ID NO: 164 - DNA, 450 bp, Homo sapiens
  misc_feature (1)...(450): n = A,T,C or G
nattgaatagcagaccatctggccgngcggtggaattcgagcctctcaaagcaaaggtcaccaacggctgtaacaacctggggatcatcatggaccactcaccggagccttccttcatcaacccgctgagcgctttgcagtccatcatgaacacccacctgggcaaggtgtccaagcccgtgagtccctcgctggacccgctggcgatgctgtacaagatcagcaacagcatgctggacaagccggtgtaccccgccacccctgtgaagcaggccgatgccatcgaccgctactattatgaaaacagcgaccagcccattgacttaaccaagtccaagaacaagccgctggtgtccagcgtggctgattcggtggcatcacctctgcgggagagcgcactcatggacatctccgacatggtgaaaaacctcacaggccgcctgacgcccn

SEQ ID NO: 165 - DNA, 482 bp, Homo sapiens
  misc_feature (1)...(482): n = A,T,C or G
ccgcccccttcgncccttcgtagtccctagtcagtgtggtggaattcggtacaacagaccccagccagagggtggaggcggggccgcggctgcacagggggcatgtggggaattcaggtgatctgcgtggacacctcatggtggccctggccagctgtcactaaatgggcagctacggcaggccccgctggacatggcatggtggcagggtgccagagccctcggtaggaaggactgggtcacagcactaagtgaactgctgttgtctgcagagacataactgagggtgagggtccgggctgggtaatggaaggagggggaaacggctcaagggggctagcatgggcgcagcagccactgcactggggccatgatcacagagtcattgcccagaagcatagctccggggcactgggccatgctcgtgacttggtgaatgagtgaatgggtgagtgaatgagcttcacagatttccacagtgn

SEQ ID NO: 166 - DNA, 488 bp, Homo sapiens
  misc_feature (1)...(488): n = A,T,C or G
agggcnnaatcgannattgagatccctagtccgtgtggtggaattcctgctcgctggccggcagcgcaccgttttgaaggtcctagcccacctgggctggctcacgcgcacgactagccgctcccatacagcacgcccggactctgtcgtcgcttaaggccactcctattctacggctgacccctggtggtcacgtggatctgttcgccacgcaagtctgggtccttcggcgattgaccgggatccttgctgttcgggagcctctcctaagctgcctgttcgcgcgagagtttggaggggcgggtttggggtcggtgtctgattggggctcgcaccgcagcacgctggagtcccgcttaggtaccagttagcgtcaggggagctgggtcaggcggtcgccgggacaccccgtgtgtggcaggcggcgaagcgctctggagaatcccggacagccctgctccctgcagccaggtgtagtttcgggagcg

SEQ ID NO: 167 - DNA, 463 bp, Homo sapiens
  misc_feature (1)...(463): n = A,T,C or G
agaggccngnnnnnnntttgaatcgcatttacctaggccatgtcgtggaattcctcaacgtagggagaggcataaccgaatggaaagagatagaaggcgcagaatccgcatttgctgtgatgagttgaatctcttattgccgttctgcaatgccgagactgacaaggccacaactctgcagtggaccacagcattcctgaaatacatccaggaaagacatggagattctcttaaaaaggttctaaacacaaactccagatacgtcatgttatggacttgcttcctgaagatgaaatcagcagttgatggaaagaatccacaacacgcctacagaacagcaaatcacaaatggctgtgtctccacgaagccaggagctttgcatttgaagtttctatctgggctcatttccagctgttcagggttcggattcctgaaggcttccttagcatttaactcattctt

SEQ ID NO: 168 - DNA, 474 bp, Homo sapiens
  misc_feature (1)...(474): n = A,T,C or G
gcgccttgagtcttgtcagtgcggtggaattccagaggacaaactccaaaagctgtggatgtccttgccaaggagattggattgcttgcagatgaaattgaaatctatggcaaaagcaaagccaaagtacgtttgtccgtgctagaaaggttaaaggatcaagcagatggaaaatacgtcttagttgctgggatcacacccacccctcttggagaagggaagagcacagtcaccatcgggcttgtgcaggctctgaccgcacacctgaatgtcaactcctttgcctgcttgaggcagccttcccaaggaccgacgtttggagtgaaaggaggagccgcgggtggtggatatgcccaggtcatccccatggaggagttcaaccttcacttgactggagacatccacgccatcaccgctgccaataacttgctggctgccgccatcgacacgaggattcttcatgaaaacacgcan

SEQ ID NO: 169 - DNA, 499 bp, Homo sapiens
gagggcccccccccatgaaccctagcagatggagacctcagaatcgcatgtgaccttgaccttggcggaggaggccagccaggagcctgagatggcacccttgggccccaaaggcctgatacacctgtactctgagctggagctctcagctcacaacgcagccaaccgaggcctacgaggacctggcctgatcatcagcactcaagagcaggggccagatgagggagaggagaaggcggccggggaggccgaggaggaggaggaggatgatgatgatgaagaggaggaagaggacttatcttctcccccagggctgcctgagcccctggagagtgtggaggcccctcccaggccccaagcccttacagatggcccccgggaacacagcaagagtgccagcctcctgtttggcatgcggaacagtgcagtcagtgatgaggactcaagctgggctaccttatgccagggcagcccctcctatggctcctcagaggacacg

SEQ ID NO: 170 - DNA, 479 bp, Homo sapiens
cgcgccctcgacccttctgagtccctagtccgtgtggtggaattcgtaactagtccgtagttcgagggtgcgccgtgtccttttgcgttggtaccagcggcgacatgacggggtacactccggatgagaaactgcggctgcagcagctgcgagagctgagaaggcgatggctgaaggaccaggagctgagccctcgggagccggtgctgcccccacagaagatggggcctatggagaaattctggaataaatttttggagaataaatccccttggaggaaaatggtccatggggtatacaaaaagagtatctttgttttcactcatgtacttgtacctgtctggattattcattattacatgaagtatcatgtttctgaaaaaccatatggcatagttgaaaagaagtccagaatattccctggtgatacaattctggagactggagaagtaattccaccaatgaaagaatttcctgat

SEQ ID NO: 171 - DNA, 479 bp, Homo sapiens
cgcggctttgcagtcctattcagtgcggtggaattccccagttcctctaagtcacacttggacctcgaaacctccccaaaggcctacaagcatggtgctccctgctcagccccaggcagcctccaagcctcccttcccaaagggagaaatcagagaaatcccttctccaatttttttgttttgttctgagataagatctctctctgttgccaaggctggagtgcagtgatacaatcctagcttactgtggcctcgacctccccaggctcagatgatcctcccaccaccccaccaccaccccatgctccagatacctgggaccataggcatgtgccaccacacccagctaagttttatattttttatagagacagggtttcaccatgttgcccaggctggtctcaaactcctgggctcaaacagtttgcctctcctctttgtttatgctgctgccctctctgctctggtccctatccccc

SEQ ID NO: 172 - DNA, 481 bp, Homo sapiens
  misc_feature (1)...(481): n = A,T,C or G
aggggccggnaatcgnncccttcgagaccatagtccatgtggtggaattcctccagatgtggttgagctggagctcggacccactgccccacgggaccccggcctcagacccaggtggctttggctactcatcttcaaggccccaaagctcctatttctgctcctttttatttatttacttatttttttgagacaggatgtcactctgtggcccaggctggagtgcagtggtgcgattatagctcactgcagcctcgacctcccgggctcaggtgatcctcccgcctcagcctccggagcagctgggaccccaggcgcagccacagtataccggcctctgctctcttccatacaagatggaagcagccgggagtgacacctgcccaagtcctcgtaggtctcctcaggtcctgttgggtcgtcagggctgaggtcggctgaggttgggtgttcacaggctgattttaggctgggcctgctg

SEQ ID NO: 173 - DNA, 471 bp, Homo sapiens
  misc_feature (1)...(471): n = A,T,C or G
ntcgagatcccttttgcgtgcggtggaattcctccctctacagctgccagcccgacctgcgtcctgcgggtaagcagcgtgtgcccacaggcatgtccttcaccaacatctacagcaccctgagcggccagggccgcctctacgactacgggcagcggtttgtgctgggcatgggcagctcgtccatcgagctttgtgagcgggagttccagagaggctccctcagcgacagcagctccttcctggacacgcagtgtgacagcagcgtcagcagcagcggcaagcaggatggctatgtgcagttcgacaaggccagcaaggcttctgcttcctcctcccaccactcccagtcctcgtcccagaactctgaccccagtcgacccctgcagcggcggatgcagactcacgtctaaggatcacacaccgcgggtggggacgggccagggaagaggtcagggcacgttctggttg

SEQ ID NO: 174 - DNA, 470 bp, Homo sapiens
  misc_feature (1)...(470): n = A,T,C or G
tctcgagatccctagtccangnggtggaagtccactatccgtgtggtggaattcgtagcctgcaagtaaattaaagaacacttgttttcatttttaattattgatcagctgtctctaaggttcatttactattaatgcagaggtagaattgtgttttttccatactctttagttcttgatgaaccccatatggttctggtgctcacagctcttcaataattcaagattatcatggaaaaataatcaagttttgaaaatctagatcagtggttttcaaagttttttctcctgtcaacaatagaaatattttttttctagttaaattatgatctggactcaaacttttaaactgtgtttaagtggagctgcttggcttttgtataagaaggaaggtttctccatgactcaattaactttccatcctctccggtgaccccagaggtagctctttcaaaggttggggctcctgg

SEQ ID NO: 175 - DNA, 499 bp, Homo sapiens
  misc_feature (1)...(499): n = A,T,C or G
agaganngnnntttgagaccttgatanaccgtggcgagagtggcggaattcccaatagcaaaaagttacataacactaatacttataacctatcaatatcagatattaatgactttgtagtgtggctaaattttgaggaattttggagtctttatcataggtaacctggaccacagttactatttattgacaatgtgattgagtgtatggaggaaagcacagtggatgctaggctttgtaaatatggggatgtagaaaagcagatagttcagtgtctacctttttctagaactaccttgaaccttaaattttaagtcatgttcattgctagaaaattaaatgtacttattaaaaccaatgaaaaagcacatttctgaaatgaagttagagataatctctgtgtcttataaaaagacattaataaaaatctgaaagggccgggcgcagtggctcacgcctgtaatcccaacattttgggaggccaaggtgggcggatcaa

SEQ ID NO: 176 - DNA, 484 bp, Homo sapiens
  misc_feature (1)...(484): n = A,T,C or G
gggatgtggcnttcgagatcattgtgcagtgcggtggaattcccgcccggtcctttagggtccgggcccggccgggccatggattcaatgcctgagcccgcgtcccgctgtcttctgcttcttcccttgctgctgctgctgctgctgctgctgccggccccggagctgggcccgagccaggccggagctgaggagaacgactgggttcgcctgcccagcaaatgcgaagtgtgtaaatatgttgctgtggagctgaagtcagcctttgaggaaaccggcaagaccaaggaggtgattggcacgggctatggcatcctggaccagaaggcctctggagtcaaatacaccaagtcggacttgcggttaatcgaagtcactaagaccatttgcaagaggctcctggattatagcctgcacaaggagaggaccggcagcaatcgatttgccaagggcatgtcagagacctttgagacattacacaacn

SEQ ID NO: 177 - DNA, 470 bp, Homo sapiens
  misc_feature (1)...(470): n = A,T,C or G
gagaggaccnactgtcccttcctgagaccctagcagtggcgggaatcgggatggggctgggggggcatgtttggtgctgcccggccccgcttctcacctgctgcttgacaacgtccttgggaaacacccactggtgcgggcggccgggcttggagaggccctgcacgaactccatcccccgctggctgctgagcttccgcaccaggtacacccggtgccagtcgttctccacccggatacagaactgcttgacttgctgcaggtagcactgcttctccttggccatctctgagaggccaacgagaaagcgggtgagtggctggtgacttanggcatttattgtaggacacaaggccaaccagagggcatcggacctacccacaggcattcacagaaacacatccaggggagaggggatgtagaaaagcccagtagtagtctattcgaagaactagtttcccatacttcct

SEQ ID NO: 178 - DNA, 478 bp, Homo sapiens
  misc_feature (1)...(478): n = A,T,C or G
agcgcgtcnccacctgagaccntgctagatggggtaattcctgcgnggtgttcagctgcccactctacagctttgaccgcgcggctgtgctgcatgtctggggccgtctctggaacagcacctttctggaggagtactcagctgtgaagtccctggaagtgattgtccgggccaacatcacagtgaagtcctccataaagaacttgatgctccgagatgcctccacagtgatcccagtgatggtatacttggaccccatggctgtggtggcagaaggagtgccctggtgggtcatcctcctggctgtactggctgggctgctggtgctagcactgctggtgctgctcctgtggaagatgggattcttcaaacgggcgaagcaccccgaggccaccgtgccccagtaccatgcggtgaagattcctcgggaagaccgacagcagttcaaggaggagaagacgggcaccatcctgaggan

SEQ ID NO: 179 - DNA, 497 bp, Homo sapiens
  misc_feature (1)...(497): n = A,T,C or G
agcgggcnnnnaatcgagaatctagtcactgtggcggaagtccgcaggaggagtatgtcaagcgagccctggccaacagccttgcctgtcaaggaaagtacactccgagcggtcaggctggggctgctgccagcgagtccctcttcgtctctaaccacgcctattaagcggaggtgttcccaggctgcccccaacactccaggccctgccccctcccactcttgaagaggaggccgcctcctcggggctccaggctggcttgcccgcgctctttcttccctcgtgacagtggtgtgtggtgtcgtctgtgaatgctaagtccatcaccctttccggcacactgccaaataaacagctatttaagggggaaaaaaaaaaaaaaaaaaaagcggccgttcaagtttaaagggcccgttaaaccccgttgataaccctggacggggctttttagtggccacccatttgtggttggcccctcccccgggctttctttgacc

SEQ ID NO: 180 - DNA, 480 bp, Homo sapiens
  misc_feature (1)...(480): n = A,T,C or G
acgcgccctcggnnccttcgtagtccctagtcagtgtggtggaattcggcgctcggtggcggtagccgcggttgttggccgaccgagtgccggtcataagccccccccggtggggggcagctggtgtgcggatcgcggcgggagagaggcgcggtaggaacgggtccccggagccgtgaaccgcgggtacaggtgtcctgtctgcgctctctgccaagccggcttgcttcctgatctgttgctagggccgctggaccccgttgctaaggacccttgagatcgtgagcgcttggagtgtacccctcctttcctggggtagagggtcagtcgagagtagccttcgttaaccttaattgaaactggagtgaaagggaagcaatgcagaaatcagagggctctggaggtacacagttgaaaaacagagcaacaggtaactatgatcaaaggacatcatcaagcacacagttaaaacacaggaan

SEQ ID NO: 181 - DNA, 371 bp, Homo sapiens
ggagcttctcatgagcagcgtgggcttctgcactgaggtggaagaggacctcatcgatgccgtcacggggctcagtggcagcgggcctgcctatgcattcatggctctggacgcattggctgatggtggggtgaagatgggtttgccacggcgcctggcaatccaactcggggcccaggctttgctgggagctgccaagatgctgctggactcggagcagcatccatgccagcttaaggacaatgtctgctcccctgggggagccaccatccacgccctgcactttctagagagtgggggcttccgctctctgctcatcaatgcagttgaggcctcctgtatccgaacacgagagctacagtccatggccg

SEQ ID NO: 182 - DNA, 457 bp, Homo sapiens
  misc_feature (1)...(457): n = A,T,C or G
agcggnttnnnnnncactgagtagcctaccatttgacgnggcattcctcttgtttaggtgttacaaaatccaggccagaccaatctaaactttaatctcataccctttttctagatgagtcccttctccagctcagattccgcctaagcctcagggttccttacttggtgggcaccacctgctcccttccccacctttgtcctctttttcctctgctggctcctccggggttgggtgtgttcagaggcagagacaggctaaaggtctttgtcctttaggttctgttgatgggtgagttccagatatagctttctcttgtaggatatttcatttttttatctattaaaaatatttatttagaacacaccattcatgtgccagaccctgttccaagaactggggagagggtgataaatgagatcaacaaaaatacctgcccacattaagctcctgttct

SEQ ID NO: 183 - DNA, 490 bp, Homo sapiens
  misc_feature (1)...(490): n = A,T,C or G
nggcagatggcccactaaaaccancccatcgngtactgcannncgcgnaannntngagaaagaacaaaggagatgatcaaaagaattatagtaattgcttttactttccctcgcccgctcagcggattccctcggccgcccctggcctggtttttatgtctgtcgggaatactcggtctttccgaccccctcccctcccccaggttcctcctctcctctccccttgctcgcgcgttccctctcttcctccgttttctggtgtgctggaacgttcagcggaatatgatgaatgatcacctgtcacagcttgtttattataatgcaggcaatcaattacacatccccaatgctggccggcccgcaggaaatttatatgctcagcacaaaccaatgtgaaaatggaatctcatttgccaaatgtctttctccccgtacagcacgatgattacagtctgtgtttgtttcaacagtcgtgtacaactgacagtgc

SEQ ID NO: 184 - DNA, 477 bp, Homo sapiens
  misc_feature (1)...(477): n = A,T,C or G
gaggccccccaatggagacatagaagccgtaggaancgccaagatgccgtggcagcagaagtgtttgatcacgtctggacaaatatggtagaacttttggaagagctgattagaaaacactgggaaactacactcacagaagggaaaaaacagagagaaacattgaaagtggctggaaacagatttccgcacgtgctcgttccacgcgctcacgccgatggagccagtggccccccgtccggacacgccgaggctcacggcatctccctggcttctcgtctgaacctgccccagattcatcacttctccagcagtttttatagtgacatgaatggtgtcatgacaattcaagcaaaaccgcttcagcggagacctgcctattttgctgacagaacgcagaatgagaaggaggacaaagcatcgggtggaggggcaggtgctctctcctccgcaccgcacagactgtgacgggcctcn

SEQ ID NO: 185 - DNA, 468 bp, Homo sapiens
  misc_feature (1)...(468): n = A,T,C or G
aaagaaagaaagaaaanntttgaattcattacatagtccatgtggtggaattccaggatgagatctatggacacccgctcttccccctcttggccctgggctttgagaaatgtgaactggctacatgctctccccgtgatggggccggagctgggctggggacaccccgcggcggcgacgtctgctcctgtgattccttcaacgaggacaacactgccttcgccaagcaggttcgctctgagaggcccttcttctcctccaacccataactggacaatctgatgatccaggccatccaagagctgcggttccacctgctggagctggagaagggaaagatgcccatcgacctggtcatcgaggatcgggatggcggctgcagggaggacttcgaggactacccagccccctgcctcagcctgccagaccagaataatatatggattcgagaccatgaggatagcgggg

SEQ ID NO: 186 - DNA, 571 bp, Homo sapiens
  misc_feature (1)...(571): n = A,T,C or G
cagtcactctgcggtcttaacatagtagggcgtaagcgccgtatacgtcatctataacccgcctatactcataccatagtcagatacgacgaataacacacatttcgagnaccacttttgataaccgttggaaatcgccccttccagaagcctctggtttctgttcttctccctgtgactcttagtgattctgatgcaggaagtgtgcccggtggctctgctgccgtcactcctctaggaagatgtgggggtcatctccagagtgggtgggtggggcctgggtgactcagcacacatgcaaatcagagcaaaccaagaaaaccacgactgggcctgtaactgtggtctctctctatcccaaggtgatggtggccccaaggccttgaaggggctgggctccagccccgacctggagctgctgctccggagcagccagcgggaggaaggtgacaatgaggaggaggagtactttgtggcccaggggcagcagtgaccagccagggcaaatggcttataagcaggccactccccagcctgctgccagcactcactgtgctcaagcccgccaggg

SEQ ID NO: 187 - DNA, 462 bp, Homo sapiens
  misc_feature (1)...(462): n = A,T,C or G
agcgggcggnnnnnnnntttgaccttgagctacactagtcagtgtcgtggaattccgggggtctctaatggaggagtccagcttcacatgtgttcttgacagggctgtattttctttttagagtgagtttttctcaggtccttgattggaactgcctcagagccaagggtccttttactcagtggcagcaacaaacgcagtctgttggctagtgatcctcctgtctcagggacacgtagtccagggagcagccaattgcttggcacttggggaccccgttctggggagtcctgaaagctttcacctcttggattgccgaatacatgggtggcccttcctagactaagggactggcctgagtgaggctgggcctctcagccaagctgatgttgaaccactgctgtggggatgggcctggngttcctgggaagctgttcatacccattgccaggagcgtgggcg

SEQ ID NO: 188 - DNA, 565 bp, Homo sapiens
  misc_feature (1)...(565): n = A,T,C or G
cgtagtcgcgccaacaatataaactaacataatacaacagagacacgcgactantgcgtgttcatatacactatcactacattaattagcgacgagagcgnggnagcgnnnnnaattgaggccatgatgactctcgacagngcgnggaanncccaggcactcattagatgagcgcagaaggcaagttttgaacctgaatctttctgagtttaaacatgaggcttttcccaccttcccacatgggtttttgaaggcagaggagaaatggaaggctgttccacgacgaagggcctagagcagcaaaggcccagcgacaggaaccttggctgtgtgcggggagccctggagcagagtggagaatggatcccaggggctgccgcaagggttcaggcgggagctaacaggagatggttgccctcctgtgccccatcaggggcctgctcccctgcagccctcccacaacccccttgcccactgtgtcctcaggacctggtgtccaaaatgctacacgtggattcccaccaacgcctcacagctaagcagggtctgcagcatccatgggtct

SEQ ID NO: 189 - DNA, 489 bp, Homo sapiens
  misc_feature (1)...(489): n = A,T,C or G
cgcgcgcccccgnnataganncccatcgagacctctaggcagtgtggnggaattctaaaagtggaacactcggacgctacgcatgccatcggtgatgagggtcagcatgtagatctgactgcccttgagggagatgaccatcttgtcatgggagatgaaggtggcctgggcgcagtccagggtgattcacacacccagctgggtgcacagcgggaaagctgcggtgcctgtggtgaggctgctgagagccacaccgtacgggggaatgctctggttcaggtataacagcgagctgacgacaaagaccaccaccccacctatgggcttgggtacggccagagcctgggtgcagtcaaagggtagctggtgagagatcagatgacggggtgcaccttctgcgtgatgttagcaagatggccacgatggagcacgtgtcctgccacacagccacgtgcccgggccaggtctggttgggctcgaacaggatgg

SEQ ID NO: 190 - DNA, 483 bp, Homo sapiens
  misc_feature (1)...(483): n = A,T,C or G
tgagtggcccgagtgccnaancctgggangcttgatgngcggggaaannccatgacccgggcggcggaggcgtcaggagagggtacccacacgcaacagcagcatagcccgttttttttcgaaggtaccccccgtaggatccggtggacaggactcaaacagatcctgtgaagcgaagacaatgaaccccggggagctctgcccaagtaccagatccggaagcaacccgaagcggcggcgcagcttgccgacgtctgcacgccgcacgctgtcgtgacatcagcgcgtcttggcgccgggtagtggagtggtcacacaacaagctggtgagcagcctcagcctgcctcctttgttccatcagagatgctcatgtcatcgggttacgcaggacaattttttcagccagcatccaactcagattattattcacaatctccttacattgacagttttgatgaagagcctcctttgctagaagaact

SEQ ID NO: 191 - DNA, 486 bp, Homo sapiens
  misc_feature (1)...(486): n = A,T,C or G
gatggccnccgcaatcgagatccattggacagtccgttggaattcgggatttgcatgatgaggagtatcattccagatctgtgcagagcggatcggacgggacagggtggagcggggaggcctgtgcaaagtgggaaagagctgccggtggcctgagccagggtgctggggctgcgggtggggaaaggaggccccagcacttcagacaaagaccaccccttcacccactggaccccaagccgcaaaagctggggaggtaggaagggtcactgtgagggcccagggcccctctcttcccatctcccttgtcctggtggccttcagtgtctcttccagttccaggagctgctgggaagctggccttcattgttggtgacagggcaaccatgggactaggaggtggcccatacacatggctggctggtcctgaggccacccaccttgttccaggacatgggcccgggcccggtgtgggggtagacgcan

SEQ ID NO: 192 - DNA, 578 bp, Homo sapiens
  misc_feature (1)...(578): n = A,T,C or G
cgacgacggtgacacgacggatgttagatggtcgacgcgcgcagattaataggggttggtatgcgagtcacatacacacataataggcagagcaccgcaccaacaaaattttgaaaccccttcgataacactaggacangccgnggaanncggagacgaggggagggcacgcaggcacggaccacgggccgcagagcttcctccttcccagggaccacgggcggcaatgctgcctccttccccgcgtccacgggcggcaatgctccctccttctcagggtccacgggcggctggtgctttttccttgccggcgtccacaggcagcaatgctccttccttctcaggggccacaggcagcaacactccctccttcctggcatccagggcgggcggagctccctgctttccagggttccaggggaagtcccaccccctgaatcttgggagctggagaagaggtgggaccctcgaggacaggccgtagccctcatagccagccacccctaagggagcatagctgctccacacggcggaatgctctccgcacagacagcgcaaccctgacgcctgcagacacn

SEQ ID NO: 193 - DNA, 484 bp, Homo sapiens
  misc_feature (1)...(484): n = A,T,C or G
ccttgcatnccgtttccangngcgggaantttgatatgcctattcagagaggtggaattcgccgcatgtaccacgacggcgcgctccggaactttgcggagcagagcgtccggctgcctattgcctgggacgccgccacccacacatgggggaaatggggtcctgctggagggagaactgatcgatgtatctcggcacagcatcttggacactcatggcaggaaggagcgctactacgtgctgtatatccggcccaatcacatccatcgccgtatattccacgcccagggaaatgaaatcgagcccaacttcagcgccaccaggaaagtgaacacgggcttcctcatgtcctcctacaaggtggaagccaagggggacactgacaggctcacgcccgatgcgctgaaggggctggtcaacaagccaaagctgctcgcgctgacagagagcctcacccccgaccacacagtggcgttctggatgc

SEQ ID NO: 194 - DNA, 484 bp, Homo sapiens
  misc_feature (1)...(484): n = A,T,C or G
nggcagagggcccactagaccaccctgggggctgcgcaccncggngacnnctacttnaccaaccgccaggaccgctacgtgttcctgcaggactgtgcggagattgccgacttcttcacggagctggtggacgcggtgggggatgtgtccctgcagctgcagggggacgacacggtgcaggtggtggatgggatggtgcatccttacaaaggggaccgggccgagtactgcaaggcagccaataagagggtcatggatgtgatcaactcagccaggacccgccagcagatgctgcatgcccagaccttccacagcaactctcttttgacccaggaagatgcagcagctgctggggatcgcagaccagcccctgacacctggatttatccgctgattcagatgaagcccttcgagattcanatcgatgagattgtcactgagaccctgttgactgaggcggagcgcggngcaaaggtctacctca

SEQ ID NO: 195 - DNA, 497 bp, Homo sapiens
  misc_feature (1)...(497): n = A,T,C or G
ngagcaggagcnncccccttgagaccccnngcagttggancacgaagngccgcggaanncgncactggccaggatcctgagcctgctggcggccagcggtcccacgtgggaccaggtgcccccgttccagtggagcacctcgcccttcagcggcctgctgcacatgggccagccagacctctggaagttcgcgcctgtcaaggtttcatgggactgaagtctgtccctgctctgctgctttcgcccctgctgaccctcgtcagggtcacccccgtcccaaggccaccggacttctaactccagcccctcctgggggcttcgttctctgatctggggtctgagtcatctcctcctagagtgggtcacgaacctgatggggctcagaactgaccccctctctcccccgaggagggtgggcaccgtggcgtctcttctgccctgccctaaatctcccactctctgtttctgtctgtttcctactgctgctctctcaaccn

SEQ ID NO: 196 - DNA, 423 bp, Homo sapiens
  misc_feature (1)...(423): n = A,T,C or G
gaggccggnnattgannccatcgtagtccctagtcagtgtggtggaattccaggccagggagtggttccaccgcactgtgaagattgactcggacctgggggatgcctgggccttcttctacaagtttgagctgcagcatggcactgaggagcagcaggaggaggtgaggaagcgctgtgagagtgcagagcctcggcatggggagctgtggtgcgccgtgtccaaggacatcgccaactggcagaagaagatcggggacatccttaggctggtggccggccgcatcaagaacaccttctgattgagcggttgccatggccggtctccgtggggcagggttgggccgcatgtggaagggctctgagctgtgtcctccttcattaaaagtttttatgtctcgtgtcaaaaaaaaaaaaaaaaaa

SEQ ID NO: 197 - DNA, 490 bp, Homo sapiens
  misc_feature (1)...(490): n = A,T,C or G
atgcagagcnccccctagganctanncaagctgngcgngcancggcccggcggagctgngggtggcttgtggcgtctccgccgccgccgccctcccttcctcttccccatcttcttctctcggncccgggagcccccgcccggagtgagtagcgcgaggcggtgcgaagggagagtcgcggttgctgatcgtggtgcttgagtagagccgtggttggtgacagcatgacgagcgaggtgatagaagacgagaagcaattctattccaaggccaagacctactggaaacaaatcccacccacggtggacggcatgcttggggggtatggccacatctccagcatcgacatcaacagctcccggaagtttctgcagaggtttttgagggaaggcccgaacaagacaggaacgtcctgtgccctggactgtggagctggcattgngaggatcaccaagcggctgctcctgccgctgttcagagaggtggatat

SEQ ID NO: 198 - DNA, 461 bp, Homo sapiens
agtgataacacttgaaggccgtgaattccggagttctccaaacccgcgctgcggagtgagtgaccaagttccggccagttcgacctcgaggatccagaggtggagacggtactacctcccagctctgttttccatccccttcaggtccttcctcgggaggcggcgaaggcggtccaccctgcgcgtgatccttcatgcccggcccctgcccctccctccgggtggaacttccccctcaccgccagacttaagctgaggatcgttggatctctggcggggtgcagaactgagcccaggccacagtaccctattcacgctctgtgcttgtgccaagggggcaatggcggcttcctgtgttctactgcacactgggcagaagatgcctctgattggtctgggtacctggaagagtgagcctggtcaggtaaaagcagctgttaagtatgcccttagcgtaggct

SEQ ID NO: 199 - DNA, 498 bp, Homo sapiens
  misc_feature (1)...(498): n = A,T,C or G
aaggctgtagcccaccccaaagaccacngctaaaaggaccangcaagngccgcggaannntcaagcagctgaagaactccgtggccaacacggccggggcgctccatcccgggcgcctctcggtgcaccgcgagccttggggcttctcccgagagcaagcggtgtgacccgagtgcgggcactggcgggagggcaccgagctgcgcgggcgctgggctgggtctccgcctcgattctccgtcctcgcggcctcccagcttccagagccgagctgctgcccttgactggtgctcaggggaccacagctgcaatgacagtttgggcctgcaaaaagaaggctggaacaacgggagatggaagctttctgcaaatgcagcaccactggtatccatgaatttaacctgcccatcattcttcctaaacaagagactattgaaaagtcaggatgctcagaatggcttcagatcttatcaggacagtcttggctggtgcactaan

SEQ ID NO: 200 - DNA, 447 bp, Homo sapiens
  misc_feature (1)...(447): n = A,T,C or G
gggggggnngnnnncctgaaccctaggatgagggcatttccgaaacatccagaacatgatcctgaagcttaagaagggcaagttcccattccactttgtggaggtcctcgcctgtgctggaggatgcttaaatggcagaggccaagcccagactccagacggacatgcggataaggccctgctgcggcagatggaaggcatttacgctgacatccctgtgcggcgtccggagtccagtgcacacgtgcaggagctgtaccaggagtggctggaggggatcaactcccccaaggcccgagaggtgctgcataccacgtaccagagccaggagcgtggcacacacagcctggacatcaagtggtgaagtcaggccagggccttccagctgctcttggggccagagccaagagcctctcagtagagggaggggctgccctgagtggagta

SEQ ID NO: 201 - DNA, 468 bp, Homo sapiens
  misc_feature (1)...(468): n = A,T,C or G
atttgacaacctttganaacctacgaagngcggnggaattcgggagagagaaagcccagaaagaaagctactccagggtcctatggatttttcagagaagttattttgttcaacttgtgaccagaccttccagaaccaccaagaacagagggaacattataagcttgactggcatcggtttaacctaaagcaacgtctcaaggacaagcctctcctgtctgccctggactttgaaaagcagagctccacaggagatctttccagcatctcgggatcagaagactcagactcagccactgaggaggacttgcagacactggatcgggagagggctacatttgagaagttgagccgacccccaggcttttaccctcatcgagttcttttccagaatgcccagggccagtttctttatgcctaccgctgtgtcctatgccctcatcatgatcccccagaagaggcagaacg

SEQ ID NO: 202 - DNA, 468 bp, Homo sapiens
  misc_feature (1)...(468): n = A,T,C or G
agtagagaacacttttgaagacactcggaattcctctgagaccatcaatcccaccgatggaagtgtcatctgccaggtatccctggcccttttcaccgacgtcgacaaggcagtggccgcagccaaggatgcctttgagaatggacggtgggggaagatcagtgcgcgggaccggggccggctgatgtacaggttggcagatctcatggagcagcaccaggaggagctggccaccattgaggccctggatgcgggtgccgtctacacgctggccctgaagacccacgtgggcatgtccatccagaccttccgctactttgctggctggtgtgacaagatccagggctccaccatccccatcaaccaggccagacccaaccgcaacctgaccttgaccaggaaggagcctgttggggtttgtggcatcatcatcccctggaactatcccctgatgatgctgtcctggan

SEQ ID NO: 203 - DNA, 464 bp, Homo sapiens
  misc_feature (1)...(464): n = A,T,C or G
catagagacctntgtgcagngncgnggaattcaaatacaaaaagtaaaaataaaaagaaaaaaagaaaaagacaggtccctgaggggcccggacacctgcggacctgagaggctaccatagggccaggaccccttcatcactcaagtgtcaccttgaggctaggatccctgggtccccacggcaacatggtgtagcccgcgcctttgggtccatagaagtttcagtgcggtcgggatcctttggtttctgcagaactacactgtggtccctgaagggacgcggagaagccctcagccccgctccccgtcttagcggccctcccctcgcccccacagaagtttagcactccctggcggcgcttcttcacgtctatgccagtctatgccatcatcgnggccaacttctgccgcagctggacgttctacctgctgctcatctcccagcccgcctacttcgaagaagn

SEQ ID NO: 204 - DNA, 487 bp, Homo sapiens
  misc_feature (1)...(487): n = A,T,C or G
aggcagtncccccaatgagaccncactgagggcctgcgcaccncactcagaggggctccaagccgtcggcgtcctcggcctcgctggagaagcgcatgaagatggtgtcccagagcttcacccagcgctttcggctgtctcgggacaggaaagtggccaagtcgctggccgtcatcgtgagcatctttgggctctgctgggccccatacacgctgctgatgatcatccgggccgcctgccatggccactgcgtccctgactactggtacgaaacctccttctggctcctgtgggccaactcggctgtcaaccctgtcctctaccctctgtgccaccacagcttccgccgggccttcaccaagctgctctgcccccagaagctcanaatccagccccacagctccctggagcactgctggaaaaagatgaagaagaaaacatgtctgtgaacttgatgtttctgggatgtttaatcaagagagacaaa

SEQ ID NO: 205 - DNA, 490 bp, Homo sapiens
  misc_feature (1)...(490): n = A,T,C or G
ggcagccccnccaatgatacccccctaaagggctaggacangccgcggaannncccgggcgccgcgccgcacgagcaccagcctatagccaggactgaagcttcaagatggctgaccaggaccctgcgggcatcagccccctccagcaaatggtggcctcaggcaccggggctgtggttacctctctcttcatgacacccctggacgtggtgaaggttcgcctgcagtctcagcggccctccatggccagcgagctgatgccttcctccagactgtggagcctctcctataccaaatggaagtgcctcctgtattgcaatggagtcctggagcctctgtacctgtgcccaaatggtgcccgctgagccacctggtttcaagagcctacccgctttactggcaccatggatgccttcgtgaagatcgtgaggcacgagggcaccaagaccctctggagctggctccccgccaccctggtgatgacagtgcn

SEQ ID NO: 206 - DNA, 246 bp, Homo sapiens
cctgtcgagagctgacattctatgatggaacacgaagtgaacctcaaggttgattctttcagggagcggatcacacgtgaggcacaagacttggtggcaaatcttttcccaacgaagttattagaacttgacacttttctgaacgaaccaatcttaaacatgcatgacctaactcagatcctctctgacatgaatctgccagtacctgaacccattcttctgaccaatagccatgatggactggag

SEQ ID NO: 207 - DNA, 452 bp, Homo sapiens
  misc_feature (1)...(452): n = A,T,C or G
ntcgagttcgctagccctagtggnggaattcctcaagatggtaggagaatgagctcctgtttgggagctgcgccgcgaggcccgcctgctcctctagtacctgtaccgcaaggcccgggaggaggcgcagcgctcaccccaggagaggaaggagcggctgcggcgcgcgctggaagaaaaccgcctgattcccactgagttacgccgagaggctctggccttacaggggtccctggagtttgatgatgctggaggtgaaggtgtgaccagccacgtggatgatgaataccgatgggcaggagtcgaggatcccaaggttatgatcactacctaccgagaccccagttcccgcctcaagatgtttgcaaaggagctgaagctggtgttcccgggcgcccagcgaatgaaccgaggtcgacatgaagtgtgggcactggtgcgagcctgcaaag

SEQ ID NO: 208 - DNA, 455 bp, Homo sapiens
  misc_feature (1)...(455): n = A,T,C or G
ggcggggnnnagggggaaatgaaaccntngaatgagtacatatccangngcgtggaattcggtgtccctgtccatgctgtcgacacgcctcacgctgctgctgatggtggccacaccagccctgatgggagtgggcaccctgatgggctcaggcctccgaaaattgtctcgccagtgtcaggagcagatcgccagggcaatgggcgtagcagacgaggccctgggcaatgtgcggactgtgcgagccttcgccatggagcaacgggaagaggagcgctatggggcagagctggaagcctgccgctgccgggcagaggagctgggccgcggcatcgccttgttccaagggctttccaacatcgccttcaactgcatggtcttgggtaccctatttattgggggctcccttgtggccggacagcagctgacagggggagacctcatgtccttcctgg

SEQ ID NO: 209 - DNA, 420 bp, Homo sapiens
agcgagcagtgagtaagccagcaagggcggtcgggtcccgaggtcagccgagatttctcaggtccctccggccccctccctggagtccacagcgcctccggtgtccagaggatcggacacggcccggcccggccatggcctcgttgctgaaggtggatcaagaagtgaagctcaaggtagcggcaccggtccggcctttttgcccctcgctttgatcccccagcagtctgaccggcttcctactccccatggcgtctttgtctccctggggataccagctctgagcttccgctcggctcagcccagcccccaactcccggggtcggcttcgcgggagaggaaaatataggatggctttctgtaccgcgtctgatgatggagagtcccggggacacctccgcggacacgtgttggactcag

SEQ ID NO: 210 - DNA, 417 bp, Homo sapiens
gttttgacagccatggggccagaggattgacaaggcctcccttccccacccccgacccctacccctccctgtccctagaaaggactccatgaggacagagcactgccctggagatctgctctgggtgaggcagggagaggagggagcagcggagctccaagcttccaggccctggggccacccctcgtggtcagcactgcgagtcaggaggtgtctggggtgaggggctagagcaggcagagaggctgggaagccctggaagaaggaaggggaaggaaatgggttcagctgtgagggaggaggcaatggctgtcacaagtgctttggccaccgagcctggggacagagaacttcaggggattcctccagctaaggggcagccaggcctgcccctgagtcagagggtgggagtgtggc

SEQ ID NO: 211 - DNA, 454 bp, Homo sapiens
  misc_feature (1)...(454): n = A,T,C or G
ggcgaggggngggnacatgaaaccctngnctgagancntagtccangncgnggaattcggaatgtctcaaagaaccattaggaaaaggatcaagatttgtctggtgtgtgtgtttggtgtgtctgatagaaatgcaacatgaggcacacatttaattttaagttttaaatgtgctagtagcctccttgaagaaatgaagagagacaagtaaaagtaaaattaattttaataatgtattttgcttaactcagtatagccaaactattaatcatttcgacatgtaatcaatataaaaattattgagatattctacctgctttttttttcatattcagccttcagataggttgtgtgttttcacctgcagactggttgaatttgggctaatgccattttaagtgctcagcagccatacgtggctcgtggctgtgatattcgggagtacagctcagcn

SEQ ID NO: 212 - DNA, 456 bp, Homo sapiens
  misc_feature (1)...(456): n = A,T,C or G
aggcgaggggnnnnnnnaaattgagaccctatgtttggagcccgaattcctaatgctggccgtagtgaagtgtatccggagcaccccggaatattttgctgaaaggctcttcaaggctatgaagggcctggggactcgggacaacaccctgatccgcatcatggtctcccgtagtgagttggacatgctcgacattcgggagatcttccggaccaagtatgagaagtccctctacagcatgatcaagaatgacacctctggcgagtacaagaagactctgctgaagctgtctgggggagatgatgatgctgctggccagttcttcccggaggcagcgcaggtggcctatcagatgtgggaacttagtgcagtggcccgagtagagctgaagggaactgtgcgcccagccaatgacttcaaccctgacgcagatgccaaagcgctgcggaaagccat

SEQ ID NO: 213 - DNA, 453 bp, Homo sapiens
  misc_feature (1)...(453): n = A,T,C or G
gggaggggaggggncctgaaccctngcctgagancctagtccangnggtggaattccctttacttactgactttgagctctgtgactccgtcggttctcgcaggaattaactaacttaccaattggttcaatccacttgagcgccatagctctgagctcctctgtgtgacatgccacagatgactattgcacacctgggtcctgccccagcaggccatgcccctcccatgtgccgtgcctgttgctgcagctgccccccgaccccgccactggctgcaggaattcagcctttagaggcagaggcagctgcagcggcccctgaggtcaaaccccagtgtgactgcatagcagtgttagctggttggtttcaaactactggattccaggcaaaggcctacagattgaccttattatttttgaaaatatgttaagggttttttcatagagagagan

SEQ ID NO: 214 - DNA, 455 bp, Homo sapiens
  misc_feature (1)...(455): n = A,T,C or G
nttgatttcgtcgtccctagtccgtgtggtggaattcagaaaggggtgtgggatttccaaatgtgcactacagtaggatcagctgtgtggatcaggatttctccaagaataacctaaggaccatctacttcagaatcagcaggggttcaagttagaaactgcagttttctggacctctacccagacttaataaaaacattagaaggagggtagggcccaagaatcttcactttagaagttacccagtgattgttatgcacactgaagtttaaggaccactgactgctctagacccttgttttttcccaaccaaatgacacaaggactctgccaagctataagtatcttaagatcatctgaaaagagaaaactccttaacagttctctctttgcattccttctatttgccttccttctaaaatacacatggaagaggaaagaaagcttggagagtg

SEQ ID NO: 215 - DNA, 485 bp, Homo sapiens
  misc_feature (1)...(485): n = A,T,C or G
aggaggccncnnccaactgtaactgccagctcagcaagnngcgnggaattcgccggccggcgaggacagcggagcgcgagggggctgcctacactcggccgcgctcgatcctgccctgatctaaacgccgcaaccccaagcccggccccggagaagagtctcaggactaaaagggctgttccagccgtccgtgctggcgcctggggatccaggcccgttcccggtacccgcccatgcccagcccggcggcctagggcgttaccttgagctgagagctgtcggacactgttcacgaactgctccagggcagacgccatgttttcccccgggcggcccgagcggcgaaggcagcacgcgcgggaaaaggctgccgctctgggaggaggggccgcggcgatccacctgaggtcctcgcgagcggcgacgtcacttccgctggttcaagcaccgcgagactatacctagctgcccacccgttactgttg

SEQ ID NO: 216 - DNA, 453 bp, Homo sapiens
  misc_feature (1)...(453): n = A,T,C or G
ntcgagatccctagcccagtgtggaggaattcggcttcctagccttcgtcagcagcaaatctgagagccaccggaagagccttgggagcacggagggtgaaagtgaaagccggccagggaagtactgctgtgtgtacctgcccgatggcacagcctccttggccctggccagacctggcctcaccatccgagacatgctggcagggatctgtgagaaacgaggcctctctctacctgacatcaaggtctacctggtgggcaatgaacagaaggccctggtcctggatcaggactgcaccgtgctggcggatcaggaagtgcggctggaaaacaggatcaccttcgagctggagctgacggcgctggagcgcgtggtacgaatctcagccaagcccaccaagcggctgcaggaggcgctgcagcccattctggagaagcacggcttgagcccgc

SEQ ID NO: 217 - DNA, 481 bp, Homo sapiens
  misc_feature (1)...(481): n = A,T,C or G
gggagagcnnttcgagatcatatgcagtgcggtggaattccccggccccgctccaccggggctgacggactgacggccaacacagccggctccgggatgagcgcacggacggtattctgaagtctcaggaaactggaccatttaaatgtgcatggcccatgagaaaggcttataagaagccatggcactcccctttcaaaaagagctggagaaatacaagaacattgatgaagatgagcttcttggcaaactctcagaagaggaactgaaacagttggaaaatgttctagatgacctagatcctgagagtgccatgctgccagctggatttcgacagaaagaccagacacagaaggcagccaccggcccctttgaccgcgagcacctcctcatgtacctggagaaggaggctttggaacagaaagacagagaggactttgtgcccttcactggagaaaagaaagggagagtctttatccct

SEQ ID NO: 218 - DNA, 456 bp, Homo sapiens
attgaattcgagatccctagtccgtgtggtggaattcattcagaaagacctggccaacatagccgaggtagaggtctccatccctgccaagctgcacaactccctcattggcaccaagggccgtctgatccgctccatcatggaggagtgcggcggggtccacattcactttcccgtggaaggttcaggaagcgacaccgttgttatcaggggcccttcctcggatgtggagaaggccaagaagcagctcctgcatctggcggaggagaagcaaaccaagagtttcactgttgacatccgcgccaagccagaataccacaaattcctcatcggcaaggggggcggcaaaattcgcaaggtgcgcgacagcactggagcacgtgtcatcttccctgcggctgaggacaaggaccaggacctgatcaccatcattggaaaggaggacgccgtccgagt

SEQ ID NO: 219 - DNA, 456 bp, Homo sapiens
  misc_feature (1)...(456): n = A,T,C or G
ggggctgnnnnnaactggttgcctagcattgacgggacntcggagggctcaggcgttgggaattgcaccgacaggcagtcgcacagaaaggcacacagatgtagtggtgtgcatagcccttgacagcgaataggtgtcactagttccaggcgtctgctgaaagatttggaacagaagatgatggccactccgaaccagaccgcctgtaatgcagagtcaccagtggccctggaggaggccaagacctctggtgccccggggagcccccaaacaccccctgagcgtcatgactctggtggttccctgcccctgacaccgcggatggagagccactcagaggatgaagatcttgctggggctgtcggtggcctgggctggaacagtangagtccccggacccagagcccagggggctgctcancggaggctgtgctggcccggaagaaacaccgtcgg

SEQ ID NO: 220 - DNA, 441 bp, Homo sapiens
  misc_feature (1)...(441): n = A,T,C or G
nttgaagacccattggacagctggtggaattcgagatgcccaagcgggtgctgtgacaactctgctggagggcgggaggcggcgagggcgggcagctgactgttggctgtggacaggctccaggcgtgccaggccagagtggggataattccaccccaggttgcttagctgagggttctctgcgcattaagcaccttaactcgctgtcctgctgcaccccagccacagaggccttggtgaaggtgaaatcttagagaatagctgggaagccaaaaggccaagcagtttgatgactatttccttaaagctgatgaaaaagcaacgtggataatatttcctaacaataatggccagcagttagtgttcactgccaggcccctgcccagtaccaagagctcaggttttacatcagcatgacgtgacctatgtggaatccctggc

SEQ ID NO: 221 - DNA, 447 bp, Homo sapiens
  misc_feature (1)...(447): n = A,T,C or G
ntttgacngacccttttgtagtcgcctagacagcgaggtggaattcgaggaagttcggctgcagtacgagaagctgcaccagctgctggacgaggacctgcggcagacagtggaggtcctagacaaggcccaggccaagttctgcagcgagaacgcagcgcaggcgctgcacctcggggagcgcatgcaggaggccaagaagctgctgggctccctgcagctgctctttgataagacggaggatgtcagcttcatgaagaacaccaagtctgtgaaaatcctgatggacaggacccagacctgcacgagcagcagcctttcccccactaagatcggccacctgaactccaagctcttcctgaacgaagtggccaagaaggagaagcagctgcggaaaatgctagaaggtgagggtggggtgttccgccgaagggagacagggacctt

SEQ ID NO: 222 - DNA, 473 bp, Homo sapiens
  misc_feature (1)...(473): n = A,T,C or G
tttggaccctanncatttgagaccatatcagtgtggggattccaggagctgctggcctctgccgactttcagcctgtccctagcattgttggtgtcaacaacaatgaattcggctggctcatccccaaggtcatgaggatctatgatacccagaaggaaatggacagagaggcctcccaggctgctctgcagaaaatgttaacgctgctgatgttgcctcctacatttggtgacctgctgagggaggagtacattggggacaatggggatccccagaccctccaagcgcagttccaggagatgatggcggactccatgtttgtgatccctgcactccaagtagcacattttcagtgttcccgggcccctgtgtacttctacgagttccagcatcagcccagctggctcaagaacatcaggccaccgcacatgaaggcagaccatggtgatgagcttccttttgttttcagaag

SEQ ID NO: 223 - DNA, 503 bp, Homo sapiens
  misc_feature (1)...(503): n = A,T,C or G
cgccagccccnnnnntttggatccctatncangnggnggaanttcgtagtccctagtccatgtggtggaattcggcaaactacagatagaaaatattggcaaagcatacatctgatgaaaggcttgtagctataatataaaaagaattcttacaactcaataataagaagataaaacatctgataacaaaaataggtgaaagatttgtaggcactctaccaaatgaattatgtgaatggtaaacagcatatgaaaagatggtcaacattattagttattaagggaatgcaaatgaatgaatacataaattgtacattcatatgtaaaattctactcagcaaaaaaagaaaagaaaagaaatgcaaactgtaacggtgaaattaattaaaaaaaattttttttggagacaggttcttgctctgccgccagctgnannncactgntgtgatctcngctcactgcaagctccgcctcccgggttcacgccattctcctgcctcaac

SEQ ID NO: 224 - DNA, 474 bp, Homo sapiens
  misc_feature (1)...(474): n = A,T,C or G
cgcgcccactgagacccctcgactgagcncctaggcagnngcgnggaanncgaggactctgcctccttgcctgcctacaaggtgcctggatagcagcaggctctccgctctttccagcaaagctgctcagagagggtgtccagcacagtggagaggccggaagtgagacgggcagacggcacctgcagcctgaaacgcaccgctcctgcgtgcgcccccacctggtccccggatgcccccaccacctggacagaggccacactgactgcccacccagctgtggcgggaggtgcacagcagagggctttagggagcagtgactgcggtcacccctttagttctctgggtgtagaccacaccacctcccactgggcaccccccaacacggtgtcctgccacccagcgcctggctccaggaaaacacgcttgccttccttcccggcagcttcgccactctccttatggactctgttt

SEQ ID NO: 225 - DNA, 465 bp, Homo sapiens
  misc_feature (1)...(465): n = A,T,C or G
aattgatnaccctgggantttgaagaccctagtcagtgtggtggaattccacctggctccagtgcctatggagctccccagggttctccccaggaccctgacctccagtccccacaaggctgtcagccccaaaggcacacacacccgaaggagcccaagctggcgctgcgagtcaggcgggaaaggcccgggctgcagctgcttgccggggtcaccctttgactataattgaagcgcccagcagggcaggagaggaccacacagaaggtcagggccagagccacacccagcagtgagaggagccccgggcacagccagccagagcccacaagcttccgggaggggagaaagataccatgaacccaaggaggggacccagtagagaaggcccagcacccagagtgagaggcaggctcagtggacccctggccccgccatgcagccgggccctccccacccaggctg

SEQ ID NO: 226 - DNA, 459 bp, Homo sapiens
  misc_feature (1)...(459): n = A,T,C or G
aatcgagatcactagncngtgaggtccatttcgggngggccatggaccccacctcctctgcagcctcacgggcactgtccctgaccagcactcctgggcactctggaagcaggctgttctcacgggaacaagcgcacagctaccgggtaagaggacaccaggaagagcgtgcacagaggctgcggccaaggcaacccctcagggctgcccaccggctcctgcattctggcaccacttgaacacgagacctggaaagtcatcaccatggccatgatcagaactgttgttgtaagaattacatctccacttccctggagccctgtctgtggttaaggtgaaatttcaaatgctgcccaagtatgggctctagataatggaccacaaagaatatgcctgttttcttatcctaaaaataaaaagccagtgtctgccagcactagaaaattgcaaataagaagt

SEQ ID NO: 227 - DNA, 427 bp, Homo sapiens
  misc_feature (1)...(427): n = A,T,C or G
aagctcttgggtgaagagaaggtggatgcaattctttgtgttgctggaggatgggccgggggcaatgccaaatccaagtctctctttaagaactgtgacctgatgtggaagcagagcatatggacatcgaccatctccagccatctggctaccaagcatctcaaggaaggaggcctcctgaccttggctggcgcaaaggctgccctggatgggactcctggtatgatcgggtacggcatggccaagggtgctgttcaccagctctgccagagcctggctgggaagaacagcggcatgccgcccggggcagccgccatcgctgtgctcccggttaccctggataccccgatgaacaggaaatcaatgcctgaggctgacttcagctcctggacacccttagaattcctagttgagtatcagttcctcn

SEQ ID NO: 228 - DNA, 489 bp, Homo sapiens
  misc_feature (1)...(489): n = A,T,C or G
aggcggggttctnaccccagggacctcacgaagngcgtggaattcaccgtgtaatcctctgtccagcatctggttggtttgttcattttaggagttgcgggagcttcaggacgagaaggcagagctgcagaagatctgcgaggagcaggaacaagccctccaggaaatgggcctgcacctcagccagtccaagctgaagatggaagatataaaagaagtgaaccaggcactgaagggccacgcctggctgaaagatgacgaagcgacacactgtaggcagtgtgagaaggagttctccatttcccggagaaagcctagctctgtggaagagaggaagccacagctaccccacccgctccccaacccgagtttcaggcagtgccttgcagtaagctcagagctagaaaccacgtcctgaggctgcctttgagatcacatgtgtctacaaggcctggctgtccccatctgtggagtcagaagcagaggctg

SEQ ID NO: 229 - DNA, 498 bp, Homo sapiens
  misc_feature (1)...(498): n = A,T,C or G
agggtgctcnnncctggatagccttngcagtgtgctggaattgatggacgtagtcggcacaatgaggaccaggcttgctgtgaagtggtgtatgtggaaggtcggaggagtgttacaggagtacctatggagcctagccgaggccagggactctgcttctactactggggcctatttgatgggcatgcagggggcggagctgctgaaatggcctcacggctcctgcatcgccatatccgagagcagctaaaggacctggtagagatacttcaggacccttcgccaccacccctctgcctcccaaccactccggggaccccagattcctccgatccctctcacttgcttggccctcagtcctgctggtcttcacagaaggaagtgagccacgagagcctggtagtgggggccattgagaatgccttccagctcatggatgagcagatggcccgggagcggcgtggccaccaagtggaggggggctgctgtgcactggtn

SEQ ID NO: 230 - DNA, 463 bp, Homo sapiens
  misc_feature (1)...(463): n = A,T,C or G
cttcgagaacattagnnttttgatgtcattagtccatgcggnggaattccgagcggcctgtgcgccagggctccgtggagcctgagagcgtctgctcacagaccgtgtccccagacaccctgtgctctagtctgtgcagcctggaggatgggttgttgggctccccggcccggctggcctcccagctgctgggcgatgagctgcttctcgccaaactgccccccagccgggaaagtgccttccgcagcctgggcccactggaggcccaggactcactctacaactcgcccctcacagagtcctgcctttcccccgcggaggaggagccagccccctgcaaggactgccagccactctgcccaccactaacgggcagctgggaacggcagcggcaagcctctgacctggcctcttctggggtggtgtccttagatgaggatgaggcagagccagaggaacagtg

SEQ ID NO: 231 - DNA, 477 bp, Homo sapiens
tggagagccccctttgagtccatattgagtgtcgtggaattcggggcgctcagtacccacaattggacttactggcagtgtggtcagtaccttggcgttgggcctggggcccatggacgatttatgccccagggggctggaggccacacccgggaggctcggatccagacactggagcctgacaactggatgaaggaggtgatgctgtttggccatggcacccggaagcgtgtccccctgggcaggctggagctgctggaggaagttttggccctggggctacgcaccgatgtggggatcactcaccagcactggcagcagtttgagccccagctgaccctgtgggatgtgtttggagcgaacaaggaggtgcaggagctgctggagcggggcctactgcagctggatcacaggggtcttcggtgttcctgggagggtctggctgtgctggactctctcttgctgaccctcctgcct

SEQ ID NO: 232 - DNA, 487 bp, Homo sapiens
  misc_feature (1)...(487): n = A,T,C or G
cttcgcagtncctattcagagnggcggaanttatgaatccctactcagagtggtggaattcatgggagcagctacacggccgaaagcgggctgactcagctcccaccgacgtacgcctcgtgccgagcggttccagcgcttcagcaaaggtttacatgtccttggaaaaccgtgacccagtaattcttccaacagaaagggggtttgcagcaaaccaccgtgacagctcctccggaatccactgttggcttggtctctaaatcctcagcatcttcgtgatcttccctggcagcctcagcagcatctgcttggctagactctctctcctcttggttcatgatttctggggtcacgtggtccaaatctgctcctagaagttcagtttgtacttccactggcatttgattgacccgttcaacatgcagctcctctacatgtacttcagtaccttcttcagtctgaattcggcccacttctagataactca

SEQ ID NO: 233 - DNA, 480 bp, Homo sapiens
  misc_feature (1)...(480): n = A,T,C or G
gagcccnntttgagcccantttagtagaacactagtccagngaggaggaattccttacagcgcaggccctcaaccatggcacggagaccgaggtcctactggtgaagaagcagatgagcgagaagctgaacgagctggccgaccaggacttccccttgcacccgcgggagaacgaccagctggatttcatcgtggaaaccgaggggctgaagaagtccatccacaacctcgggacaatcttaaccaccaacgccgttgcctcagagacagtggccacgggcgaggggctgcggcagaccatcatcgggcagcccatgtccgtcaccatcaccaccaaggacaaagacggtgagctgtgcaaaaccggcaacgcctacctcaccgccgaactgagcacccccgacgggagcgtggcagacggggagatcctggacaacaagaacggcacctatgagtttttgtacactgtccagaaggaag

SEQ ID NO: 234 - DNA, 457 bp, Homo sapiens
  misc_feature (1)...(457): n = A,T,C or G
nttgagaccctanccgngagggcatttcacatatacaccacacatatacacatataccacacacacatgcaccatgcacacacatacagacaacatacacatacacatcacagatatgcaccatgctcacaaatgcacatacacaccacacatacaacgtacacacaggcaccacgcacatacacacacaccatgcatacacacatatacccacatatacaccacatacacatacacacactaaacacatacacatgcacacacacgtacacatacacacgtatacacatacacatgcacacacatacacacacaatgtaaatatgcccgtggacccagggtccgactgagtgaactcccacaatttgagcaacacctcattctacatcctaacccaaagtgtgctgtaaatacctacaagtgcatggcgatataaatttataaatgggggagaaag

SEQ ID NO: 235 - DNA, 482 bp, Homo sapiens
  misc_feature (1)...(482): n = A,T,C or G
agtgcgtcnccacctgaaacctcactgataccctagtcagtgtcgtggaattccatgacgtggtggtaccgctggctgtgtcgcctgtctggggtgctgggggcagtctcttgcgcgatctctggcctcttcaactgcatcaccatccaccctctgaacatcgcggccggcgtgtggatgatcatgaatgccttcatcttgttgctgtgtgaggcgcccttctgctgccagttcatcgagtttgcaaacacagtggcggagaaggtggaccggctgcgctcctggcagaaggctgtcttctactgcgggtgaggggttgctgggcagggtcccgtgacacagttccccaaaaccccactgacaaaataggacccaaaagtcaggtgagggtgggcagtgtattcagttcctctctgtggaagtgtaaactgggattgcctttgtgcacagtgatttgctcatagctgccaaaacgtgcccca

SEQ ID NO: 236 - DNA, 490 bp, Homo sapiens
  misc_feature (1)...(490): n = A,T,C or G
aggcggtnnnnnccctgagaccctgtcagaggcngtaattcctggcggngactgtggcgtgcatggtgctggcggtgggtgtcggcgtggtgggcatggtgatgggactgcggattcggtgcgacgagggcgagtcgctgcggggccagaccacgagcgccttcctcttcctcggcgatccgagtgaagcctgacaggaccggtgtggtcacggatggtgtgaagcactccatgaaccccttctgtgagatcgcggtggaggaggctgtgcggctcaaggagaagaagctggtgaaggaggtcatcgccgtcagctgtgggcctgcacagtgccaggagacgattcgtaccgccctggccatgggtgcagaccgaggtatccacgtggaggtgcccccagcagaagcagaacgcttgggtcccctgcaggtggctcgggtcctggccaagctggcagagaaggagaaggtggacctggtgctgctgggcn

SEQ ID NO: 237 - DNA, 456 bp, Homo sapiens
  misc_feature (1)...(456): n = A,T,C or G
cttgatcacctaggnnttgagngcactctaaanngcggggaantattcctattggtgtaaatgagatcccttccctgtagaaagtagcaggtgctattttcaccctgccccatcttcattgaactgaactggtggtttaagtaggtgtttaaagcaatacctgccatctttcctgccaccaggaaagcctggctctgctgacctgaacatgctctgtgttcttgcatagagagctgtggtaatggtgggatcctctgtctcagcttgccagtcctttccttcaccagggtgggagggaggcccacaacccagggcatctgcatagcaaatgcttccactcaacacgacttttcaggagtaaaacaaaaatgtatcttatacacaagaccttctttcttggaagaaacgccctgctgcatagccaaagctgaggagtggccacctaagggatattag

SEQ ID NO: 238 - DNA, 476 bp, Homo sapiens
  misc_feature (1)...(476): n = A,T,C or G
gagcggnccacctgaaccctactgaaggcggtaattcccagaactgtgaggaaataaatgtctgttggtttagccaccaaacctggttaggcagtcctagctagctaatacaatagcctgttccttaataaacaactgcaagatttactttatagaaaccagctcggaagcagttggtttagaatgactttcctaggaatctggccaagaaaggaacttactaaaagactattctcatttaacaaaagagatattaagtatctcaaaggccagatctttaaaaagattatctgttttaagccacaaaacatttgtgtggatccctttgcagcaaggttgctcttagataagattcagtcttcgttctcagctgttgcaggttaaggcttgtgaaacgatccaaaaagggaacagcagctgttggagaaaacttttatttgttcttcattctagcgccaagtttaaaggcttgaagt

SEQ ID NO: 239 - DNA, 475 bp, Homo sapiens
  misc_feature (1)...(475): n = A,T,C or G
gagcgtgccacctgataccntactgatancctatgcagggcggaattcccagtttgcccttggcaaactacttcccttctctgagcttcaggtttcccgtctgttaaaggactgcctgaggtgacctgtagggtcactttctggccctaataatctggaacattgactctctagtgagtctcttgagtgtgggtgggattgaaaattgtgattctaaccccaaagattaccctacctttccccttccttagagcacccaccactagtgaagtcatcctgttccctgagtgagggatgtttagatgatttccttaataggaccagagatgtcaagtaattttcttgaggtcatactgctgaagtgcaatcttcattggggcaggcattacttctactgtctatatatcctctgcatataccactggttctgctggtagatgtgtggtgaatgaatgaatgaatggacaaatgaatg

SEQ ID NO: 240 - DNA, 479 bp, Homo sapiens
  misc_feature (1)...(479): n = A,T,C or G
agagcgtgnccaaatgagaccccatcngatgacggtaattacctgaaaccacctctgagggaaggtggtggcgtctcaaatgcatgggcatgtggctggtcaggtggcctccatcccagggtgccccgtctgtgtgacctccctctgggtgctgtgggcttgctccagggtgcaggtgcaaccccagcagcggtctctggggccaggcaggtgggtggacgattggacttggaggggaatacagagggcatggaagtggcgaggctggcctgttggcgagggtgtcctggtggtggggcgggctgagtcagggaaggactctgaaggtcccaagcagctgctgaggcccccaaggaagtggttccaaccttggacccctaggggtctggatttgctggttaacaagataacctgagggcaggaccccataggggaatgctacctcctgcccttccacctgccctggtgttcacggtggc

SEQ ID NO: 241 - DNA, 435 bp, Homo sapiens
  misc_feature (1)...(435): n = A,T,C or G
cccgtctgagaagatgaagaggcagcacagcacagctggcctcggggaaccggaagccacagggacatcaagctgtgtgctgctggctgtcggccaccagctgggggactattctggacctggaagggcattcctgacacttcccaccagatgccaggggcacccccagccccaggtgagaaccacggataccatggcgaatgaggtcagcctgtgggaagtggggctgggactgctctgcacagcttaataggaaagttgggttctatttggtggggttttggtcatgccaatggctggtcagggctgtccgtgaggaactgatttgaggacaagttaaagaaggggctgccgaggccagtggggcactcnctgtctgggtctaagaaaaagaaaataaaggctggtgatgtgacagttggtgggagcacagan

SEQ ID NO: 242 - DNA, 484 bp, Homo sapiens
  misc_feature (1)...(484): n = A,T,C or G
tgggagaggcccnnttagannccnnttcgtagtccactatcagtgtggtggaattccccgaacatccagtctgactggagacagccggatgccctctgaccccgggcccgaggcgggcagtggctggccgggcctcctcatgtcctgcctgaagggtccccatgtcatcctcaagatggaggccatgaagattgtccaccctgaaaagttccctgagctaccggctgccccctgcttcccgcctgctccccggcccaccccaactctggcacccaagcgtgcctggccctcagacacagagatcattgtcaaccaggcctgtgggggggacatgcctgccttggaaggggcaccccataccccgccactgccacggcggccccgtaagggaagctcggagctgggctttccccgcgtggccccagaggatgaggtcattgtgaatcagtacgtgattcggcctggcccctcggcctcggcggtn

SEQ ID NO: 243 - DNA, 478 bp, Homo sapiens
  misc_feature (1)...(478): n = A,T,C or G
aggagagccccntttgagtccatattgagtgtcgtggaattcctcttctccaatactgtttaaatgcatgtataaatacataggattacagaagaaaccatcatattgaaataataccaaaatattacagaaaacaagtttgtgatactgtaatatgtgttcttctctattaacacattaaataacaggatctggcagcagaattagcactttctgtaatttcagtgtagtcaatgagcgtcaatgatattttgaggcattgatgataccataatgggacatgaaagatctgtgattttcgttagtaacaaagttgtaggtgctgccaacgctaatgatagtttgttgtctgcattcatggtcaaagaaatgctacatctcagtcagcgcttgggtagaacaaagatgtgcgtttttccccattcacgtttgcagatctgctgtcagttgacctgtgctaagaacctgagttacctgn

SEQ ID NO: 244 - DNA, 543 bp, Homo sapiens
  misc_feature (1)...(543): n = A,T,C or G
tacttttaataccatgcggttacttattcatatcgtctaactcctcacctcagatataaggcatcaaacaaaccaaacacccnttcgagnacattaggcttttgaaggcgtattcaatcacacgggcagatngcccagtatacaggggcataacattctcgacatcccaaactgaccctgccaattactcctcatattccacccctccccattcctggcgcaccatcatgatactgttatgtgtctatgagcatggaaaggccatgtttaatagtgccaaaacttgatatccactataaataggagcagcatgatatggtaggaaaaattttggactggagccaaacgctttctgtcatatttagtttgtaatctgggccaaactgtttgatttctctgagactctgtttcttcgcctctaaaatgggagtagcaatttactgtgatgttgtgagaattacatgagacaacgtatgtaaatcatcaggctcataataggcatttaataaatgatattagaaatatagaatgttctcaaagtat

SEQ ID NO: 245 - DNA, 460 bp, Homo sapiens
  misc_feature (1)...(460): n = A,T,C or G
nagcgggtnnnnnncattgatntccctangcagtgncgtggaattcaattaattaacacagatctaatgagagggcactgacagaaagcagcctcttttcttgaaattcaaacatcatctcaacttgattttttttatctttctgacaagaaaaagtacaccttccttcaacactagggaaactcaaaatgtttattcattaatttccattcacctccctttaatttacagtatgtacgctttaacaatgacagaaaagtgaattatcaaacttcattgataaatactgacataacaggttaaatgtatttcttaagcactatgtatgtgttcttccacattcctatcgtctacttcagatctgaaatgctggctccctcctggtactcctcctctaagcaggctcttcagcatagaatagcaactcanaggccaaaccttcttgcccaaggtgaaagtg

SEQ ID NO: 246 - DNA, 461 bp, Homo sapiens
  misc_feature (1)...(461): n = A,T,C or G
agcggntgnnnnnnccttggctacagtagcctaggccagggacgtggaatgcctcggccgctgggccgaactactgtctgccctggacgagtcccgtgccagcatcacctctgtcaccagcttctctccggacgacgtggcctccccgcagggtgactggaccgtggtggaggtggagaccttccactgagccagaccacagccccgcctgctacaccccacccctgccttaggatccgcccctccgggtacgccgtttgttttagaccccgcctccactgccctggagccccgctgggtggattagtcttagctccctagagcctgagcctttggcctcggaggctcgggacctacccacagctttgacctaggcccgcccctcgagctccgcccctttggcctaggacacgccccgtttccccgagtcccgccccgtgtgcagtgtattgcccaccccc

SEQ ID NO: 247 - DNA, 474 bp, Homo sapiens
  misc_feature (1)...(474): n = A,T,C or G
ntgtgagatccactattgcagtgcggtggaattcgttactgatgtggccaccctattcccacatggggagcaccaggagccctggagccccttccacccaatcccatctcgcaggagagcagggtctgggctcctgcctcaccgctggttcagcagcaccctccccgccgggtcccaccttgccttttgaagaagagcccgcataatgagtggacggcagacagctatatttagtggtgcctcgacactcacgaaccgccagcgtggcgcctggatcttgcccagctgccagctccccccaccaggactgtggttcctcagtttctcctgccagccccggctcatctcagggcaaagctatagacatggtagatctcatcggggaggttctcctgcctctcctcggccaggaggctgaggcctgcactgcagatgatcctgcggaccacgtcaaggtcccggcacacgctgctg

SEQ ID NO: 248 - DNA, 485 bp, Homo sapiens
  misc_feature (1)...(485): n = A,T,C or G
agcgcgtgnccaactgaaaccctcctcgatgaccntagtccagtgtcgtggaattcctaccgtttagggcattctgcttaaagagagattatggtcacactcttaatagcaaagcaattttggatattcaccgtggacctacatttgtcagattatgttttggagttatctaggtacctaataaatgcctgtttttacagcccatgttcacagcccattgagaaatagacaaagtgggtaaggcagatgaatgaaaacatgtcagttttattactgataatgtactgcaattggagaatgtggtcagatattccaaacttcctatgactgcacactgaagagtcttctctttggaggggagaaaaataatgctcgtggctgtttttaaaattatgtttattatatatttattaaaagaaagataatatttagaaaaaaatctcattagtcaagtaaaattttagatactctatcttgaaaaacct

SEQ ID NO: 249 - DNA, 485 bp, Homo sapiens
  misc_feature (1)...(485): n = A,T,C or G
agaggcggcnnnaccttgatatccntagctcggagtgccgtaattctgagctttccctcctcctctcaggccagtccatcacctatgctctggaccccaccaacagccagcagtagggggcagtggctggagcactggccctgcatccagactgcctggctttgaatcccagctttgctagctgtggagttgctccacctctctgtgcctccgtgtccttgactaatcatgtctaccagacttctagtgagaataaggggacttgatatccataaagcatttagagcagggtgtggcacatctcaactctaaatgaatgttacctgctcctgctgctactgctgtcaccatcatctaatcctcagggaacttcctcctcctttatcccatgtcactcacgtcttcaaactcttcctttctattgtgatcttgccccagtatttaaaaattgttttggctcatgcctgtaatctcaacactgggag

SEQ ID NO: 250 - DNA, 456 bp, Homo sapiens
  misc_feature (1)...(456): n = A,T,C or G
cggcgaggggnngnnnnaaatcgagacccctngcattgagcgccattgccccggccagagcttcctagcagcccgagccatgaacaccgaaatgtatcagacccccatggaggtggcggtctaccagctgcacaatttctccatctccttcttctcttctctgcttggaggggatgtggtttccgttaagctggacaacagtgcctccggagccagcgtggtggccatagacaacaagatcgaacaggccatggatctggtgaagaatcatctgatgtatgctgtgagagaggaggtggagatcctgaaggagcagatccgagagctggtggagaagaactcccagctagagcgtgagaacaccctgttgaagaccctggcaagcccagagcagctggagaagttccagtcctgtctgagccctgaagagccagctcccgaatccccacaagtgcc

SEQ ID NO: 251 - DNA, 457 bp, Homo sapiens
  misc_feature (1)...(457): n = A,T,C or G
attcgataacccttgnnntttgtatgtcattagtccatgtggtggaattcctgacagcgccagtggtgcttggattcatgaggactgaaactgagagtcctgttccttccacatgagaggggcagggcgaggagcatgggccgtgctgtgtattaaggaaatgcacgtggctcctgcttgtcatcccagcactctgggaacctgtggctggtggattgcttgagcccagacgtttgagaccagcttgggcaatatagcatgaccctgtctcaacaaaaaataacaaaaaattagccaggcatggtagtgcacacctgtattcccagctactcaggatgctgaggagggaggatggctttagcctgggaagtcgaggctgcattgagctgcgtttgtgccactgcctccaggctgggtgacagatcaagaccttgtctcaaaaaaagaaatctcatgg

SEQ ID NO: 252 - DNA, 456 bp, Homo sapiens
  misc_feature (1)...(456): n = A,T,C or G
ggcgaggggnggggnccctgaaaccctnnaactgagancacttgcagngncgnggaattcccaggtccctggccaaagatttatttctcttgacaaccaagggcctccgtctggatttccaaggaagaatttcctctgaagcaccggaacttgctactaccagcaccatgccctaccaatatccagcactgaccccggagcagaagaaggagctgtctgacatcgctcaccgcatcgtggcacctggcaagggcatcctggctgcagatgagtccactgggagcattgccaagcggctgcagtccattggcaccgagaacaccgaggagaaccggcgcttctaccgccagctgctgctgacagctgacgaccgcgtgaacccctgcattgggggtgtcatcctcttccatgagacactctaccagaaggcggatgatgggcgtcccttcccccaag

SEQ ID NO: 253 - DNA, 455 bp, Homo sapiens
  misc_feature (1)...(455): n = A,T,C or G
tttgagacattagnnngttgtatngacctctatccatgtggtggaattccacaggatggatgagaaaactgaagctttgagaataagtacctggactaaggtcatgcaatgaggaagggccaggccagattgaaagctaaagacgtgggtgtccataccccatgcccttcacctgtgtggtgactgccttaatgatcaactttgtactgggcccaacgccgaggcaagtgagccaaaggtcagcaagtctagctccctggaggtgacacagtgatgtatataattggggtgcttggaacctggtgcagtccatccgagctgctggacaggctgcgtctaccatagaggcggcttcggggcaccaacttccacgtcccaaaggtcctgactttctgaactgagagaattctgctcggagctgtgttcctaactgtcaggagttcagggtgagttgg

SEQ ID NO: 254 - DNA, 454 bp, Homo sapiens
  misc_feature (1)...(454): n = A,T,C or G
nttcgtcgaccctagtccgtgtggtgcaattccatcctgtgggagtgcctcgtgggctgccccagagttcaccccacactcagcagcaccaatggtgaagatgacaagatcgaagactttccaggcatatctgccctcctgccaccggacctacagctgcattcactgcagagctcacttggccaatcatgatgaactaatttccaagtcattccaaggaagtcaaggacgagcatacctctttaactcagtagttaatgtgggctgtgggcctgcagaagagcgagtgttgctaacaggactgcatgcagtcgcagacatttactgtgaaaactgcaaaaccactctgggctggaaatacgaacatgcttttgaaagcagccagaaatataaagaaggcaaatacatcattgaactagcacacatgatcaaggacaatggctgggactgattg

SEQ ID NO: 255 - DNA, 458 bp, Homo sapiens
  misc_feature (1)...(458): n = A,T,C or G
attggatgacattagnacgttgtagtaccttacaccatgcggnggaaggccaccagcgcgctcacggtctagtgtgcagcgtgaggaatgttgtcatccccacaatagtgagaaagtggctctgtggaaaggggcccccggcgctcctgagtccgcggagtcgggagaggggccgcggcgacggggagagccgtgggaccgggaaggacgggagacgcggccggcactgccgccttttgttccggccagagccgagcctcttgaagccattcttacagatgatgaaccagaccacggcccgttgggagctccagaaggggatcatgacctcctcacctgtgggcagtgccagatgaacttcccattgggggacattcttatttttatcgagcacaaacggaaacaatgcaatggcagcctctgcttataaaaagctgtggataagccaccttcccctt

SEQ ID NO: 256 - DNA, 457 bp, Homo sapiens
  misc_feature (1)...(457): n = A,T,C or G
cggcgaggggnnngnnnnnaattgagacccctngnattgagcnccatctcgagagccagctgagtggttgtgtggtcgcgtctcggaaaccggtagcgcttgcagcatggctgaccaactgactgaagagcagattgcagaattcaaagaagctttttcactatttgacaaagatggtgatggaactataacaacaaaggaattgggaactgtaatgagatctcttgggcagaatcccacagaagcagagttacaggacatgattaatgaagtagatgctgatggtaatggcacaattgacttccctgaatttctgacaatgatggcaagaaaaatgaaagacacagacagtgaagaagaaattagagaagcattccgtgtgtttgataaggatggcaatggctatattagtgctgcagaacttcgccatgtgatgacaaaccttggagagaagtta

SEQ ID NO: 257 - DNA, 454 bp, Homo sapiens
  misc_feature (1)...(454): n = A,T,C or G
nttgatgaccctagaacagtgcagnggcattcgagcctcctacgagtgcccccagaagacatcagagtatgcaaatttggcaacaagtttttccaggatggagatatgtggtcctctatcaattgtaccatctgtgcttgtgtgaaaggcaagacggagtgtcgcaataagcagtgcattcccatcagtagctgcccacagggcaaaattctcaacagaaaaggatgctgtcctatttgcactgaaaagcccggcgtttgcacggtgtttggagatccccactacaacacttttgacggtcggacatttaactttcaggggacgtgtcagtacgttttgacaaaagactgctcctcccctgcctcgcccttccaggtgctggtgaagaacgacgcccgccggacacgctccttctcgtggaccaagtcggtggagctggtgctgggcgagagca

SEQ ID NO: 258 - DNA, 456 bp, Homo sapiens
  misc_feature (1)...(456): n = A,T,C or G
ggcgaggggngngnnactgaaaccntngaatcgagatccatatgcagngngcgtggaattcgtcttttttaacctatgtcctgcatagttttgttaggtttacagggggaggtggatggccataaaaccagtgcactttgggaattacttttctaggatttcctaccagttataaatgacattgacatttgtcatctttttttttctttttctaaaaagaatagctgaatttaattcacctattataaaatactcaaaagtaaattgcattggtggccacttctgaattatagctacatttcattatgaccccttctgctctcttccattttgctactgatgtcattcttgttatcaggctgtgcccctaccaggagttcatattgggttgacagggttatctatatttttgttcttgatttttgagttgtatcatcttgcattaaattgttccac

SEQ ID NO: 259 - DNA, 460 bp, Homo sapiens
  misc_feature (1)...(460): n = A,T,C or G
aggcgcggggnnagggggcccccgaaaaccctggactgagaccctcggccangngctggaattcctcagttccaaaggactaactgttgttgatgtctatcaaggctggtgtggcccctgcaaacctgtggtgagcctcttccagaagatgaggatcgaggtcggcctggaccttctgcactttgcattagcagaggcagatcgtcttgatgtcctcgaaaagtacagagggaagtgcgagccaacctttctgttttatgcaattaaagatgaggctctttctgatgaagatgaatgtgtttcccatggaaagaataatggtgaagatgaagacatggtttcatcagagaggacctgtaccttggccatcattaaaccagatgcagtggcccatggaaagactgatgagattatcatgaagattcaggaagctgggtttgaaattctaacaaatgaagaa

SEQ ID NO: 260 - DNA, 473 bp, Homo sapiens
  misc_feature (1)...(473): n = A,T,C or G
natcgagacccctgtcgagtgtgcgggaattccaggtcatattgttcacagagatgattataaaatgctttttatgacttacaaaagaaagcttagaatattcgttagaaatgccttatcactgaacacttagcgtttttctgtttcttgattctaaaacagtgatgacgctgatcatggcattaatgaagtgctgatctactatattttttagtttaatatgcctgtttattcggttaacagtataaagtaatcattctgatctggcctctttttgttttttttcccattccctccatttttgccgcttccgctttgcaaacatcagatccgagatgagtggggcaatcagatctggatctgccctgggtgtaacaagcctgacgatgggagtcccatgattgggtgtgacgactgcgatgactggtaccactggtgagtgcccagggcgccctgccggccacactcattag

SEQ ID NO: 261 - DNA, 499 bp, Homo sapiens
  misc_feature (1)...(499): n = A,T,C or G
aggcgggnnnnnnnnnngnngcatcganacccctnnnannntactgagaccctcctccagngtcgtggaattcctatgaatcaacctaaacagaggttccaaaaccagctgcagctagctagctagctctaggaccaccaattcctgttccagccctattgcaattcttatggaacccctgcctgtcatgcagaattgtagtcatctttactaccactgcccccaaaggcctttccatgcgcttttaacctatagagggcagccagttgactaattctgacagcaactttacccttcaggggagataatcccaccacccctctggaaaatggccatgccttaatacagtgtgacaaccaccttcagacaagtgacaaggaaaatgcctcctgctctggttctgtggtaatctaccatctaaggtgccttcttggggcagttggtccacaagaatgtaaggaagtggcagcagtcttggatggtgatagccactcagttt

SEQ ID NO: 262 - DNA, 475 bp, Homo sapiens
  misc_feature (1)...(475): n = A,T,C or G
attgagnccctatcgagaccactgtccangtggtggaattcctgggaccactggctttccaccttctcctgggggtcctgtgtctgtgcaggtgctggagatgtgcatgaaccactgtggtgagaagttccacagcgaggtggccaaattttgtttcctgaacgaactgatcaaagtgttgtccccaaagtacctggggtcctgggccacaggaaaagttaaaggaagagtcattgaaatactcttcagttggacagtctggtttccggaagacatcaagattcgagacgcttatcagatgctgaagaaacaaggaattataaaacaagaccctaaactaccagtggataaaatcttacccccaccatctccctggcccaagagctccatctttgatgctgatgaagaaaagtccaagcttctgacaaggcttctaaagagcaaccaccccgaggaccttcaggctgcaaaccgg

SEQ ID NO: 263 - DNA, 460 bp, Homo sapiens
  misc_feature (1)...(460): n = A,T,C or G
tggggtgnnnnncctgagtacagtacactaggccatgaggtggaattcggcagagcaccagcctgggcatcaggaagccaagtttcaaggactgtctttgagtctgtctgtatgaccttgggcctgccacttctcacagaccctaggtatccacagctgtgacatgggggcaagcagctttgtttcagcctaacccaggagcttagtaaaaattgcataagaccagggggaagagtgtcagcgtggggtgggaattcccgcggcctccacctgcttgctaggggcaggatctcattcaggctgccctggaagcacctgcttggccctgccaccttcctccaggggagggccagatggcatcctggcttggggcgggtgggacctacccaggctctgagactttactggcctatgcctgaggcctcttttcctttaactccctanattatgatgactccaa

SEQ ID NO: 264 - DNA, 482 bp, Homo sapiens
  misc_feature (1)...(482): n = A,T,C or G
agcgggttntatccaggtactccgtanagccnggaatctcgcacccanaggctctgcagcacagaggagacacccctcccctccgaaagatgcatcagccactgggcagcttacaaggattccagggagggaccactgcccactgtcagcagggtgaccacagaggcctcctgggcttccctccctttcttcaccaaaaggtcttccagctcctcagcgacagctcgtgctgctcccccagctcccagcacctccaccctcacagactcctccccacagctcccatgcgatacccccaaagtcaagcagactgatggagacatgccaccacccccagggtcggctggccccggggataacgacatggaggaattctacatctgaatgccctctgctcttgttctcgaaacacacaaactcagagacacagactcaggccccactgcccctctggccactgagcacaccacattcttcatgat

SEQ ID NO: 265 - DNA, 481 bp, Homo sapiens
  misc_feature (1)...(481): n = A,T,C or G
gggagaggccncttagacnccntttcgagatcactagtcagtgtggtggaattcggattcccttgtctgccgggagggggagagcatccagggctcccatgtgacccggtggcccggcgtctacctgctccagtggcaaatgcacagcccccccagcagcgtggcctgcagcctcccgggtgtggacgatgtcctgacggctctgcacagccccgggcccaagtgcaaacttctctactactgtgaggtgctcgcctctgaggacttcaggggctccatgtccagcctggaatcctgcaccagcggcttctcccagctcagcgccgccacctcgtcctcctcctccggccagtctcatagcagctccctggtctccagatagccgggcccagtgtttcagggccgcccgctcgcctccagtgtccagaaatgtccagaatgagaagccagctaactgcagggcctgggaccatgtgggctg

SEQ ID NO: 266 - DNA, 474 bp, Homo sapiens
  misc_feature (1)...(474): n = A,T,C or G
atcganaccatgtcgaggtgcgtgaattctctgagagggtgtctcaccgaacggtagctaaaacctcaccagaaccgcgcggaagtgagaagtcgcggtcaaaggcgcccgcagaagcctcctctctgggccggaccccagcccgagcggccgaaaggagccccccgcccggatcacagaagtttacaaggaaaggggaaatgtctgaaatggagattgcacaatcctgtcttgaagcagaagactcagctagagcacatctggaaacacctggcactcctcaatagaattcaaatgctattttaaaagagtccatttctaagaagatgtggttcgaacatacagagctacataatatgagtaaaataggacctaacagtagtgttctccagcattgctctgcctttccttttctggatgtaacaacattactaagaaaggaagaaaaagcaaaaatctgctctcggggagatn

SEQ ID NO: 267 - DNA, 476 bp, Homo sapiens
  misc_feature (1)...(476): n = A,T,C or G
gtcgagnccctattgagaccactagtcagtgtggtggaattacatcctccgtccagccgccattgccaccaggagaaccactacatgcagcccatgcccacctgcccatcacagggttgggcccagatctggtcccttgcagctagttttctagaatttatcacacttctgtgagacccccacacctcagttcccttggcctcagaattcacaaaatttccacaaaatctgtccaaaggaggctggcaggtatggaagggtttgtggctgggggcaggagggccctacctgattggtgcaacccttaccccttagcctccctgaaaatgtttttctgccagggagcttgaaagttttcagaacctcttccccagaaaggagactagattgcctttgttttgatgtttgtggcctcagaattgatcattttccccccactctccccacactaacctgggttccctttccttccatcg

SEQ ID NO: 268 - DNA, 478 bp, Homo sapiens
  misc_feature (1)...(478): n = A,T,C or G
nttcgcagaccactattccagtgtcgtggaattccttcgccagggcaactccgacatctacagctcagtgctggagtacacgctcaagtgcaattatgtggacatgggtgtccagctgcctgctgagcttcaccagcccgtgggccccagctggttctcggagcagatgggcatcatgaagccctcccaccctgaccctatcatccacaccagcgacgggcgctgctccatcagcttcagcgtggaggagggcattaatgtcctggcttccctccacggggatgatggccccatcactgaggagacacagcggcgctacatcttccagctgcaccgggagaagcagaccgagctgaaagtccagctgccccatgcaggcaagtttgccctcaagatctttgtcaagaagaggcaggaaccaggaaactacatcttcgtctttaattacctcgtatgctgtgccaacaccaaggtgaac

SEQ ID NO: 269 - DNA, 477 bp, Homo sapiens
  misc_feature (1)...(477): n = A,T,C or G
attgagngccnnatcgagatcactagtccgtgtggtggaattccttataaagagcgttttgaagactaggtttttactggcagggccctgattcaggctcacagtataaagagagaagtcagagaatcctagaaatttattgcttgaagaaggggttggtgtcctcatatctcaccttcctcaggctgggcttcatcaccaggcctcctcacagattcctgtcccttctgtgtcctggactccggatacctcaactctcagtactttgtgctcagcccaggtaacacgttttgttgtgtcctcagtgcctggcacttagatgctcagtttgttaaatggatagtgggagacacaggagtgtcaactatccacacatttgattggtgagccctactagccctgggtcaacgtgccctgtaagagcatgatcaaaaggaagtccagctttcctgcctctccacttgcaccccttagcat

SEQ ID NO: 270 - DNA, 479 bp, Homo sapiens
  misc_feature (1)...(479): n = A,T,C or G
attcgagatccactattccagtgtcgtggaattcgggagttattggtcaaagaatacaatgtttcagctcgacaggaaaaataggttttgagatctattgcacagcagagtaactacagtcaatgatgcatatttcaaaataactaagttatatgtaacaaaataactcaatgtatcatcacagaagatgtcaagcaattgaggtgagggatttgttcattagcttgatttaatcaccccacaatgtgtacatatatcaaaatatctcattatatgccgtaaatgtaatgcaattatgatctgtcaattaaaaataatataaaaatgcatggaaacgaagtacacagggcaggcctgctagtcccacggacctctggttctccaagctgcaaaatgcagatgactggctcccttggtggcaggagacagggtcaggttggaacctaagtaggcattgagtatcagatcttactaaaccn

SEQ ID NO: 271 - DNA, 479 bp, Homo sapiens
  misc_feature (1)...(479): n = A,T,C or G
aggagcgccntttgagatcatatccagtgcggtggaattcctcagtgcccctgagctcattcttttcagaaattctctctctgcgtggagagaaaacaggcctggagaggctctgcgacccgcttaggaccacagaactcgagaattaccttttccagggacggcaggaatgctacgcgtttaatgggacacagcgcttcctggagagatacatctacaaccgggaggagctcgtgcgcttcgacagcgacgtgggggagttccgggcggtgacggagctggggcggcctgaggcggagtactggaacagccagaaggacatcctggaggaggagcgggcagtgccggacaggatgtgcagacacaactacgagctgggcgggcccatgaccctgcagcgccgagtccagcctagggtgaatgtttccccctccaagaaggggcccttgcagcaccacaacctgcttgtctgccacgtg

SEQ ID NO: 272 - DNA, 487 bp, Homo sapiens
  misc_feature (1)...(487): n = A,T,C or G
ngagcgctccnnnncccggaaaacgncagcatgngcaggaacncnnnctttctaccctcattttctctttggcccgatttcatattcgctatcttatttcctctttcataatttccattaaatcttttctagattaagatatttgatggacaaataaacaaaaaaagccaatgtatatgagaatcctgggtaggagctaaaacccaaaaacagtatcacccctggatgtcataggggccaagaaaaaaggcaacaaggagcttttggcgcatgaggggtctttggtggaggttcccagagggaccagccctcagatccagggaagtaggcctggtcctgctttctgggggtggccaccctctttccaccaggccacccctgcacagagacctcggcttcactcaggcacattcatttgtctccgacacccccaggatgaagtggccgtggagacaaccactccccagcagaacaagatggacaagcn

SEQ ID NO: 273 - DNA, 490 bp, Homo sapiens
  misc_feature (1)...(490): n = A,T,C or G
cggcggnnnnnnggggcctgagaccctatgccgngactgagaactctcaacacggtacgagggctagtgcagaaaacaagggcctgcttgcttcttcacctgccccgggggatcaagcctaatggtgacactggaggatttgaccctgacgtggcgtgggtccctcccctctgtcttctaggccgtgtgcagaacaaacggcttctactcgctccacgtgcagagctggtttggcctccacaagaccctgcagcctctggtgaagcgggtctgcgacactgaccgcctggcctgcagcaagacctgcttgaactcggctgacattggcttcgtcatcgacggctccagcagtgtggggacgggcaacttccgcaccgtcctccagtttgtgaccaacctcaccaaagagtttgagatttccgacacggacacgcgcatcggggccgtgcagtacacctacgaacagcggctggagtttgggttcgacaag

SEQ ID NO: 274 - DNA, 461 bp, Homo sapiens
  misc_feature (1)...(461): n = A,T,C or G
tgggctgnnnnnncccggtccggttaacctcggccgngacgnggaantccgcgcgagcaagatggccaccaccaagcgcgtcttgtacgtgggtggactggcataggatgtggacgacaaagttcttcatgctgcgtgcattccttttggagacatcacagatattcagattcctctggattatgaaacagaaaagcaccgaggatttgcttttgttgaatttgagttggcagaggatgctgcagcagctatcgacaacatgaatgaatctgagctttttggacgtacaattcgtgtcaatttggccaaaccaatgagaattaaggaaggctcttccaggccagtttggtcagatgatgactggttgaagaagttttctgggaagacgcttgaagagaataaagaggaagaagggtcagagcctcccaaagcagagacccaggagaganattccgctgccg

SEQ ID NO: 275 - DNA, 486 bp, Homo sapiens
  misc_feature (1)...(486): n = A,T,C or G
ggggaatcgagatccctagnccgngtcgtagaccctagtccgtgtggtggaattccatccctgcctcgcacttaacaggctcctgggggtcagggcacttagggtgggccactcagcccccatctaccccatctattgcgcgtctcatccggtccagtcctggcgtcccgccctgcccagcctcccgtccctgcccctagcccgtgccctggctgaacagctgccacccaacatgtccgagcgcttccgggagacgttcctgccatcgggccgcccgccactacctggctcgttgctgcatcggcccgacctggctgaggtgctggatgtacttggcacctccggcccggctgccttctacgcaggtggcaacctcacactggagatggtggccgaggctcagcacgcagggggtgtcataaccgaagaggacttcagcaattacagcgcccttgtggagaagcctgtgtgtggcgtgtacagagg

SEQ ID NO: 276 - DNA, 496 bp, Homo sapiens
  misc_feature (1)...(496): n = A,T,C or G
cggaggtgccngnnnnagnnnnnnatcgagaccccttgcagtgtacngccattcctccctctcagctccctgctcagggacggtggacaggttgcctactgggacactctaggttgctgggtccatggggaggattgggggaggagaagcagtgccttccctctcgtgtggggtgggggctctctcttcttggtgcctgctgtctttctactttttaatttaaatacccaacctctccatcacagctgcatccctgagagtgggagggggctgtagtggtagctggggctcccaagaacgactcgggaatgtcatctccatcttcacccttcagagagcagtcctttctctgtgcagctggagacgctggtgaggagagccgggtccaggttcttaagaatgaggtgcggaggggctctccggtgctgctgggctgggttgagcaagcctacgcagacaagtgtgtgtgtggaccatccgcacctccagcccccac

SEQ ID NO: 277 - DNA, 484 bp, Homo sapiens
  misc_feature (1)...(484): n = A,T,C or G
nattggaaaccctcgaannnncnnnnactgataccctaggccangncgnggaattcacccattcggaaagttatttctgagctgttgaaggctgtgtgtgcttggactcctgagcttttgctggggatgctcagctcggactaggggcatggtcagctggcagagtgttggggacccaggtccatgagcgaaaccctccatagcaatgatctgggcacctgcagatcactgagtctgtgcagaaacctggcagtggatccaccggggcctgagcacatgactcttgcctttcctccctcacctggaagtcacagggaagatcgaggtcgttttagtcacttacagacttagggagcacccactgtgcaactcagtcacagctcagcccagctaagcactgcaaagccccaggactgtgcttggttctgcgatgtggaaggaagactctagttgggatgcatgcagctcaaaggaaggaatgggc

SEQ ID NO: 278 - DNA, 469 bp, Homo sapiens
  misc_feature (1)...(469): n = A,T,C or G
ngagcgagggnnnnccttgaaaccctgnatagtagagcgtagtccagngtggtggaattccctttctttctcacaggcataagacacgaattatatattgttatgaagcactttttaccaacggtcagtttttacattttatagctgcgtgcgaaaggcttccagatgggagacccatctctcttgtgctccagacttcatcacaggctgctttttatcaaaaaggggaaaactcatgcctttcctttttaaaaaatgcttttttgtatttgtccatacgtcactatacatctgagctttataagcgcccgggaggaacaatgagcttggtggacacatttcattgcagtgttgctccattcctagcttgggaagcttccgcttagaggtcctggcgcctcggcacagctgccacgggctctcctgggcttatggccggtcacagcctcagtgtgactccacagtggcc

SEQ ID NO: 279 - DNA, 461 bp, Homo sapiens
  misc_feature (1)...(461): n = A,T,C or G
ngagcntgggnnnnattgaaaccctnaatagagagcgtatngcangacgtgnntggggctgcgttntttctcaccattcactggtatggaggtgaagccatacctctccgggagactctgagatggcacgtctaccacgctgccgacccgtgtgctacagaggaacatccctgccctggctaaagactgtctgtctctcagggccccgttctccgagtcctgctgtccgctgacctgaaggggttccaggacttctctaccctggaagaagcagagaagcacctgaggcaggagccagggacccagccctacaacatcagagaagactccattctggaccaaaaggttgccctgctcaaggcataatggggccacccgtgggcatccacagtttgcagggtgttccggaaggttcttgtcactgtgattggatgctggatgccgcctgatagacatgctgg

SEQ ID NO: 280 - DNA, 467 bp, Homo sapiens
  misc_feature (1)...(467): n = A,T,C or G
tgagcgagggnnnaatcgaaanccntnaaatgatagccntatgcagngncgnggaattcggattctgcagcttggtccttatcttctggctcagggtcagctccgggctctgaggaaggggcaggggcaggacctgtctgtcagcagggccatgtaaaggcagctgaccttctctctgagcttggtcagactttgggcagttcatcccctccccacccctgttgttgagctaagctggggacacctgaccccacccatctccttgccggcccatgtggacaccagtgtgccagcacgtgtgctccatccctctctgggcttaccggcctgtgctgctgcagggcctccaggaccgagcgggccttctcaaagggggggatcttcagcctgtagtgggggcaaggcaagccatgctaggcagtggggaatgtgggcacacctggcccaccgcagtccccatgcccatg

SEQ ID NO: 281 - DNA, 505 bp, Homo sapiens
  misc_feature (1)...(505): n = A,T,C or G
tggctctannnaactgatagcctcgccannggcngncaactgagacccctcgcaanngccgnggaannngnacaagaccgacctcaaccccgacaacctgcagggcggcgacgacctggaccccaactacgtgctgagggcgcgggtgcgcacgggccgcggcatccgtggcttctgcctccccccgcactgcagccgcggggagcgccgagccatcgagaagctcgcggtggaagccctgtccagcctggacggcgacctggcgggccgatactacgcgctcaagagcatgacggaggcggagcagcagcagctcatcgacgaccacttcctcttcgacaagcccgtgtcgcccctgctgctggcctcgggcatggcccgcgactggcccgacgcccgcggtatctggcacaatgacaataagaccttcctggtgtgggtcaacgaggaggaccacctgcgggtcatctccatgcagaaggggggcaacatgaaggaggtgttc

SEQ ID NO: 282 - DNA, 463 bp, Homo sapiens
  misc_feature (1)...(463): n = A,T,C or G
gatggatgggnnnaattgaganccntgncatcgagggctgtatgcggcttcggaattcgtcgacttaggggttggccacgatggtgtccttgatccacttccggtaatgcaccaccttggtgtacagggaaggcctttcgggcagggcacatggttcactgccccatgacgtgataccttgaagcacaccattacagacaagtggggccccagaatcacccgagcaggtgcttttgccccctgtccagcgtccagcacacagcatgaacttggtcaccttctgagggtgaacttgcgcacacacgtcattggaaataacatggaggtccacacactgaagtttctttggggtcaagaactcctctggttcaatgctgccccagcctgaggcgtagcaggtggtccccagtgctggctcctgggtgggcaggtccatgaccttcacagcatccgtgagctcggc

SEQ ID NO: 283 - DNA, 481 bp, Homo sapiens
  misc_feature (1)...(481): n = A,T,C or G
gatgttccnnnaatgagaccaatgagagcctctgcagngncgnggaattcctgacatgtaaagagattctttaaaatgctgcttcttctactggactgtctttcactgagtagtcagggaggagatgaaaatgtggacacatccccccgccttctccctcaaccttttcactcacgtcagaagaggttggggcaaaacaaaacaagcatgattgaagagcaggggaagcccacacaatcaggtgagccctgatgggggctggactggcctggtctggctgggaaaggattcttttaaaagcgtgcctgagcatctcaaagcaatgtcagtgatgccaaagagagcaacttggcctccttgggcaccaactctgatggctgagttgcacaaacgtggctcagatgttggcatgcccgatggtgggaccttgttctctgataaagggcttaatctttccatgtagcaaagcaactttccctcn

SEQ ID NO: 284 - DNA, 466 bp, Homo sapiens
  misc_feature (1)...(466): n = A,T,C or G
gatgggtgagggcaattgannccctnaatcgaganctntgtgcagtgtggtggaattcggctttggaattcgtcgacttaggggttggccacgatggtgtccttgatccacttccggtaatgcaccaccttggtgtacagggaaggcctttcgggcagggcacatggttcactgccccatgacgtgataccttgaagcacaccattacagacaagtggggccccagaatcacccgagcaggtgcttttgccccctgtccagcgtccagcacacagcatgaacttggtcaccttctgagggtgaacttgcgcacacacgtcattggaaataacatggaggtccacacactgaagtttctttggggtcaagaactcctctggttcaatgctgccccagcctgaggcgtagcangtggtccccagtgctggctcctgggtgggcaggtccatgaccttcacagcatccg

SEQ ID NO: 285 - DNA, 461 bp, Homo sapiens
  misc_feature (1)...(461): n = A,T,C or G
gagcggtggggnncgtcgagacccttggatagagagccgtatgcagnggcggaaatcgtcgacttaagggttggccacgatggtgtccttgaaccacttccgttaatgcactaccttggtgtacagggaaggcctttcgggcagggcacatggttcactgccccatgacgtgataccttgaagcacaccattacagacaagtggggccccagaatcacccgagcaggtgcttttgccccctgttcagcgtccagcacacagcatgaacttggtcaccttctgagggtgaacttgcgcacacacgtcattggaaataacatggaggtccacacactgaagtttctttggggtcaagaactcctctggttcaatgctgccccagcctgaggcgtagcaggtggtccccagtgctggctcctgggtgggcaggtccatgaccttcacagcatccgtgagctcgg

SEQ ID NO: 286 - DNA, 482 bp, Homo sapiens
  misc_feature (1)...(482): n = A,T,C or G
aatcgattagccctactccagngtggnggaattcggcacgtattgacagcttgtggcgtgtcaggccctgtgcccaactctgggagtcaaggataacctgacagactcaggccactttaggaaaacgaaatccaccccaaccacacttagcgagtcaccctggccgggcctgggctgccctccagtcggtcagccggactggatttccacgcggccgagccctacgcctcccagaccctgagctccagtctgcacaggccaggtgtctggagccgggcctggtgacaggcatcccccaggtgggaggaggggctgtcctggctctgacctggatatcagatccagagctgagggggaggtgcacggtcaggaggggaggggttctgttctgagtttcccctggccaaggctgcagacaagggacgcagacaatcggcacattgtgagcaggggctgcaggatggaaccagcangctgctgtn

SEQ ID NO: 287 - DNA, 437 bp, Homo sapiens
  misc_feature (1)...(437): n = A,T,C or G
cgctcattgactttaatccatttggtgaagtcacagattcactgctgttcacctgggaagaactgatatctgagaacaacttaaacggcgattttagtgaagttgacgctcaagagcaagattccccaactttccgttgcacaaacagtgaagtgacagtccagcccagcccctatttgagttaccggctacccaaggactttgtagacctctctactggggaggacgctcacaagctaatagacttccttaagctgaagagaaatcagcaggaggacgactgatgagcgtgctggaactggagaagaggaggccccgccccaccgctccgggagctgctcatcagccgcaacttcctgccgaccctgatgcgggtgggccgagcagtgtggacatcagccggtttttatattcatgtacattcacctggggaaaan

SEQ ID NO: 288 - DNA, 454 bp, Homo sapiens
  misc_feature (1)...(454): n = A,T,C or G
nattgaagattcgttgcccgtgcggnggaattccaggctcctgatggcggctgctgccgctcttcctgctgaccgggcctcatctgggtgcaggcacatcaggcgctcatgcagcgaaggccctgatccagggtggcagagcctttctttgttccaccagccgcacattctagatctctgcatcgagcagagaagatatgtggtgacggggtagcccctggaacctccaggagggattcaggcagcccaaggcccagctgcagaattggggccctcatccatgctgtgggggcggggcggccaggaaggaggcgacgctgggaactaaagcccctcctaggagaaaggcctctacaacagtgtctccctggcagcccagaggggcctggcctggctgcactacaatgggaatggaggggcccagagcccctgtcctggatgtgcagggcaggct

SEQ ID NO: 289 - DNA, 479 bp, Homo sapiens
  misc_feature (1)...(479): n = A,T,C or G
cccggtnccnnnaatgagacctaatgaagngcgtggaaanccccggcctcctagggggtcgtcgtggtccagacagtttagcagaacagcctccgcggctccggggagaaggtgaggtcttgtatggatgggaagggtgaggtgcgtcggccagaggcttatttattgacgggactgtttcctttggcccacgcgacgtagtcttctgttgtccttgactgggcgccgcctcccgccccgccgcctcggaagcccctgagagccggcagatggggggcttttagccacggtctctggtctgatgaagcagaaaagaagatgaggatcagggggtcctcgggaacgctgtcacgaatgtaggcttgcaggtgaccttccctctgcagggaaaattcaggacatttccctctcagaggaggaggccgctttatttcccgggagaggaccagtgttcgatgacttaggccttaagactaact

SEQ ID NO: 290 - DNA, 453 bp, Homo sapiens
  misc_feature (1)...(453): n = A,T,C or G
nattgagnccatgagnactctacgccanngcgnggaattcagtggcttcaccgccggtcccttgcagcgctgcctttcgatctctccacatctcggtggcgcgggatctcaagatgcgcctccacctgctcctgctgctcgcgctgtgcggtgcaggcaccaccgccgcggagctcagttacagcttgcgtggcaactggagcatctgcaatgggaacggctcgctggagctgcccggggcggtccctggctgcgtgcacagcgccttgttccagcagggcctgatccagagtctcactctgtcgcccaggttggagtgaagtggcatcatcttcctcactgcattctctgcctcccaggttcaagcgattctcatggtctcaccgtgttgctcaagctggtctcgatctcctgagctcaggcaatccgcccacctcggcctgtcaaagtgct

SEQ ID NO: 291 - DNA, 480 bp, Homo sapiens
  misc_feature (1)...(480): n = A,T,C or G
cgtggaccnnaaatgagaccnattgagaccataggccangnggnggaattcgacgctcatccgtgatgcttccgcgtgtcggaggaccaggtgccacctcaagagagaggccgtgggcggcgagccgcgggcgtttactcttagcagaagctcacctgtaagttttgagaacttagaaaccgatgccttccctctcatcagtcgtgaggcgcagtctcctggccgctgggatcgttcctccttgacatctctggagacgcatcgaggagctattgttctctggcgtcggaggttgcgctgtgtccgcggcgttgagggccccttgctaactggaacacggggaaggcggccctgtgaggtttagtgaactcaatcaaagaggtcctgcaagtggagtagactccctgaagtaagactgccatctggaccgccgagtaatggcggtgttacctggagaacgtgaaacagtctctaaacact

SEQ ID NO: 292 - DNA, 450 bp, Homo sapiens
  misc_feature (1)...(450): n = A,T,C or G
natggagaccatgagaactgtcgnggaattcctgacaagctgtctgaacaaggagccaggaactgtcgggtcaccagctgtggagcgtgtcggggggacaacctgccattggatgtacagaaaagtgccttagagttggcctgagccctcctgcccactcgccctccgcgcgaggccactcggagtccacacggcacacacaagcggagctgagaagcacgatggctctagtcagaggactttgctgtcggcccagatttgaagaggacacggaacagcatgagcctttgtgacaaaactagaatttggaaatgaggactgtcttgggaaaagggtagacacaggcacttctctccacagcctgctaacctaatgtgggcagaactgaaagatcactgcagtggaaactgttctggaagaggctgcaacatagcccatgcttagggactg

SEQ ID NO: 293 - DNA, 452 bp, Homo sapiens
  misc_feature (1)...(452): n = A,T,C or G
nattgaagccatcgatgagcactccgccgngccgnggaattccttaattaaggaagggttgttattgatggcagtgtgctatacttgtagaccatgggcaatccaaccaaaaggtcaaaagcagagagtatgggtttcggaatcagagaaatctcttattagctgtgtgacctcaatgcattagttaatgtctttttttttaatggagtttcgctcttgttgcccaggctggagtgcaatggtatggtcttggctcactgcaacctccaactccggggttcaggtgattctcctacctcagcctcctgagtagctgggattacaggtgcccaccaccatgcctggctaatttttgtatttttggtggagatggggtttcactttgtggccangctggngnnnaaccccngacatcaggngatttatttgccttgccctaccctagtgctggg

SEQ ID NO: 294 - DNA, 493 bp, Homo sapiens
  misc_feature (1)...(493): n = A,T,C or G
cccagcccnnntttgaaccttgcagggcggatttgagtacctatgcacgtggtggaattcaccccagcataagcgccagctggttgcggctgagtcatgtctgtcgtgcacaaaatctttatcccctgttcagatctgtgcatgggctctttttaaatgttagtgcgagggaatccagccaggcacacaaaaaggacaattgctcaacagatttgagctaacaagctcgtactcatgcatccaaagaaaacctggaaggcaccagccagcggagcctggacgagaaaaaaggtcttcagaatccctgcagtggctgacgagcttgcaggagtctgagtggtgccatttccctcctgctgtagatcccccaagctgtctgcccccctcctccactttggcgaagcgaacaagatcataaacgtcagatgtgggcttgtcgctgtaatgatctcgtggcgatgaataaaaatgtccgggtaacagatttgtgaat

SEQ ID NO: 295 - DNA, 455 bp, Homo sapiens
  misc_feature (1)...(455): n = A,T,C or G
ntttgaaaactgatgaccactagacagngcggnggaattctgtccttgagcccaaagtctcaggtgcttggagcgtggctagaaacagatcttttggatcccacctctttcaaaaacaaaaagtaccaactggtgaggcaggaagccaggtccaggctgggacaggctcctttcctagggcagtgcgctacaagagccgggggggtcagttctgctgtaggatgaggttttccagttcatctgcagagcgcagcaggaaggcagcagactcccggtagcccgcgatgagctgccgcacggcgctgatctccgtggggctgagctgagcggtgggcacgggcctgctggtgctggtgctggaaggggtgggcgtgggggtggtggaggtggtaaaggccccgcctttcatgcttgaggtccggggccctgtggagagggaagtatggtgagaaggt

SEQ ID NO: 296 - DNA, 454 bp, Homo sapiens
  misc_feature (1)...(454): n = A,T,C or G
nttgaaaactgagaccatctgncagngcggtggaattcctctctcacagttggctcagaaatgagaactggccaggccaggcatggtggcttacacctggaatcccagcactttgggaggccgaagtgggagggtcacttgaggccaggagttcaggaccagcctaggcaacaaagtgagataccccctgaccccttctctacaaaaataaattttaaaaattagccaaatgtggtggtgtatacttacagtcccagctactcaggaggctgaggcagggggattgcttgagcccaggaattcaaggctgcagtgagctatgatttcaccactgcacttctggctgggcaacagagcgagaccctgtctcaaagcaaaaagaaaaagaaactagaactagcctaagtttgtgggaggaggtcatcatcgtctttagccgtgaatggttattata

SEQ ID NO: 297 - DNA, 492 bp, Homo sapiens
  misc_feature (1)...(492): n = A,T,C or G
gcccagcccccnnntttgantncctttccatnggcggaatttgatatacctttgagtggcttgcatgaccctcggctgggaggaagccatctggtccccttctgagaaccgaggtccgagatttctcggagtgtagggggaaggtaggtgctgtggggaaggaccactaaggtccccgttggcagggcaggggcagaggcttccttgggccacctcacttcccggcttgctgaagggctcccgggtgtggctcctaggcgagagccctgaaggcctccggcatcactgtggccgagcaaaggagcaggctccctgaaggcctgtcctggggtccagggtcaggcgtggtggtcttttcacagctcaaagagaagcacaagcagagcggcgggagcgtgggtgcgctggaggagctggagaacgccttcagcctggccgaggagtcctgccccggcatctcagacaagctgatggtgcacctggtggagcgag

SEQ ID NO: 298 - DNA, 482 bp, Homo sapiens
tgggcccggcaatcgagaccattgtgcagtgtggtggaattcgggattccaaatgatcccatgctgtggtctgaggggcaaagccacctatgttggcgctcgccattaatccccagcgctcagtttagaggctcacgtgcagacatcagaggctccatgctgcacagtagctcaggcagggtagtgcctctcaacccagccacaaaactctccccgctggagtcccagatggcgcttcacaccaaggcagtggaggcaggcatggtttttgggcacagggcagagcataaggatcccaggtcagtgtgggagagctactggctcttaggatcaccttgggcagaagtcacacggcttcatcctaggagggcccagcttgggagtctgcctccccctgatcccaggaccacccacaggagaggggcagtgtccatctttctgaagggaccctttggagatctcgtcctaagtgtggagaggac

SEQ ID NO: 299 - DNA, 452 bp, Homo sapiens
  misc_feature (1)...(452): n = A,T,C or G
nactgatgatcgttagcccatgcggnggaattccgcgcacagacctgcctctacagtcaacactgcacccttggactttcttttcaccgtggatggggcaccctagcgctcttgcttgtgactgccatggatgcacacagctttacatacacataggacgtgcccctcacacaggactgttgtcatccaagcatgctttggttttttttcctgtgcttctgtgaccttctaattagacttcatttttcctaacaggattagacagtcaaggagtggcttactacatgtgggagcttttggtatgtgacatgcgggctgggcagctgttagagtccaacgtggggcagcacagagagggggccacctccccaggccgtggctgcccacacaccccaattagctgaattcgcggtgggcagagggaggaaaaggaggcaaacgtgggctgggct

SEQ ID NO: 300 - DNA, 453 bp, Homo sapiens
  misc_feature (1)...(453): n = A,T,C or G
nttgaacactgggaccatacaccangcggnggaattcctatcgtccagaccctgaatcctccggctgtactgccaagtcatttcctagggccgcactcaaggtgtcagactcacgtgggctcatcactgcgtcctctcatattttcaatatgaatgacttttatcaggaaatctgaaaattagtgaaaggttcatttttctcagcatccggaaggctcgaagggcaggcaggaggggcgcgaacaggggctttgccctcctggagagacagcatgaacacagatgttcccagcgcaggcgaaggagaatgctggcttcagcggttgtgggggaggtaggcaggaatgttgcttttctggacattcgttctaaattagcgcctgtgtacccagggctgggtataaactgaggagtaagacattgtccctgctcctatggagcgtggagtgcatn

SEQ ID NO: 301 - DNA, 492 bp, Homo sapiens
  misc_feature (1)...(492): n = A,T,C or G
gcccagcccccnnnttttgattncctttcagnnggcgggaaatgataacgtctccagngtcgccgagagcttgagcgcagccatagacaaccagagcagctggaagggaagcgctcagtcctggtcaaagagctgggggaggtgaaggaggcgctgagccgcgccacgctgcaacgggacatgctgcaggccgacaagaccgaggtggccgaggcgctgaccaaggctgaggctggccgcatggagctcgagctctccgtgaccaagctgagggcagaggaggcctccctgcacgactccctgtccaagctgagcgccctcaacgagagccttgctcaggacaagttggatctgaactgccttgtcacccagctggaggaagaaaaggccacgctgcagggccggcagcggcaggcggagcaggaggccacagtggcgccggcagagcaagagtggctggaggagctgtggttggagcacgaggcggcacgn

SEQ ID NO: 302 - DNA, 482 bp, Homo sapiens
  misc_feature (1)...(482): n = A,T,C or G
aggggcggnnattgannncatctgagaccctagtcagtgtggtggaattccctctcccttgaaggataaccccaggcactgtttggcgccccaccctgttgatgtggattcgcattcgtgcctggatgtcccggggagcttccctggaatccaacaaatcccgagagaacttctctccaaagtccatgtcatggttacagccaccccattcccatgtgtcctgggagccatggctggggcttgagccaagaccagggctgggcaaaaagtgggggaaactcttgcctcgggacagtgcctgcagctgcagcagtttggccctcatccgatcctgctcaccactgcccttccagacacagtcacaactcaccaacttgcccacgctgcaggccgtggctactgcctgcatgaccccagcagccagcatggagaatgaaaaagcactttctcgcaaaccgcgcttgaggatggcgctgcggagg

SEQ ID NO: 303 - DNA, 436 bp, Homo sapiens
  misc_feature (1)...(436): n = A,T,C or G
catcgacatcgagtactccagagcggnggaattcctttgtctgtctctctgtctcctgcactctcgttactaagcttcctgggagaatcaaataatatcatggctatggaacagtagagagagacaggcctgatgccaaaggctttgggctcatcatcaatctttcactttcttcctataaaaaaaaattattttataaaggaggaaaaggcaatgtgggcaaacattacaaatttgaggttgaagtcaggcaatcttcaatgccctgtgagaaaggttcgattttcccaattttgaggaagccttccctcatgaaaatcactctcagtcattccaaacccctgactttctctaccgaagcattagactgatactctaactttcactttccccaatgacatctctatctttactgcgcccttcactctcactcccg

SEQ ID NO: 304 - DNA, 499 bp, Homo sapiens
  misc_feature (1)...(499): n = A,T,C or G
gccagccccnnnttttggaaacttgcagnnggggnnntttgtagtccatagtcagtgtggaggaattccctcctcgatgggtcctgtatgggggaagagtcggggaccctcgaatcccagcttgaagctaccaaacgcaagcaccaggaaatccgagccatgagaagtcagctcaaaaagatcgaggacctgggggccgccatggaggaagccctcatcctggacaacaagtacacggagcacagcaccgtgggcctcgtccagcagtgggaccagctggaccaaatgggcatgcgcatgcagcacaacctggagcaggagatccaggccaggaacacaacaggtgtgactaaggaggccctcaaagaattcaccatgatgtttaaacactttgacaaggacaagtctggcaagctgaaccatcaggagttgaaatcttgcctgcgctgcgtgggctatgacctgcccatggtggaggaaggcgaacctgaccctgagt

SEQ ID NO: 305 - DNA, 486 bp, Homo sapiens
  misc_feature (1)...(486): n = A,T,C or G
ngaggtcccgnnttctgagaccattggacagtccgttggaattccagatgagttgctctgccacacagcaggtggtctgtccccaactccctgttagtgctgggccctggcaaagtcaggaggttgtgcggtgggttctacagagggccctgtccagacatggatgccctggggcttgggagagggcttccagaatgtggcgcaggaggtagtgctgaacgacagcttcaaattctgggaatacttggaagagcgaaaaggcaagtctattttcatatggctgaagacagccctaccctctaagaccatttgcagatgtgagtctagcagcttctatgaaatgtctttgtccccaactggcagaatctagaaaaacctcgtggggttggaatgacccaatttgctgactccaaagccaggctttggtcatcatgcaggcaattctgtcttcatgcggntgcatgcangtgaggctggagcagacan

SEQ ID NO: 306 - DNA, 475 bp, Homo sapiens
  misc_feature (1)...(475): n = A,T,C or G
gggttcgagaccccanancagngnggtcgtagaccactatccgtgtggtggaattcccacccagccgctgtcctttcatctgcctccagccccgccccgcgctgcctctcacctgagccagcttcctgggaaacaaaagtgccccaggaccgcctggcgtgcccatcatcgtgcggtacagctctgccatcgccattcactggtccagcggagacccgggcaaagggcccatcacccgctacgtcatcgaggccagaccttcagacgagggactatgggacatcctcatcaaagacatccccaaggaggtgagctcctacacgttcagcatggacatcctgaagccgggcgtgagctatgacttccgggtcatcgcggtcaacgactatggtttcggcacccccagcagcccctcccagtctgtgccagcccagaaagccaaccccttctatgaggagtggtggttcttggtggt

SEQ ID NO: 307 - DNA, 486 bp, Homo sapiens
  misc_feature (1)...(486): n = A,T,C or G
nggagctcnnnncccctgaaaatgnctgctnggcaagaactctcngncttcgcctcctggccccactgatgcccttcctggctgaagagctctggcagaggctgccccccaagcctggttgcccccctgcccccagcagctcggatgccccctaccctagcgcctgcagcttggagcactggcgccagccacagctggagcggcgcttttcccgggtccaagaggtcgtgcaggtgctaagggctctccgagccacgtaccagctcaccaaagcccggccccgagtgctgctgcagagctcagagcctggggaccagggcctcttcgaggccttcttggagcccctgggcaccctgagctactgtggggctgtgggcctgttacccccacgcacagcagctccctcctgctgggcccaggctccactcagtgacacggctcaagtctacatggagctgcacggcctggtggacccgcagatacagt

SEQ ID NO: 308 - DNA, 481 bp, Homo sapiens
  misc_feature (1)...(481): n = A,T,C or G
cagccccccncatgagccagcntgctccgaagngcgtggaatttcatgttgcccaggctggtctcaaactcctggacttgagcagtctgccttggcctcccagactgctgagattataggcatgagccaccgcgcccagctgcgatcacatactttaaatcatttctaaattatttatcgtagctgatgcaacgtcagtgctatggaagttgttgttgtattgtttgggaataatgacaagaaaaaagactgtacatgtttagtatagacacaagaaaataggcctgcttacattttccatccatattggttgatccacagatgtgggacctgtgatacgagaagtttatttctggatcacataacagttcagtaggaatcacacgttggctcctcccatcttgtagttctgccatcccctatggcctcagaattctttgctgggtcatctccatccagccgaaggatggcggcagaagga

SEQ ID NO: 309 - DNA, 435 bp, Homo sapiens
caaataaatcatcaccaatacctttgaggtccctgagtaatccaccccagctaaaggcaaacccttcaatcaagtttatacagcaaaccctccattgtccatggtcaacagggaaggggttggggacaggtctgccaatctatctaaaagccacaatatggaagaagtattcaatttatataataaatggctaacttaacggttgaatcactttcatacatggatgaaacgggtttaacacaggatccacatgaatcttctgtgggccaagagatgttccttaatccttgtagaacctgttttctatattgaactagctttggtacagtagagttaacttactttccatttatccactgccaatataaagaggaaacaggggttagggaaaaatgacttcattccagaggcttctcagagttcaacatatgctat

SEQ ID NO: 310 - DNA, 242 bp, Homo sapiens
gtggcgacctttggtccttagctcacgagccacccctgttcagcttccttcccctccttgtacgtcttctccaggtgtcccttctcatccccctgtgcagcaagtgaaagaattgaatccagatgaggctagccctcaggtgaacacctcagcagatcagaacactcttccctcttcacaagcaaccacaatggtttctccccttttgaccaatagtccagggtcctctggcaaccggcgat

SEQ ID NO: 311 - DNA, 490 bp, Homo sapiens
  misc_feature (1)...(490): n = A,T,C or G
ngcgatgccnnnnncactgagngctggggngctacgcaagngccgcggaatttctggcttgagtagggcagagagcaccgcccagcagccagtgggttcccgcgcgtgccgagactctgaggccttgcacccccacgatcccgtacgatggccgtcaagaagatcgcgatcttcggcgccactggccagaccgggctcaccaccctggcgcaggcggtgcaagcaggttacgaagtgacagtgctggtgcgggactcctccaggctgccatcagaggggccccggccggcccacgtggtagtgggagatgttctgcaggcagccgatgtggacaagaccgtggctgggcaggacgctgtcatcgtgctgctgggcacccgcaatgacctcagtcccacgacagtgatgtccgagggcgcccggaacattgtggcagccatgaaggctcatggtgtggacaaggtcgtggcctgcacctcggctttcctgc

SEQ ID NO: 312 - DNA, 476 bp, Homo sapiens
  misc_feature (1)...(476): n = A,T,C or G
tctcgagatccctagtccagtgtgctggagntccactagcacgcgcggtggaattcgggagcccctccttcttctggctctgaacttaaatccaggctttgtttccctgttagataagcctatgttcatgcttcttcctcatcctctcttcagccccagacttcggggccagttctcccaccaccccgttccatcccttgcagcctgttttcccccatggtccccagctgagtgggggggatccgggagtaaggtcatgacagagccaggatctactttctgaaaatatttggatctcctgaggccaggaagtggctctgtgtgccctggctatggggcagagaggctctgagagagctgtgcctttgtgtgacccctcttactgatcctcctggcagcggatccgaggtcgcaaagccacgctagatgagatccagacagtgcactctgaataccacaccctgctctatgggacc

SEQ ID NO: 313 - DNA, 488 bp, Homo sapiens
  misc_feature (1)...(488): n = A,T,C or G
nggaagccggnnncaatgagngcaggcacctaacgcaagngncgcggaattccatgatcactgactttggtctgtccaagatggaacagaatggcatcatgtccactgcctgtgggaccccaggctacgtggctccagaagtgctggcccagaaaccctacagcaaggctgtggattgctggtccatcggcgtcatcacctacatattgctctgtggataccccccgttctatgaagaaacggagtctaagcttttcgagaagatcaaggagggctactatgagtttgagtctccattctgggatgacatttctgagtcagccaaggactttatttgccacttgcttgagaaggatccgaacgagcggtacacctgtgagaaggccttgagtcatccctggattgacggaaacacagccctccaccgggacatctacccatcagtcagcctccagatccagaagaactttgctaagagcaagtggagg

SEQ ID NO: 314 - DNA, 492 bp, Homo sapiens
  misc_feature (1)...(492): n = A,T,C or G
aggcggnnnnnnngnnaactgaaaccctaggcagngactgagaactcctaaaccacagtctataagcccgagtcaccaggacggcctgtctggccacagacaggggctgcctgtggagcctgcccaccggcccccggcagtgcagtccagcggggaggaggctgcccgttcctgccagttcctcactgcggggaccagcaaaggccttctcactgggttggtcaaaggtagtcaccttggcctggtgcatccacagaggatgttgttcaaaccagaaatcttttaaacgactgaccttccttaaaaacagaatgactccgattgcttgcttgggctagaatgtacacgtctccttgcctgaataagccatatatatgctcttaaacaaaagtttgaaattatccatatcatctcagtgaacctactggtggactcccaattgacaagattgagcaatagaaaaaaattcctttcctttgaatgatagctgtg

SEQ ID NO: 315 - DNA, 460 bp, Homo sapiens
  misc_feature (1)...(460): n = A,T,C or G
agcggcntgnnnnnnaactgagttgcntatcntgngcangacannncaaaatccaacttctcgcatcccctttccagagataatgaggagcttgattgtacattttttgtttgtcagttttaggcattttaaaatatattcatcagttatctgtattggtaacaatccttattaatgcttatttgttcatttttgtgcagcttttgcattccccattgttgagattaggtcatgttgatacatacagtaaataaattgctagatagtatttcatcaaattccttcactacttgcgtgtacttaatcttgtttagtttttttgtagttgtttcattcaacattgtgttcttagatttaatcatgttgatacatacagatgtcggttatttttattactatagaactattaaatgaataaattatagtttatttaccaagctcagcagaattagaatatgct

SEQ ID NO: 316 - DNA, 474 bp, Homo sapiens
  misc_feature (1)...(474): n = A,T,C or G
gaaggtcccnagggcncccccactgagaccnatgatagccctcggaanncacccatcgaagtacagggagagcagcaggcttggtttggttttgctggcaccccaggttacttgtcctttgaggtcttgaggaaagatccctatggaaaacgtgtggatatctgggcctgcggggtcatcctgtatatcctcctggtgggctatcctcccttctgggatgaggatcagcacaagctgtatcagcagatcaaggctggagcctatgatttcccatcaccagaatgggacacggtaactcctgaagccaagaacttgatcaaccagatgctgaccataaacccagcaaagcgcatcacggctgaccaggctctcaagcacccgtgggtctgtcaacgatccacggtggcatccatgatgcatcgtcaggagactgtggagtgtttgcgcaagttcaatgcccggagaaaactgaag

SEQ ID NO: 317 - DNA, 481 bp, Homo sapiens
  misc_feature (1)...(481): n = A,T,C or G
agggtttcncaaggtggccnncaattgaaaaccaattgattaccctaggtaagtgcggtggaattcgagcagggtgcgggggccaccggcttcctcgaatggtgggtcatcgagctgcaggagtgccggaccgactgcaacctgctgcccatggtcattttcagtgacaaggtcagcccaccgagcctcggcttcctggctggctacgggtgagtgagtggctgggggggcaccccgcagctcggggggctccgggcggccccaggactcaccagcttcccccgcagcatcatggggctgtacgtgtccatcgtgctggtcatcggcaagttcgtgcgcggattcttcagcgagatctcgcactccattatgttcgaggagctgccgtgcgtggaccgcatcctcaagctctgccaggacatcttcctggtgcgggagactcgggagctggagctggaggaggagttgtacgccaagctca

SEQ ID NO: 318 - DNA, 471 bp, Homo sapiens
  misc_feature (1)...(471): n = A,T,C or G
ggagttgcccagaggcccccactgagacccctgagagtcgtcggaanctcgaggggntacctccctcgccccaaggttccagaggccctaagcgggatgggctcgcttaacctcgttgaactccaggacgaggaggacatgggacttgcgtggacagtcagggttcacttgggctctctctagctccccaattctgcctgcctcctccctcccagctgcactttaaccctagaaggtggggacctggggggagggacagggcaggcgggcccatgaagaaagcccctcgttgcccagcactgtctgcgtctgctcttctgtgcccagggtggctgccagcccactgcctcctgcctggggtggcctggccctcctggctgttgcgacgcgggcttctggagcttgtcaccattggacagtctccctgatggaccctcagtcttctcatgaataaattccttcaacgccaaa

SEQ ID NO: 319 - DNA, 482 bp, Homo sapiens
  misc_feature (1)...(482): n = A,T,C or G
ggggncncccccaggaggccnccaatagaaaaccaactgagaccctaggccagagcggaggaattcctatcttcactttttaaatacttcttcctctccttaggcctcactgtagccttagggcacctgcactggcagaccatatggatgcaggtgcctgccaccttaggtggcttgggccccccctcccccgggtgcccctgggaggccacttccctcctggtgtccccacagctcgccagtatgcacatcagaacccgccgtggctccgcacatgatggaaaggagcacgcagctgcatcagctaccttccgtcttgctgaaattagactgcagaagtccttgctggttgcagaatggttgtaaatctagtttcacggcctgtaaacacgtgtggctgctgaaaagaaatggtgaagattgagctaaaatagacttgtccctggaagtaagtcattcatgtcctttacaaaagccaaatc

SEQ ID NO: 320 - DNA, 469 bp, Homo sapiens
  misc_feature (1)...(469): n = A,T,C or G
tgagttgccaagatccccccaatgagacaatagagggtctcggaancnctcagcaggcctgctttcatcctgctaagtacttggggcatttccctctttgggttatgtgaggttttccctgtcctggcattagacacagggcagtgggccttcctgccattctaagagtagcttaagacaatcagtgcaaagcaaccctttgtgggtgtccagcccttgcctcgggaggccagaaaggtggcctggggggagagcgtctaagctggctgtggaaaaacccatgttgggatccattccacagaggtcgtcaggggtctctgcctggcctggaggtcccagagaggaccctcctcccctcaggaaggcccatctggaagggtagcagaggactgctcacaggaagagcatgcgaagtgctctttctggggatgcctgtagttggtgatgtgggaactgggttttgagggat

SEQ ID NO: 321 - DNA, 478 bp, Homo sapiens
  misc_feature (1)...(478): n = A,T,C or G
agagttcnccnaggatgcccccatagaaaccaactgatancctaggtaagngccgcggaattctctaatctgaggacactataatggccctgtcgtcagggaagcccgtgatcgctcgttttcaggggtcttaccggtcagcaaccttggcattgatacataggcactctacagaatttaagttttcagaggtaagtctgttgttctgattaatctgcattcattcagcgaatgctcaagacaagccaggcatgctgagaagcggcgctctagttgtatgtaagatgggcattcctctgctctcctctattctccatgtcgactgagaagagtataataagaacattgtaccctctccacacttaaccctctgggattctttattataatataaaccaccgtcgtgaggcatttacctgttggatggaaggtagacagtaacaagattttaatcacctggtcaccagaccctcacggc

SEQ ID NO: 322 - DNA, 488 bp, Homo sapiens
  misc_feature (1)...(488): n = A,T,C or G
tggcaaannnatcgagaacttagtcactgtgcgtggaattcattggccatgagtttagtggccgctttttccatgacagaagagagaggcgtctgggcgttcttgcttctcaagagcctggcgccatcattgagctgtttaacagtgtgctgcagttcctggcttctgtggcgtcctctgaacagctgtgtgacctgtcctggcctgtcactgagtttgctgaggcagggggcagccggctgcttcctcacctgcactggaatgccccagagcacctggcctggctgaagcaggctgtgctcgggttccagcttccgcagatggaccttccacccctgggggccccctggctccccgtgtgctccatggttgtccagtacgcctcccagatccccagctcacgccagacacagcctgtcctccagtcccaggtggagaacctgctccacagaacctactgtaggtggaagagcaagagtccctcccca

SEQ ID NO: 323 - DNA, 490 bp, Homo sapiens
  misc_feature (1)...(490): n = A,T,C or G
tggganacnnnaaggaaaatctagntccctagtccgtgtggtggaattcgagacgtggccgtgagatgtttgaggtcacgggcctccacgacgtggaccaagggtggatgcgagctgtcaggaagcatgccaagggcctgcacatagtgcctcggctcctgtttgaggactggacttacgatgatttccggaacgtcttagacagtgaggatgagatagaggagctgagcaagaccgtggtccaggtggcaaagaaccagcatttcgatggcttcgtggtggaggtctggaaccagctgctaagccagaagcgcgtgggcctcatccacatgctcacccacttggccgaggctctgcaccaggcccggctgctggccctcctggtcatcccgcctgccatcacccccgggaccgaccagctgggcatgttcacgcacaaggagtttgagcagctggcccccgtgctggatggtttcagcctcatgaccta

SEQ ID NO: 324 - DNA, 472 bp, Homo sapiens
  misc_feature (1)...(472): n = A,T,C or G
agatggcccnagatgcccccactgagaccnctgatagcgctcggaancncacataaatcgcaaggtcctgggggacctgatctttaaccagcctgaccggcggcagttgctcaacgccatcacccaccccgagattcgcaaggagatgatgaaggagacgttcaagtacttcctccggggataccgctacgtgattctggatatccccctgctgtttgagaccaagaagttgctcaagtacatgaagcacaccgtggtagtatactgcgaccgggacacacagctggcacggctgatgcggcggaacagcctgaaccgcaaggacgcagaggcccgcatcaatgcccagctgtccctgacagacaaggcccgcatggcccgccatgtcctagacaactcgggcgagtggagtgtcaccaaacgccaggtcatcctcttgcacactgagctggagcgctccctggagtacctg

SEQ ID NO: 325 - DNA, 581 bp, Homo sapiens
  misc_feature (1)...(581): n = A,T,C or G
agtcncccnncaggngcccnnaattgatnnccccactagatatctgtcccgagnggngcaannccttctccacgctttcctccaagagccagagcgaacatgtgtgttcagttaatctttcatgtctttcaactttaacaccatctaaatttctgacattctggaaaaatctctctgcttgtttttaaagctcatttactcacagggctgttatattcattctaaaattcaaagcataatttgaatttttaagtttcaacaaatgtatccttaatttcctgtatttctaattggttcttactcataactttccattcctgagtcgcagatactgcatgttccttttggctctctgaggctattgcttacactttaaatgttctgtttcggaggtgctattagctcagttttctcaagtgcaaattctttggtaatcttgtcttcatggcgttgatgcttcagacgtctgactatatttgactgtggngtcgtctttgaggtagttattcccccgtacacagcctgccagaaaagtcacctttttgagcttgagttctgggttatccagggagagagagaga

SEQ ID NO: 326 - DNA, 481 bp, Homo sapiens
  misc_feature (1)...(481): n = A,T,C or G
agagtcnccnaagaggccnccatagagnnccaactgatagctnctaggaagngccgtggaattcgccagggctgagccttcaagcagcttctggtcaggaggtataccaggagaacctgactgcctccctaggcacctgggacgtggcaggggaagtgactggagttactctcactggagagggtcaggcagatctcacccttgtcagcccagggctggaccaactcaacaggcaactacaactggtcacttacagcagccgaagctaccagaccaacacagcagacacagtccggttctccaccgagggacatgaggctgctttcactatccgcataagacacccgcccaaccctcggctgtacccacctgggtctctaccccagggagcccagtacaacatcagcgctctagtcacgattgccaccaagaccttcctccgttatgatcggctacaggctctcatcaccagtatccgccg

SEQ ID NO: 327 - DNA, 491 bp, Homo sapiens
  misc_feature (1)...(491): n = A,T,C or G
cgccagcccccccnnntttgagtccctttccatgtgcggaattttgatagccgttgagcttgcggacgcacagagaggtgcagctgggtgagtgggcggcgccgtgcgccgagggcatggaggaggtatcgctgaggccggcgcgtgcgccgtggccggggcgcgccccggccgccatcgagactgagggcaggaccctcggcccttcgatgattgtacgctgggtgctcgatgggaggagggtttgctgggtgagctggttcagactccttgaaaaatcatcgtcactctttcttcctcgcggacgtcctgcccatcgctctgagccggcgccccaagtagagccagagtagttcgtacccagccttttcacgtaactcggccgaggtggtggttctccgaattttttccgtcaggcccagattatcagattttggggtcagctgggagaggcgttaacttttcttcgcacactcttgctgtgtgcgctc

SEQ ID NO: 328 - DNA, 492 bp, Homo sapiens
  misc_feature (1)...(492): n = A,T,C or G
agcgcccannnaattgannnctcgagatacctagtcagtgtggtggaattcgcagaagcagttcatcagagacgtgttggactgtgaggcggatgaaatggacttctccttcatggatatggatgatgcgctccggaagtgccagtcccatatcccttttcagggtgaggcccagaacgcggagcgactcatttaatccttcaaccagcggtactgtgtctgtaacccaaccctggggcgccagatccggaacccagacaccatcttcatccttgcttttgccatcatcctcctcaataccgacatgtacagtcccagcgtcaaagctgaacgaaagatgaaactagatgacttcatcaagaacctgagaggggttgacaatggtgaagacatcccccgagacctcctggtgggcatctaccagcgcatccaggggcgtgaactgcggaccaacgatgaccatgtgtcccaggtgcaggctgtggagcgcat

SEQ ID NO: 329 - DNA, 489 bp, Homo sapiens
  misc_feature (1)...(489): n = A,T,C or G
atgggggnnnnntttgagtttatagtccgtgtggtggaattcgcccctgccactgggccatggagactgtggcacagtagactgtagtgtgaggctcgcgggggcagtggccatggaggccgtgctgaacgagctggtgtctgtggaggacctgctgaagtttgaaaagaaatttcagtctgagaaggcagcaggctcggtgtccaagagcacgcagtttgagtacgcctggtgcctggtgcggagcaagtacaatgatgacatccgtaaaggcatcgtgctgctcgaggagctgctgcccaaagggagcaaggaggaacagcgggattacgtcttctacctggccgtggggaactaccggctcaaggaatacgagaaggccttaaagtacgtccgcgggttgctgcagacagagccccagaacaaccaggccaaggaactggagcggctcattgacaaggccatgaagaaagatggactcgtgggcat

SEQ ID NO: 330 - DNA, 474 bp, Homo sapiens
  misc_feature (1)...(474): n = A,T,C or G
ggagtggccnnagctncccccatagagacccatagatagctctcggaattctcatagtctataagttacgtttctgctatatttgctgtatggtgtatctagccacccatcaatcttattttttctttaaaagtgaattgcagacttgcatgtgtcttcccctgcactcaatatgcatattattaaagtacagtgcaataactgctttttaaaatgattcttctactgctttttagatgttcatatggtacatttcatctgcttgcttttgggtattaagtgttttgatgctggtaccagtcgcttttgaaatgatttttgcttccagtcacatccagtgtatcctaaggggaaattgcaataaaacaggagatctaatcctatctggagaccacccttgagttaggtttttctctgttctgcatgtgaatgtggtgctgtggcattttgaaaggactgcaggggctcatcaaa

SEQ ID NO: 331 - DNA, 472 bp, Homo sapiens
  misc_feature (1)...(472): n = A,T,C or G
agcggccactgagaccntcgactgagcccctaggaagngccgcggaantccagggattgtgtttggttgtgttttgggtaagttagtgagaactcatgtcttgtgcctatggagccttggagaacacagttttgtggagctggttccgcgtggggagaatcgggaggcccacgcgggaccagctctcccctgcgcaggccctccgcgggggacaggaacacccagccccagcgagtctggagaccaggactctgccttccaggcgtaaggccagggctctggcaggtggccagggctccacgggggcctagtggcttcagcccctggggtacttctgtgttgtgattccccggagctgggaaggtcccgaatggagtccagacctgggccctggttcccccaggaccctgagggtttccaccttggcgcgcagcccgggagatccgccctgggctctgggttcgggaagaag

SEQ ID NO: 332 - DNA, 465 bp, Homo sapiens
  misc_feature (1)...(465): n = A,T,C or G
ggccccatgagaccatcgatgaacgcgtaggcaccagcaccggngcaagttcttcagtctgactgagacaccagaggattacactatcattgtcgatgaggaaggattcctagagctgccctcctcagagcacctgagtgtggcggatgccacctggctggccctgaacgtggtgtccggcggtggcagcttctccagctcccagcctattggcatgaccaagatcgccaagtcagtcatcgccccactggctgaccagaacatatccgtgttcatgctgtccacgtatcagacagacttcatcctggtgctcaagcgggacctgccctttgtcacccacacgttgtcatcagagttcaccatcctgtggtcagtggctagactgtagcagccgagaacctcggcatcaccagtggcttcgtgaagcccaagctggtccagatgccggtcatccacccactgtca

SEQ ID NO: 333 - DNA, 495 bp, Homo sapiens
  misc_feature (1)...(495): n = A,T,C or G
ngccatagagaccctagtgcagngnggtggaattccggtccctgcgccaagaccagtgagaaggggccctacttcctgacggagtacagcactcaccagctcttcagccagctcacgctgctacagcaggagttgtttcaaaagtgccacccggtccacttcctgaactcacgggccctgggcgtcatggacaagagcactgccatccccaaagccagctcttctgagtctctttcggccaaaacctgcagcttatttctgcccaattacgttcaggacaagtatctgttacagcttctaagaaacgcagatgacgtcagcacctgggtggctgcagagattgtgaccagccacacctccaagctgcaggtgaacttgctgtccaaatttttgctgattgcaaaatcttgctatgagcagagaaacttcgcgacagccatgcagatcctgagcgggctggagcacctggccgtgaggcagtcccctgcctggagn

SEQ ID NO: 334 - DNA, 447 bp, Homo sapiens
cagattaaagtgaatgaactttatgatgtttttgtagcaccgctcagctgtcttgaaagacagtgaacacacgctttctggttctagtaatcctgggtgcgtatcacgttcaaagaaactcaggctattgcatgatgagccccctatctggcaaggagaccccgtacagaataaacaacaaacctgcgcctgcactctctctgcgtcctgggtagtctgtgcttgtaatccagcatgtttcacagagtaagcctgttgtgactttgcttttggggtctatgtcattggtttctgatgcttgtacaaacacgcacacacaaatggataaaacagcacctctggctgttacattaccataaaccatatcacatgcctacattttacaaatgatttctggtttctcttagttcttctctaacatagtactttctttccagcaaaagcaaa

SEQ ID NO: 335 - DNA, 454 bp, Homo sapiens
  misc_feature (1)...(454): n = A,T,C or G
ntcgagaccttgggcacngtcgnggaattcctggcccttagctcaggggagggaggcctgaggctagcctgtatgtgcaaacctactggccctagaggccactgatggcttcaggtggtggcaggaattcaccgtagtagaggcctccatggggttggcactggttaacgtgatcccaggatcacgcctgctacctctccacacatacagacccataccctgccggtggagccagaagcgcagggggagggctgacgagttcccttacagttcctgtcctttccgtcccaggtttggtccaaggagcttcttgacgcaaggatcccttcaccttaaactacaatctgggtagtcccaagggcacttgcacagagggaggagacagaatggttagggtgggcgtcccatctgtgtcatccagaaatgagctgacaccaatagcggctgcccagaa

SEQ ID NO: 336 - DNA, 501 bp, Homo sapiens
  misc_feature (1)...(501): n = A,T,C or G
cggcgngnnnnnnnngggggattgaganccntannnanngtactgagacctctagtccagtgctaacaaattactccatttatagtgatttataataacaatcatcacttgttctctgtcatgatttcagtggctcagaatgtcaagcatgggttggctgggcaattccgtttcaaattctctcataaagttgtagtcagatattggctgaagtgggctgcagtcatttgaaggttggactggggctgcagcatgcacttccaggatggtccccccacatggctggtatgttggtgctggctgttgatgggaggcctcaggtcctctctgcatgagcctctcagaaggtgcactgagtggccttgcaacatggcagctggcttccctcagaatgagtaatccaagagagcaagacggaagccacaatgtctttgatgacttagccctggaagccactgtctgtattagtccattttcacactgctataaagaaatacttgn

SEQ ID NO: 337 - DNA, 479 bp, Homo sapiens
  misc_feature (1)...(479): n = A,T,C or G
gggagcggntttgagatcatattcagtgcggtggaattccggctcgagcggcagggcctcccccactcagcgcaggtcaggctaaggccagtcggctggtcactatgcaatgctgccctggggaggctccctgagggcacagtgggcgctggacccggccccccaactctcttgcctgctgcctgtgaccctgaagaacagaattgattcttgcccctctccctgtgtgagcttggccccgcctcttgccccaggcccctgctggcgggtctcaccccccacccctcgctttgaataaagcacttgcgcccactgccaaaaaaaaaaaaaaaaaaaaaaaaaaaaaaaaaaangggccccctttaaattaaaggggccctttaaacccccgtgaaaccccctgggggggccttttaaggccccccctttttggggtgccccccccccgggtttttttttggccggggggggggcccccc

SEQ ID NO: 338 - DNA, 479 bp, Homo sapiens
gaagggggtttgagacccttcgtagtccctagtcagtgtggtggaattccagcagagctgagaggagggggtgaccagcttggagtctctggtgggcagagagggatggggtccctgagccaggccccacccatcacagcattcccaggtcctggtacccagccctcagttgtcatttggttcagaatcagttccctttctctgggaccaaatttcccttctctaaacatcctacagagaaggttccaaagctgagcacccatcaccctaggtgtgcaccagactcctattagcccctccttccaggagctagaaccagggaggtcctgagtgaggaaggcatgacctctgggctctctaggtggccctggtcttgccccatccatcccacctgccactaccttgggtgtccttacagctctgccctgaccccagcccctgcccctggacacctgctgacagctcccacacagaacagt

SEQ ID NO: 339 - DNA, 494 bp, Homo sapiens
  misc_feature (1)...(494): n = A,T,C or G
aggcgnnnnnnnngggggctgagaccctnngnannaactgataatcatatccatgtcgtggaattcgttttagaggcccaggattcttgctattagctatagtggtgttatggaggataaattctttatctctcacttttggaaccccatcttgaacgccagcttggagtccaaaaggaagcaattgttttaagtaaactagttgctgtgtgtcttttctgttgtgctcagcttacagttatagaggacctcaggatttcaattcttttgtcctcgagcagcatgaatatacaggtaaaatatttccaaagtgtcatggtaagtaacacgtgattgcatccatgcctgtctaggtaatgtagaccaagctaggttagccacacttggcaatgaatgaatttcataaatttaattcatataatctaaatttttcccccaaaccaaaagttgattctgaactttgctgcgttgttcatggcctttggtttggtggn

SEQ ID NO: 340 - DNA, 460 bp, Homo sapiens
  misc_feature (1)...(460): n = A,T,C or G
naatgagttccctgatatctttcggaagngccgnggaaatcccaacacgggggatccttcagctcatgcacagttgcaaagagggctacgttaaagatttgaaaggtaacccaggcctgcacagggccatgttggatcttgataatggtacacgtccctcagagttgggccatctcagtcagacagcgtccctgaagaggggcagcagctttcagtctggtcgagacgacacgtggagatacaaaactccccacagggtggcctttgttgaaaaattgacaaaactcgtcttgagccagctgcctaacttctggaaactctggatctcctacgttaatggaagcctcttcagtgagactgctgagaagtctggccagattgaaagatcaaagaatgtaaggcacagacaaaatgattttaagaaaatgattcacgaagtaatgcactccctggtgaagcg

SEQ ID NO: 341 - DNA, 440 bp, Homo sapiens
tcactttgggattttcttgtgtggtgaaatatgcatcaccagaatttaccatacttttgggtttggggttataaaattcggcgttggaactgaaaggaggaaagggagttaaatgttaccatcaggtagagaagctgtgatagcaggaaaagggaattgaagtggaggctgggaaatgccgatgctcttaccacttaaacatcctacttcaccggcaaaaatagagcagccttcccagccaaaagcagtgaccagtacacgtcacaaaatgctaagcaaaagcctcttccacgtgtgcgtgggttccctccccctgtgacccgtgcccagagctggttgtgtgccccatctcgattccgagtgggtcccgtcccctctccctcccatagatggggcgtgcacaatggcagaaagtggctggaatggagatggaaagcatt

SEQ ID NO: 342 - DNA, 476 bp, Homo sapiens
  misc_feature (1)...(476): n = A,T,C or G
gggagcggntttgagatcatattcagtgcggtggaattcccactttccagggcaaaaagggcccagggttataataagtaaataacttgtctgtacagcctgtgcctgactgagtggtgtgagatggggtgcaggggtaggggacagctggcatgggcctctggtggggacatctttttgtgctgagccctcaacatgtcactggcatgtgctgagccctcagtgtgtgaccagtgtgggttagcatgtactgagccctcagcatgtgctggcatgggttggcatgtgctgagcccttaacatgtagtgtacatgggctgacctgtgctgagcatgcagcgtgccaccctgtggcccggcatggacttagcactcatgtagccagcatgggtatgtgctgcagagaagcatgttcccagattgatcagcagggaccaaaccattgccacatcccaagggtgaacaagcatggctga

SEQ ID NO: 343 - DNA, 508 bp, Homo sapiens
  misc_feature (1)...(508): n = A,T,C or G
tgggtttcnnnncctggattccctttgnagngngcngnnaactgatgtccctagtccagtgtcgtggaattcgaggaatcggagtagaatgcgtcagttggacacaaatgtagagcgaagagcccttggagagattcagaatgtgggcgaaggtgccaccgccacacaaggcgcttggcagtcctcggagtcctcacaggcaaacctgggggagcaggcccagagtgggccccagggaggaaggtctcaacgtagggagaggcataaccgaatggaaagagatagaaggaatttgagagcgtattttgcggtaaaactggccgaaggctaaagctgaccagaccggactccttggtgacctgtcctgcacaggggagtttacagagcagcccctcgatggagatcaagtgatcggactgaacaggaatcctcggggggtgaacagccattccttcgtgacctgtgcacgccttctgcaaccctggagctctgctcggctagtctgact

SEQ ID NO: 344 - DNA, 488 bp, Homo sapiens
  misc_feature (1)...(488): n = A,T,C or G
aggcggnnnnnnngnaaatgagancataggcagngctgagaaccctatgaagaacgcaagtgtgaggtgacggaagtgagtaagcttgatggagaggcatccattaacaatcgcaaagggaaacttatcttcttttatgaatggagcgtcaaactaaactggacaggtacttctaagtcaggagtacagtacaaaggacatgtggagatccccaatttgtctgatgaaaacagcgtggatgaagtggagattagtgtgagccttgccaaagatgagcctgacacaaatctcgtggccttaatgaaggaagaaggggtgaaacttctaagagaagcaatgggaatttacatcagcaccctcaaaacagagttcacccagggcatgatcttacctacaatgaatggagagtcagtagacccagtggggcagccagcactgaaaactgaggagcgcaaggctaatcctgctccttcanaaacccaggccag

SEQ ID NO: 345 - DNA, 454 bp, Homo sapiens
  misc_feature (1)...(454): n = A,T,C or G
aatgagacctgaagcacngtcgnggaattcccaaagtggtaggattacaggtgtgagccaccaggctcatctcaagccttacatttaagcgtctaatttatcttgaaatggtttttatatacggtgtgagatgagggtctcattttatttctctgcctgtggacataaagttttctcaacatcatttattgaagttactgttcttttggctcatgcctgtaatcccagccctttggaaggctaaggagggtggatcatggggtcaggagatcgagaccatcttggccaacatggtgaagccccatctctaataaaatacaaaaaagtagccaggtgtggtggcacgcgcctgtagtcccagctactcgggaggctgaggcgggggaatcacctgaacccagatggcggaggttgcagtgagccgagatcgtgccactgcactccagcctggcan

SEQ ID NO: 346 - DNA, 493 bp, Homo sapiens
  misc_feature (1)...(493): n = A,T,C or G
aggcgggtncccnccctcgagaccctagtgagagngccggaattccttaaggcagngattgataggttatttcttggcacagctgaacgtatactgtgcgcctgcaactttccggtggtttcggaccggacttcagtgaagccagtgaagtcggtcgacttgcagaacttcctttcagaggggcgtacacagcaccgcggccgcgtgcctgtgatctccttctgagtttgaaaaagaagatcctagacaccgagccaaatatgtttgcataaaccgggagacttgtggctctattttgtaacagcttggcgcaaagcagctggtttggagacgtctctgttcttcccttggtgggggtgccggaaaaaatgtgctgcctgggcgatcgaggttggggcaaaagcgttgcaaaggaaaaggtgggaggactctactttcacattttccacaagagctttaccataagactatttctggattgttctaacgcgag

SEQ ID NO: 347 - DNA, 475 bp, Homo sapiens
gaagtgggtttgagtcactggcagtgcggtggaattcggtcctcatgtgtgggtggccgtccgtcccctggaggtggatgtgtgctgggatctcttcccgaggagcagcatccacaagtgccctccccagacctggaaggaaggatgcctgtgccaggggcaggaagtcagtgtccctgaataaaattccgtgtctgaaattaggagctggtacctggagaagaacgtgcaaacctggtggccggctgcgtggtgacatttgtagaatttccagcactcctctacgccaggctggagccagtttctagaaggatatttgggctgttttgtaaacatctaaagcatctcttgagcactctggtttcgtgagaccactttatccttctcccgtttcttaaccacgggcacggaatgttctggacatcccgcctcaggtgccatgtgatgtgtccttatgccaccatagcaaacacgg

SEQ ID NO: 348 - DNA, 462 bp, Homo sapiens
  misc_feature (1)...(462): n = A,T,C or G
nattgagnccctgaganctctaggccgngnggnggaattccccaactccgccggcgcctgttcctggttctgtgacgctccctccaccccagttggttcctgaagggactcctggtgggggaggacccccagccctggaagaggatttgacagttattaatatcaacagcagtgatgaagaggaggaggaagaggaagaagaggaacaagaagaagaggatgaagaggaacaggaggaagactttgaggaacaggaacaggatgaataggaatattttgaagaggaagaggaggaggaagaacagcttgaggaacaatttgaggaagaagaaggtgagttagaggaagaagaacaccaggacgatgatgaggaggaagaacaactggaagaggtggaatagctggagtttggcacagcaagaggggaggtataagaaggtgcaccttcacccccaagcctgg

SEQ ID NO: 349 - DNA, 454 bp, Homo sapiens
  misc_feature (1)...(454): n = A,T,C or G
natgagaccatgagaccngtcgnggaantcccaggncctgctgccagagcccctcaagagaagggctgaacctggggagatgtcactgccagggtgaggtggagccacatggtagggacaatgccggcagcctgagcccaggcaccccagtgcccgctgggcccagcctggggacagggaacctgccgggctcacagtgtgggagcagctggacaccaggcttcttggtgaaccggcgaggggccgagtcccgcctggtgggcatttgctgccgcctccccaccaccagtcactgcctcgcagagccctacactcccgcagccgctcctcagaggcctgtgcccatcgcaggcctgggaggaaagtgggcgcagagccctcctgctcacacagctgctgagacttcagggacccatcagaacttggtgcagcacagccccgcccgtggagggtt

SEQ ID NO: 350 - DNA, 495 bp, Homo sapiens
  misc_feature (1)...(495): n = A,T,C or G
natgcgagcggcccattgaaacccttactgagagcctagtcagngtcgtggaattcccaacctctgcatcaaccagcttgtacgcaatgggaatgaggcccagaaagagaagtatctcccgaagctgatcagtggtgagtacatcggagccctggccatgagtgagcccaatgcaggctctgatgttgtctctatgaagctcaaagcggaaaagaaaggaaatcactacatcctgaatggcaacaagttctggatcactaatggccctgatgctgacgttctgattgtctatgccaagacagatctggctgctgtgccagcttctcggggcatcacagccttcattgtggagaagggtatgcctggctttagcacctctaagaagctggacaagctggggatgaggggctctaacacctgtgagctaatctttgaagactgcaagattcctgctgccaacatcctgggccatgagaataagggtgctacgtgctg

SEQ ID NO: 351 - DNA, 496 bp, Homo sapiens
  misc_feature (1)...(496): n = A,T,C or G
gtgcgagcgcccccttgaacccttatcgagagcctagtcagtgtcgtggaattccatggtgtaaagccaaccattcccattcgttgtattctgaaataggagaaaactaccctgtggctagaagcgagatatgctggcagcaatactgctctgttgctctttgctacactgagatgtttgtttaaagtgaaacataaatctggcctatgtgcacatccacgcacagtacctttcattgaacttattcatgatacagattcctttgctcacgtgtttccctgctgaccttctccccaccatcaccctgttgccctgccacactcccctcaccaagagagtaaaaataatgatcaataaatactgagggaactcagagaccggcgccggtgaaggtcctcacatgctgaatgtgccagtcccctgggcccactattctttctctatactttntctctggggctaatttcttttctcagtctctcgtctccacctgatg

SEQ ID NO: 352 - DNA, 477 bp, Homo sapiens
  misc_feature (1)...(477): n = A,T,C or G
gagcggcccaactgaaccctaactgatggcngtaattcccatcctgctgtaatcggtgctttctgcccccttgcaccccgcatgtaggctcagccccctctccccaaatcccactccaggggcagaaatctcctctggctgcagctacttagccaggttctgggtgggtatgatggaggccaggtcccccccgccccagcagcactgcccttgtcacattaagatggggcagctgggaggtcagaggttctgtctcaggaactgaggtctggccttctgcgatcccaggctgagccgtgagtggtccacgtattcagaagacagccccctgcagccccggccttagaaggctgtcccaggtcacacatcgagtcanggtgaggctgtggtggatggcattcccatctgccctcttcaaacctctcaccccctggcttctgcagggtggaggcctgggtcacacaggcaagaggaaag

SEQ ID NO: 353 - DNA, 486 bp, Homo sapiens
  misc_feature (1)...(486): n = A,T,C or G
cggccccccatcgagacctantgagagccntccggaanncacggaacanagacccagagaagaaaggtggcttgcctgaggtctccgtttcaatacagccatgctgacggtgtcatcccagggtctccagggagggcagctgcttatgccttctaaagctggtggtcttcgaactggaaaactttcagggccgtcgagcagaattctcgggggagtgctcaaatctggcagaccgtggcttcgaccgtgtgcgcagcatcattgtctccgcgggaccctgggtcgcctttgagcagtccaacttccgcggggagatgttcatcctggagaagggcgagtaccctcgctggaacacatggtcgagcagctaccgcagtgatcggctcatgtccttccggcccatcaaaatggatgcccaggagcacaaaatctccctgtttgaaggggccaacttcaagggcaacaccatagagatccagggggacg

SEQ ID NO: 354 - DNA, 439 bp, Homo sapiens
accatggacccccaagagatggtcgtcaagaacccatatgcccacatcagcatcccccgggctcacctgcggcctgacctggggcagcagttagaggtggcttccacctgttcctcatcctcggagatgcagcccctgccagtggggccctgtgccccagagccaacccacctcttgcagccgaccgaggtcccagggcccaagggcgccaagggtaaccagggggctgcccccatccagaaccagcaggcctggcagcagcctggcaacccctacagcagcagtcagcgccaggccggactgacctacgctggccctccgcccgcggggcgcggggatgacatcgcccaccactgctgctgctgcccctgctgccactgctgccactgcccccccttctgccgctgccacagctgctgctgctgtgtcatctcctagc

SEQ ID NO: 355 - DNA, 495 bp, Homo sapiens
  misc_feature (1)...(495): n = A,T,C or G
nggcggagggccncaattgagacctctgctagagagcngtaatncgcccgcctgtacatcagcaagatgaagtcagaggtcaagtccctggtgaaccgcagcattcagctcgagagcgcccagatggactccaacaggaagatgaatgccagcgagcgggagctggcagcctgccagctgctcatctcccagcacgaagccaagatcaagtctctgacagactacatgcagaacatggaacagaagaggaggcagctagaagagtcccaggactcgctcagcgaagagctggccaagctccgagcccaggaaaaaatgcacgaagtcagcttccaggataaggagaacgaacatctgacgcggttgcaggatgctgaagaaatgaagaaggcgctggagcagcacatggagagccaccgtgaagctcaccagaagcagctgtccagactccgagacgaaattgaggagaagcagaaaatcattgatgagattcgn

SEQ ID NO: 356 - DNA, 492 bp, Homo sapiens
  misc_feature (1)...(492): n = A,T,C or G
gggcgagcggcccattgaaacccttactgagancctaggcagngnggtggaattcagctatatggccacggtgtcggggctcctcaagatcgtccaggccttcgtggcctgcatcatcttcggggcgctggtccatgacagccgctacgggcgctacgtggccacccagtggtgcgtggccgtctacagcctgtgcttcctggccacagtggccgtggtggccctgagtgtgatgggccacacagggggcctgggctgcccctttgaccggctggtggtggtgtacaccttcctggctgtgctcctgtacctcagcgccgccgtgatctggccagtcttctgtttcgatcccaagtacggtgagcccaaacggccccccaactgtgctcggngcagctgtccctgggacagccagctggtggtggccatcttcacctacgtcaacctgctcctgtacgtcgntgacctcgcctactcccagaggattcgctt

SEQ ID NO: 357 - DNA, 469 bp, Homo sapiens
  misc_feature (1)...(469): n = A,T,C or G
tggcggcccagannaantttgatttcganaacatagtcagtgtggtggaattcgcagcggcgacctcgccgggcaatagcagatggggcggcagcaaccctgcagccgccatcttgacaacaaccgacggcgcgtccttgacaacggaaacctgggaggagctacaggtcggggcgggacgatgtgcccgaagcagccaatcgcaggctccggcggcccctccagcttcgagcggcgggtggcaacccaagcatccctagggacccgggttgttgcgcgaggggtgagctgagtgttgttttagagcctgatgcagttctgcctccctttttatgagagtgtttttgtggcagtaccgacagtgacgaaagacagatgtaaaatcctcagatacaggcaattgccaccgggaggagtctgcagtgattgtctgggggacaatttggagttgaatttgttaaactactga

SEQ ID NO: 358 - DNA, 493 bp, Homo sapiens
  misc_feature (1)...(493): n = A,T,C or G
aggccgagggccncccttgagacccttgatagagagccgtaattcctcctatagggggattcttggagcaaatacccggccagacttggatctccgagaccccatctgtgatgacttcttccagttgtggcaagacatggctgagagcaacgccaatatctatgagcagatcttccgctgcctgccatccaatgccacgcgttccctgcggactctccgggagtacgtggccgtggagcccttggccacggtcagtccccccttggctcggtctgagctcacccaggtccagggccacctggtccacttccccctcaagttcctagaggatgagtctttgctgcccccgctgggtagcaaggagggcatgatccccctacaagtgtggacatagttgaggcccccgtcagggagaggtcaccagctgctgtgccccaccacgtctggctccctgccccttaaccccaaggactgagggcagtgccctttgaga

SEQ ID NO: 359 - DNA, 427 bp, Homo sapiens
  misc_feature (1)...(427): n = A,T,C or G
cattgactactcctacnccgncgggnggaattcgcccccagcccgctgacccccggccaggcaggcccgcgggggaggcaggaccggagccctgaggccctggccggcctcggggttgaggctcagctcgggataagtgatctttggggcccgcagaggacgtctccccaagacccagtggcaaccggactctgactgaatctggaccccggacaaactgcagcagcctttctccaagcctcctttccagccaaacgctttcaagccagccctacaccatctgaagcaatgtttgcatctgatctcatcactcttctgtcctgaaacaactagagcacctgcccttgcatccagccccgaagcctcaggtggcacgtacctgcctcttcttggaggatggacgagtcgaaccgggcacaagcatgga

SEQ ID NO: 360 - DNA, 467 bp, Homo sapiens
  misc_feature (1)...(467): n = A,T,C or G
actcgagnnccnnttctagnaccctagtccgtgtggtggaattcgtacctggctcggctcaaggaaagccatttcattgtggccctgaaggttctcttcaagtcgcagatagagaaggaaggactggagcaccagctgcgccgggaaattgagatccaggctcatctacaacaccccaatatcctgcgcctgtataactatttccatgatgcacgccgggtgtacctgattctggaatatgctccaaggggtgagctctacaaggagctgcagaaaagcgagaaattagatgaacagcgcacagccacgataatagaggagttggcagatgccctgacctactgccatgacaagaaagtgattcacagagatattaagccagagaacctgctgctggggttcaggggtgaggtgaagattgcagattttggctggtctgtgcacaccccctccctgaggaggaagac

SEQ ID NO: 361 - DNA, 229 bp, Homo sapiens
tagcagccacagacagcctcttcccactgctagcacccagtgcagctggagaaaggggaaggaaagagtcccttgagcactgagagagaggtctcgaatctgcagagacccccatgggctgcccttatggcggtgcatggctcccactctgtgccccttcagtcttaaaaagcgtcgtcttcctggtttcagtcacactgggtgaggagggggtcctgccacagggagg

SEQ ID NO: 362 - DNA, 482 bp, Homo sapiens
  misc_feature (1)...(482): n = A,T,C or G
gcgggnnnnnnggacatgaaccctggcagngatggagaaccntaagatgcacctgctccccctgctggcctgcccctccacctagcaccccagacttccagggatttggcccaaactcccagcccctgcccccacagggaagacggacagggagatgcagcatcggtgagggctgtctgcccggcctctcaacccgtgccccacacttaccttcttaagctcattcaggaatagctcaaccagcgcctcgatggcccttgcccgggctgtgtgcagcaccagctgctcgctcttcagtgacagctccagggtggagccgccccggcactccacacccagcacctccgcaaagctgcgcagggatcgggcatgaactgaggtcaccttgccacctgcccccacctctagcccagggtcgtgggctagcgcacctgtatgagcagagaatcttcatctggtcggggcggaggccggtgccttgg

SEQ ID NO: 363 - DNA, 464 bp, Homo sapiens
atcgaagaacactattccagtgtcgtggaattccctgtcttctgagacaaaagatggttaccagacatttctctgtgtttactttgttaggaagctttgtcctctgttgggtaaaaaacaagaatactgcttaccttgaaattcgctgagcactgtgtctgctaccgaagggggatagggagacatcaaaaatactcttaaaagaaaacttgatatcataaatcctattaaagcttgctaaataaatttagtaatgagaaaattgtattgcatgagtggaagagtaaacccaggatgaaacatttgagccaggtcacatgatgcatgactataaatagcatgtttggaagctgacattattccccccctgactcagcggagatttatgtaacttcatctctgctcccgatagccgtgggcagtaacatgacgccttacgccatctgctgatgccaaatgaatac

SEQ ID NO: 364 - DNA, 492 bp, Homo sapiens
  misc_feature (1)...(492): n = A,T,C or G
agggccagnnnnattganncctcgtagtccctagtccgtgtggtggaattcgtgatggcatccctctacctggggacaggtcctttggaacaggagctggtggactgcctggaaagtactctagaaaagtcactccaagcaaagtttccttcaaatctcaaggtctccattctcttagacttcacgcggggctcacgaggccggaagaactcccgcacaatgctgctcccactcctgcggaggttcccagagcaggtccgagtctccctctttcacacgccgcacctccgtgggctgcttcggctcctcatccctgagcgcttcaacgagaccatcggcctccagcacattaaggtgtacctcttcgacaacagcgtcatcttgagcggtgcaaacctgagtgactcctacttcaccaaccgccaggaccgctacgtgttcctgcaggactgtgcggagattgccgacttcttcacggagctggtggacgcg

SEQ ID NO: 365 - DNA, 488 bp, Homo sapiens
  misc_feature (1)...(488): n = A,T,C or G
tggcccnnnnnattgagtttctagtcagcgtggtggaattcaatagcagtagttttagagattagaatcatgtgtggtctcacagtctttcaggacttaaatacccgtctgacaacaatcatttattttaacttttggtttcaaaatttttgatgtacctttagtttagatgtataaagaatcgtttaaaaattatggccatatgttgatttaaaataatcttaaggttggtagaaggttttcctgaaaggaacaatgaatgcctgtgtgcatactaataaagggatcccttgagaatggtttcttggtatagggaacattcaggctttgtttgggttttgaaaagaggatacgatcagtcaagcttctcagcaaggttcatgctaatttggaggggaagatcgtcttggcataaaatcctatttgattttaaagagagaatatttgtggaaaaggttgaaatagtgaaaaaatatgtttttttttgt

SEQ ID NO: 366 - DNA, 476 bp, Homo sapiens
  misc_feature (1)...(476): n = A,T,C or G
aagaaagaagaaanaacannnnttcgagattgatatnccatgtggaggaactgcggacttacgcatcctgagctgcgagctcatacatgccgccggcattctcctccggctgccgcaggtggcgatggcaacggggcaggtgttgtttcatcgttttttctactccaaatctttcgtcaaacacagtttcgagattgttgctatggcttgtattaatcttgcatcaaaaatcgaagaagcacctagaagaataagagatgtgattaatgtattccaccacctccgccagttaagaggaaaaagcgaccagctacatttaccaaagcctgggtgatgtggagtggtacatagagatgaagctgtcgtcatggcaacagtgagtgaagtatcgaaaatccccaaggagaagccagtgctctgagaataggtcactggaatcggggactaacaggactccaagccccctgatccttgat

SEQ ID NO: 367 - DNA, 423 bp, Homo sapiens
caatcagtggagtgccgctaccggcccaacatcattctctattcagagggcgtgctgcgctcctggggggacagtgtggccgccgactgctgcgagaccaccttcatcgaggaccggtcgcccaccaaagacagcctcgagtacccggatgggaagttcattgacctctcagctgatgacataaaaatccacaccctgtcctacgatgtggaggaggaggaggagttccaggagctggagagcgactactcaagcgacacagagagtgaggacaatttcctcatgatgcccccgcgggaccacctgggcctcagcgtcttctccatgctctgctgcttctggcctctgggcatcgcagccttctacttgtcccatgagaccaacaaagccgtggccaagggggacttgcaccaggccagcacc

SEQ ID NO: 368 - DNA, 452 bp, Homo sapiens
  misc_feature (1)...(452): n = A,T,C or G
ntgagaccctatgcaggcgtgaatattattgatttaaaaatacttttccatgttttctgagtgctctatgataaatcagttgcatctgtgataatacaatacatatgtggacataaacagggatcaaataaaggacgtattgttgcagtccagccaggttgaaagggaaggggggtccccaaaggtccattggatggcaggtgtctacagaggcatgcctttgggtggaactctgacccacctaaggtttactttgctatttcaggaaggttgaagaggattgaagggtgagttgctaagtgacttaaggtttattcacttcaggaatcacagctggggtggaccccaggagcagagtactgcatgcagctgtgcccatgcatggttgccccagcgtagtgagatgggacctgccgcagcatgcccactcctgagctgccaggctgagccat

SEQ ID NO: 369 - DNA, 467 bp, Homo sapiens
  misc_feature (1)...(467): n = A,T,C or G
aatgagaaacccccctcgagatccctagtccatgtggtggaattccaaacgcttcaatggagacgtcctctccccgagctatatccagagcttccgagaccggcagaccgggagctccctgagctccttcatggcctcacccacagatgcggactatgagtatgggtcccggggacctctgacagcctgctcaggccccccagtgcgggtatagccatatctgtctgtctagactctgcagtcaccagctctgccagctcgaggaggcctgctaggctgccactcagcctcctggctttggctgtccctctccccagcctggagagggctggcctggtcactagaagggaggattgtctcaggcgagtcttggcctgagaggaaagccccctcccaagctcccaagaggctcctgaggaactcggggtgtgaaccccattgnggtgtgctcanggttgtgagtgtgt

SEQ ID NO: 370 - DNA, 479 bp, Homo sapiens
  misc_feature (1)...(479): n = A,T,C or G
gcgccccttcggncccttcgagatccctagtcagtgtggtggaattcctttacaccagacaggcctcattttaaatcctgtctctaccgtttactagctgtgtgatcttgggcaagatacttaacctctctgagtttctgtttcctcatctatcaatgaagatgatactatgaacccaataaggctgttaaaacaggttttttattacctaccacggcgggctgtacatctctgacgtacagaaggaggacgccctctccacctatcgctgcatcaccaagcacaagtatagcggggagacccggcagagcaatggggcacgcctctctgtgacagaccctgctgagtcgatccccaccatcctggatggcttccactcccaggaagtgtgggccggccacaccgtggagctgccctgcaccgcctcgggctaccctatccccgccatccgctggctcaaggatggccggcccctcccg

SEQ ID NO: 371 - DNA, 443 bp, Homo sapiens
  misc_feature (1)...(443): n = A,T,C or G
ntttgaagacccttttgacagccggtggaacncgcgggtgccaaaacagaaggaagttcaagatggcattgcccctcggatgttcaatgccctcatcggcaagggccaccctgaattctccaccaaccggcagcaggatgcccaggagttcttccttcaccttatcaacatggtggagaggaattgccggagctctgaaaatcctaatgaagtgttccgcttcttggtggaggaaaagatcaagtgcctggccacagagaaggtgaagtacacccagcgagttgactacatcatgcagctgcctgtgcccatggatgcagcccttaacaaagaggagcttctggagtacgaggagaagaagcggcaagccgaagaggagaagatggcactgccagaactggttcgggcccaggtgcccttcagctcttgcctggaggcctacg

SEQ ID NO: 372 - DNA, 451 bp, Homo sapiens
  misc_feature (1)...(451): n = A,T,C or G
cattgagnccttgagagcctacgccangncgnggaattcgggttggtgtatccttcagctctgtgtttcctccttcacaagtgtggttttggggagatgtggttgaatgttgcagaggagggagctgctgacctttgtgcctgtaaatggctgtcctctctgcccccagtgtatcgcattaagttcaaggagagctttgctgagatgaacaggggctcgaacgagtggaagacggttgtgggcggtgccatgttcttcatcggtttcaccgcgctcgttatcatgtggcagaagcactatggtgagtagagagggaggaaggcatgggcgcctggactggggctccagcctgcagtgcccattggtgggctgtgggggacctccataccttgaggctatgagatagggactgcattccagagttcatctcaggattggttccaggccttgg

SEQ ID NO: 373 - DNA, 453 bp, Homo sapiens
  misc_feature (1)...(453): n = A,T,C or G
agtgccggnnnnntttgaactgatagcntggaagngcgnggaattaccatcttctaccgcgaccgtctaggcctgtatccacgcttcgattctgccggatggtttgtgcatggtggtgtgccacagaatgtcagcctttgggcacaccggaagatgctgcagaaacgtgtggagcactacattcggacacaggagtctgcggggctggcggtcatcgactgggaggactggcgacctgtgtgggtgcgcaactggcaggacaaagatgtgtatcgccggttatcacgccagctagtggccagtcgtcaccctgactggcctccagaccgcatagtcaaacaggcacaatatgagtttgagttcgcagcacagcagttcatgctggagacactgcgttatgtcaaggcagtgcggccccggcacctctggggcttctacctctttcctgactgg

SEQ ID NO: 374 - DNA, 471 bp, Homo sapiens
  misc_feature (1)...(471): n = A,T,C or G
agagggcccagaggcccccatgagaccactgagaccataggaagngcggggaancggnccactcacctacttgaaagcgctggggcaacgttcttttgagccattacttctcttattggccctgctggaggaaggggggaggcaaaggcctctgacttggaccctttccacaccagactggcagcacttcccccaggcagccagaggtgggccctgagccctcaggtccccagctccttgagggatgaacctgggagcccaagagccagtggctgagctctgagaaggctccatctcccacctgcccttgagcgcgctctcaggctgagaacacggtctcatcaggcgccttcctggcctgatgctgtgctgtctacgtcacacggtcgattcacaaaagccagaactagacctcaaccaggtcatctccccgttgccaagtgggttcagggtgagggcaatttgtaagct

SEQ ID NO: 375 - DNA, 458 bp, Homo sapiens
  misc_feature (1)...(458): n = A,T,C or G
tgggatgggcnnttttgannccccttttgacgtcctctagtcagtgtggtggaattcctgaagaccaagaatggcattgcagggtcaagtcttccgccacccccgataaagcataacatggatattggaacttgggataacaagggtcccgttgcaaaagccccctcacaggctttggttcagaatataggtcagccaacccaggggtctcctcagcctgtaggtcagcaggctaacaatagcccaccagtggctcaggcatcagtagggcaacagacacagccattgcctccacctccaccacagcctgcccagctttcagtccagcaacaggcagctcagccaacccgctgggtagcacctcggaaccgtggcagtgggttcggtcataatggggtggatggtaatggagtaggacagtctcaggctggttctggatctactccttcagaacccca

SEQ ID NO: 376 - DNA, 435 bp, Homo sapiens
  misc_feature (1)...(435): n = A,T,C or G
tttgagaccctggacgccgggggattccggaagcatancgactgtggggcaaagagtcagagaggggaggatacagacttgggagggcagagactcagaaacagaatgttcgcattaaggacatggtgttgcggggagctgcctcccccagcccctgctccctccctcaccgccagactatgatgagagaagccacctgcatgacaccttcacccagatgacccatgccctgcaggagctggctgctgcccagggatcctttgaggttgccttccctgatgctgcggagaaaatgaagaaggtcattacacagcttaaagaagcccaggcttgcatccctccctgcggtctccaggagttcgcccggcgtttcctctgcagcgggtgctactctagggtctgcgacctcccgctggactgcccagttcaggatgg

SEQ ID NO: 377 - DNA, 443 bp, Homo sapiens
  misc_feature (1)...(443): n = A,T,C or G
nttgacgacccattagatgtcntttagacagcgnggtggaattcgagaaggagggggagcagaaaaataactgaggctgggcagaagggtcccttccatttcccatccattgcttcaaacaatgggtgattaccgtgcaccttgagtgaatgtcaaggcaggaagggttccagggccacccagtgtggcaggagcagagctgggatcagaattctggattcctgactctccgttcagctgctattcagctatcaccaagctgctgagtttgtcctactttctcctgggtcacattctgctgttgttgggaaacagggagtgagtgaagggaacctgggaacccttctcccctcaccttttaaggatgttctggggtggaataaagagaggtggagggtggggtgcctgggcccagcctccctggctcctggtccttctttctt

SEQ ID NO: 378 - DNA, 442 bp, Homo sapiens
  misc_feature (1)...(442): n = A,T,C or G
nttcgcngaccacttttcagtgtggtggaattcggagcatctatcggctgcacgccaacatcaacacaggcgaagatggtctccaagcgcattgcccaggagacctttgatgcagctgtgcgcgagaacatcgaggagtttgcgatggggccagaggaggcagtgaaagaggccgtggagcagtttgaatcgcaaggggttgatctgagcaacattgtaaagacggcacctaaagtctctgcagacggatcccaggagcccacacatgacatcctgcagatgctcagtgacctccaggagtctgtggccagctctcgcccccaggaggtgtcagcatacctcacccgcttctgcgaccagtgcaaacaggacaaggcctgccgcttcctcgcggcccagaagggggcctaccccatcatcttcactgcctggaagctggcca

SEQ ID NO: 379 - DNA, 442 bp, Homo sapiens
  misc_feature (1)...(442): n = A,T,C or G
nttgaccccctntttgatgtcctttagaccgtgnggtggaattcctgcgtactacggcttcttccagtcacctcggcccggatcggtaagtgtcaatcgggcgctcccccatctccgccgctattaccactgaacccggaccccctacccaggtccagggccagccgccatgacgaacgtgtactccttggatgggattctggtgtttggtttgctctttgtttgcacctgtgcctacttcaagaaagtacctcgtctcaaaacctggctgctatcagagaagaagggtgtttggggtgtgttttacaaagccgctgtgattggaaccaggctgcatgctgctgtggcaattgcttgtgttgtaatggccttttacgtcctgtttataaaatgaattccaaagcacccaagtcatcaactgccaaccaaggggacggtgatg

SEQ ID NO: 380 - DNA, 491 bp, Homo sapiens
  misc_feature (1)...(491): n = A,T,C or G
ggggggggncctcgagattgtagtncctgtggtggaattcgcaagctgctgctggcaccagggagcagactctgagctgcaaaggcaaagaagtggagaacgtgttcactatccggacgccagaggatgccaatcgcgtggtgaggctggcccgaggccgcaacgtggtcgtcgtgggagccggcttcctggggatggaggtggccgcttacctgacggagaaggcccactctgtgtctgtggtggagctggaggagacgcccttcaggaggttcctgggggagcgcgtgggtcgtgccctcatgaagatgtttgagaacaaccgggtgaagttctacatgcagacggaggtgtctgagctgcggggccaggagggaaagctgaaggaggttgtgctgaagagcagcaaggtcgtgcgggctgacgtctgcgtggtgggcattggtgagttggtgtgtgggcaggcaggcacaaagcagcccagccgtctg

SEQ ID NO: 381 - DNA, 472 bp, Homo sapiens
  misc_feature (1)...(472): n = A,T,C or G
nggaggccggcctgnnnnnnaattgatagcatgncatnggcnggaactcgaacagagacaccctgcggcaccagagccttcccagcaggccaggccgctgggctgggatcagtgttatttatttgccgttttaatttatggattctccgcacctctgttcagggaagggcggcggccacatcccctgccgtctgcgtgtctcaggcagtgggggggctggggccagggcgccctctgaggacagagctggtggggcgcgggggggctggcgagctactgtaaactttaaagaattcctgcaagatatttttataaacctttttttcttggtggtttttggaaaagggtgtgggggtgggggcgccgctggggcagggccaggttttgtgttttagtcccttgctcctgcttctttctacacacacatctaaagacggtgcggctcgctctgtcatgggttccgtctctcttn

SEQ ID NO: 382 - DNA, 492 bp, Homo sapiens
  misc_feature (1)...(492): n = A,T,C or G
cgggggggnatcganttttgagaccatagtccangtggtggaattcctcttgggtgtgggagccctgggcgtgggcctgtctggggaggcccttctgcagagggtggcaccagtgtggcgtggtgtccccgttaacccgggcagtcctgccactctcagcagctgctccatccctaggcccctgtactagattgactctttaaacccagcctcgtttcaatgagcgacatctcaggttggtgatgataatgcatgctctgagaatgcctgtgggcacacactacttcagtgcaccttgcggaacaggaagggttgggttccaggcctgggaccaacttgagaacccctggcggtgaagtcccaggagcgcacctccctcccgcctgccacaaggggtcccaggggcaccttgatctgcttgtgtccttctttgcagggtcttgctagtgagctggaccagtgaggcctaccccacacctgggctctccacag

SEQ ID NO: 383 - DNA, 477 bp, Homo sapiens
  misc_feature (1)...(477): n = A,T,C or G
cgcgcccttganncccttcgtagtccctagtcagtgtggtggaattcctgctgaggaagcactggattgccaacaacctttttggcctggccttctcccttaatggagtagagctcctgcacctcaacaatgtcagcactggctgcatcctgctgggcggactcttcatctacgatgtcttctgggtatttggcaccaatgtgatggtgacagtggccaagtccttcgaggcaccaataaaattggtgtttccccaggatctgctggagaaaggcctcgaagcaaacaactttgccatgctgggacttggagatgtcgtcattccagggatcttcattgccttgctgctgcgctttgacatcagcttgaagaagaatacccacacctacttctacaccagctttgcagcctacatcttcggcctgggccttaccatcttcatcatgcacatcttcaagcatgctcagcctgccctcn

SEQ ID NO: 384 - DNA, 441 bp, Homo sapiens
  misc_feature (1)...(441): n = A,T,C or G
nttgangaccttttgatgacccctagacagngtggtggaattccaggtgacgaccgcaccgcggccgtgggactgatgcgggatcccgagggccttcctgcccacatgccccgggagaaaccgaggcccctccctcctcctggaacagcttccggctctcaagcgtcaccccaggggcgtcagttttacggactcaaggtcacctcaggaagaggcagggccaggttttgggataggctttgcctccaggatgggctgctcctgggcctggtgagctactgcccccaacctaccctctagaggggctgggaagggccgttctgggctcacctggcctgggagacccatctggtccctgcgtcctctgcccctcactgctctgtgcagatcctgtcgccctcagctgcctcctcccgagacctaatggtccctgctgggctn

SEQ ID NO: 385 - DNA, 499 bp, Homo sapiens
  misc_feature (1)...(499): n = A,T,C or G
agtggctgaattgataccttcgcagngngtactgattccatacccagggtggaggaatacccactgtggtgcacaacgctacagaagggatcaagggctccacagagagctgcgacaccaccacagaagatgaggacctcaaagctgccccgctccgcactgggaatggcagctcggcgcctgaaggacggagctcccgggacagaacagccccctctgcaggcatgcagccccagccttctctctgctcctcatccatgcgaaaacaggagatgattaagattacagaacagctgattgaagccctcaacaatggggactttgaggcctacacgaagatttgtgatccaggcctcactttctttgagcctgaggcccttggtaacctcgtggaggggatggatttccataagttttactttgagaatctcctgtccaagaacagcaagcctatccataccaccatcctaaacccacacgtgcacgtgattggggagga

SEQ ID NO: 386 - DNA, 425 bp, Homo sapiens
  misc_feature (1)...(425): n = A,T,C or G
nttcgacgacccttttgcagngcggtggaattcgggagtcctaacagagaaaaattcatttagaaattatgaattcaaaattaggcacaaaagtaaatagttatttagcaaacacctacctgtacattttgactagcttacaaatatcaactgagaaaacttttaaattactatttttattaattatctaccaagcatacctttttaatatctattcctcctgggtttttgactgcctactctttgatcatctctttatatgacaattattttgtgatctttgtataaagacaatgaaagtataatttagtctttcctttatcattgttcataaaaatgtatttgactactgacagtttaaaatatttcatcttctcaactcattattcataatgtcaagtaaatttgtaggattgtataaattt

SEQ ID NO: 387 - DNA, 429 bp, Homo sapiens
  misc_feature (1)...(429): n = A,T,C or G
attganngacannattgtagacccctagtcagtgtggtggaattcctctggtgtccggctgtgggcggcttctccgtgggctactagcgggcccggcagcgaccagctggtctcggcttccagctcgcgggttcagggaagtggtggacacccaataagggaagacaactataattgaaggccgtatcacagcgactcccaaggagagtccaaatcctcctaacccctctggccagtgccccatctgccgttggaacctgaagcacaagtataactatgacgatgttctgctgcttagccagttcatccggcctcatggaggcatgctgccccgaaagatcacaggcctatgccaggaagaacaccgcaagatcgaggagtgtgtgaagatggcccaccgagcaggtctattaccaaatcacaggcctc

SEQ ID NO: 388 - DNA, 438 bp, Homo sapiens
  misc_feature (1)...(438): n = A,T,C or G
nttgaagacctctgtacagctggtggaattcagcagctgtgggaggctgaaaaggtcaaaatgcggcaaatcctggacaaacagcagaagcagatggtggaggactaccagtggctcaggcaggaggagaagtccctggaccccatggtttatatgaatgataagtccccattgacgccagagaaggaggtcggctaccgtgagtgttcccgcccttcttcggggggtttcctcttggcaccttgtgcagagccaccatccttgcccaccgcccagggcagggagcagcggagtctgtctgcattccctgcagcatcggccatgatttaattcagagcatgtggggcaggccagcttcccctccgctccctccaccccattcctctccctgcctagcaccctgcccttctctctctcagtggccacatccttaggccc

SEQ ID NO: 389 - DNA, 423 bp, Homo sapiens
attgccgaccctttgcagtgcggtggaattcgtgcccaacaactgtgtgagcagcatcgagaacatggagaacatcagcacagcccgggccaagggccgggcatggatccgggtggcactgatggagaagcgcatgtcagaatacatcaccacggctctgcgtgacacccggaccaccagacggttctatgactctggagccatcatgctgcgggatgaagccaccatcctcaccggaatgctgatcggactgagcgccatcgacttcagcttctgtctaaagggggaagtcctggacgggaagacccccgtggtcatcgattacacgccctacctaaagttcacgcagagctacgactacctgacggacgaggaggagcggcacagcgccgagagcagcacgagcgaggacaactcgcccga

SEQ ID NO: 390 - DNA, 482 bp, Homo sapiens
  misc_feature (1)...(482): n = A,T,C or G
cgatgtcccanaagtannaaacctgaaaacancctagnnggctngcannaacnnnnaannnnnnntnanggnccctgngaccccagcctcccctctgctttgcatgggacctaagtctccatttacagaactcactatttgcctcttgtgggggaagtccccagatgtcagccttctcgtgggaattataagaagtatgagccccagagctcctttagtctctccccagccagagtccacatattttcccccatgttttgtgggtgaaaaggcccttcagaaccctaaatccacccagtttatatttgttgctgggctgcgtcattctagtcagaatctgggaggatgccaccatacgtagaggaggccatgagggtctcacctgtaacattctgtagatatgacttgtttattctgtctactgtgagtgcctgactctgagtagaatcaaggccgggggattgtcatctgctttgtttatg

SEQ ID NO: 391 - DNA, 475 bp, Homo sapiens
gcgccctcgagaccttgtgaatgcgtaggaattcgaagcctagcactgagagggagaagccatcctggcatctgtgccctgggcttgcctggcaggggtgacgtccctgcactgagaaggaaaggctgtctcagcatgtgagccctgggctcgcctggcgtaccctccctttcttgtggtgcttgcttggtagcaatggcaaaccctgcgcttactggcaagggcacaaggtgctgggaaggacagaaggtgctggggccagcccgctgggggtgcacagtcccttaagaggccaccttgcattacctgggaggagagagcttgcgcctcaggtacttgaggacatacagcgggaggcaactgaccacggtgatcgccgacactttccacaggaaggtcacggcggtgataaagacaacatctgctggcatgaaactcagaaaaaggtaagagctgaccatgaagccctgtgccg

SEQ ID NO: 392 - DNA, 497 bp, Homo sapiens
  misc_feature (1)...(497): n = A,T,C or G
ggaggaggccnnattgaanccctaactgagaccctagtcagtgtggtggaattcggtgttttaagatgcctgagccagccaagtctgctcccgccccgaagaagggctccaagaaggcagtgaccaaagcgcagaagaaagatggcaagaagcgcaagcgcagccgcaaggagagttactctgtgtacgtgtacaaggtgctgaaacaggtccatcccgacactggcatctcttccaaggccatgggcatcatgaattctttcgttaacgacatatttgagcgcatcgcgggcgaggcttcccgcctggcgcattacaacaagcgctcgaccatcacctccagggagatccagacggccgtgcgcctgctgcttcccggagagctggccaagcacgccgtgtcggagggcaccaaggccgtcaccaagtacaccagctccaagtaaacattccaaggggagacaacagcttttagacatatcttttccaacagtcgn

SEQ ID NO: 393 - DNA, 440 bp, Homo sapiens
  misc_feature (1)...(440): n = A,T,C or G
nttcgacgaccccttggacagctggtggaattcctgaatgtgacagaaggaaatttccaccagttggtggcactgctacactgacgtagcctgcacaaggactatggtgcagccctgcggggcctgtgcgaagacgccctggaaggcctgctcttcctgctgctcttctccctgctgtctgcaggagcgctggccactgccctctgcagcctgccccgagcctgggccctcttcccacccagtgacgactacgatgacgcagacgatgacgaccctttcaaccctcaggaatccaagcgctttgtgcagaggcagtcgtctatctgagcccctcctcccggctggactggagcctggctcccctcttcgttccttccctggctgccggaggagaccccactaacccagcctgcctgggctctgaccactaacactcttgg

SEQ ID NO: 394 - DNA, 495 bp, Homo sapiens
  misc_feature (1)...(495): n = A,T,C or G
aggcggttcnccccattgagaccctaattagagngccgtaattcgcaactctaaagtctgggtcttgggagacaaggagtccatggcggaggtgaaggaaagggaactgggcatgacccctgtctaccaagcagagagcaagctgcaggggcaagccccaatcccttcctcctctatccacttctcccatggttcctgcctcaccgagttccccactcttcacacaacaccaggcaggcctcccaggcttccctaggccttcccagctagcaaactcctacttaagcctcaggtgaaatgccacctctcctgggtcaccttcctctggcccaattagtagctccttccttcatagacctaaatgcgcatttcctgggttttcttgtaatgacctataagtgtcccccatgacgctgcgagcttccccaaggcaggcacggatgtgtgtttctcgactcttttgctcttagcaagagcctgtcatgcagctgatgc

SEQ ID NO: 395 - DNA, 495 bp, Homo sapiens
cggcgggtgccccatcgagacccctaattgatgtgcggtaattcccgataggggttggtcaagacaagggaaatgcagctctagctgagcttgatcagttactggcagtcgcagactttggaccccgggatgaaagagacaactttgtacaaaatgatttcagggaccctgatgccccacaaccctgcggcaccacagagccgaccacaagctccagtctgtgtgggatcgatcatgaggcgctccacaagcagattatggagtacaaaaggaggaaagataaagggctcgggggcctggtgtggcaggggcaggtggctgagctgacaacgcacatgaaaaagggaaggaagagggccaagccccgcctggagcaggacagctccctcaagagttacctgtcaggcgaggaggttgaagatgacctggacctggttggtgccccggagtacgaatgctatgccccggacacagaggagttggaggcagagagag

SEQ ID NO: 396 - DNA, 504 bp, Homo sapiens
  misc_feature (1)...(504): n = A,T,C or G
cggcggttagccccccctcgaagacccctaacttgaggtgcactagaccaccgacgnggaattcgttaccattctatactttattgaatacctgtttgaaatggactcatatcaatgtatatagaactgtcatttttaaaagctgcatactgggcccatagttgatagaactggctttctgttgataaaatatttaaatcatttcttgtgtcttctattaaaaacaaattttgcaggccaggcaaggtggctcacgcccgtcatcctatcactttgggaggcaaggcagacagatcaccagaggtcaggagttcgggaccagcctggccaacatggtgaaacaccatctctactaaaaaatacagaaattacccgggcatagtgacgtgcacctgtagtaccggctgcttgggaggctgcagcangagaatcacttgagcccaggaagcggaggctgcagtgtgccgagatcacgccactgcactcgagcatgggtgacggagc

SEQ ID NO: 397 - DNA, 495 bp, Homo sapiens
  misc_feature (1)...(495): n = A,T,C or G
ngggcggtncccccaatgagaccctattcagagngcngtaattcgagaganaaggctggagatagcaccagagcgggaagatggtagacaaagaaatgatacttatttgatgctgatcaaatgcccccagatctctgtacaggagcaagtggtgaaacaaggatgaccttgcctgtccttgccctccaagcatttcagacaagcacatgtgtgacctccaaacaaggcagatggtgatgagaggaaccaggccacgggagattcagaaaaggcacaagtgctcccagaggggcctttgaagccttcccagaggtggcatctgagctgagcctggcaggttgagctgggttttgatggcctgagatgatggcaggggaaggaggtgctcttaagtttgcaggggtggcagcagaaaacacaggctaagtctaaccgcaagtagagtgtgagttaaagggggtaaggaaacgatggaatcacagccacaagggcctg

SEQ ID NO: 398 - DNA, 503 bp, Homo sapiens
  misc_feature (1)...(503): n = A,T,C or G
gggatagaaaaccntnnnnnnnnnnnaatgtagaccactantcagtgtggtggaattcgttagtgatcatgatcatgtggtactctcccctgggtatcgcctgcctgatctgtggaaagatcattgcaatcaaggacttanaagtggttgctaggcaactggggatgtacatggtaacagtgatcataggcctcatcatccacgggggcatctttctccccttgatttactttgtagtgaccaggaaaaaccccttctccttttttgctggcattttccaagcttggatcactgccctgggcaccgcttccagtgctggaactttgcctgtcacctttcgttgcctggaagaaaatctggggattgataagcgtgtgactagattcgtccttcctgttggagcaaccattaacatggatggtacagccctttatgaagcggtagccgccatctttatagcccaaatgaatggtgttgcctggatggaggacagattgtgactg

SEQ ID NO: 399 - DNA, 481 bp, Homo sapiens
  misc_feature (1)...(481): n = A,T,C or G
agggtgcnaaatcgagaatttgatcactgtggtggaattcggctcataaggacgccccaattcgcgagcgcccttgagtctggccggtgccacggtcggttcgcgcgaagtgggcaccggtctcccgagccgacttcgtgtactccggacctgtactgcgctccggtagaggacccttccctttctcttagcttcttaaatcttttcttttaaggtgtaaatgtgtgtgtgtgccgatgaatgtttctgtttttcatctgctgactttatttttttttattggtataacttctcccttctctctccctgctcgtccgttttccaccttttctcttacttatcttctgccctcgctcactccctaacacacacattcacaccctctccgcctcgctctcccgttctcgccaggtcctgatgggtacagtagattttgataaaaagacaaacgaagctatcagtggggctgatgttgaagaat

SEQ ID NO: 400 - DNA, 482 bp, Homo sapiens
  misc_feature (1)...(482): n = A,T,C or G
ngaagaggggtttganccttctgagtccctagtcagtgtggtggaattcctgcagatctcattttcatactagggggacaaggagggacatgggagtcagtggtaacaccatggaccaccagaggatcgggatctggaactcacaccaagaagcaccaacccttcagggacttgtgcatatggagaacctgggtgcccatggtgaaaagcgttctaggctttcaaagtaacattgcatgtgaggatggagaatgataaaacgattcctgccttcaaggcatcgtcccggtgtttgtcagctgtggggcaacagcaccctctgtgtcagcaacctgcatgaagagcatcatccctgcaagtcctcaaggcctggggaggcctcatcccctcctcatttcagcaacagcacacaggacaatacgctctagaagaactctttgacttanaggtatatgattgtttttgttcctttaacatgaacg

SEQ ID NO: 401 - DNA, 496 bp, Homo sapiens
  misc_feature (1)...(496): n = A,T,C or G
gcgggtccccaattgagacccttttgaggaccctagaccagngaggnggaattcacagagattccccgcccgggtccccgccaacggcgctagccgcgatgccccgcctcactccccgcccccgggatgcacggcgcgtgctggtaatccgcggctcaagccccgcccccactgtccccattctccgctcacctctctccaaggacactgcgcacgcgccacgacgtcccgcctttctccccgccctgccgcggccccggagcgcagcgcgcacgcaatcgcgtttccggagagacctggctgctgtgtcccgcggcttgcgctccgtagtggactccgcgggccttcggcagatgcacgcctggggtagtctcctttctggactgagatgagaagaatggagaagcccctcttcccattagtgcctttgcattggtttggctttggctacacagcactggttgtctctggtgggatcgttggctatgtaaaaaca

SEQ ID NO: 402 - DNA, 479 bp, Homo sapiens
  misc_feature (1)...(479): n = A,T,C or G
ggagcgccnttgcagtccatattcagtgcggtggaattcgatatcaagagttcagttttagacttattgagtttgagatgtcggttcacacccaagagaggatgtaaagtaagcagttgggtgtatgagtctgaggtttgagagcgaaccctaggctagaaatataaatgtgaaattcatacctgtgtgtactgcatacatacttacagctatggaaatggtgagatcacaggaaaggagtggaccagggcctgagccctggttcccctagcatcattctggagtcccacaaggccccacgaagatcaaggctgccatacaatggtgttacactgcaggggtctggaaagccttctagtctgtcagtgattgtttggcagctgcagggcgggtgttgggacctcttgctgacactagcagcattatcctgtgttcagatcacaccgcccatcctaatgtctgtgccccttgaacattac

SEQ ID NO: 403 - DNA, 495 bp, Homo sapiens
  misc_feature (1)...(495): n = A,T,C or G
nggcaggtnncnnncattgagacccttntcaggngcgggaattccttaatacacatgtatataatgttacattccatcactgtaaaaagtcccctttgccccctcccccaaaaaagtttcagtctagtctccaaacttggaaagcggcgctcgctcctgctgccggtgcagttcgttctcggtcagcagctggaggttctcggcgcgcagccggtccagctccagctccagctcccgcacacgcgcgtcgtcgccacccagccgcttgctctccagccgcagccggttgttctcgtcctccatgcgcgagaggcacttctccagttccaggtactccttgatgagctcctgcttgctcatgttctgcaggctctccgtgtggtaccgctcgtacgtctccgagaagtcccgctgcagaaactcgctgccgtgccctcccatcccatcgctgcccccatgctcctcacccccttcttccatgaagtcgtcatcgct

SEQ ID NO: 404 - DNA, 477 bp, Homo sapiens
cgcgcccttcggcccttcgtagtccctagtcagtgtggtggaattcgtattattatacatcatgagactggacactcttcacacctgttatttcaacagagtccttagacagagagtcctcagacaacaacaacagagagtgcttaggttcataatacagctcagtgcactttttgggctgtggttcagctctctcttgatctttaaatgctttgcggtgatgctcaggctttccccgcttgcctgcttcccagagcctcatctcacacctgtgtgagttcagaccagtgctaaattctcacacattctgctgtgttgtttctggtccctttcaggcacagactgctcagatttctgcccagaaattcacacacacatcgtggaattgtcctcagttttcaggagtcagctcaaatattacccactcagagaggttttccctgggcccttgtctaaagttgattcttctagtccttt

SEQ ID NO: 405 - DNA, 479 bp, Homo sapiens
  misc_feature (1)...(479): n = A,T,C or G
gaagagcnntttgagtccttggcagtgcggtggaattccaactgaaagccacaggacccggttggcacctttttggccgcctgcgcctttgcctgcagccccgctccctgggtcacccgaaggaggagctggcgctctttccgggcgcagaagcacccgacccacgctggaggaaacggtccctctgggcaggagaagctttgggcctggctggagcacactcacggaaccacgccaacgcctggcctgtagccagctcccacctcccctcccaccttctaaaatgcttgcggatctcacgtggccgaccctaaccagatacacatggggaaaggaatcaggtggcacacataccgcctttactccatagagaacttccaattgtgggtaagaacaaagccccacctctgcctaatagatgcagttttccacctgcagccaaaaagacaacctgttattagcttttttcccagaggacn

SEQ ID NO: 406 - DNA, 487 bp, Homo sapiens
  misc_feature (1)...(487): n = A,T,C or G
ngggaattcgggaccctagnccgngtcgtagaccctagtcagtgtggtggaattcccgagcggagatcggggtttgcctcccgtccccgctcaggaccctgacgtggctgaagcggccccgggagcatgagcgggcagcgcgtggacgtcaaggtggtgatgctgggcaaggagtacgtgggcaagactagcctggtggagcgctacgtgcacgaccgctttctggtggggccttatcagaacaccatcggggccgccttcgtggccaaggtgatgtcggtcggagaccggactgtgacattaggtatttgggacacagcaggctctgagcgctatgaggccatgagtagaatctactatcggggtgccaaggctgccatcgtctgctatgacctcacagacagcagcagctttgagcgagcaaagttctgggtgaaggaactgcgcagcctanaggagggctgccaaatctacttatgtggcacca

SEQ ID NO: 407 - DNA, 491 bp, Homo sapiens
  misc_feature (1)...(491): n = A,T,C or G
ggcgggtnnnnnnnaatcgagtccntcgcagnggcgggactgattacatcaggctggagggatttgccacacagccccacccttgggctgagaggacctgggaagcccctccaggagggaacacggtcatcctcgggcttctggagcggggttcctgcagccgcagaggcatctggaggaaacgcaaccaagaaaggaaggcaggtgggccccagcaaaggagtagctgccagggctcaacagctacgctctgtgacagcgcagagctcagcgccggcctttccctccctccgccaaggactcacggccaagccagctctcggggccttttttccagtgcccatttggctactctgctgcaccaagcttgggagccagcctgccaacagccacctgggcctggcctccccactggctggccttgaggttggcagagtgggttgtggcgcttcctctctctgtgtgggaccaggacagtggcttaagtctcc

SEQ ID NO: 408 - DNA, 464 bp, Homo sapiens
  misc_feature (1)...(464): n = A,T,C or G
tgccggcaaggggnnntttgatttcattccatatccatggctggaattcaggaacgacaacattcccaatgccgtctgggtctgggacattcagaagctgaggctgttcgcggtgctcgagcagctgtccccagtgcgcgcgtttcagtgggacccgcagcagccgcggctggccatctgcacgggaggcagcaggctctacctgtggtccccagcgggctgcatgtcggtgcaggtgcctggggaaggtaagcacatccccgaggccacggacgtggcagccttgctgtgtgcagtctggcatcacacgggctgaactgttgaagcccagctgctgtctccggcagcactccagggaaactgccctcagagtctttgcgtaaacctcaagacggacacacaggggacccgctgccctcagctttatgggctagaagcagcctctccctgacttgaggcagctc

SEQ ID NO: 409 - DNA, 508 bp, Homo sapiens
  misc_feature (1)...(508): n = A,T,C or G
tggcgantnnnnnnnnnaatcgattaccntctgaannnncnnnncatgattaccntaggccagngncnggaattccacacagctaggtacccgcggggcctcaaggcagccacagaaaaggggatccgtcgcacctcctttcctccctccagcctcccacagactgcggggaccaaggcggtttcccccagccgctagctgccccagccctccaggccaatcctaacccagatcaaagatcctgggacagctggaacaggcatggcctaatggaactcccaagtggacagggccaagcatggacggacagagcttctgaaacagtcctcagaccccgtgcatctggatctttctgtaggaaccacccatcagcagtgccagacagaaccaagcacatgcactgatccaccgcacgatgggagctggtgtgggtgagcttgtttgctttagccatgcccacagacaggaacagaagagcacagtggaggccaccagccctctcgcctgg

SEQ ID NO: 410 - DNA, 461 bp, Homo sapiens
  misc_feature (1)...(461): n = A,T,C or G
gggggccannnaattgagacaatgagagcctcggaagngcgnggaaaacgganagcacaagctgtatcagcagatcaaggctggagcctatgatttctcttcaccttaatgggacacggtaactcctgaagccaagaacttgatcaaccagatgctgaccataaacccagcaaagcgcatcacggctgaccaggctctcaagcacccgtgggtctgtcaacgatccacggtggcatccatgatgcatcgacaggagactgtggagtgtttgcgcaagatcaatgcccggagaaaactgaagggagccatcctcacgaccatgcttggctccaggaacttctcagttggcaggcagagctccgcccccgcctcgcctgccgcgagcgccgccggcctggccgggcaagctgccaaaagcctattgaacaagaagtcggatggcggtgtcaagaaaaggaaaa

SEQ ID NO: 411 - DNA, 491 bp, Homo sapiens
  misc_feature (1)...(491): n = A,T,C or G
aggccccnnnnnngggggctgaaaccntnnnnnntcactagaccctagtcagtgtcgtggaattcttcacaataaccttgtttttacttctggttgttatatgaaagaactgaggcaaagagcaatacagagagttgcaaaaattcataccgctggtccaggtttgaaccaaacagtctgcacctggagtccttgtttgtaaccatggcaccctgtcttcacacatatctcatcgtggagttccatcttgtgttaggcatggcactgagcagcttcttttaagaacataatttgtagccaggcgcagtggcttatgcctgtaatcccagcactttgggaggccgaggcgggcagatcacgaggtcaggagatccagaccatcctggctaacttggtgaaaccccgtctctaataaaaacacaaaaaattagctgggcatgatggttggcgcctatagtcccagctacttgggaggctgaggcaggagactg

SEQ ID NO: 412 - DNA, 496 bp, Homo sapiens
  misc_feature (1)...(496): n = A,T,C or G
ggcgntnnnnnancctgantccnctcgannncnnnactgataccnctctccangncgnggaattcgcagttccaaagaactactggttcagattttagctcttcccaagttgtgaaaatagtgaaggatgcttagactacttaacatacaaactgctttctggttaatcatctttagaagactggatttctggatatctactccactccatctctattgacttttaaaacatgataatgcaaacctataacactggcaaccatcagtgaacctttaatttcattgattaatagcgtttgaagcttcctcagggaataacaatgacatcagcagtggttgacagtggaggtactattttggagctttccagcaatggagtagaaaatcaagagggaggtagaagatcgacatgaaaaactggggatctgaaaacgagcccctatcctaggattacctgaaggtgaaacagattgagccagaaggaagacaatgctgn

SEQ ID NO: 413 - DNA, 244 bp, Homo sapiens
  misc_feature (1)...(244): n = A,T,C or G
ctgganggacngntggcnnaagctggaagaaatgtaatggtacctgcagcagctccctcattctcacaggcccaacaggtcatttgtggtcagaattgtacctttgtcatccaggccaatggcacagtgttggcttgtggggaaggaagttatggcagattangacaaggaaattcaaaataacttcatgtgctgacagttatttcagccttacaaggctttgtggtgacccagctggtgactg

SEQ ID NO: 414 - DNA, 491 bp, Homo sapiens
  misc_feature (1)...(491): n = A,T,C or G
gagcnngnnnttttgancctcgtagtccctagtccgtgtggtggaattctcagaacctgtcttgtgtgtgagggcctcactcctctctcggaggtgcccagaggactgtgggaagaagggcaaagtctctttccagaggagcgtgcacagaccctcatctcccacgaccacacttttggggtgaacagggtgactttgttaggtcgattcttctgcagagatggtgaagtactctatctgcccacccacccactaaaagccatagctccgtccgcctggcctccccccagctctatagcaatagcccccttcccccttccctcctgggcatccagggtgtccagctaggggcccccaccgcactctggtcccagggatcttccagtggcctgcctgcttctcccgaagtgaccccatcagctccacccaactcccatccctcttccagcaaccacagataatgacaattgtttgtgaggtgcttggagatt

SEQ ID NO: 415 - DNA, 487 bp, Homo sapiens
  misc_feature (1)...(487): n = A,T,C or G
tgggantnnaatcgagaccttagtccacgtggtggaattcccagtaattgcagcatccagtaggtcttactttagccctgagtcaccatttgtgtcaacgtgtttagtgccatgtccacgtctctcatgtaactggcagagctatcaaatattttggcaaaacacattgtttctttggctttgccttggtaactttctgtgccttttgtagctcttgtttggaagaagctcaacccatgtctgcacactgtgatacaagggggacagcatcgacatcgacttacttcttggtgccttattcctccttagaacaattcctaaatctgtaacttaagtttctcaggaagattccatactgcacagaaaactgcttttgtgggtttttaaaaggcaagttgttatatgtgctggatagtttttaagtatgacataaaaattgtataaagtaaaatattaaaatacacctagaatactgtataactttaag

SEQ ID NO: 416 - DNA, 417 bp, Homo sapiens
ggaagagcaaagaaaagagcgtaggtttggaaagaagggaaggagagaaggaaggaaggaagagagggaagagcaaagaaaagagcgtaggtttggaagccagataaagctggacctgggccgggcgccgtggctcacgcccgtaatcccagcacttcgggaggccgaggtgggcagatcacaaggtcaggagatcgagaccatcctggctagcacagtgaaaccccgtctctactaaaaatacaaaaaattagctgggcgtggtggtgggtgcctgtggtcccagctactcgggaggctgaggcgggagaatggcgtgaacctgggagacagagcttgcagtgagccgagattgcgccactgccctctagcctgggcgacagagcgagactctgcctcaaaaaaaaaaaaaaaaaa

SEQ ID NO: 417 - DNA, 491 bp, Homo sapiens
  misc_feature (1)...(491): n = A,T,C or G
gagggcnnnnntttgannttcgtagtccctagtccgtgtggtggaattcgttcagtcagcccctcagtggcctaaaaggaagaaggtgtcagtcacagggctggttctgggccctgccttggggggaccccagttccagggttctgggccctgccttcaggggacccgagttccagggtcctgggccctgcctttgggggacccgagttccaggtcccggcctcagcgttgcagtggccagggtcagtggctctttggccctctaggagtgagcagaccttagtgaaatagatccacagggtcctgactttgtacctggtccaagctgttggggaattgctgctgttgacccaggcaggagtctgactagagaacaaactaaggttgctgcaacaaacaaggacctcttccaagaagggctcccaggcctggcgcagtgactcatgcctgtgatcccagcacttgggaggccgaggcgggtggatcatttg

SEQ ID NO: 418 - DNA, 462 bp, Homo sapiens
  misc_feature (1)...(462): n = A,T,C or G
gccgccccatgagaccnaatagaggccatggaaccnccagggggctacccccaggggccatatccgcagagccccttcccccccaacccctatggacagccacttgtcttcccaggacaagaccctgactcaccccagcatggaaactaccaggaggagggtcccccatcctactatgacaaccaggacttccctgccaccaactgggatgacaagagcatccgacaggccttcatccgcaaggcgttcctagtgctgaccttgcagctgtcggcgaccctgtccacggtgtctgtgttcactttcgttgcggaggtgaagggctttggccgggagaatgtatggacctactatgcctgctatgctgccttgttcatctctgtcatcgccctcagctgatgtggggacttgcggcgaaagcacccctggaaccttgttgcactgtctgtcctgaccggcagc

SEQ ID NO: 419 - DNA, 480 bp, Homo sapiens
  misc_feature (1)...(480): n = A,T,C or G
gggagtgccnttcgagtccatttgnagtgcggtggaattcaccagcattgtgtctggtggctatgggggctctggtgatggactcatccccacagggtctggccgccatccatctcacagcaccactccttctggccctggagatgaggtggctcggggcattgctggagaaaagtttgacatcgtcaagaaatggggcatcaacacctataagtgcacaaagcaactgttatcagaacgatttggtcgaggctcacggactgtggacctggagctagagctgcagattgagttgctgcgtgagacgaagcgcaagtatgagagtgtcctgcagctgggccgggcactgacagcccacctctacagcctgctgcagacccagcatgcactgggtgatgcctttgctgacctcagccagaagtccccagagcttcaggaggaatttggctacaatgcagagacacagaaactactatgcan

SEQ ID NO: 420 - DNA, 456 bp, Homo sapiens
  misc_feature (1)...(456): n = A,T,C or G
natcgagacccctggtagccggagaaaaccccnagngccggaagtaaacttgttaacggttctttgccttttggggaggggagacagtccacagaaggctttggagacccttgagtcggccagcgagcagggattcttacttgagcgcctccacaaataaacgctccttcgctcctccgtcgcgtgcgtttccctgggataataagtgggaaagtggtggcttttatttttttgagacagggtctcaccgccgtcgcccaggccggatggagtgcagtggcgcgatcacggctcactgcagcctcgacttcccaggctcaggtgatcctcctgccttagcctcccgagtagctggaattacaggcgtgcaccaccccccccaactactttttgtatttttttgtagagatggggttcaccatgtttcccagccttggctcaaactcctgacctcag

SEQ ID NO: 421 - DNA, 442 bp, Homo sapiens
  misc_feature (1)...(442): n = A,T,C or G
ntttgaaagaccccttgtccagcgtggtggaattcctcagaaaagcctattgcaatgcaagagaatgagcgtgataccattaaagggttgatcttggatctagtctaatttgtgaagaacattttataagtcactcaaccatcatgagtaacaaatcgctggggaagtggcttaggcctcccagccacatgccaggaagcctgtgtttggcaatgactgttgctctgtacagaatggctcaagtgttctattggaagcagttggaccttgtggctttcatgctgtcacccttgtattatttcttggtgtgtccaggtaaagctggagctccttagcccagccagaaaggcagctcatggtgcagcccctgcctgcctctctggactcatctcccctgcttccctgtttgcattgtggtttttgctttccgcctccagagata

SEQ ID NO: 422 - DNA, 507 bp, Homo sapiens
  misc_feature (1)...(507): n = A,T,C or G
agtagtgccagnnnnaggggngnaactgaaaaccntngnanactgagaaccntacgccagngncgnggaanncccagagaaaacaggaagggacagcagaaagttgctttgtttgttaaaaaccattccgaaatgaaaatattacaccagcaattaggaaaagcacagctctcccaccatcaagatgtggcccccacgccttctccctggctgtggttctggggaacagtgatcccctctggtggctctctcaatccagcagaatgatctgactgaggacaccaggaagcaggtgttgggaacgcagctctgcacgcggcacctactcccaccctaccaccatgggaacagcgggcacggacgcctctcctgcgggaaggcagagcccttgcgttggagcctctatctggcctatcctgttgcagctgctctgctctgagtgccagtgtcacccanatccatatattaagacctaagtcccaaggggatggcactgggaggggggcc

SEQ ID NO: 423 - DNA, 477 bp, Homo sapiens
  misc_feature (1)...(477): n = A,T,C or G
nctcgagacccctggcagtgtagnggcattcgctgctgacgtcggggaggaaagcagtttccagtcgcctggggccaggacatggcgttcccagctgttgtagagcatgaagcaccaggatgcccattcgggtgcctgctgagatcaggctctttgagaaggaatcctgtggtcgcctgaggaagtccaaaaaaatttcgaggacatctcagccatccatcccctgttcactgtggaggttgaacaccggggctcctggaggggggccctgggtctccacagaagtgctggcagccaccatccacttcctggccttccgtgcccgctccacctctgttctgttgtttactgtctcctttgtgggaattatggaataaacaatcactctggtgtcctggaaaataaacctgatgctggagggcttgagtgtangaatccagctgggctcccactgtctgccccagggtgcggagttag

SEQ ID NO: 424 - DNA, 476 bp, Homo sapiens
  misc_feature (1)...(476): n = A,T,C or G
ggggnatcgagaccctagtccagnatcgaggaactcttcagtgccaagaggctgcgccaggccactctctcagcccagggcctgccctcctgtcctcccacttctctacgccctcaaggttggagaccccgctcccatgccccagctgtgccatcccaaacacttgggcagcagctcagcatgggcagacatgggggctgtggattcttccagggcggggatggcagatggagcccttgggctccttgggcctagagccacttcttaccaggcaacgggcacagccaccctggcacaccctctgcctggccgtgctgaacctctgctggtcccaagggagaagggagtgagcgtgggtcacctggggaaaatctcatctgattccctccttgcccgacctctgctaggggctggagaacagagctcagagcacccagtgtagggaaacacagccagaccactgtggtgacagactt

SEQ ID NO: 425 - DNA, 522 bp, Homo sapiens
  misc_feature (1)...(522): n = A,T,C or G
ggtgttatcactcaganatggcncngggnnnnagnnnnnnaaactcgagancccttcngattttgacaggcatncgccantatgaganctttaagaacctcctgaacatgtaccaccaagccctgagcacgcggatgcaggacctcgcatcggaagacctggaagccaatgagatcgtgagcctcttgacgtgggtcttgaacacctacacaagtactgagatgatgaggaacgtggagctggccccggaagtggatgtcggcaccctggagccattgctttctccacacgtggtctctgagctgcttgacacgtacatgtccacgctcacttcaaacatcatcgcctggctgcggaaagcgctggagacagacaagaaagactgggtcaaagagacagagccagaagccgaccaggacgggtactaccagaccacactccctgccattgtcttccagatgtttgaacagaatcttcaagttgctgctcagataagtgaagatttgaaaacaaaggtactag

SEQ ID NO: 426 - DNA, 488 bp, Homo sapiens
  misc_feature (1)...(488): n = A,T,C or G
agatggccngnnnntnagggcccactgagacccctcgctagngccccttagaagngccgcggaantctagactgcctgtaaatgcatttccaggggagggcaggcctcccacattcccaggcagcactgtgagttccatagcacgagctcaagcggtggggccagcgtgagcactgcatcggctgctgtggggcagtgatggcatgggggactcaacttcctcgggtggcagcacgccctttcctttactgcacgtctgtgatcagcagcggccttctcatgtgacttctctgggcgtttttgttttctttggggtgttattgcctcgggttttataccacccttgcggtcggagcttctgggtggaaaatgaggtgttcgctggcttcctgcaatgtggggcttgttcgggcctgggacgctgcttgcatgtggcgctgagtgcggcagtctacccggccctgccacctccaaggtaggcgctgtga

SEQ ID NO: 427 - DNA, 417 bp, Homo sapiens
aatcaggtttctaaacattaacaaccggagagaaatgacattttggggccgccggtgactcttgcgtgcctctgctgccccctggtggcagccccgagtcacttccagcagggccccccaccccaagggcccagcctcgggcaggaagggtacaaagcccccgccgtggctctgccacgaggtctcctggaaatgaggggaacagcacagcgacgtccttgcgtcctaaatgcatcccctgatggccgtttttcgccacacaggcttggcaaaatctctgcgtcactgagcagcattttaacctcttgaatgagatgcctccgaccttttggatcctctttctgcacctctcaggggacaggtcccgtctgtacggcgctgcctacgagaaacccaagttcattactgcagccaaag

SEQ ID NO: 428 - DNA, 478 bp, Homo sapiens
  misc_feature (1)...(478): n = A,T,C or G
nggggnaatcgaganccctagtccagtgtggaggaactccagctactctgtaggctgaggcaggaggattgcttgaacccgggaagtggaggttgcgttcctgatgaatatctgttatcgctgaagtttctctttggctcatcagccacccaggccttggacctagttgatcgacagtccatcaccttaatctcatcacccagtggaaggcgtgtttaccaggtccttggaagttccagtaaaacatacacatgtttggcttcttgtcattactgttcatgtcctgcatttgcattctcagtgctacggaagagtgacagcatcctgtgcaagcatctcttggcagtttacctgagtcaggttatgaggacctgtcagcagctaagtgtctctgacaagcagttgactgacatattattgatggagaagaaacaagaagcataaaaggactgcaggaggtgctgtgggttggagccgn

SEQ ID NO: 429 - DNA, 499 bp, Homo sapiens
  misc_feature (1)...(499): n = A,T,C or G
agcggtggaattgatccctnnnnnnnnntatcgatttctcttgtgcagtgtcgtggaattcctttgattctctgctttcaaaacttgtgagtaagattcagagatagtgtcttgcaatgtcgcccaggctggagtgcagtggtgcccctcctgttgtgaatgtatctcctgatctgtttaactcctgtgtgtgaaactttgtgattcatgcaatgagaacaaggctttacgtgaacagaccagagcccaggtgcagggcggtcattccagagcccaggtgcagcaggtgcagggcggtcattctgcccacacagtggttcagatccgttcagcagccagccgccggaaggccttctccacctgttcttcccacctgggcatggtgctcctgttctatggcaccggcagctccacctacatgcgacccaccacccgctactccccgctggaagggcgcttggctgctgtcttctactccatcctcatacccaccctgaat

SEQ ID NO: 430 - DNA, 469 bp, Homo sapiens
  misc_feature (1)...(469): n = A,T,C or G
tgctgtcacgggggggggtttgagacctttgatagccgcgtggaanncacagacagcgccctgtgtgagggctccccggacctgcccgtcagcttctctccgaccctgctgtcactctcactcgtcaggacgggagtcacccagctgaaggccggcagcttcctgagaattccgtctctgcacctgctgtgagtggggcctggctgggccgacaaccagctcaagggagtgtgcatttatgcacatgtgtgggagtgtatgctcacacagatgtcaggtgggcattgatgcacgtgtgtgggggtgtatgcacacgtctgtacaaaagcatttgtgtccatgcacatactcacacctgcgtgcccatgcccacctaggctgagggtggaggccagggttaaaatgtcagatgggggctgcaattctggaaaaatttctttcttgcccccttgccagcctcttcacctcc

SEQ ID NO: 431 - DNA, 449 bp, Homo sapiens
ccctccacaggggtccagcctgcatcttgttaactcgagtttctcaactgttcaacctcactggttttgcactgatttttgagagcggagacccattaccacctcctatggctacagccccgttgacatgcatgaaactcagtacctgctgacccaggacctacaaccacactgaaggctccagtgcggcagagcctcgtgcaagcaggagagaaaggctgtatcttaatttctgcaccccggaccctgcccacctgtctgcctgccccgcctggagcccaggccagtgttgtttccagcctcaggccacgggctggacgggcctggccgcctcttccgctccctgccatcagtcaaggccgcccgcccacgtttctacgcctttctacttctcaatctgagttctatgagggttttttaaacgagcaatccttggctgcttccttttc

SEQ ID NO: 432 - DNA, 468 bp, Homo sapiens
  misc_feature (1)...(468): n = A,T,C or G
cgagggtggnggggattgaaacccactgatgactttagtcagtgcggtggaattcctgaaatgtctaaaatgtgtttttaagagaatgaaagtcatacctgtagcctttattttggtccctatgtttttcattgcataatctccttatatacagttacttgtaaagccttttacaccaagtgtcaaggagatttctaatacgttgccaatctttacgcttaaagtgttgacatttactttgatgaccattgggaatggaccagtctggattctgtgaaatgcaccatgaggcccagcacctgctttatgctggactggtagaagcaggcagaaggtcatcccagtcctaaagccactcagaaggctgctgagacttgtgacctanaaatactgtaagccaggctgttatgcagagcctgttgcctttcctcgccgcggtttcacgtgggttttctctctcctttctgg

SEQ ID NO: 433 - DNA, 483 bp, Homo sapiens
  misc_feature (1)...(483): n = A,T,C or G
agagtgcccccattcatnaagcctgntccaccgannncnactganattctcggaancccncaaccagacaccannnccatggcgncnaggacctcncacaacacagnggacagngacaagganggcaaccttgnncctcggnggcaccngggaccgggagaaccttactccacttacgtttagcgcgcatcctgggacttgtccctgcagctcaccgggttagccgtggcaccgttgggacctcccaccaggactccaatcacccacctctcttgagacttctctggcagggctggtgtggggtgcagcctttgctcagagggcaacatgttccaagcaaaatctccccgcctgggccatgggctcaccctcggggctcccttcttctctactgggtgcaattcgaggttgctgagcttctctccaaagtctaaaatggtggggcagtanggacctgtgagaggcccaatggcccaatgtact

SEQ ID NO: 434 - DNA, 474 bp, Homo sapiens
  misc_feature (1)...(474): n = A,T,C or G
tgtattncacggagggggggggatcgaagaccactcgacagcgctgtggaantcccgcagcgcctgtcgggtgttttccactcagcagcttgttgcgaacgtctctgcgtcctgtggtttctctgtcacgctaatgattttggagccattatttcatacttttacaacaatgtctgttgctggacgtttacgtcataacagtttttcaacttataaactgtgaacacttgaaggtaaacttttcacattccttatgattttctgtggattaatttccaaatcgctcagtcaagggaatgtgtcttttagagccatagtgccccagaaaagttgtgctgatccccagtcccagcagcagggaggaggccgcctctgccccgtgtgtgtgacagccccaggcagttttcactgttgggagtgcagacagtgggtccctcagtgagccactaatactggaagccatgcgagaggctt

SEQ ID NO: 435 - DNA, 505 bp, Homo sapiens
  misc_feature (1)...(505): n = A,T,C or G
tgggtctcnnntttggaatccctcngannnncnnnncctgatnaccctagtanagngncgnggaattcccacccaggacaaggcccaagtgaggatcaagcaggaacagatggaggaggacgctgaggaagaggcaggcagccagccccaggactcaggggagctggacaaaggccaaggtccccccaaagaggagcatcccgaccctccgggtaatgatggactcccaaaagtggctcccgggcccctccttccaggtggatccaccccagactgtccctcacttcatccccaacaggagagtgaggccggggagcgacttcacccggaccctttaagttttaagtcagcctcagagtcctcacgctgcagcctggaggtgtcactgaactcgccctcggccgcctcctcaccaggcctcatgatgtctgtgtcacctgtcccctcctcctcagctcccatctccccatccccacctggcgccccccctgccaaagtgccgagn

SEQ ID NO: 436 - DNA, 474 bp, Homo sapiens
  misc_feature (1)...(474): n = A,T,C or G
gtatgtccgggggggggggatcgagnccnctgatgttcatagtccagngcggnggaattcctgaggacagccgcgtgcgcttcgccagcagcggggtgggaggaaggacattaaaatactgcagaagtcaagaccccccaggtcgaacccagaccacgatgcgcgccccaggctgcgggcggctggtgctgccgctgctgctcctggccgcggcagccctggccgaaggcgacgccaaggggctcaaggagggcgagacccccggcaatttcatggaggacgagcaatggctgtcgtccatctcgcagtacagcggcaagatcaagcactggaaccgcttccgagacgaagtggaggatgactatatcaagagctgggaggacaatcagcaaggagatgaagccctggataccaccaaggacccctgccagaaggtgaagtgcagccgccacaaggtgtgcattgcccagggct

SEQ ID NO: 437 - DNA, 486 bp, Homo sapiens
  misc_feature (1)...(486): n = A,T,C or G
nggggattgagtccctagnccangtggaggaccctactccgtgtggtggaattcgagagacgaagacttcatgtgctgaaagctctgaagaagctaatgattgaggctgatgaggccccagttgttgctgtgctgggctcaggcggaggactgcgggctcacattgcctgccttggggtcctgagtgagatgaaagaacagggcctgttggatgccgtcacgtacctcgcaggggtctctggatccacttgggcaatatcttctctctacaccaatgatggtgacatggaagctctcgaggctgacctgaaacatcgatttacccgacaggagtgggacttggctaagagcctacagaaaaccatccaagcagcgaggtctgagaattactctctgaccgacttctgggcctacatggttgtctctaagcaaaccagagaactgccggagtctcatttgtccaatatgaagaagcccgtggaagaa

SEQ ID NO: 438 - DNA, 476 bp, Homo sapiens
  misc_feature (1)...(476): n = A,T,C or G
ccactgataccctggcagnggcnggaaaatgattccctcctganctgccctttctgcaatgaggcattgcaggtgtcttgtctggttctgtgtcttatctctgtgggatgggggtgtgcagtgggatctgtctgacatccgcgctctgtacctccccagagtccttagccaggatggaggctgttgtgaacttgtaccaagaggtgatgaagcacgcaggtaagacgctatccaccagccctttccttccttctttcccgggatccctggatctacggctgtcttctaatggagagttcctatgaaacccttgatcctgtgacctgacctcatgtctgtagacccttcaaatgaagacccttcgaaccctgtgactcttcctgattcctttgacccttattcatagatccccggatccagggctaccctctgatggggtcccccttgctaatgacctccattctcctgacctacgg

SEQ ID NO: 439 - DNA, 475 bp, Homo sapiens
  misc_feature (1)...(475): n = A,T,C or G
tgctattnagggaggggnggaatcgaagaccattggacagccgcgtggaattccttcccgccaggccccctccacccgatcgccgcgcgctctccgaaccaaaaggcgacctcacgaaatgcccctttgagctcaaaggctagttacccccaggggcccttccactctcggggacaggcgaaacctctttgtctctgcctcggcctgcggcccccagcccagcctccgcgctttccctccgccagtccttgtcaatcaaacctggtgccaaacgcggcagctgaagttttcagggacacatttgcttctccccttgaagaaccaggtacaaagcgcgatgtcctctctggggtcccatcagaacaaagaaacaggtctaaagaccctcattccagagagcatcctgccccatatccagaatgaaatccatgctcagagatgccaagaagaatctagacagacaggcctttctagg

SEQ ID NO: 440 - DNA, 484 bp, Homo sapiens
  misc_feature (1)...(484): n = A,T,C or G
ggggnaatcgaganccctatcncgnatcgaggaacactagtgccgtgtggtggaattccttcagtcaaatcaatgactgcctcccactgttacagaaactgccttggtcacaagggactctgggcttctggcttgggcccctgtcaacaaagaagggattcttgttgaagaatcgtggaaggaggaggaggaggctgggcatcatctctcagcctggaggaggagacgccatgccgggggctgggatcaccatgccccttgcccgtctcgcaccttgctgctgtctgtaaccccccagcacctcccgcaggcctggacgtcttatccctctccttagccccaggagcgtgtttcaggaactctcctcacctctgtgtcttgtgttttgcagtgatcagggccaaagcggtcagtgagaaggaagtggactctggaaacgacatttatggcaaccctatcaagaggatccagtatgagatcaagg

SEQ ID NO: 441 - DNA, 490 bp, Homo sapiens
  misc_feature (1)...(490): n = A,T,C or G
ncctggagttccnctcgnnannnncnnnnaactgatatccctagtccangtcgtggaattccggcggactttgaggaggctgagattcaggaggtccttcaggagactttaaagtctctgggcaggtatagactgcttggcaagatattccggaggcaggagaatgccaatgctgtcttactagagcttctggaagatactgatgtctcggccattcccagtgaggtccagggaaaggggggtgtctggaaggtgatctttaagacccctaatcaggacactgagtttcttgaaagattgaacctgtttctagaaaaagaggggcagacggtctcgggtatgtttcgagccctggggcaggagggcgtgtctccagccacagtgccctgcatctcaccagaattactggcccatttgttgggacaggcaatggcacatgcgcctcagcccctgctacccatgagataccggaaactgcgagtattctcag

SEQ ID NO: 442 - DNA, 476 bp, Homo sapiens
  misc_feature (1)...(476): n = A,T,C or G
gancgtcncgggggggnngggattgaaaaccactgatgacactagtacangcggnggaattcaatctgttcaccgagtgttggcggaactggatgatgagagtgagcctcctgagaacccgccaccggtccttatggagcccaggaagaaactccgtgtagacaaagccccactgactcccactggaaatcgacgtggccgtcctcggaagtacccagtgagcgctcccatggctccccctgcagttgggggcggggagccctgtgcagctccttgttgctgcctgccccaggaagagacagtggcctgggttcagtgtgatggctgtgacgtctggatccatgtggcctgtgttggctgcagcatccaggctgccagggaggccgacttccgatgcccagggtgccgggctggcattcacacctaaggtccaccgccaaggcaccatcggacacacctgcccatgagtagacaca

SEQ ID NO: 443 - DNA, 474 bp, Homo sapiens
  misc_feature (1)...(474): n = A,T,C or G
gggggttcanggagggnnggaactgagaccncttgagagccctgcggaannccagngngctgggcttgctacatgaagagcttcatggaccaggccctgtgggagctctcatcagccttgctcagactgaggtgaccctgggcggtaccatgggccaggcctcggcccacatcctgtgtcggaggccccgacagcgcccaactgaccagactcagagggtctccatccttccggacttcagcctggatctccaagaggggccctctgtagagtcccagccctactccgatcctcatatacccccggtatctaagaatgccaaggccagaacaaggaaatgtagtttagtatctggtcacgggagagaaaataaaagctgcagaggttgggggtggggtcagggattctagggatggggcagagtggcagcatcctttgtacctacaggtggatcccacaactcatttgaccttg

SEQ ID NO: 444 - DNA, 489 bp, Homo sapiens
  misc_feature (1)...(489): n = A,T,C or G
cccttgatatccntcngaannnncnnnnnactgatgtccctattcagtgtcgtggaattcgttttcaggccgggtctggcttggtcttcccccgtaaggaaatggccggggagctccaggggacccaggcgccgtcgcttcggcggagcctgggctgaccagccaggacagcggggtaaacccgaacaattctgcgcgaggtgtttgtactgctatttatttttgtgaagaggcaaatcatgcgctttgcaatgaaatctcgaaggggacctcatgtccctgtgggacacaatgcccccaaggacttgaaagaggagattgatattcgactctccagggttcaggatatcaagtatgagccccagctccttgcagatgatgatgctagactactacaactggaaacccagggaaatcaaagttgctacaactatctgtataggatgaaagctctggatgccattcgtacctctgagatcccatttcatt

SEQ ID NO: 445 - DNA, 480 bp, Homo sapiens
  misc_feature (1)...(480): n = A,T,C or G
cgangtaanagaggggggcngggattgaaaaccaactgagnancattagtaccatgcggtggaattcgatatggacgttccagagactataatggcagaaaccagggtggttatgaccgctactcaggaggaaattacagagacaattatgacaactgaaatgagacatgcacataatatagatacacaaggaataatttctgatccaggatcgtccttccaaatggctgtatttataaaggtttttggagctgcactgaagcatcttattttatagtatatcaaccttttgtttttaaattgacctgccaaggtagctgaagaccttttagacagttccatcttttttttaaattttttctgcctatttaaagacaaattatgggacgtttgtagaacctgagtatttttctttttaccagttttttagtttgagctcttaggtttattggagctagcaataattggttctggcaagtt

SEQ ID NO: 446 - DNA, 252 bp, Homo sapiens
  misc_feature (1)...(252): n = A,T,C or G
aananggcaaannnctacggggctttgaagaaaaggggataaagaacgacaggcctgaggaccagttgagcaaagagaaaaagaaaattcttttctccttctgtgaggtgtgcaacatccagctgaactctgcagcccaggctcaggtgcattccaacggcaaatcccaccgcaaacgagtgatgcagctgaatgatgggcagtccccaccacccgcccaggccagtcccatcaggaacagcagcacaggct

SEQ ID NO: 447 - DNA, 489 bp, Homo sapiens
  misc_feature (1)...(489): n = A,T,C or G
agcgagggccccatgagaccctanttagagagcggtaancacaagatatgctggcagaaaaagtcttggcagggaaatcaaaaattgaagactatttcccagaatatgcaaattatactgttcctgaagacgcaacaccagatgcaggagaagatcccacagttacaagagccaagttctttatccgggacctgtttttgaggatcagcacggccaccggtgacggcaaacattactgctacccgcacttcacctgcgccgtggacacagagaacatccgcagggtgttcaacgactgccgcgacatcatccagcggatgcacctcaagcagtatgagctcttgtgaggatgctgccgccaccctgcgacggagcggcgccccggactgcctgactgccagccccatgccatggtaggaggcagagactctagttccatctcgctgtcgtctgtcccgatctgtgtcgaccaccaagcctcttgctacn

SEQ ID NO: 448 - DNA, 481 bp, Homo sapiens
  misc_feature (1)...(481): n = A,T,C or G
ntcgagatccctagtccagtgtggaggaactcagaagacagtgcagccacctccgagagcctggatgtgatggcgtcacagaagagaccctcccagaggcacggatccaagtacctggccacagcaagtaccatggaccatgccaggcatggcttcctcccaaggcacagagacacgggcatccttgactccatcgggcgcttctttggcggtgacaggggtgcgcccaagcggggctctggcaaggtgagctctgaggagtagaggagttttagtttaaatggaaaaagcaaaggagaaatcagtaggtgaactcagccattagaggaagaactggcacgtagcctcttgctgtctaaggtctcgttccgtgctggagaatgcatatgagcccaagagtgtgggcctgagtggctgcttaagacgttttcgtttaactcaccccctcttttcctcacaagggaatggtggccgggtgtgn

SEQ ID NO: 449 - DNA, 448 bp, Homo sapiens
agcgcctcatgactcagttccactttaccagctgggcagactttggggtgccttttaccccgatcggcatgctcaagttcctcaagaacgtgaaggcctgtaaccctcagtatgcaggggccatcgtggtccactgcagtgcaagagtagggcgtacatagtacctttgtcgtcattgatgccatgctggacatgatgcatacagaacggaaggtggacgtgtatggctttgagagccgtatacgaacacagcgctgacagatggtgcaaaccgatatgcaatatgtcttcatataccaagcccttctggagcattatctctatggagatacagaactggaagtgacctctctagaaacccacctgcagaaaatgtacaacacaatcccaaggaccaacaccaatggattataggaggagtttaataagagacatcaatcaaaatccc

SEQ ID NO: 450 - DNA, 483 bp, Homo sapiens
  misc_feature (1)...(483): n = A,T,C or G
atcgagnccctagnccangtcgtagaccatagtccgtgtggtggaattcccggngcagagatggccagatctgcagcgagcgtgggcactgtctctgtgggcagtgccaatgcacggagccgggggcctttggggagatgtgtgagaagtgccccacctgcccggatgcatgcagcaccaagagagattgcgtcgagtgcctgctgctccactctgggaaacctgacaaccagacctgccacagcctatgcagggatgaggtgatcacatgggtggacaccatcgtgaaagatgaccaggaggctgtgctatgtttctacaaaaccgccaaggactgcgtcatgatgttcacctatgtggagctccccagtgggaagtccaacctgaccgtcctcagggagccagagtgtggaaacacccccaacgccatgaccatcctcctggctgtggtcggtagcatcctccttgttgggcttgcactcn

SEQ ID NO: 451 - DNA, 476 bp, Homo sapiens
  misc_feature (1)...(476): n = A,T,C or G
ggagatgcccgggtgannaacccaggtggcatgangtcctggaaanncacggggnacatggccctggacaggggccccttccctgcctggcagccaaggcagatagagagaggagacagagagaaacagcttacgcggttatttgtgcttattagagacttttagtactttcactaattttgctactgctatctagaaggcagagccaggtgtacaggatggaacatgaaggcggactaggagcgtgaccactgaagcacagcatcacagggagttggttaggcctccggataactgtgggcgagcctgactaatgttaggctccacaagaagtggaggagtagagtcttctctaaaccacccccaccccgcggggaaagggagactcccattcccggtctgctaagtagccggtgtttttccttgacactgaggctaccgctagaccacggnccgcctggcaacgggcatctttc

SEQ ID NO: 452 - DNA, 490 bp, Homo sapiens
  misc_feature (1)...(490): n = A,T,C or G
ctttggaaaccctcggnannnncnnnnnactgatnaccctaggccagtgccgnggaattccctgaggaccgcagcagtgcctttgccgctgttgcagaaggagaaggcttgcagtcgagccccggggcctggggacggtccttcctctgccagcccccgccctccccactcaggcgcacacctccctcactgacgcattttgccgcacaagctgtaacatggcggcagcgactgcgaaactagtgaaacaaagcaggttgtcccacatgtataaaatacagggcagctatttagttttctttacagagaatgatccttttaaggcttgtaaggccctctggtttggacaaaaaccctcagtagagacaagcgggaaggataattagctgaaagctatgatgatataaataaaaacagctctctatcccaatacgcacctttgtattttcaagaactcttctatttattaaggaaaatgtcacattgtgat

SEQ ID NO: 453 - DNA, 486 bp, Homo sapiens
  misc_feature (1)...(486): n = A,T,C or G
aggggggccccgggtgnnnnaancctacntngcattgatngtactgggaaannncctccatgnatcgctgcaccgcccagaacccactgggctccaccgacacgcacacccggctcatcgtgtttggtatggcgcgctcaactggggactgggagaacaaccgcaggggcgggtcctctctgggaggtttccccaggaggaagaagcagtaggggcccaaaattttgggcctaaatctcccaaatttgccctgagagggtgccccactgggaggcagggtcgctcagtggttacaactataaatcagcttcggactcagaaagaaccttaggcaaactgcttaacctctctcactttctccatctgcaaaatggggctgatactatccagctcccctgaaggttgtgtggctgcactgagacagtgcgtgtgatacctcacagcaggtgctgggtaaagggccattccttccctgagctctgaagg

SEQ ID NO: 454 - DNA, 432 bp, Homo sapiens
  misc_feature (1)...(432): n = A,T,C or G
attgangaccatttgacgtctggtggaattcggtgctggggcgggcgcaggactgcaggctggggctccgctccccggcgggagcccgcgcgtggttcccagcgaagtccccgcgcggctgggcccagcgtgagtattctccgcccgctgtcctccccctggaggcggcagcgcccgtttatttgaggcttctaatgtgaggaaaaacacggaatgacaagtgtgggaaagagcaagcactaaattactgtcagaaaaataaacggagtagcacagtgctgctcggtgatttacgggggcaattagtcaccaccccacggcgctgctgaggacagcacggcagcagacaagtcaggcccatgaggaagaagaggctttgcactgctctccagacaacttttcaaacaacaagagaggatatttgagcacatt

SEQ ID NO: 455 - DNA, 392 bp, Homo sapiens
  misc_feature (1)...(392): n = A,T,C or G
aaattaaaaggcagtttggcagtaagccacctcctgaatgccccagattttcataaaaggccctttgtggaagccacagaatgcaggtaaagctaggatttgaggcggtgctgattgagagaagataaagagaaaactactttttagggttttttctttttaacttacctcatggggtgtttaaagaattgaatgagtacagaaaacaagacttgctgtaattttggttggatgtgattccaggggaaatattttttcttaaatgaaaatataatagctaacccctacataaagcttactatgtgtttttaggggtttacaaatgtattcactcctttgtgtttcataagaaccctgtgaagtgagtactgctgctgccccactggacaggn

SEQ ID NO: 456 - DNA, 494 bp, Homo sapiens
  misc_feature (1)...(494): n = A,T,C or G
gtggttatnnnaatcgagaccntatcgagngtgcnggaattcccgagtggctcaacctcatcttcagtggtttctttttggagacaggcccttttggtggttccatgagtctggttactacagccaggctccagcccaggttcaccagttcccctcttcttgtgagactggtccaggcagcccttctggacactgcatgatcacaggagcagccctctggcccataatgacagccctgtcttcgcaggtggccactcgggcccgcagccgctgggtaagggtgatgcctagcctggcttattgcaccttccttttggcggttggcttgtcgcgaatcttcatcttagcacatttccctcaccaggtgctggctggcctaataactggcgctgtcctgggctggctgatgactccccgagtgcctatggagcgggagctaagcttctatgggttgactgcactggccctcatgctaggcaccagcctcatctatt

SEQ ID NO: 457 - DNA, 496 bp, Homo sapiens
  misc_feature (1)...(496): n = A,T,C or G
tgggggnnnnaatgagnttttgattactgtggcgagagtggtggaattctcaagaacagctgttactcaagaagatgtatttaatgcttgacaataagagaaaggaagtagttcacaaaataatagagttgctgaatgtcactgaacttacccagaatgccctgattaatgatgaactagtggagtggaagcggagacagcagagcgcctgtattggggggccgcccaatgcttgcttggatcagctgcagaactggttcactatagttgcggagagtctgcagcaagttcggcagcagcttaaaaagttggaggaattggaacagaaatacacctacgaacatgaccctatcacaaaaaacaaacaagtgttatgggaccgcaccttcagtcttttccagcagctcattcagagctcgtttgtggtggaaagacagccctgcatgccaacgcaccctcagaggccgctggtcttgaagacaggggtccagttcac

SEQ ID NO: 458 - DNA, 482 bp, Homo sapiens
  misc_feature (1)...(482): n = A,T,C or G
aagcggtnnccncaccaggaccattcgtagngccngcaancccccgtgagcgggcggtcaagtgtatatgactggcctacctcttcctacccccattttgtgacccagccatgtgacatacactggagaggggcccgtcccttgctccgtcacacagccgggacagtgccactccccctgcacttttatactagaacgaggaaaagcgagctaccctgctgaactggcccaactgtattctgttctgtcctgtccatcttacctactgctttttatcctgggtacccgtgctcaaggacctttggctgtttaaggacacattcaaatgcctaaccatagcgttcagtgttctcaacactgggccttagtttaaattttggttccagcttctggcccgtttgccctgaggtcccctgtgtattttagccgcatctctctgtgaagctcccagtgtgctttgcacagctccttgtctttgctat

SEQ ID NO: 459 - DNA, 483 bp, Homo sapiens
  misc_feature (1)...(483): n = A,T,C or G
agcggtgccccccaggaccatggaagagcgnggaanncgctcctcacggacgccgtccctcctcggcgcggcctgagcgcccggcccgaccccggtcatggggtgctgctacagcagcgagaacgaggactcggaccaggaccgagaggagcggaagctgctgctggaccctagcagcccccctaccaaagctctcaatggagccgagcccaactaccacagcctgccttccgctcgcactgatgagcaggccctgctctcttccatccttgccaagacagccagcaacatcattgatgtgtctgctgcagactcacagggcatggagcagcatgagtacatggaccgtgccaggcagtacagcacccgcttggctgtgctgagcagcagcctgacccattggaagaagctgccaccgctgccgtctcttaccagccagccccaccaagtgctggccagtgagcccatcccgttctctgattn

SEQ ID NO: 460 - DNA, 459 bp, Homo sapiens
  misc_feature (1)...(459): n = A,T,C or G
catgagcccctcatgagactctggaagngcggggaatttccgtgaccccggtctccctcctggccgacccagccttcatccgggcctgggtgggcggtgtcggcaactacaagttaggtgggaattatgggcccaccgtgttagtgcaacaggaggcactcaagcggggctgtgaacaggtcctctggctgtatgggcccgaccaccagctcaccgaggtgggaaccatgaacatatttgtctactggacccacgaagatggggtgctggagctggtgacgcccccgctgaatggtgttatcctgcctggagtggtcagacagagtctactggacatggctcagacctggggtgagttccgggtggtggagcgcacgatcaccatgaagcagttgctgcgggccctggaggagggccgcgtgcgggaagtctttggctcgggcaccgcttgccagaacn

SEQ ID NO: 461 - DNA, 480 bp, Homo sapiens
  misc_feature (1)...(480): n = A,T,C or G
aggagctgcnttcgagatcatattcagtgcggtggaattccacttttcttgatttcccccaggaaatcaagcgctgcttctcagctcctgtggttttagtatttatatatctgtatcttctttgtagaaatttatttatttttgaataagtaatacctgcctggtacaaaatttaaaaggtacgggagggcgcaagctgcaagggaaggcctgctcctatgccgaccccagaggcagccactgttaccaatttcatgtgtattcctttaactctgttttaaagtaagtctctgaaaactgttcatttccttttgtcagtatttgttgctgaaaacctagaaaaacccagaaaatataatgaaataaaaactacaaatttcacaacccagaaaactgctggtaacagatttggtgtctttcctgcaattgttttaatgctatgtaggtacacatatatttttttctttttttctttttttt

SEQ ID NO: 462 - DNA, 477 bp, Homo sapiens
  misc_feature (1)...(477): n = A,T,C or G
nggaggcacgggccggnnnnnnaaactgactgcatagcatcgacangngcnggaannnggnagagcttctcctcggggagtcgaagctggagcagtacctgaaggaacaccccctgatgttgggggccagtccccgaagccccaagccgcagctgactgaggtccgcaagcatttgaccgccgccctggaccgagggaaccttaagtcagaattcctacaagaattcaatctgatcatggccaagttgaattatgtggaaggcgattataaagaagctctgaacatttacgcccgggtgggcctggacgatctgccactgacagctgtcccgccctacaggctgcggttgatcgcacaagcctacgctaccaaaggactttgtttgtagaagctgcctatttcttcttctaccagtaatctccatgtggaccgggaacaggatgtcatcacctgttatgagaaagcatgggacatcg

SEQ ID NO: 463 - DNA, 449 bp, Homo sapiens
  misc_feature (1)...(449): n = A,T,C or G
nactgatgcatncatcggcnggaacncncncacaggngaagcatttgtatatcactaaggagctggagcactaccctctcgagagactgggctcggtgaggagatctgtcaacctctccaggaaggagacagatatccggcccagcaagctcctgacctggtgccagcagcagacagagggctaccagcatgtcaacgtcaccgacctgaccacatcctggcgcagtgggttggccctgtgtgccatcatccaccgcttccggcctgagctcatcaactttgactctttgaatgaagatgatgctgcggagaacaaccagctcgcatttgatgtggccgagcgagagtttgggatccctccagtgaccacgggcaaagagatggcatctgcccaggagcctgacaagctcagcatggtcatgtacctctccaagatctacgagctcttc

SEQ ID NO: 464 - DNA, 219 bp, Homo sapiens
  misc_feature (1)...(219): n = A,T,C or G
angncatcatgagcatccgcgtgcagggggagcccaagcctgtggtctcctggctgagaaaccgccagcccgtgcgcccagaccagcggcgctttgcggaggaagctgagggagggctgngccggctgcggatcctggctgcagagcggggcgatgctggtttctacacttgcaaagcggccaatgagtatggtgctcggcagtgcgaggcccgcttgn

SEQ ID NO: 465 - DNA, 483 bp, Homo sapiens
  misc_feature (1)...(483): n = A,T,C or G
tggaaggccnnnnncccctgaaacttgatactcacgagnaanccaangaggtgcggctcggcttccatgggcctaatttacagatagggcggtatttctgtcccttaaccgaaagtgggatacagaggacgacggtgttaggcgcctgtgtaggagtaaaatgtgtttattttgcattcaacaagagctcctgcattgcagctattttgcatatgatttgcatcttacgaagaatttgtggcaaaaaaaagctgggcgtgcgccgtaggaacctcctgctgagacgcttccggtagcggcgcgtgacccgacaggtctttcacctacctaccgcagctcccacaaacacgagaagttccagcaagttcgccacttccggttctcctggctatccaatagcatcgagtggagcatccccggaagtgaggcagcggaggacgacctttttccggttccggcctggcgagagtttgtgcggcgacn

SEQ ID NO: 466 - DNA, 475 bp, Homo sapiens
  misc_feature (1)...(475): n = A,T,C or G
naaggtgccccgntggnnnnnnaattgactagcatggccattggcnggaacncgatttgtatgccatgaactttgagccgagggccacagacaaagatatcactggtactctttctaatcctgaggttttcaattatggagtggaaacccacgaagcctacaagcaaaggtctctggctagcgacatcactgatgagcagaaaaaggttcgggaggctgacctagtgatatttcagttcccgctgtactggttcagcgtgccggccatcctgaagggctggatggatagggtgctgtgccagggctttgcctttgacatcccaggattctacgattctggtttgctccagggtaaactagcgctcctttccgtaaccacgggaggcacggccgagatgtacacgaagacaggagtcaatggagattctcgatacttcctgtggccactccagcatggcacattacacttctgtgg

SEQ ID NO: 467 - DNA, 472 bp, Homo sapiens
  misc_feature (1)...(472): n = A,T,C or G
nnaaggccgggcctgnnnnaaacggatagcaacgcatcgngcnggnacnntncaccgntgccacacgcaggtttaaatgatgagaaccgatcctgctcccggacctgcagttcgtatcagctgggctccgtgggagccaggtccctcagtcagcggcagaggacctgcctgattccctctattaacgcatctgaagtttgctggaaaagaggcctatctgcgggtgagctcttggcccctatccagggagggtttgctacttctgtgaccagagttacacagaaaggacctcgtgtggcctcaagggtgtctcggccttttctgttggcctggaaagggaacagattttgtttccaaataaaagcatccatcttcaagtccaatttaacaaacactcccaaagaaccaatgcagaggtcagcatagaaactaatcaagattcacaggaaatccaagttcaacctgaaaggcg

SEQ ID NO: 468 - DNA, 463 bp, Homo sapiens
  misc_feature (1)...(463): n = A,T,C or G
nattgaggttcgtatgaccctactccatgcggtggaattccatcctcccagcaaggtcagccaataactgtggggatggagtggagccgtgagtggtggcagaggcctagactcccaccccacagggcggtcccgggcaagggctctccatctgcaaagtgcagctctggcccctgctctaggctgctatggctctgggaagccctcctcctgccccttctgggccgctttctctggggtcccccttgccatgtgctatgtgcccaggccgtttctcagggctgcccgctgtgccctactgtgacctcagccactacaacaaacccgagagacctggagggagctcaccaaacaggtcagggctgatgatgttcaagcgcatgaagacagtcctatggacttcctggaggagaaagagagagcagtatgtggcacctttgggaggcggcttccaggtttactc

SEQ ID NO: 469 - DNA, 480 bp, Homo sapiens
  misc_feature (1)...(480): n = A,T,C or G
nnggggtgggggccnggnnnnnnnaaattgactagcantactctanggacngngcnggaattcacgtgctgcccatcggcgacgcggacgcggctgcagcagtgaccacgtcgtacagacaggaattccaggcttggactggagtgaagccctcaagatccacaaagacaaaaccagcccgagtcatcacaacccacactttgggatgggacagcagccctggggccggcttccaggcctcagctccccggattctcaacgtgtgactgcctgcaccgtgacaccatggctgccgacaggacagggctggggagcagcctcaggacccactgccgcggggctgggcgagagcatggcatgggcccctgcgggagggcacagcccctctcaaagctgtcaccagggccaaagtgctggtgtggagcagatgcactgatggacttggcacacccagctcagcctcaagcatcctcttgagaa

SEQ ID NO: 470 - DNA, 469 bp, Homo sapiens
  misc_feature (1)...(469): n = A,T,C or G
nnggaggccgngctgnnnnnnaattgatagcgtgcgttgngcgggacntccgggctcacagggcaggccttgctggggtccagggctgttggaggaccccgagggctgatgagcagccaggacccgcctgctcccatcctcacccagatcaggaaccagggcctccctgttcacggtgacacaggtcagggctcaaagtgaccctcggctgtcacctgctcacagggatgctggtggctggtgagaccccgcactgcacacgggaatgcctaggtcccttcccgacccagccagctgcagggcacggggacctggatagttaagggcttttccaaacatgcatccatttactgacacttcctgtccttgttcatggagagctgttcgctcctcccaaatggcttcggaggcccgcagggcccaccttggaccctggtgacctcctgtcactcactgaggccatcagggc

SEQ ID NO: 471 - DNA, 475 bp, Homo sapiens
  misc_feature (1)...(475): n = A,T,C or G
ggggaaatcgagacccctngnannatcgagacctctatccatgtggnggaattcgaggctcgccagatcctggaccagacgccggtgaaggagctggtgagcctcaagtggaagcggtacgggcggccgtacttctgcatgctgggtgccatatatctgctgtacatcatctgcttcaccatgtgctgcatctaccgccccctcaagcccaggaccaataaccgcacgagcccccgggacaacaccctcttacagcagaagctacttcaggaagcctacatgacccctaaggacgatatccggctggtcggggagctggtgactgtcattggggctatcatcatcctgctggtagaggttccagacatcttcagaatgggggtcactcgcttctttggacagaccatccttgggggcccattccatgtcctcatcatcacctatgccttcatggngctggtgaccatggtgatgg

SEQ ID NO: 472 - DNA, 480 bp, Homo sapiens
  misc_feature (1)...(480): n = A,T,C or G
gggtaccnnaggaggccacctgaaaccannttaaagngcccgcanaaacncnaanntaaggaacaccttgttctgcactagctccatccctagagccctgcttctccaggcccgagagaccagcaaaccgtcgccctccgtcccgtggggccccacattcccccactgcctcacagcctcagtcacccggagacccgacgtccttggaggagcatggtggcgaggagccgcccgaggagcagccacaccgagatgcaagcttgcatggattatcacagtataattcactgtaatttgcataaccacaccatcaccatgaacaaaactctgcccaacaggagagatctagttttctcaaggtcaaagaatgttttttaaaaacacaaagctgctgaatgttcaacctgtgaaactgagatgtttctagaatgaaacagtaaatgtgcctggaataacttaatttttttcatagctcagaaa

SEQ ID NO: 473 - DNA, 480 bp, Homo sapiens
  misc_feature (1)...(480): n = A,T,C or G
cgggtgcccanagttanaaaaactgaaaccccattgangatcgtngcaaanccaannnannnnggnaaaggatgctgagtccggagcgcctagccctaccggactactagtatctggctcagcgacatgtcctcacctacatggaggatgcagtgtgccagctgctanaaaacagggaagatattatccaatatggaattgccaggttcttcactgaatattttaacagtgtatgccagggaacacacattctctttcgagaattcagcttcgtccaagccaccccccacaatagggtatcatttttacgggccttctggagatgcttccgaactgtgggcaaaaatggcgatttgctgaccatgaaagaatatcactgtttgctgcaattactgtgtgctgatttcccgctggagctcactcagaaagcagccaggattgtgctcatggacgatgccatggactgcttgatgtcttttt

SEQ ID NO: 474 - DNA, 476 bp, Homo sapiens
  misc_feature (1)...(476): n = A,T,C or G
cggacaaattgcagnccntnnnnnnnatcgagacctctatccatgtggtggaattccctanaacatggcacactctgctggtcctttaaactttacagaggctggagaaggcagctcatgtctgagtaagtctgcatttggaaaacaacatgcacacatgcgttaatgcaatgtttatggagcatgctctgtgtgctcagaagcacgctacggagctgggaagatgacatgaatttatccttataataccctgggaggtgggtactaactgtcccataattccctggatttatatgaaaagcccagcatttacatttcttcttgttctcactgattttttttaatttttttatttttttttaatgcatggaacaggccaggcacggtggctcatgcctataattccagcactttggagggccagggcaggcggatcatctgaggtcaggagttcacgcaaatcagggggcccgtga

SEQ ID NO: 475 - DNA, 442 bp, Homo sapiens
  misc_feature (1)...(442): n = A,T,C or G
ctgaaagccatccaggacatgttccccaacatggaccaggaggtgatccgctccgtgctggaagcccagcgagggaacaaggatgccgccatcaactccctgctgcagatgggggaggagccatagagcctctgcctcgatgccgttttgcccccgctctttggacacgccgacccggcgctccccaaggaatgctgtcccaacaagattcccgtgaaagagcacccgtgtcgccccctcccgtggacttctgtgccgccccgtccacacctgttcttgggtgcatgtgggttttcggttcctggcggtccaggacggngcggnggctcccctcccatctcgtgctgggaggtctcagcgcgctctcctgtccctgggacgtgcgtctctccttctcatgccgttctggaaaatgctcttgctgtagagagcagctgcttct

SEQ ID NO: 476 - DNA, 456 bp, Homo sapiens
  misc_feature (1)...(456): n = A,T,C or G
catgagacactattgaggcgctggaancacannatatttttcccccttgaatctgctaaagaaaacagatcctgacttagcttacttgaaataagcagggcagggagccctgttttggaagagacagactgtggaagagattacaaacaaggcccgaggctgcacgaatgatgagttttgtgtatataatgttaatgtccaccgccacttccctaacgactatgagatcttttttttgaagatcctcatggaaggttgtacagagccccacatttgaggggaagtcctttcagttgatatgagatctctttaacacccctcagtctatgtaggaaatgccttgtgatacatagagaaccctcagcttctctctgcctctggaggaccaaggtctttcctgacagtcggagacacaccttgatgtatgttaataaaagcatttcatgctgtggggcg

SEQ ID NO: 477 - DNA, 462 bp, Homo sapiens
  misc_feature (1)...(462): n = A,T,C or G
attgagaccttagcagngtggggaactccatggcggngacgaatgggaacaggagatccgtctaactgagcaagccgtccaggccatcaacaagctgaaccccaaacccaaattcttcgttctgtgcggcgacctcatccacgccatgccagggaagccgtggcggacggagcagacggaggacctgaagcgagtgcttagggcagtggacagggccatcccactggtccttgtcagcggcaaccatgacattggcaacacccccacggccgagaccgtcgaggagttctgccggacttggggagatgactacttcagcttctgggtcgggggcgtcctgttcctggtcctcaactcccagttctacgagaacccctccaaatgccccagcctgaagcaggctcaggaccagtggctggacgagcagctgagcatcgcgaggcagcggcactgccagcatgn

SEQ ID NO: 478 - DNA, 465 bp, Homo sapiens
  misc_feature (1)...(465): n = A,T,C or G
atcgacccccctattgatgacactaggccagngcggnggaattccgtttgaggcaggtattcgggtgcagatccacagccaggaggagccgccctacatccaccagctggggttcggggtgtccccaggcttccagacctttgtgtcctgccaggaacagcggctgacctacctgccccagccctggggcaactgccgcgcagagagtgagctcagggagcctgagcttcagggctactcggcctacagtgtgtctgcctgccggctgcgctgtgaaaaggaggccgtgcttcagcgctgccactgccggatggtgcacatgccaggcaatgagaccatctgcccaccaaatatctacatcgagtgtgcagaccacacactgggtccgtgctgcctaccctttcctacctctccatcagcctcttcatgtctctgtccactcttctcctcactgtcttggatcct

SEQ ID NO: 479 - DNA, 494 bp, Homo sapiens
  misc_feature (1)...(494): n = A,T,C or G
agtgcgaggggcccattgaaaccctcactgagancctagtcagngncgtggaattccacagaggtggaagattgatcttgccaagagtgagggcagatgtcttcagccaggactgtcctgagccgcaaaatgtcaaagctggagctatagaggtagccctaaaggcaactagaagagcatcagggctgctctctgaggagctgccccaccagccatccttgaagagacaattcagggcagttgatgaatatcagggctgagatgtggggagacttccgtttttatccagctcttttgctcacatcgcgtaaccttgggaaagctgattaaagtcgctgatcatcctcttcctcatctgtaaatgaagaaagtaggccctgtctacctcacatgcaggtctagggtgaggattgaaaaaaatagtggtgatgagggctttaaccaagtgcaaagcggcatgaatgcaaagtattgttctgcagcccagttctgag

SEQ ID NO: 480 - DNA, 481 bp, Homo sapiens
  misc_feature (1)...(481): n = A,T,C or G
ggtgggtccnccactgagaccnatagaagtgcgctggaattcgactgcttgagcccgggagtttgagaccagcctgggcaacatggcaagacccagtctctggaaaaaaataaaaggttagccacgtgtggtgtgcatgcaggtggtcccagctacttgggagactgaggcggagggatctaaaggtcaggctgcatgattgcaccaccgcacaccagcctgggcgacagagagagaccttgtgtcaagaaaactacctacataacattcgaatataaaaaaaagaataaaaaggaatatcaccgccctacataatattttcaatctttggttttcaatgaggctaaaaatcttgtccagcattttttttggactctgaagaactgatgagaacaaagatcacatgaggtaatctgagtaaaagacatggagcatgttgntcttatcagttcaggatctatgcttagaatagctggttgtc

SEQ ID NO: 481 - DNA, 462 bp, Homo sapiens
  misc_feature (1)...(462): n = A,T,C or G
aatggagaccacattcgagngccgtggaannccgcngaggcaggtattcgggtgcagatccacagccaggaggagccgccctacatccaccagctggggttcggggtgtccccaggcttccagacctttgtgtcctgccaggaacagcggctgacctacctgccccagccctggggcaactgccgcgcagagagtgagctcagggagcctgagcttcagggctactcggcctacagtgtgtctgcctgccggctgcgctgtgaaaaggaggccgtgcttcagcgctgccactgccggatggtgcacatgccaggcaatgagaccatctgcccaccaaatatctacatcgagtgtgcagaccacacactgggtccgtgctgcctaccctttcctacctctccatcagcctcttcatgtctctgtccactcttctcctcactgtcttggatccttccctcccan

SEQ ID NO: 482 - DNA, 467 bp, Homo sapiens
  misc_feature (1)...(467): n = A,T,C or G
cattgacccccctttttgagacactaggccagngcggnggaattccccaggagtgaagaccttgacaatgaggatacaaaggggaggtatggtggaaagtcaggaaaggcatctcgtccccaaatcagtgggactggctgggaggccctctgtgagactgagggtcattccagggagccaagagggctttcccacaccagcaccccaccccccactccccactctctgcagccgcccgcacccgggcctccgtggccgtgtcatcctttgagcatgccggcccctcccttcccggcctttcgccgggagcctgctccctgcctgcccgcgtcgaggaggaggcctgggatctggacgtcaagcaaatttccctggccccagaaacacttgactcttctggagatgtgtccccaggaccaaaaaacagccccagcctgcaacccccccaccctgggagcagcactcct

SEQ ID NO: 483 - DNA, 473 bp, Homo sapiens
  misc_feature (1)...(473): n = A,T,C or G
cggggtttgannccntnnnnnnatgagacctctatccatgtggtggaattcgaatgagacaggtattgatgccctttggggaggaggtagtcaaagaaggcctaagggtaaatgattcctgagaggcttgggatgttaaaggatggatggtgttcaccaggtggttctgggacagggtgttgttcagggcatggggaggccttgaatgagatgggactgcatgtgaaaagggaggatgaaagataaagcatcacatggtccaagagaagttagacaagttggtgttaaatcataaaggatggattttgggaaatggcagaaaatgagcaggaagcagtaagtaggagccagataataagcagttgtatcaataatcacttattcatcccatgcctaggaattgctgaccactcccttctagaaacacatttctcctttgcttccacgataccatattctgctgggtttcctct

SEQ ID NO: 484 - DNA, 477 bp, Homo sapiens
  misc_feature (1)...(477): n = A,T,C or G
gagttcccaggtccnaaaatgaaaccttgatcacntgggaaanncnggaccttatggaagcaaagactcttggaactgtaacgcccagaaaacctgtcttatctgtcagtgcaagaaaaattaaggacaatgcggctgattggcacaatttaatcctgaagtgggaaaccctcaatgatgcaggttttaccactgcaaataatattgccaacttgaaaatcagtttattgaataaagacaagatagaactagacagcagcagcccagcctcgaaggaaaatgaagaaaaggtgtgtctggaatataacgaggaactggagaagctgtgtgaggaactgcaggccaccttggatgggttgaccaaaatacaggtgaaaatggaaaagctgtcttcaactaccaagggaatttgtgaactagaaaactaccattatggggaggagagtaaacgaccccctctgttccacacgtggccta

SEQ ID NO: 485 - DNA, 486 bp, Homo sapiens
  misc_feature (1)...(486): n = A,T,C or G
gaaggtcccagatgtccnaaaatgagancctagnnancgtcgtgaagnngcgtggaattcggtattgctgtaaagtagtaaaccagctcttctcatcaatgttctcactccatgttctcactttaaacagtatgaatgggatgagtttgcaatataccacacacacacacagcttttgattatacccattagggacccaagccttgggacacagggaccagaaaatgacaagagcatgcaggcagtagtaaactctggttatacttaaaatgggaacagaaatgtatgcctatgatccagactgatcatataaaaccatggatcctgaaagtacgttccctctttacaagccttaatgactggcatcacgcacaaataggcctttcagcttctgaacgcagatattttcaaggaactctgaggcccaggagagcctaagtttttctccacggaagggcaaactactagcctcccccgcttcccctc

SEQ ID NO: 486 - DNA, 463 bp, Homo sapiens
  misc_feature (1)...(463): n = A,T,C or G
natcgagaccacattgaagngcggtggaatncaacgatgatccctatttccatattacaaaaaccatcgaggcctcccgtgtccatctctttgatatcatcacccagtaccgtgccatcttctcagacgaggacccactgctgccccctgccatgggtgagcacactgtgaatgagagtgccatcttccatggctgggtgctacagaaggtctcacaattcctgcaggtgctggagaccgacctttaccggggcataggcggccacctggactctctgctgggccagtgcatgtactttgggctgtccttcagccgggtgggagctgatttccggggtcagttggctcctgtttttcagcggttggccatcatcactttccagaaagcaattcaggaaacagtggataaattccaggaagaaatgaactcctacatgctcatatccggtccagccatgctcgg

SEQ ID NO: 487 - DNA, 475 bp, Homo sapiens
  misc_feature (1)...(475): n = A,T,C or G
agggtgcnnaatcgagactctagtcactgtggtggaattctagcacggcggctgctctatagagggcgcgctaagctccccatgcccaacctaaccgtgcaggcccatgcctgcccatccaccgcacacgaccaccctgtgcattccttgagccgcaccgagtactgctatgacttattaatctaaatgcagccccctgtctgcgtcccaagctgcacacctgcattcgggtagcagaagccccagctctgctgtgtcccctggctgacatacctggagggttccaaggcagaagtggccagcccctccccctcagtatgggctcctccatcctctgtaggggaggggccatagcttcctcccagtgacccatgtgctccctgtacacccaagcgtctctggcaggattgaccacacccccaccggagggtcaaggctcccagggagcgtggcaagccagaccggaggcctgcct

SEQ ID NO: 488 - DNA, 432 bp, Homo sapiens
gctcctcggaggaggcgcgcagggaggccctgcggaagctggggctgctcaaggagagttcgtgagggccgcgcgggctccagtccaccctgtttctccccaccctgaagagagggtgaaagagtcgctgcacccaggagctgtttggtctaaaatggaagtgacagcgggagcccctgccctctgtggcacatcggagtctagaggtgcctggctggggcctcctggctgagcacgcaccgcaagctccagccaccggcacagagaactcttccctaaaggaatctggccgagggcttgtctcccttttcccaagaactgagagagagagaataacctgttagacccataggtttccgtgatgtgtaaatgccatcttttgggggttgggaggagtaggactggtctgattatcattcttgagtctcatct

SEQ ID NO: 489 - DNA, 487 bp, Homo sapiens
  misc_feature (1)...(487): n = A,T,C or G
agagcccagccnaatcgagacccattggacagtctgtaggaattccgacctcatcacagactacaataaacaacacaaggcagaactgaagcccttaagagccgattatctcatctccagagtcgtgactgcgctggagaaactgatcagagagtttcaggacacagggcccaacagcgtccttcccctttattaccgatactgggtccacagtggtcagcaagtccatctgggcagcgcagagggaccataggtgtccatcgttggcctggacgattctggctttctccaggttcaccaagaaggcggcgaggctgtgactgtgcacccggacggcaactgcttcaacatgctgagaaaccttatcctccccaaacggaggtaatgccgggcgtgcccgacacgcggttgtctgtccgtgcccatgcatctggaaatgtaatttagagntgtaagagaattgtcttttcctccaatgcattagttn

SEQ ID NO: 490 - DNA, 481 bp, Homo sapiens
  misc_feature (1)...(481): n = A,T,C or G
ggacgaccnnnaatgagacccattgagagcgtagtccangnggtggaattcaggcaagccaggcagcaggcgacccaagaccgtccgcggaggagacaagcaagctgtcatgttataagcagccctttgaggggtccatgtgatgtcaaggaatgaagtctctagccaacatttaatgaggaactgaggcccaccaacaaccttgagtgagcttggaagtagctccttcagcatcagttgggtgtcgagatgactactgacagcttgactgcaacttcatgagagtcttctggaccagaaccactcagttaagtggctcccagattcctgatcctcacaaactctgagaaataatgaatgttggttgttttaaaatggtaaattttgaggtattatgttatgtggcaatagatagctaatatataaattatttgaatcaaacaatatgttaaattaaagctcagaagaataaacatctgtg

SEQ ID NO: 491 - DNA, 484 bp, Homo sapiens
gagccccgggtttcgagacctttcgagaccatagtcagtgtggtggaattcctccgcggcacttctgccgctgcgcctgcttctgcaccgataacttgtacgtggcgcgctatgggctgcacgtgcgcttccgaggcgagcagcagctgcgccgggactacggcccgatcctgcgcagccgaggctgtgttagcgccaaggacttccagcagctgttagcagagcttgagcaggaggtggagcggcggcagcggctggggcaggagtcagcagctaggaaagccctcatcgcgagttcctaccacccggcacggcctgaggtctacgactcactgcaggatgcagctctggcccccgagttcctggccgtgactgagtacagcgtgtccccagacgcagacctcaagggccttctccagcggctggagacagtatcggaggagaagcgcatctaccgggtgcctgttttcacagcgcccttctg

SEQ ID NO: 492 - DNA, 492 bp, Homo sapiens
  misc_feature (1)...(492): n = A,T,C or G
agcggtaacattgagaccactgngaattgagcaccatacanagngccgnggaatacctgtaatgaaagaaacgccttttgcctcctgccatagatatgaggcctcacagccatgtggaacttcttcaggagagaattaacatccaatggattcccagaaaacttttccctcgatgtaccagcaaacacctacaatgccctgaaaagccgcctctgcgaccccaatgcagatcacacgtcctgtcccagcccctgcagcctccacgcggcgggtgcactgccaggcacgggaaggcagcgctggcgagtagaactggcccatctcgcagataggaagctgagcctcagggacgtttcacgccttcgtcaacgtggtgagaggaggagcgggattgccgtgaangtggtgagaggaggagcggngtttgctgcccgacttcagggatctgtcaccctcgtccagcagggttggttctttccgaggctgggaggg

SEQ ID NO: 493 - DNA, 484 bp, Homo sapiens
  misc_feature (1)...(484): n = A,T,C or G
gatggccccgnnatcgagaccattgtggagtctggtggaattcgaggccaggcccagtggcttacatctgtaatcctagcactttgggaggctaagatgggagcactgcttgagaccaggagttcaagaccagcctgggcaatattatgagaccccgtatctacaaaaaatttttttaattagctgagtgtggtgacacgtgcctgtagtcccagctacttaggaggctgaggtgggaggatctcttgagccctgggagttcaagactgcagtgagctatgatggtgccactgcactccagcctgggcaacaggtcgagaccctgtctctaaaaataaataagtaaataaaagaaatagatggggagagtgtggaacagaggtgtcaacatcacctccgggtgaagggatttcaggagcacgttcttttctgtacagagaagatagttctttttttttggtcaagaaattcaaccattagtttt

SEQ ID NO: 494 - DNA, 493 bp, Homo sapiens
  misc_feature (1)...(493): n = A,T,C or G
ggaggggcnggnnaatcgagacccttacgtagaccactaggccagtgnggaggaattcctgtgaaacacgatttattatataaaacaaggtgcatccaaattcagtgtcagaagagctttgtatttcaagggctaaggactggaccttctcccttaaaacctccttacccaacccttgctaaggactcaggcctggggcagaggctgtcagtctctaaagaccccagccctggaccaggacggggagaacaagtttggcgcataacgtggggctagggcagtgggtcaggcaccatcccttctgcaagtggccacaggtcaccacagtgggggaaggtggggagcttgaacctccaaagataggttcattgtaggaaaagctagaccaatgccttgggtagaaacacccaaatccctctacaacaactaaagcaagaatgtggaacccatcgaaatcttcccccaaaatgccaaccataaaatagattctacc

SEQ ID NO: 495 - DNA, 506 bp, Homo sapiens
  misc_feature (1)...(506): n = A,T,C or G
gacgagccccccnnnnnttttngagaccccttngnanngngnnnnnntttcgagtnccctatcagtgtggtggaattcgtgcacactgtgtgtgatgaatctcgccagaaaggctcctgaggtcccaggttggcacttctccctgcagccattgtagaagatctgctggtccttgcaggcaaagctacagccagaatgtccgtttgaaactcctagctcatctgtcaccgagcttcatccgaatgtgccacggagcttgctctccacttcctccgtgcagcggccctgccacagccctccctcggcacactttgaccctttgtaggattggaattagcaggactcggctatttaaagcaccagtctggggtcgcctgggcccctgctgaccccttcctccagagcagccagcccagcccgggaacaagacggacttcctctcccttcggactcacagcctttgcagagtcaagctccacttgaagctcactcagtaatatcctttn

SEQ ID NO: 496 - DNA, 489 bp, Homo sapiens
  misc_feature (1)...(489): n = A,T,C or G
agggcccngncnattcgagaccaatgtgagatccctatgcagtgtggtggaattcacctgaagtacgtacttcccttctgttgctgatattgtcatgagcagttccaccctcagtgtttacctctatgctttgaaatcttctctcaaacgcatattcattcctattttttgtaccctttgggattcctcaatctcatatacatctttccatttctgacctaatcccagcactttgggaggctgagccgagcatagtggggtgtgcctatagtcccagctactcaggaggctgaggtgggaagatcacctgagcccggaggctggagtgcagtggtgcgatctcagcagctgtgtttttaagaagtgtttctactcctttccttactcaatcctgaccctgtaaaattcccacttgctggctgccccctccccaaggaaaggccgcccctctgcccctccacagtgggtggtgcccagagtcaggggacn

SEQ ID NO: 497 - DNA, 502 bp, Homo sapiens
  misc_feature (1)...(502): n = A,T,C or G
cgccagcccccnnnntttaggaaaccctnnnannnnnnnnnnnttttgagancactatcagagtggaggaattcccgctgtgtcctggaggcggcaaagcacaactttcctccgcttctctcctcggagccgggctcctgctgcagcccccgacgccacctccgctgctgctgctgctcttcccgctgctgctcttctccaggctctgtggtgccttagctggaccaattattgtggagccacatgtcacagcagtatggggaaagaatgtttcattaaagtgtttaattgaagtaaatgaaaccataacacagatttcatgggagaagatacatggcaaaagttcacagactgttgcagttcaccatccccaatatggattctctgttcaaggagaatatcagggaagagtcttgtttaaaaattactcacttaatgatgcaacaattactctgcataacataggattctctgattctggaaaatacatctgcaaagctgt

SEQ ID NO: 498 - DNA, 485 bp, Homo sapiens
  misc_feature (1)...(485): n = A,T,C or G
gaggcccggnnattggaccatggagagccctatggagtgtggcggaattcacgagactgagagaaaggaatgaaaggatggaagaattacaagatcaggcactgctgtctgtctgttccacggatgtaaccacagcacacgcgtggctcacggtactagtgtgataaatgcttgttacatgaaggcgtgaacagggatgagaagagacttcctggagaaacaaatggactaacaatcaggaaggggaggtgatcggggcaggagtaaagtggacacctcagcaaagccattcgctgtgatctctgattgtgcagtgtcatgtcctgtcaccagagccccctcgtgtttgatgttggccaatgccgccagcatgatctagcaggccaaatcctaatctaccattctctgacaccagctggtcccctgggtcgtccacccgatgtcccccattctccccacttggcctcccccacaggctctcggca

SEQ ID NO: 499 - DNA, 484 bp, Homo sapiens
  misc_feature (1)...(484): n = A,T,C or G
gaggtcccgnnttcgagaccatagtacagcctgtggaagtgacggaaagtccataactcacagaattgaagggagagtttaatgagaagggcttggagacaaaaggaagctagggatctcgaagcaaagcctcgagcatatcactttagatactgccattggataactcagatctaactaccttccatttgcttctgctgataacccacctgcttgggagtcttcttggcttagcttgggtcagaacccttcctctcaggtcaggggtgtgtgtgtgtgttggggaatacgcatcccatggttgtcagtcaaacttggaccaaatgaaatgggtaagggctgttccccaaaggaaaaccagagtactgttacttgaagagggaggaagggttgtgaggcattgcatggaaaagaaaaaaagtaccaactatatttcagcccttggttatccagcatcacacgatttccatagatatggtctttt

SEQ ID NO: 500 - DNA, 503 bp, Homo sapiens
  misc_feature (1)...(503): n = A,T,C or G
cccccccccggnnnnnngnnnnnnaatcgaganccntatgcagtgtggnggaattctggacctactatgtctcctatgctgtcttcttcatctctctcatcgtcctcagctgttgtggggacttccggcgaaagcacccctggaaccttgttgcactggtaacccccaaacctgagcctctgtgcctgggtccggccatgcagtcccacacgcccactcttccgggcctggtcaccgtggttctccttgtgctcatgaggcaggggccggcaggggtggcatgggggcacacacccaaggtcagcctgtgtctaccaactgcagtcggtcctgaccgccagactgtcgtacatggtggggatgatcgccagcttctacaacaccgaggcagtcatcatggccgtgggcatcaccacagccgtctgcttcaccgtcgtcatcttctccatgcagacccgctacgacttcacctcatgcatgggcgtgctcctggtgagcatggg

SEQ ID NO: 501 - DNA, 483 bp, Homo sapiens
  misc_feature (1)...(483): n = A,T,C or G
ntcgaganccntngnagtttggggaacatcgagcgnggggtggaagtccaagagaccagcaccctcagcccagcctgggcgacagcttggagagcatccccagcctgagccaatccccggagcctggacgacggggtgatcctgacaccgcgcctccatccgagcgccctctggaagacctgaggcttcggttggaccatctgggctgggtggcccggggaacgggatccggggaggactcttccaccagcagctccaccccgctggaagacgaagaaccccaagaacccaacagattggagacaggagaagctggggaagaactggacctacgactccgacttgctcagccctcatcgcccgaggtcttgactccccagctcagtccgggctctgggacaccccaggccggtactccgtccccatcccgatcgcgagattcgaactctgggcccgaagagccattgctggaagaggaagaaa

SEQ ID NO: 502 - DNA, 457 bp, Homo sapiens
  misc_feature (1)...(457): n = A,T,C or G
attcgtagaccctagncattgagggcgttgcccttcctgctcctggtgctgggctccctgctgctctacctcgctgtgtcactcatggaccctggctacgtgaatgtgcagccccagcctcaggaggagctcaaagaggagcagacagccatggttcctccagccatccctcttcggcgctgcagatactgcctggtgctgcagcccctgagggctcggcactgccgtgagtgccgccgttgcgtccgccgctacgaccaccactgcccctggatggagaactgtgtgggagagcgcaaccacccactctttgtggtctacctggcgctgcagctggtggtgcttctgtggggcctgtacctggcatggtcaggcctccggttcttccagccctggggtctgtggttgcggtccagcgggctcctgttcgccaccttcctgctgctgtccctcttct

SEQ ID NO: 503 - DNA, 483 bp, Homo sapiens
  misc_feature (1)...(483): n = A,T,C or G
ngggcgccncnnnccctgagactgagtngtgctgcaagaacncctangagctggcgcagaaaattaagggctaccaggagcagatcgcttctttgaattccaagtgcaagatgctgacgatgaaagccaagcacgccaccatgctgctgacggtgaccgaggtcgaggggctggcggaagggacagaggacctggatggggagctcctccccacgccttcggcccacccctctgtggtcatgatgactgcaggtcgctgtcacactttgctgtcaccggtcactgaggagtctggggaggagggaaccaacagtgagatttcctctccacctgcctgtcgctccccttcacctgtggctaatacagatgcttctgttaaccaggacattgcatattaccaagccttgtctgctgagaggttgcagacagatgctgcaaaaattcatcccagcacatccgcatcccaggagttctatgaaccgg

SEQ ID NO: 504 - DNA, 432 bp, Homo sapiens
attgtagaccatttgcagtcgggtggaattcatcagatccatcacggccgagctgtgttgactaccactacttttcccttcgtctcaattatgtcttggaaaaaggctttgcggatccccggaggccttcgggcagcaactgttaccttgatgctggcgatgctgagcaccccagtggctgagggcagagactctcccgaggatttcgtgtaccagtttaaggccatgtgctacttcaccaacgggacggagcgcgtgcgttatgtgaccagatacatctataaccgagaggagtacgcacgcttcgacagcgacgtggaggtgtaccgggcggtgacgccgctggggccgcctgacgccgagtactggaacagccagaaggaagtcctggagaggacccgggcggagttggacacggtgtgcagacacaat

SEQ ID NO: 505 - DNA, 480 bp, Homo sapiens
  misc_feature (1)...(480): n = A,T,C or G
agcccccccccactgagaactanggccgtgncgagaactcctgggtctgaccttaagggcaagggcagggagcttcacatttcatatacaggtgtggttaccgtttcccactacttttggccctccttgctgatcgggtctcctcccttctcccaacctcctcactggtgttgctgggtgtgggcctcaatacagaatatagacccttgggcctgtgtcaccagacttctgaccccttgggcaacagccagatggagactggacgcctttagagcctcagctctcttcctcttgttctcctagggtgggagtacagcacccaaacgctgaacttagtcccatccacttccatcttatcctttgtgcccttcatccccctgcatcgtgtgctttttgccctctgccacctcccagtgccccatcatatctacccccacggactcggacatcatgcagcggaagcagaactaggcctacgag

SEQ ID NO: 506 - DNA, 488 bp, Homo sapiens
  misc_feature (1)...(488): n = A,T,C or G
agagcggntnnnnnncaatgagaatcgtatgcagtgncgaggaacncctcttctctggaaacctaatcctcctttcatttcctctgggcaggactctctggccttctgtggcctgcaatgccaggccatgtgcccctctgccctctagttctccaagtccccagcccggccagtggtgccaggcagcttgccacttgggagggcagaagccaggaattccacacccttgtgttgcgcccggagcccgcccttcgcctcccagcccctcaagacaccgctggctgctggacaccctcttcacttgtgtgtgtgtgtgtagcggaaaaggacaagacggtgcagtcggctgcatactcccagtcgggagtgtggtcagtctgcctgctgctgtgcggtagctccagaaccacctcgttcctggttttgtttggattttggcatcttgtttttctaacaacaaacaatggagaaaaagaattgattcttan

SEQ ID NO: 507 - DNA, 470 bp, Homo sapiens
  misc_feature (1)...(470): n = A,T,C or G
aggggcggccnngnnnnnttaggtacagatgatcatcggagagngcganngnaagtgtacacaccaagtcctcatgaaatgatcagtcagtggggaggccgcaaccacacaatcaccctacaaggtgcaaggacaactccagggagtctcaagtgcagcctggtggctcagccagattttggcatacaccccaccctaccctgaggcaccagagggggaaggaacgggactagggggcagagagctaaccagcagaaaggggcagggaccgggccttcccaacaaaaccttcccaacctggtgcgttggtgcagctgatgctcaggaagcccactcaccacttggtacagccgctcaaatcaatgccagtctgggcctgcgcacagcggatggcggtacgcaccatcacctgcgggtcagcctgggggtcgaggccatccatggaaggagaccattcacccccaaccacn

SEQ ID NO: 508 - DNA, 512 bp, Homo sapiens
  misc_feature (1)...(512): n = A,T,C or G
tggcgnntaannanananaaactgaaataccctcgtnannnncnnnnacctgataaccctctacagngncgnggaattccgaaaccactgcgactcttgccactgctgcagagaagacgtgcacagcacgcatgcacccaccctgcaaaggaagtctgccaaggactgcaaagacccttactgtcccccttctctgtgccaggtgccacccactgaaaagagcaaaagtactgtaaatttttcctataagacagaaactctctcaaaacctaaagatagtgaaaagcagtcaaaaaaattcgggctaaagttattccggttaagttttaaaaaagacaagaccaaacagctggccaatttttctgcccagtttcctcctgaagagtggcccctgcgagacgaggacacgccagctacgatccctcgggaagtagagatggaaatcattaggcgcattaacccagacctgaccgtggaaaatgtcatgcggcacaccgcgctcatgaagaaaa

SEQ ID NO: 509 - DNA, 488 bp, Homo sapiens
  misc_feature (1)...(488): n = A,T,C or G
tggaggccnnnnccactgaaactgnagagcntaggcaagnngcgnggaatttacttcgagaacctgctggccaagaacagcaagccaatccacacgaccatcctgaacccacacgtgcacgtcattggagaggatgccgcctgcatcgcttacatccggctcacgcagtacattgacgggcagggccggccccgcaccagccagtctgaggagacccgcgtgtggcaccgccgcgacggcaagtggcagaatgtgcacttccactgctcgggcgcgcctgtggccccgctgcagtgaagccaagggaggggcacagaatggggaacaggacacaggatcctaaactccaaggggactgtccaccgatgaacactcagagtggacaccatcttccgtccacgctgtgcccaggacagctgtccccatccatgaacacagggtaaacatctgccgggctccgcaccagtggctccctgggccatgggaca

SEQ ID NO: 510 - DNA, 492 bp, Homo sapiens
  misc_feature (1)...(492): n = A,T,C or G
agaggcnccnnnnnaagccgcccatagagaccccnttgactgagcnccctaggacagngccgnggaagtcagacggcattggcagagatcccttcttccattgttctgccctctcagaaaaggaagatagagcaggctgaacatgtcccagacagtaactttggtgtaaatgcttcctgtttttctgccacaagccctttggtcttacccactacctcagagcacactgctaagaaaatgaaagccaccaatgagcccagcctgacacatatggactgctcgacagagcagcctgggagcatcctgggccccgaatgtgcctcctgcaaaagagtattttctccctacttcaaaaaggagccggtgtaccagctgccctgcggccacctcctgtgccgaccctgcctgggagagaagcaacgctccctgcccatgacgtgcacagcctgccagcggccggttgctagccaagacgtgctgcgagtccacttn

SEQ ID NO: 511 - DNA, 496 bp, Homo sapiens
  misc_feature (1)...(496): n = A,T,C or G
agggcgcggttgtcttnnnncctggtagctctgannnnccctcntngcttcgcaagngccgcggaantctggatggacagatggacaaattaacagcattctgcacttggaatgacaaaactttatgcaagaaaagggtcattggagaatatctagtccggcactctaatgggatagagagggaaactgaggccagcagaaagcatgtcacctgacccagtcacagcccttggatacagagggaaactgaggccagcagaaaggatgtcactggacccagtcagcccttggatagagagggaaactgaggccagcagaaagtgtgtcaccagacccagtcagcccttggatagagagggaaactaacgccagcacaaaggatgtcaccggacccagtcagcccttggcctangacctgcagacaggccacctgctgcttctgtgacccccacagcccagactcacacatcttcctccaggtcagggagtgaagggg

SEQ ID NO: 512 - DNA, 492 bp, Homo sapiens
  misc_feature (1)...(492): n = A,T,C or G
agatggccnnnnnnnagccgggccttagagnacccttcgactgagcaccnctaggaagagccgnggaattcggcagaggctgcggcgagccaaaattgcgccaatgcactccagcctgggtgacagaagaagaccctgtttcagggggaaaaaaaagaaaaagaaaggaaagggaaaaaacatgaagagagcccagtgtatccagacccgagtctcatcaccttctcaggaagccttttgggttgtccaggccttaagtaggcctgtgcttccaaacttcatttctgggaggagtgccagtgggctggggaagtcggaggctataaaaagcctgttcttgtaccttgcagtctgttccaccaccgaggaacaggcctgacccgagtggcctgcagtaaagctccgagtcagggagcatggtataatcacctgacactggtgttacaggtaaatcacaatctctccccatagacaacatgatcttcctcatga

SEQ ID NO: 513 - DNA, 478 bp, Homo sapiens
  misc_feature (1)...(478): n = A,T,C or G
agaggccnnnnnnagcgcccactgagacctggactgagcgcgatggcagactcggacctgtggttggtcccagcccagcctctgaccactctgctctattgcccctaggctgcaagtgcagctgcaggttggcctgctcctgcctcctctccttgcctgggcctttgggcctgctccaccttcccctggagcgctgtcctccctctgcctgctggcggactaggcactgctgcagccccactgagaggtcctcttccaggacacaccttgggcaccttggttggaattcttttccctatgactttccctcagaggaggagacaccttcagatgtgctctgcctccttactgaacagcctggaggacaggccagtctccagttcctattgggagcccctgaggccatgctcagcctcggctcaccttccctgagccgagttgctgtcagagttccaaggaggaaaagaccagggaggcg

SEQ ID NO: 514 - DNA, 485 bp, Homo sapiens
  misc_feature (1)...(485): n = A,T,C or G
agagtcgccnnnnnaaggcgcccaactgagaccttccgattgancgtcgtatgcaagagccaccccagtgccaagatggttctgtgcattgctaccgatgactcccactccctgagctgcctgagcctaaagtttggagtgtcactgaaatcctgcagacacctgcttgaaaatgcgaagaaacaccatgtggaggtggtgggtgtgagttttcacattggcagtggctgtcctgaccctcaggcctatgctcagtccatcgcaaacgcccggctcgtgtttgaaatgggcaccgagctgggtcacaagatgcacgttctggaccttggtggtggcttgcctggcacagaacgggccaaagtgagatttgaagagattgcttccgtgatcaactcagacttggacctgtacttcccagagggctgtggcgtggacatctttgctgagctggggcgctactacgagacctcggccttcactgtgga

SEQ ID NO: 515 - DNA, 489 bp, Homo sapiens
  misc_feature (1)...(489): n = A,T,C or G
agatggccnnnnnntagccgccccctgagacctatcgactgagcccgantggcagngccgnggaattccattgcctgggacatctgaatgctgatacgaatggacaggaaagggagccagagctgtatacctgggacaggccagggagcctttattgccagcagggcctgtgtcctgggatgtgatgctagtgagtgaatgggagggcgggcctggagctgcgtgagagtgaaaccaacaagcggatggggaagggagagctggccttggtcagcttagggatgaatggagaaggaatcattcatgggcctcggctaggtcccagactgattacatgagactggggagtccttccctgccagttttctcatttattacagcctatcccccaaccctacccctgtgccctgcctacacactcccgtttggccctcagcactttgggcctggtcacataccccatccctagagagctcttttcagctgggg

SEQ ID NO: 516 - DNA, 461 bp, Homo sapiens
  misc_feature (1)...(461): n = A,T,C or G
nctggcgattcgtagaccatgcggnggaattcgaggaagccgaaggaacctggccctcaaagcgactgtgccacagccaagaaaactgggagcttctgcaaatcgttcttcttgccctcagattaccagacacgacgcagctggacttgtctcatgcctgcgatagggacggcccccaccctgacttgcatggaacagtcgacataatgtggcctactgcttccacctgagcgccccgccaggctgtaattccgcgggcccacgtgacctccggggccgcgccttccggacgcaactccactggggcggaagttggttttgtgcggctctcaagaactaagtttgtgctgtgctgcgggatccccagggagcttccttatatcttcggcaggaccccttctttttttcttgaagattgattttgctagaagttatcctgtgatgggactccctaggggaan

SEQ ID NO: 517 - DNA, 488 bp, Homo sapiens
  misc_feature (1)...(488): n = A,T,C or G
agaggcgcnnnnntagcgccccctgagaccttacgctagagcgcgctangaagngccgnggaattcccaaagaggagatgctggccatcatgaagtccatctatgacatgatgggccgccacacctaccccatcctgcgggaggacgcgccggcggagcacgtggagaggttcttcgagaaaatggaccggaaccaggatggggtagtgaccattgaagagttcctggaggcctgtcagaaggatgagaacatcatgagctccatgcagctgtttgagaatgtcatctaggacacgtccaaaggagtgcatggccacagccacctccacccccaagaaacctccatcctgccaggagcagcctccaagaaacttttaaaaaatagatttgcaaaaagtgaacagattgctacacacacacacacacacacacacacacacacacacacagtcatttatgtgggctggcagaggggacagagttcaggg

SEQ ID NO: 518 - DNA, 420 bp, Homo sapiens
cccattcccaggagaaaatccggcccctgaccagcctggaccatcctcagagtcctttctatgacccagagggtgggtccatcactcaagtagccagagttgtcatcgagagaatcgcacggaagggtgaacaatgcaatattgtacctgacaatgtcgatgatattgtagctgacctggctccagaagagaaagatgaagatgacacccctgaaacctgcatctactccaactggtccccatggtccgcctgcagctcctccacctgtgacaaaggcaagaggatgcgacagcgcatgctgaaagcacagctggacctcagcgtcccctgccctgacacccaggacttccagccctgcatgggccctggctgcagtgacgaagacggctccacctgcaccatgtccgagtggatcacct

SEQ ID NO: 519 - DNA, 468 bp, Homo sapiens
ggccacactgagaccctcgtagagcccgtaggcgaggactagggcttggagtgcttacatcaatccccaaagaaaagcatttagagaaccatgagcctaacaattagctccctatactcttacctttaaatgaagtttcataatatacccactcccacaagaaggtcccactaagaatccccactaggagaagagaactggcagtaaaacaggcctgctttcacaaaagcaaaggaaacgcaacactagcaacctcccaaaatataaatggatatccaaggaccaccagacgaatgaggtgaaccagaagcatgaaagaaaaaaggccaagataaatagaaaaactaaccccagtgcgacccaacatagtgggatttgagatgttacagacatgaaatatgaacagaatgctaaaagaacataaaagaataagagctccttaaagattataaataaatggtgatgtta

SEQ ID NO: 520 - DNA, 491 bp, Homo sapiens
  misc_feature (1)...(491): n = A,T,C or G
gtgtctnnncctgattcctgtgagnggcggacctgagaccgtcgacangccgnggccccacgggcttcacgggccccaaatgcacccagcaggtgtgtgcgggctactgtgccaacaacagcacctgcactgtcaaccagggcaaccagccccagtgccgatgcctacccggcttcctgggcgaccgctgccagtaccggcagtgctctggctactgtgagaactttggcacatgccagatggctgctgatggctcccgacaatgccgctgcactgcctactttgagggatcgaggtgtgaggtgaacaagtgcagccgctgtctcgaaggggcctgtgtggtcaacaagcagagtggggatgtcacctgcaactgcacggatggccgggtggcccccagctgtctgacctgcgtcggccactgcagcaatggcggctcctgtaccatgaacagcaaaatgatgcctgagtgccagtgcccaccccacatg

SEQ ID NO: 521 - DNA, 470 bp, Homo sapiens
  misc_feature (1)...(470): n = A,T,C or G
tgccggcccgganaaantttganctcgagtnccctagtcagtgtggtggaattcatcagtttcttgagccagccccagcgcctggtgctgcagtgtaagatcccacaaccccattcctcatgggcctcttgggaagggagcattgggtatgctgtgtacatagggtcctcccccttcctacgggtatgcagatgattacccagcagggcagcttcagctgggctggggagagctcaccaagagcacccctgccatcctggtgcctgcctccacggcttaaaggagcctgggtgaggggaaagtatgtggttggtttgtagtcagaaaaggcttcctggaagacgattagcagaatcgggaaaggcagcagtagagtaaggagagagactatccattctaaggcctggagtcatggacccaagcaggtaccaatatagataataagtctgaaccaggatgtcgagtcgact

SEQ ID NO: 522 - DNA, 216 bp, Homo sapiens
  misc_feature (1)...(216): n = A,T,C or G
cnccactcacgctccaaatgtggcagccaaagagaacaatccagggaacctacatttatttttaaggacaaatatttcctcctcagcggtcctaatgttcaaggctttagagggaacccaagtggtctctcctccctgtgtcctagaatgggagagcaagtatacagtgctggtcaccccacactgcttataagtgcatctttatagcacctgggg

SEQ ID NO: 523 - DNA, 488 bp, Homo sapiens
  misc_feature (1)...(488): n = A,T,C or G
tggattancncagagtgccccaaaactgaganncctaactngctnagcanngncgnggaanntcggcactgactcccttccctgtagtcccccagtctccaattcctacactcaggcagaccctatggcccccagaactccccacccaagtcctgcccattccagtaggaaacccctcacaagccctgccccagatccctcagagtctacggttcagagtctaagccccactccctcacccccaacccctgcaccccagcattcagacctttgcctggccatggctgtccagaccccagtcccaacggcagccggagggtctggggacaggagcctggaggaggcactgggggccctaatggctgccctggatgactaccgtggccagtttcctgagctgcagggcctggagcaggaggtgacccgcctagaaagtctgctcatgcagagacaaggtctgactcgcagccgggcctccagtctcagca

SEQ ID NO: 524 - DNA, 471 bp, Homo sapiens
  misc_feature (1)...(471): n = A,T,C or G
ggcagggccaggaaaanttttgatttcgataacactagtcagtgtggtggaattccgcctgctggacccgcccgaccccctggggaaggactggtgccttctcgccatgaacttatgcctccctgacctcgtggcaaagtacaacaccaataacggggctcccaaggatttcctccccagccccctccacgccctgctgcgggaatggaccacctaccctgagagcacagtgggcaccctcatgtccaaactgagggagctgggtcgccgggatgccgcagacttttgctgaaggcatcctctgtgttcaaaatcaacctggatggcaatggccaggaggcctatgcctcgagctgcaacagcggcacctcttacaattccattagctctgttgtatcccggtgagggcagcctctggcttgggcagggtctgtttggactgcagaagcaagggggtgatgtagcccatcc

SEQ ID NO: 525 - DNA, 499 bp, Homo sapiens
  misc_feature (1)...(499): n = A,T,C or G
natcgagacccctagtccagattggaggactntctccaggctgaagactactggtacgaggcctacaacatgcgcactggtgcccggggtgtctttcctgcctattacgccatcgaggtcaccaaggagcccgagcacatggcagccctggccaaaaacagtgactgggtggaccagttccgggtgaagttcctgggctcagtccaggttccctatcacaagggcaatgacgtcctctgtgctgctatgcaaaagattgccaccacccgccggctcaccgtgcactttaacccgccctccagctgtgtcctggagatcagcgtgcggggtgtgaagataggcgtcaaggccgatgactcccaggaggccaaggggaataaatgtagccactttttccagttaaaaaacatctctttctgcggatatcatccaaagaacaacaagtactttgggttcatcaccaagcaccccgccgaccaccggtttgcctgccacgtct

SEQ ID NO: 526 - DNA, 490 bp, Homo sapiens
  misc_feature (1)...(490): n = A,T,C or G
tgggtctnnnaattgattgcctcgcagnggcggaactgatgccatagtacctgcnttccgtcctgtaaccagaaaagactattgttgtactgattgatgttattaaaatagccccattgtatcacaggcctttgtacatctttaagcttgaatccgtgtatctagtgtattgcagaattttcataaatttttttttatttcataaaactcatcgagaatatacattttcttcacgttgcaaactggaaaaatgagtgaagtatagtgaaaggtaaattctaattttgcataaaattgtcatggaatttacttgtataaaattctcccctaatgtgattgtgacataaattcatgtgtgggaaagaaggggcagacaggaaactgaatgcttaattccttaaggaaataatttaaaatgttcaaggcttcttgtttgactttcattgatagtcactatttcaagttcacttgtgctttgaatcagcaagtn

SEQ ID NO: 527 - DNA, 488 bp, Homo sapiens
  misc_feature (1)...(488): n = A,T,C or G
ggatgaggggnnnaaattgagaccaatgattgangngccgtaanacgggcaagtcaaacaggagccgtgggagagactcacccaggatgcccctcggcccctccctggccccacccacagtgacacaggcctgctgctgctgatgcccccagttttctaactccctacagagcagggacaatgcaagaggggctgggtggggctgggctatgttctctgtctccacaccttcctctcagagagcagctggagccccagaacctgggagcctcacagagaaagtcctgatgtgggacctggttttccacccgagacccaggatccaataaagaagtgtttctataaatgatgcgtcctccaaagaaggccagtgactttctgtgccaagtacctgagagaatcgccatgtcctagagctgccaggcagctgtaggtgcacttacagacacaggtcacctgtgcatgtgtcagagaccanatcccatcan

SEQ ID NO: 528 - DNA, 465 bp, Homo sapiens
  misc_feature (1)...(465): n = A,T,C or G
gcacgcaaganaantttgatttcgattncatatccangaggtggaattcggtaccgatcccatccttctacaggggaaccacaggacagcaagtatttatgtggaacttagttctcaagatatggaacttgaagcagagtgactaagcaatttgcccaagatgatcagcttgtgaaactatggaatgcagatttaagaccaagaagttcaaatccatggtctatgcacttcatcgtcatgctatgcttgaactcacaagatagagtctcatttctgtcaccccatgttggagtgcggtggcgtgatcacggctcactgcggcctcaaagtcccgggctcgggtggtcctcctgcctcagctgctagagatgggatttcgccatgttggccgggctggtctctagctcgcgacctcaaatgatccatctgcctcgacctcccaaagtgctgagattacaggaaaaa

SEQ ID NO: 529 - DNA, 453 bp, Homo sapiens
  misc_feature (1)...(453): n = A,T,C or G
nctcgagttccatangcagtgtggnggaattcagtcggagaggcaggggcttgctttgcagccccacagacaacagttgcacagtgcctcaagccccagagtggctcaccctgtccagacctttgaggatatcaaaggacaaagtgcccaagtctttcctaccttgggggaacctggaacttggaaaggctccctgtcctagtcttgatctgttctgggccaggtcccagcttgagctgcctctgagatttgggctgtgcggatctctggagtgagctctgtttcggttgacccaggtcatggaatggaaacggtgaggccccagtggctgttctggaagaaacagatctcctggcaaaggccccagcatctccctcactgaaaccaggtggccggctcctcggactctgctttatgttgcggtgagaactctgcccaggtgtgcagggtttg

SEQ ID NO: 530 - DNA, 470 bp, Homo sapiens
  misc_feature (1)...(470): n = A,T,C or G
tggagggccggaaaaantttgaactgattgcctantcagtgtgcgtggaattcctcagaacaactccatgtgtgtggccgaacaggtgggtggtgacttttatgaagataagaaagctatgggagttttgggaccgacaggcttctgcttccaagctgttccagggcccccagagacccccgggaccccaggccctcactggccacacccccacaggtcatgcgctgggacggctccatgtttcgtctgctgcagcaacttccctcgcgcggtgcccacgtattccagccactgctcatcgccagggaccaattggccatcctaggcagcgacttcgccttcagccaggtcctccgccttgagcctgacaaggggctcctggagccactgcaggagctggggcctccggccctggtggccccccgtgcctttgcccacatcactatggccggcagacgcttcctctttgg

SEQ ID NO: 531 - DNA, 500 bp, Homo sapiens
  misc_feature (1)...(500): n = A,T,C or G
ctttgaccccttggngnattgagaccctagtcagtgaggtggaattctatgaccgcagctaataaatatgtacgcccacgcttatccatcctagtactccccccaccaccgtcgagcagaaagcagttttcatatgaccaaccgctcaaacactcataattacctggctggaaacaattcacctggaacaaccgtacaccgactagaaagttgcttgccggctcctttacaaagtaactttataacactcttccctcaaccaaaatggtttctgtagagcttcgccttcttccatcgccacaacagtggcgcgacttctaagattcggcagcttccggaaggactcagaaccacctataaccctagccgacagttcagcaggctgatccacttgggggctaattggagaaaccagttgattggnntgttccgtgctgcttctctaagggcgcttgcccttaaagaagctgacccagaggccttggtgctgccggcgtggg

SEQ ID NO: 532 - DNA, 415 bp, Homo sapiens
tcaaagccctcattgacagaggaggaaacaggccaaggcaggacatggctggaccatggtgatacagctctgtgtgattcaagttctggcagagcttgtaaggctagagcccaggtctgccgacaccctgtgcttgttgcacacttgatttgctaaggctggagacaggcaccattgccatggggctggtcctagtcactggccgaggataagcccgtccctgtcccacattctagccccactatgcgggggtgctgttgtcctgcctgtgtctcatccccggctgcctaagctagggacactcaagtgcttccttccttgccccatcttcctcccaactggaggcctctgagcctcccctgtgccttgggccctgaagccccatatgtagtatagagcaaaggtggctcctggt

SEQ ID NO: 533 - DNA, 487 bp, Homo sapiens
  misc_feature (1)...(487): n = A,T,C or G
gaagcccccnnatcgagaccatagagatccctagggagtgccgggaaggatgctccgcacccccagctccctacttccctggttttctgtggatactgcgtagaccagagtggggtgggggccatgagtgtacacagctttagatggcaggagcaagtgctgggcctgtggctggctgagcctctgacctcccgcttcctccctgcagcttggaactggcttcagtgatgaggagctggaggagcatcaccagagcctcaaggcgctggtgctgcccagcccacgcccttacgtgcggatagatggcgctgtgattcccgaccactggctggaccccagcgctgtgtgggaggtgaagtgcgctgacctctccctctctcccatctaccctgctgcgcggggcctggtggatagtgacaaaggcatctcccttcgcttcccttcggttattcgagtccgtgaagacaagcagccggagcaggccacc

SEQ ID NO: 534 - DNA, 491 bp, Homo sapiens
  misc_feature (1)...(491): n = A,T,C or G
atgagaccatagcagatagaggactttctcttatacgaagccgggccttgattcaagtcccctagtcctgtttgttttttgttttttgttttttgcttttctgagacagggtctcgctctgttgcccaggctggagtgcagtggtgtgatctcanctcactgcaaccttcacctcccaggttgcaattctcctgcctcagcctccctagtggctgggattgcaaggtgcccgccaccactcctggctaatttttgtgtttttggtggagacggggtttcgccgcgttggccaggctggtctcgaactcctgacttcaggtgatccgcccgccttggtgtcccaaggtgccgggattgcagatgtgagccactgcacccggcctgcctaatcccatcttaactcatcttaactaacacatctgcaaagaccctctttccaagtaaggtcacgtcctgagattctgggtggatgtgagtttggaggacgtcan

SEQ ID NO: 535 - DNA, 486 bp, Homo sapiens
  misc_feature (1)...(486): n = A,T,C or G
ggggcnnnttttgagaatatagtccctgtggtggaattcccaccagctacatggatttgtgcccatcgcacccacctccacccagaactacacccaggagcaattctgggctgtgaagactccaacccttatcctgtatggagagctggaccacatcctggctcgagagtcactgcggcagctccgccacctgcccaaccactctgtggtgaagctacgcaatgcaggccatgcctgttacctccacaagccgcaagacttccaccttgtcctgcttgccttccttgaccatctaccttgaactaacccactcccagctcccagcctggcatgagcttggacagtctggaccgccaccctccctgaaccagggagacagcctctgggattggaggccagaggccagggtcagacccagccaggactcctcatttcatctcacagacacaataaaaaagcatatttgtcctgcctgggaagtgacag

SEQ ID NO: 536 - DNA, 510 bp, Homo sapiens
  misc_feature (1)...(510): n = A,T,C or G
ccccccatcgaaanccnctctgcagaatagaagatccntagtccagngncgnggaattcacaggatgttcctctcccacatgcagacttcacacgagacgcttgggtcgcaccgcattctgcttagagaggtgggtcccatctgcgtggacctggggtgggagtgggtacaggactgaggctgggtgccaggtgggaccttcgtgcaactggtttcattagtcacatttgagcgttcattgcagactttgaactaggtgagcctctgaaagtttccccttggggactcttgtgcctggaagggctgaataaggcagatggtgacgcttgcttagcacgtcggtgggaggccatgaaggagtaatggcgtttctcatcccccacctcagccctggctatgatttttgtattttctgggattaaaaaaaagtttgttttttttttctgtaaacctcaccaaattacaatcacacctggaattacaggatggctacaagatagatgactgctt

SEQ ID NO: 537 - DNA, 495 bp, Homo sapiens
  misc_feature (1)...(495): n = A,T,C or G
ctcgagaccantgtccaagtggaggacctttaataggtaacatgtattaccatacatcaacagataaaaacatatcattgggacaattaccgaatggtttctcataaattataaaagtatttcaattagttttattgaggtataatttacatacaatagaatctgtagacttctgttggatagcttgattaatttggcaaatgtacacagtcatgtaaccatcctcgcaatcaagatgtaggacatttccattactccaaaagctctccatgctgcagtgtattcaacccatccttgcaactccagcacctggtaaacactgacccattttctgggactattgttttgccttttctagaatctcacatatatgaattaactcttgctttccaattattatgttggggcagtttttattagaaggctgttttggagtagaaagtttggagttttcctttatagcactgcagattgaagtcatgtagaccaagtggn

SEQ ID NO: 538 - DNA, 479 bp, Homo sapiens
  misc_feature (1)...(479): n = A,T,C or G
gagcgtaannaaactgagaccatgatggaggcngtaaacggccagggggccactggctacccctactgcgcggcggcccaggagctcggactgctggtcctggagagctgcccccagaagaagctggagtgcatagtgcggaccctgcggatcatctgtgtctgtgcggaagactactgccccaccccagaggccacaccccaggccgggcccccgcccatcgctgcagctgccattggtgccgatgacctgctgcccatcctgtccttcgtggtgctgaggagcggcctccctcagctggtgtcggagtgcgcggccctggaggagttcatccacgaggggtacctgatcggagaggagggctactgcctcacatcactgcagagtgccctgagctacgtggagctgctgccccggggaggcctggccaagtagtacagctagagcccagggtccctgcagggcctggcctcgcctcc

SEQ ID NO: 539 - DNA, 478 bp, Homo sapiens
  misc_feature (1)...(478): n = A,T,C or G
nttgatcgcgtacactagtccagnggcgggaattccttcctgctgccaggtggcctgacactgtgccagagagtggctggttttaaatacctactttaaacagtgccctttttgtaggaggtaggatattttatattctgccgcaggatagaacccacgcaaggattttctttaaattgagaggcaccaggcagtaacttccatgatgacactgacgcctatacctgagctctaggctgcctggagggaaggaacaggcccatgggaagaagggggttttaaaaacatgtcttcaactcagcagagatggccctctgggaccctatacgcactccgccacttgagagcagtcctaggcccggcaggaacaccagacatgaacaggttgaagaactggagcgaagtgcacacctcaccatccttcagtctaaggaagaagggcaagccctgggaccaagagctctcccgccttctccct

SEQ ID NO: 540 - DNA, 484 bp, Homo sapiens
  misc_feature (1)...(484): n = A,T,C or G
agaaagagccncnntttgagtccactattgagtgtgcgggaattccacaggtttaaacttacacgaatcgctttctggaggaggaggggacccgctgcgcgattgacacgcatattcctataggcatcctccctcagcccccacccccacggccggattcgggtggctcctctccgaggtgaaatctgagaagaaatccttggatctcttttcttaaaaaaaaaaaaaaaaaaaaaaaaaaaaaatttaaaacccctcggtttttggcttggcggccccctattcgaaaaaaaaaaaagtttttcaactcccggaaaaaacaggggggttttggcctgggctccggttccagggggggggggggccccccctcggccctgggcgggggttacatgggaaaaattttcggcttcgggcgacagcaggtcacaagggacaaggggttgggggaaaaccccttcatagctgaggagggatagtttcg

SEQ ID NO: 541 - DNA, 477 bp, Homo sapiens
  misc_feature (1)...(477): n = A,T,C or G
atcgatagccctacccagnggcgggaattccagccatgccacttttaacagtgagaaacttcctgaagtactaaatatggaatccctacccacagtccacaatgagggtccctccagtgctgaggggaaggatattgcctttagtcctccagtgtaccctgctggaattctgcttgtgtgcaacaactgtgctgcctaccgtaaactgctggaagcccagactcccagtgtacgcaagtgggctctacgtcgacagaatgagcctttggaagtacggctgcagcggctggaacgagagcgcacggccaagaagagccggcgggacaatgagacccccgaggagcgggaggtgaggcgcatgagggaccgtgaagccaagcgcttgcagcgcatgcaggagacagacgagcagcgggcacgccggctgcagcgggatcgggaggccatgaggctgaagcgggccaatgaaaccccgga

SEQ ID NO: 542 - DNA, 488 bp, Homo sapiens
  misc_feature (1)...(488): n = A,T,C or G
gggcccngcnaatcgagatccataggacagtctggtggaattcatggaacagagacccagagaagaaaggtggcttgcctgaggtctccgtttcaatacagccatgctgacggtgtcatcccagggtctccagggaccccagctgcttatgccttctaaagctggtggtcttcgaactggaaaacttccagggccgtcgagcagaattctcgggggagtgctcaaatctggcagaccgtggcttcgaccgtgtgcgcagcatcattgtctccgcgggaccctgggtcgcctttgagcagtccaacttccgcggggagatgttcatcctggagaagggcgagtaccctcgctggaacacatggtcgagcagctaccgcagtgatcggctcatgtccttccggcccatcaaaatggatgcccaggagcacaaaatctccctgtttgaaggggccaacttcaagggcaacaccatagagatccagggggac

SEQ ID NO: 543 - DNA, 478 bp, Homo sapiens
  misc_feature (1)...(478): n = A,T,C or G
atcgatatgcctactccgngtggnggaattctggacaggcacctccaggcgcctaccctggagcacctggagcttatcccggagcacctgcacctggagtctacccagggccacccagcggccctggggcctacccatcttctggacagccaagtgccaccggagcctaccctgccactggcccctatggcgcccctgctgggccactgattgtgccttataacctgcctttgcctgggggagtggtgcctcgcatgctgataacaattctgggcacggtgaagcccaatgcaaacagaattgctttagatttccaaagagggaatgatgttgccttccactttaacccacgcttcaatgagaacaacaggagagtcattgtttgcaatacaaagctggataataactggggaagggaagaaagacagtcggttttcccatttgaaagtgggaaaccattcaaaatacaagtactggt

SEQ ID NO: 544 - DNA, 505 bp, Homo sapiens
  misc_feature (1)...(505): n = A,T,C or G
ccccccatcgagcccctcggnnnatagagaccctatgcagngncgnggaattccttttgctttagcctttctttgcgtactcacaaaccaatcagcatgcacttccctattctgagctcataaaagccccagactcagccacactgagagagaaaccaaccgacgggggaggggggtgagcaggaggccacctctgcatcccctctccgctgagagctattccattgctcaataaagttcttctccaccctcctcacccttcaattgtcagtgtatccttattcttcttggacatgggacaggaacttaggaaccactgaatgtgtgtacatgctgtaacacaggagagctgaggcacacctggcccagccacggactgagccaatgcacaagccagacttggctcaggcagactgagtaggcagggcacctcctgcagcaggtagcatgcctgagcaaggcccaggtggcagtggtaccagctggaggtccctggctggcaaan

SEQ ID NO: 545 - DNA, 486 bp, Homo sapiens
  misc_feature (1)...(486): n = A,T,C or G
cgatgcgagnnccaaatgagaccatgatgagancctaggccangncgnggaattcgtcctgtttgcttgagtctgggcatgatgacttccagttgagcccttggcatgctctttgcctagaacagtcttctcccagagagagtcaggacttgctgtctctctctattcaagcctcacttcattggagggcctttcctgccctccacccaccctgtccccatcccctgtcgttctggaatctggatgttggttggttggctggtgggtttgtgggttgtgtcatgtctaactgccaggctccatgtgagagtagggacagagtcccacatgttccccatagtatcctgggatgtagagcaggcccagtgcctagaaggcactgaggaaatcctatgcaattctggaactgctgttagttcctggcctggcagggttgcaggaggctggggtcgctggtctccaggcctgctcagccctgacgtttgg

SEQ ID NO: 546 - DNA, 500 bp, Homo sapiens
  misc_feature (1)...(500): n = A,T,C or G
cgagggccntttgacncccaaactgagtgcctagtccagngncgnggaattccatctgaggctccatatacctttcgaccattttctgctggaagaggaagattcacggcctttgaggagatccagaggaaagagacggtctccaagggtgctgtgcagcaaggagcccaggagtggtatgaaccgtaacagtgcccttagagtaaatgtgcggcccctaagaccctgccctcaggaaggcggccttcccctgcagtcctgtgtcccacccctgggtctctgtagggtgccatccagggcaagcaacccaagcactgcttcccaccgggtgatgagccatgcaggcctccaaactgcacgtcatgattcatccctaaagtgagtttggccttgagagtccccagggtcctcccccactgggcaggggtcctcaaagccaaggaagcctggtgacacaggcacccatgggaggtgggcccagaaaggngcttcccatagan

SEQ ID NO: 547 - DNA, 489 bp, Homo sapiens
  misc_feature (1)...(489): n = A,T,C or G
tgctgcgggnnnnaaatgagncccttaactgagaccctaggccgngncgnggaattccgggggttaaggtgagcgactgcaggcaaacccggcgacagcgcagctcgcgtcgaccctggctcctctgcctgccccctcaggcccccgcctccttcaggatgacgctggacgtggggccggaggatgagctgcccgactgggccgccgccaaagagttttaccagaagtacgaccctaaggacgtcatcggcagaggagtgagctctgtggtccgccgttgtgttcatcgagctactggccacgagtttgcggtgaagattatggaagtgacagctgagcggctgagtcctgagcagctggaggaggtgcgggaagccacacggcgagagacacacatccttcgccaggtcgccggccacccccacatcatcaccctcatcgattcctacgagtcttctagcttcatgttcctggtggttgacctgatgc

SEQ ID NO: 548 - DNA, 490 bp, Homo sapiens
  misc_feature (1)...(490): n = A,T,C or G
tgagcgtggnncncacattgagaccactgattggngcctngtaannncaaccagagaaagaaaaaaagaaagcaggagacacagcgggcagtagaagaggatgggcatctcaaatgcccaaggagtgccaagccccaagatgctgttgtccccgagtccagcagctgcgcaccatccgcgaatggctggtgtcctggggaccgcatggggctgagccaggcccctcctgtgtcttggaatggagagcgggagtctgatgtggtccaggaactgctcaaatactcatctgataaagcttacgggagaaaagttctgacctgggatggcaagatgtcggcggtcagtcaggatgctattgaagacagcagacaggcccggactgagaccgtggttgatgactgggacgaagagtttgaccgagggaaggaaaagaaaattaaaaaatttaagagagagaagaggagaaacttcaacgccttccagagacttn

SEQ ID NO: 549 - DNA, 486 bp, Homo sapiens
  misc_feature (1)...(486): n = A,T,C or G
gagggcccgcnatagaaaccatagagancctaggcagngnggnggaattcctgctgcggcggcaagaggctggggagccgatgactcaccctgccggctaattgcagcgttaaataactttgcgccggattcggtggctgcagcagggaacgcgctccgggcgccgggggaggtggagggacgccctgagaacgcacctccgtccctgtcaccagccttagcaagttctggcctgtggagccgtcatccagagcgcacagcttcatgcccttgaagggcgcagtgtgtcccgtggtgcccggtgggcccggacagagaccccagaggctctgtctgaaggaagctgcacccacagactccatccaggcagcgcgggcgcggtcctgtcgcctacctttctcggaagccatctgcccatgtgaatctatgtgaaggcccttcatgcgctcctggacatctgcgtgggatttacttcaactgctatcg

SEQ ID NO: 550 - DNA, 497 bp, Homo sapiens
  misc_feature (1)...(497): n = A,T,C or G
agaggcccatttganncccnaaactgattccctagtcagtgncgnggaattccgaaagcacccgggcgcagccggagccggtgccgcagctgcgatggccgtggccgtggggagaccgtctaatgaagagcttcgaaacttgtctttgtctggccatgtgggatttgacagcctccctgaccagctggtcaacaagtctacttctcaaggattctgtttcaacatcctttgtgttggtgagacaggcattggcaaatccacgttaatggacactttgttcaacaccaaatttgaaagtgacccagctactcacaatgaaccaggtgttcggttaaaagccagaagttatgagcttcaggaaagcaatgtacggctgaagttaaccattgttgacaccgtgggatttggagaccagataaataaagatgacagctataagccgatagtagaatatattgatgcccagttcgaggcctacctgcaagaggaattgaaat

SEQ ID NO: 551 - DNA, 484 bp, Homo sapiens
  misc_feature (1)...(484): n = A,T,C or G
natcgagatccctagtccagngtggaggaccactaaccgtgaggtggaattcctctgtatatctctatctagctatctatgtcattttgtttgtgtgatagcttttcaggaccatggtgactggataaatcaggttctgcgctccgtctccccatttacaggtggcttctgcctgttcagtcctgacactgttataatgccattttatcgtttagacatttgtatgtaaacaaatcttgaccactggaatagtggaagggggttctcttctggggagaaggaggaggcattcaacctgtcagcaagcaaaggagctgggcagggcctggaaagcacgagaccaggttttgggagacccagggcacagggtagccagagcagggacccccaggcctgagtgctcctccagtcccttatgtgagcagggctcacaaggcctgccctcccactggctctcatactccatgggggacaaaagacatat

SEQ ID NO: 552 - DNA, 446 bp, Homo sapiens
gaccaagatggcggcggtgtctggcttggtgcggagaccccttcgggaggtctccgggctgctgaagaggcgctttcactggaccgcgccggctgcgctgcaggtgacagttcgtgatgctataaatcagggtatggatgaggagctggaaagagatgagaaggtatttctgcttggagaagaagttgcccagtatgatggggcatacaaggttagtcgagggctgtggaagaaatatggagacaagaggattattgacactcccatatcagagatgggctttgctggaattgctgtaggtgcagctatggctgggttgcggcccatttgtgaatttatgaccttcaatttctccatgcaagccattgaccaggttataaactcagctgccaagacctactacatgtctggtggccttcagcctgtgcctatagtcttcagggggc

SEQ ID NO: 553 - DNA, 485 bp, Homo sapiens
  misc_feature (1)...(485): n = A,T,C or G
gaggtcccgcaattgagnccatcgagancctaggcagngnggnggaattcgggagcaagccttccccactgtctgtgaagaacaccaagaggaggctggagggcgccaagaaagccaaggcggacagccccgtgaacggcttgccaaaggggcgagagagtcggagtcggagccggagccgtgagcagagctactcgaggtccccatcccgatcagcgtctcctaagaggaggtgtgtgcctcagggcgcacccaggaggccgataccggggtggggctgtccctcggggtaatcattctcaccctgaggtggtttcttgtttctctaaacctggagcttgtgtgtcttgtctgagctcctgtgggtgtgtggggcctggccgggccagatggtcacacgtgtggtggtgctgttcttcctcccaggaaaagtgacagcggcttcacatctggtgggtccaagtcgcagagccgctcctggagca

SEQ ID NO: 554 - DNA, 485 bp, Homo sapiens
  misc_feature (1)...(485): n = A,T,C or G
gatggcccncnaatcgagacccttggacagtctgttggaattccccaagtgcagaagagaattccaggaagcctcgagagtgagtgacggcccgcggcccccggcgaggaggcagcaataccacaggcgaccaccagctgccgccgcagtcaagggcagttggtctcccctcgccaggattaaccctggaccgagggctcccgaaccgaatcgtccccacagcctgtcctgcgagggcggctttccccattaccaccctcgtttcaccaaggagaaaacgagctcagagaggcagtgcattggcccgggattgcaccgggcgcgaacccacgtcagctcccgcagaacctagatcattcgctgccacctccctccgggcctgctctcgcagtgttgggtgggaacagaacagccttggtcgtggctgaggagaaatcccacagatgtcactggacgagggtgacgggtggggccgggctttcccc

SEQ ID NO: 555 - DNA, 501 bp, Homo sapiens
  misc_feature (1)...(501): n = A,T,C or G
ggagcgcccatttganccccctaactgatgaccntagtccagngncgnggaattcctcctgtctcctgacgtgtttgttccctttggccgccctttggctggtgttcaattcaaggccataggctcttcctactctacacattcctcacatggaagctccagccaacacatgttgcctgatggctcccatctctctcccgagtcccagcctctgtgtacccatgtggctgctagacagctccagctggctgcttactcattcattcaactagtaattaatgggagcttactctgtgccagtgggaggggagacaaacataaaatgtccccaaatatatcctgagggtggtttaaggtctaaacttattttcactctaaactgcttctccttcatatatgtcatcattcacgaagcccaattttcccagttctgcaatactcagccccatcatctccttccaggccgggccaggaacctctcctctggcctcccacataacc

SEQ ID NO: 556 - DNA, 503 bp, Homo sapiens
  misc_feature (1)...(503): n = A,T,C or G
gagcagtgccccaattgaaacccctnctcgatgaccactgtccangngcgggaattcgggagcgggagtcttccttagcttctccgccatgggtgtcgcttcgtagccgggctgctccgggaaaggcctcgtacaggaaaactagacaatccaccagcccaggaggggacaagcaggcttattcctcctcctcgtcatctctggctccagccccaccctggcccttgctggcattcttcctcttcacgtggctggggttggccaccccaatagggaagcagagggagaagtcaatgtgcttctgggaatccaggcggacagtgaagaacaggatatttaccacctgctcacggacacggatatgacactgctgaatcagcacatgagcgtggcggatggacttagccaagccaagcttgaagacctgggtctgtaggaatctctaagaaatcattgatcttcaggcccaggatgtaatccagcttcatcttgccctcatccan

SEQ ID NO: 557 - DNA, 500 bp, Homo sapiens
  misc_feature (1)...(500): n = A,T,C or G
gagcagtnncccccattgagaccctagtgagtgtgccgtaattcaaacgaagttgcatgagtccccacaacttagtgtgagcttcaaatcatgtcttctttatcaaaggtacagtacagcaaagagggaaattaaaagaattactttacaagggagaaacctgacaaaagtgccttctactaggtaattaaggtcaacatcaacagtgataagtcagagtgataatacgtatccttaatatgacataatgaaaatggccctttgctttcacagtcttcttccctcaaacccataacctcagtctaatagtgagaaaaacatcaaacatttaaattgagggacaacctacaaaacatctgactcaatactcatcaaaaccatcaagtaattaaaaagaaggaaactctgaaaaattgccacaggcaagaagagcctaaagagctgtgacaagatgtatacacaatgtggtaatctgagtaagatcctagaatagagaaaag

SEQ ID NO: 558 - DNA, 506 bp, Homo sapiens
  misc_feature (1)...(506): n = A,T,C or G
gatgcagtcgccccnttttgaaacccctcctcgtagtccctagtccagngngcgggaattccgttgatctcctggtagcatgaccttttggcctttgtaagacacacagcctttctgtatcaagcccctgtctaacctacgaccccagagtgactgacggctgtgtatttctgtagaatgctgtagaatccggttttagttgagtcttcacatttagaatttgaaaggaaaaacagaacatttctcatgtgctttgtagcttaaaaaaaggaaaactcaccatttcatccatatttctttttcttgcaaaacaaacatacccatctgcaccgacgcctgcccccgtcccacctcgcggcgcagcccctggagctcctgctggggggcagggcccatctgccgcctggggctccggtgcggtgcactggtccgaggagtgtgctcaggccgggctttccagaaggccacaggccactgcaaaccctgctgccttgccgccgcccagn

SEQ ID NO: 559 - DNA, 499 bp, Homo sapiens
  misc_feature (1)...(499): n = A,T,C or G
natgcagtnccccncctcgagaccctagtgagtgtgccgtaattcctgngatgctgctggagctgaatcggatgccaccaaggctcggtccagcccagtaccgctggaagtgaataaactccggagggtcggacgggacctgggctctctccacgattctggctgtttgcccaggaacttagggtgggtacctctgagtcccagggacctgggcaggcccaagcccaccacgagcatcatccagtcctcagccctaatctgcccttaggagtccaggctgcaccctggagatcccaaacctagccccctagtgggacaaggacctgaccctcctgcccgcatacacaacccattntccctggtgagccacttggcagcatatgtaggtaccagctcaaccccacgcaagttcctgagctgaacatggagcaaggggagggtgacttctctccacatagggagggcttagagctcacagccttgggaagtgagactagan

SEQ ID NO: 560 - DNA, 467 bp, Homo sapiens
  misc_feature (1)...(467): n = A,T,C or G
natcggacccttnccagngtggaggaactcttattatacccacacccacgccggcgggagccgcccgttcgcgctgccagcagcttccgcctgctacggncctggcaagcacctcgggatcccattccttcacagggaccctagccagttaaagctgatacattcctgtgggtcaactatgcaactaactcagattttgagcaaacaaagctctcaagttggtgatcctcaggagtctctgcattagttggacagctcttctggaattatcttctaagtcaactgtgggttgggtaggtggctctgctgatttttcgctggacttccacatttgggaccagttggctgtcatcagctctagaaagggtgtggctgttttacattggctgttttcctcacattcctcaagcaggtactgtaataaagaactggagaaatacagtcagatgggaagtagcccctgctgt

SEQ ID NO: 561 - DNA, 460 bp, Homo sapiens
  misc_feature (1)...(460): n = A,T,C or G
ggggggccnnnnnnntttgaactgattccatcgngcggngcaattncaggtgaaccgcagcgccggcctggcccccgactgtgaggcctcggcgactgcagaaactacggtttcctcagtggggacctgtgaagccgctgccaagtcaccagagcccaaggactacgacagcacctgcgtgttctgccggatcgcggggcggcaggacccgggcaccgaactcctgcactgcgagaatgaggacctaatttgcttcaaagatatcaaaccagcagcaactcatcattatcttgtggtgccaaagaagcatattggaaactgcagaactctaaggaaagatcaagtagaactggttgagaacatggtaactgttggaaaaaccattcttgaaagaaataatttcactgacttcacgaatgtgaggatgggttttcatatgccaccattctgttccatttcc

SEQ ID NO: 562 - DNA, 491 bp, Homo sapiens
  misc_feature (1)...(491): n = A,T,C or G
agagttcccnnnnnnnnaggcggcccaatagagacctttacgatagagncgctgataggcagncccagctctttaacagaggaaaccttgctgccctgtctgtggaatacaatctattgtcaatctaatggtctgtaacaattaagacccaagtcaaaggagttgattttgaagtttctacagcaaaaaaaaaattgtttaagtttctttgtaaagatggggtctcgctaggttgcccaggctgctcttaaactcctggcctcaatatagcgaaatttagatgcctggatggaagagcatttggtatatagtttttggcttttctgcttggtttctcagaatccttggagcccctctcttcttaccaccagtcagcctccaacccattcctctaccagccccctcccaagtcctttcaagagattattataagtagtaccttctcattataggaatattgaaaaacacaaagaaagtggcatctataaact

SEQ ID NO: 563 - DNA, 472 bp, Homo sapiens
  misc_feature (1)...(472): n = A,T,C or G
gccgcccatagagacctntcgaatgagcgctctaggaagngccgcggaantcctcaagaagagtggcttcttcacctcgctggacccccggcgggtgcagaggggagctgtctggtatgcaatgcactccaggatcctacgcaccaaaccagtggagtccatgctagagggaactgggaccaccacggcacatggaactaagctagcccaggtactcaccacagtggacctcatctctcttggcgttggcagctgtgtgggcactggcatgtatgtggtctctggcctggtggccaaggaaatggcaggacctggtgtcattgtgtccttcatcattgcagccgtcgcatccatattatcaggcgtctgctatgcagagtttggagttcgagtccccaagaccacaggatctgcctacacctacagctatgtcactgttggggaatttgtggcatttttcattggctggaac

SEQ ID NO: 564 - DNA, 460 bp, Homo sapiens
  misc_feature (1)...(460): n = A,T,C or G
atagagcaccttnnnnttttgagatcactatccagtgcggtggaattcccaggctgttatgtgcctatcccctgtggtggcatggcaaagcctcagccatcaatccaagtgtccctagagtcaaccaagaaagtcaatatttaatttgggcaccatgttaatgccatcgatcgccagctccctcctccttcctcaggctcatttgtcacttcccactcactgggggtggggtggggtgcagcctagtagaggcagagctcagcctggacttggcctgggaaaactggcctgcatgtggaggtgctcccctcaaccacccagcttccaatcccctgagaatcactgagctgctttgtctgagtttcctaagtgccatccctggggaggtcagtgaagtggggaggcgaggtatgatgttctcccaagcgccctcatttgaagcttatttccttgctgggcg

SEQ ID NO: 565 - DNA, 458 bp, Homo sapiens
  misc_feature (1)...(458): n = A,T,C or G
gcgcccactggaccntggctgancgcgtggaagccctccccagcaacggccctgggccaggcaagagaaccaggaggcagagcgggagggtggcatgagctgcagctgcagcagtggcagtggtgaggccagtgctgggctgatggaggaggcgctgccctctgcgcccgagcgcctggccctggactatatcgtgccctgcatgcggtactacggcatctgcgtcaaggacagcttcctgggggcagcactgggcggtcgcgtgctggccgaggtggaggccctcaaacggggtgggcgcctgcgagacgggcagctagtgagccagagggcgatcccgccgcgcagcatccgtggggaccagattgcctgggtggaaggccatgaaccaggctgtcgaagcattggtgccctcatggcccatgtggacgccgtcatccgccactgcgcagggcggt

SEQ ID NO: 566 - DNA, 485 bp, Homo sapiens
  misc_feature (1)...(485): n = A,T,C or G
ggaggcgcngnnntagcgcccactgagnccntngactgagaccctaggcagngcggggaattccgggcagagccggccacctagtcccttccagccagcagaggcgagggaaggcgtcactgccccggcggggagacgggcaggacgccctgccccgcaccagcagcctccgccggggcgccctcagctccctgcttggctctgtctctccacacccggcagggccgcgggctgccccagccctgggggtcgtgggcagctgctactcagtgccaaccccgtggggcacagagccatatacctcgctgtccggcccccaccccagcctcgccttcccaccccatcgtctccacttcaggaaaagccgcactttacacccccacctgcctcttccccctccatccctgctccccgatcctgagcggntggggtggggtccctcagcaaccccaggcgtgggtttgaggagacaggtgatttacatt

SEQ ID NO: 567 - DNA, 482 bp, Homo sapiens
  misc_feature (1)...(482): n = A,T,C or G
gggaggcccnncncccaagnnttgggtgctatncgaggaaccnccatctgaagttaagagttttagcagcattgtttttctaagtagatttagctatagattttcttctggccaaacaaggaagagtatatgcccttgtaaatgagtcttgttttgtttatttaaatagtcagtcaaaacgtagaaatcagtatacgtaaaataaaatgcatgagactattaaatcttttcatatactctacaaataaaatgaaatctgtgtgtggtcctggttgactgggcatctaaagggaatcagaaaagagattgggaaaagttatatatatatcctcttccttattttagttttgctttttcctattttccataattaagtgccgtttacaaagtggcatcaaaaaattgaagcaggccaggcatggtggctcatgcctgtaatcccancantttgggaggctgagggcaggtggatcacttgaggt

SEQ ID NO: 568 - DNA, 327 bp, Homo sapiens
  misc_feature (1)...(327): n = A,T,C or G
tgcgtgcccccggtagnnaaaactgaaaccccngttgnngagccagcagagccgcggaatttcgggcttccaccttaccaccacgaaccagggggcctctgccgcgggccccggcttcagcctcaagttctgaaggtcagagtggaccccgtcatggggagaactcagccgggaccacaggcgtggctactgcggctggagctgcgatgagactcggaactcctcgtcttactttgtgctccatgttttgtttttgtattttggtttgtaaatttgtagaattaaatcattttccttgttgtggaaaaaaaaaaaaaaaaaaaaaaa

SEQ ID NO: 569 - DNA, 485 bp, Homo sapiens
  misc_feature (1)...(485): n = A,T,C or G
ggatggccnnnnnnnnagccgcccccttgagaccatacgatagagcgcgtatgcggnggcaagnggagatgggatgtgggatgtgaaggtgccttgacccctaccctgccatcagtcacttcctgtcctttcaggccacctggttcttagtcccccacctccgcacacgggccctgccctcatcagtgctctcaacatcctggagggcttcaatctcaccagcctggtatcccgagaacaggctcttcactgggtggcagagaccctgaagattgcattagccctggccagcagactgggagatcccgtctatgattctaccatcactgagagcatggatgacatgctcagcaaggtggaggccgcctacctccggggccatatcaatgactcccaggcagcccctgccccactcctgcctgtctatgaactagacggagctcccacggctgcccaggtgctgatcatgggacctgatgacttct

SEQ ID NO: 570 - DNA, 424 bp, Homo sapiens
  misc_feature (1)...(424): n = A,T,C or G
nattgangaccctnaggcagngcgcgggaatccggcgacagaacgcaagctgcggcccgaggtgctgcaggacctgcgggagaacacggagttcaccgaccacgagctgcaggagtggtacaagggcttcctcaaggactgccccaccggccacctgaccgtggacgagttcaagaagatctacgccaacttcttcccctacggcgacgcttccaagttcgccgagcacgtcttacgcaccttcgacaccaacggcgacggcaccatcgacttccgggagttcatcattgcgctgagcgtgacctcgcggagcaagctggagcagaagctcaagtgggccttcagcatgtacgacctggacggcaacggctacatcagccgcagcgagatgctggagatcgtgcaggccatctactagatggtg

SEQ ID NO: 571 - DNA, 424 bp, Homo sapiens
  misc_feature (1)...(424): n = A,T,C or G
nttcgagaccctattgagtgcggtggaattccgcttcctctcgccgccgagggtcaggagcccgggagcgcgaccctcccccggcccggcctggcccggcctggccagtccccgcggtctctgcccgggctgacgcccaggaatgtggtcgacgagaagccccaacagcacggcgtggcctctcagcctcgagcctgatccggggatggcctctgcctccaccacaatgcatactaccaccattgcagagcctgatccagggatgtctggatggccggatggcagaatggagacctccacccccaccataatggacattgtcgtcattgcaggtgtgattgctgctgtggccatcgtcctagtctccctcctcttcgtcatgctgcgctacatgtaccggcacaagggcacgtaccacaccaat

SEQ ID NO: 572 - DNA, 461 bp, Homo sapiens
  misc_feature (1)...(461): n = A,T,C or G
attganaattgtagacattaggcagtgcggtggaattcccaatgaacagcacagtatgggagacacaccaactactcttcaaatcagtgcgtacctgctctacgcgtgaaggtacagaaaacctccacggccttttcagtatttggtgcctttaaagaggcctaaggacttagtttatttgggctagactggaatgcagcagtactgccttcaggcctggacagccaggggctcctcgggccctgtgctctagaaggcccattctatgtctgcttcgccagcaccctttccccatcatggggtagatgcccaccagccctcactatctactgcttgaccatcctctgacttcctgggcccctagaatttataaggtccctagatatcccagaacctgccaccatggcctctgcaagcctctcctccaccttcaccccaagactaggggcaggaatgataag

SEQ ID NO: 573 - DNA, 462 bp, Homo sapiens
  misc_feature (1)...(462): n = A,T,C or G
nattgatgnactgaagcccatgcggnggaattcctgatggcgagcagggtggacagcagggccaccggctggaccatggcggtcacctggagatgagaaaggcccgcgggggggaccatgtgcctgtgtcccacgagcagccgagaggcggggaggacgctgctgtccaggagcccaggcagaggccagagccagagctggggctcaaacgagctgtcccggggggccagaggccggacaatgccaagcccaaccgggacctgaaactgcaggctggctccgacctccggaggcgacggcgggaccttggccctcatgcagagggtcagctggccccgagggatggggtcattggccttaaccccctgcctgatgtccaggtgaacgacctccgtggcgccctggatgcccagctccgccaggctgcggggggagctctgcaggtggtccacagccggcagn

SEQ ID NO: 574 - DNA, 427 bp, Homo sapiens
  misc_feature (1)...(427): n = A,T,C or G
nttgacgaccttttgaagacccactaaacagngnggtggaattcgtctgtggcatggcgtgttaacaagcgtcatgaacaggatgcacgtggtcagcgtcccctacgcgctgatgaaggcgaacccactctcctggatccagaaagtgtgcttctataaagctcgggccgcgctggtgaagtcgcgagacatgcactggtctctcctagctcagcggggccagagggacgtcagcctcagctcactgcgcatgctgattgtggccgatggtgccaacccgtggtcgatctcctcctgtgacgccttcctcaacgtcttccagtccagaggtctgaggccagaggtcatctgtccttgtgcaagttctcctgaggcgctgactgtcgccatccgcaggccacctgatctgggaggaccacctccaaga

SEQ ID NO: 575 - DNA, 478 bp, Homo sapiens
  misc_feature (1)...(478): n = A,T,C or G
tggagtgcccgggtaanaaacccagggtgcctgaagnacgggananncncacanaaaancaaaagttagaattcagcattccgttcctcatccacaggagccacatttcatggactcagcagccgcatgtggcttagcagctgggacgctggatagcacaaatataaaacacttcccccgtccccccagaaagttctgcagcacagtcgcatgctgaactgtgtcctcccgtaattcatatgttgaagtcctaacccccagtacctcagcatgtgactgcatttggagttaaggtttttaaaaaggtaatgaagttaaaatgaggtcacaggggtgatccctaatccggtatgactggcgtcctcataaaaagaggagatgaggacacagacacacacagagggcagcccatgtgaagacacagggagaagatggcatctacaaaccaaggagaaaggcctccgatggaactcccccn

SEQ ID NO: 576 - DNA, 425 bp, Homo sapiens
  misc_feature (1)...(425): n = A,T,C or G
nattgacgacccttattgcangcggtggaattccagagcaatgtggccaggagacgccactggagaacatgctgttcgcctccttctaccttctggattttatcctggctttagttggcaataccctggctctgtggcttttcatccgagaccacaagtccgggaccccggccaacgtgttcctgatgcatctggccgtggccgacttgtcgtgcgtgctggtcctgcccacccgcctggtctaccacttctctgggaaccactggccatttggggaaatcgcatgccgtctcaccggcttcctcttctacctcaacatgtacgccagcatctacttcctcacctgcatcagcgccgaccgtttcctggccattgtgcacccggtcaagtccctcaagctccgcaggcccctctacgcacacctg

SEQ ID NO: 577 - DNA, 461 bp, Homo sapiens
  misc_feature (1)...(461): n = A,T,C or G
nttganaatcgagacattagtccgtgcggtggaattcccccgagctaagctggctgcgccgcatctcacggtccccggggcccgagcgctgcgcctggaccggcgccgagcgaggcggccaatcggccggctggacccacagtccccgcgccataggcgggtcggggctttcagacccggctcccagccctcgaactcggtaaccttggaggtcagcttgagatgactgcgcttcctgcacgcgttgtcctccccagaaacgcccaaaatggcaaagcggcgtccgtggccgcccgaggccctccctgcctgggttctccccagccgaacctcacgcccggcccctccttcattctctcctggccaggctgctcctgcccttgggcgaatccgctgcgtcccacggtcctgactgtggcatttctgcgtgtctggagggctcccccggcagcgacgtcctg

SEQ ID NO: 578 - DNA, 489 bp, Homo sapiens
  misc_feature (1)...(489): n = A,T,C or G
cgcgcccaattgagaccctcactgnatagcntccgcagngncgnggaattcctgtgtggatggagctttgtgttgctcagtccgtagagttagggagcttgcaggcgactgtggttaattacaaagagttaatgtggtgattggtgaccatatttcagcctgtcgttttttgctagtctccaggctgcaatcgatatagctgtcaaatgaagttataccaagaaatgaagacttcacataatgcaggggtgagaggagggaataaatcttcatataagagcaattctcggccgggcgctgtggctcatgcctgtaatcccatcactttgggaggccgaggcgggtggatcacgaggtcaggagatcgagaccatcctggctaacacggtgaaaccccgtctctactaaaaaatacaaaaaattagccgggcgtggtggcgggcgcctgtagtcccagctactcnggaggctgatgcaggagaatgcctn

SEQ ID NO: 579 - DNA, 493 bp, Homo sapiens
  misc_feature (1)...(493): n = A,T,C or G
agggcggtncnnncattgagaccctantgagagtgccgtaattcctgaacgcttcggtaggataagtgcggtgggagggggctctgcggttttggggagcccagggcgggaacccggacccggctggaagtccggagcctggccgcagccccgcccctccgctctttcttggtgaccttaagccagtggctgcctttttctgagcccgggcggggccgaaggcggcccgtaggccctcgggactcccagcactgcagagggtgtgaggtctgacatccaagacacgttgtttcgtatttctgaaggaagaactcaagctccgggaagtgatggctggggatggggcgggcaacttggggaccgagtgtacgatccacgcctaaggttgagggcggccgagctagccaggcagccgtgaccccagtgcttttcagacgtttcttagcttccagagcccaacacatacagctgatacacgcagaccagatctggg

SEQ ID NO: 580 - DNA, 500 bp, Homo sapiens
  misc_feature (1)...(500): n = A,T,C or G
nggcaggtcgccccaattgaaacccctcctcgagatccctagtccagtgncgnggaattcctccaccctgtatctcctaccctagctgtggccctatcaaatcttccccaaattcctggcacagcctcctggctagcggtgccctgctcccatacctcccagcctcccacccaccacagactgggaaccaccctgaagattcatgtgcggccagctcagcccctccccgcttagggacccacaactacattgccctgggtccagcttaaccctaaaagtccttggggcagctctgaccagctctggctctgagctctaaggccttctaccgattctgcttggcctcagccatgggtcctccctgccccaggcttagccatgggctgcacttcctgcaccatagccccgagggaggcccccaagagagaggtcaggactcagaccatccatgcccaaagctacagaccactcagatatagggccagctacatgaggcgcac

SEQ ID NO: 581 - DNA, 522 bp, Homo sapiens
  misc_feature (1)...(522): n = A,T,C or G
ctcaggaataattgtatttatctgacgcgcgtgcgttcatgagtatttttattaatgagctatatagccgttgcnannnnnnanaatgagacttgagaacgtcgggaacccaccacagcacctgagccgccccccggtccccagcagtcccgatgcaacccctttcccatggtcctggggacggggcggaggaagatgaggctgtcattggggggcctggtggccgaggtccctggtcctgtgagaacttcaaccccctgctggtggctgggggtgtggccgtggcagccatagccctgattctcggtgtggccttcctggtccggaaaaaataatacctgggggccaggcggggggcacggagccacttcctgtacagacccgaggaagccagtgcatgcagagttcacccttacctattcgtacacacgcacattcattacacacctacatatgcccccaacacacgcgcacggtgaagaggacgcccgagcccacccctgctgacccaagactttcccc

SEQ ID NO: 582 - DNA, 479 bp, Homo sapiens
  misc_feature (1)...(479): n = A,T,C or G
ggccggggnncccnnncctagnaccttcgaanngcnctgcnaccttagcacatacntnnnnntacattcctggcagcaacgaagctgagcatccaacctctgcacatcctgacaacaattgctgttttctgaagagtggccatcctgatggatgtacccaagactgctctttataagctgacattttactttggggactaaaaatctccttttttttttttggcgggggggccccaaattttatttaaaaaaggcccctttgaaaccattgggtaaaaaaaaaaaaataaggtccttcagccggtttttgatttaaaaaaaaactacccgggggataacaacccagtttaaaaatggcctccaattggccctttttaccatttcctggcgggttttttttttttaaaaaggcccatagaacctttttgtttttaaaaggcgtgcccgcccttaaaattttctaacctaaaagacacagg

SEQ ID NO: 583 - DNA, 489 bp, Homo sapiens
  misc_feature (1)...(489): n = A,T,C or G
aggccggnnttcgagatcatagagcaccctaggcagngacgcggaattcctacaaggagagaggactgcaaggaggttttctataagacacttggttcctgggtttggactagattaggtgagagtgtccctggagcctggactcctatagaatctggtctaaggagctgatgaacaataaattaaaaatactttaagatgtcattttcatctattaaaatggaaaaaaatacaaatgtttcacagctcacagtattaacagtatgttcccatattgccataatctgcaaagattggaaaactccatgtccctcattagggacttgggtatatctctatagagcagtaatatgcagccacaagaaataaagaggacactctctatgtattgttacatattgttaagcagagatctccaaagtcagttgtttttttaaaagatgtgaatagtatgctatcatttgcatacaaaagggtgggagacgaata

SEQ ID NO: 584 - DNA, 491 bp, Homo sapiens
  misc_feature (1)...(491): n = A,T,C or G
gaggcccgnnaatcgagatcatagagagccctatggaagtgagacagagcagctcacctgcgagagcctggatgtgatggcgtcacagaagagaccctcccagaggcacggatccaagtacctggccacagcaagtaccatggaccatgccaggcatggcttcctcccaaggcacagagacacgggcatccttgactccatcgggcgcttctttggcggtgacaggggtgcgcccaagcggggctctggcaaggactcacaccacccggcaagaactgctcactatggctccctgccccagaagtcacacggccggacccaagatgaaaaccccgtagtccacttcttcaagaacattgtgacgcctcgcacaccacccccgtcgcagggaaaggggagaggactgtccctgagcagatttagctgggtaggtgacgaacgcacttccatcggcttcctcttccgtcccagtcctcacagccccgcaactt

SEQ ID NO: 585 - DNA, 451 bp, Homo sapiens
  misc_feature (1)...(451): n = A,T,C or G
nattgagnccttgagagcctcggcagngncgnggaattcccagaacctgctgtactacggcgttgtgacactggtgtccatcctccaggtaggtgatttgggtttggttaagtggagagcgggtcatgtggctggaccagaccagggctgtgtcagcttcccaagcccctcactcaggcccctatgccttctgctaccctctagtactccaatgtatactgcccaacgcccaaggtccaggacctggtagatgacaagtccctgcaagaggcatgtctatcctacgtgaccaagcaaggtagtggtgggttctgggggaagccatcttggggagggcagggccacatgatgagctgatccctggcacccacagggcacaagagggccagtctccgggatgtgttccagctatactgcagcctgagccctggcactaccgtgcgagacctcg

SEQ ID NO: 586 - DNA, 228 bp, Homo sapiens
atatcccggaaccaaatacttatatttttgacttggttggaggggatgatcttcttgtagaaatacttatgaggcctacgatctctatccggggacagaaactgaaaataagtgatgaaacgtccaaagactgcttgagtatcctgtataatacctgtgtccgtacagagggagttacaaagggtttggcagaaaagaatgactttgcgatcctcctgtgtagatcga

SEQ ID NO: 587 - DNA, 493 bp, Homo sapiens
  misc_feature (1)...(493): n = A,T,C or G
agggcgggcgcccaattgaaacccttatgagaccctagtcagtgtggnggaattcgcccatccaggacacagccaactgcatgcttcagagcctggggaggtctcagccctggctgtggggaccctgaggatcaggctgttgcccgcctccgcgatcagccctttttttttaggggggaatggggtgccgagggcacaagctccaacacagctcatgtctgtggggccaatgtgtcaggttccctgggagggcctggagggttgatagcggacagggccaacagtacggccagtgagctggactcctgggctgcagggggtactgcagggtgcccctgaatggcatactttatcggggcctctcagctcatgtaaaagcctggtaatcagggaaggcaagctcacggcattctgagtgagcggggtaagggttggggccagcagggatttgaccatcagatccacatgcagtccaagatggcacagtgtcagc

SEQ ID NO: 588 - DNA, 480 bp, Homo sapiens
  misc_feature (1)...(480): n = A,T,C or G
agggcaggtnnnccncnnccctaggacctccgaagngccctgggtccctaggaagcccaagnnagnggncagcagcctgcagggggaggactgccgagaggctgtgcagcgtcttggggtcagcgccaacctgccggaggagcagctgggtgccctgctggcaggcatgcacacactgctccagcaggccctccgtctgccccccaccagcctgaagcctgacaccttcagggaccagctccaggagctctgcatcccccaagacctggtcggggacttggccagcgtggtatttgggagccagcggcccctccttgattctgtggcccagcagcagggggcctggctgccgcatgttgctgactttcggtggcgggtggatgtagcaatctccaccagtgccctggctcgctccctgcagccgagcgtcctgatgcagctgaagctttcagatgggtcagcataccgctttgaggtccc

SEQ ID NO: 589 - DNA, 486 bp, Homo sapiens
  misc_feature (1)...(486): n = A,T,C or G
agggcagnnnnncnnnnnncctgcnaccttcgnannncccatcnacctacgtacggccgtggaanttaggcagggcctgagggagcccctggctttcccctcatcctcaggaaaggtggtcaggaaaactctggctggacaagggtcagtcttcggggtcagcagcgagattgctctgcagccagtgagggaggtccccgccatgccggctggaaaaagaacctcgcatcttttggtgagtatgcaccttggcagccagcaggaaagcagcgaagagccgcgcgccctctggcctcaagggagcattggcagaaccataaggtactgcagaagccgtcgaaaccgactgctcggctggattaggcgtgttggctacatctttcccacaaccgtataacgaccgatggtcatttctccaagagcaggcttggcgagtccttgcagagctgacatagaggcgcccgcatgtcacttagtctaacgctg

SEQ ID NO: 590 - DNA, 495 bp, Homo sapiens
  misc_feature (1)...(495): n = A,T,C or G
ggcaggtgcccaaatgagcccctactgagaccactagtcagtgnggnggaattccggttggctgagcaacgaagggccaaagctgacctctgagtggccaactgcagctcccagggactccgagacctccggtccgagaccctgcctgggttcaccccccacaacccagacccagaaccgctctccccttccctgcccagggcccctcctccccagcccagacccccaggtgcccaaggcctgctgctggagcaggcaccttgggctgggcctgctcccccagggcccagggccccccagcttagaacagcccttggtgaggtggtcatgcccgggcaaaggccctgcttcctggaaaggacactcagagcagctccaagacagaggctctgtggcgggggtccctgagagtgcccccacccatctcatgccccagggaccgccactgcccaccgcctccagcagacatgcatgtgcgcccgcagccctgcctcc

SEQ ID NO: 591 - DNA, 450 bp, Homo sapiens
  misc_feature (1)...(450): n = A,T,C or G
naatgagaccatgagaactgtcgnggaannccntnggngatgcgaagcctctgggccacaggccagtgtgagattgggaagcccctttttccagagctgtccagggcaggtgcggcaggcctgatgggtgcttttggcacccccttcctagtcaggaccacaggcacctcagagactgagatgtcggctatctgccaggaatacaggagcacctcagccaccgccgtgacattctctgactcgtcactgttgaagacgcaatcctcggactctgggaacaacagggaggcactaagccatggtcccagaaaaatcaaggccacccagggccagaggcagagccttagcaagactgagcccacccagagccagaggcggaactccagcaagaccaaggccactatacacaagaggaactccagcaagaccaaggccacccaaagccagagg

SEQ ID NO: 592 - DNA, 485 bp, Homo sapiens
agagcggcccagattgatcccctccttgatacctctaggcagtgtcgtggaattcattaaactataatgtgacagtgattgtttaagacctactgaaatttcagaaatgttaacatgaggaaaaaaatgtacgtcttagaattggtatactaggaccggccgggcacagtggctcacgcctgtggtcccagcactctgggaggccgaggcgggtgggtcatgaggtcaggagttcaagaccagcctggccgggatggtgaaccccgtctctactaaaaatacaaaagaattagctgagtgcagtggcaggtacctgtaatcccagctacttgggagactgaggcaggagaattgcttgaacctgggaggcagaggttgcagtgagccgagatcgcgccaccgcactgcagcctgggcagtaagagcgaaactctgtctcaaaaaaaaaaaaaaaaaaattggcctaatagggagtaggggaatta

SEQ ID NO: 593 - DNA, 488 bp, Homo sapiens
  misc_feature (1)...(488): n = A,T,C or G
ggcacccccattgaagaccctagtcagagngccggaantcgaaagaccaccagggatccctgtctgcctggtgctcgggacacggngagcgccagggacttccactgtgcccagcaggccggcagatggagtctcgttttgtcgcccaggctggagtgcagtggcacgatctcggctcacaacctccacctcccaggttcaggcgattctcctgcccctgcctcccgagtagctgggactacaggcgcccgccaccacgcccggagaccgggtttcaccgtgttagccgggatggtctcgatctcctgaccttgtgatccgcccgcctcggtctttattacaaggcccagggggtgtctgtcagtgggacgaccttgtttcccctccacgtctcctctcgtgagattgagtagctggaaggaggttctgtctctgacctgtggtttgaaagaaaataaagaagaggggccagatacttcaaattactt

SEQ ID NO: 594 - DNA, 324 bp, Homo sapiens
  misc_feature (1)...(324): n = A,T,C or G
agggcggnntnncncnnnttatcggtcctcggaagngctacgtgttccatgggacgaggcgcacactgcttgctgcgcaaaggcattctggaagaggaggctgtgggatgccagttggtcaatatttggggacctcaccagcttatccccataacagcccagggaggggcgcaggtcatccacgatgatgagaagaacgttcagagcatctgtggtcgagttggcctgcgtttcggatccgagggcgacgcagacggagctcagaaccagacccagccagagaaggcctcggccggtccggggtggcggcatttcggcttcgac

SEQ ID NO: 595 - DNA, 481 bp, Homo sapiens
  misc_feature (1)...(481): n = A,T,C or G
cgggacatcgttgcattctgcatngtgcngcaattcattgngncctcgataagatttctatggaagaaatattttgacagctttaaagaagtttgatatccgctgctctagaagaacaaattccctagctggagtcaagaagtctgtgttctttaaggtcttgttttcaaatacagtaaagagttgcatctttcgatttttcttgacgcacaatgacagtgattttgtagtgccatggaaagaacacaggcctcacagccatagagcttgtgggagaatctctgtttcattacttcactgctctaaggctttgcgcaagtcacttatcctccctgcatatcagnttccttattcttacaaaagcagcaatcatacctgctatgtaggttgctataaagattggagataagatacataagtacctagtacaagttttgcatctaataacactcaatgaaagctattaaatatgaaatatagg

SEQ ID NO: 596 - DNA, 482 bp, Homo sapiens
  misc_feature (1)...(482): n = A,T,C or G
agggcgnnnnnnnnnnnncctaggacctccgannncccatgnaccttagcagagcggggaattaagagctcaagcgccatcgggatgagccattgcttgtggaggcttggataacaagagtgatgggtacccctggacgccagacaaaaatggaaacatggctgcccaaaccatgtctgttgctatgcacaccaactacctgtgtgcctgcttattcaacaaatctgacatgcacatcctgacagagagcggggatatcacatgtgccctgtgggacgtggagagcgggcagctgctgcagagcttccacggacatggggctgacgtcctctgcttggacctggccccctcagaaactggaaacaccttcgtgtctgggggatgtgacaagaaagccatggtgtgggacatgcgctccggccagtgcgtgcaggcctttgaaacacatgaatctgacatcaacagtgtccggtactacccca

SEQ ID NO: 597 - DNA, 490 bp, Homo sapiens
  misc_feature (1)...(490): n = A,T,C or G
ggcgatannnnnnnaactggtacctcgcangncgggnctgataacgttgcataggaagtttaggtaaggcaggagaaagtgttccaggtagagggaacagcatatgcagaagccaggaaggaggtgagatgatagcgtatgtttggaaacagaaagaagtaataggcctgagtggatgggagagaggggaacgctggagaagaggacttgggcttggggggcatgaggaggtcaccatttgtactacacccagtacagatgtccactgaggggcccattgccactcccctccccaggtccctgaagacttcatctcccgagagctgtttgacacagtccaagtgtacatcatcaccaagccagagctgcagaacaagcttatcactgtctatggaaaagaagctgatcggctgtcctgtgtgcatcgaacacaagaagtacagccgcaatgctctcctcttcaacctgggcttcgtgtgtgatgcccaag

SEQ ID NO: 598 - DNA, 496 bp, Homo sapiens
  misc_feature (1)...(496): n = A,T,C or G
ngggcggtcgccccattgaganccntaatcgatagtcgtatgcangncgnggaantccgcatccaccagcgccaaactcagtgataagtcgcgctatgattactttgccaggaccgtgccccccgacttctaccaggccaaagccatggctgagatcttgcgcttcttcaactggacctacgtgtccacagtagcctccgagggtgattacggggagacagggatcgaggccttcgagcaggaagcccgcctgcgcaacatctgcatcgctacggcggagaaggtgggccgctccaacatccgcaagtcctacgacagcgtgatccgagaactgttgcagaagcccaacgcgcgcgtcgtggtcctcttcatgcgcagcgacgactcgcgggagctcattgcagccgccagccgcgccaatgcctccttcacctgggtggccagcgacggctggggcgcgcaggagagcatcatcaagggcagcgagcatgtggcc

SEQ ID NO: 599 - DNA, 497 bp, Homo sapiens
  misc_feature (1)...(497): n = A,T,C or G
ggcgggtnnnnnnnaactggattccctngccagngngcnggaattgactgactttgaaggaaagagacagtgctgtgagtctgcaccctctaagagtgtggaccctatagctggacacaggggacctccagaggccagggtgtgcgtgaggcctggatctgccccttcctggttctatcacctttctccagtttactcaactctaaaacagactcctatttcccagtggtggtgcgaggattaaatgactgagaatagtgcctggcacattataagtctttggtaaagccaagccagtattcctatcattattaagaggagggaggaacaccccatgaccaaccaagtataccccaagtatacgccagccatcagcttgttggggtgctggaatccttccactggacaccccttaagtcaaaatgactccaggttctgtccctgtctatttctttcccctactgggaaatattaaccttagcgatcatcacagtatt

SEQ ID NO: 600 - DNA, 215 bp, Homo sapiens
ccggccggcacgctttgctgatctaaaatcagaacaattagagagtaatgattttttttggaataacaactcctacagacactcagatctgccctcgcttcagcgcctcccaggcctccttaccagcagccaggcgagagcgcgcacacccctaaaaagcaacttcagagttaaccggctctggatcctggaactatataaactaatccgtgtgg

SEQ ID NO: 601 - DNA, 489 bp, Homo sapiens
  misc_feature (1)...(489): n = A,T,C or G
ngggcggggccccattgagaccatgctgatggcagtaatncctttaccaaagcgggtgaaaattgtggaagttggtccccgagatggactacaaaatgaaaagaatatcgtatctactccagtgaaaatcaagctgatagacatgctttctgaagcaggactctctgttatagaaaccaccagctttgtgtctcctaagtgggttccccagatgggtgaccacactgaagtcttgaagggcattcagaagtttcctggcatcaactacccagtcctgaccccaaatttgaaaggcttcgaggcagcggtcaccaagaagttctactcaatgggctgctacgagatctccctgggggacaccattggtgtgggcaccccagggatcatgaaagacatgctatctgctgtcatgcaggaagtgcctctggctgccctggctgtccactgccatgacacctatggtcaagccctggccaacaccttgatggc

SEQ ID NO: 602 - DNA, 501 bp, Homo sapiens
  misc_feature (1)...(501): n = A,T,C or G
ggcgnntnnnnnnncctggaatccctctgcangnncnnnnctgatntccctatgcagtgtcgtggaattcccagaagcaaattcagatcactcagctctttggggttcccgttgtggtggctctgaatgtcttcaagaccgacacccgcgctgagattgacttggtgtgtgagcttgcaaagcgggctggtgcctttgatgcagtcccctgctatcactggtcggttggtggaaaaggatcggtggacttggctcgggctgtgagagaggctgcgagtaaaagaagccgattccagttcctgtatgatgttcaggttccaattgtggacaagataaggaccattgctcaggctgtctatggagccaaagatattgaactctctcctgaggcacaagccaaaatagatcgttacactcaacagggttttggaaatttgcccatctgcatggcaaagacccacctttctctatctcaccaacctgacaaaaaaggtgtgccaa

SEQ ID NO: 603 - DNA, 427 bp, Homo sapiens
  misc_feature (1)...(427): n = A,T,C or G
cttgaattccngcccactagnccgngnggtggaattcatgaggaggaagatgagaaggacaaaggaaaactgaagcccaacctaggcaacggggcagacctgcccaattaccgctggacccagaccctgtcggagctggacctggcggtccctttctgtgtgaacttccggctgaaagggaaggacatggtggtggacatccagcggcggcacctccgggtggggctcaaggggcagccagcgatcattgatggggagctctacaatgaagtgaaggtggaggagagctcgtggctcattgaggacggcaaggtggtgactgtgcatctggagaagatcaataagatggagtggtggagccgcttggtgtccagtgaccctgagatcaacaccaagaagattaaccctgagaattccaagctgtccg

SEQ ID NO: 604 - DNA, 503 bp, Homo sapiens
  misc_feature (1)...(503): n = A,T,C or G
ggcgnntnnnnnanccttgatacccctggaannnncnnnnattgatnaccntactgnagngncgnggaattcgtgggaagtgtttacacatggagagatgccccatggtgggcaggcagatgatgaagtactggcagatttgcaggctgggaaggctagacttgctcagcccgagggctgcccttccaaactctatcggctgatgcagcgctgctgggccctcagccccaaggaccggccctccttcagtgagattgccagcgccctgggagacagcaccgtggacagcaagccgtgaggagggagcccgctcaggatggcctgggcaggggaggacatctctagagggaagctcacagcatgatgggcaagatccctgtcctcctgggccctgaggcccctgccctagtgcaacaggcattgctgaggtctgagcagggcctggcctttcctcctcttcctcaccctcatcctttgggaggctgacttggacccaaactggg

SEQ ID NO: 605 - DNA, 507 bp, Homo sapiens
  misc_feature (1)...(507): n = A,T,C or G
nggcgnatananaaaanccttgatntcccctcggcangnncnnnnctgatnacccctatccangncgnggaattccagctctgcatctcggggaaggtcacacagaccctcagccagaagttgagcgctctgttgaggccgtgcagcccctggaatgctgtacctttgccttgcttttttctgcctctgtacaaaagaccagcccatgccctggggctgggtcaatggccggagtctcaggtagagctctgggcagctcacactcctggaggagtgcacagcaccattacccagagtgcaggctatgtccaggctgggcagcagcaaaaaaaacgatgtgagatttgtgctcatcagccaggattttttaaaatattgtgatttcaacatctgcctcctggcaaaagacttctctttgttctgagcagagcttgtccatcttctcaaaagctaaccgtcctttttcaccgaacgacagtgtggtttcccgggctgccgcccgcacgg

SEQ ID NO: 606 - DNA, 491 bp, Homo sapiens
  misc_feature (1)...(491): n = A,T,C or G
ggcggtnnnnnnnaattgantccctggcagnggcgggattgaaattcacaccatctgaaatatgcagaaaacataactgcagaaagctcacgacaatagatttcccctcattctttttttgtagaaggtgtaaaaataatgatatgtgattattataatcacaaactccatgaaattaacaatttagccaacatttattgagaagcgacgaggtggaagaccatgctggctactgtggaagcgttcagggtaaccaagcatatttcttatttccaagatgtttatagacgagaggcggaagagcagttttcactgtatctgtgtgctcgctcttccttttattcaatcagtaagcatctatttaatgcgtatcgtcaagcactatgccaagttctaggggttcacacaatataaaaatacatgatcataaatggtttgatagaacaaagtatacagggagcatagggaaggaaaggttaatcctgacttaa

SEQ ID NO: 607 - DNA, 499 bp, Homo sapiens
  misc_feature (1)...(499): n = A,T,C or G
ggcganaaaaaaancctgattacctcggangnncnnnnctgatgaccctagtccatgtcgnggaattccccacggtcgctcgggtcgcgacaggctcccggctagagggcctgtttagcgccgcctccttgaaacttagcgctctgacccagagtctgaccagggtacggcaggcgccgaccgcgtctggagccactattcgcctaccagcgtctcccgtcgagatgtttttaaccagcgcgtttctcaccggcttctcatttcactgtttgtactccgggatcgggcacggagaagacatcctggcgtcagtggagcagataaccattgtttctcggccgctatctggtcagaggggagctgggccgggaaattctgcctacaccccgaggcggtcgcagggtggccccagagccgcaaccacaccaggctttcgcttcccctgccgaggcctcgttcgccgcgcagttctccgacttacggtcaccgtgcaagattg

SEQ ID NO: 608 - DNA, 499 bp, Homo sapiens
  misc_feature (1)...(499): n = A,T,C or G
aggcgantnnnnnnnnnccttgantnccctcgcagngngcnggatttgatggctctttggcaggccggcgagcgggcccggcgatctgggcccagggctgggtacctgcggccgggggtcccgccccgaaaaggggctacagctctgagatgaagacggaggacgagctgcgggtgcggcacctggaggaggagaaccgaggaattgtggtgcttggaataaacagagcttatggcaaaaattcactcagtaaaaatcttataaaaatgctatcaaaagctgtggatgctttgaaatctgataagaaagtacggaccataataatcaggagtgaagtcccagggatattctgtgctggtgctgaccttaaggaaagagccaaaatgagttccagtgaagttggtccttttgtctccaaaataagagcagtgattaacgatattgctaatcttccagtaccaacaattgcagcaatagatggactcgctntatgtggtgn

SEQ ID NO: 609 - DNA, 496 bp, Homo sapiens
  misc_feature (1)...(496): n = A,T,C or G
ggcgagtnnnnnnnaactgatgcctgtgatgncngaaatgatacccttgccangtcgtggaattactcctgacctcctgatctgtcagcctcagcctcccaaagtgctgggattacaggcgtgagccactgtgcccagcccgggaacactgtttttagagttcttaacagccatacgcctcttggcttgtgcgcgtctcggcttgcgggtaaaggccaggcgccccgctgcgtgcctcgggccgtgcctcgtgatctcctcagaaggctctcaaggtcaccttttaacaagtgcatctgttttccagtaacgaatccagaaaactctggagagcccttcagagcatacacaccacgtctacttctcagcgcctctggagcgagtcccgttgccaggagaacttctttcttgttctcggaatagatgctgcgcagaagaacctttctggaggccagggccacatcatggaagattgtgacctcaaagagcctgaagg

SEQ ID NO: 610 - DNA, 470 bp, Homo sapiens
  misc_feature (1)...(470): n = A,T,C or G
ggcnagatcgaacccttnnaggatcgagaactctacagaggaactaacgtccaacgacaagacgaggattctcaacgtccagtccaggctcacagacgccaaacgcattaactggcgaacagtgctgagtggcggcagcctctacatcgagatcccgggcggcgcgctgcccgaggggagcaaggacagctttgcagttctcctggagttcgctgaggagcagctgcgagccgaccatgtcttcatttgcttccacaagaaccgcgaggacagagccgccttgctccgaaccttcagctttttgggctttgagattgtgagaccggggcatccccttgtccccaagagacccgacgcttgcttcatggcctacacgttcgagagagagtcttcgggagaggaggaggagtagggccgcctctgggctgggcatccggcccctggggccaccccttgtcagccgggtgggt

SEQ ID NO: 611 - DNA, 456 bp, Homo sapiens
  misc_feature (1)...(456): n = A,T,C or G
tgcggcngnnnnnttttggctgggttccatggccatgcggggattccagcaccgagtgtcgccaggacgtggccacgaacctgctcaagctcttcctggtgcatgggctggccaaggacttcctggacctgctcttccagctggagctgagtcgcaccagataagctgagactcctcaggatgtggttctgcagcagatgaggtgcgaacaaagcctgctctgccctgggcacccaggatggcactgagttctaaaaggcaaagggtatgtggtgaggggccaggctgaggccctggtgtggtaccatcatgggcagcagcaccatttgaggccgggtaggagagacgtgcagggcctggccccccaagagaccagcagacaaactgaggcggcagagagagagattccagtgtcaccaggaagactgcagatcataacaacaatggttgctgatt

SEQ ID NO: 612 - DNA, 471 bp, Homo sapiens
  misc_feature (1)...(471): n = A,T,C or G
ggggnatcggaccctatccangtggaggaactcaatggtgtaatgccaatgacaagagaaattgaattagtaattaatttaattgtatattatgaaattatatagcttttaaaaattttatcctttgccttattttaaaaaagaagcctgcttatattgattctgtaagtattgtctctttcaaacttgtgagatataatttcttattttcttttcccaatcattcaaatattaggtattcaacctaatatttggcatgacactttcagtccatgcaaatacccttttctccaaagattatagtaaatatacatcaatatttatcactagaggattgagttttctttacagtgttcattaaaatgaaaaaaatgaagtatagaatttgtacttatgtgtttttcattgacctctctttgaccttatattgttaatcactagcacaatttcaaaaaatagtcaatgaagatt

SEQ ID NO: 613 - DNA, 426 bp, Homo sapiens
  misc_feature (1)...(426): n = A,T,C or G
nattgagtactcctacnccgngnggnggaattcgtcactgcatacctgtggatggcgggcaccggggcatccctgacaggttggttttctggggctgtggggagtcttgggtgcttactctaggtcctcactgtttttactgtgtgaaccctgcgggctggctccgcctcccaggagccgctcccgcatgctgcagcctggtgacctctgggctggtgagctcagcctctgtccacgaggccaggtgtctggggagggcactggaagcagctggaggcagcagggcctgacctgccccatcccctcgagggcacgagcaggcccccagggcttgtcaagggccagggccttcccatctctgcctccttgcctggtcgggtgtgctcggggccatggcacagcgggagggaaacatgggtgggtggg

SEQ ID NO: 614 - DNA, 469 bp, Homo sapiens
  misc_feature (1)...(469): n = A,T,C or G
ggcgggccggggnnnnttctggattgatttcattgtggaggaactcgatattatcaacattgatgtcacagtctattacaatggctaccatggagacacctctgaaacatttttggtgggcaatgtggacgaatgtggtaaaaagttagtggaggttgccaggaggtgtagagatgaagcaattgcagcttgcagagcaggggctcccttctctgtaattggaaacacaatcagccacataactcatcagaatggttttcaagtctgtccacattttgtgggacatggaataggatcttactttcatggacatccagaaatttggcatcatgcaaacgacagtgatctacccatggaggagggcatggcattcactatagagccaatcatcacggagggatcccctgaatttaaagtcctggaggatgcatggactgtggtctccctagacaatcaaaggtcggggcan

SEQ ID NO: 615 - DNA, 485 bp, Homo sapiens
  misc_feature (1)...(485): n = A,T,C or G
ngaatcgagaccntnggannnncnnactgagantcctactcagngtcgtggaattcctctttagcatctttgcttctgtcaacagagtctccctttgactaagaaagctgtgttttttctgcttttcctcttccaaatgctgcttaagtttctgattttctttaactaattcagtacttgtccctttatcttccaatattctaatctgttctcttagtttgtttaactcttcctgtaatgaggataaggctttttcttccttctccaaggatactcttaaatactgattttctgtagcaaggttcgttttctgagtttcaaaggacatcttctctgcttcagtaagtgtccaacaccttgcaagattttctttcaatgacttataatctataaaagattcttgttcctgttgacactgggaaagataatccttcatatcattcaattcatcttcatgtatctttctgactaactgttgacgcttn

SEQ ID NO: 616 - DNA, 483 bp, Homo sapiens
  misc_feature (1)...(483): n = A,T,C or G
tgcgttncggagnncnggaactgagnccnactgagatcataggacangcggnggaattccggcctgctctccgacagaacttttcttcttgggttgaggaaaacgtcttttggagtcaggccctggaggggcgagccttgctcacagggtggggatacagccgattacccgccctgtgctttccgatggcttctgcggggcgagcggggcctggccggggggtgcgggcgggagggcgagccagcggcgcctgcagcccgggccgcgtaacgctgaccgctgtgccttcagttctcccaggagaaagccatgttcagttcgagcgccaagatcgtgaagcccaatggcgagaagccggacgagttcgagtccggcatctcccaggctcttttggagctggagatgaactcggacctcaaggctcagctcagggagctgaatattacggcagctaaggaaattgaagttggtggtggtcggaan

SEQ ID NO: 617 - DNA, 483 bp, Homo sapiens
  misc_feature (1)...(483): n = A,T,C or G
tgagttcnagnngnannggaactgagaccnctgatagacctgcggaannccncgcggactacgctgccaccgatgagacccagctcagttttttgagaggagaaaaatattcttatcctgagacaaaccactgcagattggtggtggggtgagcgtgcgggctgctgtgggtacattccggcaaaccatgtggggaagcacgtggatgagtacgaccccgaggacacgtggcaggatgaagagtacttcggcagctatggaactctgaaactccacttggagatgttggcagaccagccacgaacaactaaataccacagtgtcatcctgcagaataaagaatccctgacggataaagtcatcctggacgtgggctgtgggactgggatcatcagtctcttctgtgcacactatgcgcggcctaaagcggtgtacgcggtggaggccagtgagatggcacagcacacggggcagctggtcctg

SEQ ID NO: 618 - DNA, 478 bp, Homo sapiens
  misc_feature (1)...(478): n = A,T,C or G
ggcgttccnnaatgagaccaatgagagtctacgccangngccggaanacgaggttctccccttgcagggttgcagtgtctgggttcagggctgaaaaaggtgaggcaggaggccctgttgaggcctgtgggcaccttcatctgatcatgagcatcctgggatgtggcttcctgctcaggatatggcaagcaggaagggaaggtaagtgcagggcataaggcctgggacttgtggctgtgcggcatgtgcaggttccccagggcacacttaccatattccaacaacagcaaggctttctgggaatgaaacagaggcaaagcattgctagaacttgaggaaggactcctctgtcagggggctggggttgtattgagcaagctcccgcttcaggtcctctgggtatgcaaaagcaactctcccaaacaacttatagaaatccaggcaggcatcccctgtggtggatgaggcaagataagaa

SEQ ID NO: 619 - DNA, 496 bp, Homo sapiens
  misc_feature (1)...(496): n = A,T,C or G
ggcgnttnnnnnnnnnccttgaaaaccctcgcagngngcnggccttgatatccgtcacgagccacgttaagcacaaccggctccttggtccagttctgcaccggggtggggctgggacccggggaaggattgagggcccttgcaaccccctcccagcaggggctgggcactctttgctgccccaaaagctggtcccctatggattcatcttggcctgacccagccaggtggccttatttattccctgtcacctcccctccttgaaatctgggccctgatgcctgctgaagattccctctatccctgagtacttagtcttctcccccttccctggggcttctagagctctctctgcccctcagggactggcccttgggtccttgtcaaccagaggtctatggaaccacaacccttattggcctgggtggaccaatccaaaggctaagtgatagtgactcatcaatgttgcgtcctgtggggtaccagcttatgttcc

SEQ ID NO: 620 - DNA, 444 bp, Homo sapiens
  misc_feature (1)...(444): n = A,T,C or G
gctggctgcttttctcagtgccgaagccgcgccatgctcgttctcagaagcggcctgaccaaggcgcttgcctcacggacgctcgcgcctcaggtgtgttcatcttttgctacgggccctagacaatacgatggaacgttctatgaatttcgtacttattaccttaaaccttcaaatatgaatgcgttcatggaaaatcttaagaaaaacattcatcttcggacctcttactctgaattggttggattctggagtgtagaatttggaggcagaacgaataaagtgtttcatatttggaagtatgataattttcctcatcgagctgaagttcggaaagccttagccaactgtaaggaatggcaagaacaatctatcattccaaatttggctcgcattgataaacaagagacggaaattacttacctgataccatggtccaaattn

SEQ ID NO: 621 - DNA, 483 bp, Homo sapiens
  misc_feature (1)...(483): n = A,T,C or G
gtgcgtacacnnaaattgagaccaaatcgagagtcatggcagngncgnggaanncgnggaagattgggcacgaagtcgtatgcttagctgaaagcaatgcaggagacactggtactgccataaaatgggctcactatttagaccttttcacagatgctgctgagactgaaaaaatggccaaaagtttggaggattctgaaggagtttgttttgttccatcttttagtggattacaggctccattaaatgacccctgggcatgtgcctcttttatgggtttgaagccttctaccagtaaataccatcttgtacgagcaatattggagtcaatagctttcagaaacaaacagttatatgagatgatgaagaaagagattcatattcctgtaagaaaaatccgggcagatggaggagtttgtaagaatgtgtttgtcatgcagatgacttcatacctgattaatgagaatatagacagacctgccg

SEQ ID NO: 622 - DNA, 486 bp, Homo sapiens
  misc_feature (1)...(486): n = A,T,C or G
gagaggccncnnccaatgagncctggcggcatagcgaagnngcgcggaattccttgcccagcactgcactctggaggtgggtggtgcaggcagtggagggacacaggccatctcaagcccgctggtggcagggcgttttcccaccgggatacgggaagccacctgtgtcagggctaggccctgggatcgggagttacactaccctgtcccaagccgagggggccggtggaatgatttgagcagctctgggagtggggaaaaaagacgactaatttccaaacccgtttgttctcagataaaaagcagttttataaacccgcaatctgctccagattcaagcagtaatatttcagcaggaggaggtggtcatgggaagccagcacagcagaggctccctgaccgggaggcctgcctgcttttcaggttgtttcccatgttcagcttggactgcagaagaggctcacgctcctgtggtgagggcagggt

SEQ ID NO: 623 - DNA, 476 bp, Homo sapiens
  misc_feature (1)...(476): n = A,T,C or G
ngggattccnacatcgagaccatggaagccgctggaatncatcactgatgtgtctccagactttaactctcctgtttctatatccatgttctgttctctgtgctaatcctgactgagcccagccatgctcttctttgggcctaagcctcattggaaagctaacatttcagggagctaattgaagtggacttagaggaactgagaaattcactcattcacagcccctttttgaggggggtccttacctaaggagcttatatttgtattctaggggacagaggcagacaataagtatgtaataaaacagaatttctcactgtgagatgtgctgtgaaggagataagaagggcactccactagagagtcaggggagagctgcatttaaagaggtggttaaagaaggcctttattcgaaggttgcagtgagccgagattgcaccattgcactccagcctgggtgacaagagtggaactcc

SEQ ID NO: 624 - DNA, 487 bp, Homo sapiens
  misc_feature (1)...(487): n = A,T,C or G
tgtggtnnnnnnnaatcgagtcctctagtcagtgtggtggaattaaaatcatttctctctattttccagctggttttgttaatgattctctaggacagcaggtaaatgagttaagttgttggcttggggcaagtgaagtttgtgactatgcttgatttaataagctgagagtctcttgtttgtctgtcaaggtgccttcctctgctgaagccttacctccttctcacccagtaacggttaactcttctcttgtgtatatgcaaataaacctattattcacttctcacgtcttcctcttctcttccagggaagacttggttgcttagacacctctcctttatttcttttctgttttaattcttgcctagttggaaacttgattgaaagctatgctgaaaactagaagaaaaactgcagtgttccacatctatgacaatggtcattgtcacttttaggtattgggacaaaggtcacatctggacaacan

SEQ ID NO: 625 - DNA, 484 bp, Homo sapiens
  misc_feature (1)...(484): n = A,T,C or G
cgtgggtaccnnnaaatggagncccaatcgagagtcatatgcagngngcnggaattcggatcgagggatgcactggtcaggtcgggatccgtgccattagcgtaaaggcatttaaccctggtggcacttggggagctttgaaaaacaccgatgctgggcccgcccgaagagattccgatttaactgttctgggtgaggcctgggcctcggtgttattgcacagctcctcaggtgattttaacgtgcaggcggtggggagcagccctacacgtgtttcagcaccagctattgagtgaagagctcctgggctgatcccaaactcctcagtggcttgggaggggtgggtggtcctgaggtgaagctgtcgcctcttctgggacctgtgggggagggagagggagaaggtccccatctcaccaagttgaaagctcatttccagccggaggaggaggatgggcccccaccccccaaccctggtgctaga

SEQ ID NO: 626 - DNA, 488 bp, Homo sapiens
  misc_feature (1)...(488): n = A,T,C or G
gaggannnnnntttgannttcgtagtccctagtccatgtggtggaattcggacgcaacggaggcgggagcgtgaacgcccctccagccttcgagtcgttcttgctcttcgagggcgagaagaagatcaccattaacaaggacaccaaggtacccaatgcctgtttattcaccatcaacaaagaagaccacacactgggaaacatcattaaatcacagtgtgacctaaaggacccgcaagtgctgtttgctggctacaaagtcccccaccccttggagcacaagatcatcatccgagtgcagaccacgccggactacagcccccaggaagcctttaccaacgccatcaccgacctcatcagtgagctgtccctgctggaggagcgcttccggacgtgcctgcttccccttcgccttctgccgtgattgtcagtttcctgaggcctccccagccacgctttctgtacagcctgcagaactctgccccaga

SEQ ID NO: 627 - DNA, 476 bp, Homo sapiens
  misc_feature (1)...(476): n = A,T,C or G
ggtgcggncccactgaaccccgttganggcntgagaccaaggacggnggcttctgcgaagtgtgcaagaagctggtgggttatttggatcgcaacctggagaaaaacagcaccaagcaggagatcctggctgctcttgagaaaggctgcagcttcctgccagacccttaccagaagcagtgtgatcagtttgtggcagagtacgagcccgtgctgatcgagatcctggtggaggtgatggatccttccttcgtgtgcttgaaaattggagcctgcccctcggcccataagcccttgttgggaactgagaagtgtatatggggcccaagctactggtgccagaacacagagacagcagcccagtgcaatgctgtcgagcattgcaaacgccatgtgtggaactaggaggaggaatattccatcttggcagaaaccacagcattggttnttttctacttgtgtgtctggnggaatgaa

SEQ ID NO: 628 - DNA, 484 bp, Homo sapiens
  misc_feature (1)...(484): n = A,T,C or G
ggcatgagcagcgcccncccaatgagaaactgaggacntncgaggnnnccgcncngatgnnggncgaggaactttcagtcagaggcatgcaatggtggtttgccaggatacggatgacacctacatccccctgaaccatatggacccaaatcagaaggggtttctagaggtcagcaacagccccctgtcagaagaggccgtcctgggattcgaatatgggatgagcattgagagcccaaagttactgcccctgtgggaggcacagtttggcgatttcttcaatggtgcccagatcatctttgacacattcatctctggaggagaggccaagtggctcctacaaagcggcattgtcatcctccttccacatggctacgatggggctgggccagaccactcatcctgtcgaatagagcgtttcctgcagatgtgtgacagtgcggaagagggggtggacggagacactgtgaacatgtttgtggtn

SEQ ID NO: 629 - DNA, 487 bp, Homo sapiens
  misc_feature (1)...(487): n = A,T,C or G
gagacnnnnnnattganncctcgagtnccctagtccgtgtggtggaattcccgaccgctactctcatatagaaccgaaagaccacctcatacactgctactgcgccttttaagagccaaccatatgaaggaggatgctctacgggacatcacttgatcatagacgaagctgatcgaactgcccttagctagtaatgagacgatgatggacctcattgaagagtgaaggccctgtctgagacagacctgcatgaagttctacgcacgcgtctgcagaagtggctcaggcctggttggccgccagcttgaggagttcctgaaccagagctcgcccttctacttctggatgaatggtgaccgcatcgactccctgctggagaacgaccggcagcacacgcacatgctggatgtcatgcaggaccacttcagccgcgcgtccagcatcatagacgagctcttccaggacaggttcttcacccgggagcccc

SEQ ID NO: 630 - DNA, 492 bp, Homo sapiens
  misc_feature (1)...(492): n = A,T,C or G
cgggatgtnnnnnnttcgaaaccctatcgagagcatagtccatgtggtggaattccaccaggttgctatgtggcagaagaacttcaagagaattagctatgccaagaccaagacgagagccgaggtgcggggcggtggccggaagccttggccgcagaaaggcactgggcgggcccggcatggcagcatccgctctccgctctggcgaggaggacgacctgcacatcatggactccctagagctgcccaccggagacccacagtacctgacagagctggcgcactaccgccgctggggggactccgtactcctcgtggacttaacacacgaggagatgccacagagcatcgtggaggccacctctaggcttaagaccttcaacttgatccccggctgtggcctaaatgtgcacagcatgctcaagcaccagacgctggtcctgacgctgcccaccgtcgcctttctggaggacaagctgctctggcaggact

SEQ ID NO: 631 - DNA, 490 bp, Homo sapiens
  misc_feature (1)...(490): n = A,T,C or G
tgaggggnnnnnattgannnatcgtagtccctagtccatgtggtggaattcggattgtaaatgcaccaatcagcatgctgtgtctagctcaagaactcaagctccatgaggagatgtttcattgtcgagagcagtcatgatggcctgcactccacacaatgcaacagagtgaaagagcaggttctgcttctttggtgtagtcctgaagcttcctaagaaacttcacatcaggtgatggataggagcaaccctgtaaaaccagccttagactatttttcaaacagatggtgattgctcacaccaaagccttggacccctcccagcctgtgacctttgtgaccaactccacctacgcagcaaacaagggggctctgtatgtggatgtgatccgtgtgaacagctactactcttggtatcgcaactacgggcacctggagttgattcagctgcagctggccgcccagtttgagaattggtgtaagacatcacc

SEQ ID NO: 632 - DNA, 489 bp, Homo sapiens
  misc_feature (1)...(489): n = A,T,C or G
ggggggggnnnnnaatcgcgtccctagtccgtgtggtggaattccgcctgcttccatcccccgcgccgcgctcgccttacaggtgacagctgcccccgcgatgcagagggaaccggagcagaaattcccgccgccccccgcccgccccagaattaaaggcgcagcgctccagctctggtctcggttgctaggaaaacggcttcatgagatttacagcaaaaccaattcactctgcgcggcaatgcacgttactctaggtttagagagacgttttcaaaagcaattttctcatggctggagtgcgatggcacgatcttggctcactgcaacctctgcttcctgggttcaagtgattctcctgcttcagcctcctgagtagctgggattacagatgcctgccaatggtatttttgtgtttttagtagagacagggtttcaccatgttgttcaggctggtctcaaactcctgacctcaggtgatctgcccac

SEQ ID NO: 633 - DNA, 486 bp, Homo sapiens
  misc_feature (1)...(486): n = A,T,C or G
ggggtanacccgagaacctantnactgtggtggaattccaggacctgcttgggtgagaccacctctcccctctcagcagcgctggtgggctctttgtcctggtgcccaggagccctccagccccctgcccacagaagggaaggcctgcagagggggccaggatctacctaaccatttccccacccctaagtccctcagtgggctttgccttataggtgccacagggcacagctccatcattgccactggtttttcctaagtcatgcaccaaggacttcagaaagttcttcctccgagtcagtcagtggtgccgggaccccagggcagcctcctcgactcctgaagaaaaggcagtgcccgtggctgcctctgtcttcactcgctgttgatgtgaccgccaggcctcctctcgtaccttggacaaaggatacacctgaaccagaatagttttcttaccctcacattgaaatgaggattttgcttaan

SEQ ID NO: 634 - DNA, 489 bp, Homo sapiens
  misc_feature (1)...(489): n = A,T,C or G
gcggtcccaaggagaccatannaaactgatgagcaatacgcagngngcnggaattcgctaccggcagcagctggagcacatcatggccaccaaccggctggatgaggcggagctgggtcgcctgctacccgactgatgtccgttgagggctgcagtcagaggccctggacagaagctccagataggcccctagaacatgaagcagtttgctctgtgcgtccacggcctaggtgtttcttgggggtgttgggagggcaggagcattccttgaggaggagtggcaacatcaaagtgtttgtgtcccttgccagcctccctggggtctggggacctgcagcagcatgtctggcaaactgagtcgccctcctgcctccagctctctgttgagcagagggaaggcatgggggcaggaagagagctgagcattgatggggaatgggggtggttggcaatanaaacttgttcttgcatgagatggctttggatgcg

SEQ ID NO: 635 - DNA, 490 bp, Homo sapiens
  misc_feature (1)...(490): n = A,T,C or G
gcggannnaatcgannatcgagaacactagtcagtgtggtggaattcggatgagctgcccgactgggccgccgccaaagagttttaccagaagtacgaccctaaggacgtcatcggcagaggagtgagctctgtggtccgccgttgtgttcatcgagctactggccacgagtttgcggtgaagattatggaagtgacagctgagcggctgagtcctgagcagctggaggaggtgcgggaagccacacggcgagagacacacatccttcgccaggtcgccggccacccccacatcatcaccctcatcgattcctacgagtcttctagcttcatgttcctggtgtttgacctgatgcggaagggagagctgtttgactatctcacagagaaggtggccctctctgaaaaggaaaccaggtccatcatgcggtctctgctggaagcagtgagctttctccatgccaacaacattgtgcatcgagatctgaagn

SEQ ID NO: 636 - DNA, 488 bp, Homo sapiens
  misc_feature (1)...(488): n = A,T,C or G
agaggggnaatcgagaattgatgnacctnggnggaattctgggcatatatgctcttcctgcttgtgctggtcttcttcctcatgggcctggtaggcttcatgatctgccacgtgctcaagaagaagggctaccgctgccgcacgtcgaggggctctgagcctgacgatgcccagcttcagccccctgaggacgatgacatgaatgaggacacagtagagaggattgttcgctgcatcatccagaatgaagccaatgctgaggccttgaaggagatgctgggggacagtgaaggagaagggacagtgcagctgtccagtgtggatgccacctccagcctgcaggacggagccccctcccatcatcacacagtgcacctgggctctgcagccccttgcctccattgcagccgcagcaagaggcctccacttgtccgtcagggacgctccaaggaaggaaaaagccgcccccggacaggggagaccactgn

SEQ ID NO: 637 - DNA, 455 bp, Homo sapiens
  misc_feature (1)...(455): n = A,T,C or G
attgagnaaatgagatctctacgccgnngcgnggaattccaacagctgcccatcatcagtgtggacaacctccctcctgcctcatcagggaagcagtaccgcctggaagttggacctgcgtgcttcctctgacctctgacctcgtggccactctaggcctcatggaggagggaagaggaagaggcaaggggagggtactgaggggcagatggctccaggagaggcagctcccctgcccaagggtccttgggcagaccccagctgttgtctgcccagtagaagagggtgggggtaggaggggatagggtgttctttggaacaatggatcccagcttagccccaaagaccaaccaaagagccagccagagtaagctggacctgcaacctgcctgagccccgtggcctctcagctctgcggccaccccgttccctccccagcttcctgcccaaagagg

SEQ ID NO: 638 - DNA, 507 bp, Homo sapiens
  misc_feature (1)...(507): n = A,T,C or G
aggctatnnnnaactgatagcctgtgcannggcnnnncctgatnacccctggccagngncgnggaattccgggaaagccagccgccatcctgtgctgcaggcagggagcgggcggcgggagaggagcggatccacttaggtcagcggttaaaacgtcgttagaagaggccaccccggcatcgcggggcctgtggctgcgccccctcttgaattcaggcctagcacatcacctccgcccctcgcaccctgcagtctgcgctccatacagcacgtgagcgggtgctcagcaatgttccctggctgaaagaaccgcatagagtagcatgcaaaaatgacatgcatgtttaagataaaataagggagaggacacctgttctgactgagtctggcaactcagatctccccgcagccaacatctacattcctttggacagctgtctgctgtgtagggacacctccctggaactttgaaaagcaccccatcattaccttccactttgttctggn

SEQ ID NO: 639 - DNA, 221 bp, Homo sapiens
  misc_feature (1)...(221): n = A,T,C or G
agangctggtatcangactttggttatgttggatgaacaaggagaacaactggaacgcattgaggaagggatggaccaaatcaataaggacatgaaagaagcagaaaagaatttgacggacctaggaaaattctgcgggctttgtgtgtgtccctgtaacaagcttaaatcaagtgatgcttacaaaaaagcctggggcaataatcaggacggagtggggg

SEQ ID NO: 640 - DNA, 497 bp, Homo sapiens
  misc_feature (1)...(497): n = A,T,C or G
agggccggctngctnnnatactagtttatcgtanngncnnttcagtttngcancgcaagngacgnggaannccacaacactgggcgtgggagaaagggagagatagtcataagnggaagaaaaagccaagcatagggagtgggaaagagagtgagagcctgtgcaggctgctgacgagccccaggcagcccacaagtttctcgtggggagatggaggcagagcccagggtaggggacagagctgctggggcctttccttgcctgggaatctgtcccaggaagagcttccccactcccatcccccaaattggaaaaaccgtacattcaagcctgtttggccctgaaattcttaagaatctggttaagaattaactcactaatgtcaaaagtcaaaacctcctaggggttgtcctgggagtcaggttcacgggtacagaagatgaatctcagatgtcactcaacctgagccgtcattctctgtggcagggctgccctgg

SEQ ID NO: 641 - DNA, 485 bp, Homo sapiens
  misc_feature (1)...(485): n = A,T,C or G
agggcnnnaatcgagaacctagtcactgtggtggaattccaagtgttgtgctgggattacaggcataagccaccatgccaagcctacattctttatatagatatcttacgctgcttttagagatatcaaatacagcagttatatagttggaaaaagctggaaaggactttatatatctttattttaactttcttattttgctcctctaagtttactctgctgtaatactgatgttcctgaatttgatggtatacttgattgagagatgagatcacggtgaagaaggacaaaatggaatgagggcttttaaattccataagtcagtttttatggttcatagatgctgtgacaatatgtcagctatctctgaagcctccttgatacatgatgggacagggaatcttctgcctactcccaaaactttggaaaattagtaaggcagcatttaaagaaaatttttagcgaggtcctcagatatgatatat

SEQ ID NO: 642 - DNA, 453 bp, Homo sapiens
  misc_feature (1)...(453): n = A,T,C or G
natcgagaccttgggcacngtcgnggaantcgntntcttggaaaggcattaactttgtgatggtcaacagcgtggcgctgaacggggatggctgtgtcatctgctctgaaacagaagcagagctcattgaagtttctcacagactgaactgctcccgagagcattatcctctgtatcggagaagtgatgctaactgttctggggaagacgctgctcctccagaggaaagggacatcccatttaaggagaactatgacgtgctttcacgggaggcatcacaaaagctgctgtggtggctccagccgcgcctggttctcagtggccacacgcacagcgcctgcgaggtgcaccacgggggccgagtccccgagctcagcgtcccatctttcagttggaggaacagaaacaaccccagtttcatcatgggtagcatcacgcccacagactacaccc

SEQ ID NO: 643 - DNA, 476 bp, Homo sapiens
  misc_feature (1)...(476): n = A,T,C or G
gcggtgccacactgataccctgtcgaaggcngtaattacagcggccatgctcctgggcttccaaagttggagaaagctgccaggctcaggtctgaaggccagaattctacagtaagtcctactgagtcaaggtgggagcagggtcggtagcttccgaggctctgtgggagaatccatttcctggccgtagaggtggcctgcactccgcagcttgtgctgcccgtctcgaatgactggagtttcctgcttctgtcactacacctcccaccctctccatcacctgctctgctcttacaaggatccgaagaaatggaatcatcgtatcgctgatctacgtaaacaaactgaagaattgtctgaaagaaaatatggcatgtctaaactggaaaagtcttgtaatcttatgttcatgggcgtttacacagtggagttactgttcatcatgggggtaccgtggacaatcccagggctgccgn

SEQ ID NO: 644 - DNA, 493 bp, Homo sapiens
  misc_feature (1)...(493): n = A,T,C or G
tgggccggnntgctnnaacctagnacctcccgannnncancctgnnttcatcgcaangncgnggaanntcactgctgggctgcgagctgggcccatcactctcgagcccacagaagatggcatggctggcgtggccacactgctgctccagctgcctggcgggccccatgcacccaacggcgcctgcctggggtcagccctcgtcacactgcggcacaggctgcacgagtactgtgggggtggtgggggtgctgggggcagtgggcatgggactggtgcgggccggaagggactgttgagccaggacaacctcaccagcatgtccctctgacatgcccagggttctcatccacagcagctgggtcacctgatagggccgccctggacttggggtccctccacctgggggcccctggacactgtctacttggagaccactggcccccttcccccagggttgcccagatggggcctcctttgttctgcattcacn

SEQ ID NO: 645 - DNA, 505 bp, Homo sapiens
  misc_feature (1)...(505): n = A,T,C or G
ggggctnnnncctggattccctttgcagnggcngnnaccgatntccttaggccagtgtcgtggaattcgagcccagaagtgctgaggtgacgaggaagcccaaggctgctgttccttctgtgaacaagaggcccaagaaagagactaagaagaagcggtagaagaggaggcctgaggagctgggcgggcagggagagggtcttggggacagccctcctgggaatctacattgtgttcccccgcattccaggctcagggtctgaggaggctgtgacgccctatgaccgcagagatctagacagtcgtaacagtccccaggctccagctgggcaatccaccacttcctcttccttctgcttctgtgacggtttagagtcaagggggctgaaacacactgtgagcatagactgtattaggtttgttcagaagccgggtcagctcacagaatcacattttcttgcttagtcatgtgtccctccttgagttgccccctccttgtgggttn

SEQ ID NO: 646 - DNA, 452 bp, Homo sapiens
  misc_feature (1)...(452): n = A,T,C or G
ntcgagacctgaggcccngtcgnggaattcctcgagcggcccagccacgggctctcagggtgctggggcagccccaggtcccctcttgaactcagctggggccaggggccctcagaatgaaggcaggcaccaggcaggagcagcatccccctccttgacggtgctggcaggagggccgcgccatgctgactgcttgaacctctgctgacctgacagtgctggcgggagggccgcaccatgctgactgcctgaatctctgctgaggctgcctgcctgccgggcccagctcagcgccctctccactgcgaatcagtggcgatcatgtgatttctatttctgccccacagggtaagggacgagtcttctggaaggctctgccatggacatttgtcctcgggctcagaggccccaccctgccccacacctgcccctaatcactgcagtggccagcc

SEQ ID NO: 647 - DNA, 481 bp, Homo sapiens
  misc_feature (1)...(481): n = A,T,C or G
ggggganaatgaaaatcgagaacctaggcagtgtgcgtggaattccagtggatcaagtttaagtcagtcagttaaggggaggagaaggagaggttataccttcagggggctaccagacagtgttctcaacttggttaaggaggaagaaaacccagtcaatgaaattcaatgaaattcttggaaacttccattaagtgtgtagattgagcaggtagtaattgcatgcagtttgtacattagtgcattaaaagatgaattattgagtgcttaaagattatttttgacttaaaatagtataccttgaacaaatactctaattatgaaaaggaagaacaattccttgtatgcctgtttcccctgcccccagccacctttttgggaggagaccattatggcggggcccctcacagcattctaccaaccatagcacccaccccgagcagcgctggtgctgcagcctgttcgcgctgaccatttcttn

SEQ ID NO: 648 - DNA, 434 bp, Homo sapiens
  misc_feature (1)...(434): n = A,T,C or G
attganncccttttgacgncccctagtccgtgtggtggaattccgcttggcggcggtgtcgacttctacgacgtcgccttcaaggtcatgctggtgggggactcgggtgtggggaagacctgtctgctggtgcgattcaaggatggtgctttcctggcggggaccttcatctccaccgtaggcattgacttccggaacaaagttctggacgtggatggtgtgaaggtgaagctgcagatgtgggacacagctggtcaggagcggttccgcagtgttacccatgcctactaccgggatgctcatgctctgctgctgctctacgatgtcaccaacaaggcctcctttgacaacatccaggcctggctgaccgagatccacgagtacgcccagcacgacgtggcgctcatgctgctggggaacaaggtggactctgg

SEQ ID NO: 649 - DNA, 479 bp, Homo sapiens
  misc_feature (1)...(479): n = A,T,C or G
tggagaggccnnttttgagtccctatggagtgtcgtggaattcgagcatccgaggtggagagctctttctgacagtgctgcttaatccgatcagcatctttatgacccatctgtccaattatggaaatgaccggctgggcctatacacctttgagagcttggtgcgcttcctccagtgttggacacggctgcgcctacagacccttcctcctgtcccacttgcacagaagtactttgaacttttccctcaggagcgaagccccctttggcagaatccctgtgatgacaagaggcacaaagatatctggtccaaggagaaaacctgtgatcgtctcccgaagttcctcattgtgggaccccagaaaacagggactacagctattcacttcttcctgagcctgcacccagctgtaactagcagcttccctagccccagcacatttgaggagattcagttcttcaacagccctaattaccan

SEQ ID NO: 650 - DNA, 483 bp, Homo sapiens
  misc_feature (1)...(483): n = A,T,C or G
tgagtncccagcgtccnnaaaactgatagcctaactngccagcanngncgnggaannctgngagcagccttcagtcctggacacgtgtttagaaggaaaatagcacatggatcagaggaaaatacctcgatagaggtgagaggggaaggcgggaccctctaatattcattggacatctgtgcacagtactgtggtagcccctttcacatagtttacattcctggaatcttcaaaagaatttatagaattgctcttacgcctttttttattgatggaataaaacagataagaataccaaagaagaggctgggtgcggaggctcacgtctgtaatcccagcactttgggaggccgaggtgggcagatcatgaggtcaggagagcgagaccatcctggctaacacagtgaaaccccgtatctactaaaaataccaaaaaattagccaggcatgatggcgccaccaactactcgggaggccgaggca

SEQ ID NO: 651 - DNA, 487 bp, Homo sapiens
  misc_feature (1)...(487): n = A,T,C or G
tgggcgcggntttctnnnatcatgtaccttctganggcntcagtttatatcgaaaaaacngngggaacagagnngncacctacctaacagggctctgagagagccgggaggcccaaaggggctggaagaaggnaaaggaaaaatcctgtcttgggctcaaggtcacagagtggggcccagggggagttcctgctgagggcagggccttgccaggcttcagtctccagtgccaaaggaggaaatgcccaggctgtcagcatttccagatgagagcagaagggagaagcttaaacccaagtcacacatccagcaatggagtccgacagcccagcaccatctgggaactgagaagcacctctgcccggcccccacaccgtgtggaaagtgaggagcacctctgcctggccgccaccccgtctggcaagtgaggagcgcctctgcccggccgctgtgcaaccttccaagtgtgaagtgacagccttgtgtt

SEQ ID NO: 652 - DNA, 480 bp, Homo sapiens
  misc_feature (1)...(480): n = A,T,C or G
aggcgttnccagagtccnnaaaatgagancctaggtggctangcanngcgnggaanccaaatggcggatgacgccggtgcagcgggggggcccggaggccctggtggccctgggatggggaaccgcggtggcttccgcggaggtttcggcagtggcattcggggccggggtcgcggccgtggacggggccggggccgaggccgcggagctcgcggaggcaaggccgaggataaggagtggatgcccgtcaccaagttgggccgcttggtcaaggacatgaagatcaagtccctggaggagatctatctcttctccctgcccattaaggaatcagagatcattgatttcttcctgggggcctctctcaaggatgaggttttgaagattatgccagtgcagaagcagacccgtgccggccagcgcaccaggttcaaggcatttgttgctatcggggactacaatggccacgtcggtctgggt

SEQ ID NO: 653 - DNA, 477 bp, Homo sapiens
  misc_feature (1)...(477): n = A,T,C or G
tgggaacccagcgtgcccaacctgatangctaactngccagcanancgnggaannntagctgccaatggggctgcccctcctgggctgcatgcagcatcccctatgggagctgagaaagtccagtcctgagatgggagacggctgcccagaggtgtgtggttgggccctgacagcagtctcccaaaatgtgactatattgccaggctcagttccaggcaatgctgagaagtgcccaatacagcgaggatgcacctggagcccatcctgtctaatggactctgatcatcccgcatccgcttgcctctcctgcatatcggccaccaccccttctcttttcctcatttctccatcgngtctgacccagaggctgtgaccctctctccagccccaggggcccttcttttcccttgtcctgtcagaggccctgagcaagacttcccagatccagccacatgcctggctggtccacttactaa

SEQ ID NO: 654 - DNA, 477 bp, Homo sapiens
  misc_feature (1)...(477): n = A,T,C or G
agacgtggcccgggtgcnaaacccaggtngcctaaaanacgngcaannctaggnagacaanggggctgcccctcctgggctgcaggcagcatcccctatgggagctgagaaagtccagtcctgagatgggacacggctggccagaggtgtgtggttgggccctgacagcantctcccaaaatgtgactatattgccaggctcagttccaggcaatgctgagaagtgcccaatacagcgaggatgcacctggagcccatcctgtctaatggactctgatcatcccgcatccgcttgcctctcctgcatatcggccaccaccccttctcttttcctcatttctccatcgngtctgacccagaggctgtgaccctctctccagccccagnggcccttctttttccttgtcctgtcagaggccctgagcaagacttcccagatccagccacatgcctggctggtccacttactaattgtgt

SEQ ID NO: 655 - DNA, 493 bp, Homo sapiens
  misc_feature (1)...(493): n = A,T,C or G
nagaggcnnnnnaatcgaganccntgatcactgtggtggaattcgggagccgcgggctgctttgtgacgcgtcgccatggagacaaggatcgggttccagggagttctgcccctgccaaggggtgctggccacgcaggaggcttaacctggccggcgcgggaatggggtgcagagagcaaagaaatgtggctttgatcttatggatgccttacttttacattatttgtacagttcttgcagtgagctttccggaccactgtcttgtatgtttcctaagaaaagcaaaaagggaagagattgaagagaaagtagattttcaactacaaactttcatccatttgctttcagcttaagcaaatgtgcgcaaagttgtcatggatttttgcagtcaataaaaaccaagcaagaagactgaatcccaagtcatctggtataaatggaagcagtttctgtgatagttccacgcggtcagaagggtcatcctggcttaag

SEQ ID NO: 656 - DNA, 488 bp, Homo sapiens
cgcaatgagaccctatgcagggatagattccgctcaacgccctgcctatctgtattcattggagatccgagggaagggcttcgactggccgctgctggtgaaggacttcaacctgcttcgctggcttggtgccaacgctttccgtaccagccactacccctatgcagaggaagtgatgcagatgtgtgaccgctatgggattgtggtcatcgatgagtgtcccggcgtgggcctggcgctgccgcagttcttcaacaacgtttctctgcatcaccacatgcaggtgatggaagaagtggtgcgtagggacaagaaccaccccgcggtcgtgatgtggtctgtggccaacgagcctgcgtcccacctagaatctgctggctactacttgaagatggtgatcgctcacaccaaatccttggacccctcccggcctgtgacctttgtgagcaactctaactatgcagcagacaagggggctccgtatgtgg

SEQ ID NO: 657 - DNA, 458 bp, Homo sapiens
  misc_feature (1)...(458): n = A,T,C or G
gagggccnnnnnnttcctgatcgttancntcgnanagacnnncnatgcgcaggcgcggngcactgcgcgccggcacgagggtgttttccacgttggctgttttgtttcagcaagcggcgtggacgaccgttgctgagctggtgtggaacgtctgtgatcagattcattgggcttttgccagctctttttagattgtcctcttgagacctgtttacagaggaatggccagaggccacaggcactgcctcctgagaccatccacctgatgcgaagaaagctagaaaagcccaaccctgagaaaaatgcttgggaacacaacagcctcacaattccgagtccagcatgtgcttcggaggccagcctggaagtgactgatttattgctcactgctttggaaaatccagtaaaatatgctgaggacaatatggaacacaatgacacagacagaattatctgtt

SEQ ID NO: 658 - DNA, 469 bp, Homo sapiens
  misc_feature (1)...(469): n = A,T,C or G
gccgggccggnaaaattcgaatcgatatccatatccgtgtgctggaattcaacaactttgaggaagagcagcagtgcctcgagtcttgtcgtggcatctccaagaaggatgtgtttggcctgaggcgggaaatccccattcccagcacaggctctgtggagatggctgtcgcagtgttcctggtcatctgcattgtggtggtggtagccatcttgggttactgcttcttcaagaaccagagaaaggacttccacggacaccaccaccacccaccacccacccctgccagctccactgtctccactaccgaggacacggagcacctggtctataaccacaccacccggcccctctgagcctgggtctcaccggctctcacctggccctgcttcctgcttgccaaggcagaggcctgggctgggaaaaactttggaaccagactcttgcctgtttcccaggcccactgtgg

SEQ ID NO: 659 - DNA, 461 bp, Homo sapiens
  misc_feature (1)...(461): n = A,T,C or G
cattgaccccccttttgagagcactacggaagngcggcggaannccccggccggaagccgctgtcggggagccggcggtggggctggacgcatgtgcaactgatatgggtgaaccccagggatccatgcggattctagtgacagggggctctgggctggtaggcaaagccatccagaaggtggtagcagatggagctggacttcctggagaggactgggtgtttgtctcctctaaagacgccgatctcacgtggctggcctggcctgggtgtgcttggctgtgttcctggaaaaacaaacaccctcccatctcttcctggaagcctgcaccctcatatcagccaggccctggggccaccctcccttttgactgtccctcctgccatagtcccacccagttcctgcacttggcacccaaccctggggtgctggttccctccagagcctcctgacagcctggc

SEQ ID NO: 660 - DNA, 459 bp, Homo sapiens
  misc_feature (1)...(459): n = A,T,C or G
gagcggcnnnnnnnncctgagctgcataacntggacangacnncctcagtcctttagaggccccagtatgttgggatctcagcatcaatccgactggcccagtcttttcctccagccctaccttgctggggacctggggctggggtccaactgtgagggaggagggaggtaaccagtcctcttgtgcgtttcagtctgtcccaagttcctcgtggactccagcaccaaggacttgctgacagtcaaggtcggggacacagttcgtgtgcccgtctcctttgaagccatgcccatgcctgaggtgacctggctgaaggatggcttgcccttgcccaaaagaagtgtgactgtcactaaggatggcctcacccagcttctgatccctgtggctggactctcagacagtggtctctacactgtggtgctgaggaccctgcaggggaaggaggttgcccacag

SEQ ID NO: 661 - DNA, 482 bp, Homo sapiens
  misc_feature (1)...(482): n = A,T,C or G
ggggggtttgaaaccctggaatgagaacntatgcagngncgnggaantccctttgaccctgcatgagggccaggactttccacacgggggtgtgctgcggcttcatgatcctgggccccagcgcagtggggaggccctgtggctgatacctccccaggcatacctgaacgtagagaaggatgaaggccgaaccctggaacagaagaggaatctcttgagctgtcttcttgttcgtattctcaaagcccatggggaaaagggcctccacattgatcagctggtttgtctggtgctggaggcctggcagaagggtccaaatcctcctggaaccctgggccacactgttgctgggggtgtggcctgtaccagtacagatgtcctctcttgcatcctgcacctcttaagccagggctacgtgaaacggcgtgatgaccggccccagatcctgatgtatgccgctccagagcccatggggccctgcn

SEQ ID NO: 662 - DNA, 500 bp, Homo sapiens
  misc_feature (1)...(500): n = A,T,C or G
cggagtactcgggganaggggnnnaatcaagacccctatgcagttgactgcccatcgatgnnncagnggagagtgcttccagctgagatgatttgagtctgtcctaactgctccattgagttctcgtgccctcatcagctgagggcagggaatggaactttaatggaagaaccacttttatctattctttttattcattggttcagttctgatttcagcaaacatgagcaaaccactttgactgaaagcagaaagagtgaaaattctattttgttacgctactggtgttcaattattagtttgtaccatttttaatttatgtcagttgatgcatctgaaaataagtgcttggagtgttcgtacccttatttttttttaagattcctagaaggaatctttggttaattcagattgagcagttaaagtttttgctatttacctttgtgcaggctggcatatgctaatttgggggtggtaaccaaccgattttatctcatgtg

SEQ ID NO: 663 - DNA, 455 bp, Homo sapiens
  misc_feature (1)...(455): n = A,T,C or G
atcgagcccatgagagcctacgccanngcgnggaattcccttgatggagggtcgtggtgactttgggtgaaggtgactttgaagatattttaagattcagaaagaatttgagtccttgatgatcctggagcctgacccacctctgagtcttcagtagaatggaaataatatcttattgtttgaacttgtttgagccatatttttctgcttcttgtctctaaaagcacccagaaaacaccattgaaaaagattttctctttgacagaactctactcaggctcccctgaacttttcaagtaggccttgacttttggacttccgtatttgtccctacactgtccagtttttttttgttgttgttggtttgtttttttgagacggagtctcggtcacccaggctggagtgcagtggcgtgatctcggctcattgcaagccccgcctcccagattcatgg

SEQ ID NO: 664 - DNA, 471 bp, Homo sapiens
  misc_feature (1)...(471): n = A,T,C or G
nggggggcgggcgnnnnnnaactgactgcntncataggcangngcnggaattcgtagagaaggcaggaagaaggcaagggacgagacaaccatgctgtgctgtatgagaagaaccaaacaggttgaaaaaaatgatgacgaccaaaagattgaacaagatggtatcagaccagaagataaagctcataaggccgcaaccaaaattcaggctagcttccgtggacacataacaaggaaaaagctcaaaggagagaagaaggatgatgtccaagctgctgaggctgaagctaataagaaggatgaagcccctgttgccgatggggtggagaagaagggagaaggcaccactactgccgaagcagccccagccactggctccaagcctgatgagcccggcaaagcaggagaaactccttccgacgagaagaagggggagggtgatgctgccacaaagcatgcagccccccatgc

SEQ ID NO: 665 - DNA, 484 bp, Homo sapiens
  misc_feature (1)...(484): n = A,T,C or G
ngagggcccggnaatgagacccttggacaccagttggaattcaaacgaagttgcatgagtccccacaacttagtgtgagcttcaaatcatgtcttctttatcaaaggtacagtacagcaaagagggaaattaaaagaattactttacaagggagaaacctgacaaaagtgccttctactaggtaattaaggtcaacatcaacagtgataactcagagcgataatacgtatccttaatatgacataatgaaaatggccctttgctttcacagtcttcttccctcaaacccataacctcagtctaatagtgagaaaaacatcaaacatttaaattgagggacaacctacaaaacatctgactcaatactcatcaaaaccatcaagtaattaaaaagaaggaaactctgaaaaattgccacaggcaagaagagcctaaagagctgtgacaagatgtatacacaatgtggtaatctgagtaagatcca

SEQ ID NO: 666 - DNA, 487 bp, Homo sapiens
  misc_feature (1)...(487): n = A,T,C or G
ngagcggctcccnnncccctggggacctgaggctgtgncgaagnaccncgaggacattctggggaacgggctgttgaggaagaagacgctggtcccagggccgccaggttcgagccgcccggtcaagggccaggtggtcaccgtacatctgcagacgtcgctggagaatggcacacgggtgcaggaggagccggagctggtgttcactctgggtgactgtgacgtcatccaggccctggatctcagtgtcccactcatggacgtgggggagacggccatggtcactgctgactccaagtactgctacggcccccaaggcagcaggagcccatacatccccccgcacgcggccctgtgcctggaggtgaccctgaagacggctgtggacgggcctgacctggagatgctcacggngcaggagcgcgtggccctggccaaccggaagcgggagtgcggcaacgcccactaccagcgggcggacttcgtc

SEQ ID NO: 667 - DNA, 468 bp, Homo sapiens
  misc_feature (1)...(468): n = A,T,C or G
nngggaggccccgctgnnnnnnaacggatagcgcgcnattggcnggacncataaattggccttgctgggaggctgtctggtagccctggtcagtcagccaacagataagtgagtgagaaggcgagggaacagacagccaagcagcctagcccacagccctccctaccgcattgatctacagggacccactggctcctcctagggccctgggagattccttctgttcttttgactctaagcaaaacttccagaagcagccctggggagaaaagaaggggctcccggtgcccaaggatcctggggatggcctcggcccatggccaagccacagcagacacagtctaccctccgtagctttgagtcttttcttcattttcactttactttgattttacctgcagagaagggggacaaagtgctcagagtgacctatcccacagtgaaagacagggctggtgtgggggactg

SEQ ID NO: 668 - DNA, 479 bp, Homo sapiens
  misc_feature (1)...(479): n = A,T,C or G
tgtgtgccnngggtgnnaacctgaaacccaactgananctngcgaangcgnggaattccagacatgtacatggagtctggggcggcgacggctacctggctccgggagcgggcccggcgggagcgggagcgcaaggaggagctgcgtggcggcggtggcgacatggcggagccctccgaggcgggtgacgcgccccctgatgatgggcctccaggggagctcgggcctgacggccctgacggtccagaggaaaagggccgggatcgtgaccgggagcgacggcggagccaccggagcgagcgcgagcggcgccgggaccgggatcgtgaccgtgaccgtgaccgcgagcacaaacggggggagcggggcagtgagcggggcagggatgaggcccgaggtgggggcggtggccaggacaacgggctggagggtctgggcaacgacagccgagacatgtacatggagtctgagggcggcga

SEQ ID NO: 669 - DNA, 465 bp, Homo sapiens
  misc_feature (1)...(465): n = A,T,C or G
gcagtccacggnggnggtttgagccctttgagaccttagtcaggcggggaatccggcctttgccgagtgctgactcctgcgtcttcgtgctgagaagtcacctgatgacccacggccgcatggtgccgagagggacaggcttctccggaaggaacagattttagctgtggccaggcaggtagagtcaatgtgtcggctgcagcagcaggcatctggccggccccccatggacctgcagccgcaatcctcagatgagcaagtgccgctgcacgaggccccacgtggggctttccgcctggcagcagagaaccctttccaggagccacggacggtggtgtggctgggcgtgctctcgttaggctttgccctggtgctggatgcccatgagaacctgctactggctgagggcacgctccggctgctgacacgcctcctccttgaccacctccggctgctggcgcccan

SEQ ID NO: 670 - DNA, 483 bp, Homo sapiens
  misc_feature (1)...(483): n = A,T,C or G
gagcggtnnnncccactgaacctagnagcatcagaannncnnnnannntttacgtggtncaccccgnnggngtcctcngcctcgctggagaagcgcatgaagatggtgtcccatagcttcacccancgctttcggctggctcagggacaggaaagaggccaagtcgctggccgtcatcgtgagcatctttgggctctgctgggccccatacacgctgctgatgatcatccgggccgcctgccatggccactgcgtccctgactactggtacgaaacctccttctggctcctgtgggccaactcggctgtcaaccctgtcctctaccctctgtgccaccacagcttccgccgggccttcaccaagctgctctgcccccagaagctcaaaatccagccccacagctccctggagcactgctggaaaaagatgaagaagaaaacatgtctgtgaacttgatgttcctgggatgtttaatcaagagn

SEQ ID NO: 671 - DNA, 215 bp, Homo sapiens
gatgctgaaaattgctaccaacaacttgaaatccctggaagcccaggcggacaagtattccaccaaagaagataaatatgaagaggagatcacactgttggaggagaaactgaatgaggctgacaccccagcaaagtttgccgagaggtctgtggcaaagttggagaaaaccatcgatgacctagaagatgaagtctatgcccagaagatgaagt

SEQ ID NO: 672 - DNA, 474 bp, Homo sapiens
  misc_feature (1)...(474): n = A,T,C or G
nggggaggccggcctnnnnnnnnnccttgacctgcctagcatcgngcaggaccnnctatattgnccttcactggtgcatcatgaccttctggatcgtccactgtgagacagaattctgtatttccaaatgggaagagattgtgttcgacatggtgggggggattatctatatcttcagttggttcaatgtcaaggaaggcaggacacgctgcaggctattcatttactattttgtgatccttttggaaaatacagccttgagtgccctctggtacctctacaaggctccccagattgcagacgcatttgccattccagcgctgtgtgtggtgctcagcacctttttaactggcgttgtttttatgctgatgtattatgccttctttcatcccaatggacccagattctgtcagtcaccaagttgtgcttgtgaggacccagccgctgccttcactttgcccccagacgtggtcc

SEQ ID NO: 673 - DNA, 470 bp, Homo sapiens
  misc_feature (1)...(470): n = A,T,C or G
ntcgagatccatattcagtgtggtggaattcgagcagactggggttaatggtcagcagcagcagcatccccaccactggggctatccctttttaggcccttaccatgggccaaacactgagccgtgtgcttcgtgtaacttctaagcacgcttacctgatagagtgccagcaaagactcaaagaggtgcctgggcttggcacatagtagctattgctactattatgaatgttgntttgtctttgtttttgttttgagacagggcctcactctgttgcccaggttggagtacagcagtgccatcatggctcactgaagcctcaacctccctgggtttgagcaatcctcccacctcagcctcccaagtagctgagactacaggtgtgcgccaccaagcccagccaattttttgtattttcagtagagactggttttgccaggtcgcccaggctggtttcgaactctggggtt

SEQ ID NO: 674 - DNA, 429 bp, Homo sapiens
  misc_feature (1)...(429): n = A,T,C or G
atgtttatgacagactttcctataatattcttatcataatgttcttgcacttgaaagaatgtgcattctgcagttgtgtgcaggtgttatgtgtatttcaactgggtcaagtttgttaatcaggttggtcaaattatctacatctttactgatatttttgtctgtttttctataaattactgagagaggctaaagcccgccactattattatgaatttgtttatttctcctttgagttttgttaatttttgttttatgcatttagagattgtgttattaggttcatacccatttaaaattgacgttttctggtagagcgaaccctttattatgtgaaatggctttctctaccactcacagnggtatttttttcactttcccccttatttttgaattttcagcgctcttataatgatgtcatgtctcttg

SEQ ID NO: 675 - DNA, 477 bp, Homo sapiens
  misc_feature (1)...(477): n = A,T,C or G
ngagggaggccgggctnnnnnnnnaactggaactgcatngcatcgngcnggaacncctgaagtcggaggagctggccagggagatcgtggggaaggataagtccctggccgacatcctggattccagtgtgaagatcaaaaccactatggacttgatggaaggcatcttccccaaagacgagcacctcctggaagaagcccagcaacggaggaagctgctccccaaaatcccctctcctagaagcacagaggagaggaaagaggagcccagcgtgcctgcggccgtgtccctggccaccaattctacctactacagcacgtcggcccccaaggcggagctgctgatcaagatgaaggacctgcaggagcagcaggagcacgaagaggattcgggaagcgacttggaccacgacctgtcggtgaagaagcaggagctcatcgagagcatcagccgcaagctgcaggtgctccgggagg

SEQ ID NO: 676 - DNA, 496 bp, Homo sapiens
  misc_feature (1)...(496): n = A,T,C or G
agagggttcnnnnnaatcgannnactcgaganccctagtccagtgtgggggaattcgctcaagtgcgtggtggtcggcgacggggcggtgggcaagacgtgcctactcatgagctatgccaacgacgccttcccggaggagtacgtgcccaccgtcttcgaccactacgcagtcagcgtcaccgtggggggcaagcagtacctcctaggactctatgacacggccggacaggaagactatgaccgtctgaggcctttatcttacccaatgaccgatgtcttccttatatgcttctcggtggtaaatccagcctcatttcaaaatgtgaaagaggagtgggtaccggaacttaaggaatacgcaccaaatgtaccctttttattaataggaactcagattgatctccgagatgaccccataactttagcaagactgaatgatatgaaagaaaaacctatatgtgtggaacaaggacagaaactagcaaaagagatan

SEQ ID NO: 677 - DNA, 480 bp, Homo sapiens
  misc_feature (1)...(480): n = A,T,C or G
gctataagaataaaacgaagaaaaaaatctgagaactnctaggacctgggaaanncgccnggagatgncggngctggagaccccaactctgatagggactccctgtgctgattattcatgtatcagaggacctaaagggcccaggacaaaggggtgagaatgagccagtgctggaccctgggggccctgagcctctggggcctgagagtcagtcagggaagggagacatggtggatatggccacacggtttgggtccaccctgcagatacacctggaaaaggggaaggagagtctgcaggagaagaggctggtggcagaggaggaagaggacgaagaggaggtggaagaggatggccccaccagctgctcggaggacgatcacagtgagctgctgcaggagatcacagacaacctgacgaagaaggagattcagatagagaagatccatttggacacgtcctccttcatggaggagctgg

SEQ ID NO: 678 - DNA, 480 bp, Homo sapiens
  misc_feature (1)...(480): n = A,T,C or G
gagttccaanagtgnnnaaacatgaaacccgttcgatcccctgcnannaccncnnaanatanaggaaaatttcatctaccagagcaagggctacaatgacgactactatgaagagagctacttcaccaccatgacttatggggagcccgagtctgccggcccgtccagggctgtccgccagtcagtgacttcattcccagatgctgacgctttccatcaccaggtgcatgatgacgatcttttgtcttcttctgaagaggagtgcaaggatagggaacgccccatgtacggccgggacagtgcctaccagagcatcacgcactaccgccctgtttcagcctccaggagctccctggacctgtcctattatcctacttcctcctccacctcttttatgtcctcctcatcatcttcctcttcatggctcacccgccgtgccatccggcctgaaaaccgtgctcctggggctgggctgggccg

SEQ ID NO: 679 - DNA, 488 bp, Homo sapiens
  misc_feature (1)...(488): n = A,T,C or G
tggattttagganaaaaccganagannnnnttttgataccactgatgacactaggacangcggnggaaatccccggctcgagcggcgctgcttcagcctgcacccctcccttgtctcatatatgctccttttgaccttttcaaataaatatggatggcaagctcctaggcctctggcttcctggtagagggcggcatgccgaagggtctgctgggtgtggattggatgctggggtgtgggggttggaagctgtctgtggcccacttgggcacccacgcttctgtccacttctggttgccaggagacagctagcaaagccagcaggacatgaagttgctattaaatggacttcgtgatttttgttttgcactaaagtttctgtgatttaacaataaaattctgttagccggaataagaaacaaatactgatcgacagtggcccctgggatgccttacatgtccccaggaaagatgaggcccacgagcac

SEQ ID NO: 680 - DNA, 468 bp, Homo sapiens
  misc_feature (1)...(468): n = A,T,C or G
natcgaganccctagtccagngtggtggaactcttctagtgatggggatagttttctaccacccacccccatctgttcccctgtagatagatggggtctgcagctccctgctgtctggacttgagctgattaagtaacaccatgtgcagtcgccaggatgaggacagaagggacatctgatcctgcgctcccctctgcttctgtctgcaggcacaccgtccctgcagtctggtggaagaacgcccaaggcaaagaccagatgtggtatgaggatgccttggcttccagccaccctatcattctgtacctgcatgggaacgcaggtaccagaggaggcgaccaccgcgtggagctttacaaggtgctgagttcccttggttaccatgtggtcacctttgactacagaggttggggtgactcagtgggaacgccatctgagcggggcatgacctatgacgcactccacgt

SEQ ID NO: 681 - DNA, 496 bp, Homo sapiens
  misc_feature (1)...(496): n = A,T,C or G
ngggcaaggggggnattganncccttcatgagaccactatccatgtggtggaattcctgtagcacaatgggcttctagtgacaaatcaaaattctgatctttaaaatgtatgcacaatttacctgttaccgcctggcctaagccatcctgctgttactgctgtgtagcaagttgcagccaaagcgacctcacacggctcctgaaggtcaagaatctgggagcagctcagctggatggctgtgactcggggtctcatgaagtggccaagatgccagctaaggctgccgtctctgaaggcttgacctggcgaggatttgcttccagactcactcgcgtggctattgacagaaggcctcagttccatgccacatggcccgttccacagagcagctcacagcttggtagtagctggcttccccagagcggtatctgcgagcagcgtccagatggaagccatggtgttcccttaaaacctgatatggagggtgattcccca

SEQ ID NO: 682 - DNA, 489 bp, Homo sapiens
  misc_feature (1)...(489): n = A,T,C or G
ggctatcaatgggagannaagggaganaaanaattcgatgacactgatcacgttgnggaantcggataaaaaaggggaagtcacctgcccaccatcacaaggctgagtacttgccaatgccaggattccaactcagggagatcctaattccaggagcagatgccccgcaaatgcctccccagctctcgggtggcatcagcccagtgcaccggaagcaaggatgcacagaacctggacacatgactctgtccagcatgaggtgaggggctgggcttcagctgccaagaaagtggactggcccatcccaccctcccccagcagtggtcccgcacatccggagctccatggagccatccttcagggccccctccttccctcagaggctgtgggggccacggctggtatgttggtgttctgaagcagtttctgatcggcagtggcccctgggatgccttccatgtccccaggaaagatgaggcccaggagcan

SEQ ID NO: 683 - DNA, 460 bp, Homo sapiens
  misc_feature (1)...(460): n = A,T,C or G
actcgagaactcctganatcactcggacagngcggnggaaataanaagagaggaccgcgggggcgttcgcgtggctcccagcccgggacctcacccccgttggacagtgggggaaactgaggcctgagcgggcccacacaggaccatgaagagtgaccaccccggctatggccagccagcctccagggagcgcgagtgctgctgacaggggccaacgctggtgttggtgaggagctggcctatcactacgcgcgtctgggctcccacctggtgctcactgcccacactgaggctctcctgcataaggcgggctggactacctcgtgctgaaccacatcggcggcgccccggccggcacgcgagcccgcatcccccaggcaactcgctggctcatgcaggtaaactttgtgagctacgtgcaactgacgtcgcgggcgctgaccagcctgacggacagcat

SEQ ID NO: 684 - DNA, 481 bp, Homo sapiens
  misc_feature (1)...(481): n = A,T,C or G
agagttgcccagcgtannnaacccagggggcatganngtctgggaaanncncaggantagggtcaggtcgcggctggtcactgtgcaggcgcttgggtgacgcgactatctcagcggatctggccaccttcgtctccccggcatggagacctcagcactcaagcagcaggagcagcccgcggcgaccaagatcaggaacctgccctgggttgaaaaataccggccacagaccctgaatgatctcatttctcatcaggacattctgagtaccattcagaagtttatcaatgaagaccgactgccacacttgcttctctacggtcccccagggacaggcaagacatctaccatcctagcctgtgcgaaacagctatataaagacaaagaatttggctccatggtcttggagctgaatgcttcagatgaccgaggaatagacatcattcgaggaccgatcctgagctttgctagcacaaggact

SEQ ID NO: 685 - DNA, 297 bp, Homo sapiens
  misc_feature (1)...(297): n = A,T,C or G
tggagtggcccagagtgccanaaaactgagangctagccangctanggaagngccgtggaattcgttntggggaatagaaaggcgggaagggtgggcacaggcagatgcccgccagactctgaaggagcatgtgcaggactttgccatgcagctgagcagcagcatggcctgaggggctgctggactgaccgaggggctgcccagcaagactgcagcctcttcctccctcagatcccaccagacccaccaggtgccataataaagcggattctagacggaaaaaaaaaaaaaaaaaa

SEQ ID NO: 686 - DNA, 486 bp, Homo sapiens
  misc_feature (1)...(486): n = A,T,C or G
gactacaagganganaaagaaagaaaaaanatttcgagaccatagaccacgtcgnggaantcgggtttaagagtcctggcccggcccgtcgcacagctctgctcctaactcctgcccgccccgtccgtccatctgtcccgctgccccgcggcccatccaaggggccactccacctcggacccaagatgacgtcagttgccaaggtgtattacagtcagaccactcagacagaaagccggcccctaatgggcccagggatacgacggcggagagtcctgacaaaagatggtcgcagcaacgtgagaatggagcacattgccgacaagcgcttcctccacctcaaggacctgtggacaaccttcattgacatgcagtggcgctacaagcttctgctcttctctgcgacctttgcaggcacatggttcctctttggcgtggtgtggtatctggtagctgtggcacatggggacctgctggagctggacc

SEQ ID NO: 687 - DNA, 484 bp, Homo sapiens
  misc_feature (1)...(484): n = A,T,C or G
cgatatcgaaacgaccgggaaaaaannttttgagaccctagtacaggcggggaattcgtagatggacacttacacctcggatgaacaagaaagtttggaagttgcaattcagtgcttggagacagtttttaagatcagcccagaagatacacacctagcaggttcacagcctttgacagaaatgtttaccagttccttctgtaagaatgacgttctgcccctttcaaactcagtgcctgaagatgtgggaaaagctgaccaattaaaagatgaaggcaataaccacatgaaagaagaaaattatgctgctgcagtggattgttacacacaggcaatagaattggatcccaataatgcagcttactattgcaacagggctgctgctcagagcaaattacgtcactacacagatgcgataaaggattgtgaaaaagcaatagcaattgactcaaagtacagcaaggcctatgggagaatggtgctg

SEQ ID NO: 688 - DNA, 461 bp, Homo sapiens
  misc_feature (1)...(461): n = A,T,C or G
actggaganacctgatgacgctcgggaangccgngcaacccagtcggcttgaggcacgccaggagaagactgaatgccaggctaggaatgtatgcggctctcgatcacggggtgggtgcccccgacaccgggtctcctagcttgagttccctagaagcgaaatctgagagggggattctggggcaagtagtttcttgcgggtgagtgttctcagagaaacttaccagatcaagaaagggagctcaggctggatggaggaagccacgcaagtgtggcttcaagatccatcgccttggcctgatcgctgtgggggcaggggcctggagtacgaggggcaccctgggggctcccacccagaagcagaggggctgggctgttgcacctctactggcatcagtctttggttaccccccagccccagtaggaagagagcaggcagagcttgtcatccccagcctggg

SEQ ID NO: 689 - DNA, 485 bp, Homo sapiens
  misc_feature (1)...(485): n = A,T,C or G
agggggtnnaattcggactctagtcactgtggtggaattcgttttgatgagatggaaaaattcctagaaaattataacttaccaaaactgaaagaagaaagataaatgaccccacatttgttaaataaattggatctgtcatgaaaatatttcacacagtggaacctctagtcacaaatgcttcaccagtgaattctactaaacatttaaggaataaatagcacccatctcacacaaactcttctagagccgaggcataatgggaacagcaactccacctgtcatgtttcacctccaggaaaacgtgatacccaaactcaacagagaaaaaataaacttacagaccagtctcactcatgaacataaacagaaatcctcaacaagatattaacatataagacctggcaattggccaggcgtggtggctcacgcctgtaatcccagcactttgggaggccgaggtgggtggatcacgaggtcaggag

SEQ ID NO: 690 - DNA, 490 bp, Homo sapiens
  misc_feature (1)...(490): n = A,T,C or G
tgagtgtncncagatgtccccaaaactgaganccttgcnangctnaggaagnngcgcggaattccaaacatggcggcgcccagcgcgcgaggacgtgatccgcttctgctccggcttggattgtagccttgacgaggtctgagcgaccatggaccggccggggttcgtggcagcgctggtgctgctgcattttttatcacctatgaatatgtgaagtggtttttgcatgctgattcatcttcatatttgacacctatgaaacatatgttggctgcctctgctggagaagtggttgcctgcctgattcgagttccatctgaagtggttaagcagagggcacaggtatctgcttctacaagaacatttcagattttctctaacatcttatatgaagagggtatccaagggttgtatcgaggctataaaagcacagttttaagagagattcctttttctttggtccagtttcccttatgggagtccttaaaag

SEQ ID NO: 691 - DNA, 438 bp, Homo sapiens
cctgggcacacagagagaccgtgtctctataaaaagtatatagtttatacttgtttctgtggacagctttttaaagaagaccatcatgtgggtatttatcattcagtatgtagactgtggcagatgtttaatcccaccctgcccctcgctcctgctatcaggagatagttctgggacaagtggttttagcctctcgtaatctccattacaccgcacgaaaccaccctaagaggcttacactgctggcttctctacatgcagcttctagctgaggccctagccccaggcaaaaccttctgtgctttcctatgatccgcctggctaaactgaaatgacatattatcactaccacctataaaataaaagctggatggtatatctgactgaaatcaaaactagtatttatgttaaaggcaatattcctaagcctaaactgag

SEQ ID NO: 692 - DNA, 481 bp, Homo sapiens
  misc_feature (1)...(481): n = A,T,C or G
ntttgatcgacgtccctagtcagtgtggtggaattcctcctcacatcccagacgatgggcagccaggcagagacgctcctcacttcccagatggggtggcggccgggcagaggctgtaatctcggcattttgggaggccaaggcaggcggctgggaggtggaggttgtagcgagccgagatcacgccactgcactccagcctgggcaccattgagcctcatttatgaattctatcaggatttctttttttggtggaattcttagcatgttcacatatgagatcatatctgcaaacacagataattttatctctttctttccatcttggatgccttttatttctttttcttgcctgattgccctggctaaaacttccagtactatgttgaatagaagcagtgaaagtgggcatccttgccatgttcttgatcttagaagaaagtctttaagtgtttcaccattgagtatgatatttgctgtg

SEQ ID NO: 693 - DNA, 449 bp, Homo sapiens
gtagttggtgttccttagtttttagcttttagaatacccatcaaatatccattgtcttgagtttgaggacagagaatgttgaggtttcctgcctgccctgtgattgaggaacccaactttagggaatgccccttgttattcagactttggttttgagaacaggatcactgacctcttgaatatcagatctggaaagactcagaaatctagtctgccccactcattttctggcagggacagctgagctggggcaagggagaaggactggcccagggtcaggcagcaagaggcagggctacagccggaacctggcctcccatgcccaggccactgccttccacacagcacagggcctagtccatgggcatggcccaaagagaattcccgggctcctgcttccctggtcccccttctccagggttttccttctttcattccactggtgactg

SEQ ID NO: 694 - DNA, 508 bp, Homo sapiens
  misc_feature (1)...(508): n = A,T,C or G
gcgtgccggggnnnnncgggggttcgagaccccttncgagnatcgcagaccantatgccanngccgnggaattccaacatggatgccttcacaattgctctttaagaaggataaaaagataggggtgaggtgtggtctatctcctgcttcactcaggccctggtgcttcctcaagtggtgtgagaaactgtggtcctgtgcgttctcttccagacccttagcttatatattttccctataaaacttagtcctaatcccagcattttgggaggccgaggagggtaaatcatgagatcaggagtttgagaccggcctggccaacatggtgaaactccgtctctaaaaaattagctgggcatggtggcgggcgcctgtggtcccagctactcaggaggctgaggcttgagcccaggaggtggaggttgcaatgagccgagatcacaccacagcactccagcccgggcggcagtgagagactgtctcanaaaaaaaaaaaaaaaaaaaaaaa

SEQ ID NO: 695 - DNA, 500 bp, Homo sapiens
  misc_feature (1)...(500): n = A,T,C or G
cgtgaagaggggnnnnnnggggnntttcgagaccctttccaattggaggactntccgactgggtttttattcctgaatgtccaccagatgacgactgggaggaacacctttgtcgccgactcagcgagacaaggacccgtggttctcgtctcaacatcatcattgtggctgagggtgcaattgacaagaatggaaaaccaatcacctcagaagacatcaagaatctggtggttaagcgtctgggatatgacacccgggttactgtcttggggcatgtgcagaggggtgggacgccatcagcctttgacagaattctgggcagcaggatgggtgtggaagcagtgatggcacttttggaggggaccccagataccccagcctgtgtagtgagcctctctggtaaccaggctgtgcgcctgcccctcatggaatgtgtccaggtgaccaaagatgtgaccaaggccatggatgagaagaaatttgacgaagccctgaagctg

SEQ ID NO: 696 - DNA, 486 bp, Homo sapiens
  misc_feature (1)...(486): n = A,T,C or G
nggatcgaaacccctnnnannnnnccnactgagatccctatgcagngtcgnggaattcggacaagatcggcaggctcagaatgcttgctggctccagcgtgatgtcctgtgtctcctgcttcttcctgtcttttgggaacagtgagtcggccatgatcgctctgctctgcctttttggcggggtcagcattgcatcctggaatgcgctggacgtgttgactgttgaactctacccctcagacaagaggaccacagcttttggcttcctgaatgccctgtgtaagctggcagctgtgctggggatcagcatcttcacatccttcgtgggaatcaccaaggctgcacccatcctctttgcctcagctgcccttgcccttggcagctctctggccctgaagctgcctgagacccgggggcaggtgctgcagtgaaggggtctctagggctttgggattggcaggcacactgtgagaccaacaactcctt

SEQ ID NO: 697 - DNA, 474 bp, Homo sapiens
  misc_feature (1)...(474): n = A,T,C or G
ggttgtnnnacctgagaccncactgagtatcgtacgaaagngcggnggaaatatgagcgcatggtgcacgaggcggagaaggacaaagcggaggacgaggtgcagcgcgagagggtgtcatacaagaacgccctggagtcctacgccttcaacatgaagagcgccgcggaggatgaggggctcaagggcatgatcagcgaggcggacaagaagaaggttctggacaagtgtcaagaggtcatctcgtggctggacgccaacaccttggccgagatggacgagtttgagcacaagaggaaggagctggagcaggtgtgtaaccccatcatcagcggactgtaccagggtgccggtggtcccgggcctgggggcttcggggctcagggtcccaagggagggtctgggtcaggccctaccattgaggaggtggattaggggcctttgttctttagtatggttgtctttgaggtggac

SEQ ID NO: 698 - DNA, 465 bp, Homo sapiens
  misc_feature (1)...(465): n = A,T,C or G
gtggccannnaacctgagatgatagcctatggcggaacnancctagataatgctttgtcattntcgtttttaaaaaaaaatttagttcactgatcttttcttttgtttttctagtctctatttcacttgtgctctaatctgtattatttccttacctctgcaaacttagtttgttcttgtttatctagttccttcagatggaaagttatttatttgagatctttctttttcttaattaggtatttattgctgtcactttccctcttgaactccttttgctgcatctcataaatgtgtgtgtctgtgtgtgtgtgtgtgtgtgtgtgtgtgagaaataaatctctctcttttgcccacgcttgagtgcagnggtgtgatcttggctcactgcgacctccgcctcccaggttcaggcagttctcccgcctcggcctcccaagtagctgagactacaggtgcctgcca

SEQ ID NO: 699 - DNA, 451 bp, Homo sapiens
  misc_feature (1)...(451): n = A,T,C or G
attgattacatctgaccttgagggcgtttcgaacctttctccagggtatgcttcaacaggaatagctaacatttattaaattgtggcacgtaagtatcttggatatattggctcattgaatcctcacacctactattttacagagatgccagtggggcttgagattgaatcacttgcccaggctcccactgctggtaaacagtagagggggctcctgacccataagtctggcttgacaacccattccctcaactgcggatcccggattcccttatcaccctgttgatttctccatagctgtggtaacatttgttgcatgaatggaccgttgaaatagggcctggcagggagaaattcaggaaatgatgaatgaatggttcttccctggcagcctcgatgacttacgagccctcaaggggaagcattttctcctggaccccttgatgccggn

SEQ ID NO: 700 - DNA, 493 bp, Homo sapiens
  misc_feature (1)...(493): n = A,T,C or G
gggnngccccgccccatgataccctcgactgatgcccactagnacanngcggnggaantcccatcatgaccactgcttgctcagataatgacgtgcggaaggttggaagtctggctggatcttctgtctttctgcctgtctctgtgtctcgtaccttcgctgtcagcagaggggactctctggcaggctccccagtaaaccggtccccttctcgctgcagtgggttgaatcgctctgagtctccaaaccgagagcgcagagactttgggggcagcaacacccagctgtacagcagcagcaacaacctctacatgcctgactactcagtccacatcctcagcgatgtgcagtttgtgaagatcacacggcagcaatatcagaacgcactcactgcctgccacatggacagctcacctcagtcccctgacatggaggccttcacagacggngactccactaaggcccccacaacccggngcacaccccagacccn

SEQ ID NO: 701 - DNA, 458 bp, Homo sapiens
  misc_feature (1)...(458): n = A,T,C or G
attgataccctgnnnttgatnacattagaccangcggnggaattcgttttcagccaaagcgcacacctcatccagcaccagagaatccacacaggagagaatccctacaagtgcagcgagtgtgggaaggccttccacaacagttccagactcatgcaccaccagaggctgcaccacggagagaaaccctacagatgcagcgattgcaagaaagccttcagccagagcacgtacttgattcagcaccggaggatccacaccggggagaagccctacaagtgcagcgagtgtgggaaggccttccggcacagttccaacatgtgtcagcatcagcggattcacctccgggaggacttctccatgtaacagtggcgcggtgtccgagggcagagtccagctgagcacttcctgcatgcgcccccggcacctgactctgccctttatgtattatccacacg

SEQ ID NO: 702 - DNA, 487 bp, Homo sapiens
  misc_feature (1)...(487): n = A,T,C or G
nagagccgnnnncaatgaaactggntgtatngcanngncgcggaanctcctggagcgcatcggctcaagtgtgaagcctccagctgatctgcaggccacagccaggtcacatgcacctgatgccggggcccaggcagagagtgagctcccatcctaccatcagaatgacgtgagcctggatcgagggtacacttccgactcagaggtctacactgaccatggcaggccgggcaagatacaccgatcagccacagatgccgatgtggtcaacagtggttggttagtggttgggaaggatgacgttgataactccaagccagggcccagccgcccaggcccttcacccctgatcaatcaatacagcctaacagtgggactggatttggggccacacgacactaagtctctgcttaagtgtgtggaatcgctgtccttcatcgtgcgtgatgctgcccacatcacacctgacaactttgagctctgcgtn

SEQ ID NO: 703 - DNA, 397 bp, Homo sapiens
aatggaatgaataaatggtctgggagccctatagaactctctatccgatcccagccttcaccttcagttccttaaaggcagaatggcccgaatgtccaagtgtcagcattatagatggttactttttcctctagtaaacctcatggcttaagaattattttccggccgggtgcagtggctcacacctgtaatcccagcactttgggaggccaaggtgggcagatcacgaggtcaggagatcgagaccatcctggctagcacggtgaaaccctgtctctactaaaggtacaaaatttatccgggcgtggtggtgggcgcctgtgttcccagctacttgggaggctgaggcaggagaatggcatgatcccaggaggcggagcttgcagtgagccgagaa

SEQ ID NO: 704 - DNA, 460 bp, Homo sapiens
  misc_feature (1)...(460): n = A,T,C or G
aatgatgacattcgnnttcgtagacattagnccagngcggnggaattcaaatgtagtgatgctttagaaaatcaacaggcctcatcccatctgtgaaattctattattctttatgcacagcacggaaaacataataaccaaacaatgtattagttcttacagaggctaatcaaagcaactatacaatgcaagatgcatcctggataagccattgtttcccctcagccacgacagaccacatggagacacttcagctgaccctgttccccaccaggttacagcaagaagccaggaaaagaaacatttcctttctcatggaatattctccctgttcttggtcagtcaagcttactgttactagaagtacatttccaggatacctttcttttcttttcttactcttttttttttttttaaaaaaaaagtttcgcttttgttccccaaactggagggcaggggc

SEQ ID NO: 705 - DNA, 454 bp, Homo sapiens
  misc_feature (1)...(454): n = A,T,C or G
aatgattacattggacttgaggngcatttccagaggccttggtataaagtcatttacttccatgatacttctcgaagactgaactttgaggaagccaaagaagcctgcaggagggatggaggccagctagtcagcatcgagtctgaagatgaacagaaactgatagaaaagttcattgaaaacctcttgccatctgatggtgacttctggattgggctcaggaggcgtgaggagaaacaaagcaatagcacagcctgccaggacctttatgcttggactgatggcagcatatcacaatttaggaactggtatgtggatgagccgtcctgcggcagcgaggtctgcgtggtcatgtaccatcagccatcggcacccgctggcatcggaggcccctacatgttccagtggaatgatgaccggtgcaacatgaagaacaatttcatttgcaaatatt

SEQ ID NO: 706 - DNA, 486 bp, Homo sapiens
  misc_feature (1)...(486): n = A,T,C or G
ngagggcccgnaatcgagaccataggccagctggtggaattccagagggttggaattgcagatgtgaggtacttctttgatagtgcctccatgcatgcagaagatgacgtggagagctccgcgcggcacagggcaggaagctggtgtgcactctcatggatccgaagccaacacacgcctctcaactgaggactctgcccctctggcattcttccagccaccagccctgggggccaggagccactgagtgggtcacacagccttagagggcaacgagggcaggagctcgccctggcggtccccatgcagacaagagggtcactggcttccttgctttgctcttcctggacatcttcctcgacattcatctttccatcctaccaagagcgtggaaaccacagggcatgaggacaggcggagacaacgctggaccatctcacagccacatcaagaggctgcccacatcagggctttctacgtggttgg

SEQ ID NO: 707 - DNA, 441 bp, Homo sapiens
  misc_feature (1)...(441): n = A,T,C or G
actaaaggcattagaggaggcggcggtccgcgtggacctgtggggcggcacgttcattggctctttcatgggagcgttgtacgcgggggagcgcagcgccagccggacgaagcagcgggcccgggagtgggccaagagcatgacttcggtgctggaacctgtgttggacctcacgtacccagtcacctgcatgttcactgggtctgcctttaaccgcagcatccatcgggtcttccaggataagcagagtgaggtaggcccacctcataccctgccctgcctacccctccccggaggagccccctgctcctgcctcaccttgatccctgtccccgcaggacctgtggctgccttacttcaacgtgaccacagatatcaccgcctcagccatgcgagtccacaaagatggctccctgtggcggtacgtgcgcgccaacatgn

SEQ ID NO: 708 - DNA, 500 bp, Homo sapiens
  misc_feature (1)...(500): n = A,T,C or G
agcggggtnnnnnnnaattgaatagcctagctcagngnggnggaattcggcggctgcactggcggcagctggaggtgtaatagtgcgggtagtgggtttggagaagttccgaggcggcggtggcgccggtcaggacaaggatagcggaaccgggccctgggcttgtcgctcaccatgccgacagtagaggagctttaccgcaattatggcatcctggccgatgccacggagcaagtgggccagcataaagatgcctatcaagtgatattggatggtgtgaaaggtggtactaaggaaaagcgattagcagctcaatttattccgaaattctttaagcattttccagaattggctgattctgctatcaatgcacagttagacctctgtgaggatgaagatgtatctattcgacgtcaagcaattaaagaactgcctcaatttgccactggagaaaatcttcctcgagtggcagatatactaacgcaacttttgcagacaga

SEQ ID NO: 709 - DNA, 500 bp, Homo sapiens
  misc_feature (1)...(500): n = A,T,C or G
cccccccccccccccccccccatcgacncccctcgatagtagaccattagnccangcggnggaattccgtctctgagagtccaggcagagcagagggcagcgctcggccggtcatgctggctcccttggccttgcagcgagcccctggcccacgccgagcgagggatgcttctccctacagcatgtccactcccccggcatggccaggtggggcccctggggcaatggcagtggtagaacgctcaacttggttgcggtaccatcagcccacctgcatttggctttcgacttgcttgttctaagtcacagcgccctcatctttttagcaaggtaaaaaaaccaaaatgggtgttatctctgatatcttgaaaccagcgttctgaatagaggtaggttgagttttctaggggaaaacaaatggagaaaagaggcatgaagaaaagtaaaccgagaacataattaggcatcgggcctaagtgtcctggggagataggagggga

SEQ ID NO: 710 - DNA, 496 bp, Homo sapiens
  misc_feature (1)...(496): n = A,T,C or G
cctcccccccccgcccccatgagaccctcgatagaagacattagnacagngcggnggaattcggctttggaattcgtcgacttaagggttggccacgatggtgtccttgatccacttccggtaatgcaccaccttggtgtacagggaaggcctttcgggcaaggcacatggttcactgccccatgacgtgataccttgaagcacaccattacagacaagtggggccccagaatcacccgaacaagtgcttttgccccctgtccagcgtccagcacacagcatgaacttggacaccttctgagggtgaacttgcgcacacacgtcattggaaataacatggaggtccacacactgaagtttctttggggtcaagaactcctctggttcaatgctgccccagcctgaggcgtaacatgcggtccccagtgctggctcctgggtgggcaggtccatgaccttcacagcatccgagagctcggcaggctctgacaggcgg

SEQ ID NO: 711 - DNA, 475 bp, Homo sapiens
  misc_feature (1)...(475): n = A,T,C or G
agaggggccnaagaggccnncactgagnccaactgagacctggaagngcggggaattccgacaaaaacagcagctgatgacttactccaacaacgcacagcaccagaaggcaaggaaatcaaacctcagaggctaaatgttccatgacttgtccaagatcatgaagagccgccagctgtatggggaacaaggcctggatcccaccccaaagacatggattggagacccaccccttggtgaccctagacccgccaatagatcgttgtgaagctgcagtttccctatctgtaaaatgggagcatttagtccaccagcgcgaaaggcacggagggagtttccctattatatgaccgtacacgaaatctagactgtgaccaaagtctcccgctcctcagcctcctctcctccgcatcctcagccactagtcacgctggagaggaggcgtgggaactgacctccgcgggccgggcctcgg

SEQ ID NO: 712 - DNA, 493 bp, Homo sapiens
  misc_feature (1)...(493): n = A,T,C or G
agggtcnnnnnnagcacgccatgtagacatagttagagcgccggaattcggaaccccgcggtgactttgatgttattacccctcccgccagcgaggccctgaggtcccagaaagtacgtgaagtgaccggctgggtttcttggcctcctaccccactcatgccacagcgtcttaggagggctgttgaattttgcagcaaacacgttggccaaagaagtctcccctgatggcattggtctctgtttcagatcatcactgccctggaggaggatggcacggcccanaagatgcagctgggctatcggctccagcagattgcagctgctgtggaaaacaaggtcacagatctataggaacccaggagccacggcctgctgttgcttcagcctggcctgggcagccctggaagctcggaggagaggccaccttcttaggtgcctgtagtgactgacaagcagagttagtggaaggtgactcccagtctcctggtggc

SEQ ID NO: 713 - DNA, 493 bp, Homo sapiens
  misc_feature (1)...(493): n = A,T,C or G
natgagaccatatccangtggtgaattcccagcttgaggcccgaggatgaaggcgtgtaccactgtgcccccagcgcctgggtgcagcatgccgactacagctggtaccaggcgggcagtgcccgctcagggcctgttacagtctacccctacatgcatgccctggacaccctatttgtgcctctgctggtgggtacaggggtggccctagtcactggtgccactgtccttggtaccatcacttgctgcttcatgaagaggcttcgaaaacggtgatcccttactccccaggtcttgcaggtgtcgactgtcttccggcccagctccaagccctcctctggttgcctggacaccctctccctctgtccactcttcctttaatttatttgacctcccactacccagaatgggagaacgtgcctcccttccccactccttcccttccaagccccttccttntgccttctgttcttgatctcttaaggatcctatn

SEQ ID NO: 714 - DNA, 499 bp, Homo sapiens
  misc_feature (1)...(499): n = A,T,C or G
gggcccnnnnnnagcccgccctgagaccatcgatagtagaccattagnccagngcggnggaattcaccgaagcccggtgattaagtaccccctctctcatgcgggacggaggctagggcagggggaaggcacgtgcgggatctggatcaggtagatgttacccgaaaacagccccgttggcctctctgagcctcggtgccctccgctgtagaatgggaccggtcgtacctgaattttcgaggcatcagaggcaaccccgcggctcctgccaacggtcggggcccctcggggaccagcccttcgcggggctgctgccaaaaaacctcagtcgggaggagctggttgatgcgctgcgggcagccgtggtggaccggaaaggacctctagtgacgttgaacaagccacagggtctaccagtgacaggaaaaccaggagagctgacgttgttctcagtgctgccagagctgagccagtccctanggctcanggagcaggagct

SEQ ID NO: 715 - DNA, 453 bp, Homo sapiens
  misc_feature (1)...(453): n = A,T,C or G
nctcgagtccctagtccatgtggtggaattcggcgtcgcttccggccaagcaagcatccagagctcgtggatccccgcctggcaccgcctgtgacgtcatttctggtacgtgtacctgaagcctggcgtctcgacctcggcgcagcccgtcaccagcggcgtctggggcagtcaccccgcaggacctcggtttttgcacttgtaaaatgaagacagctgtgtcgttgtacttcaaaggctagtgatgggatgtggttgctgaaaaatgtaaaatgtacggctcgtgctgcactttccattccaaacgtgggtgacagtccagccaaaataccctcgaaagaagaaccccaggcgtaatatttgcttactcttgtctgaaatacttaagtataactgtagaaagtgttaagtgaaaagacctgaaggagagcaaagggcagtagtaagcttccc

SEQ ID NO: 716 - DNA, 480 bp, Homo sapiens
  misc_feature (1)...(480): n = A,T,C or G
cggggccanaaaggaancctaccgatagtcatccgcagngngccggaannccacagatgtgtgcacatgcaggcccacacacaggtgagcgtggacctgtgtgaacagatgcgcgcagacctgcacgtggagacacagacatgcaggcgcacaaagagatccctcaaggctgacacccaggaaggggcctctcacttgtgggactcccgagatgcagtggccaacactagtgtagtgcccagttcactactggataagacagaggcctgttctggtcacacatgggaggcagaacccagagactgggcccaggagcccttctgctgacagtgggaactcccagctacgtgtgggggtccccataccagacaaaggtccctgaccttagtcttgcccgagaggccgacacagcccagctttggggtctggctttacccacaagaggccacaccttgccacagcactgtttatctggcctgn

SEQ ID NO: 717 - DNA, 474 bp, Homo sapiens
  misc_feature (1)...(474): n = A,T,C or G
ccccgcatgagccctgaactgaggcgtaagncccacccaggcgggccagtgcggcaaccagatcggcgccaagttttgggaggtcatcagcgatgagcatgggatcgaccccacaggcagttaccatggagacagtgacttgcagctggagagaatcaacgtgtactacaatgaggctgctggtaacaaatatgtacctcgggccatcctggtggatctggagcctggcaccatggactctgtcaggtctggacccttcggccagatcttcagaccagacaacttcgtgttcggccagagtggagccgggaataactgggccaagggccactacacagagggagccgagctggtcgactcggtcctggatgtggtgaggaaggagtcagagagctgtgactgtctccagggcttccagctgacccactctctggggggcggcacggngtccgggatgggcaccctgctcatcaa

SEQ ID NO: 718 - DNA, 492 bp, Homo sapiens
  misc_feature (1)...(492): n = A,T,C or G
aggcgaggcgccnatcgaacccttactgagagcctagtcagtgtcgtggaattccgccatgcttgaattctcgccgggcttcagctgcctcacggggcagggcttgggacctgcagcctgagccctccccaccccccaacccccagtgggctcccatgcagcccgagcctccctgacacgtgccgccccctgcttcacggcgcctggtcccatcgaccaccaaagggctgaggagtgcgggtgcactgtgtgggactggcaggcagctgcgcccgcggccccggcaccggatccactaggtgaagccagctggggtcctgagtcgggtggggacttggagaaattttatgtctagctgaaggattgtatatgtaccaatcagcactctgtgtctagctcaagctttgtaaatacaccagtcagcactctgtgtctagctcaaggtttgtaaatgcaccaatcagcaccctgtgtctagcttaaggtttgcaa

SEQ ID NO: 719 - DNA, 471 bp, Homo sapiens
  misc_feature (1)...(471): n = A,T,C or G
cactgagaccncttttgaagccttggaantcccctttggacatgcagnccgagatcgccatggatcggatgaagaagatcaaacggcagctgtcaatgacactccgaggtggccgaggcatagacaagaccaatggtgcccctgagcagataggcctggatgagagtggtggtggtggcggcagtgaccctggagaggcccccacacgtgctgctcctggggaacttcgttctgcacggggcccactcagctctgcaccagagattgtgcacgaggacttgaagatggggtctgatggggagagtgaccaggcttcagccacgtcctcggatgaggtgcagtctccagtgagagtgcgtatgcgcaaccatcccccacgcaagatctccactgaggacatcaacaagcgcctatcactaccagctgacatccggctggctgagggctacctggagaagctgacccttcatn

SEQ ID NO: 720 - DNA, 418 bp, Homo sapiens
caccagggcgagcattttcgagaagtgatgaagcgaatccagagcctgctggacatccaggagaaggagtttgagaagtttaaatttgcaattgtaatgatgggccgacaccagtacataaatgaagacgagtatgaagtaaatttgaaagactttgagccacagcccggtaatatgtctcatcctcggccttggctagggctcgaccacttcaacaaagccccaaagaggagtcgctacacttaccttgaaaaggccattaaaatccataactgatttccaagctggtgtgttcaaggcgaggacggtgtgtgggtggccccttaacagcctagaactttggtgcacgtgccctctagccgaagtcttcagcaagaggattcgctgctggtgttaattttattttattgaggctgtt

SEQ ID NO: 721 - DNA, 423 bp, Homo sapiens
  misc_feature (1)...(423): n = A,T,C or G
gtatgtttcctgagaccccctgatgcgctgaaanacgaggacgatgttcctctccgcctccacacactgagaccgtgcacatattcaactcgatatggaaagaaaacccccgaggagcccaccacctggacgggacttcgggaagtgctcatggctccaccagctacctgccttcccaagtgacagaaatgttcaaccagggcagagccttcgcacggtccgcctgccattctgcggcacaaaaacatctgctcgctcccacaattcagaagacccgcggttgttggtgggtgccgcgacgtacctgacatgtacaacctggacccccagagggcgggagtgtgccctgagaagcacaccggtggacggagtctggaaacgaccaagaatttggctctgctctacgactgcccttatactcaa

SEQ ID NO: 722 - DNA, 470 bp, Homo sapiens
  misc_feature (1)...(470): n = A,T,C or G
cgggcgggggnnnnnnntttcgatttcatattccatgtggtggaattcctcgtgcattcaactcgttcccgctcatggaacccctctttaaaaagacgcagggcacctgtgagcgcaggagcgagcctaaggccacccagcggcagcgcccgtgtcctgggcactcagcgtgctgggcagagcaggtgcgatggccccagtcctagcagccctcgcccatgtcctgtgcccttacatggctcccggactgtgcagggagccgatacgtttgctgatagcaatactggaaccaccgggtgcgatggcagtgaggagactgcccagtgcctttggggctgtgcttgcaataaagaaagaatttcctggaaaggcagtctgcaaaagagggaaccggtgactcagaaagacagatgttttggtaatttaccccaaatgtgccatccacatagtgctttttcctcttgcccttc

SEQ ID NO: 723 - DNA, 477 bp, Homo sapiens
  misc_feature (1)...(477): n = A,T,C or G
agagcggccaacctgataccctgctgatggcngtgaatacttcacttcccttccttgcccctcacccgctactccctctgctcgctaggctcctgccagccatgttcccacctcatgatgggtctttgcactgactacctcccaaccccacccaaattgctgcagggcctgccccccaccacttgatttggggccctcaggtcccttcccatatctcaggagcacttcccactcctttgctctttagcctcccttggcctacttcatttctcttgaacacggttaccgcagccccattcggtatcttattgtgtctgttcccagtcttgcccacccagaacgtgagccccgtgagggccccacagagcacctgcttgcaggaggtactcaatagatctgtgttgcgtgaaagcagcagagacacaaggctggcaaccgccccaactctgcctgccctgtcaactcaacctcctttcc

SEQ ID NO: 724 - DNA, 486 bp, Homo sapiens
  misc_feature (1)...(486): n = A,T,C or G
agagtnngcccagcgtttannaacccagcntccccatgacgcgacgggaaanncaggaangggaccccgaaaagcccaacgcctacgcgggcatcttccacttccacttctggcgcttcggggaatgggtggacgtggtcatcgatgaccgggtgcccacagtcaacaaccagctcatctactgccactccaactcccgcaatgagttttggtgcgccctagtggagaaggcctatgccaaactggcaggctgttaccaggccctggatggaggcaacacagcagacgcactggtggacttcacgggtggtgtttctgagcccatcgacctgaccgagggtgactttgccaacgatgagactaagaggaaccagctctttgagcgcatgttaaaggtgcacagccggggcggcctcatcagtgcctccatcaaagcagtgacagcagctgacatggaggcccgcctggcgtgcggcctggtaaagg

SEQ ID NO: 725 - DNA, 478 bp, Homo sapiens
  misc_feature (1)...(478): n = A,T,C or G
ggggatnccnncaatgagacccattgaagngcgctggaaancctgaggggttgagtggttctttgtctgtcattgtcctttttctctctgccttccccaacagctctgctgtagcagcccattgaccaagtaggtcactcagagcatcctggtcctacacataagcgttaaggcccctgaagggccagagaaggcttaggagtttctcaagagtgagcccagggtgggagggggccagagtcactgagaacagcccatttgaaaagtcaggcagagggatcctgagccctgaatatgcctgcctggcctgcggtaaccatgccagcagggtcagggcatttggccaattgctgtcttggtcgaggcaggaacatcttgcttccccagcccctgtctttntgtctccagtatccttggagcagctgcagggtgggtagtggggtgtctctcccagctgcttgaagagatgagcctccac

SEQ ID NO: 726 - DNA, 485 bp, Homo sapiens
  misc_feature (1)...(485): n = A,T,C or G
cgggggacccnnnaatggagaccaatcgagagccctangcagngngcnggaattcctgaaatgttctcctggagcctatgaacgtgcccttccatgagccaaggaccacactgtgtgttgggtccatcaagaaaggaagtcactggtaagcatccttctcccaggagtgggccagaggccttgccaagcctcaccaccactgagacccagagtggtcgagaagaggcctcaccatgtcctgaagtgaagagaactccatctctgactggtttgaggcaacggaccggacctccgaatcctccagctttgctcctgctacagaaaggccaagataaatggagagcatggcccacccaactccacagtacaaaaatgaaaaccagcttggccacaggtggaaagccacatcccaagcctgcaagctcccctctcaccactcaacataccaaactcctcctctccatcatccctcagaagcaacagtg

SEQ ID NO: 727 - DNA, 469 bp, Homo sapiens
  misc_feature (1)...(469): n = A,T,C or G
cactgagaccctaggaatggacgcctatttccctatccgcttacctgtcaccctgaagcctgggcttggcctcctccagccccccatctccgtcccatcctcccatggtgtctactcctgtccctgagccccgccctgtggtctatcctgtgcccgatttccagtgaaccccatgaagctgatgggtttgcaggaaggcctgaacatgtgcaccctcccagggacactggatgcgctgggagccccggggaccccatggggtgctgtaatcatggaccgtaggccatgtgatgggcctgaagtggaggctgctcagcacagagccctttctggtgcctctcgaactcagtacgatgcaagttctagacacacagatggcctgtggaggcctctccctggtgtgggcccacaggtacttccatggttgactcctggcttcaggaatcccttcctccctccagaggcttcn

SEQ ID NO: 728 - DNA, 470 bp, Homo sapiens
  misc_feature (1)...(470): n = A,T,C or G
tctgggtgcnngggattgagncccactgatgaccctaggacangcggtggaattcgggaaccccaatggcgagggtctgccacactggccgctgttcgaccatgaggagcaatacctgcagctgaacctacagcctgcggtgggccgggctctgaaggcccacaggctccagttctggaagaaggcgctgccccaaaagatccaggagctcgaggagcctgaagagagacacacagagctgtagctccctgtgccggggaggagggggtgggttcgctgacaggcgagggtcagcctgctgtgcccacacacgcccactaaggagaaagaagttgattccttcattcacttcgccattcattcatacttccgtccatccattcagaaagcatttattaagaatttactcaggcatgatggcccatacttgtaatcccagttattgggaaggatgagatgggaggatggct

SEQ ID NO: 729 - DNA, 480 bp, Homo sapiens
  misc_feature (1)...(480): n = A,T,C or G
cgggtgncncnaaatgagaccaactgagaccctaggccangngcnggaattcggagtggcttactacatgtgggagcttttggtatgtgacatgcgggctgggcagctgttagagcccaacgtggggcagcacagagagggggccacctccccaggccgtggctgcccacacaccccaattagctgaattcgcgtgtggcagagggaggaaaaggaggcaaacgtgggctgggcaatggcctcacataggaaacagggtcttcctggagatttggtgatggagatgtcaagcaggtggcctctggacgtcaccgttgccctgcatggtggccccagagcagcctctatgaacaacctcgtttccaaaccacagcccacagccggagagtccaggaagacttgcgcactcagagcagaagggtaggagtcctctagacagcctcgcagccgcgccagtcgcccatagacactggctgtgag

SEQ ID NO: 730 - DNA, 477 bp, Homo sapiens
  misc_feature (1)...(477): n = A,T,C or G
ggggatannnnaaatgagacccattgaagngcctggaanncccgctgagtgctgcggcgcgatccttgcttccctgagcgttggcccgggaggaaagaagatggtgctggatctggatttgtttcgggtggataaaggaggggacccagccctcatccgagagacgcaggagaagcgcttcaaggacccgggactagtggaccagctggtgaaggcagacagcgagtggcgacgatgtatatttcgggcagacaacttgaacaagctgaagaacctatgcagcaagacaatcggagagaaaatgaagaaaaaagagccagtgggagatgatgagtctgtcccagagaatgtgctgagtttcgatgaccttactgcagacgctttagctaacctgaaagtctcacaaatcaaaaaagtccgactcctcattgatgaagccatcctgaagtgtgacgcggagcggataaagttggaagn

SEQ ID NO: 731 - DNA, 475 bp, Homo sapiens
  misc_feature (1)...(475): n = A,T,C or G
tggcgttaacagggggannggttattgagacccattgagagcgctgcggaannccggcacggntagcagccccctggccaccagcgtccagcaatgtgtctcaccggccgttcgtagcatttgcgcgtgcgcggaaccgcggggccatgagcgaagccggcggccggggctgtgggtccccggttccccagcgagcgcgatggagactagtggcggcgacggccgcgttctgcctggtgtcggccacctccgtgtggacggcgggggccgagcccatgagtagggaggagaaacagaagcttgggaatcaagtactggaaatgtttgatcatgcttatggtaactatatggaacatgcttaccctgctgatgaactcatgcctttaacctgtagaggtcgagttagaggccaagagccaagtcgcggtgacgttgatgatgccttgggaaaattttctctgacactgattgattc

SEQ ID NO: 732 - DNA, 563 bp, Homo sapiens
  misc_feature (1)...(563): n = A,T,C or G
ccctaccacctatctcccacttccatcgtcgctacacactcgggtctcacttggtatacattgttcacataaactcttcacatcataacctccgggacccgcggnnnnnnnnnntttgagagcttgagnacngtcgnggaanncggnnnanggaatcgncgacttaggggagggccacgaaggcggccttgagccacttcctttaatgctccaccttggtgaacagggaaggcctttcgggcagggcacatggttcactgccccatgacgtgataccttgaagcacaccattacagacaagtggggccccagaatcacccgagcaggtgcttttgccccctgtccagcgtccagcacacagcatgaacttggtcaccttctgagggtgaacttgcgcacacacgtcattggaaataacatggaggtccacacactgaagtttctttggggacaagaactcctctggttcaatgctgccccagcctgaggcgtagcaggtggtccccagtgctggctcctgggtgggcaggtccatgacctttacagcatccgtgagctcggga

SEQ ID NO: 733 - DNA, 465 bp, Homo sapiens
  misc_feature (1)...(465): n = A,T,C or G
cgggtccgggattgagccccctgatgacactagtacgngcggnggaattcccggttcgttatggccgtcgccggagcagctgcgggagctggaggccgaagaacgcgaatggtacccgagcctggcgaccatgcaggagtcgctgcgggtgaagcagctggccgaagagcagaagcgtcgggagagggagcagcacatcgcagagtgcatggccaagatgccacagatgattgtgaactggcagcagcagcagcgggagaactgggagaaggcccaggctgacaaggagaggagggcccgactgcaggctgaggcccaggagctcctgggctaccaggtggacccaaggagtgcccgcttccaggagctgctccaggacctanagaagaaggagcgcaagcgcctcaaggaggaaaaacagaaacggaagaaggaggcgcgagctgctgcattggctgcagctgn

SEQ ID NO: 734 - DNA, 485 bp, Homo sapiens
  misc_feature (1)...(485): n = A,T,C or G
gatggggnnnncactgaaccataatgaganctctggcagnngcgnggaattcggatgtgtaccctgagcccccgcgccgcacgccggtgcagcccaatcccattgtctacatgatgaaagcgttcgacctcatcgtggaccgacccgtgaccctcgtgagagaatttatagagcggcagcacgcaaagaacaggtattactactaccaccggcagtaccgccgcgtgccagacatcactgagtgcaaggaggaggacatcatgtgcatgtatgaagccgaaatgcagtggaagagggactacaaagtcgaccaagaaattatcaacattatgcaggatcggctcaaagcctgtcagcagagggaaggacagaactaccagcagaactgtatcaaggaagtggagcagttcacccaggtggccaaggcctaccaggaccgctatcaggacctgggggcctacagttctgccaggaagtgcctggcc

SEQ ID NO: 735 - DNA, 492 bp, Homo sapiens
  misc_feature (1)...(492): n = A,T,C or G
cgcgcggannnnncaactgagaccactgactgatgngctntgaanancganccaacagcacagtgaggtctaagaaaaatcagcccacaccagacgcacagcagagctgcgggacattaaggatgagagaatctcaaagcaagcaggcggaaagccaggtatcctccaaaaaaaccagcacctggaccgaggccacctcccactccagcaacaagaggcagagggcaggagagtggtggcctcaacctgttgagagaaaataaccgtccatgagaagttctcatcccagcgtggggaggaatgcctcggtggctgagagcacagcgaccacctaaacccacctctgcacgcgccctccagaaaccacatggatcaatgagagaaacaggcgggctgcagaaatcccatgccttcagcatgactagaggacacagaaccctccagacttagaattaaccataaggtgaaaagtaaacaccaacctccagcatg

SEQ ID NO: 736 - DNA, 475 bp, Homo sapiens
  misc_feature (1)...(475): n = A,T,C or G
gcnagttnccaagggggnnnggaactgaagaccaattgatagccctgcggaannncaaggaagaaaggaaaaggaagaaagagggcatccctgtcttgttctaggtcttagagtaagagcttacatttcactgtttaatatgttgttagctggacatttttttctatacatggcatttattggcttgagatgcatttgtcctatactaattattttttagagattatcatgagggaatgttgaattttgtcaaacttttgtttttttttttgggctggagtttcacttttgccatccaggctggagtgcactggcacaatttgggttcactgaaacctttgcctcccaggttaaagcgattctcctgcctcgccctcctgagtagctgggataacaaacgggagcccccccccccagttgatttttgtatttttagtaaaaacagggtttccccccgttggccaggctggtctcg

SEQ ID NO: 737 - DNA, 253 bp, Homo sapiens
ccgtttacgaccaggtgaggatgggaccgtatataacagcttccagtcgtcggatgccactgagcccccagcccctgctctggcccaggcccccagtatggaaagccgacccccagcgcagacatccctgccagcaagcagcggtctggacgacctagacctcctggggaagaccctcctgcagcagtcgctgcccccggaatcccagcaagtgcggtgggagaagcagcagccaaccccccggctcacactc

SEQ ID NO: 738 - DNA, 470 bp, Homo sapiens
  misc_feature (1)...(470): n = A,T,C or G
aaatcgagacctataggccagngncgnggaattcatgcagntgatttattttttattttttatttttatgttttttgagaccaaggctggagtgcagtggcgcgatctcggctcaccgcaacttcccctcccgggttcaagcctcagcctcctgagtagctgggattatgcgcgctcgccaccatgcctggctagtttttgtgtttttagtagagacggggtttcaccgtgttggccgggctggtcttgaactcttgacctcaaatgatccgcccacctcgacctcccaaagtgttgagattgcaggcatgagccatcgcgcctggccgcaaattgattttaaataaatgaacttaaactcttagaagtaaataggcaatggacatgttcactagaaaggaatgtaactaatatataaacataaaaaaggccttcaacactcatcacaatcacactgaaattcaataaat

SEQ ID NO: 739 - DNA, 491 bp, Homo sapiens
  misc_feature (1)...(491): n = A,T,C or G
ggggggatcgaganccnttnncagnatcgaganccntactccagngcggcggaattcctggccatggcctgcatctttgccttcatcctcagctttggcattggccctggtgagtgggcccaaggggctctgggcatccatcatcacatagaaggagtgatgggtgcctgggtgcacagtgggtgggtgtgaatgcaatgtcccctgcaggccctcagagaccacctcatgccggggcttctgggagggaatggcaggaggagagcactgaggggccccccatacagactgggcctgggctcccactcccatgtctgggctggggtcggggagaggcaggcagggaaccctggccagcagccccctgtccctgcccctccttctagccggagtgacggngatcctggccacagagctgtttgaccagatggccaggcctgctgcctgcatggtctgcggngcgctcatgtggatcatgctcatcctggncc

SEQ ID NO: 740 - DNA, 494 bp, Homo sapiens
  misc_feature (1)...(494): n = A,T,C or G
cgccccccccccggnagnnnattgaganccatnngaactgagagcctaggccagngcggnggaattcctcaagaaacttttgtgattaagcttgttgatttgtggcttgatggtttacaggaatggtcatttttaatatctaggaccctgcttgcttgcttgcttgcttgcttactagactggctgcatagtcagtcttccacgtgtaaacaacagtgtgtgctttagtggataagagatgttgagtgctgagatttcaaggctcagcactgagtagacctagagcatttttatttatactaaattaatgccatggtaacataagttagacagcaagtgaatatggcatcaaatgtacaaagttgagtatctctttactagtcaatgtataaggaatttatttacccaagcaattatcttaaaaacagcattacaagtggtatgcgaaacatttccagaatttatttccacatctgctctttcagtggcatcan

SEQ ID NO: 741 - DNA, 479 bp, Homo sapiens
  misc_feature (1)...(479): n = A,T,C or G
ctcgatatgcctaccccangngcgggaattcgtgccacatctgttaacttatttaatcctcattattctaaatggtgttataggcttaactgtatccccttaaaatttgtatgttggaatcctaactcccagtacatcagagtgtgaccttatttggagggagggcctttacagtggtaatcaagtttaaattaggtcattgaggtaggccctaacccaggatgactggtgtccgtataagaaggggaaactgggagacagagatacacatagaaggaagatgatataaagagaagacggccaccgacaagccagggagaggggcctggagcagatccttcctcccagcctcagaaggaactgaccctgcccacaccctgctcatgctcctgcatcttccagaagtgtgagaaaatacatttctgttattggagccactcagtctgtggtgtttgtcactgcagccccaggaaacttta

SEQ ID NO: 742 - DNA, 474 bp, Homo sapiens
  misc_feature (1)...(474): n = A,T,C or G
tgatgttaccgggggnnnnggaactgaagatcttttgatagcctgcggaannccggnggcagcgtgacagctatgcccgagagttcaccaccaccgtggtctcttgctgttccgcggagctgcagactgaagggagcaacggcaagaaagaagtgctgagcggtttccaagtggtgctggaagacacagtgcttttccctgagggcgggggacagcctgatgaccgtggtacaatcaatgacatctctgtgctgagagtgactcgccgtggggaacaggctgatcatttcacccagacacccctggatccaggaagccaggttctggtccgggtagattgggagcggaggtttgaccacatgcagcagcattcagggcagcatctcatcacggcagttgctgaccatctatttaagctgaagacaacatcatgggagttagggagatttcggagtgcgattgagctggacacct

SEQ ID NO: 743 - DNA, 469 bp, Homo sapiens
  misc_feature (1)...(469): n = A,T,C or G
cgagggtgncgggattgagnccctcctgagnatcatcggacangcggnggaantcgcgtgggcacactgtcgggcatggtgtgccccatcatcgtgggggccatgactaatttcaagactcgggaggagtggcagtacgtgttcctaattgcctccctggcgcactatggaggtgtcatcttctacggggtctttgcttctggagagaagcagccgtgggcagagcctgaggagatgagcgaggagaagtgtggcttcgttggccatgaccagctggctggcagtgacgacagcgaaatggaggatgaggctgagcccccgggggcaccccctgcacccccgccctcctatggggccacacacagcacatttcagccccccaggcccccaccccctgtccgggactactgaccatgtgcctcccactgaatggcagtttccaggacctccattccactcatctctggcn

SEQ ID NO: 744 - DNA, 485 bp, Homo sapiens
  misc_feature (1)...(485): n = A,T,C or G
tgcgcnnnngnnnngnnaaactgagaccntaggnattgacgccgattgcgaacaacgatcagctgaggttcaaattggaagaaggccaactgtggcctcaggatcagttgcagacttgagaacaattgcagtggcctggattttcatgatgttttatgtatttgtatataccaatttctgttttttccttcttttccccaagtgttcacattggttacatttattactgatctttaggatataagattgtggtggccatggaggtgtaccacccagatctacttcaaaagaacctgctgtgggaagcatagttgatgacggccttcagctactgctcctccagatccatcatagctgtcacactaacactgcatttctacggagtatacccagccaatggctgagagtggcagggttcaacttttcttgaaccattactgctcaacctggcaccctttgctcaggaattctcatcaacctggtcc

SEQ ID NO: 745 - DNA, 481 bp, Homo sapiens
  misc_feature (1)...(481): n = A,T,C or G
ntttgatcgagaccactaggccangnggnggaattccccagattcagggggtcaatggcctccagcttcatcccttcctcaaaccaaccgccttctgtgtagactgctcgtaccttaaaggaatgggacagctggggactccctgggcaggccaggaggaagggtgagggaagcaggcctcaggagggaaagggatggtcccaggggaagagccaggtccctcaggcccggaatggacccatggctgaggggaaaagcgcccaagagctgaacctcaccttcttgaagaggtaaggaacggcatcacagtagatcttccggaaggtggggtgatgggccatgtcacttcgcctctctttggaggagatggatagggaatgagggagagaagggagttggaggcggctcctgggccatctccacacgccttccctgggaatgtggggctgctctgcacgtgttctcagctgtatctctgtan

SEQ ID NO: 746 - DNA, 470 bp, Homo sapiens
  misc_feature (1)...(470): n = A,T,C or G
ggagttacggggannggaactgagaccctagacagccgcgnggaannccgcacagcttctcaaagagatccaaagtctgggtgtaattcgacaccagcactactttgtcactgctacggcttcgggtcaccgccagaatataatccaggaccagcatcttacctgggaagagcagcaaccagcagtcccctactggctgtcccaatggcccaggcttcttactcttgatatcctgccttgaaacaggacagccctagcacaaaaaaaatctcccaccctcctcctagagaagcccaaatactggtaggaaaagggtcacctgacagctggggctccagggccttagagctgtaaccaggagggaagaggtccaaggcacccacaaagccatcctcctcttccacacacttatcatagattagagctggatctgggagaaaacaaaacaaaacccagatactttgctttct

SEQ ID NO: 747 - DNA, 489 bp, Homo sapiens
  misc_feature (1)...(489): n = A,T,C or G
gcgcccccccggncgnnaattgagaccatggaatgagagcataggccagngcggnggaattcggtggctcacgcctgtaatcccagctctcagggaggctaagaggcgggaggatagcttgagcccaggagttcgagacctgcctgggcaatatagcgagaccccgttctccagaaaaaggaaaaaaaaaaacaaaaaaacaaaaaaacaccaaaaaaaaaaccttaggaaaaactttggaaagggtaaaaaaaaatccaaaaaaattttgccacaaaaccaacttgtcaccatgacccaaagggatggcaggggaacaaaaggaggtcatattccacaggttttccaccttaaaaaatgggttttaaaaaaatggtcttgcaaggtccaatcatctgatcaaaataaaaaaagggggcaaaagtctcacctgtctaaaaaatggggctttcatcttttctgggtccatcaaagttgaaatgaaaagtt

SEQ ID NO: 748 - DNA, 481 bp, Homo sapiens
  misc_feature (1)...(481): n = A,T,C or G
cggcgcnnnggggcgncaactgagaccatggaatgacgccattccggaaacgngaaagagcggtaccgtttgcagaaggaaatttctgatgcaactcttcgcctttgctgattgcctctccaaacgcctgcctgacgactgccttggagcatgacaaggtggagcagacacctcgcagtcaacaagacccggcaggaccaggactccccgcacagtctgaccgacttgcgaatcaccaggaggatgatgtggacctggaagccctggtgaacgatatgaatgcatccctggagagcctgtactcggcctgcagcatgcagtcagacacggtgcccctcctgcagaatggccagcatgcccgcagccagcctcgggcttcaggccctcctcggtccatccagccacaggtgtccccgaggcagagggtgcagcgctcccagcctgtgcacatcctcgctgtcaggcgccttcaggaggaaga

SEQ ID NO: 749 - DNA, 482 bp, Homo sapiens
  misc_feature (1)...(482): n = A,T,C or G
attcgatttccactactccagngtggnggaattcgcgcatctcttccagagttcctgcttcctgggccagccaaagccgcagagaacgcctcagggtcttgcctgctgtgagtgccttgaagagggagcagcgggcacgatcaaagagacacctggctcaaggaccaataaggagtatggctgcccctcccaaagctcccatccgtgtcaggaatttgaccatcagagcaggagccctcactgggaaggagaacaacatgctgcagcccgagacccacatcttcacagcccccgaggaggggagctcccaaggggctctgctgcttggccaggccccagaacctttgtctctgccctgtactccagtgaccttggagcagcaactggtttctccttctggggatccccacagggcccctgccctgcccagcatgtccccaaagtctctgaccaggctttggtttctgcccactcagagtggg

SEQ ID NO: 750 - DNA, 482 bp, Homo sapiens
  misc_feature (1)...(482): n = A,T,C or G
aatcgaattgcactacnccagngnggnggaattctggacaacaagcagtatcgccacacagactgcgtcgacacgatcacgtgcgcgcccacggaggccatccgccgtggcatcaggtactggaacggggtggtcccggagcgctgccgacgccagttccaggagggcgaggagtggaactgcttctttggctacaaggtctacccgaccctgcgctgccctgtgttcgtggtgcagtggctgtttgacgaggcacagctgacggtggacaacgtgcacctgacggggcagccggtgcaggagggcctgcggctgtacatccagaacctcggccgcgagctgcgccacacactcaaggacgtgccggccagctttgcccccgcctgcctctcccatgagatcatcatccggagccactggacggatgtccaggtgaaggggacgtcgctgccccgagcactgcactgctgggacaggagcct

SEQ ID NO: 751 - DNA, 468 bp, Homo sapiens
  misc_feature (1)...(468): n = A,T,C or G
aactgagaccnatggnatggacggcatannnccaaacgcaaggactgaccgatgatcagattgaagaattgaaattgaaggatgaatggggtgaaaaatgcgtacccagcggaggtgcagtgtttaaaaaggatgatattggacgaaggaatgggcaagctccaaatgagaagatgaagcaagtgttaaagaagactatagaagaagccaaagcaataatatctaagaaacaagtggaagccggtgtctgtgttaccatggagatggtgaaagatgccttggaccagcttcgaggcgcggtgatgattgtttaccccatggggttgccaccgtatgatcccatccgcatggagtttgaaaataaggaagacttgtcgggaacacaggcagggctcaacgtcattaaagaggcagaggcgcagctgtggtgggcagccaaggagctgagaagaacgaagaagctttcaa

SEQ ID NO: 752 - DNA, 481 bp, Homo sapiens
  misc_feature (1)...(481): n = A,T,C or G
nttggttcgagatcactagtccgngtggtggaattcgctcaaggacgaggccatcgtgtacctggcgcagaggcgcggcgctggtctccgcagcctctctctggccgtcaacgccaacgtgggggacgccgcggttcaagagttggctcggaactgcccagaactccaccaccttgacctcaccggctgcctccgcgtcggaagcgacggtgtcaggtgcctgggcctgatagggcgggaggagggcagtcacttagcctctgctggtatggggcgggctgtagttgttaaaaggccggactgagggttctgaatcttcctgcaaaccacagcacccccattctgaacagaaagggcctctaggattgcctaggccagagagcccatagtttaaaaacttttttcaaccaatgtttacacattgggagatttcacatagaaagtcgacttctggcttttcttcaacaagggggagatcttg

SEQ ID NO: 753 - DNA, 243 bp, Homo sapiens
  misc_feature (1)...(243): n = A,T,C or G
gngggaggnccagctggacgcccaggcggcccagcagctgcagtacggaggcacagtgtgcaccgtgggccgactgaacatcacggtgggacaggcaaagatggccaagaattacggcatgacccgcatggacccctactgccgactgcgcctgggctactcggtgtacgagacacccacgggacacaatggcgccaagaatccccgctggaataaggtcatgcactgcacggagcccccagg

SEQ ID NO: 754 - DNA, 469 bp, Homo sapiens
  misc_feature (1)...(469): n = A,T,C or G
ngggggaggcggntnnnnnnnaatcgactgcctggtattgngcnggaactcgtgcgacaagaccgtgtacttcgccgagaaggtgagctccctggggaaggactggcacaagttctgcctcaagtgcgagcgctgcagcaagacgctgacgcccgggggccacgccgagcatgacgggaagccgttctgccacaagccgtgctacgccaccctgttcggacccaaaggcgtgaacatcgggggcgcgggctcctacatctacgagaagcccctggcggaggggccgcaggtcaccggccccatcgaggtccccgcggcccgagcagaggagcggaaggcgagcggccccccgaaggggcccagcagagcctccagtgtcaccactttcaccggggagcccaacacgtgcccgcgctgcagcaagaaggtgtacttcgctgagaaggtgacgtctctgggcaaggattgg

SEQ ID NO: 755 - DNA, 466 bp, Homo sapiens
  misc_feature (1)...(466): n = A,T,C or G
atttgacaacctnggtgnaacctgcggaagagcggcggaanncggcattttacatggagtatgtgtaaataaaagtgcaaatgtgagtgttttgaaagacttctgctggcgtgtgtggctggggtggtgtggcaggataaggtcaggttcgaagcattgttggggccagggagtgggggccctgagtagcataataaggagctggtgcctcagtgtggggaggtggtcaggagctgctgcgggctttcaggtaggtgactggaatgacggagcctgctgccctgtgcagcggggctggagctgggggagactggccactgagaggtagagcacgtaatgggggcatgagacaggcctggtgcagctgaaggggaagcaaagggagctggcgctgtgggcactccagggccacaccaggaggttctcctgtgatagagacaggccatgagtctacagatgtcttctn

SEQ ID NO: 756 - DNA, 480 bp, Homo sapiens
  misc_feature (1)...(480): n = A,T,C or G
ngggggaatcgagacccttnnnannatcgtagaccctagtccgtgtggtggaattcgtgctctcgacccctcctcctgtagagagtggtgctgccctctcgggatgtacctgcaggtggagacccgcaccagctcccgcctccatctgaagagggctccaggcatccggtcctggtccctgctggttggaatcttgtcgattggcctggctgctgcctactacagcggagatagcctgggctggaagctcttctacgtcacaggctgcctgtttgtggctgtgcagaacttggaggactgggaggaagccatcttcgacaagagcacagggaaggttgttttgaagacgttcagcctctacaagaagctgctgactcttttcagagctggccacgaccaggtggtggtcctgctccatgatgtccgtgatgtgagcgtggaggaggagaaggtccggtacttcgggaaaggctacatggt

SEQ ID NO: 757 - DNA, 457 bp, Homo sapiens
  misc_feature (1)...(457): n = A,T,C or G
actggagaacatgatgacgctaggaagngccgngcaaccaagtgggcatggtgcaggccaaaatggaatttcttatgtcttccctttctacacagactcagtaacagtctgatctctctttcttttccctacaggattgcaggcatgcagcaccatgcctggctaattttgtatttttagtagagacgggatttctccatgttggccaggctggactcaaactcctgacctcaggtgatctgcccaccttggcctcccaaaatgctgggattacaggcatgaaccaccgcgcccggccatgctaagtcctttcttggctccattgtgctgtccctcctgcttcctctccaggtccatctgccacagtgctacgtgcaccagcgtgccagcaacagtggctggtctctgccccgtgcctcctccactgggctcacacctgtcttattatgtcctttgg

SEQ ID NO: 758 - DNA, 462 bp, Homo sapiens
  misc_feature (1)...(462): n = A,T,C or G
actcgatgaccttgatgaccnctcggcagngcggtggaattcctgccgggcgctccgcgaagatgcagctcaagccgatggagatcaacctcgagatgctgagcaaagtgctgtcccggctgggggtcgccggccagtggcgcttcgtggacgtgctggggctggaagaggagtctctgggctcggtgccagcgcctgcctgcgcgctgctgctgctgtttcccctcacggcccagcatgagaacttcaggaaaaagcagattgaagagctgaagggacatgaagttagtcctaaagtgtacttcatgaagcagaccattgggaattcctgtggcacaatcggacttattcacgcagtggccaataatcaagacaaactgggatttgaggatggatcagttctgaaacagtttctttctgaaacagagaaaatgtcccctgaagacagagcanaatgctttg

SEQ ID NO: 759 - DNA, 450 bp, Homo sapiens
  misc_feature (1)...(450): n = A,T,C or G
nttgagactgagacnttaggcagngcggnggaattcgaagctctttgactctgatcccatcactgtgacggtccctgtagaagtctccaggaagaaccctaaatttatggagaccgtggcggagaaagcgctgcaggaataccgcaaaaagcaccgggaggagtgagatgtggatgttgcttttgcacctacgggggcatctgagtccagctccccccaagatgagctgcagccccccagagagagctctgcacgtcaccaagtaaccaggccccagcctccaggcccccaactccgcccagcctctccccgctctggatcctgcactctaacactcgactctgctgctcatgggaagaacagaattgctcctgcatgcaactaattcaataaaactgtcttgtgagctgatcgcttggagggtcctctttttatgttgagttgctgctn

SEQ ID NO: 760 - DNA, 477 bp, Homo sapiens
  misc_feature (1)...(477): n = A,T,C or G
ggactgaatcctttgcagggcgtagtacctcgtctccattgcagccgcagcaagaggcctccacttgtccgtcagggacgctccaaggaaggaaaaagccgcccccggacaggggagaccactgtgttctctgtgggcaggttccgggtgacacacattgagaagcgctatggactgcacgaacaccgtgatggctcccccacagacaggagctggggctctggtgggggacaggacccagggggtggtcaggggtctgggggagggcagcccaaggcagggatgcctgccatggagaggctgccccctgagaggccacagccccaggtcctagccagccccccagtacagaatggaggactcagggacagcagcctaacccctcgtgcacttgaagggaaccccagagcttctgcagagccaacactgagggccggagggaggggcccaagcccagggctgcccactcaagaggcn

SEQ ID NO: 761 - DNA, 454 bp, Homo sapiens
  misc_feature (1)...(454): n = A,T,C or G
ntttgannaactgatgacccttantccgngcggtggaattccccgtgtattcctgtacgagctgctccccgagtcccctttcttcctggagtgcaacagcttcacgtcgcctgacccccacaagggcctcgtcctcctgcctaagacggagtgcgacgtgcgggaagtggagctgatgcggtgcctgcggctgcgtcagtcctccctggagcctgtggccttccggctgccccgagtccggaaagagttcttccaggatgacgtgttcccagacacggctgtgatctgggagcctgtgctcagtgccgaggcctggctgcaaggcgctaatgggcagccctggcttctcagcctgcagcctcctgacatgagcccaggtgcaccgagggactgggtgtggggaggaagcgggatgggggttggagaaagggacagaaggcccaggttgaagttc

SEQ ID NO: 762 - DNA, 448 bp, Homo sapiens
  misc_feature (1)...(448): n = A,T,C or G
actgagcctaagacactgcgnggaacnnaagggcctccagccaggagaggagggcaggctgtcgaagcacaaaagaaaacagatttccctgtagggccaccagaaggaaccagccctgcctgccccttcattttggacttccgagctccagaactgcaagagaataaatctagtttaagcagcaaagttggtggtaacttcttagagcagccacaggaagctcactaccccccacacactcatcccgtttggtttttgttttcaggaagggtccagtctgtctcagaggtgctgtggttggaggtggagtgtggggcatggctgagcacccaacatccgcttcaccctctcccctgctccccagcacgttccttcaccctgtagctctaggtctctgtggcagacactcagctctaactgctgacctgatggctccacttggtgttan

SEQ ID NO: 763 - DNA, 454 bp, Homo sapiens
  misc_feature (1)...(454): n = A,T,C or G
nattgagaactgatgaccatctggcagngcggnggaattcctgtgtaggggtagattttcgctgcagtgttccccgagcctgttagacgcagcgcgccgggagactgagagaggaaaggatagaggaagtgctgccctaggctgcatgagtcgaagcaagcgtgtttccttcccgccaggcaagtgcccttagaaaccgggccccgcccccttcctggcctgcattcccatcccctctcccggggcggaggtgaggacctccttggttcctttggttctgtcagtgagccccttccttggccatgaagctcgtgaggaagaacatcgagaaggacaatgcgggccaggtgaccctggtccccgaggagcctgaggacatgtggcacacttacaacctcgtgcaggtgggcgacagcctgcgcgcctccaccatccgcaaggtacagacagagtc

SEQ ID NO: 764 - DNA, 452 bp, Homo sapiens
  misc_feature (1)...(452): n = A,T,C or G
nactgatgactgaagacactgcggnggaacnnctaaaggagacagccacaattgggttcattaataacttcggtcagatccctaaacagttatttaaaaaacctcatccaccaaagcgagtgagaagtcgactcaatggagacaatgcaggaatctctgtcctaccaggatctacaagtgacaagatcttttttcatcatctagacaacttgaggccttctctaacacctgtaaaagaactcaaagaacctgtaggacaaatcgtatgtacagataaaggtactcttgcggtggaacagaataaggttcttatcccaccaacctggaataaaacttttgcttggggctatgcagacctcagttgcagactgggaacctatgagtcagacaaggccatgactgtttatgaatgcttgtctgagtggggccagattctctgtgcaatctgcccc

SEQ ID NO: 765 - DNA, 463 bp, Homo sapiens
  misc_feature (1)...(463): n = A,T,C or G
ggtgcccccccgnnnnnntttgaactgcatttctaggcggngcaannncagaagctcatgtgtggcctgggacacctcctatccagccatacgccgcccaggactggctcaacagctccaccctccactgctgttcacccatgacacgtcacttcccacccgccactgctggctcacctgtgacaccccaggcagctcagatgcccggcaggtcctgctggtgtgtgttagccggggtctccaaagaaccagagccagcaggggacacacccatctctgtatctggagaaaaagatcgatgagaaggaatctgctcctgtgatgatggaggctgacaagtcccgagagccacggttggcaccctggagacccctgagggtgataccaccactccaggctgaaagctggcaggcttgagaccctgggagagctggccctctgactcctgggacttcttattcta

SEQ ID NO: 766 - DNA, 475 bp, Homo sapiens
  misc_feature (1)...(475): n = A,T,C or G
gccggccatagagnnccntncatagatgaccntaggacagngccgnggaattcaattattataattcagccttcaaactactactgatcaactaaaggaaagctaataaggtatttcttttaaacaagtattctggaaaagtaataactatggcacaaatgttcaggagtgtatataaaaatatgtgggctctcgatttatttgagcaaacattgcaatgagggtgttcattatgcttctaagtaagctttaactagaccactttcttcttatgtcagattgtgctggttctagctcataataatgaaaaaaatagaattatattttgtatgaattgtttctaacaaaccttgatctgtatatacttgtgaggggttgtttggttgcctaattgttgattggttggttagttgggcaaaatcatttattacatgcaaaaatagaaaattatttgttaaattcagagaaaatatgg

SEQ ID NO: 767 - DNA, 453 bp, Homo sapiens
  misc_feature (1)...(453): n = A,T,C or G
nactgatgacctgnagcccatgcggnggaattcagaagaactggagcaccgacctcaacatccaggagatcatgaccgtgcccccgccgtccgtctccggcagagtgtctcggttggccgtgaaggccgccttcttcggcctgctgggctacagcctgtactggatgggccgccgcaccgcgagcctggtcctgtcgctgcccgccgcgcagtactgcctgcagagggtgaccgaggcccggcacaagtaggagactgctccccgcccgctcgggcccctgaggagccagtgcccccgcggcacttctgggtgccaggtgcatcctagcccgcccgaggcccctgccaccccccatgggggtctgggcccggcctcgcctgccctcctgggccagtcacccctcccccagcccacccaaataaaggattatttaactgtctgagctcaggcct

SEQ ID NO: 768 - DNA, 466 bp, Homo sapiens
agcccccaatgagaccatcgactgagcgcgtaggcaaggcccgggccgagaagggcttcaggacgcgggaggcgcacttgcttcaagtcgcgggcgtgggaacggggttgcaaaacggggcctctttgtccgggcttgcttccggcgtcatggctcaaagggccttcccgaatccttatgctgattataacaaatccctggccgaaggctactttgatgctgccgggaggctgactcctgagttctcacaacgcttgaccaataagattcgggagcttcttcagcacatggagagaggcctgaaatcagcagaccctcgggatggcaccggttacactggctgggcaggtattgctgtgctttacttacatctttatgatgtatttggggaccctgcctacctacagctagcacatggctatgtaaagcaaagtctgaactgcttaaccaagcgctccatcacctc

SEQ ID NO: 769 - DNA, 496 bp, Homo sapiens
  misc_feature (1)...(496): n = A,T,C or G
nattgagncccctngnnnnnncattgagaccactagtccagagtcgtggaattcggctacaatggggagctgtacatctttggtggttataatgcaaggctgaaccggcacttccatgacctctggaagtttaatcctgtgtcctttacctggaaaaagattgaaccgaaggggaaggggccatgtccccgccggcgccagtgctgctgtattgttggtgacaagattgtcctctttgggggtaccagtccatctcctgaggaaggcctgggagatgaatttgaccttatagatcattctgacttacacattttggactttagccctagtctgaagactctgtgcaaactggccgtgattcagtataacctagaccagtcctgtttgcctcatgatatcaggtgggagctgaatgccatgaccaccaacagcaatatcagtcgccccatcgtctcctcccatgggtaggaggaagtttctgccacctcccctcctg

SEQ ID NO: 770 - DNA, 488 bp, Homo sapiens
  misc_feature (1)...(488): n = A,T,C or G
natgagaccctatgcagngcgatagaaatctgtcgaacaatctcctcgttccagaaaggcagggcccgggcaatggtgtccttgaggctctcgcaggtggggagttccccgggcttcaggcctgcgtaccgacgctcctgggggacacaggcacgctgctttccctcccaagccagtgggcccccacccgactccccactctgcagcttcccagaggccttcccagcaaaggcagcccaccttgctaatggagttgtagtaggggtgcttctcgttcatcgggggcggcgggatgtcgaaggagcgcctccagatcttcacctgctcctccccgtgcttggcggccgtttctgccttgttgaggtctgtgaggcccccgtaatgccgctcattgaggcgccaagtgcgcaccacaggcagccacatctggtccgtgccgtccaggatggcccagagggtgcggatggcccgcttcagcactgacgtgt

SEQ ID NO: 771 - DNA, 485 bp, Homo sapiens
  misc_feature (1)...(485): n = A,T,C or G
ggccgnnnnnnngnttatgagatcctatcagngctgagaacctctggctgggagaggagggagtcccaagacaggaaagactagcccccagcatgtgtgtcaccttctgcccatctccaggcactccaggggtcagggctttgtgagctcttttccctatctatgaagtaggcaggatgtggtctgcctggcccagcactcaaggtgttcctcagtgactgggggctctgtcaagcaccagcaagggtctacgagacagcagcaggacaaatgaccactgtatgcacagtcaagagaacatatagaaacataaatgaatgaacaaatgatgaacataggcaatgaggagcaaggccctgatagctcatcctggggtgataactactgggctattctctgggcttagggagcagaagggcctggagtccctacggcctgtgcctctcacagccttctctctccttcttgcaggaaaccagccatgg

SEQ ID NO: 772 - DNA, 481 bp, Homo sapiens
  misc_feature (1)...(481): n = A,T,C or G
nttcgatcgcgatccctagtccangtggtggaattcaacccggctctagatatcatgagggcttgggaagcttcggggggaaagttaggctatctgcccacccctcaatcatgccacgcatccccagagtcacacagaaatgttcttacacacctctgtgccttggcatggctgctccctctgcccagcctgccctcccctggatcgggccttctccatctgagcgtcccacatgtccccaagcctcagtccccaggaagctctgggagcctgcagtgctccaggatcacgggagtccctacctcccaccagtggccctgatgccttggacatgcttttactaccacactgtcacactgggtggtcattatttgtttaggtgtctgttctccttaccctagaccttgagttcttgaggccaagaacagccaagtctcagctttctctgcaggaccgagcacatagtggcactccgcanatg

SEQ ID NO: 773 - DNA, 423 bp, Homo sapiens
attacatcagcctcctgcttactctgatagctccctttcagatgcccatatttattttcttttttttttttaacctaaaaaaacttcagtcttttcccattttcgaataggagggaaagatggggccttctttccaaacctcccttgacctttccaaagcaattcctgattaaccaggggctttgtccatctaatccaaaggaacccagggtcctggtgggcccggttggaaccattccactgccccaaaataccagggggccatgacagcccccactgacagaaaaagctcatttccttgggctgcccttttcctgcatttcccaggccccaaaagtctccccttcgatctttctccctagctctgggttgggccaactccttctggctttcctcaacagggttccacattcccctcaaatg

SEQ ID NO: 774 - DNA, 489 bp, Homo sapiens
  misc_feature (1)...(489): n = A,T,C or G
gcgannnnnnattgannctcgtagtccctagtcagtgtggtggaattcagagtgtggacgagcatgggcgactgaggtcccaaatggcgcgagccgctgggccctcctgcttgtgccgatgtctcaggctcgattgaagctggaagaaaccaaggacaatgtgtcctttaaaagtgtaaggttagaaggtgccctgactccagccgacctggaaaaggacgtgtcctgcatatctggaggtggcccacacggtccgggaaagatcggctgccttgcctgcatcccagggcgcttcccggcctccattaagaggtgaccattgcatccacgtgatttcttttgctccactatttccaggcacagtgcaactgactccctcttgaagctagaatgccctgcacacccgggatggacttctctcccctttcaaagatcgagtgaagtttgcaaatgtgaaaggaaggaattgcatttccagtggtaaccttt

SEQ ID NO: 775 - DNA, 480 bp, Homo sapiens
  misc_feature (1)...(480): n = A,T,C or G
aggcggcccnnccaatgagccatgggcctcncaagngcgcggaantcggaggccgaggcacgaggatggcttgagcccaggagttaaagtgtagcctgggcaacatagtgaggcctcatctcaaaaaaatgagaagggccatagtgtggctatgttagctgttcaggggacactagcacgtgtgtggcaaaagtaaacctttaatgtcagcagctacatgtgtggctagtggctgctctgttggacagcagaactctagggggttagccaatgtgaaaaggacgaatgcccagccgatgccagcaggagtgagggatgtgggaggacaaagactttcctgcttccaagtaccctccagggctggccctcattgtccaggatctttctgcagtcctctgccacctgcaggggcctggggccctgtgacctcagaatcccccataccatgggccacttgttacctgttcagtcttcccccac

SEQ ID NO: 776 - DNA, 466 bp, Homo sapiens
  misc_feature (1)...(466): n = A,T,C or G
gcccccaatgagaccctcgatgaacgcgtaggccaagnccaagagcgagaacgaccccaacctgatcccggagaacggggacgaggaggaagaggaggacgacgaggaagaggaagaagaggaggaagaggaggaggaggagctgacggagagcgagagggtggactacggcttcgggctgagcctggaggcggcgcgccaccacgagaacagctcgcggggcgcggtcgtgggcgtgggcgacgagagccgcgccctgcccgacgtcatgcagggcatggtgctcagctccatgcagcacttcagcgaggccttccaccaggtcctgggcgagaagcataagcgcggccacctggccgaggccgagggccacagggacacttgcgacgaagactcggtggccggcgagtcggaccgcatagacgatggcactgttaatggccgcggctgctccccgggcgagtcg

SEQ ID NO: 777 - DNA, 499 bp, Homo sapiens
  misc_feature (1)...(499): n = A,T,C or G
ntaatgagacctttacggcannnncatagaagacccatacgcagagncgcggaanncctggaccagcttgcacacatgatcccttgcgtcctgcactacctaaatttctctacaattattggagttggtggtggagctggagcctacatgctggcgagatatgctcttaaccacccggacactgttgaaggtcttgtcctcatcaacattgatcccaatgccaaaggttggatggattgagcagcccacaagctaacaagcctcacctcttccattccggagatgatccttggacatcttttcagccaggaagagctctctggaaattctgagttgatacacaagtacagaaatatcattacacatgcacccaacctggataacattgaattgtactggaacaggtacaacaaccgccgagacctgaactttgagcgtggaggcgatatcaccctcaagggtcctgtgatgctggtggcacgagaccaagcacctcatg

SEQ ID NO: 778 - DNA, 489 bp, Homo sapiens
  misc_feature (1)...(489): n = A,T,C or G
agagggcccggnnntnagcgcccactgagaccntcgactgagaccataggccagngcgnggaattccagcgcaggcatcaaggtcatcatggtcaccggcgatcaccccatcacggccaaggccattgccaagggtgtgggcatcatctttgagggcaacgagactgtggaggacatcgccgcccggctcaacattcccgtcagccaggttaacccccgggatgccaaggcctgcgtgatccacggcaccgacctcaaggacttcacctccgagcaaatcgacgagatcctgcagaatcacaccgagatcgtcttcgcccgcacatccccccagcagaagctcatcattgtggagggctgtcagagacagggtgcaattgtggctgtgaccggggatggtgtgaacgactcccccgctctgaagaaggccgacattggggtggccatgggcatcgctggctctgacgtctccaagcaggcagctgacag

SEQ ID NO: 779 - DNA, 467 bp, Homo sapiens
gcccccaatgagaccatagactgagcgcgtaggcacccgccctggggtgaggcttcctgtggcccagcccgccccattcacctgtggatttgtgcgagatgcagcctcagaaggaacaaggcccccagagggaggtcacctgggggcagctggtgccgggtcttcacccagaccacgctgggtcccctctgttgggggtttggggtccgggtctcccaccagccactgcttcctcctgggccctcggccttccacccctcgtcttccctccctcgggggccctgatgcgtggcggcccccacccggcctcggctctttactccattcacagccgtgcacgcgctcaagccaccagggtgcgagatgccagctctggagttctcggttgttgtaggaggttgggtgttttcaaatggtaaagatgttttgagcaaataaatttgcttgatacagaaaaaaaaaaaaaa

SEQ ID NO: 780 - DNA, 418 bp, Homo sapiens
ctaaaaacacaaaaattaactgggtgtgatggcgcatgctacttgagtggccccagctacttgagaggctgaggcaggagaatcgtttgtacctgggaggtggaggttgcagtgagccgagattgcaccactgcactccagcctgggcacagcaagactccgtctcaaaaaaagaaaagaaacagacttttattcccattttttctttgttggagttaatctttgcctttccgtttgaggggctgaagccctcttgctgagttgaaagcttctaaaatctactatttcatattttgtgcctacaatgtatttcctggccttgttaagtacattaagctgtggagtgaacacataagcacagtcttaatcaaagtccgtttagtcatgtctggaccgatcacagcaatctccagttgtg

SEQ ID NO: 781 - DNA, 500 bp, Homo sapiens
  misc_feature (1)...(500): n = A,T,C or G
nggnattgaaacccctngncnngnccatcgagttccctagtcagtgtggtggaattcgcagaaggagggccattagaccctagtatctgtgtctgcgcctaggggtggagagagtggtgtctgctgggagcacagcggggctcaggggcttttgagtccgggaagggtgatcttcactccaacctgcttcttgggaccaggtgaggcttcgagctctgaggaagagcctccatccccagatgataaagagaaccaggccccaaaacggactggcccacatctgcgcttcgagatcagcagtgaggatgggttcagcgttgaggcagagagcttggagggggcgtggagaactctgatcgagaaagtgcaagaggcccgagggcatgcccgactcaaacatctctcctttagtggaatgagtggggcgagactcctgggcatccaccatgatgctgtcatcttcctggccgagcagctccccggagcccagcgttgccagn

SEQ ID NO: 782 - DNA, 473 bp, Homo sapiens
  misc_feature (1)...(473): n = A,T,C or G
tgttgtcccgncgggcggtttgagccccctgatgaccatagtccangcggtggaattccctggtgatgcaggattgcaggggttaccaggtgtacctggaattcctggtgcaaagggtgttgctggtgaaaagggtagcacaggtgctccagggaagcctggtcagatgggaaattcaggcaaaccgggccaacaggggcctccaggagaggtgggaccccgaggaccccaggggcttcctggcagtagaggagaattaggaccagtgggatccccaggcctaccaggtaaactgggttctctgggtagccctggcctccctggcttgcctgggccccctggacttcctggaatgaaaggtgacaggggtgtagtcggtgaaccgggtccaaagggtgaacagggtgcctctggtgaagaaggtgaagcaggagaaaggggggaacttggagatataggattacctggcccaa

SEQ ID NO: 783 - DNA, 500 bp, Homo sapiens
  misc_feature (1)...(500): n = A,T,C or G
cggccccccccccgcccctttgannnccntnnaaatgtatgacatctagtcagtgcggtggaattcgtgcgccctcctgagcaagatccacctgtacacacgcggctgccacagcgaccagagccttagccatctgtctgtcactgaagcagagatgctcagggacccagagggaggccagcagctgctgcggactctggagcgtgagaaccagcgcctggaggctgtcctggcgtggcggcgctctgagctggtcttctggcggtggatggacacggtcctgggcacctgtgccccggaggtgcctgctgcagcctcacagcccaccttcctgccctgggtccccgagcgcgggggtggcgagttggacctggtagtgcgggagctgcaggcactggaggaggagctgcgggaggctgcggagcgcangcgggcggcctgggaggccaaggctggaggctgtggacggcggccaaagtggagtgccgcgcggcgggcct

SEQ ID NO: 784 - DNA, 483 bp, Homo sapiens
  misc_feature (1)...(483): n = A,T,C or G
gagccgtggccaaatgagcctttactgagacctctggacanngcgnggaattctctctgggaggcaaggatgagctgactatggctgtgcggaaggagctaacggtggctgtgagggacctgctggcccatggactgtatgcctcctccccagggatgagccttggtatggctactattgcttgattgctgccagccttctcctcggtcccagaggccatgcacccgagggagctctttgtaaagtactaccatgctaagaacggccgtgcttatgtggaatccccagcccggaagctctcccagaccttcgcccttcctgttacgggaggcactgttgtcacccccaaacagagcctactgacagccatccacatggtgctgacagagcatgacccttttaagcgcagtgcagactcagaattgaaggccttggtgtgcatggcactgaatgagcaccgtctggtgtgctggatgaacctcn

SEQ ID NO: 785 - DNA, 463 bp, Homo sapiens
  misc_feature (1)...(463): n = A,T,C or G
nactgggactgatgaccctctggccgtgcggtggaattccttgcagggccacctcctccccagcccctcctgcagcgtctctgctccggacctcgcctcctcctgctctccctgggcctcagcctcctgctgcttgtggttgtctgtgtgatcggatcccaaaactcccagctgcaggaggagctgcggggcctgagagagacgttcagcaacttcacagcgagcacggaggcccaggtcaaaggcttgagcacccagggaggcaatgtgggaagaaagatgaagtcgctagagtcccagctggagaaacagcagaaggacctgagtgaagatcactccagcctgctgctccacgtgaagcagttcgtgtctgacctgcggagcctgagctgtcagatggcggcgctccagggcaatggctcagaaaggacctgctgcccggtcaactgggtggagcacgagn

SEQ ID NO: 786 - DNA, 420 bp, Homo sapiens
ggggagaatataagatgtaacttaagctaaatgtaatctatttataaagcaagagactctcatctatttttatgaaaggaagggttttttaatctagggtaggcagttgtggtagcccagcattttcctgtggacgagacatggtgcatgttgttgctggattgaatggaacccattcctgtcccccggcctcgtcttctgtcctcacttttggtcatccacacccatgagcagcttcagcagagtgtaggtcccacttcaccccattctcctctcctctgacccctcagctccttggaagtcttggggtggggatctgagggggtgggtgggctgcaggaaattcagaaatgtggtgggtgggggaagggacaaggcgcattatggagggaacaagctgggctctggggataggctctg

SEQ ID NO: 787 - DNA, 455 bp, Homo sapiens
  misc_feature (1)...(455): n = A,T,C or G
atctgagtcgagtaacactagtcagngtggtggaattcggctttggaattcgtcgacttaagggttggccacgatggtgtccttgatccacttccggtaatgcaccaccttggtgtacagggaaggcctttcgggcagggcacatggttcactgccccatgacgtgataccttgaagcacaccattacagacaagtggggccccagaatcacccgagcaggtgcttttgccccctgtccagcgtccagcacacagcatgaacttggtcaccttctgagggtgaacttgcgcacacacgtcattggaaataacatggaggtccacacactgaagtttctttggggtcaagaactcctctggttcaatgctgccccagcctgaggcgtatcaggtggtccccagtgctggctcctgggtgggcaggtccatgaccttcacagcatccgtgagctcgg

SEQ ID NO: 788 - DNA, 422 bp, Homo sapiens
  misc_feature (1)...(422): n = A,T,C or G
cctgggaattgctgggcttttgaaggcgaccaaggccaggtggtgatccaactgccgggccgagtgcagctgagcgacatcactctgcagcatccaccgcccagcgtggagcacaccggaggagccaacagcgccccccgcgatttcgcggtctttggcctccaggtttatgatgaaactgaagtttccttggggaaattcaccttcgatgttgagaaatcggagattcagactttccacctgcagaatgaccccccagctgcctttcccaaggtgaagatccagattctaagcaactggggccacccccgtttcacgtgcttgtatcgagtccgtgcccacggtgtgcgaacctcagagggggcagagggcagtgcacaggggccccattaaacatgctgatttttggagtagaaatgagn

SEQ ID NO: 789 - DNA, 231 bp, Homo sapiens
gtgagaactgtgaggagctaggatatatacttggtgaaacaaaccagtatgttccctgttctcttgagcttcgactcttctgtgctctattgctgcgcactgctttttctacaggcattacatcaactcctaaggggtcctctgggattagttaagcagctattaaatcacccgaagacactatttacagaagacacaactccttccccagtgatcactgtcataaccagt

SEQ ID NO: 790 - DNA, 461 bp, Homo sapiens
  misc_feature (1)...(461): n = A,T,C or G
nggcggnnggggnnnaactggacccttngactgaggnctattgccgcggcaccaccctgcccacctgggtggcgcgtggcttacgcaacggtcactgggctcctgggccgctcccgggccagcgagggctgcgaaagaagttgtagcatgcataccacagaatcaaaaaatgaacatttggaggatgaaaacttccaaacatctacaactcctcagttttgttctaggtgctgtctctcctgctgttgttgtcccttacatgatggtgctgcaagaaaatggatatggtgttgaggaaggcattccaaccttattaatggctgctagcagtatggatgacattctggctatcactggattcaatacatgcttgagcatagtcttttcctcagcctccttgtgaagaaggtgtctgcgctcccttctaccatgaccagaatcgaaactaatacaaatgcagc

SEQ ID NO: 791 - DNA, 454 bp, Homo sapiens
attgagttccagatccactatccatgtggtggaattcagctgttgtggggacttccggcgaaagcacccctggaaccttgttgcactgtcggtcctgaccgccagcctgtcgtacatggtggggatgatcgccagcttctacaacaccgaggcagtcatcatggccgtgggcatcaccacagccgtctgcttcaccgtcgtcatcttctccatgcagacccgctacgacttcacctcatgcatgggcgtgctcctggtgagcatggtggtgctcttcatcttcgccattctctgcatcttcatccggaaccgcatcctggagatcgtgtacgcctcactgggcgctctgctcttcacctgcttcctcgcagtggacacccagctgctgctggggaacaagcagctgtccctgagcccacaagagtatgtgtttgctgcgctgaacctgtacacc

SEQ ID NO: 792 - DNA, 485 bp, Homo sapiens
  misc_feature (1)...(485): n = A,T,C or G
cgagcgtggccnaatgagnccttaatcgagaccctaggccangccgtggaattccaggaggcagaggcctggtggggccgtggacgccacgccgagctgcccagacccttccagaagacagtggggactattcaacggtttccagcagaaactaagccaggtgttcgttttacggagattgctcggctgcagggtggaggctggatgagaacaggcgtcctctcaggtaggcgctcgtggtggtaacgctgcccaggaggagggcacgggttccgggaagacttgcgaggttaaaccggcagctccggagaactgagcgcaagaggtcggtgacacagagaggagtccgggaggccgcatgtttcaggctgaagtcacttggcggggacgtttattgagatgcgaaacacaggaagggatagaggctgcgcagagggaaaaggcgatggactcggttttggaaacgctgatgtgaagtccctacg

SEQ ID NO: 793 - DNA, 489 bp, Homo sapiens
  misc_feature (1)...(489): n = A,T,C or G
agcgggtnnnnnattganntttgtantccatagtccgtgtggtggaattctatcgaccgcaacgtgacagagatcctccgcgtagggaacatcaccagcgtgcactttcggcgggaggtagagacagagcccatcctgacctacatcgagggcgtatgtgtgctgtggttcacactggagttcctggtgcgcatcgtgtgctgccccgacacgctggacttcgtcaagaacctgctcaacatcatcgactttgtggccatcctgcccttctacctggaggtggggctgagcggcctgtcatccaaggcggcccgcgacgtgctgggcttcctgcgcgtggtgcgcttcgtgcgcatcctgcgtatcttcaagctcacacgccacttcgtggggctacgcgtgctgggccacaccctgagggccagcaccaatgagttcctgctgcttatcatcttcctggccctgggtgtgctcatctttgccaccatg

SEQ ID NO: 794 - DNA, 479 bp, Homo sapiens
  misc_feature (1)...(479): n = A,T,C or G
agagctgctaaaactgtaccctgtcgatgtccnttgagcatcaataagaatgacaaccacaatagatagacacatattgtattgatatatgtttaatgcatgagttcacagtggtattcaaaaaagaagaaaacgttatggtcatctgaaaacaaccaactcataattttgaaaattggcagatacaaaccaaaatcaagcgtgtatcctgccattactatatgaaatgaacttctgggtaaccaaacagttgataagaggaactttccctttgtagaactccagctaataaatgaagaagaaaataattagaatatcactattttgcaagccattgtgacataatgaatctatgcagtgaccatctgtagctggtaagatcacaaaaaagctaaccaggcattaaataccacctgatggaagttaaaacagtacctgaatccgatcaacccttcagatctaactaccaatctacatcn

SEQ ID NO: 795 - DNA, 459 bp, Homo sapiens
  misc_feature (1)...(459): n = A,T,C or G
nctgaagttgtagaccatgcggnggaattcccagtgagggagaaagtgatctgcagggaggtggacaccgagccctgagtgctgtgctgctgctggtctcctgatggctgttgctgcagaagatgtcctcgtagactgtcattgctcctcacacacatgaagacgtgcccgcttcccctttgctttctgccatgattgtaagtttcctgaggcgtccccagccctgcagaactcagcccgggggcacaggcacgcagaagagactttcccacagcggttcccagagccctggatgaggcgtcctccaaaggattatgtcaccaagtttctgcaggccaggcgggtaatcttgcttgtggccacactcctcttcctgggacctgagcctgccctcctgctcctgagtagttcattgtgattctgtctgctgtggctgtggagtgctacgcgctggccagn

SEQ ID NO: 796 - DNA, 463 bp, Homo sapiens
  misc_feature (1)...(463): n = A,T,C or G
nctgaaaatcgtagaccctaggcagggcggtggaattcgcatgacccccaagaccggcttctagcccaggactcagagcacaaccacagtgaccggaactggcagcgcaaccggccttggcccaaggatagctactgacagcctcctgctgccctaccctggcaggcacaggcgcagctggctggggggcccactccaggcagggtggcgttagactggcatcaggctggcactaggctcagcccccaaaaccccctgcccagccccagcttcagggctgcctgtggtcccaaggttctgggagaaacaggggaccccctcacctcctgggcagtgacccctactaggctcccattccaggtactagctgtgtgttctgcacccctggcaccttcctctcctcccacacaggaagctgccccactgggcagtgccctcaggccaggatccccttagcagggtc

SEQ ID NO: 797 - DNA, 485 bp, Homo sapiens
  misc_feature (1)...(485): n = A,T,C or G
gacgcggggccnaatgagnccttaactgagaccctaggccanngcgnggaattcgaatgattggcatctgcttttctcttttctttgctaataattctgttcctggctgccgagagtgaagtttcaccatgtggaggtttggctcctatcacctggtggtctgattcataccctagcctgaggctccactggaagatctcgcagcctcagtgtatgggaaaccctttccccaggcttgtcccagcactgccgctccccacccctgagccaggaccccagaggatggccatgccccgtgcctggcagaggtctggtgccagcactgggagctgctccgcccttgccttggggccgagggagccctcgtccacccctgcacagcagctgggcacagaggagcgctcttccatcttgaccaggactgcaccaagaagcaccaggtgtcttcagcctccaacctccggggcgaccttctcttccagccc

SEQ ID NO: 798 - DNA, 460 bp, Homo sapiens
  misc_feature (1)...(460): n = A,T,C or G
aactgagaccctagaccatgcggnggaattcctccggggctgccccgaaaaaggggctgtgcctcttccccttgctctccccggggtgcatcccccatccgagggacatctgggcccccgccccaccggggcctgggaggccctgggcagcggccttcaacccgcagggggatggacaaaaccctcctctccctcattctctactgtcacagtggctccggaagcctggttggcattgacaacaaaatcgagcaagccatggacttggtgaagtcccacctcatgtttgcggtccgggaggaggtggaggtgctgaaggagcagatccgggaattggcggagcggaacgctgcgctggagcaggagaatgggctgctgcgcgccctggccagcccggagcagctggctcagctgccctcctcggnggtcccacggcttgggccccctgcgcccaatgggc

SEQ ID NO: 799 - DNA, 486 bp, Homo sapiens
  misc_feature (1)...(486): n = A,T,C or G
ggcgccgtgnnnacatcgagaccaatgatcgaggcctntgagtacgcgacagcagggactggtggaataccgatgtggctgaggggccgccaccgccagcagggaggcggagggctagcgagccaagcggtggggacgccgctgccttcctctttgcctgtctcgccgccctcctagacacgctcctcatctacggatcctaccctccccgctcttgcaagcattcactcggccggtcgcctgctgaccctccttcgccacaggctcgtagcggaggcagcagcgaggtgtccgatttgggcacgtgaggcccgcgatccccggcggtggacgccaggcagggcatgaagacccccaacgcacaggaagccgaagggcaacaaaccagggcagctgcaggacgggccactgggtctgcaaacatgacaaagaaaaaagtctcccaaaagaagcagagaggccgaccttcatcccagccccgcaggn

SEQ ID NO: 800 - DNA, 455 bp, Homo sapiens
  misc_feature (1)...(455): n = A,T,C or G
ngggaggggnggggnnaatgagaccctangactgaggncgatttccccacgccctgtgtagatggtcttgtcctcagcacagccctggcggcctctgtcacctggaccacccttctttgtgtgaccagtcagcacactgaacggctgccagaaacccaaacagacgctctgctcctgtaccgtctggagcatctggggagtgagctgccctccaacacccaaaacaggaggctctgggatgagtgttcctcctccctccatgcagaagctcgaaggctggcactgcagctctctgaggaggtggccccacagccaaggcagcccccacagtggaccgggcaggagacactgggaccctcagcttgctcacagtgaggcctgcaatgcacacgcaggagggaccgcagtcagctcgaggctgtctttattgggatgctggggggctggctgccacc

SEQ ID NO: 801 - DNA, 466 bp, Homo sapiens
  misc_feature (1)...(466): n = A,T,C or G
aggcgaggggnagggggnccattgaaaaccntnnnaactgatgtccatatgcagngtcgtggaattctttagttttttatgattttttttctttagagatggagtctcactctgttgcccaggctggcctcaaagtcctgggcttaagcaatcctccccacttggcctcccagagtgctgggattacaggcatgagccatcacacctggccctttctacttctactcccaaacgtgttggccaactcctcaaggtattcagcaggaaaaaatcctctctattaatgcagcgcacccttcttgggcagcagcggcgttttgctgtgctggatttctgctaccatctacttaaagtccagaaacatgatggcaaagatgagattattaaaaatgtgcctttgaagaagatggtggagagaattcgcaagttccagattctcaatgatgagatcatcaccatcctggat

SEQ ID NO: 802 - DNA, 477 bp, Homo sapiens
  misc_feature (1)...(477): n = A,T,C or G
ngagccggnnnnaactggaccataatgagggcctagaacgaccccgctgcccggcccccgcgatcctgtgttcctcggaagccgtttgctgctgcagagttgcacgaactagtcatggtgctgtgggagtccccgcggcagtgcagcagctggacactttgcgagggcttttgctggctgctgctgctgcccgtcatgctactcatcgtagcccgcccggngaagctcgctgctttccctacctccttaagtgactgccaaacgcccaccggctggaattgctctggttatgatgacagagaaaatgatctcttcctctgtgacaccaacacctgtaaatttgatggggaatgtttaagaattggagacactgtgacttgcgtctgtcagttcaagtgcaacaatgactatgtgcctgtgtgtggctccaatggggagagctaccagaatgagtgttacctgcgacaggctgcatgg

SEQ ID NO: 803 - DNA, 488 bp, Homo sapiens
  misc_feature (1)...(488): n = A,T,C or G
cgagcagtggccnaatgagnccttaactgagaccctaggccanngcgnggaattcggcatcgagaagttggtcggcatctccaaaagcaaaggagataaacactctccaaaagtggtcaaggctgcatctcaggtcctcaacagcatgtggcagtaccgagatctgaggagtctctacaaaaaggatggatggtcacaataccactttgtagcctcgtcttcaaccatcgagagggaccggcaaaggccctactcctcctcccgcacgccctccatctcccctgtgcgcgtgtctcccaacaaccgctcagcaagtgccccagcttcacctcgggaaatgatcagcctcaaagaaaggaaaacagactacgagtgcaccggcagcaacgccacctaccacggagctaaaggcgaacacacttccaggaaagatgccatgacagctcanaacactggaatttcaactttgtataggaattcttatggtg

SEQ ID NO: 804 - DNA, 458 bp, Homo sapiens
  misc_feature (1)...(458): n = A,T,C or G
aggcggggggngnngnnaattgagacccctngcattgagcngcattgctaaagacggccgcagtcagctctgccccgcgcaatttcacgtcaagttttggagctgcgggagccggccagttggcctcagcgcctccttacggaattggcgtaaggcaaagaggcgcggctggaagaaccagactgagaaagtgccacagggcgggggccgcatccgcccctcggcttctggttactgacccgacggctttgtgagtgaaagtgaagagacacttcgaggcaggtgtctgtgctccccattcatccctgtttccgtggctatcttgactttcggggtgaaaagtgaggttaggccctgtttccccgacccttccctcgcgccatcacactctagtggcctggcacagccccagaggtcggccgctgtagcccccattgcggactcgccacattcatatt

SEQ ID NO: 805 - DNA, 463 bp, Homo sapiens
  misc_feature (1)...(463): n = A,T,C or G
nggcggggggnngnngnatttgagnccccttgaaatgagatgcntacgccagngncgnggaattcggagcaggtcttctcaaagtacggacagatctctgaagtggtggttgtgaaagacagggagacccagagatctcggggatttgggtttgtcacctttgagaacattgacgacgctaaggatgccatgatggccatgaatgggaagtctgtagatggacggcagatccgagtagaccaggcaggcaagtcgtcagacaaccgatcccgtgggtaccgtggtggctctgccgggggccggggcttcttccgtgggggccgaggacggggccgtgggttctctagaggaggaggggaccgaggctatggggggaaccggttcgagtccaggagtgggggctacggaggctccagagactactatagcagccggagtcagagtggtggctacagtgaccgga

SEQ ID NO: 806 - DNA, 487 bp, Homo sapiens
  misc_feature (1)...(487): n = A,T,C or G
actagatnccnctggnannncncnnnnaactgagtccctgtgacangncgtggaattccccccgttctatgaagaaacggagtctaagcttttcgagaagatcaaggagggctactatgagtttgaggctccattctgggatgacatttgtgagtcagccaaggactttatttgccacttgcttgagaaggatccgaacgagcggtacacctgtgagaaggccttgagtcatccctggattgacggaaacacagccctccaccgggacatctacccatcagtcagcctccagatccagaagaactttgctaagagcaagtggaggcaagccttcaacgcagcagctgtggtgcaccacatgaggaagctacacatgaacctgcacagcccgggcgtccgcccagaggtggagaacaggccgcctgaaactcaagcctcagaaacctctagacccagctcccctgagatcaccatcaccgaggcacct

SEQ ID NO: 807 - DNA, 483 bp, Homo sapiens
  misc_feature (1)...(483): n = A,T,C or G
gagcaggggccnaatgagnccttaatgagaccctaggccanngcgnggaattcccagaggactgtctgagaggccggtggccgcggatcctggacgcgcctccctcctgcctgtggtttccctttattccggcagcggcgcgagcccacccttcacatacaggagctacatccagaagcttctcctggggccacagcgtgggcttccgagactctgcgtgaccccagctctgcccctttggggctgcgggtgaagccctcaggaccctccgcgtgcgttgggcaggtgactggatgagggataatgtggtgaggtccccgtgcccaaccctcctctgcagcccacagcaaccgttccctcttcagcagccccctccccccggccgctctgggcgcccgttcccagcatcctccttggcaggtgttacccctccccattccccaggccctgggccctcctgatctgtctcctcgaccccctggg

SEQ ID NO: 808 - DNA, 474 bp, Homo sapiens
  misc_feature (1)...(474): n = A,T,C or G
ncctcgaaaacctggcaggncgggaactgaagcattgtgccgnctttctggacactttggtgtgaatttaatgcagttaggattattttcagactaggattaaagctcttctcatgagaaaatacttgtgggcggcaagccacccaggtgccaaggcaagagaccgagggcgtgagatgctccagtataataaaaaaaaaatataagaatagttatactagaaatagattatagataatatatgttactaatcatcagtttgtggcattactctttattccaatattataataatccttgctctacaattataacctaggacaaaccaggccatacagagacaggagctgaaggggcaccgtgagaagcgaccacaagatgagcgtgagcccccgttacgcccggacagggccactagagggctccttggtctagcggtcacgtcagtgcctggggaaggcacccgttacttag

SEQ ID NO: 809 - DNA, 485 bp, Homo sapiens
  misc_feature (1)...(485): n = A,T,C or G
agatgggagnnnnaaatgagacctctgatcgaagngccgtgaaaccgagctcacggtggaggtgtacgagacccatgcccggatcgccttggagaaggtgagctggcctctgcgggcctccccagcccctttcctgctgccgttctgccctcagcaccctcactctgctctcctccctcggngcctctgccttccagggtgaccatgaagagtttaaccagtgccagacgcagctcaagtcgctgtacgccgagaacttgcctggcaatgtgggcgagtttactgcctaccgaatcctctactacatcttcaccaagaactcgggaggtgaggcccagtccccaggacagaggccatggtacccagggttgagccctgctgacttcaccctctttgtcttggtgctagacatcaccacggagctggcatacctcacacgagaactgaaggcagatccttgcgtggcccacgccttggcattaagg

SEQ ID NO: 810 - DNA, 477 bp, Homo sapiens
  misc_feature (1)...(477): n = A,T,C or G
ngagcctannnnaaatcgtacccataagagggcngtaaaangacacaccgcctacccaccaccgaacctgacacgtcacctggagaactagagatcatcctgccacacacaccaccctagagcccagtggcgcacccgcccacctggtccagagctgccactgtcagcaaccaaagaagccacctggaggcccagggattggcccatgcagacaggctattatcagtgcccacatacactgcacatggtacctagtattgacacacctggtctaccaccactaccactgatgctgaaggacaagacttccaggcatccctatcctcagcaaagcctcaccacagcctccaataacaactgcagtctggctgggcgcagaggctcacgcctgtgatcccggcactttgagaggctgaggcacgtacataacgaggtcaggagttcaggaccagcctggccaacgtggtgaaaccccgn

SEQ ID NO: 811 - DNA, 484 bp, Homo sapiens
  misc_feature (1)...(484): n = A,T,C or G
natagatcccctngnannnccnnnactgatnaccctagtcagtgtggtggaattccccatcgagtttggcgttctcagcgccaagaaggagcccatccaaccttcggtgctcagacggacctataaccccgacgactatttcaggaagttcgaaccccacctgtactccctcgactccaacagcgacgatgtggactctctgacagacgaggagatcctgtccaagtaccagctgggcatgctgcacttcagcactcagtacgacctgctgcacaaccacctcaccgtgcgcgtgatcgaggccagggacctgccacctcccatctcccacgatggctcgcgccaggacatggcgcactccaacccctacgtcaagatctgtctcctgccagaccagaagaactcaaagcagaccggggtcaaacgcaagacccagaagcccgtgtttgaggagcgctacaccttcgagatccccttcctggaa

SEQ ID NO: 812 - DNA, 467 bp, Homo sapiens
  misc_feature (1)...(467): n = A,T,C or G
cgaagtccncctgagnccntactggagatcctaggaaagngcggnggaattctttctttctgtgtaacaaatgaccaagtaaaagtagtgaattaaaatatgagtaagtctattttcacagtattcataatttattataaacttcttttttaaaaaaataaaaaaaattaacttctattcctttaacaaagcaaagcaaaccaacattattatcagctaatgccatttgatttcggtttggtttggtcagtctcagggtggccaatcatttaagttttctgggactgttccaatttaagcactgaaagtttcacttcctgggaaaacacacactcctttgagtatttaccgttgacttccaggtgacccacttaagggcttcttccagaagggcaggcaataagactatcaagactcttcaaagcactcttccccaaagccattagatgaggtccaattttctcagc

SEQ ID NO: 813 - DNA, 488 bp, Homo sapiens
  misc_feature (1)...(488): n = A,T,C or G
ncctggataccctcgnaannncnnnnnactgatntccctagtccatgtcgtggaattctgtgactctgggcccacagcggggaggccaagaggggccctgtggactttcacccagcactgtgggggccttcagactctggggcagcagacatgctgcttcccatcagccagagggggtcagggctgccctgttgccaaacaactccctgaggcctctccgcaccacctcagcgggcaggaggtcccaccatgtggacagacatagcccaaggaggcaccacaggtctatgtgtgctgggggatgtcaggtgccacccaacgctgtcctggtggtatttacaatgacatcctcctcctccatcactccaggggtggtgtctcggccgcccctaccagctggctgagccccctggcctcctgcgctccctcacttccctcagttcccaaagctgcccagtccatggggacagaaccgtcactcagatccc

SEQ ID NO: 814 - DNA, 459 bp, Homo sapiens
  misc_feature (1)...(459): n = A,T,C or G
ggtggtnnactgagacctcctgatggcgtggaannnccctgangctgccatggagagagccctcctcacctggacactcctgcccacgtcttgtgtagctgacctattgggttgctgcacagagcagagacgatgacgtgcaccgaggagaagttgttgaggcttacgcactcctggagagggaagaatgagctgtgcggttcaaagttggagcttggcccactacagcctcagccccctctgctgagatctcccctcctggatgaagcagaggcctggggagcctcaggagggcagacctggggccgagtggatgtcactcatctaggaggattttagttcaacccaaggaagaccccaggtcggaagtgagcagccaccactgggccgtgggagtcaagtctggagaaacagctacggccatcccagccctggccaaggggaaaatgccggaagact

SEQ ID NO: 815 - DNA, 480 bp, Homo sapiens
  misc_feature (1)...(480): n = A,T,C or G
cgaaggttccanagggggnnnnncctggagcccctactgatgacgctaggacangcggnggaattcgtgctcttcctgcacgatatcagtgacgtgcagcttgagttcaccaagctcaacatttacttcaagtcccgcggcggctcctaccatcggctgcatgccttggcagcagacttgggctgcctcagcttcggcttcagctggttctggttccgcctctactggttcccgctcaaggtcctgtatgccaccagtcactgcagtctgcgcacggtgcctgacatccccttctacttcttcttcaatgcgctcctgctgctgctcacccttatgaacctctactggttcctgtacatcgtggcgtttgcagccaaggtgttgacaggccaggtgcacgagctgaaggacctgcgggagtatgacacagccgaggcccagagcctgaagcccagcaaagccgagtgagtgtggaggggc

SEQ ID NO: 816 - DNA, 452 bp, Homo sapiens
  misc_feature (1)...(452): n = A,T,C or G
agggggnnngnnnnncctgaaccttggactgagcgcatagcaagactccattggctggatgttctccaagctggacaccagtgctgacctcttcctggaccagacggagctggccgccatcaacctggacaagtacgaggtctgcatccgtcccttcttcaactcctgtgacacctacaaggatggccgggtctctactgctgagtggtgcttctgcttctggagggagaagcccccctgcctggcagagctggagcgcatccagatccaggaggccgccaagaagaagccaggcatcttcatcccgagctgcgacgaggatggctactaccggaagatgcagtgtgaccagagcagcggtgactgctggtgtgtggaccagctgggcctggagctgactggcacgcgcacgcatgggagccccgactgcgatgacatcgtgggcttctcgn

SEQ ID NO: 817 - DNA, 487 bp, Homo sapiens
  misc_feature (1)...(487): n = A,T,C or G
aattgatatccttccgaannncnnnnnnctgatttacctattcagtgtcgtggaattcgcagcggcgagtggagcccacagtgaccatctccccatccaggacagaggccctcaaccaccacaacctgctggtctgctcagtgacagatttctatccagcccagatcaaagtccggtggtttcggaatgaccaggaggagacaaccggcgttgtgtccaccccccttattaggaacggtgactggaccttccagatcctggtgatgctggaaatgactccccagcatggagacgtctacacctgccacgtggagcaccccagcctccagaaccccatcaccgtggagtggcgggctcagtctgaatctgcccagagcaagatgctgagtggcattggaggcttcgtgctggggctcatcttcctcgggctgggccttattatccatcacaggagtcagaaagggctcctgcactgactcctgagact

SEQ ID NO: 818 - DNA, 479 bp, Homo sapiens
  misc_feature (1)...(479): n = A,T,C or G
agcatggccccntttcgagaccctattgagtgtcgtggaattcgaggaaagggcatcctgggaagtggagatgggcagggcaggcgaggcaggaagggtggctttgaagaggcccacggggagcctgaggtgtagcccagggactctgctgggggccttagtgcagagtggaagtcccccaatgtgagctgccctctcctctctgcctgctgctcccccaggtaccacaatgtgggcatccttgtgctcttcctgcacgatatcagtgacgtgcagcttgagttcaccaagctcaacatttacttcaagtcccgcggcggctcctaccatcggctgcatgccttggcagcagacttgggctgcctcagcttcggcttcagctggttctggttccgcctctactggttcccgctcaaggtcctgtatgccaccagtcactgcagtctgcgcacggtgcctgacatccccttctacttctt

SEQ ID NO: 819 - DNA, 490 bp, Homo sapiens
  misc_feature (1)...(490): n = A,T,C or G
naattggaatgccctcggnannnncnnnnnactgatntccctagtccatgtcgtggaattcggaagaggcattgaggactttccttacctgtttttccagctcacccactgccagcagaggatctgctccgtcacccaggctggagtgcagtggtgtgatcacagctcactgcagcctcaaactcctgggctcaaccagtcctctcacctcagcctcctgagtagccgggattacagaatgctgtccagtttcaacgagtggttttggcaggacaggttctggttaccacccaatgtcacgtggacagagctagaagaccgggatggccgtgtctacccccacccccaggacttgttggcagccctgcccctggcgctggtcctcctggccatgcgccttgcctttgagagattcattggcctgcccctgagccggtggctgggtgtgagggatcagaccaggaggcaagtgaagcccaacgccacgctg

SEQ ID NO: 820 - DNA, 471 bp, Homo sapiens
  misc_feature (1)...(471): n = A,T,C or G
gaggtgtaacctgtaccctgtcgaaggcngtaattcctttccaccccagctcaatggcacagccaatgacacagcaggcccagagctgcctgaccctttggggggtctgttagatgaagctatgttggatgagatcagccttatggacctggccattgaagaaggctttaaccctgtgcaggcctcccagctggaggaggaatttgactctgactcaggcctttccttagactcgagccatagcccttcttccctaagcagctctgaaggcagttcttcctcttcttcctcctcctcttcctcttcttcctctgcttcttcctctgcctcttcctccttttctgaggaaggtgcggttggctacagctctgactctgagaccctggatctggaagaggccgagggtgctgtgggctaccagcctgagtattccaagttctgccgcatgagctaccaggatccagctcagct

SEQ ID NO: 821 - DNA, 482 bp, Homo sapiens
  misc_feature (1)...(482): n = A,T,C or G
aggccggcccaattgaacctggtagctccggaagngcggtggaatttctggctctgaccttaagggcaagggcagggagcttcacatttcaaatacagttgtggttacggcagcccagtacttttggccctccttgcgggtcggttctcctcccttctcccaacctcctcactggtgttgctgggtgtggtcctcaatacagaatagagacccttgggcctgtgtcaccagacttctgaccccttgggcaacagccagatggagactggtcgccttttgagcctcagctctcttcctcttgttctcctagggggggagtacagcagccaaacgctgaacttagtcccatccacttgcatcttatcctttgtgcccttcatccccctgcatcttgtcctttttgccctctggtacctcccagggccccatcatctctacccccagggactcggagatcatgcttcagaagcagataaaggcag

SEQ ID NO: 822 - DNA, 483 bp, Homo sapiens
  misc_feature (1)...(483): n = A,T,C or G
tggagagcccccttagacnccntttcgagntcactagtcagtgtggtggaattcctcttccgcatgtgtcttaaagcttacataagtggtatttgcctcttttccactaagcaatttttaaaaaaattcatcccaactttcatcacatcatcttatgtggaagtgccgtagtccataccagttccctgatttaggacacagaggttgtttctgattttcagctaacaggaattatgccgtcaaactccttgtaagagtcttttccaacatgcacgtgcatctcaagagtgggggtgacttgtagaagcggagggaagagctcagtggttttgccttcgactcctgactccctgcgtgcccctcattgccctgacccaactggacctgaccctgtgtccccctcccacagtccacgctggcagtgtgggtgaagtggcccatccatcccagcgccccagagcttgcgggccacaagagacagtn

SEQ ID NO: 823 - DNA, 478 bp, Homo sapiens
  misc_feature (1)...(478): n = A,T,C or G
natcgagatccctagtccagngtggaggaactcatcctggtgtcccggctggacccccacctccacacccccatgtacttcttcctcgcccacctttccttcctggacctcagtttcaccaccagctccatcccccagctgctctacaaccttaatggatgtgacaagaccatcagctacatgggctgtgccatccagctcttcctgttcctgggtctgggtggtgtggagtgcctgcttctggctgtcatggcctatgaccggtgtgtggctatctgcaagcccctgcactacatggtgatcatgaaccccaggctctgccggggcttggtgtcagtgacctggggctgtggggtggccaactccttggccatgtctcctgtgaccctgcgcttaccccgctgtgggcaccacgaggtggaccacttcctgtgtgagatgcccgccctgatccggatggcctgcatcagcactgtgg

SEQ ID NO: 824 - DNA, 480 bp, Homo sapiens
  misc_feature (1)...(480): n = A,T,C or G
gggcgggtncnnnnagttggtggctagtannnnnctagntncttcgtanancgnccnnntnaaggagccagtaggaggccgcaccgaaaggagcctttggcggtggcggtgttagtgggcgtggcgctgtgggggacggtcagcctaggttttcgagctgtgtacatttgcgtaaaggctgggcggcgatagaacgtttccgtggaccacagtcgaggctgttgtctgtgttaacatttgtgttaaataagatgcccataaaaggtgacttgaacactgaggaggaagaactaaatatttaaatttcaactgacatggacacaaacaatggtcaccaagtccctaaacaggttgtgggagccccttgaggcgttcatccagcgctgtttcggagaaatctctatttcagtctactcctatacgtcagttattgaaaaacaacaatcgcaaaaacaagttgacctttttgtgttgcttgag

SEQ ID NO: 825 - DNA, 476 bp, Homo sapiens
  misc_feature (1)...(476): n = A,T,C or G
ngggggagccggcgcggnnnnnnaattgtactgacgtctcatatggagngngcnggaattcggaacctgtctgcctcctgccgccatcaacatatcatccacaactccctggctgtttgtgccaaggggcacctgcaggcccatgctgagccacctgtttcctcttggccttccttccatgcttatcagcacccaaagaccagaggggtccaaggcaggagggggctgacatgtcagcaccgcccctagtgtgcacacacctggccggggccgcggcagcgcctgggcttggccacagctttgctccaaaatcggagcgggcattgggagtgcggagaggctcanaacacgcacttctgagctgggcagttgcagctgtgcccgggagcacggggcttctgccctgtaaacttggaagggatggggttccctcctgttcccaacccaagggctacatggagcacgttgccccagcc

SEQ ID NO: 826 - DNA, 475 bp, Homo sapiens
  misc_feature (1)...(475): n = A,T,C or G
aaaaagaaaaaaaagnannnttttgaattcgtatcccatgggaggaattcccgagctgtctggcctcagtttccctccgacttttctccgctctgccagccctcactgctgcccgtcattgttctcgcagttagatgggggtgctttgtgacggctgccaagttggggtgtgttctctttattccgtttttcaaacagaacaaggcctccaaggctgaccccagacaacccaccccctcggaccctaattcaccttattgcactgattttttttatcaagtcgtattttattgtacaggagccacgccctgatttcttaaaggcgccttgcactctggccatgtgttatctctgcagccggtgtgtgggaggcctcttgtgagccagttgttttcccgcctccaccacccccctcgaagatttagggatgccaggggggaagaaggtggcctggggtgcagcagcggtgccactt

SEQ ID NO: 827 - DNA, 501 bp, Homo sapiens
  misc_feature (1)...(501): n = A,T,C or G
cgtcggtccaggggnaggggngggattgaaaaccctngnnctgagaacactatccangngcgggaattctagagagtgcggactgtgtcttacaagcaggcaaagccgaggcaaggccgcacgtctcatccttcagaggaggagggacaggaaggcctcctgaacgcacccctgggtgcggtagagccaaggtcgacgacgtcatgctgaggcgactcggacgctgaaacgtcactaggcgatttttccaaagacaccggcgcctcgtgctcagtgacgtagctgtgcggctggtctacagagctttgccagtccttggaactttcttcgctctccgttcggtggatcgaatcacgtgctcctgggactgggggtcctaagcaatcctgccacatctcccggatgggggttccgcacaccatctctgggaggcagacctgtgcgtaacaggattccaggtccagttgcagttcagtgccgtccagtgaaaacatgggcact

SEQ ID NO: 828 - DNA, 544 bp, Homo sapiens
tcgcctgtacctcctatctgacgtagtgtcataggagctaatgattaaacgcgcacatgctaaatactaacacagcgcacaccaaacaccaatttgaaacatttgataccctgaaagcgacgccgggctcgctcggccccggaactgccccttctcgggggtcatgattttagcaagtttgcgtctgctagtagggtcgttcaggtagtcggaccacacactcgcattaataaggtttcctgacagaagagacaatcctaaacccaatgtatcagaagctttgagatcagcagggctaccatctcactcttctgtaatttcacaacattctaaaggaagtaaatcaccagatttgctgatgtatcagggtccaccagacactgcagaaataataaaaacattacctcagaaatacagaaggaaacttgtgtctcaagaagaaatggaatttatccaacgtggaggtcctgaataaccatggtggctgctgtttgtcatcagacaatagaattgtctttacaataaaggacttccaaaatgacag

SEQ ID NO: 829 - DNA, 470 bp, Homo sapiens
  misc_feature (1)...(470): n = A,T,C or G
ntcgaagaccattcgaagtgcggtggaattcatggatgttgatagaagacatgagactcctggatcaaagataaaaatagtttattacccacagcaatagcagtatctacagtgtctgaattttttgagccagctccccgagtcccactccccacaagataatgtaaatagggccagttaacacctgtacaaggaactctgagcttcgggaatctgaatcttttttttttccccaaagtttttatggttttatttaacacaactaaaacttacacatgaggtgtgagaaagaacaaaatttcaacaaattgagtttcaaagatctttttgggttgggttggctttggtttttcattttttgtttttggagacggattctcactctgtcgcccaggctggagtgtaagggagatttttgctcactgcaacctctgcctcccgggttcaggccattctcctgcctcagcctn

SEQ ID NO: 830 - DNA, 460 bp, Homo sapiens
  misc_feature (1)...(460): n = A,T,C or G
agggatgnnnnncctgattacantgcgctgtgncgnggaattcctgacacccaagaaagatatcccctgtggggaccagcccctgagctcaacccagggctgttatgcagcacggtcatggaacaagggtgcaggccaggttccgtcctgggcactgacggggactgatgctgataccaactgccccaagcagctgcccaggacatgaggaaatcacagctgagtacctgggttcctttataacatagtagtgaaggctgcatggaggaagccccatggaccaaggaagcccaagggagtcgcttaactcagcaggggttcaggaaggcattctagaggaggtgggtggggaaatttgaccccaaaagatccattgcagtttcaggaaggctgaagtgagaggatcccttgagcccaggaggctgaggcttcagagagctgtgatcatgtcactgcactc

SEQ ID NO: 831 - DNA, 462 bp, Homo sapiens
  misc_feature (1)...(462): n = A,T,C or G
tgggcagnnnnnncctggttagcgtncactaggccgtgtcgtggaattcccagtgagtacgcgcggcccgcgtccccggggatggggctcagagctcccagcatggggccaacccgcagcatcaggcccgggctcccggcagggctcctcgcccacctcgagacccgggacgggggcctaggggacccaggacgtccccagtgccgttagcggctttcagggggcccggagcgcctcggggagggatgggaccccgggggcggggagggggggcagactgcgctcaccgcgccttggcatcctcccccgggctccagcaaacttttctttgttcgctgcagtgccgccctacaccgtggtctatttcccagttcgaggccgctgcgcggccctgcgcatgctgctggcagatcanggccagagctggaaggaggaggtggtgaccgtggagacgtggcaaga

SEQ ID NO: 832 - DNA, 458 bp, Homo sapiens
  misc_feature (1)...(458): n = A,T,C or G
catcgacnccntnaatgatgactctaggacagngcgcnggaaatcgaagctttccgcgtggtggggagcacatgtcccccacggcaggttctcagccctcattgttatggcgaccggccccgagggtcaggcctgggcgctgcctatggcacactcgagagcggaaccggccttgcggacatgtctgtcattcggacgggacaaaacatgaagtccatcattccagaggtgatggctgatatcatcgccatctacggcctggtggtggcagtcctcatcgccaactccctgaatgacgacatcagcctctacaagagcttcctccagctgggcgccggcctgagcgtgggcctgagcggcctggcagccggctttgccatcggcatcgtgggggacgcttggcgtgcggggcaccgcccagcagccccgactattcgtgggcatgatcctgattctca

SEQ ID NO: 833 - DNA, 462 bp, Homo sapiens
  misc_feature (1)...(462): n = A,T,C or G
gcggatggnnnnnaatcgagtagcctagcnagtgtggtggaattcccctgcagggctaccgggatgctgtctgcagtgggcaggctgctgcgcgtgccaggcgcttctctgggctgtctgctgagctccggaaccagctggacgtggccaaggtctcccagcagctgggcctggatgcccccaacggctcggactcctcgccacaggcgccacccccacggaggctgcaggcgcttctgggggacctgctggatgcccagaaggttctgcaggatgtggatgtcctgtcggccctggccctgctactgccccagggtgcctgcactggccggacccccggacccccatccagtggtgcgggtggggcggccaatggtactggggcaggggcagtcatgggccccaacgccaccgctgaggagggcgcaccctctgctgcagcactggccaccccggacacgc

SEQ ID NO: 834 - DNA, 459 bp, Homo sapiens
  misc_feature (1)...(459): n = A,T,C or G
tgggcggnnnntttgactgcgtaccatggccgtgtcgtggaattccaaaggcttttacttcagcaagtggattctttgagatctgctttcttccttgactttgccctgtttaatggtacaccacagcccagtgggagacatttgattgctcatttcctttgccaggtcaatttggtgactgacagaggctcacgggcaggctcttcagttgtctgggtgcccagcagtgacagagccgtctcatggaactcctcctaggaactacagagtgggcaattgaaaatgcagagaactcccccgattcactcaaaacccttcatccaaagccagctgcacctcgacaggaactaatctgatgggcctctctctgtcacccaggctggagtgcagtggctcgatctcagctcgctgcaacctccgcctcccgggttcaggtgattctcccgcctcagcctcctg

SEQ ID NO: 835 - DNA, 448 bp, Homo sapiens
  misc_feature (1)...(448): n = A,T,C or G
nattgaactgcagatcatcgnacagngcggnggaaatccagaactccctgaaggtgctcaccctcgtgctgtactcactgcagatatgcaaagccatggcctacctggagagcatcaactgcgtgcacagggacattgctgtccggaacatcctggtggcctcccctgagtgtgtgaagctgggggactttggtctttcccggtacattgaggacgaggactattacaaagcctctgtgactcgtctccccatcaaatggatgtccccagagtccattaacttccgacgcttcacgacagccagtgacgtctggatgttcgccgtgtgcatgtgggagatcctgagctttgggaagcagcccttcttctggctggagaacaaggatgtcatcggggtgctggagaaaggagaccggctgcccaagcctgatctctgtccaccggtccc

SEQ ID NO: 836 - DNA, 480 bp, Homo sapiens
  misc_feature (1)...(480): n = A,T,C or G
gaccgagannaactgttccctactgataccctaggcagtgtggtggaattcattgcttaatccccaggagcccagttcctgtgggcagcgcctgacatgcctgatcctctcttttctgcagttcaagggaaagacgagatcttgcacaaggcactctgcttctgcccttggctggggaagggtggcatggagcctctccggctgctcatcttactctttgtcacagagctgtccggagcccacaacaccacagtgttccagggcgtggcgggccagtccctgcaggtgtcttgcccctatgactccatgaagcactgggggaggcgcaaggcctggtgccgccagctgggagagaagggcccatgccagcgtgtggtcagcacgcacaacttgtggctgctgtccttcctgaggaggtggaatgggagcacagccatcacagacgataccctgggtggcactctcaccattacgctgcgg

SEQ ID NO: 837 - DNA, 258 bp, Homo sapiens
aagtaatcctatgctcgtgaagggacacagagaatccctcagccccgctccccgtcttagcggccctcccctcgcccccacagaagtttagcactccctggcggcgcttcttcacgtctatgccagtctatgccatcatcgtggccaacttctgccgcagctggacgttctacctgctgctcatctcccagcccgcctacttcgaagaaggttcggcttcgagatcagcaaggtaggcctggtgtccgcgctgcccca

SEQ ID NO: 838 - DNA, 463 bp, Homo sapiens
  misc_feature (1)...(463): n = A,T,C or G
tgcggntgnnnnnncctcgattccctagcaattgtcgnggaattcaatgctgcacaagctctgagccctcctggggctgcgaagttcctctgatgggaggtgtgtggtggccatcccatccctgtgtaagacctggggaaaccactcttcaaggttcaggaggagggagggcggcccccgacccttaaccagagcgaggttgttgctttgtgtccacagggaccaggagcgaaccatgatgccaggtaggaggggctgactgggccctgcgagcgcgtgcctttcctgctgggcagaggccctccacatggggccacgcgggccgggcacaggagggcagtcagatgggcagggcctgagagcctccctcctctccctaggtccctaatcatggactccccaagagctggcacccaccatggccccctcgatgcagagacagaggtcggtgctgaccgctgcn

SEQ ID NO: 839 - DNA, 479 bp, Homo sapiens
  misc_feature (1)...(479): n = A,T,C or G
ggggcganaanaaacctgataccacatggattgtgctggaattcctctttgtctgggggaggggaaggatgtggtttgcagagcggaagcagagtttggaaacgcatgagagcagagcttcgtgtgttcccaccctcagtgaggaggtgtgagtgggtgagcatgtggagttgggtgttcccaccctcagtgaggaggtgtgagtgggggtgcatatagaggcagtgcctgctgtggggtcacaactggtgcatgccagcgccaaagggacctgtctttaggggtcatttcagccagctcctcccatcacagatgacagctccaagcctagaaggggctcagtgacagggccaggacaagccctcaggactgtggcctcctggcccttggtttccctgccccacaacatggtctccacatggctggctggctggctgtccctgtgtgtgtgtgacacacggtgtgagtgcagggctgtg

SEQ ID NO: 840 - DNA, 464 bp, Homo sapiens
  misc_feature (1)...(464): n = A,T,C or G
tgcggctggggnnnncctggattgcctaacactngncgnggacntctaagcatgcgtggnatcaagaggtgcattgaggcgctcctgcagcctcctcccggcacgttacttctcacaacccccagcctcagcttccctgacagggcaggggctcactcttccccactccgggccaggaacgcagcctgcttgccttttgtccaattgggtgctctttctttgcgactgatacaaagtgggaacaaactccgcttccggtgatgcccgggccccaggaggctgggggagaagtgcacgctgcccagccttcaacctgaactgcccccagcacttccgagccccgacccctgcagctgtgagggaagccccgacctctgccctggccacatccttcccctgatctcatggctgaaaagccacaccagaattcctgcaattcagtgaggcagctcttcaaaaccaag

SEQ ID NO: 841 - DNA, 249 bp, Homo sapiens
cccggtctaacccccagcgccacagagaagacgggatttgaagctgtacccaatttaattccataatcaatctatcaattacagtccgtccaccacctccctgtgggctgtcctgagctctgttgggttcctgggatggaatcagtgcatcataaagggcattctttaagcagagaagggggcaggccaccccattcaggaactgctgcgggaataaagtgctaacttgcccccaggctgtctatggga

SEQ ID NO: 842 - DNA, 461 bp, Homo sapiens
  misc_feature (1)...(461): n = A,T,C or G
tggccaggggnnntttgaatcgcagtccctagtccatgtggtggaattcctcagcgcgctctcctgtccctgggacgtgcgtctctccttctcatgccgttctggaaaatgctcttgctgtagagagcagctgcttctgccagggtgttggaggtggtggagcgccttccgattccattcatggcattttgtgatgtgatgtaattggaatagagctgttgatttaaggcacacacaatccctcacactgtgggttttttttagaacttcccagacgaaaactcacgcccttgccctaacgcgctttgctgtgagcctggcccctgcccagggcttgggtctggtgagctgagcagcttcctgtggatggtgtggggccggcctctggcctggctcacctggccactgtccagccagccttgtgacagaactccggcctgaggcagaatgaacccacacct

SEQ ID NO: 843 - DNA, 487 bp, Homo sapiens
  misc_feature (1)...(487): n = A,T,C or G
gtgggggnnnnaatcgagtctctgtccgtgtggtggaattcctcactctcagcggctgccttcgcccctgtctgcagacagcgccgctggatgctcccagctggacttcaaccccactcctctcagtccctctccccactgccttccagacgcgcctcttccccgccccgcgcccctctctcctctcccacccctgcccctctccgcggcgctcaccctcctcagtcccagtttctgaaaggactcagctgagaaaggacaactgggttccgctttccttaaccctacaccctttagctggatgctgtcagaggcgatggagaaacgcaaaggctactagacgcaacaatagaattaccatattgtttttcctggtttgaaaggaccagatggaaagaaactgggcaagccaatgaaagtctctggggatcatgggaattgagtgtctatgaaaaccatattccagacaagaatatagtctaaggac

SEQ ID NO: 844 - DNA, 481 bp, Homo sapiens
  misc_feature (1)...(481): n = A,T,C or G
tgcaggtngnncccattgataccctnactgataccctccgccangtcgnggaattcgataagtcctgtggtaagcttgggcataggttttggggtgaccacttacaagctgcttgatctggggcaagcctcagcttcccattaaaaactatgaacattgaaatgtctggcttactcaattcatagaactgtgctggatagtagatgtggtcttaagtgaaggtagtttgcatattgtaaagttctttacaaatataagggactgctttagtcgttgttcccagaactccctcccagatttctccaggagaaaaggaaaccataggcatcctggcctctctgcttaactccccaacccagtttcagttagcctcttggctttagaccacccctgggccactgtcatcccacagagctgcttctttacatggtagtcatcatcctgcctttcctcacctcccaggacctcagtctgctctctg

SEQ ID NO: 845 - DNA, 479 bp, Homo sapiens
  misc_feature (1)...(479): n = A,T,C or G
ccattgatnaaccctcgcagnggcnggacctgatattccgttgcctgngacggggcccagacctgtggtttttaaagctggcaggccattgctctgtgcctccagagctgaaggctcttgacatagctgttctcgtttgtggctggctcaccagagaggccgtggtaggacagaccccactgggcctggtcccagggttgagagcatgcggggctaccctgagactcctgagcctcctcagcctgccctgccctgtcctgtccagacacagagaacacttgggctctgctgggcttgtggcccatgcccgctacactcacccaggaccatgcgatccgcaaccctgggtactgcttggtgacctccagcaaagactgcactgaatgaggccggccagcacgcacaacgcggcccgacctctgagctacccaaagggagagcagcaagttgcctgtgcgtggctggttcctgtgcgcnca

SEQ ID NO: 846 - DNA, 476 bp, Homo sapiens
  misc_feature (1)...(476): n = A,T,C or G
atgcggaagncccctgagaccctgactgatgtccgtcaataccttactcaatccaaatttcatttacagctctggaacactttggggctgatttgtctctttaggggacatccccaacatggttaattccaactctcagatcttgtgctttagttagtacatgtgactcaccagatggggtccttagatcctattcctgctcccagggggaatctgcttttctttgtcattttgggaaaggggcttggtttctgagtgtcttgccttctcatctttttttttcatatcctttttctcaaaaaagccatcagatctgactttcatggaagtgttgctgaggtcagcctggtgcaagttgggatacaaatgaaacttatgcaggatgtgtgagaggaagcagttaattgtttctgaatatctcagggtaggaaccatgtggagccacacattccctgaccacagggaagcacctggtn

SEQ ID NO: 847 - DNA, 486 bp, Homo sapiens
  misc_feature (1)...(486): n = A,T,C or G
agtggcaggagnnncccactgatnccntnactgatatccctatgcagtgtcgnggaattccgaccccttcctactgagccagctgtgcggcccaaggagcctgggaccaagcgaaagggcttgggtgagggggtcccctcatcacagcggggtccccgccgcctctcagctgaagggggagataaagctctacataagatgggtccaggtgggggcaaagccaaggcactgggtggggctggcagtgggagcaagggctcagcaggtggcggaagcaagcgacggctgagcagcgaagacagctccctggagccagacctggccgagatgagcctggatgacagcagcctggccctgggcgcagaggccagcaccttcgggggattccctgagagccctccaccctgtcctctccacggtggctcccgaggccctttcactttccttcctgagcccccagatacttatgaagaagatggtggtgtg

SEQ ID NO: 848 - DNA, 483 bp, Homo sapiens
  misc_feature (1)...(483): n = A,T,C or G
ggtgccggnnnnaaatgagaccctaatcgaagnccntgaaancgcctccacctgctagaccaggccagtggccaggacacccccctctagagccccagccctgggtctcctcaccccaccccttctcagccttcccaccctgctcaccagagctgagtcaggagccctggctttgactccaggaagccttagccctttaacctcaatggctggggttggggtagaatcaggaggtcttgttagcagtactccccattctgcctgtggtgcccaggctggcccctgtatagcagagaacacaccagctggcccttgctggcttacacggtatcttcatctgtcatctcaatgcccacaacctcacaacgatcttacctttcatagtttttcaggagccctaaggctagagggttattcatcaccgcagggagctctagtctgatgaagtccaagacctccacagtttgggcctgtttatggcat

SEQ ID NO: 849 - DNA, 490 bp, Homo sapiens
  misc_feature (1)...(490): n = A,T,C or G
aggcgagtnnccccatcgaaaccatatttagtggccgtaattccacaattgaatgcataaagcaggagcttacggtgttccagtcaaaagacgtacctgaaaagacatcatcacctgaagaatccataaggatgacgaaaggcatcaccatggcaacagccaaagccggggcagctgggaactcatgtagacaggaggacgtgattgctactgccaacctgagccggaaagccgcgtcagatatgttgaccgcttgcaagcaagcatccttccaccccgatgtcagtgacgaggtgagaaccagagccttgcgtttcgggacggagtgcacccttggctacttggacctcctggagcacgtcttggtgattcttcagaaaccaaccccagaattcaagcagcagctggccgctttctccaagcgagtcgccggcgctgtgacagagctcatccaggcggcggaagccatgaaaggaacagagtgggtgga

SEQ ID NO: 850 - DNA, 490 bp, Homo sapiens
  misc_feature (1)...(490): n = A,T,C or G
gaggcnnnnnnattgannatcgtagtccctagtccgtgtgcgggaattccagatggagtactaccacaggcatatgacccagccgcacgcgcaggatatcttgcgcgcagcctgtgaagaaaaaaccatgctgatggtgtcaggctcagctgccctgcccgtcccagtgctggacaagtggaagatcatcttcggtccacaccctgctggagcggtatggcatgaccgagatcggcgtggctctgtccgggcccctgaccactgccatgcgcctgccaggttccgtggggaccccactgcctggagtacaggtgcgcattgtctcagaaaacccacagagggaagcctgctcctacaccatccacgcagagggagacgagagggggaccaaggtgaccccagggtttgaagaaaaggagggggagcctgtggtgaggggaccctccgtgtttcgagaatactggaataaaccagaagaaactaagagtgg

SEQ ID NO: 851 - DNA, 480 bp, Homo sapiens
  misc_feature (1)...(480): n = A,T,C or G
agatgtcccnncagaggccnccactgagntccactgatatcntctggaagngcggcggaantcctacgtcttagcaggaaaaaaaacttcgcatttctgtgcccgagcaggtttcttgcatttacagcagcgtgcggggcagagccgcgggagggcgcgtctgtccacgcctaccggacgcgccgaggtcgcgctgcctgtgttctccgagggccttcatttaaagaaaataagggtgttttgggcttttctctttgtttttttcaagattcttttaaaggagtactgaagaatactttcctaagtttgtctctaaaatcttagcggtggacctgggagatttgagaagcttccagaaacagtttaaacaagccagcgctactggagaagaggagcaacacctgtgccgcggccggaggagttttgttgttggttttagcttccagtggcttctttctgcggngcatcacgctgctgggg

SEQ ID NO: 852 - DNA, 472 bp, Homo sapiens
  misc_feature (1)...(472): n = A,T,C or G
gagtccccnnagtggccccatagagaccnctgatagtcgtcggaancnccatctgnacctgctgcctaatttagagtttgggggcattgtttacagtatttctgtttgtaatgtgtttttaatatagaaatcctcttttttgttcttaaatctatgaatgctgtgtttccaagcttatacttactactgcgtgttagtggtcctggcacagattttcttaccctggccttgtactgtccaccatgactttagaaaaagcttgaacaataggcagagaaaggaaatccccaaaagggattattttccccttggacatgagaagtttagttacaggtttcttgaattcgtttttgtccagaggaatcctctttttatctgatacggttgatgaccaaaaatgaagtagggaagccgaatgcatagccggaaaggaacagaagagctttttccccgagtgctcatcaccgggttn

SEQ ID NO: 853 - DNA, 484 bp, Homo sapiens
  misc_feature (1)...(484): n = A,T,C or G
ccccccccccccccagcggcccccatagaaacctaactgagatcctaggacanngcgaggaattcggggcttagcctctgcagagacctagtgcgccgcctccttgccccagacctgcccgggcagagagccgtgtatgtgtcccagtgcacaggcgctgctgggccctgccaaaaggccacaagcccactgtcaccgttcacattgcttctcgcttcccggcccagccccgcccacacaggcatctgccttgaaagaggtgcaggaggtacaggcaggtgggggctccagtgagctctgaggaacagcagtggccgccatgggtggagcctatctttgttgccagtttcagtgttaaacactcttgcacgtgtgacatcattgagtcctaaagaccactctgctcagtgcatgccattgtttccttcagttacagaggagggaaccagagcccagaacatttagcctttgcctaaagtcactg

SEQ ID NO: 854 - DNA, 471 bp, Homo sapiens
  misc_feature (1)...(471): n = A,T,C or G
gaaatgtccnntttgaaaaccttactgattaccactaggacagngcggnggaattccagtactaccagcgcttcgaccgaattaactggccctgtctggtgaggaaccctgacccctagcccagtttggggcccttccctctcctctaaatgatgcattttcctttcctccccgagcttctttccatttccacaccacagctgggctttgtcccatgctatgccctgcactcaaaggtgtgctttgactcacactgatttcacagctgcagggccacgggcaatcaggaggaccacatccgctagatctactctcccactcagcaaaggtccagccccagccctggcctggcttgacccccccgggctggcatactccagccgctgtcccctgggttccagccccaacgcctggcttctggtcctggttgctctggttcatctgcttccactccctgggtagcagtgtgag

SEQ ID NO: 855 - DNA, 455 bp, Homo sapiens
  misc_feature (1)...(455): n = A,T,C or G
ntttgagaccacattgcaggcgtggaaancccctctttgctcaaactgcagcctgtcctcccaggcttccgccttcaccgtcttcctccgctgtctcctgttcaggccaatccactcatttcccccctctcatttcccccagacttttgcctcgattccctttttctctctgtcatctcgaaccctcctgccctttctcatttctttccttcctggggcctcccatgccctaatcccatcctttttcctcatatcgctgtagggtcctgccctccggaggagcagcctcgaggctggtggttttcagagcaggaggccgacgttttctccgcattggaagagcccgccgtctgcaggggcctggaggaatcactggggatggtggcacaggcactgaacaggctggggccttttgacggccttcttggtttcagccaaggggctgcgctagcagg

SEQ ID NO: 856 - DNA, 465 bp, Homo sapiens
  misc_feature (1)...(465): n = A,T,C or G
agggccnccatagaaaccaactgagatcataggaagngcggngaattcgggagtgggatcggtggggaggaagggatgggggaggagcggggattgtttggggagttgggaaacttgagcacagcgggggttgtaaaacttgggaacctcatgttgggcgtgaaggctcttgggatttgtactttgtggtctggaagggctggactgcgggtgttcaggcttcgttgggtggacggggggagcatggggtgcggaccccggggtggggtggcctgggtacgaggggggggagtgcatggggtcagcctccacacttgcttggggaggagggggctgcactgctccgagggagctggctggcttctgccaggccctgcgtgggtctcccattaagtccttggcaaagctggctgctcataccctggcctcatagcttccaggcccctcctgctggaggtgccattg

SEQ ID NO: 857 - DNA, 436 bp, Homo sapiens
  misc_feature (1)...(436): n = A,T,C or G
agttctctgtggacagcatcaccagccaggagagcaaggagcctgtgttcattgcagcaggggacatccgccggcgcctttcggaacagctggctcataccccgacagccttcaaacgagacccagaagatccttctgcagttgctctcaaagagccctggcaggagaaagtacggcggatcagagagggctccccctacggccatctccccaattggcggctcctgtcagtcattgtcaagtgtggggatgaccttcggcaagagcttctggcctttcaggtgttgaagcaactgcagtccatttgggaacaggagcgagtgcccctttggatcaagccatacaagattcttgtgatttcggctgatagtggcatgattgaaccagtggtcaatgctgtgtccatccatcaggtgaagaaacagtcacagctctn

SEQ ID NO: 858 - DNA, 476 bp, Homo sapiens
  misc_feature (1)...(476): n = A,T,C or G
nggagattggaccctatccgaatggagaccctcacatggatgccttcacactggctctttaagaaggataaaaagataggggtgaggtgtggtctatctcctgcttcactcaggccctggtgcttcctcaagtggtgtgagaaactgtggtcctgtgcgttctcttccagacccttagcttatatattttccctataaaacttagtcctaatcccagcattttgggaggccgaggagggtaaatcatgagatcaggagtttgagaccggcctggccaacatggtgaaactccgtctctaaaaaattagctgggcatggtggcgggcgcctgtggtcccagctactcaggaggctgaggcttgagcccaggaggtggaggttgcaatgagccgagatcacaccacagcactccagcccgggcggcagtgagagactgtctctnnnnnnnnnnnnnnnnnnnnnncaaaaacaagcct

SEQ ID NO: 859 - DNA, 475 bp, Homo sapiens
  misc_feature (1)...(475): n = A,T,C or G
tttgaaccccatcgagaccatagtccatgtggtggaattcggtctgctgggcacccactgcagccccgatctgctcttcttcctctgtgccatgtacgcgcccatctgcaccattgacttccagcacgagcccatcaagccctgtaagtctgtgtgcgagcgggcccggcagggctgtgagcccatactcatcaagtaccgccactcgtggccggagaacctggcctgcgaggagctgccagtgtacgacaggggcgtgtgcatctctcccgaggccatcgttactgcggacggagctgattttcctatggattctagtaacggaaactgtagaggggcaagcagtgaacgctgtaaatgtaagcctattagagctacacagaagacctatttccggaacaattacaactatgtcattcgggctaaagttaaagagataaagactaagtgccatgatgtgactgcagtagtggan

SEQ ID NO: 860 - DNA, 496 bp, Homo sapiens
  misc_feature (1)...(496): n = A,T,C or G
tggnccaggttggcttttatcatgctaccatcgtannnncattcagcttngcttcgcaangncgnggaannccatgaactntgaggggccattcgcgccctctggcctcaaggtgcgctacttgaaggtgtttgaaccgaagctgaactacagcgaccatgatgggatcaaatgggtgcgctacattggccgcagtggcatttatgaaactcgctgctagctgccactaggcagctagcccacctccccagccaccctcctccacaggtccaggtgccgctccctcccccaccacacatcagtgtctcctccctcctgctttgctgccttccctttgcaccagcccgagtctaggtctgggccaagcacattacaagtgggaccggtggagcaacccctgggctccctgggcaggggagttctgaggctcctgctctcccatccacctgtctgtcctggcctaatgccaagctctgagttctgtgaccaaagccag

SEQ ID NO: 861 - DNA, 459 bp, Homo sapiens
  misc_feature (1)...(459): n = A,T,C or G
natggagcccctaagtagatcctacggaagngccgcggaannccgggccaggactttttgccctctgttcccgggtccctcaggcggccacccagtgggctcactcccaggcggcgctccgggcccgcgctccctccctctgcctttcattcccagctgtcaacatcctggaagctttgaagctcaggaaagaagagaaatccactgagaacagtctgtaaaggtatcctaggaatacctgcctgcttagaccctctataaaagctctgtgcatcctgccactgaggactccgaagaggtagcagtcttctgaaagacttcaactgtgaggacatgtcgttcagatttggccaacatctcatcaagccctctgtagtgtttctcaaaacagaactgtccttcgctcttgtgaataggaaacctgtggtaccaggacatgtccttgtgtgcccgctgcgg

SEQ ID NO: 862 - DNA, 457 bp, Homo sapiens
  misc_feature (1)...(457): n = A,T,C or G
attgacccccctttgatgaccctggaagngcgngggcttctccggtcgggtgaaaaatccgggactgtgggaactgccgttcggcaccaccgcacgctatatcctcgaagattacgccggtggtatgcgtgatggtctgaaatttaaagcctggcagccaggcggcgcggggactgacttcctgaccgaagcgcaccttgatctgccgatggaattctgagctaaactgctcgagacggcgctaatgtacgcctaaaactgaaacgagacaagaggcattttcttatttacttttagtaacttacaagtgtctcatatcggcgacagtttaatttctgacggtaataattagatattcagcgaaggaaaaaaccttaagaaaaaagccataaaaaccatgaggttattatggccgatttgaggagggaaagagtaagagcagtttgttaaatgtacg

SEQ ID NO: 863 - DNA, 479 bp, Homo sapiens
  misc_feature (1)...(479): n = A,T,C or G
aaactgataccgttcgnannnnccnccagcttggcancgcacgngccgcggaanttaggcaccagctgctgccgccacagccgtctcaaacgcactatgtggactctccgatctagaggcagattcctgactaatcccagagggctggcccagcctgtgctccccgggctgctaggaagcgatgaccactcttgttagcccaagttgaagaaagccgggctgtgcctgggagccgagagaggcggtaatatttagaagctgcacaggagaggaacatgaactgacgagtaaacatgtatggaaattattctcacttcatgaagtttcccgcaggctatggaggctcccctggccacactggctctacatccatgagcccatcagcagccttgtccacagggaagccaatggacagccaccccagctacacagataccccagtgagtgccccacggactctgagtgcagtggggaccccn

SEQ ID NO: 864 - DNA, 439 bp, Homo sapiens
ggattttaactcaattagtggaggttgctgaccacaggccatgtctagagcacagactatatcgtcacgttactctgttgtcttctcattgttcaattcagcagcattttagaaggcccgctgtgtgctctgcactgtgctaagtactgcgagaaatagaaaagttgaagacgtggttattgtctgaaatggcagctcctgggaaaaagtgccgtagaaagaggagctggctatagaaaatatggtaatttctaacctaaaattaatatgccacttatgatcatacaatacgaacattaacgtgttcaaatatgagaacaggaacgaatgctggaaatatattaaagtaataacaaacaataataatattaacacctaacagtcactaagcatctgtcatgtgccaaacgccacacttgacactttacgcgctttatct

SEQ ID NO: 865 - DNA, 459 bp, Homo sapiens
  misc_feature (1)...(459): n = A,T,C or G
tattgagaccacattgcagngcggtggaaancgccggcccgngagcggcaggagagcctcatgccctggaagccgcagctgttccacctggaccccatcacccaggagtggcactaccgatacgaggaccacagcccctgggaccccctgaaggacatcgcccagtttgagcaagacgggatcctgcggaccttgcagcaggaggccgtggcccgccagaccaccttcctgggcagcccagggcccaggcacgagaggtctggcccagaccagcggcttcgcaaggccagcgaccagccctccggccacagccaggccacggagagcagcggatccacgcctgagtcctgcccagagctctcagacgaggagcaggatggtgactttgtccctggcggtgagagcccatgccctcggtgcangaaggaggcgcggcggctgcangccctgcacgaggcn

SEQ ID NO: 866 - DNA, 479 bp, Homo sapiens
  misc_feature (1)...(479): n = A,T,C or G
attgaaagccnnatcgtagaccctaggccangtggtggaattcctttaaaggagtaataatttttaaaaaggagctcgacctcagccaaagaggacggcgcacgagattagggcttgtagatccactgcctttggttgggccggctgaatcgctggggactgcggccagtctcttaaaaaaggagaacaaaaagccgaagaccttgtgtggccgccgggacaaagcaccttgggttcggcgagaagggacgcgcaggagcgctgaacccagaacacgcgtggccgctgcggaagggcgtccgcccggcgtgcggaacgctgaggggactctcatcctctgtctcgccccctttttttgacccggggatccagccgcattatacacgagtgaccttttaaatctacgtccaccctttacctgcgagaggactgcagcaagcgagttccggaaggctgaatccccaggtcccagccccggg

SEQ ID NO: 867 - DNA, 478 bp, Homo sapiens
  misc_feature (1)...(478): n = A,T,C or G
ntcgagaccccatctgagaccatagtccatgtggtggaattcagggatatgagctcccagctcttcctcccgacatggttgagtggcttttactctatagcagtgaatctaagagtttgccagcagtctcccccgtcagtgcacagtcacgccagcagcaaacactgcccgcgatttcaggggagcctctgcttcacggctgcccttatggggctggcaggagggcttggggagtgcctcccatgggtcctgctggggaaatgtggtggacacacttcactgaagccccgcctccgcagcagcaccagtattgcgctcacacgtggggcagaaatccttttgccacggtctgtatcaatgtcagcactttaattaaagagaaaaaggaagagggagttaagagaacagactccaggagtacatggctccttcctcagtggtgtgagcaggaatagggccttacatgggggtcatcacg

SEQ ID NO: 868 - DNA, 459 bp, Homo sapiens
  misc_feature (1)...(459): n = A,T,C or G
ttcgtagaccctnnnnttcgtagtccctagtcagtgtggtggaattcctcgcctgcgctgtgcactcaacaagagttctgaatttaaggaggttcctgagaggggccgcatggatgttgctgagccctacaaggtgtatcaggtgctgccaccaggaatcgtctctggccagccagggactcagaaagtaccatcaaagcgacagcacagttctgagtcctctgagaggaaggaggaagaggatgccatgcagaactgcacactcagtccctctgtgctccaggactccctcaataatgaagacgagggggccagtgggggagcagtccattcacacattgggagcagcagcagcagcagcagccctgagccacaggaagttacagacacaactgatgccccctttcaaggggatcagaggtccctggagtttctgcttcctccacagccagactactg

SEQ ID NO: 869 - DNA, 490 bp, Homo sapiens
  misc_feature (1)...(490): n = A,T,C or G
gcnaagtagcggccgccnccccatagagnaattgangatcctacgacgngccgcggaanncaaaagagagtgcatggatgtgggaggaaggcagagtcaccctgacctccccttcagcttctctggcctcagtttctctatctgtagtgtgggacccgctgggccatctcagctgctggtaggagtcaccgtcggacctgcatgaccctgtctcacgccctctagcccagtgagtcttacacacagctgccctgcagcatctccaaggcctgagatgccgcctccgcaaccggagattctgctgtgtgggatggggtgggcctggcctcaggtgtttgaaagcttccaggtggtcctgcggagactccacgtgctgcgagggtctggcacacaatggcactcaataaaagctgcctgcgtggggggtgcacttgcatggaaagagcaacagagctgaccctccattccactctctggccgcaaatcttgt

SEQ ID NO: 870 - DNA, 481 bp, Homo sapiens
  misc_feature (1)...(481): n = A,T,C or G
nattgatnacccctgtgcagngngcngtagatcgccgtattgcgagncggctctcaagtgtgatgaaaaatgcacaaaagcatattttcacatgtgaaaagccaacctggccctgaagaactacagcgtgggtacctgaatcaagtcgatcttcaggaaaaagcagaccttcaagaaaaggaagcccacgaactgctggattcaggaaagaacacagccgtgaccaccaagaacctgctggagaccctttccaagcctgaccagatccccttgttctatgctggggggattgagatcctgactgaaatgataaatgagtgcacagaacacactttattcagaatgcacaatggatttagtatcatcagtgacaacgaggtcataagaaggtgttcttccacagcaggaaatgatgcaattgaagaaatgggctgtgtgtctgttctcaagctctggcaagcagtgtgcaccacgaacgagg

SEQ ID NO: 871 - DNA, 452 bp, Homo sapiens
ggtgaggacactagtcattgatgggcaattccttcagtgtagaaacaacatattgaactgttaccttcctctaccacagtagttttcaaactgcagtggtgttaaacctgttaaaacagattgccagccccacccccagagcttcctaatcaggtgttccaggccccaagaatctgcagttgtagcaagctcccaggtgaccgatgctctgctctggactggggaccacactttgcgaaccctgctccccggcaccccatatcctctcgctgtagctctgtcacagtgtgctagaaaacagcatcctgggttgacatcatgatctcacagtggtgttaatggtacgtctttgttttatgggggctctatctgtaatctctgaattcggttggttgtggtggcggctccttctcctaggtaatcttcgtgcttttcctgaggtgtggtgtgtt

SEQ ID NO: 872 - DNA, 455 bp, Homo sapiens
  misc_feature (1)...(455): n = A,T,C or G
atcgagccctntnattgatgacactagacagngcgnggaattccggtgagcaccctgatgaaggccacggtcctgatgcggcagcctgggcgggtgcttgagatcgtgggcgccctccgcaagggcggcggagaccggttacaggtgatttctgattttgacatgaccttgagccggtttgcatataatggaaagcgatgcccttcttcttacaatattctggataatagcaagatcatcagtgaggagtgtcggaaagagctcacagcgctccttcaccactattacccaattgagatcgacccacaccggaccgtcaaggagaagctacctcatatggtggaatggtggaccaaagcgcacaatctcctatgtcagcagaagattcagaagtttcagatagcccaggtggttagagagtccaatgcaatgctcagggagggatataagacctt

SEQ ID NO: 873 - DNA, 447 bp, Homo sapiens
  misc_feature (1)...(447): n = A,T,C or G
nattgagtacattacnccangcggnggaattcgagccgaacaagaccgaaatccagactctttttaagaggcttcgcgcagttccaaccaacaaggcctgtttcgactgcggcgccaagaatccgagttgggccagcatcacgtacggtgttttcttgtgcattgactgttccggggtgcaccgctccctgggcgtccatctgagcttcatcaggtccacagagttggattccaactggaactggttccagctgaggtgtatgcaggtcggcgggaatgccaatgcgacggctttttttcgccaacatggatgcacagccaatgatgccaacaccaaatataatagccgagctgcccagatgtaccgggagaagatccggcagctggggagtgcggccctggctaggcatggcactgatctttggatagacaacatgagtagtgccg

SEQ ID NO: 874 - DNA, 476 bp, Homo sapiens
agaagtgggtttgagtcatttgcagtgcggtggaattccagttttttccacgatgtgagacttgggcagaatccttacctcctctgtactgcagttttctgtttctttaaaattgggatagtggtggcactatcccatagcattcttgtgagtactaagtgaaataatcccgtaaagcacttagagcagtgcctggcactgagtctggtgtggtcatcatcatcatcatcattgcaacttaggacgcatgaggacaagaagcagcgctcatctggaagagactgttctaacgaaggcgggaggatcctagatcagaagaagacaaaccggaagagggagcctaggaaaggaaccacatgcacatttagtgcaaaccatgtaaacataacataacaagactatgtggagcaagggggagtcaggctgtggacccaccagggaatcttgattcatgtttttggccccatcactcacta

SEQ ID NO: 875 - DNA, 494 bp, Homo sapiens
  misc_feature (1)...(494): n = A,T,C or G
aggggccggnnttnctnnnnangctgggagcttcgcannncncctgnancctncgcaanngacgcggaanttcgggactgcaggnccaggcaggacctgccttcagccccctttgtgccgcgggacgcccagcggcacgacgtggagctcctggagagcagggtccctgccattttgcgggacttcggggctgtgagctgggacttctcagggactacccctccgcctcggggctggtccccacctctggcccccgggtgctaccagctcctgctgtaccaagcaggccggtgccaacccagcaactgccgccggtgcccgggggcctatcgggcactgagggggcttcgaagctttatgagtgccaacaccttcggcaatgccggcttttccgttctcctgcctggggcccggctcgagggccgctgtgggcccaccaatgcccgggtcagatgccatctgggcctaaagatccctcctggctgtgagctggn

SEQ ID NO: 876 - DNA, 451 bp, Homo sapiens
  misc_feature (1)...(451): n = A,T,C or G
gcacccagtggaaaccnctggagcatcggaganncttaggaagangagactgaggacccccaagtgttccatccctaaggaaagcttgggataccaattttcttccatcctctcccaagcaccccagccaaggcccatagagccagtccggaatgatccctctatggccaagctctggttcaaattccagcggtacttccgccggaaacctgtgcgcttctttaccttcctggcactctacctgactgctgggagccttgtcttccttcactctggctttgtgggccagcccgctgtctctgggaaccaggcgaaccccgttgctgcaggaggcccagctgagggtgctgagctgtccttcttgggtgacatgcatctgggcagatgttttcgggacacaggagaagcctcaagcattgctcgcaggtacggaccctggttcaagggcaag

SEQ ID NO: 877 - DNA, 473 bp, Homo sapiens
  misc_feature (1)...(473): n = A,T,C or G
agggcccggtttctnnncccctcntgctctgananncctacntnctctgannncncggnntnnnnaggnaaaggnggaganngggnngaaannggnggttgaaaaanaaggngnagaannngaaggaggnnnanggacaggggaggaanttnctagaganngaggggagcaanccgcaaacggagggggncggccggggccgctncaccacttacgaaatcagggtcaagacaaatcttcctattttcaagctgaaagaatctactgttagaagaagatacagtgactttgaatggctgcgaagtgaattagaaagagagagcaaggtcgtaattcccccgctccctgggaaagcgtttttgcgtcagcttccttttagaggagatgatggaatatttgatgacaattttattgaggaaagaaaacaagggctggagcagtttataaacaaagtcgctggtcatcctctggca

SEQ ID NO: 878 - DNA, 469 bp, Homo sapiens
  misc_feature (1)...(469): n = A,T,C or G
tgcanntacgcaaacgtangannncnctcgtnanctaacggaagngccgnggaattctgcaggacctgtccggcaggatctccagagctcggcacaacgaactctgaaggcattgttgagcccagcccggcagggaagaggccagcgtgaaggacctgggctcttggccgtggcatttccgtggacagcccgccgtcagggtggctggggctggcacgggtgtcgaggcaggaaggattgtttctggtgactgcagccgctgccgtcgtgacacagggcttggtggtggtagcatttgggtctgagatcggcccagctctgactgaaggggcttggcttccactcagcatcagcgtggcagtcaccaccccagtgaggacctcgatgtccagctgctgtcaggtctgatagtcctctgctaaaacaacacgatttacataaaaaatcttacacatctgccaccggaaag

SEQ ID NO: 879 - DNA, 490 bp, Homo sapiens
  misc_feature (1)...(490): n = A,T,C or G
aggncccgctttccnnnnnccctaataccctggtannncctagnnccctccganancccgcggaanttgnaagagaaaggcggagactngccggaggtcacgcagccaggcaggatgaacacggcatggaagacgacccgagctcctcctccgaggggagagttctccctgcctcgggctgttcctagctgactttatgacttgaaatctgttttccagccacccccctcccccagcactttgcagaacctccccctgccctcccacatgctggacgcagtccctcccacaggagccccccataggtatgctttgccttggcccatacgaggccccttgtgcagtgcacaccacccccatccactccacccgccctctcccgctcctccggccatgaccgcagcagacaccaggccttttctgtggaatcacacccgaggcctgttctgttcaaacttagccaagcaggtgcctaaataaacccccgccc

SEQ ID NO: 880 - DNA, 545 bp, Homo sapiens
  misc_feature (1)...(545): n = A,T,C or G
cgtctatcctcgtttctgctatatctgatattctataatattgtcagtaatactttaatagactacgttgccaaggcaaaannaaaanttttgaatacattagnactttgaggaccaatncaancactctttacgcagggatcttcctgatgagcgttggaggaaatatgctcatcatcgtgggcctgggactgagccgccgcctgaggactgtcaccaatgccttcctggtctcactggcaggcagcgacctcctgctggctgtggcttgcatgcccttcaccctcctgcccaatctcatgggcacattcatctttggcaccgtcatctgcaaggcggtttcctacctcatgggtgggtgagacaaccaccccacccccacttgccactctccccgcctaaagctcttgtggatgtaggggtcttccccggttggcagggaggggtgtgaggaagtcccactgatgcttgtgtagtgcaagtttcctaggtgactccttcctttctcttcccttgtttaggggtgtctgtgagtgtgtccacgc

SEQ ID NO: 881 - DNA, 485 bp, Homo sapiens
  misc_feature (1)...(485): n = A,T,C or G
cggccgnnnnnnnngnncctgagaccctagccaggctgagaactctttgttgcttcctttacagtgtggtgtgtgtgctgattgttgggtattttctatttatattggccataagctgattaggggcctgcttacttgattgttttagaagagagctttggtggggcagggggcggtaagtgcagaaggatggatggttggcaagcactggggaagaggttgtaaaattgcattttcttctttggaagcagcagtatcttagtttgctttggtatgtcttagtttggtttggtatgtcttgttttccgggaaagacaaaggaagaggaaaatgacagctttgcaggtaaagaaactgagaggcttctctccctctataccaagagtaggctgaagacccatgtccagaaagctgacagaaaggtgcctgggtgaagagccactgagcttgatgctcangaatctgagggcagagctccatgccag

SEQ ID NO: 882 - DNA, 474 bp, Homo sapiens
  misc_feature (1)...(474): n = A,T,C or G
cgcgcnctcgatcccatcgaagtccctagtcagtgtggtggaattccccaagggctaggattacaggcgtgagccaccacacccggcctaatattatacttttatatttttccatgccactagatatagctctacttcattattttttactgttgtatgatattccactgtatgaacatatcacagttaatttattttttctcctgttgaaggacttttgagatatttcttatttttttttctgaaatagcacttcaaacaatgtaaaagaaagttcaaccttccgatttctcccaataaaaacatatcctggagaaaagatatttcttgtagtggttttccaactctgctgctcagtcctaagggttctgtgcagtgactcaggaatctctccggggttgggaacaggtactgtgcaggagatgtaggtcccaacggagcaccctgctttaactcaaacaccaaccctgcttt

SEQ ID NO: 883 - DNA, 368 bp, Homo sapiens
gaagcggctttgagatcatattcagtctgatggcgtggaatgttgaagagagagcacgattgtggctggaagcatggcgtttatcattgtcaggatggcacatttctgttcttgctgatcccattgaatcgccgcgcccggaactgttcccgacgcaaacattgattgtctggacaggcatggcaccaacgagaaggcaaaacgaacttttacaacactggggtgagcaaggttataaagtcatctttcatgccccctaatttcacctttatcccgccccttagacagaatgttataatctgaacccacaacagcgtttgtaccggagctggtccgttgcaaaatgctcaccgggagaattcgatatc

SEQ ID NO: 884 - DNA, 477 bp, Homo sapiens
  misc_feature (1)...(477): n = A,T,C or G
agcgggtttcggncccttcgtagaccctagtcagtgtggtggaattccttttctcaaactcctgacctcaagcaattctcttgccttggcctgctaaagtgctgacattacaggcatgaaccagtgagccaagccacaataatactttataatgattgaatgagtgaattacataaccagtgaatgaaagcattatggctgctttgtatctggagttaccaggagaggtattatcttagatcaacttctccagaatcagattctgagagagggaaaaacggacaactgaattattaaggaagtgctgccgggggaaaccaataagagagtggagagaagcaggacaggggaggggaggaggccaagcatgggtgcaatcaactgattttgggcaaagtcttcagactgactggcaggaagctccggagcataaattacacttcacagtttgttccacagtaggaaccaaagctgggt

SEQ ID NO: 885 - DNA, 497 bp, Homo sapiens
  misc_feature (1)...(497): n = A,T,C or G
agggnccggccttgctnnnnnnttaggtngttagtananncnctagttgtctcgccannncncnngnnnnnggnnggacaganggacaaannaacagcattctgcacttggaatgacaaaactttatgcaagaaaagggtcatgggagaatatctagtccagcactctaatgggatagagagggaaactgaggccagcaaaaagcatgtcacctgacccagtcacagcccttggatacagagggaaactgaggccagcagaaaggatgtcactggacccagtcagcccttggatagagagggaaactgaggccagcagaaagtgtgtcaccagacccagtcagcccttggatagagagggaaactaacgccagcacaaaggatgtcaccggacccagtcagcccttggcctaagacctgcagacaggccacctgctgcttctgtgacccccacagcccagactcacacatcttcctccaggtcagggagtgaagggg

SEQ ID NO: 886 - DNA, 475 bp, Homo sapiens
  misc_feature (1)...(475): n = A,T,C or G
ggcgcctttgagtccatttgcagtgcggtggaattcccctgttctataacaagtaccagagcaacgtggtggtcaaataccacttccgctcgcgctctgtgctggtgcagaggagcctcccgggcgccggttacaacaacaccttcccctactcctggggcggcttctccgacatggacttcatggtggacgagagcgggctctgggctgtgtacaccaccaaccagaacgcgggcaacatcgtggtcagccggctggacccgcacaccctcgaggtcatgcggtcctgggacaccggctaccccaagcgcagcgctggcgaggccttcatgatctgcggtgtgctctacgtgaccaactcccacctggctggggccaaggtctacttcgcctattttaccaacacgtccagttacgagtacacggacgtgcccttccacaaccagtattcccacatcccgatgctggattacan

SEQ ID NO: 887 - DNA, 490 bp, Homo sapiens
  misc_feature (1)...(490): n = A,T,C or G
agagggccggntttnnnnntttgtagttanctancgnannnncnttcattttgtcttcgcaanngcnnnnnannnnnnngggnngnggnggngnnnggnngnngggagccccgaaaggaaggcacggggggaaagggaaagcagaagacagaaaaaaggggggagacaccaccgactctcttcgggaggaagacacgggacgatccctttctggagcatgtatacaagctgtgaacgcaaacgatcggaaggtgaagagaagacattaacaggggacgtgaaaaccagtcctccacgaactgcaccaaagaaacagctgccttctattcccaaaaatgctttgcccataactaagcctacatctcctgccccagcagcacagtcaacaaatggcacgcatgcgtcctatggacccttctacctggaatactctcttcttgcagaatttaccttggttgtgaagcagaagctaccaggcgtctatgtgcag

SEQ ID NO: 888 - DNA, 210 bp, Homo sapiens
  misc_feature (1)...(210): n = A,T,C or G
aaaaccanncctncacaaactgcaccaaagaaacagctggcntttattcccaaaaatgctttgcccataantaagcctacatctcctgccccaacagcacagncaacaaaagggacgcatgccnactatggacccttctacctggaatactctcttcttggagaatttaccttgggtgtgaagcacaagctaccaggcgtctatgtgcag

SEQ ID NO: 889 - DNA, 467 bp, Homo sapiens
  misc_feature (1)...(467): n = A,T,C or G
gccacttgcanaaacaaggagacccccggtatcctacggaagnngcgnggaanncgnggaaggagcatttccttagaagtcatccagatgcttctggaggaggggtaggagattcttgggctgtttgccttgggtgagcccaaagaacttgccccttttctccttgcattagcaagctaggtctggctgcgtggagctggcaagtagatttcagcaacttgagcttgagttgatgatcaattaatagtggctgccagttgtgctggcgtaagtggcccacatcatggggaaggagtgctgtgattgactagtaatggctaccatgggaaagggaaggggaagcagtagcactaatgctatgtagatgtcatctttgatctggctaggccctgggaatcgggtttagtcatcctgggggaactgtgttaactctttcatgccactggtgaggcatttggtaatttgct

SEQ ID NO: 890 - DNA, 476 bp, Homo sapiens
  misc_feature (1)...(476): n = A,T,C or G
gcgcccctcganncccttcgtagaccctagtcagtgtggtggaattcctcagcactgtttctgttatacttcattcataattcccagcgctgttggacgaggatgggaagaccgcctgtggccatgagccctccccggtgctcctggggctaaggctggggctgcagccatggggctgggtcagccccaggcctggttgctgggtctgcccacagctgtggtctatggctccctggctctcttcaccaccatcctgcacaatgtcttcctgctctactatgtggacacctttgtctcagtgtacaagatcaacaaaatggccttctgggtcggagagacagtgtttctcctctggaacagcctcaatgaccccctcttcggttggctcagtgaccggcagttcctcagctcccagccccggtcaggcgccgggctctcctcaagggctgtggtgctggcccgggtgcaggccctga

SEQ ID NO: 891 - DNA, 484 bp, Homo sapiens
  misc_feature (1)...(484): n = A,T,C or G
agagcggtnnnnnaccaggtccctcgtacatgcagaaacctaccggnactggtttggggaaactgcttttctctgagtctatattggtctgcacaaataaactaaaatgctttttaagttgttttatgatctatatagaagagatattgacaaacttctcctgcttagaaaataaaagggacacttggaattaacaaagggggttggtagatttaccattgaggttgatgaacttaatatatcatctggtaaaacaagcgtcaggaaatatccatcattcaaatgttttggctgacagcaaaatgctcaaggactaatcccacagctgaaatgtaggggaaaatttcccctacatttggctccttctggctcctacttggtctacacttttggaaggactgctgagattgtatccttggagtcagggcgagagtgccccctccttttccccacttggaaaccacagtttgtggaaagtgaagaa

SEQ ID NO: 892 - DNA, 480 bp, Homo sapiens
  misc_feature (1)...(480): n = A,T,C or G
gggcgtnnccccaatgagactangacatncgannnnccgnantnttngcacccgcgcatccggtggacggcagaccatcaaggcgcagatcttggactccgctggccaggagcgctaccgcgccatcacctgcgcgtactaccgcggtgcagagggcgccctgctggtgtacgacatcgccaagcacctgacctatgagaacgtggagcgctggctgaaggagctgcgggaccacgcagacagcaacatcgtcatcatgctggtgggcaacaagagtgacctgcgccacctgcgggctgtgcccactgacgaggcccgcgccttcgcagaaaagaacaacttgtccttcatcgagacctcagccttggattccactaacgtagaggaagcattcaagaacatcctcacagagatctaccgcatcgtgtcacagaaacagatcgcagaccgcgctgcccacgacgagtccctcgtgaacan

SEQ ID NO: 893 - DNA, 489 bp, Homo sapiens
  misc_feature (1)...(489): n = A,T,C or G
agcggtnnccccaattgagnactgagagncgtgngcaaggactcccggctcgttggcacgccggcgagcgggcccggcgatctgggcccaaggctgggtacctgcggtcgggggtcccgccccgaaaaggggctacagctctgagatgaagacggaggacgagctgcgggtgcggcacctggaggaggagaaccgaggaattgtggtgcttggaataaacagagcttatggcaaaaattcactcagtaaaaatcttataaaaatgctatcaaaagctgtggatgctttgaaatctgataagaaagtacggaccataataatcaggagtgaagtcccagggatattctgtgctggtgctgaccttaaggaaagagccaaaatgagttccagtgaagttggtccttttgtctccaaaataagagcagtgattaacgatattgctaatcttccagtaccaacaattgcagcaatagatggactcgctttaag

SEQ ID NO: 894 - DNA, 485 bp, Homo sapiens
  misc_feature (1)...(485): n = A,T,C or G
gaggcnccccccactgaaactgaggncntcgcaagngcgtggaattccctggcttttctgagagtgtctgaaagggaacaagggcatgcagctatgtggggatcatggcaggtctgagcaagcggccttgtgaatgctggggccagggcagcagcaggacctgtggccagctgtccagggtgctgctgtcagaggaatctgctccctctgtcaccggttgactctaaacaggacccaaaatcctgagggcttcagattgcccagcttgggttgtgacatggtttttccactgccgtggagttgtggcagtggacggtccatgatagcagcggggcaccagaacctcagaggcagagcaggtcagtttcctcggggaagtggtttcattcccacaagagagagggaagggatcctgagtggaggcgatgggctcaatttcgcatgtttgtggcctctggcgatgtccggcgagggatcggaaagct

SEQ ID NO: 895 - DNA, 448 bp, Homo sapiens
  misc_feature (1)...(448): n = A,T,C or G
aatgaacctgagaacgtcgnggaanncgaggagggcgagggggaggtcagtgcctcgcaggcagccgtgcaggcggcggacacagtacgaggctctgaggtgctacatccgctccaagccggccctgtaccagaaggtgctgctgtaccagccctttgagctgcgggagctgcaggcagagctgaggcagaacggcctccgtgtgtcctcgcgcaggctgttggacttcctggacacccactgtatcaccttcaccactgccgccacccgcagggagaagctccagggcaggaggcggcagcctcggggcaagaagaaggtggagcggaactgatggggccatcccgaccccaccccaacctgccatcaggagtccccacccccgccatttgcagggaggacctgggacacccagcgtgggttatgcctccacaggcattgctgggcc

SEQ ID NO: 896 - DNA, 496 bp, Homo sapiens
  misc_feature (1)...(496): n = A,T,C or G
gcgcgagggcgcccaattgaaacccttatcgtagaccctagtccagngcggnggaattcgatgggaaaagctgtgtctagcccggagatgaaccagtttagggaccattcccttgagcgcgtacgggctaatgaagtgtcgatccagttgtgctggactccctcaaacaccaaacttttctaaaagcagttttcttgtgcacatttaaaatggatgtttttctgaaatgtaatatgcactttctcatcttcttaaacagaaaatgcaagaagcatgcaacctttgctgttggcttgatttgttttacgtatttgtagagaatcggctggtgttgcccctagggaggacttgccatagggagagggtttgtgcctctccgaacagccccagctcctgagtgttttgaatgtcaccctccattcatgtggaaaccaagcttgggcagtgcagtcagacctcagttaaaatatgggtcctgccagctactgctttaagt

SEQ ID NO: 897 - DNA, 412 bp, Homo sapiens
gccctgcgacgctccaccactcgagacagaaacaagaaggcagctgcctgcttcctgctcagcactggggactatgcctgcgccgatggtagtgtccggaaagagacctgccaagacgccctctcgtgcaactatgcccaggctgaagtcctcaccctctcttaaagcggcaccaacgtgagagagacaggcagacagacagaaagccagaggcttagggaaactctggaacccagacaagaatcttttcgctgggaaagactcagatatccttgtttgcacaggactggtggaaaatctcccatgcgaccctcggggcccagagccatctgggtctgatgttctgttccattgtacatcgaagagatatatatgcacatatagtatctatattcatacatattatactctg

SEQ ID NO: 898 - DNA, 467 bp, Homo sapiens
  misc_feature (1)...(467): n = A,T,C or G
nttcgagtaccctagtccatgtggtggaattcctctttggttctcactacagcaagctgcaggaagtggaggtccctgaggactttggccctgtgcgcaccgtggcagagggccacggagacacactgtacgtggggaccacccacaattccatcctgcagggctccgtgcacacaggcttctcactgctggtccaggcgatcaaactgaggtcccaaggagatgtcacctgcctagatgactgcgctcggtcagtaatagaaagccgaaggtcagagccatcaggtttagtgccctccatgaggtccctcagacttctgggctctgtctggatgcaggcagactccagaagcgccttcccagatccttggagctggagacctgggaggtgtgtggccagggtgcagcctgtctgacccctgagatcaagctctgagccaccatgccctcctgccttccattgtgca

SEQ ID NO: 899 - DNA, 469 bp, Homo sapiens
cttagattccctttccaggggggattttgaaacctatctgcactgccctgtgtatagaagtctagcacatacaattatgtagagtacataatacttgatgataatttgtgatgttactggtttacgtatttactatactcttcatcattattttagagtgtactccttctacttatgaaaaaaagttaactataaaatggcctcaggcaggtccttcaggaggtttccagaagaaggcatcattgtcacaggaggtggcagctccatgtgtgttactgggacacgatgtggaagtggaagaaggtgacatggatgatcctgcccctgtgtaggcataagccaatgtgtgtgtttgtgtcttacttcttaacaaaagttaaatagtaaaaaacaattaaaaattttaaaaacagagaacagcactaaggacagaaaacaattttgaacatccgtacagtatgtttgtatt

SEQ ID NO: 900 - DNA, 538 bp, Homo sapiens
  misc_feature (1)...(538): n = A,T,C or G
cagcatgcgatgacgtcgacactacctacgcagttgtttcgcttaacaggcaatcactcctattaccanacaagccnacgcggaggnnnnnnaatgagacatgagactctccccangcggggaatcactgctggaagagggctgggtcctgggtccagatcacatcatgaagcttctgcggttcgtgcaccagaactccgtcttccactgccccacgcacagccaggctggagtagccgagagctttgaacgggagcagctgctcttccgccaacccagcagctactttgtgcagttcccgcaggccatgcagcgctgccgtgaccacatgatacgtagcctacagtcagtgggcctgaagcccatcatccctcagggcagctacttcctcatcacagacatctcagacttcaagaggaagatgcctgacttgcctggagctgtggatgagccctatgacagacgcttcgtcaagtggatgatcaagaacaagggcttgggggccatccctgtctccatcttctatagtgtgccaaan

SEQ ID NO: 901 - DNA, 415 bp, Homo sapiens
ctcttttagatattgtatcaatctttagaaaaggcatagtctacttgttataaatcgttaggatactgcctcccccagggtctaaaattacatattagaggggaaaagcttaacactggagtcagttctcaacaatttagaaggaaaacctagaaaacatttggcagaaaattacatttcgatgtttttgaatgaatacgagcaagcttttacaacagtgctgatctaaaaatacttagcacttggcctgagatgcctggtgagcattacaggcaaggggaatctggaggtagccgacctgaggacatggcttctgaacctgtcttttgggagtggtatggaaggtggagcgttcaccagtgacctggaaggcccagcaccaccctcctttccactcttctcatcttgacagagg

SEQ ID NO: 902 - DNA, 437 bp, Homo sapiens
tgaaagatcagtgaggaccgcgtgctgtaaacagagtagagggctcagctccctgctctgccccccacctgctcccagactcagctgaactggtagtcctgttacaggctcctctgccttagaacccaggagtccacacccacagcccctcctccctcagacccaggagtccaggcccccagccccttcatcctttaggacccaggagtcctagccccagtcctgaacaaaccgtcccctctcacccagccaggctgccctctctgtccccagagaggactcagggagccaaaggcccagtgatctcagctcccgcctcctagtctggccctggcacagccagccccagctgttggggggagagaggaggtagccagccctgcctgtccctcctggaaggacaaaagccgattaagggcagtgccaggctcagctag

SEQ ID NO: 903 - DNA, 490 bp, Homo sapiens
  misc_feature (1)...(490): n = A,T,C or G
gagggnaaatgagaccctagcattgaggngcaattcgaacacacgatgccaggccaggaactgggaccaccatcttgctgatggaaggaacaacaggtggcccaggacatgctcctgcatactcctgggtgtcccagggactgtgtgctcacgagcactgtggtagagcactggccctgccttgagaagagacacaggtctcccgtccctgcaccagctgagagagacttgccgcaaagcacaaggctggcagagatttatgtatgacttgcacagacacaaaaatatacagacaatcaaaacattgatatattcaaactcttctttaaattccaatcttattgcaacaactctgtgaattgcaaggtcccagaatctgccttctcacatactctaccctcattcatncttttgggctaattgatgagcatcttatttcttatctctaaaaattatcagcaaaggctacttcagatggccactttagtcg

SEQ ID NO: 904 - DNA, 416 bp, Homo sapiens
  misc_feature (1)...(416): n = A,T,C or G
ctcagaggccagtagggaatggggggaaagcatccaggccctcggcagggaaccaatgtcaaaaactagtcaagctgtgctcgagcttcaactaggttgtgcagtctgcctactatggaagcaattttctctcctatcccaagtgtcagagcagctggaagttcatggcaacagtgcacagcaccatgaccctgtggcacacttaactgtcccataagaactaggaaccatctaactatgcgaaactagcgccctatgcaggcaatccagaattctatcccgagcaagcatgcctgggacaaagtaagctgtcaaactagcaccacgagtgtttcgagtctttctgtcaatgctattttgctactccttcattcatgttgttgtctgctctgtgccttagcaaaaggtgccaaaan

SEQ ID NO: 905 - DNA, 245 bp, Homo sapiens
cactgagagctctggtgcacctggcatgccccgactcctcacacagcaacaacagggacagtgacagggacctgagatggggtggcccacctggcttgcagctggcactgggcacattgcccagaagttggtgagttctcatgtaggggcagaggtgtgtgtttgagggagcaaatagcagcactgtctgctgtggcatgggtctcctgcgtaaggtcagagggattcgaggaggcccagggatt

SEQ ID NO: 906 - DNA, 482 bp, Homo sapiens
  misc_feature (1)...(482): n = A,T,C or G
agagcggtnnnnnacccagggactgactgcgtgncgaggaacnccacatcgagtccctaacaagggttcgggctcactgtggaccaccaagtttttcatccccctcactaccttcctcctgtacaactttgctgacctatgtggccggcagctcaccgcctggatccaggtgccagggcccaatagcaaggcgctcccagggttcgtgctcctccggacctgcctcatccccctcttcgtgctctgtaactaccagccccgcgtccacctgaagactgtggtcttccagtccgatgtgtaccccgcactcctcagctccctgctggggctcagcaacggctacctcagcaccctggccctcctctacgggcctaagattgtgcccagggagctggctgaggccacgggagtggtgatgtccttttatgtgtgcttgggcttaacactgggctcagcctgctctaccctcctggtgcacctca

SEQ ID NO: 907 - DNA, 479 bp, Homo sapiens
  misc_feature (1)...(479): n = A,T,C or G
aggatgggccnnagattcccccaattgagacccatagatagccatgaggaantcccttctggcaaattcaagaggcatgagtggaccgagagcacatccagcatttgcatcacctttctggcacctcccatagttacagccactacattcccaccgccgcctgtcatccctcacgtctctgtggccacccgggtgtcaccgccagcaccaggcactgctttcacgtaaaatgtccaaatcacatcttcagcaagaaagcaacctcacggattgccccgcctcaaggtctttccaccctctttgagatcagcgttcggagaggtccccgccagcccggtggctgccctcaagtcccgtcacatgtctcaagggtccagcgttcgaggaagcactgttgtagatgacagagctttttgtttcacagctgcggggattctgctgaccatcttttagaaaattatttcataatttattctggc

SEQ ID NO: 908 - DNA, 456 bp, Homo sapiens
  misc_feature (1)...(456): n = A,T,C or G
gtggggnnngggggnncctgagaccctangactgagcggcgattgcggncatcggtaccccccaagaccgcaaaaactctgtgtggacacaggatggaccctcagcccagatcctgcagcagcttgtggtcctggcagctgaagccctgcccatgttagagaagcagctcatggatccccggggacctggggacatcaggacagtgttccggccgcccttggacatttacgacgtgctgattcgcctgtctcctcgccatatcccgcggcaccgccaggctgtggactcgccagctgcctccttctgccggggcctgctcagccagccggggccctcatccctgatgcccgtgctgggctatgatcctcctcagctctatctgacgcagctcagggaggcctttggggatctggcccttttcttctatgaccagcatggtggagaggtgattggtg

SEQ ID NO: 909 - DNA, 480 bp, Homo sapiens
  misc_feature (1)...(480): n = A,T,C or G
agaggcnccnnagaggcccccatagagaccaactgatancntaggacanngcgtggaattccctcagatagacccagctgatgaaagatttattcgagacatatatgagatgaagaaatttatggaccgaagtctggacatcagtgcctttaggaaagaaaatgatgactagtggaaaagagggagcgaaccatttccaaaaaaaaaaatggaacctgttgtttttgacaaggtgaaaatgccacacaaaaaagaagacccacagctacctgggaaaagctccccgaaatccacagcgcctgtcatggatttgttgggccttgatgctcctgtggcctgcttcattgcagatagtaagaccagcaataccctacagaaggatttagatctgttggcctctgttccatccccttcttcttcgggttccagaaaggttgtaggttccatgccaactgcagggagtgccgactctgttcctga

SEQ ID NO: 910 - DNA, 231 bp, Homo sapiens
  misc_feature (1)...(231): n = A,T,C or G
tattgtngannccctcaccggcctcacactagtatcgcatgtccactatccagaacctccaatctttcgacccctttgctgatgcaactaagggtgacgacttactcccggcagggactgaggattacattcatataagaatccagcaacggaacggcagaaagacactgactactgttcagggggatgngatgattatgacaaaaagaaacttgtgaaagctttcaaaaa

SEQ ID NO: 911 - DNA, 482 bp, Homo sapiens
  misc_feature (1)...(482): n = A,T,C or G
cgctcttcagagggggcnggttttgaaacctacggtagatcatcgcacagngcggnggaantctgctgaggtctccaggctcctggagtgcctcatgctggctaagttctttctgggcttctccaggggttctgtgtgctcttggaggtccctctgctagtggtggctaactagagagtcagcaggggggtgactgggaaagagggagaggtgatgttgcctgctactcccctccttgcggaccctcataccacatgacgtggcggcgtggggccaggaactatggaaggcagaaggcgggcgcagtgggcagctctctgggctcagcttgctgagggggcctcctgtcctggctctttctgggagacctcattcttctgcccatgttcctgcctcacacattccccgtgatgaacgctgtgggcggggcccggcctgtgccctcagtcccacagctcctctagtgtacctgccccgtggag

SEQ ID NO: 912 - DNA, 478 bp, Homo sapiens
  misc_feature (1)...(478): n = A,T,C or G
gaagatcagggggggngggttttgagacccatgatagtcttgcggaanncccaggagccagaggagctggcacggcgacagcgacggcacccggagctgagccatgttgaggctgtggccagcgtcatcatctaccgcaccctggccgggctactgcctcataactatgaccctgacaagcgcagcttgagagtccccaaacgcccgatcatcaacacacccgtggtgagcatcagcgtccatgatgatgaggagcttctgccccgggccctggacaaacccgtcacggtgcagttccgcctgctggagacagaggagcggaccaagcccatctgtgtcttctggaaccattcaatcctggtcagtggcacaggtggctggtcggccagaggctgtgaagtcgtcttccgcaatgagagccacgtcagctgccagtgcaaccacatgacgagcttcgctgtgctcatggacgtttctn

SEQ ID NO: 913 - DNA, 436 bp, Homo sapiens
  misc_feature (1)...(436): n = A,T,C or G
nattgtagacatattgangacccatagaccgtgtggtggaattcgctcctgggacaggtcagcgtcaggggcagcctgctgtctgctctggagggcggcgctcacctctgggtcgcagtccccacgatcagccagcagctgtgagagaggagcaggtcctcagcccatgccgcccactaggcctcagaccacaggggaggggctctggcagaaatagtcgagttgtattgccagccaggcaggcacatggcccaggcagctgtcaattctcatgtcccccacgtggcccaaggtgggcatcttgacgttacctctgccacgtgtgagaagctctttttcgggcaccgaggtattaactgcagcagaaaaagacgagcttttgttatcagttccacggggttgccctagagagaaaacaggcaaactcacaggttag

SEQ ID NO: 914 - DNA, 431 bp, Homo sapiens
attgaagaccattggacatctggtggaattcccggaagctgttcgtggggatgctgaacaagcagcagtcggaggaggacgtgctgcggctgttccagcccttcggggtcattgacgagtgcaccgtgctccgggggcctgacggcagcagcaaaggctgtgctttcgtgaagttctcctcccacacggaggcgcaggcggccatccacgccttgcatgggagccagaccatgccgggagcctcctccagcctggtggtcaagttcgccgacacggacaaggagcggacgctccggcgcatgcagcagatggtgggccagctgggcatcctgacgccgtccctcacattgcccttcagcccctacagtgcctacgcccaggctctcatgcaacagcagacaacagtcctgtccacctcgggcagctacctg

SEQ ID NO: 915 - DNA, 459 bp, Homo sapiens
  misc_feature (1)...(459): n = A,T,C or G
atagatcaccctngnnttttgagaccttagtcagngcggnggaattccggagctgctcatcgccctggccctgcgcgcgcaggacgagcacaccaaggaggcgctgctggctcacagcttcctggcccggcggccagggggcactcaaggctcgcccgaagagacctccaggtggctccggtcggaggtggagaactggctcctagccaagtcaggctgtgaggtgaccttcaacggaactcgggccctggcgcatctgcaggccctgacccccagcatgggattgtacccacccccgggtttccccaaactagacccagtggctccgatcacttccgagcccccgcaagccacgcccagcagtaacatctcctgagtagaacctacctccctgcccagtcagcaggctagaaactaagccccgcctccttcacgacaggctgtcaattacggttattn

SEQ ID NO: 916 - DNA, 428 bp, Homo sapiens
cacgctgaacaggaacagaaatgaataaaagtcgctggcagagtagaagacgacatgggagaagaagccaccagcagaacccttggttcagactccgtgattctgaagacaggtctgactcccgggcagcacagcccgctcacgattccggccacggtgatgacgagtctccgtcaacctcgtctggcacagctgggacctcctctgtgccagagctacctgggttttactttgaccctgaaaagaaacgctacttccgcttgctccctggacataacaactgcaaccccctgacgaaagagagcatccggcagaaggagatggagagcaagagactgcggctgctccaggaagaagacagacggaaaaagattgccaggatgggatttaatgcatcttccatgctacgaaaaagccagctgggtttt

SEQ ID NO: 917 - DNA, 474 bp, Homo sapiens
  misc_feature (1)...(474): n = A,T,C or G
cgcgcnctcgagatcctttgaagtgcggtggaattcccccgtttagaactcattagctgtgtgactctgggtgagtcccttaacccctctgagcccgggtctcttcattagttgaaagggatagtaatacctacttgcaggttgttgtcatctgagttgagcactggtcacattgaaagtgctgggtaagaggtagctcttgttgcttcccgttcagcgtcacatctgcagtggagcctgaaaaggctccacattaagtcacctgtgcacagccatggctggaatgatgaaggggatacgctggagttgccctgccatcgcctccatcagccagacgaggtcctcacaggagaaggacagctcttccccaccctgggatctcaagagggcagccacggagtggggaggccccagatgcgctgtgccaaagccaggtccgaggccaaagttctccctgccatccttggtgccgtn

SEQ ID NO: 918 - DNA, 472 bp, Homo sapiens
  misc_feature (1)...(472): n = A,T,C or G
tggggttcccgggattgagncctaacgtttagtccagtacagngcggnggaantccnaggagtaacctcatctgctttggctattcagatggtgtggttgttggagactaatgcaaaggcctcatagaaggaaataccatctacgctaacaagggcggtggtgtgtggatgatgtcatccatcctcccccatgtcaccagcaaccacgtcagctacaatggcctgtatggagtggcagtatttagccagaaggatggctccagcgagttacctcgaggccacagggctcaagagaacttcagcgaggatggggacgccatcctctgggagacagagctggagaaggaggacgacccactgcgccggcccatcaccatagctcttgttgagtctaacagtattaatcacaatggagcctcaggactctatgtccatagcagcgaggcactgcatgtcatcaccaatgagatcn

SEQ ID NO: 919 - DNA, 458 bp, Homo sapiens
  misc_feature (1)...(458): n = A,T,C or G
nttcgagtttcactagcccagtgtggnggaattccccacgccccctggcagcgctcaaaccagtgaggctgcacagcttccaggaacatgtcttcaagcgagctagcccttgtgagctgtgccaccagctcatcgtaggaaactccaaacagggcttgcgatgtaagatgtgcaaagtcagcgtccacctctggtgctctgaggagatctcccaccagcaatgcccaggcaagacgtccacctccttccgccgcaacttcagttcccctctcctggtgcatgagccgccaccagtctgtgccacaagcaaagagtccccacccactggggacagtgggaaggtggaccctgtctacgagaccctgcgctatggcacctccctggcactgatgaaccgctccagtttcagcagcacctctgagtccccgacaaggagcctgagtgagcgggatgagctg

SEQ ID NO: 920 - DNA, 454 bp, Homo sapiens
ttcttgaccataggccgtgaggaccgtttccggaacatcacttggccctcgctctcactcgcggtcgcctggccgttgtcattgtttctccgctgtcactttttcaagccccaggctggctgcttcagaagcccctgaccccatggaggagtgggacgtgccacagatgaagaaagaggtggagagcctcaagtaccagctggccttccagcgggagatggcgtccaagaccatccccgagctgctgaagtggatcgaggacgggatccccaaggaccccttcctgaaccccgacctgatgaagaacaacccatgggtggaaaagggcaaatgcaccatcctgtgagccccgcacccggcccctctcacaccatcctgtgagaccacgcccggtcccactcccaccattttgttagactgtgcccagtcccactcactccatcctgtgagtccc

SEQ ID NO: 921 - DNA, 433 bp, Homo sapiens
  misc_feature (1)...(433): n = A,T,C or G
atactctgtctcacaaaaaaaataatgccctttaaataatgaataatagtgatagaaaatgtcatttcttggacaaatgaaaaattgaaattaatgtatataattagatattattagctactcttaggtagcttcatttgttgaaagtttgacaagtgaatgaagttcacatctggaaatcgttgaacatttttcgttcatggaactcaatggctacgttagtcgtttatgcttttcactgttgtggtaggggctttggaagtaaatgccatcaacaatggatacagaagacctggatttggaataagggcaaaatttatttgatggggctgaattgctctgccaggagcatttggtatgagatgaaatggcctctcttgagactgagctgccaacctggcaattattgtctgctaaggttctctgtattcan

SEQ ID NO: 922 - DNA, 460 bp, Homo sapiens
  misc_feature (1)...(460): n = A,T,C or G
ttttgagaacactagnnngtggatgaccatagaacanagcggaggaattgcccctgtcaagccacagtgtgaccagccctggccatgcttgttgggtgaccctgttttagtggattcctctctctgggccagtgccagatgtgacattgaatttgtgttgggtacatacttggtggagatatgaggaccccctgttctttctcccaacgaatgcatggaagccctaagcttatcccccaacccctggccctgcttttcctcgtgcctagtggccagaaaggaggagaagggctgttgcctgggattaaatcatctgagcctgttagtgtggcagagtatagttccagggtggctccctgagctttcagcccctgctccgcacgccccatgctcttccctcccctcgagtgtgggtagggctgggactgccgtgcgtgtcactcctgccattatgtcagaa

SEQ ID NO: 923 - DNA, 457 bp, Homo sapiens
  misc_feature (1)...(457): n = A,T,C or G
natcgagaccatgagaacngtgcgggaagccgngncaggctctgcagaggtgacactggcgtgtttctgcactcagggtgcccttcctgtcttttcctcccggacacagagtcacaagtgtgcacagggaatgacagactcggcgtccagtggagccatcccctggcctcggagtaggaggcgcgcccaggccaggccagaccacagtgtaacaggagggaggagggcttgcttctttcaggcaagaaaattaaaacggacaaagaaataaaagtattaaatgtataggaaaaactggagtttttatgacagcgatcatctataaagaaaccaagagaagtaagcaaacatttgaactagctcagacaagcagcctgcttcacccgcagttcacaaggaaaacccacaatcataacgttaaaaatattcccaagcgccgggcgcggtggtcacgcct

SEQ ID NO: 924 - DNA, 484 bp, Homo sapiens
  misc_feature (1)...(484): n = A,T,C or G
cgcaggtcaatcggatccatatcagtgtggtggaattcctctagaaaatccaaaaagaaaatttatattagtgttaaaaatctacaacaaataaagaggttttcacagctctatgaacaaatgtaaaaattgaaaaggcaagaatagtattgaaagacttgctcattatatccgagatttcatcaaatccaggataccattaattgtatcttgatcctgattttagagattttaaaacatgaataaattgtgtggcttagaatcaatgaaacgtgatttttagttgaaaagtttcttaatagcattttaagaacacttacggccaggcgtagtggctcacggctataatcccagcactttgggaggccgaggcgggtggatcacctgaggtcaggagttcgagaccagcctgaccaatatggtgaaaccccatctctactaaaaatatagaaattagctgggtgtggtggtatgtgactgtagn

SEQ ID NO: 925 - DNA, 456 bp, Homo sapiens
  misc_feature (1)...(456): n = A,T,C or G
nttcgtagaccctagtccttgatgggcaattcgaaagagcgagaactggaagaagcaaggaaaaaactggcccaaatccgccagcagcagtataagtttttacccaccgagctgagggaagatgagggctaaaggtgcgagcccagatggcgagccccaggggatggccctggctgaactggacagacagtgttcctgagaggctgggcacttagctggaaaccgcccacctccctcccgggtgagcctggagccctgcgtgcttgttctcacatctctgtcccgtcggcactggctgcatgatcgtgatgtcacacggtacaatgtcctacccacaactcctctgccgcctcccctcatgcctcaccgtgtctcaagagagaggggtgcacgtttcatggactgttaccaacaaagaaaagtcagtattatgttgttctcagacactttggcttn

SEQ ID NO: 926 - DNA, 457 bp, Homo sapiens
  misc_feature (1)...(457): n = A,T,C or G
natcgagaccatgagacctgtcgngaaagtccaggaaaccacgaaaaggcctgcgccaccttaaagaggatagcaactgaaaacggagctcccatgctgctggggaaactcatcatctccagacaggaagaccgtcgcaaaatgagggaccttttcacaccccattttagatggacaactttgctgctgtggtttatatggatttccaatgcattctcttactacgggttagttctactcaccacagaactcttccaggcaggagatgtctgcggcatctccagtcggaagaaggctgtagaggcaaaatgcagcctggcctgcgagtacctgagtgaggaggattacatggacttgctgtggaccaccctctctgagtttccaggtgtccttgtgactctgtggattattgaccgcctggggcgcaagaagaccatggccctgtgctttgtcatct

SEQ ID NO: 927 - DNA, 484 bp, Homo sapiens
cgcgcccttcgagtccattgtagatcgcgtaggcagtgcgtcgcaataacctctagtactatgggttcataagcaagcaccccgccgaccaccggtttgcctgccacgtctttgtgtatgaagactccaccatagccctggcagagtccgtggggagagcattccagcagttctacaagcagtgtgtggagtacacctgccccacagaagatatctacctggagtagctgtgcagccccgccctctgcgtcccccagccctcaggccagtgccaggacagctggctgctgacaggatgtggcactgcttgaggaggggcacctgccaccgccagaggacaaggaagtgggggccgctggcccatggtaggtgagggtggggctatggggagaggcaaatgcagtttattgtaatatatgggattagattcatctatggagggcagagtgggctgcctggggattgggagggacaggacttgctg

SEQ ID NO: 928 - DNA, 460 bp, Homo sapiens
  misc_feature (1)...(460): n = A,T,C or G
nattgagnccctgagaacngtcgngagagtggnggaattccccggccccgctgcgcgcccctcacgctgcagcctgggaacctgggccgggagctgcgggccgctccgtgaccgggaagcgggcctgacctcccctccccaccgccgcccctgcggtgagatcctgcctgccggggcgcaggggcccgcggttgggctccgggagacggaagaggccccacagctcgggccccacgcagtggacgctgccacttaattttggcgtaattgatgtcaaggcgggtacccgggcccccagtgaaatgcctcatgaactcgctgcgaggaacggcgctccacgcggtgcacggtggccaatcagagctgccgcttctgatggaggctgagccggctggggaggcgtcttggccaagaaccagccccagcctcgctcagggccccaacccgcagaccatgtaan

SEQ ID NO: 929 - DNA, 458 bp, Homo sapiens
  misc_feature (1)...(458): n = A,T,C or G
natgagaccattgagaccagtcgnggaagncgcggaagttacgcgtttgactcctccgggtgccctggagccttccgcaacgcctggctggccgtgacctcaaacgcctagctgccaatgacctgcagggctgagctgtggccaccggcccttaccatcccatctggaccggcagggccaccgatgaggagccgctggggcttcccaagtgctgccagccagatgccgctgacaaggcctcagtactggagcctggaagaccagcttcggcaggcaatgcgctgaagggacgcgtgccgcccggtgacagcccgccgggcaacggctctggcccacggcacatcaatgactcaccctttgggactctgcctggctctgctgagcccccgctcactgcagagcggcccgagggctccgagccaccagggttccccacctcgggccctcgacggaggcca

SEQ ID NO: 930 - DNA, 489 bp, Homo sapiens
  misc_feature (1)...(489): n = A,T,C or G
aaggggtnnnnnnaatcgagtttctagtcagtgtggtggaattccacttctgtgcagagcaaggattgcacggttatagatggtggccctattaaccccagagcaggttaatgtacgtatttatctaggtttgtggtttacagccaatttaatgtggagacataaagaagtttaatagctcaaggctgcatgttctgtggatgcttctgtgctgagagggttcatgactaaacctggtgtgtgatactcctgttttaatgatataccagtgtaaattcctgggacctttctgtgtggtgcagatctgtggggctggaaatagacctacagttactttttgggagatttttggctttgtctgaggattcatccttgggggtgtcaggagggtagatttctgtcacatcttctgattctccaaaccccactctccaccatcctgtaactttgtgtgtaactatcgacacagggcacactgccacaggttcn

SEQ ID NO: 931 - DNA, 484 bp, Homo sapiens
  misc_feature (1)...(484): n = A,T,C or G
ncctcggaaatccccttgccagtgtcgtggaattggatntccctcctgccgcggatcaaaagccagaccatcgcctgtcgctcgggacccacctggtggggaccgcagcggctgaactcgggtggccgctgggactcagaggtcatggcgagcacggtggtgaagtacctgagccaggaggaggcccaggccgtggaccaggagctatttaacgaataccagttcagcgtggaccaacttatggaactggccgggctgagctgtgctacagccatcgccaaggcatatccccccacgtccatgtccaggagcccccctactgtcctggtcatctgtggcccggggaataatggaggagatggtctggtctgtgctcgacacctcaaactctttggctacgagccaaccatctattaccccaaaaggcctaacaagcccctcttcactgcattggtgacccagtgtcagaaaatggacatccctt

SEQ ID NO: 932 - DNA, 451 bp, Homo sapiens
atgagacctgagaccgtgcggaatcgagaagtacgcggtgactcgtacggggggaggggggccctgcgcccgggcccaacaagactggtgtctgctccctgcttgagccaccctcgcaggcgaccacgaagctcagctctgagaacttccgcggcacgctcaccagcctggccttgctgcccactaaacgccacctcctgctgggctcagacaacggggttatccgcctcctggcatagactgaggcaggagctggccgggcaagggtgggaagacatctgcgggcgcgtgtccactcaccctgttccctgagcagcagctccctccagggaggccctgggtcccacgccctgggtgcccacatggcctgccaactagggcctgcaaatggagtgggggagtcctggcccctgaatcaccagagccaccaagcctgccagaggggtctcat

SEQ ID NO: 933 - DNA, 485 bp, Homo sapiens
  misc_feature (1)...(485): n = A,T,C or G
gggagcgccnttgagatcattgtccagtctggtggaattgcaactgaggagagtgatgaaaacgtaaagaaggtagagtaatgctcccagaaggaggtctcgactaataacagatggggaattggtgaataaacttcagctttcttgcccctcagttgggataactctggcaggttgcacacctcgggcctcccagagtcccctagagcagggatccccaaaccccagagacacggaccagtactggtccacggcctgttaggaaccgggctgcgcagcaggaggtgagcagtggacaagtgagcgaagcttcatctgtatttacagccctccccgtcgctcgcattactgcctgagctccatctcctgtcagattagcattagattctcataggagtgtgaaccctgttgtgaactgagcatgtgagggacctaggttgcatgctcattatgagactctaatgcttgatgatctgtcactacct

SEQ ID NO: 934 - DNA, 480 bp, Homo sapiens
  misc_feature (1)...(480): n = A,T,C or G
gagcgtcccacctgaaaccntnactgatancnntggccatgtcgtggaattcggacgatcagggtctctgggaagtgctgacgtgtgcgcgtgtgcggtgtgttgcttgtgggtgcgtgtgtggtgtgtgcatgtgtgtgcgcgcgcgtgtgtgcggggtgtgccgtgagcgtgtgcccgcggttcgggggatgagtaggggcgctgacttttaggaccagccatttgagtcaagctggagacgacgtcttagaacctaggatgagtctcgtttggttttagtctgcaaagctcgtctgcatcagacaggaattttccccagacgcgggtgcacgtgaattaattcatcagaaggcggttcacggcctgagtgagggggacgagggcggcgaattcctccgcctcattcctaccctgacgattcgagatgctcgcttcaccccactgagatgtaactcagttttgtgggatcccactgcc

SEQ ID NO: 935 - DNA, 476 bp, Homo sapiens
  misc_feature (1)...(476): n = A,T,C or G
atcgaaacccctatctgagaccctgtccangtggtggaattcaatttaaccatccatctaatatggtgtgtatcagaaaatgcattcagatttcaaaacaattcccaaaaattttagaatacaatgtatttcaattttcagaactgcctctatttaactaaagttttgtattataggcccaggaatattgaatgtgtcatatgaagtcttttccatgagaatattaaataaacagttgatttgacttcttggtctatttggtgtctcttttaaatgaatcctaatattgttaaatggaaagtgtagactctaaaatgatatctctacagtgattacaccatgaaaaagtgtaatagctctgattcaatgaacatttctatgtgcccatatctgtggtaagccagtaattttcatgctatccttattaaatgttatttccatttgctgaggcttatagagactaattatctctgtag

SEQ ID NO: 936 - DNA, 432 bp, Homo sapiens
gagaaggtaacaagtatttattcgcataacttccccttgcagactgttttcttctggcctttatgcctgtgcttgacccctcgggcctccttcctcctccgtgagccactgcaggccccccacccacgcttcaggtcaggcgtgagccgatgcctatgctgtggccttggctgggtgctgatgggactgtcatgcccactgctgcggtcggtacctttgcagcctgtgcttgtggtctgatctgctcaggcccccggcagggagaggtggccgcgtcttcttcctggaggcggccagatcgcgcgacctccaggcagtgctcctactcggcagcacccacctgcctctgcttgagaaagcacaaaccgccctctggggaagcagccagctggggagtgctctcggcctgtgaccccgggagggctgggtagg

SEQ ID NO: 937 - DNA, 477 bp, Homo sapiens
atcgaagacccctagtccagtgtcgtggaattccatggtggtatgtgactgtggtcccagctacttgagaggctgaggcaggaggatcgtttgagcccaggagtttgaggctgcagtgagctgtgatggcaccactgcaatctagcctgggtgccagagtgagactttgtctcaaaataataaataaataaaaataaaatgtcacctttgcagggaagcttttcctgacatcccccatctaagctgagctccccatgacacctcagagctcccagttcccccaaacatgagctcaggatgtaattaattaagcagttacttatgtgattcacaattgtctgtcttgccttcattagaacataaactccataaggcccaggacttttgtctacttgtttattgctctattcttgcatccacggcacatagcaccagctcagtcaatatttgttaatcaaacaaattcaccaatattgg

SEQ ID NO: 938 - DNA, 482 bp, Homo sapiens
  misc_feature (1)...(482): n = A,T,C or G
aggggcncnnnnnagcncccccattgaagtccntaatcgaagtgcgtgaattcggcagctgtgcaatggagtctgtgggtgatcagaggagaattcattcaaccagccacctatgggtggacattaggttgtttctgctttcctttttcagctgtgctgcagtggacatctgtgacaggtgccattgggctggggggtcacgtccccggggatgccgggccgggcattctacatcctcttcagctgctgtcgttggggtgcttccagccagcctggtcttcccttcctgtggctttgggaggggaaatgagcatgggtcacctgcctgccactgtctgcctcctgcctcctctgaggcctccctttgtcctcagcccaggtgaccttcagaaagacattggagaaggaagcaaagggagaggagcccgacaatccagtccccaagttcaaacagaggaagggggagtccgacggtgcctatt

SEQ ID NO: 939 - DNA, 477 bp, Homo sapiens
  misc_feature (1)...(477): n = A,T,C or G
ggggccnnnnaagggncccatgagaccctataganggcntgagaancggcgcatgaatggttaacaaacaccagagcagtactccaatattggagagtcgctgggggcacagggctttgaatcagggtagtatcctgccttccctcccctgaccccacatggactcagggcccccttagggccccctaccccactgatagcttcctccttctctggcacaaggggagccccagggcttgggggagggcgtaaggtggggggaaatgccactgcttttancaaaagcctccctcccagaattagccagcttgcctcctgcaccccacccccaccaaccaggggagccactaagctgactaacaactgtcccctcacccaccagctatttccccagggtagagtgggcaattctcaccttcaaagagtccccgcctgcccaggcctttggcacagaggctgagtggacagtcaggagaa

SEQ ID NO: 940 - DNA, 453 bp, Homo sapiens
  misc_feature (1)...(453): n = A,T,C or G
attgagnccnctgtagtcttcgccanngcgnggaattcccagacgtcaatgaagtgagggcgctgccccagacgcgcacagcctctattttctcctatctctcggacagcgggcagactctaagcgaggacagtggtgtggatgctggcgaggcacaggccaccgccccaggccgaggaaggcagttggcgtccaccaagagcaggagtagcaaggagctgcctcggaaagagaggcccacagatggggccaacaaaccgcctggacttctggagcccacgtccactctggtccgtgtgaagaaaagtgcggccaccctgggcattgccatcgagggtggcgccaacacccgccagcccctgcctaggattgtcactattcagagaggcggctcagctcacaactgtgggcagctcaaggtgggccacgtgattctggaagtgaatgggctgg

SEQ ID NO: 941 - DNA, 474 bp, Homo sapiens
  misc_feature (1)...(474): n = A,T,C or G
natcgaganccctgtcgagtgtcgtggaattccctcgtggggaatctgagcggaatcgagaaggagcagctggacgctcaacgggttggggtagccgcggccgtggccttcgggagcggggcgttgatgctggggatgttcgtgctgcagctcggcgtcttgtccacctttttgtccgagcctgtggtcaaggcgctgaccagcggggccgcgctgcacgtgctcttgtcccagctgccgagcctcttggggttgtccctcccgcgccagatcggctgcttctctctcttcaagacgctggcctccttgctgactgcgctgcctcggagcagtccggccgaactgaccatctccgcgctcagcctggcgctgctcgtgccggtcaaggaattgaacgtgagattccgagaccggctacccacgccgatcccgggggaagtcgtcttggtgcttctggcctccgtgctctgcttn

SEQ ID NO: 942 - DNA, 462 bp, Homo sapiens
  misc_feature (1)...(462): n = A,T,C or G
ntcgcgtccctagtccagtgccgtggaattcactgcatcgcatgcctagactcccgaggcttgctctttggcccctccctggagtactggaaggctgagctggagattcagaaagacgccctggagccaggacagagggtggtcgtcgtggatgatctgctggccactggtggtaagggtctccccgcagccaactgctgtggctccaagggcctggtgggagtgggacaggacctcgctgtgtgacatgggatgcagcttactgttgtccagagggtgcctggtggccaggccgacaccttcctctccccatgccttcccctccccaacccaggggctggcctggagcacctgctccctgcagcccaggccaactggggacctcaccctcccatccccaggaaccatgaacgctgcctgtgagctgctgggccgcctgcaggctgaggtcctggagtgcgt

SEQ ID NO: 943 - DNA, 424 bp, Homo sapiens
  misc_feature (1)...(424): n = A,T,C or G
gcatgatgacagagcctgagcagcggaaccagcctgcaccctcccttctggcccagcgacctgggctgtggctgagacaataatgaggccagaagtagccggagcctgtcaggaagggcaggggaggactgtggggtctgggctctgtcgctgtaaccatctgctcccaggctgtgtgcagaaaatggcatttacactattgtgcagctcattctcatgaaatactgccattgttgctaaataaagcttgtgtgctctgaatatagcccagcntannaaaaaaaaaaaaaaaaaaaaaaaaaaaaaaaaangggggcccctttaatttaaaggggccctttaaaccccctggaacacccccggggggccttttaagtggccacccatttgtggttggcccccccccggggctttttttaaacgg

SEQ ID NO: 944 - DNA, 485 bp, Homo sapiens
  misc_feature (1)...(485): n = A,T,C or G
agagagtggccaagccgatncccctaattgatnaccntangcagngncgnggagattgagccaccctggcacgttcaccggcttgagcgttccatagtagcgaggaacatcaagtgaacggaacagccttcgatcttacatattcagaatataatgatgccgccacgaacgcctgatgcgacgctttacgcgtcttatcaggcctacaggactggtcacctggtaacctacatcttctccagcaacttcttcacatctttgccattacgggaatctttattccgctcggcccagtcattcaggcgacgtttcgcttcgtcctgtagatgtttgcgcagtaactgatccacttgcaggctgtaattgagttgctgccagttgccataaacccgcagcggtactggcgtttctttcaggaaatcaatcagtttgctttccccgttccagccacccacgacccgaatatcaaactgggtgtcgcaggt

SEQ ID NO: 945 - DNA, 431 bp, Homo sapiens
  misc_feature (1)...(431): n = A,T,C or G
ggaagtgagctccatccgtgcaggctggagctggtggcatcaccatcactgaggcggtcagccccggggagggagcctgccttcctacacctcgccaggcccctctgttcttgagcagactagaaaacacaatctcgggccagaggggctgctgcaacgagagggtgaagagcctgagcacctactgggagagatttcactggcacgcanaggaaggctgccaggtgctgggtggcctgagtcagagcttgtgcgtctgaaaatactggaaggagagataagacagagggagcaaacatcgacggaatcttgtaagagcactttaagagcaatcagattcctgagcagaggcagaacagggcctgcggcttcagtctttgagggcagagaaggaacagtttttgataactggccttggggtgacagtgggg

SEQ ID NO: 946 - DNA, 481 bp, Homo sapiens
  misc_feature (1)...(481): n = A,T,C or G
aggagttcccnngnggnnnggaactgatgaccattgtacagcgcggtggaattcccttctccctaggggtagactcttctgcctactgaagtgggtttgctgcacattgactggtcaggggcagagtctgggtgctgtcctttggccacgtgtggggacttgtctagaccagaatgaaagggacagggtcccagacacgtttgggggtcctgattctgggctggacacggttgtggatccagagaagaggcctagtctccaataaatcttaggaattttgcaggaaaaaaaaaaaaaaaaaaaaaaaaaaaaaaaaaaaaaaaaaaaaaaaaaaaaaaaaaaaaaaaaaaaaaaaaaaaaaaaaaaaaaaaaaaaaaaaaaaaaaaaaaaaaaaaaaaaaaaaaaannnnngggggggaaaaataaaaaggggggggaaaaacccccccaagaaacacagggtttttttttttataaaaac

SEQ ID NO: 947 - DNA, 479 bp, Homo sapiens
  misc_feature (1)...(479): n = A,T,C or G
ggagtnccnnaagaggccnncatagagnccaactgagaccnctggccagngcggaggaattcgtgtacagcagcgacccccaggtcacagcctccctggtgggcgtcaccatcagctcctgccctgcggacctgacccagaagcgagagctcacagatgctgagagcagggccctggccaaggagcggcagaagaaagacaatcacaacttaattgaaaggagacgaaggttcaacatcaatgaccgcatcaaggagttgggaatgctgatccccaaggccaatgacctggacgtgcgctggaacaagggcaccatcctcaaggcctctgtggattacatccggaggatgcagaaggacctgcaaaagtccagggagctggagaaccactctcgccgcctggagatgaccaacaagcagctctggctccgtatccaggagctggagatgcaggctcgagtgcacggcctccctaccacc

SEQ ID NO: 948 - DNA, 460 bp, Homo sapiens
  misc_feature (1)...(460): n = A,T,C or G
agcgggtnnnnnnnatcgagttcatatcnattgtcgtggaattccccagctactggggaggctgaggcaggagaatggcatgaacccgggaggcggagcttgcagtgagccaagatcgcgccactgcactccagcctggatgacagagcgagactccatctcaaaaacaaaaaacaaacagaaaaggatgatagtcccatcccatgctgacgccgcgctgggtcagtgcagactgcggacttccaattagttcattcatggttcttaagttttcagatgaaccatatgaagttgccatttttatattcaaaacatggctgaatattggcaatttcatattagtcagcttggcgactattttgactgttgcccctgaacacaggaaatactggagaacttactatgggcccagcccaatggcgatatattcccggctccgaggaactgactggaaactcga

SEQ ID NO: 949 - DNA, 484 bp, Homo sapiens
  misc_feature (1)...(484): n = A,T,C or G
tggagatgccnnttcgagnccctttcgagatccctantcagtgtggtggaattcgtcttgctgtctgttgcctaggctggagtgcagcggctcaatctcggctcactgcaacctccgcctcctgggttcaagcgattctcctgcttcagcctcccaagtagctgggattacaggtgtgcaccaccatgcctggctaatttttgtatttttagtacagatggggtttcaccatgttggccaggctggtttcgaactcctgacctcgtgatccgcccaccttggcctcccaaagtgctgggattacaggcgtgagctaccgcgcccaaccaattaccctttttgagagttagtttctccctatgaaactgcagatactggtacaactgctcaggactttttcacagattaaatgaatcaacatacataaggtacctagcacaggcctgggcacatggaactgtgctctcggactctgggagaggag

SEQ ID NO: 950 - DNA, 464 bp, Homo sapiens
  misc_feature (1)...(464): n = A,T,C or G
cggcgggnnnagggggnncactgaacccctggactgacantcatcgaagngncgnggaannccctcacactctgcaggtagccccaggcctccaggtggaggtggctaccaaagtgaccccacaggctggggaggaagaaacggactccaccgctggacaagaatctgctgccatggcaatgcctcagccctcccaggagggcatcagcgagatcttaggccaagagtctgtcactgcagaaaaacttccaactccacaggaagaaacaagcctcacattgtgtgcagactctcctcagaacttgaaggaagaaggagggctggacctcccctctggcagaaagcctgtagctgcagccacgattgtccccaggcaggctaaagaggacctcaccttaccccaggactccgctatgacaccgcctctgcccctacaagacacagatctctcatcagccccaaag

SEQ ID NO: 951 - DNA, 399 bp, Homo sapiens
agcgctttgacgtgcagttcctgggctccgtggaggtgccctgccaccagggcaacggcatcctgtgtgcagccatgcacaagattgccactgcccggaaactgaccgtccacctgcgccctcctgcctcctgtgacctcgagatctctcttcggggggtcaagctgagtctgagcggaggagggcctgagttccagcgctgcagccatttcttccagatgaagaacatctccttctgcggctgccatccccgcaacagctgctatttcggcttcatcaccaaacaccccctgctgagccgcttcgcctgccacgtctttgtctcccaggagtccatgaggccggtggcgcaaagtgtgggccgcgccttcctggagtactaccaagagcacctggcgt

SEQ ID NO: 952 - DNA, 438 bp, Homo sapiens
  misc_feature (1)...(438): n = A,T,C or G
nttgcgaccctttgcagctggtggaattcaggacgtcagcaagaggctctctctgcccatggatatccgcctgccccaggaattcctacagaagctacagatggagagcccagatctgcccaagccgctcagccgcatgtcccgccgggcctccctgggataaagggaaaaggagccccttccaccatggagtctcatcccttccctcccagaggctggagttgggggaggcgtcatgtctgtggagctgctaagggcttcaagctcacggcattctatgtctctccctctcagtcagacattggctttgggaaactggaaacatacgtgaaactggacaaactgggagagggcacctatgccacagtcttcaaagggcgcagcaaactgacggagaaccttgtggccctgaaagagatccggctggagcacgaggag

SEQ ID NO: 953 - DNA, 418 bp, Homo sapiens
actgtgggttggcagctctagaccttggcctgatatgctgacccctctgctcctcaggctgtcggctggcctgctgcgtcaggccacctacaccactacccgccttggcatctataccgtgctgtttgagcgcctgactggggctgatggtactccccctggctttctgctgaaggctgtgattggcatgaccgcaggtgccactggtgcctttgtgggaacaccagccgaagtggctcttatccgcatgactgccgatggccggcttccagctgaccagcgccgtggctacaaaaatgtgtttaacgccctgattcgaatcacccgggaagagggtgtcctcacactgtggcggggctgcatccctaccatggctcgggccgtcgtcgtcaatgctgcccagctcgcctcctactcc

SEQ ID NO: 954 - DNA, 492 bp, Homo sapiens
  misc_feature (1)...(492): n = A,T,C or G
cgggggggnactcgagatttgagtncctgtggtggaattccagtgaccccagatgctgacactgggaaaatgattctgctgatgaacagaaaaagaggctaaatagagttgctcgatttataataacctcattaatccaaagatttttgttttgtatgtgtttaaataataattaaaacatagatatcaagccatccagaaaatcttccttaggaattttaggctggttaatactgaaagcaaactttcaaggaaggtttaaaatggccaatttgaactttctagtgaaaaaatttggtgtctgagccaaattaaaatgccaatcattatattctaaccaaacttacagactttagttactagcaaataccagatatgattcttactgtataaaagttataattttagaataaaatggaggaataaccaccaacgtattgtagataggttgtgtctgtctccgaaactgcaatgctctcatacgctagaaca

SEQ ID NO: 955 - DNA, 481 bp, Homo sapiens
  misc_feature (1)...(481): n = A,T,C or G
ngggccgcaatcgagatccctagtccgtgtggtggccttcaagtagtacattcctttttctgccaacttttttctgagaaagtttttgaatgcacacgtgcacccaacagagtgagagtggctgttaagagagagggcgccatttcctttgccctccagcctgtccctgtgcaccctggaggggcccgttttttccaccgcttagataaaatctagggcaagttcctgaacttctcttgtctctctcaggtaacaaaaattcttttgggctcctttagtcacaaagatattcacgatttcaggtattaaagtgcccagccctgggtgattgtcaaaattctgaacttgatttaaagtggcacctcctctcacagtcttcgggagggagagaccggagccaggagtgcagcgtgtttgctggggtctgtcgtggcccactccacacctgctgggtggatccggctggtgccccatgggcgcn

SEQ ID NO: 956 - DNA, 488 bp, Homo sapiens
  misc_feature (1)...(488): n = A,T,C or G
cgaggannnttcganttctgagtccntaggcagngngcnggaattctgaagaccaggatgaggatgaggagaaagggagaggcagtgagagtgaacagagtgaggaggatggtaagaggaagacaaagaagaaggtgccagagagaaaaggagaagcgtcatcctctgatgagggcagcgattccagcagtagctcatcagagtccgagatgacatcggagtccgaggaggagcagttagaacctgcctcctggagcaggaaaacacctcccagcagcaaaagtgctcctgcaaccaaggagatctccctgcttgatctagaggatttcacccctcccagggtccagcctgtgtctcccccagcaattgtgtctaccagtctggctgctgacctggagggcctgacactcacagactccagcctggtaccgtcgctctgaatccaggatcgggtgtgggcagcaggagctgctgcaccggtagctggg

SEQ ID NO: 957 - DNA, 479 bp, Homo sapiens
  misc_feature (1)...(479): n = A,T,C or G
ggggattggacccttnccangtcgaganccctagtccgtgtggtggaattcgttgtttctttgaccattctaataagagttgctttataatggccgggcgcggtggctcacgcctgtaatcccagcactttgggaggccgaggcgggcggatcacgaggtcaggagatcgagaccatcccggctaaaacggtgaaaccccgtctctactaaaaatacaaaaaattagccgggcgtagtggcgggcgcctgtagtcccagctacttgggaggctgaggcaggagaatggcgtgaacccgggtggcggagcctgcagtgagccgagatcccgccactgcactccagcctgggcgacagagcgagactccgtctctnaaaaaaaaaaaaaaaaaaaaaaaaaaaaaaaannnnnnnnncctttatttaaagggggggggaaaaaaccccggagtacccccgggggggttttttttattaccc

SEQ ID NO: 958 - DNA, 461 bp, Homo sapiens
  misc_feature (1)...(461): n = A,T,C or G
catcgacncccctatcgagtaaccatcgacagngcggnggaanncgggccgccaggttcgagccgcccggtcaagggccatgtggtcaccgtacatctgcagacgttgctggagaatggcacacgggtgcaggaggagccggagctggtgttcactctgggtgactgtgacgtcatccaggccctggatctcagtgtcccactcatggacgtgggggagacggccatggtcactgctgactccaagtactgctacggcccccaaggcagcaggagcccatacatccccccgcatgcggccctgtgcctggaggtgaccctgaagacggctgtggacgggcctgacctggagatgcttacggggcaggagcgcgtggccctggccaaccggaagcgggagtgcggcaacgcccactaccagcgggcggactttcgcctggccgccaactcctatgacctcgc

SEQ ID NO: 959 - DNA, 461 bp, Homo sapiens
  misc_feature (1)...(461): n = A,T,C or G
atcgaccccccnatgatgactctaggccagngcggnggaattccatttactgacaggtaagaggagaaaagattagctgcatgttgccttccctttcccagtcttctgtcaggttctctcttgcaaagtgaaataaattaatatttacttctaaaatcctggttcatggtacattttcccagttaaatgaaattgaaacaaataggaaaagatgaaaaaacagatctcagttcactctaaaaaaacaaatcagtctaaatgtattgatagtttccactcagaatagctctccagctccgggtgaattctatcagtccaaatcaaaagttccttccaatccataattttggaacctccggagctcaccccagaggaaccttttccatttttctctctgaattaaacatgacccaccttttgacacagcccttctcactcatggagactggaataatcacagg

SEQ ID NO: 960 - DNA, 456 bp, Homo sapiens
  misc_feature (1)...(456): n = A,T,C or G
natggagaccacattgaagngcgtggaaancgacaagttgagtctgggagctggggcagggcacaggctctagggtccagctgtcctcctctcccctcccctgctggccactcctgctgccgtctccacagctctggaatgatgaagtggacaaggtaagttggggcctggggggctgggctcgaggaagaaggggtggcggggtgcaggcacacttgctgctgtggggtctgatctgtttctcactctgccccacacccactggggaggggttactgctttccctccctgggcctcagtttcccctctgtggggaaatgttttctccacagtaccctgtagcacacagtaggccctcaggatgcacttgctgggtggatttctccgatgggtgatggaggaagggtctgtcactgcagctgcctgtggggtcctgagtggggctctagcttctct

SEQ ID NO: 961 - DNA, 459 bp, Homo sapiens
  misc_feature (1)...(459): n = A,T,C or G
natcgaagaccactagtcagngcgcnggaanncctccggntgccttcccgggccccttacactccacagtcccggtcccgccatgtcccttaaacaagaagaagagaaccctgcggaggagaccggcgaggagaagcaggacacgcaggagaaagaaggtattcttgcctgagagagctgaagaggcaaagctaaaggccaaatacccaagcctaggacaaaagcctggaggctccgacttcctcatgaagagactccagaaagggcaaaagtactttgactcaggagactacaacatggccaaagccaagatgaagaataagcagctgccaagtgcaggaccagacaagaacctggtgactggtgatcacatccccaccccacaggatctgccccagagaaagtcctcgctcgtcaccagcaagcttgcgggtggccaagttgaatgatgctgcccgg

SEQ ID NO: 962 - DNA, 464 bp, Homo sapiens
  misc_feature (1)...(464): n = A,T,C or G
atcgacccccctnatggatgaccactaggccagngcggnggaattccagtaataaaagtctgcactttggtcatttcttttcctcagaggaagcctgagtgctcacttaaacactatcccctcagactccctgtgtgaggcctgcagaggccctgaatgcacaaatgggaaaccaaggcacagagaggctctcctctcctctcctctcccccgatgtaccctcaaaaaaaaaaaaaaaggctacccagtttttcctttaaccctcggttgagggagggaaaccccaccactgctgccctctggggtaactcaccctaaggcctcggcccacctttggttatggaaaccacactgggggtttcctccaagccccgtttttccagcatttccaccggaagagtcccaaagccacttcaccctgggggggggctggggcccccagtcagttttgttaaggacctgtt

SEQ ID NO: 963 - DNA, 456 bp, Homo sapiens
  misc_feature (1)...(456): n = A,T,C or G
natggagaccccattgagngcggtggaaancggcactccctctgccacattttttggaggttgggaaagttgctagaggcttcagaactccagcctaatggatcccaaactcgggagaatggctgcgtccctgctggctgtgctgctgctgctgctgctggagcgcggcatgttctcctcaccctccccgcccccggcgctgttagagaaagtcttccagtacattgacctccatcaggatgaatttgtgcagacgctgaaggagtgggtggccatcgagagcgactctgtccagcctgtgcctcgcttcagacaagagctcttcagaatgatggccgtggctgcggacacgctgcagcgcctgggggcccgtgtggcctcggtggacatgggtcctcagcagctgcccgatggtcagagtcttccaatacctcccgtcatcctggccgaactggg

SEQ ID NO: 964 - DNA, 464 bp, Homo sapiens
  misc_feature (1)...(464): n = A,T,C or G
ggtgattaaactgtaacccgctgagancatcgaaaggcgggnaaaatnagcgcgactgtacagagaggtggaggccgttgcgtaagataaaaatgggggccaagtaagtcctacagacatgcgtgtaccctgggagggagcctgaggttcatcatccaggaaagaaaccaaatctaatgctccttacctgtgagcccgaggtcacactgcaaggtagggaccaaacagggagcagaccttaggtttactgtcgctttctccactgcccagtccatcatccagaaggctgtgcagggtgggggcaggaatcacagggcctgatgggggttgagggtgggctggaaatggtgggaatataattggagaagatggatgggcacgcccaggctgcagccccattaatttaccatccggacagctaacaagcagaagcagcgtgtctcctgccgcctaattattgtagg

SEQ ID NO: 965 - DNA, 483 bp, Homo sapiens
  misc_feature (1)...(483): n = A,T,C or G
agagcgtcccactttgataccccaattgatagcntcagaagaggccggaanacccaacaagaatattcttagttccactggccaggattttcctacatagtcagaacttacacattactagaggcacacccaccaaggagtattgtgtctacttttatctgtgcaccagccacaaatacccacattggaaagacccatttgtgatgggtaaacatcccttcctgtctcccacaacccctgtgactgccctgcatgtgttcatgacctccgaaggcccaaattcatgaagcagcaaacccagcagatctccacccccctgcctcaggacctctgctgaagagggggatgaagtgggtctccagggaggcagtgggggccttgttggcagctggctcgggagccggcttacaggagggcagctctgcagttgggaggggcaccgtccggaggagaccaggcctctacacaccccccactctactt

SEQ ID NO: 966 - DNA, 477 bp, Homo sapiens
  misc_feature (1)...(477): n = A,T,C or G
ngtgggcccacctgagaccctacttgatgncggtgaattccatggctttagaaagaggaaacaaaaatttaggttaaacgacttacctaacatgatttctctagtaagagataaaactgtgattcaaatctatgttagacatgtatctactgtaaccctgtattatttttttttaaccacatagttatcttttttttttttaattgggggtttttccaaggttaaaaaaaaattccagggaaaagtggatcccatctttatggtatctttattttttaaggttataaggtatgtggatttatcaggaaagttaaaggaaaaaatcttcaaaaggccatttataattttgtttttaaaagccaaaattgaaaaaagttgggccaggggcaggggctcacgcctgtagtcccagcattttcggaggccggggggggggatcacctgaggtgaggcgttggaaaccaccctggccggcgt

SEQ ID NO: 967 - DNA, 474 bp, Homo sapiens
  misc_feature (1)...(474): n = A,T,C or G
ctcgaganccnatcgagatccctagtccatgtggtggaattcaaagactttagcactttcactaattctgctactgctatctagaagatggagccaggtgtacagagcggaacatgaaagtgaaacaggagcgtgaccgctgaagcacagcatcacagggagatggtcaggcctccggatggctgtgggcgggcctgactgatgtcaggccttccacaagagatggtggagcagagtcttctctaacccctccgcccctctcccctggccaaagggagactcccttccctggtcggctaagtaacaggtgccttcccaggcactgtcattaccactagaccagggagccctctagtggccctgtctgagcgtgacagagggctcacactcgtcttttggtcacttctcaccctgtcccttcagctcctatctctgtatggcctggnttttcctaggttataattgtagaacaan

SEQ ID NO: 968 - DNA, 470 bp, Homo sapiens
  misc_feature (1)...(470): n = A,T,C or G
ntcgagatcccttttgcgtgccgtggaattcttagaatagtgtatgaggtcctaaggctatcccaacttcttgcagatggttcgggtggcctggctctttctcttctccaagttcattgagctgatggacacagtgagtagttatatgagatgtgagaacttgaggggagaatgaggtggagaagcccaggttctgaatccccttccctcactcttctctcaggtgatctttattctccgaaagaaagacgggcaggtgaccttcctacatgtcttccatcactctgtgcttccctggagctggtggtggggggtaaagattgccccgggtgagtggtgaaggccactatgggaaagggtgggcaccagaggctggactctgctgaccctgtcttattgtccactcacaggaggaatgggctctttccatgccatgataaactcttccgtgcatgtcataatgtacctgt

SEQ ID NO: 969 - DNA, 474 bp, Homo sapiens
  misc_feature (1)...(474): n = A,T,C or G
nttggacccccatcgtcgtccactatcagtgtggtggaattctggcttccttgacgcgagaggctctgagggtctgaaaagggcatctcaatggcatgggtgggtggggagtcagtcatgtcactgaaattgaatgggggaggcccaatgaggtggctcatgcctgtaatcccagcactttgggaagctgaggcaggaggatcacctgaggtcaggagttcgagagcagcctggccaacatggcaaaaccccttatttactaaaaatacaaaaattagccgggcatggtggcatgtgcctgtattcccagctactcatgaggctgaggcaggagaatggcgtgaacccgggaggtggagcttgcaatgagccaagattgcgccactgcactccagcctgggtgacagagcaagactccgtctcannnnananannnnnnnnnnnnggattttaattgggggaaccttgggccga

SEQ ID NO: 970 - DNA, 483 bp, Homo sapiens
  misc_feature (1)...(483): n = A,T,C or G
gatgggcccacctgataccncaanggtnagcctangccangncgtggaattcccccagcagaccatgtgttcacgggatgcccgcacaaaacagctgaggcagctactggagaaggtgcagaacatgtctcaatccatagaggtcttggacaggcggacccagagagacttgcagtacgtggagaagatggagaaccaaatgaaaggactggagtccaagttcaaacaggtggaggagagtcataagcaacacctggccaggcagtttaaggcgataaaagcgaaaatggatgaacttaggcctttgatacctgtgttggaagagtacaaggccgatgccaaattggtattgcagtttaaagaggaggtccagaatctgacgtcagtgcttaacgagctgcaagaggaaattggcgcctatgactacgatgaacttcagagcagagtgtccaatcttgaagataggctccgtgcatgcatgcn

SEQ ID NO: 971 - DNA, 441 bp, Homo sapiens
cgaattgatggcctacgcgtgggacgagaggtttttgtaaatccccaaaacactccaatggcagctgggattgaggactgccacactggtccaacctttcccgacccattcctcaaaaactccccaaaacctggggaagccattattgaggctgcggctcatctctggagttccgggcccttggcctctctccgccttacggatcctctcagtttgatctcaaaatctccccagctcacggcagtgtaatatgcatagggagtaagaggtgggaggaaggctcccttcttccctaggtatgaaaccaggcacaggtccccaccgcctccccacggctttcctgggccccttacatctgcaccatatctgcccctccaagtttatcctttgaggcccctttcaaggtcgtttaccctgtgctgctttctccttaaggcctag

SEQ ID NO: 972 - DNA, 440 bp, Homo sapiens
gtccttaggcatgatggtgacccgtttggcatggatgacacacaggttggtgtcctcaaacagccccaccaggtaagactcgcacgcctcctgcagcgccatcacggccgagctctggaagcgcaggtcggtcttaaagtcctgagcgatctcgcgcatcagccgctggaagggcaacttgcggattagcagctcagtggacttctggtagcggcggatctcgcgaagcgccaccgtgccgggccggtagcggtgcggcttcttcacgccgccagtggcaggtgcgctcttgcgagccaccttggtggccagctgcttgcgcggcgccttgccacccgttgacttgcgcgcagtctgcttggttcgggccatgaatccgaaactgttggccccgcggtgtcctctgcccagacctcagcggattgctcgcttttatagag

SEQ ID NO: 973 - DNA, 499 bp, Homo sapiens
  misc_feature (1)...(499): n = A,T,C or G
aggcggnnnnnnnnnggaatactgaaactcntnggnanntatctgagactctagtccatgtggtggaattcctcctgacacacagcgaggaagagctggaacacagccaggacacagacgcggatgatggggccttgcagtaagcagcctgacaggagcaatggccaccagcaggtgaagggcatcgctgccccaggcctcaagccgggcacccaaccctggatgccaccccccagcgggtaccagaggaaagctggcagcaggcgcctcctcccccaacgcatcccagccagtgccatgtcctctgcaggtggagttactggcctactccttccccatgagccctccctgtctgcactgcccaggccagagggtagagcacaggggtttccccatactacctcccctccccaggacactcccaggcttgggttttttctataggtttggcggggggccacagggaggggaccctgacaataaagagattggatcccaa

SEQ ID NO: 974 - DNA, 428 bp, Homo sapiens
cgtgattgacgccgagaggaagaccgtggagaaggagctggtggcgcacatggacaccgtgaggacgctgtgctcggctgaggacagatacgtgctgagtgggtcgggcagggaggaggggaaagtcgccatttggaaaggggaataaacgtggctgagtctgccaagtggaactgtgccctatgtgtggggactggctgccccctatagcctgccaggagcagaagcctggaggggtggcagggcagagcagcccaggctcagcatggagcccacttaccgtgtggccagccgcgagacccatggccacgcaccttctctcaggccttcgggccccctggttaaactgcaccaagggtgtttcctgttggggtgtgtctcaagcaggcagctgcgtcttggtggtgataacctctgctgggaggtta

SEQ ID NO: 975 - DNA, 228 bp, Homo sapiens
ccttcgaagggtggcttgctggctatcagatgagttttgacacagccaaatccaaactgtcacagaataatttcgccctgggttacaaggctgcggacttccagctgcacacacatgtgtgagtgtttataatttattccttagtatcagtgcagttgcccaaaatattgtagccattagcatgctgagaagtgatggtactcaaaattagcatgccttggtgaatat

SEQ ID NO: 976 - DNA, 486 bp, Homo sapiens
  misc_feature (1)...(486): n = A,T,C or G
ggatacatnaanntgggganaccnggganannaaactgagaccctactgattgcgtggaaanngcgnacttagagcagaaatgttcaggacagctatggctcatcctggttcataatgcagtgtccttactgaggtttaactgtgtccagcaatacttatttaactatgcgttaaaagataattttcagaaagaagtaaaatgtggctcccaaatatgaaaaatgagcatttgtttaggattgtattctgttcattaaacaatgaggaaactggacagatgctgtaaccagttccaaggaaaggtcaaaaaagcacaaatctacatggagtaaaagaatcgagtttcagatggaggcagaactggttctggtagaggggagaggcaggcagggcagaatccgcatgcctatcagtggtaaaatcgcaaagcagctcanatcgcaaagacaatgaggggctggacgcagataacccagtggaagtgg

SEQ ID NO: 977 - DNA, 456 bp, Homo sapiens
  misc_feature (1)...(456): n = A,T,C or G
actgatnacacttttgagtgcggtggaaancatcgctgcctgctcccgcctcctcccctgcactctgcagccctggctgcccctcccaggcagctgccttaccctaagaggactgcaacccagcggcctgaggggaccagcctccagcaggacccagaagctcccacagtgcccaagaaggggaggaggaaggggcgacaggcagcctctggccactgcagaccccggaaggtcaaggctgacatcccatccttggaaccagaggggacctcagcctcttagcaggaggctctccttgcttgcactcaccctttcttattgtcttgccctgcatctgggggtctgaatttttgggagcaggcaatatctgaaggtgcaaacaggccctacggctgttccctgcacaactctcatggttttaattgtaccccatcttccacatctttaaagctcatg

SEQ ID NO: 978 - DNA, 493 bp, Homo sapiens
  misc_feature (1)...(493): n = A,T,C or G
tgctgtcccnnngggttganaaanccctgcnanccangttcanngngctnngcannaacnnnaaannntgnaaagnttgtggcaggcctagggtccaccttggccagctccttcatatcaccaccttgcctggggctgcccagccaaatgcctgctgcccgccagggtgctgcgcctcactcgcctgtcgcctgagatcgcggagctcagcgagccgctgcaggttgttcgatatggtgaggggggccactaccatgcccacgtggacagtgggcctgtgtacccagagaccatctgctcccataccaagctggtagccaacgagtctgtacccttcgagacctcctgccggcaagtatctcccaactgggggctgccttcaatcctcagaccaggaacacccatgacacaggcacagccctgcactgtgggcgtgccccttggcatggggccaggagatcactgtgttatcccggttagtgatgccctcacc

SEQ ID NO: 979 - DNA, 463 bp, Homo sapiens
  misc_feature (1)...(463): n = A,T,C or G
gatggatgaataccgttatcttcttaggacgntcaaaanncngcannaagnnncaggaccaatgctgggctcgccctcggggaacctcaagncccttcagactccatcgcagctggcaggcatgctggcgggcccagctgctgctgcttccattaagtccccccctgttttggggtctgctgctgcttcacctgtccacctcaagtctccatcactttctgccccgtcacctggatggacctcttctccaaaacctccccttcagagtcctgggatccctccaaaccataaagcacccctcaccatggcctccccagccatgctgggaaatgtagagtcaggtggccccccacctcctacagccagccagccttgctctgtgaatatccctggaagtctttcctctagtacaccttataccatgcctgcagagccaaccctttcccagaacccactctctatg

SEQ ID NO: 980 - DNA, 485 bp, Homo sapiens
  misc_feature (1)...(485): n = A,T,C or G
ggtctttaannaggagnnccnnagaananaaaactgagaccctattgagngcgtggaanncggcaggattcctgctttggctaggaagcgggcttaggtggccctggcgtccctttgcctctaagagtctgtgttgccattttagaggtgagcccagtggaggaagcaggctcagagaggttgtgcactgggctgaggcccccaggcccagaatccaggcctcctgcctagacctcccctggtgaattattcagggcagcctcagaactgggaatgcaagaagctggcagggtctgcagggagatggcagtgtcttctgggcctggagtatcttcccagcccagcatcaggtagaaaagcatttgggatgatttgctttggcactggctctgccactctccatgagcagaggtgatgacgtcccctgccatgccccanggaggcagtggggagtgttctggctgtcccaggctgagaggaccagc

SEQ ID NO: 981 - DNA, 458 bp, Homo sapiens
  misc_feature (1)...(458): n = A,T,C or G
ggcggggggggnnnnccatgagaccttatgatggaggccgatttcgncagggaccgtggcgcctcctcgcgttggtcttgctggttctcggcccccgaagcggagcgacggagacacagctgtggaagcatctggatgcgctgcccaggtccccgagcttcccggaacccgaggccgcaggacactgaaggctgccattcccgagtaagtgagtgcagtaaagaccggtaaggcccacgcagaagaaacactgaggaaagaagacacttccaaagtaacaaatgggaggaagcagccaacgcccgaggacaacatggcaagaaggagcctttggattccggactgggatggaaagagagttgattgaatcccggaatttggaaaccccagatacggagggcggacggtacaaccggagctgtcaggtggatttccaaggctttgcattggctgtacct

SEQ ID NO: 982 - DNA, 469 bp, Homo sapiens
  misc_feature (1)...(469): n = A,T,C or G
nggtagttttacctgattaccacattgagggcggtggaanncaacctaaaggcatctcggatttgcttgggaggtgggaattttttattaaaagaaaatgaaagaaatgtggagtggaggtggggagaagaggggaaaatcaagctattgttgtagcaaaatgtgagggagaggggatgtggggaaaggggaccgtgcaaacacaccccatttatcacagttaaaaacaaagcccgcgccggcccgctgctttgtcaaccgctgcccggggcaaaggcctggcgtgggggcagcttcccacctcatcctcacacacagcacaacacccaagggccggacgccccgctccagccggacccaaggagggcacagcagcgcaggtctgactctccgaggcgcgcgcgcacactcgcacacatgcacacacacatacagacacacacacacacacacacacacgcgcccaagg

SEQ ID NO: 983 - DNA, 463 bp, Homo sapiens
  misc_feature (1)...(463): n = A,T,C or G
gatagtgnnttctgagaccctcggtagatcgtcgaaaggcggggaatcctggcgagtgcttcggctcctgggcgtcaacggtgcgggcaagatcatcaccttctttatgctgaccggcgacgagagcacgacggggggcgaggccttcgtcaatggacacagcgtgctgaaagagctgctccaggtgcagcacagcctcggctactgcccgcagtgtgacgcgctgttcgacgagctcacggtccgggagcacctgcagctgtacacgcggctgcgtgggatctcctggaaggacgaggcccgggtggtgaagtgggctctggagaagctggagctgaccaagtacgcagacaagccggctggcacctacagcggcggcaacaagcggaagctctccacggccatcgccctcattgggtacccagccttcatcttcctggacgagcccaccacaggcatggac

SEQ ID NO: 984 - DNA, 459 bp, Homo sapiens
  misc_feature (1)...(459): n = A,T,C or G
ggcggggnnngnnnnatttgagaccttttgcatggtgcngcatttccatgatccgctttatcctcatccagaaccgggcaggcaagacgcgcctggccaagtggtacatgcagtttgatgatgatgagaaacagaagctgatcgaggaggtgcatgccgtggtcaccgtccgagacgccaaacacaccaactttgtggagttccggaactttaagatcatttaccgccgctatgctggcctctacttctgcatctgtgtggatgtcaatgacaacaacctggcttacctggaggccattcacaacttcgtggaggtcttaaacgaatatttccacaatgtctgtgaactggacctggtgttcaacttctacaaggtttacacggtcgtggacgagatgttcctggctggcgaaatccgagagaccagccagacgaaggtgctgaaacagctgctgatgn

SEQ ID NO: 985 - DNA, 461 bp, Homo sapiens
  misc_feature (1)...(461): n = A,T,C or G
ggcggggnggggggcctgagnccntngaatgattncatatccangngcgtggaattcatttgaaagtgatggtacatacaatgacgtttagtcaccagtattaagggaaataaaagcctttttcaaaacgaaacttgcataatgtccatgcgtttgggaaatactatatttgattgtttgcatgtatgattataccatgagagacaggattaatatacaagatggcctggcaaatttctaattagagggaatattaattttctacaaaataaagtttgttcatcaatacaaacctgctttcaaatcaaatcagaaagacatccttcggaatgtgttgagaaccaattagtgacaacactgaagaccagaaaggcaagctgaagacaccagacttcgcttgaagggcaaacatgaaatccaaacatcatgtctatggcaacagaacagtcgaacctttgccn

SEQ ID NO: 986 - DNA, 466 bp, Homo sapiens
  misc_feature (1)...(466): n = A,T,C or G
ggtagtaaaactgagacaccattgagtgccgtggaaancgccaannnaagaaagcacagctattggaaagccaggaaacagacccagagaggcggatgcatgtgggagcaaagagctttgggcagcctttaagctgaggaagtggagaggctggcggcgatgcgttctgactccctcgtcccaggcacccacaccccacccatccgcaggagaagtaagtttgccaacctgggaaggattttcaagccttggaaatggaggaagaagaaaagcgaaaagttcaaacacacgtcagcagccctggaaaggaaaatatctatgaggcaaagcagagaagagctgataaagcgaggagtcctgaaggaaatctatgataaagatggggaactctctatatccaatgaagaggactccctagaaaatgggcagtccctgagctccagccagctgtctctgcctgccctgt

SEQ ID NO: 987 - DNA, 472 bp, Homo sapiens
  misc_feature (1)...(472): n = A,T,C or G
gaaatgtccnccttgagncccctcctgagttcgctagaacangcggnggaattcgagatgtctagactggtgcgttgtggtctccggtggggccagatccccagaacagggagagactgcatacaagtctgagtggcagaagcttcaagtgggtgaggatcggtgtgtgagacccgcgagtgggcacgtctctgaatgtgaggtctcgggcagcacgtgaggtagaacgagtgtgagcgtctccacgcagtggctggccccgtggccggggcgtctcttgcatgctgttggtggtccttccccagttcctatctcccacccgcctggttccagccccatcccctctcccactgagtcacaggtttgagattcccagagaggccaaagacagctacaggaagtaccctgggggctcagctgagagagagtcacagaaaggccagagggtctcaggaaggtctggaggtcacag

SEQ ID NO: 988 - DNA, 460 bp, Homo sapiens
  misc_feature (1)...(460): n = A,T,C or G
ggcgggnnngggggnccctgagacccttngactgatggccatctgcaagagcgcggttgcaagatttaatagagtgaaatagagtgaaaacagagctcccatacaaagggaggggacccaaagagggtagccattgccagctcaaatgcctgggtttatatccagatcattgtccctcctgctgtgctctcaggcagtagatgattagctatttctttacctcctgtttttgcctaattagcattttagtgagctctctgattggtcgggtattagctaagttgcgagccccgtatttaaaggtggacgcggtcaccttcccagctaggcttagggattcttggtctaggaaatccagctagtcctgtctctccatagctcactgcagtctccaactcctgggcacaagtgatcccccagcctcagcctcccaagtggctgggattacagatgtgtgccn

SEQ ID NO: 989 - DNA, 473 bp, Homo sapiens
  misc_feature (1)...(473): n = A,T,C or G
gggcgggccgggggaanttttgacctcgcagtccctagtcagtgtggtggaattctcgcctcccactggagcttatggctggcacccagcgaggggcagcaggaccacgtggctggcaaggagctgtttagggctgagagccaggcacctaaggttggtgccctgtcccatcccatcgaagacacgcggccttatggagtccccatgggacggggcagccaccttttctcaggatccgggagactgacgcggacacatgcagaaatgagcaaggaggccacagaggctgaaaatgctttcagaaacaatccgaagtttcagcgacttgttaccccatctgcttcctgctttgcaaccacctgtggagtggagagacaaggcagggaagcagcaccttgcccttccagctctcatttcccccccgccaccagaaactgggaaggggtgggcggnggtctgcgatgagtagactt

SEQ ID NO: 990 - DNA, 462 bp, Homo sapiens
  misc_feature (1)...(462): n = A,T,C or G
natggaccccctatcngagaccactagnccagngcggnggaattctgtggctgtgtgcacctcccacttcacctgctgggccccggaaggcatttgcgtttcccaccgctgatcaggaacaggagtttgttcatctggcaaagagactggttagtgatcctgcattagaaaaggaaatcgtagtgaacggaagggaatacgtgagaatgtatcattcatggcaggtggaaagagacacctaccaacagctcatcaggaagctggaaggaagcactgaagattgagggccccgcctcatcagacacctgctctctgacacacagctctgggtgcacactcagagacagagttctggatcacgtgggcccagtgcagttcaaataaaaccagcctcagcggaatcctagaaaatgttagtcgtgagtccccagagccactgcattcatcccatatccttctgtg

SEQ ID NO: 991 - DNA, 517 bp, Homo sapiens
  misc_feature (1)...(517): n = A,T,C or G
ggattcccanagtnagggccnggnnnaggggggnaattgagncccctngnnactgantacctaggccagngncgnggaantcgacaccagcacagcaaacccgccgggatcaaagtgtaccagtcggcagcatggctacgaaatgtgggaattgtggacccggctactccacccctctggaggccatgaaaggacccagggaagagatcgtctacctgccctgcatttaccgaaacacaggcactgaggccccagattatctggccactgtggatgttgaccccaagtctccccagtattgccaggtcatccaccggctgcccatgcccaacctgaaggacgagctgcatcactcaggatggaacacctgcagcagctgcttcggtgatagcaccaagtcgcgcaccaagctggtgctgcccagtctcatctcctctcgcatctatgtggnggacgtgggctctgagccccgggccccaaagctgcacaaggtcattgagcccaaggacatccatgc

SEQ ID NO: 992 - DNA, 460 bp, Homo sapiens
  misc_feature (1)...(460): n = A,T,C or G
tgggctgnnnnnttttggctgcattccctaggcagtgtcgtggaattcgtgaagggcaaggtccagccttatgattcccactccccagggccagccaagtctcgggatggtgaacgtactgtctattgcaacgtacacaagcatgaaccccttgtgctgttttgtgagagctgtgatactctcacctgccgagactgccagctcaatgcccacaaggaccaccagtaccagttcttagaggatgcagtgaggaaccagcgcaagctcctggcctcactggtgaagcgccttggggacaaacatgcaacattgcagaagagcaccaaggaggttcgcagctcaatccgccaggtgtctgacgtacagaagcgtgtgcaagtggatgtcaagatggccatcctgcagatcatgaaggagctgaataagcggggccgtgtgctggtcaatgatgcccagaang

SEQ ID NO: 993 - DNA, 484 bp, Homo sapiens
  misc_feature (1)...(484): n = A,T,C or G
ggaagagcccnnntttgagtccatattgagtgtcgtggaattcgtagaccggcgggtgcagggcccggtcccagagttaagggaaagtcgtttggaaaccccaggccaacaggaccctttggcagctgaggctggaaacagcggaaccaaaggcagacggtcctcagttgcttgggcggacgtggacccaatctgtccgtccttacaagtttcccccaggggcaggacctagacgcgcggcgcattcaggttctcctggaccgtagtggtagtcgctggcccgagttagaggccagctgagaagtcttcgtgcttcagatttgtttacctacaaaatgcttcggtatccatatttttgtagaatgtataaagaatgcctttcatgttggttggaatctggcatacctaatttaggtgtctggccaaacagaatacatactacagcagaaaaatatagagaatatgaagcccgggagcaaacaga

SEQ ID NO: 994 - DNA, 480 bp, Homo sapiens
  misc_feature (1)...(480): n = A,T,C or G
ngatgggcccacattgataccctaatcgatgagctgtgaattcggccttggaatccgtcgacttaagagggggccacgatggcggccttgatccacttacggtgatgcaccaccttgatgcacagggaaggcctttctggcacgggacatggttgactgtgccatgaggcgataccttggagctcaccattacagacgaggggggcgcctcaatcacccgagcaggggcttttgccccttgggcagcgtccagcacacagcatgaacttggtcaccttctgagggtgaacttgcgcacacacgtcattggaaataacatggaggcccacacactgaagtttctttggggacaagaactcctctggttcaatgctgccccagcctgatgcgtagcaggtggtccacagtgctggctcctgggggggcaggtgcatgaccttcacagcatccgtgagctcggcaggctctgacaggcggagg

SEQ ID NO: 995 - DNA, 486 bp, Homo sapiens
  misc_feature (1)...(486): n = A,T,C or G
agagtncccnnnnnnaggccgcccccttgagaccctacgctagagcactctaggccaagccgngaaagctgcaccggcggagttagagcgacggtaccctgggacgaggctggcctggctcgctgtgcgagcagaggccccttcccaggtgcgactcatggacgtggtctcgaagaagcaccctgaggacactctcttcttccttaccaccgtgtggacaaggcctgggcccgaagtcctcaaccgctgtcgcatgaatgccatctctggctggcaggccttctttccagtccatttccaggagttcaatcctgccctgtcaccacagagatcacccccagggcccccgggggctggccctgaccccccctcccctcctggtgctgacccctcccggggggctcctataggggggagatttgaccggcaggcttctgcggagggctgcttctacaacgctgactacctggcggcccgagcccggcg

SEQ ID NO: 996 - DNA, 531 bp, Homo sapiens
  misc_feature (1)...(531): n = A,T,C or G
cctactccgatgacgccatcaaacatataataatagaaactacacataacataactacccacgactaacacnagccccccccaatgagactntgatgaggcntgggaccngccangcaacangagcgaggagcgaccggagcacacagaggngccagccaccttttcagccangattggaagactcctgaggcctccccagccatggggaactgacaacttgcctttgatgattttcaagagagttgtgctatgatgtggcaaaagtatgcaggaagcaggcggtcaatgcctctgggagcaaggatccttttccacggtgtgatctatgccgggggctttgccattgtgtattacctcattcaaaagtttcattccagggctttatattacaagctggcagtggagcagctgcagagccatcccgaggcacaggaagctctgggccctcctctcaacatccattatctcaagctcatcgacagggaaaacttcgtggacattgttgatgccaagtagaaaattcctgtct

SEQ ID NO: 997 - DNA, 508 bp, Homo sapiens
  misc_feature (1)...(508): n = A,T,C or G
agtactcnnnatggaggccgggnnnagnnnnnaattgagaccctttgcatgtgatggcattcacaaggcaaattacttgctgaaagaatgccaagggtcggagcagttggagctctatatgatggtgccagctgtgggcagcatggtgactaggttggaagtggcatgtggagttgtcaggcaccacctgccatttaacttctcatttttctagtttgaaaatggtatgagcttcgttcttcctttcagatccatgagacaatagaaaccatcaaccagctgaagactcagcgggagttcatgctgagctttgccagagaccctcagggtttcatcaatgactggcttcagtcccagtgcagggacctcaaggtaaagaacctangagaggtctgaagggacttangtcagtgaggtgcacagctgctttattcatgtagcagctggtaggagacccacaggaaggagtgaggggccagatttttctttagcatgttccagggtccat

SEQ ID NO: 998 - DNA, 193 bp, Homo sapiens
ccaaaagaatagtgacaggctaggaggaagggtctaggtagccaagtggcatgttaaattttattgttattaaacttctaatttataagtaattcagattccttgtttaaaacaaaaattcaccacccagaaataaatatatggtgtcatatcacccataccatttgtaatttggcttttgcctcctgacaat

SEQ ID NO: 999 - DNA, 433 bp, Homo sapiens
  misc_feature (1)...(433): n = A,T,C or G
atcgaattcatgactcaccgacccagcgnggnggaattcgatttacttcctgtcctgccattcgtgtgcttccatggacaaacctgttttttttctcttagttctaaagaatcttgggttattttgtagcggtgccagtatttcagtagatgggatttcagccaagtaggttcccctgtaacctcctacaaagcaatattccaaaggaacattttaactgtaaaggctggagacaagaaaaaataagtagatcgttttaataacaattatttaattgcctataagtttgctgtttcagaggctagcccaaaggcatcaaatttaataaagttaaacaaattgatttacttcagagcaaatatgatcctattaaaataatatagggtaaataccctacctcttagaaagggcaaaaatgcaaagaagctttctt

SEQ ID NO: 1000 - DNA, 457 bp, Homo sapiens
  misc_feature (1)...(457): n = A,T,C or G
attgaccccctnattgtagactctagtacgngcggtggaattccctcgtgcttccctcctagcctcatgactgtgggtctttgtttttgtttttgtttttgtttttttgagacggagtctcgctctgtcgcccaggctggagagcagtggcttgatctcggctcactgcaagctccgcctcccgggttcacgccattctcctgcctcaggctcccgaatagctggggcgcccggctgatttttttttgtatttttagtagagatggtgtttcaccgggttagccaggatggtctcgatctcctgacctcgtgatccgcccgcctcggcctcccaaagtgctgggattacaggcttgagccaccgcgcccggccgactgtgggtctaaactagctttattctctcaaaggtaccaggaggaaacagcactagtattcctgtattggtgtggctcttta

SEQ ID NO: 1001 - DNA, 485 bp, Homo sapiens
  misc_feature (1)...(485): n = A,T,C or G
cggggcnccnnaaatgannnccntactgagacccttctccagngncgcggaattcgtggtcaccatcaccaaatcggtaaaggtgcacttggagaaagagaccaaagaagaggggaagccactgcagcaggagaaagagaaggagaaagcgggaggagagggaggaagtgaggaggaagggagtgataaaggtgccaagggatccaggaaggaagacatagctgtcaatggggaggtagaaggaaaagaggaggtagagcaggagaccaaggaaaaaggcagtgggagggaagaggagaaaggcgttgtcaccaatggcctagacttgagcccaccagatgaaaagaaggggggtgataaaagtgaggagaaagtggtggtgaccaaaacggtagaaaaaatcaccagtgaggggggagatggtgctaccaaatacatcactaaatctgtaaccgtcactcacaaggttgaagagcatgaacagn

SEQ ID NO: 1002 - DNA, 441 bp, Homo sapiens
  misc_feature (1)...(441): n = A,T,C or G
gaccngcnnnaattgagtaccatacttagngnggnggaattcgctgggtgcaagcgagggtcttcgttcccgctgctttgcagacagtatttccttaagcaggccaggggcaggcaggctttcctgccagaacactcagaaagctgcagggtctgggggcaggacgggtggatgcgggagcagactcagaccagcaagagatgggggtcaggagagtccaggactgggctagccagcctgtgtccagccagcgacccagcacagtgacctgaagacttggccactgtatggggctagagacagcatctccatggacaacaacttcttagccacggaaagtgtcattttgaatgagaacatctgtcttttacaaaaatagaatgtgtcttttcaggtggccagtatctgggagggctgagctccttttgtaaacaatgaagn

SEQ ID NO: 1003 - DNA, 476 bp, Homo sapiens
  misc_feature (1)...(476): n = A,T,C or G
cgggtcncannaattgagacccattgaagngcctggaanncatccacaggactggatctgatctcaacctggtgttctgggcttggacccaccttctgctccgcccccaatcatggctcctcccccagcgtagtccggcccacaggcctgattctaacctcaagctcatcctctgggcctggcctcaccttcctcctggtcctctagcgtgggcccgtgcccctggcccatagctccctccacaggcctgactaacttcaaccttgttctctgaacctggggactccagcttcctctgtgagtccacagcaagtctcagctgcacccacgcgggaggaaactagaatttctcgacgtaatgtcttccagcaaggctgaagcacgagcagcagagccactcctggctggaggctgtaagcggaagtgacgcaagcgaggcgccaccctcttttccggtactggctccgcgagcctgn

SEQ ID NO: 1004 - DNA, 458 bp, Homo sapiens
  misc_feature (1)...(458): n = A,T,C or G
catgaccccntcattgagaccatcggaccgngcggnggaantcccagcgcctgttgttggagacagctgtctttgaactattgcaggttataggtttcattaagatgacaacagaaagctgcatggggatacaaagcttatatgtaggtggttctcacctgcagcccagtgaggggagaaagccggctggccaggaactctgggggaggtacgaaggaagccctcccatgtgtcgcccaggccggccggccggcagcagcaacacctgggaacatgcgcccctgggcccaccccagccccactgaatcagaaactcatgggggtatgggggtctggacaatctctattttaacaagccctccagggcgttctgacacgggccaagtgcaagaccatcatcttctcagagaacttaggatgtttatggacagccaggcagctaggcccagcgcctgtga

SEQ ID NO: 1005 - DNA, 488 bp, Homo sapiens
  misc_feature (1)...(488): n = A,T,C or G
agtgcgnnnnggggcnccactgagaccaatggaatggacgncgattnccactatattgctatacagttgagatcagtgttgtaaaattaaactgatctggttctaattgcctcaaaggccaaagcccaggcatttgaaatggaaagaagcagagaggaggctgacttagctgattggtatggaaacagttgggccaagagccagaatttccctttgtagcaacacggctagttttactttgagaagctctgctcagctgctttataacattaagtctggcggaatggatgtcactgtgcacaataaagttttcacaagtataaacaatggtgatgtaagtcaacattgctgtagccaggtgtgaaggttgtatggtgtgtgacgaatgtacatcatgtttgtaggtttggatgctaatcttgaattgtagcttaaaaaatacgtatttttgtaactctttgaaagtttatgaagactgacagctttcn

SEQ ID NO: 1006 - DNA, 457 bp, Homo sapiens
  misc_feature (1)...(457): n = A,T,C or G
atcgacccccctngatgtagactttgnacangcggnggaattcgcggagccgcctcctcctggccagttccccagtagtcctgaagggagacctgctgtgtggagcctcttctgggacccagccatgagtgtggagctgagcaactgaacctgaaactcttccactgtgagtcaaggaggcttttccgcacatgaaggacgctgagcgggaaggactcctctctgcctgcagttgtagcgagtggaccagcaccaggggctctctagactgcccctcctccatcgccttccctgcctctccaggacagagcagccacgtctgcacacctcgccctctttacactcagttttcagagcacgtttctcctatttcctgcgggttgcagcgcctacttgaacttactcagaccacctacttctctagcagcactgggcgtccctttcagcaagacgatgg

SEQ ID NO: 1007 - DNA, 432 bp, Homo sapiens
  misc_feature (1)...(432): n = A,T,C or G
atcgacattcctgactcctagtccgtgtggtggaattcccagtgtgtgaggggagcaggcagcggtcctagccagttccttgatcctgccagaccacccagcccccggcacagagctgctccacaggcaccatgaggatcatgctgctattcacagccatcctggccttcagcctagctcagagctttggggctgtctgtaaggagccacaggaggaggtggttcctggcgggggccgcagcaagagggatccagatctctaccagctgctccagagactcttcaaaagccactcatctctggagggattgctcaaagccctgagccaggctagcacagatcctaaggaatcaacatctcccgagaaacgtgacatgcatgacttctttgtgggacttatgggcaagaggagcgtccagccagactctcctn

SEQ ID NO: 1008 - DNA, 472 bp, Homo sapiens
  misc_feature (1)...(472): n = A,T,C or G
cggcncgccccaatcgagncccctnaatggagactctaggacangcggnggaattcattagatgggctttcccaataggccaaaaaaatgctgcgcatactcagagctggttgttgtgctgaggccagtcagaggatgcttcccctgaggtttgctataactaagcaacctttatgtgactctcaccttctgacctcctggcaagagaaattcagtgcagcagggggacacagacctgcccaagccaccccactgccgttccctctctgagcacaagctgggcaaatcactgtcccttggactccaggagaccagtgtcctagacttgccttttttctctaagtggcaggatcagaaaacctgcgagctttagtttgtattttcactttatgaatgaggaaactgaaatggccttaagggagcaagttatttctttttttttgacccgggagtctcgctctgttgcccaggn

SEQ ID NO: 1009 - DNA, 197 bp, Homo sapiens
  misc_feature (1)...(197): n = A,T,C or G
gnggactaanngattagntgactgccttcagggctgacgttctgtgaactgagtaatggaggaataggtacatttcgtaccttttggccacaccctggattgctgggtttcttgcggaccaccaaggcttgccccatcaggaacttttctctctcacaaggcgcagtgtgtgcgaaggatgtggagactggcaggtg

SEQ ID NO: 1010 - DNA, 482 bp, Homo sapiens
  misc_feature (1)...(482): n = A,T,C or G
agtggangaganccccctgaaaccntactgatancntacgcagtgtcgnggaattcggagaattgcttgaacccgggaggcggaggttgcagtgagttgagatcgcgctactgcactccagtctgggcgacagagcaagactccctttccaaaaacaagcaaatgaaaaaatagagttttctctatcacacaaatgggaaggtttgtattgaatgttatatttatcctctatccagtcttgtcttggagcacaaagcaaaaaggcccagcatcctccactgtcttctgaaaacttgccctcaggcctgagcaagagggctgcccggttgcttccatgtagccagccagcatatgtgcagggcccagtctagagggaggagggggtggcacatggatggtttcgtttaattggaagacagtgggtagattggagctggcatttgaagatgttgagagttgtggatcatgggcaagataagcgn

SEQ ID NO: 1011 - DNA, 433 bp, Homo sapiens
cacacactcacacatgtccagatgggagcttggtttgggagtccctccttttgaggatagccccggggtgttcctctcagccccatttctgagaacaggtgaatggcagaacagccctggccttggcccagccagctctctgtgttgcgcccttagagcctctgcgccctcagttccgtcctgctcttggcaaattccagaccctttcagaaatggccgaagccctaagcctctcctcactctgcactcccaaaaacagaacaatttaaggatgcttctctttcgggtggtggtggttgttaatttcaggaatttagaagaatcattgctccgaccaatccactgtctcctgagttttctttattcatgttaagatggcaagaatcagagaacagggagacttggtctgctttctaaaagcagctgacaggag

SEQ ID NO: 1012 - DNA, 477 bp, Homo sapiens
  misc_feature (1)...(477): n = A,T,C or G
gagggtatccaaaatcgagacctattgaagccgctggaantcctttttaatgagggctaagttttctccaatactatatggcctgcagaccgctcagctttcattccagtgaaaacattccagaaaaaactctgaatcaatcccaggtgtttctccaatcagctcaggatgattgtgtgttacctgctgcccagccagtgacacctctccaggcctctgacttagctaggtctccaccatgtgactccaccatagactccccaccttcttcttttgcaaagcctcagacacccaaacacctaccaaaagtgggtagggcaccaggacactccaagtgtaagtggggctctccagcacacctggatgtggaggtgtgatgcaaagtggtggctgctcgtgacactcatttcacccctttctgtgcaggtgccagaagcccaggaagcacacatcaaggctcacttgccagcggggtgg

SEQ ID NO: 1013 - DNA, 480 bp, Homo sapiens
  misc_feature (1)...(480): n = A,T,C or G
gtggganccnnnaatgagnaccaactgagagcctaggcagngncgnggaattcccagtatggagaactgatggccacatgaggacagagacgagtgacaccaggtcgtcttcataaaactcgattccctctgcttctgcttgttcccaaagctttgtttaaagctactttgggccgggcgcggtggcttactcctgtaatcccagcactttgggaagctgagtttgtgatggacgcctctgaccccacccagctctctgcatcctgtgtgcagctcttaggtctcctttctgcagaacaacttgcagaagcatcggtgctgatactcttcaataaaatcgacctaccctgttacatgtccacggaggagatgaagtcattaatcaggcttccagacatcattgcttgtgccaagcagaacatcaccacggcagaaatcagcgcccgtgaaggcactggcttagcaggggtgctggcctgg

SEQ ID NO: 1014 - DNA, 478 bp, Homo sapiens
  misc_feature (1)...(478): n = A,T,C or G
gggggttannnaaaatgagacctatagaaggcgctggaaancgnccgagtcaagtgtctttgacttggatggaggagaagagagtcctgaaggcatatccaagcctgttgttcctgcagacctcattaaccacgccaacagagaaggctggactgctgcccacattgctgcttccaaaggttttaagaactgcctagaaatcttgtgtaggcacggagggcttgagccagaaaggagagacaagtgcaatcggactgtgcatgatgttgccactgatgactgcaagcatttgctggagaatctgaatgctcttaaaatacccttaaggatttcagtgggtgagattgaaccaagcaactatggttctgatgacttggaatgtgaaaacacaatatgtgctttaaatatccgcaaacagacatcatgggatgatttttcaaaagcagtgagtcaagctctgacaaatcatttccaggca

SEQ ID NO: 1015 - DNA, 482 bp, Homo sapiens
  misc_feature (1)...(482): n = A,T,C or G
gggggtaccnnnaattgagaccaaatcgagagcctaggccgngncgnggaantcgtgatccttacatcaagatctccatagggaagaaatcagtgagtgaccaggataactacatcccctgcacgctggagcccgtatttggaaagatgttcgagctgacctgcactctgcctctggagaaggacctaaagatcactctctatgactatgacctcctctccaaggacgaaaagatcggtgagacggtcgtcgacctggagaacaggctgctgtccaagtttggggctcgctgtggactcccacagacctactgtgtctctggaccgaaccagtggcgggaccagctccgcccctcccagctcctccacctcttctgccagcagcatagagtcaaggcacctgtgtaccggacagaccgtgtaatgtttcaggataaagaatattccattgaagagatagaggctggcaggatcccaaacccn

SEQ ID NO: 1016 - DNA, 480 bp, Homo sapiens
  misc_feature (1)...(480): n = A,T,C or G
nccttgatatcccctcgccangngcgggaattcgatcgcctcccggctgtagacaaggggcccatcctcaagaccaagccaccagccgcccagaaggacatcctgggcgtgtgctgcgaccccctggtgctggcccagcagctgactcacattgagctggacagggtcagcagcatttaccctgaggacttgatgcagatcgtcagccacatggactccttggacaaccacaggtgccgaggggacctgaccaagacctacagcctggaggcctatgacaactggttcaactgcctgagcatgctggtggccactgaggtgtgccgggtggtgaagaagaaacaccggacccgcatgttggagttcttcattgatgtggcccgggagtgcttcaacatcgggaacttcaactccatgatggccatcatctctggcatgaacctcagtcctgtggcaaggctgaagaaaacttggtccaag

SEQ ID NO: 1017 - DNA, 432 bp, Homo sapiens
cgcggacctgcggccagacgacagccccctggaggcaggcctggccttcacctgcaagctcaagtcgccggtgcccttcctggggagggaggccctggagcagcagcgggccgcaggcctccgccggcgcctggtgtgcttcaccatggaggacaaagtacccatgtttggcctggaggccatctggaggaacggccaagtggtgggccatgtccggagggctgactttgggttcgccatcgacaagaccatcgcctacggttacatccatgaccccagcggtgggccggtctcgctggactttgtgaagagcggggactatgccctggagagaatgggggtgacctatggtgcccaggctcacctgaagtcgcccttcgaccccaacaacaagagggtgaagggaatctactgagggctcagaccacatgc

SEQ ID NO: 1018 - DNA, 478 bp, Homo sapiens
  misc_feature (1)...(478): n = A,T,C or G
agggctgaagnccccctgataccctatcgatagccgtgaattcggtgtttaagggggaaactggttctgttgggtacatagtccgcagagaatacatagggctaagtgtggtggtgaatctttcacagaagtgacatctaagcctggaagaagagtaggaatttattttccatgtgaaaactcaaaaaggtatttcgagtagagcgttcagcatgagcaatagcagctcatcataaagacttgacttctggaaaagtaagataagaatgaagtggatgaatccagtcttcgtaagaatcaccatgggtgttggttcaaaatgaaggtttccaggcccttgtccctatacattctgattcagtaggtttgtcctggggcccaagaatttgcattaccaacaaataccttggtatggtcaggcagtgggtgtagtgaggagagtcatcctgggtatgacaaggaccaggtataatcaggt

SEQ ID NO: 1019 - DNA, 496 bp, Homo sapiens
  misc_feature (1)...(496): n = A,T,C or G
tgggggtnnnnnnnattgagttcactacccgtgtgcgggaattcctcggtttaatgcctgtgagctcaggatcggcgagccaaacttccaggataaaagcagaaagatcatcaatgttcactgtgcagaaatgcagttccaccaacgaggattccaggaaagaggctgggcagggtgatgagaaggctggcagggcgggttctactcctggacacactcaacctgctgtgtgagcttgggcaggtcacttgccctctctgggcctcccgcttcctcaggtataacacgagagggtggcaagatgctcttctaccttgagtggcctaacgttgatctgagactctttctagacacagtagcattaagaagacccaagtctcgttgcctcaattaaatggttcgtgtgtgacttttaagtttttattagctgtccaattgggtttgatgcctttgcagacagcctatcctagcagacagcctatcctagcagcaagtg

SEQ ID NO: 1020 - DNA, 480 bp, Homo sapiens
  misc_feature (1)...(480): n = A,T,C or G
agggcggagnnccccctgagaccctnactgatgatcctaatcagtgtcgtggaattcggtgcctgacagaagagctcggggagcccgctgcaaccgagaggcctgcccagccgggagctgccaaccccctggtggtgggagccgtggccctcctggacctcagcctggcattcctgttctcccagctcctcacctgaggctacttcctggcctggttctggctttggttgcgtgcctcttcacccctttgacctgccttttttctcttctcctcttcctggctgtgttttctcctatctttctttctcttcttcctttcttttctgagctcctttgtttttttctctcgctttttctttccctgtcttctttcagattatctcatttcttctggatctgtctctgtattcctcactcccttccccatcccaaccccttctttctctagattggttacatatgaagggcttttctctctca

SEQ ID NO: 1021 - DNA, 446 bp, Homo sapiens
gtgttctcaaccagtctacctaggaatgctgttggctgtgaaaactccagaggctggtatctttagagttccttcagggtgcattcagcatctgagcctagcgactcttgaggtgaaagtgctcatgttttttttttggtgagagagtctcactctgtcgcccaggctggagtgcagtggcgcagtctcaaagggctcatctttatgtactttggatgccggtgaatgcctattgtttcagccagctggatcactttacctgttaaccattccaatgagtggccagaaggctcctctccaggcctcacagagggaaacactggtctagtgagagacctgcgtcctgcccatcaggaccgaagcggcacgcgtgaggatcctgcaggccaagagacaacagcgattacaaaccccagtcccagccttgcagctgaccttgcaggtga

SEQ ID NO: 1022 - DNA, 484 bp, Homo sapiens
  misc_feature (1)...(484): n = A,T,C or G
attgagaccannannncgngtcgtagaccctagtcagtgtggtggaattcaccacctgccctgctagccagatggactacaataaggagaatactggctctctaagtccatcaagtggggtgggcagccctgtgtcagggacccgcaagcagctagccaccatctaaataatctaccccaatgacttggcaaagaagatgaccaaatgcagcaagagtcacctgccgagtcagggccctgtcatcattgactgcacgcccttcatggagtacaacaagagtcacatgcaaggagctgtccacattaactgtgccgataagatcaaccggcggagactgcagcagggcaagatcactgtcctacacttgatttcctgtagggaaggcaaggactctttcaagaggatcttttccaaagaaattatagattatgatgagaataccaatgagccaagccgagtgatgccctcccagccacttcacat

SEQ ID NO: 1023 - DNA, 475 bp, Homo sapiens
  misc_feature (1)...(475): n = A,T,C or G
ggggccnngatttgannnccttatgcanactcctaggacagtgcggtggaattcctggagcgcggccagcgcggcgtcggggacgtgctgttgcaactcgaggggatctccctaggtcctggggcctctctcaagaggaaggaccctaaggaccatgagaaggagaacctgaggcggatcagggagattcagaagcgcttcagagaacaggagcgcagccgggagcagggccagcccaggcccctgaaagctctgtggcgctcacccaagtacgacaaggtggagtcccgggtcaaggcccagctccaggagcctggccctgcctctgggacagagtctgcccacttcctgcgggcgcactcccgctgcggccctggcctcccaccaccccatgtatctagtccccagccaaccccaccaggtcccgaagctaaggagccaggcctggnggtggacttcattcgtcacaatgcac

SEQ ID NO: 1024 - DNA, 473 bp, Homo sapiens
  misc_feature (1)...(473): n = A,T,C or G
atgagaccctagccgtgtggggaactccaggggtggagaagcggaggcccaggaggagggggaataaagaaggtggaggatcctggctaccactctgaatccgataccgcttctcttagacctcagcgacagaaaaagggaagggtgtctcatcccccttcctcctctcctgcctgtcctgagccttagccatggccgaggcaggggctgggctgagcgagaccgtcactgagacaacggttaccgtgacaaccgagcccgagaaccggagccttaccatcaaacttccgaaacggaagccagagaaaaaggtagaatggacaagtgacactgtggacaatgaacacatgggccgccgctcatccaaatgctgctgtatatatgagaaacctcgggcctttggcgagagctccacggaaagtgatgaggaggaagaagagggctgtggtcatacacactgtgtacgtggcccn

SEQ ID NO: 1025 - DNA, 489 bp, Homo sapiens
  misc_feature (1)...(489): n = A,T,C or G
agggggatggaganccatannnnnngtcgtgatccctagtccgtgtggtggaattcgtctagaaagcgccaggctccttcctcctgcgtgagccactgcaagctgtcggcgcctcagtgctatggagaccttgggtggattattccttgttggcggggggagggtcccagctgtcctgtgcattataggatatttagcagcatccttgctagatgccatttacaacaatcaaaaatgtctccaggcattgctaagtgtccaggtggggagcggaataggcagaaccgcctccagtcgagaagggctgaactgtacttaggatttgtgattctgcagaaatgggttctgtgaatgcactaaagcatgagaacatccaaaaatcagtgtggcacagaactgaattcaaatttacctggatccaagtaaataagcacaattttgaaagtaccaaacagaattcaagaaaaacaacaacaacaacaaaaaaca

SEQ ID NO: 1026 - DNA, 423 bp, Homo sapiens
attgacgaccatattcagtgcggtggaattcgctgggcgaggtggcgggcgcctgtaatcccatctactcgggaagctgaggcttgagaatcgcttgaatccaagaggcacaggtagcagcgagccgagatccggacaccgcactccagcctgggagacagagcgagactccctctcgggcataaccatggccgccatttcattcacatgagacacagcggcctctatttggtgggcacaacttacaaaaacgtttctctcttcagcctactagaaatgcgctccaggatggccacccttctgggcgattactgtggctacctgggcgaggggaccatctcccgcaatgtggctctggtgtacgaactcctggatgaagtgctgagactagagtctcgctgtgttgcccaggctggtcttgaa

SEQ ID NO: 1027 - DNA, 424 bp, Homo sapiens
  misc_feature (1)...(424): n = A,T,C or G
ctaacctaccacatgtggtgggtgtgtttctggcactgggacggcctggtcagcagcctgtatctgcctcatttgacactgttccttgtcggactggctctgcttacgctaatcattaatccatattggacccataagaagactcagcagcttctcaatccggtggactggaacttcgcacagccagaagccaagagcaggccagaaggcaacgggcagctgctgcggaagaagaggccatagctgctccagccggggctccggggcggcagcagagctggcacaccgattctgggaagccccgcgaatgatggcttttgaattaatgaggcagtgaatgttttgtgtttacttctaagggaaatactaactttctttcgcattagtattaattttgaagtagctacaaagtatttttaagaan

SEQ ID NO: 1028 - DNA, 422 bp, Homo sapiens
  misc_feature (1)...(422): n = A,T,C or G
nttgaagactttttgaagccgttggaattccctccaccggggtggacacaatgccctactggaacctgctgccccccaagcggtccatcaaagaggtgctgacggacatctttgccaaggtgctggagaagggctgggtggacagccgctccatccacatctttgacaccctgctgcacatgggcggcgtctactggttctgcaacaacctgattaaggagctgctgaaggagacgcggaaggagcacacgctgcgggcagtggagctgctctactccatcttctgcctggacatgcagcaagtgaccctggtcctgctgggccacatcctacctggcctgctcactgactcctgcaagtggcacagcctcatggaccccccgggcactgctcttgccaagctggccgtgtggtgtgccctn

SEQ ID NO: 1029 - DNA, 427 bp, Homo sapiens
  misc_feature (1)...(427): n = A,T,C or G
attgaaaccctttttgatgacctttaaacagngtggtggaattcgacgacgtcatcatccagggggatctggaggagctgaagtttgtggctttttacactaaaggcgacgaggtgatcgccgtggccagcatgaactacgatcccattgtgtccaaggtcgctgaggtgctggcctcaggccgtgccatccggaagcgggaggtggagtgagtgtgggtgtgggaagcctgggggtgggagtagttccctggagtactggctaaggtgcctatgacagccagccgcccccacaaccctccagggcctttcccctcttggtttgcatcgcctgaggcttacaggactacagggaggtgtggggcaaggatcatggtttgagagcaggctggttatgtgttcatggtggatggaagggatagagatgt

SEQ ID NO: 1030 - DNA, 472 bp, Homo sapiens
  misc_feature (1)...(472): n = A,T,C or G
ggggcccgaattgaaacccaatgattaccctacggaagngcggaggaattccagatatcttaaattctttgagctttaatcttgccatctctaaatgaggaatgttgcctactaaaaaatgaggtctgaactgctcccctcaggcccttcatttcccagagcatctgttatacagtgtttatgttaagcacctgaaatgggctagaggttctaaaataaggaagaattggtgtggctaagtaaacagaatgcaagagttgtgtaaatcttattttctgcaagaactgtccttgattaataggcttaaataacaacataatttatttatctcagagaacatattactgtactttatctgtttgaaagctttataaaaggcaaggaaaagaaaagaaaatgtgtgaaatccaaatatcaatatcatcattcaattttgttgtaacatgtactgtcaatataacttactcaagca

SEQ ID NO: 1031 - DNA, 472 bp, Homo sapiens
  misc_feature (1)...(472): n = A,T,C or G
agaggccnccaatagagacccaaactgagantcgtaggaaancgcggngcaaaaggctgggcattcaatcctgcgtgataagcacagaagacagctcctcataaccgagagtcttccctcatcccagcaatatgtcccttttggaggcaaaagattgtgtgcactgaagggggccaggccggccatgagcagggcagtgtctgccccaagcaagtctcttgggaggaggaggcggcggctggctcgaaacaggtttaccattgattctgatgccgtctccgcaagcagcccggagaaagagtcccagcagccccccggtggtggggacactgaccgatgggtagaggagcagtttgatcttgctcagtatgaggagcaagatgacatcaaggagacagacatcctcagtgacgatgatgagttctgtgagtccgtgaagggtgcctcagtggacagagacctgcatgagcgg

SEQ ID NO: 1032 - DNA, 455 bp, Homo sapiens
  misc_feature (1)...(455): n = A,T,C or G
nattgaaaactgatgaccatctggccgngcggnggaattcctatcccaactggctcaagttccacattggtatcaaccggtacgagctgtactccagacacaacccggccatcgaggccctgctgcacgacctcagctcccagaggatcaccagcgtggccatgaagtcggggggcacgcagctgaagctcatcatgaccttccagaattacgggcaagcgctgttcaaacccatgaaacaaacgagggagcaggagacaccccctgactttttttatttctctgactacgagaggcacaatgcggagattgctgccttccacctggacaggatcctggacttccgccgggtccctcccgtggccggcaggatggtcaacatgaccaaggagatccgggacgtcacacgggacaagaagctctggaggaccttcttcatctctccagccaacaan

SEQ ID NO: 1033 - DNA, 472 bp, Homo sapiens
  misc_feature (1)...(472): n = A,T,C or G
gaggccnccatagaaaccccctgattagcctccgcaanngcggnggaattcctcagcagcgcgaggtgctgcggcgctgcgtagaagtatcaatcagccggttgcttttgtgagaagaattccttggactgcggcgtcgagtgagctgaaagaacactttgcacagttcggccatgtcagaaggtgcattttaccttttgacaaggagactggctttcacagaggtttgggttgggttcagttttcttcagaagaaggacttcggaatgcactacaacaggaaaatcatattatagatggagtaaaggtaaatttatttctatgccagatacatacatgatatacatgtaggtactatttaattatgtatcaattaaatagatcataaatgtggaatgatggggacttggagagatttgtaactgaagctgccttaatgcttgttaagaatggtggggtggaggctgggccn

SEQ ID NO: 1034 - DNA, 474 bp, Homo sapiens
  misc_feature (1)...(474): n = A,T,C or G
tggcgggccagaanaattttgacctcgatgtccctagtcagtgtggtggaattcgatggtttcggctgtctgaccgagagagatggacgcgcaaagctgaggaaaggagagtgtggagaggggcctggtgtggtgcggcccggggtttgggaccggagggtgctgacggctgacgagttccttgcgtttgctctttcttttcctgaaaagaagactccaggaagggcaactcatgccggagaaagatgaatttcgcgttgaccgcccagaggcgcggcagtgacgccgagttgggaccctgggtgatggctgcgaggtccaaggacgcggcgccgtcccaacgcgacggacttttgcccgtgaaagtggaggaagactcacccggaagttgggagcccaactatcccgcggcttcgccggaccccgaaacttcttcactgcactttangcagctgcgttaccaggaggtggctg

SEQ ID NO: 1035 - DNA, 477 bp, Homo sapiens
ggcgccaatgagacccctggatagagcactctaggacagagccgaggaattcggatggttacatctaaacgtgcagggtttttttcttgtcattattccctaaacaatatagtataacaacgatttgcgtagcatttacattgtattaggaattataagtaatccagagatgatttaaagtatataagaggatgtacataagtcatatgcaaatactgtgtcattttgtatcagatactcggcatctgtggattttggtatccaagtggggggtgtcccggaaccaatcctctacagataccaagggacaactttatgtttaagtgttacttttagtattttattggaggtagccaatacagtatattagtgtatactaattagtgtatacacctcagcctcccagagtgctgagattacaggcatgagccaccacacctggccgaaaacacatgttcttaaaaacatttttaaaat

SEQ ID NO: 1036 - DNA, 453 bp, Homo sapiens
  misc_feature (1)...(453): n = A,T,C or G
tttgagacccattgagngcgtggaanncnccaattgagacaggacttggaggctccacccctcccatccctattacaatggcgcttctcgctgctgtggcaaacatcgcaaatccagggggtgagaaagcagttgctaaacgcaggcggccccacctggcccggcgtcccagctggccgcggagaacagagcgcgcccacttccccggcccaccgggttcctcaggctgtttacactagcgctctaccaacgatgcccaggacaccaggtctcactgtgttgcccagactggcaggctggcacgatcatggctcactgcgcactgacgtcctggcctcatggaatcctctcacctcagccttgtgctttcctttatatgtaaggatgtcaccacacagcatgcttaattatctacttattgctgttggcttttatttggggtttagggagtaa

SEQ ID NO: 1037 - DNA, 444 bp, Homo sapiens
  misc_feature (1)...(444): n = A,T,C or G
ggagtcacgggtggcggngtcatcatcatccttggggtctctagctggggaggcatgtgcattccctgaggcggggatgggtggtgcgggtgctgcaccggaagcagcggctgcagcggctgcggctggaacaggcttctgatcggctgctgctgaggcggcggaggcggtggagggggagcctggggctgtggaggaattaaccttggagaatgagtcacgacaggaggctgtgtaggaagcagcgcaggtctgtggtccttcatcctgcccctctcggtgctctctctcctctggtcccccacaccacgacacatcagcggacctcctcgccgtcctccccgcctggagctgtagcgtccttgtttatgctgtcgctccctttcttcaaattcaagcaatgctgccttggcctctgctgaaagctccaaagtttctggaatg

SEQ ID NO: 1038 - DNA, 454 bp, Homo sapiens
  misc_feature (1)...(454): n = A,T,C or G
nattgagnccatgatgacctctcgccangtcgtggaattctcgccgccatcatgggtcgcatgcatgctcccgggtgagctcggggcatcaagccggattgctgggcggggggtgggaggaagacagggagtgtgggcagcgggccgaggggatgatgttctgggctgctctggcactagccgccacctcacctcgagactgcttctctccccaggaagggcctgtcccagtcggctttaccctatcgacgcagcgtccccacttggttgaagttgacatctgacgacgtgaaggagcagatttacaaactggccaagaagggccttactccttcacagatcggtgtaatcctgagagattcacatggtgttgcacaagtacgttttgtgacaggcaataaaattttaagaattcttaagtctaagggacttgctcctgatcttcctgaagatc

SEQ ID NO: 1039 - DNA, 466 bp, Homo sapiens
  misc_feature (1)...(466): n = A,T,C or G
atctgaccacctgttganaaccctggacanngcgnggaantcctacaatcacagaatgctatgaccctgaacaaaatgaatggagagagtttgctcccattatggaaaggaggatggagtgcggtgccgtcatcatgaatggatgtatttatgtcactggaggatactcctactcaaagggaacgtatcttcagagcattgagaaatatgatccagatcttaataagtgggaaataacggagtctcgctctcgcccaggctggagtgcagtggcgcgatctcgggtcactgcaagctccgcctcccaggttcacgccattctcctgcctcagcctcccgagtagctgggactgcgggcacccgctaccatgcctggctagtttttttgtatttttagtagagactgggtttcaccgtgttagccaggatgatctgaatctcctgacctcgtgatctgcccgcctcg

SEQ ID NO: 1040 - DNA, 453 bp, Homo sapiens
  misc_feature (1)...(453): n = A,T,C or G
ttttgagatcactagnccagtgcggtggcaattcgagttggcaaaaatgggcagtaggggaaatggagttgcttcaacctttctcagtcccggccctcactgctcccaccaagtcaagcagagctgggtgggctgagaccaggatcccagctggactgagcctggggggaggggctggagccaaggagcccccctgggtgggggcatcaggagcaggggcagggcctgaggactgctccccctgcatggagggcaggccaggatggagcccagggtagactttgaggaaggctcagtgggctcagcagaaggaaggctcttctcatagttgtggtttttcacagatggatttgggtgatctgagtgtggtcaggccctgccgttggggaatgaatgccacacggggtttgtctgtaagctgcagtgtctgtgattctgtgtgaactgacagca

SEQ ID NO: 1041 - DNA, 483 bp, Homo sapiens
  misc_feature (1)...(483): n = A,T,C or G
cttcgatcgcgatcactaggcagngnggtggaattccaagctgcggatgatgcattctaacatggagaccctctataaggagctgggcgagtacttcctctttgaccccaagaagttgtctgttgaagaatttttcatggatcttcacaattttcggaatatgtttttgcaagcagtcaaggagaaccagaagcggcgggagacagaagaaaagatgaggcgagcaaaactagccaaggagaaggcagagaaggagcggctagagaagcagcagaagagagagcaactcatagacatgaatgcagagggcgatgagacaggtgtgatggacagtcttctagaagccctgcagtcaggggcagcattccgacggaagagagggccccgtcaagacaacctcttgtgcccctgggaagtagaggaggaggaggagacctttanattgccaacaggaaggccgggtgtgcagtcacatctctgcta

SEQ ID NO: 1042 - DNA, 465 bp, Homo sapiens
  misc_feature (1)...(465): n = A,T,C or G
atagaccacctcggtagtacctcggacanngcgcggaanncggatcaaagcggtcacagcacaatgtccacatccaacgagaaattgttgctacgtttttacgcagggaaaggtggccgtgggaacgtgagtcagcatcaacaggcccagaagggcagccacggtggacttgtcagacgtggaccctgaaatgacaatcacagcatgatttcaggcaggagcctgaaatggtacagctttggacatcggtttggcaaattcttttagagagaaacacacaccttccctaggacccagcaactccactcctaataaccaagtgaaatggaaggagttgtcctcagcaaaacgtgtgtgcggaagttcacagtcactttctcggtgataaccaagagctggaaaccactgcaacacccaccagcaggtgaacggattaacacactgggctagggccacacaatgagn

SEQ ID NO: 1043 - DNA, 461 bp, Homo sapiens
  misc_feature (1)...(461): n = A,T,C or G
atttgagaccctttgaaggcgtcggaatncccaaattctgaagaaaatctaaccatgaaaatgccaataaccataaaaggagtattttcttaatattaatcaaattaattctgctttgttgcaagtcacacagaaggtcctctcttcaactaagtgcaataattttttcccttttactttgcaaagaaaaatgaccaaaaacaatatgctcatttttcaagtaagtagctccttggccttatagaattataaagtataattcattttgactaaaaaacagtaatggtaattttgttttcataaataaaattttaaattgaatatccacaagccggtcatagcatatgcttctccaagcagaagagagtgtaacacttgtcaggcactagctctgtctctaaaatgaggcatgggtgcctcctcaccagttagcaatttcctaaagcaaagtcttgttaata

SEQ ID NO: 1044 - DNA, 459 bp, Homo sapiens
attagacctcgatacccatatccatgtggtggaattcggaacatcgaggacatctaccgctgccagaaggccttcgtgaaggccctggagcagaggttcaaccgcgagcgcccacacctgagcgagctgggtgcctgcttcctggagcatcaagccgacttccagatctactcggagtactgcaataaccaccccaacgcctgcgtggagctctcccggctcaccaagctcagcaagtacgtgtacttcttcgaggcctgccggctgctgcagaagatgattgacatctccctggatggcttcctgctgactccggtgcagaagatctgcaagtaccctctgcagctggccgagctgctcaaatacacgcacccccagcacagggacttcaaggatgttgaagccgccttgcatgccatgaagaacgtggcccagctcatcaacgagcggaagcggaga

SEQ ID NO: 1045 - DNA, 422 bp, Homo sapiens
  misc_feature (1)...(422): n = A,T,C or G
ctgggaaacatagctggagatagctctgtttgccgagattacgtcttgaactgttccatccttaatcctttgttaacactccttaccaagtccacacgactgacgatgacacggaatgcagtctgggccctgtcaaatctctgccgagggaaaaacccacccccagagtttgcaaaggtctctccttgtttgcctgtactgtctcgcctactcttcagcagcgactcggacttgctggcagatgcttgctgggccctttcttatctgtctgatggccccaatgagaagatccaggcagtcatagactccggagtctgccggagattggtagagctgctgatgcacaatgattacaaagtggcttctcctgccctgagagccgtgggtaacatcgtcactggggatgacatccagacccaggn

SEQ ID NO: 1046 - DNA, 504 bp, Homo sapiens
  misc_feature (1)...(504): n = A,T,C or G
tggtgtcccggggnnnncgcngaattgagaccctannnanaatcggagaccatantccangngcnggaattcgttcgtgcgctcagtggtggaagacaggacagaaaataaacggatcaacatccaaagcaacaaggtcattacagcttatggggaaactgactcgatgaagctcaggcctggccgcggtcagggtagaatcaggactagaacccaggctgtgtggctgcggccctgaccctcaccatccaggtcaggcagagaacactcaggtggggcaggaggtcttggcccccatggtgtggggcttggtcacagctgcttccccagccccaggcctgcacgaagaaggcactcactaaatgcttgctgttgaggtgagtgaagctgagggtggaatccgagagtgggaggaggaggagaaggaggaggaggcagcagagaggacgcccacaggagaaaagtctccaaactctcccaggactttgctgtctctgagagggn

SEQ ID NO: 1047 - DNA, 485 bp, Homo sapiens
  misc_feature (1)...(485): n = A,T,C or G
aaaaaaaaaaaggncangacnnnntttcgaaattcctattgcagtgtggaggaattcgttcgttctgtgccacagcctgctgcagctggcgcagctcatgatctccggctacctaaagagctccatctccacagtggagaagcgcttcggcctctccagccagacgtcggggctgctggcctccttcaacgaggtacaggccccacccagccacaggggtggacactgagggaggcttgcaccgcaccttccaccagactcccctctcactaccctaccttaaggccttcccctcccagtgccctcaggcaacccctgtcccagcgcctgcctgaaacctcagagcgtttgcagctgtcttctaggacttggacttggctgtctccccttgggaacctctaatgggtcgggtcctggaatatttcggagctagccagggtccccatatccacccactcccactttgtgtcctttaccttttcagg

SEQ ID NO: 1048 - DNA, 422 bp, Homo sapiens
ggcttatgccgcagaggtctgtgggcctgagcccacgctggactctgtccgttctgcgatgactgctgctctggccgtcgtcacgacgtcgggtttggaagatggggtgcctaggtcccgtggcgaagggaccggggaagtggtcttggagcgggggcccggcgcggcctaccacatgttcgtggtgatggaggacttggtggagaagctgaagctgctccgctacgaggaggagttcctccggaagagcaacctgaaggccccgtccagacactattttgcactgcctaccaaccctggcgaacagttctacatgttttgtactcttgctgcttggttgattaataaagcgggacgtccccttgagcagcctcaagaatatgatgaccctaatgcaacaatatctaacatactatccgagc

SEQ ID NO: 1049 - DNA, 460 bp, Homo sapiens
aatagacctcgataacactaggccatgtggtggaattccaacgaccatggagagatgggccgttgccatggtggacggactcccgggctgggcttttgaattggccttggggactactcggctctcactcagctcccacgggactcagaagtgcgccgccatgctgcctagggtactgtccccacatctgtcccaacccagctggaggcctggtctctccttacaacccctgggcccagccctcattgctgggggccaggccttggatcttgagggtctggcacatccttaatcctgtgcccctgcctgggacagaaatgtggctccagttgctctgtctctcgtggtcaccctgagggcactctgcatcctctgtcattttaacctcaggtggcacccagggcgaatggggcccagggcagaccttcatggccagagccctggcggaggagaggccctt

SEQ ID NO: 1050 - DNA, 478 bp, Homo sapiens
  misc_feature (1)...(478): n = A,T,C or G
gcgcccttcgannccnttcgagatcactagtcagtgtggtggaattcggaagaagccctaaaagaagatccccctagaaatctcctggaagagaggaaatcagatcaactggggctgcctcagaccttgcagcaggaattctccctgatcaatgtgcaaatccggaatgtcaatgtggagatggatgcggcagacaggagctgcacagtgtctgtgcactgcagcaaccatcgtgtcaagatgctggtgaagttccctgcacagtacccaaacaacgccgccccttccttccagtttattaaccccacaaccatcacatccaccatgaaagctaagctgctgaagatcctgaaggacacagccctgcagaaagtgaagcgtggccagagctgcctggagccctgcctgcgccagctcgtctcctgccttgagtcctttgtgaaccaggaagacagcgcttccagcaacccgtttgcan

SEQ ID NO: 1051 - DNA, 483 bp, Homo sapiens
  misc_feature (1)...(483): n = A,T,C or G
ggagggaccnnacactgagacccattgaagngcgctggaaancccancgggacgcccggccagccgctcgggcgcagcacaagggacaggggaccaaggtcagggcccccctgccccaccgcacccccagaatataagctatcaagagtattaatttattgggaatgagctgaggcggatttccccagagaaacaaaaaggtataactttaacaaatatatatttaaagaaagaaatattattgattctatagaaaaccatttaccaactgaaaggacacgaagtctagctccggacaaaagctgttagaggcccaggctgtctgcctgcggtccttcctccggccagagaggaggccccaggctgctagcacaggtggaaggctggtgcccgggggcgggtgctctgccgggggctcctccgtgcttctctcctaagttctctgcgccccaagaactcgaggttgtgccttgctctcggcgn

SEQ ID NO: 1052 - DNA, 476 bp, Homo sapiens
  misc_feature (1)...(476): n = A,T,C or G
atcganacccctatcgtagaccctagtccatgtggtggaattcgcgggtgaacatgccgaggccatcgctagccgggagcaggaggtgctgcagggttggaaagagctgctgtcagcctgtgaggatgcccgcctgcatgtcagctccacagccgacgccctgcgcttccacagccaagtccgcgacctgctctcctggatggatggcatcgccagccagattggggcagccgacaagcccagggacgtgtcatcagtggaggtgctcatgaactaccaccagggcctgaagactgagctggaggcgcgggtgcctgagctgaccacctgccaggagctggggcgatctctgctgctcaacaaaagtgccatggctgatgagatccaggcacagctggacaagctgggaaccaggaaggaggaggtgtcggaaaagtgggaccgccattgggagtggctgcagcagatgctggagg

SEQ ID NO: 1053 - DNA, 449 bp, Homo sapiens
  misc_feature (1)...(449): n = A,T,C or G
natgagaccatgagaccgtcggggaagcctgcacgaatatgaagccatttatctaaagacaagttcccttaatccgcggaaagatggtctcttcatagaaaatgggtctccaatccctacagcctaacagctcgctgtcgggttctaaattaatggagagaaagattatgtttttcacgagcggctgggaacgtgctggcttctttgcaggctgcagacgttttgtgggggaagcggggacagacacaatcaccaaatgaggcagaggctcggctggagggagggggcctgccggcctggtgtggctgacagtctcaaggtgagatggtgagggcacacccctgcctggccggattctccttctgcccatgaaggcgcttggaggacagatcataggaggaaacccagcttctccctgacttgctatgtgacctacggccagagagatn

SEQ ID NO: 1054 - DNA, 475 bp, Homo sapiens
tgtgccattgagatcctattcagtgtggtggaattcgccagtcccttgctttcttacttgttctgcagagcggggagctgaggctgcatgagggaagactcccgtaccccagcacggtggagggtgggatggggtcacgcctgtgcgacccaggaggtggccagcagaaggaaacagtagtgtccaccatggtctgcgtctccccaccacggattgtcttggctccggatttgagacatggcagggccagatgaggacaacttgatgacagtttacagagatggaggcagggtgccaggaagccacgggggagcccccagggcactcagcagtccaggcagggctgggcgtcctggcaaggagcagggaccttctgcccaggggtgtggccagcctgtgggtgctgtgtgcaggaccccaggaaccaaggccgcagtctcttccctcgctccagcatcctcccaaggccaccctt

SEQ ID NO: 1055 - DNA, 418 bp, Homo sapiens
  misc_feature (1)...(418): n = A,T,C or G
aggagtgcnnnccctgataccctanttagtgtgctggcagacagcggcgatattgagtccattcgccattatcatccccaggatgccaccaccaatccttcgctgttactcaaagctgccggattatcacaatatgagcatttaatagacgatgctatcgcctggggtaaaaaaaatggcaagacccaggaacaacaggtggtcgcagcgtgtgacaaactggcggtcaatttcggtgctgaaatcctcaaaatcgtacccggtcgcgtgtcaacagaagttgatgcacgcctctcttttgataaagaaaagagtattgagaaggcgcgccatctggtggacttgtatcagcaacaaggcgttgagaaatcacgcattctgatcaagctggcttcgacctgggaaggaattcgatatc

SEQ ID NO: 1056 - DNA, 450 bp, Homo sapiens
  misc_feature (1)...(450): n = A,T,C or G
natgagaccttgagaacngtcgnggaanncggangctcacagctggagtcagaggggtaggcaggagtttgttttttatttgaagagcatgaggaattggtgacaggctgtacatccctcctcttcatcagagcatgacaaatgtgaaccatcttgatgatttgagattcttactctataggttgatacagtaatacagtatgagtagatatacttaggacacaggcaggatgggaaaaaataatacctacccccttgcacccaatattcccagacccttatggttgatggctgtagtctctcagctgtgactgctctgcagggacctccatctctcacccgtcagacagcgactgaaggtggcttacagagcatgaaggacggcgtgtgagttggccagctctgtgtgcagaagctgtttcccaaaaccatttgtgtgtttaggtcttg

SEQ ID NO: 1057 - DNA, 483 bp, Homo sapiens
  misc_feature (1)...(483): n = A,T,C or G
agagggccnnntttgtagtccctattcgagnaccactagtcagagtggtggaattccccgaatagagcggccgcgccagcactcagaggcgggtgaacgcctccgttcactgtgtactggggattatacgtgccaggcctttactgataggcggtcggccgtgccttttttgtgcgtgcaggggaacactgccactgtgccttcattctaaagtgagggaacggcttcctttcgtgtgacctggtgaaaatcgatgatggagcttctcccctggtttcctcctcagagtccacgctgaggcggcgcagggtgtgcccgcaggcctcgctgactgccacccacagcagcacactggcggaggaggtggaggcactgctgcacacgctgcactccctgactcagtggaatgggctcatcaacaagtacatcaactcccagctccgctccatcacccacagctttgcgggaaggccttccaaaggg

SEQ ID NO: 1058 - DNA, 452 bp, Homo sapiens
  misc_feature (1)...(452): n = A,T,C or G
attgagttactagnaccctacgccanngcgnggaattcctgcactcaaccaggatgagaggctgcccggccaatgcagctgccgccccgtctgctgcggaggctttgctttttgactccctggcgacagtaaagttgaagagcttccggccggaggccaatagatgggacccccggaaggcggaagttctagggcggaagtggccgagaggagaggagaatggcggcggaaggctggatttggcgttggggctggggccggcggtgcctgggaaggcctgggcttctcggccccggccctggccccactacacctctctttcttcttttgttgatggggtctgtgactgcggatataactgacggcaacagtgaacatctcaagcgggagcattcgctcattaagccctaccaaggggtcggntccagctctatgcccctctgggacttcca

SEQ ID NO: 1059 - DNA, 426 bp, Homo sapiens
  misc_feature (1)...(426): n = A,T,C or G
nttgaaatgagactcttagacagncnggnggaattcggcaagatatccgtagcgtctggagggcgatcttgtcctgtggttacgatctttactttgagaggtgcgcatgcatcgatgtccgacatgcacagaaggcctcaagaaagtggaccctggagatggacgtggcacttgtgcagtacatcaaccagctatgccgccacctcgccatcacacccgcacggctccatccccatgaggtgtacctggaccccgcggatgctgctgaccccagagtggcctgtctcctgaacgtgcccatcgagagcctgcgcctgcgcttcgccttgctgcagtccctcaacaccacactggagaccttcttcctgcccctggtggagctgcgccagacacccatgtatacccacagcatcgccgccctgctga

SEQ ID NO: 1060 - DNA, 481 bp, Homo sapiens
  misc_feature (1)...(481): n = A,T,C or G
gcgggcncccctgaaacccgctgagagtcntcgaagagaccgcaagncgnccgagccaagtgtctttgacttggatggaggagaagagagtcctgaatgcatatcctagcctgttgttcctgcagacctcattaaccacgccaacagagaaggctggactgctgcccacattgctgcttccaaaggttttaagaactgcctacaaatcttgtgtaggcacggagggcttgagccagaaaggagagacaagtgcaatcggactgtgcatgatgttgccactgatgactgcaagcatttgctggagaatctgaatgctcttaaaatacccttaaggatttcagtgggtgagattgaaccaagcaactatggttctgatgacttggaatgtgaaaacacaatatgtgctttaaatatccgcaaacagacatcatgggatgatttttcaaaaagcagcgagtcaagctctgacanatcatttccn

SEQ ID NO: 1061 - DNA, 425 bp, Homo sapiens
  misc_feature (1)...(425): n = A,T,C or G
attgattactacacnnccgngnggnggaattcgcagtcatcaccaaagatgcctctgatttgtgactctgaaaattcttgcaaagctgagaaggtgaaattcctctggctatattgttgaccaaaggccctcctctgtaagagtgaattgcacgctcacttgaaactatcttgagggactaaggtgtacaatcctggtgcttatgcagtttggggctctaggtagacacgagctggctttgaaattgtagattcctacactccccctttctggagttctgggtctaagtgaattgactcctatttctgttgtgaatgttgnagattcccttcccattctcttggcggccctggaagcttctaggcacagtgtgccaccctgattattcccaccactccatccaacttttctctctctgtggtgcn

SEQ ID NO: 1062 - DNA, 426 bp, Homo sapiens
  misc_feature (1)...(426): n = A,T,C or G
nttgattacgcctacnccgngnggnggaattcacctggagctgcccgaggacgcggaggagagatgtgtgacgggagccacttggcctccaccctccgctattgcatgacagtcagcggcacagtggttctggtggccgggacgctctgcttcgcttggtggagcgaaggggatgcaaccgcccagcctggccagctggccccacccacggagtatccggtgcctgagggccccagccccctgctcaggtccgtcagcttcgtctgctgcggtgcaggtggcctgctgctgctcattggcctgctgtggtccgtcaaggccagcatcccagggccacctcgatgggacccctatcacctctccagagacctgtactacctcactgtggagtcctcagagaaggagagctgcaggacccccaaagtg

SEQ ID NO: 1063 - DNA, 471 bp, Homo sapiens
  misc_feature (1)...(471): n = A,T,C or G
agtggcccnnnnaggccccatgagaccccgtagagaccctcgaagngcgggaanccactacctaccgcagatcaagtacttctcttttcctggagagcttttgtgaggattttgcanatgctggcgttacctgtcattgtctgcagcctggtcacaggtatggcatccctggacaacaaggccacggggcggatggggatgcgggcagctgtgtactacatggtgaccaccatcatcgcgggcttcatcggcatcctcatggtcaccatcatccatcccgggaagggctccaaggaggggctgcaccgggagggccggatcgagaccatccccacagctgatgccttcatggacctgatcagaaatatgtttccaccaaaccttgtggaggcctgcttcaaacagttcaagacgcagtacagcacgagggtggtaaccaggaccatggtgaggacagagaacgggtctgan

SEQ ID NO: 1064 - DNA, 453 bp, Homo sapiens
  misc_feature (1)...(453): n = A,T,C or G
attgagntcatctttaccgtcggaagnngcgnggaattcctcatgaaggccgggctgggtgtcccaaaccagggccacggaaaggcagttttaaggttgcgcgcgggccgtaagggctgatgggcggctgttgggggctgaatgggagggacccgggacctctcatgcatgaagccgcaggcccggggcgccctagtgtttgaggacgcgcggtccatgcctgaacctgggtgcgcagccgcagctgccgccatctgcctcagggggctgggctttgaccaggcggctgggcagcgccagttgaaagcggttgagcaggccgggcgcagtggctcacgcctgtaattccatcactttgggaggccaaggcgggcacgatcacggggtcaggagatcgagaccatcctggctaacacggtgaaaccccatctctactaaacatacaaaaaaaag

SEQ ID NO: 1065 - DNA, 454 bp, Homo sapiens
  misc_feature (1)...(454): n = A,T,C or G
nttgatttcgtagtccctagtccgtgtggtggaattcagaacgcctgccagcaggtgctggcccagctgggctacaagatcgccgcctcggaggaggagctgaagaacccctcggtcagcctggtggaggagcgggacttccgccccttctcgtgacccgggcggtgcgggtgggggcgggaggcgcaaggtgtcggttttgataaaatggaccgtttttaactgttgccttattaacccctccctctcccacctcatcttcgtgtccttcctgcccccagctcaccccactcccttctgccccttttttgtctctgaaatttgcactacgtcttggacgggaatcactggggcagagggcgcctgaagtagggtcccgccccccccaccccattcagacacatggatgttgggtctctgtgcggacggtgacaatgtttacaagcaccacatt

SEQ ID NO: 1066 - DNA, 497 bp, Homo sapiens
  misc_feature (1)...(497): n = A,T,C or G
tggaaaggggnnnnngnntttggaccctatccagttgggaaacctgaggangcggcctgatccagcctgagctcagacgcattgtacatggagagagagattatgctagcgaagaaaaaaagcgacttgagggggaacaaagagcagcgctgcaagaacaggtccgagtcagaagaggactggaagacgaggtgcgtgcctgagtcagggggtgtggctgagccctcaggcaggctgctgtgtgcagacgaggcagggatgccagacactgtgaccccagagcaagggcctatctaacacaaaccctgccgagttgtcccaggcctgaaaaaaagttatttccactgacttttatccattcatccattgatggacacaggttgattccgtatctttgttattgtgaattgtgctgtcacaaacgtggggatgcaggtatccctttgatacattgacttcctttcctttggatacccagnagggggagtgccggatcc

SEQ ID NO: 1067 - DNA, 243 bp, Homo sapiens
  misc_feature (1)...(243): n = A,T,C or G
atttggtgcaacacccaaacatcttggcatccccaccccaggaagtgcggggaggaggntatgatccctgggcgcttcggcagaatggagagctgaggtgtccctcccctgctagtcacctaccaggtgtctgagcagctgcatgctccctggctcaagtgggcactgtaccttttgccttgcctttgttccctatctccactccctgaggccacttagcctgagacatgatgcaagagctgc

SEQ ID NO: 1068 - DNA, 484 bp, Homo sapiens
  misc_feature (1)...(484): n = A,T,C or G
cgctgtcaagnnaannggtttgagccccactgagatcatagtacagngcggnggaantccggaatatctactctttacagagaacttcggtagctctggagaagaactttatgaatagatgaaaactgtcccctctcttattggttttcctgcattttccagggaagctgctgaccccttaattctctttataagagttcaaatgacttctttcacagatgtcaaaccaccagtgttcaaagtgaccctgcttcattgagtcctgaaacagctcacttcctttgagagctagtgtgacttgctttgtgggacactcagtaactttgggttttgactctttaacgggtgggcactggaccatctcggtgggagtgcttgtgccactctggaaggctgttccctggggttgtgatgtttatcatgccacttccttcttacctgtgccaacagacctatttcactgcctcagcgtacaccagacccn

SEQ ID NO: 1069 - DNA, 472 bp, Homo sapiens
  misc_feature (1)...(472): n = A,T,C or G
gagggcccnnagtgcccccatgagaccatagaagcgcttggaanncccaacacacagatattccagcttcagtttcacactggattcataccactggacacaacagttttaaagttcaccaagcctgagttagatgcatgtgatgtaccagaaaaatatcctcagctatttcaggtgacactggatgtagaactacagccccatgacaaagtaatagacttaactccaccatgggaacattactgcacaaaagatgtcaatcccagcatcctcttctcttctcaccaggaacatcaagatacgctggccttaggaggacaggctccaatagatatccctccagacaaccccaggcattacggacaaagtggtttctttgcctctctctgttggcaagatcagaaatcggagaagtcattctgtgaggaggaccatgctgccctagtgaatcaggaaagtgagcaatcagatg

SEQ ID NO: 1070 - DNA, 477 bp, Homo sapiens
  misc_feature (1)...(477): n = A,T,C or G
agaggggctaaaatgagaccctacttgatgtgcngtaattccaggcccaacgcctctggtgctgttcccctgcagtcccagccccgcgtggctcgcgctcgtctgtgaggaagacacctccagaccttggggtccccgcgcttcctcttgctcctcgctgctcccattagctggtgcaggcttccgttaaggggtccctcccttggcctggcttcccggcgcacctcagcttccctgctggtggggggatccccaggagaccagcatgtgctgaacctctctgtgcctctgcctccgcaccctagacacccacctccagtttgaaggtggcgggccaggggctttcttgctgaattgacgactccgagagccctgactcccgccttgccactcacggctctgtccactagggctcagccctgctgagaaaggacctccgatgcttgggagacgctgctccggcaggtgcangccccn

SEQ ID NO: 1071 - DNA, 478 bp, Homo sapiens
  misc_feature (1)...(478): n = A,T,C or G
agatggccncnntccccccaatgagaccanattagagagccatggaaaccacttacgcagccgcacgtggtatgtccaggccacctgtgccacccaaggcacaggtctgtacgatggtctggactggctgtcccacgagctgtcaaagcgctaaccagccaggggcaggcccctgatgcccggaagctcctgcgtgcatccccgggatgaccagactcccggactcctcaggcagagccctttcctcccacttttcctcccccatagccacaggcctctgctcctgctcctgcctgcatgttctctctgttgttggagcctggagccttgctctctgggcacagaggggtccactctcctgcctgctgggacctatggaaggggcttcctggccaaggccccctcttccagaggaggagcagggatctgggttccttttttttttctgttttgggggtactctaggggccaggttggg

SEQ ID NO: 1072 - DNA, 449 bp, Homo sapiens
  misc_feature (1)...(449): n = A,T,C or G
tttgaagaccctcttgaagacccttcggaaacgcgcaggaataccgggaatggcgggcaacatgtctgagacatttggaggagccttcatgcccaatctgtaccctggggcccctggggcgggctacccaccagtgccccgtggcggctttgggcatcccccctctgcccagcagcctgttcctccctatgggatgtatccacccccaggaggaaacccacccttcaggatgccctcatatccgccatacccaggggcccctgtgccggtccagaccatgccaccccccggacaccaccccccaggggcctaccctgggcagccaccagagacctaccctggtcagcctccagtgccactccctgggcagcagcagccagtgccgagctacccaagatacccggngtctgggactgtcacccccgctgtgcccccaacccagattggag

SEQ ID NO: 1073 - DNA, 472 bp, Homo sapiens
  misc_feature (1)...(472): n = A,T,C or G
gagttccnncgccccccccatgagaccacatagaggccntggacaagacgagaaacaagaggactcccaagaagatcaatgggatggagttggtcctattttaggactgtttaagtcccccaaaggggttgagatgctgtggcacccatcggtggtaaaaccatatctgactcttctagcagaaagttccaacccagccaccttggaaggctctgcagggtctctccagaacctctctgctggcaactggaagtttgcagcatatatccgggcggccgtccgaaaagaaaaggggctccccatccttgtggagcttctgagaatggataacgatagagttgtttcttccgtggcaacagccttgaggaatatggcactagatgttcgcaacaaggagctcataggcaaatacgccatgcgagacctggtcaaccggctccccggcggcaatggccccagtgtcttgtctgaa

SEQ ID NO: 1074 - DNA, 472 bp, Homo sapiens
  misc_feature (1)...(472): n = A,T,C or G
ggtttcaaggggganngggaatgaagaccttgatagcgtgcggaannccngactcttacgaagagagatggaaatgttctaaataaaacacacttaggatctggttatatatatatttaatgtactattctgaccaaatggagcttaatcagatagctggagaatgagttaatgttacgaaatctgttaattgcattatctcaataatagatcggtgaataactttattattctctcaacaaatcctgtatttgatttacaaaatggatgggaggtttcagggagagcagttggaagcctgtgtgctcacctgttaggaacgagagtggcaacagcagtggggaggagtgctcggctcctgcacctgtctcgatggcagagcccacaggcttggctgacagacgtgggatgaaggaaagagaagcctctcactcttcccacagcattgtagtgcgatttcatgcagaagtcn

SEQ ID NO: 1075 - DNA, 416 bp, Homo sapiens
  misc_feature (1)...(416): n = A,T,C or G
gagaggccttagctgtcctggctggtgcccctcccaggctccttttcaccctgccccctgggcctgaggccccctgtgtccaagcctccccctggctcttcagttctctagcccttggctttgctgggtttcctgactgtagccacatctctcccgctccctaagggtaacctagccaatggaagctgccctttgggtaggtgctgggctcctgggagggcccagatgatggggtgaggcatgtctttccagaactttccctggcagggaggggatggcagaaactcagggaggggcttggggcccattgtatctggagagcctggattcctcttggcagtcttaggcccagccacttctgctacctttgcgctgctgtgagcctcaccctgggcccctgggccctgcttctctgn

SEQ ID NO: 1076 - DNA, 490 bp, Homo sapiens
  misc_feature (1)...(490): n = A,T,C or G
agagacccnnnnnaagccgnccactgagaccnntcgatangagactctaggacagagccgnggaattcgatgttctagtgaggggctggcggtgacagtgggaaggagcgagttggtgacatctagagtcgtgtgagagtagccctaagggatagcgctaaccttggctcctgcttatagatgagttaactcacgtacaaagaagctgagtcatctaccccaaaccacacagcctgtccatggtgtagtcacaggtggacctgggcagcctgcctctgggacctgcattctccaaaaaccaccacacaactgcctgaacggagaggccatggaggctggagggaggtctttccacagccacgtgtgaaaaagaggtgagaacgaccccaggacagatcaaagccacgctcccagcgcctatgtcccgccgtcgttgtcgccaccaccgtgcccaggagaaaggctgaaggtgatgctaaaggagataaac

SEQ ID NO: 1077 - DNA, 477 bp, Homo sapiens
  misc_feature (1)...(477): n = A,T,C or G
gttagtcnagagggannnnggaattgaagaccaactgatagtcgtgcggaannccacatcaccgncaatgcaacagagacccagaaagcagagaactgaaatgcagccatcttgtggaagcctctggaacctgacgcggctgcttgaacctttggatgcaaatgtcgatgctgaagaaaaccggtcacttcagcaacagccctttccccaggagaagccaagaacttgtgtgtcccccaccctatcccctctaacaccattcctccacctgatgatgcaactaacacttgcctccccactgcagcctgcggtcctgcccacctcccgtgatgtgtgtgtgtgtgtgtgtgtgtgtgagactgtgtgtgtttgctaactgtggtctttgtggctacttgtgtgcgcatggtattgtgtttgatagagaactgtggactcgctttcccaggcaggggctgacccacatggtcatctgct

SEQ ID NO: 1078 - DNA, 479 bp, Homo sapiens
  misc_feature (1)...(479): n = A,T,C or G
agagggccnnnaggggccccaatagagaccnnatagaggccctcgaagngcggggaannccagctgcagggagagagaggaggaaccccgtgcgattctagagacgatttcacaacattgagaaatcagctgtgtgcttacatgccgagcaggcagcacggctcttctttgcctgtcctcgggggaaatcagggctctgagagtggagatcgagatgggctagtgggtggcggatgggacgctgcacggccagaccctggactgtgttttcaccatggagcagctgagctcagcaaacacccgcttcgccttggacctgttcctggcgttgagtgagaacaatccggctggaaacatcttcatctctcccttcagcatttcatctgctatggccatggtttttctggggaccagaggtaacacggcagcacagctgtccaaggtcagcagaaacaaaaaaaagggtctgctttcctccc

SEQ ID NO: 1079 - DNA, 464 bp, Homo sapiens
  misc_feature (1)...(464): n = A,T,C or G
gtagttagagggnnnngnattgagacaatgatagcctgcggaannccgcnttgcttggagntgccgngggacagcatggccgtgccagcctcccacactgaggccaggtctaccccccatcataccagcccccaggaccactaccccacggacagccaggggtgcagagctagcccaggctggggatctcgactcagacaagatggagacaatgccttgagtctgaggcatcctctgcctgctttcctgcctgccccacctgcctcatattgtgtgggcctttttttgtttgtttcattcattgatttttttttttaaataatttaaaaggaaattttggttttttttaaaggcaatatctttgtatacagacggggggggcccccccccctgcggggggccctcccacagaatttggggcaaggaagccctgctcccagcctttcaaaaacagggacacagcg

SEQ ID NO: 1080 - DNA, 470 bp, Homo sapiens
  misc_feature (1)...(470): n = A,T,C or G
cagaggacnnggaatggagacccatgatgacccttggcaagngcggnggaantccgcactgcgtatgcgaatccactcactgcctatgcaactcagctcgttctgcgtatgcaactcacctcgctctgcgtatgcaacccagctcgctctgcgtatgcaactcaggtcgcactgcatatgcaactcagctcgctctgcgtatgcaactcagctcgcactgcgtatgcaactcagctcgctctgcgtatgcaactcagctcgctctgcgtatgcaactcagctcgctctgcgtatgcaactcagctcgcactgcgtatgcaactcagctcgctctgcgtatgcaactcagctcgctctgcgtatgcaactcagctcgctctgcgtatgcaactcacctcgctctgcgtatgcaactcagctcgcactgcgtatgcaactcgcactgcgtatgcaactcaactcgcactgcg

SEQ ID NO: 1081 - DNA, 462 bp, Homo sapiens
  misc_feature (1)...(462): n = A,T,C or G
ggtactgggaatgagaccctagagagcgcggnggaanncaagctgacagaggagctgaaccgcgaggtggctaccaacagtgagctggtccagagcggcaagagcgagatttcggagctccggtgcaccatgcatgccttggagatcgagctgcagtcccagctcagcatgaaagcatccctggagggcaacctggcggagacagagaaccgctactgcatgcagctgtcccagatccaggggctgatcggcagtgtggaggagcggctggcccancttctctgcgagatggagcagcagaaccaggagtacaagatcctcctggacatgaagatgcggctggagctggagatcaccacctaccaccgcctgctggagggcgaggatgcccacctgactcagtacaagaaagaacataagcatcttggtggctgaggccttgtggattgggtgcatgggacn

SEQ ID NO: 1082 - DNA, 482 bp, Homo sapiens
  misc_feature (1)...(482): n = A,T,C or G
agagggccnnnngggcgcccccatagagacctnaatangaggctctgggaagcgcggggaagnttctcttctacctgggcagctggagctacagtgcctacctgctgtttttcaccgactatcccttcttccatgacccaccatctgtcttctacgactggacgccgggcatggcagtgccacgggacattgcagccgcctacctgctccagggaagcttctatggccactccatctacgctacgctatacatggacacctggcgcaaggactcggtggtcatgctgctccaccacgtggtcactctcatcctcatcgtctcctcctacgccttccgctgacctctcctctctgcctgctgctcccccaggtaccacaatgtgggcatgcttgtgctcttcctgcacgatatcagtgacgtgcagcttgagttcaccaagctcaacatttacttcaagtcccgcggcggctcctaccatcgg

SEQ ID NO: 1083 - DNA, 484 bp, Homo sapiens
gggggatcgagatccctagtccagaatcgaagaacctatgcagcgcggcggaattaccagctactcgggaggctgaggcagtagaatcacttgaatcctggagttggaggttgcagtgagccgaggtcacaccattgcactccagcctggtcaacaagagcataactccgtctcagaaaaaaacaaaacaaaacaaaaaaaaaacaaatttaccaaggaagcatactaaagtaatatataacgtaaagaatcctcttgttagggtaactactcccaacctaatctagtccgagagtcccaagttatttatgtggtaatttcataagatagggaaaatgtgtatttacattttaaagttgcattcaaatagcaaatatttattgatcacctactttgcaagacaaagcatcatctctgtcaaatgctattctgtatctggatatttccaagcttcccttagcccaatcaaaaaaatacttgtagg

SEQ ID NO: 1084 - DNA, 475 bp, Homo sapiens
  misc_feature (1)...(475): n = A,T,C or G
ggggnatcgagaccctagtccgngtggaggaactcatggagccgagcccaactaccacagcctgccttccgctcgcactgatgagcaggccctgctctcttccatccttgccaagacagccagcaacatcattgatgtgtctgctgcagactcacagggcatggagcagcatgagtacatggaccgtgccaggcagtacagcacccgcttggctgtgctgagcagcagcctgacccattggaagaagctgccaccgctgccgtctcttaccagccagccccaccaagtgctggccagtgagcccatcccgttctctgatttgcagcaggtctccaggatagctgcttatgcctacagtgcactttctcagatccgtgtggacgcaaaagaggagctggttgtacagtttgggatcccatgaagagaggggtccttggacagctcttctcctctcttcatcccatctctaccccag

SEQ ID NO: 1085 - DNA, 473 bp, Homo sapiens
  misc_feature (1)...(473): n = A,T,C or G
nttgagaccatatcagtgtggggaactccaacgcctggctcggagcagcagcctctgaggtgtccctggccagtgtccttccacctgtccacaagcatggggaacatcttcgccaacctcttcaagggcctttttggcaaaaaagaaatgcgcatcctcatggtgggcctggatgctgcagggaagaccacgatcctctacaagcttaagctgggtgagatcgtgaccaccattcccaccataggcttcaacgtggaaaccgtggagtacaagaacatcagcttcactgtgtgggacgtgggtggccaggacaagatccggcccctgtggcgccactacttccagaacacacaaggcctgatcttcgtggtggacagcaatgacagagagcgtgtgaacgaggcccgtgaggagctcatgaggatgctggccgaggacgagctccgggatgctgtcctcctggtgttcgccan

SEQ ID NO: 1086 - DNA, 466 bp, Homo sapiens
  misc_feature (1)...(466): n = A,T,C or G
aggggtccgggattgaaaccccatgatgacattaggaagngcggtggaattcgagctaattggctgatcagaattacctagaccaaattaattggctaattggaatacactgggctgagctaattggctgattgaaataatcagggctgagtaagtgggttgcttgtattcacctcccctgagaagaataagtagggaaatgatctctgacttacctttttttttataagacatactcataaatggacattacatagatatatttatatattgtatgtgtttgtatgtgtttatctacatatattatatctgttaaccttcaagttaaagtgtgcaaaggaatctgaaatttgctttcaatattgcagtctatcttcaatttacagaccttggcttttctaccccaattcaagaagtcacttcttcagtcaaccaaaccaattacaaaattgtgttccaatgtcac

SEQ ID NO: 1087 - DNA, 484 bp, Homo sapiens
  misc_feature (1)...(484): n = A,T,C or G
gggaaattgagtncntgnnagngtcgagatccctagtcagtgtggtggaattcgatcttcctgcctcggcctcgcaaagtgctgggatcacaggcttgagccaccacacccagtccgtcggaactcagaatggcagggcagaggcagtctgggaaaggcgactgagccaccagtttggggttcacactgctggttttgccccacgcttgtgccttacttgccagctcccttgcccactcttcagatcctcagcttgccgtctgcaaagcagagatgacctggggcagaggaggctgcccttctagaggctgggaccagaggctgtgggcacgccggatcccatgcagtttagggacctgggcaaccagtgcctcctggctgcagcagactgtttccccatccataaaatgggcatgagcagaggtttagaagccaaggtgcagaagtgaggatttttgtgtgtgtggaggccccggagagtgca

SEQ ID NO: 1088 - DNA, 488 bp, Homo sapiens
  misc_feature (1)...(488): n = A,T,C or G
gggcnctnccgnnnaattgagaccctagtccgngtggaggaacttcgggcgtctaggcgggcctgtgcgccgcccgggcgaggatgcggctgttccggtggctgctgaagcagccggtgcccaagcagatcgagcgctactcgcgcttttcgccgtcgccgctctccatcaaacaattcctggacttcgggagagataatgcatgtgagaaaacttcatatatgtttctacgaaaggaacttcctgtgcggctggctaacacaatgagagaagttaatcttctgccggataatttacttaaccgcccttcagtgggattggttcagagttgggatatgcagagttttcttgaacttttataatatgaaaataagagccctgaggatccacaggtcttggataactttctacaagttctgattaaagtcagagatagacacaatgatgtggttcctacaatggcacaaggagtgattgaatacaaggag

SEQ ID NO: 1089 - DNA, 457 bp, Homo sapiens
  misc_feature (1)...(457): n = A,T,C or G
catgagacctctgttgaagnccntgaanacagacggnccccggcgccgcgggctggtgttgtctcgtgctctggctccccgcgtgcgtcgcggcccactgcttccgtatccatgattatttggactttcaagtgctgagtcctggggacattcgatacatcttcacagccacacctgccaaggactttggtggtatctttcacacaaggtatgagcagattcaccttgtccccgctgaacctccagaggcctgcggggaactcagcaacggtttcttcatccaggaccagattgctctggtggagagggggggctgctccttcctctccaagactcgggtggtccaggagcacggcgggcgggcggtgatcatctctgacaacgcagttgacaatgacagcttctacgtggagatgatccaggacagtacccagcgcacagctgacatccccgccct

SEQ ID NO: 1090 - DNA, 437 bp, Homo sapiens
  misc_feature (1)...(437): n = A,T,C or G
tctcgcgctggcctccctgcagctgcctaatcccacccccttgcagccctggccgccattttgttgtcctgggcgagtatgaccgatcatcaaacgcaaagcccttgcaggttctgtccgtctctcgggtgagtgcctgggctgcaaacacggaggaaaagtgggcagtgcaagtgggtgggtgctgggaacgaggaattcaagacatgccctggcctaccctgctcagcacccatcagaacatggactgtttctgaccccacaggccattacacaccctagctggaactctaccaccatgaacaatgacgtgacgctgctgaagctcgcctcgccagcccagtacacaacacgcatctcgccagtttgcctggcatcctcaaacgaggctctgactgaaggcctcacgtgtgtcaccaccggctggggtcgcctcn

SEQ ID NO: 1091 - DNA, 466 bp, Homo sapiens
  misc_feature (1)...(466): n = A,T,C or G
gggggacgggttttgagccctattgagaccctcggacangcggnggaattccacctgtcgccttaagtaccttaaggtttctggcacagaaggaccttttgggaccatcaacattcaggagcagctcctgccgttcgacctatcaatattcaggtccctgcatcaggtggagataagtcactgtgatgctaagcacatcagagggctggtcgcatcgaagcccaccttagccacgctgagtgtccgcttctcagcaacctcgatgaaggaagtccttgttcctgaagcctcagaatttgatgagtgggagcctgaaggcacaaccctagaaggccctgtgactgccgtcatccccacttggcaggcattgaccacgcttgacctgagccacaacagcatctccgagatcgacgagtctgtgaaactgatcccacagattgagttcctggacctgagtcacaatggg

SEQ ID NO: 1092 - DNA, 482 bp, Homo sapiens
  misc_feature (1)...(482): n = A,T,C or G
nttctgcgaccactagtccagtgttggggaactctcggctgccatcccatgctgggccctccaggccaagagtctcagctggccgagagtccatgccttgcctcccccgaccgccatggagggggcagcccggcacagctgctgggagcccttgtgtgtctggtcacactttttaggcgtcacgccaaaggccagcctcctggccccaatacccattttggaagcccctgtggccgtgtggatgtcggtaacagttgtataaaataaattctatttatcgctattgtggaaaaacaaaaaacataatcaaaaaccaaaaaaaaaatacaaagaaaattntctggcgcccgttaaaaaaaaaggctctcaaaacaccccttggaaaaccacctgggggccttttgtatacccccccgttgggtgtgaccccccccccgggcttttttttgggcggggggggccgcacccaccctgttttttta

SEQ ID NO: 1093 - DNA, 476 bp, Homo sapiens
  misc_feature (1)...(476): n = A,T,C or G
cgatgttancgggannannggaattgaagaccctagaccagcgcggnggaanncgaggaagatgggggcaagaagatcacgctccccgcctgttccctcagctccagacgtatgggaggggttgccacaggcctccctgtttgaagcctgcccttgtctgagatgctggtaatggccatggtacccccttctgggcatctgttctggtttttaaccattgtcttgttctgtgatgaggggaggggggcacatgctgagtctcccaaggctgcgtctggaggggcccctgcttctccagcctggacccccagctttgcccaacaccagcccctgccccagcccaagtccaaatgtttacagggagcctcctgcccagtcccccaaccccagccgctcggaggccccaaaggaaaaagcacaagaagcgtgagacgccaccattcctggaaaccacagtccacctgctcattctcgtt

SEQ ID NO: 1094 - DNA, 498 bp, Homo sapiens
  misc_feature (1)...(498): n = A,T,C or G
ggcggttnnnnnnnaaactgatacctcgcannnncnncactganaccctcggaangncgnggaantntnatggncatagctgctctcatcacaactcttgtcttaaaaaattgctgtgcccaaagcgggaacactcgggggaacagccaccagcggaagagcaaccagcaggaggagagctgccagaacctcacggacttcccctcggcccgggtgcccagcagcctggacatattcacggcctataacgagaccctgcagtgttctcacgagtgcgtcagggcatctgtgcccgtgtacaccgatgagacgctgcactcgacgacgggggagtacaaatccacatttaatggaaaccgaccctcctcttctgatcggcatcttattcctgtggccttcgtgtctgagaaatggcttgaaatctcctgctgactggccgaagtcttttttacctcctgggggcagggcagacgccgcgtgtctgtttcacggattccg

SEQ ID NO: 1095 - DNA, 429 bp, Homo sapiens
  misc_feature (1)...(429): n = A,T,C or G
ccctccccgcctaggtttgcttcactcttccagggccttcttggtgtgactgtcctgtcctggccacgtccactccaagcagctggtccaggtgtggggcagcccccaagctcagcagaggacagttttgagacttagaggaggacggcatcagatttacatgaagtcagccatctcaagggattaccacgtcaccgcctcctctcacaggtctgagagctggtcccctggagggtgcaggtctcatcctaggtagaacagtcccagcctagcttcaaagtgctcctgctgccagaaagggtagaaaaccatgctgaatgccttcactgttgcctggaatgggagcctcagtttcaccatctgtaaagtgagattaatgaaagggacccacagagggctgttagagccagtangcggccaggcgcggtg

SEQ ID NO: 1096 - DNA, 448 bp, Homo sapiens
ccgttactgatgtggccaccctattcccacatggggagcaccaggagccctggagccccttccacccaatcccatctcgcaggagagcagggtctgggctcctgcctcaccgctggttcagcagcaccctccccgccgggtcccaccttgccttttgaagaagagcccgcataatgagtggacggcagacagctatatttagtggtgcctcgacactcacgaaccgccagcgtggcgcctggatcttgcccagctgccagctccccccaccaggactgtggttcctcagtttctcctgccagccccggctcatctcagggcaaagctatagacatggtagatctcatcggggaggttctcctgcctctcctcggccaggaggctgaggcctgcactgcagatgatcctgcggaccacgtcaaggtcccggcacacgctgctgtccacg

SEQ ID NO: 1097 - DNA, 483 bp, Homo sapiens
ggggaatcgagatccctagtccagtgtggaggaaccccactgcgcgaccagggcggcaaggagttcggccacctgggcaaggtggtgcaggtgttccgcctcatgcgcatcttccgcgtactcaagttggcgcgccattccaccgggctgcgctcgctgggagccacgctcaagcacagctaccgtgaggtgggcatcttgctgctgtacctggctgtgggtgtgtcagtgttctctggtgtggcctacacagctgaaaaggaggaggacgtgggctttaacaccatcccagcctgctggtggtggggcacagtgagcatgaccaccgtgggctatggggatgtggtgccagtgacggtggctggcaagctggcagcctcaggctgcatcctagggggcatcctggtggtagcactccccatcaccatcatcttcaacaagttctcccacttctaccggcgccagaaggctctggaggcagcc

SEQ ID NO: 1098 - DNA, 450 bp, Homo sapiens
  misc_feature (1)...(450): n = A,T,C or G
aggcccgnngggggnncctgagaccctangactgagggcattgccctactctccggtgaggctcgcaggggcgcagctcagctggctgtataaggaggccacagttcaggaggtggacgtgatccctgaggacggggcggccgacgtgagggtcatcatcagcaactcagcctacggcaaattccggaagctctttccaggatgaacggacgcccacagaggcctgcggggtgggggcatcgctgcctggggagctgaggcgttaccgctgtgttgggggcagcttggtgtcaggtgcagcagggtcctccttgtctggttctgcacccgtctcgctcccagccatttgctgggatgaccgtgcaggccggtgacacggccgcacctgccccaaagcgggccgcccgagcgtccactccaagcctgagcatccacacaattccagtgggg

SEQ ID NO: 1099 - DNA, 490 bp, Homo sapiens
  misc_feature (1)...(490): n = A,T,C or G
gcgatggatgaacctatcagngggactgattccgtatcgagcgtcgagaaacccagatattttacatgatgaggcagagctctggctttcactttacaaaataagaaaccctgccacttctgcataacataaacctgctgggccaaagcagaggactgcactgaaatggggcacaagctttccggttagctgccgagcacactgacctcctccactcctgacctcacctctccaggcatttgaacttgtgagtctgggggagggggaccagaatgcccactccctgctcgccatcatcctggagggtcttcatgaacatactccagtagtcacaggactggacaggagtcagaaatcttgagctgtctgtcattccacctctgtgagtttgggcaaatcacttcacctcttccttactgcaaaatggagtcctgccatctttgctgtgcagctcccaggaattctgttgtaatggagacaggcagcggaa

SEQ ID NO: 1100 - DNA, 458 bp, Homo sapiens
  misc_feature (1)...(458): n = A,T,C or G
aggcgnnnnnggggggccattgagnccctnngactgatanctatggccangncgnggaattccctcgtggtaggcaacaagcgggacaggcagcggctgcgcttcggaccgcggcgcgcgctggccgccctagtgcgcaggggctggcgctgcggctacctcgagtgctccgccaagtacaactggcacgtgctgcgtctcttccgcgagctgctgcgctgcgctctggtgcgcgcgcgccctgcacacccggccctgcgcctgcagggggcgctgcatcccgcgcgctgcagcctcatgtgacccgatcggacagtgccatccatgggccccaccttgtgactgggacaatcagggacctggattggacgggatcgcccaacttcactgggactggacagggaagtctccgccctgattggatgaggaaagctccaacccagtctcctaagcgactg

SEQ ID NO: 1101 - DNA, 499 bp, Homo sapiens
  misc_feature (1)...(499): n = A,T,C or G
gggattgatncccctnnnnnnnnccactgagaccctagtcagtgtcgnggaattcccgaggcggatccggtgttgcatccttggagagagctgagagctcgagggacggggatttcgctgtgttgcccaggctggtctggaactccggagctcaggcagtccgcccgccttggcccctcaaagcgctggaattacaggctacagaacctgctaaggccatcaaacctattgatcggaagtcagtccatcagatttgctctgggccggtggtactgagtctaagcactgcggtgaagaagatagtagaaaacagtctggatgctggtgccgctaatattgatctaaagcttaaggactatggaatggatctcattgaagtttcaggcaatggatgtggggtagaagaagaaaacttcgaaggcttaatctctttcagctctgaaacatcacacatctaagattcaagagtttgccgacctaactcgggttgaaacttttg

SEQ ID NO: 1102 - DNA, 444 bp, Homo sapiens
ccagacttcaagtctgcaggtgtcacgctgcggagccaacgggtacgtgagtcacctcctttagcaagtttgggtcctgggctctgctctgggctccatgtgtcccaaacgctgcaggcaggtggggatggagcagtaggagagattgctgcagacagaggtggccttggcaggatctcagtgatgtggccaggctaaggtcatagcagctttcactatattcagcttcctggctatttccttttctggcccatagttaacctccatgtgttaccgtctctcttccaccatctttccctctgccttttgtccccttcatcctaagcctcttgtggctgggacaggcttagcttgccagctttcattgcagatgaagctgccaagctctgtgggacagaagaagatcaaggccctggaacagatgctgctggagcttggtgtggg

SEQ ID NO: 1103 - DNA, 455 bp, Homo sapiens
  misc_feature (1)...(455): n = A,T,C or G
tgggccccngggggggcaatgaaacccctngactgagancatcgccangncgnggaattccgcctgtagtgctagctactggcgaggctgaggtgggaggatcacttgagcctaggaggttgagactgcagtaaaccgagattgtgccactgcactccagcgtgggctggaccagtgagaccctgtctcagctcagtgagaccagtaagaccctgtctcaatcaatcaatcaatgcagtgagttagagagcatctattgagcatctacggtttgcgggtcacttccagcaccattttgagatgcggaaactggctgaagttgggtgattgattgaccaagttcctttgggaaattaataaagtcacactgaagcaataaactaccctcacctccaccaccagctttctcaggagaccccttcccattgcctgccccagacctcagggaccatggc

SEQ ID NO: 1104 - DNA, 457 bp, Homo sapiens
  misc_feature (1)...(457): n = A,T,C or G
ngggccggnnngnnnnnncctcgagaccctangatagatgggcgtacggcaggngcctagngggtctgggtttattgtgtcggaagatggactgatcgtgacaaatgcccacgtggtgaccaacaagcaccgggtcaaagttgagctgaagaacggtgccacttacgaagccaaaatcaaggatgtggatgagaaagcagacatcgcactcatcaaaattgaccaccagggcaagctgcctgtcctgctgcttggccgctcctcaaagctgcggccgggagagttcgtggtcgccatcggaagcccgttttcccttcaaaacacagtcaccaccgggatcgtgagcaccacccagcgaggcggcaaagagctggggctccgcaactcagacatggactacatccagaccgacgccatcatcaactatggaaactcgggaggcccgttagtaaacctg

SEQ ID NO: 1105 - DNA, 494 bp, Homo sapiens
  misc_feature (1)...(494): n = A,T,C or G
gaggcgtccccccctgagaccctattagaaggcgtaatacgcctcggtgaccttgctgcaacagatcctgtatggcaggaactacattaagaggtactttgaattttatgaggggccttttgaatataactccacaagatgcctggagctgaggcacgaaatattggaagtgaaggtgctgtccatggtgaagcagtcagagctgttcgacaggtggaagagcctccagatgtgcaaatgggcgatgaacatctctgaggccaaccagttcaagtctactctgtccaggtgctgcaacgcccctgcctttctcttcaccacccagaagaacactcccctggggacaaagctcaagtatgaggtggacaccagtggcatctaccacatcaaccaggagatcttccgcatgtttcccaaggtaatgccagtgggtgtaacacaacttagtatgacatacagatccaaggagaagcagcctatggaccgctganggc

SEQ ID NO: 1106 - DNA, 447 bp, Homo sapiens
  misc_feature (1)...(447): n = A,T,C or G
ggccggggggggggcctgagaccntngaatgagagcctcgccagggcggaanccgactcgtcctcggcattgcgcggctcttgtcaggatggtgaagctgttcatcggaaacctgccccgggaggctacagagcaggagattcgctcactcttcgagcagtatgggaaggtgctggaatgtgacatcattaagaattacggctttgtgcacatagaagacaagacggcagctgaggatgccatacgcaacctgcaccattacaagcttcatggggtgaacatcaacgtggaagccagcaagaataagagcaaaacctcaacaaagttgcatgtgggcaacatcagtcccacctgcaccaataaggagcttcgagccaagtttgaggagtatggtccggtcatcgaatgtgacatcgtgaaagattatgccttcgtacacatggagcg

SEQ ID NO: 1107 - DNA, 479 bp, Homo sapiens
atttgagaccactattccagtgtcgtggaattctgatcatgatgggaatcctttattctgtaattctttaagtctacaatttagcaaagccagtcctagcaacagcagaaagataagcgtcagtggcaagaggcaggataagagcatatcaaggccatgttttctacatctccctccccatcattggatttcaggtacaattaattaactgatgccaaaaaaatagcatggctaggcgcagtggctcacgcctgtaatcccagtgctttgggaggccaaggcgggcggatcacctgaggtcaggagttcgagaccagcctagtcaacatggcgaaaccccgtctctactgaaaaatacaaaaattagccgggcgtggtggcggacacctgtgattccagctacttgggaggctgaggcaggagaatcgcttgaacccagcgggcagaggttgcagtgagtggagatcatgccagttgca

SEQ ID NO: 1108 - DNA, 491 bp, Homo sapiens
  misc_feature (1)...(491): n = A,T,C or G
gagactgtgnngnttggaaaccctatcgagatccatatccatgtggtggaattcccagtacctgctcactgtttgcccaggtgcctggaagacagagagcaaaattagaaggactcctctgcatactgcagcaatgcatggccatttggaggcagtcaaggtgcttcttaagaggtgccagtatgaaccagactacagagacaactgtggcgtcaccgccttgatggacgcaatccagtgtggtcacatcgacgtcgctaggctgctcctcgatgaacatggggcttgcctttcagcagaagacagcctgggtgcccaggctctgcacagggcagctgtcacagggcaggacgaagccatccgattcttggtctctgaacttggcgtcgatgtagatgtgagagccacatcaacccacctcacagcacttcattatgcagctaaggaaggacatacaagtacaattcagactctcttatccttgggagctg

SEQ ID NO: 1109 - DNA, 455 bp, Homo sapiens
atgggattcgagatccctagtccgtgtggtggaattcgtctgcgtggctcttggatgtgacatgttcgactgcgtcttccccacacggacagcgcgctttggctctgccctggtgcccactgggaacctgcagttgaggaagaaggtgtttgagaaggacttcggccccatagacccggagtgcacctgccccacgtgccaaaagcacagccgcgccttcctgcacgcactgctgcacagtgacaacacggccgcgctgcaccacctcacggtccacaacatcgcctaccagctgcagctcatgagcgccgtccgcaccagcatcgtggagaagcgcttcccggacttcgtgcgggacttcatgggcgccatgtacggggatcccaccctctgtcccacctgggccactgacgctctggcctctgtgggaatcacactgggctgacctggcattg

SEQ ID NO: 1110 - DNA, 442 bp, Homo sapiens
cagccttcagcgtggagagcgagaccctgcgtgtcactggggcttggctgaggtctccctgcaggataacagtgacttcaggaacccagaccccagtctgggcggctctaccttcccggctggcccagcccccacaccacagttccctgccacctccaggcacaaaagcctctgaggccacagcccagctatgaagctgagtggctttgtgcggtctcctagggaaggggcagtgatgccatgcatgagatccgctgtgccataagaagttgcttcctttagaatttctggtccaatgcagggaggtgaggcccagcctcatgataacacatgcccatcaaggaaaagctgtggctaatgcttccaaaacaagtgaaaatcttgcaccaggcccagggccatatctcattccgccccagctactgagggaggggacagactg

SEQ ID NO: 1111 - DNA, 460 bp, Homo sapiens
  misc_feature (1)...(460): n = A,T,C or G
atttgatacctttgaangcgtgggaanncgctcagngaaggcgtctgggctgtcagagcagaggaggatgggccccagccagcagttgcagacagcctggtcacctcggagcccagcagggcgggtggctccctcctgagtgcacctccaaggaacagcccaggttgaggtggggccaggtagcacatgacgtcaccaggctttggatttttctgctgttgtggtctacagagtcaggcttatgtacatgaaggccataattacaaagctctgctaagcacagttttgcttgttaacgctgcagggctgaggaggcagagactgtgagctaagaagacagaaacaacttgcctttgtcagacatctgctattggaaagtgaacagccttggtaacatgatggggaggcagatggctcttctttcctcataatatcttctctgctggaccccaaaaattcg

SEQ ID NO: 1112 - DNA, 477 bp, Homo sapiens
  misc_feature (1)...(477): n = A,T,C or G
agatgggcnnnaactgagaccctaatcgatgtgccgtaattcctgcttttcctaacccagttaggaaactccgagaccacaggagcctcagtccggccactgtggcctccccgtgaccatgacccagaggttggacagccccgcagggctggacgtttgactttggctcagttcctccaccgttcccttcatttatcctgtgcctctcccaggcctgtggattttgctgtggccccaagccggcccgaatgctcctggaggtggtagggtcatggcctgaggcggtgctggggaggagagctcgggccaggagttcagggcagctacaggtgggggggtgccgagccaccctcagcctgccccctgcctacctctcagaaaggtgtgaggttccagcggggcgggggctctctggggctccatcctagtgagtccagggccaaggcttgtgttcaatcgtgtgaatggccggcggcc

SEQ ID NO: 1113 - DNA, 484 bp, Homo sapiens
  misc_feature (1)...(484): n = A,T,C or G
ggatggcccntttgagaccctttcgagtacactagtccatgtggtggaattcccagggcaagtggcttgcggaagatcaggtcatccctccatcttgcccctgtatgcctaaaggtgaaggtcaaaaaccttttctctgaaggtgagtgtttcacgttctgagggccatatggccctgttgtagctactcaactctgtagcgcaaaggtagccagagacagtacagagatgagtgggtgaggctgcattccaataaaactttacttgcacaaacaggctggatttggtccacaggccgtagcttacccatcctgcctggggcatcgcgtttggccatggagattgggtcctaggcaaactcatgctctaggaggaagaggaaggcagggcaagcaatgctgtttttgtagaagccaccggaaattgcaccacttctcatgttcccctggagagaacttcgtgcctacctgccaacaagggaggc

SEQ ID NO: 1114 - DNA, 479 bp, Homo sapiens
  misc_feature (1)...(479): n = A,T,C or G
nttgagaccctaggcagngtcgagnacactagtccgtgtggnggaattcgccagtcaccccatcgccctctgtggcagactcagtgctgtgtggcgcctcctcagcccagggctgagttttaagattttctctcctttcctcttctcctttggttcctcaattaaaaaatgtgtgtatatttgtttgtcaggcgttgtgttgaggagcagttcacgcactggctgtgtctattcctctgcccaggtgtctctgtttgctgcccaaggcagcagttcatgtctcgtccatgtccatgttcgtgttagcacttacgtgggaacaaataccaatttgtcttttctcctagtatcagtgtgtttaacaaattttaactttgtatatttgttatctatcaggctaatttttttatgaaaagaattttactctcctgcttcatttctttgtcttataggcctccctctttgcaccttcttctctt

SEQ ID NO: 1115 - DNA, 480 bp, Homo sapiens
  misc_feature (1)...(480): n = A,T,C or G
ggatggtgccnaccttgataccntgattgatgtgccgtaattcgattaatagaacaaatttgccaaatgtatttccaatggatgtatcatctaattgatgatgctaattatgcacccagagggtataaagcgtttattaccttcataaatgacatctttagagaccaggtcaggcccctcaggtaggtgcaaagtggcttgagagagttaaaaaagaaaaaagaaattgacctgtattttaatttttagaggtttattgtttggggccatggtgagagtttgtatttacataagccccagcaggagatcgtgcagttcgattttcatgctggcaccaaataagggagcacctgggctttcttactgccttttctagaagtgagtcataagggcaaaaataagatattaggcaccaaacgtgtcagcagtgaaacctcagaacataaaatcagagaccttcagtttctggtctaccatgta

SEQ ID NO: 1116 - DNA, 484 bp, Homo sapiens
  misc_feature (1)...(484): n = A,T,C or G
gggcggggnncccnnnccctggtactccgnannncnccttttaccncgtanngtcgcggaatttggaanctnggntccatcctcctccgccaggactgagggcccatgtgctctctggagcctcccctcactcctgccgggtatctggccccgagccccgctcctacactcccttacctgcacctgccctcaccaccctaacctgtgggcgtgctgctgccgcccacgcccagccgaccaggacactcctgcaggtgaccatgctggcagttccacgatgctaactgcccctttctcctcctgctgcagcctcaggcccagagccagcacgagacatccgctgcgagttctgtggtgagttcttcgagaaccgcaagggcctctcgagccacgcgcgctcccatctgcggcaaatgggcgtgaccgagtggtacgtcaatggctcgcccatcgacacgctgcgggagatcctgaagagacggan

SEQ ID NO: 1117 - DNA, 485 bp, Homo sapiens
  misc_feature (1)...(485): n = A,T,C or G
tgancttnaccanagggagnnnnnncctgagaccctcactgagnatcactcggacagngcggnggaantcgcctttgtcgggggtcacagaatcagctctgatgtcggaaaggtgctgcagcggatcttctactgcccgcagtttgatgccttgctggaccacatgacaggccgggagatgctggtcatgtacgctcggctccggggcatccctgagcgccacatcggggcctgcgtggagaacactctgcggggcctgctgctggagccacatgccaacaagctggtcaggacgtacagtggtggtaacaagcggaagctgagcaccggcatcgccctgatcggagagcctgctgtcatcttcctggacgagccgtccactggcatggaccccgtggcccggcgcctgctttgggacaccgtggcacgagcccgagagtctggcaaggccatcatcatcacctcccacagcatggaggagtgtg

SEQ ID NO: 1118 - DNA, 481 bp, Homo sapiens
  misc_feature (1)...(481): n = A,T,C or G
ggagcgggaccacctgaaaccntaactgatancntaggcagngncgtggaattcccagaccaggcaaagccacctccaacctccgcttccaccagtgcccctggtgtccaagatctgccctagtgacacctacaaagcgtggaagagcggccataacctgagggtagacaccacactcctgggctttgaccacatgacctggcagcgagggaaccgcagctttgtcttcaggggccaagacacaagcgccggggtcatggagattgaccacgaccgccgggtggtgtacacagagactctggcactgtctgggcatgaccgggagctgctgctggctgctgctcagcccactgaggaacaggtgctgagccgggttaccgcgcccgtcgtcaccactcagcttgacaccaagaatatctgctttgagaggaacaagactggcatcctgggctggcgcactgaaaagacggagatggtgaat

SEQ ID NO: 1119 - DNA, 483 bp, Homo sapiens
  misc_feature (1)...(483): n = A,T,C or G
aggcgcgtcnccaaactggataccntcgcttgatgagcctgaatactgctggtcaccatcatcttcatctacgagaagcgccggaagcccgaggacgtcctggatgatgacgacgccggctctgcacccctgaagagcagcgggcagcaccagaatgacaaaggcaagaacgtccgccagaggaactcttcctgaggcaggtggcccgaggacgctccctgctccgcgtctgcgccgccgccggagtccactcccagtgcttgcaagattccaagttctcacctcttaaagaaaacccaccccgtagattcccatcatacacttccttcttttttaaaaaagttgggttttctccattcaggattctgttccttaggattttttccttctgaagtgtttcacgagagcccgggagctgctgccctgcggccccgtctgtggctttcagcctctgggtctgagtcatggccgggtgggcggcac

SEQ ID NO: 1120 - DNA, 480 bp, Homo sapiens
  misc_feature (1)...(480): n = A,T,C or G
attgatctgcatncctagncagngnggtggaattcccaaattcctgtggctagggggtggagggaggggtgggaagcgtggggggaacccacatgtcacctgcaggacctcccagattgagggcggacccatgcaggacccatgggggggcacgtaccaaaccaggtatttccaggaatttggaaagatggggtcctgactaggtggttttcacccaaaaaggtattaggggttacattgtgtgccctcaaaactcctatgtcgaaagcttcctggacgggggcagtggctcacacctgtaatcccacaactttgggaatctgaggcggatggatcacttgaggtcaggagtttgagaccagcctggccaacatggtgaaaccctgtctctactaaaaatacaaaaaattagccaggcgtgttggcaggtgcctgtaatcccagctacttgggaggctgaggcaggagaattgctggaac

SEQ ID NO: 1121 - DNA, 492 bp, Homo sapiens
  misc_feature (1)...(492): n = A,T,C or G
agggttnnnnnggtatgttccctatgcagngngcatgagatccctagtccangnggnggaattcctgccttgtcaccagcgacctgcctgtcatgcccaccccctgaggaagcatggggaccctaacaccctggtgccctgcaccagacaggccgtggtcaggcccaggccaccggccgggttctgccacagcttcccacgtgcttgctgacatgcgtgtgcctgtgtgtggtgtctgttgctgtgtcgtgaaactgtgaccatcactcagtccaaacaagtgagtggccctcgaggccacagttatgcaactttcagtgtgtgtcataacgacgtcactgctttttaaactcgataactctttattttagtaaaatgcccacgagtcctggaagctacgcggacttgcagaggttttattttttggccttagaatctgcagaaattaggaggcaccgagcccagcgcagcatgctctgacccggattgcgt

SEQ ID NO: 1122 - DNA, 472 bp, Homo sapiens
  misc_feature (1)...(472): n = A,T,C or G
gaccggaccaaggaaannaaactgagacacattgatagcgtggaaanncccaagccgntgattatcttcacacctaaatctctgctgaggcacccagaggccatgtccagctttgaccaaatggtatccgggaccagcttccagcgggtgattcctgaagatggggccgcagcacgggcccctgagcaggtgcagcggctcatcttctgcacgggaaaggtgtactatgacctggtgaaggagcggagcagccaggacctggaggagaaagtggccatcacgcgcctggagcagatctctccattccccttcgacctgatcaagcaggaggcagagaagtacccaggtgcggagctggcctggtgtcaggaggagcacaagaacatgggctactatgactacatcagcccacgcttcatgaccatcctgaggcgcgcacggcccatatggtatgttggccgggacccagcgg

SEQ ID NO: 1123 - DNA, 470 bp, Homo sapiens
  misc_feature (1)...(470): n = A,T,C or G
gatcttccncctggagnccncaactgagnttcgtcggacagngcggnggaattcgctcaaggagggcctctgtgccgctgggcactgtggtggtcccaggatacagtgacctatagctctgccgtgcccacattgagagactccagcaggagcccgatggtgctggagccaagtccccgacatgccagaaactgtcccccaagtggtgcttcctggacgccaccactgccagccgcttctacaggatcgaccgagcccaggagcacctcaactatgtgactgagatcgcacaggatgagatttatatcctggaccctgagctgctgggggcatcggcccggcctgacctcccaacccccacttcccctctccccacctcaccctgctcacccacgccccggtcactgcaaggggatgctgcaccccctcaaggtgaagagctgattgaggctgccaagaggaacgacttc

SEQ ID NO: 1124 - DNA, 492 bp, Homo sapiens
  misc_feature (1)...(492): n = A,T,C or G
nggggnnnnnnagtctgaatcccttnnannnnttactgagaccctagtgcagtgtcgtggaattccccggtgtgtggatcgctttacccagaagcttggaaagcgccaatattaacctgcttccaggtacatcacaaggtcaagagagtgtcttgcagccctcttgtttccgtgtatctacaccttcttctcttggccagaaggatatttacgttttggttcacagcatttgaagccaaaagttcagcccttcgaactggtttgctatacaaaacaaaacaaaacaaataaggtaatgaggattgcttattaaactgcttaacaaaatccccgactcttcctcagccctttctcggctccctcctccccaccaaaatgtcaccagctcttgaattacgtggattcgggttggaggagaacttgaaggagacgtgattaaagggctatgcgagaacgctctctttgctgcccgcggtccggtgggcttcgaag

SEQ ID NO: 1125 - DNA, 475 bp, Homo sapiens
  misc_feature (1)...(475): n = A,T,C or G
nctcgagaacantttgcagngnggnggaattcgcagtccatagtccgtgtggtggaattcgcctcgacctccccaggttaagcgatcctctggcctcagcctcccaagtggctgagactacaggcgtgcgccaccatacctggctaatttttatttttatttttgtagagacgggtctcgctttgttccccaggctggtctcgaactcctgggctcaagcgatccccctgcctctgcctcccaaagtgttggggttacaggcatgagtcaccgcgcccagcctcctgtctctctttctctctctccatttcgtctatttcttcatgacttcttctctctcttcccatgtcgttctctctgactccctccaggtctgtctctgtcctactctgcctgtctctctccttgttatctgtctctgtctgaaagtctatccctccctcacctccactctgattctctgtctccctctttt

SEQ ID NO: 1126 - DNA, 488 bp, Homo sapiens
  misc_feature (1)...(488): n = A,T,C or G
ggcccgnnngnnnnaaaatgagaccctaggcattgacgncgatattcagaacctgaagcaccagccgggaggcgggaaggtgcaaatagtctacaaaccagttgacctgagcaaggtgacctccaagtgtggctcattaggcaacatccatcataaaccaggaggtggccaggtggaagtaaaatctgagaagcttgacttcaaggacagagtccagtcgaagattgggtccctggacaatatcacccacgtccctggcggaggaaataaaaagattgaaacccacaagctgaccttccgcgagaacgccaaagccaagacagaccacggggcggagatcgtgtacaagtcgccagtggtgtctggggacacgtctccacggcatctcagcaatgtctcctccaccggcagcatcgacatggtagactcgccccagctcgccacgctagctgacgaggtgtctgcctccctggccaagcagggtttgt

SEQ ID NO: 1127 - DNA, 476 bp, Homo sapiens
  misc_feature (1)...(476): n = A,T,C or G
gcggtcccacctgaaccccgttgatggcntgaattcgggcattcagcagctgctgcaggccgagaagcgggcagccgagaaggtgtccgaggcccgcaaaagtgagtttcagggtggggctgcccggcgtggcgcgagtcgaagaaagaccgctgggcctcaggtggtgggtagattaggcccgaaaaactgcggggtgcgggcgtgcgtatagtcgcggaaggttgtgtgtttcgaagctttgaggagctgaggctctggaaggcttgcggatcgcctggaagccacgatgtgagatggaaagaaccggaggctgaagcaggccaaagaagaagctcaggctgaaattgaacagtaccgcctgcagagggagaaagaattcaaggccaaggaagctgcggcattgggatcccgtggcagttgcagcactgaagtggagaaggagacccaggagaagatgaccatcctccagacat

SEQ ID NO: 1128 - DNA, 489 bp, Homo sapiens
  misc_feature (1)...(489): n = A,T,C or G
gggcngnnaggagnacatgagnccatnngaactgagactctaggcagngnggnggaattcggctggtctcgaactcccgacctcaggtgatccgcccacctcagcctctcaaagtgctgggattacaggcgtgagccactgtgcccagcccactctttcttatgcttggtattagcctttaacattcaagaaatccccacaccagacttcaaacatctaaattctagattttatatgccaaatcaggagaaacagtctttactttccctacctatagccttgttaataggggtctctacctgggatcaaagtctagggggccctcaactagttggcaataaaaaggacaaaggaaagccatcttgcagatgagctactcagagcattgctgcctttaaaaaccctgtcagaatacaaaaaaaaaaaaaattacctgggcgtgggggcatgcgcctgtagtcccagctactccggaggctgaggcaggag

SEQ ID NO: 1129 - DNA, 466 bp, Homo sapiens
agtgtgctaaaactgatgaccatagttgagtgccgtggaattccaatcttttagtaatctcatgttggaaatgacattccatcactttggctgcattccttccattggaagtgagtcaagctgggtgccatggctcatgcctgtaatcccaggactttgggaggccggggagggaggattgcttgagccaggagtttgagaccagcctgggcaacggagggagaccctatctctacaaaaaaattaattagttgggtatggtggcatgcgcatgtggtcccagctactcgggaggctgatgtaggctgatcgattgggcccaggaggtggaggctgcagtgagctgtgatcgagcctgagtgacagagcaagaccctgtctcttagggaaaaaaaacgtggcccggcccagtggctcacgcctgaaatcccagcactttgggaagccgaagcgggcagatcaccca

SEQ ID NO: 1130 - DNA, 463 bp, Homo sapiens
  misc_feature (1)...(463): n = A,T,C or G
attgagcccntaattgatgaccattaggacagngcggnggaattcggcgagccggacataccattgttggatgtattttttttaaaacagtaataattagttattttaaaggagggatgtacctgngtgtgtgcatgtgcacgtgtttgagcgtgtgtgtgtgtgtgcaagtgggttcttggatatgtgtagtgtgagcttgtgtgcatgtgtgagcctgtgcacgtgcatgttgtaggtgcataagcatgtacacgcgtgagcatgcatgtgcgtgtacacgtgtataggtgtacatgtgcatgagttgtgtacatgcgtgagcacgtgtatagatgtacgtgtgtgtgcgcatgtgtgcgtgtacatgtgtttgtgtcttgggtatgcataagcatgcacgtgtgtatgaatgtgcgtgtgtatgcatgagcacgtatgcatgtgtgatgcgcatgttttn

SEQ ID NO: 1131 - DNA, 445 bp, Homo sapiens
  misc_feature (1)...(445): n = A,T,C or G
ntcgtagtccctagtccatgtggtggaattcggcagtgcaaatatccaagaagaggaagtttgtcgctgatggcatcttcaaagctgaactgaatgagtttcttactcgggagctggctgaagatggctactctggagttgaggtgcgagttacaccaaccaggacagaaatcattatcttagccaccagaacacagaatgttcttggtgagaagggccggcggattcgggaactgactgctgtagttcagaagagggttggctttccagagggcagtgtagagctttatgctgaaaaggtggccactataggtctgtgtgccattgcccaagcagagtctctgcgttacaaactcctaggagggcttgctgtgcggagggcctgctatggtgtgctgcggctcatcatggagagtggggccataggctgcgaggatgcggcgtc

SEQ ID NO: 1132 - DNA, 435 bp, Homo sapiens
ctacaacgaatggagagtcagtagacccagtggggcagccagcactgaaaactgaggagcgcaaggctaagcctgctccttcaaaaacccaggccagacctgttggagtcaaaatccccacttgtaagatcactcttaaggaaaccttcctgacgtcaccagaggagctctatagagtgtttaccacccaagagctggtgcaggcctttacccatgctcctgcaacattagaagcagacagaggtggaaagttccacatggtagatggcaacgtctctggggaatttactgatctggtccctgagaaacatattgtgatgaagtggaggtttaaatcttggccagagggacactttgccaccatcaccttgaccttcatcgacaagaacggagagactgagctgtgcatggaaggtcgaggcatccctgctcctg

SEQ ID NO: 1133 - DNA, 480 bp, Homo sapiens
  misc_feature (1)...(480): n = A,T,C or G
ngagcggcccnaactgagaccctacttgatgtccntgaattcgctctattaatgttttataatactaattgctaccatttatggagagtccgttaatcttctaacaacccagacaatagatattattacctctgtgctatcagtggggaaggttgactctggccaagatttgagcgcgatctgactgccttcagagctcaggttcctgatggagaggaggcaggcgctacttgacgtgtagtggtcggggaagccctcggcttctctccttcactgtctgcacatcctctcttggcccccctgggcattttctgactgtttgatcattgagtggcttaagtggtccctgagctcagagtgacagagcacgatccacaggatgggggcctggggctagtggcatctgtgccccttaactgagaacaggcttcctcgaagctcactggtgctgactggctgataccactcataatggcacan

SEQ ID NO: 1134 - DNA, 477 bp, Homo sapiens
  misc_feature (1)...(477): n = A,T,C or G
nctcgagaacctgtgcanggcnggatttgatagccgctctttgggctaacatgcagggttgcaaccacacaaggggtttgtacacttccagcttcgtgacagagctgtgctttgctagcccttagagaactcctcttcagaatcctcagctatcactggcctgaactactacagtctgtgatccttactggccacagttatcttcaactcagccagctctggtttttgctcagcatctgatcaatgataggactttcacagagatgtgctaaagattactgccagcagaaagcagtgtttatcagatattgttattaacaattgggcaattaaactgagacactgcttttttaaacatttaaaccttttttattgacacgtgacatacatttataagaatgaagaagtcgtaagtgtgcagctcaatgagttactacaaagtggatacatccatttaactaccatgcaggtcaaaan

SEQ ID NO: 1135 - DNA, 485 bp, Homo sapiens
  misc_feature (1)...(485): n = A,T,C or G
ctttaagagtcccgttngnagngnggggaannatagaagtnccctatgtcagtgtggaggaattccattattccattgatattatagaaaataacaacctaatctctgttgacagcagacagattagtggttgcctggagccaggaggctgggaagagtttatggggaagaagggaaggtgggactacaaaggggcacaaggcaactttggtgaggctttatggtgtgcatatacataaaactctttaaattatatactttatgtgtggtttattttctataaattatacctcagtaaaactataaaataatctgagtcttaaattttttcttagagactggttcttgctgtcatttgggctggagtgcagtggtgtgatcctgactcactggggcctcgggcctctgggctcgaagcgatcctctgcgtcggcctcccgagtggctggaactgcgggtgcacgccaccacacctggctaatttt

SEQ ID NO: 1136 - DNA, 469 bp, Homo sapiens
  misc_feature (1)...(469): n = A,T,C or G
nttgcgatcctttccgtgtggggaatcttgattttctcagcacttgggaacttcctggcccagatgattgagaagaagcggaaaaaagaaaactctagaagtctggatgtcggtgggcctctgagatatgccgtttacgggttcttcttcacagggccgctgagtcacttcttctacttcttcatggaacattggatccctcctgaggtccccctggcagggctcaggaggcttctcctggaccgcctcgtctttgcaccggccttcctcatgttgttcttcctcatcatgaactttctggaggggaaagacgcctcagccttcgccgccaagatgagggggggcttctggccggcgctgaggatgaactggcgggtgtggacgccactacagttcatcaacatcaactacgtccctctgaagttccgggtgctcttcgccaacctggcagctctgttctggtatgcct

SEQ ID NO: 1137 - DNA, 442 bp, Homo sapiens
gtaggagtgaacccgagtgacttcacccgccctgtcccccacgtcaggacaggcttgaggcctctctgggcgtgagcgaggaaaccaggctgctctaacttctgaagagtgggctctggctcaagacttcaatcggccagaagcccacagagatcaaagcactagcaagttcagctgtcctggccctcgggtagaacccacgggcgtgcctgggtgcggctccacccacatgccccactgtcagcccaggcaggagccttcctggccgggctcaggatctgcctgcagcccagccaggccatcacccagccccgatgcatcctggcactgcacgcttactcttcacaagcacttatacgcggatggcctccgagaccctgcctccctggtctgctgaggtcaggccaggtctcccacggagccgggcagctccacaccccac

SEQ ID NO: 1138 - DNA, 429 bp, Homo sapiens
cccgatggtgagtgtctctaggagtcattatcaataacatcagtgagaatttctttgctggtcacatgaacaccaaattcaatcttcatatcaaccggtgtacagttctgggagcaaccgggatttctccgggatttcaaaaacagcctatgtggcatgactcatgatatccacttcagttttataccaagtgcagcaaagccaaattttgctgcaattagctgttgcctagaccactgtgggtcatgattggcatcatccttgaaaaacatctccactttaggtgggcaaaactcacatccttccttgacaccaggatttctttcgagtgaagaaccagttggtattcttctgcaaaccattcagttggaattatttcacactggggcacaatgaaagctgtctcctcacattttctggtgaaagcag

SEQ ID NO: 1139 - DNA, 442 bp, Homo sapiens
gccatcctcactgcttccctgctaggccagtctgtataatctcacctaacagatgaggaaactgatgcctttggaggcaaagtgactcacccaagaacccacagttaggcagtagcagagccagaattcaaaaccaggcatgtcacaccccaagtgcccttctcctagaacggattgagatgtactgctaaatgtgagccccgtcgctatttccgaggagtaggatttcggggatttctggcttttttctttatgttttgctgtcccatccaagttttctacagaaggggaataggattttttgtttttattttattttttttgacatggagtctcgctctgtcgtccaggctcgctctgtcgcccaggctggcgtgcaatggcacggtctcggcttgctgcaacctctgcctcccgggtccgagtgattcgcctgcctcag

SEQ ID NO: 1140 - DNA, 464 bp, Homo sapiens
attgagacatgccgtgggggcattctgcaaaccaaagaaatcaatccccacagatggctcgtaagtcaaaaacactgtttaattctttcactgcatccctttgggaagcctggcccttgaaaaacagaataattctgaaagaaagaaaacaaagaaaaacatactccagaattcctaatagaacacttcacctgaacctaaaatggtgagcgagagtcaccatgaggccctggcagccccgcctgtcaccactgtcgcgactgttctgccaagcaatgccacagagccagccagtcctggagaaggaaaggaagatgcattttctaagctgaaggagaagtttatgaatgagttgcataaaattccattgccaccgtgggccttaattgcaatagccatagtcgcagtccttttagtcctgacctgctgcttttgtatctgtaagaaatgtttgttcaaaaaga

SEQ ID NO: 1141 - DNA, 444 bp, Homo sapiens
  misc_feature (1)...(444): n = A,T,C or G
ttaggtgcacgggtctccaggcacagcaacttagtggagaggggcacctgctgcctgccccatccagggtctccccctccaggcccaccttttcatcagcactgccttccccacgcccccggctgacacccctgagcgagtcacctttgccgctgccttgggtgtggaaccctgtgcctttcctgagtagtcattcattccctcactctggaacccacccattggctcctcattctttctctcactcctttatttattcaacaaacacgtcttgtgcacctcccatgtggtcagttgtgtctgctatcttctctcccttgggcattcaggaaaatgagagttttcccaataggcttgaggtggtgagattcanggagctccctcactggccaaaggatggaacccacctctggcctaaggtgctttgccccacaaggatgttct

SEQ ID NO: 1142 - DNA, 429 bp, Homo sapiens
  misc_feature (1)...(429): n = A,T,C or G
agcattaaagaaagcaagggaggaaaacatgcgcccaagctcgttcgcaggaacatgttcgcgtgtctgcgcctgtgtgcgcagccagttttctggctgaggatcgctcgccaactacagacatcacccgcccaggacccggtgccacactcacccagaagacgaaactccacaggagcgagaagaggagtccatttctccgtcggctcggcacggcacggggatgcaggcccctgattcagtacgttctgtgaaagtggagcgagaagccaagacgtggatcgagaagccccgtggggcgggtctcagggtggcccaaaagacccctgttcacgccactaccagcctaactttaggaactgtcgtccacctggcttttattatactgccttaaacatattcacttttttgagactctagaaatttcan

SEQ ID NO: 1143 - DNA, 443 bp, Homo sapiens
cgacgaagccccggaggggcagcttcgaggtgacgctgctgcgcccggacggcagcagtgagtggggacctggatgtgggggagagggacgtgggtgaaagggacgtgggttccgaagacaggaagcgctattcttagaaaccacggcagtctcatgacttcagagacgtgctcgtgggttccgaagtattgtaacttcgcttcattctggcctttcaggtgcggagctctggactgggattaagaaggggcccccacgcaaactcaaattccctgagcctcaagaggtggtggaagagttgaagaagtacctgtcgtagggagatttgggtagaagccctcatgctgaggtttgaaatgggaagtggggggcgcgaccgctgttgaggaagagaaggcattgatcttggtgtggctacaagtacccacctggcgtgggtagg

SEQ ID NO: 1144 - DNA, 436 bp, Homo sapiens
ggcgtttcgccgtgttggccaggctgatctcgaactcctgacctcaagtgatccgcctacctcagcctcccagggtgctgggactataggtgtgagccaccgcacctgccatttggattggcaatctgcaagattttattacttaaatgcaacagatgttctcattcattgttctgaagcttggagttccaatgaaaaatttaggtggagaactgagtttagaaaatccatataatgtttagtaaaactagtatttcataaatgctgaatgacagagattggtctttaaattaaaacaacagtgtgatgttgggtatttttttttctttcaaaatactaaggattagatcagtggtcagcaaactacagctgatagcctgtttttgtaaataaagttttactggaaaacagccactcttactcatttgcagattgg

SEQ ID NO: 1145 - DNA, 419 bp, Homo sapiens
caagtagtaatgtgagtgaataaaactgctgtttaattttagagaaatagggtttttgtttgtttgcttgttggtttgaaatgtaatcagagcagtacttacagattgggggcagttagacaatttttaaagatgttaataaccgcagcactgattctttagctaatgcaaatatgctgagtattttggtggtcattttagacctctgccatatctgtttgtacattgtttcatttttaaccttttcgtcaacatttcttactcattttagattgtcttagaattcagcatctgaaagcattgtttttgttttgttttgttatttactttataaaacttccataagagaagaattcaagtggactagtgaatagtgacattgtttattgtgtaacattcaatcttggtgaataaatcag

SEQ ID NO: 1146 - DNA, 500 bp, Homo sapiens
  misc_feature (1)...(500): n = A,T,C or G
tggggccnnccngggccccccgatagtagtcactagttcggagngcgggaantccccggngcctccatcgcccgacacgcctcccgactccagtcgcatcagccacggcccaggtgcagccagaagtagaggagctggagccagcaccatccgggccagggcagcaggtggcagacaagcatgagctaggacgactgcagtactccctggattatgacttccagagtggccagctgctggtgggcattctgcaagcaatgggattggcagccttggatcttggtggctcctcggacccctatgtgcgggtctacctgctgccggacaaacggaggcggtacgagaccaaggtgcatcggcagacgctgaaccctcactttggggagaccttcgccttcaaggtcccctacgtggagctggggggcagggtgctggtcatggcggtgtacgacttcgaccgcttctctcgcaatgacgccatcggggaggtgcgggtccct

SEQ ID NO: 1147 - DNA, 465 bp, Homo sapiens
  misc_feature (1)...(465): n = A,T,C or G
catcgagcnccnnttaaatggtagtcttcgcaagngcggaggaacaactggctttctttacgccacagacttcctatgctgtggacccagttatttgccaccattgtccctgacacctggcagtggcaccacccccaggggctctgcttgcttacagtggcttctgaagctttggcaactggcagatttttatggcagtagaggtgccagcatggaggatggagtttgggtttataacccaaccctcgaacgaaccagcctgtgggggcctggagtggagctggttttggggagtcacaggagcggggggttcatcatctcctttctccttctcctttcctgacccctccgacagcttccatgttggccatgggtcaggtgaatggatggagctccaagcggggctcagcccattgacccgagcgaggcgcacacacctgcagcgtggatcaagcgcactctcta

SEQ ID NO: 1148 - DNA, 482 bp, Homo sapiens
  misc_feature (1)...(482): n = A,T,C or G
ccatcgagnccntngtagtagaccttagtccangcggtggaattcgcctgttttattttttcttaattttattaaaggatgatattgatgatgaaatgtcttacgatgatcatttagaggtttattttgaacaactggcaattccacgaatgatggaataaaacatatgaagtagaaggactggaacctccagaaaaagtactttaagttacctacaggtgatcctagtcaggtatgaattgataagaaatgcctgcaccttccctccttcctatctttcccttgcctacagaaaattaaaaggcaaaacaatggacatctacatattcttcattcagatcaaccagtggctagcatttgccaccttttgcagtttctttctctttccataagtactttcttctctgaatcatttgaaagcaaatgaaaacagtagcctaaagtgtcagtttcaaccagaaaataacagctctgatttctca

SEQ ID NO: 1149 - DNA, 500 bp, Homo sapiens
  misc_feature (1)...(500): n = A,T,C or G
agtgcccnnncnggcccgccactgagacccctgatagtagaccttagnccangcggnggaattcctccactctccagcctctccccagcctcctgcactgagctggcctcaccagtcgactgagggagcccctcagccctgaccttctcctgacctggcctttgactccccggagtggagtggggtgggagaacctcctgggccgccagccagagccggtctttaggctgtgttgttcgcccaggtttctgcatcttgcactttgacattcccaagagggaagggactagtgggagagagcaagggaggggagggcacagacagagaggctacagggcgagctctgactgaagatgggcctttgaaatataggtatgcacctgaggttgggggagggtctgcactcccaaaccccagcgcagtgtcctttccctgctgccgacaggaacctggggctgagcaggttatccctgtcaggagccctggactgggctgcatct

SEQ ID NO: 1150 - DNA, 479 bp, Homo sapiens
  misc_feature (1)...(479): n = A,T,C or G
aggggttncnancatcgagacccattgaagncgctggaattccggnttgggaatctcctctagctttcccagaaaggaagcccttgctgctctaaagaaagtttcagcctgagaagggatggtgattgagctatctgctgtgactgctgctcagggtagggaaatctcctggggagaggaaatgcaggtttccctctgggcctgatgagggtaatggggcctcggcacaaggtgcttcctgcattgccacgggagcccccgcccctctggcacgggtctggtgtctcctggcaagatactcaggctcccttttgttgtaggagctcctgggaggaagccaaaaatagcagtaaatactgaaaagggcatcctgttgcaaagagaaagcagtanggaggcgtgaggccgagagaggcaaaaagcctgcttggccctcatccccactgactcagagaaggatggaccttaggcctctatcn

SEQ ID NO: 1151 - DNA, 503 bp, Homo sapiens
  misc_feature (1)...(503): n = A,T,C or G
cgccccccccccccgcgccaattgaaaaccntnnatagagaccattagncagngcggnggaattccagaacctcatctcctacggtgctgaagcctgcagcagggcaggatgggcaggagagcagagccgcggagtctgcggcgcgggtgaagagcggcgcgtaattcccgcagcaagattgttccgcgcccgcagcccctggactagcaggatccgaaccccggcggctgcgtgcttataggcgcagacgtcagagagcccgcggcttaaagcgcgtcgcctggctagcgccaccccctagccttcttcaaggcctccagggctgggcccaagcgcccgtcgacggcaccctgggcccagaggactcgcgggcctcatctccaatgattcagaactcacgtccgtcgctgctgcaaccccaagatgtcggagacacggtggaaacgcttatgttacatccggtgatcaaggctttcctgtgtggctccatcagtgggacctg

SEQ ID NO: 1152 - DNA, 493 bp, Homo sapiens
  misc_feature (1)...(493): n = A,T,C or G
tgtgccccgnnnagcggccaatgagaccctaatagagcgcgtagnncccgctggacgcccacatcctggagggcacgattcgctcttccagatcctgtctgagaggcaggacatgtatcagtgcttggtagaaggctgcacagagaagttcaagaccagcagagaccggaaggatcacatggtgaggatgcacctgtaccccgcggacttccggtttgataagccaaagaaaagcagaagcccagcctcagcagaagccccaggggacagtggagagcggtcagaaggggaggccatggaaatctgctctgagcctgtggcagcctcccctgcaccggcaggtgagaggcggatctacagacataggtcagtgtctgagctctttctgaaacccgttctcaacatgtgttcggtgctgaggattctgggctgcacctgggccgcagctcttctcatactgaattcagaaaggtaacgctgggtaagaaaatcg

SEQ ID NO: 1153 - DNA, 499 bp, Homo sapiens
  misc_feature (1)...(499): n = A,T,C or G
agtggccnnnnncaggcgcccactgaagaccctagatagtaggcgtgagncngcgcaataaagatgtaataagctaggagtcaatccagaggacttcctggaggaggtgatggtggtgtatagtcacagagagggaggaacaggcagtctcagaggacagcagcaaggccaagtgagagactggcagaggtatacaggtccccgttggctggggtgaggagggtttctgctccctcaccccccagagcctctggcttatcacaggataagagccagctaagctccaggggctttccaggaaaagtgtctcttggaaagggtgtgaccttttcatcggtcctgacagcaccctagaaatagcttggccttttccctcccctgagctccacagagaacacagccagcagaagacacattccctgtcatccagaaatgggtttgattctcagctgagggacagcaggactggtagagactgtcaggccacacagctacctac

SEQ ID NO: 1154 - DNA, 457 bp, Homo sapiens
  misc_feature (1)...(457): n = A,T,C or G
catgacncccctnggagatcatcgnacangcggnggaanncatttcagtttggttaatttccatctgtgtcaaccaaaattgaaaagctgccagagacttcacatgtggagttggaagagtccgtgtacattgtggggagggagcattggtgggaagatggggaaatgaggggctctcagccctgggttattgcttcctgcctgcctcctgcactgtgagcggggagaggtcgaccaggaggctgctcttctgcccatagcggggtactctgacctcttctccctcttcccttctttgccacacatcagctcctctgggaagctgatttgctccagggacaggaggtgggggaaattgcctgttaaccttcccaacacatcacctcaagttaaaattggtggatttccagaatttgtataggatgggaatggggacgacacacttttgagctagtan

SEQ ID NO: 1155 - DNA, 456 bp, Homo sapiens
  misc_feature (1)...(456): n = A,T,C or G
aatgagnccctacgagagcatcggaagngcggnggaattccctgtattctttgaccctcggagcagggacaggcaagacaactggctttcttgcagctgccctgatggtgcaggtgcagggaggtgaccatgtaactctgaccaatctgggaagtggagggtgggctcatgggccgtgctctgcccctgtctgctgctcccagtctttcgctctgcctgcctgctcagaagaggtggctttggcccagaggctcaggccgggactgagatggacagacccagggtggggtggggtccaggttgggtgtggactgtcctcactgtcagtggagccccagaagctagatgggtaccaggtggggttaggttcccagaggactgagggaatcctgtacaggatgtcccagggtagatggggagcaggattgggacctgctctgacagctggacacatgg

SEQ ID NO: 1156 - DNA, 514 bp, Homo sapiens
  misc_feature (1)...(514): n = A,T,C or G
agacctntaaagnaganccggnnnagggaggnattgaaacccctnnnnttcgagaccactatccangtggnggaattcggagaacatccgtacggaggtgatggcgctggtcccaccggccgactgccgctactacgccttcccacagatgatcacgcccctggtgaccaaaggctgagcccccaccccggcccggccacacccatgccctcctccgtgccttcctggccgggagtccagggtgtcgcaccagccctgggctgatcccagctgtgtgtcaccagaagctttcccggcttctctgtgaggggtcccaccagcccagggctgatcccagctgtgtgtcaccagcagctttcccagcttctctgtgagggtcactgctgcccactgcagggtccctgaggtgaagtaaacgccggcgctgggcttggccagtcggcaaaaaaaaaaaaaaaaaaaaaaagcggccgctcaagtttaaagggcccgttaaaacccgttgatcaccctg

SEQ ID NO: 1157 - DNA, 480 bp, Homo sapiens
  misc_feature (1)...(480): n = A,T,C or G
gagtgcaacctgaacctcctgagancntatgcagngncgnggaattcccagcactggtccaggactggagagtttctcaaggaccttgaggaccccagaagcccttgcagcaggaaaggctgtaagggggggtcagcctagggcaggacctagggaggggaactttcttgatacgtatttgccttttcatcccatctagcaagcacagtgttaattttagaaattatagaagaaaaaatcagcaaggagtgtgggaaaactgcatgccccaggcctcccccgccccagggtgaattggaagtcctggaatgggccgaggcacaccaggcagctgatctgggtgcatgtgggccacagaccactctcacaaggttaaatctttaacaagagcctcatgtttgttaggagaaggtgggaccccagcccaagcacttccccattgcagcctggcatgaaatctttgccttttagtggggatca

SEQ ID NO: 1158 - DNA, 482 bp, Homo sapiens
  misc_feature (1)...(482): n = A,T,C or G
natcgaganccnntatgcattgtagtggaattcggagaacatccgtacggaggtgatggcgctggtgccaccggccgactgccgctactacgccttcccacagatgatcacgcccctggcgaccaaaggctgagcccccaccccggcccggccacacccatgccctcctgcgtgccttcctggccgggagtccagggtgtcgcaccagccctgggctgatcccagctgtgtgtcaccagaagctttcccggcttctctgtgaggggtcccaccagcccagggctgatcccagctgtgtgtcaccagcagctttaccagcttctctgtgagggtcactgctgcccactgcagggtccctgaggtgaagtaaacgccggcgctgggcttggccagtcggcaaaaaaaaaaaaaaaaaaaaaaagcgtctcgtccaacattagaggacctgtaaaaccactctgtgagcctgctgaggagctttt

SEQ ID NO: 1159 - DNA, 455 bp, Homo sapiens
  misc_feature (1)...(455): n = A,T,C or G
catgacnccntntttgagaccctagaacangcggnggaattcctggattccgcccggccttaaaaggagcccttgtgaaacctggttagcctcgtggtttcgcggcgttggctcagctgcagccctggtcctaaaccttggagcgcagacttgaggcaccccctcctgcctgttggtgctgagggggttgggtgctgtgtcacttgatgacgtggctgactaccacccagggcagcggccgagcccatagtggcgtcagtgccgccggcgtccttggggtccagcggtcaaggctcagcccgctgaggggacccccccggagttggttccagcactggtccaggactggagagtttctcaaggaccttgaggaccccagaagcccttgcagcaggaaaggctgtaagggggggtcagcctagggcaggacctagggaggggaactttcttgatac

SEQ ID NO: 1160 - DNA, 515 bp, Homo sapiens
  misc_feature (1)...(515): n = A,T,C or G
agaacttcnactaggagtnnccggnnnnngnnnnnaaatcgagatccttatgcattgtacnggcatncggagcacacagaaccttcctggcccctttggttctctgcctttggatggatggatttatgctggcattgtctggagggagccgggtgtcccccaataatcacagaacaaagacaattaggtcgggggaggaataaggataaaaagagaccccaacagaccctgcctgcccttccctgccccccggctgcactgctgaaatatgaggaagagatggctccagtgtggggtgctggccaggccagttcgtggggacgtacatgggctggggtggagcccccagcctctacccctggggaggatggagagtgggcagcctagggagagctacaggagggaggagggggcccagaggctctggcaggggtgaagacaagcagggggacccctcatggccctctgtccatcccgcaccagcggaggacaagggttccagtttcagtcgggtt

SEQ ID NO: 1161 - DNA, 469 bp, Homo sapiens
  misc_feature (1)...(469): n = A,T,C or G
gttacaagannannnggtctgagaccctgataggctccggaannccnnagggnnacctccctcgccccaaggttccagaggccctaggcgggatgggctttctgaacctttaggaactccacgacgaggaggacatgggactggcgtggacagtcagggctcacttgggctctctctagctccccaattctgcctgcctcctccctcccagctgcactttaaccctagaaggtggggacctggggggagggacagggcaggcgggcccatgaagaaagcccctcgatgcccagcactgtctgcgtctgctcttctgtgcccagggtggctgccagcccactgcctcctgcctggggtggcctgaccctcctggctgttgcgacgcgggcttctggagcttgtcaccattggacagtctccctgatggaccctcagtcttctcatgaataaactccttcaacgccaaaag

SEQ ID NO: 1162 - DNA, 477 bp, Homo sapiens
  misc_feature (1)...(477): n = A,T,C or G
agaggccnnnnnaagcccccactgagaccatggatgaacgcgtatgcancnccactcttgacctcaggtgatccgcccgtctcagcctcccgaagtgctgggattacgggtgtgagccactgcaccgggcctcaaatccatcttctagaagaggaagctggaggctcagggaagttaggaagttggcttaaggtcacacagcaagtcagccatgctggggcttgacccccgtccagatctgggcgggcctggctcagagtatgcggcgtcctgtaacttggcatctggtgccctgagccctttcccaggccttctgggtgccgggcagcagttacagacaagaggggtgcaggcccctgctcccccacctacagttctgttgcgtagcacctgcagggagagccaattcactttgaaacaacccacaggacaaaacaatggcgcaagtgtgtccccaggaaaagggagatttttttc

SEQ ID NO: 1163 - DNA, 476 bp, Homo sapiens
  misc_feature (1)...(476): n = A,T,C or G
cgaggtcnagggnannnnggaattgagaccttttgatatcctgcggaannccngancnatgaattaatccgtttttgtaatgtcagtctgtaccagttgagggattatttaataagtccagtatgagtggtttcggaattaccagtttttgtaacgtcagcttataccagtcaagggactatttattaagtcagctatgtgtagccaatattgcagagttgagtaagaagtctttgtccttaagcaatctcttgaaaggactgagcaatttcgtgaatatcagtaacacaagggtaagaataggacataaactgaatgctgtgagaactccaagaaaatccaagttgatttggggttgggggaaattataaaagaccttgagggattttgtccacagcagggaatggagacacttttcacgtctagggaagggtaggagtaaaggctttaaaagctggaaacattagactgtgagn

SEQ ID NO: 1164 - DNA, 457 bp, Homo sapiens
  misc_feature (1)...(457): n = A,T,C or G
catcgagaccctcgatcgangcgccgtagaacgagcaatggncagcctctgaagctagcttatttgaagaggcactggaaaaatatggtttagacttcaattacatacggcaagattttcttccttggaaatgattgactagcatcattgaatattattacatgtggaaaactactgacagatatgtgcaacagaaacgtctaaaagcagcagaagctgagagtaaactgaaacaagtatatatcccaacctacaaaccaaatcccaaccaaatatccactagtaatgggaagcctggtgctgtgaatggagctgtggggaccacgttccagcctcagaatcctctcttagggagagcctgtgagagctgctatgctacacagtctcaccaagtggtattcttggggcccacctaatatgcagtgtagattatgtgcaatttgttggctttattgga

SEQ ID NO: 1165 - DNA, 460 bp, Homo sapiens
  misc_feature (1)...(460): n = A,T,C or G
cattcgacccctatcgattgagaccactaggaagngcggnggaaatcgcctgttgtcttaacattttgtataaaaaagaacaacagaaattatttgtcatttgttaagtggcttgacaatcatttgagctttgaaagcagtcactgtggtgtaatatgaatgctgtcctagtggtcatagtaccaagggcacgtgtctccccttggtataactgatttcctttttagtcctctactgctaaataagttaattttgcattttgcagaaagaaacattgattgctaaatctttttgctgctgtgttttggtgttttcatgtttacttgttttatattgatctgttttaagtatgagaggcttatagtgccctccattgtaaatccatagtcatctttttaagcttattgtgtttaagaaagtagctatgtgttaaacagaggtgatggcagcccttccctag

SEQ ID NO: 1166 - DNA, 520 bp, Homo sapiens
  misc_feature (1)...(520): n = A,T,C or G
agtacnctatnagatcgnnncngnnnnagnnnngnaattgaaaaccntnnnnnatcgtagtacctagtccagngncgnggaantcagagcatcgtgggggatggggagaccaaggaacccttcctgctggtgcagtattcggccaagggaccgtgcgtggagagaaaggccaagctgatgactcccaacggcccggaagtccacggctgagccaggatgcaaggctcctggtcctgtttgcagccggccaagaggcgctgggaggggcaaaaccatacggatgcgctgctgtctgagaggaagggctgacacttgctggcatggcctctgcgggcttcgtcatcgcatgcactgatgcccggggacctggctgtcctgggcttcccctcggcctccaggtgaggctgcccattgcaggcactgggcaggcctgaccttgctggggctcatggccctgtagcgcttttgttacttgaatgtctagctgagcctgtttttgatggagctactactgtaatgc

SEQ ID NO: 1167 - DNA, 456 bp, Homo sapiens
  misc_feature (1)...(456): n = A,T,C or G
catgacnccntngatgagaccctaggacangcggnggaattcgcagctctcagcagctggtggcaagctccttgacctcatcctctaccctgacagagatcctggaagccatgaagcacccctcgacaggagtccagctgctctctgaacagaagggcctctcaccgtactgcttcatcagcgcggaggtggtacactggttggtgaaccacgtggaggggatccagacacaggcgatggccattgacatcatgcagaaaatgctggaagagcagctcatcacacatgcatctggcgaagcctggcggaccttcatctacggcttctatttctacaagatagtaacggacaaagagcccgaccgagtggccatgcagcagcccgccaccacctggcacacagcaggagtggacgacttcgccagcttccagcgcaagtggtttgaggtggcctttg

SEQ ID NO: 1168 - DNA, 482 bp, Homo sapiens
  misc_feature (1)...(482): n = A,T,C or G
ngatggtgnccnaattgagaccatgatcgangnctntggaaactggcatctcctggctttgacttatatttccctattcatgaggttgatcattttttcatatacctgttttccatttttatgttttcatttgtgtctattcaagtcctttgcccactttttaatgggattattgtgtgtgtgtgtgttttgctgttgaattgtttgagttgttttccttcatttgaatataatttaaggccaaagatttacatctgtaatgatttccctattaatatgctgattgtattaagtttgggacttaaccattagtatatcctgctattttgtaaaatgttagagagtagatgagtgaaggacatcaagatgggggagaacatctcactactcctgatccatcctcacatacaggttgaactgaccatttaattctgaaaaacgaatgaagactgtctgcagggttcagggacagggagggcagt

SEQ ID NO: 1169 - DNA, 489 bp, Homo sapiens
  misc_feature (1)...(489): n = A,T,C or G
aggccgnnnnnnnngggttacgagaccctatgcagngtatgagaaccnctcagccatatcctaccatggggacagccagcaccgagccgccatcaacacctactgctccttggcagcctgcgtgcttacctcggtggcaatatccagtgccctgcacaagaagggcaagctggacatggtgcacatccagaatgccacgctcgcaggaggggtggccgtgggtaccgctgctgagatgatgctcatgccttacggtgccctcatcatcggcttcgtctgcggcatcatctccaccctgggttttgtatacctgaccccattcctggagtcccggctgcacatccaggacacatgtggcattaacaatctgcatggcattcctggcatcataggcggcatcgtgggtgctgtgacagcggcctccgccagccttgaagtctatggaaaagaagggcttgtccattcctttgactttcaaggtttcaacgg

SEQ ID NO: 1170 - DNA, 466 bp, Homo sapiens
  misc_feature (1)...(466): n = A,T,C or G
ggctgctcaattgagaccatttatgagaccataggacangcggnggaattcaaaatacagagatacatacctttggctgtgacattgtctataatgacaaaagtctgttactagcagggcacccatctacaaggaatgggttaaatattacacagtacatttatgtaacggaatagtatgcagtcaagaaaaaggaaaagaactacgcatttccgtatacaaaaccatgaagcaatcttcagtgcattggaaatgaaaaacaagctgtagaatgatgggtgcaggatgtccatgttttccttttaaatatatatatgctctgnaatgaatagagcatcataggaaagataagactttggaaaatgaggccctggccaggcgcagtggctcaggcctgtgatcccggcactttgagaggctgaggcaagcggatcacgaggtcaggagttcgagaccggcctggccg

SEQ ID NO: 1171 - DNA, 450 bp, Homo sapiens
  misc_feature (1)...(450): n = A,T,C or G
catgagccctgtttgagcccgtagaaccnccggngcagcagagcctcggctactgcccgcagtgtgacgcgctgttcgacgagctcacggccctttagcacctgcagctgtacacgcggctgcgtgggatctcctggaaggacgaggcccgggtggtgaagtgggctctggagaagctggagctgaccaagtacgcagacaagccggctggcacctacagcggcggcaacaagcggaagctctccacggccatcgccctcattgggtacccagccttcatcttcctggacgagcccaccacaggcatggaccccaaggcccgggcgcttcctctggaacctcatcctcgacctcatcaagacagggcgttcagtggtgctgacatcacacagcatggaggagtgcgaggcgctgtgcacgcggctggccatcatggtgaacggtcgcctg

SEQ ID NO: 1172 - DNA, 495 bp, Homo sapiens
  misc_feature (1)...(495): n = A,T,C or G
ggggnagggatttgaaaaccccttnnnaactgatgtacctagtcagtgtgcnggaattccccggctacagctattctgaaaaacccagaggtgaagctggcagggctggcagccagggacagcctgcgcctggaggcaggcctctgcctgtatgggaatgacattgatgaacacactacacctgtggagggcagcctcagttggacactggggaagcgccgccgagctgctatggacttgcctggagccaaggtcattgttccccagctgaagggcagggtgcagcggaggcgtgtggggttgatgtgtgagggggcccccatgcgggcacacagtcccatcctgaacatggagggtaccaagattggtactgtgactagtggctgcccctccccctctctgaagaagaatgtggcgatgggttatgtgccctgcgagtacagtcggccagggacaatgctgctgggagagcttccttcaggaccctgcttctgn

SEQ ID NO: 1173 - DNA, 424 bp, Homo sapiens
  misc_feature (1)...(424): n = A,T,C or G
attgattactactacnccgncgggnggaattcctgcccccatgcctcttttagtgaccctggcctgagctccccctcccataatgtccttttccaacctaagcctctgcgtacccctcctgcctcctcccagtgtctagcctgcccctctctccacagggtgcccggcacccatttgcccaggcagtgggcaggaatatagccaatcccacggccatgctgctgtcggcttccaacatgctgcggcatcttaagtaggtcatgggaggctgtcggcagaggttgggtgtcgtgaggaggagcaggtggggaaattagcgggaggtgtcttgggggagtcacagtttcttcctgtccatatccacagtcttgagtatcactccagcatgatcgcagatgcggtgaagaaggtgatcaaagttggc

SEQ ID NO: 1174 - DNA, 493 bp, Homo sapiens
  misc_feature (1)...(493): n = A,T,C or G
agcgggnnnnnnnngggaactgaaaccctnngnanaatcgtatactctatgcagtgtcgtggaattcgaggaagcagaggaaggtgaagagggaaagcagagagagaaatgccgagaggatggagagcatcctgcaggcactggaggatattcagctggatctggaggcagtgaacatcaaggcaggcaaagccttcctgcgtctcaagcgcaagttcatccagatgcgaagacccttcctggagcgcagagacctcatcatccagcatatcccaggcttctgggtcaaagcattcctcaaccaccccagaatttcaattttgatcaaccgacgtgatgaagacattttccgctacttgaccaatctgcaggtacaggatctcagacatatctccatgggctacaaaatgaagctgtacttccagactaacccctacttcacaaacatggtgattgtcaaggagttccagcgcaaccgctcaggccggctggt

SEQ ID NO: 1175 - DNA, 453 bp, Homo sapiens
  misc_feature (1)...(453): n = A,T,C or G
catgacnccntaattgagactctcgaacangcggnggaattcgaccggtggtctgcaccgtcctggagggagatatgagtggctgttctctcagccagtcactgggatgtgttcgggctttggaccttgaggccggagagagctcccgagaggaggcggcgccacgttcgttcttctgaggggacggtagatttgggggttttcctttaggattctcgcgccgtttcctctgaagaaacaggaccagagagggaaggtgacctgaaagtcacagaataattttttagagctgaacaagaatccaagcctgcaactgcagagacgagagatctttctgctgtctatactcttggaaagcacatcctaagatctttgcagattatcctgtggaaggaaaatgcctaaagtcaaaagaagccggaaagcacccccagatggctgggagttgattgt

SEQ ID NO: 1176 - DNA, 235 bp, Homo sapiens
atcggctgaggccctcttcaggctttggcagccacagatacttctgaacccttcacagagagcaggcaggggcttcggtgccgcgtgggcagtacgcaggtcccaccgacactcacctgggagcacggcgcctggctcttaccagcgtctggcctagaggaagcctttgagcgacctttgggcaggtttctgcttcttctgttttgccccatggtcaagtccctgttccccaggc

SEQ ID NO: 1177 - DNA, 456 bp, Homo sapiens
  misc_feature (1)...(456): n = A,T,C or G
catcgagcccctaatcgtagacttctgacagngcggnggaattcctgggtgaggctgaggtagctgctgagctgggcccactggctgcctcactggaggcagcagagagcctggatgagctgcaccgggccccagagctaggagtctttgcagactttgggaaccacacaaaagcagtacagctgaagcccaggccccctcaggggctcgttcgggtggtgggtcggccccaacctcaactgcagtatgtagatgcctcttggctatgtcagtctttttcccttgctgctgcgactgctggaccccacctcatcccgccttgggcccctgctggacattctagccgacagccgccatctctggagcccctttggtttacgctcccttgcagcctccagctccttttatggccagcgcaattcagagcatgatcccccctactggcggngtgctgtg

SEQ ID NO: 1178 - DNA, 455 bp, Homo sapiens
  misc_feature (1)...(455): n = A,T,C or G
ctcgacccccctaatcgagaccctagacagngcgnggaattccaaatgatacccccacaaaaaatcaatacttttggaaattaaaaaaacacttctaagtaactttataaataaattataaaagtaaaacacttagaagtaaatagtaatgaaaatactatatcaaaacatgggatgcactgatgtctgagaatgtcttaaaaataatacgatgccaagaagagagtgggtcagtattaaaaatgaattgatcatttattttatattcaaatatcttgcttcagcaagctagttgatggatgcatggcggtttgttatgctgtccaattttgtatatgtttgaaatattctataataaaaaaaggcagagaaagtgggagatagacatttgtagttttaaatacttatatcttaaaggatagactgagtgttaatacactggacactcagtttag

SEQ ID NO: 1179 - DNA, 456 bp, Homo sapiens
  misc_feature (1)...(456): n = A,T,C or G
gggcgccccaatgagaccctgatgagggcctggaaccgcgcggaccaggtccgcgtgaggggttcgggggttctgggcaggcacaatggcgtctcgagcaggcccgcgagcggccggcaccgacggcagcgactttcagcaccgggagcgcgtcgccatgcactaccagatgagtgtgaccctcaagtatgaaatcaagaagctgatctacgtacatctggtcatatggctgctgctggttgctaagatgagcgtgggacaccctgaggctcttgtcacatgatcaggtggccatgccctatcagtgggaatacccgtatttgctgagcattttgccctctctcttgggccttctctcctttccccgcaacaacattagctacctggtgctctccatgatcagcatgggactcttttccatcgctccactcatttatggcagcatggagatgttcn

SEQ ID NO: 1180 - DNA, 478 bp, Homo sapiens
  misc_feature (1)...(478): n = A,T,C or G
gtgggtccnnntaagagacctaacganagtctcgcagngncgnggaanacatgaacatttggactcggaggagcagagggacgccccctcggccgctccggctgcactgcggagccgaggcccgcgcgagggcgcagaccgaccaaccggctagggcctgactggctagactgtgcccgctgcagaggcgcgctcccagcacagggcggggacggaagggaggaccccgagccgcgtgaaacgcaaggccctcgtgtgtgcgcagctgacaccctaggcggggctgcgtcgggggcggggacaggcgcgtcccagcccacgcagccggaacgcctgagcgctgggcgcctggtctgccggacctcagcagggggcaccgcgggccggactgtggaggggcgcacgcccggaagcggcgagggtagccatgacggcctccgtgctgcgaagtatctcgctagccctgcgcccgactagg

SEQ ID NO: 1181 - DNA, 478 bp, Homo sapiens
  misc_feature (1)...(478): n = A,T,C or G
ggggttannnnaaatgagacctattgaaggcgctggaanaccttttttatccctgatctgtgatgtgcctgagaagaagggagtgagactgctcagagaggcaggattcctgctgactccagggggacacctggcacctcagcttcctttcccacttctccaggctgcatggaggggtgccgggcaggggcctcctggaagggaacctcctgcagcctcaagcaccaggtcatgacatgacatctatccctttcccaggtgaccgactcctgcaggtggatggagtgattctgtgcggcctcacccacaagcaggctgtgcagtgcctgaagggtcctgggcaggttgcaagactggtcttagagagaagagtccccaggagtacacagcagtgtccttctgctaatgacagcatgggagatgaacgcacggctgtttccttggtaacagccttgcctggcaggccttcgagctgtgg

SEQ ID NO: 1182 - DNA, 483 bp, Homo sapiens
  misc_feature (1)...(483): n = A,T,C or G
gagggtnccnnnaatggagaccaatttgagaccgtaggccangncgnggaattcctctgcatgtgcttcagcagcagggcctggtcccggagcacgtggagtcacggcccctctacagccccctgcagccagacatcgagcaggggaagctgcagatgtgggtcgacctatttccgaaggccctggggcggcctggacctcccttcaacatcaccccacggagagccagaaggtttttcctgcgttgtattatctggaataccagagatgtgatcctggatgacctgagcctcacgggggagaagatgagcgacatttatgtgaaaggttggatgattggctttgaagaacacaagcaaaagacagacgtgcattatcgttccctgggaggtgaaggcaacttcaactggaggttcattttccccttcgactacctgccagctgagcaagtctgtaccattgccaagaaggatgccttctggg

SEQ ID NO: 1183 - DNA, 482 bp, Homo sapiens
  misc_feature (1)...(482): n = A,T,C or G
tgtgatnccnnttaggaaacccattgagantctaggcagngncgnggaattcggggaaggcaccagggtggggaccccggttctggccgcctcctcactccgtgcctcggtttatcctctggtgaagcagacgccacagtctgtgagcagctctgtgggggtctgtgtgcccctccgcactggctactgtcttcctcgggcgccggtcggcttttgcgtccccacattcagtcccaactgcggctcccgcggttcccgcactggccgcagaggagccacggggcacagctggctgtgtttagggccctgcacagccccacagccagtcgctccccccacagttccgaaagaatatggccccccagaggaaggacctgcatggactgtcattctccgttcttcgagcacagaaccgcgacaagctgttcaaagtctctgtcccccacgtcctggagatgcggaagcgggagctgaggcccagg

SEQ ID NO: 1184 - DNA, 489 bp, Homo sapiens
  misc_feature (1)...(489): n = A,T,C or G
ggatggcccgnnaatcgagaccattggacagtctggtggaattcgcaatgtattcattgcgccccgcatggcctcggcctgtatgcacgagcctacaatacaactttgggatgctataaggacatccctgaggggagcctcctacaacgagcctggcacccagcaggtgctcagtaaataggaatgaaaaggctagctgtaatactagtactttgggaggattaggagggaggtttgcttgagcccaggagtttgagactagcccgggcaacatagtgagacccccatctctaatttttaaaattataaaaaataaataccattttacaaaggcttgtatagcttatcttggagcctccccccatgggtcatgcccaacggacttagaccttgacccagaaacctcccttagaagcaatttgtattctgaaatggtgacttcacagagggcttattggataaggcccacggctgaatcactgtttgttt

SEQ ID NO: 1185 - DNA, 498 bp, Homo sapiens
  misc_feature (1)...(498): n = A,T,C or G
aaggggaggcgggccaattgaganccctaatcgatgtccctagtcagtgtggtggaattccaacatgcttggtcagatgaagactgggtggagaagtttgctgggaagaggataaagaggaaggtggttgagacttcccaaagcagaaagccaggaggtgagaaatatctgatgtgggctcaggtatttgtgattgctgctgagcaaggcggatatctgagcgcagcccatttactgccttctccaggaagcttttctgaatcctccagtgagtaagggagagcccactgctaaaaaaggcctagtcaaatcctcaggtgtacatggacatcaagattgggaacaagccggctggctgcatccaaaccctcctgcgttccgacgtcgtgcccatgaccacagagaattttctctacatgtgcacccatttaaaggactcggcttcaagggaagcagcttccaccgcattatcccccagttcatttgccagggcagtga

SEQ ID NO: 1186 - DNA, 478 bp, Homo sapiens
  misc_feature (1)...(478): n = A,T,C or G
nttgaagtccctagtccagtgtggtggaactcctacgggcagaccctgctctgtgtgtcttttcccttcgctcagttctcgaagatgggcaagcagctgacctacacctacccctgggtctataactaccagctggaagggatctttgcccaggaattccccgacttggagaatgtggtcaagggccaccacgttagccaagaaccctggaacagcagcatcacactcacatcccaggccggggctgttttccagagctttgccaagttcagcaaatttggagatgacctgtactccggctggttggcagcagcccttggtaccaacctgcaggtccagttctggcacaaaactgtaggcatcctgccctctaactgctcggatatctggcaggttctgaatgtgaaccagatagctttccctggaccagccggcccaagcttcaacagcacagaggaccactccaaatggtgcgtgt

SEQ ID NO: 1187 - DNA, 495 bp, Homo sapiens
agggcgaggggcccccctcgagaccctaactggtgtgccgtaattacgaaagcagaggtcaccgcctccgggagcccacttatatgtggagaggggagcacccagagagggtcttaggagtcctcccatggcttcacagaagcagatggaggtagtgaccaaaggaactgggttccggcgccgccccaagaccatcacttacaccccggggacctgcgagctgctcagagtgaggatgaaggaatccaaactgacgaacatccagcagcgccacatcatggacatcatgaaaagaggagatgctttgcccctacagtgcagcccaacatccagccagagagtcttaccttgcaagcaaatagcctcgcccatctacctgcctcccatcctcgcagaccgtacccacctccggcctgccaacatgtgtcaagccaatggggcctacagacgggagcagttcaagcctcaagccaccagggatttggagaaggagaa

SEQ ID NO: 1188 - DNA, 478 bp, Homo sapiens
atcgaagtccctagtccagtgtggtggaactcctgggattaaaaatgctcaggagcttgcctgtggagtgtgcctcttgaatgtggactcgaggagccggaaagaagagaagcctgcagaagaacatcctaaaaaagcattcaactcagaaacagacagtttcaagctggcctatggagggcaccagtatcacgccagctgtgccaacttctggatcaactgtgtcgaaccaaagcctcctggcctcgtcctgcctgacctgctctgaacaactcctctgtgaagcattgacttttttttttctgtgacaccccacggggtgacagggaccaataaatagaatgcgagcactgcacagttcgcttccctgaatcgatatgaaaaacaccgcaggggacggggcccccgtcatccccatggccagtctgcaggacttcaggtaaaattgtcccacccaaactgcacgtggcaccagaag

SEQ ID NO: 1189 - DNA, 431 bp, Homo sapiens
cctgtgtaactacaaggccatcgaaatgccctcacaccagacctacggagggagctggaaattcctgacgttcattgatctggtaaggccgtcccctccccctgctcgccccgcaccccgtgcctgtgtgtgcgtgtgtgtgtgtgtgtgtgtgtgtgtgtgtggatgcgcgagcacctgcgcacgtgcgcgcctccagcatacacccgtgtcctcgtctcttccccagagattgcgtgtgaaggcctgtctgcccccgcagcggcaccttctgaaccactcaccgttacctggtagctgggtacccttacctggcaactgggggacaaatggaggtggcgcgcacccaggtggtggtctctttggagggggacaccgaactgcttctaagaggtgacacgggaagaatcttcaacaaaagcatcggacct

SEQ ID NO: 1190 - DNA, 446 bp, Homo sapiens
ttgtcttctactcgcacctgaagaatgtgaaggaggtatacgtgaccaccactctggaccgggaggctcaggctgtgcggggccaggtgtccttctaccgtggcgcggtgcctgtgcgggtgccgcaagtaccaggacagcatccgacgcatgggcttggcccccaaggaccccgctctgcctggctcctcggctccacagcccccagagcctgcccaggcctaggccccacagacttttaggctggcccagatattccccagtggatgggcagagcccccaccttcaagtctctccagtgtgtggggacgggtccctgtgagcaacaaaactgcactgtttctttcaaaaaaaaaaaaaaaaaaaagcggccgttcaattttaaaggccccgttaaaccccgttgataaccctggattgtgctttttagttgccacccttctgtg

SEQ ID NO: 1191 - DNA, 492 bp, Homo sapiens
  misc_feature (1)...(492): n = A,T,C or G
gtgcgagcggccaattgancccttactgattccctagtcagtgtggtggaattcggaagagccggaggaaagaggcgtccacgccgctcactccagccgaggcccccgcatatagcagggccaggccccgtcgccagggttcccccagcgcgggtcccgaagcaccgctggccacagatgaaccgcctcctcagcgcaggtccgggattcggggaggcagcgccaatatccggtctctgcagccatcttccttccgtccctccgcccaccgagggtcggccctgtaggtgacctcagagcgtcggggatgggcgtggccccgtcgggcgctaagaagacctatcgcagagaggaccgccgagctcccgacggggcggggccaggtgtgtgaggggcggggattggacccggaggggcgtgtctggactgccggcggaagtggaacgcggcctgacctgcgacggaaagccactgcaagcccggaggcgaaca

SEQ ID NO: 1192 - DNA, 452 bp, Homo sapiens
  misc_feature (1)...(452): n = A,T,C or G
nttgacaatcgagacccctagtccatgcggtggaattcttaaaagttccaacagcttaaatttgaattacttattttcacggtgccattgtgaatggtttggttctagcccccgtatgaagagaagggatgtcgctgtctctccccagagggagtagctcgacctttggtcagagacgcaagtagaccctccccagggctggaggggcgaggctgggactgggctgcgcgcctgcttctggcttgccaggagcccagcaccaggtcctctgcagctgccagggatgaagaccccagaaggcacactgtgaatgccctttctccacaattcagaatattctctctgcctgtgtcggcgggtaggaagaaggctacttttggggacctacactgccccacaccacagagagctcctctttaaagagcttgcttctcaaacatccaccttttcaa

SEQ ID NO: 1193 - DNA, 452 bp, Homo sapiens
  misc_feature (1)...(452): n = A,T,C or G
nactgatgattcgtagcccatgcggnggaattcgnctggccgaatccactggcctggcagaatccacctggatggcagactccacctggatggcagaccccaccgggctggcagggtcctccagactggcaaggtcctcctgactggccgctaccacccgactggccactgccacctgattggccacttcccactgactggccactaccacctgactggatccccgctgattggccaattccacctgactggcagaacctgcgcccctcgcctaacctgcgcccttctcccaactcgcgtgcctcacagaacccaggtgctgcacagccccgagatgtggcccttcttcaggaaagagcaaataagttggtcaagtacttgatgcttaaggactacacaaaggtgcccatcaagcgctcagaaatgctgagagatatcatccgtgaatacac

SEQ ID NO: 1194 - DNA, 496 bp, Homo sapiens
  misc_feature (1)...(496): n = A,T,C or G
ggcggacgcgccccnattgaaacccttcctcgagagcactagtcagngncgtggaattcccacacttggccaatgttctgtatttttaatagggacggggttttgccatgttagctaggctggtctcaaactcacacctgggattacaggcatgagccactgcacccagccccttcttgccctttcttttctccatggctgatgctgctgtggccagccagggcccttgagatccttccagtttggctgttatgcaaagcaggtgatttgtcttaatcagataaaagatagaggctatgggggcctcaagatttttggagagcagaggtggtctctggcaattccatctggttttgagaaacttagcagctcacagagcacagagatcctgccttcttcctactatcaggctgacctaatggggttgggctgctcggcaactgcttgngtcaccttgccccaaggaaaccagccctgggtgccacccagccacttn

SEQ ID NO: 1195 - DNA, 481 bp, Homo sapiens
  misc_feature (1)...(481): n = A,T,C or G
atggaaaccanaanncangttcgtagaccatagtcagtgtggtggaattcgtcacaaagcaattcaccggcagagctaggcctcctagaggcttgaaacacttccagatgccaaagatatgtctctcagcagtgggatgcccaacacctggagaggcatcggggccaggcaacgggccagggatgccagacatgctggccagggcagagaccttcaagaaccagactgcggcaggggagccttgttgagtcttgttggggaaggtggcgcctgtgctggggtgacctaaagagctgctgggcaggtgggcgaggctggcagagcctgagcgctcctggaagtcagtgactcaggtagaaaggccccttctgagtcagccctgctaaaaggttgccttgtgagtactgcacctggacaagcaactggggcaaggcccagggactccacgaaggttcaaggccccaggacctctgctccctaa

SEQ ID NO: 1196 - DNA, 492 bp, Homo sapiens
  misc_feature (1)...(492): n = A,T,C or G
aggcggaggggccccatcgagaccctagttagtgtgccgtaattcaaggcttccagaggcttccacaaccagaacgcctctctaaaaacatggcaggcatctactggctggtcactttctccacgtggcttgggatttgtgtctcacttaccgttttgctccccgcctagaacggtgctgggcatgcagtagccctacacaccatctgtggaatgcattcattgcagacctggattttcaaccctaagacttccccgcaaggcggccaagggaacacgaggcggtgacatctgggagcacccgtcttcactgggcgattcctccaggggagccacagcctcangaagcgcgggggcggcaggggtgggggctgagggccggagatgtggatcgctttggatatcctgagtggcctgcaggtggcggagggtgcanggactctggtgcggagccaccgccccagcgcatgcctggtacctcccgctctcccca

SEQ ID NO: 1197 - DNA, 494 bp, Homo sapiens
  misc_feature (1)...(494): n = A,T,C or G
aggggagaggccnattganncccttaactgagatccctagtccgtgtcgtggaattccgagatgacactggaaaaaaggccttggtgttagctacagtgagctggactctggatcgtctgggcagattattcctatgcatgctgccttcctcacccaggactggtctgagagggattcatgatggaagcatgttcattctgtgacctggttctcgcctaaatgtggtcaacagtgtcagcagttcagaggacatcaagcccttaccagggcttcccgggattggaaacatgaactacccatccaccagccccggatctctggttaaacacatctgtgccatctgtggagacagatcctcaggaaagcactacggggtatacagttgtgaaggctgcaaagggttcttcaagaggacgataaggaaggacctcatctacacgtgtcgggataataaagactgcctcattgacaagcgtcagcgcaaccgctgcca

SEQ ID NO: 1198 - DNA, 478 bp, Homo sapiens
  misc_feature (1)...(478): n = A,T,C or G
natcgagatccctagtccagngtggtggaactcctgaggagtacatggagcccgagggagcagaccccagggaagccgctgaccttgacgcagtgccgatgtccctgagctacgaggagctggttcgaaggaatgtggtaggcctgggttagagggggacggggaggggagggggacaggtgagcggtgcccaggcccctgcttgggaggcagtagctcctgctgatcctcccctaggagctcttcatcgccacctcccagaagtttgtccaggagacagagctgagccagcgcatcagggactgggaggacacagtgcagcctctgctccaggagcaggagcagcatgtgccctttgacatccacacctatggggaccagctggtctcacggttcccccagctcaatgagtggtgtccctttgcggagctggtggctggccagccggccttcgaggtgtgtcgttccatgctggcct

SEQ ID NO: 1199 - DNA, 427 bp, Homo sapiens
agttgttctgccgagcccgggggaggagcgagttcaaagtgttcgaggccaaggtgattgatggcaccctgtgtgggccagaaacactggccatctgtgtccgtggccagtgtgtcaaggccggctgtgaccatgtggtggactcgcctcggaagctggacaaatgcggggtgtgtgggggcaaaggcaactcctgcaggaaggtctccgggtccctcacccccaccaattatggctacaatgacattgtcaccatcccagctggtgccactaatattgacgtgaagcagcggagccacccgggtgtgcagaacgatgggaactacctggcgctgaagacggctgatgggcagtacctgctcaacggcaacctggccatctctgccatagagcaggacatcttggtgaaggggaccatcctgaagta

SEQ ID NO: 1200 - DNA, 473 bp, Homo sapiens
  misc_feature (1)...(473): n = A,T,C or G
nnaaggggcgggcctnnnnnnnaactgaactgagtagctatgggcagngngcnggaattactcaactcccagattctgagctgcaacacgcgcgcgacgttctttaaagataacgacactaagcatcactgccgagcctgaggggagggcttttgtgacagatgttcataaaagactcgggcagtgcctgagcggggctgtggccctgcgccagagcgggtctgtgacaactgctactaagccaggaacgaccagatagctgttaccgaggcacaagtggacgatgaaggtggaacgctcattgctcggaaggtgggcgaggccgtgcaaaacactctgggagccgtggtgacagccattgacataccactaggtctggtaaaggacgcggccaggcctgcgtactgggtgcctgaccacgaaatcctccactgccacaactgccggaaggagttcagcatcaagctctccan

SEQ ID NO: 1201 - DNA, 457 bp, Homo sapiens
tttgagaccctttgaagacgttggaattccacagcctccgctccatatgagacgtgccgaggcaacgctatgatccacctcccttttggctgctacttttcatgcatcctggggcggccgatgcacaggacgtcactcgacccaggggagggccacactcactgggcacttataatggactgaagaactctcatagcctggcgctaggccagagcattgtaccctaccgctggtggcagtggcagaggtcatagcctggggcttctaaaagaggctggacctgggagaggcaagaaaggcttgtagttgtggctactcttggccctcctgcccgagcttccttcttggcccagctgcatgggcacagccaagattccttggggggtggggtacgggcaggaacagcagctgccatcacagccactgtggccccttgagaggatctggggggtgtcct

SEQ ID NO: 1202 - DNA, 483 bp, Homo sapiens
  misc_feature (1)...(483): n = A,T,C or G
gggggaaggaggcgcgcncaatgaaaactgagtatcctacgcagngncgnggaannccacgcctggaggctcctgcagagccccggaaccgcccgaacctccagaaatgccaggcagggtgcactccccagggggtacaactttggcaatgaggactacagaggtccggggagaaccggagacccgaggagcatgaaggcactctgtgacatcactgcctacaaacgcaggggccggaatgcagtgacaggacactgctgggaggaaagtctcccagcgcctccgtgtggggctgcctccactcccaataccgtgcggggggactaggacgaccctggtaagtcagccacaggatatcagttctcagaatagaagagaagccaggtctggcagcacctgatgatgcatttccaattaatcttggaatgagagccgagggcaagaagccagcggtgcctgagggatgctaaagagccaaccgac

SEQ ID NO: 1203 - DNA, 478 bp, Homo sapiens
  misc_feature (1)...(478): n = A,T,C or G
aggaggagcggtccncccaatgagacctgaggaacntncgaggaanccccagctactcgggaggctgaggtgggagagttgcttgaacctgggaggcagaggatgcagcgagctgagatcacaccattgtactccagtctggggcgacagagcaagactccctctaaaaaaaaaaaaacaaccaaaccaaaaataaaaacaggaagcccagcctcttatattggttcagcaacttaaagctcacaaggtaccttcaaaactagcttgtcacttaagggggggacaatcctctaaggtaggcaggtcaggtgacttattgaggagcctgagggagagggggtcataggtgggcacgtgcaaagttgggacttaaacccaagtttggggtttctaggccgtatgctcccaagccaaggtgtggacgggcctgggaactgcctgcgaaagttacccacgaaagtacaagatcaccttcacc

SEQ ID NO: 1204 - DNA, 471 bp, Homo sapiens
  misc_feature (1)...(471): n = A,T,C or G
ggaggagaggccccccatgagaactgagacctgcccaggccggaatccagatctcttagccagccctacagcatgcccttcaggcctctgggcagcccagccttcagagccagtggcagccccagctgcagcagctacgtgacatgggcatccaggacgatgagctgagcctgcgggccctgcaggccaccggtggggacatccaagcagccctggagctcatctttgctggaggagccccatgaactccctgcttcccctgaacccccagcaagttgcagaggctactgcccttgggaggcactcatgaaggtgcctccatctctcccttccccaatatacctgatggtcaactctcaaaaaaaaaaaaaaaaaaaaaaaaaaaaaaaaaaaaaaaaaaaaaaaaaaaaaaaaaaaannnnaaaannnnnnnnnaaannnnnnnnccggctccttttttttattggccct

SEQ ID NO: 1205 - DNA, 484 bp, Homo sapiens
  misc_feature (1)...(484): n = A,T,C or G
cccccccagaccgccccccccatagancaactagntccctacgaagnngcgcggaattcgntggtcagtgggccccgggagtcccctccagcctccactcctcggtcctggagtccacgaacccccagaggaggctgctgtagacccccgtggaggccaggtgcctggtgggcccttcagccgtctgcagcctcggggggatggccccaggcagcctggccccaggcctggggtcagtggggatgtggggtcctggaccctggcactccccatgccctttgctgccccgccccagagccccacgtggctgctgtactcccacccagtggggcgcagggctcggctacacatgggtatccgcctgagccagtccccgctggacccgcgcagctggacagagccctgggtgatctacgagggccccagcggctactccgacctggcgtccatcgggccggcccctgaggggggcctggtttttgct

SEQ ID NO: 1206 - DNA, 467 bp, Homo sapiens
  misc_feature (1)...(467): n = A,T,C or G
aggcgggggngncncnncctggagtccgtatccagtgggggaattccggaagccgtgtcgttgtcacccatgagggcgaggcctggcaaggggccaggcagaggaagggccaccttggcttcagatatgggcgacctcagctcaggcccccccgccattcccagcgctcctcacctccgtgaggccctcaacagccatggctgtcaccccacccaccctcctatctggacctgctggggtgtgaaagacagtcccgtgctgagggtgccttggatgggttcttcttaacctcagagcccctgtttccacctggaattacagccttctgtgaggctggaaaggtaaaacaagaaggctgtagaaaacgcctgccacacagtatgccggtcctggaataacattttgttgtgacattgatgaggaaaaaataatgattcccgggaccattgtctgggtggtggttgggg

SEQ ID NO: 1207 - DNA, 483 bp, Homo sapiens
  misc_feature (1)...(483): n = A,T,C or G
aggaggagcggcnctcccccccactgagaactgaggatcntncgaggaanccgggaacgcggagcggacggattcgattcaacggggttccggaccgcgctgcgctatggagcaggtcaatgagctgaaggagaaaggcaacaaggccctgagcgtgggtaacatcgatgatgccttacagtgctactccgaagctattaagctggatccccacaaccacgtgctgtacagcaaccgttctgctgcctatgccaagaaaggagactaccagaaggcttatgaggatggctgcaagactgtcgacctaaagcctgactggggcaagggctattcacgaaaagcagcagctctagagttcttaaaccgctttgaagaagccaagcgaacctatgaggagggcttaaaacacgaggcaaataaccctcaactgaaagagggtttacagaatatggaggccaggttggcagagagaaaattcatgac

SEQ ID NO: 1208 - DNA, 228 bp, Homo sapiens
  misc_feature (1)...(228): n = A,T,C or G
acaccagctgggtagctggacaaattgacatagaggtgtctggaagaagcgggaatccagcctatgataaataaatcctcaagctaatcctcatatgccaagcttagaatttatcactttttaggaggtctttcttgattaaattgtctatttcaatcaatcttcacatataggctcctttctgtttattgcatttctaatctcccagcatctcagattaaagcttcn

SEQ ID NO: 1209 - DNA, 452 bp, Homo sapiens
  misc_feature (1)...(452): n = A,T,C or G
ggcgggggnaggggnncctgagacctctngttttgtcggcacttgcgaaagacagacatgaagcaagtgggtttgcaaggagaccagatccagattctgatgaagatgaagattatgagcgagagaggaggaaaagaagtatgggcggagctgccattgccccacccacttctctggtagagaaagacaaagagttaccccgagattttccttatgaagaggactcaagacctcgatcacagtcttccaaagcagccattcctcccccagtgtacgaggaacaagacagaccgagatctccaaccggacctagcaactccttcctcgctaacatggggggcacggtggcgcacaagatcatgcagaagtacggcttccgggagggccagggtctggggaagcatgagcagggcctgagcactgccttgtcagtggagaagaccagcaagcgt

SEQ ID NO: 1210 - DNA, 465 bp, Homo sapiens
  misc_feature (1)...(465): n = A,T,C or G
atttgagaacctcnggtagaacctaggacangcggnggaannccatggcccaaggctgagcagcgttcccaagacccgcagaaaagccgtttacatctccttcatggaaggcctagaggccttacgggacagtgcccattccacaccagtgcgttccacttcccatggagacaccttcctgcctgacgtgagatgcagccggacagatagcgctgagcgatgagctgtgattgcagacgatgcctacagccctgcagacagcgtgctgcccacccctgtggctgagcacagcctggagctgatgttgctttcccggcagatcaatggagccacctgcagcattgaggaggagaaggaatctgaagccagcaccccaactgctacagaggtggaggcccttgggggagagctgagggccctgtgtcaggggcacagcgggcccgaggaggaacagagtgggcatct

SEQ ID NO: 1211 - DNA, 442 bp, Homo sapiens
  misc_feature (1)...(442): n = A,T,C or G
ttttgatgaccctttggacagccntgnggaanacggcggtggaattcgtcgacttatgggttggccacgatggtgtccttgatccatttccggtaattcaccaccttggtgtacagggaaggcctttcgggcagggcacatggttcactgccccatgacgtgataccttgaagcacaccattacagacaagtggggccccagaatcacccgagcaggtgcttttgccccctgtccagcgtccagcacacagcatgaacttggtcaccttctgagggtgaacttgcgcacacacgtcattggaaataacatggaggtccacacactgaagtttctttggggtcaagaactcctctggttcaatgctgccccagcctgaggcgtagcaggtggtccccagtgctggctcctgggtgggcaggtccatgaccttcacaagatccn

SEQ ID NO: 1212 - DNA, 481 bp, Homo sapiens
  misc_feature (1)...(481): n = A,T,C or G
tgagaaccnanaagtganaaaacctgganngccattgnagntctggnanaanccgnnnnnnngnggntgntaatgctggtcgcggacccagcgctcccggccggactgtcaccccccagtggtgctggtccctggtgatgggggtaaccagggggaagccaagctggacaagccgacagtggtgcactacctctgctccaagaagaccgaaagctacttcacaatctggctgaacctggaactgctgctgcctgtcatcattgactgctggattgacaatatcaggctgtgttacaacaaaacatccagggccacccagtttcctgatggtgtggatgtacgtgtccctggctttgggaagaccttctcactggagttcctggaccccagcaaaagcagcgtgggttcctatttccacaccatggaggagagccttgtgggctggggctacacacggngtgaggatgtccgaggggctccc

SEQ ID NO: 1213 - DNA, 465 bp, Homo sapiens
  misc_feature (1)...(465): n = A,T,C or G
aatagaaaaccnnctgagtaacctaggacagngcggnggaattcgnccaactacgggaaccctcgccatggcctgttgctgttcatgatggttggcatgactgtgtccatgtacctcttccgggtaacagtgaccagtgactcccccaagctctggatcctggtattgggagctgtatttggtttctcctcgtatggccccattgccctgtttggagtcatagccaacgagagtgcccctcccaacttgtgtggcacctcccacgccattgtgggactcatggccaatgtgggcggctttctggctgggctgcccttcatcaccattgccaagcactacagttggagcacagccttctgggtggctgaagtgatttgtgcggccagcacggctgccttcttcctcctacgaaacatccgcaccaagatgggccgagtgtccaagaaggctgagtgaagagagtct

SEQ ID NO: 1214 - DNA, 460 bp, Homo sapiens
  misc_feature (1)...(460): n = A,T,C or G
tcttgacgcactttgagnacgtcggaaancncacgncgngcaggaggccacaaaggtgctgaggaatgctgccggcaacttctacatttacgacaatttcactggctcgatagtgggccagcagccctttgggggggcccgagcctctggaaccaatgacaagccagggggcccacactacatcctgcgctggacgtcgccgcaggtcatcaaggagacacataagcccctgggggactggagctacgcgtacatgcagtgagcccctctcgggctccaccgtccagctgtctgtccgtccaggtggccgacctcactgcacagaccccactccagcccctccaccccttcttcatgcacagctgcctttctataatccgggcttgactcccttcttaccactgtattctggcctctcccatgcctcaggctctggtttgagatcgagctggggaggaac

SEQ ID NO: 1215 - DNA, 480 bp, Homo sapiens
  misc_feature (1)...(480): n = A,T,C or G
ggagggccccncncaactgagaaactgagtccctgcgcagngccgcggaanncctgcgagcccggccgcggagccgctgggacgcggcttacctcccggctgtcgctgctgtgtgtgttgcccgcgccagtcacgtccctaatgggaccctccgtttcggcgtctgtaaggcgaggaggacgatgcgtcccctccctggcaggattgaggttaggactaaacggggtccgcagcgcccggcagctcccgagcgctctccccagccgcgcctccctccttcccgccacccgtcccgcaggggcccgcggcgtcacctctcaggctgtagcgcgcctgcatgccgaataccgacagggtgccggtgcccgtgcggtcgtccttcctgacgccgcagcggaggatgtgttggatctgccccaggatttccaggtcccagaagaagagataattctacttactggatataggatgcattagatt

SEQ ID NO: 1216 - DNA, 443 bp, Homo sapiens
  misc_feature (1)...(443): n = A,T,C or G
atagacccccttttgatgacntttataccangnggtggaattctatgatcttatctcaggaggtaagtcatttaggcataaaactggtaaagaacagtgtcactagtagaatagaacaatttattttatgttaggatttttatctaatgttggagcactttaaatagtgaaagaccggtttttcatttttgccccaaaggtaagaaaactgtgtgccctttaaaaaggtacccttctcatagtgactaagtgtcatacttagtcaaagcctttgataatgactttcttacaaataaactatagctttatattttctcaatagaaacttctgtaagtataaactacatggaaataaagaattttgcatagaaataaggaatttcaaatccacttcacaaattgtaggggtacttgaaataaaatattctacagtagagattttg

SEQ ID NO: 1217 - DNA, 486 bp, Homo sapiens
  misc_feature (1)...(486): n = A,T,C or G
ggttgccnnaggttanaaacccagggaccccgtcaaagngctnngcannaacgcgnaannntnantncgggccgaggctccgaggcgatccagtcctgattttcccgctaccgctcgagctcttgctcctgcgcctgcgccgtttggctcgcgagccgcgccgtcacttcaggtccagggtggacgcatgccctcaggtgcgggcgtcttgcgagtcggcctcgcagctctgtggaagctgcacgcggcttgtcggaaaatcaaggcgttctgagttctagatggttaatagcaggttcttcggtgtctgcagtcgacgaacgactaatgtaggcgtttgctgtgagaatggagaatgcaggggaacgcccctgactgagaagcgggccctgggaaacgattgtgaacgcgtgaatgaattgatgactaaaatccgctgcgggggtcctacagcgcagatggtaatgccgttctgactggctggag

SEQ ID NO: 1218 - DNA, 483 bp, Homo sapiens
  misc_feature (1)...(483): n = A,T,C or G
cgagttccnnnggtagnnaaaactgaaaccccgtcagnnagctgngnananncgccnanagcaccggggccacccggtccccgcaggcccgggaccgcgcccgctggcaggcgacacgcggtcacggcgatccatttgtagagtcgggaatgaatgacctctgaagtgttgtctgtatattgatctgctaccagtaaaacgtatctctaatacggagttctataccagagttgattgttgatggcacatacttttagaggatgctcattggcatttatgtttataatcacgtggctgttgattaaagcaaaaatagatgcgtgcaagagaggcgatgtgactgtgaagccttcccatgtaattttacttggatccactgtcaatattacatgctctttgaagcccagacaaggctgctttcactattccagacgtaacaagttaatcctgtacaagtttgacagaagaatcaattttcaccat

SEQ ID NO: 1219 - DNA, 490 bp, Homo sapiens
  misc_feature (1)...(490): n = A,T,C or G
gatgacacnnnncgagnnccagactgatnatcanngtaaatngctacgcagagccgnggaannccatgccgctcgcgcccttcaggcccggcttgcgtgggccgcagtggctgcaggggagggcccacgggcgcccagccctaggagtcgtcccccaggcaatccccagtactcctgatgctggagagccagccacactgcacagtgccccgggggcggtttctaccaccctaaggggtattcttggctccaggcatcagagtccatgtggcttgtggggccctcatttctttcatgcccactggggaaggttccaccagcagggctgttactggcggggtcctctgggaggggggcaagaaggccagccacaccaaggcactggagctccacgactcctggccttcgattggaggcccctctctgccagctctgccccttggggggcaccaggcaggactgccagccgctctcctggcaggtgacatcn

SEQ ID NO: 1220 - DNA, 456 bp, Homo sapiens
  misc_feature (1)...(456): n = A,T,C or G
atgacncctttagaccctggaagngcgnggaannccaggcgcctgtgatgcctctatcaagctgtgggacgtgcgggattttttgtgccgacttaccttcatcggccatgaatccgacatcaatgcagtggctttcttgcccaacggctacgccttcaccaccggctctgacgacgccacgtgccgcctcttcgacctgcgggccgatcaggagctcctcatgtactcccatgacaacatcatctgtggcatcacctctgttgccttctcgcgcagcggacggctgctgctcgctggctacgacgacttcaactgcaacatctgggatgccatgaagggcgaccgtgcaggagtcctcgctggccacgacaaccgcgtgagctgcctcggggtcaccgacgatggcatggctgtggccacgggctcctgggactccttcctcaagatctgtaacag

SEQ ID NO: 1221 - DNA, 438 bp, Homo sapiens
  misc_feature (1)...(438): n = A,T,C or G
nttgtngaccactgtccatgtggtggaattcctgtttgtaagaccttctgctaaaggatgcttgcagacaaagtccttatcagccatgacacagaaatatggatcaataagtgtgtattgaatggatgaacaagaaaagagaaaagcagccatttagactgtgtgcctaacactgtgcaaggtgcttagcacatgtcttttcatttaatcctcacaaccaccctgcaaggtgattttcatcatgtctaatttacagaaggagaaactgtggcttgcccaaggtcacaaaactaacaaaggattcaaatccaggaacgtcagatcatgatgcctttgccgtctgcattgagcgccgcagccctaattggttagcttgcgccacctagtggcagaactaaaacaggaaccaggtcagcctggcacaatataaagcagcag

SEQ ID NO: 1222 - DNA, 483 bp, Homo sapiens
  misc_feature (1)...(483): n = A,T,C or G
ggggaagaggccggccccatagagaaactagttccntacgcagnngcgnggaattccctcggctctctcaacccaggaaagcaactgttcgagaagatgatcagtggcctgtacctgggggagcttgtcaggcttatcttgctgaagatggccaaggctggcctcctgtttggtggtgagaaatcttctgctctccacactaagggcaagatcgaaacacggcacgtggctgccatggagaagtataaagaaggccttgctaatacaagagagatcctggtggacctgggtctggaaccgtctgaggctgactgcattgccgtccagcatgtctgtaccatcgtctccttccgctcggccaatctctgtgcagcagctctggcggccatcctgacacgcctccgggagaacaagaaggtggaacggctccggaccacagtgggcatggacggcaccctctacaagatacaccctcagtacccn

SEQ ID NO: 1223 - DNA, 400 bp, Homo sapiens
gattgagccactgcactccaacctgggcaacagagcaagactccatctcaaaaaaaaaaaaaggatttttacaaagtttattctttgaggtttgaccctttttaaaaaggaaaatatcaaatttttaggcaaaggtggtaaatattcaaatttttaaatttaaacccaacgtggctggataaaaatactcaaaagttttagcaccttagggacaaaagtccttattttttggggagcccttaaaactgggcaaatttaaaagatttaatcaacctcccttgtccttggaaaaaggggccttaacatatagagttcagccttgatacttccaacagcccacacttcagggggagaactataaacggaaaatctcagaaaaccttcgggggacaataccaag

SEQ ID NO: 1224 - DNA, 482 bp, Homo sapiens
  misc_feature (1)...(482): n = A,T,C or G
nggaggcnnttgcagtcttatccatgcggtggaattcgcaacagcaagaagatgcagagctggtacagtatgctgagccccacttataagcagcgtaatgaggacttccggaaactgttcagcaaactccccgaagcagaacgcctcattgtggattactcctgcgccctgcagcgtgagatcctgctccagggccgcctctacctctctgagaactggatctgcttctacagcaacatcttccgctgggagaccacgatctccatccagctgaaggaagtgacatgtctgaagaaggaaaagacggccaagctgatccccaacgccatccagatctgcacggagagcgagaagcatttcttcacttcctttggggcccgtgaccgctgcttcctcctcatcttccgcctctggcagaatgcactgcttgaaaagacgctgagtccccgcgagctctggcacctggtgcatcagtgctacgg

SEQ ID NO: 1225 - DNA, 482 bp, Homo sapiens
  misc_feature (1)...(482): n = A,T,C or G
tgagtgcccccngtannaacccacngngaccttaaagggcgngnannancacnnanatnangnaagaattctctgtagcctataaaaatcaaataaattctcacttaaattaggtttctatttatcatagggaaacctagtccatgcgtcataaaatttaaaagctaaagttacaagacagactttctatcaacagctgcctaaaaagaaataggcgcccccacccccagcagtaagatttgcccagccttgccagttgtattgtaagtgggtaccccaaactagctgacctcaccttcacttccaatcatgatattttcattactccgctggtatcattcccttgattgatactcaagatcccattctccagatgaaagagtgtctctgtgaaaggtaatgtcaattagagttctcccaggtagtacaaggcagaaccccaggacaagaccagaagctgggtcccatataccacccactgg

SEQ ID NO: 1226 - DNA, 481 bp, Homo sapiens
  misc_feature (1)...(481): n = A,T,C or G
ggagtggntttgagatcttggccatgcggtggaattcctaagatgccacctctgccttagaggagtgtacagttcagacacatagatacaattacaacttggtgtgaagcacagggacaataagcacagaggaaggacctggcctcttctcaggtatcagggaagccttcctggaggaggtgacagttaactggtcttggagggtcaatggatatgagatagctgggaaagcagaaggaggctttccgggaagagaggatgaggtgtgcttagaagcagcttattggaaagtgacggtttaaattcctggtaacttactttcctcacctgtaaggtggagattgtattagctaagacacttttggttgcaagtggcagaaacccaactcaatctgacttcaggaatttactagctcacagaacttagcagccaaatgtaggtctggcttgggcctggctgagtcctgacatcaggatatga

SEQ ID NO: 1227 - DNA, 486 bp, Homo sapiens
  misc_feature (1)...(486): n = A,T,C or G
ngaagcggggtttgagaccttcgtagtcactagtcagtgtggaggaattccctcagcaggaggctccctgtgtcacggtgtccttgggcagttctcggtggcctttgccgccaagcttccagggagctgctgggcgaaggctgagacccagcggccctgtctcacagtcacagagagaagagctccccacttggccctaactcataacctgccccaatcccggaacactcggtgaggtttgagagatgcacaccacgtaacatctcgtgggcgaatcaaggcacagcaacgcagtggagcctgaggggagccgggcactggtgcaggggaccatgcacagggcaccctcggagctccattcccggccacaggagccaaggcaggctggaatgtccagcacctgcatgctgggggcctctgctgcgccactggcagtgggaatggaagcccccacctcttatccgactgcagatgggggtgtcgtgt

SEQ ID NO: 1228 - DNA, 483 bp, Homo sapiens
cagcgccctttgaatctttagagatccatatcagtgtggtggaattctgacttcgggcagagggatccctgagtccctcctggaattagcttgtatagtgaaaggcccatccaaggttgtctaaagaccaatgtgaaggtgacagaaaggacttttgagttctaattaatctgttacagcttcaagcaagaaagtcagtatagcctgaaagacaagagaaacgggatggtttataggagttcccatttggttgaaagctagaagccctaattgaccttaaagtaacatgctatgggatggtgggattgtcccctctgacagcacatatgaaatagttcatctatataatagaaacgcacacacacgaaagagaatcttctgacttaaatacaactttcatggagttcttcaccacttatctgtctctgttaaaatctgaaaatctagcccatggctaaaatctattatatgtgctctccatat

SEQ ID NO: 1229 - DNA, 389 bp, Homo sapiens
  misc_feature (1)...(389): n = A,T,C or G
nggagcgcnntttgagatcatagtcagtgtggtggaattccccggctcgagcggcgagttccggaagactggcgtgcacgacgcggacttcgaggcccacatcatcgacatgctggccaaggccagcaagatcgaagtctaccggggcaactgagccgggcctcgccgcgacccttccggcccatctatcgggcaccggggctccggcccgggacccaggaccagcaacccgcgaccaatcatgctgcagcccaggggcgtctgctgtgccccgccaatcacgagactgggggaccggccgggcctggcaccaatctgcgctgcggtcgggcggagcttctgtttctcccagccaatcatgtgactcaaggaaaaaaaaaaaaaaaaaa

SEQ ID NO: 1230 - DNA, 424 bp, Homo sapiens
  misc_feature (1)...(424): n = A,T,C or G
attgacgaccccattgaagngcggtggaatncaattccagcagaatggctagtgccaaccagcctgaagaccctcaccaaggaaccaactcagcacaggaatgccatttcttcatctccctgtcccatgatttcacccctcacttcttgaccaatcagcgatccctacactagctcatcacccatccagaccccttggaagcccatccccaacctccctggtaggtgggtttaaggtttccctccatctccttgttcaggtgctgtatatcgttaaacacttttttctgctgcaactcctgctctttcggagtctgttactgtgcaatgggcaattgaacttggtggtcctgtaacaaagggtgtgccttttcctctccatccattaggccatctctttatcactggtagactgaaattttttt

SEQ ID NO: 1231 - DNA, 487 bp, Homo sapiens
  misc_feature (1)...(487): n = A,T,C or G
ccttgaatccntcggnnnnnncnnnncctgatnaccctagtccatngcgtggaattctgcggagaccgcccgtgcacgctaacatgaaaatgctattcctgctttagtggcctccagaagacactcccctgattcctacaccgagggaacacacagcagcaagctaggaaagaaggggtgacccagcccaacgctgtaaaccagggcgcgaaccggcgttgagctgtgcagctgcgccctgggctccagtcctgctctgccgcagaccccaccggagccagcacctgcctccccgaccctcgctggggcggctgtgagatgagcccagagccttcctgagccaaccctcgcaaggaaagtctgtctgttcaccccactatccttgtcttgacggatgaagaaaagagggccccccgggaggtcccaaaaggtggaatggacatctgggatccaagcacagcaatttctttatttttcttaaggtatc

SEQ ID NO: 1232 - DNA, 478 bp, Homo sapiens
  misc_feature (1)...(478): n = A,T,C or G
nattgagaacatacgcagnggcnggaatttgatgccataggaagccgcccagggactctttggaacaggacactgctgcatccccctctctgtctggcaaccctggcggcggcactgacagagaggaggaagccggccagggactctttggaacaggtcactgctgcatcccccaaggttgccaggctgcgaatcccattcccgcacacggggacctgggtcctggccctccgctccctgtgcggggcggggcctcggatcgtgcggtgccgcaacgcgacggccgaggtgcggatgcgcaccttcctgtccccatgcgtggacgactgcgggccctactgacagtgcaagctgctgcgcacacacaattatctgtacgcagcctgctagtgcaaggccgggtggagaggctggtgctgcaccgacagtgcagatgcgctcacctatggattacaactgctgtgcacactcctgctgn

SEQ ID NO: 1233 - DNA, 487 bp, Homo sapiens
  misc_feature (1)...(487): n = A,T,C or G
cctgtaatccnctcgcannnncnnnncctgatntacctagtccagtgccgnggaattcctctgggatttcctgaaccatcaggagggtccccgcataagagatcatttaagccacggggagatcaacttacatgaattttcaaaagaaacaactaatcagttgcttgcattttctcttgtactgctactcagattcgttgatgactgtctgctatcagtttttaaggaaaaatcagccgtagaattgttgattagtcttgcagaaggctatagttctcgctgtcatccggtttttcagcttaaaaaacaggtgctgagctgtgaggagagcatcagggtttgggctctgctgcctttccccgaagaactcactcggcaagccgtcagattagaagataattctgaaacaaatgcctgccactctttgattacaaaaatgacggatgagctgtatcaccatatgcctgagaatcgntgtgtgttaaag

SEQ ID NO: 1234 - DNA, 484 bp, Homo sapiens
  misc_feature (1)...(484): n = A,T,C or G
nactcgatatcccctggccagtgtcgnggaatttgttgaccattcnttgntgcaaaacttggtattcagctgaagcctggctggtcccctccaactccttatgttttgcaacaatgctgttcaaggtggcagaggagagctccttggcacagagctcctcatagttatacttggcagtgttctggttgtagtctccaaacttggtctgggccaggagggcactgagttccactgcctgctctggggaacacaagaggtggcctgccaagagggcctccttgatgtgcaagaaaaagatatgcctagtctgctcctgtaagatgagatgaggctccacgaagaacttgactctaagtttaagcctgtaaggggctagcccatccatctgctgggagatccggtttctcaggtttagccataaactttcacctttgctacccgtaaactgcagtccaaaatagtcaacttctatgattcccagtcg

SEQ ID NO: 1235 - DNA, 486 bp, Homo sapiens
  misc_feature (1)...(486): n = A,T,C or G
acctgtataccntcgcannnncnnnnnnctgatntacctagtcagtgtcgtggaattcattcatttggtttcttttctttgaatagcatagcatatcgtcgggtcattcgtgtctatcagtatgaagttggggatgatctgtctggaagggttttctccttatttctcttcttacctcactgtggctttactgatgcactcttgacatccccaggcggctccaccctgactaacctgccgccctcggctgcttgggaaggaggggtctgtcctcccactgcaccggcacccagcctcctgcccccaggtcctggggggcattttccccggggggacatggcgtgactgtgagtctgacctgctggggtaggaggaagcctggtgccttgccttgctagagcactttgaacctggggagattgcagagctaaccctggctcgccgggttttaaaagggtaggttggggcgaatgtgggtacaggggn

SEQ ID NO: 1236 - DNA, 488 bp, Homo sapiens
  misc_feature (1)...(488): n = A,T,C or G
ccctggaatccctcgnannnncnnnnnactgagntacctattccatgtcgtggaattcatagtggcgcatgcctgtaatcccagctacttgggaggctgaggcaggagaatcgcttgaacccaggaggtggaggttgtggtgagccgagatcgtgccactgcgccccagtctgggtgacagagcaagactcctcaaaaaaaaaaaaaatgggggagtgatgagcccaaaaatttgtttgggcccttgttttcccccaccctgggggacctaaattgcccaaggggccccggaaacccttgagggattttaaccaggaggggggggggaccaaatctggggtatgaatttctccatcagggatgaatggggggggggaaaactggcctggcaccccagggggaggttggcctcctctgggccaggcctgggggaaaaaggcagaaggcaggtggaaaaaaccctcatggcctgaagggccagccctaan

SEQ ID NO: 1237 - DNA, 485 bp, Homo sapiens
  misc_feature (1)...(485): n = A,T,C or G
ctttgatcccctcgnannnncnnnncctgatntccctagtccatgtggtggaattcctggctgggggcctcactccaggaaggggctggactggctgtcctttccagtggcctggctccgctgtgtggatggggagatcggggccagaggcagaaccctggtgaggaagctccagtcctgctctctacccagcccatcttgcctccatggtgcctctggaggcctctgggcctcctctaacaggggctggtgggcaccaagagccaatggagtagacccctggctggtaagggccaagtcccaccggttgcttctgggaaggggtttctaacactagtctgtgtgctgtggttcctggggtgccctccactgccctctgttcagtaacagggccttgctaatcgggttgtcactcaacaaaagtgctttggatttaagttactatcctggctttgcccaacctcagcaacctgtaagactgataa

SEQ ID NO: 1238 - DNA, 485 bp, Homo sapiens
  misc_feature (1)...(485): n = A,T,C or G
naattggatatacctattccagtgtcgtggaattcgataaccttggaccaaagctgccttaagcctgtggtaaaagggcttcagggaaggtaagtgggccacctgctggaagctgccagctgcccggctggcaatggtgtgagtgtcttggccctgtccctgccctggggtccagcaggtcatccctcccttcttctctctcctttggcgtttgttcctgtagtcactgggctaatctccccctagcttcaagctgtacatagggcctcccagtgcaaatcctcctgcccataccgtgcacccttagaagcctgcgtgtgcatagagcgccccctacttcccagttaactcccagttcttctccctgagcttggtatttgtcatgtgccaactctgactctgaggtgggcagtgagggaagcagccccgggcctgcttgcttcctgtccccgaaatgttcgtttcttctgaagtaaatatacatn

SEQ ID NO: 1239 - DNA, 491 bp, Homo sapiens
  misc_feature (1)...(491): n = A,T,C or G
aactagatatccctcnncaccnncnnnnnnactgantacctgtgacanngcgnggaattcgatcgaggctcgctacagcactggattagctggaaacctcctgggagacctacattacaccactgagggaatccctgtgctgatcgtggggcatcatatcctgtatgggaaaatcatccacctggagaaaccttttgcagtccttgtcaaacacactcctggggatcaggactgtgatgagcttggccgcgagactggcacccggtacctggtgacagcactcatcaaagacaagatccttttcaaaacccgccccaagcccattatcaccagcgtccccaagaaagtatgaaagaacctcggattttccctagagagcggccaactccttggactcgtgctccgctgccacctcgaggacggctcgacggttccctgggaccacaggggggtcctgttctgaacacaggccacccactgtgtgtgaactn

SEQ ID NO: 1240 - DNA, 476 bp, Homo sapiens
  misc_feature (1)...(476): n = A,T,C or G
gactgattccntgtccatgtcgtggttgttcttcctgtttgagttccagacttgcagaccctgggatccgcttactcctccgcgccacggttgctgtgcttccagaggtggcgtgatgcctcccggggccacggtggggtgaaggatggcgagccggacataccattgttggatgtattttttttaaaacagcaataattagccattttaaaggagggatgtacctgtgtgtgtgcatgtgcacgtgtttgagcgtgtgtgtgtgtgtgcaagtgggttcttggatatgtgtagtgtgagcatgtgtgcatgtgtgagcctgcgcacgtgcatgttgtacgtgcataagcatgtacacgcgtgagcatgcatgtgcgtgcacacgtgtataggtgtacatgtgcatgagttgtgtacatgcgtgagcacgtgtatagatgtacgtgtgtgcgcgcatgtgtgcgtgtacatgtgtn

SEQ ID NO: 1241 - DNA, 483 bp, Homo sapiens
  misc_feature (1)...(483): n = A,T,C or G
cctgattccntcgacannnccnnccctgagtccctcttccagngcggnggaattcgttcagagcagcagaagccggcgtcgtcggatgttgtgttgcccgccaccatgagctacacaggctttgtgcagggatctgaaaccactttgcagtcgacatactcggataccagcgctcagcccacctgtgattatggatatggaacttggaactctgggacaaatagaggctacgagggctatggctatggctatggctatggccaggataacaccaccaactatgggtatgggatggccacttcacactcttgggaaatgcctagctctgacacaaatgcaaacactagtgcctcgggtagcgccagtgccgattccgttttatccagaattaaccagcgcttagatatggtgccgcatttggagacagacatgatgcaaggaggcgtgtacggctcaagtggagaaaggtatgactcttatgag

SEQ ID NO: 1242 - DNA, 449 bp, Homo sapiens
  misc_feature (1)...(449): n = A,T,C or G
nactgagatcgtagacaatgccggggaattncacgtaataagactgttcactctctaagtaccctaaaggtatttggtgtattaaacattgggtttgccatttttctcttttttcttcctctgacttcgaaaattgttggtatacatttcaaccaaaatgacctcatttgaaatgcccaggaagtatttgttttgccattcttactagatcagatcctgtatgactttaaaatacattttaaaatatattctgcatctcagcagaaggttgagtgctgcaggaagagctgcttctgcagggagttttctggaatggcgtggcacatattgaagcatttctcagtgtcccgttcacggaagcgcaggcagctcccacgacacacggagagactgactgatacgagatttggaaagctatgtagacatctttggagctcttactgtcctaa

SEQ ID NO: 1243 - DNA, 501 bp, Homo sapiens
  misc_feature (1)...(501): n = A,T,C or G
agcgcnnnnnnnntttgatcgcagtccctagtccgtgtggtggaattcctgctcatcacagagtccacgtacgccacgaccatccgtgactccaagcgctgccgggagcgagacttcctgaagaaagtccacgagaccgtggagcgtggtgggaaggtgctgatacctgtgttcgcgctgggccgcgcccaggagctctgcatcctcctggagaccttctgggagcgcatgaacctgaaggtgcccatctacttctccacggggctgaccgagaaggccaaccactactacaagctgttcatcccctggaccaaccagaagatccgcaagactttcgtgcagaggaacatgtttgagttcaagcacatcaaggccttcgaccgggcttttgctgacaacccaggaccgatggttgtgtttgccacgccaggaatgctgcacgctgggcagtccctgcagatcttccggaaatgggccggaaacgaanagaacatggtcatc

SEQ ID NO: 1244 - DNA, 491 bp, Homo sapiens
  misc_feature (1)...(491): n = A,T,C or G
gtgggnnnggaatgagaccatagcagnggatcgagaccctcatcagtgnggnggaattccaccctcctgaagactcggggtcctttcaggaagcgtctgcgtcagctcatcacccctgactccagtctgccacagcccaagcaacatccctgcttggatggcagtgctggccggaactttgggccctccccaacaagggaaggactgatagccggggagaaggagacccatttgtagggtgtggccagaggccaggcggctcctaagccgggaacctaggtcagggccaccctccattctcagcggacagcctctgcctctgtctcctgccacaatcctgctgggaacctctggagagccacaggcacccccagctggaggccagactcctctcttgtgctagctggagcagctccttcccctttgctgataacaccaccactgngacgtgccatgttgggacgccactccctgtgggaaggcaccatcgt

SEQ ID NO: 1245 - DNA, 475 bp, Homo sapiens
  misc_feature (1)...(475): n = A,T,C or G
gtaagttttacctgatnaccccaatgagtacactagaaagngcggnggaattcctcgcagtccttcttctctggcctctttggaggctcatccaaaatagaggaagcatgcgaaatctacgccagagcagcaaacatgttcaaaatggccaaaaactggagtgctgctggaaacgcgttctgccaggctgcacagctgcacctgcagctccagagcaagcacgacgcagccacctgctttgtggacgctggcaacgcattcaagaaagccgacccccaagaggccattaactgtttgatgcgagcaatcgagatctacacagacatgggccgattcacgattgcggccaagcaccacatctccattgctgagatctatgagacagagttggtggacatcgagaaggccattgcccactacgagcagtctgcagactactacaaaggcgaggagtccaacagctcagccaacaagn

SEQ ID NO: 1246 - DNA, 444 bp, Homo sapiens
  misc_feature (1)...(444): n = A,T,C or G
nctgagtacactgcaatngacgggacttanggagagctgacccacatcctgtcttgtgagccccaggaggtaggatcagaggagagcttatgatcctggtattaggttgcattgctcacgtttgaaatcacttgccctggaggaaatcccccaagggatgggtatattgagatcagtattgtgccccttttacagatgataactgaggcccagagaaattaagagactgtctaaggccgggcgtggtagctcacgcctataatcccagcactttgggagactgaggcaggtagatcacaaggtcaggagatcgagaccatcctggccaacatggtgaaaccccgtctctgctaaaatacaaaaaaaagttagctgggcgtggtggtgggcgcctgtagtcccagctgctcgggaggttgaggcaggggaatcacttgaacccag

SEQ ID NO: 1247 - DNA, 479 bp, Homo sapiens
  misc_feature (1)...(479): n = A,T,C or G
gaggggccacactgataccatattgagagccntgagaaccgcctgcagaagncttctcagattccctccttcccagccagagagcacctagccttctttggggcccccacaggccctttgtgcagtgaacagccctggctgggggtgcagccagtcgtgtccgaactctccaatgactaagcggggagatgcggacatcctagctccttctcaggcctccaactgtgccccatttccacccccaaatacctccccaggaggcacctgtgcccaccccctgggctgtttcccccttccccttaaatccggatgcctcgtcttgcatagggtcttggggcagcggcgaaggggttctgaagaactctggccaagaggacgaggatctgggggtggggaactgggcctagctgtgggaggtcatcgcggagcattgcagggagtgcgttgtgggaattccgggtggagaccctcagggcagt

SEQ ID NO: 1248 - DNA, 485 bp, Homo sapiens
  misc_feature (1)...(485): n = A,T,C or G
agagggccnnnagcgcccccatagaagacccaatagagngccggtaggaagngccgaggaantcctctgcgaagagtaaccctgcatcctcagaacaaccgtgattgtctttattcctacatatgaggaacggaggcgcggagccccacggcagccggggatccaaagacagcctccctccagttccatctgccggctcttggaaggcctggatccctgtccttcagggcccagcccaaatgccgcctcgtccatctgcattttacggccaggtgccccgctgcgggcacggcttcttgtaaaatgctcagctcagcagtgggcgaggcagggtccctgccccatgggatggagggcggagatcaggacccacaagagcccaaagaagaccattttggtcggtgaagaccaaagaaattcaagcaggaggatgtgacaggagcttttgggaaagcctctgaggaggtgacagccatgcaaccgtg

SEQ ID NO: 1249 - DNA, 470 bp, Homo sapiens
  misc_feature (1)...(470): n = A,T,C or G
tgacgggncagggaaantttganctcgatgaccatagtcagtgtggtggaattccctgcccttcctcttaaagtgctctcagttgaaacacccctgtccatccaggcacaccctaacaaggagctggcagagaagctgcacctccaggctccgcagcactaccccgatgccaaccacaagccagagatggccattgccctcacccccttccagggcttgtgtggcttccggccagttgaggagattgtaacctttctaaagaaggtgcctgagtttcagttcctgattggagatgaggcagcaacacacctgaagcagaccatgagccatgactcccaggctgtggcctcctctctgcagagctgtttctcccacctgatgaagagtgagaagaaggtggtggtggaacagctcaacctgttggtgaagcggatctcccagcaagcggctgccggaaacaacatggagga

SEQ ID NO: 1250 - DNA, 483 bp, Homo sapiens
  misc_feature (1)...(483): n = A,T,C or G
cgatggcccccanttnnaaacccagcgnngacattcgangntcctngnanaancngnnnnnnnannnnanncnancctaaaccatgcgctnccaatcttccttcttttgcttctcgcccacctcttcccgcacccagcatgcagctctgcctgcgcagcctcagtgcgctttcctgcgcgcactgcggagggcgccctaagcgtcacccaagcacactcacttaaagaaaaaacgagttctttcgttctgtgcgcagctaaaaggggcgccctacatctccgtgccactcccgccccagcctagccccaagactttggatccggggcgagatgaagggaagagggttgttttggtttcggacgacccttgctctgaccggaagagaagtccctatcccacacctgcctgtcacgttccctcccctttccccagcgcactgttgagggcagcctctccagctctcttgtttatgcaaacgccgg

SEQ ID NO: 1251 - DNA, 464 bp, Homo sapiens
  misc_feature (1)...(464): n = A,T,C or G
gggcgtcnaggggannnnggtttgagacctctgtgaagcgggtggaattcgcgcttccttcacctccaccgcgatggtcccggagaccacacatgaagcagctgccatcgacgaggatgtgctgcgctaccagtttgtgaagaagaagggctacgtgcggctgcacaccaacaagggcgacctcaacctggagctgcactgcgacctgacaccaaaaacctgcgaaaacttcatcaggctttgcaagaagcattattacgatggcaccatcttccacagatccatccggaactttgtgatccaagggggcgaccccacaggcacaggcacgggtggggagtcatactgggggaagcccttcaaagacgagttccggcccaacctctcgcacacgggccgcggcatcctcagcatggccaactccgggcccaacagcaacaggtctcaattcttcatcacgtttn

SEQ ID NO: 1252 - DNA, 471 bp, Homo sapiens
  misc_feature (1)...(471): n = A,T,C or G
gggatacnnnaactgagacccatgaaggccctggaancgcaatggctgaggatcccccttgatgcaagaggtaggctccccgaaagaccctggaaagtccctgccacctgtaccaccaatgggcctgcccccaccccaggagtttggccgggggaacccattcatgctgttcctctgcctggccatcctgctggagcaccgcgaccacatcatgcgcaatgggctggattataatgagctggccatgcactttgaccggcttgtgcgaaaacaccacctggggcgcgtcctgcgccgggctagggctctctttgctgattacctgcagtcagaggtgtgggactcagaggagggggctgaggccacagccgcatcttgatcaggctttctcaagccctccatcggccccaccagatctccattctttgccatgagggccaacacatgagaccccacctccctcccttgctg

SEQ ID NO: 1253 - DNA, 479 bp, Homo sapiens
  misc_feature (1)...(479): n = A,T,C or G
gggggncccnnnaatggagaccaactgagagcgtaggcagngngcnggaattcgattgagtcatgttggcaagagctgggtctaggaccctggggtggggactggagggttgagcaggtcggggcctcagcctccctccggttccccagggaggtctgttccatccgcttcctgttcacggctgtgtcgctgctgagcctctttctgtcagcattctggctggggcttctgtacctggtctctcctttggagaatgaacctaaggagatgctgactctaagtgagtaccacgagcgcgtgcgctcccaggggcagcagctgcagcagctccaggccgagctggataaactccacaaggaggtgtccactgttcgggcagccaacagcgagagagtggccaagctcgtgttccagaggctgaatgaggattttgtgcggaagcccgactatgctttgagctctgtgggagcctccatcga

SEQ ID NO: 1254 - DNA, 479 bp, Homo sapiens
  misc_feature (1)...(479): n = A,T,C or G
tgcgtaccnaggttnnaaannccggggngnacttaaagngctngcannancnnanaaaagngggcgtgttctacgtggagaacccgttcttcggccaacgctatatccacatcctgggccggcggaagctctaccatgtggtcaagtgcacgggtggctccgcggagctgctgttcttcgtggaaggcctctgtttccccgacgagggcttctcaggcctggtctccatccatgtcagcctgctggagtacatggcccaggacattcccctgactcccatcttcacggacaccgtgatattccggattgctccgtggatcatgacccccaacatcctgcctcccgtgtcggtgtttgtgtgctgcatgaaagataattacctgttcctgaaagaggtgaagaaccttgtggagaaaaccaactgtgagctgaaggtctgcttccagtacctaaaccgaggcgatcgctggatccaagat

SEQ ID NO: 1255 - DNA, 476 bp, Homo sapiens
  misc_feature (1)...(476): n = A,T,C or G
gaggcccnnnnagcggccccactgagaccnnatagaggncgatggacaagcccgggaagnaaagaacggggaaggctctgtgaaaccttcctggccgacgatgagcgctcgtaccatttagtggctgaccggctggcccagatcactcaggttttttcgttttgatggctggctgatcaacatccagaactctctgagtctggccgctgtggggaacatgcctcctttcctgcggtacctcaccacacatctgcaccggcaggtcccagggggcctggtgctctggtatgacagcgtggtgcaaagtgggcagctcatatggcaagacgaactcaaccagcacaacagggtcttctttgattcctgcgacggcttcttcactaactataactggcgggaggagcacttggagcggatgctggggcaggctggggagcgccgggctgatgtgtacgtgggcgtggatgtgtttgctt

SEQ ID NO: 1256 - DNA, 438 bp, Homo sapiens
  misc_feature (1)...(438): n = A,T,C or G
tttgaagaccacattgaagnccgttggaannccgccagcgcggcggcgccggccgtattctccgggctgcggaggggttgccattttgggactcctgaggtcctatctccaggctgcggtgactgcactttccctggagtggaagctgctggaaggcggaccggccgccatgtccacgttcaggcaggaggacgtggaggaccattatgagatgggggaggagctgggcagcggccagtttgcgatcgtgcggaagtgccggcagaagggcacgggcaaggagtacgcagccaagttcatcaagaagcgccgcctgtcatccagccggcgtggggtgagccgggaggagatcgagcgggaggtgaacatcctgcgggagatccggcaccccaacatcatcaccctgcacgacatcttcgagaacaagacggacgtggt

SEQ ID NO: 1257 - DNA, 476 bp, Homo sapiens
  misc_feature (1)...(476): n = A,T,C or G
agaggccnnnnnagcngccccattgagaccccgtagagngccctgggcaccgcgagaagcccgcatgctgaacgggtgcacacccctgcacctggcagctggccggggtctcatgggcatctcatccactctgtgcaaggcgggtgctgactccctgctgcggaatgtggaggatgagacgccccaggacctgactgaggaatcccttgtccttttgccctttgatgacctgaagatctcacggaaactgctgctgtgtaccgactgaagccaggcagggtctgggatcctcagggctccacctctccatctggaagccggagccataactgctgcagtttgggcccaggctatgtgctcttctggtgccctatggactgctgtggccagagcctggggccagccagtacagtcctgagccgaggaggacggactgccagtggaagagagccagtctggaaggactagctttccag

SEQ ID NO: 1258 - DNA, 475 bp, Homo sapiens
  misc_feature (1)...(475): n = A,T,C or G
tgctgttcacgggggggggaattgagnnccactgatgacattagaacangcggnggaattcaatagcctcaacaaacaaattgctcagctccaggatttcgtgagagccaagggcagccagagtggccggcacctgcagacccactccaacaccattgtggtctccttgcagtcgaaactggcttctatgtccaatgacttcaaatcggttttagaagtgaggacagagaacctgaagcagcagaggagccggagagagcagttctcccgggcacctgtgtcagccctgccccttgcccctaaccacctggacggtggtgctgtggttctgggggcagagtcccatgcctccaaggatgtcgccatcgacatgatggactctcggaccacccagcagctgcagctcattgacgagcaggattcctacatccagagtcgggcagacaccatgcagaacattgagtcgacaattgtt

SEQ ID NO: 1259 - DNA, 475 bp, Homo sapiens
  misc_feature (1)...(475): n = A,T,C or G
ggaagttcacggggnnnnnggaatcgatgacacttggacagccgcgtggaattccctgtggaggcctgtgtgctccctaggcctcctgggttccctgtggaggcctgtgtgctccctaggctctatgcttgttgattgagctggtgaggaaggggtcccgtttggagctcagacttcccaaagcatccaggggccggaagctgtctgagcagggggataccctgccgatgaggcttctcaggggacacctacccccgcatatcactcaccgcaggaaccagcggtctcccaggccatactcccgtccgcagatcccggagcgaggccacaggcagcgaggcagcttccgctccagcatcaccgtggtggccacaatctgcgtatgggaacaaaaggagaagtcagagatgaggctgggcgcagacagaggtaggggtagggcagcctttgttgaccttcttcagtgggagagagt

SEQ ID NO: 1260 - DNA, 482 bp, Homo sapiens
  misc_feature (1)...(482): n = A,T,C or G
gacggtgnnnnaaatgagaccatgatgtagggcctgaaancgccactttggaaacgtgtctgctttgggaacctcaggcggctcctcctttgttcactgtggctttgctcctgtttggggcacacgtcgggtgtggctgtacacgatgggcagcagagggcctctcttcacactcgttgcttcctttcagaggagctgatcacgcagtacctggctgagcttcggaaccccgaggagatgactcgctgtggcttctcgttggccttgggcgcccttccaggcttccttctgaaaggccggctccagcaggttctcacaggtttaagagcagttacccacacttcccccgaggacgtaagttttgctgagtccaggagagacggcttgaaggccattgcgaggatttgccagactgttggtgtgaaagcaggagccccagacgaagctgtgtgcggagagaatgtttcccagatttactgtgn

SEQ ID NO: 1261 - DNA, 478 bp, Homo sapiens
  misc_feature (1)...(478): n = A,T,C or G
gaggcccncnnagcggcccatagagaccccttcagagngccgtggagaaaagccgaattatgaaatacagtaaaattcactcttttggtagtaattgtatttaccaaatgtatagaatcttttttttttgaaatggagtcttgctgtgtcacccaggctggagtgcagtggtgtggtctcggcttactgcagcctccgcttcccgggttcgggcggttctcctgcctcagcctcccgagtggttgggactgcaggtgcgtgaccatgcctggctaatttttgtatttttaggggggacggggcttcaccatgttgctaggctggtcctgaacttctgacctcaagtgatccgcctgcctcggcctcccaaagtgctgggatcgcggtgtgagccaccgtgcctggcctaccaaatgtgtatatagaatcttaaaaccaccagtccagtcagcatttacagagcagttctatcactgcc

SEQ ID NO: 1262 - DNA, 479 bp, Homo sapiens
  misc_feature (1)...(479): n = A,T,C or G
agaggccnggnngggggcccaatgagaccncatagaggccctaggaagngcgnggaattccccaggttgtaccttttttgtgggcgtggaaagtcagccaattctgaaacttcctaatgtttattgacttaattatgagcagaaacagtgagatactggcagagaagtgccatcttcaggcttctgtgggatgtcctgctgagacctgtggaggagcatgctgtttcttcttagagctggaacttagttgaaggcatcactcttttgcttgtcagaataattaaaaaactctccaggtgtcggagctcagcttctactgtgtcaagtgcagcaaaaacgtagctgacttacttgccactggcatgtacataaaatgcacggccaggtagtttaccagagcagagtggagaatcgaagcaatgatcctcatgcatatgttacacatattttctctgcttccttgcatgctccattgtccn

SEQ ID NO: 1263 - DNA, 487 bp, Homo sapiens
  misc_feature (1)...(487): n = A,T,C or G
agggcgaatcgaganccnttnnnagaatcgaagacccatagtcagtgtggtggaattccgttgctgctggatactctgcccatgctgggcaacggcctgctgctctgcttcttcgacttcttcatcttcggcatcgacggcgtccagctgtgggcagggctgcttcggaaccgatgcttcctacctgagaatttcagcctccccctgagcgtggacctggagcgctattaccagacagagaacgaggatgagagccccttcatctgctcccagccacgcgagaacggcatgcggtcctgcagaagcgtgcccacgctgcgcggggacgggggcggcggcccaccttgcggactggactatgaggcctacaacagcttcagcaacaccacctgtgtcaactggaaccagtactacaccaactgctcagcgggggagcacaaccccttcaagggcgccatcaactttgacaacattggctatgcctgga

SEQ ID NO: 1264 - DNA, 481 bp, Homo sapiens
  misc_feature (1)...(481): n = A,T,C or G
cgggggttcnccnaaatggagacccaattgaangcgctggaaancctggcatccagaaattgtgtattcagggggcgacgatggccttctgaggggctgggacaccagggtacccggcaaatttctcttcaccagcaaaagacacaccatgggtgtgtgcagcatccagagcagccctcatcgggagcacatcctggccacgggaagctatgatgaacacatcctactgtgggacacacgaaacatgaagcagccgttggcagatacgcctgtgcagggtggggtatggagaatcaagtggcaccctttccaccaccacctgctcctggccgcctgcatgcacagtggctttaagatcctcaactgccaaaaggcaatggctgtagaagaggtcctgctggcccgagtggacgtgttgagcgattgctggatgaaagactagcggaggtcctgcctgccctgtgacgctacctcccaaggg

SEQ ID NO: 1265 - DNA, 476 bp, Homo sapiens
  misc_feature (1)...(476): n = A,T,C or G
agggattnccnnaatgagacctattgaaggcgctgganaacggcgctgcagcggcgggagggagcccagtggaggcgccctcccgaagcgccactgcccatgctgaccacccagccctccggctgctgatgtcatgagtaacaccactgtgcccaatgccccccaggccaacagcgactccatggtgggctatgtgttggggcccttcttcctcatcaccctggtcggggtggtggtggctgtggtaatgtatgtacagaagaaaaagcgggtggaccggctgcgccatcacctgctccccatgtacagctatgacccagctgaggaactgcatgaggctgagcaggagctgctctctgacatgggagaccccaaggtggtacatggctggcagagtggctaccagcacaagcggatgccactgctggatgtcaagacgtgacctgacccccttgccccacccttcagagcctggg

SEQ ID NO: 1266 - DNA, 444 bp, Homo sapiens
  misc_feature (1)...(444): n = A,T,C or G
caaccagccttgctcacgaagcgtcagccgtatcctttctgtgtgcagtggggtgtgggttgtgtggagccgcggtgtctgtggaattcacaggctggggccggaatccatggcccccgtcgccgctgccaccccccaggtgctggggtgacctgatccagggttggggtctaagctgctggggggttggagtcttgggctctggcccacgtccgcctctgattggttctaccacctgagccggtcactgaccctccatgggcctcagcttaccctatggtaaagtgagaactagggggtcagactccttgatcaccaagatctctgaccacagccaaggctaagggaagcgcaggaaaacgtggggctcgtccaaattcccagcctctctctgccccctggtggacgccggcagcctagcacccgnggggagatgaccccgan

SEQ ID NO: 1267 - DNA, 580 bp, Homo sapiens
  misc_feature (1)...(580): n = A,T,C or G
ggtcggcacgccgacggaggactgcgggaccgaggaacgcaggccgggtcaaggaccggcatcgctacacattacccatcacacggggagcagnnnnnnnattgatagcgtacactaggccagngcggcggaagacgccctaaacaccaagggagcggnggagagattgtgggagccagcccccagcgagaatttgtgctgagaaaggggcacccctcctgatgagggggggagctgctgcagaactccagggggtgagaacaggggggactccccatgcaggtcggagtcagacctggctggggcccagctatgacctctctggtctggtcctcccaggggttgaggtgactggccagtatgagagggagaaggctgggttctcatggatcgaagggaccttcaagaaccccctgggatgggttcacgcatcccctgaacacgtgggggtgactcggaaccgaagaagctctgcgtaccaagggaaggagacgctattctcagtgatgcccgggtaaggcccaggctggagcccggggcagggggtgacctttcaggctacagtggctgaagatggacg

SEQ ID NO: 1268 - DNA, 444 bp, Homo sapiens
gccttagacaccaagggacaagtggagagattgtgggagccagcccccagtgtgaaggagtgctgagaaaggggcacccctcctgatgagggagggagctgctgcagaactccagggggtgtgatcaggggggactccccatgcaggtcggtgtcagacctggctggggcccagctatgacctctctggtctggtcctcccaggggttgaggtgactggccagtatgagagggagaaggctgggttctcatggatcgaagtgaccttcaagaaccccctggtatgggttcacgcatcccctgaacacgtggtggtgactcggaaccgaagaagctctgcgtacaagtggaaggagacgctattctcagtgatgcccgggtaaggcccaggctggagcccggggcaggggttgacctttcatgctacagtggctgatgatggtac

SEQ ID NO: 1269 - DNA, 427 bp, Homo sapiens
  misc_feature (1)...(427): n = A,T,C or G
nattgcgnccannatgatgactcttaaacagcgaggcggaattccccggctcgagccgggggtgggcttccccgatcctcggctgccgtcgctcctgctgtggtctggggcaggcgcctctcctggcagacacacctgagggtgccgtggtcagagactcactggggacgcatgtgattcacactggtgcgctggccgccgggtcacagactcactggggacgcgtgtgattcacactggtgcgctggccgccaggtcagagactcaccggggacgcatgtgattcacactggtgctctggtcgccgggtcagagactcactggggacgcatgtgattcacactggtgcgctggccgccgggtcacagactcactggggacacatgtgattcacactggcgtgctggccgacgggtcagagactcat

SEQ ID NO: 1270 - DNA, 495 bp, Homo sapiens
  misc_feature (1)...(495): n = A,T,C or G
ggcgggcccgggtttnnnnaattaatacactatcgnannnactcatgttatcatctgcagngncgnggaannacnacangcagcccaggcccacctgcccancacagggnngggcccagancnggncccttgcagcnagnnngcgagaannaaacacactncggggagacccccacaccncagnncccttggccccagaanncacaaaannnccacaaaancgggccaaaggaggcnggcaggnanggaagggnnngnggcngggggcaggagggccctacctgannggngcaacccttaccccttagcctccctgaaaatgtttttctgccagggagcttgaaagttttcagaacctcttccccagaaaggagactagattgcctttgttttgatgtttgtggcctcagaattgatcattttccccccactctccccacactaacctgggttccctttccttccatccctaccccctaagagccatttaggggg

SEQ ID NO: 1271 - DNA, 491 bp, Homo sapiens
  misc_feature (1)...(491): n = A,T,C or G
agcgatagaatggtccttgcnagggtatgattacatagtcagtgtcgtggaattcccgagtcgctctctgagacccgcaagatattctctgggaaggccttggatgtttgggccatgggtgtgacactatactgctttgtctttggctagtgcccattcatggacgagcggatcatgtgtttacacagtaagatcaagagtcaggccctggaatttccagaccagcccgacatagctgaggacttgaaggacctgatcacccgtatgctggacaagaaccccgagtcgaggatcgtggtgccggaaatcaagctgcacccctgggtcacgaggcatggggcggagccgttgccgtcggaggatgagaactgcacgctggtcgaagtgactgaagaggaggtcgagaactcagtcaaacacattcccagcttggcaaccgtgatcctggtgaagaccatgatacgtaaacgctcctttgggaacccattcga

SEQ ID NO: 1272 - DNA, 478 bp, Homo sapiens
  misc_feature (1)...(478): n = A,T,C or G
tggggccggnntttctnaagactggacctcncgangcgactgaaacatccgaacccncgctcatggaaggtgccgatcaaaaccgctgatgaggcccgacagcgccatgtaccggcgatcgatcagttggttggccttgcaccatgcggtggttgaccctggacagcccaactgacactctccttccctacaaacatgaggaactggggttgaatcggctgaggaggagctattctatgctggagaccaggagctcctccaccaggccaaagacttcggcaactatttatttaactttgcatctgctgccacaaaaaagataactgaatcagttgctgaaacagcacaaacaataaagaaatccgtagaagaaggaaaaatagatggcatcattgacaagacaattataggagattttcagaaggaacagaaaaaatttggtgaagagcaacatacaaagaagtcagaagcagctgtg

SEQ ID NO: 1273 - DNA, 468 bp, Homo sapiens
  misc_feature (1)...(468): n = A,T,C or G
taaagccacngccctcgnannnncnncatcnanctncggannancgcgnggnctgnngnttgcagctgatgctccgtgtcaatgagtaccgctttgcttgggtggaagctgatggggtaaattgcataatgggagtgttgagtaacaagtgtggctttcagctccagtatcaaatgattttttcaatatggctcctggcattcagtcctcaaatgtgtgaacacctgcggcgctataatatcattccagttctgtctgatatccttcaggagtctgtcaaagagaaagtaacaagaatcattcttgcagcatttcgtaactttttagaaaaatcaactgaaagagaaactcgccaagaatatgccctggctatgattcagtgcaaagttctgaaacagttggagaacttggaacagcagaagtacgatgatgaagatatcagcgaagatatcaaatttcttttggaan

SEQ ID NO: 1274 - DNA, 483 bp, Homo sapiens
  misc_feature (1)...(483): n = A,T,C or G
gcccttgctgatgcttgcagnggactgagtaccctcgnacgggcggcattcttagcttgaaaccctacagaaacaagcagcaggctacattggctccacagcctgccccatgcttacccctggcttagatattcagaaccactggtgaatgaagaatgtattttgctttagaattttgtgatacaacttttttctaagaatatatatcctaatttctatgttatatgctgtatgtacattgatcttttaagatctaaaaggaaaatctgtcgactgaaattgtcttatatacaagatgtgcaagcagtcacaccctatcccacctctctgtgtttgtctatgagtgcgaaaaaacacagcagacccagtattttgaaaccaaattagagcagcaatatttgtgatagtgtattcagcggaatgcaggccaagaatttatttttctgttctatggaaatgaacattcatagatcatacataaaa

SEQ ID NO: 1275 - DNA, 493 bp, Homo sapiens
  misc_feature (1)...(493): n = A,T,C or G
gcgatggaattgtactttcnagnggctctgagtaccctagtcagggncgtggaattcctcaggaagagcgacaacagccggagttcagatgaagactcccaggccacgggatagcctttgctgtgccctgtggcctggccgcagtgaggcatgtatctgtagttccttgctgagtaacaagaagtaaaatacatgtttgtatatctacatttacattctgcgccccagagctaagacagactgcgaatcacttttctgctgtgagggtgatggtgcctgatgcggtgtctcgcctatctccttatttaagcccttaactccttgccctttgagagtgtccattgctggccatggtcactaaatttgaagttccagtcctccctttggagtggacatttaaaatctgcagccattccttgcttcagttcccttccaccacccagggctggctttcctataagccacctccagggtccaggggctttctctctct

SEQ ID NO: 1276 - DNA, 491 bp, Homo sapiens
  misc_feature (1)...(491): n = A,T,C or G
agggggnnngtaatgannccntnnnaatcgagatctctatccatgtcgtggaattcctgccattccttctgcaattacatgggtttcccagctgtttgcgcggccttggagcacccacagaggcggcccctgctggcaggctatgccctgggtgtgggactcttcctgcttctgctccagcccctcacggaccccaagctctacggcagccttcccctttgtgtgcttttggagcgggcaggggactcagaggctcccctgtgctcctgacctatgctcctggatacgctatgaactctcaccggctccccagccctccccaccaaggggtactgcaggggaagggctggctggggtccccgagatctcaggaatttttgtaggggattgaagccagagctagttgcgtcccagggaccaagagaaagaagcagatatcccaagggtgcagccccttttgaaagggggtttacgagcagctgtgagtgagg

SEQ ID NO: 1277 - DNA, 414 bp, Homo sapiens
taatttaggttacaaaactcaaggctgtaacctttatatgaaagtacttaagcttgaaagttcataatagtttggtatcacctcattagtatagtacagtggttctcaaagtttggtcctgggtcatcgacattacttctttttctttctgagacagggtctcagtctgtcacccaggatggagtgcagtggcgtgatcatggctcactgcagcctcaacctctcgggttcaggtgatcctcccacatcagcctcctgggtggctgggactacgggcacacgccaccatgcctggctagtttttgtaaagacgaggtttccccatgttgtgcaggctggtcttgaactcacagactcaagtgatccttttacctcagcctcccaaactgttgggataacaggtgtaagccacca

SEQ ID NO: 1278 - DNA, 480 bp, Homo sapiens
  misc_feature (1)...(480): n = A,T,C or G
tgtgaccnnncgagnccagctgaaaccannccattttgcgngcannaacnnnaanntntagannggnnnttagcatgcaggatgacacatatgtgcaggcctttcgcctggcattccttgctggccacctcagcatgaaccaagaccggtacttaggccgggcagaggagttcattggcgcangcgagcaggcccggtactgtcatgggggctttggctacctgttgtcacggagtctcctgcttcgtctgcggccacatctggatggctgccgaggagacattctcagtgcccgtcctgacgagtggcttggacgctgcctcattgactctctgggcgtcggctgtgtctcacagcaccaggggcagcagtatcgctcatttgaactggccaaaaatagggaccctgagaaggaagggagctcggctttcctgagtgccttcgccgtgcaccctgtctccgaaggtaccctcatgtacc

SEQ ID NO: 1279 - DNA, 471 bp, Homo sapiens
  misc_feature (1)...(471): n = A,T,C or G
agatggggagangnnnaactggaaaaccntngaatcgaganccntcggccagtgtgctggaattcgtaagatggcggcgctgagggctttgtgcggcttccggggcgtcgcggcccaggtgctgcggcctggggctggagtccgattgccgattcagcccagcagaggtgttcggcagtggcagccagatgtggaatgggcacagcagtttgggggagctgttatgtacccaagcaaagaaacagcccactggaagcctccaccttggaatgatgtggaccctccaaaggacacaattgtgaagaacattaccctgaactttgggccccaacacccagcagcgcatggtgtcctgcgactagtgatggaattgagtggggagatggtgcggaagtgtgatcctcacatcgggctcctgcaccgaggcactgagaagctcattgaatacaagacctatcttcaggcccttcc

SEQ ID NO: 1280 - DNA, 453 bp, Homo sapiens
  misc_feature (1)...(453): n = A,T,C or G
ntttgaaaactgatgacactagtccatgcggtggaattccagtgatgttccttggctatccactgtgaccctgacagtggtctctcctccagcaatgggtcatgagggatgcctgcatctgtgcccatctgctgctgccactgccactctcatgtaatgcgaggtcggtgtgagctgcttctccagcctctacaatacacatcctgctcaagaggtagcagccatttgagagatgcatcccaggtggccgtcagccctggcatggcatggtgggatggatgcacatcggactggaagtgtccagatggcattctggcactctggttgtctctattgtgcacatcagagcactaagatccccttcataattagagagcttattccaggagtcactatgactcangggcagagttgagagtggaagcaaatgccttgccttctctgcacttgtga

SEQ ID NO: 1281 - DNA, 451 bp, Homo sapiens
  misc_feature (1)...(451): n = A,T,C or G
nactgagacctaaggacatgcggnggaattnggctttggaattcgtcgacttaggggttggccacgatggtgtccttgatccacttccggtaatgcaccaccttggtgtacagggaaggcctttcgggcagggcacatggttcactgccccatgacgtgataccttgaagcacaccattacagacaagtggggccccagaatcacccgagcaggtgcttttgccccctgtccagcgtccagcacacagcatgaacttggtcaccttctgagggtgaacttgcgcacacacgtcattggaaataacatggaggtccacacactgaagtttctttggggtcaagaactcctctggttcaatgctgccccagcctgaggcgtagcaggtggtccccagtgctggctcctgggtgggcaggtccatgaccttcacagcatccgtgagctcggcag

SEQ ID NO: 1282 - DNA, 544 bp, Homo sapiens
  misc_feature (1)...(544): n = A,T,C or G
gtaagacttaacgtatatctatgcgatcgtactaagggaattagggtcggacatacactcagagggaattagaaagacaaagatttgaaacatttgataccctacgccangcggnggaaancggcatctgctacgacggcctccagggcttgctgtaccttggcctcttctccttcctgttcgccctcgccttctccaccatgatctgtgcagggccaagggcctggaagcacttcaccaccataaacagagactacgatgacattgatgatgatgacccctttaacccccaagcctggcgcatggcggctcacagtcccccgaggggacagcttcacagcttctgcagctacagcagtggcctgggaagtcagaccagcctgcagcccccggcccagaccatctccaacgcccctgtctccgagtacatgaaccaagccatgctctttggtaggaacccacgctacgagaacgtgccactaatcgggagagcctcccctccgcctacgtactctcccagcatgagagccacctacctgtctgg

SEQ ID NO: 1283 - DNA, 453 bp, Homo sapiens
  misc_feature (1)...(453): n = A,T,C or G
nctgaagaccgacgaccattgcgcagngcggnggaattcctaggcttgaacagacgtgacctagaagaaactgaacataaagagaagggggtggggggctagttttcaagttggggaacctgatagtgaaaagtcacagatggagaaaattgctctcagaaaaactgtttggattgctttcctcttgttgcacatgtaccatgcatttctcagcttggggtactacattttgtggaaagttaatctatcatctatctttccacatctgaattaatcattctaggaaagaatacttattcctactcatttcctttatgatgtccaaatggttgcaggatcataatctattgtgccacctttatttctagaagtacaactaatatgttcacattttcaaataaataatactccccgtaagtaataactgcaaccaatcagtgttattcagtgctt

SEQ ID NO: 1284 - DNA, 474 bp, Homo sapiens
  misc_feature (1)...(474): n = A,T,C or G
aggggcagccgggnttnnnnnnncctgatgattcgtagaccgtgcggnggaattcagggatttttaagatcaatttctaaaataagtctatttgtttcttaagctttttatgatctagcccaagttttgtataaaatctcagtgtgtggcttatgtttgaaaactaacacttcattctctcaaactttctgccactcttctatttgtcagaagtcataaataaacacagttgctaggtacctttgtctgctagggctgctataacgaaatatagactgtgtggcttaaaaaacagaagttaattttctcatagttccagaggctaaaagtctctaatcaagatctagtaaggctggtttctggtgccggccttcttcctggcttgcagatggctgccttctcactgtgacctcacatgacagagagtgggttagctccccggtgtcttttcttgtaattctatgggatcagagc

SEQ ID NO: 1285 - DNA, 475 bp, Homo sapiens
  misc_feature (1)...(475): n = A,T,C or G
nnaaaggccgggctggnnnnnnaattgaacatcgcancatcggacngagcnggaattcctaactgtgtagccttgggataaagttactcagactctcgaagtttcatttttcttatttgtaaaatggcaagataactaccttgctgagaaaaattatctaaaactcccagcacatggtaggtactcaataaatagcagccaccagtagccgaagcattccttggctataacagcttctcctggccgagtgcggtggctcatgcctgtaatcccagcactttgggaggctgatacgggtggatcacctgaggccaggagttctggacgagcctggccaacatggtgtctctactaaagatacaaaaattggctgagtgtggtggcaggcgcctgtaatgccagctactcggtaggctgaggcacgagaattgcttgaacctggcatgtagagattgcagtgagtcgaaattgtgcc

SEQ ID NO: 1286 - DNA, 455 bp, Homo sapiens
  misc_feature (1)...(455): n = A,T,C or G
nattgaaaaaactgatgacctctgcccangcggnggaattcggtctctcccagggccgatcctgtctgcagtcacatctttgtggggcctgctgacccacaagcttttgttctctcagtacttgttacccagcttctcaacatccagggcccaatttgccctgcctggagttccccctggctctaggacactctaacaagctctgtccacgggtctccccattcccaccaggccctgcacacacccactccgtaacctctcccctgtacctgtgccaagcctagcacttgtgatgcctccatgccccgagggccctctctcagttctgggaggatgactccagtccctgcacgccctggcacacccttcacggttgctacccaggcggccaagctccagaccgtgccagacccaggtgccccagtgcctttgtctatattctgctcccagcctgc

SEQ ID NO: 1287 - DNA, 469 bp, Homo sapiens
  misc_feature (1)...(469): n = A,T,C or G
tccgactacgtcggccatnacgacagngccggnnggaattccacactcgcacatncggtgcggatactataagtggccgcgtggacacgcacgactgacatttctaaatctgtacacttctgactagccatacataagcagcatggccctcacgagagcgttacttgaccctccaaggagccgctcccactgtgctttcctagttacctgaggaaatatcgatgattagtctgattatgtgacctcatagaatgcggnaggagagcagggtgataataaggagaaggtcagcaaaaaaacatgtgagcaaaggaatctgtgtcataattaagttcaaagggaggtactatgcctggatgtgcacgtaggccagatttatgtttccctccgcccaaacatctgtggagtaaagcataacaaggcagcattgctgccaacatgtctcgcctcccgccatagggtggttttt

SEQ ID NO: 1288 - DNA, 450 bp, Homo sapiens
  misc_feature (1)...(450): n = A,T,C or G
nactgagacctaaggcnatgcggnggaannnctcatgtcatggcaagggtggagtgctatggtttgaataatggtgtcccttctaaaattagtgtggaaatttaatgcccaatgcaacagtattaagaggtttggcaattgcgtggtgactaagccatgagggctctgctctaatgcatgagattaacatctccataaaagtgtattaatttaaagggagtactttcttgcccttctgccccattcaccatgtgaggacatagtcatggctcctccacaggatgcagcaacaagacatcatcttggaaacagacagcagccccgtttagacctccttctgctgctttgatcttggacctctcatcctccagaaacacgacaaataaatttatgttctttataagttactcattatcaggtatttatttatttacttttttgagacggagn

SEQ ID NO: 1289 - DNA, 469 bp, Homo sapiens
  misc_feature (1)...(469): n = A,T,C or G
naaaggccgggcctgnnnnnaaactgacatccancatcggcnggacncgtctaaactcttgacctcaggtgatccgcccgtctcagcctcccgaagtgctgggattactggtgtgagccactgcaccgggcctcaaatccatcttctagaagaggaagctggaggctcagggaagttaggaagttggcttaaggtcacacagcaagtcagccatgctggggcttgacccccgtccagatctgggcgggcctggctcatagtatgcggcgtcctgtaacttggcatctggtgccctgagccctttcccaggccttctgggtgccgggcagcagttacagacaagaggggtgcaggcccctgctcccccacctacagttctgttgcgtagcacctgcagggagagccaattcactttgaaacaacccacaggacaaaacaatggcgcaagtgtgtccccaggaaaagggag

SEQ ID NO: 1290 - DNA, 480 bp, Homo sapiens
  misc_feature (1)...(480): n = A,T,C or G
agagcggccccgctgataccntgcttgataccctaggcagngncgtggaattcggattcggctccctgagcgagatggccaagacaaaactgcccacgtaatttttgtattttcatggaaatacgaaggggatataatttcagcaaaaccctgccagcttcacttggtgactacaaccaaagattatgtgtcaagtgcacgagggtccctctctgacaggtctgattagtggtgacccccccatcagagtagagacagagctcacggtttaaaagtttcatcggggccaggcgtgatggctcacacccgtaatcccaacacttcaagaggcagaggcagaagcatcactcaagcctaagagttcaaggccagcctgggtaacatggcaagacccatctctacaaaaaatttaaaaataaaaaatttaaagctaccatgccggcttgttctcacctttatactctatgcttgtgtgtgngt

SEQ ID NO: 1291 - DNA, 474 bp, Homo sapiens
  misc_feature (1)...(474): n = A,T,C or G
atcgaggcctttnnagngtcgtagaacctaggacagtgggtggaataccccagagtcaccaacgcaaagttggggctggtcccagcctgaggctccagctgatgccctcagctcccagagagggggtgccccatctagctgggtgcaggggtcactgcttgtcagctcagggccctgtgcccgcttgcctgttcccctacatctgtgcctgcacatccagaactgcctccttgccgctgcctccaggaagcccaccttgagccagagtcaagggctgcagcactgcccgatagaacacgcccgccctcactgctgttcttgccttacagccaccatgggaaagctgcaacctttctgttttatttaaagaaagcccaacattaaagggttttcattgcnnnnnanaaaaaaaaaaaaaaaaaaaaaaaaaaaaaaaaaaaaannnnnaaaaaagcccccggtctctcttggggc

SEQ ID NO: 1292 - DNA, 473 bp, Homo sapiens
  misc_feature (1)...(473): n = A,T,C or G
agcgggcccacctgatacctcactgataccntcgcagnggcgggaatcgactatttagagccatgactaagaaacggcctccggggccagcatgatggccgactcccagggtccgttgcggcgcggcggagcagccaatggcgagccccacagtctcgcgagagtgctcaggcgctcttcgtggctgccctcttagctgctagcggagctcctcagggggcggccgggagcctacaattcctagaaagaaaatacgccattccggaaacagaactgcagttaagaccctcgaaaagatctaagaaagtgtgcatcctaaaacacctgacgaatttcagaatgtgacaaagcgcagaggatgcattatttcaaaacaaaacagaaggctaaaatttgcaggaaaaagaaaatcagtaaaccgggaatcctcggactggattgtaagcaagatttgaatgaataagaagctgaag

SEQ ID NO: 1293 - DNA, 458 bp, Homo sapiens
  misc_feature (1)...(458): n = A,T,C or G
ggcggggnnngggggggcattgagncctttgaaatgattncntatgcagngncgnggaattccagggctttgtgctgtgtcactccattgctggggggacaggctctggactgggttcctacctcttagaacggctgaatgacaggtatcctaagaagctggtgcagacatactcagtgtttcccaaccaggacgagatgagcgatgtggtggtccagccttacaattcactcctcacactcaagaggctgacgcagaatgcagactgtgtggtggtgctggacaacacagccctgaaccggattgccacagaccgcctgcacatccagaacccatccttctcccagatcaaccagctggtgtctaccatcatgtcagccagcaccaccaccctgcgctaccctggctacatgaacaatgacctcatcggcctcatcgcctcgctcattcccaccccn

SEQ ID NO: 1294 - DNA, 452 bp, Homo sapiens
  misc_feature (1)...(452): n = A,T,C or G
ncttgactgcgtggcatagggcggngcnggaattcctcgcctcgaattcatttcctgctccacatgcaccctctaaccccgacccctgctacaacctcagaggccggactcctggattcatctccctagcttccctgggcctgccttagccgccagtcgcagccgaggcgaatagagcgaaggagggaagtgggggcggctagctggggctagaaggccaagagagggcggggtgggcggccgtttggggtgggggtcagggtgactcactcgtctgcattcagggcaggtgttggctctggtgctggtggccgctctgtggggtggcacgcagccgctgctgaagcgggcctccgccggcctgcagcgggttcatgagccgacctgggcccagcagttgctacaggagatgaagaccctcttcttgaatactgagtacctgatgccctttc

SEQ ID NO: 1295 - DNA, 482 bp, Homo sapiens
  misc_feature (1)...(482): n = A,T,C or G
cggggtccnnggtagnaaacctagggngaccttanngngctnngnannaacnnaannnntggagncaggtttatcatggtgctggaggctccttcctgagcaccctacagtctcctggaagaaagagatcagataacgagacgaaatcctgctcggcagtacctgagatggccaagcaattcttcaggcctggggcccaagtcactcgcagcagctctgggtcagggctaggtacggatactgggcactggactgagctcacaggatggcagagatcccgggggtcaagaagacaaagacgcccatctgagccaaggctggcaatgctgggcccagggccctggccccagctcccaacttcagcacaccatctctctccaccagacccagggccagggctgcgattctccaacggtgcccacttctgccgggtgtcaacaagccccagccggcccgaagcacagcagaaggcaaaggtgtct

SEQ ID NO: 1296 - DNA, 441 bp, Homo sapiens
  misc_feature (1)...(441): n = A,T,C or G
nttcgcgcccctttggacgacccctagaccgtgcggtggaattcgatctgagcagcagggcccaggcagcacatgagcagtgcccatgggctccctgcgtgaggacggcaaggtgcgatgtatgtctaacttattgatggcaggcagccccctgtgccccctaagcctggccctggttattgctgagctctgtgctcagtgctgcggcctggccgtggctcgtctgttcctttggggggcccgggcgggttgtgggaatcagtcttcacagacagacgtgagccaggcggaggactcgttccttgcagaggtcagtcctcacctgcaggtgtcggggtgggggggggcaaggaggggcaggcacacaccatgtctgacctgaacccgattctggggagcatcttcccgctccggccccacgacctccacagggttacattg

SEQ ID NO: 1297 - DNA, 480 bp, Homo sapiens
  misc_feature (1)...(480): n = A,T,C or G
ggagcggcnccattatgaatccntgatcgatgngccgtaattcgctcagcaacagaaaaaggcggccatcatctctgctgagggcgactccaaggcagctgagctgattgccaactcactggccactgcaggggatggcctgatcgagctgcgcaagctggaagctgcagaggacatcgcgtaccagctctcacgctctcggaacatcacctacctgccagcggggcagtccgtgctcctccagctgccccagtgagggcccaccctgcctgcacctccgcgggctgactgggccacagccccgatgattcttaacacagccttccttctgctcccaccccagaaatcactgtgaaatttcatgattggcttaaagtgaaggaaataaaggtaaaatcacttcagatctctaattagtctatcaaatgaaactctttcattcttctcacatccatctacttttttatccacctccctacc

SEQ ID NO: 1298 - DNA, 452 bp, Homo sapiens
  misc_feature (1)...(452): n = A,T,C or G
nattgactacgtnccataggccngagcnggaattcttaagaccatccttcctgctgctgcccaggatgtttattaccgggatgagattggctatgtttctaccagccacctccttattttggatgactctgtagagatggaaatccggcctcgcttccctctctttggcgggtggaagacccattacatcgttggctacaacctcccaagctatgagtacctctataatttgggtgaccagtctgcactgaaaatgaggtttgtggaccatgtgcttgatgaacaagtgatagattctctgactgtgaagatcatcctgcctgaaggagccacgaacattgaaattgatagtccctatgaaatcagccgtgccccagatgagctgcactacacctatctggatacatttggccgccctgtgattgctgcctacaagaacaagctggttgaan

SEQ ID NO: 1299 - DNA, 462 bp, Homo sapiens
  misc_feature (1)...(462): n = A,T,C or G
gcccattcggcttnaaaaaggagaccatggcagnggcnngaaanngcgacacccancctgcggngtcgtctggcgcggnttgggaacccgcggaagcctgtgctgaagcccaataaacctctcattctagctaaccgcgtcggggagcggcgccgggagaagggcgaggcgacttgcatcacggagatgtcggtgatgatggcttgctggaagcagaatgaattccgcgacgatgcgtgcagaaaagagatccagggcttcctcgattgtgccgcgagggctcaggaagcccgaccgatgagatcgatacaggataccctgggcgaggcagggagtgctaccttcctgtaattgaatagaaagcccagaggtttggtatctccctgtcctcagctgaaaatggacaagtattttcaatgactgaaatatagcttctgacaactatgcagaggcattttagag

SEQ ID NO: 1300 - DNA, 478 bp, Homo sapiens
  misc_feature (1)...(478): n = A,T,C or G
ccgcnnnnnnnnnnnattgagaccctagtcagngtggtggaattcggaaggagggaccaggaggaggggcaagacctggacgtgctacccctccctggccaaatccgtgcagctcagcagtgccttgttcccctgcagtaaccgggccgccctgcacctctattccaacaccctcaactttcagatcagtgaagtggagcccaaatactatgcagatggggaggacgcctatgccatgaagcgggacctcactcagatggccgacgaggtaagcgcctgcatgaagccaagcaaggcgagcgggggcggcactcaggagccccaagacagtggctgcaggcgagaccgactttggatgccagctcttgtggctacgttgccaggagtcacgacctcagtttcctaggctgggctttagaggaggccgtctgcctagcagcctggagggtgatgggagaggcanagggaggaggctttt

SEQ ID NO: 1301 - DNA, 437 bp, Homo sapiens
  misc_feature (1)...(437): n = A,T,C or G
nttgtagacctctgtacgtgcggtggaattcccgctcccggcgcaggcgctgcagcttggccagagcggagggggctcgggagaggagtggacgccgctggccaggatggtgctggagagcgtggcccgtatcgtgaaggtgcagctccctgcatatctgaagcggctcccagtccctgaaagcattaccgggttcgctaggctcacagcttcagaatggcttcggttattgcctttccttggtgtactcgcacttcttggctaccttgcagttcgtccattcctcccgaagaagaaacaacagaaggatagcttgattaatcttaaaatacaaaaggaaaatccgaaagtagtgaatgaaataaacattgaagatttgtgtcttactaaagcagcttattgtaggtgttggcgttctaaaacgtttcctgcctgcg

SEQ ID NO: 1302 - DNA, 474 bp, Homo sapiens
  misc_feature (1)...(474): n = A,T,C or G
naagtgccgggcntnnntnnnnccttgacatcgcanccttgtgcnggaattccgcgtcctcccgcgcgctatgacggccagcgcacagccgcgcgggcggcggccaggagtcggagtcggagtcgtggtgaccagctgcaagcatccgcgttgcgtcctcctggggaagaggaaaggctcggttggagctggcagtttccaactccctggaggtcatctggagttcggtgaaacctgggaagaatgtgctcaaagggaaacctgggaagaagcagctcttcacctgaaaaatgttcactttgcctcagttgtgaattctttcattgagaaggagaattaccattatgttactatattaatgaaaggagaagtggatgtgactcatgattcagaaccaaagaatgtagagcctgaaaaaaatgaaagttgggagtgggttccttgggaagaactacctcccctggaccagctttn

SEQ ID NO: 1303 - DNA, 476 bp, Homo sapiens
  misc_feature (1)...(476): n = A,T,C or G
naagggccgngcctgnnnnnnnaattgaacatcgangcatcggccngagcnggaattcctgataccgagctctggctgtcaatggtaggagagtgggagggggagaggaggcttgggaaagggaggatggacaacccttttcaacatgagtcctaggacagtgacgagggacctaggctgctgctgctcctgccccgaaaagaaaaagctccaatcataacgaccaggccatggctgggattgcctctgttgaaagggccccatgtggcaaagccaggcttctacgatggaccctgctaatgccaaggatagagaagccatcacctgctgcagcctggcctggtggtgggggtgggagtgctgggtcaaggctctcaaactaagctcaggtcctgctggtcccctggcttgctgggtggcaaagaagaagtctttgagcctctctgggccatgttacccctcagaaaaaggagctg

SEQ ID NO: 1304 - DNA, 483 bp, Homo sapiens
  misc_feature (1)...(483): n = A,T,C or G
ngagcgtgnnnnaaatgagaccctaatgtaggccctgaattcttacaattcaacatgagattggggtggggacagagagccaaaccatatcacatgtactctaaagtaaagaataaattggcttgtccagaaatactaaagagaagtttaattacattttctaatttgatgaaagttaattgctctctgagttcattttggctatatttgttgagcatattttcttcagctttaagaagagtatagaaaatttacaaggacctgaaaacttataatatatatacctattatagatgaggtttttcccatttgagggagtgtcctggtgtgtgttgattccagggaaaggaaccatgtatattaaaatttactatgtattcaaccgccacaaacttaattgggttagataatatctggtttacctctactttgttttacataaccacagtagtgctcacctgacctataagggttagaccctan

SEQ ID NO: 1305 - DNA, 441 bp, Homo sapiens
attgaagatcctatggacgacgcgtggaaagcggggtgaaaccccctggctaaaacaagacaaaacaaaacaacagcacaacccgcatgacttgctgtacccacattctactggggaagacaggaagcagattaacaaacatctaataactatttttaaaagccagatatacgatatttcacgtggatgacccgattggcctgctgcgggtcagggaaacaggctcccaggtcgcatcctcagcttgatcttggcgctggaaaaaagatgctacgcggttccctccttcagccaccagagggcgcgccctccccgtttgtcctctttcgcgcactttttctcccgcacctgtcagtcacagggcagccctttagcggaacagggatcctgttctgtgattttcctgagggcctgcctctcccagggagtagcgggctccta

SEQ ID NO: 1306 - DNA, 435 bp, Homo sapiens
  misc_feature (1)...(435): n = A,T,C or G
attgangaccactgtccgtctggtggaattccgtttgaatccaggaggcagaggttgcagtgagtcgagactgggctcactggttatggagccttacctgggcatgccccccgctgacacctgtggaaaggcatgggacagccccggcccatcccctgctgcctgagccctcccctcctctgaccttcctccttccatgaccctgctgccaggggggcttcccaaaaaagatcttgagtcttagcgatgtggtcgacacgcagagaacttggagcctcatgccagggccccctcccggagattcctggcgcccatgtctccttggggggtgactgaaggggatgggtccagactcacttgatcaacaggacatgggcctgcagcttcctgatggaatgcgcacacagctccctgctgacgaagtcaatgctgttc

SEQ ID NO: 1307 - DNA, 484 bp, Homo sapiens
  misc_feature (1)...(484): n = A,T,C or G
ccgccnaaccnnnnnnatcgagagcntannnannatctgagaccctagtccangnggnggaattcgacagctggagtatcagccttggaagtatatacgccaaaagaaatcttcgtggcaaatggtacacaagggaagctgacctgcaagttcaagtctactagtacgactggcgggttgacctcagtctcctggagcttccagccagagggggccgacactactgtgtcgtttttccactactcccaagggcaagtgtaccttgggaattatccaccatttaaagacagaatcagctgggctggagaccttgacaagaaagatgcatcaatcaacatagaaaatatgcagtttatacacaatggcacctatatctgtgatgtcaaaaaccctcctgacatcgttgtccagcctggacacattaggctctatgtcgtagaaaaagagaatttgcctgtgtttccagtttgggtagtggtgggca

SEQ ID NO: 1308 - DNA, 477 bp, Homo sapiens
  misc_feature (1)...(477): n = A,T,C or G
cggcnncncnnnnnnattgcgaccctagtccgngtggtggaacttcgggaatgagtatcagccgagcaacatcaaacgcaagaacaagcacggctgggtccggcgcctgagcacgccggccggcgtgcaggtcatccttcgccgaatgctcaagggccgcaagtcgctgagccattgaggatcgcgacgcagtcggcgggaccctcatggaagcatcgccctcgcctcggaccttgcctggcgctatttttgcagggagctggggagcaggaacgcctcggacctgagtgctctccatattgtggggttgaagtctggatgggagcttgccaagtccctttttaggctttttaattaggaagcatttcgaacctgcgcaacagaccaaagaacagtacaaagaacatccgtgtacccagtaccctgactaccgactacctacaacccgtccctgccccatcctgagttcttttgaag

SEQ ID NO: 1309 - DNA, 434 bp, Homo sapiens
  misc_feature (1)...(434): n = A,T,C or G
nttcgagaccactgtcagtctggtggaattccagacttcctcgatggccatgatttgcagctgcactgggattcctgcttgtagctctctggctcaagacggggtggggaaggggctgggagccagggtactccaatgcgtggctctcctgcgtgattcggcctctccacatggttgtgagtcttgacaatcacagcccctgctttttcccttccctgggaggctagaacagagaagcccttactcctggttcagtgccacgcagggcagaggagagcagctgtcaagaagcagccctggctctcacgctggggttttggacacacggtcagggtcagggccatttcagcttgacctccttttttgaggtcagggggcactgtctgtctggctacaatttggctaaggtaggtgaagcctggccaggcgggagg

SEQ ID NO: 1310 - DNA, 469 bp, Homo sapiens
  misc_feature (1)...(469): n = A,T,C or G
cggaagttncacggagnnnnnnncctgataacatgagatctgggaaanncaaaagtagctggcattgacatgtgcctgtggtcccagctactcaggaggctgttgcaggatgattgcttgagcccaggagttggatgttgcagtgagccaagatcgcaccattgccctccactctgggccacggagcaataccctgtctcagaaaacaaacaacaaaaagcagaaacgctgaaggggtcggtttacgggaaaaccgcctgtcagaacacttggctactcctaccccagatcagtggacctgggaatgagggttggtcccgggaggcttttctccaagctgttgccaccagacccgccatgggaaccctggccacagaagcctcccggggagtgagccagagcctggaccgctgtgctgatgtgtctggggtggagggagggtggngagtgtgcaagggtgtgtgtgtgn

SEQ ID NO: 1311 - DNA, 468 bp, Homo sapiens
  misc_feature (1)...(468): n = A,T,C or G
cgaattccccccctggaanacaggtagatctngnanagngcggnggaannccaaccccactccatgggtttgtctcctggtacccaaagaaatactgagttgtgtccattacatggctgggtcttcagacccctggctcaccatgtgggtgtcttgggcagtttctatcacacatgggacaaggggagggagtttttctaacatggaaaaagattcccagcctgccgcccagcatgcaggtggcctcgctttgccgggtccgtgaggctccccgtcaattttgcacgggatcctagctcttgtaggcagacaccagtgcactctagatacctcctgagacctccgtcctctgctttccgggcagctctcaccaccccaggccccggcatgaggcctttcctcagtcctgtggcctctcagaggacacctgatgctcacctgcccctctttctcctgcacttggcttgg

SEQ ID NO: 1312 - DNA, 477 bp, Homo sapiens
  misc_feature (1)...(477): n = A,T,C or G
tgtattgtnncggnnnnnnnnncctgatncccctgagatcctaggaagngcggnggaattccgggtcggacctgtgggccagagcatagcaagggtgggggcagggtggacgaggggccccagccacggagcgtggagccccaggatgcgggacccctggagaggagccagggggatgaggcagggggccacggggaagataggccggagcccttaagccccaaagagagcaagaagaggaagctggagctgagccggcgggagcagccgcccacagagccaggccctcagagtgcctcagaggtggagaagatcgctctgaatttggaggggtgtgccctcagccagggcagcctcaggacggggacccaggaagtgggcggtcaggaccctggggaggcagtgcagccctgccgccaacccctgggagccagggtggccgacaaggtgaggaagcggaggaaggtggatgagggt

SEQ ID NO: 1313 - DNA, 480 bp, Homo sapiens
  misc_feature (1)...(480): n = A,T,C or G
cggacgtacacggnctggannnaaactgatgaaccctgatcaccgtgcggaannccaacaggacttaccctgggcttcaggaacatctgatggctgaggttagtgtgcttggaggctgcatgacgaactgtcgatgcttcttagcagagatggtcacagagggcagcagggacaggactggaagggacctgcagcctgcagaccccgcctggcccccgctggcttctggctggtccagtgatgggcaagtgacagaccttccccaggctctgcttccagaactctaatgggaaactgggcctgtctacctttagaagtcttcgattctcagagagcatttgtctaatacaataaaaactggcattaatacaaacctcaaaaaaaaaaaaaaaaaaaaaaggggcccgcctattttaaggggcccctttaaaccccgggaaaaaccccagtggggccttttaagtgccaacccttgggtgg

SEQ ID NO: 1314 - DNA, 484 bp, Homo sapiens
  misc_feature (1)...(484): n = A,T,C or G
tgaantggggncggntgnnnnnnntttgaaacccactgatgaccctagtacagngcggnggaattcgaacaggacttaccctgggcttcaggaacatctgatggctgaggttagtgtgcttggaggctgcaggacgaactgtcgatgcttcttaggagagatggtcacagagggcaggagggacaggactggaagggacctgcagcctgcagaccccgcctggcccccgctggcttctggctggtccagtgatgggcaagtgacagaccttccccaggctctgcttccagaactctaatgggaaactgggcctgtctacctttagaagtcttcgattctcagagagcatttgtctaatacaataaaaactggcattaatacaaacctcaaaaaaaaaaaaaaaaaaaaaaggggccctttaaatttaaggggcccgttaaaaccccgtgaaaaaccctgagggggccttttaattgcccaccct

SEQ ID NO: 1315 - DNA, 457 bp, Homo sapiens
  misc_feature (1)...(457): n = A,T,C or G
ggccccgactgagaacatcgagacctgggaaanncgggtactccagctgagtgccggggcacctcctccagccagtcccactccagctccatgatcttcaggtagtgccgcgctgcctgcacctactgtggggaggggacggacgaccctgctcggacagccagctgcacccgcccacccagcggcgacattgtacagactcctctcacctctagatagcaaatagctctcagatggtaaacgtagtcgtttgatcccaaaactaccttggcaggtagttttaactctgatcctaacttaactcaatagccatagattttgtatacgttgtgcacaaaatccaaccagagcgcaagggctctcttgaaagaaaagtagtttctgtaccaattaaaggattgacgtggtctcagatattgatgcaaaaaatttttccaacgaactccgcattgtccan

SEQ ID NO: 1316 - DNA, 444 bp, Homo sapiens
ctctgctcgcgcgactcggcggagagggctggagactggagacccgcggggctggcgtgactgcgcattctagcggcggaggatgccgagggcgcgggccgggggcacctgccgtggccctggactggggcacagagggtgttgtttgttaatcgaaagatgcagacgcctgggcctgcgtcactcggctgccggggcgcactggggcgtctgtacccagcgtgcgggagggcacccagggccggacgcgcaccgcaggggtctttttttggccgcggggccgggcgggcgggtaatgacagccgggttgctggggagccgcgggccagatggaagcggggccgcaggtgagggacgtccctcgcgtagcgccactcagccgccggggccagagcgggagtcaaggtgagggcgcccccaggtggccgctctcggccgcggcgg

SEQ ID NO: 1317 - DNA, 464 bp, Homo sapiens
  misc_feature (1)...(464): n = A,T,C or G
naaaatcgatnnaccatgatgaccactcggaagngcggnggaattcctgctgagggagaaaatgatgcccaggttgggctccccggcccaccggtcgaggagaggcctgcgctgcacacgcgcagaccgagcatccgcgtcaagaggcgaagagagcgcgcgctccccacgtcctgcgctcctggctgccgggcattcgtctcagccgtgactctcgccaggccggggctggcgcgcccacgtctgaagagcgatgccccgggagatcatcaccctgcagctgggccagtgcggcaaccagattgggttcgagttctggaaacagctgtgcgccgagcatggtatcagccccgagggcatcgtggaggagttcgccaccgagggcactgaccgcaaggacgtctttttctaccaggcagacgatgagcactacatcccccgggccgtgctgctggacttggaan

SEQ ID NO: 1318 - DNA, 483 bp, Homo sapiens
  misc_feature (1)...(483): n = A,T,C or G
cttcgatctgcactactccagngnggnggaattcctgctgtttgtctacttcctcctgcttccccgccgccgccgccgccatcatgagggaaatcgtgcacttgcaggccgggcagtgcggcaaccaaatcggcgccaagttttgggaggtgatcagcgatgagcacggcatcgaccccacgggcacctaccacggggacagcgacctgcagctggaacgcatcaacgtgtactacaatgaggccaccggcggcaagtacgtgccccgcgccgtgctcgtggatctggagcccggcaccatggactccgtgcgctcggggcccttcgggcagatcttccggccggacaacttcgttttcggtcagagtggtgctgggaacaactgggccaaggggcactacacagaaggcgcggagctggtggactcggtgctggatgttgtgagaaaggaggctgagagctgtgactgcctgcagggtttcc

SEQ ID NO: 1319 - DNA, 446 bp, Homo sapiens
aggtttatagcctcttgtgtgatccttgataccagcaaactggttccaaatcccaggagttatcctcactccaccatggactcactgttgttgtagcacttttgttttcccagtagttaaatgctacctgtgcagctgacatcactggactagatctgggaatagatgaaataatgttgaaaacaaaactttagaggtgccttctggtatcagatgctgcaaggccttgagcatcagagtgtgttaagtcccatctactgtatcaaggccagagtgtggctccatgctcttaggaagggtttcccaaccacggggccagagcccaaaaggtttccccttccctaatatgctaatgaacgaaacatgtaaatctgttttcccctgttaggctagtcttactgtgatgagaagtgtacctggctttccttttcctgggtggagacagg

SEQ ID NO: 1320 - DNA, 482 bp, Homo sapiens
  misc_feature (1)...(482): n = A,T,C or G
atcgattcgcctacnccagngnggnggaattcattccctctcgagtggtttccactcaacaagcccagtgttggggactacttccacatggcctacaacgtcatcacgccctttctcttgctcaaggtactgtcccagggcccccactctctcctgtcatccccattctttgcacacctggcaggaaggtgatgctaagccctgtgtcctgactcaagcacgctcctgcctgctgctggggggtgaaggctgtgacagagcagcatgtccagggcctggggcccggggaaggcggagctgccggcggcctggagggatggaaaatatgccccaagaaagggcttttgatttgagcctcagcctggcgtgccagtgggggaagcagagaggtgttcaggtagaaggacctaaagacaaggctgtgcttgggaaaccgtaaaacatttggggaggctgaggcagaattgactggaggtccaggn

SEQ ID NO: 1321 - DNA, 479 bp, Homo sapiens
  misc_feature (1)...(479): n = A,T,C or G
ntcgagaccantanncagtcgtagtccctagtcagtgtggaggaattcgacagattcagcccaggatcagcctgtgaagatgaactctttgccagcagagaggatccaggaaatacagaaggccattgagctgttctcagtgggtcagggacctgccaaaaccatggaggaggctagcaagcgaagctaccagttctgggatacgcagcccgtccccaagctgggcgaagtggtgaacacccatggccccgtggagcctgacaaggacaatatccgccaggagccctacaccctgccccagggcttcacctgggatgctttggacttgggcgatcgtggtgtgctaaaagaactgtacaccctcctgaatgagaactatgtggaagatgatgacaacatgttccgatttgattattccccggagtttcttttgtgggctctccggccacccggctggctcccccagtggcactgtgggg

SEQ ID NO: 1322 - DNA, 464 bp, Homo sapiens
  misc_feature (1)...(464): n = A,T,C or G
ntctagatccctagtccagtgtggggaattccggggggcgagctggggctcctaggaaatgcctggcggtgacgcgctgaggctttgcaggccatggtgagctgggcgcttctgccaggtgtctgggggctgtgggtgttgggctcctcctgggggtgggggacgggggttcccaaccaggccaggaggggatccttagagagggaccctcagcacatgtgcagcagtggatggtggggngnnnntnnnnnnnntnnnnnnnnnnnnntnntgnnntntntnntnnttnnnnnttttttntnnntttnnntttttnnnttntcccctnntnnntttntnnnttnnttgtntntttttnttnttggggnntttttttnnaannttggtntttnttggttttnttttttgtgggggtttggtgggaaattttttgttgtttgggtttttgnggccttttgtgtttg

SEQ ID NO: 1323 - DNA, 484 bp, Homo sapiens
  misc_feature (1)...(484): n = A,T,C or G
atttgatcgagatccctagncagngnggtggaattctgaggctgtggctacggctgctccggagctggtggcgccgcgataggagagccgatggtcaagtggggtgagggagacccacgctggatcgtggaggagcgggcggacgccaccaacgtcaacaactggcactggacggagagagatgcttcaaattggtccacggataagctgaaaacactgttcttggcagagcaggttcaaaatgaagaaggcaagtgtgaggtgacggaagtgagtaagcttgatggagaggcatccattaacaatcgcagagggaaacttatcttcttttatgaatggagcgtcaaactaaactggacaggtacttctaagtcaggagtacagtacaaaggacatgtggagatccccaatttgtctgatgaaaacagcgtggatgaagtggagattagtgtgagccttgccaaagatgagcctgacacaaatn

SEQ ID NO: 1324 - DNA, 482 bp, Homo sapiens
  misc_feature (1)...(482): n = A,T,C or G
ctcgatatgcctagcccgngtggnggaattcgaagcttccctatcctcgtctggatggaatgaaacagaggttccctaaggccaagggactcgtggagcgcccatcccgggtggggtcccagaggtgagtgcagcttgcctcctgtccccaaggggcttgttctgttaggcctcctccagtcactgctggagtggggactctgactcctgtgttcacctcagagcccatgtacaggctagaggtgaggcttggcaacaacttctactaatacttagctttgtggcagagccagtctgaaggaggagaagcgctctcagccagcagggggagtgatgattatcatttcaggtagcaaggatatgtatttactatgtggggaaataatttgcaactttaatttgtttccaaagcattttgattggcttccttttcctttaaaccaaaaaattgtttaaatgtttaagggtcatgtggaacagct

SEQ ID NO: 1325 - DNA, 481 bp, Homo sapiens
  misc_feature (1)...(481): n = A,T,C or G
nttgatcgcgatccctagtccgtgtggtggaattcgaaatgcccaaggaaaaacgtgagcttcagtttcggcaaaaggtcttagcagtcacagactcacctgccaggaagggcaaggactctccctctaagcagagccctggggagtccacgaagaagcaggatggcctagtccagattgcaccaaacctgactgtgatccagttcattaaagtcttccccagggtgctgctgcagaccctacgccaccccatcttcctgctggtggtcctgtcccaggtatgcttgtcatccatggctgcgggcatggccaccttcctgcccaagttcctggagcgccagttttccatcacagcctcctacgccaacctgctcatcggctgcctctccttcccttcggtcatcgngggcatcgnggtgggtggcgtcctggtcaagcggctccacctggggccttggggatgcggtgcctttggcttgtg

SEQ ID NO: 1326 - DNA, 482 bp, Homo sapiens
  misc_feature (1)...(482): n = A,T,C or G
nttcgaganccnntnnnnattttagnatccctagntcagtgtggtggaattcctccagagggtgactccaggggcaggtggcttggaggactggccgtgcaaggaggcagcaaaggggcggccatctgcaagctgagggcagaggccttggaggaagcagccctgccagtgctggtaactgtgagtgcatctgtctctgttggtcaagccggcagcctggggcattttgctgaggccgccccagccgcctagcatagtcgccaataagtccccgaggttctggtgtgctctctggactagtttcctggggtggctgcaacaaattgccacaaacacagtggtttaaaccacgcaaatgtcgctcccgcagcctgcaggtcggaagtccaaaccaaggtgctggaagggctggttccttccggacccttcaggggagaatctttctgcctctttggcttcttgaggccccttcctggcattgg

SEQ ID NO: 1327 - DNA, 485 bp, Homo sapiens
  misc_feature (1)...(485): n = A,T,C or G
ntttgatcgcgatccctagtccagngnggtggaattcctgacccagggctgaaccttaggcctggctttgaccaaaggttccaggcagccacccggccagccagactccagggcagctcccggggcacatgctcacagcgggaggctgggagcatgggtctgcaggggagctcagggcaaatgtaggggcccctgtctctgggtggaagagcattaaaacactaggtgcatgaactctgtgttcagacagcctggctccaacttcagcttccccatttatcagccgtctgcctcggtaacccatggcctcagtttcttctgtgaagtgagccctcaaatgcttacccctcaagattatcgtgggaagcaacaagggcacagaggatgccctgggtgcatggtggccatggacacatggccggccgtgcttcctgagctccctggcttttggngagaagggagtggaggccangcttggngtgccn

SEQ ID NO: 1328 - DNA, 504 bp, Homo sapiens
  misc_feature (1)...(504): n = A,T,C or G
agcggnttnnnngggagtactgagacccctngnnanntactgagatccctagtccgtgtggtggaattcgacaaggccaggcctagccttgagctccgtcgggcagggccgccgggattggtgtccggcagagcgtgagcccagcgggctggagtcggcgagcgggagtgaaagaagaaaagctagagagcgaaggcaaagcccgaggagagagggccgcggtcggcggaggaatctgactgcacggttgcgtgcgctcacttccggagggctccctcaggcgggcggctccgctagtggctaaaggcaaagcattccggggcgcggcgcatgaagttgagcttcgtccctgctagccgccgctttctccccaaaaatacatcctagccttaatgtttatgcctccattgccccagttcttatctgttttgctcaatgtctcatagctacaagaaggcaatttctgacgaagctctccgtcccttccaaatggattattttggc

SEQ ID NO: 1329 - DNA, 387 bp, Homo sapiens
  misc_feature (1)...(387): n = A,T,C or G
ggcgggnnnggggggccctgagaccctnngactgatancataggcagagngcnggaattcgtgtcagcccttggtggtggccagggagaggcgcccggtgcagatggccccgggcggcccaggtcctctactgtgaaggagcagggagctgccgagggacacgagcctcagtgcggggtggaaggctctttgccttgtccaccagggctcagccaagccctgcagtgtgtccccgctcggggagggcccggccgagcgggcagggagagccagtcctgtcggctgggcccttggacggctgtcagttttgcacatgatgttcctattgtaactctcagagaccttaaaaagaagtttactgcaatgtgaaaaaaaaaaaaaaaaaaa

SEQ ID NO: 1330 - DNA, 430 bp, Homo sapiens
gggagccgctggattccctgaggacgcggagggctagccacagtgtagtcccagacatccttttcacctgcagcggctggtagtctccgcaccacccgctcccactcgggtcttctcccttcctctgagagctctgtggggagtgtgaaaccggagcgggatggagctggcctcctggagacactcatctccaggaagcagggcaggccaacctaattccctagagggccgaagagggaaaggaggggccctatgcttggacaggctcctcgcagctcggttccactttgtcctccacagctgagaaggtgagctccctgggcaagaactggcaccgcttctgcctgaaatgtgagcgctgccacagcatcctgtcccctggcgggcatgcagagcacaatgggaggccatactgccacaagccatgcta

SEQ ID NO: 1331 - DNA, 484 bp, Homo sapiens
  misc_feature (1)...(484): n = A,T,C or G
ngccccgcaatcgagatccctagtccagtgtggtggccctccaggcgagtggacgggtgatccccatcgatctggagcccgtggacaaggcccactgcctgagcctgaactaggagcacctcctagggactgcccaggcttgctctgctctgacccttctgctggccagtctgggcacctggcccctgagggagggagctgtcagccagggaaaaccgagaacaccatcaccatgacaaccagtcaccagcctcaggacagatacaaagctgtctggcttatcttcttcatgctgggtctgggaacgctgctcccgtggaattttttcatgacggccactcagtatttcacaaaccgcctggacatgtcccagaatgtgtccttggtcactgctgaactgagcaaggacgcccaggcgtcagccgcccctgcagcacccttgcctgagcggaactctctcagtgccatcttcaacaatgtcatg

SEQ ID NO: 1332 - DNA, 462 bp, Homo sapiens
  misc_feature (1)...(462): n = A,T,C or G
atgtgaccacatgcgattaacctaggaagngcggggaattcctagggagctcactgagggcgtgcaaagttgaaagtggcaaggctgttggagggtgtttggtacagggaagagggcagggggctaggggaggactcagaggccatctgcagggccaagccacaggaagggctgagctggaggtgggcagggctgctccaggcaggtcagagcagtgcagggggaggagaggagaaagggaggaagctgggctgtgtggtccccatgaaggcattcagagtccacctgcagacagcgagagccccaggaaggtttgcacagctgtgccccaagcaccttggcctcctctcagctcgccgaggaggcacgctagagccgccttcccggtgggagccctctgtcccacagggagcggggagccagctttgctggggccctacctgcatgcccagccttacccct

SEQ ID NO: 1333 - DNA, 502 bp, Homo sapiens
  misc_feature (1)...(502): n = A,T,C or G
nggatcgagatccntagtccagngnggttgaattcccccaggttcccattaaggatgtcgaggcggggaatggtgaggaagagtcgggcatgggtgctggagaagaaggagcggcacaggcgccagggcagggaagtcagacctgacacccagtacaccggccgcaagcgcaagccccgcttctaagtcaccacgcggttctggaaaggcacttgcctctgcacttttctatattgttcagctgacaaagtagtattttagaaaagttctaaagttataaaaatgttttctgcagtaaaaaaaaagttctctgggccgggcgtggtggctcacacctgtaatcccagcaccttgggaggctgaggtgggaggattatttgaggccaggagtttgagacctgcctgggcaacataatgaaacttcctttccagggagaanaannnnnnnnnnnnnnnnnnnnnnnnnnnnnnnnnnnnnnnngggccggaaggcctttttttt

SEQ ID NO: 1334 - DNA, 461 bp, Homo sapiens
  misc_feature (1)...(461): n = A,T,C or G
tggggatgnnnnncctgagtacantgcnattgtcgnggaattcaaaagaagagaaagtagacttccaggagcttctgatgaagttcttgccgtccaggttaataaagctggaccctgaggaggaagatgattcctttaataactatgaagtccagtcagaagccaaactggaaagcttcccaagcattgggcctcaaaggctgtcatttgactcagccacattcatggaatctgaaaagcaggacgtgcatgagttcctgctggagaacctaaccaacgggggcatcctggagctgatgatgcgctacctgaaagccatgggccacaagttcttggtaaggtggcctccaggcttggcggaggtcgtgctcancgtctaccacagctggaggaggcacagcaccagcctgcccaacccgctgctgagggactgcagcaacaagcacatcaaggacatgatg

SEQ ID NO: 1335 - DNA, 498 bp, Homo sapiens
  misc_feature (1)...(498): n = A,T,C or G
gcaatcgagaccctagtccangnggatggatttctttggaatgcctccccctctcccctactgggggatcaacccaaatcttgaggccacatagacactgggctctggatggacagaagcaggcgcagagagaaaagctcagctaggggtgggagaacccgggaggagaggtaaccccaagagggaagggtgcctcttccactacctctgctaccagccatccccaggacagtggttcctccccaccccgcccagccctgaggactactggttggggattgcctccggagcccagcttagggaggacagtagacagtaggctttggagttgggagacagggttccgcttctgctggtgtgactggaggcctcctcgtgcgctcagaaaggtggtgaggaggctcctccaatggaggccggccccacagcccacactgttcctgaggatgggttcttctgggtgaaggagaccaagcccctcgccgagggtgctgaaan

SEQ ID NO: 1336 - DNA, 463 bp, Homo sapiens
  misc_feature (1)...(463): n = A,T,C or G
ggggcntgnnnnnncatcgagttgcctatcnattgtcgnggaattaaacaagaccctcggagccaagaaacaacactgagagatccagagcttcgcgggcgccgtgaatgacgcgcgcgtggtgggcgagatcgccttccagctggaccgccgcatcctggcctacgtgttcccgggcgtgacgcggctctacggcttcacggtggccaacatccccgagaagatcgagcagacctccaccaagtctctggacggctccgtggacgagaggaagctgcgcgagctgacgcagcgctacctggccctgagcgcgcgcctggagaagctgggctacagccgcgacgtgcacccggcgttcagcgagttcctcatcaacacctacnggaatcctgaagcagcggccgacctgcgcgccaaccccctgcacagcagcccggccgcgctgcgcaagctggtcatcgan

SEQ ID NO: 1337 - DNA, 464 bp, Homo sapiens
  misc_feature (1)...(464): n = A,T,C or G
tgcggccggnnnnnntttgaatagcgttccctagtcagtgtcgtggaattccccatgggggtatgtgtattgggagtggaggagtggacgggtagattgactttttctcatgcatcaatctgttacaaggttcatggtttctatggggccagatgcatgagaggtcaaagcatgggcaataggggttaactgaacgagttgaatgctaggaagtcctcaggggagccaacgttccttgtaaagtgtgtagattttttgttttttaactaaataaaatcttggcactgacaaagttattcctgctgtttggagctacaccagaaccccttggaactctacagaggggtagaactaaagcaaaaaccatcattcaccctacagagtattataaatttcattttcacacagtaaaaagttcctaaattggaggaaacatagtgaattccacataatggttttaaata

SEQ ID NO: 1338 - DNA, 461 bp, Homo sapiens
  misc_feature (1)...(461): n = A,T,C or G
gcgcctggggnnnaactgagttgcctatcnattgtcgnggacttccccatgggggtatgtgtattgggagtggaggagtggacgggtagattgactttttctcatgcatcaatctgttacaaggttcatggtttctatggggccagatgcatgagaggtcaaagcatgggcaataggggttaactgaacgagttgaatgctaggaagtcctcaggggagccaacgttccttgtaaagtgtgtagattttttgttttttaactaaataaaatcttggcactgacaaagttattcctgctgtttggagctacaccagaaccccttggaactctacagaggggtagaactaaagcaaaaaccatcattcaccctacagagtattataaatttcattttcacacagtaaaaagttcctaaattggaggaaacatagtgaattccacataatgttttaaattattn

SEQ ID NO: 1339 - DNA, 438 bp, Homo sapiens
  misc_feature (1)...(438): n = A,T,C or G
ctcttcagatacatgttccggccatcccagcatacacgcagccgccaggtgacttcagcccagctgtggttccacaccgggctggacaggcagggcacagcagcctccaatagctctgagcccctgctaggcctgctggcactgtcaccgggaggacccgtggctgtgcccatgtctttgggccatgctccccctcactgggccgtgctgcacctggccacctctgctctctctctgctgacccaccccgtcctggtgctgctgctgcgctgtcccctctgtacctgctcagcccggcctgaggccacgcccttcctggtggcccacactcggaccagaccacccagtggaggggagagagcccgacgctcaactcccctgatgtcctggccttggtctccctctgctctgcgcctgctgcagaggcctccggaggan

SEQ ID NO: 1340 - DNA, 459 bp, Homo sapiens
  misc_feature (1)...(459): n = A,T,C or G
tgggctgnnnnncctgagtacctatcaattgncgnggacttcctcggngggtggctggcacaaagagcccaagattaaacgcggcgcctgggctggcgaggtcggggtcgtgtggtaactctccaggtgctcctcgctggatcccggggtcccagccccgccgccgcgccccgcccagctctgtccccgcagcctcgcgggctgccgggctttgtggttcgcccgtgccgctgggcccctgctgggggtgtcgttacgagcatgtgcagacagcagcccaagccttcaggataattccttcagcagcaccactgtaacagagctaattcatgatgtttacttctgggacctttgtagaagccactctaaacatcttttcaggaaaaaggcctgagagaaggggagagaggtgtgccaaagtgtgcatctgcaggccgaagatgaggcctggacttcctg

SEQ ID NO: 1341 - DNA, 482 bp, Homo sapiens
  misc_feature (1)...(482): n = A,T,C or G
gtgggtaccnnnaatggagaccaaattgagaccataggccangngcnggaattctgcagcgtggagtctgtgtgctgtggggaagcggcagagccccgtggatgtggagctgaagagggttctttatgacccctttctgcccccattaaggctcagcactggaggagagaagctcccgcctctcccacagctccggggaaccttgtacaacaccggccgacatgtctccttcctgcctgcaccccgacctgtggtcaatgtgtctggaggtcccctcctttacagccaccgactcagtgaactgcggctgctgtttggagctcgcgacggagccggctcggaacatcagatcaaccaccagggcttctctgctgaggtgcagctcattcacttcaaccaggaactctacgggaatttcagcgctgcctcccgcggccccaatggcctggccattctcagcctctttgtcaacgttgccagan

SEQ ID NO: 1342 - DNA, 503 bp, Homo sapiens
  misc_feature (1)...(503): n = A,T,C or G
nattgaganccntnggcagnggcaatgaagtccctagtcagngtggnggaattcgctcgagcggcccactgcagagcctggtccccagtgcagatggcgatgctgacaactgctgtgtccagatcatgggaggctacttcacgtggaccccagatggaatccccacactgtccaacatcaccattcgtatcccccgaggccagctgactatgatcgtggggcaggtgggctgcggcaagtcctcgctccttctagccgcactgggggagatgcagaaggtctcaggggctgtcttctggagcagcagccttcctgacagcgagataggagaggaccccagcccagagcgggagacagcgaccgacttggatatcaggaagagaggccccgtggcctatgcttcgcagaaaccatggctgctaaatgccactgtggaggagaacatcatctttgagagtcccttcaacaaacaacggtacaagatggtcattgaagcctgctct

SEQ ID NO: 1343 - DNA, 444 bp, Homo sapiens
  misc_feature (1)...(444): n = A,T,C or G
ntcgagatccctagtccatgtggtggaattcaccacgccatgtgagtgcagctgggggcacaggcgtcagctacagagtgatgaatgagttaactgcctgcttataaataggctgatatggtcattatgcttctctcaggttgcatcctttaggaaccggtatcttcatttagaaatcctgctcttcctttatcccttcgtttcatgcagttttatctccgtcttccacttctgtgtcttcctggctggagtagctttatctgttgtctgaggcatccggggcacaccccatcatttcaggcttagccgtttctaagtcgaaggctgcagtcactgagggcttcaggcccccctcgcaaagcgctgcacagctgggttctcgtccgtcccgtgagcaggcatttgtgattgctgtcacatcgtcaccctcacgtggtgtctttc

SEQ ID NO: 1344 - DNA, 498 bp, Homo sapiens
  misc_feature (1)...(498): n = A,T,C or G
nttgagaccctannnanngggtgtgagaccctgtccangcggtggaagtcgacagcatatgctgtggagaaggcagaggccatccataacaaggagcaggaggtgtctgccgcgtggcaggcgctgctcgatgcctgtgccgggcgccggacccagctagtggacacggcggataaattccgcttcttcagcatggcccgtgacctcctctcctggatggagagcatcatccggcagatcgagacccaggagaggcccagggatgtctcctctgtggaactgctcatgaagtatcaccagggcatcaatgcagagattgaaacccggagcaagaacttcagtgcctgcctggagcttggcgagtccctgctgcagcggcagcaccaggcctcagaggagatccgcgagaaactgcagcaggtgatgtccaggaggaaagagatgaatgagaagtgggaagcccgctgggagcggctccgcatgttgctggaggtgtgc

SEQ ID NO: 1345 - DNA, 465 bp, Homo sapiens
  misc_feature (1)...(465): n = A,T,C or G
tgcggcagnnnnnnnactgagtacactaccntgtgtcgnggacttcagattgagtgcttggccgtccctgccattatcgcgtaacgagagactgcttgctgcggctgagacaccagaggtgcatctccagcagcaatggcagtgacggcgttggcggcgcggacgtggcttggcgtgtggggcgtgaggaccatgcaagcccgaggcttcgggtcggatcagtccgagaatgtcgaccggggcgcgggctccatccgggaagccggcggggccttcggaaagagagagcaggctgaagaggaacgatatttccgagcacagagtatagaacaactggcagctttgataaaacaccatgaagaagaaatcgttcatcataagaatgagattgagcgtctgcagaaagaaattgagcgccataagcagaagatcataatgctaaaacatgatgattaagtgcacacn

SEQ ID NO: 1346 - DNA, 460 bp, Homo sapiens
  misc_feature (1)...(460): n = A,T,C or G
tggggcgnnnnnnttgaattgcattccctagtccgtgtcgtggaattcagagggacgtcttcctgtatagagcgtacctggcgcagaggaagttcggtgtggtcctgtatgagatcaagccctcctcggcccctgagctccaggccgtgcgcatgtttgctgactacctcgcccacgagagtcggaggtgaggccccagagaatgggttggcctgaggcgcggggccatcttcaaggcctgttggttatgaacctgggtgggtgggggcatggcgtgcagcgcacagcatccctcagattaggcgcctctcccctctgctcccctgctgctttgtgcctcagtttccctcacctgcacagcagtggggggctggtgatggatcctgcttcaaaggggagggtcagagacagtgctgtgtgtgcacacgccctcatggaccacaaggcactctctgaacct

SEQ ID NO: 1347 - DNA, 474 bp, Homo sapiens
  misc_feature (1)...(474): n = A,T,C or G
gggagggcgggggngncnnnncctcgagattcatagtcagtgtgcgggaattcgcagcggcgacctcgccgggcaatagcagatggggcggcagcaaccctgcagccgccatcttgacaacaaccgacggcgcgtccttgacaacggaaacctgggaggagctacaggtcggggcgggacgatgtgcccgaagcagccaatcgcaggctccggcggcccctccagcttcgagcggcgggtggcaacccaagcatccctagggacccgggttgttgcgcgaggggtgagctgagtgttgttttagagcctgatgcagttctgcctccctttttatgagagtgtttttgtggcagtaccgacagtgacgaaagacagatgtaaaatcctcagatacaggcaattgccaccgggaggagtctgcagtgattgtctgggggacaatttggagttgaatttgttaaactactgaatcct

SEQ ID NO: 1348 - DNA, 498 bp, Homo sapiens
  misc_feature (1)...(498): n = A,T,C or G
agtgccnnnnnaggcggccactgagaccntagatgatgacggtagnaccngcgcggaactcgtacgctgctgtgaatcacatatcccaactgtcagaggagcatgtgctggaggtggtgagagccaactatgacacgctcacgctgaagctgcaggatggcctggaccagtatgagcgctactcaaagcagcacaaggaagctgccttcttcaaagagctggttcgatccattagcaccaacgtccggagaaacctggccttccacacactcagccaagaagtcctgctcaaggagttctccactatctcctgaggccacgcctacctgagcagcctctgactgcccttacccatgaggatcatgggctggagggggagcgaggggagagggggctgcccccgaggttggagagaaacacagataccaagttctcttggtgaagaccgcacttcaatggagcttgcgcagcaggggcaggagggtcaagccagggatn

SEQ ID NO: 1349 - DNA, 495 bp, Homo sapiens
  misc_feature (1)...(495): n = A,T,C or G
tgtgccnnnnnngggcggccactgagaccctcaactgatgatctaggacgagcggggaattcgatctagggtcacgacacaccgcccaaccttacggcggagaacgactgccggcggctgcactgctccctgagagacttgagctccctgctgcaagccgcgggccgcctggccgagtactttatcggggatgtgtttgctgcacggttcaatgatgccctcacagtcgtggaaaggttggtcaaagtcactctgtacggatctcagataaaattgtacaacattgaaactgctgtgccatcagtattgaaacctgacctcattgatgtgcatgctcagtccctggctgcgctgcaggcttactctcactggttagcacagtattgcagtgaagttcaccggcagaacacgcagcagttcgtgacactcatctctactaccatggatgcaatcacacctctaatcagcaccaacggccaagacaagctgctgctt

SEQ ID NO: 1350 - DNA, 497 bp, Homo sapiens
  misc_feature (1)...(497): n = A,T,C or G
natagagacccataggcagngnggtttgagtcccgtattccaggctgngaagagcttcaggaacagtgcctgcttggatcaccctgggacctttccttctctttcctgtgactttggagtcctctgagagatttgacctaaggaatcagtaggttggaatcaaggaatcccagagctggaagggactgtgtgcggttttcttgccatccttgcccctgccttacagatgccaatccaacctggttagttccaaaacccagtcctgtgtctgaaggatactaaggagcacaccacctacatcctgaccacccatctccatgtctgaaaattccccacctcccagaaggttctgccctgacattccagttcaagctcagtggaaatgatgggaatttggaacttgaggaacatagtangggtgatggatccataaacatgtcaattttgaataaaatatcttaagcctgtgtttgagatatacactggttgctattggg

SEQ ID NO: 1351 - DNA, 494 bp, Homo sapiens
  misc_feature (1)...(494): n = A,T,C or G
tgggcccnnnnagccccccaatgagaccctagtagtaggtgtaannccggcaccagggaagaacacctacctggagaagattgacggcttccgagcctattacaagcagtggctgacagtgatgcccgcagaggaaaccccgcacccctggcagaagttccggaccaagccccagggggaccaggacaccggcaaggaggctgatgacggatgtgcccttgggggcaggtgatgggagcacagctggaacaatgtgctcggcccccagtgctctgtgggagccccaggacaagtgagctggtgtcacctcctgcctgggggaagagccaggccctgaggaacagccgcagcgtgtcacaggtgttggtgaggacacacactangcccaaggtgcctgtgctcccagcaggtccaagtgcagctccagccacctttgcgtgtcaccttcacgggacttccagctccagctacctttgtgtgtcacctcacacacc

SEQ ID NO: 1352 - DNA, 471 bp, Homo sapiens
  misc_feature (1)...(471): n = A,T,C or G
agcccaggggnnnnnnnnnttcgagattcgatatcagtgtggtggaattcgggcaacggtgggaatcgccatgtgggctggaccagctaaaggctcgcatttgcatattaaaggttgccaagccgggtctaagagccagggctttcacgctagacaagaaacattttttggagctgcaaaaaatgcttccaaggaccctttttcctctctctctctctctcttttttttttctttttgggaaagggagtttcactcttgttgcccaccctggagtgcaggggcgggatctccgctcactgtaacctccacctcccgggttcaagcgattttcctgcctcaccctcccgagtagctgggatgacaggtgccacaggtgcccaccaccacgcccagctaatttttgtatttttagtaaagatggggttttgtcaagttggccaggctggtctcgaactcctgacctgaagtca

SEQ ID NO: 1353 - DNA, 451 bp, Homo sapiens
  misc_feature (1)...(451): n = A,T,C or G
nattgaactgcaagacatctgnccgngcggnggaattccaggtgttgattccaaaaatgacgtccagagatctgctcccattcaaacacagcctgaggcacgaccagaggcagaactgcctaaaaaacaggagaaggcaggctggttccgatttcccaaattagggttctcctcatctcctaccaagaaaagcaaaagcaccgaagatggggcagagctggaagaacaaaaacttcaagaagaaacaatcacgttttttgatgcccgagaaagtttctcccctgaagagaaggaagagggtgaactgatcgggcctgtgggcactgggctggactccagagtgatggtgacatccgcggcaagaacagagttaatcctgcccgagcaggacagaaaagctgacgatgaaagcaaagggtcaggcctgggaccaaatgaaggctgagaggtn

SEQ ID NO: 1354 - DNA, 447 bp, Homo sapiens
  misc_feature (1)...(447): n = A,T,C or G
aattgaatagcactccatcgngcggnggaattcctccatgcatagttttagacaaaaaaagatgtttcaataaaattactgtcttgtaatataaatgttgtccacttcccttttccacaggcctagaacagttaaagggaacataatttgtttaggctcccacataaatgtgaatctggccaacaactttggttcatcctttagtgaattagaggatttggctaccctgagtatatttatattcatttcttctgttctccttctgttattatacttaatcttctaaactaaactaatgtgaacagtagggaagcaagggcccaaatgcataagtttctttgcactgttgcacttacttaatacaaataaatgttttttaaagcttttgtagtatgtttttatgagttaacatcctaatgtggtaggtattaagtaatgtgctgtcat

SEQ ID NO: 1355 - DNA, 483 bp, Homo sapiens
  misc_feature (1)...(483): n = A,T,C or G
ngatgagtgnnccaatcgagaccatcatcgagggcntgagaacctccagacttcctctggctccccaaggctgcaaagcaaaacagactgtgtttaactgctgcagggtctttttctagggtccctgaacgccctggtaaggctggtgaggtcctggtgcctatctgcctggaggcaaaggcctggacagcttgacttgtggggcaggattctctgcagcccattcccaagggagactgaccatcatgccctctctcgggagccctagccctgctccaactccatactccactccaagtgccccaccactccccaacccctctccaggcctgtcaagagggaggaaggggccccatggcagctcctgaccttgggtcctgaagtgacctcactggcctgccatgccagtaactgtgctgtactgagcactgaaccacattcagggaaatggcttattaaactttgaagcaactgtgaattcat

SEQ ID NO: 1356 - DNA, 471 bp, Homo sapiens
  misc_feature (1)...(471): n = A,T,C or G
aggcaggggggnnnnnnnnttcgagtttcactagtccgtgtggtggaattcgcttcatgggtggacagtcaatgcaggctttgatcactttggtggaaagggccaggcactcagaagtatcccatgcttgaaattcttaattttatctttgaatttgtgttttttaagtgaagtccaatgggacaggttctcagttgccctggcccactcgagctgccctggggcttctccctaccctccctgatcccactcttgcccaggcagcgttgggattgcaccctccgaatctcagggcagggtggctggtaccacagcacattangcaggcaagtgggcaggggcctctcacctgtcccatccctgcagggaagttgcaatccattagggctgtagtaagggggagtctgacttctgtgctctgctccaggccgggaattttgcactgggccttgtaaatcatgtagatggcac

SEQ ID NO: 1357 - DNA, 440 bp, Homo sapiens
tgtgagcactgcactttggcctgttgggttatgcagtaagagagcagggatggtggtagtggctccatatggattcctgcaaaaagtggtgtgggtgaatactggatgccccgttatgttggaacttctaaattcctgagctaaattagaaaaaaagaagcagctcttgaaaggaatgatgttgtgaaggagagatgcttggagaaaccagtatacaacccttataaataatttgatactattggttttgatgcctgttccttttaaacagttgttgattgaaatgacacagccagttggggtggctcaagcctgtaatcccattactttgggaagcggaagtgggtggatcacctgagatcgggagttcaagaccagcctggccaacatggtgaaaccccatctttactaataatacaaaaattagccaagtgtggtgg

SEQ ID NO: 1358 - DNA, 468 bp, Homo sapiens
  misc_feature (1)...(468): n = A,T,C or G
nttgagtccctatcagtgtggggaattttaaagtgctcgctggtcggctcctccgtgccctgggccttcatgcagggcgagatcgccaccatccttgctggagacatcaaatttaagaaagaacgggacccctatgctaccactgcctccaggctactgccctctgcccctttgccacccaccgctgccgcggataaattattccctccccgacccagcccagtgccacctctatctgtgtacatactcccttcttccacccagatgggtcccctggggtagatgcattgtgggtggggggagaaagcttgtggctcctgtccgagggggtgtttggggtcccttggcccctccagtttccctctgtcctccttggcttggctttgctgctgcttgtaggtggaggagaggtgcccccctcctccttgagaagggacctcctgataactcgctctttataaacgaggn

SEQ ID NO: 1359 - DNA, 476 bp, Homo sapiens
  misc_feature (1)...(476): n = A,T,C or G
aaaaaaaaaagnnnncccccnntttcgagattcctagtccatgtggtggaattcgcggatggagcccgcgatggagccggagactctggaggcgcgaatcaatagagccacgaaccccctgaacaaggagctcgactgggccagcatcaacggcttctgcgagcagctcaacgaggactttgaggggcctccactcgccacccggctgctggcccacaagatccagtccccacaggagtgggaggcgatccaggccttgacggtgagaaggggagaggccaccatccgtcccccgccatgtgacgacaccaagggaggccaagactgaggttcttggggtccataaggctcttcagagcccaagagagttgtgctaagatggcccaggatggaggtccgggcctgccccaagggtcccaccacagccagcgggctggcctcccaccccagcatccatacacgtaggcctgttgctg

SEQ ID NO: 1360 - DNA, 466 bp, Homo sapiens
  misc_feature (1)...(466): n = A,T,C or G
gacggccaganaantttgaactgataacctacgcagngngcnggaattcctctccgtagaggatgacacagggcaccggatcatcatcgaggatctgctggaggccacccgcagccctgaggtgggcatgaggcaagctgctgccatcatcctcaacatctactgttcccgctcaaaggctgactacaccagccacctgcggagcctggtctcgggcctgatccgcctcttcaatgactccagccctgtggttctggaggagagctgggatgccctaaatgccatcactaagaagctggatgctggcaaccagttggcactcattgaagagctgcacaaggaaatccggctcatagggaacgagagcaaaggcgagcatgtgccaggattctgcctcccgaagaagggagtgacctccatccttccagtgttgcgggaaggagtcctgactggcagccctgagcag

SEQ ID NO: 1361 - DNA, 487 bp, Homo sapiens
  misc_feature (1)...(487): n = A,T,C or G
nggcccgnggggnngncaatgagaccataggaactgagaccatttcgccatgcctgagggtagccggattcctcaggcccgggcgctcctacagcagtgcctgcacgcccggctgcaaattcgcccagccgatggggacgtcgcggcccagtgggtggaggtaacgtcagcccggcagctctcgttatcctccggcgtgcggggcggttttttccgcgttgtctcggtgactcgtccgctctgtgtctccctctgagaccggcggtccggccgcggggataccgggtcagcttgaagctggccgcggtggcctgcctggctgcgcttgtcttttcggtccagcatcaccgttccccagcgccagttgtagcacccgagaggaagagcgtgtctcccttcttggggggaccacaggtccaaagaggactggtgatctacgtgtgctttntcaagggagctgataaagaacttcttcccagaatggatg

SEQ ID NO: 1362 - DNA, 491 bp, Homo sapiens
  misc_feature (1)...(491): n = A,T,C or G
gcctgcccctcggttcccttcgaagncngganttgagtacgntcgcaaancccgngggcagcaacgggggccccctctccaacaagcgcacctcatttctcacgtgggagccgctgcccagagagctgaggtgacagagcttggggcgcagagctgctccctccctgcagccgcacagcaggccggaggcacagccggcgagagacggccactcgctttggagcggcggcgaggccggcgccttcccgggcaccagggactgcgtggcttggccggaaatcaggctagaagcagctccgggaagcacagcccttatcccagcgccttcccacactgtggcaggaatagcactggcggcccacgcgcttgtcagggaacagaacagctctcgcccgacgcctggcaggggagcagggaggctgcagcttccccagcgaccagctggttcccaggctggcggactccacggaccggctccgcgtctcctctct

SEQ ID NO: 1363 - DNA, 491 bp, Homo sapiens
  misc_feature (1)...(491): n = A,T,C or G
cgcatataanncganngannncaagggaaannaactgagaccctactgagaccatcgnanagngcggnggaannngnggactgtggagccgggccaagaagccaagaggggcattaataccaagtatgaaaccacgattttctgatactcgccgtgctcctgtcctcgcggtgccttgctcgccaagcggtcccggagcaggctttccttcgcgcctccgcgtccacccagcccaggaggaagactgctctgagcgtgcggccttgttacgggcgaaaggccactggccattcctggggaagttctttctgcaccagtgatggaaaacgcaagactttccagtcgcaacccctgagaggcgtgagttgagatgggttttccctgatgctcccgactcccctccccaccacctaccaaggtatttctgatgactccgccccagtacttgctttgcttcatttggggaaaataataccttttctttaaaaaaa

SEQ ID NO: 1364 - DNA, 453 bp, Homo sapiens
  misc_feature (1)...(453): n = A,T,C or G
aatagatttccataacctagtccangtggtggaattcccgatgaagaaagtgcgttttctgttttcatttaattcagttttgtgttaagggtggaacaaagctctgttctagagggaaagttaggaataggcctcccagaggatactccagacagttgacaagcatcgcagcccctgtcaggtcaaggaattttaacctgggagactcctgaaaatcagcctaatgtctgggggcagctggcgctgaggctgtgcagatgtgtatggccttgggtcacagctccctactggggctgcagcctttagaccctgggtctgggatccacgtctagggaccactctggcttctgtgcatccacccaggcccccgacccatcactgccacattctccgggtcatggccgagcttgacctctgcatccatggtgacggaggtggcaatgacatcatcaa

SEQ ID NO: 1365 - DNA, 510 bp, Homo sapiens
  misc_feature (1)...(510): n = A,T,C or G
tgggtctnnnncctgattccctggcannggcngnaaactgagtccgtgcgtaannggcgnggaantccaatgtcacacacagccacaaagagaataatagtcgcacagtcacatgcagaataacacagttacagccacgcacatgagaataacagtcacacacagtcacacacacagaataacacagtcatacacacagagtcacacacagaataacagtcacacacacagagtcacacacagtgaataatagtcacatacacagtcacacagaaaatagtcacacacacggtcacacagagaataacactgtcacacattgaataacagtcacacacagtcgcacacagaataacagttacacatagtcacacacagtcacacacaaagaataacagttacagtcacatacagaataacagtcacacacagacgcgacaccagcctgcgaccttgcccagggtggcagaaggagctggtggcagaggagctggtggcagaggttcgggn

SEQ ID NO: 1366 - DNA, 425 bp, Homo sapiens
  misc_feature (1)...(425): n = A,T,C or G
ggggagtgttgggagcctcctccccaccccacctccctcacttcactgcattcctttctctctccttctggcctctcattttcttacactctgacatgaatgaattattattattcttctttttcttttttttacaacatgnggaatagaaacaaattcatttaaaccaacttattattattattttttacaaaatatatatatggagatgctccctccccctgtgaaccccccactgcccccggggggctgagtctgtgggcccattccgccaagctggattctgtgtacctacaacacaggcatgactgggatcccgtgtaccgagtacaccacccaggtatgtaccaagtaggcacccttgggcgcacccactgcggccaggggtcggaggagtgttggcagcctcctccccaccccacctg

SEQ ID NO: 1367 - DNA, 460 bp, Homo sapiens
  misc_feature (1)...(460): n = A,T,C or G
ntttgaaaactgatgaccatctgacagngcggnggaattcagaaccatgataagaatctcttacgcaagatcctggctggagactatgagtttgactctccatattgggatgatatttcgcaggcagccaaagacctggtcacaaggctgatggaggtggagcaagaccagcggatcactgcagaagaggccatctcccatgagtggatttctggcaatgctgcttctgataagaacatcaaggatggtgtctgtgcccacattgaaaagaactttgccagggccaagtggaagaaggctgtccgagtgaccaccctcatgaaacggttccgggcaccagagcagtccagcacggctgcagcccagtcggcctcagccacagacactgccacccccggggctgcaggtggagccacagctgcagctgcgagtggagctacctcagcccctgagggtgatg

SEQ ID NO: 1368 - DNA, 508 bp, Homo sapiens
  misc_feature (1)...(508): n = A,T,C or G
tggctctnnnnccttgattccctccgnannnncnnnnaactgagnacccctggacagngncgnggaattcgtccagcttcccggtgctgaaaaccggagggctcgtcatccaccactaccatgtaagggccatgagaagggctcatcctggcgcagcgcggacatggaggaggacttattccagctaaggcagctgccggttgtgaaattccgtcgcacaggcgagagtgcaaggtcagaggacgacacggcttcaggagagcatgaagtccagattgaaggggtccacgtgggcctagaggctgtggagctggatgatggggcagctgtgcccaaggagtttgccaatcccactgatgatactttcatggtggaagatgcagtggaagccattggctttggaaaatttcagtggaagctgtctgttctcactggcttggcttggatggctgatgccatggagatgatgatcctcagcatcctggcaccacagctgcattgcgagtgg

SEQ ID NO: 1369 - DNA, 484 bp, Homo sapiens
  misc_feature (1)...(484): n = A,T,C or G
nggnncgaatcgaganccctattccagaatcgaagaccctagtcagtgtggcggaattcactggctttaagcctgggaaggaatttttcccattggatgagtcgggcaatgtggttcccagtgacaccaacattctggacacgtgggcggccatggaagagctggtggatgaagggctggtgaaagctattggcatctccaacttcaaccatctccaggtggagatgatcttaaacaaacctggcttgaagtataagcctgcagttaaccagattgagtgccacccatatctcactcaggagaagttaatccagtactgccagtccaaaggcatcgtggtgaccgcctacagccccctcggctctcctgacaggccctgggccaagcccgaggacccttctctcctggaggatcccaggattaaggcgatcgcagccaagcacaataaaactacagcccaggtcctgatccggttccccatgcg

SEQ ID NO: 1370 - DNA, 207 bp, Homo sapiens
  misc_feature (1)...(207): n = A,T,C or G
ctttggannnancgccactgnnaacagcatnctgngccaaagacggntcttctccaggctgggggccacgtctgtgaccagggcctgcaccacgggcagccgcaggtgggacaagtgccacgtggaagtcgtggacactccggacattttcagctcccaagtgtccaagacagatcctggctagaggagagaagtcactgctacctg

SEQ ID NO: 1371 - DNA, 496 bp, Homo sapiens
  misc_feature (1)...(496): n = A,T,C or G
tggatgctnnnnccttgattccctggcagngngcggaaactgatacgtgcggatgcctcagcatgcctccagaagcagagaaagaacaaaagcactggaaccggtctccggttggcacactatgacttggccatcagtgttgctttgcaatggctggatccctcagaagacttaacttggctggagtgggaggaactgaaaataccactccatggcagacccatatatccaaatcgtagagaacgagaagctatgattttatcatcttatgctggaatcttaatgaacagtatcccgattgaggaagtctttaaaatttatggggctgattcttctgccgattctggtaccatcaaggttccccgagtttcatctctccgcctctccttgcacccctttgccatgttaacagcacccaaagcagcagcatacgcccgcaaacaggtagagacggggtttcaccgtggtctcgatctcctgacctcgcgatccgccc

SEQ ID NO: 1372 - DNA, 491 bp, Homo sapiens
  misc_feature (1)...(491): n = A,T,C or G
nggcgagggccnaattgagaccctagttagtgtgccgtaattcggngatcccaggccatggatgctccccactccaaagcagccctggacagcattaacgagctgcccgagaacatcctgctggagctgttcacgcacgtgcccgcccgccagctgctgctgaactgccgcctggtctgcagcctctggcgggacctcatcgacctcatgaccctctggaaacgcaagtgcctgcgagagggcttcatcaccaaggactgggaccagcccgtggccgactggaaaatcttctacttcctacggagcctgcataggaacctcctgcgcaacccgtgtgctgaagaggatatgtttgcatggcaaattgatttcaatggtggggaccgctggaaggtggagagcctccctggagcccacgggacagattttcctgaccccaaagtcaagaagtattttgtcacatcctacgaaatgtgcctcaagtcccagcc

SEQ ID NO: 1373 - DNA, 482 bp, Homo sapiens
  misc_feature (1)...(482): n = A,T,C or G
nggnnnngattgagtccctagtccangtggaggaacctctgccgtgtgctggaattcgaatgagacaggtattgatgccctttggggaggaggtagtcaaagaaggcctaagggtaaatgattcctgagaggcttgggatgttaaaggatggatggtgttcaccaggtggttctgggacagggtgttgttcagggcatggggaggccttgaatgagatgggactgcatgtgaaaagggaggatgaaagataaagcatcacatggtccaagagaagttagacaagttggtgttaaatcataaaggatggattttgggaaatggcagaaaatgagcaggaagcagtaagtaggagccagataataagcagttgtatcaataatcacttattcatcccatgcctaggaattgctgaccactcccttctagaaacacatttctcctttgcttccacgataccatattctgcttggtttcctcttac

SEQ ID NO: 1374 - DNA, 493 bp, Homo sapiens
  misc_feature (1)...(493): n = A,T,C or G
nggcggaggcnccccatcgagaccctagttagtgtgccgtaanttcgacgacaggacagaaaccgcgatcaacaacctcaaccccgccttctccaagaagttcgtgcttgactaccacttcgaggaggtacagaagctcaagttcgcgctctttgaccaggacaagtccagtatgcggctggacgagcatgacttcctgggccagttctcctgcagcctgggcacgatcgtctccagcaagaagatcactaggcctctgctgctgctgaatgacaagcctgcggggaagggcttgattacgatcgctgcccaggagctgtccgacaaccgcgtcatcacactaagcctggcgggcaggaggctggacaagaaggacctctttgggaagtcagacccctttctggagttttataagccaagagacgatggcaagtggatgctggtccacaggactgaggtgatcaagtacacactggaccctgtgtggaagccc

SEQ ID NO: 1375 - DNA, 499 bp, Homo sapiens
  misc_feature (1)...(499): n = A,T,C or G
ggtgtnnnaatggatgcctcggagnggcnggcctgagaacctaggccangncgnggaattcccagaagaggcattccagtggcagcatggatgaccggccatccctctctgcccgcgactacgtggagtccctgcatcagaactcccgtgccacccttctctatggcaaaaacaacgttcttgttcagccgagggacgacatggaggctgtgccagggtacctgtccctgcaccagacggctgacgtcatgaccttgaagtggacacccaaccagctgatgaacgggtctgtgggggacctggactatgagaagagcgtctactgggactatgccatgaccatccgcttggaggagattgtctacctgcactgccaccagcaagttgacagcggcgggacagtggtattggtcagccaggacgggatccagaggccgcccttccgcttccccaagggcgggcacctcctgcagttcctctcgtgcctggagaatgggcn

SEQ ID NO: 1376 - DNA, 439 bp, Homo sapiens
ccccacaccgcactgcaccgcaccgcaccgcaccatacctcgccacatctcaccacaccacaccacaccacacctcactgcccacacacggcgcaggctgcccgcctcctggagagcacacttcagctgaaacagtaaagcctgatgggtgcaaatggaacctggatgtgtgcacgtgtgtcccaggtagggacggcacaggagggtgcatggggcgtgggggagctgagcaagggtcgctcacttagaaatgtctttggaatggtgtttaactaatgctgctggcggacatcctaaaaccagatgcatcctcagaggacgagtctactaattattgcctttgttgttgtattacaaatctgcataaaatacctcatttcaaatcaaatcttacaaatttagaagagagatatgttttccgaacacagtggaagccctt

SEQ ID NO: 1377 - DNA, 481 bp, Homo sapiens
  misc_feature (1)...(481): n = A,T,C or G
ntttgaaaccatnnnnannatcgtagaccatagtccatgtggnggaattcgctggtgatctgacaggagaaactgtgttgaagccccatgaggaagaggagggtccgtccttgaggagtttctgatatgaccagggacccacgagttgggtggtcatctaagtcctcaaaggaagcaagagtaaaacatctcaggtgtttacctgttcttgtccttcagagtaccaggaccaggtgaacacactgccccttgctactcccttccaccatcttttccacttgaccctcagaaatttcttacccaaaggttgggcccagtggctcatgcctgtaatcccaatgctttaggaggccgaggcaggaggatcacttgaggccaggagtttgagaccagcctgagcaacacagcaagaccccatctctactaaaaataaaataaaataaatagccagacatggcggtgtgtacctgtagacccagct

SEQ ID NO: 1378 - DNA, 469 bp, Homo sapiens
  misc_feature (1)...(469): n = A,T,C or G
natccgagnccnttnccangtggtggaacttctgatgatgtcaaatggttgctggggctggcagcaaagctgggagtgaactacgtgcaccagttctgtgtgggggcagccaagggggtgctgagcccgtttgtgctgcaggagatcgtcatggagacgctgcagcggctgagtcccgctcatgcccacaaccacctgcgtgccccggccttccaccaactggtgcagcgctgccagcaggcatacatgcagtacatccaccaccgcttgattcacctgactcctgcggactacgacgactttgtgaatgcgatccggagtgcccgcagcgccttctgcctgacgcccatgggcatgatgcagttcaacgacatcctacagaacctcaagcgcagcaaacagaccaaggagctgtggcagcgggtctcactcgagatggccaccttctccccctgagtctttcaccctt

SEQ ID NO: 1379 - DNA, 484 bp, Homo sapiens
  misc_feature (1)...(484): n = A,T,C or G
ntttgagaccactagnccagngtggtagatccctagtccagcgcggtggaattcgattaaagggagcgcacttccgctgccctttttttcgccagccttacgggcccgaaccctcgtgtgaagggtgcagcacctaagccggagcggggtagaggcgggccggcacccccttctgacctccagtgccgccggcctcaagatcagacatggcccagaacttgaaggacttggcgggacggctgcccgccgggccccggggcatgggcacggccctgaagctgttgctgggggccggcgccgaggcctacggtgtgcgcgaatctgtgttcaccgaggaaggcgggcacagagccatcttcttcaatcggatcggtggagtgcaacaagacactatcctggccgagggccttcacttcaggataccttggttgcagtaccccattatctatgacattcgggccagacctcgaaaaatctcctcccc

SEQ ID NO: 1380 - DNA, 492 bp, Homo sapiens
  misc_feature (1)...(492): n = A,T,C or G
aggggagtnnccncatcgagaccctatttagtgtgcngtaattcgtctgagctctgcgagaaccttgaggccccagcgctggccaccaaacagacttacgtcacttacaccaaccatgcaatctagcgagtccatggagctgagcagcaggaggaggagccgtgaccctgtggaaggtgcgtcgggccagggccacacccaagggcccagctgtcttgcctgcccgtgggcacccacggacgtggcttggtgctgaggatagcagagcccccagccatcactgctggcagcctgggcaaaccgggtgagcaacaggaggacgaggggccggggcggtgccaggctaccacaagaacctgcgtcttggaccattgcccctcccggccccaaaccacaggggctcaggtcgtgtgggccccagtgctagatctctccctcccttcgtctctgtctgtgctgatggcgacccctctgtctgtctccagccctgtc

SEQ ID NO: 1381 - DNA, 417 bp, Homo sapiens
ggtaccgatcccatccttctacaggggaaccacaggacagcaagtatttatgtggaacttagttctcaagataaggaacttgaagcagagtgactaagcaatttgcccaagatgatcagcttgtgaaactatggaatgcagatttaagaccaagaagttcaaatccatggtctatgcacttcatcgtcatgctatgcttgaactcacaagatagagtctcatttctgtcaccccatgttggagtgcggtggcgtgatcacggctcactgcggcctcaaagtcccgggctcgggtggtcctcctgcctcagctgctagagatgggatttcgccatgttggccgggctggtctctagctcgtgacctcaaatgatccatctgcctcgacctcccaaagtgctgagattacaggaaaaat

SEQ ID NO: 1382 - DNA, 490 bp, Homo sapiens
  misc_feature (1)...(490): n = A,T,C or G
aggcgcgcncccccatcgagaccctagttagtgtgccgtaattcctcggcttactgcaggctctgcctcctgggttcactccattctcctgcctcagcctcccaagtagttgggactataggcgcccgctaccatgcctggctaattttttttgtagtttttagtagaaatggggtttcaccgtgttacagaatggtctcatctcctgacctcgtgcccgcccgccttggcctcccaaagtgctgggattacaggtatgagccaccgtgcctggcctgtatgtaagttttttatttggatgaagntcaacctatctattttttcttttgttgcttgtacttttggtatcatatctagaaaatcattgccaaatcccacgtcttggagatttacctctgttttcttctaagaattctacaattttagctctcacagctaggtcttttatccattttgaattatgatgtcagcgaaagatacatgaggtggg

SEQ ID NO: 1383 - DNA, 446 bp, Homo sapiens
  misc_feature (1)...(446): n = A,T,C or G
cggtgcccgccgcctgaaggccgcctgggcgcgggagccggtgccagctcggagcgggcgctggaggcagctcgaggcgcgatgtcggtgccgctgctcaagatcggggtcgtgctgagcaccatggccatgatcactaactggatgtcccagacgctgccctcgctggtgggcctcaacaccaccaagctctcggcggccggcggcgggacgctggaccgcagcaccggcgtgctgcccaccaaccctgaggagagctggcaggtgtacagctctgcccaggacagcgagggcaggtgtatctgcacagtggtcgctccacagcagaccatgtgttcacgggatgcccgcacaaaacagctgaggcagctactggagaaggtgcagaacatgtctcaatccatagaggtcttggacaggcggacccagagagacttgcagtacgn

SEQ ID NO: 1384 - DNA, 476 bp, Homo sapiens
  misc_feature (1)...(476): n = A,T,C or G
atcgagatccntatcgagngncgcggaattctcagcctccagatgggcacgaacaagtgcgccagccaggtgggcatgacggctcccgggacccggcggcacatctatgataccaagctgggaaccgacaagtgtgacaactcctccatgtccctgcagatgggctacacgcagggcgccaaccagagcggccaggtcttcggcctgggccggcagatatatgaccccaagtactgcccgcaaggcacagtggccgatggggctccctcgggcaccggcgactgcccggacccgggggaggtccctgaatatcccccttactaccaggaggaggccggctactgaggctcccagcacgctctctccccacatcgtctccccatctgggtttttgggtttttctgtgttttcatcttttttttttttttttttaacccgttcagggctgccaaaaaaccaagggtctgggagggcac

SEQ ID NO: 1385 - DNA, 458 bp, Homo sapiens
  misc_feature (1)...(458): n = A,T,C or G
nnttgatatcactagnccttgatgggcatttcccacccgagaggcatcgccgtctggcgttggtgtctgagcagaagccgcaggaaccttctggagcagcaggatgagctgcgggactcgtttgccgaggctcgtgttctggtcaaaagtttggagacgcgcacaaccaggagggagcgtgacacggagagaagggggcgcagagagagaggcagaagaaagaaagagggggcgatgaggtgaagcgcggaggagcaaggtggccgtaagtccacccggaggaagaagcaggcgattaagggaaagagggaaagtcagaaaagaaggggaggaaggcaagggagagggcgggcggctagcccgcctttgtaggagccgcgggccaggcagccgcgagggtcggcggcgccttctctgctccgaggtctctccggctgcctctgaagctgcggcttctg

SEQ ID NO: 1386 - DNA, 501 bp, Homo sapiens
  misc_feature (1)...(501): n = A,T,C or G
atgcagtncgccccccttgaaaaccctaactgatagcactgtccangngcgggaattccactgtggcatgcattgtctagggtagatgcttgttagatattttatgacttgctgtctttttcaacaggacaaattgatggccaggagatcactgccaccgccgtgctggccccctggcctaggccaccccccaggagattcagccctcccaggagaatgttgccaccaccgcctatgtggcgcaggtctcccccacggatgaggagaaggtaaacaatttgtagtttcagtggactgatcaggccacaaacctcacgtgaccgcagtgactttcagaccctttattcagccctgcctgccttccactgctgtgcgggctggcagagagcaggagcccttcagagctcatggagagagcaggagggccacagctgcagtaagccacaggcaggagacgccctagagttgcaccaacacagctttctgagtctgggcagtggg

SEQ ID NO: 1387 - DNA, 457 bp, Homo sapiens
  misc_feature (1)...(457): n = A,T,C or G
attgagaccttagnttttgagtcattagtccangcggnggaattcgaccaggctgccccgcctcctggttctgcccaagttctccctggagactgaagtcgacctcaggaagcccctagagaacctgggaatgaccgacatgttcagacagtttcaggctgacttcacgagtctttcagaccaagagcctctccacgtcgcgcaggcgctgcagaaagtgaagatcgaggtgaacgagagtggcacggtggcctcctcatccacagctgtcatagtctcagcccgcatggcccccgaggagatcatcatggacagacccttcctctttgtggtccggcacaaccccacaggaacagtccttttcatgggccaagtgatggaaccctgaccctggggaaagacgccttcatctgggacaaaactggagatgcatcgggaaagaagaaactccgaagaa

SEQ ID NO: 1388 - DNA, 487 bp, Homo sapiens
  misc_feature (1)...(487): n = A,T,C or G
gaggtccgnnaattggaccatagagagcggtgggaattcgcagaaacacagagacagagggtgagatcacgccccgatgaggacggagagagacagagatggagagagacatagaggtggaaatatacagagaaagataaatgcacagaccaaggcagggagtgtcgggggaagtaaagagggtgtcctgaagaaagaaggatctgttcactcttaccagtctgtcctcgaatgatttgcataaaatgaggaggtgcctgtccacacccccaattcctctctcaggccccagagcctgagacctcaccatgcccccatcagagatgcaaaaaactaaacacccaactagaaatccttgggacctctctcggctgggatctcagagcctttctgtcccctacccctaccccatgtgctgtcgattttgcagatggggacaacctgnggcctcccggaactctgccaccctgnngaagttgggggaggg

SEQ ID NO: 1389 - DNA, 458 bp, Homo sapiens
  misc_feature (1)...(458): n = A,T,C or G
aatgatcaccntcnnnnttgagntcattagaccangcggnggaattcgagcagngagggggagactcacccaccctctccctctcccttcagctctgggaggctggcgcagtgcccccctcccgtgggctggcccaggaccgcaggtgaaacctgggtctgtttagtttctttggtttttgtatgtttgtttgtttttgacacagtctcgctttgttgcccaggctggggtgcagtggcacgatcgcggctcactgcaacctccacctcccgggctcaagcgattctctcacctcagcctcctgagtaggtgggattacagatgcccgccaccacacccagttaatttttgtatttttagaagagatggggtttctccatgttggccaggctggtcttgaactcctggtctcaagtgatccgcccgcctcggcctcccaaagtgctgggattacaggg

SEQ ID NO: 1390 - DNA, 497 bp, Homo sapiens
  misc_feature (1)...(497): n = A,T,C or G
ggcggggggattgagnccntnnnattcgagatccatatccatgtggtggaattccttcaccaagggaaaatgcttcaggcatttgggagcgtgcgccctgagaaggcctcagcaagtttttggagattgtccttcacagaaacggggtcccattatattgtccaggctggtctcaaactcctgggctcgagtgatctgcccgcctcagcctctcaaattgttgggattacaggcatgagccgccgcacccggcctgacgaggcttcttgctgcacttaaaggaatgacagctatagagggcatatgggactggaaggcatcggatccataacatcctcacgccttctggaaatgtgaaaaatgtttcacaaaagcacagcctaaggcctcatgtgatgaggtgggctctccacaagttcccggggcagagtctgaagacctgctgctggataggggcttcctcctggtccccaagggcccgccctctcaggcccacc

SEQ ID NO: 1391 - DNA, 460 bp, Homo sapiens
  misc_feature (1)...(460): n = A,T,C or G
cttgactacctnnnnttttgatgacattagtccagtgcggtggaattccgcagcttcacttacaccagctgctctgtgagcaaggcttggtgccctggacaaggcccttcccctttagggaggtccagcctcgcaagctgaaacctcccctcggctcagccctataccaggcggccacagcaggactggccacacccacgccgcacctcatccgtgcacgcgtcggagcacggccagccttccgccacgagccagctgggaagggccgcggctgcctaaagccccagtcaacccagcctgtgtctgagcagacagggcgaacaagcaggccacaccgtctcgagggaggaggccagatgcgaccagcgtctccaacagggtgaccatccgctcggcttgctgagcgtttaaacaaatgtttagacaggctgtggggactcccctgagttgagccttggcc

SEQ ID NO: 1392 - DNA, 457 bp, Homo sapiens
  misc_feature (1)...(457): n = A,T,C or G
tagactttcgagacactagtccacgtggtggaattcctcaagaggtggagggtgcagtgagccgagatcacaccactgcactccagcctgggtgacagagcgagactccgtctcaaaaactaagaagaagattaataataaaccagcactggcattgccagcagtccatcctacctcgcatccaggttcgtgagctaccaagtgtccccacaaagctgtaaaacaacatgaccactgtaggtacgtttctgtaaaaaggggactgagtcttctaaccctgtaccacacatatgtgtgcagagagagccagctccatcctgctctcccagaagcctgaacagctgtgccctatctcgtagcagtggcactccaggaagggggcgggcggctgtgccccaactcgtatcagtggcactccatgaagggggcgggcggctgtgtctgagctcgtaacaan

SEQ ID NO: 1393 - DNA, 458 bp, Homo sapiens
  misc_feature (1)...(458): n = A,T,C or G
aatcgagatccctagnccgttggatggtcattagaccacgcggcggaattccactgaaatgtgatgcatcactgtctttcagaagactggtgagggaaaccgggcccttgcctcaggggaacatgcgatcatcctcccgcaagaacacgtggccccactcaggcacagcttagcagggcggggtgggccatgcagacctgccgaggggactcacgcaggacgggagcaatgctgttgagtagcgaccctcccgacaatggccacgctgcatcccgatattttccctttacttttaaactctgggaagtaagtgtacagctctggcctccaacgaatcaaagtgcttcttctctaatgcgttcattatgaaaatattagtctcattgtctcttctttttcagaacttagactgtttctttattttgcaggcatgaaaacaaaaagaaacccgtgatcaa

SEQ ID NO: 1394 - DNA, 443 bp, Homo sapiens
ctctgtccatgttgagctgttcactcatccaggaactggggaacacaaggtcacagtgaaagtggtggctgccaatgacctcaagtggcagacttctggcatcttccggccgttcatcgaggtcaacatcattgggccccagctcagcgacaagaaacgcaagtttgcgaccaaatccaagaacaatagctgggctcccaagtacaatgagagcttccagttgtgagtttgggatgctttgaagagcatgggggcaagggagggggcatccgccaggtgaaccccaaagccagctaggcaggaggtatctggaatctgggcccgggaatgggaggggccacattctaggtgggggtgctggaaagggagaccccttagtagtgcaggaatgacatcagggaggggacacgaggatggaggtcacctttgggggctggcagatg

SEQ ID NO: 1395 - DNA, 455 bp, Homo sapiens
  misc_feature (1)...(455): n = A,T,C or G
catcgagacccntgttgatgcctngtgggaccagctttgcaataccagagagtctcaagcagcatgtgactgtggttcccagcaaactgaggcttgtctgcctagcggccttcatccttcagaaatgcaagtttgaggaagaccagaagatggttgtctttttctcaagttgcgagctggtggagttccactacagcctcttcctacagaccctgctgagcagctcaggggcgccggcatcagggcagttgccatctgcctccatgcgattaaaattcctacggctgcatggcggcatggagcaggaggaaagaacagcagtgtttcaggaattttcacattccagaagaggcgtccttctttgcacggatgttgcagctcggggcttagatctccctcaagtcacgtggattgttcagtacaacgctccatcttcacctgcagaatacatccac

SEQ ID NO: 1396 - DNA, 458 bp, Homo sapiens
  misc_feature (1)...(458): n = A,T,C or G
atacgataaccctnnnnnnnttgatgatccttattccagngcggnggaattccaaagcaatttttaccacgagctgtggacactcatgcaaatcacctcacttttccaggtacaacttgagctctcatctacataactgaaggctgcacccagggctgtaaagagtgaaaatgcattgccgaagcatgagcacctcctgcagttctcagtagacatttgggaagcgagtgaaccgccctgtatggagtgtttggaggaggtcggagggtgtcgggcctgagccaggggctgccctgggcctgtgtcgggtggcgcatgccagaggaatgagatgggaagggcatgcacgcggggtcttggcagccctggagctggcctagatgcagcagctttctgataaagcgaaattgttccatcggcttgccatgctttgcttatccatccgcacttcactgttg

SEQ ID NO: 1397 - DNA, 422 bp, Homo sapiens
  misc_feature (1)...(422): n = A,T,C or G
caatataaatatactttaactaagccagtgacctggtcctaagttaaggattttctaaatggtatttaattgtgtgcccataaacactgattttttttaaaaagaaaacttagtaattatttgatggataacaaaaagcatctatcactaacattgcttgttcatgtaatcttctgtgataatttggcttggcatgccagtcttataattaacataatttaaatttgatgcaatttaaatataacaggagacttaaaatattttattataaattagatgccatattagttagtggagaaaaggggcattaggtattaattgcatgggtctaactacattgatgatgagagtttaattccaactagagtatattttttgtttattaataatgaaattggtgctgacatgtaatgacttcacan

SEQ ID NO: 1398 - DNA, 484 bp, Homo sapiens
  misc_feature (1)...(484): n = A,T,C or G
aggaggagcggnctccncccaactgagaactgaggacagttcgaggaancccttaatacctaggtgatgaaatgatctgtgcagcaaaccactatagcacgtttacctatgtaacaaacctgtacatcctgcacatatacccttgaactaaaaaaaaaaaaaaaaaaggatcccntttctgggtctggggataaaccttggctcatctgaagaataaacattaggggttttcaaaacaaaaccagccccattacctaggaacctattaggaatgaaaattttttggcccacaaacctactcgatcaacaatttaggggggggggcccaccagcaatttgcttataagcctgggttatatgggactctactacatgttttttgaaaactattgataagtttttttaaaagttgggaaatcatcatcttaaatcataaaggaaaacttttttgggggggcggttttgttttttttgaaacaagtca

SEQ ID NO: 1399 - DNA, 494 bp, Homo sapiens
  misc_feature (1)...(494): n = A,T,C or G
agaggganttttggtccctagtcattgtggtgcaattccacatgagtttattgataacagtagtaaaatatactttaaaatgagtttttagcaataataatagcattctaaaagttttattacttcaaagaaaagctcaattcatctttgatcaattttggttaagtcagtgtggatacttgtattagagacttaggtctgctttgggtttttgtatgctcttgctatacagcacagctcactgtttatcttaagaggaatatttgactttcttttgaaactcttcttcctgcaaccacagatagcatatgataccttcagacatagcttgaagtctgtaccccgaagtcagccatagaaaagtacttctcanatcaaagttaatctaaaatataactatttcctgtaagagccacaatacttcaacgctggtgactgcattacattcatggcagcagcagggcccaatgcattctttttttttttgagacggg

SEQ ID NO: 1400 - DNA, 445 bp, Homo sapiens
ccagaaagtaatgagctgtctatggatggtaggtgggtttagagtataaagaagggagaaatcataacggtgtaaaggaggaagggatggaacactgccgagtgtatctgagtatattttgtataactgtgagtcttggagccataataatggttctcatgccccccaaaataattaaagtccaccaggatatgaggagagttcaaaatgaaatacaaacagtaacaaatgaacttaactgtatttcagatgcataatacaaccacattgaaggaggtgggcaagaaaaataagaagttatagcattttgatgggatactataaagagaaaaggaactgtgcaccaataccagagtctagttagcaaatttttcacagaagcagaagttagtaattcacgaagtattttatgtgtgttttaggatggggaaaacaaatatatggg

SEQ ID NO: 1401 - DNA, 451 bp, Homo sapiens
  misc_feature (1)...(451): n = A,T,C or G
nttcgcgatccctagtccgttcggtggcattccaggcccgagatagcggcgaggtccgctttcagtgtatggttttccctgccaaacggttctgcttggtgccatccatggagggcgtgcgctgggccttttcctgcggcacttggctgccgagccgagccgaatggctgctggcagtgcgatcgattcagcccgaggagaaggagcgcattggccagttcgtctttgcccgggacgctaaggcagccatggctggtcgtctgatgataaggaaattagttgcagagaaattgaatatcccttggaatcatattcgtttgcaaagaactgcaaaaggaaaaccagttcttgcaaaggactcatcgaatccttacccgaatttcaactttaacatctctcatcaaggagactatgcagtgcttgctgctgaacctgagctgcaagttggaat

SEQ ID NO: 1402 - DNA, 449 bp, Homo sapiens
  misc_feature (1)...(449): n = A,T,C or G
nactgagacctcangccagtgcggggaattcgctaaggtatgtgccacctgctttgacctctcgggcagactgctgcgtgtcgtggagatgactatcacactggtgcctgagatattccttgactggacccggtctacctttgaaatgctgctgcggagtgttgcacagttgctaaaccaggtgctggaccgggtgacagctgagaggaacctgtttgtcgtgtggtcaccctacggctgcctggcctagagagcgtggaccactatcccattctggtggcagtgacgggcatcctggtgcagctcctggtgcgtggcccagcctcagagagagagcaagccacatcagtgctcctggcagatccctgcttccagctacgctcaatatgctatctcctgggacagccagagcccccagcacctggcactgctctgccagcccctgaccg

SEQ ID NO: 1403 - DNA, 457 bp, Homo sapiens
  misc_feature (1)...(457): n = A,T,C or G
nctcgaagttcactagcncanngggnggaattcgngatttgaagatatgaaccagggcacaggataggaggcaggaaagacaacaggctgtggaacagcagtgagttccttatctatgctggagctatgctatccagtacggtggccagtagccctatatggctatttaaattacaactaaatcaagtaaaaaatttgctttcttattcctactgaccacacttcaagtactcaagtggctaagtggctgccgtattagaccatgtggtgtcggatatttccatccttgcagaatgccctcttggctggtgctgggctagagtgctagggggagatcagggcagacggcagagcaccttgagtgcctgctaagggatctggactttatcctggctaggaaaggtccaggctaaggaaagagctgagcaaggagggacaccgacagaactctggtctg

SEQ ID NO: 1404 - DNA, 474 bp, Homo sapiens
  misc_feature (1)...(474): n = A,T,C or G
aggggagggggccccccnnntttgaacctgagtacatctagacagngcggtggaattcccctgcctgacgattacgagctcttctgccaggatctcaaggaagttgttcaagacccgaacagttttgctgagtaccatgctgtggttacctgtcccctgcccctggcctccagccagctgccagtggcccctcagctgcctgtggtgaggcaatacttagctaggttcttagagggcctggcactcgacatgggtactgcccccaggtctttaccagccgccatggccacccctgctgtgtctgggtccaactctgtatctagaagtgctctgttcgagcagcagctgaccaaggagagcacccctgggcccaaggagcccccagtcctgcccagttctacatgtagctccaagcctggtcctgtggaaccagcctcttcccagccagaggaggcagcccccacacctgtcccn

SEQ ID NO: 1405 - DNA, 488 bp, Homo sapiens
  misc_feature (1)...(488): n = A,T,C or G
aggatgagccgnnncccnnnnnaatagatgaactgacgacantgccgnggaanccgncacagattggctttttaagaatcctgggagagttgtcttcatctccctgtgcccccatagtaagcttcctttgaaactgacatgttcaatgtttgttctgcacagttctttatcaacaagactgagattgaggactttccccgctttcctcaccggggcttgctgttggatacatctcgccattacctgccactctctagcatcctggacactctggatgtcatggcgtacaataaattgaacgtgttccactggcatctggtagatgatccttccttcccatatgagagcttcacttttccagagctcatgagaaaggggtcctacaaccctgtcacccacatctacacagcacaggatgtgaaggaggtcattgaatacgcacggctccggggtatccgtgtgcttgcagagtttgacactcctggccn

SEQ ID NO: 1406 - DNA, 420 bp, Homo sapiens
tgtctatggttgtcaactatgatatggccaaaaatattgaagattacatccaccgcattggccgcacgggacgagcaggcaagagtggggtggccatcaccttcctcacaaaagaggactctgctgtgttctacgagctgaagcaagctatcctggaaagcccagtgtcttcctgtccccccgaactagccaaccacccagatgcccagcataagccaggcaccatcctcaccaagaagcgccgggaagagaccatctttgcctgacacagcactcttcctgtgggctgagggcatctccaaagctgcctgatgcctgtttttcagaaccctcacatccctctttccaggtcctcactcttgggatatgggggcttaggaaaacaatccaactccctagcccagaccctcaggtcaggag

SEQ ID NO: 1407 - DNA, 454 bp, Homo sapiens
  misc_feature (1)...(454): n = A,T,C or G
nattgaagatcgtagtccgtgcggnggaattcgatgccactgggcgtgatgcacggctcccgcatcagctcaaagctgatcttgccacacaggtagtcggggatgtctcgcttctgtggcacaggggcacacggtcagaggctgaaaaggggcactgcacgagcacctgccagccatcggcagcaagcgacacacactcaccttccttttctcatccacctgagaaaaaagctcgtccatgtccgccatgtacttgtcctgtgaagagttgagtgctgtgcttgggggagacaccccacctccctcctccatggggcacagacccaacacaaggcggggatgctcccacgccacgtgcacacacacagacccacatgtgggtggggggcaccctcacgtgcttggcctcaatgcaggcctgctgggcccggacgtggctgtcgtcctcatcacc

SEQ ID NO: 1408 - DNA, 425 bp, Homo sapiens
tgtctatggttgtcaactatgatatggccaaaaatattgaagattacatccaccgcattggccgcacgggacgagcaggcaagagtggggtggccatcaccttcctcacaaaagaggactctgctgtgttctacgagctgaagcaagctatcctggaaagcccagtgtcttcctgtccccccgaactagccaaccacccagatgcccagcataagccaggcaccatcctcaccaagaagcgccgggaagagaccatctttgcctgacacagcactcttcctgtgggctgagggcatctccaaagctgcctgatgcctgtttttcagaaccctcacatccctctttccaggtcctcactcttgggatatgggggcttaggaaaacaatccaactccctagcccagaccctcaggtcaggaggcctg

SEQ ID NO: 1409 - DNA, 479 bp, Homo sapiens
  misc_feature (1)...(479): n = A,T,C or G
ggagagggccgccgcctctgactccgtggccctccnccgnngcgnggaanncctcatggagggcagggggcccctgctctctacgctgtcgtggacgtggactttacaggctacggcagcacctgtgagtccctggccttcttcccggggtctggcaggtgctgctcaagtgtgggctgatctgccggtgtggtgagtgggggtggctgtgccccagggtcaagggtcataccctgtcgcccacaggacaagttggatggctttgttcccgcgcactttcttggctggtacctgaagaccctgatgatccgagactggtggatgtgcatgatcatcagcgtgatgttcgagttcctggagtacagcctggagcaccagctgcccaacttcagcgagtgctggtgggatcacgtagtggatcatggacgtgctcgtctgcaacgggctgggcatctactgcggcatgaagacccttgagg

SEQ ID NO: 1410 - DNA, 474 bp, Homo sapiens
  misc_feature (1)...(474): n = A,T,C or G
agccaaggcgggcccccnnntttgaaaactgaagaccatagcacangcggnggaattcccccgaggacatgtctgacagcagaaagccttggcacacatgcccagtgaccactgagagccccacgtcgcggaaacctgacggctggtcacccttgaccctggctgaacgggtccaaggactcttggtttctttctccccaccagggcccagactggttcctgccgcgtgtaggctcgtggcagaggacttccatgtgtggccagagagcgctcctccctggggcagctgagcgtgtgccccaccgtcctgggaggggtgaggtatgagcgctgacccctgcctgcccccgtcccacagggtaatcctgggaatggtgacgcttgggaacatgctctcgtccctgcttgccgggaaggtgcagccgtcagaccaagttggcaaagtcatctacaagcagttcaaacaggtacccn

SEQ ID NO: 1411 - DNA, 475 bp, Homo sapiens
  misc_feature (1)...(475): n = A,T,C or G
ntgagtccctatccaggtggggaactcccagtatcagcgactcccaaagactgtgaaagaacgtcccacagtcccaaagtcccagatcgaggggtctctccggatgctcgattcatctgtccccgtggggaacggcctgaagggcagattcgagggacggtgggacaagccgagttcctggcagagagaggagctacagcgcgtggaggatggatctcggcaccgcatccgactgtttccagaaggaaactgaggtgtgcaaggaagactgacacctgaaatcccccgagcccttgcatttcaacacccttagagcactgcgtgctgctccacactcacgcgaggcggcctctccagcagcctgaactacggggcacgggttggtgggcactcagtgtccgcttgctcccaggggtcagccgtatcagacgacaccggtccccacgcagcagggctgagacgcagactcacacac

SEQ ID NO: 1412 - DNA, 490 bp, Homo sapiens
  misc_feature (1)...(490): n = A,T,C or G
aatcgngntccactagtccagngttcgaggatccactaaacagtgtggaggaattcgcttatatgcattaaagattgttcccaacgctatatttctgtccgtgggtcatagcccttaaccagcctttgtttgtctgcctgtgaagtgggtgagtcactctcattaaagcacttcctgtgatccacactctcagaatgtaacagtgcatttcacccacacagcccttcgatgtaggggctataatgaatcccataactaaggacactgatgctcagagaagttaagcaactgcccaaggtctcagctggcatgaaataaagccaggatttgagcccaggtcatttggctgtagagcccaaggtgcttactgttaccttatactgctccctcggtggccaagcaggtcatgaacttgcgtactcgagtgatatgactgcctcggccatccaacgtgctgggattgtaggaatgagccaccacacccggcgag

SEQ ID NO: 1413 - DNA, 488 bp, Homo sapiens
  misc_feature (1)...(488): n = A,T,C or G
aggctgagcagggcgccgcccactgagnaattgagttcntccgccgnngcgcggaannccagggtttcgtcatgttgcccagtctggtcttgaactcctaggctcaaccgatctgcctgcctcggcctcccaaagtgcttagaacacaggtgtgagccactgctcccagcctgtaacctttattttaaaaatctaaggtggatgggtcacctgaggtcaggagtttgagattaacctggccaacacggtgaagcctgtctctacagagaaattcaaagattagctgggtgtggtggcaactgcctgtggtcccagctgctcgggaggctgaggcaggagaattgcttgaaccccagaggctgagtgacagagcaagactccatctcaaaaaaaaaaaaaaattttttccagcctttccacaaaatagcattaagaatcacattttaccacacataagtaaatgtatccaatatgtcttcaggttacag

SEQ ID NO: 1414 - DNA, 486 bp, Homo sapiens
  misc_feature (1)...(486): n = A,T,C or G
aggnagagcaggccgcgcccatagagaactgagtacctgcgcagnngcgnggaannccataaaacaccaggcctgttctcaaagtttctgggttgctcaccgaccattctctctgtgactccaccatgggaccagtaggggagggatgagcctcagccctggagggcaccaggccccttccccaggaggaagggcaggagaggaagcacccagtccctcccccagcacaggctggccatgcttctccttaacaggccactgtcacagcctccagggtgcagggcgagccacactgccggatggggccttgggcagtgcccactgcaggctcccagcgggtgtcggctgcagaggcacagagcaggaaaaggcccctccaagcttcttcctggagactcaaccctgggctgtctggggacagagggttccttccctgttcctcatacttctgagggcctggcgccagagtggagaccacattctttt

SEQ ID NO: 1415 - DNA, 476 bp, Homo sapiens
  misc_feature (1)...(476): n = A,T,C or G
gtctgtccaggggggcgcggttttgaaacctcttgagatcataggacangcggnggaattcgttatccaggccatgaccaaggccatgtgggaagcctggggaaatcccagcagcccgtattcagcaggaagaaaggccaaggatattataaatgcagctcgggaaagcctcgcgaagatgataggggggaaacctcaagatataatcttcacttccgggggcactgagtcaaataatttagtaatccattctgtggtgaaacatttccacgcaaaccagacctcaaagggacacacaggtgggcaccacagcccagtgaagggggccaagccccatttcattacttcctcggtggaacacgactccatccggctgcccctggagcacctggtggaagaacaagtggcagcggtcacctttgtcccggtgtccaaggtgagcgggcaggcagaggtggacgacatcctcgcggcag

SEQ ID NO: 1416 - DNA, 485 bp, Homo sapiens
  misc_feature (1)...(485): n = A,T,C or G
ggcgcagggnccacattgagaccaaaattgaggngcagtagaaacccccctgcactactcagagcgtcatggctggggctacttggtgcctgggcggcgggacaacctggccaagctgccgacagagccatcgagtccctgtacaggaagcactgtctcgaacaggggaggcagcagctgatgccccaggaggccggcctggcggaggagttcctgctcactgacaatagtgccatatggcaaacggtagaagaactggattacttanaagtggaggctgaggccaagatggagaacttgcgagctgcagtgccaggtcaacccctagctctgactgcccgtggtggccccaaggacacccagcccagctatcaccatggcaatggaccttacaacgacgtggacatccctggctgctggtttttcaagctgcctcacaaggatggtaatagctgtaatgtgggaagcccctttgcaaggacttn

SEQ ID NO: 1417 - DNA, 430 bp, Homo sapiens
catcgcattggatgactcactagtccgtgtggtggaattccacgtctctaccttcctgctcaagacactgggtctttccacagcctgaagatgaccatggacaagacgggtctcctgctgctcagtgacccagacaaagtgaccatcggcctgttgttctgggatggccgtggggaggggctccggctccttctgcgtgacactgaccgcttctccagccacgttggagggacccttggtactgagcccattaccggggcccaggccttcctcagaaaccagctgtgcttgggaacaggcagcgcccctcccctgcgtgtgtctcccaggcttcctctgtctctgacccttactgatccaccctttgtatctcaggccagttttaccaggaggtgctctggggatctccagcagcatcagatgacggcag

SEQ ID NO: 1418 - DNA, 483 bp, Homo sapiens
  misc_feature (1)...(483): n = A,T,C or G
agacgcgcttnncnnaannccaattggccagcanaggcatgaaantnctgnaccangactgacagcaggtccttggaggtcatgtctcatggtcccagggctggtggttgctttgggtctacagctacgtcttacgcgcctcctgcctcaacagcctgtgtggtggcaaagccggtgtggggctggggaacgcagcgttctccaggaggggacccggctctccttctgcagtgcaggcgaaggcctagatgccagtgtgacctcccacaaggcgtggcttccagactccccggccggaagtgatgcttttttgccgcgggccctgggtttgaagcagcctggctttctcttggtaagtggctggtgtcttagcagctgcaatctgagctcagccacctacacaccaccgtggccgacactttcattaaaaagtttcctgggnaaaaaaannnnnnnnaaaaaaaaaaaaaaaaaaaaaaaaaa

SEQ ID NO: 1419 - DNA, 466 bp, Homo sapiens
ggttgttttaactgatgacatttttgagtgccgtggaattctgatcagcagcaagcgctccagcagtttcaagcgggccattgctaacggacagcgggcactgccccgggacgggccgctggatgagccaggcctaggtgtctacaagcggtttgtgcgttacgtggcctacgagatcctgccttgtgaggtggaccgccgctggtacttctaccgtcaccgcagctgcccaccccccgtgttcatggcctcggtcactcttgcccagatcatcgtgttcctgtgttacggggcccgcctcaacaagtgggtgctgcagacctaccaccccgagtacatgaagagcccccttgtgtaccaccccgggcaccgtgcccgcgcctggcgcttcctcacctacatgttcatgcacgttgggctggagcagctggggttcaacgccctcctgcagctgatgatcggggtg

SEQ ID NO: 1420 - DNA, 473 bp, Homo sapiens
  misc_feature (1)...(473): n = A,T,C or G
ggggagccggntttntnnnccatcgagacgttagacagtgcggtggaattccatcctcccagcaaggtcagccaataactgtggggatggagtggagccgtgagtgggggcagaggcctagactcccaccccacagggcggtcccgggcaagggctctccatctgcaaagtgcagctctggcccctgctctaggctgctatggctctgggaagccctcctcctgccccttctgggccgctttctctggggtcccccttgccatgtgctatgtgcccaggccgtttctcagggctgcccgctgtgccctactgtgacctcagccactagaacaaacccgagagacctggagggagctcaccagacaggtcagggctgatgatgttcaagcgcatgaagacagtcctatggacttcctggaggagaaagagagagcagtatgtggcacctttgggaggcggcttccaggtttact

SEQ ID NO: 1421 - DNA, 424 bp, Homo sapiens
ggctttggaattcgtcgacttaggggttggccacgatggtgtccttgatccacttccggtaatgcaccaccttggtgtacagggaaggcctttcgggcagggcacatggttcactgccccatgacgtgataccttgaagcacaccattacagacaagtggggccccagaatcacccgagcaggtgcttttgccccctgtccagcgtccagcacacagcatgaacttggtcaccttctgagggtgaacttgcgcacacacgtcattggaaataacatggaggtccacacactgaagtttctttggggtcaagaactcctctggttcaatgctgccccagcctgaggcgtagcaggtggtccccagtgctggctcctgggtgggcaggtccatgaccttcacagcatccgtgagctcggcaggctt

SEQ ID NO: 1422 - DNA, 439 bp, Homo sapiens
  misc_feature (1)...(439): n = A,T,C or G
ctcacggggctgcccctgctgaccagagggcatgacgggacacagtccctttccctcattgacgacctccatagccagatgctgagcagcactgccatcctggaccatccctcgacacccatggacacctctgaaacggactttgtttctgagcccaacaacaccatgggcctggacctgactgatggccacctggcagcatggactggctggagctgacgtcaggtggtcccgtgctgagcctagcccccctcagcaccacagcccccagcctcttctacacagacttcctcgatggccatgatttgcagctgcactgagattcctgcttgtagctctctgactcaagacggggtggggaaggggctgggagccaaggtactccaatgcgtggctctcctgcgtgagtcggcctctccacatggatgtgagtcttgan

SEQ ID NO: 1423 - DNA, 485 bp, Homo sapiens
  misc_feature (1)...(485): n = A,T,C or G
cgacggtcccccatagagactatatgagaccctaggccagngcgcnggaattcaagggctcattttatccgaacgggaagcacgacagtcaggctgcggggggaacggcgtccctctgctgatgcctgtggctgtgtttgtgcatttacacgtgacattagcggagatgaatgccacttggaatccaacccaccgcagcagattacctcatgcaagagagaaaacagccctgcctgtgctagcctggctctgcgttgggctgtatttactcacggggcctcagctggccagggccttggagcagctctggggcccccgacccgggcaggaatcccagctcaggactagacgcacagaggaggacggggtggggaagagcagttccctcccataccctcgtcccctcccagcaagtacagagggtcgtacagcaatcgtcccgccttacttagaggctctgatctgcacaaaactggccagagctg

SEQ ID NO: 1424 - DNA, 441 bp, Homo sapiens
  misc_feature (1)...(441): n = A,T,C or G
ctcgagagggattcggacctaaggcccagtgagccctgacatagcacgtggattctgcaggaaggtcacagacctgccttgtttgcctctggttctgagtacctctcctccttactgcaatgacccctgaaggtacactctggctgcttcccacacactggagcagaagcagaggccatgctcctggatgcctgcttgtctgatgctagttcttctctgtctcatacacgcagggcaacaggtttgtctatgctggctctaactcgggcgtggtccaggccccgctggccttctgtgggaagcacggcacctgcgaggactgtgtgctggcgcgggacccctactgcgcctggagcccgcccacagcgacctgcgtggctctgcaccagaccgagagccccagcaggtatggggcgggatgcgctgcctggggatgtcccn

SEQ ID NO: 1425 - DNA, 424 bp, Homo sapiens
cagtcctgcactccttctggaggctctaggggagaattcatttctggccttttcatttttagaggctgaccgtaattcttgacttcaggctcctccatcttcagagccagctgtgggtagttgaatctttttcccgtcacctcattgaggcctcccctctcctgcctccctccaccactttttttttttttttttttgaaacggggttttgttgtgtcccccaggtggaagggcagggcccggtcattggaataagggttaattgaacccggaccctctgggtaaaagggacctttttgtttaagcccctggaaacaaccccccccccccagttaaatttttttgggggaaacggggtctaattttgtgcccaaggttggccggaaactccgggcctaaggggatttggaaccctaaccctcta

SEQ ID NO: 1426 - DNA, 466 bp, Homo sapiens
  misc_feature (1)...(466): n = A,T,C or G
attggaccttagccatgtggggaactccggaccttgtctgaacataatgatttcaaaatttgagcttaaaaatgacactctgaaatccagtcagtgtgcctcactagacttttcgatttcaagattttctgcagaaaatgttttgaaaactttgaatacttaaaaatggcaggtgtagtattgcactttgctagttgctcagatacccttttttatttgtatagatattctgagttcctttttttttctacatgttgtacgttgtcgaaagctaaaaggaaacttatccttggatcacggaaggcagaggcatttggtgagatggaaacaaggatgtgtaaaaatgagacgaccacctctcggattaaaaaaaaaaagtgccagagttctagggttctaagtgatgtccaggaaggaggaggaataatatttatggagcatatattatggaacacagtgagtatan

SEQ ID NO: 1427 - DNA, 479 bp, Homo sapiens
  misc_feature (1)...(479): n = A,T,C or G
ngctgagtaccctttccagngncgnggttgacctcagtcgctgncgctgnngcctccgccacctcctccgccgccgcgcgcccctcggagttccgcgccccaccatgcccaacatcgtgctgttcagcggcagctcgcatcaggacctatcccagcgcgtggccgaccgcctgggcctggagctgggcaaggtggtcacgaagaagttcagcaaccaggagaccagcgtggagattggtgaaagcgtgagaggggaagatgtctacatcatccagagcggctgcggggaaattaacgacaacctgatggaactcctcatcatgatcaatgcctgcaagattgcgtcatcatccagagtaactgccgtgatcccgtgtttcccatacgcccgacaagataaaaaggacaaggtaggagagagtcgtgccccaatttctgcaaaacttgtggccaatatgctgtcggtggcttgggcggat

SEQ ID NO: 1428 - DNA, 482 bp, Homo sapiens
  misc_feature (1)...(482): n = A,T,C or G
nttgagatccttggcaannnccnnacctagntacctcttccanngcgnggaattcggaagggctccctgggcactagcagcagcccttggtaccttatggccaagggactctgatgcattttcaacactgatgccaagttcagtgaaggccttgatgctgtaagggcgaccgaaagtaggaagtgaatttgctgtgtgattgtgaactggttactttctgtctctgtgctctaccggccaaacaaggggtttggaccagacctgggattcccaacaggtggacttgtcggttgtcacctgataatcagaccagactacccacctaggtagggcacactctgtcctgaagctggaaagcatggcctctcttcggttcctatatcagtcagctactgttgcgtaacaaattatagcaaactgagcaccttatgactacagacgtttatcatctcacagtttctgtgagtcaggggtctgagcac

SEQ ID NO: 1429 - DNA, 469 bp, Homo sapiens
  misc_feature (1)...(469): n = A,T,C or G
ggattcacaaactgagaccctttgaagngcctggaaaccccatttccccctgctcccccctcactgcttctgctgcagccacaatggcctctttgtgttccctgaacatgccgggcacacggccacctcggggcttttacaccggttgtttcttctggttaggacacttttcctccagacatacatgtgacttgctctctcatgaaagctctataagggcagggatttttgtccattttctttcattgttgactccccaaagcctagaccaatgcccggcacacagtaggtgctcaataagtatttgtggattgatctccaggtaaatcatgcaagaaaaaaaaaatgtgtggattgaacgtgtgtgtgcatgtatgcatgcattcctgtgaccttctcgtgtgttcacgggtgtgtgggtacagccgcttgctgggtgtgctgcttgccagggatgtgtatgtggggt

SEQ ID NO: 1430 - DNA, 484 bp, Homo sapiens
  misc_feature (1)...(484): n = A,T,C or G
agttgattccttccgcannnncnnnnactagntacctcttccanngcgnggaattcccaacgcctcgtcgttgtcctcttcgtcccctggcctcccgtgccagggtccctgtgctcctccgcctccaccgccagcctccagtccccaaggagcacacgcagcttcctcctgtttggacacagctggcgagggccttttgcaaacggtggtactgtcctgatcgtctagcccctctcgttccccgtcctcgtttccagcatctttgccacccttgcttttttccttcttccttccttttccattttcctctggcccctctttcctcttcctggtttccttacctgccctccccttactcttgtttctcctccgccgaggcactgtgcggtatttgtaaatattgggcgaggaaagtctcggaagaagaaataacgctgataataatactttattaatatttataggaattattataatactaata

SEQ ID NO: 1431 - DNA, 476 bp, Homo sapiens
agagctgcccacctgataccctaattgatggcggtaattcccggctcgagtgtcatggaatccgtcacctttgaggatgtggccgtggagttcatccaggagtgggcattgctggacagcgcacggaggagcctgtgcaaatacaggatgcttgaccagtgcaggaccctggcctccaggggaactccaccatgcaaacccagttgtgtctcccagctggggcaaagagcagagccaaaggcaacagaacgagggattctccgtgccacaggtgttgcctgggaatctcaacttaaacccgaagagttgccttctatgcaggatcttttggaagaagcatcctccagggacatgcaaatggggccggggctgttcctgaggatgcagctggtgccctccatagaagagagggagacaccattgactcgagaggaccggccagctctccaggagccgccttggtctctgggatgcac

SEQ ID NO: 1432 - DNA, 474 bp, Homo sapiens
  misc_feature (1)...(474): n = A,T,C or G
ttctgattacctttcaggncgggctgagtccctgaagggggaggacactggggactctgggatttggcgcgcaccattggaattatttaacagcactaggagagctgtttcccattcagatggagggtgtcaagctcacagtcaacaaagggttgagtaaccattttcaggtcaaccacacagtagccctcagcacaatcggggagtccaactaccacttcggggtcacatatgtggggacaaagcatctgagtcccacagaggcgttccctgtactggtgggtgacatggacaacagtggcagtctcaacgctcaggtcattcaccagctgggccccggtctcaggtccaagatggccatccagacccagcagtcgaagtttgtgaactggcaggtggacggngagtatcggggctctgacttcacagcagccgtcaccctggggaacccagacgtcctcgtgggttcaggan

SEQ ID NO: 1433 - DNA, 427 bp, Homo sapiens
  misc_feature (1)...(427): n = A,T,C or G
nattgcgtactattacnccaggnggnggaattcgtcccagctactcaggaggctgaggcgggagaatcgcttgagcctgggaggtggaggctgcagtgagctgagatcgtgccactgtactcaagcctgggcgacagagtgagactctgtctgaaaaaagacacagcaacaaaaaaaacgagaggggagggagagagtgatggaggcggaggctgctgctgctataagctgggcgtaagtggtggtggtttgcgctggggtggcagcggcgatggtgggattacagggaagtgtgtggcttgctgacaggggtcatgtgcactgacccggtgtgggcagaggcaggtgctatcctggccatcccgcctgcggatgtgtgacctcaggccaatcacacgatctctttgagctctgcttccctcatctg

SEQ ID NO: 1434 - DNA, 478 bp, Homo sapiens
  misc_feature (1)...(478): n = A,T,C or G
gacgatnaccaattactgagacctnattgaaggtcgtcgcacgagaccagggatgcccctgtctctatctgcagggattggggaatccgttgcctgcccgaggtggggcagcgggggagctgctgggtggccctgagggcgcctgcggctccgcggagtcctccggcctctgaagcactgccgcatccaggcctgctctgcactgactactgaggaggcggcactgcccacaggacagcggcagtgaccgcaaaggaagagaggaggaggtaaatctgagtccggctccgtgagattgaagtccctgggagtgaggctctggggcggcttgaccgactccagcagagtaaatccccagagtggatgacgactttccagctggaaatggagcaggatctaaccaggaagaggaatggcaactactcagccggactcagcagcgggcaggagcctccgagggcacaggntctactgatga

SEQ ID NO: 1435 - DNA, 427 bp, Homo sapiens
  misc_feature (1)...(427): n = A,T,C or G
atcgcattgatgactcttagnccgngnggnggaattcggggcaggaatgtcgggatactcagcccccggatggaaagtcaaaagactgcatgctccagattgtttgtcgagatgggaaaacaattagtctttgtgcagaaagcacagatgattgcttggcctggaaatttacactccaagattctaggacaaacacagcgtatgtgggctctgcagtcatgaccgatgagacatccgtggtttcctcacctccaccatacacggcctatgctgcaccggcccctgagcaggcttatggctatgggccatacggtggtgcgtacccgccaggaactcaagttgtctacgctgcgaatgggcaggcgtatgccgtgccctaccagtacccatatgcagagaccatcctcatgacacgtcattgcactgc

SEQ ID NO: 1436 - DNA, 486 bp, Homo sapiens
  misc_feature (1)...(486): n = A,T,C or G
agagccngnaatcgagaccttaggacagtccgttggaattccttagtgttcctgccttgactcagtttcctgccccttcaccctagcaccatagtcccctccctgaagcaccggctgcagcgaaatgtggcgtctctggcctggaagccccttagtgcctctgtcttggctgtggcctgccagagctgcattcttatctggaccctggaccctacctccttgtctacccgaccctcttctggctgtgcccaagtgctgtctcaccctgggcatacacctgttaccagcttggcctgggcccccagtggggggcggctgctctcagcttcacccgtggatgctgctatccgggtatgggatgtctcaacagagacctgtgtcccccttccctggtttcgaggaggtggggtgaccaacctgctctggtccccagacggcagcaaaatcctggctaccactccttcagctgtctttcgagtctgggag

SEQ ID NO: 1437 - DNA, 496 bp, Homo sapiens
  misc_feature (1)...(496): n = A,T,C or G
ngatggcccngnnaatcgagacccatcgtagaccactaggccagtgcggtggaattccatcacttacaccccggggacctgcgagctgctcagagtgatgatgaaggaatccaaactgacgaacatccagcagcgccacatcatggacatcatgaaaagggatttggagaaggagaaacaaagactccaaaatatctttgccacggggaaggacatggaggaacggaaaagaaaggcccctcctgcacgacagaaggctccagcccctgagctagaccgatttgaagagctggtgaaggaaatccaggagaggaaagaattcctggctgacatggaggccctgggacagggcaaacagtaccgaggaatcatccttgctgaaatctcccagaaactccgggaaatggaagacattgaccacagaaggagtgaggaacttaggaagggtcttgccaccacttaatctgtctccagagacgggcagggtagcccaagc

SEQ ID NO: 1438 - DNA, 492 bp, Homo sapiens
  misc_feature (1)...(492): n = A,T,C or G
aggaatcgataccccctnnggannnncnnatcgagtaaccattcgccagngncgnggaantcgaagaaggaggtgagaggacaagagggactcccatgttctaagcacctgttcctggccaggctctaggccaggctctctaagcacatttctcctttcattccccctaaaaacagagtgacctggaagtagatgttctttgctccttgtcagagttgaagaggctgacttggcccactgctaagcggcagaggcagggccagccatcctgtcgcaagcccgtgctggggctgccctttctgtttccagtccagttacggacttcccggccgccactgggccctgccggtcaccaggccactgtgcagtgggcgcagagcatggtcaggagtggcctgcccgtactcctccacccagatgagggccctccagagcctgcaggcatctgtggggaatcccagcctgcaggttcttggagaagcaggtgaacct

SEQ ID NO: 1439 - DNA, 482 bp, Homo sapiens
  misc_feature (1)...(482): n = A,T,C or G
nccttgatnaccccctntgcagngngcttggaatacccatttatatgancaaccgaatcatacggttacaagctgtcttaaaaataatcactgcattcggcagagccttgactattctggcccagcaagaaactcagatgagaaatgctatctatcaaaatagattagctctcgactacttgctagcagctgaaggagaggtctgtaggaaatttaaccttactaattgctgcctacacatagataaccaagggcaagtagttgaagacatagttagagatatgacaaaagtggcacatgtgcccgtgcaagtgtggcatggatttgatcctggggccatgtttagaaaatggttcccagcgctaggaggatttaaaactcttataataagagttataatagtaataggaacctacttactgctccctcgtttgctacctgtacttcttcaaatgataaaaagcttcatcgctaccttagta

SEQ ID NO: 1440 - DNA, 492 bp, Homo sapiens
  misc_feature (1)...(492): n = A,T,C or G
nggcggtncnnncctgaaccctattagtggcggtaattcggggcggccttcctgctgcccccctccaccagtgccttttgcagagagatattttgtgtacacagaagccattccgagtctgggacctgcccctgtgcggatcctgaccccagccaacagctgagctgccgggcctcctcgaggcccctaagccacccccagaggtcccatctgaagctggagtaccctggggtcagcagcaagagaaagaagaggagattttctgtttgtttttcccctcagccctgccaccgtggggagactggattttctcttcatcctgtctctctcctccttactcttggataaagaaacagcctgtgagcacacaggcagaccggcccagtgaaaaaaaaaaaaaaaaaaaaaaaggggcccctcaggtttaaagggccggttaaaacccactgactagccttgaatgggctttttagtggcaaccctgctgtgtgt

SEQ ID NO: 1441 - DNA, 428 bp, Homo sapiens
  misc_feature (1)...(428): n = A,T,C or G
atcgcaatgatgactctcagacagngnggnggaattcgggacatcgcccgcacctacccggaacacgagttcttcaagggccaggacagtctgggccaggaggtcctcttcaacgtcaggaaggcatactcgctggtagaccgggaggtgggctactgccagggaagcgccttcatcgtgggcctgctcctcatgcagatgcctgaggaggaggccttctgtgtgttcgtgcggctgatgcaggagtaccggctgcgggagctcttcaaacccagcatggccgagctcgggctctgcatctatcagttcgagtacatgctgcaggagcagctcccagacctcaacacccacttgcgttcccaaagcttccacacatccatgtatgcctcgtgctggttcctcacactgttcctgaccaccttcccacn

SEQ ID NO: 1442 - DNA, 489 bp, Homo sapiens
  misc_feature (1)...(489): n = A,T,C or G
gagagccgncttcgagtcatagagagctatatcagtgtggtggaattcgtcagactctgatgattaaccagctcatagatatggagtggaaatttggagtgacatctgggagcagcgaattggagaaagtgggaagtatatttttacaactaaagttggtggttaagaaaggaaatcaaaccgaaaatgtgtatatagaattaaccttgcctcagttctacagcttcctgcacgagatggagcgagtcagaaccagcatggagtgtttctgctgatttctgtccctgcatctcccctggccccgttccctgccctcctcccttccctgggtgactgctctgagaggcacttcactcacaggcctgtgggatgctccatggggccctgctggctccatggggcccaggtgcaaagggtttctgaaaaacagcaggattaagtactgaaagagcccaacacaattaccctgtaaactctctgttagggcaa

SEQ ID NO: 1443 - DNA, 461 bp, Homo sapiens
  misc_feature (1)...(461): n = A,T,C or G
tgcgcgcgnnnnnnnttgacccgcattccctaggccgngncgnggaattccagcctcgccgcgcgggggcaccgccgtcatcctggacattttccgccgtgcggacaattatgatgatgggaagctgtccttggaggaattccagctcttctttgcagatggcgtccttaatgagaaagaactggaggatctctttcacacgattgactctgacaacaccaaccatgtggacaccaaggagctgtgtgattactttgtggaccacatgggtgactatgaggatgtcctggcctccctggagaccttgaatcactctgtcctgaaggccatgggttataccaagaaggtatatgagggtgggagcaacgcggaccagtttgtgacccgcttcctcctgaaggagacggccaatcacatccactcgctgctgagctcagtggagagtgcggtggaggccatcc

SEQ ID NO: 1444 - DNA, 456 bp, Homo sapiens
  misc_feature (1)...(456): n = A,T,C or G
nggcgcnnnnnnnncctgagtagcantgcaatgggcggacntcggggggaaaggtggctggacctctgttggctgagaagagcatcccttcagcttcccctccccttatcagccactaaaagattatttaattccagattggaaatgacattttagtttatcagattggtaacttatcgcctgttgtccagattggcacgaaccttttcttccacttaattatttttttaggattttgctttgattgtgtttatgtcatgggtcatttttttttagttacagaagcagttgtgttaatatttagaagaagatgtatatcttccagattttgttatatatttggcataaaatacggcttacgttgcttaagattctcagggataaacttccttttgctaaatgcattctttctgcttttagaaatgtagacataaacactccccggagcccactcac

SEQ ID NO: 1445 - DNA, 473 bp, Homo sapiens
gcctgaatcctatgcagggcgtagatccccctgatacatggatggacaccatgtaaaggatatttcatgtctgaatcgggacccagctcgagtagtagttgtggactgcaagaaggaagccttccgcctgcagccctataacggcgttgccctgcggccctgggacggcaactctgatgaccgggtcttgttggatctgtctgccttcctcaagaccattgcactgaatggtgtggaggacgtgcgaaccgtgctggagcactatgccctggaggatgacccgctggcggctttcaaacagcggcaaagccggctagagcaggaggagcagcagcgcctggccgagctctccaagtccaacaagcagaacctcttccttggctccctcaccagccgcttgtggcctcgctccaaacagccctgaactctgggcctcctcaaactcagtgcctgggtccagggccccagtgctt

SEQ ID NO: 1446 - DNA, 484 bp, Homo sapiens
  misc_feature (1)...(484): n = A,T,C or G
gaatcgataccctgngagnggccactgagaccgtatgnagtgncgnggaattctgggagcttttgcaagcgggaccaggccccaacacccgatccaccagcgagagaaggagcccggcatgcggcgcactcagagtgacgacacacgcgagtctccgcccgaaagaacatagctgttgaaactgatgtaagagtaaacaaagacagtcttactgacctttatgtccaacatgcaataccattgcctcagagggatttgccgaagaatagatgggggaaaatgatggaaaagaaaagagaacaacatgagattaaaaatgagactaaaaggagtagcactgtagatgggttaaggaaaagacccctcatcgtatttgatggaagttcaacaagtacaagcataaaagtgaaaaagacagagaatggagataatgatcgactgaagcctcccccgcaggcaagctttaccagtaatgcctttagaa

SEQ ID NO: 1447 - DNA, 459 bp, Homo sapiens
  misc_feature (1)...(459): n = A,T,C or G
ntcgagttccctatcccttgtggnggaattcgatgcagtgagccaaaatcatgccactgcactccagcctggaccacagggtgagactctgtctcaaaaaaataaataaataaaaataaagaacgctgaaccctaaattaccaatggggaaagatgaaagtaacccagtttatgctgcagaacccccaatggctcagtgattatctgcagataccgaggtgaggcggagctgatgacagcagagtgcttcccttcccttctttgccttccctgcgcccagttactgtgtctgatggaaacactggtgaggtctgaggcgcaggggtgagagaggctgtcccctctatgggcacatgcagctgctgtggtgccaggcactctgatgggctccaggtgtctggggtgggggagagtggcagacacagaaggacagccgaagtgggtctggcccaggagatg

SEQ ID NO: 1448 - DNA, 423 bp, Homo sapiens
gacttcgcaatccctcgactcaagaggtggcgacgatggcggccgagatccatttactgtgatgcacaacctcgaggcacagggagggcgtgtctggcacgggacatggttgactgtgcaatgagacgatacctctgtgctcacctttacaaacgaggggggcgccacaatttgcctaacagggggtcttgccacctgggcagcgggcagcacacagcatgaacttggtcaccttctgagggtgaacttgcgcacacacgtcattggaaataacatggaggtccacacactgaagtttctttggggtcaagaactcctctggttcaatgctgccccagcctgaggcgtagcaggtggtccccagtgctggctcctgggtgggcaggtccatgaccttcacagcattcgtgagctcggcaggat

SEQ ID NO: 1449 - DNA, 451 bp, Homo sapiens
  misc_feature (1)...(451): n = A,T,C or G
tgggatnnnnatccgtctgatgcatngacngnacnnnctgggtccaccactgtgccccaagccgaaatcaagtatcctctttggcagccaagcctttgttttagaaaaaatgagtcatctgggagacgtgggggctgcccacctggtcaccttccagattgagatgcagtggcaggagcctcgggaattaacttgcctgccccggccaagcagcaaagtgtctcctctagtgtttctaactcatggactgcacccatttctgcctgccccaccaggctctaggcttgacagttcaaggtaagatcctcctcccttccttcctccctagggcaagaggcttgcaaaattcctgggccctaggcaagtgggttcctccctgggaccccaacaggaaaatggaggagagagatgggcccagagagggtgcctcacctctgatttggtttggaag

SEQ ID NO: 1450 - DNA, 435 bp, Homo sapiens
  misc_feature (1)...(435): n = A,T,C or G
ntttgtccgatcctnattgtagtcccctagtccgcgtggtggaattcgtgatggagcctcaggaactctgacagggatttgaaccgtgttctgaaccaagagaacccttgcttcccagaatgcaccttcataccagggctgaacgttccctttagcctcatgtgcttttttattttttttattttttttatttttatttttttttcgaggcagattctcgatctgtttcctggactggagtgctatgccgcaatctttgctcagtgcattctccgcctcctgggtttgagcgattcttttgcctcagccttccgagtagctgggactacaggcgcgtgccatcacacctggctaatttttgtatttttagtacaaacagggttttgccgtattggccaggctggtctcgaactcctgacctcatgaactgcctgc

SEQ ID NO: 1451 - DNA, 488 bp, Homo sapiens
  misc_feature (1)...(488): n = A,T,C or G
gggatgaggagnccccnncccactgagnaattaggaccctacgaagngccgcggaannccggaggtggacagctatgactcggatgatgccaccgccctaggcacgctggagtttgaccttctctacgaccgggcctcctgcactctgcactgtagcatcctcagggccaagggcctcaagcccatggatttcaatggcctcgccgacccctacgtcaagctgcacttgctgcctggagcctgtaaggccaataagctaaaaacgaagactcagaggaacacactgaatcccgtgtggaatgaggacctgacttacagcgggatcacagatgacgacatcacgcacaaggtgctcaggatcgccgtctgtgatgaggacaagctgagtcacaatgagtttattggggagatccgcgtgcccctccgccgcctcaagccttcgcagaagaagcattttaacatctgcctcgagcgccaggtcccgctgg

SEQ ID NO: 1452 - DNA, 459 bp, Homo sapiens
  misc_feature (1)...(459): n = A,T,C or G
ntcgagttccctagcccagtgtggnggaattcagcctggtcttgctgctgctcccaggcgaggggctctccgctgacagcggacctcggggccctatagttgatgccgggtgctgcctggcgtcagccgtcaggagcccagcccggcgccccatgcgtctcagggcacacctgtgacccgtgagcacaagtgacacctccctgcttgggagcacagcggtgtggctcggcaggaggtggaaagggagaaccgtactgtgttgtgtactgggcttcttccagttccttggaggagaaacatgtctgtcctgaatgccacctcagttggggtctttctggccagcccaggccaggtgcccctataaactgagaatgggcctctgaagaaggccccccacagcccacgaatgcaggtgggcacgagggaggctgtgcccaccctacgccagcaagggttggt

SEQ ID NO: 1453 - DNA, 460 bp, Homo sapiens
  misc_feature (1)...(460): n = A,T,C or G
attganctcgtagaacactagtccatgtggtggaattccttcttttgcgtcgccagccgagccacatcgctcagacaccatggggaaggtgaaggtcggagtcaacggatttggtcgtattgggcgcctggtcaccagggctgcttttaactctggtaaagtggatattgttgccatcaatgaccccttcattgacctcaactacatggtttacatgttccaatatgattccacccatggcaaattccatggcaccgtcaaggctgagaacgggaagcttgtcatcaatggaaatcccatcaccatcttccaggagcgagatccctccaaaatcaagtggggcgatgctggcgctgagtacgtcgtggagtccactggcgtcttcaccaccatggagaaggctggggctcatttgcaggggggagccaaaagggtcatcatctctgccccctctgctgac

SEQ ID NO: 1454 - DNA, 457 bp, Homo sapiens
  misc_feature (1)...(457): n = A,T,C or G
gcggctgnnnnncctgaatagagtncataggccangncgnggaattcggaggctgagattgcaaactatgaggcgtgcctcaaggaggaggtagagaagattaagatgttcaagattgatgaccagagaaggacccacaactacgatgagttcatctgcacctttatctccatgctggctcaggaaggcatgctggccaacctagtggagcagaacatctccgtgcggcggcgccaaggggtcagcatcggccggctccacaagcagcggaagcctgaccggcggaaacgctctcgcccctacaaggccaagcgccagtgaggactgctggccctgactctgcagcccactcttgccgtgtggccctcaccagggtccttccctgccccacttccccttttcccagtattactgaatagtcccagctggagagtccaggccctgggaatgggaggaa

SEQ ID NO: 1455 - DNA, 459 bp, Homo sapiens
  misc_feature (1)...(459): n = A,T,C or G
agcggctgnnnnnnaatcgttagcctatcgattgtgcgggaattccgtccggactcccccgatcccagctttctctcctttgaaaacactaagaataatgtcactgcatcagtttttactagagccaatcacctgtcatgcctggaacagggatcgtactcagattgccctcagtcccaataatcacgaagtgcacatctataagaagaacgggagccagtgggtgaaagctcatgaactcaaggagcacaacggacacatcacaggtattgactgggctcccaagagcgaccgcattgtcacttgtggggcagaccgcaatgcctatgtctggagtcagaaagatggtgtttggaagccaaccctggtgatcctgagaattaatcgcgcagctacttttgtgaagtggtcccccctagagaacaaatttgctgtgggaagtggagcacgactcatttt

SEQ ID NO: 1456 - DNA, 489 bp, Homo sapiens
  misc_feature (1)...(489): n = A,T,C or G
nggattgatacctctgtgcangngccactcgagatccctagtcagtgnggnggaattgctcatcgtgactactatcgctgtcatgtatgggcgtggctagcaaggaggcaaggcccgcgccaaggccaagtcgcgctcgtcccgcgctggccttcagttcccggtagggcgagtgcatcgcttgctgcgcaaaggcaactacgcggagcgagtgggggccggcgcgcccgtctacatggctgcggtcctcgagtatctgaccgccgagatcctggagctggcgggcaacgcggctcgggacaacaagaagacgcgcatcatccctcgtcacctccagctggccatccgcaacgacgaggaactgaacaagctgctgggcaaagtcaccatcgcccagggcggcgtcttgcctaacatccaggccgtactgctccctaagaagacggagagtcaccacaaggcaaagggcaagtgaggctgacgtccggn

SEQ ID NO: 1457 - DNA, 427 bp, Homo sapiens
agacggcattggcagtgatcccttcttccattgttctgccctctcagaaaaggaagatagagcaggctgaacatgtcccagacagtaactttggtgtaaatgcttcctgtttttctgccacaagccctttggtcttacccactacctcagagcacactgctaagaaaatgaaagccaccaatgagcccagcctgacacatatggactgctcgacagagcagcctgggagcatcctgggccccgaatgtgcctcctgcaaaagagtattttctccctacttcaaaaaggagccggtgtaccagctgccctgcggccacctcctgtgccgaccctgcctgggtgagaagcaacgctccctgcccatgacgtgcacagcctgccagcggccggttgctagccaagacgtgctgcgggtccacttctgagt

SEQ ID NO: 1458 - DNA, 459 bp, Homo sapiens
  misc_feature (1)...(459): n = A,T,C or G
ggtggcnnnnnnnattgaattgcattagcctatgccgngncgnggaattcgatggggccagccaggaaggggcccatccttctccccgggagcacagggacaaccagagaccggcatgtaaccaacaagtcatggggcagggtgtgcctgcggagatgtgtgtgtggtcccaaggcagtcccaagtcaaagcattcgtggaagccccttggggcccccttcaggggttcacttggccgaggagaggcctcggtgtggtgaggatgcattggtggtgtcagagctggtgctgttggggacagcagcaggagcatgtgtttgagctgccctcacctcccccgccgcccccggccccacggnaggcggtggagcaccggatccgtgaggagcagcgggcgatggaccanaagatcgtcctggagctggaccggaaggtggctgaccagcagagcacactgga

SEQ ID NO: 1459 - DNA, 422 bp, Homo sapiens
  misc_feature (1)...(422): n = A,T,C or G
gagggcccatctgggcaaggcccccagcgcctgccttctctcccggggccctgtgggcaagcctcctgcttcactttcaggtttctcgaagtgccttcttgctcctgtctgtttccccatcctgccagatttctgtttctcttgctgggcttttggcagtagggggctgtgttggtgggccctacgaagatgctcagtgctcgagatcgccgggaccggcaccctgaggagggggtagttgcagagctccagggcttcgcggtggacaaggccttcctcacctcccacaagggcatcctgctggaaaccgagctggccctgaccctcatcatcttcatctgcttcacggcctccatctctgcctacatggccgcggcgctactggagttcttcatcacacttgccttcctcttcctctatgn

SEQ ID NO: 1460 - DNA, 484 bp, Homo sapiens
  misc_feature (1)...(484): n = A,T,C or G
agggggnnnnatcgancctcgagaacctagtcagtgtgctggaattcaagccactccatagtcacacactcctttccccaaaatctttctttgtaagtctatttatttatttatttatttatttatttatttttgaggatgtctgggccaagagcaccttctccatctggcaacaaaagccagatttgggttctaatacttgtgccccacccccacccccatctcagctgctcacttttgaatctccccaaacccaagcctctgttgccctctgggctgttttggatggctttgcaccctgctcaggcagtaggcaggagagggtcaaggtggaccctttgagaagggacagaaaacaaaaagcacaaaggtgagggggtgaggctgaacagtggccccactcccctcctgctggcactgcctcccccagccacctcctcttgccctcttcccatccaccccaggtagtggcaggaggtgaagt

SEQ ID NO: 1461 - DNA, 425 bp, Homo sapiens
aggtatggcacggggagtatgactggccaatctgtggtcacaggtgagacaactccccaggacattgccactcatactccagaaaaagtatgtggccctccctggccagggctcgggtcttgccaagcaccccgtttgaccagctcagcccaaaggccaagtgaccatatctcctttgatgttcttttgaagcttcgcctcttggtgtcggatattccttagataccaattagagctccttctgaaacaggcctaccttctgttggctgaaccaaagcaaatgtggatttgttctcactttggcctggtaacttacggagcccaaggatctctgaatccttctgactcccagctcctgctcagcccctggaagccaagagtctgccccttgtctgcctggcatcatccaaggctatcagtatcat

SEQ ID NO: 1462 - DNA, 479 bp, Homo sapiens
gggggggtttgaattcgagaacctagtccatgtgctggaattcttaatatttcaacagtctatttaagggcagtatttcttctctaaggggaataaagtttgtgttttgaaacagtaatatctaagtaaatatttctttcttcatggagaggggaggagtctgccacaggggtttctgtctaatcacagacgggacactggccacttctctctaatcacagacagcgcagcatcccaggggccagcgatccagttcactctctgcctgtgtcggaaggaccagtctgaggactgtttcttagtgatccagctccaaggtgtactctaaggagatacacctgcgccccttctctctcctgcataatgggaggaaagctgacattttgctgaaaagcaacctaatgtatgtggttaaatgatagagggcccgtccccacagcagggctggggcagatctgtccactgggcagggcaggggg

SEQ ID NO: 1463 - DNA, 481 bp, Homo sapiens
  misc_feature (1)...(481): n = A,T,C or G
aggtgggggatcgagaatttgatcaccgtggnggaattcccttcaatggcacagcactcaggacagcactgccactaaagatgccaccatctggctatgctctaatcgggcatatgtgtcctcatcccatctgcagagggtctacaggggcttgcctcttgttgccagcactgcctggctctgcagcctactcaagaaaagaaaatgaaagcagcctgactccattcgtcatgattccttcttttccttttgaggctcacagacagaccgttggccagcctcgcccaggactgacgtcaagttcatcttttgcccttgtttgggctgggtcctctggcccagcgatggaacacttgtgtaccttcacctggtgccctgggctgctccagaccctggcctctggctgtgccaaagcaggaaggacagactcagggtgttgcctgtttgctctggtggagagaggctaagaatcgcagtgacg

SEQ ID NO: 1464 - DNA, 482 bp, Homo sapiens
  misc_feature (1)...(482): n = A,T,C or G
cggcgggggaatcgagnatcganaacatagtcagtgtgctggaattcggaatatttgttgaatgaatgaatgttgggtctgtctccctttactattgtgcttgtagctcaaaagtatttccactgatggtacagaaatccttctttggaaactggatctcatgttcattatgactggctggttcaggagtaattggcataaagtttatgggggtatcgtttggatttgtgtcctttgtgtagcttttggtgctccagagagaggaggccagttttggagaaaatttgctcatggataacttgggaggacgctctgatttctctactactttctttcaaaaatataattaatcatgagttcagatggaaacaaagactcttccttttggctcanggctgaattgtagcaaagagattttgaagagttattacctggggaaactaagagtttgttgcagaagctgcagtgccagcctcattttt

SEQ ID NO: 1465 - DNA, 488 bp, Homo sapiens
  misc_feature (1)...(488): n = A,T,C or G
ggtgggcaaattggaccctatcatggggtgcattccgcctttcatgtaaccggagctgagagagtgaaagtcgaatatcctattagcacagcaagcacagagggtgtccggggctgggctgtcctaaaagcatctgcagatcaatctgaaagctgttctactctctggtcatttcttgaccacattctgattttcagaagtatgaacaagggtaaatgaactggtcagaaagctcaggaaagaagacaggtgcaaatcagaaccaatttccctcacaatgtaggagctaacctgagaagggaaaatatcggggaggagtctcaacacagcgccctgcttgtaaacatcaggagcagtaaattgaggacaagccttaaagtgccaaggtacatgaaatggacacaaaaacagggacacaaagacttctgactntggactgctttgaccaggcctggcaaacaagtttcattgggaatgtcatctctaat

SEQ ID NO: 1466 - DNA, 495 bp, Homo sapiens
  misc_feature (1)...(495): n = A,T,C or G
cgaggggggattggaccctnnntttgagatccctatccgtgtggtggaattcctggataggcagaaatgggccggcaggaggctcctgacagacgggtctgtgcagtgccagcgcaggcagggtgctgtggccaggtcctacacctttatggtcagggttccaagacgtcatgagacggcttgttcagccagttagttgtcggtgcccctctgaacaaggacccccccaaggaagggggtggcctcgcatgggtggctggggatcctgctccgtcccacatgtggccagcatggccgacactggcatttctcagctcgacaacaatttttctgactttggatattttctagattttgtgttggaagaaaaaacacttggcagtcaaatactaggcagattgaaatgctgactttctcactgtttcattttgtgattgaagtggcgtgcaaacactcaatctggtanggatgatgcccgcgcggagctgacccttn

SEQ ID NO: 1467 - DNA, 474 bp, Homo sapiens
  misc_feature (1)...(474): n = A,T,C or G
ggagttcaggggaannnggaactgaaatacctgagagccctgcggaannncgcaccanaagcaagattccccaaatcaccctcaactttgtggacctcaagggcgactcccttcttgtcttcgcccaccagtgaccgtgagatcatatcacctaagataaaggagcgaacccacaatgtcactgagaaggtcacccaggacctgtccctgggcgccgacgtgctgcctgagtacaagctgcaggcaccgcgcatccaccgctggaccatcctgcattacagccccttcaaggccgtgtgggactggctcatcctgctgctggtcatctacacggctgtcttcacaccctactcggctgccttcctgctgaaggagacggaagaaggcccgcctgctaccgagtgtggctacgcctgccagccgctggctgtggtggacctcatcgtggacatcatgttcattgtggacatcctn

SEQ ID NO: 1468 - DNA, 483 bp, Homo sapiens
  misc_feature (1)...(483): n = A,T,C or G
agggtgannattcgagaacctgagcacngtggtggaattcctccgccggagcatccgggccgggcggcctccggggctgccagagcagcagggtatcatgatattagctggtttgacatcaagtcatttgtgagtcatcagatcttctcctgaaaatgggagacacagtagggcccctcccaggagctcttggctgttgctgatggcagaagccaagcttgtccaaggttcacttgtagcccctcagcgtcagctcagctggtgtcgtcctgaccatggacggcgcgtcggccgagcaagatggcctccaggaggacagatcccacagtggcccctcgtctctccccgaggccccactgaagcccccgggcccactggtgccacctgaccagcaggacaaagtccagtgtgccgaggtaaacagagcatccacggaaggggaaagcccggatggacctggccagggaggcctctgtcagaacg

SEQ ID NO: 1469 - DNA, 480 bp, Homo sapiens
  misc_feature (1)...(480): n = A,T,C or G
natcgatttccctactccagngtggnggaattctagattagtattaactctagttaccctactgatctattgaacaccaggtcttacttcttctgtcttaactgtaattatcttcattttctagcaatgctatttctcatctctaacttgtatcatctcaggatgctgtatatttcttttattttttattttttatttttttatttttattgatcattcttgggtgtttctcacagagggggatttggcagggtcataggacaatagtggagggaaggtcagcagataaacaagtgaacaaaggtctctggttttcctaggcagaggaccctgcggccttccgcagtgtttgtgtccctgggtacttgagattagggagtggtgatgactcttaacgagcatgctgccttcaagcatctgtttaacaaagtacatcttgcaccgcccttaatccatttaaccctgagtggacacagcacn

SEQ ID NO: 1470 - DNA, 455 bp, Homo sapiens
  misc_feature (1)...(455): n = A,T,C or G
aatagatgtgataacantacgcagngagcaggaattccacctgccgagcgtctgcgggggccgcttccaccctcagcggatgataatctcttgacaccttccgagcgtcagctcactccccttccaccctcagctccaccctcagcagatgataatatcaagacacctgccgagcgtctgcgggggccgcttccaccctcagcggatgataatctcaagacaccttccgagcgtcagctcactccccttccaccctcagctccaccctcagcagatgataatatcaagacacctgccgagcgtctgcggcgagcgtctgcgggggccgcttacaccctcagcggatgataatctcaagacaccttccgagcggcagctcactccccttccaccctcagctacaaccttatcagatgataagatcaagacacctgccgagcgtatgcggaggccgg

SEQ ID NO: 1471 - DNA, 452 bp, Homo sapiens
  misc_feature (1)...(452): n = A,T,C or G
ntcgagttcatagtccgtgtggaggaattcccgcaggctcatgtgtgtgcggacaggtgtcgccacctccttccagaccgtctgccccttggggggaggcagagtctgtgcctgcacccgccaacccgggacctgaactgggagccacgtgttgccctgtgaaaaaagcccccgagtggttgtggtttgcttttttacaccacagattgggttagaatcattttccaaaaacttgcaagacttgatcacccttgctttaatcggcaaggaagggggctcagagaggttatcgcaacgtagggaggccgcccgatccgtaagcagggaaaccggaactcgacctggatctatggactgccaagttcaggccctttccagcctcagtatttgctaaccaggaagttttcaggctctcaggcgcgccccctacgcggtttctggttcactccttt

SEQ ID NO: 1472 - DNA, 479 bp, Homo sapiens
  misc_feature (1)...(479): n = A,T,C or G
atcgatttgcctacccagnggcgggaattcctcgcaagtcatgggaagactcacaggaagctgaaatgcatattgctagatagaagaaccaatccgaaaaggctactttctctatgattccaactacgtgactttctggaaaaggcaaaactatggagatggtaaaaagagaaaaggatttctgctttcaaatccgctgtttcctgaggctgggtgctgagttcagctgcccctggaggagcagcagctctgggccgctggcagggccgcatcctcttcagtctggacaaattccctgcagccaggggaagtggcccatgcctgctgtcctggtatgcaacatcggacctgcatgctggaatttgacccttttcctgcctgacacccagcaaaataaaccccagggaagggatcaatgcctgcaaccggaatccagaagaaagaggagtgacagataagccctgggtcagaggccagtg

SEQ ID NO: 1473 - DNA, 481 bp, Homo sapiens
  misc_feature (1)...(481): n = A,T,C or G
nttgatcgacgtccctagtccannggcgggaattccagaggaaggaggcgacagcgccggagcagtgtcctgtttcccagaggaacagttcatttcaacagccagggagaaagcctggatgctcaagttggggaatggcggtcaatgtgtattctacctcgataacccaagagactatgagcagacatgacatcattgcatgggttaatgacatagtatctttaaactacacaaaagtggaacagctttgttcaggagcggcctattgccaattcatggacatgctcttccctggctgcattagtttgaagaaagtaaaatttcaagcaaagctggaacatgaatatattcacaattttaaacttctgcaagcatcatttaagcgaatgaacgttgataaggtaattccagtggagaagctagtgaaaggacgtttccaggacaacctggattttattcaatggtttaagaaattctatgn

SEQ ID NO: 1474 - DNA, 456 bp, Homo sapiens
  misc_feature (1)...(456): n = A,T,C or G
aatagaaatcgataacactagtccangngcgtggaattcgacaagatggcggataaggagaagaagaaaaaggagagcatcttggacttgtccaagtacatcgacaagacgatccgggtaaagttccagggaggccgcgaaggtgaggaggctcccgctgtcggtaccccctctttaaaaatttcaaataaacccagcaacagagatgatgaggacgcatgcggaagcacctcttttatttattttcattattttttttgagacgcagtctcgctctgtcgcccgggctggagtgcagtggtgcggtctcggctcactgcaacctccgcctcccaggttcaagtgattcttgtgcctcagcctcccgagtagctggaattaatgtgtaccaccacgcccggctaatatttgtatttttagtggagaggccatgttggccaggatggtctcaagctc

SEQ ID NO: 1475 - DNA, 487 bp, Homo sapiens
  misc_feature (1)...(487): n = A,T,C or G
gcgtggggnattcggaccctagtccgtgtggtggaattcgttntgatgagatggaaaaattcctagaaaattataacttaccaaaactgaaagaagaaagataaatgaccccacatttgttaaataaattggatctgtcatgaaaatatttcacacagtggaacctctagtcacaaatgcttcaccagtgaattctactaaacatttaaggaataaatagcacccatctcacacaaactcttctagagccgaggcataatgggaacagcaactccacctgtcatgtttcacctccaggaaaacgtgatacccaaactcaacagagaaaaaataaacttacagaccagtctcactcatgaacataaacagaaatcctcaacaagatattaacatataagacctggcaattggccaggcgtggtggctcacgcctgtaatcccagcactttgggaggccgaagtgggtggatcacgaggtcaggagatc

SEQ ID NO: 1476 - DNA, 483 bp, Homo sapiens
  misc_feature (1)...(483): n = A,T,C or G
attcgttctgcactactccagnggtggggaattcgccatctcacagcctctggaaggggctggggccacgtgccccacagggtcagagcccctggcaggagagacgcccaaccaggccctgaaacccggggcaaaatccaacagcatcattgtgagccctcggcagaggggcaatcccgtactgaagttcgtgcgcaacgtgccctgggaatttggcgacgtaattcccgactatgtgctgggccagagcacctgtgccctgttcctcagcctccgctaccacaacctgcacccagactacatccatgggcggctgcagagcctggggaagaacttcgccttgcgggtcctgcttgtccaggtggatgtgaaagatccccagcaggccctcaaggagctggctaagatgtgtatcctggccgactgcacattgatcctcgcctggagccccgaggaagctgggcggtacctggagacctacan

SEQ ID NO: 1477 - DNA, 454 bp, Homo sapiens
  misc_feature (1)...(454): n = A,T,C or G
nttcgagttccatangcagtgtggaggaattcgacaagatggcggataaggagaagaagaaaaaggagagcatcttggacttgtccaagtacatcgacaagacgatccgggtaaagttccagggaggccgcgaaggtgaggaggctcccgctgtcggtaccccctctttaaaaatttcaaataaacccagcaacagagatgatgaggacgcatgcggaagcacctcttttatttattttcattattttttttgagacgcagtctcgctctgtcgcccgggctggagtgcagtggtgcggtctcggctcactgcaacctccgcctcccaggttcaagtgattcttgtgcctcagcctcccgagtagctggaattaatgtgtaccaccacgcccggctaatatttgtatttttaggggagaggccatgttggcccatgtggtctcaagctcctggg

SEQ ID NO: 1478 - DNA, 482 bp, Homo sapiens
  misc_feature (1)...(482): n = A,T,C or G
ntttgattgacgaccctagtccangngcgggaattcagcttgtctctgatgcagaacactcctagcattctctctcagggctcttttcatttgaatgacctagaggattgagctcatgtaggcactgaaggcttccacctctcccatacccgcaaggccgatctgccttcagctcccagcaagtgtggggcagcgcgggccacagagtagggtgcagggatggggcccctgcagcacccagggtctctggtatggagacagcagtgtggagtctggaaactcagagtccttctggctgccgccgcggctttaccatctggagagccaccacgctgaagcctcctccaccctgagcgcttggctggcttcaggcctgtctcaagatgcaaggagaggatacaccaccatcctgctggctgctctgagtgtcacccccctgaaagcagcacagggtgcccctcccatcctggcaccccctactt

SEQ ID NO: 1479 - DNA, 472 bp, Homo sapiens
  misc_feature (1)...(472): n = A,T,C or G
agcccaggnnngnnnnnntttcgagtttcatantcagtgtggtggaattcggtaccgatcccatccttctacaggggaaccacaggacagcaagtatttatgtggaacttagttctcaagataaggaacttgaagcagagtgactaagcaatttgcccaagatgatcagcttgtgaaactatggaatgcagatttaagaccaagaagttcaaatccatggtctatgcacttcatcgtcatgctatgcttgaactcacaagatagaggctcatttctgtcaccccatgttggagtgcggtggcgtgatcacggctcactgcgggctcaaagtcccgggctcgggtggtcctcctgcctcagctgctatagatgggatttcgccatgttggccgggctggtctctagctcgtgacctcaaatgatccatctgcctcgacctcccaaagtgctgagattacaggaaaaatcacgn

SEQ ID NO: 1480 - DNA, 480 bp, Homo sapiens
  misc_feature (1)...(480): n = A,T,C or G
atcgatttgcctacccagnggcgggaattcgataaagcagaattgcagatccaaaggaggtaaccatttctgaggcatctgagacacgttggaagtctgcactctggaaattatacacaaatgggcacactcatggacaagatgggaaaataaatgcctcaagaagctgcacagattgccccaagactctcaggaggtgctgctatcaccacagagcagcccgattgcggctggcgtgtgcctgagctggctgtccctctggccacatgtccggtgctacagggtcttcaagggtgtgtggggctgggcagcatccgccaggcccaggccccgggaactgaaggtgtttcctccacgtcagcctctgcacctcctaagcacacacctgctgcaggtgccaggagtcagtgcctgagacacctgaggacgcctcctccttgaaggctggagtcgactgactgcatcttgtactgattntgn

SEQ ID NO: 1481 - DNA, 455 bp, Homo sapiens
  misc_feature (1)...(455): n = A,T,C or G
atttgatgaccactagtccagttgggtggcattcgttctgngggngctgagagctgccccccatcaccacgcaatcacacccctctgagctgaagcaaatctgaggctgaagaattaagttttccccaagcaaggaaggcaggtggtcagagagatcaaacgctgaggcgtggggattgcaggattcaggaggcagcccctttggggaagaggagggtgcattttccatggagcccatgtcagagtccactccagctcagcaggaaagtggaattgcccagtactgcctgccagctgggtctcccaagcaactaccccaagacataccaacagtgaagccaggacagcaccatgccatcggcgctccagtctgtctggctgggaggaaagtgctgggcatcttacagtaactctagaagttcctctgactaggctgcaatcccacctatatgctg

SEQ ID NO: 1482 - DNA, 486 bp, Homo sapiens
  misc_feature (1)...(486): n = A,T,C or G
gtctggggnngaactgttgcctaggcagnggactgagaccaatctccatgacgagacaagcctggcactttcaccagtcaacatttaacaacgtgatggagcagaactttaagaaccgtgagagctacccagaggacacggtgttctacatccctgaagatcacaagcctggcactttccccatagctctcaccaatggcagtttctccccctcggtgaataacggctctgtgaactggaggacgggaagctttcactgccctggccacatcagcctcaggagggaaaacagtatcgacagccccacggaactgaagagacgcaattcttccagctccatgaacagccgcctgagcatctacgacaacgtgccgggctccatcctctactccagttcaagggacctggcggatctggagaacgaggacatcttccccgagctggacgacatcctctaccacgtgaaggggatgcaacggatagtca

SEQ ID NO: 1483 - DNA, 486 bp, Homo sapiens
  misc_feature (1)...(486): n = A,T,C or G
ggggggtnttttgagaatctagtccctgtggtggaattccaagtgctgggattacaggcgtgagccactgtgcccagcctcagattgtatttctattggatagtgctgccctaactggttatttatttgtgtatgaaagctattgatttttgtttgtttgtttgtttatttcgagatggagtttcgctcttgttgcccagtctggggtacaatggtgcaatcttggctcactgcaaccttcgcctcccaggttcaagcgattgtgctgcctcagcctcccaagtagttggaattacagatgatgtctttctacctaaagatattgacctagacagtgtggatatggatgagacagagagggaagtggaatatttcanaaggttctgcttggattctgctagacagacccgacaaagactgtctatcaactggtccaattttagcttgaaaaaagccacctttgctgcccactgaatgaggactccn

SEQ ID NO: 1484 - DNA, 490 bp, Homo sapiens
  misc_feature (1)...(490): n = A,T,C or G
aggggggnaatcgagnatcgagaacatagtcagtgtggtggaattcgccgtcttccagatgctcaagtccatgtgtgccgggcagaggctagcgagcgagccccaggaccctgcgggcgtgtctctgcccacgtcgagcgtgcccgagacccgagggagagacaaaggcagcgctgccctcgggggagtattggccctggcggaacgcagcaaccacgagggatccagccagaggatgccacgccagcccagcgctaccaggctgcccaaggggggcgggcctgggaagagccctacgcagggcagcacctaggatggggcagagacttgtcacatctttgtccccagcaaaggctacatgttacctccttcagttgataataaacctttctgagatgcagagggtccaggtcncaaaanactgtctatcaactggtccaattttaacttaaaaaaanccccccttgctgtccaatgaagggccacttaa

SEQ ID NO: 1485 - DNA, 483 bp, Homo sapiens
aggggggttttggattctagtccgtgtggtggaattccagagaatgttctagcccttagcattgatgctggaacccagtgtcttgcttctgcttgggttttcatgatctttccttgctctgggtgagctgggggctggttctagatcagaaccttcagaggcactaagaaatgccacctggagtggagttaaagaagttattatttttttttaactcctactattgtcagaggtgggtgaaccagagcaactccattttgaataggtgctggataaaatgaggctgagacctattgggctgcattcccagatggttaaggcattctaagtcacaggatgagatgggaggttggcacaagatgcaggtcataaagaccttgctgataaaacaggttgcagtgatggccgggcgcggtggctcacgcctgtaatcccagcactttgggaggctgaggcgggcggatcacgaggtcaggagatcga

SEQ ID NO: 1486 - DNA, 464 bp, Homo sapiens
  misc_feature (1)...(464): n = A,T,C or G
agtgggagggggggattgagacccttnaattgagagctatatgcagngtcgtggaattccaccctgctgcacatcccgcagctggtggaacgtctgtcacagtcgtgacctatcccacgtgcggtgcagctcacggccttcgcactgctgcaggcccagctgccgtgccaggacgcggaccgccgcctgcatgacctcgcggctgggcccgtgggctacctgtgccggcgtgctgagcgatttagagacgccttcacccaagagctacgccgcggcctccgaggccgctcggggccaccaccaggtagacagaggggccctggcgcaaacatttaatcctgggctgagcggggccgaggctgcttgcttttccttccgggctctacagtggcatcaatgtggaggggtcattccgggcactgcgcgcggcttcgaatcccgactgggattgttggcctgcagac

SEQ ID NO: 1487 - DNA, 444 bp, Homo sapiens
  misc_feature (1)...(444): n = A,T,C or G
catgctgaatataagatttgtagttctcggatgcagcagctgtggccaggcagcccagtttcgggaaggctctcggtgcaccacagcctgcagacacccagcccacaccctccatgccgccaagatgtccaggaggaaggtcagctcagctaagtgtcggtgaagggagaccccgaagaagagatctgcaaggtggtcagctaaacctgctccttcaaagcgaaacaaagcccaaaaaggcagcaggaaaggataaatcttcagacaaaacaaaacaaaacaaaaaaacaaatgaaagcagaaaaaggaggaaaagaaaaacaggctgaagtggctgatcaagaaactaaagatttatctgcagaaaatggagacactgaaaacaaggagagtccagcctcggatgaagccacagagaaagacactaagtctgactgatatcan

SEQ ID NO: 1488 - DNA, 486 bp, Homo sapiens
  misc_feature (1)...(486): n = A,T,C or G
atgggggnaatcgagaatctagtcagtgtggtggaattcctttcccgctggttcaaggtttgagcgcctgccgcgtgctttagacgccggctgacaaaatcaccgagccatcgacgagcccgcgaaacctcggccgtcctgggcttgtccctgcatgtttgtaaagcgggactggcaccaacctcagaaaggatgggagatgtgtgcaaaaaagcgccttgtaaaacgcgtaagctttcgtgttagcactgccgccggggggtgtcatgccaggattgacccaacacaggactcccggaaagtgcccagcaccttccgggtcttcacctccctggcacttgcagcccctgtgcacctgcagtggtggattccttcagcacgtgttctgcggggaacccccagccaccctcacaactggcacgatagggcttcttgcccgtggggctttaagtcattctgaggctggttccctaagtgtcagccgcn

SEQ ID NO: 1489 - DNA, 484 bp, Homo sapiens
  misc_feature (1)...(484): n = A,T,C or G
aggtggggnaatcgagatttgagtcaccgtggnggaattccggaagagctgggtgctgacggcgctgggcggctcaggggcggagagcgtgctaaccaatgacttgagggagtagggggccgggtttgggccctcagttgctaagggctacccgagtgggaagcggttcaagagatggggtgaagggtggttcaccggttcttcaagtcctcagccttctggcccgcggaagttaagcaaccaagaggcgggcctaagaccggaagcaggaaggagggcgcaggaagcagggcgccgcagcctgtcgtacggtccttctgtgggtctgtccgtgccgagggcaggatggagaagctgcggctcctgggcctccgctaccaggagtacgtgactcgtcacccggccgccacggcccagctggagacagcagtgcggggcttcangtatctgctggcaggtcgattcgccgattcgcacgagctgt

SEQ ID NO: 1490 - DNA, 476 bp, Homo sapiens
  misc_feature (1)...(476): n = A,T,C or G
ggggccccaattggaccatggacagcgtgngaattccggggcttctgggcccctgggtatccccacctgtcgtggccacacctctgcctgcctcatgccccttccccctggcctaccaaggacagcccacagcccgcactgccggctcacttgggtccttcctcgatagctttgggcagagcccttgcttcctggctgcttcagggctcaggggctcccagccctccttcccaggctgaagctgggtcctctctctctttggggcttctccctcccgtttcaggggaaaggtctgagtctccacgtttcagaccagcttctgggggaaggcagtccggcagggagaccgggaggggtggccacacagtggggagctgggaggtggggggaatggtcccagactcctctcggggcccctatccacacagggcctggtgttctaccccatctggcccctggcccatctcttctgtgcc

SEQ ID NO: 1491 - DNA, 469 bp, Homo sapiens
  misc_feature (1)...(469): n = A,T,C or G
ggggcagggggcccnnnnncctgaaaactgagatcctcgcacangcggnggaattccaaggagactgcggcatgttgaccacaccagactgggtttcagggaatgggcatgccaggtgccaaggagccaaacagatggctttccaggcagcaaggtccttggggccttcttggaggagcttgggtgacagccaggtgagcacccagaccccagaccctcatgtgctgtgtgcctggccccttctgtactggccatttgtggccagggccaagcctgtgactcaactccaggggcaagatggggagtgagctgatggctccgagactggtcaggagcccaggccagtgagatggggcctggagccttgtctgtgtcacattangtaccatgggagctgctgagacctgacattttgtcccctgcctacatggcttggcccatggagaaggagcagtgaatgggatcgtcg

SEQ ID NO: 1492 - DNA, 453 bp, Homo sapiens
  misc_feature (1)...(453): n = A,T,C or G
tgggatgnnnnnttgtggttgcctaccctgnggcnggacnncataaaaagaaccggcatcctgacttcctgccctatgaccatgcccgcataaaactgattttgttgagcagcccttctcggagcgattacatcaacggcagccccattattgagcatgagcctcggatgccaacctacatagccacgcagggcccgctgtcccataccatcgaagacttctggcagatggtgtgggagagcggctgcaccgtcatcgtcatgctgaccccgctggtggaggatggagtcaagcattgtgaccgctactggccagatgagggggcctccctctaccacgtatatgaggtgaacctggggtcggagcacatctggtgcgaggactttcttgtgcggagcttctacctgaagaacgcgcagacccaggagacacgcacgctcacgcagttccact

SEQ ID NO: 1493 - DNA, 459 bp, Homo sapiens
  misc_feature (1)...(459): n = A,T,C or G
tgcggctgnnnnnnncggaattgcgtaccctatgccgtgtcgtggaattcctcgtgctaacctctctgagcttttgtttctttatctgtgaagaggggataaatatcccctgcctcgaagagctgttgaaagaataaatgtgggctgggcacggtggctcacgcctgtaatcccagcactttaagaggacaaggctggtggatcacttgaagtcaggagtttgggaccatcctggccaacatggcaaaaccccatctctactaaaaatacaaaaattagctgggcgtggtggcacatacctgtaatccctgctattcaggaggctgaggtacaagaatcactggaacccgggagggaggttgcagtgagccgagattgtgctgttgcactacagtctgggcgaaagagccagactctgcctcagaagaaaaaaaaaaaaaaagattaattttgtggagg

SEQ ID NO: 1494 - DNA, 484 bp, Homo sapiens
  misc_feature (1)...(484): n = A,T,C or G
gggagcgcgntttgcagtcattggccagtgtggtggaattcgcaaaggtaaaagcacctcgctccgcagcatccagacctggaggggctgcgaccacgggccgagcccacccattccccagccaaaggacgggcccgccgctctccatggtactgcggagagctcagctccgcccttctctttcagaaggacagcacccggcgtcacgtaacccagccttctcaggctccaccaccgccttttccttcccagctctttccctctcctccccctcctcctttananctnctnctcctcctcctgctcccctccgttgcctgttctcccctcccgcactcctggagatagacgctcaagcctgacgcctctgaaaaggcagcagcagtcgccttatccatagacctcaggaaattcgctttgaccgatgcatgcttcaggctctggctcgagctgaggggaataaccgggcagatgtctgagtcct

SEQ ID NO: 1495 - DNA, 483 bp, Homo sapiens
  misc_feature (1)...(483): n = A,T,C or G
gagaggcngnaattgaaaccatcgagaccataggcagtgtggnggaattcctgcagcagtctgcctcctctttaacatgacagatgccgctgtgtccttcgccaaggacttcctggcaggtggagtggccgcagccatctccaagacggcggtagcgcccatcgagcgggtcaagctgctgctgcaggtgcagcatgccagcaagcagatcactgcagataagcaatacaaaggcattatagactgcgtggtccgtattcccaaggagcagggagttctgtccttctggcgcggtaacctggccaatgtcatcagatacttccccacccaggctcttaacttcgccttcaaagataaatacaagcagatcttcctgggtggtgtggacaagagaacccagttttggcgctactttgcagggaatctggcatcgggtggtgccgcaggggccacatccctgagttttgcgtaccctcttgattt

SEQ ID NO: 1496 - DNA, 451 bp, Homo sapiens
  misc_feature (1)...(451): n = A,T,C or G
nactgatgactgaagccattgcggnggacnnnggagggaggcctgagcacactgctttggaaattattctaaacacaaaaaagggaaagaaaatgttatttctccctaagtcaggagcatgcagagctagcccacctcatgtccagctgtccactttccatcctggagaaagaacagtgtgcctcaaactcctgccctccccaggcctctggggcccgctggaaagggctctgaccccctggcccggccgggctctctagtggtgatccggctcattctcctgcaagttggaagcacaattttccccccaagtggaggaaaaggaaagggccccagcctactgaagaggtgtttattttttaactaacagcctcccaccccattaagactcaccaggagaggtctgagggccattcagaacccactcctgagtgggtgggtgggtgggact

SEQ ID NO: 1497 - DNA, 454 bp, Homo sapiens
  misc_feature (1)...(454): n = A,T,C or G
nattgaaaactgatgaccctctgnccangcggnggaattctttgaagcatattacctccgaggagttctctgctctgaagacccagaggaggaagagtttgccagcccgggatggaggcttcaccctggaagacatctgcatgctgagacgaaaggaccgtggcagcaccaccagccttggcagcgacttctccctggtcatggagagttccccaggagccactgggagcttcacctatgaggccgtggagctggtcccagcaggagcgccaactcaggcagcttggaggaagagccactcatcctctccacagagtgtcctctggaaccggccacaaccctcagaggaccgcttgccttcccagcaggggctggcggaagccaggtcttccagctcctcttcctcaaaccattctgataactttttcaggatgggtagcagtcccctggaggg

SEQ ID NO: 1498 - DNA, 477 bp, Homo sapiens
  misc_feature (1)...(477): n = A,T,C or G
nttgcgacccttnnnanaatcgagagcctagtccgtgtggtggaattcctgggcccgaagggagcgatgctgtggttccagggcgccattccggccgccatcgcgacggccaaaaggagcggcgcggtcttcgtggtgttcgtggcaggtgatgatgaacagtctacacagatggctgcaagttgggaagatgataaagttacagaagcatcttcaaacagttttgttgctattaaaatcgataccaaaagtgaagcctgcctacagttttcacaaatctatcctgtagtgtgtgttccatccagtttctttattggagacagtggaattcccttggaagtaatagcaggaagtgtttctgcagatgaacttgttacaagaattcacaaggtccgacagatgcatttgctaaaaagtgaaacatcagtagcaaatggcagtcagtcagaaagttcagtgtctactccatctgcgtca

SEQ ID NO: 1499 - DNA, 487 bp, Homo sapiens
  misc_feature (1)...(487): n = A,T,C or G
ngtgggggnnnnnatcgagtttctagtcagtgtggtggaattcgttcctcacgcgccccggggagatggtgggccagctggccgtgctcaccggggagcctctcatcttcaccgtcaaggccaacagggactgcagcttcctgtccatctccaaggcccacttctatgaaatcatgcggaagcagccgaccgtcgtcctgggtgtggcgcacactgtggtgaagaggatgtcgtccttcgtgcggcaaatcgactttgccctggactgggtggaggtggaggccgggcgagcaatatacaggcagggggacaagtccgactgcacgtacatcatgctcagcggccggctgcgctctgtgatccggaaggatgatgggaagaagcgcctggccggggagtacggccgaggagacctcgtcggcgtggtggagacactgacccaccaggcccgggcgaccacggtgcatgccgttcgggactcagaatt

SEQ ID NO: 1500 - DNA, 240 bp, Homo sapiens
  misc_feature (1)...(240): n = A,T,C or G
ctggtgnccncnnnctcgacacagnctgcagnccangcgtgtggagccgcctcccggctcggggaggccccggggctgggaacgcctgtgccttcctgcgccgaagccaacgccccctctgtccttccctggccctgctgccgaccaggagctgcccagcctgtgggcgngcggccttccctccttcgctccttttttatattagtgattttaaaggggactcttcaaggacttgtgtac

SEQ ID NO: 1501 - DNA, 480 bp, Homo sapiens
  misc_feature (1)...(480): n = A,T,C or G
gaggcccccnaattgagaccatagacatctgcgggaattcggccccgcgaagcagctggaggccctcagctatgctcggcacttccagccctttgctcggctgcaccagcgggagatccaggtgatgatgggcagcctggtgtacctgcggctgggcttggagaagtcaccctactgccacctgctggacagcagccactgggcagagatctgtgagacctttacccgggacgcctgttccctgctggggctttctgtggagtccccccttagcgtcagctttgcctctggctgtgtggcgctgcctgtgttgatgaacatcaaggctgtgattgagcagcggcagtgcactggggtctggaatcacaaggacgagttaccgattgagattgaactatgcatgaagtgctggtaccactccgtgttcgcttgccccatcctccgccagcagacgtcagattccaaccctcccatcaagct

SEQ ID NO: 1502 - DNA, 433 bp, Homo sapiens
cctctcccttgagggataaccccaggcactgtttggcgccccaccctgttgttgtggattcgcattcgtgcctggatgtcccggggagcttccctggaatccaagaaatcccgagagaacttctctccaaagtccatgtcatggttacagccaccccattcccatgtgtcctgggggccagggctggggcttgagccagggccagggctgggcagagagtgggggaaactcttgcctcgggacagtgcctgcagctgcagcagtttggccctcagccgatcctgctcaccactgcccttccagccacagccacagctcaccagcttgcccaggctgcaggccgtggctactgcgtgcatgaccccagcagccagcatggagaaggaaaaagcactttctcggaaaccgcgcttgaggatggcgctgtggtgcg

SEQ ID NO: 1503 - DNA, 449 bp, Homo sapiens
  misc_feature (1)...(449): n = A,T,C or G
nactgagaccttcgncagtgcggnggaattncccggctcgagcggacaacaccctggtggcggtgaagtcttgtcgagagacgctcccacctgacctcaaggccaagtttctacaggaagcgagggggcgacttcctgaccttcctccgcacggagggggcccgcctgcgggtgaagactctgctgcagatggtgggggatgcagctgctggcatggagtacctggagagcaagtgctgcatccaccgggacctggctgctcggaactgcctggtgacagagaagaatgtcctgaagatcagtgactttgggatgtcccgagaggaagccgatggggtctatgcagcctcagggggcctcagacaagtccccgtgaagtggaccgcacctgaggcccttaactacggccgctactcctccgaaagcgacgtgtggagctttggcatctt

SEQ ID NO: 1504 - DNA, 446 bp, Homo sapiens
  misc_feature (1)...(446): n = A,T,C or G
ataggctacagtacantagccaagacgnggaattccctgtcccctgcagaaaagtacttgaggttacagtctccatcccaccccactgttgtggttgaaggacctttccatgcagtgaaggcacttttcccctttccttcaccccttcctgttcccttctctgccgttttccttcttctcccccagaactcctctgtgaaatacctggcctccttccctgagcctccctgtctccctgccaccccatctccactccgtgctatgacatcaccccgtaatttgaagctcctttccctatctgaagggaggcagagacagagtgcacaggctcaactaggcaaggcagacccttgcatgcctgggtcagaggtcagggtctctggcacacattcctcccagagcaactgtaggaagcaagccagtacagaggtactctaagcgctaag

SEQ ID NO: 1505 - DNA, 469 bp, Homo sapiens
  misc_feature (1)...(469): n = A,T,C or G
naagtgccgngccnggnnnnnnaaactgacatccaacatcggcagaactcttagacctttgggagttgaagacggtccgcctgccaaagaagatgactgggacaggctcacacagaggcttcggctttgtggacttcctcaccaagcaggatgcgaagagagccttcaacgccctgtgtcacagcacccacttgtacaggcggaggctggtgctggagtgggccgactccgaggtgaccctgcatgccctgcggcggaagacggccgctcactttcacgagcccccgaagaaaaagcggtctgtggtgttggacgagatcctggagcagctggaaggcagtgacagcgacagtgaggagcagacccttcagctgtgagctggcaccgagagggctggagtgcagtggcgtgatctgggctcacctccctggttcgagcgattgtcccgcctcatcctcccaaggctggg

SEQ ID NO: 1506 - DNA, 446 bp, Homo sapiens
  misc_feature (1)...(446): n = A,T,C or G
ntgtgagtacantgcaattgncgnggacttcgaagagattggngtccctgaagttaagaaagccacctttgcctacagatggtgttcactttgtttttgtggagtcacagcttgacttttgggggccccaggagatgttgacccagcagggcatggcgctgcagaactacgacaacaagctggtcaaatgcatagaggagctatgccaaaagcaggaggagctgtgctggcagatccagcaggaggaggacaagaaacagcggctgcagaatgaggtgaggcagctgacagagaagctggcctgcgtcaacgagaagctggcccgcgtcaacgagaacctggcacgcaagattgcctcttgcagtaagttctaccagaccatcgcggagacggaggccacctacctcaagatgctggagagctcccagactttgctcagtgtcctg

SEQ ID NO: 1507 - DNA, 445 bp, Homo sapiens
  misc_feature (1)...(445): n = A,T,C or G
aataggctggagtacatcggccangncgnggaattccaatatatctaaaatatcatttcaactgtaaattatcgagacattctgcattctgttttttatattggctttgaatcccatgagtttacacttagagcccaattcagatactacattttcatcagaaaaacttgatctgtatttagatttaattaaatgtacagtcgtaaacattcacatcctcaaattgtttcagaaatactgaaaggttttgcagttatggaatttctatctatttttaaatttcaattaattaaagttaaagtttagaatgcatttcctcagttgcactagccacattgcagctgctcaatagcacttatggctggtggctactgtattggacagcacccctcaagaacaggggaggcctcgcgcggtggctcatgcctgtaatcacaacactttg

SEQ ID NO: 1508 - DNA, 485 bp, Homo sapiens
  misc_feature (1)...(485): n = A,T,C or G
agagcggccncnncccctgagaactagnagcctagcaagngcgnggaattccccctgcctgtgccagccatgggctcgggatggactccctgggccccacccattgccaagccaggaaggcagctttcgcttgttcctgcctcgggacagccccgggtttccccagcatcctgatgtgtcccctctccccacttcagaggccacccactcagcaccaccggcctggccttgcctgcagactataaactataaccactagctcgacacagtctgcagtccaggcgtgtggagccgcctcccggctcggggaggccccggggctgggaacgcctgtgccttcctgcgccgaagccaacgccccctctgtccttccctggccctgctgccgaccaggagctgcccagcctgtgggcggncggccttccctccttcgctccttttttatattagngattttaaaggggactcttcagggacttgtgtat

SEQ ID NO: 1509 - DNA, 482 bp, Homo sapiens
  misc_feature (1)...(482): n = A,T,C or G
agagcggtnnnnncaactgatnactgagtgcatggcgggaactcccgacgtcgccgcgcgagtcgggccgcgtggggggcggtgcgttcgctggatccatgggagcggagtgcgcgcgcattatttttgctcgtcggctgggagccgggcgtcgggtcgctgggagtttgcctcttgtggcagcatcctgcttagtccagcgaattgtgacacattattaaatgtatcagaatataagaactgtgtcactactacgtcaccagatggccatttccacgaattcatgtttccgttcggcggccggcgtccctcgggtggtcgcatgcaatgagtgcatctttctcgagaacaactcttccgcggaaagtcattgctgacagtcctggcattccggtggctgcttcttggcagtgagcacttgtctatcgtaagcacttgtctgcatggtacttttacaggcaccaccttgctacttgtgtagt

SEQ ID NO: 1510 - DNA, 453 bp, Homo sapiens
  misc_feature (1)...(453): n = A,T,C or G
nttgagtcgatggcatcggcangngcnggaannccgtgaagctccgcggtgcctgatggggccgttgggcggccggtagctgttgctgttgggggaccccctcattcctgccgctgccgtccctgctgcctcatggcggccatcggagttcacctgggctgcacctcagcctgtgtggccgtctataaggatggccgggctggtgtggctgcaaatgatgccggtgaccgagttactccagctgttgttgcttactcagaaaatgaagagattgttggattggcagcaaaacaaagtagaataagaaatatttcaaatacagtaatgaaagtaaagcagatcctgggcagaagctccagtgatccacaagctcagaaatacatcgcggaaagtaaatgtttattcattgaaaaaaatgggaaattacgatatgaaatacatactggagaagan

SEQ ID NO: 1511 - DNA, 453 bp, Homo sapiens
  misc_feature (1)...(453): n = A,T,C or G
nttcgagattcatatgccatgtggnggaattcggctttggaattcgtcgacttaggggttggccacgatggtgtccttgatccacttccggtaatgcaccaccttggtgtacagggaaggcctttcgggcagggcacatggttcactgccccatgacgtgataccttgaagcacaccattacagacaagtggggccccagaatcacccgagcaggtgcttttgccccctgtccagcgtccagcacacagcatgaacttggtcaccttctgagggtgaacttgcgcacacacgtcattggaaataacatggaggtccacacactgaagtttctttggggtcaagaactcctctggttcaatgctgccccagcctgaggcgtagcaggtggtccccagtgctggctcctgggtgggcaggtccatgaccttcacagcatccgtgagctcggcagg

SEQ ID NO: 1512 - DNA, 471 bp, Homo sapiens
  misc_feature (1)...(471): n = A,T,C or G
nagtgccgggccggcnnnnaaacggatagccaagcatcggcaggaaccccgagatacaggtgccgggcctggggcgtcgtccgtgtgtaacagcgcacccggctccggtcccatctctcccaacagctcccacagcaccatcggtgagaatggcttactggctcagtccccaacatccccactgagatgctccctcagcaccgagccctccctctggacagctcccccaaccagttcagcctctacacgtttccttctctgcccaacatctccctatggctgcaggccacggtcactgtcaccaactcacacctcactgcctccccgaagctgtcgacacatcaggaagccgagaggcaagccctccagtccctgcggcagggtggcacgctgaccggcaagttcatgagcacatcctctattcctggctgcctgctgggcgtggcactggagggcgacgggagcccccac

SEQ ID NO: 1513 - DNA, 454 bp, Homo sapiens
  misc_feature (1)...(454): n = A,T,C or G
nattgacctcgtggcatagngcnggaactcccgtgtccctgagtcagagtcagactgacgccctcagggggaagttgcagggccatgacgtggacttcctcatcacccaccccaaggagggtcaggaggcggggctgctgcctagagtgatgtgccgcctgcaggaccagggcctcatcctgtaccaccagcaccagcacagctgctgtgagtcccctacccgcctggcccaacagagccacatggacgcttttgagagaagtttctgcattttccgcctaccacaacctccaggggctgctgtggggggatccacgaggccctgcccatcctggaaggccgtgagagtggacttggtagttgcacccgtcagccagttccctttcgccctgctcggttggactggctccaagcttttccagcgggagctgcgccgcttcagccggaaggagan

SEQ ID NO: 1514 - DNA, 466 bp, Homo sapiens
  misc_feature (1)...(466): n = A,T,C or G
cacagagaccacttcgcatnggcgnccaatncctgcaaggggaggaacgagagctgaggagcccatacacaggacctgaagccctaaagaaaggccctctgctcatcaagaaagtggctaccaaccagggtcccaaagcccaacctcaggaagaaggccctacagatttgccatgtcccccagaccctgcttctgatactaaggacgtatccaggagtaccacaaccaccaccagtgctaccaccgttgccactgagcccacatcccaagagacaggcccagagcctaaaggcaaggacagtgccaaaaggttctgtgagcccatcggggagaagaagagtccagccaccatcttcctgactgtcccaggtccccactctccagggcccatcaagtcacccagacccatgaaatgccctgcctccccattcgcatggccgcccaagaggctggctcccagcatgct

SEQ ID NO: 1515 - DNA, 484 bp, Homo sapiens
  misc_feature (1)...(484): n = A,T,C or G
aagacggccncccccactgaaactgagagcntagcccanngcgnggaattcctgggtctgaccttaagggcaagggcagggagcttcacatttcaaatacagttgtggttacggcagcccagtacttttggccctccttgctgttcggttctcctcccttctcccaacctcctcactggtgttgctgggtgtggtcctcaatacagaatagagacccttgggcctgtgtcaccagacttctgaccccttgggcaacagccagatggagactggtcgccttttgagcctcagctctcttcctcttgttctcctagggtgggagtacagcagccaaacgctgaacttagtcccatccacttccatcttatcctttgtgcccttcatccccctgcatcttgtcctttttgccctctggtacctcccagtgccccatcatctctacccccagggactcggagatcatgcagcagaagcagaaaaaggc

SEQ ID NO: 1516 - DNA, 484 bp, Homo sapiens
  misc_feature (1)...(484): n = A,T,C or G
aggaggnnnnnnnncactgagaactgagtgcgtgncgaggaacnccgggacaggtccagcgggtgttctgtgtgaagtcgcgcggcttccacccacgcagtgttctaagtgaaggccacaaactcgctcgccatgtgggctgcggaggcggggggtgttttccacagagccaggggcaggaccctggccgcgtttcccgcagaaaaggaaagcgaatggaaaggcccattctacttcatcctgggcgcagacccacagtttgggctgatcaaggcctggtccactggggactgtgacaatggcggcgacgaatgggaacaggagatccgtctaactgagcaagccgttcaggccatcaacaagctgaaccccacacccaaattcttcgttctgtgcggcgacctcatccacgccatgccagggaagccgtggcggacggagcagacggaggacctgaagcgagtgcttatggcagtggacaggg

SEQ ID NO: 1517 - DNA, 416 bp, Homo sapiens
  misc_feature (1)...(416): n = A,T,C or G
ccggggtccaagcttcttggtgcggggggcatgagggcctccagggcaaccccaggacctgctctactgggtcagatcatgcgggggggcctggggccagcccctcaccacacccttctccttcctgtactgtcctggtgggaggagcaagggttccggggtttggcacagatgaggcagggccaggcatgaaggcaggtgagacagggcaccagaggcctcagctctgaccccagcacaggctgagactgtaaccggtaaccacccatccactgacgcggctccagctctgactacatgccgagtgctggccaagtgctcctccgaaggctcctccgagggccccccagtcccagctgcaggtgtcctgacactggcggnggtcagcatctacatcagctactcgcacctggccn

SEQ ID NO: 1518 - DNA, 477 bp, Homo sapiens
  misc_feature (1)...(477): n = A,T,C or G
ggaggccnnnngggcccccactgaaccctagactgagcgcagtagaagagcgcaccaggagcgcggagcagcccctgcccgggaccatagctggtgatcccccatagtgggcaaccacgcccagcctgcttccttgattggccaagattggggggagggggtggttgtaaggttttccttaaggatggcagccctattggggtctgtgggtgctcaaggctgcgggccgcatgcctgctcaccaggccctgcccacctatgctcgctcctttctctctgtcagcgttggggccttcgtgaagacctggctgcccttcatccttctcctgggcatcatcctcaccgtcagcctggtctttaacctccggtgatggctgctcggaggccccacacccaccagggtcccgaggaaacagccgccatcccttttggttccagatttttttctcctcaccccaaaaggcagggttgggcctn

SEQ ID NO: 1519 - DNA, 492 bp, Homo sapiens
  misc_feature (1)...(492): n = A,T,C or G
ggagtncccnnncnagcccccccaatgatgacccctcgatgaggccccctnggaannnncgnggaannncaggaagctgtcatcctaccccacgaggaggaaggtgtctagaagccagcggaaactcactctgtcggggaaaattggagctaataaactgcggaagctggaggagaaacaagcgcgaaaggcccaacgtgaggcagaggaggctgaacgtgaggagcggaaacgactcgagtcccagcgcgaagctgagtggaagaaggaggaggagcggcttcgcctggaggaggagcacaaggaggaggaggagaggaaggcccgcgaggagcacgcccagcgggagcatgaggagtacctgaaactgaaggaggcctttgtggtggaggaggaaggcgtacgacagaccatgactgaggaacagtcccagagcttcctgacagagttcatcaactacatcaagcagtccaaggttgtgctcttggaaac

SEQ ID NO: 1520 - DNA, 463 bp, Homo sapiens
  misc_feature (1)...(463): n = A,T,C or G
nttgcgaccctagtccgngtggtggaactccctagaggtgacagtctacgcattcagcattgagaacttcaaacgctccaagagtgaggtagacgggcttatggatctggcccggcagaagttcagccgcttgatggaagaaaaggagaaactgcagaagcatggggtgtgtatccgggtcctgggcgatctgcacttgttgcccttggatctccaggagctgattgcacaagctgtacaggccacgaagaactacaacaatgatatctctgagtctctgcttgataagtgcctctataccaaccgctctcctcatcctgacatcttgatacggacttctggagaagtgcggctgagtgacttcttgctatggcagacctctcactcctgcctggtgttccaacccgttctgtggccagagtatacattttggaacctcttcgaggccatcctgcagttccag

SEQ ID NO: 1521 - DNA, 468 bp, Homo sapiens
  misc_feature (1)...(468): n = A,T,C or G
gggggatcgagacctctatccgngtggaggaacctcggggagctggggtcagacgagtcccaggcactccatcctctgcagcaagtcaggttgtgatttactagggggtggtgaatataatggagagacttctggggaggaattcctggctcccgcgtggacttgcagagctcaacaggcagccacgtggctgagtgtccagcaaacatcacataaggctttgggtcctgcaggtggggctgccatgagcagcaagctcagtccagaagaacagttcctctccaggatccacttcctgcgcacttttatgtgcagagtagctggagcagagctccccggaattccacaggcaactgagaacggagagggatgcaggccagccagggatccagcgtcttccccatcgtcactctccatggcctccgtctacacacagtgttcgtctgcacagcttgtcagcgcgttatc

SEQ ID NO: 1522 - DNA, 484 bp, Homo sapiens
  misc_feature (1)...(484): n = A,T,C or G
agagggccnnnnnnaggccgcccccttgagaccntacgactgagcccgtaggcacagacgggcatcaccgcgggctctgaagagccagaccctcctccagaaccgatgagtgaggagaggcgtcagtggctgcaggaggccatgtcggctgccttccgaggccagcgggaggaggtggagcaaatgaagagctgcctccgagtgctgtcacagcccatgccccccactgctggggaggccgagcaggcggccgaccagcaagagcgagagggggccctggagctgctggccgacctgtgtgagaacatggacaatgccgcagacttctgccagctgtctggcatgcacctgctggtgggccggtacctggaggcgggggctgcgggactgcggtggcgggcggcacagctcatcggcacgtgcagtcagaacgtggcagccatccaagagcaggtgctgggcctgggtgccctgcgtaagctgt

SEQ ID NO: 1523 - DNA, 470 bp, Homo sapiens
  misc_feature (1)...(470): n = A,T,C or G
gatcgaanccnttnnnnnaatcgtagaccctagtccangtggtggaattcctgcacatctggtctccatgatttcctttttcctacaagggcccctcagatatcctataattcataaggggtctagatcaacaatcaaagacaatatcaatgacaaactgacggaaaaggagagagagtttccactgtatccaaaaggaggggagaagttgcagcttgattatggtgtctatcttctgaacaaaaatatagcacagctaatatatcaacatggactacggactccagacttgcggcaaacccttcccaacctgaaaaacttcatggagcatggactaatggtcaggtgtgacagacatcacacctccagtgcaatccctgttcctaagagacaaagctccatatttgggggtgcagatgtaggcttctctggggggatcccttcaccagacaaaggacatcgaaaacggg

SEQ ID NO: 1524 - DNA, 467 bp, Homo sapiens
  misc_feature (1)...(467): n = A,T,C or G
ngggaaatgagaccctagtccgtgtggtggaactcccactgtcttcttccccacctgtgcaggtggaagtggatgtggacgagcagcgcctggcggaaggtggtggggtctgctccttccacctgcaggcagccctgggggaaatgctgccctccccaccccccagggctctgagtgtggagggcaggggcaggaatggcgtccctcaggagccagcatggccctggagcccccgagtccctgaggaaagtgttgatgccctccagcatggggctccttctcatcctgtacgcccggctgccacccagcctggtgggccaggcaggcaggtggatagggtgggcaggccgggcaggggggcaggcggtcaggcagccctctcccacagtcctcatcgacggcgtggagtgcagcgacgtcaagttcttccagctggccgcgcagtggtcctcgcacgtgaagcactt

SEQ ID NO: 1525 - DNA, 392 bp, Homo sapiens
gggactcaatgacacaatgaggtacattctgatcgactggctggtggaagttgccaccatgaaggacttcacaagcctgtgcctgcacctgaccgtggagtgtgtggaccggtacctgcggaggaggctggtgccgcggtacaggctccagctgctgggcatcgcctgcatggtcatctgcacccggtttatcagtaaagagatcctgaccatccgggaggccgtatggctcacggacaacacttacaagtacgaggacctggtgagaatgatgggcgagatcgtctccgccttggaagggaagattcgagtccccactgtggtggattacaaggaggtcctgctgacgctagtccctgtggagctgagaacccagcacctgtgcagcttct

SEQ ID NO: 1526 - DNA, 466 bp, Homo sapiens
  misc_feature (1)...(466): n = A,T,C or G
ggataannnnnttttgaaaccctactgagaacctcgaaagngcggnggaattcgccaccattggctccggtatcgtcaacacggccttcactgtcgtgtctctgtttgtggtggagcgagcaggccggcggaccctgcacctcataggcctcgctggcatggcgggttgtgccatactcatgaccatcgcgctagcactgctggagcagctaccctggatgtcctatctgagcatcgtggccatctttggctttgtggccttctttgaagtgggtcctggccccatcccatggttcatcgtggctgaactcttcagccagggtccacgtccagctgccattgccgttgcaggcttctccaactggacctcaaatttcattgtgggcatgtgcttccagtatgtggagcaactgtgtggtccctacgtcttcatcatcttcactgtgctcctggttctgttcttcat

SEQ ID NO: 1527 - DNA, 464 bp, Homo sapiens
  misc_feature (1)...(464): n = A,T,C or G
gggattagnnnatttgagaccccattgatgagctctttcactgcgcacctgccctgccagtggcctttctggtcccagctactgaaaccggtgagctgctccagggtgaggctgctttctggctcctggtgtatttggacacagataggcccttagtgtccagaggcgccccatgcagccctcatggtcagcaggacacccaggatagaccccctccacgcagcacctgggccctgggagcggctgcttttaggatgccacctgttcctgggcgccttgtttttagcttctgacctgaagatgagcgggggagcgcggtggcgagggcacgtgggcgtggctcacggtctcctctctgtggcaggtacatgtcccagagcaagcacacggaggcccgggagctcatgtactcgggagccctgctcttcttcagccatggccagcaaaacagtgcagcagacttg

SEQ ID NO: 1528 - DNA, 497 bp, Homo sapiens
  misc_feature (1)...(497): n = A,T,C or G
cggccccccccccccggaaatgagaccctagaatagatgaccattagncagngcggtggaattccaggcgtggtgtcatgcgcctgtcgtcccagctacttgagaggctgaggagggaggattgtttgaggctaggagttcacgaccagcctgggccacatagtgagaccctgtttaagtaaataaataactgtttttctttttccagggaaatgttttgggggatcaggtgacctccgcaggcatgtccgcactcacactggggagaagccgtacacatgtgagatctgtaacaagtgctttacccgctctgcggtgctccggcggcacaagaagatgcactgcaaagctggtgacgagagcccagatgtgctggaggagctcagccaagccatcgagacctccgacctcgagaaatctcagagctcagactctttctcccaagacacgtctgtgacgctgatgccagtgtcggttaaactccctgtccacccagg

SEQ ID NO: 1529 - DNA, 481 bp, Homo sapiens
  misc_feature (1)...(481): n = A,T,C or G
ggaggcccngcaaatgggacctttggcagcctgtaggaantccaaggatcttttataagcaagctcttccatcttttttttcccgagactccccttcaccctgcagtgtctctgcaatgctggtagagtgggctggcacagcccccgcctctggcctggtccgggtccaacctgcctgcctcctggggcagcagctccctgaacgaagagccgcggagaccgaagaactcagtgaatcagcagttctcccagatgaaacgctggcctgaaagcagcctcaagagctttggcccgtcaccttgccttgccttctcttacttcctcggcctctgttggttcatctttcctgaaaaaattaagtcagctgttccccttaaccaatttccctggcattctgaagggtaggccacatggcccacctgccagctactcccacctgccaagccttcctgactatatttaccctgggactcccatgtcc

SEQ ID NO: 1530 - DNA, 489 bp, Homo sapiens
  misc_feature (1)...(489): n = A,T,C or G
ggattttananaggggagnaanaaggaannaanaaaatcgatgacatattgagngccgtggaaancctcctctataaggcactgacagacctgctgtgtacccctgaagtgagtcaggagctgtatgaccttaacgtggagctctccaaggtttccctgactccagacttctcagcctgccgagcgtactggaagacaacgctctctgctgagcagaacgcacacatggaggctgtcctgcagagaagtgccgcgcacatgaggcaccttttgatgtcccagcagaccctgaggaatgtgccaccgatagtgtttgttcaagacaagggaaatgcagctctagctgagcttgatcagttactggcagtcgcagactttggaccccgggatgaaagagacaactttgtacaaaatgatttcagggaccctgatgccccacaaccctgcggcaccacagagccgaccacaagctccagtctgtgtgggatc

SEQ ID NO: 1531 - DNA, 406 bp, Homo sapiens
ggctttggaattcgtcgacttatgggttggccacgatggtgtccttgatccactttcggtaatgcaccaccttggtgtacagggaaggcctttcgggcagggcacatggttcactgccccatgacgtgataccttgaagcacaccattacagacaagtggggccccagaatcacccgagcaggtgcttttgccccctgtccagcgtccagcacacagcatgaacttggtcaccttctgagggtgaacttgcgcacacacgtcattggaaataacatggaggtccacacactgaagtttctttggggtcaagaactcctctggttcaatgctgccccagcctgaggcgtagcaggtggtccccagtgctggctcctgggtgggcaggtccatgaccttcacagcatc

SEQ ID NO: 1532 - DNA, 496 bp, Homo sapiens
  misc_feature (1)...(496): n = A,T,C or G
agaaatataataagaannaaaaacnagganggannnntttgaaaaccctactgatgacactaggnaangcggnggaantcgattgtccctgggaagagccccacgaggaagaagtcgggcccgttcggctcccgccgcagcagcgccattggcatcgagaacatacaggaggtgcaggagaagagggagagccctccggctggtcagaagaccccagacagcgggcacgtctcacaggagcccaagtcggagaactcatccactcagagctccccagagatgcccacgaccaagaacagagcggagaccgcagcgcagagagcagaggcgctcaaggacttctcccgctcctcgtccagtgccagcagcttcgccagcgtggtggaggagacggagggtgtggacggagaggacacaggcctggagagcgtgtcatcctcaggaacaccccacaagcgggactccttcatctatagcacgtggctggaggacagtg

SEQ ID NO: 1533 - DNA, 487 bp, Homo sapiens
  misc_feature (1)...(487): n = A,T,C or G
ggtattacatacggaagnnnacagaaaaaaaaatttgagaccctatcgagtgccgtggaaancggcggcctctgccctctgctctaagccgggtccctcctagggtccatgagtgccagtggcagtgaggacagtcaccggcctggcctgtgtcctctcagctgtcctcacagcagctcaggcagggcaggaacatttgtgtctgcaccttatacacaaggaggctgcagccccacaaggagagactccttggctgaggccacaagcctcggcagtggagagctgggctagaactcagccggcctggctctacatctcaggctctgaggcagctgactgcactgggtaacctttgaggtgccaaccgtcaaggcgtccttagcctgagctttccttctcccataaagcctctgttggtccagactcaaggtttccacttgatgagccatgagctgctgggtgacttagccctgagcaggccacccag

SEQ ID NO: 1534 - DNA, 493 bp, Homo sapiens
  misc_feature (1)...(493): n = A,T,C or G
gggttataatatcganaananaaaagggaagacnnntttgagcccctactgatnacactagaacangcggnggaattccgtgctcatttcgctgagggacggctatgtgccccccaagcaccgcgagctccgggtcacgaagcgcaacatcctggacgtgcgcccgccctccggcccccgccgcagccagtcggccagcgacgcccccttgtcgcagcacaccctggagacgctgctggaagagatcaaggccctccgcgagcgggtgcaggcccaggagcagcgcatcacggctctggagaacatgctgtgcgagctggtggacggcacggactagccccgcgcgccaggcaggcggagcggggcgggtnnntntntntttnnncttttntgnttttttttttttnntttccgtntcttntttttgtnntgtgtnntgngggggtggtggtgtgggggctntgtcttttggtggagaacctatcgtttggcg

SEQ ID NO: 1535 - DNA, 235 bp, Homo sapiens
tattgcgccgcgggcgggggcagaaccccgtggcgctgcagagaggccggtccctgccaaggggcactgccccctcacacctggaaacccaggcgcccctagctcccaggagcgcagctcaccagcaagttccattgcctggaggacccctgagcctgtccctcagcaggcctggccgaattttctccgctcgtggtgctggtcctgctcctgaccttggcggtgatagcgatcc

SEQ ID NO: 1536 - DNA, 488 bp, Homo sapiens
  misc_feature (1)...(488): n = A,T,C or G
aggagttnntnnnagattgagtctctatgcagngngtactgagtctctctcactgngctacatgccctatcctgggcgcaccaaccaggaggtgctggacttcgtcgttggaggaggccggatggaccctcctaggggctgcccagggcctgtgtaccgcatcatgacccagtgttggcagcacgagcctgagctccgccctagctttgccagcatcttggagcgtctgcagtactgcactcaggacccggatgtgctgaattcactcctgccaatggagctggggcccaccccagaggaggaagggacttctgggctggggaacagatctttggagtgcctaagacccccacagccccaggaactgagtccagagaagttgaaaagctggggaggtagccctcttggcccctggctgtcctctggcctcaagcccctcaaatccaggggcctccaacctcagaacctttggaatcccacttatcgct

SEQ ID NO: 1537 - DNA, 460 bp, Homo sapiens
  misc_feature (1)...(460): n = A,T,C or G
atagaagacccccnnnnnntttgaggatcctctagtccagtgcggtggaattccccctgatgaaccttgagaagcactcggcttcccaatgttagagaaggaggaggaagcccatagacccccaagccccactgaggcccctactgaggccagccccgagccagccccagacccagccccggtggctgaagaggctgccccctcagctgtcgaggagggggccgccgcggaccctggcagcgatgggtctccaggcaagtccccgtccaaaaagaagaagaagttccgtaccccgtcctttctgaagaagagcaagaagaagagtgactcctgaaagccctgcgctaacactgtcctgtccggagcgaccctggctctgccagcgtccccggccacgtctgtgctctgtccttgtgtaatggaatgcaaaaaagccaagccctccgcctagaggtcccct

SEQ ID NO: 1538 - DNA, 468 bp, Homo sapiens
  misc_feature (1)...(468): n = A,T,C or G
tttgagacatatccattgtggggcattccgggcccggcccggngcgggccgcgggaaggggatgagttcgggcgcctgccaggccctgcaggtggccgggtcgcaggccagccgcggaagcggagcggtaaccttacccccggcgacagccgccggtcagctgccagagtgtggcgctcccggtggacgcaggggccgggtttcgggcagtctcggcctccaggaggcgcgtcttggtccagggtccgtgaggactggctagatgggggctgcgtggcctttggtggcagggaggaggagggggtctccgaggcgggagaggcgggtttgggaaggaaggtgcgccaggctgaagctggggtcggagaagtgttgggtggagacctcactgtgggtgcgttcctcctctcctctccccaaaacgatggtgttaaaagctatggtcaggatgtggagcgctgcctgcgc

SEQ ID NO: 1539 - DNA, 480 bp, Homo sapiens
  misc_feature (1)...(480): n = A,T,C or G
atttgagtcccctnnnnaatggagnatccctagtccagngtggnggaattcctctaagaccacttcatctatttacacatcatttgcttgaacattgctgaacatctgcgtgaacttggcctctccagcccttgcaggtggaaacagctgtgtcaaggctcaaggctcacgctgaggggacttggagggagggggcttctgcattaagctttcctggtgaagacccttgatcttgtccaaagccctgtgtctttgactggcttctcttcagagtccccgttgtcatcgtaagacccttgctgtttggagggtggtcttgtgactgtggcagctgctggccgctggaatgaggagcctatctccatcctccagtgtgactcaggcagagcattgagaattcccagggcagaaatccttcctgctcaggctttcattctaaaactacagtcttcattaaagctgaactttctgggtagctgn

SEQ ID NO: 1540 - DNA, 444 bp, Homo sapiens
  misc_feature (1)...(444): n = A,T,C or G
aataggctagagtacantggccangncgnggaattcgggagagagagacagggagggattggttaaaggatataaaatcattgctagatattatgtataagttctagtattctacagcactgtggggtgactctcgtcaataatgatttactacggattttcaaatagctaggagagaagattttgaatgttcccaacacaagcaaatggtaaatatttgaggtagtgaataatctcattattgtgatttgatcactatgtatgtatcaaaactcaccgtgtaccctgtaaatatgtataattattatgtgtcaattcaaaatttaaaaatatataacttaaaaattagtatttgaggaaatggccatgctttccaatgtgacctgccatctttaaaggcatagatatatgttatttcatatggcatgtgattntataattttg

SEQ ID NO: 1541 - DNA, 488 bp, Homo sapiens
  misc_feature (1)...(488): n = A,T,C or G
aggggggnnnnagactgaaccctcgcangcgactgagaccntaggcagngncgnggaattccaagagactgagcgggccatggagatcctcaaagtgctcttcaacatcaccctggactccatcaagggggaggtggacgaggaagacgctgccctttaccgacacctggggacccttctccggcactgtgtgatgatcgctactgctggagaccgcacagaggagttccacggccacgcagtgaacctcctggggaacttgcccctcaagtgtctggatgttctcctcaccctggagccacatggagactccacggagttcatgggagtgaatatggatgtgattcgcgccctcctcatcttcctagagaagcgtttgcacaagacacacaggctgaaggagagtgtagctcccgtgctgagcgtgctgactgaatgtgcccggatgcaccgcccagccaggaagttcctgaaggcccatgtgctgc

SEQ ID NO: 1542 - DNA, 391 bp, Homo sapiens
  misc_feature (1)...(391): n = A,T,C or G
gggagagccccntttgaaaccccttcgtagtccctagtcagtgtggtggaattcactgctttctgtctgtccggcctgcacccagcccctgcccacaaaaccccagggacagcggtctccccagcctgccctgctcaggccttgcccccaaacctgtactgtcccggaggaggttgggaggtggaggcccagcatcccgcgcagatgacaccatcaaccgccagagtcccagacaccggttttcctagaagcccctcacccccactggcccactggtggctaggtctccccttatccttctggtccagcgcaaggaggggctgcttctgaggtcggtggctgtctttccattaaagaaacaccgtgcaacgtgaaaaaaaaaaaaaaaaaa

SEQ ID NO: 1543 - DNA, 483 bp, Homo sapiens
  misc_feature (1)...(483): n = A,T,C or G
agggttnnnnnngactgtccttagcagngggactgattccgtctccagccgcagcaactgcgaatgtatgctagaacacacctttgattcatcctctgactctctactagaacctcctataacatgagcttctagacaaagattcattgcccctggatcgcaggatgccccctatactgcattctgaatgagagccagctgaaaacagacggctcagccagacctgctctgaaaggagagaggaattttcagacataaaatatacgatgaatgttttttatatgttatataaaagtgtaaaaacgtataaaaaagttttttatgttatataaaagtgtaaaaaaaaagagtaccttagataaaaatgaattccttaaaaaaataactaacagaacagcgaattaatgaactagaaagcagagccaattcccccgaagcacagggtcatatgggtgggacaaattttaaatgttacatttaaan

SEQ ID NO: 1544 - DNA, 496 bp, Homo sapiens
  misc_feature (1)...(496): n = A,T,C or G
ggctgttnnnnngggattgataccctcnncanngcgactagaganccatactgcagtgtcgtggaattcggacaggcagagtgctgatgtgaaaaataccacgacaaaaccaccctagttctccaaaatacttatcattcaggttgaataaaccagttctacagactgcttcttccatgcatttcccaatgatgctaactgcccttaaaattctttcagatttggaactgtatctgtatggaaacaacagagttttcttgaagtacaactaaggacaggtcaccactaggcactaacatcgctgacttgcatgattatggagatggtctatctgatgctgaaaatgtctctagttttttgacaacggctaaataaccatgggatcaagtggccttgggaaagcagcaacattagatgaactgctgtgcacttgcattgagatgtttgatgacaatggagagctggataatagttatttgccaagaatagttctact

SEQ ID NO: 1545 - DNA, 491 bp, Homo sapiens
  misc_feature (1)...(491): n = A,T,C or G
agggttnggccccccgccccccttgagaccatcgattgagcgcgtcagacgngacaaatcaggagggttagaaaaaatcagctcttcctcttcctccaaggcagccagactctttaacaggtccggaggaagcagaggggagctcttggggtcctcaaacggcattctgggtacaggatcctgctctggacggaagactcctggtgaccgtttgcccctgcggtctatgtttgcttgctgtgccattacagatctgttatcagccatgctgtaggaagaatcccagtagaattctgggaccttgacttctgagggattatggttatatggctccatgggaaaaggcttcatttttttttctagaggctgctgctgcattacaggaggttgcaatgacggctcaaacagttttatggggtcttgggtctgaaggtagtaaggctgtttcacaggcataattttccctaatgggccttgaacctgagggggat

SEQ ID NO: 1546 - DNA, 485 bp, Homo sapiens
  misc_feature (1)...(485): n = A,T,C or G
ggagatgccnnttgagtccatgtcgagtgcgctagtccagagtggcggaattcattgccttcttcattaccccagactctatgtgggtcttgcatgtcttgccttgtccctgacttttcatagaaagaatggaggatcttaattttgccaggcattggaattggactcgcttggccaaggactgggaaataataggaatgtctttctcctctgcctgtaagtaacatctgggttgtgctgcgaatgcagcagcccctccaggagtgaagtcagatactcatgacaagcctagttgcagagggagtgtctcctaactgggcaccgagcgcagccctttgaggtgcctcacctgtctagtcttcccatctgcctggtacaggggtgctgtgaggacactggggtgtggggaggtgctggggctcagcagcagcagtttccagccctccttcaggctgtgtcgccagcacttgcacccatgatctccn

SEQ ID NO: 1547 - DNA, 468 bp, Homo sapiens
  misc_feature (1)...(468): n = A,T,C or G
tgcgtgctgnnnnnattcccgtacagcgtaggcnatggncagngacgnggaattcacctcatctccaagctcctggagcgagatgcaaagcagagacttagcgccgctcttgttttgcagcacccatggacgcaggggcaagctccagaaaagggactccccacgccgcaagtcctccagaggaacagcagcacaatggatctgacgctcttcgcagctgaggccatcgcccttaaccgccagctatctcagcacgaagagaacgaactagcagaggagccagaggcactagctgatgggctctgatccatgaagctttcccctccctgcaagtcacgcctggcccggagacgggccctggcccatgcaggccgtggtgaagacaggagcccgcccacagcactctgaaatgctccagacacaccttatacgccctaggcgctgccaggcattgtcccctggaaacct

SEQ ID NO: 1548 - DNA, 461 bp, Homo sapiens
  misc_feature (1)...(461): n = A,T,C or G
agcgggtgnnnnnnaactgattccacttcaattgtcgtggaattcctgggtctgactgcagcccacaagaagagggcatttaatgttctgctgtgtgtgtagaggatagtgtagcccctaaccagagtcctgatgggtgctggtgtccagacccaagttctggggctccagagagagcaggagtggtgcctgaggactgaggcccagggggcggcccttccctaccctgcacaggcccggctgggctggaaagctgtcccacagccgcagtgaggacagccgcaggccagtgggctgctctgggggtcgtgtgggacctggggtggggctgcatgggctcactgtgccctgaccccaggccccacccacaggcaaggagcccggcctgtttgatgtggtcatcattaacgacagcctggaccangcctactcagagctgaaagaggcgctctctgaggtgg

SEQ ID NO: 1549 - DNA, 463 bp, Homo sapiens
  misc_feature (1)...(463): n = A,T,C or G
aggcggctgnnnnnncactgagtagcctatcnattgncgnggaattcaagttgcagagaactaacttgcatttttctatcagctgagggactggtgatagctgggtgcaggaagattgtgagctatttgcgcaggagggctatgtgtcctggaccatgaagaaaggcagactcacagcttatctgctttttctttttgctttcccctgctcccaccagcctgactccctttctctaattaggactccacatgaatgccatcaacttttagagccaattaacatgccttgtactccccttcagaaatcacacaaatgcctaccatcacctttctccacctctttatactaacagcactttggtgaggtgtaatttatgtattaaaaatgaatacatttaagtgtaaagctggatgaattctgacaaatatatacacttgtgcaaccatcatccagatcaaggan

SEQ ID NO: 1550 - DNA, 460 bp, Homo sapiens
  misc_feature (1)...(460): n = A,T,C or G
agcggctgnnnnnaaacggtcagcctagcntgngacanggacnnccgcgcgagcaagatggccaccaccaagcgcgtcttgtacgtgggtggactggcagaggatgtgttcgacaaagttcttcatgctgcgttcattcctttgggagacatcacagatattcagattcctctggattatgaaacagaaaagcaccgaggatttgcttttgttgaatttgagttggcagaggatgctgcagcagctatcgacaacatgaatgaatctgagctttttggacgtacaattcgtgtcaatttggccaaaccaatgagaattaaggaaggctcttccaggccagtttggtcagatgatgactggttgaagaagttttctgggaagacgcttgaagagaataaagaggaagaagggtcagagcctcccaaagcagagacccaggagagaatttccgctgcctgtg

SEQ ID NO: 1551 - DNA, 505 bp, Homo sapiens
  misc_feature (1)...(505): n = A,T,C or G
nagcgctccgggnnnnnnnnnnnacctcgattccactcgcagtgtgcnggaattcgacatanaaactaggactcagagcacatacaaaaccagttatgtttcggaaagagggaaaagagtccccgagcccggatcttgtgctgcttttctcactgacgtgttgccttttttctttacaaaatctgctttgatacttaggacctctctggactaatttctcttcctagacagctcagcacagctattgatatgttagaggcagtatccttaatattcattctaaatgagttaacgacttaacttgaaattgggcctaaggagtgagaactacaaaaatacaaaatgcttgtccaggactcagccatgcacaccttgagcagcgccggcaggaggcacggaaggaactgtgctccgttctcctcactgtcatggtgccaccagtgtctgatgaagggcagagtgacccagactgcangcagtaactgacttcacacagtccctggcg

SEQ ID NO: 1552 - DNA, 464 bp, Homo sapiens
  misc_feature (1)...(464): n = A,T,C or G
aggtggctnnnnnnaactgactagcataacntangccgngacgnggaattccgggaggtggaggttgcagtgagccgggatcgcaccactgcgctctagcctggtcaactttagcgaaactctctctcaaaaaaagaaaaagagaaaaaaggtaacaattttaaaaataataaaagttccagcgttccaagagctgcttcttgttcaaaaaatggttattcctgctgtggggttggagaaagccaagtgcgtgtggctaacagcaggcctatggcatgttaaaggcaattagggccagcgctggagttgcagagtcagatcctttgataaacctcaggcgtgtctgtctgatgccaagtggaagcttgtgctctgcagtacagaccagtgtccctcctgcaggaagtagattaagcagcgtctgttgaacaggaaaggcctctgtgatagccgtgaaagtcgat

SEQ ID NO: 1553 - DNA, 485 bp, Homo sapiens
  misc_feature (1)...(485): n = A,T,C or G
aggccccccatgagaccctagtccagngtgcgggaattcctgaagagttggctgtcgcgcagcgtaacttcattcttcaggtacagacagtgtttgtgtgttcctgttgtggctaactttaagaagcggtgtttctcagaattgataagaccatggcacaaaactgtgacgattggctttggagtaaccctgtgtgcggttcctattgcacagaaatcagagcctcattcccttagtagtgaagcattgatgaggagagcagtgtctttggtaacagatagcacctctacctttctctctcagaccacatatgcgttgattgaagctattactgaatatactaaggctgtttataccttaacttctctttaccgacaatatacaagtttacttgggaaaatgaattcagaggaggaagatgaagtgtggcaggtgatcataggagccagagctgagatgacttcnaaacaccaagagtacttgaa

SEQ ID NO: 1554 - DNA, 409 bp, Homo sapiens
ggaaggttggatccctgatgagccttggaacggaggtggttaaaagcaaggatgtgtggaaacagcaagaagtgggagagagagagagaggcggaggggagaaaaccgtcacggaggccaagcggcaggagctcagctgaagaaatgagattggtggtgggttttccctatatcgcaggctctgactgccaatctgctgctcctccaaggcctcggtggctgtggcatgaaacatcctgaggagcttgtaaagtggacactgtgcccctcacgtttggcccatttttcaggtggagccttttgccagcttgaccgaggccgtgcggagctcagttccccgactgctcatcaaccgggacttggtggggcccttggcttggcatcctcgcagcagggacgtggcccagtg

SEQ ID NO: 1555 - DNA, 490 bp, Homo sapiens
  misc_feature (1)...(490): n = A,T,C or G
atggccgnntgnncccannnnnttgggggcttcgnannnnccttgnnangctaacgcagnngcgcggaattcggcatctcagccgtggactcttctaagtgggcctgggattctgggctggtgctgggcaccctcatcttcatcctgttcttccgagccctcggtattgctggcaccctctgctttcccactctccttcctgtcccgcccctccctgcagctcatctccctatctgagtccacatctttgtcaattcctaagcctcctcttgttgctcacctgtcccagcccctgttagacctcagcccagatacttggtcccatccggtcccacgtcctccactcccaacgctttgctcccactggcctccctcccgctgtaggcgtagtcctgcagacctgggtgctgaatcagttccggctagtccctctggacaagattgaccaagtggtgatgtcctatgggggcctgcggagggctgtggcctt

SEQ ID NO: 1556 - DNA, 455 bp, Homo sapiens
  misc_feature (1)...(455): n = A,T,C or G
nttcgtagaccctagtccagtgtggtgcaattccacgcccagctaatttttttgtatttttagtagagacggggtttcaccatgttggtcaggctggtcttgaactcctgacctcgtgatccacctgctttggcctcccaaagtgctgggattacagacatgagccaccacccccagctgctgttagacatctttatctggatgtcctacggataactcaacatgacttcactggttgtccattgcagttaaagcatgactgtcctccaaagctagaaacatgagaatcatctttaacaaattgggtatttctttaattcaacagatattcttttattacttgccattctgctaggcctgctgagagctggggatacagtgagagctggggaacagaacagggatggtcctaatctttatggagaaccattgggtggtccattgggtgagatggg

SEQ ID NO: 1557 - DNA, 455 bp, Homo sapiens
  misc_feature (1)...(455): n = A,T,C or G
caatgagaccctcatagangcccntgagnaccacacgcccngctggagcaatactcagaactgttgcttcgagccgcggaacggcgtatggaacgcaaattctgagttctggaagcctgtcccaagtgaatgaatgctccagcgattccaaactgcagcccctctgcccctcaccaaaacctgcggggctgcttggagtggaaagcagggagcagtgttcagaagcaaagcagccttcccagccgctcctcgtggggggcctgtatttattaatttatttccctgactgttgcctcacttccttggaactcctgcctccacagcccctccagtggcagggacaggtcttgggtctttgtcatcttggtgctgtgagaggtaggagggcagcctgccccatctaggaatctgggaagggctggccctctcttagaagccatttgaaattactgcag

SEQ ID NO: 1558 - DNA, 502 bp, Homo sapiens
  misc_feature (1)...(502): n = A,T,C or G
gggtccggggggngnnnnacctganaccctnngaattgaggccntatnnagngncgnggaattcagcggggcgggagaggggttggacccaaggctgaggcaggcccccccctccctcccgcctcagtggatcatgcccagggcggcagcggcggcggttgcggaggggaagtgactgggcggtgccggcgccggagacgatgccgtttccagttacaacacagggatcacaacaaacacaaccgccacagaagcactatggcattacttctcctatcagcttagcagcccccaaggagactgactgcgtacttacacagaaactaattgagacattgaaaccctttggggtttttgaagaggaagaggaactgcagcgcangattttaattttgggaaaactaaataacctggtaaaagagtggatacgagaaatcagtgaaagcaagaatcttccacaatctgtaattgaaaatgttggaggaaaaatttttacatttgg

SEQ ID NO: 1559 - DNA, 506 bp, Homo sapiens
  misc_feature (1)...(506): n = A,T,C or G
cgaggtcccgggnnnnnaggnngnnaattgatnncccctngganatcgataccntngacagagngcggaagaggaacagcacagcatgctgggctctggatttaaagctgagcgcttaagagtgaatttgatattagacatagctcgccttaaactattggagaaaaagaaaacggaactggcccagaaagcaaggaaggagattgctgactatctggctgctgggaaagatgaacgagctcggatccgtgtggagcacattatccgggaagactacctcgtggaggccatggagatcctggagctgtactgtgacctgctgctggctcggtttggccttatccagtctatgaaggaactagattctggtctggctgaatctgtgtctacattgatctgggctgctcctcgactccagtcagaagtggctgagttgaaaatagttgctgatcagctctgtgccaagtatagcaaggaatatggcaagctatgtatgaccaaccaga

SEQ ID NO: 1560 - DNA, 449 bp, Homo sapiens
  misc_feature (1)...(449): n = A,T,C or G
nttgaactggcagacatctagaccangcggnggaattcattattattataattattattatggagtcgagttgactctcggctccactagggaggcgccgggaggttgcctgcgtctccttggagtggcagattccacccacccagctctgcccatgcctctccttctgaaccttgggagagggctgaactctacgccgtgtttacagaatgtttgcgcagcttcgcttctttgcctctccccggggggaccaaaccgtcccagcgttaatgtcgtcacttgaaaacgagaaaaagaccgaccccccacccctgctttcgtgcattttgtaaaatatgtttgtgtgagtagcgatattgtcagccgtcttctaaagcaagtggagaacactttaaaaatacagagaatctcttcctttttttaaaaaaaaaataagaaaatgctaaata

SEQ ID NO: 1561 - DNA, 445 bp, Homo sapiens
  misc_feature (1)...(445): n = A,T,C or G
nttgaactgattgcatcgggcggngcaannncgntgtncctgagccccctggcctcaaattctgggggatcaacatggatgaaagctgaccgtgggacttctgccaaaggggaaaagttgggaccatggccaaaccgcgggcttgaggagggagccccgtttctcacatttgtccccttcctttacattttaggagctgtgggcagagggacctaaataacagtgatcttcattcaagcacctaagttttcggggtgacagtccctccccctcatcctttgcagaggaacccagggctggagtcgggagaaggctgatgacatagattccaatccctgcctccttccatctcggaccgttggaggcagggcctgcaccccagtgggagcaaaggaagccaccgctcaaagacacccccccacccaaaaaaaaggggagaagagag

SEQ ID NO: 1562 - DNA, 503 bp, Homo sapiens
  misc_feature (1)...(503): n = A,T,C or G
gagggcggnnnnaggggnaactgaaccctgngaatcgacggccntagcgagngagccggaattcccaccacatccgcgtaaacagcctcgcccctggccccatcagtggcacagaggggctccggcgactgggtggccctcaggccagcctgagcaccaaggtcactgccagcccgctgcagaggctggggaacaagaccgagatcgcccacagcgtgctctacctggccagccctctggcttcctacgtgacgggggccgtgctggtggccgatggcggggcatggttgacgttcccaaacggtgtcaaagggctgccggatttcgcatccttctctgctaagctctaggaatcttccggccgctgcttcctgccgcctcactcagccaggtggagagcaccaatctgaaccagcaatgcctgcagcccagcccctcctctgaacactcagctattactgcgctttccctccccacggccccaactccagggcaggagcaan

SEQ ID NO: 1563 - DNA, 462 bp, Homo sapiens
  misc_feature (1)...(462): n = A,T,C or G
agcggntgnnnnnnaattgagtagcctaccntgtgncgnggcattccactccacagacctcatggaagccatggccatgggcagcgtggaggcttcttataagtgtttatcagcagctttgatagttctgacggagtctggcaggtctgctcaccaggtggccagataccgcccacgtgcccccatcattgctgtgacccggaatccccagacagctcgtcaggcccacctgtaccgtggcatcttccctgtgctgtgcaaggacccagtccaggaggcctgggctgaggacgtggacctccgggtgaactttgccatgaatgttggcaaggcccgaggcttcttcaagaagggagatgtggtcattgtgctgaccggatggcgccctggctccggcttcaccaacaccatgcgtgttgttcctgtgccgtgatggaccccaaagccccttctccagccccn

SEQ ID NO: 1564 - DNA, 460 bp, Homo sapiens
  misc_feature (1)...(460): n = A,T,C or G
attcgataacgttngnnntttgtcgatccactatcagtgtggtggaattccagtgttttgcggtgtacgatgcgcatcgttttcccggctctggcaccagatccatactattctgtaaactgaggcggcgatgcccaaaaattggaagcaattactctaagatatcaaaagattgaagcaagccatgaaacctctgcgcggagagagccgagcccgaggcggcggggagccagcacgtgtgcgcagctccgccctcttttggcgaagcacctaggcctggcccctcccgcgacctgtagcgcggcggagcaagcgcggaaggctgggagggctgcgcgggctgcgcgtcgccatggagcccgacgggacttacgagccgggcttcgtgggtattcgcttctgccaggaatgtaacaacatgctgtaccccaaggaagacaaggagaaccgcattctgctc

SEQ ID NO: 1565 - DNA, 216 bp, Homo sapiens
  misc_feature (1)...(216): n = A,T,C or G
nttcgatgaccactagtccattcgatggccttctccggtcgggtgaaaaatccgggactgtgggaactgccgttcggcaccaccgcacgcgagatcctcgaagattacgccggtggtatgcgtgatggtctgaaatttaaagcctggcagccaggcggcgcggagactgacttcctgaccgaagcgcaccttgatctgccgatggaattcgatatc

SEQ ID NO: 1566 - DNA, 501 bp, Homo sapiens
  misc_feature (1)...(501): n = A,T,C or G
cgtgtccnngnnnnagggggncctgaaacccttngagatgacagccntngngannnanccnaancnnnaccaaccaaacaaaattcatctaagcgccaagataaagcacggttttatgtaagtcactgagaaatatttgttgaaatctcaatttgcatcctcatagagtatgtgtacacatgttttgaaaacactatacttggccgggcgcggtggctcacgcctgtaatcccagtactttgggaggccaaggcgggcggatcacaaggtcaggagatcgagaccatcctggctaacatggtgaaaccccatctctactaaatatacaaaaaattagccgggcgtggtggcgggcgcctgtagtcccagccatgggaggctgaggcaggagaatggcgtgaacctgggaggcggagcttgcagtgagccgagatcgcgccactgcactccagcctgggcgacagagtgagactcagtctcaaaagaaaaaaaaaaaagaan

SEQ ID NO: 1567 - DNA, 488 bp, Homo sapiens
  misc_feature (1)...(488): n = A,T,C or G
aggccngnaattggaccatagagatccctaggcagtgtggtggaattccaagagccgaagagccagtcctcactggggtgcagagggctctttgggggcagagcgggcactgcatggaccctgcaccctggagctgatgttcaggtcacaaagctggtgaagaactaccggtcccacgaggccctgctgatgctgccctcacggctgttctaccacagggaactcgaggtctgtgcggaccccacagtggtgacctccttgctgggctgggagaagttgcctaagaaaggcttccctctcatcttccatggtgtgcggggcagcgaggcacgggagggaaaaagcccatcgtggttcaacccggccgaggccgtccaggtcctgcgctactgctgcctcctggcccacagcatctccagtcaggtgtctgccagcgacattggcgtcatcacgccctaccggaagcagtggctctggagctctggtgg

SEQ ID NO: 1568 - DNA, 431 bp, Homo sapiens
  misc_feature (1)...(431): n = A,T,C or G
nattgaaaaccntnactgatgacttctagtccgngtggtggaattcgttgtacgttccctcgtgctggcgaagcggtggtgcgtggcgtggctgagtttctgtcgtccatttctagagagaatcctgacgacggcgttcgcgggagtccgccggaagactacaggcttggacaggtcgccagtagcttatttcgcggcgaacaccattccagaggtggcaccggtcggctggcgtccctcttcagttctctggagccccagattcaacccgtgtacgtgcctgtgcctaaagtaagtcactgggctttcttcccgaatagctcgttagaaccacttacatacaaagcaatcttcttacctaccgcgtgaagcgtgatttctaaagggggcagacaggattcattttaagtaacctttcatgactcttacat

SEQ ID NO: 1569 - DNA, 469 bp, Homo sapiens
  misc_feature (1)...(469): n = A,T,C or G
aggaggttgccgggnnnnnnttttgaactgacgtatactagaccgngcggtggaattccccggctagaatctgaagtgcgggagagtgctggaccctgagtgatggggccggcgccagctggagagcagcttcgcggagcgactggagagccagaggtgatggaaccagccctggaaggcacaggcaaagaggggaagaaagcatcctccaggaagcgtacattggctgaacctccagcgaagggcctcctgcagccagtgaagctcagcagggcagaactgtacaaggagcctaccaatgaggagcttaatcgccttcgggagactgagatcttgttccactccagcttgcttcgtttacaggtagaggagctactaaaggaagtaaggctgtcagagaagaagaaggatcggattgatgccttcctacgggaggtcaaccagcgggttgtgagggtgccctcagtcc

SEQ ID NO: 1570 - DNA, 229 bp, Homo sapiens
ctccggccctgcgtcggccctggttgcctctcttgccccttgtcctgaagcccagcgacacagaagggggtggggcgggtctatggggagaaagggagcgaggtcagaggagggcatgggttggcagggtgggcgtttggggccctctatgctggcttttcaccccagaggacacaggcagcttccaaaatatatttatcttcttcacgggaaaaaaaaaaaaaaaaaa

SEQ ID NO: 1571 - DNA, 428 bp, Homo sapiens
  misc_feature (1)...(428): n = A,T,C or G
nattgacgaccctnatagcagtgcggtggaattcggaccaagatggcggaccttgattcgcctccgaagctgtcaggggtgcagcagccgtctgagggggtgggaggtggccgctgctccgaaatctccgctgagctcattcgctccctgacagagctgcaggagctggaggctgtatacgaacggctctgcggcgaggagaaagtggtggagagagagctggatgctcttttggaacagcaaaacaccattgaaagtaagatggtcactctccaccgaatgggtcctaatctgcagctgattgagggagatgcaaagcagctggctggaatgatcacctttacctgcaacctggctgagaatgtgtccagcaaagttcgtcagcttgacctggccaagaaccgcctctatcaggccattcagagagc

SEQ ID NO: 1572 - DNA, 232 bp, Homo sapiens
  misc_feature (1)...(232): n = A,T,C or G
gcccgcgcgnctgcgcctgcgccgctcctctcctgcgcgcctgttccgccgccgcactttcgacacggatgccggggccgctcacgccacgggaaatgccaagatttccatcgttgcatttacaactgctacaaaaatgccagcactccatcgacatgaagaagagaaattcttcttaaatgccaaaggccagaaagaaactttacccagcatatgggactcacctaccaaa

SEQ ID NO: 1573 - DNA, 428 bp, Homo sapiens
  misc_feature (1)...(428): n = A,T,C or G
nttgaagacccatangcagtgcggtggaattcctggaagggaggggggcagcagccgccccctggaggaagggaccgggtctagccccgcctgcgtgcgaggcgccgcgccagggtctgaggatgctttttacccaacaagggccaagcaggcgcgggtgtcccaggagctgaagaaggctgccaagcggaccgtgagcatcagcgagggcccggacaccctatgcgatgggatgagggagagaagggagactctggctctggcccctgagccagagcccctggagaaggaagcttgtgagaagtggaagaggcccttcaggtctgcctcagccacctccctgacgctgtcccactgtgtggatgtggtgaaggcgcttctggattttaagaagaggagaggtcactcaattgggggagcccctgagc

SEQ ID NO: 1574 - DNA, 505 bp, Homo sapiens
  misc_feature (1)...(505): n = A,T,C or G
aggcgnnnncccccctgagatctatcagatggaggacctacccggctcgagccttggagtccacagagccaggaatggagagtgggcccacaattttggtataggtgctgtataaacttatagtaaggttaagaaaaccgcaactatccttatcagagacttggcggggggcagggtatgatggagatcataaggaggctaaaacactccacaccctccctctgcattgctcctgcacgggagtcgggaatcttttcaggttgatacgatctcaccttgaggagctgtgaggtcccagaagcctctgggttgcagattgcttggggtgaaaatgtctgtgctactgaaatctaactttttacaaaaaattacgggctgggcgcggtggctcacgcctgtgatcccggcactttgggaggctgcagcgggtggatcacttgaggtagggagttcaagaccagaccatagtgaaaccgtgtctctacaaaaaaaattagccaggtgg

SEQ ID NO: 1575 - DNA, 472 bp, Homo sapiens
  misc_feature (1)...(472): n = A,T,C or G
ganagtcnnntttgaanaccttactgatgaccctagtaaagngcggnggaattcattttataagagggaacaaattttcacaatttgaaaagcccacataagttttctcttttaaggtagaatcttgttaatttcattccaaacatcggggctaacagagactggaggcatttctttttaggctctgagactaaatgagaggaaaagaaaagaaaaaaaaatgattgtctaaccaattgtgagaattactgtttgaaacttttcaaggcacattgaaatacttgaaaacttctcatttatgttatttatgatgttattttgtacgtgttattattattatattgttttataaatggaggtacaggatatcacctgaattattaatgaatgcccaggaagtaattttcttctcattcttctaaaactactgcctttcaaagtgcacacacacgcgtccacatacactgcattn

SEQ ID NO: 1576 - DNA, 388 bp, Homo sapiens
ggaattagtgcccttataagaagacaaagagatatctccctcttcctgtacatggttgctccgaggaatgaccacgtgagcatgcagtgagaaggtggctgcttacagccagaaagagagcccccatcagacaccaaatctgccagcacctagatcgtggactttgcagcctctagaactgtaagaaataattgtctgttgtctaagccacccagtctttggaattttgttatagcagcccaatcagacagtagtatattttaaaagaggtaaaaccaagataacaaagaaaaaatccaaaaatggatttaaggcatggttttgtactggagacttcagaggactaagggaacaactgcaaaaccaatagttacagggacaagaagag

SEQ ID NO: 1577 - DNA, 501 bp, Homo sapiens
  misc_feature (1)...(501): n = A,T,C or G
cgccccccccnnatcgagttgcctatcncgtgtggtggaattcccggngtgtgggcgaggaggaggcggcaccagaccagttagaggactgggcccagccctgccacccagctaggcctggtgcttctgggtggtccctgcactccacccctacccgggccgcttggctgcgggacaagggccaggagtaggaagctccattctcttccatccttcccactaagtgcctgaggaaggaggccgctttgcacgggcacaaagacttccacccccgcgtcacctgcgcctgccaggagcaccggacaggcaccgtggggttctgcaaagacacctttgataagaattacaaggccaccattggagtggacttcgagatggaacgatttgaggtgctgggcattcccttcagtttgcagctttgggataccgctgggcaggagaggttcaaatgcattgcatcaacctactatagaggagctcaagccatcatcattgtcttcn

SEQ ID NO: 1578 - DNA, 575 bp, Homo sapiens
  misc_feature (1)...(575): n = A,T,C or G
acatactgtctcagctacgattgagctggactgaatacagccgcacagaatcaagttatgaacaaactctacaccataagcggagccanttttgatgagtacatcaggcangncgnggaattcctcctcacatcccagacgatgggcagccaggcagagacgctcctcacttcccagatggtttggcggccgggcagaggctgtaatctcggcggtgcgggaggccaaggcaggcggctgggaggtggaggttgtagcgagccgagatcacgccactgcactccagcctgggcaccattgagcctcatttatgaatgctatcaggatttctttttttggtggaattcttagcatgttcacatatgagatcatatctgcaaacacagataattttatctctttctttccatcttggatgccttttatttctttttcttgcctgattgccctggctaaaacttccagtactatgttgaatacaagcagggaaagtgggcatccttgccatgtgcttgatcttagaagacagtctttaagcgtctcaccattgagaatgatatatgctgcggggttct

SEQ ID NO: 1579 - DNA, 227 bp, Homo sapiens
ctctggccctgtgtgaccggcccttctccctcctgggtttcggagacattttggtgccagggctgctggtggcctactgccacaggtttgacatccaggtacagtcctccagggtatacttcgtggcctgcaccatcgcctatggcgttggcctccttgtgacattcgtggcactggccctgatgcagcgtggccagcccgctctcctctacctggtgccctgcacg

SEQ ID NO: 1580 - DNA, 502 bp, Homo sapiens
  misc_feature (1)...(502): n = A,T,C or G
agcggggnnnnnnnnattggttgcatagcccgtgtggtggaattcgccctgtctcaaaaaaaagaaagaaagaaagttatgtggtgtttattgacgatgaaagaaaactcatcgtctcattaaaaaggctggtttctctttgtcaagaggctacctttactcaaattagttcagtgctaagcagttcagagatgcgttgggtcgacccatatgaaatggccctttctggctgggcacagtggctcacgcctgtaatcccagcactttgggaggccgaggcgggtggatcacgaggtcaggagttcaagaccagcctgaccaacatggtgaaaccccgtttctactaaaaacaccaaaattagccaggtgtggtggtacgtgcctataatcccagctactcaggaagctgaggcagtagaatcacttgaacctatgaggcagaggttgcagtgagccgagatcacaccattgcactctagcctgggtgacagagagagagaga

SEQ ID NO: 1581 - DNA, 480 bp, Homo sapiens
  misc_feature (1)...(480): n = A,T,C or G
gcgccgagnnnaattgataccaatangatgngccgtaagacccacagcctctggattggagcagggtggtggggggagggtggagttggacagggtacccgctagcagtgtctcgtggccactgcccccatggggctcctagactggcctgtcatcccccttccactccctggaccaccacttgggcccagctctctgacccttacttgcctagatgcccatcctttgaggctgggtcagccccaggctcctgtcctggccgcctttttgcccctctggagctgcctttgtgtggctccgcctcagcgggaagaggtgtatccacaattcattctggaggcagaacgactgatgccctctgagaggcagcactgcctgcccggaggacctgtgtcccactgtggctctgttcagatccaggggcaggtgctggggccagagccaccccagccacagtccctgagttaaagagcctggggn

SEQ ID NO: 1582 - DNA, 485 bp, Homo sapiens
  misc_feature (1)...(485): n = A,T,C or G
cgcgccgagcccaaatgagnccttaatgagaccctaggaagnngcgnggaattccaaaagaagaacctcacataaaagaaagtgtatgatcaggatgcagaaacccatgcccatctccagtggcttacatttgagattcagacccctcattcatgtgtgaaatgtactgcttactatgcggacgtgtgatacttcgcagggcagcgaatggcgcattcctccttaaatgtatgcgtgtgcatgtgtctcagcaaaagtgactacaaaggtgttctgttcagcacttcagctttccagtggcccatctcaacatggaagagaaaggaccttgccctcctccttgtgccactgttggaaggagaaagagccctccgtcccctcacgtctgctgcaggacagggggcccaagagggcctcagcacactggctgcaagacagagaccagggaccagagccaaggcaagcagaaagcaagaaaaggctcc

SEQ ID NO: 1583 - DNA, 501 bp, Homo sapiens
  misc_feature (1)...(501): n = A,T,C or G
agcggggnnnnnnnnattgagtggcctagcccgtgtggtggaattcctctttacacgattgactctgacaacaccaaccatgtggacaccaaggagctgtgtgattactttgtggaccacatgggtgactatgaggatgtcctggcctccctggagaccttgaatcactctgtcctgaaggccatgggttataccaagaaggtatatgagggtgggagcaacgtggaccagtttgtgacccgcttcctcctgaaggagacggccaatcagatccagtcgctgctgagctcantggagagtgcggtggaggccatcgaggaacagaccagccagctccgacagaaccacatcaaacccagccacagcgcggcacagacctggtgtggaagccccactcccgcctctgcccccaaccacaagctcatggctatggaacaaggcaagagccttccatctgccacggaggatgcaaaggaagagggtctggaagcccaaatcacc

SEQ ID NO: 1584 - DNA, 502 bp, Homo sapiens
  misc_feature (1)...(502): n = A,T,C or G
agagcnnnnnnnnnnttgaatcgcagtccctagtccatgtggtggaattcgtgactgctattgaaccaccaaaagtccattatgaaactgtcccaggctgtccaatctttctggctggtccctgaaggatggaaatgctttcttggacaaggagctaaaggagtgctcgggtcatgtatttgtggattctgtgccggaattctgtttaccagagacggagctaatagatctgtctacagtagatgtgattctcatctctaactatcactgtatgatggcgctgccatacatcaccgagcacaccggcttcacaggcacagtgtatgccacggaacccaccgtccagatcggcaggcttctcatggaagagctggtgaatttcattgaaagagtgccaaaggctcagtctgcctccttgtggaagaataaggacattcagaggctgttaccttctcctctcaaggatgcagnggaagtctcaacctggagaagatgctatacn

SEQ ID NO: 1585 - DNA, 479 bp, Homo sapiens
  misc_feature (1)...(479): n = A,T,C or G
gagcgtaanaaaatgaaccatgatganggcngtaaaacctgcgccagccccttggcctctgccttctgctggcagaggagcagctggactggggcctttggcacagcagccggtgtctcctgcgcccgcctcccccatggccccatgcagccccaggggcttcccccctgcccatggagtagagcccgagatcctggccactatgccagttctgacctcgcatccccctaccccgagcccatgcagtctgggaacatgccgccttctctccagcctctgtgcctttgttccaggtggcctcaccctcctgtccctggctgggctaggtggtcctgtccaggctcctgcagcgcccccctcactttgacactggactaggatgcaggctcccttctgtgtccgcttgagggtaccctgggtcctctcatcaggggcagaggcatgagagagtcggngctggatggccgggggcttctggg

SEQ ID NO: 1586 - DNA, 499 bp, Homo sapiens
  misc_feature (1)...(499): n = A,T,C or G
acgcggggtnnnnnnnnnntactgagacccctagtccagngtctgagaactcagttagactaatattctcagcacgggtgtatggggacctcattacctatttttttcatcatttaccctaggtaagaactttgatcactgcttactaggtaaagaatgtttgtactgttccaaaacccaggcttctttattcctttaccactatccatgtgagcattgacaaatcatggcttagaggtgctcactgactcgctaagacgactttggccctgttgatgactggtgctgtgctccagccttatcagttaggggacccaaggtttgtttgggacctgggtacaggtaaaagccagacttggcagggacccctctttctaggctgaaccttgagtccccctgctttttggcagacctaatggatcactgtcttgcagctagttcttcatgtggcgcctcttaagccagtgccggaggaggcatgctcctctttctatgccac

SEQ ID NO: 1587 - DNA, 508 bp, Homo sapiens
  misc_feature (1)...(508): n = A,T,C or G
tgggggtnncgcccttcgagaccctatccagatggaggaccttcgcaagctcagggcttcaacatcaggtgtagcatccaagaggcaaacatgcctgaaacagggccacagtccctctgatggacctaacctgtcagacaagctcccaaggcctccctccactgttgcctgctgcctttccctagggggcacatgctgggactgagtagatgctgcgggtcccagagaaccttctctctcaggccagcccctcgcctccccccgagcctcccattgtgttgcccgggacgcagtcctcacggctccaccctggtgacccgggtgtggtgaagcagtcgctccaacagaaaaatgcagccgaggaaacggctgagaaaggagaaaggagctctgtaaacctgtgtcctatagaagttcctacccgtgaattccctggctgcgttctcaggccaccacttttaaatgctgaaaaggagcatgtttttcttttgggtcacttaaaaaacat

SEQ ID NO: 1588 - DNA, 482 bp, Homo sapiens
cgcgcccgccatcgacccaatagagaccataggcagtgtcgtggaattcgagaacagctgctgcttgctgtacgtggtggaggaccagctgtgtgatgtggagcaagccttcagagctgagcatttgggccaacaccagagtggttcgggaacaggatgcagacattgtcctcaacgaccagcggcactttgatccagttttccagttcttgcacaagcaagtttgtgtcagccacgccctggggaggatccactggatcaccgccgtcactgcctgttcctggcggcctctccggcttccctaaagagagcaggtgggactttctacaacgctgctgtgcacgacgtggatgccgtatgcatgttgctgggggaagccactccggacactgtgttttctctgggacatgtcttctgcccagatatggccgccttaaaagatgcagatgctgttgtgatcagcatgaagtttccctgtgagg

SEQ ID NO: 1589 - DNA, 450 bp, Homo sapiens
  misc_feature (1)...(450): n = A,T,C or G
nttgtagacactagnccgttcgagggcattcgtcaccccagcagaatgtccggcacttgctcccttgctgccccttctcaggtcagaggcgggtgttccagggcctgccgcggggctctctgggccggttccctgcagacccgcaggagagcacatgtgccttgcatgaagtgtgggttgcgccaacaattcccctggtccctttcaacctgtttagttcaactcaagcctccctgtgtcccagaccctcctgctgccaccaccacccaggtcctccctagtcctccagcgtcaacactatcccttgggagttgtagctgctgtcactgactcccggctatacatggcctgtcgaccacgttatagccctcaggcctgttgaacttgctctctaagagaggttgggaccaggctaggttccgggtgacgcccaggagaggtggtggcctn

SEQ ID NO: 1590 - DNA, 451 bp, Homo sapiens
  misc_feature (1)...(451): n = A,T,C or G
attgaaaccttnnnntttgtagacctctatcagtgcggtggaattccacactacccacagcagcgtttccctaatctcctagcacttccctcctccaggactgtattgtaattatactgtggccactttctggaaagaaaggaggatgaccacaaaacctggcatttaagacacttagagctagttgctaattgactggccaggatgggcccctgggatggaggcaggagtgctggatgcccgcgtctcttcttacaggcctaaagatccctcctggctgtgagctggtggtcggcggtgagccccagtgctgggctgaggggcactgtctactggtggacgactcttttctacacacagtggctcacaatggtaacggggtgcccattctgcaggggggatgagggactcaggagcaaaggagcgttgactagaaggcagcagaatcagg

SEQ ID NO: 1591 - DNA, 223 bp, Homo sapiens
  misc_feature (1)...(223): n = A,T,C or G
cgtggccantattgnaccttnaattccaccacctttcataaagccaccagcagaagatgatgtgtcaaatgtacaaataatgtgtgcctggtgccagaaagtgggaatcaagcgctattccctgagtatgggaagtgaggtgaaaagcttctgcagcgagaagtgctttgcggcctgccgacagcctacttcaagagaaataaggtttatcctttgtctgtgt

SEQ ID NO: 1592 - DNA, 506 bp, Homo sapiens
  misc_feature (1)...(506): n = A,T,C or G
tggggggnggcccaatgagaccatatccagttggaggacttcgtcagcctcctcctgccctgcctgtgcagggtgttgcagtcagtccttccactgagtcattgcatgggctctcccaacatccggtgcacactggcagctgctctaagccaactcctagcccccaccacttgaccaacacaaacactgagtgggtgaggcagaaggggagcgctggggcctggctaggccaaggcttcctgcttcctggctgaatgatcgcacccgaggactggctctctggagcttcctttgctggctttatagctgctgccagtcacaagaccaggggaagccaggtggaaaggaactgatacccagcatttgtcatgtgtttttaacagtctggctttgtgggggcggccacagtgggggaggccctgcctggtggtggaagccagaggtgcccacaggaggcacacctcatggtgcangcttggaggatggcaaggtaggcagaggggtct

SEQ ID NO: 1593 - DNA, 507 bp, Homo sapiens
  misc_feature (1)...(507): n = A,T,C or G
ccccccattcagncccctttgnnttattgagattcctagtcagtgtcgtggaattcgtcacagatgacataagcctgggcaggctgtggggaggccgctgcctcctagcctcacggtcagctttctcaagccaggtgtggcctgcacagcggtcagggcagggctggccatcctcccaagcctcaagggcagtgtcttggagtgggaggatggccagccacaagccaccagcttgtcagcatgggaagggcaagggggaaatgggttggcctacctcatttgactccagccaatggagacaattcctgacccctgctttgatggtgctgaccccacaggaatcaaggatcttgatgccaagtgtggcatctctacctgaagagctgtttctgttagacccacgggccccggcctctgttttatgggggcagggcgtctgcaacaggagtggcacacggtgaagtgctggcatggttctacctcccaacccctcccaaccccatcccn

SEQ ID NO: 1594 - DNA, 488 bp, Homo sapiens
  misc_feature (1)...(488): n = A,T,C or G
gagtgccnnnntgtggcagactgaaaccnnngtgggangcttcgcagagncgcggaattctcctttccctcttccgtgaagagtgcagctcccaccgttggccaccccacctgccttgtggggaaagaggcctagtgggggcagccaggatctgaggcaggagactgaggatggacccctgcatggcactctccctcatgggcttgtgccttcaggctgtggtcagccaggtccccaagactgtcctcctctgggagcttccttgcttctgaaacagcctgaatcacccacagtatctcaggctttcccgaggctgttgccgtctcaagttatgcccagccacatcctccaaggaggtgcccagaggctcgacccatggaagccaagcagcagccagagatccccaagaacactgggtcagcacaacacgggcacccagaccaggatgccggcggtcccagagccagccagaggcccagggaaacacn

SEQ ID NO: 1595 - DNA, 443 bp, Homo sapiens
ggggctcacagggttcccgcagatgctcaggccggccaggaatgcatctctggctctctgttcccacggatgtcactgcctcagccagcctcccccagagcccgccagccgctaagccggggccacacctgggggtgatttcatgcctcacctccagtaggcaccttggtttctttgggctaatctctggctcccttgcgctaactcttgctctcacccagctaatccctgcctcaccctgactgccccaggggctgaccactaacaaccaacctggccctgtctgggggttccaggctcctggcctggccctgaccagttcttaattaacctttccttcaccttgactaactcctgccttcctggtctgttcctttcagcagaaactaatgggttgtggatttttttctgactaacaacaggtctaacattcctcgttactg

SEQ ID NO: 1596 - DNA, 479 bp, Homo sapiens
  misc_feature (1)...(479): n = A,T,C or G
gggatgaggcacgcccnccccctgagaactgaggacgtncggggnnccagggctgctatctcgaccattttccgcacctctccatcttcatctacgcagccatcgtcttctccatcacctcctgcatctttacctatatccatttacagcttgcctgagtggccagcgcgggacggggtgggcgcaggaccgagcggggagggaaagggaaaacggggctcggcattttgtgttttagaacagcgctgcacccccttcatgtagctttcgatgcttgtttctttccgtctttgttggcactatctttgtctatcagtacgaaagtacaaagtagctgccggcaatgaaataggggtgctgtttgcacctgcaggttaggggtggaggcgcttagaattttggggtgtgattgagccccgtttataattagaatgcccctggacccctaccactctgtgacgtgggggcacgcgcatggt

SEQ ID NO: 1597 - DNA, 217 bp, Homo sapiens
  misc_feature (1)...(217): n = A,T,C or G
nttcgagtttcactagcccagtgtgatgggcttctccggtcgggtgaaaaatccgggactgtgggaactgccgttcggcaccaccgcacgcgagatcctcgaagattacgccggtggtatgcgtgacggtctgaaatttaaagcctggcaggcaggcggcgcggggactgacttcctgaccgaagcgcaccttgatctgccgatggaattcgatatc

SEQ ID NO: 1598 - DNA, 188 bp, Homo sapiens
gcttctccggtcgggtgaaaaatccgggactgtgggaactgccgttcggcaccaccgcacgcgagatcctcgaagattacgccggtggtatgcgtgatggtctgaaatttaaagcctggcagccaggcggcgcggggactgacttcctgaccgaagcgcaccttgatctgccgatggaattcgatatc

SEQ ID NO: 1599 - DNA, 421 bp, Homo sapiens
ggggaggcggaggcaccaactaagagcgacctatcatcgcaaagccgccctcggggcgctcatggcgggacgcctcctgggaaaggctttagccgcggtgtctctctctctggccttggcctctgtgactatcaggtcctcgcgctgccgcggcatccaggcgttcagaaactcgttttcatcttcttggtttcatcttaataccaacgtcatgtctggttctaatggttccaaagaaaattctcacaataaggctcggacgtctccttacccaggttcaaaagttgaacgaagccaggttcctaatgagaaagtgggctggcttgttgagtggcaagactataagcctgtggaatacactgcagtctctgtcttggctggacccaggtgggcagatcctcagatcagtgaaagtaatttt

SEQ ID NO: 1600 - DNA, 482 bp, Homo sapiens
  misc_feature (1)...(482): n = A,T,C or G
gggttccnnncgtgnnaacctganaccannttanngngcccgcanagaccganattaagcccacaagttcctgtgagcgtcagcaaggagaactccactgcgagcgaagtattggactccctctctcagagtgtgcatgtgaagcgctgagaacctgcgtttggcggaggtaattaagaatcgttttcatcgtgtgttcctaccctcccactcactggacactgtgtccccatctgatacgctcctctgctttgagctgctatcctcagagttggctaaggagcgggtagtggtgctagaggtgcaacagcgcccccaggtgcccagcgtccccatctccaagtgtgcagcctgccagcggaagcaacagtcggaggatgaaaagctgaagcgctgtacccggtgctaccgtgtgggctactgcaaccagctctgccagaaaacccactggcctgaccacaagggcctctgccgacctgaga

SEQ ID NO: 1601 - DNA, 483 bp, Homo sapiens
  misc_feature (1)...(483): n = A,T,C or G
gggagagccgcgcccccccctgagacctgagtgacctncgaggaancccacatgccgggccctccaggctgcccagcatccctgtacgaggccatggaacagacctgtcgtctggacccggaggagaggcctaccttcgagtacctgcagtccttcctggaggactacttcacctccgctgaaccacagtaccagcccggggatcagacatagcctgtccgggcatcaaccctctctggcggtggccaccagtccttgccaatccccagagctgttcttccaaagcccccaggctggcttagaaccccatagagtcctagcatcaccgaggacgtggctgctctgacaccacctagggcaacctacttgttttacagatggggcaaaaggaggcccagagctgatctctcatccgctctggccccaagcactatttcttccttttccacttaggcccctacatgcctgtagcctttctcactt

SEQ ID NO: 1602 - DNA, 491 bp, Homo sapiens
  misc_feature (1)...(491): n = A,T,C or G
tgggtgaccnnnncggagnaaancctaggggnanacttagnngngctgngacannancgcgcannaaantncggactctgccttggcctccgagacccttgcttctccccagtctctgcctccagcttcaccactgctanaggacagggaagagggggacctggggaaggcctcggaactagcagagaccccaaaggaggagaaagcagagggggcagcaatgctggagctggtgggatccattctccggggctgtgtccctggggtgtatcgagtccaaactgtgccctctgcccggcgccctgtggtcaagttctgtcatcggccttcaggtctccacggtgatgtctccctcagtaaccggctggccctgcataactcccgtttcctgagtctctgctctgagctggatggtcgagtccggcccctcgtgtacaccctccgctgctgggctcaaggtcggnggctgtcagggagtggcccccttctca

SEQ ID NO: 1603 - DNA, 490 bp, Homo sapiens
  misc_feature (1)...(490): n = A,T,C or G
cggggcgccnnnggtgannaaccctaagntcannttaaaangctttgcanaaacncnaannngangaggatgaaccgccggtgtctgccttttccttggaggcccatgcttgtgtgggcttggatgctgcagtgctgattggggccgtgctggttctcttgctcatgtacagggacaatagcaatcaggccctgtgggactaccagaaggtgctagtgcagctggagagcctggagaccggtgtgggagaccagtgccgcaaggagttcacagacctcatgacggagatgaccgacctcagcagcgacctggagggcagcgggatccccttcctggactaccgcacctacgccgagcgcgccttcttccctggccatggcggttgcccgctgcagcccaagcctgaggggccaggggaggacggccactgtgccactgtgcgccagggcctcacgcagctctccaacctgctcaacagcaagctcttcct

SEQ ID NO: 1604 - DNA, 491 bp, Homo sapiens
ggtgggggattgaaccctatgatcgagggccattccaggacttccccttctactacctgcaacagggctcccgccctgagggcagattcagcgccctgatctgggtggggcccccaggccagccccctctgaagctcatccaggcggtggcaggctcccagcactgtgcccagatcttggttctctggagcaatgagaggccactcccatccaggtggccggagacagctgtgcccttgacagtcattgatgggcacaggaaggttagtgatcgcttctacccatatagcaccatcagaacagatgccatcctcagcctctatgcccgcagcagtctttccacaagtgaggtggactttgcctttctggtgtggcagagcttcccagagcggatggtgggcttcctgacgtcgagccatttctgggacgaggcccatggtggctggggctacactgctgagaggaccaacgaaatctccatggttctcacc

SEQ ID NO: 1605 - DNA, 481 bp, Homo sapiens
  misc_feature (1)...(481): n = A,T,C or G
gaaaaagcnnggagnaaacctagggnaacctagnngggcgngcanaaccacannnntntgncatggnggncggaaactgcgcagngaacagggtgtgcaagtcatcctggacccagtgcacagcgttcggctctgtgactggtggcatcctcagtacccattctccctgagagcgtagttactgcttcccatcccttgggggcagcctcgagtgtagtccattagtaatcagattccagtttggacagggtggctggattgtatatctcgttagtaatgtacatgctcttcaggttctagggctcctgttaggggagggagaaatgttgaatcaagagggaaaacaactactatgatttataaacatattttaatgtaaaaatttgcatttaaaaggagtggccctgttttctgtgttaaaaccccatttggtgctattgagtttgttctttattcttttatcccagngaaaattgttgat

SEQ ID NO: 1606 - DNA, 477 bp, Homo sapiens
  misc_feature (1)...(477): n = A,T,C or G
ctttagagnatccctattccagagaggaggaattctcgacttcccccctgccatggcgtgtaaacaaaacaaccctcatatttggggaaattttatcaaaatgccatgttctaacctatgagcaaatctttattatgcaagtatctatttagaatagcggtatgtaaatattgttcttccatcacacaactattactctttcagtaagtgagcttaaggtatgagtcacaccaaaaagctttaaggagctgtattttactattagagggactgtgtccctctcattattttaagtgtaagaagaaaacttaattttgcattttggtctgattgaaataagggttgtagctatagtttcccccactttttttgcttaacaacttaattcttactctaatttaccttataatagctaatttaaaactcgttatttttgtttttaaattaaccggggtgtgctcccaatatataagaatt

SEQ ID NO: 1607 - DNA, 455 bp, Homo sapiens
  misc_feature (1)...(455): n = A,T,C or G
nttggataacactatgccagagaggaggaattcggaatacatggcattcatgaatgattttttagatcatgaatggggtggaatgaagcgctttcttttggagatctctaatccagacaccatctcaaacaccccaggctttgatggttacattgatctgggccgagagctttcagttttgcattccttactgtgggaagtagtttcccaacttgataaggcgaccgtggcaaaattggggcctctccctcgtgttcttgctgatattaccaagtcattgactaatcctacgccaatacaacagcaactgagacgcttcactgaacataactccagtccaaatgtcagtggaagcctctcctctgggctgcagaaaatatttgaagaccccactgacagtgatttgcataaactaaaatctccaagccaggacaacacagacagctacttcagag

SEQ ID NO: 1608 - DNA, 484 bp, Homo sapiens
  misc_feature (1)...(484): n = A,T,C or G
ggggnaacgggagtganaanacctgggngaacctagnnnggtgngnaanacnnnnaannnnnnatnnnnagnagnggcattattattaaacccttcctgatggatataaaaaatttttcaggatgtagttatgagaagggcaaagtgagggaatataatagttccacaaaatcaatgatatgccgatcctctttaagtattgttttcttatgagctattttctcatttcattgacacatgctaattttcctatgtagattgtctacctgagctttccatgagggttgagtgagaggaggcaacattcattctcagatgaacaatacctcgtcttgttttgcagaactatgttgcctacatcatacttacttttttctaacaaaatttgactctatcatcagcagatgatttttttgaccagaaaattaatgactcatcctgtaactctgatcctaatatttctcaacatttattctgacaatgg

SEQ ID NO: 1609 - DNA, 496 bp, Homo sapiens
  misc_feature (1)...(496): n = A,T,C or G
tggggnanacggggagtagnnaanaaactgaaaccanngctacngngctttgcanaaacnnnnaanntngaagngacacccagaaacagcttgattggttacagcttatcaattgtctttaatgggcatggtctgatcacttgacagccggtggttgcctgaagatcagctggtatggctggctgagatggagctacctgttgcaagaatatactcctaagttaggttgcagtttgattactgagtttttggtacctcttacattttgtacctgggacagggtcctcacctcactcaccctggccctgttcctgagacaaggaatagctccttttaagatgctgattatcatgcttctgccttgctgggcacacccacactggttgtaatactcaccatctcttcccattttcacatctggactcttcttctcatgcccctcaacccttaatacctccctttctttgtactcttgcttatcttctgtccaatcttt

SEQ ID NO: 1610 - DNA, 473 bp, Homo sapiens
  misc_feature (1)...(473): n = A,T,C or G
ntaggagaccctttccaaggcgggaantttgacagccgttattctattccaatttatttatacttttatatcctgctagttatttttataaactttttaaaaacattcgcgaattacttttaaaataaaaaggacagggtagggctctcatcccacagagctcacagcattttatcttctctgaaaataaaagctacttttataaatattagtctgttttaaatatagctttaaaatgtaacttcaaatttcttggaattgctgattctcctcccccatgtgccgctctcagaggatcacgacgcaagcctgtgactgacgaccattcctccctcactgacgccagagctctaaaccactgcagcatacctttccacacgaaagaaaagaggtctccaacattcacttctatttaaaacaatttctcttcaagtctaagttttagttttggcacagaaataaagtcttaattn

SEQ ID NO: 1611 - DNA, 487 bp, Homo sapiens
  misc_feature (1)...(487): n = A,T,C or G
ggcgcagagggccaaatgagaccaccatccgagancataggaagngncgnggaattcggaagacttgtcctctgctacccatgatgaggcggtgcaggtcctcaagaagacaggcaaggaggtggtgctggaggtcaagtatatgaaggacgtctcaccgtatttcaagaactctactggtgggacctcggtcggctgggactcacctcctgcctcaccccttcagcggcagccttcctcccctggccccacaccccggaacttcagcgaggccaaacacatgtccttgaagatggcatatgtctcgaagaggtgcacccccaatgacccggagcccaggtatctggagatctgctcggcagatggtcaagacaccctcttcctgagggccaaggatgaggctagtgcgaggtcgtgggcgactgccatccaagcccaggtcaatactctgacgccgcgggtcaaggatgagctgcaggcactgttg

SEQ ID NO: 1612 - DNA, 461 bp, Homo sapiens
  misc_feature (1)...(461): n = A,T,C or G
gtagtgnactgagaccccactgaggcgtcgaaanncgggaaaggttatgctgcgaacttgatatgcaatatgaacaaattgcatgaagcttatgacaaactgtacaaaattccaggaaaatatgtcagctgcacagacatctacccaagcccagacagcagaacagagaaaacccaaccccagcaaactgaagacataaaggagcccgaagaatccactgccacccatgaaacctactacaaataaaatactggcaagatgataaatggctccttcggcctcttgcttccaggttgagcagactgggcgttcatctattaggttcttccataaacttgaatttctttccatggctgtattactgcctgcttcacttttcagttgactttagatgacactgaaacaggtaactaagtcctttggttctccatcatgagagttttgtgcagtcttcacaaaan

SEQ ID NO: 1613 - DNA, 486 bp, Homo sapiens
  misc_feature (1)...(486): n = A,T,C or G
ngcgccggggccaaatgagnccttgactgagaccctaggccgnngcgtggaattcggcttttgtcataatcttccagaacctcgtgatgttcctgagcgtcctcgtggactggatgattccagacatccccacggacatcagcgaccagatcaagaaagagaagagcttattagtggatttcttcctgaaagaggagcatgagaagctcaagctgatggatgagccggctctgaggagcccaggaggtggggatcgaagcaggagccgggcagccagctcagcaccttcaggccaaagccagctgggcagcatgatgtcgtcaggctctcagcacaccaatgtgtgagcagttcagcctgcagcagaggagggcacggcagcagagacacgcacatgcacgtaagcatgttcctacacccacatggcgtgctgtctgtctgcaggggcctggcttgatggngtcttgaagagggggcagtgtgtan

SEQ ID NO: 1614 - DNA, 475 bp, Homo sapiens
  misc_feature (1)...(475): n = A,T,C or G
ngagctggnnnaaatgaaccatgatganggcngtaaaccttctgccctcttctcccttggctccagctgcagctgttgacagatcaagcatgtcctgtgggagcttagaaccctgaagttctagtgtctgaaagatcagactccacgtcctgctgtcagccttgtcatcttgtctgatgtctttcagctgggagccccaaaccaggacagttctcggaccaaagatgcccccacactcaaaagtctgtcccatcttgtgtttggagaaggaaacaatgttggcaggcagcactctgtggtggtcagccctcagagctgtttctaggcatctctcagatcagacagcaaagaatctacccagatctgggctgggtggaggtgtggctgggctgggggccattctgagcctgcagtgagagtttggcccagcctcagtccttgctcttctctggctacctctgcagggagctgcagg

SEQ ID NO: 1615 - DNA, 482 bp, Homo sapiens
  misc_feature (1)...(482): n = A,T,C or G
gcgccgcggccaatgagcctttactgagaccctaggacanngcgnggaattccagggagggatgtcctggattccctgccctctgtttcctccagccctggacaaaacgctctgtgttcctgggcagcccattgtgtgcctttggcaggagggggacctggctctgtgtgctgctggctctgcgctggtggccagagccctgtgtctcacggtcacgtgacacctcaggatcctaaggtgccgatcaccttcacacccactcagaaaaccaaagctcagagacggggaggaagcttcctggggtcacacagtttgccagcggcgaagccctgtccccagtctcactttttcctttttagtagattgttttcaatataacgtctatacagaaaaacacagacgtgtacacagtttgattcttcttagactgaacacctggtttcaccagcccccagatacagagtgtgatgagaacaccgagg

SEQ ID NO: 1616 - DNA, 485 bp, Homo sapiens
  misc_feature (1)...(485): n = A,T,C or G
agagcagttttnnacactgagacctatgangangngcagtaggacngccgntcctcactcgcttcaccgttctcacggcaacaggctggagtctgtgccgatccctcatccacctcttcaggacctactccttcctgaacctcctgttcctctgctatccgtttgggatgtacattccgttcctgcagctgaattgcgacctccgcaagacaagcctcttcaaccacatggcctccatggggccccgggaggcggtcagtggcctggcaaagagccgggactacctcctgacactgcgggagacgtggaagcagcacacaagacagctgtatggcccggacgccatgcccacccatgcctgctgcctgtcacccagcctcatccgcagtgaggtggagttcctcaagatggacttcaactggcgcatgaaggaagtgctcgtcagctccatgctgagcgcctactatgtggcctttgtgcctgtn

SEQ ID NO: 1617 - DNA, 486 bp, Homo sapiens
  misc_feature (1)...(486): n = A,T,C or G
ggcgccggaggccaaatgagaccataactgagancnctggacagngcatggcgatggagccgatatgggagagtgattttcatacgctctcatatggcttccggcctgagcgcagtgtccaccacgcgatccgcacggtgaaattacagctcacagactgtggtgaaacccggggacgctgggtgattgaaggcgacctgtccagttacttcgacaccgtacatcatcgactgctgatgaaggctgtacgccgcaggatcagtgacgcacgtttcatgactctgctgtggaaaaccatcaaggcgggacatatcgatgtcggtctctttcgggcggccagtgaaggtgtgccacagggcggtgttatatcgccgctattatcgaacatcatgctgaatgagttcgatcaatacctgcatgagcgctacctgagcgggaaagccagaaaagatcggtggtactggaataacagtatccaacggggcn

SEQ ID NO: 1618 - DNA, 444 bp, Homo sapiens
ctcctccactgaccctacacccagggctgctactgccgcttgtggcttcaggatgaaaggtgagaccccggtgaacagcactatgagtattgggcaagcacgcaagatggtggaacagcttaagattgaagccagcttgtgtcggataaaggtgtccaaggcagcagcagacctgatgacttactgtgatgcccacgcttgtgaggatcccctcatcacccctgtgcccacttcggagaaccccttccgggaaaagaagttcttctgtgctctcctctgagctcccctgtcccttctcacaactcctcccttttccctctcctgggcccttccttaggtcagtaattgttgtgagccccttaggctccttgcatcccatccctaacccttgcctgaccatgtgaggttatctgaagcacaaggcccaccctcacctatctgtcg

SEQ ID NO: 1619 - DNA, 483 bp, Homo sapiens
  misc_feature (1)...(483): n = A,T,C or G
agagccgaannnaaatgagaccataatcgangngtntgaanaccaggatggnggtgcctgtatttcccagttactcgggaggctgagtgaggcaggagaatcacttgaacccgggaggcggaggttgcagtgagctgagatcacgtcactgcactccagctcaggcaacagagcaagactttgtcccccccccaaaaaaagatgtaagttaaggtgaggtcatactagagtagggtggccccttcgtccaatatgactggtgtccttttaaggggacgggagccagtggcacagaggagagactgccacgtgaagacatggggccgatagccctgtgaggacagaggccaagtttggagctgcacatggaccagctgagaagagccgaaggtcgcccgaaaccaccagaagctgggagagagcgggcactgcagacactgctggcctctggaactatgagagaaatgttggttgttttaagct

SEQ ID NO: 1620 - DNA, 427 bp, Homo sapiens
aatctctggtttattttgggattatttgttgttggtgttgtcaaagtttgttttttctaaagttgtgtgattatatatttgacattttacatttcaaagaaaggtatgttgtctaacaggggaccaacagaaggtagtattgacaactgttcctgcttctactaaaaaaaaaaagagcacaaaagaaaaactaatttattgaaaaattaaaaaatgtcattgtttcctgtttgttaatattagggttgtaaggtgtcgttttgaggtatcgactgtgattccttcccccaccctccattctccagcggttggccggtgttagaactcgctctctttgagtgactggctacaagggcctgagaggtggccagcctaggttggagctggaggggatggagccccacctgaggtgccgtgtcacacgggt

SEQ ID NO: 1621 - DNA, 486 bp, Homo sapiens
  misc_feature (1)...(486): n = A,T,C or G
gcgccggagccaaatgagaccataactggagaccctaggcagnngcgtggaattctgacaagttccgaggggtagagtttgtgtgttgcccactggctgaagaaagtgacaatgtggattctgctgatgcggaggaggatgactcggatgtctggtggggcggagcagacacagactatgcagatgggagtgaagacaaagtagtagaagtagcagaggaggaagaagtggctgaggtggaagaagaagaagccgatgatgacgaggacgatgaggatggtgatgaggtagaggaagaggctgaggaaccctacgaagaagccacagagagaaccaccagcattgccaccaccaccaccaccaccacagagtctgtggaagaggtggttcgagaggtgtgctctgaacaagccgagacggngccgtgccgagcaatgatctcccgctggtactttgatgtgactgaagggaagtgtgccccattct

SEQ ID NO: 1622 - DNA, 488 bp, Homo sapiens
  misc_feature (1)...(488): n = A,T,C or G
cgatgagggnnccaaatgagaccaccatagatgaccataggccanngcgnggaattcaatgaatacaatagacaaagggggtgtgatgagtgttaacttggttgttccagaggtaaaccaggtctcagggaagagcctggagctgctattgcttaggaagttgtacgtgccttgaaatgtccactacctgaggacgcagcatctggtgggcccggggctgctggggccaaggagggaccttgaccttctggtgcctgcccctccccggcctacgtgccatccgcgtgacgctaggtcagcgctgccggttctttaccaaatgtgcttgcttctcctaagttatttataaagagaaatcactaatggactctactggtttgagtgcttctgagctggatgaccgaccgcctgtatgtttgtgtaattaattgccataataaactttgatgagtcnnnnnnnnnnnnnnnnnnnnnnnnnnnaannnncg

SEQ ID NO: 1623 - DNA, 485 bp, Homo sapiens
  misc_feature (1)...(485): n = A,T,C or G
gggacnnatggagaccnnnnnnnttcgtagaccctagtcagtgtggtggaattccaggagaagtgcgtgccgagctgaggcagatgttcccacagtgaccccagagccctgggctatagtctctgacccctccaaggaaagaccaccttctggggacatgggctggagggcaggacctagaggcaccaagggaaggccccattccggggctgttccccgaggaggaagggaaggggctctgtgtgccccccaggaggaagaggccctgagtcctgggatcagacaccccttcacgtgtatccccacacaaatgcaagctcaccaaggtcccctctcagtccccttccctacaccctgaccggccactgccgcacacccacccagagcacgccacccgccatgggagtgtgctcaggagtcgcgggcagcgtggacatctgtcccagagggggcagaatctccaatagaggactgagcactgacan

SEQ ID NO: 1624 - DNA, 427 bp, Homo sapiens
  misc_feature (1)...(427): n = A,T,C or G
attgagtacccctactccgngtggnggaattccccggctcgaccagtacgcgctgctgtacagccagggcagcaagggccctggcgaggacttccgcatggccaccctctacagccgaacccagacccccagggctgagttaaaggagaaattcaccgccttctgcaaggcccagggcttcacagaggataccattgtcttcctgccccaaaccgataagtgcatgacggaacaataggactccccagggctgaagctgggatcccggccagccaggtgacccccacgctctggatgtctctgctctgttccttccccgagcccctgccccggctccccgccaaagcacccctgcccactcgggcttcatcctgcacaataaactccggaagcaagtcagtaaaaaaaaaaaaaaaaaaaaagcggc

SEQ ID NO: 1625 - DNA, 482 bp, Homo sapiens
  misc_feature (1)...(482): n = A,T,C or G
aggagtggccccgggtgncnnaacccagggaggcttgacngtctgggaaanncnaaagcactctttaaaaaaaggctctggggtcttcctcctccaggcagcacctaggattgcagcctctccttcctccaggcagtgcctaggattgcaggctctccctcctccaggcagtgctgggagtggcacaggggccaaggtagcggcatgggggaaggagattgggtcttacagcctctcgggtctggattggaatcctgacgccagcactgttatcttgagcacgtggccacccgctgcacctgcattgtcatctgtaaaatggagcaacagcctcctgcctgggacatagcagacactcgacgaagttggcaaatgtcactgctctcatgtccctcccttctccaccctgtgggagattcaagaaggcatggagcaagcagagagtgagcaaggctgactatggcacgccagcaccgagcagg

SEQ ID NO: 1626 - DNA, 499 bp, Homo sapiens
  misc_feature (1)...(499): n = A,T,C or G
nggcggggtnnnngnntttactgagaccctatgcagntactgagaactccttgttttgtgccctagcttatttctgacgcacggtaccagggggagatcaccagtgtgtccacagcatgccagcagctagaagtgttctcgagagtgctccggacctctctagctacaattttagatggaggagaagaaaaccttgaaaaaaatctccctgagtttgccgtaagttctttctttatgaacctcagattagaaggaggctgctttgggtcttggttttcaagcatgagatgctccttccctggagagaatctccatttctgagggcaccttccaggatgctcactcccgggcccgagcacggtggaggcttggctctcgtccgcccgtctgtgctacagtagtaaaccctgccccctctctccctgcaatcttgcagaagatggtgtgccacggngagcacacgtacctgtttgcccaggccatgatgtccgtgctggcc

SEQ ID NO: 1627 - DNA, 453 bp, Homo sapiens
  misc_feature (1)...(453): n = A,T,C or G
caatgagaccattgatgaaggccttagaacccgcggcgccacctgtcattatgcttactaacgttcgggacgtctcccgggctgcttgggcgaggagaggcaggggtgtgtgaccccggtggttactgtgctcgcgtagagcacctagggcctgctgaagccctccctcgcccgcgcctctccttagtccttgagatgagatggcaagttacagcggcttctccggcctgctggagattcgctacgggccaggacaccgcagctgccttccccaattcgctttctttccgcagccgccgctgccccgaccccggatctgcatgtggaagtacctggacgtccattccatgcaccagctggagaagaccaccaatgctgagatgagggagtagggactgaggggggcgtgggaagagctcttggcaaaggctgagggggtgctggctgagctgn

SEQ ID NO: 1628 - DNA, 483 bp, Homo sapiens
  misc_feature (1)...(483): n = A,T,C or G
aggagggtccccccctaagagnaactgaggttcntgcgaagngncgcggaannccagaacaaagacgaaacaaaaagctgcagccgaaccctacctgctgctccatgttgaaatctgcctcctcaagtcgggagcgagaccagaaggaacacccgagactccgacatcagcgtcagctgcaggggctcccggaaggacaagcctgtccctggatgctcataagcagagtggctacagtgcagcaaggaaaccttccagcaaacactgcacttggcacagccgcaggtcacgtccctgcccaccaggacctctctgtgataagggccaacgatgtttccattcctgttcatgaaatcacttggcgatgagagaaatctgtgtgcgttgtaacaacaaatgactgcaacagaaaatcaccagatttccatcataactcaaatgccagccaggcttggtggatgggctcctcgctgaaatctccaa

SEQ ID NO: 1629 - DNA, 428 bp, Homo sapiens
  misc_feature (1)...(428): n = A,T,C or G
atcgcattgacngaccactagtccgngtggtggaattcgcgccaaggttggccgtcaaggtagattccagggtgtggaagtggctttgtggtgccacctctaaccgctcggaggtcaacccccattctacaccgaaaactaggccttggctgctatggaaggacagcggcaagaaagccacgcaaccctaacactcgcccaggctcatttcaacaatggagagtacgcggaggccgaggcactgtactccgcttacattcgccggtgcgcttgcgcggcctctagcgacgagagtcccgggagcactaggactgagcgggcggacgttcgtctttctagaaaggcctaggcgaggcctaagacgagggcggcggagaacgcggggagaagcccacccgtgaggagccagctgccgcgacgcaaatgca

SEQ ID NO: 1630 - DNA, 445 bp, Homo sapiens
  misc_feature (1)...(445): n = A,T,C or G
cttcgtttacctagcaatngacgaggaattccttttccaatttctcattgtgggtccttctccacactaaacaaatgcaagttctcgcattaacttgtctttgttccatgttgacattccttaaattagctgaaaagatctgagagggaggctttttgcctgatttgggggcaggggctgtgggggatggaaatgtagttaaggataagcggactttaatttggcattgcagaagggagtttgtcattattcctattactagtaattatgtataaatttacatatatgtgtgtatatatttatactcaggtgcacacaagtacaaatgtgtgcatgtgtgtgtgtatatataaaacacagacacacacatatatacatacataaatcaggttatatacctttctttatattttatgtaagacagaaatcatctaatataaacatc

SEQ ID NO: 1631 - DNA, 431 bp, Homo sapiens
atccgcattcactgactcactagtccagggtggtggaattcctcgaagccaaatgaagtcgtatttgctgtgccctgttgtgtttagaggaaatgtatccataaatgtctataacagattttgggggtgtctagtggtagatgtgaagacttcaagcgatgtttgtacctgtgatgatagcttcttcccatgtggggattaagggtagggagtggggggaatggtccaaacccggaaggagctaatggagaggatagggccaaagtgggacagggcttggatggtagaggatggggtccaggaggaagaggagtctagcaatccaagcgcaggggtcagtgctccgagtcccagggctcagaaccagcagggcgaccacatgagcgagcccagcgccgccccagtggcggctcccgcaagcatgcccatgg

SEQ ID NO: 1632 - DNA, 429 bp, Homo sapiens
  misc_feature (1)...(429): n = A,T,C or G
cattgacgtacaactaccccagngnggnggaattcggctggaatggggccgcccggctccccatggcagtgggtgacgctgctgctggggctgctgctccctcctgccgcccccttctggctcctcaatgtgctcttccccccgcacaccacgcccaaggctgagctcagtaaccacacacggcccgtcatcctcgtgcccggctgcctggggaatcagctagaagccaagctggacaaaccagatgtggtgaactggatgtgctaccgcaagacagaggacttcttcaccatctggctggatctcaacatgttcctaccccttggggtagactgctggatcgataacaccagggttgtctacaaccggagctctgggctcgtgtccaacgcccctggtgtccagatccgcgtccctggctttggcaag

SEQ ID NO: 1633 - DNA, 466 bp, Homo sapiens
  misc_feature (1)...(466): n = A,T,C or G
gggcggccaatgagnccatgattgagaccctagcccagngcggnggaattctgaacgatgatgatattcagacgaagcattgatgttatggaagatagaaagaaacattcaaaaaatatatatatatgtccaaaaacagacaaatccaagggtgtgaggtaaacgagtgtctgcatttagattccacaaaaccaaaatccatgttgaacaaagttaagtccgtacacagtgactttttgggtgagccgtgtgtgtctgtctgttgtgtgtgtgcctcaagccctgttttcctgtgaagatactttgagtggcagccattctctccacgtgaaccacacgtctggagcacagacaggcctctcaaggtcattgatcttacgcatttactgtttaccgaacaaatgtctgactgtgtactcgggtgtactccgcagcattgtcgactgcagtcccctgtgtttgccaa

SEQ ID NO: 1634 - DNA, 441 bp, Homo sapiens
  misc_feature (1)...(441): n = A,T,C or G
catcgcattggatgntctcctagcccagngnggtggaattccctagatcgagcgggcggttaccttcataaggtgcaacgcttaactcgcactagtaatagtgcatgacgtgattccattttatcgaaccgagggttgggatgattgtaactatgcgtaggtcagatcactctggaggggacattcaacaccagtctatcgtaatgtactgtagcctttgcctttttgagcttggcaacgtgcgcctcaaacttgggacccgggacattgccgcccccgtgatggtgaatctcgtcgtatctgtcgttgtaattggtcctggactagacagcccaggcttgccttccccttggataatgcagcaagggacccccattttacgacatagggcaggcaagaagacagccagctggaagaaggcattagcggaagagtgtattt

SEQ ID NO: 1635 - DNA, 425 bp, Homo sapiens
  misc_feature (1)...(425): n = A,T,C or G
attgactactcctaccccagtgnggnggaattccacagaagcggctgccaggccttcggcgggaggctggccctcttcctgcccggctttgatcgccacatgaccgcgacccccaacaactcggatctggggagtaccgccacggcccgcgggatcctggggtacgcccccctcctctgaaggcggtgaaggcgggagcgcgacggtctccgagcctccctcacccggctccgccatcacctgtgtcgcctcgctttggtcgcggagcctcaggtactggtgtgcgtcctggtcgctcgggacttggtcagaaataatgatgctgtgggtttggagggngagtggcctcttgaccccatccaggccgctcatgttgctaacagtcggaccaaccgcaggcgaacgcccgttttcctcagaggccg

SEQ ID NO: 1636 - DNA, 454 bp, Homo sapiens
  misc_feature (1)...(454): n = A,T,C or G
atgagaccatcgatgataggtgtggaacccacanccaggacacatctgcccacacttccccagcagccaccccaaccactgcaggttgccaccgccatctcctggtcagggctggaaaggctcaggggagagggctgcgagtgagtcgacaggagaagccaagcgaggccactttaccttcacatccttcagcaccagcccctccaatccctcctggatcacccgggttatcatgtcagccaagtccaaagctttctgagggacaagagagatgctgaagttggtgtgagagtggagaaggtggtgagtgagtgggggttgttccttttcacacactagttaagtgtccactggaaacacccttacttgaaatataagggacaaagggttagaaagcaggttgcttctcatcccaaacagagggctgctgtggctttgaaacacaggaggcttn

SEQ ID NO: 1637 - DNA, 424 bp, Homo sapiens
attgaccgtccactatgcagtgcggtggaattccgaacagctgtgatgattaaggatcgctggcggaccatgaaaagacttggcatgaactgaaacaggctttcatttccacagaattcacaggagcatggttcctaataatagcccctgatagtctgctctttctttctttttctttttttttttttttaaaaaaaaattctttttttttcacccagcctgaatgtcaggggcttaatttcgattaattggaacctcctgctccgggcttcacccctttttttgacttaaacctcccaatgatggtaaacaaagggcccccgcattcaccccggtttatggttttttttttaattaaaaccggggtttcaccgttttacccgggagggtctgaacctcctagccttgtagacccacccattgg

SEQ ID NO: 1638 - DNA, 382 bp, Homo sapiens
ctgacttttatggctgaaatgaaaactcccctgggtggcctggaggaagtgttctgaccctctctgaattacccgcactgagatggccgtggcacttctgactccacagaaaagcttgaaggtccaatttccatcttcaggagggaaacatctcctgcttctgccttcagacagcctttctctgtgcttctttgtgagccatttctgagaaccgcctgcattctgttgctagtggtgaattgattgagaagatcctttgttgatagtccagcttcaaaagcatgcaggctgctgtttgtcttctttcttccttccaacggaggatatgctcctacagaggagtggggaaaaacaaaaatgccctttttatttacttataact

SEQ ID NO: 1639 - DNA, 428 bp, Homo sapiens
  misc_feature (1)...(428): n = A,T,C or G
atcgaaatgacgnacgactagtcagtgtggtggaattcctcccaagggcacagaaggggccagttgtagcggacctctggtagagaaggagagaattggaccaagcctgctctgtggattgagaatgggtcagctaggaggtggggcctgagaaggggcgaggcctctccagaggtggggccagcgcaacccagaggtggagcttcattcaatctgcccattccctgctgtgcgggcctgtggctgagtgacctgcatcattgttgtctgcacaagctcgtactctctttctgcgcagatcattcttgttctgtcgtttgcccgtctctcatgcttctcttgccttgtccttttccttctcatgtacggttttactcgtcgtcttcttgttctccttttcctgctcgtttctcacttatcatttctcg

SEQ ID NO: 1640 - DNA, 498 bp, Homo sapiens
  misc_feature (1)...(498): n = A,T,C or G
cgcgagacgcccattgaaacccttaactgatgaccctacgccagngacgaggaattccgcgtgaccatcatgcctaaagacatccagcttgcccgccgcattcgtggggagagggcgtgaattgttttgagtacaaaccttaaatccaaaggctcttctcagagccaaccactttgtccgtgaaaagggctgtaatcctttgagacgcattagaccactaaactgcactgatccaaatagacatttgaaatagtggcattcagttccctcgatgcttcatttaaatttccaaatttaagcgctccctcaggttttcgcctagggctgggcctccctacgctgttctccattggtttaggtggctttgttttgctgttcaggccctctgctgctttcttgtacattgttctcgttatctaaactcctggccacttaattgtaccctgcttaacccatcctcttgttttctggctcaacgctctttcatgtggtggcctg

SEQ ID NO: 1641 - DNA, 478 bp, Homo sapiens
  misc_feature (1)...(478): n = A,T,C or G
gagcggccccactgataccctaattgatgtgcngtaattcgaatgaactagatgctacggtacattgctacgcttagacgcaccaggaaagctctggacgaggaagatgtaggttgttgccagcacctatgcacggacagacagaaagtcctctgcttccttcaggcccttgcttccacttccccggggcttccagctgagcctgcatttttctttgacttccccctcttgcctggcgttttcagcaaacacacacagaggattacggggagaaaactatcatattaccaagtggacatggctcctaaggtgccaactgaacacaggctgtagtgcagtggcatgattttggctcgccgcggcctccgcctcctgggttcgggcgatcctcctgcctcggcctcccgagcggctgggattacagtcctttgtggcatcatgaacagatcctgtaactttctggccacttcccaatatt

SEQ ID NO: 1642 - DNA, 381 bp, Homo sapiens
tcgccgccgccggccgtgacgaacgggagccagccgggcgcgccacacaacttcacgcacacgcgtccgtcgggggcgtcgggctcggcgctgacgcgctccttctacgtgatcctgggcttatgcggcctgaccgcgctttatttcctgatccgggcgtttaggttgaagaagcctcagcggaggcgatacggcctcctcgccaacactgaggaccccacggagatggcctcgctggacagcgacgaggagacggtctttgagtcccggaatctgagatgatgctgagccagggaggcggcccttccagcagccatgagggaaggacaggagatggggcccaccccagtgcccagcaaccccctgctccaccgctcattc

SEQ ID NO: 1643 - DNA, 425 bp, Homo sapiens
  misc_feature (1)...(425): n = A,T,C or G
nattgacgaccctnatgcagngcggtggaattcgnccctcccggctctcggggtggcagctgccaccgtgaatcacttgaaggaaattggaagagctgacatgaacgggattcgcttgggtgtcccacatcacctgtctgtggccagcagaagctcaccaggtgactttcgaagtggttggcaaatgggccatgtgctcagtctgtccacagagctcatgctcgtggatgaagctgggagcatcagaggatctggggtctgtggctgtgcaactctgtagtcagtggatcttccccgaatttaaatgaagcctgcttccaggaaggtgttatgagctgtgctaccacgtgacgtggggacagcttcctcccgggagtctgctatggcgggaacccactcgcaccagctcagcccaccaggtcttt

SEQ ID NO: 1644 - DNA, 452 bp, Homo sapiens
  misc_feature (1)...(452): n = A,T,C or G
attggagccatgatgaccctacgcagnngcgnggaattcctggcttccatatctgggagatagacaaacaggtaccactctgtggcccaggctggcgtgcagtggcgccatctcggctcactgcaacctccgcatcctgcgctcaagcgattctcgtgcctcagcctcctgagtagctgggattacaggcgcccacccccatgcccagctaattttttgttatttttagtagagtcttggtttctccatgttggccaggctgttctcaaacttctgacctcaggtgatccacccgcctcagcctcccaaagtgttgggattacaggcgtgagccaacgcgcccgtccccgatccacctttactcttaaggtatgaactaaattaatctaatcatctatgccttcgcttgctttttctattgaactatctcttcctgagaaggtggcttcaan

SEQ ID NO: 1645 - DNA, 489 bp, Homo sapiens
  misc_feature (1)...(489): n = A,T,C or G
ngtggtnnnnnnnaatcgagaccctagtcagtgtggtggaattcgctcaagtgcgtggtggtcggcgacggggcggtgggcaagacgtgcctactcatgagctatgccaacgacgccttcccggaggagtacgtgcccaccgtcttcgaccactacgcagtcagcgtcaccgtggggggcaagcagtacctcctaggactctatgacacggccggacaggaagactatgaccgtctgaggcctttatcttacccaatgaccgatgtcttccttatatgcttctcggtggtaaatccagcctcatttcaaaatgtgaaagaggagtgggtaccggaacttaaggaatacgcaccaaatgtaccctttttattaataggaactcagattgatctccgagatgaccccaaaactttagcaagactgaatgatatgaaagaaaaacctatatgtgtggaacaaggacagaaactagcaaaagagataggagca

SEQ ID NO: 1646 - DNA, 427 bp, Homo sapiens
  misc_feature (1)...(427): n = A,T,C or G
atcgattcatgacactcagcccgncnggnggaattccatttacccacattgatatgaatgaaaatctatccgcgtcaccaggggcagattactaatctctggccgtgcgttttgtgctcaggactcctggcggcgggcagtcagcactggggtccaggctggcattcccatgccctgttttaccactgccctctccttctatgacgggtacagacatgagatgcttccagccagcctcatccaggctcagcgggattacttcggggctcacacctatgaactcttggccaaaccagggcagtttatccacaccaactggacaggccatggtggcaccgtgtcatcctcgtcatacaatgcctgatcatgctgctcctgtcaccctccacgattccacagaccaggacattccatgtgcctcatggcg

SEQ ID NO: 1647 - DNA, 563 bp, Homo sapiens
  misc_feature (1)...(563): n = A,T,C or G
cactcggcgcctgcgctactacgacgccctccgtgacaactgtacgtacttaactaaaaccgctctatccaccgaagccacnacgcggcccccccnaattgagaccctttcgagnacatcggacangcggcaggaancancgaccgaaccggcgaggctgagggggcggngagccgagaacgcaccttcgccctccagcccgggcaacaagagcgaagcgtggctcacaaacaaaaacaaacaaaaacaaaacaaaacaaaaatctgatttcattaactgttcaggtgattcggttccgtaatggctacctactgttctattatatggatatgcaattatttaacttttttaatttctattttgttatgagtgctgaatacatttttctgcactagtgggtcattttacttatactgtttattttacatatactgttttttcactagaagtgaaaaaacagcctatgcggatgtatgaatttttcaacatggatagacatccagattaccttcaggaaatcttatagcactgtatgcttccaaactagagttttctttatggt

SEQ ID NO: 1648 - DNA, 426 bp, Homo sapiens
  misc_feature (1)...(426): n = A,T,C or G
cttgaattcttcacgnccgcgnggnggaattcccattagttgctatcctgccttcttctctcagctgagctgtctgaaacatgctaacatgcttatacaatacttgctgtcctgccttctgctctcagctgagctctctgaaacatgctaacatgcttatacaatacttgctgtcctgccttctcctctcagctgagctctctggaacatgctttttatacaatacttgctgtcctgccttcttctctcagctgagctctctggaacattctttttatacaatacttgccatctgcatgtcccatgttgccactccttggttcccacaggccctccgtcattgagttcacattttcagtctcgtggtctctgtgctccctgtgcctccatagcagattctgggatagcagattctgggggcaacan

SEQ ID NO: 1649 - DNA, 429 bp, Homo sapiens
  misc_feature (1)...(429): n = A,T,C or G
atcgcattgatgacttctagtcagngtggtggaattcattacagacatgagccactgcacccagcctggttatttttcttaagatgtaaaaccgataatacacacacagtgtggattcaaaaaataccaaacaataaaaatggcgcccaagcctttcccacttctatctcctgtccctgcagccaggagccgcctctttaagctcctcctggaggtgggctgccgtcctctgcccctcgtccccacggaagaggtcattctgtagcccagcttttattttcgcctaatgtatctctgaggttttaaaacattcttttctagctatctattgaacatttactttatgccagatccagtacatgccattgttatcctctgtttacaggtggggaagctgaggcaggaagccctttagtcacttgccgaagg

SEQ ID NO: 1650 - DNA, 490 bp, Homo sapiens
  misc_feature (1)...(490): n = A,T,C or G
aggcgagtgcnccacccttgatncccctnattgatgaccactatgcagtgtcgtggaattcctcatcctgggggaggccttcgcctctgatgagccttttgattttggcactcagagcaccaccgagaagatccacaacctgattcccgtcatgctgaggcaccgtctcgtccccccacccgaggaaacctactccctgcacaggaagatggggggctccttcctcatctgctccaagctgaaggcccgcttcccctgcaaggccatgttcgaggaggcctacagcaactactgcaagaggcaggcccagcagtagggctgcgggccacgcccaggccggctccgcgggaactctctccctcagacaggccaaaaaccagtagcgaggtcgtggtgatgctctttttaactcctttgcccaataaggggggtggctgcctggagccccgtagccagcgctttccacggtttctgttgctaaatgggtgan

SEQ ID NO: 1651 - DNA, 427 bp, Homo sapiens
  misc_feature (1)...(427): n = A,T,C or G
attgangccnttttgacgacccctagtcagtgtggtggaattcggagcggctgcctgccaaggacatacagaccaatgtctacatcaagcacccagtgtccctggagcaatacctgatggagggcagctacaacaaagtgttcctggccaagggtaacatccccgccgagagctacaccttcttcattgacatcctgctcgacactatcagggatgagatcgctgggtgcatcgagaaggcctacgagaaaatccttttcactgaggccacccggatcctcttcttcaacacacccaaaaagatgacagactacgccaagaaggtggctggggtacagggcaaggggccgtgggaccaaggggtgaagtcactaacaacagtgtggggtggcttagagggacactggaacaagactgcccaggttta

SEQ ID NO: 1652 - DNA, 493 bp, Homo sapiens
  misc_feature (1)...(493): n = A,T,C or G
ggagtntccnnnaaacgaagaactgatgtcactgtggtggaattctggagagacccccatctctagggggagaaaaaaaagccaggtatggtagtgcacacctatattcccatctactcacaatgctgaggtgggaggatcgcttgaacctgggatgtagaggctgcagtcaaccatggtcatgctcactgtactacaacctgggtgacaagagggagaccctgtcttgaaaaaaagaaaccatcatcacagcaacatctagactagtgtttgactaaaaactggataccatggcctatccaaattgacacacaaaatagaccatcacagtcccaaggcctaaaatacttactatctgagcctttacaaaacaggattgccagccactgaagagaacaaatggtcccaccccctgctgagctcacagtctggctctcctgtgtgcagacacttcttggagctggcttctctccactccccctccagatgctgn

SEQ ID NO: 1653 - DNA, 488 bp, Homo sapiens
  misc_feature (1)...(488): n = A,T,C or G
agagccngnnnaaggagaatctgagtacctagtcagtgtggtggaattctttaaggttctgcatggggttctacctgctgctgtcacctggtctctgcagctctgttccaaagctgcagcctccaggaagccaccctgacttccccccacctaccttcccccttggaggggacaggttctactcagaagtcacacagccctcggatgggtcttctcgtttccaccgccatctgggacctacccgtccatggtttataacccctgtgttctagcagcaaagctttgtagactctgggtttatgggtgtaggggtgagagctgctggcccaggagaggacctcagggaatggatgtgaatgactgaatgagtaggtccacgctgtaccccgtggtccctatctcagagggtgcagggtttcctaggagcagagttggggagaggaacgagagatggccagacagacccagccagagacaggaagggagag

SEQ ID NO: 1654 - DNA, 485 bp, Homo sapiens
  misc_feature (1)...(485): n = A,T,C or G
gagggcannnntttgcagtttctagtcactgtggtggaattccatgcttctcaaactttattgtgtaatggaatcacctggggatcttattaaaaattcagtttatcattcagtaggtctagggggtggtctgaatagcctggagtgtgtttctaacaaactcccaagtaaggcctttcatgtttgtccacagactgctgtttctcactttgttagcataactctacttaatatttgcatgtttgatatttttataaatggaatagaatgtctgtataatttttatagagtttggagggatttgggggtgtggggtgacagtatcatgaaaaaatgcaatatacttgtccaaaatggggaaaaatagttttactctaaagtttttttttttttttattacatgctatggacaaaggcgtatttcctctgcttattaaagcacttgaaatatattctttaaaaatatgaggatatttataggcttt

SEQ ID NO: 1655 - DNA, 456 bp, Homo sapiens
  misc_feature (1)...(456): n = A,T,C or G
nggcgaggggngnnnnnnaatcgagacccctngcattgagcngcatttcgcgagaggctctgtgctgtgtcccttctgagggtccctttgcagtcccagtatattgtgcgtgcaccagccccagctggagcaaccaaaactgcttctggtttaggcacacgtcacgggtgcgggagacccgggcacgggagacccgggccgccttcaggccgctcccccgagattctggggcagtcggaagatgtgggccctgggtgggagcagcccacttcagcagcactgccactgcctttggccacctgaggtgacccccaggcctccccggccttgtacagtgtacctctgtgtatctgtacagcctcgctcctgccaccccacccttgcgttctgcattaggtacttccctgaaaaccacgtgtaagaagtgatgcttttgccagtggatgatctggaatg

SEQ ID NO: 1656 - DNA, 489 bp, Homo sapiens
  misc_feature (1)...(489): n = A,T,C or G
agaggccnnnnnattgannccttgagaacactatcagagtggtggaattcggattgtaaatgcaccaatcagcatgctgtgtctagctcaagaactcaagctccatgaggagatgtttcattgtcgagagcagtcatgatggcctgcactccacacaatgcaacagagtgaaagagcaggttctgcttctttggtgtagtcctgaagcttcctaagaaacttcacatcaggtgatggataggagcaaccctgtaaaaccagccttagactatttttcaaacagatggtgattgctcacaccaaagccttggacccctcccagcctgtgacctttgtgaccaactccacctacgcagcagacaagggggctctgtatgtggatgtgatccgtgtgaacagctactactcttggtatcgcaactacgggcacctggagttgattcagctgcagctggccgcccagtttgagaattggtgtaagacatcaca

SEQ ID NO: 1657 - DNA, 488 bp, Homo sapiens
  misc_feature (1)...(488): n = A,T,C or G
gagcggtanccnnnnaattgaganccnactcgatgagtcatangccagngncgnggaannccatcggcctcctcctgccatgaggatcaagataggcagcaatggccaagggcacagtctggcgggccatagccctgtgccacccaccgcgggtgtgcagcggtgcagaagcagatgcgtctgtctcagcgagttctccccaggagtcgttcatgcccaccaaggggcacatgctggtggtgcgcctgccactgaagcacctgcacgcctttgccgacagcctgaagccagagcagaatggggctgaaaccagctcttaccactcagaagtgcctagtgctctctcccagcagagccaaccctcactaatgggaaccccgggctcatctgtgagcagggccaccttactgtgcaagcggctggtgaccctcccctcctctgcagaccgctgtcccgaggtcctggaggtgtggctgagctacctgcag

SEQ ID NO: 1658 - DNA, 458 bp, Homo sapiens
  misc_feature (1)...(458): n = A,T,C or G
nctcgagtttcactagcccagngcggnggaattccccacctcggagcccctcatgagtcctttcaggcctggcccagtgctgccctctgacctccatgccctcgtttgctggttccactgcctccctgcacttgttttgcctgcagggtggagcaagcgcctgctgcacctgcccacctctccatttcccaacaggagtcgggttggctgccgatatccggctctgacagagcagcacctgtggcttcaggggtttgagttctgactgggagagtccccagccccccttcttgagtgtccaccctggtgagggtgggggtgaggccccagcggccacggggcccccgttcctggaggttcatggtggacagtgcatgtcggtttccatgaagccatcttcaacaagagcacatggaaggttgttttgaagacgttcagactctacaagaagctgctga

SEQ ID NO: 1659 - DNA, 475 bp, Homo sapiens
  misc_feature (1)...(475): n = A,T,C or G
ggggtncnnaaactgagacctattgaagngcgctggaaacgaacatcggctcctcctacaactacggcagcgaggaccaggcagagttcctgtgtgtggtgtccaaggagctccacagcaccccaaacgggctgagctcagagtccagccgcaaaaccaagctgttacaagccagaggcacccggatgtgaggccccagatcacctccagggacttggggttcccatctgaaatcctttatttttgtaccatggggtgggccccgggcctgagaaggaagaagcaccctctccccggcctcctctgtctgcacccgtggggctgtgacttactcctgcctccaggggccgggcggggcccccctgggacctcttaaggcccaaggtgggccccaggacctctgggcagagtggactgctcatggcatatgtgtggcaatgtctggctgtgtctctccggcacctgcgtcccctct

SEQ ID NO: 1660 - DNA, 483 bp, Homo sapiens
  misc_feature (1)...(483): n = A,T,C or G
gtgganttccnnnaaatggagaccccatcganagtcatacgcagngncgnggaanncatttgaacatctactgaggttcacattcatactaagttttcaacattgtgttctttttgcattcattttttacttttattaaaggttcaaaaccaagtgttgtatttatgtttgctttttaaaaaacagttggggtggtgttctctgtgtaggatgttagaatttgtaatggagaaatattttgcagttcttcaaattttactgaattttgacacaacctcttgggaagtatttgaatcatccttcaatatacacaggacattggttccaggataccccacgtatgcgaaaatctgcatactcaagtctggcacttggccctacggaacctgcgtacactaaaagtcagcccttcgtatacgtgggtttcacttcagcaaataaaccatgtttggttggaaaagctccatgtatataagtggaccg

SEQ ID NO: 1661 - DNA, 483 bp, Homo sapiens
  misc_feature (1)...(483): n = A,T,C or G
gtggggngccnnnaattgagncccaactgagagtcatgtccangngcnggaattcggcttctcgggaaatggatgtcacaaaggtgtgtggagaaatgcgctatcagctgaataaaaccaacatggagaaggatgaggcagaaaaggagcacagagagttcagagcaaaaactaacagggatcttgaaattaaagatcaggaaatagagaaattgagaatagaactggatgaaagcaaacaacacttggaacaggagcagcagaaggcagccctggccagagaggagtgcctgagactaacagaactgctgggcgaatctgagcaccaactgcacctcaccagacaggaaaaagatagcattcagcagagctttagcaaggaagcaaaggcccaagcccttcaggcccagcaaagagagcaggagctgacacagaagatacagcaaatggaagcccagcatgacaaaactgaaaatgaacagt

SEQ ID NO: 1662 - DNA, 478 bp, Homo sapiens
  misc_feature (1)...(478): n = A,T,C or G
nggtagaatcccctgtccagggcgggaantttgatagacggtatggcccgggagtgccccaccacgtggctttcaccccctgcaaagccattcttcgcccagcgacacagtgtctttcccacagctgtccaaagaggaagatggtccaggctgggagcatccccttagcagcagcctgtgattccttgggcaagcaggagggaaccattaacagcctgaggagctggctggctgggagcctctgagaccgcccagccttgctcccagctcacccacaagatgtggacagctcttgtgctcatttggattttctccttgtccttatctgaaagccatgcggcatccaacgatccacgcaactttgtccctaacaaaatgtggaagggattagtcaagaggaatgcatctgtggaaacaggtgataataaaacgtctgaggatgtaaccatggcagcagcttctcctggcaaattgaccg

SEQ ID NO: 1663 - DNA, 476 bp, Homo sapiens
  misc_feature (1)...(476): n = A,T,C or G
ggggattccnnnaactgagacctatagaagngcgtggaaancggcgggtcggtagtagcgatggcgggtctgactgacttgcagcggctacaggcccgagtggaagagctggagcgctgggtgtacgggccgggcggggcgcgcggctcacggaaggtggctgacggcctggtcaaggtgcaggtggctttggggaacatttccagcaagagggagagggtgaagattctctacaaaaagattgaagatctgatcaagtacctggatcctgagtacatcgaccgcattgccatacctgatgcctctaagctgcaattcatcctagcagaggagcagattatcctttcccagggtgcactcctggagcaggtgaatgcctttgggcccatgctggacagtgctcacatcaaagccgttcctgagcatgctgcccgcctgcaacgcttgtgccacatncacattcagcaggaggacca

SEQ ID NO: 1664 - DNA, 449 bp, Homo sapiens
  misc_feature (1)...(449): n = A,T,C or G
gggggggnggggggaatgaanccctngatgagtgcatggccangngcgggaattccaggcaccaagtatgaagaggatggggccagcggggcctgtctggctatggcgtgagcaccgctatgggagaccctggcttggaaagtgaacttgcagccttggatggggaagggccagatgctgggtgggtgcctgtcaccttgaggtgaccatctagggtcagtacctgctgggcttatgacagcgcctgaggctgggaatacctgtctctgctctagcagaggctaaagcaggctaaagcagtggaggggtggagttgatgaaaggagaggagtagatgagatggaatttttccagcctcatcctggcctgccctctagactccagtccccaagccctcagcctagtgggtgtcatggatggatctgggggtgtcagacaggctaccctgt

SEQ ID NO: 1665 - DNA, 449 bp, Homo sapiens
  misc_feature (1)...(449): n = A,T,C or G
nggggggggngnnnnaatgaacctttgatggaagggcgatttccacgaggagcctctgctcacagcagatcaggtaattgaggagattgaggaaatgatgcagaactccccagaccctgaggaagaagaggaggttctggaagaagaggatggaggagaaacttcctcccaggcagactcggtcctcctgcaggagatgcaggcattgacacagaccttcaacaacaactggtcctatgaagggctgaggcacatgtctgggtctgagctgaccgagctgctggaccaggtggagggtgccatccgtgacttctcggaggagctggtgcagcagctggcccgccgggacgagctggagtttgagaaggaagtgaagaactcctttatcacggtgcttattgaggttcagaacaagcagaaggagcagcgagaactgatgaaaaagaggc

SEQ ID NO: 1666 - DNA, 497 bp, Homo sapiens
  misc_feature (1)...(497): n = A,T,C or G
agccgattgaaccctagcagatagagtacatatccagtgccangctgcccagagtggacccgaacttctgttttcatttgatcctccagtcttggcctcccaaatgttgtgattacaggcatgagctactgcacctggccttggagtgattcttgccagcttacaaaagtttgtgtcccacattaaatgacgtacagatgacagaaccatggcggacttatctaagggatccaaagattcatacatacacaaactaggatggaactagaagataagaccaagcaacccaccttcagttatgttccttatgagggtctggagagcattctgtttaccaaggttccaaggaatgccctggttggggggccatcagcatcactgagaagcttggtagtggctatcctaggttgcaggggctggttattatataacatcaccccagaccattcacattacagccacaggtgcagcagtgggcatgtggccatggggaccat

SEQ ID NO: 1667 - DNA, 477 bp, Homo sapiens
  misc_feature (1)...(477): n = A,T,C or G
attgagnccccttctgagaccctantccatgtggtggaattcgtcgctgtttggctcccgatctgaaggcgccagcttcggggccccgcggatggcgaagggggatgccgcaaagctccgtgctctcttgtggacgccaccacctacccccaggggtagccactcgccccgccccagggaggcaccactgcgagccattcacccagctggtccctccaagacagagccggggccagcggcagactcccagaagttatctatgggtgggttacactcttcacgccccctgaagcggggactttcccattccctcacccacctgaatgtccccagcactggtcatccagccaccagtgccccccacacaaatgggcctcaggatctcaggccttccacgtcaggggtgaccttccggagccccctggtgacttccagggctcgctcagttagcatttcagtgccatctaccccacgacg

SEQ ID NO: 1668 - DNA, 476 bp, Homo sapiens
aatcgaagacccctattccagtgtcgcggaattcgggacctgcctgtggggctggaagagctgagacagctagagctgcaggtattgacagcacattcctggagagagaaggcctccaagacctttctcaagaagaattcttgctacacactgcttgaggtgaggtctgagaccctgacccacagcctcttcttcatctggcctggctgctgtgagatggcgcatataatgagaacatagatttttttagtgggcacctgggtaggaaggagagggtgtagttggtgagggaagcctggtcatttcctgtatgtctgcctgcctgcctcaggtgctttgcccgtgtgcagacgctggctcagacagcaccaagcgtagccggtggatggagaaggcgctggggttgtaccagtgtgacacagagctgctggggctgtctgcacaggacctcagagacccaggctctgtgattgtgg

SEQ ID NO: 1669 - DNA, 452 bp, Homo sapiens
  misc_feature (1)...(452): n = A,T,C or G
aggcgggnnngnnnnacatgaaaccctggcatggagcngcaattcctcggggaaggagagtcgatgctgttcccgctgcacggcccaccggcggccagccccagagaccagaactgatccagagctggagaaagaagccgaaggctcttagggagcagccagagggccaagtgaccaagaggatggggcctgagctggggaaggggtggcatcgaggaccttcttgcattctcctgtgggaagcccagtgcctttgctcctctgtcctgcctctactcccacccccactacctctgggaaccacagctccacaagggggagaggcagctgggccagaccgaggtcacagccactccaagtcctgccctgccaccctcggcctctgtcctggaagccccacccctttcctcctgtacataatgtcactggcttgttgggatttttaatttatc

SEQ ID NO: 1670 - DNA, 477 bp, Homo sapiens
atcgagaccctatcgtagaccatagtccatgtggtggaattcggcaccttccagaacgtgtctgtgcagctgcccatcactctcaacaaattcttccagccgacagaaatggcttctcaggatttctttcaacgttggaagcagttgagcaatccacagcaggaagtgcagaacatcttcaaagcaaagcacccaatggacacagaagtcaccaaagccaagatcattggatttggttctgcacttcttgaagaagttgatcctaatcctgcgaatttcgtgggagctggaatcatccacacgaaaaccacccagattggatgcctgctgcgcttggagccgaacctgcaagcccaggtcaggccctcaggaaatggtggaacacacttgagttgctttttattctggcacaatgtacgtggtgagatgtgtagctctttagtgcagttcagtcagttttgacagatgttgtttaac

SEQ ID NO: 1671 - DNA, 443 bp, Homo sapiens
aagaacctgcaacagatgtgcacctggaacttttggctttggccccagtggatgcaaaccttgtgagtgccatctgcaaggatctgtcaatgccttctgcaatcccgtcactggccagtgccactgtttccagggagtgtatgctcggcagtgtgatcggtgcttacctgggcactggggctttccaagttgccagccctgccagtgcaatggccacgccgatgactgcgacccagtgactggggagtgcttgaactgccaggactacaccatgggtcataactgtgaaaggtgcttggctggttactatggcgaccccatcattgggtcaggagatcactgccgcccttgcccttgcccagatggtcccgacagtggacgccagtttgccaggagctgctaccaagatcctgttactttacagcttgcctgtgtttgtgatc

SEQ ID NO: 1672 - DNA, 456 bp, Homo sapiens
  misc_feature (1)...(456): n = A,T,C or G
cctttgagtttcatancccattgngcaggaactcgacagacagccgcatcttcttttgcgtcgccagccgagccacatcgctgagacaccatggttaatgtgaaggtcggagtcaacggatttggtcgtattgggcgcctggtcaccagggctgcttttaactctggtaaagtggatattgttgccatcaatgaccccttcattgacctcaactacatggtttacatgttccaatatgattccacccatggcaaattccatggcaccgtcaaggctgagaacgggaagcttgtcatcaatggaaatcccatcaccatcttccaggagcgagatccctccaaaatcaagtggggcgatgctggcgctgagtacgtcgtggagtccactggcgtcttcaccaccatggagaaggctggggctcatttgcaggggggagccaaaagggtcatcatctct

SEQ ID NO: 1673 - DNA, 471 bp, Homo sapiens
ttcgagaccccttttgagggcgggaattaaaggacactggtgccacccttcactggggaaaggtgcaaggggcgggggatataccatgccgagccttcgctctgtgctctgtgcaggtgcttgacccaggccagctctggaatcgccccaggccatgtgagagccgtggggggtgaggggggcgggaagcacttcacaggtgaggcctccctgggaggggcagccagtgagggggtggaagggcagagccaggaggaccatggcttggggctcagtctcccaggcgaaccatagcttggggcttaagtcccccaagcagccctttcacccccaggcctccaggatctttgccaacggtcttgaggagccaggcacaggattggactctgcccgggcaggaggatgaagacagtgacttccccaccaaaactcccggcagagggccaaaggcagggaagtgtggtggcagga

SEQ ID NO: 1674 - DNA, 476 bp, Homo sapiens
  misc_feature (1)...(476): n = A,T,C or G
gtggagnccccatcgagttccatagtcagtgtggtggaattcgcggcaggcttctcgagctccgggcccgcggcaacctcgggcgctgttctgcaggccgcgaccggcatgtacgagcaactcaagggcgagtggaaccgtaaaagccccaatcttagcaagtgcggggaagagctgggtcgactcaagctagttcttctggagctcaacttcttgccaaccacagggaccaagctgaccaaacagcagctaattctggcccgtgacatactggagatcggggcccaatggagcatcctacgcaaggacatcccctccttcgagcgctacatggcccagctcaaatgctactactttgattacaaggagcagctccccgagtcagcctatatgcaccagctcttgggcctcaacctcctcttcctgctgtcccagaaccgggtggctgagttccacacggagttggagcggctgcn

SEQ ID NO: 1675 - DNA, 477 bp, Homo sapiens
  misc_feature (1)...(477): n = A,T,C or G
tgcgataaggggggnnggaattgagacccatgatagcgctgcggaannccgncaagggggccactggctacccctactgcgcggcggcccaggagctcggactgctggtcctggagagctgcccccagaagaagctggagtgcatagggcggaccctgcggatcatctgtgtctgtgcggaagactactgccccaccccagaggccacaccccaggccgggcccccgcccatcgctgcagctgccattggtgccgatgacctgctgcccatcctgtccttcgtggtgctgaggagcggcctccctcagctggtgtcggagtgcgcggccctggaggagttcatccacgaggggtacctgatcggagaggagggctactgcctcacatcactgcagagtgccctgagctacgtggagctgctgccccggggaggcctggccaagtagtacagctagagcccagggtccctgcagggcg

SEQ ID NO: 1676 - DNA, 423 bp, Homo sapiens
gcggactgcgctctgctccgagtcctgcccctgctaggtttgacccaggctgaggtcctgggcgggaagggcgtgacacggcctgacaccctccccagcagtctcccagttcccgcgccctccccggttccaccctccttcgctcattcatccctgtcccagcctcaaggggcttcgtctctcctggggaaggggctgttcagagctgggatttcagaccccttcggctgggagttcctcccgcggcctccaagggcggccagggcacgtcctgaggccgccctcccatcccagcggacatctacgacaaagtgtcgggcgacatgcagaagcaaggctgcgactgtgagtgtctgggcggcgggcgcatctcccaccagagtcaggacaagaagattcacgtgtacggctattccatggcct

SEQ ID NO: 1677 - DNA, 432 bp, Homo sapiens
taattttaagggagctaaggaagcgcggcgcgccccctggtggtggtaaaccgccaacgcacctgggggctgcaaccccaccggacgggtggtccggagggaggctggagcggggaggcgaggagggggctgtgagtcctcagaggccctgggccaccacatttctggcagcgtttcccagacacccctctgctaggccatccctggatagcaagtgaattaacttaagggcactgtgatgggaagccttgcccccctctttttttttttttttttaaaaatctggggaataaccccaggggttaatttttgaatgaaaaaagggtttttgtggaaaaaacagggggccccattttttgttttggcattttaaaatccaggctaaggctttgccccttttccaggagggggtacccccgagtccccctcccc

SEQ ID NO: 1678 - DNA, 468 bp, Homo sapiens
  misc_feature (1)...(468): n = A,T,C or G
atttgaacnacctgngtagtaacctaggcaagngcggnggaantccagcagagaggagccaccgccgccgcggntgatgtggttgggccggttttgaggaggcctccaagatgccgcagggcaagtcccggaagatggggatcctgggctaccggtctgtggggaaatcctcattgacgattcaatttgttgaaggccaatttgtggactcctacgatccaaccatagaaaacacttttacaaagttgatcacagtaaatggacaagaatatcatcttcaacttgtagacacagccgggcaagatgaatattctatctttcctcagacatactccatagatattaatggctatattcttgtgtattctgttacatcaatcaaaagttttgaagtgattaaagttatccatggcaaattgttggatatggtggggaaagtacaaatacctattatgttggttgggaatg

SEQ ID NO: 1679 - DNA, 486 bp, Homo sapiens
  misc_feature (1)...(486): n = A,T,C or G
aggggggnaatcgannatcgtagaccatagtcagtgtggtggaattccgggtgtatgcgcttcacctgaggcgctacaatgacgcgctgctcatccatgacaccgtccgcgccgtggatgccttggctgcgctgcaggatttctatcacagggagcacgtcactaaaacccagatcctgtgtgccgagcgccggctgctggccctgttcgatgaccgcaagaatgagctggcccacttggcaactcatggcccagagaatccaaaactggagatgctggaaaagatcctgcaaaggcagttcagtagctctaacagccctcggggtatcatcttcacccgcacccgccaaagcgcacactccctcctgctctggctccagcagcagcagggcctgcagactgtggacatccgggcccagctactgattggggctgggaacagcagccagagcacccacatgacccagagggaccagcaagaagtgn

SEQ ID NO: 1680 - DNA, 483 bp, Homo sapiens
  misc_feature (1)...(483): n = A,T,C or G
aggtggganatcgagaacgtagtccctgtggtggaattcctgtgtgtggttgtctccttcctctgtctcctgctcatccacaatgaacctgctgatgttggactccgcaacctggaccccatgccctctgagggcaagaagggctccttgaaggaggagagcaccctgcaggagctgctgctgtccccttacctgtgggtgctctccactggttaccttgtggtgtttggagtaaagacctgctgtactgactggggccagttcttccttatccaggagaaaggacagtcagcccttgtaggtagctcctacatgagtgccctggaagttgggggccttgtaggcagcatcgcagctggctacctgtcagaccgggccatggcaaaggcgggactgtccaactacgggaaccctcgccatggcctgttgctgttcatgatggctggcatgacagtgtccatgtacctcttccgggtaacagtn

SEQ ID NO: 1681 - DNA, 498 bp, Homo sapiens
  misc_feature (1)...(498): n = A,T,C or G
gggcggttnnngnnntactgaaaccctatgcagntatctgaggactcctgagggcccagctgcagaggaggctggataagaagctgagtgagctcagcaaccagaggaccagccggaggaaggagagggggacgtgaccggccgcatccttgcacgccccgcggagctctctccatggtagcccagggcgctggcagaccatgctccgcctccaccagggccacagaggagcggaggggcctatgggggaggagcggagggccctgttggggaaggttgggtttttggaccccagggataagcttttccgatgtcacaatgtggaggaaagcacctgggggacaacagtgctcgtgcaggtggggcttgggaaatgcacgtnccttccccttactccccgccaaaacccacatcccagcctctggatcctggggaaggttccagtccctggagaatacccacggcctcaaacttgaagtcactcctccaatgtctggg

SEQ ID NO: 1682 - DNA, 482 bp, Homo sapiens
cggggggaaatcgagaacgtagtccctgtggtggaattcggcacacgtgggttcacagtgtgttcaggagtgtgtgtatctggaggagtgtgtgtgtgagtgtgtacctgggcctgtgttagtctgcagatgctagtgtgagtgtgtcctgacatggctccagggcgtgtctgccgtgtttactgtgtgtctatgactgtgatgggtgtagctgatcccaggaggtggcggctgcgccatggggtcaaccattacagtcctagggcaggggcggcccaaggctgcatgttctccaggaggccaggccggggttgcccaggcacctccttccccgcctctgggggctgctcctgctgtggaggcagctgggaagtcagggaaggccactagcagaggctgagtgggcttctggctcctagaacaaatgtcccttcaagcaggtctgtctgccagaagccagagccagtcatgcgagggaacca

SEQ ID NO: 1683 - DNA, 466 bp, Homo sapiens
  misc_feature (1)...(466): n = A,T,C or G
tggccggggnnagggggnncattgagnacccctngncttgatggccattgccgncggcgccgagagctgccagagagttggattctgcgtgcagctgccggactcggccccatgtttttgctctcagaaagagttggtgatgaagtttgggcagaaatcccctgtcggccgtccgctccacgcttccctcggggccgacactgccaacctctccgggcactgaggacacctctgcgccctggagcggtgggaggacgcggagcgccgttctctggcttccgacaccctgcccgccctctctagtgggtctgtggctgcgccctctcgaaggaagtaataaatctttctgaccttgggggtcagaggagacgcttcagttttccggaggggtgtgcgggcgggaccgtctttccgctttactggacctctggccggggctgctcttgtttcattgtgccccacatgc

SEQ ID NO: 1684 - DNA, 488 bp, Homo sapiens
  misc_feature (1)...(488): n = A,T,C or G
tggtatacgggggnnnnngaattgagacccatgatgaccatcaggaagngcggcggaannccctgcgcttctaacctcattctgtccctcttgcttatccatcccagtttctcctctgtcactgcctgcccactccccttctggtccatttctcctaagccctgagtggcccagagacgtctttcacaacagacggcaacacacagttgggcgcacacatgctcgggtgcagacgtgtgcacgtgcacacacagacagacatgcatactctcaggctgaggctccccttggaacatagcaccagagccctgctcaccagtcccagggtcttccctcctggggctagaagctgttcccttctagggatccttgccttaaccccccaccgccccatctaaggcctcctctgctcatagccatttctcactcccacccgtgtctctgcttccctctccatctctcctggcctctctgtctctgtctctgtg

SEQ ID NO: 1685 - DNA, 439 bp, Homo sapiens
gcacccgtagccgtgacgatggtgacacacgccggtgtcccttcctggagatgaactcagtgacttcccacaagaagccactggctacggctctcatcgttcttgttctttggatgaagatgctgagtcactgtccatgtggctgtgattggtccccagaggctccccagccgcaggccagggaccagccatggtgcctctgctcgagagtaaagtgtacagtttttgcatccaccatagatgcaccgagatgcctcacgctgggtgggggtggcggccgactgctccatggcggataccatttcatttgctgagctttatctgctgtgccttgtttctccccggccctaggcggaaggtgctctaccagcgtgcacccatgaatatccatcgtcatgtgatcctctctgagagcaaggaagccgtcgctgtcttgccg

SEQ ID NO: 1686 - DNA, 486 bp, Homo sapiens
  misc_feature (1)...(486): n = A,T,C or G
gaggcccgnaatcggcccatcgagaccatagtcagtgtggtggaattcgctgcgaagtccaaggtcaaggagtcagcaaacttggtgtctggtgagggctaactttcggattcatagagctctgttttctccctgtgtgctcacatggcagaaggggcaggcagctctccggggtccctcttataagggcactaatcccactcatgcaggctccaccctcatgacctaatcacctcccaaaggccctgctgcctgaaaccatcacatttagggttaggatttcagcctatgaattttgagggggaaaccagcattcagtccaggtccataacaatggtcaaatcccatctaaaattattataacacaaagaataaggggcagagtaatgtccctacaaacaggaaactactccaggaaggcacgcccagaacatagaaactggaccctaataatgcatcaatctgagaggaaggccaggtaggtca

SEQ ID NO: 1687 - DNA, 432 bp, Homo sapiens
  misc_feature (1)...(432): n = A,T,C or G
nattgaatactctgacaccagncnggnggaatncgaggaggggccctggggaggcagcacagactggtttgtagagtgacccctccgtggcttcctggtgacccttccagaataaatcccaagcatgcatcctcctacgtgcctcagcctggggctgccactccctgcctcccaccgtccactctaagagcctggctcccctggaagggtgctgcccttccctgggcctcagcgtgccctgtaaagtgggggtcccggtgcccactgcacacggcagggaggatggaaggagacccggtgtgctgagcactggcacttgcagctggcacctggacatctacggaatgtgcttccgtggttgtcattgctgttacagatccatccacgtgtggctgactcagagctgtgacattaagggaaaataaaggaaat

SEQ ID NO: 1688 - DNA, 483 bp, Homo sapiens
  misc_feature (1)...(483): n = A,T,C or G
cggggggnnatcgannatcgaganccctagtcagtgtggtggaattcctgagtgagacttgcctgctcctctggcccctggtcctgtcctcttctccagcatggtgtgtctgaagctccctggaggctccagcttggcagcgttgacagtgacactgatggtgctgagctcccgactggctttcgctggggacacccgaccacgtttcttggagctgcgtaagtctgagtgtcatttcttcaatgggacggagcgggtgcggtacctggacagatacttccataaccaggaggagttcctgcgcttcgacagcgacgtgggggagtaccgggcggtgacggagctggggcggcctgtcgccgagtcctggaacagccagaaggacctcctggagcagaagcggggccgggtggacaattactgcagacacaactacggggttggtgagagcttcacagtgcagcggcgagtccatcctcaggt

SEQ ID NO: 1689 - DNA, 484 bp, Homo sapiens
  misc_feature (1)...(484): n = A,T,C or G
agggtnnnnaatcgagaacctagtcagtgtggtggaattcctagagttctccgagggcttggcccagggcaagaagcagcgcctaagcaagaagctgcggaggaagttacagatgtggctgtggtcgcagacattctgccccgtgctgtacgcgtggaacgacctgggcagccgcttttggccgcgctacgtgaaggtgggcagctgcttcagtaagcgctcgtgctccgtgcccgagggcatggtgtgcaagccgtccaagtccgtgcacctcacggtgctgcggtggcgctgtcagcggcgcgggggccagcgctgcggctggattcccatccagtaccccatcatttccgagtgcaagtgctcgtgctagaactcgggggccccctgcccgcacccggacacttgatcgatccccaccgacgccccctgcaccggctccaaccagttccaccaccctctagcgagggttttcaatgaactt

SEQ ID NO: 1690 - DNA, 472 bp, Homo sapiens
  misc_feature (1)...(472): n = A,T,C or G
aggggtcnngaattgagacccatgagagcatgcggaanncngcgctcgccgaggagtgggtccggaagcggcgccggagcgggtccggaagcgggctgtggagaagtccagtcgccccaaaattcttagggtgagcgaaccgagtttctggcggggtgggtggtcccgcggcccaccaagggaacgtctccgcagcctcgcctcggcgacagctcctggctccttaggtgtcttccgcctcactagttaggatgcgcggtcttcagacttgagacaaatctaaccataaatttgcgcggccgttattttttaagcaaaaatgtgagctatttttacccagacatcatagttacgagagtgacgaagactctggcaggaaaccaaatatcacctgttttcctcaaaaagcagcagaagagtgacaagtgaaaaaagttcctagcgggagacgtgcttggaaccggagataatc

SEQ ID NO: 1691 - DNA, 383 bp, Homo sapiens
gcctcatgcagtctgcctgaacctcttcaggttggcagtcccttccttcaggaagcccttctggaccctcaaaccccctcttgcctccgaccccttcctgcccctcagtcttcctggcccctgtggcccctgctgtccttcctgtttccctcattggttttgtcttctcccctggaacagaatctccatgagggcaggggctgccttccctgcttcaggccccacacccaggacgctgcctggcacagcccaggtgctcggggtatgtgtccatagatgaacactttaatcaccttcacgtgtttgtgataacgtttgtcctggaaagatgacacttgagccactgggagtggggacgtttgtcactgtagccctcggtgctt

SEQ ID NO: 1692 - DNA, 483 bp, Homo sapiens
  misc_feature (1)...(483): n = A,T,C or G
gggctcnnattcggaccctantnagtgtggtggaattcacaacctaagtcttttgacgaagtcaatctatgatgcgtcaccaccacacacacagttgcccaaagagcggagatggcaagaactttcatctctcacaattgcagatgtacaaaaattacatctcttcatttattgaggaagttttgacgtttttatacacacgcacaatgcttacacacacagtcaacctgggatgccggcagggtggctcaggacgaaagcctcaggacccaggagggccatgggtgtaagttccagagtccaaaggccagcgagcctgaagctctgatgtcaaggcagtggaagaaaagcctgtcccagctctgagagagagaccagnttgccttctttatttgttctccctgggcctcagcagattgaatgctgcccaccaacattgaaggtggatcttccacacctaggcccctcagattcacacactan

SEQ ID NO: 1693 - DNA, 483 bp, Homo sapiens
  misc_feature (1)...(483): n = A,T,C or G
ggggtnnnaatggtaatttagaacctagccagngngctggaattcctgagttcctgcacagccagaactcgctgtcaccacgcagctctctgtcggatgaggccccagtcctgcccaacaccaccccggacctcctcctggccaccacagccaagccatcagtacccagtgctgacagtgagacacccctgacccaggacaggccaggcagtcccagtggctctgaggacaagggcaacccggcgccggagctgagggcctcctttctgccacgtaccttgtctctgcggaactccatcagcaggatcatgtcggaggcgggcagtgggaccctggaggacgagtggcaggccatctcggagattgcctctacttgcaacaccattctggagtcgctgtcccgagagggacagcccatcccagagagtggagaccctaagggaactccaaaatctgatgctgagccagagcctgggaacctcg

SEQ ID NO: 1694 - DNA, 482 bp, Homo sapiens
  misc_feature (1)...(482): n = A,T,C or G
cgggtnnnaatcgagaccctagtcagtgtggtggaattcctcagctccatccctgctggacggtgcaactctgtgcttcggttttcatctgtaaaatgggtaggataatagtgcctttttgagttagaaccattataaatattagctattatacatttccatttcagacagaagttgtcaacaccatgtgtggctacaaaactatcgacaaggagcgtttcagtgtgcaggatgtcatctacgtgcggggctgcaccaacgccgtgatcatctggttcatggacaactacaccatcatggcgggcatcctcctgggcatcctgcttccccagttcctgggggtgctgctgacgctgctgtacatcacccgggtggaggacatcatcatggagcactctgtcactgatgggctcctggggcccggngccaagcccagcgtggaggcggcaggcacgggatgctgcttgtgctaccccaaatag

SEQ ID NO: 1695 - DNA, 492 bp, Homo sapiens
  misc_feature (1)...(492): n = A,T,C or G
ggcggggnnnnggtatgaatccctnnnannnnntactgagtctntagtgnagtgtcgtggaattcctgctcgggctgcgtgagctgaccccgctctctgtgcacctacttttgctgcgtttggtgctgagcctgaagtcccaggacaggcggctgagggggaaagatggtgtgaattgggtgggcagagacaactgaaagccacaggacccggttggcacctttttggctgcctgcgcctttgcctgcagccccgctccctgggtcacccgaaggaggagctggcgctctttccgggcgcagaagcacccgacccacgctggaggaaacggtccctctgggcaggagaagctttgggcctggctggagcacactcacggaaccacgccaacgcctggcctgtagccagctcccacctcccctcccaccttctaaaatgcttgcggatctcacgtggccgaccctaaccagatacacatggggaaaggaatcn

SEQ ID NO: 1696 - DNA, 430 bp, Homo sapiens
  misc_feature (1)...(430): n = A,T,C or G
atcgaattcatgacccactagtccgngtggtggaattcggagtgccaggatcatggcctgagggggccaagaaggttcgtctggtgccaaaggagggagctggggaactgctagagggcatctccgagggcatggcaggactagagggctttgggcaggagctccgggagctagaggtggcattgagcaatgggggaactggctcagagtcccccttagaacctccactgccccttgaggaggaggaggcctacgagagcttcacctgtccccctgagccccctggccccttcctcagcagccctttgcggactctcaaccagctgccaagccagcccttcactggccccttcatggctgtgctctttgccaaactcgagaacatgctgcagaactccgtctatgtcaacttcctgctgacggggctggt

SEQ ID NO: 1697 - DNA, 428 bp, Homo sapiens
  misc_feature (1)...(428): n = A,T,C or G
cattgaatacttttacnccgngnggnggaattcgggcgccagagcagggaccggacgcgagttggagatgttggactcgctgttggccttgggcggcctggtgctgcttcgggattccgtggagtgggaggggcgcagtctcttgaaggcgcttgtcaagaaatctgcactgtgtggggagcaagtgcatatcctgggctgtgaagtgagcgaggaagagtttcgtgaaggttttgactctgatatcaacaatcggctggtttaccatgacttcttcagagaccctctcaactggtcaaaaactgaggaggcctttcctggggggccgctgggagccttgagagccatgtgcaagaggacagatcctgttcctgtcaccattgctctcgattcactcagctggctgctacttcgccttccctgcacca

SEQ ID NO: 1698 - DNA, 483 bp, Homo sapiens
  misc_feature (1)...(483): n = A,T,C or G
nggggnatcgagatccctagnccattttggaggactntgacctatgttagccactcttctcatgatgagcacgcttgtactctattgtaaccacacagggcaggcgcatccagcatgtcagtgtcctgccccgggcagctttcactaccgggcacgctccctctggcctggtggatcaccaaaagggcggntctcattttgttattagtggaagagccttgagcttaaaagctcttcattatctttgccggaaagtatatggtttgtgtttttgcagttttatttttttaaggatggacactaaatctctggtgtccatgttccgagcccggtggctgggatggtggctcgatgtgactcctctttatgccgccctctgcctgtttggggccctcccttctttcccccaggcagtgggtatcgggttctttcccaaagtgcttacttggaaagagtgtggctgctggactctattcgaaatgc

SEQ ID NO: 1699 - DNA, 468 bp, Homo sapiens
attggtccctatccgtttggggacctttaccttccttaccacctctcctcatgaccagaaggattggcactcacttcggtgccctgggggaatccacccttgactgaggccagcagcacctgggtctggacaagggctggtaccagacagtctgttccaaaaagcagatccctggtgggagaccagacgtggtgagagaacagacagctgctgttgcgcagacgaggactctggcatcacaggcactgaggtcaaattcctgttttgtcatttgcagtggcaaacctcagaaagggccccgttcctcctctgaaactctctcttctgaacagtgggctgaataatatctactgcactgggcaatatctactgtacctgttctaggcaagggaaacccctggcccatgactcgggcttagcaaaatctagttcttttcctttcccagtcacacacacttgcgcacacac

SEQ ID NO: 1700 - DNA, 476 bp, Homo sapiens
  misc_feature (1)...(476): n = A,T,C or G
aggcggtcnccccaccgtatccgtcgacatggcagaaccccacgcatncgggcgccttctaccagctgctgctggccgcgcttatgctggtggctttgctgtatctgctctacctgtcgctgctgtccggactgcgcgggcaagaggagcaagaccaatattttgagttctttcccccgtccccacggtccgtggaccaggtcaaggcgcagctccgcaccgcgctggcctctggaggcgtcctggacgctagcggcgattaccgcgtctacaggggcctgctgaagaccaccatggaccccaacgatgtgatcctggtcacgcacgccagcgtggacaacctgctgcacctgtctggtctgctggagcgctgggagggcccgctgtccgtgtcggtgttcgcggccaccaaggaggaggcgcagctggccacggagctggcctacgcgctgagcagccactgccccgacatgcgg

SEQ ID NO: 1701 - DNA, 430 bp, Homo sapiens
  misc_feature (1)...(430): n = A,T,C or G
catcgcattcatgactcctagtccgngtggtggaattcctagattcagccaccagatcccagaaacatgacccttgctgcctacaaagagaagatgaaggagctcccgctggtgtccttgttctgctcctgcttcctggccgatcccctgaataagtcgtcctacaaatatgaagcagacacggtggacctgaattggtgcgtcatttccgacatggaagtcatcgagctgaacaaatgcacctcgggccaatcctttgaagtcatcctgaagccaccctcctttgatggggttcccgagttcaacgcctccctgccaaggcggcgagacccatccctggaagagatccagaagaaactagaagcggctgaggagcgaaggaagtaccaggaagcggagctcctgaaacacctagcagagaaacgggaat

SEQ ID NO: 1702 - DNA, 430 bp, Homo sapiens
  misc_feature (1)...(430): n = A,T,C or G
caatgagtagcctcacgaccagncnggnggaatncctatggngaaaagcgcagggggggcaagaagaggaaaacccaccagggtcctgtgctgtatgtgggctgcatctgggtgacagagctgaggaagaacagcccagcagggaagagtgggaaggtccgactgcgggatgagatcctctcactgaatgggcagctgatggttggagttgatgtcagtggggccagttacctggctgagcagtgctggaatggcggctttatctacctgatcatgctgcgtcgctttaagcacaaagcccactccacttataatggcaacagtagcaacagctctgaaccaggagaaacacctaccttggagctgggtgaccgaactgcgaaaaaggggaaacgaaccacaaagtttggggtcatctccaggcctcctg

SEQ ID NO: 1703 - DNA, 484 bp, Homo sapiens
  misc_feature (1)...(484): n = A,T,C or G
gggggggtttgaaactgagaacatagcccangtgcgtggaattccgcagcggtcgcacaagactagaggggccgctcttacactgtgatcattactagactgcgttattaagcaaggaagcgattgccgaatgaccctacgagcgatccttcattgaccctgtgagggggcactatctcatggacttatctacatggccacgacatgaggaaactactgcgagagaagaagacattcattgctggggccagggaaagggggttagtagaaagcacaatgaggctgggctgatacggtggctcacacctgtaatcccagcactttgggaggcaaaggatggtggatcacaaggtcaggagatcgagaccatcctggctaacatggtgaaaccccgtctctactaaaaatgcaaaaaattggcccggcttggtggcgggtgcctgtggtcccggctactcaagaggctgaggcgggagaatggcgt

SEQ ID NO: 1704 - DNA, 480 bp, Homo sapiens
  misc_feature (1)...(480): n = A,T,C or G
gggggggnttttggaatcgagaacatagtcagtgtggtggaattccaattaagcaggctcttttcaattgactgatgctggggccttcagttttattctcagtatagattgccagtattgctaagagtatccaaaggcctttctagatggagacagaataactgacttgaacatacagtgtgcctgtaagtgtccaggctcagagctggtgaaaacccttctgttgggcgtgtgcagggttaaactcctgaagtaacttgtgaggacttcagtgcttgctggtgtcctgggcagcaccatgaatgcctttaccaagacatgccaagttggatcccccgaatgaagcagatgtggctgtggtgtgacccttgctccctgctacacagagcatcgcaaggctggcctgtgtggtttccagatgagggtctgggtcccggaagcttgtgttgagagctcagtggacccaccccgcttgctgan

SEQ ID NO: 1705 - DNA, 483 bp, Homo sapiens
  misc_feature (1)...(483): n = A,T,C or G
ggggnannaattcggaacctagtcactgtggtggaattcgttttgatgagatggaaaaattcctagaaaattataacttaccaaaactgaaagaagaaagataaatgaccccacatttgttaaataaattggatctgtcatgaaaatatttcacacagtggaacctctagtcacaaatgcttcaccagtgaattctactaaacatttaaggaataaatagcacccatctcacacaaactcttctagagccgaggcataatgggaacagcaactccacctgtcatgtttcacctccaggaaaacgtgatacccaaactcaacagagaaaaaataaacttacagaccagtctcactcatgaacataaacagaaatcctcaacaagatattaacatataagacctggcaattggccaggcgtggtggctcacgcctgtaatcccagcactttgggaggccgaggtgggtggatcacgaggtcaggn

SEQ ID NO: 1706 - DNA, 487 bp, Homo sapiens
  misc_feature (1)...(487): n = A,T,C or G
tggaggcccnncccctagggcctggcgncatcgcgaagngccgcggaanttccaacttgctctcccaaaacccccagacgcagagcacctccccagtccgactgacgcgaccgagacacgcagagcacctccccaggccgacggacgcgaccgagacacgcagagcacctccccagtccgacggacgcgaccgagacacgcagagcacctccccagtccgacggacgcgaccgagacgcagagcacgcccccagtccaacagatgtgactaagacaggacgcacaagagattcctttcagagcaaaggtctacagaaacgccagctcctgtcccaggtactcgggaaaactgctgccaaccattctcttctccttanaggaggaggaggagggaggacagaggaggatgagggaggacacaggaggaggatgagggaggacacaggaggaggacgagggaggacacaggaggaggacgagggagggn

SEQ ID NO: 1707 - DNA, 491 bp, Homo sapiens
  misc_feature (1)...(491): n = A,T,C or G
gccagccccccnnntttcggtatncctttccangngcgggaatnttgagtggcggtgttgcacactagtagagaatagagtctatgcctttggcaaatttaactgggagtttggattcccacttaagggttttacttcttgggtcctgtggatggtggttcttcgtgtcaggatcccagcccgattctgcaaatgcctccatggggtttaaaaacatgaggctttccaagttcttgcccagtatctggggcagcctccagagtatcacctgggagttcaggttctctccagggctccaggtgtgtgtttatctcgccccctccagctctcctcatcctgctccccattgctccatgtcaggctgttccccattgtgccctgctgatgctttgggtccagggcctcctcccaagtgtggctttaaggagtaagcttgaggatgatgttttttaattattgtaaatcattacctcatttccagcctgccaggc

SEQ ID NO: 1708 - DNA, 430 bp, Homo sapiens
  misc_feature (1)...(430): n = A,T,C or G
atcgcattcatgacattcagaccangnggnggaattctgctggaaaagaatgcaaagtgtacggggcttgagttcctgttgcgtaaaacctttccggctttcagcaacttctcgagagggtaacacctttaaggagagactttgctccctgtcgatgccgtggctggacaaatgccgctctcaactgctacagaccaaagtctacgctttaaagatagagaagccattctgtcaaagtgaaaacagaagcggtaggtaggaagccgcccccctttctttcaagcacagagacccagagagacgcccaggagctcccgaaaaaaacgttgctgattagagctgccgggtcagaaacagctgtgagacactaaagtccccactgttataattattcaatatgttcccactgactgaggaaaacaagcatgtg

SEQ ID NO: 1709 - DNA, 487 bp, Homo sapiens
  misc_feature (1)...(487): n = A,T,C or G
ngggaggccggnngcattgagagctganagcctagcgaagngccgnggaattcatggctgttgtcccggggcctccaccgttacgtggacccttaggaaggcatctggggactgcgtgttgggctgagtgagcatctctggcttgggggaggctgctcattaagtgcctgcctgcccgcccacccctcggcgccatgctcccgcgtgggcagcgggccctgcgcctcactgcacccctccctgcagagaggagccggtgcgcaagttcacgggcaaggcggtccccgccgacgtcctggaggcgctatgcaaggagcgggcgcgcttcgaacaggcgggcgagccgcggcagccacaggcgcgggccctccttgcgctgcagtgggggctcctgagtgcagccccacacgactgagccacccagaccctcacagggctggggcctgcgtccctcctcgtgacctcggccagctggacccacatgagg

SEQ ID NO: 1710 - DNA, 454 bp, Homo sapiens
  misc_feature (1)...(454): n = A,T,C or G
natcgagacctgaggcacngtcgnggaantcccacaatgtatacaataaaactattcagctgggcacagtggctcacacctataatcccagcagtttgggaggcccaggctggtggatcacttgaggtcaggagtttgataccagcctgcctaacatagtgaaactccatctctaccaaaaatacaaaaattggtacagaataattatacatgtttataggagtacagatgatattttgatatatgcctacgatgtgtaatgatcaaatcaggatgtttaggatatccatcatctcagacattttatcatttctttgtggtgggaacatttcaaattctgtcttcttagctcctttgaaatgtacaatatactgctggtagctgtagtcaccctactgtgctgtttcttttctgagattccacctaaccccttgatgttccaactgctgtggtt

SEQ ID NO: 1711 - DNA, 480 bp, Homo sapiens
  misc_feature (1)...(480): n = A,T,C or G
ngagacggcccnccaatgataactgatgacgtgcgaggaacncgctgatacttgagcatttagtttcccagatgcctttagtgatcgcaagttgcaaggagcagaaatctgctcacattggtccaaataaagggattgagatctcatggaaatatgacatcgctggacttaatgagaactggagttgggaacggggtactatcacgaactgaggcagctagctggcccttttctgtgggcctgcatagcctcctgggtccacctctcctgcacatctgctcttttttcttgctagaccaccattcaaggttctcacccttcataacttcagtttacacatgggtttgaccagctgtgatactgactctagctgagcctctagacatttatagagacatcggtgtctcagtttttttaggtccagtttaaagaggccatctgattggattggctgaccttgtgtgtggtgtccacccctag

SEQ ID NO: 1712 - DNA, 485 bp, Homo sapiens
  misc_feature (1)...(485): n = A,T,C or G
ngggaggcccccnccaatgatnccagcnagcttagcgaagngccgcggaattcccagcagccgtttgatgattccttagaacacgagaaactcacagtggatgaatggaagcgtaagagctggggcctcgggcttcctcgcctccgcctgcagcctctcttccttgcttcctccatctttgtgcctggcctctgccagccctacctgccacctccttcttggtgggcattgtctcctgggtgcttctttctccttgagctgacttcgctctccatgctgtctctgaaggggggtggactttctcgccacagcacctctttacgcaccttaaaccatgctgcctttctcagagcacatctacaaggagattgtgaacttcagccccattgcccggaaggactcacggcgccggagtggcatgaagctgtagggactcatcttgcatggcaccgccggccagacactgcccaaggaccagtatttgt

SEQ ID NO: 1713 - DNA, 487 bp, Homo sapiens
  misc_feature (1)...(487): n = A,T,C or G
agagccggtcncnnncccctggggactgactgctgtgncgaggaacncncgangccagcgtgccaggagccatgtctgaccaggacgtttggaagatcatatccatgccagaggctcttgtgaggagatgagttggtaaagagagaggctgggatgaagatgctgccaggagtgggcgtgtttgggactggcagctccgcccgagttctggtcccactgctgagggcagaagggttcactgttgaggccctgtgggggaagactgaggaggaggcgaagcagcttgctgaggagatgaacatcgccttctacaccagccggactgatgacatcttgctgcatcaagatgtggatctggtgtgcatcagcatcccccctccactcacccggcagatatccgtgaaggctctaggtattgggaagaatgtggtttgcgagaaggcagcaacatcggtggatgccttccggatggtgacagcctcgcgct

SEQ ID NO: 1714 - DNA, 426 bp, Homo sapiens
  misc_feature (1)...(426): n = A,T,C or G
attgactactatacnccgngnggnggaattcggatgacccggggcagctggcaggagagagccttggcctgacctggcacagaaagggcagcttcagtctctgcagtgtccattatctgctgttccttcgagggttccaggctgtgtgtggggcccaagcatgccccacccacccctcctgggcccaggcagcacctggagcccacagagtctgtgtgtagccaggaagccccgctcaggtagccaccgccggggcactggctgctctgtcttggtcctgttaaccctccacctcctctcttggactccctccccaccccaaccactctttctttctcctttaacccaatggagactttctgatgcatcattttctttgctgtgccaaagcaggtcaaaagagggagaggaggggctgggggtgag

SEQ ID NO: 1715 - DNA, 482 bp, Homo sapiens
  misc_feature (1)...(482): n = A,T,C or G
ggggnnnnttttggaatcgagatccctagtcagtgtggtggaattcaaaagaagtcaccttcagggttccattttcatcccagccatttgagaacagtgcatcctcagctgacggtagggaaagtgtccagcggaataggggctgcagctgaagtcctggtcaatctgtacatgaatgatcacagacctaaggcccaggccacctctccagacctggaatctatgcgaaagtcatttccccttaacctgggaggcagcgacacgtgttacttctgtaagaaacgtgtgtacgtgatggaacggctgagcgccgagggccacttcttccaccgggagtgtttccgctgcagcatctgtgccaccaccttgcgcctggccgcctacacctttgactgcgatgaaggcaaattttactgcaagcctcacttcattcactgtaaaaccaatagcaaacaacggaagagacgggcagagttgaagca

SEQ ID NO: 1716 - DNA, 482 bp, Homo sapiens
  misc_feature (1)...(482): n = A,T,C or G
nttggaancccttnccangngcngnnnnttttgagtccctantcagtgtggtggaattcgtgggtatgcgaaggaggcggcgtcacccgtgtggaaagaggatttgaccagtaccgcgccctcctccaggaacagttccgccgcgaaggcttcctctatggccaccaggctgaggactcgcccaggacatggactggtctctcagacccctgggccaccatgtaggccaccactccaggccgtggacttcccccaacttggggacagccttattcccaaatgtctctatccttttgactggagcatcttctgcacaaccttgggagcccatccaagggttggtgaggactggtctcccgggggtgggggtctggggggtaccctctggggttatagattcccccactgccccagctctgactggaccccaagtggctgctatgtaaattaaatctctccccgcgtctcctttgcctcatgtc

SEQ ID NO: 1717 - DNA, 479 bp, Homo sapiens
  misc_feature (1)...(479): n = A,T,C or G
agagaggcccncccaatgagactgacgtcctngcagaanccccganctgnggtccactctatagcaacatgactctagcaatgtgactttcggttccaaatctgtatcagtcagctactgctgtgtaacaaaggaccgcaaatgtagcaaccagaaacaacacatgcttattatctcatagattctgtgggtcaagagcctgggtgcaggttggctgggtcctctacttgggatctcaggaggctgcaatcaaagcattcgccaggcagaggtctcatctgaaggcctgatcggggaaggatttgcttcttagaagctcatgtggttgttgcagcattcagttccttgctgttgcaagactgaaggcctcagttcctcgctggctgttggctggaagctgccctttgttctgtaccatgtgggtctctccacagcggggctcggagcatggcagctaagttagtgagggaaggtgagat

SEQ ID NO: 1718 - DNA, 485 bp, Homo sapiens
  misc_feature (1)...(485): n = A,T,C or G
catcgaaatgcgatccctaggccangnggtggaattcctttcctcttacatagacacaggatggaaatataattaaaaagctgtgcctaaataaatgtaaaatagctctttcaactagtataaaataaaaaatcctcaatgatacaagtaacatgtcctagtttaattaacagggtatttttttcttaatgttacgtaaaataatggtatgtcttctaaatgatgacatcttagatacaatgaaatacatacatctcatattatgttatacttaatcctctcgatttgatttcctgctaagacatattgtcttcttttcgttatgttgctcagatgttttctttattgtttatgaccactactatcctctaaatccaggccctcatgactaaattgcagctgaacctacctaattgagttttatacttctagacttttcttctttgcatanataccactaataattcctgactaattttcctatt

SEQ ID NO: 1719 - DNA, 487 bp, Homo sapiens
  misc_feature (1)...(487): n = A,T,C or G
ngggaggccggntcactgagngatgncgacctagcgaagngncgnggaatttgctgcgtgcgcccacccgaccaagacaggcagtgagctgatggagatcctggatgggatggaccagagccaccgcaaggagatgcagctgtacaacagcatcttcagcctgctcagcttcgagaagattggctacacagaggtccagttccggccgtaccgcacagacgacttcatcacgcgcctgtactatgagacgcccaggttcacagtgctgaaccagacgtgggtcctgaaggctcgagtcaacgactcggagcgtaaccccaacctgtcctgcaagcgtacgctctccttccagctcctcctcaagagcaaggtcacggcaccgctggagtgctccttcctgctgctcaagggcccctacgacgacgtgaggatcagccccgtcatctaccactttgtcttcaccaacgagagcaacgagacggactac

SEQ ID NO: 1720 - DNA, 457 bp, Homo sapiens
  misc_feature (1)...(457): n = A,T,C or G
nattgagnccnctagacctctcgccanngcgnggaattcctggctcctcatttttcctcctgttgcaccccagctctttgtctcctccctgtacgattaggagagatgcaaatttggaatctgggaggtcgcccagacaatggagacatcctctcctctagcaggtcagcgactgagaggggcctgacttctgctgggacagctggagaggagtctcatgggctgggatgctgttgtggctttgactttggccagtgcttctgacagaggcggagcctggcaagtgtaccatcccacaggcagcaggcacacagcccatgggctggatccttccacactttcctgacagaccagaaccagagcatctcgaggcaactgttagaaatccagggacgagacaaacagagaagcgctggtgaagccaacatagagactgtcaatgtgtacactggagttc

SEQ ID NO: 1721 - DNA, 451 bp, Homo sapiens
  misc_feature (1)...(451): n = A,T,C or G
gggtttggggnnaattgaaaccntattgacgacccctagtccgtgtggtggaattccaaagttaagagactcatcagattctgagctgctgcgggatattttgcagaagactgtgaagcatcctgtgtgtgtgtgaagcacccgccgtcagtcaagaaagcccggtgctttctctcagaactcatcaaaaagacgtgctgtattgcccagaagccatcgtgtcgctggtcgggatcctgcggaggctggctgcctgccgggagcaccagcaggctcctgaggtctacgtggcctttaccgtccacaacccagagacgtgccagctgttcaccaccgagctaggccgggctgggatcatatgggaagcggaagctcatcatgaccagaaactgtttccctacggagagcacttggagatggcaatgctgaacctcacactgtaggactcaca

SEQ ID NO: 1722 - DNA, 491 bp, Homo sapiens
  misc_feature (1)...(491): n = A,T,C or G
atggggagnnnnttcganaccctgattactgtggtggaattcacttttcagaaaaagaatctgcatcctggaaaccagaagaaaaatatgagacggggaatcatcgtgtgatgtgtgtgctgcctttggctgagtgtgtggagtcctgctcaggtgttaggtacagtgtgtttgatcgtggtggcttgaggggaacccgctgttcagagctgtgactgcggctgcactcagagaagctgcccttggctgctcgtagcgccgggccttctctcctcgtcatcatccagagcagccagtgtccgggaggcagaaggtaccggggcagctactggaggactgtgcgggcctgcctgggctgccccctccgccgtggggccctgttgctgctgtccatctatttctactactccctcccaaatgcggtcggcccgcccttcacttggatgcttgccctcctgggcctctcgcaggcactgaacatcctcctgggc

SEQ ID NO: 1723 - DNA, 444 bp, Homo sapiens
caagctttcctgaggaaaatcgaccccaaggacgaggctctggccaagctgggtatcaacggtgcccactcgtccccgccgatgctgtcccccagcccaggaaagggccccccgccagctgtggctcctcgacccaaggccccgctacagcttgggccctctagctccatcaaggaaaagcaggggccccttctggacctgtttggccagaagctgcctattgcccacacacccccacctccaccagcgccaccactgcctctgcccgaggacccagggaccctttcagcagagcgtcgttgcttgacacagcccgtggaggaccagggggtctccacccagctactcgcgccctctggcagcgtgtgcttctcctacaccggcacgccctggaagttgttcctacgcaaggaggtgttctacccacgggagaacttcagccat

SEQ ID NO: 1724 - DNA, 419 bp, Homo sapiens
agagcacttccttccgcggctgctaaaactggtgcgcgggttcccaacttcgcagaagcagcttcatcggccccccgctagagacctcagaccgcagccatcgacgcctcgcctcggggatctgtccccaccctcggggccagctcaccatgagtcaggccctgtgctaggtgctgggatgaagcagtgactgacacaggcctggacctgtccttgtgaagagtgcgtctgtgacacagatactgtgccatgtggcaaaacttgaatggagacatcagctctttgtgggtctcaagtctactggctttcaatcagctcttctgcttgacagctgcaggtcttgggactgcccagcccccataaccctgtgagtgcattcctgataataaccctctttctcttgtcctcccccaccccac

SEQ ID NO: 1725 - DNA, 445 bp, Homo sapiens
  misc_feature (1)...(445): n = A,T,C or G
gggcaaggggggttttgagaccatacaggcgtcgtcggaannncncccnggggagcagacctcgaaactaacatgatgtgctttggtgtcagtagctgctttctgatctactcaacaaggaaagcacccgggtcctccctggctcctagagccagaccaccttcctccaggtgtgggagccttgccttatcaccccaatcaggtctgcatgccagggtgcctcctctagttaaagtcagtcacctccccagaagggccacactccaggaggagtgttgagagtcatttgaggtagtcttgccacctgttttccttgatgggcctggaagttgttgacaaggggaaagatctttcttgccaataaaaagaagggatatcgttgggtgccatggctcacacctgtaatcttaacactgtgggaggccaaggcaaggggatcacttga

SEQ ID NO: 1726 - DNA, 488 bp, Homo sapiens
  misc_feature (1)...(488): n = A,T,C or G
atgggacnnaattgaacccttacacngtggtggaattcggcgccccccgcggactagaggtccagcgcccgccgcgagcagcggacagtcctcctgttgtgtccgaccgagagtcctggtgactttgaacatgctggtgccgctagccaagctgtcctgcctggcatatcagtgctttcatgccttaaaaattaagaaaaattatctacctctatgtgctataagatggtcttcaacttctactgtgcctcgaattactacccattatactatttatccccgggataaggacaagagatgggaaggagtgaacatggaaaggtttgcagaagaagcagatgttgtaatagttggtgcaggccctgcagggctctctgcagctgttcgtctaaaacagttggctgtggcacatgaaaaggacatccgtgtgtgtctagtggagaaagctgcccaaataggagctcatactctctcaggggcttgccttg

SEQ ID NO: 1727 - DNA, 434 bp, Homo sapiens
attgacgacccatggacagctgtgtggaattcctccctggggagcaaacctcgaaactaacatgatgtgctttggtgtcagtagctgctttctgagctactcaacaaggaaagcaccctggtcctccctggctcctagatccagaccaccttcctccaggtgtgggagccttgccttatcaccccaatcaggtctgcatgccagggtgcctcctctagttaaagtcagtcacctccccagaagggccacactccaggaggagtgttgagagtcatttgaggtagtcttgccacctgttttccttgatgggcctggaagttgttgacaaggggaaagatctttcttgccaataaaaagaagggatatcgttgggtgccatggctcacacctgtaatcttaacactgtgggaggccaaggcaaggggatcacttga

SEQ ID NO: 1728 - DNA, 495 bp, Homo sapiens
  misc_feature (1)...(495): n = A,T,C or G
gtggtnnnnnnnatcgaaaccttgatcacagtggcggaagtgcgggcccnccgagagctacaggcccatagctgactacatcgatgcgcaggttgaaaattatctgcatgaggagctgaagatccgccgctcgctcttcgactaccatgacacaaggatccacgtttgcctctacttcatcacgcccacagggcactccctgaagtctctagatctagcgaccatgaagaaactagacagcaaggtgaacattattcccatcatcgccaaggctgacaccatctccaagagcgagctccacaagttcaagatcaagatcatgggcgagttggtcagcaacggggtccagatctaccagttccccacggatgatgaggctgttgcacagattaacgcagtcatgaatgcacatctgccctttgccgtggtgggcagcaccgaggaggtgaaggtggagaacaagctggtccgagcacggcagtacccctggggagn

SEQ ID NO: 1729 - DNA, 461 bp, Homo sapiens
  misc_feature (1)...(461): n = A,T,C or G
nttcgagtccctagtccgtgtggtgaattccgtgaagatcccctgggactgcgatgcggcgtgaggctgggactgcgagtgctgacgccaccttcctgctgaggtgggactgggccctggacacacccctcagcccctgtgtcctcattgtttggcctcatgggaccgaggggctggaggagaggcggagctgtgccccagctgttccagcagcttgtctggcgtcaactggctttcagagtgctgacccctcatcactgtggggatcattctctctgagggcagatgaggcgcaggaaaatagtcttggaaatgttaaatatgatgggtaaattaaaagttttacaacattctacctaatatttttcttttaacatactctttctgttctattgtattatggggtccgaaagctaaataacgactaggaaaaatttttttaaaagaagaacaatcagttn

SEQ ID NO: 1730 - DNA, 479 bp, Homo sapiens
  misc_feature (1)...(479): n = A,T,C or G
gggcttgagactttagcatgtgaggcgatttcgcnngcgcaagttcaatgcccggagaaaactgaagggtgccatcctcacgaccatgcttgtctccaggaacttctcagctgccaaaagcctattgaacaagaagtcggatggcggtgtcaagccacagagcaacaacaaaaacagtctcgtaagcccagcccaagagcccgcgcccttgcagacggccatggagccacaaaccactgtggtacacaacgctacagatgggatcaagggctccacagagagctgcaacaccaccacagaagatgaggacctcaaagtgcgaaaacaggagatcattaagattacagaacagctgattgaagccatcaacaatggggactttgaggcctacacgaagatttgtgatccaggcctcacttcctttgagcctgaggcccttggtaacctcgtggaggggatggatttccataagttttacn

SEQ ID NO: 1731 - DNA, 492 bp, Homo sapiens
  misc_feature (1)...(492): n = A,T,C or G
gtgggggnnnnaatcgagtccctagtcagtgtggtggaattccgaactgcagatgtcacgttctgtggctgagagcctcagtgtgcatctgtagtaggaggatgtcagtgaggactgtcctgtcgctgctgagctggcaccgactgtgcctggtctacactccaggtctgccaaacgacccagcaaggtccttcacaactcttctgatccaggatcacacatcacttgtgctttgatgcctgcttctgaacaattttacctcctgagatgtccatttttgggagtgtgagccctcctctcctggtgacagctggctgaggccgtccagcctcaggacacacagggaacggctgcataaggagatctggggcagggggcccaccaggatgttctgccctgtggggggcaacaccggctgtggtctgccggcggcatccagggacagtctgtctaggtgaaggctgaggccgccccactcgctccctcaccccc

SEQ ID NO: 1732 - DNA, 452 bp, Homo sapiens
  misc_feature (1)...(452): n = A,T,C or G
naactggactagcctgncnatcgngcnggaacncannaaatcaccaggagcgcggagcagcccctgcccgggaccatagctggtgatcccccatagtgggtaaccacgcccagcctgcttccttgattggccatgtttgcggtgagggggtggctgtagggttttccttagggatggcagccctattggggtctgtgggtgctcacggctgcgggccgcatgcctgctcaccaggccctgcccacctatgctcgctcctttctctctgtcagcgatggggccttcgggaagacctggctgcccttcatccttctgctgggcatcatcctcaccgtcagcctggactttaacctccggtgatggctgctcggtggccccacacccaccagggtcccgaggaaacagccgccatcccttttggttccagatttttttttcctcaccccagaagg

SEQ ID NO: 1733 - DNA, 480 bp, Homo sapiens
  misc_feature (1)...(480): n = A,T,C or G
tttatggacccncaaactgatgaccattagtcagngcggtggaattcggggtgcagtggctgtgggcagcagtcctcagttgtattctgctcctccagacacggtgaagtttggtgaggttgtcctgcagcccccagagctgactgccaggctccagaggagcgtaagcaaggaccaggtaagtggggcacggggacaacttgagtttgtcccccagtgctgccagggaacagaagccttggacaggctggacacggtgggtcacacctgtaatcccagcacattgggaggccaaggcaggcggattgcttgagcccaggagttgataccagcctggacaacatagcgagatcctgtgtcaagaaaaaaaaaaaaccctcagccaacgtgtgcgctgtctggtgtgtggcctgagagtgcagtgttctcgctggcgggagagctgttgaagctgtgaggctttctgttgcatcccctccc

SEQ ID NO: 1734 - DNA, 500 bp, Homo sapiens
  misc_feature (1)...(500): n = A,T,C or G
tggggagnnnnnnttttgtgtgcattccatangcagngncgnggaattcgatgagctcggcgcgctgagctccgcggctccgcgagccggctacgtccccttttcgttgtcgccatgaagtggatgttcaaggaggagcactcgctggaacacagatgcgtgtagtccgcgaagattcgagcgaaatatcccgacagggttccggtgattgtggaaaaggtctcacgctctcagattgttgacattgacaaacggaagaacttggttccatctgatatcactgtggctcagttcatgtggatcatcatgaaaaggatccagcttccttctgaaaaggcgatcttcctgtttgtggataagacaggcccacatgccttcctaactatgggacagctttactagaaggaaaaagatgaagatggattcttatatgtggcctacagcggagagaacacttttggcttttgagggccatcgctgggctatgtgcaccgtatctg

SEQ ID NO: 1735 - DNA, 467 bp, Homo sapiens
  misc_feature (1)...(467): n = A,T,C or G
nttcgagatccactagtccaggggggtggaagtcctctactctcagggggagaaatcaaagcatcctgacaccagcagccagtttttatggcatcctggagggctgacctcatagagaggctaccctcctttcttagtcacccaaagttgtgaactatgattgtcagttgtgtgtgggccatctgcccacttaggatgcaatttttgatgtgacagacattccggatgtccaattcccctgtgatgaggtatgagccttgtccagcccttttcctgagggaagcactgtcagatgaaagacttataattgcccaaactggctagccagctgccacatgcacagtattgctgataactgagaaaggttagaacatcgtgttgcattgtgaatttctaccattgttggaaccaggtctagtattataagcccctgacccagcctgtgtgtgaggcctaaacaaagcctt

SEQ ID NO: 1736 - DNA, 471 bp, Homo sapiens
  misc_feature (1)...(471): n = A,T,C or G
nggctgccgggattgaancccacttgagatcatagnacangcggnggaattcngagctttccggctggaggggagcccatgtcccccacgggaggtccttagccctcttccttatggcggccggccccgagggtcaaccctgggcgctgcctagggcacagccaagagcggaaccggcattgcgggcatgtctgtcatgcggccgtagcacatcatgaagtacatcatcccagtggtcatggctggcatcatcgccatctacggcctggcggtggcagtcctcatcgccaactccctgaatgacgacatcagcctctacaagagcttcctccagctgggcgccggcctgagcgtgggcctgagcgggctggcagccggctttgacatcggcatcgtgggggacgctggcgtgcggggcaccgcccaccagccccgactattagagggcatgatgctgacactcatcttccg

SEQ ID NO: 1737 - DNA, 492 bp, Homo sapiens
  misc_feature (1)...(492): n = A,T,C or G
gccccccccccnccncccccaatggagacattagttagagcgccggaattcgagcgtcgtggacgccgtgccgttactcgtagtcaggcggcggcgcaagcggcggcggcggcatagcgcacagcgcgccttagcagcagcagcagcagcagcagcatcggaggtacccccgccgtcgcagcccccgcgctggtgcagccaccctcgctccctctgctcttcctcccttcgctcgcaccatggctgatcagctgaccgaagaacagattgctgaattcaaggaagccttctccctatttgataaagatggcgatggcaccatcacaacaaaggaacttggaactgtcatgaggtcactgggtcagaacccaacagaagctgaattgcaggatatgatcaatgaagtggatgctgatggtaatggcaccattgacttccccgaatttttgactatgatggctagaaaaatgaaagatacagatagtgaagaaa

SEQ ID NO: 1738 - DNA, 479 bp, Homo sapiens
  misc_feature (1)...(479): n = A,T,C or G
ggggnccatggtgacattcgatagagcgccgcaannccagagcacaagctgaaggagctcccaggagtgtgcaatgagaccatgatggccctctgggaagagtgtaagccctgcctgaaacagacctgcatgaagttctacgcacgcgtctgcagaagtggctcaggcctggttggccgccagcttgaggagttcctgaaccagagctcgcccttctacttctggatgaatggtgaccgcatcgactccctgctggagaacgaccggcagcagacgcacatgctggatgtcatgcaggaccacttcagccgcgcgtccagcatcatagacgagctcttccaggacaggttcttcacccgggagccccaggatacctaccactacctgcccttcagcctgccccaccggaggcctcacttcttctttcccaagtcccgcatcgtccgcagcttgatgcccttctctccgtacgagccccn

SEQ ID NO: 1739 - DNA, 451 bp, Homo sapiens
  misc_feature (1)...(451): n = A,T,C or G
tggnnnaacggcgcccntttgattactactacnccgngnggnggaattcttcatctctaaggacggggccaccatccctttccagggtgtcttctcgatcttcacctcctccgaggccgacgtgttcgctgggagcattcagccggtgaccagcctcgactccactctccaaggcacctaccaagtgacagtccaggccagggacagaccttccttgggtcctttcctggaagccaccaccaccctgaatctcttcaccgtggaccagagttaccgctcgcggctgcagttctccacaccgaaggaggaggtgggcgccaacagacaggcgattaatgcggctcttacccaggcaaccaggactacagtatacattgtggacattcaggacatagattctgcagctcgggcccgacctcactcctacctcgatgcctactttgtcttcccn

SEQ ID NO: 1740 - DNA, 482 bp, Homo sapiens
  misc_feature (1)...(482): n = A,T,C or G
gacagagcccccnttcgagaccantgtcgagtgtcgtggaattcgacaatctggactcagtcagttctgtcttggtacagagtccagagaacaaagtacagttacttggccttcaggtgctgctgcctgagtatctgcgtgagcgctttgtagctgcagcactcagctacatcacatgcagctctgagggtgagctcgtctgcaaggagaatgactgctggtgcaagtgcagccccaccttccctgaatgcaactgccctgatgctgacatccaggccatggaggacagcctgctgcagatccaggactcctgggccactcacaaccggcagtttgaagagtcagaagagttccaggccctgctgaaaaggctgcccgatgaccggttcctgaactccacagctatctcccagttctgggccatggacaccagccttcagcaccgctaccagcagctgggagctggcttgaaagtgctgttn

SEQ ID NO: 1741 - DNA, 495 bp, Homo sapiens
  misc_feature (1)...(495): n = A,T,C or G
tggcgggannnctcgantttttgagtccctagtgcagtgtggtggaattcgaaactttagaggcctttaaccacggaattaagacacccacatgctcacatagagggacatgtatacagtagacaaggggcaagtgagtgagggcagttctgttcctcaggaggaagcctactcagcctttgggcaggagaggccctggtttacttcagtgaatgagcttcaggctaaggctggatgtcttggaacacctcaatttcacccatgccccaaagtcacacgtgcacttatgcttgaactgcagggtcacaggctagaagggaaagaagggttgttatggagcccagttgtttttcttctcccaagaggagatggtcagggacaagacccacagctctcccttggcagcatggggagccaggacacaggtgaggccgggccacttttggctttttccagcctgttctctgagctcactgcaagccattccttctcttg

SEQ ID NO: 1742 - DNA, 482 bp, Homo sapiens
  misc_feature (1)...(482): n = A,T,C or G
agcgggntnnnnnngttacgaacccttcgcantactgaaaccntcgatgggattgatgggcaggagggatccccgcactgtgagacaggcccaggtatgaatgagccagccatgcttcctcctgcctgtgtgacgctgggcgagtctcttcccctgtctgggccaaacagggagcgggtaagacaatccatgctctaagatccattttagatcaatgtctaaaatagctctatcgctctgcggagtcccagcagaggctatggaatgtttctgcaaccctaaggcacagagagcccaaccctgagtgtctcagaggccccctgagtgttccccttggcctgagccccttacccattcctgcagccagtgagagacctggcctcagccctggcagggctgtctcttgaaggccatatccacctgtgccctggggcttgggagaacccatagggccgggactcttgggtcagcccggccactgg

SEQ ID NO: 1743 - DNA, 471 bp, Homo sapiens
  misc_feature (1)...(471): n = A,T,C or G
tgaagttnacganaannnggaactgagactcctgatagccctcggaanncccaagaagaagaccctcagtaaccccctggacttggctcttgccctagaaaccaccaactctctctgccggaagtctttggcccttttgggacagacattttccttggcctcttctttccggcaggagaaaatcttataagctgtctgcctgcaagatataactccctcacctgctgcgtttccaaacttcgaagactccactttgtttgggcgagagtacatagaccacctgaaggcctggctagtcagcagcggatgtcccctccaggttaagaaagcccaaccagagccgatgcgagaggaggagaaaatgattcctcctactaaacctgaaattcaggccaaggctccaagtagtctgagtgatgctgtcccccagcgagcagatcacagggtagtgggcaccatcgaccagcttgg

SEQ ID NO: 1744 - DNA, 471 bp, Homo sapiens
  misc_feature (1)...(471): n = A,T,C or G
ggaagtacannnanggggggtctgagatccctgatagccttcggaannnctnnctncangnggngggcgtcgtcgaggcgctgatccagagcgcagacaccctcttccctggagacatcaacttcaacgtgtcaggcctcttctcagctgttaccctccaggacacagtcagtgacaggctggcctctgaggaacttccgtccactgccgtgcccaccccagccaccaccccggctccggctccggctccagctacagctccggccccagccttgggttcagcagctaccaaggaaaggacagagtctgaggtgcctcccagaccagcctcccccaaggtcaccaggagtcccccggagacagctgccccagtggaggacatggctcgcaggagtgagttggctgtgggaggggaggaggggacagagggtgggcggggagaggggacaggcagtcccatgtcctcctatc

SEQ ID NO: 1745 - DNA, 423 bp, Homo sapiens
ccaagctgaggtccagctgcacagcgggcagggtgagaaggctggcatgggacagcttcgggagcagctcgccagcgccttccaggagcagatggatgtgcggaggcgcctgctggagctggagaaccgcgccatggaggtccagattgacacctcccgacacctgctcaccatcgccggctggaagcacgagaagtcccgccgggccctcaaatggcgggaggagcagcgaaaggagtgctacgctaaggacgacagcgagaaggactcagacacaggtgatgaccaaccagacatcctggagccacccgaggtggccgcagcccgggagagcattgcagccctggtggacgagcagaagcaactgcgcaagcagaaggtgtccagggtttggggggacaaggagagtgggtttaggggact

SEQ ID NO: 1746 - DNA, 486 bp, Homo sapiens
  misc_feature (1)...(486): n = A,T,C or G
tgcatgtgcccccnttagagatccctattcgagagacgtggaattcctcaccaagcggcactggccaggggcccctgaggaccaagatgacaaggatggtggggacttcagtggcactggaggccttcccgactactcagccgccaaccccattaaagtgacacatcggtgctacatcctagagaacgacacagtccagcgtgacctggacctgtacaagtccctgcaggcctggaaagaccacaagctgcacatcgaccacgagattgaaaccctgcagaacaaaattaagaacctgagggaagtccgaggtcacctgaagaaaaagcggccagaagaatgtgactgtcacaaaatcagctaccacacccagcacaaaggccgcctcaagcacagaggctccagtctgcatcctttcaggaagggcctgcaagagaaggacaaggtgtggctgttgcgggagcataagcgcaagaagatactccg

SEQ ID NO: 1747 - DNA, 491 bp, Homo sapiens
  misc_feature (1)...(491): n = A,T,C or G
agcggnnnnnnnnggatacgagaccctcgnanaatctgagaccctactgcagtgtcgtggaattccacgttccttcccccgcaatgtgcccccagacgcacgtgggtcttcagggggccaggtgcacagacgtccctccacgttcacccctccacccttggactttcttttcgccgtggctgcggcacccttgcgcttttgctggtcactgccatggaggcacacagctgcagagacagagaggacgtgggcggcagagaggactgttgacatccaagcttcctttgtttttttttcctgtccttctctcacctcctaaagtagacttcatttttcctaacaggattagacagtcaaggagtggcttactacatgtgggagcttttggtatgtgacatgcgggctgggcagctgttagagtccaacgtggggcagcacagagagggggccacctccccaggccgtggctgcccacacaccccaattagctg

SEQ ID NO: 1748 - DNA, 483 bp, Homo sapiens
  misc_feature (1)...(483): n = A,T,C or G
aggatgtgccccnttttgagtccctatcgagtgtcgtggaattcgtctaattggagtatcttttggggggatttctgactatgtcttttcctgagcctttgagtctgttcatcatgggtaagttaagagggtttactcgagatgttctctcttggggttcctttctgagcctacacccgagagtgaagtcgatgtgtttggacccttagacagtgaatgcaaagaagttagagaaggccgaggctcgacttaaggcaaagcaggagaagcgctcagagaaggacacgctcaagaccagcaaccctctagtcttagaagaggcatcagccagccaggcaggcagcagaaaggagagtcggttggaatcatctggcaagaacaaatcctatgatgtgcgaattgagaactttgatgtgtcttttggcgatagagtactgctggctggagcggatgtgaacctggcatggggccgccgttacgggc

SEQ ID NO: 1749 - DNA, 483 bp, Homo sapiens
tgcagaggcccctttgaccccctttcgagtgcactagtcagtgtggtggaattcgcaaattgggggtgacgttcaagatgtacttgatgccgaattcctccaacacgtccaagttggtggagtctttggcacagcccaagtagaggaagggcaagatctccactgggaaggaaggctggctgttggacagcggactaccatccgagtctgttgcactattggggtctcggtcaaggtcagactcgatgtccgaggaagagtcagagctgatccgcaggcccccgagccccagcactggcaacggcggcgagctgctgctacacgagccgtctagattggtctcgcaatgcagggagaactcggcttggaacttactgaagccacctgccagaacgagaaaagcaatcatctaacctgagaagccgtagtagttttcacagcttgtaagaaccgcagcccggcgcaagaaacaccacaagcatc

SEQ ID NO: 1750 - DNA, 476 bp, Homo sapiens
  misc_feature (1)...(476): n = A,T,C or G
gtnagtcanagnnnannnnggaactgatgacacttgatagccctgcggaannccggggntctgggtcgggacagcaccgctggtcgctgccggacggcgtgggcggtgtccgccgcatcatctgatgctgagcgcggcgctgcggaccctgaagcatgttctgtactattcaagacagtgcttaatggtgtcccgtaatcttggttcagtgggatatgatcctaatgaaaaaacttttgataaaattcttgttgctaatagaggagaaattgcatgtcgggttattagaacttgcaagaagatgggcattaagacagttgccatccacagtgatgttgatgctagttctgttcatgtgaaaatggcggatgaggctgtctgtgttggcccagctcccaccagtaaaagctacctcaacatggatgccatcatggaagccattaagaaaaccagggcccaagctgtacatccaggtn

SEQ ID NO: 1751 - DNA, 482 bp, Homo sapiens
  misc_feature (1)...(482): n = A,T,C or G
aggagatgccnntttgagaccatattcagtgtcgtggaattctggaaacaccattgctctcttcttccggtcactgttgccaaactataccatggaggtaggttgagctcgtcccagcccctgcctccccagtgggtgcgggcatatccattccagtgcgaatgcctggagcctccttgaaccaggactgtgccagccggcacagggagcagggaaggaccaaggctgcattgtgccagtggggtgcccattctgccggggaaactggggcctgcccagatggtagcagatgcagggccgtgagtcagccggcttgatcccactctgtgcctggcttggtctagacacggcatttggttttgagagcttcctcctcacagggacctggggagggttcagggtccggtgctggggcaagggccacctcgggctccacagtgcctcctgcttgggccccgggcccctagtcccagcacagacag

SEQ ID NO: 1752 - DNA, 475 bp, Homo sapiens
  misc_feature (1)...(475): n = A,T,C or G
ttccctaatacctcgcacngccnggatcttagtccctgagacgncncagnacccagggcctcttcagctctttgtaggttctgggctgggttgtgggggactggggagctgggctctaccatccctcccattagtagctggatccagccccgtttttgctgcttccagggcctctgccttcaaggccttcatggggctgtccatccatggctctgcctacggaaggggcttaatgcatgtgcctgcccctcccccagctgtttttaatgaaactgaaaaaatagacttgatcccggcaggactgtgatacagagccctagcctgcccagccagccccaagatctcaggagctttagggagaagacttggtggggctggagcacaccttgggcctcagtggtttctgtgtccctgtggtgccagtgcttctgggcagtgcaagcggctgccaggcccagccctgactttcactctg

SEQ ID NO: 1753 - DNA, 493 bp, Homo sapiens
  misc_feature (1)...(493): n = A,T,C or G
gttagcttaggcccccccccnnnntttggaatccctattcagagtgcgggaatttctttgttcctcaacttctgtagtcatctattcttgagccttgaccttggttatttgttctggtgttctgtgattctgttaattttttctgtcatctcttttgttagggccctcctcctttctagggtcccgatgacaccttcgtgattctcagtgctaccctagtcacagcctatcaaaggtagaaaaactatagtttttcttcagcgtttattcaattctttctactctcactccccttttgtattttccttctgactcatgcctgccaagctgttttggcctctgacaacaggtgttctctcatcaattatggtgctccaagtattcatcacttcatgcctgctgatgtctgttcacaaatattcagattttttttacgtgtccagcctgcttcctcttgttttaagtgtcagcgtctttctgtcattcctttttt

SEQ ID NO: 1754 - DNA, 483 bp, Homo sapiens
  misc_feature (1)...(483): n = A,T,C or G
agcgggnnnnnnngaaactgagaccttcgcagngctgagaaccctcgtttaccaaccctgagaactgctattctgtatcacttaagtttgaagtggtttttttacacaacaataataatcagaaccgaactcatatcccttttttcttcttctttttgattattagattcttcagtgtactacatggctgactgggaagattccagggtcccaacacgcttcagagttgcgaaggctctagaggtactgtttgctcacatagagcctatgtgttgagggcttatactctggagcccagctgctggaatgcgggccctgcagctgatactgttgagctgtgtgtgtggagcccttcccttagcctttcctgagtctcattctccgctggttaaatgatgtcattaataaggcaaatgattttgctgctaaatgccagtggaaactttctaatagtcataactgtcacaaggtctgatgacctcn

SEQ ID NO: 1755 - DNA, 479 bp, Homo sapiens
  misc_feature (1)...(479): n = A,T,C or G
nttgcagacccttggcagngggcggaanttttgagacccctagtccagagaggaggaattccaggtgcagggtctccaggcacagcaacttagtggagaggggcacctgctgcctgccccatccagggtgtccccctccaggcccaccttttcatcagcactgccttccccacgcccccggctgacacccctgagcgagtcacctttgccgctgccttgggtggggaaccctgtgcctttcctgagtagtcattcattccctcactctggaacccacccattggctcctcattctttctctcactcctttatttattcaacaaacacgtcttgtgcacctcccatgtggtcagttgtgtctgctatcttctctcccttgggcattcaggaaaatgagagttttcccaataggcttgaggaggtgagattcagggagctccctcactggccaaaggatggaacccacctctggcctaagg

SEQ ID NO: 1756 - DNA, 466 bp, Homo sapiens
  misc_feature (1)...(466): n = A,T,C or G
nattgacagcctantgagatcctccnacgngccgcggaanncngcccctctctgtttaccctccctgtcccctgaggttaaggggatcttttaggaggacagggagggaacagacctcggctgtgtggggagggtgggcgtgacttcaaactctctcctctctctccctccactcctcccaactctggccttggttcctccagcaatgcctgcctgaacaaaggccgttagggaaatccaactccagggttaaagaaaggcagagattgggggggcttggggtagagaggacagtctacgacccaaggtggtcttggagaggaggtgtggagtggaggggtcagcaggggggttgggttccagacagagtggatctggagtctgaaagaaaggagtgcgctagagcattctggggtggggcttggaagggcgcttagggcagggttctagaaggggcgaggcttta

SEQ ID NO: 1757 - DNA, 482 bp, Homo sapiens
  misc_feature (1)...(482): n = A,T,C or G
ggagagcccnntttgagatccctagtcgagagacgtggaattctaacaacagctgacaaatactgtatagaaaagattgcgttggaatcataactgtggattggaagtgatgttaaggattattggattgagtatttgtagctgaatttctgctggcatttctatcagtggggaaagccctcacagctccataggtaatttttgttaggggaggaagaagtgttgttctgtcacccacccccaggcaaagagtcgctgatctaattctccatttctttctttctttcctttccttccttccttccttccttccttccttacttannnnnttnnttccttncttacttgcctctcctcccctttcctttcctttcctttctttcctttctttctacgaaagctagtttgtagcttgctgcccaaactggaccgcttttcattgttgccagataggcttattgcccttccacctaccagggagg

SEQ ID NO: 1758 - DNA, 445 bp, Homo sapiens
  misc_feature (1)...(445): n = A,T,C or G
natgagncctgatcacgtgcggaatcccagacacatctaggggcctcggcttccactgcctgcaatgccaggatacgctgatctgtgaattcttggaatctccttcgggaaatgacccactcaaagggaggatttgtcatcctggtgcattgtatacatctcatccaacttccagacaagccgtaattctgtgagtaatggcttggcggtgtgaggtgatgtcatcagggcagacgctttggtggagagggatgtgtggcctggacacagccacctccctcatggagcccccagagctcacctacctcagaggaaagtcagggcggtcagcccctttcagccaggatgttcagctgggagctggaggcaagggcatccattgagtttggacttctatgcctgtgacacctgtgcaagtgatggactccccgagccagggtcccct

SEQ ID NO: 1759 - DNA, 431 bp, Homo sapiens
  misc_feature (1)...(431): n = A,T,C or G
nttgacnncccttttgacgncccctagtcagtgtggtggaattcctcacagattacaaggcttcctcggagatggcactttaccagaaaaaacatggtattaaactctataaacctctcattctccctgtgactcaggtgagcaaaaacatttccttccttgtttcatccagtacccatgaaatttcctctctgtgtttcatgtgtcccaggtcccccaaaaaacaggtggtggtggattatacatggctttcagtagtggggtgatgaaaatgttctctctggtaaagcatgctgacactgtttatcttgtgtaataggccccaatcttcatctccttcttcattgctttgagagagatggccaaccttcctgtgcccagcctgcagacaggtggcctctggtggttccaggatctcacggtatccgatc

SEQ ID NO: 1760 - DNA, 428 bp, Homo sapiens
  misc_feature (1)...(428): n = A,T,C or G
ntttgcggaccattgtccagcgcggtggaatgcgtcatcgaggagcgtgggaagggcgacggtgttcccgagaggaggaagtttggcaggatgaagctcctgcagttctgtgagaaccaccggcctgcctactggggtacctggaataagaagacggcactcatccgcgcgcgagacccctgggcccaggacacgaagctcctggactatgaggtggacagtgatgaggagtgggaagaagaggagcctggggagtccctgtcccacagtgagggggatgatgatgacgacatgggagaggatgaagatgaggacgatggtttctttgtgccccatgggtacctgtctgaggacgaaggtgtgacagaggagtgtgccgaccctgagaaccataaggtccgccagaaactgaaggccaaggagtggga

SEQ ID NO: 1761 - DNA, 497 bp, Homo sapiens
  misc_feature (1)...(497): n = A,T,C or G
ggggggnnnnaattgagattctgataactgtggcgcgagtgttgataccctgcggtaggctttctttctttcttcctttcttttttttcataaatacacagttttgtttgctattttcaggggaaacttaggcattcgactatgagctgataaaataccatacctaaaaaagtataaaagtataaatatccccttagaataaattttagtgaattgtcttaatatctttaaatttaaaaaaaaaacacaacacaagcctatctattgtatcaaggtcaaaaatcaaacaatgctaaggggccagcagctccccagagagtacaccctgagggcccacagtggctgccttcctccagagctctgctggggaggacaggtcatcccatggctaagtctgccctctagaaaggcttttataaattgtctaagccaaacatttaacagcatacaagagaccttacaaagaggaggtggtaagtcctaatgctggagaactn

SEQ ID NO: 1762 - DNA, 429 bp, Homo sapiens
  misc_feature (1)...(429): n = A,T,C or G
nttcgtcgtccctatgccgtgcggtggaattccagatgatcagctctgtatctggttaagtcggttgctgggatgcaccctgcactagagctgaaaggaaatttgacctccaagcagccctgacaggttctgggcccgggccctccctttgtgctttgtctctgcagttcttgcgccctttataaggccatcctagtccctgctggctggcagggggctggatggggggcaggactaatactgagtgattgcagagtgctttataaatatcaccttattttatcgaaacccatctgtgaaactttcactgaggaaaaggccttgcagcggtagaagaggttgagtcaaggccgggcgcggtggctcacgcctgtaatcccagcactttgggaggccgaggcgggtggatcacgagatcaggagatcgag

SEQ ID NO: 1763 - DNA, 498 bp, Homo sapiens
  misc_feature (1)...(498): n = A,T,C or G
gaggaganannnttttgatgagtccctacgcagngagcgggaattcgtgactgctattgaaccgccaaaagtccattatgaaactgtcccaggctgtccattctttctggctggtccctgaaggatggaaatgctttcgtggacaaggagctaaaggagtgctcgggtcatgtatttgtggattctgtgccggaattctgtttaccagagacggagctaatagatctgtctacagtagatgtgattctcatctctaactatcactgtatgatggcgctgccatacatcaccgagcacaccggcttcacaggcacagtgtatgccacggaacccaccgtccagatcggcaggcttctcatggaagagctggtgaatttcattgaaagagtgccaaaggctcattctgcctccttgtggaagaataaggacattcagaggctgttaccttctcctctcaaggatgcagtggaagtctcaacctggagaagatgctatacn

SEQ ID NO: 1764 - DNA, 501 bp, Homo sapiens
  misc_feature (1)...(501): n = A,T,C or G
gagcannnnnnnnnattgatcgcagtccctaggccgtgtggtggaattcaaagatgaattgatgaaccccaatacctctttatgttcctcaaagttgcttccatcccctgaaaccttattttcaacccaggcaggaaacctgggaagaaaacagatcctttccaaatgcatttattccactttcctcaattctaaaaccaagagttaggaatggggctttagatctcacatcagggaagttagagacatcgtcctctgccttgtcttattttaccacttgaatgaactattttcaggactggtgggagtgggctgcgacaagttatttaagataacttttaatgacagccagcctgcttgcttttacaaaactctcttcctcattggtacagnattgctttcacttttatatatatggggcatttatcggttcttctgcatctttgaatttttttaaaaatgtttttgctttagagaatttcgtccctgatgcaacaaaan

SEQ ID NO: 1765 - DNA, 493 bp, Homo sapiens
  misc_feature (1)...(493): n = A,T,C or G
aagcaggtnnnccccaattgagacctcncctaggggngctggcgaacngccgcgnaanggaccgggaaaggcacagtagttgttggtggatgagggtggctgtggcaggtggcgtttcaggtgagacagctcggggcccagaaagacactgggaggaggagagctctgctctccagagaaacaggagcagagaggaaaacagagccgcagcgagcggcttgtggtctggggatgaagcccaggttgacagcatcctctgcttcgctggtggaggtgggggcatcattctcacacctgtgctgggtcctgtccctgccagccaagggagaccaggaccctgccactgttgcgctcaggatagtccagaactgtcagatcttttctgttgaagtttaatttctaatacacttgtatttaaaatcaggttgcagattttaaagatgcccttgccagagtatatggagtgatacccaaaatccagtgccttccaccc

SEQ ID NO: 1766 - DNA, 494 bp, Homo sapiens
  misc_feature (1)...(494): n = A,T,C or G
aagcagtagnnccacccagggaccactttagnngngaccagcaacngcggcggaannncnnngnnnataaaaatgaggcaattaaatcccttttcatcacacaattattgagccttgttccccatggctcaccaaaatgtgctcaattgtgagagagaaagactgtactccataactgactattcacgtcccatctttttggctcttccccaaagcagaatccttactgttggttgacagtaatctctttttaaaaagtaactctcagctttttccttagcaccagagcctttcggctccgggagacgagagggtcattacatacttttttttttttctggaaaaaagggcattgtgactttataacctaaactggagctgtctgaacctgtggccaggctcaaaagccagcagggggagcaccaaactcaaaaaaaaaaccaacttaatttaatttaatttaatttaaatcgaaccaaaataaaacccctttt

SEQ ID NO: 1767 - DNA, 483 bp, Homo sapiens
  misc_feature (1)...(483): n = A,T,C or G
ggcagtagccccccaaaaccancttgaggncatcgaanccncgcngggagcttgagaatacactgccaagattgccctcctggaagaggcgcgtttgcgcaaggaggatgaagttgaagagtggcagggcagggccaaagaagcccaggatgacctggtgaagaccaaggaggagctgcacctggtgatgacagcacccccgcccccaccaccccccgtgtacgagccggtgagctaccatgtccaggagagcttgcaggatgagggcgcagagcccacgggctacagcgcggagctgtctagtgagggcatccgggatgaccgcaatgaggagaagcgcatcactgaggcagagaagaacgagcgtgtgcagcggcagctgctgacgctgagcagcgagctgtcccaggcccgagatgagaataagaggacccacaatgacatcatccacaacgagaacatgaggcaaggccgggacaagtn

SEQ ID NO: 1768 - DNA, 501 bp, Homo sapiens
  misc_feature (1)...(501): n = A,T,C or G
agcggggtnnnnnnnaattgatagcantgcccagngnggnggaattccaggcgtgtgccaccatgcccagctaatttttgtatttttggtagagatggagttttgccgtgttggccgggctggtttcgagctcctgatcttgggtgatacacccgcctcggcctcccaaagtgctgggattacaggcgtgagccacgtcccccagccagtttcttaatctatacatctagcccagtccatgcccctgtttcagactattatatccaaccacctgctatacatctcataaaggtatctcaaacacagcatatctaaagctgaagtcatcatcttgccctggtttttcctgtctctttgctgatggcatcccatttacccagtcattcaaactggaaatctaaaagcctcacttagcaagagtttggaggcagaatatgataaagaacaaggactctgggaggccaaggcaggtggattgcttgaggtcaggagttcgagacn

SEQ ID NO: 1769 - DNA, 449 bp, Homo sapiens
cctgaatttctttaaggattttttttactattgattacatttctctagtggttatattaatagaactaagtggattttctatatgttcttgggtctgattttttttttttcccaagagggagttttgcttttggggcccaggctggagtgcaagggcgtgatctcggttcgccgaaacctttgcctcccgagttaaagcagtttttctgcctcggcctcccgaggggctaggatcgcaggcatgccccaccacccccggctagttttgtatttttaggggagacggggtttctccgggtgggccgggctggtctcaaactcccaatctcaggggatccgcctgccttggcctcccaaagggaggtcggtttttataggttatattggttaatacacatgtctattttatctagtttttaaatggggggaaaattatctaaattcttatc

SEQ ID NO: 1770 - DNA, 498 bp, Homo sapiens
  misc_feature (1)...(498): n = A,T,C or G
gcgacntnnnnnnnatcgttagcantaccagtgngcgggaattcctcccattgagagtgcagaggacctagcgaagcagacagaaattgcctacgggacgctggaagcaggatctactaaggagttcttcaggaggtctaaaattgctgtgtttgagaagatgtggacatacatgaagtcagcagagccatcagtttttgtgcggaccacagaggaggggatgattcgagtgaggaaatccaaaggcaaatatgcctacctcctggagtccaccatgaatgagtacattgagcagcggaaaccctgtgacaccatgaaggtgggaggtaacttggattccaaaggctatggcattgcaacacccaaggggtctgccctgagaaatccagtaaacctggcagtgttaaaactgaacgagcaggggcttttggacaaattgaaaaacaaatggtggtacgacaagggcgagtgcggcagcggnggaggtgattccaagga

SEQ ID NO: 1771 - DNA, 413 bp, Homo sapiens
gcgacctataggagaaaagcagcctcccagtcagacaagccagccgagaagaaggaagatgaaagccaaatggaagatcctagtacctccccctctccggggacccgagcagccagccagccacctaactcctcagaggctggccggaagccctgggagcggagcaactcggtggagaagcctgtgtcctcgattctgtccagaaccccgtctgtggcaaagagccccgaagctaagagcccccttcagtcgcagcctcactctaggatgaagcctgctgggagcgtgaatgacatggccctggatgccttcgacttggaccggatgaagcaggagatcctagaggaggtggtgagagagctccacaaggtgaaggaggagatcatcgacgccatcaggcaggagctgagtgg

SEQ ID NO: 1772 - DNA, 488 bp, Homo sapiens
  misc_feature (1)...(488): n = A,T,C or G
gcgaccagnnnattgannactgantaccctatccgtgtggtggaattccttgcccatcgggaccagaaacctgggagagacttggatgaggagtggttgggctgtgcctgggcctagcacggacatggtctgtcctgacagcactcctcggcaggcatggctggtgcctgaacaccccacatgtgagggcaccaccacgaatttgtggcctaccttgtgagggagagaactgaccatctccagcattctcagccacaaccaaaaaaaaataaaaggggcagccctccttaccactgtggaagtccctcagaggccttggggcatgacccagcgaacatgcaggtttgaccaggaaagcaacgctattggagggttggataacgaggtctaggatgagggttcatcatccctccctgcctaaggaagctaaaagcatggacatgctgaccctccttgcctacacccacagtgtatagggctacaaagga

SEQ ID NO: 1773 - DNA, 481 bp, Homo sapiens
  misc_feature (1)...(481): n = A,T,C or G
tgagtggccgggtgncaaatccaggggtgctggtacgntctnnggaannnccgngaagatgcagcnngagccgatggagatcaaccccgagatgcttaacaaagtgctgtcccggctgtgggtcgccggccagtggcgcttgggggacgtgctggggctggaagaggagtatctgggctcggggccagcgcctgcctgcgcgctgctgctgctgcttcccctcacggcccagcatgagaacttcaggaaaaagcagattgaagagctgaagggacaagaagttagtcctaaagtgtacttcatgaagcagaccattgggaattgctgtggcacaatcggacttattcacgcagtgggcaataatcaagacaaactgcgatttgaggatggatcagttctgaaacagtttctttctgaaacagagaaaatgtcccctgaagacagaacataatgctttgaaaagaatgaggccatacaggcg

SEQ ID NO: 1774 - DNA, 475 bp, Homo sapiens
  misc_feature (1)...(475): n = A,T,C or G
gtcgttccnncactgagaccnatgaagngcctggaaacatcggcctcgtgcagtgagggctctgtgggctggggctgctgcccctgcctacctcctgcctgtccccagaggctgaggagagggggtactgtgcccaccacacatgattaggcctcagacccaactctggtcctggctccacaacagtggctgccactcactttgtccagaaggtggcttgggggtggatatctttgggttgctggaaaaggtgtgggaaggttcaggatggtgggagggactgaggtccctgaggtgaagaggcccttggtcctgacgggtttgacccgtgcctggacccttggagcagtgttgtgtgaacttgcctagaactctgccttctccgttgacaataaaagcctcccctcatgacctaaactctgggcttttcttgctggggaggcagcaagcatgctggggggaaaggaggcagggn

SEQ ID NO: 1775 - DNA, 469 bp, Homo sapiens
  misc_feature (1)...(469): n = A,T,C or G
agctccacccnttttgagcccccatcgagnaccctaggccangcggnggaattcgtctttggacacctgtgtgccatggaagtggcaaagatccgggactccttccccaccctgcaggcagcgggccctgagacaaagctgtgagccttgggctggtcccagggtggcaccacccaggccccctgggcaccaagggagcgagggggaataagagcagggcagccccctgggtgccgctgtcaggagcagagccaggcccaggtggctccagctgcctgtcctgtcccctttcctaaagctcctctgcacatagaggggagaaaaagagaatttaggcaactccactcccccttcacccccaaccctgtattgtactctcccgaaaagagaagagaatcgcatgagtagcaagactgctgccaccagccacctgcttgtgaggccgccacttggcatgaagcctccacag

SEQ ID NO: 1776 - DNA, 441 bp, Homo sapiens
  misc_feature (1)...(441): n = A,T,C or G
ntttgacgaccccttggacgtccggnggaattccaggaagcatagcgactgtggggcaaagagtcagagaggggaggatacagacttgggagggcatagactcagaaacagaatgttcgcattaaggacatggtgttgcggggagctgcctcccccagcccctgctccctccctcaccgccagactatgatgagagaagccacctgcatgacaccttcacccagatgacccatgccctgcaggagctggctgctgcccagggatcctttgaggttgccttccctgatgctgcggagaaaatgaagaaggtcattacacagcttaaagaagcccaggcttgcatccctccctgcggtctccaggagttcgcccggcgtttcctctgcagcgggtgctactctagggtctgcgacctcccgctggactgcccagttcaggatg

SEQ ID NO: 1777 - DNA, 454 bp, Homo sapiens
  misc_feature (1)...(454): n = A,T,C or G
natcgagaccacattgaagngcggtggaattcgggtagactgtgggttggcagctctagaccttggcctgatatgctgacccctctgctcctcaggctgtcggctggcctgctgcgtcaggccacctacaccactacccgccttggcatctataccgtgctgtttgagcgcctgactggggctgatggtactccccctggctttctgctgaaggctgtgattggcatgaccgcaggtgccactggtgcctttgtgggaacaccagccgaagtggctcttatccgcatgactgccgatggccggcttccagctgaccagcgccgtggctacaaaaatgtgtttaacgccctgattcgaatcacccgggaagagggtgtcctcacactgtggcggggctgcatccctaccatggctcgggccgtcgtcgtcaatgctgcccagctcgcctcctacn

SEQ ID NO: 1778 - DNA, 468 bp, Homo sapiens
  misc_feature (1)...(468): n = A,T,C or G
aattgaacncccctntgatgaacntgcgcaaangcggcggaaanccgctcttgggacaccggagaacctatcatgtcagccagcgggcccacttttcggaccttggttggccaatcacaacaggggggcgtggccggtaccttctcctggtcgccctcagccgcggagcctctgcggaggctgagccccgcgaccggagcgccgctctccgcttctccacccagctaacttctgctcggctttcagagcattgtctcctccagggacttgcctgggcctcctccccctccgcccccaatggggtcggtctcctttgcgctttcgcagcccagtgtttgccgcggttcccgcacggtcaggccccaggactggcttgcgagccccggggggcgggtcgtgtcaagtccttttctctctggctaggcaggtgtgccgcgaatatttgacgaatagatgggtggcagaacg

SEQ ID NO: 1779 - DNA, 441 bp, Homo sapiens
  misc_feature (1)...(441): n = A,T,C or G
nttgacgcccttttgatgacccctagaccgtgtggtggaattcgctttctgcaaccaactgtattataaccccctcccaaacacttagtgcatcctctcactcatgtaatgtgtttaccttggtttctatatatttcttttgagatgggggctctgtcagccaggctggagtgctgttgcatgatctcaggtcactgcaacctctgcttcttgggctcgggtgatcctcttgcctcggccttctgagtggctgggaccatatgcgcgcaccgtcctgcccggctaattttatgcatttttggtagagacggattcaccgagtttcccgggcttgtcttgaactcctgagtcaagtgatacgggtgcctcagcttgccatagagctgggattacagatgtgagccaccgcgctatgccttaccttattttctaataactgag

SEQ ID NO: 1780 - DNA, 453 bp, Homo sapiens
  misc_feature (1)...(453): n = A,T,C or G
aactgagaccnctggaaggcgtggaanncggcaacagcactgtggaagtcccccggattgaggcgcgcccgtccagtggagaatgccacctccagccactggggcgcctgggggcagggcggagacacagcgggcgtcccttcgccgctgcataggagggcgaccgctgggcagcgggtgttggcgcggtatccccgccctgcccagcatctgccccacgtttcttcaggctaaactaccgggatcccgggcttcttcctaaagtaaaactcgctccggaaaggccaacagtccagcggccagacgggcacctgggaacgcgggcctaacgcgtactggagacggagtggcgcccggcactgcgcgcctcctccccggcgggagactgcgtgctaagctcagcaaagccccgctgtggagacggagccatgtcgcccattacctaatgaaacn

SEQ ID NO: 1781 - DNA, 441 bp, Homo sapiens
  misc_feature (1)...(441): n = A,T,C or G
nttcgaagaccactttcaagtgtggtggaattccttggagacaccccccctcccaaaagccatgtccatccagcccttccccccaaacctagcacaaaacggggttcacaagccatggtcggggtccgggggggacagaaatggattttcttggcaataagcggactctgggactccggctccctaccccaaactgaagcgcttccgtgaacacccccgtcctccgtagggggaggggagcaggcgggatcctgggtccctcataagcactttggttttaccgcctgcaacctcactgtgcccgccccgcaccatgccctagccccaggtctagccgggcccattgcagggggcagcacttgggggcatctccggcacttgggtgggaccaaggagatgccaccatagacctttccctcgccttcttcctccctagtccgg

SEQ ID NO: 1782 - DNA, 461 bp, Homo sapiens
atttgagaccctttgaagacgtcggaattcgcccgtgccggagcccacgtgagcctttgccaaggagagattcagagatatgagcagttttaactggttgatggacttcttcaataaggcagcgggacggtttggctgatggaagatgtttcccggaagcctgttcacgctccaccctgaaagtcccagggccgtgagagtcagccgggccgccgaggcggtgccctccaggctgcaggatgatccagggactgttttcctcagcactgtgtaggtttcagcttatgagttctgtccatgttttgtgagatttatagctaagtatttaccttttcgaatgattataaacaacatagtagttttaattttagtgtctacttgttttttgttactatatagaaatacaatcgattttcatatatttatgttgcatcctctgtgcttctaaactcactagtttt

SEQ ID NO: 1783 - DNA, 445 bp, Homo sapiens
  misc_feature (1)...(445): n = A,T,C or G
ntttgangaccnnttttgatgtcccctagtccgtgtggtggaattcgtagtgtggcagttatgacatctccaagatatcgaggttcaagaggtgatagataacatacacatgccaggtgctgtctgaagaggttccatgtatcactcatttagtgtgcccagcggagaccctgtgaggggcttctattagcaagtgacagagctggaaattcaattcaggcaagatgtcctcagatccagtcataactaccttcttttgcttctgtaactgttctgcggtttgtaaatgaaagccaatctggttcccaggatccctagaggaaagccaccctctgtgtgtatgtggtggctcccgttctccttccttgaaaggttgtaggattctaggtcaggacagcggcagaagaggccctgggcagcagcccattggtgactgtcattaggn

SEQ ID NO: 1784 - DNA, 456 bp, Homo sapiens
  misc_feature (1)...(456): n = A,T,C or G
natggagaccacattgaagngcggtggaantctgcagggcttcttccgtcgtacgatccgcatgaagctggagtacgagaagtgtgagcgcagctgcaagattcagaagaagaaccgcaacaagtgccagtactgccgcttccagaagtgcctggcactgggcatgtcacacaacggtgagagctgaccagggcaactcacgggctgctggctccacacagcctgaaaccaaggtccagggagcccttggggcagcctagagggggcacctgtagagcagtgcctggcgcacagtaagcaccatggctgttggctgttggctttgctgatctggaccttggatcttagagcctaagacctgccacttcctcagactgccagcatctaccatgggtcccaggcgtggggtagtggttacctccctatacctgagggttactcattctggcccagaag

SEQ ID NO: 1785 - DNA, 459 bp, Homo sapiens
  misc_feature (1)...(459): n = A,T,C or G
tgtgatacatttgaaggcgtcggaaancccaggcccacctgagcctgctgccctgacccgtggccccagctgagcacgcaggctttttggggttttcccagggtcggcggcagagccctccctccagggcccattgtgttcctgcattcccccatggagcacacgccagacctgaggggtgggacggacacccccaggcatggccggctgtctcctctccctgccttgggaggccttgctgggctctagctgtcctccagcactttgggccctgggcccccagaggcagtcagtacctgggtggagctcagagtccccacctgtgctcttcacaaaaaccaccagcagatgagacccacgtgcgtccctctgggcgcctcaggccccaggatccaccatcaaggtttgcttgcctgtggaggtcgcctctccccaggggagcccccaagggcggtcggt

SEQ ID NO: 1786 - DNA, 442 bp, Homo sapiens
  misc_feature (1)...(442): n = A,T,C or G
nttganncccctttgacgacccctagtccgtgtggtggaattcgctcgttttaaggaaatgcggcgtctcctgggagtgaagaggcttttgggccaccttgaggcacgacgggtgccgcttcgtttccgtgcgaccgctgcctgtttcgactgagccccttacaggaggacgtggcgggggcagacgggcgcagcctcccgccctctccgtgactcagggaaacggcctcgccgcagagcgctccctcggcagctggctgcagcactcctcccccgccgggcttcagagtgggtggtttcctacagcctagggagggggcctgaaacggggtttaaaatcttccctgccctcacacaagcccttctgactgttggagaacctgacgcgcggattctaactagaactggcactctcttcgggtgttagatattaactcaaagg

SEQ ID NO: 1787 - DNA, 438 bp, Homo sapiens
  misc_feature (1)...(438): n = A,T,C or G
nttgaagaccctttngaagcccggnggaattccgaaagaagccttcaggccagccaagactcggaaacgtcaggttggaccccagagtggtgaggtcaggaaggaggccccgagggatgagaccaaggctgacactgacacagccccagcttcattccctgctcctgggtgctgtgagaactgtggaatcagcttctcaggggatggcacccaaaggcagcggctcaaaacgttgtgcaaagactgtcgagcacagagaattgccttcaaccgggaacagagaatgtttaagcgtgtgggctgtggggagtgtgcagcctgccaggtaacagaagactgtggggcctgctccacctgcctcctgcagctgccccatgatgtggcatcggggctgttctgcaagtgtgaacggagacgctgcctccggattgtggaaag

SEQ ID NO: 1788 - DNA, 557 bp, Homo sapiens
  misc_feature (1)...(557): n = A,T,C or G
gagcttctacagtgttagtatatgcgaaggccggatttggctatatcgtaaggctggacaccgacttcaaggaagagcacacanaaanannttttngaatacccctccgcanancncgttggaanncgcccaacatcttccacaaagacccagacgtgacggnggcgcccgtcttcctcctgggtttgtcatccgtcgagtatggcaagaagaaacgcagatacctaccctacaaccagcagcacctgtacttcttcctgatcggcccgccgctgctcaccctggtgaactttgaagtggaaaatctggcgtacatgctggtgtgcatgcagtgggcggtgagtggggttgcccaggaccccgggcatacggctgccgtggcaggaggtggtgcctcgggggacagtacctgcccatgaaggcaaacagggtgcacatgatttgctctgggccgccagcttctatgcccgcttcttcttatcctacctccccttctacggcgtccctggggtgctgctcttctttgttgctgtcaggtatggcagggagtggcgagg

SEQ ID NO: 1789 - DNA, 440 bp, Homo sapiens
  misc_feature (1)...(440): n = A,T,C or G
nttgaagaccattgntcagtgtggtggaattctctcctcctacaccggtctacccatctgggcccaagagctgcactcacactcctacaacgaaggacaaactgtccaggtcggagggatcacgagacacagaacctggaggggtgtgcacgctggcaggtggcctctgcggcaattgcctcaccctgaggacatcagcagtcagcctgctcagagcgggggtgctggagcgcgtgcagacacagctcttccggagcagccttcaccttctctctgggatcagtgtccggctggccgacgtggcatttgctgaccgaatgctcatagaggttgacccccacagggtcacgcaggactcggacactgccctggaaacatggatggacaagggcttttggccacaggtgtgggtgtcctgttggaggagggcttgtttggag

SEQ ID NO: 1790 - DNA, 443 bp, Homo sapiens
  misc_feature (1)...(443): n = A,T,C or G
nttgangacnntttgacgacccatagtcagtgtggtggaattcgaatgctgcagccaatgtccttcgggaaacatggttaatctataaacacacaaagctgctaaagaagattgaccatgccaaagtgaggaaacaccagaggaagttcctccaagctatccaccagttgaggagcgtcaagatggaacagaggaagctgagtgaccaagccaacactctggtggacctttccaagatgcagaatgtcatgtatgacttaatcacagaactcaatgaccggagcgaagacctggagaagcagattggcagcctggagtcgaagctggagcatctcaccgccagcttcaactccctgccgctgctcatcgccgacaccctgcgccagcagcagcagcagctcctgtctgccatcatcgaggcccggngtgtcagcgtggcagtg

SEQ ID NO: 1791 - DNA, 540 bp, Homo sapiens
  misc_feature (1)...(540): n = A,T,C or G
catccctactctgcaacgaactatactctgagacatggtagtatctgtctaaaaccacccacaccaccttaggcccaaccncnccccnnnttttgagaccatttgagngcgtggaanngcagagcgcagggcgctgagcaggacccaaagagctctntgacccagaggaacctgcaggaatggagggaggtggccaaagcagggagagttttactcagaccatatccaggtggcccgaggcagccgggatgacagctctccccaggaatcctgctgcctgctgagaaacatggtcagcaagtcccgctggaagctcctggccatgttggctctggtcctggtcgtcatggtgtggtattccatctcccgggaagacaggtacatcgagcttttttattttcccatcccagagaagaaggagccgtgcctccagggtgaggcagagagcaaggcctctaagctctttggcaactactcccgggatcagcccatcttcctgcggcttgaggattatttctgggtcaagacgccatctgcttt

SEQ ID NO: 1792 - DNA, 557 bp, Homo sapiens
  misc_feature (1)...(557): n = A,T,C or G
cgcgtctgcgntatctagcacgtcgctgtataatgggtatccagcctcttcggagacagtcttccactatctagtattacgcccccaggaaggacgnnnnnnntttgtaaaccatgagtacactacgccagngcggnnggaancacgtttctggaggaccagggtggctgggagctcatggagcaggtggagagtcaccactgcggagtggccttgctggcaagggccatggtgcagtactcctgccaggagctgtgccgcatcctctacctgctcatcccgctcctggagcgaggcgacgagaagcacaggatcacggccaccgccttcttcgtggagctcctccagatggagcaggtgcgccggatccccgaggaatactctctggggcggatggcagaaggcctgagccaccacgaccccatcatgaaggtgctgtccattcgaggcctggtcatcctggcccgcaggtctgagaagaccgccaaggtgaaggccctcctgccctccatggtgaagggcctgaagaacatggatgggatgctggtggtggaagt

SEQ ID NO: 1793 - DNA, 439 bp, Homo sapiens
  misc_feature (1)...(439): n = A,T,C or G
nttgaagaccactagtnagtctggtggaattccgagacatgtatgcagaggagcggaagaggcagcagctggagagggaccaggctacagtgacagagcagctgctgcgagaggggctccaagccagtggggacgcccagctccgaaggacacgcttgcacaaactctcggccagacgggaagagcgagtccaaggcttcctgcaggccttggaactcaagcgagctgactggctggcccgtctgggcactgcatcagcctgaatgaggctggccacctgccactttgccctgccctctgcctccagggctccactccccttccttttcttggtgaaaggcacctcctttcctgataatgaatggtgttccctttgcttggctggggagccccccaggccaggtttgctggccatagatacctttgggctgcctgggac

SEQ ID NO: 1794 - DNA, 438 bp, Homo sapiens
  misc_feature (1)...(438): n = A,T,C or G
cattgcatacctcaccaccgngnnggggaattcctgcagcagctgcatatctgaggggggtctcctttgcccgcgccgccttcgctccccgtgcttttgggtgtgtggagggcttcagcgcgcggcgcccccgcttctccgcaaccccccgccccgcgcccggactcgccccgcgccaccaagatggtcatccagaaagagaagaagagctgcgggcaggtggttgaggagtggaaggagttcgtgtggaacccgaggacgcaccagtttatgggccgcaccgggaccagctgggcctttatcctcctcttctacctcgntttttatgggttcctcaccgccatgttcaccctcaccatgtgggtgatgctgcagactgtctccgaccatacccccaagtaccaggaccgactggccacaccgggcttgatgattcgc

SEQ ID NO: 1795 - DNA, 439 bp, Homo sapiens
  misc_feature (1)...(439): n = A,T,C or G
atcgaattcatgactcactaggccgngnggtggaattcaccagacctgaggcaattcacttgccagcacagatggccaacccaccttcagattccccagtgcttccacacccgggctctgagcaaatggaaaagacttttcatttagtagacaattcacttctttttctgtgcttcccctatctgctttggcttcctaataagaaatccattcaagagctaggagatctgagggcaggcgggcagctgcagggaggagaggtgagaaaggaagcgtcttctagagacattggcccaggagctctgttctttcctaaactaagcctctgtcttcttcggcaaaccttgctttgaactctgccagtatttcattttaaagaatcccagagcgggagagagaagagaaaaaattgataagagtgaggaaattgtcctgtagt

SEQ ID NO: 1796 - DNA, 436 bp, Homo sapiens
  misc_feature (1)...(436): n = A,T,C or G
atcgaatacttcacgnccgngnggnggaattcggacaggcggcttcggggcaaagaagcgaaaaggttcttcatcccaggccccagcgttcaagaagttgaataaagaggagcttcctgtaatcccgaaggggaagcccaaatcggggcgagtgtggaaggaccgctccaagaaaagattctcccagatgcttcaggacaagcccctgcgcacatcgtggcagcggaagatgaaggaacgacaggagaggaagctggccaaggactttgcccgtcacctggaggaggagaaggagaggcgccgccaggagaagaaacagcgccgggctgagaacctgaaacgccgcctggagaatgagcggaaagcagaggtcgtccaagtgattcgaaaccccgccaagctcaagcgggcaaagaagaagcagctgcgctccatt

SEQ ID NO: 1797 - DNA, 482 bp, Homo sapiens
  misc_feature (1)...(482): n = A,T,C or G
acgcgccttcgannccttcgtagaccctagtcagtgtggtggaattccacccagagcgtgcagatctgccacataaaaagctctcaacatcatgtagacaaagcgctgaacttgattgggaagaagttcaaagagctgaacctcaccaatatctacgctcccccattgccttcactggcactgccttctctgccgatgacatcctggctcatgctgcctgatggcatcaccgtggaagtcattgtggtcaaccaggtcaatgccgggcacctgttcgtgcagcagcacacacaccctaccttgcacgcgctgcgcaggctcgaccaacagatgtacctctgttactctcagcctggaatccccaccttgcccaccccagtggaaataacggtcatctgtgccgcccctggtgcggacggggcctggtggcgagcccaagtggttgcctcctacgaggagaccaacgaagaggagattcgata

SEQ ID NO: 1798 - DNA, 260 bp, Homo sapiens
  misc_feature (1)...(260): n = A,T,C or G
gtgacagcccaaggacttctaacaataaactctctattgcaccacagactgctttgaaaatatacatgctgtagaccctctctgtacaaaaccgcacacataatacttaccaacagatttcattggttcttgagttctcccgaagcctattcatggtttatagattactaatggatgagggagctgggcacagtgggtcacgcctacgatcacagcacttcaggaggctgaagcaagcacatcactagatgtcaggagtn

SEQ ID NO: 1799 - DNA, 434 bp, Homo sapiens
  misc_feature (1)...(434): n = A,T,C or G
caagaatacctnacaccgncgggnggaattcgnggccctgagggacagcccagctctgagtctcagtcgctgatcactgccaggtaggctcaggctgccatggctccaggctccctcccctgcctaggggcaaagtccatcgggtcctgggcctcagcttcccttcccacattcctccggccccaggagcaaccccttgggctaggtctgaccccaggtgtccctctggaaggggctggctggtgccctatttccagccaccccagcagctagggaggcaaagcaggctgcagtcagtccctcaagccagcgttgcatgtttgggatggtggctcctgttgtcttgcgctctgggaagtcagatgtcatttcaggcctgcagactcatcctgcccttgccatcctcccatcgatgtgccacgtgggtgtcacat

SEQ ID NO: 1800 - DNA, 509 bp, Homo sapiens
  misc_feature (1)...(509): n = A,T,C or G
gagcggggnnngccccttagagaccctatgcagagtggaggaccttggagactaacatgggaatcatcgctggagtggcgtttggaatcgcattctcccagttaattggcatgctgctggcctgctgtctgtcccggttcatcacggccaatcagtatgagatggtgtaaggagaagtctttcaagaatgacggaataagagacctgttttaaaaaggaactgcagcaatctttgaaagacttccaaagaatgttagagcacagtacataatacacttgccctgctccctctaccccttaccccacaacgtgcaactgacactcccacccagtctctgctccacctttcagcccacgtcacgtgtagtgtccattttgtgaagccctgttgtgccacagagtgtagccaggtccccctgcagctagtcctagtgaacctcaccccgaggccctgcatgggccagcccctccatctgtacttggtccaactgcaactcatcatcggtgac

SEQ ID NO: 1801 - DNA, 507 bp, Homo sapiens
  misc_feature (1)...(507): n = A,T,C or G
ggggttnaggggcatcgaaccatagcagtaatgagaccttccgcagngtcgnggaacccgaaactatttggtgcacttcctcttattttagagctcccaaagtgtagctccagaatcgttaagggatatgctcagtgtcacagccagcctgtggatctcagtcccaacactcacccttgtgctactgagtcagctctaagaaaatctgccaaaagtaggccgagggctggttttttgttttgttttgtttgtttgatacagggtcttcactctgttgcccaggctggagtatatcatggctcactgcaaccttgacttgggctcaagcgatccgctcaagtagctggaactactctcaagtagctctcaagagcctctcgagtggctggaactacaggcgtgcaccaccacagctggttaatttttaaaattttttgtagagacggtggaggaggttctcactgtgactcagtgtgtgcccgacagcagagcccacaccactccagt

SEQ ID NO: 1802 - DNA, 452 bp, Homo sapiens
  misc_feature (1)...(452): n = A,T,C or G
nctcgagactgcagacagtgcggnggacctcgttcatttctgtcactataaatatatatgtcctcaaaagcatttatatttatggaatgatcttgttcagaacccacgttttataggtttaggttgtaggatcattcattcaagcaactttgccagcacaacgtagaagtttcagattattttagatagttatgcctattactatgctatgggcgaggggttggggagcgaggcagcatctcagaataaaatttcaggccaggcacggtggctcatgtctgtaattccaacactttgggagaccaacgtgggaagattgcttgaggccaggagttccagaccagcctggggaatgtagtgagacctcgtctctacataaaatgttctaaaaattaggtcgggtgctgtggctcatgcctgtaatcccagcactctgggaagcccaagtgggn

SEQ ID NO: 1803 - DNA, 471 bp, Homo sapiens
  misc_feature (1)...(471): n = A,T,C or G
nttgaatccctttccagggcgggatttatacttgcttagacgattggccattctaaagttggtgagtttgtcaagcaactatcgacttgatcagttcagccaagcaactgacaaatcaaaaacccacttgtcagttcagtaaaataatttggtcaaacaacagtctattgcattgatttataaatagttgtcagttcacatagcaatttaatcaagtaatcattaattagttaccccctatatataaatatatgtaatcaatttcttcaaatagcttgcttacatgataatcaattagccaaccatgagtcatttagaatagtgataaatagaatacacagaatagtgatgaaattcaatttaaaaaatcacgttagcctccaaaccatttaattcaaatgaacccatcaactggatgccaactctggcgaatgtaggacctctgagtggctgtataattgntaattcana

SEQ ID NO: 1804 - DNA, 436 bp, Homo sapiens
  misc_feature (1)...(436): n = A,T,C or G
catcgacttacacctcnnccgngnggnggaattcatctgggttccttgggaacttaatgcggggtggacactgcaggccaaaagcagttctgtctgcacagggggcctctgggcctggaaagcggggacaggagcccagagagtctgctgcctccgatgctgcttcagccccctcaagaaagtgtggaacctgcagggcctctagatgtgctgggccccagtctccaagggcgagaatggaccctgatggacttggacatggagctgtccttggtaagaagtgggtcggggagggcagaggccaggggtggctgagtcaagccctctggtccatagctgttctctgtgagccaaagccgtgtctctagaagaattgtcacagtgatttcccagctgtccccctcagctgctaggtcccctccccagctgctccctg

SEQ ID NO: 1805 - DNA, 480 bp, Homo sapiens
agcgcccttcgagtcttattgagtgcggtggaattcctcccagctagaagtcctgtccccactctcctggcctgacaagatgagctctcctgggaccttgctctagggcactctgcctctaccctaggacactggaatgccctgggagccccctccctgcaaccagcctgagttcagccccacggacaaagggacacacagcccccaatggagaccattgtaagtggtggggctgggagaggaggaacagaaggaaagccatagcgctctcttgccccttggcatgtaccccaaggcctgatggccactgggctcagcctgtcccccactcctgcctgcttcccggagagctgccccccacacgtgcagcccgggctgcctccagggtctggctgagtgggatcaggtggccctccaactcagcacaggaaataagtagaaacatttcagcaggccacctcccctcatcttccccgccct

SEQ ID NO: 1806 - DNA, 485 bp, Homo sapiens
  misc_feature (1)...(485): n = A,T,C or G
ggaaaatgcnngggtnnnnaaaactgagatcangctgnnggctgcgcaanacnggagaggagaggacaagccccagggaccctttatccgacttccttccacctgggggactccctccacgggcccttgctttaagggcaaatggcgagggcaccagaacacagggaggccatgccggaggtccctgctgcaaccatgcggccccccagctcactcccagcagccaagacgaaggggggcctgggctccccctagggcaggcgcctctgattctctccaccgagaggcacctcccatgccggcctcttcctggggtgactcccagaaccttcttggacccatgaacatttcaatctggggtggggccttccctgggcatccaagtggtgggaatctgtccctagcccctagaactcctggagggctgggcccacctctgtctgcatcccgtccccattccccgccccgggtggcaggggctggag

SEQ ID NO: 1807 - DNA, 492 bp, Homo sapiens
  misc_feature (1)...(492): n = A,T,C or G
ntttagaataccccttngnagngnggnggannttttgagntcccctagtccagagtggtggaattccccccttgttcactcagctccagccatcctggcctcctttctgttcctcaaatacaccagacacatccccacctccaagacttggtcccggctgtctgcctgcaggtcttcacaaggccagctccccatcctttggtctcagcctagctgtcacctcctcagagaggtggtccctggccaccctatgcacaagaggccccccagtccctctcctgtgcctccacctgaaattaatacctgggtcatttctgcctgcaggggcgtttgtggtctgaattctagtgcctggcatgcagtaggtactcacacagctgtttgattcattctgcagtatcttctgaaacctttcaacagccccaagacaagggatctcaccccacattcacagatgtggaaatggacacagggagattcaataagttggcn

SEQ ID NO: 1808 - DNA, 483 bp, Homo sapiens
  misc_feature (1)...(483): n = A,T,C or G
gagccngnaattgaaccactgagaccctaggcagngtcgtggaattcgtactgctggctggagcggatgtgaacctggcatggggccgccggtacgggctggtggggcggaatgggttggggaagacaacgttactgaagatgctggccacccggagtctgcgggttccagcccacatttccctgctgcacgttgagcaagaggttgctggagatgacactcctgccctgcagagtgtgctggagagtgacagtgtgcgagaggatttgctacggagggagcgggagctcactgcccagattgctgctggcagggcggagggctctgaagctgcagagctggcagaaatctatgccaaactggaggagattgaggctgacaaggcacctgccagggcatcagtcattctcgctgggcttggctttacccctaaaatgcagcagcagcccacccgggagttctcacgtggctggaggatgaggc

SEQ ID NO: 1809 - DNA, 486 bp, Homo sapiens
  misc_feature (1)...(486): n = A,T,C or G
atggcggctcnnnnacccctaaagcctancgacgtgncgaggaacncanggatgctgctagcgtgcgtgtccctacggagctgagactgcacttcctgcgacgcccctgcatcagcagcagcgtggtcagagcgagcttctgagcggtggtgggttccatgtgatggtggagtaggagacaggtctccgcggtcagtggcgggggcgtggaccccaccgggaaccctccctgctccttccctgcctctccctgttttcgtgcccgcacttcttcgtgggcatctgggcccgagtcctccgcttgggggcggttgtgcggtcctggctactgcagcgtccgcaccccggccgggaaggctatgccaatgtccgacccgcgtccagcgtataggagcgccctggcccacagctggcggtaaaacgcgggacctgggtccctcggagccccaggggcctctgagctggagtctaggattatttttgatg

SEQ ID NO: 1810 - DNA, 226 bp, Homo sapiens
  misc_feature (1)...(226): n = A,T,C or G
cnncnngnngacccttttttgaaccaacatcttttttattatattcagaggatgtttctaagtgtatcttaatatatacattttttaggacatcttaaatctaaacacataatactatgaacatctcttgaatcctgttaaaacaaccagttaaagccacagatggctttcagggcagtatcagcacaggccagcggactctgaggactcctaatgggcggagcgg

SEQ ID NO: 1811 - DNA, 487 bp, Homo sapiens
  misc_feature (1)...(487): n = A,T,C or G
gagacggcccccnccaatgagaactgagagcatagtcaagnngcgnggaattcttcgagcgcgcgtttaagggcacaaggcctgcttcaacaccgctatcatcctaggatgagccttctacttgccaaccgtcagctgtctgggcctcccccgtgccttactcgaccctgaaagggaccactctcactgggctttcgtagtactaggacgacctggcaaaccaccggccgagaacgggccataatatttgcgcactaagctgacttcaggcttggcggacatcttcgccaggcgggaggacaagggagtgggctgagatgcgtcaacgagctcgcagcctgcacagcctactgatccagagagccccggctgggctggtcctcaagcgcgttggctccctgtggagcagcaatccggcgactgctgggaagcgagggttcgaggcgcaaattcgtcgcgcgatctccggcgcgtcggaacctgttcg

SEQ ID NO: 1812 - DNA, 484 bp, Homo sapiens
  misc_feature (1)...(484): n = A,T,C or G
agagggccncnncccctgagattgagcgccntgncccanngcgnggaattcccttgctgttgcaagactgaaggcctcagttcctcgctggctgttggctggaagctgtcctttgttctgtaccatgtgggtctctccacagcggggctcggagcatggcagctaagttagtgagggaaggtgagatggaggttttggtcttattgggtgtgaggaagcaacgtgtgtgtgtgcgcacgcccttttgtgcagtgagagagagagagagattgcacacatgtgtctctgtagtcatgtggccaggtgggactatgtaggtaacagattgctcgtgtctgatttggtacaagcatgtttgttttcctctgtgttcgtgtgagtgtttactcaacaaatgtttattggacacactcagagagagggagtgtgcacacgtgcgtgtgtgttgctatccagcacgtggaccgggctcccagaagagctg

SEQ ID NO: 1813 - DNA, 475 bp, Homo sapiens
  misc_feature (1)...(475): n = A,T,C or G
cttaggaanccctttgcaangggggaatttggatcgcctcgtccgaggtggaagtggtacccttccaggaagtgtggggccgcagctactgccgggcgctggagaggctggtggacgtcctgtccgagtaccccagcgaggtggagcacatgttcagcccatcctgtgtctccctgctgcgctgcaccggctgctgcggcgatgagaatctgcactgtgtgccggtggagacggccaatgtcaccatgcagctcctaaagatccggtctggggaccggccctcctacagggagctgacgttctctcagcacgttcgctgggaaagccagcctctgcgggagaagatgaagccggaaaggtgcggcgatgctgttccccggaggtaacccaccccttggaggagagagaccccgcacccggctcgtgtatttattaccgtcacactcttcagtgactcctgctggtacctgccctc

SEQ ID NO: 1814 - DNA, 488 bp, Homo sapiens
  misc_feature (1)...(488): n = A,T,C or G
agaacggccnnnnccaaagagnccagcnatccctagcgaagngcggtggaattcgactcatagagagataagacatatatgctcctcttttacctcagccaagagacgctagtgtatctacaagctgnccctcgtgtgtccattcttcctgcgcgatgcctccctgtctgctggacagagccactctgcactgtgatgacttactactgtgccacttctgtccagcctcactggcactattgtaagtccaaaaggtattgcaggtcccatcgccaatccacacagctgcctgaggaattgatctgaaacatcatgtccctcgtatggcatccgaggccctcataatctggccggattaactccgatctcacctcatgtgccatccttcccccaaatgtgccttcctcttcagctgtcctcctgcggggcctcctatgccttgggcaactgtgcttaccaccccagatagctggataaacaaaatagtn

SEQ ID NO: 1815 - DNA, 485 bp, Homo sapiens
  misc_feature (1)...(485): n = A,T,C or G
agagcggntnnnnnnnccctaaaanctancgacgtgngcaggaacnncccagagttagcagcggggatggagcagtagaaggaatcactgtttctcctaagagtctgaaggcctcgctgctttctgtgatggctttgcagtaagtgccgcctggcctgcatgcattggctaacaggctgcagaatggcaggaaggactcgctagagattgtcatggccagagatcataggtcacttcaggtagcaagacccctggcaaactgggcacttggcctatgtactgatttgtgggatggtggcaggggtgtggggtccttcaccctgcctgaattctctttggcttctgtgctctgtatgctgctgtccccaagagctctttcttattatggcagggagtggggattggtcctactttctttctctggaaaggaaagcctccaagactccatgtgcttgggcagcttgagaaggcgttcagcaccacgn

SEQ ID NO: 1816 - DNA, 484 bp, Homo sapiens
  misc_feature (1)...(484): n = A,T,C or G
tggaggccncnnccaatgataactgagagcatgtcaagnngcgnggaattcccgcgaggaacctctatggcgccaagagcctggagctgcccttccagggagcccatctactgatgtgggccaagatcgggcctgtgggcgccgtggtcgcctttgccatcctgattgccatcgtctgctacattacccagacacgcaggaaaaagaacgtgacagagagccccagcttctcggcaggggacaaccctcccgtcctgttcagcagcgacttccgcatctctggggcaccagagaagtacgagagcgagaggcgcctgggatctgagaggaggctgctgggccttcggggtgagcccccagagctggacctgagctattctcactcggacctggggaaacggcccaccaaggacagctacacgctgacggaggagctagctgagtatgctgaaatccgggtcaagtgaaggagctgggggcagcc

SEQ ID NO: 1817 - DNA, 431 bp, Homo sapiens
  misc_feature (1)...(431): n = A,T,C or G
nattgaggacatatgcgacgacccgcggaacactgggaggggctctgctgtccagaggctgacataaacccgacctggacttggcccggctcatgggtgggggcatgcgaggagagccaaccctgaggctgctccagattggaacttagtttccagtggactcggttgctttaaaattacttctgacaggaggcccgggcgggaagatcccttggacccagaagctccaagttacagtgagctatgatcttgccactgcactccagcctgggtgacagagcacgaccctgtttctttacttttttgagacggagtttcactcttgttgcccaggctggggtgcaatggtgtgatctcggctcaccacaacctccgtctgctgggttcaggcgattctcctgcctcggcctcccaagtagctgggattacag

SEQ ID NO: 1818 - DNA, 472 bp, Homo sapiens
  misc_feature (1)...(472): n = A,T,C or G
natcgagaccctagnnagngttgtcgaccactagccgtgtgctggaatactattaggctgacgtctaagctaaagcttgcgaagtgagcgctgatcaggattcacctgtctgtctggcagcggtcagcccgtgctcagcacgaaaccattgactagatagtactacgtgggctgggtacggtcgaagcggaacttagtttcagagaattagaaaaatcttggaggggaaggccgaagaagaaacaattcatgatcaaccttctcagagtctttgtcagtaaccccatccccatcctgacttaacagtttctatgggaacagctcagcatcttgtgactggtggattcacttcctaaattggaggccatgacttgaggcctttgcagttttctgatttaggggaaagtgaagaaagggaaagagaaggtcatgcctttgtaatcattccgatggcctgcatcaatattttggg

SEQ ID NO: 1819 - DNA, 473 bp, Homo sapiens
  misc_feature (1)...(473): n = A,T,C or G
gaaggctnccaccctaagcctgacgcatngcagaacnccgccctnnggctaaggcggggtgggggaaaaaattctgagcggagttattcggtttgtcattaaggatggggagaggaaggtgcttaggatggatcacccaagcatgcgcatcttgtcttcctgctgcaaaatgtcagatatcctggctgagggcatcaccattgttgaagacatcaacaaacggcgggaacccattcccagtctggaggccatttatttgctgagccccacggagaagtcggttcaagccctgatcaaagacttccaggggaccccgactttcacctacaaagcggcccatatcttcttcaccgacacctgccccgagcccctgttcagtgagctaagccgctctcgtctggcaaaggtggtgaagacgttgaaggagattcaccttgccttcctcccctacgaagaccaggtgttctccctcg

SEQ ID NO: 1820 - DNA, 488 bp, Homo sapiens
  misc_feature (1)...(488): n = A,T,C or G
gggagggccgnnnccaactgtgaactgncgncatacgnannngncnngcaannttnnnagccagaaccccacaccctggatatctcaccctcgatgacatccaaccaggtgtttcatcctccatcacctggtgacgtctgatcaccctgcctgcctatagcaaggaccctgtgaggtgggtttagccagacccctcagccctgatgtctccttagtcattcccacccacagaccccacgctgctcctcggcttctccaccctctgccctgctgtgttggggttgagctccatctcccccaaggccgccaggcagggccccacaccacatgatgcgccttggtgcagtcttcctcactgatgttactacgcatcatgaggaatttttttattcaacagatacaaagacctctgcttgctgggactctgcaccataaggacacattgagtaagtcttctttggtgctttgagtggagggcagtggagagg

SEQ ID NO: 1821 - DNA, 234 bp, Homo sapiens
  misc_feature (1)...(234): n = A,T,C or G
aattgnggnggcagacggngcagttactcagtaattgtttggctttaatggatccttaaccagtcttgaataaggcaggtgtgatcaagggagggttggggaggaagctgagaagcattaagctttttgcctggaagggagctctcctccccacgtggtctgacttccccagctttgactcttaaaggggtgttcaggtagactcaaagccagtctctaaagctgccacttagn

SEQ ID NO: 1822 - DNA, 472 bp, Homo sapiens
  misc_feature (1)...(472): n = A,T,C or G
agagccagaaaaaaaaanttcgagttcgtatccctgngcaggaacnccgaacttacacagccacagactcggcttgtgaactggagctgcccacccagagaaccagatataatgcctgttgaagggccaagttgcatattcagcgaggatgtcagtgtgtgggagaagcatttgttcagcctgcggttctgagaggaactgtgtgttgtgttcccataggttctcaacaggaggtgtgtagaagcggcggtgatgacaggcctggctctgaactgccacataaacaagaagtccttgtttgacaggaagcactacttctatgcagacctccctgcaggctaccaaattacccagcagaggctcccaattgctgtgaatgggagcttgatatatggcgtctgtgcagggaagaagcagagtcaggtgatccccaagacggtgaggatcaagcagatccagttggagcaagaca

SEQ ID NO: 1823 - DNA, 441 bp, Homo sapiens
  misc_feature (1)...(441): n = A,T,C or G
attgacgacctttagacgacntttagacagngnggtggaattccaaaatgctggaattacaggtgtgaaccaccacgtctggtctaaaagttcctccttaccctgtcatccttggatgattaattcatctcttggtcttacagatgcttaatgaatcgctgtccctacttcagaaattattgccagcttaaaaaaaaaaaaagctccggggagtcagttaaaacccagtattgtactcccagggtgcgtgcactgccccgactcagcctaaaaaacagacgtgtgccacacacagtgccttttgacacagcactcaccgagcgccctcaagggacagtgacggcagcttccccatggtgcccgcagtggcgaggcctcacctgtggttggggtggtgattttagagaaaggcctggaagctgcctttcaaaccaaaaatcc

SEQ ID NO: 1824 - DNA, 477 bp, Homo sapiens
  misc_feature (1)...(477): n = A,T,C or G
agaagaaaagaaaagaaaaantttcgagcttgatatccntgngnagngagctggaattcagacaatgtaaaaaaaaccctccagtttatatgtgttcaccctcattccttccagggtgcagcttagtcagtcttactctaaaactttagcctgtgatcttatttcctataacattgttcatattttaaaaacctgtgaatttttgtcgatggcatacttaatatgttgccacccattgaatgtacactttaataccatctgaggttgtagttttaaaacactgtatttctgatctataattcacatatgcttataaattcatagacttctagaaggatacataagaaagcaggtccagaggttgcttctcggaaggggcctggggagctgggagaccaggtgacagggggaagagaaacatttcactgtatattctattgtgcctttttactggtggtccatgtacatgtatggccg

SEQ ID NO: 1825 - DNA, 478 bp, Homo sapiens
  misc_feature (1)...(478): n = A,T,C or G
agaagaaagaaaagaaaaantttcgagcttcatatccagtgtgcagngagcnggaattcaagaagaattacaagagctcatggacggtagtgctggcccagtgcacggaggagaaggtgcacaccttcctggattacatcatgggtggctgccagatcagcttcacggtggccattgacttcactgcctccaatggggacccgaggagcagccagtccctgcactgcctcagtccccgacagcccaaccactacctgcaggccctgcgtgcagtgggaggcatctgccaggactatgacagtgataagcggttcccagcttttggctttggggctcgaatcccccccaacttcgaggtgtcccatgactttgctatcaactttgacccggaaaatcctgaatgtgaagagatctcaggggtcatcgcctcctaccgtcgttgcctgccccagatccagctctacggccccaccaatgg

SEQ ID NO: 1826 - DNA, 474 bp, Homo sapiens
  misc_feature (1)...(474): n = A,T,C or G
agaaagaaagacaggaanntttcgagcccgatgtccatgtggcggaattcagaagatcgtaacaacttatgacatgatgattcagtccctcaaggcgttgattgaaaatgcagatgctgtatatgaaaagatcgtacattgtcagaaggcagccatggaattccatgaacacttgcacagcataggcaccaaggaaggtttgaaggaaagaaaactacaaaaagcagtggagagctttacctggaatattaccatcttaaagggacaagcagatcttttgaaatatgctaagaatgagacattggagaacctgaaacaaatccattttgctgctgtttcatgtggactgaataaaccaggcaccgaaaatgctgatgtccagaagccacgccggagcttggaagtcatacccgaaaaagcaaacgatgaaactggagaatgaggaaacttacaataaaccattatggagtttat

SEQ ID NO: 1827 - DNA, 479 bp, Homo sapiens
gaggtggccacctgaaccctattgatggccgtgaattccagcgccattgttgtctgggctcgagtttctgccccaggttgtgtgctggaatcggggggtggctctcctgccacccatggggagcgccaggagaggagggtcatggaggatgttggggctctgaccccaggagtggggtggagggcggagcctgctgggggccctgccttcacagagatgccgcgtgctgggaaggctcttggggtcccctgagcgtcttccagggtggctggagagcacagacgcgccagggagccccctctgtgctcctcagagttcaataaatgtcgtggcccctcaaaaaaaaaaaaaaaaaaaaaaaaagcggcctttcatttttaaaggccccgttaaaccccgttgatcaccctgaatgggcctttttattggccacccttttgtggttgccccctccccggggctttctttgccctgggagg

SEQ ID NO: 1828 - DNA, 478 bp, Homo sapiens
  misc_feature (1)...(478): n = A,T,C or G
aaaatgaaaganaaggaannntttcgacctcgattnccntatgcagtgtgctggaattcgtccgggatgagcaggggctgacagaacatgtccccccacctctcatcttcagccttttctgagccgcagggcctctccactcccagactgaagggtattagaagagaagacaagggaacatttttccactgttgcgcatttgttcaacaaatgctagctgaaaagagcctctagtgacttgtcgcagactacccaatctacccaggccgggcctagaggccaatgccatggcccaagggcacagctcatggtgaggtccagctgctgggcaggaaaaggacaagaggtcaggtggctgcagaggtgatggctgggggcctgtcagacgggggccaaagacattcctcccctcgtgatccctgacccaagcgcgtggacatgcaagggactccacggagcatccactgtgtgccagccc

SEQ ID NO: 1829 - DNA, 473 bp, Homo sapiens
  misc_feature (1)...(473): n = A,T,C or G
gggtgggccgggggnnnnttcgagattcgtattccattgtggaggaactccgggactgcactgtggacatgcccatcctgaaggacctggccacctggccttctgtgaggctcagtccatgcaggagatccacgagaaagttctaaacgaagtcgtgggcgccatgatgtaccacaccttctccctcaccagggaggacctggaaaatttcaaggccctgagagtgatcgtgcaggtggccagtggctacgacaacgtggccatcaaggctgctggcgagctcgaaattgctgttgcagcatcccgtctgcagccgtggaagagacagccgactccaccaccggccacatcctcaatctgtactgggggaacaggtcgctgtaccaggcactgagggaaggcacgcgagttcagagcatggagcagattggcgaggtggcctcagtaaaggcccgcattcgtggggagatatt

SEQ ID NO: 1830 - DNA, 475 bp, Homo sapiens
  misc_feature (1)...(475): n = A,T,C or G
agcagggccaggggnaatttcgagcttgatatccctagtgcagngagctggaattccacagctgtaatcccatcacttggaggctgaggcaggagaaatacgtgaagccaggagtttgagaccagcctgggcaatataacaagacccacatctctacaaagagaaaaaaaatgtaaaaaaaagaagctttaaacctaagacggcagaattcaagactgttgtccttgagaacttcctggctctggaaaaagctcagtgagttagtctcatcctgtcgttagctctgttttttaggggctcactttgtcttcacgacagtaccttgcaccattctcatgggtatcccagggtggtgcaaggcagttttctgcacttcccagaatgccctgtcagctggcttctgggtaggttctgcaaattggaggcccctgtgaaagatcgctgtggggtgggaggaagaagctttatctgcctg

SEQ ID NO: 1831 - DNA, 542 bp, Homo sapiens
  misc_feature (1)...(542): n = A,T,C or G
cgtgacgattgtctgatcgatctctactgtgtaagtatcgtccttcactttctaagcagtttctctccattacacgcacanaaccacntttgatgacattagnccttgaggtcgatttcgaacattaagagatgttcaagatcaaacttccatagcttcatccactgaatttgatggcatccacctttttctccatttgctaaaatttggtgcagtttgaggttatgtgaataggctggctgtgcctgtagagctcttgtgtttttagtgatgacatgaaatacaaagaacaagctatttccaggaatgtgttctgtattttacatcccagtgtaccctttattttattattaactaattaactatgagatttttaaaaaatggggccgctgatgtgcaatatcaaagtgaacttgtgagtattttgtgtgtgttgatctcagttgtttcttcattgttgctgtttctggatccagccatgtgtgcgcttgtgtggacctgaggctgctttctgttcccaaagcttgacctgcgtacagaga

SEQ ID NO: 1832 - DNA, 473 bp, Homo sapiens
  misc_feature (1)...(473): n = A,T,C or G
agaagggccgganaaatttggaaactgatatccntgtgcagtgtgctggaattcgaaaaccaagcagggggtcaccgaggcggcggagaagaccaaggagggcgtcctctacgtcggaagcaagacccgagaaggtgtggtacaaggtgtggcttcagtggctgaaaaaaccaaggaacaggcctcacatctgggaggagctgtgttctctggggcagggaacatcgcagcagccacaggactggtgaagagggaggaattccctactgatctgaagccagaggaagtggcccaggaagctgctgaagaaccactgattgagcccctgatggagccagaaggggagagttatgaggacccaccccaggaggaatatcaggagtatgagccagaggcgtaggggcccaggagagcccccaccagcagcacaattctgtccctgtccctgcctcgccccccagagccagggctgt

SEQ ID NO: 1833 - DNA, 489 bp, Homo sapiens
  misc_feature (1)...(489): n = A,T,C or G
gaggctannnnnattgagnatcgtagtccctagtcagtgtggtggaattcccaattatcccacctgcagtgacatccagcccctctgtctacccaaaccctgtgtgttttccaagacctagtttatatccatccatgaatcctcagtagaaaactccaaagcacttcttacagcagtgattcacaactatttccagtagcaacatatctgagagataacacatgttcttttttttttgagactgagtctcgctccgtcgcccaggctggagtgcaggggcacgatctcggctcactgcaagcttcaccttccgggttcacgccattctcctgcctcagcctcccaagtagctgggactacaggcacctgccaccacgcccagctaatttttttgtatttttagaaaagacggggcttcactgtgttagccaggacggtctcgatctcctgacctcgtgatccacccacctcagcctcccaaagggctgg

SEQ ID NO: 1834 - DNA, 483 bp, Homo sapiens
  misc_feature (1)...(483): n = A,T,C or G
cgcgcgtagcnccaacggaaaccctcantganggcactcgaaccgagcgccgggcatcgcaggcgccctcctcgggcctcccggccgggggcgccaacgggtagagcccggggggcggcgccccctttccgggcagcagcggctcttccgccctgctgcaggcggaggtgctggatctggacgaggacgaggacgacctggaggtgttcagcaaggatgcctcattgatggacatgaactccttcagccctatgatgccaacatcccctttatcaatgataaaccaaatcaagtttgaggatgaaccagatttaaaggatctcttcatcacagttgatgaacctgaaagtcatgttactacaatagaaactttcattacgtataggattattactaagacatctcgtggggaatttgacttcagtgaatttgaagttaggagacgatatcaagatttcctttggttgaaaggaaactggagag

SEQ ID NO: 1835 - DNA, 488 bp, Homo sapiens
  misc_feature (1)...(488): n = A,T,C or G
ngagcgtggnnnncaatgagaccataactgagagcactggccagngcgnggaattcctatctccttcctgctgtaatcagtgaccagacagaacctccactcaatacaccagaaaacagagagtatcttgcagaaattatgtttgaatcatttaacgtaccaggactctacattgcagttcaggcagtgctggccttggcggcatcttggacatctcgacaagtgggtgaacgtacgttaacggggatagtcattgacagcggagatggagtcacccatgttatcccagtggcagaaggttatgtaattggaagctgcatcaaacacatcccgattgcaggtagagatattacgtatttcattcaacagctgctaagggagagggaggtgggaatccctcctgagcagtcactggagaccgcanaagccattaaggagaaatactgttacatttgccccgatatagtcaaggaatttgccaagtatga

SEQ ID NO: 1836 - DNA, 474 bp, Homo sapiens
  misc_feature (1)...(474): n = A,T,C or G
agtggccnnnnggccccccactgagaccctatagagggcctgagttcagccacaggactactgagggacggcgagttggtggcttggtgttcatggtggagacttggttctttacgcagagcaggctaaaggcgtgttttttctgctctgtttctaattcatgttaagtagttggtcatcactttggtcagagctgctgctgaagctctcttaactgtgagtcactggacgttggcagggagttggctgtgagattgtaggtgctcaagtgtttctgttcgggactgagtgtgaatctgtaaaaggggaaaatcctcgcaagaggtctacgagaaggatgagggcccaagtctagggtctaaacaaagccaggagtggtttggtatattactgagtgcaatcattgcgtgccattcctgcactcaatgtattgtgtaaaatccttaggtaaaatgggataaacccacagctggc

SEQ ID NO: 1837 - DNA, 478 bp, Homo sapiens
  misc_feature (1)...(478): n = A,T,C or G
agcggttccccgggttccaaatcgatgagtactngacgnaccccgaaancaaggaaagtnctgntgatttagctggcttgtaacccacacgccttttcacttttgttgttgcattaataacggctgtggtttttcacacggaaggggggcagactgggttaggtccctgttccgccaacctggctgtttcccagtttcagttaacttagtggtttactagagccccacacctttctctttcatatggccatgatccaggaggtaatccgtcacctcccctccactagagtgctccatggccagggataatccgtcacctcccctccaccagagtgctccatggccaggggtaatcctcacctctcctccgctagagtgttccatggccatgcagtgttttctgggtccagagcacctcaaacaatttcagtgttgtggtgactcagggccttcaccatacagacttgacagcatagtc

SEQ ID NO: 1838 - DNA, 483 bp, Homo sapiens
  misc_feature (1)...(483): n = A,T,C or G
cgggggggccnnnaattgaganccaactgagaccatatgaagngngccggaattccaggaagcgtgggctcccttctcagcgttagccgtcatcatctactggtgtgcacacagctccccattcgggagattccagcacgtgtctcggggcattctagtcatgaacgccagccccacaagggcaggattttcacctgtcttgttcacttctgtatctccagtgcctaggacactggcacataataggcactcaataaatgtttgctgaatgaatgaacgagtgaatgaatgcttggatggatgtgcctgaacatctgcacacgttcctagtgaacacattcaattttatgagtctgtctagcatgtgtctagatcctggtgggagcattggagagcggctcagcatcatccctgtcctgtgtgcatccacatctgggaggcgtatccccgccaccgcatgtgcacattctgaaggatgcatga

SEQ ID NO: 1839 - DNA, 459 bp, Homo sapiens
  misc_feature (1)...(459): n = A,T,C or G
catcgagaccactgatagangcgcggtgaaaacggccaactccagcaatggcttttgcaaatctgcggaaagtgctcatcagtgacagcctggacccttgctgccggaagatcttgcaagatggagggctgcaggtggtggaaaagcacaaccttatcacatacgcgctgatagcggagctgcaggactgtgaaggccttattgttcgctctgccaccaaggtgaccgctgatgtcatcaacgcagctgagaaactccaggtggtgggcagggctggcacaggtgtggacaatgtggatctggaggccgcaacaaggaagggcatcttggttatgaacacccccaatgggaacagcctcagtgccgcagaactcacttgtggaatgatcatgtgcctggccaggcagattccccaggcgacggcttctatgaaggacggcaaatgggagcggaagaagt

SEQ ID NO: 1840 - DNA, 459 bp, Homo sapiens
  misc_feature (1)...(459): n = A,T,C or G
catgagcccctaattgagactttaggccgngcggtggaattctactgggagatgtactcaaagatcagccccaggaagcacatggaatcgattctgtgattgtagtggacaatgtccctcaggtgggacccgaccgacttgagaaacttacatatgtcatccacgagatcttttccaagttggggaaaatcacaaatgatttttatcctgaagaggatgggaagacaaaagggtatattttcctggagtacgcgtcccctgcccacgctgtggatgctgtgaagaacgccgacggctacaagcttgacaagcagcacacattccgggtcaacctctttacggattttgacaagtatatgacgatcagtgacgagtgggatattccagagaaacagcctttcaaagacctggggaacttacgttactggcttgaagaggcagaatgcagagatcaatacn

SEQ ID NO: 1841 - DNA, 543 bp, Homo sapiens
  misc_feature (1)...(543): n = A,T,C or G
agactcggcatgctgaagattacgttgatactgtatgtatcttaanccgaaatacatacagaacaccagggagaacaccccacccccnaatggagaccatcgtagtaagccatcaaaccngcaaaggggccgcagcacgggcccctgagcaggngcagcggctcatcttctgcttgggaaaggtgtactatgacctggtgaaggagcggagcagccaggacctggaggagaaagtggccatcacgcgcctggagcagatctctccattccccttcgacctgatcaagcaggaggcagagaagtacccaggtgcggagctggcctggtgtcaggaggagcacaagaacatgggctactatgactacatcagcccacgcttcatgaccatcctgaggcgcgcacggcccatatggtatgttggccgggacccagcggctgcaccagccacaggaaacaggaacactcacctggtgtcactgaagaagtttctggatactgccttcaatctccaggcctttgagggcaagacattttagagctggg

SEQ ID NO: 1842 - DNA, 455 bp, Homo sapiens
  misc_feature (1)...(455): n = A,T,C or G
catgagaccctcattgangnccntgaanancaacaanggctttcccaggttgaaattgtaacacacactggaccccatagacgtctgtggatgggtccacagttccagttcaaaaccatccatccctcaggccataccacagtgatctcatccagttcatctgtgttgcagtctcatggtccgagtgacacgccacagcctcttttggattttgatacagatgatcttgatctcaacagtctcaggatccagccagtccgctctgaccccgtcagcatgccagggtcatcccgtccagtctctgatcgaaggggagtttccacagtgattgatgctgcctcaggtacctttgacaggagcgtgaccctgctggaggtgtgcgggagctggcctgagggcttcgggctgcggcacatgtcctccatggagcacacggaggagggcctccgggagcg

SEQ ID NO: 1843 - DNA, 484 bp, Homo sapiens
  misc_feature (1)...(484): n = A,T,C or G
ggggtgagcggntcccnccccaactgagaactgagtgccntncgaggaanccctttaagttagaagaaactgaggctcagagagatgaaatcacttgtccaagatcacacagctgggagggcagagccaggatctggaccccaggtggtcctggcccctgtgctgtgagcgttctgtttgtcacagaggactctgctccctggtgctactcccgtctctggccacagctcaaaggtcagccgtgtgcctggtcgtgggcccccgataagatgagcagggctgtgttgggctgtgtcacggtggaggtcagccgtgtgcctggtcgtgggccccccgataagatgagcagggctgtattgggctgtgtcacggtcggggtcagccgtgtgcctggtcatgggcctcccgatgagatgagcagggctgtgtcgggctgtgtcagagcattcagaccctcgctgagatgagcaggtctgcgctgggc

SEQ ID NO: 1844 - DNA, 499 bp, Homo sapiens
  misc_feature (1)...(499): n = A,T,C or G
cggaaaaaggggnnnnnnnnnnaatcgagancctttncanatggaggactntgaggcggacaacctggcccagcangagcaggacgtcctctaccgccgcctgaagctcttcacccatctgcggcaggacctagagagggttagaaatctgtgctacatggtgacaaggcgcgagagaacgaaacacgccatctgcaaactccaggagcagatattccacctgcagatgaaacttattgaacaggatctgtgtcgagagcggtctgggaggagagcaaagggcaagaagagtgactcgaagaggaagggctgcgagggctccaagggcagcactgagaagaaagagaaagtgaaggcggggcctgactcagtcctggggcagctgggcctgtccacctcattccccatcgatggcaccttcttcaacagctggctggcacagtcggtgcagatcacagcagagaacatggccatgagcgagtggccactgaacaatggn

SEQ ID NO: 1845 - DNA, 465 bp, Homo sapiens
  misc_feature (1)...(465): n = A,T,C or G
catcgacccccctngatggatgaccactaggccagngcggnggaattctgacgccgcagagctgggcggaaggccgctgccagctcgcgggctatcttgaccagttccagtaggtccgagacccgagctttatatagccctcgcggccggctgcacattgagaggttcgctgcctctccgcccctctccctgctagccgcataaacaaaaaggctgcgcgtgaaggcgcaccgggctgagccccgggtgtgaacgcgtgcaactcccaaatggcccgggacagggttttgtcgagcgaatgttaatcgcccttcgacacatggctgcggagaaaaacaacattcgcccgagcagccaatttccgtgtgaagaggccaggaggagatggaattaagcgagtctacacgttttgtggatttctgcaaaaaggccaagtgactggttaattgcttgattcgctggaga

SEQ ID NO: 1846 - DNA, 223 bp, Homo sapiens
  misc_feature (1)...(223): n = A,T,C or G
annncactgaagcacagaggaagagactgagccttgagcagaggaacctatacaaagaagtgatgctggaaaaactcaggaatctggtctcattggaatcaaagccagaagtccatacctgcccttcttgccctctggcctttggcagtcagcagttcctcagccaagatgagctacacaaacatcctattccaggtttccatgcaggaaatcaactccaccc

SEQ ID NO: 1847 - DNA, 506 bp, Homo sapiens
  misc_feature (1)...(506): n = A,T,C or G
tggataaacggggnncncgnnnttttgagaccccttnnncgnatcgaggaccntaggaagngnggtggaattcccaaagaggattcccaagcaggtgcattcacgggcattggtgaaaggcagcaggggcttgtcatcccgcttctgaaaaatgggcaactctccactgatgcctgtgttcccccatgggggagagtgggggtggagagggcaggaccgccaaaccagcctgccggggaaggtgggggacaagggcaggagtgcagcctgggcctgcttcctgaggccaacagatgccacccctgcaatcccagcactttgggaggtcgaagtgggcagatcgcctgaggccaggagtttgagatcagcctgggcaacacagtgagatcctgtccctactaaaaaaattttttaaaattgagagagagacagatgtctgccggccagcctcacacagcgggccaggccggagaaagcaatggaggaacagaaaggccctgagccct

SEQ ID NO: 1848 - DNA, 491 bp, Homo sapiens
  misc_feature (1)...(491): n = A,T,C or G
cggcatcnnnngnnntttgagaccctagtccgaatgngagaacctgagaggccatgtcgcagtccccctgccgtgggagaggcaacgcggaaatgtatagacccagtgctcagccagaaacagggccagcaagcggcagtgaacggaggcagcccggggctcgtcagggtgggcagagccatggcccaggggttgaaaacccccgagttccccatgagacttggctggcccttcccacccctgggcctcagtctccccatcttgtgtgatgaggagagaccctgaggacagaggtcttcaggctgtgagtctcaacaggaactgagatccccaagggagacagagctgcaggtcacctcccctacctgcttctcagcaggacccaggaggcctggcccagctcctggtggaccccaagcagccagagcctactgctgccatctgaagacctcatctgagcccactttccaccaagcgcccacccaggctga

SEQ ID NO: 1849 - DNA, 465 bp, Homo sapiens
  misc_feature (1)...(465): n = A,T,C or G
catcgagccccctnatagtagaccattaggccagngcggnggaattcctttatttttattaaattaaaagctacagtctggcagcgattccttaacagggtaaggaggttcctcacaggggtcagagaagagcggagaaagacagactgacggagactgagacacaggagagaaaggacaaggttaagggagaactgtatctgatgaacacacacagccggctccatggcgggtgacggggagctcacatcagcccaatttctcctccccggcacccgaagttcagcggtggagcagtatgtgggggcggttaggaatcaagagaccctcccttccccaccctaggtcctttctcggcttggtcgtggagcacagcacataccagaaaaagccaagggcaatggaggggcagggaaaccgggagtatatgtacacggggaggggagaacagagccttggaggtcg

SEQ ID NO: 1850 - DNA, 468 bp, Homo sapiens
  misc_feature (1)...(468): n = A,T,C or G
caatgagcgccnctngatggagcaccactaggacagngcggnggaantcccagaaaaccaagtgtccggatggcaggggccagcggccaccatgttcatgggacacccagagcagaagctagggcagagccaatgctgagggagcctcgacttccggcgccgccgccctctcccggcatccgcagagccagctgacgccctccctgcctcccagggcagctggccagcctcgggcagcgcggccccctcctcccaggggagagtagaagtcgcacacgcagcagagcagacctgatgtcccggtgcttcctggcccctcagctccagtgattcacgcccgcctggagaagaatcagagctcagctcatgactcacccatggcaggcggagggtcccagaggggctgagtcctcaaatccggctgaggcagcagctggcaccatcagagccaggagagtgacaacaggt

SEQ ID NO: 1851 - DNA, 474 bp, Homo sapiens
  misc_feature (1)...(474): n = A,T,C or G
gtgccggaannccaaagctgatcctccgannncaactgaancatcgannnncnnnaannnnngggatgccctgcgctctaccgcactgatgactacctggaccagccctgccttgaaaccgtcggcgcatcaagttgtacagggagaccctggcccggcatggcacgagcccatatttatacccgctctacggcttgggcgagctgccccagggttttgcaagattgagtgccatctatggggggacatatatgctgaacaaacctgtggatgacatcatcatggagaacggcaaggtggtgggcgtgaagtctgagggagaggtggcccgctgcaagcagctgatctgtgaccccagctacatcccggaccgtgtgcggaaagctggccaggttatccgcatcatctgtatccttagccaccccatcaagaacaccaacgacgccaactcctgccaaataatcatcccccaga

SEQ ID NO: 1852 - DNA, 493 bp, Homo sapiens
  misc_feature (1)...(493): n = A,T,C or G
ggggaannncggggaattggancatannnanaatcgagaccctagtcagtgtggtggaattcctccgcggcacttctgccgctgcgcctgcttctgcaccgataacttgtacgtggcgcgctatgggctgcacgtgcgcttccgaggcgagcagcagctgcgccgggactacggcccgatcctgcgcagccgaggctgtgttagcgccaaggacttccagcagctgttagcagagcttgagcaggaggtggagcggcggcagcggctggggcaggagtcagcagctaggaaagccctcatcgcgagttcctaccacccggcacggcctgaggtctacgactcactgcaggatgcagctctggcccccgagttcctggccgtgactgagtacagcgtgtccccagacgcagacctcaagggccttctccagcggctggagacagtatcggaggagaagcgcatctaccgggtgcctgttttcacagcgcccttn

SEQ ID NO: 1853 - DNA, 425 bp, Homo sapiens
  misc_feature (1)...(425): n = A,T,C or G
attgangacccctatggcangcggtggaattcctgtcctgtggggacaaagggatcaggtgggcaggtcagaaagggggcaagagcactgcccaggcttaccgcagcaccctggtggcctcaccctctcgggacagcgactccagaatggtgttgcaagtagaggcaatctccgagatggcctgccactcgtcctccagggtcccactgcccgcctccgacatgactgtgggcacaaggagcaggctgagctagggaagcccaggagcaccccccaacccctcccctgctctcctgggtccagactcactcctgctgatggagttccgcagagacaaggtacgtggcagaaaggaggccctcagctccggcgccgggttgcccttgtcctcagagccactgggactgcctggcctgtcctgtgcc

SEQ ID NO: 1854 - DNA, 485 bp, Homo sapiens
  misc_feature (1)...(485): n = A,T,C or G
agatggtcnnnnnnnagggnncccactggagacccccatagagngcccatgcgnaaccgccnggctgaggattacggcgtgctgaaaacagatgagggcattgcctacaggggcctttttatcatctatggcaagggtgtccttcgccagatcactgttaatgatttgcctgtgggacgctccgtggatgaggctctgcggctggtccaggccttccagtacacagacgagcatggggaagtttgtcccgctggctggaagcctggcagtgacacgattaagcccaacgtggatgacagcaaggaatatttctccaaacacaattaggctggctaacggatagtgagcttgtgcccctgcctaggtgcctgtgctgggtgtccacctgtgcccccacctgggtgccctatgctgacccaggaaaggccagacctgcccctccaaactccacagtatgggaccctggagggctaggccaaggcctt

SEQ ID NO: 1855 - DNA, 474 bp, Homo sapiens
  misc_feature (1)...(474): n = A,T,C or G
gaggccnnnnnaggccccatgagaccccaaagagaccctcggaangcgnagccggggcctggagatgggagcaggtgagacgcanagccccagtactgagtttaggaagccttcttacagggccccttgcccaccccaagtccgtggctgaaacacggagcgggtgctgcttcaacccgcatttaatgctgtgtaagtagcgataaccacgtacgagtctgtctggttgatttctaatgtgactcctctggtatttcctcctggtaataaatacaagtgtgacctttcagattgcatatctcaaaagtaacattgctaatgttttataataaaatatattatgtgtgttttggttggtgaaaataatacagactacattttataagatgagaaataaagcaaaaaaagaaaaaaaaaaaaaaaacaatacaaaaaaaaaaaaatgaaaacccgcccttctaataaaaaggcccc

SEQ ID NO: 1856 - DNA, 483 bp, Homo sapiens
  misc_feature (1)...(483): n = A,T,C or G
gggggattgagaccctannccanaatcgagaactatatcagtgtggtggaattccgacatggtggccctgctggagcactatgaccatgttccgggtgaccccgagttcacgcagctgtcccatgccgtgctgctggagctggtcatcgacaggtgagggccttgaccaagcctggtcatctcaggatgccagcacctgcccctgaaaccagtggcagctacggaagcccctccagaggcaggggtgatgttggaacaacagtcaccattgagtacctgtcggggccacatcagctcaggactttcaaagtggtcttaccttttatcatgtgtcttgtgttgtgtgctgtgctatcctgtgttaggctctcctagcctgtccacctcaggcagttgatttccattccatcggtctctgtggcaccacagctgtgaccacggtctctcagcctctcccagctgcctcctcagggtttctatgtt

SEQ ID NO: 1857 - DNA, 195 bp, Homo sapiens
  misc_feature (1)...(195): n = A,T,C or G
ctcgcaaggagcangctgagctagggaagcccaggagcaccccccaacccctcccctgctctcctgggtccagactcactcctgctgatggagttccgcagagacaaggtacgtggcagaaaggaggccctcagctccggcgccgggttgcccttgtcctcagagccactgggactgcctggcctgtcctgtgcc

SEQ ID NO: 1858 - DNA, 430 bp, Homo sapiens
  misc_feature (1)...(430): n = A,T,C or G
cattgactacacctcgnccgngnggnggaattcgcatacaggcgtgttgggatgactgggttttgctggtcttcaatctgtaacgttggaattgttttcactaccctgcctcttcttcattctgcctgattctccagaggaagaagaggtggataagatgatggaacagaagatgaaggaagaacaggagagaaggaagaaaaaggagatggaagagagaatgtcattagaggagaccaaggaacaagtaagcagtcccttgaactttcccagctttgatttcttcgtttgactctccctgccttcatcttcttttcccaccccatcccagattctgaagttggaggagaagcttttggctctacaggaagagaagcaccagcttttcctgcagctcaagaaagttttacatgaggaagaaaaacggagg

SEQ ID NO: 1859 - DNA, 488 bp, Homo sapiens
  misc_feature (1)...(488): n = A,T,C or G
cggcgggtnnattggaactgagaccctaggcagngtgctggaattcgcccagtcggttgagaggctgaggtgggaggattgctgaagcccaggaggttgaggctgcagtgaggtatggtggtgccgctgccctccagcctgggtgacacagcaagatcctgtctctgaaaaaaaataatcatcaggtatgccaagaagcaaggattatatcccaggaagaggagaaaaaccaatgaaatgaaatgacaaagatagaactaataaagagattaaaacacttactacaactatttggtatgttcaagaaggtaaatgaaaatatgagcatgttatgggtaagtatgatggctcacacctgtaatcccggcactttgggaggctgaggcgggcgaatcatgaggtcaggagtttgagaccagcctgaccagcagggtgaggccccgtttctactaaaaatactaaagttggctgggcgtggtgtgcacgcc

SEQ ID NO: 1860 - DNA, 463 bp, Homo sapiens
  misc_feature (1)...(463): n = A,T,C or G
catggagactctnattgaaagcccnctctacccaagcagccccgccctcttcccctcaaccccggcccaggccgccctggccgcccgcctgtcactgcagccgcccctgccctgtgccgtgctgcgctcacctgcctccccagccagccgctgacctctcggctttcacttgggcagagggagccatttggtggcgcctgcttgtcttctttggttctgggaggggtgagggatgggggtcctgtacacaaccacccactagttctcttctccagccaagaggaataaagttttgcttccattcaaaaaaaaaaaaaaaaaaaaaaaaggcgccctttgaattaaaggggccccttaaaaccccgtgaaacccccgagaggggccttttatgggcccccctttgtgtgggcgccccccccccgggcctttcttggaccgggagggggccctctcccattgcct

SEQ ID NO: 1861 - DNA, 491 bp, Homo sapiens
  misc_feature (1)...(491): n = A,T,C or G
agagagtccngcaaatcgaganccaatcgagagccctagggcagngncgnggaactcctcacccaacactgggactcgcgcggcctgtgtggtgccaccctgctggtgcctcccaagttttgaaaggctttcctcagcacctgggacccaacagagaccagcttctagcatctaaggaggccgttcatctgtgacgaaggcctgaagcacaggattaggactgaagcgatgatgtcctcttccctacttccccttggggctccctgtgtcagggcacagactaggtcttgtggctggtctggcttgcggcgcgaggatggttctctctggtcatagcccgaagtctcatggcagtcccaaaggaggcttacaactcctgcatcacaagaaaaaggaagccactgccagctggggggatctgcagctcccagaagctccgtgagcctcagccacccctcagactgggttcctctccaagctcgccctctggn

SEQ ID NO: 1862 - DNA, 429 bp, Homo sapiens
  misc_feature (1)...(429): n = A,T,C or G
atcgcattgatgactcctagaccgngtggtggaattcggatggcatggtgggggtccgagtgctggaagagcagctaaaaagtgtccgggagaagtgggcccaggagcccctgctgcagccgctgagcctgcgcgtggggatgctgggggagaagctggaggctgccatccagagatccctccactacctcaagctgagtgatcccaagtacctaagagagttccagctgaccctccagcccgggttttggaagctcccacatgcctggatccacactgatgcctccttggtgtaccccacgttcgggccccaggactcattctcagaggagagaagtgacgtgtgcctggtgcagctgctgggaaccgggacggacagcagcgagccctgcggcctctcagacctctgcaggagcctcatgaccaagc

SEQ ID NO: 1863 - DNA, 482 bp, Homo sapiens
  misc_feature (1)...(482): n = A,T,C or G
nccttggatagcctatgcagtgtcgnggaattgatcatcttgctcaaaacgctgcagcagcagaccttcaagatccgcatggagcctgacgagacggtgaaggtgctaaaggagaagatagaagctgagaagggtcgtgatgccttccccgtggctggacagaaactcatctatgccggcaagatcttgagtgacgatgtccctatcagggactatcgcatcgatgagaagaactttgtggtcgtcatggtgaccaagaccaaagccggccagggtacctcagcacccccagaggcctcacccacagctgccccagagtcctctacatccttcccgcctgcccccacctcaggcatgtcccatcccccacctgccgccagagaggacaagagcccatcagaggaatccgcccccacgacgtccccagagtctgtgtcaggctctgttccctcttcaggtagcagcgggcgagaggatgacgc

SEQ ID NO: 1864 - DNA, 429 bp, Homo sapiens
  misc_feature (1)...(429): n = A,T,C or G
attgaatacctcacnccagngnggnggaattccaggacaggattaaagcagcagctcaccagctgtgtctcaaaattgacaggggtgaaactcacttatggtctccacaagtatctgaagatgggaaagcccatcctttcaaaatcaacttagaatcagaaccacaggaattcaaacccattggtaccgcgcacaacagaagggcccagccttttgttgcagctgcaaacattgatgacaaaagacaggtagtgagcgcttcctataactcgccaattgggctctattcaactagcaatatacaagatgcgcttcacggacagctgcggggtctcattcctagctcacctcaaaacgagcccacagcctcggtgccccccgagtcggacgtgtaccggatgctccacgacaatcggaatgagcccacac

SEQ ID NO: 1865 - DNA, 474 bp, Homo sapiens
  misc_feature (1)...(474): n = A,T,C or G
cttaggattcccttctccagngnggnggaannttgcataccttgtgtcttctaccacctggccaagaggctcacggggatcacgtacctccgtgtccgcagcctgcccggagaggttctgagggcccgtgttagctacaggctgctgggggtcatctcactgctgcacctggtgctgtccatggggctgcagctgtacggtttcaggcagcggctgcgagccaggaaggagtggaggctgcaccgcggcctgtctcaccgcagggcctccttggaggagagagccgtttccagaaaccccctgtgcaccctgtgcctggaggagcgcaggctcccaacagccacgccctgcggccacctgttctgctgggagtgcatcaccgcgtggagcatcaccaaggcggagtgtcccctctgccgagagaagatccccacccagaatctgagctacattcggtactaccgcagagccgcg

SEQ ID NO: 1866 - DNA, 320 bp, Homo sapiens
  misc_feature (1)...(320): n = A,T,C or G
nggggnatccagaccctagtccgtgtggggaactccggtgggcatggtccccctggcgggcctctggaggggtctgccaggtgggcatggtcccccattttctttaaggcagcacctggagtggagagaggccactccctctccagcccccgatgtggacccggggaggggaggctgaggcgtttggccccggcctggccaggagaggcccatccccagggcagtttcaggtgccggctgggccctgaatgtcgaggatagtatatagcccgctcctgggtcctggagctgtggccctttgtaaaaaaaaaaaaaaaaaa

SEQ ID NO: 1867 - DNA, 472 bp, Homo sapiens
  misc_feature (1)...(472): n = A,T,C or G
nntttgaaacccgtttgcannggcgggattttgatgccctcngcagcgcccttcctggataagagggcagaggagatgccctacctgttttgccctcttcacaccggcctgattttgacgccggtggcttatggctgccgtgtggaggccatctacctgaacgtggagtccgtctgcacacaccgggagaggtcagaggatgcaaagaagggacctaacccgctcatgagacgcaatagtgtcaccccgctagccagccccgaacccaccaaaaagcctcgcatcaacagctttgaggagcatgtggcctccacctcggccgccctgcccagctgcctgcccccggaggtgcccacgcagctgcctggacaagtcagtgcactcccctttccttcctgcctggnggacgcatgccgggcgtgatgccacagatctgggattgcgtgcgtgtgtgtttgcaagaatgcgtgcg

SEQ ID NO: 1868 - DNA, 442 bp, Homo sapiens
ctgcgctgcctgcttgcctacttcctggataagagtgcagaggagatgccctacctgaaatgccctcttcacaccgtcctgaaactgacgcctgtcgcttatggctgccgtgtggaatccatctacctgaacgtggagtccgtctgcacacaccgggagaggtcagaggatgcaaagaagggacctaacccgctcatgagacgcaatagtgtcaccccgctagccagccccgaacccaccaaaaagcctcgcatcaacagctttgaggagcatgtggcctccacctcggccgccctgcccagctgcctgcccccggaggtgcccacgcagctgcctggacaagtcagtgcactcccctttccttcctgcctgggggacgcatgccgggcgtgatgccacagatctgggattgcgtgcgtgtgtgtttgcaagaatgcgtgcg

SEQ ID NO: 1869 - DNA, 485 bp, Homo sapiens
  misc_feature (1)...(485): n = A,T,C or G
agagagtccngcnaatcgagaccattagagagtcagttggaattcgccgacccgaggaacacggacaatgcctggatcgagacggtggccgtcagcgtccacttccaggaccagaatgacgtggagctgaacaggctgaactctaacctgcacgcctgcgactcgggggcctccatccgatggcaggtggtggacaggcgcatcccactctatgcgaaccacaagaccctcctccagaaggcagccgctgagttcggggctcactactgactgtgccctcaggctgggcggctccagtccatagacgttccccccagaaaccagggcttctctctcctgagcctggccaggactcaagctgttcctgggccctgcacatgatggggtttggtggacccagtgcccctcacggctgccgcaagtctgctgcagatgacctcatgaactggaaggggtcaaggtgacccgggaggagagctcaagaa

SEQ ID NO: 1870 - DNA, 486 bp, Homo sapiens
  misc_feature (1)...(486): n = A,T,C or G
agagagtccngnaatagagaccnatagagacctctangaagngncgcggaattcattctacccacgacatccctgctgccgaggttctcatttggcaaggatctggaatcgcctgagccctagtcccanaggatgggaggagggaggcagggaggtgtggagggcgggctgggtggcatccacctgaaggctggatccgcctgaaggttggatcacggggtcacacactgaggaccctgctgggggcataccctgtggaccccaacctcaggccctaccctgcagcccagctaggtgggatcttaccaggtacaggggccactgtagtatccccatccttagggagtgccaagtgaacagagtaaccccaggccgaggtttccaggcatgacttcaaagagtagatccccccacacccaacccagttcttcccggcacctcctggtgggggaaggttgagacaggaagccagcacgtggctgagct

SEQ ID NO: 1871 - DNA, 502 bp, Homo sapiens
  misc_feature (1)...(502): n = A,T,C or G
agagcagtcgcccccattganncccctaactgagacccctgtccagngnggnggaattcggccagcggtgggctggcggttgcgctcctcagatcggcggcctttcgggcggtggcttgcgtttgagcctcagaaagcgaggagcggcctccacggaagccaagctggccgagtgcttttaggaagaagatccttttattgcttttgtacaagaccagacaggatctcatttgttaaacgtggtaccaattgggtgtcttaacacaggagcagaacttcctagagcagaatgatgatggtagatctgaaagtggctgcgtacttggaccctcagatcagggctttgtgggagaccaaggggcctgcaagagagagctccggtcagagtaaaaaatctcctcaaatggactgtctcgatcctaagagctcttgctggcacttccggaatttcacctatgatgaagcaggtggaccccgtgaggctgtcagcaaacttcaagaa

SEQ ID NO: 1872 - DNA, 484 bp, Homo sapiens
  misc_feature (1)...(484): n = A,T,C or G
ngagagtcccgcttttgagacccatagagagccngtcggaagtcactctacccacgacatccctgctgccgaggttctcatttggcagggatctggaatcgcctgagccctactcccacatgatggtaggagggaggcagggaggtgtggagggcgggctgggtggcatccacctgatggctggatccgcctgaaggttggatcacggggtcacacactgaggaccctgctgggggcataccctgtggaccccaacctcaggccctaccctgcagcccagctaggtgggatcttaccaggtacaggggccactgtagtatccccatccttagggagtgccaagtgaacagagtaaccccaggccgaggtttccaggcatgacttcaaagagtagatccccccacacccaacccagttcttcccggcacctcctggtgggggaaggttgggacaggaagccagcacgtggctgagctccaagacc

SEQ ID NO: 1873 - DNA, 484 bp, Homo sapiens
  misc_feature (1)...(484): n = A,T,C or G
cttttgaatnccctttgcagngnggcggaannttcgantatcctattcagtgtggtggaattcgcggaaggtacactataagctcggggaggtaagcggcggcaggccggcggttggtgtgttctgggtgtggggaggcgacagagccctggcacttgagggttgaggtggcctccccagcgcggcgaaccgtctagcctccggaggccaggccgtgagtgcgggaggtatacgccaaggcggaagaattttgccactcactacctgtgtgacctcgggtaaattatccttggaacgtcagtttcttcgtctctataattgatataattatagcacctttctcaggattgttgtgagccgtctgtgaaacacttagagcagtttctggcacatggtacaatttgtctatttgctgaagcttcttggtggcccttgctagcccaagaagaaacttacattttgattgttttcgaccatgcgctcg

SEQ ID NO: 1874 - DNA, 497 bp, Homo sapiens
  misc_feature (1)...(497): n = A,T,C or G
agtgcggtncccccactgagaccctgatgaatggcggtaanncgcagcagccgccgcccccgggagccgccgggaccctcgcgtcgtcgacgccgccgccgcccagatccccgcaccatgccgtcggagaagaccttcaagcagcgccgcaccttcgaacaaagagtagaagatgtccgacttattcgagagcagcatccaaccaaaatcccggtgataatagaacgatacaagggtgagaagcagcttcctgttctggataaaacaaagttccttgtacctgaccatgtcaacatgagtgagctcatcaagataattagaaggcgcttacagctcaatgctaatcaggccttcttcctgttggtgaacggacacagcatggtcagcgtctccacaccaatctcagaggtgtatgagagtgagaaagatgaagatggattcctgtacatggtctatgcctcccaggagacgttcgggatgaaattgtcagtgtaaaa

SEQ ID NO: 1875 - DNA, 430 bp, Homo sapiens
  misc_feature (1)...(430): n = A,T,C or G
atcgcattctctactcctagnccgngtggtggaattcgtagaagcaaaaataacttttaagggacttttcccagcgtgaagtggcccatataaggtgctttgccagcctttgtgtggggacaaagcaggcattgtggttcccggtgccactgtgggccaggccctgtgatgctgagtcctggagacagcacggccaccacaggaacctgaccgtcagggctgtgtgtccacccagcgagggccgggaccagatggttctgggaggcctggcttagattggtctggggtactggggtctctactgcaggcctgttggacgtggctggaaacacggcctgggggccatcgccttccagcagcttcccctagaagcataggataagacaggcagcaaagggctctgcgtcctcagagaaaggagcacaggttg

SEQ ID NO: 1876 - DNA, 487 bp, Homo sapiens
  misc_feature (1)...(487): n = A,T,C or G
ntttggaaagtcccctattgcagngnggnggaanttttgagaccctattcagtgtggaggaattctccccatctccgcgcttcaagtcagactggggaatccagcacggacagaaaataattccatatgggaactgatccatacgaagtcagaaatagaaggacggccagaaaccatctttcagttgtgttgcagagacagtgaaagcaaaaccaacattgttaaggtgattcgttctattctgagggagaacttcaggcgtcacataaagtgtgaattaccactggagaaaacgtgtaaggatcgcctggtacctcttaagaaccgagttcctgtttcggccaaattagcttcatccaggtctttaaaagtcctgaagaattcctccagcaacgagtggaccggtgagactggcaagggaaccttgctggactctgacgagggcagcttgagcagcggcacccagagcagtagctgccccacgggt

SEQ ID NO: 1877 - DNA, 482 bp, Homo sapiens
  misc_feature (1)...(482): n = A,T,C or G
agagggccngcaatagancccatcgagaccatagtccatgtggtggaattcctggcaatatgacaggcctgcctacccaagatcagaactccaaaaccactcccacccctgaaggtcgggagggtctgagcagccctggtggctgcctgtgctcaggtcctcagctccatgggaaataaaaatggcaccctgaatctctaggattttgtcacttggagtcacagcaaagttctcttcctcttgtccccccgttgctgctccttggttatagaacatggtaaatatttattactttcagagaaaccagatattttatagaggaaatatgtttgaggtgagttgtttttcacttggagaaggcggagggctcttcctgggacggagacctcctcctccggaggttattgagaatccgggctgctgctttgaggatcttcccaccatacagacagcgagatccaagaagagggctggccggtgga

SEQ ID NO: 1878 - DNA, 496 bp, Homo sapiens
  misc_feature (1)...(496): n = A,T,C or G
cgaagcgcaaattgagacccntagttgangatcctccgaanangcgcggaatnaggaggtgtaagatgcctgagccagccaagtctgctcccgccccgagtttggctccacgtatgcagtgaccaaagcgcacaagaaagatggcaggaagcgcaagcgcagccgcaaggagagttactctgtgtacgtgtacaaggtgctgaaacaggtccatcccgacactggcatctcttccaaggtcatgggcatcatgaattctttcgttaacgacatatttgagcgcatcgcgggcgaggcttcccgcctggcgcattacaacaagcgctcgaccatcacctgcagggagatccagacgggcgtgcgcctgctgcttcccggagagctggccaagcacgccgtgtcggagggcaccaaggccgtcaccaagtacaccagctgcaagtaaacattccaaggggagacaacagcttttagacatatcttttccaacagtcgg

SEQ ID NO: 1879 - DNA, 224 bp, Homo sapiens
  misc_feature (1)...(224): n = A,T,C or G
nnnnactannanagggactgngnccctctcattattttaaggcgtaagaagaaaacttaattttgcattttgggctgattcaaataaaggttgtagctatagtttcccccactttttttgcttaacaacttaattcttactctaatttaccttataatagctaatttaaaactcggtatttgtcgtattaaattaactgggatgtactccaatagataagaatn

SEQ ID NO: 1880 - DNA, 457 bp, Homo sapiens
  misc_feature (1)...(457): n = A,T,C or G
aggcggggnnnggggnnnacctcgagacccctngcattgagcnccatttcgaagggacggggcggngccccagggaccagcggctttaggaccaaactgcgggcagccagggccgcgaccctccctgcgaccgtcccctggcgaccgcagctggactttccttatcccagttgattgtgcagaatacactgcctgtcgcttgtcttctattcaccatggcttcttctgatatccaggtgaaagaactggagaagcgtgcctcaggccaggcttttgagctgattctcagccctcggtcaaaagaatctgttccagaattccccctttcccctccaaagaagaaggatctttccctggaggaaattcagaagaaattagaagctgcagaagaaagacgcaagtcccatgaagctgaggtcttgaagcagctggctgagaaacgagagcacgagaaagg

SEQ ID NO: 1881 - DNA, 456 bp, Homo sapiens
  misc_feature (1)...(456): n = A,T,C or G
ggcgggnnngggggggcctgannccctnnaactgattnctatcatcagngtcgtggaattcgtcggcttgtcaggtggtaaaggaaaaggcgctccgtcatggggatccagacgagccccgtcctgctggcctccctgggggtggggctggtcactctgctcggcctggctgtgggctcctacttggttcggaggtcccgccggcctcaggtcactctcctggaccccagtgaaaagtacctgctacgactgctagacaagacgactgtgagccacaacaccaagaggttccgctttgccctgcccaccgcccaccacactctggggctgcctgtgggcaaacatatctacctctccacccgaattgatggcagcctggtcatcaggccatacactcctgtcaccagtgatgaggatcaaggctatgtggatcttgtcatcaaggtctacctgaag

SEQ ID NO: 1882 - DNA, 458 bp, Homo sapiens
  misc_feature (1)...(458): n = A,T,C or G
aggcgangnnnngnnnnnnnattgaganccttgngnattgagcngcgttgcgganccccatgcagagtggtgcccacaaaccccccttccagagtcatctctggtccaccttgaagtccccaggaaaatgacctcgtcctccgcgggtgtgagccactaggcctgagaggacgccgggacggagctttcagagagggaggtgtcgggatggcttgagggtcaccaggtattaattaagcacttgctgtgtgccaggcactttcccacacaggatggagccgggccaccctcacagctcctgccctgcagacgctggccttgtggagggaggcaggcagcaggagcagtgctttctgggcctctgtagccagagctggccctgctgcagcttacgtctgcctgcagcccagacgtcctcctggtcctcctgatgcccccgacctccacggaggacgagg

SEQ ID NO: 1883 - DNA, 459 bp, Homo sapiens
  misc_feature (1)...(459): n = A,T,C or G
ggcggggnnagggggcccctgaaaccctnnnaactgactnctatctgcagngncgtggaattcggctccgtgagagacgacgggaagtttctggtggaggactattgctttgctgaccttgctccccagaagcccgcacccccacttgacacagataggtttgtgctactggtgtccggcctgggcctgggtggcggtggaggcgagagcctgctgggcacccagctgctggtggatgtggtgacggggcagcttggggacgaaggggagcagtgcagcgccgcccacgtctcccgggttatcctcgctggcaacctcctcagccacagcacccagagcagggattctatcaataaggccaaatacctcaccaagaaaacccacgcagccagcgtggaggctgttaagatgctggatgagatcctcctgcagctgagcgcctcagtgcccgtggacgtg

SEQ ID NO: 1884 - DNA, 459 bp, Homo sapiens
  misc_feature (1)...(459): n = A,T,C or G
nggcggggnnnnngnnnnnnaatcgaganccntatgnattgaggngcaattcgttcgacagtcagccgcatcttcttttgcgtcgccagccgagccacattgctgagacaccatggggaaggtgaaggtcggagtcaacggatttggtcgtattgggcgcctggtcaccagggctgcttttaactctggtaaagtggatattgttgccatcaatgaccccttcattgacctcaactacatggtttacatgttccaatatgattccacccatggcaaattccatggcaccgtcaaggctgagaacgggaagcttgtcatcaatggaaatcccatcaccatcttccaggagcgagatccctccaaaatcaagtggggcgatgctggcgctgagtacgtcgtggagtccactggcgtcttcaccaccatggagaaggctggggctcatttgcaggggggagn

SEQ ID NO: 1885 - DNA, 457 bp, Homo sapiens
  misc_feature (1)...(457): n = A,T,C or G
nggcggggggnngnnnnnaattgagaccccttgnatgtgagcngcaattcggccgggcataaaaggcttcgcggcccagggctcacttggcgctgagaacgcgggtccacgcgtgtgatcgtccgtgcgtctagcctttgcccacgcagctttcagtcatggcctccggtaacgcgcgcatcggaaagccagcccctgacttcaaggccacagcggtggttgatggcgccttcaaagaggtgaagctgtcggactacaaagggaagtacgtggtcctctttttctaccctctggacttcacttttgtgtgccccaccgagatcatcgcgttcagcaaccgtgcagaggacttccgcaagctgggctgtgaagtgctgggcgtctcggtggactctcagttcacccacctggcttggatcaacaccccccggaaagagggaggcttgggccccctgaa

SEQ ID NO: 1886 - DNA, 459 bp, Homo sapiens
  misc_feature (1)...(459): n = A,T,C or G
ggcgggggngggaggccctgaaaccntngaactgacatntcctcgccagngncgnggaannccagacagttgtggtttcgtctgttttctgagaacaccaaactttcttcaagatgttgatcaatatgactagtgctcagaaaaaaaaaatcccggcactttgggaggccaaggcaggtgaattgcctcagctcaggagttcgagaccagcctgggcaacatggtgaagccccgtctctactaaaatacaaaaaattanccagtcgtggcagtgtgcgcctgtggccccagctacttgggaggctgaggcgggagaattgcttgagcccgggaggtggaggttgcacggagctgagatcacaccactgcactccatccagcctgggcgacagagcgagattccatctccaggaaaaaaaaccctccaattatatctgggggtgctgatacagtaatgtt

SEQ ID NO: 1887 - DNA, 452 bp, Homo sapiens
  misc_feature (1)...(452): n = A,T,C or G
gggcggggaggaggcatgaaaccntnaactgatancatcgccangncgnggaattcccccaacctcctgaggtgctctggccccggattctcccgggctgcattctctgctcctcctcgcctgcgaagcatcacgtccgcttcccgacgctgagggcagccccgtccagggcagtggctctgccaatgatcctgtgagtattcaggaatcactgttgcccctggggatccttgtcctggagtggcccacctgcttgcccccagcatggcgtccgacactcccgagtcgctgatggccctctgtactgacttctgcttgcgcaacctggatggcaccctgggctacctgctggacaaggagaccctgcggctacatccggacatcttcttgcccagcgagatctgtgaccggctcgtcaatgagtatgtggagctggtgaacgctgcctgtaa

SEQ ID NO: 1888 - DNA, 499 bp, Homo sapiens
  misc_feature (1)...(499): n = A,T,C or G
acgctcttnnnnaattggattccctttgcagngngcnggacctcgatggccgtcttgtgactcacccagctgggagctctccagagacacccctccctctgccagggccagcttggtcactgcaggggggtggcggggtgactcttgactccctcatggtctcttggtctctttctcatctctccccagtctatcacgtggctctccctatcttggtatctcactgtctcttagtctctgtctctccctgcgtacccagcttccagcctcccccaggctctctgctcctcatttctggttaatgtgtcctcccgctccagcccccccgaatcccgcttcttccctgcttaggtctatttttaggcatctcctagtttggggagaatgttctggccaaagatggcagaaacccacagcccaggcaggcaggctgggtgggagctgggtgggagggcangtnctnttcgcccccgcccccctcccgtctctgatctctccc

SEQ ID NO: 1889 - DNA, 455 bp, Homo sapiens
  misc_feature (1)...(455): n = A,T,C or G
ntttgagaccctagncctttgagggcgtttcccattaagggcacattctgtaaatgaacgagcagcagattccagcacagtaggcctgtttgttattcatgctgagggacattgaaaagcagtcaagattagctcccctcatgccacccgtttgtgacctcagtgccacctgggcctctaagatgtatgtggcagagactagaacttctatttaacaagagaaagaagtaggagttctgtggctatccagtgcccctaatgggcaccctgcattggttgacaactcctaaaagacccgcaagtgctatttgctggctacaaagtcccccaccccttggagcacaagatcatcatccgagtgcagaccacgccggactacagcccccaggaagcctttaccaacgccatcaccgacctcatcagcgagctgtccctgctggaggagcgcttccgga

SEQ ID NO: 1890 - DNA, 581 bp, Homo sapiens
  misc_feature (1)...(581): n = A,T,C or G
gtgcaccgtatccttcgtcagctaagtgtggtaacggtggacattatgcgtctcgtgtactagttggactcacttccctacactcgagcacaaggacacaacgaaatcacaaccaaacttcgagnacccgttgatagccgtcgcgaancacaaaaactcatcgaggaggtgaagggtctggatgaagcaacattaaagcaattagactgcatccatgttaccatcttacacaaggaggaaggtgctgggcttgggttcagcttggcaggaggagcagatctagaaaacaaggtgattacggttcacagagtgtttccaaatgggctggcctcccaggaagggactattcagaagggcaatgaggttctttccatcaacggcaagtctctcaaggggaccacgcaccatgatgccttggccatcctccgccaagctcgagagcccaggcaagctgtgattgtcacaaggaagctgactccagaggccatgcccgacctcaactcctccactgactctgcagcctcaacctctgcagccagtgatgtttctgtagaatctacagaggccacagtctgcacggg

SEQ ID NO: 1891 - DNA, 488 bp, Homo sapiens
  misc_feature (1)...(488): n = A,T,C or G
gggccgannaattgaaaccttgagaacctagtcagagtggtggaattcggcacatcaagcgcatgctggaaggggtggagagtgactacgcagaacggatggacatgtgagtggacacaggcttccgtcctgtgaggtgcagtgcccgccacaggctttctgaggcaaagcggcatcggtttaggattcccgaggcttcatccgtggcaacaagatgatgcataccagtgtcccaggcgtgtttgcatgtggcgatgctgtcaccttcccccttgcctggaggaacaaccgcaaagtgaacattccacattggcagatggctcatgctcaggggcgcgtggcaccccagaacatgttggcgcaggaggcggagatgagcactgtgccctacctctggaccgccatgtttggcaagagcctgcgctacgcgggctacggagaaggcttctacgacgtcatcatccaggaggatctggaggagctgaagt

SEQ ID NO: 1892 - DNA, 463 bp, Homo sapiens
  misc_feature (1)...(463): n = A,T,C or G
tgggcnctgnnnnnnncctggatttgcctagcactgtgtcgnggaattcgtggcgatgccgtaaggctggctgggagagtaggagtgttagggagtgcggacgggtcttggtgtagggactttctatccactctatgccaggctttgacttggggccataggagggaaagtgattccagccctccacagggagttcagagtctaatgaggaagattgaagtaatgattgctggagagcccagaagagagagtactttagggagctgcaggccggggagaggcactagggaaggctcaccaaatgctggatggagctcagccttaaaggctcaatgtgaaaattgccaccaaggccaacccttgggatggaaaatcactaaagcctgacagtgtccggtcccagctggagacgtcattgaagaggctgcagtgtccccaagtggacctcttctacctacacgca

SEQ ID NO: 1893 - DNA, 437 bp, Homo sapiens
  misc_feature (1)...(437): n = A,T,C or G
nttcgcgatccatattgcagnaccactagacagagtggtggaattccggatgtcttcagaaacgcctgtcaggcattccccctggacttgtgcacagacagcttcttcacaagcagacgcccagcccttgaggccaggctgcagctgattcatgatgcccccgaggagagcctgcgggcctgggtggcagccacgtggcatgagcaggaaggcagagtggcttcccttgtcagctgggatcgcttcacgtctcttcagcaagctcaggatcttgtctcctgcctggggggccctgtgctcagtggtgtgtgcaggcacctggctgctgactttcgacactgtcgagggggcctccccgacctggtggtgtggaactcccacagccgtcactttaagctggtggaagttaaaggccccaatgatcgtctttcacataa

SEQ ID NO: 1894 - DNA, 477 bp, Homo sapiens
  misc_feature (1)...(477): n = A,T,C or G
agaggtcncacatgataccctattcgatgngcngtgaattcagcactcagaaaagatgttgcttacatctggcatataaatcagcctatttttaaaaaatacttttatccttgaaaagttgttttgcataccaaaaaaggaaggatttttagcccaagttaatagcatgaatctgttgtgttttaatggctgaaagtatgcacagacagaaatgtgtaccacatataaccagcatgtgttgttcctaaaacccaggcttcaagtgtagtcaaatttattaccatttttttcttaaaatttactttttctccagttgaacctctgtaggtttattggaatgaaatttagtatcctttcttaggtctgtcccattgccacctgaattgttgtgaaacctctgtgtttattgatctcatgtggaggtgaagaggagtggatcatcctttttcctacagaggacataaaaacagccagagc

SEQ ID NO: 1895 - DNA, 457 bp, Homo sapiens
  misc_feature (1)...(457): n = A,T,C or G
atttgagaccctcgagacgctcgggaangcggtagaagctaaagaagcaacacattgtaggagaagagagtgatcaactggatcaaatgttcctgatgtgccaagtaacagatggactaacattatctcttgtatttagcaatgcagcaatcattatcaacctagctaacagtggtttctgactagacaaattcaaggtagaatatgaggagatgaattggacacagcaaaaataactatggaaagccatagggtatagactaaagatctttgccctttacttgaatcctaactgattttgattaccccagtggataaaaatcagtcagggcttttggcactgatgcttggtaacatgatgaaccacaagtgctaggaaggaaaaaattatgaagagtctcactttttttttcctcctggcgaatctctgcaagcctgggagaggaagatgtctatg

SEQ ID NO: 1896 - DNA, 477 bp, Homo sapiens
  misc_feature (1)...(477): n = A,T,C or G
ctcgtggnnnggttttgagccccatgatgatcataggccagngcggnggaattcgagtcctctgtggggagagtcctctgtgtggagagagtcctgtgtggtagagagttctgtgtggggagagtcttctgtaggggagagtcctctggggagagagtcctgtgtgggggagagttctctgtggggagagtcctctgtgtggagagagtcctgtgtggtggtgagtcctctgtgggggagagtcctctgtggggggagtcctctctggagttctcttgggcccctggctgttcactgcctgtctccatgcccagcctccaagcccaggctgatgcagctggctgggcccctctttccggcaggttctccatggtggtacaggatggcatagtgaaggccctgaatgtggaaccagatggcacaggcctcacctgcagcctggcacccaatatcatctcacagctctgaggccctggg

SEQ ID NO: 1897 - DNA, 481 bp, Homo sapiens
  misc_feature (1)...(481): n = A,T,C or G
ggagcgtgccnaaattgatacccctgttgaatgaccngtaattcctttccgtattttccacccatcactccctttcctgaaaagaccagaccatctccgccacagctctgaacctgtgtcttggccactaggagtgccacacctggcactgccccctgcccaggacttcacagcaaccctcagggggcaggagatgcacagtgagacgaggtcaccgcctggattacagccatctgagattgttcatgctgctataacaaaatactttagactgggaaattaataaacaaccaaagtgtatttctcgcagttccggaggctgtgagtccaagatcaaggtgccagtagactcggtgtcttgagggcccgtttcccatagagggcaccttctgtgtgttgtgtggtgagagggcctgacaagctccctcaagcctccctcatcagggccctgagcctattcagcgggcagagctctcgggcc

SEQ ID NO: 1898 - DNA, 471 bp, Homo sapiens
  misc_feature (1)...(471): n = A,T,C or G
aagttccgggattgagacccatgagagcgctgcggaannccggaagaccacactggtggcagaatcctaaaattaaaggaggcaggctcctagttgttgaaagatttggaatgtgtaaaacctccacgtgactgtttggtgcatcttgacctgggaagacgcctcatgggaacgaacttggacaggtgttgggttgaggcctcttctgcaggaagtccctgagctgagacgcaagatggctgggtggtccgcaccctggctctcctgcaggtccacacaccttccaggcctgtggcctgcctccaaagatgtgcaagggcaggctggctgcacggggagagggaagtattttgccgaaatatgagaactggggcctcctgctcccagggagctccagggcccctctctcctcccacctggacttggggggaactgagaaacactttcctggagctgctggcttttgcactt

SEQ ID NO: 1899 - DNA, 486 bp, Homo sapiens
  misc_feature (1)...(486): n = A,T,C or G
cganacttcnnggggggnnnggaattgaagaccnattgagagccctgcggaannncgggaggacaagcagtggaagctgcagcagatccaggatgccagaaaccatgtgagtcaagccatttacctgcttaccagccgggaccagagctaccagttcaagacgggcgctgaggtcctcaagctgatggacgcagtgatgctgcagctgaccagagcccgaaaccggctcaccacccccgccaccctcaccctccccgagatcgccgccagcggcctcacgcggatgttcgcccctgccctgccgtccgacctgctggtcaacgtctacatcaacctcaacaagctctgcctcacggtgtaccagctgcatgccctgcagcccaactccaccaagaacttccgcccagctgggggcgcggtgctgcatagccctggggccatgttcgagtggggctctcagcgcctggaggtgagccacgtgcacaa

SEQ ID NO: 1900 - DNA, 514 bp, Homo sapiens
  misc_feature (1)...(514): n = A,T,C or G
cgccccccccgnccgatcgagaccctannncgatagagaccatagtcagngtcgttgaattccctccctcccagccctggcctcatcactgtgcggctcaaattcctcaatgataccgaggagctggctgtggctaggccagaggataccgtgggtgccctgaagagcaaatacttccctggacaagaaagccagatgaaactgatctaccagggccgcctgctacaagacccagcccgcacactgcgttctctgaacattaccgacaactgtgtgattcactgccaccgctcacccccagggtcagctgttccaggcccctcagcctccttggccccctcggccactgagccacccagccttggtgtcaatgtgggcagcctcatggtgcctgtctttgtggtgctgttgggtgtggtctggtacttccgaatcaattaccgccaattcttcacagcacctgccactgtctccctggtgggagtcaccgtcttcttcagcttcctagtatttg

SEQ ID NO: 1901 - DNA, 491 bp, Homo sapiens
  misc_feature (1)...(491): n = A,T,C or G
gtgccggattctnaatcagtattatccgannncatcatgtatttcatcgcaagngccgagnaannanaggccngcagncccgcggcgcggagcagnggccggtctgctcaagnnggcaccggnccgggggccccgggggcgcaggcgcagcgctccggccctgcaggcggcaacgagggcgcggnccagngcggccggaacctggcgcaactcctagagcggtccttggggagacgcgggacccagtcctgcggctcctactggggcgtgcgctggtcggaagattgctggactcgctgaagagagactacgcaggaaagccccagccacccatcaaatcagagagaaggaatccaccttcttacgctatggcaggtaagaaagtactcattgtctatgcacaccaagaacccaagtctttcaacggatccttgaagaatgtggctgtagatgaactgagcaggcagggctgcaccgtcacagtgtctgat

SEQ ID NO: 1902 - DNA, 482 bp, Homo sapiens
  misc_feature (1)...(482): n = A,T,C or G
ggggggnnattcggaccctagtccgtgtggtggaattcccagaccaacagagagagctgtccctgagaccccggagagaagcagctgccgaaagctgcagcctttccgcactctgagaccatgatcttcctcctgccaggggagagccacccacaggccatgtccagccccacttccctcagcccccagggcttccttctggcccctctgaggattccctagggctgccccgcagaggggcttccccaagctctgttttgaagcctgcaatgtggaaaagtgagaagtcagagggaacaggacaggtgcagccgggctctgaggccacacctcacacctcgctgttccccaacatcccctgagcagtgtgagctcatctcaccagatgagaagaggccctgtgcatttcttttgtttgtttgttgctgttttcccccacccatccagttctcctcagcaaagcaaattccttaacacctttg

SEQ ID NO: 1903 - DNA, 429 bp, Homo sapiens
  misc_feature (1)...(429): n = A,T,C or G
cattgaattcttttcgnccagngnggnggaattcgcggtcggacgccttcccagcgcgcagcccttcacctatccgtgccgcgccctgtggtcagggtcgcgctggtgctgcctggatgcggagtctacgatgggaccgagattcacgaggcctaggcgatactggtgcacctgagccgtggaggggctgaagaccagatctttgctgctgacgtccctcagatgcacgtgattgaccacaccaaggggcagccgtccgaaggcgagagcaggaatgttttgaccgagtctgcgaggatcgcccgtggcaaaatcacagacctggccaacctcagtgcagccaaccatgatgctgccatctttccaggaggctttggagcggctaaaaacctgcaagctgggcgtgctggctcatgcctgtaatcccag

SEQ ID NO: 1904 - DNA, 484 bp, Homo sapiens
  misc_feature (1)...(484): n = A,T,C or G
ggcgcgtaggcccactgataccncnactggagacccctctgaagngncgcggaattctattggtgcagtcagtgagctggtgccgcgattggtgggtgcgggtcatgtggtggcgaaggtgcgcgcagtggacgccgactcgggctacaacgcgtggctgtcctatgaactgcagccggcagcaggcggcgcgcgcatcccgttccgcgtggggctgtacacgggcgagatcagcacgactcgtgtcctggacgaggctgacttgtcgcgctaccgccttctggtgctagtgaaggatcacggtgagccggcgctgacagccacggccgctgtgcttgtatctctggtggagagcggccaggcgccaaaggcgtcttcgcgggcgtcggtgggtgtcgcgggcccagaggcggcgctggtggatgtcaacgtgtacctgatcatcgccatctgcgcggtgtccagcctgctggtgctcacactg

SEQ ID NO: 1905 - DNA, 484 bp, Homo sapiens
  misc_feature (1)...(484): n = A,T,C or G
aggggatnanaactggagaaccgtgtgcaccgtgcgggaattccaatatcaagcacttatctgcgggactccagcttcgcctccaggctattcacaaccacgtgaaccaccacagcctaaggacgctgccgggctcgggccagagcagtgctggcctggcagccctccgaaagtggttgcagtgcactcagttcaaaatggcccaggtggagatccagtcctcggaagcagcctctcaattttatcctctatgagtggactcctcggcgctcagtgtcaacactctggtttagcaataatgggtttaaaaacaaacaatttgatccaagcaggttggggaacatattggtactgtacattctctttctagtttagtaaaagatgtgcaaaggccagagagggccgaaaatgaagctttcttgctacacatatttttgatgactccttgggctatctgattaagtgtttccttacattatttttt

SEQ ID NO: 1906 - DNA, 391 bp, Homo sapiens
ctgtaacatatatgaaaggcttctgggacttgaaatcaaatgtttgggaatggtgcccttggaggcaacctcccattttagatgtttaaaggaccctatatgtggcattcctttctttaaactataggtaattaaggcagctgaaaagtaaattgccttctagacactgaaggcaaatctcctttgtccatttacctggaaaccagaatgattttgacatacaggagagctgcagttgtgaaagcaccatcatcatagaggatgatgtaattaaaaaatggtcagtgtgcaaagaaaagaactgcttgcatttctttatttctgtctcataattggcaaaaaccagaattaggtcaagttcatagtttctgtaattggcttttgaatcaaa

SEQ ID NO: 1907 - DNA, 424 bp, Homo sapiens
  misc_feature (1)...(424): n = A,T,C or G
attgagtaccatacnccgngnggnggaattcggggccgcaagcccgcctgaaaccggcccgggcggccctgcggggagcgtccgagtacctgcacagatcccatgctgtgaaagaggtgtttctggcctggtcacaccggggattcccttccagtatttgcccttcccctccgctagttttcagtgaactcgcttacgatccaaatcttgaacacacctttgtctgcgtagtacaacgttaatcttgcaattcggtaaggaagaagagtgtctctgatttttcaaaccatccattgtatctctcgcttttactgttctgcctacagttgtcacaaatcacctgcagatgattcctgtgtactgtacgttcctggtgctattgtgaacaggcttgttgttttcagcgctttgcctctggtgtgag

SEQ ID NO: 1908 - DNA, 489 bp, Homo sapiens
agggaattggatcctatcattgtgggcaattccgtgccttctctcacacaccaagccttggattggtctggcagaagctctggggacactgatgcgagcctgggctgggtcccccaaagggaccatccaggtgataacacagggaacatccctgaagaatgctgggaactgcctaagccccgcagtcattgtcggcctcctgaaagaggcttccaagcaggcggatgtgaacttggtgaacgctaagctgctggtgaaagaggctggcctcaatgtcaccacctcccacagccctgctgcaccaggggagcaaggcttcggggaatgcctcctggccgtggccctggcaggcgccccttaccaggctgtgggcttggtccaaggcactacacctgtactgcaggggctcaatggagctgtcttcaggccagaagtgcctctccgcagggacctgcccctgctcctattccggactcagacctctgacct

SEQ ID NO: 1909 - DNA, 391 bp, Homo sapiens
  misc_feature (1)...(391): n = A,T,C or G
caatgaggtgaagaagaaaatggatcctggcttccccaagctcatcgcagatgcctggaatgccatccccgataacctggatgccgtcgtggacctgcagggcggcggtcacagctacttcttcaagggtgcctattacctgaagctggagaaccaaagtctgaagagcgtgaagtttggaagcatcaaatccgactggctaggctgctgagctggccctggctcccacaggcccttcctctccactgccttcgatacaccgggcctggagaactagagaaggacccggaggggcctggcagccgtgccttcagctctacagctaatcagcattctcactcctacctggtaatttaagattccagagagtggctcctcccggtgcccaagn

SEQ ID NO: 1910 - DNA, 478 bp, Homo sapiens
  misc_feature (1)...(478): n = A,T,C or G
agagcgtcncnccctgataccctaattgatgtgcctgaattcattacctcctgatgtcatcgatttgggtgaggggacagggaagtcagaggaagctggccagtggctctcacgcatacttacagcagtggagtggtgcctgattcctggtacagctgctcccactgagtctccagggatctgtggttcaggaccccctgcaaccccctcccagacccctgtactggtgggaggagaggacctagaggaaaggtgctgggcagataagcagctgagggaggccctgggtttagcttatcagtcttctgggccctcctgccccaggaagggcagcgaggaccatggtgttgcccctgtcatcgttatcgtcctggccatgagcttgcaggactgggagggccggagtcagccaggcagacggcagcacagcatttgcctgttggcaggtggccttggtggcttcccaaaggcaatcgct

SEQ ID NO: 1911 - DNA, 477 bp, Homo sapiens
  misc_feature (1)...(477): n = A,T,C or G
agcggtgccgactgatnccntactgagancntatgcagtgtcgtggaattccctgatttagttagagtttccactcccatcttgaactagtggtataatgtaggaaagcagttctcaaagtgtggacagatgacccatggggatctcctcttaccctttcagggtagcctcaaggtcataactattttcaaaataatagtaagatgctatttattgttttcactgatacactgatggttcaaaagcaaggctgggtaaaactactggcggtaccttagcacaaagcaagtcaggggcaccaaactacttgagaatgcccttgaagcagnaaaatttattattctatttttatttttttgaggcggagttttgctctgtcgcccagggtggagtgcagtggcactatctcggctcactgcaatctcttcctccctggtgtatttttagtagagacagtgtttcgccatgttggccagg

SEQ ID NO: 1912 - DNA, 483 bp, Homo sapiens
  misc_feature (1)...(483): n = A,T,C or G
ncggggtnnatctcgagaacgtagtgcctgtgcnggaattcctgcaacctgcttaactcggaggattacaacacttgtgagggagcctttggagccctgcagaagatctgtgaagactcatcagagcttctggacagtgacgccctcaacaggcccctcaacatcatgatccccaagttcctgcagttcttcaagcactgcagtcccaagatccggtcccacgccatcgcctgcgtgaaccagttcatcatggaccgggcccaggcgctgatggacaatattgacaccttcatcgagcacctatttgccctggctgtggatgatgaccccgaggtgcggaagaatgtgtgccgtgccctggtgatgcttctggaagtgcggattgacaggctcatcccccacatgcacagcatcatccagtacatgctgcagaggacccaagaccatgatgagaacgttgcccttgaggcctgtgagttctgn

SEQ ID NO: 1913 - DNA, 484 bp, Homo sapiens
  misc_feature (1)...(484): n = A,T,C or G
cggagatagggggnngnnggttttgagccccactgagatcatcagacangcggnggaattcaagcgggcaaacaggcactcctcctcactgtccagtcacctgacgttctttttctgtgcactcaggtcgtgacaccccaggaggtgcctatcgcgccccaagctcctcacgtgcctcctccccacagtccaggacgcgtcttactaacgcctcaccagagcgcatgcgccctcctcaggagcagcctcaaagcgcgcagcctcagcccattggcctgcgggaagtggagttcccgaacagaagcccctcagtctccggaagccccgcccggcagactgttcccaggatgcaacacgggctcgcgtctaaaagagctgtgctttgttggggctatctgggagtttccgccttccatgaagtgcgcaggcgcacttaggcgaggcggggcgactctatgaagtggagacatcaagagtggtactg

SEQ ID NO: 1914 - DNA, 486 bp, Homo sapiens
  misc_feature (1)...(486): n = A,T,C or G
ncctcggatatgcccttcgccagtgtcgtggaatttgatataatctgcagaatacacaacagagttgaaagtcttaaaaggatgactaaggagatatgtgtatgagatacagccaaagaaatacacccaccccctgtttaatgccctcaaaatccttccattctgtgagaatctaccccaagggtttgtagtgttggaaagaatcatttaaatatcagattttgtttgattgctttgctgctctgagcatcttagctgcctatgagatacttcatgagatgtagcagaaacatcctggcccccagggtagagtacacaggcagtcctgacaggtcacccggtattcatatacttatttatttatatcaccatcattaatatacatacattcatttatttttaacattaccatacagcttaccacttaccaaaatagcctctctttggctggcatttcactgacaaacttttttcttctattttcaa

SEQ ID NO: 1915 - DNA, 488 bp, Homo sapiens
  misc_feature (1)...(488): n = A,T,C or G
ggcggtnnnnnncctcgatccctagcagggcnggactgatacacttagcgtgctcttccaagaactcgacagggacagaaaacgggcacagttgatcctgcagtacatcccacatgtcatccctcacaaaaacagagttctactgtttcgaaccatggttaccaaggagaaggagaaactggggctggtggaaaccagctctgcctccccgcatgtcactcacatcaccatccgccggtccaggatgctggaggacggctacgagcagcttaggcagctctcccagcacgccatgaagggggtcatccgtgtgaagtttgtcaatgacctcggggtggacgaagcagggattgatcaagacggtgtttttaaggagttcttggaagagatcatcaagagagtttttgacccagcactcaatctgttcaagacaaccagtgnggatgagaggctgtacccctcacccacatcctacatccatgagaatt

SEQ ID NO: 1916 - DNA, 478 bp, Homo sapiens
  misc_feature (1)...(478): n = A,T,C or G
cgggtnnaatcgagaacctatccctgtgcnggaattccctctatgtcttttcacagcttgacagcttatttctttttagtgctgagtaatattccacagtctgagtgtaccagagttcatgcattcacctgttgaagaacagcttggttgctaccaagttttggcaattatggttaaagttgctgtaaacattcatgtacaggctttcttttttgagacagagtttcgctctgtcacccaggctggagtgcagtggcgcaatctcggctcaccgcaagctctgcctcccaggttcacgccattctcctgcctcagcctcccaagtagctgggactgcaggcgcctgccaccacgcccggctaattttttgtatttttagtggagatggggtttcgccatgttagccaggatggtctcgatctcctgacctcgtgatccgcctgcctcggcctcccaaagtgctgggattgcaggcgtg

SEQ ID NO: 1917 - DNA, 483 bp, Homo sapiens
  misc_feature (1)...(483): n = A,T,C or G
cttagaaaccgttngagngnggnggannttgngantnccctantcagtgtggtggaattcctgtgaacggctcatggtacattcaagatttgtgtgagatgttgggaaaatatggctcctccttagagttcacagaactcctcacactggtgaacaggaaagtttctcagcgccgagtggacttttgcaaagacccaagtgcaattggaaagaagcaggttccctgttttgcctcaatgctaactaaaaagctgcatttctttccaaaatctaattaattaatagaggctatctaattttacactctgtattgaaaatggctttctcagccaggcgtggttactcacacctgtaatcccagcactttgggagtccaaggtgggcggatcacctgaggtcgggagttcgagaccggcctgaccaacatggagaagccccgtctctgctaaaaatgcaaaaaaaaatttagctaggcatggcggc

SEQ ID NO: 1918 - DNA, 489 bp, Homo sapiens
  misc_feature (1)...(489): n = A,T,C or G
ggccatgagaccatatcagnngggtgaattccgggaccctgcctttagggcactacgcgccaccagttcccggtacccagggagcaggcagccacacacgggccttgcaaccttgtcagagaaaaggcgaacagggccctcaccctgcctgtctcccgaagcaggttcgagccacaagggccaaccaggaggcccctggagcccagatctgtcatctggtgctgccagctgtgctcactctggttttctgctcagggtctgaagcagctgctgtctccctcctctgcccccatcccctggctctcccctgggcacagtgccactcccttggaagggagggaaccacccgtgagccccagggcttgggaagcctgaggcgggcctctgcctctccctgcccccagcacaattggcagagatgaggcgggtggtggacggctgggctgtcgtggcagggtctgcacagggccatgtcctagctgtaaccca

SEQ ID NO: 1919 - DNA, 499 bp, Homo sapiens
  misc_feature (1)...(499): n = A,T,C or G
ngggatagagacccctngnannnncactgagaccactaatcagngncgnggaanncgagcagcagggacggaggcgaggctggtacacctacacagacctgtgtgtgctgctggagcagccgacctggcagttggccctgggctccctctgccagcggctggtaaagctgtcttgcctgttagctgtggcatatgtgagcagtgtggccctggctgtggcatcggtggccgtaatacatcagtctttggggctgtcctgcacccctacacctgggccgcctgaccttggactgacctcccgttgcctcctggagccctgcataccttctgtgccacaatgcctgccgtctcccgctaatgtctccagctgcctggaaagcagcatggggctgcggtcactctggggcagtcttctggcctcactgactcctccaccattgcctcccccagacccccctgcccctcccactcttcttcataactgccacctttgccagaa

SEQ ID NO: 1920 - DNA, 479 bp, Homo sapiens
  misc_feature (1)...(479): n = A,T,C or G
ggggtanaatcgaaattgagaacatagccagagtgctggaattcaacgcaatgctttcttgtgtggatttgctttatgttaagattcctttactagatataggaacatgcacggagcagtttatcacatcaaacgtatgtatgtacccagtgaccactgcccaggtcagctaaagaacatttctagtaccccaggaggcttcctggccccttcccaaccaatatttcccaagaggtagcagccattaatactatgaccactaccagagaagctagttttgcctgatcttgagattgatgtgtgaactgcaggcatgttgtagtggtttatttcttctcgtgtagctttgtggggtatgaatatgatgtcctttatttaacccgttttctcttaaggctcctagaggttagggtgtccagcgtggggctcctgggcatcaagctgctgtgaacgtccacatacgtacacgtacagaagta

SEQ ID NO: 1921 - DNA, 492 bp, Homo sapiens
  misc_feature (1)...(492): n = A,T,C or G
ggcggttttnnnnnccatgattncccttgcanggcgggaatgattgcctacaaagacacccgttgcaaggatgatgagtttacacacctgtacacactgattgtgcggccagacaacacctatgaggtgaagattgacaacagccaggtggagtccggctccttggaagacgattgggacttcctgccacccaagaagataaaggatcctgatgcttcaaaaccggaagactgggatgagcgggccaagatcgatgatcccacagactccaagcctgaggactgggacaagcccgagcatatccctgaccctgatgctaagaagcccgaggactgggatgaagagatggacggagagtgggaacccccagtgattcagaaccctgagtacaagggtgagtggaagccccggcagatcgacaacccagattacaagggcacttggatccacccagaaattgacaaccccgagtattctcccgatcccagtatt

SEQ ID NO: 1922 - DNA, 480 bp, Homo sapiens
  misc_feature (1)...(480): n = A,T,C or G
caactgatacccctcgcangngcngttattgtacatcactcaggaaggattccttcctcaaggctcagcagtggctgaaggacctggaggaggagctgcacccaggagaagtcctggtgatgctggtgggcaacaagacggacctcagccaggagcgggaggtgaccttccaggaagggaaggagtttgccgacagccagaagttgctgttcatggaaacttcggccaaactgaaccaccaggtgtcggaggtgttcaatacagtggcccaagagctactgcagagaagcgacgaggagggccaggctctacggggggatgcagctgtggctctgaacaaggggcccgcgaggcaggccaaatgctgcgcccactatgtgcagccactcctgggggctgtggggaagacaccccctgcctgggccatggccagctctaggtggattctgattcactgtcaatgctgggttgctcccgagn

SEQ ID NO: 1923 - DNA, 426 bp, Homo sapiens
  misc_feature (1)...(426): n = A,T,C or G
cattgacgtactactagcccagcgtggnggaattccaacgcttgagtgcacgctcggcgcccccgaggagagccacggcgagcccccaaagcccgcacgatgcaggccactgccgattccaccaagatggactgtgtgtggagcaactggaaaagtcaggctattgacctgttgtattggcgggacatcaagcagacgggtatcgtgtttgggagtttcctgctgctgctcttctccctgacccagttcagcgtggtgagcgtcgtggcctacctgtccctggccgctctctcagccaccatcaggtttcgcatctactagtcttgtttaccagccgtgcttaatactccaccaaagtcctcctttctagtctacttgtgtcttgagattccctttttcattgtcgtttttttatgattctggtgg

SEQ ID NO: 1924 - DNA, 482 bp, Homo sapiens
  misc_feature (1)...(482): n = A,T,C or G
cggggnnnaatcgagnatcgagaacatagccagngtggtggaattcgaatttacaggagtccacatgacagtgtcctgcctggttggcagcgggggccatcacctgtggcctctgagaccgccccatttacaggaatctgcactgggtctcagtgaatgaacgtatggtagatttttattttcttggcactaaagattagcttttttaaaaaaacatcccataaaacagtagaaactcagttcccttctcaggggcacacacatccaaggcaccgtggactgtgtttccatcctggcctagaggagcagtaaaagatagcatttggtttgacatggccttagtgagtcctgcctttcctagcatgcacacaacatcctctctttgagtttgggttctccccagccccttggcctctgaggctgagggtggcttcctcccatcctcccatctcagtggttccatggcgctcccttcggcacgt

SEQ ID NO: 1925 - DNA, 491 bp, Homo sapiens
  misc_feature (1)...(491): n = A,T,C or G
naactggataaccctcngcangnncnnntnactgatnaccntaggacagngncgnggaattccgagcagtcggtgctgcaggacctggagaggcagagcagtgcccggctccaggtcggcgatggagacctaatccaaatggaagggagtccgcccgagacccaggagagcaagaggccctccagcctgggctgctgctaactggagcctgcgtggaaggcctccgctccctgcacacacacggacaggaatttccgtgactgtggtgcggagactggagcccaagctctgcagcgtgtcgccctcaagctgtaggcccgtgttccagtccctccacccacccaccgggctcagctccagggcacagtcacttgtccgttgcaggttgggcactagaaaaggcccccactggctgcctgggagccccacaccaccgggccagtgcaggcactgtggtgatcccataaaaggccagtccatttgcagggtca

SEQ ID NO: 1926 - DNA, 426 bp, Homo sapiens
  misc_feature (1)...(426): n = A,T,C or G
naatgagtgcatcgcgacagncnggnggaaancgagacagcagcccagtgcaatgctgtcgagcattgcaaacgccatgtgtggatttatgaggaggaatattccatcttggcagaaaccacagcattggtttttttctacttgtgtgtctgggggaatgaacgcacagatctgtttgactttgttataaaaatagggctcccccacctcccccatttctgtgtcctttattgtagcattgctgtctgcaagggagcccctagcccctggcagacatagctgcttcagtgccccttttctctctgctagatggatgttgatgcactggaggtcttttagcctgcccttgcatggcgcctgctggaggaggagagagctctgctggcatgagccacagtttcttgactggaggccatcaaccctctg

SEQ ID NO: 1927 - DNA, 406 bp, Homo sapiens
  misc_feature (1)...(406): n = A,T,C or G
atcgaattcgaggaccactagnccgtgtggtggaattcccactcggcacctctccgagccatgtgagccccctgatgccaccgagcaggggcagcttcatgaccgatgtctggctgaggctgtggcggacactctcggggttgtctgcaggagagcaagccaggaggacatgggcctggacgacacggcctcgcagcaaagtgtgtcagacgagcagtgacgggcgtgcggccgggcggggaggctggctcccccacacctcccacctgcattgctctccctcgtgctccccaaatcaccacaaccaaccaataccgcgatccatgagggactcctcctgtggaaaaggagagctgttccagaacacagaactgatctcaggtttttgaaaaaaaaaaaaaaaaaa

SEQ ID NO: 1928 - DNA, 483 bp, Homo sapiens
  misc_feature (1)...(483): n = A,T,C or G
ggcgggggnatcgannatcgagaccctagtcagtgtggtggaattcctacatgtgggagcttttggtatgtgacatgcgggctgggcagctgttagagtccaacgtggggcagcacagagagggggccacctccccaggccgtggctgcccacacaccccaattagctgaattcgcgtgtggcagagggaggaaaaggaggcaaacgtgggctgggcaatggcctcacataggaaacagggtcttcctggagatttggtgatggagatgtcaagcaggtggcctctggacgtcaccgttgccctgcatggtggccccagagcagcctctatgaacaacctcgtttccaaaccacagcccacagccggagagtccaggaagacttgcgcactcagagcagaagggtaggagtcctctagacagcctcgcagccgcgccagtcgcccatagacactggctgtgaccgggcgtgctggcagcggcn

SEQ ID NO: 1929 - DNA, 479 bp, Homo sapiens
  misc_feature (1)...(479): n = A,T,C or G
agggtgnaaaatcgagaactgatgnatgtgcggaantcggggcagcccgctgcggctctgctgccgggacctgcgagctgaggacctgcccatgcgcaacactgtggccctgctgcagcttctggatgcaggctgcctgcgccgcgtggacctgcgcttcaacaatctgggcctgcgcggcctgtctgtgatcatcccacacgtggcccgcttccagcacctggccagcctgcggctccactatgtgcatggggattcaaggcagccctccgtggatggcgaggacaacttccgctacttccttgcccagatgggccgcttcacctgtctgcgtgagctcagcatgggctcctctctcctttcagggaggctggaccagctgctcaacaccctgcagagccccctggagagcctggagttggccttctgtgctctgctgcctgaggacctacgcttcctggcacggagcccacatgctg

SEQ ID NO: 1930 - DNA, 486 bp, Homo sapiens
  misc_feature (1)...(486): n = A,T,C or G
ggggaatctgagtccctagtccgngtggaggaccctagtcagtgtggaggaattccacatccatactcgggaaccggatgcccagcggtcaccggcccctctggtatgcctgtgggggtggggaccctgtagagagtcagaatgggatggaagcctcctgcctgcccagctcactggaggggtccccagcctagagggccagtccccagtgggcttgctggtgcccacctcagagagggcagtgtcctttctctttgtgcccagngggcacagggcgttgtggctgcttcatcacctgcacatgccctgagcattgcctggtttcagttcactttatttactatgacacatactttcagagtcctagatgtgctgtcatcgagtcccaggtcacatcgtcacactcatcagccctctgcggccagtgtccccacctcctgccatgtttccctagtagcttggtctttatccagaactgtggggctg

SEQ ID NO: 1931 - DNA, 470 bp, Homo sapiens
  misc_feature (1)...(470): n = A,T,C or G
cttagaancctttcagnngggggaattttgatctcctcctacttgttcccaccttgggagaggacgatgacttgggagggacgcgtgtagggagaaggggtcctcccatgttgctgaggatggcctgaacctggagcagcggaccaggcagacgggctgaagtggggtcccaaattccatgtccagaggtgtggggagcctgcctccctagctcctggcccctgccaggggcttacatcaaaacacctcatagggctgccctccagaggctgcacccatatcagtgtgacatgtgcaggggtgtgggcttggtgggtgaagaggatgtggtcctatctgatgctgcacctcttcaggagtagcccgctgctcctaccccctgactggctcttgcgtactcacctctcaccctctccttaccgggaggccctgggaggtgatcattgacacccatccaagcagacagctgc

SEQ ID NO: 1932 - DNA, 443 bp, Homo sapiens
gcggcgtcaaaggtgaagcaggacatgcctccgccggggggctatgggcccatcgactacaaacggaacttgccgcgtcgaggactgtcgggctacagcatgctggccatagggattggaaccctgatctacgggcactggagcataatgaagtggaaccgtgagcgcaggcgcctacaaatcgaggacttcgaggctcgcatcgcgctgttgccactgttacaggcagaaaccgaccggaggaccttgcagatgcttcgggagaacctggaggaggaggccatcatcatgaaggacgtgcccgactggaaggtgggggagtctgtgttccacacaacccgctgggtgccccccttgatcggggagctgtacgggctgcgcaccacagaggaggctctccatgccagccacggcttcatgtggtacacgtaggccctgtgccc

SEQ ID NO: 1933 - DNA, 489 bp, Homo sapiens
  misc_feature (1)...(489): n = A,T,C or G
naactgaaaacctccgcannnncnnnnnactgatgaccctactccagngccgnggaattccaggactcaggcaggtatgaagtagccagccacaagtgtgaaaaggaagagtgctgagagaaactgcctagtcatgtgatatccctaatgcactgtgctttcttccctcaagaaccaccccttctggttccgctgcatgtacatgctgatctggggcaagtttgtgctgtacaaatatgtcacctgttggctggtcacagtaagtagaaaagttgaaacaaggtcctatttagacaagccatgggggccagtatggggagtggcaagagccctaactgagctattccctctcaggaaggagtatgcattttgacgggcctgggcttcaatggctttgaagaaaagggcaaggcaaagtgggatgcctgtgccaacatgaaggtgtggctctttgaaacaaacccccgcttcactggcaccattgcctca

SEQ ID NO: 1934 - DNA, 497 bp, Homo sapiens
  misc_feature (1)...(497): n = A,T,C or G
cgccatcgaccccctccccnnnncattgagaccactagtccangtcgnggaattccaagccagaggcacccggatgtgaggccccagatcacctccagggacttggggttcccatctgaaatcctttatttttgtaccatggggtgggccccgggcctgagaaagaagaagcaccctctccccggcctcctctgtctgcacccgtggggctgtgacttactcctgcctccaggggcgggcggggcccccctgggacctcttaaggcccaaggtgggccccaggacctctgggcagagtggactgctcatggcagatgtgtggcaatgtctggctgtgtctctccggcacctgcgtcccctctcccgggctcccctgctgcatggtggatgtgctccttcctggcccggtcacattgcctccttgagccttagtccagggggtcactcctcccaccccacctacctcacagggttgttgtgagggtgcacagaggagc

SEQ ID NO: 1935 - DNA, 489 bp, Homo sapiens
  misc_feature (1)...(489): n = A,T,C or G
gggggggnatcgagtttcgagaccatagtcagtgtggtggaattccggcaaccgtagctgctgccgaccggtccaaatggcacattccgataccgtcggggaaaaattattttagttttggaaagatcctcttcagaaataccactatcttcctgaagtttgatggagaaccttgtgacctgtctttgaatataacctggtatctgaaaagcgctgattgttacaatgaaatctataacttcaaggcagaagaagtagagttgtatttggaaaaacttaaggaaaaaagaggcttgtctgggaaatatcaaacatcatcaaaattgttccagaactgcagtgaactctttaaaacacagaccttttctggagattttatgcatcgactgcctcttttaggagaaaaacaggaggctaaggagaatggaacaaaccttacctttattggagacaaaaccattcagatgcctttcttgaagaaacatttct

SEQ ID NO: 1936 - DNA, 485 bp, Homo sapiens
  misc_feature (1)...(485): n = A,T,C or G
cgagatcccgncaatagagacccttggacagccngctggaattcgcgcacactcctggttttaaacaattctctggatttatttatttgttttaacttttctgtgctgaagagaggactagggggagggggcttcccctttcagctgcccggccccccacacccacagcttgctcttctatctccacaacgtgagcctggaagaggagaaaatgtggctcctctggagcttggcagaccacttttcggtctttgcgtgatgttccttagcccaaagacggtgagacagggctgaaatcaggtggcttctgccaccctgagccctagacccatgggtggctaaatccactggactgagaagactataatttatttccataatttatttggagattgaggaggctttggctgcacttctttggctggtgggtaatgccaggggtggggtgggcacaggccctcaagagccccttttgccttgtagtc

SEQ ID NO: 1937 - DNA, 472 bp, Homo sapiens
  misc_feature (1)...(472): n = A,T,C or G
nttagagaccctatccatgtggggaatttagaaacgctcagcacaagatgttggaactgaagaggcaggagattgccgagcagaaacgtcgtgagcgggagatgcagcaggagatgatgctccgggacgaggagactatggagctccggggcacctacacatccctgcagcaggaggtggaggtcaaaaccaagaaactcaagaagctctacgccaagctgcaggcggtgaaggcggagatccaggaccagcatgatgagtatatccgcgtgcggcaggacctggaggaggcgcagaacgagcagacccgcgaactcaagctcaagtacctaatcatcgagaacttcatcccgccggaggagaagaacaagatcatgaaccggcttttcctggactgtgaggaggagcagtggaagttccagccactggtgccagccggcgtcagtagcagccagatgaagaagcggccaac

SEQ ID NO: 1938 - DNA, 438 bp, Homo sapiens
attcgaagcccctattgacgactcctagtccgtgtggtggaattcctggaatacagtggtgtgaacacggctcactgcagcctcaacctcctggactcagagatgtcggcttatttataggaattgcttgaagccagagtcatggtggatgtcggaaagtggcccatcttcactctactctcccctcaagagattgcgtctattcggaaggcgtgtgtcttcggcacctcagccagtgaagcactgtacgttactgacaatgatgaggtctttgtatttggactgaactatagtaactgtctaggaactggagataaccagagtacacttgtacccaaaaagctagaatgcttatgtggaaagaagattaaaaacctcagttacgggagtggaccacatgttcttctcagcaccgaagatggagtggtttatgcctgg

SEQ ID NO: 1939 - DNA, 434 bp, Homo sapiens
  misc_feature (1)...(434): n = A,T,C or G
nattgaagacctcattgacgccccttagaacacctgaggaagccccaagggcacagcggctgggaaactgatgcacaagagtctgttcatagagtatgcctggagcctggggtgtgctttagaggcagagggttcagtgaggatggggctagggcacatcggcttgctgctctcacatctccctgtggcctctccttggcaggtgtttgagaagtcccccctgcgggtgaagaacttcgggatctggctgcgctatgactcccggagcggcacccacaacatgtaccgggaataccgggacctgaccaccgcaggcgctgtcacccagtgctaccgagacatgggtgcccggcaccgcgcccgagcccactccattcagatcatgaaggtggaggagatcgcggccagcaagtgccgccggccggctgtcaagg

SEQ ID NO: 1940 - DNA, 452 bp, Homo sapiens
  misc_feature (1)...(452): n = A,T,C or G
ntttgaaaactcgatgacattagncagngcggnggaattcccgaagatggcggaggtgcaggtcctggtgcttgatggtcgaggccatctcctgggccgcctggcggccatcgtggctaaacaggtactgctgggtaagtcgctgctcgtggcccctctgtcatgggcccccgctggaggtcagtgatgagcaacattcaccatctttcgtttgagtctcacggccatgagatcaaccccatgcaccgctctgagacctgccagccactcttccccagggttggggactccaggctcaagaagtaattatgtattaggctagtttttcatttaaacaggaacttagctctggcaagtactgcgctgtgtctggagggtgactgcataggcagtggtgggaccctcaggcggctcggccctgctaagcctttccctccctctaggccggaagg

SEQ ID NO: 1941 - DNA, 241 bp, Homo sapiens
gatcgcttgagcttgggtcattgcattctgctcttcccttcgctccggcccggtgaaactgaacttataatcgtcactggattgtaagtacccgaggcgaagagagctcgctgagccctgattttttgagtgtctttgttccgggagagtttgcgagttgaaagtatctctgctgggctttctgggccgaaaaccgttccgggggagccgccatttgctttcctgttccctagctagctag

SEQ ID NO: 1942 - DNA, 480 bp, Homo sapiens
  misc_feature (1)...(480): n = A,T,C or G
agggagagcactcgccccctactagatacttttgacnctcgagnncnccgccnantngccaccacgccacacaccacatgcgcacacacacaccacatacgctatatgtatacaccatacacacaccatacatgcaccacgtgtaccacgcacccacacagacacagcacacgcatacaccacacacacacgcacacatgcgttccgcacagtaatgtctcttgggtgtaagaacacgacttgccagtagtagcgttatggatgcgttgcctggattctaacagcgcgattctccccttgccctcctgggtatccacatctacagcttctagtggtctcagacttgttcaccgagcgcaaccagtttgagctaatgtatgtgacgctgacagaactgcgaagggtgcaccctctaaaagacgagatcctcgctcagtacctggtgcctgccacctgcaaggcagctgccgtccttgtgag

SEQ ID NO: 1943 - DNA, 464 bp, Homo sapiens
  misc_feature (1)...(464): n = A,T,C or G
gtcgacaacctgcgtgttacctcggacanngcgnggaattcgagagtgtttcgcctctaatcacgccaaaccctcgaccagtgtaggtggtaagagacttctgggactgaggcctcttcccttaccagggacctaaaaccttttctccggttgggctagctcgctctcggggaagaactacacctcctacatccaccctctacctctcattttaagtcccttgtgcctgagcatttctctccacgtgactcttaaggtgagaagcctcttgcccatccctttactccgtaattaacgggtgttgtgaccagatgaccagtctgccccactaccaggaaaattgggagtttgggatactgtaggcataagaggatactgacagagacgttctggatgttttcctgacgctgagaactcctaaacttgcatcctggcgtctgctaaggtgtatctctgcctctcca

SEQ ID NO: 1944 - DNA, 464 bp, Homo sapiens
  misc_feature (1)...(464): n = A,T,C or G
ntcgagttccctagcccagtgtggtggaattcgtttccgccttttcttacatctgtccctggaggccgtgagaaggaagagtctccccaaccccgccgaaagcgacagccctccagctccagcagtgaggacagtgacgaggagtggcggcggtgccgggaggcagctgtgtcggcgtccgacatcctacaggagtcagccatccacagccctggaacagtggagaaggaggcaaagaagaaaaggaagttgaaaaagaaagccaagaaggtggccagtgtcgactcggctgtcgctgccaccacccccaccagcatggccacagtccagaagcagaagtcaggtgagctcaacggggaccaggtgtcgcttgggaccaaaaagaataaaaaggcaaagaaggccagcgagacctctccattcccaccagcaaagagtgctacagctatacctgcaaactgaan

SEQ ID NO: 1945 - DNA, 235 bp, Homo sapiens
tgcaaggcctgagatgccgcctccgcaaccggaaattctgctgcgtgggatggggtgggcctggcctcaggcgtttgaaagcttccacgtggtcctgcggagactccacgtgctgcgagggtctggcacacaatggcactcaatataagctgcctgcgtggggggtgcacttgcatggaaagagcaacagagctgaccctccattccactctctggccggaaatcttgttttggg

SEQ ID NO: 1946 - DNA, 489 bp, Homo sapiens
  misc_feature (1)...(489): n = A,T,C or G
ggggtgagcggntcccncnccttagagnaaaatgagatcctacgcagngccgnggaantcctgaggtttttaccgatttatagagcagtcaaatccgaagtgctcgagtgcttacaaaccccctctggtgcttggttgaacaagggaatcacaagaaaacgaaaatgcaaaaactgaacttcgggggtcgttctgtgccttccagcatcttgtacagcaaatcctgactcgtgtctttttacccccaagatatctgtcttcagtagcgactgaatctgccactctcagaataagttccttgcatttattccaaataatctcgtttactctcacctgtttatgcaaattgtataaggtttcttatgcccaagcttgaaaaatgatttcccagtagacaagaggcggctacctatcctacagttacggtatttatttacataagaagatcttacaggagttctttgcttgaatccgttctaacacccgcgg

SEQ ID NO: 1947 - DNA, 483 bp, Homo sapiens
  misc_feature (1)...(483): n = A,T,C or G
gggagacgcggtccncccaatgagaaatgaggaacntncgcggaanccggctnnggaattcgncgacttaggggttggccacgatggtgtccttgatccacttccggtaatgcaccaccttggtgtacagggaaggcctttcgggcagggcacatggttcactgccccatgacgtgataccttgaagcacaccattacagacaagtggggccccagaatcacccgagcaggtgcttttgccccctgtccagcgtccagcacacagcatgaacttggtcaccttctgagggtgaacttgcgcacacacgtcattggaaataacatggaggtccacacactgaagtttctttggggtcaagaactcctctggttcaatgctgccccagcctgaggcgtagcaggtggtccccagtgctggctcctgggtgggcaggtccatgaccttcacagcatccgtgagctcggcaggctctgacaggcggn

SEQ ID NO: 1948 - DNA, 463 bp, Homo sapiens
attgaattcgtagaccctagtccatgtggtggaattcctaccataagggcaatgacaagggtgatgagagccagagccagtcagtacggaccctattcctggagctaatccgagcccgccggcccctggtgctacacaatggccttatagacttggtgttcctgtaccagaacttctatgcacacctccctgagagtctgggaaccttcaccgctgacctgtgtgagatgttcccagcaggcatttatgacaccaaatatgctgctgagtttcatgcccgtttcgtggcctcctacttagaatatgccttccggaaatgtgaacgggaaaatgggaagcagcgggcagctggcagcccacaccttaccctggagttctgcaactatccttccagcatgagggaccatattgattaccgctgctgcctgcccccagcaacccaccgtcctcatcccaccagcat

SEQ ID NO: 1949 - DNA, 466 bp, Homo sapiens
  misc_feature (1)...(466): n = A,T,C or G
nttcgtagttccactagcccagtgtggnggaattcgtacgtctacttcagcctgctgcaggacctgagcccacacgtgctgcccgtgctgggttcctgcggccacttctacgcggtggagttcctggccgcgggcagcccccaccacagggcactcttccccctggaccgggccccaggtgcccctgggggtggccaggccaaggccatcagtgacatcgcactcagcttcttggacatggtgaaccattttgacagtgacttttcccaccgcctccacctctgcgacatcaagccggaaaactttgccatccggagcgacttcacagtggtggctattgatgtggacatggccttttttgaacctaaaatgagggaaatccttgagcaaaactgcacaggagatgaagactgcaatttctttgactgtttttcaagatgtgatttacgagtcaacaaatgcggag

SEQ ID NO: 1950 - DNA, 487 bp, Homo sapiens
  misc_feature (1)...(487): n = A,T,C or G
ggtacgannaattgaaacctcgtagtacctactccgtgtggtggaattcctcaactgacactatattttgcattgtcttctgacacgaacgggagaaggctagagggggcccaatatgagacaggacacctgtgctggtctatgcatcgctcgctactttgccgtaaaggatgcccatcgcacagtgcgtttgtaacacaccgacctgtgctgctcgagaggacctggtacgtgcgattgaaacgtgggtgacggcgcctacgctgcggcccttcactgctgtgctgggttcctgcagcctgctacgtttcccttggcaatgtaaatgaacatggaggggtcgtttcgtgatttcctgctgctgacaataaatgtcttgttaaaaacgtggcaacggttactcttaagtgccatggatcgatgtcagggtggtcagctctggactaagccacccacctccaatttgtacaacagtattgatacatag

SEQ ID NO: 1951 - DNA, 477 bp, Homo sapiens
  misc_feature (1)...(477): n = A,T,C or G
agaagatccggagggnnggcctgagnccnactgagaccctagnacangcggnggaantcaaatcttctgcagagcaagtctgtttgtcttccttaaacttaaaatgtaatttattttaaaagcagatggttccggcactggaaccattctcccacaattcctttcaatgacacatctatagagctataattataaattcctttgaaaaccaatgggctttttgacatgagtgtcagtaaagatcaaatcaaatcgtaccaataaaattaaatatattttaaaaacaaaaacagctgtaaaaattttaaatgagttaatttcaattaaactctcaaagtatcaaggaatacataaaaaatgtgtactccgagccatgtgacgtgcaacgtgtctaatagtattttatcatgcaacaacatggtgggtaagtattaactcccttttacagatagaaatagacccaaagatggtgaatan

SEQ ID NO: 1952 - DNA, 432 bp, Homo sapiens
ctcccattgagagtgcagaggacctagcgaagcagacagaaattgcctacgggacgctggaagcaggatctactaaggagttcttcaggaggtctaaaattgctgtgtttgagaagatgtggacatacatgaagtcagcagagccatcagtttttgtgcggaccacagaggaggggatgattcgagtgaggaaatccaaaggcaaatatgcctacctcctggagtccaccatgaatgagtacattgagcagcggaaaccctgtgacaccatgaaggtgggaggtaacttggattccaaaggctatggcattgcaacacccaaggggtctgccctgagaaatccagtaaacctggcagtgttaaaactgaacgagcaggggcttttggacaaattgaaaaacaaatggtggtacgacaagggcgagtgcggct

SEQ ID NO: 1953 - DNA, 426 bp, Homo sapiens
ctcgagactaaccatcctctgataccccacctgctgacgcacgtaccaatctatactgtacaccgacagtggacatcatcccttgtcctgcgattcatcacgtgttcgcttgacatgctaagcttcactgctactgcctgtgccctaaaacgggcagactgtgtgttgcattgcctgagggtcttccacaacatctcaagccggtctctcctcccagatctgcgagaagtttgggcccaatctggacacgtgccctgaaggcaccatcctgggactgcggctggacagctctggggggctgcatcttcatgttaatggggtggaccagggggtagctgtgccagatgtgccccagccctgccatgcgcttgtggacctctatgggcagtgtgagcaggttattggcagtgggggcagggaggaggg

SEQ ID NO: 1954 - DNA, 431 bp, Homo sapiens
  misc_feature (1)...(431): n = A,T,C or G
tctgattgtatgtgttgttccctgctggctttggcgtcagtggacctcacagccttaggatatttgcatgtgctgttccctgtctccaccactcttgtctgactgtccaggtcgaccctggtgaatttgtggcctggggcctaagtgcatgcctgagcccgctctaacttttttagcaggaggtagacctttggaggcaccctaacaccaaccaggctgcgtctgagctctgccaggccgtggccagcagctggaagtgatgagctgtccaggtgtgtgccaccttggggagctggtgggcagccagcccgccctgtacagcaccagcagcggttgccctgtgcctcctctgaattgcaaccagagcagcggcccctccaaggaccaacagtgaagggctctcttccatcagcaatgattagtccttcctn

SEQ ID NO: 1955 - DNA, 428 bp, Homo sapiens
gtgggttcagcgtgggcgaggaaagcctggcgagcgtggccctgtaaaagctttctgaggcgggaggcgctcacttacctctgactgcctgggcgctgcgtgtagcatcttggcctacaggacagattttaggtgacacctggttatgacagtcagaaatttgagaagcttctcacaagtgatgcactttaaataatctgcatgccattgagacacctgcatgtctggtgtttgtggttcaagtgtcttgccgccggccttcggatgtaaacccactgataacggacagaaagagaatgcccacaagtgggtcttctttggaagatgcagaaggaggaagttagtgcttacattttagtctttttctccctcaaaaaaataggttaagtttcagtgccagctagaaaatactgctttctgccatcgat

SEQ ID NO: 1956 - DNA, 464 bp, Homo sapiens
  misc_feature (1)...(464): n = A,T,C or G
nggatgatnccccatcgagttaccttagaacagngcggtggaattccaattgcattagattaagtgtaagtttctttgaagtaatttacagatctcaaaggcaaagctagaaggaaggtagctttgggtgactctgtcgaaacaacccgagcaaggtgtttttcataggctcatatggactgcttcttttttttttttttttgaaaagggattttttttcccccagcttgaagtgaaaaggggaaatttaagttaattggaacttttccctccaaggtgggggaaatttccccatttggcccccccgggaaccgggaataaaggggccctcccacacccttgggtaaattttttttttttgaaaaggaagtttttttttccccccaggctaaagagacggggcttgattttggccaaataaaacccctcccctcggggttaaaggaatctcccccccccacccn

SEQ ID NO: 1957 - DNA, 488 bp, Homo sapiens
  misc_feature (1)...(488): n = A,T,C or G
aagcccagccccncccncnnnnttttgaatccctatcagtgtggggaattttgaagccagctggaccgcaccacgcctaggtttggaagcacaaacacgcagcgccgtgccgcagtggcctacagcattcagcgcattagcactctgcacgcatttgtagcctgggagccacaggctatgccctacagcctgggtgtggaggaggccgcaccatcgagctctgtgtaagtccctgtaggatgcttgcacgacaatgcaatcacctggccgtgcacatccctgacggtgggtgacatgtgaccgttgctatgcttatttcatggtgtctgtcctaggccggcggttcccaagccctagcctgtgtcaaaacacagggctccttacgggagggtgctggaccccaccccaaggccctggttctgtggtctgaggtggactcaggtttacacctggagctgcccgggtgacacgtctggtctgggactgca

SEQ ID NO: 1958 - DNA, 486 bp, Homo sapiens
  misc_feature (1)...(486): n = A,T,C or G
aggggccggnnnncnnnaacctgaggcctttcgannnncnnctgggaccatccgacnacggngnacncannggnnctgcactgaggccctcgncatgggggcgcctgggtggnacttggtagcggcggctctgctagtcggctttatcctcttcgggactcgcagccggggccgggcggcatcagccggccaagagccactgcacaatgaggagctggcaggagcaggccgggtggcccagcctgggcccctggagcctgaggagccgagagctggaggcaggcctcggcgccggagggacctgggcagccgcctacaggcccagcgtcgagcccagcgggtggcctgggcagaagcagatgagaacgaggaggaagctgtcatcctagcccaggaggaggaaggtgtcgagaagccagcggaaactcacctgtcggggaaaattggagctaagaaactgcggaagctggaagagaaacaagcgcg

SEQ ID NO: 1959 - DNA, 480 bp, Homo sapiens
  misc_feature (1)...(480): n = A,T,C or G
ntttagaaacccttngcaggngcgggaanttagtagtccctagtccatgtggtggaattcagaccatgcatttcattcttgcctccactgctctgcacccctgactcactcctcactatttctatgacctcttggttacccactctacgcccctgcattgcaccaaccacacattccctggcatcatttctagtcctgactttttcaaaagagcttttactctttgactttcaaatgcacaatgacaacttgaaaacaaggagaagcttagctgacaggtcacacacccagcagttttaaaagaccgagagaactttcggctgtaggggagtgaagaagttgataaatcctttctctgaaacaactataaaactggacaaaactgtcaaaaacaaccattttggagctccagaaattggccaaaggcaaacaacaaattgagaatagtttatttatgataaacttctgaatttcaggtaa

SEQ ID NO: 1960 - DNA, 479 bp, Homo sapiens
  misc_feature (1)...(479): n = A,T,C or G
ggttgtacagggnnnnnnnggaattgtagacactagtacagcgcggnggaattccaagggaaaaaatgaattggacttatgaggtataatggctattatcctagagtggtggtagaagaaaggagaggatggagagagattaaataaattagttgtttactgaaacttttttttttgagatggagtctcactctgtcacccaggttggagtgcaggggtgtgatcttggctcactgcaaactccgcctcctgggttcaagccattctcctgcctcagtctcctgagtagctgggactataggcacctgccaccatgccaaactacttttatgtatttgtatttttttttttttttttggaaaaaaagtttctttttgttccccaggttggagtacagggggggaatttaacttaattgaaagctccgcctccggggttaaaacaattttcttggctaagcttccaaggtgggggggaca

SEQ ID NO: 1961 - DNA, 491 bp, Homo sapiens
  misc_feature (1)...(491): n = A,T,C or G
gggacgggttgaacccctattgagtggcgtaatcacgggaggcaaccaccgaacaaaagctttcgagcgccgagngccctgctgnctccaccctcaggccccactaccttctgatactcctgggcctaaccatccccgctgggacacgcactgaggctgggctcagtggtgtgcacagttcctctttctgggaactgctcttcctgtcagatggagaggaagagccaccttccctctgaagggggtgaatgggagaccgagccgctgggcaccctggcccaggccccctccccctctcccgagtctcacctccaggatgtcagtggtggggatctccatggattctgttcctccgtagtacagatactgcatcatcatctgtggtgggaagaggcccatgtgaatgccacgtgaacctgaggcatgaaagtccttgccagccccacagggtactgctccagctgccgcctccagggggcctgtccctctgn

SEQ ID NO: 1962 - DNA, 472 bp, Homo sapiens
  misc_feature (1)...(472): n = A,T,C or G
tcacttagnggttttgagccccctgatgatcatagaccangcggnggaattccacctccctgagtgagtttcttctgggtgtccttttattctgggtatggagcgggagtccgtgttctcttttgttcctgtgcaaataatgaaagagctcggtaaagcattctgaataaattcagcctgactgaattttcagtatgtacttgaaggaaggaggtggagtgaaagttcacccccatgtctgtgtaaccggagtcaaggccaggctggcagagtcagtccttagaagtcactgaggtgggcatctgccttttgtaaagcctccagtgtccattccatccctgatgggggcatagtttgagactgcagagtgagagtgacgttttcttagggctggagggccagttcccactcaaggctccctcgcttgacattcaaacttcatgctcctgaaaaccattctctgcagcagaan

SEQ ID NO: 1963 - DNA, 476 bp, Homo sapiens
  misc_feature (1)...(476): n = A,T,C or G
ntttagaanccgttgnagnggccggnnnttcgagtccactatccaagtggaggaattcccacggcctctgcagttcagtcattttaggaaatacctttatgaagtagtgagccactcgtcactgatgatattcaagccaagcctggacaggatactggagtggagggttaagctgccatcttcccacagttagcctctatgcccagccccccagctccttccaggcttgatgcaaagcacggccctagccttgcaagtcaggaaacctgagtttggccctgcacctgccccggctgacttcctgtgggaagcggccgtttccaccagggcaggaccactggtggtggtgtgtctctccatgagaacagggcattacagcatgaatccagcatctgcttcccaacgaagcgagagtgtttttcagggctgggcttgtgtctggggtggggtgggggtacgaaggctgctctggcttc

SEQ ID NO: 1964 - DNA, 505 bp, Homo sapiens
  misc_feature (1)...(505): n = A,T,C or G
aggggtnncccccaatgagaccctagccagggcggaattcccaggggtccgtggcttaagccctggctctgcatggggaatcttgggaaggttggaagcccacagcccctactgagaaaggagccacgggccagatcttttgcacaaatcctgcctgtgctccttgactgtctctccccaccggggtcacggtgaccaagcaggcaggagactccatccgttcacaggactagcatcctgggagggccctggcctgagcgagctgctgcaggggaccctcatgctggatggttggccactcagcacccttttctctgtggagcagggatgacatttgagagccaccaaagatgggcaggaaaaacaaaggccaccacagaggaagctgaaggcagaaagagatgcagagaaagtgggagaaactcggctgtgctttgtgggggccctgcagggacatcagctcctgaaggggtgaaagaaagggtcccctgaactttgacactgn

SEQ ID NO: 1965 - DNA, 478 bp, Homo sapiens
  misc_feature (1)...(478): n = A,T,C or G
agaggtgncaaactgtatcctgttgatgtccngtaattcgaacgctcatgtcaccgatccaaaggcagacccccgggctctcctagagtgtcggagggaactaatgcaactggaaaaggagctggtagaacgtcaacctcaagtggacatgttacaggagatttcaaacagccttctcattaagggacatggagaagactgtattgaagctgaagaaaaggtgcatgttattgagaagaaactcaaacagttacgggagcaagtgtcccaagatttaatggccttgcagggaacccagaacccagcctcacccctgcccagcttcgacgaggtagactcgggggaccagcctcctgcaacatccgtgccagctccccgagcaaagttcagagcagtgagaactacagaaggcgaggaggagacagagagcagggtccccggcagcacacggccacagcgctccttcctctcaagggtg

SEQ ID NO: 1966 - DNA, 493 bp, Homo sapiens
  misc_feature (1)...(493): n = A,T,C or G
agggggnnnnnnngggaatcgannccctngnnnntactgagaccctagtccatgtggtggaattcgacttgaagtttcagaatattgttgtggaaatcttaattgaaaaccatgaaaagatttttcggacgccgcccgatactacattccctgagcccacctgcctgtcagcatcacccccaaatgcgccaccaaggcagtcgaagagacaaggccagagaaccaagaggcccgtggccgtctacaatctttgtctggagctggaagatggtgacaatccttacccttccaaggaggacacccctaccagcagtctggactcactttcctccccgtctcccgtgactacagctgtccctgggcctcctggaccagacaaaaaccaccttctggcagatggagggagctttggagactgggcatccactatcccaggccagacccgatcgtctgtggtccagtggcttaacccacagtctccaaccacaacaag

SEQ ID NO: 1967 - DNA, 467 bp, Homo sapiens
  misc_feature (1)...(467): n = A,T,C or G
ntcgagaccctatccagggcggaatttagagctccttcttctccccagagataagcggctcccagcttttggctttggggctcgaatcccccccaacttcgaggtaagctagatgcgagggaaagaaagagatggggggcgtgtcagtcaggcagaaaaggcaggccctcactgctcccgccttgccctcacaggtgtcccatgactttgctatcaactttgacccggaaaatcctgaatgtgaaggtaaaaggggagattttcacctgccccgcctccccgcagacacactccacacaggagcacagactccactccccaaggcccagcttcctgtcccttccacccatcccaagcctgtctttatcaggtgaggcttccagggccgaggcccaacatctggacccacttctccttgccagggaaccatccaactctcccactgctaaatgaaagaactcgagggg

SEQ ID NO: 1968 - DNA, 487 bp, Homo sapiens
  misc_feature (1)...(487): n = A,T,C or G
agagcgggcncnnccaatgagaactgagagcctgncaagngncgnggaattccggcggcctcgaggtgacaactgtctccgtcgcaggctccggcgggggcgcaggaggtcgcccggcgcgtcactgtcgggtcggcgagccacgggggccgccgcagcaccatggcgaccaccgtcagcactcagcgcgggccggtgtacatcggtgagctcccgcaggacttcctccgcatcacgcccacacagcagcagcggcaggtccagctggacgcccaggcggcccagcagctgcagtacggaggcgcagtgggcaccgtgggccgactgaacatcacggtggtacaggcaaagttggccaagaattacggcatgacccgcatggacccctactgccgactgcgcctgggctacgcggtgtacgagacgcccacggcacacaatggcgccaagaatccccgctggaataaggtcatccactgcacggtgg

SEQ ID NO: 1969 - DNA, 510 bp, Homo sapiens
  misc_feature (1)...(510): n = A,T,C or G
aagggnnnncccccaatgagaccctggcagatggaggacctacccgggtcgagccttggagttcatacagccaggaataaggacgtcgctcacaacatgagcacgcccaacaagctgctgcggctggaggacgacggcaccctgctctacaccatgcgcttgaccatctctgcagagagccccatgcagcttgaggacttcccgatggatgcgcacgcttgccctctgaaatttggcagctatgcgtaccctaattctgaagtcgtctacgtctggaccaacggcttcaccaagtcggtggtggtggcggaagatggctccagactgaaccagtaccacctgatggggcagacggtgggcactgagaacatcagcaccagcacaggcgaatacacaatcatgacagctcacttccacctgaaaaggaagattggctactttgtcatccagacctaccttccctgcataatgaccgtgatcttatcacaggtgtccttttggctgaaccgc

SEQ ID NO: 1970 - DNA, 486 bp, Homo sapiens
  misc_feature (1)...(486): n = A,T,C or G
tgggtttcccagaggccnnaaaactgagannccagggtggctangcacnngccgnggaannccctcttcaccgcaccctcggactgccccaaggcccccgccgccgctccagcgccgcgcagccaccgccgccgccgccgcctctccttagtcggcgccatgacgaccgcgtccacctcgcaggtgcgccagaactaccaccaggactcagaggccgccatcaaccgccagatcaacctggagctctacgcctcctacgtttacctgtccatgtcttactactttgaccgcgatgatgtggctttgaagaactttgccaaatactttcttcaccaatctcatgaggagagggaacatgctgagaaactgatgaagctgcagaaccaacgaggtggccgaatcttccttcaggatatcaagaaaccagactgtgatgactgggagagcgggctgaatgcaatggagtgtgcattacatttggaaaan

SEQ ID NO: 1971 - DNA, 478 bp, Homo sapiens
  misc_feature (1)...(478): n = A,T,C or G
aggaggtgcncagggtgcnnaaccctgggntcctaacncctnngnaanancngncaagaaccccgacttgcgtatcgcgcagctgcgcttcctgctcagcctgcccgatcaccgtttagacgctgccgtgcgcgacgagcggatggcgggcgtccgcgataacagtgaggcccgcacgagcgccgagtcagcggcctaggcctgggccgtccccgcgttccggagcctgcggggactttttttgatggagctccagacccctctgacggggtctcagagaccaggcctggcttctccggcccttatggttttgctttggtttggggataccctgggggacctcgacttgcctcagcggggtctgcatctctctgtgccgccttcccctacatggcttcttactatgaagccttgtgcaaatccctcgactggcagatagacgtggacctactcaataaaatgaagaacgctaatgaaa

SEQ ID NO: 1972 - DNA, 474 bp, Homo sapiens
  misc_feature (1)...(474): n = A,T,C or G
nttcagagtcccctattccagtgtggtggaatttctcctgcctctgccagcaggggttgccgccagaccagagccagggccaggtccctgcgttcatcccccccggtaggatggacgtgagccatccttctaggggacttttttcagtgtgcgactcgtctctgttaggtggtaggagccagtttgtgtggcctgtgccacgctccacagtgcgtggctgggctctgtgtgtggcctgtgtcccctgtccctgcaggacccagcaggcatcgtggcgtgacagctgtgtccaagccactgcccgggcatcccatcacccaccagggtgcacggtctctcctgctgggggctttctgtcgcatgtgtgtctcctgtcgactctgcagtttgttctcagagcagaatgtttcctgttctcagtgcacaaagacactggttttcaatcggcgtctaaaaccacgttcctgcctttct

SEQ ID NO: 1973 - DNA, 484 bp, Homo sapiens
  misc_feature (1)...(484): n = A,T,C or G
ctttaggatanccnttggnagngnggnggaanttagtattccctagtccagagaggaggaattcggccttcctcatcggctggaatgttctcctcgaatacatcatcggtggcgccgccgtggcccgtgcctggagtggctacctggactctatgttcagccacagcatccgcaacttcactgagacccacgtgggttcttggcaggtgcccctcctgagccactacccggacttcctggctgctggcatcatcctcctggcctctgcctttgtctcctgtggagcccgcgtgtcctcctggctcaatcacaccttctcggccatcagcctgcttgtcattctcttcattgtcatcctgggcttcatcctggcccagcctcacaactggagcgctgacgaaggcggctttgcacccttcggcttctccggcgtcatggccggcactgcctcctgcttctatgctttcgtgggcttcgacgtcat

SEQ ID NO: 1974 - DNA, 484 bp, Homo sapiens
  misc_feature (1)...(484): n = A,T,C or G
tgggtatncccagagtgccccacaactgaganccttacntggctnagcacngncgnggaancgngaatcttaaagggctttttatatcagttgaaagtgtgttactgcgcatgcatttggtgattccagtgctagatatttaattactgtgtatgtagtgttttgattttctataatttcagttccgcgtgtttttacacttgttcattttaaattgatgtttcattttcacttataatactgtttgacttgtctctatcatgtcaccataaactgtaatattttcaagggttatagatcaaagatatttatttagaaatgtacaagataatgaaatttagattccttatacttaaggctgattttattagaagattattttaatgttctattataaattttaagaatttgtattcaaattgtatgtaaaatatgtaaaatgttgacggtactatattaagtggttctataaaagctattcacc

SEQ ID NO: 1975 - DNA, 468 bp, Homo sapiens
  misc_feature (1)...(468): n = A,T,C or G
ccctagattcccctttgcagggcgggaantttgatttcattggctctctcgacctttcctttcttacatcccaaactgtaatcatttttatcatcatgtcccgtgttctgtgttactgcgcccagttaattaactctgccatgtgagtcattcaagctggaaacattgcaattacatatgatctctccctttcccttcacatttaatccacacttttaccaactcctgccaactcttctactacaccatttcccttccctttatctggctaatcccaccaccatttttttagtcagactctcattggtcattattgaggtctttttaacggactttccatcacgagtatcttccctctgctttaacagcctgtctccctgatataaaggctctttggttctaaaaaagaagctattatatcttgtcattcagaatacccatggggaagactcatgttcttccaatcta

SEQ ID NO: 1976 - DNA, 485 bp, Homo sapiens
  misc_feature (1)...(485): n = A,T,C or G
tgagttncccagagtgccnnaccctgagangcctganangcaanggaagngccgnggaanncccgcgaagatgcagctcaagccgatggagatcaaccccgagatgctgaacaaagtgctgtcccggctgggggtcgccggccagtggcgcttggtggacgtgctggggctggaagaggagtctctgggctcggtgccagcgcctgcctgcgcgctgctgctgctgtttcccctcacggcccagcatgagaacttcaggaaaaagcagattgaagagctgaagggacaagaagttagtcctaaagtgtacttcatgaagcagaccattgggaattcctgtggcacaatcggacttattcacgcagtggccaataatcaagacaaactgggatttgaggatggatcagttctgaaacagtttctttctgaaacagagaaaatgtcccctgaagacagagcaaaatgctttgaaaagaatgaggcca

SEQ ID NO: 1977 - DNA, 472 bp, Homo sapiens
atttgcagacccattgaagtgcggtggaattcctttccttttgcccctgagacctggggcagtatgcccagaacccctccctcctgcacaccccacagtaggcacattctcccactggcagcagatgtgttttctggcaagtagagaaaatggctttccttgccctgtgagaggtctcataagatccagccatagccaaggccatgtttgtcacctctggaggcctggtcagtccttctgtgggcacagaacatttctctcccacctaagttaggacctgcatccctgtttgggagcatgtggaagccaggcatcccagatccaggaggtcatcccacttcctgggcgatgctacaccagataagggcctgtcctctcagctgcagcagtcttgcagtggaagtgcccacttgttcacatgaaacaagtttcatagcaagtaagtaggggtcaggccagcactgaaacccaa

SEQ ID NO: 1978 - DNA, 520 bp, Homo sapiens
  misc_feature (1)...(520): n = A,T,C or G
tgggggggncgggcgaatcgagaccctaggccaaactggagaaccctactgagagtggtggaattccagattcatttcttcactcattcagcattgctcgagcatctgtgtgccagctgtagttctaggagatagagacaacaaagctttaggcagctcccatgcttagtgagcttacactgtaaggatgtacggttaggggcagggaaggtaaggctagtatatgaaactgacagggtataaggcgacagagtggtgaggtctgtggcaaagcatgcacacctgaaagacattcaaattaagcatgagcacaaacagaacaaaaaacactgctcgccaaacaaaaatgtcctagtagactgtgggcccgctctttgcagctcttggctgacagtcaagtggagctcacggttttatggataaacttgtaaaggagtaagtacgtgcctggcggcacctttgctgggaagcagctcttcctgagtcagccgtgacagagcaggcatctcctcctggcccn

SEQ ID NO: 1979 - DNA, 471 bp, Homo sapiens
  misc_feature (1)...(471): n = A,T,C or G
ggggaggcgggccnnnnnncctgaaaactgagacnctaggccangcggnggaattcggactactcacgcatcatcgagcgcctcctgaagctggcggtgagtgcggacaggtggcgcatgcacaggacaggaggggacagtggcatgtgggggaaggttctagaacttggtgcccacccccacctccctgccaggtccccaatcacctcatctggctcatcttcttctactggctcttccactcctgcctgaatgccgtggctgagctcatgcagtttggagaccgggagttctaccgggactggtggtgagtgtccctggggtgtccctgggggctgggatgggccatggtgtgctctgatccccctgtggtctcttggcccccaggaactccgagtctgtcacctacttctggcagaactggaacatccctgtgcacaagtggtgcatcaggtaggtggggtgtgtgtg

SEQ ID NO: 1980 - DNA, 509 bp, Homo sapiens
  misc_feature (1)...(509): n = A,T,C or G
tgggnnnnccgncgtttgagaccctancncgattgagnaccctccggacaatggnggagacgtcacatccagaataactttgttaggagactgaacttgacagtcacgagttttacattgcaggtatcaaaaagccacctaaaattgccttaagtaatagaggtgatctaatggctcaaaaaaccaccaactctaggaagacagacagggtgacctgaaagtgggtttcacctggtgtttttctgccattctgtgcatggtgtcagcttcctcccaagactggcactgcataggacatcgggtgtttgccaacccagttgaagctctctgcttccttgctcaccaccagcagaaaggtgagggctatgccctgcattccaggtgacagggaaggtttacatcgggactcagtcacactttctgggtactgtacatttcatagcaggagccaggttatactaaaggagtcctggcctgaggataccagcaccctatagagatggagaacc

SEQ ID NO: 1981 - DNA, 431 bp, Homo sapiens
  misc_feature (1)...(431): n = A,T,C or G
nttcgtcgtccctangcagtgcggtggaattccccaggacaagcacgaggcctcaggtcggccctgtggcggataggcaggaaggactgtcccagacgaggggcttcctctagagtctgactgctggggaggagaggactgggcctgatggaagttaacccggagctaagtcacccacagcacaggagctgccatgtcagatgggaaatctgcctatgtcataccgtgacagcccgcaggatcaggtgacttctagcagagaccctggtttttttcctgtgcccactccggcttgtcctcatctctacccatcccctgatgcccaggtcaccgggagggctgctgggagcctctcctgtccccgccgggcagtgtcactgagtccttgaaatcctcccctgccccgcgggtctctggattgggacgcacag

SEQ ID NO: 1982 - DNA, 435 bp, Homo sapiens
tttgcgaccatttgctcgtcccctagaacagcgcggtggaattcctggactccactgatgagagatccagccaaagagctgcccccaggggtatgagggcaccagctgggttctccagggagcaggagttggacctccatggagccactaggcctggcctcctctacacatccccagggctatctggttaattccatcaagctcagagttaaaaggcatatcagcctggagtatttgggagagactggctgcagatccccgccagccaagatgcaagccactcgggacctgatgtcggcagctgtgcctctactgccctgaggacttaccagagggagccctactggccttcccccaccacagcagccctgcctgtgaagctcttgtttctgacatttcacaggcagagaggtgccatcagttcgcctccattct

SEQ ID NO: 1983 - DNA, 487 bp, Homo sapiens
  misc_feature (1)...(487): n = A,T,C or G
ggaggnnccagatgtccccaaaactgagaacccttcngnggctttgcannnnctgcggaannntgnngagaggggactgggcgccggcggggaaggaggatcgctaggtcggtgtacgacctagattagggtgcgtgccanctccgggaggccggggtgaggggccgggcccaagctgccgacccgagccgatcgtcagggtcgccagcgcctcagctctgtggaggagcagcagtagtcggagggtgcaggatattagaaatggctactccccagtcaattttcatctttgcaatctgcattttaatgataacagaattaattctggcctcaaaaagctactatgatatcttaggtgtgccaaaatcggcatcagagcgccaaatcaagaaggcctttcacaagttggccatgaagtaccaccctgacaaaaataagagcccagatgctgaagcaaaattcagagagattgcagaagcatatgaaa

SEQ ID NO: 1984 - DNA, 435 bp, Homo sapiens
  misc_feature (1)...(435): n = A,T,C or G
nttcgtcgaccanatgcagtgcggtggaattcagaaatgcaggaattggccgggcatggtggtgcacgcctgtgatccagctagtcgggaggctgaggcaggagaatcgcttggacctgggaggtggaggttgcagggagctgagatcgcgccactgcactccagcctgggcgacagagtaagactcccgtctcaaaaaaaaaaaaaaaaaaaaaaaaaaaatagaaaggtggggttttttggaaaaaaaaaaaaaaaaaaaaaaaaaaacccccccccctgaaaaaaaaagggcccaataaaacccgcagacacccggctggggggcttttaaaaccccccactttttttttttcccccccccccgccctttttttggggggggggggggcccccccctttttttttttaaaaaaaaaaagagaaattccttcc

SEQ ID NO: 1985 - DNA, 481 bp, Homo sapiens
  misc_feature (1)...(481): n = A,T,C or G
ggcgancccagggtcncnaaaactgaaangcttgatngcgtgggaaanncggctgnggaaggngatacaaggttctgtcttggtgcttggagcagtgtagtggggcagctgtggctccggtgggcaccagcaaggccaatgaatggacagtgcagtttgcagatttggccctgacctaaggaagggcagagccagccgacacccacagctcctggaaggcagtctgcggcctcccccgtgggggcacagtggctctgaagcctttcagcaggtgctgccactcccggccaggagagagcccgcctgggcgggggcttgaactcatggccaccaaaatccttcagtgctgaattttagcgtagataaacctgctcactagaaagataaacattcatgggcaactaacgacacattctaatattctgttatttgaacatctggtagtcagccaagccactgcttcccctaaccaagtgtctgc

SEQ ID NO: 1986 - DNA, 489 bp, Homo sapiens
  misc_feature (1)...(489): n = A,T,C or G
gggatttccccagatgtgccccaaaactgaganccctacntgggccagcacnngncgnggnnctggngctngccgacaacctgctgctgatgtacctcggctgggaaggcgtgggcctgtgctcctatctgctgatcgggttctattacaccgatgcgaagaatggcgcagcggcaatgaaagcgttcgtcgtgacccgtgtgggtgacgtgttcctcgctttcgcactgttcattctttacaacgaactgggcaccctgaacttccgcgaaatggtggaactggcaccagcgcactttgctgacggcaataacatgctgatgtgggcgacgctgatgctgctgggcggtgcggtcggtaaatctgcgcagttgccgttgcagacatggcttgccgacgcgatggcgggcccgacgcctgtctccgcgctgatccacgccgcaaccatggtaaccgcgggtgtctacctgatcgcccgtacccacggcc

SEQ ID NO: 1987 - DNA, 433 bp, Homo sapiens
  misc_feature (1)...(433): n = A,T,C or G
nttcgcggaccataggcagtgcggtggaattcccgggcgcccccaccagtttgattggaagtccagctgtgaaacctggagcgtcgccttctccccagatggctcctggtttgcttggtctcaaggacactgcatcgtcaaactgatcccctggccgttggaggagcagttcatccctaaagggtttgaagccaaaagccgaagtagcaaaaatgagacgaaagggcggggcagcccaaaagagaagacgctggactgtggtcagattgtctgggggctggccttcagcccgtggccttccccacccagcaggaagctctgggcacgccaccacccccaagtgcccgatgtctcttgcctggttcttgctacgggactcaacgatgggcagatcaagatctgggaggtgcagacagggctcctgcttttgaat

SEQ ID NO: 1988 - DNA, 445 bp, Homo sapiens
  misc_feature (1)...(445): n = A,T,C or G
catcgacattcatgacncatagncagngnggtggaattcgcgggactggggctcctggctgtgggtgtggtaccgaggcttcagcgggtgccgcccgcctagagggagtggagcgagagcctacgactagatttgcatctttacgtcctgcgcggaggctgctacacacatgcagaagtcatgctggtggcctggacagtgaagggagagaagtggatttgggagacatttaggagatggcaccaaaagcgaaggaagctcctgctcatcctaaagccgaagccaaagcgaaggctttaaaggccaagaaggcagtgttgaaaggtgtccgcagccacacgcaaaaaagaagatccgcatgtcactcaccttcaggcggcccaagacactgcgactccggaggcagcccagatatcctcggaagagcaccctcaggagaaacaag

SEQ ID NO: 1989 - DNA, 441 bp, Homo sapiens
  misc_feature (1)...(441): n = A,T,C or G
cattgacgtcactnacnccagcgnggnggaatnccccaacccggctgggtgggtgggaagtgtggctggtaacctggcagccgcggagagagagaagattataaatggcagagccatttaactgtggttagctgttggattctgatactttcttaaaaatacgttcttgcaccaacatcttcattgggaacagttcagaaaaagcaaagaggagagccaacattcacatttaccatggctataccaataacagtgcttgactgtgacctcttgctatatggccgtggtcaccggacattggacctgtttaagctggatgatgtgactgatgaatacttgatgttcatgtatgggtttccacggcagntcatttattacttggtggagctcttgggggcgaatctttctaggcctactcagcgatccagggctattagccca

SEQ ID NO: 1990 - DNA, 442 bp, Homo sapiens
  misc_feature (1)...(442): n = A,T,C or G
ntttgaagaccccttggacagctgtgggaattcggaggtgtatgaaaacttcctccgctgcatcgcactcttcaaccaggagctggtgtctggctctgagctcctgcagctcgtcagcccatttctggggtgagcagctgacttcccagggctccctaggggggttctgttcctgtcaactccatctacttggtttttagttactgtttttgagcaatgattgtgcttttctaaaatcctgtttattaattgacgtgattgatataattattgattcccatgcatttgtaaggagcaatacaccacctgggtaccctccagctggttcctttaccagtaacatctgtagtcagtatcctcaccagaatacagtgggtcctcgagtaatgccttttcatttaacactgttttaacaccgatgagaaaagaagacattcatttn

SEQ ID NO: 1991 - DNA, 471 bp, Homo sapiens
  misc_feature (1)...(471): n = A,T,C or G
nagggaggccggcgcgnnnnnnaactgactgcatatcataggccngngcnggaattatcaggtttaacctacacttaaaactggtgccttacaaccccagattttatagccatagtacacttttctttcactgtactcaaaatactaggttacgtggcctttgggaaggattctgatttcctgcatcctccaaattgccgagcatggtgtcatccacacacactgcgatgggttcatctttttaactgaattttcatttggtgcgaaagcgcttaaagtattgcgctgtgaaaagtagtggactattaaacacaatgcccgggctagataatcatgtcaggacaccaattgtttagcagtaatagaattagcacgaccagaatacataatttcccttctttcagtgtgacaactccagagaaacaggaatgtgaatatatacagaacaaaaaggacactctttaagtgacc

SEQ ID NO: 1992 - DNA, 468 bp, Homo sapiens
  misc_feature (1)...(468): n = A,T,C or G
nagggaggccggcctgnnnnnnnaactgactgcgtggcatcggcgggacncctttagtggcttccggaggactgagcagctagaggtgattttgcatttgcgtttcccgacgttgccacatctcaggtgaataagttctatgaagcgctcacactagtacgtggcccctcggtggtttgtcctcgaggtcgaaggtccagatgtccaggggctgccctggactccagagtggtgcggctgagcaggctgtggtcttgggtgcttgggcacctcccgtctctccctgctcagagttcttctctcctgggcagccagaaaggatcagaaccggtcacatgcagagcggcctcccgtatcccacagcagctccgttctctaatctgggtcttcagatgcggctgtgtctcccggcaccttgctggaatgtggtgcattcctcggagtccagcagcccttatgcagagctgg

SEQ ID NO: 1993 - DNA, 459 bp, Homo sapiens
  misc_feature (1)...(459): n = A,T,C or G
nattgagnccatcgagancactacgcagnngcgnggaattcccacactgggaggccgaggcaggcggatcatgaggtcaggagatggagagcagcctggccaacatggcgaaacctcgtctctactaaaaatacaaaaataagccaggcctggtggcgggcgcctgtagtcccagctactcgggaggctgaggcaggagaatcgtttgaatccaggaggcagaggttgcagtgagtcgagactgggctcactggttatggagccttacctgggcatgccccccgctgacacctgtggaaaggcatgggacagccccggcccatcccctgctgcctgagccctcccctcctctgaccttcctccttccatgaccctgctgccaggggggcttcccaaaaaagatcttgagtcttagcgatgtgggcgacacgcagagaacttggagcctcatgccagggc

SEQ ID NO: 1994 - DNA, 469 bp, Homo sapiens
  misc_feature (1)...(469): n = A,T,C or G
nggggaggccggcctnnnnnnnaactgactgcgtggcatcgngcnggaacncgattntcatgcctcggcatcccaagtagctgggattacaggcgtgcgccgccatgcccggttaatttttgtatttttagtagagatagggtttctccatggtggctaggcttgccttaaactcctgacctcaggtgatctacccaccttggcctcccaaagtgctagcattacaggcgcgagccaccgcacctggccaaaacactgtttaattagtttcctatcagatcaggtcgagtttgtttgtttatttgccctttcaaatgagtttggatccaaagttacacttcctctgcccagaaataccctttggttttcagagatgtcaggctttggaatttcaagtgaataagtgtggatcccaccacctaaatgttatgtaagagtgaaaatccagctatctttgtatatgatacga

SEQ ID NO: 1995 - DNA, 471 bp, Homo sapiens
  misc_feature (1)...(471): n = A,T,C or G
nggggaggccggccggnnnnnnaatgaactgactnctctcggcangngcnggaattcgtcagtgtttgaccagaaaagcttgggaaggaagcgctgtctgtgctcacggacagaggcggccggcgccggaggcattccatcctttctgtagggaaaggagcctttatttactattttgtatttatatttgatgaataagtatataaacagagacgtgtacacagatgccaatcacctaccaaaccaaacacgaggaccgccctccctggttctgggggcccctcaaggccaagctcacccctcaagtgctctcacactcgggacctaattcaagtaaaaaccctttctccttcctggggcctcggctcctggagggctggagggtctcgtctgaggacgggaggaggctctcgctggacgtctggcctgtgcgctggtggacggatgcctacgtggttttggaggacccga

SEQ ID NO: 1996 - DNA, 465 bp, Homo sapiens
  misc_feature (1)...(465): n = A,T,C or G
aggggaggccggnntnnnnnnnaactgactgcatncatcnggcggacncagctngagaaagtcgcccccagtcaatgggatatttgttacagcaccaggtactgcctgagaactctacctttagggagcctgcgtgctgggtcactggggagacaatgaaggtgcttgacacccagtttgaatattgtgtcactgcaaagctgactgctgttgaaggatagccagtgagaggtcatggcaagccatcagaagaagcagaagtcatgagcatgctgaagctatgaggccaagacaaaatgtcacattgccacaagaagaaggacaaacaggcaacaggcagagcccatgggaatcagtaatctcctgctgacactgagcccttgggactaactcagatgcagtactactctcttgggacatgttctgactccagctcctgtccttggggtccactgagatccctgt

SEQ ID NO: 1997 - DNA, 477 bp, Homo sapiens
  misc_feature (1)...(477): n = A,T,C or G
agggtaagtccggcccgnnnnnnnaccttgactgcagtgcnactaggcgngngcnggaattcaccagctctctttaatgccaacttcctgaggagctgcccagctctgtaacaacctggaacagaggcgccatcacagacttggctctgacgggcgggacagcaagaagccttgctcgcgtgtgggacgtgcccgttctggcctggagagagggcccagagacaccacctcgccaccgccacctgattactcattgtcaccaatgagatgacaagaactgatgacgcatttcccttttgctgcactctgacacctcagagaccacagcagagaaaaagctgcttttgtaaaactggaacatgaactacgcggacgccccagaggaggtctctgctgccctctgttgctggcttcttagtaaccctaaccatttttaagaatacagtatttggtttcagtaactttattacatgaaaa

SEQ ID NO: 1998 - DNA, 468 bp, Homo sapiens
ggggaatcggaccttatccgtgtggggaactccacaatttactttatgttgatacatgcttatttgtaatgtttatgtcttaatgaaatccacctatatatctattcaaatatactgattgagcactactaagaccacaaatacaacctgataaaaagattgtcccagagagtgagaatttgtcgcgaaatggaggaaagacaaagatgaataaattaaaaattacaaatgagtataatgtgctctgacagaaggcagcaattgagctgaataaaagaatagaaaagttaatgtaatgaaatgtctaaatgaaaacactataacatccagttttctatactaatcactttctgcacaagaaaaatactaagcagtccatggatattctctacatatcagatcatatatttcagcctttaaaagttatatctggccttaccctaaataaaatgaaccagaattcctggg

SEQ ID NO: 1999 - DNA, 477 bp, Homo sapiens
  misc_feature (1)...(477): n = A,T,C or G
cgggagatcgagaccctnnnannttctgagaccctagtccgtgtggtggaattccggacttacgcatcctgggctgcgagctcatccaggccgccggcattctcctccggctgccgcaggtggcgatggcaacggggcaggtgttgtttcatcgttttttctactccaaatctttcgtcaaacacagtttcgagattgttgctatggcttgtattaatcttgcatcaaaaatcgaagaagcacctagaagaataagagatgtgattaatgtattccaccacctccgccagttaagaggaaaaagcgaccagctacatttaccaaagcctgggtgatgtggagtggtacatagagatgaagctgtcgtcatggcaacagtgagtgaagtatcgaaaatccccaaggagaagccagtgctctgagaataggtcactggaatcggggactaacaggactccaagccccctgatccttgat

SEQ ID NO: 2000 - DNA, 468 bp, Homo sapiens
  misc_feature (1)...(468): n = A,T,C or G
gtgcgggagncccaatgaaactccctganggcctcaaaccgcgcggancggagtgatccttggagagagctgagagctcgagggacggggatttcgctgtgttgcccacgctggtctggaactccggagctcaggcagtccgcccgccttggcccctcaaagcgctggaattacaggctacagaacctgctaaggccatcaaacctattgatcggaagtcagtccatcagatttgctctgggccggagggactgagcctaatcactggggtgaagaagacatgacataacagcctggatgctggcgccgctaatagcgatctagagctcaacgactatggaacggatctcattgaagtttcaagcaatggatgtggggtagaagaagaaaacttcgaaggcttaatctctttcagctctgaaacatcacacatctaagattcaagagtttgccgacctaactcgggcg

SEQ ID NO: 2001 - DNA, 474 bp, Homo sapiens
  misc_feature (1)...(474): n = A,T,C or G
nggggnatcgaagaccctagtccagtgtggtggaactcagtctcactttgtcacccaggctggagtgcagtcatctgatctcggctcactgcaacctccacctcccgggttcaggcgattcttctgcctcagcctcctgtgtagctgggaccgcgggcgtgcaccaccacgcctggctacttttcatatttttagtagagacagggtttcaccatgttggccagattgttcttcaacaccagacttcaagtgatctgcttgcctcggcctcccacagtgctgggatgacaggcgtgagccactgcgcctaacatgacagctgttactcagtatgtgggatgtttactgttctcacatctggaaaactctgaattctgaaacacatctggttccaacagtttcagctaagggactgtgggctgtgcctcttctgagtactgaaggaaaaggtcttgcatacagcaggcactcaat

SEQ ID NO: 2002 - DNA, 561 bp, Homo sapiens
  misc_feature (1)...(561): n = A,T,C or G
cacctacaccgcggtacgtgtggctatactatggatactctcggcattcttctcatatactatactatctatccagtaggcacctagcgcnnccccccnnaatttganancatttcgaggatccntggcaangcggnggaanncgngcagacggngncgcacaagagccnggnggggggcccggagcagnatgagcagangctgaagaccaagaaggaccaggacggcgagggccgggactacctcgcgggcacctacgagcccaccacgggcaggaacntctccacggacggcgtgcctgtgctctgctgagcccgccgggccctgcgggccacctgtgccccgagggcgggcagggacccatctccatcactgccatggcgcggagaccacgtgcgttgtgtgcatgcgagcgctcctgcaggcgtgtgcatggggccaggtgtgcacgtggatgcccgggtgagtgtgtgtgcatgcacgtgtgtgcacgcatgtgcacatgccttcagccccaccttccaaccccttaatgcccccaggacaggggcccctcttaag

SEQ ID NO: 2003 - DNA, 214 bp, Homo sapiens
tcacttctgtgaagttttgtaaccaggaaagaaagaaactgtataagcacacaaccaaaatcttaagcaagccccacaccttggcagatcatcaatacctgcaataccacacagcatgtgggggagagaggtagttgtgagccaccactagaagtagaagttgagggctctgaacggccaggtagaaacaaccccaaacctggagactggctgg

SEQ ID NO: 2004 - DNA, 420 bp, Homo sapiens
agagcgtggcgctgtgcctgctggaggtggcgcggcgtggggcacgcctgggcctgctggccccacgcctcgtgcagtttgagcaggagattgagcgggagctgcgtgctgcacccccagcccccaacgcccctgccgctggggaggacaccactgaaaccgcccccgcaccagggactcctgcccgcggcccccgcatgacacccagcgacctgcgcaacctcgacgagctggtgagggagattctgggccgctgcacctgccctgaccagtttcccatgatcaaggtctcagaggggaagtaccgtgtgggggactcgagcctgctcatctttgtgcgggtgctgaggagccacgtgatggtgcgagtgggtggtggctgggacacgctggagcattacctggacaagcacgacccgg

SEQ ID NO: 2005 - DNA, 477 bp, Homo sapiens
agcgcctttggatcatattcagtgcggtggaattaaaatgaaagcgctaaggcatctaaatatagtctgagtatcaactcttccagcatggagccgaaaacctagggaatgacagctagaggcatccagacgataactggcagccaggagggtggataagtcaaaggaaggggtcaaggaaagaggggaaggaaagggaaccatcacttgctgagcctgctgcctgtgctttctcatgtcacccgcacgacaacccaatgtgaatgttatcatctccaggtaactgctgaagaaacggaagctcaaagagatgtgacagacaggaagctgactatggaagaagaggaggccaagaggatagcagagatgggaaagccagtattgggtgaacaccccaaactagaagtcatcattgaagagtcctatgagttcaagactacggtggacaaactgatcaagaagacaaacctggccttg

SEQ ID NO: 2006 - DNA, 438 bp, Homo sapiens
  misc_feature (1)...(438): n = A,T,C or G
nttgacgaccatttacatcnnggggaattccactgtggagcatgccttggagagcttcagcttcctcaatgaagacgaagatgaagacaatgatgttcctggggacaggcctccaagcagcccggaggctggggctgaggacagcatagactcacccagtgcccgccccctcagcacggggtgtccagctctggatgctgccttggtccggcacctgtaccactgcagtcgcctcctgctgaaactgggcacatttgggcccctgcgctgccaggaggcatgggccctggagcggctgctgcgggaagcccgagtactggaggcagtatgcgagttcagcaggcggtgggagatcccggccagctctgcccaggaagtggtgcagttctcggcctctcggcctggcttcctgaccttctgggaccagtgcacagagag

SEQ ID NO: 2007 - DNA, 442 bp, Homo sapiens
  misc_feature (1)...(442): n = A,T,C or G
nttganncccctttgacgncccatagtcagtgtggtggaattcccccggctggatgcggtgactggtgccagtgctcaggcgcccgctgcccttgacctcccgccccgcgagccctaactcagcgcaggaggaccggctgccgccgccgccgccgccagcagagccaagcacagtgggaactttcagaaagcactggttgaaggaacgctggaatccctgggacttactgcgtagcatgtagtagttgctcctctacaaaagtttcaccttatgaagtatagcaggctctgatgctggtgtctggtagaagaagattactcacagctctgctgcaggctcagaagtggccctttcaaccctccagagacatgagactagtgcagttccgggcaccccacctggtggggcctcacttgggcctggagacagggaatggtggag

SEQ ID NO: 2008 - DNA, 462 bp, Homo sapiens
  misc_feature (1)...(462): n = A,T,C or G
natggaggcccccatggagnancactaggccagngcggnggaantcgngaggaagagagcagctcgcttctaactggactgcacgttggtgacagcgtcccaagctggtgacagacccactctgtagctttcagctagattcagccaccagatcccagaaacatgacccttgctgcctacaaagagaagatgaaggagctcccgctggtgtccttgttctgctcctgcttcctggccgatcccctgaataagtcgtcctacaaatatgaagcagacacggtggacctgaattggtgcgtcatttccgacatggaagtcatcgagctgaacaaatgcacctcgggccaatcctttgaagtcatcctgaagccaccctcctttgatggggttcccgagttcaacgcctccctgccaaggcggcgagacccatccctggaagagatccagaagaaactagaagcg

SEQ ID NO: 2009 - DNA, 470 bp, Homo sapiens
  misc_feature (1)...(470): n = A,T,C or G
natcgaagaccctagtccagngtggtggaactcgggcacagtggctcacacctgtaatcccagcactttgggaggctgaggtgggtggatcatctgagctcaggagttcgagaccagcctgggcaacatggtagaaccccatctctaccaaaagtagaaaaaattagccgggcgtggcggtgggcacctgtagtcctgagtacatgggaggctgaggtgggaggatcacttgagcctgggaggcagaggttgcagtgagctgagatcatgccactgcactccagcctgggtgacagagcgagaccctttcagtaagtaaataaataacaccatgggcctatcacagagaccctgagctttccacttcagcatgaactgctcctggctggtggctcttagcgttctttggtgggattttctagttagcactgagctgcttttgtgatttgagcatttctggatgggtgtgg

SEQ ID NO: 2010 - DNA, 544 bp, Homo sapiens
  misc_feature (1)...(544): n = A,T,C or G
accctctcataggtagatcgctgacatctcatggttcgtacatatcgaacctctctgtactctctctattggccagcccnnnnnnccnnnaatggagaccncttgcagngcgtggaanccgcaangagnncgggaagccagggcccgaatgctcaaccttgctgnatcagggagggccggagaggggagctcaagaagaggacgtcctatcgaggtggcagggattttctgaaggagggcgtattttggtgagtttaaaattcctgcaccgccgggcgcggtggctgacgcctgtggtcccaacactttgggaggccgaggcgggcggatcgcgaggtcaggagatcgagaccatcctggctgacacggtgaaaccccgtctctactgaaaacacaaaaaattaaccgggcgtagtggcgggcgcctgtaatcccagctactcgggaggctgaggcaggagaatcgcttgaaccggggtggcggaggttgcagtgggccgagatcgtgccactgcaccccagcttgggcgacagagcgaggctt

SEQ ID NO: 2011 - DNA, 462 bp, Homo sapiens
  misc_feature (1)...(462): n = A,T,C or G
catggaccccccnatcgaggacactaggacagngcggnggaattcccacagcccaagaaagatctgcagagccctgagcagggactctttcatccatcctgactaacaggataagaggctggggcttaagaagaggctctgcagagaaggtcctgggaaagccttacagaagaagttttccgcttctccctatcactgagactcggcttgagtggctgcttctcctcactgctcatcacatgtccttccccagcaggctagggcttgggcctggcatggaaggccttttggggcaatcagaggctgccacaagagcaccaagcctggcctccaagccccagccctccttcctaagtactcatcaaattcaaattcttcagtccgtgtgttatggctcatcttggccggccgtggggtccatgttctaggcttctgtttccaacttaatgacttaggcatagg

SEQ ID NO: 2012 - DNA, 459 bp, Homo sapiens
  misc_feature (1)...(459): n = A,T,C or G
attgaattcagntccactatccgtgtggtggaattcgctgtaatgagaccggaaacgccaggcagagagactgacgtgagcaacggctggagtccacctggagatgcccattagcgtcgcactgaagtctggaggtccctgccagaaattcggatggagatggcaggtcggcagtctagaggcagaagggaagtctggctggagatgtaaattccggagtcatcagcccaggatggattttaaaaccactggactggacaaggtgaccagggagagtgaaggagggcacagccaagcccgtagtccagccgcctgcagaggccagtgggtggggtgagcctggactgagaaggatctgccggctaggttgaaagaaaatcaaaagttaaagccatggaaccacaagaggaaagtgtttctagaaggtgacagtgagcagcttatgaatgaccagcacag

SEQ ID NO: 2013 - DNA, 443 bp, Homo sapiens
  misc_feature (1)...(443): n = A,T,C or G
ntttgangacccctttgtagacccctagtcagtgtggtggaattctgttattaaaggataactataatgggatgagctttgtctgtattggggctatcttggtctttgtagccttctttgaaattggaccaggccccattccctggtttattgtggccgaactcttcagccagggcccccgcccagctgcgatggcagtggccggctgctccaactggacctccaacttcctagtcggattgctcttcccctccgctgctcactatttaggagcctacgtttttattatcttcaccggcttcctcattaccttcttggcttttaccttcttcaaagtccctgagacccgtggcaggacttttgaggatatcacacgggcctttgaagggcaggcacacggtgcagatagatctggaaaggacggcgtcatggagatgaacagg

SEQ ID NO: 2014 - DNA, 491 bp, Homo sapiens
  misc_feature (1)...(491): n = A,T,C or G
aggaggtncccagatgtccnaaaactgagtancctacnttgcttagcaagngncgcggaantccccacatcccagccggtcatctctgggcataaacccccaccccccagaaaggaggcttcctgtccctcttgggcaccagctcagccaaaagccagaaagctgctctggagcataacctgacccccccacggcgaggcagggcagtcttctcctggctggcactgctctggtcatagaattgatccttcatccacctttaccccaaacaagaggtgtctccctgggtgaggacaaagtggggagggcaacagggctggggcttagagcccctccaccagccatccagggctgccttctcagctcctcccagcgcagcaccggtgccactttagtatttagtaggccacccccgggacctccatcaccacagtgcagaactggaagccacaatgctttgaatagtcgacgcctgtgcctcctgggaggtc

SEQ ID NO: 2015 - DNA, 496 bp, Homo sapiens
  misc_feature (1)...(496): n = A,T,C or G
cgggggcgcatcgagaccataactcgagggggtaacaccgccgcgagggatgccgccggccgccgggggccttctccaggaccaggagagaaatcctctctccgcttcacgacgcggccactcccacccctgagacgcccacctggcggactctgagggaggattcggctgcgtctaataccacctccacccctcatccctcacaatgcgcggaaaaccacaggcggctgtgcgcgcagcgtcggctcagccaccgcagctcctcccctgggatgaaaaagcactctgacgtcttgaaagctggcagctctctgtttggaaaatctctgcccagtgaaaaaatgtaccgacaagattactaagtaacacagtcttctgggaatgccttatcaatgccagctatttgaagagcacccaaagtcaaactagtgctccgcgctggcagtctggaaaaggcagatgtataaaccanaaaggatggagttcagagaccttc

SEQ ID NO: 2016 - DNA, 460 bp, Homo sapiens
  misc_feature (1)...(460): n = A,T,C or G
ntttgaagaccccattgaagngcggtggaannccccgcactgggccacccaccacgcagcagcctcggcccagcggcccgggccccgctggacgtcccaaaccacagctggcccagaaacccagccaggacgtgccgccacccgccaccgccgctgcagggggacctccgcacccccagctcaacaaatcccagtctctgaccaatgccttcaaccttccagagccagccccgcccaggcccagccttagccaggacgaggtgaaagctgagaccatccgcagcctgaggaagtctttcgccagcctcttctccgactgataccccactctgagaaccccaaaatccctgggcaacccttctctgggccctgaatccatttctcacttttggagtctccaaatcccttgagaacccatctcccggttctccaagattccacctctcattcctcaagatcg

SEQ ID NO: 2017 - DNA, 432 bp, Homo sapiens
  misc_feature (1)...(432): n = A,T,C or G
nttgcgaccctttccagcgggggaattccccctttcatagcttatataagattcccaacaagaatgaggtacttcacaatctgcttgattcccaaatggcaggtgcctacagaaggaagtggacttctctgtctggtcctgacagctgacttaggacggcattttggcaaaaactcaacatctgggaaagctcttggtgcagatgttgtccccgaaaggtggaaagggagaggtcctttcttgcattcctcccagagactgggaagcctgtgtgggtggggcctcgcaaggggagacctgcctggaactcgagggagaggagtcctcaccacttcctaacgattccaacctggagcctgttctggcttttttctttttttgggagtgaaggaagagcacgaaggtgtggtttgacaacagtgagctctcttc

SEQ ID NO: 2018 - DNA, 399 bp, Homo sapiens
ccagtcaggccccagccccgtttcttaagaaacttttagggaccctgcagctctggagtgggtggagggagggagctacgggcaggaggaagaattttgtagagctgccagcgctctcccaggttcacccacccaggcttcaccagccctgtgcgggctctgggggcagaggtggcaggaatggtgctgggcactagtgttccaggcagccctgggctaaacaaaagcttgaacttgccacttcagcggggagatgagaggcaggtgcactgagctgcactgcccagagctgtgatgctctgtacatcttgtttgtagcacacttaagtttgtgtattccattgacatcaaatgtgacaattttactaaataaagaattttggagttagttaccctgga

SEQ ID NO: 2019 - DNA, 457 bp, Homo sapiens
  misc_feature (1)...(457): n = A,T,C or G
attgagnctactagattcctcggccgnngcgnggaattcctctgactttgagacagaagattttgatgtcagaagcaggacgagcgtcttgacagattacgatcagctgatagctggccagagtgcccgggcgatcatggctcagcttccccaggagcaaaaagcgaagattgcggaacaggtggccagcttccaggaagaaaagagcaagctggatgctgaagtgtccaaatgggacgacagtggcaatgacatcattgtgctggccaagcagatgtgcatgattatgatggagatgacagactttacccgaggtaaaggaccactcaaaaatacatcggatgtcatcagtgctgccaagaaaattgctgaggcaggatccaggatggacaagcttggccgcaccattgcagaccattgccccgactcggcttgcaagcaggacctgctggcctat

SEQ ID NO: 2020 - DNA, 494 bp, Homo sapiens
  misc_feature (1)...(494): n = A,T,C or G
agggcggnnnancnnnnnagcctgcnaccctccgnannncncctgnnangcancgtannnncncggaanttcggcaagccgccgcgcctggggggaggacccatggacgccagcgtgtaggaggagggtgcgcagcgtgcactggactttgccgtcggcgagtacaacatagccagcaacgacatgtaccacagccgcgcgctgcaagtggcgcgcgcccgcaagcagatcgtaactggggtgaactacttcttggacgtggagctggaccgaaccacgtgtaccaagacccaccccaacttgaacaactgccccttccatgaccagacacatctgaaaaggaaagcattctgctctttccagatctacgctgtgccttggcagggcacaatgaccttggcgaaatacacctgtcaggacgcctaggggactgtaccgggctgggctgtgcctatcacctcttatgcacacctcccaccccctgtattcccacc

SEQ ID NO: 2021 - DNA, 437 bp, Homo sapiens
  misc_feature (1)...(437): n = A,T,C or G
nttgaagaccactgtccagctggtggaattcctgagttttaatttgctgttccttataatggctactactctatattatcactttcttcttttcagagtaggctagtaatgcttatttctcagggtacaggaggataggaaatgacatcatgtatgaaaaaaattaataaaattaatgacttggaatatttcagttcctgtcagtgcctgtggaaatttcttcccgattcaattaactaataagaaatcagagataatacttttttctaggtgtgtcacttccttgaaatgagaagcatgatttggtataagaaaaactttggtccctaaaatgactcagccacttagtagcacctttgacaagtgactgagcttgactaattaataaactgagaataatacctactgcaatggagtgtcatactaaatgagattgc

SEQ ID NO: 2022 - DNA, 474 bp, Homo sapiens
  misc_feature (1)...(474): n = A,T,C or G
ngtgcgccnaananaactgagatcgatgagctatgncanggaacnncaatttcacatgaaactatgcagagtcatatttatgttaaggaagacatgcaattaaaaccctacccatttgttttgttagtcccaacacgtatcaaacaaaaaacttatgttgttagatgtagatttgattatctccctttatttatttgggtctctctctctctctctccccgccccaccgtctgtctcactctcactctctctctctcactttctctctgatctcttttcctttcaactcagcttgcaggaatggatctcatttgaaatgagctgcactggtgtcagcatggttgtttaaccatgtaaactatctcatgatgcttagaattgaagagaagcttacacgcttgtgtcagaaaaatatcttacaatacacaaaacacattatatatattattagaaaaagtttagttgcgcaacaan

SEQ ID NO: 2023 - DNA, 454 bp, Homo sapiens
  misc_feature (1)...(454): n = A,T,C or G
attgagnccatgagaccctcggcagnngcgnggaattcctctctttgcttttccccacgagtgaccacggctagataggccgccggctttatgtttttgtggagagccggggctttgctccgggtgtgggggttttggccgacaggggttcccagaaggagaccgctaagctgcgatgctgcgtcgcaggcgggaagcaattatccccgctgttggaactgcggcggcccatggggccccgggcgggaggacaggttcttctgcccacagtgccgagcgctgcaggcacctgaccccactcgagactacttcagccttatggactgcaaccgttccttcagagttgatacagcgaagctccagcacaggtaccagcaactgcagcgtcttgtccacccagatttcttcagccagaggtctcagactgaaaaggacttctcagagaagcattcga

SEQ ID NO: 2024 - DNA, 455 bp, Homo sapiens
  misc_feature (1)...(455): n = A,T,C or G
nattgaggccatgatgaccctcgnccanngcgnggaattccggagttctgcttgcacacagcccggcagtacgccctcgacaggatgcattttggtgttccactggccaggaaccagctgattcagaacaagctggcagacatgctcactgagattaccctgggccttcacgcctgcctgcagctcggccgcttgaaggaccaggacaaggctgcccccgagatggtttctctgctgaagaggaataactgtgggaaagccctggacatcgcccgccaggcccgagacatgctgggggggaatgggatttctgacgagtatcacgtgatccggcacgccatgaacctggaggccgtgaacacctacgaaggtacacatgacattcacgccctgatccttgggagagctatcacgggaatccaggcgttcacggccagcaagtgagccgctccatt

SEQ ID NO: 2025 - DNA, 538 bp, Homo sapiens
  misc_feature (1)...(538): n = A,T,C or G
ctctcgacattctcataacactctccttccaatcaattcacatcaacacatacccttagacaagacgcactnagcganannnnnnnntttgatgacatgaagaccgtcgnggaantcgcaggattccgngtagaaagctgtgactgtcacccctcctccccactcagttatggttgtggacctttccctggcccttctctccttggccccctcttggcaggagagaggaggagaggatctcactttccccctgtaccagccacaccctcggtctgcggggttcccagcagctggccagggatgctccacacctggaggtcaagtaaccgtcccctcactctgggcatcggtgccctctctggggttggaacaggaaagaaagccaagacctgtatgtgggacttgagttgagactcaattctgtagagtcaggggtgaggaggagccaggcctcctgtgtgctctccataccccagagccgggtgcccagttccatgggtcctgatggacagaagggaagaacgggggggctgctgcn

SEQ ID NO: 2026 - DNA, 457 bp, Homo sapiens
  misc_feature (1)...(457): n = A,T,C or G
attgaggccactgagnagcctcggccagagccgnggaattccgaagtgtggnccggggagggctgatgaggctgcaggatgagggggctttacagacttctttccccagaagagggcccccaaaaggcattgcccctgaagagggctccccaagacctcatccctgaaaagggactcccagggtcacccccctgaaaagggctcctcaaaaggccccccgaacggggtccccccaagactgccctctgaaggaggcccccgaagacttcccccgtgaaggtgccccccaagacctgccccctggaagagggctccccaagacctctccccctagaagagccccctaagacttttaccctggaaaagggctctctgcaaagcttccctggacgtgcgccttcgagctgggcaggtagggaggagctgtgtactctacatcatccttaggatctgttgg

SEQ ID NO: 2027 - DNA, 549 bp, Homo sapiens
  misc_feature (1)...(549): n = A,T,C or G
caatactaactacgtacataacacaagacgagtccaatcgtcctaattgactattaacacaacactcataccgcagacgcacaggggngngnngnnnttcgaagacatgagnagtgtcgnggaanaccgaagagnggnccggggagggctgatgaggctgcaggatgagggggcttgacagacctctttccttataagagggcccccaaaaggcattgcccctgaggagggctccccaagacctcatccctgaaaagggactcccagggtcacccccctgaaaagggctcctcaaaaggccccccgaacggggtccccccaagactgccctctgaaggaggcccccgaagacttcccccgtgaaggggccccccaagacctgccccctggaagagggctccccaagacctctccccctagaagagccccctaagacttttaccctggaaaagggctctctgcaaagcttccctggacgtgcgccttcgagctgggcaggtagggaggagctgtgtactcgacatcatccttaggatctgggggcctccg

SEQ ID NO: 2028 - DNA, 477 bp, Homo sapiens
  misc_feature (1)...(477): n = A,T,C or G
aggccgctnnnnnnacctgatatcgatntccataggcagtgaggtggaattccacatgcctagcgtacgctacttgatatatatagaaaagaacaaacactaatcactcatgattgcgcaccctagctgcgagcacattggagtgtcgttcctaacggatggcgtgaggaaaaccagggcagacccctcggactgtgattttgtccatgatcacccacagggtcaagcatagagtccgggagagtggctatatgctgtaattccgacaaatgtgtagaaaatatcctgactttttggttttctctttcaacagtcaaatgagaataaggctgagaggacctgatctttttgagtcttgggataaacttggaagataaaattacagaataatttgagacacacataaatgttatatttcagatattctttctctactgaaagttggtagcaactttgtacatttctgtgttgcctttg

SEQ ID NO: 2029 - DNA, 455 bp, Homo sapiens
  misc_feature (1)...(455): n = A,T,C or G
nattgaggccatgagatctctacgcagnngcgnggaattcctctgccgtgtcccctctgccagctagactgcgggagccgggagcagttgattgcttacgtgtaccagcacactgcagcagtggtgagcgccaagagctacatgtgtcctgtctgtggccgggcccttagctccccggggtcattgggtcgccacctcttaatccactcggaggaccagcgatctaactgtgctgtgtgtggagcccggttcaccagccatgccacttttaacagtgagaaacttcctgaagtactaaatatggaatccctacccacagtccacaatgagggtccctccagtgctgaggggaaggatattgcctttagtcctccagtgtaccctgctggaattctgcttgtgtgcaacaactgtgctgcctaccgtaaactgctggaagcccagactcccagtgt

SEQ ID NO: 2030 - DNA, 431 bp, Homo sapiens
gttattactgagagagaaaacaggtgagttgggattgagaactcctgattttcatccctggtttagattcttggccaaagtagtggtagagttaatctttgcttgtggaaagcattaactatgttgcagattcagttgtgttacattattgtgggttctataacaacatattcctcatggacactttaccagagttgctcacacctttttcaatttctcatcccttttggaggaatgaacatgagacttaactgcctttaagcctaaaacggacatgctttccaatgacaagagattttctaaagagaagtcttggagcacatctgttaatacctgagcatctactctgagcagtgcagttttattcaatactggagagagggtgatttctttttttttgagacggagtcttgctctgtctcccaggctgg

SEQ ID NO: 2031 - DNA, 474 bp, Homo sapiens
  misc_feature (1)...(474): n = A,T,C or G
tggccgannnnnnaacctgagatcgatggcagtgncgnggaattcgagctcctgaagaaaggcgggctatacgccgagctcatccggaggcaggccctggatgccccgaggacagcggccccaccgcccaaaaagccagaaggccccaggagccaccagcacaagtcctgagaagggccccctgaggtgtggtcgctgccaagcatcagtgttagggctggggctcagcctgggggagcctactggggactgagcccccaggagggccagcatgtggagagtcgctgcggctgctcctgctcacaataaagccggggccgagcagctggcaggggaggccaatccctccctcccctccccagtcctgccggctgcctccctcccaccagagtctgccagagtcattgggctgcaatgggcagagacagagttccccgagacacctccactctattctccctttgcccagacccc

SEQ ID NO: 2032 - DNA, 483 bp, Homo sapiens
  misc_feature (1)...(483): n = A,T,C or G
ngggcnnncctcgagaccgtagtccgtgtggtggaattcctggaagggacttcaccaaccaagaccaaatagcatctggttcagtgggggccgggcccatagcccctaacaggtacaggagacacaagcggggaaccactacacttagcacatggggtgcctgggcttcagatggggaccccagcgaagcaggggctgaagaaggtgtggctgggggctctggcctggtcctctggacacccccaaatatctaccctgtggactttgagctgagcatgcccactggcacccaggccacgtgggacctggaggagcctgcctggggcctgcctctgccagaaggagccagggctgctgaggaagagctgtggggcagaagtgaagccccgcaggggaggccacagggtccagcctgtctttaggatcatctacactgcatgaagggagccccaggaaggcagcattcataagcccctgcaccan

SEQ ID NO: 2033 - DNA, 488 bp, Homo sapiens
  misc_feature (1)...(488): n = A,T,C or G
aggcgcgntnncnnnnagcctgnntgcttcgnannggcctagntnncttcgtanagncgccgantttgngnnnangccccagngggaagagccaaagctggaggtggntttgataataagtgttctgtgtacccctggaggtttgacaaaaatgagaacatggctgccaaaaagaagtctgttgctatgcacaccaactacctgtcggcctgcagcttcaccaactctgacatgcagatcctgacagcgagcggcgatggcacatgtgccctgtgggacgtggagagcgggcagctgctgcatagcttccacagacatggggctgacgtcctctgcttggacctggccccctcagaaactggaaacaccttcgtgtctgggggatgtgacaagaaagccatggtgtgggacatgcgctccggccagagcgtgcaagcctttgaaacacatgaatctgacatcaacagtgtccggtactaccccagtgg

SEQ ID NO: 2034 - DNA, 454 bp, Homo sapiens
  misc_feature (1)...(454): n = A,T,C or G
nactgggactgnggcactagccagngcggnggaattcgcccttaccgagcctgggcgcccggatttcggcagcggatcgcctttccgggttggcggcccgcctgattgggaacagccggccggttgccgggggaacgcgggagtcgggcccgacctgagccacgcgggcttggtgcccacctgtgcgcgccgcctgcgaagaaggaacggtctagggagaaggcgccgccggccgcccccgttcccaccgcggccgtcgctggagagttcgagccgcctagcgcccctggagctccccaaccatgaagcccaacttctccctgcgactgcggatcttcaacctcaactgctggggcattccgtacttgagcaagcaccgggccgaccgcatgaggcgcctgggagactttctgaaccaggagagcttcgacctggctttgctggaggaggtgtg

SEQ ID NO: 2035 - DNA, 460 bp, Homo sapiens
  misc_feature (1)...(460): n = A,T,C or G
ggggtcccnanaaatgagaccatgagaccgtcgcgaaanccggaggatatggctggggcctgcaggggcaggtggggttacagccggtccaccgcctattctgtttgttggactctataaactgccccgacctaatctttaccagtttaagtctctccagggcccggtgtgaatctcgacacagataaagcctcaccgtcctccgactcctactggcgtgtgctcccagctcacctgggcaatccgagaggccgcttcccctctggccccgcaagacccccgtacttcagcatgtctcggttggatgttttcggtagcggcggacaggaaaggaggtttggggaaggagcaggtctggacggacccacctgtcaggtgctcaaagttccctttgccaaagatgagcttcctgtccggcgttttggtggacacgaccattgtctgcaccacggaccagccn

SEQ ID NO: 2036 - DNA, 481 bp, Homo sapiens
  misc_feature (1)...(481): n = A,T,C or G
natcgagatccctagtccagtgtgatggcataaccttcctgcggctgctcgatgcgggcctgaccattccatccggcaaaaccattgttcacccactggcgcggcaacggcgcgggctggttaaaatccagttcctgcggtagctgctcgcaaaactcacccgccagccactgctcccgctccagccagtaaccgctcgcctgtgcctgaatccgcgtttgcggcgacaacggaaaataaggatgccagccggtaccaaatggcagcgtctctgccccttgattggtgacagagagcgtcaccgtcagcgtatccgccgttaaatgaaacgccctgacttacccgatagtgatagacaccgctgcgatgttcatacaccagacacaaactatcatcgctgtgcgagacacattgccactcgcccagccagccatcgncgtgtagatagtgcgcatcccactcaacattcgggtggcagtgn

SEQ ID NO: 2037 - DNA, 469 bp, Homo sapiens
  misc_feature (1)...(469): n = A,T,C or G
aggcggnannnaaacctgagttcgtagtcagtgtggnggaattcccagccagctggttctaaccttccagaatcgcaatcccttctccccacagccagccctcgccaagcaagcagcaggatgtttgcagtgtcgcgcccagggctctgagactgagcctgccatccactcgcacgcctttctttcagggcttttcggctgttggctacactgatgtgacccccctccctttttggaatgatggggatctttttggtgtatgttggatttgttttcttttccgttttatatgtacaacaagggctttcttctcaagcaaaatttaccgagtttccgcggaacgtgacggcgaccgaggggcagaatgtggagatgtcctgcgccttccagagcggctccgcctcggtgtatctggagatccaatggtggttcctgcgggggccggaggacctggatcccggggccgagg

SEQ ID NO: 2038 - DNA, 447 bp, Homo sapiens
  misc_feature (1)...(447): n = A,T,C or G
atgagccactgtaccctcgcagngcgnggaattaaggactgagcccagccagaggcgggcagggcagactgacggacggacgacggacaggcggatgtgtcccccccagcccctcccctccccataccaaagtgctgacaggccctccgtgcccctcccaccctggtccgcctccctggcctggctcaaccgagtgcctccgacccccctcctcagccctcccccacccacaggcccagcctcctcggtctcctgtctcgttgctgcttctgcctgtgctgtgggggagagaggccgcagccaggcctctgctgccctttctgtgccccccaggttctatctccccgtcacacccgaggcctggcttcaggagggagcggagcagccattctccaggccccgtggttgcccctggacgtgtgcgtctgctgctccggggtggagctg

SEQ ID NO: 2039 - DNA, 374 bp, Homo sapiens
gataactgtcaccccatctggagggaggcccttcgccaggggcttactggccgtggaacgggacacatgccatgcccgtgaacaggaacgtgtaagaaatagcatcgcattgtctagaagaaagggaattctgttatacacatacaaaagaattaaacccacaagctgcctctgacagcagcctgtgagggagtgcagaacacctggccgggtcaccctgtgaccctctcactttggttggaactttaaggggtgggagggggcgttggatttaaaaatgccaaaacttacctataaattaagaagagtttttattacaaattttcactgctgctcctctttcccctcctttggcttttttttcatcctttttt

SEQ ID NO: 2040 - DNA, 397 bp, Homo sapiens
ctgaagagaggtatcatccatgcccgggccctagtcagagagtgcctggcagagacagagcggaacgcccgcacgtaacaggaagcgcctcggcctcagcgtctggacctatccggccactgcagagcacccgcttctccctggccttcatcccgagttgcactaaccatcctgggcttcctgtcctgtgtcccttggtgggtccccccatgacctgccgacagtgttgcccaccggaacttttgtggcccctaccgctcagcccttcccagcacttctcccactttgtcccgagcctccttctcccccagcaggggcacaggcctggcacctccctgccttgtgtcctgagccatagtgactcttttatctgtgtgtcttttgctaaatatgccct

SEQ ID NO: 2041 - DNA, 476 bp, Homo sapiens
  misc_feature (1)...(476): n = A,T,C or G
catagaagaccattagtcgagngncgnggaattccgcacctagagttgcaggtaaactgtcagacatcaaatcgacgtggtcctctggccctacctcccacacgcaagcctctctgtctcatgaactatggaaggtgcccagaaacagtactgcacccacgaggccacctccagggttaaccaatcccaagccctcctccacctggggtgccagccccctcggctggaccagctcctactcctcgggttctgcctggagcaccgacacctcaggaagaaccagcagctggctcgttcttcgaaacctcactccccagattgatggttctacactgcggacattgtgtttgcaacatgggcctcttatcacattccacctgaatctgactcaaggcaatgctgtggtccggtacagctccaaggaggaggctgccaaggcccagaagtctctgcacatgtgcgtcctgagaaacact

SEQ ID NO: 2042 - DNA, 455 bp, Homo sapiens
  misc_feature (1)...(455): n = A,T,C or G
nttgagccctgagancctcgccagngcgnggaattccaggataccctggcgcttatgaccgcatgttttggtggaagtatcaccagttccgttttctctgccattcaaatgccctacctagccacgtgaagatcagcgtttgcaggcagacgcttttcgaagattccttccaacagatcatgaacatgaaaccctatgacctgcgccgccggctctacatcatcatgcgtggcgaggagggcctggactatgggggcatcgccagagagtggttttttcctcctgtctcacgaggtgctcaaccctatgtattgtttatttgaatatgccggaaagaacaattactgcctgcagatcaaccccgcctcctccatcaacccggaccacctcacctactttcgctttataggcagattcatcgccatggcgctgtaccatggaaagttcatcgacat

SEQ ID NO: 2043 - DNA, 217 bp, Homo sapiens
  misc_feature (1)...(217): n = A,T,C or G
cangannaggatttagntttgagttcaccgaacagcagaaagaatttcaagctactgctcgtaaatttgccagagaggaaatcatcccagtggctgcagaatatgataaaactggtgaatatccagtccccctaattagaagagcctgggaacttggtttaatgaacacacacacttcagagaactgtggaggtcttggacttggaacttttgatgc

SEQ ID NO: 2044 - DNA, 497 bp, Homo sapiens
  misc_feature (1)...(497): n = A,T,C or G
tgagggtccccccccccccccatcgacacccctcatagangaccatagnccangcggtggaattcatccacccgcctcggcctcccaaagtgctgggattacaggcatgagccactgcacccagcctgggcctgcttctttctctttttctttttttttcattagcagcttaaaattggtgccttattcagacacaagcaaaaggacattagcccagctttggaaataggtgagagcccatatatgattttcctagtttctcctcccttttccctctcctgggcccttccttaggtcagtaattgttgtgagccccttaggctccttgcatcccatccctaacccttgcctgaccatgtgaggttatctgaagcacaaggcccaccctcacctatctgtcgaccccatttcctaccacctttgtggccgaccccaagcaccccagagatatgaggcaccctttgctccacccacagcagggccccgtcagactctgc

SEQ ID NO: 2045 - DNA, 484 bp, Homo sapiens
  misc_feature (1)...(484): n = A,T,C or G
agcgggnaaaaagagaccatatgcattgaggngcaattccccggctcgagttgcaaacactggccaggtaatggcagcttccactcaccaggcaagtggtcagctcgcctgcagatttgccaaagaaatccgtgtcctgccccaagcttgttggctcagcaggcttttcaaaatgcaggtatctctagagctgttttgtggacaccaggagcatcactggacaatccctgtgctggccccagagtatcctgtgcacctggatgaggctggaacacatcgggggcagggccgcaacacgtccactccagaacagcgtgggacctggggaaattgccagtcatttgctgtcccatcattgctgttccacgcatccctgacaactctgagcatgggtttgggtgaggtagcagctgggcaggaccagaaatgtccattnttgacatggaggcagcagacacccangctttgggtagaagtgagggcn

SEQ ID NO: 2046 - DNA, 498 bp, Homo sapiens
  misc_feature (1)...(498): n = A,T,C or G
cccccccccccccccncccccaatagaagacactagttcagagcgcnggaattccacagcatgcccacctacctcaacagcctcaacaacgccatcctgcgtgccaacctgcccaagagcaagggcaacccggcggcttacggcatcaccgtcaccaaccaccccatgaataagaccagcgccagcctctccctggattacctgctgcagggcacggatgtcgtcatcgccatcttcatcatcgtggccatgtccttcgtgccggccagcttcgttgtcttcctcgtggccgagaagtccaccaaggccaagcatctgcagtttgtcagcggctgcaaccccatcatctactggctggcgaactacgtgtgggacatgctcaactacctggtccccgctacctgctgtgtcatcatcctgtttgtgttcgacctgccggcctacacgtcgcccaccaacttccctgccgtcctctccctcttcctgctctatgggagg

SEQ ID NO: 2047 - DNA, 496 bp, Homo sapiens
  misc_feature (1)...(496): n = A,T,C or G
ccccccccccccccccccccatcgacaccataatagaggacattagnccangcggtggaattcggtgaccgcatcgactccctgctggagaacgaccggcagcagacgcacatgctggatgtcatgcaggaccacttcagccgcgcgtccagcatcatagacgagctcttccaggacaggttcttcacccgggagccccaggatacctaccactacctgcccttcagcctgccccaccggaggcctcacttcttctttcccaagtcccgcatcgtccgcagcttgatgcccttctctccgtacgagcccctgaacttccacgccatgttccagcccttccttgagatgatacacgaggctcagcaggccatggacatccacttccacagcccggccttccagcacccgccaacagaattcatacgagaaggcgacgatgaccggactgtgtgccgggagatccgccacaactccacgggctgcctgcggatgaagg

SEQ ID NO: 2048 - DNA, 494 bp, Homo sapiens
  misc_feature (1)...(494): n = A,T,C or G
tagtgcccccnnagcccccccactgagactctagtagaagcgcgggaanncancgacttgagcaacctggagcggctggagaagtaccggagcttcgaccgctaccggcgccgagcagagcaggaggcgcaggccccgcactggtggcggacctaccgagagtatttcggggagaagacagattccaaagagaagattgatattgggctgcctccacccaaagtctcccggacccaacagctactggaacggaaacaggccatccaggagcttcgggccaatgtggaagaggagcgggctgcccgcctccgcacagccagtgtcccgctggatgccgtgcgggccgagtgggagaggacctgtggcccctaccacaagcagcgtctggctgagtattacggcctctaccgagacctgttccacggtgccacctttgtgccccgagtccccctgcacgtggcctacgctgtgggtgaggatgacctgatgcctgt

SEQ ID NO: 2049 - DNA, 485 bp, Homo sapiens
  misc_feature (1)...(485): n = A,T,C or G
gcgggncaatgagaccctangaactgagagcataggcagngncgnggaattcggaggagcgggacgaggaagaggacaaacggaggaagggggaagaagtcacgcccatctcggccatccggcacgagggaaagactgacagtgagcgcacggacaccgcagccgacggggagaccaccgccactgaggagctagaaaaaactcaagatgacctgatgaaacatcaaaccaacattagcgagctgaaaagaaccttcttagaaacctcaacagacactgccgtaacgaatgaatgggagaagaggctttccacctcccccgtgcgactggccgccaggcaggaggatgcccccatgatcgaaccacttgtccctgaagagaaaatggaaaccaagacggagtccagtggaatagagacggaacccaccgtgcaccacctgccgcttagcactgagaaggtggtgcaggagaccgtgttggtggag

SEQ ID NO: 2050 - DNA, 471 bp, Homo sapiens
  misc_feature (1)...(471): n = A,T,C or G
gcccggccaggaaanntttgatttgatatccactatccatgtgcgtggaattcctacgcccgaggctcccttcccttccccagccgcactcatgccctgctcctgtcttgtgctttatcctgccccgctccccatcgcctgcccgcagcagcgacgaaacgtccatctgaggagcctgggccttgccgggaggggtactcaccccacctaaggccatctagtgccaactccccccccaccattcccctcactgcactttggacccctggggccaacatctccaagacaaagtttttcagaaaagaggaaaaaaagaatttaaaaaaggatctccactcttcatgacttcagggattcattttttttatacgctggaaattgactcccctttcccttcccaaagaggataggacctcccaggatgcttcccagcctctcctcagtttcccatctgctgtgcctctgggagga

SEQ ID NO: 2051 - DNA, 477 bp, Homo sapiens
  misc_feature (1)...(477): n = A,T,C or G
agggtcaatgagccttangaatgtggngcaattccaggacacagccacggccaccaccgaggatccagagctcttggctttcttgtcccgctataagttccacttggccctggaaaatgccatctgtaacgactacatgacagaaaaactgtggcgtcccatgcacctgggcgctgtgcccgtgtaccgcggttctccctctgtgagggactggatgccgaacaatcactccgtcatcctgattgatgattttgagtctcctcagaagctggcagagtttattgactttctggacaagaatgatgaggagtatatgaaatacctggcatacaagcaacctgggggcatcaccaaccaatttcttctggatagtctgaagcatcgggagtggggagtgaatgatcctttgctggctaactacctcaacggcttcgagtgtttcgtctgtgactacgaactggctcggctggatgccga

SEQ ID NO: 2052 - DNA, 486 bp, Homo sapiens
  misc_feature (1)...(486): n = A,T,C or G
ncgggcccatgagacccctngcaatcgagagctatacgcagngncgnggaattcctcattttctcagcagcattctgagacacagggggcagaaaaacctgatccagagtcttctcattcaccccccaggtatacagaccatggcggcgaggaggaggaggactatgaaagtgaggagcagttgcagcaccgcatcctgacggcagcccttgagtttgtgcccgcccacgggtggacagcaaaggcgattgcagaaggagcccagtctctgggtctctccagtgcagcagccagcatgttcgggaaggatggcagcgagctaatactgcattttgagacccagtgcaatacccggctcacacgtgtgctagaagaggagcagaagctggtacagttgggccaggcggagaagaggaagacagaccagttcctgagggatgcagtggaagccagactgagaatgctgatcccatacattgagcactg

SEQ ID NO: 2053 - DNA, 496 bp, Homo sapiens
  misc_feature (1)...(496): n = A,T,C or G
agtgtcccnnnncgccgccccactgaagatctgatggggacgttagnccangcggnggaattcgatcttgatcatggatgtgactgaggtggtgcccgagcccagccagcccttgaccaagaacaagttcagagtcctttacgagaaggagcagaaggggcccgtgactgccctgtgcactgcaaggccacctggtgtcggccatcagccagaagattttcctgtgaagcctgcgggccagcgagctgacgggcatggccttcatggtcgacaggcagctctacatccaccagatgatcagcgtcaggaacttcatcctggcagccgacctcatgaagagcatctggctgctgttaccaggaggagagcaagacgctgagcctcgtcatgggatgccaagaccctggaggtgtacagcgtggacttcatggtagacaacacccagctgggttttctggtgtctgacaacgactgcagcctcatggtgtacatgtan

SEQ ID NO: 2054 - DNA, 478 bp, Homo sapiens
  misc_feature (1)...(478): n = A,T,C or G
nggggncatgagaccatanccattgtagggcaattcgngagtctggccactgnggcttgggaggcttttatggggtgacttggggcttctggtagtcccccgggaacccccagagcctggggtctgagcctgtcctcaggcatgtggtctgggtgctccaaggggtttcatcaggttgaggggtggctttgccagcccattcccaagtcctgtccagtccagggtggggcagggatcccccagggctgcgcggcccttccccagaaccagtcaaccgtcggcaccccaggatgtctacccaccacccacctgggcacccacgctgcagaccgggagctggtcagcattttcgggggactgcttgtcccgtgcccaggcctggaacatatnctcccgctcattctgaaacgggccaagcccgaggcctctgtctgaaaagggtgggtgggnggacccctgtttccttgacgccttgctg

SEQ ID NO: 2055 - DNA, 488 bp, Homo sapiens
  misc_feature (1)...(488): n = A,T,C or G
nggagtgggtttgagnccctatcaagccagtaggaagtgcggcggaataaccttcagcacgaggtgttcatagggtagggttaggtgtagtctacggcaggagacaaggattccgtgagagctgccacatgaccatgacagagagctctgtgtttggatcaaacacagagaggaggaaaacaaaaggtgcttttaagtgagcccaggcagaactgtgagggcggcccatgctgcaggctgtggctgtcagcaggctgcttctccacagctggcccagtcctaggattcacagggcagcagcagggtacactgggtgactgctgccctctcgtggtggcacagggcagacctgctggtgaccagagatgcacccttttggggagaactagggagaaagcaggtattggagaagtaggggattgtttatttgttaaaagtgtggccctttcactcagcaggtctgctactgcctactaaggaatggcctc

SEQ ID NO: 2056 - DNA, 477 bp, Homo sapiens
  misc_feature (1)...(477): n = A,T,C or G
cgggtncnnacatgagacccatgaagacctctggaaacgcgatatggctgtaggatcccccttgatgcaagaggtaggctccccgaaagaccctggaaagtccctgccacctgtaccaccaatgggcctgcccccaccccaggagtttggccgggggaacccattcatgctgttcctctgcctggccatcctgctggagcaccgcgaccacatcatgcgcaatgggctggattataatgagctggccatgcactttgaccgccttgtgcgaaaacaccacctggggcgcgtcctgcgccgggctagggctctctttgctgattacctgcagtcagaggtgtgggactcagaggagggggctgaagccacagccgcatcttgatcaggctttctcaagccctccatcggccccaccagatctccattctttgccatgagggccaacacatgagaccccaccttcctcccttgctgccg

SEQ ID NO: 2057 - DNA, 482 bp, Homo sapiens
  misc_feature (1)...(482): n = A,T,C or G
gtgggagccnnaaatgagncccaactgagaccatatgcagngncgnggaattcgattgagtcatgttggcaagagctgggtctaggaccctggggtggggactggagggttgagcaggtcggggcctcagcctccctccggttccccagggaggtctgttccatccgcttcctgttcacggctgtgtcgctgctgagcctctttctgtcagcattctggctggggcttctgtacctggtctctcctttggagaatgaacctaaggagatgctgactctaagtgagtaccacgagcgcgtgcgctcccaggggcagcagctgcagcagctccaggccgagctggataaactccacaaggaggtgtccactgttcgggcagccaacagcgagagagtggccaagctcgtgttccagaggctgaatgaggattttgtgcggaagcccgactatgctttgagctctgtgggagcctccatcgacct

SEQ ID NO: 2058 - DNA, 229 bp, Homo sapiens
atcatgtttggcaagaggcgaaaaatccgagaggccaacaagctggcggagaatcggaaagcccacgatgaggcggtgaggtctgagaagaaagccaagaaggcaaggccggagtgagtgcctgcggcccctcacagggctgaggccagcccctatcagctggatgtggcagaggccgccacaggacctaagtgtgatggaccaaacgcacttctcctcctcctttctc

SEQ ID NO: 2059 - DNA, 470 bp, Homo sapiens
  misc_feature (1)...(470): n = A,T,C or G
tggcgggnaggnnnanttttggatcgaganccactatccatgtggtggaattccaggaagccgtgtcgttgtcacccatgagggcgaggcctggcaaggggccaggcagaggaagggccaccttggcttcagatatgggcgacctcagctcaggcccccccgccattcccagcgctcctcacctccgtgaggccctcaacagccatggctgtcaccccacccaccctcctatctggacctgctggggtgtgaaagacagtcccgtgctgagggtgccttggatgggttcttcttaacctcagagcccctgtttccacctggaattacagccttctgtgaggctggaaaggtaaaacaagaaggctgtagaaaacgcctgccacacagtatgccggtcctggaataacattttgttgtgacattgatgaggaaaaaataatgattcccgggaccattgtctgggtggtggg

SEQ ID NO: 2060 - DNA, 483 bp, Homo sapiens
  misc_feature (1)...(483): n = A,T,C or G
gagggttancnaacatcgagacctnattgaagngcgctggaattcgcccacactggtgtgaatattgtgccaatttcatgtgggggctcatcgcccaaggggtccggtgctcaggattaaaatcggaaggcctttacagagtctctgggttcactgaacacattgaagatgtcaaaatggcatttgacagagatggtgaaaaggccgatatatctgccaatgtctatccagacataaacatcatcactggagcccttaaactgtatttcagagacttacccatccctgtcatcacatatgatacctattccaaatttatagatgcagcaaattcatggagggcaaggacagtgtccagcctctggccacccagaggacattcaataagcatgtggtgctcagcctcaaactctttcctgaatgacacaggacaccaacaaattgattaagtgaaacagtgcttggattgcatgaatttattan

SEQ ID NO: 2061 - DNA, 482 bp, Homo sapiens
  misc_feature (1)...(482): n = A,T,C or G
ngggtttnnnnncactgagacctattgaaggcgctggaanncgcagaggctggttcagaaaaggaggaagaggcccggctggcagccctggaagagcagaggatggaggggaagaagcccagggtgatggcaggcaccttgaagctggaggataagcagcggctggcccaggaggaggagagtgaggccaagcgcctggccattatgatgatgaagaagcgggagaagtacctgtaccagaagatcatgtttggcaagaggcgaaaaatccgagaggccaacaagctggcggagaagcggaaagcccacgatgaggcggtgaggtctgagaagaaagccaagaaggcaaggccggagtgagtgcctgcggcccctcacagggctgaggccagcccctagcagctggatgtggcagaggcaggccagaggacctaagtgtgatggaccagagtcacttctcctcctcctttctccagccagcn

SEQ ID NO: 2062 - DNA, 468 bp, Homo sapiens
  misc_feature (1)...(468): n = A,T,C or G
nattgacccccctattgatgacactagtccagngcggnggaattcaagaagagagcagctcgcttttaactggactgcacgttggtgacagcgtcccaagctggtgacagacccactctgtaacttgcagctagattcagccaccagatcccagaaacatgacccttgctgcctacaaagagaagatgaaggagctcccgctggggtccttggtctgctcctgcttcctggccgatcccctgaataagtcgtcctactaatatgaagcagacacggcggacctgaattggtgcgtcatttccgacatggaagtcatcgagctgaacaaatgcacctcgggccaatcctttgaagtcatcctgaagccaccctcctttgatggggttcccgagttcaacgcctccctgccaaggcggcgagacccatccctggaagagatccagatgaaactataagcggctgacgagg

SEQ ID NO: 2063 - DNA, 466 bp, Homo sapiens
  misc_feature (1)...(466): n = A,T,C or G
natcgaccccctattgagaccgtaggacagngcggnggaattcgatttccataagcgggagatcgagtacttcaggaaagcgctgggcatgacccgagtgaagtcctccgtctgccttgaggcgtgagtggggtgaggggtggcagctggagacccctgctgagtgctgaggcccctcctgcaccagcccccatacccccttccagggtggctgcccccacgaagctccgtgtggagagatggggcttcagcttccgggagctcctggaggaccccgtggggcgggcccacttcatggactttctgggaaaggagttcagtggagaaaacctcagcttctgggaggcatgtgaggagcttcgatatggagcgcaggcccaggtccccaccctggtggatgccgtgtacgagcagttcctggcccccggagctgcccactgggtcaacatcgacagccggaccatgg

SEQ ID NO: 2064 - DNA, 416 bp, Homo sapiens
cccagccctacctgcctctcccggaggcggccccggcccaggcccaggccgaggccgacttgctcaccgtctacctggtggtggcgttggcctcggtgtcttcgctcttcctcctctcggtgctcctgttcgtggcggtgcggctgtgcaggaggagcagggcggcctcggtgggtcgctgctcggtgcccgagggtccttttccagggcatctggtggacgtgaggggcgctgagaccctgtcccagagctaccagtatgaggtgtgtctgacgggaggccccgggaccagtgagttcaagttcttgaaaccagttatttcggatattcaggcacagggccctgggaggaagggtgaagaaaattccaccttccgaaatagctttggatttaatattcagtaaagtctgttttta

SEQ ID NO: 2065 - DNA, 481 bp, Homo sapiens
  misc_feature (1)...(481): n = A,T,C or G
acgcgccttcggnccttcgtagtccatagtcagtgtggtggaattcgggacatcgcccgcacctacccggaacacgagttcttcaagggccaggacagcctgggccaggaggtcctcttcaacgtcatgaaggcatactcgctggtagaccgggaggtgggctactgccagggaagcgccttcatcgtgggcctgctcctcatgcagatgcctgaggaggaggccttctgtgtgttcgtgcggctgatgcaggagtaccggctgcgggagctcttcaaacccagcatggccgagctcgggctctgcatctatcagttcgagtacatgctgcaggagcagctcccagacctcaacacccacttccgttcccaaagcttccacacatccatgtatgcctcgtcctggttcctcacactgttcctgaccaccttcccactccccgtcgccacccgggtctttgacatcttcatgtatgaggggc

SEQ ID NO: 2066 - DNA, 477 bp, Homo sapiens
  misc_feature (1)...(477): n = A,T,C or G
ggggnatcgagaccctagtccagtttggaggacttctgtcaccaaaagtcggccagttatgatcctcactgagttcatggaaaactgcgccctggactccttcctccggctcaacgatgggcagttcacggtcatccagctggtgggcatgttgcggggcattgctgccggcatgaagtacctgtccgagatgaactatgtgcaccgcgacctggctgctcgcaacatccttgtcaacagcaacctggtctgcaaagtctcagactttggcctctcccgcttcctggaggatgacccctccgatcctacctacaccagttccctgggcgggaagatccccatccgctggactgccccagaggccatagcctatcggaagttcacttctgctagtgatgtctggagctacggaattgtcatgtgggaggtcatgagctatggagagcgaccctactgggacatgagcaaccaggatgt

SEQ ID NO: 2067 - DNA, 472 bp, Homo sapiens
  misc_feature (1)...(472): n = A,T,C or G
agggcgggccnngcncnncctggaattcatattcagtgtgccggaattccagagcttgtgcaagcagaggaccgcgcatgcacgcgggggtggcctttccacaggtgtccatgcagggaccgccggaagtgcaggctcggagctggggtgcaggctggtgcagcaatggaaacaggctagaaggcattggtctgcagtagagggagagtaacacgaaggcaagtgttgagctggaggggcgatccacaaccccatgggaagaagatcctgcacgcagggatgcagtgaataagcaagccttgtaaggacacagaaaagggctaaaggcacaattggagaaaactagaatgattgggattggatatgttcacatgagctcatggctttcaatacctaaagaaacagatgtcagtgtgcgtgtgtgtgtgcgcacaaacgnttttattttttatttttattttttattgctagg

SEQ ID NO: 2068 - DNA, 461 bp, Homo sapiens
  misc_feature (1)...(461): n = A,T,C or G
natgagacccattgaaggcggtgganncggcgaatcacgttgggtgactgtgggtgacagcgggtcacggcgggttaagaaggatcacatcggatcacgatgggtcacggcgagtcaaggagggtcgcggcggctcacagtggttcccacggtcgcgctgcgagccgccagctgctcctgccctcagctcagagcccagtcctgctgcctggggcgggagggggtggcagcgcggccctgacatcgagaggccaccgtcatcgtcttccatcgaaaggcgtttaaacttacatcccaaagtgaccttctgttcttctttcacctttctcccacctgccccaccctgcgtcaccatggatgtcagcttcctgcccactccccaccctcctgtgaaccctccctcggccttcagagccagtccctgcctctttctggctcggtccagtctcaccccaggtgct

SEQ ID NO: 2069 - DNA, 490 bp, Homo sapiens
  misc_feature (1)...(490): n = A,T,C or G
aggccgggtnnncccnnnnncctgcnaccttcgnannnnncctgcnangctncgcaagngccgcggaattccccgcgctgcaccccagcatctcggaggaggagcgcatgtacatcgaggacgccatcggagagagcgcgaaactcatgaaccccctcacgaagtttagcactccctggcggcgcttcttcacgtctatgccagtctatgccatcatcgtggccaacttctgccgcagctggacgttctacctgctgctcatctcccagcccgcctacttcgaagaagtgttcggcttcgagatcagcaaggtaggcctggtgtccgcgctgccccacctggtcatgaccatcatcgtgcccatcggcggccagatcgcggacttcctgcggagccgccgcatcatgtccaccaccaacgtgcgcaagttgatgaactgcggaggcttcggcatggaagccacgctgctgttggtggtcggctactcgca

SEQ ID NO: 2070 - DNA, 452 bp, Homo sapiens
  misc_feature (1)...(452): n = A,T,C or G
atagattacgatancctagtccangtggtggaattccaagggccccgcagcccttctgcacccagcacagcctgcccagcccagccctgcccccgggcactgcacagcctgtctgggggccagaccaccccattgtccatccttgttgtccgtgagtccttggcctccaccaagcacgtgtggccattgtgtgcctgccttattgactccgtggttttgtgaggagcagagtgtgtatgatttttgcctcagaaactatactcttctgtgtaacagaccaataaacaacatttgtcaacaaaaaaaaaaaaaaaaagggggccgctcaagtttaaagggcccgttaaaccccgttgatcaccctcgactgggctttttagtggccacccatttgttgttggcccctcccccgggccttctttgaccttggaaggggcccctcccactgcctt

SEQ ID NO: 2071 - DNA, 469 bp, Homo sapiens
  misc_feature (1)...(469): n = A,T,C or G
ggccggggcnncccnnnttcgagttcgtagtcagtgtggnggaattcgacaccgtcgggcttgtggcctaagcccctgggagggcctggactgcagcctggggagcagagggctgggcggtggcaggcactgggcacactagggaaggaaaggcaggagaacaggatgcagccaggagagaggagattcagccaccaccagttctgcctcatccccaggccaaggaagtccggggggtgaaggtcttccgctcctcggccaccgtgtactttgccaatgctgagttctacagtgatgcgctgaagcagagggtgagacggagtccccaggatgggtgtcaggccccagctcccagagagctcaccaacccttctctgatgtttgcctccagtgtggtgtggatgtcgacttcctcatctcccagaagaagaaactgctcaagaagcaggagcagctgaagctgaagcan

SEQ ID NO: 2072 - DNA, 464 bp, Homo sapiens
  misc_feature (1)...(464): n = A,T,C or G
natggagaccacattgaagngcggtggaanncgccntgcccggtactaggaaggagtgaggtgtgttcccaccgtacacttcccacacgagctgcggctgccagcctcgggccatcagcctaggagagcagatgcagctccaggggctcgacttatagccagttacagctccccggctcttctgtgtggcagagcgtcgtttccgggccctcagggctggggagctcagttcccattgcttgtgctcagggctgagtcttaaagaagggtttgccggccctaacgctgcaacgcgtgcgcggagagaggccctttttgagcctgtttactcctgtggccttgggcagaacagtaaatactctgtgcacggaggaaagacatgcccaagaggaaggaagtactgaccatcggctgcctgtgagcagcttagcaaggagcccttngctccttgganaggcggtgaa

SEQ ID NO: 2073 - DNA, 464 bp, Homo sapiens
  misc_feature (1)...(464): n = A,T,C or G
natgagcccctantgagatcgtccgaagngcggnggaanncgcaagacagtggagagaagtcgcatgcttgtttttttgtttgttctttgagacggagtttctgtatcgtcgcccaggctggagtgtaatgacgcaatctcggctcactacaaccttggcctcccgagttcaagcaattctcctgcctcagcctcctgagtagctgggattacaggcgcctgccaccatgcttggcaaattttttttttttttggggatttataaaaaaaacgggggtccaccatgtgggccaggcttgttttaaactcctgacctgaggcaatcccactggtttggcctcccaaagggctgaaataacgggcttgacccaccaaacccccccgcgggcttggtttaaaggctcgctcgggtaaggagagattaaccaatattacggctccccgaaacaggaatttctctaaag

SEQ ID NO: 2074 - DNA, 467 bp, Homo sapiens
  misc_feature (1)...(467): n = A,T,C or G
taatgagaccacctttgagngcggtggaanncctcccagcaccagcagagcagtgggccgccctccttgctggaggggacccggctccaccacacacacatcgcgcccctagagagcgcagccatctggagcaaagagaaggataaacagaaaggacaccctctctagggtccccaggggggccgggctggggctgcgtaggtgaaaaggcagaacactccgcgcttcttataagaggagtgagaggaaggcggggggcgcagcaacgcatcgtgtggccctcccctcccacctccctgtgtataaatatttacatgtgatgtctggtctgaatgcacaagctaagagagcttgcnaanaaaaangaaaaanaaaaaaaaaaaaaaaaaatnggggggcccttcaatttaaaagggccccttaaaacccggggaaaacccctgggggggctttttagtggcaaccct

SEQ ID NO: 2075 - DNA, 472 bp, Homo sapiens
  misc_feature (1)...(472): n = A,T,C or G
nttgagaccctagtcagtgtggtggaactcanactcgtagtcccatagtcagtgttaattacacacattgttaactattggatgaaaaatacatgctattgattgtgtccaaagcctcccgaggacctccgtggggatgctctggtagcctgaatacagaactgaggtgaaagtccaaaccttgaattttacagtagtaagttggtaaaccatgtgctctgtgctatgagttaattatgttttcccaaatactaatgtggcacaagtaccatattttatcagagttcttatgtacagtatggtgaagataagtgacaagcacacatttttcttgcttcactgctgttctatattacacaggtttgttgttgttttttttaaaaaagaaattaagcagtagttagtctctaaaaatacaatgtttcaggctaccacagtgaataaatagaaatgtaatcagggattaaaaaan

SEQ ID NO: 2076 - DNA, 491 bp, Homo sapiens
  misc_feature (1)...(491): n = A,T,C or G
aggccggnnnnnnnnnnnncctaggaccttcgnannnnntctagnnantcatagtgaagngccgagaaatagttactcagttgtaaaaattttgatttattctctttcttctgacctccttgcctcttgtcttgaaccatagcaaaaggatactgcatctctcattactgtagtgctgaggttattgaagttatacaaaacacatctcagtctctgtttcttggaaaggtatctattacatcctgctagctgactgacaaaactaagcagggagaataaagataattgtattttatgttttgcacacaaacgcagaatttgcataaccatatgacttcatagttgtgatctcaaaaaagaaggaatttctcctttgtttcttgcagttaatgtaagaatactttaaatctctaagcttctgaagtgttagaggtagagatggtctagtaaagatgtagtagtaatgttttatccatttagcatgtgtttat

SEQ ID NO: 2077 - DNA, 279 bp, Homo sapiens
  misc_feature (1)...(279): n = A,T,C or G
ntttgagaccacattcgagngcggtggaattcgaactacttctatgtgccagacctgcttccctgggagggggtgacggaaccagcactgtgtggagaccagcttcaaggagcggaaggctggcttgaggccacacagctggggcggggacttctgtctgcctgtgctccatggggggacggctccacccagcctgcgccactgtgttcttaagaggcttccagagaaaacggcacaccaatcaataaagaactgagcagaaaaaaaaaaaaaaaaaaa

SEQ ID NO: 2078 - DNA, 478 bp, Homo sapiens
  misc_feature (1)...(478): n = A,T,C or G
agtccggtnnncccnnncctaggacctatgannggcctgntanctacgtaaagccatcttccctgaagccaccaaactggcccccccctccacagactttctccccaaaacaccccatctttctggcttttctgagggcaatggcatggggcccacccctcaagggtaaggaactgtgttcctgcccttaggcccccatgggggcagggatcggcttggaaatcaacgtggttgtccccgacaggccggggaaggttggagcagcccccagggaggggggcactaggtgtcattgtgcccgatgtctggctcccctgcaggagggaggctccagggtaagacagggctggcaggagcagactgcctcagcccatgtgccctgccggccagggcgtgggctcccctcggctgtggtgcctcctctggccccccaggtccacgtcctttaaattggccctttggctcttgcccttggcta

SEQ ID NO: 2079 - DNA, 496 bp, Homo sapiens
  misc_feature (1)...(496): n = A,T,C or G
aggccggnnnnnnncnnnnnnncctagcnangcttcgcannnnnncctgnnnacctancgcangnngcgcggaantcgnctgtaaaggttcgtttgatatgttactataaaaatatgaatatatatgtatatttaatagtcatatgcaggggtccccattgtttaagggctgatctatgactttttatgacataagatatctggaatcctagcaaaagtgatttcgtacattagggaccatgttctgttatgtatatcaaatacattgctgtaccttcatggtctttgctgtctatagctaattctgaagaggaaagtggagtaagaaaatcacttctagagctctgacattcctgtgaagcagtaaagattctatataaaatagttattcaaatatttaaaaaaacaataaactgaaagcatgaactaaaagcaaagaacatcaatattgccagtcacgtaagagaaaactataaaagttaacaaatatatggga

SEQ ID NO: 2080 - DNA, 240 bp, Homo sapiens
gcttgtattacagaaatcaggtgtgcatacttgctaacctacctttgaagcagttgcttctattaggattttcaacaggagcatatgaaatacaacagggcattattaaacactaggcctgtggggaaagtgacaatgtttgccagtaaattcttcaagccacctgtgagtgttctgacctctcctgcctctgcttttggcctgtgttacttatccagctgcttacgttggtgcactttg

SEQ ID NO: 2081 - DNA, 478 bp, Homo sapiens
  misc_feature (1)...(478): n = A,T,C or G
gggaagattgaganccntttccagaattgaggaccntctgcaggctcagcgcaancgggtcctgaaccagctggatgcctcggtcagagacaggcaggacatggagaggcatcatggtgagcagatacagaccctggaggacagggtccagctcaaggtccgggagctgcagacgaaccacgaggaggagctgaggaccctgcacgagcactactcgcagagcctgaggtgccttcaggacaccctctgcctccaccaggggccacaccccaaggccctgccagcccctgcccccaactggcaggccacccagggagaggctgactccatgacggggctgagggagcgcatccaggagctggaggcccagatggatgtcatgcgggaggagctgggacacaaggacctggagggcgacgcgggcacactgcatgagaagtaccagagggacttggagagccttaaggccacgagcgag

SEQ ID NO: 2082 - DNA, 492 bp, Homo sapiens
  misc_feature (1)...(492): n = A,T,C or G
aggtccggggnnncncnnnnncctgcnaccttcgnannnnncctgcnangctancgcaagngcgcggaantcancaatctctgttctagatttgttgcaggacgaggagcggaggcggcagcagcagttagaagagatgcgcaagcgggaagcggaagaccgagcgaggcaagaggaagagcgccggcggcaggaggaggagcgaacaaaacgagacgctgaagaaaagggtatggtcctttaagggcagctagaattttaccaagttagcctgaacgtaatcgattggctggggcagagcgggctggaagttctgtgtttcttaagaagcacgaggcagagcagggcctggctcccccagctttgtgattggacctgcaactttaccccatctggcccacctacctctcttctggactgtctccagatccccttatctgccaagttttgtctccttcaaacttctgaactcttgggcgtgtgtagcagtga

SEQ ID NO: 2083 - DNA, 480 bp, Homo sapiens
  misc_feature (1)...(480): n = A,T,C or G
agagcggcccaaactgaaccctnactganagcntacgaagngncgnggaattcggcagcaaggaccgctcgctttctgtctggctcacatgtctgaaacggccgctggtggtcatccatgaactgtttgacaaatccatcatggatatttcctggactctgaatgggctgggcatcttggtatgctctatggacggctctgtggcattcctcgacttctcccaggatgagcttggcgatcccctgagcgaggaggagaagagccgcattcaccagtccacctatggcaagagcctagccatcatgaccgaggcccagctctccacagccgtcattgagaaccctgagatgctcaagtaccagcgaaggcagcagcagcagcagctggaccagaagagtgctgcgaccagggagatgggctcagccacctcagtcgcaggcgttgtcaacggggagagtcttgaagatatcaggaagaatc

SEQ ID NO: 2084 - DNA, 477 bp, Homo sapiens
  misc_feature (1)...(477): n = A,T,C or G
ggggatcggacccttnnnanatcgagaccactgtcagngtggnggaattcgtcagtgccaagaggctgcgccaggccactctctcagcccagggcctgccctcctgtcctcccacttctctacgccctcaaggttggagaccccgctcccatgccccagctgtgccatcccaaacacttgggcagcagctcagcatgggcagacatgggggctgtggattcttccagggcggggatggcagatggagcccttgggctccttgggcctagagccacttcttaccaggcaacgggcacagccaccctggcacaccctctgcctggccgtgctgaacctctgctggtcccaagggagaagggagtgagcgtgggtcacctggggaaaatctcatctgattccctccttgcccgacctctgctaggggctggagaacagagctcagagcacccagtgtagggaaacacagccagaccactg

SEQ ID NO: 2085 - DNA, 476 bp, Homo sapiens
  misc_feature (1)...(476): n = A,T,C or G
agccggnnnncncnnncccaggacctggaaggncctgntaccntcgtaagcacccccatcacctccgacgaggaatacctgagccccccagaggagttcccagagcctggggagacctggccgcgaacccccaccatgaagcccagtcccagccagaaccgccgttcttctgacactggctccaaggcaccccccaccttcaaggtctcacttatggaccagtcagtaagagaaggccaagatgtcatcatgagcatccgcgtgcagggggagcccaagcctgtggtctcctggctgagaaaccgccagcccgtgcgcccagaccagcggcgctttgcggaggaggctgagggtgggctgtgccggctgcggatcctggctgcagagcgtggcgatgctggtttctacacttgcaaagcggtcaatgagtatggtgctcggcagtgcgaggcccgcttggaggtccgaggcgagtg

SEQ ID NO: 2086 - DNA, 445 bp, Homo sapiens
  misc_feature (1)...(445): n = A,T,C or G
caggtggccctcatctcgcctacagttctcaaggaaaatgggattcccttcaatcgcataactcaggaggctggagagttcatggtgacctttccctatggctaccatgctggcttcaaccatggtttcaactgcgcagaggccatcaattttgccactccgcgatggattgattatggcaaaatggcctcccagtgtagctgtggggaggcaagggtgaccttttccatggatgccttcgtgcgcatcctgcaacctgaacgctatgacctgtggaaacgtgggcaagaccgggcagttgtggaccacatggagcccagggtaccagccagccaagagctgagcacccagaaggaagtccagttacccaggagagcagcgctgggcctgagacaactcccttcccactgggcccggcattccccttggcctatggctgcccgcn

SEQ ID NO: 2087 - DNA, 501 bp, Homo sapiens
  misc_feature (1)...(501): n = A,T,C or G
gagagagncccnccccnnnttttgaaagncccttnncangnggnggaanttagtagagcctagtcagagtggtggaattcctcaggacttccagaagttactttaatcacttctgagttcgtggagggtgttactgaaccaactatttctcaggaactaggccaaaggccccctgtgacacacacaccccagctttttgagtccagtggaaaagtctccacagctggggacgttagtggagctaccccagtgctccctgggtctggagtagaagtatcatcagtcccagaatctagcagtgagacgtccgcctatcctgaagctgggttcggggcatctgccgcccctgaggccagcagagaagattctgggtcccctgatctgagtgaaaccacctctgcattccacgaagctaacctcgagagatcctctggcctaagagtgagcggcagcactttgacatttcaagaaggcgaggcgtccgctgccccagaagtgagt

SEQ ID NO: 2088 - DNA, 457 bp, Homo sapiens
  misc_feature (1)...(457): n = A,T,C or G
natgagcccatgagaccctaggcagngtcgnggaattcaaccacacggtcagactatagggaccgctcagacccgcgtgagaagcctgcattgtactttctaactgacacccatagggggagtgacgctgcctcgcgccttacttgagcctggaaggagccacaccaacagtcctttcctagcaacaagaccaaaatgaatggcgctggcggagcagacgtcaatctatgcatgtgccgaacaggaggaccaggccccaagggcatctcatgcatagttgttgagaaggggacccctggcctcagctttggcaagaaggagaaaaaggtggggtggaactcccagccaacacgagctgtgatcttcgaagactgtgctgtccctgtggccaacagaattgggagcgaggggcagggcttcctcattgccgtgagaggactgaacggagggaggatct

SEQ ID NO: 2089 - DNA, 479 bp, Homo sapiens
  misc_feature (1)...(479): n = A,T,C or G
ctttgatagctatcccangngcgggaattccccagccccgagacccataacgtgaagcatggactgaatttgaggtttctggatggtcgtgtgtaccgaggggacgggtactggactgacaagaaatgagccttgaaggtcaatctgggtgacacccgagtctcctgatggagtttcactatgttgcccaggctgatctggaactcctgacctcaagcaatccacctgcctcggcctcccaaagtactgggattacaggagggagccaccgtgcccggcctggtcctgtgcattttatagataaggtaactgacaaacctagccacagtcaccccttcgccctaaaggagaactggaatttgaacccagagccttcttcaccaccatctccgttgtttctggaagcaccctccaggcaggccagccatcatctcggngcctcccctggggctggaacgtctgcaggatgcccccttgag

SEQ ID NO: 2090 - DNA, 485 bp, Homo sapiens
  misc_feature (1)...(485): n = A,T,C or G
tggaggcccnccnnnnttcgaatccctatccaggtggggattttgggcagctgacctttatacccactatacctactcaagtttctgcttgggagatcagctctgcagagaatggaatgagaagtattggtttagataggttgtttgtttgttgtttttgagacggagtttcactcttgttgcccatgctggagtgcaatgccatgatcttggctcactgcaacctccgcctccccaggttcaggcgattctcctgcctcagcctcctgagtggctgggattacgggcatgcgccaccatgcctggctaattttgtgcttttagtggagacgggggtttctccgtgttggtcaggctggtctcgaactcccgacatcaagtgatccgcccgcctcatcctcccaaagtgctgggattgcaggtgtgagctaccgcgccctgcctgttttgcttttttatcaaaacattttattgtggtaaaatat

SEQ ID NO: 2091 - DNA, 482 bp, Homo sapiens
  misc_feature (1)...(482): n = A,T,C or G
ntttgatcgacgtccctagncagngnggnggaattcagagggttaggataccaggccgagttcaggccactgctagctttctcatactcccacatgctagaccagagatgccaagtcccaacagcactgagctgtgtgcactgtgccagggacaggagggtttgtgaactgcctgtcagggtacctgttagcccctgacaactcagtggggtgaagttttggaggtcagagtctgctttcgtaggctctttagacagcacctaccacttggttctccagcgtagactcctgggagcagccaactgcagccattgccatccagtggggagatgggttagggaggaggacgggctgactcctctcctgtaataaagctgacaagagttctagaggattctgcttctctagtaactagacaggtgatacgcatttgcttgccacattaagggaaaatggtgtcatttgttgcagaaaaacaatgg

SEQ ID NO: 2092 - DNA, 448 bp, Homo sapiens
cagtactagagctaataacatccagattgataaaaccaagcctttgtggcacaactatttcttatgtggacttaaaggaattcacgaacactttggtcttactaacctgactggaatgaactgcctgggacatggaaacatcccaccaagatctggcctctccagctgcattgctttggtctgttgtgctggcttgtaatcgctcacagtgctgggaaggaatctatccaagctcctggctaaatacaaaagcttgcaatgggacaaagtactgaggctggaggaggtgcaggctaaactagggattagtctagaagaaatgctgttggtcacagaagatgcccttcatcctgaaccctataaccctgaggagatctgcagtgtctgggaattagcctggaggaactccgaacccaaatcctgagtccaaacactcaagatgtgctca

SEQ ID NO: 2093 - DNA, 481 bp, Homo sapiens
  misc_feature (1)...(481): n = A,T,C or G
ntttgatcgacgtccctaggccaggnggnggaattcgtcccttctcttttccttcttcccccaaatcctcatcttaaccaacacaccaagtattagagcactcctatgcttctgcagatggagggaagaacagctcttgttttataggctctggagttaatacctggataatgtgagatctggaaagataactcatgagcttagtccctgtggttcttatcactctctagagaagagttctttaaggaccaaggactatctttgctctaggatatccattttggccctttaatctgcaatgataggctagcattatttcccttagaatttgtcttcagttggtatgcctccctctgcctttctgataggaatgtaatgataaatgatgactgcactcatttttaaaagttaaccagtttttgttcaattgaaaaagtaatgtacatggaaaaaatttcatgtttacaggatgttcagtgat

SEQ ID NO: 2094 - DNA, 476 bp, Homo sapiens
  misc_feature (1)...(476): n = A,T,C or G
ctttcgagntcccctattccagagtggaggaattctcgactgcctttgtctatatggctctgtcccactctttgtctatctgtctctgccccctctatctcgatctccctctcactttgtctctctttcgcgcgggcaggcatcttgcctggcgcgtgccacgcctgatgctcctattctcccgaggatacggaagtccacctacctgcgtctggagcttctgtccaaggaggagtacaagctgagcctgctgatggccgagtctctgcggggggaccaggtggcacccgtgctgtaccagccgcacctggaggccctggaccggcggctccgcgtcgtgctaaaggccgtccgggactgcgtggagaggaacgggctccacagcgtggtggatgacgacctggacactgagcacagagccgcctcggcgaggtagtgtccgccggccgctgcgctgcccgggacggagacagagg

SEQ ID NO: 2095 - DNA, 437 bp, Homo sapiens
tttgcgacctttttccagctggtggaattccagatggcattggctattctacagcgaagcatctggcgagacttggcatgcatgttatcatagctggaaataatgacagcaaagccaaacaagttgtaagcaaaataaaagaagaaaccttgaacgacaaagagacgtgagtcttgctgtgttgcccgggctggctttgcctctggaactcaagcgatcctcccacctcagcctctcgaggagctgggactacaggcgtgcaccatcatttcctcctaaaatttggaatttttatactgtgacttggcttccatgacttccatccggcagtttgtgcagaagttcaagatgaagaagattcctccccatgtcctgatcaacaatgctggggtgatgatggtccctcagaggaaaaccagagatggattcgaagaaca

SEQ ID NO: 2096 - DNA, 479 bp, Homo sapiens
  misc_feature (1)...(479): n = A,T,C or G
nttgatagcctacccagnggcgggaattcgttggactagaggcactccagggcccactgagatccatgcagatacagcagactttccttcctgcattcacgctcctcacgatgtgagtcctgggtgccagcaagccctgctctgtggccagcccagcttgcgatgcagcacatccaggtcacacagcagcctcaggcacttctgcagaccctgtgtatctcaacctagcctcacgctcccagactgcctcagacctgcccctgagatgtgagcccagcagcgcccacccagccaggccctaccccctctgtggtcatgggccccccagtagagtggccctcccctcccacaggcttggagggctgagtctgtctctggggccctgtaaccatcttgctccagtgtctctaccactgcaggggcatctgcttcccatgctggaaatcagccaagtctcccctgtgccgctgggccctgtt

SEQ ID NO: 2097 - DNA, 489 bp, Homo sapiens
  misc_feature (1)...(489): n = A,T,C or G
agatggcccggnnntnagcgcccaatgataccatctgactgagcccntaggaagngccgcggaantccccgtctctctgaattgttgattatgcgctttatgaagagattttttaatctcgcgagctttactttgtgtggnttacaccctctgacctagacttttatttttaaactgaaaaagatggtcttgtctatataattgctgcttttacataatttattttcccctctcaggacaaattctgtcttgctccatcttacagcttttccatgttctccaagaatggtgtggaacattttcattaaacagctgttgctgaggcttctgcttgaccttctgcgtgcccgaatgcacagagaggcaccgaggagagaaaggcttttctcactcgctcccgatgataccgtctctggccattcctgactgaggcagctcactctgaatgggcacctttggagcttttgcccaccacaaggctagtggggg

SEQ ID NO: 2098 - DNA, 463 bp, Homo sapiens
  misc_feature (1)...(463): n = A,T,C or G
gagcggggngggncattgaaacccctngactggagaccgtangcagngngctgaagcgctgaacgtggcattcctggaagcaggagctgttctgtttggatctggtaggacagggctcagagggctaggcacggagggaaggtcagaggagaaggcaggcagggcccagtgagaggggagcatgccttcccccaccctggcttgctcttggtcacagggcggttctgggcacttgaactcagggccgaagcagaagcacaggcccagtcctggctgcaagcacaatagcctgaatgggatttcaggttaggcagggtgggaggggaggctctctggctttagttttgttttgttttccaaatcaaggtaacttgctcccttctgcctacaggccttggtcttggcttgtcctcacccagtcggaactccctaccactttcaggagagtggttntaggcccgtg

SEQ ID NO: 2099 - DNA, 475 bp, Homo sapiens
  misc_feature (1)...(475): n = A,T,C or G
gagtcccnnnntagccccttatgacatcgctagngctatangaagnacnnnagagntcaggcccagcaggtcctggcaagtgcattccacccgaacttttattccaagcggtggtgaaggaagccaaaactccaagctgcactttcttggggttctggccatgcacttcttagccttctctctgactttacaggacaaaaggtaccccacgccttcagaatcatgcttacctgcacggcagcatctgactggatggctggctaggtctcatccaccccaaattactgacccttgatttatgttgttactgctcaggttatgctcacatgccctggttgcctgaagatggtttaagtgcaggcccttcagacaagtcacgtcaggcaagagagggctggcctctaacccacaagagggcagatttgtggccaagaggcttcctggcatccacccccaagcccaaaggatcagtgtg

SEQ ID NO: 2100 - DNA, 397 bp, Homo sapiens
  misc_feature (1)...(397): n = A,T,C or G
agtnttttnagnnntgncncgggnnagnnnnnagaattgatanccctngnaatcgtagtccactatccangtggtggaattcctcgagcggcctgctgaagacgcggtaatcgccgctagcgtccaggacgcctccagaggccagcgcggtgcggagctgcgccttgacctggtccacggaccgtggggacgggggaaagaactcaaaatattggtcttgctcctcttgcccgtgcagtccggacagcagcgacaggtagagcagctgcagcatcgccaccagcatgagcgcggccagcagcagctggtagaaggcgcaccggatggcgtaggacatctgcatggctctcggggctcggggcgcgcagcaacgaccacccggccacagactacgcca

SEQ ID NO: 2101 - DNA, 488 bp, Homo sapiens
  misc_feature (1)...(488): n = A,T,C or G
gatggtgccngnnttttgaaacccatcgagatccctaggcagtgtggtggaattcgaccgtgcaggcggccccaacagaggacggggacagctctctccttctgtaagtgaggcagcctcatccttccctggatcctcagcatctcttaaccagcagtggcagaggttgaattagaatggcaccagcttcggataaaaatccagatctcgcttttcaaaatgtgtctagagctggtggctgtaaggaaccagtcaagcctcagctgtgactctaatcctgccaagtccacctgagagccgactcattcatccaaagagagaacggtttggatggagctcaaggtgcctggctcgctggcatagcccagacaacctcttaaaggccgggccacagagctagaaggtctgtcactactcagttggggaaatcgtctgagaagttcaagtccactgcctcgcaactcaaatgagtcagcctcaccaaccaa

SEQ ID NO: 2102 - DNA, 467 bp, Homo sapiens
  misc_feature (1)...(467): n = A,T,C or G
gagccccctaggaccatcngcagcncgcgttcgnaagggcngaggggatctctccttcctgtctccctcgagcccggagcatctctccttcctgtctccaggactacagtattgacgaggaggccgccttccaggctgctctggccctgtctctctctgagaactgaagggaagcgcagccacccgcctgcgtctggggtcagggatgtccccgctcctgtgtcgcacctggcacctgctcgggagcgcacctcaccggactgagctcacaggaggagcctgcacccgcgcagaaggggagccggggccgagcctccgggcctgaatacgggccagccgccgaggccgccagagcaaggccgcctggtcccaccggcgtcgctgggttcttcggtgcttctggccgagcaggcggcctacttgggcagggctggacgctgggacctggagctgccgccgtctcttca

SEQ ID NO: 2103 - DNA, 481 bp, Homo sapiens
  misc_feature (1)...(481): n = A,T,C or G
gaggcncccnnatagagaccatggacanctgctggaattccgttgctgctggatactctgcccatgctgggcaacgtcctgctgctctgcttcttcgtcttcttcatcttcggcatcgtcggcgtccagctgtgggcagggctgcttcggaaccgatgcttcctacctgagaatttcagcctccccctgagcgtggacctggagcgctattaccagacagagaacgaggatgagagccccttcatctgctcccagccacgcgagaacggcatgcggtcctgcagaagcgtgcccacgctgcgcggggacgggggcggtggcccaccttgcggtctggactatgaggcctacaacagctccagcaacaccacctgtgtcaactggaaccagtactacaccaactgctcagcgggggagcacaaccccttcaagggcgccatcaactttgacaacattggctatgcctggatcgccatcttcn

SEQ ID NO: 2104 - DNA, 474 bp, Homo sapiens
  misc_feature (1)...(474): n = A,T,C or G
gcgcccaatgagaccnctcgccagggaccctacggaagngccgnggaannccagagaccctggacctgagggagtcccgggcaggaggcaggagcctgtgctctggacccagctgtgttaccaattccctgtatgacgttggacaggtcccctcctctctgagtcagaagatcaccaaggcctgttccatctggaatgttctcggccttgtaaagtgtttggcctcaacgggctggaattaaactggctttgcaggagagctactgtcttcctacatagccaagtccctgtgcccctcccctgcccatgaaatgtgattctctgcttagtgacaggtgccttgtttaacatagagggagtctaactggaacctgttttccttcttctttctaggtgtttaatgacgaccttaccaagccaatcattgataatattgtgtctgatctcattcagatttataccatggacacagaa

SEQ ID NO: 2105 - DNA, 489 bp, Homo sapiens
  misc_feature (1)...(489): n = A,T,C or G
agggggnnnggggaatgagaccatgcaaagagggcattgcctccgggcgccctgccaggccggggacctccgggacatgatcagcatgtatctccccggcgccgaggtgccggaacccgccgcccccagcagacttcacatgtcccagcactaccagagcggcccggtgcccggcacggccattaacggcacactgcccctctcacacatgtgagggccggacagcgaactggaggggggagaaattttcaaagaaaaacgagggaaatgggaggggtgcaaaagaggagagtaagaaacagcatggagaaaacccggtacgctcaaaaaaaaaaaaaaaaataaaatataaaaaaaaaaaaaaanggggggccctctcgattgaagggggtggtaaaaccccgcgatcctttctgggggggcttttttatgtgcccccccatgtgtgggtgcccccccccggcgtctttttaggtatagagagggcgc

SEQ ID NO: 2106 - DNA, 476 bp, Homo sapiens
  misc_feature (1)...(476): n = A,T,C or G
gccggccattgagncctntcgattgagaccctaggccangncgnggaattcgaaagagacagatggcaccctgagacagcccagaggtgaataggacccccaggctgcagggataaagctcagtggtggtgttacctcaccggggaccagggtcacacagcaaagctggaacaacagaggcgtgttgtgggggagcctcagaggggacaaaacctctgcctgagatcccaccccaggtgggcatgggggccactgaggttggggatgaaaatgccggtaccgtcagtgcacagccctgttccagacagtgctgcctggaagatttctgggctctcctgaggcgccaccccgcacctgagccacctccttggactcctgtcctctaccccttgaggacctccctcccttctaccctagctgtcttcttgaacttgggactctcctttcccaagacttccatcactagctcctggagn

SEQ ID NO: 2107 - DNA, 493 bp, Homo sapiens
  misc_feature (1)...(493): n = A,T,C or G
cccccccccccccccatggagacatagnttagtagaccatagtcagngcggtggaattcgccgctttgattctctaaggagcacgaaagggggaatgcccctcccaggagtttatgggagaagggactgggccggctgcctcccagcgatgcacttgacctgacactccccatgtcctggtgcgcacagcccttgtcggtgccccggcccctcccgcagcgttactgcctgtgtatagtataaatatatatattttctatatataagatgtataatataaggctccacaaatatatctgtgtgtgtgtgtgcgtgtgtgtgcggtgaagggcggtccccatcctgggcctccactctagacccccccaccacctggttaagtctcgagtgaatccagtggccccgtggcaccctcctttatgacatccatccatctgtggtgaaccaagtgaaggtggtgacttctggtgacatagtaataaagtgaagactc

SEQ ID NO: 2108 - DNA, 484 bp, Homo sapiens
  misc_feature (1)...(484): n = A,T,C or G
gacggcccccnattganccatcgagaccctaggccatgtggtggaattcccaaccaaaacccaaaaatcagccaggcacggaggtgcatgcttgcggtcccagctacttggaaggctgaggcacaagaattgcttaaacttgggaggcagaggctgcagtgagccaagattgcgccactgcattccagcctgtgtagtggccgatgcctataatccctgcactttgggaggcagaggtgggaggattgcttgagtccaggagtttgagaccagcatggccaatatggtgagaccctgtctctattaaaaaaaagaaagaaagaaaaatgaataggcaagccacagacagagaaaaaaatatgtgcaatacaaatacaaagagttaatgtccagacctctgttaagatgtgttgagaagtgaggacctgaaatgttctcaacacatagaaacaataaatgcttatggtgatgaatattctgaatn

SEQ ID NO: 2109 - DNA, 491 bp, Homo sapiens
  misc_feature (1)...(491): n = A,T,C or G
cgcccccccccnnggaatgagaccctagcatagtaggcattgccagagtaccctgacctcgccccagttccagcaggccctgggcatgttcagcgcagtcttggcctcggggcagctgggccccctcatgtgccagttcggtctgcctgcagaggctgtggaggccgccaacaagggcgatgtggaagcgtttgccaaagccatgcagaacaacgccaagcccgagcagaaagagggcgacacgaaggacaagaaggacgaagaggaggacatgagcctggactgagccacgcgccgtcctccgaggaactgggcgcttgcagtgcgttgcacaccctcacctcccacccactgattattaataaagtcttttcttttacctgccaaaaaaaaaaaaaaaaaaaaaaaaccgcccgttaaatttaaaagggccggttaaaccccgttaataaccttgaatgggcctttttagtgcccgccctttttgtgtt

SEQ ID NO: 2110 - DNA, 493 bp, Homo sapiens
  misc_feature (1)...(493): n = A,T,C or G
cccccccccccccgcccatggagacataggcatggaggaccactcgacanagcagaatattatagttttgtcatgcaaaattcaatcaaaacactatcataggttgaacatccctaatctgaaaatccaaaatccaaaatgctccaaaatccaaaactttttgagcactgaaatgagatagtgatacctttgcttttctgatggttttgtgtacacaaactatttcatgcacaaaattattgaaaatattatataaaattactttcaggctaggtgtatatgaaacagaaatagattttgtgtttagtctcagctcccatccccaaaatatctcattatgcacatgctaatattccaaaatctaaaaaatatcagccatccaaaacatgtctggtcataagcatattcggtaagtggtactcaccctgtatagtgctttggagaagattttgggatcctgctctaaagaaagtaggatggaagtggtggtcat

SEQ ID NO: 2111 - DNA, 498 bp, Homo sapiens
  misc_feature (1)...(498): n = A,T,C or G
cgccccccccccccggccattgagacccctgnttagtagactataggacagagcggnggaattcattcgggcaaagagtagaatttaagacaaaacggaagctgggaagcttcccttgagggcaggcaggaggtggagttgcagctgttggccggcatcacgttgctcgttgctcggcttatgggaggccgccctggagggcccggaggtcccaaagtccctgggaggactgggcccctcatgcctcgagcttggcaaccgaaaacccgagggaggagaagggacctgccttgtgacatctctgatcaggttggggtgccccagcacccagtactcagttggggtttgggaagcaggactccgtccctgtccccgactgtgccacgtggtaggacacataggacacaggaattcctgggtccttgcccatgactgtgccatgtggcaggacacaggacacaggaattcctggaaagtggtggcttcagaagtgatctt

SEQ ID NO: 2112 - DNA, 484 bp, Homo sapiens
  misc_feature (1)...(484): n = A,T,C or G
ntttgatcgcgatcactagnccagngnggtggaattcacccttcgcacaacgtgttctgttctcctgtgagcatctcctctgccctggccatggttctcctaggggcaaagggaaacaccgcaaccgagatggcccaggcactgtctttaaacacagaggaagacattcatcgggctttccagtcgcttctcactgaagtgaacaaggctggcacacagtacctgctgagaacggtcaacaggctctttggagagaaaacttgtcagttcctctcaacgtttaaggaatcctgtcttcaattctaccatgctgagctgaaggagctttcctttatcagagctgcagaagagtgcaggaaacacatcaacacctgggtctcaaaaaagaccgaaggtaaaattgaagagttgttgccgggtagctcaattgatgcagaaaccaggctggttcttgtcaatgccatctacttcaaaggagagtgga

SEQ ID NO: 2113 - DNA, 484 bp, Homo sapiens
  misc_feature (1)...(484): n = A,T,C or G
ggggncnccccggcatgagacatagcatgagggcatttccttataggtcatattgaaatcttcaaggtgaccatgccccaccggggtgctggggcagtagtcatggcagactcccggcctgggcccccaggattctaggacccccaggcagccccttggactggtcccgggtgccttccaagcacagtctccatgctcccagattctcgaccttcccccggcccgggaggtgcagcctgcgtctgcctctgtcgtgtgtgctgatttgagtggcttagcttgccacagcgcaacctcttctgtccctttcagtcatttgctgtacttccctgtggcacgttaccatggaagccgctccagggtgggtcagggtgcaagctgctggtgaggtttggaagcatcaggctcacgggtgttcatgtgtgttcgtgcgtgtgtgtgcgtacgtgtatataactgaagtgtctgtacggaatgccctttg

SEQ ID NO: 2114 - DNA, 496 bp, Homo sapiens
  misc_feature (1)...(496): n = A,T,C or G
ccccccccccccccgcccatgagaccntcgaatagtagacattagacagngcaggggaattcctgggttctcagggagctgttctgaagagagggcacctgcagggccatctccccttgaggctgcctgtgcctggggagtaggggtaggaggcgtccattgcaggcctgggctctgtctcctgtgccctccaggcttcagtcatggggatgcaagtgggcactcttgcatcaatcatggggatgcatgggcacgggcctcagtgggctcccttctggcaactgccccactttctagccttctgctgccccccactttcagataggctggctctatgcgtcggggtcccttaagaaagactgggccccctgggccttgtgccctgatatctgaccctgggcttctgacttcacggccagggtcagaatcaatgggatcacggttgggcttgagtgcacccctgggatacagctggggcctgctttgccagctctgn

SEQ ID NO: 2115 - DNA, 457 bp, Homo sapiens
  misc_feature (1)...(457): n = A,T,C or G
actcgaganacctgatgacgtaggaagngcgnggaattcaaagcttcccggaagggagacgaatagaaaggagaggagcagctcgtgatcatccctggtagcgagtacgcggcgaagtatgcggcggcggagggagcgctgatgaaaatggatgtgtcagtgagggccgcgggctgctccgacgacctcagctctggggaggccgacgtagacccaaagctcctggagctcaccgctgacgaggagaagtgccgcagcatccgcaggcagtaccggcagctcatgtactgcgtgcggcagaaccgggaggacatcgtgagctcggcgaacaactccttatccgaggctctggaggaagccaacgtcctctttgatggcgtgagccgaaccagagaagcagccctcgacgcccggtttcttgttatggcttctgatttgggtaaagaaaaggcaaagn

SEQ ID NO: 2116 - DNA, 486 bp, Homo sapiens
  misc_feature (1)...(486): n = A,T,C or G
agcgatnnnnnnagattgattccctatcnagngcgatggagttacactgagtaaacacgaatttggccttctaccgaggactcacgccctctgtaataagtaccagatgctgcgcttggttgtcccatctttgggaaaatgagatattcacggctgtcagtcccagtgtgagatgggctcagatgccttcgcctgttgagtctttgggtgtgcttttaatggtctctctgcctcttccttaggtgtcaggctgctctacctgtttctagacgctcttcctttcccccttccaaacctcttttcttccttgctgctttcctatcttctgtggctaggagatcaggtaatcaagcctgtgttttctgtaatgagtaagtgggttgccagcgaggtctctgtggatgctcctgtgagtcaagtgcatgagctttagtgcatggactttggggtcttggttcccacagcttatatgttttgggggctgct

SEQ ID NO: 2117 - DNA, 486 bp, Homo sapiens
  misc_feature (1)...(486): n = A,T,C or G
ccccccccccccgccatgacccctggnatgaggccatcgcgcgnncggcggancagactcagggtgatggcaggagagctggctgacaaaaaggaccgtgatgcatcaccttccaaggaggaaaggaagcgatcacggactgctgacagagagcgggatacagaccgggaccggaagtcttccccatctaaagatagaaagcggcatcgttcaagggatagacgtcgaggaggcagccgttctcgctctcgttcccgttccaaatctgcagaaagagaacgacggcacaaagaacgagaacgagataaggagcgggatcggaataagaaggaccgagatcgagacaaggatgggcacagacgggacaaggaccgtaaacgatccagcttatctcctggtcgaggaaaagactttaaatctcggaaggacagagactctaagaaggatgaagaggatgaacatggtgataagaagcctaaagcccaa

SEQ ID NO: 2118 - DNA, 430 bp, Homo sapiens
  misc_feature (1)...(430): n = A,T,C or G
naagaatacctcacaccagcnggnggaatacataaaaagtaaaggtgaaatttacacatatgccttgcccacattgaatttctttaaagaaattggtgcctgtccacagcattgtgtcctgctcttctgaagtctcaatggtttaaatttaaaaaaaggaaagagaaaaaaaaaaaaaaaggaaaggggaaaaaataaagcaaaactaaaaagaagcggggaaacccaaacaaaagcttcacattgccggatccagttgtcgggagatcgccaaccggccaggccaccacctgaaccctttgccgtcctttgaaggaaacttggtgaaactgtgggtcccgaggaatcgacctagttaaaaatcacccaaaatgctaacccctgaatttaaagcagcacatgtgacctggtccattctggttcaagttag

SEQ ID NO: 2119 - DNA, 485 bp, Homo sapiens
  misc_feature (1)...(485): n = A,T,C or G
tggtgtgcccccngttannaannccaaagnngaccttgacngngctnngaannaacnacnnnggtgngngngcatgagttcaacaggacatgtgtgtttgtgtgtgagggggcgggtctctgtctttttggtagggaggtttgcgggactctctgcttggccctctcagggagctatgattcggggccagcctgacatgccatctctcttcatcccagctgccaccaggcaggtcccctgaatggctgcggccccttccgcaggctcctccccagccctgaacctgggctaccaggacacacctggcgaaggaggcatttgccggaccaggggcaaagcaggagggaaggtgggcagccttgggcctcaagccttggctgcagcctcggatacgccctgggctgtgagctcagccagcacgttgtctaggtagctagcgtccgggtagccgcggcccgtgaggttggatccaaactcggtcttgg

SEQ ID NO: 2120 - DNA, 494 bp, Homo sapiens
  misc_feature (1)...(494): n = A,T,C or G
nggctctannncctggattgccttgccanggcgggaaatgaactccttcagacctcctgccggcaagtatctcccaactgggggctgccttcaatcctcagaccaggaacacccatgacacacgcacagccctgcactgtgggcgtgccccttggcatggggccaggagatcactgggttatcccgggtagtgatgccctcacctctccccacaagttgtttacccaatggctggaaaggggtggctactggtcatcgtgaccactggagtcaacacagactgatgtacccacagacaccaaaacttgccccctgagttctgaagcaaggggcaaggctgtgcccctagcttgtgctgcccattcctccacgtgttgatcttgattccacttacagaagctgatgctgagcctccctcccctgtcaagccagttgtttcctcttcaggtggctggtatggcccagccccttaccatccgcaatgagtgcttgag

SEQ ID NO: 2121 - DNA, 487 bp, Homo sapiens
  misc_feature (1)...(487): n = A,T,C or G
tggtgtgccaaagggtgnnaaccctaaaaccanttcagnnngctnngcanaaccannnannntnggantgggngnccgagctgtgncnnagatacgaggcgcggtcgttttatccgcctgtcaaccgccttcaagacttcgacgcgctggtcagcgtgggaaagcaactagaagccatttgtgtcaaggtaacgtctggagaaacaaaaggtcaggaatgaccaacgtccctactggccacagtccagccccaatctgcaagacagagccagccgccccgggggaattcccgcctggtgggactccacgtcaccagcccccagctgctcagggtacagcccctcgtgagaactgagccacagtcatgtttcctacatcagcctcctgctcaggggtttgtacagagaccactgccagccctctaggtggtccctgcaaagagagtcccagcccccaaggctccaaatggacagggcaccatgttgat

SEQ ID NO: 2122 - DNA, 497 bp, Homo sapiens
  misc_feature (1)...(497): n = A,T,C or G
ggggttttnnnncctggattnccntttcgagtgtgctggatttgtaagccgttagcacaacgcgtgcacccattgtgccatttacttatgagaccactttgtctatctgcagtttctacattagcataattcctggctcatgagaattgcttaatattttttgaacgaatgaatgagggtaagctcctaaatctgtgagccaaagactgcagacagcggggagggaggcatgttgggtccagggtgttggcaacctgggttgctataggcgtttttatttcctcctgctccccataggctcctggtggaggatgggactgccgaagccgtggtgacctgtatgaatcaccatgtggcagcagcactagggctgtgtcctagagagtgggcctccctcctagatttcgtccaagtgccaggcagagtggtcttgcagtttgcagggcctggagcccaacttgagtcttcagccagggttgacgagcccatgaccatgn

SEQ ID NO: 2123 - DNA, 498 bp, Homo sapiens
  misc_feature (1)...(498): n = A,T,C or G
nattgaganccntnngcannnncttttgagaccctagtccangncgnggaantcgngagcatttgcaggaccagggatgctgtgctgctctctcatgagccagtcaccgagtctgtctgctgcagccctttctgaacctctggccgtctggatgctccactgtgcttgccaagatgaagtgcgtcttggtggccactgagggcgcagaggtcctcttctactggacagatcaggagtttgaagagagtctccggctgaagttcgggcagtcagagaatgaggaagaagagctccctgccctggaggaccagctcagcaccctcctagccccggtcatcatctcctccatgacgatgctggagaagctctcggacacctacacctgcttctccacggaaaatggcaacttcctgtatgtccttcacctggctgcggcccccagacctggcgcagcgtgtccagctgtgggagcacttccagagcctgctgtggacctan

SEQ ID NO: 2124 - DNA, 490 bp, Homo sapiens
  misc_feature (1)...(490): n = A,T,C or G
nttcgagaccctagtccagnggcttgaattccgatgagtgagctctcggtcacaggaggtgagcaggcaggagctggataccccagcgcagtcatgcattggggtatgaggcattcccatgatgcgtgcacacgcgcttgggggttggcttcctgatggggagccacttcatctagagactcggccaccaggaaggatgctgcttcggatgggagcccagctccttcgcttctccagaataggggtttggggcttgctagtcctgagattctgagattcccagaatctggtccccacttatgagactcttaagttggggcgtctgggatcccaggaagtgctggccctttgattctgaaagtgggtgattctttgatttcagcatctcagtctgaagcttctgggacttgagactgtggttctgggcccattgagcaggctctatgggccttgggctctcagccctcctgcttcttctgtaggccgtgtg

SEQ ID NO: 2125 - DNA, 483 bp, Homo sapiens
  misc_feature (1)...(483): n = A,T,C or G
ggggatcnaggggnnnnnngaactgagaacaattgacagncttgcggaannccacaggatgtgagttggtttgatgaccctaaaaacaccactggagcattgactaccttgctcgccattgatgctgctcaagttaaaggggctataggttccaggcttgctgtaattacccagaatatagcaaatcttgggacaggaataattatatccttcatctatggttggcaactaacactgttactcttagcaattgtacccatcattgcaatagcaggagttgttgaaatgaaaatgttgtctggacaagcactgaaagataagaaagaactagaaggtactgggaagatcgctactgaagcaatagaaaacttccgaaccgttgtttctttgactcaggagcagaagtttgaacatatgtatgctcagagtttgcaggtaccatacagaaactctttgaggaaagcacacatctttggaattaca

SEQ ID NO: 2126 - DNA, 495 bp, Homo sapiens
  misc_feature (1)...(495): n = A,T,C or G
nggcggtnnnnnnggactgagtcccctngcanngngtactgagaccctaggccagtngcgnggaattccaacgactcgctgccgcccacgctgaccccggccgtgcccccctacgtgaagcttggcctcaccgtcgtctacaccgtgttctacgcgctgctcttcgtgttcatctacgtgcagctctggctggtgctgcgttaccgccacaagcggctcagctaccagagcgtcttcctctttctctgcctcttctgggcctccctgcggaccgtcctcttctccttctacttcaaagacttcgtggcggccaattcgctcagccccttcgtcttctggctgctctactgcttccctgtgtgcctgcagtttttcaccctcacgctgatgaacttgtacttcacgcacgtgattttcaaagccaagtcaaaatattctccagaattactcaaataccggttgcccctctacctggcctccctcttcatcagcctt

SEQ ID NO: 2127 - DNA, 500 bp, Homo sapiens
  misc_feature (1)...(500): n = A,T,C or G
aggtgctnnnnccttgattgcatttgcagggcngnncctgatctccntcctccangncgnggaattcatcagaattctggattcctgactctccgttcagctgctattcagctatcaccaagctgctgagtttgtcctactttctcctgggtcacattctgctgttgttgggaaacagggagtgagtgaagggaacctgggaacccttctcccctcaccttttaaggatgttctggggtggaataaagagaggtggagggtggggtgcctgggcccagcctccctggctcctggtccttctttcttcagcagggagttctggcaaggcctgggcctggggagggggcctgggtgcagttttctcctgcggtgtggttggctcttttgtcttccaggatgggcctgtggggtctgtgtggggaaggaaggagctgggagcctgggctgcctgtgtgtcggctggatgctgccagcaccggcatggaccaagcaacttctct

SEQ ID NO: 2128 - DNA, 486 bp, Homo sapiens
  misc_feature (1)...(486): n = A,T,C or G
tgggtataaggggnannnggtttgagcccaactgagttcctcggaagngcggnggaattccctgggacgagatgaatgtcctggcgcacggactcctgcagctcggtcaggggctgttcgaacacgcggagcgcacccgcagtcagctgagcgcgctggagcggcgcctgagcgcgtgcgggtccgcctgtcagggaaccgaggggtccaccgacctcccgttagcccctgagagccgggtggaccctgaggtccttcacagcctgcagacacaactcaaggctcagaacagcaggatccagcaactcttccacaaggtggcccagcagcagcggcacctggagaagcagcacctgcgaattcagcatctgcaaagccagtttggcctcctggaccacaagcacctagaccatgaggtggccaagcctgcccgaagaaagaggctgcccgagatggcccagccagttgacccggctcacaatgtcg

SEQ ID NO: 2129 - DNA, 486 bp, Homo sapiens
  misc_feature (1)...(486): n = A,T,C or G
gaagcncaagggggnnnnggaactgagacccactgatagtcctgcggaannncncnntctcctccccactacacatccccttctccagtcctaggaccacaagaaactttctctggtacaaaaaggtcagaaaacgattactgaggtaacagcgtcgcttcaagtctaaggaccgagattctggggcctctgggctcctttactccagattctagacccggctttcgcgctaccaggccttggataagacactaggccctgtgcctggacactgcacctccccaggcctcagtttccacaccagatctctacagagtgggcgtgagggcaggccgattctcccgttaagagctcttacaagccggctgacttcgtccaggagcctggggtcctggcctcctgagctccccacgatgagatggtgctgtgctggctctgcagtttctctctcttcagtcccattttccggaagtgtgatatgcgtcn

SEQ ID NO: 2130 - DNA, 471 bp, Homo sapiens
  misc_feature (1)...(471): n = A,T,C or G
nttcgagatccatattccatgcggtggaattctaacgggatgggtggtgctggacctcgggcggggccgggcctcgtggcgggaggaggcagggcagggcctctgggacggggctggacggcttgttgacggaaacgagcccttgacgctgtggcccggaagtggagcggctgtcgcagtgcggctccggcagtggcagcggaggcctgtgtttgcggccttcggcaagcgactgagatggcgagcgcaactgcacctgcagccgcagtccccaccctggcttcgcctttggagcagctccggcacttggcggaggagctgcggttgctcctgcctcgagtgcgggtcggcgaagcccaggagaccaccgaggagtttaatcgagagatgttctggagaagactcaatgaggcagctgtgactgtgtcaagggaagccacgactctgaccatagtcttctctcagcttcca

SEQ ID NO: 2131 - DNA, 478 bp, Homo sapiens
  misc_feature (1)...(478): n = A,T,C or G
ctttagagtcccctttccagagaggaggaattttagagtctcactggccaccaccgngcggcccgtctttctgatcagcatccctgcagtgcataaagtattcaacagaatcactgatgcctctgccctgcgacttgtcgataaggcccaggtgttggtgtgccgagccctctctaacatcttgctgcttccgtggccaaaccttccagagaataagcagcagtggcccgtgcgctccatcaaccacgccagcctcatctctgcactctcccgggactatcgcaacctgaagcccagtgctgttgccccacagagaaagatgccactggatgacaccaaactgattatccaccagactctcagcgtcttataatatattgtggagaatatctcggtggagtccaccaagcctcgacagatttgctaccagtcgctgcaggaatctgttcaagtctgcctggccctctttgcagctttt

SEQ ID NO: 2132 - DNA, 497 bp, Homo sapiens
  misc_feature (1)...(497): n = A,T,C or G
nattgagacccctnggnannnncnatggagaccatactccangncgcggaattcatctgagaacacgttgccaggggcttgagaaggttactgagtgagttattgggagtcttaataaaataaactagatattaggtccattcattaattagttccagtttctccttgaaatgagtaaaaactagaaggcttctctccacagtgttgtgccccttcactcatttttttttgaggagaagggggtctctgttaacatctagcctaaagtatacaactgcctggggggcagggttaggaatctcttcactaccctgattcttgattcctggctctaccctgtctgtcccttttctttgaccagatctttctcttccctgaacgttttcttctttccctggacaggcagcctcctttgtgtgtattcagaggcagtgatgacttgctgtccaggcagctccctcctgcacacagaatgctcagggtcactgaaccactgg

SEQ ID NO: 2133 - DNA, 479 bp, Homo sapiens
  misc_feature (1)...(479): n = A,T,C or G
gggggatcgagacctntnnnannatcgtagaccctagtcagtgtggtggaattccgcgagaaatggtcttggagctcctgttcgacttgtagctcctgccccagtcatcattagttcctcagctgcacaagcagctgttgcagcagccgcagcttcagcaaatggagcagctggtggtcttgctggaacaacaaatggaccatttcgccctttaggaacacagcagcctcagccccagccccagcagcagcccaataacaacctggcatccagttctttctacggcaacaactctctgaacagcaattcacagagcagctccctcttctcccagggctctgcccagcctgccaacacatccttgggattcggaagtagcagttctctcggcgccaccctgggatccgcccttggagggtttggaacagcagttgcaaactccaacactggcagtggctcccgccgtgactccctgactg

SEQ ID NO: 2134 - DNA, 409 bp, Homo sapiens
actaagtggcttttttattagagaaagccagaattacaaaagacttaagagttggcattggggcccttcttcttgccaaaggtgggcacaacgttgacaaagcgccggttgtactgcatccgccgcttagcccgacctgtcttcttcttcttcttctcctgtttggccaccttaggagtctgacctctcacttttccagcacgggccagggaaccatggactttacctccaagcatgcggccttacgcttgtgggggtctgcgggctgggaactctcgtcctcggtccccagggcgcagctgttggggctgcgggggagtggagcccccgtgcccctgcttttcctcagatccgttctttctctgtgttgtcctcctccttcccttcccagtctcccttttctctctcc

SEQ ID NO: 2135 - DNA, 481 bp, Homo sapiens
  misc_feature (1)...(481): n = A,T,C or G
gggggaaaatcgaaatcgagaacctagcccaagtggtggaattcgtcactgcagagaggaatgtcaagcaggccagcctacaggtggaccggctaccgcagcagatccgcaaggccccaacagaaggccacacccgcctggagctctacagccagttatttgtgggtggtgctgggggccagcagggcttcctgggctgcatccgctccttgaggatgaatggggtgacacttgacctggaggaaagagcaaaggtcacatctgggttcatatccggatgctcgggccattgcaccagctatggaacaaactgtgaaaatggaggcaaatgcctagagagataccacggttactcctgcgattgctctaatactgcatatgatggaacattntgcaacaaagatgttggtgcattttttgaagaagggatgtggctacgatataactttcaggcaccagcaacaaatgccagagactccag

SEQ ID NO: 2136 - DNA, 473 bp, Homo sapiens
  misc_feature (1)...(473): n = A,T,C or G
atggagtcgataatgagnaccctaggcagnngcgnggaattcgttcatcaggtgctctaccgggcgctggtctccaccaagtggctggcggagtccatcaggactggcaagctggggcccggcctgcgggtgctggacgcgtcctggtactcaccaggcacccgagaggcccgcaaggagtacctcgagcgccacgtacccggcgcctctttctttgacatagaagagtgccgggacacggcgtcgccctacgagatgatgctgcccagcgaggctggcttcgccgagtatgtgggccgcctgggcatcagcaaccacacgcacgtggtggtgtatgatggtgaacacctgggcagcttctatgctccccgggtctggtggatgttccgtgtgtttggccaccgcaccgtatcagtgctcaatggtggcttccggaactggctgaaggagggccacccggtgacatccgagcc

SEQ ID NO: 2137 - DNA, 472 bp, Homo sapiens
  misc_feature (1)...(472): n = A,T,C or G
gagggcccaaactgataccctattgatggcggtaatcgagcttaaaatctttttatacagactgggtctcgcttgctctgtcacccaggcgggagtgcagtgacacgatcgggacccactgtagcctcaaactcctgcccttaagcaatccaactgcttcagcctcccgagtagctgagactgcaggtgaggaccgccatgtctagctttttgtttttttttaaacatatggggtctctctgtgttgcccagcctgctctggaactcctagcttcaattgaccctctgcctcggcctcccaaggtgttgggattgcagatgtgagccactgtgcccaacctgtttttcttggtgttttatataaatggaattgtatcgcacgtaatctttatggaagtgggggctgttcattgagcataattatgttggaattcatctatatattgataaatattntaagtgctttttattg

SEQ ID NO: 2138 - DNA, 485 bp, Homo sapiens
  misc_feature (1)...(485): n = A,T,C or G
agcnagagcgagtcccncccaatgagaccctgagaacntncgcggnnnccgctcggnggagaggcagaggctgacccagctccagctgccttaggaggagtcacagcatacactggaacaggagctgaggcagctgcagaggctgacccagggaccccacccccctttgggggtcaggaacactacactgcacaggaagccttcacactggaagggggacctgcgcccccacatctgaaacctgtaggtccccccagctcacctgccctactggggcccaacactgtacccagctggttgggaggaccagagcctgtctcaaggaattgcctgctggggtgatgcaaggaggaggggaggtgcagggaagaggggccggcctcagctgtcaccagcacttttgaccaagtcctgctactgcggcccctgccctaaggcttagagcatggacctcctgccctggnggtcatctggagccagggctt

SEQ ID NO: 2139 - DNA, 488 bp, Homo sapiens
  misc_feature (1)...(488): n = A,T,C or G
ggggagagccggntgccccncctctgagnactaggatcntncgccgnngcgcggaannccccggctggactcggaggctcatgcctgtaatcccagcactttgggaggccttggtgggtggatcacttgaggtcaggagtttgagaccagcctggacaacatggcggaaccccatctctactaaaaatacaaaaaattggccggtcatggtggtggatgcctgtaatcgcagctactcgggagagggcgctggagaatcacttgaactcatggtgcgcaggttgcagggagccaggatggcaccattgtgctccagcctgggcaacaagagcaaaactccatctcaaaaaaaataaagaacctgcgagtgagttcccacacgttttcctaatgggctgctgctttcctaggagtctctcgctcatagaaaaggcacagactgaaagaggaagcacatcccattgctgtggaagtcccattgttaggac

SEQ ID NO: 2140 - DNA, 482 bp, Homo sapiens
  misc_feature (1)...(482): n = A,T,C or G
gannnnncnnnaagaggccnnnatagaaaccaactggagactctaggccagngcggtggaattccccggctcgagcggcccatgaatcgggtaaacctgggatatttgcaagacgagatgaacgaccaccagaacaccctctcctacgtcctcatcaaccctccgcccgacacgaggctggagcccagtgacattgtctatctcatccgctccgaccccctggctcacgtggccagcagctcccagagccggaagagcagctgcagccacaagctgtcgtcctgcaaccccgagactcgcgacgagacacagctctgagccagccctgcacggagctcaggccaccaagcccggggtcctcaggaaggacgtggaggagcgtgtgaggacacggtggcactagcgtgaccctggggatggcacactctactcaccatggctcctgggactccaccctggaaaggagcccctcatgcggaggg

SEQ ID NO: 2141 - DNA, 457 bp, Homo sapiens
  misc_feature (1)...(457): n = A,T,C or G
aggcgggggnnnggggnnnaattgaganccntatgnattgaggtgcatttcgatgggcaaactgaggcctggaaacagagaacggtgggaccaaggtcacatgatggcggaaggaggacaaggaaggaggctgactgcgtatccagcacgtgttccgtgccaagcctgtgcaggggccaaggaccggggtctctggacagcgccggttgctgggtcccacgctgggcgacagggcctttgcaatcaggccgacagggtttgaacccttgccgcggcactttccagatggccttggccactgttccctctctgaccttcagatggagcccatggcacctccggagggggtgtgtgcttccaggaccaaatccacttgtgcgtggttaggcacgaggtggggggaggcggctcagccaccgggacctgtcctgcctccaccctctgtgcaacccctttn

SEQ ID NO: 2142 - DNA, 487 bp, Homo sapiens
  misc_feature (1)...(487): n = A,T,C or G
ngagggcggncttcgagaccatagagcagcctgnggaattcgttagagctgctcaactgacggctgaatgtgccatcgtcaccctggtgtaccttgaaagacttttaacatacgcagagatagatatctgtccggccaactggaagcggattgttttaggggcgatcctgctggcctccaaggtgtgggatgaccaggctgtatggaatgtggattactgccagatcctgaaagacatcacggtggaggacatgaacgagctagagcgacagtttcttgaattgctgcagttcaacatcaatgttccttccagtgtctatgccaagtattattttgatcttcgttctctggcagaagcgaacaacctgagctttcccttggagcccctgagcagggagagggctcacaagcttgaggccatctctcgcctctgcgaggacaagtacaaggacctaagaagatccgcgaggaagcgctcagccagtgn

SEQ ID NO: 2143 - DNA, 468 bp, Homo sapiens
  misc_feature (1)...(468): n = A,T,C or G
cattgagncccataggtagctngcacnnncnccnnnnnnnnanaccatggtcctgaaaatgcacaaaagcctacagttcaacaatgtatcatctctattaaatggcacacaaagatctggatgtagttcttttgaactagtaccataacatcttggaactacttctagataaaataattgcacgccatgggttaccctgatatggagtataagaagaaaagtagtctactctaagctcatgttatcacatattagtaaaagtggcttcaatggatagttgaatctgctatttacttctaaaacccttttgagagttaaataaggaccccaatagacattttaactgttatttatagatcaaaaaaaccacgtaaacactgaaaacttgcatttatcctgagcagaactgcttttacagaatccacaaatcctatgaaaacatggttacatttgttcacaatatgtgga

SEQ ID NO: 2144 - DNA, 479 bp, Homo sapiens
  misc_feature (1)...(479): n = A,T,C or G
nagcgcctttgagtcatatccatgtggtggaattccatatttctacttaatgtcacatagacagacgagacagtgaggtatgtgaggctgctccggaatggtccggaggctgaagcgaagtgtggggctggccgtctagcaggtggcgcttgggcgggttctcgatgcagctttcaagagtgcgtattcggtccacggctacagggaggctcacgaagtgtcctctcgtggcgctggcatctcttcccaccacgtcactgcacgacacaacacttgtgcacatgggcatgaggtttacctgccccgggcatgattcggaaggccaggaacacgggcttgtggtctcccatgcagacgttgggcccaatgtggtcataggtgacaaccttctcctcgctctccgaccgcagcaccagctccttggcagacggngacatgaggatgcggtcacaccaggctgggcaccgggtgttcatgta

SEQ ID NO: 2145 - DNA, 487 bp, Homo sapiens
  misc_feature (1)...(487): n = A,T,C or G
ngagggggnnnnnaatcgagaccttagtccatgtggtggaattccctcactttgttctatctgagcagcttcctcggcagtcatgggactgattgagaccacgcgagggctcctcccgggggcaggtaatcgcaactacagcacccgcccaattccaccccatccagggtccttcgctgctttccttttttgccctctgttctgggctctgccctcccacctgaaccctgctcctctgagaagtcttggctgagtcccaggctgagccttctctgggttcccacttcccatgctgattcccaccctgctccctccatcctggtaggagggactcagaggctgccccgttgtctgggggtggccctggcgaaggagctcatcttcacgggccgacgactgagtggaactgaggcccacgtactggggctggtgaatcacgctgtggcccagaacgaggagggggacgccgcctaccagcgggcacgag

SEQ ID NO: 2146 - DNA, 367 bp, Homo sapiens
  misc_feature (1)...(367): n = A,T,C or G
aggccggnnttcgagnccatatgagtccatagtcagtgtggtggaattcctgctgtgggaaaggtggggaagaaggtgatctccctcccgggcccacccagctgcccagcctttgcccactcggggagcagatcatgcatgccaatccctgttgccgcatggagctcctcagcccactgacctctccgtgcctggtgcaggccaggcccccgtcttccgcctgcctctgcttccccgtcatgcatggtggtggtgtttctacggtgtctggttctgtgcccgtctctgagacagtctctgtgtggaatttgccttaaactgaagtaaatttggttcttttagtaaagcaaaaaaaaaaaaaaaaaaa

SEQ ID NO: 2147 - DNA, 464 bp, Homo sapiens
  misc_feature (1)...(464): n = A,T,C or G
cgccggggnnnnnnccttgagtcctatcagtgnggggaattccctaaaggcctgggtgccgtgctgacagtggtgggaaaagccttgttcccaagagacttggaaataactagatgcatttgagaagggttgatcttgggtgcgtgaggacccctgtggcagccagagggggttcagcagaacaagggcccttgacacagcaggggtgaaccacacagagcagcggaggccacagggagacggaagggcctctgtgccacagaatggacttgaggcctgagctgccatcagggccaggccctccccagccccaaggcaggctctggagaaccagggaaggcgtgggctcaccgtctggcccttcccaaagccctaggaagccacgtaggtgtgcccaggggcacccagagagcccggagcagcctggagaatgagccaccagaggccaacttggtcaagagctg

SEQ ID NO: 2148 - DNA, 243 bp, Homo sapiens
  misc_feature (1)...(243): n = A,T,C or G
ccangnataatgactgggctgatgatgatgatgacagcaatgagagcaagagtatagtatggtacccaccttgggctcggattgggactgaagctggaaccatagctatggccagggcaagggccagggctacccgggcacgtcgggctgtccagaaacgggcttcccccaattcagatgataccgttttgtcccctcaagagctacaaaaggttctttgcttggttgagatgtctgaaaagc

SEQ ID NO: 2149 - DNA, 464 bp, Homo sapiens
  misc_feature (1)...(464): n = A,T,C or G
nttgagttcgagaccactatccgtgtggtggaattcctggtctctgttctcatgttctgacccccagaaggcctctaaatcactcaacttggagactcgccagttttttctaatcagctgcctgaaagcggttcagagttctgtcaacaagcccttgcacgctgggcttattaatgctgggccactcagagccatgactcaggaacatggcttggggtcaacactgaaaagcagaaatcacagtactgataatgggaattttgtaggaggaaacaggcttttggaacttaatgcctttgttaggtttctggatttgcagatctcattgtgtgggcctgctttaggaggaaaagctgggattcataacaatctaataaacctgacccaaaccacctgcccgttgtctttgctgattgtgcgcatgtgaacccatccacggacatccatgcacaggcccaccgagt

SEQ ID NO: 2150 - DNA, 462 bp, Homo sapiens
  misc_feature (1)...(462): n = A,T,C or G
catcgaccccccnattgagnacactaggccangnggnggaattcggcggagtaaggcgtgccgctgcaaactggcctctgggccgggggcgagcagcccccgggaggccgagtgcatctgttggaccgtgcgaggagaagaaaaaaaatatcggccagaggagaggaactaaccgaacattcttcctccctaccttatagaggggagtggtcatctacactaaagcaaagtgttaggcgcgtccgtgcgaagagaccaccaaacaggctttgtgttccttatcacaggaagaaaattttccttgacctttaggtgcttttatattcatctcaaaaacaaaattctgaactcaggacttggcaaagttttgctcttgtcgcccaggctgaagtgcaatggcgcaatctcagctcactgcagcctccgcctcccgggttcaagcgattctcctgcctcagcctt

SEQ ID NO: 2151 - DNA, 500 bp, Homo sapiens
  misc_feature (1)...(500): n = A,T,C or G
tgggggtnnnnnnaattgattccctattcagtgtgcnggaattccttttaagatgctgattatcatgcttctgccttgctgggcacacccacactggttgtaatactcaccatctcttcccattttcacatctggactcttcttctcatgcccctcaacccttaatccctccctttctttgtactcttgcttctcttctgtccaatctttgtgtccatctcccaaggccatctcccatggtatattccccacctccccacacctgccctctccatccgccatgctccctgcttctctccagtctctcttgtgcccagatagaccagccagagtttgatgttcccctcaagcaagatcaagaacagaagatctatgcccaggtaagatggcacatggacaaaggccctgccctctgaggccaggagaaaagcagggacctctggcacctgtgactgacatttccttcctccagatctttncggaatacctgacttacctga

SEQ ID NO: 2152 - DNA, 469 bp, Homo sapiens
  misc_feature (1)...(469): n = A,T,C or G
nttcgaagacccctagtccagngtgcgggaattcaataataggagtgcgcccttcagcagcatgtatacaaaaattgcaacgatacagagattagcatggcccctgcacaaggatgactcgcaaattcataaagctttccataaatatatttattaaaaaccaataggaggagcacttcgagtcgagcgtaagggcccttcacaaaagcagaaggaacactggcccaaagccccaccaccccggaagcataggtgagatgggagcagcttgtgagccccccattggcgccgccctactggggaagccggtccgtacgtaagccttgcatctcgccacctccacttctgtgctcaagaacaagtcctaggtcaagggaaacagcacagcctgtttataattaagaaacacttaaaacagcctggcatttgggaacagacatgttaacgtgagcaaattcctctgatgaaa

SEQ ID NO: 2153 - DNA, 428 bp, Homo sapiens
  misc_feature (1)...(428): n = A,T,C or G
attgactactctncgccagcgcggnggaattcggagggaacacggggaaaagcatttttggtggatggtatgaagccagccatggaaactgcagccgaggaaaatactgaacaaagccaaaagagaaaaggctgctttgaatgctgcatcaagagtctgggaggagtcccctacacctccctggtggccaccatcctctgcttctccggggtggccttaatctgcggctgtgggcatgtggctctcgcacgcaccgagcctattcttgagcaacacttctccaccaacgccagtgaccatgccttgctgagcgaggagatacaactgatgcagtatgtcatctatggaattgcgacctttctcttcttgcatgggatcattctgctggcagaaggcttttacaccacaagtgcagtgaaagaactgct

SEQ ID NO: 2154 - DNA, 440 bp, Homo sapiens
  misc_feature (1)...(440): n = A,T,C or G
ntcgtagaccctagtccgtgtggtggaattcacgcctacgtcacagagatcttcgggggcctggctggctttctgctgctctggagcgccgtcctcatcatgtaccccaccagccttgctgtcatctccatgaccttctccaactacgtgctgcagcccgtgttccccaactgcatcccccccaccacagcctcccgggtgctgtccatggcctgcctgatgctcctgacatgggtgaacagctccagtgtgcgctgggccacgcgcatccaggacatgttcacaggcgggaagctgctggccttgtccctcatcatcggcgtgggccttctccagatcttccaaggacacttcgaggagctgaggcccagcaatgcctttgctttctggatgacgccctccgtgggacacctggccctggccttcctccagggctcctt

SEQ ID NO: 2155 - DNA, 544 bp, Homo sapiens
  misc_feature (1)...(544): n = A,T,C or G
acagctccatgaccatctacccgagttcactcgttcaggcctctctttatagactcattcatccccaggaggacggagcnnnnncnncttttgagaccctttgagagcgtggaanncggcggnggcncccggggcgggggagcgggctcatccgagcccgcgggccaacgcggattcaggcccgactggcgggaccgccccggaanccgcgcgggccttcctagccgccatggaggacggcgtctatgaacccccagacctgactccggaggagcggatggagctggagaacatccggcggcggaagcaggagctgctggtggagattcagcgcctgcgggaggagctcagtgaagccatgagcgaggtggaggggctggaggccaatgagggcagtaagaccttgcaacggaaccggaagatggcaatgggcaagaagaaagtcaacatggaccccaagaaggggatccaggtcttgggggagaatgaactgctggcaaacacacccgaggagatcgcccgcttcctgtacaagggcgagggg

SEQ ID NO: 2156 - DNA, 460 bp, Homo sapiens
  misc_feature (1)...(460): n = A,T,C or G
atttgagacactggagacgctcagggangcganggaattccttggaacctcgctgaatggcagcctcttgggggcctggagctctggctgcccagccgtgtgtggtgtcaggttcctctccccaccccagcttcaagcagaggcctcggggtgggggagctacaaagcacaacaatgtacatagtgtagaaacactaacagctgggagaggggagccagctgtccagccagcatgttcctgttgtacagcccggtctccctgcgcgctctgctccttcccatgtgcagacagatcagggaggaacctccaatgggtgggggacagtgagcttcggcctggccgaggtgggtgggtgggctctcagattcagctctgtgtaaagattctctagcgggctgcgctcccaagttccccttctctgtgaaagtgaagaattagtacagctgtgttttttaaagg

SEQ ID NO: 2157 - DNA, 485 bp, Homo sapiens
  misc_feature (1)...(485): n = A,T,C or G
gaggganattggtccatatcattgagggcattcatagctttccaggacatgagactgtgcaaagcctctttgctgtttctctgggctcctgagcataccaggggaagttctagaaaccgcagctgacatctcgacccaagagatttaggattctcctgtttcatctgggtcagtttggccataattctggggtcaggccaggcctgggtcctgccctcccatggggtgactcatgacccctccagccaggactctcctacatgtggcccccataggcctctgtggctgcaaggcggtcagttgctgcttgtcccagcaggtggccttgatctctccatgccccaccttaagtggtaagcatgtttaattatcaaaggccccatttgtcaggggtgagagaaaagtcaaaagataaattggggccttgtaaaaggccagggtaaaatgtctcaggcaagcaaagagtgtccccttctgcatatggg

SEQ ID NO: 2158 - DNA, 482 bp, Homo sapiens
  misc_feature (1)...(482): n = A,T,C or G
ntttagaatccctgtgagnnggggggnnttagatatccctagtcagtgtggtggaattcaaccgtgctcactgcagacaggaggatgtgggcttccgcggaaacagcccggaaatgatggttgagccacagccgaggatgtgggtgccggagagccctgtgtgtaggtcgggaagaggtgagagtaagtctgagagctggagtgaggagccgcagcctggccacccacgtgcctggcctccatccccgggccgctttcgcgtggaagaaggtggcggtgcacctttctgctcagcagatggaagcacgagtgcagagaagagacacctggaggttagcaacggaatggacgagctggcaggtagcccattttctgggacgagaatggcttcaagatcaagtgacgcaaaaccactgcccgcgtcctatccagctgaacctatggagccccaggaaaagccgaaaatcaccagtgctttcagn

SEQ ID NO: 2159 - DNA, 459 bp, Homo sapiens
  misc_feature (1)...(459): n = A,T,C or G
aatcgagaccatcgatgaccgttgnggaanncgaatggtatgtgcggtgggctcgggcagaggcgggtcctcgccctttccattcgtgtgaagtgtggtgtgtgtgacctgcacccatccctttactgttgggggtgggcaccccggcgagccgcaaaacagcaggcggactcccctactggagagaagccggggaagtgcaatggggctctcaaacacatcaaagcctgctaagtctccaattctccctgtgaagcaagacacccctgtgttcagtggcatttggcaaggatcctgaggtcacagcctggttttgtgatgtggtgataatgactctaagtagtgaacgccaaagattttatattctgcctgcaaatcatgatgggttctaatgacacagcatataaaagttctcaagtattgctttgccacctccactgctcattaacttaacttggg

SEQ ID NO: 2160 - DNA, 459 bp, Homo sapiens
  misc_feature (1)...(459): n = A,T,C or G
actggagaactttgagagcataggnaangcggnggaattcctttgctctcctgggcgcagccttttgttccaagccactgtccagccttactggatgttctgccctctgggattcatgacatcagggccataggcaggatattatgacttcagaccctgcgaggagcagccaaggaccataggatccagggcaaagcgagatgtgtgagtgcgtgtgtgcgtgtctgccctctcatgcatagatgtgtgcatgtgtgtgtacatacatgtgtgggcgtgcacacagatgcacgcgtgagtgtgagaacgcacgcactgtgaacagccgagtgactcatttgaaacagtccccttctcccaccctggagcgagtgggttgcactggccaccaacagtgttggacctggagctggtgtggacagtggaatggcaagcccagctggcatggtccttcctgcg

SEQ ID NO: 2161 - DNA, 462 bp, Homo sapiens
  misc_feature (1)...(462): n = A,T,C or G
atcgagccccctattgagagtcctacgacagngcggnggaanncccaccagcccgaggctatcgaagagttccccgtgccggcttttcaccatcccgtttttcagcaagagtcgttcaccagacaggtgttatggaagctgctgaaggttgtgaaattcggagaagtgatttcttaccagcaattagcagccctggcaggcaaccccaaagccgcgcgagcagtgggaggagcaatgagaggcaatcctgtccccatcctcatcccgtgccacagagtggtctgcagcagcggagccgtgggcaactactccggaggactggccgtgaaggaatggcttctggcccatgaaggccaccggttggggaagccaggcttgggagggagctcaagtctggcaggggcctggcttaagggagcgggagctacctcgggctccccgcctgctggtcgaaactgagta

SEQ ID NO: 2162 - DNA, 459 bp, Homo sapiens
  misc_feature (1)...(459): n = A,T,C or G
atcgaagaccctttcgagtgcggtggaattctatcagtgtattatgtatttatatacacttggagatacagtaaaatgtacctctcactgtgggttaccataaatactgtaaatttgagaaacactctttcaggcctgagaggagcagtgacaacagtagggatgatcaagtcagatgtccctggtacccaggaatggctggatgagagaaggagacagggtgacctgcccctgcctacaaactctaacccagttctgtccctggagctgtgtgaccccggacaaggccctgcccctttccaggctgtcgttgtcctcatccagcctgggagagggttggcgctgaggcccccaccttcttgcctgtttcctcctgaccccaccccttcccctcctgctgggcagatccgagtgaagcctgacaggaccggtgtggtcacggatggtgtgaagcactcn

SEQ ID NO: 2163 - DNA, 467 bp, Homo sapiens
  misc_feature (1)...(467): n = A,T,C or G
nctcgagatccctagtccatgtggtggaattcacgatgagaagtacatcttcagcgacgatagttcccagctgaccatcaaaaaggtggataagaacgacgaggctgagtacatctgcattgctgagaacaaggctggcgagcaggatgcgaccatccacctcatagtctttgcaaaacccaaaatcacatatgtggagaaccagactgccatggaattagaggagcaggtcactcttacctgtgaagcctccggagaccccattccctccatcacctggaggacttctacccggaacatcagcagcgaagaaaagactctggatgggcacatggtggtgcgtagccatgcccgtgtgtcgtcgctgaccctgaagagcatccagtacactgatgccggagagtacatctgcaccgccagcaacaccatcggccaggactcccagtccatgtaccttgaagtgcaat

SEQ ID NO: 2164 - DNA, 489 bp, Homo sapiens
  misc_feature (1)...(489): n = A,T,C or G
gtaatcatcganataaaaggangaaaaaanaactggatgacactgatcaccgtcgnggaannccaagagaaggcaagggacaatcaagcctcaatgattatatttatagagcagctaagggtttgcagcctcctctccatcttctggctctaggacacagctgtgttctggggctgagaagtctcagcacaggctcctcctcacagttctagctacaaatgaactgccggatgaactgttctagtttttcctgattgtccaggctggcaaaagtaggggacaggtggagcctggggcctgcagggctcggcgtctgctgcagaacctgggccatggaagataagccgtgagtgcgctcaccacagggactgtgtacacatggcccaggggccaggcctgtcccccagaaacctgccttgagacctctggccccttagacctcaatgtttgcgtgcaaatgctgccgcaaagcagtcccaataccccacc

SEQ ID NO: 2165 - DNA, 559 bp, Homo sapiens
  misc_feature (1)...(559): n = A,T,C or G
ttactcgttacacacgatactttctctactacgacagtgcaccatcccacacgtctgtctacactaacactctcataggcaggnccgccgcgccccnnttttgagccccttttgagtacactcggacanngcgnggaanncggaagcagcagaaaagccctgggagctcgctggatccccaagcagcccattcctgcattatgtataaagttttggtgccacagaagaaatagcacttgaatataaaattttctttttaattctcagcaaggcaagttacttctatagaagggtgcgcccttacagatggagcaatggtgagcacacacttggacaagggaggagaaggggttcttatccctgacccacatggcccctgctgctgtgtccttcccctattggctagggttagaccgcaccggctaaactaattctgattggctaatttaaagagaatgattggggtgagtgcttggcaggagtcagggcacagcaggtagcaggtaaccagaatgagttagggtggagcaggtgatcagaatgagtcagggtggaatag

SEQ ID NO: 2166 - DNA, 485 bp, Homo sapiens
  misc_feature (1)...(485): n = A,T,C or G
cgcgccgaggccaaatgagcccttattgagaccntaggcagnngcgtggaattcctaagtaataaaatttcagagctatgacttaagaatataagtatttttaattgacaactacttttggaaaacaatctcagaaagataaaaggaagatgtttccctccccactctggcagcagcaggagacattcgttcagaaaatacagtttgaactaagaatacacacaagaacattatgctgtcttttattgaaacttgtgtgtgtgtatatatatatatttctctttctatagttattaatatgttcatggaagtattacttatacaaaggagacttgtaagaaacccagattgctatgctgttactgctgctaggttctaggaaaataccctttaacctttaagatttttacttgataaatttgttgcaccattactaatatttcaactgacaggtctttatgtattcctgaaagggttaatttctt

SEQ ID NO: 2167 - DNA, 454 bp, Homo sapiens
  misc_feature (1)...(454): n = A,T,C or G
actgagancctgatcacgttgnggaantcaagcaggccctctggctcaccaagaccaagttaatagaaggccttcccgagaaagtgcttatccttgttgatgatccaaggaaccacatagagaaccaagacgagtgcgttctgaatgtgatctctcacgcccgtctctggcagaccactgaggaaatccccaagagagagacctactgcccggtcatcgtggacaacctaatacagctgtgtaaatctcagattctcaagcatccttctctggccaggaggatctgtgtccaaaactccacgttttctgctacctggaaccgagagtctcttctccttcaagtccgtggttctggtggagcccgactgagcactaaggatcctctgcccaccatcgccttcagagaggagattgaagctactaagaatcatgttctagagaccttctaccccat

SEQ ID NO: 2168 - DNA, 450 bp, Homo sapiens
  misc_feature (1)...(450): n = A,T,C or G
gccatgcctcccacctccccacccccagcgccgggtcgggggcagatcccaccccactctgccacgtgccgcatcacagttgggttttgtcagtgtgctcctttcccaaggctaacactaacttgactttagcacgacattcactgcaaaggttatggatcagacggagacaaattcttgcaagagcagggctggattttcctgtctagaatcttgtatgttaaaaataacaatcttccgtccaaatgactacagcagtttattaagtgaccgaacgggcagacaagcatgcagggagggccgtcagcatccacagaacttaccgacctgactgagagcgccacgtgcaccaggctcacgtcctgagcgtgtgcccacagcccttggagtgtttacaagaatttccttggttcgatcttacatgtatttcattntaggggaaacaacgcc

SEQ ID NO: 2169 - DNA, 494 bp, Homo sapiens
  misc_feature (1)...(494): n = A,T,C or G
ngaacttaanagaanagaaaagggggannnnnnncctggagaccactgatgaccatcgganagngcggnggaantcgctgcagtggcggaagtgctggcgccatagccacggncaggctgtgcctcacctcctttctcaccaccaggccaggaggcagctggcacagtgctcacgccgactttatttattggaccagaaacactcacatgtcacttccagaggaacgggggacagccaggctcgcccatgggccttcaggaatatttatacatggcccagcctgcactgcccgggcgagggcagaggacactgggagcaaggcttatgcccctgctgcccgtcctgtgctgggggcatgctgggaccagccgcacccatgccccaatgcttgtgtgtggaccagcggctgcagccttctagcccctcctccccgcgagactctcaggctgaggtcggcaagccgtggctcccccacacaccgtgcaataccctg

SEQ ID NO: 2170 - DNA, 500 bp, Homo sapiens
  misc_feature (1)...(500): n = A,T,C or G
natgagaccctanccgattagagaacactatctagngacgcggaattcacctgttccacttttgcacaaatattttatttctaaagtatgtctgggctctggactatggtgaatgaagttcagatcccagccctactatttcctggctgtagaatcttggtcacttactatttgttccaaacctttttgtcatcgtctgtaaaatgagaatggtaatattagcgtgcactgtttgtgggaggaggactggcaaaaatatgagagtaggagtttgggctcttgagcttgggcctggccttcaaatttccactctttcactcactagctaaggggccttgggcaagtaccttatcatgactgtgcctgtttcctcaaagagagtcatggtagtagtagtactcaaccgataggactgaagtgactattgcatgagtcagtattggcaaagaattcagaatagttcctggcatacagcactgtggaagcattagctagtattt

SEQ ID NO: 2171 - DNA, 486 bp, Homo sapiens
  misc_feature (1)...(486): n = A,T,C or G
tgcgcagagnnnnaaatgagaccatgattggtgngcctgaattcatttggaagtcctgggggatgctggcaaatctcagctgttgctgaggagggggctgggaccccttcccatcccaaccttgagccccaggagataccgcgcccacacccaatcttgggacactccctatctggttggaagagagtaaccagcttccagagagccagagagtgagagagagaaagagagtgagagagagagagaaagagagagagagatgctgttgaatcagaaacagatcaacagcccaaagattttcctgtccctggagtgccagccccaggaagctccagggctgagtggtcaggagccagtttctccagcccctcctccccacaacccctagtggggaggggcagctgtccatttgcccaaagtattaatgcaactgaagctgtgatatttccaacgactgtaggaggaaaaattaaggggagagaggag

SEQ ID NO: 2172 - DNA, 486 bp, Homo sapiens
  misc_feature (1)...(486): n = A,T,C or G
agcgccgaggccnaatgagnccctaactgagaccaatggacangccgnggaattcggcccgcctgaacctgcattgctggggctgggctgtgacagtggtcagccccgaagacctggccagtgtcccttgtctcctgagtcctccagggctggagactgcctggaagacatgcctggattagttggtggaagcagccggaggagaggagggggctcccctgagaagcccccaagccgcaggcggcctccagatccccgagaacactgcagccgacttctcagcaacaatgggccccaggcctctggacgactgggccccacacgggagaggggtggcctccccgtaattgagggccccaggactggactagaggctagcgggagaggccggctgggcccttcccggaggtgctcccgtggccgggcgctggagcctggcctggccagctgcctttcccccaagtgcttggaaatcagcattgaata

SEQ ID NO: 2173 - DNA, 483 bp, Homo sapiens
  misc_feature (1)...(483): n = A,T,C or G
ntttgatcgcgatccctagtccagggtggtggaattcacacatcaccaggtgcatctgcaggcaccgggctggctgcttgcagccaggagaaggtcagcgagaaggagtgtatgagtgtgagtgtgtgtgcatggaagttggggcactgggcgtctgactccctccccacccaagagaggaaggacccctcaccacccccactggcgagacagtttactttgccgacttgccatgtttttgccaaaaccaagattttgaaggaaatgagtggccagcgccagggcccaggccatgtggcctgcccagcctcaatgtcacttggcggcggggtggggtgggggtgggcagcancatcccagccttgagatgcttcactttccttctctgtaaccagactttgaaaaattgttcgtttcatcaggctctgttcctcaatggccttttgctacgtgcctcccgagaaatttgtctttttgtataaa

SEQ ID NO: 2174 - DNA, 482 bp, Homo sapiens
  misc_feature (1)...(482): n = A,T,C or G
natcgatagccctacgccagngnggnggaattcgaaaccatttacagaatatgaatttcagatttcctctaagctacatctttataagggaagttggagtgattggagtgaatcattgagagcacaaacaccagaagaagagcctactgggatgttagatgtctggtacatgaaacggcacattgactacagtagacaacagatttctcttttctggaaggtgagttttaagcgtcaacttaaaactcaagggaataaaactgaaggcagaaaaagacctatttgcatagtggcttttatatgaagcttcaatgattttgctagagctcattttctcacattcatgacacaccacagtgtcatgtgcctttggtggataggggtgagagctgagttccttcttccacacagtcacatcgtttcaatcccacttcctataagatcaaggtctttttccatccctggcatttccaccctctgaa

SEQ ID NO: 2175 - DNA, 486 bp, Homo sapiens
  misc_feature (1)...(486): n = A,T,C or G
ggcgcagagncncaattgaaaccttaatgagaccataggccangccgnggaattcctgggacagacagaaggcctggagatgggaagggagaaggagatcatagtccagagagatgaagaggcacagacacaaaatcaggaccctctagtccccgctcgtgctggccattttttgtagaactgctcagtcatctgggggcttccaccccatgggcccacaattgcccaatcagtgggtggcagacatgggtgatgacacggaatgggtgaggcatctggggtacactgagtttcccgagtccctctttgccccccgagccctggcaggcccctaagggcttgccccgcatcctccagtttgcagacaaggctgtacagatgcaactgagacacagatggggatccacatgggggggtcatggggtctttctgtctcttctcttccagcctgggggcaagtacaggcacgtgggtgtgcgtgcatga

SEQ ID NO: 2176 - DNA, 498 bp, Homo sapiens
  misc_feature (1)...(498): n = A,T,C or G
ggggccnnnnnnaggcncgcttagagatcattagttggagcgcnggaantcctactggaagcagaaagggctgcggaggcaggctgtatggagaacctgaaagctttgctgaaggatagcaacagtatggtgcgcataaagaccaccgaggtgctccacatcacggcaagccatagcgtgggcagatacgcctttctagagcacgacatcgtccttgccctgtccttcctgctgaatgaccccagcccagtctgccgggggaacctgtacaaggcatacatgcagctggtccaggtgcctagaggggcccaagagatcatcagcaaaggtctgatttcctcactggtatggaagctgcangtggaggtggaggaggaggagttccaggagttcatcctggacacactggtcctctgcctgcaggaggatgccaccgaggccctgggcagcaatgtggtgcttgtcctgaagcagaagctcctcagcgccaaccagaaa

SEQ ID NO: 2177 - DNA, 453 bp, Homo sapiens
cccaagtaatctccctacacacaagacctcatggctctgctgtcactcagctcgattcaaggaatagcgagcaagcaccctgacaagtactgtatcagtcaggactctgcgagaagtgctagaacttggcagaggggcagaaaatccactcagattcactaacaaagacgtcacatgcttgctttggcaggacacatactaaaattggaacgatacagagaagattcacaaaaataaaaaatagaaaaaaaaaatgtcagaccttgttgactttacctgtatctgcctttctttcctctattggggaggattcattttcaagcgggttctccaaatgccggaaagataacatccttcagctcacattacaataagaaagagagacccagccgggcgtggtggctcacgcctgtaatcccagcactttgggaggccgaagcgggtggatcacga

SEQ ID NO: 2178 - DNA, 488 bp, Homo sapiens
  misc_feature (1)...(488): n = A,T,C or G
gcccccccncgcgccatgagccctgatgtagacataggacangcgtgctccctccggcgagagactttgtcagctcccgcacagtaactcttcctgtgtgaggtccaagcaccctctcttggagtctggattgggacccctttccagtaatatactcctggtgaaccatgaaaggacgatattgaggagacccctgaactaaaggaaatagaccgcaacaccaattggctgactttgggtggaagtccaagaatccgagtggaggctcaccgaggcgaaggggccaaccatgggaaaggagagtggatgggactcaggcagggctgctgtagcagctgtggtcggaggagttgtggctgtggggactgtgctcgtggcgctcagtgccatgggcttcacctcagtaagaatcgccgcatcctccatagcagccaagatgatgtctacagcagccattgccaacgggggcggagttgctgctggcagtn

SEQ ID NO: 2179 - DNA, 482 bp, Homo sapiens
  misc_feature (1)...(482): n = A,T,C or G
catcgatcgcgatcactagtccgngnggtggaattcgtgaccctcattgagcagcgcaacgctatcatcaactgcctggatgaggaccggcagagggaggaagaggaagacaagatgttggaagccatgatcaagaagaaagagttccagagggaggctgaacctgagggcaagaagaaggggaagttcaagaccatgaagatgttgaaactgctaggaaacaaacgtgatgccaagagcaagtcccccagagacaagagctaacagcacgagaagccagttggggactgccccctcctggagcagctcctgggctgtgctctgtttgaagggggcgccctgctcccctcagatcagtcaggaggaagatgactaaggggagggatcctctgggtgatggcctcttcctcctcagggacctctgactgctctgggccaaagaatctcttgtttcttctccgagccccaggcagcggtgattn

SEQ ID NO: 2180 - DNA, 476 bp, Homo sapiens
  misc_feature (1)...(476): n = A,T,C or G
gatcgagacctntnngnannatcgtagaccctagtcagngtggnggaattcattcaatcatatctgtgaacagacaaggttcaaaaactaagcatccagaggccctgagcagctttcagcactggaggagaagagagcgtgtttttaaaatacagagacaagcacgtccaggtgttttcacagccctctgagggaagggacgcagggtctccgacaggtgctctggggtgactcttctgtggagctttaccctctgagtgagaccctccccagagccccgggggccgcagaccgccctcctggtgagcgctgggcagggctcgtggtggcatcagcagcagagacgaatcctttctgtaacatgcggccgtaccgccgagaggggcagnattgctcttttgtacattttccgaaactacagttaaagcggaagtctgttttcatgaatagtttcaagggagaagggctagtttatc

SEQ ID NO: 2181 - DNA, 477 bp, Homo sapiens
  misc_feature (1)...(477): n = A,T,C or G
ntcngantnacctattnagtgtggtggaatnnctattttgagatccctactcagtgtggtggaactcagacacatttacttattccacacatgtggctgtgcacatgtgagcttgtgtgcttttggagagaatgttgattggcaaaagcagcacagtattaatatttagagtaggatgcagcctcttatgcaccacagttaaatctagaacgaacaaaatttcagagctcaagacatgggacatttaaatcctcaaggagtttggaacaaaataaacagatctaaaaatttggtttgggtatgtatgttgcctacaaggaagaaatagtcttaacctgattaatagcagaaagtttgacttcagagctgaagtctcctttcaaatcaaatttctgccaggttctatgctctctgtgagagcagacattanaaaaagagctatataggggtttggagttggttgactatttgagattg

SEQ ID NO: 2182 - DNA, 400 bp, Homo sapiens
cttcttgttaatcctctgtcgtgctttggtaatcgtattgattagagttggtaactgtcttgacttgaattttgtccctttaaaactgctgtacctgtatgataaagatgcagtacctttctcttaaaaaaaaatgctatggaaagctgtgagaattgaagagacaaattggctgtgtcagtgtggggttatgtcatgatttctagaagccctgaagttgctcttttgagcagctttgcatgacacgctttggtaaaaggtgtgcatctttaaattatttcatggatactttgaaaaatattgtatcacttcaaatacagcaataagtttatatgttctcaagatttcatttgtttttaagaattttaagttcgtggattaatatcactacttgaatact

SEQ ID NO: 2183 - DNA, 480 bp, Homo sapiens
  misc_feature (1)...(480): n = A,T,C or G
tggaggtgccccgggtgnnnaancctgggggcctaaaagacgngganannccggncnaacccctagggcgcgggaggggacgcaggggaaatctaagctgcctgatgcccacgaccacaacgtcaccctccagattgcccggtcggaggggcccagtccgcgcaggtggctgctccctactgcctgagctgtggctgagcaacagattggggagaaacaggctctcgcaccttgtcctttattcgacgatttcttcaatggacagaattattagatcctacaaatgtgttcatttcagttgaaagtatagaaaactcgaggcaactattgtgcacaaatgaagatgtttccagccctgcctcggcggaccaaaggatacaagaagcttggaagcggagtcttgcaacagtgcatcccgacagcagcaacctgatccccaagctttttcgacctgcagcgttcctgcctttcatggcgccg

SEQ ID NO: 2184 - DNA, 212 bp, Homo sapiens
  misc_feature (1)...(212): n = A,T,C or G
gnttaacgtangcactctcgcagttcctccgccttcaggaaggtcttttcagcaggggccttacgggtgcatgcttcggtcctggaggccttatcctagcctcctctccatcagcgccacccgtctggggcccgaaaggagggagctttccctctgtcccccagcctttggactgtcactcaacaagccattcgttcatcaaatacttttag

SEQ ID NO: 2185 - DNA, 482 bp, Homo sapiens
  misc_feature (1)...(482): n = A,T,C or G
ntttgattgagatccctaggccangnggnggaattcctgcgtgtgggtatgacctctgcctggtggctggtgtatcccaactgggcaagagatgtcagagggtcccccttgtgggtgcgcttggatgtgcagagccttctccatggattttcttccctgtaagtgccgggcccctcaccccagctgacaggctgttgctgtgcctgctcacacctgctcctgcaggcacactgggctagggacgaggaaggagcagccacaagtggtagaactgccttggtggacaccagcctcgccctgtctttatttcctgaatggtttgtgaacttgctcacctggaccactgtatcctgccactgtccttcctggtctcgcactgccactgcatggcctcctgtcactgtgaatcgtggcccagtctcagtttgtagtttctcattaaattggccctttcactcccccgccctgggcctctgctcttn

SEQ ID NO: 2186 - DNA, 453 bp, Homo sapiens
  misc_feature (1)...(453): n = A,T,C or G
ggccgaccntttgagccctttttacgtcctctagaccagcgaggtggaattcctcgcgggtcgaccgggagaggaaggtgagtatgaggctgctcaggggtgcgtttcgccaacgtctcctcctcagacctcactgggcggcaagaggtctcccggatcccagcctcacaggtgagctgcccccctgccagtccctctgggcctcagaactgagttagagaccccccagtgggaggtcaggccgtggctctgttcttccctttccatcgacgctgcttgccttggagtgaaccccttctgtagagccaggacttggcctcatttaatcctctgaggtctgatgagccctcttgagcaaagtcattcaccaaggctcagggcagtaacattccctggcaagtggcacagctgggctccagtcctcgctgccaggggcccagccagggtgggcag

SEQ ID NO: 2187 - DNA, 478 bp, Homo sapiens
  misc_feature (1)...(478): n = A,T,C or G
tctcgtcgatccctagtccagngnggtggagatccctacaccgtgtggtggaactcgtgcttacgatagacaaggctcttacagagacctctggccttactgatcacccacttcagtgcccctcctcacgtcacacaaatgttttactgactgggagatgacctgagagacagaagtcaggtgctgaggtcacagagtcagaggcagggtctggtgtgggatgagggggtcagccttggcacaacacacagacctgtgtccctgagcaagccccagctcatccagctgccctccaagtccgtacttctctgcacatcagccctcccgacagaggaggaggccacatggatgcctctccccacaagaccactggccagaggaggtgctgaccaccagacccccatcctgacatgccagtactggcagcaaagctcctctggctggtcccacctgacatttacaggccccaacccatctg

SEQ ID NO: 2188 - DNA, 457 bp, Homo sapiens
  misc_feature (1)...(457): n = A,T,C or G
gggggggggnggggggaaatgaaaccctnnaatcgaganctactatcagtgtggtggaattccgaggtcatcatcatcgaacccttttttgactgctacgagcccatgacaatgatggcagggggtcgtcctgtgtttgtgtccctgaagccgggtcccatccagaatggagaactgggttccagcagcaactggcagctggaccccatggagctggccggcaaattcacatcacgcaccaaagccctggtcctcaacacccccaacaaccccctgggcaaggtgttctccagggaagagctggagctggtggccagcctttgccagcagcatgacgtggtgtgtatcactgatgaagtctaccagtggatggtctacgacgggcaccagcacatcagcattgccagcctccctggcatgtgggaacggaccctgaccatcggcagcgccggcaaga

SEQ ID NO: 2189 - DNA, 458 bp, Homo sapiens
attgatttcgcagatcactagtccatgtggtggaattcgaacactttggcctgcccgctcctctccaacctggcgacccgactctggctacgcaacggggcccccgtcaatgcctcggcctcctgccacgtgctacccactggggacctgctgctggtgggcacccaacagctgggggagttccagtgctggtcactagaggagggcttccagcagctggtagccagctactgcccagaggtggtggaggacggggtggcagaccaaacagatgagggtggcagtgtacccgtcattatcagcacatcgcgtgtgagtgcaccagctggtggcaaggccagctgtggtgcgcacacgggctatatggagagattctgtggaggtgcgcgctctctgtgctctgcgcgcgctgctccaatttatatttggttttacggacaccgaaacaatgagagatg

SEQ ID NO: 2190 - DNA, 448 bp, Homo sapiens
  misc_feature (1)...(448): n = A,T,C or G
gatccactacccgtgtggtggaattcgatcagcctttaagatggcgtctcctcaggggggccagattgcgatcgcgatgaggcttcggaaccagctccagtcagtgtacaagatggacccgctacggaacgaggaggaggttcgagtgaagatcaaagacttgaatgaacacattgtttgctgcctatgcgccggctacttcgtggatgccaccaccatcacagagtgtcttcatactttctgcaagagttgtattgtgaagtacctccaaactagcaagtactgccccatgtgcaacattaagatccacgagacacagccactgctcaacctcaaactggaccgggtcatgcaggacatcgtgtataagctggtgcctggcttgcaagacagtgaagagaaacggattcgggaattctaccagtcccgaggtttggaccgggtcacn

SEQ ID NO: 2191 - DNA, 438 bp, Homo sapiens
cctccgcggcgcccgggccatggacgggttccgcgagcgcatttgagcccgggaccgtgagtgccactcacaagcgcctgaagtacatatccctagctgggctggtgggccagaatgcctacctcacccttagcatccgctacgcccgcacgttgtcaggggaccgcttctttgccaccactgctgtggacatggcggaagtgctcaaaggtctcacctgcctgctgctgctcttcgcacagaagaggggtgacgtgaagcacctggatctcttcctccatgaggctgtcctggtgcagtatgtggacacgctcaagctcgcagtgccctctctcatctacaccttgcagaataacctgcaggatgttgtcatctctaacctagcagctgacagtctccagccttacccgaggtgcagacaaagccatagcctctgcg

SEQ ID NO: 2192 - DNA, 449 bp, Homo sapiens
gatccctacgccgcgcggtggaattcacacaagttcaaatgacctgctctgtgtcctgcacccttggttcacactcgggacactgtgtctggcattagtcacgttgtgtgtggtttgcctccccaccagaccaactccctgagagctgggaccttgcggagtcatctctgacccatctcatccactcagaggagagcagaggatctggcttgaaagggcactcattaaaggtttgttatacaaacgagtagcccaatgaatgacagcagagacacaggagcaaccagcacctacccggacctcgggccactggcgggcactgaaggggcagtcggggcacttgaaggcaccaggcccagcgtgggcccgcttgtgactctccatctcagctcggccagggaaggcctcggcacagatcttgcaggaaaacttctttgatgcagcagtgg

SEQ ID NO: 2193 - DNA, 484 bp, Homo sapiens
  misc_feature (1)...(484): n = A,T,C or G
agagggcccagcgtccaaacctaggtngcctgcngngcttgtannanctnggaanttggaagacacgaatatgttcacgcagacaggagcgttagaattgataaccagagtgttctcagctggcagatgtgcccagatagaaccaccggggggaaatctgcacggcgttcgatgtaaagtcacacctttcaactcacggtatcaactgcatccgtctgtgagagagaaagaagttcgttactcaggattcaatcccagacccgcccaaccacagcatgcccagtccaggggatacttgggtacagggaggcacctcacaccctctctcacacagcctggttttggaagcagccagcctgcctcacatccactgtgtggctactaattagggtctgttccaagctgagctcctccctctctcctttgtgggtggcggagctgctttgccaaagggaccccaaggatgggtggaagtcgcctggtg

SEQ ID NO: 2194 - DNA, 469 bp, Homo sapiens
  misc_feature (1)...(469): n = A,T,C or G
natcgagaccctaggaagtgacgccgaattcgaaagacaagaaaaggaaaaaaaacacagacaaatcaacacttgacttattccacaaaatgagtcattgttgcaattatacaattataatattttgtgaaagataacaattattttaataatcttctaggtcgattttcaagatgaaagtcccaagcaagcctcctttcccactctttttgtgtatgtgtgtgtgaaattttaatctctgtttaagtgggtctactttgagtggtctttcttcagaatcaattatcatgggttaaggagttcttccattacctttgatgcctctatcaggcactccaataactgcttgttcaacaaactaccggaagtccacgacggggactcaatacaagtattttaggctactcttttgtgccttattgacttactggactgggagtcctctacattaagccacattacattctaa

SEQ ID NO: 2195 - DNA, 457 bp, Homo sapiens
  misc_feature (1)...(457): n = A,T,C or G
nctcgtagttcactagcccagngcggnggaattccccttgaagggagaatctcacccaggatcttcctcaatactgctcctctcttctcagctcagggagaggaggggatccattctctaaggaccaaactgcaccctttcttgggtgagtgagcatttctacctccgtgctttcaacttttgttgcatcatgcactgatgctgcttgcaaaaaatgaagacaaaatactcagaagttgcatttgccatggccactggctccagctggggtttggtgccagtgttattacagggtctgcggagtatcagccattggcttggcctctctctgttcctccctctgcacctagaactcttatccttcctgtggtttggtgccgactgggtcggatctgggcttagagtaatagctttggtgggtttcctggatggatgtgaagttgggcctcccatgggc

SEQ ID NO: 2196 - DNA, 456 bp, Homo sapiens
attgatttcgagatcactatcagtgtggtggaattcttttctgcgagagctgcaaaaccacactgggctggaaatatgagcaagcttttgagacgagccagaagtacaaggaagggaaatacatcattgaaatgtcacacatggcgaaggacaacggctgggactgaggggctcatgcagggtgtgcccttcctccgcatgcccctccctccccacggccctgccaagcagtctataccagcatgagtactgccccacccctgggggaaacctggctccaaccaacccctcccctgcctccaccatatccactaccaggcaccctttataacaggggtctgggggtaccccaggggtgttaaggctcatgagtgggcagcagtcagggagagacagaactgggggaaagggatggttgtgggtctttctgttcccaagatcctgaacatggaagcg

SEQ ID NO: 2197 - DNA, 468 bp, Homo sapiens
  misc_feature (1)...(468): n = A,T,C or G
tggcggggnggggngncactgagaccctangactgatanctatatgcagngncgcggaatacctgacgagcaggactcggtgcggctgctggcggcggaggcgtgcgtgaacatcgcccatcttctgccccaggaggatctggaggccctggtgatgcccactctgcgccaggccgctgaagacaagtcctggcgcgtccgctacatggtggctgacaagttcacagagctccagaaagcagtggggcctgagatcaccaagacagacctggtccctgccttccagaacctgatgaaagactgtgaggccgaggtgagggccgcagcctcccacaaggtcaaagagttctgtgaaaacctctcagctgactgtcgggagaatgtgatcatgtcccagatcttgccctgcatcaaggagctggtgtccgatgccaaccaacatgtcaagtctgccctggcctcagtcat

SEQ ID NO: 2198 - DNA, 475 bp, Homo sapiens
atcgagattcctagtccatgtggtggaattcggcgggtggagtccagggatgctgctactcatactgcagtgcccaagaaagctggcctaaatgtaatatgtcaagctggagaaattctgctgactccgggataaataactgagttcctgaccatatgaaacttaccgtcttgcaggggaagtggacagataaacagggagattgtgctgatgctgctgttgaggtcataggtgtttgtggtcatttctcctttggagggtggttcagaaacaagtccattcatggatctgtgaaaaaattcttctctggagaggtccagtaggaattggaaagtgagggaaagaggctggatgaacaaagggtcacaggtgtaggtttgggacacattgtggggcctgaaatttggaaccttaaatgaggcagaggtaataagctcagatgcctgcaggtgccaggtattggtgcaagggtagg

SEQ ID NO: 2199 - DNA, 454 bp, Homo sapiens
  misc_feature (1)...(454): n = A,T,C or G
nttgatttcgcgatcactagtccgtgtggtggaattccttttatgctaagatcttactttaagctttttatgtgaacaaaagatgtacatatagtaagtattacttccgtagtcctcaaatttactataacttttgtacttagtatatgttttatatttggaaaacagcactacgcttagttttcctgtagttcctgagtgatgtctgtgtgttccttgcctgcccttttttgtgagcacagattagtctgttatccatggctggcacttcacttatgatcctttctctgctagatttttatgcagctctctatgaagtttcatggcccatagatattcaaaagcaagatattctatacatatgtgtatatgtatatatactccttatgttaatactaaagtgtttatgctgagttgctgcctttccccgtcatgtatccatgtgcatgctctt

SEQ ID NO: 2200 - DNA, 465 bp, Homo sapiens
  misc_feature (1)...(465): n = A,T,C or G
cggccgnnnngggggggctttgaaanccctangactgatgcggcatctgattgaaccatccaactatgatgtgtgttgatacagttttttatttagttctgacagacattgctcaccgcattttgaagctgttacagataaatgcacatttagaacttctgtgactttttgatgaattgacagttttatcattaggaagtctctttctctggcatttccggtttcttcaagtgtattttatttgaaatgaatatagtcacacaagctttattatgtttagtgttgtgcatatctgtgtctatctattcaaactgtatatgttttagtatatatgtaggtcttgctttataaatataaagcaaataacggctgtattttatttagtttatttacatataggataattactaatgcagtgtagttcaaagccatcatcctactattcgttttctctttgctccatcn

SEQ ID NO: 2201 - DNA, 476 bp, Homo sapiens
  misc_feature (1)...(476): n = A,T,C or G
atcgannccctatcgagaccactgtccatgtggtggaattccctgggccaagacaggctgatcaactatgccaccaatggtgccaagttcctgaagcggcacatgtttgatgtggccagtggccgcctgatgcggacctgctacaccggccctggggggactgtggagcacaggttgggggctgggtagaccgggagggcccgtctccccaacgcgtccccagcctacctctgccctacttctcccctccatgtggactccagtcctggctctgccaggtgcttgctgtgagtttgtagcttccctgggcccatttactcatctgggaagtgggctgatggcacctgcccaagagggttcatctggagggttaagtgaacaaatgcgtgaaagggcctcctctgggaaaggccctctctcctggggctctccccagcccctcccgtaatgcctgtcccccagcaacccaccctgcg

SEQ ID NO: 2202 - DNA, 477 bp, Homo sapiens
  misc_feature (1)...(477): n = A,T,C or G
attcgagacccctatttcagngncgtggaattcgaaataactgggggcatggagaatgcggtggctgtaaagggccgctgaggcggtggaggcctggcagagagcgtccccgcggtcgcggcttctggcttctctgtggagcttggttcttccgtggtggtgcagcaccccaggaacttcaggaaccagtccttccttggagagctccccgggacagccacgggggccaagtgaaactagcgcgttttcttggatcctacactttatagtgagtcataaatactttaaatacaaagccaacaacatttgctgcaaataaacgtaaaaatactgttaaagtgtaaaatgttttcctccgtaccatctgacgtttctggcggttcgttgaacgcgagagaacgctgagccgtctgcactgagcccgggagcatcttcagggcaacgccgcccacgcgcgaggtgaatgaaggacacggg

SEQ ID NO: 2203 - DNA, 497 bp, Homo sapiens
  misc_feature (1)...(497): n = A,T,C or G
nttgagatccctgtccaagtggaggaccctcgatcgntacgcataaatataggtactttttacctacattatgtcggactaagctgggcgtggtggctcatgcctgtagtcccagcatttaggtaggccaaggtgggcggatcacgaggtcgggagattgagaccatcctggctaacatggtgaaaccctgtctctactaaaaatacaaaaattanctgggtgtggtggcgtgtgcctgtagtcccagctactcgggaggctgaggcaggagaatcgcctgaacccgggaggcggaggttgcagtgagccgagatggcaccactgcactccagcctgggcaacagagcgagactccgtctcanaanaaaaaaggaaaggagaaaaaatttatgccaaacctttcatattattggacaggctgcttttttttatttccgggagaagggatttttttcctttaccagcgcaaagctttgcctcaaacacaactaatatg

SEQ ID NO: 2204 - DNA, 470 bp, Homo sapiens
  misc_feature (1)...(470): n = A,T,C or G
gaggggnnnagggggnncctcgaaaaccctnncatcgatanctatatgcagtgtggnggaattcgccgcagcacgcacgggcttgacccccgacctgcacttgaagatctgcgtcagccaggctctcggggacaacgccattgaccaccacgtcgaggagcaggaggccatcgggatccagaccccgggccacctgggtcatcatcccttctggaccagccccggtttgttccaaaccgtttgaaaaaagaaccaaaaaatggccctggacgtggattctcagatcttcttcatgtgatgccccgccctccacgcaggaccaggtggggccatggactgggcaaggggaacacacccgctccccacttgctctgagtcagggacggtgccagctttgcaaggttcacaggagctggccaggcccctgtgcatgggcaccaccttcccagcctctctgtgcgtctgtttca

SEQ ID NO: 2205 - DNA, 552 bp, Homo sapiens
  misc_feature (1)...(552): n = A,T,C or G
ttcagtgacggtatccaccaccgaaccagaagctaaaccgacgaagttgttatcactcaataggttataacactaactccatgaaaaaggggagggannnnaatgtagacatgagnactctcgccagngcgnggaannccaggaacatgaggggctgggaagcctgaggcctgcggggatgcacgaacattaggggttcatgagcctggggcctgtggggtctgcacgcccagaggagacctctagggggttgctggggcaggagggcctggtggaaattgccatggactcaccaaagcaagaggggctggtgggtcccatggagatcaccatggggtctctggagaaggcagggcctgtgagcccaggatgtgtgaagctggcagggcaggagggcctggtggagatggtgctattgatggagccaggggcgatgcgcttcctgcagctctaccatgaggaccttcttgcgggcctgggagacgtcgctctcttgccacttgaaggaccggatatgactggctttcggctctgtggaacccaggcttcctg

SEQ ID NO: 2206 - DNA, 482 bp, Homo sapiens
  misc_feature (1)...(482): n = A,T,C or G
attcgagnncccctattcgagnaccactagtccaggggggtggaattcggtcacttgagcccaggagttcaaggctgcagtgagccatgatggggccactgcattccagcctgagtgacagagtgaaaccttgcctcttaaatgaataaaaataaagtaagctttcttcaacaagttttcttccaacgccacacactccatcaccatattaatttaaattatttagtatgtagcagatttactttgagaccaaatctgtgaagttggtgatgatatttaataattctttatttcccttatgggatctttgcaacttagaacacaattattactcattgtatccgggtcatttaacatcttgtcagaatgctaacattaaataaaccaggccaggcgcggtggctcacgcctgtaatcccagcactttgggaggccaaggcgggtggatcacgaggtcaggagatcgagaccatcctggctaa

SEQ ID NO: 2207 - DNA, 544 bp, Homo sapiens
  misc_feature (1)...(544): n = A,T,C or G
gcgcaacacacgaaccaagaaggctaatgaacggacgtagaaataacggcccgaatcaatatccatccactacacagcaccacgcanananannnnattgagacctgaagacngtcgnggaanncncnctaaccggcccatgttccctggcaagcactacctggatcacctcaaccacaatctttgcatcctgggctccccaaaccaggaggacctgagttgcttcatcaacatgaaggcccgaaactacctacagactctgccctccaagaccaaggtggcttgggccaagcttttccccaagtcagactccaaagcccttgacctgctggaccggatgttaacctttaaccccaataaacggatcacagtggaggaagcgctggctcacccctacctggagcagaactatgacccgacggatgagccagcggccgaggagcccttcaccttcgccatggagctggatgacctacctaaggagcggctgaaggagctcatcttccaggagacagcacgcttccagcccggagtgctggaggcc

SEQ ID NO: 2208 - DNA, 481 bp, Homo sapiens
  misc_feature (1)...(481): n = A,T,C or G
ggccggggnncnnnnttctattaccttcgcanngntccatcnangctttgganagccggccttggacgtacacttgcctggctcggcaggggaagagatctaccctggcttggcttggttggcccctctggactgtggactgcaaacaccctctgctgcttctggaagattcctttgccccatccctgcttgagcccgtcatcacccccaaccttgagaagtgggcatcccataccctttggccatcagcccaacaggctaataagggggtggaaattggggcagaggaggagagtgtacccactggtcaggcgccgggctctcctcaagggctgtggtgctggcccgggtgcaggccctgggctggcatgggccgctgctggcgctgtcgttcctggcgttctgggtgccctgggccccagctggcctgcagttcttgctgtgcctgtgcctctatgatggcttcctgacgctcagggac

SEQ ID NO: 2209 - DNA, 535 bp, Homo sapiens
  misc_feature (1)...(535): n = A,T,C or G
tcacctacaaagaacttctgttatgtaaaagctatactctcgttaccgaaccaacatttactccataacgcaagggcggnnnnnnnnnttcgagacatgaaaacgtcgnggaaaccgngaaggggaaaacatcctccaataacagcatttcccggggactctcctcctggcatgtccactaatcgcacctgcacccggctctctgactgatgccggctccaccagcggtccggtctggtccggtccggtccagtgcagggggtctaacggggtgtttattttctcctcctgctctgtctctacccacagtctgaaggaaggcctgacggtgcaagaacggctgaagctctttgaatccagggacttgaagaaagactaggtgtgtcccatccaagttgagcacgcgccttccccagcttgcagcagcacaccccaagcgctgcttttcacctgtacctttgttttattattattattattattgctgttggtgtcatcgataactgggggcatggaatgcgtgaggctggcttct

SEQ ID NO: 2210 - DNA, 490 bp, Homo sapiens
  misc_feature (1)...(490): n = A,T,C or G
aggcgcgntnnncnnnnancctgcnaccttcgtannnnncctgcnannctncgtanngncgcggaantaaggggctaataacaaactacagcaacacatttttcatttcagcttcactgctgtatctcccagggtaacccgagcatccagaagtggcacggaacccctctgctggctcatgtgtgcaactgagactgtcagagcatggctagctcaggggtccagctctgcagggtgagggctagagaggaagcagggagtatctgcacacaggatgcccgcgctcaggtggttgccgaagtcagtgcccgggccccacacagtctccaaaggtccggcctccccagcgcggggctcctcgtttgaggggaggtgacttccctcccagcaggctcttggacacagtaagcttccccagccctgcctgagcagcctttcctccttgccctgttccccacctcccggctccagtccagggagctcccaggga

SEQ ID NO: 2211 - DNA, 483 bp, Homo sapiens
  misc_feature (1)...(483): n = A,T,C or G
aggccgnnnnnnnnnnnnncctgcnaccttcgnagngngcctgnnangctnaggannaacgctgaacttnagngccctgagatagnttttgtctactgtaataaaatatttccagtcttctctgtttttgcattcttcaattattaccttgaaggggtaatgttttttaaaataatgaattggcctaattgtagcctcagcacaactactaagttacacattcaataaaaagactttttctttgtaatgttatatgttaatggccagcctcctagatactgatgaagcccatcaatttctactgatagttaagatcaattaaccaattagttacccattttcatttttcctgtatattctttgtagatcacttactaaaatgattttctaagaccttcactttcttaagtaaagaaaaacaatttgactgagacttggccatttagctaaaatctaaaagacctatttaatttaaagtataag

SEQ ID NO: 2212 - DNA, 508 bp, Homo sapiens
  misc_feature (1)...(508): n = A,T,C or G
tgggctcnnnnnnagggcgngccatagagncccctngatagtagaccattagnccagagcggaggaattcctcagagccgccagcaacatcatcttctccaacgggaacctggacccctgggcagggggcgggattcggaggaacctgagtgcctcagtcatcgccgtcaccatccaggggggagcgcaccacctcgacctcagagcctcccacccagaagatcctgcttccgtgggtgaggcgcggaagctggaggccaccatcatcggcgagtgggtaaaggcagccaggcgtgagcagcagccaactctgcgtggggggcccagactcaacctctgagcacaggactggaggggtctcaaggctcctcatggagtgggggcttcactcaagcagctggcggcagagggaaggggctgaataaacgcctggaggcctggaaaaaaaaaaaaaaaaacagcgcccgcttaaattaagagggcccgttaaaaccggttgatctgcctg

SEQ ID NO: 2213 - DNA, 448 bp, Homo sapiens
  misc_feature (1)...(448): n = A,T,C or G
attgagccactagaccctcggcangacgnggaattccggcggcggcgagccaggcgccccaagaggaccatccatattgactgtgataagcgctttactagctgcaaaggcgcccaggccgacgtggggctctttttcatccatggtgtgggcggctccctggccatctggaaggagcagctggacttctttgtgcgcctaggctatgaggtggtggctcctgacctggccggccacggggccagctctgcgccccaggtggccgcagcctacaccttctatgcgctggctgaggacatgcgagcaatcttcaagcgctatgccaagaagcgaaatgtgctcattggccattcctacggtgtctctttctgcacattcctggcacatgagtacccagacctagtgcacaaggtgatcatgatcaatggcgggggccctacggcgctgg

SEQ ID NO: 2214 - DNA, 448 bp, Homo sapiens
  misc_feature (1)...(448): n = A,T,C or G
tttgagaccatgagaacgtcgnggaannccntnngntgcgngtttttttcccacaatattttaaaaaacagggccctgaagggcctttttgagattgcagtgtttgagtagagatcgtcaaggaagggagctcatagctttgtgcagaagcatgggcaggtgtgggagcagccagtgtgtgttgtggggcggtgctgaggacgaagggagtgtgttgtggggcccactcaggacccttccttttctctgagggcatgagaagctggtgggttttgagcccagtggcaacatgatctgactgtagcttttttgttagtgctttctaaaatttattgagttgaagttcacataaagggaagcattttaaagtgtatgcatcagtggcatttggtccacagtgttgctcacccgccacctctatctagttttatgacgtttcaatcaccct

SEQ ID NO: 2215 - DNA, 451 bp, Homo sapiens
  misc_feature (1)...(451): n = A,T,C or G
natcgaganccatgatgaccngtcgnggaanccggaaactccggcccagaagggntgaattgcctgaggttacactcttagtaggaagtacttttgggatttgaacccaggccctgctgatggcaaaggtcatacctgttccatctcattaaacctttgaggttttcttctacccagtgtgggtgcagggaggtggctgggggaggctggggaccttgtgttcagggctcaccttctccagcaacaaggacaaatcactgggcatctgggtaggcggggggagccttcactccattttgacaaaggcaggagagttctgaaagccctggaggaattggagtaagtgaccctgctaaggatagtgacagaggcggacattgtgctttacagccctaagcacctttagagagcgtctcatttaattcccacctcagccctgtgtggcgggcat

SEQ ID NO: 2216 - DNA, 478 bp, Homo sapiens
  misc_feature (1)...(478): n = A,T,C or G
agggcggggnnnnnnnnncctaatggctcgnanngngttanntnctacgtanngncgtgggactaaagnccagngnctgaaaagntgtttaatgtattttgtgagatttgattttagttattttagctaagaagaaaaatcatacctgtaggtctcccttggctagaggaagactacactagagtttcagcacatgcctcatactggctaaaatgttttccttccctgttcgctcaactgcttccttttcattcttcattccttagcgtagctatacattcctcgggggaattttccatgagcctagtatagatctaaatcttagcaatctgttttcttacagtatctatctgaatttataactgtcacttttctggggctttgtcttttagcacattttaagataaacaaaggccgacgctcttgtttgttgtctgtcaatctgcgcagcttaatataatgccttccacgaggcagg

SEQ ID NO: 2217 - DNA, 491 bp, Homo sapiens
  misc_feature (1)...(491): n = A,T,C or G
agggcggnnnnnncnnnnnncctaggaccctccgnannnccctacnangcttcgtaangncgcggaanttgaggcagnctnctgccctggactttcagaaagctctgctgttcactgttcctcaagacacatacacactcacgaacctgctgggggattaggaaactggagattagggaaggataataattgaaccacctgctatttatatatagcacctttggcaaaggcgctcagcagggcttccctcacctctccccctggagggggccctgacccttgttctctgtccacataaaaatcatccttggccaacctcaaggctgagaagccattgagacccacgggccatgggtagactgatgtgaggggcaacttgtctgaggccacacagagagattatggcagataattgacatgaatcagccacccgcacagcaggaggtctgtgctgccctgcgttaaaatctaactgccttcacacatgttca

SEQ ID NO: 2218 - DNA, 487 bp, Homo sapiens
  misc_feature (1)...(487): n = A,T,C or G
aggccggnnnnnnnnncnnnncctaggaccctccgaagngngctgcnangctaacgnannnncgcacaggaagatgtcattctgttccagtgttctgatcaatagttttgctgaccagaggggtcattatcccaccaagtgtgtggtggagaagatctgggtcttaggcttcaggaaggagccatcttctgtgactacccactcatctgatggtaaagatcagcctgtggcttttacgtattgtgccaaaacatccatcctgagcctggagaagctctcactcaacattgccactgactgggaggtccgcatcatatgacaaagaactgcccctggtgatgtgagcagggacctgcctgcccctttcaacctttcccctcaccttttttgagatttttgctgcaatctgtttgccttccctgaatcaaaataatctttcattcgtcaccattatactaatgaacaatagatttcatgtttcaaaatt

SEQ ID NO: 2219 - DNA, 460 bp, Homo sapiens
  misc_feature (1)...(460): n = A,T,C or G
agagcggggnnnnaactgagacctacctgagggcgtagncggngtctggcgtcggaattaaacaaccaccatgtcgagcaaaaaggcaaagaccaaaaccgccaagaagcgccctcagcgtgcaacatccaatgtgtttgccatgtttgaccagtcacagattcaggagttcaaagaggccttcaacatgattgatcagaacagagatggcttcatcgacaaggaagatttgcatgatatgcttgcttctctagggaagaatcccactgatgcataccttgatgccatgatgaatgaggccccagggcccatcaatttcaccatgttcctgaccatgtttggtgagaagttaaatggcacagatcctgaagatgtcatcagaaacgcctttgcttgctttgatgaagaagcaacaggcaccattcaggaagattacctaagagagctgctgacaaccatg

SEQ ID NO: 2220 - DNA, 459 bp, Homo sapiens
  misc_feature (1)...(459): n = A,T,C or G
catcgagcaccactagatcgatgcgccgtaagacgancgagccccagctggggcctgaggctgccgccctccgccctggctggctggccctgctgctgtgggtctcagccctgagctgttctttctccttgccagcttcttccctttcttctctggtgccccaagtcagaaccagctacaattttggaaggactttcctcggtcttgataaatgcaatgcctgcatcgggacatctatttgcaagaagttctttaaagaagaaataaggactgtcaccagggccagagagaactaaagttcctgtgtatgctgagataacaccagtgaaaaagcctggcatggagcccagcactgagaacttccagaaagtgttagccttctcccaactgtgttataccaaccacattttcaaatagtaatcattaaagaggcttctgcatcaaaccttcacatgcagc

SEQ ID NO: 2221 - DNA, 463 bp, Homo sapiens
  misc_feature (1)...(463): n = A,T,C or G
tgagccaagaaanaantttgaatcgatttacctaggcagtgtcgtggaattcgaggcgcgtccctagctaggagtgctgggagttttggtgtcttaacggtttccatcccattggtcgccgacctgctaactacaaaaccagcatgcgctgtctgtcctcccccgtggtgcgcagccctggagggagggacagggcggtgtggacctcgtcctttcctaagcgatgccacatgctgattctgtgccaccccctcgccaagggagtccgcagaaggacttgaggggcaggtctaggctgggcgatgaggacggtgtgaccctgcgaagtgcacctcccttgctcaaatcggaggggtctggtcctcactgaacagcccgctgaacatctcggtgtcctctcacatacacacccgcggngggtttccagagcatcgcacctcttccagcccagggagccgcctgn

SEQ ID NO: 2222 - DNA, 485 bp, Homo sapiens
  misc_feature (1)...(485): n = A,T,C or G
aggagagcccnnntttgagtccatatcgcagtgcgtggaatacagttgccttcttcatttccccagactctatgtgggtcttgcatgtcttgccttgtccctgacttttcatagaaagaatggaggatcttaattttgccaggcattggaattgtactcccttggccaaggactgggaaataataggaatgtctttctcctctgcctgtaagtaacatctggtttgtgctgacaatgcagcagcccctccaggagtgaagtcagatactcatgacaagcctagttgcagagggagtgtctcctaactgggcaccgagcgcagccctttgaggtgcctcacctgtctagtcttcccatctgcctggtacaggggtgctgtgaggacactgaggtgtggggaggtgctggggctcaacagcagcagtttccagccctccttcaggctgtgtcgccagcacttgcacccatgatctccatgccatggn

SEQ ID NO: 2223 - DNA, 483 bp, Homo sapiens
  misc_feature (1)...(483): n = A,T,C or G
ggggggtgccnnnaattgagnccacctgagnaccatccgcagngngcnggaattcctctgcttacagccagtgcactgtgtgaattgtagtctcttggcttcagagctggaggtcgtgaggagcctcccaggccatcccgcctgctttgctggtctctcttgtgcccgttgtcctggttctcgctcagctctggtttctttgctgcagtcagacccctggtgtctttgtttcctctggccttcatctcagggatgtctgttaatcccattgagttgcaccaccgaatgtaggcctccagctgtggagatgcagctcaggccaggccaggccaggtcgtgctctggtaacagcctcggatctcagcaccttcaagccatagggcctgtttcttactcatgatgtgtgcattgcaggagagtggggctctgcttgctgtggtcgtcctggcaggcagagcggcagccatatgagaatgcttcccc

SEQ ID NO: 2224 - DNA, 478 bp, Homo sapiens
  misc_feature (1)...(478): n = A,T,C or G
ggtgtgcccccaaggccccccatagagacccnatagagagcccctcggaanncacacaaaacagaaatttgaaagctcaagttttttcttcatttgtattttagttaatactgtacccatatttgtagttaattttaaattgtaccatgtttctgcatacctctatgggtactcaggaattctagtccaatttttgtgactttttcctactgattacctttcctccaacgttttaaaaattatttcaaatggaactgaaagaagcataaactcccataaacccagcacctatactctacaattgccaacattatctatccaacaatctctgactgtaccttttaagtactttctactggactgtttccaggatcacccctcatttatttgggttgctaacctaaagaatgaatgggggaatctccagtcataaacaacttgtcaattaggcaaatatttgagttccttctatgtgctt

SEQ ID NO: 2225 - DNA, 485 bp, Homo sapiens
  misc_feature (1)...(485): n = A,T,C or G
tggttcccnntttgagacctgaagcactgtgcnggaattcgcctggagctataggtctcccaggtgacccaggccctgccagctatggcagaaatggcttagacggttagcgaggccccccaggggtggcaggaattcctggagtgcctggacccccgggacctcctgggcttcccggtttctgtgagccagcctcctgcaccatgcaggctggtcagcgagcatttaacaaagggcctgacccttgaaaggcttactgctgcatggctgtctgcatgaaccacgcctggtgaaggagcctgggtgagaaacaccatccaaagctggggcaaagatgattaccttcagcatgattacaatgtattaccttcagtatgattacagaagtcctacttgacaatcacatatagaagaacggtgctattcagtaagttctctttcctttcccttggagggaagacagcagagtcatcatttaaaaaaaa

SEQ ID NO: 2226 - DNA, 486 bp, Homo sapiens
  misc_feature (1)...(486): n = A,T,C or G
ngaagaggggtttggcccttctgagtccctagtcagtgtggtggaattcggtgtgctcacttacattatgctcagtggacgctccccgttctatgagccagacccccaggaaacggaggctcggattgtggggggccgctttgatgccttccagctgtaccccaatacatcccagagcgccaccctcttcttgcgaaaggttctctctgtacatccctggagccggccctccctgcaggactgcctggcccacccatggttgcaggacgcctacctgatgaagctgcgccgccagacgctcaccttcaccaccaaccggctcaaggagttcctgggcgagcagcggcggcgccgggctgaggctgccacccgccacaaggtgctgctgcgctcctaccctggcggcccctagaggcacggaccacagccaggcctcgggcttcaactggggttcccaccaatgccacgggacattccagggcccac

SEQ ID NO: 2227 - DNA, 488 bp, Homo sapiens
  misc_feature (1)...(488): n = A,T,C or G
ggagtntnnnnnaatcgagtccttagtcagtgtgcgggaattcctgacttcccagcgtggaggccacacgaggggaccccggctccagggaggtcgcagaggtgcggtgttgatggcctgccctggcatgtggtccccatcacaagagttctgtggcggcccatggagcgccatcaccgtgtggaggttagcagcttgaaggccaggtatacccatccccgagtctgggggcgtggatggggcagtgacctggggcacaggctggggtgaggggtgtgaccagagtcagggaaaaactggagacctgaggagccccccacttcactgctggccccaccgtggacagtgggagtttgagggaagacagagcctgaggaacttagagatgtttccaacgcaacccagtgcagaatcatagcgttttactatttccccccaaatgtgacagttgtcctcaccttgtaaccttcacagaagcgactccttgg

SEQ ID NO: 2228 - DNA, 489 bp, Homo sapiens
  misc_feature (1)...(489): n = A,T,C or G
nggaggggnnnnnnatcgagtccttagtccgtgtggtggaattcccgcacggtcccagattacacaaccttcacgacagttggtgattggctggatgccatcaagatggggcggtacaaggagagcttcgtcagtgcggggtttgcatcttttgacctggtggcccagatgacggcagaagacctgctccgtattggggtcaccctggccggccaccagaagaagatcctgagcagtatccaggacatgcggctgcagatgaaccagacgctgcctgtgcaggtctgacaccggctcccacggggaccctgaggaccgtgcagggatgccaagcagccggctggactttcggactcttggacttttggatgcctggccttaggctgtggcccagaagctggaagtttgggaaaggcccaagctgggacttctccaggcctgtgttccctccccaggaagtgcgccccaaacctcttcatattgaagatg

SEQ ID NO: 2229 - DNA, 489 bp, Homo sapiens
  misc_feature (1)...(489): n = A,T,C or G
agcgcangnnnnattgaancctcgtagtccctagtccgtgtggtggaattcaggaagaaggcactgaccgactacaagaagctgcgggccttctttgtggaggaggaggagcatttcctgcaggaggctgagaaggaggaggggctccctgaggacgagctggctgaccccactgagcggttcaggtcactgctgcaggcggtctcggagctggagaagaagcatcgcaacctgggcctcagcatgctgctgcagtgatggcgccaacccgtggcagtcccagagctggaggcaggaggatggatcctcatctccatgggaagtgtcagcgtgtggctgccagggaagcgtggcaggcgcctggccttgggtccatctacatagttgcgtgtttcaacaatgtccatttatccttcaccccgaggcgtgttttgggggctgcaaacacctcccggtagaggctggacctgaggacccttcccacctgtg

SEQ ID NO: 2230 - DNA, 244 bp, Homo sapiens
gtgaagaccatctgtggcacccccaactatgtggatccagaagtgctgctgatacagggccacagacctgaggcggatgtatggtcactgggctgtgtcatgtacacgctgctctgagggagccctccctttgagactgctgacctgaaggagacgtaccgctgcatcaagcaggttcacacacgctggctgccaacctctcactgcctgcccggcagctgctggtcgacatcctttcggcctc

SEQ ID NO: 2231 - DNA, 438 bp, Homo sapiens
cccgagactcgccgagcgccgttgctgagccctgcaaatagcagctacctgcttcagcctatatcctgccatgaagcggactgctgctccctggctcccactctgatctgcttttcactcttgccttgtctcccaattaataaggaatgtaccaggtcatccagggtatcatctctcctgtcaacgacacctatgggaagaaagacctcgcagcttctcatcaccgagtggccatggcccggctggccctgcagacatccgactggatccgggtggacccttgggagagtgagcaggcacagtggatggagacagtgaaggtgctgaggcatcatcacagcaaactgctcagatctccaccccagatggaaggcccagaccatggcaaggcactcttctcgacccctgcagctgtgcctgagctgaagcttctctgtg

SEQ ID NO: 2232 - DNA, 441 bp, Homo sapiens
  misc_feature (1)...(441): n = A,T,C or G
ntcgagatccctagtccatgtggtggaattccaggtacgcagtgatccgattcaaccagtacttcaaggtgaagcctcaagcgtcagccttggagatgccaaagtgaccagccaccccatccctcccctacccatctgtctggccagacctgttctccagagctcaattctgcactctgggatccacacccttggacagggtgggagaggggacacatgggtgtccagggagaaggctctgtccctgccgccagaccccagtggttgccactgaagacctcattctcctgtctggaggggctgataggacccccttccgggggtccccttcaccccaccaggcttgggaggaagtgcctgcagccaggtcctgaaccataaccacccctgggaaacacatcattcccagcctcaggccctgctggaattggggctgcctta

SEQ ID NO: 2233 - DNA, 431 bp, Homo sapiens
  misc_feature (1)...(431): n = A,T,C or G
gctaaacatcgctcccgcccacccacaagctgggctggacttgaggatcgcggtgggggggcggatgttgtagtggaggaggtggaatgaagagtgagaaagctgtctaggtgcctgtccaattagggcagtaggaagaatcctgatggccaggcagctcttatctcaggtggacatggactgcagggtccacatgcgacccatcggcctgacgtgggtgctgcaactgaccttggcatggatcctgctagaagcctgtggagggagccgcccactccaagccaggtcccagcaacaccatgggctggcagctgatctgggcaaaggcaagctgcacctggcaggggatccccaggcctcagttcccaaaccttacctgaatatccaagaccctggctcacagggttcccctttgccaggaccttgttgtn

SEQ ID NO: 2234 - DNA, 442 bp, Homo sapiens
  misc_feature (1)...(442): n = A,T,C or G
nttcgtagaccctagtccgtgtggtggaattcccatatgaacggcgtcacaggcccggatggcgaggactacagcccgtgggctgaccgcaaggctgcccagcccaaatccctgtctcctccgcagtctcagagcaagctcagcgactcctactccaacacactccccgtgcgcaagagcgtgaccccaaaaaacagctatgccaccaccgagaacaagactctgcctcgctcgagctccatggcagccggcctggagcgcaatggccgtatgcgggtgaaggccatcttctcccacgctgctggggacaacagcaccctcctgagcttcaaggagggtgacctcattaccctgctggtgcctgaggcccgcgatggctggcactacggagagagtgagaagaccaagatgcggggctggtttcccttctcctacacccggg

SEQ ID NO: 2235 - DNA, 431 bp, Homo sapiens
gtttgacatccgtcccatttgggaggccttctcatcagtcattttatgcctttaatgccattctaggtaggcaggaaaggggtcagggccagtgggcccatgtagcagatagggaaactgaggcccagagaggacaagccacttcttcaagaggacccaaactggatgccagacaggccctctgcctctgggattttgcccatatggctcaactggcctaagtctgctggcccaaggaaaaatttcaacccaaccctgccctttcccccattcctctcgtgcaggggagttggcgggcctgcggcagcaaataatagctacgcaggagaaagccagtctagacaaggagctgatggcccaaaagctggtgcaggctgagcgggagacccaggcctctctgcgggagcagtgggcagcccaggaggaggact

SEQ ID NO: 2236 - DNA, 431 bp, Homo sapiens
  misc_feature (1)...(431): n = A,T,C or G
ccagcacccagtaccagtttggggtttgggaagcaggactccgtccctgtccccgactgtgccacgtggtaggacacataggacacaggaattcctgggtccttgcccatgactgtgccatgtggtaggacacaggacacaggaattcctggaaagtggtggcttcagaagtgatcttggctcgcaggcaccagtgccacctaccaagctgtgaaactaaaccttctccactaaacgtcgttagggcctcagttctagacgagtcatacctgattcacctgcactgcttcccccgtgtgctgagcatagagcatacaatagcgcctacttcacggaaacttgtgcctttaaactttgtaaacttaaacacagccgagaagttgcttctttgtactttttctacttttcctactttnttgtagaaaaaaaag

SEQ ID NO: 2237 - DNA, 456 bp, Homo sapiens
tttggaacatagtcaggggggaattcattttgagacttgacaaggggctggtcagtgacacagaggagagcaaagtgcctcactgggaacatgccgttgctggggatagtgatgcccactggtcagtgtttcaagggccaccagcagcagcagtgcacaggcacccattgctaaggagacctgtactctgccctgcccaggaagttcttcatctctgtgtgcatgcagcttagttcctgctccttcagccaagctaacgcggaagtcctagagcatctggaccaagcaaggaagccggcaggagcctctgcactgcctatgaatttgaccaacgggacttgggcctggaaaagagcatcccgaacagtggagaggaagagggagtgaggccctgtggacacagcagaggaatccacaatggatttgcagcaggctggtggaggcagagcagagaaa

SEQ ID NO: 2238 - DNA, 496 bp, Homo sapiens
  misc_feature (1)...(496): n = A,T,C or G
natcgagacccctagtccagagtggaggactttcagagagtttagttgaatcctcaacacagctggctgtatgagctggagttttccacctcatggaactgcaatatattaattcaatcaaaaatagtttacttcctcaagggaagcgaactgattttgttttgtttacctccctcccaccccagcctttcactgtgccaagacattgcctaaatttaatagcttgacattctgggaggccaatggctttcacctgcggagggagtggggcggtcagcaaggggtgcattttcagctcaccgtgctcaagttgagaaagaaagagacggacttgacacctcctaaggctttcaacccagtggagtagaaagccccagacactgcaacattcctgcctggcaagaggtcccctctgtgcctgaactgcactgaactgactccaccccaggctgtgcccgcttcacagtttggtaaacattgacttcccacgatgccc

SEQ ID NO: 2239 - DNA, 469 bp, Homo sapiens
  misc_feature (1)...(469): n = A,T,C or G
nttttgagnaaccctagtccagngnggnggaattcggcgttgtaaggccgtccgctgcaaactggactctgggccgggggcgagcagcccccgggaggacgagtgcatctgttggaccgcgcgacgagaagaaaaaaaatatcggccagaggagaggaactaaccgaacattcttcctccctaccttatagaggggagtggtcatctacactaaagcaaagtgttaggcgcgtccgtgcgaagagaccaccaaacaggctttgtgctccttatcacaggaagacaatattccttgacctttaggcgcttttatattcatctcagaaacaaaattctgaactcaggacttggcaaaccaccgctgaaacttcacttctacacagaggctttctttgccagaaacccagaccagatggagtttcactctgtcgcccacgctggagtgcaatggcacgatctcggctgactg

SEQ ID NO: 2240 - DNA, 488 bp, Homo sapiens
  misc_feature (1)...(488): n = A,T,C or G
atggcgcntnnccccnnnnnttgggggcttcgtannnncctgnntgctncgtannngcgcgnaannngaagngaaggnttgaaattctttatgactgagaggatatttggactattggaagaaaagctcagagtctactgggagattaatatgtaagagtctcaaaaccttttagggaaggaaaatgcagttaagtgctagaagcagggttcctgatctatttgaatccagccaaagaatcctcagaaatttgtaattgatttgctcaagtatgaaatgtagatctgagttggcaaactttccgtaaagggccaagtggtaaatatttttggctttgtaggacattggtctctgtcacaagtactttcaaaaacaggtggcaagctgcattggctcacaggccagagtttgctgacccctgatctacattgtttttccttctaaatattacctgattatcttagcttcttggcaaacatgctaggccg

SEQ ID NO: 2241 - DNA, 492 bp, Homo sapiens
  misc_feature (1)...(492): n = A,T,C or G
agtgcggggnnccnnnnnnnttgggtggcttcgtannnnncctgnntngctacgtagngncgcggaanntcaaaaaggggccaaaaggtgnacttttctttaccacttatgaagtatgacttcactgttactcatgaagaggggtttggccggatgctggggctcacccctgtaatcccagcactttgggaggccaaggcgggtggatcacgaggtcaagagatcgagaccatcctggccaacatggtgaaactccgtctctactgaaaaaacaaaaattagccgggcgtggtggcacgcacctgtagtcccagctactcgggaggctgaggcaggagaattgcttgaatccgggaggcagaggttacagtgagctgagatcacaccactgcactccagcctaccaatagagtgaaactccatctcaaaaaaaaaaaaaaggctttaaaaaaatttggaatttaaaaaatccccttggaccctgttggataa

SEQ ID NO: 2242 - DNA, 564 bp, Homo sapiens
  misc_feature (1)...(564): n = A,T,C or G
gatcacgggggtatggagaagaggcgaacgggaagaaggngaaagagggaggacggagcactcaccaacacacgaaaggggaacgccagcagaaaaaaattttgaaaccactttgaagaccgtcggaaancacagaagggggagggaaagaaaggaactaaaagcccgaaggaaagggaacaggagagtttagaggagatcctagcccacaagaaagagcagagagaggaggaagcggaggaggaagagaaagaagaggatgaggaaaagggggattggaaacccagaaccaggagcaatggccggagaaaggcagctagggaggagaggagctgtaagcagaaaagccaggcaaagaggctcttgggagactcagacagcgaggaagagcagaaagaggcagccagcagtggggatgacagtgggagagatagagaacccccagtgcagaggaagagtgaggacaggacccagcttaagggtgggaagagggtgagtggaagcagcgaggacgaggaagacagtgggaagggggaacccacagctaaaggctctagaaagagn

SEQ ID NO: 2243 - DNA, 441 bp, Homo sapiens
  misc_feature (1)...(441): n = A,T,C or G
ngtcgtagtccctagtccatgtggtggaattccggggccactgcgagccggcggaggctcggcgagggtggcttcccggcggctgtaccgcctctagggagccgagagggacccctgaggtcggagggtcccgggctccaagataagtgtctctgaagtggaagagctcagagctgggagatcggacgcaggtcactgcagccagaggggtccagaagagagaggaggcactgcctccactacagcaactgcacccacgatgcagagcatcaagtgcgtggtggtgggtgatggggctgtgggcaagacgtgcctgctcatctgctacacaactaacgctttccccaaagagtacatccccaccgtgttcgacaattacagcgcgcagagcgcagttgacgggcgcacagtgaacctgaacctgtgggacactgcgggcca

SEQ ID NO: 2244 - DNA, 494 bp, Homo sapiens
  misc_feature (1)...(494): n = A,T,C or G
aggtccggggnnncnnnnnnggctgggtccttcgtannnnncctanntngctncgcangngncgnggaantccttgnacttttttgctgaatttagcttcttgtagttttaacttattgctatgttaactatttattctccgcggtgccctgtaaggacatgggtgtatatttctgttacttcatccggcttgcaagttaaaggaacgacaatgttctctttgtttctttaagttttgccgagacatggttatgcctaatttatttataaaaggggaagtggaatcattaaagtaataataattattaataacagtaatggtagccgagtggcacgcgggggcgtgtgctctgcgggacagtccccacggccagcgacgtccaggtcaccaatgggattctttttgctcttgtcttgagaattttttcagtcctatttagctggtgaaatccctagcttgttcttgatacacgaacctatttattctcgtggtg

SEQ ID NO: 2245 - DNA, 494 bp, Homo sapiens
  misc_feature (1)...(494): n = A,T,C or G
agggcggnnnnnnnnnnntttcagttaccatcgnannnnttagtnangcancgcaagngccgcggaantcgacaggcgctgctgcggctggtggtggaactcgtccaggagctgcggaagcaccactcggcggagcacaagggcctgcagctcctcgggcgggactgcgccctgggccgcgcggaggcggcggggctggggccttcgccggagcagcgagtggaaattgttcctcgagatctgaggatgaaggacaagtttctaaaacaccttacaggccctctttattttagtccaaagtgcagcaaacacttccatagactttatcacaacaccagagactgcaccattcctgcatactataaaagatgcgccaggcttcttacccggctggctgtcagtccagtgtgcatggaggataagcagtgagcagaccgtacaggagcagcacaccaggagccatgagaagtgccttggaaaccaacagggaaact

SEQ ID NO: 2246 - DNA, 449 bp, Homo sapiens
  misc_feature (1)...(449): n = A,T,C or G
tttgagccatgagactgtcgnggaannccgancgatatcctagtctccaatgctgctggcaaccctttctttggaagcataatggatgtcactgaggaggtgtgggacaagactctggacattaatgtgaaggccccagccctgatgacaaaggcagtggtgccagaaatggagaaacgaggaggcggctcagtggtgatcgtgtcttccatagcagccttcagtccatctcctggcttcagtccttacaatgtcagtaaaacagccttgctgggcctgaccaagaccctggccatagagctggccccaaggaacattagggtgaactgcctagcacctggacttatcaagactagcttcagcaggatgctctggatggacaaggaaaaagaggaaagcatgaaagaaaccctgcggataataaggttaggcgagccagaggattgtgn

SEQ ID NO: 2247 - DNA, 453 bp, Homo sapiens
  misc_feature (1)...(453): n = A,T,C or G
natcgagaccattgagactgtcgnggaanccggaagagctagtattctcaattggcaagggattgattcttcaatgggttcagcatttttcttccctctgaaattaagtggcaaagtaatagcatcccttaaaaaacaggacattggtgagaggtagaatagcaggaggaattttgaaacatggagggatggctactggaaaagaactgatgaagtgcagagtctctccagacaatggtagaaaccacaggactacattaagattgggcccaaatactagtttagaaaaaggtaaataaaactagctttacttaagagtacagccagcttaattactggctagtggacatatttcagacaaatctaactggagagaaaaacagaccaggagagaaagcgaagttacaaggaaatggaactagagaaacctcacaaagggataaaggaggtaat

SEQ ID NO: 2248 - DNA, 434 bp, Homo sapiens
ctaattccccaccgatgttcccatggaaacactagaggccgggtgtctccttccacctccagtgatctgggaagtgacccagccgcctgcccttgttaagcctggtctgccccgtgggaagtgacttcatgttgcacatgtgatttcagcccccgaggcttgcgcgaggcttctggaccctcggttaaaggtcagcccctggccgggtgcggtggctcacgcctgtaatcccagcactttgggaggccaaggcgggtggatcatggagtcaggagatcgagaccatcctggctaacacggtgaaaccccgtctctactaaaaatacaaaaattacccaggcgtggtggcgggcgcctgtagtcccagctactgaggaggctgaggcaggagaatagcgtgaacccgggaggcggagcttgcagtgagccaagaa

SEQ ID NO: 2249 - DNA, 495 bp, Homo sapiens
  misc_feature (1)...(495): n = A,T,C or G
tgtgtgtcnncctggatccctngcagnggcgggaactgataaccctcgccagccctcacccagcagcagcttcaatgagggtctgctcactggtggccacaggcatcaggagatggaaagcaggttaaaggtgctccatgcccagatcctggagaaggatgcagtgatcaaggtccttcagcagcgctccaggagagaccctggcaaggccatccagggctccctgcggcctgccaagtcggtgccatctgttttcgcggctgcggcagcaggaacccagggctggcaagggctctcttctagtgagcgacaaacagcagacgcccctgctcggctgactacagcagacagagcacccacagaggagccagtggtcacagctccccctgctgcccatgccaaacacgggagcagagatgggagcacccagactgacggccccccagacagcacctccacctgcctgccaccggagcctgacagccttctggggtg

SEQ ID NO: 2250 - DNA, 500 bp, Homo sapiens
  misc_feature (1)...(500): n = A,T,C or G
ggtgntnnncctgattcccttgagnggcngncctgagaccctaggccangncgnggaattcctctgcaagccaatgacgtgttccacaagcagcagtggttcaactgtattcgagcggccattgcccccttccagtcggcaggcagtccacctgagctgcagggcctgccggagctgcacgaagagtgtgaggggaaccacccctctgcgaggaaactcacagcccagaggagggcatccacagtttccagtgttactcaggtagaagttgatgaaaacgcttacagatgtggctctggcatgcagatggcagaggacagcaagagcttaaagacacaccagacacagcccggcatccgaagagcgagggacaaagccctttctggtggcaaacggaaagagactttggtgtagagaaggctctgtgtgttaactgatgggagagactgtttgtttataaatgtgtacagttttgttttctcgtaaggggagcatcatan

SEQ ID NO: 2251 - DNA, 455 bp, Homo sapiens
  misc_feature (1)...(455): n = A,T,C or G
atcgagctactatnaccctacgcaagngccgnggaattctgcagaaggagcaattaggctgcctgcctgtgggctgggagacagggacaatggggattagttaaggagcaaaatgggggttggaagcaaaaaatagggccccacctatttaggacgagattgaagactgacccttgaggcacacttgcactggagatgggtttatttcacgctctgtgcttgtgtgctagcggagggagagctcagggtggcttaatccagaggccctgtcatggcccgcccccagccatgggaaagcaaacttcatcctaaggtgtgcagcccaggccctgcccctttacagtctaggccgcctgccatggggtgcagcctctccaggggctgcgtcagacttgcacgctgcccacatccagattcctgcaaagacgaattgggtgcacagcaccccaaccact

SEQ ID NO: 2252 - DNA, 499 bp, Homo sapiens
  misc_feature (1)...(499): n = A,T,C or G
gggtgctcnnnaattggattccctttgnagngngccggaactgattaccatgtataatactacaagttttgtgtgtgtgtgtgtgtgtgtgtgtgtattgtgtaccttgtggccttttgtccagtttctgcaacacctgacgctgaggcaagtttaatgtaaataacgtccagcaatcttagaaatgttgacttttatttgcccatcgggaaaaaaaaggtgaatgttattgtagaggaaattttcattctggaaaaaatgcctactgtttgaatattactttcatgctttccacagatattatacacagatattatattgcaaggattatgtttcaaagtcatcaaaaatagaaaattcattttatatttctagctgaaaataataacagtaattagcctacctttggggaaatgtgataaaaatactaatgaccatcacaactcattaaaagcataaaatgtgcaatgatttacactacatgttctttctatgaatc

SEQ ID NO: 2253 - DNA, 507 bp, Homo sapiens
  misc_feature (1)...(507): n = A,T,C or G
tggggccccnnnnnaagggcgcccaatagaaaacccctcnatagangaccactagtccagagcggtggaattcgttcccttcacggagaaagattttgagaatggcccccagaacatatacaacctttacgagcaagtcagctacaactgtttcatcgctgcaggcctttacctcctcctcggaggcttctctttctgccaagttcggctcaataagcgcaaggaatacatggtgcgctagggccccggcgcgtttccccgctccagcccctcctctatttaaagactccctgcaccgtgtcacccaggtcgcgtcccacccttgccggcgccctctgtgggactgggtttcccgggcgagagactgaatcccttctcccatctctggcatccggcccccgtggagagggctgaggctggggggctgttccgtctctccacccttcgctgtgtcccgtatctcaataaagagaatctgctctcttcaaaaaaaaaaaaaaaaaagcg

SEQ ID NO: 2254 - DNA, 510 bp, Homo sapiens
  misc_feature (1)...(510): n = A,T,C or G
tgggtttnnnnaattggattccctgggcanngncnnnnaactgattanctntacganagngncgnggaattcgaaaggagtagctctgtttccactattgacactgcccggctgattcaagcttttggccatgaaagagtatgcttgtcacccagacgaattagattatatagcagcatcaccaaccaacagaggagataccttgagaagcggagcaaacacagcaagaaagtgctgaatacaggtcatcccctagtgacttctgagcacaccagaaggagacacatccaggtagcaaaccatgtgatttcttctgactctatttcctcttctgccagtagtttcctgagctcaaactctactttttgcaacaagcagaatgtacacatgttaaacaagggcatacaagcaggtaacttggagattgtgaacggtgccaaaaaacacactcgagatgttgggataactttcccaactccaagttccagcgaggctaaattggaagagaaa

SEQ ID NO: 2255 - DNA, 563 bp, Homo sapiens
  misc_feature (1)...(563): n = A,T,C or G
tgcgctatactgacgtcaggagtcgtacaacgtgtggctgcgtaggtgcgtacgacgacctatgtattatctcacgcagaggagctagagacaacaagcttgacnacctttgattccntcggacangcggaggaattcctcctcgcttgctcctgccgggcgtgcaaggccccgccgccgccatgtttggctcgttttatctctcggtgcaggatctcagcgacctgctctcggacggcagcggctgctacagcctcccgagccagccctgcaacgaggtcaccccgcggatctacgtgggctacgcgtctgtggctcaggacatccccaagctgcagaaactaggcatcacccatgtgctgaacgcggctgagggcaggtccttcatgcacgtcaacaccaatgcctacttctacaaggactccggcatcacatacctgggcatcaaggccaacgactcacaggagttcaacctcagcgcttactttgaaagggctgccgacttcattgaccaggctttggctcaaaagaatggccgggtgctcgtccactgccgggaaggg

SEQ ID NO: 2256 - DNA, 460 bp, Homo sapiens
  misc_feature (1)...(460): n = A,T,C or G
ntcctgagaccacttgaaagccttgnggaantccaggctctggcgtccggctgtggacggcttctccgtgggctactatcgggcccgtttgcgaccatttggtctcggcttccagctcgcgggttcagggaagtggtggagacccaccaagggaagacaactataattgaaggccgtatcacagcgactcccaaggagagtccaaatcctcctaacccctctggccagtgccccatctgccgttggaacctgaagcacaagtataactatgacgatgttctgctgcttagccagttcatccggcctcatggaggcatgctgccccgaaagatcacaggcctatgccaggaagaacaccgcaagatcgaggagtgtgtgaagatggcccaccgagcaggtctattaccaaatcacaggcctcggcttcctgaaggagttgttccgaagagcaaaccccaat

SEQ ID NO: 2257 - DNA, 435 bp, Homo sapiens
atcgcaataagtacccagagcgcgggaagtcaaattcattgctgccaaaggaccaaaaaaggctgcctgtctgccaagaggtgacccagagcctgggtccaggcacctgcatgttctcacgcccgccacagcccgtccctcccaggctctgggaccctgggtcctcagctgtgatggcacaattgctccaagcattccccagcaccaaaccccagtgaagtcagattcttccagtgaagacagattctcctggcctttcctgggtcccgcgttcagactacctttgggttccccagcctctcggaggctgctggctggcgcgccaaggtttgaggtatactgaaacatagcattcctttgtccgcacattgccttattccttcatcttttacaagaatgagaggccccatatctgctctcaagcccacacgctcg

SEQ ID NO: 2258 - DNA, 475 bp, Homo sapiens
  misc_feature (1)...(475): n = A,T,C or G
ntttgagtccctagtccagtgtggtggcattcgtctcagccgggccgggccgttccgtggagttcctacagccgggaggagccggggggataaggcgccactgcgaggcccaggcccggcctgtcgggcgggtctcccagaaagccacaggagtcattgtattagaagaaggtcttcactcgggcgcttgaagatatggtctttacatctctttccagtattccaggggagggaaccctacctgtttccctgataactgacttttcatgttatatattgatgctcctatagacattatattggatcccagaactttccaaacctgtggttccacctaaaattttatctgatgaattgttactttactgcctagctgccaaccagtacagtagtgagtatccatcttacttagacttcagatccacccatggctgtaatggatgaacatgccacccagctccccttccaccactct

SEQ ID NO: 2259 - DNA, 478 bp, Homo sapiens
  misc_feature (1)...(478): n = A,T,C or G
tgagccgagnccaatgagacttgatgatgnctgtcgaaccaccgnngaacatgggaagacgtgaagaagaaataatctgagctttaattatttatatttggatataaggtctgcttaaataaagaatctttgtaccaaactgcccacatgagggtgaagagatttcctcaaaagacttaaatgacctggattgatcagagagaattgaactgtgacctttaaaacttctagactaattcttttagttgatagagattcatttagtcaaagacaaaagctttaactgtgagggcacagccttgaagtgggagtgatgagattctgagggacccatgaattggattgaggcttgaggggaaatggtgtgagacgaatgggctctggacatatgcctgttgatttgagaagaaatctggctggtttgagggttttctttagttcaccctcatactctcaggagactcttctggatcctttn

SEQ ID NO: 2260 - DNA, 465 bp, Homo sapiens
  misc_feature (1)...(465): n = A,T,C or G
ngaggccggctgnnnnnaactgactgcatncatnggcnggacnccggggtggatccttttcccgagaccctctaccagaaggacagccagggaaagctgttcagaaacatcctcaaggaaaaggggatcgtggtgggaatcaagttagaccaaggaggtgctcctcttgcaggaacaaacaaagaaaccaccattcaagggcttgatggcctctcagagcgctgtgctcagtacaagaaagatggtgttgactttgggaagtggcgtgctgtgctgaggattgccgaccagtgtccatccagcctcgctatccaggaaaacgccaacgccctggctcgctacgccagcatctgtcagcagaatggactggtacctattgttgaaccagaggtaattcctgatggagaccatgacctggaacactgccagtatgttactgagaaggtcctggctgctgtctacaaa

SEQ ID NO: 2261 - DNA, 259 bp, Homo sapiens
  misc_feature (1)...(259): n = A,T,C or G
atgaggntgctggatgtgtttcaggggggcttgttaggagcagggttcggggcaataaggaggatatctccacttaaaacaaacctgccctgcccttccaggtacctgactacctagaccacatcaaaaagcccatggactttttcaccatgaagcagaacttggaggcttaccgctaccctaattttgatgattttgaggaggacttcaacctcatcgtcagcaactgcctcaagtataacgccaaggacaccatctt

SEQ ID NO: 2262 - DNA, 487 bp, Homo sapiens
  misc_feature (1)...(487): n = A,T,C or G
catagagaccctatgaggncgtggattccggggatccttgagaacatccagaggaacaagctgctctttattgagacccaggatggtgccgaaaccagtgtcgccctggagaagtaccaggaggcctgcgagaatggccgcggggccatcctgctgtcagtggcccggggcaaagtgtccgagggaatcgactttgtgcaccactacgggcgggccgtcatcatgtttggcgtcccctacgtctacacacagagccgcattctcaaggcgcggctggaatacctgcgggaccagttccagattcgtgagaatgactttcttaccttcgatgccatgcgccacgcggcccagtgtgtgggtcgggccatcaggggcaagacggactacggcctcatggtctttgccgacaagcggtttgcccgtggggacaagcggnggaagctgccccgctggatccaggagcacctcacagatgccaacctcaacn

SEQ ID NO: 2263 - DNA, 462 bp, Homo sapiens
  misc_feature (1)...(462): n = A,T,C or G
tgcgnntgnnnnnnaattgagttgcctagcaattgncgnggacttcggagggtctcttgaggccaggagttggagaccagcctgggcaacatagtgagaccctcgtctctaaaaaattacaataaaaaatatttttaaatccaacccgaagcccttttgcccttctgctgctgctgtttcattcagctcaatgcccttggctttggagactgtacactaagagctcagtcagtggccccaacagcttcctctgaatccttcagctttccagagtcactcttccaggaagtcttccctgtctgctttcctcctcacccccaacccccatttcttctgaggcaatggcagggtaggcagtgagatgctgaagccacccagactccccatccctgtccaaccaggagatctgtctggctcctttgtttcttattaaataaaattctgtcttctattggttcaaag

SEQ ID NO: 2264 - DNA, 464 bp, Homo sapiens
  misc_feature (1)...(464): n = A,T,C or G
cgtggcggnnnnnnctgaactgcatagcntaggccgngncgnggaattccgagaactagaagaaagagaagaaaaattaaaaaagaggccactgctatttgatttagtttctcagaaaaatgcaagaatggcagcagaaaagcattattctaataccctaaaagcactaggaatatctgatgagtttgtttcaaagaaaggccaaagtggaaaagtacttgagtacttcaacaatcaagagacgaaaagtgtcactgaagacaaagaaagctttaatgaagaagaaaaaatagaagaaagagagaatggggaagaaaattattttattgataccaacagccaggattcttacaaggaaaaagatgaagccaatgaggaaagtgaagaagagaaatctgttgaagaatcacactgaatcatcaaggtctcctctctatgcccttgctgttgtttgcagcgtcagg

SEQ ID NO: 2265 - DNA, 520 bp, Homo sapiens
  misc_feature (1)...(520): n = A,T,C or G
aggtttttttaggggtgtncccngnnnaggggnnnngacctcgaganccnttntgcattngagtgccattccgacgacacgcgggcacctacgtaaacacacatgcgatgctcatgtaaacaaacatccatgcacacactgccacccaggtacacacacccgagaatgtgtgtgtccctgtacgtgaacccgagtgtgcccacgtacacgtacccaactgtcctcatgtacacgtacccgagtgtgctcacgtatacgtacccgagtgtgctcacgtacacgtacccgagtgtgcccatgttcatgtatccgtgtgtgtacgtacccgagtgtgtgtatgtgcctgtgtgtacgtacttgagtttgtgcccatgtacgtgtacccgagtgtgtgtacgtgcctgagtgtgtgtacgtgcccaagcacaggcacattgtccagatccacataacactccttctttgcagttgctttctccacacacagagtgtcccccatctctccaggttacacactggg

SEQ ID NO: 2266 - DNA, 480 bp, Homo sapiens
  misc_feature (1)...(480): n = A,T,C or G
gaggccccnaattgagaccatggacatctggtggaattccgcagccagccagaatgttccattcattcctctgagtcattcaggcaaaggcttaagagggcctgccgtgggcaggaggttaggaggctccagggagcaagcgccgtgcagacaccaggctgtgggtggcgggcagaccccagggggctttggtgaggggcccaaggccatcaggactggctctgagcacccatcgtggtcccttggaaggaggttcaggtccagctggatgcctgaggctgttggctgcagaacagcatccctgggttgccaatgccaccgggcactgatggcccgtgttgctgagaccctgcggcagaggcggaggagccttcagacctctggtggacagagtggtggtcggggcccagccgggagcacgaggctgctcttccgtgttctgttcattaggggtcgacacaggcagccagatttcaagag

SEQ ID NO: 2267 - DNA, 481 bp, Homo sapiens
  misc_feature (1)...(481): n = A,T,C or G
gaggtccccnaatcgagaccattggaagtctggtggaattcccccgtaccacctgtatccggcctatggctgggtgatgttcgtcgctgtcttcctctggctggtgacaatcgtcctcttcaacctctacctgtttcagctgcacatgaagttgtacatggttccctggccactggtgttaatgatctttaacatcagcgccaccgttctctacatcaccgccttcatcgcctgctctgcggcagttgacctgacatccctgaggggcacccggccttataaccagcgcgcggctgcctcgttctttgcgtgtttggtgatgatcgcctatggagtgagtgccttcttcagctaccaggcctggcgaggagtaggcagcaatgcggccaccagtcagatggctggcggctatgcctaaaccacctgtgccacggccccctctggggctgaagccgccgctgggtcacagagcanggtcaca

SEQ ID NO: 2268 - DNA, 485 bp, Homo sapiens
  misc_feature (1)...(485): n = A,T,C or G
agagggccccnaatcgagaccatagagancactaggcagtgcgctggaataccggagagggcgcccacggcatcgttttcaaagccaagcacgtggagactggcgagatagttgccctcaagaaggcggccctaaggcggttggaagacggcttccctaaccaggccctgcgggagattaaggctctgcaggagatggaggacaatcagtatgtggtacaactgaaggctgtgttcccacacgggggaggctttgtgctggcctttgagttcatgctgtcggatctggccgaggtggtgcgccatgcccagaggccactagcccaggcacaggtcaagagctacctgcagatgctgcttaagggtgtcgccttctgtcatgcctacaacattgcacatcgggacctgagacctgccaacctgctcatcagcgcctcaggccagctcaagatagcggactttggcctggctcgagtcttttcccca

SEQ ID NO: 2269 - DNA, 457 bp, Homo sapiens
  misc_feature (1)...(457): n = A,T,C or G
catcgagcccctatcgagnacactaggccanngcggggaattcctgccccacgtgatgcaggtggtgacgcangacggcacgggggcgctgcacaccacctacctccagtgcaagaatgtgaatgagctcaaccagtggctctcggccttgcgcaaggccagcgcccccaacccgaacaagctggccgcctgccaccccggtgccttccgcagcgcgcgctggacctgctgcctccaggctgagcgctcagccgccggctgcagccgtacacactcagctgtcaccctgggggactggagtgacccactggatcctgatgctgaggcccagacagtgtatcggcagctgctcctggggcgggaccagctcaggctgaaattactggaggattctaacatggatacaactctggaggcagacacaggggcctgtcctgaggtcctggcccggcaaaga

SEQ ID NO: 2270 - DNA, 481 bp, Homo sapiens
  misc_feature (1)...(481): n = A,T,C or G
gagggccccnaatgggaccctggaagtcgggtggaactcccctcggctgttccggtgaaaagttgagccacctttggaagacgcacgggtggagtttgccagaagaaaggctgtgccagggccgtgtttggctacaggggctgccggggctcttggctctgcagcgagaaagacacagcccagcagggctggagacgcccatgtccagcaggcgcaggcctggcaacacgggccccagagtcctgagcagcagttaggtgcatggagagggtatcacctggtggccacagtcccccttctcacctcagcaatgatccccaaagtgagaggtggctcccccggcccccaccaccctcagcagccccaccccactcaaccctgagggtccccagggtcctgatgaagacctccgaccccagcgccaggctcctcggagcccaacagtcccaaggaggcagtgttgaggggtacagccctggcg

SEQ ID NO: 2271 - DNA, 517 bp, Homo sapiens
ctctccgtcctcccccttctgtcttctcctgtatttatgcgatgagtactcttccacaccaaacacattgatacactagccatttgatgtcattcctgccacttcaccctcgcctgtggtccacttacgttccactcagcccgggcaggcctgctttgatcttctccaccgccttggtctcccgtgtgtcttatctagctctgggtccttctcgtctccacatttattttgttttcttcctgtgcttgctagtccttgtgcacttggtccttgagctctttttctattaataggcattactagatggacttgttgtctgcctttacatagaacacacatccttactgtgcatttcctgggtagccaggatgaatcaattattattaacttcccttcgaacattgagcttcctctgttttctgtttctaagaattagattagtattctagaagactaatactactttatagacagtcaaaacagtcatacgctggcatttcagccctttatttaagag

SEQ ID NO: 2272 - DNA, 486 bp, Homo sapiens
  misc_feature (1)...(486): n = A,T,C or G
ngggaggccggntcaactgagagacganaactaacgaagnngcgtggaattcgccacctcagccagcccccgcccagctcatcagtctgaatggagttgccttaaattggcaggtggtaccgtactcactgcccttggagctgagaccggctcctgcctgtccaccccttcccgaggtggctcctgcttaccttatcatcccagggctctgaatagccaggcctggtcagggtcctggggacggcacccagatatgcagagtcaccctgacactggtgccaggctgacctcagctcccgaaggctcgcacagactccccatccttccttcccagcccttgtggctctgtccacctgatcccaataccagcttcccccagcccctgccaccccagagggcggccacgacagggagaggtgtagatgccaccatctgacggagaggaacgtggaacaggagcaggctccgatgctgagaggctcgcct

SEQ ID NO: 2273 - DNA, 465 bp, Homo sapiens
  misc_feature (1)...(465): n = A,T,C or G
atagatcaccattnnnnnnttttgatgaccctctagtccagtgcggtggaattcggaggacggggagaagctggccaaggagtatggactgcccttcatggagaccagcgccaagacgggcctcaacgtggacttggccttcacagccatagcaaaggagttgaagcagcgctccatgaaggctcccagcgagccgcgcttccggctgcatgattacgttaagagggagggtcgaggggcctcctgctgccgcccttgaacctggctgagctcagtcctctggaggaagccgcccagtccctagaaggctggacagagggtctccaggcccttctgactttgttgcccagtggccaacgcccgagtgtctgttttcaggagccccagggcaagccttgtcccttcctcctcccagcaacaggtccaacaagcaggcttctgagagcccgtgggccgacacttgcc

SEQ ID NO: 2274 - DNA, 458 bp, Homo sapiens
  misc_feature (1)...(458): n = A,T,C or G
agtcgagatcactagnccagtgngaggcattccctgtctgcagatgctgcgggaaatcacagatcaggaacacaacgtggtggcactgaaggaggccatcaaggacaaggaggaacctctgcacatatcccagacccggctgtagctgctctcacaccggcccaacatgcagctgtgccgcgatgcagcccagttcaggtactgcctgggcctctgaggcagtcccaggtgcccccatccacctcctcgctgcgaccctctccaataaacactccaatctccacacacacatcccccacaggtgctgagaggggagggagactctgcggccacacacaacatgcaagcacgccttaaacacacagatatagacatgacactgggcaggtcatgggtcgggggcctccccgtgccagggacctgtgcccacgtggtctcaccccaccctgtgctacctc

SEQ ID NO: 2275 - DNA, 482 bp, Homo sapiens
  misc_feature (1)...(482): n = A,T,C or G
cgggggccaaaagttannaacctgagaccccnttaaagngctgcgcanagcgcngaantagntatntnccggtcagctgggaggctattcccaatgccaggatcgagctgcaggagtgggagcatgtgacctgcatgaagacagtgtctgtgcgcagtgaggagaccgtgtcgggcctcaaaggctacgtggccgccgggacctgcctcatgcagggggaggaggtcacgtgccgagggcggattttcctgtggagcctgcgggccagcgagctgacgggcatggccttcatcgacacgcagctctacatacaccagatgatcagcgtcaagaacttcatcctggcagccgacgtcatgaagagcatttcgctgctgcgctaccaggaggaaagcaagacgctgagcctggtgtcgcgggatgccaagcccctggaggtgtacagcgtggacttcatggtggacaatgcccagctgggtttt

SEQ ID NO: 2276 - DNA, 485 bp, Homo sapiens
  misc_feature (1)...(485): n = A,T,C or G
agagcggntnnnnncaactgagnactaacgcagtgtcgaggaactcgactgatctcttctctgtgaccagacctgcgaccgcatcaagcagtccgccagcggaaccaagcggcgcgtgttcatcatcgagaccatgggcggctactgtggctacctggccaacatgggggggctcgcggctggagctgatgccgcatacattttcgaagagcccttcgacatcagggatctgcagtccaacgtggagcacctgacggagaaaatgaagaccaccatccagagaggccttgtgctcagaaatgagagctgcagtgaaaactacaccaccgacttcatttaccagctgtattcaaaagagggcaaaggcgtgtttgactgcaggaagaacgtgctgggtcacatgcagcagggtggggcaccctctccatttgatagaaactttggaaccaaaatctctgccagagctatggagtggatcactgcaa

SEQ ID NO: 2277 - DNA, 483 bp, Homo sapiens
  misc_feature (1)...(483): n = A,T,C or G
cgatggccannagtagnaaaccctgggaccccnccaaatngcttcgcannaccngnaantnantcctttgctgggggctcagcccttcacatcctcattcttatactgcttttcgtggccactttggacaagtcctggtggactctccctgggaaagagtccctgaatctctggtacgactgcacgtggaacaacgacaccaaaacatgggcctgcagtaatgtcagcgagaatggctggctgaaggcggtgcaggtcctcatggtgctctccctcattctctgctgtctctccttcatcctgttcatgttccagctctacaccatgcgacgaggaggtctcttctatgccaccggcctctgccagctttgcaccagcgtggcggtgtttactggcgccttgatctatgccattcacgccgaggagatcctggagaagcacccgcgagggggcagcttcggatactgcttcgccctggcctgg

SEQ ID NO: 2278 - DNA, 484 bp, Homo sapiens
  misc_feature (1)...(484): n = A,T,C or G
ngaggggccccnnaatcgagaccttaggaagtctggtggaattccctgtacccgccgccatccgtcctggcgctccggatgagtcaatgaggggcagggcccgaggagtggtcttcccaagaacccctggtggcctcccaaggccggcgctgtgtacctcctccccgacaaaaggggaaactgaggccccgaggggagtgggaagagccggctggacgtcaggcccagccgctggtgcagtggtccgtcccctctgccggagtgggcccctcgggtttcgcgtgtcctcgggaaagagactggcgggcctcgtgggctgcgcggctatcctggagacagatgacagctctcccttggatggctttgctggatgcgcaccagccagcgcccccatttttcctgcagcaccctgatctgcactccctgaggggctcccactgtccgcggtgtgaggatgtccctggatagtccactgtgtgcagag

SEQ ID NO: 2279 - DNA, 495 bp, Homo sapiens
  misc_feature (1)...(495): n = A,T,C or G
tggggtgcacnnnaggtagggccagccttgagnaccccngccttttgagctntgcacangccncgnaantnannagagaatagcagaaccccaggaattaggagggtgaagtcctaatcctactgctccctctgcacaaggtcgtcttggttctttctattcgttgggcttcagtttcctcatatggacaacgaggattgaactagatctgtggttttcaaacagggttccagggaaatctggcagaggtacctcaggggtgaaggggccccatgcccttccctgtttcatctaaaaatagggaactcctttcccaggcggctgccgaagatggcagaggggcaggtcccggtgctcaatggtcaaagctatctcctgggcttcctgagggccatggtggctaagcaggccggaagttggtggtcgtacactgcgggggcatcagtatttctggcaatgtctatagaaagaagttgaagtacctggccttcctcc

SEQ ID NO: 2280 - DNA, 474 bp, Homo sapiens
  misc_feature (1)...(474): n = A,T,C or G
agtatgtannaactgatnaccttgactgagtcgctagaaagngcggnggaattcgtcaacactggcacctgcagatgaagtggcagagcagcccccagctttgatggcatggggtggttggggggcacattctgcatgctcagaagagagagcaactcgccctgtggaaggagcatacagtgggagatggggacaggcccagtgacgagcaccatccggaagtgaaggctgatgggtacgtggacaacctcgcagaggcagtggacctgctgctgcagcacgccgacaagtgatggcctcctgggagagccccgcctcctccacccctgcctctcctccacccctgcctcccctccacccctgcctctgctccacccgcccaggagagccccacctcctccacccctgcctctccttcacccctgcctcccctccacctgccccagtgcccagaccaaccaaggccctgacagg

SEQ ID NO: 2281 - DNA, 484 bp, Homo sapiens
  misc_feature (1)...(484): n = A,T,C or G
tgagagccannagttgnnaanctagggacccnnttaaagggctnngcanngacggnaannntngcattctgggggctcccggtcagcctgtccgagccgatgactgcagctcccactgtgacctggcccacggctgctgtgcacctgacggctcctgcaggtgtgacccgggctgggaggggctgcactgtgagcgctgtgtgaggatgcctggctgccagcacggtacctgccaccagccatggcagtgcatctgccacagtggctgggcaggcaagttctgtgacaaagatgaacatatctgtaccacgcagtccccctgccagaatggaggccagtgcatgtatgacgggggcggtgagtaccattgtgtgtgcttaccaggcttccatgggcgtgactgcgagcgcaaggctggaccctgtgaacaggcaggctccccatgccgcaatggcgggcagtgccaggacgaccagggctttgc

SEQ ID NO: 2282 - DNA, 482 bp, Homo sapiens
  misc_feature (1)...(482): n = A,T,C or G
ctcgatttgcatacccangngagggaattcgtgaccctcattgagcagcgcatcgctatcatcaactgcctggatgaggaccggcagatggaggaagaggaagacacgatgttggaagccatgatcaagaacaaagagttccagagggaggctgaacctgatggcaagaagaaggggaagttcatgaccatgaagatgttgaaactgctaggaaacaaacgtgatgccaagagcaagtcccccagagacatgagctaacagcacgagaagccagttggggactgtcccctcctggagcagctcctgggctgtgctctgtttgaagggggcgccctgctcccctcagatcagtcaggaggaagatgactaaggggagggatcctttgggtgatggccttttcctccttagggacctttgactgctctggcgaaagaatctcttgtttgttgtacgagccacaggcagcggtgattcagccctg

SEQ ID NO: 2283 - DNA, 484 bp, Homo sapiens
  misc_feature (1)...(484): n = A,T,C or G
ngagcggccncnncccccagggnccaggcgncatcncgaagaacnccnaaaacaaaaaaacttaccattaggagggcagttagttgagagagatatgtttattattctgtgatagctaggataattatctgtgatgctagaataaatatatttcctggtagacattaaggcaagtctgtagaaattctaataatctacagctcttattttcccacctgagaataatatgttatctgacctctaaactatatacagtgaaaaagttgggggggaatgtaaaagaattactatggatgatgtagttcatgggtagaggtagggagtgggtaatgaagtatttcacttaactgttaaatgctcatgcctataatcccagcactttgggaggccgaggtgggcagatcaccttacgccaggagtttgagaccagcctgaccaacatggagaaaccccgtctctgctatagatacaaaattagccaggt

SEQ ID NO: 2284 - DNA, 472 bp, Homo sapiens
  misc_feature (1)...(472): n = A,T,C or G
ggtagtgnnaactgatgacccnctgagtatcctcgnacagngcggnggaantctgaaactccatctctagaggtttatgttgctgtcctctcaagagattccagattcatactgagttctgtggctgtgggcaaaagccaacaaagacccaaatcctctgtccttgggagcttgaggagagtttaccggttcgtgttcccattatgtctgagaactttgcctttaaaatccattcctggcccctgcctaccgcttcctgatctggggaatagagttgagggggccaccctccatcaccttatttgactctccccacagaaacaacagaagaaacaagtggaacatcagctggaagaagtaacgtgatttcgtttcctcgcgacatgactgctgggtttggggggcactcagacatagaggccccagtctcgtctcacccactcccagcctggggaagaaggctcacccctcn

SEQ ID NO: 2285 - DNA, 467 bp, Homo sapiens
  misc_feature (1)...(467): n = A,T,C or G
ggaagtccncctgatgacactttgattgccgtgggaaancccgncncgccgncccgcgcagtacccagcccggccccgccgacccgcctctactgccggctccgcgctcttccccgagggctggatgatgggctgtttcgccctgcaaacggtggacaccgagctgaccgcggactctgtggagtggtgcccgctgcaaggctgcaggcacctgctggcgtgcgggacctaccagctgcggcggccggaggaccggcctgccggcccccagaacaaggtgtcacatcccggtggctggacatgccctcttgggcttggcagatgccagtggatccatacaactgctccgcctggtggaatctgagtagaagagccacgtgctggagccattgtccagccttgccctggaggagcagtgtctggctttgtccctagattggtccactgggaaaactggaagggccggg

SEQ ID NO: 2286 - DNA, 492 bp, Homo sapiens
  misc_feature (1)...(492): n = A,T,C or G
ggatgataanaattgantccctttccanggcnggacctgattgcatcctgactgacagcaggtccttggaggtcatgtctcatggtcccagggctggtggttgctttgggtctacagctacgtcttacccgcctcctgcctcaacagcctgtgtggtggcaaagccggtgtggggctggggaacgcagcgttctccaggaggggacccggctctccttctgcagtgcaggcgaaggcctagatgccagtgtgacctcccacaaggcgtggcttccagactccccggccggaagtgatgcttttttgccgcgggccctgggtttgaagcagcctggctttctcttggtaagtggctggtgtcttatcagctgcaatctgagctcagccacctacacaccaccgtggccgacactttcattaaaaagtttcctgggnnannnnnnnnnnnnnnnnnnnnnnnnnnnnnnnnnnnnnnnnnnnnnnnnnnnnnnn

SEQ ID NO: 2287 - DNA, 481 bp, Homo sapiens
  misc_feature (1)...(481): n = A,T,C or G
nggaggctccncnccctggaactgncagcatacgaagaacnccnactcaaccctgccctcccccgtgctttgcagacgccgcccgggggcccaggcggctgatgcgtgtgggcctcgcgctgatcttggtgggcgcacgtgaacctgctgctgggggccgtgctgcatggcaccgtcctgcggcacgtggccaatccccgcggcgctgtcacgccggagtacaccgtagccaatgtcatctctgtcggctcggggctgctgagcgtttccgtgggacttgtggccctcctggcgtccaggaaccttcttcgccctccactgcactgggtcctgctggcactagctctggtgaacctgctcttgtccgttgcctgctccctgggcctccttcttgctgtgtcactcactgtggccaacggtggccgccgccttattgctgactgccacccaggactgctggatcctctggtaccactggatg

SEQ ID NO: 2288 - DNA, 506 bp, Homo sapiens
  misc_feature (1)...(506): n = A,T,C or G
gaaaccaaaaanttttgatttgcnttccccnnnnccnnnnactgatntccntacgacangncgnggaattccgtttctggggcggaattctgtgggcagcaacgggggccccctctccaacaagcgcacctcatttctcacgtgggagccgcggcccagagagctgaggtgacagagcttgggccgcagagctgctccctccctgcagccgcacagcaggccggaggcacagccggcgagagacggccactcgctttggagcggcggcgaggccggcgccttcccgggcaccagggactgcgtggcttggccggaaatcaggctagaagcagctccgggaagcacagcccttagcccagcgccttcccacactgtggcaggaatagcactggcggcccacgcgcttgtcagggaacagaacagctctcgcccgacgcctggcaggggagcagggaggctgcagcttccccagcgaccagctgtttcccaggctggcggactccacg

SEQ ID NO: 2289 - DNA, 394 bp, Homo sapiens
  misc_feature (1)...(394): n = A,T,C or G
tgggttccnnnggtagnnaaaactgaaaccnnnttaaagngccagcanagcgngnaantgncgttcagacacgcactttggggccagcccctccccgcctcctccctgcctggcggcaggggtcgcgatgatgggctggagcagtttggggcagggggttctgggacccactccgactccccctccccggcatcatttcccctcccgcttcctccggctggacctggggtcccccctccctgtaatgcactcctgccccggcccaacctcgccctctctcaccagccttgaactgtggccacctagaaaggggcccattcagcctcgtctctttacagaagtagttttgttcatgaaataaagactcttggacttgaaaaaaaaaaaaaaaaaa

SEQ ID NO: 2290 - DNA, 474 bp, Homo sapiens
  misc_feature (1)...(474): n = A,T,C or G
gtaagtnnnttttgaaacccttactggagactctacgaaagngcggnggaattcgtctgcatggtgtttttcgggcagtggcttctgccatcatcaccacatgtttctctgctgcccactgtcctgaggtgggccgtcgtggaagccctgcttcctgccgtttgcgggacgagtcccgccctcttttttcctgtccccatcggtagtctgcgtgcacgtgttttccacagtaaaaccgtgttgtgtaactctttccagcaaagtaacaatccgccattacaaaggtcgtcctccttgatccagttaacgagtcagaactcttctcccaatcagcagagaaccccgcaggtcatcggggtcatgcagagtcaaaacagcagcgcgggcaaccggggaccccggccactggagcaggtcacctgttacaagtgtggcgagaaaggacactacgccaacagatgcaccaaagggcag

SEQ ID NO: 2291 - DNA, 465 bp, Homo sapiens
  misc_feature (1)...(465): n = A,T,C or G
ggaagtccccctgagacccaactgangtcgtcgaannancggaagnnaatggggagaagccgctcatcttcaacacataccagtgctacctcatggatgcctatgacaatgtgaccctggacgtggagctggctcgccgtgagggctggtgttatggggccaagctggtgcggtgcgcatacctggcccaggagcgagcccgtgcggcagagatcgggtatgaggaccccatcaaccccacgtacgaggccaccaacgccatgtaccacaggtgcctggactacgtgttggaggagctgaagcacaacgccaaggccaaggtgatggtggcctcccacaatgaggacacagtgcgctctgcactgcgcaggatggaggagctgggcctgcatcctgctgaccaccaggtgtactttggacagctgctaggcatgtgagaccagatcagcttcccgctgggacagg

SEQ ID NO: 2292 - DNA, 476 bp, Homo sapiens
  misc_feature (1)...(476): n = A,T,C or G
ggaggcccnnagtgtccncaatcgagacccatagagagtcncttggaattcaataatacctaggccggttgcctggtaacagtgccactgatcccctcccaggatttttcttgcagcctcccgaggaggaccctaatgctgggcactcagtagacaccccttaagtgttgactgatatgtggggaacctgagctcctgggttcccagtttctgattggtgtaaggggaggcaaatgaggagagaaaaaggaagagcagggagaaggataggggagtcagaggggagggagaagcataggctgtggagggggtgaaaaaggcagaaaaagggaaacggaaatggtgaaaaggaagggaatagataagaagggagtcaggggaagagggaaggaaaggccagctcccctactctgactcctctgccaggcgccacaccccctattgctccagcctttctcctgggcctgcatttctat

SEQ ID NO: 2293 - DNA, 405 bp, Homo sapiens
  misc_feature (1)...(405): n = A,T,C or G
tgagtcccccnagtgncccccctagagactcctgatagcgctcggaanncccagggccatgtggaagagctgtggggcctggccacacaccccagtcgggcccagtttgtgacctgcgggcaggataagctggtgcatctatggagctcagattcccaccagcccctgtggagcaggatcatcgaggaccctgcccgctcagccggcttccaccccagtggctctgtcctggctgtgggtacagtgactggcagatggctgctgctggacacggagacccatgacctggtggctatccacacagacggcaatgaacagatctcagtggtcagcttctccccagacggggcgtacctggccgtgggctcccacgacaacttggtgtacgtgtacacggtggaccag

SEQ ID NO: 2294 - DNA, 488 bp, Homo sapiens
  misc_feature (1)...(488): n = A,T,C or G
natgagaccatagccaggggttgaattccattctgcttcgctactgccctcaaggggcgggtgtactacctggagcaccctgagaagctgacgctgacagaggcaagggaggcctgccaggaagatgatgccacgatcgccaaggtgggacagctctttgccgcctggaagttccatggcctggaccgctgcgacgctggctggctggcagatggtagcgtccgctaccctgtggttcacccgcatcctaactgtgggcccccagagcctggggtccgaagctttggcttccccgacccgcagagccgcttgtacggtgtttactgctaccgccagcactaggacctggggccctcccctgccgcattccctcactggctgtgtatttattgagtgggtcgttttcccttgtgggttggagccattttaactgtttttatacttctcaatttaaattttctttaaacattnttttactattttttggn

SEQ ID NO: 2295 - DNA, 491 bp, Homo sapiens
  misc_feature (1)...(491): n = A,T,C or G
ggcggtnnnnnnnnaatcgagtacctcgcagnggcgggaatgattacctattcatgggcgagatgcacatggtagacaccgtgacatggcacaagatgcgaggggcacagatgattgtggccatgaaggcagtgtctctgggcttcgacctggaccggggcgaggtgggtacggtgccctcgccagtggagttcatgggctacctctacttcgtgggcaccatcgtcttcgggccctggatatccttccacagctacctacaagctgtccaaggccgcccactgagctgccggtggctgcagaaggtggcccggagcctggcactggccctgctgtgccttgtgctgtccacttgcgtgggcccctacctcttcccgtacttcatccccctcaacggtgaccgcctccttcgcaagtggctgcgagcctacgagagtgctgtctccttccacttcagcaactattttgtgggctttctttccgaggccacg

SEQ ID NO: 2296 - DNA, 497 bp, Homo sapiens
  misc_feature (1)...(497): n = A,T,C or G
cgcaaagagaccctagtccagngnggttggattnccattagccaggtgatgaacgtcattggaagcgaaaggcgcttctcggtgtccccctcgtcaccgtcctcccagcaaacaccccctccagttacaccaagggccaagctcagcttcagcatgcagtcgagcttggagctgaacggcatgacgggggcggacgtggccgatgtcccaccccctctgcctctcaaaggcagcgtggcagattacgggaatttgatggaaaaccaggacttgctgggctcgccaacacctccactgcccagtaaaaatcagactcctctgcctcctaagatgactagcaagcatgcatctgctgactctgggatcacgcattgacagcagcaagcctctctagaaagagagagctgaccctccccatatgcatgccctgtacttgtgtgctgcctgagcctgttgtcaagctcattgggtctgtgatgctaacatttgctgcgact

SEQ ID NO: 2297 - DNA, 474 bp, Homo sapiens
  misc_feature (1)...(474): n = A,T,C or G
agagtccccnnagtgcccnncatcgagacccatgatagccgtgggaattccagaactcttcctgccaaaggcaggtccctccaactgggcatggcagggccaagatggtaaaatgtagcctgcaactcagacctctgaatcccacctgcacacgatttgtgtccctgcactgggtattgggtgaaagcagcagctgggacttccttgtggagagagccatagaggtaatttacagaagagttgagagttttaagtagagcggcctctgtctgctgtgtcacagtgatggcgcagagtgcagccttgggaatgatggctgagaactggtttgtataaagtgcagcccaccctgctttgacacttgcctatggacaagtgtagcaggcaggtggccggaactgctttgtccttcctctgctgacctgaatgtggacttggccccgtcatagtgactggcccagggttggctatgga

SEQ ID NO: 2298 - DNA, 480 bp, Homo sapiens
  misc_feature (1)...(480): n = A,T,C or G
agaggtcccnnnagaggccnccatagagncctactgatgatcctaggaagnngcgaggaattcgaggaatcactgatgacaggcactggcctgcccagctgggggcctttgtttattcatttggtgggcacttcctgggtgcctgctctgggtcaggcctgtgggggggaccactgagggcaggaaacctggcctgtccctccaggaagcgaagtcaacactggcacctgcagatgaagtggcagagcagcccccagctttgatggcatggggtggttggggggcacattctgcatgctcagaagagagagcaactcgccctgtggaaggagcatacagtgggagatggggacaggcccagtgacgagcaccatccggaagtgaaggctgatgggtacgtggacaacctcgcagaggcagtggacctgctgctgcagcacgccgacaagtgatggcctcctgggagagccccgcctcctc

SEQ ID NO: 2299 - DNA, 495 bp, Homo sapiens
  misc_feature (1)...(495): n = A,T,C or G
natagaganccntagtgcagngnggttgaattcctcttcactcaaaaattttcggattttggagcatttggagtgcagattttcagacttgggatgctcagcctgtgctggaattgcaagaatgttcagactcaaaagtcaaagaaaaagttgagttctgaagagggcacattaattgaaggggccaacaaaatgtattaaaatttagcctgtagtgctcagtgtcttattgccatgaatatgagagtgatggtggctaaggaagggaactggagccatatttctaaatcgggctttatattttgtaggtgattgtgccagccatagtgtaaggcagacatgagtcatttttcaagggacttgggatgaagtgcatgtaaattttggacatgaaaatttaagggcgaaagagatgtttaaatcctctaaggaaagctatgggaaagctgtgtaggcaccattagtttatttggatcatgaagtccaggtaagaga

SEQ ID NO: 2300 - DNA, 502 bp, Homo sapiens
  misc_feature (1)...(502): n = A,T,C or G
nggataganncctntnnnnnnnnnaactgaganctctactcagngtggnggaattcctatccttcctcagtttcccctccaccttctggccacggtctccctccctacccaatgatctggtttgccctcagacccacagggctttttgtgccagcaatactgaagatctagagacagtcgtgaaccacataaagcatcgttatccccaagctccactgctggccgtgggcatctcttttggagggatactggtgctgaatcacctggcacaggccaggcaggctgcagggctggtggcagcactgactctgtctgcatgctgggattcctttgagaccactcgctccctggaaaccccactcaactcactgctcttcaatcagcccctcactgctgggctctgccaacttgtggaacggtagggtcgtggcaagtgggaggaggcagtagacagagtaggatggcagacactccaggctctcctagtgcttggtcagttctc

SEQ ID NO: 2301 - DNA, 483 bp, Homo sapiens
  misc_feature (1)...(483): n = A,T,C or G
agagttcaaggggnnnnnngaactgagacccctgatagccctcggaannccagaatattagaagggcatttaaaagaagtaaaatacatctatatgttgataaggaaagatacaagcaaggtgcagaacagtgtctgtgtagtgtgatcccatctgtgagcatttttaaaaggacatatgtgctgtgttatttgcgaattcttttcagcaaataaatatgaaaaaatcgttaacagtgattacttctagggagatgactgggtctcacggaagggacatttttcattttaaacctttctatagcatttgaatttattactacctataatgttacttttgttttagaaaaataattaggcttccctgttgctttccatcatgaaatccagntggcttccttctttgtgtgtattttaatttcgaagcagtacctttctttgtgtttattagcctccaccagactggtgccccatgaagacaggg

SEQ ID NO: 2302 - DNA, 483 bp, Homo sapiens
  misc_feature (1)...(483): n = A,T,C or G
gcgtacagaagannnngtttgaaacccctgatgacatctggacangcggtggaattcccaaagcccatcacagcagccaggagatgtcctctgagtaccgggagtatgcagacagttttggcaagtgccctggtgggcggaacccctggaccggggtatcccagttcctgcagacatctcagaagatcatccagtttgcttctgggaaggagccccagccaggggagacagtcatctatgtggctggtgccttcgacctgttccacatcgggcatgtggacttcctggagaaggtgcacaggctggcagagaggccctacatcatcgcgggcttacactttgaccaggaggtcaatcactacaaggggaagaactaccccatcatgaatctgcatgaacggactctgagcgtgctggcctgccggtacgtgtcagaagtggtgattggagccccgtacgcggtcacagcagagctcctaagtn

SEQ ID NO: 2303 - DNA, 489 bp, Homo sapiens
  misc_feature (1)...(489): n = A,T,C or G
natgagaccctggccaggggttgattacatgatgttattgtcagcactatagagtggcagggtggagtcttaccctgttgtgaaacacctccctccctctctaggtgttctccccaactgcctgctagggagggtactcccctcaggtagaattaagagggctgagggtcaggggccatgggccaaggaggtcagtcagatctccttggatctggaggccctggctttcagccagaggcagggggagaaagatgatgtctcatgatgccagcgcttcctcttcactggcgtctgacccaggagcagtccagaatcagcttctctgacctcactccaactcacgtgtctttgacactttaagggacttcctgttttagggtcttctggctgggtgtcattgaatgggcagtgattctctaactttagactgatgttccccagcctttgtttggggactcggaggcagagtagacagttacccttaccccn

SEQ ID NO: 2304 - DNA, 487 bp, Homo sapiens
  misc_feature (1)...(487): n = A,T,C or G
agagccnaggggnncnggcctggaaacccactgagaccctaggacangcggnggaattccaggagaatggcatgaacctgggacgcggagcttgcagtgagccaatattgcaccactgcattccagcctcggcgacaaagcaagactccgtcaaaaaaaagatttttattagagatacacatatgcttcccaaaatattattttggtcaacaccattgaaaccatcaaggacaaatttttgtctatgcctcctctgtaagagtaccctaattgtgattggaaagctgaatgttttatatgccagaatgacaggtttcaaagaaaacacaaagaacaaaatcagagagagagaaaaaaaatacatataccatgtagtatgaccatggttgaaacaaggtcaaaggtgatgtcaatcccatgttgtaacatctacgggggcaggagtcacaaacgttggatcagatatcacctgtgagttgcaagtaca

SEQ ID NO: 2305 - DNA, 486 bp, Homo sapiens
  misc_feature (1)...(486): n = A,T,C or G
ggatatcccggggnnnnnnnncctcgagaccaactgagaaccctcggaannncctgctgctggcggacatggacgtggtgaatcagctggtggctgggggtcagttccgggtggtcaaggagcccctcggctttgtgaaggagctgcaatgggtcttcgccatcttcgcctttgccacatgcggcagctacagtggggagctccagctgagcgtggattgtgccaacaagaccgagagtgacctcaacatcgaggtcgagttcgagtaccccttcaggctgcaccaagtgtactttgatgcacccacctgccgagggggcaccaccaaggtcttcttagttggggactactcctcgtcagccgaattctttgtcaccgtggccgtgtttgccttcctctactgcatgggggctatggccacctacatcttcctgcagaacaagtaccgagagaataacaaagggcccatgctggactatcttgccc

SEQ ID NO: 2306 - DNA, 463 bp, Homo sapiens
  misc_feature (1)...(463): n = A,T,C or G
nggatcgagacccaccgtagaccctagaaagngcggnggaanncctccagtactccatctgctcctgaaggatacgacctgaaaataggtttttctttggccccccgacgaggatcactaccagatcagaaagatctgagattaggatccatagatctgaattgggatctgaaacccgcttccagtagtaatcccatggatggcatggacaataggacagttgggggaagtatgagacaccctcctgaacagacaaatggtgtgcataccccacctcacgtggccagtgcccttgcaggggccgtctccccaggtgccctgcgtcggagtctggaagccatcaaagcgatgtcctccaaaggcccctcggcctctgcagcactaagtcctcctcttgggtcttctccaggctctcctgggagccagagtttgagcagtggagaaacagtgcccatccctcgcc

SEQ ID NO: 2307 - DNA, 487 bp, Homo sapiens
  misc_feature (1)...(487): n = A,T,C or G
cgccccaaatcgagatccctanccagtcgagatccctagtcagtgcggnggaattccctggggctgtcgggctgagtatgccgtgtgggtggagaggaagcctcggggaaatcgcccatgtgaagggagggcttggtgtggggacttgcactgggcagaggggcagcttccctgagagcagctaagccccaggcacaccgggcatccggacacacaggtcggggaaggataggctgagccggggctcccagcagagacgcctgggtggggcaggaggccgctccaggtgtgagccacagaggaggggagagggacccccacgggagtggaagtggcagagcagctgcagaagtgcagggagcggaaaggtaccagggcagctgctttccgctgcctccgggccgggcagctgcagaaacagcagggggaggagcaacagctgccaaattcgccaactaaaggagggagaggcggagcttgggtcctn

SEQ ID NO: 2308 - DNA, 484 bp, Homo sapiens
  misc_feature (1)...(484): n = A,T,C or G
ggagccgtagnncaaatgagaccatcattgangnctgtaannccatacaagtttcttccactatatattgatggagtttcaaagatatgaaggtgctgtggtctggatgtaccaccaaattctggtgttgaaatcctaaccctcaaagaggtggggcctttgggaggtgattagatcatgagggtggatcccttaactcttccattatatgaggacaaaccaaaaaactgaaccaagtctgaactaggaagctggccctcaccaagcaccgcacctgccagcaccttggacttcccagcctccagaacggtgagaaataaatgttggttataagccatccagtctttggtattttactatagcagttttggcatttccattatggcagtctttggtattgatacagaaggactgggctcccgactaaaccccacccttgagcctggaactgtggccctaagtgaaaacagctgaccctgttttt

SEQ ID NO: 2309 - DNA, 455 bp, Homo sapiens
  misc_feature (1)...(455): n = A,T,C or G
catcgacacctctcgatcgngcccgtggaaccacctccaacagtgggccggaggcacggtggtgactctgttcaatccttacgatggttggaagccacatggaggagagtatgccgccacagcagggagtgcctttccaggaaagcggatgttggggcagcatggcagcccagtccaaggagcgttctggcacagaccatttcggaacatggatctgcgccggcggctcccaggagaccttccatctcggagctcctgtggagaccacgtgcctggcaggcatgtcgggccccaggcctgtggtgctgagcgggccttcgggagctgggaagagcaccctgctgaagaggctgcttcaggagcacagcggcatctttggcttcagcgtgtcccataccacgaggaacccgatgcccggcgaggagaacggcaaagattactactttgtaacccag

SEQ ID NO: 2310 - DNA, 430 bp, Homo sapiens
  misc_feature (1)...(430): n = A,T,C or G
catgattacgatacnccgngnggnggaattaaggaaagccccctctctccctcctcccctcgccctcggcctggttctgcagctggaccgacctcattcatcgcctgccccctacccaattctgagcacacggtactgtagcccccagttcctccctagccttccatccctctgtccaccccagggggaggtaaccccgcactcacactcccttgatgctgtctgtacagggttcatattttgtagcgaaagtcgtttttgtcccagccggcgatcggagtgggccttttctttctttttgttcattctttacctttttttcttttctttctttcttttttgtacatactgtaaggttggtttgtaaattattctacggaggcaaaaagggaaaataaaaacttgcccttccctggctgacccagtcggg

SEQ ID NO: 2311 - DNA, 249 bp, Homo sapiens
ccgaggccggcttccacatggtggcgtgtaactcctcgggcaccgccgccttcgtcaaccagtaccgcgacgacaagatctggagcagctacaccgagtacattttcttccgaccacctcagaaaatagtatcacctaaacaagaacatgaagataggatacatgaccaagtcactgataaaggaagtgaaagtgggacttcctggaatgagctcttcacttccagttgggacagccattcagaggcag

SEQ ID NO: 2312 - DNA, 483 bp, Homo sapiens
  misc_feature (1)...(483): n = A,T,C or G
aggatgggcccgggtgncnnaancctacngngcctagnnnnacnngcananncnnacnnngganncnccgatccatacagcctgtctgaccatttggccaatgaaatggatacatattctttaaggtcaaatatagaacttaagggggctttggcagacttctgtgattcatatggcttagtctgcaataaaccaacagcttgggttctccactatcttaacacatctggtgcaagctgtgagagtagaattattggtgtatatgccacaaaaactgatggaacagacgctattgaaaagcagctgggaggaagaattcacagcaaaggcatttttaaaagagaggcgggaaataatgttcagtacatttggagctattattcaataacagagctgaagaaaatgatggatgcctttgatgcttgggaaagaaaaggtgttatctactggcgggtgcctcatgagctgatagagtgttggact

SEQ ID NO: 2313 - DNA, 479 bp, Homo sapiens
  misc_feature (1)...(479): n = A,T,C or G
gaggagnnngnncccatgagaccatcatcgatgccgctgaatacgatgatgaagaggctggttggactgagctggcggagcangaagtggcacgcctgctgaggactgagttgataggagaccagctagcccagctcaacaccgttttccaagcccttcctacagcagcctggggtgccaccctcagggccctgcagctccagctagatgggaatggcaagctgaggtcccaagcaccccctgatgtgtggaagaaagtgttagggggaataaccgctggaaaggaaccccccaatggaatactgcccccctttgaactcctgtgccagtgtctgtgccagctggagcctcgatggctgccaccctttgtggagctggcacagcagcagggcgggccgggctggggggcagggggcccaggactgcccctgtatcgccgagctctggcagtgctaggtgaggaggggaccangcctgag

SEQ ID NO: 2314 - DNA, 479 bp, Homo sapiens
  misc_feature (1)...(479): n = A,T,C or G
ggggcgngnnccccctgaaacctactgatagcctccgccangncgnggaattcgnnntggccggcttctttactgcaacttgttttatcagcaaggtctttgtgacttgtatcttgtgctgaccttgtatctcatcctgtgactcagaatgcccaacctcctgggaatgcagcccagcaggtctcagccttattttacccagctcctattcaagatggagttgctctggctcaaatgcctctgacaccaacactcattattttctgttttttgttttgttttacagtagtcattctgatgggtatgaggtgatgaccaattgatttttgacagaggtgcaaaagtacctcaaaggagaacggactgtctttacctaaccagtgttgggataattagtcatcctgcaaaaaatgaaccttgacctaaatttcaccttatacacagactaactaataattgattntacacgcaaatgttaa

SEQ ID NO: 2315 - DNA, 453 bp, Homo sapiens
  misc_feature (1)...(453): n = A,T,C or G
ntttgaaacattanccttgagggcgtttcggtttcactgtgttggccaggctggtcttgaatgcctgacctcaagtgatctgcccgccttggcctcccagagtgctgggattgcaggcgtgagccaccacgcctggcgaaaattaagattctttatgaccaccaccactactattgcagatggtgctctgtgtcttgaagatggcaagaccatgcattgtgtggttgaagtgacagatttaggttatgttcttagcacttccacttattagttgtgtgacctttgcaaataaacaacctcagtttcctcagcagtggaacgagaattaaaatacctgcctttcaggattggatgagtcttgctcatataactaactaatctagagtctgtcccagaccatagtggttttcttcatgaaaggttttacatatgtcatcttattgaatcttgaag

SEQ ID NO: 2316 - DNA, 462 bp, Homo sapiens
  misc_feature (1)...(462): n = A,T,C or G
atagattnaccttnnnntttgagnatccttagtccagngcggnggaattccagtgttctcctgcctcagcctcgcctgctcctacgtgggcagcctctacgtctggaagagcgaactgcccagggaccatcccgcggtcatcaagcgacgcttcaccagcgtcctggtggtgtccagtctctcacccctgtgcgtgctgctctggagggaactcacaggcatccagccaggcacatccctgctcaccctgatgggcttcaggctggagggcattttcccagcggcgctgctgcccctgttgctgaccatgattcttttcctgggcccactgatgcagctctctatggattgcccttgtgacctggcagatgggctgaaggttgtcctggccccccgctcctgggcccgctgcctcacagacatgcgttggctgcggaaccaagtgatcgccccgctgacaga

SEQ ID NO: 2317 - DNA, 438 bp, Homo sapiens
  misc_feature (1)...(438): n = A,T,C or G
nttgacgaccttttgaagtctgtgggaattccaccaagacagtagcatcttggagtcaagggacctgcgcctagaaaagcgcaccttgtttcggctggatcttgttccgattaaccggtcagtgggactcaaggccaagcccaccaagcccgtcacggaggtgctgcggcccgtggtggccagatacggcctggacctcagtggcctgctggtgaggctgagtggagagaaggagcccctggaccttggcgcccctatatcgagtctggacggacagcgggttgtcttggaggagaaggatccttccagaggaaaggcatccgcagataaacagaaaggtgtgccagtgaaacagaacacagctgtaaattccagctccagaaaccactcggctacggtaattccccaccctggcccaccctgtgccctgctcctctn

SEQ ID NO: 2318 - DNA, 486 bp, Homo sapiens
  misc_feature (1)...(486): n = A,T,C or G
agagggtggggnnnnnaccatcgagaccntnattgagtgccgctgaataccgtcgatgccgatcggacccccgctgggaccgggcggagaaaggcaaggcaggtttcaaagcccatttcacagattcccttctggcctgatgaggagagattagtttcagccaggccacccaagaggcatcggcaaagccagaactaacacccagatttccttcattccagggacagaggtggggaatcacagggctgcgctgtattagccctcctagtaccctctcagtccgaggattctcacatgggaggctactggacaggtctgtccacgtacccatttcacagatggaaaaactgaggccttgtgtgtacctggctgctgtaggaggctctcgcaccacccagatcctctgatgcgcttggttgcggggtctctgtggacaggagaaaaaggcaaaggctgattgggcgcggtggctcacgccctgtatcn

SEQ ID NO: 2319 - DNA, 453 bp, Homo sapiens
  misc_feature (1)...(453): n = A,T,C or G
nactgagaaccttgaaacccctggaaannccangaagccgagtgaatgggggctgaatgtgcgagtccatagctgaagaggagcgccagatggtgtaggaatacacttatttatgaaactggcttgagttcttcttgaattgccagttttcagcctcctcatgcctccgtctcctttagacgacagggtagtagtggcactatctaggcccgtccgacctcaggatctcaacctttgtttagactctagttaccttggctctgccaacccaggcagtaacagccaccctcctgtcatcgccaccaccgttgtgtccctcaaggctgcgaatctgacgtatatgccctcatccagcggctctgcccgctcgctgaattgtggatgcagcagtgccagctgctgcactgtggcaacctacgacaaggacaatcaggcccagacccaagccattgc

SEQ ID NO: 2320 - DNA, 472 bp, Homo sapiens
  misc_feature (1)...(472): n = A,T,C or G
gcccccccccattgagccccattgaaggcgctggaannccccaccggctcttggctggtcgttcgcgacaatgaccagccaggctgtatgcactgcaacagaagcatgattgtcactggccgccacatcactgacggtcccacaatgtggcccgggctgtgatttacctgggtgagacagcttgagccccatcgtggattccaagacatccctgctgagagagccaagatggagtttcgctcttgttgtccaggctggagtgcaatggcgcaatctcagctcaccacaacctccacctcccgggttcaagtgattctcctgcctcagcctccccagtagctgggattacaggcatgtgccaccacgccctgttaattttgtatttttttatttttagtggagacggggtttctccatgttggtcaggctggtctcgaactccgtgcctcaggtgatccgcccacctccgctt

SEQ ID NO: 2321 - DNA, 457 bp, Homo sapiens
  misc_feature (1)...(457): n = A,T,C or G
ntttgagacactagtcattgaggccgaattcattcaagcttatgtgattatatgaagaatattcataaaaaagagattgaccttcagacatctaccatcatagtcccaggaaagtggccatccctagccacatcggcctgcacacccatctccagctctaaaagcaatggcctatccaaggacatggacaccgggctgggtgactccatatgcttcagccccagtatctccagcaccaccagccccaagctcaacccgcccccctctcctcatgctaataaaaagaaacacctaaagaagaaaagcaccaacaactttatgattgtgtctgccactggccaaacgtggcactttgaagccacgacgtatgaggagcgggatgcctgggtccaagccttccagagccagatcctggccagcctgcagtcatgcgagagcagtaaaagcaagtcccacg

SEQ ID NO: 2322 - DNA, 490 bp, Homo sapiens
  misc_feature (1)...(490): n = A,T,C or G
ngaggtcggcnaatcgagatcatagagagccctanggagtgctgctgagcgtgacgtcgcgttatatgtgtagaccacacagctaccctgtgaggccaatatctatcttaagtccttttttcacagatgaggaaattgaggctcagagagatgacatctcttgtccaaagtcgtagccaataaatagtaaactggaaaatggaggcgcagccccagggctgcctcccactaaagcccattctcgcaactctttcactgtcgactctgttgctttctctttcccccttgtccttggcccaaatcctttagggaaccggggcttacaccagctcccatccctccaacatggagaacttggggttgtctccaagatccttcatccccaccccacacatgagtgcgccctttccgtgcagtggccgagccagcctcgtcccagctcttcacacacatcctggtgagcaggctgctgtaatacaagcacttacaa

SEQ ID NO: 2323 - DNA, 410 bp, Homo sapiens
cgtcatgtatacttacggcaacaagcagcacaacagtcccacctgggatgaccccacgctggccatcgccctcgccgccaatgcctgggccttcgtcctcttctacgtcatccccgagggctcccaggtgaccaagaccagcccagagcaaagctaccagggggacatgtaccccacccggcgcgtggtctatgagaccattctgatagagcagtaagggcagagcattgtctgtgttaacatggtccttgccatgttgtcgccgttttgatctttttggtcttggattcctgtgcatttttataattgtattctagctcatcaacctttacctgctttgttgtcgcgtcttcctgcttcgaagttattcttctttgtttacctctgcttgttttattactgtttttatg

SEQ ID NO: 2324 - DNA, 470 bp, Homo sapiens
  misc_feature (1)...(470): n = A,T,C or G
agtcccttccccctagagaccnatagaagtgcgtaggaattctccggctctatcgctcgcgccaatgtaaagaccccgtcaagacacgctgaacattctccaccgtgcctttgataaaccaaccatcgaacaggcgcccctcacacactatttatttgactttggaagaaacccctcacactgtccatgcttaagagcaggacgaacatgcatgcctttgcctgagcaggcgggcttctaatgggacggtgcaggcagctcccgagactgggcagctaagggccctttcctgctgggaatcaaagccgtcctggccgagagctacgagcgcattcaccgcagtaacctggttgggatgggtgtgatcccacttgaatatctccctggtgagaatgcagatgccctggggctcacagggccagacgatacactatcattattccagaaaacctcaaaccacaaatgagagt

SEQ ID NO: 2325 - DNA, 496 bp, Homo sapiens
  misc_feature (1)...(496): n = A,T,C or G
gccagcccccnnttttggatccctatcagnggcggnaaaattgagttccctatccatgtggtggaattcctgaggaccccgagtgcaggagggagtatgggtggcctcatccccagagtggcatggctctcacatgttggcacttctttcctttacacagggggcctccccggagttccagcagtgaccctgactttgtggtggtagacggcgtgcccgtcatgctcccgtcctatgacgaagctgtgagtggcggcttgagtgccttaagccccgggtacatggcctctgtgggccagggctgccccttacccgtggacgaccagagccccccagcataccccggctcaggggacacggacacaggcccaggggagtcagaaacctgtgacagcgtctcaagctcttctgagctgctccaaagtctgtattcacctcccaggtgccaagagagcacccaccctgcttcggacaaccctgacataattgccagcan

SEQ ID NO: 2326 - DNA, 460 bp, Homo sapiens
  misc_feature (1)...(460): n = A,T,C or G
caatgagaccctnggagagccctcggaagngcggnggaannngncagggggcccagcgggtcagacctttgggctggggctgccgtggtctaaccccaggccaagggtcagctggcggggggcagcctcctgatgcactgcccttgctatgggagtgaatggggcttgtggtggcgaagccaggacttggcccccagcccctctgggatggcaggcctctcgtttgggacacctactctagatgagccgtggctgggagtggaaaacgaccgagaagagctgcagacctgcttgattaaggagcagctgtcccagttgagccttgcaggagccctggatgtcccccacgccgaactcgttccgacagagtgccaggctgtcaccgctcctgggtcgtcctgcgatctgggaggcagagacctgtgcggtggctgcacgggcagctcctcaacctgctatg

SEQ ID NO: 2327 - DNA, 490 bp, Homo sapiens
  misc_feature (1)...(490): n = A,T,C or G
ngaggcccgnnatcgagaccatagagagccgtatggagtgtggcggaattctgcacatcaggcatcagtagcccgtgtggttggacaacagggccggggccgggccgggattgaggccagtctagatgtgcagtacctgatgagtgctggtgccaacatctccacctgggtctacagtagccctggccggcatgagggacaggagcccttcctgcagtggctcatgctgctcagtaatgagtcagccctgccacatgtgcatactgtgagctatggagatgatgaggactccctcagcagcgcctacatccagcgggtcaacactgagctcatgaaggctgccgctcggggtctcaccctgctcttcgcctcaggtgacagtggggccgggtgttggtctgtctctggaagacaccagttccgccctaccttccctgcctccagcccctatgtcaccacagtgggaggcacatccttccaggaacctttn

SEQ ID NO: 2328 - DNA, 487 bp, Homo sapiens
  misc_feature (1)...(487): n = A,T,C or G
agaggcccgcnatcgagacctttggacagccgttggaattcgcgcgattttggctcaccgcagcctccgtctcccgggttcaggcgattctctgcctcggcctcccaagtggctgggattgcaggcatgcgccaccacgcctggctgattttgtgtttttggtagagacggggtttcgccgtgttggccaggctggtctcaaactcctgatctcaaatgatccacctgcctcggcctcccaaaatgtcgggattacaggcatgagccactgcaccggcctacacctctttattttgtcatctatcaataattttctctttgatgtctctttctttgcctggagactaagatgtttttcaagacggataccagttcttatacatcttggtcactcccctcagcacagtgcctagcatagaaagagaaaacctttggatgattgaataacttgcccagagtcaggttctcagtcatccaggcaggcttt

SEQ ID NO: 2329 - DNA, 491 bp, Homo sapiens
  misc_feature (1)...(491): n = A,T,C or G
aggcnccgnnaatcgagacccatagaagacctctaggcagtgtggaggaattctgcacatcaggcatcagtagcccgtgtggttggacaacagggccggggccgggccgggattgaggccagtctagatgtgcagtacctgatgagtgctggtgccaacatctccacctgggtctacagtagccctggccggcatgagggacaggagcccttcctgcagtggctcatgctgctcagtaatgagtcagccctgccacatgtgcatactgtgagctatggagatgatgaggactccctcagcagcgcctacatccagcgggtcaacactgagctcatgaaggctgccgctcggggtctcaccctgctcttcgcctcaggtgacagtggggccgggtgttggtctgtctctggaagacaccagttccgccctaccttccctgcctccagcccctatgtcaccacagtgggaggcacatccttccaggaaccttt

SEQ ID NO: 2330 - DNA, 459 bp, Homo sapiens
  misc_feature (1)...(459): n = A,T,C or G
nattgagaccccttgaagngcggtggaanncgcacgaccaagatcgccaagtcagtcatcgccccactggctgaccagaacatatccgtgttcatgctgtccacgtatcagacagacttcatcctggtgctcaagcgggacctgccctttgtcacccacacgttgtcatcagagttcaccatcctgtggtcagtggctagactgtagcagccgagaacctcggcatcaccagtggcttcgtgaagcccaagctggtccagatgccggtcatccacccactgtccagcccgagcaacaggttctgtgtcaccagcctggaccccgacacgctgcctgctgttgccacactcctcatggatgtcatgtcctacttcaatgggtgaggatacaactagaagccagcagtctacaggctggaagaaggccctcaccagaacccaacccttggacttcagcctt

SEQ ID NO: 2331 - DNA, 451 bp, Homo sapiens
  misc_feature (1)...(451): n = A,T,C or G
ctccatcagcatggagacatatgacactgatgtangagctgaagctgcccactgtgcactctatcatcagcaaaacgaacattaatgaggagctgatggcctccctggaccagccaacacagacagtggtgatgcaccggactgagcccactgcccagcagaacctggctctgcagctggccgagaagctgggcagcctggtggagaacaacgaacgggtgtttgaccacaagcagggcacctacgggggctacttccgagaccagaaggacggctaccgcaaaaacgagggctacatgcgccgcggtggctaccgccagcagcagtctcagacggcctactgagctctccactctgtttcccgcctgggccatccaaccttgaagtcctaaaccacacctcagtcactaaaggtctgtttaaaagaaaaaaaaaaaaaaaaaaaagcgcg

SEQ ID NO: 2332 - DNA, 459 bp, Homo sapiens
  misc_feature (1)...(459): n = A,T,C or G
ctaagagncccctttgagancntcggaagngcggggaannccggcgagctgctcggcggctctgcgcgctgtgtaccgcctcaagggtttcagcgaggccaagcctctggccgtatgcctcgggcgcgtgggcgacgtctacagatactgccgtgtgagagtacctgaggggctcctgaaagacctactgccaggaccagtgaccctggtgatggaacgctcggaggagctcaacaaggacctaaacccttttacgcctcttgtaggcattcggattcctgatcatgcttttatgcaagacttggctcagatgtttgagggtccgcttgctctcactagtgccaacctcagctcccaggccagttctctgaatgtcgaggagttccaggatctctggcctcagttgtccttggttattgatgggggacaaattggggatggccagagccccgagtgtcg

SEQ ID NO: 2333 - DNA, 490 bp, Homo sapiens
  misc_feature (1)...(490): n = A,T,C or G
aggcgctnnncggccggcaatggagaccatnggaatggagagcctaggaagnngcgnggaattcctatgttgcccaggctggagtgcattggctactcacaggcatgatcatggtgtattatagcctcaaactcctggcctccagcgatcttcctgtctcagctcccaagtagctcccaagtgtgcaactgagactacaggtgcaaaacacagtgccctggcttctctgtaaattttagaatcagtttgtagacagtgtctgggaggaaaaactttttatctaccctcaggtttagtctttggggacctgtgaattaaacagacgaaagatatattaacaagagaaggccaagcgtggtggcttacacccataatcccaacactctgggaggctgaggcgggaggatcacttgagtccaggaggtcgaggctgccgtgggctagcatcatgccactgcactgccccatgggcaacagagcgagacccctg

SEQ ID NO: 2334 - DNA, 429 bp, Homo sapiens
catcgcattcatgactcctagtccagcgtggtggaattccggtgtgtctgcagtgtgtgcagcatgtgcgtaagtgcatgtgaatgtgcgtgtgttgcatgtgagcatgtgcacgcctgtgcgtgtgagcattgtgtgcgtgatgggagccgtgggtgctgtgtggacagcccctctgcccctcccatgggctcccacgcccagcatccacctgagagaggagggagctgccttcccattctgcggagtctgtgtgctgaggccccgcagaagcaagtggaggagctgggatgtgaacctgggaccccggcgtagggggctgcttggctgtggaccctgcccctcaggaaagcccagggtccacctccagaggactcgttctggggcgggggcggaggcggggggcctccccacccggggctcgatgag

SEQ ID NO: 2335 - DNA, 426 bp, Homo sapiens
  misc_feature (1)...(426): n = A,T,C or G
nattgactacttttcgnccgngcggnggaattcctggtccgggactggttgggcattgtggggcctgtgctgacccctccccaagagcatcctaaacgaccagtgctgggactggagtgcccacagtcagaagtgagtggtgcccgattctggggctttttccggaacctctgtggacagcctgaggtcttcttccatcactgttttgtccacaatctatgccctctgcttttcctggctcccagcgggcgcaaccttactcctgctgagctgcctgccaagcagcgagaacagcttcttgggatctgtgatgcagccctctgccggcaggtgcagctgctgggggtgcggctggtggtgggagttgggcgactggcagagcagcgggcacgacgggctctggcaggcctgatgccagaggtccag

SEQ ID NO: 2336 - DNA, 441 bp, Homo sapiens
  misc_feature (1)...(441): n = A,T,C or G
ntcgtagaccctagtcagtgtggtggaattcgcagcatctctgtgacggcgcggcggctgctggggggcccggggcctctcgctggggacgttgcgtctgcagctgcggcgcgtttctattccaaggacaatgaaggcagctggttccgctccctctttgttcacaaagtggatccccggaaggatgcccactccaccctgctgtccaagaaggaaaccagcaacctctataagatccagtttcacaatgtaaagcctgaatacctggatgcctacaacagcctcacggaggctgtgctgcccaagcttcacctggatgaggactacccatgctcactcgtgggcaactggaacacgtggtatggggagcaggaccaggcagtgcacctgtggcgattctcaggtggctacccagccctcatggactgcatgaacaagctc

SEQ ID NO: 2337 - DNA, 463 bp, Homo sapiens
  misc_feature (1)...(463): n = A,T,C or G
natggcccccctaagtagatcctccggaagngcggnggaannnccttctccaaagagtttcacattgcacaaggctcttttggaagcaggagtggtcagtattttcagagggagacaaaccctaagtagagacagctttctttggtgctgagctgtgtgattgtgatgaccgctagcctgtgcccctaggttccagctgcccaccaggcaggacaggcaggtcttgccaaaactggagcctgttggaaacctatttctgccaccaaggagagggaccaggagacccagcgtaggttggccccaagtaggctcaactcgggagggtgggggtcccgcctttctcttcgcacttgtgccccaagtgcactcacagtacctggcatgtgggtgacctcttgggtggccggcatggggcagtgtttctcaatcagagggcctgggccccgagcacgtccaggaattt

SEQ ID NO: 2338 - DNA, 433 bp, Homo sapiens
  misc_feature (1)...(433): n = A,T,C or G
cgggttggagccgcgctgtgcatagggtgccacctcaggtgtctgtcccttgtgtcctcaggaggcagccttgctaccacccgcggcaaacgccaggtgctttttctgggagagcccacagccgtggccctccatggcttccccgacccttagcgccaggtggagggccctgggcagcctgtgtatggaattcttcgtcctgaggccgcctgagtgtggactgtcctggggaggctgtgcgcctcagcagccgtcctgacgctgagccctctgcaaaggttgggccggccaggcctcttggggctgcctgagccactgcaggaagtggcctggctgggaagttgggtgccggtcacctcccagcangaaggcgcagtggacagagatgggaagccctggnggacacagaccngtgctcacatgcctccaatct

SEQ ID NO: 2339 - DNA, 236 bp, Homo sapiens
atgttatacagcagctccagcaggccgaggaggccctggtggccaaacaggaggtgatcgataagctgaaggaggaggccgagcagcacaagattgtgatggagaccgtaccggtgctgaaagcccaggcggatatatacaaggcggacttccaggctgagaggcaggcccgtgagaagctgtccgagaagaaagaactcctgcaggaacagctggagcagcttgcaagggagtac

SEQ ID NO: 2340 - DNA, 465 bp, Homo sapiens
  misc_feature (1)...(465): n = A,T,C or G
catcgaccnccnnatttgagaccctagcccagngcggnggaanncggctttggaattcgtcgacttaggggttggccacgatggtgtccttgatccacttccggtaatgcaccaccttggtgtacagggaaggcctttcgggcagggcacatggttcactgccccatgacgtgataccttgaagcacaccattacagacaagtggggccccagaatcacccgagcaggtgcttttgccccctgtccagcgtccagcacacagcatgaacttggtcaccttctgagggtgaacttgcgcacacacgtcattggaaataacatggaggtccacacactgaagtttctttggggtcaagaactcctctggttcaatgctgccccagcctgaggcgtagcaggtggtccccagtgctggctcctgggtgggcaggtccatgacctttacaacatccgtgagctcggcag

SEQ ID NO: 2341 - DNA, 459 bp, Homo sapiens
  misc_feature (1)...(459): n = A,T,C or G
attgacncccctactattaacctcggaagngcggggaanncctgccatagtatttgctactgaatgccagccttttaacataccatttcagatttgtccttcaacaaaaatataaattgcaagtcataccatttaagggtcttttacaaatatgtctaaattgtgtgtcatttttaagttccaaaggtctactggactaagtactatcagaccagctgtagaacctgatggcgctgatccggggtggaataaccctcagtactggtgtgtagaagatgaattgtaggcaggttttgctgatcagcagcctaaggattgatgggctctcttttggcctctgatcctgagcactatggaggcagcatcagagaatggggacctgagctacataggttctcaatgtaaaacaactctgttcggagtgacatataagagcaagaaatctacagctggtgtaag

SEQ ID NO: 2342 - DNA, 482 bp, Homo sapiens
  misc_feature (1)...(482): n = A,T,C or G
agggcnnnnngnnnnnaactgagaccatagcatggaggcctatattcaacccggctcgcgctgccgctgctcacgcgcgccggcctgcagggccgcaccgggctggcgctctacgtggccgggctcaacgcgctgctgctgctgctctatcggccgcctcgctaccagatagccatccgagcttgtttcctggggtttgtgttcggctgcggcacgctgctaagttttagccagtcttcttggagtcactttggctggtacatgtgctccctgtcattgttccactattctgaatacttggtgacagcagtcaataatcccaaaagtctgtccttggattcctttctcctgaatcacagcctggagtatacagtagctgctctttcttcttggttagagttcacacttgaaaatatcttttggccagaactgaagcagattacctggctcagtgtcacagggctgctgatggtggtcttcga

SEQ ID NO: 2343 - DNA, 465 bp, Homo sapiens
  misc_feature (1)...(465): n = A,T,C or G
atagagaacacgttgaagagcgtcggaattccccaccaccatgcccagctaattgttgtatgtttagtagagacagggtttcaccatgttggccaggctgggctcgaactcctggacctcaagtgatctacccgccttggcctcccaaagtgctggcattacaggtgtgagccaccgtgcccggccaccagaatcctttggtatagccaagccttttggttaccgcctcatgaagaatatgcttcccgcattgtcctagtcccagttgtattctcacaggtgttatgtgcaggacacaatccaaatcataaacctggctcatgcccaacacatttctgctaatagggagagggacccaccacacacccacacatgccagaggtccctcctcacagaggagagggcctgtgtctgtagaaggttaaagctgacaacatgtgaaacatcccagaattatgactcttn

SEQ ID NO: 2344 - DNA, 426 bp, Homo sapiens
ctctgtctcgggggggaaaaaaaactcaactattttaagtatggccaaagtgaacttaaattgaacctacccttgttaagtcagagtccttaattaggacagtcttctctagagtgagttttgcatgaggcaaaaaagaaaggcacacttggtcagaatgaagctctgtgtgtggcaagagcaggagtgatgaagtggtatggcagcgagaggtacagacaactggagaagcagcagcagctgggacggacacaggtggcaatgggagtggaaggtggtgggaagcctcataatccacaggagatcaagttgaagcagatacagaagagaatcattccactttattgattattatggagtgatctcacccatagaatacgggtgaaagtcaatcacagggcctctgaaagaatgttcaacacacat

SEQ ID NO: 2345 - DNA, 490 bp, Homo sapiens
  misc_feature (1)...(490): n = A,T,C or G
cgcccccccccggnagnnnattgagnnctntnaaatgagtagcctaggcagnngcgnggaattcctgagttccaaccagatcacccaactgcccaacaccaccttccggcccatgcccaacctgcgcagcgtggacctctcgtacaacaagctgcaggcgctcgcgcccgacctcttccacgggctgcggaagctcaccacgctgcatatgcgggccaacgccatccagtttgtgcccgtgcgcatcttccaggactgccgcagcctcaagtttctcgacatcggatacaatcagctcaagagtctggcgcgcaactctttcgccggcttgtttaagctcaccgagctgcacctcgagcacaacgacttggtcaaggtgaacttcgcccacttcccgcgcctcatctccctgcactcgctctgcctgcggaggaacaaggtggccattgtggtcagctcgctggactgggtttggaacctggagaaaatg

SEQ ID NO: 2346 - DNA, 464 bp, Homo sapiens
  misc_feature (1)...(464): n = A,T,C or G
catgagaccatggaatgacgncattccagnggcgctgctngggcccgtggcggattgtaagctgctggttttgcggctgggaagagcggcgagagggttcggcatttttcgtcgggatccccgcaaggatgagtgctgccagagagtctcacccgcatggggtgaagcgttcagcctccccagacgacgatgtaaataataatggcggagtggctgagggttgaggcctactaaagcctggagtaggccgggaagggtggttggaggaggacgcgcctgaggtggcctgcagcgggagagcccagggaagaaaccagaagaatgagtgggaaatgcctcccttaatctttatgagggtcagaaggtttgaagaggcccacacgctgagagccggagacctgcgtangaagggggattgaggaaggaaattctgagagggtcgaggagtgaaagagcttagtcaa

SEQ ID NO: 2347 - DNA, 491 bp, Homo sapiens
  misc_feature (1)...(491): n = A,T,C or G
gccccccccccggaagngaattgaganccatngaactgatgacctaggccagngcggnggaattccaccagccaggcatcctgtaattcagttcagtctgaccctgccgcggttatcagggaccccagcgttaggggctcagtcaccccccacttcagatgctaattgcaagtagtgggtccctggggtacccacacttctgtccatcttggctacacattgggagttcctacgaccccttcaggtttgatgatttgcggtagtggctcacagaactcaggaaggcacttggtttgcattgccagtttactataaaggatgccacagcgggcacaggcaggcagctgggtgaggaggggcacgggcgaggcccagagggtcctaagcataggagcctttgtccccagggagttgtgtggctggccttacagcacggggatgagttcaccaaactgaaagctttccagagcccctagttccaggatttccat

SEQ ID NO: 2348 - DNA, 476 bp, Homo sapiens
  misc_feature (1)...(476): n = A,T,C or G
nttcgagatccctagtccagtgtggtggcactcccttaaacttagatcaaattttttggtttttaatctgttatcttgggaacttaacctggcccctcacctcttctgcaccccccgcccccgaaactgtctcgtaatgaatttctgctgtcctcctgggagtggacggccgggtcccgtcccccgggagcatcgctcggctcagcaccttggctcccagtgggggccccgtggagggcgcccgtagtgataagcacaccggcacgaacgtcaggtccattcctcgaagtcggagccctcactctgccctgtcctggggctggctgagggcgaacgccccacctcactttctagagccctgtctgtcctagctcctatctgaccttgtgtgtaaatacgtacatctgtttttaaagtggatgggcccctgagaactcagtgaaatgcagagttctccatgcacctaaagctccttt

SEQ ID NO: 2349 - DNA, 425 bp, Homo sapiens
  misc_feature (1)...(425): n = A,T,C or G
cctcccttttcccatcgcccaggatgagaggactgaggcatcagctgcaacctggactcaaggccccctgaagtccttctgtccccaaagacctgtgacctctgggattccactcttcggagttgcagttaactggggtatcagctgaatcaacgaggaggattctagagtgaacttccacaccataccccaggcccctaagcccactcctccttgtttagccatctgtcctcaggatggatgtcccttgcttccacagggaggccacgtatcanggaaattgcaggtctgcaggggcagatgttggcagctcttgcccttgcctgttcccccaccttagcagagccaaccctcactactccccagccttccccgactctgctctgttcaaccctgcaggggccaagttccccatcaagtggacc

SEQ ID NO: 2350 - DNA, 457 bp, Homo sapiens
  misc_feature (1)...(457): n = A,T,C or G
agcgtgcagnnnnnnntttgactggagtacctaggccgngncgnggaattccaaggagctgcctgcctgtttgctgtgttgaactcttcactctgctgaagcttttaatggaaaaagctttcttctgactgtgaccctcttgaactgaatcagaccaactggaatcccagaccgagtctgctttctgtgcctagttgaacggcaagctcggcatctgttggttacaagatccagacttgggctgagcggtccccagccctcttcatgttccgaagtgtagtcttgaggccctggtgccgcacttctagcatgttggtctcctttagtggggctatttttaatgagagaaaatctgttctttccagcatgaaatacatttagtctcctcaaagggactgcaggtgttgacatgagttggaaagggaaccctgggatacgtggcgtcccctctattgga

SEQ ID NO: 2351 - DNA, 230 bp, Homo sapiens
  misc_feature (1)...(230): n = A,T,C or G
atnatttaccctcctccagaggtcagaaatattgttgacaagactgccagctttgtggccagaaacgggcctgaatttgaagctaggatccgacagaacgagatcaacaaccccaagttcaactttctgaaccccaatgacccttaccatgcctactaccgccacaaggtcagcgagttcaaggaagggaaggctcaagagccgtccgccgccatcccccatgtcatgcg

SEQ ID NO: 2352 - DNA, 488 bp, Homo sapiens
  misc_feature (1)...(488): n = A,T,C or G
gggatgaggagnnnccccccaactgagnaactgagatcatacgaagnngcgcggaanncccagcgtggggatgtctaggagctcgaaggtggtgctgggcctctcggtgctgctgacggcggccacagtggccggcgtacatgtgaagcagcagtgggaccagcagaggcttcgtgacggagttatcagagacattgagaggcaaattcggaaaaaagaaaacattcgtcttttgggagaacagattattttgactgagcaacttgaagcagaaagagagaagatgttattggcaaaaggatctcaaaaatcatgacttgaatgtgaaatatctgttggacagacaacacgagtttgtgtgtgtgtgttgatggagagtagcttagtagtatcttcatcttttttttggtcactgtccttttaaacttgatcaaataaaggacagtgggtcatataagttactgctttcagggtcccttatatctgat

SEQ ID NO: 2353 - DNA, 492 bp, Homo sapiens
  misc_feature (1)...(492): n = A,T,C or G
ngggtttcattgagnatgtantgcactagccagagtggcggaattcggcgcctgctactgcatttacaggctgacccggggtcggcggcggggcgaccgcgagctcgggatacgctcttcgaagtccgcagaagacttaactgatggttcatatgatgatgttctaaatgctgaacaacttcagaaactcctttacctgctggagtcaacggaggatcctgtaattattgaaagagctttgattactttgggtaacaatgcagccttttcagttaaccaagctattattcgtgaattgggtggtattccaattgttgcaaacaaaatcaaccattccaaccagagtattaaagagaaagctttaaatgcactaaataacctgagtgtgaatgttgaaaatcaaatcaagataaaggtgcaagttttgaaactgcttttgaatttgtctgaaaatccagccatgacagaaggacttctccgtgcccaagtgga

SEQ ID NO: 2354 - DNA, 467 bp, Homo sapiens
  misc_feature (1)...(467): n = A,T,C or G
cgcggtannnaaatgagctctatacatgnggnggaattccgcttgtgccggaagtaaacttgttaacggttctttgccttttggggaggggagacagcccagagaaggctttggagacccttgagtcggccagcgagcagggtttcttacttgagcgcctccacaaataaacgctccttcgctcctccgtcgcgtgcgtttccctgggataataagtgggaaagtggtggcttttatttttttgagacagggtctcaccgccgtcgcccaggccggatggagtgcagtggcgcgatcacggctcactgcagcctcgacttcccaggctcaggtgatcctcctgccttagcctcccgagtagctggaattacaggcgtgcaccaccccccccaactactttttgtatttttttgtagagatgggtttcaccatgtttcccagccttgtctcaaactcctgacctcaag

SEQ ID NO: 2355 - DNA, 587 bp, Homo sapiens
  misc_feature (1)...(587): n = A,T,C or G
ccccccccccccagcnccccccaatgatnnccaaactaaatntcatcgcgaggggccaancncanagnnntaatgctcctatcagcaaaaagagcaccaagcaaataaacatgtcctaatcatttgccatggtagtagatcattaaaaaaatacatttatcttaattacagaatacatgctaagcagaggttcagaaataaaatttctaatgggaactgacagatcgacaaaaggctaacataatatttgcttcatttgtaacaagtattggttgaagggtccaggtaactcaactagcctcagaataaaggatgtaaaactgaaaaggagattttaaacattcttttttagtagcaaaattacacacatgttttatattaaaaaggtaatgaaagaaaaggtggaattttaaaattacgtgaatttctttgggatgaaagcttctggaggcctagtgactgctgaacatttctagaaaagaagacaggtgaccaaaaagcaaatttgaaacaaaagacagaatgtttgaagatgaaggccagaggtaatcgatttcattattatattacaatcatgtaaannattc

SEQ ID NO: 2356 - DNA, 236 bp, Homo sapiens
tggccacaaggctaccgcactggctgggactgccagctgggcctgaagacactggtggctgtggactccccagcttggagcagtccctctttgacctcaccccttggagaagcaaccccatgaaggtgcccagccatgcaatgttgctggaagagccgcctcctccttggcctggcctgcattgccatccagtacacggacatccgcaccttcaccgccaagtcctttcacacctg

SEQ ID NO: 2357 - DNA, 491 bp, Homo sapiens
  misc_feature (1)...(491): n = A,T,C or G
gcgggggcaatgcgaacctagtncgtgtggtggaattcgaggattgctttaaggcactgatttggataaggaataactccatcaccacagaagggaatatcattgtctatgggaatacaattgatacttacaccaccgtggagacgctcttaaaccttggcgtgagcggcagccgcatccacctcgtgcagcccccgcccgcccccaccatcacctgcatcaacaactactcggtggagagcgccgtggcggacgcgctaggagccgccggagtcactatgtaccgggatgcgatcctggcccagtggaatgacggcctgcacccagaccccatctacagcgcctccttcaccacacccaccaagcctttcagactccagtgctctatgttcttcagcttctgtgagaagaatgtggattatgaaacgtttaaagccctcaatgatgcatgtcttgtgtatgacagtcgacttgtgattgataccaacttc

SEQ ID NO: 2358 - DNA, 461 bp, Homo sapiens
  misc_feature (1)...(461): n = A,T,C or G
nattgagnccaacgatagtcgatcgccaaagccgaggacattcaagcagccatcatatccatcagtgaaacggtgtaatcggaatcggacactaacacttaagctacggatggaggagcgatttacaaagaaagaaagattactcaggaagaagttacctaaaaaaggaattgactatgattttccttctttgattttacagaaaacggaaagtatttcacaaactagtcgtcagacgtctacaaaaggccaggttttacgtaagaagaagaaaaaagtttcaggtactcttgacactcctgagaagactgtggatagccagggccccacaccagtttgtacaccaacatttttggagaggcgaaaatctcaagtggctgaactgaatgatgatgataaagatgatgaaataggtttcaaacagcccatattctgtgtaaaagaagaaatacaagagactc

SEQ ID NO: 2359 - DNA, 488 bp, Homo sapiens
  misc_feature (1)...(488): n = A,T,C or G
gtgggggnattcggactcgagtncctgtggtggaattccaagattgccggtctctacaatgactcggagccaccccggaagaccatgcgcagaggggtgctgatgaccctgctgcagcagtcggccatgaccctgcccctgtggatcgggaagcctggtgacaagcccccacccctctgtggggccatccctgcctcaggagactacgtggccagacctggagacaaggtggctgcccgggtgaaggccgtggatggggacgagcagtggatcctggccgaggtggtcagttacagccatgccaccaacaagtgagtgacaccaaccctggggctgctctctggtcaccaaacttgcctgggctacgggagaaaagctctgcagagggtgctccccagaggctggttgtgcagggagcaccaggtcctcccccatcctcactccccaacaggtactgcgcccctggctgatccagccttttcctcctt

SEQ ID NO: 2360 - DNA, 454 bp, Homo sapiens
  misc_feature (1)...(454): n = A,T,C or G
atcgagccactggaacgtcgnaaaagnccnccactnccagctctggccactcaacaccccgcctggcaccccctagccctgcccgttatggcaccgacaaggctgtgagtgctctgaagtctccccagcctaatagggggatggggagaggtcacaggcagggctccccagtgtacagcaacaataacccctcacaccagtggttttccaaagcaacctcagctttccctaaaggttcaaactcaaagggcaaaggggaggctgagtcactgggatcttgaaccctaactttcactttagtcagatctggactacttttatttctcatgcgtcaagtttctgcataggattttaaaaagtttctggctgggtgcggtggctcacgcctgtaatcccagcacttttggaggccaaggtgggcacatcacttgaggtcaagagttcgagacccact

SEQ ID NO: 2361 - DNA, 408 bp, Homo sapiens
gaggaagcagcccccaggccactgtgcagtgggcgcagagcatggtcaggagtggcctgcccgtactcctccacccagatgagggccctccagagcctgcaggcatctgtggggaatcccagcctgcaggttcttggagaagcaggtgaacctaaggatgaaagcaaaggagggccttgaggaagcagcccccaggcctggcagccacgcagcggctgagctcatgaacttggttcgcagcctgccttgcccctggaggccacgccaggcgctcacccctgagcccacagcccctgcttgggctgcctggcaccctcagggtggcccggcctcctcctgccactctgagcacatgtccgggggttgccaccagagacggctttgttctcccagctaaggccgggagct

SEQ ID NO: 2362 - DNA, 455 bp, Homo sapiens
  misc_feature (1)...(455): n = A,T,C or G
natggagccaacgggaacgtcgcgaaagcccnaggaggagctggcagagccggcgggcagcagatggccgcttggcccccggcagcgcttgcagcgtttgcggcagaggcagcggtgggcggcggcggggagccaggcgccccaagaggaccatccatattgactgtgagaagcgcatcactagctgcaaaggcgcccaggccgacgtggtgctctttttcatccatggcgatggcggttccctggccatctggaaggagcagctggacttctttgtgcgcctaggctatgagggggtggctcctgacctggccggccacggagccagctctgcgccccaggtggccgcagcctacaccttctatgcgctggctgaggacatgcgaacaatcttcaagcgctatgccaagaagcgaaatgtgctcattggccattcctacggtgtctctttctgg

SEQ ID NO: 2363 - DNA, 483 bp, Homo sapiens
  misc_feature (1)...(483): n = A,T,C or G
gcttttcganaaanacgaaggcnnnnntttgaaacccctgatgaccctaggacangcggnggaattcacctgatgaaattacaaatgttcagaattctcaccaccttctggttaagcaagtgtcatggattgaactgtgtccccctgaaactcttatgctggagtcctagtcccacggcctcagaatgtggccttatttggagacagggtcttcacagaggtgatctatttaacaggaggtcccagggtgggccctaaaccccatggctggtgtccatataagatgggcacatttggacaccgagacacagacaagaagacgaccacatacggccacgcggggtgccctccaaggaaccaactccggccgcaccttgttctcggccttcccgcctcctttcccgctgtttaagccgcccatgagagtgccccgtgatggcaacgccagcgggcgcatatacagcaggcctctggggtccagcc

SEQ ID NO: 2364 - DNA, 476 bp, Homo sapiens
  misc_feature (1)...(476): n = A,T,C or G
ggagtgcccnnaaggggccccatagagactaactgaagctctaggaanncccctgacaagtttggatataccctttgccatgtttgctcccaagaatttggagctggaggataccgatccaatggtgaatcctccagattccccagagactgaatctcctctccagggcagcctgcactcacatggctccagcgggggcagcagtggcaatacccatgatgactttgttatgatagactttaaaccagctttttctaaagatgacattcttccgatggacctggggaccttctatcgggagtttcagaacccacctcagctgagcagcctctccatagatattggagcacagtccatggctgaagacttggactcattaccagagaagctggctgtgcatgagaagaatgtccgcgagtttgatgcctttgtggaaaccctgcagtaaaagtatccttgagtcccagcagcacccc

SEQ ID NO: 2365 - DNA, 469 bp, Homo sapiens
  misc_feature (1)...(469): n = A,T,C or G
ggggccnnaattgaaaccaactgagaccctaggacagngcggaggaattccctggctgttgttttcggccctaacctgctgtgggccaaggatgcggccatcaccctcaaggccattaatcccatcaacaccttcaccaaggtccttctggatcaccaaggggagctgttcccaagcccggaccccagcgggctctgaacctggcccctgccccaccagccccttctctggtagcccgggtttggactcttcctcctggcatcaggggccatgaagccccctggagagagatgttggagccacccatcaggcatgctctcccccacctctgtccagcccgcctcacggccctggcggcctcgctgttaccagaagacgtttttctctgccttacacttctcactgcctctctggacaccgggcttttgctgggctctccagagctgggcttggctcttccagctggaga

SEQ ID NO: 2366 - DNA, 491 bp, Homo sapiens
  misc_feature (1)...(491): n = A,T,C or G
tctgattacctttccangtcgnggttgattccgctcgagcggccgctagaggctaaaagctacgaataccaccggtgccaagccttgcatgtgccttttaatacgccagagcgtttataagatcagtgctgtccatacgagacatcatcgtctgaccgctgtgaaggatcgcactcccactgccctttgctaatgacttgaggccaaatgcattataattgtcagagaccgctgtcattttattccacaaccactaacataaccacccacaaaagaagaagacaatcccttcaatgttccccgaatgtgtgctgctgctagctcggaagctctgtagagttttgtaacggagtgtgaactgctggcctggatctcctaaccagtaaggagagagggaggacaaatccgctgagcaggtaaaaattctttcctcctcgntataatctttcatggattcagcactgaggagagtggccagggcatggngcccg

SEQ ID NO: 2367 - DNA, 485 bp, Homo sapiens
  misc_feature (1)...(485): n = A,T,C or G
agctgagtcccctagacanannccnnncctagntacctcctccangncgcggaattcgttggcgaccctgcactgacccgcgtccctccgtcccgagcccgcgcgccctcagagggtgcccggacagactgaagccatggcgattctttttgctgttgttgccagggggaccactatccttgccaaacatgcttggtgtggaggaaacttcctggaggtgacagagcagattctggctaagataccttctgaaaataacaaactaacgtactcacatggcaattatttgtttcattacatctgccaagacaggattgtatatctttgtatcactgatgatgattttgaacgttcccgagcctttaattttctgaatgagataaagaagaggttccagactacttacggttcaagagcacagacagcacttccatatgccatgaatagcgagctctcaagtgtcttaactgcacagcttgagcatc

SEQ ID NO: 2368 - DNA, 478 bp, Homo sapiens
  misc_feature (1)...(478): n = A,T,C or G
ttttgattacctttgcangnggnggttgtattacctctccctcccggcccccatgctcccttctctgccatgggccctccgtccccgccccgtgtcgtgtgcatgatctctgtgagtgtgcgtctgtacgggaagaggcagagggaggcagccagcggggcgtgatgcagtgtgcacagcgaggagcagacccaggcagggccgccagggtgacacaggccacccttccttgccttcagtaactcggtgggcccaggttctgctcttccctggggaccctaacctcgcctccagctgacctgccctgtcctctccagctgtccccacaagcagagccctgaggggtggggaccagctggccacatggtgctgcttttcaggttgggggagaggtggccctgagggacagcccagctctgagtctcagtcgctgatcactgccagggaggctcaggctgccatggctccaggctccctt

SEQ ID NO: 2369 - DNA, 476 bp, Homo sapiens
  misc_feature (1)...(476): n = A,T,C or G
ntttgagnaccctattccagagnggnggatttatttcttgctattgtccactgtcccctgtgctggaagctttgtgcccttgctcagcctggcagcctcttcctggctagggggccagaacgcctctgaccacagcctgtggctcctgaggaagccccgaggctcatcctgccccggcacgggtcaccagctctggtaatgactcctgtggcccggcagtgcccaatcacagccagcctcagtcatgttggcactctgctgcagcactgtcggctgaccagagcttgaacatttatctgcagccggctgaggcagagcaccgcgaaggccaccggacctgcactccgccgcctgcacacatcctcctggcgagctgacagcagcagggcctcactcactcgtgtgcaccgccaggcttatgcacgactctaccccgtgctgctggtgaagcaggatggctccaccatccacattcg

SEQ ID NO: 2370 - DNA, 457 bp, Homo sapiens
  misc_feature (1)...(457): n = A,T,C or G
nctcgagctgcactagcactngnggaggaattcgccctgtagcgtccaccatgtgtgtgtcctgagtttccagtgcaagtcatctggatttgcatttagctagggaaactcggccctcaaaccctctccctctctgcctgaatttgccaaaatgccaaccatccgggcaggtgtggatgccacagtccatccccattgcatttcacccccacatggacagaggcacacactcgcacacattcccagcacctttgactgctgggggatgcaggccagggtctgcctggagcctcagggttgggacttatctccaaaggagcccacaccccctcttccaggatgggcactggctggcagcacttttttccctcatcacatccctgacccctgcccagcccacatgcacatgctgtttcctgtctccagggccctagcctgtggatctcttcctcccatg

SEQ ID NO: 2371 - DNA, 419 bp, Homo sapiens
gaaaaggctgcccgatgaccggttcctgaactccacagctatctcccagttctgggccatggacaccagccttcagcaccgctaccagcagctgggagctggcttgaaagtgctgttcaaaaagacccatcggatcctacgccggctcttcaacctctgcaagcgctgccatcgccagcctcgcttccgcctgcccaaggagaggtccttgtcctactggtggaaccgaatccagtccctcctctactgtggggaaagcacctttcctggcactttcctggaacagagccacagctgcacctgcccctatgaccaatcttcctgccagggccccatcccatgtgccttgggcgaagggcccgcgtgtgcccactgtgctccagacaatagcacacgctgtgggagctgcaacccgggct

SEQ ID NO: 2372 - DNA, 478 bp, Homo sapiens
  misc_feature (1)...(478): n = A,T,C or G
ntttctgaatcccctttgnagngnggnggaatttcgagatccctagtgagtgtggtggaatttccgaggcctccatgacccccgatgccaaacacctgtggctggagttcagccaccccgtggagagcctggcgctgactgtggaagaggtgatggacgtgcgccgtgtgctggtgaaggccgagatggaaaagtttttgcagaacaaggagctcttcagcagtctgaagaaggggaagatttgctgctgctgccgggccaagttcccgctgttctcgtggccgcccagctgtctcttctgcaagagagccgtctgcacttcctgtagcataaagatgaagatgccttctaagaaatttggacacatccctgtctacacactgggctttgagagtcctcagagggtatcagctgccaaaaccgcgccaatccagagaagagacatctttcagtctctgcaagggccacagtggcagag

SEQ ID NO: 2373 - DNA, 445 bp, Homo sapiens
  misc_feature (1)...(445): n = A,T,C or G
ntcgtagaccctagtccatgtggtggaattcctgtggagtctatcagacgtgggctgaattttgctgatcagctgggtagttatggccgagaactgcacttgcctcagtgttctcatctatgaaataaggaccctcatgcccacactgtagagtcacgaagctcagagattattcccagcagcagccagcacctggcctggctgaggccattgcaccgttatcctggaaactgaggcagacactccagcccctttctgggatcctggccacgtcattgtgctcctgccctgcaggctggctcccgggggtctctgatggccaaccaaggggccacccagggacctctaactccacacatcctccacccgggggggtggcgggccaaccctctgggctgtgttatggacagaggaaaacttggcgcgcctccttggtgcacagaat

SEQ ID NO: 2374 - DNA, 434 bp, Homo sapiens
  misc_feature (1)...(434): n = A,T,C or G
tatttggaagagaaaaccaatgtaatgcaatcggaatccagttgtattattaagacccgcatttgaaacctagtttcttctatcagaagtaatttttctgatttttggattatgtacttctccttcatataaatgaatgttactgcttttgtggtgttaccagacctagcttatagaaataaatgacaggccacctgggggtctgcccgtgcaagcatgaactaagcagcaacaagcagtatgccctgcggtgaccagtgtgtcagcattcacataagcccgggacagtgaatgcgggcccttgtcagtcacgggcatcaggcgcatggcactgggcacagctgactgcctgttgatgctgatggctggatggctgcatttaagtacactttcacaaaactcatttgtatctcttcccgaagnacctanatgga

SEQ ID NO: 2375 - DNA, 453 bp, Homo sapiens
  misc_feature (1)...(453): n = A,T,C or G
nttgatttccgttccactatccgtgtggtggaattacagatgtgagccactgtgcctggcccccacctttaacttctgagaagccatgggccccagttgtgcacagctgtcccctagtgatcaaagacggttgcagaacaaatcactccaaagccaagtggcttagaactaccattgataattgtcttgcacagttctgcgggctgacagggacctgctgggcagattcccacccggctgcaatctgatgtcagggggccgcagtcatccgggccacatgtccacggtggtccgttcacatgactctccgtggatgctggagatggcttggagttccactggggctgtcgatgtgagaacgtacaggtgtctcctctgtgtggcttgagcctcctcaaagcatggcagcctgggggctccaagagggccaggtggaagccgccaggcctcttg

SEQ ID NO: 2376 - DNA, 487 bp, Homo sapiens
  misc_feature (1)...(487): n = A,T,C or G
ggcggggggnnaaatgagaccntaatcgagancgtaggccanngcgnggaattcctttgggaggccaaggcgggaggattgctagagcgtatgagttcaagaccagtctgaacaacatgggaagactctgtctctacaaaaaatattaaaaaactagccgggtgtggtggcacaggcctgtggtcccagctacttgggaggctgaggttgggggaatgcttgagcctaagaggtcaaggctgcagtgagccatgatcgcgtcactgcgctccagcctgagtgacagtgagactctgtctaaaaatcaataaacaaaatttaaaaagataaagaatcatgagaatgaagcatttgaggcaacaaaaagcataggaatcatacaactgtgtggaatgtatatattttttgctttcaactttatttatcaaattttcaatgctattggtcctttcagggttgctcgttagctcctctattctcataagaa

SEQ ID NO: 2377 - DNA, 414 bp, Homo sapiens
  misc_feature (1)...(414): n = A,T,C or G
cgtgaaagtgtcgtgataaatcgagcaagcatggggaaggtgagtgggggctacatgcatcagctaacagaacagaaagctttgcaatgctttttcatacaaggtctggaatttacagataacacaagtagtttaggtcaggggttgatgtcattattattattatttttaactcctgtggcaggtggtggtgccaaggtgtctggctacttatcttacttttgtttctaaatttttgctttctctctttcctcctgtcttgtgaactangcaagatggtgggaggagggcagccggagtagtagtggtctccttcgttagttcaggttccagctacaaacacttaccacctgtgagaccttgggcagttcacatcccctctctgtggctcagtctgctcaactgtaaaatagg

SEQ ID NO: 2378 - DNA, 481 bp, Homo sapiens
  misc_feature (1)...(481): n = A,T,C or G
agcggttttnnaactgagacatattgaggcctctgaaaacggngaaagccgcgagaaggccagcgtccctggctgggagcagagctagccgagtagggcgcccggctgtcaaactggccggcgcagtgcacgctgggccgccccggagcggtcgcagagcccgtcgggagtcgtagtccgggacgggcccgcggcattgtccgcgacgcagctcgggatccgggtcggggtgtcggccgggttgctgccgggcaccgtcgagcgttagccacccagcattgagctgccagcggctgttctccctaagcaccctcgctcacgtcgcctcgcctcgcctcgcctgaccggccgcagccttggataccagccttaaatcgagccgactacggcccagccccgcccgcggcgaggtgcgcggngttcggtgccagccgctcgcccctggcggngccagcctcttgatgcaccggngacgggcgct

SEQ ID NO: 2379 - DNA, 437 bp, Homo sapiens
  misc_feature (1)...(437): n = A,T,C or G
ctgaggagcttgngagagccgcctcctcgtcatctgttgttccatacctgccccggctacctatacttccttccaagactcggacactgaagaaacaggtggagaacaaggagaacattgaaggggcacaagatgccacagaaaattctgcttccagtttagcaccagggttcatcagaggtgcacaggcctctagtggatccccagcactgcctcgaaagcaaagagacaagtcacccagcagcctcttggaagatgccaaagagacatgcttcaccagggataggaaggggggcttcttcagctccttcatgaagaagagaaatgctcctacaccccccaaacgcagcagctccttccgagaaatggagaatcagccccataagagatacgaactcacggngcttccagagcaggataggatggcaatgaccctt

SEQ ID NO: 2380 - DNA, 484 bp, Homo sapiens
  misc_feature (1)...(484): n = A,T,C or G
gaggtgnccaaatgagacatcactgagaccactggaagnngcgnggaaatccgcatccctgtgtcctggatctgaagatggggacccggcagcacggcgatgatgcatcggaggagaagaaggcccgccacatgaggaagtgtgcgcagagcacctcagcctgcctgggtgtgcgcatctgcggcatgcaggtttatcaaacagataagaagtactttctctgcaaagacaagtactatggaagaaaactctcagtggaggggttcagacaagccctctatcagttcctacataatggaagccacctccggagggagctcctggagcccatcctgcaccagctccgggccctcctctccatcattaggagccagagttcataccgcttctattccagctctctccttgtcatctatgatgggcaggaaccaccagaaagagccccaggcagcccgcatcctcacgaggcttcccaggcagccca

SEQ ID NO: 2381 - DNA, 483 bp, Homo sapiens
  misc_feature (1)...(483): n = A,T,C or G
gatggtnnnnaaatgagccttaatgagancataggccanngcgtggaattcattgaaacgaatcgcaaaaataatgtcagtgtttccacttttgacaaaaatgggaaggcaggtggtttcatgtctgcgataagcgcattgctcctgcaataattactatttgagataattatgaaaaagaatttaaatacttaaggcatgcacaggggccaggacaactttcttttgccttattcataatttctgctgcaagttggagtcttgtcctgactgggacgtggggtgggcgtgggatgctgaggagcagtgggccagtggcagacccagcactgagacctgctcgaggtttaaggggcatggttgggcccagaaagagtgcacatcttggagtgggacacacctgggtggaagatgaatgttttagcaaggccatcctagacaactttctctgcacctcagtttccttatctgtaaaatggggtg

SEQ ID NO: 2382 - DNA, 486 bp, Homo sapiens
  misc_feature (1)...(486): n = A,T,C or G
cgcgcgttttnnaatgagaccntaactgagaccctaggccgnngcgnggaattccgggccgcgtaggggcgctttgttttgttcggttttgtttttttgagagtgcgagagaggcggtcgtgcagacccgggagaaagatgtcaaacgtgcgagtgtctaacgggagccctagcctggagcggatggacgccaggcaggcggagcaccccaagccctcggcctgcaggaacctcttcggcccggtggaccacgaagagttaacccgggacttggagaagcactgcagagacatggaagaggcgagccagcgcaagtggaatttcgattttcagaatcacaaacccctagagggcaagtacgagtggcaagaggtggagaagggcagcttgcccgagttctactacagacccccgcggccccccaaaggtgcctgcaaggtgccggcgcangagagccaggatgtcagcgggagccgcccggcggcg

SEQ ID NO: 2383 - DNA, 472 bp, Homo sapiens
  misc_feature (1)...(472): n = A,T,C or G
cccccatgagacatcgtagagcgcgtaanncgactcgnggncgcttgttttgcttatgcctgatgccctgaacaagttcacatgtgtgcttgtcttttttcctgcagatgaggtggaaagtgagaaatggtacctgtctacagacttcccttcaacatccatcaagacagagccaattacagacgaaccacccccaggactcgctccgtctgtcactctgaccatcacagccatctccaccccgttggaaaaggaggaacctcctctggaaatgaacactggggtatgctcaattttcgtctgtttaaacaggttggattaaaagatacagatagatcctcattctccaataaggtgtttaatctttttggagttagtggctgtgtacatttaaggacatgcaacttcatatgtgtgtatatacatatgtatacatttaataagggtatgttgatttggagccaacttcctt

SEQ ID NO: 2384 - DNA, 499 bp, Homo sapiens
  misc_feature (1)...(499): n = A,T,C or G
gtgccnggnnnagggccccctgagcccctngatagtagacattagacagngcggnggaattcctgaggtccctaaacacagattcggagcgccctcttccagttggcagctggatgccagccagagctatgctgtgcccttgccctgagagtttcccgggcaccgcctcatcctgagcgacatcagggggcccgggtcacggtcgacttccaggggtctccacagccacgaaggttggggcccgccttcctggagcgagtaatccatccatcccgtgaatacttgccaggcacattgctaggtgctggagaggcaatgagagcacattcggagccctgctcgcctgaactttaccatggagtggaggagtggacattagtgacataattgctcaagtaaatggagaatttcagcgttgacaagtattagtaaagagaagttcagcgtgctacaaccatgaataagcaagggacccaatctagtcttggagtcagggaag

SEQ ID NO: 2385 - DNA, 442 bp, Homo sapiens
  misc_feature (1)...(442): n = A,T,C or G
ctcgtatggacttgactttggaggcaaagtcaatccatcagacttcttagtaagaaggaccaagaaatatggacctagaatttggaagaaagtcagggctaatgatgtcttgaggatgcttgcctaaaactcacagtaatgctcttttggacaagaggagactgaaactcctgtaagtgagagaatttttgttgttttgtttttgttttgttttgtttttgagatggagtcttgctctgtcacccaggctggagtgcagtggcactatctcggctcactgcaagctccgcctcccaggttcacgccattctcctgcctcggcctcccgagcagctgggactacaggtgccctccaccacgcccggctaattttttgtatttttagtacagacggngttttaccgtgttggccaggatggtctcgatctcctgacctcgtgat

SEQ ID NO: 2386 - DNA, 488 bp, Homo sapiens
  misc_feature (1)...(488): n = A,T,C or G
agagtctccnnnaggcgcccccaataaagacccnaatagagngccgctgngaancngcgnggaatncgtacatgagacggagctgcctcctctgactgcgcgggaggcgaagctttttcggcggaatatcagccgaaagagcaagtgggtggatatgctgggagactgggagaaatacaaaagccgcagaaagctcatagatcgagcgtacaatggaatgcccatgaacatccggggcccgatgcggtcagtcctcctgaacactgaggaaatgaagctgaaaaaccccggaagataccagatcatgaaggagaagggcaagaggtcatctgagcacattcagcgcatctaccgggacgtaagcgggacattaaggaagcatatattcttcaaggatcgatacggaaccaagcagcgggaactactccacatcctcctggcatatgaggagtataacccggaggtgggctactgcatggacctgagcc

SEQ ID NO: 2387 - DNA, 459 bp, Homo sapiens
  misc_feature (1)...(459): n = A,T,C or G
agagcngaggggnnaattgagaccctagaaggatggctatatgcanngacntgtctctgcgcgtgtgcgttttccctcctcccccgccctcagggtccacggccaccatggcgtattaggggcagcagtgcctgcggcagcattggcctttgcagcggcggcagcagcaccaggctctgcagcggcaacccccagcggcttaagccatggcgcttctcacggcattcagcagcagcgttgctgtaaccgacaaagacaccttcgaattaagcacattcctcgattccagcaaagcaccgcaacatgaccgaaatgagcttcctgagcagcgaggtgttggtgggggacttgatgtcccccttcgacccgtcgggtttgggggctgaagaaagcctaggtctcttagatgattacctggaggtggccaagcacttcaaacctcatgggttctccagcgac

SEQ ID NO: 2388 - DNA, 486 bp, Homo sapiens
  misc_feature (1)...(486): n = A,T,C or G
ggtgaggcggccaaatgagnccttaatgagancctaggcagnngcgnggaattcggcctcagcatcaaagggaagactaccatgccagggatgaagcgagactgcgggggtgctgcggccgtcctgggggccttcagagccgcaatcaagcagggtttcaaagacaacctccacgctgtgttctgcttggctgagaactcggtggggcccaatgcgacaaggccagatgacatccacctgctgtactcagggaagacggtggaaatcaacaacacggatgccgagggcaggctggtgctggcagatggcgtgtcctatgcttgcaaggacctgggggccgacatcatcctggacatggccaccctgaccggggctcagggcattgccacagggaagtaccacgccgcggtgctcaccaacagcgctgagtgggaggccgcctgtgtgaaggcgggcaggaagtgtggngacctggtgcacccgctg

SEQ ID NO: 2389 - DNA, 482 bp, Homo sapiens
ggggatttgagaccctagtccagtgtggtggaacccgtaaatattttgaatgagatcattatttgtgtaagaggaggcaaaattctcataataattttcttagttctttccatttatatatttttttaaaaaataaggagagtaccaccttatttattacatgtaacattttggggtatgaggcgatctatacaaggaaaaattttccagaaactaatgttctctcaaatattaacattttaaagtatttctaataataaaaatttagtatataaacttggtttcttttatgattaacttaaacaaattagccacaaggggaaaaataaattatttcaatcattgtaagttaatttgtattctttctaaatatataggttgtaattaggggtgtattagtggtcctaaaccctggaccagcattggaaacatttctaatgtttaacacagttggagactctataactcactaggtgggaagt

SEQ ID NO: 2390 - DNA, 481 bp, Homo sapiens
  misc_feature (1)...(481): n = A,T,C or G
agaggcccnnnnnnaggcccccctgagaccccgtagtnggcagtcgaagngcgnggaanctctacaggctacacacggcggctgttcatctttgccagtcccttccattccgctgtttattcttgccagtcccctccatcccttttctggtgtcttaggggcaaaggatcgccgatgcactcatgatgcttaggctggggagtaaggttccacccccaaccttcatgcctcactctctgttcatgcagccctgccctctgagctcaggccccgccccttttaaattctgtgcagaccatagtgctgctcaacctgtaccggaatccacagaacacagcccaaactgcagacggatcacactgtgagtaagggaccaggcctgggggcaaggtgaacagcccccagtaggctacactctgattccaccctgcccgcccccaccccaggtcatgtgagtgacgtggaggtgcaggagcactan

SEQ ID NO: 2391 - DNA, 459 bp, Homo sapiens
  misc_feature (1)...(459): n = A,T,C or G
agagcggtggggnncattgagacccttnatagagggccgtttgccaatgtcatcaatggcggttctcatgctggcaacaagctggccatgcaggagttcatgatcctcccagtcggtgcagcaaacttcagggaagccatgcgcattggagcagaggtttaccacaacctgaagaatgtcatcaaggagaaatatgggaaagatgccaccaatgtgggggatgaaggcgggtttgctcccaacatcctggagaataaagaaggcctggagctgctgaagactgctattgggaaagctggctacactgataaggtggtcatcggcatggacgtagcggcctccgagttcttcaggtctgggaagtatgacctggacttcaagtctcccgatgaccccagcaggtacatctcgcctgaccagctggctgacctgtacaagtccttcatcaaggactaccca

SEQ ID NO: 2392 - DNA, 478 bp, Homo sapiens
  misc_feature (1)...(478): n = A,T,C or G
nggagtgagggccnggnnnnnaaattgaactgagtancnctcggcacngngcnggaattcgcgcaggccgccctattccgcgccctcagggcgtcagtatccgcctgaggccggatacccactctgggctcggatacccgcgctgggcccggagcatcctcggcgctgccctcccagagccccgcagaggctgaggtggcgcgggggcggccccggctccgcgagaagaggcggcagcgagggctggaggacccgggctacggggctccggggcgtctggcctgggtgggactgagcccatccagggactgggactccggggttctggtgtaggtggatcccgggcaggctcaggaccaagaccctctccttccaccaaggagcgcccagaggccggcgggagctccaggttcacctcctcctcctccaggaaatcccacttccagctggatgtctggatgaactactgaaagctgcn

SEQ ID NO: 2393 - DNA, 462 bp, Homo sapiens
  misc_feature (1)...(462): n = A,T,C or G
agtgcgaggggnnnaatgaaaccntnaaatgaaancatatgcagngncgnggaattcagaagacagtgcagccacctccgagagcctggatgtgatggcgtcacagaagagaccctcccagaggcacggatccaagtacctggccacagcaagtaccatggaccatgccaggcatggcttcctcccaaggcacagagacacgggcatccttgactccatcgggcgcttctttggcggtgacaggggtgcgcccaagcggggctctggcaaggactcacaccacccggcaagaactgctcactacggctccctgccccagaagtcacacggccggacccaagatgaaaaccccgtagtccacttcttcaagaacattgtgacgcctcgcacaccacccccgtcgcagggaaagggggccgaaggccagagaccaagatttggctacggaggcagagcgtccgn

SEQ ID NO: 2394 - DNA, 476 bp, Homo sapiens
  misc_feature (1)...(476): n = A,T,C or G
gaaggtcnnnttgagncctttgtgtccctatccgtgtggggaattcccgctccccagtgagaccggaagcgcggggaacgaatccgggcagtccttgcgggagcgcccagggctagagcgagaggcttgtcaatcactactcgttgccacgacgacaggctttgggagccccgcccccggttgcctaggcgtcgtctggacctaccttggcaccctggagcggaagttgccgcctggacttctgggaagtgtatttcgggaccctccgtaggtacctgccatcttggctatgacccaagtctctcccagggtttcaggttgacttggcaccttgaagagtggaggcttggcccccaggatgaggcggccctcgaaatcgatgccacccacgggggaatgattctgcggtgccatccccttcataaacgcagattccttcctaaagccgcagctgcagaaggaacagcgcgaggagg

SEQ ID NO: 2395 - DNA, 479 bp, Homo sapiens
  misc_feature (1)...(479): n = A,T,C or G
tcatgtgccccttgatcccctttgattccctgtancacgcgcgggannaagnggcgtccccgccacgtttccggcgaccgcaggcgcggattccttggcttccctcagcactttcccctccgcgcggacggccccgagacgctttttcactgggccttgtcgccagcacccggcgtgggggatgcgtagttggtgactgcctctccagatgctgaggtgcctgtatcattggcacaggccagtgctgaaccgtaggtggagtaggctgtgccttctgaagcagtatctattcacaatgaagttgcagtctgccgaattccagtcacttttcacagaaggactgaagagtctgacagaattatttgtcaaagagaatcacgaattaagaatagcaggacgagcagtgagggatttattaaatggagtaaagcctcaggatatagattttgccaccactgctacccctactcagatgaagg

SEQ ID NO: 2396 - DNA, 432 bp, Homo sapiens
cacctgtctctcacagccatatgggccaaggtccaagacccgtgagaggagcccacacttacagctgcagggactgctggcgtgctctcctccatgctgctgcccctggtcccaggtggggtgagctggcaccagctcctgtggaatgtttggttgctctgaagcgggctgcggcctgttcattagtcctttcttcccgctgcccacagcatttgcatccttgctgggatcctggaggactttgtgcatgggcaggcatccttctgtgctgcagcgggcagagtgggagttggctcactcagcacgctcactaacccagcatgccacttccagcaggcatgcaatcctggcccagctctatgggaaacaaggaggaaagtagccactgaaggccaaaacaccatgtggggtggacagagggtttgctgggct

SEQ ID NO: 2397 - DNA, 460 bp, Homo sapiens
  misc_feature (1)...(460): n = A,T,C or G
naccgagaacancgtagatctngganananacaagggaaagaaaatgttatttctccctaagtcaggagcatgcagagctagcccacctcatgtccagttgtccactttccatcctggagaaagaacagtgtgcctcaaactcctgccctccccaggcctctggggcccgctggaaagggctctgaccccctggcccggccgggctctctagtggtgatccggctcattctcctgcaagttggaagcacaattttccccccaagtggaggaaaaggaaagggccccagcctactgaagaggtgtttattttttaactaacagcctcccaccccattaagactcaccaggagaggtctgagggccattcagaacccactcctgagtgggtgggtgggtgggactcagtccacagacctaacattcaaaatatagcattggctgcctatttagagatggatt

SEQ ID NO: 2398 - DNA, 487 bp, Homo sapiens
  misc_feature (1)...(487): n = A,T,C or G
tgacagatcnnnntttgaannccctttcgagatccctantccatgtggtggaattcgccgaggtggccggttactggccctttggagcgttctgcgacgtctgggtggccttcgacatcatgtgctccactgcctccatcctgaacctgtgcgtcatcagcgtggaccgctactgggccatctccaggcccttccgctacaagcgcaagatgactcagcgcatggccttggtcatggtcggcctggcatggaccttgtccatcctcatctccttcattccggtccagctcaactggcacagggaccaggcggcctcttggggcgggctggacctgccaaacaacctggccaactggacgccctgggaggaggacttttgggagcccgacgtgaatgcagagaactgtgactccagcctgaatcgaacctacgccatctcttcctcgctcatcagcttctacatccccgttgccatcatgatcgtgaa

SEQ ID NO: 2399 - DNA, 250 bp, Homo sapiens
  misc_feature (1)...(250): n = A,T,C or G
ntttgagtcccttttgcgggcggtggtaaccgatgtctggtacgcagacgacaatctcttcgccatcgagttgcaaaacgatacggaaagccccgtgcgccgacgggtggttcggaccgaggttgaggaacatgaagtcctcgttttcggtgccgcgcttcatcccccactcttccggttggaaggtcagggcttccatctccagatcctgtttggctttggtcagctcaaacggcgagaattcgatatc

SEQ ID NO: 2400 - DNA, 431 bp, Homo sapiens
  misc_feature (1)...(431): n = A,T,C or G
ctcccccaaatcgccatatttaaaaattattttcactctattcttgcttaaaactgtactcttttgcaaattaacaattttatcactgattcagagttaaaaagaagactaacttttcaagcaaatgcatctgtaaagatgctttagattagactgtcatgtctcagtgtctatctgtatatattatttgatattcagagaatctaaagcactcgtctactgttttaatgagatttaacagcttttaacagtgagtttcgtttgtaaactgcttgaagtctgtggcattcaggcacacgtctggctggccggctgggtctcctcccgggctcagtgggcctggggcctctctgacgtggtgcctgctggagggaggctcgtcgtcaccagctgactgctggtccggcttctgactggcctttgtcctggcn

SEQ ID NO: 2401 - DNA, 490 bp, Homo sapiens
  misc_feature (1)...(490): n = A,T,C or G
gagagatcnnattcgaaaccctatctgagaccctagtccatgtggtggaattcaaacacgctatacgcgtacgcatcaggctaaatggcaaaaacgggcacggggatcgaccttggctgtgcgttataggaacaacgcatgaggcgacatgcccttcccggtgctatccttgggcagagccggtgccactgacactgcccactcctaagagaagacagaggctcattcattttgcccgagctaatgtcatgccctggaattcgtgcggtggctctcgggagcttctcccaggctggcagaagggagctccagctactgcctgcccccgcccctgtgtacccacatcagtgacagcatggctctctcaagaggccctggccactgtccacactgatcttttccgaagcctttgcacaagctgtaaccctccctctctatgacacccaacaaacgccaaagcattctttaagacacagcttgaaagccactc

SEQ ID NO: 2402 - DNA, 489 bp, Homo sapiens
  misc_feature (1)...(489): n = A,T,C or G
gggaacaaagntttcgagaccctagtcagtgtcgtggaattccgggaggtgggcattgaacttggtaaagagcatctacaaaaaacctacagctaacatacttattgatgaaagactgaattcttttcccctgacatcaggagtaaggcaaggatgtccattcttgctactcttgttcaatacagtgctgaaagttctagccactccagtaaggcaagacaaggaaataaaaggcctattgattggaaagtaagaaatgaaacagtctcttttcgtagatggcattgtctctgtagaaactcccaggaaatctgcaaaaaaaaaatcacaaaacaaaacaaagcttctagaactaataattgattttaggaaggtgactaggtacaagaaaaatgtacaaaaatcagtcatgtgtatatatcagtgaacaccagggacacaaaaattttaaatataataccattcacaattttcagaaactaaggaaan

SEQ ID NO: 2403 - DNA, 479 bp, Homo sapiens
catcgatatccctactccgtgtggtggaattcccttgaagaagaacctggctgacgaggatgctgtgtcttgcctggtgctgggcaccgagaacaaggagctcctggtgcttgaccccgaggccttcaccattttagccaagatgagccttcccagcgtccccgtcttcctagaggtttctggccagtttgatgttgagttccggcttgccgcggcctgccgcaatggaaacatctatattctgagaagagactccaagcaccccaagtactgcatcgagctgagcgcccagcctgtgggacttatccgggtacacaaggtcctagtggtgggcagcacccaagacagcctgcatggcttcacccacaaggggaagaagctgtggacagtgcagatgcccgcagccatcctgaccatgaacctcctggagcagcattcccggggcctgcaggccgtcatggctgggctggccaatggag

SEQ ID NO: 2404 - DNA, 441 bp, Homo sapiens
tttgagatcactagtccaagtggtggaattacggagggcgggtgagtagacagcgaaagctaccaaaatctcttagatttaagagggagttgttcatgtagctaccgtcacactaacctttgctttaaaacaagtaaacggattgggcgagggatgtgacagtatcctatcagagaaggggccagaaagcaaaaacaaaatcaagagaaaggtaggaggcagctgccccactgccccagtacagatatcaaacaatttttaaaaacaatctggaaaagtgtttttctacgtgaaaatcattggtgtagtcgattcttctatgttcgtccgagtaacggctatcctagtacttctcggacactgtcatctcggtttttcttctaaccctctacccttctggaaaagtgttactttgtaccactacattagtcagaaacacac

SEQ ID NO: 2405 - DNA, 477 bp, Homo sapiens
  misc_feature (1)...(477): n = A,T,C or G
nggctgcngaactgaaaccctcgnanngnngcagcnacctaagggacacccanaaagccgncaagtaccacagcaaggcgcgccggaagaaaatcatgatcatcatctgctgtgtgatcctgggcatcggcatcgcctccactgtggggggcatcttcgcctagaagccacccaaactgccactccactccaggtgggccactccaaggaggccctggctgctgccacctggctgggctgccctcccaacccccgcctctggctcagagcaccctccctcccggcccccatgctcccttctctgccatgggccctccgtccccgccccgtgtcgtgtgcatgatctctgtgagtgtgcgtctgtacgggaagaggcagagggaggcagccagcggggcgtgatgcagtgtgcacagcgaggagcagacccaggcagggccgccagggtgacacaggccacccttccttgccttcagn

SEQ ID NO: 2406 - DNA, 429 bp, Homo sapiens
  misc_feature (1)...(429): n = A,T,C or G
atcgcattgatgactcttagaccgngnggnggaattcaataactctgggaggggtgggggcggaggagctgggaaagggacctggctccctacagatgggggcctaggatgcaccttcaccctccagcttcccttctgggagggcagtggcagcagcaaagggccaaggccccaagccaggcaggctatgccaacgacactgccatgtgccaatctgtcaccaccctgccaagcactaaaggtaggggtagagatggaggaggaggaggggccggggccgggctagagggggactcagctccattcacagttgggggcgtgtctgggaaacaccctgggtccagaggtacaggactgcttggtgcccagaaaatgccaaagaaacctgactctactcttctgtgcccaggtggggaaggagaagggtcg

SEQ ID NO: 2407 - DNA, 434 bp, Homo sapiens
  misc_feature (1)...(434): n = A,T,C or G
cttttctcagaccgctttttatagatacggaagaaagggaacctgcggtctgtgaagggcataaggctaaattgggcttccatttgtgctattttcatgtattaatcttaatatttactgaggataataatagtagtcaatctttattagcttttacttactgtgagccaaacattattctaagcacctcatctatattaactaatttaatttttataaaaaccttaggaacaaaatgctacttttagctgattgtgcaaatgaggatcctgagcacagagttgaagggcctgcccagagccacccangcagcaggtggctgatacagccctgcctgcatggagttcagcacttacagattcccaggcttgtagaggtccaataaatactggttaggagctcctagcatacatgcaaactgatcaatgatagcg

SEQ ID NO: 2408 - DNA, 440 bp, Homo sapiens
  misc_feature (1)...(440): n = A,T,C or G
ntcgtagaccctagtccgtgtggtggaattccagcgtcaaaggtgcaggaggcgcccattgatgagcattggatcatcgagtgcaatgacggcgtcttccagcggctccgggactgggccccacggcagacacacaaggtcatccccttgaaaggcctgtgggaggatgtggcacccaccctgcctgacggtcactttgatgggatcctgtacgacacgtacccactctcggaggagacctggcacacacaccagttcaacttcatcaagaaccacgcctttcgcctgctgaagccggggggcgtcctcacctactgcaacctcacctcctggggggagctgatgaagtccaagtactcagacatcaccatcatgtttgaggtgcgcccacctgaagttccccatgggtctccaggaagtgaccttggatgggggtggga

SEQ ID NO: 2409 - DNA, 461 bp, Homo sapiens
  misc_feature (1)...(461): n = A,T,C or G
agcggggtgnnnnnncactgagtagcctatcaattgncgnggacttccaacctcccaaccccaccctgtgcgctgcctctgggtcagtacagaggcctgctcccatttccattgtcctgggggccctgggcaggccaggtgggccagctgggggcacagggcagctggaacaccccccaggtgcccgtgctgccagtcttcttgcagccacctgtggtcagcatgcctggcccccggctgcggatcacgtagccttctgccctgtcccttgccagatggcgccctcggaaccgcccggagaaaccaggtgtggtttggcctccgaatcccccccaccgcctgctgtgggcacagcactcagccgcgagggggacagcgggtgggcagcaagactgcttcctttgcggcttcagaccctgttcgctcctatgttcctgtggtccacgcgccgtctccacacn

SEQ ID NO: 2410 - DNA, 473 bp, Homo sapiens
  misc_feature (1)...(473): n = A,T,C or G
gaggccggntttcnnnnagctttatctcgannggcctgntntctcgcacgngcnccnggngcctangggccccattgacaagcctgccgctgcactgtgcatggtcgctgtgatgagggccttgggggcggtggctcctgcttctgtgatgaaggctggactgggccacgctgtgaggtgcaactggagctgcagcctgtgtgtaccccaccctgtgcacccgaggctgtgtgccgtgcaggcaacagctgtgagtgcagcctgggctatgaaggggatggccgtgtgtgtacagtggcagacctgtgccaggacgggcatggtggctgcagtgagcacgccaactgtagccaggtaggaacaatggtcacttgtacctgcctgcccgactacgagggtgatggctggagctgccgggcccgcaacccctgcacagatggccaccgcggnggctgcagcgagcacgccaactg

SEQ ID NO: 2411 - DNA, 484 bp, Homo sapiens
  misc_feature (1)...(484): n = A,T,C or G
agagtgcccgganttgtccnnnnagctatnaccttcgcanngcgctagntntctcgnanangcncacaannggggccnagggcaagggcccaaggacaacaagagaaccngcaaccgnngccgcctccagccagagcggggaaccccgggcagcgaggcgcaaganagccactctaccagctacccaaccctcctcagccaccagacctgcatggacctgaacgccccggcgctcgctctgcctgtagccaggatgcagctcccaagccctggtctgcgctcatttcatcctctggcttcctcactgccctgtgacttccacctgctcaacctacgtacgctccaggctgaggaggacaccctaccctcggaggagaccgcactcatcttacaccgcaagggttttgactgcggcctggaggccaagaacttgggcttcaactgcaccacaagccaaggcaaggtagccctgggcagccttttn

SEQ ID NO: 2412 - DNA, 559 bp, Homo sapiens
  misc_feature (1)...(559): n = A,T,C or G
ctactaaaccggactactaagttaatcgcaagcagagaagtgcgttgtaacgtataccgtaaataactaagtcgaacaaatacagcccacaaagattttgaaacccttcgagaaccctagnccangcggaggaaanccaacctcatctccaggcttggctaagccccacatgcccccaggtccttttgccctggccctctggcccagttgcaaagccggcagcgcgactacaagctgggggccctccacgccaagcagcagggagataccactgctgccgctagacacttccgcgaggctaagagctttgatgctgtcttggaggccctgagccggggtgagcccgtggacctctcctgcctgccccctccacccgaccagctgcccccagacccaccgtcaccaccgtcgcagcctccgacccccgctacggcgccctccacaacagaggtgcccccacccccgaggaccctgctggaggcgctggagcatcggatggagcgcgaccaggtggccgcagcccaagccaagagcaagggggaccagcggaaagctcgag

SEQ ID NO: 2413 - DNA, 486 bp, Homo sapiens
  misc_feature (1)...(486): n = A,T,C or G
aggggccggnnnttctnnnnagcctggaggctcagnannnnncctantgncatctgnananacnccccnnnangcagngagngaaaggggagggaatgccgaaanagcacagactctcattctcctgcgggctttttgagggttctgcagagaacatggtaatgaccctcccttccaggcccaaggctccaacagactgagaggaagtaaaagggctgctgggacccaggtcgtaccgcaatctcaggcccagcctgcccccgtctccccactaggcacgccatctccagggctcccaacttgcctggttccccacaccagccgaagctcccaaaggaaggtgccctcgttgagcatccaaatgtgtgaatcagagacctgaaagctatcattcagttccccctcctacacccaccgaggccaggttctgtgtgcatgtgtgtgtgtgtttctctctccctctgtctccttaaaacagttcaatgg

SEQ ID NO: 2414 - DNA, 478 bp, Homo sapiens
  misc_feature (1)...(478): n = A,T,C or G
gaggccggntttctnnnngctactatctcgaanngctccttttnctagtaanagacgcggnanngnntggctgaggattacggcctctaccgagacctgttccacggtgccacctttgtgccccgagtccccctgcacgtggcctacgctgtgggtgaggatgacctgatgcctgtgtactgtggcaatgaggtgactccaaccgaggtaaccactcacttgtgcccctcctccctgccctgtgcaaacacagacacatcccatctcagtgtcacagacactcctgggtttggaattttgttgttctctgtctctttgatttcctggaagacgacaccatgacaatttcaaagaaaatagaacaaaatgaaggaaaaagaggctctgtcttagcacattcctgtgaccagcctgctgtctgtggtgtgccctcctggcccggccttggcacatgttcgttnttgtggttgttgcctgg

SEQ ID NO: 2415 - DNA, 479 bp, Homo sapiens
  misc_feature (1)...(479): n = A,T,C or G
aggtccggntttctnnnnncctcnacctagcannggcctacnantctctgnananncgcgannatctcataannnnattnncttgangactaatgatgttgagtgtatttcatttgtattttagtttgcaaatggtggttcaaattcttcacgcgtttttaatgaagatgtacgacttatttttgtgttctgaacagaagttctttgtcacataaaatgtgctatgaatgttgagttttaaatactccaaatgaatggctagagaattactatttgtagaaatatttatatgtcaaagggatgctaacaatttactttattgctctaaaatagaaaagttgccagaatgctgtggagttttagtggaaaacatgatagctggtgttactgagtaaatttgagtgttaaatgtcaatgtaagctaacggccaagatagggaccactgcagggtggttacttgcagctgtgactcaactgg

SEQ ID NO: 2416 - DNA, 489 bp, Homo sapiens
  misc_feature (1)...(489): n = A,T,C or G
agggccggntttctnnnnatcatgagcctcgannncttcagtntatctcgtaanngncgcggaantctaaaaagagactactactaagagacaagaagcaggactgaatgcctttggggaaaggcgatggagtccttgctccttcccccacaccccatggggctcaccgccattgctatggccatcccagcctctgtgactgtgtccatgggagaggaaaccagtggggtcttaagagtgattttcttggtcagagcagaagtcaggtcctgaggagacaaacgtcaaccagtgtgggaaagcatcccttacacctcaaggtgttactgagtcccccacaaaaaggcacttttgtatgacctgcatgctaacaagcaacatgatcctataaaatccacccccaagcccaatctggtgagttagcccagagaccaggtgatagtagcaccttagctcaccttgatgttcaggacccaattcctgatcata

SEQ ID NO: 2417 - DNA, 458 bp, Homo sapiens
  misc_feature (1)...(458): n = A,T,C or G
nttgagtacctatccaggggggaattcgtttcggctgagccgggttggggcccgggttgggccgcccggggactctggagcattgggatttgtagcgcgccctctgggtaggcggctgtagcggagaggcgtgcgggatcgggatgtcggggctgctcacggacccggagcagagagcgcaggagccgcggtaccccggcttcgtgctggggctggatgtgggcagttctgtgatccgctgccacgtctatgaccgggcggcgcgggtctgcggctccagcgtgcagaaggtagaaaatctttatcctcaaattggctgggtagaaattgatcctgatgttctttggattcaatttggtgccgtaataaaagaagcagtcaaagctgcaggaatacagatgaatcaaattgtttgtcttggcatttcaacacagagagcaacttttattacgtggaac

SEQ ID NO: 2418 - DNA, 476 bp, Homo sapiens
  misc_feature (1)...(476): n = A,T,C or G
cggggttccnnaaatgagacctattgaagngcctggaattcccccactcttaactacccacaaggaggactacaaagagttgtcagttattgctttaaggaacaaaggtctctaggtaggatttatcttctgctaaggcattaaggtaaactgagtcccagtgaactttcaagtctttttaagggctctaagcaggactgtcagctctgaggctccccctccatgctcttcaaagcctgggtgggtgtcagggtgtctggcagagtgggagtggaggctggccagctggctgggccacccaacccgagggagggggcagtgttcttcccagtcgcagtctccagtgatgagcatcccctgttggggccttcggtggctctcctcagcggctaatgcagttctggacatccacaaagcctaggcgttgcctgcgtttccgctgctccgtcatctagggttaagcagatgccaacagg

SEQ ID NO: 2419 - DNA, 474 bp, Homo sapiens
  misc_feature (1)...(474): n = A,T,C or G
tttgtttcaggggggnnnggaattgaagaccctagaacagcgcggnggaattccggcggcggnggcggctgtgtgtcgccggagccgaagcgcgcaggcccgtcccggtggccggggagcgggcgggtgggggcgccatgtgggtcatgtacctgctgagctggctgtcgctcttcatccaggtggccttcatcacgctggctgtcgcggctggactctattacctggcagaactgatagaagaatacacagtggccaccagcaggatcataaaatacatgatctgggactagtggtggtgaatcattacctagcatttcagttttttgcagaagaatattatcccttctcagaggtcctggcctatttcactttctgcctgtggataattccgtttgcgttttttgtgtcactttcggccggggagaacgtcctgccctctaccatgcagccaggagatgatgtcgtctccaa

SEQ ID NO: 2420 - DNA, 464 bp, Homo sapiens
  misc_feature (1)...(464): n = A,T,C or G
agtgataaccctctgaancngctggaattcatgcgttttaagcagaggcctcggctccgcaactgccactcctcctcggggtgttgctcaagtttcgaggtcaccggcgaccccccctagcagcgcgcctggctctggcccccgcgaaggaggacggagtttgtgtgttgcatactttctaaggcggcggctgcagcagcggctccatccagcccgtcagctcctcctgcaaggcatggctggctacctgagtgaatcggactttgtgatggtggaggagggcttcagtacccgagacctgctgaaggaactcactctgggggcctcacaggccaccacgtcattccttgcttctcatcagtgttgcctttcctgatcgccccaggcagattttctattttctttctccatgcccctgcattgcaccttgtagaaactgccatctaacatctgctgaatggact

SEQ ID NO: 2421 - DNA, 480 bp, Homo sapiens
  misc_feature (1)...(480): n = A,T,C or G
ntcgcgatccctagtccagtgtggaggaactcctcggcgtggtggtgggcgcctgtaatcccagctactcggggccaaggcagcagaatcacttgaacccgggaagcggaggttgcagtgagccgatatcgcgccgttgcacttccagcctgggcgacagagcaagactccctctcaaaaccaaacaaacaaaaaaacctcaagtgcctgcaaggccaagcagatactgtagatgtgtaaagggtagcatagattggcagggttgggagttgggggcaggctgggcaaactggagtgagcaaggcctacttatattttaatactttaaagttatttttattaaactgtctgctgtccaaacataatacatgttgtaggccaaaatggccatgaagctaccagtttgcaaaccctgaactgtgaaatcttttagccacttccctatcttctctgttggagccatcattagtacttaaaaaa

SEQ ID NO: 2422 - DNA, 484 bp, Homo sapiens
  misc_feature (1)...(484): n = A,T,C or G
ggcggggggngggggaatgaaaccctnnnaattgagaccctagccagggcgggaatcctctgacacacagcgaggaagagctggaacacagccaggacacagacgcggatgatggggccttgcagtaagcagcctgacaggagcaatggccaccagcaggtgaagggcatcgctgccccaggcctcaagccgggcacccaaccctggatgccaccccccagcgggtaccagaggaaagctggcagcaggcgcctcctcccccaacgcatcccagccagtgccatgtcctctgcaggtggagttactggcctactccttccccatgagccctccctgtctgcactgcccaggccagagggtagagcacaggggtttccccatactacctcccctccccaggacactcccaggcttgggttttttctataggtttggcggggggccacagggaggggaccctgacaataaagagattggatcccaa

SEQ ID NO: 2423 - DNA, 475 bp, Homo sapiens
  misc_feature (1)...(475): n = A,T,C or G
gggnaccnaggttanaaacctagcangactangntntctcgnananacaccngnncncagnccttcggaagccccggcgccagcccgggccctcggcagggaggatgacggagctgcagtcggcactgctactgcgaagacagctggcagaactcaacaaaaatccagtggaaggcttttctgcaggtttaatagatgacaatgatctctaccgatgggaagtccttattattggccctccagatacactttattgataaaaatggtgatgtgtgcatttctattcttcatgagcctggggaagataagtatggttatgaaaagccagaggaacgctggctccctatccacactgtggaaaccatcatgattagtgtcatttctatgctggcagaccctaatggagactcacctgctaatgttgatgctgcgaaagaatggagggaagatagaaatggagaatttaaaagaaaag

SEQ ID NO: 2424 - DNA, 477 bp, Homo sapiens
  misc_feature (1)...(477): n = A,T,C or G
gggttcacaaaggtaaaaacctagcgacccttcnganggcntcgaannannccanagactgtntntcctcgcctgagttcctggaccacatcaggaaggtgatgctcgtgattgatgctgcagtgaccaatgtggaagacctgtcctcactggaggagtaccttgccagcctgggcaggaagcaccgggcagtgggtgtgaagctcagctccttctcgacagtgggtgagtctctgctctacatgctggagaagtgtctgggccctgccttcacaccagccacacgggctgcctggagccaactctacggggccgtagtgcaggccatgagtcgaggctgggatggcgagtaagaggcgaccccgcccggcagcccccatccatctgtgtctgtctgttggcctgtatctgttgtagcccaggctccccaagcttccctgcatcttggtccttgtccccttggccacactggagagg

SEQ ID NO: 2425 - DNA, 482 bp, Homo sapiens
  misc_feature (1)...(482): n = A,T,C or G
tgcgtgccanaggtgnnaaaaactgaaaccannttgnngngcccgcannaacncnnaannanannggaggagaccagaggcacttnttacatgctggtggcaagatataatgaagaatcaaaagtggaaacccctgatagggccatcaaatggcgtgagacttcaccatcacgagaatagcacgggaaagaccagcccccatgattcagttacctccccctgggtccctcccacaacatgtgggaattctgggagatagatacagttcaagttgaaatgtgggtgggggcacagctaaaccatatcacacttttaatgtcactgtattcctggtgagacgtgacagtgttaatgaggaagacatcaaggcattggggctacagattgccagagtcccatgcaaatcatgagtcgctcggaccacccagcccgagttctgaaggagcccgtcctcctcagatgctagggacccacagagcatt

SEQ ID NO: 2426 - DNA, 476 bp, Homo sapiens
  misc_feature (1)...(476): n = A,T,C or G
gatgggcnnaaactgtaccntatcgaggtgcctgaattcccacgacttggcccccatagaggccgcggggacagcaatcacaaaaactcccttgggagaaggggagccaactggaaatttcggtgtgccagaagacggagccgtactgtcctacaccgactgaccggccactttggtcgccggggccagggaggcatgaaggccaataataacgtgtttgagccaaagcctcagtgcccgagtacaaggtggcctccgtgggggggtctcgctgcctcctcctccactacagcgtctccaaggccatctgggacggccttatcctccttgccaccttctacgttgcggtcaccgtcccctacaatgtctgtttctcgggtgacgatgacacccccatcacttcgcgacacacccttgtcagcgacatcgccgtggaaatgctcttcatcctagatatcatcctgaacttccgcacc

SEQ ID NO: 2427 - DNA, 486 bp, Homo sapiens
  misc_feature (1)...(486): n = A,T,C or G
gtatatataggaaatnaacgaagnnnnnnnttttgagaccctgatgacactcggacagngcggnggaattcccggaagtggagggtctacacgaagcgccgctgggtctgggtgcccggaggcagcattgttcgcggagttcgcccgctggcccccgatcaccatgtcggctttcgacaccaaccccttcgcggacccagtggatgtaaaccccttccaggatccctctgtgacccagctgaccaacgccccgcagggcggcctggcggaattcaaccccttctcagagacaaatgcagcgacaacagttcctgtcacccaactccctgggtcctcacagccagcggttctccagccatcagtggaaccaacccagccgaccccccaggccgtggtgtctgcagcccaggcaggcctgctccggcagcaggaagaactggacaggaaagctgccgagctggaacgcaaggagcgggagctgcagaa

SEQ ID NO: 2428 - DNA, 457 bp, Homo sapiens
  misc_feature (1)...(457): n = A,T,C or G
natggagccccatcgtagacactagtccgtgtggtggaattcctaaactcctctgtcagtctgtaaacattacctgagaattccccagccgaaacggctgctggggcaagaaacttcttgttagaactttccacctccggcttccccctccacctcttttaccgtcccaaccttaggagacgctttttctcccccagaggagaattnatctttttttttttttccttttttttttcctccccgggggctttgctttgggaaaaaggggatttaaaaaggggccggggggaacccccctctcctccttatcgggttaacaattaatggtcgggggggtttttaaatcccggaatggcccgccccggggagtttccccccttgcccggttccngggcgggaagaagggggggaaaccggctggcccccctggaaaggtcccctttacagaggatcaatg

SEQ ID NO: 2429 - DNA, 257 bp, Homo sapiens
catctgcgcgcggcctggcctgcatgctgagccacatggtgctgtccggacagatggacagacactcggtggagtctgcctttctcaggccctaaatccctctccaaagggtacttgcgatgccggatttaaaacttgctcagagccacttagccacttgagaaccagacagtaaggtgttactctcaggtttgtttttccaaagtaacagatgacatgtggaataaagtaatagagtaacaagtggcagggccaga

SEQ ID NO: 2430 - DNA, 480 bp, Homo sapiens
  misc_feature (1)...(480): n = A,T,C or G
tgagtgccannagttanaaancctagggnngccttgcanatcntcgnaaaancnnnnganaaagagatgccctcggtgttcgggaaggacaacaagaagaaggagctggtcaacaacctggccgagatctatggccggggcgagcgggagcaccggatctcacctggggacttccccaatctgaagaggatgcaggaccagctgcaggcccaggactttagcaagttccagccgctgaagagcaagctgctggaggtagtggacgacatgctggcccatgacattgcccagctcatggtgctagtgcgccaggaggagtcacagcggcccatccagatggtgaagggcggagcgttcgagggcaccctgcacggcccctttgggcatggctatggggagggggctggagaaagtatcgatgatgctgagtgggtggtggccagggacaagcccatgtacgacgagatcttctacaccctg

SEQ ID NO: 2431 - DNA, 481 bp, Homo sapiens
  misc_feature (1)...(481): n = A,T,C or G
catcgatagccctacgccagngnggnggaattcgagaaggcacagtggctcaggcatggccgcggggacggcggcgcggaaggcagcgcctttgctggaggcccccccgcagcaggagcagctctctcatacaaagctttctgcagaagacacatggaagttgagggctttttcagatgacctcattttgctggttccagcctgcagcaggagaggatgtacaagatgcaccggggccacgattccatgcacgtggaaatgatcttgatcttcctctgcgttctggtcattgcccagatagtgctggttcagtggagacagaggcatggccgatcctacaatattggtctacaaatggtttcttttgatctacaaactcagctatgcatttggtgttgtgggttacttggcgatcatgtttacaatgtgtggattcaatctgtttttcaaaatcaaagctagagattccatggattttggc

SEQ ID NO: 2432 - DNA, 456 bp, Homo sapiens
  misc_feature (1)...(456): n = A,T,C or G
natcgagaccanattgagngcgtggaaanccacgngtatgaaggtggtctacatagcctgctccttcaccacggtctggttgatttatagcaagttcaaagctacttacgatgggaaccatgacacgttcagagtggagttcctggtcgttcccacagccattctggcgttcctggtcaatcatgacttcacccctctggagatcctctggaccttctccatctacctggagtcagtggccatcttgccgcagctgttcatggtgagcaagaccggcgaggcggagaccatcaccagccactacttgtttgcgctaggcgtttaccgcacgctctatctcttcaactggatctggcgctaccatttcgagggcttcttcgacctcatcgccattgtggcaggcctggtccagacagtcctctactgcgatttcttctacctctatatcaccaaagg

SEQ ID NO: 2433 - DNA, 490 bp, Homo sapiens
  misc_feature (1)...(490): n = A,T,C or G
tggtgtgccnannggngannnnaattgatnnccctnnccttttangccagcaagngccgnggaattcgagccacgtgcacaaagtggagtgcgtgatcccctggctcaacgacgccctggtctacttcaccgtctccctgcagctctgccagcagctcaaggacaagatctccgtgttctccagctactggagctacagacccttctgatcacagcacccaggagcttgtctccaggaaggcggccccgtcccctactcatacccaccacagagcaccagccagtgccaacgccaggctgctatttatctccctatcccaccccctaccccacctaacacatttgcactgccgggaatggacactggaagtgccaggaggaaggaaggctggtttggtggggtagtggggaggtcagggaggcggggccaagggtgtcccacattcccaacaccgccctctgatcaccatgggaatctttggactcagga

SEQ ID NO: 2434 - DNA, 482 bp, Homo sapiens
  misc_feature (1)...(482): n = A,T,C or G
tgggtgccaanatttananaacctgcgnnaccgttacngngcccgnannaacnnnnaanntnaagncagaaaccaagactatgtgcttatatgatgtttctagaatttgcagaactattgacagaaagcacacgcatggctgcctgaggttgggggtgggagtggcgactggtgacaaactgtcatgagggaattttttgcggcgatggaaaatgttctataactggactgtggtgattggttgcacaactgtttaaatttactaagactcattgaattgtatacttaaaacgggtggatttatgatatgtaaattatatgtcaaaaatcttttttaaaaatcagtcaatctagaactctgggtatatttggatcggaaaaaaaaaaaactttctccccacttccccactttagactcttcctcccactgacttgagctttaactttgatgccaacaaacaacaaggacagcttattgcaan

SEQ ID NO: 2435 - DNA, 479 bp, Homo sapiens
  misc_feature (1)...(479): n = A,T,C or G
tgggttccanaggtgaaaaaaactgatnccccattgnagngtctngnannaacnaaagnaantatgantatgactgggagagagactttcctcgatactctcaggtttctagtgactctgtctccatgcccttcctttagggaacaattgagtcaattccctttagaggaatttcactcccttggggagtgaatcttgagcgaaatgatgtaaggatatgagaagcagatccagcgcactctctcactcccgtggcaggcccgagaggctgttgacaagctcctgctacccagatggccaggacggccctgggtcctgtctgttcagacttcctgttgatcttattactaccccaaaatctgtccatttaattttgcttaggttaggccagaaaagcaaagctgagagcaatgcgcctgcgttcctcccagcaggacctctgggcctgtgtttgcagctgatgggaagaggccgcgttt

SEQ ID NO: 2436 - DNA, 472 bp, Homo sapiens
  misc_feature (1)...(472): n = A,T,C or G
gggaaccnnagggtgnaacctgaaaccccatcgagntctnaganaancncnnnnnttggnnagtctaggaagccttacttgggcgtttctggccaacgtctgcagagaagctcagacttttacaaagcttgatcatttatacgtgaaactcaagtattgtacagtcatgtttgtattcagatttccccaagtgtcattgaaccaactttaaaggtggaatatgtaaatagttagggagatccatgtaaaataatgtcttggaaactcaaaagagtccagaaaataccaaataatgagttaaaccttttctgtcttctttccaggatctagtgaaaagccatttgatgtatgcggtcagagaagaagtggaggtcctcaaagagcaaatcaaagaactaatagagaaaaattcccagctggagcaggagaacaatctgctgaagacactggccagtcctgagcagcttgccca

SEQ ID NO: 2437 - DNA, 487 bp, Homo sapiens
  misc_feature (1)...(487): n = A,T,C or G
tgcgtgcccanangttaaaaancctagcgnngaccttagnngngctnngcanaaacangnaanntttntgnatggaggaggtgctagcccggtccaccgggctgctgcccacccctgcatgccccagttgcccaccccgcctgcccgtggacatgaggtggtcacgcttcatccacggctccttcccacccctcggcagtggctgtgcaatgttttaagttcacaagttcctgctcctccccacactgagctcctttgttcctccccctccagcctttgcctgggaactggtccttgtttgccgggcttctcggagggttcactgtacattcgttctcaggtggtcttgtggctgtctttcggaaaatggttattttatatgatatggcatggaatttgttctaataaatcattcttctatcacatggcanngnngangctgcaaaanaatgaaaaaaanctcggccccctcaatttaaaaggcccc

SEQ ID NO: 2438 - DNA, 481 bp, Homo sapiens
  misc_feature (1)...(481): n = A,T,C or G
ngtggtancanacatcgagacctatggaagccgctggaattcgatcattcagacagacaacttaaaaacctgcttgagagttttactgacagaaaaaaagaatctgtgcagacccattccctttgctacatagctgaggcattttattttaccattaatttagaagtgagagaagggtcaggtctctccagctttagttctcttggaaacataagattgtccagtagacagcttgttaaacccaagtcattcctaaggcaccatgtcaaagatacttcatacccctcctccaaaaccaaagaaaacacacagagattaatacactacaaaaggaataaacattttagatcagtttgtgactactgacctgtctcctgtttataccatcagaaaagctgatataatagctgttttcccggaagctttatcctggcagtcacaacaggaagaggcctgtagagaaccccagggagcagtgccn

SEQ ID NO: 2439 - DNA, 484 bp, Homo sapiens
  misc_feature (1)...(484): n = A,T,C or G
cgtggttccnnnaatggagaccnactgagantcatacgaagngncgnggaattcccagatctctgtccttgtcctggcacaggctgctgctgcttccggcccccgacccttcctctctgcagcaacccgggggaggtatgccactgtgagtgccctggtgggcacactgagctggcagagatggaagtcccagaagggtggggtgggggtgtcatgccatggtggaggagtttggggccactccttgcctgcctcaaagggggcctggctgagggtgcttcttgaccacaggggccagggctgcctaaggtggcgcagggctgggcctggagtttgggatgcaggcttgttaaacacagggcagaaccccaggttgggaggggctcagtttgcaggcccaggcccgcaggcccactgctggtcccaaggtgagacaggtgagaagagggatggccagcacacacttgagtccccttgggccacg

SEQ ID NO: 2440 - DNA, 469 bp, Homo sapiens
  misc_feature (1)...(469): n = A,T,C or G
agtcgaacacctgggtgnaaccgtcggaangcggaggaannccgccctgctatgaggacgccctctacttcccggagctcattgtccactttatgacagctgtctgtcatggggatgggcagggtgctctctgagaccccccacgggccccagagtggccccctccccaccattccaccatgggcttagatgcccgagtgattgttgtccaaaacaggcgggaaaacagaccagccacacacaaggggcaggggtgagggtgggggtgggggtccttaaacagactaaaatgcagttacctgtggtcattttggaggaaggggaagcctaagaatcgcccccagcatggcttcatcccccaagatggccgatgatctggcctgaaggcctctcacaaagggcaggagaagaagcttccagaaaggctgggatggaggaggagtcctgcggccagctgttgcctgcaacg

SEQ ID NO: 2441 - DNA, 491 bp, Homo sapiens
  misc_feature (1)...(491): n = A,T,C or G
cccccccccccccgcccatgagaccctagntttggaggcgatttcgacctttctcgcccgggtgggcatcacccccgtctcgccagcaccccttcgacttctctgacctcatctcctttctctatagctcgggttcatgacgctctcgatattcctgtgcagaaacctggaccacgtctacaaccggctcgctcgataccgttaggccccgccctccccaaagtcccgccccgcccccgtcacgtgcgctgggcacttccctgctgcctgtaaatatttgtttaatccccagttcgcctggagccctccgccttcacattcccctggggacccacgtggctgcgtgcccctgctgctgtcacctctcccacgggacctggggctttcgtccacagcttcctgtccccatctgtcggcctaccaccacccacaagattatttttcacccaaacctcaaataaatcccctgcgtttttggtaaaaaaaaaaan

SEQ ID NO: 2442 - DNA, 516 bp, Homo sapiens
  misc_feature (1)...(516): n = A,T,C or G
agtaacatcnaagaagaaccngnnnnagnnngnnattgaaaaccctngnnactgagatcactatccangnggnggaattcggaagtccatcatcccagtggtcatggctggcatcatcgccatctacggcctggagggggcagtcctcatcgccaactccctgaatgacgacatcagcctctacaagagcttcctccagctgggcgccggcctgagcgtgggcctgagcggcctggcagccggctttgccatcggcatcgtgggggacgctggcgtgcggggcaccgcccaacagccccgactattcgtgggcatgatcctgattctcatcttcgccgaggtgctcggcctctacggtctcatcgtcgccctcatcctctccacaaagtagaccctctccgagcccaccagccacagaatattatgtaaagaccacccctcctcattccagaacgaacagcctgacacatacgcacggngccgccgcccccagtagttggtcttgtacatgcgcag

SEQ ID NO: 2443 - DNA, 518 bp, Homo sapiens
  misc_feature (1)...(518): n = A,T,C or G
aggtttntanaganaganccggnnnnagnnnagntttgagncccctnngnatcgtagaccactagtccagtgtgatggcattcctttttactatgcgcacatgcgtggcgcggatattcgcgtggagtgtctgcttaatggcgtgtatgacatggcggtggtttcgcgactagcggcggaaagttatctcacgcaaaaaggcttatgcctcgcgctggagttggggccgcacacctacgttggcgagcaccagttgatttgccgtaaaggcgagtccgcaaacgtgaagcgcgtggggctggataaccgttcggcggatcagaaaatcatgaccgatgttttttttggcggtagtgatgtggaacgagtcgatctctcttatcacgagagtttacaacgcattgttaaaggcgatgtcgatgcggtgatctggaacgtggtggcggaaaacgaactgaccatgctgggattagaggcgacgccgctcacagacgatccgcgatttttacaggccaccc

SEQ ID NO: 2444 - DNA, 441 bp, Homo sapiens
  misc_feature (1)...(441): n = A,T,C or G
ntcgagaccattggacgcccatagtcagtgtggtggaattccaggagaaatagaaattgtctgttcctttccttcaaagtgtaaggcctcttccaggagcaactggagccaccacagcttctcagtgacattgggagggcttcgggcccaggaaaaacccaagccttttgtcctgagagccgagccacagcggatgcagtggcgtcagcatcccaaagcggcagcttctctcctgcctgtcactggggactggttgctctccacccatccaggaggaaggggttaggtcccaatcttacactcttatagggtctcatggacataggcctatgcctggtctgatatctataattttttaaactcgaaaggaccaaaacactcctgaacccttatctatacggcctgcactgggcttggggtttactcctggcccatgcagct

SEQ ID NO: 2445 - DNA, 475 bp, Homo sapiens
atctgagaccctattgagtgtcgtggaattcgatggattttctgaggaacctgactactcagtagaacaactcaaaagaaactaaactttccatttcggtttggagtacagaacattttttaaaaagaattaaacacagtgaagtttaggttattcctgaatgacgccaggtttgctgactttcccatctggtcgaggttgccattcttgccatctaattgaaagtataatgggtttcaggtttttaggagttctaaagaattacgctttccatagagaataagaggaagaatgttctacatagtggggagagaggatgaaggttggcagtgtggttaaagagcaaaaccaccaagaaagagtcagagccctgaggacgtctctgtccgcgtggttcttgattctgagccagaaggtgacttggtatagcacgggagttcaaaatgtggtgtcccaaaggaatcacagtgtggac

SEQ ID NO: 2446 - DNA, 430 bp, Homo sapiens
  misc_feature (1)...(430): n = A,T,C or G
aacatttggccatgtgaggcatgtggtcagtttccattttctattacctggaaagggccataaggaagcaggcagggcttaggtagcttggttacctaagttagaaagtaagagaatcatggttcggatatgaattgaagtggttggtacatggatacctgttctttaaaaggaatgtgggagatgagtcaagggtgaggccgattgttctgcccatgccctaccataccaatttcaataacaatcttgcctgtcattgcactcagaatcttaagatcatgtttcaaatatgttgattcaaacttgcttctaagcctgagtccagggatagcaatggtactgaccagctatggactgggagaacattgagtcctgttttccattggcttcagggcgcatccatgtggatataggaaaagcctctttccan

SEQ ID NO: 2447 - DNA, 514 bp, Homo sapiens
  misc_feature (1)...(514): n = A,T,C or G
agggcttnnnancacgncacgggnnaagnnnngnaatcgaganccctggcagttgacaggcattccttattacccttctgcttgggttttatgagggctttgttaagtcttagagggaaaagagactgagcgagggaaagagagaggcaaagtggaaaggaccataaactggcaaagcccgctctgcgctcgctgtggatgaaagccccgtgttggtgaagcctctcctcgcgagcagcgcgcacccctccagagcaccccgcggacccgcacctcggagtggccaccatggtcaggagagttcagccggatcggaaacagttgccactggtcctactgagattgctctgccttcttcccacaggactgcctgttcgcagcgtggattttaaccgaggcacggacaacatcaccgtgaggcagggggacacagccatcctcaagtgcgttgtagaagacaagaactcanaggtggcctggttgaaaccgtctggcatcatttttgctggacatg

SEQ ID NO: 2448 - DNA, 521 bp, Homo sapiens
  misc_feature (1)...(521): n = A,T,C or G
cgtttttntnagnanagnnccgggnnnagnnnnnnaccttgaaacccctcganatcgacnancactaggccagngngctggaattcaaaaacacctgggtccttgcaagaaaagggtcagcctgcaagttaggacagccccaggccccctggcctctgactcacaggtcagcccaggaaagaattcagcaggcttcttccctggaggggccagccctgtcctacatacctcacgcacatcttgcccgtttctgttcataaagacctccagagagggagaagaaccacagctgactcagtccggggtaagcatggtggacggagcaggggctctggaatcagatctgggttcaaacctcaactcagtcatttcctggttctgtggcctcaggcaagctattgaacctctttgagcctcatctggatttgtggataacaattccttctctcanggttgctgtgagggttaaatgagctaaccctcggaaggggcttagcacataataggtgctcaagaaaagt

SEQ ID NO: 2449 - DNA, 513 bp, Homo sapiens
  misc_feature (1)...(513): n = A,T,C or G
acgantannnagnnncgcccgngnnnagnnnnnnaattgatanctttccgaatggacggccattcggccgctctttctttctttcttttcttttcttttttttgagtcttgctctgttgcccagcctgaagcccagtggcacaatctctgctcactgcaacctctgcctcccaggttcaagtgattctcctgcctcggcctccctagtagttggggttgcaggtgtgcacaaccacactcagatagtttttgtatttttagttcagacagggtttcaccatgttggccaggctcgtctcaaattcctgacctcaggtgatctgcctgcctcagcctcccaaagtgctgggattacaggtgtgagccactgcgcttggcctctctctttcttaacaacctctctgagggctcaaggggaaggaaccctacccttcagccccggggccctattttgcccgctgactctgaagctgagactctgcctgatgccacagccccaggatccaggccccn

SEQ ID NO: 2450 - DNA, 437 bp, Homo sapiens
  misc_feature (1)...(437): n = A,T,C or G
atcgagtacgtcgactcacagngcgggggaattccccaaaattgtagagatttcttcagatatctccattaatgaagggaacaatattagcctcacctgcatagcaactggtagaccagagcctacggttacttggagacacatctctcccaaagcggttggctttgtgagtgaagacgaatacttggaaattcagggcatcacccgggagcagtcaggggactacgagtgcagtgcctccaatgacgtggccgcgcccgtggtacggagagtaaaggtcaccgtgaactatccaccatacatttcagaagccaagggtacaggtgtccccgtgggacaaaaggtgacactgcagtgtgaagcctcagcagtcccctcagcagaattccagtggtacaaggatgacaaaagactgattgaaggaaagaaaggggtga

SEQ ID NO: 2451 - DNA, 195 bp, Homo sapiens
  misc_feature (1)...(195): n = A,T,C or G
nncnctaataacaccaggacaaagntaagggatcactactcaagcataagccccagttttcataagactgctgtgaagatgtttgatataaaggcttgggctgagtatgttgtggaatgggctgcaaaggacccctatggcttccttacaaccgggatattggcccttactccccagtactaacaagtgctgacg

SEQ ID NO: 2452 - DNA, 481 bp, Homo sapiens
  misc_feature (1)...(481): n = A,T,C or G
cgggtgccanaagttanaaaaactgggatgtccatgtngntctngnannancacnnnanntnagggngcagggcgtctgtcccaactcacattttcagtgaagctcttttctcatcccttgcaggtgagggtcacagtctgcccatcattgctggagttcttcagacccaaaattgcgtgccttgaaagccagtgtcctggaagggaggcaggtgtgagcctgcaagtgtgcatgcccagccatggtatggacatgtgtctctgggcatgtaaatgtgaaccagtgtgaacaggctccgtctgcatgctgagtgtgcatgtgggagcccgtggctgtgccgtggcaacgtgccattctctgagccagcgaatggcagtgtgttgggaggtctgagaaggcagctgcatccgtgcctctgggaggattcggatctcccccagcttgccgaggccctgcctgatggtctgacacgaggcacag

SEQ ID NO: 2453 - DNA, 480 bp, Homo sapiens
  misc_feature (1)...(480): n = A,T,C or G
gagcgttanaactaagaaacctttagagagtcttggaaancggcgaaggcaccagggtggggaccccggatctggccgcctcctcactccgtgcctcggattatcctctggtgaagcagacgccacagtctgtgagcagctctgtgggggtctgtgtgcccctccgcactggctactgtctttctcgggcgccggtcggcttttgcgtccccacattcagtcccaactgcggctcccgcggatcccgcactggccgcacaggagccacggggcacagcttgttgcgattagagccctgcacataacccacagccagtcgctccccccacagttccgaaagaatatggccccccagaggaaggacctgcatggactgacattctccgttcttcgagcacagaaccgcgacaagctgttcaaagtctctgtcccccacgtactggagatgcggaagcgggagctgaggcccagttccgacag

SEQ ID NO: 2454 - DNA, 472 bp, Homo sapiens
  misc_feature (1)...(472): n = A,T,C or G
nggagtgccgngctgnnnnnnncctgattgcctgtccttgngcnggacntcgccaggccctgcagaccccagagcggctgggaacagtgtctggaatggggccttttgcactcgcccggccaagcctctccaaaatggattccactggtgtgggctgggacctggagcaaggtgtcgccggacgcccccacagggttcccatgtttcaggctcctgccctggcctttctttctggactgcagctcagctttgttgcctgttcaatctactgatttgtttctctggaatttggggtccaaggccctgactatgaccaggatgccccagtcccttgctctaacccggctacagaagtgaaccacaggcccacaagaaccacagacagggaccctccacccccacggtctagcccaggggctctagagctcactagcccaatagaggggctagacaagattcttttccaaatatn

SEQ ID NO: 2455 - DNA, 475 bp, Homo sapiens
  misc_feature (1)...(475): n = A,T,C or G
ntttgagacccctattgagtgtcgtggaattcctggagacaacaaactccttggacagtttactttgattggaattccaccagcccctcgtggagttcctcagattgaagttacatttgacattgatgccaatgggatagtacatgtttctgctaaagataaaggcacaggacgtgagcagcagattgtaatccagtcttctggtggattaagcaaagatgatattgaaaatatggttaaaaatgcagagaaatatgctgaagaagaccggcgaaagaaggtgattacttcttgtcttctgaactttaatcttagtaaagctcagtcttgacagtgggagtttggggctgggcgcagtgtctcactcctgtaatcccagcactgtaagcccactgccaaggtgggcagatcgtttgaagccgggcgtggtggtgcacgcctgcagtcccagctacttgggaggctcaggcaggag

SEQ ID NO: 2456 - DNA, 482 bp, Homo sapiens
  misc_feature (1)...(482): n = A,T,C or G
gtggaacccnaaatgagaccnattgagagtcatccgcagngncgnggaattccatcttttgttcccctaaattaatgctgcttggattttcatcttatttataaagataaaatcacctggaagtgtcaaggagtggggcggggtggcgggggagaagcagccgtgctgccaggtcacccagacctccagacagccggctagccccactgcccgttccttttacgcccaagttttgctccttgagagcagattggctgatgcccctgcaaccccagcccaagctctgcctcaaagaccgagtgacataagccattcccaccctcctaggttcacatccagggctgtgtcttccttgggggaggagatggtgtcgtttagatcagggtaaggcagtcaggcgggtgttcaccactgccttttcttcctctgagcgngagaacactgaacccagccactgcccctgggtccctgtcctggaaatg

SEQ ID NO: 2457 - DNA, 467 bp, Homo sapiens
  misc_feature (1)...(467): n = A,T,C or G
nggatcgaagccccactgatgacattagaaagngcggnggaattccggcgggctggacgccgagtgcggccggcccctcttcgccacctactcgggcctctggaggaagtgctacttcctgggcatcgaccgggacatcgacaccctcatcctgaaaggtattgcgcagcgatgcacggccatcaagtaccacttttctcagcccatccgcttgcgaaacattccttttaatttaaccaagaccatacagcaagatgagtggcacctgcttcatttaagaagaatcactgctggcttcctcggcatggccgtagccgtccttctctgcggctgcattgtggccacagtcagtttcttctgggaggagagcttgacccagcacgtggctggactcctgttcctcatgacagggatattttgcaccatttccctctgtacttatgccgccagtatctcgtatgatttgn

SEQ ID NO: 2458 - DNA, 465 bp, Homo sapiens
  misc_feature (1)...(465): n = A,T,C or G
ggctggagaccancttgacagcgctgnggaannccctacaacagcaccacacgaaaagctgaggtcatcaacgcccgcgagggggcccccatgctggcctttgccaccatgttcaacagctcggagcagtcccagaagggggggctgtcggtggcggtgcctggggagatccgaggctatgagctggcacaccagcggcatgggcggctgccctgggctcgcctcttccagcccagcatccagctggcccgccagggcttccccgtgggcaagggcttggcggcagccctggaaaacaagcggaccgtcatcgagcagcagcctgtcttgtgtgaggtgttctgccgggatagaaaggtgcttcgggagggggagagactgaccctgccgcagctggctgacacctacgagacgctggccatcgagggtgcccaggccttctacaacggcagcctcacggcccag

SEQ ID NO: 2459 - DNA, 479 bp, Homo sapiens
  misc_feature (1)...(479): n = A,T,C or G
gaggttncnaacaatgagacctatagaagncgctggaattcgagttgtggagccaggatgaagtagagcaagctggacgcctagtattcactctgtctactgaggcaatttccttgatccccagggaggccttgggtccagagaccctggagcggcttctagaaaagcagcagagctgggagcagagcagagttggacagctgtgtagggagccacagcttgctgccaagaaagcagccctggtagcaggggtggtgcgaccagctgctgaggatcttccagaacctgtgccaaattgtgcagatgtacgagggacattcccagcagcctggtctgcaacccagattgcagagatggagctctcagactttgaggactgcctgacattatttgcaggagacccaggacttgggcctgaggaactgcgggcagccatgggcaaagcaaaacagttgtggggtcccccccggggatttcgg

SEQ ID NO: 2460 - DNA, 489 bp, Homo sapiens
  misc_feature (1)...(489): n = A,T,C or G
ggttactancgannttgaacccgganataaanaaacctgatnaccctcgataagcgcggnggaannccgnncgggccatggacactttgggcatcgaatatggtgataaggagagaaaggctgactccaagatggtgtgtgatgtggtgagtcggatggaagacaccgagcccttctctgcagagctgctttctgccatgatgcggctctggggcgactcaggaatccaagagtgcttcaaccggtcccgggagtatcagctcaacgactctgccaaatactacctggacagcctggatcggattggggccgccgactaccagcccaccgagcaggacatcctccgaaccagggtcaaaaccactggcatcgtagaaacccacttcacattcaagaacctccacttcaggctgtttgacgtcggaggccagcgatctgaacgcaagaagtggatccattgcttcgaggacgtcacggccatcattttct

SEQ ID NO: 2461 - DNA, 484 bp, Homo sapiens
  misc_feature (1)...(484): n = A,T,C or G
aggtgtacaaggaaannnggttttgagacccctgatgaccataggacangcggnggaattcccctagaagggcaatgaccaaaatgctaccaactatgggcaggccctggaaaacctttgcggacccagaagaggcccctggcttggaggggcccagggctcaccttccgaggagttttgatgtagaggtggtagagccacttgagaactgcaatcctggtcatcatcccaatggccgtgtcactgaggtggcagtttaagacctgcacgatcccgtcgaggtgaagggtcactggggctctttcagtgctgtgggtaagatcgggagggagagcagaggtgaagcccaccatagccctctcccatggagtcatggcaccaccctgggcctgcacatcctgagtcacacactgctaaccaccgtttagggggatcgggggtcagggataacctgatcccacacatccttgctggtctcccacca

SEQ ID NO: 2462 - DNA, 492 bp, Homo sapiens
  misc_feature (1)...(492): n = A,T,C or G
gagcgtttnnnnnaatcgancctctatcacngtggtggaattcgctttaagttgatctgtctgaactctgctgtgatcccatgatgtgaccctgatgggctggacttgcccctccggtagccttccttggccctcccagcgaggggcacccttcctctgtgccccagtgggcatcaccgtcgatctcgctggctgaatgaagaagaccgtgttactgcagaacctgccaagtctgtcatcactgtggggtgtagcctgcctcagagggacctgcaatcacctctctgagctcagtggtattttgagaatataatgcttaactggacccctttccctcaggaagatgtaacatctgcttgggaatgtgattttgctcccaccctaaggaatttttatcaccaaactgaatgttaatgaatttaaaacccatggcttatcattggcaagaggcacgctgacttcatcctgtcattccagcctggggtctgccag

SEQ ID NO: 2463 - DNA, 276 bp, Homo sapiens
  misc_feature (1)...(276): n = A,T,C or G
taagagaccacattgagagcgtggaaanncacacactncnatgngccagacctgcttccctgggagggggtgacggaaccagcactgtgtggagaccttcttcaaggagcggaaggctggcttgaggccacacagctggggcggggacttctgtctgcctgtgctccatggggggacggctccacccagcctgcgccactgtgttcttaagaggcttccagagaaaacggcacaccaatcaataaagaactgagcagaaaaaaaaaaaaaaaaaaa

SEQ ID NO: 2464 - DNA, 478 bp, Homo sapiens
  misc_feature (1)...(478): n = A,T,C or G
agagctggnaccctgagaccctattcggtgtgctgtaattcatgatgaagatgatcgggaagcataagaatatcatcaacctgctgggggcctgcacgcaggatggtcccttgtatgtcatcgtggagtatgcctccaagggcaacctgcgggagtacctgcaggcccggaggcccccagggctggaatactgctacaaccccagccacaacccagaggagcagctctcctccaaggacctggtgtcctgcgcctaccaggtggcccgaggcatggagtatctggcctccaagaagtgcatacaccgagacctggcagccaggaatgtcctggtgacagaggacaatgtgatgaagatagcagactttggcctcgcacgggacattcaccacatcgactactataaaaagacaaccaacggccgactgcctgtgaagtggatggcacccgaggcattatttgaccggatctacaccca

SEQ ID NO: 2465 - DNA, 481 bp, Homo sapiens
  misc_feature (1)...(481): n = A,T,C or G
agcgcgtgccacctgatnccntcctcgagatccntagtccagtgtcgtggaattcaattgttcttgtattgtttccattttacatttttttcttgaagttattttccaattgttttcattctttctgaagttttgtttactcggttttaagtttttgtaattttgatagacttttgtgctttcattttcttaatgacttttacctcatttttaaaacaaatccatagtatggatgatattgatgatgaaatgtcttacgatgatcatttagaggtttattttgaacaactggcaattccaggaatgatggaataaagcatacgaagtagaaggactggaacctccagaaaaagtactttaagttacctacaggtgatcctagtcaggcaaatgaaaacagtagcctaaagtgtcagtttcaaccagaaaataacagctctgatttctcatggctcatactcgtctgaaacgactcaggtag

SEQ ID NO: 2466 - DNA, 440 bp, Homo sapiens
  misc_feature (1)...(440): n = A,T,C or G
attgaatacactcacnnccgcgnggnggaatnctgnggcaacaccacggagccctagagctgtctctttgagccgctctgaatgtgcctcttacataatctcctgggcaacatctgctcccctaatgagatttgctccccagcaaagataagaaacttgccaaccactcccctggtccagcatttggccaaggcagacactgaggctctgaggacaagtggctttcccaaggaaggtcctgctgcccagaagagcttggcccagagccctgtgcccagtgaccccactagcttttccctctactttccccgcctggctgtgctccccttgattcgtgcctattggccgtgcccatagtctctcccaagctcaaagttcacctctttctccagatcccctggggtccccaagcctgactcagtgtatctggggggggtccc

SEQ ID NO: 2467 - DNA, 495 bp, Homo sapiens
  misc_feature (1)...(495): n = A,T,C or G
agggcccgnnnnnagcgcccactgagnccntcgatagtagacattagncagngcggnggaattctgtgaatgaggcctgcagggcgctggtgttcggcggctgcgtggagaagtcctctgtcagccgcaaccctgaggtgccctttgagagcagtgcctaccgcatctcagcttcagcccgcggcaaggagctgcgcctgatactgagccctctgcctggggcccagccccaacaggagccactggccctggtcttccgcttcggcatgtccggctcttttcagctggtgccccgcgaggagctgccacgccatgcccacctgcgcttttacacggccccgcctggcccccggctcgccctatgtttcgtggacatccgccggttcggccgctgggaccttgggggaaagtggcagccgggccgcgggccctgtgtcttgcaggagtaccagcagttcagggagaatgtgctacgaaacctagcggataaggcct

SEQ ID NO: 2468 - DNA, 395 bp, Homo sapiens
  misc_feature (1)...(395): n = A,T,C or G
cagggctctgctctgaagcctgcctcttccgcctagcccgctgcccttcccccaagttgctacgtgcccggtcagccgagaaacggcgccctgtgcccaccttccaaaaagttcccctgccctcgggccctgcacctgcccactccctgggggacctaaagggcagctggccaggtcggggcctggtcactcgtttcctccagatatccaggaaagccccagaccccagtgggactggagctcatggacataagcaggtaggaattcggggagccaggaaagatgtttgggaaagcgtggagcttcagattgagccttattgatgatgccctttcttgtgtccctgtccaggtgccccggagcctgtggggccggccttgccgagagagccttcn

SEQ ID NO: 2469 - DNA, 437 bp, Homo sapiens
  misc_feature (1)...(437): n = A,T,C or G
attgaatagccctcgnccgcgnggnggaattcgcgtccgtgtgtgcagtcaccatcatcaacctccattcggccccttccccagatgcgctggtgacaggggcttcttggatgtcaaatcatgttgtaggagggtgcagactgcgggcttctgtggggagcagtactactgtgtctgtcggcagtggccatgggaccctcagcccgtcctgtacatggagcagggtgcacagtcaccctccatcctgtggcgagaggctggcccggcccggccaggcgaggcagaaggtgtcggccaagtggccccgaccccatcccgcaatctctcagctgctttttattacctctgtgccccatttgggagtttgcttcctccacctggacactttgcccgggaggtcatcagagcccaaccccaggctctgctcgttggagagg

SEQ ID NO: 2470 - DNA, 439 bp, Homo sapiens
  misc_feature (1)...(439): n = A,T,C or G
ctcgaactgatgacttttagaccgngnggtggaattccccacctaggaacctgtctcccgcagctgtcaacatgtcatccatggcgcccaaggtatttgtgccaagaggtgcctgcaggcccctgttaagctgctctcagccccctggcctccctcctgtgcttgttggcatccaaagtccagagggggccgagctggaggttggggttaccaggggcgctggcatgtcagaaccaccctgtgtgcatgcatacccggctgggtggcaacagtacctggacttggctacaactttgctccacactgcatcaggcgccgggagccgggagaggccagggagcangagcaggcacttcttgagcctgctggtggggcagtgggccttcgccggcccccaagagcacagggatgccctggtccagagctgtggctgcactgg

SEQ ID NO: 2471 - DNA, 458 bp, Homo sapiens
  misc_feature (1)...(458): n = A,T,C or G
atcgaccccntnaatggagactataggaaagngcggnggaattccccctatccttaccctcggtacacagatgactggtttaacagccacgggacccgatgtgcaggagaagtttctgctgccgccaacaacaatatctgtggagttggagtagcatacaactccaaggttgcaggcatccggatgctggaccagccattcatgacagacatcatcgaggcctcctccatcagtcatatgccacagctgattgacatctacagcgccagctggggccccacagacaacggcaagacagtggatgggccccgggagctcacgctgcaggccatggccgatggcgtgaacaagggccgcggcggcaaaggcagcatctacgtgtgggcctccggggacggcggcagctatgacgactgcaactgcgacggctacgcctccagcatgtggaccatctccat

SEQ ID NO: 2472 - DNA, 472 bp, Homo sapiens
  misc_feature (1)...(472): n = A,T,C or G
aggngaggcggccggnnnnnnaactgaactgctagctaccgaagngngcnggaattccgaggctgctgcgcggcggacagcgggcgcgatgtatctccgcagggcggtctccaagactctggcgctgccgctgagggcgccccccaaccccgcgccgctcggaaaggacgcatctctgcgccggatgtcatctaacagattccctggatcatctggatcaaatatgatttattatctggttgtaggcgtcacagtcagtgctggtggatattatgcttacaagacagtcacatcagaccaagccaaacacacagaacataaaacaaatttgaaagaaaaaacgaaagcagagatacatccatttcaaggtgaaaaggagaatgttgcggaaactgagaaagcaagttcagaagccccagaagaacttatagtggaagctgaggtggtagatgctgaagaaagtcccagtgct

SEQ ID NO: 2473 - DNA, 451 bp, Homo sapiens
  misc_feature (1)...(451): n = A,T,C or G
nattggcttgcagtccctgggcangngctggaattcccgtgcagaagcagcagcagcagtcagggaaccaccccatcaccgtgcactgcagcgccggggcaggaaggacggggaccttctgtgccctgagcaccgtcctggagcgtgtgaaagcagaggggattttggatgtcttccagactgtcaagagcctgcggctacagaggccacacatggtccagacactggaacagtatgagttctgctacaaggtggtgcaggagtatattgatgcattctcagattatgccaacttcaagtaagcggcaacaagggtccgtggaccaggaggattgcctttaatattttgtaatattctgttttgttaatataccccaaattgtgtatatatcttataacttgtttaaaaaattggtacataggcttctattacctattaggtggaaatttt

SEQ ID NO: 2474 - DNA, 475 bp, Homo sapiens
  misc_feature (1)...(475): n = A,T,C or G
ngggnaaggccggcgcggnnnnnnaattgaattgagtnctctgggcagngngcnggaattcagcactggtgggggcgtagcggtcactcgccccgtcacgtggcagctggagtacccaggccaggcccctgaagcagagaaggacaaaatggtgtgggaaatcctggtgtctgagcgggacatcagagcccttatcccactggccaaggctgaggagctggtgaatacagcaccactgactggagtgccccagcatgtccccgtgcgccttgtcactgtggacggcgggggggccttggtggaggtgacagagcatgtcggctgcgagtctgccaacacacaggtcctgcaggtgtctgaggcctgtgatgccgtgttcgtggctggcaaggagagccggggcgcccggggggtgcgagtggacttctggtggcgccggctccgcgcctcgctgcggctgaccgtgtgggccccc

SEQ ID NO: 2475 - DNA, 453 bp, Homo sapiens
  misc_feature (1)...(453): n = A,T,C or G
atcgagccctctgattgatgcctatcgaaganncacaccctcttagccttactactaataattattacattttgactaccacaactcaacggctacatagaaaaatccaccccttacgagtgcggcttcgaccctatatcccccgcccgcgtccctttctccataaaattcttcttagtagctattaccttcttattatttgagctagaaattgccctccttttacccctaccatgagccctacaaacaactaacctaccactaatagttatgtcatccctcttattaatcatcatcctagccctaagtctggcctatgagtgactacaaaaaggattagactgaaccgagtaccanaaaaacgaaaaatgaaaactaatatgcagaaaaaaaaaaaaaatttgggggcgctctaatataaaaggggcctttaaaaccctgatttatcctcgt

SEQ ID NO: 2476 - DNA, 449 bp, Homo sapiens
  misc_feature (1)...(449): n = A,T,C or G
tatgagaccctgatgagggcntggaaccnccggagaccgggcacaggaggccacactgctccccgagcccggagcaaaagcattttgccctagattctcagggcggggctcctccggcccctgcccgaggcccgccgacaaggagagacgaccaaggttgttgaaaaccagacatatgatgagcgtctagagattaacgactccgaagaggttgcaagtatttatactccaaccccaagacaccaaggacttcctcgttctgcccatcttcctaacaaggctatggctgataacagcagtgatgagtgtgaagaggaaaataacaaggagaagaagaagacctcacagttgacacctcaacggggctttagtgaaaatgaggatgacgatgatgatgatgatgattcatctgaaactgattctgattctgatgatgatgatgaagagca

SEQ ID NO: 2477 - DNA, 484 bp, Homo sapiens
  misc_feature (1)...(484): n = A,T,C or G
ngtggcagnaggggcccccttgaataccntgctcgattgccctgaaaacgccccctgcacgcagagagccctgtgcttcagagataggactgagagctctaagaaaggaatcgtgacaatccttccccaaggaagactctagcctgaacctttggagttgagttgaattcaacgtaaatgaatcaagttgaactgaactgaactgaacaggggcagctgctggagactcacatagaaacccactccatcgttctgcttctcctagaccagtatttggggttggggaggtctgagctctccaaccagcaaggctggacacaggccaagttgccaatcctgagtcccctttggggtacagacctgggaagcttgtcctcgtcccccacccttccccagagagatgaggtgggagtctgagagggggacctgtgcctgaatgcgaagatgcctcggngccatgttgggaggcggcagagaaccatgt

SEQ ID NO: 2478 - DNA, 492 bp, Homo sapiens
  misc_feature (1)...(492): n = A,T,C or G
agtgccnnnnnagcgncccctgagaccctaactggaggcggtaannccgaggcggaacgtgatgttctcttcccggagtacacccatttgcagagggcccagcccatccgctggagccactggattctgagccacgccgtggcactgacccgagactctgagcggctgctggaggtgcggaagcggatcaatgtcctgcccctggggagtggggccattgcaggcaatcccctgggtgtggaccgagagctgctccgagcagaactcaactttggggccatcactctcaacagcatggatgccactagtgagcgggactttgtggccgagttcctgttctgggcttcgctgtgcatgacccatctcagcaggatggccgaggacctcatcctctactgcaccaaggaattcagcttcgtgcagctctcagatgcctacagcacgggaagcagcctgatgccccagaagaaaaaccccgacaggttggagctg

SEQ ID NO: 2479 - DNA, 430 bp, Homo sapiens
  misc_feature (1)...(430): n = A,T,C or G
attgtagaccattggcagtctggtggaattcggagtgtacaaccccacaaaatcttcggcgtgacgaccctggacatcgtcagagccaacacctttgttgcagagctgaagggtttggatccagctcgagtcaacgtccctgtcattggtggccatgctgggaagaccatcatccccctgatctctcagtgcacccccaaggtggactttccccaggaccagctgacagcactcactgggcggatccaggaggccggcacggaggtggtcaaggctaaagccggagcaggctctgccaccctctccatggcgtatgccggcgcccgctttgtcttctcccttgtggatgcaatgaatggaaaggaaggtgttgtggaatgttccttcgttaagtcacaggaaacggaatgtacctacttctccacaccgn

SEQ ID NO: 2480 - DNA, 453 bp, Homo sapiens
  misc_feature (1)...(453): n = A,T,C or G
catgagaccctgatgtaggccngtaaaacangcnnncnctgncctaatttaaaagtacattgcaaacatcatgaaacttgatcccttaaagcttcagtctgcatctcctaagagttagggcattgtcctacacattggcccagtatcacagccaagacgagaagtcatttcccagcgatgtctgctatctaatctgtattcaaaatccccccaattgtctcccaggtaacttatgtgtctggttttggaatcagcatccagtcacggtgcacacattgcattttctaactatgtttttaaaacctctttgaatgctgaaaggtcttccctcagctcactttgagtttttaaatgacattgtttttgaggccctaggcctgctgtctttatgaagccccacattctgaatttgtcagattgtttgctcatggtgtcgcataaccacttcttctn

SEQ ID NO: 2481 - DNA, 454 bp, Homo sapiens
  misc_feature (1)...(454): n = A,T,C or G
catcgagccctctnattgaggcctntggaaacccgcgccggagccggagccacagcggggagggtggcctggcggcctggagccggacttgtccggggcgtccccgcagaccggggcagcaggtcgtccgggggcccaccatgctggtgactgcctaccttgcttttgtaggcctcctggcctcctgcctggggctggaactgtcaagatgccgggctaaaccccctggaagggcctgcagcaatccctccttccttcggtttcaactggacttctatcaggtctacttcctggccctggcagctgattggcttcaggccccctacctctataaactctaccagcattactacttcctggaaggtcaaattgccatcctctatgtctgtggccttgcctctacagtcctctttggcctagtggcctcctcccttgtggattggctgggtcgcan

SEQ ID NO: 2482 - DNA, 455 bp, Homo sapiens
  misc_feature (1)...(455): n = A,T,C or G
catgacnccntaatctgtaccctcgaacangcggnggaaatcccgccctgggccgggccccaccggacggcatgtcgggccccaggtctgtggtgcttttcgggccttcgggagctgggaagagcaccctgctgaagaggctgctccaggagcacagcggcatctttggcttcagcgtgtcccataccacgaggaacccgaggcccggcgaggagaacggcaaagattactactttgtaaccagggaggtgatgcagcgtgacatagcagccggcgacttcatcgagcatgccgagttctcggggaacctgtatggcacgagcaaggtggcggtgcaggctgtgcaggccatgaaccgcatctgtgtgctggacgtggacctgcagggtgtgcggaacatcaaggccaccgatctgcggcccatctacatctctgtgcagccgccttcactgcac

SEQ ID NO: 2483 - DNA, 251 bp, Homo sapiens
atggggctcaattcttcaccaggaatcactgtgtttacatgaaatgacaatttgatactgtatttgatagaaaactatttttttgttaccggggtttacatagaagcacgttgtttataccactaagtgactttggcggggctctcccatggaaacggatggcactccctgaagctcccttgtcaaggtggatgataacgtgtccgtgggtgacatcaggtggtgtctccaccaccaaaagcagttagaag

SEQ ID NO: 2484 - DNA, 463 bp, Homo sapiens
  misc_feature (1)...(463): n = A,T,C or G
tttgggggngggatgagacaatgagagcgctgganngccccagancttggatctctggaaccttctgggagcgcatgaacctgaagtgcccatctacttctccacggggctgaccgagaaggccaaccactactacaagctggtcatcccctggaccaaccacaagatccgcaagactttcgcgcacaggaacatgttggagttcaagcacatcaaggccttcgaccgggcttttgctgacaacccacgaccgatggttgtgtttgccacgccaggaatgctgcacgctgggcagtccctgcagatcttccggaaatgggccggaaacgaaaagaacatggtcatcatgcccggctactgcgtgcagggcaccgtcggccacaagatcctcagcgggcagcggaagctcgagatggaggggcggcaggtgctggaggtcaagatgcacgtggagtacatgtcg

SEQ ID NO: 2485 - DNA, 472 bp, Homo sapiens
  misc_feature (1)...(472): n = A,T,C or G
nggggggggggccggnnnnnaattgattgcgtnctctaggcangngcnggaattcctctttgctaggctggatccagacgagcgctccccaaccaaggacaacggcctcccaggcgctcatcgtctacccgcaggagggtgcccgcagagcttcaagaaggtggttgtcacgcctgtcgccctctgccctcatcgagaaatgtagccacagctcgacgcacggacggagaaggaagccggcaaggggatggggcaagcatgtctgtctctcaaaggctggccttcctggccgagtcacccgtttgacactcctccccggatgccggtggtggtggcatggcccccccgtatcctgcctgggctctggcctctgctctgacctccctcttgctgtgtctgccccgtctctgagaagcctggcggcttcttagcgtggctcagtgtcttccacaaacaagacttccccgtccat

SEQ ID NO: 2486 - DNA, 451 bp, Homo sapiens
caagagacctctgatgagggcggtaaacgccaaagcctattgaacaagaagtcggatggcggtgtcaagaaaaggaagtcgagttccagcgtgcacctaatggagccacaaaccactgtggtacacaacgctacagatgggatcaagggctccacagagagctgcaacaccaccacagaagatgaggacctcaaagctgccccgctccgcactgggaatggcagctcggtgcctgaaggacggagctcccgggacagaacagccccctctgcaggcatgcagccccagccttctctctgctcctcagccatgcgaaaacaggagatcattaagattacagaacagctgattgaagccatcaacaatggggactttgaggcctacacgaagatttgtgatccaggcctcacttcctttgagcctgaggcccttggtaacctcgtggagggga

SEQ ID NO: 2487 - DNA, 458 bp, Homo sapiens
  misc_feature (1)...(458): n = A,T,C or G
catggagccccctnattgagnactctagnaccgngcggnggaantcctgcaggcccagcaacctgctacgggaagaccggggaccaagatctctgggttggttttcctagacccgctcgggtcttcgggtgtcgcgaggaagggccctgctcctttcgttccctgcacccctggccgccgcaggtggctccctggaggaggagctcccacgcggaggaggagccagggcagctgggagcggggacaccatcctcctggataagaggcagaggccgggaggaaccccgtcagccgggcgggcaggaagctctgggagtagcctcatggaagagaagcagatcctgtgcgtggggctagtggtgctggacgtcatcagcctggtggacaagtaccctaaggaggactcggagataaggtgtttgtcccagagatggcagcgcggaggcaacgcgtccaac

SEQ ID NO: 2488 - DNA, 489 bp, Homo sapiens
  misc_feature (1)...(489): n = A,T,C or G
gggggcnnggactggtccatagtccagggctgagacctatatcagtgncgnnggaaacgnggcttttggcaaaaatagccacatacactccaagtttccccctcagctgggattcctggtgtgagcctggtcaccagggtggtaggacagaccctcctctggaggcaaagtgacggtcagcagggggttctgaggccccacagcgctggcaccagtcttggctgaatggcaaagctgcatctgtctccttccccatgagcttccgttgccgtctccttccctggcggccatcagcttactgacgtgtcctcaccagcttactgacgcgtccccaccctccggtcttgctcctggggtcactttggccttcgctgtgaatgggtcaagcttgaggccatgccaagagccagggaagccagcactggccgtcagctcacacacagcctctgagatggagtctcgctctgtcacccaggctggagtgcagtg

SEQ ID NO: 2489 - DNA, 433 bp, Homo sapiens
  misc_feature (1)...(433): n = A,T,C or G
ttgaacccccattgatgaccactatccatgtggtggaattcttcatcactgtggaccccgagcgggacgacgttgaagccatggcccgctacgtccaggacttccacccaagactgttgggtctgaccggctccaccaaacaggttgcccaggctagtcacagttaccgcgtgtactacaatgccggccccaaggatgaggaccaggactacatcgtggaccactccattgccatctacctgctcaaccctgacggcctcttcacggattactacggccggagcagatcggctgagcagatctcagacagtgtgcggcggcacatggcggctttccgcagtgtcctgtcttgagccactgcagtctgggccccatcattaaacgggctgcgtttaanaaaaaaaaaaaaaaaaaaaaaaaaaaaaaaaaanng

SEQ ID NO: 2490 - DNA, 457 bp, Homo sapiens
  misc_feature (1)...(457): n = A,T,C or G
catgaccccntcantgagaccctagcacgngcggnggaaatctgttttggcagatcagggacgcctggtgggagaagcagcaggtttattggctaagctggtgccaactctcatgcccccttgtcttcctgttgtaagatgaagatgacgccaacagactcggggagaaggtgatcctgcgggagcaggtgaaggaactcttcaacgagaaatacggtgaggccctgggcctgaaccggccggtgctggtcccttataaactaatccgggacagcccagacgccgtggaggtcacgggtctgcctgatgacatccccttccggaaccccaacacgtacgacatccaccggctggagaagatcctgaaggcccgagagcatgtccgcatggtcatcattaaccagctccaaccctttgcagaaatctgcaatgatgccaaggtgccagacagcagcat

SEQ ID NO: 2491 - DNA, 457 bp, Homo sapiens
catcgagcaccactcgtcgaaagccgtgtgaaacctgcgccaaggacattagcggctactatggcttctactcgcacagctaggccgcccctacccgcccggtcccgccgcggcccggacccccagccagcccctcacagctcttccccagctccgcctccccacactcctccttgcgcacccactcattttatttgaccctcgatggccgtctgcagcgaataagtgcaggtctccgagcgtgattttaaccttttttgcacagcagtctctgcaattagctcaccgaccttcaactttgctgtaaaccttttggttttcctacttactcttcttctgtggagttatcctcctacaattcccctccccctcgtctttctcttacctcctacttctctttcttggaatgaaactcttcacctttaggagacctgggcagtcctgtcaggcagcagcg

SEQ ID NO: 2492 - DNA, 403 bp, Homo sapiens
gagaagcatttcctgttccatccgcccagcgaccgttccttcatcctttatgagctgtacacgccggcgacctaccagctaactgaagagggcacctttaaggtggtggatgaagaggccatggagaaggtgccctggatcccactggaccccttggcgccagacctagcacggtaccctagttacagtcaggcccaggcccttcgctgcacggtgcgggccggtgagatgctctatctgccggctctgtggttccaccacgtccagcagtcccagggctgcatcgcagtgaatttctggtatgacatggaatacgacctcaagtatagttacttccagctgctcgactccctcaccaaggcttcaggccttgactgatggagcactggtgaacacgaccaag

SEQ ID NO: 2493 - DNA, 490 bp, Homo sapiens
  misc_feature (1)...(490): n = A,T,C or G
aggggggnaatcgagattctagtcacngtggtggaattccccagaccccatgctcctgacacagcccagtttgcaggaaaagagcagacttattaccagggaagacacttaggagacacttttggcgaagactggcagcaaacacctttaaggcaagggtcctcggacatctacagcacgccagaagggaaactgcacgtggcccccacgggagaagcacccacctacgtcaacactcagcagatcccaccacaggcctggccggctgcggtcagcagtgctgagagcagcccgaggaaagacctctttgacatgaaaccttttgaagatgctctcaagaaccagcccttggggcccgtgttaagcaaggcagcctccgtggagtgcatcagccctgtgtcacctagagccccagatgccaagatgctggaggaactgcaagccgagacttggtaccaaggagagatgagcaggaaggaggcagaggggc

SEQ ID NO: 2494 - DNA, 454 bp, Homo sapiens
  misc_feature (1)...(454): n = A,T,C or G
catgagaccctaattgaaaggcggtgaaacgaacgaaccccggcggctggcgtcgcggcaagtccgaccgcaccctagggctaggattctgcgtggttcaaagattctcaaagaatcaaaaagactgaaggaggtgttgggggggcatgtctatcgttggaggtcattaaatatctgacaagtacataaacgtagaccttatacttctacgtttggatctataccaaaaagatccaactccaggcagacagacgcagctgctgggtttatttgctgccctagtacccaggagcagtgaccaacgctgccctgtgcccgcgatgttccagtgcagcgcctctgagagcgcggtagtagtcctgcccttaaggagcttgctgttcccaagcgggcaaacaaatggactgcagagacgacgactcatagatgttctgatgaagatgaactgggtggn

SEQ ID NO: 2495 - DNA, 462 bp, Homo sapiens
  misc_feature (1)...(462): n = A,T,C or G
ctttgacgcccctatcggtagtctttcggaagngccgnggaanncgnnnaaaggaagaaaatgttatatcatctattgaattgcggaacatgctccaggaagtttaaaagcaaaaagctttggaaggacagaggccggaagtaatcaaacctgtctttgaccttggtgagacagaggagaaaaagtcccagatcagcgcagacagtggtgtgagcctgacgtctagttcccagaggactgatcaagactctgtcatcggcgtgagtccagctgttatgatccgcagctcaagtcaggattctgaagtgagtaatagctctggagagacccttggagctgacagtgacttgagcagcaatgcacgtgatggaccaggtggcgagggcagtgttcacctggcaagctctcggggcactttgtctgatagtgaaattgagaccaactctgtcacaagcaccatct

SEQ ID NO: 2496 - DNA, 488 bp, Homo sapiens
  misc_feature (1)...(488): n = A,T,C or G
aggggggtttcggaatgtagtncctgtggtggaattcgggagagcagagaccatgtctgacatagaagaggtggtggaagagtacgaggaggaaagcagctgttgaagaagaggaggactggagagaggacgaagacggaggaggcagcggaagaggatgctgaagcagaggctgagaccgaggagaccagggcagaagaagatgaagaagaagaggaagcaaaggaggctgaagatggcccaatggaggagtccaaaccaaagcccaggtcgttcatgcccaacttggtgcctcccaagatccccgatggagagagagtggactttgatgacatccaccggaagcgcatggagaaggacctgaatgagttgcaggcgctgatcgaggctcactttgagaacaggaagaaagaggaggaggagctcgtttctctcaaagacaggatcgagagacgtcgggcagagcgggccgagcagcagcgcatccg

SEQ ID NO: 2497 - DNA, 424 bp, Homo sapiens
  misc_feature (1)...(424): n = A,T,C or G
attgacgaccatagtccgncgtggggaattcccacgacccgtgacactctgtggaccgcgagcacggagcagggtttctacagctgctccccactttctcggacccggtcctggacccagcccccgactccgacacggctccaccatggaggaggcggaccgaatcctcatccattcgctgcgccaggccggcacggcagttcctccagatgtgcagaccttgcgcgccttcaccactgagctggttgtagaggctgtggtccgctgcctgcgtgtgatcaaccctgcggtgggctctggcctcagccctctgctgcctcttgccatgtctgcccggttccgcctggccatgagcctggctcaggcctgcatggacctgggctatcccctggagcttggctatcagaacttcctctaccccagg

SEQ ID NO: 2498 - DNA, 456 bp, Homo sapiens
  misc_feature (1)...(456): n = A,T,C or G
tattgagacccctantatggtcgtcggaancnaccaacgngctacacctatggcctttcaccattcatgaccttcgtggcctgggagcctttaagttctttgtgaagttctgtgctggctccatcgaccatatgagtattcgccaactacagctcatcctattcaaggtggccctgatgctgggagttgaaatccatgtgaatgtggagttcgcgaaggttctagagcctcctgaagatcaagaaaatcaaaaaattggctggcgggcagaatttctccctacagaccattctctgtcggagtttgagtttgacgacatcattggtgccgatggccgcaggaacaccctggaagggttcagaagaaaagaattccgtgggaagctggcgattgccatcaccgccaacttcataaacagaaacagcacaacggaagccaaggtggaagagattattg

SEQ ID NO: 2499 - DNA, 487 bp, Homo sapiens
  misc_feature (1)...(487): n = A,T,C or G
gtcatatatganntganaacggggnnnnnnnncctgatnccactgatgacactcggaagngcggnggaattcgcgttctgagccgtctgtcctgcgccaagatgcttcaaagtattattaaaaacgtatggatccccatgaagccctactacaccaaagtttaccaggagatttggataggaatggggctgatgggcttcatcgtttataaaatccgggctgctgataaaagaagtaaggctttgaaaggtaagatttttgcttctgaaaatggttgggaatggaaaacagcaccatgtcttttcaggacaaggtatatcgttgttctcaattgaaatcgaaacacagttcagtatatatgtaaggtgcagttgaaatgcttcacagcttgaagtttgctatgcctgctgggaaagagaattctgaatttctgctttttatagtcaagtggatcaagtaaaacttccaggagtaatagaggaatgga

SEQ ID NO: 2500 - DNA, 448 bp, Homo sapiens
  misc_feature (1)...(448): n = A,T,C or G
tagagagcaagactccatctcagaacaaacttaaaatagaataaaataaaataagaatccgcccccctccccgccccagttggtgtttcaaaccctgagacttggccttggaattcatggggtgatgaggaccccacagccagaggtgccaggcgttccctgccccaaccccagagcaggaggccatcattaaggcaggccagccaggtggcttttcagtgccagccgtagctgaatatattaggcagggagacaggcaagggtttgtatgagacccacagaaggaacagggaatatgctggtctgggttcaagtcccggttttgctggttagccgtgtgcctctgggcaagtttattcctctgaggcttagttttcccatctgtaagatgggcatagaagtggtcactactggctgggcgcagtggctcacgcctgtaatcccagcn

SEQ ID NO: 2501 - DNA, 486 bp, Homo sapiens
  misc_feature (1)...(486): n = A,T,C or G
nttgagtccctttccaangggggaanttggtatgctcctcatgcagcgaggtggaattccagcactcaccccactccccagcggggactgactgtcttctggtcttggagctactgaaattgtcacccagaatgtgaatcctgacccttcccactgcatacccagggagccccagcccaagatggccatcctgaaactgttggccagggctcctcttgtggccatgtacccagggctggctggcctgccatttgcctctccccggagacagccgttcttctgcaaccacaccccgtgcctagccacaaccccaggctgcagctgctcagaagctccaggcattttgtttctggtgaccgcccctaatgggatatcggtgatcactggtccacccttcctgtcagggcttttctggggctgctcttggaaatgaagtcttaagtactgaataactcccctggggatagctggggcatttgtctagct

SEQ ID NO: 2502 - DNA, 480 bp, Homo sapiens
  misc_feature (1)...(480): n = A,T,C or G
ntttcggagnaaccctattgcagngnggnggaannnnanttcgtcgaccctagtccgtgtggtggaattccattgcccctcctcagctgtgcaaggagaaagcatgcttaggaagttttcaggtccttgtgataaaacctccttaaatctgttcagaccaagcaatgcgagcttcctctcctgtcccatgttggaagttgctctgaaggggtggtagatgctggaagccagacacaaccctgcgtacgctgctcagttggtggagactggggctgggactggagtcagcccagctgggaggaggggctggggaggatctgcagctgaagcccgaggcagggttggtgtgatgccaaggcaaagtggtgaggagaaaacaggaaacgggctttctctgaattggtaaatgggaaagaagtgagcaacttaagattgtcacaattaatcacaagtgtacaggattagactgggtttatattt

SEQ ID NO: 2503 - DNA, 471 bp, Homo sapiens
  misc_feature (1)...(471): n = A,T,C or G
catcgaccnccnnnatcngagaccctagcacagngcggnggaattccagaatgagaagaggcctatcctttagacattaaacacatgattaaacacaagtcatccaaagagagtgcaccagctgtagaacaaaagggacagagtggatgcatcagagaaactccttcaatcatataaaattaatttatgacaaactgaatttaagaaaaccagaggccgggtgcggtggctcacgcctgtaatcccagcaccttgggaggctgaggcaggcagattgcttcagctcaggagtttgagaccagcctgggcaacatggtgaaaccctgtctctcttaaaaataaaattagctggacatggtggcatgtacctgcagtaccagctacttgggaggtagaggtgggagaatcacttgagccgaggaggcacaggttgcaacgagctgagatcacaccactgcactgcagcctggg

SEQ ID NO: 2504 - DNA, 463 bp, Homo sapiens
  misc_feature (1)...(463): n = A,T,C or G
gcgtgcggnnnnnnntttgaattgcatagcntaggcagngncgnggaattcgaacgcgggtccacgcgtgtgatcgtccgtgcgtctagcctttgcccacgcatttttttttcatggcctccggtaacgcgcgcatcggaaagccagcccctgacttcaaggccacagcggtggttgatggcgccttcaaagaggtgaagctgtcggactacaaagggaagtacgtggtcctctttttctaccctctggacttcacttttgtgtgccccaccgagatcatcgcgttcagcaaccgtgcagaggacttccgcaagctgggctgtgaagtgctgggcgtctcggtggactctcaattcacccacctggcttggatcaacaccccccggaaagagggaggcttgggccccctgaacatccccctgcttgctgacgtgaccagacgcttgtctgaagattacggcgt

SEQ ID NO: 2505 - DNA, 476 bp, Homo sapiens
gtggagaccctatctgagtccctgtccatgtggtggaattccagatgctcgaaggagtcagtggctctcttacccagtgcagatttccctggagttccctgcgggtgacttagaatggccaccagaggcttaggatgctgccccaaagagggagggctcctggaagcagagtcgagagagtcagtgccgggttagcgggagctggaggcagagctgcagctccaggcctggtgggcgtggacctggggtgctggctggcaggcgtgctcaggggcaggaagtgggggactcttccctgaccatcgcatctcaccctggcagatggtggccgacatgcgggagaagcgctacgtgcaggagggcattggcagcagctacctgttccgggtggaccacgacaccatcatcgatgccaccaagtgtggcaacctggccagattcatcaaccactgctgcacgcctaactgctacgccag

SEQ ID NO: 2506 - DNA, 454 bp, Homo sapiens
  misc_feature (1)...(454): n = A,T,C or G
ggcccgnngggggggcctgagaccctggactgagancgtcggccangncgcggaattctgctttgaggcctgtccggttcacgagggggtccgggcagcactgactgcttccgacctgcaggaggcgtatgagcggccctgcgggccctttcacggcagctgctgctgtatagatttgtctccactcactgacgcgggatttttttgtcttccttttggctttatttttaaactgctttagatattactgctcagtggttgtgaactttcctagttctctatgttgttagtgcagccagcacccagtggggacctactagaaaaaggaactggcatgcacacgtgcccagcaggaaaagcttcctcttcacgtcggctgctgccatccagaagaggccctggagcctcacgccgtcgaggctgctctcaggcgttctgttccgggcgaggcttg

SEQ ID NO: 2507 - DNA, 494 bp, Homo sapiens
  misc_feature (1)...(494): n = A,T,C or G
aggagcccccngggcggccactgaaaccntcatagtagacattagnccangcggtggaattcctcaaacttctggactcaagcgatctgccagcctccgcctcccaaagtgctgggattactagtgtgagccactgcgcggcacctcaagggcactttagatgcaagcctgtacttcagagatggagaagaactcccagttctgattggcacatttaaaaccaaagctgggaattcaagacctaatgcttggaaaggctgacgcatgtgataatttgtagtcagtgacttttcggggtggatatacaatttactgaagtgtttgcctcctgaaagatgaggggaggtcactcaccggaagacgggcaggtccttagtaaacttgatgacttgcagtaccatgaaagtgttgatgtctgcgaagtgtgtgaccagaggcagcacaggggccagggtgggcaagggctggtgatggatgaacagatgagctggagg

SEQ ID NO: 2508 - DNA, 493 bp, Homo sapiens
  misc_feature (1)...(493): n = A,T,C or G
ggggccccccnagccccccactgagaccatagtagangcgccggaanncggacttggcagcaggcaggccttcagggagtagggtgatgggagcagacagtgcccaggaggacacagcaagtccccagaaagcagggccatcgctccaagggccacagtggctgactggatggtcccaacagtaaggcccctcctttagacaaaagctcaaaatcccttctccccttctctgtccctcacttcctatgaagtctggctctctcagccacacctgtgatattaagaatcctaaaacaaaataatgatagggtgagaatgtccaggcagcatggagactttcaccagggccagcaaacccaggtatttacaatctctcaaccgagctaccaggaccacagctggagggcgctggtctcactggtgttgggggaggaagttgtccctggagagatacctgcctgagatgctttcattggaggggtctttgaggacn

SEQ ID NO: 2509 - DNA, 490 bp, Homo sapiens
  misc_feature (1)...(490): n = A,T,C or G
aggtgccnncnagccccccatgagaccttagtaagaggcggtaannaancagcctggctaaatgcttcatgctcttccagtatttgaccatagggattgatgctgctgtgcagatatacgaacaggtgtttgcaaaactgaacagttctgttttcccagaaggctctggcgagggggacagtgccagctcccagagttggaccagtgttctcgaagccatcacactgatgcacacgagcctgctgagattccacatgaaagtgagtgtttacccgctggcccctctgcgagaggcactctcacaggctttaaagttgtatccaggcaaccaggttctttggaggtcctatgtacagattcagaataagtcccacagtgccagcaaaaccaggagattttttgacacaatcaccaggtctgccaaacccttggagccttggttgtttgcaattgaagctgagaaactgaggaagagactggtggaaactgt

SEQ ID NO: 2510 - DNA, 453 bp, Homo sapiens
  misc_feature (1)...(453): n = A,T,C or G
nctgtagatgttagnccatgcgncgcctttacctgctcaggccacacccaagtcagcaggcaggcgggccagactgaccctcccaggacctccccacaggatggggccagcccgcacccgaggtccctggagcaatgtcccagaggcacagttccatgtggggcttccagtgggaccctgggaaccctgtcgaggccaaggccacctgctccacgtgcacccgactgccagggggcaggaggcatgaggctgctggctgtgctcctgggtggaaccagcaggcacccaacaggtgtgtgtccctgcagctgcccccgcagcccagtggcagatactaggggtcctaagtgttaaatatagtgaactccaagtttgtcttcaaagaatcagtaagtcagtatgttcagatctcttttttttttttgagacaagagtctcactctgtcgcccagg

SEQ ID NO: 2511 - DNA, 506 bp, Homo sapiens
  misc_feature (1)...(506): n = A,T,C or G
cgcccccccccccccccgccgccccatagagncccctngatagangaccattagnccagngcggtggaattcctttcttcccagttctccttactatacacaacttctcaaggcagtcacctccacacccatggcttcaattgctttctccattctctgagaacaatagaattttaaatggttttatttcatgtattagctttattttatacaaggtgcctcacctgctgtaaccatagattcaaagttgctccatgaaagtaataaatgaaaaatggtgattttttagcatgtaaattttaggaaatttccccagttacgcttaatggcttgatttagtgtgtatgttatttttgaaaacatatgttgggatgtcacaaatggacttagcctacagagatttatattcaacttttgaccagagagttccattttaatgtgacactgagagtaaaaaactatcttttcctccttacctatttctcttcctacattctcggccagga

SEQ ID NO: 2512 - DNA, 509 bp, Homo sapiens
  misc_feature (1)...(509): n = A,T,C or G
aggggtaagggncccnncncagccgcccttagaaacccctnnataganngactattagtccagngcggtggaattccattgtccgaggattttttcctctttccggatgtgtttttgcttttgagtgaagagttcccgtggttctgtaacctaatacatgcataacatgcagcttgggttgcagactttggaaaataattagagacctttatggctttaggctttctacaagaagcggatcaagttttcaaccatggctttcttcagaagactgcagattttttgaatcatcttattacagtggtggataaagttgcttgttctgatctttgagcatggcactggacgcaagaagcttcagacaatcctagttactgtgtatgcaaagcacttttcttgtttttggaatcttgctttatgtaatcaaccttaagaagaaccacacctttctgcactcaagcacagcgagaagtacgttatgcgtgaaaacaaaacaactttgcattaaa

SEQ ID NO: 2513 - DNA, 501 bp, Homo sapiens
  misc_feature (1)...(501): n = A,T,C or G
agtccccaggggccngnnccaggcncccactgagaccntagtagaaggcggtaanncgngcgngggtgctcatggctgccctgccctgcccaggccgagcaggagctccgcgtggcccagacagagtttgaccggcaagcagaagtgacccgtctcttgctggagggaatcagtagcactcacgtgaaccacctgcgctgcctccacgagttcgtcaagtctcagacaacctactacgcacagtgctaccgccacatgctggacttgcagaagcagctgggcagatttcccggcaccttcgtgggcaccacagagcccgcctccccacccctgagcagcacctcacccaccactgctgcggccactatgcctgtggtgccctctgtggccagcctggcccctccgggggaggcctcgctctgcctggaagaggaggccccccctgccagtgggacccgcaaagctcgggtgctctatgactacgaggcagccgacagcagt

SEQ ID NO: 2514 - DNA, 492 bp, Homo sapiens
  misc_feature (1)...(492): n = A,T,C or G
agtgtccnnnnnggcgcccactgagactctagtagaagcgcnggaanncggaagcacagggaaggcagctgtgggatcctggctgaacagagtccagcacctgcttcctgctcctgcaccatgaaagtcctgctttgtgacctgctgctgctcagtctcttctccagtgtgttcagcagttgtcagagggactgtctcacatgccaggagaagctccacccagccctggacagcttcgacctggaggtgtgcatcctcgagtgtgaagagaaggtcttccccagccccctctggactccatgcaccaaggtcatggccaggagctcttggcagctcagccctgccgccccagagcatgtggcggctgctctctaccagccgagagcttcggagatgcagcatctgcggcgaatgccccgagtccggagcttgttccaggagcaggaagagcccgagcctggcatggaggaggctggtgagatggagcanaaa

SEQ ID NO: 2515 - DNA, 498 bp, Homo sapiens
  misc_feature (1)...(498): n = A,T,C or G
gatggccgncngggccgnccactgagnccntngtagtagacnattagaccangcggnggaattcgaaaatgatgtggctggtattgatgtcaacatgggctgtccaaaacaatattccaccaagggaggaatgggagctgccctgctgtcagaccctgacaagattgagaagatcctcagcactcttgttaaagggacacgcagacctgtgacctgcaagattcgcatcctgccatcgctagaagataccctgagccttgtgaagcggatagagaggactggcattgctgccatcgcagttcatgggaggaagcgggaggagcgacctcagcatcctgtcagctgtgaagtcatcaaagccattgctgataccctctccattcctgtcatagccaacggaggatctcatgaccacatccaacagtattcggacatagaggactttcgacaagccacggcagcctcttccgtgatggtggcccgagcagccatgtggan

SEQ ID NO: 2516 - DNA, 504 bp, Homo sapiens
  misc_feature (1)...(504): n = A,T,C or G
agtggccanncnccgncccgccttagatnnccntcgatagtangaccattagnccagngcggtggaattctacgagattcttgtatcctttaggaaagttggtgaaaattgacttagcttagatttttcttaacacgtgcatgttaaaagtcttttgggttaccactagaaaagtcaaaatagaatgtaaaacatttaaactagaaaaagaggaaagttgaatgaaaggtgagtaagacctcttttctctgaggcccttagtatttgataggcagtggtgaacaatggcaggggtgactttgggggttatcttgtggacccagcttatgcatcactacagatatgtttggcttcatctttactcccatccctcacctcgtggctggagccacttgaattgtttccagagactggagaaaccctagcaaaggctcatgccattcatgcagttatcttctgctaatgctaccactgccacaaattgaagagcctcccaatgagtgc

SEQ ID NO: 2517 - DNA, 467 bp, Homo sapiens
  misc_feature (1)...(467): n = A,T,C or G
ggagccnnnnaagggcccatgagaccnctagagggcctcgaacaccccattncatggatggacagccctttatgaagcggcagccgccatctttatattccaaatgaattgtgttgtcctggatggaggacagattgtgactgtaagcctcacagccaccctggcaagcgtcagcgcggccagtatccccagtgccgggctggtcaccatgctcctcattctgacagccgtgggcctgccaacagaggacatcagcctgctggtggctgtggactggctgctggacaggatgagaacttcagtcaatgttgtgggtgactcttttggggctgggatagtctatcacctctccaagtctgagctggataccattgactcccagcatcgagtgcatgaagatattgaaatgaccaagactcaatccatttatgatgacatgaagaaccacagggaaagcaactctaatc

SEQ ID NO: 2518 - DNA, 454 bp, Homo sapiens
  misc_feature (1)...(454): n = A,T,C or G
gtgcgtnnnnnncactgagacccttnactgatggccgtattcgngctgctgaggcgtgagaatggcgtcccgcggccggcgtccggagcatggcggacccccagagctgttttatgacgagacagaagcccggaaatacgttcgcaactcacggatgattgatatccagaccaggatggctgggcgagcattggagcttctttatctgccagagaataagccctgttacctgctggatattggctgtggcactgggctgagtggaagttatctgtcagatgaagggcactattgggtgggcctggatatcagccctgccatgctggatgaggctgtggaccgagagatagagggagacctgctgctgggggatatgggccagggcatcccattcaagccaggcacatttgatggttgcatcagcatttctgctgtgcagtggctctgtaatgct

SEQ ID NO: 2519 - DNA, 479 bp, Homo sapiens
  misc_feature (1)...(479): n = A,T,C or G
agatggccnnnnnaagggccccactgagaccccatcagagggcatcagaaccgcacagagncgctccaggatagagcggcccggtaaacacattgatgacacaacactgtcccgctgatttaccacccatcagaggtcagccggtcccacgtgccctcctttgcgctctgagaagcgactctcactgagctttgctacggacccaaggctctccgttcgccctggctgagggggcccaattcatatgccgcccccttcagttccaagtaagaagactgtatcccacgaagcagcgacagtccctcctacatctgccatgaacaggctttgctcctagctctccacgaccccctcctgtgcaacccgagcagcctccacgggttggggcgcctcacagccctccctttctgatgcatcagagcagagtaggagcgaggcacagctgtccaggaagggccacggttgctcggcaggctcan

SEQ ID NO: 2520 - DNA, 484 bp, Homo sapiens
  misc_feature (1)...(484): n = A,T,C or G
agtggaggagncncacttgaaaccctcatcgataccctacgcagtgtggtggaattcgggccatttcctattcttccaccaccttacctgggcaggtcagacccggttcacctgaccgctcacagacgtattctcactcactctcgaccgacgcatgctggagcagagcacacccaggcagcgcccaagcgggactcacccacctgcccgggtcctcgcctgcacacaggacaaactgaggcttcaaagcagccttgagagcttcagaacatgacaaacccactactgatccagtgcgcatctagggggcgcaaactaatgaccaacgaaccagacaggacacaaaaatgtttgcccaaccctggacggacacacaaatatctgtgctgcccacatccagccaacacaggcagcaggatatttcctcctagtcagactggtgccgtgccagaagccacacagctgataagtggtggatccatct

SEQ ID NO: 2521 - DNA, 448 bp, Homo sapiens
  misc_feature (1)...(448): n = A,T,C or G
natgattccctnaaatcgaganctataggccagngncgnggaattcccaacctgaggctgccccggccgcctgcgcacccggcagcaccatgacagatcaggcctttgtgacactaaccacaaacgatgcctacgccaaaggtgccctggtcctgggatcatctctgaaacagcacaggaccaccaggaggctggtcgtgctcgccacccctcaggtctcagactccatgagaaaagttttagagacagtctttgatgaagtcatcatggtagatgtcttggacagtggcgattctgctcatctaaccttaatgaagaggccagagttgggtgtcacgctgacaaagctccactgctggtcgcttacacagtattcaaaatgtgtattcatggatgcagatactctggtcctagcaaatattgatgatctttttgacagagaagaatt

SEQ ID NO: 2522 - DNA, 463 bp, Homo sapiens
cgcccccctgagccatgtagaaggcgtgagaactcacagcacagcatgaataggcacctggggaagaagaagttgcctatggattatagcaacagaggttttcaattagatgtcgatgccaatggcaacctgctctttccccaccttgatttcatcaccatattgccaaaggagaagcttggggagcgggaagtctacttggcaatcctggctgggatacactccaagtcactggtgcctgtgtatgtgaaggtgaggcctcaggctgagggcacccccgggagcaccggcaagcgagtgtccacctgccccttttgctttggcccctttgtgacaactgaggcctatgagctgcatttgaaggagaggcaccacatcatgcccacagtccacacggtcctgaagtctcccgccttcaagtgcatccactgctgtggggtctacacgggaaatatgaccctgg

SEQ ID NO: 2523 - DNA, 449 bp, Homo sapiens
  misc_feature (1)...(449): n = A,T,C or G
cgccccatagacccttgaggcatcgaangccgccaaatgaggggccctgcggagaagaattgccatggataaaccattataggcttttttttagaagcccatgccaatggggggctgctctgtgcccaccttgatttcatcaccatattgccaaaggagaagcttggggagcgggaaatctacttggcaatcctggctgggatacactccaagtcactggtgcctgtgtatgtgaaggtgatgcctcaggctgagggcacccccgggagcaccggctagcgagtgtccacctgccccttttgctttggcccctttgtgacaactgaggcctatgagctgcatttgaaagagaggcaccacatcatgcccacagtccacacggtcctgaaatctcccgccttcaagtgcatccactgctgtggggtctacacgggaaatatgaccctggg

SEQ ID NO: 2524 - DNA, 462 bp, Homo sapiens
  misc_feature (1)...(462): n = A,T,C or G
tacgagacccattgagaccgtggaaancnccggaggagcgcgcgggcacagggtgccgctgaccgaggcgtgcaaagactccagttttggaggcatgatgaagactctgctgctgtttgtggggctgctgctgacctgggagagtgggcaggtcctgggggaccagacggtctcagacaatgagctccaggaaatgtccaatcagggaagtaagtacgtcaataaggaaattcaaaatgctgtcaacggggtgaaacagataaagactctcatagaaaaaacaaacgaagagcgcaagacactgctcagcaacctagaagaagccaagaagaagaaagaggatgccctaaatgagaccagggaatcagagacaaagctgaaggagctcccaggagtgtgcaatgagaccatgatggccctctgggaagagtgtaagccctgcctgaaacagacctgcatgag

SEQ ID NO: 2525 - DNA, 455 bp, Homo sapiens
  misc_feature (1)...(455): n = A,T,C or G
gggggggnggnnnnnnatttgagaccccttgcattggcgggaattccacagtgcttggacggaacccggcgctcgttccccaccccggccggccgcccatagccagccctccgtcacctcttcaccgcaccctcggactgccccaaggcccccgccgccgctccagcgccgcgcagccaccgccgccgccgccgcctctccttagtcgccgccatgacgaccgcgtccacctcgcaggtgcgccagaactaccaccaggactcagaggccgccatcaaccgccagatcaacctggagctctacgcctcctacgtttacctgtccatgtcttactactttgaccgcgatgatgtggctttgaagaactttgccaaatactttcttcaccaatctcatgaggagagggaacatgctgagaaactgatgaagctgcagaaccaacgaggtggccgaat

SEQ ID NO: 2526 - DNA, 454 bp, Homo sapiens
  misc_feature (1)...(454): n = A,T,C or G
gagcgnnnngnnnnnncctgagaccctnngcatgatggccatatcgagagaagggccccacacaaaatcattcagtctctgaagctttgcccaggagggcacaggccagccagcctctcctctggttgcccagctggctgcaggctgtcatttaaccttccgcccagcatgcttttgagtgtgcaaaagtgctgcatgccctcttctttgaaaacctgttgagcaaatgcctacgcattttatgcaccttcaacctgcacagccaaaggcccccaagaccaaacatgctgtgcacacacagcagctctttgtgtcccactcctggccgatctcctgcatcatctcggtgagcttcattgaaccccgcagtctgcatgctctgtggaactcagggtcttcattttgcatgaaactcagggtcttcattttccgtggaactcacagtcttcttgct

SEQ ID NO: 2527 - DNA, 466 bp, Homo sapiens
  misc_feature (1)...(466): n = A,T,C or G
tttgacaccctattgagaccnctggaagngcggnggaannctggatcccccaagagccacagagcctgtggccaccagtaaccctgctttagaccccgtgggcagcacgcgctgtcccgcctctgagcccgggcttgatgctacaacagccagcgagtcccggggctgggaccttgtagacgccgtgacccccggccctcagcccaccctggagcagttggaggagggtggtccccggcccctggagaggcgttcttcctggtatgtggatgccagcgatgtcctaaccactgaggatccccagtgcccccagcccttggagggggcctggccggtgactctgggagatgctcaagccctgaagcccctcaagttcttcagcaaccagccccctgcagccggaagttcaaggcaagatgccaaggatcccacgtccttgctgggcgtcctccaggccgaggccgan

SEQ ID NO: 2528 - DNA, 449 bp, Homo sapiens
  misc_feature (1)...(449): n = A,T,C or G
cggagaccataaanncnnnaaatgataccatatgcagngncgnggaanncaaggaaaggagagaaggcaggaagaaggcaagggacgagacaaccatgctgtgctgtatgagaagaaccaaacaggttgaaaaaaatgatgacgaccaaaagattgaacaagatggtatcaaaccagaagataaagctcataaggccgcaaccaaaattcaggctagcttccgtggacacataacaaggaaaaagctcaaaggagagaagaaggatgatgtccaagctgctgaggctgaagctaataagaaggatgaagcccctgttgccgatggggtggagaagaagggagaaggcaccactactgccgaagcagccccagccactggctccaagcctgatgagcccggcaaagcaggagaaactccttccgaggagaagaagggggagggtgatgct

SEQ ID NO: 2529 - DNA, 496 bp, Homo sapiens
  misc_feature (1)...(496): n = A,T,C or G
gtggagacggccnattgaaaccctaactgattccctagtcagngncgnggaattcgggactgtccccggcgctcggcctccggggctctctgcgagcccggngccgcggggactccgttccagccgccgcgtccgaggcggacccgttcctccaccggctgcgccccatgctcagctccgcctttggccaggatagatcactgcgaccagaggaaattgaagagctccgagaggccttcagagaattcgacaaggacaaggatggctacatcaactgccgggatctgggcaactgcatgcgcaccatgggctacatgcccaccgagatggagctcatcgaactgtcccagcagatcaacatgaacctgggtggccatgtagattttgatgacttcgtggagctaatggggcctaaactcctggcagagacagcagatatgattggtgtaaaggaactgcgagatgctttccgagagtttgacaccaatggtgatgg

SEQ ID NO: 2530 - DNA, 476 bp, Homo sapiens
  misc_feature (1)...(476): n = A,T,C or G
nactgagacccctngaaatagagagtcctacgcagngncgnggaattcctgccttgngaccaccgacatgcctgtcatgcccaccccctgaggaagcatggggaccctaacaccctggtgccctgcaccagacaggccgtggtcaggcccaggccaccggccggtttctggcacatcttcccacgtgcttgctgacatgcgtgtgcctgtgtgtggagactgtagctgtagtcgtgaaactgtgaccatcactcagtccaaacaagtgagtggccctcgaggccacagttatgcaactttcagtgtgtgtcataacgacgtcactgctttttaaactcgataactctttattttagaaaaatgcccaggagtcctggaagctacgcggacttgcagaggatttattttttggccttagaatctgcagaaattaggaggcaccgagcccagcgcagcagcctcggaccctgattgcg

SEQ ID NO: 2531 - DNA, 465 bp, Homo sapiens
  misc_feature (1)...(465): n = A,T,C or G
attgagnccnttttgagacactaggccagngcggnggaattcangaggagtcgggcttcctgcgcgaggtgctgaatgctgtccccgtcctcccgcacatcccagcgctggctggcaaggtcctacgcttccaaaaggctttcctgacccagctggatgagctgctaactgagcacaggatgacctgggacccagcccagccaccccgagacctgactgaggccttcctggcaaagaaggagaaggccaaggggagccctgagagcagcttcaatgatgagaacctgcgcatagtggtgggtaacctgttccttgccgggatggtgaccacctcgaccacgctggcctggggcctcctgctcatgatcctacacctggatgtgcagcgtgagcccagctggggcccaaggcagggactgagggaggaagggtacagctgggggccccttggcttagctgggacac

SEQ ID NO: 2532 - DNA, 486 bp, Homo sapiens
  misc_feature (1)...(486): n = A,T,C or G
aggcccgnnnnnngnaaactgagaccctacgcagngactgagaacttctccggggcggngcggngcccccctgggacctcttaaggcccaaggtgggccccaggacctctgggcagagtggactgctcatggcagatgtgtggcaatgtctggctgtgtctctccggcacctgcgtcccctctcccggactcccctgctgcatggtggatgtgctccttcctggcccggtcacattgcctccttgagccttagtccagggggtcactcctcccaccccacctacctcacagggttgttgtgagggtgcacagaggagcaaagtccctgaaggccctcacgcagtatataggggccgcccaccttcagctgccctgggatgggaaggacccagcccgacccctgggcataacactgtgtttgcaaatggagattcacgtattgcggatgcaggctgtggggagctggcctggcatagtangggtagn

SEQ ID NO: 2533 - DNA, 534 bp, Homo sapiens
  misc_feature (1)...(534): n = A,T,C or G
acgcgcaccccgtgaaccagaatagacttaaaacagtactcagatagcaatacaagaagcagggccngaatnaaacaaattgaaagcattcgtaaagcccccnnaanancaagaaggaccaggnggngctgctcaacaccagctactccctggaggccagcgccgttttcgaccactcggcaggagacaggagtttctggcaaatcctggatgaccacagggcctgccccctggcgcctgccagcccccctgagccccagagcccagagctgccccctgccctccccagcttctgccctgaggcggccccagcccgttcttctgggtctcctgagccctcgcccgccattgccaaagccaaggagtttgtggctgacatcttccgccgggccaaagaggccaagggcggggtccctgaggaagcccggcctgccctgtgcccaggaccctctggcagccgctgccgtgcgcactctgagcccctagccctgtgtggagagacggcaccccgggacagcccccctgcctcggagg

SEQ ID NO: 2534 - DNA, 471 bp, Homo sapiens
  misc_feature (1)...(471): n = A,T,C or G
gangtatacgggggggggggaactgagacacttgacagccgcgnggaanncccagcccagacagctgcaagtcaccatggacgctgaaggcctggcgctgctgctgccgcccgtcaccctggcagccctggtggacagctggctccgagaggactgcccagggctcaactacgcagccttggtcagcggggcaggcccctcgcaggcggcgctgtgggccaaatcccctggggtactggcagggcagcctttcttcgatgccatatttacccaactcaactgccaagtctcctggttcctccccgagggatcgaagctggtgccggtggccagagtggccgaggtccggggccctgcccactgcctgctgctgggggaacgggtggccctcaacacgctggcccgctgcagtggcattgccagtgctgccgccgctgcagtggaggccgccaggggggccggctggactgg

SEQ ID NO: 2535 - DNA, 494 bp, Homo sapiens
  misc_feature (1)...(494): n = A,T,C or G
aggcggnnnnnnngnnccatganaccctnnnnnnaatctgagtccctactccgtgtgcgtggaattccctctggtcccacggtttcatgccgacttcattcataagcacgtgaaaggctcacggtttggatggcgtcagaaggaatgcctgaagaagtgatatgccatgttgctgcccagtttcacactggaagagatcctgtgcaaagatccagcggcctgctttgggttccagtaaacacaaaagctgcatttgatgccagaaggcaaacacaacctgcatttgcgttttgcagatgaattcaacaagttagcagaagacttcctacaatgagaatgcacactccagtcttggtggttccttcgtgtggggcttgatcgtgttgctgcctgttaacatgatgcctttgaaactctccgcctttgaaactttctacccctcccttcaatcttatcctaaccaaatgagaataatgacatattgaaaacagcct

SEQ ID NO: 2536 - DNA, 476 bp, Homo sapiens
  misc_feature (1)...(476): n = A,T,C or G
tgaagtaaaacganganccnnnnactgaganacctganattctagcacanccgnggaattcgnggatgtgagcgggctctcaagtgtgatgaaaaatgcacaaaagcatattttcatatgggaaaagccaacctggccctggagaactacggcgtggttacctgaatcaaggagaccttcaggaaaaagcagaccttcaagaaaaggaagcccacgaactgctggattcaggaaagaacacaggcgtgaccaccaagaacctcctggagaccctttccaagcctgaccagatccccttgttctatgctggggggattgagatcctgactgaaatgataaatgagtgcacagaacaaactttattcagaatgcacaatggatttagtatcatcagtgacaacgaggtcataagaaggtgtttttccacagcaggaaatgatgcagttgaagaaatggtctgtgtgtctgttctcaag

SEQ ID NO: 2537 - DNA, 479 bp, Homo sapiens
  misc_feature (1)...(479): n = A,T,C or G
agaganccggatnnnnaaccctcntgcatcgagcntggaaacntctggagncncactctggcgcccaggctggagcgcactggcgcaaccttggctcactccaagctccgcctcccgggttcacgcgattctcccgccccagcctcataagaagccgggaccacaggcgcctaccaccacgcctggccaattttttgtatttttagtagagacagggcctcaccgcgctagccaggatggtctcgagctcctgaccttgcgatccgcccgcctcggcctcccaaagtgccgggatcacaggcacgagccaccgtgcctggcccaaaacaaacagtatattaaacaagaaaaatgaatttatgaattagctttcttccctcccaaactcccttactctacacaagtcattcctgatggagagattgaaataaaatgagaaatttaataatgaataatagtaatactattactaataattc

SEQ ID NO: 2538 - DNA, 493 bp, Homo sapiens
  misc_feature (1)...(493): n = A,T,C or G
agagtgggcgcggggtnaanaaaccctgcnangccctacnttngctangcannngccgcggaanntcggagcgccacttccccaaggtcaggtgccgaggctgggagggtcggctaacggttccgagcttggttgtgctagagtgcttaatgagtttgatgctactaagtataacggagtggctgcacagaatgattgagccgcccgcgggaatcaactgcgcgtgctgctcgctgattctcgctcggacactggggctggtcctgtctgcacccaaatccccctcccacgaccgcgccggtggagatgatacccgagacaacagaattctggacagatctggggttggaattgggtccccagactccaactctgcagctccataaatcccgctgggtcctcgcaaattccctggctgataacagtaccggcaaccaaattaaaaaataatccatacagtggaatactgtgcagccattaagacgaacaatgt

SEQ ID NO: 2539 - DNA, 480 bp, Homo sapiens
  misc_feature (1)...(480): n = A,T,C or G
tgggnnnccggggtnnaaaacccaggtngctagntggctnngnannncnaagaaattgntcagctgcagacttgcatgaggaagaagtgacagttccaaacctgttcataagtgttgagctggggtgccctgccctggggaagggcaggacaggaaaggtgacagtatctggctaaggatagatgggaagggaccaagggtgctgattagggaatggttatggactaggagtatcagtaacaatggttagaaagtggctaacatttgttgagcacctgctgtgtgcctggccccggctgggagccttcgtgcccagagtgaccccgtctgaatgcagttctttgcctcattcagactggggagtgggaggcagagctgcacggctcacgggtgccgagctcaggactcactcctgggtctgcctgggctgggctgtgcttgttgcccctgtggccaacacacgcgcacctttcacctgag

SEQ ID NO: 2540 - DNA, 485 bp, Homo sapiens
  misc_feature (1)...(485): n = A,T,C or G
ggggtnnncggngctttcccgaaactganangcctgantnctncgcanngctnggaancctgcttaagccagtgcctcttcccagctcccatggggaccaccgaagccacgctccggatggaaaacgtggacgtgaaggaggaatggcaggacgaagatcttcccaggccactcccagaagagacgggggtggaactgcttggcagcccggtggaagacacatcctctcctcccaacacgctaaatttcaacggagcgcatcgtaagaggaagacgctggtggccccagagatcaacatttctctggatcagagtgaggggtccctgctgtccgatgacttcttggatacccctgatgacctggatattaacgtggatgacatcgagacccccgatgagaccgactcgctggagttcctggggaatggcaacgaactggagtgggaagacgacacccccgtggccaccgccaagaacatgcccgg

SEQ ID NO: 2541 - DNA, 487 bp, Homo sapiens
  misc_feature (1)...(487): n = A,T,C or G
aggcggtncagggcgtncnaaaanccagcnangcctacncgngcgngnananncangctnnngcccggccgccgccgcacataagctgcgaggaggagctttacgacttcccggtcttcggggccgggcgcagcaagggccagactctgcgctagcaggcgctgcgcgccaaccggccggcacctgtcgcagaaggtgcaaccgatcgcactgtcgcgcagaagctcctcaatggccagcgccagctgcagccccggccgcccactcgcctcatctgagcctggctggcagcctgctatcaattacattgatagtaaatttgaggactacctaaatgcagaatcgcgagtgaacagatgtcagatgcctggtaacagggtgcagggttgtttatacttcattgctccttcaggacatggagacagatctcattatgttgcccagggtgatccttgatctcctggcctcaagtgatcctccaaccttg

SEQ ID NO: 2542 - DNA, 461 bp, Homo sapiens
  misc_feature (1)...(461): n = A,T,C or G
natcgagaccacattcgagtgcggtggaattcgnccggagcggcactgaaatcctgcagacacctgcttgaaaatgcgaagaagcaccatgtggaggtggtgggtgtgagttttcacattgggagtggctgtcctgaccctcaggcctatgctcagtccatcgcagacgcccggctcgtgtttgaaatgggcaccgagctgggtcacaagatgcacgttctggaccttggtggtggcttccctggcacagaaggggccaaagtgagatttgaagagattgcttccgtgatcaactcagccttggacctgtacttcccacagggctgtggcgtggacatctttgctgagctggggcgctactacgtgacctcggccttcactgtggcagtcagcatcattgccaagaaggaggttctgctacaccagcctggcatggaggaagaaaactgttccacctccan

SEQ ID NO: 2543 - DNA, 486 bp, Homo sapiens
  misc_feature (1)...(486): n = A,T,C or G
tggcgttgccggagtgccnaacctgaaangcctaaacngctangcaannncgnggaannccacgccatagccaacacgtatggcattgaggccgcgctgcgggtgatcgagaaggagatcaaggatgtgtttgccgtgtatgggatcgcgggcgaccctcgccatctctccctggttgctgattatatgtgcttcgagggtgtttacaagccactgaatcgctttgggatccggtcaaactcttccccgctacagcagatgacatttgaaaccagcttccagtttctgaagcaagccaccatgctgggatcccacgatgagctgaggtctccttctgcctgccttgtggtcgggaaggtcgtcaggggcgggacaggcctgttcgagctcaagcagcctctgagatagcagctaccccggcaccatctgcccagctccaaggacccttggtgagggcgtggcccagcctgccttctgcatgagagg

SEQ ID NO: 2544 - DNA, 480 bp, Homo sapiens
  misc_feature (1)...(480): n = A,T,C or G
ggagtggcccgggttccanaaccaggtngcaagacgntctnggaaanncngaaagcacatgaagacatgttcccagcctctgcatgaagatacctttgggggacatctcaaagtggggctggcccagattgcagccatggacatcggacggggcaaccacagagataacaaagctgtgatccgctatctgccttggctttatcatcccccctctgcaatgcagcaaggacctaaagaattcattgagtgtgtctcccatatccgactgttgtcctggctgctgctgggttccctcactcacaatgcagtgtgcccaaatgcctcctctccctgcctgcccattcctctggatgcaggctcccacgttgcagaccatcttattgttatcctgattggatttccagagcaatcaaagacctccgtgctgcacatgtgctccctcttccacgcgttcatctttgctcagctgtggacagtttn

SEQ ID NO: 2545 - DNA, 489 bp, Homo sapiens
  misc_feature (1)...(489): n = A,T,C or G
aggaganccncagggtnccnnaaaactgagannccagntggctnagcagngncgnggaanntcnaaactggggattccaggtatcagcttcctggagtagacaccagaccagtagctgactgtgtccgccgagcccatccccgtggaatgtgagaaacagcctctgaggctcccatgctgggggtgcccacttcctctctgggcgacaccccagggtccaccgggagccagaggtgggtccagtgccaacgagagccgctccctgccacagccaagagagccctcggcttcccacaccagccatcgaaggccctgaggccctggaccggcggcagactggccctgggcatgaggccacagagcagggccgaagggaggggacagagggccctggaaggaagggtctcctgctgccacggngggcactcagaacttctccccacctgacccagggctgggggcatcctcagactatcccagaggcatcgc

SEQ ID NO: 2546 - DNA, 460 bp, Homo sapiens
  misc_feature (1)...(460): n = A,T,C or G
catcgacncccctnggagaccntcggacanngcgnggaanncgacgcctgtccctcttagacttgcagctcggtcctcttggcagagaccccccgcaggagtgcagcaccttctccccaacagacagcggggaggagccggggcagctctcccctggcgtgcagttccagcggcggcagaaccagcgccgcttctccatggaggacgtcagcaagaggctctctctgcccatggatatccgcctgccccaggaattcctacagaagctacagatggagagcccagatctgcccaagccgctcagccgcatgtcccgccgggcctccctgtcagacattggctttgggaaactggaaacatacgtgaaactggacaaactgggagagggcacctatgccacagtcttcaaagggcgcagcaaactgacggagaaccttgtggccctgaaagagatccggct

SEQ ID NO: 2547 - DNA, 459 bp, Homo sapiens
  misc_feature (1)...(459): n = A,T,C or G
natggagaccacattgaagngcggtggaattccacggacgcaggttcacgatgggagaaaggatcggcgcaattaagcaagagtccgaagaaccccccacaaaaaagaaccggatgcagctttcggatgatgaaggccatttcactagcagtgacctgatcagctccccgttcctgggcccacacccacaccagcctcctttctgcctgcccttctacctgatcccaccttcagcgactgcctacctgcccatgctggagaagtgctggtatcccacctcagtgccagtgctatacccaggcctcaacgcctctgccgcagccctctctagcttcatgaacccagacaagatctcggctcccttgctcatgccccagagactcccttctcccttgccagctcatccgtccgtcgactcttctgtcttgctccaagctctgaagccaatcccccctttaa

SEQ ID NO: 2548 - DNA, 490 bp, Homo sapiens
  misc_feature (1)...(490): n = A,T,C or G
gaagttncccagagtnccnnaaaactgaaangctagcctngctangcacnngccgnggaannctggacaagctgctggcagacagcaagacggctcaggaggcctttgagtctgtggtggagtacttcggagagaaccccaagaccgcatccccaggcctgttcttctccctctttagccgcttcattaaggcctacaagaaagctgagcaggaggtggaacagtggaaaaaagaagccgctgcccaggaggcaggcgctgataccccgggcaaaggggagcccccagcacccaagtcaccgccaaaggcccggcggccacagatggacctcatctctgagctgaaacggaggcagcagaaggagccactcatttatgagagcgaccgtgatggggccattgaagacatcatcacaggtaagggcttggccaggccttggtcttatcctcagtctgtccttctatgctttcttctgacccaatgcgctat

SEQ ID NO: 2549 - DNA, 472 bp, Homo sapiens
  misc_feature (1)...(472): n = A,T,C or G
gagtcccnnnggggcccccactgagccanatagaggccctggcagcgcgagacaaaaaagtgcatttgatcttacacagtgaaaatgacagaacaaatattatggggattatgcctggggaaaaaaaatctgtctctggatattcctgacactatggagagaaaatcagcaaaatttagaatcttggatctcttccactcacactaggatgttgtttctagaaatctccctgaagtatggtactgactcttggtggtaaaagtggagaggcttagaactgaaatctggtcagtagaagactgagggttaaaagtggacggtcaacccattgaatgaaggcctagcaggaaatagagagacaaaaatacaggcattaagggaataatagctgaatagtaataataatacattatgtcaacagcggtgacaaaggaaacactcaatgtatttatagagctaaataaacggcaga

SEQ ID NO: 2550 - DNA, 452 bp, Homo sapiens
atgagccctctgttggagcgcgtaagactgctcatttcatgatctgctgaggtgctaattgtgagagaaaggcggagcgcgtgtttttcccgagtgtctgtcatgacacattttcgtggcacgttcatttctcggatgtggaaaccattgacgtctgtcttgatgcatttccctgcggtttgcccacactccctgtgggcaggaggagttagagtttgccatcatgcggatagaagccctgaagctggccaggcagattgctttggcttcccgcagccaccaggatgccaaggtaccggtttgctgctgcgtgcgccacctcctgagaatgtcatgtgtgcccgctggggtccagaagctgctttgctaaccatccgccaggcgggcatcatcggtgtccagcaaagagtcgtttccaaaaagctgaaagcatcactcttgcataaatacac

SEQ ID NO: 2551 - DNA, 465 bp, Homo sapiens
  misc_feature (1)...(465): n = A,T,C or G
catcgagaccacattgaagagcggtgganaacggaaaggagtanccccaaaggagggcatgtgaagtcgcacgcggagctcgaggggaacggcgagcacccagaagcccccgggtctggagagggaagcgaggcgctgttagagatctgtcagagaaggcatttcctaagtggaagcaagcagcagcttagccgggattctcttctgagtgggtgccaccccggcttcggacccttgggcgtagagttgcggaagaacctggccgcagaatggtggacctcggtggtggtgttcagggagcaggtattcccggtggacgccctccaccacaaaccaggccctttgctacccggggacagtgccttcaggttagtttctgcagaaactctacgcgaaatcttgcaagacaaagagctgagtaaggaacagctagtagcatttcttgagaacgtattaaaaacttct

SEQ ID NO: 2552 - DNA, 467 bp, Homo sapiens
  misc_feature (1)...(467): n = A,T,C or G
ggccccaatgagaccatcgatagagcgcgtaggcgnnnccgcgagcagctcccgcctgagatccagctggctcagcgcctggcggggaatgagcaggtgacccggtaccgggcggtgaggaagctccggaaatacatcgtcgccaggactcagcgggccgcaggtggttttacgcacgacgagctgctgaaggtgtggaaaggactgttttattgcatgtggatgcaggacaagccactcctccaggaagaattaggaaggactatttcccagctcgttcatgcttttcagaccacggaggcgcagcacctgttccttcaggccttctggcagaccatgaatcgcgagtggacgggcattgacaggctgcgcctggataaattctacatgctcatgcggatggtcctgaacgagtccttgaaggttctgaagatgcaaggctgggaagaaagacagatcgaggagcg

SEQ ID NO: 2553 - DNA, 448 bp, Homo sapiens
  misc_feature (1)...(448): n = A,T,C or G
ntttgangacccttttgatagacgcctagaccagcgaggtggaattcggacgtgctcgggagaaggtgaagatgggagagaagcaagatcttctgtgtttggaccaaggacacatttccttactccatagcagctgtggtcagtggcttagctcggacaaggagatgagagcccatgtgttgtgagggttcttctgggaactctgagaaggcaggagccgcccccgcccttcactgcctctcttccattctgcagcatggaatatggatgtgtggtctggatgtacagacaccattttggaccataaagacaaggacgattgtctaaggatgacacagccagagcactgagagtggcgagaaggacaggggagctgctgtgccaagcaggactgtctctcttaagagaaaaataaaatttattggtgtttaaaccattgcttttttgn

SEQ ID NO: 2554 - DNA, 445 bp, Homo sapiens
gcagtgatgggcactatcagtcagcctctgggcagaaagtgaccctggagctcaagccactgagtacgcttcagcctggggtgaacagcggtgccgtcatcctgggaaaggtggtatttagcctcaccacagaggagaaagtcccctttacatttggcctggtagattcagatggaccttgctatgcagtgatggtgtacaatatagtgcagagctggggagtgctcattggagactctgtagccattcctgagcccaacctgcggcttcaccgaattcagcacaaaggaaaggactattccttttccagtgttcgagtggagacgcccctcctgctagtggtgaatgggaagcctcagggatccagcagccaggctgttgccacagtggcatcgcgaccacagtgtgaatgacctttgacttgcatgctcaacagggagtggag

SEQ ID NO: 2555 - DNA, 470 bp, Homo sapiens
  misc_feature (1)...(470): n = A,T,C or G
gcgcccaatgagaccctccgctaagggctgtangaagnagcgagagggngaaagggagtgggttagagagtgagggagtaagcgagtgaatgtctcttggtgctgctgtaacagaatacctgagcgagcctgggtaatttctagggagcagagttctttcccagctgtggaggttgggagtccagggtcatggtgccagcaggcttggtgtctggtgaggcctgatctctgcttccaagatggcgcccaaacactgcattccccggaggagagaggggaggaaggccacgtgtccacatggcagaaggcagagaggaatccatgcccaagctgtcttgacagctacaggagtttgtctgtgagggcggggctcccatcaggttccacctctctacactgttgctctggggaatgagtttctcactgtgaatctggggggcacattcagaccctattgtgggtgagtggag

SEQ ID NO: 2556 - DNA, 472 bp, Homo sapiens
  misc_feature (1)...(472): n = A,T,C or G
gcgccattagacccttgccaggcacctacagaagngcgnggaantcctgcactctgagcgccccctcagcagctcggcctgggctggcccgcgccctgaggggctgcaccagcgctcctgctccgtttccagcgccgaccagtggagtgaggccaccacttccctgcccccaggcatgcagcaccctgccagtggcccagctgaggtactcagttccagccccaagctggatcctcccccatctccccactccaaccggaagaagcaccggaggaaaaagagcaccgggaccccccgaccagacggccccagcagtgctactgaagaggcagaggagtcgtttgaatttgtggtggtgtccctcactgggcagacgtggcacttcgaggcttcaacggcggaggagcgggagctgtgggttcagagtgtgcaggcccagatccttgccagcctgcaaggctgccgcagtgca

SEQ ID NO: 2557 - DNA, 456 bp, Homo sapiens
  misc_feature (1)...(456): n = A,T,C or G
catgagcccctctantgaggccatcggacaagcgcgccanccttgaacataaccccggacgaggccgaactgctacgtgtacctgttagtgcgcgatctcctgacctgcggcggctgcgctcaacggactgcacgccatgctgggcgtccagcccgacacggaggactgaggtcgccgggaccaccctgagacggccccaggctcgtggactgagtgggaagcccatcctgaccagctgctccgaggacccaggaaaggcaggattgaaaatgaccaggaaagtggccaagaagcagtggccttattgcatcccaaaccacgcctcttgaccaggctgccttccttgtggcagcaccggcacagctaattctactcacagtgcttttaagagaaaatggttgagaaagaggcaccgggaagccgtcctggcgcctggcagtccgtgggacgggatg

SEQ ID NO: 2558 - DNA, 454 bp, Homo sapiens
  misc_feature (1)...(454): n = A,T,C or G
naatgcaccatgatgaagccnctaaaaacnccggncnnagnggctacttgcctgtggatggcattgagtatgctagagaactgtttactcgcgtttccaagcaggggctgaccctgttggccatctgctcctccctggcgcccgggccctccatcaccttctgctcctaggaggctgctagatggccaagaccagccccctcccctgatatacggatgcggagggaaagagcacgggcagtggtcttcagtcgtcttgggacctgggaaggtttgcagcactttgtcatcattcttcatggactcctttcactcctttaacaaaaaccttgcttccttatcccacctgatcccagactgaaggtctcttagcaactggagatacaaagcaaggagctggtgagcccagcgttgacgtcaggcaggctatgcccttccgtgggtaatttcttccc

SEQ ID NO: 2559 - DNA, 475 bp, Homo sapiens
  misc_feature (1)...(475): n = A,T,C or G
agagctgccaaaatgaaccccgttgaaggcngtaattcgccacaggtgttgggagtataggttggaggagaggctgttggagatgaatttggggcatatgtaggaggtaggatggccaggtcttagacatggcttggatatgaggtatgtgggagacaagaagcaaagaggacaccatatttcaggcctgtgcttttgaatcggcaacagtgctctttctaaaggtaagaacatgagaaaaccttcaactctgggaggatgggaaagatcatgagtttggtggtagatatgtggatttgaggtctgtcacatgtgcaggagatgtcaagtgggcagttgaatattcttgtctggagctcacaggggagttctaggtaagaggtatgagagtggttcactatttgaagctgtgaatgtgcacgaggtcttccagggtaagagaggatagggtgagatgcagagggcctctgactga

SEQ ID NO: 2560 - DNA, 467 bp, Homo sapiens
  misc_feature (1)...(467): n = A,T,C or G
ngcgccaatgagacccttgcaggcgccttatgaanggcgggagnggcagaggctgacccacctccagctgccttaggaggagtcacagcatacactggaacaggagctgaggcagctgcagaggctgacccagggaccccacccccctttgggggtcaggaacactacactgcacaggaagccttcacactggaagggggacctgcgcccccacatctgaaacctgtaggtccccccagctcacctgccctactggggcccaacactgtacccagctggttgggaggaccagagcctgtctcagggaattgcctgctggggtgatgcanggaggaggggaggtgcagggaagaggggccggcctcagctgtcaccagcacttttgaccaagtcctgctactgcggcccctgccctagggcttagagcatggacctcctgccctgggggtcatctggggccaaggctt

SEQ ID NO: 2561 - DNA, 255 bp, Homo sapiens
ggtcgtgtgcgaaggcggcatgctgtgctctctggcccacttcgtcatcaatatcctggtcatagcctactgtctatcgcgggcgcgcgactgggcctgggagaaggtcaagttctacatcgacgtcaagaagttccccatctccattggcatcatcgtgttcagctacacgtctcagatcttcctgccttcgctggagggcaatatgcagcagcccagcgagttccactgcatgatgaactggacgcacatctg

SEQ ID NO: 2562 - DNA, 483 bp, Homo sapiens
  misc_feature (1)...(483): n = A,T,C or G
agagcgggccngattgataccntaactgatancataggcagngtcgtggaattctcagtagctgttgtaggtacccgcatcagcccttgttcctaaggatgtgtggagcccaggctgtactctttgacattccacaggtcagtctgcgtgaaagccctttgtggggagtttccaagccagtgtcgtttttgcactggtttccacctcactgtcagatattgttcttttgatatgcagtttccagccctccaatgagtccccagcacagatctcaggcttgtggctgggaataagcccagctgagcaggtggggatctcagccagcctcccagactgcacctcttctattgctctcctctgtccaccgttccaggcagcagcactcccacctggctgctctgatgtcctcgctccctccattcctgcctctcaccatgcacgcatccattgtccacacacacacaaccagataatcttctgaan

SEQ ID NO: 2563 - DNA, 480 bp, Homo sapiens
  misc_feature (1)...(480): n = A,T,C or G
ngatgccggnnncaactgtaccactaaganggcatgagaacgccgcaagaaagtgtcgcaaagcagaaggaaggcgggagtcccgactgcaaacattgaggaaagccaggcagtagaggccgctatggcgaacgttccgtgggcagaggtctgcgagaaattccaggcggcgctcgctctgtcgcgggtggaactgcataaaaatccggagaaggaaccatacaagtccaaatacagcgcccgggcgctactggaagaggtcaaggcgctgctcggccctgcgcctgaggacgaggatgagcggcctgaggccgaggacagcccgggtgccggagaccacgccctggggctgccggctgaggtggtggagcccgaggggcccgtcgcccagcgagcggtgaggctggcagtcatcgagttccacctcggggtgaaccacatcgacacggaggagctgtcggcggnggaggagcacctggg

SEQ ID NO: 2564 - DNA, 490 bp, Homo sapiens
  misc_feature (1)...(490): n = A,T,C or G
gggtatttnnnnnnttttgagaccactatccatgtggtggaattcctcctgagtactcggaggtggtagccgacactgaggaggcagccttggggcagagccccttcccgcttccgcaggaccccgacatgagccttgaaggcccgttcttcgcctacatccaagagttccgctaccgcccgccacccctgtactctgaggaggatccaaacccacccttgggggacatgaggccgcgctgcatgacttgctgaacggcacagggacccctcgaggaacaaggttgcacaccagctttcagccaccatgactgtggggagtggctggaccaagggctgacctccccgactgcatcaaagttggggaaccaagtctcagagtgaggcggnggcctttcggatatcacatgggacagaggaagagcccggctggaatctgacttacctggaccgctgtccttgtgaggcattgaatgcccagtgcagtatcc

SEQ ID NO: 2565 - DNA, 480 bp, Homo sapiens
  misc_feature (1)...(480): n = A,T,C or G
ggagcgtctcaacctgagaccctccttgatgngcngtaattcggaggcaaagaagtggacagcagtgccatcgcagcacatgtgcgtggccgcctcggacaagagacccaggagcatccccttagtgcaggtgctgcggactacggccctgaccagcgcctgcgcggagcactcggaccagcgggtggtctacttggagcacgtggtggttcgcacctccatctcacacccacgccgaggagacctccagatctacctggtttctccctcgggaaccaagtctcaacttttggcaaagaggttgctggatctttccaatgaagggtttacaaactgggaattcatgactgtccactgctggggagaaaaggctgaagggcagtggaccttggaaatccaagatctgccatcccaggtccgcaacccggagaagcaagggaagttgaaagaatggagcctcatactgtatggcacagcaga

SEQ ID NO: 2566 - DNA, 479 bp, Homo sapiens
  misc_feature (1)...(479): n = A,T,C or G
gatgggnccaactgtnccctactgagancntagtcagtgtcgtggaattcccagaccagtcaaagccacctccaacctccgcttccaccagtgcccctggtgtccaagatctgccctagtgacacctacaaagtgtggaagagcggccagaacctgagggtagacaccacactcctgggctttgaccacatgacctggcagcgagggaaccgcagctttgtcttcaggggccaagacacaagcgccgtggtcatggagattgaccacgaccgccgggtggtgtacacagagactctggcactggctgggcaggaccgggagctgctgctggctgctgctcancccactgaggaacaggtgctgagccggcttaccgcgcccgtcgtcaccactcagcttgacaccaagaatatctcctttgagaggaacaagactggcatcctgggctggcgcagtgaaaagacggagatggtgaatgg

SEQ ID NO: 2567 - DNA, 468 bp, Homo sapiens
  misc_feature (1)...(468): n = A,T,C or G
atttgaccacccttgatnacactaggacagngcggnggaattcagcgacagcacctgctccacggccacttggctccattcagagaccattctgcttccttttccgttcctcctctcagagtggctcaggcccttcctcaccagactctgtcctgagacctcggcggtacccccaggttccagatgagaaggacttaatgactcagctgcgccaggtccttgagtcccggctgcagcggcccctgcctgaggacctggccgaggctctggccagtggggtcatcctgtgccagctggccaaccagctacggccgcgctccgtgcccttcatccatgtgccctcccctgctgtgccaaaactcagtgccctcaaggctcggaagaatgtggagagttttctagaagcctgtcgaaaaatgggggtgcctgaggctgacctgtgctcgccctcggatctcctccagggcg

SEQ ID NO: 2568 - DNA, 464 bp, Homo sapiens
  misc_feature (1)...(464): n = A,T,C or G
atgtcaccccatnggttgagcgtccgaaannncccaccgnngnggcgggcggcggcaaccagaaaaacagcccggaccgcggcaagcgttccatgaatttcttcatggagcggncccgcgggcagcggcgcgggatggcccaggagaaccccaggatgcacaactcggagatcagcaagcgcctgggcgccgagtggaaacttttgtcggagacggataagcggccgttcatcgacgaggctaatcgggtgcgagcgctgcacatgaaggagcacccggattataaataccggccccggcggataaccaagacgctcatgaagaaggataagtacacgctgcccggcgggctgctggcccccggcggcaatagcatggcgagcggggtcggggtgggcgccggcctgggcgcgggcgtgaaccatcgcatggacatgtactcgcacatgagcggctggagcaac

SEQ ID NO: 2569 - DNA, 480 bp, Homo sapiens
  misc_feature (1)...(480): n = A,T,C or G
agagcgtctccccctgataccntactcgatgngcngtaattcgattatggatgtgagccaccacacctggccatagagagcctttgctgcgtttgctttggttagctagaaagcaggcccatcatgcatctgtaagaaagtgactggagtgtaggccctggcgtctaagccgagtaagatgccctgtcaatctgggtcctctgggaagcaagactgatgaaatgaggagcaccaaagctttacaccccagctatgtgcatttggggctggggctgcctgggaagagctcgtcctcagcccaaagcctgcaacagctgggatcagggcttacctctcacagacggggctcagcaactttctgcgggatgaggacacaagcccacttgacctggaacgtctgaaacctcctggccccgtggaagatgggaagaaacactcctcttcctctcagttttacaaccgagtggtcctcgggctgct

SEQ ID NO: 2570 - DNA, 442 bp, Homo sapiens
  misc_feature (1)...(442): n = A,T,C or G
ntttgacgacccacttttccagtgtggtggaattcggacctgcagggctgctgctttgctgggcctggcagcccccacccgtaaggcccccacccgtcggggtgtttcctggcccgggtcaggcaagggcacccatcaatggcagggggctaggcaggcaggcctgcaggggcacagcctgtgaggagacgtatgctgcatgtccttcccaggagaagatggagttccggacggcatctatccgcctctttgggcaccttaacaaggtctgccacggagactgtgaggacgtcttcctggaccaggtggtgggcgggctggcgcccctgctgctgcacctgcaggaccctcaggccaccgtggccagcgcctgcaggtttgccctgcgcatgtgtggccccaatctggcatgtgaggagctctcagctgctttacagaaaca

SEQ ID NO: 2571 - DNA, 479 bp, Homo sapiens
  misc_feature (1)...(479): n = A,T,C or G
agcgcccttcgancccttctgagtccctagtcagtgtggtggaattcgttaggtttctgtctccagctaagctgcagacctctattttctcctctgtgcaatgggaataacaactgtgtttctcatagggctgtctttaggattaacggaataatccgttgttgagcttattagcactgtgcctggtacacagcagccatctaatctgctgggccctccctgatgagggtgggggtcaagggaaggaaagggctttgaactcaaggaaaatagccacctttttcctctcctcacagggaacccagtttggccagtgggatactgctggttttgagaacgaggaccaaaaactgaaatttctcagacttatgggtggcctcaaaaacctgtccccttcgttcagccgccccgccagcacgattgcaaggcccaacatggccctcggcaagaaggcggctgacagcctgcagcagaatctg

SEQ ID NO: 2572 - DNA, 489 bp, Homo sapiens
  misc_feature (1)...(489): n = A,T,C or G
agcgcccaattgagccctcctgagagcactagtcagnngggnggaattcgaggcaactgcaggtggggaggggctggacaggctgcttctgttccttaagggatgggcctcagctaagcagcgtttctggagctggcaggttgctccgatgcccctgggccctggcacctgactgagttgagtatgacgtcctgtcctctctgagctggtcctgctgggagccgagccatcctgggaccagctcccacatgcacacgcccacacctacacgcatggcagtgtggaagggcagtgagtgggggagggcagcggcggtcctgcgcccagctgggggtgaccaggagcatggaccccgcttcttgggccaactcccgcagtgccccttgggctcctcaccctgcactgtgggaagacagaggcctctggcaccccatccccaagcacatgccagggtggctggggcccagacagggcagtgcgtggtgacct

SEQ ID NO: 2573 - DNA, 474 bp, Homo sapiens
agagcggcccaattataccctactgataccctatcagtggcgggaatccccgatcgagctgacgtggaggctaaatagcccaggaaaacccgatgagctcccattactgggccttctagaagacaaacatcatttggggaggactacgccataccttactcgaccctggaaggggccactaccactgatcttaccgaggaaaatgaggatattgcattaaagcgtgtcagaatgcagctttctgatctggctggagaatataaatttgatatgtgtgtttagagaatcggatggaggcaggaggaacatcatttggcagagggtgttgctaatgtagatgataaggaataagagctttggagcggaaatggatcttggtagcaacaatacagaatcttctgtcatccatcatattgtaaatctgggaacctcgtgaagttgggatcctaacaagaggagtacacaccttgattt

SEQ ID NO: 2574 - DNA, 441 bp, Homo sapiens
  misc_feature (1)...(441): n = A,T,C or G
nttgangncnntttgatgctcatagtcagtgtggtggaattcgtaaaaaccgaccaatgacactgttgtcattcccactaccaattgctcttccactcacaaaagaaagcaattatttcaccttctaagagtgaaacctgcctgggtgctgacagtttagaaagagggggtggaaaaagtaagaatttcattctgtataataaattaccaatcccttggtttgcattaatagtgtatagataaaatttaagaacattacattactttttttttaacaaaaatactcttatgccttttaaatactacctttatatcgcacaatttggaagtcaatgtgtatctaaaattgctgggttgacttaatgcatagtagggcagtggactaatgttctgaaaggtcctttattaactgtattagaatgttcttttgtaagattaatn

SEQ ID NO: 2575 - DNA, 463 bp, Homo sapiens
  misc_feature (1)...(463): n = A,T,C or G
atgtgacnacatcggtaggcactngcananncacaancnggagatagagaagccgaggcggatagaacggataaagcagaagcgggcttcagctgctttaacttctcctacagcaaatcgctgtcaaaaagctggtacagagaaatcgacaaaatgagcagcaaaaccagggcccgccggctctgaactctaccattcagctgccattcataatcatcaatacaagcagaaaaacagtcatagattgcagcatctccagtgacaagtttgagtatcttttcaattttgacaacacctttgagatccatgatgacatagaagtactaaagcggatgggaatgtcgtttggcctggagtcaggcaaatgctctctggaggatctgaaacttgcgaaatccctggtgccaaaggctttagaagggtatatcacagatatctccacaggaccttcttggttaaatca

SEQ ID NO: 2576 - DNA, 474 bp, Homo sapiens
  misc_feature (1)...(474): n = A,T,C or G
gagggccnaaggagnncagctgaaaccacnttaaagngcccgcanaacncnaantntagagggngggcacttgaggccggagttcaagaccagcctggtcaacatggtgataccccttctctactaaaaatacaaaaatgagctgggtgtggtggtgcatgcctgtaatcccagctgtttgggaggctgaggcatgggaatcgcttgaacccaggaggcggaggttgtagtgagcgaagatcatgccactgcactccagcctgggtggcggagcaagactctctcaaaatgaatagattagatagataggatagatagatagatagatagatagatagatagatagatagatacatacatacatacatacatacgtagagagtgggggaatatggaatgtccaagcccaacgttccttacctccagaagagagagaatcctgaggtgctcatgtggagaaacactggccccctg

SEQ ID NO: 2577 - DNA, 477 bp, Homo sapiens
  misc_feature (1)...(477): n = A,T,C or G
gagttgccanagttaaaaaacctgcaaccccattganggactgngcannaccannnnntnttgantgctgnccgagcctgggcctacacgtgcagcgccagttctggtggtgagtgtgcatagcctgcagcagcagcgacagctggggcggtgggtcattgctggcatcctgaccttcctggcgttggagaagatgttcctggacagcaaggaggaggggaccagccaggcccccaacaaagaccccactgctgctgccgccgcactcaatggaggccactgtctggcccagccggctgcagagcccggcctcggtgccgtggtccggagcatcaaagtcagcggctacctcaacctgctggccaacaccatcgataacttcacccacgggctggctgtggctgccagcttccttgtgagcaagaagatcgggctcctgacaaccatggccatcctcctgcatgagatcccccatgg

SEQ ID NO: 2578 - DNA, 479 bp, Homo sapiens
  misc_feature (1)...(479): n = A,T,C or G
ganacgaacaannagannnnnnnncctgaagacactactgagtgcggtggaaancggcggntgccaggcggagggtctcctcacttctcagacggggcggccgggcagagacgctcctcacctcccagatggggcggcggggcacaggcgctccccacatctcagacggtgggctgccgggcagagacgctcctcacttcctagatgggatggcggccgggacgaggcgctcctcacttcccagaagccaagtacaagaagctggagaagcgatgagaaacttatttctatgggacagagtcttttttttttaatggggaagaatgtcttataaaacctgaatcctgaggctgatgaattgtgaaaattcctcaaaaggaaattatgctggtcatcacaggaacatctcaacgttcgagtaaactggaggactgtggctattcctgaaccttctttgagacagaatccctcagaatctc

SEQ ID NO: 2579 - DNA, 425 bp, Homo sapiens
  misc_feature (1)...(425): n = A,T,C or G
nttcgcggaccataggcagtgcggtggaattccgaagcagaagacggaggtggtgtgcggggtccccacccaggtggtgtgtacggccttcagcagtcacatcctggtggtggtgacccagtttgggaagatgggcaccctggtctccctggagcccagcagcgtggccagtgacgtcagcaagcctgtgctcaccacaaaagtccttctggggcaggatgagcctctcatccatgtctttgcaaagaacctggtagcgtttgtgtctcaagaagctggaaacagagcagtcctcctcgccgtggccgtgaaggacaaaagcatggaggggctgaaggcgctgagggaggtgatccgggtgtgccaggtgtggtgacctggaggcagccgccccgcgctgctcagcaggacacgtgaacacccan

SEQ ID NO: 2580 - DNA, 444 bp, Homo sapiens
  misc_feature (1)...(444): n = A,T,C or G
nttgannccccttttgatgacccctagtccagcgtggtggaattcgctctaaagacaaaagaactgcaaaccctttttaaaaaattattttcagtaacagtgttactttttggtattaagattgtaagaataccttgtggataatgtggaacaaaccaaatgaatacttatgtgaatgtgatattctcaaattatcatccctggtattccagagtaacaagattcttggtggtgacagaaggcaatacaaataagatagaagttaaataaaaaccttgtagtcttcaatttaaataaaactatacgtataaaactttaatttaaataaaattatgattgttacatcttttaaatagaaaaaaaaggcctagaaacaatgatcaatgcaacagcaaataagaatctctagaacctaaatacctttttttttgctagactcagcca

SEQ ID NO: 2581 - DNA, 438 bp, Homo sapiens
  misc_feature (1)...(438): n = A,T,C or G
nttgaagacctctggacagccggnggaattcccagaggctgaggactgagccacccaaggaggtggggactgctcggcctccaccgctgttccgctgcagccccgccctgccccacccacccagtgccttgctgaagcccatagcaatccgcttctcagaggtcctatcgtgtttccactgctcgccttggtttgggagcagggagggggaagtcctagcccagatggaccaaggacgggcctgaaggcacatgggggaaagggagcacacggggaggacgttggggaccctgggtggggcctccaggtgcagctgtggatggaagacagggattggcctgtgcttcagcgaccaggatggccaggccagagctgcagctgggggctcttttcctggtcattgggtggggctgagtgccacatgttcccacattaaag

SEQ ID NO: 2582 - DNA, 483 bp, Homo sapiens
  misc_feature (1)...(483): n = A,T,C or G
ctcgatcgcantncntaggncgngnggaggaattcctcagaaggcagagcttgcagtgagctgagatcgcaccagtgcactccagcctgtgcaacagagtgagactctgtctaggtaggtaggtaagaaggaaggaaggaagaacagacctggatggagttattgggaacatgtcttatcaatgttgaagggccccctatcactgtagggagacatccacgtgggttgttttcgtctgctgtgaaaatctagggttggaatcatggaagcaaattgcaggaattcttaatcatcctgctcacgtggtgggcatcagagggtgtctgcttggcccccacagcactgggacagtcagagaggccatgagtggatgacgccctgatcactgccctttgcagtccaggaatacctcactgggctggggccataccctgtgccctctggaagacaagcctgcgcacttactatgtgccagatgccatg

SEQ ID NO: 2583 - DNA, 479 bp, Homo sapiens
cttgaatcgcctacctagccagggcggaattccgacagtggctcccctgtggctgtggggacaagggcagagctccctggaacacaggagggagggaaggaagagaacatctcagaatctccctcctgatggcaaacgatccgggttaaattaaggtccggccttttcctgctcaggcatgtggagcttgtagtggaagaggctctctggaccctcatccaccacagtggcctggttagagaccttggggaaataactcacaggtgactcagggcctctgtcctgtaccgcagctgagggaaactgtcctgcgcttccactggggacaatgcgctccctcgtctccagactttccagtcctcattcggttctcgaaagtcgcctccagaagccccatcttgggaccaccgtgactttcattctccagggtgcctggccttggtgctgcccaagaacccagaggggccctcactggcctt

SEQ ID NO: 2584 - DNA, 486 bp, Homo sapiens
  misc_feature (1)...(486): n = A,T,C or G
catcgagtagcantagcccagngnggnggaattcagcagcgccaagacaagatgcgggaagaaggcctccagctagtgagcatgatccgggatggggaagccgcaggtgcctgtccagaggagatcttctcggctctgcagtactcgggcactgaggtgcctctgcagtggttgcgctcagaactgccctacgtcctggagatggtggctgagctggctggacagcaggaccctgggctgggtgccttttcctgtcaggaggcccggagagcctggctggatcgtcatggcaaccttgatgaagctgtggaggagtgtgtgaggaccaggcgaaggaaggtgcaggagctccagtctctatgctttgggcctgaggaggggtctctccaggcattgttccagcacggaggtgatgtgtcacgggccctgactgagctacagcgccaacgcctagagccctttccgcagcgcctctgggacagtggn

SEQ ID NO: 2585 - DNA, 499 bp, Homo sapiens
  misc_feature (1)...(499): n = A,T,C or G
cccccagccccnnnnnatttgatatccctttgcagagtgcaggaatttctctgactcccgtggaatgacagacaggcagtgcccttaaggctgccggtctggctggattgagatgtctttacctttctacatggcttgagccctatgccatgatctcagcccactggtttgctccacccttagatcccagctgcagccttcagcttggtcaccaaagacgggcagcctgttcgctacgacatggaggtgccagactcgggcatcgacctgcagtgcacactggcccctgatggcagcttcgcctggagctggagggtcaagcatggccagctggagaacaggccctaaccctgccctccaccgccggctccacactgccggaagcagccttcctgctcggtgcacgatgctgccctgaaacacaggctcagccgttcccatggatctgccagcccccggctcagcagagggaccagggcctcgcagcagcaaggtggag

SEQ ID NO: 2586 - DNA, 502 bp, Homo sapiens
  misc_feature (1)...(502): n = A,T,C or G
cgcccccccccccccgcccccccaatagaagaccattagttcgaagngccgtaaancccaccttgaagctaccaaacgcaagcaccaggaaatccgagccatgagaagtcagctcaaaaagatcgaggacctgggggccgccatggaggaggccctcatcctggacaacaagtacacggagcacaacaccgtgggcctcgcccagcagtgggaccagctggaccagctgggcatgcgcatgcagcacaacctggagcagcagatccaggttgtgctgcatgtccgctcctctgtgtgctctcactttccactgtaaccttaagcctgcttagcttggaataagacttaagagaaaatggtgcttcactaacccgcttccggtccagtcacaatcatcatgtcactgtggggacccagatctgtgtcttgaagcagctgccctcattccgacttcagaaaatcgaagcagctggctcctcccctttgtctctctcccaccctn

SEQ ID NO: 2587 - DNA, 494 bp, Homo sapiens
  misc_feature (1)...(494): n = A,T,C or G
agtgccngnnnnggggcccaatgagaccctcgatagtagacattagnccangcggtggaattcctgggttctcaaggagctgttctgaagagtggtcacctgcagggccatctccccttggggctgcctgtgcctggggagttggggtggaggcgtccattgcaggccgtggctctgtctcctgtgccctccaggcttcagtcatggggatgcaggtgggcactcctgcatcaatcatggggatgcatggccacggcccccagtgggctcccttctggcaactgccccactttctagccttctgctgccccccactttcagataggctggctctatgtgttgggttcccttaggaaagactgggccccctgggccttgtgccctgatatctgaccctgggcttctgacttcacggccagggtcagaatcaaggggatcacggttgggcttgagtgcagccctgggatacagctggggcctgctttgccagctct

SEQ ID NO: 2588 - DNA, 515 bp, Homo sapiens
  misc_feature (1)...(515): n = A,T,C or G
cgactntactaaganagncncngannnnnnnnngaaatcgagaccccttgcagtggacgtgccattcggcatgntctctgggaccctggaatcctaggtacccacatgtgtgccaaagcctaccccacctggcaggtgtcccacagcaacagaaggaatagtagtccccactctttccatcagccctaccctaccctcattccccgacaccctctggcttgaaccatggctgagcagtgccggcatacgctttgccggcatgcttggatgcccagctgtgtccagaggtggcctgggaccgccagttgcacgcctgccacctcagccagcccccgcccagctcatcagtctgaatggagttgccttaaattggcaggtggtaccgtactcactgcccttggagctgtgaccggctcctgcctgtccaccccttcccgaggtggctcctgcttaccttatcatcccagggctctgattagccaggcctggtcagggtcctggngacggcacccaga

SEQ ID NO: 2589 - DNA, 493 bp, Homo sapiens
  misc_feature (1)...(493): n = A,T,C or G
gaggcngnnnnattgannatcgtagtccctagtcagtgcggtggaattcgcgctgaggttgacccgatgggcaggtgaagaaaatcaccttctccattccccttgatttctttatcgtgtgccgcacgaggcatgctgaagggacacacacctttccccctttttatttacaaagtagagagctgagaaagacagctcatgttctgttttgttttgtacacattatctttctcaagagatgtgatgtccttaagtaaactgacctgccttcatggcttgtcctgtaatgaatgcgttcaagacagtgttttggggacaggaaagaggcattcttaggtaagcggcggtgggggatggggtggggtggagaggaaacccttctaggaagtagttcaatgaaaaacctaaaaatgcccaaataaacattcgcttacatattatatatcttgggcttctttttatgacagttcattcagggacccagtcagtaaac

SEQ ID NO: 2590 - DNA, 323 bp, Homo sapiens
  misc_feature (1)...(323): n = A,T,C or G
annnnnnnnnannnancctnngnaaagacatgctngctcatagtcttgaccgaggaccagttcccatatgtgtatgtgcccacagtgtttgagaactatgtggcagatatcgaggtggatggaaagcacgtaaagttggctttgtgggacacagctgggcaggaagattatgattccgtgaggcccctcttctacccagataccgatgttatactgatgtgtttttccatcgacagccctgatagtttagaaaacattccagaaaagtggaccccagaagtcatgcatttctgtcccaacgtgcccatcatcctggttgggag

SEQ ID NO: 2591 - DNA, 493 bp, Homo sapiens
  misc_feature (1)...(493): n = A,T,C or G
gcggccgnnnnattgannatcgtagtacctagtccgtgtggtggaattccagattaaagtgaaggaactttctgttgtttttgtagcaccgctcagctgtcttgtaaaacagtgaacacacgctttctggttctagtaatcctgggtgtttatcacgttcagagaaactcaagctattgcatgattagccccctatctggcaaggaaaccccatacagaagaaacaacaaacctgcgcctgcaccgcctctgcgtcctgggtagtctgtgcttgtaatccagcatgtttcacagagtaagcctgttgtgactttgcttttggggtctatgtcattggtttctgatgcttgtacaaacacgcacacacaaatggataaaacagcacctctggctgttacattaccataaaccatatcacatgcctacattttacaaatgatttctggtttctcttagttcttctctaacatagtactttctttccagcaaaagn

SEQ ID NO: 2592 - DNA, 491 bp, Homo sapiens
  misc_feature (1)...(491): n = A,T,C or G
ngtgggtnnnnnnatcgagaccctagtcagtgtggtggaattcaggcccgccgccggcgaggaggcgtgagtgccgaggtgtacaccgaggaggacgccgtgtcctacgtcaggaaggtgattcccaaggactacaaaaccatgactgcgctggccaaggccatctccaagaacgtgctcttcgctcacctggatgacaacgagaggagtgacatattcgatgccatgttccctgtcactcacatcgctggggagactgttatacagcaagggaatgaaggagacaacttctatgtcgttgatcaaggggaagtggatgtgtacgtgaacggagagtgggtgaccaacatcagcgagggaggcagcttcggggagctggcgctcatctacggcacccccagggctgcgaccgtgaaagccaagacggacctcaagctctgggggatcgaccgggacagctaccggcgcatccttatgggcagcacgctgag

SEQ ID NO: 2593 - DNA, 466 bp, Homo sapiens
  misc_feature (1)...(466): n = A,T,C or G
gaatggcgggggnnccnnncatcgagttcatatccagtggtggaattaggaggttgaggctatagtgagccatgattctgccactctactccagcctgggcaacagagtgggcaaagaaaaagatgataaacgtattatgtaatataatggtcggcatgtattgtacatatgtatctatggataaaattaacattaattaaattaacactctaagcacttaatgtgtgttgtagctctttagttaaagattgtttccttcttttcccatgtgaaatttttttttaagaattaaagcccaaaggcattgtctgatatttagcaagtacattaaatctgctagacttattgtcttccctgctaacttagggtatttttttggttgtccgcctctatggactgtggtaaagctaggattagtaaccagacattacttaccttggctccgatctggttgccacactggcc

SEQ ID NO: 2594 - DNA, 449 bp, Homo sapiens
  misc_feature (1)...(449): n = A,T,C or G
ggcgaggggngnnnnaatgagaccctggcatgaagcgcatttctaaanactattnttcccccttgaatctgctaaagaaaacagatcctgacttagcttacttgaaataagcagggcagggagccctgttttggaagagacagactgtggaagagattacaaacaaggcccgaggctgcacgaatgatgagttttgtgtatataatgttaatgtccaccgccacttccctaacgactatgagatcttttttttgaagatcctcatggaaggttgtacagagccccacatttgaggggaagtcctttcagttgatatgagatctctttaacacccctcagtctatgtaggaaatgccttgtgatacatagagaaccctcagcttctctctgcctctggaggaccaaggtctttcctgacagtcggagacacaccttgatgtatgttaata

SEQ ID NO: 2595 - DNA, 485 bp, Homo sapiens
  misc_feature (1)...(485): n = A,T,C or G
ngggattgagaccctagtcagngtcgaggaccctagtgagcgaggaggaattcatccaaccccaaccttcgggctacaggccagcggcctcccatacctgacgaactgcagcccaggtccctggccccaaggatggctggcctccccttccggcctccctggggctgcctttccctggtgggcgtgcaggactgccccgtggctgccaagtccaagagcctgggcgacctcactgctgatgactttgcccctagctttgagggcggctcccgcagactgagccacagcctgggcctcccgggagggacacggcgggtgtcggggccaggggtgagacgggacaccctgacagagcagctgcgctggctcactgtcttccagcaggcaggagacatcacgtcacccaccagcctgggcccggctggggagggggtggcagggggccctggttttgtgcggcgctcctcctcccgcagacacagccg

SEQ ID NO: 2596 - DNA, 469 bp, Homo sapiens
  misc_feature (1)...(469): n = A,T,C or G
tgccgggccngnnnnnnattgaattcattngcatatccatgtggtggaattccctggagttagtgagggctgcccaccaacctccacacagggacagcagacggaaactctgacatttccctctctgcagctggaaagctaagagcagcttgtctgcccgtctcgccgagtcccacccctttaagtacaggtgtccagggtggaaacatggaaagtggaacaggggaaggaagaggctggtagtgcccgtggccctggcgggactggctttgcctctgcctctcagttccctaggttcggtttgcagtcccaacatccagcacaagggggcgctaccaccctgcaaaccctgccccgcgggtcttgcacatggagtgggcgcagccatagagagtggggtgtgttcctctaagtcccttacccagctttcctcctctcagaacctacatgcaatcttgtgcagggatga

SEQ ID NO: 2597 - DNA, 494 bp, Homo sapiens
  misc_feature (1)...(494): n = A,T,C or G
agagcnnnnnntttganaatctantacctagtcagtgtggtggaattccaagcactgcgcgcttcttccccaggaggtgggcaggcagctgagagcttggaagcataggctttgagaccctagcaggacaattgggagtcccaggattcaaggtggaagatgcgtttctggtcccttgggagaggactgtgaaccgagaggtggttactgtagtgtttgttgccttgctgcctttgcactcagtccattttctcagcactcaatgctcctgtgcggattggcactccgtctgtatgaatgcctgtgcttaaaaccaggagcggggctgtccttgccacgtgccaagactagctcagaaaagccggcaggccagaaggacccaccctgaggtgccaaggagcaggtgactctcccaaccggacccagaaccttcacggccagaaagtagagtctgcgctgtgaccttctgttgggcgcgtgtctgttggtcagaa

SEQ ID NO: 2598 - DNA, 499 bp, Homo sapiens
  misc_feature (1)...(499): n = A,T,C or G
gagcggcnnnnnaattgannatcgtagtccctagtccgtgtggtggaattccccctccacctccgcagccagtgaagtgtgttgtgcctgctgaagtgatcaccccccgcccccagccctgcatcaggccacaggtcttggctttctccttatcaccatttgctgttatcacggcacacagcagggaatcccaggcccccccgccaagtggttacccaagtcaccactcctgacccaaaaatcaggcatggcattaaaacgttgcaaattcctttactgttatcccccccaccaccaggaccatgtagggtgcagtctttactccctaacccgtttcccgaaaaaggtgctacctcctttccagacagatgagagagggcaggacttcaggctggatccaccactgggctctccctcccccagcctggagcacgggaggggaggtgacggctggtgactgatggatgggtagtgggctgagaagaggggactaggaagg

SEQ ID NO: 2599 - DNA, 445 bp, Homo sapiens
  misc_feature (1)...(445): n = A,T,C or G
nttganncccttttgacgacccctagtcagtgtggtggaattcctcactcaagaggggctccaagccgtcggcgtcctcggcctcgctggagaagcgcatgaagatggtgtcccagagcttcacccagcgctttcggctgtctcgggacaggaaagtggccaagtcgctggccgtcatcgtgagcatctttgggctctgctgggccccatacacgctgctgatgatcatccgggccgcctgccatggccactgcgtccctgactactggtacgaaacctccttctggctcctgtgggccaactcggctgtcaaccctgtcctctaccctctgtgccaccacagcttccgccgggccttcaccaagctgctctgcccccagaagctcaaaatccagccccacagctccctggagcactgctggaaaaagatgaagaagaaaacatg

SEQ ID NO: 2600 - DNA, 470 bp, Homo sapiens
  misc_feature (1)...(470): n = A,T,C or G
gggaggcggggnngcnnncatcgagttcatagtcagtgtggtggaattcaagaagaattacaagagctcagggacggtagtgctggcccagtgcacggtggagaaggtgcacaccttcctggattacatcatgggtggctgccagatcagcttcacggtggccattgacttcactgcctccaatggggacccgaggagcagccagtccctgcactgcctcagtccccgacagcccaaccactacctgcaggccctgcgtgcagtgggaggcatctgccaggactatgacagtgataagcggttcccagcttttggctttggggctcgaatcccccccaacttcgaggtgtcccatgactttgctatcaactttgacccggaaaatcctgaatgtgaagagatctcaggggtcatcgcctcctaccgtcgttgcctgccccagatccagctctacggccccaccaatgtgg

SEQ ID NO: 2601 - DNA, 481 bp, Homo sapiens
  misc_feature (1)...(481): n = A,T,C or G
agtgcgccggccgggcnnnnnaactgactgcgtcgcactgggcangagcnggaattctatgttactgtgacaactacccagagtcgcacaactgctactggagaaattgaaatccagcctagagtggttcctaatgcatcattcttcagcttctttagtcctcctgagattcctatgattgggaagctggaaccacgagaagatgctatcctggatgaggactttgaaattgggcacaatctacatgataatgtcatcctgaaatcaatctattactatactggagaagacaacgcgccctactatcaattcggcccacattatggaaacaacaaatacagaagataactcactctgagagattttccacgaatcttaacatctcaagaggtgaagcagattcatacagtcttgaagaaagtaataccctgacctgtaacctgaacactattattccttatagggcacgttttgtggtttc

SEQ ID NO: 2602 - DNA, 467 bp, Homo sapiens
  misc_feature (1)...(467): n = A,T,C or G
tgtnagtgnacgggaannnnnntttgatgacctctgtacagctggtggacagcgtaggggaattcctccctggagtcgggggctggagcgtgacttgggtctagaatgccaggtgagccttgcaaattgggagaggctactgcatctgtgaggagcagggtgtggtggggaaggtgccctgggatggggcttctccttaaggctgagcagggctcaaatctgccgcttgtaggggggtgcgcagtgccacctagggggctaatgggaggatgacaagtggtcaactcaggtcatcaggggctgtgctctgagctccccaggaacaaggcttccacccctctccccaggctcagacccccacatctggagggagttcagctgtgttcccactggtgggtgcagaggcctataccaaatgggtggtgccactgaggagaaaagggaagcctctggatagagtcctttag

SEQ ID NO: 2603 - DNA, 471 bp, Homo sapiens
  misc_feature (1)...(471): n = A,T,C or G
gaggccgggccggnnnnnaaactgacatccaacatcggacggactggaaatcaaaaattatatgtgtggttaccttgggactcattggaaattgtacagcgacatcttctgggatttagtctggattgtgcagactggtgcttaaaatggaagtcgatattaatggagagactataagtaccctgaccaccttgtccttccctggggctgaggccaactccccgggaaaggcggaggcagagaagccccgctgatccagcacaccctgctccccgatgcggaggaccgtgtcaggctaccagatcctacacatggactctaactatttggttggcttcacgactggcgaggaactcctgaagttagctcagaagtgcacaggaggtgaagagagcaaagcagaagccatgccgtccttacgctccaaacagctagatgcatgacttgcccgctcctctcgtttgtataaan

SEQ ID NO: 2604 - DNA, 471 bp, Homo sapiens
  misc_feature (1)...(471): n = A,T,C or G
gaggccgggntggntnnnaactgactgcatncatnnggcggactcgtactccccaggccggagagggacctgagccgtgaggtacacaaggctgagtggcggatcaaggagcagaaactcaaggatgacatccggggcctgcgtgaaaagctgaccgggctggacaaagagaaatccctgtcggatcagaggcgctactccctcatcgacccgtcctcggcgcccgagcttctgcggctgcagcaccagctgatgagcacggaggacgccctgcgggacgcgctggaccaggctcagcaggtggagaagctgatggaggccatgaggagctgccctgacaaggcccagaccatcggcaattccggttctgcaaacggcatccaccagcaggacaaagctcagaaacaagaggtgaggggcgcctcgggcctcccaggtccctcccgtgcaggcagacctctctggagaaaa

SEQ ID NO: 2605 - DNA, 446 bp, Homo sapiens
  misc_feature (1)...(446): n = A,T,C or G
ntttgacgaccatttggacagcgtggtggaaatccctccatggcccaaacctagtgctgacactaaccacgaactttgctttgtagcagatcgaaaaagcttctgcacaatccacagcacaggctatgtgaaaagctggccacccacaaagatggggctggatgaagacaacgaaccagacaatgaggggtgtaacctcagctgcctcgtcgcaattggacgactgcattctcatgtagttccacaaccagtgaacggggaaatcagggtgaaatctatggaatatgtttctcggcacgcgatagatggaaagtttgtttttgtagaccagagggcaacagctattttggcatatttaccacaagaacttctaggcacatcgtgttatgaatattttcaccaagatgacataggacatcttgcagaatgtcataggcaagttttaa

SEQ ID NO: 2606 - DNA, 492 bp, Homo sapiens
  misc_feature (1)...(492): n = A,T,C or G
nttgaaccatagccaggggtgaatttccttctcctcangattctgaagagcccgacagctacacggaatgcacagatggctatgagtgggacccagacagccagcactgccgggatgtcaacgagtgtctgaccatccctgaggcctgcaagggggaaatgaagtgcatcaaccactacgggggctacttgtgcctgccccgctccgctgccgtcatcaacgacctacacggcgagggacccccgccaccagtgcctcccgctcaacaccccaacccctgcccaccaggctatgagcccgacgatcaggacagctgtgtggatgtggacgagtgtgcccaggccctgcacgactgtcgccccagccaggactgccataacttgcctggctcctatcagtgcacctgccctgatggttaccgcaagatcgggcccgagtgtgtggacatagacgagtgccgctaccgctactgccagcaccgctgcgtgaact

SEQ ID NO: 2607 - DNA, 479 bp, Homo sapiens
  misc_feature (1)...(479): n = A,T,C or G
nggagcgccntttgagatcatattcagtgcggtggaattcccaagtgctgggattacaggggtaagccaccgtgcctggccagcataagctatttttatcctcatctatactgattgatttaaattttccgggcctgcagatgaatttggaaaagggcataatcaactgatgttgctgtagcaaatttggacttaagaaactacagacagggccgggcgtggtggctcacacctgtaattccagcacttcgcagggccgaggcgggagaatcacttgagtccgggggttggagaccagtctgggcaacacagacctcatctctacaaataaaagagttggccgggtgtggtggggtgtgcctgtggtcccagctgctcggggggctgaggcagaagaattgcttgagcccaagaagtcaaggctacagtgagttgtgatcgcaccacagagctcagcttgagtatcagagtgtgaccct

SEQ ID NO: 2608 - DNA, 481 bp, Homo sapiens
  misc_feature (1)...(481): n = A,T,C or G
ngaggccgngccngnnnnnnncctgaactgcatagctctcggcagngagcnggaattcgctactgtgaccctcccggtcttcattggcaatattgctgtgaaccatgccccagtgagcccccggccaggcctggggctgcctcctggggccccacccctggtggtgccttccgcaccaccccaggaggaggctgaggctgaggctgcggctggcggcccccacttcttggaccccgtcttcctctccaccaagagccattcgcagcggcagcccctgctggccaccttgagttctgtgcctggtgcgccggagccctgccctcaggatggcagccctgcctcacacccgctgcaccctcccttgtgcatttcaacaggtgccactgtcccctactttgcagagggctccggggggccagagcccactaccagcaccttgattcttcctccagagtacagttcttggggctacccctatggg

SEQ ID NO: 2609 - DNA, 479 bp, Homo sapiens
  misc_feature (1)...(479): n = A,T,C or G
ngaggcgcgggccggnnnnnnnacttgactgcatancaatngngcnggaactcatcctgggtgggcggngatagcagggggtgaggctgcgcttctgcaggtgtcctggcggcgggtgtaaaatctcaccctgggcggtctctggtgacgtgaacgctgacggtttaattgatgccgtgtctgcagcctcccctgcaacgctgtcctttctctctattatgattaatccgtgttctgtggggcgtcctttaaagccatggggacatccacgcgcaccaggcttccagctgcttgtctgagcctgagctgtggggccgcttgtgccccaggccatctcctggcactgtcagctcccaccatccccccacaaccctccccatcaagcaggctcctgagtgctcgggcacggcctcgtagccctggagggtcgcgatctcctacaagcctctggtgttttccctgcccaggctggagctggn

SEQ ID NO: 2610 - DNA, 494 bp, Homo sapiens
  misc_feature (1)...(494): n = A,T,C or G
gagggctnnnnnaatcganaatctagtcagtgtggtggaattcggaaaaacaccggagctcggtaggggactgcaagtgtccagacatctggctgggctggatcatggaagacactgggctctacctgcccggcaagttctctcgctgtagcatagactagtacgaccagtttctgctggagggtggtggcagctggctgttcaacaagcccatcaggctgctggaccccacacagagcgggaacggcttcgtggaggcaggggaggagtgcgactgcggctcggtgcaggagtgcagccgcgcaggtggcaactgctgcaagaaatgcaccctgactcacgacgccatgtgcagcgacgggctctgctgtcgccgctgcaagtacgaaccacggggtgtgtcctgccgagaggccgtgaacgagtgcgacatcgcggagacctgcaccggggactctagccagtgcccgcctaacctgcacaagctggacggt

SEQ ID NO: 2611 - DNA, 475 bp, Homo sapiens
  misc_feature (1)...(475): n = A,T,C or G
agaggccgncgcngnnnnnaaactgactgcatgcataggcanggcgggaattcacgctcaacattggacagtgtgtgcgcatcacggacaagggcctggagctgatcgctgatcacctgagccaactcaccggcatagacctgtacggctgcacccgaatcaccaagcgcggcctggagcgcatcacgcagctgccgtgcctcaaggtactcaacctgggactctggcagatgacggacagtgagaaggtcaggaggcacgaggggatttttctccattattcactgtgagaactcggggaagctccagaaggtgagggagaggggacaacgacatggttcccgtggatctttaacttccagacttgcccgctctgcgcctccggcactctggtgatgacagctcaggtttccctgcctgtcactgctcggacagaggctgctgcccagggcttctgctccggtaccttgtgaag

SEQ ID NO: 2612 - DNA, 495 bp, Homo sapiens
  misc_feature (1)...(495): n = A,T,C or G
gggccannnnattgannatcgtagaacctagtccgtgtggtggaattcggctgtctctgatggtgtcatcaaggtgttcaacgacatgaaggtgcgtaagtcttcaacgccagaggaggtgaagaagcgcaagaaggcggtgctcttctgcctgagtgaggacaagaagaacatcatcctggaggagggcaaggagatcctggtgggcgatgtgggccagactgtcgacgacccctacgccacctttgtcaagatgctgccagataaggactgccgctatgccctctatgatgcaacctatgagaccaaggagagcaagaaggaggatctggtgtttatcttctgggcccccgagtctgcgccccttaagagcaaaatgatttatgccagctccaaggacgccatcaagaagaagctgacagggatcaagcatgaattgcaagcaaactgctacgaggaggtcaaggaccgctgcaccctggcagagaagctggn

SEQ ID NO: 2613 - DNA, 447 bp, Homo sapiens
  misc_feature (1)...(447): n = A,T,C or G
nttcgaagcccttttgatgtcncctagacagtgtggtggaattcggcggcgtcaaaggtgaagcaggacatgcctccgccggggggctatgggcccatcgactacaaacggaacttgccgcgtcgaggactgtcgggctacagcatgctggccatagggattggaaccctgatctacgggcactggagcataatgaagtggaaccgtgagcgcaggcgcctacaaatcgaggacttcgaggctcgcatcgcgctgttgccactgttacaggcagaaaccgaccggaggtagcaccgcaggggccaaggttgggaggtcactggccggaaggccccaggctgcagggcctgacctgcatccccgaaggtggccagaatgcacgtgggggccatcgccctgtgccgtcagctgcatcctcaggcgtggagacttagtggagacccaagg

SEQ ID NO: 2614 - DNA, 493 bp, Homo sapiens
  misc_feature (1)...(493): n = A,T,C or G
gcgcntcnnnaatcgagaatttagtcactgtggtggaattccgcttggagtcattaacgtgatcccagctgactccggtcggcctcaacccaggggtggcgcaggcaccttgcaagcctcgagctgtagccaccctcaggcctgggaagaggcctgggccgacctcacacctcagcccttgcacccggccgggctcagttcaggcctgggcaccgagcttcaccctgggtgggtctcctcaggtggagtctgcagagtggacccagccaagggtcagggtcagcactgggtcagcgactccaatcttccagtggccagcacaccctatacaccccgaggagggagggctcctttctagcctgcccccccacccccacttcacccctccccagcttcccaaacttctgtctgcccaaatgggctctgaccgtgctctgtcggcccgagacatttggaagtcctgggggatgctggcaaatctcagctgttgctg

SEQ ID NO: 2615 - DNA, 435 bp, Homo sapiens
  misc_feature (1)...(435): n = A,T,C or G
atcgaatgagacctcagacagncnggnggaattctcattgccctgatgtctgtccagaagaactagaaaagatgattcaagttttggatgaaatagatagcattacaactctgccagatctaactccacttttcatcagcattgacccagagagggacacaaaagaagccatcgcaaattatgtgaaagaattttctcccaaactggttggcttgactggcacgagagaagaggtcgatcaagtggccagagcatacagagtgtattacagccctggccccaaggacgaagatgaagactacatagtggatcacacaataataatgtacttgattggaccagatggtgagtttctagattattttggccagaacaagaggaagggagaaatagctgcttcaattgccacacacatgaggccatacagaaaaaagg

SEQ ID NO: 2616 - DNA, 448 bp, Homo sapiens
  misc_feature (1)...(448): n = A,T,C or G
ntttgagccccttttgangacccctagaccgcgtggtggaattccaaccaagcctggtacatttccttccctaagctccacctacgccacctcctcaccttggttcacattcttatctttgactggatcccaccccctcactcctccatctccacttccatctcaccctgtcaaaatcctcaccattatttagaaagagcctcttcaggccgggcacggtggctcacgcctgtaatcccagcactttgggaggccgaggtgggtggatcacggggtcaggagatcgagaccatcctggccaacacggtgaaactgtctctgctggaaatacaaaaaaactagctgggtgtggtggtgcacacctgtggtcccagctactcaggaggctgaggcaggagaatcgcttgaacccgggaggcagaggttgcagggagctgagatcatacct

SEQ ID NO: 2617 - DNA, 490 bp, Homo sapiens
  misc_feature (1)...(490): n = A,T,C or G
ggcgccccattgaaacccttcctttgagaccntccgaagngncgnggaattccttcagccctctgtgggcccctctccccggggggctttgggattcttgtcaagctcctttaagagcctgcaagcacttaaccaggcacccagagttccctcactgaagatctgagcatgacccgggacgaggcactgccggactctcattctgcacaggacttctatgagaattatgagcccaaagagatcctgggcaggggcgttagcagtgtggccaggcgatgcatccacaagcccacgagccaggagtacgccgtgaaggtcatcgacgtcaccggaggaggcaggttcagcccggaggaggtgcgggagctgcgagaagccacgctgaaggaggtggacatcctgcgcaaggtctcaaggcaccccaacatcatacagctgaaggacacttatgagaccaacactttcttcttcttggtgtttgacctgatgg

SEQ ID NO: 2618 - DNA, 495 bp, Homo sapiens
  misc_feature (1)...(495): n = A,T,C or G
gagcnannnnaattganncctcgaganacctagtcagtgtggtggaattccaacagaactcccaggacttcatggatgagatttttcaggagctcgagaacttcagcttggagcaggaagaggaggacgtgccagaccaggaacagagcagcagcatcgagaccccatcagaggaggcggcctctccccacagctgaggggctggggctaggggtgggtggagcccttttaaaatacccttcccttcaacaactctccagctctgaatggagaaactctctaggccatcccctcttctacctcctgcaacccacccatcctattagcctcccacattctaggcccgtgatacagggatgaggtcagcaccagcaaactctggactggtggaagaattccccaccagatctccttgaagcagaagtagggatcagcatcattaacaccttccccaccccctccccgcaggcagacagtgaagagaatcagaaaacn

SEQ ID NO: 2619 - DNA, 473 bp, Homo sapiens
  misc_feature (1)...(473): n = A,T,C or G
tgatganagggggggggggttttgagcccaactgagacactagaacangcggnggaattcggaggcacaggctttgggagcagaggccctgcagcttgccaagcacacacggccctatggcgcccagctgagacggcaccttggcacccgggcccgctgcagcccgctccggtcagctgcaccccagtcaggagcctttccagcgggtcggaggagaacggaagtttggggagacccgcgcgattcgcctggctgcattttacatttctttctccggcagctggggtcacgaaggctgctctcgccggcggtgttggaacgtggacacgtgcgctttgcgggaatgcatatcagtccacgtgggccaagcgggagttcagattggcaatgcctgctgggagctcttctgcctggaacacggcatccaggcagacggcacttttgatgctcaagctagcaagatcaacgatgag

SEQ ID NO: 2620 - DNA, 494 bp, Homo sapiens
  misc_feature (1)...(494): n = A,T,C or G
gggcgagccgccccattgannccctaactgatgtccctactcagngtcgnggaattcggcgaccgaccgcggcgggaagcgtgtgccctagcccgggggaccaggaggcgcagcctgtgggttgagtgcctgctgggtgtccccacggcccccgggaacacacccgtggtcagaggagttgcgtttgctgctcttcgatggctgcagcaccccatgggggcccgcggcgggaggcagcaccgggctcttgatggacttggcagccaatgaaaaggccgttcatgcagacttttttaacgattttgaagatctttttgatgatgatgacatccagtgagatgccctctggctgcaggcggngccaagcccttggtacagagccgcagtgtgagcctgcgcaggacagtttcaggtggttttaaagaacacgtggaaatcccttgaatttacgacctggttaaccagaaagataagactgttcttaacgacctaan

SEQ ID NO: 2621 - DNA, 499 bp, Homo sapiens
  misc_feature (1)...(499): n = A,T,C or G
ggcggnnnnnnngggagattgagacccttngnnnncatcgagaccctagtgccagtgtggtggaattccacagacactgattggcgtgaactggccatggaagcgctagaaggtttagattttgaaacagcaaagaaggccttcatcagagtacaagacctccgatatttagagctcatcagcagcattgaggagaggaagaagcggggagagaccaacaatgacctgtttctggcagatgtgttttcctaccaggggaagttccatgaggccgccaaactgtacaagaggagtgggcacgagaacctcgcgcttgaaatgtacaccgacctctgcatgtttgagtatgccaaggatttccttggatctggagaccccaaagaaacaaagatgctaatcaccaaacaggctgactgggccagaaatatcaaggagcccaaagccgccgtggagatgtacatctcatcaggagagcacgtcaaggccatcgagatctggg

SEQ ID NO: 2622 - DNA, 493 bp, Homo sapiens
  misc_feature (1)...(493): n = A,T,C or G
agtgcgagtnncccccctcgagaccatatttagtgtgctgtaattccctacacggacaagattgacaggtatgcccagcaagacctgaagaaaggcttgcacctgtacggcacgcatggcaacgtgggcctcaccaacgcctggagcatcatccagaccgacttccgctgctgtggcgtctccaactacactgactggttcgaggtgtacaacgccacgcgggtacctgactcctgctgcttggagttcagtgagagctgtgggctgcacgcccccggcacctggtggaaggcgccgtgctacgagacggtgaaggtgtggcttcaggagaacctgctggctgtgggcatctttgggctgtgcacggcgctggtgcagatcctgggcctgaccttcgccatgaccatgtactgccaagtggtcaaggcagacacctactgcgcgtaggccgaccaccgcccgcttctctgccaaaaggacgcccacggagaga

SEQ ID NO: 2623 - DNA, 486 bp, Homo sapiens
  misc_feature (1)...(486): n = A,T,C or G
cgaggcgcccgnaatcgagncccatcgagaccataggcagngnggaggaattcctgtccctaccacaggcagtgaacggcggctgtcaggggacctcagctccatgccaggccctgggactctgagcgtccgtgtctctcccccgcaacccatcctcagccggggccgtccagacagcaacaagaccgagaaccggcgtatcacacacatctccgcggagcagaagcggcgcttcaacatcaagctggggtttgacacccttcatgggctcgtgagcacactcagtgcccagcccagcctcaaggtgagcaaagctaccacgctgcagaagacagctgagtacatccttatgctacagcaggagcgtgcgggcttgcaggaggaggcccagcagctgcgggatgagattgaggagctcaatgccgccattaacctgtgccagcagcagctgcccgccacaggggtacccatcacacaccagcgttt

SEQ ID NO: 2624 - DNA, 471 bp, Homo sapiens
  misc_feature (1)...(471): n = A,T,C or G
naggggagtccggctnnnnnnnnacttgactgcgtagcatcgngcnggaacncggnccagctcctggaaccgtccaaatcggcctcgtccaaaggagagggctttgatgtcatgaagtcgggtgatgcccgtgtggcgctgattggatttccctctgtgggtaagtccacattcttgagtctgatgacctccacggccagcgaggcagcgtcctatgagttcaccactctgacgtgcattcctggggtcattgaatacaaaggtgccaacatccagctcctggaccttcctggaatcattgaaggcgcagcccaaggaaaaggccgtggccgggaggtgatcgctgcggcgcgcacgggtgacgtcatcatcatgatgctggatgccaccaatggagaggtgcagaggtctctgctggagaatgagctgtagtctgtgggcatccgcctcaacaagcacaagcctaacatt

SEQ ID NO: 2625 - DNA, 470 bp, Homo sapiens
  misc_feature (1)...(470): n = A,T,C or G
nggggagccggccgnnnnnnaactgactgcgtacactaggccngngcnggaattctctccttcctttttctctgcctccacttccatcgtcctagtctgtggctgcaacaggacttacctgggtgaatccagcaactttcttcatgatctttgcacacccatttttgtcccctctaatctactctcaccccagaagctgcaatgcctcctcaatatgctaacgtcatcagggtaacaggacccccatctttctgcctaaaacactggagtggtttcccatggctctcaggacaaagacccaattcctcatcataacttcagagtcccaccgtgtactccgggccccttgccctgcatgcagcatctcctgatcatacacagctccccagcccggccatgttccggcctgtgcagctctgacccactcttctctctgctggagtgctgcctgacaccttccccaccgtctc

SEQ ID NO: 2626 - DNA, 469 bp, Homo sapiens
  misc_feature (1)...(469): n = A,T,C or G
naaggggtgccggnntnnnnnnnnaactgatagcatggcattggcgggactcctcccccacatactgaagccagaataagccacgacttcgtgtgctccacgcgagggccgcctgacgccagagtttctcccgcatctgccatcagaggaccgtcgccctcaggagcccgagctcccgcgaagcttcagagcagtagtgcatagtgtatggatactacccgcccccgagcctagcaaattgcctggtgagcggccatcctggataaatggtgaatgatgacatcccaggggtcacttccacacaccacaggcttctccgaaattggagttccagaagccatccttggataacatctctataatctcctgggagaatccttcttcgaagaaatcctccatcagaggagaggtcttggtctcagtcacatctgaaagagcaagtgcaaatgtctcctgttcactaaggata

SEQ ID NO: 2627 - DNA, 475 bp, Homo sapiens
  misc_feature (1)...(475): n = A,T,C or G
nnagggaggccggcccggnnnnnaaactgaactgcgtagcactaggccngngccggaattcaccgagactgccccgcggagccgccgctagacttcgggctccttgaggatattcagttttgtatgtttgaatatcctctcaccatgttcagcataaagtaccattcttaatgattatcctcaacaagacaggtgtgagagggttgctgttgtattgcaatcatggtgcagaaataccagtccccagtgagggtgtacaaatacccctttgaattaattatggctgcctatgaaaggaggttccctacatgtcctttgattccgatgttcgtgggcagtgacactgtgaatgaattcaagagcgaagatggggctattcatgtcattgaaaggcgctgcaagctggatgtagatgcacccagactgctgaagaagattgcaggagttgattatgtttattttgtccagaaaaacn

SEQ ID NO: 2628 - DNA, 472 bp, Homo sapiens
  misc_feature (1)...(472): n = A,T,C or G
nggggaggcccgcccgnnnnnaaactgactgcgtagcatacgacgngngcnnggaattatctattgtggctttaccaaaaaataaaatgtccctaccagaagccttaaagagccttacttggagtatttttaagactggaagcttttaccaggttcatcatttcctatgcatcaccttcatgcaggcagagtctggataatgaatgctttagcagcaaaaaagcatcttgggtcttggatttcagacctggtttcaacacttgtgttccctctaagtgtcagtgtccttttctggaaagtagggtaaatagtttctctttgtctcccagagaacatagcacatgtgttcatgattgtaatgctgttataatgtgtacttcatttttaaattttgagataagaattgttcatgatacacagatgtatacttaaaaaaatatgaaggtgagcaggagcacctgtgtcaacaccn

SEQ ID NO: 2629 - DNA, 469 bp, Homo sapiens
  misc_feature (1)...(469): n = A,T,C or G
ngggaggacggccggnnnnnaaactgactgagtntcctaggcagngngcnggaattcaataaaggccttggaggattgagggatgttatcttataggatgaatcaagtttcctagaggaagtgattaggttggactttgatttcctgagctagtgtgggtctggggaacaaagcaaagtgtagccaacacacagggaatatacatttggtttcctgcctatatttttatgtgaaacaaagggctgctagcaaagccttcatgatagtcaacaaattaataagcccctgttcagtatatctaggctgcctcatgcactggtcagtccttcctctaaatgggtgtccagatgattcctgtttctgctctttcaggctccaaaaaacttttttgttgtttttttttttggttggttggttagtttgtttttgggccacagccatggcatcatcaaattttaaaatcctgttt

SEQ ID NO: 2630 - DNA, 461 bp, Homo sapiens
  misc_feature (1)...(461): n = A,T,C or G
atagagaacanttgangaccgtcggaaancccatngcaagntnngngatattgcatggtaaccatctgagttgatagatgtatttcagtttttggatagaaatatttaaattagtaaaaggggaaacctttctcatttaatacctggtataccatatttcataaaactaagaaaatagaaaaaaaatccattgccctacaactctaatgtaatgtcatcaccgcctttccttccagccttcttctccatgcatttcccataactgaagtcagagtgtatataaaagtttgctttttgcttctttctctttatatcttaatatagaaatgtcttacaaagtttgacacagacacttgccccagtgtgtcatgctcagagcaatgacccacgggttctaatgggaggtgagcattggagaaggaagggaaattccataagtcagtaaggctgcatcaggatcg

SEQ ID NO: 2631 - DNA, 425 bp, Homo sapiens
attcgagaccccaggacggcccctagtccgtgtggtggaattcctttgttttggtgtcaacggccgccttcagcgtagcaacacggttcgtgaatagctaaccttgtaattgtccctgctgttcctctacgttgttaacgaaaggaacttggagaaccaagtctcgtatgatgattaccatcttttactcctcttcagccccagcttccttgaggggacggttggggaataggtttagggtaattttcgatgagcaaaagccaaccgtctttgctacgtcgcctgcgtagcccacaaattgattccaaagcgattacgctaatggcgtgagggggccggtcagttggtggtgctacgctagcagcgttagcgccgctgaggtagtggcgtatcttagcggggggggcagtccccgatagtcgggg

SEQ ID NO: 2632 - DNA, 470 bp, Homo sapiens
  misc_feature (1)...(470): n = A,T,C or G
naaggaggcccgnntnnnnnnnnccttgatagcatggcattgngcnggaactcgcgccttcgtgcctgagaccagggtggccacacaggcagggcctggctccagtctcatcctcccattgcccagtgagccctgctcttctctccccagccccctcccaccgctgcctcgtagagtgacctcggacagagcccccctagcaatacagggaggctcccggggcctggacaggcgggctcggaggctacccgctgtggccggtgccagctgcccttgcagggtgggtgagctctcaggccgagagccttatttacctagtgcaaaaactgtaaaagtgtacagactcttcacagatttttatcttaattgcaagtctgccgattttgtaaatgttcttggtgtttgactgtaatgtaactatctcacctaatggttgtacatatcctttggtcctggtgctgccgagggct

SEQ ID NO: 2633 - DNA, 482 bp, Homo sapiens
  misc_feature (1)...(482): n = A,T,C or G
gaggcccnnnnnnnnctnnnttattgacatcgagttccatngngcgggaactcggngattacttcagattgggccacggctctgacgtgcacgtgcggaaaccacaggtggtggaagggctgagagggaagaagatcgtgcatgtggctgtcggggccctgcactgcctggcggtcacggactcggggcaggtgtatgcttggggtgacaacgaccacggccagcagggcaatggcacgaccacggttaacaggaagcccacactcgtgcaaggcttagaaggccagaagatcacacgcgtggcttgtgggtcgtcccacagtgtggcgtggacaactgtggatgtggccacgccctctgtccacgagcccgtcctcttccagactgcaagagaccctttaggtgcttcctatttaggcgtgccttcagatgctgattcttctgctgccagtaataaaataagtggtggcagtaattctaaa

SEQ ID NO: 2634 - DNA, 465 bp, Homo sapiens
  misc_feature (1)...(465): n = A,T,C or G
tttgacaacctgcgagntaacctaggacagngccgnnggaattcgattttaaaaagcccagagacttaattggagcctcaaggtctaactctgtcttgattcttgtgctaaatccacggcagcatcagacgttgctgaatagctggtgcgggaggctgcagctggccatggggactgcagcccctgcctccggggctcactcctgggcgggcagacggtggctaaggcagacaggtagcaggggtggtgccacgcagccaaggaacgcaaggaagggaagcagtgagcgggggcggggcgggttgttgggctgggggttccaattacaggcagggcagccagggagacctcagccagaggggatgcctgagggtgggagtgtctgctgggcctggtctctgaggcaggcatgtgtctgcccagcatggcagcagcagcttctgaccgcagcgcccaatgctgtag

SEQ ID NO: 2635 - DNA, 467 bp, Homo sapiens
  misc_feature (1)...(467): n = A,T,C or G
nngggaggcccgttgnnnnnnaactgatagcatggtattgngcnggaactccagatcattaccttgaaccacacagacctggttccctgcctctgtattcaggtgtggcctctggaacctgactccgttaggacgaacatctgccccttcagggaggacccccgcgcacaccagaacctctggcaagccgcccgactgcgactgctgaccctgcagagctggctgctggacgcaccgtgctcgctgcccgcagaagcggcactgtgctggcgggctccgggtggggacccctgccagccactggtcccaccgctttcctgggagaacgtcactgtggacgtgaacagctcggagaagctgcagctgcaggagtgcttgtgggctggtgagttgggcctgggggcagctggggcagggccacctcctaggggtgaaggtcagggcatgggaggcaggcaagtggccan

SEQ ID NO: 2636 - DNA, 455 bp, Homo sapiens
  misc_feature (1)...(455): n = A,T,C or G
tttgagaactangaccatcgcacagngcggnggaattcctctgacctcaaaaagcatttggtgcttcctcattaagctctatttattgtctttactattcacccatctgcctcagtctgggccaaatctattgcccaatcttcaattggttgcgacttttttgtctcttcccgattctggcattccagagggtcaataggttccttctccacgtgcttttgagggaaatgcccccccccaaaaaacttttcacaccaccttgaacagactctaaacttaggcactacagttactaagcagcctttggattctttgtttttgaagttagatcttttcagctattagtggaaaatgtgcctcactctactccaggattaccaatagaaatgaaaggacagaaatggcattagtgtttagagaagattatgtatatatggctgtgtgaacactgaaaa

SEQ ID NO: 2637 - DNA, 192 bp, Homo sapiens
  misc_feature (1)...(192): n = A,T,C or G
tcacacaaagncatggaannntatggntaaggctttgaaatttttcctgattcctctatgtccttttattggcgcgttatttttttcctggtcctttactttctttctttctttgttttttacttcttaagaaaacggggtcttggtccccaatcggggggggaagggccccaacaagactcccacccccct

SEQ ID NO: 2638 - DNA, 455 bp, Homo sapiens
  misc_feature (1)...(455): n = A,T,C or G
nttgtagactgaagncattgcggnggaattcatttagaaaatgggatgcaggattcaaggaagaaattagaccagatgagaagtcaatttcaagaaatacaggatcaacttacagctactataagatgtactaaggagatggaaggcgacacacaaaagcttgaagtagaacatgtgatgatgagaaaaattattaaaaaacaggatgaccaaattgagcggcctgagaaaatcctgcagcattcaagtttgatgctgcaggtgtttgagagctagatgaagtaccttagcacatggttgctgaatacatgaacgaagagtgagaaaccagaagctctgatacttaactgccatgataatgaattcggtgtgcaactatgggcaaattatatttaataacggggtctggctctgtcacccaggctgcagtgcagtggcgagatcttggctcactg

SEQ ID NO: 2639 - DNA, 457 bp, Homo sapiens
  misc_feature (1)...(457): n = A,T,C or G
attgagcccctnttttgagactctagaccgngcgctggaattcgaagaggaagactgtcgagtttaaagaggacatccagaccctgtgttcaatctacaatgaggctgttaggnaacacccggagcatgtgggcccatcccccgtgcctgtcttgatcgtggagggcgccactcacactgccctttcctagaaagagaagcaaacgccatatgatggactgacgaccagccacattcttgaggccgaagagtggtaccgctccaagtttgcagacctgacagacgctgctgcccgcaacgcggagctgctccgccaggccaagcacgaagccaacgactaccggcgccagttgcagtccttgacctgcgacctggagtctctgcgcggcacgaacgagtccctggagaggcagatgcgcgagcaggaggagcggcacgtgcgggaggcggccagtta

SEQ ID NO: 2640 - DNA, 568 bp, Homo sapiens
  misc_feature (1)...(568): n = A,T,C or G
tcttagctagtttagttctgaacgagggcttatagggtgtatgtaatttgtcggacctgtcatacgatgataccaggacgatactctgaaggcacaccaagtttggaaaaccatttgtagtacatctatacangcggnggaattcccaaaatgccatccaaagagtcttggtcagggaggaaaactaataggtttgcagttctcaaatcaaaacaagagggccgtcagcaagatttattgatagcagccttgggaatgaaactgggttctccaaagtcgtctgtgacaatctggcaacctctgaaactctttgcttattcgcagttgacatcacttgttagaagagcaactctgaaagaaaacgagcaaattccaaaatatgaaaagattcacaatttcaaggtgcatacattcagagggccacactggtgtgaatactgtgccaactttatgtggggtctcattgctcagggagtgaaatgtgcagattgtggtttgaatgttcataagcagtgttccaagatggtcccaaatgactggaagccagacttgaagcatgtcaaaaagg

SEQ ID NO: 2641 - DNA, 457 bp, Homo sapiens
  misc_feature (1)...(457): n = A,T,C or G
natcgagacctctagtcgagngccgnggaattcatgaatcattctaatgactgggtaacaaatcactttgcaagtagggtgtttccacttctatgctttaaaaaaaactgaaggagaacataatcaagcagttggttgatatagaaaataatttttaatgtagaatcactgattttttggcacctatgagaaaggaattcaagtaatagagggatattgttataacaaacctccttttattcccatctacttatttatatgaacaaagtttctatgttaagataagttagagtgtgctgtggaaacaaaccctgtaatactagtggttaaaaacaaaactcagaagttaatttattgatcatgcgaagcctgctatggtcaggacacttgcctccaagcagtaactcacagatccaggctgtgtcctacctccagaacatggggcttccagtgctgn

SEQ ID NO: 2642 - DNA, 471 bp, Homo sapiens
  misc_feature (1)...(471): n = A,T,C or G
nngggaggcgggccggnnnnnnaattgaactgagtactatgggcangngcnggaattcgtggttcaagagcaacgatgaggaggcgttcacctttgcccgcatgctgatcgcgcaagaggggctgctgtgcggtggcagtgctggcagcacgttggcggtggccgtgaaggccgcgcaggagctgcaggagggccagcgctgcgtggtcattctgcccgactcagtgcggaactacatgaccaagttcctgagcgacaggtggatgctgcagaagggctttctgaaggaggaggacctcacggagaagaagccctggtggtggcacctccgtgttcaggagctgggcctgtcagccccgctgaccgtgctcccgaccatcacctgtgggcacaccatcgagatcctccgggagaagggcttcgaccacgcgcccgtggtggatgaggcggnggtaatcctgggaatggtga

SEQ ID NO: 2643 - DNA, 543 bp, Homo sapiens
  misc_feature (1)...(543): n = A,T,C or G
cgtggttatggggagtagggattggtagtgcaacatggattgaggactgatattgctcatacgagggggagagcgacaaacacatttgatgacattgngaatgcctcggaaanctcaagaccccctcatgcgactctgggctcccaccctctctctagtgttcccctctgtgatccaggatttgagtgtggtcggctctgccccaggctgtcactgcacttgttgcctgggctttgggaaggcggctgtgcaccccctactcctctgggagggtggctgtgtaccccctactcctttgggagggtggctgtgtactccctactcctttgggagggtggctgtgaaccccctactcctcctttgggagggtggctgtgcaccccctactcctcctttgggagcgcggctgtgtaccccctactctttctttgggaggggggctgtgcatcccctactcctttgggagggacgggtgtgcaccccctacttatccagcgccttcttgtgctctgggcccaggagactccagacccctgggaaagg

SEQ ID NO: 2644 - DNA, 458 bp, Homo sapiens
  misc_feature (1)...(458): n = A,T,C or G
ncttgaaactgatgaccatctagacagngcggtggaattcgagggagtcaaacaccacctgacacttctgctgaagttggaggacaaactgaaccgtcacctgagctgtgacctgatgccaaatgagaatatccccgagttggcggctgagctggtgcagctgggcttcattagtgaggctgaccagagccggttgacttctctgctagaagagaccttgaacaagttcaattttgccaggaacagtaccctcaactcagccgctgtcaccgtctcctcttagagctcactcgggccaggccctgatctgcgctgtggctgtccctggacgtgctgcagccctcctgtcccttccccccagtcagtattaccctgtgaagccccttccctcctttattattcaggagggctgggggggctccctggttctgagcatcatcctttcccctcccctctcn

SEQ ID NO: 2645 - DNA, 455 bp, Homo sapiens
  misc_feature (1)...(455): n = A,T,C or G
nttgagtttcgttgnccatgcggnggacttccctttctactctggtcagtaggaggcaaatgagagggctcagcaaaagccccacaagctcattcttctaaggcaggcgtgatcaaggctgcctgattgtcactgccaacttctgtgaccaaggtagacctcttctttctcctgcaggagactcgagtccgggcaggggagctggaccaggctctaggacggcccttcaccctaagcatcagtaaccagtatggggatgatgaggtgacacacacccttcagacagaaagtcgggaagcactgcagagctggatggaggctctgtggcagcttttctttgacatgagccaatggaagcagtgctgtgatgaaatcatgaaaattgaaactcctgctccccggaaaccaccccaagcactggcaaagcaggggtccttgtaccatgagatggctat

SEQ ID NO: 2646 - DNA, 449 bp, Homo sapiens
  misc_feature (1)...(449): n = A,T,C or G
nattgagctgcctgncgatcgngcnggacttcgtgatctctgaattaatccgcttttgtaatgtcagtctgtaccagttgagggattatttaataagtccagtatgagtggtttcggaattaccagtgtgtgtaacctcagcttataccagtcaagggactatttattaagtcagctatgtgtagccaatattgcagagttgaggaagaagtctttgtccttaagcaatctcttgaaaggactgagcaatttcgtgaatatcagtaacacaagggtaagaataggacataaactgaatgctgcgagaactccaagaaaatccaagttgatttggggttgggggaaattataaaagaccttgagggattttgcccacagcagggaatggagacactttccaggcagagggaagggtaggagtaaaggctttaaaagctggaaacattaga

SEQ ID NO: 2647 - DNA, 466 bp, Homo sapiens
  misc_feature (1)...(466): n = A,T,C or G
nggggggagggccgggnngnnaactgactgagtgcataggagnggcggaattcggaggaactggcactgggagcgtgaaaaccttgcccaggtggcagagccagctttggacgcaggtctgacttcctacctcactccccttgccttgacagacacagtaattcagagtcgaacttggaacagagtttattttccatcactgtaaaacattctcagtgaggttactggcattaaaaaggtgggagaaatggaagaaaatggggttgaagaaaaaaaaagcctttgctcttgacagctaggcagccacagcggaggccgccaggctgcgagggcagcgtatgggggcagagcccggttctggcggcacaggccccggagtggagggggcaggggagggtctctgtaggtgggagagggcctgggggctgggaggcagcctggccttgtgccctacaggagggacctn

SEQ ID NO: 2648 - DNA, 468 bp, Homo sapiens
  misc_feature (1)...(468): n = A,T,C or G
nnaggggccgggttgnnnnnnaaatcgatagcatcgcattgngcnggacnnaaaaaaaaagttttacatttaatttgatactcatgatcattcgatggggtgagtactattatttattcccgtttcacagataaggaaactgaggcttatgcaggttgggtggcatgcccagggccccgtacagtgggagctggagttcagttgtgtggttctagagcttgtgctcggcctantgacaggagctctggagtctgggagcacaaagaggggcacagggccaccaagtgggtcttggatctgccctccaggtgtgggcccatcgctggatggatctgtcagaacacggctttgggctggccctgctcaacgactgcaagtatggcgcgtcagtgcgaggcagcatcctcagcctctcgctcttgcgggcgcctaaagccccggacgctactgctgacacggngcgccacg

SEQ ID NO: 2649 - DNA, 467 bp, Homo sapiens
  misc_feature (1)...(467): n = A,T,C or G
nngggggcccgctgnnnnnnaactgactgcattcctcgngcnggacnnacaaaggctcggttccgtcgccttcagccctgcggtgggggcacggggcaagtgaggggactgcagatgcggcgttcggtgtgaggctgcgccctgggctcctgaaaatccagggctgcagtcatttgaaggcttgactggggctggaggattttcatccaagatggctcactcacccagctgttggcaggagacctcggttctttgacttctccgtaagactgttttctacctccattacgtcactcagactgcttggtacattaccaaagaccaaagaccaaagaccaaatccatgaccatttactcatctttcaagactcagaagtcagctgcggtaccaagccttttctgaccttcccagagataggatctcactctgtcacccaggctggagtgcagtggcatgatcaaactcg

SEQ ID NO: 2650 - DNA, 469 bp, Homo sapiens
  misc_feature (1)...(469): n = A,T,C or G
cggggggnccaattgagnccntnattgtagaccctagtccgngcggtggaattccaagctctagtcttagcattaagtgggaccctgtggtccctttccgaaatgagtctgcagtcaccggctataagatgctgtaccagaatgacttacacctgactcccacgctccacctcaccggcaagaactggatagaaatcccagtgcctgaagacattggccatgccctggtacaaattcggaccacagggcccggaggggatgggatccctgcagaagtccacatcgtgaggaatggaggcacaagcatgatggtggagaacatggcagtccgcccagcaccacaccctggcaccgtcatttcccactccgtggcgatgctgatcctcataggctccctggagctctgatcctggaacccctccctctgcgccgcagctggacgccacctccgacggacacagccagcccn

SEQ ID NO: 2651 - DNA, 179 bp, Homo sapiens
  misc_feature (1)...(179): n = A,T,C or G
tcagnttgggctactggtttacttaattaatcagccggcagctccgtcgatctattttcgtccctgtcctcttgacgagcccgggatggtttggagtagcatttaaaagaactagaaaagtggcccagaaacagcagcttaaagaattattacgatatactttgattttgtagttcctg

SEQ ID NO: 2652 - DNA, 458 bp, Homo sapiens
  misc_feature (1)...(458): n = A,T,C or G
tgagagaacacttgaagacgctggaattccacgtgcctggcagccaagcccatttgaaggaggtgtgggaggagctggatggactgtaccccaactggtttaaccccaagaccttcttcatactgcatgatatcaacagtgatggtgtcctggatgagcaggagctggaggcactcttcaccaaggagctggagaaagtgtacgacccaaagaatgaggaggacgacatgcgggagatggaggaggagcgactgcgcatgcgggagcatgtgatgaagaatgtgaggtgggggccaggcgggggagaggacgggcccccagctctgtcactcacccttatctggctccccaggtggacaccaaccaggaccgcctcgtgaccctggaggagttcctcgcatccactcaaaggaaggagtttggggacaccggggagggctgtgagacagtggagatcn

SEQ ID NO: 2653 - DNA, 495 bp, Homo sapiens
  misc_feature (1)...(495): n = A,T,C or G
agggtggcnnnggaatgagtccctagtccgnnggtactgagtccgtcatcagtgtcgtggaattctttgttttttagtagttgcattacttgtatgtcactataattggtttcctttgtaagcctgctgcattttactttatgcttgtataattcttttttgtacatagacagtttatcattgtataaatttataggttacaaagtgatgtcataaattgtgaatgcaatgtggaataattaaatcaagctaggtaacatatccaatacttgaaatacacttctgtgatgagaacatcaattttgaaacgtataacactctattattaagtatatgcaacacactgtataacgtaaatcaaaaaaagcataaaacatattcttcctgtctgagatttcgtaccttttgaccatcattaaattttttttttttttttttttttgaaacagctttattttgccccccaggatgaaaggttggggagaaaactaagct

SEQ ID NO: 2654 - DNA, 487 bp, Homo sapiens
  misc_feature (1)...(487): n = A,T,C or G
ggcggtnnnnnnnattgagaccatttccatgtccctctcactcctgactggcagtgactctaaaaaatgccccacccgtggggaggccttggaaagtagaagtggagatgcagtcactgatctcgggagaagctgaaaacacagtcatcagccctaggagaggggttttctgcacttccttggccatcgctggcctctggggtgtttcaagtttttctggaaaacaggatcattctgtggagtgagtctcaggaccttgacatgggaggaacaaaacttttcttgcttttttggtgcaccctgggctgaaataagaaaaccactaggggtgagtcttcaaagcaaagacaacccagggtctcacatcacccaggctggggtacagtggcaccatcagggttcactgcggcctcagcctccctgggctcgggtgatcctcctgcctcggcctcctgagtctctgggaccgcagatgcaccgccacgcc

SEQ ID NO: 2655 - DNA, 460 bp, Homo sapiens
  misc_feature (1)...(460): n = A,T,C or G
nttgancaatgatgaccattagtccangcggnggaattctaaaaggagaggagaaggtagaataaaataattcccagatataaaaaaatggaaataatttgttgctagcagatttgccttgcaagaaatactaaaggaaattcctcaggctgagagcaagtgacaccagagaataattcaaatccacatgaataaatcgagattgccagtaaaagtgattatttaggtaattataagagatagagcaattgcatattttttcttcttaactgtttagaaagtgattgcggaaaataatccatgtatcattgtattggtggacctatagcatataggagatatacctaatgttaaatgacgagttaatgggtgcagcacaccaacatggcgcatgtatacatatgtaactaacctgcacgttgtgcacatgtaccctaaaacttaaagtatattaaaaaaa

SEQ ID NO: 2656 - DNA, 465 bp, Homo sapiens
  misc_feature (1)...(465): n = A,T,C or G
tctgaaaaccgttgatnaacttaggccagngcggnggaattccagcccatcctctctaaccaaggcatcctcggagatgagtgagtgattttggtctcatgagcgtgtctgctggcccggcccgcacggaagaggggagggtgtgccgtcccgagtggagccgaggctcgggacacgcaggaaaggacgccgcctgcccgggctcctggagacgcagaacttggtgtgaggtcttgggaaaacagttcaacccgatgttttaagagccagaaaaacattcccaccccttgacctggtaaccccactggtggggattttctcttagagggataagataccgggaaggggaggtgaaatgctcaccactgccaaaacacgggctgcaactgcaacatcggaggatgagagggagagtcggctgtggtgcagaatgctcagcagccctcccagcagggacaggaagag

SEQ ID NO: 2657 - DNA, 450 bp, Homo sapiens
attggaccctgatgaaggccgtaaaacccgccatatagcgcccatcctcttagtcaccgtcaggactacaactcccacaatactcggcggcagaactacagtccccagctgctccggggctgcgccacgtcgactccgctgggtggggccggcgtcgggcggggccggcggggtcttcagggtaccgggctggttacagcagctctacccctcacgacgcaaacatggcagcgcagaaggaccagcagaaagatgccgaggcggaagggctgagcggcacgaccctgctgccgaagctgattccctccggtgcaggccgggagtggctggagcggcgccgcgcgaccatccggccctggagcaccttcgtggaccagcagcgcttctcacggccccgcaacctgggagagctgtgccagcgcctcgtacgcaacgtggagtactaccaga

SEQ ID NO: 2658 - DNA, 458 bp, Homo sapiens
  misc_feature (1)...(458): n = A,T,C or G
nctgagacctaaggccatgcggnggaactcccgaaatggggccagggatgctccccctcccccaccaccataccgaatgcatgggtcagaacccccgagccgaggaaagcccccacctccaccctcaaggacgccagctgggccaccccctcctcctccaccgcccctgaggaatggccacagagattctatcaccactgtccggtctttcttggatgattttgagtcaaagtattccttccatccagtagaagactttcctgctccagaagaatataaacactttcagaggatatatcccagcaaaacaaaccgagctgcccgtggagccccacctctgccacccattctcaggtgaagcctggcttggtcccgttcctcaagaaaaggatggaccttctcttcttctcagatggtcccttccattcccctgaaacctgcatgagagctcctaacan

SEQ ID NO: 2659 - DNA, 461 bp, Homo sapiens
  misc_feature (1)...(461): n = A,T,C or G
nttgancaaggatgacccttagtccatgcggtggaattccgtggaccctgccacatatggacagttctatggaggcgacagctacatcattctgtacaactaccgccatggtggccgccaggggcagataatctataactggcagggtgcccagtctacccaggatgaggtcgctgcatctgccatcctgactgctcagctggatgaggagctgggaggtacccctgtccagagccgtgtggtccaaggcaaggagcccgcccacctcatgagcctgtttggtgggaagcccatgatcatctacaagggcggcacctcccgcgagggcgggcagacagcccctgccagcacccgcctcttccaggtccgcgccaacagcgctggagccacccgggctgttgaggtattgcctaaggctggtgcactgaactccaacgatgcctttgttctgaaaaccccct

SEQ ID NO: 2660 - DNA, 470 bp, Homo sapiens
  misc_feature (1)...(470): n = A,T,C or G
gggcggccccaattgagaccatctattgagactctaggacangcggnggaattcccaggccaaagcaagtaagcggttagcactcccccaatcccagagtttacaatagagacacaggctgggttggactgcccctcagtcaggcccccttacccacccaccagccccaaggcccgacccctcccccaaaggggcagaccccttcttgcaggtctcagcttgcggggtggggggagtcatgcccaggggaggagactatttatctggaggggagagaaggattctaggggtgtggagttggagaaagaggcttccttgagccacccttcccaccccagcccttgctggtccctaggccaagccaccaagggaaaccttccaggatactagcccgccagctgtgggccccagaaagccagcctgccttttagcacttggatacacacagacccacggagctctctgtgatt

SEQ ID NO: 2661 - DNA, 451 bp, Homo sapiens
  misc_feature (1)...(451): n = A,T,C or G
caagagaccctgatgatgccgtaagaccncngcanngngcgncagcagcaatgtttatggtgaacaatggcaacgggaccgctttcataatggttatcttctctgctgccttctcagggaactacgacaccaagagtggccctaagaacatgacctttgacctgccatcagatgccacagtggtgctcaaccgcagcttctgattgaaagagaacacttctgaccccagtctcgtgattgcttttggaagaggacatacactcactctcaatttcacgagaaatgcaacacgttacagcgtccagctcatgagttttgtttataacttgtcagacacacaccttttccccaatgcgagctccaaagaaatcaagactgtggaatctataactgacatcagggcagatatagataaaaaatacagatgtgttagtggcacccaggtccacat

SEQ ID NO: 2662 - DNA, 510 bp, Homo sapiens
  misc_feature (1)...(510): n = A,T,C or G
tgcgcntnccgccgaatgaacccctcgcanactgagaccatagtccagtgtcgtggaattccacagagatgaggttctcaaaatgcaaagcagaaggtccagccaagagtcggtgcccaaggcaacaaagacaggaggagactcgtaggaggagggggtggtgttggggagctggagatggagggcgaggctggagggcagtccttcaaatgcagagaagcccccgggccccactggcagatgggagcagttaggggtaaatgcctggtgccagtgtccttatagccactgcccatttgttcccagctcggccatcctgatttacctgagctgtaagtaccagacgccggaccactggtatccatctgacctgcaggctcgtgcccgtgttcatgagtacctgggctggcatgccgactgcatccgtggcacctttggtatacccctgtgggtccagatgttggggccactcattgnggtccaggtgcccaaggagaaggtggaacgcac

SEQ ID NO: 2663 - DNA, 485 bp, Homo sapiens
  misc_feature (1)...(485): n = A,T,C or G
agagggccggnnttcntnancctgcnatcttcgtancncactgatactttcgaangcncaagnaacaggggcgaatccgaggtggagaccatgtgaccacgtgtggcactgccatatgtcacagcagatcgtgtgaatgtgtgtcaccagaggcatgtggggcgatggtgaaacaaacggtgttgtccaggcatgtgccgttggaagggggtacgagtgacctttccatcaatgccaaggaaaatcaaagaacacctgcaacccggggggctggtggggcctgtgcctgacccaagccacgttttcaaatgcctgcaagaggagcaaagaggtttctgcaaaattcgtcccacccctatcctccaccggcctggtcgccctgacgcaacttcccctgcacccagccccaaccccagcctcagccccagtcaagtccctttggttccctgacattggtttcagccagaagttcaagggagtcaatn

SEQ ID NO: 2664 - DNA, 426 bp, Homo sapiens
attgacgcccttatggacggcccataaacagcgtggtggaattcgaggaattaagaggaggcagctgagagcgaggaggatgacaacctgtcgtccatgctgcaccagcgtgctgagatcccatggcgagcctgcgccaagtacctgtcctccgccggcatcctgctcctgtcgttgctggtcttctcacagctgctcaagcacatggtcctggtggccatcgactactggctggccaagtggaccgacagcgccctgaccctgacccctgcagccaggaactgctccctcagccaggagtgcaccctcgaccagactgtctatgccatggtgttcacggtgctctgcagcctgggcattgtgctgtgcctcgtcacgtctgtcactgtggagtggacagggctgaaggtggccaagagactgcac

SEQ ID NO: 2665 - DNA, 486 bp, Homo sapiens
  misc_feature (1)...(486): n = A,T,C or G
nggggnnnnggaactgttccctanccangngactgagaccgttctcatgtctgcggaggactttggtatagaatctgcacagagcctttgctggcaacccatccagcagaacccacacccaccagagaccctagaggcctcttgccatcagcaaccagaaataagcctgctcccccgagacgcatggctcagcttcacaggccagacttgctgtgagtgagatgcccacactgcatagatgcaggaccctcccttgcaaaaggaaccagctgccatgttgctgaaagtgggcccacacacaaccctcatttctcacgagagctaacagatgaaagctcagctatgcagtgttaaaattcatctctttctctgtgggtgttaaaaaaatgcgtttctaatcttacacttcacgtggcctacaacacaaagttctttctccacatttttaccctcttctcacatgaatgttttccaagggaaggaagg

SEQ ID NO: 2666 - DNA, 487 bp, Homo sapiens
  misc_feature (1)...(487): n = A,T,C or G
cattgattccccctcnnnannnncnnnactgatntccctantcagtgtggnggaattccatcctgtgggagtgcctcgtgggctgccccagagttcaccccacactcagcagcaccaatggtgaagatgacaagatcgaagactttccaggcatatctgccctcctgccaccggacctacagctgcattcactgcagagctcacttggccaatcatgatgaactaatttccaagtcattccaaggaagtcaaggacgagcatacctctttaactcagtagttaatgtgggctgtgggcctgcagaagagcgagtgttgctaacaggactgcatgcagtcgcagacatttactgtgaaaactgcaaaaccactctgggctggaaatacgaacatgcttttgaaagcagccagaaatataaagaaggcaaatacatcattgaactagcacacatgatcaaggacaatggctgggactgattggacagca

SEQ ID NO: 2667 - DNA, 494 bp, Homo sapiens
  misc_feature (1)...(494): n = A,T,C or G
agggggggnnnggactgagtccctaggcagngngattgaaatccctagtccgtgtggtggaattccagggcttcagtgagccgggattgccccactgcactccagcctgggtgacagagtgagaccctgcctcaaaaaaaagatagaagtttgaattgaaaagctgccttctaaatagcttgaaaggaattaattgcttgaagcagagaggaaacatggtcatgagaaagctttatgatgggtgattcttgtgttccagctatgcctatgatgatcattttctaagacctttctttcctatccatctaatcttagatattactgccttctcccaagataccatcatttcaaatttgttatttcaagatgcatgttctgtccctaagaaagcagcaaatcttggccaggcacagtggctcgcgcctgtaatcccggtactttgggaggccgaggtgggcagattacttgaggtcaggagttcgagaccagcctgg

SEQ ID NO: 2668 - DNA, 463 bp, Homo sapiens
  misc_feature (1)...(463): n = A,T,C or G
ggaagtcnnaggggnnnnnntttgatgntcctctgntcagtgtggtggaattcgtaagaacctgatcaccgtgtgcaggttctctgtgaaaacgctgctggagaagtacacagcggagcccatcgatgactcatcggaggagtttgtcaattttgcagccattttagagcagatcctcagccaccgcttcaaagcctgtgccccagcaggtccagtgagctggttcagctcagacgggcagcggggcttttgggactatatccggctggcctgcagcaaagtgcccaacaactgtgtgagcagcatcgagaacatggagaacatcagcacagcccgggccaagggccgggcatggatccgggtggcactgatggagaagcgcatgtcagaatacatcaccacggctctgcgtgacacccggaccaccagacggttctatgactctggagccatcatgctgcgg

SEQ ID NO: 2669 - DNA, 474 bp, Homo sapiens
  misc_feature (1)...(474): n = A,T,C or G
nctgattacctttcagnggcgggctggattcgctctagactccccagnactaggattacaggcgcaccaccaccacgcccagctaatttttatatttttagtagacacggggtttcaccatgttggccaggctggtctcgaactcctgacctcaggtgatcctcccaccttgggccccaggtgctgggattacaggcctgagccaccgtgtccagcctggttcagttctttttgaacacttggggtgcatagcatgctctggtggttcttccataagagggtgaagtctccaaatcaaacccccaaagatctggaaaccgtgcaacagcggacccagctccctctcttttgtagcagntgtagagcatgtctgtcctatgtgtctggatgttcgagctctccttttagctcgttcatttcccagtgaggaagctgaggcccgaaggtgggaagttctgcttgctggaggctccc

SEQ ID NO: 2670 - DNA, 448 bp, Homo sapiens
  misc_feature (1)...(448): n = A,T,C or G
aggnagccnnntttgatgacctctggacagcntgnggaannccagggacagtcttgccagacgactctgaggagggcaagggacagttccatggtccttcccggactgcactatgctgggagctctgttgtgtggaggggtggtcagaggtctgtgaagagcgggcaggaggcatgagcaggcgaggagctggcctgtcccgggaagcagcccagcctgtggctgcccccgacaccaggaggagggccaggagagttccagggggctgaggcacacagagaggccaacttcctccctgcccagccttccttgtatctctccagactcggacaatcaaagggagagagggtgtatcgggtcctgttccagccggcatcgccgggtggcttccaggcctcagagctgtgtggcagggccccctgctggggctggacatcactgcagtccn

SEQ ID NO: 2671 - DNA, 498 bp, Homo sapiens
  misc_feature (1)...(498): n = A,T,C or G
cgagcctcgcncattgataccctatgttagagngcnggaattccaggaggctgccaagctgtaccacaccaactatgtgcggaactcgcgggccatcggcgtgctgtgggccatcttcaccatctgctttgccatcgtcaacgtggtgtgcttcatccagccctactggataggcgacggcgtggacaccccgcaagccggctatttcgggctcttccactactgcatcggcaacggcttctcccgggagctgacctgcaggggcagcttcacggacttctccacgctgccctcgggcgccttcaaagccgcctccttctttatcggcctctccatgatgctcatcattgcctgcatcatttgctttaccctcttcttcttctgcaacacggccactgtgtacaagatatgtgcctggatgcagctcacctccgctgcctgccttgtgcttggctggatgattntccctgatggctgcgactcagatgaagtaaaccg

SEQ ID NO: 2672 - DNA, 450 bp, Homo sapiens
  misc_feature (1)...(450): n = A,T,C or G
ggacctcnnnntttgaagacctctttgacgtctggtggaattcgtctctccagagagtgtaatcggcagcagaaggtcatccccgtggtgaacagcttctatgccgccacattcctccacctcgcacatgtctggaggacacagcggaagaccatctcagactcgggctttgtcctcaaagagttggaagtattggccaagaagagcccacggcggctgctcaagaccctggagctgtacttggccagggtgtcaaagggacaggcctccttgttgggagcacagaagtgctatgggccagaagcccctcccttcaaggatctcaccttcacaggtgagagtgacctgcagtctcactcatccgaaggcgtatggctgatctgacctccgagatgaatggaggcttaaaggctgagctgcaggggctttcagggggtcagtggagccatg

SEQ ID NO: 2673 - DNA, 504 bp, Homo sapiens
  misc_feature (1)...(504): n = A,T,C or G
aggggnacgggtttcgagacccctaactcgatgtgccgtagaccacngtgcgaggtaagcgcactcgaacatcttctttagaactactagagaactatatacagactgcttggatggggcagctgaggggaaacacttgatggacagtctctaagagctgtcaatttaatgtattttgttgctattaacagtcaaatagaacaacataattgttcctttactgatcctctaaccacatacattttatatacttattattaacccaaacacacatttctctattccaacactgtagatttctcttccaaacaataatacccagagaatcctgtacaaatgtagctttttgagattaggccaatgaaagtcaatgacatgatctctaaggccctttttaactctaaaactctttgattnttaaggatgtttacatatgtatatcttgagcacttcatttctttcttagaagattggaatttcacattcttacttagaagttctact

SEQ ID NO: 2674 - DNA, 444 bp, Homo sapiens
  misc_feature (1)...(444): n = A,T,C or G
aggagtgccgttgaagacaccccacttggcgnggaannncncaagaaggnnggcnnggccaggcaggatgggctgtgtccggccctgcattctagtggaatttgctgagggggccctgaggcaggaccgcccgcctgacccctggtaggagggtcacatccacttggtggccaggtggcccttggtgacccacttcttcctggagcgtccctgcctagagctcagcccacaggactgcttcaggccgtggccacaggtagcagccgcaaggggaaatgaagaaaactgagccctcgtggccacctgtgtcacccttgtgccttagcctcatgggctgcctaggagctgcctgcacggcacagctcgctttcacagtcagaagtgggtctgtgggatctgtggtccctgtcctccctgctgtcccttctggggaggctttggtgg

SEQ ID NO: 2675 - DNA, 458 bp, Homo sapiens
  misc_feature (1)...(458): n = A,T,C or G
gcntgntnnaaggagnnnngtttgggacccaaatgagagctccgtaannccggagaagcacgagncacagagagagtactccaaaggtttcggcggcaaatactgtatcgacatggacaaagtggataagagcgccgatggctttgagtatcaaggcaaaacggaggagcacgagtcccagaaagactatgtgaaagggtttggaggaaaatttggtgtgcagacagacagacaagacaaatgtgcccttggctgggatcaccacgagaaattgcagctgcatgaatcccaaaaagattataaaactggttttggaggcaaattcggtgttcagtcggagaggcaggactccgctgctgtggggtttgattacaaggagaagctggccaagcacgagtcccagcaagactactccaaaggattcggcgggaagtatggggtgcagaaggatcggatgg

SEQ ID NO: 2676 - DNA, 456 bp, Homo sapiens
  misc_feature (1)...(456): n = A,T,C or G
tggaggctccnnttttgaanacccttttgatgacccctagacagngtggtggaattcctccagggacaggtactccacccagctcttcttgtcctggtagttcttggactcatccacgatcttctgaaacatcgctctcttcctgaacccagggaacaagggaggtgcagtgctcacacacccagtgctcacccgctgcatcagaaccctgctccgcaggatacggccctgccgtcctgcggacgctgcgtccccagcgcccacagcagaaaccgagggttgttggtgccgcggtggtcgatgtcatggcacaggccggctgtcaccatggcgaaggcctccagccacgtaccatgagcagcgtgaacatcgtctgggccacgttgaagccgtggcgccagttgtggtaggtgattctccggtaccctttgctgatggagaacaggaaccgcacca

SEQ ID NO: 2677 - DNA, 422 bp, Homo sapiens
  misc_feature (1)...(422): n = A,T,C or G
cgtcctcctctaccttggaagcagttagaatctaccaggcacagatgaggccgcccttgcctgacggagcttgatgagcagcccttggtctccggttccaggactgagagcccagctgcctctgcccacccttccccaggcctctgccagcctctggctgcacggtcaggccctgccccatggcaggcctgccagagcttggctggggacccctcccgcctctggctccctgatgggctggatgtaacttgtgtcttctagccgcttaaggagcccaggtgttttaaggaatgaattggtcactgcatcttgtatcgattatggttctgagaaaagcaaatatcacttttggctgcattaaaagaagcatcatatattnnatanaaaaaacacaaaaaaaaaaaaaaaaaaaaagggggcgg

SEQ ID NO: 2678 - DNA, 485 bp, Homo sapiens
  misc_feature (1)...(485): n = A,T,C or G
gcccacgcttgagaccctnatagaggacattagnccgngcggaggaattctttctctcacatggcacctctggtccatcaacagtccctgtggttttattttcacagcacgtctcaccacttccctcccctccctgactacctggcggcttcaggccaccagtgtctctcacaggagtctcccaagtggtcccctccttcaccagcccccaacagtctctcgtgagcacagcagccgtgtaatcgccttcagtaatcgccttcagcccgtgtgaggcctcctgctgctctgcgcagagctctgcagggggcgccagggcctctgtgccagccctgccacctctggctccctgctcactgctccccctgcctactgtggcttccagctgctgcctggatgcgcctgtgccctcctgccccggctgtttcacccttgtctcctaaggccttgctcagatgttacctcctcagtgcggccttccctga

SEQ ID NO: 2679 - DNA, 482 bp, Homo sapiens
  misc_feature (1)...(482): n = A,T,C or G
gggggatcgaganccnttnnnannatcgtagaccatagtccgtgtggtggaattcgaatgagtaaggacagagtgcagcctgggtctcagacggggggtgggggacaggccacagagattccctatctcagcagagaggagacaggctcaggctgccacgccttgccaaaacccagcctggccaggccagcccggcaccttccacctagataagttgtgctgctccagagaaagagcctggggtcagagtggacctgcgatgcatggcacaacctgctggacagtggcgatgaggggttcagggacctgggcacccagaagcgggcacctgatattgtacccagcaaaactgctcctaataatgtcattttttctctctcttacaggcctcaggcccaggcccaaggccaagtgagagagcccaggccacaggacatgctgccattctgccaagagaggctcttctgggggccaggctggga

SEQ ID NO: 2680 - DNA, 466 bp, Homo sapiens
  misc_feature (1)...(466): n = A,T,C or G
nctctgaganccctagtccatgtggtggaattcgatttcaatcatctctcgttgcagcttcaaactcctgagctcaggcgatcttcctagcagctgggactacaggcacgaacccctcttccacttttaaggaccttgtgattacattcaacccaccaaggatattctatcttaaggttagctgattagaaaactcaattctgcaacctttattctttgctatgtaatgtaacgcattcacaagttctgggaatgagaacatggacatcttcaggaagccatcaatctgcctataataatgggtatatattttatatatgtcatttacataacagttccccttatctgcaggagatacatcccaagacccctagtggatgcctgaagctgcagatagtaccaaaccccctacatatactatgtattctcccatacaatcacattgtatagggcaggcagtgtatan

SEQ ID NO: 2681 - DNA, 461 bp, Homo sapiens
  misc_feature (1)...(461): n = A,T,C or G
tggaccannnnnntttgtgtcatgataacntaggccanngncgnggaattccccggctgcagcggcctgggtccggacggtgttcgcggctttggcgacggcggttgatttccttcgtgggcccctgaggacgcctgggtgggcactcaccctaagtatctagaaatgatggaattagatataggagatgccacccacgtttatgtagcgttcttggtttacctggacctcatggaaagcaaaagctggcatgaagtaaactgtgtaggattaccagaactccagctcatctgccttgttggtactgagatagaaggggaggggttacagactgtggtgcctacccccatcactgctttccttcagccataacaggataagggagatcttgaaggcatctcgaaagttgcaaggtgatccagatttgccgatgtcttttactttggccatagtggagtctg

SEQ ID NO: 2682 - DNA, 459 bp, Homo sapiens
  misc_feature (1)...(459): n = A,T,C or G
ttgttgaaccccaaattgagaccctaggacagngcggtggaattcgatggagccccagctggagcctgaggctgccgccctacgccctggatgactggcccttgtgctgtggatctcacacctgagcggtgcttgctccttgccagcgtcttcccttactttgctggggccccaagtcacagccagttactattatggagggactatcctcgggcatgataaaagcaaggcctgcatcatgacatctatttgcaagaagttctttaaagaagaaataaggactgtcaccagggccagagagaactaaagttcctgtgtatgctgagataacaccagtgaaaaagcctggcatggagcccagcactgagaacttccagaaagtgttagccttctcccaactgtgttataccaaccacattttcaaatagtaatcattaaagaggcttctgcatcacaccn

SEQ ID NO: 2683 - DNA, 455 bp, Homo sapiens
  misc_feature (1)...(455): n = A,T,C or G
tgcggcannnnnnntttggctgcattacataggccgngcggggaattccaggtggttctgtggccttttccctctttgctggcacgttctgcttctcaccctctgttgactctgtgagctgggaaatgagggactggaagtgaggcctgtgttgacccttcctgaaaatcctctagcagcccccgacttcagcagtttctttctttgtttttttgagatggagatgatctcagatgagatccacgagcggcggcgctccagtgccatggggcctcggggatgcggtgttggtgctgagggcagcagcacatctgtggaggatctgccagggagcaaacctgagcctgatgccatttctgtggcctcggaggcctttgaagatgacagctgtagcaactttgtgtctgaagatgactcggaaacccagtccgtgtccagctttagttcaggaccaa

SEQ ID NO: 2684 - DNA, 484 bp, Homo sapiens
  misc_feature (1)...(484): n = A,T,C or G
gatggtccngnnataganncccttcgagatccctagtcagtgtggtggaattccactgagggagacagagcaggtcagaaccaagcctggcagcccccagggctgtgccccatggacgcaggtgtgtctgcagagcagggtcctcccctgccagtgccagccctcaggtgtctcgggtgctgcgttactcttgtgagcttccacgctgacacctgtggccacaatgttggtgtctgctggacctctggccctgttctaggtgcaggacatgtggccacagcaggcctggcccctgccccagggagtggacattccctgagcctgccccccacccccactgagaacttagtggctatgagagaacaggaaagcaggaagctagacagggcacagacccccgacggtggagaccctgacccggagcacgtgggtgtcagttttggggaagccagacagggagggtgctaacaggagggccagtgag

SEQ ID NO: 2685 - DNA, 459 bp, Homo sapiens
  misc_feature (1)...(459): n = A,T,C or G
cactgaccccatcantgagcccactaggacagngcggnggaattcccgtttgggaagatgcgagggagccacttgcgcctgttgccctatttggtggccgccttccccgtgaactatggccggccctacagactttcctgcgtggaagcgtttgctgccaccttctgcatcgtaggctttccagaccttgctgtcattttgctgcggaagtttaaatggggcaagggcttcttggacctgaaccgccagctcctggacaagtacgcggcctgcggcagcccggaggaggtgctgcaggcggagcaggagttcttggccaatgccaaggagagcccccaggaggaggagatcgatcccttcgatgtggattcagggagagagtttggaaaccccaacaggcctgtggccagcacccggctgccctcggacactgatgacagtgatgcgtctgaggacccc

SEQ ID NO: 2686 - DNA, 496 bp, Homo sapiens
  misc_feature (1)...(496): n = A,T,C or G
gagcgccnnnnnaatcgagncctgaattaccgtgtcgagagtcgaaacagtggacagtagccacttctggctctagcacttctcttttgttaagatagggtttggatttattatgaagctttggctaaaacccttgggtttgcgttagaacactgacactaataacctggaatgacatggggaggacaaagagagctcaagaggaatgctttgtgagaagtggattctctacgtgtccctgccccccacccaaacttgaactatacctattacatttccaggcagtatccctaagatgagatcctggagaaaggactaggggaagtatctttctggatgcttgtggtcccagaagggtactttctgtgtcataccatgccacttctttaagctcttcagggcagccaaagccagcccttttctcctactgcccccaggagaaatagcactcttattccttcccccagatggcagggctatggcctgcctacacctg

SEQ ID NO: 2687 - DNA, 500 bp, Homo sapiens
  misc_feature (1)...(500): n = A,T,C or G
agtggccngnnnnagnncncccaactgatgactnttcgtagaagcccntgaanacccccgangcagngcagaagatgaaagccaaggaggagaggcgagtgacagaactgaagagccagatgaagtcagagctggcagcggtggcctcggagtttgggcgactgacacggtttctggctgaagagcaggcagggctggaacggcgtctcagagagatgcatgaagcccagctggggcgtgcgggagccgcggctagtcgccttgcagaacaggccgcccagctcagccgcctgctggcagaggcccaggagcggagccagcaggggggtctccggctgctccaggacatcaaggagactttcaataggtgtgaagaggtacagctgcagcccccagaggtctggtcccctgacccgtgccaaccccatagccatgacttcctgacagatgccatcgtgaggaaaatgagccggatgttctgtcaggctgcgagagtggan

SEQ ID NO: 2688 - DNA, 460 bp, Homo sapiens
  misc_feature (1)...(460): n = A,T,C or G
agagagacannnnnntttgaactgcatacntaggccangncgnggaattcgagtctgtgctccatcagctgccgcacccgccgcctcccgcccccaaaccccattccctttgttgagccacgatgagcggcagagtcggcgatctgagccccaggcagaaggaggcattggccaagccagaagcttcgacctgcagaagtcggaggccatgctccggaagcatgtggagttccgaaagcaaaaggacattgacaacatcattagctggcagcctccagagcctccaaacaggacctgctgaggaccaagatgcgggagtgtgagctgcttctgcaagagtgtgcccaccagaccacaaaggtggggaaggaggggggagaccatcaccataatttatgactgcgaggggcttggcctcaagcatctctggaagcctgctgtggaggcctatggagagttn

SEQ ID NO: 2689 - DNA, 467 bp, Homo sapiens
  misc_feature (1)...(467): n = A,T,C or G
agggccggttgaaacctaatcgagancntaggaagngcggggaattcgagccttggacccctcatggggccggcctgtggccagcaggggcttccgtcccagtcatgaggagcctggggcctcttgggcttggttcttcaacccactgaagagctgagagccatgtcactggaccccacttgaggccttagtttcttccttcccctcctgcatggccttccccaggtttccccttcttacttatgagacagtgggtctgggcctcacaataggggatgctcaggcttaggtgcctccccgtcccccagacagtccctcagccccagtgaacgtcaccgtcaggcacctcaaggccaactctgcagtggtgagctgggatgttctggaggatgaggttgtcatcggatttgccatctcccagcagaagaaggatgtgcggatgctgcgcttcatccaggaggtgaaca

SEQ ID NO: 2690 - DNA, 464 bp, Homo sapiens
  misc_feature (1)...(464): n = A,T,C or G
agtagatgaaccctttgatagcccctcggaaanccccagggncacactcagtagggagatgaaggtggaaacatccttgctgtggctttctggcctcagatcaggttttagaggaaggggccacaggctgcctagtgcatcctggctgtgggcagcccctttcctggagccctcctgcctaccccgtacctcccatctggctgcacagctccatccttagccacgcaaggggagaacatgggcagagtctccatccagcagctgggggttctggtggcactccctgtgcccctgctgctgctgggctgtgggtctgccctgcacccaggagccccacggtccatcccccacaccatgcccagcaccagggaggttgggcagacaagacctgggccatgccagccctctgtgcctcggttttcccactggttacacaggatggtcgcattttccctgcctacctc

SEQ ID NO: 2691 - DNA, 459 bp, Homo sapiens
  misc_feature (1)...(459): n = A,T,C or G
agcgcccttagagacccaaaagaggccatagaaacacgagnctactctgcactacgctggagtgcctggtgtgatctcagatcactgttacctccaccttccaagttcagttcactgctctatccccagggcgtaccatctggcactggctcccaaatatggagttgcttacataattaatgattcctctactatgacccaggctgttccctgttgtattttgtacaaatgaaacagctgacaaagtgagacactgagagactctaacgcccaaatgggagtggcacaaggcgatcgtgggtgagagcaggcatgtttccacacactccagggagaaggctagggcctggggtccccttaatctggtcaggtctccgccagctgaaggagaccaagatgctggcagagatgatgaggtcacaaccaagtctgggccctcagcatgcctgagtcctgccn

SEQ ID NO: 2692 - DNA, 273 bp, Homo sapiens
taaagaatgagatgccccgcctgagatagattaggcatcattctattgtggccctggaagacatttatgaaagcccaaatcacctgtacttggtcatgcagctggtgtccggtggagagctgtttgaccggatagtggagaaggggttttatacagagaaggatgccagcactctgatccgccaagtcttggacgccgtgtactatctccacagaatgggcatcgtccacagagacctcaaggtgaggccatcgctcagcagcatcctgcagc

SEQ ID NO: 2693 - DNA, 483 bp, Homo sapiens
  misc_feature (1)...(483): n = A,T,C or G
ggggtnnntttgagactctagtncctgtggtggaattccccggctcgacggactcctgggtggcgccctggcgaacttgtttgtgatagttgggtttgcagcctttgcttacacggtcaagtacgtgctgaggagcatcgcgcaggagtgaggcccaggcgccgagacccaaggcgccactgagggcaccgcgcaccagagcgtgacctcggcaggctggacacactgcccagcacaggcagacccaccaggctcctaggtttagcttttaaaaacctgaaaggggaagcaaaaaccaaaatgtgtgactgggctttggaggagactggagcctcagccctgtcctggccacgggccgctggggctggtgtgggtgggccttgtgtgctggatttgtagcttatcttccgtgttgtctttggacctgttttagtaaacccggttttcattttaaaaaaaaaaaaaaaaaaaagcggccgctcg

SEQ ID NO: 2694 - DNA, 467 bp, Homo sapiens
  misc_feature (1)...(467): n = A,T,C or G
agagccgtttgagnccctcaggagactctttcgaangccgggaanttcccgtctgcttggcgcgggacccggttcactttgggctcccggagttttcctccacttatcacacctctggacctgacaggagacgcctggtgggctctgacgcggcgccccagcccggctgtgtccccggcgccccggaccaccctccctgccggctttgggtgcgttgtggggtcccgaggattctcgagatttgttgaaagacattcaagattacgaagtttagaagaccaaaatggatatcctaggtgctgtggatgctgctgtccccaccaatattattgctgccagggctgcacaagttcgggcaaacaaagtcaactggcaatcctatcttcagggacagatgatttctgctgaagattgtgagtctattcagaggtttgaaatgaagcgaagccctgaagagaagcaagaga

SEQ ID NO: 2695 - DNA, 463 bp, Homo sapiens
  misc_feature (1)...(463): n = A,T,C or G
actggagaacactttgaagagcgtcggaattccgcagnccgggactggggctgggcgcgctgcccgggagccccgcacccacgcctggttcgcggagactcccaggccgaggaacccccagcccagggactagacaccaccagggccgggcggagccagagccagacgcgccggagcgggcgcctctacgcctatcccaacagacttttcatgtagcacctgctctgcctgtgccgtgctaagaggctctttccactgaatctgttggatggtcattgaagtacgatgccataacaaggtgctgagggccgagccagatcatgacaagatgtttaagatgagtgaaaagatattactcctgtgtgttggagaggctggagacactgtacagtttgcagaatatattcagaaaaacgtgcaactttataagatgcgaaatggatatgaattgtctcccacggcg

SEQ ID NO: 2696 - DNA, 469 bp, Homo sapiens
  misc_feature (1)...(469): n = A,T,C or G
agaggcccactggnccntatagagaccctaggccagngcggnggaattccaacgtctccttggtgcgggacccgcttcactttcggctcccggagtctccctccactgctcagacctctggacctgacaggagacgcctacttggctctgacgcggcgccccagcccggctgtgtccccggcgccccggaccaccctccctgccggctttgggtgcgttgtggggtcccgaggattcgcgagatttgttgaaagacattcaagattacgaagtttagatgaccaaaatggatatccgaggtgctgtggatgctgctgtccccaccaatattattgctgccaaggctgcagaagttcgtgcaaacaaagtcaactggcaatcctatcttcagggacagatgatttctgctgaagattgtgagtttattcagaggtttgaaatgaaacgaagccctgaagagaagcaagag

SEQ ID NO: 2697 - DNA, 465 bp, Homo sapiens
  misc_feature (1)...(465): n = A,T,C or G
aattgaccacacgtgatnaacntacgacanagcggcggaatncgtgagccttacaagctatctctgcccacatggtcagggtgggcccttttcgggctttttgtgttcttggatgatttatttgcttgactctgcagggctcttgagaatcttgcagttggttttcggtcacagttgctttgcaaaaactgaactgctgaacagagtggcctgactctctttaccctgtctccctctccccagcctggaatgggcctggctgcccacggcacacgtggcaagggcccctccttgtgccttggggctcctgagcagctttcctaggaggaagaacctcgaccccccagctatatctttatgggatcctggcctggactgaggacaaagccaggggccacggggtaccccaagctgcccattttcctgggaagggcacagtggccctgaccggagctgtcattatcg

SEQ ID NO: 2698 - DNA, 484 bp, Homo sapiens
  misc_feature (1)...(484): n = A,T,C or G
tgatgtaaaggggaggnnnggaattgaagaccaatcgacagcgctgnggaanncctcgagttgggagactggccccacaaagcagcactggggcaggggaagccctcagggtcttcctcacttgcaggaaggctcatgcagatatggctcccgcctcagccacatgtaagtggatttgggttctcctgagacccagtagctagaagtagggcattgcctctagtggtgaatttggcaagccagattttcttcctgtagccagtggctggaggctcccacaccctccaaagccccaggcagggacaagcacagagatggtagcaatgaatatatgaggtggtgatttgaatgtgggagctgtggaaggaagagatgccaagagggtgaagggaagcccacacttaacagagatgcttttgaaagaaacaaactcagccagggccagaacaagtcccctactccatctgccagactgagagacagg

SEQ ID NO: 2699 - DNA, 486 bp, Homo sapiens
  misc_feature (1)...(486): n = A,T,C or G
tgaatgtttagagggggnnngggattgaaaaccaactgatgaccatagtaaagngcggnggaattcgcctctcctcctttctctctccctttttttctcctcttcccaactcccttctcaacatggggagttgtattgcgtggacctgtcctttctgtggactgtggggaggccgagccaattcttagctcctgtctgagcctagtgatgccctgtcctcacctctgcttccactccctttcccattcaggctgactgtcaccgcagggaggcaggtgggtctggagcatggagtggcccctgtcctgggtcagctgtaggaaggggcccctttgtaaacaagcttctgccaggttctgaggcagagcactggtctgagtccggccccacagaagggttccatcttgtggtcagcggggtgggctcagacctgcagactcccgcagtgggcccaccctttcccttgctatggcccgtctatgagtg

SEQ ID NO: 2700 - DNA, 592 bp, Homo sapiens
  misc_feature (1)...(592): n = A,T,C or G
gcaccactcgcactgacgtggancgancgaggctgagctagtagctaagtgcacaccaaagccgtactaacaagagtctatgctcgacacaacccaaagagcgatgaaaacacaagaaaaaaanaantttgaanagcacttctgaagagcgtcnggaanncncaaacancaagaacaattntgggctcatatatgagctgctggatgagattctagactttggctacctacagaattccgagacaggcgcgcggaaaaccttcatcacgcagcagggcatcaagagtcagcatcagacaaaagaagagcagtcacagatcaccagccaggtaactgggcagattggctggcggcgagagggtatcaagtatcgccggaatgagctcttcctggatgtgctggagagtgtgaacctgctcatgtccccacaagggcaggtgctgagtgcccatgtgtcgggccgggtggtgatgaagagctacctgagtggcatgcctgaatgcaagtttgggatgaatgacaagattgttattgaaaagcagggcaaaggcacagctgatgaaacaagcaagagcgggaagcaatcaattgc

SEQ ID NO: 2701 - DNA, 464 bp, Homo sapiens
  misc_feature (1)...(464): n = A,T,C or G
atagacaacacgtgatnaacctaggacagagcggaggaattcgntgacccaggtcatggaatggaaacggtgaggccccagtggctgttctggaagaatttgatctcctggcaaaggccccagcatctccctcactgaaaccaggtgcccggctcctcggactctgctttatgttgcggtgagaactctgcccaggtgtgcagggtttggcttgtgggctgcttgctgctcatctgatttttgtcccagtagtccctgcgttcttcattcaaccccttctgggacttcagctcagagagcaccatcccgggggtcagggcctccccacaggagccctgcagtgtggtagcgccatggctgtctcaaaccaagcaaaggaaggaccctgaggccttcaggctaaccctcctcgagcaactgctgttggaaggcctccctgggcctggcccccaccctctgccacg

SEQ ID NO: 2702 - DNA, 434 bp, Homo sapiens
  misc_feature (1)...(434): n = A,T,C or G
atcgcattcatgactcctagnccgtgtggtggaattcgatagagtgtgcctgctggcatgtgtacatgtatgtgcatatgtatgagtggggtacacttgtacccctgggtgagcctgcatgtgtgaagctggagtagaagcatttgggggtgggagtgggggctccatccgatggttctaatttcattcccaatttcctgctgcagcagctgcttaagatgtgcctggggttggtgacggtggcgggcgcagggggagggggacacaggctgtgctgctgctgggcctgtgtgagcctgaagacctttctgtcctggcgacccctcagaagggctgcactggatcttgtctgcccggggagcgcacctatccattggagggaagagcctcctgtgggtagaggatggccagctactcagcaaactggacttgag

SEQ ID NO: 2703 - DNA, 485 bp, Homo sapiens
  misc_feature (1)...(485): n = A,T,C or G
aggcggnnnnnnngattatgagaccttaggcangatggaaancctaccagacaagatctgggcccaggcccctcacttgctgctgctgtctctttgacttacccatccgatgccagctttgcaaacgggcggtccactggcctcgtgctggacagtggagccacccacaccacggccattccagtacatgacggctacgttctgcagcaaggtggggcttcggcagggggtgggggtgctccaggaggaccaggtcctgacagtgccttccttctaggcatcgtcaagtcccctctggcaggggacttcatctccatgcagtgccgggagctgttccaggagatggccattgacatcatcccaccttacatgatcgcagccaaggtggggcctctggggacatggagctgccactagagtcctggccactcgccccatggccgtcaaccctctgacacatgagatatcagagcagagagcagcag

SEQ ID NO: 2704 - DNA, 483 bp, Homo sapiens
  misc_feature (1)...(483): n = A,T,C or G
agaggtcccagggtgcccacaactaaangccaaagnggctngcanaancnnggaanntgaagacgntngctctcccggaacagcctatctcattcctttctttcgattacccgtggcgcggagagtcagggcggcggctgcggcagcgagggcggcggtggcggcggcggcagctgcagtgacatgtccagcatgaatcccgaatatgattatttattcaagttacttctgattggcgactcaggggttggaaagtcttgccttcttcttaggtttgcagatgatacatatacagaaagctacatcagcacaattggtgtggatttcaaaataagaactatagagttagacgggaaaacaatcaagcttcaaatatgggacacagcaggccaggaaagatttcgaacaatcacctccagttattacagaggagcccatggcatcatagttgtgtatgatgtgacagatcangtaagttccaag

SEQ ID NO: 2705 - DNA, 479 bp, Homo sapiens
  misc_feature (1)...(479): n = A,T,C or G
gagggcccgcgtccnnaacctcntaccctgacgngcggggaaannccaggagggcgtggngggtgcggtggaaaagaccaagcagggggtgacggaagcagctgagaagaccaaggagggggtcatgtatgtgggagccaagaccaaggagaatgttgtacagagcgtgacctcagtggccgagaagaccaaggagcaggccaacgccgtgagcgaggctgtggtgagcagcgtcaacactgtggccaccaagaccgtggaggaggcggagaacatcgcggtcacctccggggtggtgcgcaaggaggacttgaggccatctgccccccaacaggagggtgaggcatccaaagagaaagaggaagtggcagaggaggcccagagtgggggagactagagggctacaggccagcgtggatgacctgaagagcgctcctctgccttggacaccatcccctcctagcacaaggagtgcccgc

SEQ ID NO: 2706 - DNA, 495 bp, Homo sapiens
  misc_feature (1)...(495): n = A,T,C or G
atggatgngccccaggcgtgcccnaacccctaaaanngcctaaatggactnngcanaanccnnggaanntctgaagnacaaaggacaaactaggaccaatggcagggagtttcacgaagaccaattaccattcagtgttaagaactttctaatagctgttcgacaatagggtggccttgtagaagatagtaattccctgtcactggaggtgtgtcagcagatgtcagaaaggttgtaaaggggattcctgcattgtgtagaaagttggatcaggtcacccctaaggtcctttccaattatgaaaatctgtggttggctactggagacctatgggggcttgctgctgttaagtcagccctggtctccccagcatttgggagggagagctggtgagttcttctttctcctccctagataataatgacaaacacctgatcacctaccagtcagtggtcagaggcagagccctccaacagttcttatcttagctcaacc

SEQ ID NO: 2707 - DNA, 481 bp, Homo sapiens
  misc_feature (1)...(481): n = A,T,C or G
tgaggtgcccgggtgacnaannctgggtgcctaaccgtctgggaaanncaaaagggaacaaggattagagaagggagtgacactgaatagaaccagagagaaggggcttgggggcaggaagttgagagctcacacctaaggttccattgcctctgaggtgggaggcaaagtcaacagtgtgggggttgaggtgggaggggtccggcttgagcagagcagtgcaatagcacgcaccaactcctccaccttccagcccagtccccatcccccattcccatggcgctttcttcacaattttagttggtggagcctctctcgtgaggccatcctttctccttgcctaccgcatcccaagaagaactcagctacgtgaagggatgtcactaccccctgcaatatgtatatgtgaaatatgttgggcgcggtggctcatgcctgtagtcccagcactttgggaggccgaggcaggcggatcatgaag

SEQ ID NO: 2708 - DNA, 483 bp, Homo sapiens
  misc_feature (1)...(483): n = A,T,C or G
aggagttgcccagagtgccccaaacaagtatatcaagtattcctgcanancnnnaanantncaggagagggcaggtttccgtccctccgcgtggtccacaacttattttttttcgtgtgtccccgggtgtcaagcgacaggggtcctggggggcgctgggtgcccacccggtgaatggccgcctgagccggggaagatgcttcatctgcccctgcccagatccggaagaacggtgaatttcccccgcagctgggatgaaagcagctccatcagtagtggactcagcgatgcctcagacaatctcagttcagaagaattcaatgccagctcctcactcaactccctcccaagtactcccactgcttctcgcaggaactcaacaatagtgctacgcacagactcagagaagcgctcactggcagaaagtgggctgagctgtgttagtgaatcacaggagaaagcccctaaaaaactggagtacga

SEQ ID NO: 2709 - DNA, 483 bp, Homo sapiens
  misc_feature (1)...(483): n = A,T,C or G
aggagtggcccggggtgacnaannccaaagtgcctacnnnaccgggananncngaaggagcccgccatctgggctataccctttgtaaacaaatatgtaccctgctggccgagctgctggaatacaacctcgagcagcancggcgagccggatgtgaaaccctgtctcctgatggcctgcctgaggagcacccacagaccaccaagctgaagggcaaaatgcagagcaggtttgacatggctgaaaatgtggtaattgtggcatctcagaagcgacctttgggtggccgggagctccaactgccttctatgtccatgttgacatccaagacatctacccagaagttcttcttgagggtactacaggtcatcatccagctacgggacgacacgcgccgggctaacaagaaagccaagcagacaggcaagctaggttcctccggtttaggctcagctagcagcatccaggcagctgttcggaagn

SEQ ID NO: 2710 - DNA, 492 bp, Homo sapiens
  misc_feature (1)...(492): n = A,T,C or G
tggaganncncagagtgccccaaaactgaaangcctaactggctangcacagccgnggaannctaactcagccctgggggtctgggttaaaggagaaattcaccgccttctgcaaggcccagggcttcacagaggataccattgtctgcctgccggaaaccgataagtgcatgacggaacaataggactccccagggctgaagctgggatcccggccagccaggtgacccccacgctctggatgtctctgctctgttccttccccgagcccctgccccggctccccgccaaagcacccctgcccactcgggcttcatcctgcacaataaactccggaagcnngaaaaaaaaaaaaaaaaaaaaaaaaaaaaaaaaaaaaaaaaaaaaaaaannnggggggccctttaaattaaaagggccctttaaaaccccgggaaaacccctgggggggtttttttagggcccaccttttgggggtcccccccccccccg

SEQ ID NO: 2711 - DNA, 497 bp, Homo sapiens
  misc_feature (1)...(497): n = A,T,C or G
cggggtnnccncaggcgtgcccccacaactgagannncctagnctnggtnangcacgngccgnggaannccgcattgggtggacgagaaggtgcttccgctgcttgaaggtttgtccacattcgtcacagatatagttccgcacctctgagaggggagagtccagtgagtccaggcccctgatgctccaacctcccggggggacgacgatgacaatgtgaaaccatcacagctgggaagacatttctgcacatggttcaccatgcagtgggcccaagcaaggggcctatgagggcctcgtttattaagatctttaaactgctttatacactgtcacgtggcttcatcagctgtgtgcatttcaggatggtttttaaagaaacctcagaaagctatttccttaaccacaaaananaaaaaaaaaaaaaaaaanggggggcccgttcaattttaagggcccctttaaaccccgttgataaccctggagggggcttttan

SEQ ID NO: 2712 - DNA, 480 bp, Homo sapiens
  misc_feature (1)...(480): n = A,T,C or G
tgagtggccagggtgncaaatccagggtgcctaacgngcccgcanaancnnanganngggcaagagaacgccaggagggataacgggaggaatgccggccggggccttcaaggctgtcccaggctcgcgtaggaggcgcgcagaccttgcaccttgcaccttcgcagcgccctgcaccccgccaccatgtgcgagctgtacagtaagcgggacactctggggctgaggaagaagcacatcgggccctcatgcaaagttttctttgcatcggatcccatcaaaatagtgagagcccagaggcagtacatgtttgatgagaacggtgaacagtacttggactgcatcaacaatgttgcccatgtgggacactgtcacccaggagtggtcaaagctgccctgaaacagatggaactgctaaatacaaattctcgattcctccacgacaacattgttgagtatgccaaacgcctttcagcaact

SEQ ID NO: 2713 - DNA, 479 bp, Homo sapiens
  misc_feature (1)...(479): n = A,T,C or G
tgagctcccagcggcccaacctgagntccattgtntcctgcanancnnggaanttntagggacctgccccagccccacccaccctggcccactccacatgcctctgaccattttcactcacggagagggatggaggagaaggtgggtgaactgagtactgagaacccacaggacagagcccacagcttccaagcaggaaaagggacctctctgaaaaatctggataaccagaattatcacagcaccctctcattcccagcgcgtccttctgagctcagaccttgagcatttactgggtttctttttgaggaagagggaaagtgacaaaggacaaaacaatgcaaatcttcatgactgaagacgatcaaagactccctggagcgagaaaacagttactgccagaagcagaatggaagagccaaaaagtacacaaaatggacgccataaattctgaaataaaagtgtatgatgtgttctgg

SEQ ID NO: 2714 - DNA, 483 bp, Homo sapiens
  misc_feature (1)...(483): n = A,T,C or G
aggcggnnnnngggccatgaaccttagccangatgagaaccctctaaagcacgctgggtgacctcagatggctccgctgggactggaaggtcactggagccactggtgaaaatgatgctgtcactaccaactcaaaaggtcacctatcagtgtgccatgtgccacctcctggagcacacacatgtgcacacacatacactcacacgtgtgtgcaggtgcacacctcccccagaggctgcagccaagacgggcatcccacatcatagggatgaatggcaggtctgtcccgccagctgtgtgctctctcccacccgaagaaagcagcagagactcagacggcggagcctggaggagcccacgcagtctgttcccggcacccggtgcgtgtgaagggacttgagggcagcgagatggaatcagcaagagaaaacatcgaccttcaacctggaagctccgaccccaggagccagcccatcaacctga

SEQ ID NO: 2715 - DNA, 495 bp, Homo sapiens
  misc_feature (1)...(495): n = A,T,C or G
gggagtgtcccccggcgtgcccnanaaactgaaangcctagnctngctangcacnngccgnggaanncttcaggacccaggccaagccgcctcacgaagaccaggaagcggcctctgtcgggaagccacctgcagcctatagtcccctccccgggcggccccagcccgtgctatctcctacatagttgccttccgaacgcctggagggccctgacccttccggtgttccaccgcaatggggtcggggggagaggggggctgtggctgcctgagacctccagggcagcgcacattacgggcgggaaagggaagtcaaggcaggaaccataacatccagggagaatgcaggtctgacatgagccaaggccttggcagtagaggaactttcaccaggtcgtggaaaagaccaagccactagccctaaagagccggacttctcgccaagcgccggagtccctgaaccaggatatgtgggcactgctccctgcaaggtgg

SEQ ID NO: 2716 - DNA, 466 bp, Homo sapiens
  misc_feature (1)...(466): n = A,T,C or G
natcggacctttgcagttggaggaactctcccagcgacaggagagtgagctcaccacgcgcagcgccatgaccagcaagggtcccgaggaggagcacccatcggtgacgctcttccgccagtacctgcgtatccgcactgtccagcccaagcctgactatggagctgctgtggctttctttgaggagacagcccgccagctgggcctgggctgtcagaaagtagaggtggcacctggctatgtggtgaccgtgttgacctggccaggcaccaaccctacactctcctccatcttgctcaactcccacacggatgtggtgcctgtcttcaaggaacattggagtcacgacccctttgaggccttcaaggattctgagggctacatctatgccaggggtgcccaggacatgaagtgcgtcagcatccagtacctggaagctgtgaggaggctgaaggtggagggccac

SEQ ID NO: 2717 - DNA, 475 bp, Homo sapiens
  misc_feature (1)...(475): n = A,T,C or G
agggatannnnaaatgagacccatcgaaggcgtggaaancctgnttttcaacccaggaaggttagtgtgttcctgttactaagtggctgccgttcctcaaatgctgtcattgagctggtaggcattactgtgagatctaaatcttctcaagagaagaggggacaatgagtattttctgtatgcttgttattagttctttccccaggggtgttaaatcagtgaacacgacagctaagataaacatctagggagcttggctcttaggtctgcatttgccacattgctttcggaaagcaggagatatcctttctgttgacttagagtttgctgcaacagggtgtgctggagtatctgtctgccttcgatgaagaaaccacggaagtttgttctctggacactccttctagacctcttgctctccctctggtagaagaggaggaagcagtgtctgaaccagagcctgaggggttgccag

SEQ ID NO: 2718 - DNA, 440 bp, Homo sapiens
  misc_feature (1)...(440): n = A,T,C or G
ntcgtagaacctagtcagtgtggtggaattcagcggagaacgctggtgggcctgttgtggagtacgctttggactgagaagcatcgaggctataggacgcagctgttgccatgacggcccaggggggcctggtggctaaccgaggccggcgcttcaagtgggccattgagctaagcgggcctggaggaggcagcaggggtcgaagtgaccggggcagtggccagggagactcgctctacccagtcggttacttggacaagcaagtgcctgataccagcgtgcaagagacagaccggatcctggtggagaagcgctgctgggacatcgccttgggtcccctcaaacagattcccatgaatctcttcatcatgtacatggcaggcaatactatctccatcttccctactatgatggngtgtatgatggcctggcgacccatt

SEQ ID NO: 2719 - DNA, 452 bp, Homo sapiens
  misc_feature (1)...(452): n = A,T,C or G
nccttgatgacctanangccatcgcggnggaannnccgaagatggcggaggtgcaggtcctggtgcttgatggtcgaggccatctcctggtccgcctggcggccatcgtggctaaacaggtactgctgggtaagtcgctgctcgtggcccctctgtcatgggcccccgctggaggtcagtgatgagcaacattcaccatctttcgtttgagtctcacggccatgagatcaaccccatgcaccgctctgagacctgccagccactcttccccagggttggggactccaggctcaagaagtaattatgtattaggctagtttttcatttaaacaggaacttagctctggcaagtactgcgctgtgtctggagggtgactgcataggcagtggtgggaccctcaggcggctcggccctgctaagcctttccctccctctaggccggaaggtggtg

SEQ ID NO: 2720 - DNA, 483 bp, Homo sapiens
  misc_feature (1)...(483): n = A,T,C or G
aggtgnnnaatcgagnattgtagaacctagtcagngtggtggaattcagaaaacaataacatcaacagccagatcaacatgtacctgttgtcacgcgtcctgtttgccctgagccgcctggctgtagagaagggctacatccctgaacccaggtgggacccgttcccgctgctcactgcggtggtgtgggggctggtgctgtggctctttgagtatcaccgatccaccctgcagccctcgctgcagtcctccatgacctacctctatgaggacagcaatgtatggcacgacatctcagacttcctcatctataacaagagccgtccctccaattaatgcagccctgaggtgtctggctgtggctcaagatttggccccatgcagaccctcccaaaggatactgccttctcaagatcataggcctcagactccaactggtgttatcccagggttccgtttgctgaagtaaaaacactgattttn

SEQ ID NO: 2721 - DNA, 452 bp, Homo sapiens
  misc_feature (1)...(452): n = A,T,C or G
ntttgannatcgatgacccctagtccangcggnggaattcggatagtttcacaagctctgatagagctgaatatggactccccagaagagctgcagtcctacatccagaagctcagtatagcagtggagcaggctaagcagaaaatcctccaagcggaagtcaacctcgaggtggatgtggtagacagcaagccagagacccctgacctggagcagctggagccgtctttggaagatgtggaaagcatgaatgattttgatcccttgttttcagaggaaacacctggagtggagaagccggtcaccactgttcagcatatcatcagctatttgttgggacagaaagaattcgagctccagagattattttccagccatctctcataggagaagaacaggctgggattgcagagactcttcagtacattctggacaggtacccaaaggacatt

SEQ ID NO: 2722 - DNA, 450 bp, Homo sapiens
  misc_feature (1)...(450): n = A,T,C or G
catgagaccctgatcgagggcctgaanaccccacgtctgggagatgctgcgtcggttgggggtgcaaccctcaaagtatcatttcctctttgggtatccgaagaggcttattatggaagattttgtgcagcagcgatatctcagttacaggcgggtgcctcacaccaatccaccagcatatgaattctcttggggtccccgaagcaacctggaaatcagcaagatggaagtcctggggttcgaggccaaactgcataagaaggaaccgcagccctggccagtgcagtaccgtgaggccctagcagacgaggccgacagggccagagccaaggccagagctgaagccagtatgagggccagggccagtgctagggccggcatccacctctggtgagggttggtgaaaagttggccagtgggtccccgtgaggacgaactactgtcctgagt

SEQ ID NO: 2723 - DNA, 453 bp, Homo sapiens
  misc_feature (1)...(453): n = A,T,C or G
ntttgannactgatgaccatctagnccangcggnggaattcgtgatggtgatattgactgaaatctggactggagaagataatgtttgagagagggccatgagttcagtactgagctaagtttgaggttccttggggcctccagtaggagatgtccaaaaggcgaccagttttggagctggttgtggtctttaactgagaagagagacttccctgatgtagtctagcactgactccttccttgggtctctgacagactcagctcgtggtagtgctatttgtctctgggggaggtctgtggaagaagggaggaaggggcattggcagggctgcgtatgttggtagtaggattcaggcccagcttctgtagagatgcctgaccttggcaaactctgggggagtggcaagtcccactgtgcccactgngtggcagtagtgcttcagatgagttgta

SEQ ID NO: 2724 - DNA, 449 bp, Homo sapiens
  misc_feature (1)...(449): n = A,T,C or G
nctgatgatcgtaggccatgcggnggaattcctttccagagccagcattagaacctgagacccccagatgtttctgcccctcatccccatcctgtgaatagagagacagaaaaggtgcaggttcccattctgcatagattctgctgtttcctctccaccggtcccaggcagcttttcctttccatcactgccgcttagcaaaaatgtgcttcttttgaagaactggtcattttttttgagtgccctcttctcagttttgtttaaacttacactcagtagagtgttgggttgtctgctgacatggagtagaacctggattctggccaaataggccagaatcggaaaggtgaaggtgagtgtgatagtaggtaatctcctcaccccagcacaggccctgggggagaggcaaagcagtttgatgggatctggaggggagggaggtaccctgg

SEQ ID NO: 2725 - DNA, 455 bp, Homo sapiens
  misc_feature (1)...(455): n = A,T,C or G
ntttgaaaactgatgaccatctagnccangcggnggaattcgtttataactaaccagtttatactaaccaatatcttctctggaattagaatctaatcaagtaccggccaggcgcagtggctcatgcctgtaatcccagcactttgggaggtcgaggcgggcggatcatgaggtcaggagttagagactatcctggctaacatggtgaaaccccgtctctactaaaaatacaaaaaattagctgggtgtggtggtgggcgcctgtagtcccagctactcgggaggctgaggcaggagaatggcgtgaacctgggaggcggcgcttgcagtgagccgagattgtgccactgcactccagcctgggcgacagagccagactcccactcnnaaaaaaaaaaaaaaaaaaaaaaaatgtttttttttaggcccccaaaggaaaccacccttctttaaat

SEQ ID NO: 2726 - DNA, 448 bp, Homo sapiens
  misc_feature (1)...(448): n = A,T,C or G
nctgagatcgttggccatgcggnggaattcgacattttctaaactctcctgaaaatccagctgctcctccctgctgcttgggagttcacccaggagaggaaatgggtgtgttttgttaaggtcccttgtggagactcagggctgaatcctgcttggtaatatcagtgtgtgtgcttggggatggaccttctactgaataaaaactccctccctccccccattgtggtcacatatcattctacatatctcatctctgagcatctccatggaagcttgatttttgttctttttggtttctttatgtatttttttctgttgttattattttttaatgttcaaagactagcctttccctttgggattccaaatgatcccatgctgtggtctgaggggcaaagccacctatgttggcgctcgccattaatccccagcgctcagtttagaggcg

SEQ ID NO: 2727 - DNA, 466 bp, Homo sapiens
  misc_feature (1)...(466): n = A,T,C or G
ggccggcccccnnntttgaaaactgagaccatagcccgngcggtggaattcccgagatccatggctgcggtgagagggctcgcgcccatgcccggcagagaatcagccgggaaggggtcctctatgccggcagcgggaccaagaacggatccctggacccagccaagagggcccagctgcagaggaggctggataagaagctgagtgagctcagcaaccagaggaccagccggaggaaggagagggggacgtgaccggccgcatccttgcacgccccgcggagctctctccatggtagcccagggcgctggcagaccatgctccgcctccaccagggccacagaggagcggaggggcctatgggggaggagcggagggccctgttggggaaggttgggtttttggaccccagggataagcttttccgatgtcacaatgtggaggaaagcacctgggggacaacagn

SEQ ID NO: 2728 - DNA, 459 bp, Homo sapiens
  misc_feature (1)...(459): n = A,T,C or G
catgaccccntctatgagaccatcngaaagngcggnggaattccaaggccaccccggagcccacgcttccctcagctgtggccacagatgccagtctggtttcctgcccagagtcttcagtaggggctgtgtccagtctggacagaggctgccctgacgcgcctgcccccacgtctgcaccaacctcccagcagccggagcctgtactgggtctgggcagtgttgagcaaccccacgaagtacccagtgtccttggcacccccttgctgcagcccccagaaaaccttgccaagggtcagcccagcacgcccgtggacaggcccctgggccctgacccttctgctcctggtacccttgctggggcagccctacccccactggagcccccagccccctgcctgtgccaggacccccaggaagactctgtggaagacgaggagcccccaggctctctgggcn

SEQ ID NO: 2729 - DNA, 465 bp, Homo sapiens
  misc_feature (1)...(465): n = A,T,C or G
cgcgccatgagaccttcgatgagcccgtagaagagcccannacagngctgngtattgcccacatggcagagaggcactgaggcatggcgtccacattgtgacactgtgtgctccaggaacgtcagtgatgagctcaaggtcaccaagcccagcaagagactgcaagtgaggctccctgcttcccaggggagccacagtcatcaaagccccgcacattttgctctcaaaaaaattttttttgatggagttttgctcttgttgcctaggctggagtgcaatggtgcaatctcggctcactgcaacctccacttcttgggttcaagtgattctcctgtctcagcttcctgagtagctgggattataggtgcccaccactacccccagctaatttttggtatttttagtagagatggcatttcaccatgttggccaggctgctcttaaatttttaagtgactttccccg

SEQ ID NO: 2730 - DNA, 474 bp, Homo sapiens
  misc_feature (1)...(474): n = A,T,C or G
gcaggtccnnnnccaatgagaactgaggacgtgncgnggnnnccgccnagcccgggatgactgcactctagggcatcactgcgcgctcacactcagcattcaggcacaagcacgttctctttataaacagtttcgaatcttgtcgagtctttctagaaggttgaaatgccctggaggagcagcgtgaatagttttttccaattaggaaaaaagaatgtggggcggctggagggagagaggcaggccgagaaggccaggtgcgtccaggagccgcagcccccgtgcctcagtttcctcctagaaacatggaggtggcggtgcacgctacaggatttctgtaagaacaaatgagttaacgtgtgcaaaacatttaaaacagtgtctggtgtgtagcaagcaaatatgagtattagtcttttccttgctagaatgtgtgcatctacatttggtgcacattacaggaagtgtatagtt

SEQ ID NO: 2731 - DNA, 473 bp, Homo sapiens
  misc_feature (1)...(473): n = A,T,C or G
gcagtcccccccaatgagncctggcgccatccgaagnngcgcggaanncggaaagctgtcatggaacagtgtctgattagaggcacacctatttgtgggggcactaagagaagctgctggttgccaagtgctactgaccaccatcctctgcaggattcctgttctggaaaagttgcctgcactgcgggagggtgatgttggagaagctgtgagctctgtgctgttaagatgagcccagcacaaccagaaaggaaggcctcttcctcctccaatgtctctagctccccctcctgacagagcctagcattgcaccaactaccaaaagaaaaatatttaaagggccagctccatttttgaagagcaggcgatgaacagtaaatttggggtccagagtaataactgaatgtcattctaccattatcgaggggccgcataaccaagttgttaagagtgtggactctgcagttgggttt

SEQ ID NO: 2732 - DNA, 451 bp, Homo sapiens
  misc_feature (1)...(451): n = A,T,C or G
nactgagacctaagnccatgcggnggaactcctggcatccagcgaggcatctgggatggagatgccaaggctgtccaacaatgtctgacagatatttttaccagcgtttacaccacctgcgacatccctgagaatgctatatttggtccctgtgtcctgagccatacttccctatatgacagcatagctttcatagctctcaagtctactgacaagagaacagtaccgtatatctttcgggtagacacctcagcagcaaatggttcctcagaaggtctcatgtggctgcggttggtccaatcggccagagataaggaagagcagaaccttgaagcctacataaaaaacggacagctgttctaccgctctctccgcaggattgccaaagacgaggagttactagtttggtacgggaaagaactgactgagttactcttgctctgcccctctn

SEQ ID NO: 2733 - DNA, 458 bp, Homo sapiens
  misc_feature (1)...(458): n = A,T,C or G
aaatgaggacactagnccagtgattgccattcgtggcatgggaagcatcactgctgtcacagtcaaccagagcctgctgagcccccttatcctggaggtggaacccaacatccaggccgtgtgcacccaggagaaggaccctcaacaacaaatttgcctcctccatagacaaggtacaattcctggagcagcagaacaagatgctggagaccaagtggagccctcctgcagcagcagaagatggcttatagcaacacggacaacatgttcgagagctacatcaacagccttaagcagcagctggagactctgggcttggaaaggctgaagctggaggcagagcttggcaacatgccagggctggtggaagacttcaagaacaaatatgaggatgagatcaacaaacgtacagagatggagaatgaatttgtcctcatcaggcagtatgtggatgaagc

SEQ ID NO: 2734 - DNA, 493 bp, Homo sapiens
  misc_feature (1)...(493): n = A,T,C or G
aggtcattcgagaacctagnactttgtagggcaattcctccctggcccccgtcttcagccggagtcatgagctggtggttgtggagtgttagaaaccacacaggtttggggcagctgtcactcaccagctgtgtgtccttgagcacctgtgaaatggggacagtggatgctgtctcaggacatgctgggaatactgggtgaggggctaacgtgtagtaacccaatagtagctgtagcaggaaacagctgacacaatgtcgcacgtcctgcctgacaggccctaagtgctctacgtacattaactcacttaatcctcatgactttcctgtgaggtaggtcctagtatcactcccatcttacagacaaggaactggaagcacagagaggttaagtaatgtgcccgaggtcacacagctggtaagctgcagagccaggattcaaaccaacatacaagccaggctgcccagcctgtcctctatggtcttactgtccn

SEQ ID NO: 2735 - DNA, 495 bp, Homo sapiens
  misc_feature (1)...(495): n = A,T,C or G
cgggggattggtccctagtcatcgagatgcaatatgcacgtggcggaattctcatggtggcgcaccagaggtttcagagggtgacattcccaggcagggctcagggagattcttcctgtcatctagatatctgtgaaaagagagtccttcctgcatacctgggtggcagattcaactgtgtgcaggccccagggaggtaaggtgggcaggcgaggggccaggcacctggcgagccgtcctatagatggggcgatgagaggcccccagcccagggacggcagggagttggggggccagcggtggccacgagcctcgtttcatctgaagggggtactcgtggctcagtggcagctggtggtggccatgttggaatgtgacagagaccgtatgcttagacgttatctagggaaaccagcgatgcatactggtatgggaaatctctcttctaagtgctggtagttattnttcccaagccccgtgcaggctaaatacagc

SEQ ID NO: 2736 - DNA, 482 bp, Homo sapiens
  misc_feature (1)...(482): n = A,T,C or G
ggggagcagcagntcccnnnncccctgggtaactgaggacgatncgaggaancccgggaggntagntgagccggctccggcggggaaggaggcgggctgcggctgcggctggggctgaagctgaagctggggctggggttgggggactgcccggggcttagatggctccgagcccgtttgagcgtggtctcggactgctaactggaccaacggcaactgtctgatgagtgccagccccaaaccgcgcgctgctcgggaccttagagcctctgactcaggctggaagatttgagagctggattaagtacttgttggctcacgcccgtgactgttccgctgtttagctcttgttttttgtgtggacactcctaggatagaaagtttggtatgttgctatacctttgcttctcccaccttccccaatatctaatatgtatttctcattcttagaataatccagaatggctactctgatctatgtg

SEQ ID NO: 2737 - DNA, 454 bp, Homo sapiens
  misc_feature (1)...(454): n = A,T,C or G
ntttgacaactgatgaccttagtccatgcggtggaattcctaaggcactgagcgtatcatgttaaagatgagcgggtggcagcgacagagccaaaatcagagctggaacctgaggagagagtgttcaagaaggaagtgtatcttcatacatcaccacacctgaaagcagactgatccaactgcagagatggcagctgagtcattgcctttctccttcgggacactgtccagctgggagctggaagcctggtatgaggacctgcaagaggtcctgtcttcagatgaaaatgggggtacctatgtttcacctcctggaaatgaagaggaagaatcaaaaatcttcaccactcttgaccctgcttctctggcttggctgactgaggaggagccagaaccagcagaggtcacaagcacctcccagagccctcactctccagattccagtcagagctcn

SEQ ID NO: 2738 - DNA, 449 bp, Homo sapiens
  misc_feature (1)...(449): n = A,T,C or G
nactgagatcgttggccgtgcggggaattaaacattgttttaaagggatgatatatacatagttatactaccaatatatttgaaatagccgactacaaaaataactgctctggcctggggcagtggcacatgcctgtaatcctatcactttgggaggccaaggagggtggatcacttgagaccaggagtttgagaccagcctgaccaacatggtgaaacttcgtctctactaaaaatagaaaaattagctgggcatggtggcacatgcctgtagtcccagctgcttggctgtttgggtagccaaggcatgagaatcacctgaacctgggaggcggaggttgcagtgagctgggatcacaccattgcactccagcctgggcaatagagcgagactctatctcaaaaaaaaaacaagaacaaaaaactgcccaaatgaggtcaacataaag

SEQ ID NO: 2739 - DNA, 496 bp, Homo sapiens
  misc_feature (1)...(496): n = A,T,C or G
ngggggaatcgagatncctagtcattgaggtgcaattcgtacttgccgcccagccacgcccgcgcgccagccaccatgctaggtaacaagcgactggggctgtccggactgaccctcgccctgtccctgctcgtgtgcctgggtgcgctggccgaggcgtacccctccaagccggacaacccgggcgaggacgcaccagcggaggacatggccagatactactcagcgctgcgacactacatcaacctcatcaccaggcagagatatggaaaacgatccagcccagagacactgatttcagacctcttgatgagagaaagcacagaaaatgttcccagaactcggcttgaagaccctgcaatgtggtgatgggaaatgagacttgctctctggccttttcctattttcagcccatatttcatcgtgtaaaacgagaatccacccatcctaccaatgcatgcagccactgtgctgannatctgcatggtttcctttg

SEQ ID NO: 2740 - DNA, 487 bp, Homo sapiens
  misc_feature (1)...(487): n = A,T,C or G
aggggtggagcagcncgccnnccaactgagnaactgaggtcctgcgccgngncgnggaanncgcggaaagctaaggaggcagccccagccccacccaccgaggaagacatctggtttgacgacgtggacccagcggatatcgaagctgccataagtccagaggcggccaagatagcgaggaaacagttgggtcagagcgagggcagcgtcagcctcagcctcgtgaaagagcaggccttcggcggcctgacaagagccttagccttggactgtgagatggtgggcgtgggccctaagggggaggagagcatggccgcccgtgtgtccatcgtgaaccagtatgggaagtgcgtttatgacaagtacgtcaaaccaaccgagcccgtgacggactataggacagcggtcagtgggattcggcctgagaacctcaagcagggagaagagcttgaagttgttcagaaggaagtggcagagatgctgaacn

SEQ ID NO: 2741 - DNA, 469 bp, Homo sapiens
  misc_feature (1)...(469): n = A,T,C or G
gcgcccaatgagaccatcgccagnncgcgatagncanngncaaagctcccatttcacagaggataccaccgagactcggaggggacacgatgagcaccaggccccacctttgtcccctagcaaattcagggtacagctccacctagaaccaggctgccctctactgtgctcgttcctcaagcatttattaagcacctactgggtgctgggttcactgtgtcctaggaaaccaagagggtccccagtcctggcctctgcccgcccctgctgccccaccaccttctgcacacacagcggtggggaggcggggaggagcagctgggacccagaactgagcctgggagggatccgacagaaaagctcagggcgggtcttctccttgtgcccgggattgggctatgctgggtaccaccatgtactcaggcatggtgggttttgaacccataaaccaaaggcccttgtcatcagn

SEQ ID NO: 2742 - DNA, 452 bp, Homo sapiens
  misc_feature (1)...(452): n = A,T,C or G
nattgatgatcgttagnccatgcggnggaattcccctgctgcagcccaggtgacatcctcaccccacagcctgcaccctagggatggggtgtctgcctgagcacagcactgggggcctggccccagcagcgggtcctggatgtgctgagtctgggctgcctgcggtgacctcactgagagggggtggggatgtcaggtgcagctgcatactgaggaccctgcagcgagccctaggtgtggactcctgagtcggctttttgccttcccaatgtctttttccagagctcacaacgacctggggctgaggacaatgtcctcaatgagatcgtgagtatcttgcagcccacccaggtccctgagcaggaaatggaagtccaggagccagcagagccaacaggtgtcaacatgttgtcccccggggagtcagagcatctgctggaaccggcagaagn

SEQ ID NO: 2743 - DNA, 406 bp, Homo sapiens
catatttgtgtttcattccttagaaagtgctgtcagttccctctttgaggagctctctgaaacaacaaagggacctgtcatttgtgcatacccccgactggcacctttgaaatgttatccagtcttgctacctaccatttctgatttgtctgacgttgacatgtacacaccctggagcaggtctgttgacttcactcaggcttatggaatattgcatacatccaccgtactccataaataactaatagtgtgaagcagagatcagatcaactgacagactttgtagaatgtaatctctggtaacactgactttaagaggcaatgagtgtgtgtgtgtgtgtgtatgtgtgtgagtatatatatattcccataggctagcaaatgaaaactgacagtgaacttttcc

SEQ ID NO: 2744 - DNA, 455 bp, Homo sapiens
  misc_feature (1)...(455): n = A,T,C or G
ntttgaaaactgatgacccttagnccangcggtggaattccacccctgttctgcagggcttcagcgtggccttcattcccgcctcgcctcggcctcttttcaattaagaagtgatgccacttgaggcagggtctgcatgatcacttcttgggtttgagtttgaaagctgccatccctgcgactgcccagggcctgtatgttgggaccgaagccaaacaccactgtcctccagggggctttcggcccggggcagggtccccagtgcccgccttcgaatcagactccgcgtttccgcctctccctgggcggacctgccgctagagggcgctcctcctccgcagccggcgccggcctccagcgccccagactcccgcgctgccgcccgagcctgaggtttctcacggcgttcgggattcgcgcttcggaaaccgggaacaaagaagcaagcagcaccc

SEQ ID NO: 2745 - DNA, 466 bp, Homo sapiens
  misc_feature (1)...(466): n = A,T,C or G
ntcgaggcccttnnnannatcgagacctctgtccangnggnggaattctgcttctcgttgcgggttgtgtttcctgcttcgtgggcctggccgtttgcgtttggatgcaggcccgggtgagccctgcgtggcccgctggccttttcctgctccctaggtgactgagccgcgtgtgtgacacatcggagtgaattgaggcaacgcgttcctttccaggcttgcagcgggcggtgtcgttcacgctcctgagcagagccttccggtgctttactcgacgccacaaatagtgcagggttcctcccaggggctgtcgcgagctagaactcttccccgcccctgtgagctcgggctgttcttcctcctccgcgtggctcactccagcctcggatgtttcctcgctgcacagacctgctcgggaagactcgagaaggccaccccaggactccagctctccccggaagggctt

SEQ ID NO: 2746 - DNA, 497 bp, Homo sapiens
  misc_feature (1)...(497): n = A,T,C or G
tggagggcnttttggaccctanncatcgagtgcactgtcagcgggtgagactcctgacggcggaggaccgcgaagaaggtgccgcagagaattcgcatacaccaaccgtaaccagagcagctgggggcgcggcggcgagagaagctgcgaagcgcatgcgcgcaggacgctgtgggagggggaaaggaggggaggagcgtggagcgatcgcctagttcccgcgttgcggggcgcatacgagacttggcgactcgctgcctcagggttgcgtgcctccggccctagcctgcgcaggcggcctgagcttggggctctgctacgccacccacgcccaccttggcggagggcggggccccacggctctcaaacttgcgcgccaaagacggagccacctggcgtactggtggaaagcgcaaacttcagagccacacccgtaggtaagtattcggactctgagattccagggtggggcccaggccatccgcgttttcaccagg

SEQ ID NO: 2747 - DNA, 444 bp, Homo sapiens
  misc_feature (1)...(444): n = A,T,C or G
nttcgcgacctttgtgaancgcatagacagcgtggtggaattcccttttcaggctaagtagcacgttctagcaatctccaaggtctatcacatcctagacaggcctctgaaagttcaactggccaatggctcttttccagatcctcccccagttaagcccaggtgtctagatgagacccaacagggcagagtgtggccagcccctgccttcatctttcccagcacccccactccctggctcctccccctgcttctttggctgtgagacaggcaggaggtgagagtggcagccaggactgaggcaggctgcggctccttggagtcccccgctctgcctgactctgacccggggctccgcaggtccagcaggtgcaggacgacggccaccggctccagaaggcctacgctggagacaaggctgaggagatcggccgccacatgcag

SEQ ID NO: 2748 - DNA, 474 bp, Homo sapiens
  misc_feature (1)...(474): n = A,T,C or G
nctgaaaccctcgnannnncattgatnnccntncncacngnncgaggagngcganncggagctcatcacgctgcgagacgagatctttattgacctctacgagctggatgaggagcattactcgtccagctcaagcctttgcgaagctaatgacctgcctctgtgcgaagcttacgggaggctggacctcgacacagactctgctgatggcctctcggcccctctgctggcgtccccggagcccagtgctggccccctacaggtggcagcccctgcccactcccatgctggtggccctggccccactgagcacgcctgagcctgcggggccacgcttcgttctcaggaacaaaacctgaggcagccctttggatgccctcacagccttgcttctctcagcctacgttcccatttggggacttcacgaccccagagccactatgacttccttgggaagcccgttagcccagggtg

SEQ ID NO: 2749 - DNA, 481 bp, Homo sapiens
  misc_feature (1)...(481): n = A,T,C or G
agggagcagcngctcccccccaatgagaactgagtgccntncgaggaancccagactgagccctgaaaaccaacaagctgaacatgcggatgctgaagcgggtcagcatgtcgctgcccacacgtacctgggctgcctccgtcagcacccgcccatcaaagtccgtcagcactttggtgtggctgctacctaggtgcttttggtagaaccagactacagctggcacctcttcgggtttgcagtgacagggaagctcaaagctcatgtcggccaggtaggctgcattttcaaacatcaggaaagcagggcagggggtcctctgaaaaaagttttccttctccacaatttcaaaggcctggagcccccatgcccacaggagcacagtggtgagggccaggtgcatacctgaaggaggcaggggtcagaggggcagggcaaaaccagggcattaaaggctcatagggctcctagaaagctctgt

SEQ ID NO: 2750 - DNA, 440 bp, Homo sapiens
  misc_feature (1)...(440): n = A,T,C or G
nttgaggacatttggaagcgcctagaccacctgcgcggagcgcgcgcggcacgatggacggtcgggtgcagctgatgaaggccctcctggccgggcccctccggcccgcggcgcgtcgctggaggaacccgattccctttcccgagacgtttgacggagataccgaccgactcccggagttcatcgtgcagacgtgctcctacatgttcgtggacgagaacacgttctccaacgacgccctgaagacctacgctaccactgccatcgccatccaccgcatctcaccaacagactgtggctcctagtgatgtggactcacctcggaggtatccgagctggacacagcccctggacagtgatccagacagctggccgtcccccaaggagcctgtcaccttcagcgagacccatttcctccccatccccagagacctcttgtg

SEQ ID NO: 2751 - DNA, 450 bp, Homo sapiens
  misc_feature (1)...(450): n = A,T,C or G
natgagatcgttggccatgcggnggaattcgcagattcatgcagcattccatatttttttaagaaaaggttacactgtgcaccgacatgtggagctagaaggaaaagcttttaagtctcatgtttgctgactataaaaataaatcatagtaataatattgaacattctactttaaaaattattaataaaaccataaatgaaacacttgagcacactttaaaaagtacataaatccatgagtccatatgcctatttttaggttgtctgttttattatccaggatttcatactcagatgagaattagcatcaggaaagcctgaaatgccttaattgtgaactgatatgcaggaaaatgaaatatgcaagcacattggtgaccttgttctttacagacgtcgtgatcagcctccagccatacagaacaaatgagaaattagaagcgattccan

SEQ ID NO: 2752 - DNA, 474 bp, Homo sapiens
  misc_feature (1)...(474): n = A,T,C or G
gannagattgaanccnnnnnnnnaatcgagatccctagtccangtggnggaattcggcgaggcacggngacatcctggcggccaccatggtggccacgtgcctgcaggtggtgggcttcgtcacgagcttcgtgggctggatcggggtcatcgtgaccacctccaccaatgactgggtggtgacctgcggctacaccatccccacctgccgcaagctggatgagctgggctccaaggggctgtgggccgactgcgtcatggccacggggctgtaccactgcaagcccctggtggacatcctcatcctgccgggctacgtgcaggcctgccgcgccctgatgattgctgcctcggtcctgggtctgccggccattttactgctgctgactgttcttccctgcatccggatgggccaggagcccggtgtggctaagtacaggcgggcccagctggctggtgttttgctcattctgn

SEQ ID NO: 2753 - DNA, 497 bp, Homo sapiens
cggaggggaaatgagaccctagtcatttgagggcaattccgagcctgttagacgcagcgcgccgggagactgagagaggaaaggatagaggaagtgctgccctaggctgcatgagacgaagcaagcgtgtttccttcccgccaggcaagtgcccttagaaaccgggccccgcccccttcctggcctgcattcccatcccctctcccggggcggaggtgaggacctccttggttcctttggttctgtcagtgagccccttccttggccatgaagctcgtgaggaagaacatcgagaaggacaatgcgggccaggtgaccctggtccccgaggagcctgaggacatgtggcacacttacaacctcgtgcaggtgggcgacagcctgcgcgcctccaccatccgcaaggtacagacagagtcctccacgggcagcgtgggcagcaaccgggtccgcactacccttaatctctgcgtggaggccatcaattaaaaattagc

SEQ ID NO: 2754 - DNA, 467 bp, Homo sapiens
  misc_feature (1)...(467): n = A,T,C or G
agtnaagatcgagaccctagtccangttgaagatcttttgacattttttatatatctgatggccatatgtacaccctcttttgagaaatgtctatttgggtcccttgcccattttttcattgggttatttggtttcttactattgagttgcttgagtaccttatatattttggatattaaccctttctaagatgtatggtttgcaaatattttcctccattcaatggagtaaagttgtctctttactccattgagtgtttccttggctgcgctgaaaccttttagtttgatatgccatttgactgttttcactttgctgcctgagctttgagggtcatatccacacaatcattgcccagactaatgtcacgaagaatttctccttatgatttcttctcatagatgtatagtttcaggtcttgaatgtacgacatgcttcaaatttaattgggatactttctttctgt

SEQ ID NO: 2755 - DNA, 481 bp, Homo sapiens
  misc_feature (1)...(481): n = A,T,C or G
ggggagtagcagggccccccccactgagaactgagancntgcccagngcgcggaancgaacaacgacaagacagatacagggatgccagccaccgggtcggcaggcacccaggaggagctgctacgctggtgccaggagcagacagctgggtacccgggagtccacgtctccgatttgtcttcctcctgggctgatgggctagctctgtgtgccctggtgtaccggctgcagcctggcctgctggaaccctcatagctgcaggggctgggagctctggaagcaactgcttgggcactaaaggtggcagagaatgagctgggcatcacaccggtggtgtctgcacaggccgtggtagcagggagtgacccactgggcctcattgcctacctcagccacttccacagtgccttcaagagcatggcccacagcccaggccctgtcagccaggcctccccagggacctccagtgctgtattattc

SEQ ID NO: 2756 - DNA, 454 bp, Homo sapiens
  misc_feature (1)...(454): n = A,T,C or G
aggccggnnnngnnnnncctgagaccccttgcattgagcnccaattccgantaacaagtactgcttttgtgatttagttgtgaaacaccgacttatttatttaatccaatcctgttttctgatacctcaaaattttcttcctgattaacattttgccattaatcattatataaattgctggtttgtattaagtcatttttggtgtggcttgtgtgctctcggtagttttttacagccttagaaatgtagattttttgcgaaaaatcaattttaataaaaataaattaagtcgaggtgggtggatcacctgaggtcaggagtttgagaccagcctggtcaacatagtgaaaccctgtctctactaaaaatacaaaaaattagctgggcgtggtggcaggcgcctgtaatcccagctacttgggtggctgagcaggagaatcacttgaacccgggn

SEQ ID NO: 2757 - DNA, 479 bp, Homo sapiens
  misc_feature (1)...(479): n = A,T,C or G
ggggttgacctcgataccctgtgaattgagggcactccccantcctgagnctgatgacctccacggccagcgaggcagcgtcctatgagttcaccactctgacgtgtattcctggggtcattgaatacaaaggtgccaacatccagctcctggaccttcctggaatcattgaaggcgcagcccaaggtgggaggcagggcaggaaaaggccgtggccggcaggtgatcgctgtggcgcgcacggctgacgtcatcatcatgatgctggatgccaccaagggagaggtgcataggtccgcagggtggggcatggggcaggctcacatgtctggggagggccaatgtgtccctgagctcgtactaggcggcctgtgggtgtttggctctctcacacgtgagagtagtggtaggacttgtcacagactaaacccaacaccacccagcctatggcgtcttctcctcaaggcttgtgtccagcn

SEQ ID NO: 2758 - DNA, 478 bp, Homo sapiens
  misc_feature (1)...(478): n = A,T,C or G
cgcccccatggngccccntnnnannaatggagacctatatgnagngncgnggaattcttgcccttcttggtgctcttggtggcctcggtcgagagccatctgggggttctggggcccaagaacgtctcgcagaaagacgccgagtttgagcgcacctacgtggacgaggtcaacagcgagctggtcaacatctacaccttcaaccatactgtgacccgcaacaggacagagggcgtgcgtgtgtctgtgaacgtcctgaacaagcagaagggggcgccgttgctgtttgtggtccgccagaaggaggctgtggtgtccttccaggtgcccctaatcctgcgagggatgtttcagcgcaagtacctctaccaaaaagtggaacgaaccctgtgtcagccccccaccaagaatgagtcggagattcagttcttctacgtggatgtgtccaccctgtcaccagtcaacaccacataccagc

SEQ ID NO: 2759 - DNA, 472 bp, Homo sapiens
  misc_feature (1)...(472): n = A,T,C or G
aaccagggagcatcagnannncnnttaaaatggctacgcacgagccgcggaatttcccgagtagctgggattacaagcaagcaccaccatgcccggctaatttttgtatttttggtggagatggggtttcaccttgttggccgggcgggtctcgagctcctgacctcaggtggtctgcctgcctcggcctcccaaggtgttgggattgcaggcatgagccaccgcacctggctgatggtgccttatcttttgctgctgggatggatgttctgcttgagccctaagtctgctgaccagcccttgcccctgagaaggggaagaggtaatggggagacaaggttggggagatggccttgcaggaggagcccagcaccccatcaagtttccagaggctggctgggctcggtggctcatgcctgtagtcctagcactttgggaggccggggcgggcggatcgcctgagttcaggagt

SEQ ID NO: 2760 - DNA, 467 bp, Homo sapiens
  misc_feature (1)...(467): n = A,T,C or G
aatcgagacccctagtccagngttgtggaactcagcttaatgtattctactcagaaagtagttaaataagactgtttctctaatatatattttagttgtaggaattaggaagtagcatcatagatgctcctacactaagctggccctgcttcctatgttaaatatgacacatctgaggccctgggagaggaagtgatttgcccagtctcacacaatgagttagagccagagtgaagtcaaaacccagtctctggatgtacaagcaaggtctttttctagtcccaaatggccttttgtggtggtccagggactgccgggagcagtcgtggaactgcatcatttacagaaggtctgatctttgagtcagagtcacagaagaattgagaatagctgttgggccttgggctgctggactgagatgacatgtggacatcaggatgacaaggcttctgaagcagaggctgggg

SEQ ID NO: 2761 - DNA, 442 bp, Homo sapiens
  misc_feature (1)...(442): n = A,T,C or G
ntttgacgacccttttgaagaccactagaccagcgccacaatctaatgaccactagtcctaccatctcagggacatccatttcctacctcagtaaagttgtcattagtctaactatgcattccatcctaacctatctgttctgagggattctgacacacccctctcctccttgtgcccccacaatgcttgcctcatggtacccctgtacctggtaccacacactcatacaaaggagaggtgaaggagtttagaatttatgctcctcagtattaagctcagggttgcttcctcctaagccagacatacccctgactccccacagtcctcttggctacaagggctcccattgagataaagattctctcactctcagagaccacccccattggtccagtgaagggaacacatgtcccatctcaagtgcatagagcgtgaccaagt

SEQ ID NO: 2762 - DNA, 488 bp, Homo sapiens
  misc_feature (1)...(488): n = A,T,C or G
aggggagcaagcggnntnccccnccaactgaganactgaggatcntncgaggaanccggaggngancggaagggactggctggagtgtggcgggctgacaggtctgaggcctgaaggacttccgggaaccgcaaagcacggtgtgcctccgctgtcctgaagaaaaagccgcgcgcggacgactggccggcccgcgcttgcagctcccagaagttgacaggcatcctccggtgaccggtgtgagtatggcatcaggatgatttgactgcaagcaacagaaaaatcaaacaaaaatggcctaagccaagaagagaaatgattatttcacattccaagaagtttgggagtcgagtggttaaacggctaattaatctagagctcaacagtatcacccaggacccattttcactatggtggctaaagctctgcaccctttatgcttgcaccatggcagcagcagtgacagtaaagacacccttacaccacan

SEQ ID NO: 2763 - DNA, 480 bp, Homo sapiens
  misc_feature (1)...(480): n = A,T,C or G
ntttggaatcccctattccagagtggaggaatttcgaggacgtatggcccgggagtgccccaccacgtggctttcaccccctgcaaagccagacttcgcccagcgacacagtgtcaagcccacagctctccaaggaggaagatggtccaggctgggagcatccccttagcagcagcctctgatcccttggccaagcaggagggaaccattagcagcctgaggagctggctggctgggagcctcggggaccgcccagccttgctcccagctcacccacaagatgtggacagctcttgtgctcatttggattttctccttgtccttatctgaaagccatgcggcatccaacgatccacgcaactttgtccctaacaaaatgtggaagggattagtcaagaggaatgcatctgtggaaacagttgataataaaacgtctgaggatgtaaccatggcagcagcttctcctgtcacattgaccan

SEQ ID NO: 2764 - DNA, 477 bp, Homo sapiens
  misc_feature (1)...(477): n = A,T,C or G
tgagttgccnnngtannnaacctagctnccccatttgagntctngnanaancnnannngtcagncactgntggctttgaagtggaggaaagggctgaaagccatttgcctctagaagttggaaaaggcgaggaagaggattctcccccgaagcctccgggaggaatgtagccctgatcatgcttgactggagcccagtgagactcattttggacttctcacttccagaactgaaagttgagaaaccggtggtgttttaagccacgaagttgatgacagttcgttacgacagcagcaggaaactaatgtaaaccctgtgccttgtgttattatccccctttacagatgctgccactgaggtcacagagttagtaacccaaggcagagccagtacgtggcagggctggttttaaattgagtcaggctggctctgggctgctgattacatttcccttttcactttggccactaggaagcg

SEQ ID NO: 2765 - DNA, 502 bp, Homo sapiens
  misc_feature (1)...(502): n = A,T,C or G
cgaagtgccnnnnnnaggggtggaactgaaaccnctnggaactcgacgaccntatgcagngncgnggaannctgcacgcaggtgcgcagccggcggctcatgaaggagctgcaggacatcgcgcgccttagctaccgcttcatctccgtggagctggtggacgagagcctgttcgactggaacgtgaagctgcaccaggtggacaaggactcggtgctgtggcaggacatgaaggagaccaacaccgagttcatcctgctcaacctcaccttccccgacaacttccccttctcgccgcccttcatgcgggtgctcagcccgcgcctggagaacggctacgtgctggacggcggcgccatctgcatggagctgctcacgccgcgcggctggtccagcgcctacaccgtggaggccgtcatgcgccagttcgcagccagcctggtcaagggccagggacggatctgtagaaaagctggcaaatcaaaaaagtccttcagtcgca

SEQ ID NO: 2766 - DNA, 491 bp, Homo sapiens
  misc_feature (1)...(491): n = A,T,C or G
agggggannttttgaaattgagtccatagtccgngtggtggaattcccaagaactggcacacggacgtgattgagatgaacgggatcaaagtggaattttccatgatattcaccagccgagatatgagcctgaagaggaccccgtccaaaaagcagaccggcgtcttcggtgtgaagatcagcgtggtgacgaagcgggagcgctccaaggtgccctacatcgtccggcagtgtgtggaggaggtggagaagaggggtatcgaggaggttggcatctacaggatatcgggcgtggccacggacatccaggcgctcaaggccgtcttcgatgccaataacaaggacatcctgctgatgctgagtgacatggacatcaacgccatcgccgggacgctcaagctgtacttccgggaactgcccgagccgctcctcacggaccgactctacccagccttcatggagggcatcgccctgtcagaccctgctgccan

SEQ ID NO: 2767 - DNA, 500 bp, Homo sapiens
  misc_feature (1)...(500): n = A,T,C or G
tggagttgcncngnannnaggggngnaatcgagacccctgnngaatggacggcccatcgcgcaccaccggntttcgacacgggagagcgacccttcgcctgcgcagaatgcggcaaggccttccgcggcagctccgagctgcgccagcaccagcgcctgcactctggcgagaggccgttcgtctgcgcccactgcagcaaggccttcgtgcgcaagtcggagctcttaagccaccggcgcacgcacacgggcgagaggtcctacgcttgcggcgagtgcgggaagcctttcagccaccgttgcaacctcaacgagcaccagaagcggcacgggggccgcgctgcgccctgacccgaggacgccctgagcgggaggtcgcggacacacggcattgcggggtctcgggcgtgagtgcgctgtctgctggcccagactttttcgggccgccggtgcgggcgccctcctgctgggagtgcaggggcggccttgggtgtggagat

SEQ ID NO: 2768 - DNA, 489 bp, Homo sapiens
  misc_feature (1)...(489): n = A,T,C or G
gtggtnnnttttgaaatttatgncgtgtggtggaattccccagagcaagaaaggcatcctcaccctgaagtaccccatcgagcacggcatcgtcaccaactgggacgacatggagaaaatctggcaccacaccttctacaatgagctgcgtgtggctcccgaggagcaccccgtgctgctgaccgaggcccccctgaaccccaaggccaaccgcgagaagatgacccagatcatgtttgagaccttcaacaccccagccatgtacgttgctatccaggctgtgctatccctgtacgcctctggccgtaccactggcatcgtgatggactccggtgacggggtcacccacactgtgcccatctacgaggggtatgccctcccccatgccatcctgcgtctggacctggctggccgggacctgactgactacctcatgaagatcctcaccgagcgcggctacagcttcaccaccacggccgagcgggaaan

SEQ ID NO: 2769 - DNA, 484 bp, Homo sapiens
  misc_feature (1)...(484): n = A,T,C or G
gggaaggaattgaaaaccntnggaactgatgaccctatccangngcnggaattctcctaacacacgagtcccctcaacatgggcccggccgtggaagcactgaggcgagttgcggggaagctggtggtagtgaggctggtggctcccacggagccagggcttggcaggccccacagttgtgcagatgctgagctagcagtggggctgtggtgggagcagagtctgtcccgccgtggcctaccccactccaccctgccctcgccgtgcggctatgtctagcagcagcctctgtaggtgtctggcaggacgggaacaccaggcctcatctggcctcccaaaagcttgggctcctggaggtgctactgtggggatctgtcttaggctgagtgtcagccggcggcaggtgaccgcctggcccttgcagtccctccaggaccaccacgaagcacgacgcacatcctggagctcgccataccggctccca

SEQ ID NO: 2770 - DNA, 461 bp, Homo sapiens
  misc_feature (1)...(461): n = A,T,C or G
attggaccctagcagngtggggaactccaacagccgacgccagtgaatattcgggcttcgatgcagcaacaacagcagctagccagtgccagaaacagaagactggcccagcagatggagaatagaccctctgtccaggcagcattaaaacttaagcagagcttaaagcagcgcctgggtaagagtaacatccaggcacggttaggccgacccataggggccctggccaggggagcaatcggaggacgaggcctacccataatccagagaggcttgcccagaggaggactacgtgggggacgtgccaccagaaccctacttaggggcgggatgtcactccgaggtcggggtatgataggtcggggaagagggggctttggaggccgaggccgaggccgtggacgagggagaggtgcccttgctcgccctgtattgaccaaggagcagctggacaaccaatn

SEQ ID NO: 2771 - DNA, 441 bp, Homo sapiens
  misc_feature (1)...(441): n = A,T,C or G
nttgaaacccttttgatgacctctagaccangnggtggaattctggagaaggccctggagtacctgcgccagatattccggctcagcgaagcgcatctcaggcagttcacactcgccttgggcaccacgcaggatgagaatggaaaaaagcaactccccgactgcatcgtgggtgaggacggactcatccttacgcccctggggcggtaccagatcatcaatgggctgcgaaggtttgaaattgagtaccagggggacccggagctgcagcccatccggagctatgagatcgccagcttggtccgcacactctttaggctgtcgtctgccatcaaccacagatttgcaggacagatggcggctctgtgttcccgggatgacttcctcggcagcttctgtcgctaccacctcacagaacctgggctggccagcaggcacctg

SEQ ID NO: 2772 - DNA, 485 bp, Homo sapiens
  misc_feature (1)...(485): n = A,T,C or G
tgagtgcccccngttannnaaaactgataccccgctacntggctangnanaaacnnnnaanttatgaggcccctgccgccggtcggcgatgtccggctggagctgtcgcctccgccgccgctgctgccggtgccggttgtgagcgggtctccaggcggctcctctgggcgtctcatggcctctagcagctccctggtgcccgaccggctgcgcctgccgctctgcttcctgggtgtctttgtctgctatttttactatgggatcctgcaggaaaagataacaagaggaaagtatggggaaggagccaagcaggagacgttcacctttgccttaactttggtcttcattcaatgtgtgatcaatgctgtgtttgccaagatcttgatccagttttttgacactgccagggtggatcgtacccggagctggctctatgctgcctgttctatctcctatctgggtgccatggtctccagcaattcagg

SEQ ID NO: 2773 - DNA, 390 bp, Homo sapiens
atcttctctggagtgacctgagtgtggccgtagcagggaagccaagctgactgctcatgaaatttctttattccatagctctaagcagctgcagcagtcacctacccccacctgtcccaccccagaattggggtcgcccctccccagccggacaggaagcctcacagatgaacctgcagaccctgccagagtgtcttcccgccagcgcctggagcttgtagcccttgtttactcctcgtgcattgctgagaacctggtaccaaacctcttcttggagcttttcttcgtctttcagctcctcactgcccggaggatggtgactgccaaggacagcgaccctgaactaagtccagctgtcctaggtcagtgagcaagcctccttttgagacg

SEQ ID NO: 2774 - DNA, 494 bp, Homo sapiens
  misc_feature (1)...(494): n = A,T,C or G
ggagtggcccagcgtaacanaancccagggtnngctagggtngaccccgcannngncgcggaantcatgagcagaagatatcagatggagaagcagaaaagagcacaaggagaggagaaattggggaacaaaagtgggcaacagaaggcctgggaggacagcacccccagggctctaagaagcggagtggctcatgttccatcttgcaggtttaagaactcctgaccttcaggattcataatgtccctcgccctgtgcggaccctattttaatgtccttttggcagcagactgttgttttgtcccatacgttcaggtctctgagccagtgtagaatccatcatggtttgatgtggcccgtctgggactgtgatattggcatagcttttttttttttttttggaacgtaaatgtttggcggggtgaattctttttcccaaaccatataattgggtttttgccccggggaaaaataagggccccatttttgaatcc

SEQ ID NO: 2775 - DNA, 428 bp, Homo sapiens
  misc_feature (1)...(428): n = A,T,C or G
cattgcatactttncnaccgngnggnggaattcggcatcggcatcgaggagctggacaccctgcagctggagctggagaccctgctgtcttctgccagccggcgcctgcgtgtgcttgaggccgaaacccagatcctcaccgactggcaggataagaaaggtgacagacgattcctgaagctgggtcgagaccatgaacttggagctccccccaaacatgggaagcccaagaagcagaaactggaagggaaggcaggacatgggccgggccctggcccaggacggcccaaatccaaaaaccttcagcccaagatccaggaatatgaattcactgatgaccctatcgacgtgccacggatccccaaaaatgatgcccccaacaggttctgggcttcagtggagccctactgtgctgacatcaccagcgg

SEQ ID NO: 2776 - DNA, 488 bp, Homo sapiens
  misc_feature (1)...(488): n = A,T,C or G
aggcggggnnnnggggnaattgagaccctaggccgattgagggcattcgaggaacaagccccagggaccctttatccgacttccttccacctgggggactccctccacgggcccttgctttaagggcaaatggcgagggcaccagaacacagggaggccatgccggaggtccctgctgcaaccatgcggccccccagctcactcccagcagccaagacgaaggggggcctgggctccccctagggcaggcgcctctgattctctccaccgagaggcacctcccatgccggcctcttcctggggtgactcccagaaccttcttggacccatgaacatttcaatctggggtggggccttccctgggcatccaagtggtgggaatctgtccctagcccctagaactcctggagggctgggcccacctctgtctgcatcccgtccccattccccgccccgggtggcangggctggagaggaaggagcttcan

SEQ ID NO: 2777 - DNA, 483 bp, Homo sapiens
  misc_feature (1)...(483): n = A,T,C or G
tgggcccggnaatcgagaccattggacagtctggtggaattcccagcctgggcgacagagtgagattctgtctttaaaaaaagaaaaagaaagaaagaaaagaaaagaaaaattgaaggggaagagagagaggaactgagatgaaaacactgagtgaggccaggcccagtggttgtaacatctgcagtcctagcacactgggaggctgaggcaggaagattgcttgaagcaagaaggttcaagaccaggacggggcaacaaagccagatgcccatctctataaaaaatttaaaaattagtggtggtgtgcacttacactctcagctgctctggaggccggggtgggaagatctcttgaggttgggagttttagactagcagggcaacttggggagaccccatctctacaaagggaaaataattggctgggcgtgttggctcacgcctgtggtcccagtattttgggaggccgaggtgggaaaa

SEQ ID NO: 2778 - DNA, 493 bp, Homo sapiens
  misc_feature (1)...(493): n = A,T,C or G
tgggtnnccccaggagggccnnaacatcgaaaccngtaaaaacgctaggacangccgtggaattcgaagctgtttccaagggtgcagatgagccttaggttccagccgcctgcagaccccaccccagcaggctcactcagcaaggagctctctgcccagcatattgcaggccctgttttgagtatggaagccagtgcctgtgtactcactgaaattgaagatgaggaaagtagctgtacactcactgaatgctcccccttactagatatttcctggagccagaaaggtatgcatgtgggtgtcttcacaccggggaggagggcctctcatgggaaagccctggccaccacaccggcctgtgccccttgaagcccaccaaagcggccctcacttgtggtcagtatatcagttatgacgcccattgcccagcttcagtccatccatgttagatggacagaaattatggccagttgaaaataccagctttggttgg

SEQ ID NO: 2779 - DNA, 482 bp, Homo sapiens
  misc_feature (1)...(482): n = A,T,C or G
gatacctgaaccatcngaannccttcctttagtctggcacnnggcnggaannncaangcatgagtggagattattgattatcatgtactctttactttaaaagagatttccatttcagcaactgtgagaaacattctctgtctatataatccttccgttcgatgatagttgatcctgaaccattatgagtcagacaatgaaagccctctcaacatgaatcatgatagacgcaagctgaaatgtgcatgacggtgtgtttgtgtacctctatatgtgagagcatgtcttcaggtgtgacttcaaaatctgtgatgatttacaattatactgagggatgaagctgactgggcagaaattacatcagagtgttttccactagtgtattttgcagccagttgacaagagcagcagtgtagacacattccaggcaacagatgtgaccttcttctttgaggtaacagccctgtcatatgacctttaat

SEQ ID NO: 2780 - DNA, 485 bp, Homo sapiens
  misc_feature (1)...(485): n = A,T,C or G
gcgatggaatgttcctcncangncaactgattccctngcgatctncgagacccgcaagatattctctgggaaggccttggatgtttgggccatgggtgtgacactatactgctttgtctttggctagtgcccattcatggacgagcggatcatgtgtttacacagtaagatcaagagtcaggccctggaattttcagaccagcccgacatatctgaggacttgaaggacctgatcacccgtatgctgtacaagaaccccgagtcgaggatcgcggtgcctgaaatcaagctgcacccctgggtcacgaggcatggggcggagcctgtgccgtcggaggatgagaactgcacgctggtcgaagtgactgaagaggaggtggagaactcaatcaaacacattcccagtttgtcaaccgagatcctggcgaagaccattatacgtgcacgctcctttgggaacccattcgagggcagccggcgagagg

SEQ ID NO: 2781 - DNA, 483 bp, Homo sapiens
  misc_feature (1)...(483): n = A,T,C or G
gaggccnnnnggtgccccaatgagaccanaatagagagccgtaggacagcgcggaggaactcccaggtccgccgcctcggagagggcaccacgtcactgcatccacaggggttcataagagagaggaggcactgtctccactacagcaactgcagccacgatgcagagcatcaagtgcgtggaggcgggtgatggggctgtgggcaagacgtgcctgctcatctgctacacaactaacgctttccccaaagagtacatccccaccgtgttcgacaattacagcgcgcagagcgcagttgacgggcgcacagtgaacctgaacctgtgggacactgcgggccaggaggagtatgaccgcctccgtacactctcctaccctcagaccaacgttttcgtcatctgtttctccattgccagtccgccgtcctatgagaacgtgcggcacaagtggcatccagaggtgtgccaccactgccctgatgt

SEQ ID NO: 2782 - DNA, 509 bp, Homo sapiens
  misc_feature (1)...(509): n = A,T,C or G
aggcggatannnnnnacnacttgaatgctntccgcangnncnnnnaactganaccactgcgaagagncgnggaattcctgagggtgtgatgggtgaagctgtcctgcagctctgagatccacgaggcagaggcagcagtagcgctggactccactgctttggaggctgcccagtcgaatttgggagccagcaagagtcctgacagcagcacattggccaccagaagacacccaaaggtagggaggcggcagatactgcttaagttcaggagctcctctggccattgctgacccaagttcccccagaggcatccacagcctggggctccttcctcctgcctagagtttgctttcctatgcccaggccccaaccaggaggactggctctgcctcgagtcctgatcccttcttctttccctgctgtttccagccggtttcttactttcctcctacctaccccaatgcccagttctgtttcctcctcttcttcccctaggctggctgaaaacn

SEQ ID NO: 2783 - DNA, 517 bp, Homo sapiens
  misc_feature (1)...(517): n = A,T,C or G
cgaggtgccnnnnnnnnnaggggggaaccttgaaannccnatgngancctcgacgacccctatgcagngngcnggaattcctggaatagaaacagtggtttgaagaccccactgccacctttatggactggcccctttgagtctgaatccccggcctctgtcacctgagacccaacccctagctgggccaactccagtgaattcacccatttttcttcttcagaaggcctttcctgtgtgagacccacatattttaaccttttgctcctatcccatttttaaagaattagagaataaaccaggcctgtttcttttcccctgaaatccctgcctctggcttcctaaacccatcatctaaggtgacagagcagtgctggaatagcatctcctttcactttcccaaaactgccacagatagctgccactggcatgctctttgattcctggaagcaaacgtgggactgtcggaggaaagggattgttctggtcttactcataactgggtggtttgagggtg

SEQ ID NO: 2784 - DNA, 483 bp, Homo sapiens
  misc_feature (1)...(483): n = A,T,C or G
agagggccncnccaatgaaactgaggcctgcgaagnngcgnggaattcgtacattgcacccatactgggaacgcccccaggatctgctgcgagacccccaaggaccagcttctgcagtcctggaagggctctcctgacccccaagtccgccatcttctgatggtggcaggtgggcacagtcactggctgagcgaccaagggtcagtgagattactaggccggcgctgcacccaactgaaatgaactcacgtgtcctcacaactcctagcagcagatgctgtcggcctcgcatcctacaggaaaggaaccatcgccaaaagacgctgaggaacatcccgagggtcacagggacagtgcagagccaggaccagcccggcccatggtcccccagcgtgcaccacctggcccggcactgtgtgctcagccatgaggactgggaagagtcctgcccacagctcaagtgtctacaccgcactgccatcc

SEQ ID NO: 2785 - DNA, 452 bp, Homo sapiens
  misc_feature (1)...(452): n = A,T,C or G
atcgcagaccctaattgatgcctntgagaacgncctgttggctgcaggactcagagcatggacaggtggatagtaaatcaccaccacggggacagccgtgcccagactgtgcgtttgcttagctcggggacagcacttggcccggggtctcctgctcgcctcccttcagagcatctgccaaacttcgggcatctaccctgcaattcccgcttggctgagaggagggggagaaggaggggaagagagaaggaccccacttcactccggcaggcagacctgctggagctgctttgcagaatgacttgggtcttgctggcccctgggtgtgcctggaggggggtcttcctatccccctccacctctccccttggtgcctaacccaggactttgtccccagagacccactgtgtgccccctggagctcctcctagagcagagtctgctgctgtctg

SEQ ID NO: 2786 - DNA, 503 bp, Homo sapiens
  misc_feature (1)...(503): n = A,T,C or G
cgagggccnnnnnnnagggggnccttgaancccatnngagcttgacgccntctgtanatnccgggngtggttatggccgaggcctacgggcttatctctcgcgagctctacttatggcttcgctttgacggcgacagtgacagcgacagccaaagcagggtccgaaaccaaggcgggctgccaggggctgttcaccagaacgggcgttgccggcctgagactggcgcggttggcgaagacagcgatggctgctacgtgcaacttccacgttcccggcctgccctggagctgacggcgctgacggctcctgggccgggatccggctcccggcccacccaggccaagctgctggctaagaagcgcgtggtgcgaatgttgctggtgatcgttgtgcttttttttctgtgttggttgccagtttatagtgccaacacgtggcgcgcctttgatggcccgggtgcacaccgagcactctcgggtgctcctatctccttcattcactt

SEQ ID NO: 2787 - DNA, 495 bp, Homo sapiens
  misc_feature (1)...(495): n = A,T,C or G
gcgaccgngnnnngnnnnaactggaccctggcagtggcnggcattccagaccatggnctcagggttttgactctgggaggagggctgccttatttggagcaccttaatctctctggttgtcttactataactggtgcaggcctgcaggatttggtttcagcatgtccttctctgaatgatgaatacttttactactgtgacaacattaacggtcctcatgctgataccgccagtggatgccagaatttgcagtgtggttttcgagcctgctgccgctctggcgaatgacccttgacttctgatctttgtctacttcatttagctgagcaggctttctttcatgcactttactcatagcacatttcttgtgttaaccatccctttttgagcgtgacttgttttggccccatttcttacaacttcagaaatcttaatttaccagtgaattgtaatgttgtttctcttgcaaattatacttttggtttagaaagggat

SEQ ID NO: 2788 - DNA, 496 bp, Homo sapiens
  misc_feature (1)...(496): n = A,T,C or G
agcgcnnnnnnnattgannatcgtagtccctagtccgtgtggtggaattcgttttaagttgttctgtctgaactctgctgtgatcccatgatgtgaccctgatgggctggacttgcccctccggtagccttccttggccctcccagcgaggggcacccttcctctgtgccccagtgggcatcaccgtcgatctcgctggctgaatgaagaagaccgtgttactgcagaacctgccaagtctgtcatcactgtggggtgtagcctgcctcagagggacctgcaatcacctctctgagctcagtggtattttgagaatttaatgtttaactgtacccctttccctcaggaagatttaacatttgcttgggaatgtgattttgctcccaccctaaggaatttttatcaccaaaatgaatgttaatgaatttaaaacccatggtttatcattggcaagaggcaagttgacttcatcctgtcattccagcctggggtctgc

SEQ ID NO: 2789 - DNA, 473 bp, Homo sapiens
  misc_feature (1)...(473): n = A,T,C or G
gggttcgagaacccttnnnangnnttcgaagtacctagtcagtgtggtggaattcgagtgccgggtctaggcctggaagcgcgaggcgggcatttcggaagagagtggcgcggcgtggggcgccgcgagggcactacgagcccaggaactgccgcgccggcccgattttccgcggctgtataaggactagcgcttcggtagccggggagctggagggaacctgatttgagatcaattcttggagaacacaaagaagtgtgatgaaatgatgacagagctaagttcacagttgaggaccacacaatgcaaagagattttagatggctgtgggtctacgaaataggctatgcagccgataacagtagaactctgaacgtggattccactgcaatgacactacctatgtctgatccaactgcatgggccacagcaatgaataatcttggaatggcaccgctgggaattgccggacc

SEQ ID NO: 2790 - DNA, 497 bp, Homo sapiens
  misc_feature (1)...(497): n = A,T,C or G
cgaggccngnnnnnngnnnncctgaaaccatatgaattganggcctncnnanacacgctggntagntactccctacctgaaagccttcataggtgcctctttgctcttctgccagtatcaaaacttttgaaggccttaaaggccctgctttgcctggcccatctgtctctccagcctcaccttgaactgtgttcctgtcactgcacgccagtcacaccggcctctaggtcctcctgtaggccactcttctttctggcacagggacctgcacacctggagtgcccttcctcccccactcgcctgttcacccctgcttttcctttacacctcctcctcagggaagtgcccaccctccgtacatctttcacagccctgattgcagctgtgttcactcaccacgtacctgcagaaggcctacagggtgccaggcacttctttaatgggttctttctttatgtgattatttgattaatctctgcctcccccactagactgta

SEQ ID NO: 2791 - DNA, 510 bp, Homo sapiens
  misc_feature (1)...(510): n = A,T,C or G
cgaggtccngnnnnnnaggggnaaattgaaacccttnngaatcgacggccntangaagagncgnggaattcagaatgcgccgggcaagggtgacatgcccactctcactgacaatgtccgtggccgcttctttctcatcatctatgagaacatcctcaagtatgtcaacctggacgcctggaaccgggagctgctggacaagtactgtgtggcctacggcgtgggcatcattggcttcttcaaggccaatgagaacagcctgctgagtgcgcagctcaagggcttccccctgttcctgcactcaaacctgggcctgaaggactgcagcatcaaccccaagtccccgctgctctacgtgacgcgacctagcgaggtggagaaaggtgtgctccccggcgaggactggacggttttccagtcaaatcactccacctatgagccagtgctgctggccaagacgcgctcgtctgagtccatcccacacctgggcgcagacgccggcctgcatgg

SEQ ID NO: 2792 - DNA, 497 bp, Homo sapiens
  misc_feature (1)...(497): n = A,T,C or G
cgcggcgcgnnnnagnnnacctgaaaccatcngaatgcgancatatgcangngcnggaattcgtctgtatctagttggtgctaactgctacgtgcttggcagggcatggcagggtcaccacctcagcaggcgtttgtcctcctccggcatgatgctaccctagctgcccaaggttctagcctgtgtatgttattacatggatttttttacacataaatacatagacttcaactcacttttctttttacaaagtatacaatataccttggatgtatttatatcccaagacagggttctcattctttttcatgtgttttactgtatgggtaatatgggtaataattttttttttttttctgagacaaagtctcgctctgtagcccaggctggannnnnnnncnnnaacctacntaantaaaatttccggctacacgttctaaaataattgcctctattccccataattgggaattctaagcttgcgacttttctccacc

SEQ ID NO: 2793 - DNA, 497 bp, Homo sapiens
  misc_feature (1)...(497): n = A,T,C or G
cgtgggccgnnnnaggggnaatcgataccttngaattgacggccatcccaccaccgagagcatcaagaggtcctgcccgtcttgggctgggttctcgctggcgttctccggggtggttggcattgtgtcctggaagcggccattcactctagtgatctccttcttctccttgctttcggtgctctgtgtcatgcttagcatggctggctctgttctctcctgtaagaatgctcaactggcccgagacttccaacagtgctctctggaaggaaaggtctgtgtgtgctgtccctctgttcccctcctccggccctgtccagagtcggggcaggaactgaaagttgcccctaactccacctgtgatgaagcccgaggggccctcaagaacctgctcttcagcgtctgtgggctcaccatttgtgccgctataatctgtacactctctgctattgtctgctgcatccaaatcttctccctggacctcgtgcatacgctga

SEQ ID NO: 2794 - DNA, 425 bp, Homo sapiens
  misc_feature (1)...(425): n = A,T,C or G
attgangacccctatgaagtgcggtggaattcggtcttacagggctggccacatggaggaggccaatgggttggtgagatggccataggaggccccggatcttggtcagagggaggaagacctgcaggggctccccctggtgaaatgccacgcaagaactccagagatggagctgaactggatcccgaagccaaccaggatgcccctgatgcgggtgccttacagagggggggtggtgacccacccgctatactgcctcattgtggggaatgagagtggggaggagagcgcccgcatcatgtagcctaaagctttccacacagtaggtcgtttgtacaaatgtgtctatagactacccatttctctcccatcaaacgtcactgctattgtaggtcacctgggttggatgaatgccccatgacaat

SEQ ID NO: 2795 - DNA, 514 bp, Homo sapiens
  misc_feature (1)...(514): n = A,T,C or G
agagtacgcagnnnnnnaggggnganacttgaaanccntgnngagctcgacagccntatgnagngngctggaattcgggtgtggaattcgtcgacttacgggctggccacgatggtgtccttgatccacttccggtaatgcaccaccttggtgtacagggaaggcctttcgggcagggcacatggttcactgccccatgacgtgataccttgaagcacaccattacagacaagtggggccccagaatcacccgagcaggtgcttttgccccctgtccagcgtccagcacacagcatgaacttggtcaccttctgagggtgaacttgcgcacacacgtcattggaaataacatggaggtccacacactgaagtttctttggggtcaagaactcctctggttcaatgctgccccagcctgaggcgtagcaggtggtccccagtgctggctcctgggtgggcaggtccatgaccttcacagcatccgtgagctcggcaggctctgacaggcggagcn

SEQ ID NO: 2796 - DNA, 471 bp, Homo sapiens
  misc_feature (1)...(471): n = A,T,C or G
tgccagcncgganaaanccttgatttcgattgcctagtccgtgtggtggaattcaagaagaattacaagagctcagggacggtagtgctggcccagtgcacggtggagaaggtgcacaccttcctggattacatcatgggtggctgccagatcagcttcacggtggccattgacttcactgcctccaatggggacccgaggagcagccagtccctgcactgcctcagtccccgacagcccaaccactacctgcaggccctgcgtgcagtgggaggcatctgccaggactatgacagtgataagcggttcccagcttttggctttggggctcgaatcccccccaacttcgaggtgtcccatgactttgctatcaactttgacccggaaaatcctgaatgtgaagagatctcaggggtcatcgcctcctaccgtcgttgcctgccccagatccagctctacggccccaccaat

SEQ ID NO: 2797 - DNA, 498 bp, Homo sapiens
  misc_feature (1)...(498): n = A,T,C or G
agtcggtgccngnnnnngnnnnnaaactgagaccctacgaattgacagccatncctggaangcaanngaccccattaaaaagaaagaccttcatcacagcaatggagaagagaatgcacaaagcatggataccctccctccagggaaagtacggtggccagactttaaccaggaagcttatgttggagggacgatggtccgctccgggcaggacccttacgcccgcaacaagttcaaccaggtggagagtgataagcttcgaatggacagagccatccctgacacccggcatgaccagtgtcagcggaagcagtggcgggtggatctgccggccaccagcgtggtgatcacgtttcacaatgaagccaggtcggccctactcaggaccgtggtcagcgtgcttaagaaaagcccgccccatctcataaaagaaatcatcttggtggatgactacagcaatgatcctgaggacggngctctcttggggaaaattgagan

SEQ ID NO: 2798 - DNA, 499 bp, Homo sapiens
  misc_feature (1)...(499): n = A,T,C or G
cgtgtcgcnnnnnnagggggatttgaaanctcttgcaattganggcantcggcatgctcttcccggcgtgtgtgtgtgtgtgtgagcccatccaggcatgctcttcccggcgtgtgtgtgtgtgtgagagagagcccatccaggcatgctcttcccggcgtgtgtgtgtgtgagagcccatccaggcttggcctttctttgccgtaatggacgcccctttctttgtccctcacactgggcatgtggtgtttccatccaaaatcaagacagggcgtctgtctgtggcatcagtgtccccaggcctggctgagggctcctgctcgtgactggccagctttctccattatattctatggggtgctggtcactgtcaaccagctgccccaggcatccggtcctgggccccgggcgtggcgattcccaggtgtgaatgtgaacgctctgcacggcaacagagagtcccttgcctgcctcgtcctctcagctgcagcccctgcgg

SEQ ID NO: 2799 - DNA, 487 bp, Homo sapiens
  misc_feature (1)...(487): n = A,T,C or G
gcggtaccattgagccctnnaactgagagcataggcagngnggnggaattccaacccctcgccctgccatcttcccctcaagcctgctaagttatcccaggcctgtgcgtggtggaaaaagccagccttggccctgcagcctccacctcgccgctgggggaccaacaggttgcttacagctttgcaccccggcatcagcacaggggtccctgccccaccctccggcagctcagggagtgttttcctgtgaggcctcccccatcagtggaccagagggagaagcccgatgccccatcccggctttcccgtaacgcacaggacacgtgtgcaattcataggaacggcccagatcgccctcatgagtgccacctggtacaggtaggtggcgctcacgttcctgcccaaatgcagcccatcggggagtcacagtcagtcccccccgcccccctcccagtccctgttggctttcggtagctctcgcatgcag

SEQ ID NO: 2800 - DNA, 479 bp, Homo sapiens
  misc_feature (1)...(479): n = A,T,C or G
gggagggattgaaaccctnnncctgagtacctatccangtggnggaattaaatggcggccccggcaggcggcggaggctccgcggtgtcggtgctggccccgaacggccggcgccacacggtgaaggtgacgccgagcaccgtgctgcttcaggttctggaggacacgtgccggcggcaggacttcaacccctgtgaatatgatctgaagtttcagaggagcgtgctcgacctttctctccagtggagatttgccaacctgcccaacaatgccaagctggagatggtgcccgcttcccggagccgtgaggggcctgagaacatggttcgcatcgctttgcagctggacgatggctcgaggttgcaggactctttctgttcaggccagaccctctgggagcttctcagccattttccacagatcagcccgtggaccgggagcccgtggaccgggagccggtggtgtgccaccccgacctg

SEQ ID NO: 2801 - DNA, 466 bp, Homo sapiens
  misc_feature (1)...(466): n = A,T,C or G
agacgccactgagaccntcgactgagcccgtatgaancncncgctagcaggaaggactagatgctgctgatcagctgatcatggctgagccgtgtagagcttggggctctcctaagaggtcacccactgggagggagcttcacagctgttcttttgacccaggaaggagctctttcaggactgtggcacccagagccgcggccctcctgccatgccattgttcccacttccctgcccttgggagtcttggagacagctgactagctgccctgaggggtccaccgctctcaccttctcactggaggctgctgccattctcctgggctctgcacagaaagctttggtccttctgaaagccactctgccccttcctgcagcaccagatccccctgagccggtactgctgcctccacctgggccaagactaggcttggtgttcacccttcttcgtgcttcagaaagtagg

SEQ ID NO: 2802 - DNA, 474 bp, Homo sapiens
  misc_feature (1)...(474): n = A,T,C or G
agggaggcaggggggcnnnnncctcgagttcatantcagtgtggnggaattccccatggctagacgctgaaaacccacctggttccggaatcctgtcctcagcttcttaatataaccgccttaaaactttaatcccacttgcccctgttacctaattagagcagatgacccctcccctaatgcctgcggagttgtgcacgtagtagggtcaggccacggcagcctaccggcaatttccggccaacagttaaatgagaacatgaaaacagaaaacggttaaaactgtccctttctgtgtgaagatcacgttccttcccccgcaatgtgcccccagacgcacgtgggtcttcagggggccaggtgcacagacgtccctccacgttcacccctccacccttggactttcttttcgccgtggctgcggcacccttgcgcttttgctggtcactgccatggaggcacacagctgcagaa

SEQ ID NO: 2803 - DNA, 487 bp, Homo sapiens
  misc_feature (1)...(487): n = A,T,C or G
gaggtaccatgggaccctnnaactgagagcatatgcagngngcnggaattccacacacacacacccctagagaaaagtacagatttccagtggatatttcaagcacagttctgctgctgtggcttcagctttggaagctgtcaatcccggagcaactttcccaactacccaaccccaccatggccaggacatgtgcaatgccagccccttcttgtctcggcacatgcacagacccagtcccctcacggtagggcacccctgacctacgggcttccaagagagcagctgcagtggttgggaggagcttgaccagtgtgccccaaggagtggagtagagcccaatctaagtattccttgctgcttggaaccctccctgtttggaaccctccccaaagaggcagtcaggctgatgctcagtgctttgtgctccctgctccttcccgcgtagccaggtgggcccaagggtgcctggcagggagcactaccn

SEQ ID NO: 2804 - DNA, 469 bp, Homo sapiens
  misc_feature (1)...(469): n = A,T,C or G
ngaggccgggccggntnnncctcgaccgcgtgcattnggcggaactaatgctggggcagccctggctgccaccggggggcacggcgccccatgccaggcggcactcgctgccgagtcctactgctcagtctcacctttggcacgtccatggcctgcggcaacgtgggcctaagggctgtgcccctggacctggcacaactggttactaccaccacacctctgttcaccctggccctgtcggcgctgctgctgggccgccgccaccacccacttcagttggccgccatgggtccgctctgcctgggggccgcctgcagcctggctggagagttccggacaccccctaccggctgtggcttcctgctcgcagccacctgcctccgcggactcaagtcggttcagcaaagtgccctgctgcatgaggagaggctggacgcggtgaccctgctttacgccacctcgctgcccn

SEQ ID NO: 2805 - DNA, 471 bp, Homo sapiens
  misc_feature (1)...(471): n = A,T,C or G
nattcgagacccctagtccagtgtggtggaactccaagaggcgatgcagagattatgatgaaagaggattttgtgtacttggtgacctttgtcagtttgatcatggaaatgatcccctagttgttgatgaagttgctctgccaagtatgattcctttcccaccccctcctcctgggcttcctcctccaccacctcctggaatgttaatgcctccaatgccaggtccaggcccaggcccgggcccaggtccaggcccaggcccgggcccaggtccaggtcctggccatagtatgagacttcctgttccccaaggacatggtcagcctccaccatccgttgtgcttcccataccaagtaagtatatatttgttgaatttttctctagcgttctgtttagaagaacctcatcccttttagctaacttgacactcgtttaaagtgtttgagaaatagagtaataatataatttgg

SEQ ID NO: 2806 - DNA, 231 bp, Homo sapiens
  misc_feature (1)...(231): n = A,T,C or G
atgcgggccaannaaanaccacntgctttgaaatgaccattccacagtttgagaatttctacagacagatcaaggaaattgctgcaattaatgaaacggcgtgaagacggattctttggtagataaattgctatcattctaaagtcatggacttcactttcggcaacaaaactaaataaggatgaacatttattgaatgaaaaatgcacttttgtttttccattattttaa

SEQ ID NO: 2807 - DNA, 480 bp, Homo sapiens
  misc_feature (1)...(480): n = A,T,C or G
nggaggccgggccnngnnnnnnattgaattgcttnccatagggagngngctggaattcctctcgagtccgggccgcaagtcccagacgctgcccatggaggcgtccagcgagccgccgctggatgctaagtccgatgtcaccaaccagcttgtagattttcagtggaaactgggtatggctgtgagctcagacacttgcagatctcttaagtatccttacgttgcagtgatgctaaaagtggcagatcattcaggccaagtaaagaccaagtgctttgaaatgacgattccacagtttcagaatttctacagacagttcaaggaaattgctgcagttattgaaacggtgtgaagacggattctttggttgataaattgctatcattctaaagtcatggacttcactttcggcaacaaaactaaataaggatggaacatttattgaatgaaaaatgcacttttgtttttccatttttttaa

SEQ ID NO: 2808 - DNA, 510 bp, Homo sapiens
  misc_feature (1)...(510): n = A,T,C or G
tgagtgtccnnnnnnnaggggngaattgaaaaccntngganatcgacgaccctantcagngngcnggaattcagattgggtgcttggccgtccctgccattagcgcgtaacgagagactgcttgctgcggcagagacgccagaggtgcagctccagcagcaatggcagtgacggcgttggcggcgcggacgtggcttggcgtgtggggcgtgaggaccatgcaagcccgaggcttcggctcggatcagtccgagaatgtcgaccggggcgcgggctccatccgggaagccggtggggccttcggaaagagagagcaggctgaagaggaacgatatttccgagcacagagtagagaacaactggcagctttgaaaaaacaccatgaagaagaaatcgttcatcataagaaggagattgagcgtctgcagaaagaaattgagcgccataagcagaagatcaaaatgctaaaacatgatgattaagtgcacaccgtgtgccatagaatggcac

SEQ ID NO: 2809 - DNA, 459 bp, Homo sapiens
  misc_feature (1)...(459): n = A,T,C or G
ggcggggggngggggggccttgaanccctngactgagaacctaggcagngngcnggaantcgngggcagcggccgtggtcctgtcagtggccaccttcctctaccaggtggctgagagggtgcgctactacagggagttccaccaccagactgccctggatgagcgagaaagccaccggctcatcttcccggctgtcaccctgtgcaacatcaacccactgcgccgctcgcgcctaacgcccaacgacctgcactgggctgggtctgcgctgctgggcctggatcccgcagagcacgccgccttcctgcgcgccctgggccggccccctgcaccgcccggcttcatgcccagtcccacctttgacatggcgcaactctatgcccgtgctgggcactccctggatgacatgctgctggactgtcgcttccgtggccaaccttgtgggcctgagaacttca

SEQ ID NO: 2810 - DNA, 507 bp, Homo sapiens
  misc_feature (1)...(507): n = A,T,C or G
tgagcaccaannnnnnaggggnagaattcgaaacccctnngagattgagggccntncttanagncgacccaggccttgaaagacaacaagagtcctctgcacctcgtgcagatgccacctgtgattgtcgagacagcccgtacccaccagcggtcttctagcgaggcctacacacagagctttcagagccggaagcccttcttttcatggaggtagctccaaaggcaggcagaggaaatattgtcagagactggtgggaggaagcctggggagtggtgtgcaagaaaagccagagaagccggtggagagcaccacctttaagagccctctctctctgcttgccaccctgctcagagctttccacccacagggagaagcacaatcaggaacagtgagtgctcctcgcccttctgatgtgggggaggctggagctccatgcacgtagtccagatgcctgggaaggaacatctcccttccagcatctgctggtagcaggctgagacagcn

SEQ ID NO: 2811 - DNA, 482 bp, Homo sapiens
  misc_feature (1)...(482): n = A,T,C or G
agcggttacattgagacctatangcaattgaggagcaattcgaganggacaaccatatgtcggataaggatgagagttgctatgacaatgcagaggcagccttcagtgacgatgaagaggatctcaacagcaaaggaaagaagagggagtttcgcttccaccctatcaaggagacagttgtggaggagccagatgatatcaccccttaccttgaccagttggatgagtccctgagggacaaagtactccagctacagaaggggagtgatacggaggcccagtgtgaggtcatgcaagaaattgtggaccaggtcctggagactttgagctcgagcagctgtctgtccttgcttcctgcctacaggagctcttcagggtcactttcgaggggaggtcctgcctgaggagattactgaggagtccctggaggagtctgtaggaagcctctgacctaatattangaacctatgtagatgcggaaa

SEQ ID NO: 2812 - DNA, 487 bp, Homo sapiens
  misc_feature (1)...(487): n = A,T,C or G
gcgggccatgggaccatnnaactggagaccataggccgngncgnggaattcggcagctaggggcagcagcttggatgcggaccctcagtcctcaggcagggagaaagaacctctgaagtaagccctcacctctgcaggtggggctcaggcccagagactgggatcagctggctcaggcagctcaggtcctggttcgtcccctagcccaggaggatgctgtgggagctgcagcagcggcaagagggagaatggggggaagcagcactagagaagtccttcagctcctacttaatggaagcctcgcagatgcaagatggctccagcaggcccagcatcacttcttctcagtgtcccaaagccagaagagaggctgttgtttttaaaagcaggaaaactttcctaaacttggccagaattgcatcacagaccctttcctaaaacaatttccagcaaagggaatagacttaccatgtctggtacagatgaa

SEQ ID NO: 2813 - DNA, 476 bp, Homo sapiens
  misc_feature (1)...(476): n = A,T,C or G
nnaaggccggcgcggnnnnnnaattgactgcatggcatcgngcnggaactcggtgtgaggagtagagccacgtggtgggaaactgttggtgtcttgtttgcgaatgactttggaacatagaccacctgataagcacagttaaggaaggaaaacacacagggacttcccagggagccaggaggacactgggggagcaggaacacctgcctttcccatggggccctggtgtgcccagccccccacttcatgtctgacccacgtgctctccggctgacctcctgggactcgcacctggcccccacttggtatctgagccacgtgcttcccggccctcacttggtatctgagccatgtacttcccggctgacctcccgcaacgtgaagactactctcgctcccttcaaggccactgtccccaccgcagccagagaggtgttttatagttcaaatcctgcccaggcaccatcttgtttaaa

SEQ ID NO: 2814 - DNA, 480 bp, Homo sapiens
  misc_feature (1)...(480): n = A,T,C or G
aggaggccggcccggnnnnnntttgaactgcgtaccataggcagngngccggaattccacctcatcaaaatacctttcctccaaggagctccgggtgcttcccaaacatggctgccaaggtgaatgggaacccccacagcacccctgtgagtggtcctccggcctttctgacccagggctggggcagcacctaccaggcgtggcagcagcccacacagcaggtcccaagccagcagagccagccgcagagcagccagcccaactacagcaaggcctgggaagactattacaaaaaacagagtcacgccgccagcgctgctcctcaggccagctccccaccggactacacaatggcctgggcagaatattacagacagcaggtcgctttctacggacagacgttagggcaggcgcaggcccacagccaggagcagtaggacagcgtcctcgtggccaactctcccctcaaaatcattgtca

SEQ ID NO: 2815 - DNA, 485 bp, Homo sapiens
  misc_feature (1)...(485): n = A,T,C or G
ggggnganaattgaaaaccctnngnactgagaacactatccangtggnggaattccacaaggtcctgaacccaccgggaggcaaatccagcatctccttctactaagagaagccactgctccacccggagccagaccagaaactcaagagatagggtagccatgttttcatttccttttgcccaaatgagcggggtgggaagagggttagtcttatgtgagcctggctgctcagcgtctcctggccgtcatgacagctgcttggagacccgtgccttccagatggctgggagatgcctctgtggggatgaaatggggcacccctggccatcactcatgtgtagtccaggtttgagaggaactggaaggggggtgagggtggggaggtggggcagggcatggtccttggatcaacagcccgccagctgattggatgtctaggaatgactgaaagaaaccaaaacaacctgtccactgctgctgtgg

SEQ ID NO: 2816 - DNA, 473 bp, Homo sapiens
  misc_feature (1)...(473): n = A,T,C or G
nctgagaccccttgcagttganggcattcccgngttcctgtggcctccaggctgctggaacagtgtagaactcaggacagccctgggctgagccaggaagtgcctccagccaggggggccctgggcaggtgccctccctgtgcttcagtttccctacctataaaatcagacccaccccatacacttggttgtcaatgaagacaacctggtacctgcaggatgctggcagtgccttgtccctgggggtgagttgtgacaaatgctgngttctctattgttactttttctccttctgtttgtcattccgaagtcgccctggcagcatacaagtggctggtttgctacctgctccgagagacttatcaaaaattaaaccaagagaaaagatcaggaagcagtgactttgaagcaaggaacaaatgccaggtgtcccacggccgtccgttggcgctggccttcgtggagctcacggg

SEQ ID NO: 2817 - DNA, 443 bp, Homo sapiens
  misc_feature (1)...(443): n = A,T,C or G
ggcccccnaggggnccctgaaccctggactgagcgtctccgcaggcgcgcctttacggactgggatccgcatctgcctgggatcatcaagccctataagctgggtttctttaaattacggctgccgttgtctgtttctccctgggctgcggaacgccagaagattctatctagcttatacaaggctgctggtgttccctctttttttccacgaggggggcgctcggctgcgacagcatgaaatcccaatggtgtagaccagtggcgatggacccaggagtctaccgactgagacatttttcaatttctttcttgtcatccttgctggggactgaaaacgcttatgtgagacttgataatagctcctctggtgcaagtgcggtagctattgacaaccaaactgagcgagctatggatctagtgaaaagccatttgatgtatgcg

SEQ ID NO: 2818 - DNA, 476 bp, Homo sapiens
  misc_feature (1)...(476): n = A,T,C or G
gggaggcagggcccggnnnnnnccttgactagcatancatcggcanggcnggaattcacacaatgagatccgcacggtggccgccggagccctggcctctctgagccatctcaagagcctggacctcagccacaatctcatctctgactttgcctggagcgacctgcacaacctcagtgccctccaattgctcaagatggacagcaacgagctgaccttcatcccccgcgacgccttccgcagactccgtgctctgcgctcgctgcaactcaaccacaaccgcttgcacacattggacgagggcaccttcaccccgctcaccgcgctgtcccacctgcagatcaacgagaaccccttcgactgcacctgcggcatcgtgtggctcaagacatgggccctgaccacggccgtgtccatcccggagcaggacaacatcgactgcacctcaccccatgtgctcaagggtacgccgctga

SEQ ID NO: 2819 - DNA, 492 bp, Homo sapiens
  misc_feature (1)...(492): n = A,T,C or G
cgggtaaaannnnatcgaanccctatcgtagtccactatcagtgtggtggaattctgtatagatgctgatgtacaattgtcgtgcatttgagtgaacacattgcgttcccagtccatgccataaatgatgctctcaagcaaaagactggaggctctgtcctgtgcagaagcagcagccagactcccgcattcgatgttgtgcagggaggtttgggggcggaacggattcctcccttggatccttcagttcccatcgaggaataacccgcagcagtggtggaggaaggtcagtggctgggtcctgagcttggtgttatttattgcatttgggtgcctgtcccctcagggcagcacagattctgaattctgattcacagtccctagccagatgggaactgggaaagagacagaaggcgtgtgggtgcttttgaaccctgtctcaaatgtttgggattttctctctcactattctttggctggggatgatgtccg

SEQ ID NO: 2820 - DNA, 494 bp, Homo sapiens
  misc_feature (1)...(494): n = A,T,C or G
ngggatagagaccctagtccagngnggtggaatttcctcgagcggccttgcactgaccgcagccggcccccaggcctcagagttctggatgcttccgtgcggctccaacaggcatcgtcttcccttccgcaggtggaggggccacttcccgcaggcatctgagttctgtgccggggccgtggccatgggaagatgttccacgctgcctcctcctcgagttttcctcggaaacactcttgaatgtctgagtgagggtcctgcttagctctttggcctgtgagatgctttgaaaatttttatttttttaagatgaagcaagatgtctgtagcggtaattgcctcacattaaactgtcgccgactgcaggcgcagtgactgctgaatgtaccctgtgtggcgacttggaatcaataaaccatttgtggatcctggggnnnnnnnnnnnnnnnnnnnnnnnnnnnnnnnnnnnnnnnanaanngagagggcggcctcc

SEQ ID NO: 2821 - DNA, 490 bp, Homo sapiens
  misc_feature (1)...(490): n = A,T,C or G
ngganngnnnnnnttttggaccatattcagtgtggtggaattccttctacaatgaagctgtcaattatgatacctgcaagcagtgtacacagtgcaaccatcgaagtggaagtgaactcaagcagaattgcacacctactcaggatactgtctgcagatgtagaccaggcacccaacctcggcaggacagcggctacaagcttggcgttgactgtgttccctgccctcctggccacttttctccaggcaacaaccaggcctgcaagccctggaccaattgtaccttatctggaaagcagacccgccacccagccagtgacagcttggacgcagtctgtgaggacagaagcctcctggccacactgctctgggagacccagcgccctacattcaggccaaccacctgccaatccaccacagtctggcccaagacttctgagttgccctctccacccaccttggtgactcctgagggcctgggcctgggccn

SEQ ID NO: 2822 - DNA, 499 bp, Homo sapiens
  misc_feature (1)...(499): n = A,T,C or G
agcgggtnnnnnnnnattgatcgcagtccctagtccgtgtggtggaattccaccttgtgcctgcactgggtgctgaagacgggacgaccactgtgggactgtcccctgtgacccggtgtctgggttgcagggaggcccccaggcagatcccctccaggatcgagtccccgagtcccctggtgacacagctctctccttccagggaggctgggaccatatctctgtccgggccaatgccaccagggccccccggagctcgtcccaggagcaggagccgagtgccccaccagaggcccatggccccgtctgctgctgaggcccccccacacacctacatgcagggacggtgcccagtttgggggatcaaggctgagccattcttgtgctggagtgtgcaccgtgggagcaatgtggcccaggtggactcaggagggaacctggccccaaggctgcggccacttcagaggcactggctgagacggccctgaaatggaagctn

SEQ ID NO: 2823 - DNA, 493 bp, Homo sapiens
  misc_feature (1)...(493): n = A,T,C or G
aggcggntnnnngnagactgagaccctagcagnactgagaccctcctacaagacgnggaattccacagggcacacatttgctgcctgtgtctcanagggtgggctcctcagcaggacactagagagggtggctgggtgatctcacctctcgggactgcggggttcgtgcttccgtctctcccggtggcagcaggaccagctgtcatggcaggcacacctgttgaccatgcgctgtcatgggcatttgccacgtccatccttggcttccgggtccctgtcctgagccgggcgtggccaccttgtgtctttcaggtggtgtataaggaggccgagaagagcccacagctgggactggggtgcctatacttcccaccgacccgggccggggccggccctctcccgagctcagagagtaaatgtaagtagcacatgtgatgccatttgctttccttttttaatgcaagattcctcgttgtccagataaacttcggat

SEQ ID NO: 2824 - DNA, 497 bp, Homo sapiens
  misc_feature (1)...(497): n = A,T,C or G
gaggggtnnnnnnnattgatcgcagtccatagtcagtgtggtggaattcgagcctcttggagatccggcagctggacccggacgacaggagcctggccaagtacaagcgggtgctgctggggcccctgccaccggccgtggacccaagcctgcccaatgtgcaggtgaccaggctgacactcctgtcggaacaggctccggggcccgtcgtcatggatctcacaggggacctggctgttctgaaggaccaggtgtttgtcctgaaggaaggtgttgattacagagtgaagatctccttcaaggtccacagggagattgtcagcgggctcaagtgtctgcaccacacctaccggcggggcctgcgcgtggacaagaccgtctacatggtgggcagctatggcccgagcgcccaggagtatgagtttgtgactccggtggaggaagcgccgaggcgtgcgctggttgcggggccctatctggtgagtccctcttcaccn

SEQ ID NO: 2825 - DNA, 486 bp, Homo sapiens
  misc_feature (1)...(486): n = A,T,C or G
gcggntnnnngnttatgagaccttagcagngtttggaactctaccagacaagatctgggcccaggcccctcacttgctgctgctgtctctttgacttacccatccgatgccagctttgcaaacgggcggtccactggcctcgtgctggacagtggagccacccacaccacggccattccagtacatgacggctacgttctgcagcaaggtggggcttcggcagggggtgggggtgctccaggaggaccaggtcctgacagtgccttccttctaggcatcgtcaagtcccctctggcaggggacttcatctccatgcagtgccgggagctgttccaggagatggccattgacatcatcccaccttacatgatcgcagccaaggtggggcctctggggacatggagctgccactagagtcctggccactcgccccatggccgtcaaccctctgacacatgagatatcagagcagagagcagcaggctc

SEQ ID NO: 2826 - DNA, 498 bp, Homo sapiens
  misc_feature (1)...(498): n = A,T,C or G
gcggggnnnnnnnnattgattgcgtagcctgtgtggnggaattcctacaagacgttaaagcaagtcatcgctggggttggggctttggagcaggagcacgcccagtataagagggacaagttcaagaagacgaaatatggaagccaggagcaccccatcggagacaagagcttccagaactacatccggcagcagtccgagacctccactcattccatttaaagtctgcgggacgcgcccagtggcgccagcaagctgcccatgcaaagccgcagcctttgggagggagaagagaaggaagagcgcacagccggcaaagtgagatgcacgccgtcccggcccatagacaagtggcgctggggtttccctctcccagaaccgctgtcaccaccgccacgccctccgaagaaagcccacctggccctgtggaacgtgtcgtcatttgattctgtgctttttgctccttggttgcggngatctggggatcagctgaaggat

SEQ ID NO: 2827 - DNA, 497 bp, Homo sapiens
  misc_feature (1)...(497): n = A,T,C or G
agcgnnnnnnngggagctgagaccntngnnanaattgatgaccctactccangtcgtggaattccccggctcgagccgggctcaggtcaggagttcgagaccagcctggtcaacatggcaaaaccatgtctctactgggaacacaaaattagccaggcatggtggcgcatgcttgtggttctggccgctcggggggctggggcaggagagtcgcctgagcctgggaggcaaaggttgctaggttgctgtgagccaaattcgcaccattgcactccagcctgggtgaaaagagcaaaactcatctcaaaaaaaaaaaaaaccccccccaaacccggttttggacgggagggggccatccattttttaagaaaaaatattaacgccgataagttgataggggaaaacccaatattcctcccgccacaggtcagcccaaaaaaaatatggtcgaatatcctttaacacaagaggttttttcctttagagaacaatgggtt

SEQ ID NO: 2828 - DNA, 494 bp, Homo sapiens
  misc_feature (1)...(494): n = A,T,C or G
aggcggntnnnnnnccatgagaccctatgcagngactgagaacccttactcccgggcccagctcctggaagagctccgccggctgaaggatatgcacaagagcaagtgatgcccccagcgcccccagcccagcccactccccgcatggggaggccgccaccaccaacacctcatcatccttctcatcgctaacaccaccaactccatcggcacccaagcgggcatcatccccccacactgctcatgggaggggagggatcaggcgatgagactgtgaggccaaaagaagggggcctgttggaggctgggaaccccgcagcgcgaggctgcctcatcaacggcaagaggaaaggaggggtctcgggacatctccagaccctaccaactgggagggtcccctcctccttccctactcctgggacggcagcaaggacatgggggctgctgttagcttctccgtcaggaggcctcatctcactgtagccctggaaccc

SEQ ID NO: 2829 - DNA, 496 bp, Homo sapiens
  misc_feature (1)...(496): n = A,T,C or G
agcggnttnnnngnatactgagaccctnngnanaactgagaccatcggcagtgtgctggaaatctttttcctgctttttccactcggtttggattgaggattgcagcccccccaggcttcccagcacattctgtaatgggttaccgccgcttttcagcaccgctttcgcgcccatttcattaatgctgtcctgtaaaattccacccattgcctgattcactaattgctggccttcggcgcgaacctgatcaatggctttatagtgaaacgtcaggccatcgctgcgcgtttcaataatgcggttcatctgctctttcacctgcgcatcaagtttggtcagacggctgcgcattttgctgctttcgcccatctcctgaacgataattttatccagagcaatacgggctttctcgacgcggcttttcgcgccttcatcaatccacggcagcgtgcttcgtagttcagcctgataatccttcgcctgctcgcgctgggc

SEQ ID NO: 2830 - DNA, 498 bp, Homo sapiens
  misc_feature (1)...(498): n = A,T,C or G
agggcncaannnnnnnattgatttcagtancctagnccgngnggtggaattcgatcgagtctaaatgggccgttcaagctcgcggaccaggcagggctgagccttctatttgccagccaactgctgggcgcacgcggcccgtgcatttcttgaccctgggaagcgcacactgcacggagcttttctagtaaagtgaggcaagctcatgagagtgcctgactgcgcttcattcaatagatgggctcatgacctgagctgaccactcagggaactccatgcctcctgcctgctgggatttcttcaggaatggcatgtgactcaaaatgggtgaatccaaacctccctaagatacggtctatggactctggtagaaataagtgtcttttcctctgggatcaagctgtgaggattatgtacccaggtgccaatagacacctttgccagtcacctgaagggagaaatctgctaaatgaaatcaacatacagagaacagcagag

SEQ ID NO: 2831 - DNA, 483 bp, Homo sapiens
  misc_feature (1)...(483): n = A,T,C or G
ntttgattcgctntccactagnccagggtggtggaattcccaggctattgcctctacttcatcccctacgtgttcctgagtgagtggatcacacctgaggcctgcacaggccccagcccctgtgctgtgtggctggcgggcggcatggcaggagcaatttcttgggggacagcgactcctatggatgtcgtgaaaagtcgactccaagctgatggggtttatttaaacaaatataaaggtgtcctggactgtatctcccagagttaccagaaggaaggtcttaaagtgtttttcagaggcatcactgtgaacgcggtgcggggcttccccatgagtgcggccatgttccttgggtacgagctgtcgctgcaggctatccgcggggaccacgcagtgacgagcccataagcgccaggtctttgctcaggctgtcccctctgcctgacatcctcttctcgctcctttcctacttgtccttggctt

SEQ ID NO: 2832 - DNA, 495 bp, Homo sapiens
  misc_feature (1)...(495): n = A,T,C or G
agcgggttnnnnggggaatcgagaccntatgnagngactgtagaactctaaaagcctctgacacaaaagcgaaagcttcggatctacatttccaatacgttcagtcccagcaaggcggaaggcgatagtgcaggaactgcagggacccctgggggaaccccagcaggggacaaggtggcttcctgggaactccgagtggaaggaaaactgctggatgatcctagcaaacagaagaggaagttttcttcattctttaagagcctcgtcattgagctggacaaggagctgtacgggcctgacaatcacctggtggagtggcaccggatgcccaccacccaggagacagatggcttccaagtaaaacggcctggagacctcaacgtcaagtgcaccctcctgctcatgctggatcatcagcctccccagtacaaattggacccccgattggcaaggcttgctggagtgcacacgcagacaaaggccgncatcatgcag

SEQ ID NO: 2833 - DNA, 496 bp, Homo sapiens
  misc_feature (1)...(496): n = A,T,C or G
agcgnntnnnngnagactgagaccctcggannactgagaacatccgccangncgnggaattcgagaaagggagaaagaaagcgtgcgacagggagtgggagccccaagtcaagaggagccccacagaggcagccctggacttcgggaccacagaggtgctgagtgctgcccgattctggatcccactctgcttagctcagaactttgtcagcgagcaagaacaatgccaggaggtctggagaaaacgtgtcatcagtgcatttctaaaatcgccagcaatgcctgcttcgttgttgtgctctgtgctttcctggctctgccgctgtccatgaccttcatagtgtcttccttgaataccctgggggaagagaatcctccagtccttgggatgcttcatttgttctttcttccaatgggatttctgagggtagaagactgtgtccacagaagctgacaacctgttctaggcaaattttgctccataaaactcataatn

SEQ ID NO: 2834 - DNA, 478 bp, Homo sapiens
  misc_feature (1)...(478): n = A,T,C or G
nggggttnnnnaaaatgagacctattgaaggcgctggaannccacggaggtgatcctccacccccacacctaccttgtgcatggcagtggtgtctcctggagctggtgagaccccacctcactcaggaaaccccccagacgcccccaggcagaagtggccatactccagggcctgcatccctgtgccccacagtgcgccctggccggttggttgtaggaactcagaaaagcaaagcaaacaggatggttccctgctggacacattacattccctgctggacacatttctattgcagatctttagtccaggattccagggtagccaaggtcacctgagtcctggggactctgggcctggtctctgaaagcagccagtaagacagagatgggaaacccagcaagatggagtgagccaagggcacagttgggtccaggcgcagcagggagctgcctgggggtgacacacacttgacggagg

SEQ ID NO: 2835 - DNA, 409 bp, Homo sapiens
caggaacttcagcacccacagggcggacagcgctcccctctacctggagacttgactcccgcgcgccccaaccctgcttatcccttgaccgtcgagtgtcagagatcctgcagccgcccagtcccggcccctctcccgccccacacccaccctcctggctcttcctgtttttactcctccttttcattcataacaaaagctacagctccaggagcccagcgccgggctgtgacccaagccgagcgtggaagaatggggttcctcgggaccggcacttggattctggtgttagtgctcccgattcaagctttccccaaacctggaggaagccaagacaaatctctacataatagagaattaagtgcagaaagacctttgaatgaacagattgctgaagcagaagaagaca

SEQ ID NO: 2836 - DNA, 423 bp, Homo sapiens
  misc_feature (1)...(423): n = A,T,C or G
gaccaccacgaagcacgacgcacatcctggagctcgccataccggctcccaggcctcaccctaggctctagggtgttgggcgccgcctcttcagggacctctggcccaggctccagttccctgcggatctgatgtggaggaaacagctgtttcctgggctttgcatccggcctagaagatcccgggtggagggacccatcaccctccgaggctcacacccactgcccacctctcctcctggcgctcgagtcccttgcctcattccttgggctgtctctggcacccatcgtttcggttgcctcctcatcctgaacgtttgcttttcttttctcaagaggaagttcagaagcagaaggaactttccaaagctgaaatccagaaagttctaaaagaaaaagaccaacttaccacagatctgaactn

SEQ ID NO: 2837 - DNA, 474 bp, Homo sapiens
  misc_feature (1)...(474): n = A,T,C or G
agcgccccaatagaaccccccttttgaganctcttcggaagngccgcggaatttcgtattcttaagcatggaataaattgctttattaacaggcaattaatttataattattttgaacagctctttggtgctgctggtgtcatgggtattgagcatgcagattttgcaggtgtggaacgcctagctcttgtcacaggtggagaaattgcctctacctttgatcacccagaactggtgaagcttggaagttgcaaacttatcgaggaagtcatgattggagaagacaaactcattcacttttctggggttgcccttggtgaggcttgtaccattgttttgcgtggtgccactcaacaaatttcagatgaagcagaaagatcattgcatgatgctctttgtgttcttgcgcaaactgtaaaggactctagaacagtttatggaggaggctgttctgagatgttgatggctcatgct

SEQ ID NO: 2838 - DNA, 452 bp, Homo sapiens
  misc_feature (1)...(452): n = A,T,C or G
nttcgagatccctagtccgtttggtggcattcagctcattgtgtgtgggaaactatgactcattcatcacaaacatgcaggcaatctgagcaggataggcccaggccctgcctcagcactggtagcaccacctatgcagtgtccacactgccagatcagtgccttcacctctgtgtaaaccaccaggtcttaccagtgctggtttaaacattcagcaccaaagccggtggacagcggaacatatgaggaagttctggggtgagattgaacactaagggcattgagcagctggacacagagggagcactaggggtatgggttcagcactagggacagcaggcagctgggcacaaaagggaggcactaaggtgtgtgttcagcaccaagaacagcaggcagcgggacacaaaagggaagtgctagggatgtgggttcagcaccagggacagcgg

SEQ ID NO: 2839 - DNA, 458 bp, Homo sapiens
  misc_feature (1)...(458): n = A,T,C or G
attcgaagacactagncctttgtatgtccttagtccagtgtggtggaagtcccggcctgtgtccccagccccgccaccaccaccaccacaaaagcacccaggctgctgcctgccccacgggcctacctagtccccgagaacttccgggagagaaaccttgagctcatccagtccatcagggacttcctgcagagcgacgaggcccgcttcagcgagttcaagagccactcaggggagttcagacagggcctgatctccgcagcccagtattacaagagttgccgggacctgctgggggagaatttccagaaggtctttaatgagctgctggtcctgctgcccgacacggccaagcagcaggagctcctgtctgcacacacggacttctgcaaccgcgagaagcctctgagcaccaagtccaagaagaacaagaagagcgcgtggcaggccaccaccca

SEQ ID NO: 2840 - DNA, 482 bp, Homo sapiens
  misc_feature (1)...(482): n = A,T,C or G
gaacggccccccaatgaaactganagcntgcgaagngccgnggaattccacaatcgtaaacacatgtaagctctcttcttctcgaaaaggtgctactgcaatgccctactgagcaacctttgagattgtcactgctgtacataaaccacctttgtgaggctgtttctataaatacatattgtttattaataagcaagaaaagaaggaagaccacggagaatatccccaaagttgttttagatttgtggctttaagaaaaacaaaacaaaacaaacacattgtttttctcagaaccaggattctctgagaggtcagagcatctcgctgtttttttgttgttgttttaaaatattatgatttggctacagaccaggcagggaaagagacccggtaattggagggtgagcctcggggggggggcaggacgccccggtttcggcacagcccggtcactcacggcctcgctctcgcctcaccccggt

SEQ ID NO: 2841 - DNA, 419 bp, Homo sapiens
cgccacgcgctgtctgatgggccactcggagatcgttgtgcagggattgtccggcgaggacgtgctggcccggccgcagcgctttgctcagctagagctctcccgcgccggcttggagcaggagctggaggccggagtgggcgggcgcttccgctgcagctgctatggctcggcgcccatgcatggctttgccatctggttccaggtgaccttccctggaggggagtcggagaaacccctggtgctgtccacctcgccttttcacccggccactcactggaaacaggcgctcctctacctgaacgagccggtgcaagtggagcaagacacggacgtttcaggagagatcacgctgctgccctcccgggacaacccccgtcgcctgcgcgtgctgctgcgctacaaagtgggagaccagg

SEQ ID NO: 2842 - DNA, 453 bp, Homo sapiens
  misc_feature (1)...(453): n = A,T,C or G
nattgactggactnctctanggcgngngcnggaattccgagttctcatgctggggcgaaaggaccgtccgccctctcggaagaggcgaatctcccactttagacgtctgggtgtgcgaatgccagttgagctgggcctcgaggacgcgtcacacacagcgaggatttgaggagggaagcgccttccagagcttcagagaagaggcagaagtgtgcaaacaggagcaggtccaagatttgcatggccagaagcaattcttgatcctcttggctagattcgaagatttggccacctccagacgctaccacactctgggacagtgggagatttggaacagctctgagaagagcaaggaaaagaaaatttggacatagactcatacagaggaaagatgatgtgaggacagacatctatgccacggaacaaggcccttccctcacagctctcagaagg

SEQ ID NO: 2843 - DNA, 456 bp, Homo sapiens
  misc_feature (1)...(456): n = A,T,C or G
nttggatgatccctagtccattcgagggcattccacgttaacacctaactctccttctttcttccaggggccgggctagagcgacatcatggtattccccttactaaaaaaagtgtgtattaggaggagagagaggaaaaaaagaggaaagaaggaaaaaaaaaaagaattaaaaaaaaaaaaaagaaaacccgaaaatgcccttgtgggaaaaaaaatattttttaaaaaaaaaatatccgggggagggggggaaaatcccatacctaactgctgaggagggacctgctttggggagtagggaaaggcccagggaggggggcaggggcctgtttattcactctggggattcgccatggacacgtttaaactgcccaagctgttgcccatgtttccctgccccacttcacccccttgggggctgctcaagggtaggtggccgtgggtggtagaagt

SEQ ID NO: 2844 - DNA, 460 bp, Homo sapiens
  misc_feature (1)...(460): n = A,T,C or G
tggggctgnnnnnnnactgagttgcctatcntgtgncgnggaattcaaaaaggaagaaccagagcctgaaacagaagcagtaagttctagccaggaaatacccacgatgcctcagcccatcgaaaaagtctccgtgtcaactcagacaaagaagttaagtgcctcttcaccaagaatgctgcatcggagcacccagaccacaaacgacggcgtgtgtcagagcatgtgccatgacaaatacaccaagatcttcaatgacttcaaagaccggatgaagtcggaccacaagcgggagacagagcgtgttgtccgagaagctctggagaagctgcgttctgaaatggaagaagaaaagagacaagctgtaaataaagctgtagccaacatgcagggtgagatggacagaaaatgtaagcaagtaaaggaaaagtgtaaggaggaatttgtagaagaaatcaag

SEQ ID NO: 2845 - DNA, 468 bp, Homo sapiens
aatgatcaccctttgattaacactaggacagtgcggtggaattccccggcgtcgagccggcccctaaaaaactggagtacgacagtggtagcttgaagatggaacctgggacttctaaggggcggagggagcggggggagagctgtgatgattcatgcaagggtggagaactgaaaaagcccatcagcctgggccaccctggttccctgaagaagggcaagaccccacctgtggctgtaacttcccccatcactcacacagcccagagtgccctcaaagtcgcaggcaaacctgagggcaaagctacagacaagggtaagcttgcagtgaagaatactgggctccaacgctcctcctctgatgctggtcgggaccgcctgagtgatgctaagaagcccccctcgggcattgctcgcccctccacttcgggatcctttggctacaagaagcctcctcctgccacaggca

SEQ ID NO: 2846 - DNA, 412 bp, Homo sapiens
  misc_feature (1)...(412): n = A,T,C or G
ggctaggtttagacgaatagagaaaatggagcagcttgtgctttttcttgtattcattgatttgagagggattcttgtgtattgggtatttcttatttatttagggttgagacaaagcctcactctgtcgcccaggcggaagtgcagtggcacggtctcggctcactgcggcctctgcctcccgggttcaggcgattctcctgcttccgcctcccgagtaactgggaccgcaggcatgtgccaccacgcctggctaattttttgtatttttagtaaagatggggtttcgccatgttggccaggatggtcttgatctcctgacctggtgatttgcctgccttggcctcccaaagtgctgggattacaggcatgagccaccacgcccggcctgattactttnttaaagctgtcg

SEQ ID NO: 2847 - DNA, 460 bp, Homo sapiens
  misc_feature (1)...(460): n = A,T,C or G
nattgaagatcgatannccgtgcggnggaattccatggctgctttagggactgttctcttcagtgagtgggtatagatagggaccgtggactcgggggccctttggggacgggcacaggacccctgatccggctgcgcggcctctcccccaactctgctctgttctcccagcaggtgtccggaggctgcactgcagcgcagccgcttgggcgggcggccagtggcgactacagcagggactggctgccaacccctccggctacgggccccttaccgagctcccagactggtcatatgcggatggccgccctgctcccccaatgaaaggccagcttcgaagaaaagctgaaagggagacgtttgcaagacgagttgtactgctgtcacaggaaatggacgctggattacaagcatggcagctcaggcagcagaagttgcaggaagaacaaaggaagcagga

SEQ ID NO: 2848 - DNA, 460 bp, Homo sapiens
  misc_feature (1)...(460): n = A,T,C or G
nttgaccctgatgaccattacaccangcggnggaattccttgcgagctgcagtgccaggtcaacccctagctctgactgcccgtggtggccccaaggacacccagcccagctatcaccatggcaatggaccttacaacgacgtggacatccctggctgctggtttttcaagctgcctcacaaggatggtaatagctgtaatgtgggaagcccctttgccaaggacttcctgcccaagatggaggatggcaccctgcaggctggcccaggaggtgccagtgggccccgtgctctggaaatcaacaaaatgatttctttctggaggaacgcccataaacgtatcanctcccagatggtggtgtggctgcccaggtcagctctgccccgtgctgtgatcaggcaccccgactatgatgaggaaggcccctatggggccatcctgccccaagtggtgactgccg

SEQ ID NO: 2849 - DNA, 483 bp, Homo sapiens
  misc_feature (1)...(483): n = A,T,C or G
nttgcggctcncaactgataccactgctgagtgtgccgtaattcgggtgaaggtgacccgccggggccggcggcctgtgctcccccggactgaggcagccagcttgcgggtgctggagagggagagacggaagcgcagccgaaaagagctgctcaacttctacgcctggcagcatcgagagagcaagatggagcatctagcgcagctgcgcaagaagttcgaggaggacaagcagaggatcgagctgctgcgggcccagcgcaaattccgaccgtactgagctgtgagagccgcantgaatggctggaggtgcanggccaggaggaggcgaggcanggcctgcagcggtctctgagaggccgagctctggccaacgggccccatgttgaaggccaccgcgtncaacagccccatcagagtccacacaggccaggagggaaggaccaggccacccctcgggtcttgtgcttcagcaagtcctgg

SEQ ID NO: 2850 - DNA, 453 bp, Homo sapiens
  misc_feature (1)...(453): n = A,T,C or G
naattgatagcgtncgataggcangngccggaattcgatcgcttgagcccgggaggcggaggttgcggggagctgagatggtgccattgcgctccattctgggtgatacagccagactctgtctcataaaaataaataaatacataaataaaatataaaataaaaagattcaggattccaccaaaacacaaagactctgctgtggtagcctcaccacttactagcttgcctctcctccctccaaccctccccccacaaaaagagaatacattaccctgtaagaataatttgaagtaaaaagcatttaaatgtaaatgcagcatgagtttttattcagctaaaagaatccagctgtttttctttccagccatattaattacgagacactggtgggggatcctggggtttcccagtggatttggggtttgagatgttttgcacagagccgggctt

SEQ ID NO: 2851 - DNA, 458 bp, Homo sapiens
  misc_feature (1)...(458): n = A,T,C or G
tggggctnnnnnnnaactgagtagcctatcaattgncgnggacttccgaaaaagactgtggatgacctgcaggccaaactgaccctggcaaaaggcgagtacaagatggtcctgaagaacctggagatgatctcagatgagatccacgagcggcggcgctccagtgccatggggcctcggggatgcggtgttggtgctgagggcagcagcacatctgtggaggatctgccagggagcaaacctgagcctgatgccatttctgtggcctcggaggcctttgaagatgacagctgtagcaactttgtgtctgaagatgactcggaaacccagtccgtgtccagctttagttcaggaccaacaagcccgtctgagatgcctgaccagttccctgcggttgtgaggcctggcagcctggatctgcccagccctgtgtccctgtcagagtttgggatgatgtt

SEQ ID NO: 2852 - DNA, 460 bp, Homo sapiens
  misc_feature (1)...(460): n = A,T,C or G
agagtgcgnnnnnnntttgcctgcattacctatgcagtgtcgnggaattctgagtatctttggccccttttcacctactgcgaccacccacctcatcctggctcagcctggtgatggagaagtgctgatggtcttggtcccagccagggtcgtgggggcagccactctctccaaagcatagtcataggtgtcatgaaaaaataccaaatgtaagagaacctccaagtcagggcgcagtggctcacccctgtaatctcagcactttgggtggccaaggcgggcagatgacttgaggtcaggagttcgagaccagcctggccaacatggtgaaaccccgtctctactaaaaatacaaaaattagtcaggtgtggtggacgcctgtgatctcaatctcagctactcgggaggctgaggcaggagaatcacttgaacccaggaggtgttgcagtgaaccaagat

SEQ ID NO: 2853 - DNA, 471 bp, Homo sapiens
  misc_feature (1)...(471): n = A,T,C or G
naaggagccgngctgnnnnnnnaaccgactagcgactcntcgnccnggacnnaaggaagnanaagatggtctgatgctacaggacttggtttcagctaagctgatttcagattacactgttaccgagatccctgataccattaatgatctacaaggttcaactaaggttttgcaagcagtgcagtggctggtttcccactgcccccattcccttgacctctgctgccagactctcattcagtacgtcgaagacgggattggccatgagtttagtggccgctttttccatgacagaagagagaggcgtctgggcggtcttgcttctcaggagcctggcgccatcattgagctgtttaacagtgtgctgcagttcctggcttctgtggtgtcctctgaacagatgtgtgacctgtcctgtcctgtcactgagtttgctgaggcagggggcagccggctgcttactcacctgcn

SEQ ID NO: 2854 - DNA, 471 bp, Homo sapiens
  misc_feature (1)...(471): n = A,T,C or G
ngggaggcgggcngnnnnnacctgatagcgtgcataggcacngngcnggaattcggatcggccagagttactccgaggtgatgagcctcaacgagcactccatgcaggcgctgtcctggcgcaagctctacttgagccgcgccaagcttaaagcctccagccggacctcggctctgctctccggcttcgccatggtggcaatggtggaggtgcagctggacgctgaccacgactacccaccggggctgctcatcgccttcagtgcctgcaccacagtgctggtggctgtgcacctgtttgcgctcatgatcagcacctgcatcctgcccaacatcgaggcggtgagcaacgtgcacaatctcaactcggtcaaggagtccccccatgagcgcatgcaccgccacatcgagctggcctgggccttctccaccgtcatcggcacgctgctcttcctagctgaggtggtgctgn

SEQ ID NO: 2855 - DNA, 457 bp, Homo sapiens
  misc_feature (1)...(457): n = A,T,C or G
tgggctannnnnncctgagtagcatgcgattgtcgtggaattcctcagcagacctgttgccacggtgactgaagcccccagctctgtctgtagagaaacgggatgggtgggggagcaggttggagaggggaccaaaggcaggcctgtcgtgctgaagctcttggggaccgtttcctcggcatttccccaactccttctccacccccctgccaggcccggaagtaccaccagcttcctaagggatgcaggaaggggccgggtgaactgaggtgaagtccagggcaggggagtcagacccctcaacatcctgtttaggggtcctcctccacaaagggtgccctccacctctccctcctgctggttggccggctcaaagatgaagggggagagatggtggctccaaggctctgccaccgccaccttccaagcctgccaacgtgaatggcttgcagaatca

SEQ ID NO: 2856 - DNA, 458 bp, Homo sapiens
  misc_feature (1)...(458): n = A,T,C or G
gggtgcganaaantttgaattgcattccctaggcagtgtcgtggaattccaagcggcgcgacttcacccccgccgagctgcggcgcttcgacggcgtccaggacccgttcatactcatggccatcaacggcaaggtgttcgatgtgaccaaaggccgcaaattctacgggcccgaggggccgtatggggtctttgctggaagagatgcatccaggggccttgccacattttgcctggataaggaagcactgaaggatgagtacgatgacctttctgacctcactgctgcccagcaggagactctgagtgactgggagtctcagttcactttcaagtatcatcacgtgggcaaactgctgaaggagggggaggagcccactgtgtactcagatgaggaagaaccaaaagatgagagtgcccggaaaaatgattaaagcattcagtggaagtatatctat

SEQ ID NO: 2857 - DNA, 482 bp, Homo sapiens
  misc_feature (1)...(482): n = A,T,C or G
ccgcgccccccatagacnccatcgtagtccctaggcagtgtggtggaattcaagacaatccatgctctaagatccattttagatcaatgtctaaaatagctctatcgctctgcggagtcccagcagaggctatggaatgtttctgcaaccctaaggcacagagagcccaaccctgagtgtctcagaggccccctgagtgttccccttggcctgagccccttacccattcctgcagccagtgagagacctggcctcagccctggcagggctctctcttcaaggccatatccacctgtgccctggggcttgggagaccccatagggccgggactcttgggtcagcccggccactggcttctctctttttctccgtttcattctgtgtgcgttgtggggtgggggagggggtccacctgccttacctttctgagttgcctttagagagatgcgtttttctaggactctgtgcaactgtcgtatat

SEQ ID NO: 2858 - DNA, 473 bp, Homo sapiens
  misc_feature (1)...(473): n = A,T,C or G
ngggaggcggccngnnnnnnaattgaatagcctcctataggccgngngcnggaattcctggtcgtcactgcttggcttgcggggggtgggagataggggtgcgtacctgtaggcctgggggcacccggggcgggggggtggtcgccgaactctgtgcgatcactggaggaagggactgggggtcatttgagggatgaggaaatggagagggggcgccgcagccggttttgaggcccaaggggcagcccccacgtggctgcgcggactccctccggaagtgcccgagttcagatgctgtgtgaccgcgcacgtggggcgagcggcgccctctctgaacctcctgcctctcccctgtctagtggggccccagtgcacttgtaaagtggagagacctgacgaccccccacccccaagcgctccactcacgctgttgtgattcctaaaccatcgtgcccggaactcagtgaagctcc

SEQ ID NO: 2859 - DNA, 463 bp, Homo sapiens
  misc_feature (1)...(463): n = A,T,C or G
atagacaaccgtgatnaacctcggaagngcggnggaattcgacaagtgcccgctggtcggctcctccgtgccctgggccttcatgcattgcgagattttcaccatccttgctggagacatcagagttaagaaagaacgggacccctaggctaccactgcctccaggctactgccctctgcccctttgccacccaccgctgccgcggataaattattccctccccgacccagcccagtgccacctctatctgtgtacatactcccttcttccacccagatgggtcccctggggtagatgcattgtgggtggggggagaaagcttgtggctcctgtccgagggggtgtttggggtcccttggcccctccagtttccctctgtcctccttggcttggctttgctgctgcttgtagttgggggagaggtgcccccctcctccttgagaagggacctcctgaatactn

SEQ ID NO: 2860 - DNA, 550 bp, Homo sapiens
  misc_feature (1)...(550): n = A,T,C or G
gatactggtcaacggtgtgttgagctangagtccgagcagtgaagaacgatcgaaagcgtatctcagagggagaagcagcaaacaaaattcgagnacactttgataacactcgcgaancgccanggaaagcataactgggtatcagacaggtgcacacccaggaatccaagggaacctgaacagcttctattcccagcagggggttccagccagcatcacattttttagtccctctggcctcacatacagtctcaagcacattcaggagttatctggtgacaatatcgatcaaattaagtttgcagccatcggccccactacggctcgcgcgctggccgcccagggccttcctgtaagctgcactgcagagagccccacgccacaagccctggccactggcatcaggaaggctctccagccccatggctgctgctgagtcagccacctagcgctggccccatgcagcctccctgggctgggctggctctggatggagccaggcatcggcaagggctctcgggagctgctgccgtcagactcctgcctcag

SEQ ID NO: 2861 - DNA, 465 bp, Homo sapiens
  misc_feature (1)...(465): n = A,T,C or G
atggacaacctgcgtagtacctacggaagngcggnggaatncacgggagactggtagtcggcgtgcagcttggcagtggccacagctggtgccacccatttgtggtcagtaaagagcgccagcagggttttgcggcgcatttcgccattgtcccggtcggcccagtctgtgtacataaacttgatggtctcccgaagcacatccttgccttccgggtagccatacaggttgtccacaaagttggagacagtgaagtcaaaggcgctggcagacacaccgtcctcgctctctgcagagtcctccacgaacttgaggccctctccctggttgacgccgatgagcatgtcgtagttgaggaattctccctgctgcatgaggatctcatggtcatcggggaccacgtcgccatccaccacgggcccaaaggcgatgtggtagcgggcaggctgcacgtcctggtccacg

SEQ ID NO: 2862 - DNA, 469 bp, Homo sapiens
  misc_feature (1)...(469): n = A,T,C or G
nnaaggcggccggnnnnnaactgactgcgtagcattgngcnggaacncgaggggaagaacgaggacaagaaggggaaattcaagttcatgttcaacatcgcggacgggggcttctcggagttgcacacgctgtggcagaacgaggagcgggctgctgtatcctctgggaaaatctacgacatctggcaccggcgccatgactactggctgctggcgggcatcgtgacgcacggctacgcccgctggcaggacatccagaatgacccacggtacatgatcctcaacgagcccttcaagtctgaggtccacaagggcaactacctggagatgaagaacaagttcctggcccgcaggtttaagctgctggagcaggcgttggtcattgaggagcagctccggagggccgcgtacctgaacatgacgcaggaccccaaccaccccgccatggccctcaacgcccgcctggctg

SEQ ID NO: 2863 - DNA, 446 bp, Homo sapiens
  misc_feature (1)...(446): n = A,T,C or G
ntttcgagttacactagcccattgtggnggaattcgaacccccttgctccctgctgccttgtcaggccccttgggcttctgacccttcctggttctggggactggaggctggggctggtaactgaaaggaactttcttaccgtagttggaggctttgttcattaggctgtttttctccttctccagggacctcctgtgaggggaaaggagcttcatggaccaaacccttttccttttccccacccgaggggcagctggcatgccagttggcagggcttgggtcttgttcggcggcagggggggcgtgcactgaagctaagatgtcagggacccaaacccttttgctcaggcctactttgggggacccaggatagatacagggggtgggggcctgatggggaagggtggggtggctgggcaggagcattacctggcctctgggctca

SEQ ID NO: 2864 - DNA, 484 bp, Homo sapiens
  misc_feature (1)...(484): n = A,T,C or G
agagggcnccgcaatcgagacccttggacagtctgttggaattctgcacatatgcaagccatttgcactctggaactgcatgccgagaaaactcctaatggtgtggaacttagtttgaatttgaaatcacgccgcatgcacaaagggacaggcccaggcccgacctcaggtcatccgcccgctggctgcagagcatccctgggagccaaggcgaggcccgtggagcctgagctttgtgtagctcgagctttgcgtagctcgtgcacttattatgcaccacctcccttcagtcaccactcctcttcctccgccatcctcatttatactgattgcacaccccccgctcaaacaacaatgtccttattatgatgaccatctcgtagtggtacattccattcctatttaaggtaagcccaaagcccacttttggattttctcgactgtccgagaaaagttgtgtaagcgcctgcgctcttctgggttn

SEQ ID NO: 2865 - DNA, 483 bp, Homo sapiens
  misc_feature (1)...(483): n = A,T,C or G
gaggggcngnaatcgagnccatcgagacctactatccagtgtggtggaattcgtggcatgggcggaagtgaccgtggtggcttcaataaatttggtggccctcgggaccaatgatcacgtcatgactccgaacaggataattcagacaacaacaccatctttgtgcaaggcctgggtgagaatgttacaattgagtctgtggctgattacttcaagcagattggtattattaagacaaacaagaaaacgggacagcccatgattaatttgtacacagacagggaaactggcaagctgaagggagaggcaacggtctcttttgatgacccaccttcagctaaagcagctattgactggtttgatggtaaagaattctccggaaatcctatcaaggtctcatttgctactcgccgggcagactttaatcggagtggtggcaatggtcgtggaggcctatggcgaggaagacccatgggccgtgga

SEQ ID NO: 2866 - DNA, 478 bp, Homo sapiens
  misc_feature (1)...(478): n = A,T,C or G
nggggccatggccttggaactgaggcatccggagnnccagngaggcttggaggcaccaaacacccaaggtgggcagggtgggcaagcggggaggagaagactccaagcaacacccagggccagggttggctggcctaccctgttcccctccccagcaggtgaagttcaggtgaaatcacagcaagtcccacctaggagggaaagggaagtcgtacaggttcagcccatcacaggaaagtagccagtcacagagctggaagggatctgagagggggccttcagcccagccttccacctgcacaggctttccttctgcagtgccagggccgtgggtgggaggagccacaagtgtcctgatttacatgaaccccactcactggctcctcttcagccagccaccaaatcttcacaacgagggcttgtggggggtcccatagccgtatgatttgtaactcacatctgcaacagtggaacactt

SEQ ID NO: 2867 - DNA, 473 bp, Homo sapiens
  misc_feature (1)...(473): n = A,T,C or G
ngggggcggccggnnnnnnaattgaatagcgtngcataggcangngcnggaattcgcagctgtgagcagtgccgagggaggaccagctctgacggtgaggtcgggtgggggactataatccagcagaggagcgagggcagggctcctaccaggaaacccatagcattgacactaactgagaggcagcaaaggcggtgacactcccccaggctctgtgggcccagccctacccctgaagcacagttaactggttctggggtaggaactgggggccggagggacagggttctggttctggctcaaccttggctgctggtgagatccagggcctgggaaagaggggctgaggcctgaactgggcctaaggagagtgcagctcagttcgcacacaacagcacccagccctgtccccttgctgcctctacccagccctgggcagttccctcaacagagctctgcagccccaagtggcn

SEQ ID NO: 2868 - DNA, 480 bp, Homo sapiens
  misc_feature (1)...(480): n = A,T,C or G
agaggcccccnaatgagaccatggccatctggtggaattcagggtggattgtagggccaggaaccagttgtaggtgtgggggagtggggtctgatcccaggggagggcagcaggataaagagcagagctgggggtgaaaattcccaagaacgaagaagtagaaggacgtggggaggaaaggcccacttcgcccatcccctctaggttttgcttggagctgtggctggtttgaccatgcctcagaggtcaggccctcagccccccgactggctttggggccaatctcaatgccacctccagggtagacttgacctgcgtgcccccatctaccctggccctgatctccctttccccagccctaccctcatagacggagggtccagaggaggatgcgggcatctctcctcccagcccttctgttagagaagcttcctggtccagccttcagccttctgggaaggtagcaggtcagagctggcn

SEQ ID NO: 2869 - DNA, 465 bp, Homo sapiens
  misc_feature (1)...(465): n = A,T,C or G
atagaacaacannttgatgtgcgtcggaaancaccacaaaaancangaaagaaaacgcagactgcatcatccataaatacacctttggtctacggatgcttttggaagacatctgaattttacaccttcagagagaagatctgggtggctagctccagagtggaggcatgcttgctttttctttacacttgtgaagaggaatggatccggacatctgcaatctgggtagaggacggcaggcagcaagcttagccactcggccaggcttctcagcccttactctagacatgtgatccttcctccacgtgatatacttcacaactttcttacggctactcaaggcatcccaagttaaaaggaagggtctcactctgttgcccaggctggagtgcaatagtacaatcatggcttattgtaccgttgacctctcaagatcaagtgatcctcttatgtccacctcctggg

SEQ ID NO: 2870 - DNA, 459 bp, Homo sapiens
  misc_feature (1)...(459): n = A,T,C or G
nccgaaaactgaagacctagaaagngcgggngcgcaactggcaggacaaagatgtgtatcgccggttatcacgccagctagtggccagtcgtcaccctgactggcctccagaccgcatagtcaaacaggcacaatatgagtttgagttcgcagcacagcagttcatgctggagacactgcgttatgtcaaggcagtgcggccccggcacctctggggcttctacctctttcctgactgctacaatcatgattatgtgcagaactgggagagctacacaggccgctgccctgatgttgaggtggcccgcaatgaccagctggcctggctgtgggctgagagcacggccctcttcccgtctgtctacctggacgagacacttgcttcctcccgccatggccgcaactttgtgagcttccgtgttcaggaggcccttcgtgtggctcgcacccaccatgcca

SEQ ID NO: 2871 - DNA, 469 bp, Homo sapiens
  misc_feature (1)...(469): n = A,T,C or G
nnaaggcgggctgnnnnnnaattgatagcctncntcgngcnggacntcccctggatcccaggtttgggagaggggcaggagtgacaggcctcacccccacaggcctggctgtgatgcactcacagggcagcgattacctggacatcggcaacaacccgagagtgggcaccaagcggtacatggcacccgaggtgctggacgagcagatccgcacggactgctttgagtcctacaagtggactgacatctgggcctttggcctggtgctgtgggagattgcccgccggaccatcgtgaatggcatcgcggaggactatagaccacccttctatgatgtggtgcccaatgaccccagctttgaggacatgaagaaggtggtgtgtgtggatcagcagacccccaccatccctaaccggctggctgcagacccggtgaggcctctgctgggactatgatggcgtggggtggt

SEQ ID NO: 2872 - DNA, 494 bp, Homo sapiens
  misc_feature (1)...(494): n = A,T,C or G
agggagtccgcccaattgaaaccctttcgagagcatagacagtgaggggaattcaccggcaggcctgcctggtgtcctgcttccagcagctgatggcggagacctgctcctgtggctactacctccaccctctgccggcgggggctgagtactgcagctctgcccggcaccctgcctggggacactgcttctaccgcctctaccaggacctggagacccaccggctcccctgtacctcccgctgccccaggccctgcagggagtctgcattcaagctctccactgggacctccaggtggccttccgccaagtcagctggatggactctggccacgctaggtgaacaggggctgccgcatcacagccacagacagaggagcagcctggccaaaatcaacatcgtctaccaggagctcaactaccgctcagtggaggaggcgcccgtgtactcggtgccgcagctgctctcggtcatgggcagactctgcagnctg

SEQ ID NO: 2873 - DNA, 486 bp, Homo sapiens
  misc_feature (1)...(486): n = A,T,C or G
agggggcnnaatcgagaatttagtccctngtggggaattccaaatatcaagcacttatctgcgggactccagcttcgcctccaggctattcagaaccacgtgaaccaccacagcctaaggacgctgccgggctcgggccagagcagtgctggcctggcagccctccgaaagtggttgcagtgcactcagttcaaaatggcccaggtggagatccagtcctcggaagcagcctctcaattttatcctctatgagtggactcctcggcgctcagtgtcaacactctggtttagcaataatgggtttaaaaacaaacaatttgatccaagcaggttggggaacatattggtactgtacattctctttctagtttagtaaaagatgtgcaaaggccagagagggccgaaaatgaagctttcttgctacacatatttctgatgactccttgggctatctgattaagtgtttccttacattattttttaaaa

SEQ ID NO: 2874 - DNA, 459 bp, Homo sapiens
  misc_feature (1)...(459): n = A,T,C or G
aggcggggnnnnngggggnnncctcgagacctctgngnattgagcngcatttcggnactcaaggtttcctttgttgtcgtttggaaagagattctggctgcaggaaaggggaacgaagacagtggtctgtgcgttccaggggtgtgtctgcggtttttacaaggctgcctcctggactgggagacccgggcccggcaccgccagtctctgtccgaggtgctgacaggcttccgctgcttcagagagcgggaggccgcgcctaggcgggctctcagaggagccgctctaccgggagagtcggaggctggtgacccactgtcacttaggtcttctgtgaatgcagactggattcaatattctgacctgtgggaagcggaggtcagtaccccgaggtgcgaagcgggcttttgccacgagtgctttatgacgccagggaatcatgagaaggatggccctttn

SEQ ID NO: 2875 - DNA, 489 bp, Homo sapiens
  misc_feature (1)...(489): n = A,T,C or G
gcatcntcaggaanaaanacggagnnnnnnnntttgatncccctgatgaccctaggacangcggnggaattcgaacaggacttaccctgggcttcaggaacatctgatggctgaggttagtgtgcttggaggctgcaggacgaactgtcgatgcttcttagcagagatggtcacagagggcagcagggacaggactggaagggacctgcagcctgcagaccccgcctggcccccgctggcttctggctggtccagtgatgggcaagtgacagaccttccccaggctctgcttccagaactctaatgggaaactgggcctgtctacctttagaagtcttcgattctcagagagcatttgtctaatacaataaaaactggcattaatacaaacctcaaaaaaaaaaaaaaaaaaaaaaacggcccctttaattttaagggcccctttaaaccccgtggataaccctaaaggggcctttttatggcccaccn

SEQ ID NO: 2876 - DNA, 457 bp, Homo sapiens
  misc_feature (1)...(457): n = A,T,C or G
aggcgggnnnaggggggaatgaaaccctnggactgagancactatccangnggtggaattccccaggccggcccagatgtgtcccccccaggccttgtcctacgtccaaggtggcagatgtcttccctgggctgccaccagcccccgccccagagtggcccaccgtggcactagaatgcaagtatcctgcgaccttgcaacctcaccttcctgtgggtgttctttcctgccctgtccaaaagcgccctcactattcttggaccatgccagattctgcctctctggaaagaggctctggacagcagaagcctccaagcacagagcctggccccaggccccagacagggtgggcttcctgcccttccctctgggcacgcctgctggccgacccactgacccactcggatggaccaacctgctctgtccccaaaggacgcctgcaggagagagcagcact

SEQ ID NO: 2877 - DNA, 445 bp, Homo sapiens
  misc_feature (1)...(445): n = A,T,C or G
ntttgaggaccctttggacagcccgctggaaagcctatgagcggctgcatctgctgctcatgccgcccaaacaccacccagatgtcacttacgtcaagaaggtccggaccctccgtatgcacctgttcacggccctgcagctgctctgcctggccctgctctgggccgtcatgtccacagctgcctccctggccttccccttcatcctcatcctcacagtgccgctccgcatggtggtgctcacccgtatcttcaccgaccgagagatgaaatgtctggatgctaacgaggcacagccggtgtttgatgagcgggagggtgtggacgagtacaatgagatgcccatgcctgtgtagccgccaccgagggacagccgagggaccgatggacgaggggacaggctggtgggatggggttccccctcccatgcccctccctcctttnt

SEQ ID NO: 2878 - DNA, 483 bp, Homo sapiens
  misc_feature (1)...(483): n = A,T,C or G
gggtttantgaaaaaaaagangaaaaaaatttgatgacactgatcaccgtggnggaannccaaggaactggtcaaggtcctcctcgactggattaatgacgtgctggtggaggagaggatcattgttaagcagctggaggaagacctgtatgacggccaggtgctgcagaagctcttggaaaaactggcagggtgcaagctgaatgtggctgaggtgacacagtccgaaatagggcagaaacagaagctgcagacggtgctggaagcagtacatgacctgctgcggccccgaggctgggcgctccggtggagcgtggactcaattcacgggaagaacctggtggccatcctccacctgctggtctctctggccatgcacttcagggcccccatccgccttcctgagcatgtaacggtgcaggtggtggtcgtgcggaaacgggaaggcctgctgcattccagccacatctcggaggagctgac

SEQ ID NO: 2879 - DNA, 455 bp, Homo sapiens
  misc_feature (1)...(455): n = A,T,C or G
aggcgaggnnnnggnngaaattgagacccctngnactgatcngcatttcctcngcactaaccctgccgcagtacatatccagccatactcatggaccccagtgatttccccagtccatttgacccattgaccctgccagagaagcccctggctggagacctaccagtagacatggaatttggagaggatctactggaatcccagactgccccaactcgaggatgggccccccctggcccttctccatcctcgggagccctggacctgcttgatacccctgctggcctggaaaaagaccctggagtcctggatggagccactgagttgctggggctgggggggctgctctataaagccccctctcccccggaggtggaccacggtcctgagggaaccctggcatgggatgcaggagatcataccctatagcctggaccagggggccagacccctgn

SEQ ID NO: 2880 - DNA, 449 bp, Homo sapiens
  misc_feature (1)...(449): n = A,T,C or G
gggcggnggggggaatgagccctngaatgattncatagccangncgtggaattcccccaacgatccccgagcccgcatggacagtgagagcctcttcaaggacgggaagctgctgcctgctatcaccatcctgggctgggtgggcctgagctggtgccattctcttcggaagcacagtgggaggtaccctgttctgggaaggccctcaccacctcctgtccccctggccctgccctttgaggttgaaggcatcctgcctaccctcaggaggaaagaggatgtgatttgtctcatgatggaggccagtatgttgtcggggaagtgtgaccccaagatctcaatagatgctgctggttctgcggcttggatcgatggagccacctccccccgcccgtccacgcttactctccctgctgctcattagcgccccgattaatcagccccccttt

SEQ ID NO: 2881 - DNA, 442 bp, Homo sapiens
  misc_feature (1)...(442): n = A,T,C or G
nttgacgaccttttgatgacccctagtcagtgtggtggaattcagtcgctccggaggaggcgtgaatcgcgcagggattgactaatttggggtggggggtgcggtgggcgatggagcagcctgaggacatggcgtcgctgagcgagttcgactccttggcgggcagcatcccggccaccaaggtggagatcaccgtgtcctgcaggaacctcctggacaaagacatgttttccaagtccgacccactgtgcgtcatgtatacccaagggatggagaacaagcagtggcgggagtttgggcgcaccgaagtcatcgacaacacgctcaatcctgacttcgtgcgcaagttcattgtggattactttttcgaggagaagcagaacctccgttttgatctatacgacgttgactctaagagtcctgatttatccaaacacgattt

SEQ ID NO: 2882 - DNA, 442 bp, Homo sapiens
  misc_feature (1)...(442): n = A,T,C or G
nttgaagaccccttgtccagcgtggtggaattcaagaagaatacaaggaaaagaaaagtaaattgctgctagccaaagaagaattcaagaaacttctagaggaatctaaagtgtctcccaggaccacgtttaaggagtttgcagagaaatacggccgggatcagaggttccgacttgttcaaaaaagaaaggaccaggagcattttttcaaccaattcatacttattcttaagaaacgggacaaggaaaacagactaaggctgcggaaaatgagatgagtttgtgaaaaaatgcaataagcccgggggttgaccctgggcgtgccgggggcgagggggtcacggtggagacggacacgggcgtggggcggccgagacctgcacggcccagcgggcaccggcactgcggngtctttgttctcagaggattactggttcatatt

SEQ ID NO: 2883 - DNA, 442 bp, Homo sapiens
  misc_feature (1)...(442): n = A,T,C or G
nttgangacctttggacgcccatagtcagtgtggtggaattccttccagtgccctaggcctggaagggtaggaggagcacagagaaccttccatggcccctttggttctctgcctttggatggatggatttatgctggcattgtctggagggagccgggtgtcccccaataatcacagaacaaagacaattaggtcgggggaggaataaggataaaaagagaccccaacagaccctgcctgcccttccctgccccccggctgcactgctgaaatatgaggaagagatggctccagtgtggggtgctggccaggccagttcgtggggacgtacatgggctggggtggagcccccagcctctacccctggggaggatggagagtgggcagcctagggagagctacaggagggaggagggggcccagaggctctggcaggggtgg

SEQ ID NO: 2884 - DNA, 453 bp, Homo sapiens
  misc_feature (1)...(453): n = A,T,C or G
actgagaccctgatcacgtcgnggaattcagaagatcatgcaggctgccactcccacggagcagccccctggagctgaggctcctctccctgtaccgccccccactggcaccgctgctgcccctgcccccactcccagccccgcagggggccctgaccccacctcacccagctcggactctggcacggcccaggctgccccgccactgcctccacccccagagtcggggcctggacagcctggctgggagggggctccccagccctcccccccacccccaggtccctccacagctgccacaggcaggtgagggacccctgagaagatgccaggacttatagtaccccctcaggacatggacagtatgtgggggcaggaaggttatctcctcccgggtaaagccatttcgtcctctccagtttggggcggaatgaggcctgctcctcttgtaaa

SEQ ID NO: 2885 - DNA, 457 bp, Homo sapiens
  misc_feature (1)...(457): n = A,T,C or G
actggagaccactgatgaccctcggacagngcggnggaattccccgagtatgcttcgtttttcgccgtcatgggcgcctcggccgccatggtcttcagctccctgggcgctgcctatggcacagccaagagcggtaccggcattgcggccatgtctgtcatgcggccggagcagatcatgaagtccatcatcccagtggtcatggctggcatcatcgccatctacggcctggtggtggcagtcctcatcgccaactccctgaatgacgacatcagcctctacaagagcttcctccagctgggcgccggcctgagcgtgggcctgagcggcctggcagccggctttgccatcggcatcgtgggggacgctggcgtgcggggcaccgcccagcagccccgactattcgtgggcatgatcctgattctcatcttcgccgaggtgctcggcctctacggtc

SEQ ID NO: 2886 - DNA, 482 bp, Homo sapiens
  misc_feature (1)...(482): n = A,T,C or G
gtaatctagaantgnaacggagtnanaaaaactgagaccttgataagcgtcgggaanncctgnnggacaggtattgggggcaaggttggtagggaggacagactgtcacttgctgttacaggcacaggtgattaaaatgctaaatattgcaaatttaagctttgtcagtatatggaaaagttgaagggaaaatactggaatgcttcttcaaaggttaaaaaataaccgagtcttttggtaatttgaccccacgtgctctctggccctcaagcatgtaacctcggggtctgaggcccaggacccacccccctgccacccctcccaccccactccctgctcagtacctggcgttggtacacaggcaaggattggcacaaccaaaattggcctttttctccctcttaatattgaagaaattcccacatttctcatttggtaatggtgttgtggcctcagatttcttctagtatttgcttctgatg

SEQ ID NO: 2887 - DNA, 443 bp, Homo sapiens
  misc_feature (1)...(443): n = A,T,C or G
catcgaaatgatgactcactagnccgngnggtggaattccttcgggtgttgaagcctgagtggtttcggggccgggacgtcctagatctgggctgcaatgtgggccatctgaccctgagcattgcctgcaagtggggcccgtcccgcatggtgggcctggatatcgattcccggctcatccattctgcccgccaaaacatccgacactacctttccgaggagctgcgtctcccaccccagactttggaaggggacccgggggcagagggtgaggaagggaccaccaccgttcgaaagaggagctgcttcccagcctcgctgactgccagccggggtcccatcgctgccccccaagtgcccttggatggagcggacacatcagtcttccccaacaatggtgtcttcgtcacgggtaattatgtgctggatcgagatgacctggt

SEQ ID NO: 2888 - DNA, 443 bp, Homo sapiens
  misc_feature (1)...(443): n = A,T,C or G
nttgacngaccacttgtacagcgtggtggaattcccaacttcaatgaatggtacgtgtgacgggtcggggcctctctccctctccctgtccccaccccagcgcagcagccctccccgcagctagcagcgagggcaccttgtgatcatgttgttaaaattatgaatctgatttttatgatgatgaaaattttaccagcagaaggattttttaaagtttttttttttttttttaataataatctaggcatgaaaagcaaaaatatcccttccggagtctttgaagctgaaattttaaaccaattaaaaaataaaaaattaaaaccccccaaaattgttgaaccaaacctccttgttaatttccatgcccacgttctttcccaccctgttcccagtcttttgacaaactgtgtacatagcggactcttcctttctcctccgaggtg

SEQ ID NO: 2889 - DNA, 481 bp, Homo sapiens
  misc_feature (1)...(481): n = A,T,C or G
tgaaatantgaaagttaaaggagtaanaaaaactgaaaccctgatanacgtgnggaanncaaagactgagacagcccttagtggatgagagcgcctatgcttcagaaacagcaggtttccaggatggacaccccgccccctgaagaacgcttacagaggcaaaatgaataactgaacaaccatgaagaggagactgagtttaaggaactggacggtctgagggaagccttggctaacctccggggactgtcataggaggagaggagcgagaaggctatgcttctctcccgcattgaagagcagacccagctcatctgcatcctgaagcggaggtcatatgaggccctggagcgctgccagatcctagagctgctcaatgcagagctggaggagaatatgatgcaggaggctgagaagctcaaggcccagggtgagtacagtcggaaactagaggaacgctttatgaccctagcagccaacc

SEQ ID NO: 2890 - DNA, 293 bp, Homo sapiens
  misc_feature (1)...(293): n = A,T,C or G
gtctcttacaganaganacacggagaaannnnatttgatnccatcgatgacatctgtccagngcggnggnaaccgatgtctggtacgcagtcgacaatctcttcgccatcgagttgcaaaacgatacggaaagccccgtgcgccgacgggtggttcggaccgaggttgaggaacatgaagtcctcgttttcggtgccgcgcttcatcccccactcttccggtttgaaggtcagggcttccatctccagatcctgtttggctttggtcagctcaaacggcgagaattcgatatc

SEQ ID NO: 2891 - DNA, 458 bp, Homo sapiens
  misc_feature (1)...(458): n = A,T,C or G
aactggatgacccctcgagaaccgcggnggaanncgnatttcatcatcagtttagagagttcggcatgcttacaggcagttattgttctaggtgttagctttctgggtgtacggagcagctctaagccggcaacatggcccggttgcccttgcgatcaaagagaagagggctgggcgctccatgatttagcctgaggctcttcaaacatccattctgcttccacgcatggcttctgccattggttctcttcccccagcaccctgaaacgacagaaacaagcaatccgattccagaaaattcggaggcaaatggaggcgcctggtgccccgcccaggaccctgacgtgggaagccatggagcagatacggtggcatttttcaactccgctggaaccagtgcccaggaggagcaaaggatgtgctgccagcccctggctcacccagtggcctcgtcccag

SEQ ID NO: 2892 - DNA, 472 bp, Homo sapiens
  misc_feature (1)...(472): n = A,T,C or G
cggagtgccnnnnccggatnnncactgagtaccactaggacagngcggnggaantccctgcttcaacagtgcttggacggaacccggcgctcgttccccaccccggccggccgtccatagccagccctccgtcacctcttcaccgcaccctcggactgccccaaggcccccgccgccgctccagcgccgcgcagccaccgccgccgccgccgcctctccttagtcgccgccatgacgaccgcgtccacctcgcaggtgcgccagaactaccaccaggactcagaggccgccatcaaccgccagatcaacctggagctctacgcctcctacgtttacctgtccatgtcttactactttgaccgcgatgatgtggctttgaagaactttgccaaatactttcttcaccaatctcatgaggagagggaacatgctgagaaactgatgaagctgcagaaccaacgaggtggccgaa

SEQ ID NO: 2893 - DNA, 227 bp, Homo sapiens
aactcccgcctccgccgcccctaggcctcatggcggtccgagcttcgttcgagaacaactgtgagataggctgctttgccaagctcaccaacacctactgtctggtagcgatcggaggctcagagaacttctacagtgtgttcgagggcgagctctccgaaaccatccccgtggggcacgcgtctatacgcggctgtcgcataatcgggcgcatgtgtgtggggaat

SEQ ID NO: 2894 - DNA, 470 bp, Homo sapiens
  misc_feature (1)...(470): n = A,T,C or G
cgaggttacccgggtnnnnnaactgagaaccttganatcctgaaaanccngnaaccaacccctgctttacccacgttggggctggcataagctgcttccctgagttgacatgttgggggggcggtcctcgtaccctctcccaccctggtgtttgggcacctgcgtgggatgcacacggatgacagaatcaaggcgccaggatgggcactctgccctggatacaggctctaccctcctcccccaggacctgcctagtgccagtttggtagtccccctttctggccccttggagcccacacacgtttcatctttttcccctctgagagcaagaagagacatggcatgttctctgggaccctggaatcctaggtacccacatgtgtgccaaagcctaccccacctggcaggtgtcccacagcaacagaaggaatagtagtccccactctttccatcagccctaccctaccctc

SEQ ID NO: 2895 - DNA, 483 bp, Homo sapiens
  misc_feature (1)...(483): n = A,T,C or G
gcgggtcnccnnnaattgaganccaactgagagncatacgcagngncgnggaantcctgatgatgaagcctggaatggattcgtggctgctgctgaactgcccagggatgaggcagatgagctccgtaaagctctgaacaagcttgcaagtcacatggtcatgaaggacaaaaaccgccacgataaagaccagcagcacaggcagtggtttttgaaagagtttcctcggttgaaaagggagcttgaggatcacataaggaagctccgtgcccttgcagaggaggttgagcaggtccacagaggcaccaccattgccaatgtggtgtccaactctgttggcactacctctggcatcctgaccctcctcggcctgggtctggcacccttcacagaaggaatcagttttgtgctcttggacactggcatgggtctgggagcagcagctgctgtggctgggattacctgcagtgtggtagaactagt

SEQ ID NO: 2896 - DNA, 460 bp, Homo sapiens
  misc_feature (1)...(460): n = A,T,C or G
tgcggggtnnnnnnccccttagnaccctggcatgngacanggacnnccctgtagacccagcactttgggaggccgaggcgggcggatcatgagatcaagagattgttaccttcccggctaacacagtgaaaccccgtctctactgaaaatacaaaaaattaactgggtgcggtggcggctgcctgtagtcccagttacttgggaggctgaggcaagagaatggcgtgagcctgggaggtggagcttgcagtgagccaggatcgcgccactgcactccagcctgggtgacagagcgagactccatctcaaaaaataataataataaaataaaataaggtttgcatattgggtataagcattttctcacatcagtctaataccttgtggctactgatttcctgcactgggagtcagcagacctcatggcgatgcaaaacgtctgccaatgtatattaaaagg

SEQ ID NO: 2897 - DNA, 456 bp, Homo sapiens
  misc_feature (1)...(456): n = A,T,C or G
aggagcnnnnnnnttcgtacagataaccctggacgngccgnggaattcggactcgttcgtgaacagccaggagtggacgctgagccgctccgtaccggagcttaatgtgggcatagnggggaacctgtctagcgggaaggcagccctggtgcaccgctatctgacggggacctatgtccaggaggagtcccctgaaggggggcggtttaagaaggagattgtgggggatggccagagttacctgctgctgatccgagatgaaggaggcccccctgagctccagtttgctgcctgggtggatgcagtggtgtttgtgttcagcctggaggatgaaatcagtttccagacggtgtacaactacttcctgcgtctctgcagcttccgcaacgccagcgaggtgcccatggtgcttgtgggcacgcaggatgccatcagcgctgcgaatccccgggttat

SEQ ID NO: 2898 - DNA, 236 bp, Homo sapiens
  misc_feature (1)...(236): n = A,T,C or G
anggnatacttgattgagagatgagatcacggggaagaatgacaaaatggaatgagggcttttaaattccataagttagtttttaatggttcatagatgctgtgacaatatgtcagctatctctgaagcctccttgatacatgatgggacagggaatcttctgcctacctcccaaactttggaaaattaataaggcaccatttaaagaaaaattttagcgaggtcctcagaaatag

SEQ ID NO: 2899 - DNA, 464 bp, Homo sapiens
  misc_feature (1)...(464): n = A,T,C or G
aatgacctgaaatgtagcctctgtccttgtaagtcagttgacttgccgcacatctctttgtgtacttgtacggtactggcagaaaagtcatttttcaaaagccataggcttttccttgcccttagctgtaataatgcatctgattttgatttcctccagagctgtgtttctgtccatcacctgtgtattggccctgtgtttaccactctggcccactcctcacccccttgctcccctggtcttctggagtttgtgacattgatttgaaatggatggtgttctcttgagagcaagtgagattgttagaattaagttccaactatacagttttctaacatagctataaggtccttggtgctgtttgtgataactgatagataactcattggaaacgtgcatacatttatattcagatgaaattatggtttgcactgtctattanatatctcgattaattntcanaa

SEQ ID NO: 2900 - DNA, 421 bp, Homo sapiens
tcttatttaagaaaaagagaaggctctcttttctcccttgtcattgccgttcttttccttacacgcaaagattgtttaactattgcagattttcatcccattctactgcttgattgaccatcaactccatcctatcgagatttatttaagaatgaagaacataattttctgctgatgccgtaccctcacccttttcagcaaagaatagtggagagtaggaaactgtactttatctcggcatcctcttgaatgatagtgcaagtttctccagttgggatgttgtctctgcccggttggacctcctccctttgttgaatgtggagtgcagcctctcatctcacactgtgagtccagcggcgcagggtggtaccaggaaagaggatattctaggctttgcgtgctgctagctgggttcaggctt

SEQ ID NO: 2901 - DNA, 415 bp, Homo sapiens
ctggggccccggtgacccagagtaagcctccaagaaggaggaggaggagagaaaggcggctcttcccgtgcccctaccagaggcttcggtgggcccaccttgtgacctccgcggccggcccctcagtggaactgcgtcccacgcggggggcgtcccgaccgtgggggccgcggcccgcgctgaccctggacgtcgccgcgcagcccctggttccccaaggcagaggaaataccctggtggagccctccttccatagaaccagagatggcatctgtggatttcaagacctatgtggatcaggcctgcagagctgctgaggagtttgtcaatgtctactacaccaccatggataagcggcggcgtttgctgtcccgcctgtacatgggcacagccaccctggtctggaatggcaatg

SEQ ID NO: 2902 - DNA, 407 bp, Homo sapiens
tcgtggttttacttgtagttcgaggtctgagaccaggcctcaagtggaaacggcgtcaccatgatcgcacgggggaacccagaacccttacggtttctgccggatgaggcccggagcctgcccccgcccaagctgaccgacccgcggctcctctacatcggcttcttgggctactgctccggcctgattgataacctgatccggcggaggccgatcgcgacggctggtttgcatcgccagcttctatatattacggcctttttttttgctggatattatcttgcaaaacgtgaagactacctgtatgctgtgagggaccgcgaaatgtttggatatatgaaattacatccagaggattttcctgaagaagataagaaaacatatggtgaaatttttgaaaaattcct

SEQ ID NO: 2903 - DNA, 415 bp, Homo sapiens
  misc_feature (1)...(415): n = A,T,C or G
ttatataggttacttgtggccaggaggaggatcaggattctttgcctttttgaaatgagagagacactagagagaaaaaaaaaaaattacattctgaagggctatagtttgatgaagtcggaactcatgaggggcagcttccctggcttgtgcccagggtctattttgagaccttgtcaaagcttgcctgacagaacctaccacataaccataatctggcctggtcctcttgcaagacaggaaggcctgcggtttaggatcagaggcaagcacagaagggggagttataaaggacattttgccttcaaaaaattaaggctaggttttggggtgaacaactacttagcccgtatatccgaggatccaagtttttaaggctacctcctcctcccctgcttcttcctattattaaggn

SEQ ID NO: 2904 - DNA, 409 bp, Homo sapiens
cccacgcgtccggaaacacaggacaatcagaactcataaggagaggcaagaaattgctgtgaaacatctatcagacaggactctgattcatcagtttcagacaaacagcggcaaaccatcattattgccgactccccgagtcctgcagtgagtgtcatcactatcagcagtgacactgatgaggaagagacttcccagagacattcactcagagaatgtaaaggtagtctagattgtgaagcttgccagagcactttgaatattgatcggatgtgttcattaagtagtcctgatagtactctgagtaccagctcctcagggcagtccagcccatcccccttgcagagaccgaatagtatgtcagatgaaaagcaagaaaagtagtgcgatacggtggattgctctccga

SEQ ID NO: 2905 - DNA, 414 bp, Homo sapiens
atatactctcagccagtcagattgggtaacatgtggatggagaagacagcatggccagtccagggctagacactggggtagagaacgaaggagacagggagcagaggacatctagcccctcagccacacccttgccctggagaggcgagggatatggtgaaggtggggatatgcccacagcagtgcttgtgaaagacctgacccagagatgccacagatgtagagacagagctgagaagagccagttgtggcaagaggccatgggccggataagggggctgtgctccagcctgactcaggcacacgttggttgagtaaccaaggcaagccctgtgctcttccaggccttgatttcttcctctttaaggaaaagaaattggacctgatgcttcctaaagtcttggccccaggaca

SEQ ID NO: 2906 - DNA, 403 bp, Homo sapiens
agtgaactgtgattgcatcactgcactccagcttgggcgacagagcgagaccctgtctcaggaaaaaaaaaaagtgtctggcacatattatgtgctcagtattagctggggttattatttaatataattttttttttttgaaacggagtttcactttgttgcccaggctggagcgcagggtcacaattttggttcaccacaacctccacctgccagtttaaagggatcctcccaaaggaccttttgggaggccttgtcctccaaaagtagggggattacaggcatgggattacagccgccttgcccagccaatagttatttttttcagtacagccaagttcccaacaatgagtcatcgctctagcattctgaagatgaatttgtatttactggatttcacagt

SEQ ID NO: 2907 - DNA, 568 bp, Homo sapiens
  misc_feature (1)...(568): n = A,T,C or G
ggagttgatcccgtgaccgctnccaattcccggccgacccacgcgtccgcccacgcgtncgcccacgcgtccggccaggcctggcccgggccccgggagctcacgtcacccccacccctcacttctccagggaactgccaaagccaaacccagctcgggatgggattatgtgtactgggtagacccgtggagaggggctgcgagaagagatctcggtggcagagagaagcagaggcagagagggcatgaagaggggtcggcatcagagaaggggcaggcagtgactatcaccccatttcttcttccctcagctggagtaacaagagtcaggcagagcctgaagacttgggtggaacatgggcccttctctggagatcctggcctcccccgttcagtcagggtggagttgctgaccttagtgcgcggcccagccaggggaaggagtgggcatcggcaacccccaccccaaccccaatccttgaggcgccggttctggtcagccactctgacccttccttcaaattcggaaccttaggcttaaggaaggcgagggggcttaattgcttcn

SEQ ID NO: 2908 - DNA, 417 bp, Homo sapiens
ataaaactaaaaatgaactctcaaagaaacccttacaactgaacaaatacatagaaattaagaaatctgctcctgagtaatatctgggttaacaatggcataagatgaaaatttaaaaattaccttaattaaatggtaacaagttattgaaaccttaagaatacagcaaaagcagtggtaagaggaaagtttatagtgcctactgcctacgtgaaaaagccggaaagagcacaagttgtcaacctaatgttgacacgagaaaaaagaaaaaattaaagaaagaaaatataaatcaaaaaagagaaagaaacaagctgcctgtgttaggctgactcacgtcaaaggcagtaacacgcaaagtttcaatgatgttatctaagggccggagctcaaaggaatgggctctgaagactctcc

SEQ ID NO: 2909 - DNA, 441 bp, Homo sapiens
cagcccttacaaacattaaatgtaaatggtttcaaatggtcagcgttgtttaaatgtaatcatgttattttattcattgtgaatgctttgatgaaaaggctttatatgcagtacatctacgaaaatattgttcatactgatcagaattaaatttgtatagagcagagttttaaaatgaatgtaaatagcactaaacgttttctttctgcaacctgtacttacagattcttcctgtaaactaaataaaaaaaaaatgatagtgcattttggtggtaattttaaaggtcttgattaggtcaataattgtttaagcaccgtctcattcatgttttctactttcatttcttaagcttttaaaattcatttaattaatattctgttggtgctttggggagtattcccaatgtatctttgatatttaacctggttaatttgtggccg

SEQ ID NO: 2910 - DNA, 507 bp, Homo sapiens
  misc_feature (1)...(507): n = A,T,C or G
cacaacttggaggtaaatgcccccaggccgcatgtggctttattatactgatccatgtgtcagaggatggggagacaggcaggaccttgtctcacctgtgggctgggcccagacctccactcgcttgcctgccctggccacctgaactgtatgggcactctcagccctggtttttcaatccccagggtcgggtaggacccctactggcagccagcctctgtttctgggaggatgacatgcagaggaactgagatcgacagtgactagtgaccccttgttgaggggtaagccaggctaggggactgcacaattatacactatttatttatttattctccttggggttggtgtcaggggcgagccaaccccacctctatgccctgagccctggtagtccagagaccccaactctgccctggcttctctgggtcttccctgtggaagcccatcctgagacatcatgctggaaccaaggcattcctggatgtcctgtactgacccaccccn

SEQ ID NO: 2911 - DNA, 410 bp, Homo sapiens
caacaccctcctagccttactactaataagtattacattttgactaccacaactcagcggctacatagaaaaatcgcaccccttacgagagcggcttcgaccctatatcccccgcccgcgtccctttctccataaaattcttcttagtagctattaccttcttattatttgatctagaaattgccctccttttacccctaccatgagccctacaaacaactaacctgccactaataggtatgtcatccctcttattaatcatcatcctagccctaaggctggcctatgagtgactacaaaaaggattagactgagccgaataaaaaaaaaaaaaaaaaggggcggcggttttaaaggatccctcggggggcccaaccttacgcgggctggcgaggatttaattttttcct

SEQ ID NO: 2912 - DNA, 411 bp, Homo sapiens
aacctttccagggagtggttgtgtgatcgccatcttagggaaaagatgttctcgtccgtggcgcacctggcgcgggcgaaccccttcaacacgccacatctgcagctggtgcacgatggtctcggggacctccgcagcagctccccagggcccacgggccagccccgccgccctcgcaacctggcagccgccgccgtggaagagcagtatagctgtgactatggatctggcagattctttatcctttgtggacttggaggaattattagctgtggcacaacacatacagcattggttcctctagatctggttaaatgcagaatgcaggtggacccccaaaagtacaagggcatatttaacggattctcagttacacttaaagaggatggtgttcgtggtttggctaaagga

SEQ ID NO: 2913 - DNA, 528 bp, Homo sapiens
  misc_feature (1)...(528): n = A,T,C or G
ngagattgagccctgtgaccgttgtagatctgtcgtaccgacccacgcgtccgcctaccctgaaggtgcacctgcaatcctcgccgataagaggcagcagttcggaagccggttcctgagcgatccggcgcgcgtcttccaccacaatgcctgggacaatgtggagtggtcggaagagcaagccgcggcggcggagagaaaagtccaggagaacagtatccagcgggtgtgccaggagaaacaagttgattatgagatcaatgcccacaaatactggaatgacttctacaaaatccacgaaaatgggtttttcaaggatagacattggctttttaccgaattccctgagctggcacctagccaaaatcaaaatcatttgaaggattggttcttggagaacaagagtgaagtatgtgaatgtagaaacaatgaggatggacctggtttaataatggaagaacagcacaagtgttcttcgaagagccttgaacataaaacacagacacctcctgtggaggagaatgtacn

SEQ ID NO: 2914 - DNA, 474 bp, Homo sapiens
  misc_feature (1)...(474): n = A,T,C or G
cggatcgnnnnaactgatnactgaagacctgcaacggaccttcngggttganccacgcgtccgctctgcctccaccctgctgtcaccactgccctggttcaaagctcccaggactcccagaaagcgccagagccacctggaaggccccactcagccttgagactgggggncacacctccctgtcagagtcgcctgctgggctgaaggggcaatggattgtcattgttgaaattgttgggctcaggttataaggaggaacttgggaagtagaaagtgacttgaccatgtgcatccttggtagcttcctgtaactaacaaatggaacagagagcacacccccgccccgccccaccccaagcagatgttcccgtcagcgctgccctgagtcagtcggtcccccgtttctgctctcctcccttttgtggacctgctcacttcaagcttcttccatggactttccagggcacagtcatc

SEQ ID NO: 2915 - DNA, 471 bp, Homo sapiens
  misc_feature (1)...(471): n = A,T,C or G
ngagcgggccnnnnnnncctagaacactgacggacntggcgacgaacccccgggnctacccacgcgtccggcgctgggccggggaggtgccaggctcttttttacaaccagctggcaggagaactctcgcaggaactaacagtgagaactcactcatccccaccacccagggaggatattaatctattagtgagggatcctccctcatgaccccaacacctcccattaagccccacctccaacactggggatcagatttcaaatgagatttggaagagtcaaacaaaccaaactgcagcactccctaaggcatctattcttatggtcctatacgtagctcacttcttatttctaaataattattttccttggaaattatatttactaacagttttctatctcctttaagcagatgatgtttatgttttgatatttatttatttttatcagctggttactttcatcattcat

SEQ ID NO: 2916 - DNA, 406 bp, Homo sapiens
agacagagagacagagacagagacagagagacagacagacagacagactccatttatttggggaaagggaagggaagggaacaagagtctctgcctggtaatccaacgaattcacccagttcctacccaaggcagtacctcatgagtctgcaagagtcacagtgttactgcatggcttggtgtgcccaactgaagcagatatggctgcagcaaccaaagacttagattgcaacacccaattacatttgaatatctggaaaaccttcccaagaaggataggtccaaaccaaaactgcaaagactacaataaatacctaactctttgatgcccagacattgatgaacacttagaagcattaagacaatccagaaaacatgacctcacctaacaagctaagtaaagcac

SEQ ID NO: 2917 - DNA, 414 bp, Homo sapiens
  misc_feature (1)...(414): n = A,T,C or G
acattctcttgttacaattattgccagaaagccaattgataagctttcaaaatgggcttatcacacccctccaaaaatagatttttgttttttctataaacagaaatttcagaaatgagatttgagagatccgactgagaagacccttcagtaaaatgtgacatgacttaccttatgctgtaatctgtattccctcaggatttaagagcttcctagcataaaatctttgctaaacgtttgtgtacatgttattggtgctccgaaaaatagtcaatggaatggtgcactacaattgggctttatcatcttattttgaacctcgtgtagattacagtaaagcaaaccattcagtgtgttccaggaaattatattagatctgtgtttctatcagctcactggaataatctgataatn

SEQ ID NO: 2918 - DNA, 397 bp, Homo sapiens
  misc_feature (1)...(397): n = A,T,C or G
cggacgcgtgggcggacgcgtgggtgcacaacaaccccttgtggcgcaggagagcaaaaaaaagggggcctttatgcccttttgagggaagcacacattctgcaaggccgtggaaacaaagggaggaactgtttgtagccctcgtacagacgccccaaacaaacagagccaagttacaccctgtttaaccctgccttcaaagggacgactctgtaagattctctgctacttattcaagttgacacgatgcccttcacactccacctgaggtcccgccttccctctgccataaggaggttgattctacaaacgaaaccaaacatcagaaatacatccagcatggctggagagctccgaccagccagcctggtggccctagccaggtgccttgctccan

SEQ ID NO: 2919 - DNA, 434 bp, Homo sapiens
gcgctcttgcgcactaatgactgactgccccactgagaagggtctagcggtgcacatgtcaccagctgggcaacattgagaaagggaggcttcctatgctcattttcctgggctgttacagaagaagactggaagagcgcgcagggaccatgtcggaggagaccgcgagcgggcccacagaggaccaagtggaaatcctggagtacaacttcaacaaggtcgacaagcacccggattccaccacgctgtgcctcatcgcggccgaggcaggcctttccgaggaggagacccataaatggtttaagcagcgcctggctgagtggcggcgctcataaggcctgccctcagagtgcagatccgtcacagactaaggagatggccggcattgacagcttcactccatgaaggccatctctgtttctctcctccgctta

SEQ ID NO: 2920 - DNA, 423 bp, Homo sapiens
  misc_feature (1)...(423): n = A,T,C or G
caccaacatggtatgcaggttctggctactatccggatgaaagctacaatgaagtatatgcagaggaggtcccacaggctcctgccctggactaccgagtcccccgatggtgttatacattaaatatccaggatggagaagccacatgctactcaccgaagggaggaaattatcacagcagcctgggcacgcgttgtgagctctcctgtgaccggggctttcgattgattggaaggaggtcggtgcaatgcctgccaagccgtcgttggtctggaactgcctactgcaggcagatgagatgccacgcactaccattcatcactagtggcacttacacctgcacaaatggagtgcttcttgactctcgctgtgactacagctgttccagtggctaccacctggaaggtgatcgcagccgaatcn

SEQ ID NO: 2921 - DNA, 418 bp, Homo sapiens
cagcagcggctcccggagtggagggaccctgataagtactgcccctcttacaacaagagtcctcaatccaacagcccaatgcttctgtctcgactgcactttgagaaggatgcagactcatctgagcgtatcattgctcccatgcgctggggcttggtcccttcttggttcaaagaaagtgatccttccaagctgcagttcaatactaccaactgtcgtagcgataccgcaatggagaaacggtcatttaaggcgcctctgggaaagggaagacgctgtgtcgttttagcagatggattctatgagtggcagcgatgtcagggaacaaaccacaggcagccatacttcatctattttcctcagatcacgacagagaagtcaggtagcattggtgctgcagacactcctgagaactgtg

SEQ ID NO: 2922 - DNA, 406 bp, Homo sapiens
acagaaatgggtttcatgcctgaaaagctttttacagaaagatgccgcctgtagccagtgacagccgcaaccctacaggcctcagttccttgcagaggtgaggggtagagagtcagcctctctcccttccagcagcgacccagcttccctccacttccaggtggtgctgggctcaccaagggagcactggtgggtgctctgaaaacccacaggatcccacctccaggcccacctgggtcccatctcactctcttcttctttcaccaattgctaacatagaccttgttgggatcacgatggcttcacaagccagctgttgggtttgctatgtcactgtggctcagtcacatccctgcgtgtatactgtctgcggggcacatatgtatccatttagagctaaaggaat

SEQ ID NO: 2923 - DNA, 481 bp, Homo sapiens
  misc_feature (1)...(481): n = A,T,C or G
aggnatnnnnnaacatgattcgtgcagaccccccgaatcccgggcaccacgcgtccggaatgataataatcccagcccagtcaaagcaccgccacctgtaggcttctgtctcatggtaattactgggcctggcctctgtaagcctgtgtatgttatcaatactgtttcttcctgtgagttccattatttctatctcttatgggcaaagcattgtgggtaattggtgctggctaacattgcatggtcggatagagaagtccagctgtgagtctctccccaaagcagccccacagtggagcctttggctggaagtccatgggccaccctgttcttgtccatggaggactccgagggttccaagtatactcttaagactcactctgtttaaaaatatatattctatgtatgcgtatatggaattgaaatgtcattattgtaacctagaaagtgctttgaaatattgatgtggggaggtttattg

SEQ ID NO: 2924 - DNA, 388 bp, Homo sapiens
gcagaagtctgaaatcggagtgtcaggaggaccacactccctctggaggctccagggaaggagccttccttgcctccccagcttccagtggcggccagcagtctttggcttgtggccacattgctgcagtctctgcctccgtcgtcacgtggcctcctgtgagtctctgttctgtgttccctcataaggacaccactaggccccaccctactccagtgtgacctcaaccgcctacatctgcaaagctgctgtctcaaataagctctcagtctgaggttctggatgggcgtgagtttggtgggcaccagtcaccccaggacaggagtggagccattggctggaagagttctcatagcagggactcagggcaagggtggtgctggtggca

SEQ ID NO: 2925 - DNA, 475 bp, Homo sapiens
cctagcctttctattagctcttagtaaaattacacatgcaagcatccccgttccagtgagttcaccctctaaatcaccacgatcaaaagggacaagcatcaagcacgcagcaatgcagctcaaaacgcttagcctagccacacccccacgggaaacagcagtgattaacctttagcaataaacgaaagtttaactaagctatactaaccccagggttggtcaatttcgtgccagccacaaaaaaaaaaaaaaaaaaaaaaagggggggcccttttaaaagatcccttggggggcccaaatttaccgggggtgggaaagttatatttttttcctttagggggggcgtattaaaacctccctggggatttttggaaaagaacctttttttggggggggggaattatgggcccaccctcctcacaaaatttaagggtttaggggaaaaaaaaaatttttaaggggtaaagggggacaa

SEQ ID NO: 2926 - DNA, 397 bp, Homo sapiens
ctggatctctgaatacccaggccccctccaccatggccagccggggtgggggccggggtcgtggccggggccagttgaccttcaacgtggaggccgtgggcattgggaaaggggatgctttgcccccacccaccctgcagccttctccactcttccctcccttggagttccgcccagtacctttgccctcaggcgaggaaggggaatatgtcctggcactgaagcaagagctacgaggagccatgaggcagctcccctacttcatccggccagctgtccccaagagagatgtggagcgttattcagacaaatatcagatgtcaggtccgattgacaatgccatcgattggaaccctgattggcggcgtctaccccgggagctaaagatccgagtgcg

SEQ ID NO: 2927 - DNA, 423 bp, Homo sapiens
  misc_feature (1)...(423): n = A,T,C or G
catccctgagaatccaaaattctccgtgccacctatcacaccccatcctagaaaaaaaaaaaaaaaaaaaaaaaaaaaaggggggcccctttaaaaaaacccctgggggggccaaatttaaccggggcttgcaaagaaaaaatttttcccttaaagggggccgtaaaaaaccccccctgggaatttttggaaaaaacctttttttttgggggggaaaaaattggcccaacccccccacaaaaattaaaccctttagggaaaaaaaaaaattttaaagggaaaaaggggaaaaacaaccccaaaagcctcgcggttaaaaaaattggggcnnnnnnaaaaaaaacatttttttttgcggaaaccaattgcacccccctctcctaaataaaaagcccctgggaaaattgaattttaagggattga

SEQ ID NO: 2928 - DNA, 568 bp, Homo sapiens
  misc_feature (1)...(568): n = A,T,C or G
nagagttgatcccgtgaccgcnngcaattcccggccgacccacgcgtccgcgctttccatggtgtagtcaatgccaagtgatgcatctaggcaggaaaatttactctttgcttttttgggggcaattagtacatttgtgaagtgcagcatccaagaaacagcctgttttttcatcccttgagaaaggagcagtcattgcagcttttctgtccttgtcggcctgcagttcctggggaaaagagtacatctgagctacttgtccaagcctctgtctgcaggtgacaggttttgggggaaatgagatgcattaagtagaacatcatctcgggtcagacattgccccttttgtttgccaatgccccagtcctagagacttgtcctgacagtgccgcacacctacttttgatctctcagagcaggtggctccatccccagacaagcctggttgctctccgaggcccctccacctgctccctttattgccccattcttgtggctggccgggccacttggcctcccttcttgccggtgacagcgttcaatcatctccccgttccccatgggccag

SEQ ID NO: 2929 - DNA, 399 bp, Homo sapiens
aaaattctgtcgacagtggtaacagagtcagaggtcaatagtttccaagcatgaactaaacctaaacagcaagaaaaatatcaaaatgtatgcaaaaatacacagaaaggttattgatcttctaaaatcataccagattttagaagaaataccagaaaatagccttaaggaaataaaccttgtgtttgtctaataaaacccatcaagaagtatgtaataattacatcaaccctcttgaaatttttttaaaaaggccaagtctatagaatgaatagtatcaggccaagaaaaaaaattcaggccctgtttccaaggacaataatagtggaacagacagatagtggccagtctagcctggggaatgcaaaccaaccaagtaaaaaatttgacaactcagtt

SEQ ID NO: 2930 - DNA, 471 bp, Homo sapiens
  misc_feature (1)...(471): n = A,T,C or G
aggtgtccnnnnnncctagaaaactgacggccntgnccacggaaccccgggncgacccacgcgtccggcggtgcacgcctgtagtcccagctactcgggaggctgaggcaggaggatcacttgaacccggaaggcggaggttgcagtgaaccgagatcacgccactgcactccagcctggcatcagggtgagactccgtctcaaagaaaaaaaaaaagataaaagaaactttgattagaacatagccatgcccatttgtttacatatgtttatggctgatttcacactgcaacagcagagttgaattgttgcaacagaggctgcaagccaaaaatatttattatctggccctttacagaaaaatgtgcggacccctgggccaaggcagacagcctggctgatgcctcagtgggatgagccaggtcacatccacctatgcatctgggggcggaggctggctccactgccaan

SEQ ID NO: 2931 - DNA, 459 bp, Homo sapiens
  misc_feature (1)...(459): n = A,T,C or G
ntctgaactacagttgatcctacgaacagccccggaanntacggaccgacccacgcgtgcgtgaacttggagcatccagagatgctggagaatgcgtctcgggagctgtggatgcgcgtctggtcaaggaatgaagacatcaccgagccgcagagcatcctggcggctgcagagaaggctggtatgtctgcagaacaagcccagggacttctggaaaagatcgcaacgccaaaggtgaagaaccagctcaaggagaccactgaggcagcctgcagatacggagcctttgggctgcccatcaccgtggcccatgtggatggccaaacccacatgttatttggctctgaccggatggagctgctggcgcacctgctgggagagaagtggatgggccctatacctccagccgtgaatgccagactttaagattgcccggaggaagcaaactcttcgtataaa

SEQ ID NO: 2932 - DNA, 463 bp, Homo sapiens
  misc_feature (1)...(463): n = A,T,C or G
nagagcgccggctnncccggaaacttttggcgagcacngncnctaatntagggngccccacccgtccggaacccgggagctggcgccatggtgctgttgtctcgttctgtttgagcacgcggtcggctacgcgctgctggcgctgaaagaagtggaggagatcattttgctgcagccgcaggtggaggagtccgtgctcaacctgggcaaattccacagcatcgttcgtctggtggccttttgtccctttgcctcatcccaggttgccttggaaaatgccaacgccgtgtctgaaggggttgttcatgaggacctccgcctgctcttggagacccacctgcctcatcccaggttgccttggaaaatgcacaacgccgtgtctgaaggggttgttcatgaggacctccgcctgctcttggaaacccacctgccgtccaaaaaaaaaaaaaaagggcccaatggc

SEQ ID NO: 2933 - DNA, 401 bp, Homo sapiens
aacatggccatgtctgttcatatatatatatattgtctagatctgctttcacattataacagcagagttgaatagttgagacagagatggtatgtgtcctccaatacgaaatatagttattatttgactttacggaaaaaagtttgctgactcctgctacagattgtagtggggcagtaaaaatatgcacttgtgtctcaattttgtcatctttaaataaaggtagtaatattacttatctcatagggtgttgtaatgataagtgttcattaaacgttaactgttagaggaaagcacataaactttgttcaatattctcagtggatagttctctggaagactccttcttatgtgtgtctactgatttttgttcatcttcctctgcagtactgcagggaaag

SEQ ID NO: 2934 - DNA, 420 bp, Homo sapiens
gccgtgggatcccggataggaggaggaggggacctataggacgttttaacatggacctggaaaacaaagtgaagaagatgggcttatgtcacgagcaaggatttggagccccttgtttaaaatgcaaagaaaaatgtgaaggattcgaactgcacttctggagaaaaatatgtcgtaactgcaagtgtggccaagaagagcatgatgtcctcttgagcaatgaagaggatcgaaaagtgggaaaactttttgaagacaccaagtataccactctgattgcaaaactaaagtcagatggaattcccatgtataaacgcaatgttatgatattgacgaatccagttgctgccaagaagaatgtctccatcaatacagttacctatgagtgggctcctcctgtccagaatcaagcattggccg

SEQ ID NO: 2935 - DNA, 409 bp, Homo sapiens
  misc_feature (1)...(409): n = A,T,C or G
cccacgcgtactactttaagttctatcagtgacttctgaatccttataatggcctctttgtagaaccctgtggtatagaggagtatggccactgccccactatttttattttcttatgtaagtttgcatatcagtcatgactagtgcctaaaaagcaatgtgatggtcaggatctcatgacattatatttgagtttctttcagatcatttaggatactcttaatctcacttcatcaatcaaatattttttgagtgtatgctgtagctgaaagagtatgtacgtacgtataagactagagagatattaagtctcagtacacttcctgtgccatgttattcagctcactggtttacaaatataggttgtcttgtggttgtaggagcccactgtaacaatactgggcagccn

SEQ ID NO: 2936 - DNA, 416 bp, Homo sapiens
  misc_feature (1)...(416): n = A,T,C or G
cgggtagccatggccttgcggctcctgaagctggcagcgacgtccgcgtccgcccgggtcgtggcggggggcgcccagcgcgcgagaggaattcatagcacctgtgcagggcaaactgcgctatggaatggggcatttcctacttggggattaagcatgcggaggaccgacagaacgcaacctagcgataactgtagatggcactatatgtactggaaaaggcaaacttgcaaaagaaataacacagaaactatgcttcaggcactttcctgatgcggggattcattatccagacagtaccacaggagatgggaagcccctcgccaccgactataatggcaactgtagtttggagaaattttacgatgatccgagaagcaatgatggcaacagttaccgcctgcagtcctggttgn

SEQ ID NO: 2937 - DNA, 414 bp, Homo sapiens
  misc_feature (1)...(414): n = A,T,C or G
gcgcccacgcgtncgcaagaaaggaatgaagaaatagagaaactggagttcagagtaagagaactggagcaggcgcttcttgtgagtgcagatacttttcaaaaggtagaggaccgaaaacactttggagctgtagaagctaaaccagaattgtccctagaagtacaattgcaggctgaacgagatgccatagacagaaaggaaaaagagattacaaacttagaagagcaattagaacagtttagagaagaactggaaaataagaatgaagaagttcaacaattacatatgcaattagaaatacagaaaaaggaatctactacccgcctacaagaacttgaacaggaaaacaaattatttaaggatgacatggagaaactgggacttgccataaaggaatctgatgccatgtct

SEQ ID NO: 2938 - DNA, 400 bp, Homo sapiens
  misc_feature (1)...(400): n = A,T,C or G
gaacgtggaggccaaagtggtgtgcttctaccggaggcgggacatctccagcaccctcatcgccctggccgacaagcacgcaaccctgtcagtctgctataaggccggaccgggggcggacaacggcgaggaaggggaaatagaagaggaaatggagaatccggaaatggtggacctgcccgagaaactaaagcaccagctgcggcatcgggagctgttcctctcccggcagctggagtctctgcccgccacgcacatcaggggcaagtgcagcgtcaccctgctcaacgagaccgagtcgctcaagtcctacctggagcgggaggatttcttcttctattctctagtctacgacccacagcagaagaccctgctggcagataaaggagagattcgagtn

SEQ ID NO: 2939 - DNA, 442 bp, Homo sapiens
  misc_feature (1)...(442): n = A,T,C or G
cccacgcgtccgcagtgacaaccctttctctccagttctccactccaatgataatagttcacttacacctaaacccaaaggaaaaaccagctctaggtccaattgttctgctctaactgatacctcaaccttggggccagcatctcccactgcctccaaatattagtaactatgactgacgtccccagaagtttctgggtctaccacaccccctaacaacccccctcctantaaaaaaaaaaaaaaaaaaaaaaaaaaaaaaaaaaaaaagggggggcccttttaaaaaaacccttggggggcccaaatttaacgggggaaggaaaaataatattttttcccttaagggggggcaaaaaaaaccccccctgggaattttgggaaaaaacctttttttggggggggggaaaaatgggcccaccctccccccaaaatttaaggc

SEQ ID NO: 2940 - DNA, 372 bp, Homo sapiens
  misc_feature (1)...(372): n = A,T,C or G
caggaaccatttgtagcagtggtgattgatccaacaagaacaatatccgcagggaaagtgaatcttggcgcctttaggacatacccaaagggctacaaacctcctgatgaaggaccttctgagtaccagactattccacttaataaaatagaagattttggtgtacactgcaaacaatattatgccttagaagtctcatatttcaaatcctctttggatcgcaaattgcttgagctgttgtggaataaatactgggtgaatacgttgagttcttctagcttgcttactaatgcagactataccactggtcaggtctttgatttgtctgaaaagttagagcagtcagaagcccagctgggacgagggagtttn

SEQ ID NO: 2941 - DNA, 452 bp, Homo sapiens
ctccaaaggagagcttgtggagatcggatcttttctccagcaattgggggaaagaaggctttttctctgaattcgcttagtgtaaccagcggcgtatattttttaggcgccttttcgaaaacctagtagttaatattcatttgtttaaatcttattttatttttaagctcaaactgcttaagaataccttaattccttaaagtgaaataattttttgcaaaggggtttcctcgatttggagctttttttttcttccaccgtcatttctaactcttaaaaccaactcaagagacaaagaaaaactttgaagtagtggatctggtggatgtcaatacccctgatttaatggcacctgtgtctgctaaaaaagaaaagaaagtttcctgcatgttcattcctgatgggcgggtgtctgtctctgctcgaattgacagaaaaggattctgtgaagg

SEQ ID NO: 2942 - DNA, 418 bp, Homo sapiens
cagaatttcatgttcacttcctactttcaacatgatcagctcaacccattgtacttattggattttatttgaaaaaaatttcacacacaaagtttgactgtcattagatcacagcacactggctgaagagtgttaaagaaaaaattattctgacatatggaaaactggaagacagaagtacgggaaggcgaagaaaagaatagagaagatagggaaattagaagataaaaacatacttttagaagaaaaaagataaatttaaacctgaaaagtaggaagcagaagaaaaaagacaagctaggaaacaaaaagctaagggcaaaatgtacaaacttagaagaaaattggaagatagaaacaagatagaaaatgaaaatattgtcacgagtttcagatagaaaatgaaaaacaagctaag

SEQ ID NO: 2943 - DNA, 488 bp, Homo sapiens
  misc_feature (1)...(488): n = A,T,C or G
tgcatggtcccaattganccctngganattgatgacttgcgggaccgacccacgcgtcccggcacataccagacagacaacaccattctcacgatgttgaatgtgttctaaattttccaggcctgagaaaagaacagctgtgattctgcgagtttgcctgagtgtcaaggtcagacttaggagttgagtgttgtcctgcgcgtcaggctgaggttcctcgctctcatctcttacttgcccagactcgtgattgcagggatgagatagtcctgctataggaaacatttttttttctttgccagatcagcctgatcaaatgtttctaaagctaaaccaaatgacatattggcttgcaaggattacccacacccttgcatcagtaaaaaaagaaacaaactgaactgcctggagggagtggagagaggctattttgtgctctgaaagatgcccaaggcagctgtagatagcattgttttcatgaaacgtgg

SEQ ID NO: 2944 - DNA, 383 bp, Homo sapiens
tgtggagctgcggcccaccacgctgtcggaggagcgggcactgcgggagctcgccctgccaggctgcacctcacgcatgctgaagttactggcgctgcgccagctgccggacatttaccccgaccttctcggcctgcagtggcgcgactgtgtacgccgccagctgggtgactttgacactgaggctggagctgtgtcctcctcagagcccactgtggccagagatgagccagagagcctagccctggctcagaagtcaccggcccccaaggtcaggaagccaggcaggaagccaccaacccctggcccggaaaaagcaaaggcagctgctggggaagagtccttgggtgccttccctacccctgctaccagtgccagcccac

SEQ ID NO: 2945 - DNA, 476 bp, Homo sapiens
  misc_feature (1)...(476): n = A,T,C or G
gaacatccttcttttataagcaccctaaaatagtatggcactacttaatggcattcttcatgaacaaaagcatactacatttactaacaaagcacgcattttctgtctggaaggaagtgtaacaatgctaattatgttttaaatccatgaggctcattaagaggaatcacataactaatattataatttctcttctgagcttagggtaggcagattatttttaaaataagataattaatttaaagatataacatatttctttaattccatatctaacatttaactttaaaaaatgttcttttaaaaatgaaggatgctcaagtataaggaaaacataaatatgcaaacacatacataatttttattagagtatgtagcatgatattagactgagccgaattnnnnnnnnnnnnnnnnnnnnaannnnaaannnnggggggggcccttttaaaaaataccttggggggcccaaattt

SEQ ID NO: 2946 - DNA, 451 bp, Homo sapiens
  misc_feature (1)...(451): n = A,T,C or G
gtgccggaganaaanactgatnccntcggactgacgcccgcttgcacgggccgacccacgcgtncggtggaggcaggctgcggcagacggcgacagtggctttggcgccatggctgggcttgcaggatccctgctgccttggtgatcccgggctgacagccagagagcacagcggctcagctcctggagagtgagggttgaagaaagcggagggcagccgcctgcgcccgctggctcccattaggtcggttcctgcagcggtgcccggcagccttggtgaaggccctgcccggcagagatcatgtattgcctccagtggctgctgcccgtcctcctcatncccaagcccctcaaccccggccttgggttcagccacttcatgttcatgggcttctacctgctcagcttccttctggaacggaagccctgcacaatttgggccttggttttn

SEQ ID NO: 2947 - DNA, 388 bp, Homo sapiens
cggtgagatctcgagccctcctcctgactagattggtgctgccctctcgggatgtacctgcagggggagacccgcaccagctcccgcctccatctgaagagggctccaggcatccggacctggtccctgctggttggaatcttgtcgattggcctggctgctgcctactacagcggagcctgggctggaagctcttctacgtcacaggctgcctgtttgtggctgtgcttaacttggaggactgggaggaagccatcttcgacaagagcacagggaaggttgttttgaagacgttcagcctctacaagaagctgctgactcttttcagagctggccacgaccaggaggtggtcctgctccatgatgtccgtgatgtgagcgtggagga

SEQ ID NO: 2948 - DNA, 494 bp, Homo sapiens
  misc_feature (1)...(494): n = A,T,C or G
aggcactgagaccctccgaanncctttgggcttgcancggcncgaanttngggnaacccacccgtccgcccacgcgtncgactcacctcccccaaaaggaagggaagcacatcccatcaggagagctgctcttggagcatctcagagtcttttctctcctttctctttctagaccccagatgcctgtccctgctttgttgttgttgttgttttccccgacttagtttcctaggggaaagaaacagatgggcttttccagaaaagccaccacgtgccttctccacgcccccttctcctccccttgcccttaggagcctcagcactgctgttgccgtgacaactatgcagggctcgacttgcggcttcctgcaggccaaaggtacagcactcaggtgccaccggggtagntaatctttcttggcccctgttctgcggcggccaaagggatagtcttatacatgcttcgtggaccttgagatacccgagttgntgcn

SEQ ID NO: 2949 - DNA, 409 bp, Homo sapiens
  misc_feature (1)...(409): n = A,T,C or G
aggggagcaatccttgcctccagaaggaaactggaccctggttgagaccttgattgaaactcctctggggattcgacctttgaccaagatcccaccttatcatgggccttattaccagaccttagctgagatcaaaaaacagattaggcaaagggaaaagtatgggcctaatccgaaggcctgccactgcaaatcacgtggctttagtttagagcctaaagagtttgataaacttgttgccctccttaagttaactaaggatcctttcattcatgaaatagctacaatgataatgggcatcagtcctgcttatccatttactcaagatataattcatgatgtaggtattactgttatgattgaaaacttggtcaataatcccaatgttaaagaacaccctggagctttn

SEQ ID NO: 2950 - DNA, 372 bp, Homo sapiens
ttccgggagttgccattctttccttgggggtgattccactcacaggagccctggggctcttcaacattttcctgtatacctgctgctacacaccactgaaaaggatcagcattgccaacacatgggtcggagctgtggttggggccatcgcgcctgtcatgggctggacagcggccacgggcagcctcgatgctggcgcatttctcctgggaggaatcctctactcctggcagtttcctcatttcaacgccctgagctggggcctccgtgaagactactcccggggcggctactgcatgatgtcggtcacccacccgggcctgtgccggcgcgtggcgctgcgccactgcctggccctgctcgtgctgtccg

SEQ ID NO: 2951 - DNA, 452 bp, Homo sapiens
gtgaggagaacaattttgatcccttcggctcgattcccgtattcccgggccgacccacgcgtccgcccatctctactaaaagtacaaaaattagccgggcatggtggcaggtgcctgtaattccagctacttgggaggctgaggtaggagaatcacttgaaccccagaggtggaggttgcaatgagccgagattgtgccattgcactccagcctgggcaacaaaagtgaaactctgtctcaaaaaaataaaaagacaagaagtaaagaataaaaatggcaagacaagaggcagtgagaagaggtgatgagtctttctttttttagagttagtctactttgtgttccctgctagtgagtctgtgcctatgggcttacatatggacataagtttgtgtaagaattatattttgttctatcctaagtggcagctctcaaaccttttcagccaggg

SEQ ID NO: 2952 - DNA, 403 bp, Homo sapiens
gcggtggatccggagccggtggagggggcagctgctgtctcacggaccacggcggcgcccgcagctcctcaccgaaacaaggagaccagtgctggtccagtggctgggatgggaaaagattattacaagattcttgggatcccatcgggggccaacgaggatgagatcaggaaggcctaccggaagatggccttgaagtaccacccagacaagaataaagaaccctacgctgaggagaagtttaacgagactgcagaggcctatgatgtgctaagagaccccaataaacggcgcctgtatgaccagtatggggaggaaggcctgaagaccggcggtggcacatcaggtggctccagaggctcctttcactacacctttcatggggacccccatgccacctttg

SEQ ID NO: 2953 - DNA, 401 bp, Homo sapiens
  misc_feature (1)...(401): n = A,T,C or G
accacctntncncgcgtctaggccttctgtcctggagaagaagctatagtcgttctccctcgctgcctcccggcgacccgcagctcatcgctctcatcgtggagcagctcaagagccggggcctttttgacagcttccgccgggactgcctggccgacgtggacaccaagccagcttaccaaaacctgaggcagaaagtggataattttgtgtcaacacatctggacaagcaggaatggaatcctacgatgaacaaaaaccagttgcgaaatggtctgaggcagagtgtggttcagtcagggatgttggaagctggagtagacaggattatttctcaggtggtggatccaaaacttaaccacatcttcaggccacaaatagaacgagcaattcatgagttc

SEQ ID NO: 2954 - DNA, 416 bp, Homo sapiens
cccacgcgtccggcaatgggtgaactgagctcatcaactccttggcatttgcagcctacctgtgcaatcataggagatggcctaaaggaaggacttgagaaactacatgatatgatcattaaaagaagaaaaatgttgcggcgacagaaaaagaaaagatgaatatcagtacctattatatctgtgtggagtaggttttctctggtctgattttgacaaatagaagagtgtctacagcgtggtttgcctgtctgccctcctggatgctattaaagctttgttttgttgaacaatcagatgcccaactctgttgccttgtggaagatgagtaaatgcagtgcttcttaaagtggtctcttctccctaccccacaaatcttttggtactaccatttggggaagccaagcaaggatagt

SEQ ID NO: 2955 - DNA, 484 bp, Homo sapiens
  misc_feature (1)...(484): n = A,T,C or G
aattgaatcgctgtggaacatggaccggacttcccgggncgacccacgcgtgcgaccacgcgtacggcccagagggctgctcagagtgggtgtttgccctgcaggggttgacagagcacacatcgatactggtgaaggacctgcccacgggggcccggctgcttttccgagtgcgggcacacaatatggcagggcctggagcccctgttaccaccacggagccggtgacagtgcaggagatcctgcaacggccacggcttcagctgcccaggcacctgcgccagaccattcataagaaggtcggggagcctgtgaaccttctcatccctttccagggcaagccccggcctcaggtgacctggaccaaagaggggcagcccctggcaggcgaggaggtgagcatccgcaacagccccacagacaccatcctgttcatccgggccgctcgccgcgtgcattcaggcacttaccaggtgacggtgcg

SEQ ID NO: 2956 - DNA, 375 bp, Homo sapiens
  misc_feature (1)...(375): n = A,T,C or G
aacttccacttctgtctgatgacacatgtgctgactgctccgtgtggttatggaatgcctttgctgactttatgagaagagacatgtcttactttccctgcccaatctcttgccagttgagctttatgattctgtgaaaaaaaaaaaaaaaaaaaaaaaaggcccaanttttaaacctttagggggttaaaaacccctttttttttcccctggggctgggggggaacacccttttttttgtttttttgaaaaccggctaaagggctttccccttgtgggctttaaggccgggggatttaaggaaaaattttttggggcccctaaggggggccccaaatttgaaaagaaaaggggtccccccccctttttttattt

SEQ ID NO: 2957 - DNA, 513 bp, Homo sapiens
  misc_feature (1)...(513): n = A,T,C or G
agtggccgannnnnnagnaaactgatacctgcagaancctagntggctncgancgacnccgcgttnnggctgagggttccgcaccacaagtttcacagtcagcggcacgggagcaagaaggattgaggctgggccttcccctgccggcccagaggggcttctgtcctgtgtgttgtgggaggggatgggaggcgcccctcgagtgtgcgtgtatcagggggtctcttctattctcccttgggttttatgggcgctgtgggccctgaaggaagacctgggcccagtgccctcaataaagagaggcccagaggtgaataaaaaaaaaaaaaaaaaaaaaaaaaaacaaaaaaaggaaaaaaaaanangggggggggcccttttaaaaaatcctttgggggggcccatttttcccgggggggggaaataatttttttttcttttttgggggggggttataaacctcgttgggggtttttttggaaaaaacccttttctttgggggaggaataaaag

SEQ ID NO: 2958 - DNA, 496 bp, Homo sapiens
  misc_feature (1)...(496): n = A,T,C or G
agccaactagacccctcgaanccagngttgccagagcgncnccaanttngggaaaacacccgtccgctatagttggttgagtcaggaattcagtttatggattagccagaaatggcagtgtttctgcagaatgccagaaccctgctaaaaaaaatctcggaagcatcaaaggcatttcagatggagaaaatagaacatggctatgagaacatgaaccacttcacagtcaacctcaatagagaagaaaagataatacgtgaaattgacttttacagagatgaagatgaagaagaagaagaaggcggcgaaggagaaaaagaaggagaaggagaagtgggaggagaagcagtagaagtggaagaggtagaaaatgttcaaacagagtttccaggagaagatgaaaacccagaaaaagcttcagagctctctcaagtggagctgcaggctgcccctggggcacttccagtttcctctccagagccacctccagccctgg

SEQ ID NO: 2959 - DNA, 374 bp, Homo sapiens
cccacgcgtccgcggacgcgtgggaaagaaaataatcaatgaggcatcccaattcaaaccaaaaggtatttctgagcacacagttctgtcagtagacggcaaggaggtcattggaccatcttccccagatttggttgttgcatctgaacactctttcccaccacacacaaccgagatgacttctgaatgccaggccccaccactttcagccaccccatctgaatatgttgttctatcagacgaagaggcagtcgagttggaacgatacacaccctcttctacatctgcttctgaattttcagtaccaccatatgcaacaccggaggcacaggaggaagaaattgtccatagatctctaaatctaaaaggtgcat

SEQ ID NO: 2960 - DNA, 394 bp, Homo sapiens
  misc_feature (1)...(394): n = A,T,C or G
annnnnnnagtctcagcttgacatctgtttaaaacaaacttcgttatccagcatcctgctggtttaaacttgcctgtctactatggctaagcccaaggaggtaatgtgtttgttaacgtggttttcatttggggtcagttattctaaaagaaaaaaaaagccctggaaggtttgggggtgaggtttggggatgcttgtcaggcaaagggtaggctgatatttctttgagcccatcctgactgctgcccccttgatctgatcagcaccccctttctctccaccagcaattcacaggcttgggtagagaccatccatttgtgccaaattgtgtagtgttttttttgtttttggttttagttttattttgtttcgtttttggggcttttctgtatat

SEQ ID NO: 2961 - DNA, 469 bp, Homo sapiens
ccggtctgtaatttttgggtcgacccacccgtccgggaagtttcagtacaaagaaatctcagcccccaccttcacagccagcaaggtcagcttctagttcaaccatcaatctaatggtgagcacagaaccattggctctcactgaaacagatatatgcaagttgccgaaagacgaaggaacttgcagggatttcatattaaaatggtactatgatccaaacaccaaaagctgtgcaagattctggtatggaggttgtggtggaaacgaaaacaaatttggatcacagaaagaatgtgaaaaggtttgcgctcctgtgctcgccaaacccggagtcatcagtgtgatgggaacctaagcgtgggtggccaacatcatatacctcttgaagaagaaggagtcagccatcgccaacttgtctctgtagaagctccgggtgtagattcccttgcactgtatcatttcatgctt

SEQ ID NO: 2962 - DNA, 465 bp, Homo sapiens
ctctggagtccctggcgtctgctattccctctctgcgtcatgtgcatgcagcattcagctcccatggataagtgagaacacgtggttttggttttctgttcgggttgagttctcaggctgacggcctccagctgcatgtgtggctgcaggggacgtgctctcctccattttcccggctgcatcgagttcatggtctgtctgcacacgtgaggccacctgccaggccacatcccagcacaggcgtcatccagtgatttcctcatcggccagagtctgcgtctgcagctttgtgagccacgcggccatggcctgactctgtgccgagagccccgcagcggtggccacagacaatagtaagcaactgggtgtggctgggcgccaataaaactgtatttattaaaacaggcaaggggctgggctgcggcagggcccatgtgcctgggaaagaggtgggaccgggcccca

SEQ ID NO: 2963 - DNA, 464 bp, Homo sapiens
  misc_feature (1)...(464): n = A,T,C or G
tggccctcgggtcaggcaaccggnccgagaaaaggatggttctccctgctccttctgttggtttctacttctttatacccatcaaaaggtatatcagagtaggttttcggtatgcagctgttccagagacatctgacagatagaaagataaagttgataacttcatgctttcatacatccagtaagtttgatgactaggtagagttgttaaaatggctgatatttattgagcacttaacagtataccagatactgtgctaagtgctttatgtaaataatctcatttactcttcattatgtttctacattatagatactattctaatcctcattagagaaaagtggggcttaagataacttgcctaatggcacatagaaagtggtagagcctggattcaaacacagatatgtctaactttaaatgtagtctatgaccttaactactacattcttctaacaatcag

SEQ ID NO: 2964 - DNA, 409 bp, Homo sapiens
aaaatacagatttagagaaggaaccagtaagtaggagacagatgtgaaggaaatggaaatgaggcaagaggacattggaagagagaagtttgctgtccaggagccaggtctggagcatcagtgtgagggagttcaggtaggctgggcctgtgcctctaggtagggacaagggaggctgggtagccagggctggtgcttaaaacccctgaggccatgagctcattggctgcctttgtagcatcctgtcttcttctgtgctgcctggtttgatctcatctcacctggattcaaagggtaaggtgggcatgggtcttgggcctgacacccaccaaggatgacctgtggactgccatcggatgctgaacagggagatgaaaggaggtcctcttaccatacccctctgccaccc

SEQ ID NO: 2965 - DNA, 411 bp, Homo sapiens
atcaccatggcggctgggaccctgtacacgtattctgaaaactggagggccttatgggctatcatcgttggtcagtacagcggggctcaggttcgcgtgctgtccgcaccaccccgcttacattttgtccatgccaaccgctcccgtgaatttctccgcaaatttcctgccggctaggtcccctcattcgagggagaggatggatgctgtgcgatggacagcaacgccattgtctactatgtgtgccttgaggagctggggcgaattactccaaaggcatgatcccagggggagcatagggtgagctatgctgattacgatatggtgcccccagccagaacctgggtggtgcccaccttgggcatgatgctgcacaactaacaggccactgagaatgcgacggaagaagtg

SEQ ID NO: 2966 - DNA, 471 bp, Homo sapiens
  misc_feature (1)...(471): n = A,T,C or G
cggcatgtaattttcgggtcgacccacccgtccgcggacgcgtgggatttgatgctaccgttctggtcatggattgggctgcttcttcagttcctaataccagaccaagcctcctgatgcctttctgcactgcaactgtgtgattgaaaaatgagatgttcatccaagcagtcaagccacagaaacccagcatgtccctgtcacaatctcatgggcaccttgatcatggcttaaccttcccttaaccttggggctcccaagccagagtcaaggtctgacgccacctcaaggtgacagctcatctccagcacagcacaggcgtgtgcacacagaggtgttccttgcagccccctccctctcatgtgtcctgagatgctgctcctgggagccccctcagaaaactgcctcacctgagacaagtgcctgctggacagaggtgtgattccaggcctggtgtcacatgacaccagn

SEQ ID NO: 2967 - DNA, 473 bp, Homo sapiens
cctagagactgaagggactcggagaggaggcactcaataaatattgtgtaaaaaaaacaaaaacaaaaacaaaaacaagaaaaaagatacaaaatatatagaaatatctttatttacatttttttctatattttattaactggctctgtttgtgagaggacctggaagcaataacacaccagtagcaatgaaatctaacatcaagatcttggtttcttaatatcattttccaatttaaaaaaaaaaaagagcttcttggagaaatggctgattctagagttggggcagggaaaatcaaagccgagactggagtatcttgtggtgccacaaagcaaggacatgctctgaaaggaagggagcttgacaagagggagccaggagctgaatcagggttcccaatggctaatgcttggacaatctgagcaacaaaataatgataatcttacatcataacccataaaataaatatccaa

SEQ ID NO: 2968 - DNA, 89 bp, Homo sapiens
cggacgcgtgggaaaagaaggaaaaaggagagaaagaaggaaggaatggaatggaagaaaagaaaagaaaaaataaaaaaaaaaaaagg

SEQ ID NO: 2969 - DNA, 392 bp, Homo sapiens
  misc_feature (1)...(392): n = A,T,C or G
cngcgctttgatatcttcagtcagtatatgtaaagattgtttatcggaagacccatgaatgagttttggtcagaaaattccacttgtttccttagtgtaatagcagtcatatctccgaattttttttaatgtggttcggatgtgaaataaccagttatacgtattaaacagtttacagtctaaaggaaacaaaacctatatgttataatatccaagaagtactaataggttttctgaaatgttatattctctatgcatttaaaaaaaaatgtaaacttgacattttagggtcttcagttacacatacacctgttataaggtgtttaatatagctcaggaaagtgagcattttgtgagaaaaatgaatatatcatatctaatggaaaagattg

SEQ ID NO: 2970 - DNA, 415 bp, Homo sapiens
ctttactaaaagcgaaaaaaagtaagttgattttcacacatgactaaataccattatctctttagttctacggtattcagaggcatttcttgcctatttcttgcctattaggtctgggctaatttgagtaatagatttaatattgtagatatatattgtcatactttagataggcagcacctaaggagagttattggaatatcagtatcatgtttctccaaatacatttctgctcatttacttttctctctacttagcttgtggctaatatttttcctaaggtcagaggctccttttgtcttacttaaataatttatgtgtgcttattttttgaataggattctgtaacaaagatgggagatgcacataaggagttggaacaatcacatataaactatgtgaaagaaattgaaaa

SEQ ID NO: 2971 - DNA, 406 bp, Homo sapiens
  misc_feature (1)...(406): n = A,T,C or G
cacgcatcagtccagctggcccacactgcaccagtgcatccgagtcctgctgggcaagagccgggaacagaggttcgacccctctgcctctctggacttcctctgggcctgcatccatgttcctcgcatctggcaggggcgggaccagcgcaccccgcagaagcggcgggaggagctggtgctgcgggtccagggcccggagctcatcagcctggtggagctgatcctggccgaggcggagacgcggagccaggacggggacacagccgcctgcagcctcatccaggcccggctgcccctgctgctcanctgctgctgtggggacgatgagagtgtcaggaaggtgacggagcacctgtcaggctgcatccagcagtggggagacagcgtgctgggcaggcgctgn

SEQ ID NO: 2972 - DNA, 413 bp, Homo sapiens
atggcggatgacgccggagcagcgggggggcccgggggctctggtggccctggtttggggaaccgcggtggcttccgcgtatgtttctagagtggcatcctgtagccggggtctctgccatggacggggccgacctcatgccgcggagctcgcgtaggcggggccgatgattacgagtggatgcccgtctacaggtagggccgcttggtcaaggacatgaagatcaagtccctgtaggagatctatctgttctgcctgccattaaggaatcagagatcattgatttcttcctgggggcctctctcaaggatgaggttttgaagattatgccagtgcagaagcagacccgtgccggccagcgcaccaggttcaaggcatttgttgctatcggggactacaatggccacgtcggg

SEQ ID NO: 2973 - DNA, 412 bp, Homo sapiens
ctaatgaaagggatttttcctgttgggtcctggtgcaagccttcaggtacattcagaaatacaaagagaaatgcagagtgaggtgacacactcatcttaggacaccagtgacagggaaaagcactcagagtttattctcgtggtggcacctgaactctcaacaactagaatatggagggtggtctaggaggaattcagttcagggaaataaaagcgaaagggaaaactagaggaagatgtgaaaaaggcaagaataagattcctcggccatggccatgtggttcagatagttgagaaccaccccaaatgggacttaagtctttggaaagtgccctcaatgataccctgccctcctaaaatgagtctgagagagaaaatgagtcttcttgttcatttgtggcactctgtccac

SEQ ID NO: 2974 - DNA, 462 bp, Homo sapiens
  misc_feature (1)...(462): n = A,T,C or G
tgaaattaatgtaagaataatccctatcattcaaaacaactgcagtttgtatccctggtcatggtaaaaatcttttgggttggcgaaagggttttttggaaataactgattaactgtatttctttgtcccaggttatggactttgtgactgatctagaattcacagttcctgatcttgttcaaggaaaagagtacttatttaaagtttgtgctcgtaacaaatgtggccctggagaacctgcatatgttgatgaacctgtaaatatgtcaactcctgcaagtgagtacattcttgatgatttcttacctaatcttgttgcctgtttttgcttttagacctanagttgaagttatggggcaaggcaggggttggcaatgtgaagagaactgcataggtggcctgtgtaagactgactctctcttccaaatgttgtagcggtacctgacccaccagagaaatgg

SEQ ID NO: 2975 - DNA, 548 bp, Homo sapiens
  misc_feature (1)...(548): n = A,T,C or G
tgatgcggggnagnnnnnnaattgacgcccgtgggacctttgaaggaactctcggancgacccacgcgtccggatttagggatacccgcttcctctttttcttgcaagttttaaatttccaaccttaagtgaatttgtggaccaaatttctaaggaactttttgtgtagtcagttcttgcacaatgtgtttggtaaacaaactcaaaatggattcttaggagcattttagtgtttattaaataactgaccatttgctgtagaaagatgagaaaacttaagctttgttttactacaacttgtacaaagttgtatgacagggcatattctttgcttccaagatttgggttgggggcactaggggttcagagcctggcagaattgtcagctctagtctgacataatctaagggtatggggcaaggatcacatctaatgcttgtgttccttatactctattatatagngntattcatgattcagctgatcttaacaaaattcgtagcagtggaacctttgaatgcatgtggctagaatttatgctaaatgat

SEQ ID NO: 2976 - DNA, 407 bp, Homo sapiens
  misc_feature (1)...(407): n = A,T,C or G
ctcaagcagcccggaggagactgacggtccctgggaccctgaaggtcacccgggcggccccctcactgaccctccaaacgcccctgtcctcgccctgcctcctgccattcccggcctgagtctcagcatggcggatgggagcagcgatgcggctagggaacctcgccctgcaccagccccaatcagacgccgctcctccaactaccgcgcttatgccacggagccgcacgccaagaaaaaatctaagatctccgcctcgagaaaattgcagctgaagactctgctgctgcagattgcaaagcaagagctggagcgagaggcggaggagcggcgcggagagaaggggcgcgctctgagcacccgctgccagccgctggagttggacgggctgggcttcgcggagctgn

SEQ ID NO: 2977 - DNA, 410 bp, Homo sapiens
cccacgcgtccgcaccattctattcctcagtctccaacatgactcttcattttggggagggaaagggaagatggggccatagcccctaccttgaaattgtacagtgtggaggggatgttagtgcctacctgtgacctttctgctccactgctcagcaagatgaggtaaggttgggtgtcagaggggacctccagcttctctgaagagccagcccttaaggcacttggagcaaaggtcattgagatcagctttatgtggagtaaggaggaggcctgggaaccgcttgtggcatcagttggggcgacaggtggatgagtgtgctctgatggagcttttacggcccacagccactgccaggagcctgagctcttccccatgcttgggacacgttccttggtccccacagcaga

SEQ ID NO: 2978 - DNA, 413 bp, Homo sapiens
aaacatcctatcatctgtaggctcattcatttctctaacagcagtaatattaataattttcatgatttgagaagccttcgcttcgaagcgaaaagtcctaatagtagaagaaccctccataaacctggagtgactatatggatgccccccaccctaccacacattcgaagaacccgtatacataaaatctagacaaaaaaggaaggaatcgaaccccccaaagctggtttcaagccaaccccatggcctccatgactttttcaaaaaaaaaaaaaaaaaaaagggggggcggtttaaaagaacccttgggggggccaaatttaacgggggttgggaaggaaaaatttttttccttatggggggccgattaaaaccctggctgggaatcttggaaaggaaccttactttgtggg

SEQ ID NO: 2979 - DNA, 405 bp, Homo sapiens
agagagactctgagacttcttccatcgcaatgacctgtattaaacacaagccccccaagcaaaagaagaggttgagtttgctgccaggattcagatcagcccttcccagggtctgcaggtgtcacatgatcacagttcagcgggaggctttccgtacccacactggctgtagccacttcagtccatctgccctccagaggaggggtttcttcctgatttttagcaggtttagaggctgcagcttgagctacaatcaggagggaaattggaaggattagcagcttttaaaaatgtttaaatattttgctttgctaatgtgctgatccgcactaactcatctttgcaaaaggaactgctccctcggcgtgccccagctggggcctctgaagggattcctcactgtgg

SEQ ID NO: 2980 - DNA, 430 bp, Homo sapiens
gctaacaaaaaaaagaacagagctgaggctcttgatagtccacaatgggggaaccacagcaagtgagtgcacttccagcacctccaatgcaatatatcaaggaatatacggatgaaaatattcaagaaggcttagctcccaagcctccccctccaataaaagacagttacatgatgtttggcaatcagttccaatgtgatgatcttatcatccgccctttggaaagcctgggcaacatagggagaccccatctctacaaaaatatttaaaaattcgctggatgtgatggcacatgacgggttccagccattccagaggctgaagtagaagggacactggagtccaggaggtcaaggctgcagtgagccacagtcatgccactgcactccagcttgagtgacagagtgagaccatgtcataaaacataaag

SEQ ID NO: 2981 - DNA, 399 bp, Homo sapiens
gcaggttcccgcccggatgaagcgaccaaagcgtttgatgaccggcaacatggtgcggtcggggaataaggcagctgttgtgctgtgtatggacgtgggctttaccatgagtaactccattcctggtatagaatccccatttgaacaagcaaagaaggtgataaccatgtttgtacagcgacaggtgtttgctgagaacaaggatgagattgctttagtcctgtttggtacagatggcactgacaatcccctttctggtggggatcagtatcagaacatcacagtgcacagacatctgatgctaccagattttgatttgctggaggacattgaaagcaaaatccaaccaggttctcaacaggctgacttcctggatgcactaatcgtgagcatggatgt

SEQ ID NO: 2982 - DNA, 409 bp, Homo sapiens
atcttatgctgctggttgtctacttcctactgcttccccgccgccgacgccgacatcatgagggaaatcgtgcacttgcaggccggtcagtgcggcaaccaaatcggcgccaagttttgggaggtgatcagcgatgagcacggcatcgaccccacgggcacctaccacggggacagcgacctgcagctggaacgcatcaacgtgtactacaatgaggccaccggcggcaagtacgtgccccgcgccgtgctcgtggatctggagcccggcaccatggactccgtgcgctcggggcccttcgggcagatcttccggccggacaacttcgttttcggtcagagtggtgctgggaacaactgggccaaggggcactacacagaaagcgcggagctggtggactcggtgctgg

SEQ ID NO: 2983 - DNA, 424 bp, Homo sapiens
  misc_feature (1)...(424): n = A,T,C or G
ccgatgggcctgcaggtctctgtcgagcagcggacgccggtctctgttccgcaggatggggtttggtaaagttgttaagaataaggcctactttgagagataccaagtgaaatttacaagacgacgagagggtaaaactgattattatgctcggaaacgcttggtgatacaagataaaaataaatacaacacacccaaatacaggatgatagttcgtgtgacaaacaaagatatcatttgtcagattgcttaatgcctgtagaggggggatatgatagtctgcgcatcgtatgcacacgaactgccaaaatatggtgtgaaggttggcctgacaaattatgctgcagcatattgtactggcctgctgctggcccgcaggcttctcaataggtttggcatggacacaanaattaaggncagtggt

SEQ ID NO: 2984 - DNA, 427 bp, Homo sapiens
  misc_feature (1)...(427): n = A,T,C or G
cccacgcgtccgcccacgcgtccgcacctaagaaagcaaagaagagagccgggggcgccaactccaacgtgttctccatgttcgaacagacccaaatccaggaatttaaggaggccttcactatcatggaccagaacagggatggcttcattgacaagaacgatctgagagacacctttgctgcccttgggcgagtgaacgtgaaaaatgaagaaattgatgaaatgatcaaggaggctccgggtccaattaactttactgtgttcctcacaatgtttggggagaaacttaagggagcggaccctgaggaaaccattctcaacgcattcaaagtgtttgaccctgaaggcaaaggggtgctgaaggctgattacgttcgggaaatgctgaccacgcaggcggagantgttccaaggaggaggttgag

SEQ ID NO: 2985 - DNA, 473 bp, Homo sapiens
  misc_feature (1)...(473): n = A,T,C or G
aggaacaacatatgacgcactctcccctgaactctacacaacatattttgtcaccaagaccctacttctaacctccctgttcttatgaattcgaacagcatacccccgattccgctacgaccaactcatacacctcctatgaaaaaacttcctaccactcaccctagcattacttatatgatacgtctccatacccattacaatctccagcattccccctcaaacctttnnnanaaaaaagagagaaaaaaaaaaagaaaaaaaaaaaaaaaaaaaannnngggggggggggttttaaaaaattcccggggggggcccaatatttagggggggggggaaaatattcttttttttttttgggggggggtattaaaaccctcggggggattttgggaaaagacctctttttggggggggggaaatagggcaccccccccccaaggaattagagcgtgggggggaaatatattttt

SEQ ID NO: 2986 - DNA, 419 bp, Homo sapiens
aagacacccagtgagcccatacttgctctttttgtcttcttcacactgcgccatggggctcagcgacggggaatggctgttggtgctgaacgtctgggggaaggtggaggctgacatcccaggccatgggcaggaggtcctcatcaggctctttaagggtcacccaaagactctggagaagtttgacaagttcaagcacctgaagtcaaaggacgagatgaaggcatctgaggacttaaagaagcatggcccactgtgctcaccgccctgggtggcatccttaagaagaaggggcatcatgaggcagagattaagcccctggcacagtcgcatgccaccaagcacaagatccccgtgaagtacctggagttcatctcggaatgcatcatccagggtcttgcagcaagcatcccggggac

SEQ ID NO: 2987 - DNA, 429 bp, Homo sapiens
ccaatccatcctccaggattaggaggcggggcctttggtgatgcttggcctggtatgccttcacttggaaacagcggtttgcctgttctaggactggatgttccgggttttggaggtggaccaaacaatttaagtgggtcatcgggatttggagggggccctcaaaattttggaaatggccctggtagcttaggcggtcccccggggtttggaagtggccctcctggacttggaagtgcccctgggcatttaggggggccaccagcttttgggcctggccccggccccggccccggccctggcccaatccatattggtggaccccctggctttgcatctagttctggaaaaccaggaccgacagtaattaaagtgcaaaacatgccctttactgtgtctattgatgaattatagatttcttttatggct

SEQ ID NO: 2988 - DNA, 410 bp, Homo sapiens
tactgcagtgtggagaatggattggagggttcagaatgaatgtatagagaattcaaaggctcctgcaggagtccaagcaagaggattgcagatggtagcctggaagaggccagtagctgtggtgacaatggacaccaggtggatatgttggagagacacttagaagggtctcactctgtcacccagactggagtacactggtgtgatctcggctcactgcaacctccgcctcccaggctcaagtgattctcctgcctcagcctctcgagtagctggaattacaagcatgtgccactaccaccctgctaatttttgtatttttagtagagatgcggtttcaccatgttggccaggctggccttgaactcatgaccttaaatgatccacccgcctcagcctctcaagtgctg

SEQ ID NO: 2989 - DNA, 409 bp, Homo sapiens
  misc_feature (1)...(409): n = A,T,C or G
gccagactacaaaagaccttaaatacttacctaaggagttatgtaggcagtagaagtctgtattttaaaactagattgtgtttggggaaaaaaaaatgctggcaagagatcagtagctgaaaatgtcggcaagatgagttaggggactattgcaatagtccagatgaaaaacaaatgaagactatggttgggcaatggagatggacaatagaaagatttgaaagacatttcagaggttaaatatctaaaacctggtaactagccggatgtgtagggagacaaaggaatccagaatgagaacgggtggatggtagtgctattaaccacgacaggaattacacaaaggaagagcaagtttgctggtaagatattaatctggttttggttactggatcagaataaactgtgn

SEQ ID NO: 2990 - DNA, 460 bp, Homo sapiens
attttagctgttaatggcgagaccctggaaggtgttactcatgagcaagcagtcgccattctaaaacaccagagagggactgtaaccttaactgtgctgtcatgagcctcgggcctgatcacaagatagatgttgttgtttagaatatccacaggcagatgaagttctgagtgggtatgaaaagcaccctcaactaaaatgcaccttcattcttatttcttgccctctctgctcaggagaaatggctgaggtttcatgtgaatttcccaaatcaacaatcatctcctaatgtttcccagttcctgtcacctgttggcgaggttgatttctaaaacttaaatgagtctacctgttttgcatttaatttcagtgttccgatttcttttttctttttttttttttgagacggagtctcacttctgcacccaggttgcagtgagccagttcgggccctccactg

SEQ ID NO: 2991 - DNA, 463 bp, Homo sapiens
  misc_feature (1)...(463): n = A,T,C or G
gaataacactcaaaatcctaaggaaattgaacacttgaacaaaggattcttagcaaagcaattttacttctgcacagagggtgcctccctggccagttgtcctgagagcacacctgaacaaaggggcacgagagcctttattcctgatgcaagtcctgcccctgtaccctttccccattggccggggtcgggttgtacaatctaaactaatcctggttggctaaacattgtattttttttagatagggtgggcacgtaaaggaaagtggagagaataggggaaggggtgctgtaatgagccataaagttagtcctctttccaaataaggaaaggaatgtgagctggtactgataacacttggtagtgtggcgtgcctgggcatttaacaaaggcaagaagggaaaaggggaaaaaaggagaaaaatgagggggggtaactacgaattaaaaaaaaaaaaaaan

SEQ ID NO: 2992 - DNA, 471 bp, Homo sapiens
  misc_feature (1)...(471): n = A,T,C or G
attgttattcattccttattggattagcacaacatttacatatataaagggctaaagatacatctttggcatttctggtttcctcttgtggtccaatcaagtctttaggtcttaggctttgaagggtaactgagtaatgactgtgtctgtattccatgaggtcagggtgcttgcctcatttgcccacctctgtaccatcagtgtgtaacacaatgcttggcgcataaacagaactcaatgaataattgttgaatgagaaaatgaatgaaagatcctgcagccaaccacatgacttaactgaaaaaaggcttgatgcagcatcttgcttatacttcaggcaataaattttcaaggtttaaacaattataacttaaaaccaaataggggcaaaaagaggtaaggttattttttttttaaaagctctgccttcttccccctaactctactaattttcaggctctctatgtgccn

SEQ ID NO: 2993 - DNA, 413 bp, Homo sapiens
attttaaatcaaatgccacaaaagatacaggaagacattttaccataaagacaattattagagacaaatgaaaaataaaggaagatttatgtcaccaaagacagaaaatataagaatggcaagattcagaatatcaagcctatgtaacgtatttttagagaaacaaaagagctaattataatgaagtctggatggacaagaataaacagacaaatatgcaaaaaataagagttataaaaataaaggatgtaattgttgaaatcaaagctcaatatattgttttaaattcagatttaggttcaactaagcagagaatttgtaaactggaaaataaaaataaaaaatttttttagtgcagaaatataacaacttaaaaagtgtgaaaaacaagaaatatggaggattaaaaaaaa

SEQ ID NO: 2994 - DNA, 390 bp, Homo sapiens
  misc_feature (1)...(390): n = A,T,C or G
agcgttaacctgaaagaggaggtccaggcagccacaccgtcacgttagctcactcggacagccgcgaaacaccaggtgctgttacaaaatcaatatccagcatctcagtaggaacaagtgagcatcctgacaagacacacagcagnggttcgacttcctctcccattcaggatgaaccttgcctcacctctcaccctgctcatgtgatctgacttcaggttctctttgagagaagtaataggcaattaaacagactttgaaaaaatgggaaggcttcctgactcctgtctcttctattggccagctggaggtccaaggtgcccagctagagtcatgggccccacactatggattcaactcttgatatttctagccaagttataaccattg

SEQ ID NO: 2995 - DNA, 465 bp, Homo sapiens
  misc_feature (1)...(465): n = A,T,C or G
aatgaaaccttccaaaaagaggttctcggttgccgcctagataccacccaattgctggctaaagccatgaccaaagccccacaaccccccaaggcctgggtcttagtcacaggtgtagcttactaccagcccagtctgactgcggagtatgatgaagacagcccaggaggggacattgactttttctccaacctcctaaccaaatgggaagctgcagccaggcttcctggagattctacacgccaggtggtggtgcgctcaggggttgtgctgggccgtgggggtggtgccatgggccacatgctgctgccctttcgcctgggcctggggggccccatcggctcaagccaccaattcttcccctggatacacatcggggacctggcaggaatcctgacccatgcccttgaaganaccacgtgcacggngtcctgaatggagtggctccatccttcgccactaatg

SEQ ID NO: 2996 - DNA, 461 bp, Homo sapiens
ctctgatgaaggcagggatgctggggaacacaggctgatcttggggagggtcctgctgatccagctctttggggagacactgcagacccctccccttcccacagtggtacctgggacttgcctcggcgatatcctgcattatctgtctgcacatctggcgcttccgccatcttctgtggtcgttatgttgtctgttttctctacatataacaacatacgttcttataaaaaaacagcatattttggcccacttcctttcattctttttcctagcatccatgcacacatgcgtgcacatgcgcacgtattaacatcagaaccgtgctgtgcatatgggttaagttatgcacatttccccttgtccttaaaatgtacagcttttatggctcttccctaagtccgtgttttcagttttctgttaacacactagactttacctgcttaaatattttccaaagatt

SEQ ID NO: 2997 - DNA, 391 bp, Homo sapiens
gcgtgcggctcaaaaagccatttgaatgctttggtaaaaatttgttagtttcttatactttttagaatctctcaataaaatttttctaaataaattccacaaaaacaaagggtgaagatggtctctccctttcgttccccttcactcagttgtgctgaggtcaatagagtgtagagtttcagaaaggattccagcaggtttatatgtgaatataagtgtccctgaatggggcaggcattaaatagaagaatccctgctgtttaaatttcccgcatattccaattcacttttaaaaaataccatttgaatttgtatttcataaagtgactctggggtgcttactttagtcaattcttaaaattttttatttgttccctaagaaagtaattac

SEQ ID NO: 2998 - DNA, 430 bp, Homo sapiens
acagttctggagatccgtgatggaacacggattgagcgaatcggtgctcactcccacatccggagactggggctggacgatgccttggagccttggcaggcttcgcagggcatggtgggtgatctggcggcacgcgagccggccggcgtggtgctggagatgatccgggaagggaagattgccggtcgggcagtccttattgctggccagccgggcacggggaagacggccatcgccatgggcatggcgcaggggctgggccctgacacgccattcacaggcatcgccgtgagtgaaatcttctccctggagatgagcaagaccgaggcgctgacgcaagcctttcggcggtgcatcggcgttcgcatcaaggaggagacggagatcatctaaggcgaggtggtggagatccacattgatcgaccagcat

SEQ ID NO: 2999 - DNA, 430 bp, Homo sapiens
ctttgccatcacatagagaggatcaagtttgctttttatgagcagtttgccaactgagaaggacaaccaaagtgagctggatctttgaagcacaaatgcagcaaatccttcaccctgctttataagtggagctggaatagtcctggggctctggggcctgcaggtatcagcttgctctctttgcactttcggggaaggaggactcacagtgaggaagcaaaaactgtgcacagaagtggatcacctgctggtggaaatgtggacatctcttgttcagcagatggcagtttttaaaaaataaaggttgtgaggaaaagacttatataagaagaaaagcatttccagtggtgtggcctgaaaacaaagaataacctaggctgctggaaagcacccttttgggtgtttcattctgttccctcccattggagat

SEQ ID NO: 3000 - DNA, 407 bp, Homo sapiens
  misc_feature (1)...(407): n = A,T,C or G
aggaaatggcttctgttaatctctccttcagcttctcccgcccttcccatgcactcttcctgtttccctttccagttctcacggngactcaaggaacaacgtgtgaaatgaaagacctcaggtgctgtattggctcttgacagctcttcagaagaaaatacctcctgcctgttctgttcagtcctggtgcaggtgagtcactgccttgccagccaggcaagtattttaagaaacaaaatctaagccagaaccagcagagaaatacgagggatggattagcgccattagctttgatggtgtcttgttgtcatggcgctaggaaaatcactatcatttacagtcccactcaccagctgttttgctagaatttttgacatgagaggctggtggccaccctaacacaggcg

SEQ ID NO: 3001 - DNA, 410 bp, Homo sapiens
  misc_feature (1)...(410): n = A,T,C or G
tatcagtgcttgatggggctgcctggtggtggatttttttttgcagcgcctggtaagagtggagagccgggggaagaggttctgcggcgcccaagcctggtttcaccccaagactaagttctttcccgngttagagaagaagagagaacgcaaaaagaagaggggagagttctcccttcctcttctgcgtgcgtgttgtgttctctaagccagagccgagggacgtccaccatctgaacgggactggcccttgtgcctctccgtgcttttcanatggcccagggagagagcccttgggtgggacctcagagtttctggggccttgatggggctggggtagaggtggtgattgagtctcgggcccacgccaagggggttcgagaggaggacgctctgctggaaaacgagac

SEQ ID NO: 3002 - DNA, 496 bp, Homo sapiens
  misc_feature (1)...(496): n = A,T,C or G
tgggacnnccccaattgaagccattatgaacgcttgncggaaccncnccggaanncccggggcgacccacgcgtgcgttagaaaaagcatcaaatcccaaaattctgtctttgtgttctgaaatcaaatggcacttcattggccacctacagaaacaaaatgtcaacaaattgatggctgtccccaatctcttcatgctggaaacagtggattctgtgaagttggcagacaaagtgaacagttcctggcagagaaaaggttctcctgaaagggtaaaggttatggtccagattaacaccagcggagaagagagtaagtaaccacacctgaattgtagatttttcttcctttaggatggttgaagcttatggagaatgggtgggcccaagtgtctgatggataaggttatagaaacaaatcacaggatcacaggcctctaagttggctgttttatgtgtgatctacgtagcataatggcatgcaaagcagtctatgt

SEQ ID NO: 3003 - DNA, 475 bp, Homo sapiens
agcagctgaagcctggggtcagcaggcgctgcgggcgcagcttctgtgcaagcgatgacacgacacatgcagtggcttctggactgcgcgatgactggacgcaagtaacttctaggtctgcagacaagaggaagagaagatgaaggaagactgtctgccgagttcttacgtgcccatcagtgacagcaagtccattcagaagtcggagctcttaggcctgctgaaaacctacaactgctaccatgagggcaagagcttccagctgagacaccgtgaggaagaagggactctgatcatcgaggggctcctcaacattgcctgggggctgaggcggcccatccggctgcagatgcaggatgaccgggagcaggtgcacctcccctccacctcatggatgcccggacggcctagctgccctctaaaggagccatcgccccagaacgggaacatcacagcccaggggccaagcattcag

SEQ ID NO: 3004 - DNA, 459 bp, Homo sapiens
  misc_feature (1)...(459): n = A,T,C or G
actagttctagatcgcgagcggccacccttggctattttatttttattttttgtatttttttgtacagatggggcttcaccatgttgtccaggctggtttagaactcctgggctcaagtgatccacccaccttggccttcaaaagtgctgggattataggtgtgagtcactgtgcccaacctgaacttttttttttttaatctaaaccacccctataaggaagggataataatttaatatttaataaagggaaggcgtggaaatccataaacgctacctatctggcctgaggcacacagcaaatactcttatcgctgaaattcaaacccaggcctactggttgtaaaactctaaccatggaggcagggtgctcagttttttttctttatggcacactttgaaaagccttttaaaacattaatcccccttaatcatttcccctatgaggaaagagaaaan

SEQ ID NO: 3005 - DNA, 421 bp, Homo sapiens
  misc_feature (1)...(421): n = A,T,C or G
aagccgtgaggccggagcttatgtcgggaagggatggatcgctgagccgatagcgtccgctaggctgtctgcctcggtacctgttactgctgctacttcctcgtttgacaccttcctggaatctctcttgatttttgaggaaatacctagtaacaaacatgactgagttctggcttatatctgctcctggggagaaaacctgtcagcaaacatgggagaaattgcatgcggcaacttcaaagaacaataatcttgctgtcacttccaagttcaatattcctgacttaaaggttggcacgttggatgtcttggttggcttgtcagatgaactggctaaactggatgcatttgtagaaggagtggttaagaaagtagctcaatacatggctgatgtattggaagatagcaaagacaaagttcn

SEQ ID NO: 3006 - DNA, 431 bp, Homo sapiens
cccacgcgtccgcgggatatcccacaacttgccttgtaggcatctggccccttttgtgttggggctgtcctttttgatgtatggggcaaagatcactgggagctggcacctttggcttattcttcttttcactgtctatcctcactaagcagtcttttgatcacacctttcccatctccaagctcctctacatcttcttccagcacttaccagcgccgctggcttcgaagtcagacaacaagtttggaaaatggcatcatcccaagaaggtcaactgatgagacattcagcttggctgaagaaacctgtagctctaatccagctatggttaggaggaagaaaattgccataagcatcatcttttccctatgtgagaaagaagaagcacaaaggaatttccaggacttcttcttttctcattttgccctgtg

SEQ ID NO: 3007 - DNA, 412 bp, Homo sapiens
tcctttactcctctttctgaattatattcgtgactgtcaggtaatatacctgaccacttgtccccaccgtcactgctgtacacccttatctccttaacagaccattatggcgggctcctcagtgatctgtctgatctcacccctgcccccagagtgttccttacatgcagctggaaggatgctgggagcacctgtatcaggtcatatccctcccctgctcagaacacttccaaggctacatcttgctcggggtaaaacccagagtcctctgcaaggccctgcattgtctgccctcatcacctctctgacatcatctactcttattactgcctgtgctccagccacactggcccgaaggcctttgtgcttgctcttttctttgcctaaagaactcatgtatcagataacccac

SEQ ID NO: 3008 - DNA, 395 bp, Homo sapiens
agatggcggctgtgtcggtgtatgctccaccagttggaggcttctcttttgataactgccgcaggaatgccgtcttggaagccgattttgcaaagaggggatacaagcttccaaaggcccggaaaactggcacgaccatcgctggggtggtctataaggatggcatagttcttggagcagatacaagagcaactgaagggatggttgttgctgacaagaactgttcaaaaatacacttcatatctcctaatatttattgttgtggtgctgggacagctgcagacacagacatgacaacccagctcatttcttccaacctggagctccactccctctccactggccgtcttcccagagttgtgacagccaatcggatgctgaagcagatgcttttc

SEQ ID NO: 3009 - DNA, 579 bp, Homo sapiens
  misc_feature (1)...(579): n = A,T,C or G
ncggaattggccctagaacactnctcgcaaacccgcgtcgacccacgcgtccggatttgggtctcacctttgcctcttgccagccatgagatccctgagtaagtacctcctccgcctcatttgcaagacagggacaagtatggactcacagggctagtatgaaataaaaatggtaaggtgcttagcacagtgattagtgcctattaaatggattcagtacctgccatcactaatgaattgaaacttccctgggactgttaatgagagacaagggtgatgtctgaaatttttgctattagttgtagaaggaataaaaaactagggcctccaactaaattaatcatagagggaataaaaataaggtcctctaagtaaattgatgaagcttaaactcattgacctttgacactgaaacatcatgacctttttgcaggccaagtaacatttctgggcatcattnttttccctcattataaaactacatgagctgtttngattcctttcacctctaactntaatttgcagaatggtaagagaactgaaattatttctcctatggcttctttgtcgcattntccn

SEQ ID NO: 3010 - DNA, 416 bp, Homo sapiens
tgagagagctcgcttattattttattattttattttttagagatgggggtctcactatgttgcacaagctggactcaaactcctgggctcaagtgatcctcctgcctcagagagttggcttttatagcaaagccacttctgcaagaactagcccactcctgtgataacggcattcatccattcatcacagtggagcccttatgacctaaatgcctcctgaaggttccacctctcaataccaccacaagaggaaccaagttttcatgcttgaactttggggggacacattcattatatcaggcctcctggttatacaggcacattcatggtcttatatttgtgacttctgcttgttactgggaagaactgaggtttcttgaaaagactacaaaatttgaggccctacccaaactgtg

SEQ ID NO: 3011 - DNA, 446 bp, Homo sapiens
cgaggaagatggctgcatcccagcagcaagcttcagcggcttcctcagctgctggtgtatcgggtcctagttcggctggcggcccgggtccccagcagcagccgcaaccgccagcacaactggtgggccctgcccagagcggcctcctgcagcaacagcaacaggacttcgatcctgtgcagcgttataagatgctcatcccgcagctgaaggagagtctacagaccttgatgaaggttgcggcccaaaacttgattcagaacactaacatcgacaatggacaaaagagcagtgatggacccatacagcgctttgacaagtgcctggaagagttctatgcactctgtgaccagctggagctgtgcctgcgcctggcgcatgagtgcctgtcacagagttgtgacagtgccaagcactctccaacgttggtgcccacagccaccaag

SEQ ID NO: 3012 - DNA, 517 bp, Homo sapiens
  misc_feature (1)...(517): n = A,T,C or G
cggagaacagcggtcgcgccggcaagagcagcgggagcggcgcggngaagggggcggtgtccgcagagcaggtgattgctggcttcaaccgccttcggcaggaacagcgaggcctggcatccaaagcagctgagttggagatggagttgaatgagcacagcctagtgatcgatacactgaaggaggtagatgaaactcgtaagtgctaccgcatggttggaggagtgctggtggagcgaactgtcaaagaggtgctgcccgctttggagaacaacaaggagcagatacagaagatcattgagacactgacacagcagcttcaggcaaagggaaaagaactaaatgaattccgggaaaagcacaacattcgtctcatgggagaagatgagaagccagcagccaaggaanactcagaagggctggngctaggccactcaacttgagtgtgtctcctnggaccacggccttngcatttttctaccttgactccactctaaatcnctctattggaataatt

SEQ ID NO: 3013 - DNA, 425 bp, Homo sapiens
tgcacacttgtaatcccagctactctggaggctgaggcaggagcattgcttgaacccaggaggcagaggttgcagtgagccgagatggcgccattgcattccaacctgggcaacaaggctgcaactccgtctcaaaatataatgaagagaagagaaaagaaaacacatgttactatctccagttaaaactttttgttttttttttttgggtaggggtgggatgtaaaaaaaaattccccacctttaaaatttggagaaagggttttactgattgggatttaacacccctttacccttttttttttcccgtttttttttttgggccacaaggccttcccaagaataaaaacttaaattttggaaaaatattacctcaacccttattagggcttgggggactttaaaccatttggttaattaaaccc

SEQ ID NO: 3014 - DNA, 434 bp, Homo sapiens
aatttattttataaactcttggactatgtatttgacatgtaaaatatgtacagtattaacgtcaaccatctctttaaagttagcctataaatattgttgtataattttctttggtcagaaacacttggactgaatagtgacactcggtaaggattttcagtgccatttagcaaaacgtctttagtctatgcaactagcaaaaatctgcataatgcaacaacacagttttcacacttcaaattttacatgaggggttcttcacgattctcctggaacccagtctagcaaaatgagaggaaaggccctagggagatttatttctgttaaatagttaactctgctgagtatgacaaatagtgtctactatctcaaccctccaaaatttgcagagtgttgggactgtcatttgtgattctttttttttttttgggggg

SEQ ID NO: 3015 - DNA, 515 bp, Homo sapiens
  misc_feature (1)...(515): n = A,T,C or G
acgtgatgagcgcacgggctgcggagacgcaccggagcgctcgcccagccgccgcctccaagcccctgaggtttccggggaccacaatgaacaagttgctgtgctgcgcgctcgtgtttctggacatctccattaagtggaccacccaggaaacgtttcctccaaagtaccttcattatgacgaagaaacctctcatcagctgttgtgtgacaaatgtcctcctggtacctacctaaaacaacactgtacagcaaagtggaagaccgtgtgcgccccttgccctgaccactactacacagacagctggcacaccagtgacgagtgtctatactgcagccccgtgtgcaaggagctgcagtacgtcaagcaggagtgcaatcgcacccacaaccgcgtgtgcgaatgcaaggaagggcgctaccttgagaagagttctgcttgaaacatangagctgcccttcctggatttgagtggtgaagctgaaccccagacgaaatacagttgcaaagatgg

SEQ ID NO: 3016 - DNA, 418 bp, Homo sapiens
  misc_feature (1)...(418): n = A,T,C or G
cccacgcgtgcgcccacgcgtccggtggaatacttctcgggaggcagtgctgggtcctttccaccatggcacctaagaaagcaaagaagagagccgggggtgccaactccaacgtgttctccatgttcgaacagacccaaatccaggaatttaaggaggccttcactatcatggaccagaacagggatggcttcattgacaagaacgatctgagagacacctttgctgcccttgggcgagtgaacgtgaaaaatgaagaaattgatgaaatgatcaaggaggctccgggtccaattaactttactgtgttcctcacaatgttcggggagaaacttaagggagcggaccctgaggaaaccattctcaacgcattcaaagtgtttgaccctgaaggcaaaggggagctgaaggctgattn

SEQ ID NO: 3017 - DNA, 523 bp, Homo sapiens
  misc_feature (1)...(523): n = A,T,C or G
cccacgcgtccgccgcaggcttctgcctggccgccgccgcctataagctaccaggaggagctttacgacttcccgtcctgcgggaagtggcgggcacgatcgcaaggtagcgcagaagcttctcaatggccagcgccagctgcagccccggcggcgcactcgcctcacctgagcctgggaggaaaattcttccaaggatgatctcccactcagagctgaggaagcttttctactcagcagatgctgtgtgttttgatgttgacagcacggtcatcagtgaagaaggaatcggatgctttcattggatttggaggaaatgtgatcaggcaacaagtcaaggataacgccaaatggtatatcactgattttgtagagctgctgggagaaccggaagaataacatccattgtcatacagctccaaacaacttcagatgaatntttcaagttacacagattgatactgttggctacaattgcctatacacctngtatatgaagagtggacagatgatctgcactgcn

SEQ ID NO: 3018 - DNA, 472 bp, Homo sapiens
  misc_feature (1)...(472): n = A,T,C or G
gataaaacagacacacactttaatttttcccatttaactcttcacatactatattcatataggttttcactggatggggaaagagagcagaggtcggcaaacattttgtaaaggacagattttgtaaatgctttgtgggacatatggtctcttaaaactagtaagctttgctgtgagtatgaaagtgtctgtagctagtatgtaaacaaaggagtgtcactgtgcttcaatacaactttattatggacactgaaatttgaatttcatgtgatggtcatgtgtcgtgaaatattattgttttgaattatgtttccagccattaaaaaaatgtaaaatctcagccgggcacagcggctcatgcctgtaattctgccactttgggaggctgaggcaggcggatcacttgaagtcaggagttcgtgaccagcctggctaacatggggaaaccttgtctccactaaaaaaaaaaaan

SEQ ID NO: 3019 - DNA, 569 bp, Homo sapiens
  misc_feature (1)...(569): n = A,T,C or G
nagataactgacagtaacactctcgatacccgctcgacccacgcgtccgcccacgcgtccgcccacgcgtncgcccacgcgtccgatgactaacacccttaattccatccaccctcctctccctaggaggcctgcccccgctttaaaaaaaaaaaaaaaaaaaaaaaaaaaaaaaaaaaaaaaaaaaaaaaaaaaaaaaaaaaaaaanannnnnnnnnggggaggggggcttaaaaaaaaaaacacggggaaaaaaaaaaaaacccccggaaaaaaaaaaaatattttttattaaaaaaagggaaaaaaaaaaaccccttttgttttttaaaaaaaaaaaaaatttttttggggggggaaaaaaaaaaaaaaaaccccaaaaaaaaaaatccttgtaaaaaaaaaaaaaaaatttttgggggggggggggggccccccctccttttgtgggggctgaaaaaaaaaaaaaaatnnnnnnnnntnnnnnnntgcttggcgctcgngttgcctcctctttctccaatgataaaaagaagaaataaaaactgtgtttattttaaaaaaaaaaa

SEQ ID NO: 3020 - DNA, 469 bp, Homo sapiens
  misc_feature (1)...(469): n = A,T,C or G
nggatgccgctttctcnnnnngggcccgtttagcancngcannnacnntngnnggtaagnaaccgtnccaaaatttgtcatttgtgcattaaataaacagaggatgttggttaagtgatacttagatattggcacacacagggagcaactgttggcaggcagtatcgattttatgaagagaaagtgaagtttgaaaacttttcaaacttttctagttacaatccaatttttcagatttgataatgcttttccaaagtgaaaataagatacacaataatcattgctctgtgtgattacagataggattatccatctgcatagccttgtaacagtgccattttatttttagagctcaaatcttggtagataatgtagttttatatatctgaaagatcctgctatctgcacacttaaacacagttgatgtaaattgttggtttttctcacaacaggcattatatgcgtgggg

SEQ ID NO: 3021 - DNA, 426 bp, Homo sapiens
tcgcgcagggtaggggactgcgcggcggtgccaggccgggcgtgggcgagagcacgaacgggctgcctgcgggctgagagcgtctagctgtcaccatgggtgatcacgcttggagcttcctaaaggacttcctggccgggggcgtcgccgctgccgtctccaagaccgcggtcgcccccatcgagagggtcaaactgctgctgcaggtccagcatgccagcaaacagatcagtgctgagaagcagtacaaagggatcattgattgtgtggtgagaatccctaaggagcagggcttcctctccttctggaggggtaacctggccaacgtgatccgttacttccccacccaagctctcaacttcgccttcaaggacaagtacaagcagctcttcttatggggtgtggatcggcataagcagttctggg

SEQ ID NO: 3022 - DNA, 465 bp, Homo sapiens
  misc_feature (1)...(465): n = A,T,C or G
ngcgcggccnnctaaccccnaagctttagncgangcnngncnctaannttagggagccccacccgtccgagagcactttaggtgcactccaggttttaatggagattttgaaactaatggcttcagccaaataagaggcggcatcctgagctgttagacctggagaaggaggaaacagtgagaagtgaaaatatcaagagatatatgcagcaataccagaccctatgccctctttatactacagattttgacccattaatgagatgtgaaagtatttaatgagtcatacccagcattttttaatgaaaaagttagaatggaaaatatcagatatacatatcatgtattaggtgattgtgtaaaatatattccttactgtggactgtagggaagaagtttaaaaggtactgctctggaaaatactgccaaatagaggctgctaaaatgagaaatacccagagcccn

SEQ ID NO: 3023 - DNA, 538 bp, Homo sapiens
  misc_feature (1)...(538): n = A,T,C or G
cgggccgcnnnccccaatgaccccgatggaacgccgtggtaccgggccggaaccacgcgtcgacccacgcgtccgggcaagagcaagggccacgatgacagattacggcgaggagcagcgcaacgagctggaggccctggagtccatctaccctgactccttcacagtattatcagaaaatccacccagcttcaccattactgtgacgtctgaggctggagaaaatgatgaaactgtccagactaccctcaagtttacatacagtgaaaaatacccagatgaagctcccctttatgaaatattctcccaggaaaatctagaagataatgatgtctcagacattntaaaattactagcattacaggctgaagaaaatcttggtatggtgatgatttttactctagtgacagctgtgcaagagaaattaaatgaaatagttgatcagataaaaactagaagagaagaagagnagaaactaanngaaaaagaagccgaagaaagcctgaaagcattattccatggtactttcagtacagtn

SEQ ID NO: 3024 - DNA, 429 bp, Homo sapiens
  misc_feature (1)...(429): n = A,T,C or G
ngtattgctcaccactctggaggctggaaattgaagatctaggctccaccatgtttggagactggtgagggcctggcgtctacttccacgatggcgccttgatgttgcatcccctggagggggcaatgctgagtcacaggacagaaggaacagaggggcaaaagagcctaagctagttctctccagctctttcataaggcactaatccctcatccattctgcactcatggcctaataacctcctaaaagcctcacctgataatactcttgcgctggggattaactttcagcatgaattatggaggggacgaaaacattcctaatatagcactctccacacgttaattttctaatataaaaaattagcaagtaatagcacccattatttttctgaggattgagtaatattatacaggtaaagcaactacg

SEQ ID NO: 3025 - DNA, 387 bp, Homo sapiens
tgaatgggtctaatcccaaatccaggagcataatagatgtttgatgatgatgatggtaaaaaaaaaaccaagttattgttttaagtaataactttaattataataattgggagacagtatctatagaaatgagttcctaacacttaagatgctcttatgtggccatttcttgggggcttagaccactaatttttaatttttaagatcctttacattgctgattgaaagaaaatcttgtaagaatcctgcagagcaaactatttcttttcttttactttgataggtattttctattctttatagcaaatattttactattctttctgaaatgtgaagagttaatatggttatattcattaattccctaaataaaaagtttttaaaagg

SEQ ID NO: 3026 - DNA, 401 bp, Homo sapiens
  misc_feature (1)...(401): n = A,T,C or G
ttttaataatcaacaccctcctagccttactactaataattattacattttgactaccacaactcaacggctacatagaaaaatccaccccttacgagtgcggcttcgaccctatatcccccgcccgcgtccctttctccataaaattcttcttagtagctattaccttcttattatttgatctagaaattgccctccttttacccctaccatgagccctacaaacaactaacctgccactaataggtatgtcatccctcttattaatcatcatcctagccctaagtctggcctatgagtgactacaaaaaggattagactgagccgaatnccacactggacggaagcaaaaagaaaagagtatgctgaaaacaaccgggggggccgccttttaaatggtc

SEQ ID NO: 3027 - DNA, 408 bp, Homo sapiens
  misc_feature (1)...(408): n = A,T,C or G
cctttgaaggctcttcagggctatttacatgccccaaaatatctactgtgttcatgtggatgaaaaagcaacaactgaatttaaagatgcggtagagcaactattaagctgcttcccaaacgcttttctggcttccaagatggaacccgttgtctatggagggatctccaggctccaggctgacctgaactgcatcagagatctttctgccttcgaggtctcatggaagtacgttatcaacacctgtgggcaagacttccccctgaaaaccaacaaggaaatagttcagtatctgaaaggatttaaaggtaaaaatatcaccccaggggtgctgcccccagctcatgcaattggacggactanatatgtccaccaagagcacctgggcaaagagctttcctatgtgat

SEQ ID NO: 3028 - DNA, 436 bp, Homo sapiens
aacaacagaggcagaggataaaagaggaagagaaaagggcagcagaggagaggcaaagggccagggcagaggaggaagagaaggctaaggtagaagagcagaaacgtaacaagcagctagaagagaaaaaacgtgccatgcaagagacaaagataaaaggggaaaaggtagaacagaaaatagaagggaaatgggtaaatgaaaagaaagcacaagaagataaacttcagacagctgtcctaaagaaacagggagaagagaagggaactaaagtgcaagctaaaagagaaaagctccaagaagacaagcctaccttcaaaaaagaagagatcaaagatgaaaagattaaaaaggacaaagaacccaaagaagaagttaagagcttcatggatcgaaagaagggatttacagaagttaagtcgcagaatggagaatt

SEQ ID NO: 3029 - DNA, 414 bp, Homo sapiens
ctttctgcctggtagccttcaaactgagacacaggcttttatcctgccttcagattcgcctgggaacactggctcttcctgagtctcaagcctgctggccttgagacaagaactacatcagctctctcagttctcaagcctttggacttactctggaactaagccatcagctctcttgggtcgtcagcttgccaaccaactcatcctgaagatcttgggacttgccagccttcatagtcacgtgggccaattccttttttttttttttttttggaaagggggtttaactttgtggcccagggggaactgaaagggcccaatattggttcattgcaccctcaccctccggggttggaggaaccctccacctctccccccccaagtagcggggactacaggcccttgttaccttgg

SEQ ID NO: 3030 - DNA, 453 bp, Homo sapiens
  misc_feature (1)...(453): n = A,T,C or G
nactgactcatggcatcggcancgcaatggagggtagagaacgcgtccgcggacgcgtgggtttagaagaagctgnggatttggtgtcataatatgtggatgctgtattgggaaaaggacatggatacttctgaattgagtttccactgtccgcaacagccccaatggtgtggcttccatactcctctattgatcagcttctccaagctctgggagagaacagagccaacagtcacaacatcgcactgtcccagaaaatacttgacaaattggaggactaccagcaaaaagttgataaggcaacacgggatttattatatcgtcggaccttgtgatttggattgtcacctagcctttgtaaccgcttggtgcctcttatgacttaagactaccctacaggaaccctgtactcaaggccgatttttgtaactgtaaatgatgtgtacaacattc

SEQ ID NO: 3031 - DNA, 401 bp, Homo sapiens
gctacggcggctgcagggctccggcaaccgctccggcaacgccaaccgctccgctgcgcgcaggctgggctgcaggctctcggctgcagcgctgggtggatctaggatccggcttccaacatgtggcagctctgggcctccctctgctgcctgctggtgttggccaatgcccggagcaggccctctttccatcccctgtcggatgagctggtcaactatgtcaacaaacggaataccacgtggcaggccgggcacaacttctacaacgtggacatgagctacttgaagaggctatgtggtaccttcctgggtgggcccaagccaccccagagagttatgtttaccgaggacctgaagctgcctgcaagcttcgatgcacgggaacaatggccacagtgtcc

SEQ ID NO: 3032 - DNA, 408 bp, Homo sapiens
aagagaatggctgccagtggctgatgggtcccggtgatgggaagggtatcaggttgctggggagtttccactcttctctggtgattgttccttccctcccttcctctcccaccatgcgatgagcatcctttcaggccagtgtctgcagagcctcagttaccaggtttggtttctgagtgcctatctgtgctctttcctccctctgcgggcttctcttgctctgagcctcccttccccattcccatccagctcctttccccctgggtttccttggcttcctgcagcaaattgggcagttctctgccacttgcctaaaagcctgtacctctggattggcggaagtaaatctggaaggattctcactcgtatttcccacccctagtggccagaggagggaggggcacagtg

SEQ ID NO: 3033 - DNA, 473 bp, Homo sapiens
  misc_feature (1)...(473): n = A,T,C or G
ctttgacaaagatgcattgcaaaacaatcaacaaacaatcagattggcatgctatgtgtgagtgatgatccctgcagcatatgccataggcttgttgtagaggagctgctcagtaaatggtggattcaattgaaacaagtcttttttggatgcttaatgggaagttgtagggtgggtatgatggactaaaaattatttctaaagaagggtatatattgtatatattccagaatcttccgtttttatcgtttcttaaattaaaaaataaaaatttaactctgtcccaggttaactcagatgttaacacgtatatagaaatttttttcctctttccccgttaggcatctcacagtattttctgcttgtctgtttaggatgttaggtagaggaaaagagagtgatagaagattttttttcttaanannananannnnnnnnaaaaaaanncaacgtgcccgggctggggggctccc

SEQ ID NO: 3034 - DNA, 399 bp, Homo sapiens
  misc_feature (1)...(399): n = A,T,C or G
gaatatataatcatacattacctttttcaatatgcatcctttttgactcatgtcccatgtcatgaccggccaaatctccctctttgggcccaggaagtacatttggtgataagcccatcagcatctggttcatggacaacccattctgatggaccgctattatggcccaaaagaaaacaaacaaaacaaaacacaaaaacaccataacacacaaggttccaataagtcaattaaactctcttggactcaacagtaactataatattaatataatggtctacctttaaatttataatctatccctaaaaacactgtgataactgataaacatgataatttgtcagaatatgcagaanatattgaaaatgacatcacctcactttatttttattttgcata

SEQ ID NO: 3035 - DNA, 416 bp, Homo sapiens
  misc_feature (1)...(416): n = A,T,C or G
agaaggcggcggttgcaggcaagaagcctgtggtaggtaagaaaggaaagaaggctgctgttggtgttaagaagcagaagaagcctctggtgggaaaaaaggcagcagctaccaagaaaccagcccctgaaaagaagcctgcagagaagaaacctactacagaggagaagaagcctgctgcataaactcttaaatttgattattccataaaggtcaaatcattttggacagcttcttttgaataaagacctgattatacaggcnnaaaaaaaaaaaaaaaaaaaaaaagaaaaaaaaaaaaaaaaaaaaaaaaaaaaaaaaaaaaaaaaaaaannggggggggggggtttattaaaaaaccggggggggggccccaaccccccgggtgtgaaaaaatatttttttttttttttggg

SEQ ID NO: 3036 - DNA, 462 bp, Homo sapiens
taatttttaccctaatgtcttcataaagtacttgagtgtaatgtttgttacctccaacagaactaaatgttctatggttatgaaagaatatatttatttaaagcattgcttttattttgaaaagcttcttaattaatttgattaacaaatatgctaatttggggaaacctagagaagataattgttgaaattttgcaaatataaacatctcctatagcttctgtgttatttctgacttcttaacactattatgtttatgttgcacattactgaaagagtaaagatatgaaaaaaacacttattgttttcttttattgtgaattgaaaaagcaaagctaatgaaaatgggttactacatcaaaaatatcttaaagagtttgctatttccatggaccagatatgatgaaattattccctgggtttaaaactgggcactcgaggaggaggtacctgaagtcattt

SEQ ID NO: 3037 - DNA, 443 bp, Homo sapiens
aatacttaggcatttatggaatgcattgaagagttaacaaaatggataggcaggaaatatcgtatacctataatgaattgcagttacccactgtggaactgaggagctagggtttctcataaaactccctgacagaagacgacttttgataaaaatttttttccgccaacaaaatcccctgtcttctcaactagttattgtctgtccactaaataagagatggtccgtcagttcttcagatgagcactacaggcttttcaaaagataattgctaatcaacccctttgtgcctgggttttcttatttgtaaaaatagatagtactacctaactccaaagtgtgtggtgaagacaaacaactggggtgatgtatactaaagtaacgaaagtggtgaccacacactaccggcttggtaagtgtagaataccttgtttttcctcaag

SEQ ID NO: 3038 - DNA, 445 bp, Homo sapiens
agctgaagccaaagcgaaggctttaaaggccaagaaggcagtgttgaaaggtgtccacagccacaaaaagaagaagatccgcacgtcacccaccttccggcggccgaagacactgcgactccggagacagcccaaatatcctcggaagagcgctcccaggagaaacaagcttgaccactatgctatcatcaagcttccgctgaccactgagtctgccatgaagaagatagaagacaacaacacactcgtgttcattgtggatgttaaagccaacaagcaccagattaaacaggctgtgaagaagctgtatgacattgatgtggccaaggtcaacaccctgattcggcctgatggagagaagaaggcatatgttcgactggctcctgattacgatgctttggatgttgccaacaaaattgggatcatctaaactgaggccagctgc

SEQ ID NO: 3039 - DNA, 453 bp, Homo sapiens
gctgatcaagattattgcatcgagcttttaatgtcttcttattcaacaccgaaaataagcttctgctacagcaaagatcagatgcttagattacctttccaggttgttttacgaatacgtgttgtagtcatccattaagcaatccagccgagcttgaggaaagtgacgcccttggagagaggcgagcagcacagagacggctgaaagctgagctaggaattcccttggaagaggttcctccagaagaaattaattatttaacacgaattcactacaaagctcagtctgatggtatctggggtgaacatgaaattgattacattttgttggtgaggaagaatgtaactttgaatccagatcccaatgagattaaaagctattgttatgtgtcaaaggaagaactaattagacttctgaaaaaagcagccagtggtgaaattaagataacgccat

SEQ ID NO: 3040 - DNA, 473 bp, Homo sapiens
agcgagctgagtggttgtgtggtcgcgtctcggaaaccggtagcgcttgcagcatggctgaccaactgactgaagagcagattgcagaattcaaagaagctttttcactatttgacaaagatggtgatggaactataacaacaaaggaattgggaactgtaatgagatctcttgggcagaatcccacagaagcagagttacaggacatgattaatgaagtagatgctgatggtaatggcacaattgacttccctgaatttctgacaatgatggcgagaaaaatgaaagacacagacagtgaagaagaaattagagaagcattccgtgtgtttgataaggatggcaatggctatattagtgctgcagaacttcgccatgtgatgacaaaccttggagagaagttaacagatgaagaagttgatgaaatgatcagggaagcagatattgatggtgatggtcaagtatactatgaa

SEQ ID NO: 3041 - DNA, 403 bp, Homo sapiens
cggacgcgtgggaaccgccaacacagacgagccttttttatttctttactcaacctctttgatgacacagcaaaaacagacgtgactatgctcttgtatatagcagacaatctagcctgttttccataccagacacaggaagagccgttgtttataatgcatcatatagacattacactctcagtttctggtagtaacctactgcagtcattcaaggagtctatggtaaaggacaaaaggaaagagagaaaatcatcacctagtaaggaaaatgagtcaagcgacagtgaagaagaagtttccaggcctcggaagtcacggaaacgtgtagattcagattcagattcagattcagaagacgatataaattcagtgatgaaatgtttgccagaaaattcagctc

SEQ ID NO: 3042 - DNA, 445 bp, Homo sapiens
gaccaactttccatctagtagtgtacgatctatatagtgcatgtcagtagcacaaaatgcagtcttagcattagcctgtctaatctgaatagtttactcaaaagtacttctttgtgttaagtattcagccactgtttttagatctagttaataggttctatttaatttgctacaacatttactgaatggtggagtgaaaaaactgatgcatactgggaaatatctaccattttttaaagataatgttaattaggaaaagaacacttttaaggaatttatagcagtgatgaaatgaattcagttatatcagatacaccaaactgttgatggtatttaaatgtgacttcaagttagtatttctgtatatattattgattactgggttgtttttagatatgtaagtctgttctaatctacagttcacatatcgacagttactctggtt

SEQ ID NO: 3043 - DNA, 410 bp, Homo sapiens
ttcgcgtcgactgcccagagtccgcgaatcctccgctccgagcccgtccggactcccccgatcccagctttctctcctttgaaaacactaagaataatgtcactgcatcagtttttactagagccaatcacctgtcatgcctggaacagggatcgtactcagattgccctcagtcccaataatcacgaagtgcacatctataagaagaacgggagccagtgggtgaaagctcatgaactcaaggagcacaacggacacatcacaggtattgactgggctcccaagagcgaccgcattgtcacttgtggggcagaccgcaatgcctatgtctggagtcagaaagatggtgtttggaagccaaccctggtgatcctgagaattaatcgcgcagctacttttgtgaagtggtg

SEQ ID NO: 3044 - DNA, 406 bp, Homo sapiens
gaattcttctcgggaggcagtgctgggtcctttccaccatggcacctaagaaagcaaagaagagagccgggggtgccaactccaacgtgttctccatgttcgaacagacccaaatccaggaatttaaggaggccttcactatcatggaccagaacagggatggcttcattgacaagaacgatctgagagacacctttgctgcccttgggcgagtgaacgtgaaaaatgaagaaattgatgaaatgatcaaggaggctccgggtccaattaactttactgtgttcctcacaatgtttggggagaaacttaagggagcggaccctgaggaaaccattctcaacgcattcaaagtgtttgaccctgaaggcaaaggggtgctgaaggctgattacgttcgggaaatgct

SEQ ID NO: 3045 - DNA, 433 bp, Homo sapiens
acgcgcctcgcttgctgcgcgctgccggcgctccttcctcctcggctcgcgtctcactcagtgtaccttctagtcccgccatggccgctctcacccgggacccccagttccagaagctgcagcaatggtaccgcgagcaccgctccgagctgaacctgcgccgcctcttcgatgccaacaaggaccgcttcaaccacttcagcttgaccctcaacaccaaccatgggcatatcctggtggattactccaagaacctggtgacggaggacgtgatgcggatgctggtggacttggccaagtccaggggcgtggaggccgcccgggagcggatgttcaatggtgagaagatcaactacaccgagggtcgagccgtgctgcacgtggctctgcggaaccggtcaaacacacccatcctggtagacggcaaggatgg

SEQ ID NO: 3046 - DNA, 505 bp, Homo sapiens
  misc_feature (1)...(505): n = A,T,C or G
ctccctttgaacgcctgctggacatggatagacctcccgggncgacccacgcgtncggcagccttctcccgcctgggcagggcccggcgccgtccgtggatgagccacagaacctcttccaccttccgagcggagagaagcttccattcctcttcttcttcctcctcctcttccacctcctcctcggcctcccgtgccctcccggcccaggacccgcccatggagaacgccctgagcatgttttccgatgactttggcagcttcatgcggccccactcggagcccctggccttcccagcccgccccggtggggcaggcaacatcaagaccctaggagacgcctatgagtttgccgtggacgtgagagacttctcacctgaagacatcattgtcaccacctccaacaaccacatcgaggtgcgggctgagaagctggcggctgacggcaccgtcatgaacaacttcgctcacaagtgccagctgccggaggacgtggacccgacgt

SEQ ID NO: 3047 - DNA, 505 bp, Homo sapiens
  misc_feature (1)...(505): n = A,T,C or G
cgctcgcttgaggcctnttnnaactgagtgctgcganaccgcccggaatcccggtcgacccacgcgtccgatgggaaaaacaggaagttcacgtttcagagggaacgttggaagtttggttttggacatgttaaatttgacatgcctgttagccagatggaaatagcagaatgttgaataatgaatctgaagttttctcattattttcagctccattcaatagagctaagaacgtgacaagggtgtggctgagagcctgccatcaaagtggagcccctctttcctgacacggagacagctgggaagaccttttttcacatgacggaagactttaccttctgcacctcagcaaaacctctgcaagcatcccagtttgggagcagccagtcttctttcacagagcaggtttctgtttctgtagctggtaaaacaacctaagcattcagaattgcctaaatgaactacctcaggcagtgaggaacatccctacccctgctggtgttan

SEQ ID NO: 3048 - DNA, 507 bp, Homo sapiens
  misc_feature (1)...(507): n = A,T,C or G
cctcccatagagcgcctgatgnacnatagatggatntccggancgacccacgcgtncggaaggtctagacatggatggagctgtgagcaaaggctgcaccttgcctggggcccacattcctgacctgggaaacccagctggggccacctgctcactgtggcctcctacaccaccacactgggatccagcagctccagtccctccacaggcattaagaggtagctgaagtgtgagtcaggcaattatgtgggccactgtaggcctttcccctctcttcaagggggaaggtgcatacctctgcctcttccctgcacctctctcgcctagcaaacactctgtgaggttggcagctcttgtaccagcttaacctggcacaggggctggggtagggaaaaggccctactggagcaggaagaggcaaggactactccagacagagggattcaaaggggaagaaaaggtcatgggaaacacttcacaggacagcagtatctcagccagagatgg

SEQ ID NO: 3049 - DNA, 435 bp, Homo sapiens
tccttttattcaagaagtagccttggtcactctgggtaacaatgcagcatattcatttaaccagaatgccatacgtgaattgggtggtgtcccaattattgcaaaactgataaaaacaaaagaccccataattagggaaaagacttacaatgcccttaataacttgagtgtgaacgcagaaaatcagggcaagattaagacgtacatcagtcaagtgtgtgatgacaccatggtctgtcgcttggactcagctgtgcagatggctgggctaagactgttaaccaacatgactgtgactaatcattaccaacatttgctttcctattcttttccagacttttttgctttgttattcctgggaaatcacttcaccaagatacagattatgaaactaattataaactttactgaaaatccagccatgacaagagagcg

SEQ ID NO: 3050 - DNA, 418 bp, Homo sapiens
ggggaggctggcagcccgcaagcaggagctggagctggtggtgtcagagctggaggctcgcgtgggcgaggaggaggagtgcagccgtcaaatgcaaaccgagaagaagaggctgcagcagcacatacaggagctagaggcccaccttgaggctgaggagggtgcgcggcagaagctgcagctggagaaggtgacgacagaggcaaaaatgaagaaatttgaagaagaagccagaaggagaatagaggaagaaaagaaggcgtttgctgaagcaaggagaaatatggtagtagatgatgactccccagagatgtataagacaatctctcaagaatttcttacaccgggaaaactggaaattaattttgaagaattattaaaacaaaaaatggaagaagaaaaacgacgaacagaggaa

SEQ ID NO: 3051 - DNA, 455 bp, Homo sapiens
aaagacattagccctgctgccctccctggagaggaactcctctgttgtgtctgtcgctctgagactgtggtccctgggaaccggctggtcaactgtgagaagtgtcgccatgcttatcaccaagactgccatgttcccagggctccagcccctggagagggagagggcacatcctgggtatgccgccagtgtgtctttgcgatcgccaccaagaggggaggtgccctgaagaagggcccctatgcccgggccatgctgggtatgaagctttctctgccatatggactgaaggggctggactgggatgctggacatctgagcaaccgacagcagagttactgttactgtggtggccctggggagtggaacctgaaaatgctgcagtgccggagctgcctgcagtggttccatgaggcctgcacccagtgtctgagcaagcccctcctctatggtga

SEQ ID NO: 3052 - DNA, 407 bp, Homo sapiens
cccacgcgtccgaacaaatcaagcacatccttgctaatttcaaaaactaccagttctttattggtgaaaacatgaatccagatggcatggttgctctattggactaccgtgaggatggtgtgaccccatatatgattttctttaaggatggtttagaaatggaaaaatgttaacaaatgtggcaattattttggatctatcacctgtcatcataactggcttctgcttgtcatccacacaacaccaggacttaagacaaatgggactgatgtcatcttgagctcttcatttattttgactgtgatttatttggagtggaggcattgtttttaagaaaaacatgtcatgtaggttgtctaaaaataaaatgcatttaaactcaaaaaaaaaaaaaaaggggggccgtt

SEQ ID NO: 3053 - DNA, 415 bp, Homo sapiens
  misc_feature (1)...(415): n = A,T,C or G
atgtcaagcttgtgtcctccccgggaaggagtgatgctgagactgtggacgagccagtctcagaaggtgctgatgacagcctcgacggtaatcccagtcccggtgcaaagccagtaccttgggcaggaagggtggggccacctttagagtccctgacgcagtggtcatggggcattgccacaggcagggagttttgagtcgcatctcacactcagctttctaactttcttgtctggttgaggggccaacgtccgatttttgtgctatctttatttatttatttaattctgagacagggtcttgctctgtcgctcangctggagtgtagtgggcatgatcagggttcactacagcctcaaccttccaggctcaagcaatccgcctgcctcagcctcctgaccagctgggaccacan

SEQ ID NO: 3054 - DNA, 481 bp, Homo sapiens
  misc_feature (1)...(481): n = A,T,C or G
aggatggggctggaggacacacctaaacatgtggaatcccaatgccgggcagccagggccaaatccatatccccccaatattgggggccctggaggttccaatcctgcccacccaccacctattaatccaccctttcccccaggcccctgtcctcctcccccaagagctccccatggcaatccagctttccccccaggtgggccccctcatcctgtgccacagccagggtatccaggatgccaaccgttgggtgcctaccctgctccatacccaccgactggccctggaatccctcctgtgaatcccttggctcctggcatggttggaccagcactgatagtagacaagaagatgcagaagaaaatgaagaaagctcataaaaagatgcacaagcaccaaaagcaccacaagtaccacaagcatggcaagcattcgctcctctgctgctactcttnccagaaagaatctgactggatacaa

SEQ ID NO: 3055 - DNA, 475 bp, Homo sapiens
tgagatgtttatcttagactattttcttttagggaaaaattttacatgtttgagatggtggagtaaaaagactgttcaacatttcttttaaaaaattatttttacattacaacaatatatttatgatgtgttcagatcaaaaatttaacttctgtgtcccagatctactttcaaagtgagattttcacttgtcagcttaaatttctgactagaactaacgtttgtgtatttttgtgcttagtcggaatacaaatttcacagtggatttttgaagtttgtccttaaattggataaaatcaagtgattaaagttactaaagagataaaaatggtaatttccatttttaaaagtaatttggttgtgtttatagttatttgtacaagtatttatcacagactctaaattgaaaaatatagtatgatctatatttgacccaaaaaatgttgcattaatttaacaaatatggcagaatttt

SEQ ID NO: 3056 - DNA, 480 bp, Homo sapiens
  misc_feature (1)...(480): n = A,T,C or G
ggccccannnnnccctgaaaccctccttanagccctgcggatccgcgncgaacctcgcgtgcggataatctatatcaccaatatgacctccacgtttttaaaaccagggtttattatttacattcaacctctggacagcatctgacatggctgacttctcttgaaatacagcatttgatttctgggacaccatgtcctactgggactttgatgtatctacagctagttctaatgtcatcactaagtatgctcagggtcttcctgtgcttttggaattaaagatattacctaaaatgaagaagcaagagatatacctgatcatacttcacttaggaatataggaagcgaaaactcacaaaacacacattcagaagctgtcctttaccctcaaaattactaggaagtcaggtttaaatttaaaacatgtatgctttttgacttgagcattccacttccagaagtccatcctacagaaatccg

SEQ ID NO: 3057 - DNA, 450 bp, Homo sapiens
ataaaatactaatgcaattctacagcattcaaatgaagaaaacttgaggctttatggataagtggttagtgatattttattgaaaccactaaagagataagtttaaaagaactgcataggttactctcagtatatgatactctgtgacatttatatttatatcggcataaatttcattttttttcttcatatgcaatgtggttatataaagcttaatgcagctcatttgctaccatttggatacttagacactttgagcaagattgtggcagtttttgcacaactttgaaatagaaatacctggtactctatcttgtttattgttgatgccatcttagaggaaaaaatgtaaaggtaagtaattaagcatatgacagcaacaaataagatacataaaactacaaaataaagtcccattaggttataagtattacaaaaaatccacctttc

SEQ ID NO: 3058 - DNA, 482 bp, Homo sapiens
  misc_feature (1)...(482): n = A,T,C or G
aggtagannnnattgacccccttttgatcgccttaggaccgcccggaatccgggtcgacccacgcgtccgccttcctcagtctgcagctcttttcttcaccgcgcgctttcctcagccgttcagccctgagctggcgggtggacgggcatggatccaggcggtgggagcagtctgcgaagtcagggtaggaaggctacacaaaggaggcgacatcccagcccggtcctcaggaataagcgggcgtgcccgtgtggtgtggacggtgaggggacactgtattaagtgccttatctgcattatcattgaatcttcatagcaatcgattgtgatgggtactggtcatctccccgggttgtagatgaggaaactgaggcctcagtaactttgctttagtcagtaaatgataagagtcagcaaatgaattcccaagcgtagactcggccgtaccgctgctctaccttgctaataacgacctacctgt

SEQ ID NO: 3059 - DNA, 474 bp, Homo sapiens
  misc_feature (1)...(474): n = A,T,C or G
gaggcctaaatgataactgaaggcatcncnacgaacntccgggnntaccgacccgtccgcaggccttnagttagtgattgggaaaggactatatattagctgtcaaaaaaaggtgtctagataacccatgttgcgaggattcatatacaattgtaagagccccatttattttttgagtgctttccaactggaatcagtgatgggcatttatctacatgatctaatttcattttcactataattccaggaatgggcattcttaacttcatttcacagatgaggcaactgaggcttaaaaagtttaaatggctgggtgcgatgactcacgcctgtaattccagcactttgggaagccgaggcaggcggatcgcctgaggtcaggagttcaagactagcctggccaacctggtgaaaccctgtttactaaaaatacaaaaaagttagctgggcatggtggcaggcacctgtaatccc

SEQ ID NO: 3060 - DNA, 410 bp, Homo sapiens
  misc_feature (1)...(410): n = A,T,C or G
tcaatttgtaacccacctagttcttttataatctaataacatatatgtgtaactgtgctactcactctacccttcattaagtacagaggcttattttacttaaggatcaaatctttctccctcagatccatgtccttgtctcatcacaaacacccattgtaacttataatgctggagagtggaaataactatacacaggacaggcagctccttagaaatgtagtcacttaccctcgtgtattacttctttcctccataccacatgtaccttggcccctgttactgtattgattaagggcctaaaactattttctgacatttttgtcccccaaagtctatgatgttcccctttttgctgtgttgtgtgtgtatactattcattggaatgtagactcatcccttgttgatan

SEQ ID NO: 3061 - DNA, 404 bp, Homo sapiens
tcttctttttgaaacaattatgtgaaatgtatagctgcttttgatgaaaagcagctatttgcctttttttttttttctttggaccttgaaaccaagggcatggaaaaaaggcccctttcccctctttggaagggcggattaagggaagaaaaaaaataacgggtttggaacctggttcgggaaaggccctccccggacttttttaaaaggccccccccaaagtttaaacctggagggaataataagccggttttaaaagggttggccgggtttttctttaaaaaatgggggaaaaaaaaccaatcttggggaaccggaccaaaccggttggaaaggccaaaagaactttggaaattcaaggtttttcccaaaatatatttaatcggggataacccattggacat

SEQ ID NO: 3062 - DNA, 407 bp, Homo sapiens
  misc_feature (1)...(407): n = A,T,C or G
ctgaaaaagaacattacaaattttttttgaaagaaatttgggggtaaatttaattttaaatactgatttttgataacatttgatcttatgacagcatttgtatttttaattacagataggattacactaaaagtcatttctgacctgctcccttacccttatggctaaaataaactgctaggccctgaagcaaaggcgagccatgttctagagcaatgtctttcttgtattaaaatacggccccatgctcacatataggctgttttgtgttttgcttttctgttgatgcacaaaggaatccttgatatgtttgtcctcaaagaccaaagacaagtatctagtaaaaaatgcaaatcatatctaacagtgaagctttccagcanaaaccttctgctctagaatgcatn

SEQ ID NO: 3063 - DNA, 415 bp, Homo sapiens
cggaggctgagctccagagggtccagaaggtccgagagctggaactggtctatgcccgggcccacctggagctggaggtgagcaaggctcagcagctggctgaggtggaggtgaagaagttcaagcagatgacagaggccataggccccagcaccatcagggaccttgctgtggctgggcctgagatgcaggtaaaactgctccagtccctgggcctgaaatcaaccctcatcaccgatggctccactcccatcaacctcttcaacacagcctttgggctgctggggatggggcccgagggtcagcccctgggcagaagggtggccagtgggcccagccctggggaggggatattcccccagtctgctcaggcccctcaagctcctggagacaaccacgtggtgcctgtactgcg

SEQ ID NO: 3064 - DNA, 386 bp, Homo sapiens
tggtggagcgccttccgattccattcatggcattttgtgatgtgatgaaattggaatagagctgtagatttagggcacacacaatccctcacactgcgggttttttttagaacttcccaaacgaaaactcacgcccttgccctaacgcgctttgctgtgagcctggcccctgcccagggcttgggtttggtgagctgaccatcttgctgtggatggggcggggccggcctctggcctggctcacctggccactgtccagacaggcttgggacagactccggcctgaacgcaaaatgaacccacacctggagtgaggaaggggggctggcacggttgggcaggctctgcctgattgccagccagcgggcatctgaagacggtccttg

SEQ ID NO: 3065 - DNA, 404 bp, Homo sapiens
gtccgccaagttacttctaccggcagcaccttcgtgaagcccattttcagtcgggacatgaacgaggccaagcggagggtgcgcgagctctaccgcgcctggtatcgggaggtgccgaacactgtgcaccaattacagctggacatcactgtgaaaatgggacgggataaagtccgagaaatgtttatgaagaatgcccatgtcacagaccccagggtggttgatcttctgggcattaagggaaagatcgaactggaagaaacaattaaagtatggaagcagcggacacatgttatgcggttcttccatgaaacagaagcgccaaggccaaaggatttcctatccaagttctatgttggccacgatccatgaagtcattcattggaaagatgcacgttgatact

SEQ ID NO: 3066 - DNA, 417 bp, Homo sapiens
  misc_feature (1)...(417): n = A,T,C or G
agcctgtagactacaacgtggatattggcatccccttggatggagaaacagaggagctgtgaggtgtttcctcctctgatttgcatcatttcccctctctggctccaatttggagagggaatgctgagcagatagcccccattgttaatccagtatccttatgggaatggagggaaaaaggagagatctacctttccatcctttactccaagtccccactccacgcatccttcctcaccaactcagagctccccttctacttgctccatatggaacctgctcgtttatggaatttgctctgccaccagtaacagtcaataaacttcaaggaaaatgaaaaaaaaaaaaaaaaaggggcggccgttttaaaggatccctgggggggcccaagctaacccgggcttgcaaggttatatn

SEQ ID NO: 3067 - DNA, 402 bp, Homo sapiens
agtgagcagagatggcgccactgcactcagcctgtgcgacagagtgagactctgtctcataacaaacaaacaaacaaacaaacaaaaaacagggtaccatggagtggtttttgagtgtgcctggaaggggtacctagtccatgctccagccccatccgaggcctccatggtgcccaactttactgagaagtatgctctgctcttatttctttagggataatccaggaaagtcatgggtgttggattaaatgctagtctgttttcctagcaagagtacccacaatggtcctctaaaatgatttaccctcatgaactggctaggtggtctgctaatcacctttggctacacgatctgctaattaccttttctcactaagattaataagattctctctccttttg

SEQ ID NO: 3068 - DNA, 420 bp, Homo sapiens
cttacgtatgggtgcacacaagataactaaccttatttcggattccagaactttaactttaaatatatcacacccatttgtattccacatacctgctgactgccattattttacctaaacatatgactctgcctcatcataaggactcttattgcaagatacctctaagatgaagcgcttcaatcaaacgctttcaaccaacaaaattggttatacaagtccgcaaccctcagtcataccacctacttattaaagaacaaagacagaaacagtcttctgaaacagtctttaatatttatgaaaggagacatggatgaatgtactcatgtagcaaatttctcagtcccagatgatccaagcctcattatagcggatcaagccaaagaagatgcctatattccacgaacaggagttcgaagt

SEQ ID NO: 3069 - DNA, 411 bp, Homo sapiens
actcctgtaatttatgagagtatgttcattgctgtgagctttgaaggtgctctaatccttcctcatatttggccttagaatgcacctcggatcccccaaggtttaggctttcttcatttgtctttgaaactatatcttctgtctcttgtcatatctgcttattgcgtgtttttcataccttccacctctctaaaagccgttacctgagccctcgttatcacttttggttgaatgtgctgcacttagctgcatttctaagtttctgattcttgcaagtttgtggaaacagaggagtctttaacccacatcagccttgatctaagtgtaccactttacttaaaagttcgtgggatctggagctcctggtctagcaagccatgaaaatgccaataaatgtttgtaataaagctt

SEQ ID NO: 3070 - DNA, 479 bp, Homo sapiens
  misc_feature (1)...(479): n = A,T,C or G
gcgcnctcnaaattgagagctgaaggcnatggcgaggaacnccngggnngacccacgcgtccgcaaagtatatgggaaggaaggttagatgtagcaataatagaaactattatattctctaacccttaaaaaatagggacagtaatcactcatagtattatgattctttgtcaggccaggcaagaacattatgtataaaaatctagaactcagaagcgaaataaattgacctacgactgacaggaaatgtagagaaatagttggttgagtagcagtgatattattgacatttcttggaaataatattcagatttgcagctctagtgtctaaaattatggggctcattactttcctttgttatctctagagtggcaggaggctctaggaaaatagagcgactaatttgcattttaaacttgaatttagacctctgaattggattttaaaaaaatgtcctttcttagatatttatggttaa

SEQ ID NO: 3071 - DNA, 474 bp, Homo sapiens
  misc_feature (1)...(474): n = A,T,C or G
agagggaactagggcaccccttgtttctgttgttcccgtgaatttttttcgctatgggaggcagccgaggcctggccaatgcggcccactttcctgagctgtcgctgcctccatggcagcagccagggacccccagaacaagaagacccccccgcaggatccctcctgagctcggggggctctgccttctcaggccccgggcttcccttctccccagccagtggtggagccaagtggtccagcgtcactccagtgctcagctgtggctggaggagctggcctgtggcacagccctgagtcccaagccgggagccaacgaagccggacacggcttcactgaccagcggctgctcaagccgcaagctctcagcaagtgcccagtggagcctgccgcccccgcctgggcaccgggaccccctcaccatccagtgggcccggagaaacctgatgaacagtttggggactcaggaccan

SEQ ID NO: 3072 - DNA, 487 bp, Homo sapiens
ccagcttgttttttggatcgagcactccagataacaaagttgctgaacaagaagacttagaaacacagccaagtccatccgtagaaaaagcagtgactgtgatagatcctgaaggtacaattcccaccaattttaatgtagctgagaaaccagctgatcattcattatcagaggtaaaacttaaaactgctgatgaacccagaggtactttagtaaaatctggtgacggtcaaaacgttaaagaaaaatccatgattttatcaaatgtagaagatttacaacagccaaaattcatttctgaggtgtctagggaagattatggaaaaaaagaaatctcaggcgattcagaggaaatgaacataaactcagtagttacttctgctgatggtgagaaccttgaaattcaatcttattcactaatcggtgagaaattggttatggaagaagccaaaactattgttcctcctcatgttactgataagaaaag

SEQ ID NO: 3073 - DNA, 477 bp, Homo sapiens
  misc_feature (1)...(477): n = A,T,C or G
cccacgcgtccgttacacacttcaaaatgtttttattggatttaatttcccaaacactgacattttagacaattttgcaaggactctgaatttttgcagggctatttttggatactgtaaaaaaaaaaaaagaaacaacacaccccccccccccccctcatagcaaagctgctctgctcgctctaaggcctctttgggggaaggacagttccaaaaggccctgaccggggacatgggggggccctgcccctcctaaggcagccagctaagccatggccctgtccaaggggtccacaaaccattattcattatcccacccaaggaaccaccccacaaaggagggaggctcaaagccttgcttcaccacggtgatgggcgtccgccgatcccaattggctgggtccgtctcgatgtaccgctaaccaaaagtcaaggcttctgtcttttcttcttcttgagaaccctttccaacccaan

SEQ ID NO: 3074 - DNA, 486 bp, Homo sapiens
  misc_feature (1)...(486): n = A,T,C or G
ttaatatgtagatccccactctggtaacctgttagtgggacagcctcaggcaagctacttacttaacacttctgaatctaattttctcttttgtagatcaaataaaatagaatctatgaagatgcattgtagtagaatttaagataataatctatataagtatgtacatattttccctaggatcagtattcactaattcaatgttctcagtgacattttggaacataactaccatgaaaaatgataatagctattatcattaactatttaaaagagccaactcttcaagaagaaataaaaacacgtaaatgtttatgtacctaaaattagagctttaaaatacaagaaacaaaaactaacagacatatagagatataacaaatccaacaattagagctagaaatttcaagactccgtcctcagtaattcatagaatgagttggaacaaaataagtatgaatctaattaacattntagtatactcan

SEQ ID NO: 3075 - DNA, 387 bp, Homo sapiens
cttagcagtaggtagggtgggaggctaggaagactggcatcagtctcttaaacaaaaccatacctataagcttttgccgctgaatgacctgccacctttcgccacaagaagcgataggtaactcactttgggatacaagtctacatcgtggagcctggcttcttccgaccgcccgtgaccaacctggagagtgtggagaaaaccctgcaggcctgctgggcacgggtgcctcctgccacacaggcccactatgggggggccttcctcaccaagtacctgaaaatgcatcagcgcatcatgaacctgatctgtgacccggacctaaccatagtgagccgatgcctggagcatgccctgactgctcgacacccccgaacccgctacagt

SEQ ID NO: 3076 - DNA, 489 bp, Homo sapiens
  misc_feature (1)...(489): n = A,T,C or G
aggggccnaggggnnnnnaatttgacgccctagttgacggcctgaagtaccgggncgacccacgcgtccgcccacgcgttcgcccacgcgtccgggcggttaccctgagtctcttgctgggcgggcgcgtttgcgccgccgtcactcgctgtgggttcgcgacccggggggtggcgggcccaggccctattggccgggagccggaccccgattccgactgggagccggaggaacgggagctgcaggaggtggagaggtaccggcttctccccgggccctcagcttgaagcagggcctcgtgccccggcgctccaggccgcgcccccttggcgccgggtgtcctgccgctgcttgcgcagcggcccttgtttcttcttacccgttgttaggggcgcagcgtcaggtgttcagctccccgggaccactggtcccttcattagtgacgtatttcatcatcagtttagagagttcggcatgcttacaggcagn

SEQ ID NO: 3077 - DNA, 409 bp, Homo sapiens
gcgaatgaaagtaattgctaagtagcagcttaaaaattcaattatccgattgtatttaacatctttaagagcatgatcataaagagctatttttgacaccccccccccacttttttaacatttagagttaggaagggttttatatctcttctgcccatattgtgtgcaaaggaatgaggtgtttacgtggctggaaaagcatttgtaggaagttagatttgaatatagacaaggtgggttattcacgttgagaatgttatttgaagaatgcctgtgaagccaggtgtgggttctactcagtgccatagatagactgagtcttctctcgtaggtcaccattacatagtaattttgattctgaatttcacattaaattatttgagtttatacagacctaaattttaaaatc

SEQ ID NO: 3078 - DNA, 420 bp, Homo sapiens
gctcggaagcccgtcaccatgtcgtgcgagtcgtctatggttctcgggtactgggatattcgtgggctggcgcacgccatccgcctgctcctggagttcacggatacctcttatgaggagaaacggtacacgtgcggggaagctcctgactatgatcgaagccaatggctggatgtgaaattcaagctagacctggactttcctaatctgccctacctcctggatgggaagaacaagatcacccagagcaatgccatcttgcgctacatcgctcgcaagcacaacatgtgtggtgagactgaagaagaaaagattcgagtggacatcatagagaaccaagtaatggatttccgcacacaactgataaggctctgttacagctctgaccacgaaaaactgaagcctcagtacttggaagag

SEQ ID NO: 3079 - DNA, 428 bp, Homo sapiens
gcgtgaacacctgctgcctgggcttcatagcattcgcctactccgtgaagtctagggacaggaagatggttggcgacgtgaccggggcccaggcctatgcctccaccgccaagtgcctgaacatctgggccctgattttgggcatcttcatgaccattctgctcatcatcatcccagtgttggtcgtccaggcccagcgatagatcaggaggcatcattgaggccaggagctctgcccgtgacctgtatcccacgtactctatcttccattcctcgccctgcccccagaggccaggagctctgcccttgacctgtattccacttactccaccttccattcctcgccctgtccccacagccgagtcctgcatcagccctttatcctcacacgcttttctacaatggcattcaataaagtgtatatgttt

SEQ ID NO: 3080 - DNA, 486 bp, Homo sapiens
ctctttaatccagataactaatacatcatccactcaattcttctttttttaaattatgattttaaaataggaagaattatttacctaattaataaaacctatgaattaaaaataatagaaagcaagatgcaggcttcccatgtagaaacattttgttaagtaatttcaagtgatatatttcatgtctcttacataccttgaatgaggtatttactcctgttctgaccaaatttttaaaggagcatgcatacacataaaagttttattccagcgattatgaatccttcatcaataaaaactccttaaatcagattctcctcaatgcctcagtcagcatattaacccttttaagtgattagggctgcatatatagcaccactcaccacagcaatatacaattgacatgacttaggaaatctacttcttaaccccatggaaatttttaagtgtgggaaccaagagacatgggttctggtcctactgact

SEQ ID NO: 3081 - DNA, 489 bp, Homo sapiens
  misc_feature (1)...(489): n = A,T,C or G
cgggcctcttcggtgttggtgagacagcagccaagatcttataaagcattatcgatgtgttatttgcagacgtagctgggtgcgaagaatcaaattggaaattatggaatttgtgaatttcctgaagaatcccaagcagtatcaggacttaggagcaaaaattccaaagggagccatgctcactggtcctcctggtaccggcaagacccttcttgccaaagcaactgcaggggaggccactgtgcccttcatcactgtgaacgggtctgagttcctggaaatgtttattggcgttgggccagcaaggggttcaactctgccaccaacgtcgtggtgttggctggcaccaaccgccctgacgtcctggacccggccctcatgcggnctggccggttcatcgccagattacactggtccccttacattaaggcagcctcatctttagtccactgcgccctgagctgacagagcttataggcaccttgcagg

SEQ ID NO: 3082 - DNA, 397 bp, Homo sapiens
accacgcgtgcgcttaccaagaatgaaaggcaacctatgtaaaaactatgggctttctagtataaataaaaactactcatctccagaaaataaacaatgactgctaagatgattgaaaaaagaaaggagaagaaagtagcttgtaaaagcgtgtgaaatgcattcacgttggaatctcctacaggcacttcaggtcaaagactaccgatgtccagatcataatgcgaggacagtttgagcccagtgctctctgactgaggtagaacccccgggaaggtgaagagggcagccgtctgcgaaacagcccagcatttaagaatgggcagcacctggccaggtgcatttgagaactaggaatgtggcaacaataacatttatttatttggatgaagagaaa

SEQ ID NO: 3083 - DNA, 474 bp, Homo sapiens
  misc_feature (1)...(474): n = A,T,C or G
aaaaaaagtacgtctgcaagttgctcttcatctttctccttggtcatgacattgactttggacacatggaggctgtgaacctgctgagttcaaacagatacacggaaaagcagatcggctaccttttcatctctgtgttggtgaactcaaacagtgagctgatccgcctgatcaacaacgccatcaagaatgacctggccagccgcaaccccaccttcatgggcctggccctgcactgcatcgccagcgtgggcagccgggagatggccgaggccttcgccggggagatccctaaggtcctcgtagccggagacactatggacagcgtgaagcagagcgcggccctgtgcttgctgcttgagaaaatggggnnnnnnnnnnnannnnnnnnnnnnnnnnnnannnnannannannnnnnnntntnnnnnaanaaaaaannataaaaannaaaaaaaaaaaaaataaaaaaatat

SEQ ID NO: 3084 - DNA, 460 bp, Homo sapiens
aaaatagtctatactgtattaaagttaataaagacaactatggactaacttttcctccacttcattttaaaatacaatctcaggtgggcatggtggctcatgcctgtaatcctagcgctttgggaggctgaggcgggtggatcacctgaggtcaggagttcgacaccatcctggccaacatggtgaaaccgcgtctctactaaaaatacaaaaattagctggctgtggtggcacatgcctgtaatcccagctacttgggaggctgaggcaggagaatcatttgaacccatgtggcggaggttgcagtgatttgagatcacgccactgtactccagcctgggctacagagcgagaccctgtctcaaaaaaaaaaaaaaaatacaccctcaatatgcagaaacctcggttttctcacctctagagagcaaattcatcacttaaagcgcgcccttcaccctgt

SEQ ID NO: 3085 - DNA, 500 bp, Homo sapiens
  misc_feature (1)...(500): n = A,T,C or G
agaggatatttctattggacagcgctgctctagaacattatattaagtggttattattgaagtagaccaaagtttataccataaggatagttttccttaaataccatgtttgaagaacaattatttattgatccttgaatctgtaagatcaaataacaagtctctatccatgttaccaaatttaaacttttgaaaataataaactttaaaatatcagatgtgttattacaggatgatacttggaatcaagtgaaatgagttatatggtcatcactaaatttagaaatctattgtgaaacaaagacaaacaggaaagtacagaatagagacttttagtanatagatggaatttaaaagaaagtgtttatttacagtgtcacgacagaaaaggatgtctttgtgtcatagtctttgagggatctccgtaaaactggggacaggtgcaaaaatagccaatattatttccagacattgttaagagtgtcagttcagatattgcg

SEQ ID NO: 3086 - DNA, 473 bp, Homo sapiens
  misc_feature (1)...(473): n = A,T,C or G
ggacgccatgaacgcctgcgtagaggccgtgaataccggcncgacccacgcgtccggccgaagtggaggagggtcttatattgaacctggttttatatagctttatagcttgataacagctggttcctttcttctcagaatttgtagttttaagtgtattggggttttatttgttgattttgctttaatcagtttcttaatccatgatctgttgctttgaattagacattaacctgtttctaaagagatagactaaacaaaactaaaggtttgtttgcttaagtcaagcttgagtctggggagttatgtaagtaacatagatatctggttaatctggtaggatagcctttccaagggagtttacattggtactttgaaagaaacattttaagtcgcagaaaggtaacaaaaattaagttaactgtagcatcagcaccagaaagttactgtttcattgaatgtaagataatgtn

SEQ ID NO: 3087 - DNA, 497 bp, Homo sapiens
  misc_feature (1)...(497): n = A,T,C or G
aatgatagccntcggaatattacgacctcgcgagncgcaccacgcgtncgcttgagcaaattgactgtaatgcatgtcacattcacttgtaattgtgtaatttaacagttttctttctgttctgttactgtgcagttcctctggggctgaagaaaattttgcttttaattatattttccaaatcctgtctagaattaccagacataatgtaaacacataaggtgccaactaagctttactctagatgggccttttcggcttccagtcagttcacaattgtgctgtgaagtgcatgctgtcccctaaatatgcaggtggaattgtgcgtctgcctacttggtatctatcatgtctagagtcacttttagagaggctagaccagatttctacagacttcattggtcagatattagccattttacctctttcagtgactcttgtgtcctcagacctgaaactgattcagtgaccatggggcccaatcagagtataatatg

SEQ ID NO: 3088 - DNA, 510 bp, Homo sapiens
  misc_feature (1)...(510): n = A,T,C or G
ctccgcccgagcgccgctccggctgcaccgcgctcgctccgagtttcaggctcgtgctaagctagcgccgtcgtcgtctcccttcagtcgccatcatgattatctaccgggacctcatcagccacgatgagatgttctccgacatctacaagatccgggagatcgcggacgggttgtgcctggaggtggaggggaagatggtcagtaggacagaaggtaacattgatgactcgctcattggtggaaatgcctccgctgaaggccccgagggcgaaggtaccgaaagcacagtaatcactggtgtcgatattgtcatgaaccatcacctgcaggaaacaagtttcacaaaagaagcctacaagaagtacatcaaagattacatgaaatcattcaaagggaactttgaagacccgagcccggaaagagtanaacctttatgacgggggcggagaacaaatcngcacttcctgctaattcaaaacttccagttttttggtgaaacatgaaccg

SEQ ID NO: 3089 - DNA, 477 bp, Homo sapiens
  misc_feature (1)...(477): n = A,T,C or G
gaaggggnnttattgatcctancgatcggcaccgcaanngnagggtcgagtcgagcgacgcgtcggatatgattataaagaatttgaggagtatgagctctcttatgaatatgaccaatatgaggaatacgaggagcgggagtatgaacgatatgaagagcatgaagaatacatcacagaaccagagaagcctatccctgtaaagcctgtcccataagaaccaggtcccacaaaaccgaaggccccaccggctaaagttcctgaagtgcccaagaaacctgagccataggagaaagtaccagtaccagttcctaaaaaggtggaagttccacctgccaaagtgccagaggtacccaagaagcctgtgcctgagaagaaggtgccagttcctgctcctaagaaagtggaggctccacctgcaaaagtgccagaggtgcccaagaagcttattccaaaagaaaagaaaccaacaccctg

SEQ ID NO: 3090 - DNA, 435 bp, Homo sapiens
  misc_feature (1)...(435): n = A,T,C or G
aacgcaggcacatacttcctattctacaccctagtaggctcccttcccctactcatcgcactaatttacactcacaacaccctaggctcactaaacattctactactcactctcactgcccaagaactatcaaactcctgagccaacaacttaatatgactagcttacacaatagcttttatagtaaagatacctctttacggactccacttatgactccctaaagcccatgtcgaagcccccatcgctggatcaataaaaaaaaaaaaaaaaaaaaaggggcggccgttttaaaggatccttgggggggcccaagctaacgcgggcaggcaaggaaatacctctttccttatagggagtcgtattaaaaccaacctggggatctttgagaaggaccctaacttcggtggggggacataattgaccaacctaccn

SEQ ID NO: 3091 - DNA, 420 bp, Homo sapiens
  misc_feature (1)...(420): n = A,T,C or G
cccacgcgtccgcatctattgatgagggtcttaaaaaattataacaaaaaatttaaaaaaaaactataagaaaaaaaagaaataaaaaaaaatatggggggggccctttaaaaaaaactcttgggggggcccaaatttaccctgggtagaaaatttaaatttttttttttttagggggtattataaaaacccccgctgggctttttaaaaaaaatcctttttttgggggggggaaatattgggaaccccccccccacaaaataatagccttcgggaaaaaaaaaaatttttttagggacatgggggaaaaaacccccctttttgtcgttttttaaaaaatgtgggaacntataccccagacacctctcttgtcatttcggcacctgttaaaaaaaatctcccaattataatagttgggat

SEQ ID NO: 3092 - DNA, 499 bp, Homo sapiens
  misc_feature (1)...(499): n = A,T,C or G
gtcaggcccttctaaatgcttaaccaaaaacaaacattattggagtttcattgtaaaataaaattaaaattggagggttggttagattgatttcagatggatactaacagtttgaggggaggtccagatatttccaaggcataaattcttgcctggaaactttggagcaattaattaaattaggttaagttttccctcagcaacctgtgtgttcaaaggttaggcacaccattgctgttactaaaatacatgcactgctcattcttgacatagcttgggtgtgggttcctcttgttttggttattttgtgtagcagtttaatcagtggataactgagcctgtntcctcttagctttctagacttcttaacagaaaaaacagtttgggtcaatagcattgtatgattctacaatattttgtcactacctggggttgcaaaaaaaatccttatgaatatatggtttaatctgtaatgaagaaaacatataaggttgctgag

SEQ ID NO: 3093 - DNA, 477 bp, Homo sapiens
  misc_feature (1)...(477): n = A,T,C or G
ggatggctnannattggaaggtgggcgatccgcaccgcaattgaagggtcgacccacgcgtccgcaatttttagggcagtgaagctgttctgtatgatactgtaatggtggatacatgtcattatacatttgtccaaaactgtagatgtagaacaaacgaaccctaaagcaaactagagatttggggtgataatggtatgtcagtgaaggttaatcaattgtaacaaatgtaccattctggtgggggatgttgatagtggagataagggaactatgcaagttttggggggcacagggagtatatgggtaatcactaccttctgctcaattttgctatgaacctgaaactgctttaaaatataaaacgtaaaaaaaaaagtaaacaacccagatagctcagttgatagagcatcagacttttaatctgagggtccagggttcatgtccctgttccttaatttttttttaactttttaa

SEQ ID NO: 3094 - DNA, 400 bp, Homo sapiens
  misc_feature (1)...(400): n = A,T,C or G
caagcttaaactttgttgttgcttgaaaaataactttttagagcttgagtcccaatattttgccttcagtttacatcccagcactttgggaggccaaggtgggaggatcacgaggtcaagagatggagaccatcctggccaacatggtgaaaccccgtctatactaaaaatacaaaaattagccagcgtggtggtgcacacctgtagtcccagctgcttgggaggctgaggcaggagagtcacttgaacccaggaggtggaggttgcagtgagccaagattgcgacactacactccagcctggtgacagagtgagactccgtctaaaaaaaaaaaaaaaaaaaaaaaacaaaaagnnccaacttattgggaagcttggggggggccaatactctgtcccc

SEQ ID NO: 3095 - DNA, 408 bp, Homo sapiens
agctgctgcgggagctccaggtctagtctttactgctctgtgtattctgctcctagaggcccagcctctgtgactccgttatctgcaggtattgggagatgcacagctaagatgccaggaccacctggaagcctagaaatggcagcagcgggatttggcctggggatggagcaaagtgaccccctgctgtagagcaagctgagaggggccatgttgaaatgatagaaaaacttaccttcctaaacctgcatacttcagaaaaggacaaggggggaaacactgccttgcacctcgctgcgaagcatggtcacagtcctgcagtgcaggtgctgctagcccagtggcaagacataaatgagatgaatgagaagcagcaaacccctctgcatgtagctgctgatcgaggaa

SEQ ID NO: 3096 - DNA, 412 bp, Homo sapiens
gcgggaggagagcggccagagggccgggcaccgaaggtgtggaacccgccgtccccgctatggtccgaggaagtgtacagcactgctccctactacacgtcctgggcccgcggtccccgatgccccccggagctctgtgcacctccactgaaacgcaaggagcagacagaacctacaccatccgtgaggtagcttctgccaacccctctccatctctagagctgattccggttgatgttcttaacaccttcctctatcaacactcttccaggtctaggctgaaatttaaaatctgtgtaaatgttgacacaataatgtttgtacaaacaaaaaagaccaaaaatgaaaaccccctagttaattgctgcatattctaaagatgggatcttgtggagaaattggaactcttatg

SEQ ID NO: 3097 - DNA, 92 bp, Homo sapiens
caggagccaaattacgtttcaagtaactctaggaccagggcagagagatggctgttagagagaagcacgagattgaagaaaaaaaaaaaagg

SEQ ID NO: 3098 - DNA, 456 bp, Homo sapiens
aaaaaaaaattttttttcctgagaggaagcctgaggttgaccagctctggggtttgtaaggcaggtctgttttctcctaggccctgagttttctgaatctctgaagagcctggaagaaacccaggggcctcctatgcacagatcttgcagcccagaaccaagtcagcctccctgcgactgcccaggcacactgcccaccaccccacccccgaaacaatgccagcccgctgctttttctatcctcccagtcacctttgcagacaaagaccaggggcagctcccgagggcactgtgaaggctcccatgccacacagtgagaactgtagcctctgcgtccaaggcacacagggtactttctggacccactgctggacagacttgaaggtgtcatgcccggtgtgtgcaggaggaaactaacagttcagtaaactctgccttgaccagcaaaaaaaaaag

SEQ ID NO: 3099 - DNA, 470 bp, Homo sapiens
  misc_feature (1)...(470): n = A,T,C or G
cccacgcgtacgtatccatcctcatcctagcaagaatccccatcctccatatatccaaacaacaaagcataatatttcgcccactaagccaatcactttattgactcctagccgcagacctcctcattctaacctgaatcggaggacaaccagtgagctacccttttaccatcattggacaagtagcatccgtactatacttcacaacaatcctaatcctaataccaactatctccctaattgaaaacaaaatactcagatgggcctcnngaaagataatatttgaggggtagtgaaacaataaaaaaagggggggacctcatagaaaaaagcatttggggggtcaaactttaaagggtcaaggcagttctatgtttttttttttataggggagtgaaaaaaacactcgtgggtgtcttgagagaaaacctttttttgtggggggcaattgagcaaccctcccccccgac

SEQ ID NO: 3100 - DNA, 461 bp, Homo sapiens
agaaaagaaaaagaaatattactgacagcatgtgacagagatatggagcatttagagaaaattaaccacaagatacacagaaagccagacaactaaaaaatgaggtaattattaactttttaaaaagtaaaagttagtactgtatttcactatttgactcagcagaaaacaatatctccataatcaatataatgagtttatattatattaatttaaccaaaaattgtaatatatgtaattatatgggggaagggaagtaggagagcaaggtaggaacctagagctccacctaccataagaaaaaaaaaatctaaacctgattaatcaagaaatatcagtctacacattatttagtaatataggtaaatttcagggagaaaggccaaaaggattaagaatggtttcttccaagtaggaggacttgtaggtggagaatataggatattataagccctctattt

SEQ ID NO: 3101 - DNA, 480 bp, Homo sapiens
ttaaatatccaaggccacatacagttaacagattgtatctcggaatttttgaaggaagaaaaattagaaggagacaatcgctatgtttgcgagaactgtcaaagcaaacagaatgcaacaagaaagattcgacttcttagccttccttgcactctgaacttgcagctaatgcgttttgtctttgacaggcaaactggacataagaaaaagctgaatacctacattggcttctcagaaattttggatatggagccttatgtggaacataaaggtgggtcctacgtgtatgaactcagcgcagtcctcatacacagaggagtgagtgcttattctggccactacatcgcccacgtgaaagatccacagtctggtgaatggtatatgcttaatgatgaacacatagaaaagatgtgggggaagaaattacaactagggattgaggaagatctagcagaaccttctgagtctcagacacgtaag

SEQ ID NO: 3102 - DNA, 468 bp, Homo sapiens
  misc_feature (1)...(468): n = A,T,C or G
ccacacccaagattctccatcctttaacacgcaattatggtaaaccatggttgacaaacagcaaaatgtcaactccttgtaaagcagcagagtgctcagactttcccgtgccatctgcagagggaacgccaatacaaggaagcaagcttcgacttccaggatatttatcaaggaaaggcttccactctggggaggacagtggcttgataacaactgcagctgccagagtccgaacacagtttgctgattccaagaagactcccagccgaccaggaagtcgagctggaagcaaagctggcagcagggccagcagccgccgaggcagtgatgcatcagactntgacatttcagaaatccagtccgtgtgctcagatgtggaaactgtcccccagacacacagacctacaccccgagcaggttctcggccatccacagcgaagccttcaaaaatccccacgcaccagaggg

SEQ ID NO: 3103 - DNA, 471 bp, Homo sapiens
aaggacccagggctgtgctcaagctgggctacaagggctggaccagggtctggggttgggcataggttgggctgacttgcagttgctggccttggagaaaggagaagcaaagccactgtgattggaggaaggagattcaggaagcaaggacagctcttagtgtcagttccaatggttgggtatgagaaagagggagtaaaaactggggcttcaagaaggcagggactatagttgtatttcctcccagtgtattcacagtgcatctggttcaccaaagactctcaaggtgacttcatccatggcggctgtgtggcagcgagctacttgcgcatctcttctgttccgtgaggtcatgttggcagcttgaaattgatcaagtgggaagcatttacatcacagaaattgataccatgaaaggatttgagcgtttttttatgtgaatccaaagatgacatttacaaaaggtggaga

SEQ ID NO: 3104 - DNA, 458 bp, Homo sapiens
  misc_feature (1)...(458): n = A,T,C or G
aaaaaacatcaaaagatcaagtttcgagtttctcctcatccttctctccccttttttgagttctcatcctcttccccaaaaggtaaccactgttaagagtttcttctggatccttttagaattgctttatgcacacattagcaacttaagaatacagagtcttatttttcccctttctgataaaagctagcatattatacacttctggnttttttgtttttttttttttgcgttttttcaaatgaacacaatttttgggaaattttcccttgtgggggggaaaaacattccccctttttttttttttaaaccacctaaaacccttttccctgggggggggggaaaaaaaataatttaacccttttcctgttcaagcccccttggaataatataaaacttttttttaaaaaaaaatcccggggggggaaaccccgagaacttttgtttttccacaaacc

SEQ ID NO: 3105 - DNA, 412 bp, Homo sapiens
tgacttggaagatgaaagagttgtagggaaggaacaaggtcaaaatctagcaagacaatggaacaactgtgcattcttagaatcttctgcaaaatcaaaaataaatgttaatgagatcttttatgacctagtgcggcaaattaacagaaaaactccagtgcctgggaaggctcgcaaaaagtcatcatgtcagctgctttaatatactaaatgcattgtagctctgagccaggtctgaagaactgttgcccaattcaacagtgccagcattccaactttgttaaacctaccaacatcttaaatggactttcctgtggtggtaccctttaagaggcggatgaaagctactatatcagtttgcacattctaatcactttccagtatcacaagagagatttttacttatataata

SEQ ID NO: 3106 - DNA, 421 bp, Homo sapiens
aacacattgaattgtttagaggcacatggtacttcaacaaattattttcaaaggattcagaaattaatatacatataaagcaagagaatgatatgaaatatcacttggtaagatacttgcatttgagtaatgtgggtaaaaggatttatgggaattatttttattatttttgcaacatttttataattaaaattatttcaaaacaggttttacaataatcctgttttcacacaatgctatagtttatccttttaaaggcaaaaaaattattttcactttctctgtggttataggagtatatgaggtttggtgaggtttgagaccaacttcctgaaatgggcatttaaatcagcatgtatttcaaaatattatggatattacatgtttgctatgtttatcgtaaactgactgcaagaattcg

SEQ ID NO: 3107 - DNA, 468 bp, Homo sapiens
aagaatgtggcaaagcttttaatcgatcttcaaatcttactatacataagtttattcatactggagagaaaccttacaagtgtgaagaatgtggcaaagcatttaactggtcctcaagccttactaaacataaaagaattcatactagagagaaacccttcaaatgtaaagaatgtggcaaagcatttatatggtcttcaaccctaactagacataagaggatacacactggagagaagccctacaaatgtgaagaatgtggcaaagcttttagccgttcctcaacccttactaagcataagacaattcatactggagagaaaccctacaaatgtaaagaatgtggcaaagcttttaagcactcctcagcccttgctaaacataaaataatacatgctggagagaaactctacacatgtgaggaatgtggcaagcttttaataatcttcaatcttacacacataagaa

SEQ ID NO: 3108 - DNA, 461 bp, Homo sapiens
agcaggtggcccttctcatgcagatgacggccgaggagtctgtcaacagcccagtggacacaacaccaaagcacccctcccagtctacagtgtgtcagaagggaacgcccaactctgcctcaaaaaccaaagataaagtgaacaagagaaacgagcgtggagagacccgcctgcaccgagccgccatccgcggggacgcccggcgcatcaaagagctcatcagcgagggggcagacgtcaacgtcaaggacttcgcaggctggacggcgctgcacgaggcctgtaaccggggctactacgacgtcgcgaagcagctgctggctgcaggtgcggaggtgaacaccaagggcctagatgacgacacgcctttgcacgacgctgccaacaacgggcactacaaggttggcatccccccgttcttcacacatccggcctgtcctggcatctgggtggttctgtag

SEQ ID NO: 3109 - DNA, 414 bp, Homo sapiens
cttctgtacctggagcacaaaggctggtactcctgggtgctcagcatgctctacggcttcctgctgaccttcggcttcatcaccatgacgccccagctcttcatcaactacaagctcaagtctgtggcccaccttccctggcgcatgctcacctacaaggccctcaacacattcatcgacgacctgttcgcctttgtcatcaagatgcccgttatgtaccggatcggctgcctgcgggacgatgaggttttcttcatctacctctaccaacggaggatctaccgcgtcgaccccacccgagtcaacgagtttggcatgagtggagaagaccccacagctgccgcccccgtggccgaggttcccacagcagcaggggccctcacgcccacacctgcacccaccacgaccaccgcg

SEQ ID NO: 3110 - DNA, 414 bp, Homo sapiens
  misc_feature (1)...(414): n = A,T,C or G
aaagtataatattgagtctggtcgatagaaaaatccttaacttttaagatacttaatatatcatatatattttatattgaaacttactgggtccatcagatttctgctttaattaaaccacttatgagcttcttagaacttattcagataacagtgtaaaatctatgcagtgctacccaaagggtgtgaggtagataggggatttcaaagatctcttccacctttgagatcccatgattctgagctgccacagtctgattatacaactctgccagctccctaaacaagttaggttcatttgtgagtactcatcatttcataatatcatgattatcacgatttcatgatactcaatattttgagattntataaccctttaagaagtgataaataatgtattcaattcgtttatcn

SEQ ID NO: 3111 - DNA, 449 bp, Homo sapiens
gcaattgggatgcaaagcaaaactgtttgcggagacattacatattacaatttccatgacaaatatcgaggtgcctgagaccaaaactgcctcttttgagtgtgaggtgtcccacttcaatgtcccttccatgtggctgaagaatggtgtggaaattgagatgagtgaaaagttcaagatagttgtgcagggaaaactccatcagctgatcatcatgaacaccagcacagaggactcggcagaatacacatttgtctgtggcaatgaccaagtcagagccaccctgacagtcaccccaatcatgattacttccatgctgaaagacatcaacgctgaagaaaaagacactattacttgtgatgtgacagtgaactatgaaggcatctcttacaaatgggtaaagaatggtgtggaaatcaaatcaactgacaagtgccagatgagaacca

SEQ ID NO: 3112 - DNA, 407 bp, Homo sapiens
ggacgtgccctctatatgaggttggggagcggctgagtcggccttttccgcccgctcccccctccccccgagcgccgctccggctgcaccgcgctcgctccgagtttcaggctcgtgctaagctagcgccgtcgtcgtctcccttcagtcgccatcatgattatctaccgggacctcatcagccacgatgagatgttctccgacatctacaagatccgggagatcgcggacgggttgtgcctggaggtggaggggaagatggtcagtaggacagaaggtaacattgatgactcgctcattggtggaaatgcctccgctgaaggccccgagggcgaaggtaccgaaagcacagtaatcactggtgtcgatattgtcatgaaccatcacctgcaggaaacaagtttcac

SEQ ID NO: 3113 - DNA, 484 bp, Homo sapiens
  misc_feature (1)...(484): n = A,T,C or G
gactgcaggctgnggctccgctccccggcgggagcccgcgcgtggttcccagcgaagtccccgcgcggctgggcccagcgtgagtattctccgcccgctgtcctccccctggaggcggcagcgcccgtttatttgagccgtgtgaagatgtgcctgcttcgccttccatcatgactgaagtttcctgaggcctccccagctatgctccctatacagcctgcagaacggtcggctgcctccaatcctgaggtcatcactcatcaagaggggataatcccagggacagcaggatctgcttcgttacttggatttaggagccagaaacccatcaggcaactaaacagtaacaatgacccgccattaaacacactgagagaagagcatgatgaagagtttgtacaagaagaagccaggagcacttgctgacaatgcttacagagacgcaggcttctatgagctctgcctgttgaactgcagtanaaan

SEQ ID NO: 3114 - DNA, 433 bp, Homo sapiens
cccacccccaggcaacatgaactttcccagccaacccttcaaccagcctctgggtcaaaactttagtcctcccagtgggcagatgatgccgggcccagtggggggatttggtcccatgatctcacccaccatgggacagcctcccagagcagagctgggcccaccttctctgtcccaacgatttgctcagccaggggctccttttggcccttctcctctccagagacctggtcaggggctccccagcctgccgcctaacacaagtccctttcctggtccggaccctggctttcctggccctggtggtgaggatggggggaagcccttgaatccacctgcttctactgcttttccccaggagccccactcaggctccccggctgctgctgttaatgggaaccagcccagtttccccccgaacagcagtgggcgg

SEQ ID NO: 3115 - DNA, 447 bp, Homo sapiens
  misc_feature (1)...(447): n = A,T,C or G
acaagaaaagaaacattatgctaatattggaaaaactttaagtgaaagagctattaatagagcacccatgaatggacattgtcatctgtggtatgcagttttgtgtggctatgtatctgagtttgagggtttacaaaacaaaatcaactatgggcacctcttcaaggaacatctagatatagcaatcaaacttttaccagaggaaccctttctatattacctcaaagggagatactgctatactgtctcaaaactgagctggattgagaaaaaaatggctgctacttctgtttggaaaaataccatcttcnncngnacannannnnntanncaanaaaaacctttctgaatatgcacttttcttttttctcctccgaggagctgtttttttttctgacacaaaccgtagttataaaaactggtgcgtctctgttcgtgaagaaaact

SEQ ID NO: 3116 - DNA, 444 bp, Homo sapiens
  misc_feature (1)...(444): n = A,T,C or G
gcgaaaggagtcaaaaagctatgactattggttagtacagattaagcaaaactaaaaagcagtattaaatcactaaaagcaaatacaaatgctttatgtggaaatgaggctctaattcacaatgggcagaagagaaatttttatttcaaagaggaaagttcaaagaccggagagttctaaaaaaatgaacattatacattaattttgattcgttgtgccaacacaatgagggaaatcctggctggagagagtgacttctcattgttggcaccttgcatgtgttttacgcacttggaacacagagaagtagttacaagtggccataattagtcaggaggctgtcagatgaggccgtcctaagagcgagaaggagtagaatctgataaacagtaccgctttcaccctcttgtaactaccattaatcaaatgatatatttttatatn

SEQ ID NO: 3117 - DNA, 410 bp, Homo sapiens
cccaggccggcccctcaccccctggagtattgaaactggagtcccgtccccaaggccttcagagatgcccctacacacccagggctccagctctggtccttctgggggagtaaagtgcaaagaggggcacagcttagttttgggcctctcgccgagcaagagacagcactgctggctacagctccaacacagccagctgtggcaagaggactctgcctgggctggcccccctcctgtgtgaggtgtctgtcccttctctgctggccagcagcagatgcactggcagctcccaaccctgtttccgcccctcggccctcccccagcctgttcggcttctctgcagcccgcaagggggagcagacttttgacaaaggactgcgggcctcgctcaagtccctgagcccccagct

SEQ ID NO: 3118 - DNA, 419 bp, Homo sapiens
  misc_feature (1)...(419): n = A,T,C or G
agaagtgccagcctggggagccgtttgggggcagccccttctgcccaccccatccttcttcctctccagagatgccaggggggcgtgtatgctctaccccttccctcagacaggggctgggtggggaggctctttatgctcaggagaagcattttaaagaaacccccaccctgccgcccgcattataaacacaggagaataatcaatagaataaaagtgaccgactgtcaaaaaaaaaaaaaaaaaaaaaaaaaaaaaaaaaaaaaaaaaaaaaaaagaaatttaagataaaaaaaaaaattttttaaaaaannnnnaccctggcggccgcattataaacccgggggaaagntccntagaatataaagtgaccgactgtcccataaaataaagtattcttttttgtgtgtgtcttgaga

SEQ ID NO: 3119 - DNA, 464 bp, Homo sapiens
  misc_feature (1)...(464): n = A,T,C or G
tagacagtttatatgttgcctttttctgttcaaatttgcatggcctattaagttggctggagagtgttttatgtggaaatattttcaagataatgttccttaggaagaaaataacattcttgggttgagggaaggaatgccatacactactgtctcttcagatctgaaatactccagtttagagccaggaaatttcacaggtcacaccgatttttagcattaaaaactaaggaatatacttagcacttacttaatcttttcagttttccagtttacgtctcaggaatgaagtgtagtctatggttgacaatggagttttgtgatcctgcttattgtaactgacaactgttttcaactccaagagctaaactattggcagttcatgttaagttagagtgagggtgtangtagtgtcagtgagtggctcttgtgcctgctgtagacattangcctgcactaggccn

SEQ ID NO: 3120 - DNA, 405 bp, Homo sapiens
cggacgcgtgggattctgtttagggaaacttttgaatagatttgatttgatgtgagtcagggctaataaaaagctatagaagaattttctttccaataagtaaaaatcctctgttttattaaggaaaaaatagctatgttttaggtaaataactctgaaataaactggtacaacaattgtaaaatagaacatatttaaatgtcaaggtgtcttttcttaagacttcaggaatttgtattgaacaaagtctcaagttaagtagcaataattatgatgcataaatgagactggcatctattcatttattttattcttttttggggtgatgggaggtttcaatccagtgcttcacccgtggtgccaccgtggctatctttttttttatcttacagttttttaggagat

SEQ ID NO: 3121 - DNA, 419 bp, Homo sapiens
cccacgcgtccgggcagggcacgcactggccccggtgcccacccgcacccctccccagagcactgacacggctcccgggacctcggcaggatggaagagaagctgaagaaaaccaagatcatctttgtggtgggtgggcctggctcagggaagggcacccagtgtgagaagatcgtgcagaagtatggctacacccacctctccaccggggacctcctgcggtccgaggtcagctcaggctcggccaggggcaagaagctgtcggaaatcatggagaaggggcagctggttccactggagacagtgttggacatgctccgggatgccatggtggccaaagtcaatactttcaaaggcttcctgattgatggctacccgcgggaggtgcagcaaggagaagagtttgagcgacggatttg

SEQ ID NO: 3122 - DNA, 406 bp, Homo sapiens
cccacgcgtccgctttccagcctcagtcggacgggcgcggagacgcttctggaaggaacgccgcgatggctgcgcagggagagccccaggtccagttcaaacttgtattggttggtgatggtggtactggaaaaacgaccttcgtgaaacgtcatttgactggtgaatttgagaagaagtatgtagccaccttgggtgttgaggttcatcccctagtgttccacaccaacagaggacctattaagttcaatgtatgggacacagccggccaggagaaattcggtggactgagagatggctattatatccaagcccagtgtgccatcataatgtttgatgtaacatcgagagttacttacaagaatgtgcctaactggcatagagatctggtacgagtgtgtgaaaa

SEQ ID NO: 3123 - DNA, 499 bp, Homo sapiens
  misc_feature (1)...(499): n = A,T,C or G
aggcccctacagatgactgcgcatgngcggaacnntggggtaacacgcgtccggccgcggccatggtatcactgtcttgtggacccgcacttttcactttagacctctcactgagcccgagccgagcgcgacatgagccactggaagggaaccgacatgctcccggagatcgccgccgccgtgggcttcctctccagcctcctgaggacccggggctgcgtgagcgagcagaggcttaagggcttcagcggggcgctccaggaggcactcacagagcactacaaacaccactggtttcccgaaaagccgcccaagggctccggctaccgctgcattcgcatcaaccacaagatggaccccatcatcaggagggtggccagccagatcggactcagccagccccagctgcaccagctagctgccaacgagcttgacccttgggagggacccctatgaggcggcctaccgcattggggaggacggctccttctgggtattg

SEQ ID NO: 3124 - DNA, 455 bp, Homo sapiens
  misc_feature (1)...(455): n = A,T,C or G
acataatccagtgaaaactctacttgttgaaattatgacataaagatcttgcagctttatttgagtatttgttcttttgtgtagtttccatcttttaaaatatttaaaatattttcaagataaagtattatcttctctgcaaaaattcctggagtaattttctctcataatatttgaagtcagtggttctcagttgtattagtggggtaactacatcaaaataaataaagtcttatttttaaaatgcaaaaaaaaaaaaaaaaaaaagggggggccgttttaaagaacccttggggggcccaaacttaacccggccatgcaaggaaaaagttttttccttatggggagccaaataaaacccaacctgggaattttgggaaggaacctttctttggggggggggccatattgggccaacctccctccggaatattaaggttctagggaaaatttan

SEQ ID NO: 3125 - DNA, 440 bp, Homo sapiens
  misc_feature (1)...(440): n = A,T,C or G
gacgttaaagttgaagacaagaaaaatgaaatatgtttgtctacgaagcctgtgttccagcccttttcaggacagggtcacagactaggaagagtaagccatatcaaagacttcattgaaaaataccaaggatctcaaagaagtcctccgttttccctggcaacagctcttcctgtcctcaggttgctagatgagacactcacactggaagaagcagatttacagaatgctgtcatcattcagagactccaaaaaactgcatcttttagagaactttcagagcactgatttttgatagactaagtggaaaatttgcagagaaatgatggttgtaagtggacatgcaaaccaaaattggggattggagaagtcagactcactagacttttggttcgagtactattgaactctctcctgatgagaagatgtttagataagtn

SEQ ID NO: 3126 - DNA, 506 bp, Homo sapiens
  misc_feature (1)...(506): n = A,T,C or G
atggccccactgagaactaccgcaatgggcacgaannccctgggggacccacgcgtgcgaagaaaagaaataaccaagatcagagaagaactacatgattctgattcaagaaaaaaaatgtaagtcaaaaaccaaggagataaaagagaaccaggaaaatcctaatgccatggagtctatcaaaatgccaaaaagaaaaagcaagccaagcatcatatctatattgttcactgctgcatatataggcatattaatgtttattacataaatgagtaaataagtattgaagagtttttattgccctttacttgctaatccagttctataaagactatcacattcacatatccttgattctaacaaaataaaatctgggctgggtgcagtggctcacacctgtaattccaacactttgggagaccaaggcatgcggatcacttgaggtcaggagttcgacatcagcctggccaacatggtgaaaccccatctctactaaaaaaaaaaag

SEQ ID NO: 3127 - DNA, 466 bp, Homo sapiens
caatgttgttgttttgtaaatagctgatttcaaatggcatgtacatttctaatcctaaatgaaacatattcaatatttatgtaaaaatcatttttcataaagtttttgtgtaaaaattgtcattacagagacagatatacaggcttcatggtattttatgagaactacctaatgacaatttttagaggtggttatctcaatttatttacaaaagatgctaacacaaatttaatgcactctttcaattcctttcagatttttctactttttaaaataaatctgacttaaataactttttagattttttactctcaaaatattcttattgaaatattttagaataagtgcttctagtttctaagttcattttatttaatatacattatctagcccaaaattattaattaaccttttaagaaatttctgagttctctattcaatactactaaagagatgttttgggtct

SEQ ID NO: 3128 - DNA, 408 bp, Homo sapiens
aaatgatctagagggatttattttagactggcaattctcaatattgataaatatgggcgtgtctgtacagttaacatcacataaagaagaaaatgaataatggcaaatactctaaatttggcaagactttcctaaggcgattttgtatttagttaaccataatagaatctatgtatattaaaatagcttgtatgagatgttatgcattcagctaactggcacatgtgaatttaaagactccttgtagttaaccctatagctgtccctgtaccaccccatttcacaaaaagaaaagaaagactgtaaatttgaaaactgctcctgtggctcaatggcagctgtttttcaataaaaagtttgagatctaggaaaaggaattggctttgattatgcagctgggaccaaaac

SEQ ID NO: 3129 - DNA, 505 bp, Homo sapiens
  misc_feature (1)...(505): n = A,T,C or G
cacaaaaaatcgccgcccgagcatttgcacagcgttacctggctgaccttctcccgtctgtttttggcagcctcagggatagtggctacttttatgatcccattgaaagagatattgagataggatttcttccatggctaatgaatgaagttgaaaaaaccatggaatatagcatggtgggaagaacagtgcttgacatgttgatccgtgaggtggttgaaaagaggctgtgtatgtatgagcatggggaagacacacatcagtctccagaacccgaggatgagcctggtggtcctggagcaatgacagagtcactggaggcctctgaattcctggagcagagcatgtcacagacacgggagctgcttttagatggaggctacctacaaagaacaacatatgacagaaggtcatcccangaaaggaagtttatggagagagagaactcttaggcaagataaagaaccagcatgatgaatcctttagggatgaagaattgcataag

SEQ ID NO: 3130 - DNA, 466 bp, Homo sapiens
  misc_feature (1)...(466): n = A,T,C or G
cgtgggaanaaacggattggcgcatcggaaccgcccggaatccgggtcgaccacgcgtccgccgtcatctactctaccatctttgcaggcacactcatcacagcgctaagctcgcactgattttttacctgagtaggcctagaaataaacatgctagcttttattccagttctaaccaaaaaaataaaccctcgttccacagaagctgccatcaagtatttcctcacgcaagcaaccgcatccataatccttctaatagctatcctcttcaacaatatactctccggacaatgaaccataaccaatactaccaatcaatactcatcattaataatcataatggctatagcaataaaactaggaatagccccctttcacttctgagtcccagaggttacccaaggcacccctctgacntccaaaaagaaaaaaaaaaaaaaaaagaaagaaaaaaaaaaaaaaaaan

SEQ ID NO: 3131 - DNA, 416 bp, Homo sapiens
  misc_feature (1)...(416): n = A,T,C or G
cttgggtcttgtgccctttgctaaaccaagtgctgtattgggaaagagacggggagagaagtgttggagatgctctttagtcaggcctgagtcacttgcccaaccctggagttggagtgggggatggagccaggatctccaaaccacatgcccctagagtttcagggaaaatatggattgtgaattgaagatggggggtgatgtaaggcagacaaggacagaaaatccctcttccagctgtgatttggctgtgagtttggcgctcgagacaccatacgctcctgaggtttgttaaggggtttcaggatattgtggacaaaagggaatagcaaacgatgttcagtccataagtaccatttggaggaggaaataattgaaattgctgctgatcaaaaagctttttgtctccagtttgn

SEQ ID NO: 3132 - DNA, 455 bp, Homo sapiens
cttcaatttgtaaaaaagtgcaatatttgtgaaacacaataaagtgaagtacaatacaataaggtatgcctgaataaaaatataggctgactttataactaatagtaataccttaatatttaagaaacatccattgcctgcactatactggactgtgtgctaacgctaacagcacaataaaaataacgatcatttcctcaacaactcaagtgataaattgtgtaactgagatatataaaaagcaccaagtgaacctgacatgggtaaatatatattcccgagggaagagaaaagctttaaagtagtgatagcatttgaatttgatcttgaagaatcatagaaatcccttcagagacaaagctgactaaggacttttcagacagaacattgttgggaaattcacaaggatttggaggcaatcagcggacagcatggaagatgtgtgctctggctcg

SEQ ID NO: 3133 - DNA, 466 bp, Homo sapiens
  misc_feature (1)...(466): n = A,T,C or G
actcggtgtgcggccacttcggcactgcttaatccagatattcttgttaactaagcattgtgcttcccaggtggtctgaagtcaggtactctctctctcaacacctgtagttgaatatgatttggtcagttgctcgttgtaacttggagaaattcctataaagtaagatctccttgcctcttccatccattgttggcacccccttgcaaaaggaaaagaacagcaaaagtcaggagcagtaatctgagaaagttaactccaggataggtaggtttctattgttatagctagatgtaaatctttagttccaagaagtgatagagtttctgctttaataatttggtgataagtttacataaacagaaataaaagatactatctttaccgtagtagttcaggccaagattatgcttagttntagttctccaggtagttacttttgccatgttctatngatcagtgacan

SEQ ID NO: 3134 - DNA, 396 bp, Homo sapiens
aaagtgagtggggttgggcataggctgagtgaggtggcctgaatgacacctcttagaggactgtgaagtacaggcacagcccgactgcagggagggatgcacccatcatttacccatgggagcatctgtaggaccatctctctcccacttcttctcccctcccccaccgcatctggccagatggactgtcctacagcaatcgtttccatctgtcaccctcttccctctcctttcataccagtcactatcttgggtaacaaatttatacaggacagtggtacagaaatacatctttgctctgagaatacagcaaatattaacttaaattattataactgaacaaataataaaacctgaattttaatatcttcatttgatgtctgaattatttgtcta

SEQ ID NO: 3135 - DNA, 450 bp, Homo sapiens
caaaatgagaggtaccaagcataagggcagcagaggtggagtagggaggaggcaaggagggggagaaccatcaatacgaatacgaggtccgaatgctggaccaactgataccattttctgttgctcagcgccctctaagctttggtgtttcacttaatgtatttgacagtgttcatcacaggctagagaggtgagcttggaaaagcactgtagtttgtcagagactccagtttacatccagaaaggccatgaacataggacacgcttctgtctgtagaggcttcatatgagacccagaaagtctatcctatggcaagtctgacctctcctggcaatgctcagttctgattttttttttttaatgtttggagtctccattaaaaatggtatgttggcaaaaaaaaaaaaaaaaaaaaaaggggggggccttttaaaggaaccctcaggggg

SEQ ID NO: 3136 - DNA, 408 bp, Homo sapiens
  misc_feature (1)...(408): n = A,T,C or G
tgctagtttctctaagccatccagtgccatcctcgtcgctgcagcgacacacgctctcgccgccgccatgactgagcagatgacccttcgtggcaccctcaagggccacaacggctgggtaacccagatcggtactaccccgcagttcccggacatgatcctctccgcctctcgagataagaccatcatcatgtggaaactgaccagggatgagaccaactatggaattccacagcgtgctctgcggggtcactcccactttgttagtgatgtggttatctcctcagatggccagtttgccctctcaggctcctgggatggaaccctgcgcctctgggatctcacaacgggcaccaccacgaggcgatttgtgggccataccaaggatgtgctgagtgtggccttctn

SEQ ID NO: 3137 - DNA, 424 bp, Homo sapiens
  misc_feature (1)...(424): n = A,T,C or G
cgctaacttcccaggtgacagtagcaggaacaaggaagggtaatgtttccatgacagacacttgcttcccttgggacaagtcccagaagaactacctgaagcaccaaagctccccaccccagcctggtggcagaggaagcaggtggcaccaactcaccaaagggacttgggagccaccttctcactctgtggaagtactttagtgagagctgactggcaagataaaaaccctgaaattcccagaagttacagatgccttaaagactttctttggaagatcattgcctgtactattccttttttgtgtggcataaataatatattaacctgttacaactgacaacattggttttctgcagctagggagtcttgagtcgagactgctcgccttgatgacttgctcttttttggcagatgtgtggan

SEQ ID NO: 3138 - DNA, 513 bp, Homo sapiens
aagtttccatctcattccagctgctttatttatctttttcatggaactttgcatggatttctttttctttttttaattttgaagagtggagttagatgttcttaccatagaattttacagggttatatactagcattctttactgcattatatgtaggagtgtggtgcagtgcttttatctgtagcatataatttttttttaattttccatttttcaagagtagtttctgctttgttaatatttatacacaggctacttgttgaagtaattaattaaaaatataaccaagtgcctaagtctttcagctgatgtactagatattaaattctcctaagttatgcagaatcgtttttacaattttgataaattatgcactattgtaatggcagtttttcaaaatgcagatttaagcctgtacattattgaatctgatgactgggcaaaagaatcaggtgctttcagctttcttgagaaacccctgatggagcgtttgcactgcctaacaagatggg

SEQ ID NO: 3139 - DNA, 415 bp, Homo sapiens
ctgataattaatcaaaataaacgcatctttaggataaatggtttctgagaaaaagttattatagtactaaagtatagcatgattgtaaaaggatttcatagtttcatactgagtttgatttttagcagaattaaaatatattgaagtacttttgctctttgtctctgtataattgttgcttaatccaagccagggattgaaatccaaatgtatttattaagcaatgaagttttgtttagaagaagttttgataacaacgcatttcgctagaaacttcttgtgcatgtgcacaggcatgtgtatgtgttttgtcttcaaaggaagacgtggggtgtatgagagttcatcttgaatactgagcattttaacacacactaagaagttgaattgcatgatttccatatagtagaagggg

SEQ ID NO: 3140 - DNA, 401 bp, Homo sapiens
aaaagaaaaaagggaaaaaggtcaagaaacagccaaacagtattctaaaggaaataaaaaattctctgaggtcagtgcaagagaagaaaatggaagacagttcccgaccttctaccccacagagatcagctcatgagaatctcatggaagcaattcggggaagcagcataaaacagctaaagcgggtggaagttccagaagccctgcgataaaaacatgatctttagaagaggatgcagaactgttcagtggtattacatgaaatgcattgtgagatgtttctaaaataccttcttcaattcaaaatgatccctgactttaaaaataatctcacccattaattccaaagagaatcttaagaaacaatcagcatgtttcttctgtaaatatgaaaataaatt

SEQ ID NO: 3141 - DNA, 406 bp, Homo sapiens
ttcatttagtaccataagcaatggtggtgaacttttagcttatggttcccttaaccgagctgtgttgaggattttcaacccttttctttttttatgaacaagtgaaccaaacctttttctatgaaagccccaaccattttaaagagcaaacaaaacttgttctgttggtttagtgcctcctcctctcccattaccaagcagtaacataatctcaaatcttcagtatcagcccactgagctttgagagctaagggtactttacaagttaagtgtccagaagcacctaccaccacgttcgtagaccaccgactgactgatcccagcaactggcatcactgacctgcacagccaggcttggggcaccccagatcacacatgcttccactttctaaaaccaggtgtgttg

SEQ ID NO: 3142 - DNA, 435 bp, Homo sapiens
aaacaaccatatggtgttgtatattataaactggtgacattctactattgaattatgtacaacattttcattttttatgcttcttgaggtggtaatgagaaaaaagttttttaaaaaagtgtgccttgctgtatttcttataccatttattaaaaagctgctttcacggtaaaattatgttggtttgaaaggaggaaatagcaaggttaagatgtgtgaataatttctgtatatatgtataaccaagtacaaacattgatgtataatgacagtataaaatgctttcatgtttgtgatgtctagtgatgtggaaaatataagccttaaatccattagattgcatggtaattaaaattggcataataaacacagattattgggggaaaaggaaaattactgatctcttctactatgttctttaccaaattgttgcat

SEQ ID NO: 3143 - DNA, 416 bp, Homo sapiens
tcacacaaactgtatattataatacagtctaaacctcaacactcttcagtgttagccttttcttaagttttaataaaagcatttgttcaacatttattatacgaaaatagagtgtgaagattagtcacgtgttatcaggaatagaaataaaatgtgggctgcaacttacaatggaatacatatagccctttaaaagtaacatatggtggacaattaaggaatacttaagcctttaattgattgttatttcactttatgtaaccaaatatgaaagtagccctttgtttaagaaaaaggaattttaaaaaattttctagaaccagtcttgtctaagctttgcatgtgctaacaatcactttttggaagtttatagttgaagcatacactgccatctgtacggacacaagttagatcag

SEQ ID NO: 3144 - DNA, 493 bp, Homo sapiens
  misc_feature (1)...(493): n = A,T,C or G
ggggacttgacgccctcggaaccgttggagaacttccgggncgacccacgcgtccgcgcaacttccccatcaccttcgcctgctatgcggccctcttctgcctctcggcctccatcatctaccccaccacctatgtccagttcctgtcccacggccgttcgcgggaccacgccatcgccgccaccttcttctcctgcatcgcgtgtgtggcttacgccaccgaagtggcctggacccgggcccggcccggcgagatcactggctatatggccaccgtacccgggctgctgaaggtgctggagaccttcgttgcctgcatcatcttcgcgttcatcagcgaccccaacctgtaccagcaccagccggccctggagtggtgcgtggcggtgtacgccatctgcttcatcctagcggccatcgccatcctgctgaacctgggggagtgcaccaacgtgctacccatccccttccccagcttnctgtcggggctggg

SEQ ID NO: 3145 - DNA, 449 bp, Homo sapiens
aaaaataagagtactcagcagtgagcaacacttacaagtgtgactggctggggctggtgttgccggtggtaaaggaatttaccaagacagttgtagggggagaaaaataaaggcacatttattagagaaagtatgaaaattcattgcaagggtgcaatatgtagcactacagagaaggggctgtctgcaaagaggcaggggctggagggaagttttataaggtcttctggagggggctacatgctgatcgaggttgtgccatttgggctacctgtggagcaaggtcgttgtgtcagcgcgttgtttatggttacttgtctctcagaacaattgttctctcctaccttgggcccctccctggggttatcaagactccacaaatatccagtgcctcttgcgctttaggatatatattaagaagtcactggctgtgcacggtggctcacgcc

SEQ ID NO: 3146 - DNA, 397 bp, Homo sapiens
aggacattccctgttgactgcgtcgcgatgtgtggcgactgtgtggagaaggaatatcccaaccggggtaatacctgcctggagaatggatctttcttactgaactttacaggctgtgcagtgtgcagtaagcgggattttatgctgatcacaaacaaatccttgaaagaagaagatggagaagaaatagttacctatgatccagatttgtgtaagaattgtcatcatgtaatagccagacatgagtatacattcagtatcatggatgaatttcaggagtataccatgctgtgtctgttatgcggcaaagccgaagatactatcagtattctccctgatgacccccgacaaatgactctcttattctaaggatccttctacagatctgttataacta

SEQ ID NO: 3147 - DNA, 421 bp, Homo sapiens
cccacgcgtccgcggacgcgtgggccggacccccatcaccagcctaggatccaggggctgcctctggcctcttagggagcagagagcagaactccgcagcccagcccagaggagtgtcacctcccacctttggagaggaatccttccctcccctggacaaagttgctgacaagctgctgaagtggcctctccatattccagctgagcctgaatctgactcttgagggttggggctgcacttatttattgcggggagacagctctctctcccacctcctccccagatgggaggagagcctgaggcccaagcaggacccgggggttccagcccctagctgctctggagtgggggaggttggtggaccatggagtccctggtgctgcccctcaggtgggacccaggcgttctcagctgtaccct

SEQ ID NO: 3148 - DNA, 479 bp, Homo sapiens
  misc_feature (1)...(479): n = A,T,C or G
ctccagtcncgtctcggataatgaccgcattgngaannncnnnnnnnncgtcggaaggatcacgcgttcgggctgctgaactaccgcctgtttattaactgcgatttttctgnccgtgcgcgatggtggggccgtggtccgcgccctttctcggcggaccggactggtctccagaaatgctttgggttcatctttcattgctgcaaggaacttccatgcctctaacactcatcttcaaaagactgggactgctgagatgtcctctattcttgaagagcgtattcttggagctgacacctctgttgatcttgaagaaactgggcgtgtcttaagtattggtgatggtattgcccgcgtacatgggctgaggaatgttcaagcagaagaaatggtagagttttcttcaggcttaaagggtatgtccttgaacttggaacctgacaatgttggtgttgtcgcgtttggaaatgataaactan

SEQ ID NO: 3149 - DNA, 396 bp, Homo sapiens
ctgggcaacgcccacatgggctactacgagacggtggcgggcggcgcgggcgcgggtcccagctggcacgggcgcagcggtgtgcacagccacatgaccaacacacgcatcaccgaccctgagatcctggagagccggtacccggtcatcctgcgccgcttcgagctgcggcggggctcggggggcagaggccgcttccgaggcggcgacggcgtcacccgcgagctgctctttcgtgaggaggcgttgctgtcagtgctgaccgagcgccgcgccttccggccatacgggctccacgggggcgagcctggcgcccgcggcctaaacctgctgatccgcaaaaacggccggacggtgaatctgggcggcaagacgtcggtgaccgtgtaccccggg

SEQ ID NO: 3150 - DNA, 410 bp, Homo sapiens
aaatgagggtccctgtatttgaggatataaaagatgaaactgaagaataaaagataggggaagaagaaaatgaagaagacgaggtcttctataagcctgttattgaagacttaagcatggaattggccagaaaatgcacggaactcattagcgatatccgttataaagaagagtttaaaaagtccaaggataagtgtacatttgtgactgacagtcctatgctaaaccatgtaaaaaatatcggtgcttttatttctgaggcaaaatacaaaggcaccattaaagctgacctttctaattctctttataagcggatgccagccacaattgacagtgtttttgcaggagaagttacacagctccagagtgaggtggcctacaagcagaaacatgatgctgccaaaggattc

SEQ ID NO: 3151 - DNA, 484 bp, Homo sapiens
  misc_feature (1)...(484): n = A,T,C or G
ngggagatgccgngctnnccccnaaacgttttnaccgnannnntcntnnnnntagggggaccnacccggccgncctctcgtncggatcttggctcactgcattttgtttttcccctcgaccccaggttcaaggtgatgctccgaccacctcagcctctgaagtagttaggaccacagatgcatgccaccatgtgtggctaatttttgtatttttaatagagatggggtttcgctatgttgcccaggctggtcttgaactcctgagctcaagcaatctgcctaccttggcctcccaaagtgctgggattacaggcatgagccaccatgcctggccaatttcttactgttgggtagtaagaattctttatatattttggatataagtgctttgttaggctgtgtgatgttcatacattttctccccatctgtgccttgtgtttcattgacttagcggggtctctttcccagagcataaagaatgan

SEQ ID NO: 3152 - DNA, 464 bp, Homo sapiens
actagttctagatcgcgagcggccgctcgcgatctataactatcttactctctcccagcaggcatctgtgaccgcttaagggctggatgaattggtccaaggtttgggacaggctgactgtgtacgtgacagggagggaaagatgatggccaggggaaagagcatcgtatatgctaggggattgaactgtggactgattcattgtaaatataattatattaacaggtagtatttcctgacaggtctgcaggaagcagcccactccctcacttttactccttcctccaaccctcaatcacagctacttacagccaggcaggatggggctttccccaaagcaattggccgtttgtccagtggcagacaatggtggctacagcctttgtgcttttaagagtgggctgggattgtggagactgcccaggggctttgctttgtcagaacttagacaatcttcttttgag

SEQ ID NO: 3153 - DNA, 410 bp, Homo sapiens
  misc_feature (1)...(410): n = A,T,C or G
nggagcggctngcttttncccgaaacgtttacnancngcatggactntngggttgangcacccgtnccctagattgtcacatgtaaaaagtaataaccatcattatatcttttatgttctgtaattccaaagcacggatctgtagagaacagagtgtctatcccatgcatgttgtcatgtacttatcccacaccctattgaaatcacagtacccataagggagacattttttttcttcaagaatatgtatttctgccacatctatgattctccagaatgagatgacagaaaatgctaaactattgttaaatgactatatgtagttccacttctggatggtagatgggggggctctgcaaactcattttctaataaaactggcaaaaaaaaatgtaaaaaaaaaaaaaagg

SEQ ID NO: 3154 - DNA, 378 bp, Homo sapiens
cgagatccttgctcctcagatttggttcatcgcctttcgtggtcaacgggccagacgactctggagtggatgcgaacccttctggctgcacatctcgaggaggaggcagtaccctggactctattctgctgccccttcagggtttgaaggagccggatcatccctcccgtcctgtcactttcagtgaggcacacacaactgaccgtagggatggacaccaggggccggacagcttctatttgggtcccacctctccaagaacgaaacagtccatgggaaagcatcaaaaagctccaaggacaggaatccatcttgggccaagggactactgggctgtgacctctccctggaacacccaggcagaagcagaatagacgt

SEQ ID NO: 3155 - DNA, 348 bp, Homo sapiens
  misc_feature (1)...(348): n = A,T,C or G
ngagcggccnnnnntnncccgggcaccgtcccgccacccgccnngccnctgaanttnagggncgacccacccgtccgcccacgcgtccgggatcactcggctcgtgcgtcgattaagaacgcagctagctgcgagaattaatgtgaattgcaggacacattgatcatcgacacttcgaacgcacttgcggccccgggttcctcccggggctacgcctgtctgagcgtcgcttgccgataaaaaaaaaaaaaaaaagggggggccgttttaaaggatccctgggggggcccaagttaacccgggcatgcaaggaaatagctttttccttatagggggccgaattaaaac

SEQ ID NO: 3156 - DNA, 436 bp, Homo sapiens
ccagcctctaccctgccgaacatctagatctaaggctcccaatcccatcctcatctctgccccttcttctcagaaggatggccgacacccagacacaggtggcccccacaccaaccatgaggatggcaactgcagaggacctgcccctccctccacccccagccctggaggacctgccactgccgccacccaaggaatccttctccaagttccatcagcagcggcaagctagtgagctccgccgcctctacaggcacatccaccctgagctccgcaagaatctggctgaggctgtggccgaggatctggctgaggtcctgggctctgaggaacccaccgagggtgacgttcagtgcatgcgctggatctttgagaactggagactggatgccattggagaacacgagaggccagctgccaaggagcccgtgctgtg

SEQ ID NO: 3157 - DNA, 426 bp, Homo sapiens
  misc_feature (1)...(426): n = A,T,C or G
gacgggaagctcaagcacgaagacacgaacttggcctctagcaccctgttgagggaaggtgccaaccgtgagatcctggggatcattgtttcctacaaagtgaaagtgaagctggtggtgtctcggggcggcctgttgggagatcttgcatccagcgacgtggccgtggaactgcccttcaccctaatgcaccccaagcccaaagaggaacccccgcatcgggaagttccagagaacgagacgccagtagataccaatctcatagaacttgacacaaatgatgacgacattgtatttgaggactttgctcgccagagactgaaaggcatgaaggatgacaaggaggaagaggaggatggtaccggctctccacagctcaacaacagatagacgggccggccctgcctccacgtggctccggctccn

SEQ ID NO: 3158 - DNA, 475 bp, Homo sapiens
  misc_feature (1)...(475): n = A,T,C or G
ngagcgcttgcttannnnnaaagcttannagnngtntnncnntnggtttaagaaccgnncagaatttattacagatacttcttttaaaagtaaatttttttattttattgtcagtagaaaaaagttaaggtccgactaatttaaactaagacagtttaaaaaggaagcctgaaaaagactcatactacaaataatttaattgatggcatataagaatatgcagtttgaaaaagccaaactcttctctccacttagcttttgatccccactgtttgcttatttgtataagtcatactgtgtagaatttctattttctttttccccattaaaagaggaccaaacaattctttatacaaatggagtagcaactagttttgtagcactacatttaatgtaatgagatacctttgttcatttttttaaatttgaaatatactttacctgatccactttgattgtatactatattctttgn

SEQ ID NO: 3159 - DNA, 486 bp, Homo sapiens
  misc_feature (1)...(486): n = A,T,C or G
cggccctcnnnnnaattgagaccccgtgaccggccggattcccggtcgacccacgcgtccgggcctgtgtttgcggccttcggcaagcgactgagatggcgagcgcaactgcacctgcagccgcagtccccaccctggcttcgcctttggagcagctccggcacttggcggaggagctgcggttgctcctgcctcgagtgcgggtcggcgaagcccaggagaccaccgaggagtttaatcgagagatgttctggagaagactcaatgaggcagctgtgactgtgtcaagggaagccacgactctgaccatagtcttctctcagcttccactgccgtctccacaggaaacccagaagttctgtgaacaagtccatgctgccatcaaggcatttattgcagtgtactatttgcttccaaaggatcaggggatcaccctgagaaagctggtacggggcgccaccctggacatcgtggatggcatggctn

SEQ ID NO: 3160 - DNA, 424 bp, Homo sapiens
  misc_feature (1)...(424): n = A,T,C or G
aagcacagaattctaggacatgctagggaatcatacatctgttttatgacatatgatcatcagatgaaaactggaggatcttatgggacagtgagaatattcctatgactcatatactatcaacagaatctaagcttcatttaaggcgctgtacggaattatctgagctacaggtacctaccttaccatactatatctacggaatcatgaaaccttaacacttcaaaatgattttgcgggttgtcttccattccagcctaacatccaatgcaggcaaggaaaataaaagatttccagtgacagaaaaatatattatctcaagtattttttaaaaatatatgaattctctctccaaatattagctagttattagattatattttgaaatgaacttgttggcccatctattacatctacagctgan

SEQ ID NO: 3161 - DNA, 392 bp, Homo sapiens
gcagttttgcagtcatttatatctactttaaacacatgcagattaaggggtgatttgtgcaaaaatttctagggaatgggtaataacttttgggtcatcgagtcaatgccatggaagagaggggggataaccccctggtgttgcgatggcaacggtaaactgacatggcaactgatgagcgtgtcttacggaaagctcattccaccccagccctgtttcagctagtcctcaatttggtccagtgtccgagccctgcctctggagtcaagtcccacctcctacctcataaagagagacataaatcaatggaatagaatcgagagtccagaaataaactcatacctcgatgatcaattgattttcaacaacggtgccaagaccattcagtgggg

SEQ ID NO: 3162 - DNA, 331 bp, Homo sapiens
cgtgaaccagcaggagttcgtcagagctctggcagccttcctcaaaaagaccgggaagctgaaagtccccgaatgggtggataccgtcaagctggccaagcacaaagagcttgctccctacgatgagaactggttctacacgcgagctgcttacacagcgcgggacctgtacctccggggtggcgctggggttggctccatgaccaagatctatgggggacgtcagagaaacggcgtgatgcccagccacttcagccgaggctccaagagtgtggcccgccgggtcctccaagccctggaggggctgaaaatggtggaaaaggaccaagat

SEQ ID NO: 3163 - DNA, 447 bp, Homo sapiens
gtggacctgctctggtggacttggatgttgccccatgagctttgcgcccctggtgggctacagcagcagcggctccgaggatgattccgaggacggtatgcggaccacgccgggggatgggagccaccgtcgtggccatagcccccttcccaggcagagatttccagtacctgacagtgtgctgaacatgttcccggacaccgaggaggggcctgaagatgacagcacaaaacacgggggacgggtgcgcaccttcctccatgagcgaggcaactgggccacccacgtttatgtaccatatgaagccaaggaggaggtcctggatctgcttgatgtgttgctgccccatgcccagacatttgtcccccggctggttaggaataatgtggtccacctcagcctgtcccaaagtgtggttctgcgccaccactggattcttcccttcgt

SEQ ID NO: 3164 - DNA, 462 bp, Homo sapiens
acagagtctcaccctgtcgcccagtctggagtgcagcggcgcaatctcagctcactgcaacctccgcctcctggattcaagcagttctcctgcctcagcctcctgagtagctgagattataggtgcatgccgccacacccggctaatttttgtagttttagtagagacggattcaccatgttggccatgctggtcttgaactcctgacctcaagcgatccgccacctgagcctcccaaagtgctggttttacaggcatgagccaccgtgcctggccaagggaaaaaaaaattaatatttgggtgagtgtcacccaacatgaaagcttcctgcgtggcaaacttgccttgtggctgatccatcatatcttgaggagctggcttctggtataattacccattcttcttctgggacacttagattgctagctgcttgttctttatgtagacatgactgcgagcgg

SEQ ID NO: 3165 - DNA, 511 bp, Homo sapiens
  misc_feature (1)...(511): n = A,T,C or G
agctctctaaccggatancagcggctatcggccggaacncttggggcgaaccacgcctccgcgcaggagccgcagggccgtaggcagccatggcgcccagtcggaatggcatggtcttgaagccccacttccacaaggactggcagcggcgcgtggccacgtggttcaaccagccggcccgtaagatccgcagacgtaaggcccggcaagccaaggcgcgccgcatcgccccgcgccccgcgtcgggtcccatccggcccatcgtgcgctgccccacggttcggtaccacacgaaggtgcgcgccggccgcggcttcagcctggaggagctcagggtggccggcattcacaagaaggtggcccggaccatcggcatttctgtggatccgaggaggcggaacaagtccacggagtccctgcaggccaacgtgcagcggctgaaggagtaccgctccaaactcatcctcttccccaggaagccctcggcccccaagaagggagacagttctgn

SEQ ID NO: 3166 - DNA, 432 bp, Homo sapiens
cccacgcgtacgactgaattaagctagattaaccttcactttcctgcggaagtgtgtactggaagctggcattcattgctaagatctctgctattcaggaatcttgcgggctctactctccaccattgtatgggagtaactcaggtcctttaggccttgaaggaagccagactatttgattctcattatctactgacattaccaggttctttacctatctgaaatttgctctgagagttctttctccattctagccctgtgggtctgtacatgaggctctgaggttcatccatgacgccatgccattctgcttgacaggagatgcttttttggggggggttggggaggaaggtaaagaccccgacttactccgcgcctggaaacgcatttcttctctctgactatggcgggtgtcaatcggggccgggagtg

SEQ ID NO: 3167 - DNA, 504 bp, Homo sapiens
  misc_feature (1)...(504): n = A,T,C or G
gctccccacagatagcaagcatcggcggaancccttggggganccacgcgcccggcatactttcaggaatatgctatatatgttttcataagtactgacaccttagggaagaaaaaaagtgggtaattgaagcttatggttgattaatttcctaacagcacagctatgaatattttgctggggtacactggaggtaggaagactactggaaatttttgcacttgaattttgtttttaaagctttttttctttaaagaatggtagaaacagattatccattccaaaatgtcttttctctgatcacaaagagcaaacaaatgtcaatatctcttatgatggtgaaaaaaaggaattaatcgatgcaaataaacttttcacagtattacttttaatgaagatttttcgaaatgtgccttttaatccagttaatgaatgaagctatatgcagtgtttcaaatgaataagtcaaaacaccatatgtnttcataataccacatgaaaaat

SEQ ID NO: 3168 - DNA, 448 bp, Homo sapiens
  misc_feature (1)...(448): n = A,T,C or G
nggagcggcttgctgnnnnnnnaaagcttttnannngctngnnctctngggtagaggnaagcgtccgggcgtacttttacacctacgacgatcgggcctacattatcttctgcggcggcagagggtcccgcggcagggctggtggccatggttcccgtagccagaaggagttgcccacagagcccccctacacagcatacgtaggaaatctacctttcaatacggttcagggcgacatagatgctatctttaaggatctcagcataaggagtgtacggctagtcagagacaaagacacagataaatttaaaggattctgctatgtataattcgatgaagtgaatgcccttaatgaagccttgacatacgataggtgcactgttgggcgatcggtcacttcgtgtggacattgcagaaggcagaaaacaagataaaggtggggtggctt

SEQ ID NO: 3169 - DNA, 387 bp, Homo sapiens
ggagggatagcattgggagatatacctaatgctagatgacaccttagtgggtgcagcgcaccagcatggcacatgtatacatatgtaactaacctttacaatgtgcacatgtaccctaaaacttaagagtataattaaaaaaaaaaaaaaaaaagattttatgcaccttaaataacagggatggctaaaaaaactgaggcatccacttgaatgcatatttacaattataatgaaaattacccagaaccttgggaaaattttacaaggggagggaaaaacacaaaaccatattcaatatttggattccaaaaatcaaaaaattttatgtccttgtgggaaaaacaaaaggaaaacaaataaacctgatttgctgaggccatagggctg

SEQ ID NO: 3170 - DNA, 392 bp, Homo sapiens
agcctttctattagatcttagtaagattacacatgcatgcatacccgttccagagagttcaccctgtacatcaccacgatcaaaagggacgagcatcaagcacgcagcaatgcagatcataacgcttagcctagccacacccccacgggaaacagcagggagtaacctttagcaataaacgagagtgtaactaagctatactaaccccagggttggtcaatttcatgccagccaccgcgggaaatgagtatttataaaattttattggggggggcattttttaagaactctgctgggggcgccaggctgacgggcagtgctaaaataatagctctctgcatacggggactcttgaactcacccattggttctgttgtggacgacactttgtt

SEQ ID NO: 3171 - DNA, 456 bp, Homo sapiens
  misc_feature (1)...(456): n = A,T,C or G
atttttatatttgacatcaaaagcacaagaaacaatacaaaaatagataaattgagcctcctccaagtgaaaaattttatgcatcaaagaacattatcaagaaagtaaggtaaaaagctgaatatgtgtcctctaagatcaagaatgagataagcatggctactcttgccatttttattaaatatgctactgaagtcctagccagagtacttacacaagaaaaagaaaagctatccaaattggtaagaaagaagtaaaactgtctctgtttgtagaagatataatctcatatataaaaaattctataagttccatcaaaaaaaatctcttagagttaataacaaattcagttactttgcaggatacaaaactgacatacaaaaatcagttttgtttcaatgcactaacaacaaactatccaagaaagggattaagaaacattnttatttacaaata

SEQ ID NO: 3172 - DNA, 506 bp, Homo sapiens
  misc_feature (1)...(506): n = A,T,C or G
gctcccctacagtagagttagcatcggcnnancnntggnngtaaccacgcgcccgacagcatgagctcgtggctcaggagagccttcaggccctttatgctttccatgggcagtgctgtgtgggcagaggaggggtgatatgagatcgagcccatggaaggacctctgggcaaaaagttcccaggccctaactgcgtctacttgctcagtcccagctctgcctgttgctctagcccacaggctccctgcggagggtctgggcttggcggaggacccaaaatggcactgaagccagcatggctgtgggagttgagcaaaccctgggtgccagtccaggagctgtggctggacatggggtgatggggcgggatgcttgggcctgggtctctccgccagcagtgccaggagcccttgctggggaaatcaagaccagactaggatgctttttgcccaggcctgccttccattctttaacagcccattcttgtcttggggttgcaatgatg

SEQ ID NO: 3173 - DNA, 396 bp, Homo sapiens
  misc_feature (1)...(396): n = A,T,C or G
tggnngncccctgccatcccagctacacgggaggctgaggcatgagaattgcttgaacctgggaggtggagggtgcagtgagctgagatcgcaccactgcactccagtttgggtgacagagcgaggctccatctcaaaaaaaaaaaaaaattaaccccatgacaggaacatttcctatggaaccccttttgacctttttgacagcctttaaaacctcctgtctactggaggacaaatttttgccctcctttccatttttcacatgccttttttaaatgctgggggactgacaccggacctcttctctgtccttcttaaattcactggccccctgtttgaatggggacagttcactgacctcctgctttttatactttatccctcttgacatagatt

SEQ ID NO: 3174 - DNA, 418 bp, Homo sapiens
gagcgacagcaggagatggagcatgtttatgagctcttggagaataagatgcagcttctgcaggaggaatccaggctagcaaagaatgaagctgcgcggatggcagctctggtggaagcagagaaggagtgtaacctggagctctcagagaaactgaagggagtcaccaaaaactgggaagatgtaccaggagaccaggtcaagcccgaccaatacactgaggccctggcccagagggacaagtaggtgccttcggtgctctttttgtcgcttgtcttttgcccattctcaaggcatacagcagctgtcctgttccctttcaaggactgacagtaggagcttcactatttctaagactttatgggcccacaaccgaagacattcttttcagggttgaattttcagtggtatccattat

SEQ ID NO: 3175 - DNA, 420 bp, Homo sapiens
  misc_feature (1)...(420): n = A,T,C or G
cttacacttaggagatttcaacttaacttgaccgntntgaccccttccaaaaaaaaaaaaaaaaaaaaaaaaaaaaaaaaaaaaaaaaaannggggggggcccctttaaaaaaatcctgggggggccccaaatccccccggggggaaaaaaaaaattttttttttttttggggggggtaaaaaaacccccccggggttttttgaaaaaaacccctttttttgggggggggaaaatggcccccccccccccccaaaaaaaaaaccccttggggaaaaaaaaaaatttttaggggggggggggggaaaaaacttttttttttttttttgttaaaaaaagttggnnnnnnnnnnccacacccccccccggcggggggggcggccccccccccccccccccnagacggccccccgcgcgccccc

SEQ ID NO: 3176 - DNA, 400 bp, Homo sapiens
  misc_feature (1)...(400): n = A,T,C or G
annttgtttcctcagcggccccgagcccgcggtgctgtgcggatggtagggatgccgaccctactgaggagcagatggcagaaacagagagaaacgacgaggagcagttcgaatgccaggaactgctcgagtgccaggtgcaggtgggggcccccgaggaggaggaggaggaggaggaggacgcgggcctggtggccgaggccgaggccgtggctgccggctggatgctcgatttcctctgcctctctctttgccgagctttccgcgacggccgctctgaggacttccgcaggacccgcaacagcgcagaggctattattcatggactatccagtctaacagcttgccagttgagaacgatatacatatgtcagtttttgacaagaattgcagcaggaaa

SEQ ID NO: 3177 - DNA, 307 bp, Homo sapiens
gcagccagcgcaggggcttctgctgagggggcaggcggagcttgaggaaaccgcacataagttttgttctctttgaaagatagagagtaatacaactacttaaaaaatatagtcaatagggtactaacatattgcttagcgttaagtttttaacgtaattttaatagcttaagattttaagagaaaatatgaagacttagaagagtagcatgaggaaggaaaagataaaaggtttctaaaacatgacggaggttgagatgaagcttcttcatggagtaaaaaatgtatttaaaaaaaaaaaaaaagg

SEQ ID NO: 3178 - DNA, 427 bp, Homo sapiens
  misc_feature (1)...(427): n = A,T,C or G
cgtttacttgctctcagccatgaacacaagttcccaactgtcccagttaaatcagagttggcagttgaaattttggagaaaggccaggtccggttttggatgcaggctgagaaactgtctggcaatgccaaagtcaactacatatttaacgagaaggaaatttttgaaggcccgaaatataaaatgcatattgaccgaaacactggcatcatcgaaatgttcatggaaaagctacaggatgaggatgagggaacgtacactttccagcttcaagatggaaaagcaactaaccattctactgttgttctcgttggagatgttttcaaaaagctccagaaagaagctgaattccagcggcaagaatggatcaagaaacaaggtcctcactttggtgagtatttgagctgggatgtgactggtgaatgtn

SEQ ID NO: 3179 - DNA, 463 bp, Homo sapiens
  misc_feature (1)...(463): n = A,T,C or G
tcccagggaaagagaaaactcgccctaggccctaggtgggaagatggtttgaaatttttgtaatcgagtaaggcacacccaaatgtaaaaatccttttgaatgatgcctttataaatctttctctcactgtctatttaagtgcaattaacatatgtcacgaacttgaaagttttctaaactcaataaggtaatgaccagttgttatttacagctctgtaacctcccgttgcgtcaagtctaaaccaagattatgtgacttgcaataaagttattcagagcagagnaaaaaaaaaaaaaaaaaaaaaaaaaaaaaaaaaaaaaaaaaaaaaaaannnaannnnnnnannannnnnnnannnnnnnnnnnnnnnnggggnnnngganaaaaaaaaaaaaaaaannaannnnannaaananannnnnnnnaaaaaaaaaaaaaaaaaggggggggggctttatgtt

SEQ ID NO: 3180 - DNA, 400 bp, Homo sapiens
aagaagtcgggggccgtggcgcgcagcccgcggtgcctgaagggatgttcgaggacaagccccacgctgagggggcggcggtggtcgccgcagccggggaggcgctacaggccctgtgccaggagctgaacctggacgaggggagcgcggccgaagccctggacgactttactgccatccgaggcaactacagcctagagggagaagttacacactggttggcatgttcattatatgttgcatgccgcaaaagcattattcccacggttggaaagggtatcatggaaggcaactgtgtttcacttaccagaatactacgttcagctaaattaagtttaatacaattttttagtaaaatgaagaaatggatggacatgtcaaatctaccacaagaatttcg

SEQ ID NO: 3181 - DNA, 424 bp, Homo sapiens
  misc_feature (1)...(424): n = A,T,C or G
gagctggtcggagtgacagagaagccannnnaaccgctttgaaagaggaaataagtgttgaagatgaagctgtagataaaaacattttcagagactgtaacaagatcgcattttacaggcgtcagaaacagtggctttccaagaagtccacctatcaggcattattggattcagtcacaacagatgaagacagcaccaggttccaaatcatcaatgaagcaagtaaggttcctctcctggctgaaatttatggtatagaaggaaacattttcaggcttaaaattaatgaagagactcctctaaaacccagatttgaagttccggatgtcctcacaagcaagccaagcactgtaaggctgatttcatgctctggggacacaggcagtctgatattggcagatggaaaaggagacctgaagtgcca

SEQ ID NO: 3182 - DNA, 498 bp, Homo sapiens
  misc_feature (1)...(498): n = A,T,C or G
gggtgtgcacngnaaatanannaaaaaactgaaanccttcgnatngaacnncatnnncagggncgacccacgcgtgcgcaggtctctctggacctcgcctgactcggctgggctgtgcctgaaattgacccagctccaccatactccttgattatgagaaaacaaggagtaagctcaaagcggctgcaatcttccggccgcagccagtctaaggggcggcgcggggcctccctcgcccgggagccggaggtagaggaggaggtggaaaagtcggtcctaggcggcgggaaactgccaaggggcgcctggaggtcctccccggggaggatccaaagtctgaaagagcgaaaaggcttggagctagaggtggtggccaagacctttcttctcggccccttccagttcgtccgtaattccctggcgcacctccgggaaaaggtgcaggaactgcaggcgcggcggttctccagcagaaccactctcggcgtcgaggaattg

SEQ ID NO: 3183 - DNA, 430 bp, Homo sapiens
  misc_feature (1)...(430): n = A,T,C or G
agcgccttacgaaaggcggcaaaaagggagccannannnatgtggttgatccattttctaagaaagattggtatgatgtgaaagcacctgctatgttcaatataagaaatattggaaagacgctcgtcaccaggacccaaggaaccaaaattgcatctgatggtctcaagggtcgtgtgtttgaagtgagtcttgctgatttgcagaatgatgaagttgcatttagaaaattcaagctgattactgaagatgttcagggtaaaaactgcctgactaacttccatggcatggatcttacccgtgacaaaatgtgttccatggtcaaaaaatggcagacaatgattgaagctcacgttgatgtcaagactaccgatggttacttgcttcgtctgttctgtgttggttttactaaaaaacgcaacaatcagat

SEQ ID NO: 3184 - DNA, 414 bp, Homo sapiens
caacacactataaaatgggctgtagcaaagcgatgcttttaggtgataagatttagagagactagtggaaccaaacctttttctacaatgataatccttaagtagatagctaacattgtccttagattaaaccagttttttcatatgtggttcttacataccacctccttcagaattataggggagcttatttaaaaattaattatccacttcatgaataactttaaggtggcatccacacatccacattcttacagatactgaggtctgatgaccaaattaattcatctttcttaaatttcagatacccgagtaatgctttggcaagtattcccagttatgacgggattctaggttcagcctaaagtcctgatgaagttggtgttctataaataacagaagtacaggaagcag

SEQ ID NO: 3185 - DNA, 411 bp, Homo sapiens
cccacgcgtccgcccacgcgtccgctttattttattttattttttttgaaacaagatctcgctctgttgctcaggctgaagtgcaatggcgcaaactcggctcactgcaacctcccaggttcaagcaattctcgtgcctcagccatccctataggcatgcgccaccacactttgctaatcttgtatttttggtagagacggggtttgcaccatgttggccaggctggtctcgaactcccaacctcaagtaatctggcctcccagagtggtgggattacaggcgtgagccagcgcgcccggcctggacttaacttctgaagaactctttctgtttagattgcaggagcgttctctcggctcatctcttgttttctcacccagctgttcttcttctagttggccatcattctt

SEQ ID NO: 3186 - DNA, 455 bp, Homo sapiens
  misc_feature (1)...(455): n = A,T,C or G
gttttgtcatgccagatccccaaatgacataactgatcacatgattctaagccacttcaccatgattctttgtaatctaaaaaactaatagaacaatgggatgacatgctgaaagtcaagttttgggaaattattctagtgacattctgcagagtaaaatgaagacgagaaagaacccacaggcgactttataaggctcttaaaataatctaggtttggccaggcggggtggttcatgcctgtaatcctagcactttaggaagccaaggcgggtggatcatctgaggtcaggagtttgagaccagcctgaccaacatggtgaaaccccgtctctactaaaaatacaaaattagcttgggggtggggcccatgctctgtatcctagctactanggaggctgaggcaggagaatcgctagaaccccagaggtggaagttgcagtgagccgcgattgt

SEQ ID NO: 3187 - DNA, 531 bp, Homo sapiens
  misc_feature (1)...(531): n = A,T,C or G
tgcgagcnnnncnnaattgacgcctgctggaacggtcngtagaacccggctcgacccacgcgtccggagtgattctcttcaatctatgtatttgtatcactttcatatttcttaccctctcttcctccaattctatggcctatggaaaatgggattagaccctgttgttaatgtggcatttagtaaatagttggatctgtttccactgttctgtattgggctgggaagtgttatcaggtagtccctgggaagagaacagtatattggcaacattagcaaaggagtgccattttgtaaaaattacctcattgtataactttctttaacttggtacactcaagctttgttccagactctggttaaaggtggggctaaatttcaacctaataattctaaaagagagcttcagaagctaaaacaattcacatcttggtgacaggggatactntttcctgctaagatgccctcaaaatgtttttctctttctttntttcttgggtggngaagacagggtagataggtggggtggga

SEQ ID NO: 3188 - DNA, 406 bp, Homo sapiens
atgactggcagatataaaatggctatttcaatattacctacaaaggacatgaaagatacatgctggttacatgcatgcaaattggagcacaagtgaagaactcactactccaataataggaaattttaagaagtcttcctagatggtgttaaaagagaaaattcagctgaattaaatttaaaagagtttcattgaacaaagaaggactcacaaattgggcagtctcccaagacagagtagattcagactccagcacagccacgtggctgagaggatttatggacagaaaaatgaacgggacctacagaaaacggaagtgaggtacataaacagctggattggttatagctccacgttgccttccttatttgaacacagtttgaacagttggcaacatttgattggc

SEQ ID NO: 3189 - DNA, 409 bp, Homo sapiens
  misc_feature (1)...(409): n = A,T,C or G
gaggcgcatatctnaaatcccagctacttgagaggctgaggcacgagaatcacttgaacctgggaggcagaagttacagtgagccgagatcacgccactgcactccagcctgggacacagagtaagactctgtctcaaaaaagacccaaaaaaaactggggagaaccaggggtctgcttcatagggtctttctagtatgtagatacaagcccttgcactcgcactcgtactcttatagcagctgacagggtaagctccagactgccacctttctgctgactacttccttattcttttcgtgacacgtcccttccacacacctttcagaagcttcaccctctctctttgtcgcttttcattttggaaacatcaataaaaatgtccagtttgaggaagaagtagatagccc

SEQ ID NO: 3190 - DNA, 462 bp, Homo sapiens
gagaatccaactcaggtaaggaatatttagatttttctaattttaaaaatcttgtattaataaaatcaggattcttgcctaagaaatgtattactttagaaattttaattttcatgtggtgttagtaaacagaagcttaaaatgggaattttgccatagttatactttgatgtattaattaataatcttaatgtatgcctaaattgcaggaaataatttccagtataatacctaattataaatttgatactgattccagttgctatagaatcttaatattttcaaatatattaattttgaattatgcctttgatagcatacttataatttttattaattacaaaaataagagtccttacgtacagtttaaaattctcagtcatagagaatttggctatcaacaacatccctgatacacaggcgtctttttatcatcattatgatgggtatgttctatataat

SEQ ID NO: 3191 - DNA, 457 bp, Homo sapiens
cccacgcgtccgggtatttctgggtttttccagtgattggcatgtttgagttaaagacagaaagacttcattggtcacatttctttgtggtaatttattttcagatacctgatcagagaagcagtttgatgtactaaaggcttctcgattgggagacaggaaacctgggtgtcagtgccgggtctgccactgaatttctgtgtgacctttgtcagagtactgtacttccagagcgttggtttccacatctaccctataaagcagcctgcatgtttctctcattctctcgttcgaggagttggaggatagctgctgcctgatgtaagtagagtgcagttctctctccatgagcaacttttttttttttgtgatcaccagagagggaaggccctgggccccttactctgtaaaggaaacttgccagcgttgaccagcaacattggtccttgtcagcttg

SEQ ID NO: 3192 - DNA, 403 bp, Homo sapiens
ataagtgtaaagttgtgcgtctctgcggctcctgaacttgaagattattatgaatagattggaccagcattatatattaaaaactttgatacttagaactttccaactttaaaattcagaatcataaatggtgacaacagtagtagtattgaaccaaaaatagtcaagtaaataatgtctcagtaaagcaaaagcattatcttctcaaatacaaaaaatacaaaattcatttcttttcttgaccttgaaaatttctgttttccaaatacctaggaaaaatgaataccttctgcgttgaatccatgtagcaatctgaaaaagaaatcaaaatggaatggtactgaaaagctaatttgtagcacataacggtatatagttctataccattaatactaaaacatgg

SEQ ID NO: 3193 - DNA, 416 bp, Homo sapiens
  misc_feature (1)...(416): n = A,T,C or G
atttgtcaaaatcctggcccgagagcctcccctgctccctcccccggtactggtgaggagaacagctctgagaagagatggcacccacctctgtcttcctgcccagcagggaagaacaagctgcagggtctctggaagctggaggggttttgaggcgctcaaagccggttgagtgccggtttcttagagggacacctttgcaagaagtagaaggtctccatggttaagagtctgacagcctggggttcaaatctcaccccgacatacactgctgggccactgtggcagcgtggaggggcggtcaagggtgtggctcctggagtcagacagttcaggttcagatcctgcccctgcccctcaccagccggggaccttggccaagtcacttacctcctctgcacctctgtgtcctcagn

SEQ ID NO: 3194 - DNA, 407 bp, Homo sapiens
cttgaagatgggtttttcaaaataacccaatcagacaaaaaagaaaaaaaaagaataataaaaatgtaaataaaaccttcaagaggtgtgggaattatgtaaaacattcaaatctacaagtcatagaaattcctgagtaagaagtaaagtgtttagaaaacctatttgaggaagtaattgaggcaaacattctcatcttgctagttatttagacatccagatacaagcggtacagagaactcaaagaggatacattgcaagacagacttcaccaaaacatatagtcgtcagactatctaaagttaacatgcaggaaaaaatactaaatttaccaaaggagaagcatctaatcacctataaaggaaattcaatcagactaacagctaaacctagccccaaacccactc

SEQ ID NO: 3195 - DNA, 429 bp, Homo sapiens
cggacgcgtgggcttatagtttcagagactcaaatttctgatgggactgtaggtatgcaccaccatggctggcttatagttgtgatttaaagaaaaacatttacaaatcatagctttattttagaaagagttattagaaataatctaattcaacttatttgttttaaaaataaaaaaagaaattgttcagagatattaactaattttccagaatacatatatatacatacatatatgtatgagagagagagatgagaatctctatatttaacatatatactgtcacccggtcatagccgctcatgcctgtaatcccaacactttgggaggctgaggaggaaggatcgcgtgaagccatgagttcaagaccagcctgggcagcatagtgggaccccgtctttacaaaagaaaattaaataaaaaattacg

SEQ ID NO: 3196 - DNA, 391 bp, Homo sapiens
  misc_feature (1)...(391): n = A,T,C or G
agatttccttttcattcttcctgggaatagaagatgtaatggaagttccagtatctgtatgcaggcctatgactagcttcacttcttggtgactaatactagttgacaaaacagcatattctaaactgattgtcttcgttatccagtagctttcctattctccataacaaatgttccaaatctttgattactcacctcagaatgcttgtctcactcctcttttcctcattcctagtagatcataccttggagaagaaagtagaaactatcaggcctgaacttcattagctttttcttcctcttcaatccaaatctgtctgtatcttcattcatttttcttaaccctttccttgcttgctatttctgctttccaaaaccaaggaaggaattn

SEQ ID NO: 3197 - DNA, 391 bp, Homo sapiens
aattaatattctaaggttataaggccccttgagcatgtctagatgagtgcttttcaagcattttgaggctggacttttctgggtcctgccctgtccctttctttgtgtgtgagttttttgttttttcttgttcatttgtttgtttgttgtaatcgttgtgttgttgttgttttaatgtgctttcatgtggtattggaattggttctgaaagtgatcgagctagaactaagtgagcaccttttctttaaccatcctttgtttcagcatgcccctagaaagccaaggttccttgaaacttttctatatacgtctatatggaaactactaaccaatccttctccctttcctttgggaacattgacttctaaagcaccgtagaagttcttgacaa

SEQ ID NO: 3198 - DNA, 413 bp, Homo sapiens
tttgattagtgatgtctgccacgggcagggatggaagcagcagtgtgatgtctgctctcttctctcccctctgtccctcttcaggaagaaagagctcattctgtctcacaagccaccggcatcctgtatcagcttccagcctcccctcaggctttccagtcaccagggacactcggagccacagcctagagccccgtgttccctggcctgtgcgtctgcccccttctgagatgcagccagaagctctgtgcctgctgcaaagattcaggtggaccctcctctaatctcctgctgtgcccgccagtccttgccctcccaccaggtctctgagctcagtcttaccaaattcgccctttaacagcttgctctggcaaccccataaatgacacctgagctccgtagaagctaagctc

SEQ ID NO: 3199 - DNA, 449 bp, Homo sapiens
  misc_feature (1)...(449): n = A,T,C or G
cccacgcgtncggtgtgtggttctcttttggaatttttttcaggtgatttaataataatttaaaactactatagaaactgcagagcaaaggaaggggcttaatgatcctgaagggatttcttctgatggtagcttttgtattatcaagtaagattctattttcagttgtgtgtaagcaagttttttttttagtgtaggagaaatacttttccattgtttaactgcaaaacaggatgttaagggatgcttcaaaaattttggaaattgtttattttaaacttatctgtttgtaaattggaactgattaaaaattgtgatagttcaacttgaatgtctcttatagggtgggcttttgctgtgagggaggggaaacttttttttttttaataacttttttcaaaaacctttttgagcataacccacctggccgatgatggcctaaaccaaaa

SEQ ID NO: 3200 - DNA, 409 bp, Homo sapiens
cagttttgtaatctttaaaatggagatattaataccatcttctcaggactataaattacagagttcatttaaaaaaataagatgcctcaacattttttaagggaattaacatttactcagtgccaactatgtacaagatactatgctagaatgttatattatttctcacaacatttctgtgaggataggtaagaccatattacaggaaagaaaattgatttagaaagggtgaaaaaattgctcacaatcttagggctagaggccaaattcatgcttaaaaagaactacatgcttcttttcattatatcatgctgccttaattgggaactgatatataaattactgcttgctattaattctctttttgtaaacctgagctcaagtcttaaactgtggcatcagccaggtg

SEQ ID NO: 3201 - DNA, 428 bp, Homo sapiens
cccacgcgtccgcatttctataaaaatactacaatttttttatgcacaacttcccattaaaaatgagatttcttatttgtttgtctgtttttactctgggagtaatactttttaaattacctttacatatatagtcactggcatactgagaatatacaatgatcctggaaattgcagtaacaaaagcacacaacgattatagtaactataagatacaataaaacaaataaatgtgaaagtagattcatgaaaatgtattcctttaaaatattgttttcctacaggcctatttaacaagatgtttcattttactgtatattttgtagttaatataaatgttgctctaatcagattggcttaaagcatttttattatatttatgttgctgaactaatatatgaaataagtaaatgtagctcccacacggg

SEQ ID NO: 3202 - DNA, 448 bp, Homo sapiens
  misc_feature (1)...(448): n = A,T,C or G
ctaaaagcacttcggttactcaatttccagcgtcagctgagacaggaggtggtggcctgcatgcgcagggacacgaccctggagacggctctcaactccaaagcatacaaacggagcaagcgccagactctgagagatctcgcatgaccgagaagctggagaagcagcagaagattgagcaggagaggaaacgccgtcagaaacaccaggaatacctgaacagtattttgcaacatgcaaaagattttaaggaatatcatcggtctgtggccggaaagatccagaagctctccaaagcagtggcaacttggcatgccaacactgaaagagagcagaagaaggagacagagcggattgaaaaggagagaatgcggcgactgatggctgaagatgaggagggttatagaaaactgattgatcanaagaaagacaggcgtttagcttaccn

SEQ ID NO: 3203 - DNA, 448 bp, Homo sapiens
  misc_feature (1)...(448): n = A,T,C or G
ttgaaggaggctcctgcctgagggacagcatcaggcagcgggctctgtatagtgagaaccaagtggaggccttctgtgcccagctcagagttctgcaccacgccaggactgcccaagccaagggctactgacgcaagttccactcattccactctgtggggggcgccttgggcctctcctggaagggctcttggagaaggaattggagttacgtacaagtgacctaaatgggaagcttttctagatgagattggattaaattccatgtgatttctctttccctttaatccaggttgggactcgtttctttctggtggatcacagctgcccagatgttgcaattgatttttatgtttctgtagagaagtatttttctttcatcttcaggattttttttgccaccaaaagaaaacattggaactctgtgttcctcttgattgtgacttcn

SEQ ID NO: 3204 - DNA, 424 bp, Homo sapiens
aggtgactgatgatcaccctaaaagggaggtaggtatctagcagtttcacagttactttgagcctgaccacttgttctgaagtgcagatgttgaaacatgcattgaggaagaacactttaaggaagcactttatgatttactcatggctggtgttggcctcaaagtaaaagaacatcttaatgcagaacagtacaataaagagccccttaggatggatgccatcatctgtccccatggttgggattgccaaggaaagtgccttgttctgtgcatcttcagaatcccccaggccctctcttgatccttttcatgaagtccagagcattccttctattacaggctgaagatgcattgtaaaagggaatgctataatagtattccctcttctcaataaatgtgcaaaactggagaatctggtgctgt

SEQ ID NO: 3205 - DNA, 402 bp, Homo sapiens
cggacgcgtgggattgtctccatcagagcctgcatgtgtatgccgtcctcccctggtccggtgtttgtgttccccacccctcacagactgcctgagctcttctgtaagctggggtagggtgatggcagtgctccgggaactgggcctgcagccttcctcttctgggactgctgtgaggcagaggaatgatggagaatctagtgtagcagcctccaggcaggattcagcacaacactggggagtcacccttccctcgggcctctgcctaccaacaactgggcttatcactgggaaaacacaaaaaattacacaacccagcaacaacaaaagaactagtcctcttagaatttcttgcgctttgatttttttagggcttgtgccctgtttcacttatagggtcta

SEQ ID NO: 3206 - DNA, 402 bp, Homo sapiens
  misc_feature (1)...(402): n = A,T,C or G
tgagannngnngncccgatgactgacagtgaagatagtactgtgtccatccagataaaattagaaaatgaaggcagtgatgaagatattgaaactgatgtactctatagtccacagatggctctaaagctagcattaacagaatggttgcaagagtttggtgtgcctcatcaatacagcagtaggcaagttgcacacagtggagctaaagcaagtgtagttgatgggactcctttagttgcagcaccctctttaaatgccacaaccgtagtaacaacagtttatcaggagcccattatgagccagggagcagccttgagtggtgagcctactactctgaccaaggaagaagaaaagaaacagcctgatgaagaacccatggacatggtggtggaaaaacaaa

SEQ ID NO: 3207 - DNA, 188 bp, Homo sapiens
tcatccctcttattaatcatcatcctagccctaagtctggcctatgagtgactacaaaaaggattagactgagccgaataaaaaaaaaaaaaaaaggggcggccgttttaaaggatccctggaggggcccaagtttacccgggcatgcaacgtcatatttttttccttatagggagccgtattataac

SEQ ID NO: 3208 - DNA, 427 bp, Homo sapiens
  misc_feature (1)...(427): n = A,T,C or G
ctaaacgtcaccaaggtggcttctccttggctgagagatggaaggcgtggtgggatttgctcctgggttccctaggccctagtgagggcagaagagaaaccatcctctcccttcttacaccgngaggccaagatcccctcagaaggcaggagtgctgccctctcccatggtgcccgtgcctctgtgctgtgtatgtgaaccacccatgtgagggaataaacctggcactaggaagaaaaaaaaaaaaaaaaactataacttattaaaacaaaaggacaaaaaaaaaaaaaaaanngggggggggggccctttaaaaaaatccccggggggccccaattttacgggggaaaaaaaaatttttttttttttttttgggggggggatattaaacccccgggggggttttgggggaaaaacccttttttga

SEQ ID NO: 3209 - DNA, 490 bp, Homo sapiens
  misc_feature (1)...(490): n = A,T,C or G
aattgatcgcctgtcggnaccgttcgataaccctcgggtcgacccacgcgtccgctgtgctgcgcggcgcggcgcggcgcggcacggcacggtgggagtgtctccggctggcctgcagggagaacaccgactgagacctcaaaccctggctccagtgtcatggaatccgtcacctttgaggatgtggccgtggagttcatccaggagtgggcattgctggacagcgcacggaggagcctgtgcaaatacaggatgcttgaccagtgcaggaccctggcctccaggggaactccaccatgcaaacccagttgtgtctcccagctggggcaaagagcagagccaaaggcaacagaacgagggattctccgtgccacaggtgttgcctgggaatctcaacttaaacccgaagagttgccttctatgcaggatcttttggaagaagcatcctccagggacatgcaaatggngccggngctgttcctgaggatgn

SEQ ID NO: 3210 - DNA, 421 bp, Homo sapiens
  misc_feature (1)...(421): n = A,T,C or G
ttggtttgtctagttttaacctggcaattgtatatctgggagtcaagggaactgttcttatctcttacattccaagtatgattaatggagtattgaaattattgcagcatgctgggggaaaatgttatcagtgataagatacagacaagtaacttgcttgggggtaaggaaataatctggggatttcagaccggtgtatgtcgttagctacttccaggctaaccatggaggagtgtggtggctttactaagacccaggctgacctgacagaataaatggaatgttctatgcttgaactgcctgaattccagagatatttattaaggaaaaaacacaaaaccttgagtataagataaaggggggagtttcttgaaactgtcatcttttttaaatactcaagaaattccaattttcttatgtn

SEQ ID NO: 3211 - DNA, 438 bp, Homo sapiens
  misc_feature (1)...(438): n = A,T,C or G
aagatgcggtatttggcaaaattgatacgaggaatggctattgaccaggctttggctcagctggaaatcaatgacacaaaaggggccagaataattaaagaggttctattaaaaacacaagatatggcagcgagagaccataacgaggaatgcaggaccaatttatatatagcatgagtccacctcgggacgaggccagtgcctgaaacgcatccgctaccatggcaaaggtcgctttgggatcatggagaaggatgattgccattattttgtgaggntggaggaagggaccccacctccacctgagccaccaaagactgcggttgcccatgccacagagtgtattcagcagctatccagccggaccatcgctcacactctatgatgaggagattcagactccacagagtacatattttgccatatatactctaagaa

SEQ ID NO: 3212 - DNA, 412 bp, Homo sapiens
agttgtaaaaaactccagttgacacaaaatagactacgaaagtggctttaacatatctgaacacacaatagctaagacccaaactgggattagataccccactatgcttagccctaaacctcaacagttaaatcaacaaaactgctcgccagaacactacgagccacagcttaaaactcaaaggacctggcggtgcttcatatccctctagaggagcctgttctgtaatcgataaaccccgatcaaaaaaaaaaaaaaaaaaaaaaaaaaaaaaaaagggggggggccttttaaaaaaatccctgggggggccaaattttacggggggggggaaaaaaaatttttttctttttaggggggggtaataaaaacccccggggggttttttggaaaaaaaccttttttggggggg

SEQ ID NO: 3213 - DNA, 391 bp, Homo sapiens
tacaataggcttttagataccactcctgttctttttgagggaaatcaagagaaagaaagggaaggttaggatatagaacatcttcaggtttgttttaataccagcgccattcaacatgaccttgccctagattagagttaaaaccttataggactgaattaaaaaaattttaaacaataatctccaagggtaattcatgattagtatcttcatgattgttaaggtggcagatacagtggctgcagggctccctctcgtggactgttaaagcaagtagtggtcgggtctcaagagccagaggcttttctgttaaaggcctcttttgtgacatcggttgtgggaaaacatgcgatttgggtgatagaaaagaatctgtggaagagttagagta

SEQ ID NO: 3214 - DNA, 433 bp, Homo sapiens
gccagagcgaggtgagcgccgcgcagctgcaggagaggctggccgtgctcgagaggcacctgcggagccccgtgctcacctttgccggcggcctgccagatgtgccggtgacttcagcgccagtcaccgcgttctaccgcggctgcatgacactggaggtcaaccggaggctgctggacctggacgaggcggcgtacaagcacagcgacatcacggcccactcctgcccccccgtggagcccgccgcagcctaagcccccacgggacgcggcaggcttctcagtctctgtccgagacagccgggaggagcctgggggctcctcaccacgtggggccatgctgagagctgggctttcctctgtgaccatcccggcctgtaacatatctgtaaatagtgagatggacttggggcctctgacgccgcgcactcagg

SEQ ID NO: 3215 - DNA, 427 bp, Homo sapiens
  misc_feature (1)...(427): n = A,T,C or G
cggacgcgtgggctgaggtgcaaaccaaaatacttctgtaactttttttgatatatactgtcattctaagtacatatactccttatgacttgggaagtatttgtcttgaggcaagtatttaccacccacactaaaataatgctggaaaaaataaaatactaaactgaaggcacagtattattagaaagtgtaacattttcattttctcttttactctacattttaaagatacgagggttattgttcttgaaataattacctatattaaattatcatagaatgtgtctataaacatttgacgaaaaatgttgattttcctccagaataatgtgaagtccatactcagaaattaactagaaaggttttagacattacttaaataaattattcacattgcatttgtattgcttgctctgtgtaattgaan

SEQ ID NO: 3216 - DNA, 471 bp, Homo sapiens
  misc_feature (1)...(471): n = A,T,C or G
agtgggtnaaacgtgnacccgtagatagcatcgaaatnnngcgtcgacccacgcgtccgaccacgcgtacggagaaaagtcaggtagaaagtggtttataaatctgttaggaaggaagggtaatataaatttttatattaccacatatagattttaattaacatgattgagaaattattaagagtacagaaagagagaagtgggctggaatgcatgcagagatgtcatcttctttactcaatcccaaattgatgaacattcaggttatttcatttaaattataagtgcatttagtgaacacacctttgaaatcttgtctgatatctcctgaggagaatttcctagaagtagatcataagttgcatgtgaagtgcttgaatggagcctaccacatagtgagctcttgataaatatttgtagccttggtttatcttcatcattcttactgttattgagcgaaaggctttcaan

SEQ ID NO: 3217 - DNA, 140 bp, Homo sapiens
atgttgagctctttctgtcctatgattatgctgggaagaagccatggcttgcatatcctcactataagcccgcggagaaatgcccctctatcattctccatgatcgactgtattacctaaggcggcagtagagtgaggag

SEQ ID NO: 3218 - DNA, 404 bp, Homo sapiens
aattgaccagagaaccaacatagttgttgctcattaatatcggattcaaattaaggctcagcaatatggagattcaatggctcaactaagaatgtgttgttgagacattcttgtttttccctacaacttatctttggtaatggtttgcagctttgctgtaggcaagtaggaaagcagaaaactgaatttattgacaggtggtgttttcctaggtgatttcgtccaaaatgataagagtatctaggctattgaccagagggattttatggacctactatggaatgttaaaactagaagtaggggagagaaataaagctggaaaatattggtagaaaggaagaaagtagaggaaaaaattaactgaacactccataatgtaaaagaacccgatagtgggatggttt

SEQ ID NO: 3219 - DNA, 401 bp, Homo sapiens
ttagcatttaacggatactgaatttcagtttgagaaaactaaagtcctcgaaatgcatagccatgatggtggctcaacaatgtgaatgtacttaatgccactgaactgtacacttaaaaatggttgaaagggcaaatattatgttgtatatattttgctaaaataaaaaagaaaaaagatcacatagaaaactaaatacaatagtatcaagttattccaggtaaaacaatattgaactgtcagataaagtctcatataagcgtaatgagaatgctgacacagatacctggtgggaatacatttgtacttataatgtcagcaggacccaaggtcttattagttttctgtaacaccatgcatgatatatacattttactgtttcatatatatcacctcatgga

SEQ ID NO: 3220 - DNA, 416 bp, Homo sapiens
tcgaccacgcgtccgcccacgcgttcggcttaacactggaaatgacagagaacaaaatcaaatctttggccttcatggagcttatattttacctaatatttgtaaaatgcatgatagatgatcaataaatcatagctctaattgtcactacctaaaatttggataaaactttgagatctaaaatatattgttaaatgatttcaggtcttcccttattttaacttcaaattaaattagagatgttgaagaagttctgtagatatattctgcacattaattttaaggttctaaagcagtggttctgaactctgacaacacattagaatgaccctggaggcttttcaaatactgaaataccagcgttgggaagcttctctcagagattctgatggtggtctaaggtgggcactggtatt

SEQ ID NO: 3221 - DNA, 403 bp, Homo sapiens
aggagtttgaggctgcaatgggctattgcaccactgcactccagcctgggtgactgaaaccatgtctcagaaagaaaaaaaaaatcatctgcaaacggatgagtttcaagagccgagtgtcaggccaaggcacggacatagcttcagagtgttggaagtcagtgacagagtcttttaatcactactgattacaaactttttttttttattattataagttttagggaacatgtgcacaatgggcaggttagttacatatgtatacatgtgacatgctggggcgctgcacccactaactcatcatttagcattaggtatatttcccaatgctatccctcccccctcccccaaacattttaagggcatttttacaattccttcatcaaggggagctggggatatt

SEQ ID NO: 3222 - DNA, 466 bp, Homo sapiens
  misc_feature (1)...(466): n = A,T,C or G
ncgccgcttctntnnnggaaactttagnancggcncgacntntngggtnganccacccgnccgcgaaaagtttataagttaaaattatatgcgcatatagttatattgcccgatatatgatcctcattcccagaagtgatttatttaagatgatttatcagtaggctaagaatgatctgattaggatatttggtacctgtggctaatatatcctaggagacattgtttttcctatcaaacaacaatgaactgaagcacatgtgctgataaatttttaaatgcctctcatccagttctttttttctaaccccaccccaacttctataacctcctctgttttatgacacctttctttgtccctcaactcgagaggagatattcatttgagagcacatattcaacaatgctctgaaatagagggagagagagaaagcttttttaaaaagcgagggataaaggagggttt

SEQ ID NO: 3223 - DNA, 432 bp, Homo sapiens
  misc_feature (1)...(432): n = A,T,C or G
cccacgcgtncgcgctcccggaaggggaggggtaananaaggcgtttctgggtctgggtgcccggaggcagcagcgttcgcggagttcgcccgctggcccccgatcaccatgtcggctttcgacaccaaccccttcgcggacccagtggatgtaaaccccttccaggatccctctgtgacccagctgaccaacgccccgcagggcggcctggcggaattcaaccccttctcagagacaaatgcagcgacaacagttcctgtcacccaactccctgggtcctcacagccagcggttctccagccatcagtggaaccaacccagccgaccccccatgccgtggtgtctgcagcccaggcaggcctgctccggcagcaggaagaactggacaggaaagctgccgagctggaacgcaaggagcgggagctgcatac

SEQ ID NO: 3224 - DNA, 467 bp, Homo sapiens
  misc_feature (1)...(467): n = A,T,C or G
naggctgctttctttnnngggaaatttagnannngttnnacnntgggtgagnangcgtncgcccacgcgttcgccgngcccggagtccccacccacggtcggtcgcggagccgagtgctgacccgggtgagaggttcccgcggctcagggaagatggcggcagccgtggtgctggctgctgggttgcgcgcggcgcgcagagccgtggcggccacgggggtgcgcggggggcaggtccgaggagctgcaggtgtgactgatgggaatgaagtggccaaggcccatcaggcaactcctgggggagcagccccaaccatcttctcccggatcctggacaagagcctcccagctgacattctctatgaggaccagcagtgtcttgtgttccgggatgtggcccctcaggctcctgtgcacttcctggtcattcctaaaaagcccattcctcggattagccaggctgtggg

SEQ ID NO: 3225 - DNA, 467 bp, Homo sapiens
  misc_feature (1)...(467): n = A,T,C or G
aggattccgggtgnnnnncctgaagccctgagacctcggaccgcccgganttccggtcgacccacgcgtccgagaaagaatcaaaagatgaggccccttctataatctatgataacaagagtgttgacagtttgaggagtcgaattgagattcatcatcaaagagcaatgcagcgtcgttaaaataaaaactgtgccttttaaaaagaaaaatgcaaatatagagcaaatccctaaacttgaaccatttcctagtgccttgctagacaaacataaaggggcagggttgtggggaggggaacgtttttggtggtgtgtgcagttcctactggatgagtgtgtgtttcttaatgtctcatttcaagcaggagatgttgggtctggagcaagatctgagactgagatgtcccccaagggtgacaggtcagatttatttcagtcagtgcaagtcacactccaaactaaagg

SEQ ID NO: 3226 - DNA, 477 bp, Homo sapiens
acgccactaacagagaaggattatgaggggttgaagagggtgctccgttccttacaggcccataagatggcctggcctttccttgaaccagtagaccctaatgatgcaccagattattatggtgttattaaggaacctatggaccttgccaccatggaagaaagagtacaaagacggtattatgaaaagctgacggaatttgtggcagatatgaccaaaatttttgataactgtcgttactacaatccaagtgactccccattttaccagtgtgcagaagttctcgaatcattctttgtacagaaattgaaaggcttcaaagctagcagattgtgatatctttagtctgaatttttaactggaatcagaactggatgttggggtcactctttgttttattgtacctcgtgattacctaattcaaaattgccccccaaaaagtcagattagttaatataattttttaatgttaaagag

SEQ ID NO: 3227 - DNA, 404 bp, Homo sapiens
cggacgcgtgggcgccgcttcgaccaagagatcggtcttcaacagaaaagcatgactgggatcctccagacagaaaagtggacacaagaaaatttcggtctgagccaaggagtatttttgaatatgaacctggcaagtcatcaattcttcagcatgaaagaccaccccctctcccaacaactccgacacctgttccaagggaacctggccggaagcctctttctagctcccgactcggagaagtcactggtagcccctcccctccgccccggagtggcgcccccacaccaagctcgcgcgccccggctctgtctcccacccggactgatcgcataaatccagatgacatagatttagaaaatgagccctggtataaattcttttcagaactggagtttggacgg

SEQ ID NO: 3228 - DNA, 419 bp, Homo sapiens
  misc_feature (1)...(419): n = A,T,C or G
cgttcattctccgtcctcgcgccccttttcctacactttcctcttctccccgaccggaggagccgctctttccgcgcggtgcattctggggcccgaggtcgagcccgccgctgccgccgtcgcctgagggaagcgagaagaggccgcgaccggagagaaaaagcggagtcgccaccggagagaagtcgactccctagcagcagccgccgccagagaggcccgcccaccagttcgcccgtccccctgccccgttcacaatgcagcctgcttctgcaaagtggtacgatcgaagggactatgtcttcattgaattttgtgttgaagacagtaaggatgttaatgtaaattttgaaaaatccaaacttacattcagttgtctcggaggaagtgataattttaagcatttaaatgaaattgan

SEQ ID NO: 3229 - DNA, 423 bp, Homo sapiens
cataaacacaaagtgctgggattatgggtgtgagccactgcgcctggccttctactcttataagtagtattatagtgaacatcctgtaagtaaatctttgtgcatgtccacgtttatttccttaatttctaggagtgtaattgctatgtcaaaaataagcagttttttaaaagctttaagaatatttagaaatacggaatttaaatagattgctaaatgatgtgtgttgaagaaatttaactcaaagcctcctgatcataacatgctgtcttagttcattttctgctacaacagaatagcagggactgataatttgtaaatttgtaaataatagtagtttgtttggctcatggttctggagactgggcagtccaagagcatggcgccagcacctaagcaaggtccttggtgctgtgacatccc

SEQ ID NO: 3230 - DNA, 461 bp, Homo sapiens
  misc_feature (1)...(461): n = A,T,C or G
cggagtccnnnnncctgattgcctgaggacngtcgcggaancccgggcgacccacgcgtccgccgctcgcttaggtggctcccatggcaggaatgctgagtctgatggggcctctttgagatggcttaactgcggctcttctgggttcggggtcaagggaatgaggggtttggatagtggcatctgatcactgcttaatgaatacagtggaggcctctgaaacattagagtaaccagcagtggagctatgcaccaagggaaataatggggggtttggaatttgctggtttcctacctgctgggccacataaaagctgagtgactgtataaattcctgaactgttttgagccgctgtttctctataaaatggaatccctcagtttctctataaaatgaatgtgtgggtcaggcaggtggctcatgcctgtaatcccagtactttgggaggccaaggcgggcg

SEQ ID NO: 3231 - DNA, 429 bp, Homo sapiens
gcgctcttacggatcccctcggagtacgccgcaccatgcagcttaggctcttccggcgcctccttctcgccgctttgctgctggtgatcgtctggaccctcttcgggccttcggggttgggggaggagctgctgagcctctcactagcctccctgctcccagcccccgcctcaccggggccgcccctggccctgccccgcctcttgatccccaaccaggaagcttgcagtggtcccggggcccctcccttcctgctcatcctggtgtgcacggctccggagaacctgaaccagagaaacgccattcgggcttcgtggggcgggctgcgcgaggcccgggggctcagggtacagacgctattcttgctgggagagccgaacgcacagcaccccgtgtggggttcccaggggagtgacctggcctcggagg

SEQ ID NO: 3232 - DNA, 490 bp, Homo sapiens
cccacgcgtccggtacattatttgggtgttggagtacactaaaatcccagactttgccactatacaattcatccatgtaaccaaaaaccacttgtacccctaaagctattgaaataaaaaaaaaactcaaagaaaagtagtgatattctaatgtaattttttttcatgtgttagttggtgttatggactgaattgtgtccctcaaaattcatatgttgaatctcaaaccccaaggtaactgtatatggagtaagaaagtaattaaggttaaatgaggtcataaagggggaactctaatcaatattagtgtccttataaaaagagacaccagagagttcactcactccctgccatgtaaagacgcagcaggaaagcaggcatctgcaagccaggaagagacccctcaccagaaatcacaccttgccagaaccttgatctcacagccttgagaagagtgaaagaaataattttctgttgtttaagccactca

SEQ ID NO: 3233 - DNA, 478 bp, Homo sapiens
  misc_feature (1)...(478): n = A,T,C or G
attttctcatatgtctcatattttatattttctcatatgtgtctcatttttattattactatagtatccattaaaggagactggcaaatacctgaacaaagttatgttgttggcaatataagatattaccaattgcataatattatttccaaaggcaaattaatatgcaaactatagatttccatgggtatctatacaaattattacttgaagtccatagaaaacagcttccttagagggaagtaaaagaagctctgataacagacaatgtatagcatttcagttaaagtttgattgacatatttttttctcagtcttttatacttgtgaattatagtctacattttgtctttacagatgttgctaacacagtgcagcatgttggcttgtcattntactgattatgtatattgtctcctagttcaagtatacagtaaatcagagctttcatttttcaaggggcagaaaaataattgtn

SEQ ID NO: 3234 - DNA, 400 bp, Homo sapiens
aaaaagctaaattgtctattatgtttttgcagaagctttgatgaatcagtttatgaaataaaatacctataatgatttttaaaaatccattagagttgaaattttctattgtcttttttcattgacttagtatgtactcttataattttataaaaaggtattttataggaggcagaagctaaatggaatataattctcttttagaaacacctgcaatagacataattgttcaattgacttgaagttaagggatgtctgattgttatttcacgtatattaaaagtcatgaatgacagtgacattaagctatctccaaagtcactattgccattatatccacaaatgatttttattattaaagttcattatgtaatgaatatctttgtgtcactgccctttt

SEQ ID NO: 3235 - DNA, 428 bp, Homo sapiens
  misc_feature (1)...(428): n = A,T,C or G
gacagtatagtcattactttggagtcagacatgtggtttaaatctatgctcagagtttgtcagctgcacaaccttgagctggtcacttaacccctctgagcccctatttcctcatgctgaaagacatgtaaacagccatcatgccaccacagtgaccagngtctgatcctcacttctctccctctgtcttctctatcccctgccctggcctgcctcagtcttggcagctggacttactgttcagggcagctgtcatggctttcttgctgttggctgcgtggtaccaggtgacctccaaggcatctcgccggctgatctggcccaggctcagcaggtagtccagcatgtcggcatcagggctgcaggcctccagctcacagcctggaaggaatcccaaggggctgttagcgtctgtcctcgccccagcc

SEQ ID NO: 3236 - DNA, 478 bp, Homo sapiens
  misc_feature (1)...(478): n = A,T,C or G
cacggtttttggctttcatcgctttttctacatgtttttagcctcaccagaagtctttcatctcggtggtccaactcaggatctcagcctcattattttcttacccttctggagtgcatatgtgcctttacagtttctgtttgcaaacgctgtctagcatactaagaggatgttagcaaacctgttccatggacactaaatggcagttgtacatctcccctcatcagtcatagtgacaaccagaaatgccctccatattttccagtgatcccagtcttcaatgcgtctgtctcataatttgtaaacgtttattatcttgaagtcattgttaatctgtggtgaaaagtaattgctaaatagaaattctgagaagaaaaaggcctcatccttttcacatgatgtangaaggtctgttgcatgagcaatgggaaatccagaanacatagaagatgcatatgttgctgttattcgtccaaag

SEQ ID NO: 3237 - DNA, 471 bp, Homo sapiens
  misc_feature (1)...(471): n = A,T,C or G
ngagctgccgncttcccccnnnaaatccccgnagcacnntcnctannntagggngcaccacccgttcgaccatgccctctcccaggatctttcccaatttccttgcaaacctgccccaaccccctcacagatgcccacaggagtgcagcgcctgggcatctcctgagctggcaaccctgcagcccccctttctctgcttaccttgacagcagcaaccccataaagagttgtccacgctcatcatgtccagtgtctttccagccatttcttcctgagcccacttccccaggatgttgcccccatcaggccacccaaactgctctggttcaagtcagcaaacatcccaggagcagaatctcatggttgggcctccgccttcttcctacttgaccaggggcagcccctgacaaggaggaccacttcggcctccctgcagttcctcctgcacctgactctgcccacagnnnnnag

SEQ ID NO: 3238 - DNA, 426 bp, Homo sapiens
atcccactgacaccacgtagagcacaaatgagttggctgcactgagcccagcccaaattggtatgctataaaatgataaaaacataaacaggtgtgttaagtcactacgttttggatagtttgttatacaacaaaagctagctgaaacaaatgtattaactagagcatctgcgaatggcactatttgcttagttgattggctgaaatttggactcactggtaggttacatttaatggtgttgagtagccacaatttctgtggaataatgtataggaaggattctaatggcctaagccattagaatctctaaggagatagaagtgaaggagtgatttataaaaaaaaaaaaagatggggagggattctaaaggaccactcaaggggcctatgtttagggatgcatgcaaaggaatagttttttaatg

SEQ ID NO: 3239 - DNA, 453 bp, Homo sapiens
  misc_feature (1)...(453): n = A,T,C or G
tgtgcgagaaaaatcggaagcctgcgtcggtcaacgtacgaaaggnccgacccacgcgtncggggaggtggcggcagcggctagcggactcgagtctcaaccgggctgaggcggacacttctgtggagcgaagcagcgggagcatcgagcactagaggcggcaccgggatccccggctccggggaggggggcgccggaccgggaggaggggagggggcgatgctggaagccatggcggagcccagtcccgaagatccacctccgacccttaagccagagactcagccaccagagaaacggcggagaacaattgaggatttcaacaaattctgcagttttgttttggcatatgctggttacattccccctagcaaagaggaaagtgactggccagcctctggctccagctctccattgcgaggagagagtgcggccgacagtgatggctgggan

SEQ ID NO: 3240 - DNA, 428 bp, Homo sapiens
cgcgtcgcctctgtcgcccgcgcctggcctaccgcggtactcccggctgcacgctctgcttggcctcgccatgccggtggacctcagcaagtggaccgggcccttgagcctgcaagaagtggacgagcagccgcagcacccgctgcatgtcacctacgccggggcggcggtggacgagctgggcaaagtgctgacgcccacccaggttaagaatagacccaccagcatttcgtgggatggtcttgattcagggaagctctacaccttggtcctgacagacccggatgctcccagcaggaaggatcccaaatacagagaatggcatcatttcctggtggtcaacatgaagggcaatgacatcagcagtggcacagtcctctccgattatgtgggctcggggcctcccaagggcacaggcctccaccgct

SEQ ID NO: 3241 - DNA, 427 bp, Homo sapiens
  misc_feature (1)...(427): n = A,T,C or G
agctggaggagctgggtgtggggtgcnnnnnnccggtggggaggcctagtttgggtgcaagtaggtctgattgagcttgtgttgtgctgaagggacagccctgggtctaggggagagagtccctgagtgtgagacccgccttccccggtcccagcccctcccagttcccccagggacggccacttcctggtccccgacgcaaccatggctgaagaacaaccgcaggtcgaattgttcgtgaaggctggcagtgatggggccaagattgggaactgcccattctcccagagactgttcatggtactgtggctcaagggagtcaccttcaatgttaccaccgttgacaccaaaaggcggaccgagacagtgcanaagctgtgcccaggggggcagctcccattcctgctgtatggcactgaagtgcacc

SEQ ID NO: 3242 - DNA, 432 bp, Homo sapiens
  misc_feature (1)...(432): n = A,T,C or G
ctctaaagaggaaaatggcattcctatgaagaannnnnnnaatgatgaatatgagaatctgtttaatatgattgtagaaatacctcggtggacaaatgctaaaatggagattgccaccaaggagccaatgaatcccattaaacaatatgtaaaggatggaaagctacgctatgtggcgaatatcttcccttacaagggttatatatggaattatggtaccctccctcagattctttcttgtggagaagttattcatgtgaagatccttggaattttggctcttattgatgaaggtgaaacagattggaaattaattgctatcaatgcgaatgatcctgaagcctcaaagtttcatgatattgatgatgttaagaagttcaaaccgggttacctggaagctactcttaattggtttagattatataaggtacc

SEQ ID NO: 3243 - DNA, 401 bp, Homo sapiens
  misc_feature (1)...(401): n = A,T,C or G
ttacatttttattaactgtcacccaccaaaatgttgactcaaatcctgcagctatttgatttcaagctttaaattgatctggtatttcccgtggaaatctaattgcatctaaatggatgtgagagtctaaagaccaataaggggtgtctctcgcttcatgatgtcttatttttcctccctctggttgatgaaatgccagggtgaaagggatagccaattggactaaagtacaagtgccactccagttattcagcagagtgcccaataaaggtccaccacaataacaccacacatctgctcagggatgaataagggctgactgattgataagctcttgaaaatttttaagctcactgcatctcttcaggtctccaaggaatgttaagtttcctccctgtggn

SEQ ID NO: 3244 - DNA, 422 bp, Homo sapiens
  misc_feature (1)...(422): n = A,T,C or G
cccacgcgtccgagccagaccactgtctcctgggttccccttgagtggccagggcctggatggaagctaagagcttggatttctgggaacaaagggccatccccataagattgagcagaaattctggtcctcttccctgaaaaattttccccaccccagccagcatcttctgcttccccttgggttgtgaccagggagtggggagagaggctgaggctctgctcccctggagaccttctcttaggagttgggtgcttcatggaaaatccaagccttaggttcccttctgtctctggcaattagatgtgttcttggtgtcctccatgtcctttttgacttttccctgtgtccattgttagcatgtgcaaaagttccctgtcattacccaacctcctactcctcattgtacccattctaatcgn

SEQ ID NO: 3245 - DNA, 427 bp, Homo sapiens
gactatggcaggggagaacctcgctacgccgttccacgggcacgtgggccgcggcgccttcagcgacgtgtacgagcccgcggaggacacgtttctgcttttggacgcgctcgaggcagcggctgccgaactggctggagtggaaatatgcctggaagtagggtcagggtctggtgtagtatctgcattcctagcctctatgataggccctcaggctttgtacatgtgcactgatatacaaccctgaggcagcagcttgtaccctagagacagcacgctgtaacaaagttcacattcaaccagttattacagatttggtcaaaggcttgctaccaagattgaccgaaaaagttgatcttctggtgtttaatcccccctatgtagtgactccacctcaagaggtaggaagtcacggaatataggcagg

SEQ ID NO: 3246 - DNA, 410 bp, Homo sapiens
  misc_feature (1)...(410): n = A,T,C or G
cttatgcattttgtaccagtggaactttttatactggagattaaaaaaaaaatggaaatttttgtggcttgctctggtgggcccctgacaatgactgatttcaagtttgatttcgggttgattgattgattgattgatagaaagaaagttgcttttcttttgagaattaaaaactttggcttgatttcttttttccctttgcttatatctagcattagaattttgtcttaaaataacagcggtaagtttcactttttattctgtattgtgcagttacacaataaggtaattagatttagaagtactcagtcactttaagtggataaatgtattagttaaaactttagggtttgcttttttgctgtttagatcaaagttttttctgattcttctgtcctcattgtgaacan

SEQ ID NO: 3247 - DNA, 549 bp, Homo sapiens
  misc_feature (1)...(549): n = A,T,C or G
gtgtggtggcgagcaactacacgtgtcgtaggatttctatacatctttcttcccccccaagagccnccaggagccccccgcccccccctttgacgccctgcgttagatcncgtaagcccgggccgacccacgcgnccgctacatnngggaagaccagaaaagagncntnncaatttcaaaaggttggtgtgaggacagagaaagtaggcaagcggggagacaggagacgtctatgtgtgcagaaacctgcacctcttctcctccagctacccgtgcaggtcatttccccccaggcccatccaggtctagcgatgtcccagcactgccccctggtggagccctccaccggcctgcaggaagggcatgtgactgactccctcagcgccctgcagtcttgtcccctctggtcccaaaagtgtatcctgcctccgctttgcgataggtttcttcctgccctttgcctggaaattttatctctggttcttgcaaacattatttacagctgtctaattttttctgtctacctcacagctgccaaactaaagtagg

SEQ ID NO: 3248 - DNA, 408 bp, Homo sapiens
cgaagccccaaaggctggaattaggggctagaagtctggcacccaccgcctggccaggtgttcgggacgcgaccaggtgggcggtcgccccgccccgggagcgcggcttaatagctgagagcccgggggccaggccgcggctgcggcccaggcaacgccctgagggtggccacgctgccaggtgttccactcccccgggactatgggcaagggcccggggcggggagggcggcaggtgctgacactggagctgcgccggaggtcggggaactcggcctcctaagactgaggacactcgcctgctgggccggtcgagctgtgcggtgccctccgggacgcagggggcgctgcagccacgctgggtcaggctccgcagggccctcccaacccggtgactaacggcgccgg

SEQ ID NO: 3249 - DNA, 424 bp, Homo sapiens
ctgctctatgacattgtattcaagcacttcaaaagaaataaggtggagatttcaaatgcaataaaaaagacattgccattcctcgagggcctccgtgatcgtgatctcatcacaaataaaatgtttgaagattctcaagattcttgtagaaacctggtccctgtacagagagtggtgtacaatgttcttagtgaactggagaagacatttaacctgccagttctggaagcactgttcagcgatgtcaacatgcaggaataccccgatttaattcacatttataaaggctttgaaaatgtaatccatgacaaattgcctctccaagaaagtgaagaaaaagagagggaggagaggtctggcctccaactaagtcttgaacaaggaactggtgaaaactcttttcgaagcctgacttggccacctt

SEQ ID NO: 3250 - DNA, 431 bp, Homo sapiens
  misc_feature (1)...(431): n = A,T,C or G
cccacgcgtccggctgggactacagacccatgcaccatgcccagcttattagaaaatcattactttgcatggggaaaatatggatatttccctgccaaatcattaccctttgaataacaacttcaaaaatataaattcaacaaagcagttgctttgatgatatattagagctaatataatatataacgaaatgagccatatataataaactttttagggtgcttgtgttttattatttcttccaagaaaatattaaagaaggtgaagaaaactaatggaccattacaacattaactttagtctgggaaatatgtacacnaaaaaaaaataaaacgaaaagagccaaaaaaaaaaaaaatttataagggggttgagaattattatattttttcaaaaaaatatttccggggggcgcgccccctctacccccn

SEQ ID NO: 3251 - DNA, 402 bp, Homo sapiens
ctccaacacatgacaaattaattgtgttgataaaatgatggcaaaatgtataaacaaaaaggttacacgttttcactaacatcataacaactaaaggaaagtatatcacatattaaaataagacaagtgaacatgtgaaaaggtgaaaaatttaaaccaatatgagtttttctaaatactttctataacctgatcaaacaagagcttttattctttctcttggcggaaaaaacaatgttgtctcaccatctgtttgaaagttcctctggaatattgtgcttgcctctggattggcagaaaggttaaactccaaagctatatgcatagaggaagaaaagaaaaagagatgcaatcattgataaaaatttatcaactcggttattcggctgctgcatttaggct

SEQ ID NO: 3252 - DNA, 412 bp, Homo sapiens
cccacgcgtccgttgctttttaaaaccaaattggagaagtctctggcctggaaagaggcccagcctgagctgcaggagcctcagccagcagcacctggaacaccaggtggcttctccgaagtcatgggcagtgccctggcctgaaggcccacaacccccacccccaggactgctgctggagcctggacacgtcctacttaagaaaatgccttttactcagggaatctcctgctacttaatgtggaaagacacgcccatgtcccccttcggcccactctgggggcctggaaatgctgcagtggggagcaggccccaagctggacctgccctgtcctcagcacgcgtgtgcaaaagtgaacaataaatcatttcaaagatgaaaaaaaaaaaaaaaaaaaaaaaaaggggcggc

SEQ ID NO: 3253 - DNA, 398 bp, Homo sapiens
tagagagagagacatggcggactctttataccttttgttaaagcacgaagcctccctgggccgtgagaccatatccctttctacgcataatgctgtgcactgccaggctataggaaatattactattgggcccttacaaatatattctggctgattttctcaaagtgactacttaccaaatgagctctagagcattctccaaaggagatagtgtttgctgtgctcatctatcccaacagggttgttctgtgtgaggggctaaggtaaagaggggacacttctgtctgtttaacagacagtccatatctgtgaggccagcaaatattttcttaaactcatggggagacagcagattcttgccttggtgaggtcattgctgtgccatatgtcctaccccc

SEQ ID NO: 3254 - DNA, 474 bp, Homo sapiens
  misc_feature (1)...(474): n = A,T,C or G
nagagcgccttcttnnnggggaactttagnancngctnnncnntngggttgagnaaccgtncggaaaaaagtttaattttgggttctcctttaggctcttttagtcttcttcatacttgaatgtattaattatcacttattgcttctgctttagctttaacacactggatactggcattccagcatattcctaagctttagagagccaaaggaatctgttgttctatttcacatgtacagtcttttatataaaatatattgcaatatgtattgagtatgtattttatataacatataattgcattttgtgaaaatttgaatatgtaaaattgaaataggatattctaaaagtattaataaagcctcactccaattttaaaataaagttgactagaatgacataatttctaagctggaaggcttgagttgattgtaaactgggttgaagctgtagccacatggcagtgacatttt

SEQ ID NO: 3255 - DNA, 481 bp, Homo sapiens
  misc_feature (1)...(481): n = A,T,C or G
nagatgcgctttctcnnnnngggaccctttagcancggcncnnacntntngggttgagnnacccgtccgggcactagctgacagcttttcctctctgcacctgcgctctggtgacttggggtggacgcctctgccttcacttgaacacaaatgtgcttcctataaaatcatgtaccaagaagttcctgccttttgtctctgagcctgatgtgtgtaggggtgatggaaaggctcactgcccaggggtcagccagaggggaggtgggctgcactcctcctgcctggagaccaggcccccttcttgcctggtgctgtccctgctgtgggagacgtctggccacaggcagtgccccacccagtcttggagagagatgaatgttaaatcagaggttcaaatgctagagaactgagaagccctggtggcaggcatggtctggagtgctgggcaaatgctgtttctgggcccgtctgcctggagggn

SEQ ID NO: 3256 - DNA, 401 bp, Homo sapiens
cccacgcgtccgcatccttacactttggagaagcagcaagaaagttgattctcgctatttgctgttgctgaacacagagcatgaaaatcaacatagagatgatggtgaaaaaggagatccaggagaagagggaaagcatggcaaagtgggacgcatggggccgaaaggaattaaaggagaactgggtgatatgggagatcagggcaatattggcaagactgggcccattgggaagaagggtgacaaaggggaaaaaggtttgcttggaatacctggagaaaaaggcaaagcaggtactgtctgtgattgtggaagataccggaaatttgttggacaactggatattagtattgctcggctcaagacatctatgaagtttgtcaagaatgtgatagcaggga

SEQ ID NO: 3257 - DNA, 353 bp, Homo sapiens
  misc_feature (1)...(353): n = A,T,C or G
nagagcgccttcttnccccacccnctcccgcaccngcncggacntttngggttgaggnacccgtncgctttaaatttgcccacagaaccctctaaatccccttgtaaatttaactgttagtccaaagaggaacagctctttggacactaggaaaaaaccttgtagagagagtaaaaaatttaacacccatagtaggcctaaaagcagccaccaattaagaaagcgttcaagctcaacacccactaaaaaaaaaaaaaaaaagggggggccgctttaaaggatccctgggggggcccaagtttacgcgggcgtgcgagggaatagttttttccttatagggaggcgaattataa

SEQ ID NO: 3258 - DNA, 511 bp, Homo sapiens
  misc_feature (1)...(511): n = A,T,C or G
nggagatggccnncntnnnaaccggggaacgtttagnacccgnannngntcnntnnnnntnggngnagcacccaccgcgtncggttgataagcgacaagntggaggcccgccgctctattcggttctgggactctgaacnntatggcggctagtgantgcagagcggagatgtgactagccctcagaaaagacatcanccagatagagataagaaaaaaagagcagtcagaagtatcctgtttctcctagagncttcaaaacatcattattcaagatcacgatcaaggtcaagagaaagaaaacgaaagtcagataatgaaggaagaaaacacaggagccggagcagaagcaaagagggaagaagacatgaatccaaagataaatcctctaagaaacataagtctgaggaacataatgacaaagaacattcttctgataaaggaagagagcgactaaattcatctgaaaatggtgaggacaggcacaaacgcaaagaatgaaagtcatctg

SEQ ID NO: 3259 - DNA, 418 bp, Homo sapiens
aaggtgggtccctttgatgtgaggtgccatcctctgagcccaggtctgacccccctacccagccccgtgagtctggagaggccccagggaaggacccctcatcaggggcggcttcaggtgtagaagccgaggggacagcaaggggcccagacacccccgaccttcagaacagccatctgtgcccagctctgcaggccaggcacacccagctgagcccggggccagccagcaccacccaccagctggggcctgtgggtcccggagaccgtctgtggttgtggctttgtcgccggattgcagagctgaagggagccctgtgggtgacaaacaccaggggcctctccagaccctacgtggggggagggctgaacaaagcagggaggcccacggttagacaccaggcagaactgcccaggag

SEQ ID NO: 3260 - DNA, 403 bp, Homo sapiens
  misc_feature (1)...(403): n = A,T,C or G
taaaactntgnnngttttatatcaatagcttgtagaagctcagctcttcttggtcttggctagactgcctagattcccacagcagacaaggttgagaatccattgctggaatcttggtattgatgagttacagtgatggaacatgtgcttggccacaggcaggtccagtcactgcaaaagtgaccaagccagcaggtcacccttaacttcagaaacaattattggtggtgaactgtacttaaattgcagagaaacctgtaagtaatggaaggtaaagaaaaattacagaatggaaaataatattttgggcaagcaaacaaattcactgagaattccaaaagtatattaaaaaagaagatagctatgagttcagatctatcttattggtctttaatattacaac

SEQ ID NO: 3261 - DNA, 495 bp, Homo sapiens
  misc_feature (1)...(495): n = A,T,C or G
agggttannnnnntttgaccctgtagtaccggtccggaccggcccggaatacccgaggcgacccacgcgtacgatttttctacaatattatgataccgtcctccttcctctcaaactttaaagtttctacaaataacctgaaaagcctgtgaatacagattcctgatcccaaatccacacttatggaatcagaaactctctggtggtgaagctcaggaataagcctcttttggcaaaaagaaaacaggtggccctaatgcttatagaggattgtattttgaaaaacaagccttataaaagatttttcacaccattcccctgcacctccaatttccaatttaccttctagctttcatgctatgagtctattttttcctgcagngtaagatttgaaggactaaggcttgggtgttagcacaggatggtcagaaagaagaggtttagctctagacaaaagggtcttccatgtcactcaatttggctcaccagaagttg

SEQ ID NO: 3262 - DNA, 457 bp, Homo sapiens
  misc_feature (1)...(457): n = A,T,C or G
cccacgcgtncgcagggatcctgagacgtctggatacctcgttaggatcagctcgcacagaggttgtctgcaagcagtgtgaagctcatctatgtcacgtgtttcctgatggacctgggcccaatggtcagaggttttgcatcaacagtgtggctttgaagttcaaaccaaggaaacactgaccatcttcaagagtcccgttcccttgccaccccttcacgtgcaccctcaatttccacaattcacttgaatgacttgttttatttgcaataaaactgggctgaatttgcaaaaaaaaaaaaaaaaaaaaaaaaagggggggccctttttaaagattccttaggggggccaaatttaaccgggtttgggaagaaaatattttttcccttatggggggccttataaaaaccatcttggaaatttttgaaaagaacctttttttggggggggaaaaaaa

SEQ ID NO: 3263 - DNA, 419 bp, Homo sapiens
  misc_feature (1)...(419): n = A,T,C or G
cccacgcgtncgaatctactcctcttataggaaacatttattgtttggattctttggatctgatgggggcaggcaataaatgaaacaagtgttgaaaatgttaaaggctgtgctgaagaagagccgagagggaggaaagggaggcaagaaggaagcagactggatgttttcctagtgctttggattatccatgtcccatgtgagcaggcatctgcaagtgtgcccacacccaaccaccaacagcagagatgaccacgacctggaagagaaacagaagggtgggaagagaagaaatgccagctgacccagagcccatcaatgacaggactgtggcaggctcagcactgctggcatccaaccttcagagcagggcactggcactcttcttcctgttatgcccgagtccactgtagtcagag

SEQ ID NO: 3264 - DNA, 408 bp, Homo sapiens
cccacgcgtgcggtggtagctcatatttgtaatcctagcattttgggaggccgaggcgggagatcatttgagctcaggagctcaagaccagcctgggcaacaatagtgagaccccatctatattaaaaaaaaaaaaaatttaaattaaatttttttctgaaaaggggaaaactataaatgtgtccaataaaagaaaaattaaaagtcctataaaatttactatgaggatttaaagttttattaaaatataagggaccaaatagggatccttggaaaacttgagggattctgaaaaatagttgaaatgacactggctcagggttaggtagactggaaagcccaacgctgatgaggcaaaggaatgtgtgcacccactgctatcctgggtcagcaaaatgaggggacatg

SEQ ID NO: 3265 - DNA, 469 bp, Homo sapiens
  misc_feature (1)...(469): n = A,T,C or G
agggaattgggcattgatagcctgcggaccgcccggaatcccggtcgaccccgcgtccgggctccagagggttcagctgtctcttacttttaaccagggaaattgacctgcccgtgaagaggcgggcatgacacagcaagacgagaagaccctatggagctttaatttattaatgcaaacagtacctaacaaacccacaggtcctaaactaccaaacctgcattaaaaatttcggttggggcgacctcggagcagaacccaacctccgagcagtacatgctaagacttcaccagtcaaagcgaactactatactcaattgatccaataacttgaccaacggaacaagttaccctagggataacagcgcaatcctattctagagtccatatcaacaatagggtttacgacctcgatgttggatcaggacatcccgatggtgcagccgctattaaaggttcgattgttcan

SEQ ID NO: 3266 - DNA, 484 bp, Homo sapiens
  misc_feature (1)...(484): n = A,T,C or G
gggtgtccaggacaccccaattgaaaccctnattgaacgccttggaaccgcccggaatcccggtcgacccacgcgtccggcagatcaaagaagtgataacctttcgggagaagaaccgaggcagcaagttgtttaatcacctgtcagctgtcagcgaaagtatccaggccctgggctgggtggctatggctcccaagcctggcccttatgtgaaagaaatgaatgatgccgccatgttttatacaaaccgagtcctcaaagagtacaaagatgtggataagaagcatgtagactgggtcaaagcttatttaagtatatggacagagctgcaggcttacattaaggagttccataccaccggactggcctggagcaaaacggggcctgtggcaaaagaactgagcggactgccatctggaccctctgccggatcaggtcctcctccccctccaccaggcccccctcctcccccagtctctaccag

SEQ ID NO: 3267 - DNA, 493 bp, Homo sapiens
  misc_feature (1)...(493): n = A,T,C or G
agatgaggngnccccctaggaaactcttacggaagctttttcgnanccgcnncgacccacgcggncgcccacgcgtccgatgaggcttgataatattaagttgttacgatgaagcttgctagaagctgtaacagaatacatagagaataatgaggagtttatgatggaaccttaatatataatgttgccagcgattttagttcaatatttgttactgttatctatctgctgtatatggaattcttttaattcaaacgctgaaaacgaatcagcatttagtcttgccaggcacacccaataatcagtcatgtgtaatatgcacaagtttgtttttgtttttgttttttttgttggttggtttgtttttttgctttaagttgcatgatctttctgcaggaaatagtcactcatcccactccacataaggggtttagtaagagaagtctgtctgtctgatgatggatagggggcaaatcttttttccctttctgtt

SEQ ID NO: 3268 - DNA, 404 bp, Homo sapiens
agtcctctgtggtccctgctgccaccatggccactcaccgcctcgtgatggtccggcacggcgagagcacatggaaccaggagaaccgtttctgtggctggttcgatgcagagctgagtgaaaaggggaccgaggaggccaagcggggagccaaggccatcaaggatgccaagatggagtttgacatctgctacacgtcagtgctgaagcgggccatccgcaccctctgggccatcctggatggcacggaccagatgtggctgcctgtggtgcgcacttggcgcctcaatgagcggcattacgggggcctcacaggcctcaacaaggcagaaacggccgccaagcacggggaggagcaggtgaagatctggaggcgctccttcgacatcccgccgcccccgatg

SEQ ID NO: 3269 - DNA, 424 bp, Homo sapiens
cggacgcgtgggctgtaggctcattcatttctctaacagcagtaatattaataattttcatgatttgagaagccttcgcttcgaagcgaaaagtcctaatagtagaagaaccctccataaacctggagtgactatatggatgccccccaccctaccacacattcgaagaacccgtatacataaaatctagacaaaaaaggaaggaatcgaaccccccaaagctggtttcaagccaaccccatggcctccatgactttttcaaaaaaaaaaaaaaaaaagggggggcggttttaaaggatccttgggggggccaaagttaacccgggcatgcaaggtaaaagttttttccttatggggggccgaattaaaacctgcttgggaattttgggaagggacccttactttggggggggaacaaaatgga

SEQ ID NO: 3270 - DNA, 466 bp, Homo sapiens
  misc_feature (1)...(466): n = A,T,C or G
aaaaaaactgataaccctggttagaagcnccgtaattcccgcctcgacccacgcgtccggtgactggcaacttggactacaagaacctggtgctcatcatcacccacggagaagagaaggactaggagggggctcgctgctgcgccctgggctcgtctttgcagagtggtccctgccctcatctctctcccccgagtaccgcctctgtccctaccttgtctgttagccatgtggctgccccatttatccacctccatcttctttgcagcctgggtggctatgggtacttcgtggccgcacatcctacagttggaaatccatccagaggccatgttccaataaacaggaggtcgtgtatttggtcacgacatttctctgaccaaaaaataaataaattaaattnttaggggggccccctcttaaaaaatcccttgggggccccatttttaccctttgatgaaagact

SEQ ID NO: 3271 - DNA, 447 bp, Homo sapiens
atcgtaggaacccacacgaagtgcagccctcttacgcaaccagatatgctatgactgtctggtactttgatgctgaagaaagggcagaagccaaaaagaaattcaggaatttaactaggaaaactgaatctgccctcactgaagactgaccgtgctctgaaatctgctggccttgttcattttagtaacggttcctgaattctcttaaattctttgagatccaaagatggcctcttcagtgacaacaatctccctgctacttcttgcatccttcacatccctgtcttgtgtgtggtacttcatgttttcttgccaagactgtgttgatcttcagatactctctttgccagatgaagttatttgctaactccagaaattcctgcagacatcctactcggccagcggtttacctgatagattcggtaatactatcaagagaagagccta

SEQ ID NO: 3272 - DNA, 263 bp, Homo sapiens
  misc_feature (1)...(263): n = A,T,C or G
tgtannanatcantctcttttttgccctcctcccgctttcctgtagtagtcccttgacagatgctggcatgcttgcccgcagggggcccacacccatgactgggtgctgggaatcctggctggagcctcagttcagccacaggcttttagggactttgtgcaccttctgttaccatatgggtctcgctttccctatctgtgtaatgagagggttggactggatgggtgagaagtccccttcccacactgagccgagaagaacg

SEQ ID NO: 3273 - DNA, 468 bp, Homo sapiens
  misc_feature (1)...(468): n = A,T,C or G
ccggcccgtaantttcgggtcgacccacccgtccggcagaatggctcccgcaaagaagggtggcgagaagaataagggccgttctgccatcaacgaagtggtaacccgagaatacaccatcaacattcacaagcgcatccatggagtgggcttcaagaagcgtgcacctcgggcactcaaagagattcggaaatttgccatgaaggagatgggaactccagatgtgcgcattgacaccaggctcaacaaagctgtctgggccaaaggaataaggaatgtgccataccgaatccgtgtgcggctgtccagaaaacgtaatgaggatgaagattcaccaaataagctatatactttggttacctatgtacctgttaccactttcaaaaatctacagacagtcaatgtggatgagaactaatcgctgatcgtcagatcaaataaagttataaaattgcaaaaaaaaaaaag

SEQ ID NO: 3274 - DNA, 417 bp, Homo sapiens
cccacgcgtccgggcaccaacactttattatgttaactccagtagaaggtgtgaggtcaggtagaatctgtgatatgtctgattttcctttggaagggtttcatttctctgcttttgactggttgcaaaaatagtttagaacatgtctctttcctctgaatccctctctaaacttttccctcccacacttttgtatcaaagtaactttcccctaacttagaatactcaaggttgacaggaatcctaaaactttcatgaggcaagatgacgttctttggtaagatttagatggtgcaagcacctgctactgaaccacggcagagaagatactgaaatcctctgagtatgcccctgtgtacatgtcagggattactaattccagacatcttctagatgcctcactcccatatccactgg

SEQ ID NO: 3275 - DNA, 414 bp, Homo sapiens
aggaggtggaggttgtggaattcgccgttcgaaagcatggactaaaagccccacttcgtcttacgttccgaaaggaaggcgtctgttgagcctttctctcagtcgtgagggaggcgtcgacggcgtgcggaagtcctgagttgaggcttgcgggatcctttccggagaaagcgcaggctaaagccgcaggtgaagatgtccaactacgtgaacgacatgtggccgggctcgccgcaggagaaggattcgccctcgacctcgcggtcgggcgggtccagccggctgtcgtcgcggtctatgagccgctctttttccagaagctctcggtcccattcccgcgtctcgagccggttttcgtccaggagtcggaggagcaagtccaggtcccgttcccgaaggcgccaccagcggaag

SEQ ID NO: 3276 - DNA, 465 bp, Homo sapiens
  misc_feature (1)...(465): n = A,T,C or G
acttctgtaatgttagggnagacccacccgtccgctccaaccaaagccaaaaggaagcttatcgatgtgcttcaataaacttgacatgtttattaattaaactaggacttaaataaaaaaaagtgcatagaaaataaacatgtttaaaaactccttttttttacaactatgtacactttttacttttacattcagtctttcgtagagagctttcagcattattattttttgaactattaaagtattttccttcatccctgtcacagggagttaacactgatggactttagacacattttcctttttttttttctctttttctctaaccaaaagctgggaagaacacagggaaaaaaaccagatctgttatacatgataaagttgtcaaaaaaggtcttatttctaaaaaaaaagcttgtcatctgttgagctcttgaaacaataattcaactacctgtatttact

SEQ ID NO: 3277 - DNA, 465 bp, Homo sapiens
ccgcctctaattttcgggtcgacccacccgtccgggggaaggtgaacagtgtggcccgccatgttcttcttcgcggcgctccgggcccgggcggctggcctcaccgcccactggggaagacatgtaaggaatttgcataagacagttatgcaaaatggagctggaggagctttatttgtgcacagagatactcctgagaataaccctgatactccatttgatttcacaccagaaaactataagaggatagaggcaattgtaaaaaactatccagaaggccataaagcagcagctgttcttccagtcctggatttagcccaaaggcagaatgggtggttgcccatctctgctatgaacaaggttgcagaagttttacaagtacctccaatgagagtatatgaagtagcaactttttatacaatgtataatcgaaagccagttggaaagtatcacattcaggtctgc

SEQ ID NO: 3278 - DNA, 489 bp, Homo sapiens
  misc_feature (1)...(489): n = A,T,C or G
gagaggngnnnnntattgatggctttattaaggcatcagaaccgccncgacccacgcgggcggcaaaagggacagacttgaagctgtacttccagactcttatggaagcttttggtcacaatcttagttctaatttcaggttctgccagtcgagtctagacatttctggggcaccctttaagtggtctccagcagccttctaggcaggtggcttcacagggaagtccacactgcaagctcagctcaccacgactcaggctgacggggtagtcagccatgctcggaggctgaatttggcagggacttgctgccatctccctgccaaatggtctctcgggactcagaatctcaaacttgttttaaagagaggaaaaaagtcactttcggggatgaggttcttggcccaactctgctttatataaacacagtctatggctatttcagtcttctggattttgagaagcagctgccaggatgaacggattggtg

SEQ ID NO: 3279 - DNA, 435 bp, Homo sapiens
ccgccatgcacgcgtggactctcggatgagctcagcataaccgcacagccagagccccaggtcagaagtgcagacgagggttctcagcacagtgcccgtcgtgcttccatggcttgctacggagagagacctctggatccacactggggctgcgtctggcccgttgtccagcagccctgcggtaccgcaagcccaggcaccagtgtctcggggggcctcactgctgcgcaaggggtggggccgaggatgcaagtccaggcagagcggcgcaggcagctgtgagcttttctccatcagccgtctgagaagagcagtgaggccagctgcttcctgtccttcagaacacttctctgtgctcagtgggagccaggaagcctcaggcttcacgactgaatgcacccaatatccgacctggctgcgtgtttctggctgggc

SEQ ID NO: 3280 - DNA, 117 bp, Homo sapiens
cccacgcgtccggctctacatagtgagcggccggtgtagaggactcgtttgggtgcccacccttacgcgtgcgtgccacagcttagatgtctgcgtataatgagacgaatcataagg

SEQ ID NO: 3281 - DNA, 466 bp, Homo sapiens
  misc_feature (1)...(466): n = A,T,C or G
ccgtcacgtaattttcgggncgacccacccgtccgctgacctccactggctctagacacgggccgtcttgatccagcattctgcttttgaccattcaaacttaacaccaatcttgatgacttcctgcaacctccaatgatcatactgttcccatttctgttattttatgctaaactcagcccagggagccaatgccaggctttgccgtaatcacacccagcctttcataacatcagttactgatcggagtactcccaaaggcggcacacctagaacaagagctatccaaatgcaccccacccagaggccacattctagttcatggcttaggaaaagcaaatattgtaaagggacagaggctaaagcagacattatcgttcaaaagtaacccgtttccacctaccccatgtgattaaagtgctgctgttaatttcctaccatgtgctggtaaaattataattatctt

SEQ ID NO: 3282 - DNA, 424 bp, Homo sapiens
  misc_feature (1)...(424): n = A,T,C or G
caagatctttgtaagcatcagatggaccntncgggagactaaccatataattgtaatgtatgtgggaagggcttcaggtggtcctcatgtctttcaagacatcagcgggtccacaatggagaaacaacattcaagtgcgacggatgtgggaagagattttatatgaattcacagggccattcacatcagagagcctatagagaagaagaactgtataaatgtcagaagtgtgggaagggctacattagtaagtttaatcttgacttgcaccagagggtccacacgggagagagaccttataattgtaaggaatgtggaaagagcttcaggtgggcctcaggtattttgagacataagagactccatactggagaaaaaccattcaaatgtgaagagtgtgggaagaggtttactgagaattcac

SEQ ID NO: 3283 - DNA, 422 bp, Homo sapiens
tgcaagggtgcaaagggcctgtgccagaagaaaacacacacagggaaaccgctttttttaatcaattgtagagaatagtcatttttaatctaaattagagaattgtgatacaatggcagtcctcaaaggcgtaacgagttcatctttctttcaccataggggttatagttggcttgtgctactctggaatcattttactgtttgtttttattatcttaagtgctaattaaaaaaaaaataaaattttaaaaaaacctgtagtttcattacctttttgaataatgtcatacaaaaaatgtatttgtttttttgtgctgtgagaattgatgtttgtagattaataatcattttgtttagaattacaaaatagtttttaaatattgtctgagaaaagccaaagttaatgcaacctagtggaaact

SEQ ID NO: 3284 - DNA, 465 bp, Homo sapiens
atgactttttgggtcgacccacccgtccccgccttctccgtaccagggaagccccacccaccagattccattatgtccagcaagcgggccaaagccaagaccaccaagaagcggccacagcgggccacatccaatgtcttcgcaatgtttgaccagtcccagatccaggagtttaaggaggctttcaacatgattgaccagaaccgtgatggcttcattgacaaggaggacctgcacgacatgctggcctcgctggggaagaaccccacagacgaatacctggagggcatgatgagcgaggccccggggcccatcaacttcaccatgttcctcaccatgtttggggagaagctgaacggcacggaccccgaggatgtgattcgcaacgcctttgcctgcttcgacgaggaagcctcaggtttcatccatgaggaccacctccgggagctgctcaccaccatgggt

SEQ ID NO: 3285 - DNA, 468 bp, Homo sapiens
  misc_feature (1)...(468): n = A,T,C or G
ctcttccctacacttctctccaccctctttttgcatccctcttaccctcttcctgactgtggntcatagatccccaccagccgccattgtctgatcatcttgggaaggtagaggtgacagttctcgaaaagtctacagaaagaggcaattctttttctgagttccagtttgaaggcctggaattttcacatagcacttggtcgaaaatatcaagcctaaataggaagtcattttctgtgacacctctacatagctattacagatcctaagtcctagggcatcagctataaaaattggccagtcccaaagacacagtaagttctaacattctggtactatcatatttcaagtattttttctcactttttaaaaatgtttttctgaacaaaagtgaaacaatgccatttatcaaactgagatcattacaatcttcaacaagacaactaaaacagcttgatgttagatggg

SEQ ID NO: 3286 - DNA, 406 bp, Homo sapiens
  misc_feature (1)...(406): n = A,T,C or G
aacaaacaactggatggtagaattgtaggaggagaattcccgaatcaatgagaggacacatttttcaatccttatgattaagaatagcctctggggaggcttaagagctttctgcctatgctctgttagcaaatagcttaactctgtttaccatatgagtacctataggggattatttgaaatgagctgtataagctatcccaagataagacatggcagccttctgatttgatgtagagttgagtataattatatcacatttttattccaactgataacattggctgtgtgtttactaacagtatttgtctagcaagccattatatctaacggccaaaatacaaagttacagtcaaagaatgaatcaagtactcaagaaaacagaaacctcacataggctgagcan

SEQ ID NO: 3287 - DNA, 394 bp, Homo sapiens
  misc_feature (1)...(394): n = A,T,C or G
agagggtccagcagaaggaaacatggctgccaaagtgtttgagtccattggcaagtttggcctggccttagctgttgcaggaggcgtggtgaactctgccttatataatgtggatgctgggcacagagctgtcatctttgaccgattccgtggagtgcaggacattgtggtaggggaagggactcattttctcatcccgtgggtacagaaaccaattatctttgactgccgttctcgaccacgtaatgtgccagtcatcactggtagcaaagatttacagaatgtcaacatcacactgcgcatcctcttccggcctgtcgccagccagcttcctcgcatcttcaccagcatcggagaggactatgatgagcgtgtgctgccgtccatcacaacn

SEQ ID NO: 3288 - DNA, 407 bp, Homo sapiens
cacttctcctcgcaagctgagggagccggcttgggccttggccagcccagaaaagggctcccacggtgcagctgcgggctgaagccagagtgggcgccaaggccgaggaggcgccgagagcgagcccgggtgtcacctctcatgatgacctacagtcaaacaagaaaatgcctactcatactttcagttccagtttaaatgaaacctcctgtgagaagtctctcaactcctcccaggagcatcatcatggggtctagtgccacagagattgaagaattggaaaacaccacttttaagtatcttacaggagaacagactgaaaaaatgtggcagcgcctgaaaggaatggagataaagaagctgaattagggcttccattttccccactttgtgatcggaagtcaacc

SEQ ID NO: 3289 - DNA, 429 bp, Homo sapiens
  misc_feature (1)...(429): n = A,T,C or G
aacactaaaacagtgttgattcttgcctctgaagactaataattaaaccttttttttcccaactaaagaatggatttaattaaactatgtattgaaaaaaaagtagcctaagtgttagagatggtgaatatattccattttagttaaagaacaaatttcctgaattttaagcattcagtgagctgccaattttgattttgtgttgctctttacccaaattattttttctttgtttttctttttttgggggaggaggggaaaaaagcagcaatactgtgtttggaaattatactctgtatctggttttcctgtgtatgttaaccacttaaatgttattatcctgctttggttttagagtgattgtgaggcattcaatgcaagtatacagttattttctcattaaaatccaatgtgtgttgagttnttata

SEQ ID NO: 3290 - DNA, 471 bp, Homo sapiens
  misc_feature (1)...(471): n = A,T,C or G
cggacgcgtgggagcagttacagttaagactaggaaagtttatttaaagtgaaaatataccctgaatgctgagttagagtgggctgcttaagaatgagacagcccagataggcacggggaggctctcttacgagagtctcacaggattattcatgaatggtgtgaaggagtgttattagcaagcacgttttgggtggtcccctgggcatgtcttattagcatcttaaatctcgacctaggggtgtgtttcttactattataatgagcaaaatgttacctttagggtgacactgccaagttgaggtgtgcgtgctagccactgngaaaagtccctactacagtcatttcctgttacggataagtcttggttggggctgcataagcataaccacaagtctagatgtggctattggctntttaaaaaatcctaactgctanggaagcattgattgctagtggggcaatgtttcn

SEQ ID NO: 3291 - DNA, 463 bp, Homo sapiens
agacctctcgggtcgacccacccgtccgcaaatgtatagctttctatggtcaggcaaatatggtgttggattgagtcaatctagtcataaattgagctggagggggattttgttgattttacctttactgcaccacaggctttataccctccagcactggctggcgttaccttatgcttatagggggtcctagggtgctagaaaatttctctccattttcttgctcctctctcaactttcaggagttcctatatgcctgtgccacaaaaagagggtctctccgtgcccttatacctctccaagtgggagactgctcttgcttgttacttgggactaagcttacagaatcaagagagatctttgtcatcctgatccagcctaagtcttaggcaggccctgtgctcagagcttgagcgtctaagcatgcctgccttctcttcctatttctgcatcagcttcctgg

SEQ ID NO: 3292 - DNA, 407 bp, Homo sapiens
  misc_feature (1)...(407): n = A,T,C or G
cccacgcgtccgaaaagtttggttctgtgtctgtgttttaataagacgagaggacgagcgattgaggtgtatggagagaaaacagacctaatgctccttgttcctagagtagagtggagggagggtggcctaagagttgagctctcggaactgcatgctgctggacagtatcactgtctttcctagatggcagtcactgaattccattttttcaaggtaatttcttgtgcctctaatagcccaagaatgggaggttgatcagatctgacatgattccttcctgttctgaactggggggtgtgcacatctctgcttgagtcaggtttgagtagaggcttanagacagttgggtgagaacaaccaaaatcttatcatggtctcagtcataatcattagggggaactcta

SEQ ID NO: 3293 - DNA, 415 bp, Homo sapiens
cccacgcgtccgagatatctatgaatatatatatttatgaaaataggtatagatatctatctatagatagacctatatatagatagatagataacatatatatatattagtctacaaaacaaaacaagtgacaaaactaaacatgaaatgtgttattgaatgtcttctctgttcttgttcttgggggattttaaagatgagaggtatgccctgagattaggggtcgtgggcatcctcaaggtttgtaggagaaacagagataggagtatatagctatgttcactgtttaagttccattacaataactgttatttgttgggtgcttactatgcattttgggtactttacattgcaatatctcatttaatcataagtaataatgcctcttgcaaagtgctgtgcaaacgcagaaggg

SEQ ID NO: 3294 - DNA, 421 bp, Homo sapiens
  misc_feature (1)...(421): n = A,T,C or G
tctcgaggctcctcccgctgcgggtcggcgctcgccctcgctctcctcggcctccgccccggccccggacccgcgcccgccatggagaagactgagctgatccagaaggccaagctggccgagcaggccgagcgctacgacgacatggccacctgcatgaaggcagtgaccgagcagggcgccgagctgtccaacgaggagcgcaacctgctctccgtggcctacaagaacgtggtcgggggccgcaggtccgcctggagggtcatctctagcatcgagcagaagaccgacacctccgacaagaagttgcagctgattaaggactatcgggagaaagtggagtccgagctgagatccatctgcaccacggngctggaatttgtggatagaattaatagccaatgcaactaatccagagaga

SEQ ID NO: 3295 - DNA, 461 bp, Homo sapiens
  misc_feature (1)...(461): n = A,T,C or G
tctcgggtcgacttacgcgtccgtggccatcgaaagcccaattttaacttaggcaataatgtggcccgttccactgggatgnataatgattgggccaagccaggtattatgatatgattctactttgtcagagatatgggggggggggtttnnnantttttggggggggagatttaattgggggattatgtggggtacccaattctaggccctaactctggagtctctaattcagtgtgtttgggtcagatctgataatttgcattttaatcaaatttccaggtgaggatgatgctggtctgggaactgcactttaacaaccattggtgtaggatatagacatgtggttcattttggtcaatgagttgtgagagatacttggcaaagtttgtccttcctgataagaaggcaactaggtaataaagacattatttccttctctctctctccttgcttgctgg

SEQ ID NO: 3296 - DNA, 328 bp, Homo sapiens
acacaccatatgctacctaggcatatttgtgacagaaccttacttatgcgggggcacatagataaacacactacctacaaacatttacggctctaaggaaaacataaagcgcttaaccggatctggtggcaaaccaactgcaaatgcttgctggataagacatatgccaaagagaagattgatattgggctgcctccacccaaagtctcccggacccaacagctactggaacggaaacaggccatccaggagcttcgggccaatgtggaagaggagcgggctgcccgcctccgcacagccagtgtcccgctggatgccgtgcgggccg

SEQ ID NO: 3297 - DNA, 408 bp, Homo sapiens
gaagggacattttcacactaatctgtgccagctggagcagtcctgccatctgaacatcatattttggaaccctgagaagctaggatgcagttaacaggagacaggaagctctgaacacttcaagacatgcttagaaggccccccgatgtcagcagaaaaggggctgctaatgtcatctcagaaaccaagttatccccatgcaacaaaatcaatcacgtatcaaaacatgatggagagacagcctgcagaagtcagatggttcccggagcactacaggataaaaaggaccttgaaatacagaagacaaagtacaggctcatgaatgtctggacacaccagcaaattgagcctgaccaactgcactgacatcctgatgagtcagcttgaatcaagaagatgggtcccaaa

SEQ ID NO: 3298 - DNA, 417 bp, Homo sapiens
  misc_feature (1)...(417): n = A,T,C or G
tgagccaccgctctggggagactgaggacacattcattgctgaccttgtggtggggctctgcacaggacagatcaagactggcgccccctgccgctcggagcgtctggccaaatacaaccaactcatgaggatcgaggaggctcttggggacaaggcaatctttgctggacgcaagttccgtaacccgaaggccaagtgagaagctggaggctccaggactccactggacagacccaggtcttccagacctgcttcctgaaataaacactggtgccaaccaaaaaaaaaaaataagaaacaaagaaaaatttaataaaaaaaaaaagaaatataaaaaaaggaaattttnaatgtgtnggttataggagggggggggggggggcaaaatgagttgaatgctgggggagaaataaaga

SEQ ID NO: 3299 - DNA, 470 bp, Homo sapiens
  misc_feature (1)...(470): n = A,T,C or G
ccgccccggaatttttcgggtcgacccacgcgtccgccgcgcgctcgccccgacggtcctgctgnngacccatggctcctcgtcgccgccaccatggacgccatcaggaagaagatgcagatgctgaagctcgaanngggggnaagatttngttnnggggttggtngggggggggggggnnncggcgtggggggtggaaggggacagcagctggaagatgagctggtgtcactgcgaaagaaactcaagggcaccgaagatgaactggacgaatactctgaggctctcaaagatgcccaggagaagctggagctggcagagaaaaaggccaccgatgctgaagccgacgtagcttctctgaacagacgcatccagctggttgaggaagagttggatcgtgcccaggagcgtctggcaacagctttgcagaagctggaggaagctgagaaggcagcagatgagagtgagag

SEQ ID NO: 3300 - DNA, 417 bp, Homo sapiens
cttcacctttcttgacccgttgaagtagaataataaaatgatggtaagtgaggttacacacatgctctgtttgttttccacttttgcttgatgggacagtagttgttgttttgtgtccctttagtattggggagggggggttatttccatatttttattttaagtactttgatttttaacctttttcattgcttcaatttgatagcaactaattaagtcctatactttcctgattgcgtacaatggaccaaacaagaactaattactaacataggtttgaattggtttccttgtttttcttgtagatgaatgttataattaaaatggaatgtgttgtgcataatattacaaaccagatggctttatataggatatgtgtgatccaaaaaattcaagtgaagttgttacatttgaata

SEQ ID NO: 3301 - DNA, 454 bp, Homo sapiens
  misc_feature (1)...(454): n = A,T,C or G
ttcggtcgacttacgcgtcgtctgacatgatttggcgccggcgggctgcggtacgcggtggtttggagacagggacggctcggcaggctggcttgacagggcggcgggagctgcgggagctgnggnnggttnngnggtttttgggttggggggggtttttttttttttttttggggtttagaggaggcgcctgtgaaccagatccaagaaacaatttctgataattgtgtggtgattttctcaaaaacatcctgttcttactgtacaatggcaaaaaagcttttccatgacatgaatgttaactataaagtggtggaactggacctgcttgaatatggaaaccagttccaagatgctctttacaaaatgactggtgaaagaactgttccaagaatatttgtcaatggtacttttattggaggtgcaactgacactcataggcttcacaaagaag

SEQ ID NO: 3302 - DNA, 387 bp, Homo sapiens
cggacgcgtgggcggacgcgtgttcagcagcaaatgcagaatcaaaatctaatcatgaagtttctaaacaagacagaagagggaagagccagtttatggcctgtgccaggccatttgtggggttactgtttaatatttaaaacagtcaaacttcattcctccaacaccctctgttagagggcattgctcacctctcttacctttgtttttcttggtggtttacggtacttctagggcctgtttctctcaaccagcatcctatgtagtcagtcatcaaaatgcacccctcttttgttcatttccttagggccttaacaagtaactgatcgatctgaaaaaaagaagacaatttttattttttagcaaaacataaaattcatatactat

SEQ ID NO: 3303 - DNA, 396 bp, Homo sapiens
cccacgcgtgcgcccacgcgtacgcaaaaactgttattttggattttgtcatctttccatttaaattgctacttaatccttcattacagaatgagtcaaccatcttaatttgtgtgactgccttcatgaaaagctggatatataaaataaacgtcacttttaaggcatctaaggaattgttttctatcttaatcaccaagtatgccatacacattgcttacaacgtcttctatttacaatctgtggattggttctgccatccaaaaatgatgaaactttattttcacccagccgcgttcctgaatatgaacattcaaaagcggaccatgcgtgatggaaaatcctgccatggctgaaaacatggataaacttgaggtggacttgttgatggacagt

SEQ ID NO: 3304 - DNA, 375 bp, Homo sapiens
gcggcgtgagttgcatgttgtgtgaggatcccggggccgccgcgtcgctcgggccccgccatggccggcaccatcacgctcaaaacgctgcagcagcagaccttcaagatccgcatggagcctgacgagacggtgaaggtgctaaaggagaagatagaagctgagaagggtcgtgatgccttccccgtggctggacagaaactcatctatgccggcaagatcttgagtgacgatgtccctatcagggactatcgcatcgatgagaagaactttgtgggcgtcatggtgaccaagaccaaagccggccagggtacctcagcacccccagaggcctcacccacagctgccccagagtcctctacatcctttccgccg

SEQ ID NO: 3305 - DNA, 464 bp, Homo sapiens
  misc_feature (1)...(464): n = A,T,C or G
tctcgggtcgacttacgcgtccgcccacgcgtccgacactgccatagagaccctaggataaannnntacgaaaannnnntttttttacatatgtttccaaaagttttaaatacaactacaaatataaccatgtgctctnatnnacanntaattttntttttttgggggggggttttttttttttttgaaataattgattaatacctcaattctccatcctggctgtacattcaactcatctaaggagcttttaaaacacaaattcctaggggcaattaaataaaaatgtctggggatgggatccaggcaaggttacttttagagacggggtctcgttatattgcctacattggaatgcagtggctattcacgggcacaggcatagcgtaccacagcctcaaactcctgggttcaaacaatcctgcctcaggctcccaagtagctgggactacatgccactgtac

SEQ ID NO: 3306 - DNA, 436 bp, Homo sapiens
accgcagtgccctcgtatatgatgatatgccattgtattatcttgataacagtctgtggaattttttatcccgtgtctttgctgtatgagtgaaccaccacagagggtgtcgggagcaatattaagctggagactttcttcagtgatgcttcgcttatgtatttgcagctgctgccattgtcgctttgttcccatgtgcaggagttggatttttttgattgttgtttggcaagaaatattaatagtaacttttgtgtgtttgattattttcggggccggagcagcatctatccagcacctttgggatttggtggttattgacttaagcacagggcttctaagatcagaacttggttcttcttcccacaagtgctctgttttggaaatgtgctaatgacacacattgaattatgtcagaggtttgtggccttaagtg

SEQ ID NO: 3307 - DNA, 460 bp, Homo sapiens
gcggcggccgtaaggtgcatgggtagagccttgatacatcatcaaaggcatagcctttccaagatggtttatcagacatcactttgttcttgttctgtaaacatccgagtgcccaacagacattttgctgctgctacaaagtctgcaaagaaaacaaaaaaaggtgctaaagaaaaaacaccagatgagaaaaaagatgaaatagaaaaaataaaagcatatccctatatggaaggcgaacctgaggatgatgtctatttaaaacgcttatacccgagacagatatatgaggtggagaaagctgttcacttacttaagaaatttcaaattcttgactttactagtccaaagcaaagtgtttatcttgatttgacactggatatggcactgggaaagaagaatgcatcagaggtcaaaatagcggaagaaaatggagctgcatttgcaggaggcactagtc

SEQ ID NO: 3308 - DNA, 397 bp, Homo sapiens
ctggggcgtgcgtgaggcgtttactgatgcttcctggtccggtggcctcggtcccggtaagccaggcatgaagatcacaaggcagaaacatgccaagaagcatcttggcttcttccgcaacaacttcggagtccgcgagccgtaccagatcctgctggacggcaccttctgtcaggcggcgctgcggggccgcatccagctgcgggagcagctgccccgctacctcatgggggagacgcagctgtgcaccacaagatgtgtgttaaaagagctagaaacattgggaaaggacttatatggggcaaaactgattgcacaaaaatgccaagttcgaaattgtcctcatttcaagaatgcagtgagtggatcagaatgtctgctttccatggttgaagag

SEQ ID NO: 3309 - DNA, 388 bp, Homo sapiens
cccacgcgtccgttaaatatagaagtagtgtggaggaatgtgcaggaaagatgggtacaggtttctaatagagggtctataaagctatcgtatccctccaagtgaaaaatatatttgattataatagatatcgtgtaaataacatcgctattagctacagatcatggtacaaacaagaaactagacctttttctgcattgcttttatatgacttttttaaaaagctgcctttattatattcagggaattctagaagagacacttgatagtgaatttattgcctgtggatttgaatattggtaaaatagaaagtgtccacattaaaaaaaaaataggtattctctactactggcatttcagatatgtccttggtagagatattggcatg

SEQ ID NO: 3310 - DNA, 425 bp, Homo sapiens
  misc_feature (1)...(425): n = A,T,C or G
catggttattactgatcgcattgaaaacattgatcacctgggtttctttatttatcgactgtgtcatgacaaggaaacttacaaactgcaacgcagagaaactattaaaggtattcagaaacgtgaagccagcaattgtttcgcaattcggcattttgaaaacaaatttgccgtggaaactttaatttgttcttgaacagtcaagaaaaacattattgaggaaaattaatatcacagcataaccccaccctttacattttgtgcagtgattattttttaaagtcttctttcatgtaagtagcaaacagggctttactatcttttcatctcattaattcaattaaaaccattaccttaaaatttttttctttcgaagtgtggtgtcttttatatttgaattagtaactgtatgaagtcatagatan

SEQ ID NO: 3311 - DNA, 436 bp, Homo sapiens
  misc_feature (1)...(436): n = A,T,C or G
nagtgcgccngctncnnnggaaacgnagnagnngcttnacnttngggtgaggnacccggnccccaagttttccgtgaacatgccaacaaattgattgattttgctctcttggcctgttccatctcaaataatgaagaaggtgtaaagcttgttcgaatgtctgcaagccagttagaagccctctgtcctcaggttattaatgctgcactggctttagcagcaaaaccacagagtaaactggcccaagagaacatggatcttttaaagaacaatgggaaaaacaagtccgtgttctcacagatgctgtcgatgacattacttccattgatgacttcttggctgtctcagagaatcacattttgtgaagatgtgaacaaatgtgtcattgctctccaagaaaaggatgtggatggcctggaccgcacagctggtgcaa

SEQ ID NO: 3312 - DNA, 396 bp, Homo sapiens
atccagctctggcagtggcagctggagagggtaatagggcctcctgctgaatgaaggaagttgggtgaatgaatgggtgagctgcagggttcacttgcaaagggaccaggagtgataaggaaacaacaactcattcaggcagctgcttttgacctctaactcccaaacctgcctgttgcatgaggggaagccatctcccatgggagcgaagttaatggggtgggaggctatattctcactattgagtctttccaggagtctcaaggcacaaggctcctggtttcttactctcaaccaccccctacactctttatactctcactccttgtgcttcttcttgagcttcttcttctttttcttcttctttgctgccttgctgtcttttgatgtgtgcct

SEQ ID NO: 3313 - DNA, 465 bp, Homo sapiens
  misc_feature (1)...(465): n = A,T,C or G
ggagttccccnnaatagaagactgacggtcctgccacggaaccccgggncgacccacgcgtccgcggattctttggttgataaattgctatcattctaaagtcatggacttcactttcggcaacaaaactaaataaggatggaacatttattgaatgaaaaatgcacttttgtttttccatttttttaaataataaaaatcagacaaacaggaactgggtagtggtgatgaatgcaaaactttgtgaatgtgctttataaaagtgataattagacactttagaggatatacttggtgataatgtgaatgatgtaatcagactaacagttgaatcattgctgttggaggcagcacaaatttatgtgttacaacaatagtttaaaaacttgtactggatggaacccattttataaacagtcttatttggagtcatgtatataaaaatatatataaattagaaaagta

SEQ ID NO: 3314 - DNA, 419 bp, Homo sapiens
cagggagccctttttacttggctgtctcagtaggagtttcagtgatgttaatagtatgttcgtggttcctcaagcacactaagattttccttagatagagccctcgtaatattttctctccttgaaacactaacctattctccttttgccattgtcccgtgtgcctcgcggtattagcattgtggacactgaaacctagtctaaactagcacaagcaaagggattttcttgactcacaaaatgaaagtccaggagcatattaggccttaagcacagatagatccagggctgaaaccatgtctcatgtcagcaggacactcttactatcttaaaatctcaactctgattttctctcttctcatctcattccttttctttgtctaacatttattttaagttctgaggtacaagtgtaggtt

SEQ ID NO: 3315 - DNA, 473 bp, Homo sapiens
  misc_feature (1)...(473): n = A,T,C or G
gtgggannnttaagaccgacgtcaacggcaanggcaannnngggtcgacccacgcgtccgaattcaactctgttctccattaagcatcatgtaaatctcactagtgtggttaacaaaatggctttccccaaggacagaagtcaagagcttgtggggccatatattatctagtactaggccattcattatctcctagattaactctttttttttttttttttgggggggagnnaaantttggcagcccaggttggtagtccaggataatattctggggaaaatgaaaattttacctacagggtacaagccactgcctgttccaggctgtctgctatctctggaggaactggagcgttcaacaattccccaaaatatttgttgatgtttgacccttggccgcgtagaacacagtgggcccctgcaaggttacgggtacgtatcatgcattatctatccgctgcacctcactcagg

SEQ ID NO: 3316 - DNA, 434 bp, Homo sapiens
  misc_feature (1)...(434): n = A,T,C or G
tggatagcgcgggccgaccgggcgcaccgaccatggcctccaaatgccccaagtgcgacaagaccgtgtacttggccgagaatgtgagctccctggggaaggactggcacaagttctgcctcacgtgcgagcgctgcagcaagacgctgacgcccggaggcgcacgccgagcatgacgggaagccgttctgccacaagccgtgctacgccaccctgttcggacccaaaggcgtgaacatggggggcgcgggctcctacatatacgagaagcccctggcggaggggccgtacgtcaccggccccatcgaggtccccgcggtccgagcatatgagcggaaagcgagcggccctcccgaagggcccagcagagcctccattgcaccacttttaccggngagcccaacacgtgcccgcgctgcagcaagaaagtgtac

SEQ ID NO: 3317 - DNA, 460 bp, Homo sapiens
  misc_feature (1)...(460): n = A,T,C or G
nttgagnccagtttagccgnacaancntnnnntngggngaccacgcgtccgccacgcgtncgtccacgcgtncgcaagtccttttttctgcagaagaggcctcatcgccagcaccctggcgtcctaaagctgccgcacgtgcggctgccacaggcactggctaacggtgcccagttattgctacttgggagcgctgggcccactatggagaatcaggtgcaaacactgaccagttatctctggagcagacatttgcctgtagagccagaggagttgcaaagacgggctaggcatcttgagaaaaaattcctggaaaacccagacttatctcagacagaggagaaacttcgtggagcagtgctacacgcactacgtaaaactacctaccattggcaagaactgagctacactgagggactgagcctggtgtatatggcagcaagactggatggtggctttg

SEQ ID NO: 3318 - DNA, 438 bp, Homo sapiens
tgccgtttgcggtgccctatgaggccgagctctgttgcttcgaactccagtggtcagacctgctcatatctcagcatttcttcaggaccgacctatcccagaatggtgtggagtgcagcacatacacttgtcaccgagccaccattctggctccaaggctgcatctctccactggactagcgagagggttgtcagtgttttgctcctgggtctgcttccggctgcttatttgaatccttgctctgcgatggactattccctggctgcagccctcactcttcatggtcactgagatgggctttcaccatgctgtgtcggccattacccaactcctgggcttaagtgatccacctgcctcagcctcccaaagtgctgggttacaagcctgagccaccgcgccccagtgttaatcgtgacttaatacatgtgcatcttccc

SEQ ID NO: 3319 - DNA, 440 bp, Homo sapiens
tcaatatcacacttcatgatggacctctatgctaacaatgtcctatcagggggcaccactatgtaccctggcattgccgaccgaatgcagaaggagatcacggccctagcacccagcaccatgaagatcaagatcattgcccctccggagcgcaaatactctgtctggatcggtggctccatcctggcctctctgtccaccttccagcagatgtggatcagcaaacaggaatacgatgaagccgggccttccattgtccaccgcaaatgcttctaaaacactttcctgctcctctctgtctctagcacacaactgtgaatgtcctgtggaattatgccttcagttcttttccaaatcattcctagccaaagctctgactcgttacctatgtgttttttaataaatctgaaataggctactggtaaaaaaaaaaaaaaaaa

SEQ ID NO: 3320 - DNA, 438 bp, Homo sapiens
  misc_feature (1)...(438): n = A,T,C or G
gcatgtgaagtaaatttactacaaggaggtctaggtgtcatactaaatgttgaacaaggttaatatgtttgggcatttctctttcaaaataatataagggaaattagttcattttgtcaatagtttttaagtaaatatgaattatgtaataaacaatgaattaggtgttgattaatagatcataattttcccttcaaaattgtatgtaaacatggcccttgtgtcacaagatcataaacacctcataaacagcctcatcaattttgccagtactccctttaattctttgattctcagatctgtctctttgaggcacctatcatgtcatagtcctcgtggattttctcctcttctgacattaacttttctcactctgccagactcatttggtggtagtttgacatgtgattaaagagttccgtaatgttactttctttn

SEQ ID NO: 3321 - DNA, 404 bp, Homo sapiens
agcaacaaagcacctacaccttccagctgaaggcagtggatggtggcgtcccacctcgctcagcttacgttggggtcaccatcaatgtgctggacgagaatgacaacgcaccctatatcactgccccttctaacacctctcacaagctgctgaccccccagacacgttttggtgagacggtcagccaggtggcagccgaggactttgactctggtgtcaatgccgagctgatctacagcattgcaggtggcaacccttatggactcttccagattgggtcacattcaggtgccatcaccctggagaaggagattgagcggcgccaccatgggctacaccgcctggtggtgaaggtcagtgaccgcggcaagcccccacgctatggcacagccttggtccatctt

SEQ ID NO: 3322 - DNA, 429 bp, Homo sapiens
ctaatcgacagagaaagtgaggcacacaaaccgtttgtctgggcactgctaggccttctgcttatttggatatgggctggggagttacctggctgtgattatgggtggctctaccgcttaagagagttctatacaccgctgcttgttaacttctgaagttaggttttcagtttaagttaggttgtagttcattaagtgggaactgaaagtatggagacagcctcaggccactggcctcctgcttattgattgattgattgagacagagtcttgccctctcacctaggctggagtgtagtggcatgatctcggcccactgcaacctctgcctcctgggttcaagcaattctcctgtctcagtctccctagtggctgggatcatatgtgcccgctaccacacccagctaattttttgtgttttgagtggaa

SEQ ID NO: 3323 - DNA, 405 bp, Homo sapiens
cccacgcgtccgcgctgcgccacgatgtccggggagtcagccaggagcttggggaagggaagcgcgcccccggggccggtcccggagggctcgatccgcatctacagcatgaggttctgcccgtttgctgagaggacgcgtctagtcctgaaggccaagggaatcaggcatgaagtcatcaatatcaacctgaaaaataagcctgagtggttctttaagaaaaatccctttggtctggtgccagttctggaaaacagtcagggtcagctgatctacgagtctgccatcacctgtgagtacctggatgaagcatacccagggaagaagctgttgccggatgacccctatgagaaagcttgccaaaagatgatcttagagttgttttctaaggtgccatccttggta

SEQ ID NO: 3324 - DNA, 422 bp, Homo sapiens
  misc_feature (1)...(422): n = A,T,C or G
cggatcgtccttccttgaaccctctgtttagggctgtgctgaggggctgggcggggagcacaggccgtgtccgctcgcttgcaccttttcagactgccgtgtcaagcctcgagccgggcccacctggagccctaccctgcgcacccgcccgcagagcccgatatacgcccccggaccagaagggccgggctagggcatccccagtcccgtcgcgggcactgacccttgagatcagccctgacatccccaccttcccgtcccaggccagcccaggggccgaagcccacccactcgcgtatctagcagccgctcttgtcctctgtgtacggctcgcgggagtgttggttaccatggtgaagctggcagccaaatgcatcctggcatgagacccagcagtgggcacgaccgcccttgcacagatn

SEQ ID NO: 3325 - DNA, 406 bp, Homo sapiens
  misc_feature (1)...(406): n = A,T,C or G
gacaagatccggggcatgcagaagctgagcacaccccagaagaagtgagggtccccgacccaggagaacggtggctcccacaggacaatcgctgccccccaacctcgtagcaacagcaataccgggggaccctgcggccaggcctggtgccatgagcagggctcctcgtgcccctggcccaggggtctcttcccctgccccctcagttttccacttttggggttttttattgttattaaactgatgggacttttaaaaaaaaaaaaaaaaaaaaaaaaaaaaaaaaaaaaaaaaaaaaaaaaaaaaaaaaaannnnnngcncnggggccagggggcggttgccctgccccccccgcgggccaccaaaggggggnnnnattgatattaaactgatgggacttataag

SEQ ID NO: 3326 - DNA, 429 bp, Homo sapiens
  misc_feature (1)...(429): n = A,T,C or G
cccacgcgtccggaagtggttcacccttgaggaccaggagcctccatatcctgactgaaaaccttttctgagacttagagtaacagtacttttggttccttgagttctcctgtctccagataccaaatgaccttgacttttctgccttgtgaattcgtagtccaatcagctgaaattaaatcacttgggagggacgcatagaaggagctctaggaacacagtgccagtgcagaagtttctccaggtggcctccctttccaacaatgtacataataaagtgtatgcactttcnctannnannnnaaaaaaaaaaaaaaaaaaaaaaaaaaaaaaaaaaaaaaaaacaaaaaaagggggggggggcttttaaaaaaatccctgggggggcccaaaaaagcgcggggtggcaaaaattttttttttttttta

SEQ ID NO: 3327 - DNA, 449 bp, Homo sapiens
  misc_feature (1)...(449): n = A,T,C or G
nggagccgccttctcannnngggaactttagnanncgtctggcccttngggttgagggaagcgtcccggctgtgatagtcaggattgagacagctaaatcatatgtcctatctggattgcttatttgtggatatctccttagcttacattcttacctagtcttgcagatacttcctcagttttaccaaatctcctcatcactgtctgtttatggcaggccctcccacttacccacccactccagtctctgaactttttgtcctttttccctgcttcgcattccgccgcacttttttttttttttcttgaaagggatattgtttttgtggcccagggggggggggaggggcccagtttgggaaaagaaaacccctttgccccccaggtacaagcctttttcttgcctaacatatttggaaggtatgggtggctgggagcttggaccccgg

SEQ ID NO: 3328 - DNA, 412 bp, Homo sapiens
agcgcaagtaggtctacaagacgctacttcccctatcatagaagagcttatcacctttcatgatcacgccctcataatcattttccttatctgcttcctagtcctgtatgcccttttcctaccactcaccctagcattacttatataaaaagaaaaaaaaaaaaaaaaaagaaaaaaaaaaaaaggggggggggcttaaaaaaaaacctgagggggggccaaaaaaaacgggggggagaaagaaaaaatttttttctttaagggggggagaaaaaaaactaccgggggaattttggaaaaaaaactttttttgggggggggaaaaaaatggaaaaacccccccccaaaaaaaaaagcttcgggggaaaaaaaaaaatgtgaagggggaaagggggaaaaacacgccgaatgg

SEQ ID NO: 3329 - DNA, 409 bp, Homo sapiens
cgggaggaccaggaacccaggagagcatggccacgctgcgccggcttcgggaggcgccgcggcacttactggtttgcgagaaatccaacttcggcaaccacaagtcgcgccaccggcatcttgtgcagacgcactactataactacagggtttcatttctcattcctgaatgtgggatactatcggaagaactgaaaaacctggtcatgaacactggaccctattactttgtgaagaatttacctcttcatgaattaattacacctgaattcatcagtacctttataaagaaagggtcttgctatgcactaacatacaatacacatattgatgaagataatactgttgccctgctaccaaatgggaaattaattttgtcactggataaagacacttatgaagaaactgg

SEQ ID NO: 3330 - DNA, 450 bp, Homo sapiens
  misc_feature (1)...(450): n = A,T,C or G
nagatgcgctttctcannngggaactttagnanngtctnnncnntngggntgaggnaaccgnnccccctttgttgttggctgggaggccaatgggagcttttttagttacctggcatctcaagagatggaagcgaggcggggaggaatgagaagttggcctgccagtcttgaactgctctcctttgacctgttatttaagagtaaaataaaatactgacttgcttaagctactgtcttttgaagtctattatagcaattagtttgctttaaatatgtaatttatattaatggccttataccatccttattttgcaactaacttttcatttaatattatatgcaagacatttctattcctgtaagtatagctctgcctgcacagaattgttggattaatgatgtagattttacatgtcaggggatgtagcagaattgcttgcatccgacgg

SEQ ID NO: 3331 - DNA, 420 bp, Homo sapiens
  misc_feature (1)...(420): n = A,T,C or G
cccaaagctgcacagaaaagctaggcacagattttctctgggatataaaagcatccaaaacatccctgcatagtgggaaactcagaaactcacacatatgcccagggcagaatacactctcagaaaagacctcacaattttcccaaactttcacacctggttgagcagtagtttcagtgcaaacaagaaggaaaaactaaggcagagttgtaaaaagcctggcgaagtgttgaaggagggcccagcacacaaagggtcaactggcagactgagagaggattttcatttttgttttgtatttcctttctgcctctcttttcctttctttcttattcatgtccattcccttgcctctctgtctctctttctcactcacgcactcttggcattcatggaaatctctgtcaaaacgctgttaan

SEQ ID NO: 3332 - DNA, 425 bp, Homo sapiens
cggacgcgtgggtcaggcccgagacacaccctgtgctcgaaacagtgttgccagtgtccacggggcccagcgcaggggctgatgggaaggcattttcgtgcatgggggacacaggcccccccttctccgtggcgcttttttttttttttttttttccccgccccgggggaggaaaattctttggcccccggggggcaagggtgtcatgggcccaaaaaacattatttgtcctcaacccgggcaaaaacaaaattttttcttaggggggggaaaaaaaaaagaaattttcaaaagggggggggggggggggaaaggattttatacaaagccctttttgggggcccccattagacccggaaaaaaaaaagtaaatttatttttcaactttgggggggggggccctttttaagtctccttggggggcc

SEQ ID NO: 3333 - DNA, 477 bp, Homo sapiens
  misc_feature (1)...(477): n = A,T,C or G
aagaattgtcttgggccacacataaaatacgctaacactaacaatagctgatgacctanaaaaaaaaaaaaaaaaaaaaaaaggggggccctggcatggtttttttgaatcccccccccccaaataaccaaattatcctttgttttaaaagggggggccccggggggaagggtttaaagggccggaaaatttttttgggaaaaaattttttggaaaaaaaagtatgggggggaattggaaaaaaaccttcccttccgggtttttaggggggggaaaaaaaaaactgaaagggggcagggacccccggggttaaggaaatttttttttctcccccggcttttttttttttaaaaagttaaaagctcttttgccttttgggtttgccatggcccacctgaaattcttttgcaattttgataaaaaaaaatgctggaaaatgggaaaaattttgccgttttccaatccaaaaaaatcgat

SEQ ID NO: 3334 - DNA, 480 bp, Homo sapiens
  misc_feature (1)...(480): n = A,T,C or G
gaagcaaatatttgaaatttggaaaaccctaaaccttttggtaagaaattgtaattttcacttaaaattttctttaaagatataaaaggtttataattgatgtagttaaattgaacaataaccattggtgactggagcaagtaattatagcctgcagaaaaaattatctaagaattttaaaaataagatcctgaagttggttaattgcatccatttctgtatttatgtgaatttataaactgcagtaagttttgaatgaggttaatcttgtttaatataagtaaatgagtctgtagactgtgatctccccaaactaaaaagtacagtacttggaattgtgttctttatggttgtagtggtggtaaagcactaatatgcagaanataaaggaattacacncgtgagaaganaancntnnnnaatattaaaaaaataaaangggggggggccgttttaaaagattctctgggggggcccttg

SEQ ID NO: 3335 - DNA, 475 bp, Homo sapiens
  misc_feature (1)...(475): n = A,T,C or G
cgaccaancgggagcgggagcgggagcgggagcgggagccggagcgagagcgcgcgggcgcggccgacagtgcctgatttgagatggggtcccaggtctcggtggaatcgggagctctgcacgtggtgattgtgggtgggggctttggcgggatcgcagcagccagccagctgcaggccctgaacgtccccttcatgctggtggacatgaaggactccttccaccacaatgtggctgctctccgagcctccgtggagacagggttcgccaaaaagacattcatttcttactcggtgactntcaaggacaacttccggcaggggctagtagtggggatagacctgaagaaccagatggtgctgctgcagggtggcgaggccctgcccttctctcatcttatcctggccacgggcagcactgggcccttcccggcaagtttaatgaggttccagccacaggccgtatccagcctatg

SEQ ID NO: 3336 - DNA, 431 bp, Homo sapiens
  misc_feature (1)...(431): n = A,T,C or G
agcttcaggcctggcggcggcttccaagctaaggaacggtttggggcagtgtcgttcccggaggtcggccgccgttacccgctcaccagctacgcggcgcgtcaggacactgcccatctctaagataagaacctggaaaggggactctgttggccattggaaattgcagaataatgtctcagcgtcagtacccagagtgttacctggcaccaaatggatgcttagtaagtaattgtggagtgaataagatgagtaatgaagaactggtggggcagaatcatggcatggaaggtgaagcttgcacaggaggggatgtgacatttagtgatgtggctatagacttctctcatgaagagtgggcatgcctagattctgctcagagggacttatacaaggatgtgatggtccaaaattatgagaaacctgttctn

SEQ ID NO: 3337 - DNA, 420 bp, Homo sapiens
attgaccttactgaactggttaagctccgagaagaattataacccattgcatttgctcgtggaattaaactctcctttatgcctttcttcttaaaggctgcttccttgggattactacagtttcctatccttaacgcttctgtggatgaaaactgccagaatataacatataaggcttctcataacattgggatagcaatggatactgagcagggtttgattgtccctaatgtgaaaaatgttcagatctgctctatatttgacatcgccactgaactgaaccgcctccagaaattgggctctgtgggtcagctcagcaccactgatcttacaggaggaacatttactctttccaacattggatcaattggtggtacctttgccaaaccagtgataatgccacctgaagtagccattggg

SEQ ID NO: 3338 - DNA, 411 bp, Homo sapiens
cccgttcttgcctcatgccagtcgcctccaggccattagggatccttcacccgtgtctggtgagtgaggagcgctgttggccggcgcgggggtggccgtggggagcatcaacagtggaggatggatgagtgaccctgagagttacggcccggagtctaaagcattggtttgtcagccttctaaaattaatgtggaagtacgagagaatataccagaacgttcttgtagcgaattaaattatctccagacttattccttcctttcctttccgagaggtaactgctgttaatagtctggtgactttgcagacgcgtttctgtgcttttacgtgcgtgtctatgcaactggaaaacgtatagttgttgtaatctaatcgcttttttaaaaaatcatgctgagcgagtatttggg

SEQ ID NO: 3339 - DNA, 415 bp, Homo sapiens
attaaatgtacataacatagcgcggtcaggcttgtggcacagtgcattgaattcaaaagtcaaacagcaaatttgaattctaacagaattcaaaaaaaaatttttttagtcagtactactaaggcagacacactgattactaggtacaaatcaaaccttgatgctaaaactcttcatcattgtaatttcaaagcacttacctgcttcaaaacattgtaaactaagactgaacacctgtatagtttaaaagcaacactatcaatagcatttcagccattttgccagccatgtgtaatcacaactgcagaaataaggagaaaacccctgtttttttagtttagctaattagatctggaacatcactgggattgctctgaatgaatcctgagagttttgttttttataagcaccctca

SEQ ID NO: 3340 - DNA, 420 bp, Homo sapiens
  misc_feature (1)...(420): n = A,T,C or G
cccacgcgtncgctctaggcagtgacccattcagctggaaactcccaagcctcgactacgaacgcaagaccaaagtggacttcgatgacttcctcccagctatccggaagccccagacacctacctccttggctggatcagccaaaggtgggcaagacggttcacagcgttcaagcatccactttgaaacggaagaggctaaccgttcctttctctcggggatcaagaccattttgaagaagagcccggagcccaaggaggatcccgctcacctgtctgactcgtcctcatcctccagctccatcgtgtccttcaaaagtgctgacagcatcaaaagtcgaccaggaatcccacgacttgcgggtgacggtggcgagcgaacgtcccccgagcggagagagccagggacggtgaggaaag

SEQ ID NO: 3341 - DNA, 509 bp, Homo sapiens
  misc_feature (1)...(509): n = A,T,C or G
aaattgtaatggtttgacttctgttcatgaatacagagattgggaattttttgattatcacagataattccatgtcagacttttgatggtcctataacattattttatctagtttctctttatttacttttgaagatgatagtatgatcctatcatgttctttgaagtgctaggaaagatttctggtgattcttacgtatttcttctttttctcctggaactaatagcttcaaattgtaaatgtccagaaaacagtgggcaatccattgaattgcacaagttgcaaactactggaccatgttagctttatgtgctaatatattagccagtgtgtcccttaatactaataaaagattatgttgtttttagaatacagaatacaaaggggaatattgggcagaacatcctacgatanaaattttttgggaagtatttcacgaattaccattggaaaagaagaaacagtttctgtgtagtatttctaactagttgtatactttatgagactg

SEQ ID NO: 3342 - DNA, 474 bp, Homo sapiens
  misc_feature (1)...(474): n = A,T,C or G
acaggacggaaaaattcctttcattcccaggctgcccagaagtagctgcaagcacttttaaggaaatctgaaaaagagaagacaaacaaagaaactgagacagaaagtggaaatgaaaactccggctacaattcagatgaacaaaagaccacagaaaccgcttctctccctcccaaatcctgtgaatccagtgatcctgaacaaagaaacagtagctgtggccctcctcaccagcgggctgatcaacgtccacccaggccagcaagtcatccacaggcttcttttaatctggccagtcctgagaaggtcagtaatacaactgtagtatagcaaagccttccccaagctccactgagcacttggctgacaattcaaaacacggcgatggcatccttcctttccatcctaagactggcctgcagctttgccaacattacctgaagaggagatgtcggagtcatcagaactgatacn

SEQ ID NO: 3343 - DNA, 417 bp, Homo sapiens
ataatattttatagggctatatctgcccaataattagcagctttaaaccagtcatacctgtcaccaaacagtacaaacgaaaccacaataaaaaatgatcttttgagctccctcttataatccctatatatcccaaaagtcatatacattatgttaattgtaataatagctcattgtaatcaatgtgcaatatatgaatcaatttatcccatcagattacacagtctgtgtgagcactgtaagaatgttagtaacagatacggtatgcacaaacataagagctcatgtgtacttttaaaacctcatccttgaggatatattaataatagaaataaatcagcattctttatgactcaagtagtataaatcaataggtagagtaggatgtgaaatgaaatgtaggttgttactacattt

SEQ ID NO: 3344 - DNA, 480 bp, Homo sapiens
  misc_feature (1)...(480): n = A,T,C or G
tcagtaaggatatgagcctttgcacaggctggctgcgtgttcttgaaataggtgttaccttctctgggccttggttttttaaaatctgtaaaattagaggattgcactagagaaacttgaatgctccattcaggcctatcattttattaagtatgattgacacagcccatgggccagaacacactctacaaaatgactaggataacagaaagaacgtgatctcctgattagagagggtggttttcctcaatggaaccaaatataaagaggacttgaacaaaaatgacagatacaaaccatttctatcctgagtagtaatctcacacttcatcctatagagtcaaccaccacagataggaattccttattcttttaatttttttaagacagagtctcactttgttgcccaggctggagcgcagtggggtgatctcatctccctgcaacctccgcctcctgggttcaagcgattcttgtgcn

SEQ ID NO: 3345 - DNA, 433 bp, Homo sapiens
  misc_feature (1)...(433): n = A,T,C or G
gcaacgaaaagtcgcagatgcaggaaccagaaagaatgccacacatacgtttcttgacttaaacaaattgcttggagccaggtgcagtggctcacgtctgtaatcgcagcactttgggaggccaaggcaggcagatcacctgaggttaggagtttgagattagcctgaccaacatagtgaaaccccatctctactaaaaatacaaaaattagccgggcatggtgatggtcacctgtaatcccagatactctggaggtgaggcaggagaacctcttgaacccgggaggcagaggttgcggtgagctgagatcttgctactgcactccagcctgggcgacaaagctagactctgtatcaaaananaaaaaaaaaaagacaacaaaaaaaaccaaaaaaaaaaaaaaaaaaaacaaaaaaaccgtcaggggcccgc

SEQ ID NO: 3346 - DNA, 424 bp, Homo sapiens
cggacgcatgggcaggaatcggctctggaaggtgaagctagaggaaccagacctcatcagcccaacatcaaagacaccatcggtacagcagggcccgcagcacccaccccggaccggcgactccatgttcatggccaccccctgcgggggacggttgaccaccagccaccacatcatcccagagctgagctcctccagcgggatgacgccggccccaccacctccctcttcttctttttcatgcttctgtgtcatgtgtctgagctttcctgtctttccttttttctgagagattcaaagcctccacgactctgtttcccccgtcccttctgaatttaatttgcactaagtcatttgcactggttggagttgtggagacggccttgagtctcagtacgagtgtgcgtggtgtgagccaccttgg

SEQ ID NO: 3347 - DNA, 417 bp, Homo sapiens
cggacgcgtgggcgaggctcagagcaagagaggtatcctgaccctgaagtaccctatcgagcacggcatcatcaccaactgggatgacatggagaagatctggcaccacaccttctacaacgagcttcgcgtggctcccgaggagcaccccaccctgctcaccgaggcccccctcaatcccaaggccaaccgcgagaagatgacccagatcatgtttgagaccttcaacgtgcccgccatgtacgtggccatccaggccgtgctgtccctctacgcctccggcaggaccaccggcatcgtgctggactccggcgacggcgtcacccacaacgtgcccatttatgagggctacgcgctgccgcacgccatcatgcgcctggacctggcgggccgcgatctcaccgactacctgatgaa

SEQ ID NO: 3348 - DNA, 413 bp, Homo sapiens
  misc_feature (1)...(413): n = A,T,C or G
cggacgcgtgggcggacgcgtggggttacacgctgcttgtagacatgttaatatagtaatacctttatgatatattgagtttaaggactactctttttctgttttatcatgtatgcattattttgtatatgtacagggcaagtaggtatataatttgataaagttgcaattgaaatattattaacagaagatgtaagaaatttctgcatggtctaaatctttgtgtactttatttgtaaattatttgccctggagttttagaaaatagtttctgaattttaaacttgctggattcatgcagccagctttgcaggttatcagagatcaaagattgtaataataattttgtaaattgtaagcaaaaagttatttttatattatatacagnctaattgttcatcctaattgttcct

SEQ ID NO: 3349 - DNA, 395 bp, Homo sapiens
  misc_feature (1)...(395): n = A,T,C or G
agagccgaggncgcaccactgcactccagcctgggtgacagagcgagactctgtctcgaaaaaaaaaaagggtttttaaatgtaatattcatagttctatgagtgaaggattatcttcctcttctaaaaatttgcaaaggggttaagtgcctaaaatagggtcttttacatgttaaacactcaataaatatggctgaaagaatgaatggggaaaaaaagaatgaatgacttgtcgagggcaaagaactagcaaggagtgaaacggattcaaatttggctttatgactccaaagcagtttaaagccataaatattatgcttgccaaattacccctttttcacagcttttccggaattgtagaactagacaaaattggggttctaaacagtctggcn

SEQ ID NO: 3350 - DNA, 505 bp, Homo sapiens
  misc_feature (1)...(505): n = A,T,C or G
agcgcccctacagagatcgaccgcatcgggcaggaacncctgggnngacccacgcgtgcggcgacctcggggtcgttaggcctccacgtcctcgctggagctgcttacctcagtcgtccatccacacctcccccctgccgcccccgcccatctcactctcccaaccctgggcaccagggcaggtcgacagcccgaggcactcctctactgcgtttccaggcccaggagacccactccagcgccgcggttccttgcgacccggcagccgttcagcagacctcccattctttcctgcatcatcgggcattgtggaggcaccctacggtgattcctctcagagcctgtttgtaggtgaccgtgacagagacaaaaccatggaagtgactgggtttggagtgaccaagagttcctccctcccctttcccagacacgcctcttgctggcagatcctctgactctctggctgcagaacagaatcttccgtgctctggcctgagtgccacan

SEQ ID NO: 3351 - DNA, 440 bp, Homo sapiens
  misc_feature (1)...(440): n = A,T,C or G
aaacagtctaattattttcaggtcctgattctttatgtgaagaaaggaatatttaaatgacaataattcaggaggctatgttgatagaaagaataagtgaaaagaggcaaaaaaaggtgatctaacttttaaataattactttcccaaaacataagggagatacttgattccatgctgctctttaaactgcgttaggatatttctttttaaacatctagggttttagttctttattttcctttccttgttttctagagaatattatttcaccaagtaaaggatatttcagattttaaaagttcaaatagggctaatataatcaaaatggttttttaaaatttatgaatgcattattatggaaaagcactataagttcttgttcgttgtttctgtagttgaataagcagcctaagaaacctgttctttaattatagattan

SEQ ID NO: 3352 - DNA, 502 bp, Homo sapiens
  misc_feature (1)...(502): n = A,T,C or G
agtgtccacagatgncagagcatcggnccggaacncctgggncgacccacgcgtgcgcaacagagcagcggcaagaacagtcccatccagggacactcacaggctaccgtagagacacacgcaaaccactggcgcctgtgcttccagagctgtgggcagagtgccatggagccagctggagagggaagtgctgtcagggccttggagtggtcagaggatctcacaagaggtggcactggtacaagaaaggcaagtaggagtgtagcaggcaggcaggacagagggtgttctaagcagaggggacatgaagtataggcactgagcagaaggcacccttgcccagggtgcagaaaggggctgtattgggagactggcacaggccggggcagggagggctgggctaaggcattggcatcattcttgaagagtttgaagccaggcaggtggcctggtcagaccatgtttgaggaaggagcctgtgtcacaattccctgtgaccagg

SEQ ID NO: 3353 - DNA, 437 bp, Homo sapiens
ttttgtcagaagcgtccgcgccgcgaggaggaggccctgctggtttctgtgcgggctcttgtcaggatggtgaagctgttcatcggaaacctgccccgggaggctacagagcaggagattcgctcactcttcgagcagtatgggaaggtgctggaatgtgacatcattaagaattacggctttgtgcacatagaagacaagacggcagctgaggatgccatacgcaacctgcaccattacaagcttcatggggtgaacatcaacgtggaagccagcaagaataagagcaaaacctcaacaaagttgcatgtgggcaacatcagtcccacctgcaccaataaggagcttcgagccaagtttgaggagtatggtccggccatcgaatgtgacatcgtgaaagattatgccttcctacacatggagcgggcagaggatgg

SEQ ID NO: 3354 - DNA, 443 bp, Homo sapiens
cccacgcgtccggtgacacgcacctgtagtctactggggaggttgaggcgtgaggattgcttgaacccaggagtttgaagctgcagtgagctgggatcataccactgcactccaggctgggtgacaatgagaccctgtctctaaaaaaagaaaataaaaataaaaaaaacaaagaattggagggaatgagagaatgagttcctctttactcagctttaatgtaatcaacacatggcccatgttgtttcattggtgctgtcacctctatcttcactttgggttattttgaaacaaatctcagacatcatactattgtaaatacaacacattagcaattgtatttacaatgaacttgtacatatttttataaataaatttcaaaaagatgggccaggagtggtgtcacgtgtctgtagtcccagctgctcgagaggctgaggcag

SEQ ID NO: 3355 - DNA, 438 bp, Homo sapiens
  misc_feature (1)...(438): n = A,T,C or G
cccacgcgtccgcccacgcgtncggggttatgaaaaaggatccctgctttgggagctcatggacttgtagcagagaccggtagtaaattggcagtctcagtaacttctgtaaatgattgcatctctttgcaggcttctcttcccatactctcccccactcctccttggacagtgttccgggggttctttcctaagcaactgctttttcagtatacatacttcagatgattgtgtctactccaggatttccaacgatgctaggtttctttcctgtgccctagacgtataggtctaagttccacctggatatcccacagggctatcaagctcagttcatcctaaacagaacttacattcatccccaactcagacttccttattctttattattgaatggcagctctgtaccttaaccaagctgntatctctaggtcatca

SEQ ID NO: 3356 - DNA, 463 bp, Homo sapiens
cccacgcgtccgcccacgcgtccgcccacgcgtccgtgacgacctacgcacacgagaacatgcctctcgcaaaggatctccttcatccctctccagaagaggagaagaggaaacacaagaagaaacgcctggtgcagagccccaattcctacttcatggatgtgaaatgcccaggatgctataaaatcaccacggtctttagccatgcacaaacggtagttttgtgtgttggctgctccactgtcctctgccagcctacaggaggaaaagcaaggcttacagaaggatgttccttcaggaggaagcagcactaaaagcactctgagtcaagatgagtgggaaaccatctcaataaacacattttggataaaaaaaaaaaaaaaaaaaaaaaaagggggggccgttttaaaggatccttgggggggcccaagtttacgcgggcttggagaggaatagttttttc

SEQ ID NO: 3357 - DNA, 422 bp, Homo sapiens
  misc_feature (1)...(422): n = A,T,C or G
cggacgcgtgggctagttctagatcgcgagctgccgcccttttttttttttttgaaaatgggcgggggggttttataaaaccggggggagctcttgctttcccggggggggcccccccatttccaaaatggtaaagggtttcccattttgcccccccaacccaaaatttccccctatttgaaagggaattttttgtttttttaaggggcccggggttaattaaaaaattggttccggccaggggaaataaggggttggatttgggggtaccccccatttggggggtggaaaaaattccggtgggtttttaaaaaaggggccattttttcaaaacccaccccttgcaaaacacgggggcccggggccctttccggttcccaggggggagaacttcccaagggggggcccttcttttgccttcn

SEQ ID NO: 3358 - DNA, 443 bp, Homo sapiens
  misc_feature (1)...(443): n = A,T,C or G
cttacacttaggagatttcaacttaacttgaccgctctgaccaaataaaaaaaaaaaaaaaaaaaaaaaaaaaaaaaaagggggggcccctttaaaaaaacccctgggggggcccaaaaaaacccggggggggaaaaaaaattttttttcctttagggggggcataaaaaacccccccgggggatttttaaaaaaaaacctttttttgggggggggaaaaattggaccacccccccccaaaaaaataaagctttcgggggaaaaaaaaaatttttagggggtaagggggaaaaaccaccccctaaaccccgggtcaaaaaaaatgnnnnncncccnctaatacacgatcctttgtgcaacgattaaagtcctacgcgatctgagttcataccggagtaatgcacggcgagttctatctacttcaaattccttcatgaacgaaa

SEQ ID NO: 3359 - DNA, 152 bp, Homo sapiens
caacttacacttatgagatttcaacttaacttgaccgctctgaaaaaaaaaaaaaaaaaggggcggccgttttaaaggatccttgggggggccaaagtttacccgggcttgcaacgtattagttttttccttatagggggccgttttataac

SEQ ID NO: 3360 - DNA, 419 bp, Homo sapiens
  misc_feature (1)...(419): n = A,T,C or G
ctaaaagagtgtgaagattgctcctggagcagttgtatgtgtagaaagtgaaatcagaggagatgtaactatcgttacccagataatatcactcctgacactgaagatccagaaccaaaacctatgatcattggcaccaataatgtgtttgaagttggctgttattcccaagccatgaagatgggagataataatgtcattgaatcaaaagcatatgtaggcagaaatgtaatattgacaagtggctgcatcattggggcttgttgcaacctaaatacatttgaagtcatccctgagaatacggtgatctatggtgcagactgccttcgtcgggtgcagactgagcgaccgcagccccagacactacagctggatttcttgatgaanatcttgccaaattaccacccacctaagaagat

SEQ ID NO: 3361 - DNA, 466 bp, Homo sapiens
gggtcgacccacgcgtccgcggacgcgtgggcagaaactcaactggttccacaccatttgggtccctgctgtttttttcttgcagactgtgctattaatttaataacagtgctgctggagtggcggtagtaatgtagatggcaccatttgcattttggacctggctatattagaattctgatgtcaaagaccgagcagtgggctgtagagtaggtttattaaactagcaagtcttccataattaagacagtgaatttggctgaagtctaaaataaatttctcaaagactgagctggagattatcaacctgaatatatttcttgagtagaccaaatatgttttgtaaaagtaactatttcttaagatagtgaaagtagagcttcagttgctccacactgagctggaaatcagagagagcctatgttttccacagttttttctgtgtgaatatgaacaaaagatttat

SEQ ID NO: 3362 - DNA, 528 bp, Homo sapiens
  misc_feature (1)...(528): n = A,T,C or G
tgagcaaggggnnnnaatggaacccgatgaacggcccgaancccgggcgaccacgcgtccgggcgccgaggggattgaggggttgactgagcgttgcgagctttagctttctttcgaacgccagcgctgaggacacgatgtcgcggctctcccgctcactgctttgggccgccacctgcctgggcgtgctctgcgtgctgtccgcggacaagaacacgacccagcacccgaacgtgacgactttagcgcccatctccaacgtaacctcggcgccggtgacgtccctcccgctggtcaccactccggcaccagaaacctgtgaaggtcgaaacagctgcgtttcctgttttaatgttagcgttgttaatactacctgcttttggatagaatgtaaagatgagagctattgttcacataactcaacagttagtgattgtcaagtggggaacacgacagacttctgttccgtttccacggccactccagtgccaacagccaattctacagctaaacccacagttcagcccn

SEQ ID NO: 3363 - DNA, 61 bp, Homo sapiens
aaaggcgaaatcagaggagatgtaactatcggtacccagataatatcatctcctgacactg

SEQ ID NO: 3364 - DNA, 418 bp, Homo sapiens
agcagcccagcgtgcccattccagcgcccgcgtccccgcagcatgccgagcccccgcctgctggccgcgctgtgcggcgcgctgctctgcgcccccagcctcctcgtcgccctggatatctgttacaaaaacccctgccacaacggtggtttatgcgaggagatttcccaagaagtgcgaggagatgtcttcccctcgtacacctgcacgtgccttaagggctacgcgggcaaccactgtgagacgaaatgtgtcgagccactgggcatggagaatgggaacattgccaactcacagatcgccgcctcatctgtgcgtgtgaccttcttgggtttgcagcattgggtcccggagctggcccgcctgaaccgcgcaggcatggtcaatgcctggacacccagcagcaatgacgataacc

SEQ ID NO: 3365 - DNA, 449 bp, Homo sapiens
  misc_feature (1)...(449): n = A,T,C or G
aaactctcccgtatttgctgactcattggtggagtaaacttctggctcccagctccactggcccatggggcctccattgtatgaagtcagcataagctgcccacctaatggtggagagcatgaaactgggagcatcctgtggggggcttgtgggggaaaaaggtggttgttttaacccaccgttgttttggggtggtgttgcacactaatacagaatagagtctatgcctttggcaaatttaactgggagtttggattcccacttaagggttttacttcttgagtcctgtggatggtggttcttcatgacaggatcccagcccgattctgcaaatgcctccatggggtttaaaaacatgaggctttccaagttcttgcccaggatctggggcagcctccagagtatcacctgagagttcatgttctctccagggctgcaggagtgtgtn

SEQ ID NO: 3366 - DNA, 408 bp, Homo sapiens
cccacaagctggtgttagctgttcgcgccttagatcaccgcccgatgggccctgcgctgcccgcgcttgccatagcgttactttctgcctatagctgagggggttagagcggatcccaggaggcgtgaaccggagaccatgagcgggggcttgatctaggccgaccagctggcctatgatatggcgcggggcttcgcggacgtaagcatcctgacggcttacaggataaaactcagctcatcagatatgagcctgcccacggtgtccgcgctcaagaagatgggtgtgaacctgacacgcagcaacaaggagacggtgaagcacagcgacgtcctgtttctggctgtgaagccacatatcatccccttcatcctggatgagattggggccgacgtgcaagccagacat

SEQ ID NO: 3367 - DNA, 515 bp, Homo sapiens
  misc_feature (1)...(515): n = A,T,C or G
ctcatcaccggagttacaaaagtcacaggacgtccagcaggagcagatccatgagcagctcatatgatccccacagtcgatccaggtcctacacctacgatagctactatagcaggagtcggagtcgaagtagaagccagagaagtgacagttaccaccgaggcagaagttataatcggcggtccaggagttgtagatcttatggctctgacagtgaaagtgaccgaagttactctcatcaccggagccccagtgagagcagcagatacagttgaaaacgtccggatacaaattatatcttatttgtaaatatctggcaacttagcttaagaaatgtaatgacagtctgttgttctatttcaatatcagaggtgaatttcaaaaatagacacttcttaattntactgggtcattacaggtggggagaagaatttaaaatacagatatgtttcctaaaaatatttttatgccacatttacaggagccacctatggaattgatttcattttctggaa

SEQ ID NO: 3368 - DNA, 424 bp, Homo sapiens
  misc_feature (1)...(424): n = A,T,C or G
cccacgcgtccgcacgatcaaaagggacaagcatcaagcacgcagcaatgcagctcaaaacgcttagcctagccacacccccacgggaaacagcagtgattaacctttagcaataaacgaaagtttaactaagctatactaaccccagggttggtcaatttcgtgccnaaaaaaaaaaaaaaaataaaaaaaaaaaataaaaaataaaaaaaaaaaaaaaaaaaattgggggggggggtttattaaaaaatccctggggggggccaaacttaaagcggtcgagaaagatatttttttttttaaaaaaggaatagaacaaaatccctcggtggtgtttttggaaaaaaccctttttttggggggggggaatatgggcgcccccccccccaagaaagaattcgctcggggggaaaaaatatatttt

SEQ ID NO: 3369 - DNA, 391 bp, Homo sapiens
cccgtctccactaaaaatacaaaattagctatgcgttgtggcacatgccagtaatcccagctactcgggaggctgacgcaggagaatcgcttgaatgcaggaaccggaggttgcggcgagccaagatcacgccgttgctctccagcctgggcaacaagagcgaaactccatctcacaaaaaaatgaaatgaacagacagccctttagaagagctactacaaaaataatgagccagagtggggattgcttttttagactttgggaagggagccgatgcctatctataaaatgtattaacttgcatataaatgtttctgtgcaaatgggcattggatcctgcccctcaaatttaaaggacctaatgctgcgcttggatgcttcaactaaggaa

SEQ ID NO: 3370 - DNA, 420 bp, Homo sapiens
ggaggctgaagtgagaggatcacttgtgcccaggagtttgaggctgcactgtgccagggtcgtgccactgcacccctggcatgggcaacaaagtgagaccctgtctaaaaaaaaaaaaagtttccgccagatgagcactccatgagggggcttactatttctattttacaaaggaaactgcggtttaataagccccctgcccaaagttacagcttgatattatttaacaggctgagcacaggggcttcacacctgaaatcccaacactttgggaggtcaaaatggggaggatcgtttgaggcccggagtttaaaactaacctgggcaacatagggaaactccatttttatttttaacaaaagatttgtggggggggggttgttttaattacccaggctttgggggtgtatacctgaaacg

SEQ ID NO: 3371 - DNA, 450 bp, Homo sapiens
cccacgcgtccgaattcttctcgggaggcagagctgggtcctttccaccatggcacctaagaaagcaaagaagagagccgggggtgccaactccaacgtgttctccatgttcgaacagacccaaatccaggaatttaaggaggccttcactatcatggaccagaacagggatggcttcattgacaagaacgatctgagagacacctttgctgcccttgggcgagtgaacgtgaaaaatgaagaaattgatgaaatgatcaaggaggctccgggtccaattaactttactgtgttcctcacaatgtttggggagaaacttaagggagcggaccctgaggaaaccattctcaacgcattcaaagtgtttgaccctgaaggcaaaggggtgctgaaggctgattacgttcgggaaatgctgaccacgcaggcggagaggtttccaaggaggag

SEQ ID NO: 3372 - DNA, 460 bp, Homo sapiens
  misc_feature (1)...(460): n = A,T,C or G
aataattctgtgtaatataaatggtttataactgcttttgtacctagctaggctgctattattactataatgagtaaatcataaagccttcatcactcccacatttttcttacggtcggagcatcagaacaagcgtctagactccttgggaccgtgagttcctagagcttggctgggtctaggctgttctgtgcctccaaggactgtctggcaatgacttgtattggccaccaactgtagatgtatatatggtgcccttctgatgctaagactccagaccttttgtttttgctttgcattttctgattttataccaactgtgtggactaagatgcattaaaataaacatcagagtaactcanaananannaagnnnncaaaaaaaaanaaaaaanaaanaaaaanannngggggggcccccttataaaaatttttgggggggccaatttttctggtttga

SEQ ID NO: 3373 - DNA, 406 bp, Homo sapiens
cccacgcgtccgcccacgcgtccgcccacgcgtccgggggaattaggggattagattaagagtaggtaaagacccttttgttctttcctgttgtaggggaggaagctgttctccccaccccaggtgcctttggaggttaaggctaggttaggccctgcactccacctggggacggcccctccacctgaagtcctctgctgtgttgactggaccctcagttcccacactgctaattactatgaaagctgctctggcctcgtcttctagcttgtgcctagttgaaagtctcacctttacaggatcatttgtaatgctggtgtacatgcagggaactcacaagctgtgtcaggtatgcaggacaaggaatgtctgctctggggggcacaggccaactatatggagggag

SEQ ID NO: 3374 - DNA, 573 bp, Homo sapiens
  misc_feature (1)...(573): n = A,T,C or G
ttttctcttcgtgtctaataaacactcttcactcaacttcctctgttcgtctatactactacttaaggtttctcctcaccataccccccaccnnaaggggggaatggaggactgagggcatggcgccggaaccccggancgacccacgcgtccgcccacgcgtccggctttttttgttgttggtcaatctctgagtgataaggaaacagaggcccagagattaaatagcttgatcaaggttaatcaaggttaagacagagctgactttgaacacaggattctgatcccagcagtattggagcccttctgttttctcctccagatgtacactcagcttttattttttccaccacactcttttctcagaagactgagcatttgggatgccttggagaactcccttgctttctggcttcctgttgggatcagccaatggggagcacgggcaggacatggggcaggggttgggggtaggaaagggagactggggtattttattccattgggttccttctcaaagggatcactttggactggctgtcaccttaaacaaaaaccacagctcctaagaag

SEQ ID NO: 3375 - DNA, 449 bp, Homo sapiens
gaaaccatgccgaaagtagtgtctcggtcagtagtctgctctgacactcgggaccgggaggaatatgacgacggcgagaagcccctccatgtgtactactgtttgtgcggccaggtggtcctagtgctggactgtcagttagagaaattgcccatgaggccccgggaccggtcccgtgtgattgatgctgccaaacatgcccataagttttgtaacacagaagacgaagagactatgtatctgcggagacctgaaggcattgaactacagtacagaaagaaatgtgcaaagtgtggactgctgctcttctaccaatcccagccgaagaatgctcccgttaccttcattgtggatggagcagtcgtcaagtttggccagggctttgggaaaacgaacatatatactcagaaaacagagccttctaagaaggtgatgatgaccaaacggac

SEQ ID NO: 3376 - DNA, 401 bp, Homo sapiens
ctgggtgccagatttggtcacttttttttattactgttagaaatgggggggatagaaaattctactttgaattatttagttttttttaaagagagggttgtgtttgtgcttctcccacctttcagcatttatagaacatgctgccccacatacaaagtcaagaccacttacttttatgtgacactagtagtttggggttaatgttttgtgtaagaacagctgcatatgagtaaagttaccccaaccacagtgaggaggaagatgttcacatactggaactgtcctgccaaataaattttgcccctattgtgctctgttttaatttggagtgggcaaagtaacctcttgcttggtgcaactatttgtttcaaataaaaacatttagacaaaaaaaaaaaaat

SEQ ID NO: 3377 - DNA, 451 bp, Homo sapiens
  misc_feature (1)...(451): n = A,T,C or G
ctcagaacaactaactcatgtggactcggaaggacgggcagctatggtagatgtgggcaggaagccagacacagagcgggtggctgtggcttcagccgtggtcctcctgggaccggtagccttcaagcttgtccagcagaaccagctcaagaaaggagatgccctagtggtggcccagctggctggagtccaggcagccaaggtgaccagccagctgatccctctgtgccaccacgtggccctgagccacatccaggtgcagctggagctggacagcacacgccatgccgtgaagatccaggcatcttgccgggctcggggccccaccggggtggagatggaggccctgacctctgctgcagtggccgccctcaccctgtatgacatgtgcaaggctgtcagcagggacatcgtgttggaggagatcaagctcattagcaagactggtggn

SEQ ID NO: 3378 - DNA, 559 bp, Homo sapiens
  misc_feature (1)...(559): n = A,T,C or G
nggagattgaacccgttgaccgctncgcattcccgggccgacccacgcgtccgcgggaggctgcaggatggtcaagctgacggcggagctgatcgagcaggcggcgcagtacaccaacgcggtgcgcgaccgggagctggacctccgggggtataaaattcccgtcattgaaaatctaggtgctacgttagaccagtttgatgctattgatttttctgacaatgagatcaggaaactggatggttttcctttgttgagaagactgaaaacattgttagtgaacaacaacagaatatgccgtataggtgagggacttgatcaggctctgccctgtctgacagaactcattctcaccaataatagtctcgtggaactgggtgatctggaccctctggcatctctcaaatcgctgacttacctaagtatcctaagaaatccggtaccaataagaagcatacagattgatgtgatttataagttcgcaagcagagtactggatttcagaaagtgaacctaaagagcgtcagaagcaaagaaatgtcaaggcaaacgggtgcac

SEQ ID NO: 3379 - DNA, 576 bp, Homo sapiens
  misc_feature (1)...(576): n = A,T,C or G
acgcgattgaaaccattgangatcatcgacaggncnccaatnncccggtcgacccacgcgtccgcccacgcgtncggtcatatattgtgcttgatcagaaggatcatagtgtctttctgagacgaggccatgacttgatcatgaagatgaaaattcagctttctgaagctctttgtggcttcaagaagacgataaaaacattggacaatcgaattcttgttattacatccaaagcaggtgaggtgataaagcacggggacctgagatgcgtgcgcgatgaaggaatgcccatctacaaagcacccctggaaaaagggattctgatcatacagtttttagtaatctttcctgaaaaacactggctttctctggaaaagcttcctcaactggaagctttactccctcctcgacagaaagtgaggattacagatgacatggatcacgtggagctgaaggaggttttgcccaatgagcagaactggcgtcagcccagggaggcctacaaggaggacgaagacgggcccctggctggagtggagtgccagacggtttgacgtggtgcgggcagccgggcct

SEQ ID NO: 3380 - DNA, 404 bp, Homo sapiens
ggcgcagagcggagatgcagtggcttggggccactttgctgtgcctgctgctggcggcggcggtccccacggcccccgcgcccgctccgacggcgacctcggctccagtcaagcccggcccggctctcagctacccgcaggaggaggccaccctcaatgagatgttccgcgaggttgaggaactgatggaggacacgcagcacaaattgcgcagcgcggtggaagagatggaggcagaagaagctgctgctaaagcatcatcagaagtgaacctggcaaacttacctcccagctatcacaatgagaccaacacagacacgaaggttggaaataataccatccatgtgcaccgagaaattcacaagataaccaacaaccagactggacaaatggtcttttcagag

SEQ ID NO: 3381 - DNA, 409 bp, Homo sapiens
ctccaactgggagagctgcagctgccgagaggaggagaacgctgaggtcggtcggaccaacggacgcgctgaccgctgccaactgcagctcgcgctgcctcctgctcgcgccgtgccactaaggtcattcccgcctccgagagcccagagccgagatggaaacggtccaggagctgatccccctggccaaggagatgatggcccagaagcgcaaggggaagatggtgaagctgtacgtgctgggcagcgtgctggccctcttcggcgtggtgctcggcctgatggagactgtgtgcagccccttcacggccgccagacgtctgcgggaccaggaggcagccgtggcggagctgcaggccgccctggagcgacaggctctccagaagcaagccctgcaggagaaaggcaa

SEQ ID NO: 3382 - DNA, 395 bp, Homo sapiens
ctaatcgaaaagggccacggtattcgcttattagatgcacagatcgcaaccggggggatcattgacccaaaggagagccatcgtttaccagttgacatagcatataagaggggctatttcaatgaggaactcagtgagattctctcagatccaagtgatgataccaaaggattttttgaccccaacactgaagaaaatcttacctatctgcaactaaaagaaagatgcattaaggatgaggaaacagggctctgtcttctgcctctgaaagaaaagaagaaacaggtgcagacatcacaaaagaataccctcaggaagcgtagagtggtcatagttgacccagaaaccaataaagaaatgtctgttcaggaggcctacaagaagggcctaattga

SEQ ID NO: 3383 - DNA, 463 bp, Homo sapiens
  misc_feature (1)...(463): n = A,T,C or G
agaaggggagtggatgccaggcagccagaaacaacagtcctgcatgggccttggaaaggtgtcatttgcccagcttggaagcactgagatcccttgttaaagatagttactaggcacttactctgtgccaggcacaatgctgagagcttgatgtgggtcatgtcttctgttccttacaagaatcctgtgaggcaggaaactcatttgcaaactccacgtggatagagaacttggccaaggttgcataactgttggtggtcctaaagtcagagtttgttcattattgttataaacaaagggtgtgataaagacctgaacttatggagttaaatggcgnggttcggaggtctaagcgcaccattccaggctgcaggagaggaaactgaggcccagagaaaggcagggacttgcccaaggtctcccagcttggcagtggccacggngggggggaggggagggacct

SEQ ID NO: 3384 - DNA, 451 bp, Homo sapiens
gtgcgagaccccctcgttatcctgcggtttgacaccgttttcccgggccgacccacgcgtccgcccacgcctccgcccacgcgtccgcccgccttccttatggaagcggctttctatggcgaccgccacggagcattgggttctggtggagatggtacacgcgctttacgaggctcctgcttaccatcttattttggaagggattctgatcctctggataatcagacttcttttctctatgacttacaaattacaagatcgatctgatcttacaggcaaggaaaaagaacaactgattgaagagtggcaaccataacctcttgttcctcctgtcccaaaagaccatcctgctctcaactacaacatcgtttcaggccctccaagccacaaaactgtggggaatggaaaagaatgtttaaacttcgcctcatttaattctgttggattgctg

SEQ ID NO: 3385 - DNA, 412 bp, Homo sapiens
cccacgcgtccgggagaatgccccactacattgattttttgtgcattaagtattgtagcattattttctcatgaggtcatagcctgggacgatgaatcaaattctttaccagcagaccgtgtgggaagaacagccaccagtgaaccaaatacccagacaatatggaaataacatgtttttctttcttcttgccttccttctcaccctttgtttcttcccttatatgtgcatttatttacttataacaaacatttatttaagggtgggtagagggtcattacaaggaaacggattcctatctataataaaaaatctgattctgactgtaaatcttggaaatttctggagagggtagaaaaaaattaatgatggagtgaggggaaatgggtacaatatcaaggccacatatatg

SEQ ID NO: 3386 - DNA, 375 bp, Homo sapiens
cttggcgaaagtaaaagggataattaactggctcttagcttatgtgcagagttccaagccccaaagttaatctagaaccactcgataacaccaataaaaatatttatttcacatctgttatatatctggaaaatgttctaagcatcttacacatatttctcattaaatccacaggtgaccattgtgaggtagatattttgttctaattttccagatgaggaagctgagaccctaaaaggttaggtgacaggttatacaacttggagtgtgggaggaggagagaggaacctgaacagggcaagttggggatctgacacttgtttgggtagatgtaggcacattgtatttttggcttagatgctttattcatcatgg

SEQ ID NO: 3387 - DNA, 405 bp, Homo sapiens
cgacgagcagccggtcagcatgagcgagctctaccctctgcagatctcccccgtgtcttcctatgcagaaagcgaaacgactgatagtgtgcccagcgatgaagagagtgccgagggacggccacactggcggaagaggagcagataaactccaacacgatcccggggctcaagtggcttaacaaggaaaagaagatttttcagatcccctggatgcatgcggctagacatgggtgggatgtggaaaaagatgcaccactctttagaaactgggcaatccatacaggaaagcgtcaaccaggagtagataaacctgatcccaaaacatggaatgcgaatttcagatgcgccatgaattccttgcctgatattgaagaagtcaaggataaaagcataaagaaagga

SEQ ID NO: 3388 - DNA, 396 bp, Homo sapiens
cggacgcgtggggctcttttttcccagttgcattaacgtgaagagattatgtggtcatgattcttaagaaaacacatgttatgttttggaaggtttatgggtcacttatggaacttgagagtattacacgaatgggaaatttagtggcaaaactcaaacctcgtttaaatccagctcattgcctatcttctttatgtttgtacctgggcagctcattgtaactggagaaaaacatggctatatgactggtgtcactttaaatttatcatcgtcacccgttgcaagtgatctctctatgctgcctaacaatcccagtgtcttcacttatctctttgaggagtcaataataggctcttttttttttttaaccgtgtttttcttcctgcatagccttgt

SEQ ID NO: 3389 - DNA, 421 bp, Homo sapiens
  misc_feature (1)...(421): n = A,T,C or G
ccaaacagaaagttcaagtgtaacaacaacaataaaaatagattatgaaacaggctataattggctcttttggatttgataggggcaagatgaaaggcaactttcttgcttttgaaatcatgttgggtaagaggtaaggaatccagctacaattttattagtgcttgaaacgggcttccttgaattctccaggccctatcattttttttttcttactaatcaaaagagagctggggtagaagccccatgtttgtattccatgaaacacgtcgggttggagtaaaggcaaaaacagctagacacaccaggtgtgtctgtttgacatttataagctggcactcatcaacactcctgtttctcctttctctgggacgtgtggattaaggggtgtgagttgtgggaagaattgccctcgtacctn

SEQ ID NO: 3390 - DNA, 563 bp, Homo sapiens
  misc_feature (1)...(563): n = A,T,C or G
ggcgattgacccgtgaccgcncncaattcccggccgacccacgcgtccgcccacgcgtncgcagctttccacattctttgaggaatggtggtggaccaagaggacgttccgggtggcataagggtgttgcaggaggctcctcgacttggtttcacaaccatagtaattctggaggtggttggctttcaaatagtggagcagtagattggaatcataatggtacaggaaggaattccagttggctttctgaaggaacaggtggcttttccagttggcatatgaacaacagtaacggaaactggaaatccagtgtacgtagtacaaataattggaattacagtggccctggagacaaatttcaaccaggcagaaacagaaattctaactgtcaaatggaagacatgactatgctatggaacaagaaatctaataagtcaaacanatacagtcacgacagatataatgggcagcggcaagaaaatgacnaacttgtacagttgcacatatagaggccttctgaaggattacagggataaatttctttcgaaggttactcgcttcan

SEQ ID NO: 3391 - DNA, 509 bp, Homo sapiens
attttagttgcttcactgatacggaatcggcgaggcgccattgaggctttttgcgtggggccgcagagcgagtcgggaaacgattttaaactgaagaggcggcggagggccgaattcccttttctcaacggcttgatttcagagctgggctggtctctgacaggctcagctggagagggacgggttgggacgcactgtccttttgcccttccccctccgcgagcagaagctgactccgcaggagcgagggtcgcagagctgggggatttcagtctccacatagttttggagccggacttttgaagaatgattcgtgaatccggaatgggtgacagcgtcatcacggcattttattgacagaccatggattcttacagtgcaccagagtcaactcctagtgcatcctcaagacctgaagattactttataggtgccactcctctgcagaaacgattagaatcgggcaggaggcagagttatttatcctgacttcacctcgaaggaaaatt

SEQ ID NO: 3392 - DNA, 386 bp, Homo sapiens
aaatagcaacagggtctcggagtctccctttcatatgactgatttaaattccattctaaagtattaattttgttcgtgactagtctagaaggcattttaattttcccttttaattatgtacacgccacgtaaccagagagtatatgtgaggctgacacattattttccttggaggcagaaaatagtaaagcatgagaacccagagaactaaacgctcctcttgtaaagtggggcaaggattcttcaaaatactgttcatgttcatgctggtatagagatagcagggatctgtgaaagaaagccagtttctcttaaatttgttcagtagtactcaaatttatgcatttaccatacagcaaataaattcagaatcagtagttcaatca

SEQ ID NO: 3393 - DNA, 519 bp, Homo sapiens
ctgtcgccttaatccaagcctacgttttcacacttctagtaagcctctacctgaaaaatttttaaaaaaaaaaaacaaataaaataaaaatggggggggggcccctcccttttaaaatttcccccccctttttaaaaaaaactctttcttggaaaaaaggggccccaaaaaccccccctttggaaatggcccccttttttttcccccagggggggaaaaaaaattccccttttaaggggggaaaaattttttttttttttttccctaaaaaaacctttataaagggcccccctgggggggaacacaccccccccctgggggggggccctcaaattttttctcttcccccacccaagggggtcccccaaaaaaaccccccccccttgttgagaggggggctctttttcacaatttaaaaggggggaaaagggtggtttttttccccaccaacaaattctttttttaaaaaaaaattttttttttgtttgagggggggtttattttttatttaaaaaaaag

SEQ ID NO: 3394 - DNA, 412 bp, Homo sapiens
ctccacgctgtgttctgcttggctgataactcggtggggcccaatgcgacaaggccagatgacatccacctgctgtactcagggaagacggtggaaatcaacaacacggatgccgagggcaggctggtgctggcagatggcgtgtcctatgcttgcaaggacctgggggccgacatcatcctggacatggccaccctgaccggggctcagggcattgccacagggaagtaccacgccgcggtgctcaccaacagcgctgagtgggaggccgcctgtgtgaaggcgggcaggaagtgtggggacctggtgcacccgctggtctactgccccgagctgcacttcagcgagttcacctcagctgtggcggacatgaagaactcagtggcggaccgagacaacagccccagctcct

SEQ ID NO: 3395 - DNA, 399 bp, Homo sapiens
  misc_feature (1)...(399): n = A,T,C or G
ctagtctatatcgccacctccacccctgttgtgacctgtccttccgtacttaataaagtgcgcgtgggagtgttcaaaaaaaaaaaaaaaaaaaaaaaaaaaaaaaaaaaaaaaaaaaaaaaaaaaaaaaaaaaaaaaaaaaaaaaaaaataatataaaagcggtcatttttataaataatagtttcacatggttttattcaattaaataaaaaaaaacatatattttcatataaaggaagatttaaaatttaacttcctttgttaatagtaataaaaaaatttcttattgtgtatataaaataaaacaaaaaaattttaaaaaaaatttgttctttttaaaaaattttatttttctatggtgaaaaaaaactttacccccaaaacttaattccagaan

SEQ ID NO: 3396 - DNA, 413 bp, Homo sapiens
  misc_feature (1)...(413): n = A,T,C or G
cccacgcgtncgcttatttccttagagttgtaagttgtacatgtatttttctgtggcagcagcagattcagattagcttttatgtccttcagggaaaagggattgttactaaatttgcaggctgcatcagagttttaatattgagatttaatattttaatcatttgaataatgattgaatgatgtgatgggtaacattttaagatgtatgagatacgattaggggctttttatgtatttttctttctttcagatatatatgagtgcctgggactcctgggctcaagtgatccttgtgcctcagcctccccagtagttaggaatgactacaaccatgtgccaccacacctggctgatttattttatttttgtaatgacagtctcttgctatcttgccccaactggtctcaaacn

SEQ ID NO: 3397 - DNA, 467 bp, Homo sapiens
  misc_feature (1)...(467): n = A,T,C or G
tcgcggatcgacccacgcgtccggacatgtgaagcttatttactacaacgaggtctaggtgtcatactaaatgttgaacaaggttaatatgtttgggcatttctctttcaaaataatataagggaaattagttcattttgtcaatagtttttaagtaaatatgaattatgtaataaacaatgaattaggtgttgattaatagatcataattttcccttcaaaattgtatgtaaacatggcccttgtgtcacaagatcataaacacctcataaacagcctcatcaattttgccagtactccctttaattctttgattctcagatctgtctctttgaggcacctatcatgtcatagtcctcgtggattttctcctcttctgacattaacttttctcactctgccagactcatttggnggagtttgacatgtgatntaatgagtccgtaatgttactttcttcttttttt

SEQ ID NO: 3398 - DNA, 512 bp, Homo sapiens
  misc_feature (1)...(512): n = A,T,C or G
agcgcnccaattgaaacatgacagtcatcgngcaacgaaccccgggncgacccacgcgtccgaacaatttaaaaacttatcctatcagtaaaaagttttatattctgtcctttgtatacgtgggttttgtatctatggactctaccaaacatagatggaaaatatttggataaaaaaaggatggttgtgtctgtactgaacatgtacagagttttttcttgtcattattccctaaacaatacagtataacaactatttacatagcatttacattgtattaggtattataagtaatctagagatcacttaaggtatacaaaaaagttatggataggctatatgcaaatactctgccattttatgtaagggatcccccacagattcaagggacaactgtgatgttcaagaacaaatctataagactatggtatgaatctatatgaaaaagcaaaactaaactaaactaaaattccttactaattgaagtactttaaaaaatggaattcctaaan

SEQ ID NO: 3399 - DNA, 444 bp, Homo sapiens
caaattttgtatttttaatagagacagtgcttcttcatgttggtcaggctggtcttgaacccccgacctgagatgagccacccgcctcggcctcccaaagtgctgggatgataggcatgagccactgcgcccggccagaaggaatatttgaataaataatggcaaagatttttgaaaccccatgaaagatgacaatccacagaattaagagattcttaatatagcataaggtgattcttaaaggtttccacttctaagtaatatgcaaattcattttccttagattgagcttccttcccctcctcctttctaattttagcagtggttttcagaattctgctgagagtaagtgtttttctaacaagtgatgaattacatgttttttttaatcacatttacaaaataatttatgtgctagagctccaaaaattctgattggacaaa

SEQ ID NO: 3400 - DNA, 448 bp, Homo sapiens
cctctgcccatgtttcctcccaggaagagcgggcagagtgtcccatccccaggcagtgcttcctgagcagaccacccggactgtctttcctccacccgcccatggagaaagagcacgcccggccccgccctgtgctcacctctgcctggctcagcgaccttctcaggcattctgccctcctgggcccctctctccctgaaggggctttgtggcatctctggaagagcagggtgtgctgcactcatgggcctggtctcactccttggacttgtcaccttgtgacatttggcttatcagcatttgagaaggctctgctgggtctccatggtgggggtctctcaccttcttgaccctctctccatcattcagctgccagcccaggcttcacacccaagctggctcagcagccgagcctggcaccgagggtccctgcaggctccctgggcag

SEQ ID NO: 3401 - DNA, 445 bp, Homo sapiens
ataattttcatgatttgagaagccttcgcttcgaagcgaaaagtcctaatagtagaagaaccctccataaacctggagtgactatatggatgccccccaccctaccacacattcgaagaacccgtatacataaaatctagacaaaaaaggaaggaatcgaaccccccaaagctggtttcaagccaaccccatggcctccatgactttttcaaaaaaaaaaaaagggggggcccgtttaaaagaacccttggggggcccaagtttaacgggggcgggcaaggaaaaatttttttccttatggggggcggaataaaacccaacttgggaattttggaaaggaacctttctttgggggggggaacaaatgggcacaacccccctacaaaaattaaagccttaagggaaaaaaaaaatttttaaggggaaaagggggaaaaccaaccgg

SEQ ID NO: 3402 - DNA, 457 bp, Homo sapiens
  misc_feature (1)...(457): n = A,T,C or G
tgcaaggtgggggntttagataactgagagcatcgcaccgacntccgggtcgacccacgcgtccggtgaaagctaattagatccagcatttcttatgttgattcatattgaatgaggtagtgaaaagggacctgtgcttttgtaaattctagaaaggcaagaggacaatattgaataaagctgtgtttaaacttcattgctcatatatcttttagtaactggtaaaccggcgaagctgataagccaataagagtgctgtctagaacgcatttgcaaaccgttaagagtagcttctttttgaggcctggacttctgattcatctatagaagtctattatgattccatcaattgcatagcttgtgtacctggtagaaattgtgtcttggaatgaccctttcgagttattgacatggctctgatgaatagaacatgagccccaaaactaaatccaaaagg

SEQ ID NO: 3403 - DNA, 386 bp, Homo sapiens
tagaactaattttttgcccctgaggagtgggcttaagaaggaggtagcgcaatacgcagaggccttttcttcccggtatactatagcatttgccttccgttctgaagctatgtggcttgccaagtccttcacgaaatgagccacgctgatgggtaatttgtggagaaatatcttaattttgatttccttaaggaaaagcgaaaagcagagttacagtcacaaatcccctgaacgtactgctgtcaccagtgtcattgtggctgcgggaaggagatctgaacctaacttttcttactccctgaggagtttcttgttggacccaatgtggtccatgaagacactgatggggatggaagcatacccatggcatccacttgagggtttct

SEQ ID NO: 3404 - DNA, 465 bp, Homo sapiens
  misc_feature (1)...(465): n = A,T,C or G
tggccagggtcaccaaggtcctgggcaggaccggttctcagggacagtgcacgcaggtgcgcgtggaattcatggacgacacgagccgatccatcatccgcaatgtaaaaggccccgtgcgcgagggcgacgtgctcacccttttggagtcagagcgagaagcccggaggttgcgctgagcttggctgctcgctgggtcttggatgtcgggttcgaccacttggccgatgggaatggtctgtcacaatctgctccttttttttgtccgccacacgtaactgagatgctcctttaaataaagcgtttgtgtttcaagttaaaaaaaaaaaaaaaaaaaaaaaaaaaaagggggggccggtttaaaaaaatcctctgaggggccaagattaacccngcctgccaattttttatttttttccttatgggggggatattaaacccttttggagttttgggaaagaccct

SEQ ID NO: 3405 - DNA, 415 bp, Homo sapiens
cttggcatctagactcccttgtgccctcactatgccagcggcaactgtagatcatagccaaagaatttgtgaagtttgggcttgcaacttggatgaagagatgaagaaaattcgtcaagttatccgaaaatataattacgttgctatggacaccgagtttccaggtgtggttgcaagacccattggagaattcaggagcaatgctgactatcaataccaactattgcggtgtaatgtagacttgttaaagataattcagctaggactgacatttatgaatgagcaaggagaataccctccaggaacttcaacttggcagtttaattttaaatttaatttgacggaggacatgtatgcccaggactctatagagctactaacaacatctggtatccagtttaaaaaacatgaggag

SEQ ID NO: 3406 - DNA, 443 bp, Homo sapiens
  misc_feature (1)...(443): n = A,T,C or G
aaacattcttctgctaccctgacatggaagcacacaagtggttttccactgggtatataacttcctgtgcgagacccttcggctttctactctctggagggcagagcactagagtattctctggatctatttctgtcctagtggctctctacctgtctgctccgttcatctctggacactanatgtgctgcctggatgggctcctccctgcccactggtttacttccagccttgttagaaactcttctttagtcattctgagctgacacatgagactcactgtgcctcttcatcccttggcaaaacacattggcagccgcccacaccatgctgagcacccgtgggtgaggtgccagccttgcccagggatgtcagcatccttctgctgccactccagggctcacagggaatgggctgaatctgtcctccaatctgtttatggg

SEQ ID NO: 3407 - DNA, 495 bp, Homo sapiens
  misc_feature (1)...(495): n = A,T,C or G
tggtccattgacatacgcttggcacggccgaatccgggcgacccacgcgtccgatgaaagcacatattaagctgcaagtgcatgctagcttaccacagtgcggagactgctttctgaaaaggccactcacgtgaacactagggatgaagatgagtatacccctcttcatcgagcagcctacagtggacacttagatattgttcaggagctcattgcacagggggccgatgttcatgcagtgactgtggatggctggacgcccctgcacagtgcttgtaagtggaataataccagagtggcttctttcttactgcagcatgatgcagatatcaatgcccaaacaaaaggcctcttgacccccttgcatcttgctgctgggaaaagagacagcaaggataccctagaactcctcctgatgaaccgttacgtcaaaccagggctgaaaaacaacttggaagaaactgcatttgatattgccaggaggacaagtatctn

SEQ ID NO: 3408 - DNA, 475 bp, Homo sapiens
  misc_feature (1)...(475): n = A,T,C or G
agcgcccaactgaaactgaaggcatcgcaaccgccccggaanttacgggacgacccacccgtncgataagagtcttggtcttgcagcctgtgaagtctcattcttatcccatctctgctcacactgaactaaatgccgcttcaggctagcattggcttccctccggcttccgtttccttctctatgaaataaccattcattgagctcttatgacatgtttggttcagtactaagcactttccatgagttgcattttcattacaacagccctttgagataggtaatgtccttcttttttttttggatgggaagtttcgctctccttgcccaggctggagtgcaatggagtgatctctgctgaccgcaacctttgcatcccgggttaaggggattctcctgcctcagcctcccgagtagttgggattacaggcgcgcaccaccatacctggctaattttgaatttttagtaaaacag

SEQ ID NO: 3409 - DNA, 473 bp, Homo sapiens
  misc_feature (1)...(473): n = A,T,C or G
aggcnccaatgagncctaaggcctggcgacgaacttccgggncgacccacgcgtccgcttaatttctgtaacagctaaggactgcaaaatcccactctgcatcaactgaacgcaaatcagccactttaattaagctaagcccttactagaccaatgggacttaaacccacaaacacttagttaacagctaagcaccctaatcaactggcttcaatctacttctcccgccgccgggaaaaaaggcgggagaagccccggcaggtttgaagctgcttcttcgaatttgcaattcaatatgaaaatcacctcggagctggtaaaaagaggcctaacccctgtctttagatttacagtccaatgcttcactcagccattttacctcacccccaaaaaaaaaaaaaaaggggggccggttataaagaacccttggggggcccaagcttacccggggggggcaaggtaatgtcttttcc

SEQ ID NO: 3410 - DNA, 425 bp, Homo sapiens
  misc_feature (1)...(425): n = A,T,C or G
ccaggggtaagtaaactatagccacctnnnnnttctctgtcccactgcctattttataaataaaggtttgttggaaaacagccatactcattcatttatgtattttctatggctgcttttgcactataatggcagagttaagtagtttcagcacaaatcatctatcccacaaaatctaaaatgtttctgtctgagcctttacagaaagtgtgctgacctctgctttatgcagtagttgtcatatattttacatctacatcttatagccccaaataagattttactttaaataggttttgcttttaacaattctgtgcattntgaggaaactaaaataaaaaatggtattttataattaccctcatgtataccagtttgagtgtcagttttccctgaagatctgagtttccatctgataacatttt

SEQ ID NO: 3411 - DNA, 427 bp, Homo sapiens
  misc_feature (1)...(427): n = A,T,C or G
ncaggacttccttatgcctctagttttatgaccnnnnnaggagaagccagagttagagtaggagaggactaattctcagcagcagtggaggtgagttctttcttttgcggaagctttacatatgttttgtgtagtaggaataactagatattttagctagtgtgcggtgtgtgttcacccctgggattggacagtgtatcctaacaagtcccatgtctggttctgtgtctaaaggcctgctccatgacacaggatgctacatgcactcctgctagcacatcttgatctgttgaatgttcattctttctttttgctcatactgctgtaggctataattcccccctgtttttccatcttgttgacagcttgtagagaataaagcaggaattctttttaaaaaaaaaaacaaacactaatgataaaaaaa

SEQ ID NO: 3412 - DNA, 404 bp, Homo sapiens
acagttgctgttgaattataattttccggattattggtctccttcccctggtgcctgagggtgagaggtctgaaaagcatttgtcagagtacattaagcattctcaacctacttcatgctttacgagagctgagaaatcagacgcaccggcctttattattatatatgctacatctgttgagtatttttaaaataccaataagaggacttgtttatttcataaaccacttcttccctctctttcaaagaaaatacattattaccatacttttacattagtctgagaatttttgctaaatatgattaagtattccaaaatataatggcgtcattattcttgacttttttagagaatatacatcttaagactgtattagttctcagagcaaggcatcatctactcc

SEQ ID NO: 3413 - DNA, 468 bp, Homo sapiens
  misc_feature (1)...(468): n = A,T,C or G
gctgcctaggagtacgtagacatncacgaccctcgggntancgacccgnccgcccatgcgtncgtccacgcgtncgggcgagggaggattaaggttcctggcctttgcatgaggctctccgcatggaccctgtggaggccatccagctggaactggacactgggaatgctcatgccgacagggccttccaacagctggagcacaagtttgggcggatgcgtagacactacctggagcggaggaactacatcattcagaatatcccgggcttctggatgactgcttttcgaaaccacccccagttgtccgccatgattaggggccaagatgcagagatgttaaggtacataaccaatttagaggtgaaggaacccagacaccctagaacctggtgcaagttcaagttcttctttataagacacccctacttcaaaaacaagctgattgtcaaggaatatgaagaagaan

SEQ ID NO: 3414 - DNA, 401 bp, Homo sapiens
  misc_feature (1)...(401): n = A,T,C or G
catggtcaaccccaccatggtcttcgatattgctgtcatcgacaagcccttgggccgtatctcctttgagctgtttgcagacaagtttccaaagacaacagagaactttcatgctctgagcactggagagaaaagatttgggtgtaagggttcctgctttcacagaattattccagggtttgtatgtcagggtggtgacttcacatgccacactggtggcacatccatctacagggagaaatttgattgcaagaacttcatcctgaagcatataagtcctggcatcctgtccatggcaaatgctggacccaacacaagtggntcccagttttcatgtgccctgccaagactgagtgattggatggcaagcatgtggcctttggcatggagaaagcatgaat

SEQ ID NO: 3415 - DNA, 434 bp, Homo sapiens
ttcaaggataaaaaccatcaggcccaagtgccatccatagtccatctccagagtcttcctccacaaactgggattcatccccgctgaaaaagcacaatctaacagcaagggaacaaaaaaaccatgctatcacataatactatgatgaagcagagaaaacagcaagcaacagccatcatgaaggaagtccatggaaatgatgttgatggcatggacctgggcaaaaaggtcagcatccccagagacatcatgttggaagaattatcccatctcagtaaccgtggtgccaggctatttaagatgcgtcaaagaagatctgacaaatacacatttgaaaatttccagtatcaatctagagcacaaataaatcacagtattgctatgcagaatgggaaagtggatggaagtaacttggaaggtggttcgcagcaagc

SEQ ID NO: 3416 - DNA, 429 bp, Homo sapiens
  misc_feature (1)...(429): n = A,T,C or G
cgttcagctcccctgcagcctggcttctggtcattgccctgataatcacgtggtcagctgttgccatcgttatgtttgatttagtggattacaaaaacttttcagcaagctctattgccaagattggctcagatcctttaaaactggtacgtgatgctatggaggaaaccacggactggatctatggcttcttttctttgttatctgacatcatctcatctgaagatgaagaagatgatgatggtgacgaagatactgataaaggtctaggagaaatagatgagcctcccttgagaaaaaaagaaatacacaaagataagactgaaaaacaagagaaacctgaaagganaatacaaactaaagttacacacaaaagaaaaagaaaagggaaagaaaaaagtagagaaaaagaaaaccttgaaagaaagc

SEQ ID NO: 3417 - DNA, 425 bp, Homo sapiens
ctcctgtggaggcctgctgggaacgggacttctaaaaggaactatgtctggaaggctgtggtccaaggccatttttgctggctataagcggggtctccggaaccaaagggagcacacagctcttcttaaaattgaaggtgtttacgcccgagatgaaacagaattctatttgggcaagagatgcgcttatgtatataaagcaaagaagtaagtttatgacactgcaacacagtcactcctggcggcaaaccaaacaaaaccagagtcatctggggaaaagtaactcgggcccatggaaacagtggcatggttcgtgccaaattccgaagcaatcttcctgctaaggccattggacacagaatccgagtgatgctgtacccctcaaggatttaaactaacgaaaaatcaataaataaatgtggatt

SEQ ID NO: 3418 - DNA, 424 bp, Homo sapiens
caaattgcggacacaccggggctgccagctcgcctgactcccggcctcttgcgctcctaggggcggagaagggagcgggctcttcgccctttgtggccttctttcactaacttctggactttccagctcttccgaagatcgttcttgcgcaaagcccaaaggctggaaaaccgtccacgatgaccagcatgactcagtctctgcgggaggtgataaaggccatgaccaaggctcgcaattttgagagagttttgggaaagattactcttgtctctgctgctcctgggaaagtgatttgtgaaatgaaagtagaagaagagcataccaatgcaataggcactctccacggcggtttgacagccacgttagtagataacatatcaacaatggctctgctatgcacggaaaggggagcacccggagt

SEQ ID NO: 3419 - DNA, 430 bp, Homo sapiens
  misc_feature (1)...(430): n = A,T,C or G
caatgagtgaaaagcgggaatttcctacagtgcccttggttaaattaggcagttcttttacgaaggttcaagattatctaagaagatttgaaagtataccagatatgcttgaattggatcacctcacagtttcaggagatgtgacatttggaaaaaatgtttcattaaagggaacggttatcatcattgcaaatcatggtgacagaattgatatcccacctggagcagtattagagaacaagattgtgtctggaaaccttcgcatcttggaccactgaaatgaaaaatactgtggacacttaaataatgggctagtttcttacaatgaaatgttctctaggattctaaaataggcaggtactttactatgttactgtaccctgcagtgttgatttttaaaatagagttttctgcagtatgcttttagtcn

SEQ ID NO: 3420 - DNA, 397 bp, Homo sapiens
  misc_feature (1)...(397): n = A,T,C or G
atnaaaatggatagggacccacttgtaggacttgctgatatggagggacgaatgccagggagcggaattggtactggtccaggagttatccaggatagattttcacccaccatgggacgtcatcgctcaaatcaactcttcaatggccatgggggacacatcatgcctcccacacaatcgcagtttggagagatgggaggcaagtttatgaaaagccaggggctaagccagctctaccataaccagagtcagggactcttatcccagctgcaaggacagtcgaaggatatgccacctcggttttctaagaaaggacagcttaatgcagatgagattagcctgaggcctgctcagtcgttcctaatgaataaaaatcaagtgccaaagcttcagccct

SEQ ID NO: 3421 - DNA, 389 bp, Homo sapiens
agactaccatcttccctgcaactctgaatgatggacttaaccaccaccatgtcgagcaaaagagcaaagaccaagaccaagaagcgccctcagcgtgcaacatccaatgtgtttgctatgtttgaccagtcacagattcaggagttcaaagaggccttcaacatgattgatcagaacagagatggtttcatcgacaaggaagatttgcatgatatgcttgcttcattggggaagaatccaactgatgagtatctagatgccatgatgaatgaggctccaggccccatcaatttcaccatgttcctcaccatgtttggtgagaagttaaatggcacagatcctgaagatgtcatcagaaatgcctttgcttgctttgatgaagaagcact

SEQ ID NO: 3422 - DNA, 448 bp, Homo sapiens
agaaaaaacgagcagctgagatgatggcatctttactaaaagaccttgcagaaataggaattgctgtgggaaataatgatgtaaagcagcctgagggaactggcatgatagatgaagagttcactgttgcaagactctacattagcaaaatgaagtcagaagtaaaaaccatggtgaaacgttgcaagcagttagaaagcacacaaactgagagcaacaaaaaaatggaagaaaatgaaaaggagttagcagcatgtcagcttcgtatctctcaacatgaagccaaaatcaagtcattgactgaataccttcaaaatgtggaacaaaagaaaagacagttggaggaatctgtcgatgccctcagtgaagaactagtccagcttcgagcacaagagaaagtccatgaaatggaaaaggagcacttatataaggttcagactgcaaatgg

SEQ ID NO: 3423 - DNA, 529 bp, Homo sapiens
  misc_feature (1)...(529): n = A,T,C or G
cgactgtgcannaattgagcccgattgaccgccactgaaacccgcccgacccacgcgtccggccagggatcgcgtctgatatgctgttggggtcgtgaccgtttgggggccgtggcaggcactggccagacccagccagggatcctcgtattcgtcgagcctaatttccagcagccgggtaggcctcaccagaggctcctttccgtgaggccgcccccaattcctgcccctattctctgcctgggagatggcttccccgagccccccgccggagtcgaagagagacttgataaatcggcctgagaaaataagtaatgctccagactagctctctcatttgtgagttctccaggagtgggattatctggacccagctcagagaagcctgtataaagatgtcatgatggagaattatggaaacctggtctcactgggtntaattccaggttctttggcgaaacccactttgagacaactatctgtgtagaanaaattgccatgaccacaggatgggaagatattgcataag

SEQ ID NO: 3424 - DNA, 426 bp, Homo sapiens
cccacgcgtccgcccacgcgtccgcggacgcgtgggatttaacagaagagaaacctgatggccttatcaatgaagctactaggcaagttgctttggcagatgccattctcattaataaaacagacctggttccagaagaagatgtaaagaaattaagaacgacaattagatccataaatggactaggacaaatcttagaaacacaaagatcaagagttgatctctctaatgtattagatcttcatgcctttgatagtctctctggaataagtttgcagaaaaaacttcagcatgtgccaggaacacaacctcaccttgatcagagtattgttacaatcacatttgaagtaccaggaaatgcaaaggaagaacatcttaatatgtttattcagaatctcctgtgggaaaagaatgtgagaaacaagg

SEQ ID NO: 3425 - DNA, 416 bp, Homo sapiens
atttttgataagaaagcccttttgtttttccttctgttaattttttgtttttttcttggtcgagacagagtcttgccatgctgcccaggctggagtgcagtggtgtgatctcggctcactgcagcctccacctcctgggctccagcagtcctcccacctcaacctccctaagagctgagactacaggtgtgagccaccatgcctggctaatttttagagacagggtttcaccctcttgcccaggctggtcccaaactcctgggctcaagcagtcctcctgcctcagcctcccagagtattgggattataggtgtgagccactgccagaaaaacgttgtctaagacaaggcaggtcttacattatatttaaattttttttaatgatgtctttgttggcagcgcacagccagagaact

SEQ ID NO: 3426 - DNA, 392 bp, Homo sapiens
atgtttatatagaaacttcacagtagacatgatggtggcgtaggtttgcaggaaggatcctttcctacttacagagtgacccaatgtggccgatcccttcaatatttacaacagctgggtgagtggaggcatgatcaactccatttacccgtcaaataaatgaaatttcagagcggttacacaatctgcttgaggtaacaaggccagcaagccacagagccaacatacccctggtgcctggctccacaggagtctgggaagagggagaggaagatggggacaggatgtatcaccaggatgctaggggaagagagaatattgacgtgtggggcagcctgcatccccaaatcaggagcactgggtgctgctgtgttacagtgagtgtaggagca

SEQ ID NO: 3427 - DNA, 404 bp, Homo sapiens
  misc_feature (1)...(404): n = A,T,C or G
gctggtntngaantaccgacctcaagtgatccgcctgccttggcctcccaaagtgctgggatttacaggcgtgagccaccgcgcctggccaaaataaaatgtttttatctttcttcacttaaaactatgaaggccttttcttgttctggtaaccccccacagtgtaattggtgctgaaaatagtttcgtgcctgaggtctgttgtcactcactcactttctgacaattaggtgagccacttgaggattttctggcctgaagttataaaaacttggcatctgtcctaaggtaattgtaaaggcaaaatgaaagcattgaggtgaatttaggttatatggcatttatctggtaatgtgtttcagaaaagctagaatgaaaatgtgatgtaagggatagcaagtgta

SEQ ID NO: 3428 - DNA, 417 bp, Homo sapiens
tgggttcattgggcccttctgtttttctcaactatgtgcatgcactttggagcttgacaaacagccgtgtccagtgaactccccccaaagaaaattgaagttgactcaccgtgaaaggcataccaccaaaagtgactcctaacccatgtacaattcagaaagaaagcactagttaacaagtgcccagtgtgtgattatttagttctagaatctgtccagattttctttgttctggctctgttctcttcatggtggccctgcagtttttagatgttataaaacctccctacgattataatagcatgtaagttaaaagttgttgtgaaaaaacaaatgaagatgcatttataagtagtcttcagtctttgcctgaagaagagtaagttggttatttgaatttatgaagcatttacatag

SEQ ID NO: 3429 - DNA, 401 bp, Homo sapiens
  misc_feature (1)...(401): n = A,T,C or G
cccacgcgtccgcccacgcgtccgggacactgagatagttggggatggaaaacaacatanaaggaagcaaagccagaggctgcgatggccatgctgcctggccctggtcccagacagacaccccagccagctttcctcttgcaccctttgtctactggccgcagcgtcgcagtgggagtcctgggcccacttctccaaatggcacacagaagcctcaacaggcacccacctgggaaaggccaaggccgagggcttggggtgcacagtcaagaacacgcctcagctcagcatttgtgagctgagtcactttggcccatcgtttgtacacagcccccacctgctggttgaccgtgaccacagggcaagcgctgccacagggcgtgggcaggctggaccttcgn

SEQ ID NO: 3430 - DNA, 419 bp, Homo sapiens
  misc_feature (1)...(419): n = A,T,C or G
agaaaatggagagaggcacggacacagagacttggtcataaggcaaacattaacccccagcgaacacgcaacattaaccccccgcgaacacgccgggaatggatggattcccctcttctttcctcccctcccctcttttggattagaagaggagaaagaaaatcttccgcattgtattgcaatccagggaagaattattcctatatgtccaccaaagccgcggcaaatagaaggaggccttcgcagttaatccaagacttcgatgtgtgatcataagcctgacgatttaggcaaaacaaattaaacaaaatccactaggaaaaaataaaagcaagctcaatcctgctacatccttgaaaaaaaaaaaaaaaaaaaaaaaaaaaaaaaaanaaaaaaaaaaacaaactccggtggggggg

SEQ ID NO: 3431 - DNA, 372 bp, Homo sapiens
gcgctgaggctgcagctatcatggtgaacttacttcagattgtgcgggaccactgggttcatgttcttgtccctatgggatttgtcattggatgttatttagacagaaagagtgatgaacggctaactgccttccggaacaagagtatgttatttaaaagggaattgcaacccagtgaagaagttacctggaagtaaagactggctagattatcgaatgttcacattttaaagttctgagagaaataaaaacatgaagaatctgaaaaaaaaaaaaaaaggggcggccgttttaaaggatccttgggggggcccaagtttacgcgggcatgcaacgtaatagttttttccttatagggagtcgaattataac

SEQ ID NO: 3432 - DNA, 417 bp, Homo sapiens
cggacgcgtgggaaaaaccgcatcccaggttctgttaatttagtaaataaacaagtcaaagacttgtggaaaataggaagtgaacccatattttaaattctcataagtagcattcatgtaataaacaggtttttagtttgttcttcagattgatagggagttttaaagaaattttagtagttactaaaattatgttactgtatttttcagaaatcaaactgtttatgaaaagtactaatagaacttgttaacctttctaaccttcacgattaactgtgaaatgtacgtcatttgtgcaagaccgtttgtccacttcattttgtataatcacagatgtgttcctgacactcaataaacagtcattggaaaaaaaaaaaaaaggggcggccgttctataggatccctaaaggggcccaa

SEQ ID NO: 3433 - DNA, 408 bp, Homo sapiens
gccaaactaaaacctgcattcatcaagccctacggcacagtgacagctgcaaattcttctttcttgactgatggtgcatctgcaatgttaatcatggcggaggaaaaggctctggccatgggttataagccgaaggcatatttgagggattttatgtatgtgtctcaggatccaaaagatcaactattacttggaccaacatatgctactccaaaagttctagaaaaggcaggattgaccatgaatgatattgatgcttttgaatttcatgaagctttctcgggtcagattttggcaaattttaaagccatggattctgattggtttgcagaaaactacatgggtagaaaaaccaagggtggattgcctcctttggagaagtttaataactggggtggatctctgtcc

SEQ ID NO: 3434 - DNA, 392 bp, Homo sapiens
  misc_feature (1)...(392): n = A,T,C or G
naacgcgtccgggcacagagctatttcagccacatgaaaagcatcggaattgagatcgcagctcataggacaccgggcgccccttccaccttccaaggagctttgtattcttgcatctggctgcctgggacttcccttaggcagtaaacaaatacataaagcagggataagactgcatgaatatgtcgaaacagccagtttccaatgttagagccatccaggcaaatatcaatattccaatgggagcctttcggccaggagcaggtcaaccccccagaagaaaagaatgtactcctgaagtggaggagggtgttcctcccacctcggatgaggagaagaagccaattccaggagcgaagaaacttccaggacctgcagtcaatctatcggaa

SEQ ID NO: 3435 - DNA, 563 bp, Homo sapiens
  misc_feature (1)...(563): n = A,T,C or G
ggcgatgacctcgtgaccgctacgaattcccggccgacccacgcgtnccgggattgttcgcgtaatgccaacagagacttcagaaatgtcatataggctatagatttgattcaaggtagtgtcttggtgctgcgtaccttataagtctgtttgcttgagagtaaatcaatctgttgacttttgagattactactgataagggttcggtactgtgcgtttttctccccctactggtcttttgttgtaatattggaaaagcgtaggagcagtgattagaagtctgagatacaagtactccagcatcggttcctccttgaatttttaagtaatagagggcttgggaagtgacccatcctagagatgttacagtcctacttgtcctctagagcagaactctgaccaataacagtcttctcgaacaccgcacgtgcgtccatancccaatggtaaatgagatggatctgttcctctnntgtgtgcgagnntcacttgactggatttctttcttttctgcgntctctttctgtcgcccttgtctgcctttagctcgaatttcttctacg

SEQ ID NO: 3436 - DNA, 509 bp, Homo sapiens
agccaaaaccacgccactgcactctagtctgggcaacagagcgagactccatctggaaaaaaaaaaaaaaaaaaattaggggccataccttaatataatattcctcccccccctggaaacaaaaaaaaaataagggcttcttaagcctaatttaaggaaatgggccccaaaacccttttgaaacctggttgcagtttaagtataaaacggggtcttgtttttttaaaagaaaaaaaaaaaaaaaaaaaaaaaaaaaaaaaaaaaaaaaaaaaaaaaagggggggggggtttttttataatttttgggggggggccaaaaaacggggggggagaaaaattttttttttttttttatgggggggtttttttttacccctcgggggttttttggagaaaactcttttttttggggggggaattttgggcaaccacccccccccaagattgcggctggggggagaaaaaaaattttgggggggtggcggggaaacccttcccttgttgtgggg

SEQ ID NO: 3437 - DNA, 502 bp, Homo sapiens
  misc_feature (1)...(502): n = A,T,C or G
tgctccccaactgatatcatggcatcgggcacggaaccctgggncgacccacgcgtccgattaaataagtaaaaatcaaaacaaaaagactttttctcttagatttgtataacttaattttcttatgctggggaaaactgtggaaaaatattcccttatacactacttgaattagtgttaattttgcacttttcaaaggataatttataaatgtttattttaaaatatctatatctgtactctttgatccagaaaattctgctctacaaatttgaccaataaaataaaaaatcacaaaattattctgtattgtaagaataagaatgctattgcaacagtattttaaatagcaaaatactgtctataacctaaatgtcatttaatacatttgttaatacatttattatattaattgaatggaatatatatacaatggattagacttgaatataatgatatgaaaagtttagaatgaaagtgcaaacttcttcttctgactatt

SEQ ID NO: 3438 - DNA, 414 bp, Homo sapiens
  misc_feature (1)...(414): n = A,T,C or G
catatagtaagtattacttccgtagtcctcaaatttactataacttttgtacttagtatatgttttatatttggaaaacagcactacgcttagttttcctgtagttcctgagtgatgtctgtgtgttccttgcctgcccttttttgtgagcacagattagtctgttatccatggctggcacttcacttatgatcctttctctgctagatttttatgcagctctctatgaagtttcatggcccatagatattcaaaagcaagatattctatacatatgtgtatatgtatatatactccttatgttaatactaaagtgtttatgctgagttgctgcctttccccgtcatgtatccatgtgcatgctcttagagaccttgaatggttgagggtaaagtgatttattagtaattctan

SEQ ID NO: 3439 - DNA, 447 bp, Homo sapiens
  misc_feature (1)...(447): n = A,T,C or G
caaatcttgtccaagaccatgaaagnggcatacctctaagatcctgcaagaaccacaacattcctgggcttggggtgcccctaaagcagatatagttgagatcacaacactcaaagtcctttcaaatatctggaaagccttgccaagaagaatggccacaaataagcccagacagtacagactatataataaatacctaacacttcaatgcccagatgctgaagaatatctattagcaccaaccccatggcctccatgactttttcaacanagaaatatttatggaccgcggttgcagaaaacgtccccccaagagatggtgggagcgccccggaacgccttttgttgggcgctactgctggggggggcactttggtagcagggcgcggccggctacggcgtattgcaggttgcagtgcatgagattataaaacgagctgcgggttn

SEQ ID NO: 3440 - DNA, 408 bp, Homo sapiens
aaatgatttccacgccttcaccaaagaaaagcatgttaatgactatgtatgctgacgaagtggaatctcagttgaaaaatattaggaactccatgagggcagatagtgtatcttcaagcaatatcaaaaaccgaattggtaacaaattaccacctgagaaatttgcagatgtccgacatctattagatgagaaacgtcagcactcccgtccacggccaccagtcagcagtactaaatcagatatacgccagcggttaggaaaaagaccacattctccggaaaaggcttttagtagtaaccccgtcgttcggagagagccctcttctgatgtgcatagtaggctaggtgttcccaggcaggatagtaaaggcctctacgccgatactcgggagaagaaatcaggtaatt

SEQ ID NO: 3441 - DNA, 401 bp, Homo sapiens
  misc_feature (1)...(401): n = A,T,C or G
gcggtgagccttgaagcctatggcgcgggcccgggtggagccgccgcaggtgcagatttgtggtggttaagaaacaatgaaggagagagtggagagagaattttaagagtccatttgttaaggaattttggtgtcgaggctgggtgtggtggctcacgcctgtaatcctagcactttgggaggcctaggcgagcagatcacttaagctcaggagttcgagaccagcctgggcaacatggcgaaaccccatctctactaaaaaatacaaaaattagccaagcatagtggcgcatgcctgtaatcccagctactcgagaggctgaggcacgagaatcgcttgaacccangaggcggaggttgcagtgagccgagatcgtgccactgcactccagcctgggtga

SEQ ID NO: 3442 - DNA, 413 bp, Homo sapiens
acagctactttaaataccagttgtgtagattcccacacttttctaccaatggagaggtttacacaagcataatttaagttacaattacactaattaacatctcatttgcataaattgttgaagtcaaaacaacaaagaattgtctaagaagcttaatcctatttgtccaaaatagaaagattttttttttaaaaaaaaaactatgctctaaaaattggcagcttaagtatgtctttagtatgttgagctgtgtccttttaaaaataaatgttttcaattttcttaataatatatttctctattctttttagaatccttcatttttagtatacttttaaaattgaacacacacaacactttggttcctaaagtaatgataacaagaaattaaaatcaaggtacagtatcatttt

SEQ ID NO: 3443 - DNA, 392 bp, Homo sapiens
ctaactttgactcatggactgcttgtgaagcaggaagacatgaagggccattttttcatctcaatccctgtgaagtcacacattgctcctgtcgctcggttgctcatctatgctgttttacctaccggggacgtgattggggattctgcaaaatatgatgttgaaaattgtctggccaacaaggtggatttgagcttcagcccatcacaaagtctcccagcctcacacgcccacctgcgagtcacagcggatcctcagtccgtctgcgccctccgtgctgtggaccaaagcgtgctgctcatgaagcctgatgctgagctctcggcgtcctcggttacaacctgctaccagaaaaggacctcactggcttccctgggcctttgaatgaccag

SEQ ID NO: 3444 - DNA, 431 bp, Homo sapiens
  misc_feature (1)...(431): n = A,T,C or G
aatgaactgaccactatctacaatcatcctgcnaacaattattatcgcctcactgccagctcagggttctaaacccagacactgtttgtaatagactggaaataaaatgttcttttcttaaaaaaaaaaaaaaaaaaaaaaaaaaaaaaaagggggggggcccttttaaaaaaacccctggggggcccaaatttaacccggtgtggaaagaatatatttttcccctaaaggggggggtaaaaaaaaaaaagggggaaatttttgaaaaaaaactaatttttgggggggaaaaaaattggccaaaccccccaacaaaaaaaaaacccttaagggaaaaaaaaaattttaaaggggtaaagggggaaaaaaaactccatttctttggtttttaaaaaattttgggannnnnnnncnnnaaaaaaccattctta

SEQ ID NO: 3445 - DNA, 454 bp, Homo sapiens
  misc_feature (1)...(454): n = A,T,C or G
nggagcggcccgnctnaccccnnaagcttttgncgnagcanngtcntnannttnngggnaaaccacccgtccggtagatggaaccctccttttactcctctcggtaggccctggcccttacccagacctgggcgggctcccactccttgaattatttccacacttccgtgtcccggcccggccgcggggagccccgcttcatctctgtgggctacgtggacgacacccagttcgtgcgcttcgacaacgacgccgcgagtccgaggatggtgccgcgggcgccgtggatggagcaggaggggtcagagtattgggaccgggagacacggagcgccagggacaccgcacagattttccgagtgaatctgcggacgctgcgcggctactacaatcagagcgaggccgggtctcacaccctgcagtggatgcatggctgcaagctggggccccgggg

SEQ ID NO: 3446 - DNA, 405 bp, Homo sapiens
gtacagtcttggctcactgcagcctccgcctcctgagtagctgggattacaggcatgtgccaccacgcccggctcattactgttttttttgtagtgacgaggtttcaccatattggccaggctggtctcgaactcctgatgacctcaagtgatccgcccaccttggcctcccaaagtggtgggattacaggtgtgagccaccgcgcccggcctcccctgctttcatgtttgcttacccagtgtctcagtctgtgccagcagcaccactgtctgttatggacaaagcacagaagcggggatgcgaggggaggtagagggaccgccagcctgtcaatgcttaactggctgttgctgacagatacagaaggatttgtggggtacagaggagttctgctttaagtcact

SEQ ID NO: 3447 - DNA, 405 bp, Homo sapiens
tttacaacgaaatcctcaaatctagcccaatattcacttgcagattccacaaaaagagtgtttcaaaactgttctgtgtaaagaaatgtacaactgtgttagttgaggacacacatcagaaactagtttctgagaatgcttctgtctagttgttatcggaagatatttccttttccaacgtaagcctgaaagcgctccaaatgtccacttccatatactaaaaaaagagtgtttcaaacctgctctaccaaagggaatgttctactctgtgacttgaatgcaaacatcgcaaagaagtttctgagaatgcttctgtctagattttatctgaagacaatcccgtttccaacgaaatcctcaaggctaggcaaatatactcttgcagattccagaaaaagagtgttt

SEQ ID NO: 3448 - DNA, 476 bp, Homo sapiens
  misc_feature (1)...(476): n = A,T,C or G
tcctgatgttggccagttgaagatgaacttagtggacaggctgaagagactggggatagccagagtggtcaagaaccctggtgcccaagagaatggaagatgccaggaggcagaaattggtcctcaaaaaccagattctgctgtttatttaaattcaagtagcagtttattaggtggactaaggaggaatcagagtcttccagtcataatgggtagctttgctgccccagtttgcacatcctcacccaaaatgggtgtcctgaaggaggactgaggttcagcagttaactgaccttttatacaagttagcacatgaaggatagatatgcactgaaacatgtggtctggtctgacttgagagaaaaggaatgttgcacaagggttgtgaatgtgaaagggggaatggaggaatggaaataaaattgngatgagccctaatggaggaagtcgggcanattgaaagtataaatgaatgg

SEQ ID NO: 3449 - DNA, 392 bp, Homo sapiens
tttgggaggctgaggctggtgtatcacctgttgtcaagagttcgagatcagcctggccaacatggggaaatcccctctctactaaaaatataaaaattagccaagtttggtggcatgcacctgtaatcccagctacttgggaggctgaggcaggagaattgtttgaacccaagaggcagaggttgcagtgagccgagattgcgccactgcactccagcctgggcaacagagtgaaactctgtctcaaaaataataataataaaaaaaagcttccatctcccagcccttcttgcaagcaagggcaggccatttcctccggtcctggctagtatgaatatgagaagtcactggatgtgactctggggaagatattgtgttcagggatggtttat

SEQ ID NO: 3450 - DNA, 490 bp, Homo sapiens
cacggatttgcattgccgaggacgggaccccagggcagcgaagcagaatggccaacatgcagggactggtggaaagactggaacgagctgtcagccgcctggagtcgctgtctgcagagtcccacaggccccctgggaactgcggggaagtcaatggtgtcattgcaggtgtggcaccctccgtggaagccttcgacaagctgatggacagtatggtggccgagtttttaaagaacagtaggatccttgctggggacgtggagacccatgcagaaatggtgcacagtgctttccaggcccagcgggctttccttctgatggcctctcagtaccaacaaccccacgagaatgacgtggccgcacttctgaaacccatatcggaaaagattcaggaaatccaaactttcagagagagaaaccgggggagtaacatgtttaatcatctttcggccgtcagcgaaagcatccctgcccttggatggatagctgg

SEQ ID NO: 3451 - DNA, 414 bp, Homo sapiens
  misc_feature (1)...(414): n = A,T,C or G
tgaatcttgcttttaccggaaattaacagacacctcaaaagatgaagagaaccatgaagagtctgagtcattgcaggaagatatgctaggaaacagattattacttccaacaccaacagtaaagcaggaatcaaaggatgtggaagaaaatgttggcctcattgtgtacaatggtgcaatggtagatgtaggaagcctcttgcaaaaattggaaaagagcgaaaaagtaagagctgaggtagaacagaagctgcagttactagaagaaaaaacagatgaagatgaaaaaaccatattaaatttggagaattccaacaaaagcctctctggtgaactcagagaagttaaaaaggaccttagtcagttacaagaaaacttaaagatttcggaaaacatgaatttacaatttgaaan

SEQ ID NO: 3452 - DNA, 483 bp, Homo sapiens
  misc_feature (1)...(483): n = A,T,C or G
cacacataagatcactatattcatgataaatctgatgctgcagtgtaatgagaaagggacttttttctataaatgattctgtaataaacaaatgtccatattaaaaacatgttataacctctttctgatatcatactaaaaaattgattccaggcagcttgcagatgtaaatgtaaaggcaaaacaaacatcaacacaaaacacccagaagaaaacaaaagaatatctttgtggcctggtttaggcagttttcagaaacaggacatatctaacaccnnnnaaaaaaaaaaaaaaaaaaaaaaaaaaaaaaaaaaaaaaaaaaaaaaaaaaaaaaaaanngggggggggcctttttaaaaaaatctcgggggggcccccatcttccccggggggggaaaatttttttttttttttttttggggggctttaaaaaaccccctgggggatttttggaaaaaaccctttcttggggggggaaaaaag

SEQ ID NO: 3453 - DNA, 407 bp, Homo sapiens
cccaactcaaaacaggagctcgagcctgcctgtatttgagactggagctgcctgtatgaggactggatcaactgctagtcacgttatatccaaatctgcattatcattgggcacattttcacagaattttactgaattattccttaattgtttaatggttgggaatagtttgggaattaccttccatcaactctgctaagaaaggaatggattctggtagcaagacaatataattctcctttagtttttcagccagtgctaacacagtaatcaaagcagcaaatcgaacctgaaagggataaaagagcaaagaaataaaaagtagtgttactgtatttattatcttaagagctgtactgacttgagacaagctctaactttttaaacattagttcacacgcgtttat

SEQ ID NO: 3454 - DNA, 402 bp, Homo sapiens
  misc_feature (1)...(402): n = A,T,C or G
gcagacaatttttcgctccatgatgcgttatctgggtctggaaacccaaaccctcaaggatggcctggcgcatgggggaaccagcctgctggggcagggggctacccaggggcttcctatcctggggcctaccccgggcaggcacccccaggggcttatcctggacaggcacctccaggcgcctaccctggagcacctggagcttatcccggagcacctgcacctggagtctacccagggccacccagcggccctggggcctacccatcttctggacagccaagtgcccccggagcctaccctgccactggcccctatggcgcccctgctgggccactgattgtgccttaacctgcctttgcctggnggagtggtgcctcgcatgctgataacaattctggg

SEQ ID NO: 3455 - DNA, 399 bp, Homo sapiens
cccacgcgtccgagcaattgtctgattaatcactggccccttgaagacagcagaatgtccctttgcaatgaggaggagatctgggctgggcgggccagctggggaagcatttgactatctggaacttgtgtgtgcctcctcaggtatggcagtgactcacctggttttaataaaacaacctgcaacatctcaaaaaaaaaaaaaaaggggggccctttttaaaggatccttgggggggccaaacttaacgcgggcttgcaaagtattatttttttccttatggggggccaaattaaaacctacctgggaatttttgaaaagaaccctttcttttggggggggacatattgggccaacctccctacaaagattaaaggctctagggaaaatataaaattt

SEQ ID NO: 3456 - DNA, 402 bp, Homo sapiens
  misc_feature (1)...(402): n = A,T,C or G
cttgcccagcaacctttcgcggggcatgtctatctatccaggctacatgtccccacatgcaggctacccagctggtggcctcctacggtcccaggggcctccatttgactctcatgaggttgccgaggttgggttcagctccaatgatgatgaggataaagacgatgatgtgatagaggtcactgggaaatagctagggagcccctccccacctcacttggggcccccagcaggatgcccaccaagctggaaggcagagatttagaccttttgagaataggacacttggcctgagggaaaaggaagaggacaaaggagggtggttggccaaagtggcagagctctgttgctcgttaacaaaagaggcgggnntncctaanataagncggcattttggtgggg

SEQ ID NO: 3457 - DNA, 481 bp, Homo sapiens
  misc_feature (1)...(481): n = A,T,C or G
cggacgcgtgggaacatatggagctgtaaaaatcaaagatggtcagagggtggtaagaggaatggaagagtttcacatccaactatctatttgatagcgatttctacttgcggttttgaaaaaaatctcaagtgtaatatatccaaagcaatgcttctgattttcaaggttgaaaatggttccaccaaccctcatgactcaggtaattccttatacccctaccacaacttctttatagagttttattacatctatctctagcaaagattttggttcagaaaatctctgttgatctctgcttatattttcagtcaccccatcctannnaaaaaaaaaaaaaaaaaaaaaaaaaaaaaaaaaaaaaaanggggggggccccttttaaaaaatccttgggggggcccaattttcacggggttggggaaattatttttttttcttttaggggggggtatataaaacccccctggggtttttgaan

SEQ ID NO: 3458 - DNA, 426 bp, Homo sapiens
aggttgctccacaggtagctctaggagggctggcaacttagaggtggggagcagagaattctcttatccaacatcaacatcttggtcagatttgaactcttcaatctcttgcactcaaagcttgttaagatagttaagcgtgcataagttaacttccaatttacatactctgcttagaatttgggggaaaatttagaaatataattgacaggattattggaaatttgttataatgaatgaaacattttgtcatataagattcatatttacttcttatacatttgataaagtaaggcatggttgtggttaatctggtttatttttgttccacaagttaaataaatcataaaacttgaaaaaaaaaaaaaaggggcggccgttttaaaggatccttgggggggccaaagtttacccgtgcttgcaaag

SEQ ID NO: 3459 - DNA, 398 bp, Homo sapiens
  misc_feature (1)...(398): n = A,T,C or G
gaaactcagaaagctttctgaaaataagcttctatttaaaaacagaaggctttgtaactgctggtgtgtcttcagaggttaggatatatcggcagtttttatagctctttttcccctctactaaattaaaaacaaataaaaagccttaagctggagatttcaagctgattaggaaatcaggctacaggaaacaatactgactgacctatggaacagtcttgcatttagcacagtttaacctactggtagctgagatccttggtcatggagttacggaagcattctgatttgtgggatgcttatagatttagctcccttaaaataatgaggaagtctgtattttacttttcataaaagacagnactatattcactcttagntactgactttttttcccg

SEQ ID NO: 3460 - DNA, 459 bp, Homo sapiens
ctctgtctcaaaaacaaacaaacaaacaaaacaaggaacaactctgtttttctggctagataactaataaacttcagcatcttaaggagagccatgagatgggacaggccctacagcaggccagaaatgtcatggtaagtgatgattgaccttacaccaccactgggtctcctgtgaagatgaagaatggagaatcctgggtggttagtagatggtgatactaagtcgtggtggtgaagggaggtttccaaacatttgtaaagtacatctccttatgcggagcttggaattggggttagcggttttcctccccagtgcccctgtttcctgcttagtgactttatttgatctcacctacccatttttttctctacagcaatcatgggtgcttatctctaaagagctgatatccttgcttcacctatccctggtgcatttagaagaagataagactactgt

SEQ ID NO: 3461 - DNA, 400 bp, Homo sapiens
cccacgcgttcgctctccaagctgctctcctatcctacagcctgaaactcccttagagaaagatgcttggctatctgtcatggaaaccccagccagaaaagaaatatcactgtcagagcctgccaaacctgggtctgcccacgtgcaatcacgaacaccacaaggcgggttgtacaacagaccatgcctgcatagactgaagtacttattacgtcctccggttcatcacctcttctttcagacgctaataccggataaagacacaagagagaacaagggtcaaaaattagaacccatccctcatcgaagactaagaatggtaacaaataccattgaagagaattttgctctggcgactgtgcagatgttgatggactttgtggcaccccagcattaccca

SEQ ID NO: 3462 - DNA, 414 bp, Homo sapiens
ggaaaccccatttctacgaaaaatttttaaaacatagccaggcatggtggtacatgcttgtagtcctagcttctcaggaggctgaggcaggaggatagcttaagcccggatggcgccactgcattccagcctgggcgacagagcaaggccctgtctcaaaaaaaaaaaaaaagggttttcccctccccaataaaaggcaaacaacaagggctcattacacttttttagggataaaaagccggaaagctttttttttttacggaaataacctttaaaaagggcaaaaaggccgggggggggggctctttcttgaaaccccacctttttgggaggccagggggggggaatcacagggtaaggattttaaaaccaccctgcccattttgtaaaacccccgtttttacaaaaaaaaag

SEQ ID NO: 3463 - DNA, 428 bp, Homo sapiens
  misc_feature (1)...(428): n = A,T,C or G
taaataccaagccagaaatgtctggctctnnncactgtannnnnnnnnnnnnnngggtgtagaaaactcagcagatcaccaggctctggaaaagatattggnnggnnnnnnnnnnnntgtgtggtggnnnnnnnnnnnnnnnggggnnnnnnttggggggggggggtttttnnngggggggtggnttttttttttttggggggggggggggctgtaattaatattatttactttgtttttctctatttcaaaaagttctggctctttcacttagtagctgtataatttggggaatgttttgtctttcataaatggatataataatggtatatggtatgtagggtcattgtgagggctaaatgagataatatatttaaaaagcatagaacatcattcaagaaaaaatatctgtcatttctgtcatcatn

SEQ ID NO: 3464 - DNA, 390 bp, Homo sapiens
atctctctaggagctgacactcgaaccttcacgacccattcggatttttccaggactcaggagtgggactgggaagaaggggaccgctttctgcaattggcctcgacactggctgccaagaagacctgtcgcctttgtttttaagtctccagaaatggaagaagaaggcgaagtcagttgaagtcacgagaaatcagcgaggcatttgaaggcgcttcctgaaaacctttattccctggcacgttgtctgtttcaacagccctgcccctcctcggagcctgcttgtggaattcttccccttcgggtgtgtggtggcattccccgccacgtccaatgtggactccaaaggatttgtcccttctttgtcatttgaaatgaaatgatggccac

SEQ ID NO: 3465 - DNA, 448 bp, Homo sapiens
  misc_feature (1)...(448): n = A,T,C or G
nactgaaatcttaangacctgccaggnaacttngggncgacccacgcggccggaaaagagaagtcttgaggcccagtgcagnggtgttagtgagtatacagtaaacaaaagaaataaaaattggggccttataggcataaaaacattggatttgctagactatgatacagaagttatcactttcctaatctctacagctgggttcagatatgagctgtctgaattttaccttcccttaccaggtgttagtaacatcaattaattgtctttgttggctttgctcataagggttcagtttagatcctgattgtattcttacccctccataaattatcttcaacattgatcgagctccattcagattgtgtcacttgtagcaaactttataaaagtaccccttacctccatccctgagtctaagggactggtaatacttatagatatcgat

SEQ ID NO: 3466 - DNA, 393 bp, Homo sapiens
gaatagcaccaaaccatgggcttactttccctttaaatccatgcctcaagtatatgtacccaccaccttccagcacaatcctagcaaacattgtaaatgccttggcaagcgtgcctaagttctatgtacaggtccttcatcttatgaataaaaagaagttgcccacaccttttggaccaattactgcgcgacctcccatgtatgaagactatatgccattgcatgcacctcttccacccacatctcctgagccacctgaggaacctcctttgccagacgaggatgaggaattatctagtgaagaatcagaatatgaaagcactgatgatgaggaccgacagagaatgaacaaattaatggaactagcggatcttcagcccaaaagacctaaga

SEQ ID NO: 3467 - DNA, 401 bp, Homo sapiens
  misc_feature (1)...(401): n = A,T,C or G
tcagtggtcagcttcatgctattttccccatccttccatctctcccttttccattttcattagtccctctactctgtatctcagaagttctttaccttttttgtgctgtgggccaattggcaggccctgtaaagcctgtggacacatccccagaataatgtttttaaatgtataaaataaaatacattaaaatatgaaggaaaccaattatattgaaattcagttttcataaattaataacatacttaaatagagatgagcataaatgagactttgagatctataaaaaccataatctcatataaaaatatctaatatcagntacaatctcaggtacttctattatggnttgttgcttatctttatgattaatgtatatgccaaatttcagttcaaggtta

SEQ ID NO: 3468 - DNA, 399 bp, Homo sapiens
ggatataggctatgtgccaggacagggcctggatggaggagcctcagactcagaccaaataacagtcgtttctggagaccccagtgaggaaaatacaagaccaagagcagcaaagaggccaagttgtcacaagcaaaacaggaagaaaatataacactgtgtatttaagcacctttttcaaggctcttaatggataatatttattcatgggaaaaggtggaaaacaaaaacaccaacggatttttgtgaaatgtttttctccatggacccaacacctttgaaccaaaacaatgcattttgtgagggatttttttttctccttttatagcaaaagcttttaggctaagaagtcagttattgctgagttctctctccattcccccaggtgggtgaggtcaa

SEQ ID NO: 3469 - DNA, 394 bp, Homo sapiens
tgttgaccaggctcattctttaagcattctccatgcttaaaccagttccataatccctaggcctgtactccagggattgagactgaaaggatcatttatgccatgtttctctaaaagcatcattgctggaagacttttgataagtctgatgtgtctcaagctattctcaggccttttttgtagagtttagaaatgaagtatttgaatcaatttagtatctcctttactatgtttctccttttaatctcagccaaccccctacctgcaggtaaacccagcattcattaagagctgggttggggtactctattctgtatgcatcataatagcttaacattatttagtagctgtaacttacaggtttaatgctagatgaggatgtctcaagccgtga

SEQ ID NO: 3470 - DNA, 403 bp, Homo sapiens
cttatttaagacaacagtgactgaaaatggaaagttgggttttgaatggcactgcttatgatttgggccaattagagagatgcagagcaaggtggatgagaatgatcatcttgtctttgttcatgaaactgtcaatagctacatatagtgtccacactctcctgaagtagttccacagttttcacacatatttctagcagttgaagcctttcttttacttaatgcttacttgaaagtcaaaagggaaaagaaggatttctctggcacaggtaggaaagaagcaagaagtggggtggaataggtgagcagagcctcactaccagataacccctctctcaagtgtttctcagggaagcccttaggctacctgaaacacatgttaaaatggcaatttataagggat

SEQ ID NO: 3471 - DNA, 509 bp, Homo sapiens
  misc_feature (1)...(509): n = A,T,C or G
cccacgcgtncgccacgcgtncgactagttctagatcgcgatcggccgcccttttttttttttttttttttttttttttnaaaggggggggttataaaaaaaaccttcggggccaaactttttttggggggtttatttttgcattcaaactcgcgggcgaaaaatgtttttttattttaaattgggagcggccgcccttaaaaaaaaaaaaaaaaaaataacttttttttttccccttttgggggggggggaaaaaaaaaaaaaaaaaaatgggggaattttaaaaaaaaacacctttttttaaaaaaaaaaaaatttttttaccctttaaggttgggacgccaaaaaaaaaaaaaaagaggggggggccctttttaattttccctttggggcccccttttacacgaaacacaaaaaaattgcttttctttttatggaaggtctttttcttcctcaaaaagaatattttagagaaacttattttgtggggggaaaaaaaaaaaaaaaan

SEQ ID NO: 3472 - DNA, 386 bp, Homo sapiens
aaatacatggtttttgtggaaatcattatatgtttgctttagattttcttctgttttcaccatcataacacttaagttaaatcatgatgtaaaattttagtacttaaaggtttttaattatctcgaaggccaagcattgcatttgtaaacagtcctggtcagtagttaaataatgtttcaattaaagtgctgtaaaataaacttcaaagtggttataagttaaaaaaaaaaaaaaaaaaagggggggccgttttaaagaatccttgggggggcccaagtttacccgggcttgcaagggaaaatttttttccttatagggggccgaataaaaacctacctggggatttttggaaaggaaccttatttttggggggggaaaaaatgga

SEQ ID NO: 3473 - DNA, 429 bp, Homo sapiens
cgccatgcggaacttgagggctttctcggaccgcgtcgttgcggattacctgctttagccccgaccaaaccgtcctctacagccttctggccccggcgcaagctgcccgtactggccgtggcatgagggagccggactagctgatgcccgattcgggggctgtgtttacattggggaaaagaacatttggtgcaaataatcccggtaaattctggtttaaaaatgatgtccctgtacatctttcatgtggagatgaacattctgctgttgttaccggaaataataaactttacatgcttggcagcaacaactggggtcagttaggattaggatcaaagtcagccatctacaagccaacatgtgttaaagctctataacctgaaaaagtgaaattagctgcctgtggaaggaaccacaccctggtgtcaa

SEQ ID NO: 3474 - DNA, 392 bp, Homo sapiens
attgtctgattcgattgctgccacctcagagctagaaagaaaagaacacgaacaaaccgattctgaaatcaagcagctaaaggagaaacaagatgttttgcaaaagttacttaaggaaaaagacctcttaatcaaagccaaaagtgatcaactactttcttccaatgaaaatttcactaacaaagtaaatgaaaacgaacttttgaggcaggcagtaacaaacctgaaggagagaatattaattctagagatggacattggcaaactaaaaggagaaaatgaaaaaatagtggaaacatacaggggaaaggaaacagaatatcaagcgttacaagagactaacatgaagttttctatgatgctgcgagaaaaagagtttgagtgccactcaa

SEQ ID NO: 3475 - DNA, 388 bp, Homo sapiens
tcgctttaggagccgcgggttatggcgcaaacatggccaagggcaagaaccacaccacacacaaccagtcccgaaaatggcacagaaatggtatcaagaaaccccgatcacaaagatacgaatctcttaggggggtggaccccaagttcctgaggaacatgcgctttgccaagaagcacaacaaaaagggcctaaagaagatgcaggccaacaatgccaaggccatgagtgcacgtgccgaggctatcaaggccctcgtaaagcccaaggaggttaagcccaagatcccaaagggtgtcagccgcaagctcgatcgacttgcctacattgcccaccccaagcttgggaagcgtgctcgtgcccgtattgccaaggggctcaggctgtg

SEQ ID NO: 3476 - DNA, 390 bp, Homo sapiens
  misc_feature (1)...(390): n = A,T,C or G
cccacgcgtacggctcgcagtaccaaaacaggcactgcatacactttctttacacctaataacataaagcaagtgaccgaccttatctctgtgcttcgagaagctaatcaagcaatataatcccaagttgcttcagttgtgtcgaagacagaggttcaggtcgttccaggggtagaggaggcatgaaggatgaccgccgggacagatactctgcggtcaaaaggggtggatttaatacctttagagacagggaaaattatgacagaggttactctagcctgcttaaaagagattttggggcaaaaactcacaatggtgattacagtgctgcgaattacaccaatgggagctttggaagtaattttgtgtctgctggtatacagaccagtn

SEQ ID NO: 3477 - DNA, 391 bp, Homo sapiens
cccacgcgtgcgggaattcttctcgggaggcagagctgggtcctttccaccatggcacctaacaaagcaaagaagagagccgggggtgccaactccaacgtgttctccatgttcgaacagacccaaatccaggaatttaaggaggccttcactatcatggaccagaacagggatggcttcattgacaagaacgatctgagagacacctttgctgcccttgggcgagtgaacgtgaaaaatgaagaaattgatgaaatgatcaaggaggctccgggtccaattaactttactgtgttcctcacaatgtttggggagaaacttaagggagcggaccctgaggaaaccattctcaacgcattcaaagtgtttgaccctgaaggcaaaggggtgg

SEQ ID NO: 3478 - DNA, 410 bp, Homo sapiens
  misc_feature (1)...(410): n = A,T,C or G
attttacagatgaggaaactgaggcacaaggaagccaaatgatggtgtctctgggtcaccttgctagtaagtggtgagtggggaatgcaggctgtcctgccccagagtctgcccccctgacttaccaccgtggggatttgccccacaggccccgctgtgagttggcgtctctccctgagcctatgttgtgtgcccctgcagatactcgcaggcaagccagctgcccagaagtcacccagcgacctgctggatgccagcgcagtctcggccacatctcgctacatcgaggagcagcaggccacacagcaggttttggggccagcggggtggatcttgggaggggagagccttgcagactgatctgaggtctggggtccctttttgttgttgttggtgttgatatggagttn

SEQ ID NO: 3479 - DNA, 417 bp, Homo sapiens
agcacttactttttttggaagttatttaatttattttagactcaaagaatataatcttgcactactcagttattactgtttgttctcttattccctagtctgtgtggcaaattaaacaatataagaaggaaaaatttgaagtattagacttctaaataaggggtgaaatcatcagaaagaaaaatcaaagtagaaactactaattttttaagaggaatttataacaaatatggctagttttcaacttcagtactcaaattcaatgattcttccttttattaaaaccagtctcagatatcatactgatttttaagtcaacactatatattttatgatcttttcagtgtgatggcaaggtgcttgttatgtctagaaagtaagataacaatatgaggagacattctgtctttcaaaagg

SEQ ID NO: 3480 - DNA, 526 bp, Homo sapiens
  misc_feature (1)...(526): n = A,T,C or G
cattgaccccgtggtagaagccggtagtaccggtcgacccacgcgtncgacagcacacacgtgaaatcatgtttccagaacatggagatctgcaagcgtcgggtgaatatgtatgacacggtgaaccagagcaaaacccctttcatcacgcacgtggcccccagcacgtccaccaacctgaccatgacctttaacaaccagctgaccactgtccacaaccagccctcagcggcatccatggctgcagtggcccagcggagcatgcccctgcagacaggaacagcccagatttgtgcccggcctgacccgttccagcaagctctcatcgtgtgtccccccggcttccaaggcttgcaggcctctccctctaagcacgctggctactcggtgcgaatggaaaatgcagttcccatcgtcactcaagccccaggagctcagcctcttcagatccaaccaggtctgcttgcccaggcttggccaagtgggacccagcagatcctggcttccccagcatggcagcaactgg

SEQ ID NO: 3481 - DNA, 401 bp, Homo sapiens
  misc_feature (1)...(401): n = A,T,C or G
aatgaatnnnnnnaacaatctcttcaattgtcctctgaatgggtttcttatttctatgtggaatttcatgtcacacagtgtcctgtaaataaacattaaagtccacccttttctttacttcaaaaaaaagaatcatctaacatttaatgttctgataaccaaggaaagaatagataaggtcccagaaatttatgatttgagtttttcttttagaaatccctagatatgtgtgtatataaaagggagtctatttttaaaaataaaaacacaaaaaagaaattgctagatgttttctcctgggggatatggaagaaatatgtgttaaataaaataattctcaagattttttatatataggccgactcttaacttgataattaatataaagtcataaatttcca

SEQ ID NO: 3482 - DNA, 389 bp, Homo sapiens
accgcgcgctcgccccgccgctcctgctgcagcctcagggcccctcgccgccgccaccatggacgccatcaagaagaagatgcagatgctgaagctcgacaaggagaacgccttggatcgagctgagcaggcggaggccgacaagaaggcggcggaagacaggagcaagcagctggaagatgagctggtgtcactgcaaaagaaactcaagggcaccgaagatgaactggacaaatactctgaggctctcaaagatgcccaggagaagctggagctggcagagaaaaaggccaccgatgctgaagccgacgtagcttctctgaacagacgcatccagctggttgaggaagagttggatcgtgcccaggagcgtctggcaacagctttgc

SEQ ID NO: 3483 - DNA, 416 bp, Homo sapiens
tggaagcacttctttgctacagacggttgctaagagaacagagtcactccagcaacacgcccatgcgtcttctctcagcgtatttgggtcttctttgcccaaaagaacacaaaagcctttttccattgtatggaagatagtttttaagacatttgaaactttctactatagtttacagaacaaattattttatttttattgtaaatcttagtgtggaagagctgatttctaaaatatgattaaagtaaatatatacctatgaatatcaagagtcgtctccctgagcctgtagttggaagtgacgactgtaatggaatgatgtcttgtatagaaatgcccttctctgaaataaagagaactcctgggctttctaaagaggctgcgggaagccatcctccactcccactgtgtgtgag

SEQ ID NO: 3484 - DNA, 405 bp, Homo sapiens
atcatcatacaaactaacaatcagaaagcctctgatgttttccagcacctgcgaagactgtccatctgaaagactctaatctcctactaaactctgcctactcgtataaatggtagctcaaattcctgaattaacaatctacactgacaatgtaataactcgttatacacacacacacctatcctgccccgctggactagctactctgaaacaagggacagcagatggaagcacagaaatagatccagttataaacaatctaaagatacatatcatgtatattgaaaaatgttttcggccgggcgcgggggctcacgccatgaattccatcactttggggggccgaggtggatggatcacatggccacgagaacgataccatcctggctaatacggagaaaccac

SEQ ID NO: 3485 - DNA, 464 bp, Homo sapiens
  misc_feature (1)...(464): n = A,T,C or G
tgacttctcgggtcgacccacccgtccggaatattatttcntcccggctgtcggtctaaaagaggatagtttgctttctttaaaaaagggtctgtgaatgagaggtcctgatctaacttctaattttctgtatgttctgccatttgtgggaaatatttcttcgtttcagattgttgatgttattgttgggaaagacgaaaaaggcagaaagatcccagaatatctgatccattttaatggttggaacagaagctgggatagatgggcagcagaagatcatgtgcttcgtgataccgatgaaaatcgtagattacagcgtaaattggcaagaaaagctgtagctcgcctgaggagcacaggaagaaagaagaagcgctgcaggttgcctggtgtggactctgtcttataaggcctccccactgaagaaaaagatgaaaatgatgaanactcattaagcagttcct

SEQ ID NO: 3486 - DNA, 466 bp, Homo sapiens
  misc_feature (1)...(466): n = A,T,C or G
gaaaggcattgacagccagggacaggagccagggtgggggtttttttgtgggaaagcagaactgaagttagcttaagcataaaaacaaagaaaaatcttcgcttttcatgtatgtggaatccaagaataaccataggctctaccagaccaggagggtaaggatggacactaaaatgaaacaaataccaaggtattccttctgctgcagcctggagaccaccgagagtcgagctggggcacacacacacctggccgggacccggcagggacaaggcgggccgtggcctcctccaccaagtctctctagacaattcagggcctgctttccccagctccatgcatggctggactggtgattccagggtgcagaagggattcatattcccagaacgctntaagtgtacacctgcaggataaagagataccggctacattattaaatgattctagggattcactgggggan

SEQ ID NO: 3487 - DNA, 404 bp, Homo sapiens
attttatgataaatatgtaccttttaaaatcctaaaatgtttttgtaagcatttcagaacacaaatcctgggtttactgtttggatgacagaacaacttaaagagaatttttggagctataaatgtggttgaatctacaggaaatgtatcagccatgccttccttttaaaaaatcttttatatgcatattttgtctcctttgacatagtactatcgtgcatggctttaatgtcttttttgatggtattgtttttaagttgagcatatactatatttagattttgcaaactttaattccaacaaatctgttgctattttattagaatatctagggcttctaaattcatacgcatacacttgcagtgacaatagaacataaaagcatcaaatgtttacatatttaa

SEQ ID NO: 3488 - DNA, 472 bp, Homo sapiens
  misc_feature (1)...(472): n = A,T,C or G
cggacgcgtgcgcccacgcgtncgaattcttgagccccatcacaggcctggtgagtcaaaaactctgaggatgggtctagcagtccgctttaacaaatcctccaggtggttaccataaatgttgaagtgtgagagctactgcctgtaatcccatttagagaggtacataggtaacttaaaaacaggtcctgataaaagaattctactaaacttaaaaaacaaattcaggtaactttataaacaaacaaatcactgcgcccgacctttttcacttctcttaatgctctgtaaacattaatgtatttatatatgtacttagaattttaaaaaatcaattttattgagttataattaacatacagtaaaaatgctcccatcttgagtaattccatgccttttgacagtgttctgtcccatgccacgaccaccacaatcgagagagaacatcttcatcactccagaagggctcctg

SEQ ID NO: 3489 - DNA, 465 bp, Homo sapiens
tgcaggtgacagtcagaaggatgagaaggagaatgtgatgctgaaggatgagctgcagtactgtgccttaagcaatgggcacgcatgcctggaaaaccgcagccagggggaagcattgcaaagagaaagggaaagtgtgtctggaggaagaaccaggaaggcatcagcagaggaagctaatttcagaggctcttggattggggaaaataagggcacaaccttttcacaggccaaagaccttactccctcaccatcttctgcttcaaacaggcacatgctgtttacgattaaagacaacaccctcagagctacccccgtaattaaacctatcatgctgcctctcctgaggaccatgtccttggagaactccctcagcagtggccacaaagaggaggaattgccaaggccagaatggggtgaggatcctgggttttgtgcccccgaaaaccaggacattcttggtac

SEQ ID NO: 3490 - DNA, 402 bp, Homo sapiens
  misc_feature (1)...(402): n = A,T,C or G
tgaacccaggaggcggaccttgcagtgagccgagatggtgccactgcactccagcctgggcgacagagtgagactcagtctcanaaaaaaaaaaaaaaaaaaaaaaaaaaaaaaaaaaaaaaaaaaaaaaaaaaaaaaaangggggggggccttaaaaaaaaaacccggggggggccaaaaaaaaaggggggaaaaaaaaaaaattttttttttaaaaggggggggaaaaaaaaaacccgggggggattttggaaaaaaaaccttttttgggggggggaaaaaaagggacaaccccccccaaaaaaaaaaaacgcctgggggaaaaaaaaaaattttggggggggggggggggaaaaaccgtttttttttgtgggggaaaaaaaagtgccccccccccccca

SEQ ID NO: 3491 - DNA, 409 bp, Homo sapiens
  misc_feature (1)...(409): n = A,T,C or G
aggatgntgaggttaacgacaggttccaggtcctttcactcctttggccaaaggttgggggtaggtggcccaagtggcgtgctctctaggtagacaacaggagtggtcagagttccctcaaaggatcctccactccagagcacctgagaaggccgggaccagaggccctgtgtgatgtgtactccgcagctgtttggggtgggacatttctgtacttctcgatttgcttatggctcagccattacctgtgtcagtccatgattctgttgtaacagttttaagagtaaataaataaagctgcctgatgtcccatcaaannnnaaaaagactaccacactatttggggagggaaatttttgaacttnttgatttgtttatgggtgggcccttacctgtggcagcccccgac

SEQ ID NO: 3492 - DNA, 480 bp, Homo sapiens
  misc_feature (1)...(480): n = A,T,C or G
attttctttttaacaaaattgcaaaataaataattttcctatgtattttctccctcaccaatctgaattcccaaggaagtcctgcaaacaacaaaatactatttgtttcaggctttccaatcaaaatacaatgaaaaagacaactgaaaatcatgctcttctatggatcaggaagtggcaaacatagaagcagcaatgtaagtctaattctggctacaccccctctaccccctctagagccaaaaaaaaaaaaaaaaaaaaaaaaaaaaaaaaaaaaaaaaaaaaaaaaaaaaaaaaaaaaaagaaaaaaaaaaaaaaaaaaaaaaagaaaaaanngggggggggggtgttaaaaaaattatgggtggggccccccctaccccctctggggggagaaatttttttttttttttaagggggggaaaaaaaaaaccgcgggggggttttgggaaaaaaaccctcttttttggggggaaaaaa

SEQ ID NO: 3493 - DNA, 484 bp, Homo sapiens
  misc_feature (1)...(484): n = A,T,C or G
cggacgcgtgggcggacgcgtgggctttttttattaaacagatatcttcagtttaatgcaagagaacattttactgttgtacaatcatgttctggtggtttgattgtttacaggatattccaaaataaaaggactctggaagattttcattgaggataaattgccataatatgatgcaaactgtgcttctctatgataattacaatacaaaggttccattcagtgcagcatatacaataatgtaatttagtctaacacagttgaccctattttttgacacttccattgtttaaaaatacacatggaaaaaaaaaaaccctatatgcttactgtgcacctagagcttttttataacaacgtcttttntgttgttggtttggattctttaaataatatatattctcatttagggccttctttagcagaatccattactgtttatttttgaaaaacaataatttagatatttccataattgcaccgg

SEQ ID NO: 3494 - DNA, 422 bp, Homo sapiens
ctatggaggagactgatctcgcacaagaggagcaggcgttaaagattatggtcttgcaatggctgtggcacatgcattatcgcagagcctggctcaaaaccttggaatccaatgggaaccttctagcaaacagccaaaatgtgactgcacagaatcctggggtggctgcatcatggaggaaacaagggggttccattctctaaaattttcaaagcgcagcattttggagtatagagactttttacagagaggaggaggagcctgccttttcaacaggccaacaaagctattggagcccacggaatgtggaaatggatacttggaagctgcagaggagagtgattgcggttttcatggggaatgctatggattatgctgtaagaaatgttccctctccaacggagctcactgcagcgacaggg

SEQ ID NO: 3495 - DNA, 437 bp, Homo sapiens
cttctctcagcctagcccagcatcactatggtggacgctttcctgggcacctggaagctagtggacagcaagaatttcgatgactacatgaagtcactcggtgtgggttttgctaccaggcaggtggccagcatgaccaagcctaccacaatcatcgaaaagaatggggacattctcaccctaaaaacacacagcaccttcaagaacacagagatcagctttaagttgggggtggagttcgatgagacaacagcagatgacaggaaggtcaagtccattgtgacactggatggagggaaacttgttcacctgcagaaatgggacgggcaagagaccacacttgtgcgggagctaattgatggaaaactcatcctgacactcacccacggcactgcagtttgcactcgcacttatgagaaagaggcatgacctgactg

SEQ ID NO: 3496 - DNA, 396 bp, Homo sapiens
ccctctcctgcgttctcacttagaagatctcatcttatcttgtccgctcagaccatggactcgttgctcaccttcctgggggagcttttggaggtcgcggaggattctggtgactcttggaaaggatatttttattacatttgattatagctgagagttgtcccccttccagaggagtaggacctaactcattttccttaaatttttgcagctcaagtggcggggctcctttccagcccatcaaaagccacgtaaccatttcaacagcccatgtgatgccttctactttagggacctctcctgccaagccaaattctacacctgttggaccctcttcctctaaactccctttgtcagggttggctgaaagtgtgggaatgacaagaaatggagacc

SEQ ID NO: 3497 - DNA, 401 bp, Homo sapiens
attgcgagcggccggcctactttgtttttagaattttgaacagaaccactgatcttgagggctactgggacctccttaaaaggactttaaggtctagtgctcacctggtgcaaggcacagaatttgtgacagttccctgttctctgtgtttgcagctataaggattattatgaactgtagccagagaagttccagaataagaccaatggtattaccccccgtcggtggctgctgctgagcaacccggggctggccgataccatagtggataaaatagaggaggagtgcctgactgacctgatccagctgaagaagctgatggcgctgtcattgacgatgtgttcatcagggacgtggccaaggtcaaacaggagaacaagctcaagatctcggccttcctg

SEQ ID NO: 3498 - DNA, 472 bp, Homo sapiens
  misc_feature (1)...(472): n = A,T,C or G
caaattataacatcttatttgcaaaattggggttgtttttactgtgatatagtattgtagtacagtgttagtcactgcgtagtgatgttggtaataagtgataggctctcattggtaattttcctgttatcatatatttgctaacattaattttttcacatttgtttttaatataggggattattttgcagataaaatcttaggtaggtttgagagatatactgtgacttgttttagcgggaagaagtaaataaagctcttctgtccttgaaaatgttaaaatgctttcctgacatacaagttgccatgtaaagccactagtatcttgattttcatgcttcccattaatccagtgacaccttctggaaccattctgaattataaggatttatttggggaggctgatgattgaaaaaacatatagtgatttaaaatttccatanattgtcacatttttgtntaaactgtgttn

SEQ ID NO: 3499 - DNA, 447 bp, Homo sapiens
  misc_feature (1)...(447): n = A,T,C or G
aagtagaggtatcgtgctgctggtgtgtgtgcttatggtggtagagaacgtgatgggaatggtggtagtggcgatgatgatgtcctcatagttgtaaaacaaaattttggttattttcacttctctagtctggaaaagagaattttatttttaagtcttaagcagattgcgactacccagattatgaaatgaactatcccctctcttagccaggtaggaccttggtatttagtactttacctcagttacctttctcttactatttctgaaaaactgacatctttttttcctcgtttaatttctttaaggttaggagaattactctctaagtgtaacgatcaattcatatgagaattttctttatttctgaaccatactaacagttntcctcagttgtttccaaactctgccagttgttctttttgaggtacttctcttntagtgacn

SEQ ID NO: 3500 - DNA, 565 bp, Homo sapiens
  misc_feature (1)...(565): n = A,T,C or G
gtctgcccgatcgcgctgcatccatgcatcacatgtccttatctgtcgtctttctcaccacccccacccagagaggccnncnnnntttgatttcatggcatcggccccggnccggaatnccgggncgacccgcgcgagcgggattcgccagctagctaattatgttcacagcatttgactgaagctagggatttatgcacatgttggaaataaaacctgcgcaggcttccctgggaggtttggatactacgacattgatgcccagacctttgctgactggggagtagatctgctaaaatttgatggttgttactgtgacagtttggaaaatttggcagatgggtataaacacatgtccttggccctgaataggactggcagaagcattgtgtactcctgtgagtggcctctttatatgtggccctttcaaaagcccaattatacagaaatccgacagtactgcaatcactggcgaaattttgctgacattgatgattcctggaaaagtataaagagtatcttggactggacatcttttaaccaggagagaattgttgatgttgcg

SEQ ID NO: 3501 - DNA, 391 bp, Homo sapiens
aaagaacagtcatttcagaaactagagagtcatggttagctttaaagcagcgggatcaataatgcaactgcacagcaacatcaccaccaccaccatcaccaccaaggaagatcatactcaccccagggacaagatcagtgttgaatctgtgtgttagattgttgatagagcactcttgattaaggtggaaagggcatgggacagtggctcccctgcctgaatgaattgttccattctaagaagtattttgctcacacaggtggcattaaaaaaaaaaattaagaaaaaaagtatataaatttttggggaggtttattctttgaaaaaccgatactgacggacagacggaccgtttggttttatagagtcaccgatagaacgatctattgag

SEQ ID NO: 3502 - DNA, 422 bp, Homo sapiens
cccacgcgtccgcggacgcgtggggaagttaaataatatgatcataaggaaacaagtttgtttccaaaggcttacatgctttttacgtaatttttaaaagtaatgttgtttaagaattgttacaagttccattagtgacctgctaaattaggaatcttacctggaatttttttcaaataataacagcaagaacatgtggtgtttaacatgtgccaaacattgttttaaagcactttacagtattaatttattctttttattgaaaagattttgcctctaagggaactgtcaagaggcatgtgaaccggagcaactccatcttaaataggagctgagtaaaatgaggctgaaacctactgggctgcattcccaggccgttaaagcattctaagtcgcagaatgagataggaagtcggcacaag

SEQ ID NO: 3503 - DNA, 408 bp, Homo sapiens
  misc_feature (1)...(408): n = A,T,C or G
ctctgtcaaaaaataaaaataaaaaagacagaaaagaaagaaagaaaataaatgcctgcaaagtcagagacctaagtcctttatttctatctatcataaaatctttaagacattttctacaagacctagtgactgaaaacttctcaaaggaaaaaatttctcatgagggaaatggaaaattgtggtaatgtgcacagagaatcaatgtatcactcaggaaaacaatatgagcagaaattccttgaggggacgccccgagcaccacagctggtgtcctcgtgctcaaacagaggaagccccctgacactgcgacgacactgaagtccttctcccagggacacatgcacacgcaattcaacacgcaactgtggggggcttgctgctcccaagacccagttaaaacactcn

SEQ ID NO: 3504 - DNA, 414 bp, Homo sapiens
aagacagatatgaggaagagatcaaggtcctttccgacaagctgaaggaggctgagactcgggctgagtttgcggagaggtcagtaactaaattggagaaaagcattgatgacttagaagacgagctgtacgctcagaaactgaagtacaaagccatcagcgaggagctggaccacgctctcaacgatatgacttccatataagtttctttgcttcacttctcccaagactccctcgtcgagctggatgtcccacctctctgagctctgcatttgtctattctccagctgaccctggttctctctcttagcatcctgccttagagccaggcacacactgtgctttctattgtacagaagctcttcgtttcagtgtcaaataaacactgtgtaagctatttctgtttgctattct

SEQ ID NO: 3505 - DNA, 412 bp, Homo sapiens
agccaagatggaacacggagccaagtataacctctcttcactcacagaggtcacatcttcctagatggaaatgggatggaccctgctcctttggtcaccacccacacctggcatccctgcagaccaaggactttgttatcagcaacaaatgatgcctctctgcatgagtgggactgggtggacctttgtgccccccgctgacaccagcatctttccatctaggcctctagaaaggggaggagctgctgtactagcaagggtgctgatgtaggactcaagtgactaccactccctgctaccagctgagtggccttgggcaagtctgacagcgtcacttaacctcagtttccttatctgtaaaatgaggatagtaagaactacctcgtagcgatattgcgaaagttagaagaag

SEQ ID NO: 3506 - DNA, 384 bp, Homo sapiens
  misc_feature (1)...(384): n = A,T,C or G
attatttttagtagacacgaggtttcaccatgttagccaggagggtctcaatctcctgaccttgtgattcaccgatctcggcctcccaaagtgctgggattacaggcgtgagccaccacacccggctgaagccagaacttttataactacaccagaacttttataactacaccaaccagccattaaccagagccacccctacagggtatgtgcaatagactgaacatttatgtccccccaaaatttgtatgttgaaattttaactccaaagatgatggtattaggagatgagactttgggaggcaattagatgatgagggtgaatacatcatgaataggatcactgcccttataaaggaccccccagagagctggtttgccttn

SEQ ID NO: 3507 - DNA, 454 bp, Homo sapiens
  misc_feature (1)...(454): n = A,T,C or G
aatttgacnaccctgtttgacagccntggaanacccgggncgaaccacgcgtncgaaaagggcaatcntttaattgtatttttttgctggttatcctggcctagtgtcttcagaactcatccaagttacgagacgaaataaactaaaatcacctcattaatttttttcccttagttacaaccaaatgaatttatgtaatctctgaatgaactacatccctattccagccgctgatgaatatgttctccagcacatggcagcattaaaaggaaatacttttcagtatttcttttcatgccaaaaaacctacagaataattttccaaacagtcctttattcgtaattataagaattaaacaatctaaaatattaaagatttaccctccagcacattcactgggtaaagaccatttaatttgccctctcagggaatttgaaataaattatttgtcct

SEQ ID NO: 3508 - DNA, 390 bp, Homo sapiens
  misc_feature (1)...(390): n = A,T,C or G
aaaaatcatgatttttgcatgttctcacttgtaagtgggagcttagctatgggtatgcaaggcatacagagtggtataatggacattggagactcaaaagtggggagagtgggagggagatgagggatgaaaaactacctattagagtaaaatgtacaatacagggtgaggggtacattaaaatcccagacttcaccgctatataattcatccatataaccaaaaaccacttgtatgcctaaagccattgggganaannnnaaaaaaaaaaaaggaagaaaaaataaaaaaagggggcgcctttttaaaaattcctggggggggcccaattttaccgggggtgggaaattttttttttttttcttttggggggggtatttaaaaggccgg

SEQ ID NO: 3509 - DNA, 422 bp, Homo sapiens
cccacgcgtccgggctatgtgtatataccatccatgtttatgcaagtaccctctgtgatacttgcacaacaaaattgcctaacaatgcatttctcagaatgtatgcatccctattgttatgtgagcatgagtttataaaatgaggcttattttcaagaacaaggatggagctggagatccttatgttatgtgaaataagccggggacagaaagacaaacatcacatgttcttacttatttgtgggatctaaaaatcaaaacaattaactcacagacataggaagtagaaggatggttacccgaggctgagaagggatttgatatggtcggaggggagtggggatggttaatgggtaccaaaaaaaaaaaaaaggggcgccctttttaaaggatccttggggggcccaaattttactcgtcct

SEQ ID NO: 3510 - DNA, 481 bp, Homo sapiens
  misc_feature (1)...(481): n = A,T,C or G
agcgaggattttttttgatacctttgataatcctnccggaaancccgggncgacccacgcgttcggtcgatatataccacattttcttcattcatgcgttgttgtgtgttgtcttggctatcgtgaataatgctgctttgaatatgggtatacaatgtttttcttttcaaaccttccctcactttggnggaattaatcctttagtagctacttctgacagcacatatttaaagtatgtttgtatggttcaatttttccattgcttttattctctccaggaagaggagataaatatatgaaggtgctgtttggcacagaatttaatagggaagaaagagacagtataactcaccagtgctgggtctcatcatcctgccacttcagaacaactatgaatacaaaaagaaatttataatcccagccctgcctaaaaaggggaagtcatctctaaatatggtggccctggggcagctggcctccc

SEQ ID NO: 3511 - DNA, 414 bp, Homo sapiens
cagcttgttaaaagtgggaatgccgtaaaccaacacagtgagcctggagcaatgacaagctacacaaaaattaaacatatttgtatttcaagatgtagcgagctgtcgtggccagttcatggccactttgggaagacatttattaggaggaagcaagatggcactaaagcgtgggagaggacagaagctggagccgtcatgggtgcagaataaggctggcccggaagagtggctgggtggggtcacacctggtagttcagatatcttttgctatcgattttctaattttctaagatgaagtgttaatgtcccagcgtgtggatggtgcctccggatggacaattcaggttgcatgccccagacctcgtgattgggactggccagaacagacaagaccccatcagcaggatggac

SEQ ID NO: 3512 - DNA, 406 bp, Homo sapiens
catccactggaaaagtagaagcagcactaaatgaaaatacttgcagagcagagcgtgaactacgaagcattccagaagactcagagttaaatacagttacattgccaagaaaagcaagaatgaaagaccagtttggcaattctattatcaacacacctctgaaacgtcgtaaagtgttttctcaagaacctccagatgctttagctttaagctgccaaagttcctttgacagtgtcattttaaactgtcgaagtatacgagtaggaacactcttccggctgttaatagagcctgtaattttttgtttagattttatcaagatacagctagacgaaccagaccatgatcctgtagagattatattaaatacctctgatctaactaaatgtgaatggtgtaatgtccg

SEQ ID NO: 3513 - DNA, 409 bp, Homo sapiens
  misc_feature (1)...(409): n = A,T,C or G
agaggatggcgtcgtcgagccctgactccccatgttcctgcgactgctttgtctccgtgcccccggcctcagccatcccggctgtgatctttgccaagaactcggaccgaccccgggacgaggtgcaggaggtggtgtttgtccccgcaggcactcacactcctgggagccggctccagtgcacctacattgaagtggaacaggtgtcgaagacgcacgctgtgattctgagccgtccttcttggctatggggggctgagatgggcgccaacgagcatggtgtctgcattggcaacgaggctgtgtggacgaaggagccagttggggagggggaagccctgctgggcatggacctactcaagctggctttggaacggagcagctctgcccatgaggccttgcatgtgan

SEQ ID NO: 3514 - DNA, 471 bp, Homo sapiens
aaaaagtgtgaagtatgatttactaaccacacaaatatctgcttgtttgcaagaacaggttgggctaattaataactccaactgagaccgaagtttctcatcatcgccgagaacctggttaaatttcttcacaaaatcttgtgctttcccggggtcaggcaaattctttgctatggtcatcagttttccaaacatggcagaacagttagcctctgatgtaggctgcttgtgcaaatccaatagttcgcgtacatggctccgaagcatgttctgacacttccacatttcgttgagagcttttacagcatttggatccaaactagcatataagtaatataagcatttcattctctcttctgtttccaggttgtgggggacaagatactgagcaaagattttctctaccaacagtttgtcgtcaatgctgttctgataataaatatgcagaagtttgccttttccagctgactt

SEQ ID NO: 3515 - DNA, 462 bp, Homo sapiens
  misc_feature (1)...(462): n = A,T,C or G
aggcggcttctnannnggaaggtgagcancgaccngncngtaagttagggcgcacccacgcgtccgctacagtcatggctgccgccgtcgctgctgttggtgcaggggaaccccagtccccggacgaattggtcccgaaaggcgacgcggagaagcctgaggaggagctggaggaggacgacgatgaggagctagatgagaccctgtcggagagactatggggcctgacggagatgtttccggagagggtccggtccgcggccggagccacttttgatctttccctctttgtggctcagaaaatgtacaggttttccagggcagccttgtggattgggaccacttcctttatgatcctggttcttcccggtgtctttgagacggagaagttgcaaatggagcaacagcagcaactgcagcagcggcagatacttttaggacctaacacagggctttcaagag

SEQ ID NO: 3516 - DNA, 390 bp, Homo sapiens
  misc_feature (1)...(390): n = A,T,C or G
gagatatacctaatgctagatgacgagttagtgggtgcagtgcaccagcatggcacatgtatacatatgtaactaacctgcacaatgtgcacatgtaccctaaaacttaaaagtataataaaaaaaaatatatatatatataaaaataaaaaataaaataaataaaaaagccaggttcagttatagttgatgttgtctctatctctctgagcctagtaataataaaacactgttggttctgggatagtggaagaacttccttttcatttagcagttgtattcataggttgtgcttaaactgattgtaattaaactgatgaaattatccaactaccaccaagtagttgtatagattttaaggatatctgtgagggaaaaaaatggtctatn

SEQ ID NO: 3517 - DNA, 402 bp, Homo sapiens
ctttgctgagctgggagaagtgattaagggagtgataccagcccactgtgagaagaccacggtgttcaagtctttgggtaagatccattgctccctgggcacaaatccaactagcgcacaaggcaggttcacccattggtggaaagagcaatgagtcaccagactctgcagctgaatcattgtgctccatcattcaggtcaattatttacatggtttagcctagtgctaagcccatgaactctggaactgagcagtcctgggtcagagtcccttccccgccactcagaggcaggtgtccttaggcaagtgatctgacctctgtaggcctcagtttcctcaccacctgttaccattgaggattaggtgggatttgcatataaaatgaatcagttcggtgcaga

SEQ ID NO: 3518 - DNA, 413 bp, Homo sapiens
tgctgcctcgagagccgctgattgccacggcagtgaagtttctacagaattcccgggtccgccagagcccacttgcaaccaggagagcattcctaaagaagaaagggctgacagatgaagagattgatatggccttccagcagtcgggcactgctgccgatgagccttcgtccttgggcccagccacacaggtggttcctgtccagccccctcacctcatatctcagccatacagtcccgcaggctcccgatggcgagattacggcgccctggccatcatcatggcaggcattgcatttggctttcaccagctctacaagaaatacctgctccccctcatcctgggcggccgagaggacagaaagcagctggagaggatggaggccggtctctctgagctgagtggcagcgtg

SEQ ID NO: 3519 - DNA, 412 bp, Homo sapiens
cgtcgccatgggccgtgtgatccgtggacagaggaagggcgccgggtctgtgttccgcgcgcacgtgaagcaccgtaaaggcgctgcgcgcctgcgcgccgtggatttcgctgagcggcacggctacatcaagggcatcgtcaaggacatcatccacgacccgggccgcggcgcgcccctcgccaaggtggtcttccgggatccgtatcggtttaagaagcggacggagctgttcattgccgccgagggcattcacacgggccagtttgtgtattgcggcaagaaggcccagctcaacattggcaatgtgctccctgtgggcaccatgcctgagggtacaatcgtgtgctgcctggaggagaagcctggagaccgtggcaagctggcccgggcatcagggaactatgccact

SEQ ID NO: 3520 - DNA, 466 bp, Homo sapiens
  misc_feature (1)...(466): n = A,T,C or G
aggtannnccttttattggtaaagactgagcgaaggctttcgagnttnagggacgacccacgcgtccggtttttttaaccattattatgcaaaatttttagttttgcctcgccatggttgttgcatatagttaaactgagagtaattcatctgtgaatctgctttaattacccggggagtaacttacaaaagtggcgtaaacttgtacatggaattttttgaatatgccttaatttataaactgaaaaatatccgggtatatcattctgggtgcgttcttactgacaccaagggtccgctgccccatgtgtcctggtgagaaaatatatgcctggcacagcttttgtataaaaaattcttgagaagtaactgttcgctataaatctgtccaaatttaaaatgtgtgccatattctggttcttgaaaataagactccacagctctttgatcgcttttaatagactgc

SEQ ID NO: 3521 - DNA, 461 bp, Homo sapiens
tttacgggtcgacttacgcgtacgcccacgcgtgcgcgactaagcatgattttctgagcctattaaaatggttctgaatcaaaaccgaagtcacgctgtgctgccgatccctgtttgactctcaaaaccaaaatctgtatcaggaaaggaataatcatttagcagactgagtccaaaatgctcatttttggtttcctgtgaaaatggatttctttttgtcgctttccttttttttttttttttgggaaaagggagtctcttttttttccccaggttgaagggcgggggggcatttttaattccccgaaccccccgcctccgggtttaaagaaattttcttgtttcccaacccaaagttgtgggaataacgggcttccccccccttgctgggtaaatttttggatatttaagaaaaaacggtttttccccttgtggcccaggttgttctcaaacccctgccg

SEQ ID NO: 3522 - DNA, 392 bp, Homo sapiens
atcgacatggccctgagtgaatacccagaaaatttcatactactgttttccaaagtgaagttgcagtcactctgccgaggcccggacgaggcactgctgacttgtaagcacatgctgcagatatggaaatcctgctacaacctcaccaaccccagtgattctggacgtgggagcagcctcttagatagaaccattgctgacagacgacagcttaatacaattactttgccagacttcagcgatcccgagacaggctccgtccatgccacatcggtagcagcctcaagagtggagcaggcactgtcggaagtggcttcgtctctgcagagcagtgcccctaagcagggcccgctgcacccctggatgacgctggcacagatctggctccatgc

SEQ ID NO: 3523 - DNA, 54 bp, Homo sapiens
cccacgcgtccgcccacgcgtgcgcccacgcgtacgactagttctagatcgcga

SEQ ID NO: 3524 - DNA, 398 bp, Homo sapiens
ctgccctgcgtgggtcgtgccagctcatcgggactggtcctcgcctcggtccctcggacttagggagcgcggggcaggtagtctcaaaagccctcagcaccaacaggggagaaagcaccgtaggaccctgagagatggttggtgccatgtggaaggtgattgtttcgctggtcctgttgatgcctggcccctgtgatgggctgtttcgctccctatacagaagtgtttccatgccacctaagggagactcaggacagccattatttctcaccccttacattgaagctgggaagatccaaaaaggaagagaattgagtttggtcggtcctttcccaggactgaacatgaagagttatgccggcttcctcactgtgaataagacttacaacagcaacctt

SEQ ID NO: 3525 - DNA, 408 bp, Homo sapiens
aagatcccctaaaacatgctggtgtctacacggcagaagaagtggccctgattatgcgtgaaaagctaattcgtttgcagtcgttgtatattgatcagtttaaacgacttcagcatctgctcaaggagaagaagcgccgatacttacataatcgcaaagtggaacatgaagctctaggcagtagtctcctgactggcccagagggacttttggccaaagaacgagagaacttaaagcgattaaaatgtctgcgacgataccgccagcgctatggagtggaagccttactgcatatgcagttgaaggaacggagaatgctggccacagatggtgctgcccaacaggcccataccactcgttccagtcagaggtgcttggcctttgtggatgatgttcgttgttccaatc

SEQ ID NO: 3526 - DNA, 423 bp, Homo sapiens
tttagagcacagcctccctctccagggtcaggttcacgggagctgttgggggctccttccctcgcagcagtgaccactccaaggaccacggcctggacatgagcggcagcggagtctagatgaatataggcagcagccaaaggccacagtcacgacaaacctacacactctcaccactgtcatctcatattgtcctaaaatttccagccagtgcaaaaaaacatgaaaaagaaaaaatacagccattggaaaagaggaaaagtaattgttattagctgatgatgtgaatgtcttcctgaaaaccttaagagaaccaactggaaaacaaccagaaatgagagcatggagttaggcaaccgccgatctgctttctgtcacttgggcgagtttttcccgtcctgggagttcatatctctggaatcc

SEQ ID NO: 3527 - DNA, 457 bp, Homo sapiens
ctgctaacaagaacgcttccatctcaaaccttttctctgcctgggaaattattttatgtttgtttttgaaataaaggatttagtttaagattctaaattttagagaaacaaacgtaggccttgtttactaatagccagacatcagaactgcaggtaggtatgttaatgagatgacttatttctggcagctcctggaatcctaatattgtaaatgagtgggacacacttgcatattgtgaccattctattgaggcccttctctgtttaatgcatattatacttgtgcttttaactgtggaatctatttctaacctaaaggtgctgccctagtacttttctttgctgcctctgctgctctttatcctttccaaacagcaactctgaggccatgagcagccaaaaaacttaggtactggctcacctcgtctcatagagggaaacgggctcattccttgat

SEQ ID NO: 3528 - DNA, 433 bp, Homo sapiens
tctggcgttgcttggcttgtgggtggtcatcttctccctgtgtcttcccttcaggacgtctgcccttctccctctacacatgtctgtctgttcaaatgtccccattttataaggacacagtcatactggattagggcccacccaagtgaactcatcttaacttgatcacctgcaaagaccctatttccaaatatggtcacattcacaggtactgagagctgggacttcaacatctttcgtggggagacacaattcaacccccaaccagcatatgtacagagaatgcaaagaaagcgggaaggggagagggctggcagagctgagggaacatgacacttccacatacatcttttcgtatgtctctcttagaaccatggtcaggtttctcatactcaaaaaacaaaccattacttagccagacgtggtggcgcag

SEQ ID NO: 3529 - DNA, 457 bp, Homo sapiens
  misc_feature (1)...(457): n = A,T,C or G
agggcggcatggagcgggagccgggcgccgcgtgagttcgcctggctctgggccgccggctggaggcggtgctggcgagccgcagtgaggccaacgccgtgttcgacatcctggccgtgctgcagtctgaggaccaggaggagatccaggaagcagtccgcacgtgcagccgtcttttcggagccttgctgcttcagagtgaggtgnttgcgggccagctgccctctgaggagatggtcatgacagggtcccagggagccacacggaagtacatggtgtggatgagacaccgctatcacagctgctgcaatcgcttgngagagctgctgggccacccctcctttcaggtcaggagctggccctcatcgcactcctgaagttcgtgcagctggaaggagcgcaccccctagagaagtccaagtgggaaggcaactacctgttcccccgagagctcttt

SEQ ID NO: 3530 - DNA, 411 bp, Homo sapiens
tttccaggtaggacagctgctcccctttcctcctgttacacaggaagagacggaaggagcaccttgacagacttgtgtgagtcttctcgaaggagggttgactcacaacccagagacaatacaaaacccctcacttcctctgagagggccaaatgctgtgagtctgaagtatgtgcctggtgtgaaatgatctatggcctgtttcttacacaggaagccccctgaacctcctgtacatgtgttcatgttcccagccagctctgagacccaggaaccaaatattccattttggcttctgctagagcagacatgggtcctctcctaaaagccatgggcagcatgttccgagggcctgcatgatccacctgctgcacgatcctatgagggcttcctgtggcacacagccctctg

SEQ ID NO: 3531 - DNA, 384 bp, Homo sapiens
ttcgcttcattcttcagatagtttggactcgtttctcaccttcctgggggagcttttggaggtcgcagaagattctggtgactcttggaaaggatatttttattagatttgattatagctgagagttgtccagcttccagaagagtaggacctaactcattttccttaaatttttgcagctcaagtggcagtcctcctttccagcccatcataagccacgtaaccattccaacagcccatgtgatgccttctactttagggacctctcctgccaagccaaattctacacctgttggaccctcttcctctaaactccctttgtcagggttggctgaaagtgtgggaatgacaagaaatggagacctcggtgcaatgaaacattct

SEQ ID NO: 3532 - DNA, 437 bp, Homo sapiens
  misc_feature (1)...(437): n = A,T,C or G
cttcatcattatggtgtggtattggaggaggatcaccatgatgtcccgacccccagtgcttctggaaaaagtcatctttgcccttgggatttccatgacctttatcaatatcccagtggaatggttttccatcgggtttgactggacctggatgctgctgtttggtgacatccgacagggcatcttctatgcgatgcttctgtccttctggatcatcttctgtggcgagcacatgatggatcagcacgagcggaaccacatcgcagggtattggaagcaagtcggacccattgccgttggctccttctgcctcttcatatttgacatgtgtgagagaggggtacaactcacgaatcccttctacagtatctggactacagacattggaacagagctggccatggccttcatcatcgtggctggaatctgcctctgcn

SEQ ID NO: 3533 - DNA, 400 bp, Homo sapiens
tgcttgagcaccagacaagctttttatcttctgatttcggtgcccgagagcaggagaacatggatgacacaaacagcgagcagcagtttagagtcttcagagacttcgacttcctagatgtggagctggaggatggagagggtgagagtatggacaatttcaactggggagtgcgcagacgttctctggacagcctggataagtgtgatatgcagattctggaggagcgccaactgtcaggaagcactcctagcctgaataaaatgcaccatgaggactccgatgaatcatccgaggaggaggacctcacagccagccagatcctggagcactcagacctaatcatgactctctccccctctgaagagacgaatcccatggagctgctcaccacagcctg

SEQ ID NO: 3534 - DNA, 499 bp, Homo sapiens
  misc_feature (1)...(499): n = A,T,C or G
tttgatcgccctcggactattgatgacctcccggancgccccacgcgtccgcccacgcgtacgcccacgcgtacgcccacgcgtncgtcttaatgctggattctcggattgaagatcttgaggaaggacaacaggtcatccgctctgtgaacctcttggtggtgaaggttctggagaagtcagaccagaccaacatcctgagtgccctacttgttttgctccaagacagcctgctagcaacagccagttctcccaaattctcagagcttgttatgaagtgtctctggagaatggttcgactgttgcctgataccatcaatagcattaacctagacagaattcttctggatatccacattttcatgaaggtcttccccaaagagaaactgaagcaatgcaaaagtgaatttcccataaggacgctaaagaccctgctacacaccttatgcaaattaaaagggcccaagatcctggaccacctaacgatgatcgacaacaa

SEQ ID NO: 3535 - DNA, 384 bp, Homo sapiens
ttgtatcctaccaatgattgcctcccctctcccacatattaatgtattacttaaaggaactgattttttaaaattggattgaatcatggaaacattctttgagaatatggaaataatttaatatttttcccgtttccagctcttcagctgtaacagtgactcaaaatcaattacattaagattagtttttttttgttttggttttttttttttaagaaactttgtggctttaaatataagggaaaaaacgggatttactttggggggcttccatctgaactaaagtttcccatggggcttaccgagttaggtctggctttgggaaaggaggggacagcacctggttgaaatacatccccatctggaaacaggactgccactgaa

SEQ ID NO: 3536 - DNA, 447 bp, Homo sapiens
cgcgagccggaactgctccaggacagagaacaccgtgtgtggctgcagcccaggccacttctgcatcgtccaggacggggaccactgcgccgcgtgccgcgcttacgccacctccagcccgggccagagggtgcagaagggaggcaccgagagtcaggacaccctgtgtcagaactgccccccggggaccttctctcccaatgggaccctggaggaatgtcagcaccagaccaagtgcagctggctggtgacgaaggccggagctgggaccagcagctcccactgggtatgtggtttctctcagggagcctcgtcatcgtcattgtttgctccacagttggcctaatcatatgtgtgaaaagaagaaagccaaggggtgatgtagtcaaggtgatcgtctccgtccagcggaaaagacaggaggcaaaaggtgaggccacagtcatt

SEQ ID NO: 3537 - DNA, 476 bp, Homo sapiens
ttggaagttgagtacctgtgatctaaaatgtcctggaggcatatgacatctaaaatatgtgctttccaaccagcacagctggcgctcttagctcctgattggttgtgtgttttattaaggatcagtgcagttaagtcgtattttaaagtgttacctcccctcctaacccttccccttcttggacactgaaggaaaaggccaactagggtgttagccctctgggcaccaaggaaactaacagctttctcaaagcggtgaccactcaggccagcccagacaaatctgagggatggccagtgcactccaatgatgggacaggcctaacaacacatgtaagcttccccgagagctttcagctggttcacctctttgttctctagactcttaagtactgactgctttgacttttgtgattatgttatggtgatgtgtagtcagtgtaccaatatgttcacaacctatgatcattgatatgg

SEQ ID NO: 3538 - DNA, 421 bp, Homo sapiens
gcaggaggtgaccacactcaccctttcgtcaggaaccacccctggtacctgcattcatccattcataaagggagagccctcctggcctatcatctttttattttattttatttatttagtcccagctactctgtttcctacaccgagtctgtatgctttcatcgggaaaagcaatgttttgctgctagagatttgaaaggagccaggcacagcggctcacacctgtaatctcagcactttaggaggctgaggtgggaggatcacttgagctcaggagttcaagaccagcttgggcaacaaactgagatactgtctctacaaaaaatcaaaaaattagccagttgtggcctgtgcctgtggtcccacctacatgggaggctgaggcaggaggatcatttgagcccaaaagttcaaggctgca

SEQ ID NO: 3539 - DNA, 464 bp, Homo sapiens
cttcacttacttctcaatgatttataatccattattccctatctacccttttatctttgacacaccaaaaaaaaaaaggtcaactttaataaatcatatgcccttgcatgaaaggttcttaaaaggtttttaaggcctcctaaatttaatctttcccctacctggctctaggctttttgggagaggcatgatcaattaaaaaaaaacctctacctcctatgaggtttaatatgacctcttcccatgggccagttcctcatatataatctataaaacggctgttaaaaatatttttattattatgaggcctatacctaaattggaaaaccttcaccttaaagacggggatatttaagtttaaagggtttatgctgcactgaagggccaaccatttggtaaatcaggaattcacactgccattctaatcaggaaaggctcactccttaggaactactaatagccct

SEQ ID NO: 3540 - DNA, 407 bp, Homo sapiens
atataacatacatattaacaatatctatcaggaaaaccctcaagacagcttctagttaaaacctttgttgctggcctctcaaactatatttataaaaatttgctagggccaaatccatacttgcagaataattcatcaaattttatttttaagtgaaaagtaacctttcaggcatttcagcagcatacattgacaatctagggtatatatgtatgtatgtttcttattgtatgtctatatatgtatgtggggaggacaggagtgaatgttcacacacttttcttgcgtactcaactaaattggagaatgtttctgaagaaaattggatgaaattagctgctgagattgagtttctgccttaaaatctgaaacaaaaaaagggacaaattgctggtagatctactgag

SEQ ID NO: 3541 - DNA, 478 bp, Homo sapiens
  misc_feature (1)...(478): n = A,T,C or G
tactttaactggcgttccagaagagcatataaaaactagaattgtcaggatctttgttcctgctcgcaataacatgcagtctggagtaaacaacacaaagaaatggaagatggagtttgataccagagagcgatgggaaaatcctttgatgggttgggcatcaacggctgatcccttatccaacatggatctaaccttcagtactaaagaagatgcagtttcctttgcagaaaaaaatggatggagctatgacattgaagagaggaaggttccaaaacccaagtccaagtcttatggtgcaaacttttcttggaacaaaagaacaagagtattcacaaaataggttggcactgactatatctctgcttgactgtgaataaagtcagctgtgcagtatttatagtccatgtataataaatacatctcttaatctcctaatanactggaccttgagactacaaaaaaaaacaagaggggg

SEQ ID NO: 3542 - DNA, 480 bp, Homo sapiens
  misc_feature (1)...(480): n = A,T,C or G
gcgccgcnnttttgattacagtgggcatgcgcaaccgccccggaanttacgggccgacccacgcgtccgcccacgcgtccgcggacgcgtgggctggttagaaggtgagctgtggctctttaagggtcacccagagactctggagaagtttgacaagttcaagcacctgaagtcagaggacgagatgaaggcgtctgaggacttaaagaagcatggtgccactgtgctcaccgccctgggtggcatccttaagaagaaggggcatcatgaggcagagattaagcccctggcacagtcgcatgccaccaagcacaagatccccgtgaagtacctggagttcatctcggaatgcatcatccaggttctgcagagcaagcatcccggggactttggtgctgatgcccaaggggccatgaaccaagccctggagcctgttccgaagggacagggcttccacctacaaggagctgggcttccagg

SEQ ID NO: 3543 - DNA, 411 bp, Homo sapiens
  misc_feature (1)...(411): n = A,T,C or G
ccctcatactgttgtccaacctggagaattatatacttatgctcctcaatttatgatgccactgcattcccaataatccattctaagttgaaatcttcaacttacaatgggtttatctggatgtaagcccattgtaaattgaggagtgtattgaatatatatcactttcacatcatcataaagtcaaaaaactgtaaatcaaaccttcctaagtcagtgaccccctgtacccttaaacaatgagataaacttccatcaagcatggcagtactctggctttgttctccgtttgaaaaaccgtcactttataggcttaatatatctattttacacattaagactgtaccttcaaactgtgttgttccatacagtagccctagtcatgtgtggctaaacttgaattaacaaaan

SEQ ID NO: 3544 - DNA, 469 bp, Homo sapiens
  misc_feature (1)...(469): n = A,T,C or G
cggacgcgtggtgttgtggccaggacacccagtgagcccatacttgctctttttgtcttcttcagactgcgccatggggctcaacgacggggaatggcagttggtgctgaacgtctgggggaaggtggaggctgacatcccaggccatgggcaggaagtcctcatcaggctctttaagggtcacccatagactctggagaagtttgacaagttcatgcacctgaagtccgaggacgagatgaaggcgtctgaggacttaaagaagcatggtgccactgtgctcaccgccctgggtggcatccttaaaatgaaggggcgtcatgaggcagagattaatcccccggcacagtcgcatgccaccaagcacaagattcccgtgaagtacctggagttcatctcggaatgcatcatccangttgtgcaaagcaagcatgcccgggactttggagctgatgcccaggtggccatg

SEQ ID NO: 3545 - DNA, 474 bp, Homo sapiens
  misc_feature (1)...(474): n = A,T,C or G
gggggattgacgccgtgagagcgcctggaaacccggncgaccacgcgtncggcgggtcacggcaccccgaaccgtcctcctgctgctctcggcggccctggccctgaccgagacctgggccggctcccactccatgaggtatttccacaccgccatgtcccggcccggccgcggggagccccgcttcatcaccgtgggctacgtggacgacacgctgttcgtgaggttcgacagcgacgccacgagtccgaggaaggagccgcgggcgccatggatagagcaggaggggccggagtattgggaccgggagacacagatctccaagaccaacacacagacttaccgagagagcctgcggaacctgcgcggctactacaaccagagcgaggccgggtctcacacttggcagaggatgtatggctgcgacctggggcccgacgggcgcctcctccgcgggtataaccagttagccta

SEQ ID NO: 3546 - DNA, 408 bp, Homo sapiens
  misc_feature (1)...(408): n = A,T,C or G
aagatcttctcaaggaacactacgttgacctgaaggaccgtccattctttgccggcctggtgaaatacatgcactcagggccggtagttgccatggtctgggaggggctgaatgtggcgaagacgggccgagtcatgctcggggagaccaaccctgcatactccaagcctgggaccatgcgtggagacttctgcatacaagttggcaggaacattatacatggcagtgattctgtggagagtgcagagaaggagatcggcttgtggtttcaccctgaggaactggtagattacacgagctgtgctcagaactggatctatgaatgacaggagggcagaccacattgcttttcacatccatttgccctccttcccatgggcagaggaccaggctgtangaaatatattn

SEQ ID NO: 3547 - DNA, 454 bp, Homo sapiens
  misc_feature (1)...(454): n = A,T,C or G
agaggccttgaatgctgtgcacagctttattgccgagaaggttcgagaaatcccacaagcgatgaccaagcctgaggtggtcaacatccttcaaccccaaaccacgatgaaccccgacagagccaagcaggccaagctgatcgtccccaacagcacggcgggcctgatcatcggcaagggaggcgccacggtgaaagccgtgatggaacagtcaggagcatgggtgcagctgtcccagaagccggagggcatcaacctgcaggagcgcgtggtgacggtcagcggcgagcccgagcaggtgcacaaggccgtgagcgccatcgtgcagaaggtacaagaagacccccagagcagcagctgcctcaacatcagctacgccaacgtggcaggccccgtggncaactccaaccccacctgctcttcgtacgccagccccgcggatgtgcttncagcc

SEQ ID NO: 3548 - DNA, 466 bp, Homo sapiens
ctaatctgtgaaatcagcgtaccatgcctgtagcatcaggaatggcagaaaagtctgatgcgctctagacagcttcaccactcatttgggcaggcagtaaacacacatataatttattagctgggagctgaactggctgtgaaatctatgatttgctttgaacatttgggttttgttgcctttttcttaattgataacacagaaaagaaagtaccatcatagactgtggagtcattgagggtctgtgtgtcctcaccgaaagggacctggtgtgcccgccgggtcgatcttcccacgtgttagggtgtatttttatacaacacatcttttgacactataacgcggctgggagtgtgtgtgcttatatgtgtgccccaacctcccacgcctcgtggacgactccaacccgaccggctcttcgtacgccagtcccaaggatgtgctgcaagccgggtcgctctagaga

SEQ ID NO: 3549 - DNA, 396 bp, Homo sapiens
ataattattttatttcacactgaataaaaattattgtttttccatgtgagtaaatgtgctgtttgtttttctgatagtttagtaatatttacattgcttactctcagtaaattacatcatgatgtgagaaagaaagcacacattcagtaaataagataggtgctaaaccttcttagtgccttatgaaaatgttatgtttgtgtaagtagaataaagtaagttggtcatttactagtaagacatcacagaaagcacagttagcaaagagtatatacatcatcattgtgctttctctttttttttgttatctactgtattttttcctatgcagccatgcccacctacacctttcccaccacagcttatactcaccaaggaaaaaatgtgagaaaccag

SEQ ID NO: 3550 - DNA, 407 bp, Homo sapiens
cccacgcgtccggcggcaggcaagagagcttgtgcaggggaactgccctttataaaaccatcagatcttgtgagacttattcactatcccaagaacagcatgggggaaaccgcccccaagattcagttacctccaccgggtccctcccatgacacatgggaattctgggagctacaattcaagatgagatttgggtggggacacagccaaaccatatcagggtatgtatatataatctgttatttattccagtgccttttgtagaaaagaactgccctttctccaccaaattgcccttacagctttgtcaaaaattagttgtccatatatgtatgggtctatacctggactctttattctcttccctggatttaactgtcttggtcctccaacttggttccttctca

SEQ ID NO: 3551 - DNA, 456 bp, Homo sapiens
  misc_feature (1)...(456): n = A,T,C or G
ggagcgccccctancccgaaacgtttgncnagcacngtcctnannntagggngccccacccgtccgcttgacagtgaaacacttaaaaagataatgttatggatgttaactcctgtcaaatagatcacttgcaattgcttccttatgtggaggttgcaatgagctgagatcatgccactggactccagccttggcgacagagggagactgtcaaaaaaaaaaaaaaaaaaaaaaaaaaaccagggtggggttttttaaacccccccccccaaaggggaaaactttgtttttaaaaaaggggcccggggttttaaaaaactttcccaaagggagcttttccaagggcccaaaaaactttgaaaaaaaaaataaaatttttttttggaaaaaaggggaaggcccatccccggggggcttttacctctaaccctttgggggggccctttttaagaggtg

SEQ ID NO: 3552 - DNA, 481 bp, Homo sapiens
  misc_feature (1)...(481): n = A,T,C or G
cccttcaccaccacctgctccccacgccaccaccatttgggtggctgtttttaaaaagtaaagttcttagaggatcataggtctggacactccatccttgccaaacctctacccaaaagtggccttaagcaccggaatgccaattaactagagaccctccagcccccaaggggaggatttgggcagaacctgaggttttgccatccacaatccctcctacagggcctggctcacaaaaagagtgcaacaaatgcttctattccatagctacggcattgctcagtaagttgaggtcaaaaataaaggaatcatacatctcanaaaaaaaaaaaaggggcggccgttttaaagaatccttgggggggccaaagttaacgcgggcttgcaaaagaatacttctctccttatagggagccgaattaaaacgctcctgggaactttgtgaaagaacccttacttgtgtggggagacatattggaaa

SEQ ID NO: 3553 - DNA, 406 bp, Homo sapiens
tcggcacattctcttacgtccaacaatgcagactttaatttgtgatgtacattcaataacaagtgataaccacaaatggacccaggaagacaaacttttgcttgagagccagctcatcctagctacagctgaaccactctgtcttgatccttctatagcagtcacctgcactgcaaacagactgctctataacaagcaaaagatgaacactcgcccaatgaaacggtgtttcaagaggtattccagatcctctctgaatcggcagcaagatctatctcattgtccacctcctcctcagctgagggtacttgatttcttacaaaaaagaaagggaagaaaagcccggcagcattatgacctcaaaatttctaaggcaggaaattgtgtagatatgtggaaacggagt

SEQ ID NO: 3554 - DNA, 425 bp, Homo sapiens
  misc_feature (1)...(425): n = A,T,C or G
cttacttttaaccagagaaattgacctgcccgtgaagaggcgggcatgacacagcaagacgagaagaccctatggagctttaatttattaatgcaaacagtacctaacaaacccacaggtcctaaactaccaaacctgcattaaaaatttcggttggggcgacctcggagcacaacccaacctccgagcagtacatgctaagacttcaccagtcaaagcgaactacaaaaaaaaaaaaagggggggcccttttaagagaaccctagaggggccaaaacttaacccgtgataaaaaatttatatttttttctttagagggggcccttaaaaaaccattctggaaactttggaaaagaaccctccttttggggggggggccttttgggccaaccaccctccaaaaattaagacctcacgggcaaaan

SEQ ID NO: 3555 - DNA, 473 bp, Homo sapiens
  misc_feature (1)...(473): n = A,T,C or G
cggggtcnaatgatngctgacggccntcgcgaggaacttccgggntgacccacgcgtccgcaggacatcgcgtcgctgacgcgcgagcacgggcggtcgtacctgcggaaccggagcaagctgtgggagatggacaatatgctcatccagatcaaaacgcaggtggaggcctcggaggagagcgccctcaaccacctccagaacccgggcgacgcggccgagggccgggcggccaagaggtgcgagaaggccgaggagaaggccaaggagattgcgaagatggcagagatgctggtggagctggtccggcggatagagaagagcgagtcgtcgtgagcgcggtcggcggtttccagccaatggattctggtcaactggtggagattggctgacaccctggagaagccgaaaccagagagccttttgggtctcttttttcctgtggatgcgctgggcacataacactacaggtt

SEQ ID NO: 3556 - DNA, 463 bp, Homo sapiens
  misc_feature (1)...(463): n = A,T,C or G
nagatgcggncttctcnnnnnggaccttttagcancgtcnnnacnntngnggtgaggnaaccgtncgcttgacagtgaaacacttaaaaagataatggaatggttgttatctcctgtcaaatagatcacttgcaattgcttccttatgtggaggttgcaatgagctgagatcatgccactggactccagccttggcgacagagggagactgtcaaaaaaaaaaaaaaaaaaagaaaaaaaccagggtggggttttttgaaccccaccccccaaagggaaaaacttggttttttaaaaaggggcccggggttttaaaaaactttccccaaggaaagctttccaaggggccgaaacacttttgaaaaaaaaaccaaatttattttttgagaaaaaggaaaggaacagcccagggggggtttacctttttccccttgaggagggccgttatctaccccaaacaaga

SEQ ID NO: 3557 - DNA, 453 bp, Homo sapiens
caagcaatacctgcaactgaggattcttcccggggagaccgcatcccatcggcatggctcaagagtttgtgaactgcaaaatccagcctgggaaggtggttgtgttcatcaagcccacctgcccgtactgcaggagggcccaagagatcctcagtcaattgcccatcaaacaagggcttctggaatttgtcgatatcacagccaccaaccacactaacgagattcaagattatttgcaacagctcacgggagcaagaacggtgcctcgagtctttattggtaaagattgtataggcggatgcagtgatctagtctctttgcaacagagtggggaactgctgacgcggctaaagcagattggagctctgcagtaaccacagaacaggccccatgctgacgtccctcctcaagagctggatggcattgcaaatgatgacagcacttctggtggat

SEQ ID NO: 3558 - DNA, 414 bp, Homo sapiens
actttccacaagtagataaggccatgttgattgagagaatagttaggctgcaaaaagcacatgcccggaaaaatgaaaagatagaatttatggaggaccacatcaaacaactggtggaagaaattaggaaaaaaacaaaaataattcaaagttatattttacgagaagaatcaggcacactttcttcagaggcatctgattttaacaaagttcatttaagtagacggggtggcatcatggcatctttatatacatcccatccagctgacaatggattaacattggagctctctttggaaatcaaccgaaaattacaggctgttttggaggatacgttactaaaaaatattactttgaaggaaaatctacaaacacttggaacagaaatagaacgtcttattaaacaccagcatg

SEQ ID NO: 3559 - DNA, 422 bp, Homo sapiens
agaccctatctctatttctaagaaaagacttgacggttgtttagctgagggcattgacaggagaaaggacagtgggtgaatttgagaaatattttggagggtgaattgacaggacttagcactggtttgtctgtgtgggttgcacgagaaggaggtgttgggggtgacttctggttttctgctttgagccatccgatggattctggtgctcactaaaataggaaagactggaggaggcacagagattgaaagcgtcaaaagacagagttcagtttcacagaggctataaatgagacatctacaagttcttagcatttaatgccattttctgcctgcgtggcgctgatgtcatcatgtggaacacactgtttctggtagctatttttattattagatgcagagtgatctgactctgtttctgg

SEQ ID NO: 3560 - DNA, 497 bp, Homo sapiens
  misc_feature (1)...(497): n = A,T,C or G
tattgatcgccctcanggaattgagcgccattcgagggnccacccacgcgtccgggaacatgttgaaagacattttcgaaaaactggacttttgtatacatgctcctgaaaagacatgtgcgagagaaggtaagaggggcgtctggtggagcgttaccaaaaaggaggaattccaagatttttttagatctagatactgatgacgatttaaatagcgacgattatgaatatgaagatgaagccaaacttgttatattcccagatcactatgaaatagcactaccaaatattgaggagttaccagccctggtaacaattgcttgtgatgcagttctcagctcaaaatctccatacagaaagcaggacccagacacgtgggaaaatgaattgccagtatctaaatatgccaacaacctcacccagctggacaatggagtcaggattcctccaagtggttggaagtgtgccagatgcgatctgcgagaaaccctctgttg

SEQ ID NO: 3561 - DNA, 413 bp, Homo sapiens
cgctcggcggcggcctgcggccatggtcaccgtgatggcagcgacggcggcggagcgggcggtgctggaggaggagttccgctggctgctgcacgacgaggtgcacgctgtgttgaagcagctgcaggacatcctcaaggaggcctctctgcgcttcactctgccgggctccggcactgaggggcccgccaagcaagagaacttcatcctaggcagctgtggcacagaccaggtgaagggtgtgctgactctgcagggggatgccctcagccaggcggatgtgaacctgaagatgccccggaacaaccagctgctgcacttcgccttccgggaggacaagcagtggaagctgcagcagatccaggatgccagaaaccatgtgagccaagccatttacctgcttaccagccggg

SEQ ID NO: 3562 - DNA, 128 bp, Homo sapiens
  misc_feature (1)...(128): n = A,T,C or G
atgtgccctcctattatagnattgaaattaagtctacttaatttatcaagtcatgttcatgccctgattttatatacttgtatctatcaataaacattgtgatacttgaaaaaaaaaaaaaaaggggg

SEQ ID NO: 3563 - DNA, 378 bp, Homo sapiens
ctgcaaataaaaaatccaaggccaggcctaaaagtggaaggatgtcgggatcctcctcctcttcctcaggaacccctgcatctcagctttatccacagtctcgggggctggttccaaagtaaaaccagcttctcctctcccatggcggaaacaggatttgccttctgagagaagagactatcaaaaagctgcagagaggattctgcccaaactcagaactgttcccctgaggagaagcggtggcctctttgcagatcaaccaacttaatctggttgaacgtgctgttcctaatctggcactcagcccctctgggaaacatcttttaattagcatctcagaaatgcatgggtaaggtaaagtgcgatagttcaagtgga

SEQ ID NO: 3564 - DNA, 465 bp, Homo sapiens
  misc_feature (1)...(465): n = A,T,C or G
cccacgcgtccgaataaatctccttttatgcatctatacatatctgactgattctgcttctctggagagccctgactactagagcagtctctaaaagagcttatttcaactgcccactgatatcttcctgaacacacaggtgagaatacaaacccatgctctcactaaaacctcagaatgatagacaacctattaacaaataagcctagattaaggaatacagtccagactttgttacatggaaggctcaggctttgattgatgaaacaaaggtgacataaaaacagcagaaaaacacttaggtcctgtattagttttctagccctgctatatagcaaagtaacacaaactgggtggctttcaataacagaaatttgtcttcttacagttctgggtgttagaagtctgaaatcaaagtgtacaccgggccatgtactccttgtggggtctggaggagaataatcn

SEQ ID NO: 3565 - DNA, 522 bp, Homo sapiens
  misc_feature (1)...(522): n = A,T,C or G
ctttgacccattgancgcgcggatnccgcgagatcccgcgtgcgctataccttccttgaaggcagaaattgagccaccaaaaggcagatccaaatacagtctgcaatgaagtgtgaataaaatttaaaaacaaaaattacttttagatcaaaaaatgttttagatgctttctataaatatttttttaaaaatcacctgcagttggttctatagtgagatataaaactgaacaacattccaaaatcttaattttttcttaaaaaaaatttccctggtagttaacaagtattttttatttgtactcactgtaattttctctgattaagtgttatttggtcacacttctcacttggctttcaagcctgctttcaatttataagaacaggagaaaaaagaatgctatagcaagtatttaaatgtagcagctatagtataagagaatttttaaggaaaagggtgatacagtgatatgtttttttctgcttacaacatcactgtcagtatattnttggatcttgaaag

SEQ ID NO: 3566 - DNA, 486 bp, Homo sapiens
  misc_feature (1)...(486): n = A,T,C or G
ggagagtacnntttgaacccttnatagagggcgtgagtaccggtcgaaccacgcgtccggacaagacagcacagacagattgacctattggggtgtttcgcgagtgtgagagggaagcgccgcggcctgtattactagaccgtgcccttcgcctggttcgtggcgccttgtgaccccgggcccctgccgcctgcaagtcggaaattgcgctgtgctcctgtgctacggcctgtggctggactgcctgctgctgcccaactggctggcaagatgaagctctccctggtggccgcgatgctgctgctgctcagcgcggcgcgggccgaggaggaggacaagaaggaggacgtgggcacggtggtcggcatcgacctggggaccacctactcctgcgtcggcgtgttcaagaacggccgcgtggagatcatcgccaacgatcagggcaaccgcatcacgccgtcctatgtcgccttcactcctgaaggg

SEQ ID NO: 3567 - DNA, 400 bp, Homo sapiens
cggacgcgtgggcggacgcgtgggcgtggctgtctcctctctccgccatggcgtgtgctcgcccactgatatcggtgtactccgaaaagggggagtcatctggcaaaaatgtcactttgcctgctgtattcaaggctcctattcgaccagatattgtgaactttgttcacaccaacttgcgcaaaaacaacagacagccctatgctgtcagtgaattagcaggtcatcagactagtgctgagtcttggggtactggcagagctgtggctcgaattcccagagttcgaggtggtgggactcaccgctctggccagggtgcttttggaaacatgtgtcgcggaggccgaatgtttgcaccaaccaatacctggcgcccgtggcatcggagagtgaacacacc

SEQ ID NO: 3568 - DNA, 420 bp, Homo sapiens
gcgataagcccaagtcagagcatgtggtgtcagagtttggggtcagctactttgaggagctccggcagcagctggggcaccgcctgcagctgaacgacctcctcatcaaacctgtgcagcggatcatgaaataccagctgctgctcaaggattttctcaagtattacaatagagctgggatggatactgcagacctagagcaagctgtggaggtcatgtgctttgtgcccaagcgctgcaacgatatgatgacgctggggagattgcggggatttgagggcaaactgactgctcaggggaagctcttgggccaggacactttctgggtcaccgagcctgaggctggagggctgctgtcttcccgaggtcgagagaggcgcgtcttcctctttgagcaaatcatcatcttcagtgaagccg

SEQ ID NO: 3569 - DNA, 414 bp, Homo sapiens
atactactagacgggtttaaaaaaaatgtaacgttcttacttagcaaaagaagaagaaagaaaaaaaaaagaaataccctgacacgtcttctaaaatgttgctggtcctaaaatcctaacaggtgggtaccacagtcatcgacctaccctctaccatcagctcaatgactttctttatatttttcccaagcctctcttgcagtgagttttggcatgtgggaattaatttcatttttttttgtgcccacaacaaaaccaaaaaaaccccacaaaggaaacataaacatacatacacatattttttctaaatatctttgtaattcccttattttactttaagcttcagaattaaaagactctttttagtctttttttttttggaaaggggttttgtttttgccacccggctggagg

SEQ ID NO: 3570 - DNA, 409 bp, Homo sapiens
caatttgcccgtctttaataaaatcttgtgttaaaatttgcatcacgtcgccttcctatgtatgacgaaacaagaaacagagatttccaattgctcttttgtcttcagacatttagtaatataaagtacctatttttatgctgaaatgtttatacaggtttattaatagcaagtgcaactaactggcggcatgccttgcaacacattttgatatattagccatgcttccgggtaaaggcaagccccaaactccttatcttttgcagtctctctgggatcagtaaaagaaaaaaaaaataatgtgcttaagaagtgggactgtaaatatgtatatttaactttgtatagcccatgtacctaccttgtatagaaaaataattttaaaaatttgaatggaagggggtaaagg

SEQ ID NO: 3571 - DNA, 406 bp, Homo sapiens
cggagaccatgttccgagcggcggctccggggcagctccggcgggcggcctcattgctacgatttcagagtaccctggtaatagctgagcatgcaaatgattccctagcacccattactttaaataccattactgcagccacacgccttggaggtgaagtgtcctgcttagtagctggaaccaaatgtgacaaggtggcacaagatctctgtaaagtagcaggcatagcaaaagttctggtggctcagcatgatgtgtacaaaggcctacttccagaggaactgacaccattgattttggcaactcagaagcagttcaattacacacacatctgtgctggagcatctgccttcggaaagaaccttttgcccagagtagcagccaaacttgagggtgccccgatttt

SEQ ID NO: 3572 - DNA, 408 bp, Homo sapiens
gtgaaaccaaagaaaaagatattgactggggaaaacgctgcgtggataaatttgatatcatcggaattattggagaaggtacttacggacaagtttacaaagccagggataaagacactggagaaatggtagccttaaaaaaagtacgtctggataatgaaaaggaaggctttccaattacagcaattcgagaaattaaaattctccggcagcttacccatcagagtattatcaatatgaaggaaatagtgactgataaagaagatgctttggatttcaagaaggacaaaggtgcattttatctggtgtttgaatatatggaccatgatctgatgggactactggaatcaggcttggttcattttaatgaaaatcacataaagtcatttatgagacagctcatggagg

SEQ ID NO: 3573 - DNA, 400 bp, Homo sapiens
tcgcgcagggtaggggactgcgcggcggtgcctggccgggcgtgggcgagagcacgaacgggctgcctgcgggctgagagcgtcgagctgtcaccatgggtgatcacgcttggagcttcctaaaggacttcctggccgggggcgtcgccgctgccgtctccaagaccgcggtcgcccccatcgagagggtcaaactgctgctgcaggtccagcatgccagcaaacagatcagtgctgagaagcagtacaaagggatcattgattgtgtggtgagaatccctaaggagcagggcttcctctccttctggaggggtaacctggccaacgtgatccgttacttccccacccaagctctcaacttcgccttcaaggacaagtacaagcagctcttcttaggggg

SEQ ID NO: 3574 - DNA, 419 bp, Homo sapiens
cggacgcgtggggctaattttgatatcatctttgctatgtaagtctgcagttttacaaatgagtaacataagcttaagataaaaagtgtcaaagtcaaattccaacccagttttaactgacctcaaaaaacctgcgctgtgtaatctcactaccctgtgtgccattacacaagatgaaccacactgtccaatcttgtggtcaggacttggaccagatcttctttgtgcacctcccaactttataacaatttacaaaaaactttcatatacaatcttacttgatcctaacaatatggctgtaagatagtcaggatgtatattatgtatctccattttacagagagattatgctcaaggtcccataactaatccccaacctaggtcttttagctacaagtcacttttggcctgtaaagcac

SEQ ID NO: 3575 - DNA, 402 bp, Homo sapiens
aggtggtggcggcggaagctttggcagctcgggactgagtgcaagaatcagcatgattcttcagaggctcttcaggttctcctctgtcattcggtcagccgtctcagtccatttgcggaggaacattggtgttacagcagtggcatttaataaggaacttgatcctatacagaaactctttgtggacaagattagagaatacaaatctaagcgacagacatctggaggacctgttgatgctagttcagagtatcagcaagagctggagagggagctttttaagctcaagcaaatgtttggtaatgcagacatgaatacatttcccaccttcgaatttgaagatcccaaatttgaagtcatcgaaaaaccccaggcctgaagaaataaagtaaaattaatctg

SEQ ID NO: 3576 - DNA, 395 bp, Homo sapiens
  misc_feature (1)...(395): n = A,T,C or G
actacaaattcctgttcaaccccaagggggagtgcatccgagatgtctacgcgcagtttctagagatgaccgatgacaagctgtgactccagctgggggcgccacagcacccaccacctgccgccttcagactctcggggctggtgccagtgccccaggggcctcctgggccacgggctggaggggctgcccagggaccttggtctcgaagccatacgtggttgtctgctttcctaaggactcccatttccagtattaaagagagaatcatcatcaaggcaccgtaggtaactcagtggctgtgaccagctcgactggcggccactggctgttcccatgagttcagctgtgacgttagcttcagtggctccgccgcatcctcacactgacggggn

SEQ ID NO: 3577 - DNA, 459 bp, Homo sapiens
  misc_feature (1)...(459): n = A,T,C or G
caagaaactggtggcgacactgcctgagcccgctgctgttgccaaggtgacgaggcataaagccgcggtggatcggtgcgtgggggcgcggtgtgggtggtgaagggagaacgaagctcgagcggaaagacaggaccgcgaccgcttgtcaggggattcggcttccagtcccccttccagagggcgttcttctgcagccaggcctctgtcttcccccgcccccacacgagtctcacttcatcaccatgctggagtgcagtggcactatctgagatcactgcaatctccacctctcggattcaagcgattctcgtgcctcagcctcccgagtagtagctgggagtacaggcatgtgccaccatgcccagcttaattttgtatttttggtacagacctggtttcgcctttgttgccangctggtctcgagcttctgacctcangtgatncggctgcctcgn

SEQ ID NO: 3578 - DNA, 408 bp, Homo sapiens
actcctcataagcatgccttgtttctatccttctctatttccgcggtcccatgaatccagaatacaaatagaacataattgtatgagacttccagaagacctttgctagctcgccacccgtagataccggccacaggctcgacaaatagtgggctttgttattagggcttatggtacatggcttcctggaatcaaaatgtgaattcatgtggaagggacattaatccaataaataaggaaagaagctgttgcattactgggattctaaaagtttgagttacatttatattccttttctggttcccatgttttgtcactcatgtgcacattgcttcgccattgagcctccaatgtattgttctgcagtgttgaaacagaatggaaaggacaagatatatctgcaagtat

SEQ ID NO: 3579 - DNA, 453 bp, Homo sapiens
cgagcccagtgcggacctttcttcagcctctgtgcgaccgagccgcgcgccaggctcctgtgcgaggaggacgcgctgactccctccgacctgggctccgatggagcagaaatagcgggacctcgacttgtggcgcgcctggtgccacatctcgggctctgcgagcgtcctggcgcgggatcctgccgtttgcatccaagagaggggaggacaggggcaaaaggatgcagggaggctgctgatttccactgaagagctaatttcctgtgagacattaacagtgatttaagaaaaagattcctgtaactgtaatgtcttacaataacagaatgcaggagagcacatatcaatgaagaacagacaaaatgtacttatccatgaagctgaggttaagaaaccagtgtcttcaagagccagggacagcactgggtctgtgcagaagtgagagatggg

SEQ ID NO: 3580 - DNA, 489 bp, Homo sapiens
  misc_feature (1)...(489): n = A,T,C or G
cgccccccccnnagggggattgaaaacctgatcgtcttgcagcacagctcccgaattgaccgacgcatccacgctgtcgaagtgttattactattgtttattgggattccattttttcagtgtttaggctggcgctactgtttatgaaaaactaaatttttaatcatgaacaatttataaaactaaataaatttattcatagaaacttttctgggttctattatttttgctaaatcaaaccatgattttaatatctcagcatttactttgtccccttataacatttcactcttgacttgatttgagaaacatgtttattttttgaatgttcttgtgaacaactaattttctgctgtggaaataaatacttatgatatataaaatcagtgttaactttgaattctaaaatatcctgatagcttcatagataagagcttttctttttctttcttttttctttaaacagggacctctacttgaatgaaactg

SEQ ID NO: 3581 - DNA, 414 bp, Homo sapiens
ttggagagtgcatccggcccggtacttgtgatcggaggagagccggatcgttcttccttgaaccctctgggccagcccagggcccgaagcccacccactcgcgtctctagcagccgctcttgtcctctgggtacggctcgcgggagtgttggttaccatggtgaagctggcagccaaatgcatcctggcaggagacccagcagtgggcaagaccgccctggcacagatcttccgcagtgatggagcccatttccagaaaagctacaccctgacaacaggaatggatttggtggtgaagacagtgccagttcctgacacgggagacagtgtggaactcttcatttttgactctgctggcaaggagctgttttcggaaatgctggataaattgtgggagagtcccaatgtcttatg

SEQ ID NO: 3582 - DNA, 503 bp, Homo sapiens
  misc_feature (1)...(503): n = A,T,C or G
ccccccccccccgnnngnnccnaattgaaaaccntnattgacacccctgcagtaccggngccgaactacgcgttcgaccaacccgtncgcttgtaggaaggtaatgctggatgtctttccaccatttgccctaagaaagcaaagaagagagccgggggtgccaactccaacgtgttctccatgttcgaacagacccaaatcctggaatttaaggaggccttcactatcatggaccagaacagggatggcttcattgacaagaacgatctgagagacacctttgctgcccttgggcgagtgaacgtgaaaaatgaagaaattgatgaaatgatcaaggaggctccgggtccaattaactttactgtgttcctcacaatgtttggggagaaacttaagggagcggaccctgaggaaaccattctcaacgcattcaaagtgtttgaccctgaaggcaaaggggtgctgaaggctgattacgttcgggaaatgctgaccacgcaggc

SEQ ID NO: 3583 - DNA, 464 bp, Homo sapiens
  misc_feature (1)...(464): n = A,T,C or G
cccacgcgtccgcccacgcgtccgtaatgcttgactgaagttataatgtcacttcagtggccttgagacatcaattttgcaacgtatttccttcgtggaaaggatttagattgtaacccgcacacaaaagcacggtgtttgtgaatataacacctgtcagccaactttagacagatggtaaagaccacatttgaataagtacacatctttcatatcttggatttgcagctgttggtactatgtggaaaatattagaaacttctatgtggaaaatattagaaactacagagtttgcgatatttagatactgaaatttatgtcaaaataacggctaggaataattctgtcaatatggagttgagcttatttctttggaaacccttntaagttgccttgctggctgtgagaattttatatgtggataacanagatagatagatagcatgtaaatggggtgtggttgg

SEQ ID NO: 3584 - DNA, 414 bp, Homo sapiens
tttccgtgggcaagggggtgtccccttcagctgtgtcattgttgatgaggctggacagtcttgtgaaattgagactcttactccactcatccatcgctgcaataagctcatcctagtaggagatcctaagcagctccctccgacagtcatctctatgaaagcacaggagtatggctacgaccagtcaatgatggctcgcttctgcagactgctggaagagaatgtagaacacaacatgatcagcaggctgcccattctacagctcactgttcagtacaggatgcatccagacatatgcctcttcccttctaattatgtttataacagaaacttaaaaacaaatagacagacagaagccattcgatgttcatcagattggccatttcagccataccttgtgtttgatgttggagg

SEQ ID NO: 3585 - DNA, 407 bp, Homo sapiens
tccttgagcgtcaaccttctttccctgaagtggctggggttcctgtttccttctttgattgacaacttgtgttaaccctcgcacatctctgggccaatttttgcttgtaagtctttccggagacccctggaatttaaatcattagcaccgcgcccttccccgaagagtcttcgaagggttgccgcttttcggtggcgcagttctcgcgagaaggtgactttctttctcggtatttcctggtttccagaatccttagcgcgaggcggaaaaaatatttctcccagcttgtgttgatgccgcgattttgactgagacttcttcccacgatttctgtttttgcttctccaaggaaaatggcagctcccgagcagccgcttgcgatatcaaggggatgcacgagctcctcc

SEQ ID NO: 3586 - DNA, 462 bp, Homo sapiens
  misc_feature (1)...(462): n = A,T,C or G
ctgtcctccatttagatgagatacactgtattgtagggtggcacttgcatctctagaatataagtatcacctcataatagtggacattatatcccaaatttaattctaggaagacgacatctaatagaataacctgtgatgtaagtcaggcataaccagataagtcatatattatttgtgtgtgtgtgtgtgtgtgtgtgtgtgtgtgtgtgtgtctgtgtgtatgggtgtgtatggaatgtcctanggcagagataggtttggaaacatgtatgtattggctagagaattacattacatcatatagaaattgggaggaatataacatttttagatgcaaattatttccagaagaatgtttaatctcatgcccacgtgaataatcatctctttaaaaaaagcaactgctcagaatgaacgtggaaccaggtgaaagnccctgcgctcttctcttaacaaagg

SEQ ID NO: 3587 - DNA, 419 bp, Homo sapiens
acgcccacgcgtccgctggacagcgctgattgggagcctacttctcatatcactgttgaaggtgtcagctgtccagaaaactgccgagagaaaataacactgagattagctaaatgcagatggccaccgtgagcccttctccagggcacgggtgaggcgacagcaagtagcatcggtctgcaaggtggcgttatctagaagttgtgttcttgtcgtttctctttactggtgcacatcacagagctggagggacacagctggataatcctgggtccagactcagagccttaagctccttttacttatttttttaataacaaagaggaatctcatgttttgctccaacgaacgacataaaggagaagtagtgcatattttaggaactttgtgtcccagataccacaaagattttgtaccat

SEQ ID NO: 3588 - DNA, 403 bp, Homo sapiens
  misc_feature (1)...(403): n = A,T,C or G
cccacgcgtncgagtttttcagtgatgtaatgcttgtagccaaattgcttaaagagtgtatatatatttttttccttataaattgtctattttttaaaaaagctatttaaccacagctgaagtggggggtaaggccaaattgccaacacttggtaaaagattaatactcttaagtggcactctgatacctttccaacttggcatcagaaaggaatcaataattaccaactgttgtatttagaccaacttacaatatctagctcattagaagccaggatctagaaagctccttctaagccatttaagatattcttacattgagcttcatattatagaactttataggattggatattttacaataaaataatttatcctcaggactgagaatgtggaagctgan

SEQ ID NO: 3589 - DNA, 400 bp, Homo sapiens
aagatcatgtaccagcccagccggggtgcggtccggtttctcggcccttgcctgcgcgcctaccaggctcgaccccaggaccagctttatccagggactctaccattcccacccctttggccccactccacgacaaccacttccccatcttctcctctattctggtctcccctgcccccacgccttcccacccagcgtcttccccaggttcccccactacctctccctcagatccaggccctcagctcagcatgggtggctctccctccaggaaagggggaggagggaccacgacctgagttgcatagcggctgcctggatgggcttagaagcctttttgagggacctccctgcccctatcctggggcttggatacctttccaagtccctggaactgccc

SEQ ID NO: 3590 - DNA, 400 bp, Homo sapiens
  misc_feature (1)...(400): n = A,T,C or G
gctgagcagagaacttagaccactgagcactccatgaatcagcccattgcctgagggaacagagaacttctttcagtaaataaggatgaagtatatactcatccatgttgaccacagctggctcttgcccgtaagcagcatgttctggcttgtaggttaaactgtacagcccaatatagaacctgatggcagagtgcataaggctatagaagaaaagccaaacgaccttacccagcattttctacagtcacaccccctagggagggagaaaaagagaatggaaaaaaaaaaataaaaataaaaaaaaaaaaaaaaaaaaaanggggggggccgtttaaaaaaaatctttggggggcccaatataaaccgggcgagccaaccaatattttttttcttaagg

SEQ ID NO: 3591 - DNA, 408 bp, Homo sapiens
  misc_feature (1)...(408): n = A,T,C or G
catggctacctcagagctgagctgcgaggtgtcggaggagaactgtgagcgccgggaggccttctgggcagaatggaaggatctgacactgtccacatgccaggtacagtcctgccccagggcctttgcatgggcagtgcactgcgtggaatgctgttcccctcactgtcctgaccaccctgtgtacaagccagcatccccgccgccctcgctctgtgccgccttccttctgtgtgccttgtcagaggacacaggtcaccaaggtcaccccctgtctctgccactggcctgtgagtcagagaggaggatggatggagtctcgccctgccatctctctccctgcacctggagccctgcaggggagctgcccccgcaaccttcactttacagaaaagggtattagggctn

SEQ ID NO: 3592 - DNA, 414 bp, Homo sapiens
ccacgcgtccgacttgaccaacggaacaagttaccctagggataacagcgcaatcctattctagagtccatatcaacaatagggtttacgacctcgatgttggatcaggacatcccgatggtgcagccgctattaaaggttcgtttgttcaacgattaaagtcctacgtgatctgagttcagaccggagtaatccaggtcggtttctatctacttcaaattcctccctgtacgaaaggacaagagaaataaggcctacttcacaaagcgccttcccccgtaaatgatatcatctcaacttagtattatacccacacccacccaagaacagggtttaaaaaaaaaaaaaaaaaaaaaagggggggccgttttaaaggttccttgggggggccaaagttaacgcgtgcttgcaaat

SEQ ID NO: 3593 - DNA, 409 bp, Homo sapiens
  misc_feature (1)...(409): n = A,T,C or G
gtcaaaggaccagtctgcagagggatcctgtggctggaagcgaggaggctccacacggccgatgcagctaccgcagccaggatctgggcatccaggcacggccatgacccctccgaggctcttctgggtgtggctgctggttgccggaacccacggcgtgaacgatggtgacatgcggctggccgatgggggcgccaccaaccagggccgcgtggagatcttctacagaggccagcggggcactgtgtgtgacaacctgcgggacctgactgatgccagagtcgtctgccgggccctgggcttcgagaacgccacccaggctctgggcagagctgccttcggacaaggatcaggccccatcatgctggacgaggtccagtgcacgggaaccgaggcctcactggccgan

SEQ ID NO: 3594 - DNA, 506 bp, Homo sapiens
  misc_feature (1)...(506): n = A,T,C or G
aggtccgganananaggacctagntgctgcgcanagacctgatgcctnctgaaaaccnccgcgttngggntatatctacctaaatggatcctgattgtcaggttttccacctatttccctggatattttgatggtcagtactggctctggtgggtgttccttgttttaggctttctcctgtttctcagaggatttatcaattatgcaaaagttcggaagatgccagaaactttctcaaatctccccaggaccagagttctctttatttattaaagatgttttctggcaaaggccttcctgcatttatgaattctctctcaagaagcaagagaacacctgcaggaagtgaatcaagatgcagaacacagaggaataatcacctgctttaaaaaaataaagtactgttgaaaagatcannnaaaaatntttcttgnanaaggcataataatttgtattgaagtccatattttaaagaataanaacatntatgggataaagagcggggc

SEQ ID NO: 3595 - DNA, 452 bp, Homo sapiens
  misc_feature (1)...(452): n = A,T,C or G
catgagtgcatgcatcggcnccgcattnnngggtcgagccacgcgtccgctgactttgcctgtaatatcagcactttggcaggtttccgtggtgggaggattgcttaaggccaggagttcgagaccagcctgggccacatagcaagaccctgtctctatgaaaaatttaaaaattagctgggcatatttgtgtgtacctgtggtcacaggtactcgggaggctgaggcaggaggattacttgagtcctggagtttgaggctgcagtgagctgtggttgcgccacagcactctatcctacatggtggagtgagaccctgtctctaaaaaagaaaaattaaaaacctgtataagggtatgaagaatctgtaatggtttaaacaatgaggacataggtgttgcttctttaaaaaaaaaataccctttaaagctatataggcttatgttccatgtg

SEQ ID NO: 3596 - DNA, 518 bp, Homo sapiens
  misc_feature (1)...(518): n = A,T,C or G
gaacccagacccataggagacccgcgtccccgctcggcctggccaggcctcgcgctatggagttcctctgggcccctctcttgggtctgtgctgcagtctggccgctgctgatcgccacaccgtcttctggaacagttcaaatcccaagttccggaatgaggactacaccatacatgtgcagctgaatgactacgtggacatcatctgtccgcactatgaagatcactctgtggcagacgctgccatggagcagtacatactgtacctggtggagcatgaggagtaccagctgtgccagccccagtccaaggaccaagtccgctggcagtgcaaccggcccagtgccaagcatggcccggagaagctgtatgagaagttccagcgcttcacacttttcanccttgggcaaggagtcaaagaaagacacagntactactacatctccaaccccatccaccancatgaaaacggttgtttgaggttgaggtgactgcagtggcaaaatcactacagtccn

SEQ ID NO: 3597 - DNA, 401 bp, Homo sapiens
  misc_feature (1)...(401): n = A,T,C or G
ccgacgcctnnnnccctttgagcctgcttctttgcctggggcccttggcccccccttgctttttcagccctagccccctgtctccccttctctctgctccttgtctccctctccctttttctgtctttgccgggtctctgggtctctgacccccatccggccctcatggctttgtgtctggagctcttgaagcaatgttcatcatgcctagtggcgtataagaagaccccgccaccggtccctccacgcaccacttcaaagccgttcatctcagtcacagtccagagcagtactgagtctgcccaggacacctacctggacagccaggaccacaagagcgaggtgactagccagtcgggcctgagcaactcgtcggacagcctggacagcagtacccgacc

SEQ ID NO: 3598 - DNA, 487 bp, Homo sapiens
  misc_feature (1)...(487): n = A,T,C or G
gagctgccttgctnncnccccgaaaagtccagnanagncnnngtcnctnnnnntnngggnagacccacccgttcggtttttgagacggagcctcactctgtcgcccatgctttagtgcaatggcgcgatcttggcccactgcaacctccgcctcccgggtttaagggattctcctgcttcagcctctcgagtagctgggattaccggcgcgtgccaccacgcccagcaaatttttgtatctttagtagagatgggtttcaccatgttggccaggctggtctcgaactcctgacctcaggtgatccacccacctcggcctcgcaaagtgctgggattacaggcgtgagccaccgcgccctgccagatttaggcataattttctacaagaaacattagagtgtgtgttccttccactttggggagaaatcataaatatactactactttcacatttcagatagnatctcttgtatttttggataaattn

SEQ ID NO: 3599 - DNA, 476 bp, Homo sapiens
  misc_feature (1)...(476): n = A,T,C or G
nagcngcttgcttcnnnnnaagcctttgnannngctnnncnntngggtgagnaagcgtccctttgatagatcagggaagagattgaagaagaagcttatggtgacatttttgacatagaaattggtgtaggagagccagaaaaagttggtgatggcatgaatgcctatatggcatatagagtaacaacaaagacatctctttccatgttcagtaagagtgaattttcagtgaaaagaagattcagcgactttcttggtttgcacagcaaattagcaagcaaatatttacatgttggttatattgtgccaccagctccagaaaagagtatagtagggatgaccaaggtcaaagtgggtaaagaagactcatcatccactgagtttgtagaaaaacggagagcagctcttgaaaggtatcttcaaagaacagtaaaacatccaactttactacaggatcctgatttaaggcagttctt

SEQ ID NO: 3600 - DNA, 503 bp, Homo sapiens
  misc_feature (1)...(503): n = A,T,C or G
taaaaatgttgaaaataaggcttacttttattatttgaatatggtaattatgtaattatccttttaatatgttaaggttatattctgtgccttagagtatgctaagcactttatacataattatcttatttaagcctcgtagaaatcttatgagcaaaatgttactcggtacacttaaagtacaggtaactgaggcttagagatgtaaaataatttgtccaccacagtgcttttaaaagatgctcgtaaccactatattgtaatttcaaaccctgattccattaatgctttttgttgtgttgcctttactgataattgtgttcaatattcccatgagggaggcagtctttgactttttatttatgatacagaatattaaagtgcttanagttttttattgtatagcgtgttttatcatcaaacagggtttagttttttaaagtaaactgatcaaaaatataaaagctgatggtctatgacattgcattgaagaacagattagg

SEQ ID NO: 3601 - DNA, 388 bp, Homo sapiens
aaagaaacaaagaaaaattatgatgacttttatattcaggcaatgaagccatatcaagacaataataaaacaaattatttaattaaacatgaagagaatctatatggatattcatatattaatattacatatcatataatgttaaatatgaaatatattaaataagttaatgttggaacttgttcgggcatggtagcttcacacctgtagttccagctacttgggaggctaaggtgggaggattgcttgagcccaggagatcaaggttacagtgaaccatgttcctgccgctgtattccagcctgggtgaagagacaatgtctcataaaagaaaaaaaaaaaaatctgggacttttaaaagtggaatggggatatacaaaaaataatg

SEQ ID NO: 3602 - DNA, 410 bp, Homo sapiens
  misc_feature (1)...(410): n = A,T,C or G
ctgggatcgagtatactcttgacttaaatatgtttgtttataaagacaaatggagaaatcaatttttttccctgaattcttaggagcactttagtgaataaagaacctgacagtatgctggcccacatgtttaaggacaaaggtgagtgtaacacgttgttttcacatttcatcttacctgttttatatctgngctgactttataactcctgaccttctgtacttactaattatgtcagtttttaagagtaaaaacttatatttagcaattttttcctcatacattactgactttattttttgcttatgggggactttctttattataatggtaacacaggtgtctggagaaatacgcgagatcatagaggagctttcttaattgaccgaaggcctgagtacttcgaccc

SEQ ID NO: 3603 - DNA, 529 bp, Homo sapiens
  misc_feature (1)...(529): n = A,T,C or G
tatcttctcctttatcatctaacatgtcactccaacagtcgctaacttttagactcattttgncggaggaaggggggatannnnnatagagatcgtagggcaatccgaacggacnnnccgggncgacccacgcgtccgaaaaggntttattctaaaaactgaaaataacgtatgaggtcattaaaggaaaatcagaaaatacaatcaacaaatctacccacatatagtcattcttaagctttgatgcatgcacttctaagttcttcaagcatatactttttttgtttacagatatgagaccatacttattcttttgtaaataaccttattaatgacatcatttttttttgttaatatatattcatgtgcacttacaacattatttgtaacagttgtgtgatatttcatggtgtagatgtgctatatataatttatttaatagtcagatattgctgaacaattaagttttttacaagtttttaactgttacaaaaatgaatatatttgaggctaaatctctgtatattgt

SEQ ID NO: 3604 - DNA, 405 bp, Homo sapiens
gcgccacaagcctcagtgattacttctgccgcctgccagccgggcggggaaggggagtacccggccacccctcactttagctcctgcagctttccaaacaaaccagggcgggatgggagtgtcttcttggctgtggaaatcgatcctcctaccttgtcctgaagccacccgccgcctttcctcgtccctcccttcgcggagattttccggtcccggcgcccggcgagggcgcgcggctggtgtccgccccgcccgaaaggtgagccagccatgagagggtatcttgtggccatattcctgagtgctgtcttcctctattatgtactgcattgcatattatggggaacgaatgtctattgcgtggcacctgtggaaatgaaacggagaaataagatccagccttgt

SEQ ID NO: 3605 - DNA, 411 bp, Homo sapiens
  misc_feature (1)...(411): n = A,T,C or G
cccacgcgtccgcccacgcgtacgtgataacatgctgctggataaatctggacatttgaagttagcagattttggtacttgtatgaagatgaataaggaaggcatggtacgatgtgatacagcggttggaacacctgattatatttcccctgaagtattaaaatcccaaggtggtgatggttattatggaagagaatgtgactggtggtcggttggggtatttttatacgaaatgcttgtaggtgatacacctttttatgcagattctttggttggaacttacagtaaaattatgaaccatanaaattcacttacctttgctgatgataatgacatatcanaagaagcaaagaaccttatttgtgccttccttactgacagggaagtgagggtaaggcgaaatggtgtaaa

SEQ ID NO: 3606 - DNA, 387 bp, Homo sapiens
  misc_feature (1)...(387): n = A,T,C or G
aagtgtttatccacatacaaagtacaaaacaagccatgaacaagcttctttcccttaccccccagaaaaaaaaaaaaaaaaaaaaaaaaaagggggggggccgtttaaaaaaaaccctgggggggccaaaattaacggggggagggaaaaaaaaatttttttcctataagggggggaaaaaaaaacccccggggggatttttggaaaaaaacctttttttgggggggggaaaaaaggggaaaaaccccccaaaaaaattaaaagctttaggggaaaaaaaaaattttaaaggggaaaaggggaaaaaaaaccttaaaatccttggttttaaaaaaattttnnnnnnnnncnanaaaccccccccccaccgggaaaaaaaacaagaaa

SEQ ID NO: 3607 - DNA, 294 bp, Homo sapiens
tgagggtgggctggcaggaggcctatgccttgccctaggggcagtcctgcttcctcattttatagatagggaaactgaggctttgggaggactcactgacatacctaccttcaagatgagttcaggtgggctcagttctggggcttgggaaaagggccccagtggctttgggaagcacccccagcccagggtgaaacatgcttcttctcttcctgtggttccatccgaaggattgtggtgagccccgtgccttcagttaataaagatttgtattgtgaaaaaaaaaaaaaaagg

SEQ ID NO: 3608 - DNA, 515 bp, Homo sapiens
  misc_feature (1)...(515): n = A,T,C or G
ttcgtctctgcaagcttggtcgccctgggatggattcctcctcctcttcctccgcggcgggtttgggtgcagtggacccgcagttgcagcatttcatcgaggtagagactcaaaagcagcgcttccagcagctggtgcaccagatgactgaactttgttgggagaagtgcatggacaagcctgggccaaagttggacagtcgggctgaggcctgttttgtgaactgcgttgagcgcttcattgatacaagccagttcatcttgaatcgactggaacagacccagaaatccaagccagttntctcagaaagcctttctgactgatctcagcattacctctttggacaaggaaggtagttcaagaaatgaaaaagctgtgatggcatgattgaaaaacagctatgagaggattgggctccatcttttgtactctggcgacattctgtcttctgagaatggacaaagaccaatttttgtgtgtgaagctaaggggcatatgtttgcctgaattttaan

SEQ ID NO: 3609 - DNA, 407 bp, Homo sapiens
cggacgcgtgggtgacagaactatttttcattatgggtaactggggaataaatgggtcactggagtaggaatagaagtgcaagctggaaaggcaaaaatgagaaagaaaaaggcaggccctttgtgtctaccgttttcagtgctgtgtgatcatattgttcctcacagcaaaaaagaatgcaagggcataatgttagctgtgaacatgccagggttgcattcacattcctgggtacccagtgctgatggggtgtgcccacgtggggacatgtccttggcgtgcttcctcagagtggcttttcctccattaatacatatatgagtactgaaaaattaagttgcatagctgctttgcagtggtttcagaggcagatctgagaagattaaaaaaaaatctcagatgtatc

SEQ ID NO: 3610 - DNA, 445 bp, Homo sapiens
ctcactctgtcgccaaggctggagtgcagtggtgcgatctcggctcactgcaacctccgcctcctgggttcaggagattctcctctgtcagcgtcccaagtagctggaattacagccatgcggcaccattcccggctaatttttgtatttttggtagagatgggttttcaccatgttggccaggctggtctcaaactcctgatttcaagcaatccacccacctcgacttccccaagtgctgggattacagcgtgagctacctggcccctccccaaattttaacatcagatctcaacatatttgttgagaacttgtttagatcatcactatcgagtaaatttatgtcagttctttagagcatttgcttcacacacagttcaaccatttaaccaaaaaaaaaaaaaaaaaaaaaaaaatgtttttaaaataacccaggatgtttgtt

SEQ ID NO: 3611 - DNA, 401 bp, Homo sapiens
ccaaagggttataggggtacacttaggggttgcatgcaagctgttaccaaaaaatttttaagtattttcttaatttgaataataaaaccagaggaaatgcatacagggcatgagcaactgaggcaaacctttgtggacatgaattgttctacgatgaatttttgctttagtattttaataagaattacaaagacaatggcatacttggggtgagagggagctgaggatgtctgaggagggaatagtattgcagggaagactgagaaaacagtaggatgacagttttgagtatactctgcacttttcaattgtgcaatcttcttgtgcactttaaggctttttaattttgtttgagaatgcaaatgtatactggaagtctacctttactatctactatgcct

SEQ ID NO: 3612 - DNA, 395 bp, Homo sapiens
cccaaatagacttgatgaaacaaaaaacatcaaggatggctcccgtgtcacctgggaagacacacttcatgtaaggaatggaaaaaaggcaatggtaagggacaggggccctggattttttacaacatgcgatagagaactatttgtctccttaatttatttaactttaaaaaataataatgaatgaaagaaaaattacccatttttcaaatatgggtgtgtaagttttttccactttgtacaaaaaattttaaagaaacgaaaactgctgaacaccttatattcagaattactccctgtataagcccattccaattccatatactgctgattaaatttccatcagttggcagttctctaatatcaggttcactgctatttaactaactactgcg

SEQ ID NO: 3613 - DNA, 406 bp, Homo sapiens
  misc_feature (1)...(406): n = A,T,C or G
atccacccactnccgcctcccaaagtgctgggattataggcgtgagccaccacgcccggccaatttttctattttttagtagagacggggtttcaccatgttggccaggctggtcttgaactcctgacctggtgatctgcccgcctcggcctcccaaagtgctgggattacaggtgtgggccaccacgcctggccagttgcttagattattaagtcctacgctttgtccttgcttttctccaccctttcactgctagagatgttggcttatttgtataaaccaaagaggccttttccttttcataacctggattttttttttttttttttttttgaaaaaacttaactctgttccccagggagggaggaattgccccaatttttgttaatttaaactttggcctcc

SEQ ID NO: 3614 - DNA, 407 bp, Homo sapiens
  misc_feature (1)...(407): n = A,T,C or G
cggacgcgtgggcttttctttataatataaagaagtcataatgaacccttcctaattattagtagtaggaaggtgaatatgcattttaatgacagtggactacattttctattgtaccttttgaaaaaaaaaaaaatcaagcagatcctaaaagtatacatatgggggctttctctttccttttaggaatgctcttctgaattccctgagggaattttctagaatctcaaaattgaaagaaacctgaggttcatccagtctctaacctcttaacaaatgcaggagtcccttctacaagggggatctttccaccttgaacacttccaagtgactctacctcaccaagcagtccattcagttgttgagcagctctaactgttagaaaggtcttccttagatggagttgn

SEQ ID NO: 3615 - DNA, 406 bp, Homo sapiens
agcccctccagcttcctgggagttcaatttcccattgtagaacggtggcggcagagcctggccctgtgggggggcagctgcaccccgatgagtggcttgcagttcctggagccctgcaggttgttggagaggcagggagcccttctccctcctgcctgccctcttgcacttcctctcccagaacccagcactactcccagaggctctgagctggagccctagaaggaggcgctgcaaggctccgtgctcctggagcttcgagtctatggtatgagttaaacagaagggtatctcctccatcagatctacaggagggtgtctgctccatcagacctggagcttccaaggcattttacccgaagctccagcacctggcccaaggctgggctgtgctgtgtcctcagtg

SEQ ID NO: 3616 - DNA, 411 bp, Homo sapiens
gaactaaataagcttcatttaagctgtagagaagttataatgaacccttcctaattattagtagtctgaaggtgtatatacattttaatgacggtggactacattttctattgtaccttttgaaaaaaaaaaaaaccaagcggaccctaaaagtatacatatgggggctttctctttccttttaggaatggtcttctgaattccctgagggaattttctagaatctcagaattgaaagagacctgaggttcatccagtctctaacctcttaacaaatgcaggagtcccttctacaagggggatctttccaccttgaacacttccaagtgactctacctcaccaagcattccattcagtggttgaccacctctaactgttagaaaggctttccttagatggagttgaagccc

SEQ ID NO: 3617 - DNA, 421 bp, Homo sapiens
  misc_feature (1)...(421): n = A,T,C or G
acatcccaacattcatttctctgttggcatcttcccatgctcacatcagagaacaagctgtctgggctctaggaaacattgcacgagatggctcagtgttccaagacttggttattaagtacggagcaaacgacccactggtggctctacttgcaggtactgatatgccatctttagcatgtggctacttacgtaaacttacctggacactgtctaatgtttgccgcaacaagaatactgcacccccgatagagtgtggtgagcaaattcttcctaccttagttcggctcctgcatcatgatgatccagaagtgttagcagatacctgctgggctatttcctaccttactgatnggccaaatgaacgaattggcatggtggtgaaaacaggagttgtgccccaaccnaggaagcttctatg

SEQ ID NO: 3618 - DNA, 413 bp, Homo sapiens
  misc_feature (1)...(413): n = A,T,C or G
cattttccgtttctgggaggagtgaggggcaacgggtcggagaaaaaggaaaaaagaagggctcagcgcctccccgccgggccgtggacagaggggcacagtttcggcaggcgggtgaggtcgctgagggcccgccggagatgttttccttgtcgagcacggtgcaaccccaggttacagttcctctgagtcatctcatcaatgccttccatacaccaaaaaacacttctgtttctctcagtggagcgtcagtttctcaaaaccagcatcgagatgtagttcctgagcatgaggctcccagcagtgagccttcacttaacttaagggaccttggattatctgaactaaaaattggacagattgatcagctgggagaaaatctacttcctggnatttgaaaggcaaaaacattt

SEQ ID NO: 3619 - DNA, 393 bp, Homo sapiens
caaaactatgcttttgccaccttcctgttgcagtattactttgcttttatcttttctttctcaacagctttccattcagtctggatccttccatgactacagccatttaagtgttcagcactgtgtacgatacataatatttggtagcttgtaaatgaaataaagaataaagttttatttatggctacctatgtgtttgtaagcaggtatattgtatattagtgtattagtaatactagataaatgaattttgtctggggattaagattggatagttaatagattaatacaatcttttaattctgctctaatgctagcaaattggaaaatgtttaagtctttgacacttaaatttatctatatttttaacaaagttcttgaacttagtatggg

SEQ ID NO: 3620 - DNA, 393 bp, Homo sapiens
agtccaccctgcacctggtgctccgtctcagaggtgggatgcaaatcttcgtgaagaccctgactggtaagaccatcaccctcgaggtggagcccagtgacaccatcgagaatgtcaaggcaaagatccaagataaggaaggcatccctcctgatcagcagaggttgatctttgctgggaaacagctggaagatggacgcaccctgtctgactacaacatccagaaagagtccactctgcacttggtcctgcgcttgagggggggtgtctaagtttccccttttaaggtttcaacaaatttcattgcactttcctttcaataaagttgttgcattcccaaaaaaaaaaaaaaaaaaaaaaaaaagggggcgccctttttaaagattccttggg

SEQ ID NO: 3621 - DNA, 448 bp, Homo sapiens
  misc_feature (1)...(448): n = A,T,C or G
ntctgaaagctgaagaacctgcgaagaancncngggncgacccacgcgtccggncgtgtgttgatcaacaactttgctattaaaaaaaagttttatatttttttacagttacaacattgcttcccatctctcagactgaatttttgttgatttctccttaccatcattaagcaagttagtggaatttaatttttataaagaaaaacttacggctttagatgctttcagttaaatttaaagcctactgaagatttgctcacactttagttcaaatctatgattgtcttgatttattgatcttctttgactggtggagtagaaagaaataactttctctatgcacagattttatacaaaaacgagttttctcattgctttctgttttatttagacgctaggaagccaaattctgtgtgtcttgttcacatagtagtaagaagtaccaaga

SEQ ID NO: 3622 - DNA, 394 bp, Homo sapiens
  misc_feature (1)...(394): n = A,T,C or G
agaaaaatgtttgaattggaccaactgctggtgatggggccagggccctgggccctgtgctgtcagaattctgccttgggaaatgatcctatagctgctgctttttcttggtccttggggctggcagacccatagaccatggcctgttaggaggcgtcctgtctgtaaaggaaattcatctcttgtgacagcctggggctacctagctcccaaacccagaagttggagacatcaggctgtttaaatgatcatagcctagcaggattggattaaaaccacaggcttttgcagctggaatggggttcagtgaacatctcccccattcctctcttgctacaaataaggaaacaggcccaggagattaagtgacttggctaaagtcacatagcanatg

SEQ ID NO: 3623 - DNA, 463 bp, Homo sapiens
  misc_feature (1)...(463): n = A,T,C or G
cacgcgtccggacatctttgggtggccattattctgcctaccacacacaatatgtcctctgactgtaatggaaccaaactggaaatcagtaatagaaatacataccaccacgcctggctaattttatttttgtagagatggggtctcgctgctcaagccagtctggagctcctgggcttatgtgatcctcttgccttggcatcccaaagtggtgggattataggcatgaaccactgcacccggcttaatttacgttttatagtgtgcaattcaatgttttgggtttttttttctttttaaagcatatttacagagttgtgcaaccgtcaccactatctaacttaagaatattttagccaggcatggtaggtagcacgtgcctgtagtccatgctacttgngaggctgaggcaagaggattgctcgagcccaggaggttaaggctgcagtgagctatgatcacn

SEQ ID NO: 3624 - DNA, 415 bp, Homo sapiens
aaaagaatacagacttttcctccaggatgagtcatagattttaaaaattatgatgatatttaccatttagtctacagttttgagaatgatagttctattgcttgaaagagttagataccttccaaaagagaaaaggaatgtaatgggaggagagataggcaacagaaaacaagcatctgtcccttatggagaaaaatgtatttttaacagatactagagaatatagaagttgctatatcaacaaaaaatttttatttgctcaaacaggtggataagccaatgtgtatttactgaataaatgagtatgtgctagtggaaatcaatgagtgagtgaataagtgaacaagtaaatggataaactcagtaggtaacacattattcttcctgtttattatttttaggaaacaatacttag

SEQ ID NO: 3625 - DNA, 401 bp, Homo sapiens
  misc_feature (1)...(401): n = A,T,C or G
gccttcccaggcggggatgctgttgctccgcatttgtctgaggcactttcgggcaacacccaatactcggggctccgctcggcttcttcgcgccgagatgcctaagaaggctggtgcgacgaccaagggtaaaagccagagcaaggaaccagagagaccacttcctcccttaggtcctgtggcagctgatcctaaaggatgcgtcaccatagccatccatgcaaaacctggctccaaacaaaatgctgtaacagatttgacagcagaggctgtaaatgtagctattgcagcacctccatcagagggagaggctaatgctgagctctgtcggtatctttccaaggtcctagaactcangaagagtgatgtggttttggataagggtggtaaatctcgtgaaa

SEQ ID NO: 3626 - DNA, 462 bp, Homo sapiens
cggacgcgtgggctctggtcccagaggatggcttctcagggcatgccacaagttaaaggtcaccttcctgaaagatgaatgagaaagctgcccattctcaagactcatctgcctagggagggtcacagaggcaggatgtaagacacactgtgttgcattcttgcacaagtcatgaaaatggagccagagagcctggacatcagggacttttgcccacagcacatgacaccgacagctgcccagcctgttcacatgctggggaccagcacagcacctgaagccatgtgggacagttgggctttgttcattctagccacggggatgaaagggatcttttgcattgcagagattttatatatattttgtttgtaatgagccattctcaataaacattattctcactgcaaaaaaaaaaaaaaggggcgcccgttctagagaacccttgggggcgccaaactttcc

SEQ ID NO: 3627 - DNA, 415 bp, Homo sapiens
tcgcgcagggtcggggactgcttttcggtgccaggcctttcgtgggcgagagcacgaacgggctgcctgcgggctgagagcgtccagctgtcaccatgggtgatcacgcttggagcttcctaaaggacttcctggccgggggcgtcgccgctgccgtctccaagaccgcggtcgcccccatcgagagggtcaaactgctgctgcaggtccagcatgccagcaaacagatcagtgctgagaagcagtacaaagggatcattgattgtgtggtgagaatccctaaggagcagggcttcctctccttctggaggggtaacctggccaacgtgatccgttacttccccacccaagctctcaacttcgccttcaaggacaagtacaagcagctcttcttagggggtgtggatcggcataa

SEQ ID NO: 3628 - DNA, 458 bp, Homo sapiens
  misc_feature (1)...(458): n = A,T,C or G
tttaattactatttttcattaaatttttattagttggtacaatatttgattttgaaaactgcttcatgtcaaccacataaatgaagttctgtgaaacccccaaatacacatggagaaattttagatacaggcatatagaaagcaggtccaaaacctttatcaaaacctacatgaaagtggtaagaacaagtggtaagaatacaagtcatctcccactggctgggagtcaaaaaaaaagtctagatctcaagctgacngccagtaagaagaattgaaacagattttataggctctatgatgtgacttcccagactttctctcacaatcacatcctcttcccaacattacagtgcccgtatgtatccataacattttgggcaggagagggagtcagcaagggctttgatgatcatgccacattaccctcttaatatataatttctgatatttgccagaan

SEQ ID NO: 3629 - DNA, 452 bp, Homo sapiens
  misc_feature (1)...(452): n = A,T,C or G
tatgagtgcgtgcgataccgcccgcaattnngggtcgagccacgcgtccgcaggtggagacactgaatctgcagctggagataatagtctgtgggtttcaggggagaagtccaggctggggatataaacatgggggtcataaaaaaaggggatttaacccatttatgctggaggttgcaatttttttttttaataaaaaatcagaccttggcaatgaccttgaagagtaggatataagtaactcccacaagcttagcattccagtaatggaacactaggcataaatgggttaaagccccaagactggctgagatggctctgcactctgtgtggacagagacaaagctgcttcctgtgtcttgccttcctctgtgactcgccatgtggactgtcattgcgccccctcccaagaggcttgagtctgggcaggtggccgggctcccgggggcagg

SEQ ID NO: 3630 - DNA, 425 bp, Homo sapiens
cccacgcgtccggtagtcttgagatgctacttaagaatttatttcttaagtataatctataatacaaaaaacgaccattaaaaagaaaaaaaagttgaagaatcacctagcagcatgtgaggcgaccaccagttgtacatgttccacactttgggaaacacttagggggataatcgaagtgtgggcacaaattagggggctggaacttatttggtgagtggtgtggctggaaaggatattgcagatttcagggctgtttgggagtctgagcccatgagatgtggtgattgatctgatctgtagggtggaatagagtaggaaaaggagaatctgataactgcaggcaatctgggggtagatgatgatcatgttactggaaaggggtcccaatccagaccccaagagaggattcttggactcgcgca

SEQ ID NO: 3631 - DNA, 395 bp, Homo sapiens
tttaccactgaataaaagcacttcccaaagccatagtcttaagatatagattggccaaaggattaaatgtattcagaagattatggaataatcctccttctgcacatgctactgtcgcatcagtagggctccattacaataaaagtgaattagagctgaaagtcttgcaaagtgtggactctctctaagaagaattactcaggaaagcccccaaacaagaggaaagacaaaaacaaaggcactgaaagaattgtagcatctgatacctgtagcaacaacaaacatcaaaaacagctccattcctacttagattaacataagtcctcacactggaagtctctttatctcagtttctattacctgatatgacatatctaggtttcaacaaaaaaatt

SEQ ID NO: 3632 - DNA, 396 bp, Homo sapiens
agctgttggggccaggacacccagtgagcctatacttgctctttttgacttcttcagactgcgccatggggctcaacgacggggaatggcagttggtgctgaacgtctgggggaaggtggaggctgacatcccatgccatgggcaggaagtcctcatcaggctctttaagggtcacccagagactctggagaagtttgacaagttcaagcacctgaagtcagaggacgagatgaaggcatctgaggacttaaagaagcatggtgccactgtgctcaccgccctgggtggcatccttaagaagaaggggcatcatgaggcagagattaagcccctggcacagtcgcatgccaccaagcacaagagccccgtgaagtacctggagttcatctcggaag

SEQ ID NO: 3633 - DNA, 492 bp, Homo sapiens
  misc_feature (1)...(492): n = A,T,C or G
gaggtnccccatgacgcagaagaacgcnatcggtaccngcgncgacccacgcgtncgcggacgcgtggggtgaatcttgtagtcagaaacttgatagagagaataaccattgtaacatcagtcacagcattatcttaaatagtgaagatggagaaatattcaataatgaagagcatgaatatgcatcgaaaaaaaggaaaaaggaccattttagaaatgacacaaatactcaaaaggcatggctattgcaccttgggagaagcctttaatcggttagacttctcaagtgcaattcaagatatccgaaggttcaattatgtggtcaaactgttgcagctaattgcaaaatcccagttaacttcattgagtggcgtggcacagaagaattacttcaacattttggataaaatcgttcaaaaggttcttgatgaccaccacaatcctcgcttaatcaaagatcttctgcaagacctaagctctaccctctgcatt

SEQ ID NO: 3634 - DNA, 411 bp, Homo sapiens
cccacgcgtccggtgccagcaccatccccgaacaaatacagtccctctctgtgcacgactctcagggcccacccaatgctaatgaagactacagagaagcttcttcttgtgccgtgaacctcgttttgagattaagaaactccagaaaggaacttaatgacatacgatttgagtttactccaggaagagatacagcagatggtgtatctcaggagctcttctctgctggcttggtggatggtcacgatgtagttatagtggctgctaatttacagaagattgtagatgatcccaaagctttaaaaacattgacatttaagttggcttctggctgtgatgggtcggagattcctgatgaagtgaagctgattgggtttgctcagttgagtgtcagctgatgtatgtcccttg

SEQ ID NO: 3635 - DNA, 345 bp, Homo sapiens
  misc_feature (1)...(345): n = A,T,C or G
caggcttttgggaagtagggtggatgtgggtagggctgggaggagggggccacagcttaggtttggagctctggatgtacatacataagtaggagcagngggacgtgtttctgtcataatgcaggcatgaagggtggagtgaagtcaggtcataagtttcatgtttgcttttgttttgttttgtttttaatggatgtagcagatgttacagtcttagggatccgggatgggagaccccactttagaaagggacgncactcctttaatcctctactcaacaatgtactcttttacttttatattaaaaaaaataaaataaatatgtgcctaaaaaaaaaaaaaagg

SEQ ID NO: 3636 - DNA, 501 bp, Homo sapiens
  misc_feature (1)...(501): n = A,T,C or G
tgggtggcacagganntaaaanaaanccatcccgngcttcgnatngaacangcaannncngggncgacccacgcgtggcgcagtatgactagaattttgaggctcccattctgatgaaaattgagctgtccatgcttccatggaacccgggttacagcagtgagggggccacggctcaagaaacttacacatgtccaaaaatgattgagatggagcaggcggaggcccagcttgctgagttagacctgctaaccagtatgttccctggtgagaatgagctcatagtgaatgaccatctggctcgcgcagaactgaaagattgtattgaaaagaagacaatggaggggcgatcttcaaaagtctactttactatcaatatgaacctggatgtatctgacgaaagaatggcgatgttttctctggcctgtattcttacctttaaatacccggcagctgtgcctgaaactactggctgatcagtattattgagtcgatcccagc

SEQ ID NO: 3637 - DNA, 395 bp, Homo sapiens
  misc_feature (1)...(395): n = A,T,C or G
ccaacctcctactcctcattgtacccattctaatcgcaatggcattcctaatgcttaccgaacgaaaaattctaggctacatacaactaaaaaaaaaaaaaaaaaaaaaaaaaaaaaaaaaaaaaaaaaaaaaaaaaaaaaaaaaaagggggggggcctttaaaaaaaaaccccgggggggccaaaatttcccgggggaaaaaaaaaaaaaatttttttttttaagggaggttaaaaaaaaaccacgggggaatttttgaaaaaaaacctttttttgggggggggaaaaatggggaaaaaccccccaaaaaaaaaaagcccccaaaggaaaaaaaaaaattttaagggggaaaggggggaaaaaatccggtttttgggggtggtaaaaaannnnc

SEQ ID NO: 3638 - DNA, 393 bp, Homo sapiens
tgatgttggggctcccatagctgatgttattctcccaggagctgcttacacagagaagtctgctacatatgtcaacactgagggtagagctcagcagactaaggtagcagtgacacctcctggcttggcaagagaagactggaaaattataagagcactctctgagattgctggaatgactcttccatatgatactctggatcaagtaaggaacagattggaagaagtctctcctaatcttgttcgatatgatgatattgaaggggctaattacttccagcaagcaaatgagctctcaaagctagtgaaccagcagcttcttgctgacccacttgttccacctcagctaactataaaagacttctacatgacagattcaattagcagagcctc

SEQ ID NO: 3639 - DNA, 388 bp, Homo sapiens
aagcctcgcttccctcccgcggcgaccagggcctgagccgagagtatcagttgtagctacccgcccagaaactagacacaatgtgcgacgaagacgagaccaccgccctcgtgtgcgacaatggctccggcctggtgaaagccggcttcgccggggatgacgcccctagggccgtgttcccgtccatcgtgggccgcccccgacaccagggcgtcatggtcggtatgggtcagaaagattcctacgtgggcgacgaggctcagagcaagagaggtatcctgaccctgaagtaccctatcgagcacggcatcatcaccaactgggatgacatggagaagatctggcaccacaccttctacaacgagcttcgcgtggctcccgaggagca

SEQ ID NO: 3640 - DNA, 463 bp, Homo sapiens
  misc_feature (1)...(463): n = A,T,C or G
tgatggtggcccccnnnnaaatggatagcatgcgataccgcnccgcgaatcccgggccgacccacgcgtccgcgtaatcagacttatctatttttgcttttgtggttttgttcttttggagtcatatccaagaaatcattgccaaagccaatgtcaagaagctttttccctgttttcttctaagagttttgtagtttaaggacttacattgaaatctttaattcatattgagttgatttttatatacagcgtgagataagcgtccaatttcattcctctgcatgtggatatctagatttcccaataccatttatttgaagagattatcttttcttcactgtgtgntcttggcataattgtcaaaactcacttgacctcatgtgtgggtgtattactacgttctgtcttctgttccaatagtttatatgtctggctntatactggtaccatactgttttgaatg

SEQ ID NO: 3641 - DNA, 456 bp, Homo sapiens
  misc_feature (1)...(456): n = A,T,C or G
tccagcagaaggaaacatggctgccaaagtgtttgagtccattggcaagtttggcctggccttatctgttgcaggaggcgtggtgaactctgccttatataatgtggatgctgggcacagagctgtcatctttgaccgattccgtggagtgcaggacattgtggtaggggaagggactcattttctcatcccgtgggtacagaaaccaattatctttgactgccgttctcgaccacgtaatgtgccagtcatcactggtagcaaagatttacagaatgtcaacatcacactgcgcatcctcttccggcctgtcgccagccagctatctcgcatcttcaccagcatcggagaggactatgatgagcgtgtgctgccgtccatcacaactgagatcctcangtcagtggtggctcgctttgatgctggagaactaatcacccaaagagagcttgtctn

SEQ ID NO: 3642 - DNA, 393 bp, Homo sapiens
ctttagattgtctgatttctttttgttgtggagcacacctgctaactgctccctcaacataactatgaaatcatagctctgttttcaccaaagaacagaccaattaacatacttatttgcagaagtggtgtagttctacaaaacggcaaatgaagttcaacttaatattctctataatggattattttattttattttttacaattagccttttttttagttaatttttgtcaaatgaaacgacttcaggcaagtctcttttataatggtttttcaagtgccatttattctagtttatcatgttttgcatgtttgaaagtatgaatgtgctctttcctaaaacatggcaaatgaatagatgtagagaataacaatattacttacaagatgaag

SEQ ID NO: 3643 - DNA, 425 bp, Homo sapiens
ttttgtttgggtggtgtcttccaaagcctgcaggcaatgtgtagaactttctggtaggagttgcaaacagtgagaaccatgactcagtcacccgagagactcgagggaacatcagggtgctgtttctgagactctggatcgcacgagacagaagtaatcagaagtttcccagtggatagaaacaagagcagtcagaatagaagaaatcagacatgttgtgaaatagatccagaccctgaatgcatgcaagctccctggaagagctgtgaaccctctgaaattctgcccacgccgtcctgctagaggctgtcacagaggccatccagggaatctttgttggctgagacagccagctccctatggcttacctagatgccacagtgggtatgtcacattcactgctgattgatgcaaagtgaggctgg

SEQ ID NO: 3644 - DNA, 382 bp, Homo sapiens
cagctggtaactgatctgtcactcaggccaaacactatcctcagtgctttaaagatgttgattcaccaaatcctcacagttgacccagagaggtgtgtaattagggtcccagtctcaacacagagaaactgaggcacagagaggtgaagttacttgtcaagggtcgttgggcagagtacgattggtgagaaaagagagcataggacacgtgggcaagtgctggccccatagggtggggatggagcctttgtgatcactctactcgtctctaatccctcctttcctgcagcgagggtgggtcctgggccccaacaactactacagttttgccagccagcagcagaagccggaagacaccaccattccctccacagaactggcc

SEQ ID NO: 3645 - DNA, 401 bp, Homo sapiens
gaccgaatgcgcgcgcgcggtgctcgaggcggtggggaggaggcggggaaggcgaaaggaggggttcggaggagagggttcgatctccgtacgcaccagagttgcatgctgagaatttgaaaaatgaagatgatgtagacactggactattaggattctggactctacttataatatccctaactgctggattctcctgttgcagcttttcttggacagtgacttactttgattcttttgaaccaggaatgtttcctcctactcctctttcacctgccaggttcaagaaactgactggacattctttccacatgggctatagcatggcgattttgaatggcatcgtagctgctcttactgtagcatggtgcctcatgtaaacccacactggagcgatattg

SEQ ID NO: 3646 - DNA, 402 bp, Homo sapiens
  misc_feature (1)...(402): n = A,T,C or G
ataattattttactgccatgagtaagtatagaaatttcaaaaaatgtattttcaaaaaattatgtgtgtcagtgagtttttcattgataattggtttaatttaaaatatttagaggtttgttggactttcataaattgagtacaatctttgcatcaaactacctgctacaataatgactttataaaactgcaaaaaatgtagaaggttgcaccaacataaaaaggaaatatggcaatacatccatgatgttttccagttaacataggaattaccagataaatactgttaaactcttgtccagtaacaagagttgattcatatggacagtatgatttattgtttatttttttaaccaaatacctcctcagtaatttataatggctttgcagcaatgtgtatcn

SEQ ID NO: 3647 - DNA, 418 bp, Homo sapiens
  misc_feature (1)...(418): n = A,T,C or G
aacaagttaccctagggataacagcgcaatcctattctagagtccatatcaacaatagggtttacgacctcgatgttggatcaggacatcccgatggtgcagccgctattaaaggttcgtttgttcaacgattaaagtcctacgtgatctgagttcagaccggagtaatccaggtcggtttctatctacttcaaattcctccctgtacgaaaggacaagagaaataaggcctacttcacaaagcgccttcccccgtaaatgatatcatctcaacttagtattatacccacacccacccaagaacagggtttgaaaaaaaaaaaaaaaaaaataaaaaaaaaaataaataanggggggggggcttttttaaaaatccctgggggggcccaattttaccgggggtgggaaagattttttt

SEQ ID NO: 3648 - DNA, 393 bp, Homo sapiens
agagaatgctgcagaatttttgaagcaacataattcaggtccaaattccaagcctgtagtgtccttcattgctggtttaactgctcctcctgggagaagaatgggtcatgccggggcaattattgctggaggaaaaggtggagctaaagagaagatctctgcccttcagagtgcaggagttgtggtcagtatgtctcctgcacagctgggaaccacgatctacaaggaatttgaaaagaggaagatgctatgaaagaaaaaaaaaattcctaaaactgtggaatggatcacgtagacatgtaacccagcagcagtttgcttctgttgtccactgattaatcagcctatgtgcctgacactggtcttgcagtacaactggaagccaaaacaagg

SEQ ID NO: 3649 - DNA, 409 bp, Homo sapiens
agcagctgaggcaacaccagtggccctggacagtgacacctccggggctgaaaatgcagcagtgagtgctatgctgcacgctgtagccgccagccgcctgcctgtttgcagccagcagcagggtgaacccgacttgacagagcatgagaaagtggccatcctggcccagctgtaccacgagaagccactggtgttcctggagcgcttccgcacaggcctccgtgaggagcatctggcctgctttggccacgtgcgtggcgaccaccgtgcagacttctactgtgctgaggtggcccggcagggcactgcccggccccgcaccctgcgtacccgcctgcgtaaccggcgctatgctgccctgcgagagctgatccaagggggcgagtacttcagtgatgagcagatgcgg

SEQ ID NO: 3650 - DNA, 475 bp, Homo sapiens
  misc_feature (1)...(475): n = A,T,C or G
atgggctcgcccnccatagaaaactgagaggcntgccgnaccgcnccggaattcccgggcggacgcgtgggattcgatccagcagtcccactactaggtatctccccaaaggaaaataagttattatatgaaaaaaaacagatgcacgcacatgtttatagcagcacaatttgaaattgcaaaaatacagaagcaacctagatgtccatcaaccaatgaggagataaagaaaaattggtatatctataccatggaatactactcagccataangcagaaaaaaaaaaaaaaaaaaaaaaaaaaaaaaaaaaaangggggggggccttttaaaaaatttctggggggggccaaattttccgggggggggggaaaataatttttttttttttaggggggccattttaaaaccctggggggttttttgggaaaaaaactttttttggggggggggaaatttggggcacacccccccca

SEQ ID NO: 3651 - DNA, 411 bp, Homo sapiens
ctgggctgaaaaccccaagccacccctcttctcctaagaggcatctgtggctcaagagtgatgcctcgtgcccctcctggttggttgtctctatggcctgagagtggcccctaaatccaagagagtatcagcacttgcatcagctgtccagatgcaaccctgcccagctttgccaccttggcagcagagcacaggatgagatcactggaagcctaatcccctgcccttcaccagagacaccccagtattttccttgaacaacaaaggccaagtaaaatttccactgccatcacagcaactattacccacaactgccacctactgtcacatagcataaactgcaatataattcctgctgacagaagtgcacagtggtggaaaatgagctaagcctcccaagactcgacttcc

SEQ ID NO: 3652 - DNA, 414 bp, Homo sapiens
cccacgcgtccgcaagcatgaggagaaccaccggcctttattccacaagggccccgtgatcaaggtgaacagcaagcaacgctatgcttcaaacgcggtgtcagaggccctgatccgagaggtggccaacaaagtcaaggtccccctgcaggatctcatggtccggaatgacaccccctgtggaaccaccattggacctatcttggcttctcggctggggctgcgggtgctggatttaggcagcccccaactggccatgcactctatccgggagatggcctgcaccacaggagtcctccagaccctcaccctcttcaagggcttctttgagctgttcccttctctaagccataatctcttagtggattgagccctcttggaaagacttctctgccatccctttgcacctgagag

SEQ ID NO: 3653 - DNA, 445 bp, Homo sapiens
attggcctatgtggccaccccacagaaccctggttacctgggccctgcgcctgaagaggccattgccacgcagatcctggcctgccggggcttctccggccacaaccttgaatacttgctgcgtgtgcgggacgtcatgcagctctgtgggcctcaggcgcaggacgagcacctggcagccatcgtggacgctgtgggcaccatgttgccctgcttctgccccaccgagcaggctctggcgctggtgtgaggggctgagcccctgcggggagtgctcatgggacatcagggccagacacccactccagtgcacaagacagacttgcgaccgcttgagcccactgagcagatatggtgggtggctggaggcttctctttctcagtccctgcctgtctgccagcctgcagctctcctgcttgacactgacttactacttgaaacttt

SEQ ID NO: 3654 - DNA, 414 bp, Homo sapiens
cattatcagtctttgaccgaggaaacccctggagggacttgggcattccttgggctccgtgcctgttcttcgtgctcctttcgggcaaggatctcacattatcagtctttgaccgacacagaatgcctggcatttgataaatgtttgttgaacttgaagagacatatggacaatgaatctgcaaagctcaggcccagaatcagcagcagacagaaggtgtaaaaactgaagagagtgaacctcttccctcgtgccctgggtcacctcctctccctgatgacctcctgcctttagattgtaagaatcccaatgcaccattccagatccggcacagtgacccagagagtgacttttatcgtgggaaaggggaacctgtgactgaactcagctggcactcctgtcggcagctcctcg

SEQ ID NO: 3655 - DNA, 400 bp, Homo sapiens
atggcattcagtgacctgtatcaagtagtgagaacaatatgtgactttagatcttccttttgtaccacagggagaccccagcaacatcctggtctctccttttattatgcagtcgtcatagttgaccccattcaagttgtaatcataggatccttaaacgactacattttgaacctcactctcagtatgcatttccattacttttgttaattttgcttaggaagacaactgccttcacctggttgattttgcctaatttcatgggggcatgaatacagaagacagagaaacttggttccggagaggaaatacagcctgttgatgttctgaactatggacttagctagagcctagattttcttcagttagaaggatttctgtcctcatgagtaagactatt

SEQ ID NO: 3656 - DNA, 479 bp, Homo sapiens
  misc_feature (1)...(479): n = A,T,C or G
aataaacaaatttacattacatgtgatagttatcatggtatggccttcatgacaagatggatgagaatatcactgataggatattagccttctttcatatctttatattgaaatatgggctttacttcaatttgaaggtctttcatgaacaataaaagagagtagaaggactgtctgagaaggcaggagacatataaaacagatgactgaaagactgactagctcctggaaagggaaacatttggaacatccagagtaagggcaaatgggcttctaccagcacaacaaagagcctccaggtggcaacatggaagcaggttatcagagaaaataaatgtgcaaattccttatttacaatgactcacttaaccccacaaacatgtttcactgctgccttccccagntgtcgcttatgtactgggtgtacctttcagntacatgcctttgatcctaaaattctctacttttgtgccttatag

SEQ ID NO: 3657 - DNA, 517 bp, Homo sapiens
  misc_feature (1)...(517): n = A,T,C or G
cctgtgtgtctcaaaaatacgttttgtgtttattccaactgcctctgtctttgctcacatgtgtaagcctttctgcattatttttccctttgcctgtaaggtccctttcaccttggcctcaatacttggctcaagtagtacccctttgtaaattttacctgaatgtctcagccagaattaggcatttatttcactgtgctctttaagcaactagtagagatttcatttgaggcacttaatttgtaatcatttatttgcatgcctgtcttttaattaaaacatagccattcaggcatagtgttctaaatatgtttatttcctacctcccatattggtacatggtaacatgtttggttttcagttaacaatatgttgagaaattgaataagtgaaaatatttacatanatagtgtttgtataactaaaaaataggcgtcttatgagttcggtgatttcattgagggtacactcagtccatngtcagggtgagttgaaactttagaattaaattacatag

SEQ ID NO: 3658 - DNA, 425 bp, Homo sapiens
  misc_feature (1)...(425): n = A,T,C or G
attgcaaacccttctatccgtaccaaatgatgnnnntaattacatatctttcttgactatactgatttcttattttggtcactattactaaatctctgttaatattctctcttttaactgaaaagggatgggatagaagggtttgcaatgccatattattggtggagggctgttttaacatctttgaagtatggcttgctgaatatctttaccaacatcttgaatatatattctagtgtccacaagatttagcaaaaagataaagcttgggtggaatatcattttaaaatgttcatgttctgttctatattttcttcacctactctccaaatattgtaatgcaaaaagtctcagtaatgatttggtagtattaattttgtggtcattgtttctcttcgataaatntattttcattaaatacttat

SEQ ID NO: 3659 - DNA, 442 bp, Homo sapiens
tgacaacaaattccatacagaggctcttacagcactactttcagatgatagcaagtttggattcattgtaatagatggtagtggtgcactttttggcacactccaaggaaacacaagagaagtcctgcacaaattcactgtggatctcccaaagaaacacggtagaggaggtcagtcagccttgcgttttgcccgtttaagaatggaaaagcgacataactatgttcggaaagtagcagagactgctgtgcagctgtttatttctggggacaaagtgaatgtggctggtctagttttagctggatccgctgactttaaaactgaactaagtcaatctgatatgtttgatcagaggttacaatcaaaagttttaaaattagttgatatatcctatggtgggaaaatggattcaaccaagctattgagttatctactgaagtcc

SEQ ID NO: 3660 - DNA, 514 bp, Homo sapiens
  misc_feature (1)...(514): n = A,T,C or G
agaagaactaatatatgcacatggaaaatgttctattttcctattagtcaatgaaatgcaaattatgacaataatattgagccgttttccatctcctgttttatgtatgtatatatgtgtatttgtttttattaaataataccagctattgcccgggcatggtggttcacacctgtaaccctagcactttgggaggccaaggcgagagaatgccttgagggaaggagtttgaggccaggatttcaagactagcctgggcaacatggtgagaccctgtctctacgaaaatatttgaaaattagccaggtgtggtggttcatgcctgtgggaggctgaggtaggaggatctcttgagcccaggagttggaggttacagtgagctatgattgcaccactgcactccagcctggatgacagagcaggaccctgtctcanagaataataataacaatgataataataccaggtattgttgcaaactgatagctcatgtattgtgttgacatataaactn

SEQ ID NO: 3661 - DNA, 415 bp, Homo sapiens
ctcaaaatggcggcagcagcgatgcgcctgcgtacttaactcctccgtcgcgccagggccggcgggaagtgaggttctcggacgagccgccagaagtgtacggcgacttcgagcccctggtggccaaagaaaggtccccggtgggaaaacgaacccggctagaagagttccggtccgattctgcgaaagaggaagtgagagaaagcgcgtactaccttcggtctaggcagcggaggcagccgcgaccccaggaaaccgaggaaatgaagacgcgaaggactacccgccttcagcagcagcactcagagcagcctccgctacagccgtctcctgttatgaccaggagagggctgcgggactctcattcctctgaagaggatgaagcatcttcccaaactgatttaagccaaacgat

SEQ ID NO: 3662 - DNA, 482 bp, Homo sapiens
caagaacatttaagtactctgtgtttcaattagtttttttgtaatactgagttagcttgtctcagacaggttaagaactggtaataatctgtacactgacttatgtgaaatacaatataatattttaccagtttaatgaatgatcagttggaagtgggagcccctttgcaaatcacttaaattagaagtgatttgcaacgcttaggttaaggagaagagcgggctgtgtcattaatgcaggaacttacggtatccagcggggtccagtcaggagacagaaaccacacatgattcaatcagagaaagtctgatgtgaagaattcttagttggggattgggttataagaagtaatgatatgtgaattatatctcaataaagctgttatctttaaaaaaataaatcaaaaagaaatagagaggaccctgaagaatataggagccaggaacagtggctcacgcccataatcccagcactttgggag

SEQ ID NO: 3663 - DNA, 400 bp, Homo sapiens
  misc_feature (1)...(400): n = A,T,C or G
cacatatgnatncacgatcgccaacctttcccccaccagctaaggacatttcccagggttaatagggcctggtccctgggaggaaatttgaatgggtccattttgcccttccatagcctaatccctgggcattgttttccactgaggttgggggttggggtgtactagttacacatcttcaacagaccccctctagaaatttttcagatgcttctgggagacacccaaagggtgaagctatttatctgtagtaaactatttatctgtgtttttgaaatattaaaccctggatcagtcctttgatcagtataattttttaaagttactttgtcagaggcacaaaagggtttaaactgattcataataaatatctgtacttcttcgatcttcaaaaaaaaaa

SEQ ID NO: 3664 - DNA, 396 bp, Homo sapiens
taggaaggagagacttgatttgggggtcagtaggctgagctgccagagccaggggaaagtgagagatcgaagatgtagaaaaaatgctgagaaatgtatgaaacatggttcttaggaaggcgaagaagtgggatcaaaaatgcacaaaagtattactgatcaggagattttatgctgagtgattgaaagtttgaactgaggtctctgatcacaaatggcatagatcagatgtgggcctcagggagattaatttcgcagcagtggtaaaataacagattactggaggctaaaggaggaagataaaagattcagaaggttttaagtacgggttgtggaatggctgaagagagtggtaacaataacaacaacacagctacgacaaggaaaaaaaaaaag

SEQ ID NO: 3665 - DNA, 481 bp, Homo sapiens
  misc_feature (1)...(481): n = A,T,C or G
caagaacatttaagtactctgtgtttcaattagtttttttgtaatactgagttagcttgtctcagacaggttaagaactggtaataatctgtacactgacttatgtgaaatacaatataatattttaccagtttaatgaatgatcagttggaagtgggagcccctttgcaaatcacttaaattagaagtgatttgcaacgcttaggttaaggagaagagcgggctgtgtcattaatgcaggaacttagggtatccagcggggtccagtcaggagacagaaaccacacatgattcaatcagagaaagtctgatgtgaagaattcttagttggggattgggttataagaagtaatgatatgtgaattatatctcaataaagctgttatctttaaaaaaataaataaaaaagaaataaagaggaccctgaagatataggagccaggaacagtggctcacgcccataatcccagcacttttngag

SEQ ID NO: 3666 - DNA, 435 bp, Homo sapiens
gacatgcctccgccggggggctatgggcccatcgactacaaacggaacttgccgcgtcgaggactgtcgggctacagcatgctggccatagggattggaaccctgatctacgggcactggagcataatgaagtggaaccgtgagcgcaggcgcctacaaatcgaggacttcgaggctcgcatcgcgctgttgccactgttacaggcagaaaccgaccggaggaccttgcagatgcttcgggagaacctggaggaggaggccatcatcatgaaggacgtgcccgactggaaggtgggggagtctgtgttccacacaacccgctgggtgccccccttgattggggagctgtacgggctgcgcaccacagaggaggctctccatgccagccacggcttcatgggggtacacgtaggccctgtgccctccggccacctg

SEQ ID NO: 3667 - DNA, 422 bp, Homo sapiens
  misc_feature (1)...(422): n = A,T,C or G
caagctcggatccctgaatttgatccaggtgctacaaagtacacagataaagacaatggagggatgcttgtatggtctccatatcacagtatcccagatgccaaattggatgaatacattgcaattgcaaaggaaaagcatggctacaatgtggaacaggcacttggcatgttgttctggcataaacataacattgagaagtcccttgctgatctccctaatttcactccctttccggatgagtggacagtggaagataaagtcctatttgaacaagcctttagttttcatggaaagagctttcacaggattcagcaaatgcttccagataagacaattgcaagccttgtaaaatattactattcttggaaaaaaactcgctctangacaagtttgatggatcgccaggctcgtaaactacn

SEQ ID NO: 3668 - DNA, 444 bp, Homo sapiens
  misc_feature (1)...(444): n = A,T,C or G
ccagaattgatgaaagacaacaatcctcagatataggattcccaaggaaccccaaatggtgtatataaaaacaaattcaaacctagactcattatagaaaaaatgaagaccatcaaaataaagagaagaccttgacaccatcagagaaaaaaaaggcaacttacagataacaactattagctaacttttcaacagcaccatggaaggtagaagacagggcaatattaactttgatgcactcagagaaattagctgagaaactggaattgtacattcggtgaactatcttttaagacataaacaaactaaaaatattataagacaaactgtgagagcttactaccaacaatttctcactgataatatttctacaggatgtacatcaagaaaaaagataataaacctccccaataaaggcnggncngnnnnncccccctccccttc

SEQ ID NO: 3669 - DNA, 407 bp, Homo sapiens
atcacaactgttttgactgctggcagtctaaaacagtccacccaccccatggcactgccgcgtgattcccgcggccattcagaagttcaagccgagatgctgacgttgctgagcaacgagatggtgagcatcagtgcaaatgcaccattcagcacatcagtcatatgcccagcgcagttacaagatgttgtttcggcaaagcattttgatggaatagggaactgcaaatgtatgatgattttgaaaaggctcagcaggatttgttcttaaaccgactcagtgtgtcatccccggttatttagaattacagttaagaaggagaaacttctataagactgtatgaacaaggtgatatcttcatagtgggctattacaggcaggaaaatgttttaactggtttacaaaat

SEQ ID NO: 3670 - DNA, 411 bp, Homo sapiens
cgctctctcgcgctaccctcccgccgcccgcggtcctccgtcggttctctcgttagtccacggtctggtcttcagctacccgccttcgtctccgagtttgcgactcgcggaccggcgtccccggcgcgaagaggctggactcggattcgttgcctgagcaatggctgccatccggaagaaactggtgattgttggtgatggagcctgtggaaagacatgcttgctcatagtcttcagcaaggaccagttcccagaggtgtatgtgcccacagtgtttgagaactatgtggcacatatcgaggtggatggaaagcacgtagagttggctttgtgggacacagctgggcaggaagattatgatcgcctgaggcccctctcctacccagataccgatgttatactgatgtgttt

SEQ ID NO: 3671 - DNA, 429 bp, Homo sapiens
ttctccggctggtgggtgtgtggggcagcctttttgcagggtggcaaccaactatatctgaggaccagagccattttggggcaccagagcttgtgacctctccatctccacccagctgggtccaggggccactctcagcactcacctcagcagctgacatcataaagcagacttgggaacctggaagcactctggagaacctttccctgagacatggagctttggggccgaatgctgtgggccctcctgtctggcccagggaggaggggaagtacccggtgctgggccttcagctcatggcaaccccaaccacctctggctgggttatccagtgccatagaactggtcagccactggactggggtctttgagaagaggggtatccctgaggcccgggaatccagtgagtacatcgtgggtcatgttccg

SEQ ID NO: 3672 - DNA, 475 bp, Homo sapiens
  misc_feature (1)...(475): n = A,T,C or G
cccttcccctgagagcaggtggactgctggtggtggctttctttcctgcagagaggcactttagacccatacctgctgtgagctgaattgatgttctcatcctgtgaaccttctcccactttaacctaatttatctttacttgtttaaagataaggaaacccaagatgtactttatttgcaaactcaaagcaaatggcgagccacctgtgacccagtaaccagaaaagaaaccatgccatttgtataagtagagacacttcttgttgaggtaggcaaggctcttgtgagcgatttttttttcccctagtgagacctaacaaaagacaagctatatcatttctgcctgaaattatctgcttgaaaagatcanaatatcaggatacttagctcttcacaaatatgaagtcctggaatggaaaaaatccataagtccataaattaacttgataaatattttagaacagacaaaagaaa

SEQ ID NO: 3673 - DNA, 402 bp, Homo sapiens
  misc_feature (1)...(402): n = A,T,C or G
gacgacgaggaggaggaggattttaaagacacatttttcccatgcccctgatggagagacatgagtctgtggagttgactgtgcatcaaaaggtgtttcacattgtctacgacctcctgcgaactgacaaagcctacgtttccaggctccatctcctggatcaagtgttctgtgcccggctgctggaagaagctcggaacctgcagttccttcccggccgacgttgtccacggcatcttctctaacatctgctccatctattgcttccaccagcagttcctgctgcctgagctagagaagcgcatggaggaatgggaccgctatccacgcattggagacatcctgcagaaactgacccccttcctcaagatgtatggagagtatgtgaagaactttgaccgn

SEQ ID NO: 3674 - DNA, 413 bp, Homo sapiens
cttgcgggcggggaagaagacctttctcccccctctctgccgcgccttcgcctgccgcggctgtcaactcgctccggagcgcggcgccgagcgcagggatacagcgcccagcggggtctcaagattctgccctccaagaaagtcttgccatgattggataggacccccagataaatattcaaaccttcgacctgttcacttttacatacctgaaaatgaatctccattggaacaaaagcttagaaaattaagacaagaaacacaagaatggaatcaacagttctgggcaaaccagaatttgacttttagtaaggaaaaagaagaatttattcactcaagactaaaaactaaaggcctgggcctgagaactgaatcaggtcagaaagcaacattgaatgcagaagaaatggcgg

SEQ ID NO: 3675 - DNA, 429 bp, Homo sapiens
cgatgaccaggataaaaaggtggaaactctcatggtaccatcaaaaaggcaagaagcattgcccctccaccaagagactaaacaagaaagtggatcagggaagaagaaagcttcatcaaagaaacaaaagacagaaaatgtcttcgtagatgaaccccttattcatgcaactacttatattcctttgatggataatgctgactcaagtcctgtggtagataagagagaggttattgatttgcttaaacctgaccaagtagaagggatccagaaatctgggactaaaaaactgaagaccgaaactgacaaagaaaatgctgaagtgaagtttaaagattttcttctgtccttgaagactatgatgttttctgaagatgaggctctttgtgttgtagacttgctaaaggagaagtctggtgtaatacaagt

SEQ ID NO: 3676 - DNA, 402 bp, Homo sapiens
  misc_feature (1)...(402): n = A,T,C or G
cgaattttaatcaatagaatttttgtatatatacttgtatccatatacactaaagtctaaaattggaacataactatacggtgatgcaactaggagcccctttgtatctctactgtcttttgggcttcctatttttgcattatttccacttttattgataaccaaacactttccaaatgttaagtgtataatctcagagggctagttaggaatttgctgaagagtggtagagaaagccatacttttaactatctttaagcctcctcatgctttctaagaaattaatcttctttttctgtttcccgatctcttcccttctgtctgtttcacttggtactagatcagctcttatcattcctcctgcagttgaatccacattctgtttccaggattttacgaatn

SEQ ID NO: 3677 - DNA, 412 bp, Homo sapiens
attatatttgccaatgtttcagtgcgggacgtcaagccccacagcttggatgggttacgacctgacgagttcctaggccttacccacacttatagcgtgcgctggtctgagacttcagtggagcgtcggagtgacaggcgccgtggtgacgatggtggtttctttcctcgaacactggaaatccattggttgtccatcatcaactccatggtgcttgtgtttttactggtgggttttgtggctgtcattctaatgcgtgtgcttcggaatgacctggctcggtacaacttagatgaggagaccacctctgcaggttctggtgatgactttgaccagggtgacaatggctggaaaattatccatacagatgtcttccgcttccccccaaaaaaaaaaaaaaaaaaggggcggc

SEQ ID NO: 3678 - DNA, 403 bp, Homo sapiens
  misc_feature (1)...(403): n = A,T,C or G
aaaggctnnncanaacttaggaaacaggataatgaatgtgcctctgtcattaagccactaatcgttaattatccccctagacatcacataatgtgctacccaggcaaaaataaaattgcttgaacttttctaccgagctctagttttaaataaattactcgtgtcaaaactatttaccaaagtgagtaattttagatatttgtcagacttcataacatgctttaattagtgccagctaataaagtcctcgtgtaattaagcatacatacatccctgttgttttgtattttgaatttttgcttacgataattctttgaaatgatttgatgcctggctttcggaatacatgtatgtgcatggaggtgtgtgcctttgtgtgcatatgtttccaatgttactccgt

SEQ ID NO: 3679 - DNA, 400 bp, Homo sapiens
  misc_feature (1)...(400): n = A,T,C or G
ctgtgatgttgggccagctcctgttcaggtccagagctgctaacgtgggttctactcagtcccagtgacttggccagaatagagctttgccaggtaactgccctgtgctaggtgaaaggggaaaagcagtagctggatatatttcaaatgaggttttgaacaagttcagaaagtggaacttgattgaaaagtgaacaagtgtagtagtgtgtgagaaaattcagatggtgtcggatgcagaagttaatattccacttaatgttatctgagcattaaaaatcatcagcatttaactgagaccccactatagagtttccttatcaagactttttggttttaaagttggttttaatgcattgcaagatacaatagctattttgcttttagatttttcccagcn

SEQ ID NO: 3680 - DNA, 402 bp, Homo sapiens
accttgtcttgaaacaaaaaaaccccccacctccaattgggggataagcccacaaaaaaattacgggaaaggaaaaatctttggttaagcccctgaggctggggctttaaataaatggctttttttaagaaattaaaaaaatattaaaatggaaaaagagcccgggaaatcctcaaagcaatttttgtaccaatcggggccatatataaaaagggccctttttttacctgtaactctgccagaaaaaaatgcttgggatgggccacccatttgactcaatatcacagcttgctttttatccctaggggaggataactggaccaacccctcttaatatatcccatggggattttggaaaaaaaaaatctttgttttgatttactccacaagtaaacactgtgg

SEQ ID NO: 3681 - DNA, 519 bp, Homo sapiens
  misc_feature (1)...(519): n = A,T,C or G
cttacatgtaattggagtctcagaaggagaagagaaagagaatgaaacagatcaaaatatttgaagaaataatgggcccaaattttcaaatttggtgaaatacataaatgcatagatcaagaaatgcagtgaaccccaaatgggatacatttgaagaaaactgtgcataggtacatcatattccaactggtgaggaccaacaataaagagagaatcttgatagtagccagagaaaaatggcacggtatctttggtggaacaatgctttaaatgaacgatgacttctcatcagaatttataaaggccagaaaaattgaaatgatgtttttaaagtacaaacgaggggtaaaaaaaaaagcaaaacactgttaatccagaattctatgtgtagcanaaatatcctttgtgagtaaaggcaaattactacattttcagataaaaggaaactaagagcatttattatcagcagacctgcccacagaaatgctaagggaaagatngtcacgctataaagtgaaa

SEQ ID NO: 3682 - DNA, 399 bp, Homo sapiens
  misc_feature (1)...(399): n = A,T,C or G
cagctttgtttggggtgggcaggagtcaggagtcttgagcagatgcatcactgtgaagaagaacgacatgtcggggctgcacctgtcctcccgtcggcatttgacgaaagctccctgaagcggggcagcactctcctcctgagagatttaccatttattgcccctgtgaggaatgtgtgcttgggaactgccaagtcttaccccttctggaagaagaggttttctctgacaagagcctagagcgtcggctctattatgctgggacttgacagaggagccatggggtttaaacagtaggaaagaggggctacgcgcagtggctcacgcctgtaatcccagcacttcgggaggcgaaggcgggtggatcacttgaggtcaggagtttgagaccagcctggn

SEQ ID NO: 3683 - DNA, 418 bp, Homo sapiens
taagaattcaatggtatttcttagcaatgagaaagtaggaaaatatatatttagaaagatcatattgatgaatatcactaaggactcatattatgcaaggatgattagcttagataactgggaaaagctgatttttttctttagacttgaattctgacctgttagttgaggaatcacaaatatgttgctgaataatgtcaaacagttcatgacctaattcataagaagaaaatagatatcatctaagtgaaatattgtgccattattaaggtgtaattgtataactatgataggtaatattttgccccattttataagagaccacaatttaaaagcctaagggtttactgggaagtgtattttattggagcatcccttctcttagcctttgtgaacttgaatcattacacttggaagg

SEQ ID NO: 3684 - DNA, 399 bp, Homo sapiens
aacttttcccctactctagggttgtatggaaaacaatgaaatattgggggaaatacacatctatacacttattttacagcatcctacaatgttattagcaaacctcctttgttttaaagtacatggtgggctcggcaaggtggctcacacctgtaatcccaacacttttggaggctgaggcgggagttcacttgagtccatgtagcctgggcaacataacaagaccccatctgtacaaaaatgtcaaaatattaagacagtcatggtggcatgcctgtagtcctacctactcaggaggctgaggtgggagaaccacttgagcccaagagttcgaggctgctgtgagccatgatcaccccattactgcctgggtaacagagcaaaatcctatctctaaaa

SEQ ID NO: 3685 - DNA, 421 bp, Homo sapiens
  misc_feature (1)...(421): n = A,T,C or G
cgggtgtcttacaaatttaacagtgtcagttgggaccgtccaaagatatttacaggactaaccattcaacatgtgctcactgatgtctcctatcccatcaccctccctcttcatcagctggtttgatggatttgggggttttaacttttcgttaaggcgtgcattctgattcttaatcaaggaatgaaatctgtgtataaaacacacagaggaatgtacagatatgagtcacatggctccgcacccagtgaaattataccaaaatgtattagccaagtgaggaagtcatagtaccaaatacaagattttatgaaaaaaaaaatacaaaaagatgtgctacttttcacagaatcaccatctccatatttcaacataggtatgacacacggccctcaaatgggtgtcctggtagtaaactttn

SEQ ID NO: 3686 - DNA, 410 bp, Homo sapiens
tggagtctcactctgtagcccaggctggagtgcattggcgcgatctcggctcactgcaacaacctccgcctcccgggtgcaaacgattctcctgtctctgcctcccgagtagctgggactacaggcgcgtgccaccatgcctggctaattatttgtatttttagtagagatgaggtttcatcgtgttagccaggatgatctcagtcccctgacctcgtgatccaccgtctcggcctcccaaagtgctgggattacaggcgtgagccaccgcgcccagcctaactatgaggtgatttaaggaaagtaatgggaaggtgcacttaaatgccctgtgattccctcttttctttatgttaatctggaaacttgcagaaaagccttctcttgataacaaattttatgtaactagc

SEQ ID NO: 3687 - DNA, 457 bp, Homo sapiens
  misc_feature (1)...(457): n = A,T,C or G
nactgagttcgatccntgggacacngcnncggaanttccgggaagccccacgcgtccgcttttcctcttaagggcctcagaactcttgttttttctgggctgagggggaatgagtgttcttgggatgggccagcctaatgcgcatgctttctgcctctggtaacaggagtgagtgagcccctcagacctgcactctgggtgtctcctgctttcaaaggttcttaatagtgaatgctttaaaattaaagtcatcacgaaatggaagttttcccagggtggaaaataagaggaagtgctgctgtaattgggagcacaaggggcctcccaaaaaggagccccacctcagcatcactgccttaatcgaggcctccctggggtgggtggggaactatcctccctccctccctcctcctggggtgggagggcgctcctgttcccatctctgtgttccctggag

SEQ ID NO: 3688 - DNA, 399 bp, Homo sapiens
cccacgcgtccgattgtcttctgatccataaaaatagaacatctttttatttatttagttctttgatttctgtaaaaatattgtcggtttttttgtagtataaatttcgtacttcttttattacatttatttctaagtattttatttttccctagctttattgaagcataattgacaaacaagaattatatacattcaagttgtacaacatgatttttaaaatgcatatatattgtgaaatgattaccacaatcaagctaattaacatatctatgacacatagttaatatttttgtgtgtggtgagaatacttaagatctattctcttagtaaatttcaagtataccaatagttgccatcctgttgtaagcccaaatcactttggcttagtgattttgg

SEQ ID NO: 3689 - DNA, 467 bp, Homo sapiens
  misc_feature (1)...(467): n = A,T,C or G
agctagtagaaaagtacagaaaatttgactattatttatagatttcaggtatatttatatgtgtaaaagaaattgacaaagaaatatttcatctggcctttactgactcctgttaaatgcagttttaaatttatatcgtaacacctacttaagtgcctgacacagtaggtattcaataaaaatttactgaattaaaggattaaattaggtgacatggtgacatctatccctttattttgacactaaaacatggacacaactagaaagaggtacaatgcaatataaagtcacaatagataatatatatcaaatttctaaaaggtaaagaatgttgtgggttcatgcagtcacaggaatgacaatcattcaacagatagttcagaaacactttttatctgcaaggcactattctagatccagaagatgcaatgttgaacaaacagacaaagccctgccctcagaaggcn

SEQ ID NO: 3690 - DNA, 531 bp, Homo sapiens
  misc_feature (1)...(531): n = A,T,C or G
tgatgggggcncccccatggacccctgttgaacggctctgagancccggcccgacccacgcgtccgcggacgcgtgggcggacgcgtgggcgacgtgggagcaagaggcgtttctggattccctggtgccgatggaatttctggacacccggggcaaggtgggcccaggggaaggccgggctacgatggctgcaacggaacccagggagactcaggtccacaggggccccccggctctgaggggttcaccgggcctcccgggccccaaggaccaaaagggcagaaaggtgagccttatgcactgcctaaagaggagcgcgacagatatcggggtgaacctggagagcctggattggtcggtttccagggacctcccggccgccctgggcatgtgggacagatgggtccagttggagctccagggagaccaggaccacctggaccccctggaccanaaggacagcanggcaacagaggacttgtttctacngagttaagggtgaaaagggtgacgtanggcagcctggaccc

SEQ ID NO: 3691 - DNA, 423 bp, Homo sapiens
  misc_feature (1)...(423): n = A,T,C or G
ataagcatgattttttctcatttcacgtttaagaaaagtgcagctctgaaaggtcaatgctaattagatagccctgactttgtgtcagtcaacattctaagcctttcatatgtagttggtcatttggcaatcatagaaccttgtgggatggaaagtatttatatccccattttacagatgtggaagctgaggcacagggggattaagtaatttgcccaaagtcacaaagctggtagatgtcttaagtgaaaactcatacccagttcttgtttgactccaatactagaaggcccattaaacattatgctcctctgcacttcctgagcctcaggggatccttacaatatgtctattccaagtgtcacttcattccaagcccaagtgaccctctgtattcttgctcttgatgataggccattggcn

SEQ ID NO: 3692 - DNA, 457 bp, Homo sapiens
ttggtgttgtaacatgagtatgtaaaatgtcaaaaaaattatcagaggtctaggtctgcatatcagcagacagttttgtccgtgtattttgtagccttgaagttctcagtgacaagttttttctgatgcgaagttctaattccagtgttttagtcctttgcatctttaatgttaagacttgcctctttaaaattgcttttgttttctgcagtactatctgtggttaacaaaatagattatttctctgctttaatatttgatatcttacatctaaaataaattctctccacatataaaacccatagcctttggagatatggaaaatggtatctttcagatttctagaagttcaagtgtcatacaacaaaacaggaaccccctttactcttatggacctcatttcaatatactggttacagtttgatggaattgtataatttaatatttctcttgtact

SEQ ID NO: 3693 - DNA, 532 bp, Homo sapiens
  misc_feature (1)...(532): n = A,T,C or G
ggtgggagaagccnnaatgacgccgaatgaggggcngtagnacccggctcgacccacgcgtccgattttactttggtggatttaaatttctcgttcttcaaagaagtatttctgatcatctctcacaaaacacaggcaacccagactaccttgtttttcttctggattgagtattatagtcaaacgtaaagccaaattttgaggacgtggaccgtgggtttcttcccactcagggcaaggaagagaaagagagataatccctatcaaagcttctgggattatttgggactatacctaaaaggaaagtgacatctttgtaatgggatttcccaagtcatggatagaaatccacttaagtagctaggtgggagctgtctttgtgagtggtgtctttgagatactgatggccctaatatcggttatctctatctgaagacctgcagtttagcttttcttcacctctacttaattgggcagnctttaacccctttccatggtgaactctggctttnntatctctgagagnacagcc

SEQ ID NO: 3694 - DNA, 408 bp, Homo sapiens
cggacgcgtgggagaaaatttgataggagtttgtttttttctatttataggccaagcaataccacgtataaatattaagaatcatggctgttccttagtgcctagttgtttataaaccatgggaaagaatgaaatcattgaccaaatgagacagggtaacagtcttccctgggagtaaagagactagcagtctctattgacatatattttaggcctggcctccaaaataaatttacccaaagaagtgatgtatttgtgtccagggctaccgagcctaatctttggctgcctctgtgttattctaagttgtaattttccatgtcatctaaatttgtaataattctttaatatgatagtgtttcagggaacaaacattctgcttgctgcatttcttctgagtgagtaatt

SEQ ID NO: 3695 - DNA, 409 bp, Homo sapiens
ccaagtttgtttctgtacctagaaggtacatgaaaagtttcagcagctccgcaaaaatatctggcatgagaaagctgtgccactatgactcatctgaataatgaaagcccattaacagtatagtcagggcgccatctggcaaggtgaggaaatgatcaagaataaatatattgagtgtccgtcagaggcagcattgtgtacttgttaggaaagcagatcttgaaatcaaactacctgggtaagaattcattcttcacatcattgtattcttgtgaccctgagaaaattatctaatatctctctgcttcaaattatttacaagtaaaataagaagaagaatagtatctacctcacagctttgtgtgaggataagttaatatatctaaattgttaataaacctgcttacta

SEQ ID NO: 3696 - DNA, 419 bp, Homo sapiens
  misc_feature (1)...(419): n = A,T,C or G
gcgctcggtgaggcaaaaggaggcgctcggcccgtggcctgacagggacttagcccgcagagatcgaccccgcgcgcgtgaccccacacccacccactcatccatgtatccactccctgcgccgcctcctcccaccctgagcacagccgacgaggatgatagacacccaggacagcagtattctgcctttgagggactgaccccagctccagtgctgcaggcacattgctccagggcctctggggtgctcctgatgcccctcacccactgacgaacatccccggcgggcgagggggcggcagggatccttctctgtcaggtctaatatatacggacgagaagctcactgtgacccaagacctccctgtgaatgatggaaaacctcacatcgtccacttccagtatgaggtcaccgaggn

SEQ ID NO: 3697 - DNA, 393 bp, Homo sapiens
atcctcttgtaattaatgcaataaaacgctttcttatttattcagaggtgagtcataatttgagacaaataatatttgtagagtgatcctctttgtcagataaaaatagtaagcacaatcttgttaagaaagggaggggacgtttcaggtttattaattgtatgtatccttatagttgagtagaatatcataagttcctcttaaaatttaaagaccccagaaacagttctctcatgaactcgaagaatgaaccttagtgtgtaaataatggccagggtaatagacaagccatatggaaaagagggtcatgggagccaaaaagttctaaatagggatgggcttttggccttggacaccttgtgggtgagcacgatgaccacgtgaagggacagg

SEQ ID NO: 3698 - DNA, 429 bp, Homo sapiens
gcgaccacgcgtccagcctcgcttccctcccgtggcgaccagggcccgagccgagagtatcagttgtaggtacccgcccagaaactagacacaatgtgcgacgaatacgagaccaccgccctcgtgtgcgacaatggctccggcctggagaaagccggcttcgccggggatgacgcccctagggccgtgttcccgtccatcgtgggccgcccccgacaccagggcgtcatggtcggtatgggtcagaaagattcctacgtgggcgacaaggctcatagcaagagaggtatcctgaccctgaagtaccctatcgagcacggcatcatcaccaactgggatgacttggagaagatctggcaccacaccttctacaacgagcttcgcgtggctcccgaggagcaccccaccctgctcaccgaggcccccctt

SEQ ID NO: 3699 - DNA, 480 bp, Homo sapiens
  misc_feature (1)...(480): n = A,T,C or G
gcncggcaattgatacccctgcggtagagcnccgtaatacccggcncgacccacgcgtccgggctgtgtgtgcgtgtgagaatgatcacatgtggtttcatgctttgttcagagcctcagaccactgggccttgtccagtgagagtcctctctggcgacatcacacgcggagcagccaggggccaccttagatctcagatctctcagagcaatacttttctgaactgccactgtgcctgggtggttgggtttggtgtcatgcttctgactagagtagatcgcgcatgtccaccagtgatacgttgagtccttacagttccccccatggagtcccataagcagctccatcgagatctgtcagcaagttgcaggaccccacaatgttctgacatgttaagacccccttacatgacgagtagagaggcagctgaggccacaaccgtgtcttcctcttgaatggagctaactcggaaccccccg

SEQ ID NO: 3700 - DNA, 535 bp, Homo sapiens
  misc_feature (1)...(535): n = A,T,C or G
cgatgcgaggggccnnaattgaagccgcactgacggtcgtagnacccggcncgacccacgcgtncgggtggggaggactgttttttcataaatcagttttgtgaggtatggaaggatgaacaagttgagaaggaaaacacttacactagttacttggacaagttctttagcaggaaagaagatactgaaatgctagaaactgagccagtagaggatgggaagcttggggagagaggacatgaggaaggatttctgaacaacagtggggagttcctctttaacaagcagctcgagtccataggcatcccacagtttcacagtccagttgggtcaccacttaagtcaatacaggccacattaacaccttctgctatgaaatcttcccctcaaattcctcatcaaacatacagcagcattctgaaacatctgaactaaaacactcagcagacatttatctttgtattcttcatgagatggggtttgtctttttttattactagnggttaagtcattttttactttgatcagatggtgt

SEQ ID NO: 3701 - DNA, 464 bp, Homo sapiens
  misc_feature (1)...(464): n = A,T,C or G
ctatcattttattaagtatgattgacacagcccatgggccagaacacactctacaaaatgactaggataacagaaagaacgtgatctcctgattagagagggtggttttcctcaatggaaccaaatataaagaggacttgaacaaaaatgacagatacaaaccatttctatcctgagtagtaatctcacacttcatcctatagagtcaaccaccacagataggaattccttattctttttttaatttttttaagacagagtctcactttgttgcccaggctggagcgcagtggggtgatctcatctccctgcaacctccgcctcctgggttcaagcgattcttgtgcctcagcttcccaagcagctgggattacaggtgcccgccaccacgcccagctaatttttgcatttttagtagagatggggtttcaccatgttggccacgctcgtctccaactcctgan

SEQ ID NO: 3702 - DNA, 416 bp, Homo sapiens
gagtcaatttgtgaggaacacttttatgacttctagagcttgtacagagcagcaaagaacaagacacaaataataggcggtttctaacactctgaaacgtgcaagaggaatcgtttccaccttttctttctcctggttagtgctgacatcaaaatgaacatttgaatttcagggtgagcataagtcctgccttagaagggatatttccaaacacacaaaggttatatttataagctgagctgcaaaagacaatttttctgctgtgagactcgacaggaccagcctagtcagcaggattttaaaatccttctgcagacatatgttagccaagttactggactggtccaaggctcattacatctgctgacaatcattttgaacaagtataaaccaaacacttctgagtctaccagtgc

SEQ ID NO: 3703 - DNA, 527 bp, Homo sapiens
  misc_feature (1)...(527): n = A,T,C or G
cgcttgttgagccgggaccggccgaattcggtcgaccacgcgtcggccacttcacaaggactggcagcggcgcgtggccacgtggttcaaccagccggcccgtaagatccgcagacgtaaggcccggcaagccaaggcgcgccgcatcgccccgcgccccgcgtcgggtcccatccggcccatcgtgcgctgccccacggttcggtaccacacgaaggtgcgcgccggccgcggcttcagcctggaggagctcatggtggccggcattcacaagaaggtggcccggaccatcggcatttctgtggatccgaggaggcggaacaagtccacggagtccctgcaggccaacgtgcagcggctgaaggagtaccgctccaaactcatcctcttccccaggaagccctcggcccgcaagaagggagacagttctgctgacgaactgaaactggccacccagctgaccggaccggncatgcccgtncggaacgtctataaaaggagacagctcgagtcatactgacgaagaa

SEQ ID NO: 3704 - DNA, 396 bp, Homo sapiens
  misc_feature (1)...(396): n = A,T,C or G
cccacgcgtccggaagttcttttgccagataaatattttgatattattttcctttttaatataaaggataggtttgaattgtacttaaaatgcatagcattattaaaaacaatcttttaaaatataatttataacatagattgaagcctccccttaagaaaccttaaagaaataagtatcctactcaaaaaaggaagtctgtttcagaactttagggcctttgaaatatttcctcaagcctatttcatgagatctacttggtttacccaagtcatgtttttaatagactgctaatatcaaaggagaatttttaaagccttaacaatgcctactttccattcactgttaacatggaataaacacaattcccaacatcttagatagtgtattatgctn

SEQ ID NO: 3705 - DNA, 407 bp, Homo sapiens
  misc_feature (1)...(407): n = A,T,C or G
aagagtccgtctcaaaaaaattgtgttttaatcattctttataatattaacacaatagaatgtgaatcctgggaatttataagaaaaatgttcattttaaaatacattctctatgacatgtagtgcttccatttgttctgtatatattgtatttctttctctttagttggtgcaaagaaacaggttaatatgcagaagaaatccatataggatctttgagtatttgcaactcagcctagaagaggtatgttttcaacatattattatttcagccatcggtctctgggcctgaactacactatatgtgaacctacctcacagtgtagttctgtatgtaattcaattattgaatattgtaattcagtattgaaatcactatgggtagctcccaagtaggcctgcctttn

SEQ ID NO: 3706 - DNA, 464 bp, Homo sapiens
  misc_feature (1)...(464): n = A,T,C or G
cccacgcgtncgcggacgcgtgggcttctgtgtgtggggcattaccctctcgggaatgggggtcttaagacctacagtcaaacaaggaggcatcagatctttctcacgcttggaagatcatggactcggccttctgcggcatctgactcttccgccttccttttctgcttgattacatcgggcccacctggatgtgctgggtcgcctccctattttaaggctgtacaaccatggcaccagcatctgcttctggtgaggactcaagaaactaccaatcatggcagaagcaggtgtgtcacatggcgacagagagagaaagagagggggaggagatgccaggctcttttaaacaactagctctcatgtgaacctaatagagtgagaacccactcattacgtcggggagggcacaaaaccattcatgagggatctgcccccacgacccagacacctcccaccaggtc

SEQ ID NO: 3707 - DNA, 479 bp, Homo sapiens
  misc_feature (1)...(479): n = A,T,C or G
gaatttttcattagcacaatgtgttgaggtgagacttcatggaaagttactgtaaaaaacaaaaaaaagtccttacttccattcagtttaccatcatggatccaaactaagggtaaagccaatacatcctaatatgtgcccaacccataactttaaatgattaaatgaaacacacaacagggagatctattgttaatgtgttaaccaaaattgccaggaattgccctaaaggggaaaaattgtttaatcagtaaatcagtgaggaaatacaagattataaattagaagcgttgctatggtgttagctcttacatccctgaacaacaaaaaagacagttcaaccccaagcatggaacagaaaaatgctgagcttagaatgttgtcagctagatattgtgtaaaaataatgttctctttaatacctgtgtctctgtggataatgtatttctagntcttccatcctgtcccttacagataan

SEQ ID NO: 3708 - DNA, 415 bp, Homo sapiens
agaccacacaggatggtgaggatggctgacttcatgctgcggaaactgaaggcaataatgttggcttttggaaggggcaagacgagaaactctgaagaaagctctgactctcaggaagtgatctggaaagatacctgtatgtttactgccttgggacactgggggatctccatgtttggactatgggacagagaagtgaccctaactaactatgaactatttatttcctcctcccctacccctagttaagtgccacaaagactgtgttatgtagtcagtacttttctcatgtatctttctctagaccatttatatacgggtgaaatgaaagcttttttgcatgtacttgatactcagtctgtaaactcagacttcgctttttttgtgagactatcctttcaatatctttagtaac

SEQ ID NO: 3709 - DNA, 410 bp, Homo sapiens
  misc_feature (1)...(410): n = A,T,C or G
cccacgcgtccgcccacgcgttcggttctacataattctctattctccatttgccacaagtgatgaggactttattaaaagcattttgaaaacatccacacataccttttaaaatcttttctttttctcctggaaataatatgtatattaggnnnnnnnnncnnnncnnncnnnncnnnnnnngnnnnnnctnncntctnntccncnctngcntgtgcctttccttcccccgctgtggtggtgttctctcctttcctttttggggtgcttttttttctctgcttgggactctgctgctctgctccttttgggttgcttgtttccctgcggtttctggtctgtcgtcctggcttgccgttttcttcgtggcctttgtttcgttcgctctccttccgctttgtgggtggttg

SEQ ID NO: 3710 - DNA, 353 bp, Homo sapiens
cccacgcgtccgctgtaaaagacgtgaaccagcaggagttcgtcagagctctggcagccttcctcaaaaagtccgggaagctgaaagtccccgaatgggtggataccgtcaagctggccaagcacaaagagcttgctccctacgatgagaactggttctacacgcgagctgcttccacagcgcggcacctgtacctccggggtggcgctggggttggctccatgaccaagatctatgggggacgtcagagaaacggcgtcatgcccagccacttcagccgaggctccaagagtgtggcccgccgggtcctccaagccctggaggggctgaaaatggtggaaaaggaccaagat

SEQ ID NO: 3711 - DNA, 388 bp, Homo sapiens
cataatttgaatcaacacaaccaccgcatcaggcccccagttatatttctctgtaataagctcatgctctcatgatttacaaaagtacttgccttttcactcaacatttacattcctaacttcattgaaaagtagacagtaaatcctacaggtctcttggggaataaataaaccaacattctatgtagcaccatccccttttaacaattgctttttaaattaaaaaaaaaaaagagttttgggatataatttacataccataaaacactcattttatgtgtacaattcaggggattttagtgagtttacagggggtgcaaccattaccataatccaatgaagaacccaattattcatgctgtgtaaaacagcttgttacatctcttcc

SEQ ID NO: 3712 - DNA, 406 bp, Homo sapiens
cgtccccgtcagctccccagcgtcgtctgctttacggctgcgcgggcagcgactccgagtgctcggctgggcgcctggggcccctgggacgccgggggcctgcgggaggcgtcggcgggggttacggggagagcgaatcgagcgccagcgagggagaatcgcctgccttcagctctgcctccagcgactcagacggcagcggtggcctcgtgtggccgcagcagctggtggcggccaccgcggcctctgggggtggagcaggtgcaggggcgcccgcaggccccgccaaagtcttcgtgaaaatcaaagcttcccacgcgctcaagaaaaagatactgcgtttccgttcgggttctctcaaggtcatgactacagtgtgagtttggggatttgcttgggctccccc

SEQ ID NO: 3713 - DNA, 449 bp, Homo sapiens
  misc_feature (1)...(449): n = A,T,C or G
ctgaaactgggtgatttataatgaaaaggaatttatttcttatagctatggaggctaagaaatcccacgtgaagaggccactggtgagagcttcctgctaagtggggactctgcagagtcctgaggcagcacagggcatcatcacatgtctgagcatgttagctcaggtctgtcttccccgtcttacaaagctgctagtgatagcccgttgatccattgatctgtgaattgggtctgctctcataacccagtcacctcttaaaggtcccacctttcagtactgccacagtggagattaagtttcaacatgaatttcagaggggggcgaatattcaaaccatagaacctgggaacgtgttaaaatggctgatctgaatgaaggagtgtctagggtgaagcangagagtcntgcatttctaacaagctccaggtgatactaatggctgctg

SEQ ID NO: 3714 - DNA, 401 bp, Homo sapiens
  misc_feature (1)...(401): n = A,T,C or G
ccccgaaccatgatgaggactacattgaacccaatccatggtaaacacaggcttcacctgttcttgtttgttaaccttgactgtgaagcaggacttacctcgcttgaactgttacacatacaatgtgtgtgtcacatcacatattgcgcagctgttggttatcatgtagtgccctgcgatggaaattagatatatttcatgtatttttccattgaaggtggagtttttcaatgatcatgagttttgtcctcctaaacagtataccaaagattgtttttatagttgaggattgaattgataaccactggggttccgcattgaagcaggaacaaattgcctctttttctggccttctctgagggacctctgcttttgtgaagcaactatttatttgaagaccn

SEQ ID NO: 3715 - DNA, 466 bp, Homo sapiens
  misc_feature (1)...(466): n = A,T,C or G
ttccttcggtcatttggaattcctgagggcagccagagctccttggtcctttcagtactaggcagaacagcccccgatctgcatagcctgtgaaagcccacggggacatcagtaaccttctgcagccaccatccaatgccattactgtcaagtgagacttggccactgtagcctgggcctgctgcaggagctcttcagaaaggcacatgaggaccacggtttgcctcagtttctggtaaaacacaaggtctggagtgcccctgcaaagggtattgatggacttcctgccagtgacagagcatgtctattgcaaacaattctctcagttacgttcagcacttaagaacggctaatggcaataggatctttagcaactttttcacatcatagaaggtgcaatcgctcacttgggaacactactgagagtgacttctcttttataattgagtagcagatgataaattan

SEQ ID NO: 3716 - DNA, 421 bp, Homo sapiens
agcatatgacatataacttatataaatcagtatcaattcctcccatttcaattcagttaagacttctgtgatagatgtttatagcagagaagaaatgtctcatcaatagaaaactatcagataaagtttaggagataggaagaaggactgtgtgtagtaatgaaaataccaagttgcaacattacatgtttacaaaaaaaaatctgtgtttgtagtgtggaagttggtgactgttttaatcatcatctagacttgttaagtagaaaaattttaaaaatttgcttatgaaaatataacccccagaaagtaacaatgacaaagtattatatttatatatattattggagagaatttgtatatttttaaagatgtcttaagatatcttaattttatttataagttttggtggttaccttgttta

SEQ ID NO: 3717 - DNA, 415 bp, Homo sapiens
cccacgcgtccgactagttctagatcgcgggcggccgctcgcgatctagaactagcccacgcgtccgagcctttccacctataattatgatgcatttgatgccactgaacagtaatagcacaaagaacaggtcacacagtctagactggattgagttttaattaaacttcttcagccatagcctgataagaatcaggctgggtctagaagagttatcagactgtaggcctgtattaattttgcaagctaatgttaatgtttactgccagccttgcatagcaatgccagtttgcaggtgtgactatgatgtgacttttggtaaaaatggtttatatctaaagtagcttagattttatggaagtggctcttgattgtttggacaagcagggtagggaaatttcaattacgtctgaag

SEQ ID NO: 3718 - DNA, 408 bp, Homo sapiens
  misc_feature (1)...(408): n = A,T,C or G
ctcagctcaggcttgtccagctgggaagtgactgtatagatggctttagtcccatcctgcggccccgtgaccgtatatacaacccccgacaggctgtcctcctccttgatgtcttgctagatccctggagactccaggaggagctggaggcctggtgcaaggagagagccttgggctcactgtgaaaccctggacagggcacctcttccctccatgactttttcaaaaaaaaaaaaaaaaaaaaaaaaaaaaaaaaaaaaaaaaagggggggggcccttttaaaatatccttgggggggcccaattttcccgggggggggaaaaattattttttttttttttggggggggaaataaaaccccccggggggttttttgaaaaaacccctttttttgggggggaaaaaan

SEQ ID NO: 3719 - DNA, 408 bp, Homo sapiens
cgctgacgtcggatgagtgatccggacggacactccgaccgcggacgggaggctcctgagggcctaggctcagaagaaataatataacttatcctctcatgcttttttcgtgccccttctccccaaatcatgcaacaatagaagaagaagaaaacatgtcaggacacaaatgcagttatccctgggacttacaggatcgatatgctcaagataaggcatgtgtaaataagatgcaacagaaatattgggagacgaagcaggcctttattaaagccacagggaagaaggaagatgaacatgtcgctgcctctgacgcggacctggatgccaagctagagctgtttcattcaattcagagaacctgactggacttatcgaaagcaatcgtactctatcaaaagaggatag

SEQ ID NO: 3720 - DNA, 468 bp, Homo sapiens
  misc_feature (1)...(468): n = A,T,C or G
ngagcgccccccttaccccnnnaaatttccgnagnannnncnctnnnntnagnaacaccaccgttcggtgagtgagctgagattgtgccaccgcacttcagtctgggcaacaagagcgagactctgtttcggaaagataaagagtaaaaatactcacttttattttctgtgtcttctttctgaggaccaaagggaaaatatgtgtcccttggagttttcttctgtgatcttttagccacttaattcattgggaaccaacattatagctgtatatttgcatgggatagatctgaagattttgtaaaatgtttttaatctagaaagaatatgttgtttcagtttattttgttttgatgtaccattgtggtagctatttggtgtcttacatgggaattgtattataatcttgactcttcttctaggggccttatgcctctggcatgcccatcaagaaaataggcccaactn

SEQ ID NO: 3721 - DNA, 467 bp, Homo sapiens
  misc_feature (1)...(467): n = A,T,C or G
ngatgcgcttctntnnggggaactttagnannngtcggacttngggtngagcacgcgtgccggatcttttcatgtgcttattggttatttatttcttctttaaagaagagtctagatccttttcccatttaaaattgcattgcttctatttttactgttgattcttagaagttctttacatattttagatttatgtacagtaaatattttctcccagtccatggcttgcctttaccttttcttaatggtgtcttttgattaaccagacattttaaattttcatgaagcctattgtatcgggggttgtttttgtttgttcatttatggttagtactctttttggtgctagccaggaaaactttgcctacattctcctaagctcatgaatatatttttctatatttngttctaggacagttataattcaaacttttatgttctagcctatcactcatgtatagctataa

SEQ ID NO: 3722 - DNA, 479 bp, Homo sapiens
  misc_feature (1)...(479): n = A,T,C or G
agaaaaaaactgacagccgtccnaccgttgaggaccntccgggacgacccacgcgtccgggaggtggtcagaggcgtgaagcctataatgatagctcttatgaagaaagcagcttccatcatggacctggagtgcagtgtgcccatcagtaaactctgcaaacaaattgcacaggtggattttctttccacatttgcctgatttgttctcagcaatccagctggagtgtcttatcaatccagatgaactgagggacatctgttggtctatgtataacttttaaaattggtatagtatctacagagtgtataatttaaactaaccacaaagctttacatcttcattttgactgttccatagcagaataaagcacttgaaaggaaacaagactccctttcacacatggattattataagtttcaatcctggnatctgtgcttgatttttatcagttttgtgtagatttttatgtttcatat

SEQ ID NO: 3723 - DNA, 403 bp, Homo sapiens
  misc_feature (1)...(403): n = A,T,C or G
gacagaactgaagttttggcttttaggcactganactgtcataaggctatctattaccattggctggtctgagtgcatcttgctcataccattctagttattaaatatttttagcatcaaccttggtcaagtaattgcattgtgtcacttgctttccgtcaagtttaagtgtctgttacctacctaaggtacattgtcatggcttaaagcctctgtgtgggtctgagttcatagatgcttctctgcattgcgagtaacttaattcaatcttctcaagccaacttgcctcttgatggcccttttagtacctaagcttttaaagtgggagcatatgaacacagtattcaaaagagggaagtcatttgccacccacccaaatgttccatctgcagtatcgaggcag

SEQ ID NO: 3724 - DNA, 475 bp, Homo sapiens
acttttcaaccaatggattgcatggctagggacaggcagaaattattattctattgttatgtttgccaaatgaagatactattcctaaggacatcttcagactatttatcaccatatataaggatgctctaaaaggaaaatacatagaaaacttggacaatattacctttactgagagttttctcagtagcaaggatcacggaggattcctgtttattacacctacttttcagaaacttgatgatctctcattaccaagtaatccttttctttgtggaattcttatccagaagcttgagattccctgggcaaaggtttttcctatgcgtttaatgttgagattgggtgcagaatataaagcatatcctgctcctctaacaagcatcagaggccgaaaacctctttttggagaaataggacacactattatgaacttacttgttgaccttcgaaattaccagtataccttgcatat

SEQ ID NO: 3725 - DNA, 480 bp, Homo sapiens
  misc_feature (1)...(480): n = A,T,C or G
tgcagctgaggccgaagcccgggctgaagcaagaacccgcatgggaattggagatgaggctgtgtctgggccctggagctgggatgacattgagtttgagctgctgacctgggatgaggaaggagattttggagatccctggtccagaattccatttaccttctgggccagataccaccagaatgcccgctccagattccctcagacctttgccggtcccattattggtcctggtggtacagccagtgccaacttcgctgccaactttggtgccattggtttcttctgggttgagtgagatgttggatattgctatcaatcgcagtagtctttcccctgtgtgaggctgaagcctcagattccttctaaacacagctatctagagagccacatcctgttgactgaaagtggcatgcaagataaatttatttgctgttccttgtctactgctttntttccccctgtgtgcttgcaagnttn

SEQ ID NO: 3726 - DNA, 486 bp, Homo sapiens
  misc_feature (1)...(486): n = A,T,C or G
aggcnccaattgacgctttaatgacggcatgagnaccgcncgaccacgcgtgcgccccgcgtgcgcgtttgagctgctgattttcatgagtcgccttcaaaactctcgtgtagggttgacaatgtgggggggtgggggatccagcttattcttttattttcaagtccattcttggggctggtggggaggcaggagaatacccctccctaagcccttagtgtgtgccgagcttgctttgtgatgttggcaggggaggggagacctgggtggtgactgagttccctttatcaaacccttcaatgggcacaaaattgagtgcttgattttaggttttatttttttatgaatgtccaaatctgtgtttccccctgccctcccagactgtgtggccagttgaaagtgtctggtttgtgttcatctctccctcatttctggagcagggcctgagaccctgccacatctcctatgctctgcatccacgcctct

SEQ ID NO: 3727 - DNA, 467 bp, Homo sapiens
  misc_feature (1)...(467): n = A,T,C or G
gtggtatnaaacgtagttactcgatccgcaccgcaannnngggncgacccacgcgtccggcaaggggagactgacaccaagaacagccagtaggttcttctcccctgcactctgctccctgcgcggnaaccccaccactcctgaagcctgcccagtctccttccttccctgcttggtgagtcgcgcatctccgtggttatcccgctgtctcctctccaagaacaagcagagcccgggccactggcccttgcccaaggcagggaagaaggatgtgtgtgtccaggaaggaaaaaaaggtggatcagtgattttacttgaaaacaagctccatcccttttctatatttataagaagagaagatcttgagtgaagcagcacgcgacccaggtgtgtgtgaattgaatggagacgtttcttttctctttctttaatttttgtttttgttctttttttctttaaggaaagct

SEQ ID NO: 3728 - DNA, 407 bp, Homo sapiens
  misc_feature (1)...(407): n = A,T,C or G
cacacctgtctcggagtaggcatctcttcctgggagctccaggctatttttgtgcttagttactggttttctccattgcattgttaggcatggtgacaagtgacagagttcttgccctctgtccagtttcagcatctggttgcttttaagccaagtacatctagtttccctattaaaaatgtgtctgaatagcgattttgctttgccaccaaaaggcttttccctgagaacagtgaaggatgtatgtcattttgtggtggttgtatgtgtccttacatagaccttaaaaagagctcacccttccaggccaatgctgaagacacagctccgcttgggagcctgagaacccaggcttcccaggccagagtgtggcttcttaaacggcaaaggaaattcctttgagtcan

SEQ ID NO: 3729 - DNA, 467 bp, Homo sapiens
atcatatgccatccccatgtgcctgtggtcacaaagtttctatacatagaaagtcatatctccccacagaaatttggggacatctgtaaacatactgtaaaatagcagattccagccaggcacagtggctcatgcctgtaatcccagcactttgggagaccaaggctggctggtcacctgaggtcagaagttcgagaccagcctggccaacatggtaaaaccccgtctctagtaaaagtacaaaaattagccagacatggtggcgcatgcctgtaatcccagctactcaggaggctgaggcaggagaattgcttgaatctagagggtggaggttgcagtgagccaagatcgcaccactgccctccagcctgggtgatggagggagactccatctcaaaaaataaaaacaacagactccactgctcagcaagagaatgaagaataatggaaattacaatggttagggg

SEQ ID NO: 3730 - DNA, 416 bp, Homo sapiens
gccaagcacattgagaagatgcagaatcctactctattacaaacctcactcatgtttcttttattgaaacctttttctactttatatttcctcttttgtaaatttttccatgtcatttaaaaaattttttactttagaattacagattagttctttttttaaagcattatggcattttcaaaaaaaaaattattttggttacccaaaaagctatacaagaaatataacttcaattttttaggttgatatgggtatatttttaaagtttttattactttatacaaatacaaattaatttatattatagtttaacacctgctatgatgatagatatcacactgctatgatagaaaatccctgtctgtcattgaactattcatttagtgttactctgatatgttaataatgtattcctg

SEQ ID NO: 3731 - DNA, 400 bp, Homo sapiens
  misc_feature (1)...(400): n = A,T,C or G
atttgcgttcagttgatgcagagtgggattttgcagtccttaccaaaaaaaaaaaaagggggggcccttttaaaagaacccttggggggcccaaatttaccgggggttggaaaggtaaaattttttcccttatggggggccatataaaaacctccttgggatttttggaaaagaaccttttttttggggggggaaaatattggcccaacccccccccaaaatttaaagccttaagggaaaaaaaaaatttttaaggggtaaagggggaaaaacaaccggaatatcctggtggttgaaaagtttggnnnnnnnnnnnnnnnnccnccttttctgtgtgggttctttttgccccccttttctttgcggtgtgttcccctttgcttgtttatttttcttttct

SEQ ID NO: 3732 - DNA, 462 bp, Homo sapiens
  misc_feature (1)...(462): n = A,T,C or G
atgagcctattaaacctcttttcttataaattacccagtctcagatatttctttaccttaatagaaatgcaagaatggactagtacagctattaacagaaaggatataattactattatctgatgacatgagaataaaagctagtgtattttaggaagcagggagagagaattatttgttagcagtgatgatgagcaaggaggaaaatctaccccacatccaggcccattggtacaaggagagtgggatagaaattatctgcttctgagatgttgggcaaagaatgtcctcaggaaagagccagtgttccttttgagaaataaatctcaaacttgaccgcagatgcgtagaccatatcccagactaattaaataaccacctctggaggtaggagccatggacctgtattctgtttagttgtttgcctgcccgtgttaaactttggatgattctgaaatgcan

SEQ ID NO: 3733 - DNA, 411 bp, Homo sapiens
cccacgcgtccgtaaaaaattaaatttaattttaaaaaataacaatgaaaaaaataaaaaataaacaaaaatatctcagaaccagtggctctgagatattttggctttttagtcttgagtcactcttaaaaagatagcaaaataaaacacatgcaggaaagccgaaggtcccaggcccagccagatgggggctaggagtggctgggactctggcctagcttctccatggcagcgttagtcccagacgtacaccacttctgcaaggctgtgtgggtaggagcccctggggctgagggggcacattgtgcaatctgctaagcagaatgtagagttttaaaatagctacctttctccaagacactatctgcttgccgctttgtgggatgtttacctgggattaataatagctga

SEQ ID NO: 3734 - DNA, 468 bp, Homo sapiens
  misc_feature (1)...(468): n = A,T,C or G
gtggtttnaaacagggcgatgncgtacggcanngcaannnngggncgacccacgcgtccggtattttctgccgtaggattggaaaacaaatctgtattctcttcctttctttttttcttctgctcctcctccaaaaagaatggcatgaaagaatggttgctggccaggcgtggtggctcacgcctgtaatcctagcactttgggaggccgaaggcaggcagaccacgaggtcaggagatcaagactgttctggctaacatggtgaaaccccgtctctactaaaaaataaaaaaaaataaaaaaattagccaagcgtggtggcgggtgcctgtagtcccagctactggggaggctgaggcaggagaatggcatgaactcaggaggcggagcttgcagtgagctgagatcgctccactgcactccagcctgggcaacagagcgagactccgtctcaaaaaaaaaaagggg

SEQ ID NO: 3735 - DNA, 424 bp, Homo sapiens
atttgtaaaggcacaaaacaagtctttgagagattgcatcttcacaaagaccgatcatacttttccacagataggctcttaatcatgtcagctcagcaaactttggttgtatttggtggcagtgctaagtcctagggatacaaagacaaaaaagtcagcgtctctacttcttgagtctgttgagaagagaaggatgcacgcaaatgattggggtacagggaggcatctgctataaagaggacatgaacatagtagttggggcaccagtatgctggtgcatagaatgcaggtaagtagtagtgccagaatttcaatctaagccttcatatgtatggaccacagtttcatcttattctaccacactgcccattgtaatccagaaggggcttggattcatcagcgtgttctagtagtttggcagaag

SEQ ID NO: 3736 - DNA, 437 bp, Homo sapiens
ctaagctacctttttgtatttttcatagaaatagagtctctccatgttgcctaggctggtcttgaactcctggactcaagctatcctccctccttggactctcaaagtggggttatgtttttttgatccactctgacaatctttgtcttttaattgcatcagttacaccattgacatttgaagtgattattgatatagccagattaatatctaccgtatttgttactggtttttatttgttgttcttgtacattattttatttttgccttccactctttgtctgccttttgtggtttaactgagcatcttctatcattccatctttttctccattcttagcatatgaattctacctaattttcttttacttttttatagtgattgccctagagtttgcagcatacatttacaacagatacaagcctactttcaatat

SEQ ID NO: 3737 - DNA, 412 bp, Homo sapiens
aaaaaacaaagaaaaccaaaaagagcaaactgcgttatacagaggagggcaaagatgtagatgtgtctgtctacgattttgaggaagaacagcaggagggtctgctatcagaggttaatgcagagaaagtggttggtaatatgaagcctccaaagccaacaaaaattaaaaagaaaggtgtaaagaagacattccagtgtgagctttgcagttacacgtgtccacggcgttcaaatttggatcgtcacatgaaaagccacactgatgagagaccacacaagtgccatctctgtggcagggcattcagaacagtcaccctcctgaggaatcaccttaacacacacacaggtactcgtcctcacaagtgcccagactgcgacatggcctttgtgaccagtggagaattggttcg

SEQ ID NO: 3738 - DNA, 239 bp, Homo sapiens
cggacgcgtggggcttgcttagatgttccaaatttagaaagcttaaggcggcctacagaaaaaggaaaaaaggccacaaaagttccctctcactttcagtaaaaataaataaaacagcagcagcaaacaaataaaatgaaataaaagaaacaaatgaaataaatattgtgttgtgcagcattaaaaaaaatcaaaataaaaattaaatgtgagcaaagaaaaaaaaaaaaaaaaaaagg

SEQ ID NO: 3739 - DNA, 401 bp, Homo sapiens
  misc_feature (1)...(401): n = A,T,C or G
catcaaactatacttgaaaaaaggcttatgtattgtaacttattttcctcttttcctttttggtaagagtactgtcttagggacttaattttagtttaaaattttagtttaaaaacattttttgatcctacaggagaacctctcgtgaccttcaaaaagtgacatagtgctgtctggatatcctttaccataaatacaatattttagaaaatggacaattctgctaattgttggttaaaaaaaagtttgaactggattagaatatatttacaatgtgattaatgagaattcataaaactattaattagaatctaggtccaaatgaagatgtttacagtattgtttgcaaaattcagaagattttagttgttgatactaaagccagcaaccagttaacctan

SEQ ID NO: 3740 - DNA, 423 bp, Homo sapiens
cccacgcgtccgtggaggtggaggttggaggtggtgctgctggggaacgggagctggatgaggttgatatgtcagatctctctccagaagagcaatggagggtcgagcacgcacgcatgcatgccaagcaccgtggccatgaagctatgcatgctgaaatggtcctcatcctcatcgcaaccttggtggtggcccagctgctcctggtgcagtggaagcagaggcacccacgctcctacaatatggtgaccctctttcagatgtgggttgttcccctctatttcacagtgaagctgcactggtggaggttcctagtgatctggatcttgttctctgctgtcacagcctttgttaccttccgagccacccgaaaacctctagtacagacaaccccaaggttggtttataagtggttcctgctaa

SEQ ID NO: 3741 - DNA, 401 bp, Homo sapiens
tcgcagggcaaagttgtacccaagtttctttcttgatgtgcactgggtacctaaaaggccagtgtgacataccccacacctaacagtatgcgtgtcatttcatatcatttctatttcagggcaatttctgatggctgctatgtgtctgacactgtgccatgatctgtaggagaaacaagtgaacaggggacaatctcagcctttatgaacacaggggagcactcaaggccaaataaaatcagtgccctcgtggagcttctcgcagggtgtttgggagcagaggatggagcaccaactactagttctgctcagtaacaccctccatttgcatagcacctaactgacttccagagtctctgtagaaaccttaactcatctggagttatcagggagctgcgaag

SEQ ID NO: 3742 - DNA, 396 bp, Homo sapiens
caacaagaatcagtagaagtgctgggagcagcttttggggaagctgccgcccacgggctctgccccttccagctggagccgcccgtgcctccaggggccaagaggatgatgtcgtggcctccattctcgtttctatgcagccccatagtccaaggacacccagtccacatctaccatatagcaagtttagtaagggaaggcagcatacgtcccagggacagtgggtttggatctgtctagaacagcggtttgtggctgtggcccagctccgagagtgatatttgctctggtaggagagggcctgagggtacatttctccacctgtgccccctcatgttcacagaggatttcagcagctgcaactgcgcacgccaggtggggaagggtgggggtggg

SEQ ID NO: 3743 - DNA, 423 bp, Homo sapiens
agtgaggtttggagggatagcggaaacatttctccctgccttccagccacatacagaaccaaagcagagagggtcatgcttggggcctgattgcccatgcatccagtaactgctaaacttcacccacttcacccacttggaaaatgaggtgaagcttccacttggggaaaatctttctgacaactgtccctctgtgccctcaagtaggctaatcacccctgccttgggacaccactgtactttgttttcacctgtattctttggctgtacaattattaggatggtttgtttgcttgtcctttactcctccttgaccataaatttctactagagacaggaagaaatcctactgagataagtatacgcggcatttattacatgcttataatgtggcctaacatcagtggttttcaaagatttggg

SEQ ID NO: 3744 - DNA, 398 bp, Homo sapiens
cggacgcgtgggtcggaatggagtgaacttcaaagtcaggaacgatctgaacaaaaaaagtctgaaggcttgataacctctgaaaatgagaaatgtgatcatccagcgggaggtattcactatgaaatgtgcatagaatgtccacctactttcagtgacaagagagaacaaatatcagaaaatccaacagaagccacagatattggttttggtaatcgatgtggaaaacccaaaggaccaagagatccaccttcagaatggacatgattcagggagctagaagacactttaagttatactggaaaattcaggtgccactgaaagccagatttatagtattccatctttaatatgtgggactaacagcagtgtagattgttaccttaatattttttgct

SEQ ID NO: 3745 - DNA, 424 bp, Homo sapiens
  misc_feature (1)...(424): n = A,T,C or G
caggattgtatatttgtgcttatgctgtatgccacccacctcagtgcatgtgtgtatacgtggattgttttagtgatcttaatcaccaactcctttttaggaatggtctcctttgtgatacatttattttttaggagtggtcttcacctattgctggtttcttagcagtgaacaaaacagacaaaaatcctgccttcatggagtttcaaatgcagaaaggagacaattaaacttaatttaaaaaatcgatgtcaaatggagaaaaataaagcaggttaagggagatagcgagtgatgagaagagttgctgtcttttactggtcagttatgggaagtatccttgagatgatagcatttgaataaagagctggaggaagtgaggggtgattcacatggatgtcaggggaaagggtgttcaaggcan

SEQ ID NO: 3746 - DNA, 471 bp, Homo sapiens
  misc_feature (1)...(471): n = A,T,C or G
cccacgcgtncggcagatttgtggtgcgttctgagccgtctgtcctgcgccaagatgcttcaaagtattattaaaaacgtatggatccccatgaagccctactacaccaaagtttaccacgagatttggataggaatggggctgatgggcttcatcgtttataaaatccgggctgctgataaaagaagtaaggctttgaaagcttcagcgcctgctcctggtcatcactaaccagatttacttggagtacatgtgaaagaaaacgtcagtctgcctgtaaatttcagcaagccgtgttagatggggagcgtggaacgtcactgtacacttgtataagtaccgtttacttcatggcatgaataaatggatctgtgagaaacaaaaaaaatttgagnacaagngaaaaaaaaaacannnngcctgaaaaaanannanncggggggacggggtgcgtaaatgtccttgtcggca

SEQ ID NO: 3747 - DNA, 400 bp, Homo sapiens
cggacgcgtgggcgagtagctggaataataagcgctcaccattacgcccggctaatatttgtatttttagcagagacagtctcttgccatggtgaccaggctgatcttcaactcctgaccttaagtgaaccacctaccttgacctcccgaagtgctgggattacaggtgcgaactacctcacccgtcctatttgcattgtaagaaaggacattgctaacttacaccatgctttctttttttgctgaaaaggagccttgccccgggaccctggtttggcagttggacgatctcggctcactgcacctaccgccttctgggttcagacaatacttttgcctcattctcccgtttagctgggataacaggcgcccaccaccatgcccacttaatttattgtat

SEQ ID NO: 3748 - DNA, 424 bp, Homo sapiens
ctgggtcatcttgtctgcccgccgctggcctggccccgtctgtctctctcagcagctgtctttctcgcgcccactggccggtctctcctcttccccgcagttgcctccttctctgcctgcctgggtggccgccatgggccggaagcggctcatcactgattcctacccggttgtgaagaggagggaggggcccgctgggcacagcaagggggagctggcacccgagctaggggaggagccccagccccgcgacgaggaggaagcggagctggagctgctgaggcagtttgacctggcctggcagtacgggccctgcaccgggatcacacggctgcagcgctggtgtcgggccaagcagatgggcttggagcctcccccagaggtgtggcaggtgctgaaaacccaccccggagacccccgcttt

SEQ ID NO: 3749 - DNA, 396 bp, Homo sapiens
atgtgtgtcggtgtgtgtggagagggtgctccttcgctcctgctttcccggctcggtggggtcccttcgcggccacccggggagacgtcttagacagtcgtggttcctgtgatctgtgtcctctttgcagaagttctgtgtccatctcatgtgctgcgtgtgtctgtaaagcctcattccgtgctgtctggcaggaagctccatctcatctcatcatctcacggccctggcactgcctcagcatggccatctcatcacgcctcgccctgtgggagcagaaggaaagtgacactcatggctggggctgcagccatctgcagggactgactcgaccctcgggagacaagtccgacctttcccaccttgagtggggagtctgacatccagccctgctaa

SEQ ID NO: 3750 - DNA, 453 bp, Homo sapiens
cagcggtcaagttccttatctcggaccagccccatcccattgaccccctcctgaagagcttcatcggagagttcatggagagcctgcaggacccagacctgaacgtgcgccgtgcgactctggctttcttcaactcagctgtgcacaacaagccctcgctagtccgggacctgctggatgacatcctgcccctcctctaccaggagacaaagatccggcgggacctcatccgagaggtggagatggggccctttaaacatacagtggacgatgggctggacgtgcggaaggcggcctttgaatgcatgtattcactgcttgagagctgcctgggccagctggatatctgtgagttcctgaaccatgtggaggacgggctgaaggaccactacgacatccggatgctgaccttcatcatggttgcccggctggccaccctgtgtcctgcacctg

SEQ ID NO: 3751 - DNA, 395 bp, Homo sapiens
cgcggacgtggaagaacctcgtctgcggaggaaaaggtgccgagtcaatccccatacacagccgccgccattgcctcgagtccttgtgtctgactgtctgttcctgctgctgtatgacacagcacctcgaggcaaggaaataagaaaactgcctctgatccaagcagagaaggtctgcctgtagatctgctgtaaggcttgtcaccattggaagcaaggtcctacttcagtggcagatctggtggccttggagtggctgaagaccaccaccctctacagggctgggcccatgcacagccatccttccctaccttgagtgagcttcctctgcatgttttctatatcactggcacagcctgtagttggaaaggggacagagtgactactggactttg

SEQ ID NO: 3752 - DNA, 400 bp, Homo sapiens
  misc_feature (1)...(400): n = A,T,C or G
cccacgcgtncgtatttttaggttgttgaactgggattacttaaccttgaatgatgatatgtatgcacactgactttaagcttcataaaaccatcagtgccaagaaattctctttgtagtaattacttgttactgacaccacagcagtatagcatatgtcacagctcctgtgattcaatgttataaaacaagcagaattttaaaagcagcactatatagctgttttgtattatagtgtatatgatgtttgcgaaaatgccagatttaaaatgatgtatttatttttggcaaaaaataaaaaattctatgctatattgttgatcaagtgtaaatgtgaccttgtacagtttactaaaattactgatatttttcactacattgagacagttactgtgagaat

SEQ ID NO: 3753 - DNA, 301 bp, Homo sapiens
taacagtacatcttttcaagttctcagctatttcttctacctctccctatcttacatttgagtatggtaacttatgtcatctatgttgaatgtaagcttataaagcacaaagcatacatttcctgactggtctagagaactgatgtttcaatttacccctctgctaaataaatattaaaactatcatgtgaaaaaaaaaaaaaaaaaaagggcggccgttttaaaggatccttgggggggcccaagtttacccgggcatgcaaagaaatagttttttccctatagggagccgaattataac

SEQ ID NO: 3754 - DNA, 420 bp, Homo sapiens
accagagtcacagtcaccttgcaatgccaataaccatcaatgatgttcccccttgtatctctcaattacttgataatgaggagagttgggacttcaacatctttgaattggaagccattacgcataaaaggccattggtttatctgggcttaaaggtcttctctcggtttggagtatgtgagtttttaaactgttctgaaaccactcttcgggcctggttccaagtgatcgaagccaactaccactcttccaatgcctaccacaactccacccatgctgccgacgtcctgcacgccaccgctttctttcttggaaaggaaagagtaaagggaagcctcgatcagttggatgaggtggcagccctcattgctgccacagtccatgacgtggatcacccgggaaggaccaactctttcctct

SEQ ID NO: 3755 - DNA, 415 bp, Homo sapiens
aaacaacctgtcctgttttgtcagttcccagcttcttcgtttagaataaattagaccaaaagaataaacgtgcttgtctctgtatacccgcagaatgaagttactgttggtaaaactggattttttcattttactaggctccgaagagtccagatgcttggtagatgttcaatacgagattttttttttaattgaatgtgtgcatttaaaatcctccttctcatttctagaaagacttctttcaataaataatgggatcttacaggaaaagtggttttttataagctagggaactcctccactattagtaaccattggaaacctggaatgagggctaaaggtttaatcataagagaaaaggcagcttaatgaaatgtgtacacatacttagtcagtggtccattttatgaagccg

SEQ ID NO: 3756 - DNA, 411 bp, Homo sapiens
tttttttttaattagctgggcgtggtggtgcatgcctgtggtcccggctacttgggaggatgaggtaggaggatcgcttgggcctgagaggtcgaggctgcagtgagctgtgatcatgccactgcagcccagcctgagtggcagagcaagaccctgtctcaaaaaaaaaaaaaaaaatttattgaagcctccttgcccggggttggaaattggaataacctgcctttttttcggaacatcctgaggggggtgctccagcatttgttgtttttccgtccccacggttgttgggggggggttgccctgccccccttgttgccaaaaggggggtcatggcccatgggaacccaaaattttggggagaggaatacctttacccagtttccttcccaccttaattaccttttttgg

SEQ ID NO: 3757 - DNA, 493 bp, Homo sapiens
  misc_feature (1)...(493): n = A,T,C or G
gagggtncccaactgacgcagttagatcgtcatgagaacccgcgncgacccacgcgtccgatactaatgtcaagagttaaacctcctcaggttcaacctgtgataaaagactagtgcttcccagtacttgcatggggttcactatttatagttttcttgggagtatcacaggaaaatcacaattacaccactttagaccctatgtgtagcaggtcacaacttacccttgtgtgtttagatgtgtatgaaatacctgtatacgttagtgaaagctgtttactgtaacggggaaaaccagattctttgcatctgggccctctactgattgttaaaggagttcctgtcacctgctccccccacccccgcatgcgtctgtccacttggctaacttttaatatgtgtatttttacattatgtatattcttaactggactgtctcgtttagactgtatacatcatatctgacattattgtaactaccgtgtgatcagta

SEQ ID NO: 3758 - DNA, 420 bp, Homo sapiens
agccgtggagtacctcggcctcccaaagggctgggattacaggcgtgagccaccacgcccagccctgagttgtcagttttttaaaataaatgttatagtaggaccaaaaagctatgattttatccctatgaaggccgcttataatcatgcgcttattgtttctttcatatacaagggaataatatggtacctcttaaaccaaggagatatacagtgaaatggccacaaaaaagaagcaattttaatcaatttctatgcaaggatattcacttggggctctccacctccaggaaaaaatgccgggggaaaaacacacaggtgacacatgggatttattgcaaaagctgtcaggagtgctcaatgccacacacctactcacttccattttaaaagggagaaggcagaacaacacctggcagg

SEQ ID NO: 3759 - DNA, 394 bp, Homo sapiens
  misc_feature (1)...(394): n = A,T,C or G
aaatttaaacatttagatttgctagtctaatatttacactacaatgagatataaatgtgtactaagtaagatattgtggttttgcccttggaaatatgtgtggaaaaacagcttttttaatttagaaggtatgttcatgttcattgaggttacatgtaggcattatagcacttgtggcatttttaagtaggcattatttaccagaatagtcttccaccagtaaaacagtacctttaagttgtattggcccataacaatttggtatatgcttgcttatcttaatttgatcttgtagacccaaaaaaggcatttatattcagagcatctagaatgtacatcacatttttatttttcatttttaaagcttctacgcagattttggaccactcaatcn

SEQ ID NO: 3760 - DNA, 531 bp, Homo sapiens
  misc_feature (1)...(531): n = A,T,C or G
gggcgacgnnnnaatgacgcccgtggtacttgtacgacttcccgacccgacccaagcgtccggtcgacccacgcgtccgaaaagaaagcttgacagtgttatgaaagccaccagactcagccagtgtgtccccatgggtatccccagccatccttgctcaatccattacttatatactaactacataatgacctgttcaaaccagactctatttaatgaactgtgaatttacacagaggccattttaaatgggtcaccccatttaggattagtggatctcaaattattaaccaaacatcactccatttcaaagtaaaatattccaccagcgatttgatttattggctcttccattgccactgagcaatgcccaggaagcaggcacattgccaaggactgggggcatcttgactaggaagctcctcgtttgtgtgagcgtgggtcagaccgccaaagtaggacttcatcgtttacctacctattatcaatatggtgcttgaatatattcctataactgtagaacagtgtggn

SEQ ID NO: 3761 - DNA, 411 bp, Homo sapiens
cagccttcgcccgcctgggcagggcccggcgccgttcgtggatgagccacagaacctcttccaccttccgagcggagagaagtttccattcctcttcttcttcctgctcctcttccacctcctcctcggcctcccgtgccctcccggcccaggacccgcccatggagaaggccctgagcatgttttccgatgactttggcagcttcatgcggccccactcggagcccctggccttcccagcccgccccggtggggcaggcaacatcaagaccctaggagacgcctatgagtttgcggtggacgtgagagacttctcacctgaagacatcattgtcaccacctccaacaaccacatcgaggtgcgggctgagaagctggcggctgacggcaccgtcatgaacaacttcgctg

SEQ ID NO: 3762 - DNA, 419 bp, Homo sapiens
  misc_feature (1)...(419): n = A,T,C or G
tggcggcggccgtggaggtggacttgtgctttgcgtcttaaagtgtggtgcccacaccatcagcacgtcagcagcatgctggagcttgtttgaaatgtatactctgagctccactccagaccaactggaccataatttgcattttaaaagatcccttcctgggcgatgcacgtgaacatataaaaatcacgggaccagatctgtggctggcaaacttgagttcacaataaaggtgctaagaaagagaatgtaagacaggaaaataattaaatattcttaccgagatcactcctgtaaactctcacaagagatgtttataaaacacttggaacaatacagattgtactaagaaaatgtgctttgatcaactctggagatacaaagcaggaaacttaataaatcacgtcctatatgtgaan

SEQ ID NO: 3763 - DNA, 454 bp, Homo sapiens
  misc_feature (1)...(454): n = A,T,C or G
ccaggagacacaacaaaagcagctctgccttcactttcacttgcaacaaattcttcaggagggatgagttccccctgcacttcaagaatgtccacacagacattcagtcatgtctcaatggctggatccagcatcgatgccccctcgcctacttgggatgtacatttgttcaaaaccatttccgtcccccagggcaaaaggcaaaagtaatctatagccaggagctcaagacctttgccattaagccggaggttgctccagagctgagcgagggaaggaagaacaaccatcttttgggtcatggaggaaaaagccagaattctttaaccagcctgcccctggagattttgaagtacattgctgggttcttggacagcgtcagcctggcccagctctcccaggtgtctgtgctgatgacgaatatctgtgccactttgttactagagagaggaan

SEQ ID NO: 3764 - DNA, 466 bp, Homo sapiens
  misc_feature (1)...(466): n = A,T,C or G
atcttgtggctttgcaaccattttcatttgtttgttttccttttatttcttcaccagatttaaataactggaggaattttctccaatttttttttccttctctggcaggtatccccagcagtcaattaacaataagccagtataaaacacctaaataaccaatctacaatctcccttcacaagtttttttactgtttttagatgaatgtacgatgagaaattcaacgttaataattttggattttcttatcacaaaaaagaaaatgaaggacctcaaagcacctgaacagtttatcgaccagtttgaatctatttatcttcatttgaatgtcttctagaatatgtaaaaagtcataaaatgtatcttccatgctacatgtacaataagaacttctataattgtatatatgcctttgatgtattttcccctcaagattatcaactgtgtgttcgacagagaatattn

SEQ ID NO: 3765 - DNA, 524 bp, Homo sapiens
  misc_feature (1)...(524): n = A,T,C or G
cccccattgaccccatagtaccgctgtggaatncccgccgcgacccacgcgtccggataaatgagccaggcagctcacagaagtaaccggcgtagtgcttgctgcttgagaggaccgcgnnntaccataactactgccttgttccctgactctgccccttgcccctttccccctcaaccaagctgggaggctgcccctgtctgttttgtattccccgaggcgggcacacaggaggtgttcagggaatgtggtataagcagagatcgggctcacggataggtgccctgggggcttgggcagggtcttcccaccccagctgaacccaggtgaggccaggccacgttgttccttccccccgctgacttggagggaggggggcttctggaaagagcactgggccgggcctgagagggcgctaccagctactcttctttcctctgttgcacaggaggcctctctgcgcttnactctgctcggctncggcactgatgggcccgtcagcaagagactttcttctatgtcgn

SEQ ID NO: 3766 - DNA, 441 bp, Homo sapiens
  misc_feature (1)...(441): n = A,T,C or G
atttgaaacctgtttgatcgccctcggaatccccgncgacccacgcgtccgatcatatagtaagtagcagagttgggattggaattcaggcatgactcaaacctggatgtacttgattccaaatgccatgttgttttcactctctgcactgactttttaattatttaaaactctagaaagatgaacaaaggttaatttaaacttacctaagaagatgagaatcaaacaaaacagatatgcttactctagttaaaaagaaaataaatctcatgtcagacccagaaaggaccaatcactgtccgattgtaagctatgttgggccaattccaaaatattatacgatggagaggtcaaatttacctacttctgagttacctcagtttcccaacaatggaccttggcacactggagtaacaatacataacagagttgccaagatat

SEQ ID NO: 3767 - DNA, 461 bp, Homo sapiens
  misc_feature (1)...(461): n = A,T,C or G
atggagctgctacagtcagcgcttggggctggcctcagcttgtagacccgagccctgcagaacaaccccccgtggcgcaggagagcagaagaaagggggcctttatgcccttttgagggaagcacacattctgcaaggccgtggaaacaaagggaggaactgtttgtagccctcgtccagacgccccaaacaaacagagccaagttacaccctgtttaaccctgccttcaaagggacgactctgtaagattctctgctacttattcaagttgacacgatgcccttcacactccacctgaggtcccgccttccctctgccataaggagtttgattctacaaaagaaaccaaacatcagaaatacatccagcatggctggagagctccgaccagccagcctggtggtcctgcccaggtcccttgctccagcttttgaaagattctgccaggtcaacacttgtn

SEQ ID NO: 3768 - DNA, 381 bp, Homo sapiens
cgccatgttggggtttgtgggtcgggtggccgctgctccggcctccggggccttgcggagactcaccccttcagcgtcgctgcccccagctcagctcttactgcgggccgctccgacggcggtccatcctgtcagggactatgcggcgcaaacatctccttcgccaaaagcaggcgccgccaccgggcgcatcgtggcggtcattggcgcagtggtggacgtccagtttgatgagggactaccaccaattctaaatgccctggaagtgcaaggcagggagaccagactggttttggaggcggcccagcatttgggtgagagcacagtaaggactattgctatggatggtacagaaggcttggttagaggccagaaagtact

SEQ ID NO: 3769 - DNA, 532 bp, Homo sapiens
  misc_feature (1)...(532): n = A,T,C or G
agcgcgccnaattgacccctatggtaccgctgctggaaccccgccncgacccacgcgtccggtggcttcttaaaaatattctcagtgtcttttgtgtgcgtgcagcatgtacatttgatgttatgtgaatgttgagttttttcttctaagtttcacttcagcagtgtttagggctttcagatgccttattccagtgtgaacagaaaaagttcatattttatgtggttaatgctttgatgtgtcacataaagagtagtttgtagaaaatgttggcacaattttaacttcttagtggcttgtgacattatatattatatatatatatgtatatatatctttataacattcctgtgtttagtagtgtaaatgttctgggcaagttttaatattttgaatgcctttggatattccagcaataaaggcatcatgttctgcaataggatttcttactcatttacctattttaacactanaatagaccaccactgagcacanattccttttataaatgttatagaagcagggaagagan

SEQ ID NO: 3770 - DNA, 464 bp, Homo sapiens
  misc_feature (1)...(464): n = A,T,C or G
aggagacctatttgacaagagcatacaatgccttaaaaacttaaggtgagaaaagtgagttgaaaatgaaaatgatgagctaacttgcatttcaccttataaggtaaaagaccttttgaagacggtaattgtgtaattggagttgccatttatgcaattatgtcaggtagtgacttgtaagatggataagccagaggaaacatgagagatagcaaagcccaatccagattttggtgtgtgtgtgtggtaaatcacagtaaagtgaggaacccacaggtgctagaagggcaacagaaaaaaaaaaaatggaataggagaggatttgtgagtcactgttaatgaatttctaggttctgtcatctgattagatttaaaacctgggttaagaactgtgatctcttcaagatgaattttcaaactttgatgagtaggagaagcatcccaccctgcaaaaaaaaaaaaan

SEQ ID NO: 3771 - DNA, 481 bp, Homo sapiens
  misc_feature (1)...(481): n = A,T,C or G
gttagtaaaatcatttctattccttatttataggattagtataggaaacattatacttttctctgtacagttttcttttatcatcccccagatttaaagcagtcatctctatggatatgacttctgaatggctctccagaatttcaatcttcattacttctagcatagtaaaactaaatttctcattattccccccaaactgctgtcacttcttatattcctatttctgctattctctgagatactctctgatccttgtctgtgttgaattttctttctctctgatgtctactccatagactgccagaaaaacctgttgatcaaacaaagctgtttattagcttattacagtaagagaaaacccactttgactgtgtcttagtaatatctcacaagggagaagtcaggagaggatattcataaagttntaggaccctggctaagtgaatttgaggttgggctgcgtgtagaaaactggttt

SEQ ID NO: 3772 - DNA, 478 bp, Homo sapiens
  misc_feature (1)...(478): n = A,T,C or G
ntttgatgcccttggnacattgacggactttccgggncgacccacgcgtgcggttcattgggttgagggtggtgagagggaagaaattgctttagttgctttgctagtgtttattagcacgttgtgcacgtgtatcctaaaacttaaagtataataataataaaattttaaaaaaaggttttaaaaaaaaagaaaatttcagcttaatccattgcctgtatgttacatgcgtttcatttacctttgctgtactgtatatattgngtatatactgaacaaatgagtcctaattttataatatttagtcgagtctctagagagtaaagaggttgccaatgtatgacagaaagagttagtaaactagcataagttgtatgctttgttaaaattcacagaaagactgtcttctgaaaaggacttttgggagtgaaataacatcagctctaagtgactcatgtgcctatatccacctggttgg

SEQ ID NO: 3773 - DNA, 464 bp, Homo sapiens
  misc_feature (1)...(464): n = A,T,C or G
ctgacgtcaggagccaagatggcggcggtggtcgcactctccttgaggcgccggttgccggccacaacccttggcggagcctgcctgcaggcctcccgaggagcccagacagctgcagccacagctccccgtatcaagaaatttgccatctatcgatgggacccagacaaggctggagacaaacctcatatgcagacttatgaagttgaccttaataaatgtggccccatggtattggatgctttaatcaagattaagaatgaagttgactctactttgaccttccgaagatcatgcagagaaggcatctgtggctcttgtgcaatgaacatcaatggaggcaacactctagcttgcacccgaaggattgacaccaacctcaataaggtctcaaaaatctaccctcttccacacatgtatgtgataaaggatcttgttcccgatttgagcaacttctatgcccn

SEQ ID NO: 3774 - DNA, 437 bp, Homo sapiens
cgcccggcctgtcagcgctgctctccgccgcagcttcagcacctcggcccagaacaatgctaaagtagctgtgctaggggcctctggaggcatcgggcagccactttcacttctcctgaagaatagccccttggtgagccgcctgaccctctatgatatcgcgcacacacccggagtggccgcagatctgagccacatcgagaccaaagccgctgtgaaaggctacctcggacctgaacagctgcctgactgcctgaaaggttgtgatgtggtagttattccggctggagtccccagaaagccaggcatgacccgggacgacctgttcaacaccaatgccacgattgtggccaccctgaccgctgcctgtgcccagcactgcccggaagccatgatctgcgtcattgccaatccggttaattccaccatccccatca

SEQ ID NO: 3775 - DNA, 472 bp, Homo sapiens
  misc_feature (1)...(472): n = A,T,C or G
attagaaccatgtagaacaaatatactagatgttaaagattacacaataaaggaacttggcaaaccaaaaaaaaaaaagggaaaaaagggaaaaaaaaaaaaaaaaaaaaaaggaaaaaaaaaaaaaaaaaaaaaaaaaaaaaaaaaaaaaaaaaaaaaaacaaaaaaaaaaaaaaaaaaaaanggggggggggggcgctttaaaaaaaatcggggggggggcccaaatttgggggggggggggaaattttttttttttttttggggggggggtttttaacccccccttttgttttttaggagaaacttttttttggggggggggggttattccccccccccccccccgcaggttttttttggggggggaaaaatatctttggggggggggggggggggcccccctctctttgtggtggggtgtaaagtgggggggggaaaaggatgtttattcatctgtgagggaggcacn

SEQ ID NO: 3776 - DNA, 420 bp, Homo sapiens
ccgagcgaccatggtggcccgggtgtggtcgctgatgaggttcctcatcaagggaagtgtggctgggggcgccgtctacctggtgtacgaccaggagctgctggggcccagcgacaagagccaggcagccctacagaaggctggggaggtggtcccccccgccatgtaccagttcagccagtacgtgtgtcagcagacaggcctgcagataccccagctcccagcccctccaaagatttactttcccatccgtgactcctggaatgcaggcatcatgacggtgatgtcagctctgtcggtggccccctccaaggcccgcgagtactccaaggagggctgggagtatgtgaaggcgcgcaccaagtagcgagtcagcaggggccgcctgccccggccagaacgggcagggctgccactgac

SEQ ID NO: 3777 - DNA, 417 bp, Homo sapiens
ttcataaacatagttatcaataacatttccaaggtttgttccttcatccaacaggccaacggagtagtttgcatcatcaataaatcctttcatctcagccgtattccacaaagccgaaagtcataaaccaggaaagacaagagacgggccaccaagcctatgtctgggtccttagaatatgcaacaaactgtcaaaatataagttatataaaagtctgtattatttcaatagacataatgtacgagtcaatgaaagtgtgctaagtacctaatttagtgaggaatttacgcaattttacaatttcagaaacatcagattattaatttcctttaacgcccatttaaaaaagcaaatacatgaattaaaatacatttacccaaaaaggtcaatataatttgaaggggtaactcacatat

SEQ ID NO: 3778 - DNA, 424 bp, Homo sapiens
ctgacgcgtgagcggacctaggtcgcgtagacatggcctaacgtaccaagaaagtacgcatcgtcggtaaatacgggacccgctatggtgcctccctccggaaaatggtgaataaaaatgaaatcaaccaacacgccaagtacacttgctctttctgtggcaaaacctagatgaagagactagctgcggggatctggcactgtggttcctgcatgaagacagtggctggcggcgcctggacgtacaataccacttactggtgtcacggtaaagtccgccatcagaagactgaaggagttgaaagaccagtagacgctcctctactctttgagacatcactggcctataataaatgggttaatttatgtaaaaaaaaaaaaaaggggcggccgctttaaagaatccctcgggccgccaagcttag

SEQ ID NO: 3779 - DNA, 470 bp, Homo sapiens
  misc_feature (1)...(470): n = A,T,C or G
cttttctgacaccataatagttcattttgtagggaataatccattaggtgtatataattgctttctagaaatgacctaatgtccccaaccactttgtagtggcagatcactgtttcacagcatattttctcccaaggaaagtattcaaaagagactgcaactaacaagactcttatttcatcaaaatttaaatatttctgagttgtatttttaatgcctctttcttttctgcctaaatgcttagaaattataaagcaaaaaaaaaaaaaccggcaccaaaaattcgagccaaccaaaaagggcttttttcaaaacttcaatttcttaaggaaaaaaaggaaaaaaaaaggggaaaattggactttcgaaaaaaattaatttttcgtaggggaaggttggcaaagccacctggaatttntgccttaggggagtttcagctaccttccttgctttttttagggccttaaaag

SEQ ID NO: 3780 - DNA, 420 bp, Homo sapiens
  misc_feature (1)...(420): n = A,T,C or G
gagactatggaacgtcaggtgctgctgagcgagccctagaggctttggatctgtatcggggccttagccgacagcccgcgctgagcgccgcctgcctgggcccggaggtcaccacgcagtacggcggccaataccggacggtgcacactgagtggacccagagggacctggaacgcatggagaacattcgattctgccgccaatacctggtgttccatgacggggactcagtggtgtttgcaggacctgcaggcaacagtgtggagacccggggggaactgctgagcagagagtctccttcaggcaccatgaaagctgtgctgcgcanggctggaggcacgggccctgaggaagagaagcagttcctggaggtctgggagaagaaccggaagctcaagagcttcaacctgtcagcgctgg

SEQ ID NO: 3781 - DNA, 422 bp, Homo sapiens
  misc_feature (1)...(422): n = A,T,C or G
cggacgcgtgggcggacgcgtggggtggaaaaggagggagctgctctcaggctgcgtgcagcaacagtgcccagggctctgatgagtctctcatcacttgtaaagcctgagacagctgcctgtgtgggactgagatgcaggatttcttcacacctctcctttgtgacttcaagagcctctggcatctctttctgcaaaggcgtctgaatgtgtctgcgttcctgttagcataatgtgaggaggtggagagacagcccacccccgtgtccaccgtgacccctgtccccacactgacctgtgttccctccccgatcatctttcctgttccagagaggtggggctggatgtctccatctctgtctcanattcatggtgcactgagctgcaacttcttacttccctaatgaagttaagaacctgaa

SEQ ID NO: 3782 - DNA, 399 bp, Homo sapiens
gagcgtgcgggccctgctctgcaccctgcgcgcggtcccgttacccgccgcgccctgcccgccgaggccctggcagctgggggtgggcgccgtccgtacgctgcgcactggacccgctctgctctcggtgcgtaaattcacagagaaacacgaatgggtaacaacagaaaatggcattggaacagtgggaatcagcaattttgcacaggaagcgttgggagatgttgtttattgtagtctccctgaagttgggacaaaattgaacaaacaagatgagtttggtgctttggaaagtgtgaaagctgctagtgaactctattctcctttatcaggagaagtaactgaaattaatgaagctcttgcagaaaatccaggacttgtaaacaaatcttgttatgg

SEQ ID NO: 3783 - DNA, 415 bp, Homo sapiens
agagattctcgggcgcgctgccccgaatactcagggcgtgtgcccgggccccgacacgctggttgggctttttcgacaaggcgagcccccgatctgctcggacgagccgaaggacgctcggaagcgcgacggcccttatgatgcgcgaggcatgtgacaccaccgagttacgcgacaagattgtgaatgagcccctcaagcactctgacttcttcaatgtcaaggaactgggttccgtgagaagcctcttcgatgcccgagtccatctgggacacaaagctggctgtcggcacaggtttatggagccgtacatctttgggagccgcctggaccacgacatcatcgacctggaacagacagccacgcacctccagctggccttgaacttcaccgcccacatggcctaccgcaaggg

SEQ ID NO: 3784 - DNA, 422 bp, Homo sapiens
gtggcggcggaggctttggcagctcgggactgagtgcaagaatcagcatgattcttcagaggctcttcaggttctcctctgtcattcggtcagccgtctcagtccatttgcggaggaacattggtgttacagcagtggcatttaataaggaacttgatcctatacagaaactctttgtggacaagattagagaatacaaatctaagcgacagacatctggaggacctgttgatgctagttcagagtatcagcaagagctggagagggagctttttaagctcaagcaaatgtttggtaatgcagacatgaatacatttcccaccttcaaatttgaagatcccaaatttgaagtcatcgaaaaaccccaggcctgaagaaataaagtaaaattaatctggtaatttgtcacggattagttgtat

SEQ ID NO: 3785 - DNA, 424 bp, Homo sapiens
  misc_feature (1)...(424): n = A,T,C or G
attttgcttagatcactccattgtgagtttgaccattttggagtcattatgagcagacttccaaggagttgaccagtttgtgactagtctggtcacctttccagttacaggatcatattaactgtgtaaatgaattcatgggtagatgatttgtgcagatctgaatttaagaacatttcctttttctgtgggaatcacaagagtttatccactaaaaaaagatatgtaaaaaagatactttccagcacataaataaaggctggaattttacaacctgatgtatatattagacagttctaggatgttagttcccttcattccagagctatgcttgtgatacagccccttttcttataaagtcagttagaaggacttccttaacaatgactattataatgtcttacttaaaatacagttntgtatt

SEQ ID NO: 3786 - DNA, 425 bp, Homo sapiens
gcgacacagacttctactatgacatttgctccttttgaggatacattgagttggatgctatttggctggcagcagccgttttcatcatgtgagaagaaaagtgaagcaaagtcaccttccaatggcgttgggtcattggcctcaaagccggtagatgttgcctcagataatgttaaaaagaaacatactaagaagaatgaataaatttacgtgatgagctctacaaggccaaaaattttttttcttatctacctgttatattgtgctaatttttctatgtatgtgatgtgaaatgaagactatatatatggaatggaggtgacagaaagaaagaaattctttgtttgagggagacttcccctttctggattgtatttgtagagtgttacgagtgtatcatgtgattatgctttaccggtataagg

SEQ ID NO: 3787 - DNA, 408 bp, Homo sapiens
acttgaactagatctttagagatacaaggttgatttaaatacagaccctatcatcaaggataattctagtgacaattatatttcacattatttctgtcaggtcttgataatattttaatcacaggaaccaccatagcagtccagactcattttattatttatcatctctcagtaactgctccgacagtggcaacaaagggtattgaatacttatatttcaaattttaaaatttatgataatttggagggaggtgaaaaaaccttactaggaaagacaaacattcattattctacgtgtgtgtgagctcatgtctcttactcttagcatcctgggaattaagtacagccttctgtgtaggtgttcctttaaagaaaacaactttaatgcattttacctctgcacatttg

SEQ ID NO: 3788 - DNA, 496 bp, Homo sapiens
  misc_feature (1)...(496): n = A,T,C or G
cggacgcgtgggcggacgcgtgggtttctccttcatttttatatgcgtattaaatggtacttaaagtgttttcatgatcattttgtaggtagactagatatagcccgttgaacctcttttaaaatttagacttttgatagtaatataaaagcatattgaaatttgtagatattatatgaggaatggcacctagatttgaaaattatgcttggcttgtagagacaactagtttctctcgctcttttttttttttttttttttttggaaaaaagtttctctttttttcccccggggggaaggaagggggccatttttggtaatattcacacttgggctctggggttaaaagaaattttacgcgctaccctctcttaaaatagaaataagggggggccccccccccgcttttatttttttgttttttataaagaagggtttccaccgtcccctgtgtgggcggggggtttaaaccctcgcccaaaggaatccccccccn

SEQ ID NO: 3789 - DNA, 400 bp, Homo sapiens
cccacgcgtccgcccacgcgtccggtgttatatgtattatacactatattcctacaataaagtaagctagagaaaatgttatttagaaaatcataagaaagagaaaatatatttactattcattaaatggaagtgggtcaacataaaagtcttcattctcattgtcttcacattgagtaggcagaggaggagaaagatggggaggaagagaaggcgttggtcttgcagtcttgtcttaggggtgtggggagtgggggaaagaatattcatgtataagtggacccttgcaattcaagcccttgttgttcaagggtcaactgtaataggatatagctatttttcttcctctatcaaccaaatggtaagcatctattttgtagtccactctactgagctaaat

SEQ ID NO: 3790 - DNA, 508 bp, Homo sapiens
  misc_feature (1)...(508): n = A,T,C or G
cttttcttcttttccattggcctgggtatcatgtacagtgtattgaaatatagatgaagttaataggaatgttcttaattgggctgtttatcaaagtgctaatactatggcaatggtttttcccataagctagtagctgttccccactgtgaatgttctgacttgagagtttgagaaggaagagaaaggataaggaaactgagctaatagtttttcatcccctgtggcaccagacagtgtattaagtcctttacatgtctatgcaccatgtcatttaatcctaccagtatacctgcgaagtagacattattaaccccatttcacagataagacaactgttaaactgagagtttaagtaatttgtccatgaaaccaactaattaataggagtcaaagctgggatttaaacatcaaatcctgtattttctttcctttatcatccttgncatcagcattaccattatcacctatgtgaagctgcactaatagccaaccattgtcaacatgn

SEQ ID NO: 3791 - DNA, 472 bp, Homo sapiens
cttagttttaattttgagtaaagaaaaggctaaaatcatgaattagttacaagcaacagtaccaacttatgtgacccctgaggggtggggctgtgagctcttaatttgtttttgattctgaaaaactctgcttcctggcatccaggagttagagattgagcctttcatcttctttctcaaaactagtttttgatgctttctttcatgggaatagtcacttttttatttagtaaatcgcattgctggaaccaccaaggagtgtggaatgtccttgagtgtattatttatgcaagtcacagtcacgttgccatcatggcagctatgtgaaacactaataaatgtgtttttactttttattcccattaaaactgatgtaaaacaggataaaggcttgttatagtcacttataagtatctgggtctaagtaatttcctctagatgttctaaagaaacattttcagctttgctccca

SEQ ID NO: 3792 - DNA, 454 bp, Homo sapiens
  misc_feature (1)...(454): n = A,T,C or G
ttttcggtaacctacccgtacgggttcagcggtttgcacaatgtcggaaatggctgagttgtccgngatgtatgannnnnnnngaagnataggcatggatgtgatgcctggcgagggtgaccttccgcagatggaggtngggnnnnnnnnggnnnnnngggggtgnnnnttttttttttttttttttttnnngctccctccccggggcgcttggggggggaggggccgccaatggcggcgccagaggggaaacggagccttgctaacgggcccaacgctggggagcagccaggccaggtggcgggcgcagacttcgagagcgaggacgagggcgaggaatttgatgactgggaggacgactacgactatcccgaagaggagcagctcagtggtgccggctacagagtatcagccgctcttgaagaagccgacaagatgtttctgagaacaagaa

SEQ ID NO: 3793 - DNA, 455 bp, Homo sapiens
cggacgcgtgggttcaaaagcagtggcaagtcgaagctcctatcttaatcctcgcttgttattatggaagcctggatccaacttttgaaggataagagatttcacagatcattgattacaaaggcaatagccaacaccaacaccccagacatgagagggatgctaccttcgatgcagcctccctgcccggccccagtcaagccaccgatgactgctactacctgagcaagcccaggagtgggactggtggctctgtaagaagaggaggaggcacctgagctggcacactcagctccttcaccatgtgatgccctgcaccacctcaagactgcagagtccttaccaacaagacggcactcaccaaatgcagcccttagaccctggacttctcagtctttttaactgtaagaaataaattccttttctttataaattaaaaaaaaaaaaaaaaaaaa

SEQ ID NO: 3794 - DNA, 445 bp, Homo sapiens
  misc_feature (1)...(445): n = A,T,C or G
aaaatcccactctgcatcaactgaacgcaaatcagccactttaattaagctaagcccttactagaccaatgggacttaaacccacaaacacttagttaacagctaagcaccctaatcaactggcttcaatctacttctcccgccgccgggaaaaaaaaaaaaaaaaaaaaaaaaaaaaaaaagggggggggcccttttaaaagaacccttggggggcccaaatttaacgggggagggaaaataaaaatttttttccttaagggggggcataaaaaaacccccttgggatttttgggaagaaacctttttttgggggggggaaaaaatgggcacaccccccccccaaaaattaaagccttgggggaaaaaaaaaatttttaaggggaaaagggggaaaaacaccctcaaatccctgggggttaaaaaaagtgggggnnnnnaaaaa

SEQ ID NO: 3795 - DNA, 464 bp, Homo sapiens
ctgacgtgtgtcaactatcatggaaggaaaaaaatgtacagattaaaattattcagtgttatgtactgtaagttaatatttttgtagaatggacatcaatctactttgcaaaatttggaggctatttcaacattgcactgtagaaatgtaaagtaatgtatgcaatgtaaaggaaagcccgcggtagctgagcgcttcataacagaatgttctaatcaagtacgtggtatttggggatgtctccaatattgctcttgtattctttctaattgggtttagtgactagttgaaggaaaatgttataacgccatttggttcacatgtgaagtgccctccatagccaaatgttgggatttttttttttttcgtttttggttggactgttggcagatatttaaattttatgaaatttccaaagattttggttgacaacccccttttaccttctaaatgattggagatgg

SEQ ID NO: 3796 - DNA, 450 bp, Homo sapiens
  misc_feature (1)...(450): n = A,T,C or G
agaggcacccacagttaccaacagcaagctctgcttttggcggtggaagcgtctggctcccancagggactgatcagctgggtatttttctgcaggatatgcactgataagcaacatagcttgggcatgtggaatttgtgccagttccactctcccgtcaccatcaccccctggaaggaggtaaggaaagtcctcccagagtaaatgacattgaatctgagacaccaagaacatgtaggctgtagctcatcaagatgagaggaggtgtccagatgaaaggagtagtatacacaaatgcccagattcaggggaaacacaggcccacagatcccacacagcctcatttctaagaaaaatattttgttccgaaagacgaaaatgaccttcaaagaccttgggatggatgacttgggtatttactcttgcgatgtaacagacactgatggaatn

SEQ ID NO: 3797 - DNA, 430 bp, Homo sapiens
ttctttgtgaatatgtaagtatagtataaagatttctttcatcccatttatccccttcctttaaataaactagtttacaattggtagatctgtctatatataaatatatattaaagaacaaagatatatatctaaaaatcacctaaatctgctttattagactacagttcacttattgcatagaaactggacttggctttacattcttaatgtacttttacttttcctcaagatatgaacttactctcttgaagctgaattttcttttactacttaaatcatttatgtatatctggtaaattatgaccaaatttttgttagattgcatacagtaaattgaaatacacacttggtacactacgggattgttgtgcttttgtttgcgtttagttggaaataaggtttgatgtagatggcttggtactgttaa

SEQ ID NO: 3798 - DNA, 441 bp, Homo sapiens
  misc_feature (1)...(441): n = A,T,C or G
cggaggagactgacggtccctgggaccctgaaggtcacccgggcggccccctcactgaccctccaaacgcccctgtcctcgccctgcctcctgccattcccggcctgagtctcagcatggcggatgggagcagcgatgcggctagggaacctcgccctgcaccagccccaatcagacgccgctcctccaactaccgcgcttatgccacggagccgcacgccaagaaaaaatctaagatctccgcctcgagaaaattgcagctgaagactctgctgctgcagattgcaaagcaagagctggagcgagaggcggaggagcggcgcggagagaaggggcgcgctctgagcacccgctgccagccgctggagttggccgggctgggcttcgcggagctgcaggacttgtgccgacagctccacgcccgtgtggacaaggtggatn

SEQ ID NO: 3799 - DNA, 460 bp, Homo sapiens
  misc_feature (1)...(460): n = A,T,C or G
tttgtgatgataactgaagtcttttgtgggtccgacctgttgtagggtgtgggggaaagtgaaggaagagaatgaaggtgagtccccgccgttgcaaaccttcaccaaaccacgcggcccagttttcgtgagtacccctgtgtcccagagaggaggacccagcgtcctcggctctgccgcaggccttcttggtctggtgggtactcgaggcagttgagaaccttgctgagctgagcgggcacctcgccttgcctgctggttcgacacctgaccccctccccctgggattatgtacacgcatcattgggcttcatggatgtggaaaggggagcaaaggatggtttggggggtacgtccggctttagcgagggcgtacgcttcagccccgaccttgtcagtgagttgtaggcgttgaggctgggctgcctcgagacagtcacggnctggccagatggctggn

SEQ ID NO: 3800 - DNA, 415 bp, Homo sapiens
aaataaaattaggcagatgtgtgatgccagatatacacatatgactcaccccgcccctccccttgcttcatttagtttctggtcaaataccactttactaagaaaggccttacctgaccaccacctccacctaaaatagctctccttcaaatggatcatttggcttactgcacttccccttgcagcagttgtcaccacctgtgaaattatataatatcttaattaattgtatttgactccatgaatgccaggatatcagggactcactgctgagtctctatagcctagaacagtgctggtacatagcccttaaattcttttacacaaagaagaacctattaaattttgtcaaataagaaacttgaggtttatcttaatgacagagttgctattatcaccaccatctgttttaaag

SEQ ID NO: 3801 - DNA, 414 bp, Homo sapiens
aggtccatttcagactctcgggttcaattctgagtttatgccagttattcagacagaaagtgaacacaagcctcctgtaaatggaagttactttgcccatgtgaaccctgcagatggagggtgcctactggagaaatacagtgagaaatgtcatgattttcagtgtgcattactggctaatctttttgccagtgaaggccaacctggcaaggtaattgaggtgaaagccaaaagaagaactggaccacttaactttgtgacttgtatgagagagaccctggaaaaacattatggaaataagcctataggaatgggaggtactttcataattcagaagggaaaagtgaagtctcacattatgcctgcagaattttcttcctgccccttgaactctgatgaagaagtgaataaatg

SEQ ID NO: 3802 - DNA, 495 bp, Homo sapiens
  misc_feature (1)...(495): n = A,T,C or G
cgcccccccccgcccccccattgatcgcctgatagacagccntggaaaacccgggncgacccacgcgttcgaacagagggagcatggacaaagctcctggccctcatacttcagcatggatgagaatagatgcaaatgttgataaacatcctgccatgctgaatctcccagaagctggtaggaattattccatctgggtatccatcaatacctaagactggtgggaattactttgtttgagtatccatcaatatctaagactaagactagggtaactctctttacttcttcgggtaaagcaaagaagaatagccctgcatgacaagccccatgaaataccgatgttcccatgctcaccttttctttttgtttctttatagaatgtgaatgacactttgagcaggtaagtcctgtttgaatgcaggaggggaggggtgtgcgtatatagaaatgaatggaatgcacctctgaagaaatctctcgcctctgcttatn

SEQ ID NO: 3803 - DNA, 479 bp, Homo sapiens
  misc_feature (1)...(479): n = A,T,C or G
catgcatggaattttcggggagacccacccgtccgcccacgcgtccgcccacgcgtccgggatgtnatgtgtgtnnnnnnnnnggtggacaatggggaccattgggaaaacggattttgtaacttagctttanaactagggnnnnngnggnnnntnnnnnnnnttntnntttttttnnnnnntttttttttttttnnnggggcgggggggttttttttttgggtggataccttcctctcctggcctctgtagtttcagatcagtagggagaccatataataattgtatgggacctgtttcaaaacatattttttctgtttttataagtaagttgatattaattaaactcttggcaatatttcttctttcttaaaggaaaatataccttaactttttttcttttacactgtgaaacatacacagtagaaattctgttactctctgttattaatacataaatgagaatacatttttttccn

SEQ ID NO: 3804 - DNA, 474 bp, Homo sapiens
  misc_feature (1)...(474): n = A,T,C or G
actacgggtcgacctacgcgtacggtcctcggagcaggcggagtaaagggacttgagcgattcagnnngtcggattattnnttttaanacccctggctcccgccggggatctcttttcacccttctcccacccttcgctcgcgtagnncctgggngggnggnngnnnnggggggggnnnnnnngnnnnntttnntttttttttttngtgatttaggggacgagacgtccgcgcccgggggcggcgggagcccaggagcctgccccgccctggggacgaagagctgcagctcctcctgtgcggattcctttgtttcttcctcttcctctcagcctgtatctctattttcgacctcacaagtgcacgatctgattttctggagagatgtgaagaagactgggtttgtctttggcaccacgctgatcatgctgctttccctggcagctttcagtgtcatcagtgtgggttcttacct

SEQ ID NO: 3805 - DNA, 413 bp, Homo sapiens
agattccattgtatggatgtactacatgttgttcacgcattcacctatctatggaagcctgggctgcatccacctgttggctattgtgaataatgctgctatgaacatgagtgtgcaggtatttcttccaaaccctgctttcaattcttttagatatatacccagaagtggggtatactttcatatcttaaccttgaccggaacttattggagtttcatctttactcagctggctccctcccttctggtcacactggactttaacccttagaagggatggagtgagatttattcatcttggtggcattgtgaggatgagtcacttagcaatcaacaagtttctgctcaatagtttccctcgggctctctactcaatccaattactaggagaaggatgccatgtgaactttttt

SEQ ID NO: 3806 - DNA, 463 bp, Homo sapiens
  misc_feature (1)...(463): n = A,T,C or G
gggccgacctgacgtcatgattacctccggaatcccggncgaccacgcgtccgcctaaacccgacgctaggctggagggagcgactgctggccgggctggcggggactggggcctcgttgtggttcgtggcggggctggggctgctttacgccctgaggatccctttgaggctgtgtgagaatttggcagcgggcttatcttgagtaataaaatagtacaggaagtgagagcgccacaaacaacagtgggtttgctagttctttcgacgtctgtagaacacttgctacgtattctgtgctgacaatacgaacacattgactgtatttttaaattcattgacacccaaattctatgtggcacttacagggacctcttcattgatatcaggactaatatttatatttgaatggtggtacttccataagcatggcacatcttttattgagcaagtatctgtaagcc

SEQ ID NO: 3807 - DNA, 415 bp, Homo sapiens
  misc_feature (1)...(415): n = A,T,C or G
cccacgcgtccgcccacgcgtccgcaaagcacagctcatctaaagaatgcctacttcttttccaaataagcatcagatttatcgcctattatgcagtaacagtcaataaaatgtacttatgggggggaattactcaattattctatcagaacctattataaagactgtatttcccatagacgtttacagcaactatgtttaaaaaacaaaaacaaaaaaaaaacacccaaacctaagtagaatacattattttgcatgaaggaatgtcatttctgagctttttacacctaaaattaggctgaaatagctgagataattaatttggaacctatcaatttgagtggactttttctttagtagtacaccattttggttgttgtagtttcaaagtctttctgaagcagatatattgggn

SEQ ID NO: 3808 - DNA, 486 bp, Homo sapiens
  misc_feature (1)...(486): n = A,T,C or G
agggaaggagcangnnccnnnnnnccttgaaaactgangacnctccgaacagccccggaanntacgggtcgagccacgcgtccgggaagatctaaagaacccactgtgggtcaggggaatgggaccagcaggacatatgggcaagctctgcaggacagacagacagacaaaccctctgatctatgaagtctctgcagggcaaggggaccagggacctggaaccctcttggccaaggggagtgggagggacagagggaaggtcacaggcaagggtgcctatctaagtggaactaattgcccgagggctcagcaaggccaagaggagacagccgtgacggtaaacttcccctctaccagcctccaagccccacgccagcgagcaggctgcctgcccaccccgtgcccccagccagctggctgtgccagggcagagccatgccacatctgtatatagatggggtttttccaatacagctggttcgtgat

SEQ ID NO: 3809 - DNA, 419 bp, Homo sapiens
caattgtataaatctaatttattaccaaatagggtcttttaaaaaatatttttatcgttgaaaccttgacaggtacttcatattcttctaataatttaaacagtccaataatgtggtatacactttgacatccaagaactcaccaagatgtttttcagagatttattctcgatttaactatcatagcatttaatgaatctgatttgtagttcaataaattgtgggttgaactacttatccctgtgtgaacattgaattactttctgtcactgaaactgaggtatttgggtgtggtaagtacttcgaaaattgtaatactgtttgggcattgtctaaattattaaaggttaaaatagaaaataaagtcagaatttttcttttccattccaaaggtgtacttagagatctctattagtatt

SEQ ID NO: 3810 - DNA, 404 bp, Homo sapiens
  misc_feature (1)...(404): n = A,T,C or G
cggacgcgtggggtaaagttgttttataaacgatcctgttaattaaaccacagacaccatatatccttctgcatcctttggccaataaaagttgctggagaaccaaaaaaaaaaaaaggggggggccgtttaaaagaacccttggggggcccaattttaacgggggcgggaaaggaaaaatttttttctttatgggggggggtttaaaatcctcctggggaattttggaaaagaaccttttttttggggggggaacatatgggcccaccctccctccaaaatttaaagccttaagggaaaaaaaaaatttttaaggggaaaagggggaaaaacaaccgcattttgttggttgttaaaaatgggggcnnnnnnggganacaacccctctgtgggggaaaagaaag

SEQ ID NO: 3811 - DNA, 497 bp, Homo sapiens
  misc_feature (1)...(497): n = A,T,C or G
nattgatagccntgcggactttgatgacctcccgggncgacccacgcgtccgggtagatcaattcagccatggtagtgctggttggcagggattggtaacggagagaactgctcatcagccaaaactcaagccttgccttttaggaggccaccagcagagggacttggtcctccttgtctggtacttgtgtacatgccggtgacctgaggactccactcacactggcgagcaaaaagggagcagtgattctcttttctctccccaccccctgccctttgttaccaacaccagtttcccagggggtacatgagtttctgaatttttaaaaaatgtttttggtttggtttttctggggactgataagtgctttaagcaatgtccataccccgtcaagactcccagcttagncattntcttgtatttttctggtcacagtatttgtgtgtgtgcttggtttgcagctcattttggctgtattatatattgagtgatgaat

SEQ ID NO: 3812 - DNA, 412 bp, Homo sapiens
catatgtgtgaactgcattaagaagtgccatcagggacatgatgtagagtttattagacatgataggtttttctgtgactgtggtgctggaacactgtctaatccttgtacattagctggtgagcctacacatgatacagatacactatatgactctgctccacctatagaatctaatacattgcagcacaactgaattccttccctaaagaaaaagtcctgccattgtaacatcataacttaaaacacttttttggaagaagatttaaaatatttgcccatgctacaggaagagactgtattaaaaatggatacacaaggtcagttgacactatgaagctcaagctaccaaaaagaaagtggcaatatattgactcaggatctcaaagctgggtgttttagcattactgtg

SEQ ID NO: 3813 - DNA, 404 bp, Homo sapiens
agagaagcaaaaagatcttatttgaatgttagaaccattgatttatagcacacataaataaacggaatagattgctgtatactcaacccactgatatttaatatcttctaagttatgatgatatcttagaccaagtagagattataatgtgtcaatcattacaaagaactgaagaatccatctgctatactattagctcaactgactcatcattacttagtctaatataaacctcttaatttcaaggaaaacagaataattaaagggataataactcatagcaggtcatgtgcagtttagtgactacatgaaagacttctgaacaagactatggcatctacctaagtccactgaatatgataatatcaaaagaagcatatatgtcatatataatagtagttcct

SEQ ID NO: 3814 - DNA, 407 bp, Homo sapiens
ctaagctatgttcagatagaagcctcgaaattcctgtaaattgtttactttatgatgtttacatacacgtttcactttgaaaaaaaatgcaaatcgactttttaacaactgttgagatgtttcatgggacagtagaactctgactcaccaactgggctaaattttaatttaaaaatgtatttatttgagtgtctttccccccctcaccctcaccatctgaggggctccctgagatcttggtagaggaggcccctcctgcccagaccttcgtttgtttccccggtggcccttgcttcttgctttgcagactgcctgcagccatgattttgtcactgacatctgtgagccaaagactgagcctttttggcaggaataataagcaatactacacaacttgctactttcag

SEQ ID NO: 3815 - DNA, 484 bp, Homo sapiens
  misc_feature (1)...(484): n = A,T,C or G
agatggccggnnnnnnnnnaattgatanactgagagacactgcgacggaacttccgggttgacccacgcgtccgctggtttcaaatccctgcccccaggcaagtaaaaccctgacttgctcaagacagaagatcttttctcctgtttttcaaaataaacatatatagggatggaccctgtgcattgtggcctgccttggtgtcctagaattggagccagtctttagcttaatgtctgaagtatttatacggccaatatgtgttttcttatgtcagaccacactgtctttttgaatatcagttcatttcctctcaccgagtgcttttcggtgagaggcaaagagaaagaatgaacaatcaagtattgacagactggcattagcaggacagagccatactagtgacaagggcatcccaaggcacttgcccagagctgcagagttgtgtgtgccatacctgcggctcaaagggaaggccttctatcn

SEQ ID NO: 3816 - DNA, 419 bp, Homo sapiens
ctccgctcagtttccggtgcggcgaacaccaaagtccgggaacttaagcattttcggtttctagggttgttacgaagctgcaggagcgagatggaggtggacgcaccgggtgttgatggtcgagatggtctccgggagcggcgaggctttagcgagggagggaggcagaacttcgatgtgaggcctcagtctggggcaaatgggcttcccaaacactcctactggttggacctctggcttttcatccttttcgatgtgggggtgtttctctttgtgtattttttgccatgacttgttcgctgatatctaaattaagaagttggttcttgagtgaattctgaaaatggctacaaacttcttgaataaagaagacaggactctcaatagaagaatttcacatctgcaagggacccttcctt

SEQ ID NO: 3817 - DNA, 402 bp, Homo sapiens
ccgctttgtaaaatgctgctgacagatttatagttaactagctcaccactgcctctgcctccaagctgccttttagactgaatagcttttcttgttagccctactttaacatttcttttgaagtggttgtctgcttgaagagggaaacacgtcatgaaactgtaatgcatgaacagaactcaggagttgtctggccagcttattgctgccactggtgacatgccaacttaccagatccgagctcctactgctgctttgccacagggagtggtgatggctgcatcgcccggaagtttgcacagtccccagcagctggcagatgaagcaacacgcatacgagagctgaggctaatgaaaaacagggaagctgccaaagaatgtcgacgtcgaaagaaagaatat

SEQ ID NO: 3818 - DNA, 473 bp, Homo sapiens
tgatgctgagcttctgtaatcactcatcccatcagaatgcaataaaagcggaagtcacagtttgtttcctggaaactttgacaagctttattaagttgagagagagagaggggaaaaaaaaaagcctttcgtagttcagtaattgccagcaataacacggctaaaatgaagtttttacagtatatgacatagggcgcttcataaataggtttatttctgagtttttagcaaaatgtaatgaaatatcaggtggatttctttgattaaacagaacaaattacttgagtaataggaaattaggaggatctagggacagaaggaaagtgaaaaatgtgaaaatacaaaatacccaagatttaagaccggggggaaaaaaccacaaattggtaaataaaggtttgctatttgtaaaaaaaaaaaaaaaaaaaaaaaaaaaaaaggggggggcctttttaaagatcccctggggggcc

SEQ ID NO: 3819 - DNA, 424 bp, Homo sapiens
ctctgccataacatagagaggatcaagtttgctttttattatcagtttgccaactgagaaggacaaccaaagtgagctggaggtttgaagcacaaatgcagcaaagccttcaccctgctatataagtggagctggaataattctgcggctctgtggcctgcaagtatgagctagctctctttgtactttcggggaaggaggactcacagtgaggaaacacaaactgtgcacagaagtggatcacctgctggtggaaatgtggacatctattgttcagcagatggcagtttttaaaaaataaaggttgcgaggaaaagacttatctaagaagaaaagcattctcagcggtgtggtctgagaacaaagaataacctaggctgctggagagcacccttttgggtgtaatcattctgtgacctcccaa

SEQ ID NO: 3820 - DNA, 415 bp, Homo sapiens
cggcggaaacatggcggtcgcggccgggccggtaacggagaaagtttacgccgacactggcctgtattagcgcgtatggcctcgggccctcgttccccaaggcgtgccgcctccctgttctcagtcgcaggctgaagccttgtctgctctcctcctttttggtttggttttggaactgactccgagggttgggagagcgcgttggtggcgacggccgagtcagccaacaaatggaattttcttgagcatgtttctaatcgttttgccattggaatccatggctcatgggctcttccatgaattgggtaactgtttaggaggaacatctgttggatatgctattgtgattcccaccaacttctgcagtcctgatggtcagccaacactgcttcccccagaacatgtacaggagtta

SEQ ID NO: 3821 - DNA, 410 bp, Homo sapiens
  misc_feature (1)...(410): n = A,T,C or G
cgcttgcagcttcggagtcacggaggtgaaacttcaaggggccacgtgcaacaacaacaagctgtcactgtccaatgccatctcaaccgcccttcccctgacgcagctgcgctgggtcaagcagacaaacaccgagaagaaggccactgggggaaccttacctgtctacctgaacttcacccgtgcagacctcatcttcaccgtggacttcgaaattgctacaaaggaggatcctcgcagcttctacgagcggggtgtcgcagtcttgtgcacagagtaaacttttctagctgcccctttctgtaatagggaaagttgggatttaacatttattcattgttaaaatatttggaaggtctgagcttgtgaaaagaaagtgcgtggtctgacgttggaggaagctgaatggn

SEQ ID NO: 3822 - DNA, 399 bp, Homo sapiens
tggatataaaggaagcaagtttcatcgtgtcatctaggatttcatgattcaaggaggtgacatcaccactggatatggcactgggggtgtgagcatctatggtgagacatttccagatgagaacttcaagctgaagcactatggcattgggtgggtcagcatggccaacgctgggcctgacaccaatggctctcagttctttatcaccttgaccaagcccacctggttggacggcaaacatgtggtgtttggaaaagtcattgatgggatgacagtggtgcactccatagagctccaagcaactgatgggcatgaccgtccactcaccaactgctcgatcatcaacagtggcaagatagacgtgaaaacgccttttggtggtgagatcgctgattggtg

SEQ ID NO: 3823 - DNA, 451 bp, Homo sapiens
  misc_feature (1)...(451): n = A,T,C or G
cccacgcgtccggattactttagagggcattcctacaagtcaggacattctacataactacagtgcaaaccttgcaatcagaaagtcaacattaatacattctagtttgttacttctctgtaatgtcctttatagcaaaaggatcccattctaatccatggcttgtatttagttgctgtatctgttagatctttcagtctggaacagttcctcagtctttccttgaccttcatgaccttgaatattttgaagagtaaagcctggtaatataagaatgtccctcaattgggtttcatggtgattagatttagattatatgattttttggcaggagtatcacagaagtgacccagngatcttctcattgcatcttacctgtgaccctacagttttgatttgccctgttactgggaatgttagcattgatcactaacagtggtatctgctgaat

SEQ ID NO: 3824 - DNA, 412 bp, Homo sapiens
  misc_feature (1)...(412): n = A,T,C or G
ttctaaaggaggtactacttaaactgtgttgaaatttcaattaaggaattaaggaggctgggcatggtggcacattcctgtaatcccagcaggaagctgaggtgggaagattgcttgagaccaagagttcaagaccagcctgggaaacaaagcaagacccctgtctctacaaaacataaaatactagctgagcacagtggcgtgtgccagtagtcaactactcggggggctgaggcagaaggatcacttgagcccaggaatttgaggttgcagtgagctgtgattgcaccactgcactgctgcctgggcaacagagtaagacccgtctcaaaaaaaaaaaccaaaaaattaactgaaggcgggaaggttggcttgtttcaggagagggatcaccatgtatgaaagctgaaan

SEQ ID NO: 3825 - DNA, 389 bp, Homo sapiens
cccacgcgtccgaggggctcaaggaggtatgtcggtcagtagtcaaaactatgaaatgatactggtttctccacaggaatatggttccattaggctgggagcaaaaacaatgttttttaagattgagaatacatacctgacaacgatccggaaactgctcctcaccactcccgtcatgcctgctgtcggcgtttgaccttccacgtgacagttcttcacaattcctttcatcattttttaaatattttttttactgcctatgggctgtgatgtatatagaagttgtacattaaacataccctcatttttttcttttcttttttttttttttttttagaacaaaggtttagtttttttttcatgagggggaaactacaaagggagggtaa

SEQ ID NO: 3826 - DNA, 421 bp, Homo sapiens
  misc_feature (1)...(421): n = A,T,C or G
atgatgcacaagaaacctaatttattttgctcttttctgcagcagcagcanaaaaaaaaaaaaaaaaaaaaaaaaaaagggggggggttttttaaaaaaatcccttgggggccccccccttcccttgaaaagaaaattttaattttttttttttggggaaagtttttttaaagcccccggggtttttttgggggggccctttttttgggggggggaaaatttgggcccctttttccccaaaaattaaaacctttttgggcaattttttttttttaaaagaaaaaaggggggaattttccttttttgcccccctcccccccctttttttttgggggggaaatcccttaaaaaatttcccccccagaaagatttttttttggcccttttttttgggcataaattatttcaggggagattttag

SEQ ID NO: 3827 - DNA, 454 bp, Homo sapiens
  misc_feature (1)...(454): n = A,T,C or G
aaatgatcgactgcgatacggcnccgcaantnngggtagacccacgcgtccgctctcttcttcttttttgttcatgggacatggtacttaatcaaataggagttgggtttggtttttctcctaaaataatgctcaatacttacctaatcaaatggcatccatttgaataaaatgacaataactaaagctagttaatgtcagtgacattaaactaactccaggattcaggagttttaatgttagaatttagatttaacagatagagtgtggcttcatttgtccatggtagcccatctctcctaagaccttttctagtctgtcttcctgccttcgaacttgatgacagtaaaaccctgtttagtattctcttgtgcatttggtttgttggttagccgactgtcttgaaactattcattttgcttctagttttattttacagaggtagcattggggg

SEQ ID NO: 3828 - DNA, 397 bp, Homo sapiens
aaatatggatgataaggaaagagagactgccttctgacctaactgggcatggtttcagtccctagctcattgtccaggaaccctgtggagaaggcctgtagcttaatgtgctccatggatgaggttctcagtcttatacaactctcctaagcattgacagtttccttaatatttactatcacttccagctctcacttgggaacattcatgcagtatccctgcagtgcacatgcctctttgttctctgatgctgcagtggtccatggaagatcatagctcacaatctcatctgcattgcatagtcaactctgaagcaagcatatatcatgtgtgacccacatctgagggttggggggagcagttttcccctcgccattgcccactctcttcattttct

SEQ ID NO: 3829 - DNA, 403 bp, Homo sapiens
  misc_feature (1)...(403): n = A,T,C or G
cggacgcgtggggtaaagttgttttataaacgatcctgttaattaaaccacagacaccatatatccttctgcatcctttggccaataaaagttgctggagaaccaaaaaaaaaaaaaaggggggcccgtttaaaagaacccttggggggcccaaatttaaccggggatggaaaagaaaaatttttttccttttggggggcgattttaaaacctccttgggaattttggaaaagaacctttttttggggggggggacaaatgggcccaacccccctccaaaatttaaagcctttggggaaaaaaaaaatttttaaggggaaaagggggaaaaacaaccgcaataccctgggggttgaaaatttggggncnnnnnngaccccaacctcccgtaaggcggaaggag

SEQ ID NO: 3830 - DNA, 405 bp, Homo sapiens
cgttaatatcgccccactccgcgcctgttacgatttcttcccgggttccgatcgctttgcccggccggacttcagggacatttccaaatggaacaaccgcgtagtgagcaacctgctctattaccagaccaactacctggtggtggctgccatgatgatttccattgtggggtttctgagtcccttcaacatgatcctgggaggaatcgtggtggtgctggtgttcacagggtttgtgtgggcagcccacaataaagacgtccttcgccggatgaagaagcgctaccccacgacgttcgttatggtggtcatgttggcgagctatttccttatatccatgtttggaggagtcatggtctttgtgtttggcattacttttcctttgctggtgatgattatccatgg

SEQ ID NO: 3831 - DNA, 456 bp, Homo sapiens
  misc_feature (1)...(456): n = A,T,C or G
tttgaatgcgtgcgatacggcnccgcaatnnngggtcgacccacgcgtccgcgagccggctgcgccgggggaatccgtgcgggcgctttccttcccagacccatcctcgccgcgctccagcacctctgaagttttgcagcgcccagaaaggaggcgaggaaggagggagtgtgtgagaggagggagcaaaaagctcaccctaaaacatttatttcaaggagaaaagaaaaagggggggcgcaaaaatggctggggcaattatagaaaacatgagcaccaagaagctgtgcattggtggtgggattctgctcgtgttccaaatcatcgcctttctggtgggaggcttgattgctccagggcccacaacggcagtgtcctacatgtcggtgaaatgtgtggatgcccgtaagaaccatcacaagacaaaatggttcgtgccttggggacccaatcatg

SEQ ID NO: 3832 - DNA, 477 bp, Homo sapiens
  misc_feature (1)...(477): n = A,T,C or G
ggaggacgggggnnnaatgatnactaagacctgcgacggaccttcngggnngacccacgcgtccgattaagcttattcggtcagaaaaacatgcaggatttcaagaccatggtctgaaactctaagtccatcttgatctctatttgcagtgattgaattatctttgcaatccccaacccgcccaatatcttgcacacatgaaactttcaataactacatgttggatagctaaatgaaatgaatgaatacactaacaattttacattcttaaagaaaggttgctattctaaaagttactattactatgcccatcttacagataagaaaattgagacttggagaagtctcacagcttgaaaatcgaagagcctaaattcaaatttaggcagtctgatgtcagagcctgccctgttctacatactgaaagtacaaagaaagacagacccaaactcctatcacagacccaaattcctatca

SEQ ID NO: 3833 - DNA, 400 bp, Homo sapiens
aaacagataaagacagcatttaaaactgtgttgtcagataagagaacacatccaaaatgcatgattcttacaaactaaaggaagttaatgtgcaaaaatctcaaccaaaactactatttttagtatacttgtttacgtaaatgctgattggaaatatttaaatgactatagatctgattctttcttttcctttggaaactgggattaatgtatgctctagatccatttattagaaatgcaaaaatactacaattttttgatggatgaaaatactcctgtaacacaaacagagaactggaggaactgaagaataactcactcatatagctctgcctcattctgtgtgtgtgtgcatgtgtgtgttagcagaggtattttactcagaaaataggtttcaaag

SEQ ID NO: 3834 - DNA, 390 bp, Homo sapiens
  misc_feature (1)...(390): n = A,T,C or G
attaggaaatactttagggactatgatataacaaatatttaaaaagaaaaaagaaatatcttttcactgcagcctaacccaatgtgtacttataggtggttatttcacttagatactttcagagaaagagcattcataacttcttttggcagtcaattagggttcttaatgccctcatgttttttccttagatctagactaaatattgatcaaccagaaacttaaacatattttgcgcagaataaagaacaactagtcaagataagtctttttaagttataaaagtttaatttgatcttcttcgggtggaataattcaattttataccctttcatcttggggcctaagtactttaataaagatctatacctttaagccaggggtaagcan

SEQ ID NO: 3835 - DNA, 403 bp, Homo sapiens
  misc_feature (1)...(403): n = A,T,C or G
agggactccagcccatgccatggcggattctgagcgcctctcggctcctggctgctgggccgcctgcaccaacttctcgcgcactcgaaagggaatcctcctgtttgctgagattatattatgcctggtgatcctgatctgcttcagtgcctccacaccaggctactcctccctgtcggngattgagatgatccttgctgctattttctttggtgtctacatgtgtgacctgcacaccaagataccattcatcaactggccctggagtgatttcttccgaaccctcatagcggcaatcctctacctgatcacctccattgttgtccttgttgagagaggaaaccactccaaaatcgtcgcaggggtactgggcctaatcgctacgtgcctctttggctatgat

SEQ ID NO: 3836 - DNA, 510 bp, Homo sapiens
  misc_feature (1)...(510): n = A,T,C or G
atgttccaatgaaanctacgtgcctcgggcacggaaccccgggtcgacccacgcgtccgtctacatctacatgacagtagaaggtgacattctttcccattcccccactggaatagtgtcagaggaaagcagctaaaatgaaatgtttaaagaatatttgcattcttacaactaatactcaaaatgtctagctttcagtaaaatccatcattataccaaggactcagaaaattttgcctgaatgagaaaaaatgaacaaccaacaccaaaagcaagatgacataaatgttaggattatctgtcaaaactttaaaaatagctatgataaaaatacaattatgaagcaataatgaacatgcttgaaggaaatggaaaaaaaaattctcagcaaagtaatagaaaatttaggaaaaggtagaagatatttttaaaaaagaaaattgaaacagaaaaatacaataatggtcgtgaaaaaaaaaaaaaaccctaaatcgatgggctcaacaacaa

SEQ ID NO: 3837 - DNA, 405 bp, Homo sapiens
tccgggcccgggcggctggcctcaccgcccactggggaagacatgtaaggaatttgcataagacagctatgcaaaatggagctggaggagctttatttgtgcacagagatactcctgagaataaccctgatactccatttgatttcacaccagaaaactataagaggatagaggcaattgttaaaaactatccagaaggccataaagcagcagctgttcttccagtcctggatttagcccaaaggcagaatgggtggttgcccatctctgctatgaacaaggttgcagaagttttacaagtacctccaatgagagtatatgaagtagcaactttttatacaatgtataatcgaaagccagttggaaagtatcacattcaggtctgcactactacaccctgcatgc

SEQ ID NO: 3838 - DNA, 405 bp, Homo sapiens
aatttatagatagatcagttgctatattttctggtgtagggtctttcttatttagtgagatctagggataccacagaaatggttcagtctatcacagctcccatggagttagtctggtcaccagatatggatgagagattctattcagtggatcagaatcaaactggtacattgatccacttgagccgttaagtgctgccaattgtacaatatgcccaggcttgcagaataaagccaactttttattgtgaataataataaggacatatttttcttcagattatgttttatttctttgcattgagtgaggaacataaaatggcttggtaaaagtaataaaatcagtacaatcactaactttcctttgtacatattattttgcagtatagatgaatattactaatt

SEQ ID NO: 3839 - DNA, 407 bp, Homo sapiens
cccacgcgtccgctttgcagagtttctgcaacagttctttctcaaatttgatcttaagattgctgggtcccatccaaggcctcttagatgagaaaccttggggtacaacctaggagtctgtatttttcaagacgcacttgatgtgattcttgttaaagtcagggaaacagtagtaagttaggagtttgaagaaaaataatattttcatctcccttgctgtgttcccagttaacatggttttgagccctccatttaggtggagatgaaggtgtcaaacttcagtcagtgggggaggcccaccccaccccaccagttagctcaggttgggctagacatggacaaaattggttggcagtaaacaacgacccaagcagaacaaggtattgctagaaacacctccatagaag

SEQ ID NO: 3840 - DNA, 413 bp, Homo sapiens
cgcgcgctcgccccgccgctcctgctgcagccccagggcccctcgccgccgccaccatggacgccatcaagaagaagatgcagatgctgaagctcgacaaggagaacgccttggatcgagctgagcaggcggaggccgacaagaaggcggcggaagacaggagcaagcagctggaagatgagctggtgtcactgcaaaagaaactcaagggcaccgaagatgaactggacaaatactctgaggctctcaaagatgcccaggagaagctggagctggcagagaaaaaggccaccgatgctgaagccgacgtagcttctctgaacagacgcatccagctggttgaggaagagttggatcgtgcccaggagcgtctggcaacagctttgcagaagctggaggaagctgagaaagca

SEQ ID NO: 3841 - DNA, 511 bp, Homo sapiens
  misc_feature (1)...(511): n = A,T,C or G
ctagttgttgatttcaggccctcaaacatcccaggccttgttagtcactatagaaatgttctaggcaagtgggaagaacaggggataagagaaaaaaactaaagatgagaacaaactggctttaaaaaaacatcattgcttgagagtgtccaatatgcctatttgctaatgactgtgtgtgaatgctagggtgcctttgaagagtcctgacaccctcttctactgctccattgatcaggagagggtcagatgacttctaatgttgagaacggaattatgaagttcattttatacacaggcaactgaggcctcaaagatcacatgcctactctcacacagctagtgtcagccactgcacgaacccaagtctctgtaagaggttttccttttaagaggtggaaacaacaggtactgacccctaggactcttatttgttctttgctcactgacaaccttgtcctacaggngtgcacagggctccatttgtagagctggcataatccctactacg

SEQ ID NO: 3842 - DNA, 407 bp, Homo sapiens
cggagtcagacaactcctcagctaaacacccgtatgacttcatacaacacaatactctatactgtgatgagaacagctgccaaggctacctataaaaggacagtgatctcatatttggctggcgggtttgtatctttctctcgaccacttaaaacttcagacttcctgggctgctggtatcatggagaaagtacaatacctcactcgctcagttataagaagagcctcaaccattgagatgcctcagcgagcacgtcaaaagctacagaatctatgtatgaatttctgtctcatcttaatatgtcacttgctgatctgtatcatcgagatgcttctctgaagttgtgctacaacctctagatctgcagcttgccacatcagcttaaaatctgtcatcccatgcagag

SEQ ID NO: 3843 - DNA, 410 bp, Homo sapiens
cccacgcgtacggtgttcaagcgcttcttggaggctggccgggtggcctatgtctcctttggacctcatgccggaaaattgggcgcgattgttgatgttattgatcacaacagggctttggtcgatggaccttgcactcaattgatgagactggccatgcctttcaagagcatgcaggtcactgatttcatcctcaagtttccgcacagtgcccaccagaagtatgtccgacaagcctggcagaaggcagacatcaatactataggggcagccacacgatgggccaagaagattgatgccagagaaaggacagccaagatgacagactttgatcgttttcaagctatgaaggcggagaaaatgacgaacacattaatcaagaatgaagtttagaagcttcaaaaggcagc

SEQ ID NO: 3844 - DNA, 412 bp, Homo sapiens
cgttgaaggacaccagctgcggaatttgcggctttggcagctgtttgttcccaccgagctgtgctttaggaagctggccagccgggcctcctttaggtgcgctgcagcctttttcaaagcgagtgaatgtggcccggcccctacagttcgccaggcccgctgtaaaagggttagatttcagtctatagacgatcagtgggaaggcctttcctaggaggtaaccagaacagagagctgtaaactccgtgaatgcaagaggctgcttctgttacctgagtggctctcactcatctttgccttccttacctcgtgatctcaccattccagattgaaatcatggcaggtccagaaagtgatgcgcaataccagctcactggtattaaaaaatatttcaactcttatactctcacag

SEQ ID NO: 3845 - DNA, 406 bp, Homo sapiens
cgccagggatggctgagcgtgaagatgcagcgggtgtccgggctgctctcctggacgctgagcagagtcctgtggctctccggcctctctgagccgggagctgcccggcagccccggatcatggaagagaaagcgctagaggtttatgatttgattagaactatccgggacccagaaaagcccaatactttagaagaactggaagtggtctcggaaagttgtgtggaagttcaggagataaatgaagaagaatatctggttattatcaggttcacgccaacagtacctcattgctctttggcgactcttattgggctgcgcttaagagtaaaacttcagcgatgtttaccatttaaacataagttggaaatctacatttctgaaggaacccactcaacagaagaag

SEQ ID NO: 3846 - DNA, 420 bp, Homo sapiens
  misc_feature (1)...(420): n = A,T,C or G
tgattggctaggactttcttctgtaaagtcataccttttcacatcttaagtttttacatttgccattttccaaatctcaattttgggcaagaacgatatagtcacaactatggggctgctttcaaaagcggggctccatttctactgtcagatcaatgtggtgctgtaaccatctttttatccctaccttcaagaacctccttatatgaagcctgtctttatccatcagaaggtgtgtgaaatcatcacttccttctggttttatgtatttgtagactatgcagcttttcattaaactgcaagtatatacaagacagatctgaaattaggcctgagtgttccgatccaccactgtactagtaaataaaaatccacctaccttttatgtggaaaattatgcgctattgagtaactnttagc

SEQ ID NO: 3847 - DNA, 410 bp, Homo sapiens
tcaccccgactcaacgtgagacgcaccgcccggactcaccatgcgtgaatgcatctcattccacgtggggcaggcaggtgtccagatgggcaatgcctgctgggagctctattgcttggaacatgggattcagcctgatgggcagatgcccagtgacaagaccattggtggaggggacgactccttcaccaccttcttctgtgaaactggtgctggaaaacacgtaccccgggcagtttttgtggatctggagcctacggtcattgatgagatccgaaatggcccataccgacagctcttccacccagagcagctcatcactgggaaagaggatgctgccaacaactatgcccgtggtcactataccattggcaaggagatcattgacccagtgctggatcggatccgca

SEQ ID NO: 3848 - DNA, 461 bp, Homo sapiens
  misc_feature (1)...(461): n = A,T,C or G
aacagcggaattgccttacgccgccctgcccctcgcctgcttcagaagcttccaggaactcccgggtcggcgacccaacccgagccgcctggggccccaagggaagctgaacgccctgtgggctcctgggatggttcttcccgttctttgcgccgccttcacccattgaagagcctgtgcccaccctgcccagtcgctctcggggccgcggaggagcttccgctgccatcttcggatcctgtgttccgcacgggggctccaccagggcagggatggtgcagaatggggaaatggagagagaacctgaaagagccccaaactcgaggacctattgctccccaagaataacatcttccagaagaactagacagaaaactaggcgtctgggaactctgaaatccntggaggagtagcatcatcatgaccctctgtgttcttttgcanaggacnntgctccatgt

SEQ ID NO: 3849 - DNA, 406 bp, Homo sapiens
  misc_feature (1)...(406): n = A,T,C or G
agaggggcggccctggaggagacggaggccgcgggtgggcccgaggcgcaagaggaagatgaggacgaagaagaggcgctgccgcactccgaggccatggacgtgttccaggagggtctggctatggtggtgcaggacccgctgctctgcgatctgccgatccaggttactctggaagaagtcaactcccaaatagccctagaatacggccaggcaatgacggtccgagtgtgcaagatggatggagaagtaatgcccgtggttgtagtgcagagtgccacagtcctggacctgaagaaggccatccagagatacgtgcagctcaagcaggagcgtgaagggggcattcagcacatcagctggtcctacgtgtggaggacgtaccatctgacctctgcaggagagn

SEQ ID NO: 3850 - DNA, 392 bp, Homo sapiens
agaaaacaaaagcagagcaggtacataagtcccgacctacatcttcatttcacattcaattccacaagtatttgctatggatactgataatggaatgggagtggttatcattaaaagggtcatatctgaatttgaaccctgcctttagttattttcctctcttttgttactctggtcaactccacagatgaaccatcttcccaggatcctctattattccacatttaccacagaaaccaacagttctataaaatcaaattaataccagactacagaattttggaactaaaagagaatttggaaacaaaatgatttagtccatttatttttcagatgaagaaacagacccagagaggttttgacttgtccacactgaacagtgtggagtgaat

SEQ ID NO: 3851 - DNA, 514 bp, Homo sapiens
caattgttaagttatattaattaagattaaataaaatgtacttcttcggttgtactagctatatagaacatttttgtgactgtagaaagtcctattggcagacactggtctagagcctttatctggaaaagggagaagtataggagtaggatgggactggggtgccaagccactaggctcccactctgccctaaggtcaaggtggacaggctagctgggtgcggagaggcagaccactcctgcagcccttgctaccactcctcaggctggctgctggctccttgcctgctgagcaaagcagattcctggaactcctatttctttttttttttttttagaaacggaaccatatctttgttcttaagcgggaagggaggggcgaaatttcagtccataaacttgtgcctttcgagcttattgttccttttttcagcgaaagggaaaaaaacttggtctccccccgggtttaggttctttctggggaatctgcccaatgtggacctccaaaaccatg

SEQ ID NO: 3852 - DNA, 413 bp, Homo sapiens
caattggcttctttgcatgcttttggtttgttaccaaaatatacagtgtggtgaaggttgactgaagaagtccagtgtgtccagttaaaacagaaataaattaaactcttcatcaacaaagacctgtttttgtgactgccttgagttttatcagaattattggcctagtaatccttcagaaacaccgtaattctaaataaacctcttcccatacacctttcccccataagatgtgtcttcaacactataaagcatttgtattgtgatttgattaagtatatatttggttgttctcaatgaagagcaaatttaaatattatgtgcatttgtaaatacagtagctataaaattttccatacttctaatggcagaatagaggaggccatattaaataatactgatgaaaggcaggg

SEQ ID NO: 3853 - DNA, 468 bp, Homo sapiens
  misc_feature (1)...(468): n = A,T,C or G
tgacctctcgggtcgaggcacccgncccggctcttacattctgtataatcttggcaaagaacttatcacttctgagttttggattcatcatcaggaaaaggagagagttggactaggctagctctaagataccatccaatactgaaacatgggagctctgtcgatggccattatagtcctacagtagccctgatggggattttgcttcatggcccgttggattttgacaatggaaaagcatatcttgcccatcctctggcttgcctaaactaaatattcagcacaatagcagcatacacttcacttctgttcttctagaaggaaggggattagaggagagttgaagtttagcctcaaagaaagccaagtgagatgatgattcagaagtgcctatcttcctgttacataattggatctcgggaatgccagtggaatcttctacagtacaagggaagacattctacatga

SEQ ID NO: 3854 - DNA, 459 bp, Homo sapiens
  misc_feature (1)...(459): n = A,T,C or G
nctgatggcctcgangacgtcggaaaaggcnncgggacgttccacgcgaccgctccaaattgttatagttttatttataaataatttttctttgccattaattttaaccaatacataagtgttagggaaaaattaaaaatgttttccagctgtcattctataccccagaggatacacagctaacagtttggcgtgtatccttgtagagttttttttatgcatgtagcaacacagaaggctctcccccatgccaccccaccctcagccaacactcatgggttactgctatgtacactgtacaataacttactttcttctcaccactaatgcagggacatttctgggacaccctggggaagaaagaaggtgataaacagttctgtgtccttttaaacatgctaatggaagacttccttcctacgaagaaaagtccttatttatggagtgattcttacagga

SEQ ID NO: 3855 - DNA, 481 bp, Homo sapiens
  misc_feature (1)...(481): n = A,T,C or G
gggaggagcnggtccnnnnntttgatngactgatggacctcgggacnggcccggaatttccgggtcgagccacgcgtccgctttttataaggatattgggcacactggattaggagcccattctactccattattacctcattctaatttaaaaattacatcagcaatgactctgtttccaaataaagtcacattctgaggcactggaggtcagtgcatgagcatatacattttgagtggacacaattcaatccgtaactgccctgatcaggcataacaagcataacatcagagggttaagtggggagaggagtaggtgccactaaaaaaacccagctagtaataaataaataagcaatgagcaaatacaaataaacctgggagaaggttactcagagttgctataatgtattctgtaaaatgttcactttccaaagatcacaagaaatatataatgagatgtgcaaaaaaaaaaaaaaaa

SEQ ID NO: 3856 - DNA, 479 bp, Homo sapiens
agacattgaaacgctaaagaaatttctcctgaataagaagcctcatgtagtgacagttgcaggagagaacagggacgcccagatgtggattgaagatgtgaagcgcattgtacatgagctggaccagggccagcagctgtcatctattggggtagagctggttgacaacgagttggccattctctatatgaacagcaagaagtcagaggcagagttccgggattatcctccagtgctgagacaggccgtctccctggcccggcgcatccaggaccctctgattgaatttgcccaggtgtgcagttccgatgaagacatcctgtgtctcaagtttcaccccttgcaggagcatgtggtgaaagaggagctgctcaacgccttgtactgtgaatttatcaaccgagtcaatgaggtcggggtcgatgtcaaccgtgccattgcccacccttacagccaggccttgatccagtatgtttgtg

SEQ ID NO: 3857 - DNA, 463 bp, Homo sapiens
  misc_feature (1)...(463): n = A,T,C or G
tactgcccatagcaaggcattctcttctcctgccctcccctgccctcttttccttcgggtcaggtggggtgcattaaccctcactggagcctggtgggcagcaccagaggtcggcctttgcagcagaatagctggaattcctgagcataatttagccatggttctgtttgcttaagcatgtgggtggctattcttcagtctctcttgtgttcgtaagtccctgtggctgctaaaacttgagatcccctgaaaatggcagagcctcaggagttcgccgtgatggccccagaatactcaatctgcttagaaaaaggaaaacacagatcttgttgtctgtctgcatcatttgtaaacgagagccttgtcaggaatttgtgtgtagaacgtgatctgttttaagcctgagcaaagtctgcctgtgcttacaggtttttagttgcctcaagagggagtcaccanatac

SEQ ID NO: 3858 - DNA, 438 bp, Homo sapiens
  misc_feature (1)...(438): n = A,T,C or G
tgggcgaatgcagtagcagtatagactccgtgaagattctggagcacaaactgaaggaggaagaggagagccttcctggctttgttaacctgcatagtaccgaaacccaaacggctggtgtgattgaccgatgggagcttctccaggcccaggcattgagcaaggagttgaggatgaagcagaacctccagaagtggcagcagtttaactcagacttgaacagcatctgggcctggctgggggacacggaggaggagttggaacagctccagcgtctggaactcagcactgacatccagaccatcgagctccagatcaaaaagctcaaggagctccagaaagctgtggaccaccgcaaagccatcatcctctccatcaatctctgcagccctgagttcacccangctgacagcaaggagagccgggacctgcaggatn

SEQ ID NO: 3859 - DNA, 517 bp, Homo sapiens
  misc_feature (1)...(517): n = A,T,C or G
tcttctgctggacccagtggtatctgtaaagagataggtgcagggcagcctcagagcagagtgttaacactggctgaatcaactgcacagcaaaatgcttaactggaaaacagagagagaaaaggcatgaacagagccaagcatcctttaaggtcaaccaagtacagtccagtgttttcagagtcttcagttttgtcagttacaggcacagtttcatcagatacaaattattatttgctgttgtctttttccagtcaatctgttgattgcaggcattcctactgaaaagggaagccctgtgctcagagataacataatgaaagtcaagggaaagaaggacccttagagtatatttaatctaacattcttactttagaggaaaagaaactgaggcaaagaacatttaaatgactgactcagaatcttaaaaaaattattggtactgccaagggtaaaactcagctccctagcatcagacttgaaatatgaccatgatactctgtagctcttgtttttn

SEQ ID NO: 3860 - DNA, 422 bp, Homo sapiens
cgctccggctgcaccgcgctcgtttcgagctgcatgttcgtgctaagctagcgccgggggcgccttcctgcagccgccatcatgattatctaccgggacctcatcagccacgatgagatgttctccgacatctacaagatccgggagatcgcggacgggttgtgcctggaggtggaggggaagatggtcagtaggacacaaggtaacattgatgactcgctcattggtggaaatgcctccgctgaaggccccgagggcgaaggtaccgaaagcacagtaatcactggtgtcgatattgtcatgaaccatcacctgcaggaaacaagtttcacaaaagaagcctacaagatgcccatcatagattacctgagaccaatcagagggaaacttgtagaacacagaccacatagagtataaccttt

SEQ ID NO: 3861 - DNA, 412 bp, Homo sapiens
gttgggatttcaaggtcagtgacgacgcatttcctcccagtacagaccccccagccccccttgctggacatggggaggcagagagtcacttgaccatccagaaatacatgactacaagtcctttatgactgtctgccattttttttaatggtacttagtattttgatcaaactttagtctccagaactaaacaagtccctaagtttccttattttaatttactgtgactagatttgaagcaaataaatactccagatccatgcagctagaacacacttgcttccactactaaatatacagggtatgtcctaacatggagttaactggaatagcagtacactagcaagtatctgtgaatccttagcactgacgggttaacagaaatgctttggtaatacctacttagttaatg

SEQ ID NO: 3862 - DNA, 452 bp, Homo sapiens
  misc_feature (1)...(452): n = A,T,C or G
acactgtatgtgacggaggccgaggcccactctccagctctgcccggactctcggggccccagcccaagtgggtggaggtggaggagaccattgaagtccgggtgaagaagatgggcccgcagggtgtgtctcccaccacagaggtgcccaggagctcatcggggcatctcttcacactgcccggtgcgacccccggaggggaccccaattccaacaactccaacaacaagctgctggcccaggaggcctgggcccagggcacagccatggtcggcgtcagagagccccttgtcttccgcgtggatgccagaggcagtgtggactgggctgcttctggcatgggcagcctggaggaggagggcaccatggaggaggcgggagaggaagaggnggaagacggagactcctttgtgacggaggagtcccaggacacacacagccttgttgatcg

SEQ ID NO: 3863 - DNA, 400 bp, Homo sapiens
attctttgagttagcatttgattctccacaggccagcagttattcttgtcccttgttttactttgttccttctgcttcctgccttccagacttacactgcttattgatactttcatcagagcaatttaggaaactaaagagatatgaaatctatactgtcagagcagtcaggagactgtgttgtcacagaaagcaagaaaagaggtcttctgtagttactagaaaatgatacagagttattagttaacatagtgctaaaaaatattggccaggcgcagtggctcacgcctgtaatcccaacactttgggaggccgaggcgggcggatcacctgaggtcaggagtttgagaccagcgtggccaacatggtgaaaccccgtctctactaaaaatacaaaaaa

SEQ ID NO: 3864 - DNA, 413 bp, Homo sapiens
  misc_feature (1)...(413): n = A,T,C or G
ccttggtaaagtatatgttgacggtggctatgatgtgcaaaacagacttatcagcgtacaatgttatgattcctttttaaatggatggactgaagttgctccccttaaggaagccgtgagttttcctgcagtgactagctgtgtaagcaaactgtttgtgattggtggaggacctgatgataatacttgctctgataaggctcaatcttatgatccacaagccaattcttggctacttcgcgcagctatcccaattgccacaaggcgtataacagctgtatccctacacaacctgatatatgttgtcggcggactgaccaaggcaatatactgttacgatccagttgaagattactggatgcacgtacagaatacattcagccgtcaggaaaactgtggtatgtctgtgtgtn

SEQ ID NO: 3865 - DNA, 408 bp, Homo sapiens
ggtgtgtgtgagcgtgtgtgagagagttaatcttttatttgcgcccaaaataacttaaaatatgagaagggaaggccaggcatggtggctcacatctgtaatcccagctctttgggaggccacgatgggcagaccacttgagcccatgagttcgagaccagcccggacaacttgctgaaactctgtctctactaaaaatacaaaaaaaaaattagctgggcgtggtggcacacacctgtaatcccttcttctaaggaggctcaggcactattattgcttgaacccaggaggcatatgttgcagcgagccaagattgaaccactgctctccagcctgggtgacagagcgagactgtgtcaaaaaaaaaaaagaagggccttcttctttgtatggttttgcgagacaatt

SEQ ID NO: 3866 - DNA, 514 bp, Homo sapiens
  misc_feature (1)...(514): n = A,T,C or G
natggacgccgtggnaccgtggaggaccttccgggacgacccacgcgtccggaaccgtggctggcaaagatgattcaggcgattctggttttcatcaaccatgggaagccacggctagtccgcttctaccagcgtttcccagaagaaattcaacagcagattgttcgagagactttccatctagtcctcaagcgggatgacaacatctgtaacttcttggagggtggaagtttgattggtggctctgactacaaactgatctaccggcactatgctaccctctactttgtattttgtgtggattcctcagagagtgaacttggaatcttggacctcatccaggtttttgtggaaactctggataagtgtttcgaaaatgtgtgtgaattggatttgatcttccatatggataaggtgcactacatcctccangaggtggtgatgggtgggatggtgttggaaacaaacatgaatgatatcgtggctcagattgaggctcacacacgctggagaa

SEQ ID NO: 3867 - DNA, 394 bp, Homo sapiens
  misc_feature (1)...(394): n = A,T,C or G
gaacatgcctgccacagacaccactttgtctattcaccgggtactaatttacatcctattaatggttgtaaaagctgagtgtctaaatgctagacatgttcacaattttgtctgtttttgtttatttgtttttaagacccaaaccttttcaatcttgcatttatttacttggttctcctgtgtcaccctgtggctttttaaatagggaatgtaatttattttaatagtagttctcaaagactctattaaaaactctggacgagggatatgtgcaatctgttggtaagacacatcctatgtttggcctcatttttataactcctaaaatgagaaaggtagattttaacacttctaaggtacctttgagctttaaagttcttttctgcttttccan

SEQ ID NO: 3868 - DNA, 401 bp, Homo sapiens
gaaggagagaaaatggcgtccacggattacagtacctatagccaagctgcagcgcagcagggctacagtgcttacaccgcccagcccactcaaggatatgcacagaccacccaggcatatgggcaacaaagctatggaacctatggacagcccactgatgtcagctatacccaggctcagaccactgcaacctatgggcagaccgcctatgcaacttcttatggacagcctcccactggttatactactccaactgccccccaggcatacagccagcctgtccaggggtatggcactggtgcttatgataccaccactgctacagtcaccaccacccaagcctcctatgcagctcagtctgcatatggcactcagcctgcttatccagcctatgggcagca

SEQ ID NO: 3869 - DNA, 509 bp, Homo sapiens
  misc_feature (1)...(509): n = A,T,C or G
nttgaccccgtgggacagggacggacctctccgggtcgacccacgcgtccgctttgccaatctgctagggaaccttagggcaagggtagatattaactgctctcccgtcggtaccttctgggccttgattaacaaagtcagtgctgaatgcatatgtatttgtgcttccctcttacattcccgtctgccagacataacatatcatgaccatggtggtgttctcttcccattttttgaatttttttttttcgttttgctgcttgttttcttgctgtgttcctttttgacctttctccctccccacaacctggcttgtgccatccccgtgactatcactaacagccgttgccgagagatggatgagcagattatactgatggaccacaacctgaagtgtctgagtgctgctgaagaaaaggtactaaccattaagcccacagcaagggtatatatgggggggggggttnngtttgtttgttttgtttgcaccgcctccctccatagatttg

SEQ ID NO: 3870 - DNA, 429 bp, Homo sapiens
aaataaaggactttgtatgccacagtggatgggctgctttgacaaattccaccctttgcttggttccaacatggaatttcttgtttaaagatttcagtatcccatcaaaagtacagttagagaatacctagtgaatttattgaatataacgctaagaatcaaaagacttgtactagtttacctctggctttggtaagcgtggctttgagtaataactgagctgtttccccgcatataaaatacagatatgtatgtagtcatcatgacagcaaaaataaaaaaaggggggggccctttaaatgactccctaaggggcccaatattctcccggaagggaaagtgaatttttttttttctttggggagtattttcaaccccaagctggaggatttgagagagaacattgctttgagcgtggaacaataaagg

SEQ ID NO: 3871 - DNA, 412 bp, Homo sapiens
  misc_feature (1)...(412): n = A,T,C or G
ccaaccccgcgcgccacccgcggcttcctccgctcggggtcctcgttcggcctctgctggcctccgcgactccgcggtgcccgcccccgttgagttcaaaaggacgcgcggagcggcgccggcccttcaccagcagcccgtccgactggaaagatctgcctcttctccaagaaactcaaccactagtgacaatgaccagcctcctgactactccttctccaagagaagaactgatgaccaccccaattttacagcccactgaggccctgtccccagaagatggagccagcacagcactcattgcagttgttatcaccgttgtcttcctcaccctgctctcggncgtgatcttgatcttcttttacctgtacaagaacaaaggcagctacgtcacctatgaacctacagaagg

SEQ ID NO: 3872 - DNA, 396 bp, Homo sapiens
ctgacggtccctgggaccctgaaggtcacccgggcggccccctcactgaccctccaaacgcccctgtcctcgccctgcctcctgccattcccggcctgagtctcagcatggcggatgggagcagcgatgcggctagggaacctcgccctgcaccagccccaatcagacgccgctcctccaactaccgcgcttatgccacggagccgcacgccaagaaaaaatctaagatctccgcctcgagaaaattgcagctgaagactctgctgctgcagattgcaaagcaagagctggagcgagaggcggaggagcggcgcggagagaaggggcgcgctctgagcacccgctgccagccgctggagttggccgggctgggcttcgcggagctgcaggacttgt

SEQ ID NO: 3873 - DNA, 404 bp, Homo sapiens
  misc_feature (1)...(404): n = A,T,C or G
atatgctgcatgtgaagtagtaaaagaggaagctgaataagtaggcagaggttatttcatgaagggccttaaatatcatccttaagtaccaggaactatgccaagtgctaggggtataaacaaaaaaaacagagtccttgaggaatgtgtttatagctttcattctcgtttatgcgtcagcagttctcaaattaatatgcctagcccagacctctcctttgagctccagatctatatatccaactgcctagttgattgacatcccgagaatatatctagagtgtaaattccaagagaacaggtatttcattgcctttgttctcagctgtacctgcagtgcctagaacagtgcctggcaataatttatctaatgattaaagaaaagaatggcagggcgtggtggn

SEQ ID NO: 3874 - DNA, 411 bp, Homo sapiens
aattttctttgtcccatgaggaggctttttaactttgcatgctcttgcttgaacaccctgtgggtgaataactttagtaagttagctgccagcattagaaccttgcaggaagaattttaactagtatgctacatttgaagcactctgacatgtacatttaaagtgacagttttaaaagtaaaatggtggtaaatctctgaaacttgaacgtatgatgctctggacattttaggaagcttaagtaaaattctgattttcctttattgatcatgcaacccacgtgattcgcatattttagtttttatgttggacagtggtacaaatgactgacattggcaggcagttattgtagggtatatggttaatcacgattgtctaacttttccagagaaaggggtgatatgcttcttt

SEQ ID NO: 3875 - DNA, 401 bp, Homo sapiens
caaaaaagaatccaattagaattcaattacaatgaggaatatttgaataaaaattttagttccattggatgtttgttttcaacatatccaaaatcagattcatcttccctttataatccattcctcaatctagtttaatgatttctgttattggcaccatcaacgttcctcataattctaataagaaacatccaggtcagtttttgcttcctctaccctatcaatggacaagacctgctgattctacttctatcattcttcttataggcaggagtttcttcctttcccctgcagtgctccagatcagacttacattacttccttcacttgccctctataatacttctttttttttttttttttttggaaaaagaagttttcttctgacccccaccctggag

SEQ ID NO: 3876 - DNA, 413 bp, Homo sapiens
cattttatattcccaccagtaatgcctgaaaacttcaggctatcttgtttctgctaaatctcctttgaaccacttctataaatacgttgtgcatacataatgagaggcgactgaatggattctctatttttttcaattgatccggctgtcttttcttgctgctcataccacacggtcgtgataaagaagctttgtaataagtcttaagacccgagcattaagccctccaacttcattcttctttttcaaagctgttttggccattctaggtcctttgtttttctacattcattttataatcagtcatattgtatattggttcctgcaaaaaacagacagttgaaatttgattttgattgacactgtacacagaatcgacatcttgcaatattgagtcgtctgacccatgaacg

SEQ ID NO: 3877 - DNA, 393 bp, Homo sapiens
  misc_feature (1)...(393): n = A,T,C or G
ccgttgttcagtccgatgaggaggaagttcaggtggacactgccctggccacatcacacactgacagagaggccactccggatggtggtgaggacagcgactcttaaattgggacatgggcgttgtctggccacactggaatccagttttggctgtatgcggaattccacctggaaagccaggttgttttatagaggttcttgatttttacataattgccaataatgtgtgagaaacttaaagaacagctaacaataaagtgtgaggacggtaaaaaaaacaaaaaaaaaaaagaatggcttgtataaaaaaaaacaactaaaaaaaannggggggggggcctttttaaaaattccttggggggcccccatttttgcgggggagagaaaaatt

SEQ ID NO: 3878 - DNA, 475 bp, Homo sapiens
  misc_feature (1)...(475): n = A,T,C or G
cttcattctctcatccagctcctcggcctcatcggaacatttccaccaccattactcctttggaaactggtggcccggttccttcaaggggcacaggatgtctttgcctttttatcagaggtgccaccagcactatgatctcagctaccgcaacaaggacgtgcgcagcaccgtgagtcactaccagcgggagaagaaacgctccgccgtctacacccagggctccacggcctacagcagccgctcctccgccgcgcaccgccgggagtccgaggccttccgtcgggcgtccgcctcctcctcccagcagcaggcctcgcagcacgccctgagctctgaagtcagtcggaaggcagcctcagcctacgattatggctcctcccatggacttacagattccagtctgctgttagatgattattcatccaagttgagccccanaccaaagagagccaagcacagcctactgtctggn

SEQ ID NO: 3879 - DNA, 399 bp, Homo sapiens
gttatgtttcgtgaagatttggggggagggctcttttaaaacttcagcctcagttgtttaacagtctctttaatatattaatctgcactaacatctctgtgatatatgcacatattttagaggtaatcatgtcttctagattacttgtgtgcatttgattgggcttcttgtttagggtcccttttaaaattaattcattagattgaaaaatgtattctatatttctgatagactggacagaaggatctgtgtccccaagtgagacaggctctgaataacctttgttttctccactttttattgatgatttaaaacactctagtcttcccctcaaatcatgcatgcaaataggaggacagtggtggtgactcaactggatacaggtgctcaatagtcagg

SEQ ID NO: 3880 - DNA, 452 bp, Homo sapiens
acgcactggccccggcgcccacccgcacccctccccagagcactgacacggctcccgggacctcggcaggatggaagagaagctgaagaaaaccaagatcatctttgtggtgggtgggcctggctcagggaagggcacccagtgtgagaagatcgtgcagaagtatggctacacccacctctccaccggggacctcctgcggtccgaggtcagctcaggctcggccaggggcaagaagctgtcggaaatcatggagaaggggcagctggttccactggagacagtgttggacatgctccgggatgccatggtggccaaagtcaatacttccaaaggcttcctgattgatggctacccgcgggaggtgcagcaaggagaagagtttgagcgacggattggacagcccacactgctgctgtatgtggacgcaggccctgagaccatgacccagc

SEQ ID NO: 3881 - DNA, 474 bp, Homo sapiens
  misc_feature (1)...(474): n = A,T,C or G
gggagtagggggtccnnnnaactgaagaactgagacgtgcgggaagncccgggangacccacgcggccggcgattttcatgcactgaggaaggaagggtggctttggtgaacacaccgtatctgactggtggggggccggcgttggaaatactttgaggggatcctgagattggactctagactctcccctgggtcttcccttacctgagtgctggccggttcttggaccagaccaggcaaggcccaagaatgtagatcagaattttttagcctttttttcattagttccttccctaggattcttctagatttttttttcttaatcacatgaaattttaataccacagatgtactatatatctgcttatgttctggatataggctgtgctttatacataaaagagagtaggattttgttttcacctccccttttaagaatcagttttaattcccttgagaatgcttgttataan

SEQ ID NO: 3882 - DNA, 382 bp, Homo sapiens
cccacgcgtacgtgattgagagctcacaggatatcggcacatacatagtctctgcatgatggggcggacccatttgcttggaacctacgaacaacatgtgaaagtatgcagttactaagttctttgcatgtcacgctcaagctatccaagcattcactcttctttcaaaggacgctaaatgcaaaacacagctgactgtgaccttgggagacctaaccggaatctgcagacaaacttatgtaaacgtaccctggccagccttgttccgaaagccctctctaattaaatgagagttttgatttcttatgtggaacagtaaagggtcttctgggaagagacatctcttgcaggaactgtaatttgaaaagtaatttttgtctct

SEQ ID NO: 3883 - DNA, 504 bp, Homo sapiens
  misc_feature (1)...(504): n = A,T,C or G
agtgctaaaatagacnatagaggcctcgggcaggaatccccggnnganccacgcgtgcggccggcagccatcaggtaagccaagatgggtgcatacaagtacattcaggagctatggagaaagaagcagtctgatgtcatgcgctttcttctgagggtccgctgctggcagtaccgccagctctctgctctccacagggctccccgccccacccggcctgataaagcgcgccgactgggctacaaggccaagcaaggttacgttatatataggattcgtgttcgccgtggtggccgaaaacgcccagttcctaagggtgcaacttacggcaagcctgtccatcatggtgttaaccagctaaagtttgctcgaagccttcagtccgttgcagaggagcgagctggacgccactgtggggctctgagagtcctgaattcttactgggttggtgaagattccacatacaaattttttgagggtatcctcattgatccattccataan

SEQ ID NO: 3884 - DNA, 423 bp, Homo sapiens
cccacgcgtccgcttaaaagaacagcaactaaaaaggtgtgtggaccagttgacaaagatccaaactgaattacaagagacagtgaaagatttagctaaaggcaaaaagaaatactttgagactgaacagatggctcatgcagtacgagagaaagctgacatcgaggcaaaatctaaacttagtctttttcaatcaagaatcagtttacagaaggcaagtgtaaagttaaaagcccggcgatctgagtgtaattccaaagctacccacgcaaggaatgattatcttcttaccctagcggcagcaaatgcacatcaggatcgctactatcaaacagatttagttaacattatgaaggctcttgatggaaatgtgtatgatcatctcaaggattatttaatagccttcagccggactgagctaga

SEQ ID NO: 3885 - DNA, 434 bp, Homo sapiens
  misc_feature (1)...(434): n = A,T,C or G
attagaatcttagctttgggtgctaatggtggagttaaagactttttctctgaccaaaaaaaaaaaaaaggggggcccgtttaaaagaatccttggggggcccaaatttaacccgggcttgcaaggtaaaatttttttccttatagggggccgaataaaaccctacttgggaattttgggaaagaaccttttttttgggggggggacaaattggcacaacccccctccaaaaattaaagcctttagggaaaaaaaaaaattttaaggggaaaagggggaaaaacaacctccatatccttgctgttaaaaaaattttnnnnnnnnannanacccncccnttcngggggggcnncnggcccccccctctcccgaagaaaaacccccgggggaaaaaaaaacaaaacngaaagggggggaaccccacccttctttct

SEQ ID NO: 3886 - DNA, 409 bp, Homo sapiens
ctttactctccacccatgctcttcccctaaccctgagaattttgcacagattttcggggttcgcgcggagcgcctctgaaagtgatggcggacaaaccgtcaaaaaggcctcagcatagcaatttaggaaaagatcgtatcagatccttaattcacaccatacactctaatacactcgaaagtaagcaaagaaattataacaaataccacaataaaatatgggtgaattcctttttaacctcagtgtaggaaaagaaaggtcttctcaccatgactcaaatcaagaagcaagtaaacataacacaaatgattacattttataaaatgcatggtaagaaatcactataaaagaagtcaaaagacaattgtcaaacaggaagaaaatatttgcaacatatagcacacataa

SEQ ID NO: 3887 - DNA, 442 bp, Homo sapiens
  misc_feature (1)...(442): n = A,T,C or G
tgagaggccgcggcggcaggtccacctgggcttgcgaaggcacagattccccgtccacagctcacgaccagatgcaccagcaggagtccacatcgaggacgtcctccgggcactcccacgaccagtgaccaggagttaaactttgggatgtgcccgtgatgttggaccacaaggacttagaggccgaaatccaccccttgaaaaatgaagaaagaaaatcgcaggaaaatctgggaaatccatcaaaaaatgaggataacgtgaaaagcgcgcctccacagtcccggctctcccggtgccgagcggcggcgttttttctttcattgtttctctgcctttttgtggtgttcgtcgtctcattcgtcatcccgtaaaananannnaaaaaaataaaaaaaaaaaaaaaaaaaaaaaaaannnnngggggggggccttttttaag

SEQ ID NO: 3888 - DNA, 444 bp, Homo sapiens
  misc_feature (1)...(444): n = A,T,C or G
acgagcaaccccaaatgtcaaatcaaggcagtatactttaagttagtgttttttggccttattccatggactctaatgcgttacacgtgcctacatttgagcttaccatgattatatttttagtttctgtatactgactggtattaaaattgaaagcttgaaagcattaccttgcttaaaatattcaaccaattgtgaactcagagttttatgttttgcctgcattcccactatttaagttaattaacgagtaaatttctagtatctagcaagccacatctgtatgactagactatggtggacttctttctaatgctcaaatattggaaatgtgaccaataaattctaatttcttttccttataaggaatcaatagttaacaacatccagggttcttcatttttatagttcttgttcaataatgttaaatcaaacatttttttn

SEQ ID NO: 3889 - DNA, 472 bp, Homo sapiens
  misc_feature (1)...(472): n = A,T,C or G
agaggggccnnnnnnncaactgaaaactgacgtacatcgcgacggaccncccgggtcgacccacgcgtccgcccacgcgtncggagaaaagtactattggaggatgaggtgttggctgccatggtgtctgtcattggcactgctacaacccacctgagccctgagttagctgcccagagtgtgacacacattgtgcccctcttcttggatggcaacgtgtcctttctgcctgaaaacagcttcccgagcagattccagccattccaggatggctcctcaaggcagaggcggctgattgcactgcttatggcctttgtctgctccctgcctcgaaatgtggaaatccctcagctgaaccaactcatgcgggagcttttggaactgagctgctgccacagctgccccttttcttccaccgctgctgccaagtgctttgcaggactcctcaacaagcaccctgcagggcagcagg

SEQ ID NO: 3890 - DNA, 399 bp, Homo sapiens
catataacctatgtatcaaagataaagcatattggttattacagaatactcttccctataacctatgtatcaaagataaagcacaagggaaattataaaatattttgaactgagttataatgaaaacataacatatctaattgtatgggatgtagctaaagcaatgcttaagatatatatttatgacttcctatgcctatgaaaaaagaagaatgattttaagttcattatccacacttccactttaggaagctagaaaaagaaaattattctcaaatgaacaagaggatggaaattgagactgaaatgaaaatcactgaaacagtatatggataacaaatcgagaagctctcaaacattttgggatcatgatcaccttacactctcaaaaattattgg

SEQ ID NO: 3891 - DNA, 237 bp, Homo sapiens
gaaaaggctaatggcacaactgtccacgtaggcattcaccccagcaaggtggttatcactaggctaaaactggacaaagaccgcaaaaagatcctcgaacggaaagccaaatctcgccaagtaggaaaggaaaagggcaaatacaaggaagaaaccattgagaagatgcaggaataaagtaatcttatatacaagctttgattaaaacttgaaacaaagaaaaaaaaaaaaaaaagg

SEQ ID NO: 3892 - DNA, 439 bp, Homo sapiens
tttaatgtcagttaaagatttttttaccctctttttgggaacatcaattttgtactgttatgcaggaaacatttataataatataatttcagtcatttcttaactgtcacatctattgaaaatggatatagatacaggttttaagtattttaagtatatattacttattttaattttctgactttactattttaagggccagagggttaatcacaaagagcaattatgtggtctccctgctacatgaaaccgtgtatactaacaagcgtacaatttttagttgattttttttaaccttttagtttcccagatttgaataattacatggtggattctgacttttgaggggaagcaaatgattattttagagtctttgaaatggggattgtggaattagattgaactaagggatttaacatgatgcttggaaattaagaga

SEQ ID NO: 3893 - DNA, 431 bp, Homo sapiens
cgaaggctgtgcggtctgccaagagctgcggccccgtccggcccgggctggcatgggttggaattggagcctatcccccaacccgaaggctaacagcatcatgtggttactaactgttcctcattcaccgggtgatgcctcccagaaaaaaacgccgccagccttcccagaaagccccgctgctgttccaccaacaaccactggagggccccaaacacagctgtgcatctacacagcttcccatcactcacactcgacaggtgcccagcaagcccattgaccacagcaccatcacttcctgggtatcacctgattttgatacagcagcaggaagcttgttcccagcctaccagaaacaccaaaaccgggcgagacactcaagtcgaaaacctaccacctccaagtttccacatctaacttttgagagtccg

SEQ ID NO: 3894 - DNA, 448 bp, Homo sapiens
  misc_feature (1)...(448): n = A,T,C or G
actagttctagatcgccgaagcgtcggactaccgttggtttccgcaacttcctggattatcctcgccaaggactttgcaatatatttttccgccttttctggaaggatttcgctgcttcccgaaagtcttggacgagcgctctagctctgtgggaaggttttgggctctctggctcggattttgcaatttctccctggggactgccgtggagccgcatccactgtggattataattgcaacatgacgctggaagagctcgtggcgtgcgacaacgcggcgcagaagatgcagacggtgaccgccgcggtggaggagcttttggtggccgctcagcgccaggatcgcctcacagtgggggtgtacgagtcggccaagttgatgaatgtggacccagacagcgaggtcctctgcctcttggccattgacgaggaggaggaggatgacatn

SEQ ID NO: 3895 - DNA, 474 bp, Homo sapiens
  misc_feature (1)...(474): n = A,T,C or G
aaccagaatcctttaaggaaaatgttcttcatgtatgagagactaaagtgatttttctaagaaagttcagcccttctctgacttacctggacatttctagatacttccaaaggaccctctgggaatccatagcttcctaatctggagatgggaggtcataagggagacgctgtggggttccttgaagtttcttgggttcacagaggagccccctcacttggtgttctcccgtgagccagcctccacctgccaaagacactctggtcctcgtatagtgagtaatggggctcagggcctctccaacaacagagaggagctgatgctgtagggctgaccccgtgacttcctgagtcctcaccctgtccagtgctttgagattcttnccacctccccatcctcaccaaccggatcgggcgctgtgcagtgtggtcagcatggtgaacaaagcatttcctcggtggacagtattcctct

SEQ ID NO: 3896 - DNA, 423 bp, Homo sapiens
  misc_feature (1)...(423): n = A,T,C or G
ctgggtggcaggagatgctgcatgcttctacgatataaagttgggaaggaggcgggtagagcaccatgatcacgctgttgtgagtggaagattggctggagaaaatatgactggagctgctaagccgtactggcatcagtcaatgttctggagtgatttgggccccgatgttggctatgaagctattggtcttgtggacagtagtttgcccacagttggtgtttttgcaaaagcaactgcacaagacaaccccaaatctgccacagagcagtcaggaactggtatccgatcagagagtgagacagagtccgaggcctcagaaattactattcctcccagcaccccggcagttccacaggctcccgtccagggggaggactacggcataggtgtcatcttctacctcagggacaaagtggtcgn

SEQ ID NO: 3897 - DNA, 445 bp, Homo sapiens
  misc_feature (1)...(445): n = A,T,C or G
cgcgtcgcggtcatggctctcgtttcaagcctccacggtgtgcacctggagtcaggagcgcgcttgtgcgtacagttcggttcagttactaaaagatgtaactgaactgcagatccttggtgaaatatctttcaacaaatctctatatgagggactgaatgcagagaaccacagaactaagatcactgtcgttttcctgaaagatgagaagtaccattctttgcctatcatcattaaaggcagcgttggtggacttctggtgttgatcgagattctggtcatcctgttcaagtgtggcttttttaaaagaaaatatcaacaactgaacttggagagcatcaggaaggcccagctgaaatcacagaatctgctcgaagaagagaattacgacctgctatgcactgggagaggctatcagccagtcctgggactagagacccagcan

SEQ ID NO: 3898 - DNA, 514 bp, Homo sapiens
  misc_feature (1)...(514): n = A,T,C or G
agcgcctcgcctggatgtgagtttcagccagatcattcatcgagatataaaacctgagaatattttagtatcccagtcaggaattactaagctctgtgattttggttttgcacgaacactagcagctcctggggacatttatacggactatgtggccacacgctgacctgtggatatctgggctttgggctgtatgatcattgagatggccactggaaatccctatcttcctagtagttctgatttggatttactccataaaattgttttgaaagtgggcaatttgtcacctcacttgcagaatatcttttccaagagccccatttttgctggggtagttcttcctcaagttcaacaccccanaaatgcaagaaaaacatatccaaagcttaatggattgttgcagaatatagtcatgcttgttacaaattgatctgctgacggatatcatctagcgatctttgcgatattgagttttttacttgagatggattattgaaaactcatgccaaan

SEQ ID NO: 3899 - DNA, 425 bp, Homo sapiens
aacaaaattcggagcccggcccacggcgcgcgctgctgatgggtctgggcccgcctaccgacggcccaggacccatcgacccacgagtcggtccggccgccgggtgcacaatgggtgggtccttcaatggcgccgctatgaagaaagtggataaactgctcctgctggaggccggacttaacgacgaagaagtttctcaggggggtggagacttgaaacaggtctgtctgcagaatgctcatcatgaccctctgctgactggagcatcttcaagtgcaaatgcgttcataccccagacagactgttcctttttgcagtaaaatgaatctttcaaaggcttcccacaccactccttatgatccagtgaatattcaagagagctacatttgaggcctgtgcaaaagcttatccctgtaacacatgtg

SEQ ID NO: 3900 - DNA, 480 bp, Homo sapiens
  misc_feature (1)...(480): n = A,T,C or G
agagctgccncntnncccggaaacgttagacnagcacngncnnctannntngggnngacccacccgtccggacggcagcacgcttgatgtggggcctgcactattcctggcccccgagctgctgttccagccggaccttgtgggggatgagagtgaggggctccatgaggtggtggccttcgccatacacaagtccgacatggacctgcgccggacgctgttcgccaacatcgtgctctcaggtggctcaacgcttttcaaaggcttcggagaccgattactcagtgaagtgaagaagcttgccccaaaggatatcaaaatcaagatctcagccccgcaggaacggctgtactccacatggattggcggctccatcctggcctcgctggacacttttaagaagatgtgggnngccaaaaaggagtatgaagaggatggctcccgtgctattcatcgcanaactttctagtgcccaaggag

SEQ ID NO: 3901 - DNA, 420 bp, Homo sapiens
  misc_feature (1)...(420): n = A,T,C or G
cccacgcgtccgcccacgcgtncgattcccagtaatgggattgctgggtcaaatggtagttctgtttttagctcttggaggaatcaccatactgctttccacaagggttgaactaatttacactcccacccacagtgtataaatgttcccttttctctgcaacctcgccagtgtcctgttcctgttggaagggcttgaggtgttgcccaaagagccactgactgcagccactgcatttctgactatttgatatcattgttttgggaagtgagtctttccatttatcctgctctcagggtacctgggcagctgcaggatgatcttacccgcagggagcaatgattcatcctcagggactttggcagtttttcttgtgcaagggcagcttgcactcccaggtcaagggtattagtgccctcn

SEQ ID NO: 3902 - DNA, 424 bp, Homo sapiens
atacaatccagaagacaacacagtgaaaaatgtaaagtactgaaaggaaatatataaacaaacaaactgtagacccagaattctgtatctagccagagtatttttcaaaatgaaagtgaaataaatactgttttaggcaaacaaaggctgagagtattcactacctgcaactctgcacctttagaaatattaaaagaaactcttctagacagatatgacatccaacagacacttagatttacaaacaaaaaataaagatctaaggaaatggttaaaataaaggtaaaaatattttttgttatgtttaatcattctctagaatgaaagataactgactctctaaaacaaaaatagtaggagggaggaatgggaaggaagaatgagaagtttactgttgtaaagtccttacattatacatgaagtc

SEQ ID NO: 3903 - DNA, 413 bp, Homo sapiens
atgaactgaagaaagaagtttctatggatgatcataaacttagccttgatgaacttcatcgtaaatatggaacagacttgagccggggattaacatctgctcgtgcagctgagatcctggcgcgagatggtcccaacgccctcactccccctcccactactcctgaatggatcaagttttgtcggcagctctttggggggttctcaatgttactgtggattggagcgattctttgcttcttggcttatagcatccaagctgctacagaagaggaacctcaaaacgataatctgtacctgggtgtggtgctatcagccgttgtaatcataactggttgctttcctttcctactgccctggaatgggtgttgctcttaggatgtatcccctcaaacctacctggtggttctgtgg

SEQ ID NO: 3904 - DNA, 424 bp, Homo sapiens
gcgcagagagcaaagcgggatgatctgtcactactcctgcagttccacgctcggaggacagctcctgcctgcagcttgcagacccaggaagcctgaggggaaggaaggaagtacgggcgaaatcatcagattggcttcccagatttgggaatctgaagcgggcccacatcttccggccaacttccattgaacttcccagcactcgaaagggaccgaaatggagagcaaagaaccccagctcaaagggattgtgacaaggttattcagccagcagggatacttcctgcagatgcacccagatggtaccattgatgggaccaaggacgaaaacagcgactacactctcttcaatctaattcccgcgggcctgcgtgtagtggccatccaaggagtgaaggctagcctctatgtggccatgaatggg

SEQ ID NO: 3905 - DNA, 400 bp, Homo sapiens
caaggtgctcggtccttccgaggaagctaaggctgcgttggggtgaggccctcacttcatccggcgactagcaccgcgtccggcagcgccagccctacactcgcccgcgccatggcctctgtctccgagctcgcctgcatctactcggccctcattctgcacgacgatgaggtgacagtcacggaggataagatcaatgccctcattaaagcagccggcgtaaatgttgagcctttttggcctggcttgtttgcaaaggccctggccaacgtcaacattgggagcctcatctgcaatgtaggggccggtggacctgctccagcagctggtgctgcaccagcaggaggtcctgccccctccactgctgctgctccagctgaggagaagaaagtggaagcaa

SEQ ID NO: 3906 - DNA, 392 bp, Homo sapiens
  misc_feature (1)...(392): n = A,T,C or G
aggactcgttggcggacgccgctgattatttccttgagcatatatctctgcctagcgctttcttttgagctatacaggatacgggaaaagtatgagatctggctccatccaatatgacattttattagagaggatcaaaatgatacctggcaggaggggaataatctgactttcttggcagggggccgttaacttcttaatcattgatccacgaatatttcaaccatagacacaactttctggcagacagacaaattgtgcaacaccaacaatatcttggaccttgaaattatgatacttcaatccattgnatcctttaaggcacctgtgctagcctagattttgtaataacactgatttatgagaatggacaaaagtggtagggaaattgt

SEQ ID NO: 3907 - DNA, 466 bp, Homo sapiens
gaatccacccgagggagccagctcaaattgtagtctatggtattttagtcattttggcgacaaacaagataagaaaatagctccggaaactcgtcgttcaatagaagtacccctgaatgagaggatttgtctgcaagtggggtcccagtgtagcaccaatgagagtgagaagcctagcattttggttgaaaaatgcatctcacccccagaaggtgatcctgagtctgctgtgactgagcttcaatgcatttggcacaacctgagctacatgaagtgttcttggctccctggaaggaataccagtcccgacactaactatactctctactattggcacagaagcctggaaaaaattcatcaatgtgaaaacatctttagagaaggccaatactttggttgttcctttgatctgaccaaagagaagggatccagttttgaacaacacagtgtccaaataatggtcaag

SEQ ID NO: 3908 - DNA, 466 bp, Homo sapiens
  misc_feature (1)...(466): n = A,T,C or G
gtggtgannttacttaagcatgcgatcggcacngcaannnngggnnanccacgcgtccggaggtgggggacagggcccatctaccagccttcattttgatgggaaagggctttggggtcaggtggcagctattccccaccaagagattcagggtcacaggtttttccccacacctctgaactcagggcctagccacccccaaacttccaaatcccacttttgtgatatgtgaagctactcatttcttacccttggaggctgtgtggggaatttccagcccttttatgcctgtgtgatcccaccccacccccatagttgtataaaggtcatagtgaagaagctgggggaagactgcttcagccagatcctggggtggggtctttaggttttctcactttgacaacccccgaatgtttttatagtagtttttttgtattttcttgtaatgacagcattatgtaaaaaa

SEQ ID NO: 3909 - DNA, 484 bp, Homo sapiens
tctgatcttcctgcggctgaaccgcccggctgagccgacattgccggcgtcttggcgattcggcccgacgagctccgctttcgctacagcatggtggcctactggagacaggctggactcagctacatccgatactcccagatctgtgcaaaagcagtgagagatgcactgaagacagaattcaaagcaaatgctgagaagacttctggcagcaacgtaaaaattgtgaaagtaaagaaggaataatctaccctgactaaagcttgaaatgctacatttccaaggtgaagatgtgtgggcacatgttatggcagattgaaaaggatctcattccatgggaaaaaaaaaaaatcctgtcttgttcataaattgacaatgtcaataaattgaaatatggttcaaaaaaaaaaaaaaggggcgccctttttaaagagtaccttgggggcccaacttttcagcgttgattgggaggtgatattctttt

SEQ ID NO: 3910 - DNA, 402 bp, Homo sapiens
  misc_feature (1)...(402): n = A,T,C or G
cganncctgtgaggtatggtgctgggtgcagatgcagtgtggctctggatagcaccttatggacagttgtgtccccaaggaaggatgagaatagctactgaagtcctaaagagcaagcctaactcaagccattggcacacaggcattatacagaaagctggaagttgaaatggtggagtccaacttgcctggaccagcttaatggttctgcttctggtaacgtttttatccatggatgacttgcttgggtaaggacatgaagacagttcctgtcataccttttaaaggtatggagagtcggcttgactacactgtgtggagcaagttttaaagaagcaaaggactcataattcatgattgaagaaatgcaagcagacctgttatcctaaactagggttttta

SEQ ID NO: 3911 - DNA, 405 bp, Homo sapiens
cggacgcgtgggcggacgcgtgggctttccgcgccgccacaatggtgcgcatgaatgtcctggcagatgctctcaagagtatcaacaatgccgaaaagagaggcaaacgccaggtgcttattaggccgtgctccaaagtcatcgtccggtttctcactgtgatgatgaagcatggttacattggcgaatttgaaatcattgatgaccacagagctgggaaaattgttgtgaacctcacaggcaggctaaacaagtgtggggtgatcagccccagatttgacgtgcaactcaaagacctggaaaaatggcagaataatctgcttccatcccgccagtttggtttcattgtactgacaacctcagctggcatcatggaccatgaagaagcaagacgaaaacacacag

SEQ ID NO: 3912 - DNA, 375 bp, Homo sapiens
  misc_feature (1)...(375): n = A,T,C or G
cggacgcgtgggcggacgcgtgggcttcaccatttccgacggcatctacggctcaacattttttgtagccacaggcttccacggacttcacgtcattattggctcaactttcctcactatctgcttcatccgccaactaatatttcactttacatccaaacatcactttggcttcgaagccgccgcctgatactggcattttgtagatgtggtctgactatttctgtatgtctccatctattgatgagggtcttantaaaaaaaaaaaaaaaaaaaaaaaaaaaaaaaatttgggggggcccccttttaaaaattccctgggggggcccaaattttcgggggggggaaaagaaaatttttcccccctaaaggggg

SEQ ID NO: 3913 - DNA, 383 bp, Homo sapiens
tttttctaaatgttatgatgtaaatattattgatcccattttacagatgaagaaacatgctacacaaccagtgaataacaaaataggagttgaaccacagactgattccaaaacccactgcattatactacttcctacagtttaaattttttgcacttggctagaaaaagcttttcactctagttcttacaaatgttctcataaacattttcaatttatttaaaacatatacataatgcattttcaatttatttaaaacggatacataatataaacaatttaaatatagtgaatgctcatggaaggaagctcaagaggcaacaggacttcaagaaggtgtgcactgggaagagccagaggtgatctttaagattacccttgaa

SEQ ID NO: 3914 - DNA, 372 bp, Homo sapiens
ctcgcttccctcccgcggtgaccagggcccgagccgagagtagcagttgtagctacccgcccagaaactagacacaatgtgcgacgaagacgagaccaccgccctcgtgtgcgacaatggctccggcctggtgaaagccggcttcgccggggatgacgcccctagggccgtgttcccgtccatcgtgggccgcccccgacaccagggcgtcatggtcggtatgggtcagaaagattcctacgtgggcgacgaggctcagagcaagagaggtatcctgaccctgaagtaccctatcgagcacggcatcatcaccaactgggatgacatggagaagatctggcaccacaccttctacaacgagcttcgcgtggg

SEQ ID NO: 3915 - DNA, 471 bp, Homo sapiens
  misc_feature (1)...(471): n = A,T,C or G
aaacaaaaagtcttctaattcccagtccacatgtaaaatttgcttcatataaacaaacctaattgtaaatggcactgtagcaacaggcttctttttaacacttggattggtaaaggtcttgtttgcaacatattagaagtattatttttctctttcccccccaccccacccccaacagagtctggctctgccgcccacgccggagtgcagtggtgcagtcttggctcactgcagcctccacttcccaggttcaagcaattctcgtgcctcagcctcctgagtagttgggattacaggtgctcaccactatacccggctaatttttgtatttttagtagagatggggcttcgtcatgttggccaggttggtcttaaactcctgacctcaagtgatccacccaccttggccttccaaatgctgggatacaggcttgagccaccngcctttctttgttcttaggagtatagtcg

SEQ ID NO: 3916 - DNA, 454 bp, Homo sapiens
  misc_feature (1)...(454): n = A,T,C or G
gtgcagaacgacnaacaactggaagtctgcgatttgacacccgttnncccgggccgacccacgcgtccgcggacgcgtgggcggacgcgtgggctcagcccaacatggcgatgcacatcaaggcggcgccgccgcagatcccggacacccggcgggagctggcggagctcgtgaagcggaagcaggagctggcggaaacattggcaaatttggagcgacagatctatgcttttgagggaagctacctggaagacactcagatgtatggcaatattattcgtggctgggatcggtatctgaccaaccaaaaaaactccaatagcaaaaatgatcgaaggaaccggaagtttaaggaagctgagcggctcttcagtaaatcctcggttacctcagcagctgcagtaagtgcattggcaggagttcaggaccagctcattgaaaagaaggagccagg

SEQ ID NO: 3917 - DNA, 390 bp, Homo sapiens
agagttcacttacattggaagcctgaataaacacgctgccttcagctgtcccaaaaaacccctttctcctcccaaaaaaaaaggttctcattcatctaagaaaggtggacactcatcacctgcaagtagtgacaaaaacagtaacagcaaccaccgcagacggacagcggatgcggagattaaaatgcaaagcatgcagactccgttgggcaagaccagagcccgcagctcaggccccacccaagtcccacttccctcctcatccttcaggtccaagcagaacgtcaagtttgcagcttcggtgaaatccaaaaaaccaagctcctcctctttaaggaactccagcccgataagaatggccaaaataactcatgttgaggggaaaaaact

SEQ ID NO: 3918 - DNA, 471 bp, Homo sapiens
  misc_feature (1)...(471): n = A,T,C or G
agggggctgaagccgtcgatcgcctcgaatncncggtngacccacgcgtccgggacgccagaaaatgttccacgtgggataccctgcgtggggttcactgtagtagctgcactaggtgattcttggagcgggcctgagagacaaggacatgtggatcccagtggtcgggcttcctcggcggctgaggctctccgccttggcgggcgctggtcgcttttgcattttagggtctgaagcggcgacgcgaaagcatttgccggcgaggaaccactgtgggctctctgactcctctccgcagctgtggcccgaaccggatttcaggaatccgccaaggaaggcgtctaaggccagcttagactttaagcgttacgtaaccgatcggagattggctgagaccctggcgcaaatctatttgggaaaaccaagtagacctccacacctactgctggagtgcaatccaggtcctggaan

SEQ ID NO: 3919 - DNA, 443 bp, Homo sapiens
tccgaactcttgagagccctcgaggaactccggattgaccacgcgtccgcccgttgaggaaggctgacattctctctcagccagagaccctggcgtcgcaagacctcagtggggacttcaagaagccagctctgccggtgtccccagcggcgcggagtaaggccccggtcagcagttcttcaaaccctgaggaggtacagaaggaagggcccactgcgttgcaggactccaattctggggagcccgacatccctcctcctcagccggactgcggagattttaggagtctacaggaggagcagtcgcgccccacgacagcggtttcttcccctggcgagccagcccgggctcccccctaccaagagcctccatggggtggccctgccacagccccctacagcttatagaccctgaaaggcggcactatccttggcacccgtagc

SEQ ID NO: 3920 - DNA, 461 bp, Homo sapiens
  misc_feature (1)...(461): n = A,T,C or G
tgatgagcaggaaaancctgataacctgcggctgacttcgtactacaggcccgacccacgcgtgcggatattttgggaattcattctaaatatgatgaagttagaaaggctggtgcatgcttttataagatgactggcctgggtcctgggcctcaagctctttataatggtgaaccctttaaacatgaagagatgaatattaaagaactaaaaatggctgttcttcaaagaatgatggatgcatctgtatatttacaaagagaagtttttttgggcacattaaatgatcgcacgaatgcaattgattttctaatggataggaataatgttgtaccccgtataaatactttgattttgcgtactaaccagcagtacctcaatttactatctacatcagtaactgctgatgctgaagatttctctactttttttttcttggattcacaagataagagtgcttn

SEQ ID NO: 3921 - DNA, 422 bp, Homo sapiens
  misc_feature (1)...(422): n = A,T,C or G
aaaaacatcacctctagcatcaccagtattagaggcaccgcctgcccagtgacacatgtttnaaaaaaaaaaaaaaaaaaaaaaaaaaaaaaaaaaaaaaaaaaaaaaaaaaaaaaaaaaaaaaaaaaaaaaaaaaaaaaaaagaagaatttggggggggggccctaaaaaaaaaaaccttggggggaccaaaacgacccgggagacaagttaaaaattttttttctaatgagggggaaaaaaaaaacaaccggtgaaatttttaaaaaaaaaaccatttttgggggggggaaaaagttccacacaccccccccaaaaaaaattgtggggggggaaaaaaaaaaattttttggggggggggggggaaaaccccccccccgcggccggggggaaaaaaaannnaggacnancgggaaaaactn

SEQ ID NO: 3922 - DNA, 425 bp, Homo sapiens
  misc_feature (1)...(425): n = A,T,C or G
gccagagcgaggtgagcgccgcgcagctgcaggagaggctggccgtgctcgagaggcacctgcggagccccgtgctcacctttgccggcggcctgccagatgtgccggtgacttcagcgccagtcaccgcgttctaccgcggctgcatgacactggaggtcaaccggaggctgctggacctggacgaggcggcgtacaagcacagcgacatcacggcccactcctgcccccccgtggagcccgccgcagcctaagcccccacgggacgcggcaggcttctcagtctctgtccgagacagccgggaggagcctgggggctcctcaccacgtggggccatgctgagagctgggctttcctctgtgaccatcccggcctgtaacatatctgtaaatagtgagatggacttggggcctctgacgccgcn

SEQ ID NO: 3923 - DNA, 430 bp, Homo sapiens
aaggcggataccagtgtagagccagagctgacgttcttgatagtccacaatgggtgaaccacagcaagagagggctcttccaccacctccaatgcaatatatcaaggaatatacggatgaaaatattcaagaaggcttagctcccaagcctccccctccaataaaagacagttacatgatgtttggcaatcacttccaatgtgatgatcttatcatccgccctttggaaagtcagggcatcgaacggcttcatcctatgcagtttgatcacaagaaagaactgagaaaacttaatatgtctatccttattaatttcttggaccttttagatattttaataaggagccctgggagtataaaacgagaagagaaactagaagatcttaagctgcttcttgtacacgtgcatcatcttataaatgaataccga

SEQ ID NO: 3924 - DNA, 409 bp, Homo sapiens
gaggcccgacctaacacagaatttgcctgggtttagcgggtgtgaggagccggagccgccgcagcgaccgaggaagtggcgggaggtgccgagccttgcggaggggcggtgggggccgcggtgggagacggcggatggcgctcagcgcgaggccgcggaaccactgtggcagcaagcagttcggccagactcccgctgagcccgctcctggaggggccctccccgactccggtcttgctttcctttaggctgtgggttagagtctacacttcactaaacctgggatggaggcgtggaggacttgcttcgcggcgtttgcgtcctcgcaggcgcctcgcagggcttcctgccctcacggcgggggagtagctttggcgaaaatcagcacgagttctgcagtttttccaag

SEQ ID NO: 3925 - DNA, 403 bp, Homo sapiens
agccgctccacagcgacggttgcggctgcggcttattcggtggcggccggcggcggctgcgggctgagcggcgagtttccgatttaaagctgagctgcgaggaaaatggcggcgggaggatcaaaatacttgctggatggtggactcagagaccaataaaaataaactgcttgaacatcctttgactggttagccagttgctgatgtatattcaagatgagtggattaggagaaaacttggatccactggccagtgattcacgaaaacgcaaattgccatgtgatactccaggacaagggtaggtgacttatttcctggtgctttaccacacttgttgtgcctttgtttaaggataacattttaacttcttgccatttacattctctggttagattttttggg

SEQ ID NO: 3926 - DNA, 415 bp, Homo sapiens
  misc_feature (1)...(415): n = A,T,C or G
caaaaatggtaactgtcatgtgcacactgttggttatttttaataagcctcttcctactagaacattttattttccttgttcaccatacaatcatgtactctttaacagaaattgcttttaaaaaatatctggaactatctttaaaaaaactttattaataatcatgtatttttactgatcacattttgaaatgcctaaaagactttattgttctaattatccagatgtacctttgtaaaatagctcttttatgaattagctgataaggctgtatgtttctggaacaaaatattggtcatctaaaaactttctgttttctggggtctgggaaaatagaaaataagatttcaaatattaaataagcttannggaggaaaaaaaaaaaaaaaaaaaaaatataaaaaaaaaaagggg

SEQ ID NO: 3927 - DNA, 402 bp, Homo sapiens
agccgccagcatggatgacatctacaaggctgcggtagagcagctgacagaagagcagaaaaatgagttcaaggcagccttcgacatcttcgtgctgggcgctgaggatggctgcatcagcaccaaggagctgggcaaggtgatgaggatgctgggccagaaccccacccctgaggagctgcaggagatgatcgatgaggtggacgaggacggcagcggcacggtggactttgatgagttcctggtcatgatggttcggtgcatgaaggacgacagcaaagggaaatctgaggaggagctgtctgacctcttccgcatgtttgacaaaaatgctgatggctacatcgacctggatgagctgaagataatgctgcaggctacaggcgagaccatcacggaggg

SEQ ID NO: 3928 - DNA, 489 bp, Homo sapiens
cggacgcgtgggtgcacatgaaactgttctgtctggaatccacgcagtattgcactttgattggcaggtcagccaccatctgaaggtacttagtgctcattactcatcagtccatccagaagggtaagaaagaagtaaccctttcctgccgtttgcacttattctcaccttgtctttcctgaggagtatggctgtagttacagatacatatctaacagaaagcagtcatatcattccaacagggaacagaactcagggaaatggttgccagtgtaccagattccttctttcattttctttctttttactccttttgaaagctgttgaggtctagttgtttcttaaggaggtttaactcaaatctcagcactgatctggaggccaggcagggtcttatcaactctggcactgaagttaaccccgtcctgggtgcagctgggaaggcttagctctctgagaccaccgaggaacccacagacatctaaagag

SEQ ID NO: 3929 - DNA, 402 bp, Homo sapiens
cccacgcgtccgggtgactggagaggggcagcaccttcaggaatagaattagtgcccttataaaatagacccaagggaactttttcatcccttacaccctgtgagaacatgatgagaaggcaccatgtatgagccagagaatagatcctcaccacacactgaatctgctggtgccttgatcttggactttctaacctccagaactgtgagaaacaaatttctgctgtttataagctgtccagttaatggaattttgttattgtagcccaaatatactaagacaacaaccaatatagttaaaattactatgcatgttctactttatattaagttctagtggacgttgtataatgcttacatcaaataaaaggtaaggttaatttacataaaacatgtttaggt

SEQ ID NO: 3930 - DNA, 412 bp, Homo sapiens
agaaggggttgcatggtaactggcatgagcgagatttcgacctgggagccttgagtgactctgtcctgggagagctctaaaactttcttagtagacttctgtcttaaacataatgcctgaccttgtttcttgtccattatatacccgtcgcttcttcatacctcctactatcatatgatataggtagatgcttgtcaaacttcaccgtgcatagtgttatctggggatcttgaaatgcattctgactcaggaggactagggcagggcctgaaattctggatgtatgaagctcccaaatgctgctgctgctactgaactgtggaccacactttgagtagcaagattataggcggtagctactttaagcagcttggtgtgtatctggactttaactagtatttatatttaaact

SEQ ID NO: 3931 - DNA, 411 bp, Homo sapiens
tttcttaagcttccaaggctaaagttggaggtaatgcttgaagataatgtttgcttgcccagcaatggcaaattatatacaaaggtaatcaactgggtgcagcgtagcatctgggagaatggagacagtctggaagagctgatggaagaggtttattaacaaaactaggatacccaagactgaagaaacaagaagaaacctcaagtgtattgacacgtaaagaagcagcagtcctgccccagttctcctaagaaaaatccgctgtgggcagagaacgatgatgatttaatggtgtttactcctttacaggattcttgtctttaaagctgtgtgtttttcaatggtgttgttcatacatatagtcactcacttaacttgggctacttttaaaaaaaatacacaagatacaat

SEQ ID NO: 3932 - DNA, 396 bp, Homo sapiens
ctggctgccgccgtcagctgtgccgtcgcgcagcacgcgccgccgtggacagaggactgcagaaaatcaacctatcctccttcaggaccaacgtacagaggtgcagttccatggtacaccataaatcttgacttaccaccctacaaaagatggcatgaattgatgcttgacaaggcaccagtgctaaaggttatagtgaattctctgaagaatatgataaatacattcgtgccaagtggaaaaattatgcaggtggtggatgaaaaattgcctggcctacttggcaactttcctggcccttttgaagaggaaatgaagggtattgccgctgttactgatatacctttaggtaaagttcacttagaagctttaaaaaaaaaagtaattaaattcttt

SEQ ID NO: 3933 - DNA, 403 bp, Homo sapiens
  misc_feature (1)...(403): n = A,T,C or G
ccagcgcaggggcttctgctgagggggcaggcggtgcttgaggaaaccgcagataagtttttttctctttgaaagatagagattaatacaactacttaaaaaatatagtcaataggttactaagatattgcttagcgttaagtttttaacgtaattttaatagcttaagattttaagagaaaatatgaagacttagaagagtagcatgaggaaggaaaagataaaaggtttctaaaacatgacggaggttgagatgaagcttcttcatggagtaaaaaatgtatttaaaagaaaattgagagaaaggactacagagccccgaattaataccaatagaagggcaatgcttttagattaaaatgaaggtgacttaaacagcttaaagtttagtttaaaagttgtn

SEQ ID NO: 3934 - DNA, 396 bp, Homo sapiens
  misc_feature (1)...(396): n = A,T,C or G
cggacgcgtgggccaggatgtagagaaattggaatccttgcacactctaaagtggtacagctgctgtggaaaatattctaaaaatagaatttccaaatgatccaaattttctgcaagcagagtctcaaaaagatattcatacaccaacatttatagcagcgttattcacagcagctaaaatgggaaaacaacccaagtgtccattgacagatgaatagataaacaaaatgtggtgtatcatacaatggaatattattcagccttaaaaagaaaagaaattctgacatatgccacgacatgatgaactttgagaacattatgctaagttaaataagccagttatgaaaagacaaatgtggtgtgatcccaaactgttttttatatgcactaaattan

SEQ ID NO: 3935 - DNA, 462 bp, Homo sapiens
  misc_feature (1)...(462): n = A,T,C or G
tgccagaagcttatcaaaaatattgaatatcctgtggacttggaaattagtaaagaactgctttctccaggggttaaaaataagaattttaaatgccaccgaacctatcggctgtttgcagtggtctaccatcacggcaacagtgcgacgggcggccattacactacagacgtcttccagatcggtctgaatggctggctgcgcatcgatgaccagacagtcaaggtgatcaaccagtaccaggtggtgaaaccaactgctgaacgcacagcctacctcctgtattaccgccgagtggacctgctgtaaaccctgtgtgcgctgtgtgtgcgcccagtgcccgcttcgtaggacaccacctcacactcacttcccgcctctctttagtggctctttagagagaaactctntctccctttgcaaaaatgggctagaatgagaaggagatgcccttgggttcgg

SEQ ID NO: 3936 - DNA, 400 bp, Homo sapiens
  misc_feature (1)...(400): n = A,T,C or G
gagtctcagaaaggacacggctggctgcttttctcagcgccgaagccgcgccatgctcgtcctcagaagcgccctgactcgggcgctggcctcacggacgctggcgcctcagatgtgctcatcttttgctacgggacccagacaatacgatggaatattctatgaatttcgttcttattaccttaagccctcaaagatgaatgagttcctggaaaattttgagaaaaacgctcatcttcggacagctcactctgaattggttggatactggagtgtagaatttggaggcagaatgaatacagtgtttcatatttggaagtatgataattttgctcatcgaactgaagttcggaaagccttggccaaagataaggaatggcaagaacaattcctcattccn

SEQ ID NO: 3937 - DNA, 496 bp, Homo sapiens
  misc_feature (1)...(496): n = A,T,C or G
natggaccccctcggactacggatggtctcgcaaacgccccacgcgtncggtgcctacagccagaggcatctccctagaaggatcagtaggggtcatctgctccagccctctgcctctgtacaggaaaccaccctggatagtagagccagggagctcggggagaaccgagtctacagacattgctctcaaggttcattcagtcagttcctgtgggctggccagggctcaagtgtaccctcagggggctcttcacctcccctgcttcttcaggctccaacgtctgagcccccagcagccaggacctcatgctaacatagtgggaaaccccagagggctacaccttatcccttagcccaatttctttagacctggtctgcctttcccaaggcgctggcactttgctttaaatacccacctcccagaaagtgcttcccctcagaacgttggtcaatgagtacaatcaaaaggtaatgccctagctgggcatggtggctc

SEQ ID NO: 3938 - DNA, 528 bp, Homo sapiens
  misc_feature (1)...(528): n = A,T,C or G
ccctgtcnnnaattgatgnctangaccngccctgagaccccgccgcgacccacgcgtccgcagactaccatcttccctgcaactctgaaggatggacttaatttccaccatgtctagcaaaagaacaaagaccaagaccaagaagcgccctcagcgtgcaacatccaatgtgtttgctatgtttgaccagtcacagattcaggagttcaaagaggccttcaacatgattgatcagaacagagatggtttcatcgacaaggaagatttgcatgatatgcttgcttcattggggaagaatccaactgatgagtatctagatgccatgatgaatgaggctccaggccccatcaatttcaccatgttcctcaccatgtttggtgagaagttaaatggcacagatcctgaagatgtcatcagaaatgcctttgcttgttttgatgaagaagcaactggcaccatacaggaagattacttgagagagctgctgacaaccatggnggatctgtttacagatgaggaagtggatgg

SEQ ID NO: 3939 - DNA, 480 bp, Homo sapiens
  misc_feature (1)...(480): n = A,T,C or G
ntcgacaatcgataccntcggccacgaacncccgggncgacccacgcgtccgggggcaggtagggagggcttccctgaggtggnggngnnggggttttcacagaagggcgagcaggagtcgccgagagtaggggagacaccatggctcaggggccagaaagctggtgacaccccttcagagccccgtctcctctggagccctcaggtttgatttgtcgctgctggagcatgagctccgagggtggcagttgcccccatccccacagtggccctctcactgggcccacctcagactgtcacaggctgggctccgggatccccagaagcccccgttgcagtctgggagcctcgtgcgtcggcagtgggtgagttatgatgtgagaaaatgtggtgtgcagggaattggggtttccttttgagctcctgccccatctcgggcaccatcctcaccttagaactgtgttttacggctgtgggacc

SEQ ID NO: 3940 - DNA, 460 bp, Homo sapiens
tccatttcaagaaaaattaaaaaactgtttgttgcctgcttgttttaatgttctggcttgaggcagcgagcccttgactatgccacattgccaggattttgcaggttagattgtactacagcactgcctttggcttgccagactctggagtccccacattttcatcctgttctcaggaaaacactttgacccacttgaagctctgagctactgcttcacagcttcctggggtcagtctccagccaaaaccatagatatcccaactgcagccaaaccacggctctgggcgaaggaacgattaggtttactctaggtttccacaccctgatgctcctgcctttactttgacacctctgactgccaggttttcacagaccttgtgacagtgactcaagatctggaatgtaatggatggtttggcaacagtgtttgcttgagcagattaaaatcttgccagggg

SEQ ID NO: 3941 - DNA, 417 bp, Homo sapiens
  misc_feature (1)...(417): n = A,T,C or G
aggtagggagggcttccctgannnnncctcgctttggttagcacagaagggcgagcatgagtcgccgagagtaggggagacaccatggctcaggggccagaaagctggtgacaccccttcagagccccgtctcctctggagccctcaggtttgatttgtcgctgctggagcatgagctccgagggtggcagttgcccccatccccacagtggccctctcactgggcccacctcagactgtcacaggctgggctccgggatccccagaagcccccgttgcagtctgggagcctcgtgcgtcggcagtgggtgagttatgatgcgagaaaatgtggggtgcagggaattggggtttccttttgagctcctgccccatctcgggcaccatcctcaccttagaactgtgttgtacggctgg

SEQ ID NO: 3942 - DNA, 396 bp, Homo sapiens
aaaattatacagtacctgaaactaaaaggctaaataaatggattcatcttttaaaaaaagttacattttctgagcatctataattcagttaagaaggtgactgaaaattgcagtttactggatgatcttgggaaaattactcactgtgtttctcagttttctcatttgtaagacaacaataatatgttgaaaggattaaatgaggtaatgtatttaaagtgcgggcacatagtaactactcaataattatttgcctgtcatcatcatggtcatattcaaagtgaaatttcttccacatctgaccttggctattttaatatatgtgttactaagcaatataatgtattttaaagaaaaatacggtgatatgccactttcaaagaaacaaaaaagatg

SEQ ID NO: 3943 - DNA, 398 bp, Homo sapiens
cccacgcgtccgggatcattttgctaaatacttcactgacgcaggtcttaaggagctttccgacttcctccgagtccagcagtccctgggcaccaggaaggaactgcagaaggagctccaggagcgtctttctcaggaatgcccgatcaaggaggtggtgctttatgtcaaagaagaaatgaagaggaatgatcttccagaaacagcagtgattggtcttctgtggacatgtataatgaacgctgttgagtggaacaagaaggaagaacttgttgcagagcaggctctgaagcacctgaagcaatatgctcccctgctggccgtgttcagctcccaaggccagtcagagctgatcctcctccagaaggttcaggaatactgctacgacaacatccatt

SEQ ID NO: 3944 - DNA, 401 bp, Homo sapiens
tgcctgcttcgtgcctggtgtgacgtctctcatgatgcctgagccggggaagaagccagtctcagcttttagcaagaagccacggtcagtggaagtggccgcaggcagccctgccgtgttcgaggccgagacagagcgggcaggagtgaaggtgcgctggcagcgcggaggcagtgacatcagcgccagcaacaagtacggcctggccacagagggcacacggcatacgctgacagtgcgggaagtgggccctgccgaccagggatcttacgcagtcattgctggctcctccaaggtcaagttcgacctcaaggtcatagaggcagagaaggcagagcccatgctggcccctgcccctgcccctgctgaggccactggagcccctggagaagccccggccc

SEQ ID NO: 3945 - DNA, 397 bp, Homo sapiens
cccacgcgtccgggatcattttgctaaatacttttctgacgcaggtcttaaggagctttccgacttcctccgagtccagcagtccctgggcaccaggaaggatctgcagaaggagctccaggagcgtttttctcaagaatgcccgatcaaggaggtggtgctttatgtcaaagaaaaaatgatgaggaatgatcttccagaaacagcagtgattggtcttctgtggacatgtataatgaacgctgttgagtggaacaagaaggaagaacttgttgcagaacaggctctgaatcacctgaagcaatatgctcccctgctggccgtgttcagctcccaaggccagtcagagctgatcctccttcagaaggctcacgaatactgctacgacaacatccag

SEQ ID NO: 3946 - DNA, 410 bp, Homo sapiens
  misc_feature (1)...(410): n = A,T,C or G
tgaggtggaggaggaagagctcagatagaaaaggagggagctactctcaggctgcaagcagtgacagtgcccagggctctgatatgtctctcacagcttgtaaagtgtgagacagctgccttgtgtgggactgagaggcaagatttgttcctgcccttccctttgtgacttgaagaaccctgactttgtttctgcaaaggcacctgcatgtgtctgtgttcttgtaggcataatgtgaggaggtggggagaccaccccacccccatgtccaccatgaccctcttcccacgctgacctgtgctccctccccaatcatctttcctgttccagagaggtggggctgaggtgtctccatctctgcctcaacttcatggtgcactgagctgtaacttcttccttccctattaaan

SEQ ID NO: 3947 - DNA, 464 bp, Homo sapiens
  misc_feature (1)...(464): n = A,T,C or G
cccacgcgtccggcagccccagggcccctcgccgccgccaccatggacgccatcaagaagaagatgcagatgctgaagctcgacaaggagaacgccttggatcgagctgagcaggcggaggccgacaagaaggcggcggaagacaggagcaagcagctggaagatgagctggtgtcactgcaaaagaaactcaagggcaccgaagatgaactggacaaatactctgaggctctcaaagatgcccaggagaagctggagctggcagagaaaaaggccaccgatgctgaagccgacgtagcttctctgaacagacgcatccagctggttgaggaagagttggatcgtgcccaggagcgtctggcaacagctttgcaaaagctggaggaagctgagaaggcagcagatgagagtgagagaggcatgnaagtcattgagagtcgagccccaaaaagatgaagaagaaa

SEQ ID NO: 3948 - DNA, 498 bp, Homo sapiens
  misc_feature (1)...(498): n = A,T,C or G
cgaggaaanttctatcccctcccgtgtcacctcgataanncganggacaccgcggtcggaccatacggccgcccgttaataaagaagtacctgctttcaatcaactttttcctgcacccgaacagaccagcaggcacctgcaccgcagccagtcatcacgctgcancccaatcaatcaagcatcaccctgcacaccaatcaagccagcatcacacttcactttggatagctgccccaactttcccttttccaccaagccaatataatcgcccacctctacttctgtggcatcctttgcatgctactaatcagtgtcttcattgtcctgaactgccccccaacacacacccagtccatgagctgacagttctctaaaactcctgagccactatagtctctagcacagtatagtgtaggcttccaaaactggcagcaaacacttgttaattaattgcatgaagggtttcaagtctatagatatcccacatcgtgtgttan

SEQ ID NO: 3949 - DNA, 457 bp, Homo sapiens
  misc_feature (1)...(457): n = A,T,C or G
tggcggganannaactacggtttcacctcggtcggtgctccctcgaaaanccccacaacgcgggggggaggcctcagcatcgtggcggaaggggaaaggtttttcttacatggtttctgcaagagaaaatgagagagaagcaaaagcagaaacccctgataaacccatcagatcgcatgagacttattcactattacaagaatagcatgggaaatacaggcccctgtgactcaattacctcccactgggtccctctcacaacatgtgggaattctgggagataaaattcaagttgagatttggatggggacacaaaccatatcaccacagcatcatgccatggagcacagggctggggctgaagccctgagatctgctccagcccgactgccctgtgaccttaggtgagtcccttcccctccccagtcctctgtgtccttctgtgtataaaaagagg

SEQ ID NO: 3950 - DNA, 380 bp, Homo sapiens
  misc_feature (1)...(380): n = A,T,C or G
cagagtcagaaaactccccatttaaacacccgtattacttcatacaacacaatactctatactgtgatgatcacagctgccaaggctacctaaaagaagacagttatctcatatttggctgccagctttttatctttctctcgaccacttaaaacttcagacttcctgtcctgctggtatcatggagaaagtccaatacctcactcgctcagctataagaagagcctcaaccattgaaatgcctcaacaagcacgtcaaaagctacagaatctatttatcaatttctgtctcatcttaatatgtctcttgctgatctgtatcatcgngatgcttctctgaagttctgctacaacctctagatctgcagcttgccacatcn

SEQ ID NO: 3951 - DNA, 515 bp, Homo sapiens
  misc_feature (1)...(515): n = A,T,C or G
ntttgatgccgtgngacatttgaggaactctcggaacgacccacgcgtncggatttagggatacccgctttctctttttcttgcaagttttatttttccaaccttaagtttatttgtggaccaaatttcagaggaactttttgtgtagtcagttcttgcacaatgtgtttggtaaacaaactcaaaatggattcttaggagcattttagtgtttattaaataactgaccatttgctgtagaaagatgagaaaacttaagctttgttttactacaacttgtacaaagttgtatgacagggcatattctttgcttccaagatttgggttgggggcactaggggttcagagcctggcagaattgtcagctttagtctgacataatctaagggtatggggcaaggatcacatctaatgcttgtgttccttatactctattatatagtgntattcatgattcagctgatcttacaaaattcgtagcagtggaaccttgaaatgcatgtggctagatttan

SEQ ID NO: 3952 - DNA, 419 bp, Homo sapiens
ccgaggcaggaggattatgtgagctcaggagttcgagaccagcatggacaacgtggcgagatcctgtctctacaaaaaattagctgggcatggtggtatgtacctgtagtcccagcttctccggaggctgaggtgggaggatcacttgagcctgtgaggtcgagactacaccgagattgcactgagccgagattgcaccactgcgctccagccttggtcaacagggtgagattttgtctcaaaaaataagtaaaagtaattataggtcatcatggaatatttttaaactatagaaatataaaaaatatataatcacctgtaatcccaccatccaaagataatcacctttagtattgggatgtattccctccatctgtattccacaaaaaaattatatattaattagatttgaattgtgt

SEQ ID NO: 3953 - DNA, 466 bp, Homo sapiens
ccagaatgttgggaagccgaggtgggaggattgcttgaggactagaatttgagatcagtctgggcaacatagcaagactcgtttctaaaattttttttttaatagttgggcatcgtgaatatgtacctgtagtctcagctgctcaggaggctgaggtgggaggatggcttgagcccaaaggtttgaggctgcagtgagctatgattgcacaagtgcactccagcctgggcgacgaagcaggatcctgactcttaaaaaaaaaaaaaaggcccctgccttcactgtctcctgttccaaaattgggggggggataaaaattcattaaatagatgcccgggccaaaaataaccttgcccccccccaccccgcctaaaaaaaaaaacccccccaaaaacctctcaattgcccgggccccctccctaaagaggtaaaaatcccctgggggcacaaatggtagggtggggaa

SEQ ID NO: 3954 - DNA, 422 bp, Homo sapiens
actcgctccggatggccatcatggtgcagtcgcccatgtttgatggaaaagtcccacactggtaccacttctcctgcttctggaaggagggccactccatccggcaccctgacgttgaggtggatgggttctctgagcttcggtgggatgaccagcagaaagtcaagaagacagcggaagctggaggagtgacaggcaaaggccaggatggaattggtagcaaggcagagaagactctgggtgactttgcagcagagtatgccaagtccaacagaagtacgtgcaaggggtgtatggagaagatagaaaagggccaggtgcgcctgtccaagaagatggtggacccggagaagccacagctaggcatgattgaccgctggtaccatccaggctgctttgtcaagaacagggaggaagctggt

SEQ ID NO: 3955 - DNA, 417 bp, Homo sapiens
gaaggtggcggagcaggagctgattgagactagtgagcgggtgcagctgctgcattcccagaacaccagcctcatcggccagaagaagaagatggatgctgacctgtcccagctccagactgaagtggaggaggcagtgcaggagtgcaggaatgctgaggagaaggccaagaaggccatcacggatgccgccatgatggcagaggagctgaagaaggagcaggacaccagcgcccacctggagcgcatgaagaagaacatggaacagaccattaaggacctgcagcaccggctggacgaagccgagcagatcgccctcaagggcggcaagaagcagctgcagaagctggaagcgcgggtgcgggagctggagaatgagctggaggccgagcagaagcgcaacgcagagtcggtgaa

SEQ ID NO: 3956 - DNA, 419 bp, Homo sapiens
  misc_feature (1)...(419): n = A,T,C or G
ggaaacttgtccattgccaccggtaatcttctgcatttagtagaaaatatgtgcacacaatagtcacacagacagtcacaatgcacaggataaccagcaccagcatcatgaagccatagacataatagatcttatatgcccagaaagacgtgaagatgaaatacatttcaataaagattgaaccaaaaggtaaaattccacccaggcaaacaataaccgcaggctccatgaaccattttttctccggtataggacgaggcacagcattgacacgacaaggaaagttgggctgacctgacagatttcggccaagtattgtaccaacaagatttagaggaagaataacaaaaaaacagatgcaacaaacggccaccattgttccaaaaggaatggctcttgaagcatggtaataaatggcn

SEQ ID NO: 3957 - DNA, 408 bp, Homo sapiens
ataatacttctacttcaactgaggaatggaaaactaaacatcatatgttctcatatgtccctaagctatgaggatgcaaaggcataagaatgatacaatggactttggggactttcagggaaagggtgagaagggcgtaagggataaaagactacaaattgggttcagtatatactgctcgggtgatgggtgcaccaaaatcttaaaaatcgccaaagaacttatgtaactaaataccacctgttccccaaaaaactatggaaattaaaaattaaaaaataagtataatttctgctttagcgatattaactattcagtacacaataagtgagtttagcaattcagtgatttctgactgttgggtagctctctttgttaacaaataaaatataaatttgaagaaactta

SEQ ID NO: 3958 - DNA, 465 bp, Homo sapiens
  misc_feature (1)...(465): n = A,T,C or G
ctatttttaaaattttttaaaattgctgaacaggggtacctctgggcagtgtgtcagaataccactttttaaatattttatgatttatttatttttctatttgaggttttaactgatgtgtatctgtatgtctatttgtgtatattttgtcatgatcatgtaacagagtctgaaaagtgtcgaagagacagttttcaggaacaacaagcaattattcctactttccaagttattttgatgccatggtggctcatacctataatctgagtactttgggaggctgaggtggactgatcacttgagcccaggagtttgagaccagcctgggcaacatagcaagactccatctctacaaaaaaagacaaaatttagctgagcgtggtggcgtgttcctgtagtcccagctacttgggaggctgaagtgagtggatcccctgagcccagagaggtcanggtttgtgtgag

SEQ ID NO: 3959 - DNA, 475 bp, Homo sapiens
  misc_feature (1)...(475): n = A,T,C or G
naagtgccccctttcccccnaaggttcagnanagcacngccnctannntngggncgacccacccgtccggnggaggagccgcagtctgtgttgcagcttcctactttaattgctgctggaggggaaggacttacggatgggtccccagaaacaaccaccccggagcccccgtcttccgctgcagtttccccgggaacagaggaacctgctggcgacaccaagaaaaaaattggttgtgaattcactccttaaaccaaaaaccaaattcttacgcagaatgaagactgctaagggaaagctaaaggcatagatgttacctttttaagaaacacattttggaacctttatgacagtggtctctggccgggcgcggnggctcactcctgtaatcccagcactttggtaggctgaggcgggtggatcacctgaggtcaagagttcgagaccagcctggccgacatgttgacattatgtg

SEQ ID NO: 3960 - DNA, 420 bp, Homo sapiens
aaatcccaaacatataactgaactcctcacacccaattggaccaatctatcaccctatagaagaactaatgttagtataagtaacatgaaaacattctcctccgcataagcctgcgtcagattaaaacactgaactgacaattaacagcccaatatctacaatcaaccaacaagtcattattaccaaaaaaaaaaaaaaaaaaaaaaaaaaaaaaaaaaaaaaaaaaagggggggggccttttaaaaaatccccggggggggccaaattatccgggggggggaaaaaaaatttttttttctttatgggggggtaaaaaaaaacccctgggggttttttggaaaaaaacctttttttggggggggggaaatttgggccccccccccccacaaaatttaacccctttgggggaaaaaaaaat

SEQ ID NO: 3961 - DNA, 489 bp, Homo sapiens
  misc_feature (1)...(489): n = A,T,C or G
nnnccaactgacagcctcgganaccgttgaggaccntccgggncgacccacgcgtccggtcaggagactttccagtgccctgaagatgttgccttattggcttcccctgatgaagccttagcccaaagccagtgaaaccagaaagaagaggctggaggtgggagttggggtgggattatggttctataaccctctcctgcacctccccatgcaatgggggaaataaatagccatttaaaaatcctttttggctgccgttatggactgaatgtttgtgcactccccccgacccccgcaattcatatgttaaagcccaaaagccccatgtgactatatttggggcttctaaggaagtacttaaggttaaatgaggtcataagtgtggggccctaatccgataggattagtgttcttacgggaagagataccatagagctcactcgctctccatctgccatgtgaggacacagcaagaaggcagccatctgg

SEQ ID NO: 3962 - DNA, 462 bp, Homo sapiens
  misc_feature (1)...(462): n = A,T,C or G
cccacgcgtncggcgagcaaaggctattattgtagaatttgcacagcagggtttgaatgctgctttgttttatgagaataaagatccccgcacttttgtgtctttggtacctacctctgcacatactggtgatggcatgggaagtctgatctaccttcttgtagagttaactcagaccatgttgagcaagagacttgcacactgtgaagagctgagagcacaggtgatggaggttaaagctctcccggggatgggcaccactatagatgtcatcttgatcaatgggcgtttgaaggaaggagatacaatcattgttcctggagagaagggcccattgtaactcagattcgaggcctcctgttacctcctcctatgaaggaattacgagtgaagaaccagtatganaagcataaagaagtagaagcagctcagggggtaaagattcttggaaaagacctggag

SEQ ID NO: 3963 - DNA, 468 bp, Homo sapiens
gcgatgagagcgggtactgcgaactgccgggcgatgctgtctctgccgccgtgatacggagagcaacagttccccagcaacacccctccccgacacaggcacacaccccccgacaggcacgcacacccaccccacagagcccggctcggctgcgcctcctctattggcccaggaagcccacccagccccgccacgcagagcccagaaggaaagaaagcctcatgcctgagccgaggggagcaccatggatctgacaaaaatgggcatgatccagctgcagaaccctaaccaccccacggggctactgtgcaaggccaaccagatgcggctggccgggactttgtgcgatgtggtcatcatggtggacagccaggagttccacgcccaccggacggtgctggcctgcaccaacaagatgtttgagatcctcttccaccgcaatagtcaacactatatcttggacttctt

SEQ ID NO: 3964 - DNA, 398 bp, Homo sapiens
  misc_feature (1)...(398): n = A,T,C or G
cttccctgcctggcagccgaggcagagagggagaggagacagagagaaagacagcttacgccgttatttctgcatatcagggactattagtactttcactaatttactactgctatctagaaggcagagccaggtgtacaggatggaacatgaaggcggactaggagtgtgaccactgaagcacagaatcacagggagacggttaggcctccggataactgtgggcgagcctgactaatgtcaggccctccacaagaggtggaggagcagagtcttctctaacctcccccagggaaagggagaccgccccccaccctttcccggtctgctaagtagcgggtgttgttccttgacacttttcgctaccgctagaccacggtcttcccaaacgctggcgn

SEQ ID NO: 3965 - DNA, 472 bp, Homo sapiens
  misc_feature (1)...(472): n = A,T,C or G
atctattttggcctagaattttgcccttgtgagaatgccatattaatggtgtcaacagaaaaaaaaacaaactctgcaaaatattttaaagaggtttattctgagccaatatgagtggctgttactgaaacaccaggggttcgctctagatctttccgcttcctgcacagaaagcccatcactgagacaatgagtattgccaaggaagaaggctgtaatttggaggtgcagctgaagagatgggagcttaatctcaaatccatccccctgactaaaactaggggtttatatatcaaggaagaaatgtaataatgtgtgagaaagcaggaacttgggaggggtgaggaagcagtcacggtgaacaaagggcctggagtcacattgaatgccatggtctggtgagtttcagttctttgatactttctgagaggagtttcagctctttgatactttttgagaggccctgatgtcn

SEQ ID NO: 3966 - DNA, 481 bp, Homo sapiens
  misc_feature (1)...(481): n = A,T,C or G
gcgcgtgaanannntaatggcacggattcggtagcgnacacangcannggaannncngggacgacccacgcgtgcgaccgctcctccgcccgaccgcgcgctcgccccgccgttactgctgcagccccagggcccctcgccgtcggggccatggacgccatcaagaagaagatgcagatgctgaagctcgacaaggagaacgccttggatcgagctgagcaggcggaggccgacaagaaggcggcggatgacaggagcaagcagctggaagatgagctggtgtcactgcaaaagaaactcaagggcaccgaagatgaactggacaaatactctgaggctctcaaagatgccctggagaagctggagctggcagagaaaaaggccaccgatgctgaagccgacgtagcttctctgaacagacgcatccagctggttgaggaagagttggatcgtgcccaggagcgtctggcaacagctttgc

SEQ ID NO: 3967 - DNA, 474 bp, Homo sapiens
  misc_feature (1)...(474): n = A,T,C or G
nggatgcgcttcttannngggaaatttagnannngcttnacnntngggttgagncacccgtccgatgaggggctctaacacctgtgagctaatctttgaatactgctagattcctgctgccaacatcctgggccatgagaataagggtgtctacgtgctgatgagtgggctggacctggagcggctggtgctggccggggggcctcttgggctcatgcaagcggtcctggaccacaccattccctacctgcacgtgagggaagcctttggccagaagatcggccacttccagttgatgcaggggaagatggctgacatgtacacccgcctcatggcgtgtcggcagtatgtctacaatgtcgccaaggcctgcgatgagggccattgcactgctaatgactgtgcaggtgtgattctgtactcaggtgagtgtgccacacaggtagccctggacggcattcaatgctttttgcn

SEQ ID NO: 3968 - DNA, 425 bp, Homo sapiens
gcgcgggctgccacgcccctgccctctctgagggtggaagctgaggctgggggctcaggggccaggacccctccactgtcccggaggaaagctgtagacatgcggctgcggatggagttgggtgctccagaagagatggggcaggtgcccccacttgactctcgccccagctccccagccctctacttcacccacgatgccagcctggttcacaaatctccagaccccttcggagcagtagcagctcagaagttcagcctggcccactccatgttggccatcagtggtcacctagacagcgacgatgatagtggctccggaagcctggttggcattgacaacaaaatcgagcaagccatggacttggtgaagtcccacctcatgtttgcggtccgggaggaggtggaggtgctgaaggagcagat

SEQ ID NO: 3969 - DNA, 452 bp, Homo sapiens
  misc_feature (1)...(452): n = A,T,C or G
attacattctttgttggccatagcatactagtaattcagattgagatgtactttctactaaaactttaaaaattctaaatgcactattgttaagcaaattctgtctttctactgcccttgatcatttgagttttattgtatgttcaggatattaaatactattaaattctacctcattaggtacagcactacagcctatggagacctatctatccacctcagagtaaggaaatcaacaaagatgataaacttctatcttcatccaagtcactaacaaaaactaccatgcagaatcaggttgaggataaatctccagaataatagtaatagagacagcgtgtaaagtactgacaaaagcaaaagatgacaattactaagcccttttatgttccagattctgtatcacactccacaacaaacttccacataccaccctcgagatatctactaan

SEQ ID NO: 3970 - DNA, 396 bp, Homo sapiens
  misc_feature (1)...(396): n = A,T,C or G
atcagatgaatttattcaacttcaatacaaagaaagacaaacctattatagtttcaagtgagtagatattatactgtacaggacagctatttgaacacacacatcactgctttagaaataaaaccgccaatttataaatgtatatgacctacattttataggaaaaaatgtttttaaatgctaatcatttatataatgtgctttgaaggatttgctagtccacttctgtcactttttagtacactggtatcttttatattgtaatgtatgctttttattattgtagcaaagcatttcagtagaaagaattttgcaacaatatgggggaaatttttcattggtggatttgaattatactggattttatctgcgtagncctacttggctttattttaa

SEQ ID NO: 3971 - DNA, 412 bp, Homo sapiens
  misc_feature (1)...(412): n = A,T,C or G
cccacgcgnccggnncttagtaagattacacatgctagcatccccgttccagtgagttcaccctctaaatcaccacgatcaaaagggacaagcatcaagcacgcagcaatgcagctcaaaacgcttagcctagccacacccccacgggaaacagcagtgattaacctttagcaataaacgaaagtttaactaagctatactaaccccagggttggtcaatttcgtgccagccaccgcgctcacacgattaacccaagtcaatagaaaaaaaaaaaaaaaaaaaaaaaaaaaaaaaaaaaaaaaaaaaaaaaaaaagggggggggccttttaaaaaaatcctggggggggccaaattatagggggggggagaaaaaatattttttttccttataggggggataataaaacaca

SEQ ID NO: 3972 - DNA, 384 bp, Homo sapiens
taccactgtccagcctaggtgacaaagtgagactccattaaaaaaaaaaaaactgcattaaaaatctaatcataaaaaactatcattgttttttgaaaaagcatttaaaacgcacatgcttctgacattcttaaggggggatttcctctaaattactgaaaaatcccctaagcatcaggagtttaaaaaaaaaggcttttagataaatatttttaaaaattgattaacatactccttggggactgaatataatttaactttttaatgaacaagtttgaatgtcaaaattgagggactaacagttaagtgctctaatcaaaaacaagggaagcaatatctttttctctcccctacccaccacatgtgcttttcctccccaatgcc

SEQ ID NO: 3973 - DNA, 416 bp, Homo sapiens
gccaggacacccagtgagcccatacttgctctttttgtcttcttcagactgcgccatggggctcaacgacggggaatggcagttggtgctgaacgtctgggggaaggcggaggctgacatcccaagccatgggcaggaagtgctcatcaggctctttaagggtcacccagagactctggtgaagtttgacaagttcaagcacctgaagtcagaggacgagatgaaggcatctgaggacttaaagaagcatggtgccactgtgctcaccgccctgggtggcatccttaagaagaaggggcatcatgaggcagagattaagcccctggcacagtcgcatgccaccaagcacaagatccccgtgaagtacctggagttcatctcggaatgcatcatccaagttctgcagagcaagcatc

SEQ ID NO: 3974 - DNA, 386 bp, Homo sapiens
atttgattgaaagaaaacagttgttgagaaaccataaccaataaggttttaattcaaaatgaaaggacagattatgaacaagccacaggaaactaaataagttatttgactgcagaattcgcggcaggtagaaatgaaggaggacagaaagagaggtaagttttggtgttatcattcctttgaatagtggcattgctcattgtgcttttcaatctgaacacttaaaaatcacagaaactggatgtctgtgaatcgggtggagaaacaaacagaagataaaattaactttgcagctgatgatcaatgtgagctaaaaagaaatgaattaaatacaaactaatgacctgttacttgtaagacacaagtgttactacagacttaccatt

SEQ ID NO: 3975 - DNA, 450 bp, Homo sapiens
  misc_feature (1)...(450): n = A,T,C or G
acgacatgtgcagaccaggctggtggaacctcgagcttcggcgctcaacagtggggactgcttcctcctgctctctccccactgctgcttcctgtgggtaggagagtttgcaaacgtcatagaaaaggcgaaggcctcagaacttgcaactttaattcagacaaagagggaacttggttgtagagctacttatatccaaaccattgaagaaggaattaatacacacactcatgcagccaaagacttctggaagcttctgggtggccaaaccagttaccaatctgctggagacccaaaagaagatgaactctatgaagcagccataatagaaactaactgcatttaccgtctcatggatgacaaacttgttcctgatgacgactactgggggattatttcgaagtgctcccttctgcaacccaaagaggaactggtggtgattttganaag

SEQ ID NO: 3976 - DNA, 461 bp, Homo sapiens
tcgcccacgcgtgcgcgcacattaaaagtgggcagcttcccagcctcggcagtgacgctggcagatgcggggggctagccagccacccgtccagtccagtccggggagatcaacacccaggaagcatatatggagacagaaagaaggcgaatctttgggatgcgcccccagcacggggccagaggaggaacatgcccctggagaggatgaaaggcattttcaggagtctggagtcagttctgtcccttggtcctcgtcccacagggggtggttcaagcccccctgaaattcgacaagccagagctgtgccccagggacctccaggcctgcctccacgcccacctttatcctctagctctcctcagcccagccagccctctagggagaggcttccctggcccaaaagaaaacccccacacaatcaccccatgggaatgcctggagcccgtaaagccgctgcc

SEQ ID NO: 3977 - DNA, 447 bp, Homo sapiens
ttgtaatagactagggaagtaattatttcccaattaataaagaaaattgttatcaacactttgtagggaatgccctttattatcctagtgcattttacagaaaaggtcatatgttttcattttataacatgacagctgcacatttatcatctgatttctttttgaagttttcgcaaaataaactggataagcaatcttaacaacatgtaaaaggcaatgccattacatgatgctagactagctttcatttgggatttaattaacaaaggaaaaggcatgaatgaaaaataaaactgcttccattagcataaattagatgattatgatatattttagtagttggatatccatttctgacagaatcgaaaatttccagggtcaacctatcaacctgcattgatgggaaagaatttagggtgatcacagctcttttggagaatactcatt

SEQ ID NO: 3978 - DNA, 429 bp, Homo sapiens
  misc_feature (1)...(429): n = A,T,C or G
agcctttctattagctcttagtaagattacacatgcaagcatccccgttccagtgagttcaccctctaaatcaccacgatcaaaagggacaagcatcaagcacgcagcaatgcagctcaaaacgcttagcctagccacacccccacgggaaacagcagtgattaacctttagcaataaacgaaagtttaactaagctatactaaccccagggttggtcaatttcgtgccagccaccgcggtcacacgattaacccaagtcaatagaagccggcgtaaagagtgttttagatcaccccctccccaataaagctaaaaaaaaaaaaaaaaaaaaggggggccgttttaaaggatccctaggggggcccaagtcttacgcgggcattcaacgnnatagctttttcccttatggggggccaaataatagccaa

SEQ ID NO: 3979 - DNA, 422 bp, Homo sapiens
ctcaatgaagccgggacgcactccggagcgcactgcgtggtcgcaccctacccgggctgccttggaagtcgtccccgccgcccctccgcaccggcatgaagctcatcgtgggcatcggaggcatgaccaacggcggcaagaccacgctgaccaacagcctgctcagagccctgcccaactgctgcgtgatccatcaggatgacttcttcaagccccaagaccaaatagcagttggggaagacggcttcaaacagtgggacgtgctggagtctctggacatggaggccatgctggacaccgtgcaggcctggctgagcagcccgcagaagtttgcccgtgcccacggggtcagcgtccagccagaggcctcggacacccacatcctccttctggaaggcttcctgctctacagctacaagccc

SEQ ID NO: 3980 - DNA, 422 bp, Homo sapiens
  misc_feature (1)...(422): n = A,T,C or G
cccacgcgtncgctagttctagatcgnaaaanaccgccctttattttttttttttttttttttttttcttgtgttttttttctttttttttttttacagagggggggccccccccccccgggggggatttttaaaaaaaaaaacccggggggggggggggtttttaaaaaaaaatttttcccccccccccaaaaaaagggggggggggggaaaatttttttggagtttctttcttcccccccaaccatttttaaaaaaggcccccgggggggggggtttcccttttggggggggggggggccccctttttttccccccccctaaaaaaaaaaaaaaaagananngggggttccccggggggggtttnttctaaaaaaaaaaccccccccccccccccccttgggggggaaaaaagaagtttc

SEQ ID NO: 3981 - DNA, 468 bp, Homo sapiens
tgcattttggggtcagaattgacatttcagaaatggaaacctttaaggtttggagaatggcaaagtcttatccaggaaaaagtgctggagaagcatgtgttcaaggtagtggggacacaaagattaatttccagaattaagacagtgtgtatttgatttgaagaattagagaaaactcagtatcactgggatgtaaaacaagagatcaggagagcaaaatagacagctgcagggtaagcaataaccagataatccacatcttgcaacctaaaaaaaaaaaaaaaaaaaaaaaagggggggggcctttttaaagattccttgggggggccaaattttacgggggatggcaaggtattatttttttccttttggggggcggttttaaaacctacttgggattttttggaaaggacctttttttttggggggggacttattgggccaacctccctacaaaattttaaggtt

SEQ ID NO: 3982 - DNA, 409 bp, Homo sapiens
cacgcgtacacacactcaagcgttcccggtacagtgcggcaggagcgttgcatcaccatgggggccactgccatatacctcttctacgagccctcggagaatgacttgaacttcatcaagcatagcacggacggggccggcttcctaatcaacctcattgactcccccgggcacgtccacttttcctgggaggtgactgctgccctccgagtcaccgatggcgcattggtggtgggggactgcgagtcatgcgagtgcgtgcagacggaaaacagagttgaatttgtgaatcctaaagaactcgtgccacctatcacaccccatcctatttaaaaaaaaaaaaaaaaaaaaaatttgaaaattttaaaaaaaaaaaaaaaaggggggggcccttttaaagatcccctgg

SEQ ID NO: 3983 - DNA, 478 bp, Homo sapiens
  misc_feature (1)...(478): n = A,T,C or G
agatgtggtnnaaccttgatcgcactgattgaccgcnctggaattcccgggtgcgcagaccagacttcgctcgtactcgtgcgcctcgcttcgcttttcctccgcaaccatgtctgacaaacccgatatggctgagatcgagaaattcgataagtcgaaactgaagaagacagagacgcaagagaaaaatccactgccttccaaagaaacgattgaacaggagaagcaagcaggcgaatcgtaatgaggcgtgcgccgccaatatgcactgtacattccacaagcattgccttcttattttacttcttttagctgtttaactttgtaagatgcaaagaggttggatcaagtttaaatgactgtgctgcccctttcacatcaaagaactactgacaacgaaggccgcgcctgcctttcccatctgtctatctatctggctggcagggaaggaaagaacttgcatgttggtgaaggaaga

SEQ ID NO: 3984 - DNA, 391 bp, Homo sapiens
aggacctgtttcactgcagggggatccaaaacaagccccgtggagcagcagccagagcaacagcagccgcaagacattgtttctctccctctgcccccccttccccacgcaaccccagatccatttacactttacagagcatcgtgcatcaagtcaccagggtggtccattcaagctgcagatttgtttgtcatccttgtacagcaatctcctcctccactgccactacagggaagtgcatcacatgtcagcatactggagcatagtgaaagagtctattttgaagcttcaaacttagtgctgctgcagaccaggaacaagagagaaagagtggatttcagcctgcacggatggtcttgaaacacaaatggtttttggtctaggcgttcta

SEQ ID NO: 3985 - DNA, 428 bp, Homo sapiens
ggacaagcatcaagcacgcagcaatgcagctcaaaacgcttagcctagccacacccccacgggaaacagcagtgattaacctttagcaataaacgaaagtttaactaagctatactaaccccagggttggtcaatttcgtgccagccaccgcggtcacacgattaacccaagtcaatagaagccggcgtaaagagtgttttagaaaaccccacaaaccccattactaaacccacactcaacagaaacaaagcatacatcattattctcgcacggactacaaccacgaccaatgatatgaaaaaccatcgttgtatttcaactacaagaacaccgcaaaaaaaaaaaaaaaaaaaaaaaaagggggggcccttttaaaagaacccttgggggggccaaatttaaccggggttggaaaggttttattttt

SEQ ID NO: 3986 - DNA, 407 bp, Homo sapiens
tcttcttcagactgcgccatggggctcagcgacggtgaatggcagttggtgctgaacgtctgggggaaggtggaggctgacatcccaggccatgggcaggaagtcctcatcaggctctttaagggtcacccagagactctggagaagtttgacaagttcaagcacctgaagtcagaggacgagatgaaggcgtctgaggacttaaagaagcatggtgccactgtgctcaccgccctgggtggcatccttaagaagaaggggcatcatgaggcagagattaagcccctggcacagtcgcatgccaccaagcacaagatccccgtgaagtacctggagttcatctcggaatgcatcatccaggttctgcagagcaagcatcccggggactttggtgctgatgcccaggg

SEQ ID NO: 3987 - DNA, 460 bp, Homo sapiens
  misc_feature (1)...(460): n = A,T,C or G
acagaaactgcctatttgaaatggctcataagtagtatctgcagtgtgttcatccgttgctgccttaacaagtcacccacacgtagtggcttaaagcaacgaacattcactctctcacagtctgtgtcagtcggggatttgggagtgatgtatctgggtggttgtggcccagagtctctcatgaggttgcagttaagacatcagccaaggccacttcgtctgaggaaggctcaactggggctggagccacttccaagccagtgccctcacgtggctgtcggtgacagccacagttccttcccatgggggcccctacacgaagctgcttgagcatcctcacggcatggcctctgccttccccagagcangtgaaccaagggagaggaaggagcaagccacagtgcttctatgagccaccctgagaagtctcacgtgatcacttccgccacagcctggttan

SEQ ID NO: 3988 - DNA, 429 bp, Homo sapiens
ctgattttagagagcccagaaccacagccaaatccaggtggcaagatggagggagaagatggaatagaggccttaaaattaatccatgctgagcaagaaagagttgccctatccactgaaaaaaattgtattttgcaaaccctaagctctcctgattcagaaaaggaatcctccactaacgcaccaacaagagaacctggacaaacaccagactcagacgtaccgagggcacaggtgggtcagcatgttgccaccttgaaagaacatgataattctgtcaaagaagaggcaacagcattattgagaaaagcccttacagaagagtgtggccgtaggtcagctattcacagtagtgaatcatcttgcagcttgccatctattctgaatgacaatagtggaataaaggaagccaaacctgctgtatggctc

SEQ ID NO: 3989 - DNA, 426 bp, Homo sapiens
cggacgcgtgggcagaatctggtggaattgctccagcttcctggtttagaggaagacaaagccttccagaaagagataggcctcaagactctggtgttcaaagcttacaggtgttttttcattgctcagtcctatgtgctggtgaagaagtggagcgaagcccttgtcctgtatgacagagtcctgaaatatgcaaatgaagtaaattctgatgctggcgccttcaagaacagcctaaaggacctgcctgatgtgcaagagctcatcactcaagtgcggtcagagaagtgctccctgcaggccgcagccatccttgatgcaaacgacgctcatcaaacagagacctcctcctcccaagtcaaggacaataagcctctggttgaacggtttgagacattctgcctggacccttcccttgtcaccaag

SEQ ID NO: 3990 - DNA, 389 bp, Homo sapiens
  misc_feature (1)...(389): n = A,T,C or G
cccacgcgtgcgaattcacttaaatcctcaagtatgtttctgccctgtggccttcaaatctacagtgctctgctatttgtgaaactcatcttcaaattcttctgttcttattaactcagctattataatcgtttcttgtcccgtacttgtcctgtcgttgctgtggatataagcattattatctgtatgacacatttgaaaattaagttaatgaaacctatttcccatttcccatactcttcattaacgcatgtgctttgattaaaatgctctttgagtattttaaataggaacaagcaggggtttggcaagggttaaacttttgctattttgattactctttgaagngataaattaaagctaaaaataaacatgaaaaacactgtaat

SEQ ID NO: 3991 - DNA, 422 bp, Homo sapiens
cggacgcgtgggcggacgcgtgggcggacgcttggggtacagttgtgtcaaactacaggtgaaaactttgaatcttggagaagaccactggtttattccacctctctagccatcggcatgaatgtctattggtatacttggtttagctgcccaatttatggccaagactgggacatgatatggtacaaaatatggtgtttttgtataaagagctatctcttgttccttcgatgtaaggggactgagggcacaagagttctaagactgataatcccatcaacttaatatattaaaagaggttttatatctaaagcatccaacacagtgtctggcctagaggaggcactatatctatagaacaaataaacgaatgttcgaacatagcctctctaaattctatttgaatgacttaacacaaagat

SEQ ID NO: 3992 - DNA, 399 bp, Homo sapiens
tgaaagagaagccaccttttcctccctctgcccaagccacctggcccctttgtcctttctcctcctcgtcctctgaggtatgagtggctgtgactgtatgacataggaactatgaagcggggtgaggggacggtttggtgcgtaaatcctcacgcaggtggcggttattgtctgtgtggaggaaataagcccggttcttcctgggactgctttcatttccctctagcttccagagggtaaaatgaaccttaatggaggttggggggtggcacgcacaaagtcctgggttgagggggcagtggtcagaaagttccctagggtaatatacaaaggagaattaacactggggacactgaggtgggttttggtcctttccacataactgacacctttcaaagg

SEQ ID NO: 3993 - DNA, 379 bp, Homo sapiens
aatccggaggagactgacggtccctgggaccctgaaggtcacccggtcggccccctcactgaccctccaaacgcccctgtcctcgccctgcctcctgccattcccggcctgagtctcagcatggcggatgggagcagcgatgcggctagggaacctcgccctgcaccagccccaatcagacgccgctcctccaactaccgcgcttatgccacggagccgcacgccaagaaaaaatctaagatctccgcctcgagaaaattgcagctgaagactctgctgctgcagattgcaaagcaagagctggagcgagaggcggaggagcggcacgcagagaaagggcgcgctctgagcacccgctgccagccgctggagctggccg

SEQ ID NO: 3994 - DNA, 422 bp, Homo sapiens
ctagttctctactggggagattctgttgctgagtaacctttggaaatgtgtaggctaatgtacagacattaaaaggaaggaggatgctaaatatcttgtaatgcactgaagaatcccacagactgaagaatcatccagcccaatatgccaattgtgtgctactgagaatgactgcattgagtgtaaatattcccttttccaagttttgttttgatttgctttgatttttgagacagagtctcgctttgtcacccaggctagagtgcagtggcgccatcatggctcactgcacctcgacctgccaggctcaagtgatcctcccgcctcagcctcccaagtagctggaactacaggcacacaccaccacacctggctaattttttgtaaaggcaggattttgccatgttgcccaggctggtctc

SEQ ID NO: 3995 - DNA, 406 bp, Homo sapiens
aaacttaggggccacgtgagccacggccacggccgcataggcaagcaccggaagcaccccggcggccgcggtaatgctggtggtctgcatcaccaccggatcaacttcgacaaataccacccaggctactttgggaaagttggtatgaagcattaccacttaaagaggaaccagagcttctgcccaactgtcaaccttgacaaattgtggactttggtcagtgaacagacacgggtgaatgctgctaaaaacaagactggggctgctcccatcattgatgtggtgcgatcgggctactacaaagttctgggaaagggaaagctcccaaagcagcctgtcatcgtgaaggccaaattcttcatcagaagagctgaggagaagattaagagtgttgggggggcctgtg

SEQ ID NO: 3996 - DNA, 421 bp, Homo sapiens
  misc_feature (1)...(421): n = A,T,C or G
gccgtcatggcgccccgaaccctcctcctgctactcttgggggccctggccctgacccagaccagggcgggctcccactccatgaggtatttcttcacatccgtgtcccggcccggccgcggggagccccgcttcatcgccgtgggctacgtggacgacacgcagttcgtgcggtttgacagcgacgccgcgagccagaggatggagccgcgggcgccgtggatagagcaggaggggccggagtattgggaccaggagacacggaatgtgaaggcccactcacagactgaccgagtggacctggggaccctgcgcggctactacaaccagagcgaggccggttctcacaccatccanatgatgtatggctgcgacgtggggccggacgggcgcctcctccgcgggtaccagcaggacgccg

SEQ ID NO: 3997 - DNA, 463 bp, Homo sapiens
  misc_feature (1)...(463): n = A,T,C or G
cccacgcgtncggatttttctaaaatcctgttttctttaagtttcaaatgggtcattggtaaatagtaggcagcagcaagacaaagtccaagtgtgtgaagtgtaaagtgaaagaactggtttaaaatgctcactttgcccattagctctgtggtcccgagaaagtcatttaattctctgagcctgtttcatcacttacaaaatgtgaataacaacacttattcatagggttgtaataaggagtgggagatggtgttaggcataaaaccagcacagtgccctgaacctattttaacaaatggtatttccgaggtgttagtccatgccaacatgaaacgtgagtctaaggaagcttataaatactgtttctttttattacaaagattataattccagtataacaaaattcactggaagaaaaccatttaacacagcttattatctgttcanaaaataaaagttn

SEQ ID NO: 3998 - DNA, 487 bp, Homo sapiens
agggacccatgtcttcggaaatacaaggacttctgcatccatggagaatgcaaatatgtgaaggagctccgggctccctcctgcatctgccacccgggttaccatggagagaggtgtcatgggctgagcctcccagtggaaaatcgcttatatacctatgaccacacaaccatcctggccgtggtggctgtggtgctgtcatctgtctgtctgctggtcatcgtggggcttctcatgtttaggtaccataggagaggaggttatgatgtggaaaatgaagagaaagtgaagttgggcatgactaattcccactgagagagacttgtgctcaaggaatcggctggggactgctacctctgagaagacacaaggtgatttcagactgcagaggggaaagacttccatctagtcacaaagactccttcgtcccccagtgccgtctaggattggggcctccataattgctttgccaaataccagagccttt

SEQ ID NO: 3999 - DNA, 463 bp, Homo sapiens
cggacgcgtgggccactttgtacgttgtatcatccctaatgagacaaagtctccaggggtgatggacaaccccctggtcatgcaccagctgcgctgcaatggtgtgctggagggcatccgcatctgcaggaaaggcttccccaaccgcatcctctacggggacttccggcagaggtatcgcatcctgaacccagcggccatccctgagggacagttcattgatagcaggaagggggcagagaagctgctcagctccctggacattgatcacaaccagtacaagtttggccacaccaaggtgttcttcaaggccgggctgctggggctgctggaggaaatgagggacgagaggctgagccgcatcatcacgcgtatccaggcccagtcccgaggtgtgctcgccagaatggagtacaaaaagctgctggaacgtagagactccctgctggaatccagtggaact

SEQ ID NO: 4000 - DNA, 422 bp, Homo sapiens
agaaggtgaagacatctagaaacattacaccacacacaccgtcatcacattttcacatgctcaattgatattttttgctgcttcctcggcccagggagaaagcatgtcaggacagagctgttggattggctttgatagaggaatggggatgatgtaagtttacagtattcctggggtttaattgttgtgcagtttcatagatgggtcaggaggtggacaagttggggccagagatgatggcagtccagcagcaactccctgtgctcccttctctttgggcagagattctatttttgacatttgcacaagacaggtagggaaaggggacttgtggtagtggaccatacctggggaccaaaagagacccactgtaattgatgcattgtggcccctgatcttccctgtctcacacttcttttctt

SEQ ID NO: 4001 - DNA, 408 bp, Homo sapiens
caaaaacagaataattttgaagttttagaataaatgtaatatatttactataattctaaatggttaaatgcttttctaaaaatgcaaaactatgatgtttagttgctttattttacctctatgtgattatttttcttaattgttattttttataatcattatttttctgaaccattcttctggcctcagaagtaggactgaattctactattgctaggtgtgagaaagtggtggtgagaaccttagagcagtggagatttgctacctggtctgtgttttgagaagtgccccttagaaagttaaaagaatgtagaaaagatactcagtcttaatcctatgcaaaaaaaaaaaatcaagtaattgtttttttttgaggaaaatacccatgagctgtttcatgctacttag

SEQ ID NO: 4002 - DNA, 462 bp, Homo sapiens
  misc_feature (1)...(462): n = A,T,C or G
cttttctataagttgtaccaaaacatccacttaagttctttgatttgtaccattccttcaaataaagaaatttggtacccaaaaaaaaaaaaaaaaaaaaaagaaaaaaaaaaaaaaaaaaaaaaaaaaaaaaanggggggggggggtttttaaaaaaaatttgggggggggaaaaaaatagggggggaggaaaaaaaattttttttttttttaggggggggtttaaaaaaccctgggggggtttttggaaaaaaaattttttttgggggggggaaatataggggaaaaaccccccaaaaaaataaaagtgcttaaagaaaaaaaaaaattttggggggggaaggggggaaaaatttttttttttttgtgggtttaaaaaagtgggggcccnaactgnnanaaaatcaatttggtgaaagcactaggtttgtggaatctgctaacggttaaataggaagaag

SEQ ID NO: 4003 - DNA, 469 bp, Homo sapiens
  misc_feature (1)...(469): n = A,T,C or G
agggggcggagggagcccgcggcggcggcagcagctacagcgaaatggcggttaccgtggctgacacccggcggctgatcaccaagccgcagaacctgaatgacgcctacggaccccccagcaacttcctcgagatcgatgtgagcaacccgcaaacggtgggggtcggccggggccgcttcaccacttacgaaatcagggtcaagacaaatcttcctattttcaagctgaaagaatctactgttagaagaagatacagtgactttgaatggctgcgaagtgaattanaaagagagagcaaggtcgtagttcccccgctccctgggaaagcgtttttgcgtcagcttccttttagaggagatgatggaatatttgatgacaattttattgaggaaagaaaacaagggctggagcagtttataaacaaggtcgctggtcatcctctggcacagaacgaacgttgtctttn

SEQ ID NO: 4004 - DNA, 439 bp, Homo sapiens
  misc_feature (1)...(439): n = A,T,C or G
cgggttaaggtctgagggtcttgtggggccacggtgctgatcaccaagtgtttggcttggtcggttcttatttctcgcctggcaatggcgacgtacacctgcataacttgccgggtggcgttccgcgacgcggacatgcagcgggcccactataagacggactggcaccgctacaacctgcggcggaaggtggccagcatggccccagtgaccgccgagggcttccaggagcgagtgcgggcgcagcgggccgtctcggaggaggagagcaagggctcggccacctactgcaccgtttgcagtaagaagtttgcctctttcaacgcctacgagaaccacctcaagtcccggcgtcacgttgagctggagaagaagccgtgcaggcagtgaatcggaaagtggagatgatgaatgaaagaacttggacaaaggactgggn

SEQ ID NO: 4005 - DNA, 462 bp, Homo sapiens
  misc_feature (1)...(462): n = A,T,C or G
cccacgcgtncggatggccgcgggccgcctctttctaagtcgttttcgagcacccttcagttccatggccaagagcccactcgagggcgtttcctcctccagaggcctgcacgcggggcgcgggccccgaaggctctccatcgaaggcaacattgctgtgggaaagtccacgtttgtgaagttactcacgaaaacttacccagaatggcacgtagctacagaacctgtagcaacatggcagaatatccaggctgctggcacccaaaaagcctgcactgcccaaagtcttggaaacttgctggatatgatgtaccgggagccagcacgatggtcctacacattccagacattntcctttntgagccgcctgaaagtacagctggagcccttccctgagaaactcttacaggccaggaagccagtacagatctttgagaggtctgtgtacagtgacaggtatat

SEQ ID NO: 4006 - DNA, 389 bp, Homo sapiens
cccacgcgtccgcccacgcgtccgctgtgtcctatacaggttactgtttacgtaactggtcagctgttgctgagtgcttggtggcctgatttcctgtgctactggaaatgactgcaggccgaaccagtagggcaggaggccaccacgcgtgccaggtacctgtagatcccatgtggttcagggtgaactggagaggggagagctgggtggtggcgaaaggggtgtcaggccatggagagtggcctgaggctggtggctttgtgggtggcccaccttggctggctggagttggcactaggcaaagagagctgggggaaagggccaggatgtgtttcatgatttggccttggtgggatagaaaatagccccagaatagctcgagccctccc

SEQ ID NO: 4007 - DNA, 472 bp, Homo sapiens
  misc_feature (1)...(472): n = A,T,C or G
caggatggctgggcacagattggtgttggtattaggagatctgcacatcccacactcggtgcaacagtttgccagctaaattcaaaaaactcctggtgccaggaaaaattcagcacattctctgcacaggaaacctttgcaccaaagagagttatgactatctcaagactctggctggtgatgttcatattgtgagaggagacttcgatgagaatctgaattatccagaacagaaagttgtgactgttggacagttcaaaattggtctgatccatggacatcaagttattccatggggagatatggccagcttagccctgttgcagaggcaatttgatgtggacattcttatctcgggacacacacacaaatntgaagcatttgagcatgaaaataaattctacattaatccaggttctgccactggggcatataatgcctttgaaacaacattattccatcatttgtgttg

SEQ ID NO: 4008 - DNA, 464 bp, Homo sapiens
  misc_feature (1)...(464): n = A,T,C or G
ctccaccttactaccagacaaccttagccttaccatttacccttataaagtataggcgatagaaattgaaacctggcgcaatagatatagtaccgcaagggaaagatgaaaaattataaccaagcataacatagcaaggactaacccctataccttctgcataatgaattaactagaaataacttanaaaaaaaaaaaaaaaaaaattttaaaaaaaaaaaaggggggggcctttttaaagaatccttgggggggccaaatttatcggggggtgggaagttaatagttttttccttatgggggggggtattaaaacctacctgggaattttgggaaagaaaccttcttttgggggggggaaaaatgggcccaacccccccaaaaaaattaaaggctttaggggaaaaaaaaaattttaagggggaaagggggaaaaacacccgctttatgtttgctggttgaag

SEQ ID NO: 4009 - DNA, 406 bp, Homo sapiens
  misc_feature (1)...(406): n = A,T,C or G
cggacgcgtgggctatgaacacagctctgccaccttcttgattttcacccagtgaaattagttttggattcccaacctgtagaactgtaaagtaacaaatttgtgttttaaggccaggtgtggtgtctcacncctgtcatctcttctctttggttttggaatggcgaggaggtataatcatttttggactttaatccaaaaccagtttgggcagaataccgagacttcatttctacacctaaaaaatttgggttttaatgccatgggtggggccctccttgtttttttttgtggggggttgcctttttccgtgggaaccggggattttttttgttggggaggattttttttcctgtttgaggattatttttttcctttttcctaaggtatatatatttttataaaa

SEQ ID NO: 4010 - DNA, 427 bp, Homo sapiens
  misc_feature (1)...(427): n = A,T,C or G
cccacgcgtncggaggctgttcgcagagctgnggaagatgantggcccagacttggatctgagctaaaggacagtattccagttactgaactttcagcaagtggacttttggaggnatggtntttatttgggccgggtttttttttggtgggggaaggaattttggactctcatacccttgaattatcagaaaaaaatttccagctcaaccaagataaaatgaatttttccacactgagaaacattcagggtctatttgctccgctaaaattacagatggaattcaaggcagtgcagcaggttcagcgtcttccatttctttcaagctcaaatctttcactggatgttttgaggggtaatgatgagactattggatttgaggatattcttaatgatccatcacaaagcgaagtcatgggagagccac

SEQ ID NO: 4011 - DNA, 410 bp, Homo sapiens
  misc_feature (1)...(410): n = A,T,C or G
attcgtaagaattaacatatagaatggtctggtcagtacatttataatttatctatgcatgaaaaagtattgttttgtttgaaacatgaatttcatagcaagctgccatagaaaggaacgcaggctgttctagaccttcaactgcctaaattatacaaaaattcattttaataaactcaattattagctatttattattcaaagacccatatttaaatcctttgctgaccatgttgacatatatcagccttcttctagacaaactgtcaactctcaaccatcttgacagtagaagtgacagtaaaaaatgttgaatgatcagagattatattaaaataaacatgtaattttcaagtatttttgttgtgcttttataatattaattctagatcagatttattttatagccn

SEQ ID NO: 4012 - DNA, 403 bp, Homo sapiens
tttaacttgctcttttttttattttttcactaattcccttttgtttttctctgataattcttctctttcctgagcctctttagagcagcacttacaggattgcctctgtaaagccttattcctgtcccagaaaaggtaatccaaaaagtctctagtatccactaaaaggtaacccaaaaatctctagtatccactggctttctccagtgtggaagctttcccctccacctcccatagatcactggaaaggacccgaggcctcggttctaatccctggcttatcactaactgctgtgtggctttggcttgtcccttagtctctgtgagactgctgcaccctcatctgtcaaagatggaactggacttagttgagctctgaggtccctgtggacttggcccctcc

SEQ ID NO: 4013 - DNA, 409 bp, Homo sapiens
ctggagtctcagaagctacagtctctgattctttggattgatatgaacacattatcaaaaagttacttatctgaagtctggggcttctaaattcaatctgatgctatacccagtgcagtataaatactgcttacatcaactcagggagctgagaacacaagtcagtggagcttgggatttgagagaaaactcacccacaaacctccagttacaaacaagagagcgcacacaattggctctgcaggtgccccgcttcgttgcctgctgttccaaggagtcactggaattgtacttcactcttcacttctactccagatctgatgaaagaaaaactttagacacatttaacagagtttaattgagcaaggaaaaaaatgatttgcaaattgaacagccttcagaatcaaag

SEQ ID NO: 4014 - DNA, 445 bp, Homo sapiens
gctacctcagagctgagctgcgaggtgtcggaggagaactgtgagcgccgggaggccttctgggcagaatggaaggatctgacactgtccacacggcccgaggagggctgctccctgcatgaggaggacacccagagacatgagacctaccaccagcaggggcagtgccaggtgctggtgcagcgctcgccctggctgatgatgcggatgggcatcctcggccgtgggctgcaggagtaccagctgccctaccagcgggtactgccgctgcccatcttcacccctgccaagatgggcgccaccaaggaggagcgtgaggacacccccatccagcttcaagagctgctggcgctggagacagccctgggtggccagtgtgtggaccgccaggaggtggctgagatcacaaagcagctgccccctgtggtgcctgtcagcaagcccg

SEQ ID NO: 4015 - DNA, 432 bp, Homo sapiens
agcgttgcaacgaaatcctatatccagtttcctgtaatttaattgaagaaaaatacatccaaataaagactttattattaacagaccagatagcatcagaaatcatgtgactgttatgattatcagaatatgtcttaactttttagggcaaagttaacactgaaagttctagcttaagtgttgaaacttttgtgggaaaaaaaaatcacttttgaaactcagacttcagtgtatacccaataatttaaaattatgtgaaatgttttaaatttgtgaactcgtaattactgttttaatgattcagtttcttcagagtggtaattgtataaaattgctattgcagctttatattcaatatgatgtgcctgtaaaccaaggagttttccctgtttgtaaaaagacattgtagataattgaatgtttgattttaga

SEQ ID NO: 4016 - DNA, 454 bp, Homo sapiens
  misc_feature (1)...(454): n = A,T,C or G
tatgcggcganttnccggaaagggnccatgactgagcttgctcggagtattgatgaagtccattnttctatatttgngnntaanatcccaacaggggactttggactggagactcctattgtccgggccaaaatttcctaaatgtggttgtggggtgggggttttttttntaattttttttcttcccctcctttgacagaagccaggcttgcatcactgaagactccctgcacttagatctgctttttcttcttaatctttaactaacgttcctctcataaccttttgagtgacttataattgcatagtatcagcttcttggaaaacctgacttgataaactatcctatttgaaatacagatatatacgcatttaacaatttttgacattattagcacattgagtattaaatagtatctgaagagagatacctttaaaaatgaaaacaccttcc

SEQ ID NO: 4017 - DNA, 524 bp, Homo sapiens
  misc_feature (1)...(524): n = A,T,C or G
ccgccccccccnnngttttnaatagaacgccctgctgnacnatagaaggacctcccgggncgacccacgcgtccgaggcgcttcgggagccgcggcttatggtgcagacatggccaagtccaagaaccacaccacacacaaccagtcccgaaaatggcacagaaatggtatcaagaaaccccgatcacaaagatacgaatctcttaagggggtggaccccaagttcctgaggaacatgcgctttgccaagaagcacaacaaaaagggcctaaagaagatgcaggccaacaatgccaaggccatgagtgcacgtgccgaggctatcaaggccctcgtaaagcccaaggaggttaagcccaagatcccaaagggtgtcagccgcaagctcgatcgacttgcctacattgcccaccccaagcttgggaagcgtgctcgtgcccgtattgccaaggggctcaggctgtgccggccaaaggccaaggccaaggatcaaaccaaggcccaggctgcagccccagcttcag

SEQ ID NO: 4018 - DNA, 457 bp, Homo sapiens
  misc_feature (1)...(457): n = A,T,C or G
tctccggtcgcctacgcgtacgcccacgcgtccgcccacgcgtccgccacgcgtccgctatatagaccctgccttagtagagggtgggactataaccttagaggccagaacttgatccagaagttgctgtccacagaagtgctttctatttcatcatttttgtttctaggggtctttttctgtagccaggtcttcccaaggattttagtatttgcattggagttgaggtttactctaatgatggtggcccagctgtgcccagaggacagccaggcaggccctgggagggagtttagaaagacagtcctggtgaatgggcttcaagtggtcacaaagagggtggctgtgaggtgaccccagacactgcagaacgaggtgcaccctctgcgttttggatgtccttggaatgtgggagcctanaaataaccctgtggatggaattggggcagcggctgct

SEQ ID NO: 4019 - DNA, 465 bp, Homo sapiens
  misc_feature (1)...(465): n = A,T,C or G
caatagctcaantttgcggnaaannatctgttcggaggattgaccgtgtggtatgagaagttaacactaatttatccccaaggncaaagactcaggggggtggggagagaaaagggagcctgcacaggagtacagtgaacggngcgaggcgggcgaagaaacggggagtccccggtaggagagttcaatgaggaacactcctcagcccagtgaaatgttgcagagaaagccaaatagacaagggctgcaagggtgagtgacatcctcgcctccccacgcccccatgcattgtcttgaaggaggtgatgctttggcatgatttgtctgagaaattctaccaggtcttacttcattttgtcagagggacctgtctaaaggatactttagcaggctaaagtttcaagtctccagatactttctcataatcatcaaacatactctactctanaatagcctaaggacttn

SEQ ID NO: 4020 - DNA, 448 bp, Homo sapiens
  misc_feature (1)...(448): n = A,T,C or G
cccacgcgtncgccttcatcgacttcatgactagagagacggctgacaccgacactgccgagcaggtcatcgcctccttccggatcctggcttctgataagccatacatcctggcggaggagctgcgtcgggagctgcccccggatcaggcccagtactgcatcaagaggatgcccgcctactcaagcccaggcagtgtgcctggtgcactggattacgctgcgttctcttccgcactctacggggagagcgatctgtgatgctgagcttctgtaatcactcatcccatcagaatgcaataaaagcggaagtcacagtttgtttcctggaaactttgacaagctttattaagttgagagagagagaggggaaaaaaaaaagcctttcgtagttcagtaattgccagcaatataacacggctaaaaatgaagttttacagtatatgaan

SEQ ID NO: 4021 - DNA, 433 bp, Homo sapiens
  misc_feature (1)...(433): n = A,T,C or G
ctccaccttactaccagacaaccttagccaaaccatttacccaaataaagtataggcgatagaaattgaaacctggcgcaatagatatagtaccgcaagggaaagatgaaaaattataacaaaaaaaaaaaaaggggggggccgtttaaaagaatccttgggggggccaaatttaacgggggatggcaaggtaaaatttttttccttatggggagccgtataaaaacttacttgggaattttggaaaagaaccttttttttgggggggggaaatattgggacaacctccttacaaaaattaaaggttttagggaaaataaaaatttttaaggggaaaagggggtaaaacaacctgcatatgttggctgttggaaagttttgtttccggagtgtgtttaagaaaaattttttccccgggaggtttgtggttnnn

SEQ ID NO: 4022 - DNA, 432 bp, Homo sapiens
gtggtggcggcggaggctttggcagctcgggactgagtgcaagaatcagcatgattcttcagaggctcttcaggttctcctctgtcattcggtcagccgtctcagtccatttgcggaggaacattggtgttacagcagtggcatttaataaggaacttgatcctatacagaaactctttgtggacaagattagagaatacaaatctaagcgacagacatctggaggacctgttgatgctagttcagagtatcagcaagagctggagagggagctttttaagctcaagcaaatgtttggtaatgcagacatgaatacatttcccaccttcaaatttgaagatcccaaatttgaagtcatcgaaaaaccccaggcctgaagaaataaagtaaaattaatctggtaatttgtcacggattacttgtacaactagt

SEQ ID NO: 4023 - DNA, 465 bp, Homo sapiens
  misc_feature (1)...(465): n = A,T,C or G
acatgcgcggaattttngggtcgacccacccgtccggttttgaacactgaaaatgaagggtgaaatctctcatgttggaaatgatattttgctaaggctgccttcctctttttgcaagatatgtggccccttctgtatgtttaaagctctgcccccaagaagagacatatgagatcaaggacaagcttctgtctttcatgtcttggtccatttaagctgctgtaacaaaatgccatagactgaggggcttaaacaatagaaatttatttctcacagttctggaggctgggaagtccaagatcaaggtgctggtagatttgatatctggtgaaggccatctttttactgtgccctcacatggcaaaaggggcaaacaatcttccttgggcctcttttatagggatgctaatcccattcatgagggcttcatcctcatgacctgatcatctcccaaaggccccaccn

SEQ ID NO: 4024 - DNA, 445 bp, Homo sapiens
gcagaacaatcacttgaacccaggaggtggagggtgcagtgagccaagatcgtgccactgcactccatccagcctgggcaacacagcaagactccaactccaaaaaaagaaaagtcaagttggcattcgtttaatgatgctttacatgatgtggtttagctgaagcttgcttttctcaacatgactctgacactgattgctagggtaagggttcttttgagtatgttactcctacatgttattcctacccgtgttgcgcctcgtgataccacactttgctgcactactttatttgaactaaccttaattcataaggccccttggtctccatatggtgtgactgtatcacttttgtaataattatagtactaatgcacacatttactgagtgcaggcaattgagcagacactcttaaatgctgctctctcatttaatacagcacag

SEQ ID NO: 4025 - DNA, 428 bp, Homo sapiens
ccgaagagaagttgaagatctgaaactccgtcttcagatggctgcagaccattataaagaaaaatttaaggaatgccaaaggctccaaaaacaaataaacaaactttcagatcaatcagctaataataataatgtcttcacaaagaaaacggggaatcagcagaaagtgaatgatgcttcagtaaacacagacccagccacttctgcctctactgtagatgtaaagccatcaccttctgcagcagaggcagattttgacatagtaacaaaggggcaagtctgtgaaatgaccaaagaaattgctgacaaaacagaaaagtataataaatgtaaacaactcttgcaggatgagaaagcaaaatgcaataaatatgctgatgaacttgcaaaaatggagctgaaatggaaagaacaagtgaaaattgctg

SEQ ID NO: 4026 - DNA, 393 bp, Homo sapiens
caactgcaaacttgagagggagagaaagatggatggaagagggaggagaggaagggaggagagagagacggatgtgagaagaaaagtaaaggagaaaagtctgcctccatggatatgggacagatcatttattaaatgtatctactctggccgggcatggaggctcatgcctgtaatcccagcactgtgggaggccaaggctggtggatcacctgtgggaggccaaggctggtggattaccttaggtcaggagttcgagaccagcctgggcaacatgatgaaactccatctctgctgaaaatacacaacttagctgggtgtggtggcacacgcctgtggtcccagctactcaggagactgaggcaggagaatcgcttgaacccgggaggtgga

SEQ ID NO: 4027 - DNA, 403 bp, Homo sapiens
atcagcatggccataagtgcaatgattttcatatatgcctctgcccatttcaaatatatttttgacatgaataaatctaacagtatacagaataattcatgtaagaccctaacgtgtacatgtgaaaaagcatttctatataatgtgaggagcactggccatcaattagggaaataaaggtcatgtaatattgcaaattttcaaaatagagccctgcaagataactgcaatcataccaaaaactatttgagtaaatggatttttaaagcaatttttgtttagaagagtttatatttcagaagcagaaaatgtcaaatgatagtctttgtaaatggtggtgcaccttctctatgcacatctgtcttttacatcagaaagagctgtggtcatgctaaaattagaa

SEQ ID NO: 4028 - DNA, 407 bp, Homo sapiens
  misc_feature (1)...(407): n = A,T,C or G
aagaatttcaaggccacaactccatatttgaagtatagtgctcataaaattaattgcaaggaaatccatcactatgattcagtaagtaaacaaattcaaggtgtcacatcatattgctttttatgcttttgattttagtaatatcctttcacattcataatccagatagagagataagcaagattgtatccaccaagcctcctctttattgatcttccaaactgaaaaacatagctgccattttagtcagcagttaaactttattatagaatatttttataccttttctgctaacattacctgcaactcccatggtgatgctcaaatcccatttgggaattcagtgaactagcagaacgaaattctaagagactggggcttgttgatgtgtccacgctttccatggn

SEQ ID NO: 4029 - DNA, 429 bp, Homo sapiens
  misc_feature (1)...(429): n = A,T,C or G
caggttcaagcgattctcatgccttagcctcccaagtagctgggattacaggtgtgtgccacaatgcccagctaatttttgtgtttttagtagagacagggtttcactatgttggccaggctggtctcgaactcctggcctcacgtgatctgtccacttcagccctccaaagtgctgggattacaagcgtgagccactgtgctgggcccgaggccctgacttcttgctgtaactttccatgcattttttttaaaaggagcagtgtggattttcgcaccctttgtgaactaagttcaatgtgctctatccaaatttgcctaattgaactataagaaagtaataattccattttctatcccctcagggactgaacaaatggaaataactcccaggcagtatcaggtggtcactacagagacttccacaaan

SEQ ID NO: 4030 - DNA, 426 bp, Homo sapiens
gcgcccacgcgtccgaacacggagaccaccccagctacgaacagattcaggtactgggataccctgatgggagagggagatgtgggaggcaggtacagacatggtcatctaaacatagttgacctactcctctaatttttaaaaaagacatagggtttgtgtttttttgtttgatctgcagttgcttttatggaagaacaaaatcattcactgtagactaaggtagggtagctctgtcattgtatgcgaaatttgccgcgggacttttgtttgttcacattttgaacgctcttcttggattccttaggctttgctttcccttacatttttaagctagacttagtgatgacctgtagttgtaggttacccaaatgctccgcaagtaagcctgggagatgcccttgcagaacctcatcacctgccgtt

SEQ ID NO: 4031 - DNA, 416 bp, Homo sapiens
gccgccctttttttgataagaagtatttaaagtttccttgggaactagctactcggcagccacatttcccaaatgctgaacttgggcttttaatgttaaaagccttaccctcctttgggtactcaaaagaaaaatcagaggggattctggttaacttgagaagccaagaaagatcatttttagcaagtatgccttccatccttggcagaggcttcccagcatcctaggctcagcttaccgggtgataggccccataatacacacacatgagcagggtgagaaatgcttgctttatagctgctccaccctcatctccagagattttgtgtctatggttgtgggtctggaaacctggcaggaaccacttctagagtacctttgctaaactcttttagaattgaggccccaactttgat

SEQ ID NO: 4032 - DNA, 480 bp, Homo sapiens
  misc_feature (1)...(480): n = A,T,C or G
aggaggccggnnnnnnnnaccttgaancctacggcactgcgacggaacttccgggttgacccacgcgtccgtttttagcagagatggggtttcaccatgttagccatgatggtctcgatctcctgaccttgtgatccgcctgcctcggcctcccaaagtgctgcgattacaggcttgagccaccgcgcccggcctggcatgaactttttagagagttatgaaaaataaatgcgtttgacactcctgattcaccacttgtgagaggcaaggagtttagtgactctatacataatacctttgactctatgtggagaacaaaggaacataattaagttggttggttgttcctaagttcactggacaaagtgaatccaaagggattctaactcctcgctccagaagcagatactgagcctcaaatctaagactgtcctaagtgagagtcttatctcctgtagagaaagaactgaaattgtggan

SEQ ID NO: 4033 - DNA, 385 bp, Homo sapiens
cccacgcgtccgtgggtgacaggatctatactcccaaacttcagcatcatgccatatacccatgtaacaaacctgcacatgtacccccagaatctaaaataaatgttgaaattatgtaataataatcatttaaatgttagcccatgagatggtgaaatattgttaccaagacaactttgacaaagtgggagtgcactgaccagaagcagatcatgcgatggtgaggatataggctgcctcccttccaatttcagaaggaaacacggacgtgggaccagctgcactcaggccagcagggtacttgtccttcttacaaccacacatattgtgaatttgtatagcagttaacattgctgaagccctctcaggaatatatgtcatggtc

SEQ ID NO: 4034 - DNA, 427 bp, Homo sapiens
acaagtatcacgagaagcaggcacaggtggaagccacgattctcaattttaaggtcgaggctctgtcccccggagacaggcagcagatctacgagaaaggtctagaattacggagtcaacaaagcaaacctcaagatgcctcttgtctgccagcgttgaaagtttccgatattgaacccaccatacctgtcacagagttggacgtggtcctgacagctggagatatccctgttcagtactgcgcccagcccaccaatggcatggtgtatttccgggccttctccagcctgaacacactccccgaggagctgaggccctatgtgcccctcttctgcagcgtcctcaccaagctgggctgcggccttcttgactaccgggagcaggctcagcagatagaattgaagaccggagggatgagtgcttctcc

SEQ ID NO: 4035 - DNA, 443 bp, Homo sapiens
ggagcggatcttgatgctagctctgtgtgcagtgtaattttatgaagagtcccgccccctccatacgggaggaaacgtgtgtccctgggccctcagccaagcctccactatctttttggcccagacggatttcccaggtcacaagtggctggagacttcctcttgaaaaacatttgccgtcgtttttccctggcagagcccctttgaccctggctaacaaggacagcctgacttggatcccactatgcaggaaggaaggcgactcttccccgcacctcttgctacgattaggacttgcgacttggtgaaaacaggaatcaaaacttgggcctatttctcctgaggtctgcttgcctagaacaattcgtaacgatgaatcttattaaaaagagaaagtcctccccgactttatctttttccgcccagaatccgataagggagac

SEQ ID NO: 4036 - DNA, 425 bp, Homo sapiens
cggacgcgtgggaatggtttgcctttggtagcagggagaggtggaggattgcctatgagaaacagcggcagccccccaacaagaccatccatctcggtgtctgtcttggtctgatacgtcggaccaggccatgggctgagggaggaggctcgatgctgacatcgcacaggccctgagaggccagagccccccattcctaggcaggcctgtcttgctcgcccttgcatctgggaagcagtgggcagggtgggctagactcttccccaggatcctcacagtgggccctgtgggcctggctgctccctccaaaggtcagaggcaaattggtgaccaagtgaatgtaccagagcgggcaatggcattacatgactgctaacagaaacatggcaacaaccatttcttctccaaggaacataaatagaaga

SEQ ID NO: 4037 - DNA, 476 bp, Homo sapiens
  misc_feature (1)...(476): n = A,T,C or G
ttgaatcagatncccctgcggactgacaccccacttccagggncgacccacgcgtccgcgaaagcctgcagagagcagaacatggaaggagacttctcggtgtgcaggaactgtaaaagacatgtagtctgtgccaacttcaccctccatgaggcttactgcctgcggttcctggtcctgtgtccggagtgtgaggagcctgtccccaaggaaaccatggaggagcactgcaagcttgagcaccagcaggttgggtgtacgatgtgtcagcagagcatgcagaagtcctcgctggagtttcataaggccaatgagtgccaggagcgccctgttgagtgtaagttctgcaaactggacatgcagctcatcaagctggagctccacgagtcctactgtggcagccggacagagctctgccaaggctgtggccagttcatcatgcaccgcatgctcgcccagcacagagatgtctgtcg

SEQ ID NO: 4038 - DNA, 422 bp, Homo sapiens
  misc_feature (1)...(422): n = A,T,C or G
cggacgcgtggggttggcctatacgccccttgatgagaaaagccttgcattattgttgggctatttgcatgatttcctaaaatatctggcaaagaattctgcatctctctttactgccagtgattacaaagtggcttctgctgagtaccaccgcaaagccctgtgagcgtctacagacagctcaccatttttgtcctgtatctgtaaacactttttgttcttagtctttttcttgtaaaattgatgttctttaaaatcgttaatgtataacagggcttatgtttcagtttgttttccgttctgttttaaacagaaaataaaaggagtgtaagctccttttctcatttcaaagttgctaccagtgtatgcagtaattagaacaaagaagaaacattcagtagaacattgtattgcctagttgn

SEQ ID NO: 4039 - DNA, 393 bp, Homo sapiens
tacatctttaataagcatcaattatgtgcctgttctaggtctcgagaattcagcagggacaaagtagagggcccttgttttatcctttgaatctgtaaaagaagctaacctcataatgtgacatgaggggcactagccctgcaatggcggcaaaatttcaccattagactttcattctttgaacaaagctgtttatcttattctaaaatgcaaatgtgcttgagcacagtaaagctttgtcattcatggtcataaacaattttgggtaaatttatttatatgatgagttccaatatgacaacccaagcttatctagatgagttttgtggcatccttgataggggcttttatagacaggaaaaattactaaggggatactgtgattttcttaat

SEQ ID NO: 4040 - DNA, 427 bp, Homo sapiens
  misc_feature (1)...(427): n = A,T,C or G
ctatcatacctaaacctttgttttgattcatgannnnnttaggcagttttgtttgtattttgtaactatttgagaagaaatagtttaagcaaaagtaatcttcagtcttgccattgtcccaagtcataaaaaattctgaaataattgtattttgcattaaaaatgtctttatttaaactcggcatggtggcctgagttgtagtcccagctactctcaagactgaggtggaaggatcacttgagcccaggagtttgaatctagtctggcctagacaatataacaagaccttgtctctttatttattttttatctttatttttaaaagtcttgatttaataagacttcaatgatcagttcaacttgaatttttaccatttaaaatgttaagacgtagtaaaagagaaaaatagaaaaagtcacttgaca

SEQ ID NO: 4041 - DNA, 389 bp, Homo sapiens
  misc_feature (1)...(389): n = A,T,C or G
tttcttttcgctgctggggatgnggctgttgctgtgcagctgcggatgccccgagggcgccgagctgcgtgctccgccagataaaatcgcgattattggagccggaattggtggcacttcagcagcctattacctgcggcagaaatttgggaaagatgtgaagatagacctgtttgaaagagaagaggtcgggggccgcctggctaccatgatggtgcaggggcaagaatacgaggcaggaggttctgccatccatcctttaaatctgcacatgaaacgttttgtcaaagacctgggtctctctgctgttcaggcctctggcggcctactggggatatataatggagagactctggtatttgaggagagcaactggctcataatttacg

SEQ ID NO: 4042 - DNA, 478 bp, Homo sapiens
  misc_feature (1)...(478): n = A,T,C or G
ttaaacctgataaccctcaggnttcgantaacatntgcagggncgacccacgcgtccgaatgcctccctctcaaactgaaatattcatttttttagtggagtatttgattagagagaaggtaaggcagaaatacagtctacactggcttttaaaaatgtaaagccaatttccaaccggaccccaaatagtacaggttgaacattccgttccaacaatccaaaaccccaaatgctccaaaatcttaaactttgagttccagcattccgtcagaagtggaaaattttacacctgacctcatttgacaggtggcagttacagtgcaatcaaaactttgttccatgcccaagattattaaaaatattggataaaattaccttcaagctatgttgtataaggtgtatataaaacaaatgaattttgtgtttagacttgggtctactcccaagatacctcattatatatatacaaaaatccccn

SEQ ID NO: 4043 - DNA, 309 bp, Homo sapiens
ctccttcagccaacatgatggtactgaaagtagaggaactggtcactggaaagaagaatggcaatggggaggcaggggaattccttcctgaggatttcagagatggagagtatgaagctgctgttactttagagaagcaggaggatctgaagacacttctagcccaccctgtgaccctgggggagcaacagtggaaaagcgagaaacaacgagaggcagagctcaaaaagaaaaaactagaacaaagatcaaagcttgaaaatttagaagaccttgaaataatcattcaactgaaaaaaaaaaaaaagg

SEQ ID NO: 4044 - DNA, 494 bp, Homo sapiens
  misc_feature (1)...(494): n = A,T,C or G
tgcgcctnnnnnnaaatgagattcgtctcacaggcccgcaananccgggtcgacccacgcgtccgctcatctttagtttaaccttacgaaaataattttatcgttctcaactactctatctaacaatgataatgaaagtattttcatagaatagttaaggatgtgtcccagaggcatttcaattgtttcaagtttgggggtaaagttactctgagtaaatagtgtagctacatagcaggagttttgaccaaaaataatgaaataacaactcaacaatttattccactccaagtgcctttgaggttagaatatttgtttcattaatttctgtatctatcacagcatcttaatttttaattttaatttttgtgggtacatagtaggtgtatatatttatggggtacatgagatgttttgatatagacatgaaatgtgtcatacttacatcatgaaaaatggggtatccattccctcaagcattatatcctttgtat

SEQ ID NO: 4045 - DNA, 525 bp, Homo sapiens
  misc_feature (1)...(525): n = A,T,C or G
ctccgtacacgcacaactacgacgtatttgttatcgttatactatccctatcaccaccacaaggcccacaganaccaatttgatagcctgttagacagcactcgcaaaccccggncgacccacgcggccggagccagaaaactccccagctaaacacccggaatatttcatacatcacaatactctatactgtgatgatcacagctgccaaggctacctaaaagaagacagttatctcatatttggctgccagctttttatctttctctcgaccacttaaaacttcagacttcctgtcctgctggtatcatggagaaagtccaatacctcactcgctcagctataagaagagcctcaaccattgaaatgcctcaacaagcacgtcaaaagctacagaatctatttatcaatttctgtctcatcttaatatgtctcttgctgatctgtatcatcgtgatgcttctctgaagttctgctacaacctctagatctgcagcttgccacatcagcttaaaatctgccatc

SEQ ID NO: 4046 - DNA, 511 bp, Homo sapiens
  misc_feature (1)...(511): n = A,T,C or G
tgaaatttaataaaagataaataaaagagtctatctcaataaaagatagcctcgtcctggtaaatcaacaaaatatgaaacctaaatctggaagatgaatgaatgttttttgtgatcctctgagtgcaaaggtagatttgctgtcttctggtaataccaggttttctgactccaccactttctccctggggcttgagagggtagcaaaagaaagagaaacacagtgctacccagtgggccagggcaacccccagtaccactcactgcacagcactattcccctcctctaattcattggtcttagtccaatatttcatggtagaattcagcagattcttccttcttaggagatgacattattagtcataagtcctcaacaatcaccaccnnnggaaannccannaccactcactgaaaaggggggggcccttttatagttccttggggggccaaatattccttggagaagaagaatatttttctctttagggaggctttataccctcggggg

SEQ ID NO: 4047 - DNA, 373 bp, Homo sapiens
agccagaatagatttccactgtctagacagatatattgcatttaaccaatccctagttcagttttttcattatcatgaggcaggtcataaagatcattaagtgatgagcatcataagttaagatggtagacattctaaatctctataaatggcgacacagatttatttatggttaatataggaagttaaaaatctatgcccagtcttgacagatggagctttttggttataaggtggttatcccaaaaccacaaagcaaaatcataaaatgaacagaactgcgggggtgtgtctttcttccttccctccttccttcctccctttctttttttttttctttttctttccaggggggggccatgggaacataaat

SEQ ID NO: 4048 - DNA, 419 bp, Homo sapiens
cccacgcgtccgaagccagtgatctctctgactttcaatcagtttccaagctaaaccagggcaagccatgcacatgcataggcaaggaatgccagtgtaagagatggcatgatatggaagtatattccttttcaggcctgcagagtgtccctcccttggctccagaacgaagatccacacttgaggactactctcagtcgctgcacgccagaactctgtctggctctccccgatcctgttctgagcaagctcgagtcttcgtggatgatgtgaccattgaggacctgtcaggctacatggagtattacttgtatattcccaagaaaatgtcccacatggcagaaatgatgtacacctgatagcaagaagctaattcatatgctttaaaccaatgaaggcttgtcaaagagatttagtta

SEQ ID NO: 4049 - DNA, 403 bp, Homo sapiens
cagacttcaaatgggggtaaaatacattaaagtaattatatcagaaaagaaatacaggaaattgggaattaatatttatttataaaaatactaaaatgtgttcacagatctaaaggggcattttgaagtatttttaaaaggggtttggaggtagcatccgaaatcatataaagattggggataaatgttgaatttttgagatatggaatgtctattaagaggtggaataaagattgtatgtgtcatactctttggaggaaagtggtcccccaaaatgacagcaattcctaaggagtttgtgaaggggtacatgttggaatcatatagagtaaatatcataaaaactatccatacattactgttgcattggcaagagcacatcatttagaatatacatccaatt

SEQ ID NO: 4050 - DNA, 511 bp, Homo sapiens
  misc_feature (1)...(511): n = A,T,C or G
cggacgcgtgggttaatgacattcaaaaatttatggctagtgatatatataaagtaaaattttctttgcagtaaaatatgccctttattatagaagggaggatataaggaaccaacagtttgtatgaaaatagctcaaataatatcttttattttgattttaatatttcttattttggtttattagtgtcttagaacaaaatggccttatataatgaagcctagttatgctggactgttttgatctcttttaattgttctgacagatagttggggatgagagccgaataaggtttgcctgaaataactgacactatataatttctgctttggcaaatactaagatctaacttgtcattcctggtagaacaagctttatttttcgagcctagcaatgatctagaagcagatgttatctcagtgccttttgcaatttgtgtgtgggttttttttttaaaagcacacaatatttttggaaacattgattgggagaacatgtgctgtaattgacn

SEQ ID NO: 4051 - DNA, 419 bp, Homo sapiens
gcgtgcgccacccgtctcatacagcagctgccgaactgggcgtacgggcatgacctgcaggggaagctgcgaggtcgctaccacgagatctccaagcgaactcagcctcctcccaagctccctgtgggtcctagccacaagctctccaacaagtactattgcactcgcgatggccgccgggaatctgggcccccttgcatcatcatgtcgtcgcataaggcgctggtgtcaggcaagccagcacagagctctgctgtagctgccactgagaagaaggcggtgactccagctcctcccataaagaggagggagctgtgctcggaccaaccttacctgtgacactgcaccctgacggccacccgactacttggcctgcttggatatcctccagggagaatgtgacctaatttatgacaaat

SEQ ID NO: 4052 - DNA, 575 bp, Homo sapiens
  misc_feature (1)...(575): n = A,T,C or G
aggagaggaacccgttgactagcatcaatacccggcccgacccacgcgtccgcaccattgcactccagcctgggtgacagggcgagactctgtctgaaaaattgagagagagtgaaagaaatacattgttttcaaacctaccaaaagatcttcagccttacacataataagagaatcacaaacttaaactgtactgaagtagcacttttaactttatcagattggcaaaaattctacagtgtgacacttagaaattgttgaccagttgtggaaacatcagcagtgtacttctgagagtacagaatggcataaccctcatgaaggccagttcggccagttttcatctatcgagattacaaatacaattaccctttgacccagcagtctggctttggcaattactcctgcagatacatctgaatacatatgcagtgacctatagagtaggtgtctcattagaccatngtttataatagaaaagactggaagcaattcaagtatccactggtgaaagactgggtaaataaactatgatccacttttacaatggaatatngngcagcattttaaagaan

SEQ ID NO: 4053 - DNA, 470 bp, Homo sapiens
  misc_feature (1)...(470): n = A,T,C or G
cttatatatgacatcacgatggatcacaggtctatcaccctattaaccactcacgggagctctccatgcatttggtattttcgtctggggggtgcgcacacgataacattgcgagacgctggaaccggagcaccctatgtcgcaatatctgtctttgattcctgcctcataaaaaaaaaaaaaaagggctggcctctttaaaggacccttgagggggcctaagtttacccgggcatgcgaagggaaaactttttccttatggggagacgcattataaactaccttggaactatggagaagaacccttatttctgtggtggaacttgatcggacaaacaacctaccgattttataacttctggggtgaanacagaaatttaaaacgttatttggggcaaacatactgcgtatatccttttgttttaaaaaaattaccncaccccagggacatctgagtcaggagttcgaga

SEQ ID NO: 4054 - DNA, 512 bp, Homo sapiens
atttcttgaatgatagaagacgtgctcctaaggaaatatgctatactttttaaattagagataaatgctttataattttacgtctagataagcaccctgatattgcaggtcaaaaaattagataaatattgatagaaagctggcatcaaagtacctaatgaggtcttatttattatctcaaaaatgggaaaattcagtgttagtgtatcctctctcacaagtgggggatgggggaggttattcagtgcctatgaaattttctctctactataaattctcaaggaagaaaatgttagggaagcaacaatgtgacatctaaagcaataatatgatgggtgtgaccacaggtgtctcttgccatctgaactcctatgaaatttcaaggacccatactggaagtatgtgcagataacccagagccagctgaggaccacattttcattattgctgcttccttcattattggcttttattatgagctaacattgaagttctatctagaacaatgtata

SEQ ID NO: 4055 - DNA, 450 bp, Homo sapiens
tctggttgagagttagagaacttttaaatttctttagccagacaggtctctatttttttaagttatccaggactccaagaaccatagttactgaaaagggagtcctgatacatctaatattggtagcatgtaacagtgtttgacaaagagtaagtaagcagtattcttgggagtcagtgttatgtgtttcagcagagtattattttgtatatgtatgccattttctccctgcaaagcagctcaacaagagaaaaagctctagttatagggcttaaattgatttctatttcaaataatttcctaagagattctagagtagaactgaagagtattctattggaaaagtgaaaggaaagaaatgtaattttctttgaacatgaaaaagaaaacaactttgagagtagtcatttagcagtagatgtgcattattatgagaaaacagttctataa

SEQ ID NO: 4056 - DNA, 449 bp, Homo sapiens
aaagcaaggaagacggagtccgagcctcgggggctcctagcaacgggccggggcgggagttccatggagactggggagcgcgcccgtctcatcctcatccttgtcctccagcttctccttcgcatccgacgcaaccggcagcagcgctgccgccgcgtcctcagccaccgctccctcttcccacggatgtgatcttcgtggtggaaagctaaattttaaaaccaccccaatggatgcagacagtgatgttgcattggacattctaattacaaatgtagtctgtgtttttagaacaagatgtcatttaaacttaaggaagattgctttggaaggagcaaatgtaatttataaacgtgatgttggaaaagtattaatgaagcttagaaaacctagaattacagctacaatttggtcctcaggagaaattatttgcactggagcaacaagtg

SEQ ID NO: 4057 - DNA, 464 bp, Homo sapiens
  misc_feature (1)...(464): n = A,T,C or G
tgatactcgggtgagnacacgnccggctgttgtttttgttgtggcctcatggatgagctgttacattacttagcctcagccttggagcagacatgggaagagaattttcttggtgaactgtgggaggagatggcgctgagcccccgacagcagaggcggcagcttcggaaacgccgaggtcggaagcgtcgttctgacttcactcacctggcagagcatacctgctgctacagcgaggcctctgagtcaagtctggatgaggccactaaggactgtcgagaagtggctccggtgaccaattttagtgactctgatgacacaatggtagccaaacgacacccagctctcaatgccattgtcaagagtaagcaacattcttggcatgaatctgactcctttactgaaaatgcaccttgtcgaccactcangcgcatgcggaaggtgaagcgagtgacatcagaggg

SEQ ID NO: 4058 - DNA, 466 bp, Homo sapiens
  misc_feature (1)...(466): n = A,T,C or G
tgtctactagggtgaggaaccgnccggttttatttttttctggctgtcggtctaaaagaggtttattttgctttctttaaaaaagggtctgcgaaggagaggtcctgatctaacttctaattttctgtatgccctgccatttgtgggaaatatttcttcgtttcagattgttgatgttattgttgggaaagacgaaaaaggcagaaagatcccagaatatctgatccattttaatggctgccacagaacctgtgatagatcgccaccgtctatatatgtgcttcgtgaaaccgatgaaaatcgaagattacagcgtaccttgcctagaaaagctgtagctcgcctgatgagcacaggaagaaagaataagcgctgccggttgcctggtgtggactctgtcttataaggcctccccactgaagaaaaagatgaaaatgatgaaaactcattaagcagttcctctgag

SEQ ID NO: 4059 - DNA, 438 bp, Homo sapiens
caaccttagccaaaccatttacccaaataaagtataggcgatagaaattgaaacctggcgcattagatatagtaccgcaagggaaagatgaaaaattataaccaagcataacatagcaaggactaacccctataccttctgcataatgaattaactagaaataactttgcaaggagagccaaagctaagacccccgaaaccagacgagctacctaagaacagctaaaagagcacacccgtctatgtagcaaaatagtgggaagatttataggtagaggcgacaaacctaccgagcctggtgatagctggttgtccaagatagaatcttagttcaactttaaatttgcccacagaaccctctaaatcaccacaaaaaaaaaaaaaaaaattgtttaaaaaaaaagagggcggccttttataaatactcttcgagggcct

SEQ ID NO: 4060 - DNA, 385 bp, Homo sapiens
atttatcatgacacctttatctttgatttctgagtgaaaggggtgtatattttgtagttaagataaatgagaaagttcctaatagtacaaatgcccttttccaggtttatctttgctatttgttgccatttttcttaaatatttgctttatttgtacccgatttctggaggcaaatagtgctgttttttcaaactcataatatagttacataaatgattgtatcaaagcattcttgctatcttattttctttcctacctgttgagtaagtagcatttcttgctcaccaactcatttatttgactaggttcagtgtttcctattaatgtgtttttttattttcctttggttgattttgaaaaatctgtcacaaataaggaagttat

SEQ ID NO: 4061 - DNA, 443 bp, Homo sapiens
  misc_feature (1)...(443): n = A,T,C or G
gattcagaagatttttacatgtaaagagataaagtaggttttaatgaggtttttgtttttgtttttttgcaatatattaagtgtttgtaaagcactaaaatattttaacaaaggccaggcacggtggctcatgcctgtaatcccagcactttgggaggccgagacgggtggatcatctgaagtcaagagtttgagaccagcccggccaatgtggtgaaaccccgtctctactaaaaatacaaaaataaactgggcgtggtggtgcgcgcctgtaatcccanccacgtgggaagctgaagcaggcagaggtttcagtgaggcgagattcatgccattgcactccagtgagactctctcaaaaaaaaaaaaaagggggggccgttttaaagaatccttaaagggcccaaagtttacccgtgcttgcaacgttttatttttttgtt

SEQ ID NO: 4062 - DNA, 421 bp, Homo sapiens
  misc_feature (1)...(421): n = A,T,C or G
gaaggcgaagaaaagaatagagaagatagggtaattagtagataaaaacatacttttagaagaaaaaagataaatttaaacctgaaaagtaggaagcagaagaaaaaaagacaagctaggaaacaaaaagctaagggcaaaatgtacaaacttagaagaaaattggaagatagaaacaagatagaaaatgaaaatattgtcacgagtttcagatagaaaatgaaaaacaagctaagacaagtattggagaagtatagaagatagaaaaatataaagccgaaaattggataaaatagcactgaaaaaatgaggaaattattggtaaccaatttattttaaaagcccatcaatttaatttctggtggtgcagaagttagaaggtaaagcttgagaagatgagggtgtttacgtagaccagaan

SEQ ID NO: 4063 - DNA, 512 bp, Homo sapiens
ctcatctgtggaccacattttgactaataaatgtgctaaatgaacatgctgtatagtagcagaaacaataatataatgatctgttatatatagaattctctcatatatacaggttccacttatgagggaaataaaaggaaaaataacatcatttacctcattttcatatatgtgagaatatacaggtacacacacctacacagagagagagagagagaaaaaaaaaaaagccccccggctcaaaaatatcactcactgtggagggccacacccccccaaaaagacaaaccaggttttggattaaaattagccataccacaagggccaatttttttacagaaaaccacgacacaaaacctgaggggtttctaatagtctttatccattacccctacaaatataaagtgaaagaggcgggccttcaccttacgtgtataaaggacccaaaagacacaaccccaactgtgggctaaaaggaatcacctcccaactaatcatacttctttcagaag

SEQ ID NO: 4064 - DNA, 444 bp, Homo sapiens
  misc_feature (1)...(444): n = A,T,C or G
aagaagtttaaaataacccagagtagaatttctatatctagtcttggtttttttcatgaatatttgcaagtaattaccattaaattcacacatgaaagattaatctgaaagatcagagaccatgttattcctgaccacgatagaactgctcctgtggtttgggacaagtaataaaacaactgcttgagttttgtttgtaaaatacataattaatatttgacctacctcaaaatgtattgaggatctgtgaaatgctaagtgcccaaaataaaatattgctgattgtctttttattaaaagtaaatttcctcattaagccaacctgccttctgtaagtcacagtgcttaaatctcaggatttttcattaggagagacctgtcgttaaggatttgtaggtataattgcttagcctccattattggtgctgggataaagaagtttan

SEQ ID NO: 4065 - DNA, 392 bp, Homo sapiens
  misc_feature (1)...(392): n = A,T,C or G
cccacgcgtgcgcagaaaattgcgatccactacccaatccatgggcaccaccgccagctacccagagttctgcaactaccagcacgaccacaagcactggtagtgggtctggcaatagttccagcaatgctactgggaacaccgttgctgccgctaattatgtcgccagcatctttagtaccccaggcatgcagagcctgctgcaacagataactgaaaacccccagctgattcagaatatgctgtcggcgccctacatgagaagcatgatgcagtcgctgagccagaatccagatttggctgcacagatgatgctgaatagcccgctgtttactgcaaatcctcagctgcaggagcagatgcggncacagctcccagccttgctgcagcaa

SEQ ID NO: 4066 - DNA, 402 bp, Homo sapiens
cgctgctgctggcctcaggcatggcccgcgactggcccgacgcccgtggcatctggcacaatgacaacaagagcttcctggtgtgggtgaacgaggaggatcacctccgggtcatctccatggagaaggggggcaacatgaaggaggttttccgccgcttctgcgtagggctgcagaagattgaggagatctttaagaaagctggccaccccttcatgtggaaccagcacctgggctacgtgctcacctgcccatccaacctgggcactgggctgcgtggaggcgtgcatgtgaagctggcgcacctgatcaagcaccccaagttcgaggagatcctcacccgcctgcgtctgcagaagaggggtacaggtggcgtggacacagctgccgtgggctcagtat

SEQ ID NO: 4067 - DNA, 426 bp, Homo sapiens
taaaaattggagacaagtctttggtgatgaaaagaaatattggctacttccaatattttcaagcttgggtgatggttgcagttttccaactcgccttgtggggatggatccacaacaagcttctgttacaaaccagaatgagtatgccagaagatctaaactgcagaggtagaaagcagaaaacttggcaaatgacagtggctcaaatcaaccttttcctatcaaaccacttagtgaatcaaaaaaccgcttgttggacagtgaatctcagtggctggagaatggagctgaagaaggcatcgtcaaatcaggtgtatgaaaacattatagactggtattttcaattttcatttgcaagaaaatgatcagtggaatgaaataactgaagtataacagaagatatattttttaaaacggaaagccttt

SEQ ID NO: 4068 - DNA, 397 bp, Homo sapiens
atctgcttagcttctaaatatatcatctttgatttaatcccagccctacaactttggaagagtgaagtattagttcagggatccagtgagagacactgaagtgctaaaagccagggctcgtgaactatggataaaaagaacagacatgggaacagcctggacatggcatcagagattcatatgacaggcccaatgtgccttattgagaacactactgggcgactgatggcgaatccagaagctctgaagatcctttctgccattacacagcctatggtggaggaggcaattgcgggcctctaccgcgcatgctgattctacctgacgaacaatctggctggaatgaaaaagggcttgtgtctgggctccacggagcaggctcacactataggaattg

SEQ ID NO: 4069 - DNA, 178 bp, Homo sapiens
caggttgggtaatctatgttttgaacaagcaactctggtgattcctgccttttcggattttgcactgagttaggtggaggttgtaggcatctaggtgagcaataataaggatttaaacaagaggagtagaaacaatgtggttggagagaaggcagcaaattaaaaaaaaaaaaaaagg

SEQ ID NO: 4070 - DNA, 420 bp, Homo sapiens
aaaaagtatttattaagcccatctaaaaagctaatgcaaattcccaaaaaaggagcacatacagatagaggaggaggccgaagtggtggctcatacctgttaattccagcactttgggaggccaagacaggaggatcactttaggcccagagttggagaccaacctgggcaacatagcaagaccctgtctcttaaaaaaaaaaaaaaaagacgggaaaagctccaaaaaaaaaactaaaactttagagcgggagtaaaccttaaagcatgtaaagccctttttggagatgaggaacagacccaggaagatgacctggtttccctgaatcccacggttagttagggcaaacttttaagccataacccagcttttttaattcccaaatacttttttttttactggcacataaagaggggggg

SEQ ID NO: 4071 - DNA, 412 bp, Homo sapiens
cggacgcgtggggtttggagactcccaccatctgcgactgttccggatcctgcggagtactgtgatggttcgtgttggaggtggatggatggcacttgatgacttcttagtgaaaaatgatccttgcagggttcatcatcatgggagtaaaatgttacgttcggaatcaaactcttcaattactactactcagcctactatagccaaaggaaggacaaacatggaactgcgtgagaagttcattttagcagatggtgccagccagggtatggctgctttccgaccccgaggccgaagatcccggccatcatcacgaggcgcttcacccaacagatccacttctgtgtccagtcaggctgcgcaggcggcctccccacaggtccctgccaccaccacacccaagattctccat

SEQ ID NO: 4072 - DNA, 403 bp, Homo sapiens
cggacgcgtgggcttgaaagttcttggatctgcgggttatggccggtcccttgcagggcggtggggcccgggccctggacctactccggggcctgccgcgtgtgagcctggccaacttaaagccgaatcccggctccaagaaaccggagagaagaccaagaggtcggagaagaggtagaaaatgtggcagaggccataaaggagaaaggcaaagaggaacccggccccgcttgggctttgagggaggccagactccattttacatccgaatcccaaaatacgggtttaacgaaggacatagtttcagacgccagtataagcctttgagtctcaatagactgcagtatcttattgatttgggtcgtgttgatcctagtcaacctattgacttaacccagcttgg

SEQ ID NO: 4073 - DNA, 397 bp, Homo sapiens
ccgaggctaaatcggctgcgttcctctcggaacgcgccgcacaaggggtcctggtgacgagtcccgcgttctctccttgaatccactcgccagcccgccgccctctgccggcgcaccctgcacacccgcccctctcctgtgccaggaacttgctactaccagcaccatgccctaccaatatccagcactgaccccggagcagaagaaggagctgtctgacatcgctcaccgcatcgtggcacctggcaagggcatcctggctgcagatgagtccactgggagcattgccaagcggctgcagtccattggcaccgagaacaccgaggagaaccggcgcttctaccgccagctgctgctgacagctgacgaccgcgcgaacccctgcattgcgggtgtg

SEQ ID NO: 4074 - DNA, 403 bp, Homo sapiens
caaataacctatgtatcaaagataaatcacaagggaaattaaagaatactcttccaaataacctatgtatcaaagataaatcacaagggaaattagaaaatattttgaactgagttataatgaaaacataaaatatcgaattttgtgggatgtagctaaagcaatgcttaagatataaatttatgacttcaaatgcctatgaaaaaagaagaaagattttaagttcattatccaaacttccactttaggaagctagaaaaagaaaattattctcaaatgaaaaagaggaaggaaataaagactgaaatgaaaatcaatgaaacagtaaatggataacaaatagagaagctctcaaacattttggtctcatgatcaccttacactctcaaaaattattgagaat

SEQ ID NO: 4075 - DNA, 405 bp, Homo sapiens
aggatggagatccctgtgcctgtgcagccgtcttggctgcgccgcgcctcggccccgttgcccggactttcggcgcccggacgcctctttgaccagcgcttcggcgaggggctgctggaggccgagctggctgcgctctgccccaccacgctcgccccctactacctgcgcgcacccagcgtggcgctgcccgtcgcccaggtgccgacggaccccggccacttttcggtgctgctagacgtgaagcacttctcgccggaggaaattgctgtcaaggtggtgggcgaacacgtggaggtgcacgcgcgccacgaggagcgcccggatgagcacggattcgtcgcgcgcgagttccaccgtcgctaccgcctgccgcctggcgtggatccggctgccgtgacgtcc

SEQ ID NO: 4076 - DNA, 397 bp, Homo sapiens
ccagaggctacaaaagaaatcaaattattggaataaaaatttcagtcactgcaaataaatagaatagatctcttacacccactccaacttttgatttttgctactgcacattctccaacaggcatcattgttcaaaatactgatcttgtggagtggtcattccttcctcacagtacagccaagacgattaaactgtattaggatcatatagctacattaattggtcacacccgattacaaataataaaattatgtggaaatgacccacacaaaatagctgtccctttaaccaagaaacaaactagacaaacctttatcaattctggcgcatggcaaattgatcttgctaattttgtggaaattgtgtattatcattacccgaaaacaaaaatcttcg

SEQ ID NO: 4077 - DNA, 401 bp, Homo sapiens
ttggcgctgaggacccggacagccgctgggcgtggtggcgtacacctgtaatcccagctacttgggaggctgaggcaggagaatcgcttgaatccgggacgcggaggttgcagggagccaggactatgccattgcactccagcttgggcaacaagagtgaagctccgtctttaaaaaaaaaaaaaaaaaaaaagtcgggggggagcctgaaaccgaaccctttttggatgtactgggctccccaagtctgttctggcccctccggggggcatgaggttacatccttgctaagccccactccgactttttggaaagtcatcaggcagacgccaaggcattaaaaaaagggagggtccctatgttcatgctgggaacatcattgcaacacagcgccattttcg

SEQ ID NO: 4078 - DNA, 476 bp, Homo sapiens
attgaacgctgtattgaaggcctgaggtaccgggtcgacccacgcgttcgaccacctgcggcgctggggcgcgcgccatgggccgcctgcactgcactgaggacccggcgccggatgccgcgggcggcgacatgcagcatctgaaccagctgggcgcgcagcagttctcagccctgacagaggtgcttttccacttcctaactgagccaaaagaggtggaaagaattctggctcagctctctgaatttgccaccaccaatcagatcagtcttggctccctcagaagcatcgtgaaaagcctccttctggttccaaatggtgctttgaagaagagtctcacagccaagcaggtccaggcggatttcataactctgggtcttagtgaggagaaagccacttacttttctgaaaagtggaagcagaatgctcccacccttgctcgatgggccatatgtcagactctgatgattaaccag

SEQ ID NO: 4079 - DNA, 450 bp, Homo sapiens
  misc_feature (1)...(450): n = A,T,C or G
taagacatacacatcctgcttgtccagctgttcctccaaaatctactttggcttcagctccgggtcctgtaccagatggaaaatgtttttggtgatctggctgctgcttaaagccagttttccctaagaactccaaaggctaaagtctactaggggcagagtgtgaggatagatttctaatcagagaaaagtggcctccaggagctttcatttatgtcttctccagaccaggttttcctgttatcttcctttaatcccctttcaaccaacaggtgaagttcttccagcccacagaggtagtaatatcatcttttctatctcctcctctcctttggccatgtaatgaagcaaaatattatttatttagcccaggcttgagagccactgtttgtggacagtcttcatctagattccataccctggcctaggcgaggtaaggctctctggttn

SEQ ID NO: 4080 - DNA, 403 bp, Homo sapiens
  misc_feature (1)...(403): n = A,T,C or G
ttacaagtcttcagcccatttagtcatctaagaagttgagaaagtctaaacctaagtaatcacagcaaatactgcaaatactgatatacttcataccctgtgacaaaaaggatggggaagagaatatcattggtcttgccatatacctcctagctaaaaggaaaatggtttgtagttgttcttgggcctactgtgttgcttttcagaaggacataagactttctactttatctgatatggatatcgtctacttcctcattcctttatgctcacttatggagtagttacatagaaatataactcttggtggtactgtattttaaggtaattcagaagcagtatgtattatttatgtacatgtacaggacaccattcaaaatggcttgaaaatattcagcatgtn

SEQ ID NO: 4081 - DNA, 434 bp, Homo sapiens
  misc_feature (1)...(434): n = A,T,C or G
aacatgcattggcgcatccacctttattatcagnnnnnnaagcacaacaatattcatgtgcctagaccaagaaggtattatctcgaactgacactgagccacaacccaaacaacccagctctccctaagcttcaaactagactacttctccataatattcatccctgtagcattgttcgttacatggtccatcatagaattctcactgtgatatataaactcagacccaaacattaatcagttcttcaaatatctactcattttcctaattaccatactaatcttagctaccgctaccgnaaataacctgagtaagaaaaaactacagtggacgcaaaaaaaaaaaaaaaatatgggggggcctttgggggggggggcgggggagaaaaaatcttcggggctatagaaagtcctattttttccataatagggat

SEQ ID NO: 4082 - DNA, 414 bp, Homo sapiens
agaaacacacctcaatgagctgaacatcatggatccacagcaccgggccaagctgctcacggccgccgagctgctgctggactatgacactggcagtgaggaggctgaagagggcgccgagagcagccaggagccagtggcacacacagtgtcggaacccaaggtggacatcccgcgcgactcaggctgctttgagggctcggagagcgggcgcgatgacgcagagctggcaggcactgaggagcagctgcaaggcctctccctggccggggcaccttgaggtggcggtggcaataggccagggctgggacccagctgcaaaggctgtaggagtgggcccagcctcccgtggtggcccaggccctgaggactggcactgagcctggccctgcttccccagggacacttagggcg

SEQ ID NO: 4083 - DNA, 479 bp, Homo sapiens
  misc_feature (1)...(479): n = A,T,C or G
tatatttcaagtttttaaaaatgagcttattttgcatctgcaaccacgaaagagtaatgaaaatctttttatttgaagaagtcatattagaaaacaagttggaaaacattttgaagaaggtattaattttttagccgcggcaataatgtagaataaaagaacagttttcagctttctgctaattttccaaaaattgtaataaaagaattattccctttttttctctgttacataacaaaataaaactttagaataatatggctctactttaggagtattttaattgggcttctgataagtatccttttatataagaaatttcctgttatttaaaatttataacagctttggctgctaaattttatcaaaactttttgggacatatattgatacaaccatatggttctcctgcttacttaataatntacagaatatcaccaattcctgttaaactactcttatatttctgggctaaccag

SEQ ID NO: 4084 - DNA, 430 bp, Homo sapiens
  misc_feature (1)...(430): n = A,T,C or G
gaaaactgagacctcctggtcacccgccgccgggnnnnttagaaactcccacaagctctgccttccctccctggtcctcttcagaccccctcttagttcttcgcggctaacggctcgcgctcggggccgggtgtggagctggaacagagggctggcaaggcgcgcatgcgcaccgagggtggagccgctgagcacagaaccggaaacttagagacaaagttcggagccccgcccccgccgcgcgccgctgagttgtctggccccgccgacccacgggccacgacccaccgacccacgaatcggcccggccgtcgcgtgcaccatgtctggctcctccagcgtcgccgctatgaagaaagtggttcaacagctccggctggaggccggactcaaccgcgtaaaagtttcccaggcagctgcagacttgaaa

SEQ ID NO: 4085 - DNA, 502 bp, Homo sapiens
  misc_feature (1)...(502): n = A,T,C or G
ntagacgcccgtggtaccgctccggaattggtgcggagttccaggctcgacccacgcgtncgcggacgcgtgggcttcgctcatcaggcataatgtctaaaatctaatatacataattccattaagtggttgaaggaagcatataatggaattgtcaattgatcatctggctgcaaggtttgcccttgaactaaaaatgttgtttggggcaagggccagaaatgtggagacatgggttttgttacgcattcttgtattatatgtgactaaatttacaaacaagatacatgtgtaattaaagacccttatggaactggaagacgtcttgtagtgctacattgggtgaaaccgttggtccatttttgtctgtttctatgaagataaaataattgggggccatctagaaatagaaaggcagtgggaagacagattctacggcactgctttcatttaattgggctttatgcactccattcgaatgcataacctcacctctagttga

SEQ ID NO: 4086 - DNA, 475 bp, Homo sapiens
  misc_feature (1)...(475): n = A,T,C or G
aattgaaaacccctcntttgatancccttaagtaccgggncgaaacacgcgtgcgtatagatcagtctcatgggccatctcttcctcagatgtaaatgatatctggttaagtgttatatggaataaagtggaccactattgtgtgttgctaatcattgactgtagtcccaaaaaagccttgtgaaaatgttatgccctatgtaacagcagagtaacataaaataaaagtacattttataaaccatttactatggctttgtaacaattgcatacccatattttaagggacaggtgaatttactactttctaaagtttattgatacttcccttttatgtaaaatgtagtagtgatacctatatttccacattgtgcattgtgacacacttgtctaaggatgcctggaagtgtataaaattggactgcatttcttagagtgttntactatagatcagtctcatgggccatctcttcct

SEQ ID NO: 4087 - DNA, 477 bp, Homo sapiens
  misc_feature (1)...(477): n = A,T,C or G
gcggtttgatcatcaatagggcaggacttttcatacctctagtgaataaaggggaggggagaattcacgcctttgctattattgccactttacttgtattttgttcttattttgagtggctagggtaaagatcttttaactgatttaaaggatgtttagtttttattttatcagccctagttccaatgataggaattcaaaatgtaaaacttagactgtctagatgacttgattatagttgaaggagaaattttaaagtgagcttgaagaatggtgccaaagtgcattttattttctgcagactccgaagaaaggagtgtatcctctgaggggaagttccagactggcaggtctattttggcttcagcaatgctggagtgaaaacaacacggctagaagctcattctgaaatggngagcactgaaattntggaaaaggagaccccagaaaatctcagtaatggtaccagcagcaatg

SEQ ID NO: 4088 - DNA, 469 bp, Homo sapiens
  misc_feature (1)...(469): n = A,T,C or G
gccacggctctgctgggctcctggcgccgcctcctcccagcccgccgagggctgcgcgcttctgtgggtgggggaaggcaggactgacgcataagagtacccagagaaggagaagccagcaaaggagacgacacagacaagacctcagagatcaaaggaagaggccccttaatatcctggaataatgggacccatccccgtaatcagtgaatctcatccacccgcttgccagcttctacccgcagcaagtagaagctaagtcctggctcanatctcttccctccctccctctcccagctgtcagtgcttttggacttgtgctcagatgacaacggcaacacgacaagaagtccttggcctctaccgcagcattntcaggcttgcgaggaaatggcaggcgacatcagggcagatggaagacaccatcaaagaataacagtacatactanatgaagccagaacgctgttn

SEQ ID NO: 4089 - DNA, 407 bp, Homo sapiens
cagaggttacatcttttacaccttttctactgtacaccccatcccagacgaagacagtccctggatcaccgacagcacagacagaatccctgctaccagagaccaagacacattccaccccagtggggggtcccataccactcatggatctgaatcagatggacactcacatgggagtcaagaaggtggagcaaacacaacctctggtcctataaggacaccccaaattccagaatggctgatcatcttggcatccctcttggccttggctttgattcttgcagcttgcattgcagtcaacagtcgaagaaggtgtgggcagaagaaaaagctagtgatcaacagtggcaatggagctgtggaggacagaaagccaagtggactcaacggagaggccagcacgtctg

SEQ ID NO: 4090 - DNA, 421 bp, Homo sapiens
ggtttattaagctcctggctccgctctagacctcagcgtttctggctgccagcctgggcagcctgggaagcctgggaggacggtggcttgccggtctgtcgagaggcagtgcggacggggaccctctgggattctgctggatctgccccgggggttacctttgggggctgggaccccagtcgaggggacacaaccgtccctggcagtggttggttctgcttctccctgcagaaaagcagcatttttcgaagctgaagaataagctagcccaaccacaccaccttgttgtgtgaccttgggcaggtggttctgtctctctgagcctctgtttctctctgagctgagcagccaccatggctgacggtcagatgcccttctcctgccactacccaagccgcctgcgccgagacccctttcggga

SEQ ID NO: 4091 - DNA, 490 bp, Homo sapiens
  misc_feature (1)...(490): n = A,T,C or G
gccgatctcacccgggacccccagttccagaagctgcagcaatggtaccgcgagcaccgctccgagctgaacctgcgccgcctcttcgatgccaacaaggaccgcttcaaccacttcagcttgaccctcaacaccaaccatgggcatatcctggtggattactccaagaacctggtgacggaggacgtgatgcggatgctggtggacttggccaagtccaggggcgtggaggccgcccgggagcggatgttcaatggtgagaagatcaactacaccgagggtcgagccgtgctgcacgtggctctgcggaaccggacaaacacacccatcctggtagacggcaaggatgtgatgccagaggtcaacaagggtctggacaagatgaagtctttctgccagcgtgtccggagcggtgactgggaggngtacacaggcaagaccatcacggacgtcatcaacattggcattggcggctccgacctgggacccn

SEQ ID NO: 4092 - DNA, 401 bp, Homo sapiens
  misc_feature (1)...(401): n = A,T,C or G
cgaaccctgtgggtcttcgctgccgccgtcgggagcgggatgcggcccagaaacagcgcggggctggccgatcggggccgcgcgagaggcgctgcggagtttatgtggccgaggcagacaagtggaattaggccttgctgcttgagagtnttgnnnnnnnnnnnnnnnnnnnnnnnnnnnnnnnnnnnnntnnnnnnnnnnnnnnnnnnnnnnnnnnnnnnnnncnnnnnnnnnnnnntnnnnnntntntttnttnnntttttttttttttttttttttttttttttttttgggttttttttttntttttttttttttttttttttttttttttttttttttttttttttttttttttttttttttttttttttttttttttnnttttttttttttttttg

SEQ ID NO: 4093 - DNA, 423 bp, Homo sapiens
tgactggcaacttggactacaagaacctggtgcacatcatcacccacggagaagagaaggactaggagggggctcgctgctgcgccctgggctcgtctttgcagagagggccctgccctcatctctctcccccgagtaccgcctctgtccctaccttgtctgttagccatgtggctgccccatttatccacctccatcttctttgcagcctgggtggctatgggtacttcgtggccgcacatcctacagttggaaatccatccagaggccatgttccaataaacaggaggtcgtgtatttggtcacgacatttctctgacaaaaaaaaaaaaaaaaaaaaaaaaaaagggggccccctttaaaaaaaatcttgggggggcccaagttaacccggggagggaaagaaaattttttttcctttag

SEQ ID NO: 4094 - DNA, 422 bp, Homo sapiens
atcagagcttctgcttagcacatgtgatttttgagctgtctgttagaaatctaacaggaggtggtgactcagtcattggataagtaagtctaatgtttacaagacaggttagggcctaaacttgtgagtcttcaacatctggaagccactgaaagctgtgtgtgtggatgagttaaccaggactgtaggagcaaacacagaagaggagacaagcactgagcccagggccttcccacgttagccagctgggaaaagaggaagagccagagaaggagattgggaaagagcacccagggagtcaggaggagaactgagaaaagggcctttcagaggccaaggaacacaagtgttgcagaaggaagccatgatcaactgtgtgtggcgctggcaaaaggcggagaaatatggaaattgagacttgg

SEQ ID NO: 4095 - DNA, 408 bp, Homo sapiens
gcgtgacccatgtccaccagacagggcgtggatactaacatgatctgcagcacccagtagcgaatgtgggagatggggaaagcctggtcgtaacagacattctggcagccaggctgaatcgtatcacaccggaaatcagcctgctcatccccccaggaagactcagcagctgtgcccagcacgagcatacggaatatgaagaggacagtgagccagaccttgcctaccacggtcgagtgcttgtgtacttcctccaggaaatttcccaggaagctccaatcgcccatcttggcacagccagggaacagatgccaaaacttctgcaaatgggagagagagaaagagaaaaaagaagaaggatgttctgtgaaggtctggaatgtctatcatggtctgggattccactga

SEQ ID NO: 4096 - DNA, 409 bp, Homo sapiens
aacaacatcgacaagctggagggagaccatcagctcatccaggaggcccttgtctttgacaacaagcacacgaactacacgatggagcacattcgtgttggatgggagctgctgctgacaaccatcgccagaaccatcaatgaggtggagactcagatcctgacgagagatgcgaagggcatcacccaggagcagatgaatgagttcagagcctccttcaaccactttgacaggaggaagaatggcctgatggatcatgaggatttcagagcctgcctgatttccatgggttatgacctgggtgaagccgaatttgaccgcattatgaccctggtagatcccaacgggcaaggcaccgtcaccttccaatccttcatcgacttcatgactagagagacggctgacaccg

SEQ ID NO: 4097 - DNA, 479 bp, Homo sapiens
  misc_feature (1)...(479): n = A,T,C or G
cttttttcattccgttttgatagtaactgaaagcatcagcacacaagcaggacgtgaagttaccagagtctttcccgcacatgcctatgagtcataaatgaccaggtggaagacacagtggatgaggagacccagtgtacggtagcagcaaacaagagaaaacacttaggaacaacctaaccggcattcaggacctctgtggcccaaggggaaagccggaaggacattgttggtctaacggattgcagagctactggcatttttggcattttagataaatctattccatcggtatcatgtttactgaggtggataactgcatggaggttctgtgagagaatgttcttatgaaacgcacatgggagcctgtgacagacaggcccgagcaatacaaatgtcctcaggtgggacagaacgatgtggtggggagaagaggcgtggcagagcccacggggcacgtgtcagcatttgctgggtcn

SEQ ID NO: 4098 - DNA, 404 bp, Homo sapiens
ctctactcatatttttatattcattctatctctttctccatccttctcaactttcaccaagttcacaagtatatagaggtcttatcctcagtgtctaagccaatgcctgatactattacgtacgatgtgcattaactatgattccactaaaagatccattgtaatagtcatagaatcttagagtttaaaggactcttagtgatctcctcatccagctgattgttttacagatgagaaaactgaggccccctaaatgagaagtgactttccaaggtgccacaactaatgagaaaaagaactgagtttccctgtgaccaaacccatttacatcacattctaccacctgggcccgcctatatatacacattccacagagttctcctgaaaaaagaaaaaaagcagat

SEQ ID NO: 4099 - DNA, 408 bp, Homo sapiens
  misc_feature (1)...(408): n = A,T,C or G
cggacgcgtgggtttgatttagagagatttgtcctttttgatgttgcacaacaaatggtagagtctgggtatgtctgtgaaggtgatcacaagaccatggctaatgctatcatagacagagtatcattaattaagaggaaacgagagcagcggcagttggtacgggaggagcaagaaaaaaaaaagcaggaagagagcagtctcaaacagcaggtagaacaatccagtgcttcccagacaggaatcaagcagctcccttttgctgacaccggcatacctactgcttctaccacttcagcttcagtttctacacaagtagaacctgaagaacctgaggcagattaacatgaacaactacagtaccagcaacccagtttatctgtgttatctgatgggacggttgacagn

SEQ ID NO: 4100 - DNA, 479 bp, Homo sapiens
  misc_feature (1)...(479): n = A,T,C or G
ngagctgccngntnncccggaaacgttagncgangccngtcccgaanntngggcgacccacgcgtccgcggacgcgtgggcaaggctcaagtgagtgagggcaaaggacgcctcatgcctgggcaggaccctgagaaaaccataggagacatgttccagaaccaggaccgcaaccaggacggcaagatcacagtcgacgagctcaagctgaagtcagatgaggacgaggagcgggtccacgaggagctctgaggggcagggagcctggccaggcctgagacacagaggcccactgcgagggggacagtggcggtgggactgacctgctgacagtcaccctccctctgctgggatgaggtccaggagccaactaaaacaatggcagaggagacatctctggtgttcccaccaccctagatgaaaatccacagcacagacctctaccggggttctcttccatccctaaaccacttccttan

SEQ ID NO: 4101 - DNA, 503 bp, Homo sapiens
  misc_feature (1)...(503): n = A,T,C or G
cgcccccctttaaattcacggcatcggcaccggnccgtaattnccgggncgacccacgcgtgcgaataaataagactagtatatccacatatataaatttttattaatttaaccaatcctttagatatagtatatgtgtattaatgaaactttcagtaatatttggatggatactgttctgaattattagggtttaaaagtccccccaaaaacatgagattgatacagaattgatgtttcttccccaaatgatatattaaactacctttttttctgattcaacatagcttatttatctgtgacaactgaagataaaggagaaggatgaggccaggtgtggtggctcatgcctataatcccagtaagaggccaaggcgggcggatcacttgaggtcaggagttcgagaccagcctggccaacatagtgaaaccccgtctccactaaaaatacaaaaaaaaattatccaggcttggtggcaggcatccgtagtcccagctaattg

SEQ ID NO: 4102 - DNA, 567 bp, Homo sapiens
  misc_feature (1)...(567): n = A,T,C or G
ngggtgattgacaatatgatcnctgctggaatgcncgggacgacccacgcgtncgcggacgcgtgggctatgagctgcctganaaaggtttcaaaataattgccttataggagttcagtgagctataagacaacacagatatacaaatagaataaatcaggaaaacaatacatgaacaaaatgagaagttaaacaaaataaaggaaatgatataaaataactgagcagaaattctggagctaaataatacaatgattgaactgaacaattcaatagagtgcttcaaaagcagattcaaacagaagaaagaatctgcaagcttgatgatatgtcatttgaaattacccagtcagaggcatggaacttatgagacatcatcanatgaattcattattaaattcccaggagaagagaaagataaaaaagcagaaagcttattagtaaaataacggctgaaaactctcaaatctgagagggtacaaacatcatataaggcccgangatcctanaagatcaacttaagagatcttctgagcacctttaataaatggcaaggtagagttgaga

SEQ ID NO: 4103 - DNA, 521 bp, Homo sapiens
aattcctgacctcaggtgatcctcccgcctcggcctcccaaagtgctgggattaaaggcatgagccactgtccccggccagaagcaagattcttttacgatacccctgattcagtttgatacatgctattgattgcttaaaatttcctactaaaaaattaatattctcaactaaattgaacttgtgccaaaatcagcatgttcttctatgcctcagccagttctaatgtaataggagatgcagtttatttaagctatttgcaagtgtaataacagttgttgttttaagaaattatttttatttttagccttttgtctgtgggaaaagcaggagacgcttcgatttttctgattctgaccacaacaggacattattccctctttcctctgctcttcactgcaccagaaacttcccattaaaatcttactcatgttactattcacacattatatagaacttcgtcactgaagactttattcagaaaggaaaaaccttttttaaatggtatggaactttttacc

SEQ ID NO: 4104 - DNA, 428 bp, Homo sapiens
  misc_feature (1)...(428): n = A,T,C or G
atgcgtctggcacatggcaaggcccaagccaaccnnnncccccgttgatgggcagctacactgccacccaaacacggagatgtggccgcggcactgggtcccccagtgggtcccatgggggaagaacttccctttgctggggtgggcagcctgccctgagctatcaacactggatttgttgtcttctgcacagctactgtgaagataacgtaaggagaagtggtcagttttcattttataactgacacagctgggacaaaatatatacgtggacatatatttaagacactaattgtgtgggagagtttagtagaggcctgtgcagacacaaggcaaacagcgtcagcagcgtgggggtctcctgggccagctcggcacctgtgggtgctctgaccctgggggtggggacagctccgtgctaaccccac

SEQ ID NO: 4105 - DNA, 398 bp, Homo sapiens
gcacgggttcgcacacccattttagcggcaggacttacttgtcttagcagttctcgctgaccgcgctagctgcggcttctacgctccggcactctgagttcatcagcaaacgccctggcgtctgtcctcaccatgcctagcctttgggaccgcttctcgtcgtcgtccacctcctcttcgccctcgtccttgccccgaactcccaccccagatcggccgccgcgctcagcctgggggtcggcgacccgggaggaggggtttgaccgctccacgagcctggagagctcggactgcgagtccctggacagcagcaacagtggcttcgggccggaggaagacacggcttacctggatggggtgtcgttgcccgacttcgagctgctcagtgaccctgagga

SEQ ID NO: 4106 - DNA, 422 bp, Homo sapiens
  misc_feature (1)...(422): n = A,T,C or G
cccacgcgtccggaggaattcttcttnntanttttgctttgtcctttccaccatggcacctaagaaagcaaagaagatagccgggggtgccaactccaacgtgttctccatgttcgaacagacccaaatccaggaatttaaggaggccttcactatcatggaccagaacagggatggcttcattgacaagaacgatctgagagacacctttgctgcccttgggcgagtgaacgtgaaaaatgaacaaattgatgaaatgatcaaggaggctccgggtccaattaactttactgtgttcctcacaatgtttggggagaaacttaagggagcggaccctgaggaaaccattctcaacgcattcaaagtgtttgaccctgaaggcaaaggggtgctgaaggctgattacgttcgggaaatgctga

SEQ ID NO: 4107 - DNA, 427 bp, Homo sapiens
  misc_feature (1)...(427): n = A,T,C or G
ctgctttattttaccacagttttcaccatcatctgcctgtatatgtatgtgtatgtatacatctatatctacactagtagtttatctactgtctgtttctcaccactagaataaaagtgccatgtatactggcattttgagctattttgtttgctaccagatccacagctcttaaaataatacaatactcaacaaatacttgttaaatgaatgaatgccgctgggtgcggtggcttgtgcccataatcccagcactttatgaggctgcagtgggcagaacacttgagctcaggagttcaagacccggctggccaacatggcgaaaccctgtctctacataaaagagaaaaattagtagggcatggtggtgcacacctgtagtcccagctactcangatgttgaagtgagaggatcgcttgagcccaa

SEQ ID NO: 4108 - DNA, 429 bp, Homo sapiens
  misc_feature (1)...(429): n = A,T,C or G
ctcttcctcctcctcaagggaaagctgcccactnnnnnttgccctgccatcccctttaaagggcgacttgctcagcgccaaaccgcggctccagccctctccagcctccggctcagccggctcatcagtcggtccgcgccttgcagctcctccagagggacgcgccccgagatggagagcaaagccctgctcgtgctgactctggccgtgtggctccagagtctgaccgcctcccgcggaggggtggccgccgccgaccaaagaagagattttatcgacatcgaaagtaaatttgccctaaggacccctgaagacacagctgaggacacttgccacctcattcccggagtagcagagtccgtggctacctgtcatttcaatcacagcagcaaaaccttcatggtgatccatggctggacggtaacaggc

SEQ ID NO: 4109 - DNA, 404 bp, Homo sapiens
cgcctctggcttgcgccaggacttggcgtgggcaccgggcgcccccatcccagtgtctgtgtgcgtccagctgtgttgcacaggcctgggctccccactgagtgccaagggtcccctgagcatgcttttctgaagagccgggcctcagagtgtgtggctgtgtgtctgttcgactctcctcgccccattttcaccccacccccgcctctgatccccgggggcgagattggcgcgggagtgtggccgcgccccatcagatgttcgcccttcaccagcgggagcttgatatcccttgtctgtaacatagaccccgggtactgcgggaggggagggctgctggggaggatggggggatgttatataaatatagatataattttattttcggagctaagatggtgtta

SEQ ID NO: 4110 - DNA, 424 bp, Homo sapiens
  misc_feature (1)...(424): n = A,T,C or G
aatttgtattatttcttttaaagaaaggggnngggttctttgtaaagggtagcctggaaaataaaacaacagtgttttttgtgaaacacaggcttccattgggaaatttttttcttatctaccttccctccctctgcagcaaactcagtgtctcttcatatcattatcttccccagtttcctgaagaaatattctaacagaataaaaggaacctttctacaaatgtaaaccttatttacaaaagcaatttgacattgctacttctgaaaaacagtatacatagacatcctggctaacatggtgaaaccccatctctactaaaaacaaaaaaatcagccgggtgtggtggcacgctcctgtagtcccagctactcgggagggcgagacaggagaatcgcttgaacccgggaggcggaggttgcaa

SEQ ID NO: 4111 - DNA, 424 bp, Homo sapiens
gagatgctgcggccggcagggctctggcgcttatgtcggcgaccttgggcggcgagggtcccagcggagaatcttggccgtagggaagtcacctctggtgtctctccccgcggtagcacctcgcccagaaccctgaatattttcgaccgggatttgaaaaggaaacagaagaactgggcagcccggcagcccgagccgaccaaatttgactacctgaaggaggaggttggaagtcggatcgcagaccgtgtatatgacatacccagaaatttcccccttgctttggatcttggttgtggaagaggttacattgcacaatatttgaataagcttcagttattccattgcaggaaactattggaaagtttttccaagctgacattgcagaaaatgctttgtttgcattgagtgaatgaccttcctt

SEQ ID NO: 4112 - DNA, 418 bp, Homo sapiens
cccacgcgtccgcccacgcgtccgattgctgctgagctggtcgtaaggaaaccgagtgagaagggaatgcaacagaagaaaaagaccaaagacctgggtttcagggctgggaaagaaagcaagacagaatggaggaaatgaggcctgcaggacatggcgtctcaaatgtttgagtcgcctttaaagtagcctgtcacagctgccttccacgactcttcaatgccctcatcccttctccagatagaaatggagcagctcttcttggaggccaggcttcagctgatagcaagtctgaggccaggaggaaccagtgtgactccatgctgctcagaaaccaacagctgtgctccacatgtcaagaaatgaaaatggtacaaccaagaacaatgaaaatcccagatgatccaaaagcatcctt

SEQ ID NO: 4113 - DNA, 391 bp, Homo sapiens
  misc_feature (1)...(391): n = A,T,C or G
nnaggcgtccggagcgagtcgtgcgttttaggtttagtgtcttttccttgtccctgctcggggagcgtgaggcagatcggccggctttgctccaggcctcaggagtggtgcaggttcgcagccctgtcaaccagctccgagccggcagcgaaacctgaagtggaccctgtggaaaatgaagctgtcgccccagaattcaccaaccggaacccccggaacctggagcttttatctgtagccaggaaagagcggggctggcggacggtgtttccctcccgtgagttctggcacaggttgcgagttataaggactcagcatcatgtagaagcacttgtggagcatcagaatggcaaggttgtggtttcggcctccactcgtgagtgggctatac

SEQ ID NO: 4114 - DNA, 477 bp, Homo sapiens
  misc_feature (1)...(477): n = A,T,C or G
attgacagccgtggnaccgtgatggactttccgggncgacccacgcgtncgggttttagcggctctctgggtagcagggtggtgtgatagtggcagcgaggggcttttagaggtgctcggattctcgtagctgtgccgggacttaaccaccaccatgtcgagcaaaagaacaaagaccaagaccaagaagcgccctcagcgtgcaacatccaatgtgtttgctatgtttgaccagtcacagattcaggagttcaaagaggccttcaacatgattgatcagaacagagatggtttcatcgacaaggaagatttgcatgatatgcttgcttcattggggaagaatccaactgatgagtatctaaatgccatgatgaatgaggctccaggccccatcaatttcaccatgttcctcaccatggttggtgagaagntaaatggcacagatcctgaagatgtcatcagaaatgcctttgcttg

SEQ ID NO: 4115 - DNA, 388 bp, Homo sapiens
taattttggaaaatacctaccgtgcagcccatagcaactttctggaatgctgctttaatttgcttctctttttccctattccaacaagaacaatgacaacaacaaaaattaacttagagaagcatctgctggaacaagtggtgattatttccaagcccaaacaaaagtaggtagggaaagaattattcagagaaaacatttttcaagatcttctccagtgtgtgagagagtatgtgagaaggaaaatgcacatgtggataaaatgttttcatttgacgtcgaaaatgatagggaagtgagagtctgaaaacggtttcacaatgagaacacatggacacagggaggggaaagggaacaacacacgccagggcctgttgtggggtgaggg

SEQ ID NO: 4116 - DNA, 466 bp, Homo sapiens
  misc_feature (1)...(466): n = A,T,C or G
agagangccnnnnncactgaaactagaggcntgcacgaccgcnccggaatccgggtcgaccacgcgtccgcggcgcttcaagatgcgctgcctgaccactcctatgctgctgcgggccctggcccaggctgcacgtgcaggacctcctggtggccggagcctccacagcagtgcagtggcagccacctacatgtatgtgaacatgcaggatcccgagatggacatgaagtcagtgactgaccgggcagcccgcaccctgctgtggactgagctcttccgaggcctgggcatgaccctgagctacctgttccgggaaccggccaccatcaactacccgttcgagaagggcccgctgagccctcgcttgcgtggggagcatgcgctgcgccggtacccatccggggaggagcgttgcattgcctgcaagctctgggaggccatctgccccgcccaggccatcaacatn

SEQ ID NO: 4117 - DNA, 477 bp, Homo sapiens
  misc_feature (1)...(477): n = A,T,C or G
gtggtancaaattcggttancctgacaggacntgcgccgganaccccgggtcgacccacgcgtccgtctgactctctctgtgtgaacaggaaactttagggtttatgagtagaatgaattggctatcagagtggaagaccatggcccaggatccctgagctttcccagtagcctccagtttcctttgtaagacccagggatcacttagccatagcctgaatcttttaggggtattaaggtcagcctctcactcttccttcaggttactaacaaaatttcgtagctaaagaatgccatggccgggtgcagtggctcacgcctataatcccagcactttgggaggccgaggcgggcggatcacgaggtcaggagattgagaccatcctggctacgacggtgaaaccccgtctctactggaaatgcaaaaaattagccgggtgtggtggcgggcgcctgtagtcccacctactctggagg

SEQ ID NO: 4118 - DNA, 418 bp, Homo sapiens
cccacgcgtccggaccgggtggtttgcttaggcgcagacggggaagcggagccaacatgccagtggcccggagctgggtttgtcgcaaaacttatgtgaccccgcggagacccttcgagaaatctcgtctcgaccaagagctgaagctgatcggcgagtatgggctccggaacaaacgtgaggtctggagggtcaaatttaccctggccaagatccgcaaggccgcccgggaactgctgacgcttgatgagaaggacccacggcgtctgttcgaaggcaacgccctgctgcggcggctggtccgcattggggtgctggatgagggcaagatgaagctggattacatcctgggcctgaagatagaggatttcttagagagacgcctgcagacccaggtcttcaagctgggcttggccaa

SEQ ID NO: 4119 - DNA, 393 bp, Homo sapiens
aacaaagatagtttgacttcttcttttcctattggatgccttttatttctttctcttgcctgatttctctggctaggacatcaagtactatgttgaataggaacctaacttttgaaagcctaagcagagacttgagagaggaagtggaagtggtctgttttttctgagggctactgggagctatccctggtgctgccacaaaatcaacctctctaacaccaattttcggctgtttgacctcagtagaacatgactactaagctgagctaaattaagcatcaactgtttgagctaatgaatcttactaaaaatttaacttcagttttgcaagtgattttcatatgttatgtgctgtgtatctccaccacacttcttcctttcttgtatttgagg

SEQ ID NO: 4120 - DNA, 406 bp, Homo sapiens
  misc_feature (1)...(406): n = A,T,C or G
tgagggtgataatatagtggataattttgagactgtctacacagcatccctgttctgggaatttcttctcatctcagtccattttggctagcacaggagctattatgattgtattgtctttgagtgccttaactttaaattgtgaatcttaaaacttctcagtgctcatgtttctagctacatgtgtgaaaacacagacatagccaaatgattgagagagaagggcaaaggcataaaaatgtgaaaggaaagacatagaaaatagagagagtcctgagcaacggtgctctggaaaatatttaacaagcagttctccttttataaaaaaaaaaagaaaaaaaaaaaacaaaaaaaaaaaaaaaaaaaaaaaaaganaaaaggannnnnnaggggggggggggggccc

SEQ ID NO: 4121 - DNA, 401 bp, Homo sapiens
aatatttataaactcaatgaggacttggcttgcagtgtggcaggcataacttctgatgctaatgttctgactaatgaactaaggctcattgctcaaaggtatttattacagtatcaggagccaataccttgtgagcagttggttacagcgctgtgtgatatcaaacaagcttatacacaatttggaggaaaacgtccctttggtgtttcattgctgtacattggctgggataagcactatggctttcagctctatcagagtgaccctagtggaaattacgggggatggaaggccacatgcattggaaataatagcgctgcagctgtgtcaatgttgaaacaagactataaagaaggagaaatgaccttgaagtcagcacttgctttatctatcaaagtact

SEQ ID NO: 4122 - DNA, 456 bp, Homo sapiens
  misc_feature (1)...(456): n = A,T,C or G
cttgagcccaggagattaagactgtagtatactatgatcgtttctgtggctagccactgtgctccaggctgggcaacagcatcgtaaaaataaataaataaataaataaattggggaggacagcctcactggtatcagacttacaggaccagatagacaagatgggtataaggggagctgaagtctgtgttcatatgaggaagagaagaccaagccctgggactttggctgaattcctccgtggggctggacggcagngatctcctgttccctatgtgtaaacaaagattccagggcgtggntttgcactcctgttgtactcttttaaaggtggaaaagaggtggatactgagatctaagaggaaaggaaagtcattcacgttctgagatatgcgctctctctattttctccgacacaaagggatagtctcttttctggagctgatgtccatgttg

SEQ ID NO: 4123 - DNA, 534 bp, Homo sapiens
  misc_feature (1)...(534): n = A,T,C or G
ggtgagccccccccccccaattgaggcccgtattgacggtcgtagaaccgggcccgacccacgcgnccgagggacatgtagacctccttgaagatatcgtaggaaacggaattatcttcacatatgaactacaccgatgcgttctcaggaactttttggtgatgtttgtattcaactcccagagatgaactttcctttggaaagagcagctatgaaacactgtttttctagaatctgcaagtggacgtttggagggctttgtggtttgtggtggaaaaggaaatatcttcacctaaatactagatagaagcattctcagaaactgctttgtgatgattgcattcacctcacagagttgaacattcctattgatagagcagtttggaaacactcttgttgtggaatgtgcaagaggagatttgtagcgctctgaggcctatggcagtaaagggattagcttcatataagaactagacagaagcattctcagaaaatactttgtgatgattgagtttaactcacagagctgaactg

SEQ ID NO: 4124 - DNA, 472 bp, Homo sapiens
  misc_feature (1)...(472): n = A,T,C or G
ccacgcgtncgcaacaccctcctagccttactactaataattattacattttgactaccacaactcaacggctacatagaaaaatccaccccttacgagggcggcttcgaccctatatcccccgcccgcgtccctttctccataaaattcttcttagtagctattaccttcttattatttgatctagaaattgccctccttttacccctaccatgagccctacaaacaactaacctgccactaatagttatgtcatccctcttattaatcatcatcctagccctaagtctggcctatgagtgactacaaaaaggattagactgagccgaataaaaaaaaaaaaaaaaaaaaaaaaaagggggggccgttttaaagaaccctcgggggggcccaggtttacgggggctgggaaggataaattttttcccttaaagggggccttattaaaagcatcctgggaatttttgaaaaa

SEQ ID NO: 4125 - DNA, 426 bp, Homo sapiens
aggctgcagcgccgcgactcgtgcgggtatgcgtctgcgctcggtttgagggctcggcgcggggtttcctgttccttcttctgcgcggctgcagctcgggacttcggcctgacccagcccccatggcttcagaagagctacagaaagatctagaagaggtaaaggtgttgctggaaaaggctactaggaaaagagtacgtgatgcccttacagctgaaaaatccaagattgagacagaaatcaagaacaagatgcaacagaaatcacagaagaaagcagaacttcttgataatgaaaaaccagctgctgtggttgctcccattacaacgggctatacggtgaaaatcagtaattatggatgggatcagtcagataagtttgtgaaaatctacattaccttaactggagttcatcaagttcccactg

SEQ ID NO: 4126 - DNA, 414 bp, Homo sapiens
tgatctgaataacatataagaagaattaatttggtaactaatttgcagattagcaaagtgattcactaacatggtgtttctcacatttcagccatttatgttaccatttttgatggctttttccatattcattgctgcctacattgttttcttcagatctactcatttccagatttattttgttcttacttgacacaattctattttgaaatcaaagttttgatatgttagtgttttttcctaatcacattaaagtaactatagcagtgaatacaccacactttggaaaaaattgggttaggttaatttagttttctaggagagaataatcagggtctgagctagagtagtggcaggagagatagcactaaataaagacaggcattgtgaaaggcctggccacttgatgtgagg

SEQ ID NO: 4127 - DNA, 453 bp, Homo sapiens
  misc_feature (1)...(453): n = A,T,C or G
cttacttgtattttaggtaactggtcatcagtgccaatgacatggataacaatttttaatctactcgacagtgcatccctgggaatgactgttatgtttttgtcatattcctggtaatataaatactcgtgttctttactacattgtttttatcaactctaaaagtcatgcctctgtgacctttatcatgtttacaattgcaactgaacttatgacaaattaactcaggaaataaattgagttatcctttctagcattgtaattaccatcagcaaggcctgagatagccagagccaatactagccaagtgatttattttcaaggattgccactaactacggttctttaggaccaagatataaaacagtcacttaaaatcattaggctaggtatcagnnatacattcattactaataatgcattttggagacttttgtgaaagagttggtctct

SEQ ID NO: 4128 - DNA, 525 bp, Homo sapiens
  misc_feature (1)...(525): n = A,T,C or G
cccccgcccccccaatgaagccgattgatcggtcgtagaaccggccgaccacgcgtccgcgctcccagagcaaacgaggcccctgagagctccacctagtttacaggataaaatcccacagcagaactcggagtcagcaatggctaagccccaggtggttgtagctcctgtattaatgtctaagctgtctgtgaatgcccctgaattttacccttcaggttattcttccagttacacagaatcctatgaggatggttgtgaggattatcctactctatcagaatatgttcaggattttttgaatcatcttacagagcagcctggcagttttgaaactgaaattgaacagtttgcagagaccctgaatggttgtgttacaacagatgatgctttgcaagaacttgtggaactcatctatcaacaggccacatctatcccanatttctcttatatgggagctcgcctgtgtaattacctgtcccatcatctgacaaatagcccacagagtggcaacttacgcctatn

SEQ ID NO: 4129 - DNA, 460 bp, Homo sapiens
aaaagaatggtcacaaagaaaacttcaagacagatatcttcactggaaataattccaattctacaaactattccagaaaattcaaaaggagggattacttcccaactggttctgtgaggtcagcattatcctgataccaacatgagagaaacattacaataaaaggaaacaaccaatcaaaatttatcatgaacacatatgtgaaatttttaagtaaaattgcaacaaatgaatctagcaatatattaaagaaagacaatacataatgtacaagtggagtttatcccaggaatgcaaagttgtctcactatttgaaaaccaatcaagtgaagtcaccatagtaacaaactgaaaaagaaagaccgcatcatcgcgcatcatagtctcgtacattcaggaaaaagtatttgacacaattcagtatccataactgattaaaaaccctcagcagactaggagg

SEQ ID NO: 4130 - DNA, 503 bp, Homo sapiens
  misc_feature (1)...(503): n = A,T,C or G
agctgtccactagataatcacggcatcgggcacggaaccccgggtcgacccacgcgtccgcttagcttgtgaacaggcctttttaaaatcctttcttggtgtagcagcaatcttgttgttttatttttagatggatgtattttcatttaatacgtgggagttatatgaatatgtcctancactaagggaagtgtaacagttgattgatttaggtggttttatgcagccagaacgattggatcaggaaaggtgtggaagggatattcttatgtcgtcacaaagctgagctgatgggagcaccctccccagaggtcaacaatccattcgttaactcagacacttaacctttacctttacttctgttggcgaaaaagaagtgctcctttttattacactgatttatccttccatcttttccttggcatttaccatcttccatctcccccttcacttttttcagatatgtctacaaacagactccaatctcagtcgcactaaaaata

SEQ ID NO: 4131 - DNA, 410 bp, Homo sapiens
  misc_feature (1)...(410): n = A,T,C or G
agatcatncnanctngaatgtcttctctgaaaggttgaattgaagcttcctctgtatctgaatcttgaagactgcaaagtgatcctgaggattacagctgtggaatttttgtccaagcttcaaataattttgaaagaaattttcccatatgaaaaaaggagagaacactggcatctgttgaaatttggaagttctgaaattatagtatttttaaaaattgcactgaagtgtatacacataaagcaggtcttttatccagtgaacaggatgttttgctttatcagcagtgacataaaattccatgttagataagcatatgttacttaccttgttattaaatatttcttgaaaagcaaattttaatggtttaattntatgtggacgtatgttaaattatccaactaccctat

SEQ ID NO: 4132 - DNA, 458 bp, Homo sapiens
  misc_feature (1)...(458): n = A,T,C or G
cggacgcgtggacggacgcgtggatttttatcgtaagcaatgtcagctggtaacacactttctacaattcaggaaccagtttccagggtcataaagaatgattgtgtgtagtggtttcactacagttgccaggggggttcctatgtttatttattagctgaaattgcttcacattttaaaacctgtatattgtcacgtataatgagacaacattgtctttgtctgttggttttatggttgtattttctctttggggaatggtatgtagttttcacccattattcagtggggtctttgagacggttttcttgatttgtaggaagtctttactttttcatacaatttgaattatacaagacatacatgagtatattctcctttgtaaaaaaaattcaagcattgtagatgaaactcaagatccctttaaccatatgcagntgtttagtccatttgaaatn

SEQ ID NO: 4133 - DNA, 417 bp, Homo sapiens
actttacacagagaaagcttataaaacagaaatgcaggataacacctatcctgagattttgcgttctaatttaggatcagttgtgttacaattgaagaaacttggtattgatgacttggtacattttgattttatggatccaccagctcctgaaactctgatgagagccctggaacttttgaattacctggctgctttaaatgatgatggagatctgactgaattgggatccatgatggcagagtttcctctagatccacagctcgcaaaaatggttattgcaagttgtgactacaactgttctaatgaggtcctatctattactgctatgatgtcaagcccacagtgttttgttcgccccacggaggccaagagagccgcagatgaagccaagatgagatttgccacatagatggg

SEQ ID NO: 4134 - DNA, 447 bp, Homo sapiens
  misc_feature (1)...(447): n = A,T,C or G
cagctctcggcgcacggcccagcttccttcaaaatgtctactgttcacgaaatcctgtgcaagctcagcttggagggtgatcactctacacccccaagtgcatatgggtctgtcaaagcctatactaactttgatgctgagcgggatgctttgaacattgaaacagccatcaagaccaaaggtgtggatgaggtcaccattgtcaacattttgaccaaccgcagcaatgcacagagacaggatattgccttcgcctaccagagaaggaccaaaaaggaacttgcatcagcactgaagtcagccttatctggccacctggagacggtgattntgggcctattgaagacacctgctcagtatgacgcttctgagctaaaagctttcatgaaggggctgngacctgacgaggactctctcattgagatcatctgcttcagaacccaccag

SEQ ID NO: 4135 - DNA, 458 bp, Homo sapiens
  misc_feature (1)...(458): n = A,T,C or G
gtgcagcagcaccncctgtgatngcctgcggnttgactcccgtattaccgggccgacccacgcgtccggccggatcgtccttccttgaaccctctgggtagggttgtgctgaggggctgggcggggagcacaggccgtgtccgctcgcttgcaccttttcagactgccgtgtcaggcctcgagccgggcccacctggagccctcccctgcccacccgcccccagcgcccgatatccgcccccggcccagaagggccgggctcggtcatccccagtcccgtcgcggccactgacccttgagatcagccctcccctccccaccttcccgtcccaggccagcccaaggcccgaagcccacccactcgcgtctctagcagccgctcttgtcctctgggtacggctcgcgggagtgttggttaccatggtgaagctggcagccaaatgcatcctggcagttcc

SEQ ID NO: 4136 - DNA, 415 bp, Homo sapiens
cccacgcgtccgggctggagaaggacatgagatcagggcctgccccctggggatcacagcctcacccctgcccctgtgggactcatccttgcccaggtgagggaaggagacaggatgaggtctcgaccctgtcccctagggactgtcctagccaggtctcctgggaaagggagatgtcaggatgttgctccatcctttgtcttggaaccaccagtctagtccgtcctggcacagaagaggagtcaagtaatggaggtcccagccctgggggtttaagctctgccccttccccatgaaccctgccctgctctgcccaggcaaggaacagaagtgaggatgagacccagccccttcccctgggaactctcctggccttctaggaatggaggagccaggccccatcccttccctatag

SEQ ID NO: 4137 - DNA, 421 bp, Homo sapiens
ccgagagtcgtcggggtttcctgcttcaacagtgcttggacggaacccggcgctcgttccccaccccggccggccgcccatagccagccctccgtcacctcttcaccgcaccctcggactgccccaaggcccccgccgccgccgcctctccttagtcgccgccatgacgaccgcgtccacctcgcaggtgcgccagaactaccaccaggactcagaggccgccatcaaccgccagatcaacctggagctctacgcctcctacgtttacctgtccatgtcttactactttgaccgcgatgatgtggctttgaagaactttgccaaatactttcttcaccaatctcatgaggagagggaacatgctgagaaactgatgaagctgcagaaccaacgaggtggccgaatcttccttcaggatatg

SEQ ID NO: 4138 - DNA, 417 bp, Homo sapiens
  misc_feature (1)...(417): n = A,T,C or G
gcttccttgtctaatacacaggaacccagacaaatataatcacgcacataacaggccaagaaaaggggccttggtgatcagcacccctgctgtactgcaaaaggggtctgagagtaggaccttattcagatggaatgggcaaagtggttatgcacattaatgtccaaggtgtatgcctgtggtcacttacaactgtgcaccttgattgtccaaacgtaagcgtcttatggaggaggtnatttnctacaccanctacttttcactttaccttactaattctttngacctgatctcttacctactcataactttcccaaattcttttttcgttcacttataactcgacatcttttatgctttcaaacatatcactttttggataataagcacgtggctcaattctatttttatcaaatc

SEQ ID NO: 4139 - DNA, 400 bp, Homo sapiens
  misc_feature (1)...(400): n = A,T,C or G
ggagcgccnnnctnncaacggggacgttagncgngncacngncnctaannntagggnngacccacgcgtccgccccagcacccgtcccaaatgtggcctcagcttgtcctccccttccccaaactatgcattcattcagcaataaatgagcctttgctgtatgccagacccagttctaggctcttgcagccctggtagaaagcaaaacaaaaactcccgctttcccagagggtcacttggcaggggaaagaatcaggaaataaaataaataatgaaaaaaaaaaaaaagggggggccgttttaaaggatccctgggggggcccaagtttacgcgggcaggcagaggaaaagctttttccttatagggagccgaattaaaacctacctgggaattttggga

SEQ ID NO: 4140 - DNA, 423 bp, Homo sapiens
  misc_feature (1)...(423): n = A,T,C or G
cagacgtggtggctcatgcctgtaattacaccactttgtgaggctgaggcggatggatcacctgaagtcagaagttcgagaccagcctggccaaatggcgaaactccatctctactaaaaatactaaaattaaccaagcatggtggcaggcgcctgtagtcccacctactcgggaggctgaggcaggagaatggcatgaacccgggaggcggagcttgcagtgagccgacattgcaccgctgcactccagcctgggcacacagcgagaatctgtcaaaaaaaaattgacaaacaaggccattatataatactaaagaagttaatacaacaggagaatgtaccaggcataaatatatatacacccaacattggagcacctaaatatattaatgattgaactttggatttactagtctcattaan

SEQ ID NO: 4141 - DNA, 515 bp, Homo sapiens
  misc_feature (1)...(515): n = A,T,C or G
attgacccctgattgacggctctagnacccggcncgacccacgcgtncggccaggacacccagtgagcccatacttgctctttttgtcttcttcagactgcgtcatggggctcagcgacggggaatggcagntggtgctgaacgtctgggggaaggtggaggctgacatcccaggccatgggcaggaagtcctcatcaggctctttaagggtcacccagagactctggagaagtttgacaagttcaagcacctgaagtcagaggacgagatgaaggcgtctgaggacttaaagaagcatggtgccactgtgctcaccgccctgggtggcatccttaagaagaaggggcatcatgaggcagagattaagcccctggcacagtcgcatgccaccaagcacaagatccccgtgaagtacctggagttcatctcggaatgcatcatccaggttctgcagagcaagcatccccgggactttggtgctgatgcccagggggccatgaacaaagcctctgag

SEQ ID NO: 4142 - DNA, 449 bp, Homo sapiens
caggtgaagataagaatccacataaaagaatgaagatccggaaatggggatctaagtgaccctggcacaaactaacaatatcttttaagatgaacaaaaaagactactcatctgagactcaggccatggacactcaagtgagtgacctataacacttcacagaacatacaatcagacatcaggaactggtcatgtaggcttttttatagttctaaactaaatactacatagaactttgtgactgccctgtttatttagctttagaacttcatgtgctagttcagtctgtgaagattcattattgatcagatatatacaatctgtaatttggaatattcattcatatttagttgaactttaacaagtcacaagttgttctccatagcaaaccgtaaaagaataaaattaaagttaaagagaggtctgtccgtcagcatattaaggtttgt

SEQ ID NO: 4143 - DNA, 453 bp, Homo sapiens
  misc_feature (1)...(453): n = A,T,C or G
ntaaataactatatctatacttagatatagagcattgtctgtgtcccttaaagtgttacaaagagtttctctcaaaaggtccttaaggagagtgagagatgagagaggtgccttctctgtattagactcacacacatcagtccagttgaagaattggtttaaacttttaaatgagaacagaaattataattagtacctgaccaattgtgcctagatattaaagtatgttctctttagtactttccgttcaattaaatatcagtatattagggatttttttctacaggtgtatattttgttgaagagtcactttcctcaaccatttttttgtactgggcctttaaaaaaaataaatccatccaactttaacacaacatttctcagtgtagaaatcatgtcttcttaattgctgaaccttactgcanaaacttgtgatgtaagaaatttgtatgg

SEQ ID NO: 4144 - DNA, 460 bp, Homo sapiens
  misc_feature (1)...(460): n = A,T,C or G
gaaaaaactgataacctgcgngtgatcaccgtaattaccgcgccgacccacgcgtccgcccacgcgtccgatcaactccaagggattggaattgaggaagactgttactacagttgagactcaaaacttggaaggcctgcatcatgatggccaattctgccataagccctgtcctccaggtgaaaggaaagctagggactgcacagtcaatggggatgaaccagactgcgtgccctgccaagaagggaaggagtacacagacaaagcccatttttcttccaaatgcataagatgtagattgcgtgatgaaggacatggcttagaagtggaaataaactgcacccggacccagaataccaagtgcagatgtaaaccaaactttttttgtaactctactgtatgtgaacactgtgacccttgcaccaaatgtgaacatggaatcatcaaggaatgcacactc

SEQ ID NO: 4145 - DNA, 392 bp, Homo sapiens
ctcagccaattcaagttctgagattttgagtttacacaaactaatcaacttcaaaataaattctgggaccaacaggggttggcaaaacttctaattttgctatgaaagtaaaaacatacacactaaacgaccaacactaccatttatcttcaccatgcttccatgaagggccattaacaccaagagtaagaatgtaatctcaaaattagaaacaatctttcaagttgaataaattagccctgtaaaaaataacatacaatagagattgtttaattggttttggattctaactggtcaaaacactgtcttaccactactaagtacacagagtaagacacgctgtaatagctaaagatctcattagaggccgggcgtggtgcctcatgcctgta

SEQ ID NO: 4146 - DNA, 424 bp, Homo sapiens
agaagactggtctaggtgctgctcctgagcttggtctctgagccatggcttcccatagacactcaggtccctgcagctacaaggagggcaccatggcggagaagtttgactgccactactgcagggatcccttgcaggggaagaagtatgtgcaaaaggatggccaccactgctgcctgaaatgctttgacaagatctgtgccaacacctgtgtggaatgccgcaagcccatcggtgcggactccaaggaggtgcactataagaaccgcttctggcatgacacctgctttcgctgtgccaagagccttcaccccttggccaatgagacctttgtggccaaagacaacaagatcctgtgcaacaagtgcaccactcgggaggactcccccaagtgcaaggggtgcttcaagggcattgtggcagg

SEQ ID NO: 4147 - DNA, 400 bp, Homo sapiens
gcaaggccaagtggggttgggggtggggctggtccttctccctcccacaggcctgtgttcttggggctgctcccatgcagacaggatcacctaacagagatggaagccagggcatggatggggctttgggtcctcgaggttggaccccagcttcttgccaccttcccctccgggcagtcagctctccatccatccccctctttaatctatgaatctataggctcggtgtgtgtaacacacacacccctatcgttgtccttcaaatactcagcattaccattggttgaggccaaattcagagctttctcaaatcagatttacaatctccattttcattaacggggaaacatccccgagccactgagtgctgtgctttgtcactgaaggttagatctgaacc

SEQ ID NO: 4148 - DNA, 430 bp, Homo sapiens
  misc_feature (1)...(430): n = A,T,C or G
ccctgaaaaaatcatacattgttggttngantnttaaatgaaacatcatttgggaaaataccttggcacttttcattaaataaaatatattttagccatatatccccacactaatatatgtatttaagaataatgaaaacatatgctcacccaaaaaccttatgcaaacattttagtggctctatttatcattgctaaaaccagaaaacaactcagatggataagcaatttctgatatatccaggcagtgggagagtactctgcncnnnnnnnanaanaaaaaaaaaaaaaaaaaaaaaaaaaaaacatataaaaaaaaaanaaaannaaaagggggggcctttttaaaaaatatttgggggggcccaaattacccggggggggaaaaatatattttttttttttttggggggggcaaaaaaaaagcaga

SEQ ID NO: 4149 - DNA, 427 bp, Homo sapiens
  misc_feature (1)...(427): n = A,T,C or G
agaaggattcactagtcattggcggggnggnnnnnnncctaaattataacatcatttgggaaaataccttggcacttttcgttgagtaaaatatattggagccatatatccccacactaatatatgtatttaagaataatgaaaacatatgctcacccaaaaaccttatgggaacattttagtggctctatttatcattgctaaaaccagaaaacaactcagatggataagcaatttctgatatatccaggcagtgggagagtactcagctcaaaaaaaaaaaaaatggtaggtggggggagggaaatatacttattctaaaaatataatttttggggggggcccctctaaaaaaaactcggggggggccaaatttttatccggggggaaaaaaatattcttgataaaaagggggtaaaaaaaaaaa

SEQ ID NO: 4150 - DNA, 422 bp, Homo sapiens
  misc_feature (1)...(422): n = A,T,C or G
attgaccagaaccgtgatggcttcattnnnnnttttgacctgcacgacatgctggcctcgctggggaagaaccccacagacgaatacctggagggcatgatgagcgaggccccggggcccatcaacttcaccatgttcctcaccatgtttggggagaagctgaacggcacagaccccgaggatgtgattcgcaacgcctttgcctgcttcgacgaggaagcctcaggtttcatccatgaggaccacctccgggagctgctcaccaccatgggtgaccgcttcacagatgaggaagtggacgagatgtaccgggaggcacccattgataagaaaggcaacttcaactacgtggagttcacccgcatcctcaaacatggcgccaaggataaagacgactaggcaacccagcccctgacacccca

SEQ ID NO: 4151 - DNA, 426 bp, Homo sapiens
  misc_feature (1)...(426): n = A,T,C or G
gagtggcccttggctcactgtgttctgcatggtttggatctgaattaattgtcctttcttctaaatcccaaccgaacttcttccaacctccaaactggctgtaaccccaaatccaagccattaactacacctgacagtagcaattgtctgattaatcactggccccttgaagacagcagaatgtccctttgcaatgaggaggagatctgggctgggcgggccagctggggaagcatttgactatctggaacttgtgtgtgcctcctcaggtatggcagtgactcacctggttttaataaaacaacctgcaacatctcanaaaaaaaaaaagacctttgcaaagaaagaaagaaaaaaaaaataaacaaaccaaatgggggggnnnnngggtgtgggggacttgcgtgagccctccccaggcgcgcc

SEQ ID NO: 4152 - DNA, 405 bp, Homo sapiens
acgtatataaattatttttagccacatcttgttcatctgctaagtttgggaatcccccattatttttaagtttaaaagtaatgaaacaactacttaaaatggcacactagaaaaaaaaacttcctactaagatagtttttccagagatgcattaaaccacaacctgttacttcatgacgttctacaggctgcctaaaaatcgcagttgctggaacagtgaacttggggaagcctatttctcaatttagtcttctgactcaattattgacaaataattctgtgactacaattaatataaaattgaattttgagttattagagttttattaatagctaaaaaagatgaaaaggttctaagtttacatccacattagaaaccaggtacataaatgcattttttaaatg

SEQ ID NO: 4153 - DNA, 472 bp, Homo sapiens
  misc_feature (1)...(472): n = A,T,C or G
cccacgcgtncgctagaacagcttccactttggcagtgaggtcgtagccttttaggtggaagaaatgagggtgcagcgtgtcagacacaacattcatgttactcttacattggaatctgaaggtagttcagacttcgtgggttttgtttttaagcaaaacaatgtgaaaacatttaagtttgaaatgttgcatttgaagttatgatcatttaatatattcatattaccaagactattatactggaagtggtttttgtgttataaaggtttaattttacataaggcagttacttaatgtgatttttaacccttaaaaaagtggagatgtatacatttgttaacaatgccatgaaagcattttctttctcctaaggaaaagtgaatttcttatcagaatatctggctggccctgtaatttaaattaaaataaaattttggagaaacaaaaaaaaaaaaaaaaaaaaaggggggg

SEQ ID NO: 4154 - DNA, 416 bp, Homo sapiens
atttaaattactgatcagaagatgaaagtagcttttctcttgggaagtcttgcagcccgtgggagtgataccaggagcaacacagagctcagcagcggcgccaaggtgttccctgtttcctcagcacgtgagccttcaccgcctgcttcattcaggagccagtgcagcagtaatacagtctatacattgttctgttttcaaatttatcctgaggctttgttgagcataaatgattatacgataaaggtatccgttattttggaactcatttcagttgggatctcctgtatgcagagtgttgcatttagaggtttgagtcccatcttggtttcttgccgtgctgactgtagccttcaccttgacttgaatgaaggtctgtggttggaatgtgtgaggagccgctgaggtgtccagag

SEQ ID NO: 4155 - DNA, 400 bp, Homo sapiens
cttattttatgttcttgacttgattttaatgcctcatatgcttgcatgcatgtgtttcttgaatgtatttggtaccctgtgtacatgtctctgggtcaatgacatagaggttttaggccttctgagttaatatttcataacatttgctttagctttttaaattgcaagatagctctgccaaaccctcagggactatttgagcagttttttattcatactctggttttaagacaaggggtcaatttgtcaaagagctttttgtttttctcagattctagcttgctctctactgccctttgcttttccccattcagaaggcaataaggccatccctatacataatatacattaacagtgatctgtaatcccaaactgatggagttaggtaaaactctacagg

SEQ ID NO: 4156 - DNA, 398 bp, Homo sapiens
cgcacaggacatgaggtggcactcaggacacaatttggatgtcagaaccacctgggggtggtgaggacaccaggggatgctgaggacacaaggggaggatcaggacaccagggtctgctcagcaaccaccagggggcgcccaggacatcaggagctgctcagaatcaccagacgtcgttcaggacatgaggtggcactcatgacacaagggggagctcagaaccaccagggggcgctcaggacatgaggtggcgctcaggacacaagggggagctcataaccaccagggggcgctcatgacatgaggtggcgctcaggacacaagggggagctcagaaccaacagggggcgctcgggacactagggggtgctaagaacaccaaggggcggtcaggacg

SEQ ID NO: 4157 - DNA, 407 bp, Homo sapiens
gcgcccacgcgtccggatcaacacaatcttcagtgagtatatcccatatgtttttaaatggttgaaagaagacctatgccttaatcttcataagttcaatgaatttattcaaaacgagcttcaggaagcttctcaagagttacagcagatccatcaatacattatggcccttcgtgaagaatattttgatccaagtatagttggctggacagtgaaatattatgaacttgaagaaaagatagtcagtctgatcaagaacctgttagttgctcttaaggacttccattctgaatatattgtcagtgcctctaactttacttcccaactctaaagtcaagatgagcaatttctgcacagaaatattcaggaatatcttagcatccttaccgatccagatggaaaaggga

SEQ ID NO: 4158 - DNA, 423 bp, Homo sapiens
  misc_feature (1)...(423): n = A,T,C or G
caagaaaaggagtgacacttcccaaaagcgattggcaaaataagtacgactatatgaatccaacaaattagcagtcaaaagatgagctaaaacaagagactaagaagaaaagggagcttgaacagctaagaaaaaaacagaacaaaatcaatactattatacatctaataatttataaagattgaggagtagaagagagaaaactaaaaactgtactattacgttggaaaacctcgaagcaagccaatgcatccatcanaaaaaaggttaaagtaaagacctatgcggagatcaaagttatctacaacgtatgtaaaaaactggaactcaataagtgaaatagaaaacaacattaaggaataacacacagaaaaacttcgttgaaaagaactgaatcggcagactgaacgagcataccacata

SEQ ID NO: 4159 - DNA, 432 bp, Homo sapiens
  misc_feature (1)...(432): n = A,T,C or G
aacatccagtgtcgcatccacctttattatgagtctcttccccacaacaatattcatgtgcctagaccaagaaggtattatctggaactgacactgagccacaacccaaacaacccagctctacctaagcttcaaactagactacttctccataatattcatccctgtagcattgttcgttacatggcccatcatagaagtctcactgtgatatataaactcagacccaaacattaatcagttcttcaaatatctactcattttcctaattaccatactaatcttagttaccggctgcgngcgaattaacaataaaaaaaagaaaagcggggcggcccgctctaaggaatcctcagggggatcaaggggggggggcccgcataaataaaatttgagggcccccacggagtctgcttgtaagcatactttttt

SEQ ID NO: 4160 - DNA, 468 bp, Homo sapiens
  misc_feature (1)...(468): n = A,T,C or G
cgtgggcnnnaatctagacgactgcagcgacaagcnnggaannnngggncaccgcacgcgttcgggacgcgtggggcattcttctctccacatccctctctgtacttacagcccccaatggcccccaaaaagccatagcccaagaaggatgatgccaaggcatcccccaaggcagctccagctcccgcacctccccctgagcctgagcgccctaaggaggtcgagtttgatgcttccaagatcaagattgagttcacacctgagcagattgaagagttcaaggaagccttcatgctgttcgaccgcacacccaagtgtgagatgaagatcacctacgggcagtgtggggatgtcctgcgggcgctgggccagaaccccacacaggcagaagtgctccgtgtcctggggaagccaagacaggaagagctcaataccaagatgatggactttgaaactttcctgcctatg

SEQ ID NO: 4161 - DNA, 465 bp, Homo sapiens
  misc_feature (1)...(465): n = A,T,C or G
gtgggctnaaactgggcgttgncgacggcnccgcaannnngggncgacccacgcgtccgcaggatacttatgggcaacagtggaagtagacaagtatgggcttgaaaatgatactggcaagatacgattggctctagatctacattcttcaaaaaaaaaaattggcttaactgtttcatctttaagtagcattttgctgccatttgtattgggctgaaaaaatcactattgtgtatatactcaagcctttttatttttcctcttttcataaatgctcttggacattattgggcttgcagagttcccttattctggggattacaatgcttttatcgtttcaggcttcattttagcttcaaaacaagctgggcacactgttaaatcatgattttgcagaacctttggttttggacagtttcatttttttggatttgggatagattacataggagtatggagtatgct

SEQ ID NO: 4162 - DNA, 419 bp, Homo sapiens
gcagaccaggccccctgcaggtcccctatccgcaccccggcccctgagagctggcactgcgactcgagacagcggcccggcaggacagctccagaatgaaaatgcggttcttggggttggtggtctgtttggttctctggaccctgcattctgaggggtctagagggaaactgacagctgtggatcctgaaacaaacatgaatgtgagtgaaattatctcttactggggattccctagtgaggaatacctagttgagacagaagatggatatattctgtgccttaaccgaattcctcatgggaggaagaaccattctgacaaaggtcccaaaccagttgtcttcctgcaacatggcttgctggcagattctagtaactgggtcacaaaccttgccaacagcagcctgggcttcattctt

SEQ ID NO: 4163 - DNA, 424 bp, Homo sapiens
  misc_feature (1)...(424): n = A,T,C or G
gctgaggacttttcgaaggaaagggtccgcctagccctgagtcattcggtcttactgtaccgccgtgtgcattccctcatacgatcgagcctgcgtgctgccgaagcagggcgccgagtccatgcgaactgccatctgatccgctcttatcaatgaagcagccgatcatggcggatggcccccggtgcaagaggcgcaaacaagccaatcccaggaggaaaaacgccttggagtcagaaatgagcactcggagcgggagatgccctgctgctgcttgccaccggtgcggcccgtttgtaacttgcaaagtttgttgcttttgcccctgattcgggcagcgggtcctgggatgctcctgcttccctcctgcctcccacggagcccgggaagagggtctgcctccccatcccgccaccttccagcn

SEQ ID NO: 4164 - DNA, 412 bp, Homo sapiens
  misc_feature (1)...(412): n = A,T,C or G
gcgggagggagaaggatcggaagcgcattcgcttctccagcaggcacggcgtggcactcgaggctccaaaagccgcagcccagctcctggcgccactaactacagtaatgcttattttctacaaactcacccagacggggacaagaaaggagccagaacacaagatttaaaaagtcagccctccaaaccgatagttgcaaaaaaaaagaaaaataaggaagcgttcccataccgggagtcgaacccgggccacctgggtgaaaaccaggaatcctaaccgctagaccatatgggaagtgctatgagaaactgccgtgacccacctgacaagcataagtgcctctgcctccttcgccgcacctctcgccaccgccgcctctgcgctactgaagctgctgctgccgccgccgcn

SEQ ID NO: 4165 - DNA, 429 bp, Homo sapiens
  misc_feature (1)...(429): n = A,T,C or G
cccacgcgttcggtacatctttaacttcaaaatacttttagcaggttttaagagaatgggtgttgacaaaataattcctgtggacaaattagtaaaaggaaagtttcaggacaattttgaattcgttcagtggttcaagaagtttttcgatgcaaactatgatggaaaagactatgaccctgtggctgccagacaaggtcaagaaactgcagtggctccttcccttgttgctccagctctgaataaaccgaagaaacctctcacttctagcagtgcagctccccagaggcccatctcaacacagagaaccgctgcggctcctaaggctggccctggtgtggtgcgaaagaaccctggtgtgggcaacggagacgacgaggcagctgagttgatgcagcatgtcaacgtattgaaacttactggtgaaan

SEQ ID NO: 4166 - DNA, 134 bp, Homo sapiens
cttagggtggcctctcactcccaccactctgggccccttgggggaggactggggagggggccgtgggagagccctgacgctggaacctgtatacacaataaaggacagtctcacagaaaaaaaaaaaaaaaaag

SEQ ID NO: 4167 - DNA, 477 bp, Homo sapiens
  misc_feature (1)...(477): n = A,T,C or G
cccacgcgtccggtcttcttcagactgcgccatggggctcagcgacggggaatggcagttggtgctgaacgtctgggggaaggtggaggctgacatcccaggccatgggcaggaagtcctcatcaggctctttaagggtcacccagagactctggagaagtttgacaagttcaagcacctgaagtcagaggacgagatgaaggcatctgaggacttaaagaagcatggtgccactgtgctcaccgccctgggtggcatccttaagaagaaggggcatcatgaggcagagattaagcccctggcacagtcgcatgccaccaagcacaagatccccgtgaagtacctggagttcatctcggaatgcatcatccaggttctgcagagcaagcatcccggggaactttgtgctgatgcccagggggccatgaacaangcccttggagctgttcggaagacatggcctncaactacaaggan

SEQ ID NO: 4168 - DNA, 502 bp, Homo sapiens
  misc_feature (1)...(502): n = A,T,C or G
tggaatctaaaaaagaggaaaagaatgtgcttaaaggaatgaaagtctaggactttgggaaaaatatgtcaactctgttgtcattaaacctcttaattctcttaaaatcttaacctttttaagattaagattcattaagtgaaacaaacaaaactctttaaatacagtgcacatagccattctaagttaacacgtctttttttctctgcattttatctgaagggccagaaaccaaatactcttattaaagctggacactgtgcttaagcagtcctatgaagtaaggcatatcaaagcttttttaaggcatcacaaggctatatataaatgtatgacattgtgcttttacagcctaacaataacaacacgtagtcttttacagcttatagagtcctttcattaatattaagtgatttgatcctcacacatccctatggactaagtgttgatttttcttctttacatataaggaaactggctanaaggctggacttgcccagag

SEQ ID NO: 4169 - DNA, 407 bp, Homo sapiens
  misc_feature (1)...(407): n = A,T,C or G
gcagcgaccgngnnacagaacaatcttgaatcatgaagctactaaccagagccggctctttctcgagattttattccctcaaagttgcccccaaagttaaagccacagctgcgcctgcaggagcaccgccacaacctcaggaccttgagtttaccaagttaccaaatggcttggtgattgcttctttggaaaactattctcctgtatcaagaattggtttgttcattaaagcaggcagtagatatgaggacttcagcaatttaggaaccacccatttgctgcgtcttacatccagtctgacgacaaaaggagcttcatctttcaagataacccgtggaattgaagcagttggtggcaaattaagtgtgaccgcaacaagggaaaacatggcttatactgtggaatgc

SEQ ID NO: 4170 - DNA, 514 bp, Homo sapiens
  misc_feature (1)...(514): n = A,T,C or G
gctcaagtgatcctcctgccttagccacctgagtagctgtgactgcaggcatgtgccaccacgttcagctaacttttacattttttttgtagagataggctctcagtatgttgccctggctggcctcgaactcctggggtcaagcaatcctcccaccgcagcctcccaaagtgctaggatgacaggtgtgagccactgcactgcaaaaatacagaagaccaaattattaaaactagaaatgagaggggacattactattgttcttagagacataaaaaggattataatatgaataaaaaggattatacatataaacaatatatgctaataattggataagctggatgaaagacacattaccagaaagatatgaactactgaatctgacttgagaaaaaaacagaatatctgaatagacagacctatgtcaagtaaagagaatgaggtagtaatcaaataacttttcactaagaaaagctgaagaccagcaggcagccctcactggtgactctan

SEQ ID NO: 4171 - DNA, 423 bp, Homo sapiens
aggttgctccacaggtagctctaggagggctggcaacttagaggtggggagcagagaattctcttatccaacatcaacatcttggtcagatttgaactcttcaatctcttgcactcaaagcttgttaagatagttaagcgtgcataagttaacttccaatttacatactctgcttagaatttgggggaaaatttagaaatataattgacaggattattggaaatttgttataatgaatgaaacattttgtcatataagattcatatttacttcttatacatttgataaagtaaggcatggttgtggttaatctggtttatttttgttccacaagttaaataaatcataaaacttgaaaaaaaaaaaaaaagggcggccgttttaaagaatccttgggggggccaaagtttacccttgcttgca

SEQ ID NO: 4172 - DNA, 468 bp, Homo sapiens
  misc_feature (1)...(468): n = A,T,C or G
acggctagnnnnnaactaaaaactagagcaatcgcaccggacnnccngggtagacccacgcgtccggaagaggaagggcataaggagagtgacaggaacaattacgataccaacatgaaagctcccgggccagctcttaaggactcaagtttcttgtcacccaatgggcccagtgccctggctgccaggatagccctgctggcaagttggggcccagtcaggctgggcccagtgggcatgcagttagtgggagccccagcgggttagcccttcccctagcaagccagtgagagcaagcggagagagcagacatatttaccattataaacggcttgagtggggatgtgctgctctagccgcctttcccctgtttgacattgtaaaaacgctgtttaagtgctgggcagaagccactgtggccctctggccccggacccctccccaccctcttctccgcactgacagccn

SEQ ID NO: 4173 - DNA, 413 bp, Homo sapiens
  misc_feature (1)...(413): n = A,T,C or G
cccacgcgtccgttttttttttaaatcatgacacttggaggtttagcaccagcatccaaaatgaacaaaaacggaaaaaaaagcatttactatatatttcaaatttctttggttggggttctccccatgtggtattaatatttcttgtttcaatatatatattaccaaaacagtaaaaaccaggaaaaaaaatagaaacctagcggttgctgaaactggagaggctactctcttgtcttccgtgcaggaattcccaggttctcagcttgctggaaaaatttgttgacattttctttttgtagttgtttcttaaagaataacagtaaacattccaatgtccaaatcttggttagtcttccactttattgcttggatgtttctttggtgttggttaaggttgtggcctgcttttn

SEQ ID NO: 4174 - DNA, 537 bp, Homo sapiens
  misc_feature (1)...(537): n = A,T,C or G
ggagcnagcnccccncaattgaccccgatggaacgcctgtggtaccgggcccgacccacgcgtccgtggctgctcagagtgagcttgcttaggtactggtggctactatgtggctccagtttgaacgccctcgtccccaggaaggattttgtggtcctgtgcctttgtgatccagacaaagacggtagctcagtgcgttgagtattattacatctggaaaaaaatgatcaagtttgactgtggccgagccccagggctagaaaagagggtcaagagagagccggaggaagtggaaaggacagaggaaaaggtcccatgcagccctcgggagagacccagccaccatccaactcccaagttaaagaccaagagttataggagggagtccatcctcagctccagcccaaatgcaggctccaagcggacccccgagctgttgggaagtgcagagagccagggcatttttccatgcatagagtgtgaaagggtgtttgacaagatcaagagtcgaaatgcccatatgaagcggcaccgcct

SEQ ID NO: 4175 - DNA, 430 bp, Homo sapiens
agaaggcattaataaaactgtccttgtgaagagatgacatgattgtgtatataggacattataaagaatcatcatcaacaataaccaaaatgtttaaaataaatgagtttaacaagatcttaggataaaagagcaatatataaaaagcaagtgtatttctaaactagcaagacataattagaaaatacaatttcaagtaaaatataccatttataatggcatacaaaaacatggaatatttaggaatacatttaacagaatatattcaagatgtacacagtgaataactgaaaacactgttggaacaattaaaagatactttaaatataagtgaaatgtaaattagtatatagatgctatacaatcccagtaaaaattcagtcatgctttttaaaacaattgacaagctgttgagtgcagtggttcatgg

SEQ ID NO: 4176 - DNA, 413 bp, Homo sapiens
agcagcctctgaggctgcgtgcctgatcgtgtctgtagatgaaaccatcaagaacccccgctcgactgtggatgctcccacagcagcaggccggggccgtggtcgtggccgcccccactgagaggcaccccacccatcacatggctggctggctgctgggtgcacttaccctccttggcttggttacttcattttacaaggaaggggtagtaattggcccactctcttcttactggaggctatttaaataaaatgtaagacttcactgaaaagaaacccacccaacaaaaaaataaaaaaataaaaaaaaaactggggggccgtgttttaaaaaatttcttgggggggcgaagttttgggggggggggcaattttttttttttgttcgttaggggggttaaataaaagactgt

SEQ ID NO: 4177 - DNA, 437 bp, Homo sapiens
aagacataaaaaaaacagttgggtttcagtaaaagcgtgtttcaagttgggtctcaacttatagaagtaattgggagcgcgatctatcataaccataaggaggggagcgatacaaccatccttgggagtttataggataagagcctttattttagggaatgcaacaagttacagacatacttcaactgggattaaaacctcataggcatttttattaattgcccttaatatttggacatatagggatacataaatttaaagaataaaatttctcagttttttcagatattgccatactgaacctcattctaaactggtgctgtggatagtctttccctctcccctcctgttttagtttaaggaaaggtttccttcatggaaaagcacttttaattttgagaatttcacatttaaaattagccaaagcctgatgttag

SEQ ID NO: 4178 - DNA, 409 bp, Homo sapiens
  misc_feature (1)...(409): n = A,T,C or G
aacatgctctccagtttggggagtctacttctctgtggaagtattacactagccctgggaaatgcacagaaattgccaaaaggtaaaaggccaaacctcaaagtccacatcaataccacaagtgactccatcctcttgaagttcttgcgtccaagtccaaatgtaaagcttgaaggtcttctcctgggatatggcagcaatgtatcaccaaaccagtacttccctcttcccgctgaagggaaattcacagaagctatagttgatgcagagccgaaatatctgatagttgtgcgacctgctccacctccaagtcaaaagaagtcatgttcaggtaaaactcgttctcgcaaacctctgcagctggtggttggcactctgacaccgagctcggtcttcctgtcctggggtn

SEQ ID NO: 4179 - DNA, 418 bp, Homo sapiens
tgcaaaatgccactctgcatcatctgaacgctattgaggcactttaattaagctaagcccttactagaccaatgggacttacacccacaaacacttagataacagctaagcaccctaatcaactgggttcaatctacttctcccgccgccgggaaaaaaggcggtagaagccccgccaggattgaaactgcttcttgcaatttgcaattcaatatgaaaatcacctcggagctggtaaaaagaggcctaacccctgtctttagatttacagtgcaaggcttcactcaggcattgtacctcacacccaacaaaaaaaaaaggggggggcctgtttataataacccttcaggggccaaacattcgcgggggcatatgcctataatcccatctactttgggggcgggaaaaaaaagaaaac

SEQ ID NO: 4180 - DNA, 421 bp, Homo sapiens
  misc_feature (1)...(421): n = A,T,C or G
cggacgcgtgggcggacgcgtggggcggtgtcagaggccctgatccgagaggtggccaacaaagtcaaggtccccctgcaggatctcatggtccggaatgacaccccctgtggaaccaccattggacctatcttggcttctcggctggggctgcgggtgctggatttaggcagcccccaactggccatgcactctatccgggagatggcctgcaccacaggagtcctccagaccctcaccctcttcaagggcttctttgagctgttcccttctctaagccataatctcttagtggattgagccctcttggaaagacttctctgccatccctttgcacctgaggggaagttctcagctgagctgaagctggattattaaagtggattgtcactcnnnnccnnnnnnnncnnnnnacannntn

SEQ ID NO: 4181 - DNA, 508 bp, Homo sapiens
  misc_feature (1)...(508): n = A,T,C or G
nggtgcacatagaacatacggcagtggcaccggnccggaatttttggggcgacaccacgcctccggagaaagaaaagagatagaagtagtaaagagaaaagagttttttctattcctttaaaagccagggtaaatttaaaacctataattaataattaaaggtcttctctgtgaccccataacactcccaaaccaccttgttgtcagtgtaaacaagggtgtagcccgaaagcactgaggccactggcaactgtagccttcctaatcaaaaatccttaacccagtaacccatggatggcccaaaagcattcaatctgtaacggcaactgctttgctaacagaataaagtagaaaaataacttttagaggaaacctcattgtgagcacacctgatcaggtcacaactatcctatgttaaaaaagaagactttgaaaaggcaaaaagcaaaggcctccccaaaagaaattgttaccccccccaacatccttaaagtatgggcgttgttgg

SEQ ID NO: 4182 - DNA, 390 bp, Homo sapiens
tgatgaatagattaggaaggaatttttaaccattagatcacttcttaatcctcagtaaatattttctaaaatgtatgcatactcagccctaatcccagagtctcaagctgtgaaggtctaggtaagacttggacatctgtagttttttaaaactccatggaatttctaataaccccccatgagaacccgtggattagaggcaaaggaaaggccgttttagacttcttgattcttaatgaccaagcgtggtggctcacgcctgtaatcccagcatgttgggaggccaaggcagccagatcatgaggtcaagagatcgagaccatcctggccaacatggtgaaaccccgtctctactgaaaattcaaaaattagccggatttgatggtgtgg

SEQ ID NO: 4183 - DNA, 417 bp, Homo sapiens
attgactgccccactgtcatctgcctctcaatttggtactgtgtagctctgtgaccaccaccaagcctttttccgtccgccacaaagctcttttcggaagattccctacgggagctgaattttaagcccatttactttataggatgaaacagacgggcaccatgtccgctgaaacaccaatcacattgaatatcgatcctcaggatctgcaggtccaaacattcaccgtggagaagctactggagcctctcataatccaggttaccacacttgtaaactgtccccagaacccttccagcaggaaaaaaggacgttcgataagagccagtgtccttctagcttgtgtggaggaagcgacttggattttattacactagggagagaagattgcccaggaagctacagttttaaaggatg

SEQ ID NO: 4184 - DNA, 417 bp, Homo sapiens
  misc_feature (1)...(417): n = A,T,C or G
actagttctagatcgcgagcggccgctcgcgatctaaagtggcacccagagggccagaccgtggacatatatacacacatacatacatccctgcatatgtgcacacagacatacctcccgcacaccagcgcccactggggcaccgtcgccagctcagaatccgcttcagtgtctgcacgatcagcagcaccgacacacaacccgtggctttacagagcaataacacaaccgggtgtgacaccccgcgacgtggacacacaaacacaatctcgtgccctcatgtacgagtgtcacagccacagttcactacatgaaccctcaaaacctagccaccccccacattcctttaaggaacacaccctagcattacttatatgatacgtctccatacccattacaatctccagcattcccccn

SEQ ID NO: 4185 - DNA, 420 bp, Homo sapiens
tatgtgcctgagatggtgctcacccctgatgatcagcgcctgctggcccatgtcaccctggagctccagcactatcaccagctacttgagaaggttcggatccgggatgccttgcgcagtatcctcaccatatctcgacatggcaaccaatatattcaggtgaatgagccctggaagcggattaaaggcagtgaggctgacaggcaacgggcaggaacagtgactggcttggcagtgaatatagctgccttgctctctgtcatgcttcagccttacatgcccacggttagtgccacaatccaagcccagctgcagctcccacctccagcctgcagtatcctgctgacaaacttcctgtgtaccttaccagcaggacaccagattggcacagtcagtcccttgttccaaaaattggaaaaa

SEQ ID NO: 4186 - DNA, 396 bp, Homo sapiens
ttggggtgtccgagttgccgccggagaggagtggcctcgcccgcttgagttttgattcatcatggataatctgtcatcagaagaaattcaacagagagctcaccagattactgatgagtctctggaaagtacgaggagaatcctgggtttagccattgagtctcaggatgcaggaatcaagaccatcactatgctggatgaacaaaaggaacaactaaaccgcatagaagaaggcttggaccaaataaataaggacatgagagagacagagaagactttaacagaactcaacaaatgctgtggcctttgtgtctgcccatgtaatagattctcagatgttggttgtttctatgaaaccaggcaggaaattgaatgcattatgtttttaaaacttta

SEQ ID NO: 4187 - DNA, 424 bp, Homo sapiens
  misc_feature (1)...(424): n = A,T,C or G
cgctggtatagcaatgttagtattcggcaacctgagttgtactgtaataacttttcaataaatcaaaatatgtgaaccagactattttcttatgtatagaagagatatgttattttagaatcctatttaaaatataagaaatgaatcaaaaacttccaaaattttaatttctttgatttttctaggatttctaccttctagaatataaagctcttattctttttactgaaatcttagctttacttcagcatcaagctgcttcataatgcaagggctaacagttaaaatgagagttaaatatcatttaaagagaattatttaacggccgtgttactgttatgaaattgtacatgttccaaaataagtctagtcacctatcacaccccatcctttnanaaagaagaaaaaattaaagaaagagggg

SEQ ID NO: 4188 - DNA, 430 bp, Homo sapiens
  misc_feature (1)...(430): n = A,T,C or G
caggcagttaatctcatgctcagaagatggcagtgtacgcatttgggagttaagagaaaaacagcagcttgcagctgagcctgtaccaacaggtttttttaacatgtggggatttggaagagtcagcaaacaagccagccaacctgttaaaaagcagcaagaaaatgctacttcatgttcactggagcttattggagatttgattggacactcatcatctgtggagatgtttctatactttgaagatcatggactagtgacgtgctccgctgatcatctcattattttgtggaaaaatggagagcgagaatctggattgcgcagtttaagattatttcaaaaattagaggagaatggtgacttataccttgctgtctagtttaaggaattaaaaatacacatgcatgaaccttgaacatcaaaaaaaaan

SEQ ID NO: 4189 - DNA, 392 bp, Homo sapiens
ctaaggaagatactagtggataagaagctgaggataaaagagaactggcaactgcacatgagacagtgctggaccaatgtcaaaataaaaatcaatacgtgtatcaaactaatggtgaccaatttcacgaaaggtagggttacagcattgcgtatccacagcaatgttttctctagagctatgtgccattgcggtttaaggccttattgaaaggataaatgaagagagtttgaagcaatgatttataacttggttttccagcttatatgaatttttcatggccacattttctagccattattttttcttcttgcctgtgatattttcaggcattttgttattttctatgttttctaccaactggtagacaaagatgatgattaatagtgccg

SEQ ID NO: 4190 - DNA, 419 bp, Homo sapiens
ggtagaatagtgtatgtgagtatcacgctcagttcagtgaagagagaaacaacacagtaatttgaacatagaaagtttaatataattgttaactataacagaggattggagtaatgagggatcagttagtaaaggaaagataactctaaagaaattatatgagtagcaaacataaagaaaagccagactctgaggctgagataaagtgcccaaggaagagcctctcctcccccatcctgagggctgaggtatagggctgtgttctctcaatgacagagaaatcactgtggtgctatgttggtggaacttgctaggaactcccctctatggtgctcacgaaagctgttcgttgagagatatctctctacagtaactctactatgataccacccaaggtgagggtaatgatgctgctgctt

SEQ ID NO: 4191 - DNA, 466 bp, Homo sapiens
  misc_feature (1)...(466): n = A,T,C or G
acatgcgcggaaattangggtcgacccacgcgtccggcctcgcttccctcccgcggcgaccagggcccgagccgagagtagcagttgtagctacccgcccagaaactagacacaatgtgcgacgaagacgagaccaccgccctcgtgtgcgacaatggctccggcctggtgaaagccggcttcgccggggatgacgcccctagggccgtgttcccgtccatcgtgggccgcccccgacaccagggcgtcatggtcggtatgggtcagaaagattcctacgtgggcgacgaggctcagagcaagagaggtatcctgaccctgaagtaccctatcgagcacggcatcatcaccaactgggatgacatggagaagatctggcaccacaccttctacaacgagcttcgcgtggctcccgaggagcaccccaccctgctcaccgaggcccccctcaatcccaaggccaacn

SEQ ID NO: 4192 - DNA, 419 bp, Homo sapiens
aagttctcccaggagaaagccatgttcagttcgagcgccaagatcgtgaagcccaatggcgagaagccggacgagttcgagtccggcatctcccaggctcttctggagctggagatgaactcggacctcaaggctcagctcagggagctgaatattacggcagctaaggaaattgaagttggtggtggtcggaaagctatcataatctttgttcccgttcctcaactgaaatctttccagaaaatccaagtccggctagtacgcgaattggagaaaaagttcagtgggaagcatgtcgtctttatcgctcagaggagaattctgcctaagccaactcgaaaaagccgtacaaaaaataagcaaaagcgtcccaggagccgtactctgacagctgtgcacgatgccatccttgaggactg

SEQ ID NO: 4193 - DNA, 459 bp, Homo sapiens
tttccggtcgacctacgcgtccgctttgtatattggatatatttaatatttattatagtgagtggataaattgatactgaaattgggctacttgtagaactgtagatgcatttgtatgcctcttctctctgaaatttcttctctcttgatcaaggcatcaaaaaagagtatttttaggatgcctgatttagtaaaaataacctaaagtaattctttgcctttttagtgaatttgccagcctcagatctcagagttctttgaaaagattaattcaggcaggaaatgtaatgctggtgatacttaactttaccttttcaattctttgctgaatgctctttttaacaggaccacgaaactttttctgaatttcctacaacagccctgtgaaataggtagccaggaaggttgtagccagattacgacatgctatacaaaagcaacaaataggaacaaactggg

SEQ ID NO: 4194 - DNA, 459 bp, Homo sapiens
  misc_feature (1)...(459): n = A,T,C or G
aaggactacgagggggctcgctgctgcgccctgggctcgtctttgcagagaggtccctgccctcatctctctaccccgaggaccgcctctgtacctaccttgcttgttagacatgtggctgccccatttatccacctgcatcttttttgcagcctgggtggctatgggtacttcgtggccgcacatcctacagttggaaatccatccagaggccatgttccaataaacaggagatcgtgtatttggtcttttccagaaggggggcgttgaacaaactaattccgactttgggggggggcccttttttagatatgtcgggggggcccccccacacccccccctgagagaaaaatcttttttctcaaagaggagctttaaaaaaaactcggggggctttttgggaagagccccttttttttgggggggggagtgnngaccaccccccccggggtatcggct

SEQ ID NO: 4195 - DNA, 422 bp, Homo sapiens
cccacgcgtccgataaatattatactagcatttaccatctcacttctaggaatactagtatatcgctcacacctcatatcctccctactatgcctagaaggaataatactatcgctgttcattatagctacccgtatttaccctatagcaccccctctaccccctctagagccagaaaaaaaaaaaaaaaaaaaaaaaaaaaaaaaaaaaaaaaaaaaaaaaaaaaaaaaacataaaaaaaacacaaaaaaaagaaaaataaaagcaaaacgaaaaaatttggggggggggggcctttaaaacatgctccggggggggtttttctctggggggggagggaaaaatttttttttttttttggggggggggagaaaaaattccggggttgttgataggggaaactctccttttagggggggaag

SEQ ID NO: 4196 - DNA, 464 bp, Homo sapiens
gatgcttggaatatttggggagacccacccgtccgacaccctctcctgtccagccttcgcccgcctgggctgtgcccggcgccgtccgtggatgagccacagaaggtcttccaccttccgagcggagagaagtttccattcctcttcttcttcctcctcctcttccacctcctcctcggcctcccgtgccctcccggcccaggacccgcccatggagaaggccctgagcatgttttccgatgactttggcagcttcatgcggccccactcggagcccctggccttcccagcagcccatcccacagcccgccccggtggggcaggcaacatcaagaccctaggagacgcctatgagtttgcggtggacgtgagagacttctcacctgaagacatcattgtcaccacctccaacaaccacatcgaggtgcgggctgagaagctggcggctgacggcaccgtcatga

SEQ ID NO: 4197 - DNA, 478 bp, Homo sapiens
cccacgcgtgcgcccacgcgttcggacctgccggcgtgcgtgagggtgattataaaaggatgtttccttgagaaaaaaaaaattatttctatcctcttctattgattattagggtaatcatttaagtacttatcaggagtgtattggtattttgcgttttgttgtcataaatgctttttgctggcactctagtggttactatcctgtgccttcctctcctcccctactcccccagagaaccaaggcgtctggtggattgactggggggcagagggggtttccccagcaaaatcaaacacctgtcttcatagtagccactcaaaaactggagtgctctatgcgtgtaactttttaaatgagagtgtttatgaacataacaatttaccaacgtgtgagggagttgttgaattgaagaatgctcgcttgaggagcttcagaggaatcttagcatagccaagttcagttccccacagcctcg

SEQ ID NO: 4198 - DNA, 463 bp, Homo sapiens
  misc_feature (1)...(463): n = A,T,C or G
cagtgcctgaanttttccggagagcnatcagtgcggtgttgtttctgctgggtcccccagtttccatctttttaactatgacctactgcttggcgggcatggctgggcttcttccaatgagacctttgatgggctggactgtccagctgcagggagggtggccctcaaatatatgacccctgtgattctgctggtgtttgcgctggcgctgtatctgcatgctcagcaggtggagtcgactgcccgcctagacttcctctggaaactacaggcaacaggggagaaggaggagatggaggagctacaggcatacaaccggaggctgctgcataacattctgcccaaggacgtggcggcccactatatgggccatgagcgccgcaatgatgaactctactatcagtcgtgtgagtgtgtggctgttatgtttgcctccattgccaacttctctgaggtctatgtg

SEQ ID NO: 4199 - DNA, 422 bp, Homo sapiens
aaccaaggcagcataccataattttagggcatttcaactaactcagtctctactacatcctatttatttatcaatggaataaaaatagtctcctgcactttcagttctaagtggtgcccatttgaagtgatgttcatttataggagggaataaaatatgctgtctcttgcagaataaattattactgtttaaagctagattggcagggcacagcggctcatgcctgtaatcctggcactttgggagattgaggtgggtgaatcactcgagcccagaagtttgaggccaggctaagcaacatggcaaaacctcatctctactaaaaaaaaaaaaaaaaaataggcgtgggggggcacacctttagtcccacctactttggtgggctgaggtaggaggataatttgagccctggaggtcaagga

SEQ ID NO: 4200 - DNA, 420 bp, Homo sapiens
  misc_feature (1)...(420): n = A,T,C or G
cacaaacatcttctgatcaaacggtccctgcgctgccgtttatgtgaacataatttgagcaagccagaatttaacccaacgtcaatcaaattcaaaatccagctggtcgctgtcaattatattccagaagtgagaatcatgtcaattcccaaccttcgctacatgaaggagagccaggtcctcctgactcttacaaatccagttgagaacctcacccatgtgactctcttggagtgtgaggagggggaccctgatgatatcaacagcactgctaaggtggtggtgcctcccaaagagctcgttttagctggcaaggatgcagcagcagagtacgatgagttggcagaacctcaagactttcaggacgatcctgacattatagccttcagaaaggccaacaaagtgggtattttcatcaan

SEQ ID NO: 4201 - DNA, 424 bp, Homo sapiens
agtcgcgaccctggtccggacctgacctgaattgcgaccccaacctggactgctcccctgaccgcaacccctacccccgcccaccagcatggcccggcacgtgttcctaacggggcccccaggagttggaaaaacaacattgatccataaagccagtgaggttttaaaatcctctggtgtgcctgttgatggattttataccgaagaagtcagacagggagggagaagaataggattcgatgtcgtcacgttgtccggcacccgggggcctttatcgagagttgggttagagcctccacctggaaaacgtgaatgccgagttgggcagtatgtggtcgacctgacttcttttgagcagttggcactacccgtcttgaggaatgccgactgcagcagtggcccagggcaaagagtgtgcgtcatc

SEQ ID NO: 4202 - DNA, 400 bp, Homo sapiens
  misc_feature (1)...(400): n = A,T,C or G
ctaagagaggggaagatgttaccctgtctggtgtccagtttcctcatctgctaaaagggcgataacagtagagttacaaacattaaattagtacacataaagcattcataggccaggtgcggtggctcacgtctgtaaatccagcactttgggaggccaaggcaggcagatcacctgaggtcaggagtttgagaccagcctggccaacatggggaaaccctgtctctactgaaaataaaaaaattagctgggtgtggtggtgggtgcctgtaatcccagctgctcaggaggctgaggcaggaggattgcttgaacccgggaggcagaggttccagtgagccaagatcacaccactgcactctagcctgggctacagagtgagaccccttctcaaaaaaan

SEQ ID NO: 4203 - DNA, 462 bp, Homo sapiens
  misc_feature (1)...(462): n = A,T,C or G
tgtcgggtcgacttacccgtccgcagccagcgcaggggcttctgctgagggggcaggcggagcttgaggaaaccgcagataagtttttttctctttgaaagatagagattaatacaactacttaaaaaatatagtcaataggttactaagatattgcttagcgttaagtttttaacgtaattttaatagcttaagattttaagagaaaatatgaagacttagaagagtagcatgaggaaggaaaagataaaaggtttctaaaacatgacggaggttgagatgaagcttcttcatggagtaaaaaatgtatttaaaagaaaattgagagaaaggactacagagccccgaattaataccaatagaagggcaatgcttttagattaaaatgaaggtgacttanacagcttanagtttagtttaaaagttgtaggtgattaaaataatttgaaggcgatcttttan

SEQ ID NO: 4204 - DNA, 413 bp, Homo sapiens
  misc_feature (1)...(413): n = A,T,C or G
aacattcttaatatagggtaaagagcgcgaggcttcttaagccttctaggggctgccctaactactcagttgtcataatgcaaaacaaaaccatagacagtatggaaatgaattaccgcggctatgttttaataaaacaacttatatttacaggaagcgggctgaattcggcccacctcacataagttactgactgttgcttgaattccctagagtccgctttcagaatgggatatttatttaaaaaaacaagcttgataaaaatcntgatgtacctcacctgtgtaaaagagctacaaagtacgaactaaaatatgtatataaagtttctagtatagatgtatttgtataacagtgaagagactgtaaatgtaatgaaaatggttagtgggtaaaataggtcatttgtgtgc

SEQ ID NO: 4205 - DNA, 467 bp, Homo sapiens
caatatcaaaggaagatacaatgctaagttggtactattgtagtagctatcagagtgcagtttaccaaacagcaatttatcctacacataaactgcagacctaaacaataatacatatacatagttattctttgcaccattgtttgcaaacaacctaaataccagtcacctctatggcattcctcctccaaaatttgtattccctcatctaaatcatgagaaaagacaaaaccaaactgaaaaaggacttctacaaaatacatcaccagccgtcttcaaaagcatcaaggtcatgaaaaacaaggcagaaaaactccagagtggaggagaccaaggaggagtaggttctggagaagacaaaggacacttgggcaatctaaagtctggagttcacttaacagtatcaacccaatattaatttcttagtttgatgaatgcatcgtgattatataacattagaggaagct

SEQ ID NO: 4206 - DNA, 416 bp, Homo sapiens
  misc_feature (1)...(416): n = A,T,C or G
cggacgcgtgggcggacgcgtgggctgctacggtggactgtgagactcagtgcactgtcctcctcccagcgaccccacgctggaccccctgccggaccctccacccttcggcccccaagcttcccaggggcttcctttggactggactgtccctgctcatccattctcctgccacccccagacctcctcagctccaggttgccacctcctctcgccagagtgatgaggtcccggcttctgctctccgtggcccatctgcccacaattcgggagaccacggaggagatgctgcttgggggtcctggacaggagcccccaccctctcctagcctggatgactacgtgaggtctatatctcgactggcacagcccacctctgtgctggacaaggccacggcccagggccaacccaggcn

SEQ ID NO: 4207 - DNA, 411 bp, Homo sapiens
ctgagttctgcgattctgctctttgaaatctgccaatctgccctcacagaagagagtggttacagtcaggcaatgtgctaaacaataagactggagtgggacctggtacctggggtgttattgggggcagaagatggcaaacatccagacttcggagccactttgtatatgaactaggagggtttcttatactaaaaaaaaaaaaaaaaaaaaaaaaaaaaaaaaaaaaaaaaaattttggaaaaaaaaaaaaaaaaaaaaaaaaaaaaaaaaaagggggggggggttttttaaaaattttttgggggggccaaatttttccggggggggggaatttttttttttttttttttggggggggttttaaaaaccctttggggtttttttggaaaaaaccttttttttgggggg

SEQ ID NO: 4208 - DNA, 493 bp, Homo sapiens
  misc_feature (1)...(493): n = A,T,C or G
ggaatacagtagnacttgnanatngcatgaggtaccatnannaaccncncanntnngggnagacccacccgtccgattttatttttagaaatggtttctcactatgttggttttgctgcctgaattctggggtttttgtacgcggaaactggtgatgcaagtactgaatgtacctcaggcagctggaggaagatacagacggattgccatccgtcccccaggttaaggattcccaatgaagtcactctcttcccaccactcctcctgagagggtacggtggaaggaagggtctgaattttcctccccagaatttcccaagacacaggtatatttgtcatgaatgtgaggagtgagaacaagggcctgccccggcccccagtctgattgccctctccggcactgcttgctgtgggtgttaggcccgcttaaatttttgttgttgttgttgttgttcttcatggagtctcactctgtcacccaggctggagtgcg

SEQ ID NO: 4209 - DNA, 416 bp, Homo sapiens
  misc_feature (1)...(416): n = A,T,C or G
gctgcgcttccctggtcaggcacggcacgtctggtcggccgccaggatgcaggccccgcacaaggagcacctgtacaagttgctggtgattggcgacctgggcgtggggaagaccagtatcatcaagcgctacgtgcaccagaacttctcctcgcactaccgggccacaatcggcgtggacttcgcgctcaaggtgctccactgggacccggagactgtggtgcgcctgcagctctgggatatcgcaggtcaagaaagatttggaaacatgacgagggtctattaccgagaagctatgggtgcatttattgtcttcgatgtcaccaggccagccacatttgaagcagtggcaaagtggaaactccaagttaagtctccctaatggcaaaccggtttcagtggttttgttggccaan

SEQ ID NO: 4210 - DNA, 511 bp, Homo sapiens
  misc_feature (1)...(511): n = A,T,C or G
taaccacttactgacaaagttagaaccaaacctaagtttagtgaatttccagatcattttagaaaatatgtataactagcgtgaaataggaactacttaaggaaaacggcatggtgttcttagtcatgggggattttgctttgtttttggcttggtttgattttagttgacaaatgaggcaacatacaaaaaattaaataagtacttaagattatggtatttaaatttaaggctttttatagcatatggtgtaagaagaatttgcatattctgaaatgtttatactagataaggcattcccaatttagagtccaaggaagggaagtagcataattagaaactcaatgaccaaagccttttcaaacgaattcccaaatgccctacaagcaagtttttacatttgataagtactagtgaaaacaatacataaaaaatctgaagaacttaaacatagtaggtatattttataaccaatagatacgcttttcatatgtaagggagatttactcan

SEQ ID NO: 4211 - DNA, 402 bp, Homo sapiens
  misc_feature (1)...(402): n = A,T,C or G
gttaacannngnaaggtctaagatggcggcagtggctacctgcggtagtgttgccgcgagtactgggtctgcagtggcgacagccagcaagagcaacgtcaccagtttccagaggaggggtcctagagccagcgtgaccaacgacagcggccctcgactggtgtccattgcgggcacgcgaccgtcggtgcggaatggacagctgctggtatcaaccgggctcccagccctagaccagctcttaggtggaggtttagccgttggaacagttcttctaattgaggaggataaatataatatttactcacctttgctcttcaagtatttcctggcagaaggaattgtcaatgggcatactttgttggttgcatctgctaaagaggatcctgccaacattgtaca

SEQ ID NO: 4212 - DNA, 483 bp, Homo sapiens
  misc_feature (1)...(483): n = A,T,C or G
agatgagaggntnnnnnnactgaaactgaggacctgcgaaggacctnngggtcgacccacgcgtccgctttttttacccgcactcaatgcatctagccaaatatagctttgttgttgttgcagttgttcttaactggtctggctggctgaatcacatttagaatggctttaataataaggaaggcttcttgttgactttaatgaattcattcaagatataatgtgtatggtaggtacagatgtcacagtcttaaagagggttaaagaatatcactgctttgtatggtatagagcttgatggtgtatggccacactctgacaatatcctggaaggttctctggatttcctgctgtaattctttctagtttattggctgtgtataattaaacagcgctttctaagtagcaaaacttggttgtagatactgatgcagcttagcaaaaaatgttctatgatggcagttagtccaacttttatcttct

SEQ ID NO: 4213 - DNA, 451 bp, Homo sapiens
  misc_feature (1)...(451): n = A,T,C or G
cccacgcgtgcgacttactagtttagcctctaggttatggcacagcatgctaaaaaatcatgtgtttaaaagtaaatgttggtaaaatgctggcatctggtcctattgtgttgatgcattttcacttctgtggtcataggaaatggactggtctaaagagagtgaggcacaacacaagcagggcattagtttgaataggaagtcaatcatatttggttttatggcctggtgtattttgggtttaagataaaatagggaaaaatgtcagaaatgatccctatgcatttattttcatggatacccttaatttcatgggcatgcctaataatgatctatgttctaactggagcttanggcttattttatatattggagtgtagctttattacagatggattttatctttcaacattgcattttgatcaactttgtatattcacgtgtattaaan

SEQ ID NO: 4214 - DNA, 394 bp, Homo sapiens
ctgggggcgagctggggtcgcgcaatacagactgtttcctgcaaatcacgcgagatttcgttcacccgggctccacacggagtattttatacagaaatcttgtgaaaccactgcccaaccagagcaatgattgttcaaagagtggtattgaattctcgacctggaaaaaatggtatatccagtggcagagaatttccgaatggaagaagtctatttaccagataatattaatgaaggacaagtacaagttagaactctttatctttctgaggatccttacatgcgtagtagaatgaatgaagacactggcactgattatataacaccttggcaggtatctttagtcgttgatggtggaggtattggaattatagaagaaagcacacacgcgttt

SEQ ID NO: 4215 - DNA, 390 bp, Homo sapiens
aaatgccagattattgtcactgtttcatccgcacatttttgccaacgtgccgttatgcaccatagcaggaccaagagaagatgacctgtaattcaggatctaatgacgaaaaattgtagactcagtgttttatcaaggattctatgttttgaagctttttaattcatacataattttatatttcttgtcaccaacccgccagagtaagaaatattctagtactttgaacatgagaattaaacagtggtcaaatcaaggggatagaattggagcttggaggagctgtaaacaggctttgcagtgaccccagcctttaaatgacaggcgtgtgccttttctctccctgccccaagatgctgacccgctggtcacaggggcccccggtgcacg

SEQ ID NO: 4216 - DNA, 424 bp, Homo sapiens
  misc_feature (1)...(424): n = A,T,C or G
gaattcttctcgggaggcagtgctgggnnnnttgcaccatggcacctaagaaagcaaagaagagagccgggggtgccaactccaacgtgttctccatgttcgaacagacccaaatccaggaatttaaggaggccttcactatcatggaccagaacagggatggcttcattgacaagaacgatctgagagacacctttgctgcccttgggcgagtgaacgtgaaaaatgaagaaattgatgaaatgatcaaggaggctccgggtccaattaactttactgtgttcctcacaatgtttggggagaaacttaagggagcggaccctgaggaaaccattctcaacgcattcaaagtgtttgaccctgaaggcaaaggggtgctgaaggctgattacgttcgggaaatgctgaccacgcaggcggagag

SEQ ID NO: 4217 - DNA, 394 bp, Homo sapiens
  misc_feature (1)...(394): n = A,T,C or G
cagagtcagaaaactccccagctaaacacccgtatgacttcatacaacacaatactctatactgtgatgatcacagctgccaaggctacctaaaagaagacagttatctcatatttggctgccagctttttatctttctctcgaccacttaaaacttcagacttcctgtcctgctggtatcatggagaaagtccaatacctcactcgctcagctataagaagagcctcaaccattgaaatgcctcaacaagcacgtcaaaagctacagaatctatttatcaatttctgtctcatcttaatatgtctcttgctgatctgtatcatcgcgatgcttctctgaagttctgctacaacctctagatctgcagcttgccacatcagcttaaaatctgcn

SEQ ID NO: 4218 - DNA, 414 bp, Homo sapiens
aagaattgtaaaacccattaaggcattaccctatttaatatttttatcattaattaatatgcccctcataatgcacatttacattttgacatcaaaaagaagaatatgtagctaatgtatgaatgatagaatacagatttagaaagctttctcattaaccttcagttaaaatactaaactaagaagattcaagaggagaaaataaaattttgcacttaagtttttaataaaacttcagtgtgcaaagtacctgcgtatttgttcataagcaaatgaagaaacaaaaagtaagatttaagaatctggattgacgtcaagcccaatatcatatggcttttctaacagcaagtgccactttgggcttcactaacgtatttatggcatacagaacagaatagttgattcaataaattc

SEQ ID NO: 4219 - DNA, 412 bp, Homo sapiens
ccttattccaaagctgcctcctgaaaggatgctttttaaaaggggttgctttggggtaaatgagaggtgctggtgaagtgagactagcttgcgcatctctctgccatgaaggaaactagctccgcagacgttttactaaccacagcagaccccctccttgaggaacccagaagggcagaggtaagttgggtaacgtgttcttaagtcttccatttacctgaccctggggttcatatggggataagctccagctgctgacaccttctgatcaagagaaggcggaatgtcaccactatcacctgcactttgtttggatttgcctctatacccactgcatttctctgatgttttttttctaccattctgtttggacagagcatcagatgaaatcaactgctgagagagggaagtg

SEQ ID NO: 4220 - DNA, 470 bp, Homo sapiens
  misc_feature (1)...(470): n = A,T,C or G
tggcccnnatttgatttcgtggtactgcgaacccnccggaatcccggtcgacccacgcgtccgggggaaatcgatctgctgcagcacacttctcatttttcatgccattatccacactggagagaagccctataaatgtagtgaatgtggaaaggccttcagtcgcagctcgtccctcactcagcatcaaaggatgcatactgggaaaaatcccatcagtgtaacagatgtgggaagaccttttacaagtggacaaacctcagttacccttcgagaacttcttttagggaaggactttttgaatgtaaccactgaggcaaatattttgccagaggaaacatcttcctctgcatctgatcaaccataccaaagagaaaccccacaagtgtcttcactgtgagaaaaccttctgttgctgaatattacttgtcatctgaagagtcatattagaaattcgttcagtctagagg

SEQ ID NO: 4221 - DNA, 481 bp, Homo sapiens
cggaggagactgacggtccctgggaccctgaaggtcacccgggcggccccctcactgaccctccaaacgcccctgtcctcgccctgcctcctgccattcccggcctgagtctcagcatggcggatgggagcagcgatgcggtgagagcagcgggctaaggcgtggctgggacccccagggccagggctagggaacctcgccctgcaccagccccaatcagacgccgctcctccaactaccgcgcttatgccacggagccgcacgccaagaaaaaatctaagatctccgcctcgagaaaattgcagctgaagactctgctgctgcagattgcaaagcaagagctggagcgagaggcggaggagcggcgcggagagaaggggcgcgctctgagcacccgctgccagccgctggagttggccgggctgggcttcgcggagctgcaggacttgtgccgacagctccacgcccgtgtggacaaggt

SEQ ID NO: 4222 - DNA, 500 bp, Homo sapiens
  misc_feature (1)...(500): n = A,T,C or G
aggggccggantanaggnnaccagggggctcgcanagactgagagccctcgagnaaccnccccgnnngggantangccatgttggggtttgtgggtcgggtggccgctgctccggcctccggtgccttgcggagactcaccccttcagcgtcgctgcccccagctcagctcttactgcgggccgctccgacggcggtccatcctgtcagggactatgcggcgcaaacatctccttcgccaaaagcaggcgccgccaccgggcgcatcgtggcggtcattggcgcagtggtggacgtccagtttgatgagggactaccaccaattctaaatgccctggaagtgcaaggcagggagaccagactggttttggaggtggcccagcatttgggtgagagcacagtaaggactattgctatggatggtacagaaggcttggttagaggccagaaagtactggattctggtgcaccaatcaaaattcctggtggtcctgagacttt

SEQ ID NO: 4223 - DNA, 548 bp, Homo sapiens
  misc_feature (1)...(548): n = A,T,C or G
tcagctgtacatcgcaactgccatactcgagccggctgaagccaacgctgaaagatgtgctatatcccacaaccacgggcacaggcaggnnnnnnnttttgtagattgtacggcnatcgcgacggacnnnccgggncgacccacgcgnccgcccacgcgnccgctctataaagcnnannaaaannttgcggatgngnagncncaaaaaacaaaagaaagaagacgcggaganangancangnnncanccacacacatatacctatgaaaggattatttttaatcattttggtgtatttgctttatggatattttataatttatttaactaatccagtgttgaatatcaagattgtttgtaatttatgctgagatacagcttcatacatagagctttgcacatgtctgtttactcttttaaaacaaattcttacaagtgggatttttattttccttatcatgtcaactcttaactattttgtctccttttagccttataatcttagatatattttctacaactttttaacacaagtatttcatttaggn

SEQ ID NO: 4224 - DNA, 417 bp, Homo sapiens
  misc_feature (1)...(417): n = A,T,C or G
cactcccatagcaacaagcatcactattttcatgtgtgctgagagtacagatctagttacattgtgacctgctggtggtgaccttcagctcctgagatcatgctgtctttacttagccaggagaactggggttagaaaaaaggtacaaggggcattctctttgccctagcatgagtaactatccactgggtaggttcactgtgaatcacgtggtttgagagtacgcgtgctttgggcatctctcctactaaacatactgtggcttcagtcagtagatggcttatctaggatctaacctggtaaagtaggaacaagcagtgccgctttgtttctagatgtgggaacaacaaggagcctgaccaaagatgtccactccctcttncttcacaccacttctgatgacctccaacaggtcag

SEQ ID NO: 4225 - DNA, 415 bp, Homo sapiens
tttcacattcctctgtttatttctaatggtaccctgcagcttttaaattttctctattcccactttattttcaaggcctaaaagcaaagtttaatattctaggtagaacaacaggaacaaatcacatgtgcttcaatcttaatagaaaaaaataaaaataaataaactaaataaataaaaataattgaagagaaaatacacacacacacacacacacaaaattatcctctccttttaccaaatccttggaatttattcactactcttattcaggttctctaaactttaacataagtttacaaaattataattttgtgctataagcttacaaaatttacctattataaaaatttaaaatctgaagataataaatatataggtgtgcccttggtttataaaatatgtcaaaaaggct

SEQ ID NO: 4226 - DNA, 485 bp, Homo sapiens
gactacgccatgttggggtttgtgggtcgggtggccgctgctccggcctccggggccttgcggagactcaccccttcagcgtcgctgcccccagctcagctcttactgcgggccgctccgacggcggtccatcctgtcagggactatgcggcgcaaacatctccttcgccaaaagcaggcgccgccaccgggcgcatcgtggcggtcattggcgcagtggtggacgtccagtttgatgagggactaccaccaattctaaatgccctggaagtgcaaggcagggagaccagactggttttggaggtggcccagcatttgggtgagagcacagtaaggactattgctatggatggtacagaaggcttggttagaggccagaaagtactggattctggtgcaccaatcaaaattcctgttggtcctgagactttgggcagaatcatgaatgtcattggagaacctattgatgaaagaggtcccatcaa

SEQ ID NO: 4227 - DNA, 452 bp, Homo sapiens
  misc_feature (1)...(452): n = A,T,C or G
tctgaaacctgagcggcnatngcgannggacttnnngggttgacccacgcgtccgccaaaatgcactggtcacgaaacgtctaatactatgactgttaaaatgtcagactataacaaatatctatcttttatttttcattagacccttatacttcaagagaacacactcagtgcttgtttttattttcttgacacatttattaacaaaatgcatcatggaaaaaaaatctacctcttaaaattcatttgcttttatggttagacatgcttgaccaaaaatgttcagaagaaaatatgtacctggtccctaattaagctgcgttaaatttggtagaagcatttaaatggtctatcttcagttttactgaacaaaaaatgtaatttatttagcattctttataaaagaattgatgctagaggtaaaaaaaaatacttgtttttaaaaaatcctt

SEQ ID NO: 4228 - DNA, 476 bp, Homo sapiens
  misc_feature (1)...(476): n = A,T,C or G
cggacgcgtgggctccctccaggcagcccttggctggtccctgcgagcccgtggagactgccagagatgtcctctttcggttacaggaccctgactgtggccctcttcaccctgatctgctgtccaggatcggatgagaaggtattcgaggtacacgtgaggccaaagaagctggcggttgagcccaaagggtccctcgaggtcaactgcagcaccacctgtaaccagcctgaagtgggtggtctggagacctctctagataagattctgctggacgaacaggctcagtggaaacattacttggtctcaaacatctcccatgacacggtcctccaatgccacttcacctgctccgggaagcaggagtcaatgaattccaacgtcagcgtgtaccagcctccaaggcaggtcatcctgacactgcaacccactttggtggctgtgggcaagtccttcaccattgagtgcagggtgcn

SEQ ID NO: 4229 - DNA, 487 bp, Homo sapiens
  misc_feature (1)...(487): n = A,T,C or G
agcccctcccccgcagcgggatgcgcacagtgagtgggtccctccatcaccttccacctggggatgcacccactgggagggcagggtggaagccccagctgggtgtgtggactcccagggaccccaccccaggcctgggaagcaggggtcagcccaacacgcaccaatccatccccgatgcaggtagcccagggagcacctgcccctgctgtgaatggggcattcgggggcgtgagaccttttggtgccagcggtcacgctgcacctgaggcccccacctgaccagtgctcccagctctggtgtcctgagaaacccttcaagccatcccgcatgggcaggatggtgacatatccatgtggtaggattgtcccggccccaaagtatggccctggtcaggggagcccctgctggaaattgcatctccagagctttgatgcaggacccctgggggatcagggaatgagggtctccaccccaggggtctcn

SEQ ID NO: 4230 - DNA, 474 bp, Homo sapiens
  misc_feature (1)...(474): n = A,T,C or G
cccacgcgtccgcggacgcgtgggcttgattctaggatccgggcacagaagaaaaagaattagttccatcagggaggagtcagaggaatttgcccaatggctggggcatctcccttgacttacccataatgtctttctgcattagttccttgcatgtataaagcactctaatttggttctgatgcctgaagagaggcctagtttaaatcacaattccgaatctggggcaatggaatcactgcttccagctggggcaggtgagatctttacgccttttataacatgccatccctactaataggatattgacttggatagcttgatgtctcatgacgagcggcgctctgcatccctcacccatgcctcctaactcagtgatcaaagcgaatattccatctgtggatagaacccctggcagtgttgtcagctcaacctggtggnttcagttctgtcctgaggcttctgccctcattn

SEQ ID NO: 4231 - DNA, 394 bp, Homo sapiens
ccctgatcttccctgtctcacacttcttttctcccatcccggatgcaatctcactcagacatcacagtaccacccaggggtggcagtagacaacaacccagaaatttagacagggatctcttacctttggaaaataggggttaggcatgaaggtggttgtgattaagaagatggttttgttattaaatagcattaaactggaattgacaagagtgttgagcatccctgtctaacctgctctttctctttggtgccccttatctcaccccttccttggaatttaataagtctcaggcatttccaattgtagactaaaaccactcttagcatctcctctagtattttccatgtatcaagacagaggtgtcttatgtatggagggggcaagtatgaa

SEQ ID NO: 4232 - DNA, 489 bp, Homo sapiens
aagaaattcagagaacacctgtgagatactatacaaaatgaacattgccaaggcatatagtcaccagactgtcaaagtcaacactaaaaaaaaaaaaaaaaaaaaaaaatttttaagggcacctactgaaaaggggcaaatccctccaaaaaaaattccttcaaactaacagtaaacttttaaaaaaaaagctaacggcgggaaaaatggggggcctattttcaacattttaaaaaaaaaaaaattttaaccaaaaattttttatcctgccaaactaacctttataagggaaggaaaaaaaaaattttttccaaaaaaacaagggctagggaaatttgttaccactagggcacccttaaaaaaaatcctcacaggagttttaaacttgaaaatgaaaaaaggatacctgttcccccaaaacacacttaagtacttagcccacaaccacccctaattccataggccccacagtaaaaactacaaagcggt

SEQ ID NO: 4233 - DNA, 415 bp, Homo sapiens
cgatattatccactgccacttaggctcacttttacttttgaaaaggctcaatgtttggagtccataaaatgtttgcagaatatcatcctgagtcattttatttatgactaatctaaaatatttttataggttttcagccatcccatagtggtgttggttttggtggcatctgaaggagggtgatattcctatcagagtgatctgtgacacgttgcagtgttggtcactgctgacccagactgaggtgacaggattcttccatgcagagctgcaagagttctaaagcaagtgtttttcctggagggagagcaatggctttttgtgaattttagttttagaatttgaaaaagtcttagcctgaaacatatgtttaaaaatgcctcctcatatctgagctaacgtagcacatcacaga

SEQ ID NO: 4234 - DNA, 424 bp, Homo sapiens
tctgcaaggaccacgtgcgctctctgcagaaggaggggttttggtaggtggtccccttgatcattggctgtctggcttctggaggcattgccttcctagcttgggaattaggggagggaaggtcatggcatcccaggcagacacagctggaagcagctcttttgtgagaaatttatttgtcctttctgactttggctcatctcttggcataggcctgaggccttctctgaagtggctgagaaacacaacaacaggaacaggtgaggaacaagccttggggtggggtacatggaaaataaggggttcatgctttggtgccttgagggaaaaatagagccttctttcctccttacataggggatctgttgagagctcctaagcatgtggtataacatggttatgaatggggcttgaaggtcacatg

SEQ ID NO: 4235 - DNA, 472 bp, Homo sapiens
  misc_feature (1)...(472): n = A,T,C or G
gccaagatggctgcgcggtgctccacacgctggttgctggtggttgtggggaccccgcggctgccggctatatcgggtagaggggcccggccgcccagggagggcgtggtgggggcatggctgagccgcaagctgagcgtccccgcctttgcgtcttccctgacctcttgcggcccccgagcgctgctgacattgagacctggtggcagtttcctgtccattggtaggtgacggcccctggctcaggcagagggagatggttagactcttgcagggctaaaactctaatttggaattgaatattgtggatatcttagttaaaggccatgcttacagcttagaaatgaagccttaagctgcatcaagttacgaagtgattaatttccttctcagcaaacctccgggaggttccagaatgagttcttcctgacaggttgtcttcactgggaacgggggcccccaggccccaccn

SEQ ID NO: 4236 - DNA, 487 bp, Homo sapiens
ctcaagcagcccggaggagactgacggtccctgggaccctgaaggtcacccgggcggccccctcactgaccctccaaacgcccctgtcctcgccctgcctcctgccattcccggcctgagtctcagcatggcggatgggagcagcgatgcggctagggaacctcgccctgcaccagccccaatcagacgccgctcctccaactaccgcgcttatgccacggagccgcacgccaagaaaaaatctaagatctccgcctcgagaaaattgcagctgaagactctgctgctgcagattgcaaagcaagagctggagcgagaggcggaggagcggcgcggagagaaggggcgcgctctgagcacccgctgccagccgctggagttggccgggctgggcttcgcggagctgcaggacttgtgccgacagctccacgcccgtgtggacaaggtggatgaagagagatacgacatagaggcaaaagtcaccaag

SEQ ID NO: 4237 - DNA, 419 bp, Homo sapiens
aaaacatcagctgaagaaggaacagtctccactccgcagatcggacagaatgcgacctccctaatcagccaaggcagtaccccagcggagagctgtccatcaggccccctgggttgcgcttctgtggctaagtacaaccagaaccagatgtgacactggatagacatgccctcagtgaccacagagctttcaacaagctgtgaaaagctgggtacttgcctaccagtgctctcgatcctgaaatttcagctcaggaaaagccctgtttcccattaacctgttctgtcccccttgaagtggtggggctaaaacgagaagagtgctgcctatttgggagattgggaccaggcctgagaggcatgatgtttgggtagcatcttcccaacacttgcaattagcactgttctcagatcacaggg

SEQ ID NO: 4238 - DNA, 487 bp, Homo sapiens
  misc_feature (1)...(487): n = A,T,C or G
cacaagcagaaaagtcataatttcccacaaattttatttaattaaaacattattgcagcaacagatgttgatccctgtaaaagaaatatatattccatacatagtgtcagggcccaactgaaacatacaaaaccctactcagatcctaaatgcaatgcctaggaaagtcaaagacaaacaaatgaaaatgtgaacttacatatataaatgaatagtgctagaacaagctaagtttatggatgtggaatttctgagtttaaatttcaaggtccatgaaagaatgaaacatgtttgctgctcaaaaccactggccatttttagacgactaaatcaccagtggttaccctaaaactaagtgctataataataggatgtgcaaaatggagatgttggaaatgagaaattctgaatttgtttactttggtcttttttaccatggctatgagagtaactgttttgacttccgactntgttaaccacaattgtt

SEQ ID NO: 4239 - DNA, 473 bp, Homo sapiens
atcatttgtagcaaaagcttagtggttttctgtagaactgctttgttttaaaaatcaaattgaagaccaacttgattctgcctgcagagcaaagctatctgcctttttagaaaatctggatggttaaattggaagcacgttctgcacatggtttagcagttagtagcctggaaaatgacccaatagccaagatagtttttttgtttgtttgttttttgtttttttaatcttcattgtaagtgcttgtttaaagtgtaagcttgtaatggactattttgcacattgttcattgttaattcttttcaggctattatagttctgtaaatacattgcctgctaagttgtgtcagtggagaaacattagtgctataagaaaatccagtgaaatgtgcttaaaagcattaccaattagcgcatgggactggatcaccgcgatttcttagtgatcctagagaagtcagcttcagttgact

SEQ ID NO: 4240 - DNA, 438 bp, Homo sapiens
tgattcgatgaagtctttctggcaaagcatttattacccattcacttttcaaaggtgagttcctctgtagaggcacctcaggttcttgctacaaaaaccaatctttgtgctaagtgtttgatgaatactgccatgttgtgattttagatgttggatccttggcttcgttatgtggacttctggctttgggaggtattttatcctgttagaatattatctcttccagagtatttctctcattttctatatcacaaacaaatatataagcacattctaatatagtacgcagtttaagcgaagttagatgatattgaataatagattggtataaatatatttttacatacttgctctcacaccctccttgacccacccagtgccccattttttttttttttccaagaaactaacgtctgggacttggatgctgggactttg

SEQ ID NO: 4241 - DNA, 383 bp, Homo sapiens
aagcgaggagcagcgatggacggtcgggtgcagctgataaaggccctcctggccttgccgatccggcctgcgacgcgtcgctggaggaacccgattccctttcccgagacgtttgacggcgataccgaccgactcccggagttcatcgtgcagacgggctcctacatgttcgtggacgagaacacgttctccagcgacgccctgaaggtgacgttcctcatcacccgcctcacagggcccgccctgcagtgggtgatcccctacatcaagaaggagagccccctcctcaatgattaccggggctttctggccgagatgaagcgagtctttggatgggaggaggacgaggacttctaggccgggagaccctcgggcctgggggg

SEQ ID NO: 4242 - DNA, 380 bp, Homo sapiens
cctgcgcgccttctccagtccgcggtgccatggcctccgcccgtctgttcgcgctgctgctgttcttcgtaggcggagtcgccgagtcgatgacttggaagactccatgatcggccctgaagttgtccatcccttggtgcctctagataaccatatccctgagagggcagggtctgggagccaagtccccaccgaacccaagaaactagaggagaatgaggttatccccaagagaatctcacccgttgaagagagtgaggatgtgtccaacaaggtgtcaatgtccagcactgtgcagggcagcaacatctttgagagaacggaggtcctggcagctctgattgtgggtggcatcgtgggcatcctctttgccgtcttcg

SEQ ID NO: 4243 - DNA, 424 bp, Homo sapiens
cagaagttgtgtctcctgatcaggaaatgcctgtttatccacctgccatcatcaccccgcttcaggacactgtcacttctgaagggcagccagcccgttttcaatgccgggtttctggaacagatctaaaagtgtcgtggtacagcaaagacaagaaaatcaagccatctcggttctttagaatgactcaatttgaagacacttatcaactggaaattgccgaagcttatccagaagatgaaggaacttacacgtttgttgctaataatgctgtaggccaagtatcaagcacagccaacctgagtctggaagctcctgaatcaattttgcatgagaggattgaacaagagattgagatggaaatgaaaggtattgttataatggatgtgagatttaagtagaaattctaaaggattaataggat

SEQ ID NO: 4244 - DNA, 448 bp, Homo sapiens
  misc_feature (1)...(448): n = A,T,C or G
tagagcttgaacagaactctgggggaaaacccagcccagagggaccagaggaagaatctgagggccctgtgcccagttctccaaacatcaccatggccaccagaaaggaactggaagaaatgatagaaaatctagagccccacattgatgatccagatgttaaagcacaagtggaagtgctgtccgctgcactacgtgcttccagcctggatgcacatgaagagaccatcagtatagaaaagagaagtgatttgcaagatgaactggatataaatgagctaccaaattgtaaaataaatcaagaagattctgtgcctttaatcagcgatgctgttgagaggtgctttgtttctgatcggaccatttcactgcagcaagcaacacagtattctgagcagaagatcgggacttgaggccatgttgcggaggccagtgacattatctggan

SEQ ID NO: 4245 - DNA, 416 bp, Homo sapiens
  misc_feature (1)...(416): n = A,T,C or G
ggtaaattacataaatcaagaaaattacccctcacacttttgcttttgagttaaatttatgaaaaatgcactagattcctcaccactaaaactttctatatattggaaacccaagttgttttttgttttaactagcattttgtaagcccattaagtagtataaatttctgttatttttaaatacttgtcagcagtatgttttgcaattggaatgaatacttagacaaataaatgttgagtttaacttctcatagagttacaaacttctcatagagagttcaggaagtgtttgaattcatggtggctttacttcattcacctgtatggttggggacaattccattctaaatacatttattcagcacctgccatatatcangcactctgttaagttgaaagtgttggctcattggaan

SEQ ID NO: 4246 - DNA, 405 bp, Homo sapiens
  misc_feature (1)...(405): n = A,T,C or G
gcagacacngncnnactcagctccactcgggtggagtggaagtggccagaccatttagacggacagggtcctcaccctacccctttcctgtgaggcaggggtggtggtggagttgctggaggtagaggagctatgtggagcaaaggccgacagaggggaaggaatggacctgtgagaggaagggaaggtggcagaaagtctcatttcaggaaggagggatagaaggaaggaaggaaggaaccccccccccccccgaaaaaaaaatcaaggggggaaaaaaatcaaagggaaggttaaggtgggttttggccagaattccaggcaacaggttgaagggacggggggccctaaataacgggggggataaacccctttttacccctaacaaatggcctgagctttttt

SEQ ID NO: 4247 - DNA, 451 bp, Homo sapiens
ccagcctgggcaacacaacaagaccctgtccccaaaaagagaatatataaaataaattatgttactaacactagcctcactaatagtgtctaatacttgcacagtagtgccctccttatctgcagttttgctttctagggtttcagtgacctgtgttcacccatggtccaaaaatattaaaaggaaaattccagaaacaattcagttttagattgcacaccattctgagtagcatgatgaaatctcacagcataccactccatcctgcctggaatgtgaatcatccctttgtccagcatatccatggggcatttgctacccacccattattcaccttagctgtctcagttaccagatcacaaaaacagcatatctagggtttggcagtatccatggtttctggattccactgggggccttggaatgtatctgccatggatgaggggagact

SEQ ID NO: 4248 - DNA, 469 bp, Homo sapiens
  misc_feature (1)...(469): n = A,T,C or G
cgtgagccaccccnnctgataacctcncttgatagccctgcaagnacccggccggaaccacgcgtccgcaacaggagagagagctggcagagctgcggcacagccaggaagagctgctgcagcgtctgtgtacccaactcgaaggcctgcagagcacagtcacaggccacggtacaacgtgcccttgactactcggcacgagcaggaacagcggcggctggagcgagcactggctgaggggcagcagcggggagggcagctgcaggagcagctgacacaacagttgtcccaagcactgtcgtcagctgtagctgggcggctagagcgcagcatacgggatgagatcaagaagacagtccctccatgtgtctcacggagtctggagcctatggcaggccaactgagcaactcagtggctaccaagctcacagctgtggagggcagcatgaaagagaacatctccaagctg

SEQ ID NO: 4249 - DNA, 474 bp, Homo sapiens
cctagcctttctattagctcttagtaaaattacacatgcaagcatccccgttccagtgagttcaccctctaaatcaccacgatcaaaagggacaagcatcaagcacgcagcaatgcagctcaaaacgcttagcctagccacacccccacgggaaacagcagtgattaacctttagcaataaacgaaagtttaactaagctatactaaccccagggttggtcaatttcgtgccagccacaaaaaaaaaaaaaaaaaaaaaaaggggggggcgttttaaaaaatcctttggggggcccaagtttaacgggggagggaaacgtttaatttttttctttagggggggggaaatataaacaccccggggatttttggaaaggagcctttcttttgggggggggacaaattggaccaacctccttccgaaatttaaagctttaggggaaaaataaattttaaggggtaagggggaaaccc

SEQ ID NO: 4250 - DNA, 433 bp, Homo sapiens
  misc_feature (1)...(433): n = A,T,C or G
acgcgggagcccacggagaacgctccaggagggcctgtccatcctcgctgtcctttccctgttctccccctgccccccgtctctatcctctgtggccttcagctaatttctgctcccctgagattcgtccttcagccccatcatgtgctttgggatgagtgtaaataaaacggggctgtggcttgggaaaaaaaaaaaaaaaaaaaaaaaaaaaaaaaaaaaaaaaaaaaaaaaaaaaaaaaaaaaaaaaaaaaaaaannntaaaaaaaaaaaaannnnttaaaaaaacaacannncccttnggataaaaagaaaaaaaaaaaaataattttntttttnaaaaaaaanatatattaatttttattttttttttntntttttttttntnannnnnnnttattaattttttttttttataaaaaaaataaatata

SEQ ID NO: 4251 - DNA, 404 bp, Homo sapiens
  misc_feature (1)...(404): n = A,T,C or G
gcttctgggtcaaaggaccagtctgcagagggatcctgtggctggaagcgaggaggctccacacggccgttgcagctaccgcagccaggatctgggcatccaggcacggccatgacccctccgaggctcttctgggtgtggctgctggttgcaggaacccaaggcgtgaacgatggtgacatgcggctggccgatgggggcgccaccaaccagggccgcgtggagatcttctacagaggccagtggggcactgtgtgtgacaacctgtgggacctgactgatgccagcgtcgtctgccgggccctgggcttcgagaacgccacccaggctctgggcagagctgccttcgggcaaggatcangccccatcatgctggacgaggtccagtgcacgggaaccgaggc

SEQ ID NO: 4252 - DNA, 471 bp, Homo sapiens
acaagtgcctcctggtgcctgcggcatccttctgcctggttctgtaagcaaatgccacaagccacctatagctacatactcctggcattgcactttttaaccttgctgacatccaaatagaagataggactatctaagccctaggtttctttttaaattaagaaataataacaattaaagggcaaaaaacactgtatcagcatagcctttctgtatttaagaaacttaagcagccgggcatggtggctcacgcctgtaatcccagcactttgggaggccgaggcggatcataaggtcaggagatcaagaccatcctggctaacacggtgaaaccccgtctctactaaaagtacaaaaaattatctgggtgtggtggtgggcgcctgtagtcccagctactcgggaggctgaggcaggagaatcgcttgaacctgagaggcggggttgcagtgagccaaaattgcaccactg

SEQ ID NO: 4253 - DNA, 466 bp, Homo sapiens
caggacccgtcgccatgggccgtgtgatccgtggacagaggaagggcgccgggtctgtgttccgcgcgcacgtgaagcaccgtaaaggcgctgcgcgcctgcgcgccgtggatttcgctgagcggcacggctacatcaagggcatcgtcaaggacatcatccacgacccgggccgcggcgcgcccctcgccaaggtggtcttccgggatccgtatcggtttaagaagcggacggagctgttcattgccgccgagggcattcacacgggccagtttgtgtattgcggcaagaaggcccagctcaacattggcaatgtgctccctgtgggcaccatgcctgagggtacaatcgtgtgctgcctggaggagaagcctggagaccgtggcaagctggcccgggcatcaaggaactatgccaccgttatctcccacaaccctgagaccaagatgacccgtgtgaagctgcg

SEQ ID NO: 4254 - DNA, 472 bp, Homo sapiens
  misc_feature (1)...(472): n = A,T,C or G
agccgagccgacccgccccgccgacgaaccccctgaagctgtgccaagatgtgtgacgacgaggagaccaccgccctggtgtgcgacaacggctctgggctggtgaaggccggctttgcgggcgatgacgcgccccgcgctgtcttcccgtccatcgtgggccgcccgcggcaccagggagttatggtgggtatgggtcagaaggactcctacgtaggtgatgaagcccagagcaagagaggcatcctgaccctgaagtatcccatcgagcatggtatcatcaccaactgggacgacatggagaagatctggcaccacaccttctacaatgagctccgtgtggctcccgaggagcaccccaccctgctcacagaggccccgctgaaccccaaggccaaccgggagaagatgactcagatcatgtttgagaccttcaatgtccctgccatgtacgtggccatccaggcagtgn

SEQ ID NO: 4255 - DNA, 397 bp, Homo sapiens
atgcgcacggacgaggctcgggataacgcccgcaaccacatgggttagatgctgcaattcgtgctgcccgtggccacgcaaatccagcacgaggttatcacagcctatggattcagctgcgacagggaacgtgtccttaagtttgctcgcttggtcaagtcctacgaagcccacgatcctgacatcgccagcctgtcatgcaagctgaaggcgctgtttctgccgcccatgaccctgccaccccatgggcctgctgctggtggcagcgtggccgcctactgagagttggccctcccttgtgccactgccaggggaggaaaggccttgatgctccagacaataataaatgcgcctgtgacttaatgattagggaacaacttcggtgaagggggcggcc

SEQ ID NO: 4256 - DNA, 388 bp, Homo sapiens
cggacgcgtgggcggacgcgtggtctgacggtctttggatcggtgggtttatctcaaggcctgagtagccggtaacaaacgagggttcccgggattggacccacgcagccatgcctctgcgacttgatatcaaaagaaagctaactgctagatctgatcgagttaagagtgtggatctgcatcctacagagccatggatgttggcaagtctttacaatggcagtgtgtgtgtttggaatcatgaaacacagacactggtgaagacatttgaagtatgtgatcttcctgttcgagctgcaaagtttgttgcaaggaagaattgggttgtgacaggagcggatgacatgcagattagagtgttcaattacaatactctggagagagttcg

SEQ ID NO: 4257 - DNA, 398 bp, Homo sapiens
cttcaaccagcctttggtcatcaccaggattacaccaggaagcaaggcggcagctgccaacctgtgtcctggagatgtcatcctggctattgacggctttgggacagagtccatgactcatgctgatgcgcaggacaggattaaagcagcagctcaccagctgtgtctcaaaattgacaggggagaaactcacttatggtctccacaagtatctgaagatgggaaagcccatcctttcaaaatcaacttagaatcagaaccacaggacgggaactactttgaacacaagcataatattcggcccaaacctttcgtgatcccgggccgaagcagaggatgcagcactccctccgggattgactgtggcagtggacgcaccaccccttcttctgtcagta

SEQ ID NO: 4258 - DNA, 432 bp, Homo sapiens
  misc_feature (1)...(432): n = A,T,C or G
naagctgctnncntncnnnggccaattgnnncanncgcatgnacnntnngggntgagccacgcgnnnccgacctacntctgccctcnaacttccgagaaaaccagccctgagcataggggnttctgaggtccataccaagaagacggcgatgatcaagaccatctagacacgggatggggaggtcgccagtgaggccacacagcagcagcatgaagtgctctaaagacagagaccctctgccaccagagaccgtcctcacccctgtcctcactgctccctgaagccagccttcttccatcccaggacaccacacccagcctcagtcctcccctcacagcctctgacccctcctcactggccatccctcgtggtccccaacagcgacatagcccatccctgcctggtcacagggcatgccccggccacctctg

SEQ ID NO: 4259 - DNA, 424 bp, Homo sapiens
  misc_feature (1)...(424): n = A,T,C or G
ngcgctgccggcctcnnnnggaaaatccccannngnannntcnctnnnntnagggaaccggacccgtntgngatgacacaaccaggtaaaggctctgctgttctatttcatcaccccaaactggaccttctccctgggcagttgagtctgaaaggaagactgaggtgggaacagagaagaaggaaatgattacaggtgtaaggtggccttggtaggggagggaagggagtaatacttcagttttctatctattccaccaagacatgcctctcaccactgaaccaacttcggggctgccatgagaaccactcttaaagcctggaaggagtgcctataggaagagaaggccagaattacctttctagctttgacatctgcacctgccctggccttgccaatcaagccactgtacctacctgaactg

SEQ ID NO: 4260 - DNA, 156 bp, Homo sapiens
actaaatgaaggttaaaacatgcttaagaaaaatgcactgatttctgcattatgtgtacagtattggacaaaggattttattcattttgttgcattattttgaatattgtcttttcattttaataaagttataatacttaaaaaaaaaaaaaaagg

SEQ ID NO: 4261 - DNA, 414 bp, Homo sapiens
cccacgcgtccgcttttaagtgttcagctgtggcatgctcagaggttcctgctggattccagctggagcggagtgatacccttctttttcagctgttcgtgccttcctttcttgtatccaccaaagtggagacaaatacatgatctcaaagatacacagtacctacttaattccagctgatgggagaccaaagaatttgcaagtggatggtttggtatcactgtaaataaaaagagggcctggaaaaaaaatactttattgaaaacaccaaaaaaagaaaaaaaaacatgaaaaaaaaaaaaaacaaaaaactacttaattccaactgaatgggagaccaaaaaatttggccggggagggtttggtatcactgtcaataaaaacaaggcctggaaaaaaaaaaaaaaaaaaaaa

SEQ ID NO: 4262 - DNA, 522 bp, Homo sapiens
  misc_feature (1)...(522): n = A,T,C or G
cgggtgtgcccanannntaaannaaaanccctggcagngcttcgnatnngancnccaatnnccgggncgaacccacgcgtcgcgaagaaaatttatcagaaaatgggccattcaaatggtaccctttttcttgtgccccctcctacttttccagaacanngcttgcatatggatnnggagagaataattgagggaatgcaagcttctgaaaaagatgtnctcttttgaagttatatttaatttccagactgctttatccaggctcagagtcaaaatatttagcaatatagtagaagatgcaaaatagttttctgcatcttctattggggaaactatactttctaatataaaatggagagaaagaaagaaaaactcctatatatggagaatggtttgtcatcaaatttggctcatctggagaaaacagcacagatggtctagcttgcttcaggactgcagtttcgtgccatgcatgattcaccagagaaggtaaatcagcatctgctcatttcattttgtgtg

SEQ ID NO: 4263 - DNA, 478 bp, Homo sapiens
  misc_feature (1)...(478): n = A,T,C or G
cagagcaagacagatagctgggctctggtggccagtgtctgtctgtgagggcaggaacgagagctgcacattgagaacataggagggacctgaggtggagagaggcccagcaccccaaatctctgccatcacacggacggggagcccatacattctgcaacaaccagggacttcacaggagccttgttttcaatttgctaacaggtgcataatgcctgtgctgcttaagcctcatggccttcctacatttccacattttgtttgtttgtttatttatttttgagacagtctcgccctgtcacccaggctggagtgcagtggcacgatctcagctcactgcaacctacgccttctgggttcacgtgattctcttgccttagcctcccaagtagctgggactacaaggcctgccccatgcctggcttaattttgtattttttaaatagaagacgggtttcactgtgttgccangctggcn

SEQ ID NO: 4264 - DNA, 413 bp, Homo sapiens
agaagatgggcagggctgtgagaccctcattgaccagtatttaagggaccctaacctccaaaagaggtacccattggcgctcaaccgaattgctgctcaggaggtccccattgagatcaagccagtaaacccatcccccctgagccagctgcagagaatggagcccaaacagatgttctgggtgcgagcccggggctatattggtggctctcgggggctggtccatgggcggctgtggcgtcaggatggagtcctagctgtgacctgtgcccaggagggcgtgatccgagtgaagccccaggtctcagagagcaagctgtagccagaggtaccagcttcgcctggggcttcaagaacctcccatctatccccattcctgagacaggagttacagtcccttttggccctcacat

SEQ ID NO: 4265 - DNA, 391 bp, Homo sapiens
  misc_feature (1)...(391): n = A,T,C or G
naacgcgtccgcatgagcgcgctgctgcggctgctgcgcacgggtgccccagccgctgcgtgcaggcggttggggaccagtgcagggaccgggtcgcgccgtgctatggccctgtaccacactgaggagcgcggccagccctgctcgcagaattaccgcctcttctttaagaatgtaactggtcactacatttccccctttcatgatattcctctgaaggtgaactctaaagaggaaaatggcattcctatgaagaaagcacgaaatgatgaatatgagaatctgtttaatatgattgtagaaatacctcggtggacaaatgctaaatggagattgccaccaaggagccaatgaatcccattaaacaatatgtaaaggatggaaagctacg

SEQ ID NO: 4266 - DNA, 435 bp, Homo sapiens
cacaattatgcaaatattttaatgtttattaatgcttacagtggaattgtgaataagttttcagtggactatcttatcccttgacaaaaatattttgtcttttttctatgtaatttcagagtttttattttgttacaaaaagacaaaaatgaaatatataacaacaatgaagttatttaacaagatttctaaagctgaaatttttgtgtaaaataaggtattatcttgcaacttggtaaatatatttattcagacattggatgctgtatttttatgtatttttaaaatattaataaaatttaaaaaaagaaaattctaggttaattcactctttggatgacaatagctctcagctgtcctttttacaggaggttgcatcctgcagccttgcctgtgttaaagggagtctgtctcagtccatcaaacagtatagaa

SEQ ID NO: 4267 - DNA, 418 bp, Homo sapiens
cccacgcgtccggtgcttaatcctggtgcagggggcgagcatggccgctccgcgagtattcccactttcctgtgcggtgcagcagtatgcctgggggaagatgggttccaacagcgaagtggcgcggctgttggccagcagtgatccactggcccagatcgcagaggacaagccttatgcagagttgtggatggggactcacccccgaggggatgccaagatccttgacaaccgcatctcacagaagaccctaagccagtggattgctgagaaccaggacagcttgggctcaaaggtcaaggacacctttaatggcaacctgcccttcctcttcaaagtgctctcagttgaaacacccctgtccatccaggcacaccctaacaaggagctggcagagaagctgcacctccaggctccg

SEQ ID NO: 4268 - DNA, 423 bp, Homo sapiens
actcacctctttgttctgaaaatagaactttatcactatgctttccggtggttttcccttttacaatcgaaatcttgtgcctcccaagtgcattggaaaatgacaaaagcctgtctctccaaattcctatttaacagtttgattgtttttttttaatcaccatctttcaaatcttagctcaactctcaccaagtgaaaattggctacttgggagaaagttaactttctatggtgggatggtgaaggatgagggacagtttacataggaaaagaaaaaaaaaagtctaaagtccacgttgaaaaaccacactaccacttattttctgctaaccctaaattatttttgcgtatacgcttgaggttatagtctgtgcctatacctaaaatgcaccagcgggggggattttaaaaaatccttcaaat

SEQ ID NO: 4269 - DNA, 421 bp, Homo sapiens
aatcaccatggcggctgggaccctgtacacgtatcctgtaaactggagggccttcaaggctctcatcgctgctcagtacagcggggctcaggtccgcgtgctctccgcaccaccccacttccattttggccaaaccaaccgcacccctgaatttctccgcaaatttcctgccggcaaggtcccagcatttgagggtgatgatggattctgtgtgtttgagagcaacgccattgcctactatgtgagcaatgaggagctgcggggaagtactccagaggcagcagcccaggtggtgcagtgggtgagctttgctgattccgatatagtgcccccagccagtacctgggtgttccccaccttgggcatcatgcaccacaacaaacaggccactgagaatgcaaaggaggaagtgaggcgaatt

SEQ ID NO: 4270 - DNA, 421 bp, Homo sapiens
ttaaaaaccagaagaaggcacgggttctgcatgtgctcagaaagggaagggctgattctcttgttcattcaacagatatttattgaacagcagctgcattaaaaatgttcaaaatcattacagtcagctgggcaaggtggctcacgcctgtaatcccagcactttgggaggccgaggtgggcggatcacttgaggtcaggagtttgagaccagcctggtcaacatggtgaaaccctgtctccactaaacatacaaaaattagctgggcatggtgatgcgtgcctgtaatcccagctactctggaggctgaggccggagaattgcttgaacccgggaagtggaggttgcagtgagctgagatcatgccgctgcactccagcctgggcgacagagtaagactctgtctcaaaaaaacaaaaac

SEQ ID NO: 4271 - DNA, 497 bp, Homo sapiens
  misc_feature (1)...(497): n = A,T,C or G
gggtccaggggnnaggggactgacagcctcggacctttgagaacctcgggcgaccccgcgtncggtgaatagaagtggtaaaagtaggcatccttgtcttgtttcttgagcttagaggaaaagcttttagtctttgaccattcagtatgatgttagctgggggcttttttatatggtgcttctatcatgttgaggaagtttccttgtattcccaatttgttgagggtttttttttttttttttaaatcatgaaagagggtggaattttgtcaaatgcttttttctgcttcaccggaaaggaacagggggggctttttttctcattattctgtaagggcaacaaccaatttctatatgcggaccgccctttctttccaaaaataaacccctttgggttatgaggcctattaaaattttgaagactgtttttgttttttaaactttataaaagccctctataaaatatgggtgggtgtggggggggggggagaaaagag

SEQ ID NO: 4272 - DNA, 392 bp, Homo sapiens
  misc_feature (1)...(392): n = A,T,C or G
naaagttttatggtggcaagaagcctgatctcccactaacaaattttcgtcgtttaccttttgaccactgcagtctctctctgcagccctttgtctacccagtctgcactcccgatggcatcgtctttgacttactgaacattgttccatggcttaagaagtacgggaccaaccccagcaatggagagaagctggacgggaggtccctgatcaagctgaacttttccaagaacagtgaggggaagtaccactgcccagtgctgtttaccgtgttcaccaacaacacccacatcgtggctgtgaggacgaccggcaacgtctacgcctatgaggcagtggaacagctaaatatcaaggccaagaacttccgggacctgctgaccgacgagccc

SEQ ID NO: 4273 - DNA, 407 bp, Homo sapiens
gaactttataaaagtttgggattttttttcctaatcataaaaatagccccagaaagagcctaagctatgttcagatagaagcctcgaaattcctgtaaattgtttactttatgatgtttacatacacgtttcactttgaaaaaaaatgcaaatcgactttttaacaactgttgagatgtttcatgggacagtagaactctgactcaccaactgggctaaattttaatttaaaaatgtatttatttgagtgtctttccccccctcaccctcaccatctgaggggctccctgagatcttggtagaggaggcccctcctgcccagaccttcgtttgtttccccggtggcccttgcttcttgctttgcagactgcctgcagccatgattttgtcactgacatctgtgagcc

SEQ ID NO: 4274 - DNA, 419 bp, Homo sapiens
cgcgctcctcaaggaccaggagccgggggcctttatcatccgcgacagtcactccttccaaggcgcgtacgggctggccatgaaggtgtcttcgccacctccaaccatcatgcagcagaataaaaaaggagacatgacccatgagctgggcaggcattttctgatagagactggccccaaaagagtcaagctcatgggctgccccaatgagccaaacttgggatcgctgtgtgccctggtctaccagcactccattatcccattggccctgccttgcaagctggtcattccaaaccgagaccccacagatgaatcgaaagatagctccggccctgccaactcaactgcagacctgctgaatacaaggggcagcctgcaatgtgctcttcatcaactctgtggacatggagtcactcact

SEQ ID NO: 4275 - DNA, 397 bp, Homo sapiens
  misc_feature (1)...(397): n = A,T,C or G
ttttccgaaattctctgtatgcaccagattattcatctcgtttagatattgtaagagcaaattcaaagtcacctcttcagagatcactgtcagctaagtgtgtatctggaacaggacaggtatccacttgtcgactaagaaaggatcaacaagcagaagatgatgaggatgacgagttagatgttacagaagaagaaaattttcttaagtaaactacacatttccattttcatcataaatgacttgaaatccacaatgactaaattgtagaactttatactcactttgctatgttaagcctcaaagtgaagtccaactggaaacagaaaaataattaaaggaaacttatgctgaccaaaaatgaaggctttaaaaaatattgcataccagtcatttn

SEQ ID NO: 4276 - DNA, 509 bp, Homo sapiens
  misc_feature (1)...(509): n = A,T,C or G
aggttccaggnatnnannnancctgcntaggcttcgcanagactgagacccttcgggaagacccacgcgnncgaagatttncggcgatggaatccgaaatggaaacgcatatcgccggggcagaggagggctttacccaggtcacccgcaagggtggccgacgggcgaagaaacgacaggctgaacagctgtccgcagcaggagagggcggggatgcgggccgcatggacacagaggaggccaggccggcgaagaggcccgtcttcccacccctctgtggggacgggctcctgagtgcgaaagaagaaacaaggaaaattccagtcccagctaacagatacacaccattgaaagaaaactggatgaagatatttactcctattgtggaacatttgggacttcagatacgctttaacttgaaatcaaggaatgtagaaatcaggacttgtaaagaaaccaaggatgttagtgctctgacaaaagcagctgattttgtgaaagcttttatt

SEQ ID NO: 4277 - DNA, 397 bp, Homo sapiens
aggaaagaagcaactggaacacacatataacactaacccttccagctgcattatgagggaccagtacctgtctcaaggcaaaattatgacttagttcatcctcacctctggaggccagtaaaagtgggttatagaagaacaaagaggcatctagatctttcactgggttatttggagagaaacatctcctaccgaaggccagtttaacaagactggtagaggaggttatcttatctaattcacagaaatcaacacattgagtcaagaaaaatgaaacacagaaacactctaaataaaagaagataagtcttcagaaaccaaccctaatgaaatgaagatatgtgattaacctgacaggaaattaaaaagagcaaccataaagagtctcatgggagca

SEQ ID NO: 4278 - DNA, 413 bp, Homo sapiens
  misc_feature (1)...(413): n = A,T,C or G
gaaaacaaggggctacctaccgagaggattatgctagtgactttctttcttacttggggtagggctgttccctctccaatcttccagcctttgggagcaggggaggggtcagtagcagaagcagagggaggcctcttgcctgagggattaaaatggcagcttgccatgcctacccttccctgtctgtctgggcagcaggttcagggctgagcccttcttttccctcttttttcctgggaatattttgtacaatattttgtacaaagacaggcatgaggagtgcctattccatgcttgcctttgcaatacctgcatccccagcactggtcctgggcacttccccaccccagccaggtgtccctcctatgcacagagcagaggagggagaagctctggggagccagctgtggccn

SEQ ID NO: 4279 - DNA, 518 bp, Homo sapiens
  misc_feature (1)...(518): n = A,T,C or G
tgggatgcccccgcttcctaagatcgccctctgaacnatagaaggaccctccggancgacccacgcgtccggcagcccggaggagactgacggtccctgggaccctgaaggtcacccgggcggccccctcactgaccctccaaacgcccctgtcctcgcggtgcctcctgccattcccggcctgagtctcagcatggcggatgggagcagcgatgcggctagggaacctcgccctgcaccagccccaatcagacgccgctcctccaactaccgcgcttatgccacggagccgcacgccaagaaaaaatctaagatctccgcctcgagaaaattgcagctgaagactctgctgctgcagattgcaaagcaagagctggagcgagaggcggaggagcggcgcggagagaaagggcgcgctctgagcacccgctgccagccgctggagttggccgggctgggcttcgcggagctgcaagacttgtgccgacagctccacgcccgcgtggacaaagtggatg

SEQ ID NO: 4280 - DNA, 397 bp, Homo sapiens
  misc_feature (1)...(397): n = A,T,C or G
cgttccnnnagcacgcggcatcttgattcctgctgtgtcttatctgaccattgtcttaaattctagagtggatcatgacccatgaagagcaccatgcagccaaaaccctggggattggcaaagccattgctgtcttaacctctggtggagatgcccaaggtatgaatgctgctgtcagggctgtggttcgagttggtatcttcaccggtgcccgtgtcttctttgtccatgagggttatcaaggcctggtggatggtggagatcacatcaaggaagccacctgggagagcgtttcgatgatgcttcagctgggaggcacggtgattggaagtgcccggtgcaaggactttcgggaacgagaaggacgactccgagctgcctacaacctggtgaagcg

SEQ ID NO: 4281 - DNA, 414 bp, Homo sapiens
caagaaccgcgaggacagagccgccttgctccgaaccttcagctttttgggctttgagattgtgagaccggggcatccccttgtccccaagagacccgacgcttgcttcatggcctacacgttcgagagagagtcttcgggagaggaggaggagtagggccgcctcggggctgggcatccggcccctggggccaccccttgtcagccgggtgggtaggaaccgtagactcgctcatctcgcctgggtttgtccgcatgttgtaatcgtgcaaataaacgctcactccgaattagcggtgtatttcttgaagtttaatattgtgtttgtgatactgaagtatttgctttaattctaaataaaaatttatattttacttttttattgctggtttaagatgattcagattatccttg

SEQ ID NO: 4282 - DNA, 414 bp, Homo sapiens
cagaatttaccatattatcccacaaagcagtaacttttcaattttaggatacataatttcagcatttttcctatcactagatgtttagagctccctccagtgtctctatattgtcatatttactttgagattttttttttttcccaaagatcctaagaattcttttaaccatagcagggagagtatgttattgtctttaagcttacttcaaaaacagaacgtgaaagccagaaatatcacatgcagccccacaacctatagatggcccattcctgctgtctgggctttttttcaggatgaggagagttttggaggtaaaaaaagatgaagtggtcaaaggatgggactcaggaggggacagggtaataaatatggtatgaaagttgctgcatttaaagagcttagggccgggcg

SEQ ID NO: 4283 - DNA, 411 bp, Homo sapiens
ctcaactccactgctacccagagactccagcaggagctgtcatcttctgactgtacaggctcccgactgagaaacgtcaaggtccagacagccttgctacccatgaatgaggcagccagatctgatcagcaggctgggccctgcgtcaacagaggcactcaaactaagaagtctgggaagagtgggccaacaaggcatcgtgcccagcaacccgcagccagcagcacctgtgggcagccgccaccagccacaggcagcgagcagactggccctcacattcgggacacctcccaagctctggagcttacccagtatttttttgaggctgtttctacccagatggaaaagtggtatgaaaggaagattgaagaagcacgaagccaagccaatcagaaagcccagcaagataag

SEQ ID NO: 4284 - DNA, 415 bp, Homo sapiens
cggacgcgtgggcaggattataaatcattctactataaagacacatgcatacatatgtttattgcagcactttttgcttttttacaatcagcctgccagaggctggtccacagattgtggaagcagaaagtgaccttcctctcatctggtccaactccctcattttggaaactgaggcttggaatgaggaagagatttggcttcaaatgtcagtagccaaagactgggcccaaggtaattgaaatataaataatgcaatgatcatctgccctcccagcattccctcacgacagcacccaactctagcttttgatgaaggagccaagacccagagaggtggcatcatttaccccaatggcatcgtatgaccagcacaatgaaggaaaccaaaggggtattgtgacttttcctccct

SEQ ID NO: 4285 - DNA, 406 bp, Homo sapiens
  misc_feature (1)...(406): n = A,T,C or G
atcagaacagctcagcaacccctgaatttgacagtctcaccaatttcagaaaatcattaaaaagaaaatattgaaaggaaaatgttttctttttgaagacttctggcttcattttatactactttggcatggactgtatttattttcaaatggctttttcgtttttgtttttcttggcaagttttattgtgagtttttctaattatgaagcaaaatttcttttctccaccatgctttatgtgatagtatttaaaattgatgtgagttattatgtcaaaaaaactgatctattaaagaagtaattggcctttctgagctgatttttccatcttttgtaattatctttattaaaaaattgtacttggnnnannnnnncnnnnnnnnnnnnnnnnnnanngncgggggg

SEQ ID NO: 4286 - DNA, 415 bp, Homo sapiens
acagatacttccttttccagataaacttacagaaaagaaagtacagagaaaaaaaaagaatggaatacacatgaatgccgaaccacattggatatgtagctgttcatgaagatattccagggaaggcctatctagtagagcctcaaatctatttgaatacaaatggcactcattaaggacatctgtcttctgtaatgtctacacaaagtcttaccggggtcttcttggctcttattgacggctgatgaaggaggggtttataaagaaaacaagccaaaacctgaataacttgctactgagagcagcacacatattttcccaaagtgcaaagttgagaagaagtacaaagctttgttaatattctgaacagtactgcttagtatgatctaattgatggattttccatggactccct

SEQ ID NO: 4287 - DNA, 502 bp, Homo sapiens
  misc_feature (1)...(502): n = A,T,C or G
tgatatggtccacaattgatngcctgnggnncctttgaggactttccgggaccgacccaggcgtcccggctcgacccacgacggcgagaactattctcgccatgaacgccagggtcgtggacgtgctgggcctcatgctgaccgcgctctgcctcagggacgggaagcccgtcagcctgagctacagatgcccatgccgattcttcgaaagccatgttgccagagccaacgtcaagcatctcataattctcaacactccaaactgtgcccttcagattgtagcccggctgaagaacaacaacagacaagtgtgcattgacccgaagctaaagtggattcaggagtacctggagaaagctttaaacaagtaagcacaacagccaaaaaggactttccgctagacccactcgaggaaaactaaaaccttgtgagagatgaaagggcaaagacgtgggggagggggccttaaccatgaagaccaggtgtgtgtgtggagtgggcn

SEQ ID NO: 4288 - DNA, 481 bp, Homo sapiens
  misc_feature (1)...(481): n = A,T,C or G
ggggatgacgcggnntnnnnnnnccttgaaaactgaaggcnctcgcgaacagcccngannngacccacgcagccgcggacgcgtgggagcaaatactgaaagcagtcatgcgaatggagggtgctcttgtgtagctggtcagggactttttttttcttttctcctgaactacatgattctaattggaatgttcatttgcctctttttactcttttaaatgcttgtaggtggcttggggtgtgctatcgtgctgttcctactcagtaaacaggtgtgatgagttaacaagaaataacactgtttgagaactagctttgaataataatttttccctttgtacatgacctgctgaatttcggtacagtgtttttgtagctaacttattttgtcatgcacataatgtatatttgttatgcactacttttgtatatcttgtttttccaacagtgaacatttttaggcacacttttcactgacgggg

SEQ ID NO: 4289 - DNA, 407 bp, Homo sapiens
cttaggaattttagaatcagcttttcagtttccttaaaaacttctcttgggggagaaattttattcaggattgcattgatctctatggattgatgtgcagataattgaaatctttaaaattgaatcttttaattcatagacatatgtccctttatttatttaggtcatggttttgcatattttagcatataagtattctgtacttttctttagatgtattcctatatatttgatatttttaaaccctaaagctaattttgtaattgtaattttgtatgctttttcttatagaggactcttttttaagctgtaggccctacaaaacctcattctatccctgggcagaatgttttcactcacatgaatgttgaaaatcatgtgggaagctagtcatttcttaattgtgg

SEQ ID NO: 4290 - DNA, 418 bp, Homo sapiens
cggacgcgtgggctcgcccctctggggcggaggcgttgcaaaagaagaggggcaggactcgttcccgggaaccgaacctggaatccccggcggcagtggggctgttgctgttgctgtggctgtcgctgcccgtcaggctgccttcttttgtcgtttcccagcgctgcgcaggacttctcctggcggcgctgcggatccagggggtcggctgccaggtacaggtttcctaaagacaaaaaaaaatggaggaatctgtaaaccaaatgcagccactgaatgagaagcagatagccaattctcaggatggatatgtatggcaagtcactgacatgaatcgactacaccggttcttatgtttcggttctgaaggtgggacttattatatcaaagaacaagaagttgggccttgaaaatgctg

SEQ ID NO: 4291 - DNA, 414 bp, Homo sapiens
tggggccgacagttttgggggtgaaaaggcaaaaggcgggtgaaaggctgcctcccgagactctccttgcttggaattctgcccactctgcggagttagcagtcacgacctccagcacaggatgtggtaccacagattgtcccacctacacagcaggcttcaggacttgctgaagggaggagtcatatatccggcccttccacagcccaacttcaaaagcttacttcctttagctgtccattggcaccatacagcctccaagtctctgacttgtgcttggcagcaacatgaagatcattttgagctgaaatatgctaataccgtgatgcgctttgattacgtctggcttcgagaccactgccgctcagcatcgtgctacaactctaagactcaccagcgcagcctggatactgg

SEQ ID NO: 4292 - DNA, 408 bp, Homo sapiens
cggacgcgtgggtgggcatcatagccgacgctaccgtccgctccctggagggccgcggggtgaagattgcccgtgccctggtgggcaccttcatgtcagcactggagatgcctggcatttctctcaccctcctgctggtggatgagcctctcctgaaactgatagatgctgaaaccactgcagcagcctggcctaacgtggctgcagtctccattactgggcggaagcggagccgggtagcccctgccgagccccaggaggcccctgattccactgctgcaggaggctcagcctcgaagcggatggcgctggtgctggaacgggtgtgcagcactctcctgggcctggaggaacacctgaatgccctggaccgggctgctggtgacggcgactgtggcaccacccaca

SEQ ID NO: 4293 - DNA, 443 bp, Homo sapiens
  misc_feature (1)...(443): n = A,T,C or G
cctacagtttcttcacgaacacaagatcgtctacagggacctgaagttggacaatttgctcctggacaccgagggctacgtcaagatcgcagactttggcctctgcaaggaggggatgggctatggggaccggaccagcacattctgtgggaccccggagttcctggcccctgaggtgctgacagacacgtcgtacacgcgagctgtggactggtggggactgggtgtgctgctctacgagatgctggttggcgagtccccattcccaggggatgatgaggaggaggtcttcgacagcatcgtcaacgacgaggttcgctacccccgcttcctgtcggccgaagccatcggcatcatgagaaggctgcttcggaggaacccagagcggaggctgggatctagcgagagagatgcagaagatgtgaagaaacagcccttcttcn

SEQ ID NO: 4294 - DNA, 441 bp, Homo sapiens
aagtaataaaattcaacaaacatttgctgaatagctactatatgtcaagtgctgtgcaaggtattacactctgtaattgaatattattcctcaaaaaattgcacatagtagaacgctatctgggaagctatttttttcagttttgatatttctagcttatctacttccaaactaatttttatttttgctgagactaatcttattcattttctctaatatggcaaccattataaccttaatttattattaacatacctaagaagtacattgttacctctatataccaaagcacattttaaaagtgccattaacaaatgtatcactagccctcctttttccaacaagaagggactgagagatgcagaaatatttgtgacaaaaaattaaagcatttagaaaacttctttgctttcttatttacgtagatgcattatacctttc

SEQ ID NO: 4295 - DNA, 411 bp, Homo sapiens
agcatctatgccctcatccagcactaccgcgagacgcacctgcgctgcgccgagttcgagctgcggctcacggaccctgtgcccaaccccaacccccacgagtccaagccgtggtactatgacagcctgagccgcggagaggcagaggacatgctgatgaggattccccgggacggggccttcctgatccggaagcgagaggggagcgactcctatgccatcaccttcagggctaggggcaaggtaaagcattgtcgcatcaaccgggacggccggcactttgtgctggggacctccgcctattttgagagtctggtggagctcgtcagttactacgagaagcattcactctaccgaaagatgagactgcgctaccccgtgacccccgagctcctggagcgctacaatatg

SEQ ID NO: 4296 - DNA, 469 bp, Homo sapiens
  misc_feature (1)...(469): n = A,T,C or G
gccgacatgaccaactttgatgtggaggttcttttgaacatccatgataatgaagtcattgtgggcattgcattgactgaagagagtctccaccgaagaaatataacacattttggacctacaactcttagatcaactcttgcctatgggatgctcaggctctgtgatcctctaccttatgatataatagtcgatccaatgtgtggaactggggcaataccaatagagggggccactgaatggtctgactgtttccatattgctggtgataataatccactggctgtgaatagagcagcaaataacattgcatctttattgaccaagagccaaattaaagaaggcaaaccctcctggggcttgcccatagatgctgttcagagggatatctgcaatctgccattgagaactggctctgtggatattattggaacagatttgccatttggaaaaggatgggatccaagan

SEQ ID NO: 4297 - DNA, 381 bp, Homo sapiens
cccacgcgtccgcccacgcgttcgtaatcaaaaatttctctaatgaaagatcaagcttgtggtcaggaggagtaaagtatccagttaatcccagaagaatgggcagaagtaggataagggtagggccaatctctggcatgtatttatcaacattctttctgataatagaatgtttagcatacaatagaatggagtgtttaacatacaagttgagttcaaagtttagatttcaaatggtaaatggttttccaatattgggatgtaatgatggaccaaaaaagaaaaagaagaaagtaatacattagagcccaatactttttaatcaagatatgaggacttaattatttttttccagtaaagtcgagcatttttataaatggg

SEQ ID NO: 4298 - DNA, 393 bp, Homo sapiens
ctggtgtaggggcctctctgaccaggccaaacaggcgactccgatggaacagtttccagctgtcgcaccagccccggccggccccagcatcgccccacatcagcagccagacggccagccagctgagcctgctccagcgcttctcactgctccgcctcacggccatcatggagaagcactccatgtccaacaagcacggctggacatggtcagttccaaagttcatgaagaggatgaaagttcccgactacaaagacaaggctgtctttggcgttcctctcatagtccacgtccaaagaacgggacagcccctgcctcaaagtattcagcaagcactgagatatctacgcagcaactgcctcgatcaggtgggtctttttcgcaaatcaggag

SEQ ID NO: 4299 - DNA, 445 bp, Homo sapiens
ctaaccgctaacattactgcaggccacctactcatgcacctaattggaagcgccaccctagcaatatcaaccattgaccttccctctacacttatcatcttcacaattctaattctactgactatcctagaaatcgctgtcgccttaatccaagcctacgttttcacacttctagtaagcctctacctgcacgacaacacataaaaaaaaaaaaaaaaaaaagggggggcccgttttaaagggtcctttagggggccaaagtttaggcgggcagggaaagttttatttcttcccttatagggaggcacattaaaacctccctgggaattttggggaaggacccttatttcgggggggggctatatggggacaaactgcctccagagatgtaaagctctaggggaaagacaaaattcttacgtggttagggtggtaacctgcctgc

SEQ ID NO: 4300 - DNA, 414 bp, Homo sapiens
  misc_feature (1)...(414): n = A,T,C or G
cccacgcgtccgcccacgcgtacgtacgaaagtggctttaacatatctgaacacacaatagctaagacccaaactgggattagataccccactatgcttagccctaaacctcaacagttaaatcaacaaaactgctcgccagaacactacgagccacagcttaaaactcaaaggacctggcggtgcttcatatccctaaaaaaaaaaaagaaaaaaaaaaaaaaagaaaaaaaaaaaataaaaaaaaaaaaaaaaaaaaaaaangggggggggggttttaaaaaaaaccttggggggggggcccccccccccgggaaaaaaaaaaattttttttttttttttgggggggggaaaaaaaaaccttgggggtttttttggaagaaacctttttttttgggggggaaaaaaaaaaac

SEQ ID NO: 4301 - DNA, 445 bp, Homo sapiens
  misc_feature (1)...(445): n = A,T,C or G
cggacgcgtgggggcgcctcagtcctggacaggagcctccaccacaggctgtgtgaatgttttgtgtaaacgtacaaaaccgtttctggcgatcacgcttgtaaaaaaaaaaaaaaaaaaaaaaaaaaaaaaaaaaaaaanggggggggccttttaaaaaaatttctgggggggccaaaaataacggggggaaaaaaaattattttttttttttttaagggggcgaaaaaaaaaaccgggtgggcattttttaaaaaaaaactttttttggggggggaaaaaaatgagaaaaaccccccaaaaaaaattacacgcctgagaaaaaaaaaaatttttggaggaggagaggggaaaaaaacccttttattgttcttagattaaaaaaatgggnnnnnctataaccaaacgcaaaatagggggagggagaggaagaccactatcaaca

SEQ ID NO: 4302 - DNA, 420 bp, Homo sapiens
cccaaagctgcacagaaaagctagagcacagattttctctgggatataaaagcatccaaaacatccctgcatagtgggaaactcagaaactcacacatatgcccagggcagaatacactctcagaaaagacctcacaattttcccaaactttcacacctggttgagcagtagtttcagtgcaaacaagaaggaaaaactaaggcagagttgtaaaaagcctggcgaagtgttgaaggagggcccagcacacaaagggtcaactggcagactgagagaggattttcatttttgctgtggatttcctttctgcctctcttttcctttctttcttattaatggccattcccttccctctctgtctctctttctcactcacgcactcttggcattcatggaaatctctgtcaaaacgctgttta

SEQ ID NO: 4303 - DNA, 399 bp, Homo sapiens
cccacgcgtgcgctggacccttcccactacataatagggctcagcccaggcagccagctttgggctgagctaacaggaccaatggattaaactggcatttcagtccaaggaagctcgaagcaggtttaggaccaggtccccttgagaggtcagaggggcctctgtgggtgctgggtactccagaggtgccactggtggaagggtcagcggagccccagcaggaagggtgggccagccaggccattcttagtccctgggttggggaggcagggagctagggcagggaccaaatgaacagaaagtctcagcccaggatggggcttcttcaacagggcccctgccctcctgaagcctcagtccttcaccttgccaggtgccgtttctcttccgagaaggcca

SEQ ID NO: 4304 - DNA, 466 bp, Homo sapiens
  misc_feature (1)...(466): n = A,T,C or G
acggcagcggctggcagccgccgcgcccctgcgaggcctaccgcgccgagtggaagctctgccgcagcgccaggcacttcctacaccactactacgtccacggcgagcggccggcctgcgaacagtggcagcgcgacctggccagctgccgcgactgggaggagcgccggaacgccgaggcccaggtgctaagtgtggtggctcacacctgtaatctcagctacttgggaggctgaggcagaagaatcacttgaggataggagtttgaggttgcagtcagctatgatcgtgccactgcactccagcctgggcaacagagcaagaccccatctctaaataaatgttgtaaaaataaaaataaatgttttggataaaaccccatattaataataagtattttacattattatctggcatagactggtatatatagcatattnatggtganatacanaacaatatgtan

SEQ ID NO: 4305 - DNA, 403 bp, Homo sapiens
  misc_feature (1)...(403): n = A,T,C or G
aggagcttcaggctgggcgtggtggcttacacctgctatcctagcacttatggaggctgaggcaggcagagcacgaggccaagagattgagaccatcctggccaacatggtgaaaccccgtctatactaaaaccccaaaaattagcctggcatggtggggcacacctgtagtcccagctactcaagaggctgaggcaggacaattgcttgaacccaggagacagagattgcagtgagccaagatagtgccactgcactccagcctagcgacagagtgagactccatcgnnagaaaggactacagagccccgaattaaggccggccttctggcggagcgtttanattacccccggggcgacttaaacaaattaaagatgagttttaaagctgtaggcgactagg

SEQ ID NO: 4306 - DNA, 449 bp, Homo sapiens
  misc_feature (1)...(449): n = A,T,C or G
ttacgttaatatttgctatttctaccaaggaagtaataaatataaaaatatggacttggtgaatgcctagtattaacttactgcattattttacatacacttgtatattaacaaatataattcttagcttaatgaccatttacacccagaagaatagcagaatagaaatagtttattggtgataaaaatatattaaacaaagtgttaatcttgacattntatttcttgttgcttggtaacaatgctgcagtaatgcgagagagttccattatctcaggtacaatggacttcattgcattgtggggtaaaaataccaattacagcaagtcatttgtatgccattatcctcacaaaattttggagctattttttatagtttatatagagatcctaaaagaaagncattttaataatatatccccctttcttgatggattggtgaattttan

SEQ ID NO: 4307 - DNA, 397 bp, Homo sapiens
gccattgctttttcacttgccatgagctctgtgaatgagatggttcctgctgaagacatttactttcaatgatctacagaatttcccaaatctatgtctccagactggatgtttctcacgtctgtggcccactgggcatcttctgcactttctctgcatttgtaaacactgagcctgtatgcgtgtctatgtggccatggccctggccgcggggatgcacccataattataatgagagcaggcgaatgtcatgtggctatgtatgagacattgttgtgaatgttttacatgcatcagctctttcaacatttacagcatctgtgtgtggtaggtaatgttgtttccttcattttgcagagcagaatatagataggctcaagttaagaatttgcccacg

SEQ ID NO: 4308 - DNA, 403 bp, Homo sapiens
taaaagacaggaacctgcttcactgtattaactagtccatgggctgagaccggggcatctcttttcttcatactgcaatgttgctagatacatgatcagacaccagagggttgggcattcttgcaataccttaacagtgctgaaatctgcagcatggtactaaggaagttaaagtttgaatgtaaccactttatttaaaaggtttttttctttaatttaaatgaaatggggttgaagtgaacatgattttgttgaccatgttcgtgaattacagatgcaacatgcattggtagaatcgtgtgatggtcttttgtgatacttaatttttacatatcccagtctctgtatgtatctgcatagacaaagaaaaacaaactcctgcttgcttttattgaagggttcc

SEQ ID NO: 4309 - DNA, 500 bp, Homo sapiens
tgtctcccctgagtcctgcgcactcggcccggaaccctgggtcgacccacgcgtccggaggaagatgaggagagctcctcggagggcttggaggctgaggactgggcccagggagtagtggaggccggtggcagcttcggggcttatggtgcccaggaggaagcccagtgccctactctgcatttcctggaaggtggggaggactctgattcagacagtgaggaagaggacgatgaggaagaggatgatgaagatgaagacgacgatgatgatgaggaggatggtgatgaggtgcctgtacccagctttggggaggccatggcttactttgccatggtcaagaggtacctgacctccttccccattgatgaccgcgtgcagagccacatcctccacttggaacacgatctggttcatgtgaccaggaagaaccacgccaggcaggcgggagttcgaggtcttggacatcaaagctgagtcactggacctagctgtgcccc

SEQ ID NO: 4310 - DNA, 439 bp, Homo sapiens
aagagagtagtccaggtatattcctgatcaaaatttggcttttttgatgatactactctacacagatcagactcatgtgcagaatcgtgcctggagagagaggtttggttaagacagagatttctggaaacattcaaattgcaaatggaaacttgaaacccacaatctaatgaggaatgtactggaaaaataatctgaagagttgacaaattgtgtactagattgaacacatggaatgcaatgcaatgagactttctgcactaaaacttatcctcatatgtacaacaatgatgtgtgtattatataacagtgatgtgtacatttctgacaccccatacataatatacacagtttgtataaatgcatacatttaaaaatatatatgtacaatacagctaacataaaactgtagtacgcctgaaggatattactagtgcct

SEQ ID NO: 4311 - DNA, 399 bp, Homo sapiens
agagagcaaagccagcgtctctagcttggttgccacactggggagactggtgggtggtcaccccaccctatcctcatccatggaaacccggagggagagtcccgcctggagaaacctggatctttgctagaaagagagagatccagttgtcatcggtatccaggaagctctcctcttcctcctcctgacgtctactactacagttgctggctgttgctaaggttgctgccatggtaacatgcacatcctgtttacaccttcatctgggcaagttggtctaagctaggaacctacctaccctggacaactactatcatcaccacctggggacaccaatcatcgtgacacggagtccaccttccactcagttcccccatcctcttcctcctctcgctgcca

SEQ ID NO: 4312 - DNA, 440 bp, Homo sapiens
  misc_feature (1)...(440): n = A,T,C or G
cagacagatggcctgggcttgtcctacctttccagccatatcgccaacgtggagcgggtgcccttcgacgccgccaccctgcacacctccactgccatggccgcccagcacggcatggatgacgatggcacaggccagaaacagatctggagaatcgaaggttccaacaaggtgcccgtggaccctgccacatatggacagttctatggaggcgacagctacatcattctgtacaactaccgccatggtggccgccaggggcagataatctataactggcagggtgcccagtctacccaggatgaggtcgctgcatctgccatcctgactgctcagctggatgaggagctgggaggtacccctgtccagagccgtgtggtccaaggcaaggagcccgcccacctcatgagcctgtttggtgggaagcccatgatcatctn

SEQ ID NO: 4313 - DNA, 407 bp, Homo sapiens
cgcccgaccgcgcgctcgccccgccgctcctgctgcagccccagggcccctcgccgccgccaccatggacgccatcaagaagaagatgcagatgctgaagctcgacaaggagaacgccttggatcgagctgagcaggcggaggccgacaagaaggcggcggaagacaggagcaagcagctggaagatgagctggtgtcactgcaaaagaaactcaagggcaccgaagatgaactggacaaatactctgaggctctcaaagatgcccaggagaagctggagctggcagagaaaaaggccaccgatgctgaagccgacgtagcttctctgaacagacgcatccagctggttgaggaagagttggatcgtgcccaggagcgtctggcaacagctttgcagaagctggagg

SEQ ID NO: 4314 - DNA, 439 bp, Homo sapiens
  misc_feature (1)...(439): n = A,T,C or G
acgcccatccgggatgaggccagggaggaactgttgatgacatacttcatccagctgggctttgatgagaattgagtcttcccacccacgcggcagatgggactcctgatcacctgggggtttaaactacctgaaagagacatttacccatactccaagttacgacatgagccctgacatgctcagcgtgcttgtcaaaatgatgcttgcacaggcccaagaaagcgtgtttgagaaaatcagccttcctgggatccggaatgaattcttcatgctggtgaaggtggctcaggaggctgccaaggtgggagaggtctaccaacagctgcacgcacccatgagccctgcgctggtgaaagagaacatgccctactcctgggccaacttgtgctgcgtgaaggcccaccagtacacggagctggaccactacttgactgan

SEQ ID NO: 4315 - DNA, 403 bp, Homo sapiens
caaaaacagcaacaacaaaaaccttataagttactttcattagatgcttccattgagccagacaccatgtaaggtgctgggtgagtgcagagatgcacaagacacagaatccaagacaaataacccaaaagaacccaaacagttgctaagctcttcccagggctcactgtatgtcccaaacacattcagcacgttacacagagtatctcattgatcacattttattacctctaggaaattttgagaggccccattatttttatggacagctgggaaaaaaaaaaaaaaaaaaaaagggggggccgttttaaagaatccttgggggggccaaagtttacgggggattgcaaggtaatagttttttccttatagggagccgtataaaaacctacttggggatttt

SEQ ID NO: 4316 - DNA, 508 bp, Homo sapiens
  misc_feature (1)...(508): n = A,T,C or G
agcgcntncaattgaaattaacggcatcgggcacggaaccccgggncgacccacgcgtccgcccacgcgtncgcccacgcgtncgacagaattcaaaatagctgtgttgaggaaaccaaaagaatttcgagataacacagagaaggaatttagagttccataagataaacttaacaaagagattcaaataacttaaaagaatcaagcagaaatcctggagctgaaaaaagcaatgggcatactgaagcatgcatcaggtcctttaataacagaatggatcaagcagaagaaagaattagtgagattgaagacaggctatttgaaaatacacagtcagaggaaacaaaagaaaaaataatttaaaagatgaagcatgcctacaggatctagaaaatagcccctaatggggaaatctaagagtttttgaccttaaaggggaggtagagaaagagatgggtgtagaaaatttattcaaaagggttatagagaacttcccaaatgtagagaa

SEQ ID NO: 4317 - DNA, 440 bp, Homo sapiens
aagaaaagaaataaccaagatcagagaagaactacatgaaactgaaacaagaaaaaaaatgtaagtcaaaaaccaagtagataaaagagaaccaggaaaatcctaatgccatggagtctatcaaaatgccaaaaagaaaaagcaagccaagcatcatatctatattgttcactgctgcatatataggcatattaatgtttattacataaatgagtaaataagtattgaagagtttttattgccctttacttgctaatccagttctataaagactatcacattcacatatccttgattctaacaaaataaaatctgggctgggtgcagtggctcacacctgtaattccaacactttgggagaccaaggcatgcggatcacttgaggtcaggagttcgacatcagcctggccaacatggtgaaaccccatctctactaaaaa

SEQ ID NO: 4318 - DNA, 426 bp, Homo sapiens
  misc_feature (1)...(426): n = A,T,C or G
gaaagcaatctgttattctaacctctgcagggccactggcaggtcctcaggcctgagacacagcagcagtcagggggtagagagacaaacaagccaagattgtctttctttgcttttcagccagacaaagaaaatccctctctgcgtaaagcctcctccgcaggctttgatgtctctcttcccagcagaggcgccacttcagacaagagaggcaggcaggggcagagagctgagaacaaagcggcgtttcctgggctgctaattattctccttctgtggaaataattatctggaagagaaaaaaacagtccacagctaaagagctagaaaagcaaaaggaggatgaaaggagggctgggatttgatgtgtccccgggagcagtccttgaaggggaggggagtcacagcnaaatccttcttacttct

SEQ ID NO: 4319 - DNA, 502 bp, Homo sapiens
agtgctcacatagattccgtagcatcgggcacggaaccccgggtcgacccacgcgtccgctcttctaagtaagctttttatgtagtcacgcaattaagactgtcaagacatatttgaatttcattttgaatggtgccagtggccctgtgctcctggttgatacagcatttatacccagtttgtcttactagctaatttaaactctgagcacatccctgtcaccttcacaactataaatgaaatatcttgccatatatgtagaaagtaaaaggtatgtgtttcttaacttctccctaaacttcagcttggcagtagtttataatttcatgcttttgatgctttttttctctgggttttggtttctatatttttccaaatgccattttgaaaagttgcattatagatagatataagtaaacaggtgggcacagtggtgcacacctgtagtcccagctactcatgaggctgaggcaggaggatcacttgagcccaaaagtgtgcg

SEQ ID NO: 4320 - DNA, 441 bp, Homo sapiens
aattaagatcacccctttccacttacttcacctggtgattgaaagcatcatagtattttataaatgccaagaattatgcatgaaggctcggcgcggtggctcacgcctgtcatcccagcgctttgggaggccaaggcaggcagatcacttgaggtcaggagtttgagaccggcttggccaacatggcgaaaccccatctctactaaaaatacaaaaattagccgggtagcgcatgcctgtattcccagctgctcttgaagctgaggcaggagaatcgctcggacccaggaggctgaggttgcagtgagccgagattgcgccactgcactccagcctgggcgatagagcgagtctccgtctcaaaaaaaaaaaaaaggtgcatcaaccataggattgcttcgagtttgcccaccacaagtgtatctttttaatcaggacagg

SEQ ID NO: 4321 - DNA, 445 bp, Homo sapiens
ccaaccttgtgtccactgtgacccctgttcccatgctgacctgtgtttcctccccagtcatctttcttgttccagagaggtggggctggatgtctccatctctgtctcaactttatgtgcactgagctgcaacttcttacttccctgctgaaaataagaatctgaatatcaatttgttttctcaaatatttgctatgagaggttgatggattaattaaataagtcaattcctggaatttgagagagcaaataaagacctgagaaccttccagaaaaaaaaaaaaaaaaaaaaaaaaagggggggggcccttttaaagaatcccttggggggcccaagtttacccgggcgggcaagggattatttttttccttaaagggaggcgaattaaaaccaccctgggaatttttggaaagaacccttattttggggggggaacaaaatgga

SEQ ID NO: 4322 - DNA, 443 bp, Homo sapiens
  misc_feature (1)...(443): n = A,T,C or G
atgggggcttcggtgcccaccaaccccccaccttcactctgccattccggcccacctccctctggccggacagaactggtgctctcttctccccactgtgcccgtccgcggaccggggacccttccccgtgccctaccccctcccattttgatggtgtctgtgacatttcctgttgtgaagtaaaagagggacccctgcgtcctgctcctttctcttgcnnaanacaggaaaaaaaaaaaacaaaaaaaaaaatgggggggggggcttttttaaaaattttttgggggggcccaaggtttccgggggaaaaaaatttttttttttttttttttggggggggttataaaaacccgggggggtttttttggaaaaaaccctttttttgggggggggggaatttcgggccccccccctccaccaatttgggggcgttaggggaaat

SEQ ID NO: 4323 - DNA, 400 bp, Homo sapiens
tcgaggcaagtttaagcggcccaccctgcggagagtgaggatctctgcagatgccatgatgcaggcgctgctgggggcccgggctaaggagtccctggacctgcgggcccacctcaagcaggtgaagaaggaggacaccgagaaggaaaaccgggaggtgggagactggcgcaagaacatcgatgcactgagtggaatggagggccgcaagaaaaagtttgagagctgagccttcctgcctactgcccctgccctgaggagggccctgaggaataaagcttctctctgagctgaaaaaaaaaaaaaagggggggccgttttaaaggatccttgggggggcccaagtttacgcgggcatgcaacagaatagttttttccttatagggagccgtattataac

SEQ ID NO: 4324 - DNA, 454 bp, Homo sapiens
cggacgcgtgggtgggaggctgaggcaggataattgcttgaacctgggaggtagagattgaaatgaaccaagatcgtgccactgcactccaactgcactccagcctgggcaacaagaacgaaactctgctcaaaaaaaaaaaaaaaaaaaaaccccaaaaacttcaacttgggcggggggggccccaaccctttggataaaaaacctttaataaaccaccttttttacccgggaggtttttttttaaccaattttttggggaaacttaaggcccggcctccaaaccagggtttttaacattggaaaatttttttcttttcttaaggttaggggggaaaatttttattaggaaaaaagaacttatgaacccccccgcctttgccctcccattgccttggaaaaaattgggtgcttaaaatttgccgggggaagggggctaaaacttttggaaagg

SEQ ID NO: 4325 - DNA, 417 bp, Homo sapiens
atgccatatgccggggtgccaagacagtgcgcgagttcctggagaacaactatactgacgaagccattgaaacagatgatctgaccattaagctggtgatcaaggcactcctggaagcggttcagtcaggtggcaaaaacattgaacttgctgtcatgaggcgagatcaatccctctagattttaaatcctgaacaaatttagaattatgctagtgaaattgaaaaaaaaaaaaaagggggggctgatcaaagaggctccggggggggccaactttactgcgggcctcacaatgtttggtgctatccttatgggggcggaccttatagacaacattgtcatcttagtgaaagacccttactttggaggcgaaacagaattgaacactctactcacagaagttaagccctctagggaa

SEQ ID NO: 4326 - DNA, 423 bp, Homo sapiens
caggacccgtatccatgggccgcgcgatccgtgaacatatgaagggtgccgggtctgtgttccgcgcgcacgtgaagcaccgtaaaggcgctgcgcgcctgcgcgccgtggatttcgatgatcggcacggatacatcaagggcatcgttgaggacatcatacacgacccgggccgcggagcgcccctcgccaaggtggtcttccgggatacgtatcggattaagaagcggacggagctgttcattgccgccgagggcattcacacgggccagtttgtgtattgcggcaagaaggcccagctcaacattggcaatgtgctccctgtgggcaccatgcctgagggtacaatcgtgtgctgcctggaggagaagcctggagaccgtggcaagctggcccgggcatcagggaactatgccaccgtta

SEQ ID NO: 4327 - DNA, 458 bp, Homo sapiens
cccacgcgtccggagaatttgtactactgatttttatatattcctgtttttgagatgaacagatctctggggaaattgttgagttacaatggcatttcactgtgatccctctcaagctcagatcagttctataacccaatgacaacctgtctctttggtttactgtcctgtgaaatgtcagctcaagtttcccagaagtcgtgtgtttatgatgagtcagagtgcttttcctcggtgggacagttgctggccctcttaattttggtgtatgtgcttccaagtatctaaacctccagtctgatctgtatatgctatcctaactgttaattgtattattgattatgttgattatcttgcttgaaggttcatacttttcaatttgatagaaataaagtttttttctgcttatagctagcgaattcaaaaaaaaaaaaaaaaggggcggccgttttaaaggt

SEQ ID NO: 4328 - DNA, 504 bp, Homo sapiens
  misc_feature (1)...(504): n = A,T,C or G
agtgctaaattgacttcgaggtctcgggcacgaatccccgggncgacccacgcgtncgacgggggcttcggtgcccaccaaccccccacctccactctgccattccggcccacctccctctggccggacagaactggtgctctcttctccccactgtgcccgtccgcggaccggggacccttccccgtgccctaccccctcccattttgatggtgtctgtgacatttcctgttgtgaagtaaaagagggacccctgcgtcctgctcctttctcttgcgnaaaaaaaaaaaaaaaaaaaaaaaaaaaaaaaaaaaggggggggggccctttaaaaaaacccttgggggggccaaatttatggggggggggaaaaatttttttttttttttttagggggggcctttaaaaacccctcggggattttttggaaaaaacccttttttggggggggggaaaaatgggccccccccccccccaaaaatttaccccctggggggaaaaaaa

SEQ ID NO: 4329 - DNA, 430 bp, Homo sapiens
gcgtcgaggcaagtttaagcgggccaccctgcgtttagtgaggatctctgcagatgccatgatgcatgggctgctgggggcccgggctaaggagtccctggacctgcaggcccacctcaagcaggtgaagaaggaggacaccgagaaggaaaaccgggaggcgggagactggcgcaagaacatctatgcactgagtggaatggagggccgcatgaaaaagtggagagagctgagccttcctgcctactgcccctgccctgaggaggggcctgaggaataaagcttctctctgaactgaaaaaaaaaaaaagagggctggcggtttaaaagatccctcgggggcccaacgttaaagcgggctggcaacatagaaactttttctaaactgggtcgggatttaaaagaacgagtcgaaattttgggaagaaat

SEQ ID NO: 4330 - DNA, 423 bp, Homo sapiens
  misc_feature (1)...(423): n = A,T,C or G
aattcaactctgttctccatgaaagggggnnnntaaactgtgtcattgcctctgggggcagccagtcagttgacttagcccgagtcccatctcactctggatccctgctccataacgttctttctttagactgactttttcccagcagctttaaatgtctacataccttctcaatcactctgctctaccaattaaacactgttcatcattcctctaatgcaaaactccattcctttgatcatttgagttgctttcctctgctcccattctaatttgtttctgtacttctggaactgaggtagtcattctttaacatgcaattagttataatttgttactgaaatgattctgccaaaggattaaaactaaattttactaaatcacttttttaaaaatgaaaatgctagaagtcctctaattata

SEQ ID NO: 4331 - DNA, 428 bp, Homo sapiens
  misc_feature (1)...(428): n = A,T,C or G
aaaatgtatttgctttgcttcagctgttctgannnnnntttttttttcagaacagcatgattccaacaggcctggcttgggaggacatgttgtaccctctgtaccagaagtacaagaatgccatcacgtggggagaccaggatttattaaatattattttttatttcaacccaggtaggttatctttggagaatgccttttgtgtaggagtacactcagcacaccccacggagcacattccatgcccgggttgctattgactaggcttgaattgtgcacagaggagcctgtgttccccagcgaagtttgccctttcatccgcccccctgggtatctgatggaggcggngccttgcactactgacacaaaaggccaaatgttgaaacttccaacactggactcatttttagagagtatcttttaggttt

SEQ ID NO: 4332 - DNA, 422 bp, Homo sapiens
actatggctaaatcgcgagcggacccgactttttgcttttgctctccctgctgattgcaaaaaagagcagcgagggtgaatatattcaaaggggtgggaagagagtacgacccggtttcacctgcccatggatatggtaaacatcaggcatgctaagaaggcccaaactctctccagggacctggactacaggaagaaactgcatgattacactgcgctgcctgaagatattaagactcagtgggccaagaaggtgtatgggctttatagcgagctgcactacagggctgacctggcttggatgaaggggtggggcggctgacaaaggggagtctcaacttggaacaagccaagaaggctggacatctggtcagcgagaaaaactaccggcctagggtcgatgagctgctgttcaccagcgg

SEQ ID NO: 4333 - DNA, 429 bp, Homo sapiens
  misc_feature (1)...(429): n = A,T,C or G
atgactctttatgcaacataacatacatttggtatnnnccagggtttaaaagaaaacactgagctgtttcctccaagttttattaaccttttatttaacttactgctttatttttttctcttttaatatgggtattgttaaaatgagagtcacttgctagactggtctctttaaatgtaaggtctagtatcaatatttacttcattcaagtggaataaatggctttttgtagttacttccagttttcctcaagaatagaaataagtctgttcataagcaataccttcagttttgttcagttcacttccacgttaaataaagaataggattattcactggtaataatagagtcattaagaaatattaagcattgcagctaanaattgaacaaccctgtaatgatacatttaagaattattcaaaggtgct

SEQ ID NO: 4334 - DNA, 419 bp, Homo sapiens
cccacgcgtccggaagagagtttcacagaaacaaagctttgtcactcagaaatgagttctgtctcactggggacttcatccctcaggctccagctgagcagagattttaatcagcttccttaatgggtattgacactgctcaggaagcagtagaccctgtcagggacagctattgatcttttgtgttctgattagattggaaaatagatcaacttcattgtagtccaggaactgttggtcacagctactaggaatgaggtgatttctgagggctgagaaaaaacacagaatcttggccagcagccagcagctgcatggtgaaagatgcattcacttctcctttgagagttggggttgagggcaaacatataacccaggtttggcttacaacccagtgtcccggaagccctccttcggga

SEQ ID NO: 4335 - DNA, 426 bp, Homo sapiens
  misc_feature (1)...(426): n = A,T,C or G
aagattttccaaactaataggaaaannnnnnnacccacatatccaagaagctcagcaaaccccaaaaaggataaactcaaaaatcacagcaaggcacagtggctcatgcctgtaatcccagcactttgggaggctatggtggcagatcacttgaggtcaggagtttgagaccagcctggccaacatggtgaaaccccatctctactaaaaatacacaaaataaaaaataaaataaaataaaataaggcgggtgtggtagtttacatctgttatcctagctacttgagaggctgatgtgagaggattgcttgaacccaggaggtggaggttgcagtgggccaagatcatgccactgcactcctgcctgggtgacagagcaagactccgtctcanaaaacaacaacaacaacaacaaatcacacctat

SEQ ID NO: 4336 - DNA, 408 bp, Homo sapiens
ctctaatctttagcttcatgttaaaatattgcagcaaaaatagttcagtttattgattttcttagtgggtttctactctgcagaatttaacaactatctattagttgaaggaaaatttaaatttccattaaacactctaagatagaagcaattaaggcattatatatatttaaattatttgatttaaacacctttgttattcttcaagtcatatgtgcacttgctctttcattcagcaaatgtgctttgagttagtttcttactgcaagacagtcattactctggtgcctgggtgtattagcccatttttctgttgttgtaactccctgaggctgggtaatttataaagaaaaaagctttaattggctcatggctctgcaggctgcacaggcagcatagtgctagtgt

SEQ ID NO: 4337 - DNA, 430 bp, Homo sapiens
  misc_feature (1)...(430): n = A,T,C or G
aatcacctaagcctgggaactcaaggctacannnnnnttcgtgatgatgccactgcactccagcctgggtgagggagtaagaccttatctcaaaaaaaaaaaaaaaaaaccaccatgggaggggggttctccccccaaaaattttaaaaaccaaatttttgcctaaaaccagaaacccccctttttttttttcatacccccaaataaaaaatgggggtccccacccggggggggggcctcccccctgtaatcccacccctctggggggccaggggggccaaataacaaggtcaaaatttcaaaaccaccctgcccaccagggggaacccctgtttttactaaaaccccaacctttacctgaccttggggccccatccctgaaaaggaaggcagaaaaactgtttgccccagaacccattaggcggaggtt

SEQ ID NO: 4338 - DNA, 427 bp, Homo sapiens
  misc_feature (1)...(427): n = A,T,C or G
tacgcctgtgggctctggggtctatcnnnnnnttcaaggtaaaggtatgatgccgccaccacctatgggcatgatgccgccgccgccgccgcctcccagtgggcagcccccaccccctccctctggtcctcttcccccatggcaacaacagcagcagcagcctccgccaccccctccgcccagcagcagtatggcttccagtacccccttgccatggcagcaaagatccctccccgcggcggcgatggcccgagccatgagagtgaggactttccgcgcccattggtgacccttccaggcagacagcctcagcaacgcccctggtggacaggatggttcggcaaagcagcctgagttatttttgtggacggaatcggaacacgctggctccatatcgtgaaatttttattaatttttttctttttcc

SEQ ID NO: 4339 - DNA, 418 bp, Homo sapiens
  misc_feature (1)...(418): n = A,T,C or G
actgtggcaaacttatgagtggtgtttggaccaactctgatgaggccacaggaagaaactgtcgctgccctcatggacttgaagtttcagaatattgttgtggaaatcttaattgaaaaccatgaaaagatttttcggacgccgcccgatactacattccctgagcccacctgcctgtcagcatcacccccaaatgcgccaccaaggcagtcgaagagacaaggccagagaaccaagaggcccgtggccgtctacaatctttgtctggagctggaagatggtgacaatccttacccttccaaggaggacacccctaccagcagtctggactcactttcctccccgtctcccgtgactacagctgtccctgggcctcctggaccagacaaaaaccaccttctggcagatggagggagcn

SEQ ID NO: 4340 - DNA, 405 bp, Homo sapiens
  misc_feature (1)...(405): n = A,T,C or G
gatgtgcacaggttatatgcaaatactacaccattttctataagggacttgaacatcatggactttagtatcctagggggttcttggaacccatcacccataggggcaccataggacaactatagtaccgtgtttatttcctattaattcaggttccgtttagagtctaaaactaaaacctaatcatttagtcacagtgtaaaaacaaatggaaataacagctcaaatcttcaaaatattactatagcattatgtttaaaataatctacaacaaaaatgtaccattttcaagcagtactacattaggagcccttttatagaaaataatttcttctttacccccgttccagtgtgaatctagtattctgttaacatttgtgtggcatttggagtttgtcatccccn

SEQ ID NO: 4341 - DNA, 430 bp, Homo sapiens
  misc_feature (1)...(430): n = A,T,C or G
gccaagagccgtgacattggcacgaagggctnnnnnnccgagtagctttgccacatcttgatctgctcagccctggaggtgccagcaaagccccatgctggagcctgtgtaacagctccttgggaggaagcagaataaagcaattttccttgaagccnacaaaaaaaaaaaaaaaaaaaaaaggggggggcccgtttaaaagaatccctggggggcccaaatttaccgggggggggaaaatttttatttttttccttaagggggcggaattaaaaacctcctcgggaattttggaaaagaaccttttttttggggggggaacatatggggacaacccccccccaaaatttaacgccttgggggaaaaaaaaaatttttaaggggtaaagggggaaaaccacccgcaattgcctgccgcttagaagatana

SEQ ID NO: 4342 - DNA, 421 bp, Homo sapiens
taggggacaggaggctcaggacgcgccctctgaatcgagtgtttcttcttcacaagtcaccaagagaggacatgaggggaaaagtccttttttgcccttctccaaaaaataaccttccacagagacaaactgtccttctatccacttttatcttttaataaatatcaaaaggaaaaagctgcaagggtgcaaagggcctgtgccagaagaaaacacacacagggaaaccgctttttttaatcaattgtagagaatagtcatttttaatctaaattagagaattgtgatacaatggcagtcctcaaaggcgtaacgagttcatctttctttcaccataggggttatagttggcttgtgctactctggaatcattttactgtttgtttttattatcttaagggctaattaaaaaaaaaataag

SEQ ID NO: 4343 - DNA, 415 bp, Homo sapiens
  misc_feature (1)...(415): n = A,T,C or G
attaaattttaaggtaccactggtattttgggagattataatcagtttgttttcaagataatagaaaataaggtccatgagaatagaagttatgtgatttcagtgagttgatgtgtacagcatggctgtgctccatctgatttaccccattcttaagttctgagagtatgttctcaaggaagatttaactctctttggttttaaattactttttaaccagcctaataaataagtcttactacttttcataatatttcataatagttaaaaggaggtgtttttttcgtgctcaatttggcactcaaaataatgttcattatggaaggttggtaatactgagcaagcctgtggaattttctttatgaaaaatgattntagcctttgcaaatgttaaccatgtgaaacacattgtcag

SEQ ID NO: 4344 - DNA, 406 bp, Homo sapiens
cagaaaagtcagctgtcagataagaattcttgaaagtgaatgttttaactatggcatttggatcttcttgaccttctgccctagagcttcctcccatactctctctctctctttctctctctgggaggaagggccagataaaatacgctaggaatgtagcccagtttttgactggctagcttcattccactacttcttgcctctgatcccattacactacagataagagccacaagactagatgactgattaagccactttttaacagctttattgagatataattaaatactatcacattctctctttatgtgttaactttgaagtatttaataccatggaaactatttttcttttaatgtcggatcaaacacgatgcatatgctgttcgataaactaacttttg

SEQ ID NO: 4345 - DNA, 404 bp, Homo sapiens
caaaaattagctgggcacaatggtgggcacctgtaatcccagctactcaggaggctgaggcaggagaagcgcctgaacccaggaggcggagattgcagtaagccaagatcacaccattgcattctagcctgggtgacagagcaagactctatcttaaaaaaaaaaaaaaaaaaaatttgggcaaataaaaagttgtttatttcatggaaaccccgaggaaaatccccaaaaaaaagttttgtgggctgggggcagcagttcacacctgtaatcccaccactttaggaggctaagggaggaggactgcttgagctcaaaagtttcaaaccaccctgggcaacataaggaggccctgtttttactaaaaaaaaaaaaaagggggggccgctttaaaggacccccgg

SEQ ID NO: 4346 - DNA, 418 bp, Homo sapiens
ttttatttacatgtaaagaaaacagatttaaatgtttatgtggccaaaaggtgtcatttaaaaggtaaaataagtttatgtagaatgtatgttcatggtgcttatttttaaaatgtaattcaagtttacagtattacttaatgcttctttacagaatttaatagagaaacaaggctagaacacatctacatcctgaagagccgtttataacttcatattatatgatgacaaagttcattattttccttaaagttgagcaattgacttttatggtccaatgatgaacttattattaataaatgattgagttaactgtgaggcttctcattaaaatacaatattgcagctatcagttggagaatatattataaaattttcagacagtatatcagaaaaatgtttttatttgtactgtata

SEQ ID NO: 4347 - DNA, 413 bp, Homo sapiens
acagcacccggccccatcatgcattttttactttgctatccagtggtagatatctgatcaaaactggtttaagtcaaaaacaaaaacaaaactgagcatagtggctcaggcctggaatcctaacactttgggaggctgatgtgggaggatcacttgagcccaggagtgcaaggctgcagtgaactatgactgtgccactgcactccagcctggaaaatagaacaagaccctgactctaaaaaagaaaaaaaaaaccatcatgttttaagtaatgtagaatagcataggaaaattcctagcctattaagtagaaaagtagattgcaaagcagtttgatctgcccttctcgacctcccaaactgctgagattagaggcatgagccaccgtcaccagcccagaaaatattttttat

SEQ ID NO: 4348 - DNA, 486 bp, Homo sapiens
  misc_feature (1)...(486): n = A,T,C or G
nagctcnctnnaaattgagnacctgcagncgatgngcaacngcttnggaanttangggccgacccacgcgttcgcataaagctactaaaaggactggtgtaatttaaaattaactaaggcagaaggcttttggaagagggggacgattttggaaggccttatatatagtaacttagtttgaaaaatgtgaaggactttcgtaacggaagtaattcaagatcaagagtaattaccaacttaatgtttttgcattggactttgagttaagattattttttaaatcctgaggactagcattaattgacagctgacccaggtgctacacagaagtggattcagtgaatctaggaagacagcataagaaaaaagacaagctaggaaacaaaaagctaagggcaaaatgtacaaacttagaagaaaattgtgagattgaaaccagatagaaaatgataatattgtcaagagtttcagatagaaaatgatcan

SEQ ID NO: 4349 - DNA, 479 bp, Homo sapiens
  misc_feature (1)...(479): n = A,T,C or G
gtgttctgacccaaaatcccaagnactgnctaaccgctntggaanttacgggccgacccacgcgtccggagccatgctgaggagctgcgccgcgcgcctccgcacgctgggggctctgtgcctgccgccagtaggccggcgcctgccgggaagcgagccgcgacccgagctgaggtcattttcttctgaggaagtcattcttaaggactgttctgtccccaaccccagctggaacaaggacctaagactgctctttgaccagtttatgaagaaatgtgaagacggctcctggaaacgtttgccttcatataaacgtacacctactgaatggattcaagacttcaaaacccattttcttgcctggttaatggccgggcgctgtggctcacgcctataatcccagcactttgggaggccaaggcaggcggatccctgagttcgggagttcaagaccagcctgaccaacacggagaaacccc

SEQ ID NO: 4350 - DNA, 462 bp, Homo sapiens
  misc_feature (1)...(462): n = A,T,C or G
acccttgngaggttgtaattttggggggcagagatggtagtgttttctgttatggaaacaagatgctaattagaccctaaggggaaacagcccctttccccttcctgggtcatggttgccttgaacccagaaatgccctccctgttctgggagcctccggactccactccctgtcctgcccctgaccaagccttcggcgttgaggaggttggggtgactcagtgggaacgccatctgagcggggcatgacctatgacgcactccacgtttttgactggatcaaagcaagaagtggtgacaaccccgtgtacatctggggccactctctgggcactggcgtggcgacaaatctggtgcggcgcctctgtgagcgagagacgcctccagatgcccttatattggaatctccattcactaatatccgcgaagaagctaagagccatccattntcagtgatatatn

SEQ ID NO: 4351 - DNA, 412 bp, Homo sapiens
aaagaatagaaattgggtaatattagggcttttatagaacaggtgggatgtgctccatgagagcaaagcttttcagcaaagaatttgtcagaaataagatgatgtccattttttttctatcctgaatgctttagaagggtggattaaaagttggtggcaaggccaggtacggtgacttacacctgtaatcccagcacttggggaggccaaggtgggcggatcacttgaggtcaggagtttgagaccagcctggccaacatggtgaagccccgtctctactaaaaatacaaaaattagccttcatggtagcatgtgcctgtaatcccagccacttgggaggctgaggcaggagaatggcttgaacctgggaggcagagattgccgtgagccgagatggtgccattgcactcca

SEQ ID NO: 4352 - DNA, 401 bp, Homo sapiens
cccacgcgttcgattgacaacagccttgtggagtcttgctccttggaagacgattgggacttcctgccacccaagaagataaaggatcctgatgcttcaaaaccggaagactgggatgagcgggccaagatcgatgatcccacagactccaagcctgaggactgggacaagcccgagcatatccctgaccctgatgctaataagcccgaggactgggatgaagagacggacggagagtgggaacccccagtgattcataaccctgagtacaagggtgagtggaagccccggcagatcgacaacccagattacaagggcacttggatccacccacaaattgacaaccccgagtattctcccgatcccagtatctatgcctatgataactttggcgtgctggg

SEQ ID NO: 4353 - DNA, 409 bp, Homo sapiens
  misc_feature (1)...(409): n = A,T,C or G
gatgcggggacagcggcctggctaactcctgccaggcagtgcccttcccggagcgtgccctcgccgctgagctcccctgaacagcagctgcagcagccatggccccgccctgggtgcccgccatgggcttcacgctggcgcccagcctggggtgcttcgtgggctcccgctttgtccacggcgagggtctccgctggtacgccggcctgcagaagccctcgtggcacccgccccactgggtgctgggccctgtctggggcacgctctactcagccatggggtacggctcctacctggtctggaaagagctgggaggcttcacagagaaggctgtggttcccctgggcctctacactgggcagctggccctgaactgggcatggccccccatcttctttggtgcccgacn

SEQ ID NO: 4354 - DNA, 445 bp, Homo sapiens
aatatataatagagagaaataacagagaaactaaaaataaaattggagttaaatttgaatcatgttttacacattggctaagattttgaggtttggtatcatccagtgttgctaagatttggagaaacagaagtacatgtttttgataggaatataaataggtacagctctttggagtcattttagcaatatctatcaaaacttaaattgcacataccctttcacctagcagttcttccccgccccccgagacggaatctcactttgttgcccaggctggagtgtagtggcactacctcggctcactgcaacctccaccttctgggttcgagcagttctcctgcctcagcctcctgagtagctgggactaccatcacgcccagctaattttttgtatttttttttagtagaggcgggtttcactgtgttagccaggatgatcttg

SEQ ID NO: 4355 - DNA, 495 bp, Homo sapiens
  misc_feature (1)...(495): n = A,T,C or G
nggacgaggacgggggnnnnnnnactgataacctgaagacactgcgacggaccttcngggtcgacccacgcgtccgaagaatttcaaggccacaactccatatttgaagtatagtgctcataaaattaattgcaaggaaatccatcactatgattcagtaagtaaacaaattcaaggtgtcacatcatattgctttttatgcttttgattttagtaatatcctttcacattcataatccagatagagagataagcaagattgtatccaccaagcctcctctttattgatcttccaaactgaaaaacatagctgccattttagtcagcagttaaactttattatagaatatttttataccttttctgctaacattacctgcaactcccatggtgatgctcaaatcccatttgggaattcagtgaactagcagaacgaaattctaagagactgnggcttgttgatgtgtccacgctttccatgggaactgatgttaa

SEQ ID NO: 4356 - DNA, 410 bp, Homo sapiens
ctagttctagatcgcgagcgggcgccctttttttttggctagttttgagacgtctggttacgcttattactcaactggcaaaagaactgtcaaacaaaggtgtacttaaaactcaagcagaaaatactaacaaggctgccaaaaaatttatggaagaaaacgaaaaactaaaaaggattttgaaaagccatggtaaaaatgaagaatgtgttttggaagcagaaaataaaaaactagtagaagaccaggagaaactgaaaactgaattaaggaagacttcagatgccctttctaaggcacaaaatgatgtgatggaaatgaagatgcagtcagagagactttcgaaagaatatgatcaactcctgaaagaacactctgaacttcaggatcgtttagaaagaggcaacaaa

SEQ ID NO: 4357 - DNA, 480 bp, Homo sapiens
  misc_feature (1)...(480): n = A,T,C or G
nagtggctnaaactgatgactgaaggcctggcgaggaacttcngggntgacccacgcgtccgcggacgcgtgggcggacgcgtgggcggtcccagttttacagcatcacagaccagcccggcctccttcacgccaagaggagccagcagctggccagtgatgtgcactacaggcagcccctgccccagcccacctgcgacccggagcagctgggcctcaggcatgctcagaaggcccaccagctgcagagtgatgtcaagtataaatcagacttgaacctgaccagaggtgttggctggacccctcctggctcctacaaagtggaaatggctcggcgggctgcggaactggccaacgcaaggggcctgggtctccagggagcttaccagcngggggcagaagcagtggaggctggagatcatcagagtggggaggtgaacccagatgccactgagattctgcacgtcaaaaagaagaccg

SEQ ID NO: 4358 - DNA, 407 bp, Homo sapiens
gcgagtccacccatgtttgtaagaaagttgatgttataggattcaaagaaatgaaaatgcctgaaggaagaaaagatgaaaagaaggaaggaaggaagaatgtgcaagataggccgagtgaagctgaagacacaaagagtaacaggaaaagtgctatggatcttaatgacaacaataatgtgattgtgcagagagctgaaatggagaaaaatgaaaaaactaaccaaactaatggtgcagaagttttacaggttactaacactgatgatgagatgatgccagaaaatcataaagaaaatttgaataagaataataataacaattatgtagcagtctcatatctgaataattgcaggcagaagacatctattttagaatttcttgatctattacccttgtcgagtgaa

SEQ ID NO: 4359 - DNA, 404 bp, Homo sapiens
gcttgtgaacggcgtttctgcgtctgccgtggacagcgaagctgctgcggttcctgagccggaggagtgcctgtgaagaaaacggggtattgccctgaggcttatattctgcctcagttgtcttttcttgaaatattataaatcagaatgtctgcacagtcagtggaagaagattcaatacttatcatcccaactccagatgaagaggaaaaaattctgagagtgaagttggaggaggatcctgatggcgaagagggatcaagtatcccctggaaccatctcccagacccagagattttccgacagcgattcaggcagtttggataccaggattcacctgggccccgtgaggctgtgagccagctccgagaactttgccgtctgtggctcaggccagagacgca

SEQ ID NO: 4360 - DNA, 493 bp, Homo sapiens
  misc_feature (1)...(493): n = A,T,C or G
aggctttgnacggccnnnnnaactgatactgacggcatcgcgaaggactttnngggttganccacgcgtccgtgggaaaagaaaatagtagctgggctataaagtgctttgcgagccacgttacttgttcttatggagggatgagggtagaagtaaaagagaaggtatcagaattgctgtcaaattttccacattatgtatgcttctgaccacgatggggatgctgatgtcctccccttacccctactactttcccaggatcttcgccacattgccaatttactgtaagtcatatttctcaggtgagctgtagctaagaatgtctgagaaacactagacaatggagagccctcacaggtttttaagaaggcggtagcatgttcagattttcctttgaggaagattactgtggctctggagtacacagtggactagtgaaaagtgagagatgaggagacatcctgctgaaaagcgttcatgtactcaaggtcta

SEQ ID NO: 4361 - DNA, 415 bp, Homo sapiens
  misc_feature (1)...(415): n = A,T,C or G
atttcttgtccactatttttctcttcaaatgttttaaacttgttatttatccccactattgaatttctatcttagtccatttatgcttctatgacagagtacctgagactggataatttataaagaaaatacaattaatttttcacaattctgggagctggaaagtccaagatcaaggtggcagccagattggtatctggcgaggactgctctctgcttctgagatggcaccttgcttctataccttctgctgggaaggcatactgtgtcctcacgtggcagaagggacagaagggcaagagaggactcttttcaaccttgagccattttgtaaggatgctaaatccattcagggggcaaggtcctcatgacttaatncatctaccagaggctttccctctcaaaccatcatagg

SEQ ID NO: 4362 - DNA, 420 bp, Homo sapiens
cccacgcgtccgccaaaaagcagtgtccattaggtttctgcatataaatattaccaagcaatgttcacaatagacatcattacactgtccttgaaatttattaattcttcatccaaccctggttgagctgaggctcatagttaggttcaagactatctgtttaaatattactgaaaaacaaagtaagacagtactatgcttacctcttaacttgataatgtcaaaacaggcatgttaaatgacatcatagaaaagacttcaagataatttatagaagttaaattatattgtacagaaaataattgtatgaaaatctctactatggggctggaacatggttgaacattagaatgatataaaaaattatatatattctccaaatccacgctagacctgtcaaattagagaatctagagatta

SEQ ID NO: 4363 - DNA, 406 bp, Homo sapiens
tcctgtcagccgctgtccccttcgccgcgatgccgttggagaacctggaggaggagggtctgcccaagaaccccgacttgcgtatcgcgcagttgcgcttcctgctcagcctgcccgagcaccgctgagacgctgccgtgcgcgacgagctgatggcggccgtccgcgataacaacttttggaacagaatccggcaagagcaaaccgaggattgccctccctccagccctagtagaggttggcattggcaggattggccgtcacgcaaaccttccaccagcatacgtttatgttttgccaagtcgattattaagcgccatcgcatgccttcctacatggatccttactatgaagccttgtgcacatccctcgactggcagatagacgtggacctactcaatagaag

SEQ ID NO: 4364 - DNA, 424 bp, Homo sapiens
atcatgggtgggtgggataggctgtgtgctttcactgtttctaataggttaggggaaaaccaggttcgatggaggagggaagaaggaggttggggccagaaaacctgtggctgccccagtggagctgctgtgacgctgctggtcacagcttctttgctctgtgtgggcctccctgcgggtcccatgtggggtcacccggctctaccctgggctactctctggatctctgtttcccacctataaaacagggtggtgatgaaatacctcctctgtcagaattcttccagctctgagagtccatgaattcagagcctcgctggcaagatgcctggaaagactgtccctggagacagactcagcatgccatggccagtgctaatgagggcaagggaggggagggcagggtcagattcctcaagaacta

SEQ ID NO: 4365 - DNA, 421 bp, Homo sapiens
  misc_feature (1)...(421): n = A,T,C or G
cttacacttaggagatttcaacttaacttgaccgctctgaccaaaaaaaaaaaaaaaagaaccaaacgtgggggggttcttttgggggcccctttttggccccccattaaacacccaaacccaatttccaaaaattttccccaattaaaagctacattaaaaattttggagaaaaattttatattggggcttgaaatgggggggaaaaattttctaaaaaaattttaacttttaggggaaacccttaaggtttaaaaaaatttttggggggaaatacgttgaaaacccttttttttaaaacgtgggnnaaaaaataganacatnactcattatgaatcccagtatcaggctgctggccagccaagatgagacaaagtttcctaaaaaagacttttttgactatactaaattgacccctctt

SEQ ID NO: 4366 - DNA, 424 bp, Homo sapiens
tctctctgggactttttttcataaggacactaatccctttaatgaagacagagccctcatgatctcccaaagtcacacctcctcatacatcaccatgggggttaagatttcaacatatgaattttagagggaacaaatattcagaccatagtagacagcttaatctttgatgcaataagtagttcacatttggggaagagagcaacttttgccttcctctttcaatgtttcatgaggttttggggtttagttctgaagattaaatgtttctggcctctctactggcaccagaaaaaatcagtatctaatttttaaaaaaaaacaataaacgtgcactgtttccagatttacagttttttcttgacctgtgttagtcccatcctgcagtaaaatcaagtcactgtggaaaccttatcataggtcc

SEQ ID NO: 4367 - DNA, 419 bp, Homo sapiens
  misc_feature (1)...(419): n = A,T,C or G
cccacgcgtncgcccacgcgtccgatagggtcagtgggatgaggagaccaagtgactaaagcagatctgagaatctgagctgtaaaggatttggaggtgggatggagggataaaaccttagtgggaagcagacagcagatagagaagatataggataaactcacggaaggtgtaagcaggttcatgattttaaaattagcctgttaagaggttgtgttggaggtctgttttcttagtgggggcaaagtggcaagggaagtttcacttctgaatagggtggaaaatgaagatataaggaaagaaagagagaaagaggaaagacgtattatgcagtgtgaggcaaagaaagagaaaagtgggagaaggaggggagtcagactttccttggctggaggcaaactgaccaatgcccgttgctg

SEQ ID NO: 4368 - DNA, 428 bp, Homo sapiens
  misc_feature (1)...(428): n = A,T,C or G
aaattttctaggaatgagtttgaaaaaatctgcagaaaggaggtgaaaccattaggattaacagtaatgagagatgtgaccatttcgaaatccgaatatgctccaagtgagaagatgatcacgaaggtccaggatttccaggaagataaggagctcttcagatactgcactctccccgagattctgaaatatgtggagtgcttcactggacctaatattatggccatgcacacaatgttgataaacaaacctccagattctggcaagaagacgtcccgtcaccccctgcaccaggacctgcactatttccccttcaggcccagcgatctcatcgtttgcgcctggacggcgatggagcacatcanccggaacaacggctgtctggttgtgctccaggcacgcacaagggctcccttgagccccacgag

SEQ ID NO: 4369 - DNA, 395 bp, Homo sapiens
cccacgcgtccgacagggtggttaagaacaacaaacacaggagtcctcatgaaactagcgtggacaacactagattgaccactggctaccaaccggcgtaggaattcaacctacatgaagactcagagtcaggacccaccctgcacccccaaactgttgcgctttcccagagcccctgccgtgccgtccttccctgactttctagttcccacccctgaccagctcttgggctctctgcactgagctctctgccctgcaactttagtacatgggatacaagcttcatcagctccctggcccttgttcagaacagctgctcgccgtgaagtggacatgcatgtgctagaacatctttccttgtactgaggaatgataaagcgctggatgatgcccat

SEQ ID NO: 4370 - DNA, 457 bp, Homo sapiens
  misc_feature (1)...(457): n = A,T,C or G
aggccccnnnaatgaaactgaggcatcgcacggacttcngggtnangcacgcgtccggagatggatcaaagaagatcaaaggctgctgggattccatccacgtggtagaagagcaggagaaatccagcgggcgcaccgcccattacaagttgacctccacggagatgctgtggctgcagaccaacaaatctggctctggcaccatgaacctcggaggcggccttaccagacagatggagaaggatgaaactgtgagtgactgttcaccacacatagccaacatcgggcgcctggttgaggacatggaaaattaaatcagaagtacgctgaacgagatctactttggaaaaacaaaggatatcgtcaatgggctgagatctattgatgctatccctgacaaccaaaagtttaagcagttgcagagggagctctctcaagtgctgacccagcgccagat

SEQ ID NO: 4371 - DNA, 457 bp, Homo sapiens
ctttggtaattgctacagattattgaagactggaattgaacatggagccatgccagaacagatagtcgtgcaagcactgcagtgttcccattattcgattctttggcagttggtgaaaattactgatggctctccttccaaagaggatttgttggtattgaggaaaacggtgaaatcctttttggctgtttgccagcagtgcctgtctaatgttaatactccagtgaaagaacaggctttcatgttactctgtgatcttctgatgattttcagccaccaattaatgacaggtggcagagagggccttcagcctttggtgttcaatccagatactggactccaatctgaactcctcagttttgtgatggatcacgtttttattgaccaagacgaggagaaccagagcatggagggtgatgaagaagatgaagctaataaaattgaggccttacataat

SEQ ID NO: 4372 - DNA, 427 bp, Homo sapiens
  misc_feature (1)...(427): n = A,T,C or G
gagaaggaatttcattgcaagaaatacctgagnnnnnnagagcgctctcagatcgcccacgccctcaagctcagtgaggtgcaggtcaagatctggtttcagaatcgacgggccaagtggaagcgcatcaaagctggcaatgtgagcagccgttctggggagcccgtaagaaaccccaagattgttgtccccatacctgtgcatgtcaacaggtttgctgtgcggagccagcaccaacaaatggagcagggggcccggccctgaatgggcacccaagaacttaggaaggcgagggatctgtacctgagcctgctctgagactgtcagggttctgtggaccagaggggctgcaactgtgattctgccttgagaggggctagttggcaattaacctagccctgggtgtgctcttcccagactcctcccc

SEQ ID NO: 4373 - DNA, 418 bp, Homo sapiens
  misc_feature (1)...(418): n = A,T,C or G
gccttcccaggcggggatgctnnnnnnacgcagtgggctgaggcactttcgggcaacacccaatactcggggctccgctcggcttcttcgcgccgagatgcctaagaaggctggtgcgacgaccaagggtaaaagccagagcaaggaaccagagagaccacttcctcccttaggtcctgtggcagttgatcctaaaggatgcgtcaccatagccatccatgcaaaacctggctccaaacaaaatgctgtaacagatttgacagcagaggctgtaaatgtagctattgcagcacctccatcacagggagaggctaatgctgagctctgtcggtatctttccaaggtcctagaactcacgaagagtgatgtggttttggataagggtggtaaatctcgtgaaaaggtggtgaagcttttg

SEQ ID NO: 4374 - DNA, 475 bp, Homo sapiens
  misc_feature (1)...(475): n = A,T,C or G
attgatngccgtggtttgatcccgatttgcagggtcgacccacgcgtgcgcggacgcgtcgtccacagataacaggtgcgaaagtggtggtatctggtggtctaggcttgaagagtggagagaactttaagttgttatatgacttggcagatcaactacatgctgcagttggtgcttcccgtgctgctgttgatgctggctttgttcccaatgacatgcaagttggacagacgggaaaaatagtagcaccagaactttatattgctgttggaatatctggagccatccaacatttagctgggatgaaagacagcaagacaattgtggcaattaataaagacccagaagctccaattttccaagtggcagattatggaatagttgcagatttatttaaggtagttcctgaaatgactgagatattgaagaaaaaatgaatcaggatcatgccttaaaaagaaaacttttgttaaag

SEQ ID NO: 4375 - DNA, 396 bp, Homo sapiens
attaggaggggattaaaatcgatcatcgtggctcccatccctttcccgggaacaggaacacactaccagccagagagaggagaatgacagtttgtcaagacatatttccttttgctttccagagaaatttcattttaatttctaagtaatgatttctgctgttatgaaagcaaagagaaaggatggaggcaaaataaaaaaaaatcacgtttcaagaaatgttaagctcttcttggaacaagccccaccttgctttccttgtgtagggcaaacccgctgtcccccgcgcgcctgggtggtcaggctgagggatttctacctcacactgtgcatttgcacagcagatagaaagacttgtttatattaaacagcttatttatgtatcaatattacgtg

SEQ ID NO: 4376 - DNA, 395 bp, Homo sapiens
tccagagcagagtcagccagcatgaccgagcgccgcgttcccttctcgctcctgcggggccccagctgggaccccttccgcgactggtacccgcatagccgcctcttcgaccaggccttcgggctgccccggctgccggaggagtggtcgcagtggttaggcggcagcagctggccaggctacgtgcgccccctgccccccgccgccatcgagagccccgcagtggccgcgcccgcctacagccgcgcgctcagccggcaactcagcagcggggtctcggagatccggcacactgcggaccgctggcgcgtgtccctggatgtcaaccacttcgccccggacgagctgacggtcaagaccaaggatggcgtggtggagatcaccggcaagcacgg

SEQ ID NO: 4377 - DNA, 400 bp, Homo sapiens
cttcaaatgtgaagagaggaccatcgccgtcccaggaccaccgcacagtctcaagtgtagtgaagtcaggaaagactcactggttctccagtggaagccgccagtccactccgggcggactccggtcactggttacttcgtggacttgaaggaggccaaggccaaagaagaccagtggcgagggctcaatgaggcggctattaaaaacgtatacctgaaggttcgaggcctcaaggagggcgtcagctacgtgttccgtgttcgagccataaaccaggcgggagttgggaagccatctgaccttgctggccctgttgtggcagagacccgtccaggaaccaaagaggttgttgtaaatgtggatgatgatggagtcatttcattgaacttcgagtgtgat

SEQ ID NO: 4378 - DNA, 424 bp, Homo sapiens
  misc_feature (1)...(424): n = A,T,C or G
ctgatttgattaaggaagtactgagcatggnnnnnnaaattcagaaactagcaacagaactttatcatcagaagtcagttctgataatgggacgaggctatcattatgctacttgtcttgaaggggcactgaaaatcaaagaaattacttatatgcactctgaaggcatccttgctggtgaattgaaacatggccctctggctttggtggataaattgatgcctgtgatcatgatcatcatgagagatcacacttatgccaagtgtcagaatgctcttcagcaagtggttgctcggcaggggcggcctgtggtaatttgtgataaggaggatactgagaccattaagaacacaaaaagaacgatcaaggtgccccactcagtggactgcttgcagggcattctcagcgtgatccctttacagtt

SEQ ID NO: 4379 - DNA, 430 bp, Homo sapiens
ctctgttgccaggctggagtgcagtggcgtgatctgggctactgcaacctccgcctcccgggtttaagtgattttcctgcctcagcctcccgagtagctgggactacaggcgtgtgccaccacgcccagctcattttttgtatttttagtagagagagggtttcaccatgttggccaggatggtctcaaactccagaccttgtgatccgcctacctcagccttaagtgacatctttaaaggctgtcacttcaaagaaaaaaatgataaacccagaattctatacccagcaaaaatatctttcaaatatgatgatgaagtaaactttttcaaacaaaactagagggaattcattgccagaagatctattttctaagaaatgtaaaaaagagtttttgaggcagaaatataatagattaaaacatggattta

SEQ ID NO: 4380 - DNA, 486 bp, Homo sapiens
  misc_feature (1)...(486): n = A,T,C or G
ggggtcaggacgnaccaattgaaaccctctgtgatagcctgcggaaccgcccggaatcccggtcgacccacgcgtccgggcgagtccgtcccgtccaccgtccgcagctggtagccagcctgcccctcgcctcgactccctttcaccaacaccgacacccacattgacacctccagtccggccagccgctccactcgttgcctttgcatctccacacatggcgtcctccgcgcagagcggcggctcctccgggggacccgcggtccccaccgtgcagcggggcatcatcaagatggtcctctcagggtgcgccatcattgtccgaggtcagcctcgtggtgggcctcctcctgagcggtagatcaacctcagcaacattcgtgctggaaatcttgctcgccgggcagccgccacacaacctgatgcaaaggatacccctgatgagccctgggcatttccagctcgagagttccttcaaaagaagcg

SEQ ID NO: 4381 - DNA, 423 bp, Homo sapiens
tactcttgacaatgcccaggtcacagtcgaggaaactgaggccctcacaagccacaccgaactcacaagtcctcagaggccctcataagttacagctcagagcccacggctctggcctccatgtcagctgcctccaacatcgacctgcctttgttgggcgccagggctcatgctggggagcctggccaggtggctgcccacacctgtgttcaaggcccatgtcggtccatcccagcataggctcacagcttatcaagcccctgctgcctgcctggggacttcacgggagcccatcctgaggcctcatgtcctcacctgtgaaatggccaggtgtaaccaggagcctttaagcactccatgactctgtgcagagtttcatgcacatcattcatttgttaattcagtcattcacaaacatttatt

SEQ ID NO: 4382 - DNA, 421 bp, Homo sapiens
  misc_feature (1)...(421): n = A,T,C or G
ccggaggggctctgcgttctgtagtggcgctgcttgggcccgtggcggattgtaagctgctggttttgcggctgggaagagcggcgagagggttcggcatttttcgtcgggatccccgcaaggatgagtgctgccagagagtctcacccgcatggggtgaagcgttcagcctccccagacgacgatctgggatctagcaattgggaggcagcagacttgggtaatgaagagagaaaacaaaagttcttgagacttatgggtgcaggagaatcgcttgaacccaggaagcggaggttgcagtgagccgggatcgccccattgcactccagcctgggcaacaagagcaaaactccatctcnnnnannnggngnnngaagaaaaaaaaaaaaaaaaaaataaaaanggggggggggggcctttt

SEQ ID NO: 4383 - DNA, 402 bp, Homo sapiens
  misc_feature (1)...(402): n = A,T,C or G
tttcttgtnngaatgtcccagctgagggaatctcccagaatgaaaatggactaactgaactgtggctgcatagtcttcaggctactgagaaaacaatacaacaaaaaaccacacacaatgactcaaactttatagaggggaaaggtaatagtgcatcacaagtttaacatccttgagtatacatccttttacttaacttttgtttctagtaacaaagttatgacattgcaagtacatcactggaatgcatctactagcagaaatgtttattgtgcaccatttttataggaagtactgcctcagcttacgagctttgcaaacaaatattaatgctaaatgctttttactgacgtcttcgtttctgaacagaagctgataaagatactatttttctgtcaaaca

SEQ ID NO: 4384 - DNA, 391 bp, Homo sapiens
atggagagctcccgtgagtggttaatagggtgatagacctgtgatccatcgtgatgtcttatttaaggggaacgtgtgggctatttaggctttatggccctgaagtaggaaccagatgtcggatacagttcactttagctacccccaagtgttatgggcccggagcgaggagagtagcactcttgtgcgggatattgatttcacggaggatggtggtcaagggacccctatctgaggggggtcatccatggggacgagaagggatttgactgtaatgtgctatgtacggtaaatggctttatgtgctatgtactgttaagggtaggtaggtttgtcggctcctgtgtgtaggagggatttcggcctgagagcgggccgaggagattggcgt

SEQ ID NO: 4385 - DNA, 406 bp, Homo sapiens
  misc_feature (1)...(406): n = A,T,C or G
aggacgcgtggacggacacgtggggctgacgcgtgggcttacgcgtgggcggacgcatggggtctccggatccaaggtttacaggcttgcaggctacacacggaaattgtgtctacccctccacgctgggtggcagaacggcttggcctttttgaggagctgcgggctgctcacgtaaagagattagcatgcatggcacagaaggaaccccggactattaagatatcacttcctggaggccacaaaattgatgctgatgcatggaacacaaccccctaccaactagcccggcagatcagttcaacactggcagatactgcagtggctgctcaagtgaatggagaaccttatgatctggagcggcccttggagacagattctgacctcagatttctgacattcgatn

SEQ ID NO: 4386 - DNA, 420 bp, Homo sapiens
  misc_feature (1)...(420): n = A,T,C or G
gccattgttatatttttgaaaaaaggnncccccctttattatataaaatatgtagttgtttttgaaaaaatggactacaaacttttcattgtaataatcatacttatttaaatatcctgtatttgtcatttcaatataagtgtatgtttcacatacatttgtactatgtagttaaatacgtgggcttaaatttctttttgggcacactttttctaccttttttttttttttttttttgaaaaggaaccacattttgcccccaagccgggggggcggggaaaaaattaaaataacttgatccccccccctctggggtaaaacaagtttttttccttaacccccccagggggtggaaataacaggcccccgcccccggggtggtttatttttttttttttaataaaaaccggggttccccct

SEQ ID NO: 4387 - DNA, 400 bp, Homo sapiens
ttgatcttcaccattactttatccactgccaggaaggatatggcacaccaacagcctgtctattagcagctgccatttgctgaaagaaatttggattattttagaaacaaatttggaaagaaaaagaatggcgttcggttcaactctaactgaggaactggattctataaccagtgagctacatgcagtagaaattcaaattcaagaacttacggaaaggcaacaagagcttattcagaaaaaaaaagtcctgacaaagaaaataaagcagtgtttagaggattctgatgccggggcaagcaatgaatatgattcttcacctgccgcttggaataaagaagaatttccatggtctggtaaagttaaagatattctgcaaaatgtctttaaactggaaaaa

SEQ ID NO: 4388 - DNA, 428 bp, Homo sapiens
  misc_feature (1)...(428): n = A,T,C or G
accctatacagtaaatggtctggtaccactgatnnnnnagagaaaaaaaataaaatttctgcatccttactccacattatacataaaaataaactccccttgaaacaaatcataaattttcaaaaattatgctaaagacaaacctttataaagacaacacattgagatttctgctcctgaccataattgaataatagtatctagatttccttatctaccttaaacaacaacaaagcctgagggggaaaaaatgtggaacaacagtttttagacactcttccacagatagcataaaactgtgatctctgaaaaagagaaacaaatggggtgaggtttacaattgccccaagattattgcctggggacagtctccagggtgaagtgcattggtatattgagaaaaaagccaaacacagcctggccttgtc

SEQ ID NO: 4389 - DNA, 429 bp, Homo sapiens
  misc_feature (1)...(429): n = A,T,C or G
cgcttttcctccgcaaccatgtctgacaaacccnnnnccgctgagatcgagaaattcgataagtcgaaactgaagaagacagagacgcaagagaaaaatccactgccttccaaagaaacgattgaacaggagaagcaagcaggcgaatcgtaatgaggcgtgcgccgccaatatgcactgtacattccacaagcattgccttcttattttacttcttttagctgtttaactttgtaagatgcaaagaggttggatcaagtttaaatgactgtgctgcccctttcacatcaaagaactactgacaacgaaggccgcgcctgcctttcccatctgtctatctatctggctggcagggaaggaaagaacttgcatgttggtgaaggaagaagtggggtggaagaagtggggtgggacgacagtgaaatctat

SEQ ID NO: 4390 - DNA, 464 bp, Homo sapiens
gccggcggcgctgggaggtggagtcgttgctgttgctgtttgtgagcctgtggcgcggcttctgtgggccggaaccttaaagatagccgcaatggctgaaaatggtgataatgaaaagatggctgccctggaggccaaaatctgtcatcaaattgagtattattttggcgacttcaatttgccacgggacaagtttctaaaggaacagataaaactggatgaaggctgggtacctttggagataatgataaaattcaacaggttgaaccgtctaacaacagactttaatgtaattgtggaagcattgagcaaatccaaggcagaactcatggaaatcagtgaagataaaactaaaatcagaaggtctccaagcaaacccctacctgaagtgactgatgagtataaaaatgatgtaaaaaacagatctgtttatattaaaggcttcccaactgatgcaactcttg

SEQ ID NO: 4391 - DNA, 568 bp, Homo sapiens
  misc_feature (1)...(568): n = A,T,C or G
agaggtgttgatcccgtgaaccgctcctcaattcccgnctcgacccacgcgtccgaaaatattttagaatccttggtactgaaatgaatgggatcaaagagccattgagaactgtggaatgtttggtggattgtaaaagaaatttcaacttgctcaaggcaagggcagagaataaagaatgaattggaagaaataagctgactacaatgtctggattttctctagaggccctaaatattcttctgtatcagggaaaattgaaaaaggaggcaaaatgcagctgcaaagacataataaaatacagagttaaattgattctaaaatgttttatgtaaaatatttaattttatactcattgagtatacaataatgaatattctcttaaaatacaataataattattttcaattacaaaaatgagtaaaaatatatgttctttttaggatataatgtcaggaataaatgataatacatcatattcctataattcatggtattctaaaagctttgtaggttggcccacattttaataagcagctaaaatgcgcttctctaaaaataagtatag

SEQ ID NO: 4392 - DNA, 396 bp, Homo sapiens
  misc_feature (1)...(396): n = A,T,C or G
nnnnnncccctgcactatggagtctgctccacgtggctaagccagctcaagcccggagaccctgtgccctgcttcatccggggggctccctccttccggctgccacccgatcccagcttgccctgcatcctggtgggtccaggcactggcattgcccccttccggggattctggcaggagcggctgcatgacattgagagcaaagggctgcagcccactcccatgactttggtgttcggctgccgatgctcccaacttgaccatctctaccgcgacgaggtgcagaacgcccagcagcgcggggtgtttggccgagtcctcaccgccttctcccgggaacctgacaaccccaagacctacgtgcaggacatcctgaggacggagctggctgcggag

SEQ ID NO: 4393 - DNA, 403 bp, Homo sapiens
  misc_feature (1)...(403): n = A,T,C or G
atctgtgnggcatccctagcgctctctaaattatgtctctggcatattttaatcactggaaactcaaagagtggaagagtggaagtgcgaaggaatctcaggtagctcttaactaattcgccagcagtgaagaaacttcaaccaatcatgttttccttgaattttgcaaagaaagaaaatccaaagcattgcttggatgttcttttaaggcattttatatcagttgaaccttaaactgaaatatgaagacaagctttataaactagttttttgatatgaagtatatcaattatgtttgccttttgtgaagaagtaaatgagttgaatttgtatttcacttactagattatactaatgagctaatggggtcattgccatcctccctactcatgactttgatgag

SEQ ID NO: 4394 - DNA, 442 bp, Homo sapiens
  misc_feature (1)...(442): n = A,T,C or G
cggacgcgtggggttgagtccctgttgtttaccagtcactggagaagttactttacaacaatctcataaggtaggttttgttacttcaatttacagatgggaaagtaaactaatagagttagtgcaacagcaagcaagtgaacctaggtattcctgatcccaagattatagtatttctttgagtcaaatcagagaggcagaatgtgctagaaggtgagtgatcaaagcatagagttcagttgttgggaaaaccaatcaggggaccttattagaaatgagtagaataggtaaagttgagacaaggacttctacttccaactaagatgaaggatttttcttcctgcccgaaataagcaaaaaggaaacaaaatatataaaacaataggttttcaagacactggacatcagaccacgaaggacagtgatccctgacagatgggan

SEQ ID NO: 4395 - DNA, 480 bp, Homo sapiens
  misc_feature (1)...(480): n = A,T,C or G
cggacgcgtgggccgtggtggtgcaagtggaacccaagccttgaggtttcagtgagtagggggccgacgtgagctttagcgtccgcctttagcctccctcttcgattccttgaagaccctggtgcagcttagcaagagggcccaggatttttggatccccagccctgtgacaagggttcctgtccagtttccccctcccaggatttcgactcagttcagcgaagtcaccgccccgtctgagaaatgaggacaccaaggcttagagcacagccccgaggcgccgtctaccaggccccgtcccctcccccggctcctgtcggtcagcactgaaaccccgtccctgctccaggcctccttctctggngtccaaggtcccatacaggcctctgcctcggccgaggcccttcagtcaccgtcgcctcgtcttcctgactgttcgcaggccttggcagcatggncgtattccggtcgggtcttctg

SEQ ID NO: 4396 - DNA, 391 bp, Homo sapiens
aactctccttgtacatttggagagtggcattgccttttagataggatctaggagtgattttattgttttggagaatggaagggcccccatggccctggctttgtcatcagtgactgccatagcaacagcagctctgtacctcatctgttgatcccacctttgaagaggagacacagtgctcaccttaattgcgctggtagcagcttatatcccatgtatcattttcaccattgattggaagctgccttgggaattcagtaccaggcattacccctctgggtgggagagggagaagtgtaaagttggagtgggctggaatcaggtgtggcccgcccagtgtcctctgcagagtggtgaagtagtctggccctcttgggagccctgagtccac

SEQ ID NO: 4397 - DNA, 424 bp, Homo sapiens
  misc_feature (1)...(424): n = A,T,C or G
tctgcaggtcctgaaatttgatgctgtcatagtctttgcagtgggtcggttggaatgattctgggggcagaagctcagagccccttagtaggaatggaggcggcccttctgctgccactgctcagccccctccactgcatgacgaagggtggaggaaattcccagcaacatatggcccaggccttgcagcagtgtggaggtccaacgaaggagctccctgaatggcagagacaagaggaaatcagatgatttggaaaacttgggaggaagccatcaagctgggagatgaggactttccacaagcaagagctaactaggggtaggtgggtgcaagaggacgaattatggggactatccaactgtaggggatggggcagtatgacatgttgatttctgacctgagtactttctttgggccaagtcn

SEQ ID NO: 4398 - DNA, 411 bp, Homo sapiens
tgaaaagccctgaattgggggtttatcattcattcacttcttcactttatagtttcctatctcctaaaaatcacttttaaaatcttcatatgtttttgaaaatcctgtataccgtaagttctagaggtgtgtgtgtgtgtatatgtatatatgtatatagagagagatatatatgttttttatgtgtgtgggaaggaaagggtggaagtaatggaagaaattatgcatttaaacttgatagttaacaccttctcttgtttcagaacttaaaatattttttacatgtttaaagtaatttaattggtggcaatattttaattctaaaattaaattgggatttactgaattggaaacctaggttttgttattttgtaaatcctgggaagagtatcagagttgaaatcccttcaa

SEQ ID NO: 4399 - DNA, 451 bp, Homo sapiens
caggtgactccacatcttctgccccagtgtgtccccacctctcccagcctgtatacccagattactttggtgaactgagagctggagtactgttcattcatttattcattcacccactcattcagcagacatatactgagtgctactttatgccagaccctgggctggcagctgtttggaggcaaagatgtatgaggccatctcaggagagactacttgataggattcttgagttttgaccaacagaaatgaacttggaccaacttaagcaaggaaaaagcgttcatgggaaggatgctgggatagctcacaaaaccaaaagaatagctgaacaattaattggccttgggaagggtgggagctggggcaactacaaggcttgcctcccaggagctgctgcggttggcagatcaacaccaacttgccattggatctagtggggccctttcca

SEQ ID NO: 4400 - DNA, 410 bp, Homo sapiens
  misc_feature (1)...(410): n = A,T,C or G
gctctgcacccatccaagtgtgctggtaatagagatggagtacttttaagagacgatgaaaatctacagactttatttgtatataaagaggcaactttaaaaattttgcaaactgacttgagtcactctggccagtactcttgctcagcttccaacccacttggaacagcatcttctagtgctagactcacagcaagaggtttgttcacacgtcactctttttctttgcaaactgaggcttcatatttcattgacaagtagaaacgaccaatggcaaaaaaacaaacaaaaaatacacattgcctttcttctcatcctccagaacccaagaaatctcccttctttgacatcaagcctgtatctatagatgttattgctggagaaagtgctgattttgagtgtcatgttan

SEQ ID NO: 4401 - DNA, 411 bp, Homo sapiens
  misc_feature (1)...(411): n = A,T,C or G
cggacgcgtgggaacatatggagctgtaaaaatcaaagatggtcagagggtggtaagaggaatggaagagtttcacatccaactatctatttgatagcgatttctacttgcggttttgaaaaaaatctcaagtgtaatatatccaaagcaatgcttctgattttcaaggttgaaaatggttccaccaaccctcatgactcaggtaattccttatacccctaccacaacttctttatagagttttattacatctatctctagcaaagattttggttcagaaaatctctgttgatctctgcttatattttcagtcaccccatcctnaggaaaaaaaaaaaaaaaaaaaaaaaaaaaaaaaaaaaaaaaaaagggggggccctttttaaagatcccttggggggcccctttttt

SEQ ID NO: 4402 - DNA, 564 bp, Homo sapiens
  misc_feature (1)...(564): n = A,T,C or G
nggttgagcccttgacagccctcaatacccgncncgacccacgcgtccggagtatttaaaaaattttctatagcaaagaacattccttcctttttcatttagtttttatttatcagatgaggacagatgcaatgagggctgtgtgcctaaatgaatacttttactcttgactaaattagtctggcataaacacaagactgctagctttcagtacaattgaaaataagtgctgtggttcagaggtctttcttttcatagtcctgccaaatcatgcttaaagttcagtttgtattccaacagtagcatttaagacagcatagttaagaatctcttaacatttccatttacaactctcctctccttctaacattttctttattgattttaggatgtttcatggtaacagcttatcagtacttacagccaatgacctaagtatgcaattaaaattggactatcctagctaggtgaatcaactgcccctgacgggggggctttggaaatactactttctttnctcaagacctattcttattactaattataaaatgaacagcacacttn

SEQ ID NO: 4403 - DNA, 424 bp, Homo sapiens
aaaaatcttacaaaagtgaagaatgtggcaaagcctttatccaggcctcaactcctagtaaacataattaatgatggagagaaaccatacaactgtgaagaatgtggcaaagcttttaaccaggcctcaaacttatattgaacaaaataattcatacaggagagaaaccctacaaatgtgaagaatgtgacaaagcctttaaccagtcctcaatttttactaaacataagaaaattcatactggagagaaaccctatgattgtgaaaaatatggcaaaggctttaactagtcctcagttcttaacacacatacgataattcttactgcagagaaactctacaaaccagtaagatgtgacagtgcttctgacaacatctcaaacttttctaatcataaaagaaatcatattggtgagaaatccta

SEQ ID NO: 4404 - DNA, 407 bp, Homo sapiens
tgaatttgctgagctacataatcaccacatggccatttgttactcaactaaacttctagccctttggtatagaagttggtatctcatggagtcatactggaaccttgcatattacttttcctgttttaatcctcactgttgaattaatcattagttcccacgctacaccgtctctactgtaatacttcataggtagtattttgatatacacacagattttggaataatgcatcgaagaaggcttttttaagttatcttttttatactttttattttttacttttttatttgttcaagcccctttagctgtcatttgccataaaaagcacaggtataacagtctgtcatggtggaaagagcacagctctagttacacagatttagttttggtccatattctgccacgg

SEQ ID NO: 4405 - DNA, 423 bp, Homo sapiens
taacatatacgtatgttataaaatccaaagggagtacagtttcttgtgtgttcttctaaagattgtctatgcatataagcaaaaactgttaaaaacaataaatcttagcatacgataaacacttccgcatctttcttcaccaccaccctcaaccaccccaagcacgcacttaaaaatacatcttggagattcttcatggtagttaagagcattgactctggagccagacactgggacttaaaccatggctccattacttactagttttaatctttttcaagttacttaacctttctgtgttagtttctgcagctaaaaaaaaatatagaaaaaataatagaattgagacataagctttatctataaaccgttaagacaggcctggcatatactaagtgctcagtaaatgttaactattatctt

SEQ ID NO: 4406 - DNA, 409 bp, Homo sapiens
  misc_feature (1)...(409): n = A,T,C or G
cggacgcgtgggcttctgtacttgcttttggctctgagtacaatttcagcttttgacaggattgactttgctaaaatatcagtagcaatccgaaattttttggccctggatcctacagctttagcatctttcttgtactttactgctcttatactatctctgagtcagcaaatgacaagtgacagaatccacctttacacaccttcttctgttaatggtagcctctgggaagcaggaattgaggaacagattctccagccatggattgaggtgaatctcgtggagtctcttctggttggattatcttggctatttttgtcttataggccaggcatggatcttagtgaagagttaatgttctcctcagaggtggaagaatatcctgataaagagaaagaaatcaaagccn

SEQ ID NO: 4407 - DNA, 420 bp, Homo sapiens
  misc_feature (1)...(420): n = A,T,C or G
cttaaagagttgattgtgaagaaccagtaactttgtcccaaatgcttctttggctgtttcatgcaggacttaattattgcttttaaaaattcacaatgaaaagacgattctgctgtatttgttaaacgttgacatttggttctagggccttgagtatgtgccacgtgcttgtgaaatgctatgattcacatgtaacatttaaacattaatttaaaaagggaaccttggagaattcttttgttcactagttccttttttctctacatttttaatttattaaacttgctgtgaaaacactttgattttctaagaggaaggtactttaagttccaggatgaacatgtagctgcactatgccagaaattaatgagggaagactttcttcctaagtgcttatgttttaacttatgttagtgaaan

SEQ ID NO: 4408 - DNA, 452 bp, Homo sapiens
  misc_feature (1)...(452): n = A,T,C or G
agttcatgtaaccttacgtagagatttgtgtgcaggaaaccctgagcatacactagtttgcagggactcgtaaggacatgggaagggaggttcccgaaatccaggcaggaggcccagacacctgaaaggcaaagggatcttggttggttgcaggtgcagtgaagtccactgaaggtgtggtgcgaagaatgcagtccttcacccaggtcccaggagggaagaagggtgtgtgctaattcctggtgcccctcggcgggggccacagagaaggatggggacaacccagagagtcacaagaccagtgcctcccctcagggtgcctccaggctgaaaggggctcctggctctggtctctggggaccctgtgccacgtggttggtggtgtgagtgaagagaatccataagagagtttctgagaattatggtgtcatgtccagaagctagagcttacn

SEQ ID NO: 4409 - DNA, 374 bp, Homo sapiens
gcgcggctttcccccaggctcgaatggagacacgtttctgaaggggctgcaggtgaggccggcccctctctcagctgagcttcaggctgcgctggccatggagccgacccccggtggggtcaaatacatcattgtcactcaggtggggccagggcctcaaatcctggatgacccctgcgcccacctcctgggtcctgacggcctgccgaagccagctgcctgactgcctcagcagggaccgcatgccgcttggagaaggggtggcctcgccggagctagggagcggatgtggtgggctggccggactcctgggacatgtgggtggtggcttgaccccgggcccatgggcagcttgctgtggggcagtgcaggga

SEQ ID NO: 4410 - DNA, 392 bp, Homo sapiens
taagagccttctttctggtgagaaccctctacagagtcccatggtagccctagggcatcacattggtgaaggggctgagtgcgctaactcagatctctattcctctttttataaagccaccagtcccactcctatgataaatttcaacatgagtttggagtttttaatccttatagaaaaatttctcctagaatctccagtacaatactaaatagaagtttctatagtgggactcttgtgttattctttctttaaatgaacacgcgttaaaaagtagttacaacaagcgagcataacatttcaaattgaaatgtgtcaaaacaaagtatcaatgaaccatgtgatatatcagaacgagttaatgagctgaattataaaacgaaaagcactcc

SEQ ID NO: 4411 - DNA, 402 bp, Homo sapiens
cctagctgcagccggagcctgtgagacgatgcatctttgtaagcgataccgctcccctgaaccagacccgtacctgagctaccgatggaagaggaggaggtcctacagtcgggaacatgaagggagactgcgatacccgtcccgaagggagcctcccccacgaagatctcggtccagaagccatgaccgcctgccctaccagaggaggtaccgggagcgccgtgacagcgatacataccggtgtgaagagcggagcccatcctttggagaggactactatggaccttcacgttctcgtcatcgtcggcgatcgcgggagagggggccataccggacccgcaagcatgcccaccactgccacaaacgccgcaccaggtcttgtagcagcgcctcctcgatgag

SEQ ID NO: 4412 - DNA, 424 bp, Homo sapiens
cccaaccaaagaaatctgaaatatatagtaaatgcttttttttccgtttttgttcattttggatgctggtgctaaacctccaagtgtcatgatttaaaaaaaaaaaaaatttatgcccttcttatttatttctaggatgaggggaggataacatttttgctttcttatgtgactctctttgaaaatgtgcagtaaaaaattcctcaaaaataaaatttttacccttccgaggaaaagaaaaaaaaaaaaaaaaaaaaaaaaggaatttattatttaattcaataggggggggggccttttaaaaatactccgggggggccccatttttcccggggaggagaaaaaaaattttttttttttaaagggggttttatttaaccgcgggggggttttttgaaaaaaactctttttttgggggggaaaa

SEQ ID NO: 4413 - DNA, 420 bp, Homo sapiens
acgtcctggcaaataagtatattacacatatatgttgctcttttcaccgttcttttattgtgcgaagacattgctaaaacatctgatgtattaataggatttatttttaataggattgcttctaggatttatttttctaggacattggctttaaacacttggatgattttatatgtcttaattctttaataatttgtagatttaaaaaacttcgtgggctgaaagcgaagaaataggaaaggatatagatttatttggcatttcaaaggattttgttttattatcccctcttatttgggtataaactcaaatctattttatccttcatctgtttggattgatgtgtattgagattttgtctaattgaactgattttgataacacataaagtttaatttccctgttaaaataggactcccc

SEQ ID NO: 4414 - DNA, 404 bp, Homo sapiens
  misc_feature (1)...(404): n = A,T,C or G
caaaaaaaaccccaaaacaacccatgcatgtataatgtgtgtatacacatatacataagtatacatatactcccacattataacttagaatatttagttttttacctgttactaggtttgagttacatggttgagttgccaaattatttacatgctttgtttaaattcttcatcacctagcaactgtttgctgatcatggatttacttagttactttaatttataaaattaccatttggaaaagaactcaattgggaaatgtgatgacgtattgtacatgttactttttcctttgctataatcatctagggagactgataagaattttggaaatgggagcctggaaactcatctttgtttttttaatgctatgcctcttacgaggaatacgaattggtatgtcn

SEQ ID NO: 4415 - DNA, 448 bp, Homo sapiens
gatgcgcagaaaaacctgaagcctcggttcgaccacatttcccgggccgacccacgcgtccggggctaacaggatctcctcttgcagtctgcagcccaggacgctgattccagcagcgccttaccgcgcagcccgaagattcactatggtgaaaatcgccttcaatacccctaccgccgtgcaaaaggaggaggcgcggcaagacgtggaggccctcctgagccgcacggtcagaactcagatactgaccggcaaggagctccgagttgccacccaggaaaaagagggctcctctgggagatgtatgcttactctcttaggcctttcattcatcttggcaggacttattgttggtggagcctgcatttacaagtacttcatgcccaagagcaccatttaccgtggagagatgtgcttttttgattctgaggatcctgcaaattccctt

SEQ ID NO: 4416 - DNA, 484 bp, Homo sapiens
  misc_feature (1)...(484): n = A,T,C or G
gggtccnnnttttgaaccctggacaccgtccggaccggcccggaatacccgggccgacccacgcgtgcgctagtatgtataattattgggtgggtatggtgaattgcttcgctaaaaataagctcccagggtggggcaaacttagagaagaccaagggacagtattttttatcaaaggaatactattttttcacactacgtcaacttggttgctctgataccccagagcctgattgggggcctcccggccctggctcacgccaagtccctggtgctgggtttgctctcccgctgttgccaggggctggaagctggaggggtctcttgggccatggacatccccacttccagcccatgtacactagtggcccacgaccaaggggtcttcatttccatgaaaaagggactccaagaggcagtggtggctgtggcccccaactttggtgctccagggtgggccagctgcttgtgggggcaccttgga

SEQ ID NO: 4417 - DNA, 418 bp, Homo sapiens
aaccacccagggccaccatcagacaactccctgcatgcattgccctagtaccctctcacaccctcacggcgcgcctcacgatccctcacccagagcacacggccgcggagatgacgtcacgcaagccacggggctgacgtcacatatcaccgtggtgatggcgtcacgtggccatgtagacgtgacgaatagacatagcgacggcgtcgggcagaatcgccacgtaagacacagacatggggaacttggcatgacgtctcaccgagatgcagcgacgacgtcacgggccatgtcgacctcacacatattaatgtcacacagacgcggcgatggcatctcacatacggtgatgatgtctcaccccgacacagtgacaacacacaccatgacgacgacacctatagatatggcaccaacc

SEQ ID NO: 4418 - DNA, 439 bp, Homo sapiens
  misc_feature (1)...(439): n = A,T,C or G
cggacgcgtgggggcggcagcggcagcggcagcgtcgctgagttttgtctcccgggccgtctgggcgcgcgcgggtgtcccagaatgaaatatgactgaggactctcagagaaactttcgttcagtatattatgagaaagtggggtttcgtggagttgaagaaaagaaatcattagaaattctcctaaaagatgaccgtctgggtgagtacttttaaaaattaatctcattggttctcaatcactccacatgttctgaagtaaatattttcttaaaagacatccagaagcattggttacttgctgtattttttagtgatgtggngaagcagaatggtgtattttgagaaaagatttttcaaatttatatttcactgagcgtcagaagtttttgaaaggtttcttaagaaagtcagtagtatttttttcttttattgaan

SEQ ID NO: 4419 - DNA, 450 bp, Homo sapiens
  misc_feature (1)...(450): n = A,T,C or G
gcgcgccgccaccttttgaagcctgcggttgactgtcgatttcccgggccgacccacgcatccgtgacttcgctgaatttgaggatgtcatggaagactttgttactgaatctcctcaacgggtcataatcactgaagatgatgaagatgagaccactgtggagttggaagggcaggatgaaaaccaagaaggagattttgaagatgcagatacccaggagggagatactgagagtgaaccatatgatgatgaagaatttgaaggttatgaagacaaaccagatacttcttctagcaaaaataaagacccaataacgattgttgatgttcctgcacacctccagaacagctgggagagttattatctagaaattttgatggtgactggnctgcttgcttatatcatgaattacatcattgggaaagataaaaacagtcgccttgcacagg

SEQ ID NO: 4420 - DNA, 412 bp, Homo sapiens
taaatctggcctgccacctagttttgtacagcctggaagctaagcatgatttttacattttaaatattatacataaaaattatacaaaattcaaatttcagtgttcataaataaagttttattagaacatagctacctacactcattcatttacatattgtctgcggcttctttgttaccatgttggcagagctgagtactagcaacagagaccatatgctccacaaagcccaaaatatttactatctgcccttcacagaaaaagtttacctgcccctggcttccaacgtgttcaatttttaatgttttaggtgttcttgaaaaaaatctgtactctccagataacatatgcagggttttatatatgtttattgattaatcttactgactgtattacacaaatttatatact

SEQ ID NO: 4421 - DNA, 404 bp, Homo sapiens
ttggatggtaacgtttattttccttggcagagaagctgatcgtcgaagggcatctaaccagagcggtagaagaaacaaagctttcaaaagaaaatcagacaagagcaaaagaatctgatttttcagatactctgagtccaagcaaggaaaaaagcagtgacgacactacagacgcccaaatggatgagcaagacctaaatgagcctcttgccaaagtgtcccttttaaaagctcttttggaagaagaaagaaaagcctatcgaaatcaagttgaggaatccactaaacaaatacaggttcttcaagcccaattgcagaggttacacatcgatactgagaatctccgggaggagaaggacagtgaaatcacaagtactagagatgaattgcttagtgcccgagaa

SEQ ID NO: 4422 - DNA, 401 bp, Homo sapiens
acgctgagacgtggctgccagaacttttatttttatggttctcttgagtttggggagaaataattaaatgttgcaaatgtaaaaattggcagtaacattttccattttgccaatagtcattcctttggttttcccttggattttatttatttctttctccttttaggcattgctctgtcatagcctgcttgagtgttgtgtctctaggaaggccagaacaccaggtttggatgttacatagccaagaacattgtgtagcagtgcctggttttgccacaagacaggtctgtaggaaataccactgccactgcagccgagcacgttgaactgactgtgcttaggaatacttcaccagtaggcttactggaaggtatgtctttctgcatctgtgatttgcagag

SEQ ID NO: 4423 - DNA, 419 bp, Homo sapiens
  misc_feature (1)...(419): n = A,T,C or G
cgtgtctgcagctagtgtgtcaactcagcgtttctcctctcgtccctggaagagctaaagatggctgaatttctagatgaccaggaaactcgactgtgtgacaactgcaaaaaagaaattcctgtgtttaactttaccatccatgagatccactgtcaaaggaacattggtatgtgtcctacctgtaaggaaccatttcccaaatctgacatggagactcacatggctgcagaacactgtcaggtgacctgcaaatgtaacaagaagttggagaagaggctgttaaagaagcatgaggagactgagtgccctttgcggcttgctgtctgccagcactgtgatttanaactttccattctcaaactgaaggaacatgaagattattgtggtgcccggacggaactatgtggcaactgtgg

SEQ ID NO: 4424 - DNA, 418 bp, Homo sapiens
  misc_feature (1)...(418): n = A,T,C or G
agcttataaagtcccaatatattatatcttttgttgctttggcagttttaatttagagctctgcgttcacagagatgccacctatagcaaaaactatctttaagaattggaaaataaaatgaatgttttagataaaatattgcaagccattatgtgtagagttaatgtatggaaatttgcatttgtttttctgaatcatggtgtacattaatcactcattgaattctatttctaagcaaataagagaatcaaacatttctaaaaggaacatatgtcttgctattaataacaaggagacaggaaaaatagtaaggtaatataagcaaaaaaaaaaatgtaaggaatttagctatcctaaattggaatttttacagattgcatgcatacttagaattttaaatttttaaaagatttacan

SEQ ID NO: 4425 - DNA, 410 bp, Homo sapiens
tactttgcagatatgaacctgaaaatcaaagtgccattgttaaatcatcctaaagtgtactgtgggtattctccagcatacttgaaaatgaataaagttagattgctcacattgaagctaatggttgagacaagacacctgccagagtgaagtttgattcctatgggtgagaagatgtagatgactattgttctcactaaagttctaaaataatagcaagtgtagagaagagccgttgctttgaaaatacataccacatttgttataaagcatttgtttgttagtagcaatcacataggtagaaagagtttgagttttactgtggattaaaaagccttccctaaaaagagagcatgccagtcatagagacactaatttggcacttttcctccttcttaggattaaatgtt

SEQ ID NO: 4426 - DNA, 376 bp, Homo sapiens
  misc_feature (1)...(376): n = A,T,C or G
agtggggaaaccgaggcagctcctgctccccctagttcttccgctcctgtgaggaaaaaaaaatgtttatttctttgtgggagttcttctatgggcacttttttcgattttggatgaaatggctattacgacagatgactgggaagtgtgaattgcagcgaatatttgatacctatgtaggtgcacaaaggacacacaggatagaaaattccttgacatactccaagaataaggttttacagaaggcgacacatgttgttcagagtgaagtggacaaatatgtagatgatattatgaaggaaaagaatattaaccctgagaaggatgccagttttaaaatatgcatgaagatgtgcttactgcagataactggttn

SEQ ID NO: 4427 - DNA, 386 bp, Homo sapiens
attgatgtaaaaactctaaagattagcaaatccaacattgcaacgttttatttctccataatgttaaagagccttttttctttacaccagctttaccattttattacatgtatcttatattgccacgaagtttgtttacatacaataaagtgcatgcattctaagtatacaattcagtgggttttggcaaatgtaaccaaccatggttacattcagtctcaatatagaacatttccatcaccctccaaaaattccctgtgctatctctatatttatgttatgcaaggctcacatttgcctcattattgaaatcattgttggttgggttttgtattatttgtaccccaaattgtcttaactaacatatactcacctgttaatcccac

SEQ ID NO: 4428 - DNA, 395 bp, Homo sapiens
  misc_feature (1)...(395): n = A,T,C or G
acagcgccaagtgaagcctcgcttccctcccgcggcgaccagggcccgagccgagagtagcagttgtagctacccgcccagaaactagacacaatgtgcgacgaagacgagaccaccgccctcgtgtgcgacaatggctccggcctggtgaaagccggcttcgccggggatgacgcccctagggccgtgttcccgtccatcgagggccgcccccgacaccagggcgtcatggtcggtatgggtcagaaagattcctacgtgggcgacgaggctcagagcaagagaggtatcctgaccctgaagtaccctatcgagcacggcatcatcaccaactgggatgacatggagaagatctggcaccacaccttctacaacgagcttcgcgtggctcccgn

SEQ ID NO: 4429 - DNA, 480 bp, Homo sapiens
  misc_feature (1)...(480): n = A,T,C or G
agaaaaaattgacgcccgtggttcgatcgcgtgtggagcgcgacccacgcgtgcgcagaggcctgcgcccacaccctgtcctgtccagccttcgcccgcctgggcagggcccggcgccgtccgtggatgagccacagaacctcttccaccttccgagcggagagaagattccattcctcttcttcttcctcctcctcttccacctcctcctcggcctcccgtgccctcccggcccaggacccgcccatggagaaggccctgagcatgttttccgatgactttggcagcttcatgcggccccactcggagcccctggccttcccagcccgccccggtggggcaggcaacatcaagaccctaggagacgcctatgagtttgcggtggacgtgagagacttctcacctgaagacatcattgtcaccacctccaacaaccacatcgaggtgcgggctgagaagctggcggctgacggcaccgtn

SEQ ID NO: 4430 - DNA, 420 bp, Homo sapiens
tgagcagtgggggagcattgtgttgtgggtgtctgtgtgtgaggtcaccctcaaactgcaccgccggccagataccctcctgaccccgaggacttggtctggtctctctggtggctacaaccccagagttttaaggacttggaaaggaaagcacaatcagagaagaaaacagcccccgaaccagcaggagtggcctggcacatggaccggcctgagcgatgtgcactccacccaagccaggctcccagggggcctgatttctctctcactgtctctttttttaaaatggttgcacggctctgccccatggggggccttttttacacactgcgaggcccagctttctaggggacttttgcacatgtcatgcagctcagctgggagctgcttaggtggaaaactccaaataaagtgcggctg

SEQ ID NO: 4431 - DNA, 420 bp, Homo sapiens
ataaaacctagtcactattttttgacatataactataaaaagaaatacagttttaaatgtgaataaattatacagtggaaaattgcagactaagccttatagatacattgtttatttttattttataaagagagcagtgagattattaaactacaggaatggtctctaggacaaaagaatgttagtattgaagaaacagacaatttttgtgaaacattcccttatcgaagcaataactgaaagtttccagtttactgccatatttggttaaatgtgttttcttgttaaaatagtttatctcagactgttaactaattttttttttttttgagagggagcttttttgtgttgctgaggttggagggcagtggcacaatttaagttaattgcaacctccacctcccgggttaaagcaatttg

SEQ ID NO: 4432 - DNA, 413 bp, Homo sapiens
tattttttaaaataattttatatctgtgtaccaccccatatatttcatattactgtttcacatgtacagctttctacttctttgtaagaacaccaaccaaccaaggtttaagtgattaataggcttgagcaccgggtggcagatgttctatgcagtgtggttcaagtttctttgaccgcacttatatgcattgctaatatggaatttaagataccatacacagtctctcatggacctatctctattgtagaattatgacttatgtcttacttgccaaatttttctgaatgtgacctttttttgctgatttgctgggtttgggattaactagcattattttgccacctttatattgtatttataaaaaaaaaagtactatcaatcaatcatactactttggattggtgggctgg

SEQ ID NO: 4433 - DNA, 482 bp, Homo sapiens
acgtccagagcagagtcagccagcatgaccgagcgccgcgtccccttctcgctcctgcggggccccagctgggaccccttccgcgactggtacccgcatagccgcctcttcgaccaggccttcgggctgccccggctgccggaggagtggtcgcagtggttaggcggcagcagctggccaggctacgtgcgccccctgccccccgccgccatcgagagccccgcagtggccgcgcccgcctacagccgcgcgctcagccggcaactcagcagcggggtctcggagatccggcacactgcggaccgctggcgcgtgtccctggatgtcaaccacttcgccccggacgagctgacggtcaagaccaaggatggcgtggtggagatcaccggcaagcacgaggagcggcaggacgagcatggctacatctcccggtgcttacgcggaaaacacgctgccccccggtgtggacccacccaagtttc

SEQ ID NO: 4434 - DNA, 484 bp, Homo sapiens
tggcgtggtggctcacgcctgtaattccagcactttgggaggccaaggcaggcagaatgcttgaactcaggagctcaagaccagcatgggcaacatggtgaaaccccatctctaccaaaaatacaaaaattatctgggcatggtggcacgcacatgtggtcctgatacttggcaggttggggtgggaggatcgcttgagcctgggaggcagaagttgcagtgagccaagatggcaccactgaactccaacctgggtgacagagtgagacctgtctcaaaatgaagaaaaaaaaaaaaaaaggggagaaaaggaaaaccaaattattgagggggaaaaaatccctaaatccaaaaaagttgttacatctagggaaggaaatagggaaatgggaatggaatgaatcataacagagtttccatggtagatggccagtttccaagtttcaggggggggcgggctcatagagtgtttgttaatttaaca

SEQ ID NO: 4435 - DNA, 569 bp, Homo sapiens
  misc_feature (1)...(569): n = A,T,C or G
ccctaacatcggactcaacactaacccgctcactatacaacagacatgtattacctatcacggtacttatatctaaccccccccannnaggggganntttgaacatcgtcagacntggcgccggaaccccgggacgacccacgcgtccggcgaggcggggtaggcggacaaggcgggcgccgaggtttgcaagggctcgcagcggccagaaacccggctccgagcggcggcggcccggcttccgatgcccgtgagctaaggacggtccgctccctctcgccagctccgaatcctgatccaggcgggggccaggggcccctcgcctcccctctgaggaccgaagatgagcttcctcttcagcagccgctcttctaaaacattcaaaccaaagaagaatatccctgaaggatctcatcagtatgaactcttaaaacatgcagaagcaactctaggaagtgggaatctgagacaagctgttatgttgcctgagggagaggatctcaatgaatggattgctgtgaacactgtggatttctttaaccagatcaacatgttatatggaactatta

SEQ ID NO: 4436 - DNA, 451 bp, Homo sapiens
  misc_feature (1)...(451): n = A,T,C or G
ttgcgctaaaatgcctttgtttttttgttattattttcttagccagaacatctctctttgaactcacactgatacacacctgctactcttacacagggcagcagggctgactcttagtctggcttccatgaagcgtcatgggtggaaacgcattctagtaaaaaaggtaggaaatccctaaaacttccagcctcacatagcacggntctcacctgtcactgttttcccacctctaaggatttcatgtgcatcttttcaaagctagaaataagcactgtctaagattatgttgcgtttttagtcaaaagggagaaatcttattccttcttgaaaatattaagtgttatggctttatatagctcagttctttgagatttttgaaaagagtattttcagtaatagacgtgccatctctatcttttacacattcattacaacaattgtgtaaaag

SEQ ID NO: 4437 - DNA, 421 bp, Homo sapiens
  misc_feature (1)...(421): n = A,T,C or G
ctgcgcttgaagtcctccctgatagagttgcaacatctcgaatcagcgatgcacacttggcagacacaatgattggcaaagcagtggaacatatgtttgagacagaggatggttctaaagatgagtggaggggaatggtcttagcacgtgcacctgtcatctttattaagttctagttcatataccaagtctctccctcnctaanaaaaaaaaaaaaaaaaaaaaaaagggggggggcctttttaaaggatccttgggggggccaaattttaccgggggtgggaaggttttatttttttccttttggggggcctttttaaaccctccctgggaatttttggaaagaaccttttttttgggggggggacttattgggccaacctccctacaaaattttaagcctttagggaaaatataaatt

SEQ ID NO: 4438 - DNA, 402 bp, Homo sapiens
cccacgcgtccggcagcaccacgctcggaggacagctcctgcctgcagcttccagacccaggaagcctgaggggaaggaaggaagtacgggcgaaatcatcagattggcttcccagatttgggaatctgaagcgggcccacatcttccggccaacttccattgaacttcccagcactcgaaagggaccgaaatggagagcaaagaaccccagctcaaagggattgtgacaaggttattcagccagcagggatacttcctgcagatgcacccagatggtaccattgatgggaccaaggacgaaaacagcgactacactctcttcaatctaattcccgtgggcctgcgtgtagtggccatccaaggagtgaaggctagcctctatgtggccatgaatggtgaag

SEQ ID NO: 4439 - DNA, 408 bp, Homo sapiens
cccacgcgtccgcccacgcgttcgcccacgcgtccgaaaagcctattttaaaatcactgtgcatattatagagttgtagccacctcacaatgaagtactacagcctgtgctgtcttaatggtttatgtcaggaaatgaaaaagatactgtaccaaatctggaattacaatggggagtaataatgtatactaaatgacttttgtattttaagttactttttgtgagtggtgaatttttgtgtttttcttttcagctacacttagtcctgagatgtattttttctttaagtcttgaatgaatacaaaaggagcccattttataatataaaccttgatgtacatgttgagatatttggacaatgaaaatgccttaaaaggaatgcatatggataaagttgcacttataacc

SEQ ID NO: 4440 - DNA, 394 bp, Homo sapiens
  misc_feature (1)...(394): n = A,T,C or G
nacgaagcccccagccagggcggggcggcgcagccttagctcccggacccggaagaagcgccatctcccgcctccaccatggagcccaccgcaccgtccctcaccgaggaggacctcactgaagtgaagaaggacgccttagaaaatttacgtgtatacctgtgtgagaaaatcatagctgagagacattttgatcatctacgtgcaaaaaaaatactcagtagagaagacactgaagaaatttcttgtcgaacatcaagtagaaaaagggctggaaaattgttagactacttacaggaaaacccaaaaggtctggacacccttgttgaatctattcggcgagaaaaaacacagaacttcctgatacagaagattacagatgaagtgctgaaac

SEQ ID NO: 4441 - DNA, 419 bp, Homo sapiens
aagatgtattaacagactagaaaagcagctttctatcttaaacttcatacttttacatacatttgcacagcataacaaaacagaattccaagagatgaactattagtaacatttttgatctgccccccaaaaagctttttagtatgttgataactacaaataagtcttcttaggaaacaattttccagtgcctttttatttttttacaacagagtgatataacagtataattttattctgaaccaagtaaattagaaaacattactgtaaggctagttatttctgtatcaatttctgtatcatttttaaaatgatttctaccataatgtattctaacagtaagtaagaagtattagctcaacccttttattattcttttatcaatcaaagatgatggcaagtttaaagaaaagttggcg

SEQ ID NO: 4442 - DNA, 561 bp, Homo sapiens
  misc_feature (1)...(561): n = A,T,C or G
ttagttgataattacactcgtagtctgaactcgtaaaaacgtgcgttgaacaatctactcgtgttactctcaaccacannnggtgggggntttgaggatgtaggacttggcgccggaatcccgggacgacccacgcgtccgcccacgcgttcgtggacgcgtgggcggcagtcggttctctcgttgaccgaatcaccgacctctctccccagctgtatttccaaaatgtcgctttataacaagctgacgctggacaagctggacgttaaagggaagcgggtcgttatgagaggcgacttcaatgttcctatgaagaacaaccagataacaaacaaccagaggattaaggctgctgtcccaagcatcagattctgcttggacaatggagccaagtcggtagtacttatgagccacctaggccggcctgatggtgtgcccatgcctgacaagtactccttagagccagttgctgtagaactcaaatctctgctgggcaaggatgttctgttcttgaaggactgtgtaggcccagaagtggagaaagcctgtgccaacccagct

SEQ ID NO: 4443 - DNA, 478 bp, Homo sapiens
  misc_feature (1)...(478): n = A,T,C or G
ggcgcccattgatcccctgcgatagagcgccntnaaganccggcncgacccacgcgtgcgggcgggagtaagaggaaaacgattgtgaggcgggttcggctttctgttgccttttttgggccccgaaaagggtcagctggccgggctttggggcgcgtgccctgaggcgcggagcgcgtttgctacgatgcgggggctgctcggggctccgtcccctgggctggggacgcgccgaatgtgaccgcctcccgctccctcacccgccgcggggaggaggagcgggcgagaagctgccgccgaacgacaggacgttggggcggcctggctccctcaggtttaagaattgtttaagctgcatcaatggagcacatacagggagcttggaagacgatcagcaatggttttggattcaaagatgccgtgtttgatggctccagctgcatctctcctacaatagttcagcagtttggctatcagc

SEQ ID NO: 4444 - DNA, 400 bp, Homo sapiens
atgaaacatcctatcatctgtaggctcattcatttctctaacagcagtaatattaataattttcatgatttgagaagccttcgcttcgaagcgaaaagtcctaatagtagaagaaccctccataaacctggagtgactatatggatgccccccaccctaccacacattcgaagaacccgtatacataaaatctagacaaaaaaaaaaaaagggggggccctttaaagggaacccttggggggcccaaatttaccgggggtgggaaagaaataatttttttctttagggggggcggattaaaacccaactggggaattttggaagagaacctttttttggggggggggcaaaatgggcccaccctccccccagaatttaaggctttggggggaaataaaag

SEQ ID NO: 4445 - DNA, 431 bp, Homo sapiens
  misc_feature (1)...(431): n = A,T,C or G
cttttactttaggattatggtttggttttggctttgtttttgattgtttttttattatgaatctcctggacgcagaggtgactgtgttagctggcctgggccaggacggcaggtggccctgtagatgggaaagtgtctgtgtcgaggcgctgagctctgtctctgtttctccttttttcctctactccttccccttcacaccctcgtggctggaaggaacctcggcttccctgaaagcttgggggtcccaccctaattaccccacccgggaggaacgcccagggccccgggcttgtttctcctcttgttttccttttgggcagtttgatcactgatcgagtaaggaatgacctttagattgtgcgacttttgtttttgtttttttaaatttttttaaaccaagaatgattttcctgcttccttctcctcan

SEQ ID NO: 4446 - DNA, 423 bp, Homo sapiens
acaacttcaagcagtctaatatatctgaaacgcagggccagggaaagagaagtagatacttgaaaaaatcatgtctgaagtttccaaacttgatgtaaacttagttaaaacccagcaagataaagaataagaaaactgcacaaaggcacatcataatcagatcccttcaaactagtaataaagcgaaaaatcagaaaagcagtcagagaaaaaaagatacattatgtacagaaaattaaagaaaaaaacaacagcagatttcctgtcagaaataatgcaaaccagaagatactggagcagtatctttaaagaacagaaagaaaaacctatcaacttataattttatacccagagaaaatttctttcaagaactgggataaaatacagacttttaagttatatcaacctgaaagaatttataag

SEQ ID NO: 4447 - DNA, 414 bp, Homo sapiens
taagaattcaatggtatttcttagcaatgagaaagtaggaaaatatatatttagaaagatcatattgatgaatatcactaaggactcatattatgcaaggatgattagcttagataactgggaaaagctgatttttttctttagacttgaattctgacctgttagttgaggaatcacaaatatgttgctgaataatgtcaaacagttcatgacctagttcataagaagaaaatagatatcatctaagtgaaatattgtgccattattaaggtgtaattgtataactatgataggtaatattttgccccattttataagagaccacaatttaaaagcctaagggtttactgggaagtgtattttattgtagcatcccttctcttagcctttgtgaacttgaatcattacacttgg

SEQ ID NO: 4448 - DNA, 415 bp, Homo sapiens
  misc_feature (1)...(415): n = A,T,C or G
catggcggcctcagcaaaaaagaagaataagattgggattactatctccctaacagactttctggctgaggatgggggtactggtggaggaagcacctatgtttccaaaccagtcagctgggctgatgaaacggatgacctggaaggagatgtttcgaccacttggcacagtaacgatgacgatgtgtatagggcgcctccaattgaccgttccatccttcccactgctccacgggctgctcgggaacccaatatcgaccggagccgtcttcccaaatcgccaccctacactgcttttctaggaaacctaccctatgatgttacagaagagtcaattaaggaattctttcgaggattaaatatcagtgcagtgcgtttaccacgtgaacccagcaatccagagaggttgaaaggn

SEQ ID NO: 4449 - DNA, 467 bp, Homo sapiens
  misc_feature (1)...(467): n = A,T,C or G
aatacatgtaaaatttgtacaaaaatatcttctatgaaaatgatttgtaatccgtagacttattacctgggagatgtcttgatgtaaaatcccatcctttgggttgtgggttttttgttttctccaaataaatctgatctttaaagttcaaaaaaaaaaaaaaaaaaggggcggccttttaaaaggatccttgagggggccaaggttaacccggggtgcaaaaataaaaattttctccttatagggctccttattaaaacctagctgggattttttggaaggaaccttcattttggggggggaccatattggcccaacctcccaacaaagttttaacccttaagggaaaaaaaaaaattttaaaggagagaaggggaaaaacaaatcgcatctccgggtgttttaaaaaaatggnnncnngaaagnctgcaaatacttaatgaggaaacactctaccttaacaaatt

SEQ ID NO: 4450 - DNA, 424 bp, Homo sapiens
  misc_feature (1)...(424): n = A,T,C or G
gaatttacatggggagacctacctatggcagctctcgccgtcgggattactatgacagaggatatgatcggggctatgatgatcgggactactatagcagatcatacagaggaggaggtggaggaggaggaggatggagagctgcccaagacagggatcagatttatagaaggcggtcaccttctccttactatagtcggggaggatacagatcacgttccagatctcgatcatactcacctcgtcgctattaaagcatgaagactttctgaaacctgccctagagctgggatattgtttgtgggcaatattttttattgtctcttgtttaaaaagtgaacagtgcctagtgaagttaggtgacttttacaccttttacgatgactacttttggtggagttgaaatgctgttttcattctgcan

SEQ ID NO: 4451 - DNA, 452 bp, Homo sapiens
  misc_feature (1)...(452): n = A,T,C or G
cgcagcggaggttttcctggtttcggaccccagcggccggatggtgaaatcctccctgcagcggatcctcaatagccactgcttcgccagagagaaggaaggggataaacccagcgccaccatccacgccagccgcaccatgccgctcctaagcctgcacagccgcggcggcagcagcagtgagagttccagggtctccctccactgctgtagtaacccgggtccggggcctcggtggtgctcctgatgcccctcacccacccctgaagatcccaggtgggcgagggaatagtcagagggatcacaatctttcagctaacttattctactccgatgatcggctgaatgtaacagaggaactaacgtccaacgacaagacgaggattctcaacgtccagtccaggctcacagacgccaaacgcattaactggcgaacagtgctgagtggcgcn

SEQ ID NO: 4452 - DNA, 418 bp, Homo sapiens
cggggaggtcagcttcacattctcaggaactctccttctttgggccacggaattaacccgagcaggcatggaggcctctgctctcacctcatcagcagggaccagagtggccaaagcgggcagggtggcctctggctctgccgaagttatgcccctggccaggattgctacagttgtgattggaggagttgcggctgagcccatggagctcagcgccatgggcttcactgcggcgggaatcgcctcgtcctccatagcagccaagatgatgtccgcggcggccattgccaatgggggtggagttgcctcgggcagccttgcggctactctgcagacactgggagcaactggactctccggattgaccaagttcatcctgggctccattgggtctgccattgcggctgtcattgcgagg

SEQ ID NO: 4453 - DNA, 405 bp, Homo sapiens
gactggcacccaccctgctgagagccatgccttcctcaggagggctctgctggacagagacctgatcaagggcgtctcccactccttcaggatggagacaaaaacccaactggtggccgagagtggtggcttacgcctggaatcccagcacactgggaggccaaagcaggaggatcacttgaggccaggagtttgagacgggcctgggcaacatagcaagaccctcgtctctattaaaaatgtaagaaatatgccagacgcggtggctcatgcctgtaatcccagcactttagaaggctgaagcaggtggatcgcttgagaccaggagttggagaccagcctgttcaacacggagaaaccccatctctactagaaatacaatacaatagctacgtttgatggggg

SEQ ID NO: 4454 - DNA, 416 bp, Homo sapiens
tggataagaacagatttttgtactctagaaacagatgttttcaacataatatgcagcaaaattattctatgcctattccctcctaatttaagggcgtgcagatgaaggctgacatcggcatagaaatgtgctaaatttcaaatatggttgttcaataatatatttttaattgtattttaaaacatccctttgtagggaatatcagtagaactattgaattgatgttgtatttttgcattagctgtcctttaattttgctttccatgtcttgatcttgttaccgaaatgcattctgtgtaatttcaacgtagactacgttcctgagtctgatgatgtcattgtaaataatcattcctcatgttgctctcacgggtttgacattggaggatagatgtgccatcaactttaaatagagt

SEQ ID NO: 4455 - DNA, 429 bp, Homo sapiens
cccacgcgtccgaagaggaggagcaggcatatcacatggccaaaaagggagcaagagaaaggtgagagagacactagactctttttaaaaccagctctcacatgagctaatggaataagaactcactcattaccacaaggacagaacccagccattcatgagggacctgccaccatgacccaaaaacctcctacttgacccaacctccaacactggggataacatttcaacatgagatttgaagaggacaaatactcaaactatatcacttggtgtccatttttaatctttctctaacataccctaacttcttcttgaaaatgcttaattttctctgttttgagatgtaaatttgctatcctgtttttcttaaaacttggtaagatcttcagccatgaaggacagacaaactgtaacctttccatttag

SEQ ID NO: 4456 - DNA, 424 bp, Homo sapiens
tgcccacctcatagagttgttctgaggattagataggagagcagtgtgggcctttgactcaatcaactttacagtttttgttactactactgtttaaggacaggaaacaagttagtggcaacgccgagctgaaacccgggtctctcaacgtccagttggaggttttacccaccacccctctacctcttcagagctaatgggatgcagaggcgaggacagcccctggaaaaccatgtgacgttgatacactggcaaagcgcaggcatcccggcctcgaaggtgcataattattgcaatatgaaaaaatcgaggctgggtaggagcagggcagtgaggatttctcaacccttactttcaccccggcgctgtccactgcatctgacagagcgcggagctgcgctgctacagccgcaaccccagggac

SEQ ID NO: 4457 - DNA, 418 bp, Homo sapiens
ccagacaggagcacaggcggcgtgtctgtagctgattggggggtgcagatgctgccagcagacaagtgtgccactgggaaatgaggttagtctgagagtggagggggcacagaagggtgtcctccttgggaaaacaagaggtgtgaggcagtcctctaggtcggaccctcccagggctgtggtcgttagagtaaagggaaagggtcacatggctgggtgtttctccaggctttctgcatgctgagcaggctgtaaccagacgtctggtcttgtccagggagagtgtcagaggcgtgtggggctgaatgcaaggggctggccatcataattagggacacagtgaaacaacagccacgtggcatcgtgagtggagttgaaggtttgttggagccaggatctcagtaatgagctgtagcag

SEQ ID NO: 4458 - DNA, 403 bp, Homo sapiens
tcttcctgatggaccttccttcccggaaccttcgagatctgcggactggggtctggttgaaagatggcggccctcactaccctgtttaagtacatagatgaaaatcaggatcgctacattaagaaactcgcaaaatgggtggctatccagagtgtgtctgcgtggccggagaagagaggcgaaatcaggaggatgatggaagttgctgctgcagatgttaagcagttggggggcgctgtggaactggtggatatcggaaaacaaaagctccctgatggctcggagatcccgctccctcctattctgctcggcaggctgggctccgacccacagaagaagaccgtgtgcatttacgggcacctggatgtgcagcctgcagccctggaggacggctgtgacagcg

SEQ ID NO: 4459 - DNA, 427 bp, Homo sapiens
tcgctctctggtaaaggcgtgcaggtgttggccgcggcctctgagctgggatgagccgtgctcccggtggaagcaagggagcccagccggagccatggccagtacagtggtagcagttggactgaccattgctgctgcaggatttgcaggccgttacgttttgcaagccatgaagcatatggagcctcaagtaaaacaagtttttcaaagcctaccaaaatctgccttcagtggtggctattatagaggtgggtttgaacccaaaatgacaaaacgggaagcagcattaatactaggtgtaagccctactgccaataaagggaaaataagagatgctcatcgacgaattatgcttttaaatcatcctgacaaaggaggatctccttatatagcagccaaaatcaatgaagctaaagatttactagaa

SEQ ID NO: 4460 - DNA, 434 bp, Homo sapiens
ttaatctctcctagatctggaaaaggcctacaaagggaaggcctgggtgcattaatggagattctctaccaatgcaaattgccactgcaaaaggcagctttgcagagtcacttcaatgtgttggccctgtggcagccattttaaaatatgtcaaagaaatatattttgggataaaataatatggtttccttcagcggctgctatctatcatgtgatgctataccagagtcaggttggaaagtaagccacattgcgtcagggtaattataaaaatcgaattagacttttatagtttgtagggcatgactccccataccccttagataggaatttcaagatcagagtttaggcctcatgccataggagatcacatgacgcgctctagactgggaagaatatttgcgacacttaagaagagaggtgatattgaaact

SEQ ID NO: 4461 - DNA, 420 bp, Homo sapiens
gcacctaagaaagcagagaagagagccgggggtgccaactccaacgtgttcttcatgttcgaacagacccaaatccaggaatttaaggaggccttcactatcatggaccagaacagggatggcttcattgacaataacgatctgagagacacctttgctgcccttgggcgagtgaacgtgaaaaatgaagaaattgatgaaatgatcaaggaggctccgggtccaattaactttactgtgttcctcacaatggaagggagaaaacttaagggagcggaccctgaggaaaccattctcaacgcattcaaagtgtttgaccctgaaggcaaaggggtgctgaaggctgattacgttcgggaaatgctgaccacgccaggcgggaggttttccaaggaggaggtttgaccaaactgccgcctt

SEQ ID NO: 4462 - DNA, 456 bp, Homo sapiens
  misc_feature (1)...(456): n = A,T,C or G
gcgaggcgttctccgcgggcagccggcggcggggccttgccttacagcgcggggtcctcggcggcctgggtggctactgcccctgctgctgtcgtatgcgaggacggctgttagtgctgctgctgttggttcatcccggcggcgaaagaggaagaggaagatggcgaggcgacaagagaagaaggaggcaggcgcggcggcttcggcggcgccccgagccggcggaggcgaggggggggaagatggcggacgtgcttatcgtcctgcgacagtacaacatccataagaaggagattgtggtgaagggagacgaattgatcttcggggagttctcctggcccaagaatgtgaagaccaactatgttgtttgggggactggaaaggaaggccaacccagagagtactacacattggattccattttatttctacttaataacgngcacctttctcatc

SEQ ID NO: 4463 - DNA, 486 bp, Homo sapiens
  misc_feature (1)...(486): n = A,T,C or G
ggggtggagcggagtccnnnnnaaattgatngaactgagtaccggtcggaaacgccccggaatacccgggtcgagccacgcgtccggtgggaccccggcacccggctccgcacctgaggggaaatccgctggaaagcactagggccaagcgggtccggtaggcgcgcggcagcagaggtggtccgcccccagcagccggggctttggtggccgctgaaggtttgcggcaggaggcctttgtgaagtcagtcggctccaggtcgccctccggatgcggtccccacaaccgcctgcgtcacctgggttgaggggctcatttgaaatacagacttcgcgacccaccccagcctgctgaatcggaaatgcagcggtgagccataggtgattattatgcacccttaaatttaagaattagtcattcggaggtttctctcaatggcgaacttgaaaataagttcaggaaaccagacaattggagcggaccgn

SEQ ID NO: 4464 - DNA, 427 bp, Homo sapiens
  misc_feature (1)...(427): n = A,T,C or G
agcgagcggacggcctttagggtggttagggtgacagattagaccatggaaacaagcctgagtctagatagaaggaatcaaaattactagagataatgtctttatgttttcagcatataagaagagtgcgcgggattcctaaaaactagtggcaaactcataagaaaaaagattccattgataatataagtgttatgatggaaagagcactactagactaagacttgataacttgggtttaaattttatctatacccatttcaggccatgtgccctcaaaagtcgcttaagcttccctgggcctcagtttcctcatctgcacaatgcatgggattgttgaggggttcgagttgaggtaacgaatgcaagaacacattgcatgccctagaggagtggatctcaatctgtggcactcttaaagctagan

SEQ ID NO: 4465 - DNA, 408 bp, Homo sapiens
  misc_feature (1)...(408): n = A,T,C or G
aaacaggataatcataaagaaaaccagcaccaggatacatcataatcaaattgctgaaaataactgataaagagaaaaatcttaaattcaggtagattaaaaaataggcctattaaagaggaataaaggtatgcttatcaagacatatcagaaactataaaagtcagaagataagagaatgacatctttaaagtgttgagaggaaaaaaaaagctgtcaacctagattactatatccattgaaaatatcataaatagaggtgaaatacttttttgacaaatcaaagctgaaagaagtcatcacaaacagatcaccagtatgagaaatgttaaacattgttcttcagaaaactacgatagcccttatgaanctnnnnnnnannnnnnnngnnnnnntnntnnnnnnnnn

SEQ ID NO: 4466 - DNA, 401 bp, Homo sapiens
ccatgttggccaggctgggtttgaactcctggccttaagtgatccatccatcccggcctcccaaagtgctggaattataggcgtgagccaccaagcccagctgatgattggtttttaaagtcaagaatctgaaagcaattttatctccagccaatttaatgtaacagctctcaaactgaagctatcctatgatgttacaatttagagaatgctgtaatatgtaatataaggataatctgattttcaaaaagttagcctccttacttaggagtgacaataggaatagagcttagatatttcccagtcctgtcagaggtgtccttgcagggagtctggctcttttctccctttccctggccttcattgatctgtccaattttccctggcagagctctctttac

SEQ ID NO: 4467 - DNA, 437 bp, Homo sapiens
  misc_feature (1)...(437): n = A,T,C or G
agtgggacaagatggtttacatctcgaacggacaagtgttggacagccggagtcagtctccatggagattatctttgataacagatttcttctggggaatagctgagtttgtggttttgtttttcaaaactctgcttcagcaagatgtgaaaaaaagaagaagctatggaaactcatctgattccagatatgatgatggaagagggccaccaggaaaccctccccgaagaatgggtagaatcaatcatctgcgtggccctagtccccctccaatggctggtggatgaggaaggtaaatgtctgctctaagaagcagacaaccggacatgcgcattcatagcagaaggaaaccatcaagaagtggaaggctgaccatgatgagcagtagatgaatgtgtatgtctaaacaaggactgctctgtgtcctcacagatgan

SEQ ID NO: 4468 - DNA, 407 bp, Homo sapiens
cccacgcgtccggtgagctggagattggatcacagccgaaggagtaaaggtgctgcaatgatgttagctgtggccactgtggatttttcgcaagaacattaataaactaaaaacttcatgtgaaaaaaaaaaaaaaaaaaaaaaaaaaaaaaaaaaaaaaaaaaaaaaataaatattctcttgggggggggcgtttttaaaaaacctccggggggccccacatcacccggggtaaaaaaaatatttttttcctataaaaagggggtcattaaaaatcccctggggcccttttgagaagaacccctctttttgggggggggatatttgggacaaaccccccccaaaaatataaattctttagagaaaaaaaaacctctttaggggaataaggggataacctccggccg

SEQ ID NO: 4469 - DNA, 469 bp, Homo sapiens
  misc_feature (1)...(469): n = A,T,C or G
ccccccccnaatgaaatcgagcgcatgcgggaccagtccgcggttcgacccacgcgtccgagagtcccacctgcgggctctctccacccttctcagagttccagtttcaaccagagttccaaccaaagggctccatcctctggattctggccaatgaaatatctccctggcagggtcctcttcttttcccagagctccaccccaaccaggagctctagttaatggagagctcccagcacactcggagcttgtgctttgtctccacgcaaagcgataaataaaagcattggtggccttannaaaaaaaaaaaaaaaaaaaaaaaaaataaaataaaaaaaaaaaaaaaaannnancnnnnnggggggggggccgtttaaaaaaaaccttggggggccccaattttttggggggtaggaaaatattttttttttttttttgggggggttttaaaaaaggcccccggggggg

SEQ ID NO: 4470 - DNA, 481 bp, Homo sapiens
  misc_feature (1)...(481): n = A,T,C or G
ggggnagcnagncaggggaannnnnncctgatagcctcganaccgtcgganangcncggaannatcgggccgagccacgcgtccgcccacgcgttcgagcaaaccaaggactctgttcggcatattattttttcatcccttttcagccctcaagggaacaaagccgatgacagccggatgagcttgttgggaaaactggtctccatggcggtggctgtgtgtcgaatcccggtgttggagtgtgctgcctcctggcttcagcggacgcccgtggtttactgtgtgaggttagccaaggcccttgtagatgactactgctgtttggtgccgggatccattcagacgctgaagcagatattcagtgccagcccgagattctgctgccagttcatcacctccgttaccgcgctctatgacctgtcatcagatgacctcattccacctatggacttgcttgaaatgattgtcacctggatttttg

SEQ ID NO: 4471 - DNA, 418 bp, Homo sapiens
  misc_feature (1)...(418): n = A,T,C or G
tgagaccagcctgggcagcatagtgagagccctgtctcaattttttaaaattaaattaaaaattttttaaaagttcttctcaaccagaccccctctctggagataaaccactataacaagtttcttgtatatccttccagagagagtctctgcatatacaggcatttgcatgtatattatatagacatgtttgcaatatatatacaatcttcccctcctttggagctgggatttgaatccagacctgtgtaattctaaaatatctgcccatttcaccagacccacagcctctcagaccacagaagaactgggagctgggtgagtagttatcacaagagtgcagcacagttccactctgtaaaggtgccaggtgcatagggaaaagtgagggctggggcatcaggagactcaaaataan

SEQ ID NO: 4472 - DNA, 409 bp, Homo sapiens
aagacattttaatttaagctggcgtcctgcctcttagatgtggcatggggccaatcttagctttgagcaagaaagttttggaaattgcgttgcttttaagaaatatatttactgtgggtggatattaaagacacatctatgctaatgttgcttctgctagaacctcatacctgttctagatcatctccacgtttattttaccaagagatcctctgtcaagagaatttcctggctgttgtgaaagaatttttctacatactgaactatttttcctatttcttttcaccttgctttttttcatccttaatttgcttgtcatcacaatgaagtatgttttttgaatcatcaattctttctcattctccatttatctgaaggttcttttgcccttattaacctctcaactttg

SEQ ID NO: 4473 - DNA, 476 bp, Homo sapiens
  misc_feature (1)...(476): n = A,T,C or G
gggggtnnaggggtcnnnnnaactgatcgnactgagcactgtccgcaaanncccgggacgacccacgcgtccgcccacgcgtccgagacattgtcataaactaggaaaagtgttttcttagattagcgtggacatttaatcaatcaatctccttgttttatccttagaaaaggatataatcaaatggccttaaaatggctcagttatagtcagttacatgtgtaacgtgaacttcataggcaattagcacggactctaagcttgagagctttaagcccaggcccagtatctgaaaaactcaaactataacagccaaagcttgagtgcaatgagatttccaagcctagtggttgacccagaaatttaatccaacagaattttaatacagcagaaactctcttaatggaacactacctaaacaattcagtgcattaacagacactctctattcctctctaacagccactgatgccagg

SEQ ID NO: 4474 - DNA, 438 bp, Homo sapiens
cctcgttgaccgaatcaccgacctctctccccagctgtatttccaaaatgtcgctttctaacaagctgacgctggacaagctggacgttaaagggaagcgggtcgttatgagagtcgacttcaatgttcctatgaagaacaaccagataacaaacaaccagaggattaaggctgctgtcccaagcatcaaattctgcttggacaatggagccaagtcggtagtccttatgagccacctaggccggcctgatggtgtgcccatgcctgacaagtactccttagagccagttgctgtagaactcaaatctctgctgggcaaggatgttctgttcttgaaggactgtgtaggcccagaagtggagaaagcctgtgccaacccagctgctgggtctgtcatcctgctggagaacctccgctttcatgtggaggaagaagggg

SEQ ID NO: 4475 - DNA, 436 bp, Homo sapiens
  misc_feature (1)...(436): n = A,T,C or G
taaataccaagccagaaatgtctggctcagaaatctgtaaagaagtaggtcctgcataagggaaaactcagcagatcaccaggctctggaaaagatattgcaggagttggtgaatgaaatttaagagaagtcttccatattggagagggcttttaatttatgtggagtagcttgttttcaacttttggtttattgtggtgggtgagtgtacatgtaattaatattatttactttgtttttctctatttcaaaaagttctggctctttcacttagtagctgtataatttggggaatgttttgtctttcataaatggatataataatggtatatggtatgtagggtcattgtgagggctaaatgagataatatatttaaaaagcatagaacatcattcaagaaaaaatatctgtcatttctgtcatcataattatccn

SEQ ID NO: 4476 - DNA, 503 bp, Homo sapiens
  misc_feature (1)...(503): n = A,T,C or G
aggttgccggnatttagnnnaccaggggngccagnanagactgagaatctncgganngaccnccgcgnnnngggnagnggngtcgcggccagtagagggattctgggtaacggcccggacccccggctgggcttctggctcggcgcagcaggttccattcacgccaagtctgttggcagtggcagttgtagggccaagggcggttgtaggacccggagcagccggacatggaacaaccgtggccgcctccgggaccctggagcctccctcgggccgagggtgaggctgaggaagagagtgacttcgacgtgttccccagttctccccgctgcccgcagctgccaggcggcggcgcccagatgtatagccatggaattgaattggcttgccaaaagcagaaagagtttgtgaagagctctgtggcgtgcaaatggaatcttgctgaagctcaacagaaacttggtagcttagcactgcataattctgagtccttggatcaggag

SEQ ID NO: 4477 - DNA, 517 bp, Homo sapiens
  misc_feature (1)...(517): n = A,T,C or G
agacgccgctcctccaactaccgcgcttatgccacggagccgcacgccaagaaaaaatctaagatctccgcctcgagaaaattgcagctgaagactctgctgctgcagattgcaaagcaagagctggagcgagaggcggaggagcggcgcggagagaaggggcgcgctctgagcacccgctgccagccgctggagttggccgggctgggcttcgcggagctgcaggacttgtgccgacagctccacgcccgtgtggacaaggtggatgaagagagatacgacatagaggcaaaagtcaccaagaacatcacggagattgcagatctgactcagaagatctttgaccttcgaggcaagtttaagcggcccacccttgcggagagtgaggatctctgcagatgccatgatgcaggcgctgctgggggcccggcttaagagtccctgacctgcggcccacctcaagcaggtgagaaggagacacngagangaaaacccggagtggagactgcccacgaca

SEQ ID NO: 4478 - DNA, 465 bp, Homo sapiens
cccacgcgtccgcttagcggctgctgttggttgggggccgtcccgctcctaaggcaggaagatggtggccgcaaagaagacgaaaaagtcgctggagtcgatcaactctaggctccaactcgttatgaaaagtgggaagtacgtcctggggtacaagcagactctgaagatgatcagacaaggcaaagcgaaattggtcattctcgctaacaactgcccagctttgaggaaatctgaaatagagtactatgctatgttggctaaaactggtgtccatcactacagtggcaataatattgaactgggcacagcatgcggaaaatactacagagtgtgcacactggctatcattgatccaggtgactctgacatcattagaagcatgccagaacagactggtgaaaagtaaaccttttcacctacaaaatttcacctgcaaaccttatacctgcagaattttccttt

SEQ ID NO: 4479 - DNA, 516 bp, Homo sapiens
  misc_feature (1)...(516): n = A,T,C or G
cggacgcgtgggctgaagcaaaaatattaacattcatcatattgtttaaacaagtctcaggatttcctaatgtcattgaaaatgttcagaatagaattcaaaataatttatcaaatgaaaagccatgaaaatgttaacttgcatggaaaaaggtagccatggtgccagtgacaagacgatgtagattttgggatgatctgacaaaaactttaaagcaactgttataaatataactgaaaaagcaatgacaaacattcttgaaacaaatgataaagtagtatctgcaaagaaacagaagatgcaaagaagaaacaaatggaatttttaacattgaaagttaaaatacctgaaattgtcccactggaaaacaggggagaaagatagagaaaaataaacagagcttcagggaactgcggaacaataactaaagggcttacttgtgtgtcattagagtctcaaaagggaaagagaaagacgcagtgctganacacatttgagaaatatgcttaaatttcn

SEQ ID NO: 4480 - DNA, 573 bp, Homo sapiens
  misc_feature (1)...(573): n = A,T,C or G
gcgtgaattgtgactagttacacgnccgcaattnccgcnncgacccacgcgtccgcagatttttgaaacacttattttaaaccaaattttaatttctgtgtccaaaataagttttaaggacatctgttcttccatacgaaataggttaggctgcctatttctcactgagctcatggaatggttctgcttatgatactctgcacgctgccttttantgagtgaggagtttggggttgcctatcaacttgctaacttgtaaaaagtcatctttccctcacagaaagaaacgaaagaaagcaaagcaaagtcagtgaaagacaatctttatagtttcaggagtaaatctaaatgtggcttttgtcaagcacttagatggatataaatgcagcaacttgttttaaaaaaatgcacaatttacttcccaaaaaagttgttacttgccttttcaagttgttgacaaacacacatttgatattctcttatatngtatagtaatggaacgtataaactcaagccttntatttctttgtgataaatctgttttaaatgcacaaacaggaccatcatctaata

SEQ ID NO: 4481 - DNA, 414 bp, Homo sapiens
cccacgcgtccggaaacatcaagagatatgacatacatgtagctctggggtagcaagaactagacttcctcaatttggattccatttccttctgccatttgcttttaggcaattgagtgtgggtagtgatgagatatcaaatcccttagtgtttccattttgggaaatgaggcactatttttttttttaaaagacaacttacccacctgagtcctgaaacagtttgtctctccagttttctggcctatactctagttagctctgatccaagtttacaggacaacagccttgctttaagccatgtcctgttgggggcacgataatagcaactgagctgtcacagcctaccagcaggctggtaacacctccagggtctcttggctagagcagatttcttagcagctgactaggact

SEQ ID NO: 4482 - DNA, 441 bp, Homo sapiens
atgataatgaatgtatcagtatttttaaaacatgtcttcccaaaaaaagaaagaagctagacacagattttttcctacctttcattaaaaaatataaaatgggtcatagacctactgtaaaatgcaaaattataaaactcttagaagatagcattagacaaaatctatgtgatattgagttttggcagtgacattttagataaataccaggagaaaaaagaaatagtaagttggatatcattaaaaggtaaaacctctgctatgtaaaaaaaaaaaaaaaaaaaaaaaaaagaaaatggccggcgattttttggaaaattttttgggaaaaagcctttttcgttaggggttggcccccccccaaaaataaaaaatttcttttaaaaccttaaaaaagaaaaaaccccctttaaaattggaccccgggttgaaaaaaacccc

SEQ ID NO: 4483 - DNA, 516 bp, Homo sapiens
  misc_feature (1)...(516): n = A,T,C or G
cccacgcgtgcgccgcatgcttctgcctggccgccgccgcctataagctaccaggaggagctttacgacttcccgtcctgcgggaagcggcgggcacgatcgcaaggtagcgcagaagcttgtcaatggccagcgccagctgcagccccggcggcgcactcgcctcacctgagcctgggaggaaaattcttccaaggatgatctcccactcagagctgaggaagcttttctactcagcagatgctgtgtgttttgatgttgacagcacggtcatcagtgaagaaggaatcggatgctttcattggatttggaggaaatgtgatcacgcaacacgtcaaggataacgccaaatggtatatcactgattntgtagagctgctgagagaaccggaagaataacatccattgtcatacagctccaaacaacttcagatgacttttacaagtacacagattgtactgtttgcttacattgctataacaacttgtataaaagttgtacgacgatctgactgn

SEQ ID NO: 4484 - DNA, 395 bp, Homo sapiens
gagcttaagtgaagaggtacgccttgttcggtggaaatcagccgtagccatgagtttctgccggggctagccctagagtacggagcaggcggacttttcggttccccgccccgccaggtggcggggcctactaagcctccgggcatccccggtctcaagtaggcctcatctgccggcaagggcgcccgaaacgcgggaggcgccatgtcgctggttgcttacgccagcagcgatgagagcgagccggatgaggctgagcccgagccggaggaagaggaggcggtggctcctacatctgggcccgctttagggggcttgttcgcttctctccctgcgcccaagggtccggccttgctgcttgagaatttgaaatgctggcgccagccttttccccg

SEQ ID NO: 4485 - DNA, 390 bp, Homo sapiens
gacggagccaagatggcggcggccgacggcgattactcgctgtaccccatcgcggtgctcatagacgaactccgcaaggaggacgttcagcttcgcctcaacagcatcaagaagctgtccaccatcgccttggcccttggggttgaaaggacccgaagtgagcttctgcctttccttacagataccatctatgatgaagatgaggtcctcctggccctggcagaacagctgggaaccttcactaccctggtgggaggcccagagtacgtgcactgcctgctgccaccgctggagtcgctggccacagtggaggagactgtggtgcgggacaaggcagtggagtccttacgggccatctcacacgagcactcgccctctgacctggaggcg

SEQ ID NO: 4486 - DNA, 389 bp, Homo sapiens
  misc_feature (1)...(389): n = A,T,C or G
ctgatgcacacctcactaacacccatgcattcaactgagacactgaaatggatgagctttaggaataagagtcacacttttcaataagagcctattgtagaccaacctgctaaagcctaaaagcaaaccctgacaaattcacacaggggtggattgaagattgagtcctgccaaaatataggggcttgggaaatgctgttggctgtccatgaatccgtggaaataaaacataaaccagtccacataagtccaaagtgatcacacagtaattttactgcccactagaacaaaattaattcacacaatcaatgacacatgtagccaggtcgatatttaagcaaaatacatctaagaacagctaacaaataactcttctcaaactcttaaan

SEQ ID NO: 4487 - DNA, 415 bp, Homo sapiens
gccgcgcaagtgcacttgcgtgtcaccgttaccgtagcgactgggcttctggactgtatatcctagctgccttgtcaacatcttcgagcatcggcagctccggaggccggggtaactggcagcaggtaggaaactatgtgaaagaatctcctgatgtcataatttccgggtgtcaccggaacatttgatcatcattcctttggcaattccagccttctgtggaaaggccagtagaaagcattgatttattcacctctacaggaatcagactcagcctcttttggttttcagtgaagtatgccttttcaatttggaacccagccaaggaggtttccagtggaaggaggagattcttcaattgagctggaacctgggctgagctccagcgctgcctgtaatgggaaggagatgtcac

SEQ ID NO: 4488 - DNA, 397 bp, Homo sapiens
  misc_feature (1)...(397): n = A,T,C or G
accacgcgtncgtgatatttggcgttgtagatcatttaaaacaacacttgctgaccgaccacactaatcccaacttccagactctgaaatgtcgctggaagaactgcgatgcttttttcactgctaggaaaggatccaaacaggatgctgcaggacatattgaacgacatgctgaagatgacagcaaaattgattcatgaagttttttgcctcccacgttgggaagtcattagttgaactattttcacattggccccccacacaggccactctcttccctttcttggtgaagtaaggaaggagaaagtggttactagccaggcatacccctagcataagtctgggcagctctatgggatgataaattacacttttaagttcttgctggaggttttaa

SEQ ID NO: 4489 - DNA, 423 bp, Homo sapiens
accacgcgtccagagcttcccttggctttcgatactgtgcaattcttaatgctgtgaactacatctgaacagtactagcagattgggctgacaatgtgttctttctacaacttcaacaggctgcactgggggaggttgcatagaatagtactctgagtaaattggagctaggacagctagcctatatggagagctctgtctttgatgacatgattaacctcttagaacgtttaaagcatgatatgttgacccgtcaagaagaccacgtttttacagaagttaaagatgctgctaaattgtataaaaaagaaagatggttgtccttgccatctcagtcagagcaggcagtgatgtccctgtccagttcggcttgcccgttgctgctgacgttatgagaccatttacttcagttggagcgcagct

SEQ ID NO: 4490 - DNA, 424 bp, Homo sapiens
catttgggaaacaaaaggagaattttacagagagagagggatagctaaaactacgtgagcctggcgagggtgcagagcataaagtagagactgtccgaagactgctatctgggacgagacaagttgttaaagggacaggagagaaagcagagctatttcaagagtgagccacagaagggaatccagaggccatctaagcgaggaagggtctacaggcagtgagtgaaggccaggagcagggcccaggccaggcacgaccaccgaggggatgaacttcacagtgggtttcaagccgctgctaggggatgcacacagcatggacaacctggagaagcagctcatctgccccattgcctggagatgttctccaaaccagtggtgatcctgccctgccaacacaacctgtgccgcagatgtgccaacg

SEQ ID NO: 4491 - DNA, 395 bp, Homo sapiens
  misc_feature (1)...(395): n = A,T,C or G
ctattgggaaaactaacaaattattatttcaacaaacctacaatacggggatacaatgaagataagcacaaaacaataagggagcaatgtggtctaattaccttgaaggaccaaaaggactgagtgaagtaaaatgttaaagtgtcaaaagagttacagaaaggggaaacagaatgagacaagacacacatgttttggaaattgcattctggcttctgcattaatgtcattacatttgctcttacaagatcactagaggcagtcacctcatattaatgcctcctgcagcttttgatgctttcctgtaacacccttcctctggtatctgaggcatcctacttggtttgtttctatctctcaagtcattcacagtcttgtttatggctctctttttn

SEQ ID NO: 4492 - DNA, 468 bp, Homo sapiens
gtgcggtacgcccttcttgatacccttacagtccaggcctgcaaaacccggccggaactaccgggacgacaccacgcgttcgtacaataaccagatagcctctgttttctttttcttttcttcggaatgagagactcagccataatagaaagaatggagaactattaaccaccattcttcagtgggctgtgattttcagaggggaatactaagaactcagttttctgtgcttggaccctctgggcccatcctggccatggtgggtgaagacgctgatctgccctgtcacctgttcccgaccatgagtgcagagaccatggagctgacgtgggtgagtcccatcctaaggcaggtggcgaacgtgtatgcagatggaaaggaagtggaagacaggcagagtgcaccgtatcgagggagaacttcgattctgcgggatggcatcactgcagggaaagctgctctccgaag

SEQ ID NO: 4493 - DNA, 395 bp, Homo sapiens
  misc_feature (1)...(395): n = A,T,C or G
actacgccatgttggggtttgtgggtcgggtggccgctgctccggcctccggggccttgcggagactcaccccttcagcgtcgctgcccccagctcagctcttactgcgggccgctccgacggcggtccatcctgtcagggactatgcggcgcaaacatctccttcgccaaaagcaggcgccgccaccgggcgcatcgtggcggtcattggcgcagtggtggacgtccagtttgatgagggactaccaccaattctaaatgccctggaagtgcaaggcagggagaccagactggttttggaggtggcccagcatttgggtgagagcacagtaaggactattgctatggatggtacagaaggcttggttagaggccagaaagtactggattctggn

SEQ ID NO: 4494 - DNA, 413 bp, Homo sapiens
taagaacactttgatgctgttttatttctacagaaaaatgtagcagcactgcctaaacaagaggttatacaagaagaggaagagataatccatgaagataatgaatggggtattgagctggtatctgaggtttcagaagaggaactgaaaaatttttcaggtccagttccagacttacctgaaggaattacagtggcatacacaattccaaaaaaagcaagaagattctgtcactgagttaacagaggaagattctggtgaaagcttggaagacctcatggccaaaatgaagaatatgtagataatggactgggatatattgtatttctcatgttaaagcctcttcccttgaaattaaaaaaaaattttaactgataaaacttagggcaacattaattaatgtatattcttag

SEQ ID NO: 4495 - DNA, 414 bp, Homo sapiens
cccacgcgtccgctgctctgcccagagctgaagtctggccccaccatgagtcctgtgtccaggccggacatggctgggggaccaactactctggcaggatctggacccctggcaggggagtccagctgagagtggaagaggtggcggggaccagctgggcagatgagaggctgagcctcatccctaaccccctttcccagagcccctggtggtcctgaaccggcccctctatccctccgcaggcctcttgcctggggccactctcccaccctctcgatctgtatatcctccagtccaagattaaagaggcggactgtgaaaaaaaaaaaaaaaaaaaaaaagggggggccgttttaaaggatccttgggggggccaaagtttacccgggctggcaaggtattagttttttcctt

SEQ ID NO: 4496 - DNA, 409 bp, Homo sapiens
caatttgcccgtgtttaataaaatcttgtgttaaattttgcatcacgtcgccttcctatgtgtgacgaagcaagaaacagagatttccaattgctcttttgccttcagacatttagtaatataaagtacctatttttatgctgaaatgtttatacaggtttattaatagcaagtgcatctaactggcggcatgccttgcaacacattttgatatattagccatgcttccgggtaaaggccagccccaaactccttatcttttgcagtctctctgggatcagtaaaagaaaaaaaaaataatgggcttaagaagagggactgcaaatatgcatatttaactttgtatagcccatgtacctaccttggatagaaaaataattttaaaaatttgaatggaagggggtaaagg

SEQ ID NO: 4497 - DNA, 460 bp, Homo sapiens
  misc_feature (1)...(460): n = A,T,C or G
atttgcctttttctttttcttgccttattcactatctgggtcttacaatacaaatttaaatgcaaatagtgagagtggatatgcctgctttgctttgtttgtgattttaggtagaaaacattaaatcttcaccattgagtttgatgttagctgtagattttttttataaccttaattggatgaggaagacttctattcctagttgttgagagatttagtgatgaaagagtgttgatttttatcaaatgttttttctgcatccatttaaataattatatggttctttttctgttttctattcatagagtagattatattgattgattttctgatgttaagccaaccttgcattctgagataaaccccacttggatatgatagatagtattctttttacatgttattgggtcttatttgctatattttggtaggaactttttgtttctatgctcatgagtan

SEQ ID NO: 4498 - DNA, 540 bp, Homo sapiens
  misc_feature (1)...(540): n = A,T,C or G
tgttattaccnccaggggnnnnttttgacgccgtggtgaggcccgtagcccggncgaccacgcgtncgtttgacaagttcaagcacctgaagtcagaggacgagatgatttcgtctgaggacttaaagaagcatggtgccactgtgctcaccgccctgggtggcatccttaacaagaaggggcatcatgaggcagagattaagcccctggcacagtcgcatgccaccaagcacaagatccccgtgaagtacctggagttcatctcggaatgcatcatccaggttctgcagagcaagcatcccggcgactttggtgctgatgcccagggggccatgaacaaggccctggagctgttccggaaggacatggcctccaactacaaggagctgggcttccagggctaggcccctgccgctcccacccccacccatctgggccccgggttcaagagagagcggngtctgatctcgcgtagccatatatagtttgcttctgagtgtctgctttgtttagtagaggtgggcacgacgagctgacggg

SEQ ID NO: 4499 - DNA, 464 bp, Homo sapiens
agaggccttgaatgctgtgcacagctttattgccgagaaggtccgagaaatcccacaagcgatgaccaagcctgaggtggtcaacatccttcaaccccaaaccacgatgaaccccgacagagccaagcaggccaagctgatcgtccccaacagcacggcgggcctgatcatcggcaagggaggcgccacggtgaaagccgtgatggaacagtcaggagcatgggtgcagctgtcccagaagccggagggcatcaacctgcaggagcgcgtggtgacggtcagcggcgagcccgagcaggtgcacaaggccgtgagcgccatcgtgcagaaggtacaagaagacccccagagcagcagctgcctcaacatcagctacgccaacgtggcaggccccgtggccaactccaaccccaccggctctccgtacgccagccccgcggatgtgcttccagccgcggccgctc

SEQ ID NO: 4500 - DNA, 430 bp, Homo sapiens
  misc_feature (1)...(430): n = A,T,C or G
atttatctttgaacaatctgagctttttgacttagagagtttcccacagtttggattttattcatacagtcctgttgtctgtttccttcagatttgcagctggattcagaggcttaattaattactcagacttgatctctttggtaaattgtgcccttatagtgttgtgttctttcattgaggaggcataaatatctagttgtctctttttttgtgacatataagaaaagataaaaggataaattcttgattatttttcccctccatttatttaccagtttttaagaccatgaacatcttctgaaagtgacccatagtttttattatggactcatgaattgaaacatgtttgatggggccaggcacggtggctcatttctataatcccagcattttgggaggccgaggcaagtggatcacctgagggtcn

SEQ ID NO: 4501 - DNA, 460 bp, Homo sapiens
  misc_feature (1)...(460): n = A,T,C or G
aattttctcattatatctcatccctgtctcagttggctgattcttacagattaacatcatgtctttggtccgatttgagtgtgacttcaaagataaaacatatcaattctacatataatatataaattacctattgaaaatgatatctgaaatagttgatattgactcaaaatgattattgcttttttcataataatcccatagggaagaaataaatcgtttcacttggataatttatgaaagtaaaaaatatttatgataattctatttaggtgatccacctgcctcgacctcccaaagtgctaggattacaggtgtgaaccaccactcttggccaatttacggtcattttaaaggaagctacatggtagaggtggttgaggagagtttctgaatttcgtcttcttggaaagttagttgttctttgtagagcatgctgactaataatgctatcctcccn

SEQ ID NO: 4502 - DNA, 469 bp, Homo sapiens
  misc_feature (1)...(469): n = A,T,C or G
cccacgcgtccgcccacgcgttcgcccacgcgtccgcccacgcgttcggaggaaaaaaaaaaaaaaaaaaaaaaaaaaaaaaaaaaaaaaaaaaaaaaaaaaaaaaaaaaaaaaaagggggggggggcttttaaaaaaaaacttggggggggcaaaaatttagggggggaaaaaaaaaatttttttttttttttaggggggggaaaaaaaaaaccccttggggttttttaaaaaaaaatttttttttgggggggggaaaattgggaaaaacccccccaaaaaaattaaggggttgggggaaaaaaaaaatttttaagggggagggggggaaaaaaaacctttttttgttgggggaaaaaaaannntgggncnnnnccccccgccccccgtggtggggggagtttttgggctcacccccttgttataaattttgggcttaaaaaaaatttgtttttaacgggaaagggga

SEQ ID NO: 4503 - DNA, 462 bp, Homo sapiens
  misc_feature (1)...(462): n = A,T,C or G
cggacgcgtgggcgctgaccagcatgatctaaaggtcccggttgcactttatccactgcctggtaccaaaccctgtggtggaaagcaggagtgggcaggaatctccaccaccaccgcagcctggtagagacaagcctggggcaggtggacctctggccctggatatcccagcactgagggtccagcttgctgggttccacatcctggaggctctgcgtctgcataggacaggctatgctgaccacatggggctcactcgcttccgccggcaattccaggtgctggacgctccactcctgaagaagctcatgtcgacctccgagggaatagatgaaaggaaggccgtggaggagctcctggagaccctggatctggaaaagaaggcggtggctgtggngcacagccaagtttttctcaaggcaggtgtgatctccaggcttgagaagcagcgagagaagctgg

SEQ ID NO: 4504 - DNA, 419 bp, Homo sapiens
aacagccagtggccagttcactgtattaaatggctctttttctttggaattggtcagtgagaaatactggaaagtgaacaaacccatggaactttattacgcacctacaaaggagcacaaatgagcctttaaaaaccaattctgagactgaacttttttatagcctatttctttaatattaaagatgtactggcattacttttatggacagatcttggatatgttgttcaattttctttctgagccagactagtttacgctattcaaatcttttcccctttatttaagatttcctttttggaagggactgcaattattcagtatttttttctttcctttaaaaaaatatatctgaagtttcttgtgtttttttttttccccacaaagtgtgtttccacttggagcaccattttgaccca

SEQ ID NO: 4505 - DNA, 408 bp, Homo sapiens
gagctcaggatagagaagaggaaacaggaggaggaggccagaatggcacagaagtaggggaagatgggataggacaggctgggaacaggtaatcaggcccctcccagggcttctttcccctctggagtgcctccggcctccccatccacctctgcctaagtaaatctgctctcaacctatatatatacaagggcattcattctagcattgtttgcaagagtgaaagagtggaaacacccgaagtgtccatcagtaagggacaggctagattgattacggatgtaattgctgtccatccatacagagcatactctacagtgtattctaaaataagactaaggaagctgtttatattctgatatgaaactaccatcaagatgtataaaggaaaaataactaaggagtggg

SEQ ID NO: 4506 - DNA, 475 bp, Homo sapiens
  misc_feature (1)...(475): n = A,T,C or G
agcaaaactcaaaaatatttacaaatattttacacccaactagataaaatttatgatatatagcatccggtaattttcaggcacacaaagaagcaggaaaatatgatctataatgagaagataataatcataactgtctcaaaactgacacagaggttagaattagcagataaatacattaaaagttttatgtaactatttcatgtgttcaaaagttaagtaggaatatattaaacctctaaagactcaaaaatgaacagaatatctgagctgtgggaactttaagtagctcaacatatgaaatttgagtccctgaagtagaggagagagaaagcatgatagaaaaaatattggaagaaataatggctgagatttttctggatttgatgaaaactataaacccacaccttcggaatctccgtgaacacaaagcataggaaacatgaagaanattacaccaaggcacattatattn

SEQ ID NO: 4507 - DNA, 393 bp, Homo sapiens
tagatactgcttttccattttgcagatgaggatgtaaggcacgggagttacgtgtgacttgcccaaggctgcatccttaacgaagggcagaactggaatgcaaaccgtggaggtctggatccagagcctgggggttaatcctaccctgctatgccgctatagctcgcggatccagtacagctcatctgtgtgatccactttcaaccagagtgcaaccgagggagagaacattacctcttcacaaaatcttgtcattgaatgcttttaaagtcagctaacatgaattctgacgagaggatcaggaaaaatgtaggcctgtcataggcacaatttccccctccttgaaaagggcagaggaaactacaaagcaccaaaaaaataccaagtttatgt

SEQ ID NO: 4508 - DNA, 526 bp, Homo sapiens
  misc_feature (1)...(526): n = A,T,C or G
agtccttctcactatcctcctctcatgatcttccctactcctcctatctgattcgtggcttactctttttatttatggaggggcgnnnnnnccttgatcccttggaacccccggaatcgggcgaccaccgccgataaatcaaatgcatatttacgaaaatactatatgacaaaaagggaatgaagcatggaatgaagcagcagcatgtttatgttcacaagaatcattcatatctgttaaaaaatatatgtagcctcacagatgctactgtgttttgatacaaatttgtgctttgtattattatacagtacttttttgtttctcctcaattaccttaccttgtttgccaagaatggggttcttggggaggctaatactgagatagaattaggagggcaagggctttttggaggcaggaaatctaatgcccatgtaagataaaaggggaggaagcaggattgaacagggaaggctttcagagcgggatgttgatctgacacttgtgaaaggaaagggaaccagaggg

SEQ ID NO: 4509 - DNA, 462 bp, Homo sapiens
  misc_feature (1)...(462): n = A,T,C or G
aatcctgctgcctgctgagaaacatggtctgcaagtcccgctggaagctcctggccatgttggctctggtcctggtcgtcatggtgtggtattccatctcccgggaagacaggtacatcgagcttttttattttcccatcccagagaagaaggagccgtgcctccagggtgaggcagagagcaaggcctctaagctctttggcaactactcccgggatcagcccatcttcctgcggcttgaggattatttctgggtcaagacgccatctgcttacgagctgccctatgggaccaaggggagtgaggatctgctcctccgggtgctagccatcaccagctcctccatccccaagaacatccagagcctcangtgccgccgctgtgtggtcgtggggaacgggcaccggctgcggaacagctcactgggagatgccatcaacaagtacgatgtggtcatcagat

SEQ ID NO: 4510 - DNA, 473 bp, Homo sapiens
  misc_feature (1)...(473): n = A,T,C or G
agtggctnaactgagactgaaggcatggcacggaacctcgggntgacccacccgtccgctgacgcgaacaatggcggagctgggcgaagccgattaagcggttttgcagcgcctggtggccgccgagcagcagaaggcgcagtttactgcacaggtgcatcacttcatggagttatgttgggataaatgtgtggagaagccagggaatcgcctagactctcgcactgaaaattgtctctccagctgtgtagaccgcttcattgacaccactcttgccatcaccagtcggtttgcccagattgtacagaaaggagggcagtaggccatcccccaggagaatgacagaagcaaaggacttgttactaagcacatttaagggtgagtgggggaagggctatcaacccatttgcagatcagcattaggctgctatcaaatctgttggcgctaaaaagtaaaagatgaaatgttcaan

SEQ ID NO: 4511 - DNA, 428 bp, Homo sapiens
tagccccagactttgctcatttccttcatgtaagcagtggcttccttggaggcctcttcccttccaacatggtgaaaccccgtctctactgaaaatttaaaaatttgctgggtgtggtggtgcactcctgtattcccagctactcaggaggctgaggcaggagaatcacttgaacccaagaggctgaagctgcagtgagccatgatggcactactgcattccagcctgggcaacagagcaagaccctgtctcagaaggaaagaaataaaaaatactgggcggccctgtttaaaggacccttagggggcccaacatttacttacctatccgaggatatgcttttttccttatggggagacgaatgctcacctaactggtcatttttgggagggacctttatttttggggggggatatactggcacaacc

SEQ ID NO: 4512 - DNA, 414 bp, Homo sapiens
  misc_feature (1)...(414): n = A,T,C or G
attttccaaattttgtaccagaaccttgaggatgcttgtctctcgcgcgcttctccgcagaccgaaccctctccggaactcagagctgttcacccaagtcagcggaggaggcctcctgggacttgagcctgagggtggcgaagaaccctaggcagagatcatcaacttggtaccgatgagtgacgcggagcttgaacattccagcgacttgctccagggccactcccagttaagaggctgagtgttaactgcaagaggctgagtgttaactacgccgttggctccaggaaccgaaccgggtttggatacagacccagtcacaccatccatgaaaagctgtttctataatatgaaaaattgttaaatgacgctttagtaaaagccatttaaagatcttttctaataaatttttcn

SEQ ID NO: 4513 - DNA, 395 bp, Homo sapiens
taggaaggagagacttgatttgggggtcagtaggctgagctgccagagccaggggaaagtgagagatcgaagatgtagaaaaaatgctgagaaatgtatgaaacatggttcttaggaaggcgaagaagtgggatcaaaaatgcacaaaagtattactgatcaggagattttatgctgagtgattgaaagtttgaactgaggtctctgatcacaaatggcatagatcagatgtgggcctcagggagattaatttcgcagcagtggtaaaataacagattactggaggctaaaggaggaagataaaagattcagaaggttttaagtacgggttgtggaatggctgaagagagtggtaacaataacaacaacacagctacgacaaggaaaaaaaaaag

SEQ ID NO: 4514 - DNA, 391 bp, Homo sapiens
atttttctccaacccctgctccattttcttataatattttccagttaataactagatgctttatttcctagctgaagtgagaaagcctgcggataacaatacagatttgggcagaggagatagagttacatctttaaaggagtgagccagtcacccacgagaatcacatgtgtaactgatgtacgggtttaagtcttcatactttcactaagatctgtctactaactctcccaccaacctttgcatcaaacacttacgtacctgcctgattaggggggcccctttaagggaaaaaactttgaaaaaattaaacgccttggttttgttttatcttctgggaaagaacacttttacttgattagcaggatgattatattatataacttgccct

SEQ ID NO: 4515 - DNA, 468 bp, Homo sapiens
  misc_feature (1)...(468): n = A,T,C or G
ggggaggcggnttttnnnaaatgaaagctgaggacnctgcnacgaancctcgggncgacccacgcgtccggtatacacatgtaacttggaatttccttcatccctacatattttctacacttacatcaccttattgcataaaacaaagtcacgcgctttctgcttgaacatcaaaatatcaaaaaccaaggtacccaaaagatacaagtcagagacaacatccttgtccatatccaaacccagtgtttcagtgctagcaacttaatttctcatacatttatagagtttggtttggtttgctagttgtgtgaatcattgggctgtttttagagccactgttaagagagaatataaaataatcatgacaattactactgtttccacatttacaaattgtgtacttaaatgaacctcatttcccttttatttctgaatggcttgtctgagaggaaacaaaattaaaattcn

SEQ ID NO: 4516 - DNA, 395 bp, Homo sapiens
  misc_feature (1)...(395): n = A,T,C or G
aactaacttatcagctgtaaaactgactagaaattttcctgcattcaaccactctagcttaatacctgtctggcatataataagtgctcaataaatatttctgacagaacactaatggggtaaattttcccttccttgcccgcaaccataattatatgaatataatggacacagttgctgcataggttaacctcaagaaagctggcagggaagacacaccaaacagaaagaattccatgcgatgattgctacttacagaggcctatacaaatctaggggtttggaaaagatgtcacagagagattgactctgagcttacttcaagaagttggggtttgcccaacagagcagcacaaggagagaattcttggtcgttaacataccaattgcatttn

SEQ ID NO: 4517 - DNA, 451 bp, Homo sapiens
atccccaggatctccaggctctcctggatccgtacctaaaaatacatctcagacggcagctattactacaaagggaggcctcgtgggtctggtagattatcctgatgatgatgaagatgatgatgaggatgaagataaggaagatacgttaccattgtcaaagaaagcaaaatttgattcataataatggcaacggcctaggatcagtacctgttgaaaaaaactggttctccacccctcccccatacaaaatccacaaaaaagcgcagtggtctcttgtgaatgactgacacagatcagcctcttacacttgacttctgctcatcaagtgccaattcaatggagcaggaggaggggatatcatatatttaggggaaagacttaagcctttgagctctccagcttggaccacacattggccttttctcagggaaggaaatggaaacaaaaa

SEQ ID NO: 4518 - DNA, 456 bp, Homo sapiens
  misc_feature (1)...(456): n = A,T,C or G
nttgaaccccttgaacacctgcgaaaccccggcgcgacccacgcgtccaaacaaaagcngcggnccctgtgtagtgaacacagctcatctggagctcagcatgcctctgtctcactggagacctcactaagcatagagagcactgtcacaccaggcataccaactactgcagttgcaccaagcaaacttctgacttctaccacaagtacttgcttaccaccaaccaatttaccactaggaacaggtgctttgccagatacaccagtggtcacacctgggcaagtttctaccccagtcagcactactacattaggagtgaaacctggaactgctccctccaagccacctctaactaaggctccagagctgccagtgggtactgaacttccagcaggtactctacccagcgagcaggtgccaccttttgcaggaccttctctaacccagtcccagcac

SEQ ID NO: 4519 - DNA, 409 bp, Homo sapiens
cccacgcgtccgggcgacacccagcctgcggggtcgtctggcgcggtttgggaacccgcggaagcctgtgctgaagcccaataaacctctcattctagctaaccgcgtcggggagcggcgccgggagaagggcgaggcgacttgcatcacggagatgtcggtgatgatggcttgctggaagcagaatgaattccgcgacgatgcgtgcagaaaagagatccagggcttcctcgattgtgccgcgagggctcaggaagcccgaaagatgagatcaatacaggaaaccctgggagagtctgggagtttacttccaaataaattgaataagttgttacagaggtttcctaacaaaccttacctcagatgaaaatggactagtcttttcaatgactgagatatagcttctgac

SEQ ID NO: 4520 - DNA, 396 bp, Homo sapiens
  misc_feature (1)...(396): n = A,T,C or G
cttgccgcagtactcttaaaactaggcggctatggtataatacgcctcacactcattctcaaccccctgaaaaaaaaaaaaaaaaaaaaaaaaaaaaaaaaaaaaaaaaaaaagggggggggccctaaaaaaaaaccccggggggggccaaaattaaccgggggaggaaaaaaaaaattttttttctaaaagggggggaaaaaaaaacccccgggggaattttggaaaaaaaaccttttttgggggggggaaaaaaagggaaaaaaccccccaaaaaaaaaaaagcccggaaggaaaaaaaaaaattttaaaggggaaaaggggaaaaaaaaccctaaattgggggggttaaaaagaatttgccccnccccggcatngaaatttataaggaggcag

SEQ ID NO: 4521 - DNA, 393 bp, Homo sapiens
aactaaatgaaataaagtagtgctgtattaaatctttttctcatttagtgaggtgcctccatatagtatatatatatgtatcttaagtgatatgtaacccaaatgtcactattttaatttactgtgataaagtatcatggatattttgtgctgctgttatgctttttgtgttgcataaaatatcttgtaaaaattagatggataaatgaattattaaaaaatcacatttctgaagatgtaaagtattagggaattttgtgctggaaaaacatttttgacattcaaggatgcctattttatcttctagcaaatttctgtggtccctggaaaagtacagatgatcctggacttacagtggggttacctcccaataaacccattgtaagttgaaag

SEQ ID NO: 4522 - DNA, 424 bp, Homo sapiens
  misc_feature (1)...(424): n = A,T,C or G
catccctgagaatccaaaattctccgtgccacctatcacaccccatcctaaaacaaaaaaagacgaacaaccccgggggggggggccctcttaaaaacacccgttgggggccccaaattaacggtgagggcagacaaaaagatttttccctttaagggggaaggaaaaacccctccccgggcattttaggaaaaaacccatactttgggggggagaaaagaggggccgccccccctccacattcttaacgcctagagggaacaacccatatttatatgcaacgggctaaacttcctacgtgaccgcgaaataaaaaaactgnnacaagcaaatgctgagagattttgtcaccaccaggcctgccttacaagagctcctgaaggaagcactgaatatggaaaggaaaaactggtaccaggcactn

SEQ ID NO: 4523 - DNA, 476 bp, Homo sapiens
  misc_feature (1)...(476): n = A,T,C or G
ggggatgagcngggnnnnnnnncctagatcgactgaaggccntggccacggaaccccgggtcgacccacgcgtccgcatgactgcctgccaccattgcttttcagactaccacaactcaatcatgctgtccaggacttctggccctgtgttcaccactgggaaaacgtacttcagactggatagcctaaaaaggagcaatgcccttgtaggatgtggagaagggaaaatacggacattaacattaaaagacaccagtgaaattgttaggtctctaggaagttggagcacaaggcttcacgctttaagaccatctgtggttttcagtgaacaagcgctgagcaccagcagcagaaaacaacatccccnnnnnnaaaaaaaaaaaaaaaaaaaaaagggggggcccttttaaaaaatcctttggggggcccaaatttaccgggggttggaaaggaaaaattttttcctttaaggggag

SEQ ID NO: 4524 - DNA, 463 bp, Homo sapiens
  misc_feature (1)...(463): n = A,T,C or G
attagaaacgcccctagatatacctccggaaatcccggcggagaccccgcgtngagcccaccggtcgacncctctgccgtcaagacctattttcagtctttttcaaaagggttctgaggtccatgccaagaagacggtgatgatcatgaccatcgagacacgggatggggaggtcgtctgtgaggccacacaccaccagcatgaagtgctctaaagacagagaccctctgccaccagagaccgttctcacccctgtcctcactgctccctgaagccagccttcttccatcctaggacaccacacccagcctcagtcctcccctcacagcctctgacccctcctcactggccatccctcgtggtccccaacagcgacatagcccatccctgcctggtcacagggcatgccccggccacctctgtggaccccagctgtgagccttggctgatgccagtgagtgat

SEQ ID NO: 4525 - DNA, 415 bp, Homo sapiens
ctggaagttaagcaatactttaatactgtaatatgtttgttttctttttctttcttttttttctaccaaaaaaaagtaagtaaactaaaacacaaaaacatataaataaaatccatccctcttgtcggggacctgcaggggggcaaccttaatccaaacacctggctatcaaataatcagaatgtattgtctcagacaggatttcagttccgggaggcaggggcatgatgggggagggggccggaggctgaaagacaaaagttccagagcctccctcgaaggttctctactactgtattctgtacataatgtaccatcccatgtggaatctgtgagtgtcctcttaagtagcgtgggctagccaatctgccgttcatggtgtattgtaaactccgaattccatatgtaataggaa

SEQ ID NO: 4526 - DNA, 403 bp, Homo sapiens
agattatttgagggacactcaactaatacacagcttctgagaaaagagatggtatacgagcccttgtcaggctgcccttctctttacacagaagctgtgtattatttgagggacactcaacctttggctaggggcatagaatgagttcctttgctgaaacatacctcctttctatgtattgcctacttttatgaggaccattggtggataaaggaaaatacaggcattttcagtgagctacctaaacccgattaccttggattttttctttctttttcttttgctcaggcagtggctatatctaattaaaacaaagggacctggcaagcgttcagataactcaagagtggtgtattcatctgatggacggatttaaatagcttggttgttgacatttatcaaa

SEQ ID NO: 4527 - DNA, 476 bp, Homo sapiens
  misc_feature (1)...(476): n = A,T,C or G
ggccggnagggnccgctgaagcctgatgatagcatgcagaaccgcgccgaaccacgcgtgcgaggggagcgactgaatgttttgaccttcctttatactaatgatagcgctttagaatgagaattatgcctgaaatctggcaaaccgaaaaatgttgctattgcaacaaagtggcaaaagctaaaagtaaggatttatcttcaaacataagctgagataacgaatagaagcaaaacgattggctactagctctctctctctctctctattaggtaaattggaaaaataaaaatgacttggcacttttaaaggtaacttcaccaaagaccgaagagccagtaaccagtagctccaacttgtctcagcatcacatcttctgtgctctttatttttgccggaccagttcgcggttaggagaatgtgccttttttgtacctttgcatttaggctatataattntaattgatgtatggaca

SEQ ID NO: 4528 - DNA, 419 bp, Homo sapiens
  misc_feature (1)...(419): n = A,T,C or G
agggcagcaagtggcctgggtcatttgcgcagtgctcgcgagctcaaggcttctcggttaggggaggtgcagcctgctctgaccagtcaggatatggaacttggaactctgggacaaatagaggcaagtgtcattcctgtgattgctgtcctgtcccttggggttgtcctggctgtgtttctctgccactgccctgcttggccaaggttgggagtggggagggggcatgtttctggggttacctactccttaacaggaggccctcatcagaatgaccagggcccatctagcttcagtggctagggtcttctctctctgtgacagaagatacccttgtatctgtgtttgtctctgtctctgtctgcctcccctctgcctgcccccaccatctgtctgtctctgtctccctcactgcaggn

SEQ ID NO: 4529 - DNA, 389 bp, Homo sapiens
  misc_feature (1)...(389): n = A,T,C or G
ggtgtggctggttcgttcattcattcattcattcattcaaaaaatgattgacctccagtcaaggtgctcaataggatggtggtcatggccctaaatgacacagacgatgtcctcatgcaaccttcaagccattagtatctggctgctctctccccagctttgccacgttccccccgtgtaactatgggcaagtccctcccttgtaaagataataataatagctattatttattaggcacttactatatcctgggtctgtgagttaagagtgttacatgcactatctcactaaatcctctcatagccaggcttggtggtgcacacctgtagtcccagctaccaaggagggtgagatgggaggattgcttgagcctgggagttcaagactn

SEQ ID NO: 4530 - DNA, 399 bp, Homo sapiens
  misc_feature (1)...(399): n = A,T,C or G
cggacgcgtgggagaggactggcccactctccccatttaccagacgactggggcctccacactaaggaggggcagggctggcagtgacgagggaaacctctcgctgagggttggggcaaagtcacccctggaaatcgaaggggccgctggtggtctcttgaggtccaccagcctcaaatgcatctcttcagacggtgttgggggcacaaccctactccccgaaaagtcgaaaacccgattcagttcctgtgagtccctcttagaatccagaccgagcatggggagaaaactgagctctccgaccacacccagggacatgctgttgtcgcccacactgcgtcctcggaggcggtgtctggagtcctctgtggacgatgcgggctgtccagaccttggaan

SEQ ID NO: 4531 - DNA, 415 bp, Homo sapiens
  misc_feature (1)...(415): n = A,T,C or G
tcgcaccaaccctgagagccacacctaaagagatactttgatattactcaacgcagccctgctttgggctgccctggtgctggcacactacaagctcttatcctttcacaaccttctgtggctcacaaaacccttggagccaatggagactgtctcaagatggcactggtggcccgactgcctggcacagggcagtgggacagggcatgggcaggtggccactccaaacccctggcttttcactgatgctgccttanaacctttcttacattagcagtttgctttgtatgcactttgtttttttctttgggtcttgttttttttttccacttagaaattgcatttcctgacagaaggactcaggttgtctgaagtcactgcacagtgcatctcagccccatagtgatggttcccc

SEQ ID NO: 4532 - DNA, 412 bp, Homo sapiens
  misc_feature (1)...(412): n = A,T,C or G
acagcagaaccactctggttgaggctctggactgcatcctaccaccaactggtacaactgacaagcccttgcacctgactctacacgatgtgtacaaaactgccgggattgggactgttcctgtcggcgcgaacggcgacttgtgttctcaaacccggaatggtggtcacctttgctccagtcaacgttacaacggaagtaaaatctgtcgaaatgcaccatgaagctttgagtgaagctcttcctggggacaatgtgggcttcaatgtcaagaatgtgtctgtcaaggatgttcgtcgtggcaacgttgctggtgacagcaaaaatgacccaccaatggaagcagctggcttcactgctcangtgattatcctgaaccatccaggccaaataagcgccggctatgcccctg

SEQ ID NO: 4533 - DNA, 403 bp, Homo sapiens
  misc_feature (1)...(403): n = A,T,C or G
cccacgcgtncgcaaagtttatagaatactgaaacttgtaacaattacctctctacgtgatgctgtaaggaatcttgctaatttggtaggaagaggaagcatttatgaaagggtttagtatctaccaaaagtacttgacctcaagtaaccaatagtaatgcaaacttgctttaaaggaaccaaaggcattgccaagtatttgccaaaaggaggcactttttatttaaaatttgagactaatgagatctcaaaaatcagccccaaaaaggtattatccatttaaggttataattttcactaagatgtagatatttctcttattngtttcatgtaaaatagtatagagttgttttgttggtttaagagtaacattcagtagtaatacaaagttttttttctatgt

SEQ ID NO: 4534 - DNA, 404 bp, Homo sapiens
agacgtcagcatctcaagggcactgtggtatggataaggacgccacatgagtaaattttaaaaatataaatattttaaagggtaaaaatgagggtccctgtatttgaggatataaaagatgaaactgaagaagaaaagataggggaagaagaaaatgaagaagaccaggtcttctataagcctgttattgaagacttaagcatggaattggccagaaaatgcacggaactcattagcgatatccgttataaagaagagtttaaaaagtccaaggataagtgtacatttgtgactgacagtcctatgctaaaccatgtaaaaaatatcggtgcttttatttctgaggcaaaatacaaaggcaccattaaagctgacctttctaattctctttataagcggatgcg

SEQ ID NO: 4535 - DNA, 400 bp, Homo sapiens
cccacgcgtccgcccacgcgtccggctgtgtcatcattccagttcttcaactccattggcagcagacagggagtcccagggagaaaaggctgcagatacaaccccaaggaagaaacaaaactcgaattctcagtctacacctggcagctctgggcagcgtaagcggaaagttcagctgctgccttctcggcgaggggaacagctgaccttgcctccacctccccagcttggctattcgatcactgccgaggacctagacttagagaagaaggcttcattacagtggttcaaccaggccttggaggacaagagcgatgctgcctcgaactctgtcactgagaccccacctatcactcagccttcatttacctttaccctgcctgctgctgcacctgcctcc

SEQ ID NO: 4536 - DNA, 600 bp, Homo sapiens
  misc_feature (1)...(600): n = A,T,C or G
gctctcgactaacaacaacatctcatcctaataagcgctaagctaatatttatgttcttcggtanncccnacccagggagagnnantttgatggcgtgggaattgacggacnncccgggncgacccacgcgnccgcccacgcgtccggaaaagggaaaannaagcactaaaaaggtatttttattttgccatacccctaacaacattttatttaaattatattgtgacttgattacaaatcttttaaatgacattattggcatatttttcttaaactttgtaagaaaaagataacatttcacattttagtagcaaaatcattgttaagagatagtcaattttgtgaaaatatttgagtgctaatcaatttttccaggatgatcttctatcctttaatatttagatacttccttttgaagcacttacatcatcatcaaatttttggtcatttgttggtcatctaatttctgtttcattntctaatggcttcgtatgtgaatgaattttagttattcctaacgtcattgtagccactcttttgaatttttttttaaacaagtctttcaatttattttaaacgaaatttgattgatatagaga

SEQ ID NO: 4537 - DNA, 487 bp, Homo sapiens
  misc_feature (1)...(487): n = A,T,C or G
ttatgcaataaaatgtctctaacctgcgaacaaatctatcaagcagacggcacagtactgaatttgaaaccagaaatactgggtttttatataaatgcttcatagatttgttttatgataaagggcacataactctcctaaacctcacaccacctcttgaataggtataataagtccacatcaatgctgatgccttagctattattaaactcttacagtatgatgtaaagtgaaagtacaatgtaagatcattcctaggccaactttgaccagttttatacagaaacatgtgccaacttttctgtttgcaaggataatatcaaagcaaacaccagaaagttatatctttgatgcatttttttcaaaatcatacacataatacacaaaccaaagacaaatgatgaatattatgtcagaaaatataaagtcttcccctttcttcttttgccaagaaagtccaatattttcaccattnttatgcacacan

SEQ ID NO: 4538 - DNA, 476 bp, Homo sapiens
  misc_feature (1)...(476): n = A,T,C or G
catttttttggaaacctctgcgccatgagagccaagtggaggaagaagcgaatgcgcaggctgaagcgcaaaagaagaaagatgaggcagaggtccaagtaaaccgctagcttgttgcaccgtggaggccacaggagcagaaacatggaatgccagacgctggggatgctggtacaagttgtgggactgcatgctactgtctagagcttgtctcaatggatctagaacttcatcgccctctgatcgccgatcacctctgagacccaccttgctcataaacaaaatgcccatgttggtcctctgccctggacctgtgacattctggactatttctgtgtttatttgtgaccgagtgtaacaaccatataataaatcacctcttccgctgttttagctgaagaattannaaaaaaaaaagataatacacaaaaaaccccanannannaaaaaagggggggcccgttttaaagttctcc

SEQ ID NO: 4539 - DNA, 400 bp, Homo sapiens
atttcatgtaaataaggcatctatattttcaacacttcccaccacataaagttgatgtccatcaaaatgaaaatctctgcttaaacatttcactgccttcccatttcggtgcattaagaattaattccaaaggccaggcgaggtggcttatgccttaatcccagcactttgggagtccaaggcaaatggatcgcttgaggtcaggagttcaagaccagcctggccaacatggagaaaccctgtctctactaaaaaatgcaagaattagcaggcatggtggcaggcgcctataatcccagctgcttgggagaccgagacacaagaatcacttgaacccaggaggcagaggttgcagtgagccaaaatggcactactgcactccagcctggaagacagagtg

SEQ ID NO: 4540 - DNA, 492 bp, Homo sapiens
  misc_feature (1)...(492): n = A,T,C or G
agaacccaggggcctttcgaanncctttgggctnagancaccnnccantnngggnagaaccacccgtccgcccacgcgtncgatgggagccaaggcacctcgggctgcgccaacgactcccagcacgaccccggtaaaatgtttatcgttggactgagctggcagacctcaccagatagccttagagactattttagcaaatttggagaaattagagaatgtatggtcatgagagatcccactacgaaacgctccagaggcttcggtttcgtcacgttcgcagacccagcaagtgtagataaagtattaggtcagccccaccatgagttagattccaagacgattgaccccaaagttgcatttcctcgtcgagcgcaacccaagatggtcacaagaacaaagaaaatatttgtaggcgggttatctgcgaacacagtagtggaagatgtaaagcaatatttcgagcagtttggcaaggtggaagatgcaatg

SEQ ID NO: 4541 - DNA, 402 bp, Homo sapiens
tccctgcggcgctaagaaggggagactgaggctgttgctgtggaacatctggcagcatgagcggctgcgggctctttctgcgcaccacggttgcggttcgtgcctgccggggtctggtggtatctaccgccaaccggcggctactgcgcaccatcccgtctgtacgagctttcgccaaagagcttttcctaggcaaaatcaagaaagtaacgcgagccctgcgcgaacccttgctgactggctcccgctttctaccctcagctgcaagactggtgttgaactttgtgagatttcccacacctgcctgagagatacaccctgcggccgaggcgtgttaacactacggatacctgagatccaggaaaaacttccctaataaaggacagacggtttcacatttcg

SEQ ID NO: 4542 - DNA, 399 bp, Homo sapiens
  misc_feature (1)...(399): n = A,T,C or G
tcgtagtgacttaatgtcaacactggttacagcaacacctgattcccagctattaacaatttttattagtaataataatgttgcttttgacaataggaaggagttgcagcatttgatgggaaaatccatgaaatgagctcctgccctactccttctagaatggaaccctcttcataataaggaggttcctgctgaccaaagcctgatccaggccaaggctcatctgttcctgtctctgtctatccctataaaactgtctcatgaagagagacctctgccaaagaaagatgcagagtaaagacacccatgatttaaggtctttgatgcacagggctgttagggatgtaagaaatatatggtgccaccccagagaaacaaagtgggaaggtcactctgacn

SEQ ID NO: 4543 - DNA, 398 bp, Homo sapiens
tagaagcacgtctcatgtatcacctttggctgggctgactttccccactccctggtgaaatttccaattctcttttatggggtctaaattctgatataaatattacattcatgccaggtgcccaacaaaattctctgtaagagttatgatagaatgacaaggtaatatacagaagaacaaaaatgaccgtttaaggaagaaatctgagaagaaaaatgactcctgctagagatgtacctactaaggcatggattccttccagtcattcattagagttcgtgcttgactctagctgagaatgaaagtaatgtggaactatcacttttaatggcaaaaacagcagtgacttttacaccaatctaatggttccatcccatcattaccttagattctaaact

SEQ ID NO: 4544 - DNA, 456 bp, Homo sapiens
  misc_feature (1)...(456): n = A,T,C or G
catgactgcatncgatcggcnccgcaannnngggtcgagccacgcgtccggccgcaaccaggcccgcgccgccaccatgtttcgaaatcattatgacaatgatgtcactgtttggagcccccagggcaggattcatcaaattgaatatgcaatggaagctgttaaacaaggttcagccacagttggtctgaaatcaaaaactcatgcagttttggttgcattgaaaagggcgcaatcagagcttgcagctcatcagaaaaaaattctccatgttgacaaccatattggtatctcaattgcggggcttactgctgatgctagactgttatgtaattttatgcgtcaggagtgtttggattccagatttgtattcgatagaccactgcctgtgtctcgtcttgtatctctaattggaagcaagacccagataccaacacaacgatatggccggagact

SEQ ID NO: 4545 - DNA, 493 bp, Homo sapiens
  misc_feature (1)...(493): n = A,T,C or G
agcaccctggtgcctttcgaannccagntttgaccgnagcagncncgcanttnggggagannacccgtccgagccggtcgacaccacaccatccggggagccgccgtttccgccgccacctctgagcagccggctgggagcgagagccgacagctagtctgcaagccaccgctgtcgccatggggagccgcgtctcgcgggaagacttcgagtgggtctacaccgaccagccgcacgccgaccggcgccgggagatcctggcaaagtatccagagataaagtccttgatgaaacctgatcccaatttgatatggattataattatgatggttctcacccagttgggtgcattttacatagtaaaagacttggactggaaatgggtcatatttggggcctatgcgtttggcagttgcattaaccactcaatgactctggctattcatgagattgcccacaatgctgcctttggcaactgcaaagcaatgtggat

SEQ ID NO: 4546 - DNA, 420 bp, Homo sapiens
tcaacatactagtcacagccctatactccctctacatatttaccacaacacaatggggctcactcacccaccacattaacaacataaaaccctcattcacacgagaaaacaccctcatgttcatacacctatcccccattctcctcctatccctcaaccccgacatcattaccgggttttcctcttataaaaaaaaaaaaaaaaaaaaaaaaaaaaaaaaaaaaaaaaaaagggggggccccctttaaaaaaacccctggggggccccaatttaccccggggggaaaaaataatttttttcctcttaaaggggggaaataaaaaacccccctgggatttttgaaaaaaaaccctttttttgggggggggaaaattgggccccccccccccccaaaaaataaagccccgagggaaaaaaaa

SEQ ID NO: 4547 - DNA, 408 bp, Homo sapiens
cccacgcgtccgaagaaaacctataaacctattcttcaaaaaactatgctatattataatgccatcccaaagtatcttgaatgatctatggctcatttctataccatcgcccccttttatttaaagctgtaacatattgagaattgaatatgacctttctgagccactcatttctgaatattttaattttaaataaaaatactttttcagattgtttcagatttttagagagggtaaagcaaaatataaacataaaatatgaaacatacgagcgtatgtatatatgtgtatgcatatatattgatatataaaacgaatgccttaacagataatgtgcattacaattgctgcttcacacttttgctggtattattttaattacactctgacgaaaagttcagcataaag

SEQ ID NO: 4548 - DNA, 412 bp, Homo sapiens
tcccgggagaagactcggcggtcgccacctcttctgttcaggcctcggccttcctgagcatctctccttcctctcccagatcgtcttctccttcagtttcaaagccagtggcgtcgcggccaccctgccgggctctctgtgaggatggtgggggtgaagcccgtcgggagcgacccggatttccagccagagctgagcggcgcgggctccagactcgccgtggtcaagttcaccatgagagggtgtgggccatgtttgaggattgccccagcattcagttctatgagtaataaatatccacaggctgttttcttggaagtcgatgtacatcagtgtcagggaacagctgccaccaacaatatatcagcaacacctacatttttgttttttcgaaacaaagtgagaattgatc

SEQ ID NO: 4549 - DNA, 408 bp, Homo sapiens
gccttctcaatttctcatagattttaccttaaactaattaaggccattctcttgataaatttgtacatcagaccgggtcaccagctatgatgcagaacgccagatttttgaatctcaagtaactttctgtggtgctggacaaattgacttaattctgtgcaggcaaacactttgaatcataaggatttttattgccgctccattcttactactattcatgattcaaacatctacccctgttctgaatcaggatgttgacacttcttggttattttcagatgaacagcaactgctacactcttgaaagcacttaaaagtgcaagcatgtcctaaatagccatttaacctggtaaaacataggcttttctgtttaattaagtattagaccagtctgtagatataatctga

SEQ ID NO: 4550 - DNA, 497 bp, Homo sapiens
  misc_feature (1)...(497): n = A,T,C or G
agggccggnntnnnagnacctaggaccctcgaanactgagtccttcganaancccccgnngggcaaggntgcaccagctcccggaagagagggaggcagtcttgtttttgtcgtgggaaggggtttgggtggagaaaaagattacaggcacatcaccacaggggaccagaagtggagagaagacagagagttctgccgaggccttggtcttcctgtctttccaatcttgccttccccaactctccctgcttcctgggaccatcggtaggggtggggagcagcagtcaacacagcccactgggaagggaggcacaagcagcactccagcttcccagtgctgccctcacactcacctggacaggtcaggggacacaggatgaaagccatggcccaatctaagagcaagacaagtgaaaagtgagtactctcactgtgtaccccagcataggaatagtgaaacctgctacaacttgaggctgcgttcccatgacttcctn

SEQ ID NO: 4551 - DNA, 496 bp, Homo sapiens
  misc_feature (1)...(496): n = A,T,C or G
cgggtggcccggnatnaaanaaatcctagttgtgcttgcatngancnacatnngnaggggcgancaangcgtgcgggacatactggtgtgtgggtatccccccttctactccattcacggccttgctttttctccgggcatgaagactcgcatccgaatgggccagtatgaatttcccaacccagaatggtcagaagtatcagaggaagtgaagatgctcattcggaatctgctgaaaacagagcccacccagagaatgaccatcaccgagtttatgaaccacccttggatcatgcaatcaacaaaggtccctcaaaccccactgcacaccagccgggtcctgaaggaggacaaggagcggtgggaggatgtcaaggaggagatgaccagtgccttggccacaatgcgcgttgactacgagcagatcaagataaaaaagattgaagatgcatccaaccctctgctgctgaagaggcggaagaaagctcgggccctg

SEQ ID NO: 4552 - DNA, 492 bp, Homo sapiens
  misc_feature (1)...(492): n = A,T,C or G
agccaactgtanaccccgaanncctttgggattgnancagcnccaannnngggnngaccacgcgtccgcccacgcgtncggacctgtcttgtatgtctctcaattttgtcagaatttttattattgtttttcacatatgtgaaataagcagttttttcagggtacatagggtatctttgttttacagatttttaaagatgaggttttgaaaagccctcagaggtttttgttaaaagactatcttgcttaataaatgacaacttgttacagattcacacattacaagtaggacagtataacaggagattggtgtgtgaatgctacaaaacagtcagcaaaaggaatcatgtttgcttgtgaaacttcacaggtaccctgaaagtcatttcctaaagctagtgcatgtgaatcttttccttgaattgtgcagaataattggattgaggcacatattttgaggagtagcaagtggaatggtataatgactacagg

SEQ ID NO: 4553 - DNA, 426 bp, Homo sapiens
  misc_feature (1)...(426): n = A,T,C or G
gccttcccaggcggggatgctgcggctnnnnnnttggctgaggcactttcgggcaacacccaatactcggggctccgctcggcttcttcgcgccgagatgcctaagaaggctggtgcgacgaccaagggtaaaagccagagcaaggaaccagagagaccacttcctcccttaggtcctgtggcagttgatcctaaaggatgcgtcaccatagccatccatgcaaaacctggctccaaacaaaatgctgtaacagatttgacagcagaggctgtaaatgtagctattgcagcacctccatcagagggagaggctaatgctgagctctgtcggtatctttccaaggtcctagaactcaggaagagtgatgtggttttggataagggtggtaaatctcgtgaaaaggtggtgaagcttttggcttctac

SEQ ID NO: 4554 - DNA, 439 bp, Homo sapiens
gagaccgggttgggctgtgacgctgctgctggggtcagaatgtcatacccaggctatcccccaacaggctacccacctttccctggatatcctcctgcaggtcaggagtcatcttttcccccttctggtcagtatccttatcctagtggctttcctccaatgggaggaggtgcctacccacaagtgccaagtagtggctacccaggagctggaggctaccctgcgcctggaggttatccagcccctggaggctatcctggtgccccacagccagggggagctccatcctatcccggagttcctccaggccaaggatttggagtcccaccaggtggagcaggcttttctgggtatccacagccaccttcacagtcttatggaggtggtccagcacaggttccactacctggtggctttcctggaggacagatgccttctc

SEQ ID NO: 4555 - DNA, 518 bp, Homo sapiens
  misc_feature (1)...(518): n = A,T,C or G
agaaattgtctgttccagcctcagtggtgtcgaggataatgggaagaggatgatgcaacatcactgcaatacaggatgttactggtgcccatattgatgtggataaacaaaaagataagaatggcgagagaatgatcacaataaggggtggcacagaatcaacaagatatgcagttcaactaatcaatgcactcattcaagatcctgctaaggaactggaagacttgattcctaaaaatcatatcagaacacctgccagcaccaaatcaattcatgctaacttctcatctggagtaggtaccacagcagcttccagtanaaatgcatttcctttgggtgctccaactcttgtaacttcacaggcaacaacgttatctacgttccaccccgctaatanactaaataagaatgttccaacaaatgtccgtccttctttccagtttctctacctttagctaatcctaaccttaattttgccttgtggcttgctcaactatgcaccagattccgaatcttcg

SEQ ID NO: 4556 - DNA, 509 bp, Homo sapiens
  misc_feature (1)...(509): n = A,T,C or G
cccacgcgtccgagcggagcaggtctgcgaggctaagtgtctccgcggcgcacctcgcggcgagaatccggaggagaaggagactgcaaggataggcccaggaaaacgaagagatggagcagcctatgcagaatggagaggaagaccgccctttgggaggaggtgaaggccaccagcctgcaggaaatcgacggggacaggctcgccgacttgcccctaattttcgatgggccatacccaataggcagatcaatgatgggatgggtggagatggagatgatatggaaatattcatggaggagatgagagaaatcagaagacaacttagggagctgcagttgaggaattgtctgcgtatccttatggnggagctctctaatcaccatgaccatcatgatgaattttgccttatgccttgacnntctgccattatcatgagattattactgggattcccgctgttttcttttccttggcatntnctaatatgcccttactgatccgctggt

SEQ ID NO: 4557 - DNA, 463 bp, Homo sapiens
aagaacaaggatgcactaaagttagcaagtttataataaagttaaatataaattattttgttttaaaatgcctcaaatttttctttattctaagcagcaaacattaaaataagaatatttcctgctaaatgtaaccatacactttattccacaaaatgttatttaacaagactgagggttttttttaagaaaaaattatttccatccaatatttaaagacttgaattttatttaaacttgaaaatgactttgccttaacttttgtataagacagcttagagtccatggagcccggccctgggttggcgtgagtgggtcagagttactcagttactgcgaggatctcctgtcgctagttttactgagtaagcatactgtagtacaagagctagtagtagtttttgtaatataccttaaagatcttcaacagttgatcttttttcagaatgttggaaaatcctgt

SEQ ID NO: 4558 - DNA, 426 bp, Homo sapiens
atgttttaaggtaggatctaaaatttcaattttcctcattgagttccaagctgcttctgagaagaaagtctattaggcagcagcagagtaacaaatactctatcaaaaatgaaaagtaaaactttagtaatggaatcctttcccttatcatgattaaatatgaactaccactaaatgggagacaaagtggaaactgtgtttctatcgtgcgctcaagaaaaaatttgagtactttataaacaatggggcccattacaaagtaccatttcaacggatgatttccctcagattcaccacaccatcctcttgaaataaaagatctgtagttgtcatgcattttatagctatttcatggtgattattaaatgtcagaataaagtcaggctagatattgtttcaaagcatatgggaacagcttctggacag

SEQ ID NO: 4559 - DNA, 428 bp, Homo sapiens
  misc_feature (1)...(428): n = A,T,C or G
atcgactttcggtgcccgcaagaccannnntnttacgccgagatcacgctgcagatggtgcagtacaagaatcgtcaggccatcctggcggtcaaatccacgcggcagaagcagcagcacctggtccagcagcagcccccctcgcagccgcagccgcaaagcgctgaaggagggcgtgctggagaagcgcagcaaccccagccccaatcacaaccccagcctcagccccaacccaagcctcagccccagcagctccacccgtatccgcatccacatccacatccacactctcatcctcactcgcacccacaccctcacccgcacccgcatccgcaccaaataccgcacccacacccacagccgcactcgcagccgcacgggcaccggcttctccgcagcacctccaactctgcctgaaaggggcagct

SEQ ID NO: 4560 - DNA, 433 bp, Homo sapiens
atcgactttcggtgcccgcaagaccagggctggaacgcttagatcacgctgcagatggtgcagtacaagaatcgtcaggccatcctggcggtcaaatccacgcggcagaagcagcagcacctggtccagcagcagcccccctcgcagccgcagccgcaaagcgctgaaggagggcgtgctggagaagcgcagcaaccccagccccaatcacaaccccagcctcagccccaacccaagcctcagccccagcagctccacccgtatccgcatccacatccacatccacactctcatcctcactcgcacccacaccctcacccgcacccgcatccgcaccaaataccgcacccacacccacagccgcactcgcagccgcacgggcaccggcttctccgcagcacctccaactctgcctgaaaggagcagctcccgg

SEQ ID NO: 4561 - DNA, 569 bp, Homo sapiens
  misc_feature (1)...(569): n = A,T,C or G
ggagatgatcccgtgaccgcnctgcattcccgggccgacccacgcgtccgacactgtacacataagccaaaactgagcataagtcctctagtgaatgtatgctggctttcagagtaggctattcctgagagctgcatgtgtccgcccccgatggaggactccaggcagcagacacatgccagggccatgtcagacacagattggccagaaaccttcctgctgagcctcacagcagtgagactggggccactacatttgctccatcctcctgggattggctgtgaactgatcatgtttatgagaaactggcaaagcagaatgtgatatcctaggaggtaatgaccatgaaagacttctctacccatcttaaaaacaacgaaagaaggcatggacttctggatgcccatccactgggtgaaaacacatctagtagttgttctgaaatgtcagttctgatatggaagcacccattatgcgctgtggccactccataaggggctgagtggacagagtgaattaaaacagaaacctgccctcagaaccaaagaggacattgcttaaagggggag

SEQ ID NO: 4562 - DNA, 511 bp, Homo sapiens
  misc_feature (1)...(511): n = A,T,C or G
ccattgattggaatacttcatattgtaaagatattaattctctccaaattcttctacagatccaacacactacaaatcaaatcatgggtgctttttcacatatatctataatttatgttcacatgcaaaggattacaataatcagataactactagataatctgagaaaaaaatgggagctttttttgagggacaaataccaagtctttttctaaagcttgtattctgcaaggatagctgactaaacccatggaaaagaacagctagttcagaagcagaggccctcacatatttggacacttgatttttgaaaagagctgctctgcagagcagtgggggagaagatggtcttttcaataaatggtgctgggtccaccacatatccatatggggaaaaatatatcttcttccctaccttagactatgcacaanaatctangccagagagactgcagattttaaatgacaactgtggaaaagatagctttttaaaatacactatattttggan

SEQ ID NO: 4563 - DNA, 430 bp, Homo sapiens
  misc_feature (1)...(430): n = A,T,C or G
cccacgcgtccggcggggagagggaacctgaatattnnnaatgagcacaaatttgaaggaaagaaaacaaagaaccattatctaatcaagctttgaaagtcctgcatgtttgccttttattttagtgttgacgccaacatagactgtctaaggtatttttttccccaaacacttgaatcttggtcgttggtatgtaatccactctctagagtccagtgtactttagacttcatctgagtccaatacatgtaccacactactgttttattaatgtaaaaaccttgtaaatgaatttcagatgggtgatttaagtgagtcacaagtcacaaaactttgctattcatagttaatcaaatagaactgggttttttttttcagagtgtggtgtaaataaagaaatataagaagttctgttctataactgctctgt

SEQ ID NO: 4564 - DNA, 425 bp, Homo sapiens
  misc_feature (1)...(425): n = A,T,C or G
aagaacagcgctcccgaagccgcggcagnnnncttagatgacagccggcctgcgccgggacatgcggccccaggagctccccaggctcgcgttcccggtgctgctggtgctgctgctgctgatgccgccgccgccgagccctgcccacagcgccacgcgcttcgaccccacctgggagtccctggacgcccgccagctgcccgcgtggattgaccaggccaagttcggcatcttcatccactggggagtgctttccgagcccagcttcagtagcgagtggttctggtggtattggcaaaaggaaaagataccgaagtatgtggaacttatgaaagataattaccctcctagcttcaaatatgaagattttggaccactatttacagcaaaattttttaatgccaaccagtgggcagatatttttc

SEQ ID NO: 4565 - DNA, 408 bp, Homo sapiens
cccacgcgtccggccagataaccctattgctcattatttaagtgcaaagtacattttttcaatcattattgcctaagaaatttttaggagatgatggttgaatggtccttctcctcacctcaccacaccaagataggttggtatgtgtgtttgtgtttccttgctttcactttttaaaggatcctatagaaaataacagtattgtttccatttaaaaaaaaaacttgataatttatattccattttatttctgaaaaatagccacatttttacataccccaaataaatcgccatgtgtaactatgtgcaaaaaataattgaatgtggctgaaaacgatctcacttgttgtactataatgtatgaataataataaatgtaaaacccttgaaatcacattttcttataat

SEQ ID NO: 4566 - DNA, 410 bp, Homo sapiens
gaagaaactgaggcccaaagagggacaggcacttgagcttggtcacagtcagaagggtggaggggagtcagccgtcagcccctccaccaagctgccactcagtgaccaggcctgtctgcctctcaccctccagggttgacaactccctgtgggttcagcccgtggccccagcacacaggcagcggctcccaactgcctgtttctctctgagtcccccacccccaccaccgcgttgtctctgtgcctctctctggggctttggagacggacatgtctcctgttgctccgcccctccatcactctgcccatctctgtccccagcggcctcgggctatgggacccagaacattcgactgagccgggatgccgtgaaggacttcgactgctgttgtctctccctgcagccttgc

SEQ ID NO: 4567 - DNA, 564 bp, Homo sapiens
  misc_feature (1)...(564): n = A,T,C or G
cgagatgatcccgtgacgagcngcaattcnccggccgacccacgcgtccggaacaggccagattttcagctgccaaagacttttaccagatccctggcacttgatttatgacaactgggaaaaatcatttattttcatgaaaataaatattttgaagggtgaagaaagtgggaaattaaatgtacattgtttgaataccttctctcggtcaggcactatgtgctaagtactttcacacagttctcacaacaaccgtgtgaggagatagaatcctatcaaacagattaaattcattccccaagactagtttatgggcattgaaaatggaatctgaacctaggatctttaagtccatgctctttntactacctatgaatcctctcctttggtagatgtaaaaaatagattaatgctctttntggctcctcatatttttctgataatggttacttcttcagggcagccttaacctaagacttaccagacactctattcaccacccttccttgaaattcctttaatgtaatctccatatcaactatgacctcttgaggcaagaccttt

SEQ ID NO: 4568 - DNA, 502 bp, Homo sapiens
attgctaattggatgagggaatggcctcttagattgtccttgttttgacttatctgctctttgccaggatttttatatcaagtacttagtttggccaaatttagagtatagtttaaaggggaaaaaaagtttgtatttgatgagtctaattactatattagaatgctttttaaatgaatatgctgtgattggaatctcttcttgggggccggggagagtgctgagagatgcagctgtgtctctgctctctgcagtcttgggcaggcagcaccgctgtctcctgatacagagggttgaatgcactgcttcacattgatgccacattttcaaatctaaacatgattaacatgttttttaagtatttatcaaataattcacatttttgcaggtttaagtgctggtttttaagatataaaacatgttccttgtttttttttctttttaccactggagactatgtgaaatcttgtgtatatggatttttctaaacatttccttttat

SEQ ID NO: 4569 - DNA, 429 bp, Homo sapiens
  misc_feature (1)...(429): n = A,T,C or G
aaagctgggcctgctgttcttcccctacctacannnnnactgggaagtgcagtaccaacaggacaccccggtggccccccgctttgacgtcaatgccccggacctctacattccagcaatggctttcatcacctacgttttggtggctggtcttgcgctggggacccaggataggttctccccagacctcctggggctgcaagcgagctcagccctggcctggctgaccctggaggtgctggccatcctgctcagcctctatctggtcactgtcaacaccgacctcaccaccatcgacctggtggccttcttgggctacaaatatgtcgggatgattggcggggtcctcatgggcctgctcttcgggaagattggctactacctggtgctgggctggtgctgcgtacccatctttgtgttcatgatccg

SEQ ID NO: 4570 - DNA, 411 bp, Homo sapiens
cccacgcgtccgagcagcccggaggagactgacggtccctgggaccctgaaggtcacccgggcggccccctcactgaccctccaaacgcccctgtcctcgccctgcctcctgccattcccggcctgagtctcagcatggcggatgggagcagcgatgcggctagggaacctcgccctgcaccagccccaatcagacgccgctcctccaactaccgcgcttatgccacggagctgcaggacttgtgccgacagctccacgcccgtgtggacaaggtggatgaagagagatacgacatagaggcaaaaagtcaccaagaacatcacggagattgcagatctgactcagaagatctttgaccttcgaggcaagtttaagcggcccaccctgcggagagtgaggatctctgcaga

SEQ ID NO: 4571 - DNA, 409 bp, Homo sapiens
aaatttaggaaaaaagaaagaagaatttggaaaggtatattgttgttaatgtacatccaatgtattaaaaggtcaaaaaaaaaaaaacaaaccccacccctggcctttttacatttttggtttgaccccaccgataaaaacccttaaacctcaaagaaaaacccgtaaagctttttttgggttccacagctggggttacctcaccaaaaggaaacccatttgggcttcaaattttcccctgccccagtaaaccctccaaattattaagccaaatttgaaaaaaaaaatatatttttgagtaaaattttagttttacgggaacctcccttttgaaaaattccatatgaaatgaattttttataggaaagcggcccctaaacttgctaaaagtggaaaaaaaaaaaaaaag

SEQ ID NO: 4572 - DNA, 431 bp, Homo sapiens
  misc_feature (1)...(431): n = A,T,C or G
ctatattcctacaataaagtaagctagagaaaangnnncccgattatcataagaaagagaacatatatttactattcattaaatggaagtgaggcaacataaaagtcttcattctcattgtcttcacattgagtaggcacaggaggagaaagatggggaggaagagaaggcgctggtcttgcagtcttgtcttacgggtgtggggagcgggggaaagaatattcatgtataagcggacccttgcaattcaagcccttgttgttcaagggtcaactgtaataggatatagctatttttcttcctctatcaaccaaatcggaagcatctattttgtagtccactctactgagctaaattatagatccagctatgctatgtataattattttcttgatgaataaattttcaatttctcctctgaccattgcaca

SEQ ID NO: 4573 - DNA, 408 bp, Homo sapiens
gctcccttcaaaacaccaactaacccacccagcccttggagtatttatttgcaggctctgcagccagtgggaggagcgcctgagggaagaggtcatggcagagccatttgggaagttcctgcagtgggaaagggtttagcttctctgtgtcagcatcagaggtggaggattattttcaagagataagagcatctcattggcaaaagagcacattacaaccccaatgccttgtagctcatccctcctaatcttatcatatagtatgtgcagggaggatgtgttgctttctacactggtaacaaacgaccacaaacttgagggcttacaacatttaccatttcacaggttctgtgggtcacgaatctgggcagggctgagttccagcatctccctgagttatgattcagg

SEQ ID NO: 4574 - DNA, 422 bp, Homo sapiens
cccacgcgtccgattttccaagttagcattttcttttttgtcactgctctttaaacaggaatgccggaggagcattctggattccctttgaaaggcatctgtacattcaaaccgtctacacttcaccattggttgtacgtagacttaagggtttagggcttggacaatagctgagttgagaagacctcaaggatatttaaaggaatttttctgctactgaaaatatattgaagaatcgctgcaaaatttttccattccatcccctttcccccacccccgttttccacagcaagaatcaatttggagggagatgtgtaaactagaatttttaaagaaatagtaagacttcaggtgttttctacccagggatagcctacataattgagaaaagagagttcctgctatttttctgttccagagaa

SEQ ID NO: 4575 - DNA, 465 bp, Homo sapiens
  misc_feature (1)...(465): n = A,T,C or G
ttgactnctcgggtctacccacgcgtncgggaactgaaagaccagaaaccagcctgccctagtcatagaatgttagggcccaaccagcctctccccaagaagcagggggtagggaggaggtcccagggaagaacctggttgccaaagtctcggccagttggagaagagatgggtctcccgaggatacccaagcccaagctctacactgtcccaagggtgtggtgttgcgggaagtcagggaccccaaacggagggaccggctgaagccatggcagaacgtggattgtgaagacttcatggacatttattagttccccaaattaatacttttataatttcctatacctgtctttactgcaatcttggaacataaaattgtgaagatttcatggacacttaccacttccccaatcaatacccttgtgatttcctatgcctggctttactttactttcttaatcctgg

SEQ ID NO: 4576 - DNA, 416 bp, Homo sapiens
cccacgcgtccgagcttgtagtcattgttgaaaggacagaaaagtaacgacgttggtatgtagtcttcaaagctattgtaaagattaatcattttcagtaagccggaaaatgagggccattttcttaaatagtatgccctgtatagagtgttaccttctgaaacagagttgtttggtaatgtcagaggtttaatagatgagtcttgaagttaatggtgagaggctttacttttgaaatggctttcttacagctattttaacatttctattataaatccataaagaggttttataggtcgttttaattcacacaaggagggaagaaattgtgcttctcttttcccaataaggatttatagaacattaattcattcttgggaccaaattgtttagtgattttcaaaaataaactatgt

SEQ ID NO: 4577 - DNA, 413 bp, Homo sapiens
atcttaaaaaattctcaggtgtttatgtcttgtaaacctttgagtaaggctttagagcaaacagttacatctgccagcatttctgtgggtactgacgtttcacagggagacccagagtcttagacttttgaacattataatgactgcgtagtttttaattgtgcaacgaaggaaatctcaagtgaatttagggcactgtgctgacagtgtcatatgcattactccactggatttccacagttactctataaggtaggttttattacaatttccatttacaaatgaagaatctgaggctacacagctcagatgtcaccttttcaaggtaaaaggaaactaatgaacctaggaatgaacctctgtagtctgtctgtaagctctatgagagcagggatgaggccaattttgctccc

SEQ ID NO: 4578 - DNA, 416 bp, Homo sapiens
actagcccatccctgggactggaatttgagtaagggatgaggggaaattgtaatcccattccttaacttgctttttcccacccctgctcttcaacctctttatcaagtctgacgctgcagggattgggcaaagcaacatcaccattgcaattccattgtctgatgcaaaccttatcggagggatttggaagccattcggggaggcaggctgggccacagggtagagctgtgaaataaacgtctattatcctggggaggagggattctaaactttccttccgtcctcaatttctacctccatataccggccagaatgtagcttcacttgagagagatctggaatggtcgccatgattgaaaccacgcaccattacatcatcattacattaattacatcaacataaattatctcttcc

SEQ ID NO: 4579 - DNA, 481 bp, Homo sapiens
  misc_feature (1)...(481): n = A,T,C or G
cgttgnntaaattgagacatgnagacattgncgaaggaacntccgggnttacccacgcgtccgcaaaaacaatagaacatgttaatgagtaatttatattagttcgatgtattacaattttttagctttaaattacagttttcttataatgttgaaatgttttacaatcctttgaatctaagtatttgtttcctaaatgaaacatttgtacaacatttgatgtttttacttatgaaatattctcctcccccaagaaaatttaaactttttctctctatttaaaagctaagaaatgttgtaaaggaaaaatgaaattatcttcctttagcttatttttaaggtaaaacagctttttactctgttattgtggtaatggacagaatattacatacaaaaatattctgggagagctttttcctagttggttttaaatcattgtgccacctgaaaggatattagattttataggagctaatttgtc

SEQ ID NO: 4580 - DNA, 508 bp, Homo sapiens
  misc_feature (1)...(508): n = A,T,C or G
gaattgctcactcagggagctcggattttaagacactattctgctgatgttcccagctgattaaagccactcccttcactatcttggtgtctgaggggttttgtccgcagctggtcccgctacagtgagatgggaaattttttaaattacatttttaggctgggtgcagtggcttactcctgtaatcccagcactttgggaggccaaggcgggtgaatcacttgagcccaggagctggagaccagccagaacaacatagcaagacccccatctctaaaataaaatttttttaatttttaaaaattacatttttatattatcttattactatatgctcactgaggaagagaacatttcaagcaatacagacatgaatataaatcaaatgctaaggttcttctcacctcgctgtaactcatagttgctagaagtgatcatttgaaaacgtggaaggctgcgcgtggtgcctcacacctgtaatcccattccttgggaagccatggaggtn

SEQ ID NO: 4581 - DNA, 428 bp, Homo sapiens
cggacggtgggcggacgcgtgggtgactggtgttcttctggctaatggaacacttaatgcatccattcttaatagcctttataatgaaaatttgggtaaagaaggagtttcagcagcttttgctgtgaagctctttaaatcatggataaatgaaaaagatatcaatgcagtagctgcaagtcttcggaaagtcagcatggataacagactgatggaactctttcctgccaataagcaaagtgttgaacacttcacaaaatattttactgaggcaggcttgaaagagctttcagaatatgttcggaatcagcaaaccatcggagctcgtaaggagctccagaaagaacttcaagaacagatgtcccgtggtgatccatttaaggatataattttatatgtcgaggaggagatgaaaaaaaacaacatcc

SEQ ID NO: 4582 - DNA, 421 bp, Homo sapiens
  misc_feature (1)...(421): n = A,T,C or G
cgaacgaaaaattctaggctacatacaactacgcaaaggccccaacgttgtaggcccctacgggctactacaacccttcgctgacgccataaaactcttcaccaaagagcccctaaaacccgccacgtctccatacccattacaatctccagcattccccctcaaacctaanaaaaaaaaaaaaaaaaaaaaaaaaaaaaaaaaaaaaaaaaaaaaaaaaaaaagggggggggggcccttaaaaaaaatccctgggggggcccaaaatcccggggggggggaaaaataatttttttttttattgggggggcttaaaaaaacccccgggggggttttgggaaaaaaaccttttttggggggggggaaaaagggggcccacccccccccaaaaaataaagcccttgggggaaaaaaaaatttt

SEQ ID NO: 4583 - DNA, 432 bp, Homo sapiens
cttaaaggttgatattcttaaatataccttttcataataaggaaaatgatattcagagagattaagcatattgtctaagttacagagctagtaggcacaggacaaactctagtgcacctgctccaaaatcattattcattcttcaagatcatgctactttcttgaaacacatgaaggtaaacacacatgttttaaaataaaatgttattaagacattggtttgcaactcaccatttgtaacttttgtagaacaagaatgatgtttggatattgtcaagccatgtggtgtatagttactctcttcacaatttactgttgatcaagtttaaagtataagaagctgtcagatacaattaaggagtaaaaaattgtacaatcaatattaaaaatataattttgttaagtatatcagttagattggaggtaaatctt

SEQ ID NO: 4584 - DNA, 438 bp, Homo sapiens
attgcctctaagtgactaaatcattggtcttctcacctcataacacgtgaaggatgaacccacctgcccaaaaaattgcctgatgctcaaaggcccatttttttcctgagtgtctgggtaggaaaccccaccattagtcaatacttctggcagcccacttcatagaacggctgcaacccacgggagtgggatttgcaagcccccatttgggagggttttagtaattttcattttgtgtttctcaagaccaaggagctggtctttggcagaattctgcatgcttagctgtgtggaggtgccaccgtcagttctgttagtcattttgcttatctatattaaccacaagccttctgtgtaaaccaatcactggaaggcccaaataccatctggatatttgcaaattgtgtcattttctcgagacaccctgtgattgcccgt

SEQ ID NO: 4585 - DNA, 417 bp, Homo sapiens
tttttttatttttcctgtcgctgcggtgcaatcgggcctggggaatagatacgcccggcggagaggggttcacttgacaggctctgaaaagccacctctgggtggcgagggacccgacaggccgtggggtgggctccggctcgggttcatcaggacgacgagcaggcaaagcataattgatttgaaggagaaggaaataccacaattaagaaacacactgcagaatgtcaatagagacatacagcgcctaaagaacgacatacaagaacatgaaacactcttgggtacaataatgcctgaagaagaaagtgccaaagtatgcctgacagatgttacaattatggagaggctccagatggaacttaaagatgttgaaagataaattgcacaacaagcagctaagctacaaggaataga

SEQ ID NO: 4586 - DNA, 460 bp, Homo sapiens
  misc_feature (1)...(460): n = A,T,C or G
aataaggagaaagcattagtagctctggcataataaacactttatgctgatttggatttaagaaaaggaagttaaatcaacctccttcaaatttggcactgttgtcatcatattagaagatgtttcggatagtccgcacggaaatatcttttgtcccagtgggatttattttgatgcatcagcaattctttcaatattcatggagagttggacaatttaaagcagtgtgttcaaatgttcaactttatcctctgggagattttttcatttaattaagttttaaaatcacagtaaattgtcattatctctatcaagattgagattaataaacatattcagagtgttaattatttaacacttacaaaaggaaaattgcaaaactgtgcaatgggtaatgaatctaatagtaagtctaaatagagaattatttaatttacttcctgtaattgatgaanaaata

SEQ ID NO: 4587 - DNA, 472 bp, Homo sapiens
cgcatactggctacccaggtggatttagacaagtaacagctgctcagcttcacctgagggatccagtggcaattgtaaaactagctatttatggcatgctgccaaaaaaccttcacagaagaacaatgatggaaaggttgcatctttttccagatgagtatattccagaagatattcttaagaatttagtagaggagcttcctcaaccacgaaaaatacctaaacgtctagatgagtacacacaagaagaaatagacgccttcccaagattgtggactccacctgaagattatcggctataagagaataagaattgcagaaaataacagtgaagtgattgaaactttcttctgatgagtttctctaacctacaggatggagtaaaacaactgctacagttcagcacctgttttatgtgccgaatcactgtggggaaaggtcaggaaggtatagtcctttcataggaaattgt

SEQ ID NO: 4588 - DNA, 424 bp, Homo sapiens
  misc_feature (1)...(424): n = A,T,C or G
atgaagttcttgcaaaacagaaaagagaacaaaagcttattcctaccaaaacagataaaaagaaagcagaaaagagaaagaataaaaagaaagaggggcagaatggaaacctccatgaatccgactctgagagtgtacctcgagactttaaattatcagatgctttggcagtagaagatgatcaagttgcacctgttccattgaatgtcgttgaaacttcaagtagtgttagggaaagaaaaaagaaggaaaagaaacataagcctgtgcttgaagagcaggtcatcaaagaaagtgacgcatcaaagattcctggcaaaaaagtagaacctgtcccagttactaaacagcccacccctccctctgaagcagctgcctcgaagaagaaaccagggcagaagaagtctaaaaatggaagcgatgn

SEQ ID NO: 4589 - DNA, 451 bp, Homo sapiens
ttgtgaggaagatcagagtctggttcttgacatgagatgcccttcagacatctcttcactcaggtccaactagggatacagaaacactgaatatttcaacagcagaaattgaatggggggattgatagcgctggcgagggaagcagctggaaagagacagatggcaccctgagacagcccagaggtgaataggacccccaggctgcatggataaagctcagtggtggtgttacctcaccggggaccagggtcacacagcaaagctggaacaacagaggcgtgttgtgggggagcctcagaggagacaaaacctctgcctgagatcccaccccaggtgggcatggcggccactgaggttggggatgaaaatgccggtaccgtcagtgcacagccctgttccagacagtgctagcctagaagatttctgggctctcctgaagcgccaccccgg

SEQ ID NO: 4590 - DNA, 457 bp, Homo sapiens
  misc_feature (1)...(457): n = A,T,C or G
ctcacgtaccatctatgtggtggataatggtctgaggacgttcgtctccctgcttatgaacaacatgaacactgaggagcttgtgtccagaatgcattttcagagcaaattctgaagagtcactttccttaatcagtttctataaggtattttttttccactttcattttactttttgtttttttgagatggagtctcactctgtcacctaggctggagtgtagcagcgaaatctcagctcactgcaacctccgcctcccaggttcaggtgactcttgtgcctcagcccccagagtagctggaattacagacgtgtgccaccacactcagctaatttttgtatttttaatagagacggngtttcgccatgttggccaggctggtcctgaactcctgacctcaggtgatccacccccctgggcctcccaaagtgctgggattacaggcgtgagccact

SEQ ID NO: 4591 - DNA, 470 bp, Homo sapiens
cgggcccttgtggctgctgtacagctgctccgggaacaagaggcccgtggcagagacctgctggccgtggaggcggtgcgtggctgtgagatagatctgaaggagcagggacagctcttgcatcgagaccccttcactgtcatctgtggccgaaagaagtgccttcgccatgtctttctcttcgagcatctcctcctgttcagcaagctcaagggccctgaaggggggtcagagatgtttgtttacaagcaggcctttaagactgctgatatggggctgacagaaaacatcggggacagcggactctgctttgagttgtggtttcggcggcggcgtgcacgagaggcatacactctgcaggcaacctcaccagagatcaaactcaagtggacaagttctattgcccagctgctgtggagacaggcagcccacaacaaggagctccgagtgcagcagatggtgttcatggg

SEQ ID NO: 4592 - DNA, 464 bp, Homo sapiens
tgaaggttctggacatgaacaagggtcaggtataagagaaaggcttcccctacaccccagcctcctgctgtcccctgaagcccaggactgcgttgtatgctttccatccactcaccttaccccatagcatcttgcggcccagaaaccagagccatttgtctcagaccctaaatcaataatcacaaaccccaaaacgggagagagcagtgaaaacatgcagggctgtggacgggggaagggttgtggcgggtgttctgaggctgagaggacacctatatgcgtatttcctctacacacatcaccccccttctataatcttaagccatgactagcctggtggcgtgttagtttctgcccagttctaccccctcatgtgcttcttctgaatactgaatgtgactgtttgaaagctgagagaattcatccctcttactgtagataacactgcaaatcttggaattttg

SEQ ID NO: 4593 - DNA, 401 bp, Homo sapiens
ttctagatctctaggccatcactttaattgatctttctacaacatttatcctggttgttaagccctccttacaacattcttctctctttgtttttatagctccatctctcctgcttctttaacttgataatgcatacttgatttttctatttgttatttcataaaccaattaatacacagataaaatgactgtatatcaaaccatgtttgtatagaaaaaatggattttggatgcctctcatatgtaattagttctattaaacatattaattgtattgtttaatttgtcaggtttttgacagaattttgtttacaagtaataaaaattttatctccaattttcaaaaaacaagaaagaaaagaaaaaaagaaaattaaaaagcctctccttttttgtcctg

SEQ ID NO: 4594 - DNA, 400 bp, Homo sapiens
cattacaagagtataaaaatggacattaaatcatggccttgcattaaaatatggaaagcagagcagtacatattcaaatgtattcagaaagtcaaaagattacctatcgctctacaataaaatacatggaaatagcttgctatttttatatacatttccaaaatattaagataactttctgtaagagtcaatgattctgttcgactaaatagctgtcctttccaacacattgctacttttttaaatactgtatcataagttcagcctgtcatactttttgcattgatcgttatgaataccagaccatttgtaagtgtggttgaagagcaaaatgctaattgacatctctagtaaatactgtgacaggattcatgaacttgaataattctacagattgaaa

SEQ ID NO: 4595 - DNA, 456 bp, Homo sapiens
tccttccgtgcctttagcatggttcaggtaggaagtttagcagtgtccctgcctcgaccctctagatgccagtagcagctccttctccttgctcctgcacctgtcatggcaaccagaaatgcccagtgtctcatgcgggacaaaattgccctaagttgagaacctctgctttatacagatagattttaagtatttgtcaccaggaaaagcctccaagaagtgatcagctgaattgtttctgtttttatctttcagatgatggatgcaataaaaggaacaatgacagaaatatacaacgatctttctaaaaacactactggaagcacaatagctgaggtcagagatgacacatgaatttcttatttgctaagagtgttttgtgggctgctttaaaggtggtaccatgaagaagcttctctggaaacccctctggggtcctggcttggtcactaagct

SEQ ID NO: 4596 - DNA, 394 bp, Homo sapiens
cgccattctcccgcctcagcctcctgagtagctgggactggaggcacccgccaccatgcccagctaattttttgtatttttagtagagacagggtttcactctgttggccaggatggtctcgatctcctgacctcgtgatccacccgccttggcctcccaaagtgctgggattacaggcatgagccagcatgcctggcctacagctattcattttctaaggagagtccattgcagattctgcattgcatttggttatctctctttagtgtattgtagcatggaaaccccatgaaagtatgctctcaaattatggtgggtatcagaatcccctgtggaacttagtaaacctacagaagtgtagccctagtttataagcctgggcctctgtttttt

SEQ ID NO: 4597 - DNA, 448 bp, Homo sapiens
cggacgcgtggggtgccaatggttggaaacaatccatatgcgaccacagaaggaaattcaacagaacttagcataaatgctgaagtgtattcattgccttcaagaaagctggtggctctacagttaagatccatttttattaagtataaatcaaagccattctgtgaaaaactgctttcctgggtgaaaagcagtggctgtgccagagtcattgttctttcgagcagtcattcatatcagcgtaatgatctgcagcttcgtagtactcccttccggtacctacttacaccttccatgcaaaaaagtgttcaaaataaaataaagagccttaactgggaagaaatggaaaaaagccggtgcattcctgaaatagatgattccgagttttgtatccgcattccgggaggaggtatcacaaaaacactctatgatgaaagctgttctaaag

SEQ ID NO: 4598 - DNA, 568 bp, Homo sapiens
  misc_feature (1)...(568): n = A,T,C or G
ggagatgatcccgtgaccagcngcaattcccggccgacccacgcgtccgcagatcatgaagaactttcaggctcctccacaaatctcgctgaccataacccttcttcttggcgagaccacgatgatgcaacctcaacccactcagcaggcaccccagggccctccagtgggggccatgcttcccagagcggagacaacagcagtgagcaaggggatggtttagacaacagtgtagcttcacctggtacaggtgacgatgatgatccggataaggacaaaaaacgccagaagaaaagaggcattttccccaaagtagcaacaaatatcatgagagcatggctcttccagcatctcacacatccgtacccttccgaagagcagaagaaacagttagcgcaagacacaggacttacaattctccaagtaaacaactggtttattaatgccagaagaagaatagtacaagccatgattgaccagtcaaatcgagcagtgagccaggagcagcatatagtccagagggccagccatggggaagcttgngtggattgtcagaaccacatgggat

SEQ ID NO: 4599 - DNA, 424 bp, Homo sapiens
  misc_feature (1)...(424): n = A,T,C or G
tacctcttccaagccaaagacgatgaggaaatgaacacatggatccaggctatctcttccgccatctcctctgataaacacgaggtgtctgccagcacccagagcacgccagcatccagccgcgcgcagaccctccccaccagcgtcgtcaccatcaccagcgagtccagtcccggcaagcgggaaaaggacaaagagaaagacaaagagaagcggttcagcctttttggcaaaaagaaatgaactcctttccttcacctcctgcccttctcttaccttttcagtgaaattccagcatgcaagctcagaaccaacacattactctctgtgcctaatgttcctcaatgtggatgatttttttttttttttaatttatagagcatttcggggggggggggggaaacacacctaaacactttatctn

SEQ ID NO: 4600 - DNA, 395 bp, Homo sapiens
  misc_feature (1)...(395): n = A,T,C or G
cttcagtgtatacccaataatttaaaattatgtgaaatgttttaaatttgtgaactcgtaattactgttttaatgattcagtttcttcagagtggtaattgtataaaattgctattgcagctttatattcaatatgatgtgcctgtaaaccaaggagttttccctgtttgtaaaaagacattgtagataattgaatgtttgattttagaaaggtcattagtttcttgttacacattttgttagtctggtttttgttgcttatcgggtttaatattgttcttgaaaatagttgatgctatgttatgtataacttttctaataaaagttgtgttataagctgtaaaanaaaaaaaaaaaaagaaaaaaaaaaaagggggcgccccttttaaaaatcg

SEQ ID NO: 4601 - DNA, 385 bp, Homo sapiens
  misc_feature (1)...(385): n = A,T,C or G
ccagctctaggtcaggtagcttggcaggtggatctagcaggctctaggttccatagcctgggttcagatcctggattcactggtcaccagctgtgtgtttctgaacctatgactcagcctcagcttcctcatctgtaaattagggataatactagtagctgtgtcacaggaatgttttgagaattcattggcatatgtgaagtgcttagagcagtgcctggcacatgagaagtgctcaggaaatagtagctgtttgtttaagctggctgtttaagcccagttgcctctctggccaagtgtctccagcttgcctggtcttttgggactcctgaaggaagggagcaccaaaactataggtgttaggatcatgagaaagacacatacn

SEQ ID NO: 4602 - DNA, 398 bp, Homo sapiens
caaataacctatgtatcaaagataaaccacatttttttttaaagaatactcttccaaataacctatggatgaaagataaatcacaagggaaattagaaaatattttgaactgagttataatgaaaacataaaatatcgaattttgtgggatgtagctaaagcaatgcttaagatataaatttatgacttcaaatgcctatgaaaaaagaaaaaagattttaagttcattatccaaacttccactttaagaagctagaaaaagaaaattattctcaaatgaaaaagaggaaggaaataaagactgaaatgaaaatcaatgaaacagtaaatggataacaaatagagaagctctcaaacattttggtctcatgatcaccttacactctcaaaaattattg

SEQ ID NO: 4603 - DNA, 397 bp, Homo sapiens
ctgctgagatgatccaggtcctgggccccaagcctgctctgaaggagggcaaccctgaggaagacctcacagctgacaaggcaaatgcccaggccgcagctctgtataaggtctctgatgccactggacagatgaacctgaccaaggtggctgactccagcccatttgcccttgaactgctgatatctgatgactgctttgtgctggacaacgggctctgtggcaagatctatatctggaaggggcgaaaagcgaatgagaaggagcggcaggcagccctgcaggtggccgagggcttcatctcgcgcatgcagtacgccccgaacactcaggtggagattctgcctcagggccgagagagtcccatcttcaagcaatttttcaaggactggaaatg

SEQ ID NO: 4604 - DNA, 398 bp, Homo sapiens
attgacttatgagataattaatgattaaactattattgataaaaagagtagcattccattttcttgaggagcacatgatattatgaacaatacaaatgcacttcaagaaaaaggaatgctactcttttgtggcttacccgtattattttcaatatcttaataccctaatacagagtccattaaaatccaaaaaaaaaagcaatcaatatggggggccccccctgaaaaatttcaacaaggggcctctgcttcacgaatatggaaagctcctattttttcttttattgggagtatttttaatatttccttaggccccttgggaaagcatccttttcttcggggggggcttttattgtaccaaccccctcctttatttttttccttcaaggggaggataa

SEQ ID NO: 4605 - DNA, 412 bp, Homo sapiens
agcagctgtctgacagcttgactcttcttcctacactgggccatttagaaccttcaacctttatgaatttcacttaatttgcttcattattaagtaattggtagtttccagattcctgaaatatttgaatccttgagtttaatgccaaacacttttggggtggtttagatgaactctgactctattttatttcaagtaggtgctatatcccggccataaacccctatagaaaagccagaaagttgtgcttcctttgaggctattagggggctctgtggtgttttaggatgggtgtgggtaactcatctacctaaacttttaatttctttacaacattcagcaagagagggggtcagtagtctctatctgctaataaatgaagaaaggaagtaaactctgaaaaataataaac

SEQ ID NO: 4606 - DNA, 401 bp, Homo sapiens
aaaattgagagcgttttcgcactccaggggctgctcctggcggctctgcggccgtcaccatgccacagaatgaatatattgaattacaccgtaaacgctatggataccgtttggattaccatgagaaaaagagaaagaaggaaagtcgagaggctcatgaacgttcaaagaaggcaaagaaaatgattggtctgaaggctaagctttaccataaacagcgtcatgctgagaaaatacaaatgaaaaagactatcaagatgcatgaaaagagaaacaccaaacaaaagaatgatgaaaagacaccacagggagcagtacctgcctatctgctggacagagagggacaatctcgagctaaagtactttccaatatgattaaacagaaaagaaaagagaaggcg

SEQ ID NO: 4607 - DNA, 401 bp, Homo sapiens
  misc_feature (1)...(401): n = A,T,C or G
acaaacngnnnccgcacaataaagcttctgagtaacactttctgattactcatgataaactgacatggctaactgcaagaattaaatcttctatctgagagtaataatttatgatgactcagtggtgccagagtaaagtttctaaaataacattcctctcacttgtaccccactaaaagtattagtctacacattacattgaagttaaacacaaaattatcagtgttttagaaacatgagtccggactgtgtaagtaaaagtacaaacattatttccaccataaagtatgtattgaaatcaagttgtctctgtgtacagaatacatacttattcccatttttaagcatttgcttctgttttccctacctagaatgtcagatgtttttcagttatctccccc

SEQ ID NO: 4608 - DNA, 377 bp, Homo sapiens
gaaatccggcctcgcttccctctctttggcgggtggaagacccattacatcgttggctacaacctcccaagctatgagtacctctataatttgggtgaccagtatgcactgaagatgaggtttgtggaccatgtgtttgatgaacaagtgatagattctctgactgtgaagatcatcctgcctgaaggagccaagaacattgaaattgatagtccctatgaaatcagccgtgccccagatgagctgcactacacctatctggacacatttggccgccctgtgattgttgcctacaagaaaaatctggtagaacagcacattcaggacattgtggtccactacacgttcaacaaggtgctcatgctgcaggagcccct

SEQ ID NO: 4609 - DNA, 464 bp, Homo sapiens
  misc_feature (1)...(464): n = A,T,C or G
tgtgcngnnnnnnaaagtcagtcatcgtgcagaaccgcgccggattcccggtcgaccccgcgtccgcgttaaactcctgctaagctaactagctcttttttatgggtccatgcacacgaccgaactcctctttcactgaccagagattatttctgacaacccaggatatcccgaaagcttggaggcatatggctggaaaatgaaacgacccaggacatcgtttctggctgcatcattattttgtgtcgcgtagtaccagatgggcagtcagtgagcggcgcagggatgtgaacggacggttttataatgtgaaaattttcccttggtaaagctaaaacagatttaatttccctctcttttctttcactacttccccctctttattccccctctgtctgcaatatcagtgaactcaactttgcagtgaggtggccaaaaagagagagaatgaggagatcttgatn

SEQ ID NO: 4610 - DNA, 461 bp, Homo sapiens
  misc_feature (1)...(461): n = A,T,C or G
gtgccgnnnntttgtagtcttcgtagaaccncgannnnantggtagacccacgcgtccgagcagtctgtccatcagtataccatcagcaaagacttgtttctcttcctgcaggcccgagccaatgctgcggagctcagcgagaaactgtataagagcacctgggaaaaccagaaagcaaaagggtttgagctgcgtcttgattccttgaccttcctggcagtcgaagccaaaagggacctggctagcgaggtgaagaacaacgaggattatgagagatccagagggaagctcattggggcaaaagatgtacagggagattcgcaaatgagccactcactgcaaatgtccaagctgcagagtgagctggagcacaagaaaggattcgaggacaccaaatcccaatgccacgtctccctggacatggtccacctcgtgcatgcccgcaaagctcatcatttat

SEQ ID NO: 4611 - DNA, 487 bp, Homo sapiens
ggggcatagaagccctgcggaccgtcgaggaactctccgggtcgacccacgcgtccgcgttgaaatgtttttcaatcaggatcatcctccaagcagtcctgttcattcatgtctgcctcaaattgctggtgaatacataaaatagttacttgctaatcatttcaatgcatgatccttttcttgcctcccttgtgtcagggtgggcattacatatacttttcttttttttttttttgaaaacggattttttttttccccccccaggaggaggggaaggggaaaattttaatttaattgaaccctccccttcccaagtaaagcaatttttgtgccccaaccccccaaggaggggggaataaaggggggggcccccctgccccggtaaattttggttttttaaaaaaaaggggggttaaacaaattggcccgggtgggtttaaaattttgaacctaaggggaccccccggcctaaccctccaaaagggta

SEQ ID NO: 4612 - DNA, 393 bp, Homo sapiens
gccatttcatactgctctccatagtggctgtactattgcttttctattgtcattgcccttttattgccacaccacctctctgtcacccagcccccctttcctaaactctggcaaccactaatctattttctagttcaatattttgccatttcaagaatgaatataattagaaccatacagtatgtagccttttgggattggtttcttccattaagcataatttcctggagattcgactaaattgttacatggatcaataattccttacattttattgttgagtagtattccatactatatatgcactacagtttgttcaaccattttctgttgaaggacatctgggttgtttacagtttgtaattatgatgaacattacaccaaacgatgcgg

SEQ ID NO: 4613 - DNA, 423 bp, Homo sapiens
  misc_feature (1)...(423): n = A,T,C or G
gggtttcggttcccccccttccccttnnnngtttctgttggtgacattgcaccgcgcccctcgtggggtcgcgttgccaccccacgcggactccccagctggcgcgcccctcccatttgcctgtcctggtcaggcccccaccccccttcccacctgaccagccatgggggctgcggtgtttttcggctgcactttcgtcgcgttcggcccggccttcgcgcttttcttgatcactgtggctggggacccgcttcgcgttatcatcctggtcgcaggggcatttttctggctggtctccctgctcctggcctctgtggtctggttcatcttggtccatgtgaccgaccggtcagatgcccggctccagtacggcctcctgatttttggtgctgctgtctctgtccttctacaggaggtgttccg

SEQ ID NO: 4614 - DNA, 407 bp, Homo sapiens
cctagatcctgggcttcccaccacagaggatgtgatcttgaagacagatcacgtcaccaagaacattcaggaactgttgcgggcagcccaggagtttaagcatgacagcttcctgccctgctcagagaagatccatttggctgagaccgagatggcctccctcttcccaaagaggccagccctgcagccagtgcggagctcactgcggctgctcaacgccagcgcctaccggctgcagagtgagtgccggaagacagtgcccccagagcccggcgccccagtggactttcagctgctgactcagcacgggatccagtgcgcctatgacatcgccaaggctggcaagcagctggtcaccatcaccacccgagagaagaagcagtgacctctctccccacacctccacg

SEQ ID NO: 4615 - DNA, 454 bp, Homo sapiens
  misc_feature (1)...(454): n = A,T,C or G
agccgctgctgatctgtagctgtgagtggatggcagccatgttcggggggtcatttgtggaaagtgccaacagtgaggtgtatctcccgaacataaacaagatatcaatgcaagcagtattggattatctctataccaagcagttgtctcctaacttggatctggacccgctggaattaattgccttggcaaacagattttgcctgccacacttggttgcacttgcagaacagcatgccgttcaggagttgaccaaagccgccacgagtggcgtgggcattgacggagaagtgctctcttacttggaattggctcagtttcacaatgcccaccagttggccgcctggtgtttgcaccacatctgcaccaactacaacagtgtatgctccaagttccgtaaggaaatcaaatcaaaatctgcagacaaccaggaatacttcgagcggcaccgctn

SEQ ID NO: 4616 - DNA, 415 bp, Homo sapiens
  misc_feature (1)...(415): n = A,T,C or G
aaaaactggaaaagaaatgttggattataaaagaaaacaagaagaagaattaacaaaaagaatgctggaggaaagaaacagagagaaagcagaagatagggcagctcgagaacgtataaaacagcagattgcattggaccgtgcagagagagctgctcgttttgcaaagacaaaggaagaagtagaggctgccaaagctgctgccttgctagcaaaacaggcagaaatggaagtcaagagggaatcttatgcaagagaaagaagcactgttgcaagaattcaattccgtcttcctgatggttcttcctttacaaatcagttcccttctgatgctcctctagaagaggcaaggcagtttgctgcacagactgttggcaacacttacggtaatttttcgttagcaaccatgtttccn

SEQ ID NO: 4617 - DNA, 404 bp, Homo sapiens
accgacaagaagagtcaaggctgactgggtttggtgcctcagcgactgaaaagacagaattaatgaaagtggcaagatctcggggggaagcatgtgttttatggaggaccagaaagaagcttggttgcaggtgccagttagataccccatttgaaggtgatgcatgaatctggggttcagggttcagggctgagcagtcctcctgctctgggctgtggcttcatcagctcccagcttggttgggaggggcctgtggcttctgaagaggatgctgctggggaatagtacaactcaaaggggtaggattctgtgccctcacccctaggccgaaggaaagtttgccagtcacaaaactagctgagcccctgggctccctgcagcacacacactttgtgcacgctcct

SEQ ID NO: 4618 - DNA, 520 bp, Homo sapiens
  misc_feature (1)...(520): n = A,T,C or G
ttttgatgcctgtgggaccgtgccggaactcccgggncgacccacgcgttcgagaaaaacaggccaaactctgctgggggctgcagcctttaggtagcagctggcctcctgaggcaaaaggacacatactttgttgaggccaggaactggaccagcctgtcgggggcttggtaactccatccagaacatcctcagggtctccacaaggcagacacagcacagtaccacaggagatggctgggacaaagaaccaggagctggaggggtgaggcggtaggggggcagcactcctgaaacaatgagaacatagagaagagaaagaaaagtcataccagctcggaagagcttgcaaaccgatcttccaaaacacgcccagaattctaatgttcacaaagttatccagtcaataattagaatccactgcacatgagcattcagcattcgggattgtggcattcaggaatgtgtctttcgagattatgacccagactntctcaacatggccctttctttggttcat

SEQ ID NO: 4619 - DNA, 451 bp, Homo sapiens
agttaaactatgttgcccaggctggtcttggactcctggtttcaagtgatcctctcatcttggcctcccaaagtgctgggattacagggacgagccaccacaccccacctattgtctatatttctatctttaacagcacttcagtcctgccttaagttatagttatgtatagatacccattatactttaaatttttcagcagaaattatgcttttatcttctctgcagtgttatatgttggtgtgcaaaaatgttaaatttatttttcctaagtaccccatctgcttttcaactctgtcctctgcctgaaaagcctccctccagcccctacttccctcccatcttagttcacaaagtcaggttgatttgcccccagctgtcaaagcagactacctgtttccacatgtaactggttatgttctgtaaagttacaaaaatagaaaggttgaat

SEQ ID NO: 4620 - DNA, 488 bp, Homo sapiens
  misc_feature (1)...(488): n = A,T,C or G
agaattcaaacacttgaccctgagggagcagagatgtgggaatgggggccgagccaattgtgatgcttccctgattgtgactgaggagctgcacctgatcacctttgagaccgaggtgtatcaccaaggcctcaagattgacctagagacccactccttgccagttgtggtgatctccaacatctgtcagatgccaaatgcctgggcgtccatcctgtggtacaacatgctgaccaacaatcccaagaatgtaaacttttttaccaagcccccaattggaacctgggatcaagtggccgaggtcctgagctggcagttctcctccaccaccaagcgaggactgagcatcgagcagctgactacactggcagagaaactcttgggacctggtgtgaattattcagggtgtcagatcacatgggctaaattttgcaaagaaaacatggctggcaagggcttctccttctgggtctggctggacaatatan

SEQ ID NO: 4621 - DNA, 426 bp, Homo sapiens
  misc_feature (1)...(426): n = A,T,C or G
aattgctgagtacaatgctccttgcagcaattgcaaactcatccgtctcgtactaatcatatactttcactatggctggtttcagatctcttactgtgagacggatgagtttgcaattgctgagtacaatgctccttgcagcaaagatcttggaaatgcttgaagaccacaaggctgaaaagtgctttgctggagtcctgttctcagagctccacagaagacacgtgtttttgtatctttaaagacttgatgaataaacactttttctggtcaatgtccnnnnnaaaaaaaaaaaaatttgtaaaaacttaaaaaccaaaaagaaaaaaaaaaaaataaaaaaanttcaagccggggggctcctcttaaaaaacctcttggggggcccccccctagcggggtgaagaaactttttttttttttttt

SEQ ID NO: 4622 - DNA, 460 bp, Homo sapiens
  misc_feature (1)...(460): n = A,T,C or G
ctgtttgcagagttgaaggagaagagccaggcgtgcggagggaaaggcctctttgggatgtctttcatcttatttcaagccaaccccatggcctccatgactttttcaaaaaaaaaaaaaaaaaaaaaaaaaaaaaaaaaaaaaaaagggggggcccttaaaaaaaaaacctggggggggcaaaaataaagggggggaaaaaaaaaaaattttttttcttaaagggggggaaaaaaaaaacccccgggggaattttaaaaaaaaaacattttttgggggggggaaaaaaggggaaaaaccccccaaaaaaaaaaaaagccctgaagaaaaaaaaaaattttaaaggggaaaagggggaaaaaaaagtttaatttgttgggttgaaaaaaatttggggnnnntcnnnncncccccccctttttggggggcgtgttttccccccctctcctcttagaagaag

SEQ ID NO: 4623 - DNA, 237 bp, Homo sapiens
acttggacaagtgagcctcgaggaaagaagaattgcatctaataatttttggcgggctaagcgaagtggggctcacgcctgtaatcccagcactttgggagggcgaggcaggaggatcacttgaggtcaggagttccagaacagccagggcaacatatcgagaccccgtttctattattatttttaaaataatttaaaaaataaaaattgttggcatttaaaaaaaaaaaaaaaaag

SEQ ID NO: 4624 - DNA, 487 bp, Homo sapiens
cttacgcttcaaggaacgcttcacaacacggccttgatattcttttaatcctgtagtgtgcacttaaataaacagacttttgagaacaggcttatcaacacaggcataccacagatgggcgcagccataacatggcttacagtgaaggctcacagataggctgcctgcggttgagacctgtctcttttccttactacctctgtgagtccggatgagtttttcacctgcctctgcttgtttactcagccgaaaactgtggagagaagtggagcctactctgtaagactaatgtgaggattaaattagatagtactcttacgttagatatcataaatgctgccttatgttagatatcatacatgctcaacaaatgctggctctccttcatcagccatttgatgatagacattatcaagctactggacctaagttgtcacagacacattctatatgataatacgttctctgacgaagaatgtattaaccg

SEQ ID NO: 4625 - DNA, 424 bp, Homo sapiens
ctccagcctctgtgcctttgatcaggaggtctcaccctcctgtccctggctgggctaggtggtcctgtccaggctcctgcagcgcccccctcactttgacactggactaggatgcagcctcccttctgcgtccccttgagggtaccctgggtcccctcatcaggggcagaggcatgaaagagtctgggctggatggccaggggcttctgggcccgacgcctagtgcagaccctggggtcgaggtttgacatttgtctgactggtgcaaacaaagaatccttgcctttaaggtgacaggccctccacaggcttccagacttgaaggaaaaggtttaagaaagaaaacaaaaccaacagttagcggagcccaagcccagacactgtaaatagaaccccctgcaccaccccccgccgaccagaataa

SEQ ID NO: 4626 - DNA, 564 bp, Homo sapiens
  misc_feature (1)...(564): n = A,T,C or G
ggcgatgaccccgtgacagctctgcattcccggccgacccacgcgtccgagagagagaagattgaacgggagaaggaggagctgatggagaggctgaagcagatcgaggtacagactaagaaggctcagcaagaactggaagaacagacccgtagggctctggaacttgagcaggaacggaagcgtgcccagagcgaggctgaaaagctggccaaggagcgtcaagaagctgaagaggccaaggaggccttgctgcaggcctcccgggaccagaaaaagactcaggaacagctggccttggaaatggcagagctgacagctcgaatctcccagctggagatggcccgacagaaaaaggagagtgaggctgtggagtggcagcagaaggcccatatggtacaggaagacttggagaagacccgtgctgagctgaagactgccatgagtacacctcatgtgcagagcctgctgagaatgancangatgaccaggatgagattgggcanaggctantgctgacttacggcctgatgctatggccagggaccggagggagaagaccgt

SEQ ID NO: 4627 - DNA, 413 bp, Homo sapiens
cggagaatccgaattcgtggtcctcagaattggtttagggttgtttcgcggttcttcccgtattctgcctccgaggcccagtggggctggctgtgggccccctgtgctgtttgaggcgtgaaactcacctcaggaaatgtatctgatccattagcgtggattcatattatttggtgatggagaatcttcagctgtgttaagtgttaccgtcagtttcagagatggcttctttgcaaaggaaagggctgcaggcaaggattctcacctctgaagaagaggagaaactgaaaagagaccaaactttggtgtctgattttaaacagcagaaattggaacaagaggctcagaaaaattgggatcttttttacaaaagaaatagcactaatttcttcaaagacagacactggaccacc

SEQ ID NO: 4628 - DNA, 453 bp, Homo sapiens
tgtggcagtccgcctcagcatgaaagtggagctttgcaaaaggaccagaaatggatttggatgggcaaggttgaaagtagttaaagaaaagccattgcaactcagcagtgaacaaggcaaagacagtcaattgaaatcaaccctccattgcacagtaagagtatatgtgtgaagttcttgagccgagcccctaaaagtctccatgaacatcaaaccacgcctgttgggggacctcagttctctaccaaatgtcttgttaattgagctttggcaaatgtctccatgaggaccattgtcacccgtcatgctcatgagagtcacggcctacgcttccacatacttttaaaaatcttattaaagattacagagcagtcaggtgagtacacagacaattacatccagacgatgaacagaaggacagaataatgtactaactttctgctctttaatgga

SEQ ID NO: 4629 - DNA, 419 bp, Homo sapiens
  misc_feature (1)...(419): n = A,T,C or G
aacaagttaccctatggataacagcgcaatcctattctagagtccatatcaacaatagggtttacgacctcgatgttggatcaggacatcccgatggtgcagccgctattaaaggttcgtttgttcaacgattaaagtcctacgtgatctgagttcagaccggagtaatccaggtcggtttctatctacttcaaattcctccctgtacgaaaggacaagagaaataaggcctacttcacaaagcgccttcccccgtaaatgatatcatctcaacttagtattatacccacacccacccaagaacagggtttgaaaaaaaaaaaaaaaanataaatatttaaaataaaaattggggggggccttttttaaatatccctggggggggccaatttttccgggggggggggaacatattttct

SEQ ID NO: 4630 - DNA, 463 bp, Homo sapiens
  misc_feature (1)...(463): n = A,T,C or G
aaacaaaggctgcaggatctccttggtgtcttcatacattgaacacttatttagaaatccctcatgactttttccactcccatttcttgaggagaaaacagaagatctgagaaagggagaatgggagatggcctgccctggtctcttggctgccctaatggaaaggctccaagttgcagctttagaaacaagggctggcactatgagcaggctataacttcttgcttacaccttctctcttcacatcgggtgccgcctgtcaggtgagggccacagtccttcattccaggtgtttttgccttcagccttgctttactaccatgtttttctccttttctgtcttccatctgtccttccataaatccattcattattcatccatccatccgtcctttgagacatccatccttcaagccaccggttgaccccttcatcccnagataatgacttactatatgccaaa

SEQ ID NO: 4631 - DNA, 453 bp, Homo sapiens
  misc_feature (1)...(453): n = A,T,C or G
ccgcttccatgtccctggcggacacagctcccaggaacctccacgcccatggccactaggcagagggaatcttctatcacctcctgctgttccacctcgagctgcgacgcaaacgacgagggcgtgcgcggcacctgcgaagatgcttccctgtgcaagaggtttgcagtaagcattggctactggcatgacccttacatacagcactttgtgagactgtctaaagagaggaaagcccctgaaatcaacagaggatattttgctcgagtccatggtgtcagtcagcttataaaggcatttctacggaagacagaatgtcattgtcaaattgtcaaccttggggcaggcatggataccaccttctggagattaaaggatgaagatcttctcccaagtaaatattttgaggttgactttccaatgattgtcacgagaaagctgcacagtatcaan

SEQ ID NO: 4632 - DNA, 414 bp, Homo sapiens
caagaggaggagcaaggggcagaggggaagggaatcttaaagaagtcctggatgccacactcttcttccttcctcctcttccctctcctcagaggtctcactcgtggttcttcatttcctgccctgcctccatctcctctgggtgctgggaaagtggaggattagctgaagttttgcttctcggggcctgtctgaatctccattgctttctgggaggacataattcacctgtcctagcttcttatcatcttacatttccctgtagccactgggacatatgtggtgttccttcctagctcctgtctcctcctcatgcctttgctgggtatgggcatgttagggggaaggtcattgctgtcagaggggcactgactttctaatggtgttacccaaggtgaatgttggagacacagt

SEQ ID NO: 4633 - DNA, 409 bp, Homo sapiens
aatctttccaccaggcactatgagcataacagtattgatagtgaactaggtaaaatctgtagtgtttgtattagtgactatgtaactggaaacaagctcaggcaattaccttgcatgcatgaatttcacattcattgtattgaccgatggctctcagagaattgcacttgtccgatctgtcggcagcctgttttagggtctaacatagcaaacaatgggtaaggtgatgggatctactcaaatactgttttttagtagaactgaatgttcaagcattgttttgctgagttatttgtgattagctaaccaggatgaaaaataacagattatatatagtttgaactatttttcgtgtgcttttttaaacttgttaaaaagaaatttatataaaatttaaaatacaaatgtt

SEQ ID NO: 4634 - DNA, 455 bp, Homo sapiens
cccacgcgtccgagagagcactgtgcaagccaaatggttcaataatgaatggaaattctgggtgtaaagagtaaatatgccctggctctttctaccaatgtttgctcctggttggaaagaaaccaaagatttaagacgggctgctcttccagactggctgtgcctgcctgtgcccagcaacctgtgcagccggcagtgtgcctggtgtcacgccaggaggctgtggctgctgtgggccctctggaattgtgctcctcacaaagtttccccaaaaggttcttctaagcctttattgtccctggtaaatgtttcctggctgggcgcggtggctcacgcctgtaatcccagcactttgggaggccgaggcgggtggatcacctaaggtcaggagtttgagatcagcctgcccaacatggtgaaacctcgtctctactaaaaatacacaacttagccag

SEQ ID NO: 4635 - DNA, 467 bp, Homo sapiens
cggacgcgtgggaaaatgctcctatccaacaattatttttattttctccctgctctgtattgaccagaaaacaatgattttataatatttaacccaccaaaaagtccctccaacagcaatatcttatgaaaggctggctgttctcaataatttcattttcttggccaaagccaaaaggaatcaaaaaatccttggagcgcttgcctttccacgtgacttttaaaaggctcttaaagagcaaatgtcctcttctccttgctgctagagagggaggagaaagatgtcttgccttaaaagtttactgtttcttctgttcttctagcatctctcaaaaaattcacagtactccattttggggtccaaactgtaatgctcaaaataataaatgcttacacgaaaattatttattgagaaatattcatataaaaattacctaaagcaaagtaaaaaaaagtaaatcaaggtgg

SEQ ID NO: 4636 - DNA, 555 bp, Homo sapiens
  misc_feature (1)...(555): n = A,T,C or G
aggagattgatccctttgacagccntcaatacccggcccgacccacgcgtccggngatttctttcttttatttattattattattggtgttgagacagagttttgcccttgttgcccaggctggagtgcaatggcgcgatcctggctcactccagccagcgcctcacaggttcaggtgattctcctgcctcagcctccggagtagctggggttacaggcacgggccaccagcccagctaatttttgtatttttagtacagacggtgtttcaccatgttagtcaggctggtctcgaactcctgacctcaggtgatccgcccacctcggccttccaaagtgctgggattacaggcatgagctactgtgcccagcctctatgatttcaattntcatgtttaagtacctatgtagaacctaactgtccatangtaaacacaacaaaaaaaagatttggcttttggcaaagatcatggacgttacacagggtaagtgcagatgattttatcacattagaagataaaaaaaatgaagtgagttgtgaaacagttttgttan

SEQ ID NO: 4637 - DNA, 411 bp, Homo sapiens
cccaagcgtacgtttactcttttgaggtgagaatagtttatattacgatgtaaaagcttctttaatactaaggatttttcaggacttcaccaagtatcagagcaataacacaaatgaagtgtcattattcaaaatagtccactgactcctcacatgtgttatcttattataaagaactatttgtaggaactatcagaatctacattctaaaacagagattgaattttttctatgccacattaacatcttttaaagatgatgagaatcaagtgtggaaaagtaaggccatactcttacataataaaatgccttttaagtaatttttttcaaagaatcacagaattctagtacatgtaggtaaatcataaatgtgttctgagacatatgatcaacagatgagaactggtggtt

SEQ ID NO: 4638 - DNA, 571 bp, Homo sapiens
  misc_feature (1)...(571): n = A,T,C or G
ggagtttgatcccgtgagaagcctcaataaccggcccgacccacgcgtncgctaaaaacccagcattacaactagaagtaccagagaagcaagagcaaacatacctcaaagctagcagaagaaaagaaataacaaaaatcaaagctgaaatgaaggagtttgtgacataaaaaaaaaaaaccttaaaagatgaccaaatcccagagtgggatcattaaaaaaatcaataaatagatatttggatccctaaacttgtaaaaaaaaaaaaaagctccaaataaatcctatcaaaaatgacaaaaaaaatgttcccattgataccaaagggaaaaaaaaacaccggaaactactttaaacccctttatgtacacaaaataaaaaatgtgggaaaaatcgataaattcctggacacatacctccccccaaaatggaagcgggaagaaattgatccttgaacaaaccattattgacctccaaacctgaatcagtattaaatagcttacaaacaaaaatggccaaggactaaatggattcccacccaattttaattaattatgaggaaaagccggcg

SEQ ID NO: 4639 - DNA, 408 bp, Homo sapiens
gcgaaactagatgatccccaagatgccttcacttctaaaattacactttaatgacatcttctccagggcccgcctgtccccacgtagggagtgaagcaccaggcccagcaagccccgtggaggcctccgagatgggcaccaggagacaaggacagcgaggctatcgtcttgacaccacgggacctggtcactgttttgaaagggatttggttttgttttgctgggacgcttcctggaagtcttttcttgaggcagggtgtttatctggtttcttaggtagagcataaggctgttttctctcagacgtggacttggcaatgcggaactcagttctgggctgtgattcaaagccttgccagcttcgtgaattcaagaaatccttgtttccacccaaagacccaaagaaac

SEQ ID NO: 4640 - DNA, 420 bp, Homo sapiens
gttatggccggtcccttgcagggcggtggggcccgggccctggacctactccggggcctgccgcgtgtgagcctggccaacttaaagccgaatcccggctccaagaaaccggagagaagaccaagaggtcggagaagaggtagaaaatgtggcagaggccataaaggagaaaggcaaagaggaacccggccccgcttgggctttgagggaggccagactccattttacatccgaatcccaaaatacgggtttaacgaaggacatagtttcagacgccagtataagcctttgagtctcaatagactgcagtatcttattgatttgggtcgtgttgatcctagtcaacctattgacttaacccagcttgtcaatgggagaggtgtgaccatccagccacttaaaagggattatggtgtccag

SEQ ID NO: 4641 - DNA, 445 bp, Homo sapiens
  misc_feature (1)...(445): n = A,T,C or G
cccacgcgtccggaagactggtctaggtgctgctcctgaacttggtctctgagccatggcttcccatagacactcaggtccctccagctacaaggtgggcaccatggcggagaagtttgactgccactactgcagggatcccttgcaggggaagaagtatgtgcaaaaggatggccaccactgctgcctgaaatgctttgacaagctctgtgccaacacctgtgtggaatgccgcaagcccatcggtgcggactccaaggaggtgcactataagaaccgcttctggcatgacacctgcttccgctgtgccaagtgccttcaccccttggccaatgagacctttgtggccaaggacaacaagatcctgtgcaacaagtgcaccactcgggaggactcccccaagtgcaaggggtgcttcaaggccattgtggcaggagaatcaaan

SEQ ID NO: 4642 - DNA, 412 bp, Homo sapiens
cccagatgggaagcgtcttcctaatgctcttggccttggagggtcctttctgtgagttcaattgacaaaatctacaaatgcgctagcttggcaaagagaaatgtttatagggtctagctctagtctcacaaaggaaagcacaggaagggtggatttggaactgatagacaataaattgataattgccacttaaggagtagcgtacgccaggcgcagtggctcacgcctgtcatcccaccactttgggaggctgaggcgggcggatcatctgaggtcaggagtttgagaccagcctgaccaacatggtgaaaccccatctctactaaaaatacaaaaattggccaggcatggaggcagacacctgtaatcccagctactcgggaggctgaggcgggagaatcacttgaaccca

SEQ ID NO: 4643 - DNA, 465 bp, Homo sapiens
tgagatccgtgagttgcaggctcagcttcaggaacagcaggtccaggtggagatggacatgtctaagccagacctcactgccgccctcagggacatccgggctcagtatgagaccatcgcggctaagaacatttctgaagctgaggagtggtacaagtcgaaggtgtcagacctgacccaggcagccaacaagaacaacgacgccctgcgccaggccaagcaggagatgatggaataccgacaccagatccagtcctacacctgcgagattgacgccctgaagggcactaacgattccctgatgaggcagatgcgggaattggaggaccgatttgccagtgaggccagtggctaccaggacaacattgcgcgcctggaggaggaaatccggcacctcaaggatgagatggcccgccatctgcgcgagtaccaggacctgctcaacgtgaagatggcccctgatgt

SEQ ID NO: 4644 - DNA, 424 bp, Homo sapiens
ttctttctgtggcaaaaccacaattctttaagattcctattgttcaggctaaggcaaatttttttgtttgtttcttcagtttaatattttgattttgtgtttttacgtaaatatttatattccttgaaagcaatttttgccaaggtagttcagtttaggaatatgttgttctaaaatatgtcttagaatcctgaaagcatagattttgaaatgtttttttaatgaaaatgaaggtcagagagaataattgccctgaccacatttgcctttcagtaggaggaggctgtgaaatagtaaaattataatcgtttatgccatgataaatacaagattggtaaataaatacattgattggtaaattatgagaatcaaaatgataaaaagagcctgcttttttccctaaccaatatagctatcttaagtg

SEQ ID NO: 4645 - DNA, 432 bp, Homo sapiens
aaatacaaagttaaaaataaaatcatataggttaaaattatgtaaacatctggcctagagcctcttgattcaactcacataactaaccagaccatgggggccaacaggtcaaaggacactatgtaaaagacatgacttacacacatggagtgagaggagcaacacaggctcccatgggtggggactgagctggaaggtcacagtaatgagtgaactcccccttgggcacacttagtatgatgagtaaagcttccttgtgactttagagaatgatcatgggaacactttataagaagatcccagacagaagagcagagccccttgtggtgtgcatagctttaggggaatcagggagcccctcctaccactatactctccaaaccatgtagaaccaaagatggttacctctttctcaaatggtgttgttcaggg

SEQ ID NO: 4646 - DNA, 451 bp, Homo sapiens
  misc_feature (1)...(451): n = A,T,C or G
gatgcgagacaaacctgatagcctcggttgactacggttattcccgggccgacccacgcgtccgacgacctgtctcgccgagcgcacgccttgccgccgccccgcaggcagctgggataccgcgcctccagtcttgaccttgctgggggcgttcggaaagaaggacacgtgggctcgcgccgagtgggccgggccgccgcccccagcatcgcggccttgctgcttgagagtattgagcanccttgggtggatccatggagacactttgctgagcggctttttgcaccgtcaggaatacttttaacttacctggtcacttggatttgtaacttgcctctctccggctgacttggtttctcaggggccacagttggagtgggtctgcccacaaggccgttttcgcgaaatgcttcggttacccacagtctttcgccagatgagaccggtgtcc

SEQ ID NO: 4647 - DNA, 391 bp, Homo sapiens
  misc_feature (1)...(391): n = A,T,C or G
naacgcgtccgcccacgcgtccgctcctagggggcagcagttagaataagggaagaggatttgctggtcactgtttgctgacatgggtttccatggtgagttcaggcctgaggacagcagtgtctgcaaaaccacatggcccttgagaaatgtccttgcacattgggcttcaaactcctcttctagggaatccatcttggcctgaaagcagaggtacaacaccagccccaaaggcaattctgttttcagattggttgctctggaaaggaaggctggggtgagggggcattttacttgcacagaggctgaccctgcctcccctcttcactgaccccatctccaaggtagacctcagccatgtcagtccctgttctgggaggtgctgggctgg

SEQ ID NO: 4648 - DNA, 455 bp, Homo sapiens
  misc_feature (1)...(455): n = A,T,C or G
gatgcggagancccctggtaagcctcgattgactncgtatgcacgggccgacccacgcgtncgagaagatgaatttaagtttagaaactctgatggattatttcaccaacattattgaaattcacccacaagactaaaaacagaatgtctcagaaataatgaaagaggcaaaaatcaatgtgcacaagtcaatatttacaacctaccagccacaaagggaaggttcgcccacaagactaaaaccagaatgtcttacaaataatgaaagaggcagaaatcaacgtgcaaaagtcaatatttacaacctaccacccacaaagggaaggacataggtgtataaagctttgcaatgaggtagaaggaagcatcagggatgaagttcacagaaagacactgttttgcctagttggatacagttatttggcacaatcttatctgttcatttaagctattgg

SEQ ID NO: 4649 - DNA, 481 bp, Homo sapiens
  misc_feature (1)...(481): n = A,T,C or G
ctaaattctccttagtttgttaataccagtattcagattcctgattcatttatacatctgtttccatatggcagggacattatgatacttaatgaataatgctttgaggagttctgcagttaactttcaagtcttccagatgattgtcaacaacaaaaaaggcttattgaatcccatcttgctatgcaagttttatcagatgatcaaatagtagatctgatacatccccattgtatgtacgacattttcaaaccaagtcttaacttttcaaggacattttagtagctaattcaggggagggggaagaatgatgcaggtttttagattgactgactatttttgagttatggggctcattttgaaagactgctgtccagatcagcttgttgctgcagataatagaaggttcttatgaatccaagttgtatattcacttgtaggataatttaaaaattagattttttttgcatatgagcaaaan

SEQ ID NO: 4650 - DNA, 378 bp, Homo sapiens
attcttctctccacatccttctctgtacttactttccccaatggcccccaaaaagccagagcccaagaaggatgatgccaaggcagcccccaaggcagctccagctcccgcacctccccctgagcctgagcgccctaaggaggtcgagtttgatgcttccaagatcaagattgagttcacacctgagcagattgaagagttcaaggaagccttcatgctgttcgaccgcacacccaagtgtgagatgaagatcacctacgggcagtgtggggatgtcctgcgggcgctgggccacaaccccacacaggcagaagtgctccgtgtcctggggaagccaagacaggaagagctcaataccaagatgatggactttgaaac

SEQ ID NO: 4651 - DNA, 456 bp, Homo sapiens
  misc_feature (1)...(456): n = A,T,C or G
gagcgggagnanaaaattgatagcctgcggttcgattcccgttttcccgggccgacccacgcgtccgactagttctagatcgcggcgatcctcccacatgtcatcagcaggatgggcaagctggagcaggtggacgtgaaccttttctgcctggtcgccacagacttctacagacaccagatagaggaggagctcgaccgcagggccttccagtctgtgcttgaggtggttgcagccccaggaagcccatatcaccggctgctgacttgtttacgaaatgtccacaaggtcaccacctgctgagcgccatggtgggagagactgtgaggcggcagctggggccggagcctttggaagtctgcgcccttgtgccctgcctccaccgagccagcttggtccctatgggcttccgcacatgccgcgggcggccaggcaacgtgcgtgtctctgccatgt

SEQ ID NO: 4652 - DNA, 379 bp, Homo sapiens
ctctgtagcgggcgacctatgccgcgggacccggacggaggtagaggccagggcagcgcgtccgggagcggagtccgcgcccgccgccgccatgccggacagctgggacaaggatgtgtaccctgagcccccgcgccgcacgccggtgcagcccaatcccatcgtctacatgatgaaagcgttcgacctcatcgtggaccgacccgtgaccctcgtgagagaatttatagagcggcagcacgcaaagaacaggtattactactaccaccggcagtaccgccgcgtgccagacatcactgagtgcaaggaggaggacatcatgtgcatgtatgaagccgaaatgcagtggaagagggactacaaagtcgaccaagaaatt

SEQ ID NO: 4653 - DNA, 476 bp, Homo sapiens
gcagacttgaccttgaccagatagtcttcaagatgccaaactgtggcggaggcgcaaaatgtggagcctgtgaaaagaccgtctaccatgcagaagaaatccagtgcaatggaaggagtttccacaagacgtgtttccactgcatggcctgcaggaaggctcttgacagcacgacagtcgcggctcatgagtcggagatctactgcaaggtgtgctatgggcgcagatatggccccaaagggatcgggtatggacaaggcgctggctgtctcagcacagacacgggcgagcatctcggcctgcagttccaacagtccccaaagccggcacgctcagttaccaccagcaacccttccaaattcactgcgaagtttggagagtccgagaagtgccctcgatgtggcaagtcagtctatgctgctgagaagttatgggaggtggaagccttgcacaagactgtttcgctgtgcatctgg

SEQ ID NO: 4654 - DNA, 446 bp, Homo sapiens
  misc_feature (1)...(446): n = A,T,C or G
tcttcttcagactgcgccatggggctcagcgacggggaatggcagttggtgctgaacgtctgggggaaggtggaggctgacatcccaggccatgggcaggaagtcctcatcaggctctttaagggtcacccagagactctggagaagtttgacaagttcaagcacctgaagtcagaggacgagatgaaggcgtctgaggacttaaagaagcatggtgccactgtgctcaccgccctgggtggcatccttaagaagaaggggcatcatgaggcagagattaagcccctggcacagtcgcatgccaccaagcacaagatccccgtgaagtacctggagttcatctcggaatgcatcatccaggttctgcagagcaagcatcccggggactttggtgctgatgcccagggggccatgaacaaggccctggagctgttccggaaggacan

SEQ ID NO: 4655 - DNA, 459 bp, Homo sapiens
  misc_feature (1)...(459): n = A,T,C or G
tgagcaggagaaaaaattcggatagccttgcggctgacttcgtctnaacggnccgaccccgcgtccggcgccttctccgcaccagggaagccccacccaccatatgccaagatgtcctgcaagcgggccaaagccaagaccaccaagaagcggccacagcgggccacatccaatgtcttcgcaatctttgaccagtcccagatccaggagtttaaggaggctttcaacatgattgaccagaaccgtgatggcttcattgacaaggaggacctgcacgacatgctggcctcgctggggaagaaccccacagacgaatacctggagggcatgatgagcgaggccccggggcccatcaacttcaccatgttcctcaccatgtttggggagaagctgaacggcacggaccccgaggatgtgattcgcaacgcctttgcctgcttcgacgaggaagcctcaggt

SEQ ID NO: 4656 - DNA, 440 bp, Homo sapiens
aaaggaaaatgtatttaagtgtgtcagaatagtggatctatatgtagaaataaccgatcgataggggaccaaagttagctgcgtgcgaattatatttactcagggagagatttgggaattatttttcctgacttgcataccatgctaaatattaagaaactgcatgtaagtctgagtagtcaaccacgtactaatgaagttttgtagtcttttaatagcatagtactttgcttaataaagatgatgtttacttgcgaaaaaaattactttaaaaaatacacatacaacactgctggtgggagtataaattacttcaatcattgtggaaagcagcttggcacttcctcaaagagctaaaagcagaactaccattcaacccagcaatcccattactggatatatacccagaggaatataaatccgtctaccttaaagacaca

SEQ ID NO: 4657 - DNA, 402 bp, Homo sapiens
  misc_feature (1)...(402): n = A,T,C or G
cggacgccccnncacacgttagaagaatatgccagactcagaactacctcccgcccctgcccagtgagatctgtgacctgcccccagccctgttgcgagtgcacacgcttccctggggatgggggtgggtgagaacagcctttgacctgcagacctggattccagtccccattctgcccttgctccccttagtacgccgagctgctcgacctccgagcttcggtttccttgtgtgtgatggcgaggctggagctaccccaagggactgtcatgaggctaaataatgtatgtgaaaggccttaacccagtgccaggcacacagcaggtcccagaaaaaggatgtgccatcctctcactttctgtctaccccacccatcctcatccttcagggtttgagcaaga

SEQ ID NO: 4658 - DNA, 422 bp, Homo sapiens
acccacaacagcccatttttcttatgtatattggaatttcaagtaagctttcatggggtgcagtggggcggggaggaatggatgggataaaaaaagtggagattttgctgctttaaaaaagttgagaactacttgagtagtttttaagtattttaatgtatttcatttggccaaattcaactgccacaagcatgctagtcatagttgtaactgtgcagtggtaatatgcttatgcctacctttttcctctcaaacaatttgttttttttacattgcattctgagtactgaagagcatcttgaaatgtatggaagcggattctatgctaattgataatcagtaatgttcagctgtcatgatagtacgttactggttgcagacccatctctcttttatattatagcactagtgccgtttataag

SEQ ID NO: 4659 - DNA, 478 bp, Homo sapiens
cccacgcgtccgagatgatatctgtattctgaatcatgaaaaagcccataagagagatacagtgactccagtttcaatatattcaggagatgaatctgttgcttcccattttgctcttgtcactgcatatgaagacatcaaaaaacgacttaaggattcagagaaagagaactctttgttaaagaagagaataagatttttggaagaaaagctaatagctcgatttgaagaagaaacaagttccgtgggacgagaacaagtaaataaggcctatcatgcatatcgagaggtttgcattgatagagataatttgaagagcaaactggacaaaatggtaagttgatttgaagcgaatgacatctgcattttggaaatgaattttctccttcaagaggtttaaaattagaagtaagttaaatatttacatttagtaattaaaattttgtatacatgttcaaggcaaaatggaaattttagt

SEQ ID NO: 4660 - DNA, 462 bp, Homo sapiens
  misc_feature (1)...(462): n = A,T,C or G
actagttctagatcgcgagcggcctccatgactttttcaaaaaaaaaaaaaaaaaaaaaaaaaaaaaaaaaaaaggggggggggccctttaaaaaaacccctggggggcccaaaatttaccgggggggggaaaataaaattttttcccttaaaggggggcaaaaaaaaaccccccggggaatttttgaaaaaaaccctttttttgggggggggaaaaaggggcccccccccccccaaaaaattaaaccccttggggaaaaaaaaaaattttaagggggaaagggggaaaaacaaccctaaattccctgggggaaaagaaatgnnnnnnnnnnnnnnnccccccccccccnccgccgcccccncccccccccccccccnccnnnncncccccccccggggnnncccccccccgcgggcggggggggccacaccccccccgcggggcggggccgcggggggncg

SEQ ID NO: 4661 - DNA, 481 bp, Homo sapiens
caaaaagaagcaggagctgcagcatgccaacagttccccactgctccggggcagccactccttggagctccgggcctgtgagttaggaaatagaggttccaagaacctttcccaaagcccaggagctgtgccccaagctctggttgcctggcgggccctgggaccgaaactcctcagctcctcaaatgagctggttactcgtcatctccctccagcacccctctttcctcatgaaactcccccaactcagagtcaacagacccagcctccggtggcaccacaggctccctcctccatcctgctgccagcagcccccatccccatccttagcccctgcagtccccctagcccccaggcctcttccctctctggccccagcccagcttccagttgcctgtccagctcctcactgtcatcccttggggaggatcaagacagcgtgctgacccctgaggaggtagccctgtgcttggaactcagt

SEQ ID NO: 4662 - DNA, 485 bp, Homo sapiens
  misc_feature (1)...(485): n = A,T,C or G
gaggaggcnattaaaaccttnttttgatcgccgtgagtaccggtccgaaaacgcgggcggaaccacgcgaaacctgcgcgtggtgtagggtcaaagttgaacagcaactcgggggcagggaggacgtcaaggcctggtaggacaagcgactctccatggtttctctcaggttctgagactctaggcaggctggcaggcaacaccttaggaagccgctggagttctggagtgggtggaagtggtggaggatcctctggtaggtcatcagctggagctcgagattcccgccggcagactcgagttattcggacaggacgggatcgagggtctgggcttttgggcagtcagccccagccagttattccagcatctgtcattccagaggagctgatttcacaggcccaagttgttttacaaggcaaatccagaagtgtcattattcgagaacttcaaagaacaaatcttgatggaaccctgctgtaaan

SEQ ID NO: 4663 - DNA, 395 bp, Homo sapiens
  misc_feature (1)...(395): n = A,T,C or G
ngncgacacgccaatgtcaagatcttctccgagaagctgttgttgctcctgaacagaggggatgaccctgtgcgcatcttcaaacatgagccacagccaccacactctgtcctcaagttcctgcaggacgtgtttggcagcccggccacagctgccatcttctaccacacagacatgatggctctcattgacatcactgtgcggcacatcgcagacctgtcaccaggagacaagctgcgcatggagtacctctccctgatgcatgctatagtccgcaccacaccctacctgcagcaccgccaccggctacccgacctgcaggccatactgcgacgcatcctgaatgaggaggagacctcaccccagtgccagatggaccgcatgattgtccgaga

SEQ ID NO: 4664 - DNA, 423 bp, Homo sapiens
cggacgcgtgggcaacatctatggatgctcaagtccctgatataaaatggtggactatttgcatataacctgtgtacatcccgtattatttaaatcatccctagatcacttataatacgtaatacaatgtaaatgccatgtaaataactgttatactgtattaaggaataacaacaagaaaaatgtacatgttcagtacagacgcaattttttttgtgtgtggaatattttcattccaaggtcagttgaacccatggacataggaggctgactgtgtgtgtgtgtgtgtgtgtgtgtgtgtgtgtgcacacacacacacacatatttgtgagagtgatattttctcttcttaaaaaaattattatcacagctaaacaaaacaccagtttttcttatatcctcatatacccggtgtacatattt

SEQ ID NO: 4665 - DNA, 480 bp, Homo sapiens
  misc_feature (1)...(480): n = A,T,C or G
agcgaattgagnccncgatagtctgcggaaccgcnccggaaancccggggcgacccacgcgtccgcccaagagtttccgggaaaaggcattgctttgctcttgtgaatcagtggctaacctggttagaaactgctgaagaagaagaattagaggaagaagctgactaatgaaccagccaaagccttaaattgtgcaaaacatactgttgctatgatgtaactgcatttgacctaaccactgcgaaaattcattccgctgtaatgttttcacaatatttaaagcagaagcacgtcagttaggatttccttctgcataaggtttttttgtagtgtaatgtcttaatcatagtctaccatcaaatattttaggagtatctttaatgtttagatagtatattagcagcatgcaataattacatcataagttctcaagcagaggcagtctattgcaaggaccttctttgctgccagttatcatag

SEQ ID NO: 4666 - DNA, 419 bp, Homo sapiens
acgctcggctccagcgccatggcgccctccaggaagttcttcgttgggggaaactggaagatgaacgggcggaagcagagtctgggggagctcatcggcactctgaacgcggccaaggtgccggccgacaccgaggtggtttgtgctccccctactgcctatatcgacttcgcccggcagaagctagatcccaagattgctgtggctgcgcagaactgctacaaagtgactaatggggcttttactggggagatcagccctggcatgatcaaagactgcggagccacgtgggtggtcctggggcactcagagagaaggcatgtctttggggagtcagatgagctgattgggcagaaagtggcccatgctctggcagagggactcggagtaatcgcctgcattggggagaagctagatga

SEQ ID NO: 4667 - DNA, 486 bp, Homo sapiens
  misc_feature (1)...(486): n = A,T,C or G
gaggnnnnaattgacgccnnntttgatgggccgaagtaccggtcgagccacgcgtccggagagagaggagaaaagtcaaaggcaggaccccatcaaacccaccgtggtaacccgcacaagaaacagtggctgagccaggcatggggcaggcttgtggagcggtgcatagtgcctggaagacggggacacagggttttggctgaatgtgaggagagcacgcaggaggcgtcaggaaggacttcccctctcactgctcagtacacgtgtgagcatcgatgtcacaggcttccaggcagaggagtgcgtacgtgagggtctgctgtgcgctcagtacagagtgggtgtgggtttctggctcaggagcctcccgttgttggcacttctcctcctctgtctctggtcctcccacctccctcattgtagggatcattgtggtgaccccaacagtctccccatctaaagatcctcagcgtgggtctttccttt

SEQ ID NO: 4668 - DNA, 483 bp, Homo sapiens
  misc_feature (1)...(483): n = A,T,C or G
nattgaaagcctgtggtaccgttccggaactcccgggncgacccacgcgtgcgaacaaaatgcttcccactgcaagctacttcactaaaatagcttagtcaaagcagaaaacaaataacaaaacaaaacaaacaacaaaaccactctgaagaacaacaacaaaaaccactctgaagaaggggacagggaatcagtatccagaatcgctatagtatgttacctaatatgtccacttatcaacaagaaattgtaagacatacaaagaaactgaaatgttcgacttataaacaggaaaaaagcaggcaacagaaatggcctttgacagggaacagatatcagatttaaaagacaaaaacttcaaggtagccattatatatatattcacagcagtaagggaaaatacaaagataatgtctcatcaaataaagaatatcaataaaggaaatcataagatgaaccaaatgtaaattctggagttgaaga

SEQ ID NO: 4669 - DNA, 408 bp, Homo sapiens
caagataatatttgaagtaaataatgttaaagtgtttttactattgtttattggaatcccatatattcagtgtttagtctgttgttactgtttatgaaaaactaaatttttaatcatgaataatttattaaattaaataaatttattcatagaaacttttctgggttttagtaaaattgctaaatcaaaccaagattttaatatatcagcatttactttgtacccttataacatttcactcttgacttgatttgagaaacatgtttattttttgaatgttcttgtgttcaactaattttctgctgtggaaataaatacttatgatatataaaatcagcgttaactttgaattctaaaatatcctgatagcttcatagataagagcttttctttttctttgtttttact

SEQ ID NO: 4670 - DNA, 405 bp, Homo sapiens
  misc_feature (1)...(405): n = A,T,C or G
cttgtagctaaagcctagtagaattctcaagaataggtgaaatacactttcaaagttgcctgtcatttaaaagaccaaataagcattttgtattaaataaattagcagatggttagagacttcaaggagagttagcttggtcatttaattgcgacttcatgttatttgattgaaataacccacatccttgctttgtataagatattcgctctggagaagttacatgtaaatagaattctataaattgttttccagttgaccgagtatctgttgtgtttttgtttaaaaagaggattccatgacataataaaaattattttaaaaaaaaaaaaaaaaatttttttttttttataaaaggctcctcatatcatatgtgccgtaatattaaactctggctgccattan

SEQ ID NO: 4671 - DNA, 427 bp, Homo sapiens
  misc_feature (1)...(427): n = A,T,C or G
cccacgcgtncggactttttattccataaagtttttattggatctccagaatcaggaaataatgaaagcaggattttttttttctttagcataaggtatcccaaataccctctttgttttcagaagttgttccagatctgaaaatgggcttttataacttggctgtcttcatatagctctgaacatacaacattttgcttttgatttaggaacagtgttttttctcatgagataaaactagcacaagcagtttttcattattaaaagaatgtgaattatattggtgactttagtaaaagagtgctctaagaataaactaacaaaaaacacataatttgaatcaacacaaccacccacagcctaattattagcatcatccccctactattttttaaccaaatcaacaacaacctatttagctgttccn

SEQ ID NO: 4672 - DNA, 474 bp, Homo sapiens
  misc_feature (1)...(474): n = A,T,C or G
agctgcgagcaacagatccggacgccgcgagctgacccgctctgctgttgggcgatttttttttaattgcagaaaaatttattaaattggaaaatcttgcgtttttcaatggcgctggccccgggtcagcgggcgattttctctgcatcaagatgggctttgccgtttccgtagtgggcaccagtggtggcctgattgtcagtcttctcccggcatttttaaggccaggagccgagcgctgcttgtaggcgaataccctacagagcggtttggctttttaaattactgttattattttgggcagagaacagtcggtctggtgcaccccgtcctcgctgcagaagaggctgcgagtccgaggtgggtctctcggaaggtgaaattcctttctgggtgagcgagccccggccccgcccgcagtccagcggacccgcggtgtgccctcgccctgccggagcccggaaaatggagctn

SEQ ID NO: 4673 - DNA, 415 bp, Homo sapiens
  misc_feature (1)...(415): n = A,T,C or G
tggataagaacagatttttgtactctagaaacagatgttttcaacataatatgcagcaaaattattctatgcctattccctcctaatttaagggcgtgcagatgaaggctgacatcggcatagaaatgtgctaaatttcaaatatggttgttcaataatatatttttaattgtattttaaaacatccctttgtagggaatatcagtagaactattgaattgatgttgtatttttgcattagctgtcctttaattttgctttccatgtcttgatcttgttaccgaaatgcattctgtgtaatttcaacgtagactacgttcctgagtctgatgatgtcattgtaaataatcattcctcatgttgctctcacgggtttgacattggaggatagatgtgccatcaactntaaatagag

SEQ ID NO: 4674 - DNA, 344 bp, Homo sapiens
caaagattactattgtatctttggataagcatgaaaatataacattagaatgccgaatatactcccctaggggcaatcgcataagcatattagagattgtgcggctgtattttcatgcttatccagggactactattgtatcttccaaggaatataatattgtgagatggaactgccggggattaaaaagactacccaaacgaaagaaaaggaacctagcgggggggccgttctaaaggagccctcggggggcccaagttaacacgggcttgcgggagaaataactttttcttaagggggaatcggattaaacccaccctagggacttgcgggaagagaaactt

SEQ ID NO: 4675 - DNA, 418 bp, Homo sapiens
  misc_feature (1)...(418): n = A,T,C or G
tgtttttgtgtgtactgaattcatagtcattgttttgttagagcaacagccacatcaggtacgaaaaaatgtttaggtttgttcccacctgtttttgtattttgtttttacattttagcttaattgtattttgggaaactgtggtgaaagcctgttttaacatttgtaagttagtgcattagactgcatgctttttatttattttttagaactttatttcattaacatattaaattatttataaaaataaagtttgattttttcatatcatttgaatcattctatcctctttttcagctgctaaatgtgacctgtgcttataactatacctacctatatgtattatgttatagncttttctacttttttgactattttactttgaatttttacctctttaagaatctgttccaagtgn

SEQ ID NO: 4676 - DNA, 519 bp, Homo sapiens
attgaccccgtggtaccttgacggaccttccgggtcgacccacgcgtccgcttccagttgctatggttacgagttgcaacctccagaaagaattcgtggtttcacccgggaaaacagctccccggattaaacggataggtttacacatactgatccacccagctattcatcttctgtttgctgctttaattgggtgcggttaaaaggccacgtccctaggcgttcaccggctttcttgccatctgctgcatgaaaactgactttgccgaaaaaattaacaaagaagagcgaaaatgacagaccgcaaccgggataagaaaagtacttcaccttcaaattcagacacagaaatgaaatctgaacaactgcctccttgtgtgaaccctggcaatcctgtgttttcatgtatgttggatccaaagacactccagacagccacctcactatcaaaacctcaaatgattatgtataaaaccaattcaagtcattatggtgaatttctacctattccacagtttt

SEQ ID NO: 4677 - DNA, 404 bp, Homo sapiens
ctcggcagcatggcgtccgtgacgctgagcgaggcggagaaggtgtacatcgtgcatggcgtccaggaagacctccgtgtggatggccgtggctgtgaggactaccgatgtgtcgaagtggaaactgatgtggtgtccaacactagtgggtccgccagggtcaagctgggtcacacagacatcttggtgggagtgaaagcagaaatggggacgccgaagctggagaaaccaaatgaaggctacttggagttctttgttgactgttcagccagtgctacccctgaatttgaaggtagaggaggtgatgaccttggcaccgagatcgctaacaccctctatcggatatttaacaataaaagcagtgtcgacttaaagaccctctgcattagtcctcgggagcactg

SEQ ID NO: 4678 - DNA, 420 bp, Homo sapiens
tagcgcgagcgccctgcagcgcttggtagagcagctcaagttggaggctggcgtggagaggatcaaggtctctcaggcagctgcagagcttcaacagtactgtatgcagaatgcctgcaaggatgccctgctggtgggtgttccagctggaagtaaccccttccgggagcctagatcctgtgctttactctgaagactctatgagagaagtttgctgaggaatgccttcaagcacaaagtgatgaatgattgccttcaagtctcaagaaaacacttttccctaacttttagagatatttcagcctttcctgtggcctggtcctatagccaaaatcacagatattcatgagtttctacttgagtgagaaaactgggtgaaggaatagaattttaaatagctattactgcttgttttttttg

SEQ ID NO: 4679 - DNA, 380 bp, Homo sapiens
aagagatgtggactgtgggactctttgctctcctatcctgcttgcatgcagcaggcattcaggcatttctggcccaggaagcccaccaccctgtactgcagcagggaggtgggccagttctgttcccactgaggacccaccaacaacaatgatgcaagcttgtttacagagtatttttagttattgtacaccacaaaacttaagaacgtgagcataggttaatatttatcttcagggaaaagagtttcctttagaaggttctagaattaggaactgctgcacgcatattcactcaggaatgcttgtgtgtgcagccataaaggtaggctgagagaaacgttgcggagctgagtgcagatggccccagggaatgatgcctt

SEQ ID NO: 4680 - DNA, 411 bp, Homo sapiens
  misc_feature (1)...(411): n = A,T,C or G
ctgggaggagttacgcaggcagggttgtggttgctggctgttaccaggacaaccggaggcgattgaccgttatctgcggtttggagccgttagcgggagaggcagagatattcagaggtcttttaggatgcgctaaagggtcgtgagggctctcttaaaattttcttcacaagcggttatccagtcgtgccccgcggccctgctgctggccccggggatctgagtcgtaccctcttgtttttctctgagtcagtcttaaggtgaaatgaagtgtggcccagtggctcctcactgtcgcttctctagttttctgcctccttttagaaaattgaattgaaaagacaggatgaagtggacacagcatgtgaagacaattctttcaagaagtttggctgtcaaggaaaacagagn

SEQ ID NO: 4681 - DNA, 418 bp, Homo sapiens
tgacacattaaaattggaagtcaagatatagtggatgtctgggtagctgtaggcaatggcagctcccaggttcacctctgcaaatattttgtccaaaatagaacagaaagaagaacaagtaaaacatacacacacatatacaaatatgccatccacataatgtaaggacaaagaatgcataaacttcaaaataatgatgattaaaaagtagaaaaaataatcacactaaatttcatgtagcaaccactcagacactatcttatcacatatctttatatagaacaaatataggccaagaaaaattaagagaagatgaagctaacaataggtctatggttaacataacaccacaggtagaaaacatgtctactgtaagtgggaaaacacagaaggaagtcccaagagagcagggcacaga

SEQ ID NO: 4682 - DNA, 423 bp, Homo sapiens
  misc_feature (1)...(423): n = A,T,C or G
cgctccctccccgagctggcccagcacaaggcagacatgcagcgccgtgaagaacctggtggacagcagcgtctacttccgcagcgtggagggtctgctcaaacaggccatcagcatccgggaccatatgaatgccagtgcccagggccacagcctggaggaaccacccccgccctcctcagcctgatcctggaagagactcggggccccccagcctccgccaacccagagacggggtttcaccatgttggctaggctggtctcaaactcctgagctcgagatcctcccgcctcggcctcccaaagtgctgggattataggtgtgagccaccgcacccagccttggatctccctttcttcatctggataaggaaggctggactgcaccttctctacaggctgagttggacattcgcagatctn

SEQ ID NO: 4683 - DNA, 403 bp, Homo sapiens
gagaactcgatccaaatctcgggagaaacgccatcgccacaggtcccgctccagcagccgtagccgcagccgtagccaccagagaagtcggcacagttctagagataggagcagagaacgatccaagaggagatcctcaaaagaaagattcagagaccaagacttagcatcatgtgacagagacaggagttcaagagacagatcacctcgtgacagagatcggaaagataagaagcggtcctatgagagtgctaatggcagatcagaagacaggaggagctctgaagagcgcgaagcaggggagatctaactagctgtgtacatttcttcagtccttaagcttcctacggagttacgtactattgtttagttcacagctgttcagggtgacagtgagcagatc

SEQ ID NO: 4684 - DNA, 416 bp, Homo sapiens
tttcaaaggagtgaatgaggttaaaatcaagattttgaatggtataaatatgcaactaattcagttgtaggatattattaaattttttattgctaaatatgtttctttcatacgttgcagtgcttacagttccaacagctttccaagaaaacatttccatatttgtgttatttgtaaagtatacataaataatgtaaaataatttgggattatttcaactttacattgtatgtctgaatttcatcgatgttgtacctggctcagtcaatagttgtcacaggtattaagccattttggaatttgccacttttttctgggtaacctgttttagtttagtttacagcatttagaaacagaaggtaactttatagaagtaacaccaatatcctagtctgcttgccccgaatataactaat

SEQ ID NO: 4685 - DNA, 421 bp, Homo sapiens
tgagaagcccaacgctgaggacatgacatccaaagattactactttgactcctacgcacactttggcattcacgaggagatgctgaaggaccaggtgcgcaccctcacttaccgcaactgcatgtttcataaccggcacctcttcaaggacaaggtggtgctggacgacagctcgggcaccggcatactatggatgtttgctgccaaggccggggcccgcaaggtcatcgcgatcgagtgatccagcatctctgattatgcggggaagatcgacaaagccaacaagctagaccacgcggggaccatcataaaggggaaggtggatgaggtggatctcccagtggagaaggtggacatcatcatcagcgagtggatgggctactgtctcttttacgagtgcgtgctcaacaccgagctctat

SEQ ID NO: 4686 - DNA, 428 bp, Homo sapiens
cccacgcgtccgaccacgcgtacgaccacgcgttcggagagttggacacccggctccttgaggtgatctctaggcgccagcgccaaatccgacaccattccgagctgcggggacactgatggatccataagaggacgctggaggggaggccttagggggcagattctgggaggctgtcaactactggcgcacggaacagcggacggaggacgggcaccggctgtgcggggacctgaacagctgcttccaggagcgcgcccgcgtcgagaatgcttatgcccagcgcttggctgactgggtcctaaaggggagggggaccgtgaagaaggacccccagcatggcacactggagaaggcctggcctgcctttatcacgggcggtgagcgggtgagctcgctggacctggaagtgcgggagaagctgtcgg

SEQ ID NO: 4687 - DNA, 414 bp, Homo sapiens
aatgtgttttttaagtcaaggtgacacatgtatttaagaatctcttttttaaacccctctgccgctaaaactcactttttcaaacaagcctggatcagggcaaaccaacttatatttgggtttagctggaggctcaccaggcaaattgcaggcaggggggcacttttcatccatgagggcccagcctggggcctgggactcaatcaccattgtggaggccaaaggcacctgcgtatggaggagaaatgtcaaactgaacgcaggtttcaccactctaggaaagcagcttgttgagcccctgcagctggatgcggttaaagggatggcctgaataggcagggtagatttcctgcatcaacagtgctttgggaagctgtgtggattcctgaggaagaacagggagccgaaatggag

SEQ ID NO: 4688 - DNA, 391 bp, Homo sapiens
  misc_feature (1)...(391): n = A,T,C or G
tgacccacagaatggctttgagcatcagtctactggacaggttggaagcatccactgtgaaccaggcattagtcccctacctggcctgtgtgtgctcagtagagaaggagagggacaggccactcccagactgcccagcccaggagggttaataaattggggccgagccaacctgtcagtgcttcctgaatgccccagcctctgtattggtgcgttggttcagtgacattttctaaactctcctgaaaatccagctgctcctccttgctgcttgagagtttgccangagaggaaatgggtgtgttatgttaatgtcccttagggagactcaaggctgaaaactgcttggttatattaacgagagtgcttggggatggaccttctactgaac

SEQ ID NO: 4689 - DNA, 422 bp, Homo sapiens
  misc_feature (1)...(422): n = A,T,C or G
cccacgcgtccgcccacgcgtccgggtggcctgaatgacacctcttagaggactgtgaagtacaggcacagcccgactgcagggagggatgcacccatcatttacccatgggagcatctgtaggaccatctctctcccacttcttctcccctcccccaccgcatctggccagatggactgtcctacagcaatcgtttccatctgtcaccctcttccctctcctttcataccagtcactatcttgggtaacaaatttatacaggacagtggtacagaaatacatctttgctctgagaatacagcaaatattaacttaaattattataactgaacaaataataaaacctgaattttaatatcttccncnnaaaaaaaaaaaaaaacaaactagggaaaaaaaaaaaaaaaaaaaagaggggggg

SEQ ID NO: 4690 - DNA, 425 bp, Homo sapiens
acatggcggttaccctgagtctcttgctgggcgggcgcgtttgcgccgccgtcactcgctgtgggttcgcgacccggggggtggcgggcccaggccctattggccgggagccggaccccgattccgactgggagccggaggaacgggagctgcaggaggtggagaggtaccggcttctccccgggccctcagcttgaagcagggcctcgtgccccggcgctccaggccgcgcccccttggcgccgggtgtcctgccgctgcttgcgcagcggcccttgtttcttcttacccgttgttaggggcgcagcgtcaggtgttcagctccccgggaccactggtcccttcattagtgacgtatttcatcatcagtttagagagttcggcatgcttacaggcagttattgttctaggtgttagctttctgg

SEQ ID NO: 4691 - DNA, 454 bp, Homo sapiens
  misc_feature (1)...(454): n = A,T,C or G
actagaagtgccgattctacaaaaaggaagctncccacgccccgccctgccccacacgggacccagcagtttgtgttctaacaagcccaccaggtttttgtgatgtatgctgaagtttgagactggttagcttaaaacagcctctgagaggggctgcaagccactctttatttggatcataactaagtagttaaaacatccctgagtgaattcaaaatgctaatgaggaaaattaatgtctttatcaaaaaaagaaaaaaagaacaaaacaaacctcaggagaccagaagtaagttgcctctttaagaagcagagctgctttgagatgttgcaagggggagctaagagcagggcagaattttccagtgtcttttgacaggaggaagtggttggggacgacttatttttttggcccggagacagcctgtcattattagactaagcattgtatcag

SEQ ID NO: 4692 - DNA, 396 bp, Homo sapiens
ggacacatcatgtgtgggatgaggccgcatggaaagcatacgacatctgcaggggacacatctatgagggtgtctatcacaattctcccagtctaaacaagaaatgagattgggagacatgttgctctgcagaattcccaggggttggaacaggaggatgaaaaaaggcttgaaattctgactgcaagtgggaagagagcaccaggcagttgacccggacgctaaaggaaaagcttcgtgaaagtttcttgtagttttctttgatctgtatgacagttcattgtcccgaagagctatgtcatccttggatttgatggcttcactgtgtactcctttttatttgaaagaaaaaagaagccaactgaaaagagatctgagcgctgatccccgtgagaa

SEQ ID NO: 4693 - DNA, 427 bp, Homo sapiens
  misc_feature (1)...(427): n = A,T,C or G
aaagggtttagctgaaaccctagattcttctctgtagtctaatctaactccaaacattgtaagaattgcttgggagcataagctcacggataaggcgggaattgacttcaaatatagcgtgttatcttccacaccaatcatctctatgggagttaaattaggaggtcacaacaccgcctcgagaacaaactcatcattgcggtaatcctatgagggataattgcagaagggttttagagacttgtgaggttccatatgataattctttacacctcccccccccaacagaaagtgcacagggctattctgtaatattggtcacggaaagcaacctgatacatgctgtgcctccagagagttctttggagattactaccccaatgtgcattttggcaattgggtgggatttacgatgtaacatgtattn

SEQ ID NO: 4694 - DNA, 395 bp, Homo sapiens
  misc_feature (1)...(395): n = A,T,C or G
tattcatccaacccttggatctctttgagtctactgattatctccactggaaaggtggaattgaaatgtggtccacattttaactagctatttcctggggctgtatttttcagaatatgctgagctacatttgctgcaatctgttgctattcagagtttaagtttcaggagaaaacaggaacaatagaacactctgcctgttatttttgttgtaatcaagcttttccacagttcttgaaaagtactatgtttcaaatttcaggaacaccagcgttagctgtaaaagttgcagcaatttattggctagtcatagaaaatttttgaacttttaactgtattttaattgatgtttattaaaaacactttgctatcagatatttggcataaatctgtcn

SEQ ID NO: 4695 - DNA, 396 bp, Homo sapiens
ccctgctcctcgtcagtgccaacactgggattgctggtaccacaagggaacatctggggctggccctggccctgaaagtgcccttcttcatcgtggtcagcaagatcgacctatgtgccaagaccacagtggagaggacagtacgccagctggagcgggtcctcaagcagcctggctgccacaaggtccccatgctggtcacctctgaggatgatgccgtcactgctgcccagcagtttgctcagtcacccaatgtcacccccatcttcacattgtccagtgtgtctggagagagtctggacctcctcaaagtctttctgaatattctgccgccactcaccaacagcaaagagcaggaggaactcatgcagcagctgacggagttccaggtggatg

SEQ ID NO: 4696 - DNA, 449 bp, Homo sapiens
  misc_feature (1)...(449): n = A,T,C or G
aacacagtgagactccatctctactaaaaatacaaaaaattagccaggtgtggtcatgcatacctgcagtcccagctacttagatgagaggaaggatcacctgagcctgggagatcaagtgagtcatgatcacaccactgcactccaacctggatgaaagagtgagaccctgtctcaaaaaaaaaaattttaaaagtaactatattttcttttgaataaaaagtaatgtttctggaaacatctgtgatttttctattgtgctttttcttgcacattagctttcacattttcctctcctgaaaatctctttctctcttcctctttccctccttcccttattctttctttattcattctctttagggnaactattctctgttttatcattttggaataaatgaacaacaaaagcactgcagaacacacaaacgaaacaaaatctaacctac

SEQ ID NO: 4697 - DNA, 505 bp, Homo sapiens
  misc_feature (1)...(505): n = A,T,C or G
ggcacgttttgagaccctgcggatgggaaggcctcggaaacgccccacacgtccggnggtacccacacgagcgacttccacagccagatggttgtgcacaagctggtcaagagcatccctctgcgcagacaggtgtctgctgactccagtgcatccatgaactctggggttcttctggttcggccatcacggctctcctccagtgggactcccatgctagcaggggtctctgagtatgagcttcccgaagaccctcgctgggagctgcctcgggacagactggtcttaggcaaacccctgggagagggctgctttgggcaggtggtgttggcagaggctatcgggctggacaaggacaaacccaaccgtgtgaccaaagtggctgtgaagatgttgaagtcggacgcaacagagaaagacttgtcagacctgatctcagaaatggagatgatgaagatgatcgggaagcatatgaatatcatcaaccttgctgggggcctgcacg

SEQ ID NO: 4698 - DNA, 403 bp, Homo sapiens
aaacatcctatcatctgtaggctcattcatttctctaacagcagtaatattaataattttcatgatttgagaagccttcgcttcgaagcgaaaagtcctaatagtagaagaaccctccataaacctggagtgactatatggatgccccccaccctaccacacattcgaagaacccgtatacataaaatctagacaaaaaaggaaggaatcgaaccccccaaagctggtttcaagccaaccccatggcctccatgactttttcaaaaaaaaaaaaagaaatgaaaaaaataaaaaaaaacaaaaatttaaaaaaaaaaaaaatcgggggggggggcgttttaaaaaaaagcctggggggggcacccaaaccctgggggttgaaatgataattttttttgtttga

SEQ ID NO: 4699 - DNA, 425 bp, Homo sapiens
tttattatagagataaacttgtcctttgtgatttagttttttatgcccatatatatacatatatgaaatagaactttagaggtcatataatttatcaccttatctaatgcataaatctaccaagtggcttttaaatgtgcttttactatgtttctatattgccttgtaaatttgatagtggaaatctaatgaaacttcctaatttttgttaggatactgtgtaaagactctgatttttgtaagaaaaaaacttataaaaattaattttcctgtaatatgcttactagttcatgctctttctggaaagaaattctatctgtgaatatatccagggtgcatagcttagcatcctgtgttttgcagagtacattttagcattaagatacaagatgaagaaatggagtttattatagatttaaattggt

SEQ ID NO: 4700 - DNA, 460 bp, Homo sapiens
gcggcggcagggctgagccagcgacgccctccattcactctccgcgcccgttctccggctgtcctcccgttccgctgcccgccctgccaccatgacggaacaggccatctccttcgccaaagacttcttggccggaggcatcgccgccgccatctccaagacggccgtggctccgatcgagcgggtcaagctgctgctgcaggtccagcacgccagcaagcagatcgccgccgacaagcagtacaagggcatcgtggactgcattgtccgcatccccaaggagcagggcgtgctgtccttctggaggggcaaccttgccaacgtcattcgctacttccccactcaagccctcaacttcgccttcaaggataagtacaagcagatcttcctggggggcgtggacaagcacacgcagttctagaggtactttgcgggcaacctggcctctcgcggtgcggct

SEQ ID NO: 4701 - DNA, 433 bp, Homo sapiens
  misc_feature (1)...(433): n = A,T,C or G
ggtgttgacattttttagctattgatttcccaatagcttgtggatcagttgtacacccacacttccttctctgcctaattccgtttttctggaaaaagtagtatgcccatgtatgtgtgtttttcttaacacaggtccatgaaagtttggcttcctggtttgatgtctgttgcgtggcctggaaaccagggagcagcaactattgagatggtttctgtgttcagtgaaaaattctatttcattgagacaattttttctttatccacagtaattttttgacactgtcatcatgaaactacccttaggaaaataagattacctgcaaaaaaaaaaaaaaaatgagttatggaataggaacagttatgtgatgattctgaaactttaacttagagcttcattactttaagaatggaaaacaccctctgagtttgan

SEQ ID NO: 4702 - DNA, 451 bp, Homo sapiens
cccacgcgtccgtgaaattcatatatattttcatatatatttcatatatattttccatatatatatatataaattcatcagaacaagggtgtctttttttcttctgaccacaccaatgtaatgaaacagtaagtgtgaaaaagaaaaaaaaaaatacaggaatcaagagcccaaagaatttttaaggaaaccatgattgaataggttatatcagactgactgggctcctaactttgattctgcccacaccattcaataaaaagaggacatggaattccagctattccctccactatagaatttactacattttaaatttaaacaggttaatttaagctacagtaataatttgagacagaatctcatcaagcacagattcaaagtaccacactttgaggtcagagtggagagagcttttcccttgggatgaacatgagaaggttaattaaag

SEQ ID NO: 4703 - DNA, 461 bp, Homo sapiens
aacaaacgttaaaacctcaatcctcagtaggaaggtagattacattaggtgaaattataggtaatctatgtatgtgctaatggggttggaaagaaccttacagagcatattacctgataaactggagtgggtttgggagaacaaactaataggattattgtgtctcctagttggtacctgggagcaattgacatgcccccttcagaaccttaactgttagtagcagtggctgtaacaacacaaaccagtgaccagagataacagcttttaggccaagctggcctgacggtatggctgcaggaagtgactgagcagtagcggtactcagccagaccaagacggagagggaagagtccacagctttctggaagctaaggcattctggtggtagaaaagtgtgccccaagccttcatggacgagatataggtcttaagattagtctcctcttgattggattcca

SEQ ID NO: 4704 - DNA, 510 bp, Homo sapiens
  misc_feature (1)...(510): n = A,T,C or G
ctttcatagcactgcagaaacctttaaaaaaaaatgcttcatgaatttctcctttcctacagttgggtagggtaggggaaggaggataagcttttgttttttaaatgactgaagtgctataaatgtagtctgttgcatttttaaccaacagaacccacagtagaggggtctcatgtctccccagttccacagcagtgtcacagacgtgaaagccagaacctcagaggccacttgcttgctgacttancctcctcccaaagtccccctcctcagccagcctccttgtgagagtggctttctaccacacacagcctgtccctgggggagtaattctgtcattcctaaaacacccttcagcaatgataatgagcagatgagagtttctggattagcttttcctattttcgatgaagttctgagatactgaaatgtgaaaagagcaatcagaattgtgctttttctcccctcctctattccttttagggaataatattcaatacacagtacttg

SEQ ID NO: 4705 - DNA, 419 bp, Homo sapiens
  misc_feature (1)...(419): n = A,T,C or G
cccacgcgtccgcattacttttgctcacgatgttggacataactttggatccccacatgattctggaacagagtgcacaccaggagaatctaagaatttgggtcaaaaagaaaatggcaattacatcatgtatgcaagagcaacatctggggacaaacttaacaacaataaattctcactctgtagtattagaaatataagccaagttcttgagaagaagagaaacaactgttttgttgaatctggccaacctatttgtggaaatggaatggtagaacaaggtgaagaatgtgattgtggctatagtgaccagtgtaaagatgaatgctgcttcgatgcaaatcaaccagagggaagaaaatgcaaactgaaacctgggaaacagtgcagtccaagtcaaggtccttgttgtacagcan

SEQ ID NO: 4706 - DNA, 456 bp, Homo sapiens
atcattccatttatttctatgctgtaatcaaatgctttgaatataatcgtatgtgtgccttaaaatatgataaaattgattctgtttatagagaagtagatggcttaacttttgctgatcttttatttttataaaactttaaaaattaagtgattttcttaaatgtattatatttattaaacccttacatttatatattctgtatgaaaatatgttttgctaatactgtgtgactgcgggaacatacattcagctatagccatgatattagtagttaattggcagtgacttctgactaaattattgggagtggggtatttagcagaaagggaactgaaggtgagcaaggtacacttaaaatttggggtctgaagtagagaaactatcagaaaaccgagccagcgggggggcaagagatgaagttccaatcgtgcaggaatgaagaatcaacacgct

SEQ ID NO: 4707 - DNA, 451 bp, Homo sapiens
  misc_feature (1)...(451): n = A,T,C or G
attagccaacaccttaaggttaaggtgttataaaacccaaagggacggatttgaaactgccattgcaaaacagtaactgagacaatgaaagagatctgacctaaccaactccatcttgcttctaacctccaagctgcccttgttcactcctgggcataggccgaactaactttgtgaggaacttagtttataatttaaacagagatgataacagccctttcccctaaacaaacccccatcttgcctggggactaggctgacattgtaggactaacaaattagccacaagattagaagttatggtttaagagtcaagcagctggaggctacaagactctgaccctattcaaattgctcctgggaataaaatcactattgtaaaacctaaaaccagtgcttgagataatttgcagaccctgcacttgatggattagctggcaccacccacatn

SEQ ID NO: 4708 - DNA, 440 bp, Homo sapiens
caagaccccacgcatgccaccccacccagctcccaaccccctaacccagctggtggaggcgcgccgacgtctggaggaggaagaaaagagagccagccgagcaccctccaagcagaggtatgtgcaggaggttatgcggaggggacgcgcctgcgtcaggccagcgtgcgcgccggtgctgcacgtggtaccagccgagtcggacatggagctctccgagacagagacaagatcgcagaggaaggtgggcggcgggagtgcccagccgtgtgacagcatcgttgtggcgtactacttctgcggggaacccatcccctaccgcaccctggtgaggggccgcgctgtcaccctgggccagttcaaggagctgctgaccaaaaagggcagctacagatactacttcaagaaagtgagcgacgagtttgactgtggggtggtgt

SEQ ID NO: 4709 - DNA, 422 bp, Homo sapiens
  misc_feature (1)...(422): n = A,T,C or G
atttttcagggaaatctgaggtttccaaattgagcttgttattaggttcgctggggtaatggaaagtgcataccagaagcctggaaatgtaataacatggatgaatgtggagataggtccgatgaagagatctgcgccaaagaagcaaatcctccaactgctgctgcttttcaaccctgtgcttacaaccagttgcagagtttatcccgttttaccaaagattacacttgcctccccgaatctttaaaatgtgaggggaacattgactgccttgacctaggagatgagatagactgtgatgtgccaacatgtgggcaatggctaaaatatttttatggtacttttaattctcccaattatccagacttttatcctcctggaagcaattgcacctgggtaatagacactggtgatcaccgtan

SEQ ID NO: 4710 - DNA, 399 bp, Homo sapiens
  misc_feature (1)...(399): n = A,T,C or G
cttgaannangnaacagcagagcaccataaaggttatataagtccttgcgtatcaaacttccagcctaagaaataaaatctaattatttcttagggtactcatctgacttgaactctgttggtttactgagctattaaactgtgctttctattatctatacataaaacctgaccagcaactgtgtctttagagctattgccacattatcctttgcactggatagcgtctggctttatggaacttaagtttaccaaatataaaaagaaacttctgcttttaaaaaaattatatatatatattaaatttgaaacctgcatttctcccacagcaatgtaagaagtaggctctgatgtcctaccactttgaatggtttaataaatggcagatttatgtccacc

SEQ ID NO: 4711 - DNA, 427 bp, Homo sapiens
cccacgcgtccggaataaataaatgaatgaatgacaaccattagaggcttccaaaagaagaaaaactaaaattcaaggaaagtaaaaggtagttgcattacttattctttattcaactatttattatgcattaattaatagttgcattcttataattccctttaagcctccttgaattatttcttaaaaaaatatgaaatctgtttccaagagttctagtactttgttcccctgaccccttgaatgttgcacaaaatgtttccttaatttctttccaatacgtgattacaaaatgtgtttattatgttttacatcttctaattcttaaattgactatctattaatcacagagatactaaggaataaggaaatccttggtagaaaagtgttaataatttaccagttgccaactgtacttttacctctg

SEQ ID NO: 4712 - DNA, 429 bp, Homo sapiens
cacgaagcgccgctgggtctgggtgcccggaggcagcagcgttcgcggagttcgcccgctggcccccgatcaccatgtcggctttcgacaccaaccccttcgcggacccagtggatgtaaaccccttccaggatccctctgtgacccagctgaccaacgccccgcagggcggcctggcggaattcaaccccttctcagagacaaatgcagcgacaacagttcctgtcacccaactccctgggtcctcacagccagcggttctccagccatcagtggaaccaacccagccgaccccccaggccgtggtgtctgcagcccaagcaggcctgctccggcagcaggaagaactggacaggaaagctgccgagctggaacgcaaggagcgggagctgcagaacactgtagccaacttgcatgtgagacagaacg

SEQ ID NO: 4713 - DNA, 469 bp, Homo sapiens
aactcatttttccctgctctgctcctctaaatacaactaagtaccttggaaactattcagcagacaatgataaagggctctgaaagctaaaagaaaaggtgtacttgcaagaaacctcaggacttgagtaacagcaacatgaacaatccatttcacagatgaagaaacagactcagtgagcacgtgatcacttctcacaactaatggagccaagattctgtccttatggctccagagacctcttttttttcccactgtaccacaacactcaccaggactggagtgccacctatgacctcattgcataatggatggcttgtcctcaaatgggcccggatcttgttctcactagagaataatttctacattatgcccaggttcttctgagctatgaaggggcccagatttaagggctatttttgacaccctaaatgtgctgagacaagtcatttaaagtggtcctgccagg

SEQ ID NO: 4714 - DNA, 415 bp, Homo sapiens
cggacgcgtgggttttgcaccaaaatcaacttgtactaatttgctgtaacatgtacaaataggatctagttcaaggagctaagaaagatatgacatcgctttgaaaatagcccctatcagagcaacacgaattctgccaaaattgaagcaagaacaaacatcaaatttattgggaagcttgggtgaaagaatggtgagatcattaatgccttctgtaaagcttatggggacaataccccaaagaaaccagtcgtttacaaatcaataacttgtttaaggaaggacatgattatggagaagatgaagctgcagtggaagacaatccacatcaatttgccaggaaaacaatgaccttggttgtgcactaattgaagaacatcagtaattaacagcagaaaccacagccaacaccata

SEQ ID NO: 4715 - DNA, 438 bp, Homo sapiens
  misc_feature (1)...(438): n = A,T,C or G
accaaatatatttgaaacaatggtatatgagagagcatatcagagaatcacatccttccaaatgtttgctattagtagtcttaaaatttttttagccattctagtgggaatgtaagagtatcttatttatttatttatttaaagagacagagttttgctttgtcatccaggctggagtgcagtggtgttgcacagctcactgcaaactcaaattcctgggctcaagagatcctcccggccgggtgcggtggctcacgcctgtaatcccagcactttgggaggccgaggtgggcacatcacaaggtcaagagatcgagaccatcctggctaacacggtgaaacaccgtctctactaaaaaatacaaaaaattanccaggcgtggtggtgggtgcctgtagtccccactactcgggagctgaggcaggagaatggcgtgn

SEQ ID NO: 4716 - DNA, 429 bp, Homo sapiens
  misc_feature (1)...(429): n = A,T,C or G
aagacaagaacaagagctgactctagaatcttctgcctggctgacctctgagcccatgatccctggcttgctgtgcttctcttggatttgaggagagcttatgaatccatccccctgttttcagggacctctgccttctcccacaccccttacactagtgaggactccttcggcctcttgtgtttccttccttttgtgaccattacgccccctccctgtttcttatcaccagcccatcagcccactgactcccatatggtagaaaaggtaccgtggctgctgcagggcacatggagggacctaccctctgggaaagcccttgtgtccctcccagagtccttcaggtaggccctcgcagatgctgcttgctcagaaacaacccgtgcatccctgcccatggattctgcaggacctagaagagtggcattn

SEQ ID NO: 4717 - DNA, 422 bp, Homo sapiens
cggacgcgtgggctcaggtccctcaaaggcctcggagcacccccttcctggtgactgagccagggcctgcatttttggttttccccaccccacacattctcaaccatagtccttctaacaataccaatagctaggacccggctgctgtgcactgggactggggattccacatgtttgccttgggagtctcaagctggactgccagcccctgtcctcccttcacccccattgcgtatgagcatttcagaactccaaggagtcacaggcatctttatagttcacgttaacatatagacactgttggaagcagttccttctaaaagggtagccctggacttaataccagccggatacctctggcccccaccccattactgtacctctggagtcactactgtgggtcgccactcctctgctacaca

SEQ ID NO: 4718 - DNA, 430 bp, Homo sapiens
gaggccaaggtgcaacttccttcggtcgtcccgaatccgggttcatccgacaccagccgtgtccaccatggcggcgaagtttgaccccaacgagatcaaagtcgtatacctgaggtgcaccgaaggagaagtcggtgccacttctgccctggcccccaagatcggacccctgggtctgtctccaaaaaaagttggtgatgacattgccaaggcaacgggtgactggaagggcctgaggattacagtgaaactgaccattcagaacagacaggcccagattgaggtggtgccttctgcctctgccctgatcatcaaagccctcaaggaaccaccatgagactgaatgaaacagaaaaacattaaacacagtgggaatatcacttttgatgagattgtcaacattgctcgacagatgcgggaccgatccttg

SEQ ID NO: 4719 - DNA, 463 bp, Homo sapiens
agaccatactggctggcgcagtggaatcccgtctctactaaaaatacaaaacttagccaggcatggtggtgcatgcctgtaatcccagctacttgggtggcacaagaatcacttgaaacctgggaggtagaggttatagtgagccgagatcacaccactgtactccagcctgggcgacagagtgagactgtatctcaaaaaagaaacaaaacaaaaacagaagattatggaaacataatttactcagattccccagataaattatactttgctttaatattttaaagatgagtgtgttttttaaattggagaaaatattgtttattatgtagactagaaagtaaaatgggaaagtgacttaagtaaaatctcagaagcaaagtgtacaaaatgcattcaagtggtaaataaatcagtttgtctggaacagaggtttcatgaaggatgctctggaagcacaact

SEQ ID NO: 4720 - DNA, 479 bp, Homo sapiens
  misc_feature (1)...(479): n = A,T,C or G
gaaaccnnnttttgatgccctatggaccggcatgaaacccgcgcgaccacgcgtgcgattctctcaatgttaactctcagaataagcccttagcttttggtgggtttttttccagtcataccagtttaacagggaaaaagagagtcatagtaacattcacaaatcaagatttccctaattcttccatcattcagatgggaactctagccccttcagatttctcccaaatagatgagaaattttctaggggcacctcatatggactcttcctcctgaattattcttactggtcctttgggtttcaacatagaagtcatttcttcagaaaacctactctaccaaactgaagaggggttaggtgcccctcatatgtgcttgcaaattattatagctctatccatacaatattgggattgtctctggtcttgttgctttcctgcactagattgtgagcaccatgacattagggatcatatctn

SEQ ID NO: 4721 - DNA, 427 bp, Homo sapiens
  misc_feature (1)...(427): n = A,T,C or G
agaatgtggatcaagcaggttttaaatcaagatttaacattccaacacataaaaattatttatccaacagctcctcccagatcatatactcctatgaaaggaggaatctccaatgtatggtttgacagatttaaaataaccaatgactgcccagaacaccttgaatcaattgatgtcatgtgtcaagtgcttactgatttgattgatgaagaagtaaaaagtggcatcaagaagaacaggatattaataggaggattctctatgggaggatgcatggcaatgcatttagcatatagaaatcatcaagatgtggcaggagtatttgctctttctagttttctgaataaagcatctgctgtttaccaggctcttcagaagagtaatggtgtacttcctgaattatttcantgtcatggtactgcagatg

SEQ ID NO: 4722 - DNA, 408 bp, Homo sapiens
attcttctctccacatccctctctgtacttacagcccccaatggcccccaaaaagccagagcccaagaaggatgatgccaaggcagcccccaaggcagctccagctcccgcacctccccctgagcctgagcgccctaaggaggtcgagtttgatgcttccaagatcaagattgagttcacacctgagcagattgaagagttcaaggaagccttcatgctgttcgaccgcacacccaagtgtgagatgaagatcacctacgggcagtgtggggatgtcctgcgggcgctgggccagaaccccacacaggcagaagtgctccgtgtcctggggaagccaagacaggaagagctcaataccaagatgatggactttgaaactttcctgcctatgctccagcacatttccaa

SEQ ID NO: 4723 - DNA, 438 bp, Homo sapiens
ttaaagtcaaagcaggagagtaattatgaatagcgcagcgggattctcacacctagaccgtcgcgagcgggttctcaagttaggggagagtttcgagaagcagccgcgctgcgccttccacactgtgcgctagctccccacgatgagatggtgctgtgctggctctgcagtttctctctcttcagtcccattttccggaagtgtgatatgcgtctttatctggtttttccatgcctttttctcaaatagtatctactctctccttttctcttccttctcagatgacttcaaacctgcttctattgacacttcttctgaaggataccttgaggttggcgaaggtgaacaggtgaccataactctgccaaatatagaaagttgaaggaagcagtaaaattcagtatcgtaaagaacaacagcaacaacaaatgtggaatt

SEQ ID NO: 4724 - DNA, 424 bp, Homo sapiens
cacagtgcagaggctagacaactgaaaggggctaccaaggctgggaaaaaaatgcaattgttgctgtgagtgactttgaaagactctggtgccttgtggtgcccttctgaaattcaaacagtaatgcaaaagtgtctgcattagaatttacggtgtctaaaattcatgtttttaaaagagcttgcctacagatggtttccacacttgaaattgtgccctgcgagttgcatagctggaagttcaatgctcagtcctaccttggctcccattaaacatttggtgctctgtggattgagttgaacgtgttgaggctttgcaatttcacttgtgttaaaggctctggcatttttccatttctatgcaaatttctttgaagcagaattgcttgcatatttcttctctgccgtcacagaaagcagagttt

SEQ ID NO: 4725 - DNA, 429 bp, Homo sapiens
  misc_feature (1)...(429): n = A,T,C or G
tacagaacaccaagaagattttacccanngnnnccctcaaggcatttaataataaaacttctaaaggtcaaaaataaaggatcctaacagcaacatacaatggaactccaatatacctgcagcagacttctcagtagaaacttcataggccagaagagactgatgtagcataaagtgctgaaggaaacaaaaacttttactccagcatagtatatccagtgaaaatatccttgaaatatcaaggagaaataaagtttcccaaaaaaaaaaaaaaaaaaaaaaaaaaaaaaaaaagggggggggcccttttaaaaaatccctgggggggcccaaatttaccgggggtgggaaaaaaatatttttttcctttagggggggccttaaaaaaccccgggggggatttttgggaaagaacctttctttgggggg

SEQ ID NO: 4726 - DNA, 409 bp, Homo sapiens
  misc_feature (1)...(409): n = A,T,C or G
tactgcgggatatactagtaaactacatagactcagccacttacaacttacaagtggatacatccaatttaaaagcctatcctccttaaaaaaaaaaaaaaaaaaaaaaaaaaaaaaaaaaaaaaaaaaaaaaaaaaagggggggggggcttaaaaaaaaacccggggggggccaaaaaaaaggggggggggaaaaaaaaaatttttttccaaaaagggggggaaaaaaaaaccccgggggggaatttggaaaaaaaaccctttttggggggggggaaaaaaggggaaaaaccccccaaaaaaaaaaaaggcccgggggaaaaaaaaaaattttaaaggggaaaggggggaaaaccccccccaaaggggggggggaaaaaaaatggggnnnnnnnnnnnanaacccccc

SEQ ID NO: 4727 - DNA, 398 bp, Homo sapiens
caaggaatgctgggagcaggatcacgaggagcgctaggctgagaaggtgcgctacctggcagagcgcatccccacgctgcagacccgtggcctgtccctcagtgccctgcaggacctgtgccgggagctgcacgccaaggtggaggtggtggatgaggagcgatacgacattgaggccaaatgcctccacaacaccagggagattaaggacctgaagctgaaggtgatggacctccgtgggaagttcaagcgcccgcccctgcgtcgagtccgtgtctcggctgacgccatgctccgggccctgctgggctccaagcacaaggtgtccatggatctgcgggccaacctcaagtctgtgaagaaggaagacacagagaaggagcggcctgtggaggtgg

SEQ ID NO: 4728 - DNA, 418 bp, Homo sapiens
cccacgcgtacggaaactgataacacagccaggctcgggagtgcctggtgatctcattacaacccttctggttattccggcggctgtcctgctggccattgccatatttattcggcggaaaaaaccaagggcctttggagcacattctgcacaccaactccagactatttcacgaagagtactgggaagatttataggacagggaggtggaggcttagaccttggttatttctttgcacgccggaagggctacaggcgaaacgggtttgaccgccttagcactgagggctgtggcccagagaaagaggatgatggaagtgaatcataggaggagtcttcagcggctctgcctgcgctcgcaccttcctcctgctgataaccaagctttgatttagattgagtaagatttaccccgagg

SEQ ID NO: 4729 - DNA, 430 bp, Homo sapiens
acaattttgaagaatgtgaagaaggagaagaggaggaattagaaggtgacgaggagggagaagacgaggatgatgcggaaattaaccccaagaaggaacccagccagccggcggaatgcaagcagcagtaggaagcggaggcgggtgcctggcagaccggctgtcgggactccaggcctgtgggcggggcctcggtccttgccgcagcacaatcccgtggacagagcttactccatctaactcgttttcaagtgcatgattttcactttcacttttcctttttccttattattttgcttaacttgtacagtggcaactgaaatgcatttcagaaataggaggtttcgtccagcaccctctgcagccttggtgcctgtagctctggacttccctgggcctttccctgtgggagggccctgtagaccacatc

SEQ ID NO: 4730 - DNA, 419 bp, Homo sapiens
tgagataaagaaaattctgaaaaacaatacaaaaaaaattaagaaaaacaattaagtatatgaatgggagattttccaaggaagtagatatcataaagaagaaccaaccagaaactctggacttacagacttcattgaatgaaaagaaaatatatttgaaagcttcaacacaggctagatcaagaagaagaatgaatctcaaaacttgaagacagttcttttgcaacaacccgataagaaaaaaataaagataaaaggataaaaaagaataagcaaagccttcatggcacatgggacaccataaagcaaccaaatgtttgaattgtcagggtcctggaaggcaaagagagaatgaaaaggttagaaaacctatttaatgaaataatttagcaagatatttagacatccagatataggag

SEQ ID NO: 4731 - DNA, 465 bp, Homo sapiens
  misc_feature (1)...(465): n = A,T,C or G
taatcatggcgcccctcggaacaactgtattgctgtggagcctcttgaggagttctccgggcgtggggcgggtctgtttccgggctcgaatccagccctggcacggtggcctgctccaaccgctaccttgctctttcgagatggggctgccacgccgccggttcagctccgaggccgcagaatctggtagcccagagaccaagaaacctacatttatggatgaggaagttcaaagcatactcacgaaaatgacaggcttgaacttgcagaagacttttaagccagctatacaagaactgaagccaccaacctataagctaatgactcaggcacagttggaagaggctacaagacaggcagttgaggcagctaaagtacgattaataatgccaccagttctggaagagcgagtaccaataaatgatgtgttagctgaagataagattttggaaggaacagaaacan

SEQ ID NO: 4732 - DNA, 476 bp, Homo sapiens
  misc_feature (1)...(476): n = A,T,C or G
ccactgcgcagaaggagcagctgctccgcgccccgccgcgcctcgctgaggccgatgtccgcagggccgcggggaagccgagggctgccggagaaccctgcaggtgtcactcgggacgcggaagtgcgcttgccgaggtttgctttacaatacgcttgagactccccgacaagcgtaatttggtcgagttcgacgggaaagtactctccccaccccagcgccggccgcgtagtccgaggttactgtccccggcgcgtcctctgttgccccagtccagaggctgcccttgaacccgggcgcgcacgagcgcagggcatccgaggcgacagcccctggcacggcccgacctgtacccagcctggcaggaagactgtaatcgtggggtgagttaaaaataaggccctttcgattgggagctgctttttaaaacgcccccttcctgtccgtttttaatacgcagcanaataacaataacn

SEQ ID NO: 4733 - DNA, 460 bp, Homo sapiens
  misc_feature (1)...(460): n = A,T,C or G
ctagatcgcctcggatgatcnccgtacnaccgggccgacccacgcgtgcggaagatatagactagtggaagagtttcagagtacatttccttttctcataatatggacattgtgcttgtgcattggttaaacttttatctcaaaggaaccaacttatattctgcagtaatatcctgttcttcagaaaccccacttgtattacaccaaaaatttcttccacatcttggaacccttacctggtgctatttgaaaaaacttcagcttttacaacgtttcattgtacataaagttttattctacctgagagaagaaagagaagtagcactacaaggggcactgaattaattttcttataagaaggagtggatggcacataaaacatgatgggctgagataatgaaggcttctctctaggatacctagagagagacctcaattgagctgtgataatatctgaatg

SEQ ID NO: 4734 - DNA, 457 bp, Homo sapiens
  misc_feature (1)...(457): n = A,T,C or G
cccacgcgtccgcggacgcgtgggctttcctgagaaggggagtatgagcaaaaacttggtggaaggaaaaacaggagagttgagaatgggataaaagttgcatgttggtttagtactaggagagttttacagagatatactatactattccagtttttttaaaaacagaaggagtgcttgctaaatattcaatcatcaaagataaaacatggcagtatattatttctgatttctcattgatattatacttctcatatgaacaactaagtttgaaactctaaggaaaagaaaagctcacataagacccggctagtcaggtatgtatattgaaattcaatcttttcataataaaaaataaggattcttacattttctctaatatgaatcaaaatgcacaagattttagttgtcatcagcaatgttatataaattagcaaacacaagaaaaatatgagan

SEQ ID NO: 4735 - DNA, 477 bp, Homo sapiens
  misc_feature (1)...(477): n = A,T,C or G
ctggaagctgagcctgacccagcaggtcccagcagcctggcattccagccagcatgcagcagcagcctctgcccgggcctggcgcccccacaactgagccaaccaagcctccctacagctacatcgcccttattgctatggccatccagagctcaccggggcagcgggccaccctcagtggcatctaccgctacatcatgggccgattcgccttctaccgccacaaccggcccggctggcagaacagcatctgccacaacctgtcactcaacgagtgctttgtcaaggtgccccgcgatgaccgcaagccaggcaagggcagctactggacgctggaccctgactgccacgacatgtttgagcacggnagcttcctacgccgccgccgccgcttcacccggcagacaggtgctgagggcacccggngccccgccaaggcacgccgtggacccctcanggcgaccagccaggacccan

SEQ ID NO: 4736 - DNA, 483 bp, Homo sapiens
  misc_feature (1)...(483): n = A,T,C or G
ntttgtacatctgtcggaacagtgatgntcctcccgaaacgacccacgcgnccggcagcccggaggagactgacggtccctgggaccctgaattgttcccgggcggcttcttcactgaccctccaaacgcccctgtcctcgccctgcctcctgccattcccggcctgagtctcagcatggcggatgggagcagcgatgcggctagggaacctcgccctgcaccagccccaatcagacgccgctcctccaactaccgcgcttatgccacggagccgcacgccaagaaaaaatctaagatctccgcctcgagaaaattgcagctgaagactctgctgctgcagattgcaaagcaagagctggagcgagaggcggaggagcggcgcggagagaaggggcgcgctctgagcacccgctgccagccgctggagttggccgggctgggcttcgcggagctgcaggacttgtgccgacagctccaccccn

SEQ ID NO: 4737 - DNA, 464 bp, Homo sapiens
tggataaataattctgtcacacgtgccctggcctctggagctcagctgccagtccacgtctagggaatcttagcatctgggaccaagacactttacagcaatcatcaccctttgcagaggaggtgagctcaccaggactcatctgccatttcagaccttttgctgctacctgccaggtggcccccactgctgacgagagatggtggatctctcagtctccccggactccttgaagccagtatcgctgaccagcagtcttgtcttcctcatgcacctcctcctccttcagcctggggagccgagctcagaggtcaaggtgctaggccctgagtatcccatcctggccctcgtcggggaggaggtggagttcccgtgccacctatggccacagctggatgcccagcaaatggagatccgctggttccggagtcagaccttcaatgtggtacacctgtaccaggagc

SEQ ID NO: 4738 - DNA, 476 bp, Homo sapiens
  misc_feature (1)...(476): n = A,T,C or G
cccactaagccaatcactttattgactcctagccgcagacctcctcattctaacctgaatcggaggacaaccagtaagctacccttttaccatcattggacaagtagcatccgtactatacttcacaacaatcctaatcctaataccaactatctccctaattgaaaacaaaatactcaaatgggcctaaaaaaaaaaaaaaaaaaaaaaaaanngggggggggcccttttaaagaatccctgggggggccaaagtttaccggggctgggaaagaaaaagttttttccttatgggggggggaattaaaacctacctggggattttgggaaaggaccctttctttgggggggggacaaattgggccaacccccccccaaaaattaaaggctttggggaaaaaaaaaaattttaaaggggaaaggggggaaaacaacctcctttccctggcgggtggtaaagttttgggnnnnnnncn

SEQ ID NO: 4739 - DNA, 528 bp, Homo sapiens
  misc_feature (1)...(528): n = A,T,C or G
gagattgagccctgtgaccgttgcagaacttccggatcgacccacgcgtccgtaagtattttacagcttgttgatttttaaattaacgtagtaaatgctgtaaaatagatttatattcagttaaccgctttcagttgattttttgaaagaaacaaaggttaaatgggggattaaagtaaaattgagagaccctttaaaccattgtcagcatgcacaatgcctctgattctgcagttttagaaacttggtggcacttattaatcctcttggcccctttccactctaatggatagtgtacattcttcttaaagtccacaacagcagattttcttgcagtaaattatgcagatgcaaaatattctaattgatatatgtgttggaagactgagtattgatgggggagtggaccagacaaagaggtaagatgaaacagtagtgtgtttataattgtctgtgactattttctataataattagtactatttaatggtgagcttttaaaaatgtangataaagggtacagtggca

SEQ ID NO: 4740 - DNA, 466 bp, Homo sapiens
tatttgtgatttattgagaataaaaatccattttgaaatgtaaaatttttatgatctgattcagttttaagaaaacatgaatgaactagaagatattaaaaacatttgacattggtaagaaatattgatactgatattgatttttatataggtatttatttcagaattgatattttgagaaaaatacatgtgagtcattttttctgtttctcttttctcttaacgattatcactgtaattctgaatctgaaaggtaacaattagtcaaaatattattgccatcattctacctgtgttatgaaactacttattcatagttaattctcattaacacttacatttccataaagaaaactcaagtattaataaaagagactttactggcttaagagggctgtgaaagatttttgatagtgaatcatgaccctaagggagagatttgtgtgataaaagtattgtatataat

SEQ ID NO: 4741 - DNA, 464 bp, Homo sapiens
gagagtgcctccctctggcctcagattttttatgttgtagttttggagcatggcccggaccgggcccccgataccgccccgtgcaacctcaccgccagcctgggggcctcagcgactgggacgggaccaaggggctcggggattctccctgcccccggccctggtgcgtgactgaccctcctgttcccagagcccccagcgcaggccgggatgttcgtcctggtggaaatggtggacaccgtccggatccccccttggcagtttgagaggaagctcaacgactccattgccgaagagctgaacaagaagttggccaacaaggtcgtgtacaacgtgggactctgcatttgtctggttgatatcaccaaactggaggatgcctatgtattccctggggatggcgcatcacacaccaaagtccattttcgctgcgtggtggttcatccatttctagatgagattct

SEQ ID NO: 4742 - DNA, 531 bp, Homo sapiens
  misc_feature (1)...(531): n = A,T,C or G
aatttgacccctgctngtagagggccggtcagcaccggncgacccacgcgtgcgcgctcacaagaatggggccgagaagctattgaaatgcatgataatggaagtaccataaacctcctccagatgacggatgtgtactactcgcctacaagtgtaaggaatccagaacttgaacgaaacggactctacccggcctacactggactgccaggatcacggcattcttgcattttccccggacagtataacccgtctttcatcagtgatgaaagcagaagaagagactacttttaagtccaggagagagagggactcattgctctgagccagtcacctgggacctctgctcagaggaccgcaccaggaggctgcgcccaggatttgtcaggagccacgctgagtggcaagcaggaagagggacaggcatgcggngcgtgaccacagtggaggagacaggtggatgtggaaccacaggctgctcattcagcaccttttgtggtactgtgaacgtgaatgtgggccagtatcaaa

SEQ ID NO: 4743 - DNA, 463 bp, Homo sapiens
  misc_feature (1)...(463): n = A,T,C or G
tgacccctcgggtaacccacccgnnccaagatgtggttctgattctatgtaaatggaagaaattttggtttcaaggctacttccccaaggaaaccaaagtaaggcataagatggctcgactggaggcaccacagccaaggcacaggacacagacccgacaaattacaccgctgtctctgagaatggctctctgcccctactgcctcaagaagtttgatactctgctgctgacctcacaaaaagggattccacacaggtgtttgctttttcacattacttatttccaaatcaaagtcttgggtggtagtttctgacttagaacctaagccatattgctatatcctatatgcaataagaaagctgagaaaatgagcatctgatttataaatacggaaaggatggagccatgaggtaggatattcccagtcatagttgaaaggtcttcataagcatgatacaattn

SEQ ID NO: 4744 - DNA, 423 bp, Homo sapiens
aaaacctgacattaatagctacagataatttcataaacatttcattgtatctttttcattagcaatagctccactttgggtgggggagatgataatgtgccttgttaaaaatacctccccaactcctgctaagggtggccatgagactcagctctggcaagttaagaaatacaggtggaattctgcttgataaagctgctgggttttttgttacaaaaggacagacttggcaaacatgagcctttgctcttatcttttcatcctacttggagtgcagagataaaacctgagtaccagagccacttttaggcataaggaaggcagccatgtgctttgggtcatgttagtaaaaagactcagagcttggctccttgctgacatgcctggaggagctgctacaccagcttggattgctgacctctg

SEQ ID NO: 4745 - DNA, 424 bp, Homo sapiens
gatgatgaggatgaggaagaaggggaggaagtttcggtttacctacattactactatgaccccttcggaggagaggactacaatgaggagaatcctactgaacccggccgcgacggcaccatgttcgacagggaaattactcatgatgtcaaaggtcctccaactcctctgccaaccaatgatggagatgtgtatttcgagacctctgcagatgataatgaacaagctctctttcagaaggctaaggagcaattggagattccgcaccgtacccgaatggacagggttccgaaggaatgggaagaggcagagcttcaagctaagaacctccccaaagctgagaggcagactctgacacagcatttatgagccatggttaaagctttagagaaggaagcagccagtgagaagcagcagctggtgg

SEQ ID NO: 4746 - DNA, 464 bp, Homo sapiens
  misc_feature (1)...(464): n = A,T,C or G
cccacgcgtccggtattttttacacttcagtttctaaatcatgaatcgttgccttccacaggaaccctcccttatacattacttgagtgttgtgtagtttttcttcagccaggtatttctctgcctagagaggggaagagaaatgtgttctccaggactgatcccctttgtagattttgtacctgaagagttacctggcagggcaccacccttggctaggcccaggtgtgtgtttctttcttgcctggcatggaccccgaggcaggtgatgtggggcctggcgcacctccccgctttggcagctgtggcctccctggccagtgcccttgcaggaggccggccggcagcctgatgacccgcactctntagtcactgacgtcagattatttttataacgttccctgacagntcagagacccttcgaattgcacttttctggtttcgcttatttaattagaagagat

SEQ ID NO: 4747 - DNA, 412 bp, Homo sapiens
ccttccggacggagatcaaaatctgagtgcctctcccttccctttccctgtccccccgccccacgcctgccagcaaagcctcgctaaccccattacaacagctccaggacatctcagcccaggttctagcccccacgcaccccagaccccaggtggaccatcctcccaaactagggccctccactctatccagggcaggccagggactccctggcctgacacatgatgcccagatttcagatttggcctccgtcacttaatccagagtacaggggctggggtcagggaaggaagatctaaagaacccactgtgggtcaggggaatgggaccagcaggacatatgggcaagctctgcaggacagacaggcagacaaaccctctgatctatgaagtctctgcagggcaaggggg

SEQ ID NO: 4748 - DNA, 425 bp, Homo sapiens
caaacacagacccaccagctgaggattcacagaagtctttaggagcaaacacaagcaaagacagaccacatgccagtggtactgatggagatgaaagtgaggaagacccacctgagcataagccaagcaaactgaagaggagccatgaactggacattgatgaaaacccagcttcagactttgatgacagtggttcccttctaggattcaagtatggctcaggacaaaaatatggtggaatcccaaatttcagtcatcggcaggtcaggtatttagagaagaatgtgaagcttaagtctaagtacctagacatgcgcagacaaataaagatgaaaaacaaacacatcttctttaccaaagagtcagaaaaaccatttttcaagaaaagcaaaattctgagtaaggtagaaaaattcctcacatgg

SEQ ID NO: 4749 - DNA, 463 bp, Homo sapiens
  misc_feature (1)...(463): n = A,T,C or G
atccctgaacaaatctctctggccagggtccagctgtttccattcttcctgggtaaagtccactatcacatccttgaaagtcaccgattcctgaaataccaaacatatttctgcttagccataagcatttacttaggaaaggggtaaagttagcaatactgacagaagtaaggcagtctataggatgtctgcaaaataatcttgacattttctcctttatgaaataaatgtaaaaacagtgcctcatccattgggttattgtgagaattaaataaaacattccatgtgaaatgcttaatttaacgtctggcatataataagtgctcagtcaatatggccattggtgntgtccttcatcgtcatcattaccatcatcatctctgtgttccaaggtccgctaagtattaatggttaactattatcatcaatattttttactacctacaatgtgcaagagcacccn

SEQ ID NO: 4750 - DNA, 449 bp, Homo sapiens
  misc_feature (1)...(449): n = A,T,C or G
aaacaaccatatggtgttgtatattataaactggtgacattctactattgaattatgtacaacattttcattttttatgcttcttgaggtggtaatgagaaaaaagttttttaaaaaagtgtgccttgctgtatttcttataccatttattaaaaagctgctttcacggtaaaattatgttggtttgaaaggaggaaatagcaaggttaagatgtgtgaataatttctgtatatatgtataaccaagtacaaacattgatgtataatgacagtataaaatgctttcatgtttgtgatgtctagtgatgtggaaaatataagccttanatccattagattgcatggtaattaaaattggcataataaacacagattattgggggaaaaggaaaattagtgatctcttctactatgttctttaccaaattgttgcatctggttctgaaaan

SEQ ID NO: 4751 - DNA, 403 bp, Homo sapiens
cccacgcgtccggatcatgtcagtactttatgtctgggcccagctgaacagagacatgattgtatcattttgggttggaacacgatttaaggcctgctatttaccctgggttatccttggattcaactatatcatcggaggctcggtaatcaatgagcttattggaaatctggttggacatctttattttttcctaatgttcagatacccaatggacttgggaggaagaaattttctatccacacctcagtttttgtaccgctggctgcccagtaggagaggaggagtatcaggatttggtgtgccccctgctagcatgaggcgagctgctgatcagaatggcggaggcgggagacacaactggggccagggctttcgacttggagaccagtgaaggggcggc

SEQ ID NO: 4752 - DNA, 400 bp, Homo sapiens
ttttatgattgatactattatttttcctttgcattttaaaatagtggctctaatattttccctgtcatggctacattctagacattgaatttatatcttctttttttcagatacggagcaaatagcatccttaacctatgaataatggtgttgcctagattcttgtcacacacacagaagaccctttgtacctagtaacattcatcctcttgattcctggtgaacacggttaaattcatgcacatttgttcttgtagtttctaaaaattagatcaatttatttgttaaccagcaaattgaaaattccattattagattaatgaaatttttgctctgcttatatgtatacgaactggaaatctgaatttttaaatttagatctttaaatcaaattattttt

SEQ ID NO: 4753 - DNA, 476 bp, Homo sapiens
  misc_feature (1)...(476): n = A,T,C or G
tgtggccnaggggccnncctgaancccctgatagtctccggaannccggggagatccacgcgtgcggcggcggtggccctggactgcggggaatgggaattctaggtccctgactgagcacctcccccgcctccctgcccccgacatggctcaggagaagatggagctagacctggagctgcctccgggtacgggcgggagcccggcggagggcggtggcagcggcggcggcgggggcctcaggaggtctaacagcgcccccctgatccacggcctcagtgacacttcgccggtgttccaggccgaggcgccgagcgccaggcggaacagcacaacgttcccgagccgccacggcctgctgctgccggcctcccctgtccgcatgcacagcagccgcttgcaccagatcaaacaagaagagggcatggacttgatcaaccgagagacggtccacgaacgggaggtgcagaccgcan

SEQ ID NO: 4754 - DNA, 408 bp, Homo sapiens
tgatttttagtttggtttttacagtcaagcctactgcttgcaattaagatatcaatctgaaatgcatctgtaattcctggccacaggtccttattgccattatttttaagtatcttcattggagatgaacactgacttttgcatatggtctcttacctcagggaagatcacttgctagcaactcatactactaatgacaggtttttgagaattgtactgacatcacatgttagctactaaatgcaaaatgtataaaagtattgttttatgtagttacctaccaatactatctgctactgaataactctctaaatatgtagacctcactaataactaacctttaggtaaaaaatttacttctgtcattaattacacttcaactggtcaatatagtggcagcataaagtg

SEQ ID NO: 4755 - DNA, 458 bp, Homo sapiens
  misc_feature (1)...(458): n = A,T,C or G
aaaggcattcttgcttatgttgtagcatcctggattattatcttttgcctcacacccacatatcttgttttcctaatttgatttctgtatttgcgtcactgccagggacactcagactagaccagtcagttcacttcctgtttctcagaactggtttatatttggtctcgtagcactagctggtaaaacattatcaaactgatcctcttggaaagaaatctttgcttcccattgaaaacaaaatattccaattaaattgtaattcctgtggaaaacgtcatcatttgaggagtagactgccagttgccatttgagaaaccatccttgaaatgtaaagcctacaaaaaaaaaacatcatcttgatttcttttacccagaatcttcattcctcagcactagaactaagacaaactcgagtaaagagtagatttaagtatacttctaaaatgaaacgcatn

SEQ ID NO: 4756 - DNA, 492 bp, Homo sapiens
  misc_feature (1)...(492): n = A,T,C or G
aggaagaggcggggcnnnnncctgagactgaagacctgcgacggaacttcngggtagacccacgcgtccgcgctgaactggctatcggggaagtagatccctgcatgggaaagtcaagtatccccactgtgtanagctggtccacaatggagaggaggaaaagttttgcattggaccaaatcactgccttagaaggaaagagattgcaatcccattcatttttaagatctgcaatgggttgggatgatacccatttaaaaaagaaaaaaaaagaggttacctctttggcctctttggcaaaggatatgaactagtaataaagcctcagcatcaaggcttgggagtctggctcaaagtggctaagactagaagcatcttctaacataaatatggcagcattaggaaaatagcttggcctttagagagacccagattatcttcaccttaaaaactaccaagaccctggtccagcaagaccaccatcacagcagt

SEQ ID NO: 4757 - DNA, 470 bp, Homo sapiens
aggacttgaactgccatgtgctctgaagaaggaaagctcttcgtgggagggctcaactttaacaccgacgagcacgcactggaagaccactttagcagtttcggacctatctctgaggtggtcgttgtcaaggaccgtgagactcaacggtccaggggttttggtttcatcaccttcaccaacccagagcatgcttcagttgccatgagagccatgaacggagagtctctggatggtcgttagatccgtgtggatcatgcacgcaagtctgctcgctgaaccagaggaggtggctttggggcccatgggcgtggtcgcagttactctagaagtggtggcgaccacggctatggtagtggcaggtattatgacagacgacctggagggtatggatatggatattgacgctccagagactataatggcagaaaccaaggtggtatgaccgctactcacgaggaaattacagg

SEQ ID NO: 4758 - DNA, 473 bp, Homo sapiens
aggaacctccgggtcgacccacgcgtccgcccacgcgtccgtgatgaatgtggtgctggggtgtttatggcatagtcactttgacagacattattgtggcaaatggtgtctgacttactgtttcaacaaaccagaagacaagtaactgtatgagttaataaaagacatgaactaacaaaaaaaaaaaaaaaaaaaaaaaaaaaaaaaaaaaaaaaaaaaaaaaaaaaaaaaaaaaaaaaaaaaaaaaaaaaaaaaaaaaaaaattagggggggggccctataaaaaaacacgggggggggccaccttttacggggagggtgaaaaatttattttttttttttttggggggggtaaaaaaaaacccctggggtttttttgaaaaaaaatatttttttgggggggggaaaaatcgcccccccccccccccaaaattttttgtccggggggaaaaaaaattttttggggggggggg

SEQ ID NO: 4759 - DNA, 512 bp, Homo sapiens
  misc_feature (1)...(512): n = A,T,C or G
aatttgaaaacctttgtcgcgcgccggaaccgctgcggagttccaggcggacgcacgcgtccgggcagacgcagcctgcggccaggctttttatttaatgtaaatagtttttgtttccaacgaggcagtttctggtactcctatgcaatattactcagctttttttattgtaaaaagaaaaatcaactcactgttcagtgctgagaggggatgtaggcccatgggcacctggcctccaggagtcgctgtgttgggagagccggccacgcccttggctttagagctgagttgaaatccattttggtggttggtttttaacccaaactcagtgcattttttaaaataggtaagaatccaagtcgagaacacttgaacacacagaagggagaccccgcctagcatagatttgcagttacggcctggatgccagtcgccagcccagctgttcccctcgggaacatgangtggtggtggcgcagcagactgcgatcaattctgcatgggcacagnan

SEQ ID NO: 4760 - DNA, 492 bp, Homo sapiens
  misc_feature (1)...(492): n = A,T,C or G
gggtgaggcccccccctaatgatcgctatagatatagtcctgcaggaccccgccgacccacgcgtncgatctatctatctatctatctatctatcatctaactatttttttgagatggagtcttgctctgtcacccaggctggagtgcagtggcgcaatctgatctcactgcaacctctgcctcccaggttcaagtgattctcctgcctcagcctcctgagttgctgggactacaggtgcccaccactacacccagctaatttttgtttttttagtagagacgggtttcgccatatttgccaagctggtcttgaacccctgacctcaggtgatccacccgccttggcctcccaaagtgctgggattacaggtgtgagccaccgtgcccggccaaacatatcaaaaacattgatgggcacttgacaatacttttgaagcatgcgggggaaaaaggcaaaaggaacacagaatactaagttttctgaataaatt

SEQ ID NO: 4761 - DNA, 401 bp, Homo sapiens
ctcggactcctgggacgccgacgctttctccgtggaagacccagtgcggaaggtggggggcggcggcactgccggcggggaccgctgggaaggcgaggacgaggacgaggacgtcaaggataactgggatgacgatgatgatgaaaaaaaagaggaagcagaagtaaaaccagaggtaaaaatttcagaaaagaaaaaaatagcagagaagataaaagagaaagaacggcaccagaagaaaaggcaagaagaaattaaaaagaggttagaagaacccgaagaacctatagtgctaacaccagaagaacaattagcagataaactgcggctaaagaaattacaggaagagtcagacctcgaattagcaaaggaaacttttggtgtaataatgcagtttatgg

SEQ ID NO: 4762 - DNA, 401 bp, Homo sapiens
atttgccctcatacacactgcttccacagcttgctagttctgtgtttactcaatggaatatgagaactgaggacattatggctctcataatctgcataggtataaagaggatcatttctacctagggatagccaaagcatgggtttcaacacgttttgtattaaatatattttcaaagtccacagtgatttttctaaacgcttacagattccatgaaataaaagtctattctttcaagtggagctaaccaggataatctttgtccccaaaggcaaacctttaaaataaatagatcattaaatcttcacttgtggaaatgagttttagggaagggattgagtcttggaacatgactttcatccagatatctaacgacataatagaatgcataattagctctg

SEQ ID NO: 4763 - DNA, 582 bp, Homo sapiens
  misc_feature (1)...(582): n = A,T,C or G
gcgtgactgaagaactgatagactnctcgcaaacccgcncgacccacgcgtncgaggagagaaaaaaagagaaccagaaagaatatggttttaggtagccaagctgtgacataactggccaaaaatgggactatcaatgaaaaaatttaaaaaacaacataatggtaattttatttaaatatgtcttttgtgcaaaataaagctaaagtaaactttggtaaccttctgaagtcaatatatttgccttgctgtgggtatagtttgtaattattgttttcaactttgtatatatactcatgatttaatccatcagaaatatgatggggtgagagcacgtttgtcttttgttatactttctgaacaattatgtctgcctaatcctgctattagtggcctcctcaactagatacttaaaataagaattaagaaaaataagattatttgagtgatatttcagtatctttcatgttagcatggaatggaaagggaaggaaaaggaagggacgtanacaagtgccaaaagaggagaatannaataggtgaatttcattacagaacagatatttctgctgtaagtgtcag

SEQ ID NO: 4764 - DNA, 418 bp, Homo sapiens
gttgggtgtagtggctcatgcctgtaatccctacactttgggaggctgaggcgggtgaatcacttgaggtcaggagtttgagaccagcctggccaacatggtgaaaccccatttttactaaaaatacaaaaaattaaccgggtgtggtggcaggcacctgtaatcctagctagtcaggaggctgaggcaggagaattgcttgaactcaggaggtggaggttgcagtgagccgagattgtgccactgcactccagcctgggcaacagagtgagactccatcccccccaaaaaaaaaaaaaaaaaaaaaaagggggggccttttaaaagaacctttggggggcccaaatttaacgggggatggaaaggaataatttttttccttaaagggggccgtttaaaacccaccttgggaattttg

SEQ ID NO: 4765 - DNA, 406 bp, Homo sapiens
gctgctactccggaatctgctaatcccagtttgtgccgcatccccagcccgccgccatggccgcctacaaactggtgctgatccggcacggcgagagcgcatggaacctggagaaccgcttcagcggctggtacgacgccgacctgagcccggcgggccacgaggaggcgaagcgcggcgggcaggcgctacgagatgctggctatgagtttgacatctgcttcacctcagtgcagaagagagcgatccggaccctctggacagtgctagatgccattgatcagatgtggctgccagtggtgaggacttggcgcctcaatgagcggcactatgggggtctaaccggtctcaataaagcagaaactgctgcaaagcatggtgaggcccaggtgaagatctggatgcg

SEQ ID NO: 4766 - DNA, 545 bp, Homo sapiens
  misc_feature (1)...(545): n = A,T,C or G
ataccatagctaacaatttctactataaagttaatataagctagttactttatcctaagtaggaanggacagacnnnnnnnaattgacgccntctttgacggaccttaaaaccggcncgacccacgcggncggacagcttttaaaggaaaaggngtactgagccttctgactatgccttgttttcttttgagatatatattttcacagtcttttctagatatattattgctttaacttaacaaatcttagcaatctctcaatgccttttcacttatttttttccaagttatgattctttttcctcacagccttttttgttccatagcaatgagggtgtccatttgataattttaacaaacaatgtaagtttaaaattgaggctaaggtaacatgaaaaagcagggaatctcaaactttatttcatatatatacacacacacacacacacacacacacacacatacatacatatatatatatatacatatatatacatacacacatacatataattttttttttttggagagggagctccactctc

SEQ ID NO: 4767 - DNA, 422 bp, Homo sapiens
ggcggacctcggtctcattcctgatgtggacatctactacgactgcgtcttcaaggatgtgctgatccgagtacactcggctccccgctccggggctccggctgcagagagcaaggagatcgagcgcggctacaagtgggctgagtaccatgcggacatctacgacaaagtgtcgggcgacatgcataagcaaggctgccactgtgagggtgtgggcgggggccgcatctcccaccagagacatgacaagaagattcacgtgtacggctattccatggcctatggtcctgcccagcacgccatttcaactgagaaaatcaaaggcaagtaccccgactacgagggcacctgggctaacgacggctactgagcactcccagcccggtgcctgctgcctacaacagccacttgagagcccacgc

SEQ ID NO: 4768 - DNA, 403 bp, Homo sapiens
cggacgcgtgggttcaaccagtgggaggatctgtgagagaccagggaagaggggcgtgtccgagccaggaactggactcacctgggcaacttcccgcacgagaccagggaagaggggcgtgtccgagccgggaactggactcacctgggcgacttcccgtgcgagaccagggaagaggggcgtgtccgagccgggaactggactcacctgggcgacttcccgtgcgagaccagggaagaggggcgtgtccgagccgggaactggactcacctgggcaccttcccgagagagaccagggaagaggggcgtgtccgagccgggaactggactcacctgggcaccttcctgtgtgagaccagggaagaggggcgtgtccaagccgggaaattgactcacctgggca

SEQ ID NO: 4769 - DNA, 475 bp, Homo sapiens
atccgtgcatcaccctggggagcctttgggcgttcgaacggaagtgaagaatctcaacagcatcaggttcctggccaaagccatagactatgaaattcagaggcaaatcaatgaacttgagaatggaggtgaaattctgaacgaaacacgctcatttcatcacaagctggggtgcaccatgtcaatgagagacaaagaaggaaaacaggactacaggttcatgccagaacccaacctgcctcccctggtgctctacgacgccacatctctgcccgcaggtgcagacccacagcaagtgatcaatattgaccagattcgggagacactcccggagctccccagtgtgacccgagagaagcttgtccaacagtatgggatgctgctggaacacagcttcactttgctggtaggtatcgatcggatgccaagaggatccccgctcagcagatggggcagtgcccttcagaggccccgt

SEQ ID NO: 4770 - DNA, 414 bp, Homo sapiens
cccaaggtgcgtcccaacccagcccgcttcctgcagaactgccgggcacctggtggcttcatgagcaaccgctttgtagaaaccaacctcttcctggaggagattcagatcaaagagccagccgagaagcaaaaattcttccaggagctgagcaagagcctggacgcattccctgaggatttctgtcggcacaaggtgctgccccagctgctgaccgccttcgagttcggcaatgctggggccgttgtcctcacgcccctcttcaaggtgggcaagttcctgagcgctgaggagtatcagcagaagatcatccctgtggtggtcaagatgttctcatccactgaccgggccatgcgcatccgcctcctgcagcagatggagcagttcatccagtaccttgacgagccaacagtc

SEQ ID NO: 4771 - DNA, 486 bp, Homo sapiens
  misc_feature (1)...(486): n = A,T,C or G
acaggtcctacaacgtgactttaaaaagacagcagaaagcaaaaatgtcccattggaacgagaagccactagtaaaaatgaccaaaataactgccctgtgaaaccctgttacctcaatatcttggaagatgagcaacctttaaatagtgctgcccataaggagtcacctcctactgttgattcaactcaacagcctaaccctttgccgttacgtttacctgaaatggaacccttagtgcctagagtcaaagaagttaaatctgctcaggaaactcctgaaagctctctggctggaagtcctgatactgaatctccagtgttagtgaatgactatgaagcagaatctggtaatataagtcaaaagtctgatgaagaagattttgtaaaagttgaagatttaccactgaaactgacaatatattcagaggcagatctaagaaagagaatggtagaagaagaacaganaaaccatttatctggtgaaat

SEQ ID NO: 4772 - DNA, 421 bp, Homo sapiens
ctcacctatgcaccatggacatcgccatccaccacccttggatccgccggcccttctttccttttcactcccgcggccgcctcttagaccatttcttcggagagcacctgttggagtctgatcttttcccgacgtctacttccctgagtcccttctaccttcggccaccctcctttctgcgggcacccagctgggttgacactggactctcaaagatgcgcctggagaaggacaagatctctgtcaacctggatgtgaagcacttctccccaaaggaactcaaaggtaaggtgtgggagacgtgattgacgtgcatggtaaacatgacgagcgccaggatgaacatggtttcatctccagggagttccacaggaaataccggatcccagctgatgtagaccctcttaccattacttcatcc

SEQ ID NO: 4773 - DNA, 391 bp, Homo sapiens
cataccctctggactcctcagatgagcggattcggagagaagcttttgagagcgtgctggcggagacatttttcacaaaagagcccttgcggtgctggtgtccgtggcgtgcctgggaaggcccaccaaccctggccggcctccaagcacccgggcctgtggtcatgtacagctcctgaactgccctgcctctgagttactgtggaaaatgagcttatatatgaagaagtcagcgagtggacaaagccaggcgcaatggatagcaaagatgtggaagtctcctcgattcaagttagaagaaaaccgcagcatggagtctgctctcagctgttggggaattaccgatgcctttgactaagtcaagactgacttttccagaatatcacccaag

SEQ ID NO: 4774 - DNA, 395 bp, Homo sapiens
  misc_feature (1)...(395): n = A,T,C or G
gagaacactagtggcaaaggtattggcttctttcctttatgtgtgccatttcttgaacaactgaaacaaagccttcctcagaatcaattggtccttgactggttgtactctgctacataagatttatcttctagtactttggggagtggtttaattttaacatcatgttagaattgtcttagattcttgtcatttcaaatccattctttatacagctgactgaagacattttgtataacctgttagaattagttctcatgtgtaccatatattatgattctgatatatcaaattttatattacattaaatttttaaaaagaataaaccttttctattctaaatacactttgaaggtgatactaatttttaattaaaaagaatgtgttgtatcaan

SEQ ID NO: 4775 - DNA, 415 bp, Homo sapiens
  misc_feature (1)...(415): n = A,T,C or G
ggtgctctcttgcctggagttccctctgctacggctgtcccctcccagccctggcccactaagccagacccagctgtcgccattcccacttctggtcctgccacctcctgagctgccttcccgcctggtctgggtagagtcatggcctcgagcacaggtgaccggagccaggcggtgaggaatggactgagggcgaaggtgctgacgctggacggcatgaacccgcgtgtgcggagagtggagtacgcagtgcgtggccccatagtgcagcgagccttggagctggagcaggagctgcgccagggtgtgaagaagcctttcaccgaggtcatccgtgccaacatcggggacgcacaggctatggggcagaggcccatcaccttcctgcgccaggtcttggccctctgtgttaacn

SEQ ID NO: 4776 - DNA, 414 bp, Homo sapiens
  misc_feature (1)...(414): n = A,T,C or G
acgccccgcctcgccccggcggcagagaggagactatggaacgtcaggtgctgctgagcgagcccgaggaggcggcggctctgtatcggggccttagccgccagcccgcgctgagcgccgcctgcctgggcccggaggtcaccacgcagtacggcggccaataccggacggtgcacactgagtggacccagagggacctggaacgcatggagaacattcgattctgccgccaatacctggtgttccatgacggngactcagtggtgtttgcaggacctgcaggcaacagtgtggagacccggggggaactgctgagcagagagtctccttcaggcaccatgaaagctgtgctgcgcaaggctggaggcacgggccctggngaagagaagcagttcctggaggtctgggagaagn

SEQ ID NO: 4777 - DNA, 406 bp, Homo sapiens
agtccccgaattccttcttggaccaggaaagccggagacgaagattcaccattgcagactcggatcagttgcctgggtactcggtggaaaccaacattctgcccacaaaaatgagagagaaaacaccatcttatggcaagccacggcctttgtccatgcctgctgatgggaactggatggggattgtggacccttttgccagacctcgaggtcatggcaggaaaggggaggatgccctttgccggtatttcagtaacgagcggattcctccgatcattgaagagagctcctctcccccataccggttctccagacccacgaccgagcggcatctggtccggggtgcggactacatccgaggaagcaggtgctacatcaactcagatctccacagcagcgccacgat

SEQ ID NO: 4778 - DNA, 427 bp, Homo sapiens
acatgatctaatggcaagagggtggttagggtgacagaacagaccatggaatcaaacctgagtaaagatagtatgaatcaaaattactagagataatatctttatgttttcagcatataagatgaatccaccaaaattcctaaaaactagtggcaaactcataagaaaaaagattccattgataatataagtgttatgatggaaagagcactactagactaagacttgataacttgggtttaaattttatctatacccatttcaggccatgtgccctcaaaagtcgcttaagcttccctgggcctcagtttcctcatctgcacaatgcatgggattgttgaggggttcgagttgaggtaacgaatgcaagaacacattgcaagccctagaggagtggttctcaatctgtggcactcttagagctaga

SEQ ID NO: 4779 - DNA, 378 bp, Homo sapiens
cccacgcgtccgcgcacgcttggtgcgtgcgcggcgactgcgacgggcagtggcagtcatggcggctcagtgcgtgaggttggcgcggcgcagtcttcctgctttggcgttgtctctcaggccatctccccggttgttgtgcacagccacgaaacaaaagaacagtggccagaacctggaagaggacatgggtcagagtgaacagaaggcagatcctcctgctacagagaagaccctcctggaagagaaggtcaagttggaggaacagctgaaggagactgtggaaaaatataaacgagctttggcagacactgagaacttacggcagaggagccagaaattggtggaggaggcaaaattatacggcattcaagcctt

SEQ ID NO: 4780 - DNA, 493 bp, Homo sapiens
  misc_feature (1)...(493): n = A,T,C or G
gggtggngccccctatggagacctcatggagancatcggaaccgccccggaatccgggtcgacccacgcgtccgggctggcttctgcgtggtgcagctgctcacgtgttttatccggcagcgctttaagatttccggggatggaatccgaaatggaaacgcagagcgccggggcagaggagggctttacccaggtcacccgcaagggtggccgacgggcgaagaaacgacaggctgaacagctgtccgcagcaggagagggcggggatgcgggccgcatggacacagaggaggccaggccggcgaaaaggcccgtcttcccacccctctgtggggacgggctcctgagtgggaaagaagaaacaaggaaaattccagtcccagctaacagatacacaccattgaaagaaaactggatgaagatatttactcctattgtggaacatttgggacttcagatacgctntaacttgaaatcaaggaatgtagaaatn

SEQ ID NO: 4781 - DNA, 410 bp, Homo sapiens
  misc_feature (1)...(410): n = A,T,C or G
attgtggtgaatattttgagtcctgacagtttaaacgtgatagagggaacaaaggatttatatattttttgtacaaagttttttcttaaactgtataattttgtaaataatttgtttgggttttttttttgtgtactaaaactaccagcgtatagatttcaataaaaattgttgtatttttgtatttggaaactgaaaattacagtaaataaatggaactctaagaaaaatttcagtaaacagttcaacagaatgagattccttttcatatgatttttttgacctcaaaatggacatcttatttcactctcagtaaaaagttgaaaatttgactttttagtattgggggcagaaaatagaagtgtgttaaagtgaaaaacagttttttcagtaaggtttgaggccctttn

SEQ ID NO: 4782 - DNA, 492 bp, Homo sapiens
  misc_feature (1)...(492): n = A,T,C or G
agggcggtnnncccattagtgacctcnatgaaaanctcncgaanccccncnacccacgcggncgagattgactccttcagtgtctgttcaatttttccccattattccagcctctctgactttacgtggcgctcagggggctgccccacccttcagatccacccagccttgatctcaagagtgacctccatgttcatgaaggcattcagccactatttgggccagcctcaaccccaccagccttctcagagatggggcatgccaaagttctttcccaagtatgtagtgagagtttgagtcacactcttgcttaagaggatactctatgcattttcagacgtatgactaactgggcaaaaagtttagagaataaaattcacaataacagtgttcagcaggacagntgttctttgctttccatgttatttgcggagcttaggaaaaggacagaataagattggcctgaaacacggaacaccataaagagacagt

SEQ ID NO: 4783 - DNA, 465 bp, Homo sapiens
aagtacaataatgcacaatcagtgttgctcaaactgctttatacttataaacagccatcttaaataagcaacgtattgtgagtactgatatgtatataataaaaattatcaaagaaaattaactgccagtcatttgtaaatgctgtctactcctgaaagccttccttcatctctatttagttaataatgtgctctctcctcctgttttgaaaccccatagctctctacacctcttattgtacatcactctactttgcattggagttctgtttctatatgtacttattcacctgttgcctaaacatgcactgttcctaaaaggtacagtttttgctcataatatatgaaaggaaagataatcagttcttaaagtttgggatgctaaataagcacccagggaacttacctgcttcacctcaccccataaattgattattcaggtctggaatatggctcacgattctt

SEQ ID NO: 4784 - DNA, 499 bp, Homo sapiens
  misc_feature (1)...(499): n = A,T,C or G
gggatggngnnnnnttttagggacttcnattgatgacttcncgganccgccccggaanncccggggcgacccacgcgtgcggctagagaaaatgttatttacaaaattataagaaagattttatatatttactattcattaaacggaagtggggcaacataaaagtcttcattctcattgtcttcacattgagtaggcagaggaggagaaagatggggaggaagagaaggcgttggtcttgcagtcttgtcttatgggtgtggggagtgggggaaagaatattcatgtataagtggacccttgcaattcaagcccttgttgttcaagggtcaactgtaataggatatagctatttttcttcctctatcaaccaaatggtaagcatctattttgtagtccactctactgagctaaattatagatccagctatgctatttataattattttcttgaagaataaattttcaatttctcctctgaccatttcaaaacatcttn

SEQ ID NO: 4785 - DNA, 409 bp, Homo sapiens
catgacagtaccgtcacatccactgtcctcatcctattgggggttggcttgcccatttcctctgtaagtaaattaataagtaggtagtgatgggtttgttgtgctggaggttggatgaagcatggagttggggcgggggtaaatccacagtactgtcttcaccagtgttgatatggtgaatgattgcttgaggaatatacccactgttttagtccagaggcagtgtttctccagttaaaggtggatgttacccagaacaacttgatgtcattctgaagaatgatagaatgattatttttgaataggagagtctttttgagtcatttggatcaactcctctcagtaaacaaatgaagaaacttaggtccagacacttgttaaagcccagtaagctatcgtacggcagagg

SEQ ID NO: 4786 - DNA, 488 bp, Homo sapiens
gtgaggagccccctaagagaccctacggaggttatcggaaccgcccggaatcccggtcgacccacgcgtccgcacataggtgctttaagcaggggcttatagggcagatcgcttgcccggcctgccaggggggtgatctcctgacagaagagtcaccttttggaagaggctggcccattcagaatcaggagctgccttcctgctcttctagggaggcacacttcactaaagtgtcatccaccagggtggtgaatccgaagaatgacaattttctaccactggtgtaaaaaacaaacatttgaagacccttgtgcattgggtgtgacaaagctaaatacatggaaatcgcttatatcgttgatattaagtaatttccccactctgagagaatactttgatgattgccaacagaggctaataaaatgacggctaccacactcatgggtcactggggctgcgcagggctctttgaggtgggaggcttcttt

SEQ ID NO: 4787 - DNA, 490 bp, Homo sapiens
  misc_feature (1)...(490): n = A,T,C or G
aggccggnnnnncccactgataccagcatagacgccntgaaacccgcncgaccacgcgtccggccaaatgaagtttaatccctttgtgacttccgaccgaagcaagaatcgcaaaaggcatttcaatgcaccttcccacattcgaaggaagattatgtcttcccctctttccaaagagctgagacagaagtacaacgtgcgatccatgcccatccgaaaggatgatgaagttcaggttgtacgtggacactataaaggtcagcaaattggcaaagtagtccaggtttacaggaagaaatatgttatctacattgaacgggtgcagcgggaaaaggctaatggcacaactgtccacgtaggcattcaccccagcaaggtggttatcactaggctaaaactggacaaagaccgcaaaaagatcctcgaacggaaagccaaatctcgccaagtaggaaaggaaaagggcaaatacaaggaagaaaccattgag

SEQ ID NO: 4788 - DNA, 488 bp, Homo sapiens
  misc_feature (1)...(488): n = A,T,C or G
gtgaggngccccctaggaagccttacggaaagcatcggaaccccccgaatccgggtcgacccacgcgtccgcaaactcctgacctcaggtgatccattcgcctcggccttccaaggtgctggaattgcaggcgtgagccaacgtgcccagcctgtttttgttttttgtgttttgaggcagggtctcactcagttccccaggctggagtgcagtgacacgataatagcttactgtagctgcaatctcccgggctcaaacgatcctcccacctcagcctcctgaacagttgggactacaggcacaccaccacacctggctaattttttttttttttttttttaataaaaatgaggtcttgttatgttgcccaagctggtctcaaactcctgaggatcaagggatcctcctaccttaccctcccaaaatgctgggattgcagatgtgagccaccacacccagcctgattttactttaaatgagagtccttg

SEQ ID NO: 4789 - DNA, 465 bp, Homo sapiens
  misc_feature (1)...(465): n = A,T,C or G
gagcgccggccccatgaaaactgacggcgtngcaaccgcccgganttccggtcgacccacgcgtccgatttcttctttatcccctacagatataagttaaggtttttatgttcaatatgtatttattgcattaaagcttactgaattctaagtgtataaatgcataattgtcatgctgttcccctaccgattacaataaggatggcaccatgttcaagaagccgaacaagggacctggagccatcaaacaagacatagagtttattggggggacttacacacagggcagttcaatgccagtagcctggacaggaggactacaattgcttataaaaaagcacgcagtttatatagcattttcacttagcactttcccccaccgaactccacctggcaatcttcatttaacccaaaacaaatggcctccgagccctgtatggtctgtattccatgaggaggaccagg

SEQ ID NO: 4790 - DNA, 498 bp, Homo sapiens
  misc_feature (1)...(498): n = A,T,C or G
aaattgatcgccntgaggnaattgatcgccattcccgggnccacccacgcgtccgggctgctgtaggacggttgctccgagcgtcggttgctcgacatgtgagtgccattccttggggcatttctgccactgcagccctcaggcctgctgcatgtggaagaacgagcttgacaaatttattgtgttctggttccagtcaagcaaaattattcagcaccagttcctcatgccatgcacctgctgtcacccagcatgcaccctattttaagggtacagccgttgtcaatggagagttcaaagacctaagccttgatgactttaaggggaaatatttggtgcttttcttctatcctttggatttcacctttgtgtgtcctacagaaattgttgcttttagtgacaaagctaacgaatttcacgatgtgaactgtgaagttgtcgcagtctcagtggattcccactttagccattctgcctggataaatacaccaagaaaga

SEQ ID NO: 4791 - DNA, 428 bp, Homo sapiens
  misc_feature (1)...(428): n = A,T,C or G
cccacgcgtccgccccgagcgccgctccggctgcaccgcgctcgctccgagtttcaggctcgtgctaagctagcgccgtcgtcgtctcccttcagtcgccatcatgattatctaccgggacctcatcagccacgatgagatgttctccgacatctacaagatccgggagatcgcggacgggttgtgcctggaggtggaggggaagatggtcagtaggacagaaggtaacattgatgactcgctcattggtggaaatgcctccgctgaaggccccgagggcgaaggtaccgaaagcacagtaatcactggtgtcgatattgtcatgaaccatcacctgcaggaaacaagtttcacaaaagaagcctacaagaagtacatcaaagattacatgaaatcaatcaaagggaaacttgaagaacagagaccan

SEQ ID NO: 4792 - DNA, 418 bp, Homo sapiens
  misc_feature (1)...(418): n = A,T,C or G
ggattcggagaaattagacaatattctttggaggatgtgctatgtcttatattactgaaatgctctccagaagccatagaaaactcttctttcttaagggaaaatactcttcttttgcctttattggcttaagaaatgcctttataggcattcaggtgcctttaggatctacacactttgatcgtttagaagattctgagtatactacttattctcattggacagctacttctttaaactttgtgcttagaggttcacagattattgagcacgcctagtttgaactgtancaggtttataggaatgagcatgaccctgactcgcattcgatttcattatggtccttttttgcgcttaagagcataagactataatacgattatttggggtgagagtttaattacactcatactatatg

SEQ ID NO: 4793 - DNA, 452 bp, Homo sapiens
  misc_feature (1)...(452): n = A,T,C or G
gcagcgcgactccaggcagtgggtctctctgccccggtgctttcgtctgcccctggggccgggccgagcggaaccaggaatcgcagaaacggtcagcgcccagggctctaggccggccgccccgggtgccaggtgaattcctttccctgaccggctgtgagacgttggcccgtcagccgtcgtctttggcctgagtgtgcacatctgtaaaatggaagctcggactagtgatccgtgaggaccttccacgtctgacgtgtgatctcgagagacctgcgtacattcggggtgccagaaggaaagcataggtaagaatttctctggaatatacatctaggattggagttgttgtttgtcagagatggngtcttgctgtgttgccagactggtctcaaactcctgggcctcagtgatccttctgcctcagcttcccaaggacttggatacagctt

SEQ ID NO: 4794 - DNA, 448 bp, Homo sapiens
  misc_feature (1)...(448): n = A,T,C or G
tagctgactgacaattttagtgagaattcatattcatttaacccagcagcaatctacataagctatgctgtgtcccgcctgtatttatgtttcttagcttataaagccccaacatattatatcttttgttgctttggcagttttaatttagagctctgcgttcacagagatgccacctatagcaaaaactatctttaagaattggaaaataaaatgaatgttttagataaaatattgcaagccattatgtgtagagttaatgtatggaaatttgcatttgtttttctgaatcatggtgtacattaatcactcattgaattctatttctaagcaaataagagaatcaaacatttctaaaaggaacatatgtcttgctattaataacaaggagacagganaaatagtttggtaatataagcaaaacaaaaaatgtaatgaatctagctat

SEQ ID NO: 4795 - DNA, 426 bp, Homo sapiens
cttacggaatataacattgatgtggatctgcctggaagctttaaggaccactgggctaaaaatttgcctttcctcatagaagactacgaagagcagccagggttgcaaccccacataaaagatgtgttacatcagaattttgagagttataagcctgaagtacaggagctgatttgtgtggctgatcgtttgggatccctgatgcaatatgaaacacctggtttcctgccaaacaagagaatacacagagctatgggtttggccgcattggaggtcatgcaagccgtgcagcgtacatggaccaactcgaaagttcgaatgaatgggaagacacggttgatgcagtggagagacatgtttgacattgcagttaaatggagaaggattgctgacccagaccagcccgtgctgtggttagatcaaatg

SEQ ID NO: 4796 - DNA, 492 bp, Homo sapiens
  misc_feature (1)...(492): n = A,T,C or G
agggttccnggcagnncnnccaatagacngcctcaggatagatcgcatttgcaggggcgacccacgcgtccggttttatactctataacttgtggttcatattatattgatgatggtatttgtacttatttagtcataatatgagtggttaaaataaatgaatactaagttggtggtggtgtagagtcaactaggaaagtgacctcactgttactagtagtagcaacagaagcagcagtatcaatgatcagcgttcattgcatacttaatatattcctgacacagtgtcaagtgtctcatttaatcctcctgccagccttatctgttaatcccttttagtatcccattttacagatgagggaactgaggcttagaataagtagcttttctaaggtcatacaactaataagtagtggggctgggatttcagtcatggtgatctgagtctattgctcatgtgcttgaccactgtattgcatttcttcattgtgg

SEQ ID NO: 4797 - DNA, 460 bp, Homo sapiens
  misc_feature (1)...(460): n = A,T,C or G
acgaaagtggctttaacatatctgaacacacaatagctaagacccaaactgggattagataccccactatgcttagccctaaacctcaacagttaaatcaacaaaactgctcgccagaacactacgagccacagcttaaaactcaaaggacctggcggtgcttcatatccctctagaggagcctgttctgtaatcgntnnnnnaaaaaaaaaaaaaaaaaaaaaaaaaaaaaaaaagaaaaaaaaaaaaaggggggggggccttttaaaaaaattttggggggggccaaaatttacgggggggggggaagaatattttttttttttagggggggggtaaaaaaaccccccggggggtttttggggaaggaatctttttttgggggggggggaatgggggcacccccccccccaaaaattaagggctttggggaaaaaaaaaaatttttgggggggggggg

SEQ ID NO: 4798 - DNA, 535 bp, Homo sapiens
  misc_feature (1)...(535): n = A,T,C or G
ggtgcacggcncncccaatggaggcccgnatgatcggtcngtagnacccgncncgacccacgcgtncggaccgcgcggctggaggtgtgaggatcctaacccaggggtgtgttggtggaggttgctcctgcgatcgaagaggacttgagactcaccggccgcacgccatgagggccctgtgggtgctgggcctctgctgcgtcctgctgaccttcgggtcggtcagagctgacgatgaagttgatgtggatggtacaggacaagaggatctgcgttaaagtagagaaggatcaaggacggatgatgaagtagtacagagagaggaagaagctattcagttggatggattaaatgcatcacaaataagagaacttagagagaagtcggaaaagtttgccttccaagccgaagttaacagaatgatgaaacttatcatcaattcattgtataaaaataaagagattttcctgagagaactgatttcaaatgcttctgatgctttagaaaagataaggctaatatcactgactgatgg

SEQ ID NO: 4799 - DNA, 496 bp, Homo sapiens
  misc_feature (1)...(496): n = A,T,C or G
aggttgccnggnnaggnnnccnccttgaaagcctncggaatagatcgccnttaggaggcgcgacccaagcgtccgggagaaagtgtcctttcttcagacactgaggctcccgcagcagcgcccctcccaagaggaaggcctctgtggcactcagataccgactggggctgggcgccgccactgccttcacctcctctttcaacctcagtgattggctctgtgggctccatgtagaagccactattactgggactgtgctcagagacccctctcccagctattcctactctctccccgactccgagagcatgcttaatcttgcttctgcttctcatttctgtagcctgatcagcgccgcaccagccgggaagagggtgattgctggggctcgtgccctgcatccctctcctcccagggcctgccccacagctcgggccctctgtgagatccgtctttggcctcctccagaatggagctggccctctcctggggatgn

SEQ ID NO: 4800 - DNA, 500 bp, Homo sapiens
  misc_feature (1)...(500): n = A,T,C or G
agggttccnnnnnaggggnncaactgatagcctgcggaactgatacgcaattgcgggggccgccgaatcgtcggatcgaaccacgcgttcgtgacaactcagcatctctctagtggccactgcttttgcttcctaaacatgctgttttgagtagcctcaccttacaaatagatttgcagaacaggaagaagattcttgaaagggaagattgtgatgaaaccgataaaaatctctgtattaaaatcttgtacagccttctgttttaatatcttttcttctggatgagacattagtctttaacttttgaggaactctgtaactgaagacaaacaataaaataccaacagagaggaaattattaaaggattatatgtatttaaattacttttatcagtaacccactctagcctcagaaggtataaagctaacggagaaggggacatttaaaaccaatgtatttttattctgtaaatctttaacttaaaatagtattttgaatt

SEQ ID NO: 4801 - DNA, 532 bp, Homo sapiens
  misc_feature (1)...(532): n = A,T,C or G
cgatgcgggggnnnnnaatggaagccgtttggacggccgtagnacccggcncgacccacgcgtccggngaccagaggagtcccgcgttcggngagtatgtcaaggcctttacccgtgtattattgaccgagtggccggaacgggagccaacatggcagcggggttcgggcgatgctgcagggtcctgagaagtatttctcgttttcattggagatcacagcatacaaaagccaatcgacaacgtgaaccaggattaggatttagttttgagttcaccgaacagcagaaagaatttcaagctactgctcgtaaatttgccagagaggaaatcatcccagtggctgcagaatatgataaaactggtgaatatccagtccccctaattagaagagcctgggaacttggtttaatgaacacacacattccagagaactgtggaggtcttggacttggaacttttgatgcttggttaattagtgaaagattcggtttatggatgtacaggggttcagactgctattgaaggaattcn

SEQ ID NO: 4802 - DNA, 389 bp, Homo sapiens
attagccgggcgctcctgtcatcccagctactcatgaggcagaggttgcagtgagccaagatgacgccactgcactccagcctgggtgacagactatgactccatctcaaataaaaattaaactgggggggactttataaaaaacattatgaggaacttacaggatgccattattgggagtgtgtacttccatgttgaaagggtaaacaggctaaattgactcactgctttaaaagagaaagaaaatattgtgggcgggatttgctccttcttctacccgagcagaatgactgggttctgaaacccaaaagacctcattagatttgtagtgggtatatatttgaacgtagagtcatctcataaaatttttgtacaacagcctctctcct

SEQ ID NO: 4803 - DNA, 455 bp, Homo sapiens
aatattagtttttaactttaacatctgtttctttttaatctataatgagctagttttatggaaaatggaatttcttactatataaagaatacagagactcattgtattagagaatcaagtcagccagctaaagtatcctactgttaaatccttaaacctaattttggaaaagagaaagttaatcaatgtatttaccttacatgttggaaagaactatgttaggtctgattcatgtgaagaagatgttgcaaaggatttatttcacaaattttaaaggagatatgagtaaaagtttttatcttttcttgactttttctcctgaacacttatgtcttagcaagtggtcaacatgaggatttgaacgcctaattgttggtaaatggttgaggcatgacaaaaatattaatatccactggttaccatcatgttatttgaaacaaaagtgaccatgtata

SEQ ID NO: 4804 - DNA, 479 bp, Homo sapiens
  misc_feature (1)...(479): n = A,T,C or G
cgcggttactgagnccanctagagtctgcggaaccgcnccgganaacccggggcgacccatgcgtccggagagaaaggaaagcgcgaggagcctttgtcaccaccagcgcagcagtcctggagctgtgaggagattcgggccgtcaccctgcctcccctgcgtcccgccaccggccgcttctgtcctcggacccattccaacaatctcgtaaaacatggtggattactatgaagttctaggcgtgcagagacatgcctcacccgaggatattaaaaaggcatatcggaaactggcactgaagtggcatccagataaaaatcctgagaataaagaagaagcagagagaaaattcaagcacgtagcggaggcatatgaagtgctgtcggatgctaagaaacgggacatctatgacaaatatggcaaagaaggattaaatggtggaggaggaggtggaagtcattttgacagtccatctgaa

SEQ ID NO: 4805 - DNA, 421 bp, Homo sapiens
tgaaagacatgctaaaaagaatacttgtactgtcaatgaattaaaaacataaacaattgccattgaatgtgcgagatgagtgggagtcaaggtttgtcacacataccaccacccttccaaaaagaaaaaggcagaaaataaaaaaagaaaaaaataaaagaaagaaagcaaagtaacattccaactgaatgagagatgagtgatgtaaataattcaggcttatgagactacagccaaagatggcagggtgctttggaacaactgcaagaaagagatgggattagcgtgaaatcttctaagatgtggaggatttggacaagcaataaagaaaaaaaaatctagattcttcctggtatgttacaaagctccaccccaatattcaggaggaagcctcgaaggagagagatatagggagccagga

SEQ ID NO: 4806 - DNA, 403 bp, Homo sapiens
cggacgcgtgggcggacgcgtgggcggacgcgtgggctgttaactaagtgtttgtgggtttaagtcccattggtctagtaagggcttagcttaattaaagtggctgatttgcgttcagttgatgcagagtgggattttgcagtccttaccaaaaaaaaaaaaaaaggggggcccgttttaaaggatccttgggggggccaaagtttacccgggcttgcaaggtaatatttttttccttatagggaggcgttttataacctccctgggaattttggggagggacctttatttttggggggggacatattggaccaacctccctccagaatttaaaggctttagggaaaatataaaattttaaggggtatagggggtaaacctacctgcataggctggctgttga

SEQ ID NO: 4807 - DNA, 451 bp, Homo sapiens
  misc_feature (1)...(451): n = A,T,C or G
cccacgcgtncggcgtccctgcgcctggtcgcccccatgtggaatgggcgtatcaggggcatccatcgcctgggtgcggcagtggccccagagggcaatcagaagaagaaaaggacaatactccagttcctgaccaactatttctacgatgtggaggctctgagggattacttgctccaaagggagatgtacaaggtgcatgagaaaaatcgatcttacacctggctggagaagcaacatggtccatacggcgcaggtgcctttttcatcctgaagcagggaggcgcagtcaagtttcgagacaaggagtggatcaggccagataagtatggccatttctctcaggagttctggaatttctgtgaagtgcctgtcgaagctgtggatgccggtgactgtgacatcaactacgagggcctggataacctccgaacctccgcaggctggacag

SEQ ID NO: 4808 - DNA, 415 bp, Homo sapiens
  misc_feature (1)...(415): n = A,T,C or G
atcattattaataatgaacataataaccacaggaagacaatgaaaacaatgatcacaaacagctcagtgccagtttggtgttctgtagggaagagtactccttccagtcgtctcttgctggtcagaatgactttgttagttgtgaagtgatagctttaattataaatgacaagtggcattatatcacagagggaaaaaagatgttcaggccaccaacacatcactggaacagtgcctgccccccactccctgcacaattgatacacaaatatttatacggccacaacaaccagtacaacctccaagcaggcaccataatttatctgttctttttcaaaaggaaaaaaaaagnnaaaaacaacaacacctttcttggagaagggccggccccggaggccctgccccccagatgggg

SEQ ID NO: 4809 - DNA, 411 bp, Homo sapiens
gagaaggaagccaacaggatccgacccggtgttttgtgttaaaggcaagacccccaggtctactgagagcaaaggtagtagaggaggcagctaggcgtggctctcattccttcccacagaatggattataagtcgagcctgatccaggatgggaatcccatggagaacttggagaagcagctgatctgccctatctgcctggagatgtttaccaagccagtggtcatcttgccgtgccagcacaacctgtgccggaagtgtgccaatgacatcttccaggctgcaaatccctactggaccagccggggcagctcagtgtccatgtctggaggccgtttccgctgccccacctgccgccacgaggtgatcatggatcgtcacggagtgtacggcctgcagaggaacctgctg

SEQ ID NO: 4810 - DNA, 418 bp, Homo sapiens
aacattaagaataaagggaaaaaatcataaaagatgcattaactgtagtaataaaatctaacatgcgagtaactggattcccaaactgtgatggatttggagctacaatagtgagattcaagattactgtcaatcctaaggaatattaatacttataaaaccacactggcttaccatagtaaaaatgctgaaaactagaaaaataaaaaatcttaaaagtaactggaggagggaacaaaatttaaaagctgtaataagactgatacctgatgacacattagaaaaagttgaatcagaagacaaaggcatgatatctttaatgttgtgaggaaaaataatcactaactctgtattatagccagataaaagtatacttcaaaagtgagagtgaagtaaagacatttccagacgcatacaa

SEQ ID NO: 4811 - DNA, 402 bp, Homo sapiens
cgaggaaaactgagcgtgggcctcagaaagaagttaaggcacccgcgagccgggcaactgccctccttccgcgccggcggagcgattaaagtgaagaaacaatggccagcaatcacaaatcttcagcagctcgccctgtttcaagaggtggagttgggttaacaggaaggcctccttctgggatacgacccctatcaggaaatattcgagtggcaactgcaatgccacctgggacagcaagaccaggttctcgtggttgtcccatagggactggtggagttctgtcttctcaaatcaaagttgcccatcgccctgtaacacaacaaggtttgactggaatgaaaactgggacgaaaggtccccagaggcaaattttagacaaatcttactatcttgggcttg

SEQ ID NO: 4812 - DNA, 411 bp, Homo sapiens
agcggtgaggcgaactgcagcagagttcttgctttccggcaggtgatggcgccccccgcggcctagaggtccagcgcccgccgcgagcagcggacagtcctcctgttgtgtccgaccgagagtcctggtgactttgaacatgctggtgccgctagccaagctgtcctgcctggcatatcagtgctttcatgccttaaaaattaagaaaaattatctacctctatgtgctacaagatggtcttcaacttctactgtgcctcgaattactacccattatactatttatccccgggataaggacaagagatgggaaggagtgaacatggaaaggtttgcagaagaagcagatgttgtaatagttggtgcacgccctgcagggctctctgcaactgttcgtctaaaacagttggg

SEQ ID NO: 4813 - DNA, 408 bp, Homo sapiens
  misc_feature (1)...(408): n = A,T,C or G
ccccttcctgaccttcagggatcggccaccatgtcccaccggaagttttccgcccctcggcacggacacctgggcttcctgccccataagaggagccaccggcaccggggcaaggtgaagacgtggccgcgggatgaccccagccagcccgtgcacctcacggacttcctgggctacaaggcgggcatgacccacaccctgcgggaggtgcaccggccggggctcaaaatttccaaacgggaggaggtggaggcggtgacaattgtaaaaacgccgcccctattggtggtgggcgtggtgggctacgtggccacccctcgaggtctccggagcttcaagaccatctttgcagaacacctcagggatgagtgtcggcgccgattctacaaggactggcgcaagagcaan

SEQ ID NO: 4814 - DNA, 397 bp, Homo sapiens
gcgcgggcttctcaggcgccacgtgggattcggctccgggtgctcttgtgagctgctgctcctgcgggtggtgagattacctgggtctagagtgcggagctgctccgtggccacgaggacgtcaccatgcccaaagcaccaaagggaaaaagtgcaggacgggaaaaaaaagtcatccatccatatagtagaaaagcagctcaaattacgagagaggcccacaaacaagaaaaaaaggaaaaattgaagaatgaaaaggccttgcgtctcaaccttgttggtgaaaaactgcaatggtttcaaaatcatcttgatccccaaaaaaagagatattcaaagaaagatgcttgtgaactaattgaaagagattccagacattctaaatgcaagtaatctg

SEQ ID NO: 4815 - DNA, 424 bp, Homo sapiens
  misc_feature (1)...(424): n = A,T,C or G
gcaccgcccaccaagaaattgatgatgtggaaagagacttgaggagtagaaaaactgttttctttacctgctcagcctttgtggaataacagactactgaagctctttacacgctgtcttacaccgcttgtaccagaagaccttataaaaaggaggaaaggaggagaggcagataatttggatgaattcctcaaagaatttgaaaatccagaggttcctagagaggaccagcaacagcagcatcagcagcgtgatgttatcgatgagcccattattgaagagccaagccgcctccaggagtcagtgatggaggccagcagaacaaacatagatgagtcagctatgcctccaccaccacctcagggagttaagcgaaaagctggacaaattgacccagagcctgtgatgcctcctcagcaggtan

SEQ ID NO: 4816 - DNA, 412 bp, Homo sapiens
agtgatccagcccttattagggatgtgttttgtgcaatgatgatatgctcctggttttaagtttggcaaagcttatgtatcttttaatagatgtgggagcatgatctcgaaaggatccttttcccttctcttattctcctacccaattggattctatcctgcaaaaaaagagagacctgtcattagaagcaaccaggttctcctgatacaagagaagaaatgtgtgatgacaatatgggtttgctgtatctgctcccatagctttgccataggaaaaaaaaaagtggaaagtttcttttaagatggaattcataaaagggaaaatacggaggaaaaaaggtctcactccaacttgtgaatcagtttaggagttcagatattaatagtaacaatacaggaaaaaggggaactt

SEQ ID NO: 4817 - DNA, 397 bp, Homo sapiens
  misc_feature (1)...(397): n = A,T,C or G
cccacgcgtncgggaatcaagagcagccaaaacttcactgaaaaataaaacaaagtcagagaagtcacagcttccagtttcaatatttactacaaagctatagtatcgggggaaattcacccctgatatttcacgtaggttcttttctattttccctaagtgctggccggtctgagaaataaagggaaagagtacaaaagacagaaattttaaagctgggtgtccaggggagacatcacaaattggcagagttcgtgatgcctcccaagccgcaaaaccagcaagtttttattagtgattttcaaaaggggagggagtgtataaatagggtgagggtcacagagatcacatgtgtcacaaggtaattaaatatcacaaggcaagtggaggcagggtn

SEQ ID NO: 4818 - DNA, 391 bp, Homo sapiens
aaagcagccgagcggccatggagctgtgcgggctggggctgccccggccgcccatgctgctggcgctgctgttggcgacactgctggcggcgatgttggcgctgctgactcaggtggcgctggtggtgcaggtggcggaggcggctcgggccccgagcgtctcggccaagccggggccggcgctgtggcccctgccgctctcggtgaagatgaccccgaacctgctgcatctcgccccggagaacttctacatcagccacagccccaattccacggcgggcccctcctgcaccctgctggaggaagcgtttcgacgatatcatggctatatttttggtttctacaagtggcatcatgaacctgctgaattccaggctagaacccaggttca

SEQ ID NO: 4819 - DNA, 419 bp, Homo sapiens
tatacatccagattctgaaataattttcctactgatgttcagctcacactatctgtacctttttagaagagaaaagaatcttgaattgtatatatttattttgctttacagaaaaaaatggtttcgtaaataatttgcctattttggttaacatagcacatggagataatcatctgaaagttagggcactgccactgctgaatcagagcatgcccaatatttgaggtggctctgatttcctggcagctgaactcgggtagtccagtggcctagctggtaccacatctattcccatccagagacattctctggcaagtgttctcagctgaaaagtggttggggatgattcttaccttggtaattaaatgaagctacacatttgggtaatctagcaaatgaagtattttttccctcttggc

SEQ ID NO: 4820 - DNA, 497 bp, Homo sapiens
  misc_feature (1)...(497): n = A,T,C or G
taaggggccccgncgaanttttgacgntccttccgagncgccccacgcgtccgaaacaaccatatggtgttgtatattataaactggtgtcattctactattgatttatgtacaacattttcattttttatgcttcttgaggtggtaatgagaaaaaagttttttaaaaaagtgtgccttgctgtatttcttataccatttattaaaaagctgctttcacggtaaaattatgttggtttgaaaggaggaaatagcaaggctaagatgtgtgaataatttctgtatatatgtataaccaagtacaaacattgatgtataatgacagtataaaatgctttcatgtttgtgatgtctagtgatgtggaaaatataagccttaaatccattagattgcatggtaattaaaattggcataataaacacagattattgggggaaaagggaaaatagtgatctcttctactattgtctttaccaaattgttgcttctgttctga

SEQ ID NO: 4821 - DNA, 486 bp, Homo sapiens
  misc_feature (1)...(486): n = A,T,C or G
cagaaaatatcatatgataagaagaaacaagaagaattgatgcagcaatatcttaaagaacaagaatcatatgataatagattgcttatgggagatgaacgtgtaaagaatggccttaatttcatgtatgaagccccaccaggagctaaaaaagaaaacaaagagaaagaagaaacagaaggagagaccgaatacaaatttgaatggcagaaaggagccccacgagaaaaatatgccaaagatgacatgaacatcagagatcagccctttggtattcaggttcgaaatgtgaggtgcattaaatgtcacaaatggggtcatgtcaacacagatcgagaatgtcctttgtttggtctttctggaatcaatgcaagttcggttcccactgatggctcagggccatcgatgcacccctcggagctaatagcggagatgagaaacagtgggtttgcactgaaacgaaatgtactggggagaaacttgacn

SEQ ID NO: 4822 - DNA, 476 bp, Homo sapiens
  misc_feature (1)...(476): n = A,T,C or G
ggantgcnnttttgacgccctgtttgaggccgtaattcccgcncgacccacgcgtgcgcggagttgttctgcgccggtgttcccacgtgcggcctgaacctgagcgcataatgttatgaggagatgggagcactaatgattcgcggtatcaggaatttcaacctatagaaccgagcggaacgggaaatcagcaagatgaagccctctgtcgctcccagacacccctctaccaacagcctcctgcgagagcagattaatctctatccaaaagttaaaggagagattgctcgtaaagatgaaaagctgctgtcgtttctaaaagatgtgtatgttgattccaaagatcctgtgtcttccttgcaggtaaaagctgctgaaacatgtcaagagccgaaggaattcatattgccgaaagaccatcattttgatatgataaatattaagagcattcccaaaggctaaatttccattggtgn

SEQ ID NO: 4823 - DNA, 429 bp, Homo sapiens
  misc_feature (1)...(429): n = A,T,C or G
acgatctcctgattctcttggaactcctacagataagcatcctggcagaggcccaggctcccaaaccgacaaagtgaagagagaccagagaggccaagcatattgactggtgctgttcatggcctgctcttttccactcaccacttgttttgctgcttgtcacgaggagagttgttcctgtatgtggctgctctcagatctttccaagcaagccagtcatttgaagaggttttcttttcatgctggagggcaggctaagatcaatgagtggaagagagaaaggctgttttagctcaagttaaaggaacaccttctagccatcaaagccgtccaacagaggcaagggccaccacacatgagagagcgctctgtccttaaagggaattctctgttgagtgggaggtgaacaccctggttcttccaactcan

SEQ ID NO: 4824 - DNA, 409 bp, Homo sapiens
  misc_feature (1)...(409): n = A,T,C or G
tacagagcagcatttttgtaacaaagagactcgctggagctatttggtgcttgaatgtgaccatcctttttacttttgctaagccttatttaaattttgtataccgtggaatatgtagaatttgtcaaatcattttagtgctgaaggtttttgatttcttgtttttgtttctgttgttgcagtttctttggtggcttgttttgtattgcaagatggcacttgctgatataaatactaaggcactaagagaaaatacagataagtatttataagttgcttgggaaccatagcagaattttttgtttggttttgtaagagaaaaaaaattaccaataaataactgatctagcacccaaactctcttgggggatgtcttattatcttcacgctatanaattgttcatctaan

SEQ ID NO: 4825 - DNA, 398 bp, Homo sapiens
cggacgcgtgggctgccaactgccttttacccacaacccctttgcctgaatgcagactgcgaatgtgcgttatggaattgaaaagcattgtaactgtcctcccttctcctcttggctctcctgcctgtagcccttggcatgtcctatgcctcgggcctttggaaaacccctttctataactttcctggggacaacagaggctttctggaggtagctgagaactggcccttgaccccagctaactcctgcactgcgttttcctgcacttcacagaggacctttgtcctgtttatatttccttcacctgggctgctagagagatgaaaaaacccaacatccccgaacaaatatctaatcctgtatgtgaaactgaggttttaatttgacttaatttggtt

SEQ ID NO: 4826 - DNA, 426 bp, Homo sapiens
  misc_feature (1)...(426): n = A,T,C or G
gcgcccacgcgtgcggctacattactcccatggacacccctgatgagcctcaaaaaaagctctctgagtcctcccgatcctgctcttgtatccattccatggacacaaagtcctcacggatgtctttcttaatcaaccccctctcctcccctccgacctgcagcaacaaccccaaaatccacaagcgctctgtctcggtgacgtccattacctcgactgtgctgcctcctgtttacaaccaacagaatgaagacacctgcataatccgcatcagggtggaagacaataacggcaacatgtacaagagcatcatgttgacgagccaggataaaacccccgctgtgatccacagagccatgctgaagcacaatctggactcagaccccgccgaggagtaacgactggtgcacgtcatctcggaggacn

SEQ ID NO: 4827 - DNA, 399 bp, Homo sapiens
ggaaccattccgtaagtcccacacctcccgaagtgtacgccacttcctggatctcttcatggaaactcagatgtttgcaggattcatccaggaccgagagcttcggaaaagtggagttaaaggtttgtttgagatccgggccatccagtatttggaaacaattcctgagtcggagcccagtgggatgaatagaattttgcggagtcttggttagttgctgtgttttcctgttagataaatgtggctgaagaccaggcgcggtggctcatgcctgtaattccagcactttgcgaggtcaagtaaggaggtttgcttgaggccaggagtttgagaccagcgtgggcaacatagtgagaccccatccctacacaaaattttaaaattagctgggcatggttg

SEQ ID NO: 4828 - DNA, 424 bp, Homo sapiens
atcatgagaatgaactaatacagtctgctgttattgtgatagtgagttctcacgagatctaatggttttataaggggcttttcccccttttgctcagtacttctccttgatgacaccatgtgaagaaggacatgtttgcttccccttccgccatgattgtaagtttcctgaggcctccccagccctgcggaactatgagtcaattaagcctctttcctttataagtgaccccatctcgggtttgtctttgttagcatcatgagaatgaactaatacagtctgctaaaggttaaaaaaaaaataaaaaaattaaaaaagcaactgatttcttaaagtgaagaggaaagtaaagaaaatttatctcatactaagtgactttacttggccttttttttcaaatcactatgatagagactaaaattgg

SEQ ID NO: 4829 - DNA, 400 bp, Homo sapiens
  misc_feature (1)...(400): n = A,T,C or G
cggacgcgtgggcggacgcgtgggaaacatctccaaacctctacacctgtgttgacttttttaaaagtcagggagattgtatggtttagttaaggttgcaggttcttgagccagactgccagattttgaatcttagctctgttgattactagctctatgacctgggcaagttatttgacctttctatgcctcagttttctcatatataaagtggcgataatagtaatcttttacatcatgaggtcattgagataaataaattaatttaaaatgtataggccaggcacagtggctcacacctgtaatcctagcactttgggagcccaaggtgggtggatgggttgagctcggaagttccagaccagcctgggtagcatagcaagactccaattctacaaan

SEQ ID NO: 4830 - DNA, 452 bp, Homo sapiens
aagagccacagtacagagcttcaagttatttaaaatactaagtcatcttacgtttccattttattaacgggatgttgcaatcgtttgtaaactaataaacttataaagtgattggcacaaagactccttgagcaaaagctgtgcagttaagtacaaaaagatacttaatttggagactcttacagtaatttttgccatgtcaaaacaatggcttttacattgaaagattaatagaaactctacatatgttaatttttttatagaacctgactcaaatcaaggtactctccattttattgccttacctgaatcagtcctttttggttggtaatagatttttttatacacccacgtttgatttaaaagtaaattctagttcttaagcacttttaacaagaaatccagaagcacatttttctgcacaaacaagttacaaagttcaaaagtgtttc

SEQ ID NO: 4831 - DNA, 466 bp, Homo sapiens
  misc_feature (1)...(466): n = A,T,C or G
agctaacagtcttagatctacttttaaaacggatggccttcttaagaataaagcaaaaggtgattttctacataatttttgctttccaaaagtgatgatatgctctcctacagcaacatatgagaagaaaaaaggcttatctagattcgaaaattaacagcaattatagtaatatatcccctccttctaaatagtaaaaagctctgattgtacaagaattacctgtgctagtcaagttgttgtttttccttgaacaactttggaaaaatggatttgacagtacataatcagttctactaaccaaagcttgtatttggaaatttactttttgtacaaattgaattatataatgcttaaaatactttgtcactttataagcaaaatgcatagtacttaattggtttatactggaaagtatatgttaaatgcttttatcactttgagaataaaaagttactaatgcaan

SEQ ID NO: 4832 - DNA, 418 bp, Homo sapiens
cccacgcgtccggtggcctgtaatcccagcactttgggaggccaaggcgggtggatcacctgatgtcaggcatttgagaccagcctgaccaacatagtgaaatcccatctctactaaaatacaaaaaaaattagccggtgtggtggtgcttgcctgtaatcccagctattccagaggctgaggcaggagaatctcttgaacctgggaggcagaggttgcagtgagccaagatcgtaccattgtgctccagcctgggcaataagagtgaaactccatctcaaaaaaaaaaaaaaaagggggggccgttttaaagaatccttgggggggccaaattttacgcgggcttgcaaggaaatagttttttccttatagggaggcgtattataacctacctgggaatttttgagaagaacctttt

SEQ ID NO: 4833 - DNA, 452 bp, Homo sapiens
aaaaaacaaaaaaaatgggcgccctttttatagtggcctgggtggtgcccgcgtttctaggcggtccggaccttgtactgttttacttaaccaggggctcattaaagccgagccggaatgttttgacagggacccactgttgggggggggaacactgtgtgcaaaccgcctggaaaaagttaaaagcgtaagggcttacctgaaattttgcagggactatggggccaaaccaggtgatatgcttgggggcaaaggaagctgaggaggaaaccttgtttacttggagaagacctgtgactggcttccgaaaccgaacatgtctgcttcatgcaaggagatagtggactcctacctccctgtcatcctggacatcattaaaggagaaatgagccgtcctggggaggggtgctctgctctcaacctctgcgagtctctccagaagcacctagcag

SEQ ID NO: 4834 - DNA, 476 bp, Homo sapiens
  misc_feature (1)...(476): n = A,T,C or G
atggctgcccgtggtgtcatcgctccagttggcgagagtttgcgctacgctgagtacttgcagccctcggtcaaacggtcagacgccgacgtcgaccagcagagactggtaagaagtttgatagctgtaggactgggtgttgcagctcttgcatttgcaggtcgctacgcatttcggatctggaaacctctagaacaagttatcacagaaactgcaaagaagatttcaactcctagcttttcatcctactataaaggaggatttgaacagaaaatgagtaggcgagaagctggtcttattttaggtgtaagcccatctgctggcaaggctaagattataacagctcataggagagtcatgattttgaatcacccagataaaggtggatctccttacgtagcagccaaaataaatgaagcanaagacttgctagaaacaaccaccaaacattgatgcttaaggaccacanctccggg

SEQ ID NO: 4835 - DNA, 457 bp, Homo sapiens
agaaaccccatctctactaaaaatacacaaaattatccaggtgtggtggcaggcgcctgtagttccagctacttgggaggctgaggcaggaatctcctgaatcctggaggcggaggttgcagtgagccgagattatgccattgcactccagcctgggcaacaggagcgaaactccgttgcaaaaaaaaaaaaaaaaaaaaaaaaatttttttcccccctttttggaaggggagggacttatttctgcagtttattttggcggggttggggttagaacccaaccttttataaggggtaaacttttaaaccaaaaatccgggcttgggaatttttggtttggttttggaaaacatttcaaaagggaaatgtcccctgttaaaggggggcccaaaaaaatttggcaggggttttttttttggccgggggaaatctttcttttaagaaaaaaaacaccccc

SEQ ID NO: 4836 - DNA, 423 bp, Homo sapiens
gccaagatggctgcgcggtgctccacacgctggttgctggtggttgtggggaccccgcggctgccggctatatcgggtagaggggcccggccgcccagggagggcgtggtgggggcatggctgagccgcaagctgagcgtccccgcctttgcgacttccctgacctcttgcggcccccgagcgctgctgacattgagacctggtgtcagcctcacaggaacaaaacattaccctttcatttgtactgcctccttccacacgagtgcccctttggccaaagaagattattatcagatattaggagtgcctcgaaatgccagccagaaagagatcaagaaagcctattatcagcttgccaagaagtatcaccctgacacaaataaggatgatcccaaagccaaggagaagttctcccagctggca

SEQ ID NO: 4837 - DNA, 413 bp, Homo sapiens
  misc_feature (1)...(413): n = A,T,C or G
ctagttctagatcgcgagcggcctccatgactttttcaataaaaaaaaaaaaaaaaaaaaaaaaaaagggggggggcctttaaaaaaaaccccgggggggcccaaatttaaccggggggggaaaaaaaaaattttttcttttaaggggggggaaaaaaaaacccccgggggatttttggaaaaaaacccttttttgggggggggaaaaatggggcaaaacccccccaaaaaaaaaaaaccttttggggaaaaaaaaaatttttaaggggaaaggggggaaaaaaaacccaaatttcctgggggtaaaaaaatgggncncnnnccgcaagaaaaaaagcccccagggacgacccccgtccccccgaaaattaagacttacaacccaaggcggtttacaaaacctgggcagatgg

SEQ ID NO: 4838 - DNA, 427 bp, Homo sapiens
  misc_feature (1)...(427): n = A,T,C or G
cacaaacacacacacatatattcagctttgaatttctatatgcagaatatccttcttgcagattatccatgtgctctgttaggccatttccctccccattattcagccagtcctttggtctccttttcctgcacagngagcttttctatagttgtcttcaccttctgtcccccactttatgcaagactggtgattgctgtccctactcctcatgtgttcgaggccagctgtgggttcggaagtctatagctaggaggggagggactttatgaactgatggcagtgaaacctgtagatggtcttctctggtgttgccaaagagggcgagcgtagcctgtttttctagtagatgactgataccagctcactgtggtttaatgcaagaacaccattcgtagcacaaaactgcttcaggtttggtattggg

SEQ ID NO: 4839 - DNA, 478 bp, Homo sapiens
  misc_feature (1)...(478): n = A,T,C or G
nattaccgtnctattgagggtcatcagnacccgcgncgacccacgcgtccggcccgagtgcactgaagatggcggctgctgtaagacgtgttgctccgagcgtcggctgcccgacatgtgagtgccattccttggggcatttctgccactgcagccctcaggcctgctgcatgtggaagaacgagcttgacaaatttattgtgttctgggtccagtcaagcaaaattattcagcaccagttcctcatgccatgcacctgctgtcacccagcatgcaccctattttaagggtacagccgttgtcaatggagagatcaaagacctaagccttgatgactttaaggggaaatatttggggcttttcttctatcctttggatttcacctttgtgtgtcctacagaaattgttgcttttagtgacaaagctaacgaatttcacgatgtgaactgtgaagttgtcgcagtctcagtggattccn

SEQ ID NO: 4840 - DNA, 517 bp, Homo sapiens
tggatggtaagaaatttagagcgcgctgtaccggctgatattcctggtcgacccacgcgtccgctttcatttccggattggcgcgtgtgcaattagcaatgcagtgtatatacaagaagccatgctgttaacagattatctcaagtaatttggtgtcatttacaaaaggaagaaattcctgccatcagaagggacagaaggagatggaatgatcaaatcacagagaaacactaaaattactaaatctacaacagctcgccttatttttcttggacccaaactgtcagggtataaacactatttgtttcttttttaaaacatcgatagttttgctgtaaataataacactgtataaattctaacagaaaaatatgaatacaatgttgataatgcactgcctcttataacacaaacagaatattgcaaatgcatttaacaaataggggtctcaagtgacttcaccctataagaggagggagggattctgggtgagggagactcttcactgattcttgta

SEQ ID NO: 4841 - DNA, 416 bp, Homo sapiens
agaaaacaggtcttctgctggagactccatttctggcagcagcctggagccttcatccctaattcaacaccaggagagcttctcccaaactccccgttcctgcgtagtccgctttctcttgctgccacattctaaaggcttgatattttccaaatggatcctgttgggaaagaataaaattagcttgaccaacctggctaagatagaggggctctgggagactttgaagaccattcctgtttgcagggaatccccacttgaaggaagaagtctaaaagtgaagtaggggtgacttgaactaaattgcatgcttcctcctttgctcttgggaagaccagctttgcagtgacagcttgagtgggttctctgcagccctcagattatttttcctctggctccttggatgtagacagtca

SEQ ID NO: 4842 - DNA, 421 bp, Homo sapiens
tttcccagtctcccaagtaccctgcaacactccacctgtcagtggatggatgcagggggttgtctccatggatgccagaggctcagtccaagtctccactgttctgagatggtcattggtagacctggatgttacccagaaccacagccatctccagcccagggacctgaggggatctgtagaagccacagatccctcgaatattagagaaaagactcacagagcagccagaaaaaatggtgggggtggggtgggggcctagggtctgtgttctgttcagtaaaagtcacagtaaatccttatgccatccttccttcaaaactgaaaagattcaggccaggcacagtggctcacgcctgtaattccagtactttgggaggctgaggtggatggatcaagtcaggagttcaagaccagtctg

SEQ ID NO: 4843 - DNA, 463 bp, Homo sapiens
tttgttctcatgctattcctttgaggacagtagagaaacataagagagttacaactgttattccatttggtggctcaactgacatgttaaccaaactttcaacagctgaactcaactgcatttttgtgagcccagaaaatcagtagttttgataatttaaagttggagaaatgaaggacgttcattgtttcctcccattcttatgctttgggtgatgctgttaaataaatgaatgtgtttgtgcaatggggagagaccactgttctctggagtggatctagaggttaaaaagtcaagctattttgaaccaactacttagagtggcacattctttaggggaggtgagcagggatctattgaattatcatattgctggttaatcatgattaagaatctatagaaccccgaccgggcgcggtgctcacgcatgtaattgcagcacctttgggaggttgaggcgggg

SEQ ID NO: 4844 - DNA, 415 bp, Homo sapiens
  misc_feature (1)...(415): n = A,T,C or G
gcggcgctaggctgaccctcctgctggtgacggaagtaccgcctcctcccgtctgacgcccctcaggggaccctgcatcgctccagccgccgcggccatgtctgggccaggcaacaaacgcgccgccggtgacgggggctcatggcccccggaaaagaagctgagtcgtgaggagaacaccaccacgactcttatcgagcccattcgtcttggaggcatctcttccacggaggagatggacctgaaggtactacagttcaagaacaagaaactggcagagcggctggaacaacggcaggcttgtgaagatgaactccgagaacgaattgagaagttggagaagcggcaggccacagatgatgccccactcctcattcgcaatcgctactgggcccaactcgatgaaactggggan

SEQ ID NO: 4845 - DNA, 439 bp, Homo sapiens
  misc_feature (1)...(439): n = A,T,C or G
attagaatcttagctttgggtgctaatggtggagttaaagactttttctctgaccaaaaaaaaaaaaaaggggggcccttttaaaaaaaccctgggggggcccaaggttacccggggttccaaatatttggtttttttccttaggggaagggtattaaaaccctaggtggaatttttggaaagaaaccttttttttgggggggtcaaaaatgggccaccccccccaactaaatttaaagccttaagggaaaaaaaaaatttttaaggggtttagggggaaaaacacccccctttcccttttttttaaaaaatggggnccnnncccccgagccaactttaaaccaaagtggttctccaagggggcttcccccctcctttttttccccacaaagaaaaaataaaaaattttacgctttttttatttatccaggccggaagg

SEQ ID NO: 4846 - DNA, 390 bp, Homo sapiens
gatccttcacagatgaaattaatgctttggagtggaacggggagatcatgaagtaaaaagcaggcatagctattaaattctgtaaccttggcaccgtcaccagtggctgtttaataaatatcctaaagtaattcatgttgtaagtgcatcccctccaaactctcaatggcttaatttggagacgtgcttgacacactgaagcaaaccagagtcacggagtccttagaaatactgttatcagggaaagaaaatgccagcagcaggtttttaaacaatgaaggctattttaccatttgcctagaagttattctttaaaatagtctctttctttcactcagaacatggatggattctgtaatctgtacaaagaagaaacagtaagccctgtgt

SEQ ID NO: 4847 - DNA, 478 bp, Homo sapiens
  misc_feature (1)...(478): n = A,T,C or G
gggcagacncaattgacngcctatttgacggccctcaatcccggcncgacccacgcgtccggcgctctgccattcaactcggaaactataagtaattctcaagaaagccctcatttttataacctggcaaaatcttgttaatgtcattgctaaaaaataaataaaagctagatactggaaacctaactgcaatgtggatgttttacccacatgacttattatgcataaagccaaatttccagtttaagtaattgcctacaataaaaagaaattttgcctgccattttcagaatcatcttttgaagctttctgttgatgttaactgagctactagagatattcttatttcactaaatgtaaaatttggagtaaatatatatgtcaatatttagtaaagcttttcttttttaatttccaggaaaaaataaaaagagtatgagtcttctgtaattcattgagcagttagctcatttgagaa

SEQ ID NO: 4848 - DNA, 458 bp, Homo sapiens
acgaaagtggctttaacatatctgaacacacaatagctaagactctaaactgggattagataccccactatgcttagccctaaacctcaacagttaaatcaacaaaactgctcgccagaacactacgagccacagcttaaaactcaaaggacctggcggtgcttcataaaaaaaaaaaaaaaaaaaaaaaaaaaaaaaaaaaaaaaaaaaaagggggggggccttttaaaaaaaaccttggggggccccaaattatcggggggggaagaattatatttttttctttttgaggggggcgaaaaaaaaccccggtgggtgtttttggaaaaacccttttttttgggggggggggtaaggggccccctcccctccaaaaagtaaacgggcttggggaaaaaaaaaaatttttgaggggtatgggggaaaaccccccgcccctcctctccgggtgaaaagtg

SEQ ID NO: 4849 - DNA, 418 bp, Homo sapiens
taattgtgatcattatgaatcccttcagtcacattagggggaaagtagttggctataagtacgtcattcttagtccagtcagtcttaaaaacatcttgggttacccactctgtccactcccataggctacagaaaaagtcacaagcgcatggtttccaaccatatgtgttttctgcagttatttctcttgttctggccaaacaaccctaaaaatccttaccattccacaaagttggaccatcacttgtgcacccactttgactatgagtataccaccacattgcatttctgtttgcaccatgtcttccaggagactagactactgttgtccagggtcaatttgagtgtaaagaaaatgtagacaaggaattgcccaattttaaattctgactttgctgacttaatttaaatgctcgat

SEQ ID NO: 4850 - DNA, 431 bp, Homo sapiens
  misc_feature (1)...(431): n = A,T,C or G
gaactgaaagaccagaaaccagcctgccctagtcattgaaagttagggcccaaccagcctctccccaagaagcagggggtagggaggaggtcccagggaagaacctggttgccaaagtctcggccagttggagaagagatgggtctcccgaggatacccaagcccaagctctacactgtcccaagggtgtggtgttgcgggaagtcagggaccccaaacggagggaccggctgaagccatggcagaacgtggattgtgaagacttcatggacatttattagttccccaaattaatacttttataatttcctatacctgtctttactgcaatcttggaacataaaattgtgaagatttcatggacacttaccacttccccaatcaatacccttgtgatttcctatgcctggctttactttactttcttaatn

SEQ ID NO: 4851 - DNA, 461 bp, Homo sapiens
  misc_feature (1)...(461): n = A,T,C or G
tgactctcgggtaacccacccgnccgagagcagcccctcaggagctgtccgggagagaagggttctgttggctgctgagcggagagcaaggcccgtgttctccaggcccttggcacagcagtggagcccccgcccctgccttgtgttgtcctcttaggctctggtcctggggtttggaggagggggaccctgggagttggtggcctgtcccagcctgagctggcaagattccgaatgccaggccccccaagtgtgcaacagggcacagggtgacctcatgtgggcaggtgggtgctgttctgtacacacctggggccgccgctgggagagttctggaaggtggggtgaggggacccatggcaaactagggccttaggaaggatgtgaaggccctggctggccccccaggccaccctctgtgctgtggggcagcccagccattntgctgtctaccctgcaan

SEQ ID NO: 4852 - DNA, 463 bp, Homo sapiens
  misc_feature (1)...(463): n = A,T,C or G
cgacttctcgggtcgacccacgcgtccgcccacgcgtncgctcactcactcattccttcactcatccagccacctaaaaacatttactgaccatgtactacgtgccagctctagttttcagccttgggaggttttattctgacttcctctgattttggcatgtggagacactcctataaggagagttcaagcctgtgggagtagaaaaatctcattcccagagtcagaggagaagagacatgtaccttgaccatcgtccttcctctcaagctagccagagggtgggagcctaaggaagcgtggggtagcagatggagtaatggtcacgaggtccagacccactcccaaagctcagacttgccaggctccctttctcttcttccccaggtccttcctttaggtctgngtgttgcaccatctgcttggttggctggcagctgagagccctgctgtgggagagcga

SEQ ID NO: 4853 - DNA, 464 bp, Homo sapiens
  misc_feature (1)...(464): n = A,T,C or G
agcgctcaaaccacacgcaccgctgctcggggcttggagatttgcgcaggctgggctcccggacccggcggaccgacgcgcggaggatcgggatccggcgctgtggggctggggtgggcgggggaggctgcccccggtgcctttggcgcgacacccgcatgaggacgcgagtgaaatataccaaggtggaatttccaagggaaaagcttcggggtggttttggtccatttctccagcgaagaagttgacatggcgagcgactccccggctcgaagcctggatgaaatagatctctcggctctgagggaccccgcagggatctttgaattggtggaacttggtggaaatggaacatacgggcaagtttataaggtaagtacattgagtctgagagtggcttatgtacggtttcagttcatgaatgacanatngcagtgctgtctatactggctcataaatggctt

SEQ ID NO: 4854 - DNA, 523 bp, Homo sapiens
  misc_feature (1)...(523): n = A,T,C or G
ccccccccccccnangntnngnatagaacgccctgctgnacnatagaaggactttccggatcgacccacgcgtccgcccacgcgtccgagatgaagcagaaagagcgggagctgcgactgctcatgcttggcctggacaatgctggaaagacaaccatcctgaagaagttcaatggggaggacatcgacaccatctccccaacgctgggcttcaacatcaagaccctggagcaccgaggattcaagctgaacatctgggatgtgggtggccagaagtccctgcggtcctactggcggaactactttgagagcaccgatggcctcatctgggtagtggacagcgcagaccgccagcgcatgcaggactgccagcgggagctccagagcctgctggtggaggagcgcctggccggagcaaccctcctcatctttgctaataagcaggacctgcctggagcactgtcctctaacgccatccgcgaggccctggagctggactccatccgcagccaccactggtgca

SEQ ID NO: 4855 - DNA, 465 bp, Homo sapiens
  misc_feature (1)...(465): n = A,T,C or G
acgtcattaagtttagggncgcaccacccgtccgcacttcgaagtggcagcagccagagagggagttggtttggacgcgaggagccgggcgcttagaacagaggcttgcacaggtggagatgtggaagtctgtagtgggccatgatgtgtctgtttccgtggagacccagggtgatgattgggacacagatcctgactttgtgaatgacatctctgaaaaggagcaacgatggggagccaagaccatcgaggggtctggacgcacagaacacatcaacatccaccagctgaggaacaaagtatcagaggagcatgatgttctcaggaagaaagagatggagtcagggcccaaagcatcccatggctatggaggtcggtttggagtagaaagagaccgaatggacaagagtgcagtgggccatgagtatgttgccgaggtggagaagcactcttctcagacggatg

SEQ ID NO: 4856 - DNA, 530 bp, Homo sapiens
aaagaattaaattatccttcaagagtgcatacagcaatagtaaagtgtgataagcatttgagctgagagcaaaagaatttaagaaacaggcagaagaggacctcaaggaacagactgagaaggagcaggtagagagatgaaaggaaaaccaaggagagagcctgtcgtggcatgtgtctcaggagtgatggagagttcggggaggaaatttggtttattttctgaccctgattctttaagttccaaaatttcttcatgctaatcaattcccattcttttaatttttacccatcttcccccacaaaaagttatcgggtatgaaatattgcaagatatcaacagctactttaataaaaaaattcacaaaattatcaaacagcaagaatgcccttaattattattaggaaagatcagcatgtttgtaatcccaaatagttggtaggctgaggagggaagattgtttgaactcaagagtggagccctgcagtgagttgtgcttttgccactgcattgcagcctgggtgacagag

SEQ ID NO: 4857 - DNA, 480 bp, Homo sapiens
tgtgaaagctttgcttgggggattgcacctgaattgggagggcagtgagtggtgtatggacattgaatgaagacatgattaggaccatgtaaaagactgtcaggaaagcaaggcaatgactttcctgaattaacatggacatggagctgtcctccagtgttgtaagatattctggatcagacagtgatacatgaacatgccaaggtgagcctcatgcacattaatttcaattcccaaataactatcctcctgaatggtggtgtgaaatgttagactgctgctgctggacatctctcaccccaccaataacactgaaaatgctgaacatgctttttctttgtcctttcataaatctaagttaatttagagtcaggtgaacatctattggtgcctggagttttattacccagatagcttttcttcgaagttctggcaaatacttaatgaggaaaccactctaaccttacacaaattcttccc

SEQ ID NO: 4858 - DNA, 453 bp, Homo sapiens
ccagctgcgagtgcggcctcggctggtttcggcaccagaggaatgtttgctgggggattgaaggagatggaacaggaagaggtcctgatccacggtgtgtcctacaatgctatgtgccaaatcctacatttcatatacacctccgagctggagctcagcctgagcaatgtacaagagacactggtggctgcctgccagcttcagatcccagaaattatccatttctgctgtgatttcctcatgtcctgggtggacgaagagaacattctcgatgtctaccggctggcagagctgtttgacttgagccgcctgactgagcaactggacacctatatcctcaaaaactttgtggccttctctcggactgacaagtaccgccagcttccattggagaaggtctactccctcctcagcagcaatcgcctggaggtctcctgcgagaccgaggtatat

SEQ ID NO: 4859 - DNA, 467 bp, Homo sapiens
  misc_feature (1)...(467): n = A,T,C or G
tgcgtggtcgcaccctacccgggctgccttggaagtcgtccttttcgcccctccgcatcggcatgaagctcatcgtgggcatcggaggcatgaccaacggcggcaagaccacgctgaccaacagcctgctcagagccctgcccaactgctgcgtgatccatcaggatgacttcttcaagccccaagaccaaatagcagttggggaagacggcttcaaacagtgggacgtgctggagtctctggacatggaggccatgctggacaccgtgcaggcctggctgagcagcccgcagaagtttgcccgtgcccacggggtcagcgtccagccagaggcctcggacacccacattctccttctggaaggctttctgctctacagctacaagcccctggtggacttgtacagacgccggtacttccttgaccgtccgtatgaaaagtgcaagtggaggagaacgtccctgaan

SEQ ID NO: 4860 - DNA, 402 bp, Homo sapiens
attgaataattatttataaaaaatatgggggggccctttttagagaacccttggggggcccgaatatcccccgggggggggaggttttattttttgctttaaggggggggttataaaaccttgcttgggttttttgggaaggaacccttctttggggggggggaaaagagggacccccccccccccaaaattttggtgttctagggaaaaaaaaaatttttaaggggaaaggggggaaaaaaaactatcaaccccccctgaaaaaaaatagcgcggaaaaggtaatgcattcgctaagataaggtcactttatggtttcttatttattactctgcatcttaagtgtttgagctctgctcatttccatatagaacttataagtaaaatgcggatctgagacct

SEQ ID NO: 4861 - DNA, 499 bp, Homo sapiens
  misc_feature (1)...(499): n = A,T,C or G
atagacggcgtctgnacnatggangacctcccgggncgacccacgcgtccgattcagtgaactgggaattgtccactacttactttactatggcaactctacagctagattatgctccgttatctagaaaagctcaggagcagattgagaaagaagtcagtgaggccatgatgaagtccctaaaatactgcgatgtggattcagtgtctgctcgacagcccctttgtcagtatcgagctgcaaccatccatcacaggctggcctccatgtaccacagctgtctgaggaatcaggttggtgatgaacaccttangaaacaacaccgggtgctggcagatcttcattacagcaaggccgcaaagctgtttcagctgctgaaagatgctccctgcgaactgcttagagtacagctagagagagtagcatttgctgaatttcagatgaccagtcagaatagcaatgttggaaagttgaaaacactatctggggctctagatan

SEQ ID NO: 4862 - DNA, 451 bp, Homo sapiens
gcagaacaatcacttgaacccaggaggtggaggttgcagtgagccaagatcgtgccactgcactccatccagcctgggcaacacagcaagactccaactccaaaaaaagaaaagtcaagttggcattcgtttaatgatgctttagatgatgtggtttagctgaagcttgcttttctcaacatgactctgacactgattgctagggtaagggttcttttgagtatgttactcctacatgttattcctacccgtgttgcgcctcgtgataccacactttgctgcactactttatttgaactaaccttaattcataaggccccttggtctccatatggtgtgactgtatcatttttgtaataattataataataatgcaaacatttactgagtgcaggcaattgagcagacacttttaaatgctgttttctcatttaatacagcaaatctatga

SEQ ID NO: 4863 - DNA, 415 bp, Homo sapiens
ggatgcagagcaccataaagtgactaattctatacttttattagggagcctaatacaatttcaattcctaggcattaatgtagaattgctgaatcagaatctttaggagcagggcccaaaaatctgtattttttaatttcttggaagctttatatcattaaagaaacatattgctagattccatgtggtgttaacctggtaacataggctctagataaaagtttaacaacgtgttccacacatgatggttaattctatcctatggaaacatcctgtcctttaccttccaaaactgcgtaattacctgatgaggaagagaggtgctctgagtgcacacaccacctgggagacacattaagtagagcacttaccttctgagagtctttccttccagccttgggctgctgaagtgaag

SEQ ID NO: 4864 - DNA, 478 bp, Homo sapiens
  misc_feature (1)...(478): n = A,T,C or G
attgcatggtaattaaaattggcataataaacacagattattgggggaaaaggaaaattagtgatctcttctactatgttctttaccaaattgttgcatctggttctgaaaaagtatagcatgtagcagcttccaaacatattcatattgcttaagaggcttaacattacctaaactagagactagacgtaaagccttcagttttcaaaatctttctggtcactataaagatcttggaacagcaaatgattaaatgtcagttcccctaaaccaataaacatttatactagattttttatttccacttatcattaatgatttaatgttggatttcaggtaccttgtatgtcttaatttattttaaatatttattttgaatgagtttgatagaaagctagtaaaaaagtacagaaaatttgactattatttatagaattcaggtatatttatatgtgtaaaagaaatcgacaaagaatan

SEQ ID NO: 4865 - DNA, 494 bp, Homo sapiens
  misc_feature (1)...(494): n = A,T,C or G
gcggtannnnnnttttgaangtccgtacgcctcgaggcgcaagttccgagtcgacccacgcgtccgggcgtggagcggatgctttgacaagatggcggggagcggcgtccgccaagctacttctaccgccagcaccttcgtgaagcccattttcagtcgggacatgaacgaggccaaacggagggtgcgcgagctctaccgcgcctggtatcgggaggtgccgaacactgtgcaccaattccagctggacatcactgtgaaaatgggacgggataaagtccgagaaatgttgatgaagaatgcccatgtcacagaccccagggtggttgatcttctggtcattaagggaaagatcgaactggaagaaacaattaaagtatggaagcagcggacacatgttatgcggttcttccatgaaacagaagcgcccaggccaaaggatttcctatccaagttctatgttgggcaccatccatgaagtcattcagtggaaa

SEQ ID NO: 4866 - DNA, 429 bp, Homo sapiens
  misc_feature (1)...(429): n = A,T,C or G
aaattatcgncaattttctactaccttccaattgacagctctttttttcctctctgggttttcctatactttacagaaaaagacattgatctatactgccattccctctaatcctgccatactcagtcaaaaggaatgacttaagatgaagatgatcatctgctcgagtctaaaatatacattgtatataagaattggtgattagaaaagcaaaaaacctaaaacttaaatctaggagtctgtatactgtctccatgtctccatgcctcagatctcatctaaatctttgaacagcaccattcaaccaatctgaggccttgacttgcttgtaagatgattctcagagatcggctgagttaaaaaagatgacgacttgattaccaaagaaagtagggccaactttgacaaatctggctctgctgaccctgn

SEQ ID NO: 4867 - DNA, 484 bp, Homo sapiens
  misc_feature (1)...(484): n = A,T,C or G
agtggcncaaaatgataactganacgcgtgggcaaggagcnncngggnngacccacgcgtccgatggaaaccccaccccccataataccagccctctttatgatactctaaagcactcatcttctaacacatgctaaaatttactcatatataatttttttcacttgaatttgagctctacaatgttacctggtttgttttttttttttagtttggtcctctgatatttcccaatcatttaaaacagtgttgggtacataatagttgctcaatgaatattgggggaatgatttgagtaaacagcattttgatcaaaaaaaaatgcattcttagagttctttcatttcatgcggaattgcttatttaaaaggaatccatttagacgtcataccctttaaagtcggcagtttgaaatttggcaaacactttgaaagcagcctaaatgaagcggttagaatatgggggtagctttgcaattgtacta

SEQ ID NO: 4868 - DNA, 453 bp, Homo sapiens
atctaccttagagtcagttctcagtaaataattgttagagtgaaatgaatttaaagtaagatatcttaagttgttgtatcctaagtctcttcaaattacagaagaagaaatccaacctggttttgaagatcattctcttccactctactctgcactcttcttccttccctgactgtcccccaactccaaacaccttttataaagttccgtgatgctgcctcagaaaatattctagagacaaacagtatctccatcaggcatcccttaacttgtcagtctggattttcttcttaagtacattcccccaacactttcaaccaaatgtaattcagagtacgttccatctaaattattgatgcctagattctgagatgtaacattttgaattaaaaccagccacttaattacactgcttgatgcctgattatccaagacactgatttgtatttctgg

SEQ ID NO: 4869 - DNA, 478 bp, Homo sapiens
  misc_feature (1)...(478): n = A,T,C or G
gcacgcactggccccggcgcccacccgcacccctccccagagcactgacacggctcccgggacctcggcaggatggaagagaagctgaagaaaaccaagatcatctttgtggtgggtgggcctggctcagggaagggcacccagtgtgagaagatcgtgcagaagtatggctacacccacctctccaccggggacctcctgcggtccgaggtcagctcaggctcggccaggggcaagaagctgtcggaaatcatggagaaggggcagctggttccactggagacagtgttggacatgctccgggatgccatggtggccaaagtcaatacttccaaaggcttcctgattgatggctacccgcgggaggtgcagcaaggagaagagtttgagcgacggattggacaagccacactgctgctgtatgttgacgcangccctgagaccatgacccagcggctctttgaacgtggagagaccn

SEQ ID NO: 4870 - DNA, 416 bp, Homo sapiens
  misc_feature (1)...(416): n = A,T,C or G
aaatcatttggttttggcagtttgtgaaagagacatacaatgaagtaagaatgcgactattgcagttcgtcactggaacctgccgtttacctctaggaggatttgctgagctcatgggaagtaatgggcctcaaaagttttgcattgaaaaagttggcaaagacacttggttaccaagaagccatacatgttttaatcgcttggatctaccaccatataagagttatgaacaactaaaggaaaaacttctttttgcaatagaagagacagagggatttggacaagaatgaatgtggcttctttattttggaggagctcttgcatttcaataccccagccaagaaaaattgcacagatagtgtatataagcatgtcattctgtacagtgaaatttccgaacctctcaagtatgtttn

SEQ ID NO: 4871 - DNA, 558 bp, Homo sapiens
  misc_feature (1)...(558): n = A,T,C or G
gcgccttctctgctcacgtggtactgatacactgtactcagtgtctccacgttgtcttcaattcactaaaggtcaaanacgcgaggttttnnttttgatagcctgtcttatcgtaccgcacttcccggggcgacccacgcgtccgcacagacatgtgcaactaccacagtccattttagaatagctttatcatctcaaaaagatatcccatgccctttaactgtcaccccctattcctttaaggattccttgagtaaccattaatttactttccgtctctagatttccctattctggacatttcatgtgaatggaatattataatatgtcgccttttgtaataggcttctttcattcactttgcataatggtttcaaggatttattcatgttgtagcatgtgatagtacttcattcctttttatggctgaataatattctattgtatggttataccatgttttatttatccattcctcactcgatggacatttcacttctttctactggttggttatgaataatgctgctatgaacatttgtatacaagcctttgtgn

SEQ ID NO: 4872 - DNA, 414 bp, Homo sapiens
acgcagagaggactcaagactcccgctggccatggagtggcctgaaagagagcaagaacatgtggatctttgataggattgttaccaaatggtgtcagtatggaccaattgtgtgaccatgagaaggatgcttattttttttaaaaagaaaacacatctaaaagcccaggaactgatttttttaagaggaaaactaatgacagtgtataactgatgtttaaattgtgcatttagtactatttaaatgctttcttatactagtattttatattcttttgttggcgcttaaaactggagcttcagtgtctcttccctccctctaatagtaatggttcagtaagcactccttaactccttagtatttcatagaaaaatgactgcaacattaaagctaagaggaacacttcaacatat

SEQ ID NO: 4873 - DNA, 576 bp, Homo sapiens
  misc_feature (1)...(576): n = A,T,C or G
ngagtgattgatgnactgatgagcgctgcaananccngcncgacccacgcgtccggtccccgcgccagagacgcagccgcgctcccaccacccacacccaccgcgctctcgttcgtctcttctccgggagccagtccgcgccaccgccgccgcccaggccatcgccaccctccgcagccatgtccaccaggtccgtgtcctcgtcctcctaccgcaggatgttcggcggcccgggcaccgcgagccggccgagctccagccggagctacgtgactacgtccacccgcacctacagcctgggcagcgcgctgcgccccagcaccagccgcagcctctacgcctcgtccccgggcggcgtgtatgccacgcgctcctctgccgtgcgcctgcggagcagcgtgcccggggtgcggctcctgcaggactcggtggacttctcgctggccgacgccatcaacaccgagttcaagaacacccgcaccaacgagaaggtggagctgcaggagctgaatgaccgcttcgcaactacatcgacaggtgcgcttcctgagcagcagaatagatctgctgccgacn

SEQ ID NO: 4874 - DNA, 405 bp, Homo sapiens
caaactttcttccacaggttcgacccaagcctgtggcccagaataacattcctattggcccagcaccacctgccatgctcgcagctcctcagcttatccagaggcccgtcatgctgaccaagttcacccccacaacccttcccacatcccagaattccatccaccccgtccgtgtcgtcaatgggcagactgcaaccatagccaaaacgttccccatggcccagctcaccagcattgtgatagctactccagggaccagactcgctggacctcaaactgtacagcttagcaagccaagtcttgaaaaacagacagttaaatctcacacagaaacagatgagaaacaaacagagagccgcaccatcaccccacctgctgcacccaaaccaaaacgggaggagaacc

SEQ ID NO: 4875 - DNA, 414 bp, Homo sapiens
agcttctgggcattctatggagaccccaggagagcacagcagacccttagcagaacagaaaagcggaccgtattagtctttcctgtccacggccttgttttcagtgattcatgtgcccgattggccaaatctctgcagacgtgcccctgtccgaggccaggcttctgggattcatcgagcttgcttgtttccgggacctgctaattccgtgcccagcagctgttccccggagcaggccctgccctccacaccctcatgaggaatgccgagtctcattttctgagggccctggttgagggtggggtgtggggcgagggggacagggttgcttcctgccatagacttcctgccttggagggttatccttgttctcacctatcccttcccgagctgaagccacagagtaggagagaa

SEQ ID NO: 4876 - DNA, 406 bp, Homo sapiens
aacaccaaggagttccgagaccgctggggcggggaagactgggagctgctggacaggatactccaagcgggcctggacgtggagcgtctctccctcaggaatttcttccatcatttccattccaagcgaggcatgtggagccgtcgccagatgaagacgctgtagccggagggtgtccgcggggcccagcactccccgctctggactagcagtggctccccagggccctgctactgttcagggatggggagtggggtgacggctggaccccaagaggcctcgaagctgacggcccactccacctggagctgtcccctcacagaggcaggttccggggctcctgtctctgcctcctgggccttcagaagggaggactttgagagagaggccaggagggaccacttgg

SEQ ID NO: 4877 - DNA, 406 bp, Homo sapiens
caatgagtgaaaagcgggaatttcctactgtgcccttggttaaattaggcaactcttttacgacgggtcaggattatctaacaagatttgaaagcattccagatatgcttgaattggatcacctcacagcttcaggagatgtgacatttgtaaaaaatgtttcattaaagggaacggacatcatcattgcaaatcatggggacagaattgatatcccacctggagcagctttagagaacaagattgtgtctggaaaccttcgcatcttggaccactgaaatgaaaaatactgtggacacttaaatattgggctagtttcttacaacgaaatgttctctaggattctaaaataggccggtactttactatgttactgtaccctgcagtgatgatctttaaaatagag

SEQ ID NO: 4878 - DNA, 400 bp, Homo sapiens
cactaaccctaccagaagagaaaaaatcagtgcaagaactctggcaattcaaaaagctagagtgtcctcttacctcaaaattagcccactagctaccaagcaatggttcttaatcagtctaaaataattgcaacagacatagaatacagaacctcgatggcagggaagctcatgaacattaaggagaaagttgaaacccaatccaagtaatccagtaaagcaatctaagtaagtgctgaaagatgaaactgccattttaaaaaacagccacactgaatttctagagcagaaaaaattcagtataagaattttataatacaataagaaatattaacagaaggtaggccaagctaaggaaagaatctcagagctcaaagactggttcgttcaatcaactgag

SEQ ID NO: 4879 - DNA, 403 bp, Homo sapiens
  misc_feature (1)...(403): n = A,T,C or G
aaataaaagagtttgcagnggaatgatactctcactccgtgcttgtaaaattgagttctattcaagacggaactgctatgactggcctattcaaggcttcatatttttatacagactatttcacagaccatagatttattttaaaagggaaaatctcacacataattaagcagtggaaaatgtgctcaatgctatggtgcgtcaggccctctgtctaccaggtttctcccctttctgcagagctgtggaccctgtacgtaccaaacaggtgaacttggnccatctttccttcttcctttttttgcacatttgcatttatatcttcctgtactaaaagaaacaaattatttataattggggtgacaatataaaggaacaaaagatggggcaatagttgcttccn

SEQ ID NO: 4880 - DNA, 403 bp, Homo sapiens
tgtaaaggacactctttgaacttaagaaccctttttttcacaaatcctgactttcaggatgatgtcttttgaggactttaaaaaagaatcaactttggaggaatacttcacattcaaagctaaggaatgacctctctgagaccgcatgcatatgcccttcctacagaaataaatgcccttgtgttaaaaggtgagaaagtgcacgtcaatgtgacttacagagaataaaaagtaccttgtcttacggcttcaaaatattattcccctgactcgtctattagtagcttattttcacagcttccatttcctctaaatggctgtgaacttacttattactttatccttaaaaggaatcttggacttacgtaaaacttgcgttgaacttaacttcatggattgtagg

SEQ ID NO: 4881 - DNA, 447 bp, Homo sapiens
gcgcggtgacagcgcggggttggcggcgtgggacccagggggcgacagaggcagcagcagcccgaggcctgaggagaggagaccggcggcggcggcaatgctggagacccttcgcgagcggctgctgagcgtgcagcaggatttcacctccgggctgaagactttaagtgacaagtcaagagaagcaaaagtgaaaagcaaacccaggactgttccatttttgccaaagtactctgctggattagaattacttagcaggtatgaggatacatgggctgcacttcacagaagagccaaagactgtgcaagtgctggagagctggtggatagcgaggtggtcatgctttctgcgcactgggagaagaaaaagacaagccctgtggagctgcaagagcagctccagcagctcccagctttaatcgcagacttataatccatgacagcaaa

SEQ ID NO: 4882 - DNA, 500 bp, Homo sapiens
  misc_feature (1)...(500): n = A,T,C or G
aggggccggnntncagnaaactaatggctgcgcacngactgagatcctcggancgaccccgcgnncgggcagattagccctgttgcagaggcaatttgatgtggacattcttatctcgggacacacacacaaatttgaagcatttgagcatgaaaataaattctacattaatccaggttctgccactggggcatataatgccttggaaacaaacattattccatcatttgtgttgatggatatccaggcttctacagtggtcacctatgtgtatcagctaattggagatgatgtgaaagtagaacgaatcgaatacaaaaaaccttaaagccaggcctgtcttgatgatttttggttttttttcattgtcctgttgaaatcaagtaattaaacatttaagagccacaaaattgtatcacttttataatattttgcagtaaaatataataccatcttctctgttaatacataattgctccaagcttcctgtaaactataag

SEQ ID NO: 4883 - DNA, 437 bp, Homo sapiens
atcacctgagctcaccatagtctaatagaaaacaaccgaaaccaaatatttcatgcactgcttattacaattttactgggtctctattttaccctcctacaagcctcagagtacttcgagtctcccttcaccatttccgacggcatctacggctgaacattttttgtagccacaggcttccacggacttcacgtgattattggctcaactttcctcactatctgcttcatacgccaactaatatttcactttacatccaaacatcactttggcttcgaagccgccgcctgatactggcattttgtagatgtggcctgactatttctgtatgtctccatctattgatgagggtctcaaacttctccacgggcgtctgggtgacgggcattttattatttcaccaaaccctgaaactgcgggggcgctccatcgaagga

SEQ ID NO: 4884 - DNA, 386 bp, Homo sapiens
atccctctggttcagttgtaatggttagtggattacatcaactaaaaatgaattgttcaagagtcttcaacctgttctgcttatatggaaatattgagaaggtaaaatttatgaagaccattcctggtacagcactggtagaaatgggtgatgagtatgctgtagaaagagctgtcacacaccttaataatgtcaaattatttgggaaaagacttaatgtttgcgtgtctaaacaacattcagttgttccaagtcaaatatttgagctggaggatggtaccagcagctacaaagattttgcaatgagcaaaaataatcgctttacaagtgctggccaagcatctaagaatataatccagccaccctcctgtgttttgcattattat

SEQ ID NO: 4885 - DNA, 403 bp, Homo sapiens
cacccttttacaggcatagttcagatatgctagttccattccagatactgcagtaaagcaaatatcacaataaactgagtcacacagatgtgttggttcccagtgcatattaaaatcatatttacactgtactgtagtcttttaagtgtacaatagcactatggctctaaaaaacaatgtacagactaatttaaaatgctttattgcttaaaaatgctgacacagagacatgaagtgggcatatgctgctggaaaaatggcacaggcagacttgctggacacagttgccacaaaccttcaatacgtaaaaatttaaaaactacagtttctgtgaagcgcagtacagtgcagtgtggtaaaatgacatatgcctgtattttcctttgtaacttctgactagtac

SEQ ID NO: 4886 - DNA, 397 bp, Homo sapiens
cggacgcgtgggcggacgcgtgggcggacgcgggggttttttgagatggagtttccgtctgtcacccaggctggagtgcagtggcatgatctcggctcactgcagcctctgcctctcaggttcaggcaattctccttcctcagcctcccgagtagctgggattacagacatgtgccaccctgcccagcagatttttgtatttttagtagagacggggtttcgtcatgttggtcaggctggtctcaaacttctgacctcaggtgatctgcccacctgggcctcccaaagtgctgggattataggcgtgagccaccccgcccagcctcctcagttcttatatgtgcctagaggaatacatggattgcattttattcatttcatatccccagcaccttag

SEQ ID NO: 4887 - DNA, 403 bp, Homo sapiens
acttggtgttacgaaaggatctatcacaagctccgttctcctggccggcgggcgcactggtagcgcaggcttgtcacgcggccaccgcggccttgcacactcaccgcgaccacccgcacacagccgcttacctccaagagctggggcgcatgcgcaaagtggtcctcgaggccccagatgagaccaccctaaaggagctggccgagaccctgcaacagaagaacattgaccacatgctgtggcttgagcaaccagagaatatcgccacttgtattgctctccggccctaccccaaggaagaagtgggccagtatttgaagaagttccgattgttcaagtaactgctgctttgatgtgtttgaatacgcaggccacccattccaaagcatcatgtgttccttgg

SEQ ID NO: 4888 - DNA, 395 bp, Homo sapiens
  misc_feature (1)...(395): n = A,T,C or G
ctcgtacatttcacctgtggatgtctataacttcatcctcagtatgttcccaaatctgtgctggcattgaaaggacaaaacattatactagtgggtttttctactaattattttttgaagcattattttcccaacacaaaagagcttttttctcggtataatgaaaattgaaatcctatgtgtattcaatagtaaatagacaaattttattttttatttccacttgaagagttacatttcgtataaaagtttacaaataacggtttttattttgattttttcagtataaaaaaagttgccttgatggcatattatgatgtaatgctaattgcttgtaggatagtaaatggtcagtattgaaacctaatctctagctgccgtcttgtaaatatgan

SEQ ID NO: 4889 - DNA, 397 bp, Homo sapiens
cacacacatatccctattctcaactacaacacttacaaacatcattctgcccctatttcatctgttcctctcttttccttagaaacatcttttgcatctacgccataaaataagtttatattcacaatttaagttgaagatttccaaatgcccccggtcatcactgtccactggtactcctcggatggtcatttttcgtgtgcaggagactgtttgttctcagtccctcaagaactcatttaaaagtcatattgtaatgaaaatactttgactgtaaaaattatatcttgggaaattatacatgtattcactatcttgcttcaccagggaaatgttcatatttttctgaagctcctgttttcttgggtgaatataccaattcgatacctgttgctgt

SEQ ID NO: 4890 - DNA, 423 bp, Homo sapiens
  misc_feature (1)...(423): n = A,T,C or G
tcatccagagagacctggccaagactggctgtgtagacttgactatcactaatctgcttgagggggccgtagctttcatgcctgaagacatcaccaagggaactcagtccctacccacagcctctgcctccaagtttcccagctctggcccggtgacccctcagccaacagccctaacatttgccaagtcttcctgggcccggcaggagagcctgcaggagcgcaagcaagcactatatgaatacgtaagaaggagattcacagagagacgagcccaggaggctgactgagctcaaaggaacaggatggcacccacagccgcangacggagactgggggcagccctcacccaactcacaacaggctggatgggtgggtggtaaaaagggaaggatgaggctcccccaatgtcacattaaattc

SEQ ID NO: 4891 - DNA, 417 bp, Homo sapiens
caaaagcatctccaaggccttggtggagcggggtggtgtggtcaccagcaacccacttggcttctgaatactcccggccagggcctgtcccagttatgtgccttccctcaagccaaagccgaagcccctttccttaaggccctggtttgtcccgaaggggcctagtgttcccagcactgtgcctgctctcaagagcacttactgcctcgcaaataataaaaatttctagccagtcaaaaaaaaaaaaaaaaagggggggccgtttaaaagaacccttgggggggccaaacttaaccggggcaggcaaggtaatatttttctccttatggggggccttataaaaacctacctgggaattttggaaaagaaactttatttttggggggggacatattgggacaacctccctacaaaaat

SEQ ID NO: 4892 - DNA, 408 bp, Homo sapiens
agtttttcccttaagttttcttctaggagttttgtgatttcaggtcttaaatttaagtctttaaatatttcacgttaatgtttgttatggtataagataagggtccagtttcattctcttgcatgtggagatccagtttttccagcaccgtttattggagggactatcctttccccattgtgtattctccttggtgcccttgtcaaagagagatctagtagtttctaagcagcatcatgaagctgtatctttactgatttcatgttacaacaaaatttttttaagcacaaacccaggggtgtgacataccctgaaactggtgatttgaaaaacagtactgttagagaaagggatctatggagatcattgttagtagtagtaattggggcattggatcatgatacccca

SEQ ID NO: 4893 - DNA, 387 bp, Homo sapiens
  misc_feature (1)...(387): n = A,T,C or G
cccacgcgtgcgcttttgttattcataacaagcttcttaatattgttgatgccaattgttccctacttgatctctagattcaacgaaatctcaatcacaatcccagcatgctatttagagattctgaagtttacatggaaagaaaaagacccagtgtagccaacacaatactaaagaatagaaaagatggaatagtcacactactatatttcaaaacttactatgaagctatagtaatcaaaacagcatggcgttggcaaaagaataaataaatgaaacagtaaaaatctcataactacatctatataaatatagtcaacttatttttctcaaggacacaaaggaaactcaattgagaaaggctaaacttttcaagaaatgattctn

SEQ ID NO: 4894 - DNA, 401 bp, Homo sapiens
tgattacagtgtccatctcaggcccacacaaccatgagagcctggactctggggtctacccgtcagtgccccccaccgctgtgcagactccctggttgatcctgggcttgtggcttttcaccgcacggcggggagccctgctcttgaatgtcatcgggctgctcagagctgattgctaggtgcctacacatttgcctcgacccacacagccccgtggtgatgcctcaaaacaccacttaggtttgggttcgtttagttcgagtttggggttttcatttgaacttgtttgatgtctgcagtttctgccatgacctgggtagaacctatgggattacccgtctcctggaataactgtttgacgttttccaaagttgtagagttagtatggcctctgtttaaag

SEQ ID NO: 4895 - DNA, 420 bp, Homo sapiens
  misc_feature (1)...(420): n = A,T,C or G
caagatttaggaacagtaacagctccctggttttagtggcttcaaaacagaaaattgaaacangaccannaaaaaaaaaaaaaaaaaaaaaaaaaaaaaaaaggggggcccctttaaaaaaaacccccgggggcccaaaatttacccggggaagaaaaaaaaaatttttttcttttaagggggccaaaaaaaaaaccacttgggattttttggaaaaaaaccttttttttggggggggcaaaattggcccccccccccccccaaaaataaaccctttaggggaaaaaaaaaattttaaaggggaaaggggggaaaaccaccctcaaatcctgccggnaaaaaaaaaatgncnnnnnnnaaaaaaacactttttgggggggggggctggcccccccccccctctaatataggcccttgggg

SEQ ID NO: 4896 - DNA, 397 bp, Homo sapiens
  misc_feature (1)...(397): n = A,T,C or G
attccttccaggagcagtaggtgggaggtttgacccagagaagccaatccttgcattccaggagtggcctgtgcctcccacctcttccttcccactgccaaaggcctgtgttgagaaagatgtcatgcaaaaggacgacggtggccaactaaagcaagtcttccttccaccctgtggcctgcacttgagccacaaagtgtgtgtgtgtgtgtgtgcgtgtgtggcacgtgtgtgtgtgtgtggctatgaggctgattcctgtgtggatttttgccctcacgtgtatcattaagctggcctttgggccttttcctttctacctcccctgtgacctttcctagcctcagatgtgttaattcttttggccccagccctgtccctcactgtcctctgtccn

SEQ ID NO: 4897 - DNA, 468 bp, Homo sapiens
  misc_feature (1)...(468): n = A,T,C or G
ctcggtggaaagagcagaacaccatagacaatatgtcgctcttgggacccaaggagctgctgtttcttgctgcattcatcatcacctctgactggatacccctgggggtcaatagtcaacgaggagacgatgtgactcaagcgactccagaaacattcacagaagatcctaatctggtgaatgatcccgctacagatgaaacagttttggctgttttggctgatattgcaccttccacagatgacttggcctccctcagtgaaaaaaataccactgcagagtgctgggatgagaaatttacctgcacaaggctctactctgtgcatcgggcggctaaacaatgcattcatcagttatgcttcaccagtttacgacgtatgtacatcgtcaacaaggagatctgctctcgtcttgtctgtaaggaacacgaagctatgaaagatgagctctgccgtcagatggctggtn

SEQ ID NO: 4898 - DNA, 417 bp, Homo sapiens
  misc_feature (1)...(417): n = A,T,C or G
taaatttcgttgaatgatggatgcaaagatggaagacagatggatagaggaaaagacagaatcagatactggatgagttagtactgctgcctgtgcttcagagctgtcttattaccacaaggccggcaagcatcaatgtccccacatccccctctgcctccccctgaaatgtaccgatttatatgaaaattaagattacaaattaaagcctggctatcctggagttttccagttcatcagccatccaataaaaatgatgtcaagcctgtatgcataattcccggaagattactttcgtccttacagctaacccctgtctttagatttacagtccaatgcttcactcagccattttacctcacccccaagaagnggnnnaggnggtaagacattcaataaaaatgatggcaagcctgc

SEQ ID NO: 4899 - DNA, 478 bp, Homo sapiens
cctagcctttctattagctcttagtaaaattacacatgcaagcatccccgttccagtgagttcaccctctaaatcaccacgatcaaaagggacaagcatcaagcacgcagcaatgcagctcaaaacgcttagcctagccacacccccacgggaaacagcagtgattaacctttagcaataaacgaaagtttaactaagctatactaaccccagggttggtcaatttcgtgccagccacaaaaaaaaaaaaaaaaaaaaaaaagggggggccgtttaaaaaaatccttggggggcccaaggttaacgggggagggaaacgtttaacttttttccttagggggggcggaataaaaacctccctgggatgtttggaaaggagactttccttgggggggggaacaaattggaccaacctccctccaaaaattaaagcgcttagggaaaatataaaattttaaggggaaaggggtgaaacctc

SEQ ID NO: 4900 - DNA, 471 bp, Homo sapiens
  misc_feature (1)...(471): n = A,T,C or G
cctagcctttctattagctcttagtaaaattacacatgccagcatccccgttccagtgagttcaccctctaaatcaccacgatcaaaagggacaagcatcaagcacgcagcaatgcagctcaaaacgcttagcctagccacacccccacgggaaacagcagtgattaacctttagcaataaacgaaagtttaactaagctatactaaccccagggttggtcaatttcgtgccagccacaaaaaaaaaaaaaaaaaaaaaaaggggggggcgttttaaaagaatccttggggggcccaaggttaacgggggtggggaacntttaggtttttcccttagggggggccgaataaaaaccccccttggaattttgggaaggaacctttccttggggggggggacatatggggccaacctcctcccaaaatttaaaagctcgggggaaaataaaaatttttaagggggaaaggggg

SEQ ID NO: 4901 - DNA, 462 bp, Homo sapiens
gaacagcaagcacaattctgtactttggttataccatgataatggttttgatcttctttctttttacaggaacaattggcttctttgcatgcttttggtttgttaccaaaatatacagtgtggtgaaggttgactgaagaagtccagtgtgtccagttaaaacagaaataaattaaactcttcatcaacaaagacctgtttttgtgactgccttgagttttatcagaattattggcctagtaatccttcagaaacaccgtaattctaaataaacctcttcccatacacctttcccccataagatgtgtcttcaacactataaagcatttgtattgtgatttgattaagtatatatttggttgttctcaatgaagagcaaatttaaatattatgtgcatttgtaaatacagtagctataaaattttccatacttctaatggcagaatagaggaggccatatta

SEQ ID NO: 4902 - DNA, 423 bp, Homo sapiens
caaataataataatgctatacttaaattacttgtgaaaaacaacacattttaaagattacgtgcttcttggtacaggtttgtgaatgacagtttatcgtcatgctgttagtgtgcattctaaataaatatatattcaaatgaaaaaaaaaaaaaaaaaaaataaatacaaaaaataaaagaaaaaaaaaaaaaaaaaaaaaaaaaaaaaaaaaaaaaaaaaaaaaaaaaaaaaaaaaaaaaaaaagataggggggggggggggtaaataaaaattatggggggggccccccttttccacttgtaaacaaaatttttttttttttttttggggggagtaaaaaaaaaacgttgggtgggtgtggaagaaaaattttttttgtggggggggggtatatttcccaccccccccctctttttttttt

SEQ ID NO: 4903 - DNA, 483 bp, Homo sapiens
  misc_feature (1)...(483): n = A,T,C or G
aattgatcgctgtcggtacctgtccggacttcccgggncgacccacgcgtgcggtgagacaaaaatcaccaattgtctcagtttgttcaggctgctataacaaaataccataaactacgtggactctaagaacaacagaaatttatttcttgcagtttttgaggctgataaggccaagatcaagctgcaggcaaattcagcattttctgagggcctgctcctgggttcatagatggatatctcattgcgtcctcaaatgtattatgtgtcctcaaggggcaagggagggctccagagtctctgctataagggcactaattgcattcatgagggctccactctcatgacctaatcacctaacaaatgccctatcttctaataccatcatattgggagttaggatttctacataggagatttgaagtgacatagaagcatttgctaaaactagtgaggggacgtttaatgagaaataagacattg

SEQ ID NO: 4904 - DNA, 456 bp, Homo sapiens
  misc_feature (1)...(456): n = A,T,C or G
naactgtgngctggannacgtcggaaaggctcgaanattcgggcgaccgacgcgttcgcttactactaaaaattattacattttgactatcacaacttaacggctacatagaaaaatccacccgttacgagtgcggcttcgaccctatatcccccgcccgcgtccctttctccataaaattcttcttagcagctattaccttcttattatttgatctagaaattgccctccttttacccctaccatgagccctacaaacaactaacctgccactaataggtatgtcatccctcttattaatcatcatcctagccctaagtctggcctatgagtgactacaaaaaggattagactgagccgaataaaaaaaaaaaaaaaaaggggcgggcgggggccgtttccttgcctcttcctttgccccgcttgggccgccttccgcctttcaggggcggggtg

SEQ ID NO: 4905 - DNA, 398 bp, Homo sapiens
ctttgatatcagtattttcttaacctttgtgactgtttcaatattacccccgtgaaagcttttcttaatgtaactttgagtacattttaattgccttctatttttaaaactcaaaatcattagttgggctttactgttcttgctattgtatggcatatacatctgcctggatatatttctactcttgaccaaagttttgtaaagaacaatataagatttcgggtaggggtatggggagggaagatattttattgagaactacttaacaaaagatttatctgtaagcttgaactcaggagtacagttttagctatctagactctaacagcttttgctttaaaattattaaagtgtttcttaatgaaaaagaaaagatcttgctaaagttaaaataaggg

SEQ ID NO: 4906 - DNA, 453 bp, Homo sapiens
  misc_feature (1)...(453): n = A,T,C or G
taccttaaactcataactggcttattaaatgcaaaagactttcgtgatcgtattaatgggattaagcagcttttatcagatacagaaaataatcaagaccttgttgttggaaacattgtgaagatttttgatgcttttaaatctcgacttcatgattctaatagtaaagtaaatctggtggctctggaaacaatgcacaaaatgattcctctacttagagaccacttatctcctataatcaacatgctaattccagcaatagtggataacaatctgaattccaagaatccaggcatctatgcggctgctacaaatgttgttcaggcactgagtcagcatgtagacaattacttacttctacagccattttgcacaaaagctcagtttttaaatggaaaagcaaaacaggacatgacggaaaagcttgctgatatttgtacggaactttatcan

SEQ ID NO: 4907 - DNA, 423 bp, Homo sapiens
  misc_feature (1)...(423): n = A,T,C or G
ctgcgtccgcggcccgctgaggcccccggttcgctgtcccgcctggtgtcccttcgcctcgggtgctaactttgagtacatcatcgcagaaaaaagagggaagaataacaccgtggggttgatccaactgaaccgccccaaggccctcaatgcactttgcgatggcctgattgacgagctcaaccaggccctgaagaccttcgaggaggacccggccgtgggggccattgtcctcaccggcggggataaggcctttgcagctggagctgatatcaaggaaatgcagaacctgagtttccaggactgttactccagcaagttcttgaagcactgggaccacctcacccatgtcaagaagccagtcatcgctgctgtcaatggctatgcctttggcggnggctgtgagcttgccatgatgtgtga

SEQ ID NO: 4908 - DNA, 429 bp, Homo sapiens
  misc_feature (1)...(429): n = A,T,C or G
ngggcgcctttcttacccgggaactttagcancgcatngcnntannntagggagacccaccgtccgggacgcgtgggcggacgcgtgggcaggttttgagctagtctctaccgtagaaactaagttatggagtcgggtttcctactacaaactggcatcccacctgcagcctctctcacctcctgttgaccatgcttaatactgtccacttaatcttcctaaagaagaaccttctcctgtatgacatcgattccccatctgctagatcaacttcaactgcttccacctgatactgaaactattcttgcattccttttcccagcgttatttcccatattctgttaaaatggttccttgtgtgtacatacagttttttgaagcatttttgggtctcttatcctttgaggaaggaagatagttaatcctctn

SEQ ID NO: 4909 - DNA, 436 bp, Homo sapiens
  misc_feature (1)...(436): n = A,T,C or G
acgcggcnnctntcccggaaacgtttgncgagcanngncnttannnntngggnagacccacccgtccggcgatagctgagtggcggcggctgctgattgtgttctaggggacggagtaggggaagacgtttgctctcccggaacagcctatctcattcctttctttcgattacccgtggcgcggagagtcagggcggcggctgcggcagcaagggcggcggtggcggcggcggcagctgcagtgacatgtccagcatgaatcccgaatatgattatttattcaagttacttctgattggcgactcaggggttggaaagtcttgccttcttcttaggtttgcagatgatacatatacagaaagctacatcagcacaattggtgtggatgtctaataagaactatagagttagacgggaaaacaatcaagcttcaaat

SEQ ID NO: 4910 - DNA, 417 bp, Homo sapiens
gcggcgggtgtcagggctatgagtgcttttaaggaatgtctccatagaaggttcccccagcaaagtagggaggggtactccccgagaggagtcgaggtgccggagcctgctgcctcgccgacgctgggaggagccccgtgtcccgccgcgcttgccaagggttggctgcgcgtgcggcgggagtagaggcgccttgcgcaccaggaagtgactgtttccccgccgcagcaaaccaggccatccgctggccttttagtttgccgcctcaggtggatttcagtgtgttctttggatggcaggccttaagagaagagtcccactgcacagcctcagatacttcatctccatggtgggtctcttctccaaaccaggactgcttccctggtatgccagaaatccaccaggatggtcacagct

SEQ ID NO: 4911 - DNA, 424 bp, Homo sapiens
  misc_feature (1)...(424): n = A,T,C or G
aattatgtttttgagatacctttgggcttagattgttattgttttattctaaaaacccaactcagtggtgtagagaaacttgtgtaccaaaattttagtttctgcagatgctagtgtttttttggatacaattttgacaaccaagttagtaaacaaaatatcttaacagtttgatgacacaagctactgatgagggtttggaatattaattcagaaggtagtttctcttgtgttcaaaatagctgccatggggctgttacttttaaagtcaaaattttcttctgaaggctcattttggtatttgatcttaaccaagtgattattagagaaatgtatcaactccatgccatctcccaaaataattgtctaagaaaacttgaaagtgtaaggttttaacctttaatttatttctcttaaatacatn

SEQ ID NO: 4912 - DNA, 412 bp, Homo sapiens
cccacgcgtccggagtttggagccactgaatgtattaaccctcaggattttagtaaacccatccaggaagtgctcattgagatgaccgatggaggagtggactattcctttgaatgtattggtaatgtgaaggtcatgagagcagcacttgaggcatgtcacaagggctggggcgtcagcgtcgtggttggagtagctgcttcaggtgaagaaattgccactcgtccattccagctggtaacaggtcgcacatggaaaggcactgcctttggaggatggaagagtgtagaaagtgtcccaaagttggtgtctgaatatatgtccaaaaagataaaagttgatgaatttgtgactcacaatctgtcttttgatgaaatcaacaaagcctttgaactgatgcattctggaaaga

SEQ ID NO: 4913 - DNA, 448 bp, Homo sapiens
  misc_feature (1)...(448): n = A,T,C or G
ngagatgccnnncttaccccnaagggtttcgnagnngnanngncnctnannntnagggnaaacccacccgtncgggaacgccctgttgttcaaaggagagaaccgttatttctggaagaatggactaagaacattgatggtgaaggaagaattttaaatgtagataatatgaagcagatgatatttagagggggacttagtcatgcattgagaaagcaagcatggaaatttcttctgggttattttccctgggacagtaccaaggaggaaagaacccaattacaaaagcaaaaaactgatgaatacttcagaatgaaactgcagtggaaatccatcagccaggaacaagagaaaagaaattcgaggttaagagattatagaagtcttatcgaaaaagatgttgaccgaacagatcgaacaaacaagttttatgaaggccacagatatt

SEQ ID NO: 4914 - DNA, 472 bp, Homo sapiens
ccacttccacaaggactggcagcggcgcgtggccacgtggttcaaccagccggcccgtaagatccgcagacgtaaggcccggcaagccaaggcgcgccgcatcgccccgcgccccgcgtcgggtcccatccggcccatcgtgcgctgccccacggttcggtaccacacgaaggtgcgcgccggccgcggcttcagcctggaggagctcagggtggccggcattcacaagaaggtggcccggaccatcggcatttctgtggatccgaggaggcggaacaagtccacggagtccctgcaggccaacgtgcagcggctgaaggagtaccgctccaaactcatcctcttccccaggaagccctcggcccccaagaagggagacagttctgctgaagaactgaaactgggcacccagctgaccggaccggtcatgcccgtccggaacgtctataagaaggagaaagctcgagtcatt

SEQ ID NO: 4915 - DNA, 485 bp, Homo sapiens
  misc_feature (1)...(485): n = A,T,C or G
cttttttcattccgttttgatagtaactgaaagcatcagcacacaagcaggacgtgaagttaccagagtctttcccgcacatgcctatgagtcataaatgaccaggtggaagacacagtggatgaggagacccagtgtacggtagcagcaaacaagagaaaacacttaggaacaacctaaccggcattcaggacctctgtggcccaaggggaaagccggaaggacattgttggtctaacggattgcagagctactggcatttttggcattttagataaatctattccatcggtatcatgtttactgaggtggataactgcaatgaggttctgtgagagaatgttcttatgaaacgcacatgggagcctgtgacagacaggcccgagcaatacaaatgtcctcaggtgggacagaacgatgtggtggggagaagaggcgtgcanaacccacggggcacgtgtcacatttgctggtccacggngaca

SEQ ID NO: 4916 - DNA, 421 bp, Homo sapiens
  misc_feature (1)...(421): n = A,T,C or G
cccacgcgtccggccccctgtcttccctctggagctgtttgaggaatgcagttcttttgcataagaaaggcttttctctccagtcattctgcttgctgatcgagagcactgaacagcttcaggctttcctgatactttgacgaaggtaattgggactcccatcaagtctccacacagctagcagccacgtggggcacttctccagcatatgtaagtggaactcagaaggcaacattccctgaacatactcttccaccagaatctcctctacagatttttgctgccccttttaccagtggctgaatctactttctcttatggatcgcttacacctgagacgaactacagaacagcacgtaccagaggtggaagtccaagtcaaacgcagaaggactgcctcactgagcaaccaagagtgtcn

SEQ ID NO: 4917 - DNA, 414 bp, Homo sapiens
  misc_feature (1)...(414): n = A,T,C or G
cgaggattcagcagcctcccccttgagccccctcgcttcccgacgttccgttcccccctgcccgccttctcccgccaccgccgccgccgccttccgcaggccgtttccaccgaggaaaaggaatcgtatcgtatgtccgctatccagaacctccactctttcgacccctttgctgatgcaagtaagggtgatgacctgcttcctgctggcactgaggattatatccatataagaattcaacagagaaacggcaggaagacccttactactgtccaagggatcgctgatgattacgataaaaagaaactagtgaaggcgtttaagaaaaagtttgcctgcaatggtactgtaattgagcatccggaatatggagaagtaattcagctacagggtgaccaacgcaagaacatatgn

SEQ ID NO: 4918 - DNA, 428 bp, Homo sapiens
  misc_feature (1)...(428): n = A,T,C or G
agacaagaaaaggaaataagaaataaactgattggggaggaaaaagtaaaactgtctttgttctcagacagcacaattgcttatgtagaaaatctgaaagagtcaacaacaacaacgaaacctcctggatctaataagcaattatagcaaggttgctagatccaaggttaatctacaaaagccaagcacattcctatatagtagcaatgagcaaatggaatttgaaattaaaaacatattaccatttatattagatagaaaaactgaaatgtttacatataaatctaacaaaacatatacaaaatctaaatgagaaaaactacaagactaaagaaaggtatcaaataaatatataaatgaagagacatggatacaaagacacaatattgtcagtatgtcagtttttcccaacttgatctatagatttn

SEQ ID NO: 4919 - DNA, 412 bp, Homo sapiens
  misc_feature (1)...(412): n = A,T,C or G
atgtaccccatgcgtatcgatgagagcattcacctacagctgcgggagaaatatggggacaagatgttgcgcatgcagaaaggtgacccacaagtctatgaagaacttttcagttactcctgccccaagttcctgtcgcctgtagtgcccaactatgataatgtgcaccccaactaccacaaagagcccttcctgcagcagctgaaggtgttttctgatgaagtacagcagcaggcccagctttcaaccatccgcagcttcctgaagctctacaccaccatgcctgtggccaagctggctggcttcctggacctcacagagcaggagttccggatccagcttcttgtcttcaaacacaaagataagaacctcgtgtggaccagcggtatctcagccctggatggtgaatttn

SEQ ID NO: 4920 - DNA, 483 bp, Homo sapiens
  misc_feature (1)...(483): n = A,T,C or G
agagaaaaccgatngacttcgagaangctnacggaaancgcgggaagacccacccgtacgtatagatcctaagcacttctttcctttttctgatttttatgctttttgagataatggacaaagatgagcagacatagtgaccatgggcatcttttgctactgctgattttgaaggaaatgcacccaatatcctgccacttgggtctgtgaactttcatcaggataaggaagttcctttctatcactaaataagtttttatcctaaacttctgttgtattttttgaatgcatctactgataggattttttcctacttaatctgttaccgcggggaatgacaattaaagatttttctagtatgaaactactcctgcattcctgggagaaaaccatattattcatagcatttttttaatactccagtaggttgtttgatcatcttttgctcaacacttttgcgtttatatgcatggacaaataccg

SEQ ID NO: 4921 - DNA, 468 bp, Homo sapiens
  misc_feature (1)...(468): n = A,T,C or G
aggccaanatttgaaacctgaagcctgcgaaccgcccggaatcccggtcgaccccgcgtccggttccacagtgcgttccccttgcagccatacattattcacagattcatccctattgtaacccaaatgtcagctgagggctccttgcctcttgacatccagagaggtctgataactgggctctgtttctgaacctctagatttctgtgatttctcaaagacttatatttttgcagccactgctgactccacacttctgctacctcattttaaatagcgtcttatccctgcaatgcatcagctgagacatgaagctcagtttcctcgcccatttccacatagcaaaattcaagcgagtgagtgtgtgtgcctgcgtgtgtctcagtgacgtgggaaggaatggcagatgctacaacagtgcagactcggcaccccatttatagaatgttctttttatatactatggag

SEQ ID NO: 4922 - DNA, 411 bp, Homo sapiens
atgggacaaggctctaaatggactggaggcctcttttccattatagatgtgtttcctcatagacttttgtcttcacactttattttcttgtgcccactgcctcttattcgatcatttgttatttctattctcaaactctctttcttcttctcctaattttgtttctgaaaatttagcctgtatcttacaatctactatataccaggcagtgctccactctctccttacttttttaactacagcctatcaaccaaagtttattctatggttgacttcctctcaggaaaaagactgagaggaatagacaaaactttgtaaagaaatgtatgggatggttgtgggagggaaatcacaatgagtgcatttggaaaaatacataaactacctgtcttcttatgttcatgatcatat

SEQ ID NO: 4923 - DNA, 491 bp, Homo sapiens
  misc_feature (1)...(491): n = A,T,C or G
ngggaactgaagccntcggnacnactgattaacctccggaacgacccacgcgnncgggcaaaacctgtctctaacagaaatacaaaaaattagccgggcatggtggtgcatgctgtagtcccagctacttgggaggctgaggtgagaggatgacctgagcccaggaggttgaggctgcagtgagccatggtgacaccgctgcaatccagcctgggtgacagtgatatcctgtcttaaaaaaaaaaatgaaaaagacaagataaccacccccagtttggatagcggagaaacaaattcttaaagaaacctccaacccaaatacaatgacaggaattatttttactaattccctattcagacactattcatatacagggatgcttttcacattattgcactcagggtcactagaacctgatgttaacattgtggccttgaattttctgctgttgctatgtagcattcacggagatcataatgatgtttcatcg

SEQ ID NO: 4924 - DNA, 421 bp, Homo sapiens
ccagaatcctatatccagcaaaaatatcctttaggagtgaaggggaaatcaagacattctaaaatgaagaaaaactaagaggatttgtcaccagcagaatgtccctaaaaggataatgaatggatgtactttgaacagaaagaaagggtaaaagaagaaaccttactatataaggaaggaagaaagaatatagtaaggaaaagtatgggcaaatgcgaaagaccttttttcttcttttgagttttccaaattatgcttgattgttgaagcaaaatatagcaaaccatatcaacattacactttgttttaacattacgcaaagcataacgttgtctgacatggtcccaaatgtatgtacagaaaatatttaagacatttggattaaaatagggaaggataaagggaagtaaagatgagtaag

SEQ ID NO: 4925 - DNA, 419 bp, Homo sapiens
gccacggtatttaggaatccaaggagataaagaatactgtattactagtgatgaccttttttctctgccttattgccctggcaaaacattagtggtgggtgcctcttatgttgccctggagtgtgcagggtttctggctggctttggcctagatgtcacagttatggtacgctcaatccttctccgtggcttcgaccaagaaatggcagaaaaagtgggttcctacatggagcagcatggtgtgaagttcctacggaaattcatacctgtgatggttcaacagttggagaaaggttcacctggaaagctgaaagtgttggctaaatccactgaaggaacagaaacaattgaaggagtctataacacagttttgttagctattggtcgtgactcctgtacaaggaaaataggcttggaga

SEQ ID NO: 4926 - DNA, 484 bp, Homo sapiens
  misc_feature (1)...(484): n = A,T,C or G
nactgatcgtctcggnaccgtcgaggaacctccgggncgacccacgcgttcgcccacgcgtncggaccaactgagggaggctgaggaacagagagagacagccacatgcagggacacaggtggtctctctgcgtgtctctgtcttcatgtggtgctttcttcttcttacaaggacatcagccatgctggattagttcccactactactctctgggacccccaaatcagtttggctttcacatattccatcaaagaagagattgctcatttccttgcgaaactgtatacgtccaccgtaatgctatttttcacctctcggtcctttacaaaagggctctggcatcaaagggcagctggcggtggagacggccctcagagcaaggacatcagtgatgtggatcagcggctgcagctgaggagagcggactcagtcccagtccgctgaaggagggacatgaagtcaagggagaggcagcttgcagac

SEQ ID NO: 4927 - DNA, 461 bp, Homo sapiens
  misc_feature (1)...(461): n = A,T,C or G
aaaaagtcatggaggccatggggttggaacagggagagcagcagccatgtcagctacacgctcaaatgtgcagatgattatggaaaataacctcaaaatcttacaaagctgaacatccaaggagttattgaaaactatcttaaatgttcttggtaggggagttggcattgttgataaagccagtcccttcatttaactgtctttcaggatgttccttcgttgtttccatgagtattgcaggtaataatacagtgtattcataagaatctcaatcttggggctaaatgccttgtttctttgcacctcttttcaagtccttacatttaattactgattgataagcagcagcttcctacatatagtaggaaactgccacatttttgctatcatgattggctgggcctgctgctgttctagtaagatattctgaattccattntatcaataaagcttgatttaac

SEQ ID NO: 4928 - DNA, 423 bp, Homo sapiens
ctgaacgggactggcccttctgcctctccctgctcttcttatggccttgggagagagcccttggctgggacctcagagttcgtggggcctgatggggctgggggagaggaggagattgagtctcgggccaacgccaagggggttcgggaggaggacgccctgctggagaacgggagccagagcaacgatagtgactgacgcagcacagaccgtgggcctgcgccaccttccccgctcaaggagacctccttttccatcgggctgcaagtactgtttccattcctcctggcaggctttgggaccgtggctgctggcatggtgttggacatcgtgcagcactgggaagtcttacagaaggtgacagaggtcttcatcctactgcctgcgctgctggggctcatagggaacctggaaatgaccctg

SEQ ID NO: 4929 - DNA, 418 bp, Homo sapiens
aagacagcaggctccaggggagcacagttacctcccagggcagatgcaattagcaggtttttagtgactggggagccagaggccaatttgatgatttactgtaggaaatatcatcaagaccactggtactcagactagcagatttcctccctgtaggcagacgtcaagggaaggagttgtaatcaggagagcatttggtaaacatagaatcacagtgagaagagctagccagtgtgatcagaaagtccagaggcctccagagtcaggacagccccatctctccattctatagggaggcctcacacctggcagcagatgtggaagagagaggctagagtggggctgccctcccttgtatagagctggggtagcctagcagcgccaatttgctcagatttcatggttggccacctctgct

SEQ ID NO: 4930 - DNA, 147 bp, Homo sapiens
  misc_feature (1)...(147): n = A,T,C or G
actagttctagatcgcgtgccacctatnanancccatcctaaaaaaaaaaaaaaggggcggccgttttaaaggatccttgggggggcccaagtttacgcgggcttgcaacgttatagttttttccttatagggggccgaattaaaac

SEQ ID NO: 4931 - DNA, 406 bp, Homo sapiens
taaggatatagtaacgcagcactgaggctttatccatgaatgaatcaggactgaatggcaaaaaatgtgaaaacttcatgcacatctgaaaagacttcctttcctcaaggacgttatcaccaaatcctgggaatttttcataataaaaatacaagaataaaagtgtacaaagtaactggcacctctcagtggtcctcttgagcagtgcacaacctgcccaaccatccatgacagcctggtgttccactcatgttatttaacattcccacgcatacacctggagctctgcccaaaatacctcccctcgccctgacatacaccctttggcaagcctcactctcagacatacaagcagcccaaggaggagggaagagaccacagcttacacgagctcttgtgttccctt

SEQ ID NO: 4932 - DNA, 331 bp, Homo sapiens
gccagcacagctgaggaccctcagccccaggagaagggacaaaaggtactggtgagggcaagaggtgcctgggaggagtggccctgatccaggaaaatgtgaggggaatctggaacgctctatgcagaagaagctgggagggagggggaggtgaaaagggcagaggcaaggatggtggggcccccagcaccctctgttagtgccgcaataaatgctcaatcatgaaaaaaaaaaaaaaggggcggccgttttaaaggatccttgggggggcccaagtttacccgggcttgcaaggtaatagctttttccttatagggagccgttttataac

SEQ ID NO: 4933 - DNA, 489 bp, Homo sapiens
  misc_feature (1)...(489): n = A,T,C or G
ngggcactgacgccctcggnaccgtcgaggaacctccgggncgacccacgcgtncgaagatttccggggatggaatccgaaatggaaacgcagagcgccggggcagaggagggctttacccaggtcacccgcaagggtggccgacgggcgaagaaacgacaggctgaacagctgtccgcagcaggagagggcggggatgcgggccgcatggacacagaggaggccaggccggcgaagaggcccgtcttcccacccctctgtggggacgggctcctgagtgcgaaagaagaaacaaggaaaattccagtcccagctaacagatacacaccattgaaagaaaactggatgaagatatttactcctattgtggaacatttgggacttcagatacgctttaacttgaaatcaaggaatgtagaaatcaggacttgtaaagaaaccaaggatgttagtgctctgacaaaagcagctgattntgtgaaagctttt

SEQ ID NO: 4934 - DNA, 497 bp, Homo sapiens
  misc_feature (1)...(497): n = A,T,C or G
attgatagcctgggnacagtgatggtcctcccgggncgacccacgcgtccgctcagatattagcattattagcatacaacagaaaggaaatacagctaatatgtttacatattaaaagaatttgaaaagcgaaaaagccactgattatgaaaaatgaccaatcatgttgataacattctagaaatgaaaaaatataatcaaattgtaaaatttggagatgtaagtttagcggaacattacatacaattgaaagagaatgtggtgagctggaacacagattttggagatgatgcccaaccgagaaacagaatatgagaggtgaagtgacatggaatagatctaacttaggtctagctaaattcctagtggaaaggagaaagagaatgggggaaagtcaatataagagcagctaataaccaagaacagggtttgttatntaaaccacacnnnaaacataaaaaaaaaagggccggcttttaaaagatccctcggggccn

SEQ ID NO: 4935 - DNA, 429 bp, Homo sapiens
attcaatttttattgtgatgtttatgtttctaaagtaactctttaattttgtcttttaaaattaaaataacagtaaattaacatactccttaatatcttacctatatactaatgtggacccaagtcttctcatataagactcgacaaatataaaaaattctgaaaatgaagggtaggaccaaaagaccttagaggtgatcattcaacaatacaattctgtgttaagctaatagtaattattcttaatacaatttagaataaactttaattttgtaacaaaggacgagagaaataatattacaatgaaagataaattttatctccctccacctcttaaattacttattgttacttaatggctacatttgtcacctgcatttagcaatatttaagtaccattatcatatttaaaatgctaattttaattag

SEQ ID NO: 4936 - DNA, 429 bp, Homo sapiens
ctgaaaccataaaactcccagaaaaaataaggaaaagccttattgacattgaccttggcaatgatttctttgatatgacaactaaaagcacagagagcaaaagcaaaaattgacaagtgggattacatcaaactgaaaagtttctgcacagcaaagcaaacaacaaaatgagaagataacctagagattgggagaaaatatttgcaaaccatatccgataaagggttaatgccccaaatatatgaagaacacattagcaaaaacccaaataacccaattaaaataatgggcaaaggaactgaatagatgtttctccacagaagaggtacagatgaccaacaggtatattaaaaggtgctcaatgtcactaaccatcagagacatgcaaatcaaaatcacagtgcgatatcctctcataccagttagaag

SEQ ID NO: 4937 - DNA, 465 bp, Homo sapiens
atgactttccgggtcgacccacccgtcccaatagattgaagggggccagggcagaagctagaagatccattgggaagttattgtaatagtccaggtgagagatgatggagggtggaactgggtcagtagcagtaaagggatgaaagcagtcacattatggatatgttttaaagtgagacccaaaggatttactgttgggttggatgagagaaagaaaagaatcaaggatgactgagcaattggaggagcaattgccaaaaacttaagttggtagaggccacagggctgcaggtttaaggagaaagtttaggagcccagttttagacacatcatttgagatgcctgtttagagatatccaagcctagatgtcgagtaggcagtttgatacactagtctggaattcagtggttgcctaaaataaatatgagagccgttagcacatagatggcatgccaagttgtgag

SEQ ID NO: 4938 - DNA, 419 bp, Homo sapiens
ttctatttgtcccacgacgtgcttctgaaagaagaccattctgagtacttggaggaacgaagaataaaggagatggtgaagaaacattctcagtttattggatatcccattactctttttgtggagaaggaacgtgataaagaagtaagcgatgatgaggctgaagaaaaggaagacaaagaagaagaaaaagaaaaagaagagaaagagtcggaagacaaacctgaaattgaagatgttggttctgatgaggaagaagaaaagaaggatggtgacaagaagaagaagaagaagattaaggaaaagtacatcgatcaagaagagctcaacaaaacaaagcccatctggaccagaaatcccgacgatattactaatgaggagtacggagaattctataagagcttgaccaatgactgggt

SEQ ID NO: 4939 - DNA, 418 bp, Homo sapiens
gcgctgtgctgcacggcgcggcccatttttgcacggcacggtgtgagtgtctccggctggcctgcagggagaacaccgactgagacctccaaccctggctccagtgacatggaatccgtcacctttgaggatgtggccgtggagttcatccaggagtgggcattgctggacagcgcacggaggagcctgtgcaaatacaggatgcttgaccagtgcgggaccctggtcttcaggggaactccaccatgcaaacccagatgtgttttcaggtggggcaaagagcacagccaaaggcaacagaacgagggattctccgtgccacaggagttgcctgtgaatctcaacttaaacccgaaaagttgccttctatgcaggatcctttggaagaagcatcctccacggacatgcaaatggggcc

SEQ ID NO: 4940 - DNA, 420 bp, Homo sapiens
gaagccagctctgtgcctggaggggactcgccgccatctcaggtctcttggctttgccagggcccaccggagaaaactgacgacccgtttctgtaatccttatgggagaccaaccttgtgcctccgggagatccactctcccacctggaaacgcacgggaagccaagcctcaaaaaaagcgctgcctcctcgctccgcgttgggattatccggaaggaactcccaacggaggtagtaccactctaccctccgcacctcctcctgcatcagccggcctgaagtcgcaccctcctcctccggagaagtagagaaataaatttctcccaccctaaaccagtctttgagtgattgcagtatgactccatttccctggtgcattcatataatagttcacctggtgaaaacaatgaagattattta

SEQ ID NO: 4941 - DNA, 506 bp, Homo sapiens
  misc_feature (1)...(506): n = A,T,C or G
ggattctcatagtacgatgcaggcatcggnacgganccctaattctaggcacgacccacgcgtacgcaaagatgaagggaaaacgaactaagacagacgctaggccatgttggcaaagtagcatcttggtgactaaggtgactttgtatattcatcttaaaaattatgttctttagacactgctacctgaaaactgttggagaaataatgtttaaagttatttaagaaaaactgttacatcactaagtattaataaattcttcttacctgacgtaacttctcaatgcctaaattctgtagttgaagctctgctgcagagagttgggataattttcttttggtggatcagctctcataaaaaagctatgatttgctcaaatatgctgttgactcagtaaatgaatatatttttttctttaaataggaacaacctcttttaaaagagaaaaattatttcagtgatttgtcaaaacgaattacctcttttggcatgagctaataattga

SEQ ID NO: 4942 - DNA, 235 bp, Homo sapiens
caagtcaatagaagccggcgtaaagagtgttttttatcaccccctccccaataaagctaaaactcacctgagttgtaaaaaactccagttgacacaaaatagactacgaaagtggctttaacataaaaaaaaaaaaaaagggggggccgttttaaaggatccctgggggggcccaagtttacgcgggcaggcaaggtaatagctttttccttatgggggggcgtattataaccta

SEQ ID NO: 4943 - DNA, 425 bp, Homo sapiens
  misc_feature (1)...(425): n = A,T,C or G
ttgtaaaggaaaagtggtactgttccaacctgaaatgtctgttataattaggttattagtttcccagagcatggtgttctcgtgtcgtgagcaatgtggtttgctaactggatggggttttcttattaataagatggctgcttcagcttctcttttaaaggaatgtggatcatagtgatttttccttttaattttattgctcagaaatgaggcatatcctaaaaatcctggagagctgtatttaatgcatttttgcactaattggtccttagtttaattctattgtatctgtttatttaacaaaaaattcatcataccaaaaagtgtaagtgaaaaccccctttaaaacaaaacaaaaaaatgaaataaaattaggcaaattgacagacagtgagagttttacaaacatgataggtattctgctn

SEQ ID NO: 4944 - DNA, 419 bp, Homo sapiens
cacaagataagagggatcttatttctgttgcctgatcatttgtgagtaaaattttaagtgtttttctcttttttcaacttttttttttttttttaacttttttgggccacaaaaaattttaagtttaaaaaaaaacccctacggggatgggaataaaagagggtagggtcccctccctccccccaaacaaaaaaagccctttatcccctggggaaggccccctaaataaaaagaaaatttttatttcctgggggggcgggctattttaacctgttttgttttaagggaaaaagggggttccttcaaacacaaaaggagggcggaataaaaatttttttttgcggcaatttttatggaaaggggcggcctgttttgctacagcatgcaacccaaaaggggctgaaaatttccacttttgg

SEQ ID NO: 4945 - DNA, 499 bp, Homo sapiens
  misc_feature (1)...(499): n = A,T,C or G
nattgagagcctcnggacnatgatggcctccggagncgcnccacgcgtccgggggaggctgcgaaggaagagctgcattaaggagggtgaggagcgtgtggttttgtatcatggcagccccaatggatccaggggatgcctccaaaaaatacatgcttcccttcccttaatctgtactgttgggattgttacccctccaaattagctgccttatttcaaaagtcagtgaaattactgcacttgatgagggtcacaaaaataccacttgattgtttctttagttgagaatgctgggattcagactcgaatagtggatagatacacacaaatgcaaggacttttttgtttactccagatttggggtttattttgagtggcatgcttcaaatagttcataaagatccttgcattaaatttctgaaccatttctttcaacttcttagtgtgtttagacaaggagaacataaattgaaaccatagccctttctgtattttttcg

SEQ ID NO: 4946 - DNA, 505 bp, Homo sapiens
  misc_feature (1)...(505): n = A,T,C or G
aggtgtacactggacgatacaggcatcgggcacggaaccccgggtcgacccacgcgtccggaaagcgtgtggagcccgttcctaggggcccagctccctttgccccaagagatccagctcctcgcctttcctggggcgttccgcctttatttctggtttctcctgcagtgtagcctccatccttcttgctgcctgagaagcctggtttttcttagaggtgtggggactgcacggcgctcaaagaccatcttgggaagcccgtgcctatttcccagatagacaaactgctccattcgcgtcctgtttctctccaaggggaaccacagtactaatattttgcttctccctcatgcagacacccgctagggacgagggtgacctagaggttattattcccttattcaccaagacattttcagttttaggtaacagaaaaccctactcaatctggcttaaggaagaaaaggaagntggtggcttatatatggggtctaacacgagctgg

SEQ ID NO: 4947 - DNA, 416 bp, Homo sapiens
cttttgtcctttcccttttgactgtctggtatctttgggtcccaaatggcctggcgtggtagcacatatctctattccaagctactaaagaggctgaggcgagatggggagcgggttacatgagcccaggagttctaggccatagtgtgcaatgaagatgcctgtgaataaccactgtactctaccctgggcaacacagcaagaccctatctcttaacaaaaaaatgatggtacagttttggatgtgcagacacatgtcaatacattcttgccccttgcaatcctaggaaaatgctgtcctggcttttccttcccctgaccttgtgcatatttccatagcactgggaaatctaatttctctttcctccttcactcatcttgacccaggagtggtaacttggaaatggccatgtcag

SEQ ID NO: 4948 - DNA, 450 bp, Homo sapiens
  misc_feature (1)...(450): n = A,T,C or G
gatttcaactacacaatactatcattgtcaggactatgacctcaggcactctaaacatatgttttgtttggtcagcacagcgtttcaaaaagtgaagccactttataaatatttggagattttgcaggaaaatctggatccccaggtaaggatagcagatggttttcagttatctccagtccacgttcacaaaatgtgaaggtgtggagacacttacaaagctgcctcacttctcactgtaaacattagctctttccactgcctacctggaccccagtctaggaattaaatctgcacctaaccaaggtcccttgtaagaaatgtccattcaagcagtcattctctgggtatataatatgattttgactaccttatctggtgttaagatttgaagttggccttttattggactaaaggggaactcctttaagggtctcagttagcccaagn

SEQ ID NO: 4949 - DNA, 450 bp, Homo sapiens
  misc_feature (1)...(450): n = A,T,C or G
actagccaggtgacccctcacactcacctagccgccatggacatcgccatccaccgcccctggatccgccgacccttctttgctttccactcccccagccgcctctttgaccagtgcttcggagagcacctgtcggagtctgatctttgcccgacgtctacttccctgagtcccttctaccttcggtcaccctgcttactgcgggcacccagctggtgtgacactggactctcaaagatgcgcctggagaaggacagggtctctgtcaacctggatgtgaagcacttctccccagaggaactcagagttaatgtgttgtgagatgagattgaggtgcatggaaaacatgaagagcgccaggatgaacatggtttcatctccagggagttccacaggacataccggatcccagctgatgtagaccctctgaccattacttcatccctgtcn

SEQ ID NO: 4950 - DNA, 478 bp, Homo sapiens
aaggacaaactaaaagaagcaaactactctaaaaattagaaaatttagaataataaagtaaactaatagatagctgaagaaaataatttataataaaaaaaatggtggaaattactaaattagaagagaaaaatggtagaaaaggttggtttttaaatgaatcaatataatagacaaactttgttaacctccttttttttttttaagggaaaaaaccatgagtttttaaattcgggttgaaatttcaaaacatttaaaaaaccttcagactttttcacagtactttgaaaataaaaggggatacttttttaggaaaatacaggacacaaaaattgaccccagtaaaaatagaaagtttaaatagagtttcatagaagtaaacctgtgttaaaactccctttaaaaagaccactgtccccacatgttaagagaaattcaaccatattgttatttttgaaattcaattaattaattaatg

SEQ ID NO: 4951 - DNA, 273 bp, Homo sapiens
aataatctcccatattgtaacttactactccggaaaaaaagaaccatttggatacataggtatggtctgagctatgatatcaattggcttcctagggtttatcgtgtgagcacaccatatatttacagtaggaatagacgtagacacacgagcatattaaaaaaaaaaaaaaagggggggccgttttaaaggatccttgggggggcccaagtttacccgggcaggcaacgttaaagttttttccttatggggagcctaattataacctacttg

SEQ ID NO: 4952 - DNA, 404 bp, Homo sapiens
  misc_feature (1)...(404): n = A,T,C or G
cagaaagaaatgaagtgactcagcttctggcttctctgctacatcaaatatcttgtttaatggggcagatatgcattaaatagtttgtacaagcagctttcgttgaagtttagaagataagaaacatgtcatcatatttaaatgttccggtaatgtgatgcctcaggtctgcctttttttctggagaataaatgcagtaatcctctcccaaataagcacacacattttcaattctcatgtttgagtgattttaaaatgttttggtgaatgtgaaaactaaagtttgtgtcatgagaatgtaagtcttttttctactttaaaatttagtaggttcactgagtaactaanatttagcacacctgtgtttgcatatttttttggagtgcagaatattgtaattaatg

SEQ ID NO: 4953 - DNA, 416 bp, Homo sapiens
cccacgcgtccgctcgatagcagggtagactaacagtagttcccaaataaaggcacacaggagaaaatgaatcaatagaatctaattaaaattactactccagggaataagaagtattgaggatttattttattttgaattggttttaagtatggaataattgtctttacagttataaaaagtaattagtggtgtttacaaaatgttgggaatttctgctttgacagataggtaagtcccatgggaatttctgctttgacaaatagttaagtcccatggccttcagagaggcaggaagcagaaactttcaaaaaagtaacatttctctggatttaatgtggaaatagagaaaaatttaaagaataattaaaaaaccatggtagatgaaatttggtgattacatatagtttcggatg

SEQ ID NO: 4954 - DNA, 397 bp, Homo sapiens
  misc_feature (1)...(397): n = A,T,C or G
caaagttatgtagtacaggtgtttaattgttgatggaattaaaatcacagctgaattaattaaaagatcaaagaataaaagtgtatcacttgcttacaaaggtaaggaggtctgaaaaacaaaaatgtaggttacttggtacagaagaacattttattaaaagacttggagtaatctatgaaacaagtcttagctatatctactgtattcattttggctgtagatatagctcttcagttcttttcaataaagcaggaatttttaaagctccgctgttactttggaatgtgtaatacaatatctctctatatattcatttgtatttttgtaaattatatggagcaataacaaagtgtttccaaatctcattttcaggtagcttaacactaatcctttn

SEQ ID NO: 4955 - DNA, 497 bp, Homo sapiens
  misc_feature (1)...(497): n = A,T,C or G
agggggnagcccccccccccactgatcccngttangataggcnctcgaancccgcgncgacccacgcgtccgtgccaatcaacacactgccaatgcgggtgggctaagccgccaggatgcctgcagcagatggacgctgcccatcctcgagccagccagctgggggcagagaggtgggtggcgggcacctcatgccagctgagaccaagagtggttgtatacatttctgcagcttgcagatttcatttttttggtcaccctttaagtgtccttctctcccaggatgagtgaggagctgtgctgatgttgggaacttatctttttccaggatccataacatttaggggaattatttgcgggctttcctagtgtattctaagaagttctaactctccatcaagaagcccaagattcctggagtctttttttcctctgccctgatcaactggggcccaggaaaagcaatgtctcttcacgggcctcagggccccagcaga

SEQ ID NO: 4956 - DNA, 416 bp, Homo sapiens
  misc_feature (1)...(416): n = A,T,C or G
ctcctctttgctggatgcacagggtttcagtgatctttataaaagtccatcacccactccagtaatgggatctcccagttgtgacccatttaacacaagtgttcccgaagagttccatactaccatcttgcaagtttccatcccttcattattgccagcaactgtaagcatggaaacttctgaaaaatcaaagttgactcctaagccagagacttcatttgaagaaaatgatggaaacataatccttggtgccactgttgatacccaactgtgtgataaacttttaacttcaagtctgcagaagtccagcagcctgggcaatctgaagaaagagacatctgatggggaaaaggaaactattcagaagacttcagaggacagagccccggcagaaagcaggccatttgggacccttn

SEQ ID NO: 4957 - DNA, 476 bp, Homo sapiens
  misc_feature (1)...(476): n = A,T,C or G
cccacgcgtccgcacccggtcggcccggcacagccatgatcaaggcgatcctaatcttcaacaaccacgggaagccgcggctctccaagttctaccagccctactgaagatacacaacagcaaatcatcagggagactttccatttggtatctaagagagatgaaaatgtttgtaatttcctagaaggaggattattaattggaggatctgacaacaaactgatttatagacattatgcaacgttatattttgtcttctgtgtggattcttcagaaagtgaacttggcattttagatctaattcaagtatttgtggaaacattagacaaatgttttgaaaatgtctgtgagctggatttgattttccatgtagacaaggttcacaatattcttgcagaaatggtgatggggggaatggtattggagacaaatatgaatgagattgttacacaaattgatgcacaaaataagctggn

SEQ ID NO: 4958 - DNA, 417 bp, Homo sapiens
cgaacccttgccactcatcttccagatcacaccgctgaacgtgacccagtggctgatggtgctgaaaatctccttgcccgtgattctcatggatgagacgctcaagtttgtggcccgcaactacctggaacctgttcttagctcagaactttagttgtactctgcttgaggggaagaaggctcctgctctgctgtcaatactggagtaaccgcttcctaaaccattttgcagaaatgtaagggtgttcggttgcgtgcatgtgcgtttttagcaacacatctaccaaccctgtgcatgactgatgttggggaaaaagaaaagtaaaaaacttcccaactcactttgtgttatgtggaggaaatgtgtattaccaatggggttgttagcttttaaatcaaaatactgattacagatgg

SEQ ID NO: 4959 - DNA, 490 bp, Homo sapiens
  misc_feature (1)...(490): n = A,T,C or G
gggtggaggggnnnnncctatgaaccatcnangagagcntccgacccccccgaccacgcgtncggacagncaagaagaggaaagtgtgtgaagacccaagtttggctctgctttttgcctggccatgtcaccttgaagctgtgacctgactccctatattgtttcctcagcagtagaccaaaggcaatggtgtctgccctcctaccttagaagacaaatgcacgggcatttcaccacagagaggacctttgtgctcactttggcccaggaggcagtgatgctcatggttgcatgactttatgagtcgctgggccagggtgaggacctgggcctcctgactcctggcccagagttcttgtccatcagttcatactgcaattttatgtgaaagcattatgactgtcctacccatgggagagtaaatgtagattgaatgctaggagtcttaaagctggagaatatagatattgaggtccccatttgggaaacg

SEQ ID NO: 4960 - DNA, 396 bp, Homo sapiens
  misc_feature (1)...(396): n = A,T,C or G
aaattttagcaagttgcagaatgggttgggaagcacaacatttcatctctttgattctagacactatcctcagaaattagatttgaaaaatgagcttcattttcgaagaacatatttctttatagggggagaataattgactccattcaagtgttcgctcctgtttcaatcgactatggctgaagagtgaggagacatttggaataaatatggcttctgggggcccattcctatggatcagcagctggcttctggaggcccattcctgtgaatcgtcgatctcatagaagataatattggtggaaggcttacctcattgatgctgaacatcctaaaaagcttctgctgctttgagtcactgttaaagaccaccanacatgaattttttaaaaaaat

SEQ ID NO: 4961 - DNA, 470 bp, Homo sapiens
  misc_feature (1)...(470): n = A,T,C or G
agaaacacaattgataccntgcgctgagaccgtagatgccgggtcgacccacgcgtgcggtcagggacaagatggagccaccggtgcaggtctctgcgctcatcaagctcggccgctactccgccctgttcctcggtgtggcctacggagccacgcgctacaattacctaaaacctcgggcagaagaggagaggaggatagcagcagaagagaagaagaagcaggatgaactgaaacggattgccagagaattggcagaagatgacagcatattaaagtgagtgaccctgcgacccactctttggaccagcagcggatgaataaagcttcctgtgttgtgtgaaaaaaccaacaactagaatataataatgggggggggcttttttaaagagacctgagggggccaatattggcccggaggtgtgaaagaaatgcttcctccctatgagggttgtgctaatgagaaggtg

SEQ ID NO: 4962 - DNA, 418 bp, Homo sapiens
attaagaaaaacagcacaatatctagtattagatggagctagggactctggattctctctcatggaatcaaaattaccataaattttaaggcccaccattatttgatgtattattaagaaaaaaaaagtcaccaattaaactatgacacaaggctatcttattacttagtattttattttatagttattggaagctattttctgtatttagatacagactttaaccactgattatgcccaactatatgtatgaagaaaatataagcaaagtttgcaaaatgcatggctggaagtctgaaataaattaattgtctgagctgcaaagcagagaaatgcattcaatcaacagctgtcaggacctagggtgtttctgacactgaacgaggctctggtggtatggaggtgcacacaagaaggg

SEQ ID NO: 4963 - DNA, 398 bp, Homo sapiens
agagaccgtgctggagttcgccctgccggaaagcagcacgccgccgcggcattttacgacgtcggcggtgacaggccctgggactctgggaatacccagcttcctccccgcaacctggtgaaagccaacgcaatgttcggtgcgggggacgaggacgacaccgatttcctctcgccgagcggcggtgccagattggcctcactttttggactggatcaggcagctgctggccatggaaatgaatttttccagtacacagccccaaaacagcctaagaaaggccagggaacggcagcaacaggaaatcaggcaacaccaaaaacagcaccagccaccatgagcactcccacaatactggtcgcaacagcagtccatgcatatcgatacacaaatggtca

SEQ ID NO: 4964 - DNA, 409 bp, Homo sapiens
aaggcatcaaccacgagtgtaagctgtgcaaccagatgttcgactccccggccaagctcctctgtcacctcattgagcacagcttcgagggcatgggcggcaccttcaaatgccccgtgtgtttcacagtcttcgtccaggccaacaagttgcagcagcacatctttgccgtgcacgggcaggaggacaagatctacgactgctcacagtgccctcagaagttcttcttccagaccgagctgcagaaccacacgatgagccagcacgcacagtgagggatcgctcaacaggacacctctccgcagaaggcttgccggagacgccgtggggagggccatttgaacattacatccaatcaaagtgtcatttgcaacccagatgtaaaactctaatgatttggccatgaggc

SEQ ID NO: 4965 - DNA, 398 bp, Homo sapiens
acgagacaagtaccttcacacaaattgtttggcagctttagcaaatatgtcggcacagtttcgttctctccatcagtatgctgcccagaggatcatcagtttattttctttgctgtctaaaaaacacaacaaagttctggaacaagccacacagtccttgagaggttcgctgagttctaatgatgttcctctaccagattatgcacaagacctaaatgtcattgaagaagtgattcgaatgatgttagagatcatcaactcctgcctgacaaattcccttcaccacaacccaaacttggtatacgccctgctttacaaacgcgatctctttgaacaatttcgaactcatccttcatttcaggatataatgcaaaatattgatctggtcatctccttct

SEQ ID NO: 4966 - DNA, 438 bp, Homo sapiens
gcggtccccgcggcgctgatcctacgggagagccccagcatgaagaaagcagtgtcactgataaatgcaatagatacaggaagatttccacggttgctcactcggattcttcaaaaacttcacctgaaggctgagagcagtttcagtgaagaagaggaagaaaaacttcaagcggcattttctctagagaaacaagatcttcacctagttcttgaaacaatatcatttattttagaacaggcagtgtatcacaatgtgaagccagcagctttgcagcagcaattagagaacattcatcttagacaagacaaagctgaagcatttgtcaatacgtggtcttctatgggtcaagaaacagttgaaaagttccggcagagaattctggctccctgtaagctagagaccgttggatggcagcttaaccttcagatggctcaa

SEQ ID NO: 4967 - DNA, 447 bp, Homo sapiens
  misc_feature (1)...(447): n = A,T,C or G
gcttctctccagataccccatggagcaactgtaaaacgaatgtacatctacagtggcaacagcctgcaggataccaaggctcccatgatgcctctgagctgtttcctgggcaatgtctatgctgagagtgtagatgttcttcgagatggaactggacctgcaggtttacgacttcgcctacttgctgcttgagaatgnnngaccnnnnnnnagaagttacncggcgctacataaatcctggagggtctaaagtagagccttggccatgatggcttatacagaatggttataaaacacctgggctctatggagtaaaagctggggtgcccagtctattcgcatcattcctancctgatgacaggaaactgaagctgactattattatagtacttgactataggcccgcagcttctatgtgacacgactgcgcacgagcgagaactttn

SEQ ID NO: 4968 - DNA, 417 bp, Homo sapiens
cccacgcgtccgaccacgcgtccggaaagcggctttaacatatctgaacacacaatagctaagacccaaactgggattatataccccactatgcttagccctaaacctcaacagttaaatcaacaaaactgctcgccagaacactacgagccacagcttaaaactcaaaggacctggcggtgcttcctataataaaaaaaaagctaagaaaactggggggcccccctaaaaatacccgcgggggggccaaagtttacccgggtaagcaacataagacttttgcctcttaggtggctctattctactcctgctcggatatgctgtagaggaggccttatctgggggggggagaacagtcgaccctccctctccagggaactactcccacccgggagcctaagatacctaaggtcttcg

SEQ ID NO: 4969 - DNA, 398 bp, Homo sapiens
  misc_feature (1)...(398): n = A,T,C or G
ccgcgcctttctcgcttctgacgaggagctgtgttgtccgatccgccggtgctgggcctgggcgcgtgcgtgctctcaaccaaccgcctctgagagcgcccactcgagcgccccgggagccatagggcggtggttctcggcgggacccttctgtgggcccagggggacaaacgtggctctcactccagcacatgcacattgaagcaaggtaaaggatttaatatgaagcacagaagcacatagggccaaatagcaagcgctagatggtacacatttggtgagcagggcagcatttccttctcccactgctgctgagatggcanaaattagtcgaattcagtacgaaatggaatatactgaaggcattaatcagcgaatgaggggcccagaaaagctaa

SEQ ID NO: 4970 - DNA, 417 bp, Homo sapiens
gcttcccatccccaaaaggcgccctccgactccttgtgccgcactgctcgccgggccagtccggaaacgggtcgtggagctccgcaccactcccgctggttcccgaaggcagatcccttctcccgagagttgcgagaaactttcccttgtccccgacgctgcagcggctcgggtaccgtggcagccgcaggtttctgaaccccgggccacgctccccgcgcctcggcttcgcgctcgtgtagatcgttccctctctggttgcacgctggggatcccggacctcgattctgcgggcgagatgcccctgggacacatcatgaggctggacctggagaaaattgccctggagtacatcgtgccctgtctgcacgaggtgggcttctgctacctggacaacttcctgggcgaggtggtggg

SEQ ID NO: 4971 - DNA, 454 bp, Homo sapiens
  misc_feature (1)...(454): n = A,T,C or G
tctcgttggnactggcgnacacgcncggaatttctggggcgacccacgcgtccgcacaagtgctatgattacaggtgtgagccactgcgcccggcccattttgcttattttaataaattcagtaaatagttattgagtgcttgctgtgcgtcatgctcagtgctaagcatctatcgtcatgttctaggaagggggaacaatgaggggactccttcctggcgcctttatgataccgcctcgcactttatctctctgaagtggttttgaaatcccttaaaccagggactctcagccttggcgctgatgacatctgggcgctggagaattctttgctgtagaggatgtcttgtgtattgtaagatgtttatcagcacccctggcttccacccactagatgccagtagcatccccggtcttcaaacattgtcatatgtcccctgcgggacataatcac

SEQ ID NO: 4972 - DNA, 409 bp, Homo sapiens
  misc_feature (1)...(409): n = A,T,C or G
accatcaacgtcaaggagctctgcgatccttgctggtttatagttctgaacctccttggcacccacctgggccacagcgccatggacaacatgtgccacctcatggaggacagagcctacatggaggacgcgcccctgctgagaggagccgtgttttttgtgggcatggctctctggggagcccaccggctctattctctcaggaactcgccgacatctgtgttgccatcattttaccaggccatggcatgtttgaacgaggtggngtcctatgagatcgtcctgtccatcaccaggctcatcaagaagtataggaaggagctccaggtggtggcgtgggacattctgctgaacatcatcgaacggcttctttagcagctccagaccttggacagcccggagctcagga

SEQ ID NO: 4973 - DNA, 415 bp, Homo sapiens
aggtgacatcaggacgtttacagcctccacatgaattgagtgttcatttacctcagtattaccgtgttcatttttgtcctcgtgctacagttagctccctgccgcctcttgcaggtcttacttcagctcttgcctgtgacccacacagcttctgggctctgcctctgctctaagaagtgctgtgggggtagagaaccaggaaggacatgctgttgggaatgtacacctgggcagaggtggccctgttaagatgtgactgtagccacagccagggatgggatccctgggtctctggaatctgaaacctcaacaaataccagtcttgacccctagcagcagagataagaataaaggggttggtttgctattaagtcagatgggggctctctccttgtcatgctgtccctgtgggtaa

SEQ ID NO: 4974 - DNA, 470 bp, Homo sapiens
  misc_feature (1)...(470): n = A,T,C or G
agaaacccccgtctctactaaaaatacaaaaattagccgggtgcagtggcaggcacccgtaacccgtaatcccagctactcggtaggccgaggcaggagaattacttgaacccagggggcggaggttgcagtgagccgaaatcgcgccactgcactccagcctgggggacagagcgagactccatctcanaanaaaaaaaaaaaaagaaaaccccccggggatttaaagggggggcttttgcgccccatttatttttggggttgggggggccaaaaaaattttgggcccaaaagttttttgtaaaaaagaaaaaaaaattgtttaaaaaaaaaaaaaaaaaggggggggggggggggggggggtttcccccgtaacctcaaaattttgggggggcccgggggggaagtacctttggccccagggtttaaaaaccccccggggccaatttttaaacctttgtttttaaaan

SEQ ID NO: 4975 - DNA, 396 bp, Homo sapiens
atctgaccccttcaatcatggccttgccaaccagatagccacttccttcattacagtttccactccagtgctggtatcaatcctctccttttcatagaaataggctgcccttcctattccctccctttctccccaaactccttcaataattggcactaacccagagacccgaggccccatactcacccttggacagcccttgattatggagctacagagtgactacgtcagacgtcaaatcctaatctcttcagttcagctccacgccactaagtggtgcttgaaagagactgtttaagtacatggctttgtggtgttttttttttttttccccctccttcttcccagggaattttttaaaaaaaaggcatttggacctaaaaccctttcccaagg

SEQ ID NO: 4976 - DNA, 498 bp, Homo sapiens
  misc_feature (1)...(498): n = A,T,C or G
gaggaggnngnnnnttataatngccctcactgaaacnatgcgnanccgcnccggaantcccggggcgacccacgcgtgcgcccacgcgtccgagctgacgctccgtattgcagactgttgagtcagacggcgctatgtacgccctcttcctcctggccagcctcctgggcgcggctctagccggcccggtccttggactgaaagaatgcaccaggggctcggcagtgtggtgccagaatgtgaagacggcgtccgactgcggggcagtgaagcactgcctgcagaccgtttggaacaagccaacagtgaaatcccttccctgcgacatatgcaaagacgttgtcaccgcagctggtgatatgctgaaggacaatgccactgaggaggagatccttgtttacttggagaagacctgtgactggcttccgaaaccgaacatgtctgcttcatgcaaggagatagaggactcctacctccctgtcatcctggacatcatag

SEQ ID NO: 4977 - DNA, 411 bp, Homo sapiens
aaggaccctatttgaacatcttccaactgaaaaatatctacgagtgttaaggaagtataaaaaagagggaaaatggttatcccttttctaaaattttttaagagtcactttttaaaaaagggagaaattatggttcacatacaagtatacagtgaacacatatcaaagattctatctaaatcatccattactgtgagaaccagtaagatattacaaccaagtcaaaagaaaattttaagaataatacatacaaaatgaataaagaattctgaattgaatatacaagtagatgcaaaatgggtctatccacagggcaataatcacttgcattaccctggaaacaactaatttgcatttgtatatgcaagaataatttgcattatagtcagtattcaacaatttatgggctcg

SEQ ID NO: 4978 - DNA, 418 bp, Homo sapiens
cggacgcgtgggctgggagggacactgtggcagagcttctggagagaaatgaggtttgcaggccattggagttggactggacatgatggagggtcactttccccagagcgatgtgataggccaggttctgcctgaagcaacaactacagcatttgaatatgaagatgaagatggtgatcgaattacagtgagaagtgatgaggaaatgaaggcaatgctgtcatattattattccacagtaatggaacagcaagtaaatggacagttaatagagcctctgcagatatttccaagagcctgcaagcctcctggggaacggaacatacatggcctgaaggtgaatactcgggccggaccctctcaacacagcagcccagcagtctcagattcacttccaagcaatagcttaaagaagtcg

SEQ ID NO: 4979 - DNA, 449 bp, Homo sapiens
ctataaacaaataaactgtcctgagcttatgcacaccttttggtttcatctccccctcagaatgtataaaaactcttggagaatgaggttccctgtctcctattatgttggttctccctttcctcatacacctcctatgaaaaaacttcctaccactcaccctagcattacttatatgatacgtctccatacccattacaatctccagcattccccctcaaacctgagaaaaagagctcaccgccctggatggcaatgcttaaaaataatgggaatcatgaggggggggggaattttaatagacccccggggggcccccaatcacaggatccccgcgaagtacctgtttttcctcttggagggcgtcataaaagttctgccgaggaagctttggggggacttcttttctttgttgggggaaagcttgaaccacgccccgtagctgattt

SEQ ID NO: 4980 - DNA, 421 bp, Homo sapiens
agcagtcacctcccaaccactcaagatcttcctcctcccagaggtcctgccaacaggagcattgcaaacccaacaagaatggcctgaaaggatccggcagcctccaccaccactcagccagcactaaaaccccccaagggaagagtaagccagccagtaaactcagcagataggagccaggctgcatctctttgaaaggtgtgagatcttcctcctaaacctgatgcatgtgtgtccctgtactttctatgtaaaaaaatcagtgttgatcttctcttgcaaaagaaagtaacatgatcaattatttataagaagacataatacatgataaggaattacctaaggcaggcagcaagtagattaggaatcaatgtctttgtacaagaaggaaaaatagagcaaaaatccaagggggagaaac

SEQ ID NO: 4981 - DNA, 408 bp, Homo sapiens
gcctctggcgaacatggcgcttgtcccctgccaggtgctgcggatggcaatcctgctgtcctactgctctatcctgtgtaactacaaggccatcgaaatgccctcacaccagacctacggagggagctggaaattcctgacgttcattgatctggttatccaggctgtcttttttggcatctgtgtgctgactgatctttccagtcttctgactcgaggaagtggcaaccaggagcaagagaggcagctcaagaagctcatctctctccgggactggatgttagctgtgttggcctttcctgttggggtttttgttgtagcagtgttctggatcatttatgcctatgacagagagatgatatacccgaagctgctggataattttatcccagggtggctgaatcacgg

SEQ ID NO: 4982 - DNA, 467 bp, Homo sapiens
  misc_feature (1)...(467): n = A,T,C or G
cacattcagacgatgctgaagcgcgcactcagctatcgcacgctggagctggagctgctggagtggcgggagcgggagctttttgagtactttgtggcggaggccctcaagaagaagccatcgagagacagctacctacccgagggctgctaccagattaccaagctggaccgacccaccacgcagatgcgagaggcataggataggctcaaagccattccccagttttgcttccctgatgccaaggactggcttcctgtgtcagagtatagcagtgagaccttttctttcatgctgactggggaagatggcagcagacgctttggctactgcaggcgcttactgccaagtgggaaagggccccggttgccagaggtgtactgtgtcatcagccgccttggctgcttcggcttggtttccaaggacctagatgaggtggagcgccggcgtgggatctccgctgcatn

SEQ ID NO: 4983 - DNA, 442 bp, Homo sapiens
actgagcaccttgtgacccccattcctgcccgccagagaacaacccccatttgactgtaattttcctttacctacccaaatcttgtaaaacggccccacccctatctcccttcgctgactctcttttcggactcagcccgcctgcacccaggtaaataaacagccttgttgctcacacacagcctgtttagtggtctcttcacacggacgcacgtgaaatttggtgccgtgactcgtcttcacatggacgcacgtgaaaataaaatcttggataagtcactttttctttctttctcagtgacctcttctgttcagtagtaaagaaaatagttgttagaagttgtaacattacaaaaaaaaaaaaattaaaacatcaggtaatgggaaagtgttataacacagtcagctgatcctaaaaagttctgagccattcatacaaatc

SEQ ID NO: 4984 - DNA, 418 bp, Homo sapiens
gagaccgtgggaggtgacttcatcaatgctcctaccctgagttcttgagacagacctggaccgatcccctaccttgggtgtgcactcttgggagaacgaggggcggagggtccgaatctcctctcagcctttaagctcacctggtcagaatccttggatgagcctgtgggaccgttcctcctagccctgtggtttggaaccagtggctttgggactgtaagaggatggacaaagattctcaggggctgctagattcatccctgatggcatcaggcactgccagccgctcagaggatgaggagtcactggcagggcagaagcgagcctcctcccaggccttgggcaccatccctaaacggagaagctcctccaggttcatcaagaggaagaagttcgatgatgagctggtggagagcat

SEQ ID NO: 4985 - DNA, 507 bp, Homo sapiens
  misc_feature (1)...(507): n = A,T,C or G
cgcgctccatttgatcagtgaggcttggnaccggcccggaannnccgggncgacccacgcgtgcgggagaaccacacctactgcatccgctttgttcccgctgatatgggcacacacacagtcagcgtgaagtacaagggcgagcacgtgcctgggagccccttgcagttcaccgtggggcccctaggggaagggggagcccacaaggtccgagctgggggccctggcctggagagagctgaagctggagtgccagccgaattcagtatctggacccgggaagctggtgctggaggcctggccattgctgtcgagggccccagcaaggctgagatctcttttgaggaccgcaaggacggctcctgtggtgtggcttatgtggtccaggagccaggtgactacgaagtctcagtcaagttcaacgaggaacacattcccgacagccccttcgtggtgcctgtggcttctccgtctggcgacgcccgccgcctcactgtttctagcctg

SEQ ID NO: 4986 - DNA, 481 bp, Homo sapiens
  misc_feature (1)...(481): n = A,T,C or G
tatttgaccgtcttattgaagcgtctgcgnanccgcnncgaaccangcgtgcgccacgcgggcgggatctctaaggtctctcggctgctttggcattccttttcccacaacaggtgaccagaggttttactggtggtgttcagacagtaactttaattccaggagatggtattggcccacaaatttcagctgcagttatgaagatttttgatgctgccaaagcacctattcagtgggaggagcggaacgtcactgccattcaaggacctggaggaaagtggatgatcccttcagaggctaaagagtccatggataagaacaagatgggcttgaaaggccctttgaagaccccaatagcagccggtcacccatctatgaatttactgctgcgcaaaacatttgacctttacgcgaatgtccgaccatgtgtctctatcgaaggctataaaacccccttacaccgatgtaaatattgtgaccn

SEQ ID NO: 4987 - DNA, 426 bp, Homo sapiens
cttggagtgatgtggggtgactggggaggagcattgttcatactcagctccacctattcatgggaaacacttagatgctattttaaaatatccgtggccaggcgcagtggctcatgcctgtaatcccaacactttgggaggctgaggcaggtggatcatgaggtcaggagtttgagaccagcttggccaatatggtgaaaccccgtctctactaaaaatacaaaaagtagctgggcatggtggtgtgaacctgtagtcccagctacgcaggaggctgaggcagaagaatcgcttgaacccaggaggcagaggttgcaatgagccgagatcgcaccactgcactccagcctgggcgacagagcgagactctgtctcaaaaataataataaataaatataacaaaaaataaataaataaaaatatcgg

SEQ ID NO: 4988 - DNA, 509 bp, Homo sapiens
  misc_feature (1)...(509): n = A,T,C or G
agctcntccactggaagataacggcactcggcccggaaccccgggncgacccacgcgtccgcccacgcgtncgcccacgcgtccgagctgagatcgtgccagtgcactccagcctggatgacagagcgagactccatctcaaaaaaaaaaaaaaaacttaaggccagctgcggtggcttatgcctgtaatccagcactttgggagcccaaggctgggggatcatctgaggtcaggagttcgaaaccaacctgtccaacatggtaaaacccccatctccactaaaaatacaaaaattagtcagacatggggtggggggcctgtaatcccagctactcgggaggctgaggcaggaaaactgcttcaaaccgggaggcggaggttgctgtgaactgaaattgtgccactgcactccgttctgggcaaaaagagcaaaactccatttcaaaaataaaaagaaacttgatcccacaaatgtaccctgtgaattaagaagcaagtataattactg

SEQ ID NO: 4989 - DNA, 442 bp, Homo sapiens
  misc_feature (1)...(442): n = A,T,C or G
agaaacagctcatcctgctctacacatttcctcaagtgggacagtgatcagctttggtgagaggagacggctgacggaaatcccgtcagtgctgggtgaggagctgccttcctgtggccagcattactgggaaaccacagtcacagactgcccagcatatcgactcggcatctgctccagctcggctgtgcaggcaggtgccctatgacaaggggagacctcatggtacatgcactgctctgagccacagagatacacatttttctacagtggtattgtgagtgatgatcatgtgactgagcgtccagccagagtgggcatcctgctggactacaacaaccagagacttatcttcatcaacgcagagagcgagcagntgctcttcatcatcaggcacaggtttaatgagggtgtccaccctgcctttgcccttgagaaacct

SEQ ID NO: 4990 - DNA, 399 bp, Homo sapiens
  misc_feature (1)...(399): n = A,T,C or G
cggacgcgtgggtaaaatcattgtcaaaattaatatgattattaatcagaatatcagaatgtgattcactatttaaactatgataaattatgataatatatgaggaggcctcgctatagcaaaaatagttaaaatgctgacataacaccaaacttcattttttaaaaaatctgttgttccaaatgtgtataattttaaagtaatttctaaagcagtttattataatggtttgcctgcttaaaaggtataattaaacttcttttctcttctacattgacacacagaaatgtgtcaatgtaaagccaaaaccatcttctgtgtttatggccaatctattctcaaagttaaaagtaaaattgtttcagagtcacagttccctttatttcacataagcccaan

SEQ ID NO: 4991 - DNA, 477 bp, Homo sapiens
  misc_feature (1)...(477): n = A,T,C or G
cggacgcgtgggctacactaatcttctataacgtggcttcctccctatagcagagctatcatttctttcaccgttctgagttattttccagcatattagagtccagaccaatgccttaaagaacagaggagccgggtacagtggctcacacctgtaatcccagcactttgggaggccgaggcgggtggatcacaagctcaggagatcgagaccatcctggctaacacggtgaaaccccgtctctactaaaaatacaaaaaattagctgggcgtggtggcaggtgcctgtagtctcagctactcaggaggctgagacaggagaatggcgtgaacctgggaggcagaggttgcagtgagccgagatcatgccactgcactccagcctgggcaacagtgcaagactccatctcnnannnnanannnnnnnnngggacnggaaanggaaaaaaaaaaaaaagggggggcccgtttaaaggg

SEQ ID NO: 4992 - DNA, 511 bp, Homo sapiens
  misc_feature (1)...(511): n = A,T,C or G
cgctgctcnatttggactagtgnagcctcggcaccggnccggaannnccgggncgacccacgcgtacgggaagaaaaaagggtctaccccgagccccggagcgagagctagtgcctgagcaacatccgcgagttcctgcgcggctgcggggcttccctgcggctggagacgtttgatgcaaatgatttgtatcaggggcagaattttaacaaggtcctcagttccttagtgactctaaataaagtaacagcagacatcgggctggggagtgactccgtgtgtgcccggccctcgtctcaccgcataaagtcttttgactcccttggatcacagtctttgcacactcggacttcaaaactgttccagggccagtatcggagtttggacatgaccgataatagcaacaatcaactggtagtaagagcaaagtttaacttccagcagaccaatgaggacgagctttccttctcaaaaggagacgtcatccatgtcacccgtgtggaagagggag

SEQ ID NO: 4993 - DNA, 400 bp, Homo sapiens
  misc_feature (1)...(400): n = A,T,C or G
cccacgcgtccggaaaagtaactcagagtgcatattcccaaattgttcagtttggcatgaatgaaaaggttgggcaaatctcctttgacctcccacgtcagggggacatggtattggagaaaccttacagtgaagccactgcaagattgatagatgatgaagtacgaatacttattaatgatgcttataaaagaacagtagctcttctcacagaaaagaaagctgacgtggagaaggttgctcttctgttgttagaaaaagaagtattagataagaatgatatggttgaacttttgggccccagaccatttgcggaaaaatctacctatgaagaatttgtggaaggcactggcagcttggatgaggacacctcacttccagaaggccttaaggactggan

SEQ ID NO: 4994 - DNA, 469 bp, Homo sapiens
  misc_feature (1)...(469): n = A,T,C or G
catgatcnccttgcggatagacacccgattgcccgggtcgacccacgcgtccgcccacgcgtccggagggtccttgggggcacagcccctcctgcagccctcccactatgggcaatctgggatctcaatgtcccacatggacctaagggccaaccccagttggtgatcccagctggagggagaacccaaagagacagctcttctactacccccacagacctgctctggacacttgctcatgccctgccaagcagcagatggggagggtgccctcctatccccacctactcctgggtcaggaggaaaagactaacaggagaatgcacagtgggtggagccaatccactccttcctttctatcattcccctgcccacctccttccagcactgactggaagggaagttcaggctctgagacacaccccaacatgcctgcacctgcagcgcgcacacgcacgcacacacacan

SEQ ID NO: 4995 - DNA, 530 bp, Homo sapiens
  misc_feature (1)...(530): n = A,T,C or G
cgctgcggaananaaaaccgacgtcntgatcttagnancttaanaaaaggnnngaacangcgcccggncaaacactgttccccatattccagaagacacatttcagtctttcaaattttttagcccctcgcgttagattcgggtgatagcaacagggagtgctaaggggtgctatttatgcggaatcatcaggaaaggcctccctgaaaaggatacataaacataatctattgtaaagatacgagaaagctcacagcatccctgagaagagtggagcagcaggcttggagcatgggtagaaacaaggacaggcagtcagatcacatccatcacagatccctgggtgctaaagcttgcaccacagatcctctggcattggataatgccagtccttccaaatgggactatcatcactgcagataactggaaattggatgttgctgctgcttccactaccacttgcaacacagtctcaaaagaaaagctggaatactcatctgactaatgatagtgtgattggaatataattt

SEQ ID NO: 4996 - DNA, 462 bp, Homo sapiens
  misc_feature (1)...(462): n = A,T,C or G
ttggaacccttcgtnagtacaacgtagaaccggcncgacccacgcgtncggataaccagaaagtctccaagacccgcgggaaggctattgccaccggtctctggaaatagagcctggcctgcttcaccaaagagctgctcctcgctcgcacctgcctccggcctgcactaccccagttcccgggccctcctgggcaccccacgcagctcctgtttggaaatggggagctggcctaagtgggagccaccactcctgcctgcccccacacccactccacaccagtaatataaagccaccacacactataaaaaaaaaaaaaggggcggccgctttaaaggatccttgagggggcccaacctatcgcgggcatgcaacaccaaatttctttccctaaagggaggctaataataacctagcttggaactttgggaaaggaaccttattgtggtgggggaacaaaag

SEQ ID NO: 4997 - DNA, 495 bp, Homo sapiens
  misc_feature (1)...(495): n = A,T,C or G
ggcntcnnnnnttttgacgccttgagtacccgtccggaantgccgggacgacccacgcgtgcgccagaactgaggaccctgaagcatgtgttcaacagccatttcatgacgttaacggacatgcgagcagaggacagagcttgagcacaggcagaagggcatgaaatgtgactggatccccaggcaggctggactggccagaaggcagaagcgcctggctggagggccacttggcaccaaagggaggaggtgtttttgtgcagcgccaaaaggctgggcttgattccataggaacaaggcgtacctttaaacatggagtgcttttgaggaagtgccaatggatgttggaaaggaatcattaaagtgaaaaagtaggcagtgagaactgttaggacatgaaaaataagagcctgaccaaggaagaaggcagatcaggaaatgtttcagacgtaggacacaatggttaatgatcttggggtttttttttcatttttg

SEQ ID NO: 4998 - DNA, 411 bp, Homo sapiens
aggcactataagtgtaataattcttaagcctgaggtttttgctcctgatcttcctgaacatctctaccattgaattaaaaaagcacttgctgttcgaaagcctctctagaggaacagaaaggataacgatgctaaattccgcctgattctaatacagagccggattcaccgcttggctcgatattataagaccaagcgagtcctccctcccaattggaaatatgaatcatctacagcctctgacctggtcgcataaatttgtctgtgcactcacgcaataaaccgattgtttacctattttatgaaaggcttgggcgcccgttttatgagagaccaggagggccctttcccgtcgctgactctgaatgtggtaactttttgctcagaggggaaccattttaattctggctt

SEQ ID NO: 4999 - DNA, 423 bp, Homo sapiens
  misc_feature (1)...(423): n = A,T,C or G
ctcacgcttacgagatccgcggtgatcnnnnnnagcttgatcaaccactggattttctgggtggggccattcatcgggggagccctggctgtactcatctacgacttcatcctggccccacgcagcagtgacctcacagaccgcgtgaaggtgtggaccatcggccaggtggaggagtatgacctggatgccgacgacatcaactccagggtggagatgaagcccaaatagaaggggtctggcccgggcatccacgtaaggggcaggggcaggggcggacggagggaggggaggggtgaaatccatactgtagacactctgacaagctgggcaaagtcacttccccaagatctgccagacctgcatggtcaagcctcttatgggggggggnctatctctttctttctctttctgtttcctggc

SEQ ID NO: 5000 - DNA, 465 bp, Homo sapiens
  misc_feature (1)...(465): n = A,T,C or G
cgcgagcggtcgcccttaattttttatcttttattcagtattttttatgcactcanacttgtcgaggggggcaacgtctgtgttggatagatacatcacaggtcggaataaaaaacaaagagaggggcgcatgcatgtaatcccagcactttgggaggctgatgcgggagaattgcttaagcccacaaggtcaaggcagtaagctgtgattgcaccactgcactgtagtctgggtgacaaagttagactcttgtcttgaaaaaacaaaacaaaacaccaggaattgggagcccggtgtggtggtgtgcacctgtagtcccagctactcaggaggctgatgcagtatgatcattttgaaccaggagttgaagactagcttgggcaaaatagccagacctcatctcagaataaattgataaataataaataaataaatatataaataagtaaataaaaggaatctgt

SEQ ID NO: 5001 - DNA, 469 bp, Homo sapiens
  misc_feature (1)...(469): n = A,T,C or G
attttattttttttaatcatatgaactaaaattgtcaattgtgaggtgtgcttttctcatcatgttggttatattgcacaattggttatatttatgacctgatattcaaagactctggcattgatagccagtgtgttttcttatttaactccgtttactacattctacatggtgtttacgtgatccacacttgaaatactagatcagtagacattcactaatataccaaaataaaatgaaaaattgagtttttccgtgaactttatactgtccagctctgttgattntaaagcctcttcatccaggtcagttcaggaagtatatctggagtacctgctctgtttttggctgtgagactagcactaaagattctggtacctttacccaaacctactgggctactaatacttctctcagcagttgatcaaatacaatagaccatgtaagctgcggccgctcatccactttc

SEQ ID NO: 5002 - DNA, 418 bp, Homo sapiens
  misc_feature (1)...(418): n = A,T,C or G
cttacacttaggagatttcaacttaanttganntgctctgaccacaaaaaaaaaaaaaaaaaaaaaaaaaaaaaaaaaaaaaaaaaaaaaangggggggggcccctttaaaaaaaaccccgggggggccccaattttccccggggggaaaaattaattttttttttttttaggggggctttaaaaaacccccccggggttttttgaaaaaaacccctttttttggggggggaaaaaagggcccccccccccccccaaaaatttaccccttgggggaaaaaaaaaatttttaagggggaaggggggaaaaacttttttttttttttttttttaaaaaattgggggnnnnnnnnnnncccccccccccccggggggggagcaggcgccccccccccccccaaaaagccccccacggagat

SEQ ID NO: 5003 - DNA, 472 bp, Homo sapiens
  misc_feature (1)...(472): n = A,T,C or G
cggacgcgtgggctataatgtgtctaggtatggatctctttatgtttatcctgctatcaanttgttgacattctggtgtgtgtaaattaatgtttttattgaatttggaaagactttagtcattactccttcaaatattctttctgtccttttctctcattcttcttctgggactcacataagctatgttggtaacttgatttcctgcaagtctaagctctgagttggctataataaagacaagcattgagaatggatcttctccaaggatctgccaggcaggtcaaatagtgacccttttctgggtatgaggctttctgaagagctccagactcattctgttttcttcagtggccactaagctcctggttttcatagcacagntctgaggctagctggtttccaagaatactgagtagctcgtaagaaggataggataagtttaaatgctacaaaaatgtgctattcttan

SEQ ID NO: 5004 - DNA, 404 bp, Homo sapiens
  misc_feature (1)...(404): n = A,T,C or G
gcgagcnnaccaaattctatagcatactcaaggagctgaaaaactggttgctgaacttgaaggagactctcataagtctcatggatcaaccagtcagatgccagaggcccttcaagcttctgatctctggtactgccccgatgggagctttgtcaagaagatcgtaatccgtggccatggcttggacaaacccaaactaggctcctgctgccgggtactggctttggggtttcctttcggatcagggccgccagagggctggacagagctaactatgggcgtagggccatggagggaggaaacttggggggagctcatagagaaatgcttggagtccatgtgtcaaggtgaggaagcagagcttcagctgcctgggcactctggacctcctgtcaggctcacac

SEQ ID NO: 5005 - DNA, 467 bp, Homo sapiens
  misc_feature (1)...(467): n = A,T,C or G
cccacgcgtncgctcataaattagagaagtacaaaacaaaatgttttggaaggtgatcctggctcctttggctctcataattgttttatagctgaaaataaaaagtcaggaaactggcccggtgcggtggctcatgcctgtaatcccaacactttgggaggctgaggtgggtggatcacctgaagtcaggagttcgagaccagcctggccaacatggtgaaaccctgtctctactaaaaatacaaaaaaaattagctgggtgtggtggcacatgcctgtaatcccagccactggggaggttgaggcgcaagaatcgcttgaacccggaaggcagaggttgcagtgagccaagattgccccactgcactccagcctgtgcgactgagcgagactcttatatctcataaaaaaaaaaaaaaaaaggcgaaaaaccgtaatccccatttaatgttttaaaaccagggatg

SEQ ID NO: 5006 - DNA, 447 bp, Homo sapiens
agtgactgtgttgtcagcatcttatcactgtgggcttactatgatgcctttagaagtcttttagaatgataatctttattttggaagtcagttatccttacatataaagttccaatttagaggtagtgaatttccaaatagaagtttatataatcatatacctttatcagaccaattgtgaatttccgaaaatagctgtagtataatttagtggaaacaactctagtctgaaaaaaatcatgagaatgttcttagccacagactgccatacttaactttgagtctgagtcacttaaatcatgttggccttcaaacttccccatatgtaaaatgagtgttgaactgattactgtggtcccattcagctaaaaaaataacaaacaatgcttagtctcagttcaccacctttattgttagtagagtagtctgatattcattgcagcatct

SEQ ID NO: 5007 - DNA, 391 bp, Homo sapiens
agcggagctggttgagccttcaaagtcctaaaacgcgcggccgtgggttcggggtttattgattgaattccgccggcgcgggagcctctgcagagagagagcgcgagagatggagatgggcagacggattcatttagagctgcggaacaggacgccctctgatgtgaaagaacttgtcctggacaacagtcggtcgaatgaaggcaaactcgaaggcctcacagatgaatttgaagaactggaattcttaagtacaatcaacgtaggcctcacctcaatcgcaaacttaccaaagttaaacaaacttaagaagcctgaaacttatttttttctgattgtaacgttgctgtgggaacgagaggggaagagtgtactgggggttgcgggggga

SEQ ID NO: 5008 - DNA, 522 bp, Homo sapiens
  misc_feature (1)...(522): n = A,T,C or G
cccccccccnnnnnaatgaccccgctgaccggtcggaatcccggtcgaccacgcgtccgaccacacgtacgaccacgcgtgcgtaatgcttgactgaagttataatggcacttcagtggccttgagacatcaattttgcaacgtatttccttcgtggaaaggatttagattgtaacccgcacacaaaagcacggagtttgtgaatataacacctgtcagccaactttagacagatggtaaagaccacatttgaataagtacacatctttcatatcttggatttgcagctgatggtactatgtggaaaatattagaaacttctatgtggaaaatattagaaactacagagtttgcgatatttagatactgaaatttatgtcaaaataacggctaggaataattctgtcaatatggagttgagcttatttctttggaaacccttttaagttgccttgctggctgtgagattttatatgtggaaacaaagatagatagatagcatgtaaattgggttgcgtttgg

SEQ ID NO: 5009 - DNA, 519 bp, Homo sapiens
  misc_feature (1)...(519): n = A,T,C or G
tgtaatggagnagaanttggancnccgttgtaccggttcggaattcgtgggtagacccacgcgttcggcggtgactgcaccgcccgccctgcctgacccgcccggaacggggctcgtcgccgccagtagccgcagcaccgcagccttgggcctcgcgccggctatggccgtgccctggggctgagccctcaggttgtgaccgagattcccgacgagagagactgaggggaagagaggaaggaggggcgggctcctggcaaggcattcgctcctgagcggaatcctgcaaagatggagaaggaggagacaacccgggagctgctgctgcccaactggcagggtgagtggctcccacgggctgaccatcgcccagagggacgacggcgtctttgtgcaggaggtgacgcagaactcccctgcggcccgcactggggtggtcaaggagggggaccagattgtgggtgccaccatctactttgacaacctgcagtcgggtgaggtgacccagctgctgaacac

SEQ ID NO: 5010 - DNA, 428 bp, Homo sapiens
gggaccatggcggcggcggcggacgagcggagtccagaggacggagaagacgaggaagaggaggagcagttggttctggtggaattatcaggaattattgattcagacttcctctcaaaatgtgaaaataaatgcaaggttttgggcattgacactgagaggcccattctgcaagtggacagctgtgtctttgctggggagtatgaagacactctatggacctgtgttatatttgaagaaaatgttgaacatgctgatacagaaggcaataataaaacagtgctaaaatataaatgccatacaatgaagaagctcagcatgacaagaactctcctgacagagaagaaggaaggagaagaaaacataggtggggtggaatggctgcaaataaaggataatgatttctcctatcgacccaacatgatttg

SEQ ID NO: 5011 - DNA, 336 bp, Homo sapiens
ttctggccaggcgtctgcgaaatcatatggctgtagcattcgtgctatccctgggggttgcagctttgtataagtttcgtgtggctgatcaaagaaagaaggcatacgcagatttctacagaaactacgatgtcatgaaagattttgaggagatgaggaaggctggtatctttcagagtgtaaagtaatcttggaatataaagaatttcttcaggttgaattacctagaagtttgtcactgacttgtgttcctgaactatgacacatgaatatgtgggctaagaaatagttcctcttgataaataaacaattaacaaataaaaaaaaaaaaaaagg

SEQ ID NO: 5012 - DNA, 392 bp, Homo sapiens
ggaattagccattttttttattgtaataaaggcaggtgctatttttttctggtgagattgcacctggataccaggcttttgtaatagttaacattaaacattcgattcataaagttaattcactgcttaagcatgtggctcatatttaggaagctatataaaattcagtttttcattcaacatttgctcttttgcatatgaagagatatttgtatttttcaaatgttaagtaaaacaagatgtgccaatatcataggtaaataaattagggaaaatgtgggactttatggctgtttttaatttactttcacccgatcttgattcttgaattagctatgtttatatttttagttctttcttattcaactcagatttgtcaagaaatgtaacct

SEQ ID NO: 5013 - DNA, 436 bp, Homo sapiens
  misc_feature (1)...(436): n = A,T,C or G
cccacgcgtccggacctaggtcgcggcgacatggccaaacgtaccaagaaagtcgggatcgtcggtaaatacgggacccgctatggggcctccctccggaaaatggtgaagaaaactgaaatcccagcactttgggtggctgaggcaggtggattacttgaggccaggagattgagaccagtgtggccaacatagcaaaaacccgtctcgacgaaaaatacaaaaaaatagcttggtatggtggcacatgcctgtaatcccagctactttggaggctcaggcacaagaatcacttgaacctacnaggcggaggttgcagtgggccaggatcgtgccactgcactttatttagccaggacaacactctgtctccaaaaaaaagtttctgaaggtaaaagatatactaaaggatatacatatactgcctcttctatgt

SEQ ID NO: 5014 - DNA, 448 bp, Homo sapiens
  misc_feature (1)...(448): n = A,T,C or G
ccacgcgtccgcccacgcgtccgcccacgcgtacgactagtcctacttcacaaagcgccttccaaaaaaaaaaaaaaaaaaaaaaaaaaaaaaaaaaaaaaaaaagggggggggccgttttaaaaaaaccccgggggggcccaaattttcccggggggggaaaaaaaaatttttcttctttttgggggggggttaaaaaaccccgcggggttttttgaaaaaaaaacctttttttggggggggaaaaaattggaaaacccccccccaaaaaataaaccccctaagggaaaaaaaaaatttttaaggggaaaggggggaaaaaaccccctttttgggggggccaaaaaaaaaaacttgcnnnnnnaaacaacacaacactctgtgtgcaaaaaaaagtgcccgaccccccccatattctaaaggtttacatatactgactctttatgaa

SEQ ID NO: 5015 - DNA, 410 bp, Homo sapiens
aaatatacataatctcagcaaaaaataaaagttattttaaaaataactaagtagaattatagaacaagaaaacaaaataacaggaatgaaaacattgctggataggttgagtagtagagtggagatgacagaatagaatcagttaacttgagaacagaacaataaagttcacccaatctgcaaaacagagagaaaaactgtctcagggacacaagggacaataaaaaaggtccaatatttctgttactaaaattctgggataaaatggaaaaatgactgacactagaagaattttaaagatataatgactgaaaacattttcccagatttggtgaaaatcaaaacctacagatccaagaagctgagagaattccaaacaggttaaattcaaacaaatccacaacaagatg

SEQ ID NO: 5016 - DNA, 389 bp, Homo sapiens
cggacgcgtgggctagttctagatcgcgagcgccgcccttttttttttttttgggggggggttcctttttaaagccatttgaaaagctttttaaattggatttccccaaaaaaaccccttttatgggaaaatttaacctttaaaacaaatattttttttgccttttttaaaccgtaaagaaccctctaaacttccttttttttttttttccccggggaaaccaaacgggtacccataggggtacgggggaaataaaaaatatccttttgggggaaggggaacgccccaaaaacccccaagaaccaccccttgaagggaaaaacccctctaattttgggggtctaaaaaacccaaaggcccacaccaaaaccttattttaacttatttcc

SEQ ID NO: 5017 - DNA, 400 bp, Homo sapiens
cagggacaagatatgtctcttctttaattaccttatgtccttcactaaagttttatctattttttcttaacaggcttgcataccaagcattttaaattgttattttgaatgggatttatttctaagttttttaaattggtgtatttaagagctaataatttctggttttggtcttgtatttgatctccttgctgacatccttgtagatctactgttgatctcttagcctgttgattctcttagctcttcatgtagagattttaaaatactgacagtgttgtgtgtttattgctaatatttgttttattttgctttttttttttcgatgctgctttagctagagtaagtcttattcttctattgggaggcttctaccatctcatcattaactaaaaagttg

SEQ ID NO: 5018 - DNA, 416 bp, Homo sapiens
cccacgcgtccgcccacgcgtccgggattcctgatcaagtaagcctcttccctttctaataaaatatacaccttatacccaagggagagcaaagacaaaatacaccagtaacatttgaccttttcagctccctagctaatttattagattgtgttgaaggtctgattctacaaaggccaactctacatatttggtagccctaactgtctgagcagtagtggctgctgtgatgtaaacttagggtgctgagataagcaattagctctagccttctgccttaagaatgcactctactggggatttcctggcatagttaagagcgctgcctataaggttggtgaccaaatctttcctcggtgactttaagctttatgtgaaagcttagttaaggtgaggaggggcacactcctaaattg

SEQ ID NO: 5019 - DNA, 403 bp, Homo sapiens
  misc_feature (1)...(403): n = A,T,C or G
agaagatgatgtaagagataatattttaaaatatgatgaagaaggtggaggagaagaagaccaggactatgacttgagccagctgcagcagcctgacactgtggagcctgatgccatcaagcctgtgggaatccgacgaatggatgaaagacccatccacgccgagccccagtatccggtccgatctgcagccccacaccctggagacattggggacttcattaatgagggccttaaagcggctgacaatgaccccaatacgcaaaattagccccctaataaaattaattaaccactcattcatcgacctatcacaccccatcctagnaaaaaaaaaaaaaaaaaaaaaaaaagggggggggcccttttaaagaatccctgggggggcccaagtttacccggc

SEQ ID NO: 5020 - DNA, 473 bp, Homo sapiens
  misc_feature (1)...(473): n = A,T,C or G
gcccgccctcaattccacttcggatgatcaacgctaagaaccgggccgacccacgcgtncggtaacaaagacttccccaggcctataataagctgatgtgttgctttttctctttcactactgcatgaaatttctgctaacagagctaggcctcattaaccttgtgccatcatttcatctgtcctgttacccgtttcataaaggatgtccttttgtgtcccatgatcaagatggaaacacctctaatgagagcttcacagttagtggaatgagcccctggtatgcacactggaaatctacttgcttgaaagtcagatttacatacagtgatccttctttagcaataatgtatggccctagaacttgtggcatcaggctatttgaatcataataaaaatattttttataaaaacaggtgaaattggaagaaacttggaggtgttggggtgggtagaataagagaaagaacaggt

SEQ ID NO: 5021 - DNA, 432 bp, Homo sapiens
caggttcaagcgattctcatgccttagcctcccaagtagctgggattacaggtgtgtgccacaatgcccagctaatttttgtgtttttagtagagacagggtttcactatgttggccaggctggtctcgaactcctggcctcacgtgatctgtccacttcagccctccaaagtgctgggattacaagcgtgagccactgtgctgggcccgaggccctgacttcttgctgtaactttccatgcattttttttaaaaggagcagtgtggattttcgcaccctttgtgaactaagttcaatgtgctctatccaaatttgcctaattgaactataagaaagtaataattccattttctatcccctcagggactgaacaaatggaaataactcccaggcagtatcaggtggtcactacagagacttccacaaaaact

SEQ ID NO: 5022 - DNA, 391 bp, Homo sapiens
cggacgcgtgggctgcagcagcttgtggtcctggcagctgaagccctgcccatgttagagaagcagctcatggatccccggggacctggggacatcaggacagtgttccggccgcccttggacatttacgacgtgctgattcgcctgtctcctcgccatatcccgcggcaccgccaggctgtggactcgccagctgcctccttctgccggggcctgctcagccagccggggccctcatccctgatgcccgtgctgggctatgatcctcctcagctctatctgacgcagctcagggaggcctttggggatctggcccttttcttctatgaccagcatggtggagaggtgattggtgtcctctggaagcccaccagcttccagccgcagccct

SEQ ID NO: 5023 - DNA, 443 bp, Homo sapiens
tgacaatgggagcagcgcgggcggcgccgggaggcagctgacaagcgtttgcggcttcgcttcatggccgctctcccgcccctcctgggatctgtggggagctggggagcccgcagcggcccggagccggagctggcgagccgagcggagacctgtgcgccgcgcctctgaggcgcagcatgtgaagcggagacggcatccagtggggggcgagcctctcagccggccgggatggctaccacggccgagctcttcgaggagccttttgtggcagatgaatatattgaacgtcttgtatggagaaccccaggaggaggctctagaggtggacctgaagcttttgatcctaaaagattattagaagaatttgtaaatcatattcaggaactccagataatggatgaaaggattcagaggaaagtagagaaactagagcaacaatg

SEQ ID NO: 5024 - DNA, 393 bp, Homo sapiens
acttagttgcggctgctgtcaccatgtcccgcgttttggtgccttgccatgtgaaaggctccgtagccctccaggtgggcgacgtgcggacctcccaaggccggcctggcgtgctggtcatcgatgtcaccttccccagcgtcgctcccttcgagttgcaggaaatcacgtttaagaattactacacagcttttttgagcatccgtgtccgtcagtacacctcagcacacacacctgccaagtgggtgacctgcctgcgggactactgcctaatgcctgacccacacagtgaggagggagcccaggagtatgtatcgctgttcaagcatcatatgctgtgtgacatggctagaatatcggagctacgcctgattctgcggcagccatcaccac

SEQ ID NO: 5025 - DNA, 395 bp, Homo sapiens
cccacgcgtccgggaagtgaagacaataacatgtgccttgaaacagtattaagaagagtcttccagagcctcttatgacctatgagttacatggagattttattgttccagccaaaagcggcagcccagaatctcgggttaatgcgatccatttcttggtacacaaactgccagagaagaataaagagatgttggatattttggtgaaacacttaacaaatgtttcaaatcactccaagcagaacctgatgactgtggcaaacttaggagtggtgtttggaccaactctgatgaggccacaggaagaaactgtcgctgccctcatggacttgaagcttcagaatattggagaggaaatcttaattgaaaaccatgaatagatttttcggacgccg

SEQ ID NO: 5026 - DNA, 404 bp, Homo sapiens
cgaaaagcccaaagagagacggtgaggagaacactatactgaagggattacccgggggagtccaagagcatcttgagttgcttggtctgccataacaaaacactatagactcttttgcttaaacaatggaaatgtattttctcacagttccagaggctgaaagtccaagatgccacaattgctgggttctggagagacctcttctgttgccttgaagaaggctggcttttccctgtgtgctcacgcgggctttttccaggtcatgtggatgaagagatagctcactctcttccaactcttataaggctaccaatcccatcaaattataactccaaccttatgacctcatttgacctgaattacctccttaaagtcctgtctctaaatacggtcacattgaggag

SEQ ID NO: 5027 - DNA, 420 bp, Homo sapiens
atgttattgagctgtaactgaaataagggttcacccatttagtgtacaagtcagtggttttcactattttcataggtttgtggaccatattcagtgtgagagcttttcctcaccttataaacgccatacataccttttatcaccctcttatccacatgcccccagcaacctcctttctgtatctattcatcttgcaatcctggacatttcatgtaaatagaatcagacaatgtagtcttgcaagtggtttctttcacttagtgtaaagagttcagagttgtggcacatatcagaactagttttttttggaggaataatattctgttgtgaggacaggccatgttttgcttacctgttcattagttgacagacatttgggttgtttgcatctttgggtgcctcacctgtgccctcggtggg

SEQ ID NO: 5028 - DNA, 411 bp, Homo sapiens
  misc_feature (1)...(411): n = A,T,C or G
tgcctcctaccccagggcctgccatgctctcggggccatgctgtccaaaggagccctgaaccctgctgacatcaccgtcctgttcaagatgttcacaagcatggaccctcctccggttgaacttgtaagttgcttctcaagaatccccaatgtcagctggtaaggtgactttggaaagtctgtgcttgtctgattgtctgaaggctgtgaatgcaaatccatcattgtcctggtccttcctcagtcacactctctgcctggagcctgttgggcccctgctgtgtagggaaccctgaagggaggtgggtgagcaatgccctcacgcctgccatcccgaactgggcatatgcttctcctcagatgcgcgttccagccttcctggacctgttcatgcagtcactctttaaaccn

SEQ ID NO: 5029 - DNA, 426 bp, Homo sapiens
tagtctagccctctaagcttctttcatctataaaacatgaatatacctacttcaaaagagttgtgacattttatgaaaaattgatttgttgtcttttggaggtcaatttgatttttttaaagcataaaaatctttttagaagcaaatctcatgaataaaattggtgactgatttacgtaataaaatttatgaacataaattgcatgtaaatataatataccactgtttggtgcctgataaattgaacattatagtacccgcaaatctccaaagaagagttctaaagttttaatgactatattactgaaattttgtaaaaaggttatctagaatagccaaaacaattctgtaataaaagggcaaagttggaagactacacctgatttcaagactcactatcaagattatgtgatattgacaaagggg

SEQ ID NO: 5030 - DNA, 398 bp, Homo sapiens
  misc_feature (1)...(398): n = A,T,C or G
tacagacagccccccttcagcccagcccagccaggtctcctacaccgccaccatgccattcggtaacacccacaacaagttcaagctgaattacaagcctgaggaggagtaccccgacctcagcaaacataacaaccacatggccaaggtactgacccttgaactctacaagaagctgcgggacaaggagactccatctggcttcactgtagacgatgtcatccagacaggagtggacaacccaggtcaccccttcatcatgaccgtgggctgcgtggctggtgatgaggagtcctacgaagttttcaaggaactctttgaccccatcatctcggatcgccacgggggctacaaacccactgacaagcacaagactgacctcaaccatgaaaacctcn

SEQ ID NO: 5031 - DNA, 416 bp, Homo sapiens
  misc_feature (1)...(416): n = A,T,C or G
acaatatgtcgctcttgggacccaaggtgctgctgtttcttgctgcattcatcatcacctctgactggatacccctgggggtcaatagtcaacgaggagacgatgtgactcaagcgactccagaaacattcacagaagatcctaatctggtgaatgatcccgctacagatgaaacagttttggctgttttggctgatattgcaccttccacagatgacttggcctccctcagtgaaaaaaataccactgcagagtgctgggatgagaaatttacctgcacaaggctctactctgtgcatcggccggttaaacaatgcattcatcagttatgcttcaccagtttacgacgtatgtacatcgtcaacaaggagatctgctctcgtcttgtctgtaaggaacacgaagctatganagat

SEQ ID NO: 5032 - DNA, 411 bp, Homo sapiens
caaacaagaaaaaacggataaagaatattatgagaggtacttaaaggtaacatcacatactgaacgtgtcctataatcctatattgattaatgcattacaactctgtcaattgttagttactaggccagtagctcggaattggtataaatttaatgcaccttctatcctgaataactagcatggaaaagagaatatatgtgtgagcagatatggttataaagacctatagatgatgcactttatgcatatataaccaatcctttctagttcagtgaattgaccccatccacaggctgattcatctttgggttgaggggcaaatgaaacggcatattatttctttgcaggctcctctcagacattcatcaatgtggccagcttatctactcccaattatggtgatgatgcat

SEQ ID NO: 5033 - DNA, 398 bp, Homo sapiens
ccaatgtgtaacccacctcgaaatcttatgtgtagaccatttggaaatcttaggaaaagaagaaatgaggaaaaaagcagtttgaacacaaaggctctatggaagaaatgcctctatgttcgtgaagagatctgtctgcatgcaacagaaaaaattaatataatattttccccacaaaagaatctcttatctgaggcacgtgcaatttattaatttatatctaaaggggaatcatgattataagtccttcgggccttgtactctaaattgatgggattaaaaagaatttaaaataattgagaacgaatttattttcccctcagttatcgagggcattaaacaggcattaaatgaagacatatcatgtgcttgagaaaaatacaattaatgagctcgcg

SEQ ID NO: 5034 - DNA, 476 bp, Homo sapiens
  misc_feature (1)...(476): n = A,T,C or G
tgaactgacaggggttnnnnnnaactgaagccctgaggaacngtcgcggaannctcgggacgacccacgcgtccggtcattgttagcctggttccacactcctgaggacttggctgttctttttcaccttattatgttctaatggaagtaaaaaccctcatagtgaagaagagcagtatatacaccagactagtgtataggaacttcttcattaaatattgcagtccttatgagtgctctttattgttgctgttctggacaggtacaaatcttctgaagcaacttctgtgggatgttaacttagcttctctaacacctaaaaaaattcttctttgtattttcagctaatagaagacagttcttcttcatcttgacacctagagccctctatgtgattcacagaggacttaaaatacttcttactctgttgaagtgtttaattgtacagaatatatgtactctacagtatatgtgan

SEQ ID NO: 5035 - DNA, 475 bp, Homo sapiens
  misc_feature (1)...(475): n = A,T,C or G
catgttttactcatacatagagcaaagcattatagtacagtgttttacatatattttattaatgagattacatgaccctagcaattagcaagattagctttctgacatctttagtcatctagatagcaagataaaacctagcaataagactatggtgcaccaaaagctgtcaaagggtgtacctactttatttcttcaagaagtagttcttagtcgtatctgcagactcctatgaccaataatatttccgtgggaggtatttccaagacatagtcccactaaaaaaggtgggactttaagaccacaagttttataactttagtatcctgatttttaaaattgaaaatatttgctaanttttagactttgttagaagtaataaactgtgttttgcaccgtggcggtgacctggtaactctcagggtcactcagccagccttgcttcttggacaaggactatagtttatatttctaa

SEQ ID NO: 5036 - DNA, 426 bp, Homo sapiens
ctcactcgtgggaatcaatatgaaaaagaggggcctgttttaacatatttattgcggcgcaatttacaatagcagatatatggaattaatttatgtgcctatcaggggatgaatagataaagaaattggggcttatatatacaatgattgctattggggcgtgaaaaagaaggaaaccatgccacttgctacaacatggatagagctgaaggtcaatatcttaagtgaaataggccaggcataaaaagacaaatatcacgtattctaaatggagatagagggtgaaaagatagtgaacagagactggaaagaatgtgtggggagaaagtgagagcatgaatagaaatgaattaaagggcaaaaatatacagttagatagaaaaaacaaattcaatgtttgatagcagtgtagggtgactataagta

SEQ ID NO: 5037 - DNA, 394 bp, Homo sapiens
gcgtgttcggtggcggctctggccgctcaggcgcctgcggctgggtgagcgcacgcgaggcggcgaggcggcagcgtgtttctaggtcgtggcgtcgggcttccggagctttggcggcagctaggggaggatggcggagtcttcggataagctctatcgagtcgagtacgccaagagcgggcgcgcctcttgcaagaaatgcagcgagagcatccccaaggactcgctccggatggccatcatggtgcagtcgcccatgtttgatggaaaagtcccacactggtaccacttctcctgcttctggaaggtgggccactccatccggcaccctgacgttgaggtggatgggttctctgagcttcggtgggatgaccagcagaaagtcaagaagaca

SEQ ID NO: 5038 - DNA, 489 bp, Homo sapiens
  misc_feature (1)...(489): n = A,T,C or G
cggacgcacgtgcggacacgtgatgtaatattttggggcagtgcaagccggatgactctacaccttggtaattaataatgcagacaatagaggcgcagacgccaactgaaacgcgatcttgatgagcaaacagacgcagctgcaggaattgatacgaggctttgactatcatggaacacaactggtatggcttgattgacatgaacgagacgacagacacctttgatgtcattgggcgaaggagcggctaaaaagaccaaatcgaagagatgatgaaggaggctccatcaccaagtaactttactgggttcctcacaatgtttggggagaaacttaagggagcggaccctgaggaaaccattctcaacgcattcaaagtgtttgaccctgaaggcaaaggggtgctgaaggctgattacgttcgggaaatgctgaccacgcaggcggagaggttntccaaggaggaggttgaccagatgttcgccgccg

SEQ ID NO: 5039 - DNA, 395 bp, Homo sapiens
agaagacatagtcagtgcagaaaaagtgaacaaatctcactcagtgaatggcattactgaggaagctgatcccaccatttactctggcaaagtaattcgccccctgaggagtgttgatccaacacagactgagtaccaaggaatgattgagattgtggaggagggcgatatgaaaggtgaggtctatccatttggcatcgttgggatggccaacaaaggggattgcctgcagaaaggggagagcgtcaagttccaattgtgtgtcctgggccaaaatgcacaaactatggcttacaacatcacacccctgcgcagggccacagtggaatgtgtgaaagatcagtttggcttcattaactatgaagtaggagatagcaagaagctctttttccatg

SEQ ID NO: 5040 - DNA, 414 bp, Homo sapiens
agcggccatggaccgcttcgtttggaccagcggcctcctggagatcaacgagaccctggtgatccagcagcgcggggtgcgaatctacgatggcgaggagaagataaaatttgatgctgggactctccttcttagtacacaccgactgatttggagagatcagaaaaatcatgagtgttgcatggccattctcctttcccaaattgtgttcattgaagaacaggcggctggaattgggaagagtgccaaaatagtggttcatcttcacccagctcctcctaacaaagaacctggcccattccagagtagtaagaactcctacatcaaactctccttcaaagaacatggccagattgagttttacaggcgtttatcagaggaaatgacacaaagaagatgggagaatatgccagt

SEQ ID NO: 5041 - DNA, 461 bp, Homo sapiens
  misc_feature (1)...(461): n = A,T,C or G
gcacgtcaggnagccnnnnatcagagatcacgggaccgtcgcaaanctcggaatcaggcgacgcccgcatccccataggcgcccttcgactccttgcgttgcactgttcgccgggccattccggaaacggggcgcggagcgccgcaccactcccgctggttcccgaaggcacatcccttctcccgagagttgcgagaaactttcccttgtccccgacgctgcagcggctcgggtaccgtggcagccgcatgtttctgaaccccgggccacgctccccgggcatcggcttagcgctcgtgtagatcgttccctctctggttgcacgctggggatcccggacctcgattctgcgggcgagatgcccctgggacacatcatgaggctggacctggagaaaattgccctggagtacatcgcgccctgtctgcacgaggtgggcttctgctacctggacaacttcc

SEQ ID NO: 5042 - DNA, 476 bp, Homo sapiens
  misc_feature (1)...(476): n = A,T,C or G
atagctcttccttgctgttttaatgtggtgcacactatagcctcacaaacctgttattccagtgtaatctgcagtgtcgtaactaaagttactggcttggtcttatttgcacagtttttgcgtcttgtttgcttcttgcatctgattaactagaatatttctctttcccccttttaatttgtgatgtcacttgaccccatttatgtgtaggagcactacaccattggtttccaatactgcacacataagatacatacttgtgtgcagaaagtatcttcctccaggcttgtaatacccttcacatggaagattaatgagggaaatctttatattctgtataaaaacaaaagcaaatttatatactaaaatcatttgtctaaaaatttaagttgttttcaaataaaaattaaaatgcatttctgatatgcaaaannnnnnnannnnctnnncacnnaaaaaaaaaagaaggaaaaagt

SEQ ID NO: 5043 - DNA, 477 bp, Homo sapiens
  misc_feature (1)...(477): n = A,T,C or G
cgacgggtttggtaagtaggaaagtttcggttgaggagtaagagctgccgcggtagcagtaacccgcgcgggggaggccgacgtcggtcggagagggggtacgagagctgctggtggtgttgtcgtggccggagcggcccgcgcctgggctgccggctctttgcggcagtcagagcaccataacatggtgtgggaagtgaagacaaatcatatgcctaatgcagtacagaaactcctgttggtgatggacaagagagcctcatgaatgaatgactcattggagttgctgcagtgtaatgagaatttgccatcttcacctggatataactcctgtgatgaacacatggagcttgatgaccttcctgaacttcaggcagttcaaagtgatcctacccaatctggcatgtaccagctgagttcatatgtttcacatcaagaatacccaagatcatcttggaaccaaaataccttagactn

SEQ ID NO: 5044 - DNA, 487 bp, Homo sapiens
agccgccgccgaggattcagcagcctcccccttgagccccctcgcttcccgacgttccgttcccccctgcccgccttctcccgccaccgccgccgccgccttccgcaggccgtttccaccgaggaaaaggaatcgtatcgtatgtccgctatccagaacctccactctttcgacccctttgctgatgcaagtaagggtgatgacctgcttcctgctggcactgaggattatatccatataagaattcaacagagaaacggcaggaagacccttactactgtccaagggatcgctgatgattacgataaaaagaaactagtgaaggcgtttaagaaaaagtttgcctgcaatggtactgtaattgagcatccggaatatggagaagtaattcagctacagggtgaccaacgcaagaacatatgccagttcctcgtagagattggactggctaaggacgatcagctgaaggttcatgggtttaagtgcc

SEQ ID NO: 5045 - DNA, 403 bp, Homo sapiens
aattatcaaacacagaggaatacattggcggaccctgaggaaaccattctcaacgcattcaaagtgtttgaccctgaaggcaaaggggtgctgaaggctgattacgttcgggaaatgctgaccacgcaggcggagaggttttccaaggaggaggctgaccagatgttcgccgccttcccccctgacgtgactggcaacttggactacaagaacctggtgcacatcatcacccacggagaagagaaggactatgagggggctcgctgctgcgccctgggctcgtctttgcagagtggtccctgccctcatctatctcccccgagtaccgtctctgtccctaccttgtctgttagccatgtggctgacccatttatccacctccatcttctttgcagcctgagtg

SEQ ID NO: 5046 - DNA, 407 bp, Homo sapiens
cacaaggtcaagagatcaagaccatcctggccaacatggtgaaaccccatctcttctaaaaatataaaaattagcaacacttaactgagcactgacctgccaaccactgtcccaaaaggacaactaatagaacaccttggcatgtagttgggtaaaccttagcaagggagcttttctccacccagctgtgatcagaaccatttctaagccatgggtgcccaggtggcctccttaccactctgccctagagttttcttgaccaggcagtgctaagtaggtccctatgcgctcacactgaccctgtcctaaacagtttctccataggcctgaaagatcacccagaattagcctaatggtgataggcaaggtagccatgaatctccttgactaccagacttgaataggaa

SEQ ID NO: 5047 - DNA, 423 bp, Homo sapiens
  misc_feature (1)...(423): n = A,T,C or G
ctcatagggttgttgcaagaattaaatgacttaatacattcaaagctcttagaaccatgtctgacacgcagcacatattcagtaaggattatctgaatgggaacctacccttcccagctgcaacaaggcacccaaaccccctgctgacggctgagtgagaagccagaactgtcatctccatcatgtggtaacaagctccccctgcccccgccatgatgtcagtagagaccatgtagggagcctggacttcactctcagccaacagtatgaggctctgcggtggtgtcagtgttggccatatggaaagcagtgatgaggtactcttacccctacctgccaaagaggtatcactgcagacctagtaggacccagaactcttatttccccctaaaaataaggagaagcctatacccttgggtgtan

SEQ ID NO: 5048 - DNA, 408 bp, Homo sapiens
tatagagcaatgctcaaaaaatgcattttagaaaatgattttgtttttcataatgcaccatattggggcacaggatgtgtatatttcatataccacttgtctacagatatgtaataccacctgctcattacgcatgggactacatggagagggaagaccgtttcatttattgctactgaggctaccaggacccttgctgactgcagtctgcttgcgattagttccacgcactaagcactctgaaggagggggacaacgcgagctcagaaacatgcatctacgtgcgtgaggatgatgaggactataacgacgtagcagcgctttaacgacacactatacttgtacatgctctgtcctgcgattttccttgtgcatgagagaaaacgtactctcatcccttaagataag

SEQ ID NO: 5049 - DNA, 402 bp, Homo sapiens
aatgactcaaaaggcttaggttatagtgttattagcgtttctactaaatgctgtgtgaccctgagcaagtcttgcagttttgaactttaacatcctcatctgtcataaactaaataaactaacatttcatgagtaattatgtcgtgccaggtacgttgctggtcagcttacttattatagttcatttaattcacctattcaccttagagaataaatagaatctacattttacaaatgagaaacctaagtttccagaatattaaggatcattcaaaatgccaagcaataagcattagaggacaattttactctaaagccatgaacttccttctgtttctaaaaagaactttaatatttttgaaccatattatatgctaacagtaaatttccaaattgccttag

SEQ ID NO: 5050 - DNA, 419 bp, Homo sapiens
aggagagcgacgctggctcctcggtggggaggctttggcgcaccctgagcgagagcagcgcctgggagagcgtgagcagccacgacatctgggtcctgaagcagcagctggagctgaaccgcccggaccacggcaggaggcgccgcgcagactcgatgtcctcggagagcacctgggacgcatggaacgagaggctgctggagattgagaaggaggcttcccggaggtaccacgccaagagcaagagagaggaggcggcagacaggagctcataagcagggagcagggtgcgggaggatgatgaggacagcgtgggctctgaggccagttccttctacaacttctgcagcaggaacaaggacaagctcactgccctggaagatggaagatcaagagaatccaatttggatttcacaagg

SEQ ID NO: 5051 - DNA, 443 bp, Homo sapiens
agaggtgctgcctaccctcctccgcccagcatgccccccatcgggctggataacgtggccacctatgcggggcagttcaaccaggactatctctcgggaatggcggccaacatgtctgggacatttggaggagccaacatgcccaacctgtaccctggggcccctggggctggctacccaccagtgccccctggcggctttgggcagcccccctctgcccagcagcctgttcctccctatgggatgtatccacccccaggaggaaacccaccctccaggatgccctcatatccgccatacccaggggcccctgtgccgggccagcccatgccaccccccggacagcagcccccaggggcctaccctgggcagccaccagtgacctaccctggtcagcctccagtgccactccctgggcagcagcagccagtgccgagctaccc

SEQ ID NO: 5052 - DNA, 464 bp, Homo sapiens
  misc_feature (1)...(464): n = A,T,C or G
tacatgatcgcctgcggttgatcgcggtatncccgggccgacccacgcgtccgcccacgcgtccggcgagttacgagaattcccggccgctgcaagggagctctgcgtgcctcttgctgtgccctacctggacaaacccccaactccgctccacttctaccgggactgggtctgccccaacaggccgtgcattatccgcaacgctctgcagcactggccggccctccagaagtggtccctcccctatttcagagccacagtgggctccacagaggtgagtgtggccgtgaccccagatggttacgcggatgccgtgagaggggatcgcttcatgatgccagctgagcgccgcctgcccctgagcttcgtgctggatgtgctggagggccgggcccagcaccctggagtcctctatgtgcagaagcagtgctccaacctgcccagcgagctgccccagctgctgc

SEQ ID NO: 5053 - DNA, 468 bp, Homo sapiens
  misc_feature (1)...(468): n = A,T,C or G
gggatggccggnggnnnnnncctgacgcctgaggaccgtcccggaatcccggtcgaccacgcgttcgaacacattctgatttaagtggaaattgcagggtcagccattaccagcacatcctgtgcattgatgttatgtctcagatgtgttcgccgaagtcatcacaaaaccagggtacagaggaacgaggctcttttgcccttactcagctccgccttgaacctcgagttacttttagacagttccagatgaatgaccaagacgggtgagtccattgcattacagtcacgtgtgtatagatgagtgcagtggtgattctggtcaagatgaggggctgatgaatagaagtgctgtgtctcctggagaccacagagaacttaaccagctcagcgtggcaaggtgtgtggggtggtggctgggatttggagctggatgacagattgagtcatgatttgaagtgcctggtan

SEQ ID NO: 5054 - DNA, 496 bp, Homo sapiens
  misc_feature (1)...(496): n = A,T,C or G
agggnaggnnnnnnntttctagggcnttcnatngangatcntgcgaacccgcgncgacccacgcgggcgggactcgctaagtgttcgctacgcggggctaccggattggtcggaaatttcagaggtggaggagacactgaagcgactgcagagccagaagggagtgcagggaatcatcgtcgtgaacacagaaggtacgccctccctcccgccatgacccgcacccaggcaggcccagaagcagccgtaacacagcatagcacttgctggtcactaagcccttcatgaatctgatctaattttaggcctttttaatttttaacacctccagaggtctttttttttttttttttttttttctaaaaagggcacccggggaaacccggggggggggaaaggggcaaaaaaaacggcgctcggggggggggaaattttttggatatggggtttaaaacccccccctttcaggtctctcaaaaggggaaaaccccttccc

SEQ ID NO: 5055 - DNA, 394 bp, Homo sapiens
cgggaagaaggtgcaaacggaggttcttcagaagaggcagcaggagaaagcccatatgatgaatgctattaagaaatatcagaaaggcttctctgataaactggatttccttgagggagatcagaaacctctggcacagcgcaagaaggcaggagccaaaggccagcagatgaggaaggggcccagtgctaaacgacggtataaaaaccagaagtttggttttggtggaaagaagaaaggctcaaagtggaacactcgggagagctatgatgatgtatctagcttccgggccaagacagctcatggcagaggcctcaagaggcctggcaagaaagggtcaaataagagacctggaaaacgaacatgagagaagatgaagaacagaacacactaa

SEQ ID NO: 5056 - DNA, 446 bp, Homo sapiens
  misc_feature (1)...(446): n = A,T,C or G
nttagaaactgcaggcatncgcgnnnnganttnnngggaagacccacgcgtccgcttcagatactctctttgccatatgaagttattttctatcttcagaaattcctgcagacatcctactcggccagcggtttacctgatagattcggcaatactatcaagagaagagcctaggagcacagcgagggaatgaaccttacttgcactttatgtatacttcctgatttgaaaggaggagggttgaaaagaaaaaaatggaggtggtagatgccacagagaggcatcacggaagccttaacagcaggaaacagagaaatttgtgtcatctgaacaatttccagatgttcttaatccagggctggtggggtttctggagaattatcacaacctaatgacattaatacctctaaaaagggctgctgtcatagtgaacaatttataagcgn

SEQ ID NO: 5057 - DNA, 395 bp, Homo sapiens
gccgaaggggagcctctgggtgaggacccaactggggctcccgccgctgctgctgctgaccatggccttggccggaggttcggggaccgcttcggctgaagcatttgactcggtcttgggtgatacggcgtcttgccaccgggcctgtcagttgacctaccccttgcacacctaccctaaggaagaggagttgtacgcatgtcagagaggttgcaggctgttttcaatttgtcagtttgtggatgatggaattgacttaaatcgaactaaattggaatgtgaatctgcatgtacagaagcatattcccaatctgatgagcaatatgcttgccatcttggttgccagaatcagctgccattcgctgaactgagacaagaacaacttatgtccctga

SEQ ID NO: 5058 - DNA, 422 bp, Homo sapiens
  misc_feature (1)...(422): n = A,T,C or G
aatacatcttaactttagtgggttgaaaaagacaggtgctatttcctcaaacaatattttggctgctggtgatcgactcttagagcaagagaaacactttctaacattgatgtgggattttgtgtgtgatgtgtgggtttcctgagctgctgagcttttccacaatctcctgctctattacttcgtagcccactttcctttaatacccaccgtcagagaggttctctttaccattcctctgctcagctccttcagaagtctgtgtacaccgacaataaatggtaggtctgaaaacagatgagaggtttttaaatttgaaaacagatgagaggctttcttccctcaagggatgatgtggggtttagtagcttcagctatgttgaattttacttataaatggtgatgacttgcttataatgtgn

SEQ ID NO: 5059 - DNA, 452 bp, Homo sapiens
aggagtatgtaaaaaaatctctgggttttcctcttaattttgctgtaaacctaaaactgctccaaaaataattaaaaataaagtcttaaaaattgattttttaaaaaatgggatattattggaaaactcacagattcaaacttttgatgagttacactgtttgccttgaaaaaatttagatctgcagataatttttttctaagaaagtctgacttagaataatactatatttctgtagcttaattgatttaactgatgagcttctttgagcatttttactactttttgcaaataaggtctcagaatagcaccgtttagataaaatgcctaagtaggaatgacttttacataattcagtgatgaataattagaaaataatcatatcagattctttcagttacgcaaagtgatatattgacatggggaattttctggtgtgacacaaggcaggt

SEQ ID NO: 5060 - DNA, 403 bp, Homo sapiens
acgagaagaaaaggagagaaaccgtggagagagagaaagagcagatgatgcgcgagaaggaggagttgatgctgcggctgcaggactatgaggagaagacaaagaaggcagagagagagctctcggagcagattcagagggccctgcagctggaggaggagaggaagcgggcacaggaggaggccgagcgcctagaggctgaccgtatggctgcactgcgggctaaggaggagctggagagacaggcggtggatcagataaagagccaggagcagctggctgcggagcttgcagaatacactgccaagattgccctcctggaagaggcgcggaggcgcaaggaggatgaagttgaagagtggcagcacagggccaaagaagcccaggatgacctggtgaagac

SEQ ID NO: 5061 - DNA, 407 bp, Homo sapiens
  misc_feature (1)...(407): n = A,T,C or G
cttcatgagtatctttggaaaataatttgttgaatatatatgattatgagatattttctgataaacactgaattttgaaacctgaactcactatataattgcagtgttttgaaggcctgcatccattagcattgcattatattcacactgccttttttagtgaaccaagacccatcttctggacgacagatttatcttaagatgaaaggttgtataacatgcccacaaggcataaaaatgttaatgatgcaagtaagttctaagagtttaatgaccaagcaaaactctaccaccagatgctgactgcttgttttgcagtgttcaggaaacaccattttcctggctcttaacgcttttgtattggtatgggaaagggctggcagctatagaacaggagatccataacn

SEQ ID NO: 5062 - DNA, 463 bp, Homo sapiens
ttgttgcttgggcgcttctccgctgcgtgtaggtgaagggggcttcctgaccgagacatggatttaggtgctattacaaaatactcagcattacacgccaagcccaatggactgatccttcaatacgggactgctggatttcgaacgaaggcagaacatcttgatcatgtcatgtttcgcatgggattattagctgtcctgaggtcaaaacagacaaaatccactataggagtcatggtaacagcgtcccacaatcctgaggaagacaatggtgtaaaattggttgatcctttgggtgaaatgttggcaccatcctgggaggaacatgccacctgtttagcaaatgctgaggaacaagatatgcagagagtgcttattgacatcagcgagaaagaagctgtgaatctgcaacaagatgcctttgtagttattggtagagataccaggcccagcagtgagaaac

SEQ ID NO: 5063 - DNA, 420 bp, Homo sapiens
aacaaactacactactgctgctgctgctgctgctgctacaaacttctacagccccagtcaccaaggtaatcacagttattgtcaaattgaacacagctgaagaagttgtatgaagagtataccaatgaatctaccattaaacagagtaaccacacccttcccaactggcacactaaaacccccaaaaggtgaaattctttctctctgaaagacacttttaaaattttggaaatgcagttgtcctatcagtttcacaaacatcaatgcaaacacacaagaaacaaacagaaaaacaaaaaacccaagaaatatgacaccaacaaagacacactgttactctctaataacatgctgctataaaagggaaatctacaaattgccagagaaagaattcaaaacaagaatattataagaatttcg

SEQ ID NO: 5064 - DNA, 451 bp, Homo sapiens
  misc_feature (1)...(451): n = A,T,C or G
ctgggaggtgaccctctgtctgctggcctgctgggtgctggtctacttctgtgtctggaagggggtcaaatccacgggaaagatcgtgtacttcactgctacattcccctacgtggtcctggtcgtgctgctggtgcgtggagtgctgctgcctggcgccctggatggcatcatttactatctcaagcctgactggtcaaagctggggtcccctcaggtgtggatagatgcggggacccacattttcttttcttacgccattggcctgggggccctcacagccctgggcagctacaaccgcttcaacaacaactgctacaaggacgccatcatcctggctctcatcaacagtgggaccagcttctttgctggcttcgtggncttctccatcctgggcttcatggctgcagagcagggcgtgcacatctcccaggtggcagagtcagggccg

SEQ ID NO: 5065 - DNA, 466 bp, Homo sapiens
  misc_feature (1)...(466): n = A,T,C or G
attgaactctaacagttttcaatattcaactcaatataaaataataataagaaacacttctgatgttaggttgagttgaatattgaactctaacagttttctacatacaaaacacagtgtcatgaaggttattcataattgcattatagaggaatgtagtatgtcataagtactttgtaaagatttgacattcaactgtagtatccatatgttgcttaaatttccttatgagccccatgatggaaagacttaaagatgaatttgagaaaaattgaaagaaattagattatcaggttctgttaaattgttacatgtatcttgcttaaatttctgtttattaatttatatccacccaagtacataaagcaaatttggaggannnnnnnnnnnnnnnnannnnnnnnnaannnnnnnnnnngggggggcctttaaaagactcttggggggccaaatttacctgtatata

SEQ ID NO: 5066 - DNA, 391 bp, Homo sapiens
  misc_feature (1)...(391): n = A,T,C or G
taataatggacttaaaatactccataaaccatgctgttcttttatagcacacaggcagagtagatttagcataattgtttttaacgtcctaaagagcatgcattttgtgtgtgcgtgtctgtgtgtgtgtgttagtcttgtgtaaaaatagctgtagcaagagaggtttgagatttttttcaatttttttttttttaaaaagtagcccacggcacatttttaaactagttgttctaatacttcacccacacttttttttccctcactttcttctagatatttttattcttcttgagctcctcctcattctcctctctccttttggcccttccttttttaaggattttcagagaaaaagatacttttctcacctcacctctgcatttcaaan

SEQ ID NO: 5067 - DNA, 393 bp, Homo sapiens
  misc_feature (1)...(393): n = A,T,C or G
agggctgtggctaccatgttctctcgcgcgggtgtctctgggctgtcggcctggaccttgcagccgcaatggattcaagttcgaaatatggcaactttgaaagatatcaccaggagactaaagtccatcaaaaacatccagaaaattaccaagtctatgaaaatggtagcggcagcaaaatatgcccgagctgagagagagctgaaaccagctcgaatatatggattgggatctttagctctgtatgaaaaagctgatatcaaggggcctgaagacaagaagaaacacctccttattggtgtgtcctcagatcgaggactgtgtggngctattcattcctccattgctaaacagatgaaaagcgaggttgctacactaacagcagctgggaan

SEQ ID NO: 5068 - DNA, 480 bp, Homo sapiens
  misc_feature (1)...(480): n = A,T,C or G
caactctataaaaaataacattaaatgctctttatgaactaacatttccaaagtgttgagtagacattttttgaatgtcagagttaaattattattttgtggccatatttcatccttgtagtctccctgcctatcatattaatcatgtttcgatcaacgtatgttgaaatgtttaacacccttcccttcactctgcaacattatgtaagtaaagacgattggaaaatgagataagaatcatttaaaggaaagttagtattatattgagggacctatcacccatacgtgctaaatttcattaattttacattcattaatctaaaatgaacaataagaaatccactcgacaattaacttacatttgcttatgagcatatgacctttggaaattcaacatacaatttttaccaattttgtgagttgtgcatttagttttggtaaagttataaaagcaataattntacatataaggtggangga

SEQ ID NO: 5069 - DNA, 397 bp, Homo sapiens
  misc_feature (1)...(397): n = A,T,C or G
aggacnnnnnnccgccggggggctatgggcccatcgactacaaacggaacttgccgcgtcgaggactgtcgggctacagcatgctggccatagggattggaaccctgatctacgggcactggagcataatgaagtggaaccgtgagcgcaggcgcctacaaatcgaggacttcgaggctcgcatcgcgctgttgccactgttacaggcagaaaccgaccggaggaccttgcagatgcttcgggagaacctggaggaggaggccatcatcatgaaggacgtgcccgactggaaggtgggggagtctgtgttccacacaacccgctgggtgccccccttgatcggngagctgtacgggctgcgcaccacagaggaggctctccatgccagccacggctt

SEQ ID NO: 5070 - DNA, 524 bp, Homo sapiens
agagattgagcctgggaccgttgcagaactgccgtgtcgacccacgcgtccgtgctatgaaaggtgctggcacagatgactccaccctggtccggattgtggtcactcgaagtgagattgaccttgtacaaataaaacagatgttcgctcagatgtatcagaagactctgggcacaatgattgcaggtgacacgagtggagattaccgaagacttcttctggctattgtgggccagtaggagggatttttttttttttaatgaaaaaaaatttctattcatagcttatccttcagagcaatgacctgcatgcagcaatatcaaacattagctaaccgaaagagctttttgtcaaggaccgtatcagggtaatgggcttggctcgcacaaggggatattgccttaattctaattttattttgttctctacatacaaccaagggaaagccctatcacaatgatacagtaatattgcaatggtttgaaaccttcattcttactaggttcattctaagcaagagggcg

SEQ ID NO: 5071 - DNA, 397 bp, Homo sapiens
  misc_feature (1)...(397): n = A,T,C or G
aaatgttctnnncctggattgtggagatggntgcttaactatatctttactaaaaatcattgaattttacacttccagtggataaattctatatgtaaattttatgttgctgaagcaataacagagttattgctgtgtgctttaaatgacatcttatttgaggttttttttttttcatttttaaaggtttggcaattccaacttttgtttaaaattcagggggggcatgtgctggtttgttacatggttatattgcttgatgctgaggtttggggtataaatgaccccatcttccaggtagggagcatagtccccatttgggagttttttaaaccttttccccactccttcccttttaatagaccccaggggctcttgttcttatctttatgtccat

SEQ ID NO: 5072 - DNA, 427 bp, Homo sapiens
aaaatcccactctgcatcaactgaacgcaaatcagtcactttaattaagctaagcccttactagaccaatgggacttaaacccacaaacacttagttaacagctaagcaccctaatcaactggcttcaatctacttctcccgccgccgggaaaaaaggcgggagaagccccggcaggtttgaagctgcttcttcgaatttgcaattcaatatgaaaatcacctcggagctggtaaaaagaggcctaacccctgtctttagatttacagtccaatgcttcactcagccattttacctcacccccaaaaaaaaaaaaaaaaaaaaaggggggggcggtttaaaagaacccttggggggcccaaatttacgggggtgtggaggagtaaaactttcttcttaatgaggggccgattataagcaaggggggg

SEQ ID NO: 5073 - DNA, 393 bp, Homo sapiens
ataaaatcacaaatgtttggaaaacacaaaagtaacttgtttatctcagtctgtacaaaaacagtaaggaggcagaaagccaagcactgcatttttaggccaatcacatttacatgaccgtaatttcttatcaattctacttttatttttgcttacagaaaaacggggggagaattaagccaaagaagtatatttatgaatcagcaaatgtggtgcctgattatagaaatttgtgatcctatatacaatataggacttttaaagttgtgacattctggctttttcttttaatgaatactttttagtttgtatttgactttatttcctttattcaaatcatttttaaaaacttacattttgaacaaacactcttaactcctaattgttctttga

SEQ ID NO: 5074 - DNA, 413 bp, Homo sapiens
cccacgcgtccgatactttcgatgaggaagcattcatagagattagcattgaagccatggattttgttgaccggttgttagtgaaagagaggaaatctcgcatgacagcatcggaggctctccagcacccatggttgaagcagaagatgcggtaatgaaaccggttagtcaattttgtcttaatattgttgacaattctgtaaagttcctttttatgaatatttctgtttaagctatttcacctttcttttgaaatccttcccttttaaggagaaaatgtgacacttgtgaaaaagcttgtaagaaagcccctcccttttttctttaaacctttaaatgacaaatctaggtaattaaggttgtgaatttttatttttgctttgtttttaatgaacatttgtctttcagaatag

SEQ ID NO: 5075 - DNA, 392 bp, Homo sapiens
  misc_feature (1)...(392): n = A,T,C or G
aagaaaacctgatcttctttgttggggcaaacattaacaacattgacatctgattacccatgatactctcaagagcttattctttaacaaaaaggtggggaaataaaaacaccataaaagcggacgggtgcagtggctcacgcctgtaatcccagcactttgggaggccgaggtgggcggatcatgaggtcacgaggtgagaccagcctggccaatatggggaagccctgtctctgctaaaaatacaaaaattggccggacgatgtggcgggacgcctgagtcccggctactcgggaggctgaggcagaaaaacccctggaacccgggaggcagaggatgcagagagccgatatggcgccactgcactccagcctgggtgatagagagagan

SEQ ID NO: 5076 - DNA, 403 bp, Homo sapiens
  misc_feature (1)...(403): n = A,T,C or G
aaanaggcanggcctttataacaaagtggaagatttcaagaaaggacaactcactgtacacttgagaataatacctacagaggttcatactgaagagtagtctcaataatgtaaagaatttgacaagcatgatgctattgaaatagttctgtaaggaagtggtgttctttatacatcaattattacaaaaagcagtgaattgtaagtgtgaggtgtgtttacttagatgtgaagagttctccttactgctgtgatggaataacaagggtcagatttcctctcctgccttaaacaactggaagctatacaatacgtataataggtaatggtttttagacataggacaagcacaggtttgtgatcctcaggagactgcagacagagtgaggtgagcaccatggtt

SEQ ID NO: 5077 - DNA, 400 bp, Homo sapiens
  misc_feature (1)...(400): n = A,T,C or G
agacaccgntgnngcggcctcagctacagccgcagtctccgcggttttcggagagtataaccgctgaggcgggcgcgggcccgggtggggccaaggttccggccactctgcataatggagataatcaggagcaattttaagagtaatcttcacaaagtgtaccaggccatagaggaggccgacttcttcgccatcgatggggagttttcaggaatcagtgatggaccttcagtctctgcattaacaaatggttttgacactccagaagagaggtatcagaagcttaaaaagcattccatggactttctgctatttcagtttggcctttgcacttttaagtatgactacacagattcaaagtatataacgaagtcatttaacttctatgctgttccgaacc

SEQ ID NO: 5078 - DNA, 389 bp, Homo sapiens
  misc_feature (1)...(389): n = A,T,C or G
cgcccttgtggcggctgcagaagctggcggtcgagctgggcccgcagcttcttcacataataattgatggcattggtggtcgagcttatgctgcgtaccaagattatcacactgtttgggaatcagaagaatggatgcacgttttacaagatagtgccacatttttcgaagccatagttggtaaaaacttacctgatgaagagatatttcagcagttgaatcagttgaattcacttcatcaagaaactatcatgaaatgcgtgaaaagtaggaaagatgaaatcaaacaggctctgtcaagagaaatagttgctatttcctctgcacagctacaggattttgattggcaggtaaagcttgcactttccagtgacaagagatgtgcattn

SEQ ID NO: 5079 - DNA, 389 bp, Homo sapiens
aattactgattacaagttgtcagccagtgactctaggtgataactcccctctgtgcgagagtcatggatacagtatgcttttttgcctctaaaagagcaattatattcacgaaatttcctactgcatttaaaaacagctgggtgaaagtcattttaaatccccgaatccgacacattcgttcttttatgcatttaattaagcagaagttaaaataaattagaacaggagacattcagtgctgattgttgaatcaacaaagcaagaaacagcctagcattaccctaccacagatgtctgtcactcagtgctgctgccctataaatttccatcaactcttaccattttttgaataacaatttcttttctagtacaaattggcatatgatgg

SEQ ID NO: 5080 - DNA, 388 bp, Homo sapiens
  misc_feature (1)...(388): n = A,T,C or G
ctcccagttcagaacaagggcagcccgtggtgctgacctaggatataacaaagctcttcacttcaaaacccctgcaatagctgggtttacagacatttaccacctgcggacccaaaagagaaggcctaggagagttttctagaaggttgggattgtcagggtcctggcccctcagaactggcttgatcaagggccttatgtggagcagaggttgtctctgaaccaggagagaaggtactatacctttcaaatccccagggcagacacacccccacccagcccctatttggacctaaactgtgccatttgaacagtcacttccaagctcagtctaaatgaaaccgaaacgtgaccacgcacaaaggcagtcactgcctcgaggggtgcn

SEQ ID NO: 5081 - DNA, 485 bp, Homo sapiens
  misc_feature (1)...(485): n = A,T,C or G
gcgggtaaaatgatnactgacgacactggcacggaacnncngggncgacccacgcgtccgatgactcanatattagtaaacatcatagtactcattttctagaaaactattacaattgtaatgaatgtgaaaaagtattttaccaatcctcaaagcttattttccctgaaaatatccatattcaagaaaagccttacaactctaatgaatgtggtgaaacttctgacccattctcaaagcttactcaacatcaaagaatttatattggagagagctcacaaagatgtaataaaaaatgtataatagtctttagtcaatcacatctaaagggacataagataattaacactggagaaaaatcagtgaaatataaagaacgtggcaaagcttttaccaggggcttacatcttggacatcagaaaattcatactggagagaaaccttacaaatgtaaaaaatgtgacaaagcccttaacaagaagtcc

SEQ ID NO: 5082 - DNA, 485 bp, Homo sapiens
  misc_feature (1)...(485): n = A,T,C or G
ttgtgggcgatggtgctgttggtaaaacatgtctcctgatatcctacacaacaaacaaatttccatcggaatatgtaccgactgtttttgacaactatgcagtcacagttatgattggtggagaaccatatactcttggactttttgatactgcagggcaagaggattatgacagattacgaccgctgagttatccacaaacagatgtatttctagtctgtttttcagtggtctctccatcttcatttgaaaacgtgaaagaaaagtgggtgcctgagataactcaccactgtccaaagactcctttcttgcttgttgggactcaaattgatctcagagatgacccctctactattgagaaacaataaagagattcacacacaagcaaaannnnnnnaaaaaaaaaaaaaaaaaaaaangnnnaaaaaaaaaaaaaaannnnnnaaaaagaggggtctttcttttaaggactccccggcggcccc

SEQ ID NO: 5083 - DNA, 392 bp, Homo sapiens
tatttgactcacgcttgggcttgcatcccttctgtcattcatcaaatatgcatggagcacctactatgtgcaggcacgagatatgaaaagatggctaacatgtccttctgctgggagattgctgtctatggttgccatctgcctcccatctgtctcccttttcacaacatcctaacactctttaagacaatgtttatatttccaggtattaaaagttaaggatgtcattttccagcctaggaaattgctttattttgattcagccaatacaagccatatgagtacaataaagcactgattactgtaactgtgcaaatagttggtaccatcacagctgggagaagaaacatcatttaacagcggatctctatgagacaacttctcagtaactg

SEQ ID NO: 5084 - DNA, 450 bp, Homo sapiens
  misc_feature (1)...(450): n = A,T,C or G
ttttggggtcctgagaacctgcgganacccgnccggaattaccgggtgcgacccacgcgtgcgcccacgcgtccggagccaagctgtacgggtcacttttttctaacccctgaatctcccggttctcccaaacgcaaagtagacaaggacccataagtcaggtgcacaggaaggagaagcacagggctctcttagtgccccaattcccagcttccataaaccaccgtcctataccagggtggacagcaacacttccagtgatcagaagttaatctcacagcagcatcaaggtggagtgcagcaacaaagacctccattctggggtgtacgggggctcggtgcatgaggccatgactgatctcattttgctgatgggctctttggtggacaagagggggaacatcctgatccccggcattaacgaggccgtggccgccgtcacggaagagg

SEQ ID NO: 5085 - DNA, 392 bp, Homo sapiens
  misc_feature (1)...(392): n = A,T,C or G
cccacgcgtccgttctgcctcagcctcccgagtagctgggattacaggcgcctgccaccatgtccggctaatttttgtttttttagtgaagacagtgtttcgtcatgttggccaggctggtcatgaactcctgatcccaggtgatccacctgcctcagcctcccaaagtgctgtcattctggtctttaaagagtaagcatgtctagatggtatctgaagcggctatgggaaccacctactttcacgttaagtagaagccatcatagtgctttttgcctgggcttagttctgtgcagataaatctagagtaatttcaaggtatcagttcacggtttcgtatgaacacaaaatagaaaatgacatgatttgaatgttctactccaagtcgtatn

SEQ ID NO: 5086 - DNA, 392 bp, Homo sapiens
aaaactgtaacttttcaaatattggttctttctgtaccatttaagtatagttgatatatgtgaggcaaaaaaaggtttcagcatggtggtgagggaaaaaggagcttagaaatcccagttggcacagcctgggcaagcgccagctcccctcagggctaacggcactgttcacacagggatcctcagaatcagcggccacctgcctccaccttctgcctggagggcatggggctgttgtagaacctatggtagcaaatgtatatgtatgagtttgtattctgtagtgttggtgtagcacagaagaaagacctgtgtcctagagagtaggccaaggtgatctgcctcttctattgggagaaattctaatttctttcccactttctcaacaagcc

SEQ ID NO: 5087 - DNA, 407 bp, Homo sapiens
cccacgcgtccggagggagacttctctttttttggcaatcagatctcgtggtaactaataaagcaaaaattaattcattactgtggcaaggacaccaagccattccaaaaagattcacccccatgacccaaacacctcccaccaggtcccacctccagtgttggagatcgcatgggagacaaatatccaaactatatcactcctctctaaaccagtttagagggttcaaactttgccttctccagatttgcctcttccctgagaccttccctgatagcttcccacacatactgctctccccagtccatcaatgaattcctgcatccaggtggctaatggttccatacttacccttcagctgtgaccagttttgtgtccacctctgtcttcctccctctttttgctta

SEQ ID NO: 5088 - DNA, 416 bp, Homo sapiens
  misc_feature (1)...(416): n = A,T,C or G
caatatgattaaagtattgcatctactaattgccttgtagttacataaaaggataggcttgtttttagtaaatacacactagactattaaagagataaaaggccacgatgtatgcacgcaacataccctcaaatttagaaaagtaaattatatagataaatggatagaaaaaccaatatggcaatatattaaaaatttataaatccaggtaaaggtatacaggaattctctgacttattcttacaacttttctataagttaaaaaaatgcaacttgttaaaatataggaaaatgtttagactcactaataccaaaaatgcaaaacaagatgagacagcattttttctatcaaatttgagcaaagntgatgtatttatttttaatgataatacccatattgaaaaaaacacagtgtg

SEQ ID NO: 5089 - DNA, 417 bp, Homo sapiens
cggacgcgtgggcaaaattacctctgttattagccggatgcctgtcagcattgacctggaaaattcacagaagataaccttggcaaaaccagctcctcaaaccctcactggtctggtgagcgcactcactggcctggtgaacgtctccctggtcccggtgaatgccctgaaaggccccgtgaagggctcagtgaccacactgaaaagtttggtgagcacccctgctgggcccgtgaacgtcctgaaagggcctgtgaatgttcttacggggccagtgaatgttctcaccactccagtgaacgccacggtgggcacagtgaatgccgccccaggcacagtcaatgccgctgcgagtgcagtgaatgccacagcaagtgcagtgaccgtcacagcgggtgcggttactgctgcatctgg

SEQ ID NO: 5090 - DNA, 577 bp, Homo sapiens
  misc_feature (1)...(577): n = A,T,C or G
gagtgcttaacaactgatcagcgctgcacttgccgncacgacccacgcgtacggacactgtaagggcagagtagccagggtgtggccctgccatcttcccagcatggccactcccggcactccatgcttagtcactgcctgcagaggtctgtgctgaggccttatcattcattcttagctcttaattgttcattttgagctgaaatgctgcattttaattttaaccaaaacatgtctcctatcctggtttttgtagccttcctccacatcctttctaaacaagattttaaagacatgtaggtgtttgttcatctgtaactctaaaagatcctttttaaattcagtcctaagaaagaggagtgcttgtcccctaagagtgtttaatggcaaggcagccctgtctgaaggacacttcctgcctaagggagagtggatttgcagactagaattctagtgctgctgaagatgaatcaatgggaaatactactcctgtaattcctacctccctgcaaccaactacaaccaagctctgtgcatctaactccaaggtntggnggtcagggaagtaatggtttcn

SEQ ID NO: 5091 - DNA, 410 bp, Homo sapiens
gaaaaaattctagttgatagaagataagaaaaagaactaatggcaccctagagatattataataaacgaaagacatcaaagctggacgaagtagcccagtggcttcaaggagaacaatagaagcttgaaaaacatctatcaatccagatcagcatttaataagagccaaaagcccacagatccattaatttaatgaacctgtgaacctggaacattataggtgctcaatatatgtttgttgaattgatctgacaatcctttaaaaagcttaagtcaaatttctagttaaaggcacacgtataataaaagggagaacaggaaagaagaaaacagcctcaaaattttggacttagtgtactggagaaagcagatttttaaactgttagtgaggaaagcggagcagaaactca

SEQ ID NO: 5092 - DNA, 451 bp, Homo sapiens
  misc_feature (1)...(451): n = A,T,C or G
ctggccttcaacatcctggggatggtggtctttgcctttgccactatcacgcctctcatgttcacaggtaaagtgtgtgggctcagggacagcttgtcccagaggcactgggtaagaactgggggccggccactcactgcccccagatgtggttcattcctgtgtctttggaaacatagttatgcccccagcctgcactggagaacagacaactaagaaatccctcaaaaatgccatctttgatacatggaaaatatagaccttcagtagctaaagtaattaacccactgttatcaaccattaatattgttagtaatatagagcaaaagacaaaagtgtggctcatacactaattgctttaccccttggcctcccaccgcctattcatatgttcttaaacaaagtccatgccattaannnnannannaancnaataaaataaaggggcggg

SEQ ID NO: 5093 - DNA, 409 bp, Homo sapiens
agacatctccatgattgggcagtttggtgttggtttttattctgcctacttggtggcagagaaagtggttgtgatcacaaagcacaacgatgatgaacagtatgcttgggagtcttctgctggaggttccttcactgtgcgtgctgaccatggtgagcccattggcaggggtaccaaagtgatcctccatcttaaagaagatcagacagagtacctagaagagaggcgggtcaaagaagtagtgaagaagcattctcagttcataggctatcccatcaccctttatttggagaaggaacgagagaaggaaattagtgatgatgaggcagaggaagagaaaggtgagaaagaagaggaagataaagatgatgaagaaaagcccaagatcgaagatgtgggttcagatgag

SEQ ID NO: 5094 - DNA, 391 bp, Homo sapiens
cggacgcgtgggctgacttttcctgttgagtatagcataaaagaaaaatagagagcaggtctttcaatctcaaaaaagtcagtaattatcaatcagtaattatttctataagaacaattattctttcagggatacagctgatgtttgctcattagctgaaggcactctggagaatagaatatgactcataaataataggtgaggtggttttattatcagctattgtattgaaaagctataggatcctgttattcatcagaataaggaaaatgaagcaattaaaatcaagcctcactaattcacattcatattattaaaagcccatctgactaaaatagagaagtctgatttatagaatatttctgaggaaatacattttaattctttcaag

SEQ ID NO: 5095 - DNA, 488 bp, Homo sapiens
  misc_feature (1)...(488): n = A,T,C or G
aggacactgaggcccttcgaannccaattggaccagancggcncgaantttgggnagaacacccgtccggttaggacgaaggggaaggaggagaagcgcttaaagtggcgggagcggtgcgggagaggggttggacccagggctgaggcaggcccccccctccctcccgcctcagtggatcatgcccagggcggcagcggcggcggttgcgggggggaagtgactgggcggtgccggcgccggagacgatgccgtttccagttacaacacagggatcacaacaaacacaaccgccacagaagcactatggcattacttctcctatcagcttagcagcccccaaggagactgactgcgtacttacacagaaactaattgagacattgaaaccctttggggtttttgaagaggaagaggaactgcagcgcaggattttaattttgggaaaactaaataacctggtaaaagagtggatacgagaaatcagg

SEQ ID NO: 5096 - DNA, 417 bp, Homo sapiens
cccacgcgtccgaacacttctgcgactccaattatttaggatcctggttcaccgtatgttattctaatcactttttctctgttgtttgtatttaccttttacttcactgtcaatattttataaatcatattagaaaactcaagatttaaataaaatcaaaaagttttaatacattaattttaaacaggaaaaatgtaaataaagcaagtgcatattttgaaagcaaagttttgagttaaatttaggaaataggcatttaggctagtgccaagaaaacttacacgttctttctgtgtgtaatttggaggaagggatggattttgttcacagtcattatttattttttttcagggcttgttaggaggcaaaatcataattttttttttactaacagattgtttaaaggctaggttctgg

SEQ ID NO: 5097 - DNA, 401 bp, Homo sapiens
gttttccaaggaggaggttgaccatatgttcgccgccttcccccctgacgtgactggcaacttggactacaagaacctggtgcacatcatcacccacggagaagagaaggactaggagggggctcgctgctgcgccctgggctcgtctttgcagagtggtccctgccctcatctctctcccccgagtaccgcctctgtccctaccttgtctgttagccatgtggctgccccatttatccacctccatcttctttgcagcctgggtggctatgggtacttcgtggccgcacatcctacagttggaaatccatccagaggccatgttccaataaacaggaggtcgtgtatttggtcacgacatttctctgaaaaaaaaaaaaaaagggggggccgctctaaag

SEQ ID NO: 5098 - DNA, 489 bp, Homo sapiens
  misc_feature (1)...(489): n = A,T,C or G
aaggaaaaannttgatngctgtagactgcggcacaggtcccggatcgacccacgcgtccgcggctgcctgaagctagtgagtcgcggcgccgcgcactggtggttgggtcagtgccgcgcgccgatcggtcgttaccgcgaggcgctggtggccttcaggctggacggcgcgggtcagccctggttcgccggcttctgggtctttgaacagccgcgatgtcgatcttcacccccaccaaccagatccgcctaaccaatgtggccgtggtacggatgaagcgtgccgggaagcgcttcgaaatcgcctgctacaaaaacaaggtcgtcggctggcggagcggcgtggaaaaagacctcgatgaagttctgcagacccactcagtgtttgtaaatgtttctaaaggtcaggttgccaaaaaggaagatctcatcagtgcgtttggaacagatgaccaaactgaaatctgtaagcagattttgactaaagga

SEQ ID NO: 5099 - DNA, 408 bp, Homo sapiens
gtgaagaaggcgggaagttaatcctcttccaatcagctccccatctcgccctctggcggctccggaccacaggccgagttactctgattaccgccatgctccaagacccgcactgacagtccccacgtgagggaccgcggtgggagtcctaaatgggggaggaggggacgggcggcactgtgcatctgctgtgcctcgcggcctccagcggggtccccctattctgcaggagcagtcgcggcggcgcccccgcccgtcagcagctcccgttctctgtcatcggttccctcaatggagtccacatgtttgggcagaatctggaggtgcagctgagctctgcgaggaccgagaacacgactgtggtgtggaaaagcttccatgacagcatcaccctcattgttctgtcat

SEQ ID NO: 5100 - DNA, 414 bp, Homo sapiens
tgtcctgagacactcttccagccctccttcattggtatggaatctgctggcatccatgaaacaacttacaatagcatcatgaagtgtgacattgatatccgcaaggacctgtatgccaacaatgtcttatctggaggcaccactatgtaccctggtattgctgatcgtatgcagaaggaaatcactgctctggctcctagcaccatgaagattaagattattgctccccctgagcgtaaatactctgtctggattgggggctccatcctggcctctctgtccaccttccagcaaatgtggattagcaagcaagagtacgatgaggcaggcccatccattgtccaccgcaaatgcttctaagatgccttctctctccatctaccttccagacaggatgacggtattatgcttctt

SEQ ID NO: 5101 - DNA, 423 bp, Homo sapiens
cggcaaaggctgctggtttgcctagaagagtccatttatattcacaacattaaagacatgaagctgtggaagaccctcctggatattcctgcaaacccaacaggtctatgtgctctctctatcaaccattccaattcttacctggcctatcctggaagcctgacttcaggggagattgtgctttatgatggaaactccctgaaaacagtctgcactattgctgcccatgagggaacactagctgccatcaccttcaatgcctcaggctccaaactagcaagtgcgtctgaaaaaggcacagtcatccgggtgttctctgtccctgatgggcaaaagctctatgagttccggagagggatgaaaaggtatgtgacaatcagctctctagtgttcagtatggattcacaattcctctgcgcctcc

SEQ ID NO: 5102 - DNA, 435 bp, Homo sapiens
aggaagtgggcctgacagaaaaaggagaagctagacccctggacttgaaatatgaaaaataaaaagcgcaggccttggcttcgctctctagtgaggctttgggaaccctgccggagtcggaaggagtagacggagagagagaaaagggcctcctcacacaccctggacccttggcccactcctgccgcgcccccgcctcccacgactggcacccccgggccgccccaatccttcagcaaccggtcccctcccctcgcctccctccttctcgggccccagcttcctctctgccttccgccgcccgcttctctcggcacacacacggcttctctctgctcttcgcaatccccgctgtctccccacaccgtggatcgaaccctcaccggcatcttggcggcgcccgggtttcaacccagaggagcaggatccaggtac

SEQ ID NO: 5103 - DNA, 408 bp, Homo sapiens
  misc_feature (1)...(408): n = A,T,C or G
cccacgcgtccgggatgcaataggatattatgccttggtttgactccttttcattcaaattaatgtaagtatgttgttcaagactttgaagcattgaacaatgttctcgacgaattttatttaattactgacattttgtgatatttgaatgttattaagttaaacacttagagttgagtatattcaggggagaaaagtgaatgaaatgactcataataagaaagcttgctcccttgggacagttaccttcctggtgtcattgccatcctgggttgacaagctgagagcagaggatacaagtgatgtgaataaaatggaaattgcattgagttaatgaaacatacacttttagatcaagataacacttcaacagcctttttagaaattggcacactcctatagtcccan

SEQ ID NO: 5104 - DNA, 415 bp, Homo sapiens
cactggccccttgaagacagcagaatgtccctttgcaatgaggaggagatctgggctgggcgggccagctggggaagcatttgactatctggaacttgtgtgtgcctcctcaggtatggcagtgactcacctggttttaataaaacaacctgcaacatctcaaaaaaaaaaaaaaggggcggcctttttaaagaacccttgggggggccaagtttaacccgggatggcaagattatatttttttccttatagggagcccaattaaaacctacctgggaattttggaaaagaaactttatttggggggggggacatattggaacaacctccctccaaaaattaaagcctctagggaaaatataaaattttaaggggtaaaggggggaaaccaacctgcatagcctggttttttaaa

SEQ ID NO: 5105 - DNA, 417 bp, Homo sapiens
cccacgcgtccgatatattaagaagtcactggctgtgcacggtggctcacgcccgtaatcccagtactttgggaggcagaggctggcggatcgcttgagttcagaagttggggaacagcgtgggcaacatggcggaaatcccgtctctacaaaaaaaaaaaaaaaaaaaaataaccccggtggggcccccccgcttttagccccattttcttgggaacctgaggcagaaggtttgggtaacctcaggaggtaagggttgcggggaacaaaaattgccccttggccctccacttgggaaccaaaggaagattttgggtcaaaaaaaaaaaaaaaaaaaaaaagggcccccttttgggaccctttttttttaacgggaccaatttttttttcttttttttcctttttaaaaaaaaaaaa

SEQ ID NO: 5106 - DNA, 395 bp, Homo sapiens
gacagggatcaggcagcggctcatgcgaccctttgtgtgcccccaccccgccatggcccggctgctgcaggcgtcctgcctgctttccctgctcctggccggcttcgtctcgcagagccggggacaagagaagtcgaagatggactgccatggtggcataagtggcaccatttacgagtacggagccctcaccattgacggggaggagctcatccccttcaatgcagtatgctggcaaataccttctctttgtcaacgtggccagctactgaggactgacgggccagaaccttgtactggatgcactacaggaggagcttgcaccatttggtctgtcattcaggctatccctgcaaacacctggaagcaagagccaggagagaactcatagattt

SEQ ID NO: 5107 - DNA, 426 bp, Homo sapiens
  misc_feature (1)...(426): n = A,T,C or G
ngtgctgccggcntncnnnnnnnnaaaccccnnnnngnannnncnctnnnnntnngggnagangnacccgtncggggagacgtatgttcctgttccctagttgctcgttctgtcctggggaagggcccaccccaccagggcaggggccggccgttcttctccaggacttttgctccaggagtgcatgcatggctggatctcactcacattctaaagagctccttctccagagtcccccttcatccggagtccactctgagtccagtcacatgtgtggcatttccatgattgttccctatctgggtacagtttagtggtgcctttgcgtgccacgatggtctcccttgaaacactgtcagcaggcgtgtttcagaccaagacgcagaccttggtcacaagccctgagccacaacgggcgcatcgcag

SEQ ID NO: 5108 - DNA, 435 bp, Homo sapiens
cagactccgccaagcacctgggtctgaagcacgtggtgtacagcggcctggagaacgtcaagcgactgacggatggcaagctggaggtgccgcactttgacagcaagggcgaggtggaggagtacttctggtccattggcatccccatgaccagtgtccgcgtggcggcctactttgaaaactttctcgcggcgtggcggcccgtgaaagcctctgatggagattactacaccttgggtaaaacgaagtgaaaactcactaggcacctggttgccctcctctccactcacctgcctccctctctcccttcttgcccctctgcagtggacacctgtcatctgagtgccttctatgtgtttagccctatgtgaagtgctgagagggatgcctggccaacgtggtgaaacactgtctctactaaaaatacaaaaatca

SEQ ID NO: 5109 - DNA, 404 bp, Homo sapiens
agaaatcaatggacagaaaggtgaagtaagcttaataccaaattttactcaagaaagtttggctgacaggccagtcctgggtttaagaaggggaaaagaaaaatgaaaactgtttcacatactttatggcaatatccttattacaactctgtatagcaaaactctatgttaaggctttcagaataacttgaattgagtcgaaaaaagaagtaggaggtgaaattttttttaacggacgaaaaatttgagttgttttatatatatatatactattaccttagtagatgggagagaaaaatatacaaaaactgatataagttgtccaacataagcagatctgcagaaaatagattattctctattcaaaaaataagaggcaactattattggactaatatatctaa

SEQ ID NO: 5110 - DNA, 426 bp, Homo sapiens
  misc_feature (1)...(426): n = A,T,C or G
ggggacctcaaccaagatggctttccagatattgcagtgtgtgccttctttgatggngatgggaaagtcttcatctaccatgggagcagcctgggggttgtcgccaaaccttcacaggtgctggagggcgaggctgtgggcatcaagagcttcggctactccctgtcaggcagcttggatatggatgggaaccaataccctgacctgctggtgggctccctggctgacaccgcagtgctcttcagggccagacccatcctccatgtctcccatgaggactctattgctccacgaagcatcgacctggagcagcccaactgtgctggcggccactcggtctgtgtggacctaagggtctgtttcagctacattgcagtccccagcagctatagccctactgtggccctggactatgtgttagatgcg

SEQ ID NO: 5111 - DNA, 393 bp, Homo sapiens
cggacgcgtgggcttttcaagtgggggaaagtgggagaggactgagagtgaggcaagttctccccagcccctgtccgtctgtctgtctgtctgtggtggtttctgtttcttgggaggcatggtaggatcataagtcattcccctccccttccaggcctcctgctatatttgggggacctgactggtttggctggagtcccatgaggatgtgggccctttaataaaggatagcaaacagaaaaaaaaaaaaaaataattggggggggccgttttaaagaatcccttagggggcccaagtttacccgggcatgcaaagttttagttttttccttttagggaggcaaattataacctaccttggaatttttggaaaggaaccttacttttgggggg

SEQ ID NO: 5112 - DNA, 580 bp, Homo sapiens
  misc_feature (1)...(580): n = A,T,C or G
gccacgcgcctctctccgtctcacatgtactcattcatttcgctccttatctctttctgagtttctaaggcattacatagtattccgataccccacccagaggggatttgaaaattgangngcatcgcnccggaacncccgggncgacccacgcgnccggagagctgcaaccccagggctgagccactgaacattcagggccttaaacatgacttgggggacttccctgtattcttctttggttctcatgactactactgggtacaccagggcagagtgtccccttatgttgaaggaaacaaaagctttgctgaagggcatactagtattaacaagaccttcaaaaaggcactggaagaagctgcaaaacgttttcaggaattgaaagcacaaagagaaagtaaagaagccctagagattgaaaaaaactcaagaaaaccccctccctacaaacacatcaaagctaacaaagtaataggaaaggtgcagatccaggttgctgacctgtcagagattccccgctgtaactgcaagccacctgatgaaaacccttgtggctttgaatcggagagcctggaca

SEQ ID NO: 5113 - DNA, 399 bp, Homo sapiens
  misc_feature (1)...(399): n = A,T,C or G
ttatgagaatggtgaagaaattgtccattgcgaattagctgcctataggcgaaactctgggctgctggaatgtgatttgttcagataaaactggaacactgacgaagaatgaaatgactgttactcacatatttacttcagatggtctgcatgctgaggttactggagttggctataatcaatttggggaagtgattgttgatggagatgttgttcatggattctataacccaactgttagcagaattgttgaggcggcctgtgtgtgcaatgatgctgtaattagaaacaatactctaatggggaagccaacagaaggggccttaattgctcttgcaatgaagatgggtcttgatggacttcaacaagactacatcagaaaagctgaatacccttttn

SEQ ID NO: 5114 - DNA, 471 bp, Homo sapiens
  misc_feature (1)...(471): n = A,T,C or G
agggcttcaggggttttnnnaactgacgccctgaggaaccgtcccgaancccgggncgaccacgcgtccgatccgcgcgcgagacccctgggcccaggacacgaagctcctggactatgaggtggacagtgatgaggagtgggaagaagaggagcctggggagtccctgtcccacagtgagggggatgatgatgacgacatgggagaggatgaagatgaggacgatggtttctttgtgccccatgggtacctgtctgaggacgaaggtgtgacagaggagtgtgccgaccctgagaaccataaggtccgccagaaactgaaggccaaggagtgggacgagttcctggctaaggggaagcgctttcgcgtcctgcaacctgtgaagatcggctgcgtgtgggcggctgacagagactgcgcaggcgatgacctgaaggtactgcatcagttcgcagcctgcttcctggagac

SEQ ID NO: 5115 - DNA, 410 bp, Homo sapiens
atggcgcgtgccgtgcaacaagatttggtccagctcatgaattccagcggctctcataaagatctggctggcaagcatcgtcagatcctggaaaaagccattcagttatctggagcagaacaactagaagctttgaaagcttttgtggaagcaatggtaaatgagaatgtcagtctcgtgatctcgcggcagatgctgactgatttttgcacacatcttcctaacttgcctgatagcacagccaaagaaatctatcacttcaccttggaaaagatccagcctagagtcatttcatttgaggagcaggttgcttccataagacagcatcttgcatctatatatgagaaagaagaagattggagaaatgcagcccaagtgtgggtgggaatttctttggaaacaggacaaag

SEQ ID NO: 5116 - DNA, 417 bp, Homo sapiens
  misc_feature (1)...(417): n = A,T,C or G
gcttcgctatggcggcaattcccccatattcctggcagccacccaacgtttacttggagaccagcatgggaatcattgtgctggagctgtactggaagcatgctccaaagacctgtaagaactttgctgagttggctcgtcgaggttactacaatggcacaaaattccacagaattatcaaagacttcatgatccaaggaggtgacccaacagggacaggtcgaggtggtgcatctatctatggcaaacagtttgaagatgaacttcatccagacttgaaattcacgggggctggaattctcgcaatggccaatgcggngccagataccaatggcagccagttctttgtgaccctcgcccccacccagtggcttgacggcaaacacaccattnttggccgagtgtgtcanggcatan

SEQ ID NO: 5117 - DNA, 400 bp, Homo sapiens
ctgattgatgcaaagcacaggcttaataaatattaaactagtattataaatttaatatttagtaaatattaaactagtattataaatttaatatttagtaaatattaaattactaaattgtgaatattactaaattataataatattgattattattaaattataataatattactattattttggaagagaacattatcataataagtagttctgccctacttcaacattactggaaaaacagtggcataaattagctcaatcttatttcagctggctcatggctaaagaaaattataattgggtcaagtcaaagcaaatcatttcagcacatcatatacaactttccttgactccctaaaaaagaatatattacatagaaattgaatatataattggg

SEQ ID NO: 5118 - DNA, 487 bp, Homo sapiens
  misc_feature (1)...(487): n = A,T,C or G
ttatgcaataaaatgtctctaacctgcgaacaaatctatcaagcagacggcacagtactgaatttgaaaccagaaatactgggtttttatataaatgcttcatagatttgttttatgataaagggcacataactctcctaaacctcacaccacctcttgaataggtataataagtccacatcaatgctgatgccttagctattattaaactcttacagtatgatgtaaagtgaaagtacaatgtaagatcattcctaggccaactttgaccagttttatacagaaacatgtgccaacttttctgtttgcaaggataatatcaaagcaaacaccagaaagttatatctttgatgcatttttttcaaaatcatacacataatacacaaaccaaagacaaatgatgaatattatgtcagaaaatataaagtcttcccctttcttcttttgccaagaaagtccaatattttcaccatttttatgcacacan

SEQ ID NO: 5119 - DNA, 421 bp, Homo sapiens
  misc_feature (1)...(421): n = A,T,C or G
tgaacaggacccgtcgccatgggccgtgtgatccgtggacagaggaagggcgccgggtctgtgttccgcgcgcacgtgaagcaccgtaaaggcgctgcgcgcctgcgcgccgtggatttcgctgagcggcacggctacatcaagggcatcgtcaaggacatcatccacgacccgggccgcggcgcgcccctcgccaaggtggtcttccgggatccgtatcggtttaagaagcggacggagctgttcattgccgccgagggcattcacacgggccagtttgtgtattgcggcaagaaggcccagctcaacattggcaatgtgctccctgtgggcaccatgcctgagggtacaatcgtgtgctgcctggaggagaagcctggagaccgtggcaagctggcccgcgcatcagggaactatgccn

SEQ ID NO: 5120 - DNA, 396 bp, Homo sapiens
gagcttgtactgacttgtattaaaagataggtgttggttggtagatgattatgcatcccattgaggttctggagcctcagctagggtgggctcattgaccttttgctagtaaatgtcaactttctcactccttagttttgagatacacgagtcctagctttttgtgactgtagcgtaagaccccaccattggcacctatgttgagatcttcctggttgtttagagaactaagcattttatgctgacttaaaagagtctggaaatgatagtctttttatctttccattcatagctccatcctatattcaatttagcaagtacagttccaaaattgtgggtggtctttacttcccaagtaagtgggataccaggctacccttgacttgggaccgcccc

SEQ ID NO: 5121 - DNA, 458 bp, Homo sapiens
ctcgacttcggagaggcagcgcggatcctctgggtgcttccgtctccccttctcctgcttgtccagcctcttcgggctgctggcccgccgcgggaacccgagaccccagtgtatgccccacccctgaccccggtcgcgacatgtccaccccggctcggcggcgcctcatgcggtacttcaagaggttggaggaggatcctccagccggagtcagcggggctccgtccgagaacaacatagtggtgtggaacgcggtcattttctggcctgatgggaccccgttggaggatggaacatttagacgtacgatagaattcactgaggaatatccagagaaaccacctacagttcgattgtgctgtaagatgtgccatgcatatgtctatgcagatggaaggtatgtctggacatacttcagaaccgtggagaccaacctatgatgagcttccattctacat

SEQ ID NO: 5122 - DNA, 473 bp, Homo sapiens
  misc_feature (1)...(473): n = A,T,C or G
cgcccgcctgggcagggcccggcgccgtccgtggatgagccacttaacctctttttccttccgagcggagagaagtttccattcctcttgttcttcctcctcctgttccacctgctcctcggactcccgtgccctcccggcccaggacccgcccatggagaaggccctgagcatgttttccgatgactttggcagcttcatgcggccccactcggagcccctggccttcccagcccgccccggtggggcaggcaacatcaagaccctaggagacgcctatgagtttgcggtggacgtgagagacttctcacctgaagacatcattgtcaccaccttcaacaaccacatcgaggtgcgggctgagaagcttgcggctgacggcaccgtcatgaacaacttcgctcacaagtgccagctgccggaggacgtggacccgacgtcngtgacctcggctctgcgggaggacggcagcn

SEQ ID NO: 5123 - DNA, 518 bp, Homo sapiens
  misc_feature (1)...(518): n = A,T,C or G
gaggggagtggagacagcagtgggtgccagatgacacggagctgtcggcttccgtgtgcattttcttttgatagtagccgtagagaagttgtccgccaggcagccctcaatgggatttttcatttaagaaaaatcactctgctcgtgcactgatggagaaatgaactacaagaagcaagccctgaggtctggagacaggaagctactgaaaccagccagagctaaacggagagactgagaagctgagaagaaaccaaatgctaagaagcagagaagctgagcagaactttcagcagtctcacaggaccgcaaagacaaacagaatttatgctgaacacatttctgagccattacatgttctcctacagcgtatatgaacgttcactaaagctcanagactgtatccatacagagaattcctggaaagaactccaganataatgaaaccanacatctagcantagaaacccagagacactgagtgacttgcctaggaccacagaggccaattggtccag

SEQ ID NO: 5124 - DNA, 431 bp, Homo sapiens
cccacgcgtccggcactgcaaaatgccactctgcatcaaatgaacgcaaatcagccactttaattaagctaagcccttactagaccaatgggacttaaacccacaaacacttagttgacagctaagcaccctaagcaactggcttcaatctacttctcccgccgccgggaaaaaaggcgggagaagccccggcaggtttgaagctgcttcttcgaatttgcaattcaatatgaaaatcacctcggagctggtaaaaagaggcctaacccctgtctttagatttacagtccaatgcttcactcagccattttacctcacccccaaaaaaaaaaaaaaacgggggggccgttaaaaggaatccttgggggggccaaaattaacgcggggatggaaagcaaagctttttcctaatagggaggcgattaagggaa

SEQ ID NO: 5125 - DNA, 445 bp, Homo sapiens
  misc_feature (1)...(445): n = A,T,C or G
agatattataacactcaatattgacccaatgggatgaaaattgttatcttcatgatttcttccaatgggcttanatttgttgggacagggcagaattagaataattatttctcacatataagagtaagtgatatgagattgggaatttcttgccaacactcaagcaaactgcagaagataattactccattttactagctcacctagtttctgaaggatggggtggggagtgagacatggagcctctggggacaaggataggggggtgggactgtcccagtggagggtgccactggtagcctccacccaagtgggccagcagctgtgcaagggtgcagcactaggctggtgaaagccaggttgtacagatctttctaggggaagagaatgattatagaaaaggagaaaagggaggagcaagaacatctctccatggcctattttt

SEQ ID NO: 5126 - DNA, 446 bp, Homo sapiens
ttggggccaggacacccagtgagcccatacttgctctttttgtcttcttcagactgcgccatggggctcatcgacggggaatggcagttggtgctgaacgtctgggggaaggtggaggctgacatcccatgccatgggcaggaagtcctcatcaggctctttaagggtcacccaaagactctggagaagtttgacaagttcaagcacctgaagtcagaggacgagatgaaggcatctgaggacttaaagaagcatggtgccactgtgctcaccgccctgggtggcatccttaagaagaaggggcatcatgaggcagagattaagcccctggcacagtcgcatgccaccaagcacaagatccccgtgaagtacctggagttcatctcggaatgcatcatccaggttctgcagagcaagcatcccggggactttggtgctgatgccca

SEQ ID NO: 5127 - DNA, 440 bp, Homo sapiens
tgcaacctaccggacacatttacagatttatcaaatcagtttgatagaagattgccccttctcatggtgccaaaaagcagttcaacctgtaagtaggttactacatatttggtgtccacgacttcatataagaagtcagaattcaagtatttcagcagctgcaggagatttcagcatttccgtatgttttatgaaaactataattgacttgctaaaaagtgtgcaggttacatgtgttgtatggatagatgagaagctacagtcaaacaggcaagaatttgtttctgaaatactgatttctctagagccacatcttttcctttttttcagtgaaagattagatgctgtgactaggcacctaaaatttacaaaccctatttcaaggactctgacgtataagtgtccttatgctaactgtgacagggtatcaggaactaaag

SEQ ID NO: 5128 - DNA, 447 bp, Homo sapiens
ctgcacgagacctggcatcagacatgccttgaactggatcgctacctacagacggagccccggaggatctcatagaccttaggtgaggacttggactgtttcctccacgcttcccctcccccgtgcattgaggaaagcttacgtcgcttataccccctgctgctccccgtggaagcggccatctgtgacaagagctcgggagaggacatcttgctctctcgggacaagttgctatctgatacctggctcagactccagacggccagctcttctctagacagctacacagtcgtgaaccacggccatctctacgcagagacctcattatcgcccccatcgtaccctgagctcatgcgacatctggtctaaaactcacaaactctctctgacgtggttgtgacggtgacggtgaatctggtggccgagacagctgctctcagctccgta

SEQ ID NO: 5129 - DNA, 430 bp, Homo sapiens
  misc_feature (1)...(430): n = A,T,C or G
ctgcctaccctaggcatgaacagcaagtgttacaattatggacgctttggctggttgcagctagagcacaggaaagagtctggctttctcaaacaggtggcacaaagataccatccaggaataactgtagcattggttgtaataatgaaaaactgaaaataacctacattgctatcaatagcttatcacttttgcaaaaaaaaactaattaaaatctgtacacgtgtccatacacatatgtgtaaatgcacacacacacacacgcacacactatttttggtgtatagacaaatatctggatgggttcatgcataatgttagttgttacatctgggcaaactttatatacttctgtattgtttgaattacctcacaaggagaatatgttactggaatcaatcaaaagtaaataattgaatgaatgaaatcn

SEQ ID NO: 5130 - DNA, 415 bp, Homo sapiens
  misc_feature (1)...(415): n = A,T,C or G
acctcatttgtccacatagaccatggccagacagacaatggggattatgcatctttgatgatgtcatagaacactgtagtccagcctcatttaaatacgcagaatatttcttaagaccaatgctccaatatgtatgtgacaacagcccagaagtcaggcaagcagctgcatatggcctgggagtcatggcacagtacggtggagataattatcgccctttttgtacagaagcacttcccctgctggtaagagttattcattctgcggattctaagaccaaagaaaatgtcaatgctacagagaactgcatctcagcagtagggaaaatcatgaagttcaagcctgactgtgtaaacgttgaagaggtccttccacactggatgtcttggcttcactacatgaagataaagagaan

SEQ ID NO: 5131 - DNA, 410 bp, Homo sapiens
cacgagccgaggcctcctgcagtgttctgtacagcaaaccgcacgctatggctgacagccgggatcccgccagcgaccagatgctgcactggaaggagcagcgggccgcgcaaaaagctgatgtcctgaccactggagctggtaacccagtaggagacaaacttaatggtattacagtagggccccgtgggccccttcttgttcaggatgtggttttcactgatgaaatggctcattttgaccgagagagaattcctgagagagttgtgcatgctaaaggagcaggggcctttggctactttgaggtcacacatgacattaccaaatactccaaggcaaaggtatttgagcatattggaaagaagactcccatcgcagttcggttctccactgatgctggagaatcggag

SEQ ID NO: 5132 - DNA, 490 bp, Homo sapiens
  misc_feature (1)...(490): n = A,T,C or G
aagggaaacctgattccctcgagnaccgtcncggaanncccgggnngacccacgcgtncgctgaaacaacacaaaaccctatctcaagaacttgttattctccggttagagctagtcactgcttcaaccacctgtgagaaattagaaaaagccaggaatgagttacaaacagtgtatgaagcattcgtccagcagcaccaggctgaaaaaacagaacgagagaatcggcttaaagagttttacaccagggagtatgaaaagcttcgggacacttatattgaagaagcagagaagtacaaaatgcaattgcaagagcagtttgacaacttaaatgctgcgcatgaaacctctaagttggaaattgaagctagccactcagagaaacttgaattgctaaagaaggcctatgaagcctccctttcagaaattaagaaaggccatgaaatagaaaagaaatcgcttgaagatttactttctgagaagcaggaag

SEQ ID NO: 5133 - DNA, 437 bp, Homo sapiens
gctcagatccagatggcattccgatatgagaccttatgcaatgagctcagcttcctgtctgatgctatgaaatcagaagagatcaccgtcttgaccaactaggtccagcatttgacatgcattttaactttttggttcaatttcaagcctgctgaggctaataggggtcaagattccgaactatgactttcctctgcgaagaggaggcctctgaagaaattttaaactggtgattttggttgcactgctcactttaagagttaacatgctcacttgttagtatttctgagtaacaagatggtgacttctccttgaggatctgggagctgagcacttgtctatacttgttcctaattttccaagtatttctcttgaaactggcagtgcctgaactgtagtggccaggatttccctgggcagatgccaagtaacatgtg

SEQ ID NO: 5134 - DNA, 415 bp, Homo sapiens
acgagccgaggcctcctgcagtgttctgcacagtttaccgtacgctatggctgacagccgggatcccggcagcgaccagatgcagcactggaaggagcagcgggccgcgcagaaagctgacgtcctgaccactggagctggtaacccagtaggagacaaacttaatgttattacagtaaggccccgtgggccccttcttgttcaggatgtggttttcactgatgaaatggctcattttgaccgagagagaattcctgagagagttgtgcatgctaaaggagcaggggcctttggctactttgaggtcacacatgacattaccaaatactccaaggccaaggtatttgagcatattgcaaagaagactcccatcgcagttcgtgtcttcactggtgctggagaatcaggctctagt

SEQ ID NO: 5135 - DNA, 405 bp, Homo sapiens
tctgggcgctgttgataggactttaggcctgcggaggggcgttatctggagggccgcgggtgcaggccgcagtgacagggccgctcgccccgctagtcctgcctgtctcccggtgcagctgtgttcgcggcctgcaggcccaacatggcgcaggaggtgtcggagtacctgagccagaacccgcgggtggcagcctgggtggaggcgctgcgctgcgacggcgagactgacaaacactggcgccaccgccgggattttttgcttcgcaacgccggggacctggcccccgctggcggcgctgcctccgctagcacggatgaagctgccgacgccgagagcgggacccgaaaccggcagctgcagcagctcatctccttttccatggcctgagcgaaccacgtcttt

SEQ ID NO: 5136 - DNA, 449 bp, Homo sapiens
cccacgcgtccgcccacgcgtacgtgcctctcgagacatacaaatccttgctttgtcagcttgcaaaggaggagagtttaggattagggccagggccagaaagtcggtatcttggttgtgctctggggtgggggtggggtgtttctgatgttattccaccctcctgctacattatatccagaagtaattgcggaggctccttcaactgcctcatcactttgattttggacagggacaaggtaggaagagaagctttccttaaccagaggggccatttttccttttggctttcgagggcctgtacatatctatatataattctgtgtgtattctgtgtcatgtgggggtttttaatgtgattgtgtattctgtttacattaaaaagaagcgtttattataattgccctataaacaagagatacgaatccttttggttttctatgagccgg

SEQ ID NO: 5137 - DNA, 442 bp, Homo sapiens
tccagatcagagtcagccagcatgaccgagcgccgcgtccccttctcgctcctgcggggccccagctgggaccccttccgcgactggtacccgcatagccgcctcttcgaccaggccttcgggctgccccggctgccggaggagtggtcgcagtggttaggcggcagcagctggccaggctacgtgcgccccctgccccccgccgccatcgagagccccgcagtggccgcgcccgcctacagccgcgcgctcagccggcaactcagcagcggggtctcggagatccggcacactgcggaccgctggcgcgtgtccctggatgtcaaccacttcgccccggacgagctgacggtcaagaccaaggatggcgtggtggagatcaccggcaactcagcagcggtgtctcggagatccggcacactgcggaccgctggcgcgtgtc

SEQ ID NO: 5138 - DNA, 310 bp, Homo sapiens
tggggggaagcactgattcccagttagggggtgcctaactgagcagtagggatagaaggtgtgaacctgggagtgcttttataaattattttccttgtagattttatttttaatttatctctgtgacctgccagggagaggggagagagagagagatgctgttgagcacatgacaaaataaaataaaatggatgattcaaaaaaaaaaaaaaaaaaagggggggccgttttaaaggttccctgggggggcccaagtttacccgggcttgcaaggtattagttttttccttttggggggccgttttataac

SEQ ID NO: 5139 - DNA, 401 bp, Homo sapiens
cccacgcgtccggaacagtgtgatgtacagttctcctcaagcagtgaactctacctacatttccaggagcacagctgtgatgaacagtacttgtgtcagttctgtgaacatgaaactaatgatccagaagacttgcatagccatgtggtaaatgagcatgcatgtaaattaatagagttaagtgataagtataacaatggtgaacatggacagtatagcctcttaagcaaaattacctttgacaaatgtaaaaacttctttgtatgtcaagtatgtggttttcggagtagacttcacacaaatgttaacaggcatgttgctattgaacatacaaaaatttttcctcatgtttgtgatgactgtgggaaaggcttttcaagtatgctagaatattgcaagca

SEQ ID NO: 5140 - DNA, 422 bp, Homo sapiens
  misc_feature (1)...(422): n = A,T,C or G
caggcaggtaatctcatgctcagaagatggcagtgtactcatttgggagataagagaaaaacagcagcttgcagctgagcctgtaccaacaggtttttttaacatgtggggatttggaagagtcagcaaacaagccagcctacctgttaaaaagcagcaagaaaatgctacttcatgttcactggagcttattggagatttgattggacactcatcatctgtggagatgtttctatactttgaagatcatggactagtgacgtgctccgctgatcatctcattattttgcggaaaaatggagagcgagaatctggattgcgcagtttaagattatttcaaaaattagaggagaatggggacttataccttgctgtctagtttaaggaattaaaaatacacatgcatgagccttgaacatcan

SEQ ID NO: 5141 - DNA, 416 bp, Homo sapiens
tgattggtgaagtgtgttcaggctcacagcctcctccgctccattcttctgacggggaatccactgggtggactggtggtgactttgccaaggtctcacaacctacccagcacggaagggctcgggacctggctcatagccccagtgtccctggtgatggagagcccccgcagtggggaatggggggagcctgtttttccctcctcctttttcaaggctcacaaacacggaaggttgggtcccaccagcacaactccccccatgacaagcctgaatctgtttaacataaatgggaccaaatgtggacactgaggagcccaccgccggagcaaggctgagctgccacccatccacggagaggtcccagtgagggagctgtgagggcctgtggctgaaatcccgggagggacctgaag

SEQ ID NO: 5142 - DNA, 433 bp, Homo sapiens
  misc_feature (1)...(433): n = A,T,C or G
acaataaaaagctcaattttcacaaccttaaaagcttttattgcttgcacatgcctgtgcagtaaatggggagtttaccttgtttttaggaagagaaaatgacatgcaaagaagtgaattgatgaaatttaattgactctagtcattgaacacctgctacttggtaggtattctactagacataaaacgctaaataaaatacagcccatgctctcaagtcagtcataagctcatggaaaaaaataacaggagcatcagtgattaccaaatcatatgtcaactaattctcaaagacagggaggaagttcctcccaagtaaagaattctgcacagacaaattaaaaaggtataaagaaagatgaaagatgatatattacaatgttctgctcttcaaaaatcatcattaagaaaataaaaagatgtgtcaacgacn

SEQ ID NO: 5143 - DNA, 433 bp, Homo sapiens
cccacgcgtccggtgcaaactggtggagaatttaatcatgatgatcatgataatggtaataataataacagtaatacagcctgttcagagaaaataagagatgtcctataggccctaggaaatatgaactggacttcagctgagaagttatgagccacagaactttatcaatgcttatggagctattaaagaaattagaatagggcaggagtgtgcagtgtgagctgaccataaattgatcccctagaaaaacaacatcaaagggtgggagaaaccagcaaaggaagcccaagaagaaagcttagagaggcagaagctggtgaaataaaagaggcggagaaagaagagagagtttcaataaggagggactggtcaaccgtgtcaaatgttgcataaatgtcaagtaggataacaagagaaagtgaggccattg

SEQ ID NO: 5144 - DNA, 404 bp, Homo sapiens
ctcagcccttgcgaggaaactaaggctgcgttggggagaggacctcacttcatccggcgactagcaccgagtacggcagcgccagccctacactcgcccgcgccatggcctatgtctacgagctcgcctgcatctactcggacctcattctgcacgacgatgaggtgacagacacggaggataagatcaatgccctcattaaagcagccggtgtaaatgtcgagcctttttggcgctggcttgcttgcaaaggccctggccaacgtcaacattgggagcctcatctgcaatagtacgggccggcggacctgctacagcagctggtgctgcaccaacaggatgtcctgccccctccactgctgctgctgcagctgaggagaagaaagtggaagcaaataaagaaa

SEQ ID NO: 5145 - DNA, 429 bp, Homo sapiens
cccacgcgtccggaggctggaatcaagaatgagagccttgatattgttgtatcaaactgtgttattaaccttgtgcctgataaacaacaagtgcttcaggaggcatatcgggtgctgaagcatggtggggagttatatttcagtgacgtctatacgagccttgaactgccagaagaaatcaggacacacaaagttttatggggtgagtgtctgggtggtgctttatactggaaggaacttgctgtccttgctcaaaaaattgggttctgccctccacgtttggtcactgccaatctcattacaattcaaaacaaggaactggaaagagttatcggtgactgtcgttttgtttctgcaacatttcgcctcttcaaacactctaagacaggaccaaccaagagatgccaagttatttacaatggaggaatt

SEQ ID NO: 5146 - DNA, 423 bp, Homo sapiens
  misc_feature (1)...(423): n = A,T,C or G
ttctagatcgcgtcaggccaccctcattgtaagtggtgtagtattaaaatattttcacggaattaaaagtagcttgctgtcaaagaaacacctgagatgaattggtgtgaacgaattttgcaagtttaatttgatttatttcagagaaaatagaaaaaacaatgttagaaggttatttaaaatgatacttaaataaagaaagtgtgaggtctactttaaaaaaattcaaatgaagagaaaaagaaaaacagcattctagaaatggcatttctcctaattaattttccacttaatggaagattatcaattgtcctattttatgatcccaggactgaagacagttgtgggatatctgtcatatttatcctgtgagtcattgtgaataatgacatacagtactgaagtaatctgattttattcttn

SEQ ID NO: 5147 - DNA, 399 bp, Homo sapiens
  misc_feature (1)...(399): n = A,T,C or G
gctgtcaaggggactctaaaatacgacttatacaaccccacatgagaagcatttttattactttatacttttattcaactgaattatttaatatgttaaagtcataggattttagggtcagaactacagttcaatggcccttaaattggattttgtacatccatgtagagggcaaagctaaactaggcaggatgaagatccctacttcaaccacagtagttcagattgtatccattttaaatatcaggattctgtacaggattttgtttgcaggtgaaaaaaaaaaagtcccttgggctggtctaaatcaccttcattttgctaacaaagatgctcatgaccagggatattaaaaatgttgctggctgggcgcaggggctcctgcctgtaatcccagcn

SEQ ID NO: 5148 - DNA, 402 bp, Homo sapiens
cacagttataagacaaaatcatgttgttgatgtcagtgttgcggtcagtactcctgcaggactcatcacacctattgtgtttaatgcacatataaaaggagtggaaaccattgctaatgatgttgcttctttagcaaccaaagcaagagagggtaaactacagccacatgaattccagggtggcacttttacgatctccaatttaggaatgtttggaattaaaaacttctctgctattattaacccacctcaagcatgtattttggcaattggtgcttcagaggataaactggtccctgcagataatgaaaaagggtttgatgtggctatcatgatgtctgttacactcacttgtgatcaccgggtggtggatggagcacttggagcccagtggcttgctga

SEQ ID NO: 5149 - DNA, 414 bp, Homo sapiens
tctaatggaaaatcaattaactattttagtaattttctacacgatacccaaattttaaaaacttaaaagcaaaggtgagttgaatcatgctgaggactatatatgtacataaaagctgcgaactcttcattctgtttgctaagaacctgttgcttggcattgcttgtctctcagtgtccatgtgacgcacaaccaaaccctcatgtttcagatgttaaccttgtgtagaggagacacaaacgaaatctgatgaattagtatgttcagaaaactgaatgaatggaggtgctgcgactcccttatgataagggatcactcaacatctcattaatattgtcttttatgagaccacctggtatttctgcatgaggcatttatcataacttctatccaccaaaatatattataatctag

SEQ ID NO: 5150 - DNA, 428 bp, Homo sapiens
accgcagctgctgcagtggctgaaggaggaatgatggagacagtgccaggcccaagaactagaactttaaaacgttcccggggcctcagacaagtgaaaaccaaagtaaatgctgcttttagaactgtgccctcatgccctcttcctgctcacatgctagcggggcccagcagccctgggtggttttgccagcatgctaactcttgtaactcgcagctgcatcctatgagctctcccaagcttccccgcccctcccctgggtcagccgtgaggcccacctttgccaccctcagctctttcctctggtgtggcttcagcttgaaagcaacctggagtcgggggcacagcctttggggcctggctgggagagggtcttggagcattaagggaagaagagagcagtgggatcttggggcctgagaagcctc

SEQ ID NO: 5151 - DNA, 417 bp, Homo sapiens
catgaactgcatctcgaggatcaagattaggctccccagtccattgtgacatccagcaaagtggacaggctcaacttccgagaccatccttaaacatcagtagactgtgagcagtacatggacgggagcagattctccaacccctgcaaagtgactctgaagaagacgacaagccctgctccagtcacacccggaggctgactgggccacgcatggccgaagcatgagaatactcagcacaggactcattttccttaaaatttggacttgtaccatgaggactataactgaccttcctcagtctgaggactgttcccagtgtacacatcaagacactgaggtgtctgcgtccgagctcttttttgtagttctggtctatgtacaggacaggagtaatcgagttggagaagaccctgg

SEQ ID NO: 5152 - DNA, 482 bp, Homo sapiens
  misc_feature (1)...(482): n = A,T,C or G
nctgatagcctgcggaccgtcgaggaacctccgggncgacccacgcgtncgagaggcctgcgcccacaccctctcctgtccagccctcgcccgcctgggcagggcccggcgccgtccgtggatgagccacagaacctcttccaccttccgagcggagagaagtttccattcctcttcctcttcctcctcctcttccacctcctcctcggcctcccgtgctctcccggcccaggacccgcccatggagaaggccctgagcatgttttccgatgactttggcagcttcatgcggccccactcggagcccctggccttcccagcccgccccggtggggcaggcaacatcaagaccctaggagacgcctatgagtttgcggtggacgtgagagacttctcacctgaagacatcattgtcaccacctccaacaaccacatcgaggtgcgggctgagaagctggcggctgacggcactgtcatgaaca

SEQ ID NO: 5153 - DNA, 412 bp, Homo sapiens
tttgccgtcagaacacaagtgtcgtgaaaactacctttaaaagccaacatgggaaaggaagagactcatatcatcattgtcgtcattggacacgtatgattccggctagtccaccactactggccatctgatctataaatgcggtggcatcgacaaaagaaccattgaaaaatttgataaggaggctgctgagatgggaaagggctccttcaagtatgcctgggtcttggataaactgaaagctgaacgtgaacgtggtatcaccattgatatctccttgcggaaatatgagaccagcaagtactatgtgactatcattgatgccccaggacacagagactttatcaaaaacatgattactgggacatctcacgctgactgtgctggtctgattgaagctgctgctgttggc

SEQ ID NO: 5154 - DNA, 419 bp, Homo sapiens
  misc_feature (1)...(419): n = A,T,C or G
gggccgctgaataagcttccaaaatgatgcccacaccagttatcctattgaaagaggggactgatagctcccaaggcatcccccagcttgtgagtaacatcagtgcctgccaggtgattgctgaggctgtaagaactaccctgggtccccgtggcatggacaagcttattgtagatggcagaggcaaagcaacaatttctaatgatggggccacaattctgaaacttcttgatgttgtccatcctgcagcaaagactttggtagacattgccaaatcccaagatgctgaggtgggtgatggcaccacctcagtgaccttgctggctgcaaaattntgaagcangtgaaaccctatgtggaggaaggtttacacccccagatcatcattcgagctttccgcacagccacccagctggcag

SEQ ID NO: 5155 - DNA, 423 bp, Homo sapiens
agacagaggcacggagagaaaggaatgtttagcacaagacacagtggatacctgccctgacatgtgaggcaagctaaggcctggagggtcagatgggagaccaggtcccaagggagcaagacctcgcgaagcgcagcagccccggcccttcccccgttttgaacatgtgtaaccgacagtctgcctgggccacagccctctcaccctggtactgcatgcacgcaatgctagctgcccctttcccgtcctgggcaccccgagtctcccccgaccccgggtcccaggtatgctcccacctccacctgccccactcaccacctctgctagttccagacacctccacgcccacctggtcctctcccatcgcccacaaaagggggggcacgagggacgagcttagctgagctgggaggagcagggtgg

SEQ ID NO: 5156 - DNA, 547 bp, Homo sapiens
  misc_feature (1)...(547): n = A,T,C or G
ctacgccccgcgctcgaagcaggtgtgcggcgtaatacccagcacttttcctccccaagggcnccaggcgccgccnccccccccccntttgacagcctcggttcgacnccgtaancccgggccgacccacgcgnccgcccacgcgngcgannnaaanancaagggcnatacatttaaanacagagaatctgtatttaaatgtatagaccttgatattttgccaatactattttttaaaaaattgtatgatttacatatgaacctcagttctgaaattcattacatatctgtctcattctgccttttatactgtctaaaaaagcaaagttttaaagtgcaattttaaaactgtaaattacatctgaaggctatatatcctttaatcacattttatattttttcttcacaattctaacctttgaaaatattataactggatatttcttcaaacagatgtcctggatgatggtccataagaataatgaagaagtagttaaaaatgtatggacagtttttccggcaaaatttgtagcttatgtcttggcta

SEQ ID NO: 5157 - DNA, 421 bp, Homo sapiens
  misc_feature (1)...(421): n = A,T,C or G
cctgaaccccaaggccgatgtggcccgagcgcatgtggcgctggcggtcaacatcagcgcagtgcggggtctgcaggacgtgctaaggaccaacctggggcccaagggcaccatgaagatgctcgtttctggcgctggagacatcaaacttactatagacggcaatgtgctgcttcacgaaatgcaaattcaacacccaacagcttccttaatagcaaaggtagcaccagcccaggatgatataactggtgatggcacgacttctaatgttctaatcattggagagctgctgaatcaggcggatctctacatttctgaaggccttcatcctacaataatcactgaaggatttgaagctgcaaaggaaaaggcccttcagtttttggaagaagtcaaagtatgcagagagatggacagggan

SEQ ID NO: 5158 - DNA, 424 bp, Homo sapiens
ctatttttttcctctcctctttattatttcacaaatggtagaatttcttgatatgattcttgtaaagagtttagcttatcttgaacattctgtcttaagcaaatatttaacaagagaaaactttgtagtttaatcacccataagtgtaactttagcaaaattcaatgactatgaaaaataatttttttcttaactgttctaataatatttagttataatattatcaaaccttcagaaagttataaatcctaacagccagaaaaaaaaatttactatgtgtatatttatataggtgtgtgtatacacaaagattaagaattattcatgattcttttatggccaatatacttttgagcttgtataactgagataagttactctttgcttgtttttctgtagttggaaaatttaggaagttattaaa

SEQ ID NO: 5159 - DNA, 419 bp, Homo sapiens
cattcggtaacacccacaacaagttcaagctgaattacatgcctgaggaggagtaccccgacctcagcaaacataacaaccacatggccaaggtactgacccttgaactctacaagaagctgcgggacaaggagactccatctggcttcactgtagacgatgtcatccagacaggagtggacaacccaggtcaccccttcatcatgaccgtgggctgcgtggctggtgatgaggagtcctacgaagttttcaaggaactctttgaccccatcatctcggatcgccacgggggctacaaacccactgacaagcacaagactgacctcaaccatgaaaacctcaagggtggagacgacctggaccccaactacgtgctcagcagccgcgtgcgcactggccgcagcatcaagggctacacg

SEQ ID NO: 5160 - DNA, 427 bp, Homo sapiens
  misc_feature (1)...(427): n = A,T,C or G
gcgcccacgcgtncgcccacgcgtncggcgaggcagccatgtcttatcccgctgatgattatgagtctgaggcggcttatgacccctacgcttatcccagcgactatgatatgcacacaggagatccaaagcaggaccttgcttatgaacgtcagtatgaacagcaaacctatcaggtgatccctgaggtgatcaaaaacttcatccagtatttccacaaaactgtctcagatttgattgaccagaaagtgtatgagctacaggccagtcgtgtctccagtgatgtcattgaccagaaggtgtatgagatccaggacatctatgagaacagctggaccaagctgactgaaagattcttcaagaatacaccttggcccgaggctgaagccattgctccacaggttggcaatgatgctgtcttcctgaa

SEQ ID NO: 5161 - DNA, 418 bp, Homo sapiens
  misc_feature (1)...(418): n = A,T,C or G
cccacgcgtccggaaagtacgaatttggttagtgaagcgggaagactgcatatttataattggcatactacttgcaattttttgtttttcatcacttgtaataatggaatggaaatgtaagctgtaaagactctcaaatataaaatatttgctacagtgtatatatgggacataattgcttgctgcttttaaagctccttctgttgttctgcttcccactgatttcataccagctcatgaatggatcattacagtctctccagaggcttagaatgattcataatgttcaatgcatacttctcaataaacaagaggcagaatttttaatgggtatttcttttcagatatatgataggtctctacgcttttgataataatatggccttaaattcataattactagccgagatcgataatn

SEQ ID NO: 5162 - DNA, 420 bp, Homo sapiens
  misc_feature (1)...(420): n = A,T,C or G
cccacgcgtncgcagacttattactagatgattcgctggtgtccatctttgggaatcgacgtctcaagaggttctccatggtggtacaggatggcatagtgaaggccctgaatgtggaaccagatggcacaggcctcacctgcagcctggcacccaatatcatctcacagctctgaggccctgggccagattacttcctccacccctccctatctcacctgcccagccctgtgctggggccctgcnnnnaaaaaaaaaaaaaaaaaaaaaaagaaaaaaaaanagggggggggccttttaaaaaatttcttggggggccccaaattaccgggggggggaaaaataaatttttttttttttaggggggctgtttaaaaccctgctgggggcttttggaaaaaaaccctttttttggggggg

SEQ ID NO: 5163 - DNA, 482 bp, Homo sapiens
  misc_feature (1)...(482): n = A,T,C or G
tgcacttgccctcctaaagctgggaaggagaatacttatgtcatgagctactggtgaagttttatgaaagtatagggatggcatttgagtgggactccttgacagatggtacttaagttaatgaatgtttttgatgtttgaaaggatgagagaataaatgggtaaaatacgaatatagctcaatagagtgtgatatagaaggaagcatttcatgaggagaatgagaacaaaggcatagagaagaagcatttgttggtggctgggaactcccaagtgttctgctgaggggtaaagtcaggtttcaaatgccatgtaaccagcacaactttatttgaaagatgaagggagcttctgaaagctttctaacagtggattgcattatttcaccttgtgccacttgccaatttgcacacttagacatgcataaatcaaccctggaggtataaaccttcagttgggttttaatanaagatgacatgcct

SEQ ID NO: 5164 - DNA, 416 bp, Homo sapiens
tcagaggtcatacctcaggactagggggcctgttatggggtcttggccaaactcttgatccgtacctggggccggggtacaggagacactgtctggacacaaggataaggtgacagctgccaaattcaagctaacgaggcaccaggcagtgactgggagccgcgaccggacagtgaaggagtgggacctcggccgtgcctattgctccaggaccatcaatgtcctttcctactgtaatgacgtggtgtgtggggaccatatcatcattagtggccacaatgaccagaagatccggttctgggacagcagggggccccactgcacccaggtcatccctgtgcagggccgggtcacctccctgagcctcagccacgaccaactgcacctgctcagctgttcccgagacaacacactca

SEQ ID NO: 5165 - DNA, 471 bp, Homo sapiens
  misc_feature (1)...(471): n = A,T,C or G
aaagacacaaatattttagaactaaatgagaggctgttttctgcattccttggctcatggccccttccatcttcaaagccagcaatgacaagttgagtctttctcaggtcgcactactgactcttctgcctccctcttccatatctgagacacaaccggataatttaggataacctccttattttaagtctcttctacagaattcaagctccacgatggcaggccacttctggctcaaacagtgctgttagtattcagcagaatgacggtgttaaaacaaaaatggactgattgagtaactataaaagaagtggcagtctacggccataccaccctgaacgtgcctgatctcatctaanagaagtgacaaagaagaagtgttgtgcaagaactttatggcaaaaatctggaagtcactttcgagtacagtgatcagtgcttatgtagctagcaattnttttctaaaataag

SEQ ID NO: 5166 - DNA, 423 bp, Homo sapiens
cccacgcgtccggtactacatggtcgaccaatatctagttctttactttaagtaaactcacctctttatatatatttcaaaactgaatttgaagcctattagagaccaactgaccttttagttgtaatgaactgtatggtcttgcatggcgacacacctgtgtaagaggccaccacttggcagaggatgtagtctaggcggactggtatatataaatggccactcacttcgtttatatattccacactcagaaaagaagtgagagttttttctgagtaatacaaaaaccatcacttacataatttgtataagaaactttacacagttttaatcaaaactatgagttgcatcacatatgctttaagattctatattttggaatacctgtgaaagagtatgactacatcctgttaaatatatatt

SEQ ID NO: 5167 - DNA, 428 bp, Homo sapiens
cggacgcgtgggctctgcagagagaatgatacaggagttcaaagaagccttcagctgtatcgaccagaatcgtgatggcatcatctgcaaggcagacctgagggagacctactcccagctggggaaggtgagtgtcccagaggaggagctggacgccatgctgcaagagggcaagggccccatcaacttcaccgtcttcctcacgctctttggggagaagctcaatgggacagaccccgaggaagccatcctgagtgccttccgcatgtttgaccccagcggcaaaggggtggtgaacaaggatgagttcaagcagcttctcctgacccaggcagacaagttctctccagctgaggtgaggctgcccagccccttcaatactcatccccagcaccttctctgggccttcacccatgacccagagccca

SEQ ID NO: 5168 - DNA, 396 bp, Homo sapiens
tgatttggagatatctcgaatatacattggtatataaaaaaagcacggtgcagaatagtgtatatagagagctcagcatgaacaatgggattcttctgagacagcatttaaaaaaatgagaaaggatatctatgaaaatattcacttgaacattcctggacattctttgggaaacaaaatgatcacctctttgcctgtgaaagaagaactgtgtggccaagtataggagaagacttcttgtgaaaaagttcatactttcgaatttggaactattggaatgtattaccttttcaaaaatttaggttggccaggtgtggtggctcacagctgaaatcccagcactttgggaggtggaggcaggaggattgcttgatgccgggagttcacgacaagcct

SEQ ID NO: 5169 - DNA, 402 bp, Homo sapiens
  misc_feature (1)...(402): n = A,T,C or G
cttcttaggagtatcctaactgccggtggggagaacttcgccctaaacctggggttccgatccaggaactggaagttgacagcttggctgcctggctcctacatctgccttctccactcaccatctcatttctttctccaggattgtcagtggcttcgccccgaggagagctgactgccctgggctgctgcctccggcagagctgagccaaaatgtccccggaatctaaaaagcttttcaacatcattattttaggagttgcctttatgtttatgttcactgcctttcaaacttgtggaaatgtggcgcaaactgtcatcaggagcttaaataggacagattttcacggcagtggatataccagcatggctattatctatggagtgttctctgcttcaaatn

SEQ ID NO: 5170 - DNA, 473 bp, Homo sapiens
actagaaagccctcgatacccgctccggaatcgccgcggaagatccacgcgtgacgcgcgaattagaactatcctatatagtcacctatatctctggaacattctataatttccatattaatttcaaatatgctcgagttattcttcggggacttccacaataagagcattttattcttcggtttaagcactgaagcatataatgaaagtacttgctaagtagcagcttaaaaattcaattatccgattgtatttaacatctttattagcatgatcataaagagctatttttgacaccccccccccacttttttaacatttagagatagtaagggttttatatctattctggccatattgttttcaaaggaatgaggtgtttaagtggctggaaaagcatttgtaggaagttagatttgaatatagacaaggtgggttattcacgttgagaatgttatttgaagaatgcctgg

SEQ ID NO: 5171 - DNA, 426 bp, Homo sapiens
cttatcctttaagaaaacagctggcggcacttacatttattatcattattgagcctacggcagagatctatgtggggatttacgaagcctacaggtctatacagataggaatgatctattggcttactgaatggtgattactttctgtggggctcgggactacatgccctaggatataaaaatgatgttatcattatagagtgctcacagaaggaaatgaagtaatataggtgtgagatccagaccaagagtcatttagcaagtttattcagtgatgaaaacatgggacaaatggactaatataaggcagtgtactaagctgagtagagagataaagtcctgtccagaggatacatgcttcctggcctgattgaggagatggaaactttttgcataaaacaaggtgctgtggtcttccatccagag

SEQ ID NO: 5172 - DNA, 439 bp, Homo sapiens
  misc_feature (1)...(439): n = A,T,C or G
ttaaaaaaagtaaaaggaactcggcaaatcttaccccgcctgtttaccaaaaacatcacctactcatgcacctaattggaagcgccaccctagcaatatcaaccattaaccttccctctacacttatcatcttcacaattctaattctactgactatcctagaaatcgctgtcgccttaatccaagcctacgttttcacacttctagtaagcctctacctgcacgacaacacatannaaaaaaaaaaaaaaaaaaaaaaaaaaaaaaaaaaaaaaaaaaaaaaaaaaaaaaaaaaaaaaaaaangggggggggggctttttaaaaaactccggggggggcccaaatttcccgggggggggaaaaaaatttttttttttttaaggggggggtaaaaaaaacctcctgggggtttttggggaaaaaacctttctttggggg

SEQ ID NO: 5173 - DNA, 409 bp, Homo sapiens
gccctggcaagatggattccaggggtgagcacagacaggatcgcagggagaggccgtattaattagcctggctccccaggttctggaacagctttttgtcctgtacccagtgttaccctcgttattttgtaaccttccaattcctgatcacccaagggtttttttgtgtcggactatgtaattgtaactatacctctggttcccattaaaagtgaccattttagttaaaaaaaaaaaaaaaataaaaataaaaaaaaaaaaaaaaaaaaaaaaaaaaaaaaaaaaaaaaaaatgaaaaaaaaaagaggggggggggtttttaaaaaaaccttggggggggccccctttttgcggtggaaagaagaaattttttttttttattagagggaaaataaaaaaaaccccgggg

SEQ ID NO: 5174 - DNA, 444 bp, Homo sapiens
cccacgcgtccgtagcctccagccctggttgtggaaggcgacagaagtcatggcgatgtttgagcagatgagagccaacgtgggcaagttgctcaagggtatcgacaggtgacaatcctgagaacctggccaccctggagcgctatgtagagacgcaggccaaggaaaatgcctatgatctggaagccaacctggctgtcctgaagctgtaccagttcaacccagccttctttcagaccacggtcaccgcccagatcctgctgaaggccctcaccaacttgccgcacacagacttcaccctgtgcaagtgcatgatcgaccaggcacatcaagaagaacggccaatccgacagattttgtacctcggggacctgctggagacctgccatttccaggccttctggcaagcgctggatgaaaacatggacctcttggaaggataac

SEQ ID NO: 5175 - DNA, 509 bp, Homo sapiens
  misc_feature (1)...(509): n = A,T,C or G
tagagctcgggccagctgtagttcattcgccagtgtgcttttcttaatatctaagatggtgcgtgagcagtacactacagccacagaaggcatctgcatagagaggccagagaatcagtatgtctacaaaattggcatttatggctggagaaagcgctgcctctacttgtttgttcttcttttactcatcatcctcgttgtgaatttagctcttacaatttggattcttaaagtgatgtggttttctccagcaggaatgggccacttgtgtgtaacaaaagatggactgcgcttggaaggggaatcanaatttttattcccattgtatgccaaagaaatacactccagagtggactcatctctgctgctacaatcaacccagaatgtgactgtaaatgcgcgcaactcagaaggggaggagcacanaactccagcccactgagccctctgcaattaaaatggggttgggttaggttacatctgggtactgtcctgggaaaacatttttn

SEQ ID NO: 5176 - DNA, 407 bp, Homo sapiens
  misc_feature (1)...(407): n = A,T,C or G
agccctcttggcggattaatgttgttttaagtagaaaaatattaaaacctatttcatattaaaacctattcaatattcaaacctattacattcaatattaaacctattacattcaatattaaaacctattacaatatgcatgggaaatgtacttttcaatgacgttgctttaggatttataatactctgtatatttagaatctgttttaactgcttaatagaatttaaaacaaaacaatagtgttgattctagattataatttgagtcacaagaagagtactgtatacctgtgtgtttgcttttatatgtatacttttatttccagtattatcacttaattgctatgtagatatataactgacatttataaataacactntcctatntataggatgctaataatagg

SEQ ID NO: 5177 - DNA, 462 bp, Homo sapiens
  misc_feature (1)...(462): n = A,T,C or G
ttttgatcgcctgcggttgagcnccgtaatncccgggccgacccacgcgtncgcttgtgtcattttttggtttacatgtgccttaagattagttgctggttttatctctgtgtttattttaaacttattcattttaattctcttatgccatctactcttccagtctctgtaaaacaacagatgtttattgagcatatattggcatgtgctagactctaagggtatggttataattaaggcatgttctccgaacttggggagttcatagtctattcaggtagagaaatatttcagcatgtaagaaatagcaaataatacgaacatataagagcagaggaaaggtgcatggtagataaagtatgaacctgaccttgaaggatgagtaagagagtgccaagcattggaagagagggggcattccagagccatccagcctcagttgaagatttcaggatgctgagg

SEQ ID NO: 5178 - DNA, 493 bp, Homo sapiens
  misc_feature (1)...(493): n = A,T,C or G
tagattcnnnnnattgaacgcatcgatacgcttccgtaccggcccggaatacccacgccgaccgcactgcaaaccatcacatatagacagacacattgatatatttcattgatagcttgtgcatgaatgggtgaaatgtgctaatatggctctgggtttggggttctggagggacttgaggcatcaaagacaatcaggaccatttggggctttgaggtggatggatgggagagagaagatggcctgggatagataagcatctgctttggttttgctcaggggaagagaggctttgagcctgctctgttctcaacaacctgctcagcggtcaaaggcctgtgaggatgcaggtcctgggtcaacaggaagtcaccacggagctggacagtcatggttggatcttatcggctagattttccctcttgggaagcttgttacaaagttgatactgtgaaacagccttagaaacattccatttgatttagcatttcag

SEQ ID NO: 5179 - DNA, 468 bp, Homo sapiens
ttcacgttcgcggccttctgctacatgctggcgctgctgctcactgccgcgctcatcttcttcgccatttggcacattatagcatttgatgagctgaagactgattacaagaatcctatagaccagtgtaataccctgaatccccttgtactcccagagtacctcatccacgctttcttctgtgtcatgtttctttgtgcagcagagtggcttacactgggtctcaatatgcccctcttggcatatcatatttggaggtatatgagtagaccagtgatgagtggcccaggactctatgaccctacaaccatcatgaatgcagatattctagcatattgtcagaaggaaggatggtgcaaattagctttttatcttctagcatttttttactacctatatggcatgatctatgttttggtgagctcttagaacaacacacagaagaattgtccagttaagtgcatgcaa

SEQ ID NO: 5180 - DNA, 429 bp, Homo sapiens
ccgaggaccagcgcaacgaggagaaggcgcagcgtgaggtcaacaaaaagatcgagaagcagctgcagaaggacaagcaggtctaccgggccacgcaccgcctgctgctgctgggtgctggagaatctggtaaaagcaccattgtgaagcagatgaggatcctgcatgttaatgggtttaatggagagggcggcgaagaggacccgcaggctgcaaggagcaacagcgatggtgagaaggcaaccaaagtgcaggacatcaaaaacaacctgaaagaggcgattgaaaccattgtggccgccatgagcaacctggtgccccccgtggagctggccaaccccgagaaccagttcagagtggactacattctgagtgtgatgaacgtgcctgactttgacttccctcccgaattctatgagcatgccaagg

SEQ ID NO: 5181 - DNA, 426 bp, Homo sapiens
taggctaaatgaggtggttgtgactgattacatgattatttttacatatgcatgtaaaagttacaggaattatgagtgagtttatagtttcagaaatggcatataaaagaaccatttacgttgattttaatattttaaaaatgtcatataacttctgattgccatataaaatgtgaacacttcagtttagagtgaaccaaaatgtcatagaatattgacactgatttcaagttggccagtagtgtctctcacaaaactttgagatacattggatttagaagtgatgttatattcccacctcagcatttcttgacaaatgtatttgtcaagaaaatgaaatgaaatttctgcctcttaattttgttgcttatgtttcacttcaagttctaatctttagtctgtgacataatatttattatactaatc

SEQ ID NO: 5182 - DNA, 473 bp, Homo sapiens
  misc_feature (1)...(473): n = A,T,C or G
cgaaatgtcagagctaagtgagctcccccagccaacttgggccctcctggggaggcacacgatggccccgtgctgggcgttagggagaccccgtgggtgtgcatggtgtattcactgatcttgtgactgaactccacccagagcccgtttcttcctctctccctacagtcagcactttatgtcttctaggagccgacacccgcactgccaggatccaagatgcagggctggtgttggcagacacgctccggaaattcttattcgatctggatgttgatgatggcctagcagctgttggttactccaaagctgatatccccgcactagtgaaaggaacgctgccccaggaaagggtcaccaagcttgcaccccgtccccagtcagaagaggatctggctgctctgtttgaagcttcaatgaaactgtattaattgtcattntaactgaaagaantaccgctggccattgtagtg

SEQ ID NO: 5183 - DNA, 397 bp, Homo sapiens
atgattacctgatgtatgtaggacgggtagttttccaggttcctgactggcttcatcatctcttaatgggaactcgaatcctctttaaaaacaccctggaaatgtatactgattactatcttcagtgtaaactagaacagctatttcaggagcaccgtttggtctcactcataacacttctcagagatgctatattctgtgaaaacactgaacctcgctctctccaagataagcaaaaaggagcaaaacagacttttgaagaaatgatgaattacattccagatctgttagtcaagtgtattggtgaagaaaccaagtatgaaagcatcagacttctgtttgatggcttacagcaaccagtactcaacaagcagctgacttatgttttattggacat

SEQ ID NO: 5184 - DNA, 461 bp, Homo sapiens
aagaacctcgtaagaatagaagagctacttatgaaaaagggaggggaaatcattttggaaggagagcatagaattggtagaaaatgagaaaagctgtatggcatttctaaaacaacaatgaaaagaatgactttcctgaatgtgggtaaaaaccttacatcaaaaactcttccccgaatcttgtatagcacctggaaaagacttgtgaagaaaaatgacctttcatgtaccatttctggcattttgtattttgcaatgcaataaattctagtttatgctgcttataattttaatggaagaagcttaccatgggcaatactgaattgagttgtgtagtgttctgacttagttttctctttctgccaattgtcatgaagtctgtagtttttgtcactttctgaacccaaactaaattttcttttctcaaccaagtaagaggttttttgtctgttaaatcatgt

SEQ ID NO: 5185 - DNA, 523 bp, Homo sapiens
  misc_feature (1)...(523): n = A,T,C or G
ntttgaccccgtggtagaggnccgttttcccgggncgacccacgcgtncggccggagtctgagcccgagaagaccgagccctgccttaccatctctctgcccatctctcagtgtggaccctaaagggggaggaaaggatgccttctgcacgggggaaatccaaatccaaggcacctataacatttggggacttagccatctacttctcccaggaggagtgggaatggctgagccccattcagaaggatttgtatgaagatgtcatgttggagaattaccggaacctgggctcgcttggtctttcctttcggagaccaaatgtgatcaccttattggagaaagggaaagcaccctggatggtagagccagtaagaagacgccgggctcctgactcggggtctaaatgtgagaccaagaagttacctccaaatcaatgcaacaaatctgggcaaagcatctgccagaaactagtttctgcacaacaaaaagctcctacacgaaagagtggctgcaacaaaaattc

SEQ ID NO: 5186 - DNA, 407 bp, Homo sapiens
gcggcagccatcaggtaagccaagatgggtgcatacaagtacatccaggagctatggagaaagaagcagtctgatgtcatgcgctttcttctgagggtccgctgctggcagtaccgccagctctctgctctccacagggctccccgccccacccggcctgataaagcgcgccgactgggctacaaggccaagcaaggttacgttatatataggattcgtgttcgccgtggtggccgaaaacgcccagttcctaagggtgcaacttacggcaagcctgtccatcatggtgttaaccagctaaagtttgctcgaagccttcagtccgttgcagaggagcgagctggacgccactgtggggctctgagagtcctgaattcttactgggttggtgaagattccacatacaa

SEQ ID NO: 5187 - DNA, 422 bp, Homo sapiens
  misc_feature (1)...(422): n = A,T,C or G
agggaaccaccgctcaccgcagacgtggtggctgcattcagtctttccgagtgagggatttcgccgcccgctttcaggcccgtttggcttaaataactgtgattgatggccatgcaggagaaatatccaactgaggggatctctcacgtcacttcaccgagttccgatgtgattcagaagggcagttccctggggactgaatggcagaccccagttatctcggagccctttcggagccgcttcagccgctgttcaagtgtagccgacagtggggacacagccattggtacatcatgctcagatattgcggagggtaagtttgtattaatgatttgattaccaatatgtgttctcattttcagattgcattttgggtatattggcatttccagattgtgttatttccagaatgttcataacgn

SEQ ID NO: 5188 - DNA, 463 bp, Homo sapiens
tagatacattggtgaaaagttatcatcaatataggttgttgatacaataatagaggtcaatactgatatagaaatgaacctgtgtatgtgattttgtttttccaagagactacattcttcctagcacatcatctcagtttgttccagaatatgaaagatcatagtgaaaggcaaaacttgagggagtgtaaaaagtagtagagttttaatttaaaacaagtgaattttatttaccttggtttataatacctgaatctgaaagaaaaccataaaatgtgttaaaattttgacaaattcactcagttttaatgagtttaatcaaaagataataaatacagattaggtgacccacaaaaatttatttccaagtattatattaaagcaaaataagaatttggttttctctgtaaaataataaattggtgtttgggtccttaacaaggcatagtaaagggattttttt

SEQ ID NO: 5189 - DNA, 463 bp, Homo sapiens
  misc_feature (1)...(463): n = A,T,C or G
aaactcgccaggtccgatccctggcagccgtaggctgcttgctaagattcctgggcatctcctccgaaggcaaggcttggctgcctcgcgcgcgcgcctcccgcagtggccgcggggcagccagggagcctgaagaaggctcccggtccgggctgcagcccctgcgctccgctgggggtggcgctggagagccgcagtggagcgctccgggagggcggcccattccctgcgctcctcctggacgcccggctgggcccagcggtctgaccaccccctcactccatcccaggggtcttcaaaggggcactgatgggtgggcggtggcaggggtgggggaggctcgttggtacccaggaaggggctgcctcctctaggcctggccccgagacatggaacctccaatttgcgagcacggtagactgcacatctgaaggctcagtactctggccccagcttgccttcn

SEQ ID NO: 5190 - DNA, 405 bp, Homo sapiens
atgatcttggctcactgcagtgagggtgacagagttagaccccatctcaaaaatacagcctacctgctgtatttttatttttcattggaaaatataccaggcaaatgtcaaacatttaaaatggtgaatctttttcttataattcattttaaatcattgtttgctagatactgctaaatatcatctgtgggggattgtttccaggacccccttcagataccaaaatcccaggatgctcaaatccctgatataaaagacatagtattatcatacaactgatgcacatcctcctgtataccttatttatttttagtttaatttttaaatttttaacttgtatgggtacatagtaggtatatatatatttatggggtacatgtgattttttttaaagtatcaaaggga

SEQ ID NO: 5191 - DNA, 427 bp, Homo sapiens
tcgactagttctagatcagcgagactccgggggcgtacgaccctacgagccaggtgcgggatgtagtctcgtggggcgccattttttaagcccgtcggaaaagcgcattattcgggtgggagcgacccgattttccagactctggaaaccaaaatggaggacatgatgataagactatgaatgctgagaggaactatttaaatgttttacctggggaattttatattacacggcattctaatctctcagaaatccatgttgctttccatctctgtgtggatgaccatgtgaaatcgggaaacatcactgctcgtgatcctgccattatgggactccgaaatatactcaaagtttgctgtacccatgacatcacaacaataagcattcctctcttgctggtacatgatatgtcagaggaaatgactat

SEQ ID NO: 5192 - DNA, 471 bp, Homo sapiens
  misc_feature (1)...(471): n = A,T,C or G
attaaattggaaaacaaggtctacaaaatcatgatacttttttaaaaggcagagcattcttttttcggcaattttgataagcaaggtgtagatttacatttttgtccttgctcccaacgaaatggataaacaaaaataacttaccatctactcatggaatgttgttgtgttagccagtctgaaagcccaccttaatttttatataactgtctttagctcttcttttgacagggcaggccttgttctgaactgtttcgcttctgactgttaaacaccgatgacgcatgcactgcacttcttcgttttcttcttgctcccccattggcctgagtttcttgtgcattactcctgtccctccttcgttagaataggtatatcagctgtgtaaatagagcaagaaaacagtattctgcatctgtggcatttatgtagagttgcagttgtgtactgctgaanatgcaggcttttgta

SEQ ID NO: 5193 - DNA, 423 bp, Homo sapiens
agaaatccgactctgtatcaactgagcgcaaatcattcactttaattaagctaagcccttactagaccaatgggacttaaacccacaaacacttagttaacagctaagcaccctaatcaactggcttcaatctacttctcccgccgccgggaaaaaaggcgggagaagccccggcaggtttgaagctgcttcttcgaatttgcaattcaatatgaaaatcacctcggagctggtaaaaagaggcctaacccctgtctttagatttacagtgcaatgcttcactcagccattttacctcacccccaaaaaaaaaaaaaaaaaaagggggggctgcttgaaagaatccttggggggcccaaattaaaccggaccaggcgagtaaaagctttttgcctatggggtgcggaataaaacccgcacatg

SEQ ID NO: 5194 - DNA, 462 bp, Homo sapiens
  misc_feature (1)...(462): n = A,T,C or G
ctgagggctcaagatgtgtctcttaaagctttaaanncccacttatcttctcatagccattatgactgatttagctgaataaccttggctaccatgtgttcaggcttgggctcacctgttaaatgactagagactgcatggagcagaggcaagtctgccagccaaggctgtcttagaccagacaacccccagccaacctatcagctgactgcaggtgcgtgagtgaacacagtcaagacatgaagaactgcccatctgagccctgcctaaatcattaacaccaactcattacctaagcactcaggacacaggtccaggatctagctctgctatttcgtttggatattggaattgcactatcacatagaagttatggagcaatttcttgctgaagaccacactcactcaaagtctgttagatcgacagttgcattgcactcagagatcaaaagggtgaatgtt

SEQ ID NO: 5195 - DNA, 406 bp, Homo sapiens
aaacctgtttgtactgttctatactattcaggcatctttttatttctgatagttttatattataatagaaagccagccactgcttagctatcatagtcaccattttctcactgttaacattaggaaaatcaaggctactatgcttcaggattgtctggttaaatagtatgggaaaaaaactgaagagtttcacataattacacacgtgaaataattaaagcttaaactgaatttgtatttcattttattgtcagatggtggtgttcaccagcctgtatcttgtctgagactgcattcgtatctgagcaggttttctatgcctactgatgtcagtatgtttatactaaccttcatgcttttttcccagaatccctcatctgccagaaaacttgaaaagtttattgct

SEQ ID NO: 5196 - DNA, 422 bp, Homo sapiens
ggaagcggacgggcatctggaatcgctgcctctggctttctgttttctactaacaggattgggtcactgggtcttcatcttttgtctgttgcacgcatcccgccctccccacttgcttccccactccttggatccagccctgtgggcattcacgtcagttctctgaccccgccgtgagccccgctccgggtccccgggcgggcttggcacggaggcggtaactatggagaatatggcggaggaggagctgctgcccctggagaaggaggaggtggaggtggcccaggtccaggtcccgaccccggcccgggactcggctggggtcccagctccggccccggattcggctctggactcggctccgactccggcctcggctccagccccagcccctgccctggcccaggctccggccctgtccc

SEQ ID NO: 5197 - DNA, 463 bp, Homo sapiens
  misc_feature (1)...(463): n = A,T,C or G
cccacgcgtncgccgcgtccagtcaaggattctttgagggattttttgagtcactggaccttgcggaatttgctaagaagcagccatggtggcgtaagctgttcgggcaggaatctggaccttcagcagaaaagtatagcgtggcaacccagctgttcattggaggtgtcactggatggtgcacaggtttcatattccagaaggttggaaagttggctgcaacagctgtgggaggtggattttttctccttcagcttgcaaaccatactgggtacatcaaagttgactggcaacgagtggagaaggacatgaagaaagccaaagagcagctgaagatccgtaagagcaatcagatacctactgaggtcaggagcaaagctgaggaggtggtgtcatttgtgaagaagaatgttctagtaactgggggatttttcggaggctttctgcttggcatggcatcctn

SEQ ID NO: 5198 - DNA, 521 bp, Homo sapiens
  misc_feature (1)...(521): n = A,T,C or G
nattgaccccgtctttgagcccgtttgcccgggncgacccacgcgtncgtacagctataaatatccagagtccaaggttacagattcacagtttaagtaaatctttcaatttgtgcgatagatcattgccagctctggtaaaccaaatgatgcctatattcagctttacaagaacacgaactccacagattggtctcaaatttcactttactttaaatagtctttagaccttttctttcttctctctaaacaaagggttatgattactccaggatttatgttttcagtagtgcttgggttaacagtttctttgcttagaagtttacccctaaatgctctgaacctaatagccaatgctttaattataattttaatcaaggccaagtaaaagaactttgggcttatgatttacttttgtaacatacactatcatattcagtatttacaagaatccaatgaaatctgtactctcctgttttgctgagaaggagactgaggatcatataaatagtaaggaactn

SEQ ID NO: 5199 - DNA, 396 bp, Homo sapiens
aatggatgcattttttgcataagttgtcaaactttttctggaatcagtgtcaaacttgttactattatatttcccagatttttataatgttgcaaaatacctacaacaaaactcttttaaagttgagagttgttaccttatatttatattagttattttttaatttaaaaaataatacataccaatgaccaaaaatttaagagttcagaaggatgtaaagttaaatgcttaggttgtctttttcctgaaagcaccaggaggactattagtttttagtttttaagctagtttgatagctattccacgcaaatttatatagcattgataaacagacataaacagatgcttattaatgaagcatcattactaagaaataattagctgttcatcctaatg

SEQ ID NO: 5200 - DNA, 424 bp, Homo sapiens
cagagactgagggttgggacgcttggcccataggtggttttataggcgattgcttcgcccgacgccggaactgcgagctctcagcgggagccgagacggtgcagggccggaaaatcaccttcactcccagcctgcgccccgatgctgcgcgttctgtgcctcctgcgcccctggaggccccttctggcccgcggctgcgctttcgacggggcggccgggggctcagagatacaagtgcgcgccctggcgggtccggaccaaggctggaggttccatgaggacaggccttgagcctgtcctggtctctggaatcacggtgtctagttgaggccagcacacagcatatattttaatgtacaaatgagtgaatgaagagaatctgattggtcctaacgaacttacgcactttaaataatcgtgcagg

SEQ ID NO: 5201 - DNA, 408 bp, Homo sapiens
  misc_feature (1)...(408): n = A,T,C or G
actacatataactgacctgatgatccacccgcctgggcttcccaggcggctgggattacaggcatgagtcaccacgcccagccaagccttttcttaatccctccaaaaaagcaaatgcaagctatgaaaaacattccagggtaaggcgggtcattagagctgttgggtcacatgagcacgtgtaatggctaaaacgtacctgttaatgtatgcatttctactatgacaaaatggaaagaaaagtcttgcttctgacatacttcaattctgagataaggaagaacaaacattttaataatgcccttagattgtctgcagcatgaacattacctgtcttaaagtttaaactaatagtaaactatagcttaaaatgtagatttaaataagtgactagacctcaccttattn

SEQ ID NO: 5202 - DNA, 408 bp, Homo sapiens
atcaccctgaggctgaagtatatcactcatgacatgaaagatcagcttaacttgaaaagagcattgacaaaatgtcgagaattcctggagctccacagctctgccgctaaatgcttctacaactgtcccttcagaattgcccaggtctttgaaggttttcttgattcaaatgagctctgccagtttataatgactacatttgataccctgaaaaccctgaaacatccctgcatccagcgatcagcaggagaattactgctaactttggcgaaaaatacagagtcccaatttgagaaggtgccagaaattatgggagttatctgtgcccagttacccataatcagccagcctagagtccgccaacaaatcataaataccgtgagtttatttatatccagacccaagtac

SEQ ID NO: 5203 - DNA, 410 bp, Homo sapiens
  misc_feature (1)...(410): n = A,T,C or G
cacagaaccctctaaatgcccttgtaaatttaactgttagtccaaagaggaacagctctttggacactaggaaaaaaccttgtagagagagtaaaaaatttaacacccatagtaggcctaaaagcagccaccaattaagaaagcgttcaagctcaacacccactacctaaaaaatcccaaacatataactgaactcctcacacccaattggaccaatctatcaccctatagaagaactaatgttagtataagtaacatgaaaacattctcctccgcataagcctgcgtcagattaaaacactatnnnngnaaaaaaaaaaaataaaaagaggaatttntatttgggggggggcttttaataaaaacttggggggggcccgatttcttctgggagggagaggtgatttttt

SEQ ID NO: 5204 - DNA, 396 bp, Homo sapiens
  misc_feature (1)...(396): n = A,T,C or G
gaggggtgcagtgtgggatcccagggacatgaccattcagccccgccctggctttgacatgggggtgcctggcagcggtggctaaagaagtccagtttgccaagagaatggcacatattgcactggggagggcacctctggggcatggacatagggagacatagggatggggtgggtcacctgcgtggaggactgggcactgaacagcacaggcccgagcccatccttgtacacgtgagcttatggcctgatgtacagaccaccaggggctccaggaaagttaagctgcatggagagaaacgatgggccagggccatggccgggcccaaggtggtttaaggaatggcagtgtcctgggtagaataagaaggcctgagactgtgactgagctgacan

SEQ ID NO: 5205 - DNA, 493 bp, Homo sapiens
  misc_feature (1)...(493): n = A,T,C or G
acttctcaggacgacgaatcttctcaatgggggggcggctgagctccagccaccccgcagtcactttctttgtaacaacttccgttgctgccatcgtaaactgacacagtgtttataacgtgtacatacattaacttattacctcattttgttatttttcgaaacaaagccctgtggaagaaaatggaaaacttgaagaagcattaaagtcattctgttaagctgcgtnnnanaaaaaaaaaaaaaaaataaaaaaaagaaaaaaaaaaaaaaaaaaaaaaaantgaggggggccctttttttataaaatttgggggggccccaaattgagccgggggaaaaaaaaaaatttttttttttttgggggggcctttttaaaacccgggggggagtttggagaagaaaactttttttgggggggggtttgttaggccccccccccccccgcggaaattgaccgttggaggagaaaatatatttgttgagggggagg

SEQ ID NO: 5206 - DNA, 484 bp, Homo sapiens
  misc_feature (1)...(484): n = A,T,C or G
acagcccctgctgggtccccctgagtccatgcgggaacatgtggtcgctgcctccaaggccatgaagatgggtgactggaagacctgtcacagttttatcatcaatgagaagatgaatgggaaagtgtgggaccttttccccgaggctgacaaagtccgcaccatgctggttaggaagatccaggaagagtcactgaggacctacctcttcacctacagcagtgtctatgactccatcagcatggagacgctgtcagacatgtttgagctggatctgcccactgtgcactccatcatcagcaaaatgatcattaatgaggagctgatggcctccctggaccagccaacacagacagtggtgatgcaccgcactgagcccactgcccagcagaacctggctctgcagctggccgagaagctgggcagcctggtggagaacaacgaacgggtgtttgaccacangcagggcacctacggtggctac

SEQ ID NO: 5207 - DNA, 488 bp, Homo sapiens
  misc_feature (1)...(488): n = A,T,C or G
aagacacagttttgtctcattataaaataagattatatgaaatttatattctagaaatgattccaaatcatgtcctaagaatttctcccattcaaatgataatggaaattactgtcaaaaggaaaatctcaaagttaccattacgctgctctcttgtaaatgaactagggataaagatatgggttttatcaaaagccctaaggaatatatctcacattcacctcctatatgtatgtgtatatataaatgccactataaatgaaaatgtcacccagagataataaaataatttttaaagtttaaatctggtccaaagtctttaaaataggtagattttcagctttcttaagtttctccctcatttagatttcatggtttttacatanagggtgaatattttgannntttctttanatntcactgcatcttcaattgccaactgtgtttctgataaatntagatcacattttaagaaatttgagtanccn

SEQ ID NO: 5208 - DNA, 401 bp, Homo sapiens
catgtaccgagcacttcggctcctcgcgcgctcgcgtcccctcgtgcgggctccagccgcagccttagcttcggctcccggcttgggtggcgcggccgtgccctcgttttggcctccgaacgcggctcgaatggcaagccaaaattccttccggatagaatatgatacctttggtgaactaaaggtgccaaatgataagtattatggcgcccagaccgtgagatctacgatgaactttaagattggaggtgtgacagaacgcatgccaaccccagttattaaagcttttggcatcttgaagcgagcggctgctgaagtaaaccaggattatggtcttgatccaaagattgctaatgcaataatgaaggcagcagatgaggtagctgaaggtaaattaaatg

SEQ ID NO: 5209 - DNA, 418 bp, Homo sapiens
  misc_feature (1)...(418): n = A,T,C or G
tggatatgcccagtaatggatggctccaccgaggccttgttggggaagttcagcctcgaggacactaggggacgaaaaacttcaaaaagaagacgctttttattaatattttggcgggctttttggagaggaacttttgggatgtagcctttacctgtttcctgaatttgacatccaaaaagccttttggaaaacaccattctaaatttatcctgttctgaatcatcatcgcttctgatagatgcagttgcttgctgacatcgngatctttgattttgtacaacgctatttgggctaacttttgggattttactttgtgcttagaatttgaaagtagtattcattggaaagagactccaagaaaatactcgaagacatcaaaagctggattcgagggtataacgtgttttgttttgtn

SEQ ID NO: 5210 - DNA, 409 bp, Homo sapiens
gctctcaaatcttaatatggactcagatggatttttttacaattaaaatcagtttatgtgctaagttgtggataaacattggtatcctgacctgtatatgagtcaagaaattatagatgcaagtcatagatattccttagtatacttaccctcttctggagaattgtgaaggaagaatatagcaacaaaaatttgatataggaagcgaataacctttgaatcattgatatggcatttaatatctcagtgacctttggcaaattgcctacgttgtctaaatttgtcccagatttgtaaaataatagaaatagtgtagactctgcttatagtaatgactgagcacgttgtagactgagactgactgttgtttaagaattagaatactagcatatttactatcaacagaatt

SEQ ID NO: 5211 - DNA, 402 bp, Homo sapiens
cgagcggccccgggacgggcagctagcgcgaccctgagccggcgcccgtggtccggccatggacgacctcgacgccctgctggcggacttggagtctaccacctcccacatctccaaacggcctgtgttcttgtcggaggagaccccctactcatacccaactggaaaccacacataccaggagattgccgtgccaccccccgtccccccacccccgtccagcgaggccctcaatggcacaatccttgaccccttagaccagtggcagcccagcggctcccgattcatccaccagcagcctcagtcctcatcacctgtgtacggctccagtgccaaaacttccagtgtctccaaccctcaagacagtgttggctctccgtgctcccgagtgggtgaggagga

SEQ ID NO: 5212 - DNA, 409 bp, Homo sapiens
catggacatcctggtcccactcctgcagctgctggtgctgcttcttaccctgcccctgcacctcatggctctgctgggctgctggcagcccctgtgcaaaagctacttcccctacctgatggccgtgctgactcccaagagcaaccgcaagatggagagcaagaaacgggagctcttcagccagataaaggggcttacaggagcctccgggaaagtggccctactggagctgggctgcggaaccggagccaactttcagttctacccaccgggctgcagggtcacctgcctagacccaaatccccactttgagaagttcctgacaaagagcatggctgagaacaggcacctccaatatgagcggtttgtggtggctcctggagaggacatgagacagctggctgatggc

SEQ ID NO: 5213 - DNA, 403 bp, Homo sapiens
acagcctgggccagatactcccacaggatggactcactgcagaagcaggacctccggaggcccaagatccatggggcagtccaggcatctccctaccagccgcccacattggcttcgctgcagcgcttgctgtgggtccgtcaggctgccacactgaaccatatcgatgaggtctggcccagcctcttcctgggagatgcgtacgcagcccgggacaagagcaagctgatccagctgggaatcacccacgttgtgaatgccgctgcaggcaagttccaggtggacacaggtgccaaattctaccgtggaatgtccctggagtactatggcatcgaggcggatgacaaccccttcttcgacctcagtgtctactttctgcctgttgctcgatacatccgagctg

SEQ ID NO: 5214 - DNA, 419 bp, Homo sapiens
gccaatgcagtatttgacagcgtataaataagcccttaaattaaaaggcacaaattatcaggctaaataaaaaaacaagacttaactatatactatcacaattaataaactttaaataagtagattcaaatagattaaagataaaaataataggacttccactgaaaccaaatggaatagcattcccacaatagataaagtataggaaataatagttatcaagacattggactcaagtgatgaaggacagtgattgcccagacatagggaacaaatgaggtgagccttgtgaatatccagaggactgcctgaagaaagtttccagttgtggaacaagaaagagatccacaaggagtcctacagtctctctgaattgaggagatgaacctaggaattgaagaaagtttagacaaccagat

SEQ ID NO: 5215 - DNA, 419 bp, Homo sapiens
  misc_feature (1)...(419): n = A,T,C or G
aacaattaatatatatgctactggacattctagcaaggtaattgtagtttagttttaattcggagagcaatgataatcagtgcacaggagtataaaatattattttaaacagcgaaattaataatataaaatgccaaatggttgaaaaaatagaaacctttctgtatatttgatcatttttttttttgccttgtcaatgtatttaaagtttacttaaggtcaggaaattctaaaacaacttttctggccttgttatttgatgtatatcttttaaatttactgaccaaagcatgttttaagctgcaatgcagtagtcacgggtggtaaccatgtagtcaggtattgttattagtacctatcactgctgagctgtatttaaaattttggtacaatatataaaatggagaagagcttgattn

SEQ ID NO: 5216 - DNA, 450 bp, Homo sapiens
agagaattgggagctgaggattccttggggttttgagtacaaggaggagacagggattgcagactgcagcttccaaaagcacagtcagcccacggcctctgtcttctctggggtctttgcaatttctagaccagcaagtgtgtgtggaacaagcacagactgagctcatgtgtgcgtgtgtgtgggtacccacaccttcgcctgatgccctttggcctctgtgccctgcaggccatgggtgtgtacctctacggggagctgatggtgagtgaggacgccagacagcagcagctcgcccgtaggtgcttcgagcggaccaaggagcagatggataggtcctcagcccaggtggtggccgaaatgttattttaacgaggggattctctccctttcctttctgtcatttagttctaaccagatactccttttaggagccaactaaatcagtag

SEQ ID NO: 5217 - DNA, 413 bp, Homo sapiens
  misc_feature (1)...(413): n = A,T,C or G
tcacaagaatggcttccctcaggaaggcggcattaccgctgcctttctgcagaaaaggaaactaaggctcagcaagaaccaccgcccagccagagccaaggtcacagagcacgtccgtggcacgcgtccaggtcgtgccacagcagggccggcggcttcgacgcgggcagccgggtcccttttctttgacagatggggaaaccgaggcccggccggctgccggggctcctcgcacctaccccagcaactcaaattcaccacctcggactcctgcgaccgcatcaaagacgaatttcagctactgcaagctcagtaccacagcctcaagctcgaatgtgacaagttggccagtgagaagtcagagatgcagcgtcactatgtgatgtactacgagatgtcctacggcttgaacn

SEQ ID NO: 5218 - DNA, 406 bp, Homo sapiens
cccacgcgtccgcccacgcgtccgcccacgcgtccgctggtctcgaactcctgacctcaagtgatctgctcgcgtcagtctcccaaagtgctgggattataggcttgaaccaccacgcctgaccaaaacataatttaaatcagatatgctttgctctaagaatataagaaattacagaaatatactttgcattaaataaactgcaatgaaaactgatttagcaggtgcgagacagttcaacttctccattcaagaacgtactcaaaaaaaaaaaaaggaaaattgaaattaaaatttaaaattaaaccaaccaaagaaccttcctcaggccaaggacgggggttaatgcttatacccccaccccttaaggaggttgaggcaggtaaactgtttgtgtccagagatc

SEQ ID NO: 5219 - DNA, 417 bp, Homo sapiens
ggaaggaaggcggagggaaccatgctaggttctgataattgcggcgagggtcgcctcgagagacggtttctgagcaggaattctgaaatccccaccacttcctccctccgggggatttgatcccctatggccaccgctaacagcatcatcgtgctggatgatgatgacgaagatgaagcagctgctcagccagggccctcccacccactccccaatgcggcctcacctggggcagaagcccctagctcctctgagcctcatggggccagaggaagcagtagttcgggcggcaagaaatgctacaagctggagaatgagaagctgttcgaagagttccttgaactttgtaagatgcagacagcagaccaccctgaggtgggcccattcctctataaccggcagcaacgtgcccactct

SEQ ID NO: 5220 - DNA, 486 bp, Homo sapiens
  misc_feature (1)...(486): n = A,T,C or G
gagaggnngcccctaggaggccctatggnngtcatcgnanccgcncgaccacgcgncggcggcggccggacccagactggtagtgaggcgttggatcccgagccgttttaatgccgctggagctggagctgtgtcccgggcgctgggtgggcgggcaacacccgtgcttcatcattgccgagatcggccagaaccaccagggcgacctggatgtagccaagcgcatgatccgcatggccaaggagtgtggggctgattgtgccaagttccagaagagtgagctagaattcaagtttaatcggaaagccttggagaggccatacacctcgaagcattcctgggggaagacgtacggggagcacaaacgacatctggagttcagccatgaccagtacagggagctgcagaggtacgccgaggaggttgggatcttcttcactgcctctggcatggatgagatggcagctgaattcctgcatgaactgg

SEQ ID NO: 5221 - DNA, 427 bp, Homo sapiens
cccacgcgtgcggacaattttaaaatcctgggaccatatttatttagaagtagctgttagtaaaacattagaaaaggagtcaggccattaggttatttatccaaatctctaagcaattaggttgaagttattaagtcaagcctagaaaagctgcctccttgtaaggctttcatgacaatgtatagtaatccacagtgtccaattcttcacactcctcaggaatatcactacctcaggttacggtacacaggctataattgatgatgatgttcagataactgaagacacaataaatgacattcagacatcaggacaattccctcatgttcttttctatgatggccacctgtaccagcaacgtgggtttcacccacacaacgatgaactgttctcttacttctccagttgattttaaagacttgttaag

SEQ ID NO: 5222 - DNA, 399 bp, Homo sapiens
tgaaaaaaaaagactttgagctgaatgctctcaacgcaaggattgaggatgaacaggccctcggcagccagctgcagaagaagctcaaggagcttcaggcacgcatcgaggagctggaggaggagctggaggccgagcgcaccgccagggctaaggtggagaagctgcgctcagacctgtctcgggagctggaggagatcagcgagcggctggaagaggccggcggggccacgtccgtgcagatcgagatgaacaagaagcgcgaggccgagttccagaagatgcggcgggacctggaggaggccacgctgcagcacgaggccactgccgcggccctgcgcaagaagcacgccgacagcgtggccgagctgggcgagcagatcgacaacctgcagcggg

SEQ ID NO: 5223 - DNA, 412 bp, Homo sapiens
tggaccatcctcccaaactagggccctccactctatccagggcaggccagggactccctggcctgacacatgatgcccagatttcagatttggcctccgtcacttaatccagagtacaggggctggggtcagggaaggaagatctaaagaacccactgtgggtcaggggaatgggaccagcaggacatatgggcaagctctgcaggacagacaggcagacaaaccctctgatctatgaagtctctgcagggcaaggggaccagggacctggaaccctcttggccaaggggagtgggagagacagagggaaggtcacaggcaagggtgcctatctaagtggaactaattgcccgagggctcagcaaggccaagaggagacagccgtgacggtaaacttcccctctaccagcct

SEQ ID NO: 5224 - DNA, 426 bp, Homo sapiens
ggctctgagcggtccctgcccggatggcaacagtagttctaggaggagacaccatgggccctgagcgtatcttccccaatcagactgaggaactgggacatcagggcccttcagaaggcactggggattggagcagtgaggagcctgaggaagagcaggaggaaacggggtcgggcccagctggctactcctaccagcccctgaaccaagatcctgaacaagaggaggtggaactggcaccagtgggggatggagatgtagttgctgacatccaggatcgaatccaggccctggggcttcatttgccagacccaccattagagagtgaagatgaagatgaggagggagctacagcgttgaacaaccacagctctattcccatggacccagaacatgtagagctggtgaaaaggacaatggctggag

SEQ ID NO: 5225 - DNA, 422 bp, Homo sapiens
attttttccttttcagcacaacctttggctttaatataggaagagccaagggagtcctcggctgaacttacgatatctgccccaaacctctgtaaccccaactgaaatgaggagcttcctctcttcctgtgaaggatatgacagtccagcatcgatgcctgtgccctctggaaaaatttcctcctagcccttccagggccttatcataaaactctggatttagagtattcattttgaaggcaactcccccttccccaagtttccttggagctgtatagctgggttctaagcttcaccatgcaaatcagaaattttatctctaagtacaggctgtgccatgtctcacccacacccccctggggacttcagttccatttcaggttacctggggtataccttgatccctagagtgactggcagaa

SEQ ID NO: 5226 - DNA, 403 bp, Homo sapiens
aaaaccaatatgtgtggttgatttgtaccctaggtgatctttggcttcctcaagtttttgcaccactcagaatcatttcatataccacctttggcaaacatgccagacctgcagtagactgaaggaagctctcccaagctctaaattgattaatttattagttcctagaagaaagagattacatgtttatctttttgttacagaagaaactttgaatagcagttgaaaatttggcagggtggaccacctaacttgacagtgtattattgtgtctgttttgaaggaataaaatggaattatttataaagttttcatttgtattagagagagccatttttaaaatttcacattcaatttgtaacattctagaagacagattatcttctttctgtatactgcgcgg

SEQ ID NO: 5227 - DNA, 539 bp, Homo sapiens
  misc_feature (1)...(539): n = A,T,C or G
ggggcgnnnnnnaattgaccccgtggtaccttgacggacctctccggccgacccacgcgtccggcgctcggcgcctggcgctggcgctggccaaggcttggccaacagtgttgcaaacaggaacccgaggtgttcacttcactgttgaaggaacgagagggcatctgctaaagtttcagattccatttctgctcagtatccagtagtggatcatgaatttgatgcagtggtggtaggcgctggaggggcaggctttgcgagctgcatttggcctttccgaggcagagtttgatacagcatgtgttaccaagctgtttcctaccaggtcacacactgttgcagcgcaggttggaatcaatgctgctctggggaacatggaggaggacaactggaggtggcatttctatgacaccgtgaagggctccgactggctgggggaccaggatgccatccactacgtgacggagcagggccccactgccatggtcgagctagaaaaatatggcatgccgtttagcagaaactgagatggggagatt

SEQ ID NO: 5228 - DNA, 475 bp, Homo sapiens
  misc_feature (1)...(475): n = A,T,C or G
agtttctnaaactgatnactgaaggcactgccacggaacttccgggttgacccacgcgtccgcccacgcgttcgcggacgcgtgggcacagggacctacaggcagttcttccacccagagcagctgatcaccgggaaggaagatgcagccagtaattacgccaggggccattacaccatcggcaaggagattgttgacctagtcctggaccggatccgcaaactggcggatctgtgcacaggactgcagggcttcctcatcttccacagctttgggggcggcactggctctgggttcgcatctctgctcatggagcggctctcagtggattacagcaagaagtccaagctagagtttgccatttacccagccccccaggtctccacagccgtggtggagccctacaactccatcctaaccacccacacgaccctggaacattctgactgtgccttcatggtcgacaatgaagcca

SEQ ID NO: 5229 - DNA, 402 bp, Homo sapiens
cggacgcgtgggcggacgcgtgggcggacgcgtgggccgagctgaccctgatcacggccgagttgtctcggcggcgctgccgaggcctccacccaggacagtccccctccccgggcctctctcctcttgcctacgagtcccctctcctcgtaggcctctcggatctgatatcgtggggtgaggtgagcaggcccggggagggtggttaccgctgaggagctgcagtctctgtcaagatgatagaggtactgacaacaactgactctcagaaactgctacaccagctgaatgccctgttggaacaggagtctagatgtcagccaaaggtctgtggtttgagactaattgagtctgcacacgataatggcctcagaatgactgcaagactaatggactttgaag

SEQ ID NO: 5230 - DNA, 467 bp, Homo sapiens
tgaaaatcagcggagactctgaagcactgagtcctcacggtgagtccacggatacagcctctgactttgaaggtcacctcacggaggacagcagtgaggctgacactagagaagctgcagtgacaaagggatcttcggtggacaaggatgagaaacccaattggaaccaatctgccccactgtccaaggtgaatggtgacatgcgtctggttacaaggacagatgggatggttgctcctcagagctgggtgtctcgagtatgtgcggtccgccaaaagatcccagattccctactgctggccagtactgagtaccagccaagagccgtgtgcctgtccatgcctgggtcctcagtggaggccactaacccacttgtgatgcagttgctgcagggtagcttgcccctagagaaggttcttccaccagcccacgatgacagcatgtcagaatccccacaagtaccactt

SEQ ID NO: 5231 - DNA, 390 bp, Homo sapiens
ctctgtgaaaccttctctaagatctactttcctgtcccttagagcacactcctctctttccactcttgactggtgggccccagctggcccttagtaacattttccaagcctgggagctcagggcaagtggcagtagccagaggatgttgcagtggttggccacaaagtcacccaaaaaggaagactcagaaacacctcaaaaggaagagtcagatgttccccagtggtccagtcagttcctgcagaagagtccactccccaccaagagaggcactgcaggactcctagagcaatggctgaagcgggagaaggaggaggaacctgtggccaagcgtccttacagccagtgacacaggactttcagagaccaaggccagggtctgctgcact

SEQ ID NO: 5232 - DNA, 402 bp, Homo sapiens
tacttatactgtcatcagggatactgtgaacatgtttttgtcattactgacataaggcttgtgcatcatgatgactgcttggataggacattgtatcccctccttatcaagaagcattggctatggaccagaaaatgttttgtttgtaaaatgtatacagccagatgggtgacgaacaatgacagttttgcaccagaggacccatgcttcttttgtgatgtttgcttccgaatgctgcactatgattcagaaggcaacaaactgggggaattccttgcttatccttatgttgatcctggaacctttaattaagaatagctacactcacaaaaataccccctcatgaaataactgttctcttggatggttaccttatttctaagaaacgccactgaggaacag

SEQ ID NO: 5233 - DNA, 405 bp, Homo sapiens
cccacgcgtccgaatgaatgtgtatttttgtgttgttaaggatgtatcttcagaacagattcctagaattgggattttagagtcaaaagataagtacatatgtggttttgttaagtgttatcaaattttcctctggaaggcttgtatcaatctgcattcccaccagctacttataagaatccctatttccccagagtctcataagacaaggtgatgtcagatttttagattttttcagataagaaatggtatcaagatctttttagtttaatttttccacctattcattttgatattatttaactgaacaaattaacacctttttttaacgtgccgtatcatataaaggatttttttaaaactaggatattcttgctaatataactaagaaaacttcataatggg

SEQ ID NO: 5234 - DNA, 413 bp, Homo sapiens
  misc_feature (1)...(413): n = A,T,C or G
attttttttattgggataccaagaagggaacaaaacaacccagtctaactgtgtattatcaaagaaaaaccctggtcaaaaatagtttaaaaaatacaatttaaaaagccagaaataggaaacaaagtgatgcatcacaaggtgattataaacaattcaaagcaatggcatttctaatcaaagtagctcacaaaaagtagtaagtaaaaaacactaaatgtcaacttaagaaataccttatgaaatgtgttaattccaaattgaaagccaatatataaaatttggcttatgccaaagtaatagcaaaaacatataaaatgggttttaacagctagggctacagagataagataatttataactatggagaatgttaattcatgattgggaattaaatgggtaattaaaaatan

SEQ ID NO: 5235 - DNA, 418 bp, Homo sapiens
  misc_feature (1)...(418): n = A,T,C or G
cacccgtaagacttcatacaacacaatactctatattgtgatgatcacagctgccaaggctacctaagagaagacaggtatctcatatttggctgccagctttttatctttctctcgaccacttaaaacttcagacttcctgccctgctggtatcatggagaaagtccaatacctcactcgctcagctataagaagagcctcaaccattgaaatgcctcaacaagcacgtcaaaagctacagaatctatttatcaatttctgtctcatcttaatatgtctcttgctgatctgtatcatcgngatgcttctctgaagttctgctacaacctctagatctgcagcttgccacatcagcttaaaatctggcatcccatgcagacaggaaaacaatattgcataacagaccacttcctgagg

SEQ ID NO: 5236 - DNA, 419 bp, Homo sapiens
caggaagtttcaacaaaataagataaaaatactgcatttggagagtaagtcaccgccttttttttttaagttacaaatatccctggtaattacaatttgactcttaaaaaaatgggcatcttaaaaaactgtaacattacagggcattgggttaaaaacatgtctgtttttgtttgggtatcatgttactctgaaaaacaccttaaaaagataatgtttccttcttaaacacacacacacacacaaacacattccagggatagcagattaagttttaaaaagaaataatctgaagtaagtcctccctgactatggaaaactaatgagaaaacttaagattactctgaattagaacctttgtttcctagattttggtttatatttctcaatccaataccaaaaccaaagcatgaaataag

SEQ ID NO: 5237 - DNA, 390 bp, Homo sapiens
cccacgcgtccgggcacagccagcctctgtaggggtatgagatgcaaaacatacaattctaaatcacaaggtgccattttgccctaacttattttcactaaatctctattttttcacccttagcttaaaaaaaaaatctatcccaatccacttcacattcataaatctataatgaaaatattccttagtatttttttcacgtcaattctgcagttccagttagacctccctaggtctcatgttattgaatgtgatttggcatgggttttatagcctctcaacttactctggttaacactcaaataatcactaagcttaggcaaatgaaatccctgatgtatatgtaagactttgaaattagttatttaaacctttcataatctaatccat

SEQ ID NO: 5238 - DNA, 416 bp, Homo sapiens
tggaaagcctctctccatagaggagatagaggtggtacccccaaaggctcatgaagttcgaatcaagatcattgccactgcggtttgccacaccgatgcctataccctgagtggagctgatcctgagggttgttttccagtgatcttgggacatgaaggtgctggaattgtggaaagtgttggtgagggagttactaaactgaaggcgggtgacactgtcatcccactttacatcccacagtgtggagaatgcaaattttgtctaaatcctaaaactaacctttgccagaagataagagtcactcaagggaaaggattaatgccagatggtaccagcagatttacttgcaaaggaaagacaattttgcattacatgggaaccagcacattttctgaatacacagttgtggctgatt

SEQ ID NO: 5239 - DNA, 392 bp, Homo sapiens
gcagaagtctgaaatcggagtgtcaggaggaccacactccctctggaggctccagggaaggagccttccttgcctccccagcttccagtggcggccagcagtctttggcttgtggccacattgctgcagtctctgcctccgtcgtcacgtggcctcctgtgtgtctctgttctgtgttccctcataaggacaccactaggccccaccctactccagtgtgacctcaaccgcctacatctgcaaagctgctgtctcaaataagctctcagtctgaggttctggatgggcgtgagtttggtgggcaccagtcaccccaggacaggagtggagccattggctggaagagttctcatagcagggactcagggcaagggtggtgctggtggcagatg

SEQ ID NO: 5240 - DNA, 391 bp, Homo sapiens
aagaaaacctgatcttcttttttggggcaatcattaacaacattgacatctgattacccatgatactctcaagatcttattctttaacaaaaaggcggggaaataaaaacaccataaaagcggccgggtgcagtggctcacgcctgtaatcccagcactttgggaggccgaggagggcggatcatgaggtcacgaggtgagaccagcctggccaatatggtgaagccctgtctctgctaaaaatacacaaattggccggtcgtggtggcgggcgcctgtggacccgtctactcgggaggctgaagcagaagaacccctggaacccgggaggcagaggttgcagtgagccgatatggcgccactgcactccagcctgggtgatagagagagg

SEQ ID NO: 5241 - DNA, 451 bp, Homo sapiens
  misc_feature (1)...(451): n = A,T,C or G
tttattgcagcctttcttttcctatttcttttttttaagggttagtattaacaaatggcaatgagtagaaaagttaacatgaagattttagaaggagagaacttacaggacacagatttgtgattctttgactgtgacactattggatgtgattctaaaagcttttattgagcattgtcaaatttgtgagcttcatagggatggacatcatatctataatgcccttctatatgtgctaccatagatgtgacatttttgaccttaatatcgtctttgaaaatgttaaattgagaaacctgttaacttacattttatggattggcacattgtattacttactgcaagagatatttcattttcagcacagtgcaaaagttctttaaaatgcatatgtctttttttctaatntccgtttggtttaaagcacattttaaatgtagttctctcattt

SEQ ID NO: 5242 - DNA, 394 bp, Homo sapiens
  misc_feature (1)...(394): n = A,T,C or G
cccacgcgtccggttcagggacatccaggatggcatcaagacatctcatctggggctatcctttgactcaactcaaacaagtcctctgccatgatggctacagggacatatggcctagccttgtcctaaatggcatttccccgctgatatggtttggctgtgtccccacccaaatctcaacttcaattgtatcacccagaattcccacatgttgtgggagggactcaggggaggtaactgaatcatggggcccatctttccggtgctattctggtgatagtgacgaagtctcatgagatctgatgggtttatcagcggnttctgcttttgcttcttccacattttctcttgctgctgccatgtaagaagtgcctttcacctgccgccatgattc

SEQ ID NO: 5243 - DNA, 389 bp, Homo sapiens
atgagtgtctcagcactcacgcactgtttaatatggcagcaggatacagcactgctcaagagggcagcttctctgcagcttcctcctcagcctccctccttgcacccccacaggtttggcttgtggattttgtcatcagcaacctactgcctgagatcatgatctcttaaaagatgagactcttggaagggctgattgtatgcgtcagtgagccttctatcaccttctggaacaaagacacttgaaatctcttgatgagattaaggagtttagagatactaaaaaaatctgctttgggccgcagcagagctgggtgttctcagacctgactgaggaaattatctgtggcctgccctgtggactggtgcttcatgaggaatccacataag

SEQ ID NO: 5244 - DNA, 414 bp, Homo sapiens
cagacctgcaggcgattctgtcaataaagacagtatgtattgctacctctactcctgctgcattgtcaccttgtgtgttaacgaccccgtccaagatcgaacccatgaaagcgtttgactcccggttcacagagcggtccaaagccacaccaggtgctcctgccctgaccagcatgactccgacagctgtggaaaggttaaaagagcagaaccttgtgaaagagctgatgccccgagacctcctggagagcagcagtgacagcgatgacaaagtccctttggctaaggcttcctcactgtccaagcgaaaacttgagcttgaggtatagacagtatagaagaagaagaaagggcggcctcggaaggactctcgtctcatgcctgtgtctctgtctgtccagtcttcagctgccc

SEQ ID NO: 5245 - DNA, 431 bp, Homo sapiens
  misc_feature (1)...(431): n = A,T,C or G
gcgcccacgcgtncgaacaaaagcaagccaaaaagaaaaagaaagttgcacaaagtcacacaagagtgaacagtaggacagggattaaaacccaaatcctctgacccaagagctcaaactctaagccaggaaaacattttttttttttttttggttttagggagcgaaaagtttaccacccaaaaaagagggaagaaagaaaagaacccctcccccacacaaaaacaaggaagggggttttggaacaaaaaaaaacccccaaaaaagcttttaaggaaggtagctctgacccaggcaaaagggaaaaggttattaggcagctattattatggctatgttgggctaaccgctcgctctcggaaagggaggggttctcagcactagacgggacttcagtcttaaaaggaaggactcctgagcacaagttaata

SEQ ID NO: 5246 - DNA, 466 bp, Homo sapiens
  misc_feature (1)...(466): n = A,T,C or G
aggcggngccaagggtgtcccacattcccaacaccgccctctgatcaccatgggaatctttggactcaggacagggccaggcgcagggctctccctcctctccccttcgctgtcccctccccctggagggcatggtgtcggggggtggcactgagctatgagtcccggggatggtgaggaacgccacagacagagccaccctaggagtgagtatagtgctggtgactgtgtttcatagccccagtccagggctgtctaagaaataaagatcatcagactccaaannnnaaaaaaaaaaaaaaaaaaaaaaaaaanngggggggggggcccttaaaaaaaaccctgggggggcccaaattaaccgggggtggaaaagaaaatattttttcctataagggggggaaaaaaaaaccaggcgggactttgggaaagaaccttacttggggggggaaaaaaagaaaaaccn

SEQ ID NO: 5247 - DNA, 101 bp, Homo sapiens
tcgcggacgcgtgggttcccctgctccaggcctcttgctaagccttctcctcactgccctttatgctcccaggggaagaatgagaaggaacatttgcatgc

SEQ ID NO: 5248 - DNA, 404 bp, Homo sapiens
ctgacacacactatgacatggatcaaccttaaatacattataccaagtgaaagaatgttatcacaaaaatcgctgttgtgtgattccattaatataaaatgtatagaatagacaatttatggagatagaaaacacattaatattgcctatagctggggaatgtagaaggaaataaggagtgtctgttaatgaatacaggagactaggtaccaggagttaacttcagccagtcaagtgtaatttcacagaccacaaggctgagaataggggaaaggtggttcccaaaaaataaaacttcagtgtgttttgtggcaggaaagagaactactaaagccaagcaggagttagccaggcaaatggaatgggggaaatgaaattgaacaaccttacatagtctattttat

SEQ ID NO: 5249 - DNA, 463 bp, Homo sapiens
  misc_feature (1)...(463): n = A,T,C or G
aggtagggaaggaaacaatcccgacccggagtggacaggttaggaggggaggacttgcctcgccgaggccgctgcgaggagcgtgcccaagggcgaaggtccagggaacccggctcccgcgcaccgaagacggtcgccatgccggcccgttgtgtggccgcccactgcggcaacaccaccaagtctgggaagtcgctgttccgctttcccaaggaccgggccgtgcggatgctctgggaccgcttcgtgcggggctgccgcgccgactggtacggaggcaatgaccgctcggtcatttgctctgaccactttggcccagcctgttttgacgtcttttcggttatacagaagaacctgcgcttctcccagcgcctgaggctggtggcaggcgccgagcccaccctgcaccgggtgcccgtcccggtacctaagaggggagaggagggagaccatacacgccgcn

SEQ ID NO: 5250 - DNA, 398 bp, Homo sapiens
  misc_feature (1)...(398): n = A,T,C or G
aaacaagttatgttgaagttatcttttctttgtcttcagttttggacaataaaaatctgaaagtattaacacttgattttctactggggcccttcaaacttggttggaagaaattcaaccagaatatctacattagagtataatcatgtgtggtaggaagatggactagttaatcaagatttgttgtcacttaaattttttgtgatttttttccaagccagtttttttaaattctaaatgtgttttgaggtatgggtacattaattgtaatgtaaactattatacaactgtttttgcgactttataggcaggtaaattttgctattactattgaatacaaatgacaattcatttatgaccactcaaacagcgttagtaaccatttagtgacaaaggan

SEQ ID NO: 5251 - DNA, 432 bp, Homo sapiens
cggacgcgtgggcgagggacgagcttatctgagctgtgaggagcagggtgagggtgggcgacccaggattccccctccccttcccaaataaagatgagggtactaaagttgtcttggtttttattttattattatttttttctttttccagtatactagcttgtcttttaagaaaggggatattaaaaaaaaaaaaagacaaaagtgtttttaaaaaaaagcaccccccacccctgtgtctgtatatagccagcttatctcgggttcaatcgtctgatctctacagagagaagtggaaaatgctgtatcaagggtgggcttagctgtgcctttccaataaagatgtgagaagcttcaaaaaaaaaaaaaaaaaaaaaaaaaaaaaagggggggcctctttaaaagatcctcgggggcgccacattttcccca

SEQ ID NO: 5252 - DNA, 439 bp, Homo sapiens
  misc_feature (1)...(439): n = A,T,C or G
gttcttttacctgctctccctcagtgagtcctcaaccaccctgggcccagaaacagaggcctgccgaggggaggagcctggcctctgtccacccgtcagcagtgtgaagtctgttgtgtttgagcttctcagagtggaatgactccttttccttcctggccctcgggggcctctcgaggtcagcctctccaacccctacctcagctcctgtctgcactgagaaacctccccgggtgatgtctgcaaagtctgtgctgtccgtgccccaggctgggagagctatctggggagggggagaggaggccgagcanaatacaccccagagttagggtttgcgactccgcctccctgggacctggattgngtcagatgcctgtccttggaggggacaaggttgactgcttangaggcgcgacgcacagggctgccaggccctgcn

SEQ ID NO: 5253 - DNA, 416 bp, Homo sapiens
cggacgcgtgggtttagtaaggaaaattagaagagtatgtagcaggtaggcaagtagataactagcagcatctgccacactgttttccattctctatgagagatgttctctaactattctctacaactcttaacttgcctctcattttctacctctgtgtccttttctttgtgtgtggggcggggggtacagaggctcactctgttgcccaggctggagtgcagtggcgtgatctcggctcactgcaacctctttcttccaggttcaagtgattctcctgtctcagcctcctgagtagctgggattacaggcgcctgccaccatgcccggctaatttttgtatttttggtagagacggagtttcaccatgttggctaggctggtctccactcctgacctcaggtgattcacctgcc

SEQ ID NO: 5254 - DNA, 396 bp, Homo sapiens
cagagcttggcacagaaggttataaaactataatccagctgggtgtgtttgctcacgcctgtaatcccagcactttgagaggccgaggcaggtggatcacctgaggtcaggatttcgagaccagcctgaccaacatggtgaaaccctgtctatactaaaaatacagagaaaaaaaaaaaaaaaaaaaaaaattttccccgggggggggggatttcccttttaccccaaaaactagggggggggggggggaaaaaaactggaacccggggggggaaaatcttttttttaaaaaaatcgccactttggctttacgccggggaaaaaaaggggaaattccctttccaaaaaaaaaaaggggaaaaagaaaaaggggggaaaaaccctttatccccccca

SEQ ID NO: 5255 - DNA, 417 bp, Homo sapiens
gccagactgcgacggatacagggagggctaactcacgtgagatggagccgctatagtcctgaattcaaggatcccttgattgacaaggaatattatcgcaagccagtggaggagctaactgaggaggagaaatatgttcgggagctcaagaagactcagctcatcaaagctgctccagcagggaaaacaagttctgtgtttgaagacccagtcatcagtaaattcaccaacatgatgatgataggaggaaacaaagtactggccagatccctcatgattcagactctggaagctgtgaaaaggaagcagtttgagaagtaccatgccgcttctgcagaggaacaggcaaccatcgaacgcaacccctacaccatcttccatcaagcactgaaaaactgtgagcctatgattgggctg

SEQ ID NO: 5256 - DNA, 406 bp, Homo sapiens
aaaagtgccaaaaaaataaaataagacagcagtgatggttctgcaaccctgtgaatacactgaacaacactgaaatgtacacatggtgaattgtacaaaagggtaaatctcacatcctgtaaattatctctcaataaagctgttattaaacagagagagagagaaggagagaaaagggggagataagatgaggacggtaatgggagtgacagcgaagagagaaatagagaaaacagcagagaagagagtgcctaagagggaggatcactggagctcaggagtttgagaccagcctgggtacaatagcgagactcagtctctacaaaaaaaaaatttgtttaaaaattagcaaggtgtgttgatgttcacctatagtcccagctattcagaaggctgaagtgagaaa

SEQ ID NO: 5257 - DNA, 451 bp, Homo sapiens
cttttcccgcgcgtgctgccttcgccgctcgggccgcccgggggaaaacatgtcgtctgccctggagcacttcgtgaacagtgtccgacagctctcaactcaagggcaaatgacacagctttgtgaactgatcaacaagagtggggaactccttgcgaagaacttatcccatctggacactgtgctcggggctctggatgtacaagaacactccttgggcgtccttgctgctttgtttgtgaagttttatatgcccaatagccctgacttcgaaacgctattctcacaggttcagctcttcatcatcacttgtaatggggagcacattcgatatgcaacagacacttcccctgcgaggaattggcatccttaagcctgccctagacaagatgcagatgaatacaaaccagctgacctcaatacatgctgatctctgccagctttgttttgt

SEQ ID NO: 5258 - DNA, 402 bp, Homo sapiens
  misc_feature (1)...(402): n = A,T,C or G
aggtcccgaggagcggcgactgagggggcggtcggatccgcatcttgaagatgagctcagagggggtggattctaatccctacagctgctactctttgattatgacaaggtggaactatccaatatgaataaacttttgttccaacctcatcattcaggattatgtaaagttcaagcagcaaaacatactctgaggaacatttaccctgaagttctttttgaagtacacatctataatataaccacagtggaaaactttcaacatttcatggatagaataagttatgatgggttagaagaaggaaaacctgttgatctatctcttagctgtgaggacaattttgaagctcgaacgacaataaatacagcttggaatgaactaggacaaacatggatggaatn

SEQ ID NO: 5259 - DNA, 394 bp, Homo sapiens
agatctgctaatggattctcttagaaacattatacttagtgtattctattgctgtatatttcattttaaagtgagcactaaaggaatgcggtattttaataaaaactctgccaatgcttttatttagaggcgtgttgccaatttttgtcttttatgaaaatttggcccaagaaaggcaggattacattgtttttccaacagattgagtgggtgtagtgtattcttgatgatcaaaatactcatatagctttgagattttgaattggtaaatacttaagatgtgtgaaaaagcatgatacatactatatgatctcagtcccataaaattgactattgtatctacacccacacaggacctagaaggacatgttaaactgtaaactgcttgtgattg

SEQ ID NO: 5260 - DNA, 430 bp, Homo sapiens
  misc_feature (1)...(430): n = A,T,C or G
gcgcanactgccttttacaagntagaaaatgctgtttgaatttagttgaaccatggaatacagagcgagcaatatgtagcttgaagtacatttaaaagcagattttttacaaacaaaaaggcgaaagcactgattgtcatttttagcagtcacttaaggcctatagaacttttttcaagtcggaaggtcctgttcttactatctcaaaaatgggcatcgaacaatcaatctaggagcgtggcagtgggtaaaatggtggacaggcaccaaagctattttttcatctgtcctgtggatgagtggaactgtggaacaagtgatgtggaattaatgggtgccacagctgtacagacaatcaataacacacacaggtctggaaagaacacatcacttgtgcttgtttgatgagcttgtcacattctaatccctt

SEQ ID NO: 5261 - DNA, 421 bp, Homo sapiens
  misc_feature (1)...(421): n = A,T,C or G
atatttcctattcgcctacacaattctccgatccgtccctaacaaactaggaggcgtccttgccctattactatccatcctcaaaaaaaaaaaaagggggggcccgtttaaaagaacccttggggggcccaaatttaaccggggcgggcaaggtaatatttttttccttatggggggcggtttaaaacccaacttgggaattttgggaaggaacctttctttggggggggggaaaaattggcccaacctccccccaaaaattaaaggctttagggaaaataaaaatttttaaggggtatagggggaaaaacaacctccttttcctggctgttaaaaattatgnnnncnnnncnnggggcacctctatgagggggtgtgcaagcacggcaccttatattaggaaaccaaaagcctttaggct

SEQ ID NO: 5262 - DNA, 419 bp, Homo sapiens
  misc_feature (1)...(419): n = A,T,C or G
cggacgcgtggggtcgaggtggaccctttgaacgcagtcgccctacagccgctgattccccccgcatcgcctcccgtggaagcccaggcccgcttcgcagctttctccctttgtctcataaccatgtccaccaacgagaatgctaatacaccagctgcccgtcttcacagattcaagaacaagggaaaagacagtacagaaatgaggcgtcgcaaaatagaggtcaatgtggagctgaggaaagctaagaaggatgaccagatgctgaagaggagaaatgtaagctcatttcctgatgatgctacttctccgctgcaggaaaaccgcaacaaccagggcactgtaaattggtctgttgatgacattgtcaaaggcataaatagcagcaatgtggaaaatcagctccaagctactcaagn

SEQ ID NO: 5263 - DNA, 425 bp, Homo sapiens
cttaaaactcctattgtagtttaatgtcattatccattaatttacataaatctgatttggatctctattttcatcgtagactgtgtaggggcaatttttcctaaaggttctgtgacatagtgctaccttttttttaaaacctgtcttgcccaggcattattgagtgccccctggtgccagcatgtgtatttcacgactgtatcaacaaatcatgatcatcttctctggccattgtgccctttcagattccaaacttgttacctctcagtccttcctacaaacttagaaagtctaatatcttaatgtttacttatgtagcaacctccctttctcccatccctaaatcctcttgtaattaattattttcctttggaactttttaaatctacaatttccttataatagtggaaccaatattaattttc

SEQ ID NO: 5264 - DNA, 421 bp, Homo sapiens
aaattgtctcatcaccccaaactgaaactctgtaactgttgagcactatcctcattcctgtatctctcccaaccccaggtaacctcagatctttctttttatctttgagacaagggctcattctatcactcaggtaggagtgcagcggtgtgatcatagctcattgcagcctcaaaatcctgggctcaagcaatcctccttgagtagctaagactataggcacacattaactgcgcctggctgattttgttttttgaagagatgtggccttgctatgttacccatgctggacttgagttcctggcccatttgtctatatatgagtaccgcacatttaattattttgctaaataatagattttaatagctaaattttttagagatgattaaattagaatcagtcttccttcacaacttacct

SEQ ID NO: 5265 - DNA, 391 bp, Homo sapiens
atcgcataaaacttaaaactttacaggcagaggttcatttcctcttcttaacaccaaaaaaaaaaaaaggggggggcctttaaaaaaaacccctggggggcccaactttaccgtggactggaaaaaaaaaatctttccccttatggggagccatataaaaaccaacctgggaactttgggaaaaaacctttctttgtggggggaaaaaatggggccaaaccccccccaaaaaattaaagccttgagggaaaaaaaaaatttttaaggggaaaagggggaaaaaaaacaccatttccttggtggttaaaaaattgggacacacacaactgccttgttttgttttttatttatgcaaaaacgcttctatccgtttgtgttgattagccgaccg

SEQ ID NO: 5266 - DNA, 396 bp, Homo sapiens
ctctcctacaagataaactctctcctgacttgtttcaccacagatgagatttgccttttgtgtattttaaatgaaggaatcatacagcatataatcttttgtgcttgactttttagattcaatattgaaaatatattagttaagctagggactggaatgtagttaagacattcacacaaggcagtttgttgtctgggggcttctcctagtgactccaggccccattcctgtccacctgccagctgtgtactctgaatccagtattcggatgttccaaatgttccttgaactctaatatcatgtgtattatccattaggaaattaatcctcacctgctaacctattatttgctgttgcatcaaacttttagttatctcctccatgtttaatttgcca

SEQ ID NO: 5267 - DNA, 406 bp, Homo sapiens
  misc_feature (1)...(406): n = A,T,C or G
ttccgcgcgcccttcattgaagcggtggcggcttggctgggcgccggtagtggaaagcgacggcgcggctggtaaatgccagtccattcccgaggggataagaaggagaccaaccatcacgatgagatggaggtggactacgccgaaaatgaggggagcagctccgaggacgaggacactgagagctcgtcggtctccgaggatggagatagctcacaaatggatgatgaagactgggaaagaataagaatggaatgttcggatgaaatgtccaatcttgaaaaacagcttaccgatctcaaagatcaactttataaagaacgattaagtcgggtggatgcaaaactacaagaagtcatagctggaaaagcaccataatacttggaaccgctggcaactctacagn

SEQ ID NO: 5268 - DNA, 422 bp, Homo sapiens
  misc_feature (1)...(422): n = A,T,C or G
taggtttactctcatgtcagtgggcttatgataagttaaaatatagctatctgatttttaaaaagtacacattattatagcatattttatgcaaataaaagagaaataaatatagttgagaattaaatatgcagcaagttactttgcaaggtgtcatatggtcagtggatggataacaaagacgcagttcttgcttttaggaagagggaaaatttgcatgtataaatgcataaaacagctacaggtaagaaaaacagatgtgataaccacaaaacagattaattatgaagaaattaattgtcttaatcatattatgcttacaactaagttttggtaaatccatttaaaattttggtattgtatatcagtatgcattaattcattaattcattccattatatntattgagactctaccacatn

SEQ ID NO: 5269 - DNA, 521 bp, Homo sapiens
  misc_feature (1)...(521): n = A,T,C or G
ccgagcgccgctccggctgcaccgcgctcgctccgagtttcaggctcgtgctaagctagcgccgtcgtcgtctcccttcagtcgccatcatgattatctaccgggacctcatcagccacgatgagatgttctccgacatctacaagatccgggagatcgcggacgggttgtgcctggaggtggaggggaagatggtcagtaggacagaaggtaacattgatgactcgctcattggtggaaatgcctccgctgaaggccccgagggcgaaggtaccgaaagcacagtaatcactggtgtcgatattgtcatgaaccatcacctgcaggaaacaagtttcacaaaagaagcctacaagaagtacatcaaagattacatgaaatcaatcaaagggaaacttggagaacagagaccagaaagagtaaaaccttttatgacaggggctgcagaacaaatcaagcacatcccttgctaatttcaaaaactacccagtcctttatgggtgaaacatgnantccagagg

SEQ ID NO: 5270 - DNA, 441 bp, Homo sapiens
  misc_feature (1)...(441): n = A,T,C or G
agattgtttgcagcatagaagctccgcggacgggaaggtaaactgagctccccagagacgctcatcctacagcctcagctcgggcccagccttctctctccagctgccaccacagcctggaggcgcctgcctccaccctcccgaatggtgctcctcctagcaggcctcggtccaggatccaagccccctttgccccctgccttggagctgttgctccgggtttgtcacagtggactccctgtggcgggaagggaagaacttttgcacagacaaggcttcagctctaggaaccccactgacaacttgaatctcaacctctaacctagtgtgaggttcttcctgtgcccaccttttctgccttttgagaagagaaactcttctcctggccatctagagcccaggaagccccaagctggggccctggtcccagcatgtcagtcn

SEQ ID NO: 5271 - DNA, 403 bp, Homo sapiens
  misc_feature (1)...(403): n = A,T,C or G
cccacgcgtccgcccacgcgtccgaattggttcaattgcatcctccctacccctcaagctctcggagttaaatataaattcagtccgtgattgatgtgacaaaatatatacaaagacaaataaaagacagattgcctttcaggtctgaagcagcaaggcccaggaattctagcaacattggcttgtctgaaacagcacagagtgaatagtattatcataaccaagaggggtcagaatagctggacaacagtagctgtataaaaggaaagtgcaggaagcaagcacctgcaatttgtctccagggctgacccacagatgtgatttatctgttcctagttgcactgacagatgattcagcccttaagagcccaaagccataaaatacttgaaccatacacacaan

SEQ ID NO: 5272 - DNA, 471 bp, Homo sapiens
ctttagcaccaatgaacccagcaacatgtcatacgtgaaagagacagtggacagattgctcaaaggatatgacattcgcttgcggccggacttcggagggccccccgtcgacgttgggatgcggatcgatgtcgccagcatagacatggtctccgaagtgaatatggattatacactcaccatgtatttccagcagtcttggaaagacaaaaggctttcttattctggaatcccactgaacctcaccctagacaatagggtagctgaccaactctgggtaccagacacctactttctgaatgacaagaaatcatttgtgcatggggtcacagtgaaaaatcgaatgattcgactgcatcctgatggaacagttctctatggactccgaatcacaaccacagctgcatgtatgatggatcttcgaagatatccactggatgagcagaactgcaccctggagatcgaaagtat

SEQ ID NO: 5273 - DNA, 449 bp, Homo sapiens
gagccgggagcacggtggagcggaggagggcgtcactgggtttcggcgtctggcaagcggttcagctgtctgctccctagcagccggccttcgggtcgggcgtctccgccggctactgccgcttcagttctcccggtgtggccacgagtcgggttgcactgctgtgatccatcctcatctcctaaagatgcatcctgacttatctccacacttgcacactgaagaatgcaacgtcttgattaacttgcttaaggaatgtcacaaaaatcacaacattctgaaattttttggttattgtaatgatgctgatcgggagttgagaaaatgcctgaagaaatgggttcttgctctgtcacctaagctggagtgcagtagggtgatcgtaactcacggaagcctcgaactcagtgatcctccacctcagcttctgattgttaggacacggtcgg

SEQ ID NO: 5274 - DNA, 399 bp, Homo sapiens
tctcaaagtgcattagagaaagagaagactcatgttgctgactttgccccagagggtgcttgggttacaagatctggtctaaccgagctggcagaaccaattgccattcgtcctactagtgaaacagtaatgtatcctgcatatgcaaaatgggtgcaggcacacagagacctgcccatcaggctcaatgagtggtgcaatgtggtgcgttgggaattcaagcatcctcagcctttcctacgtactcgggaatttctttggcaggaaaggcacagtgcttttgctaccatggaagaggcagcggaagaggtcttgcagatacttgacttatatgctcaggtatatgaagaactcctggcaattcctgttgttaaaggaagaaagacggaaaaggaaaat

SEQ ID NO: 5275 - DNA, 449 bp, Homo sapiens
  misc_feature (1)...(449): n = A,T,C or G
cccacgcgtccggcgggtcggcgggccgcaggagggggtcatgggtaaagattactaccaaacgttgggcctggcccgcggcgcgtcggacgaggagatcaagcgggcctaccgccgccaggcgctgcgctaccacccggacaagaacaaggagcccggcgccgagggagaagtcaaggagatcgctgaggcctacgacgtgctcagcgacccgcgcaagcgcgagatcttcgaccgctacggngaggaaggcctaaaggggagtggccccagtggcggtagcggcggtggtgccaatggtacctctttcagctacacattccatggagaccctcatgccatgtttgctgagttcttcggtggcagaaatccctttgacaccttttttgggcagcggaacggngaggaaggcatggacattgatgacccattctctggcttccctatgn

SEQ ID NO: 5276 - DNA, 449 bp, Homo sapiens
gtggcccgggtgtggtcgctgatgaggttcctcatcaagggaagtgtggctgggggcgccgtctacctggtgtacgaccaagagctgctggggcccagcgacaagagccaagcagccctacagaaagctggggaggtggtcccccccgccatgtaccagttcagccagtacgtgtgtcagcagacaggcctgcagataccccagctcccagcccctccaaagatttactttcccatccgtgactcctggaatgcaggcatcatgacggtgatgtcagctctgtcggtggccccctccaaggcccgcgagtactccaaggagggctgggagtatgtgaaggcgcgcaccaagtagcgagtcagcaggggccgcctgccccggccagaacgagcagggctgccactgacctggaaactcggactggacccccactcgagggcagctcccgg

SEQ ID NO: 5277 - DNA, 402 bp, Homo sapiens
  misc_feature (1)...(402): n = A,T,C or G
cttccatgacagcatcaccctcattgttctgtcatctgaggtgggcatctctgagctgaggctggagagactactccaaatggtgtttggagccatggtccttcttgtgggacttgaagaactgaccaatatccgcaacgtggagagactgaagaaggacttgagggccagttattgcctcatcgacagcttcctgggggactcggagctcatcggggacctgacccagtgtgtggactgcgtgattcctccagaggggtccctcttgcaggaagccctctccgggttcgctgaggccgcgggcacgaccttcgtcagtctggtggtgtccggccgggtggtggcagcaacagagggttggtggcggctggggacgcccgaggccgtgctgctcccctggtn

SEQ ID NO: 5278 - DNA, 471 bp, Homo sapiens
cggacgcgtgggttttattaacacaacaatgatattttaaaaaggaagaataataatttccaagaaaaagtacaggaatttattttatgtctttttgaatttagacagagaatgatttcatagacatcatttagacaaagttagactggcctgaatttaactgcaggtcctgagacttattattaaggtcatatttgccaatgtctggtgagaaatagactgggaagatgaaaagcatcaaaagatttctaagggctaccaagattattgaggggatactgaagaacatgttttttatttaaatatttcctaggactgaccttcactcttttttcagtgaatctaccattaaaaagggtacctcatctattacactcaggagcagctacagctagagtcaccaagaagggtcgctgacatggtagttgatgctagcaggtcagcttggaggtcagctgcggctttctggca

SEQ ID NO: 5279 - DNA, 400 bp, Homo sapiens
ctttatcaacaaaatcaatttctttcacgcgtgcccagacaggatggctttttcgggaagataaaacagaaagagtaggaaactttttggcagacttttacctggtgaatggacttgttttagaatcaaggaaaagaagagaacatctcagtgaagaggatattcttcgaaataaggccatcatggagagtttgagtaaaggtggaaacataatggaacagaattttgagccgattcgaagacagtctcttacacctgctcctcagaacactattacatgggaagaatatatatctgctgaaaatggaaaagctcctcatctgggtagagaattggtgtgcaaagagagtaagaaaacgtttaaagctacgatagccatgagccaggaatttcccttatg

SEQ ID NO: 5280 - DNA, 403 bp, Homo sapiens
  misc_feature (1)...(403): n = A,T,C or G
atctccactacaagtactgcattttgagagcagattttaacttgtaaaatgttatcccgacttcacttagaccatttttatcggcattaggaaatatgggtcagccccggacactgactcaccattctggaactatatgacctgctttctaatcatctatcgaaggattcctatattatactagctacttcaatacattatcacctatgtgaatatcatttattcttgtgaatttttgactatttgcagtagagaagcatactcagccaatgtggtcccttaataactatgacaaccttaaaggatgtcacttaagttagaaaataagcacgcttaagaagtgattctatttaggacccccactcattttgctagtcatgcctgcctgacaaaacataatctn

SEQ ID NO: 5281 - DNA, 466 bp, Homo sapiens
  misc_feature (1)...(466): n = A,T,C or G
ctagttttctctactgccttccaaggtttctactgtacaatttctcattgaaaactgcctcagcattttttaagaagacatcacttcccccttggggaagaaagaactcaatgacttgaagaaactgatgcttcaggtaccttgaaaaattcagctggttttgatgagaaacagtcaatggggctgttaggggtcctggcggatgcttaggcagtggctgtcctggattccagggaatgccccaaacccagtgatgcaggacccaggactccatctgctcattcttcataaggttggctcacaggtcatctgctgagaaggtcatcttctccgtcttcactgggcttactgaatgaggacattccaagatcccagctcatctcatttgagctttccttttcctaatcccatgcatctgtgtttgagaaaatcttcccaagtgatagatcttctattttccgatttn

SEQ ID NO: 5282 - DNA, 386 bp, Homo sapiens
  misc_feature (1)...(386): n = A,T,C or G
cggacgcgtgggaggaaatgcaaattaaaactgatttcataatacatacatcaaaatggcagtgatgagaaacactgcaaatgccaacacttgcacttgctgcttgagagttttgannnanaaactnctttnaaactatttaccatctaaatctaaacctaaccgccatacacttcaatatattttatcctttatatcccaatgtatttatatacatatattctttaaccaacattttcctttcaatttttacccttcacaaagcctataaaccttcctataatctattttatctactttatgactatctttttttataaatcaagcttaaactatcattgctcaatgcacaaacctcaactcatcctgcactttctacaaagtag

SEQ ID NO: 5283 - DNA, 494 bp, Homo sapiens
  misc_feature (1)...(494): n = A,T,C or G
tgggncannnnattgatcgcttggagcaccggtccggaccggccgggacgacccacgcgtacgcagtgccctctatatgaggatggggagcggctgagtctgtcttttccgtccgctcccccctccccccgagcgccgctccggctgcaccgcgctcgctccgagtttcaggctcgtgctaagctagcgccgncgtcgtctcccttcagtcgccatcatgattatctaccgggacctcatcagccacgatgagatgttctccgacatctacaagatccgggagatcgcggacgggttgtgcctggaggtggaggggaagatggtcagtangacagaaggtaacattgatgactcgctcattggtggaaatgcctccgctgaaggccccgagggcgaaggtaccgaaagcacagtaatcactggtgtcgatattgtcatgaaccatcacctgcaggaaacaagtttcacaaaagaagcctacaagaagtacatcn

SEQ ID NO: 5284 - DNA, 484 bp, Homo sapiens
tgttgatctctggtgcaagaaagatgtccactgcaggtattgacctgatggacatggcttctgacatcctgcagcccaaaggagatgatgtggcccggatcagctggtacctccgtgacatcatcactcgataccaggagaccttcaacgtcatcgagaggtgccccaagcccgtgattgctgccgtacatggaggctgcattggcggaggtgtggaccttgtcaccgcctgtgacatccggaactgtgcccaggatgctttcttccacgtgaacgaggtggacgtgggtttggctgccgatgtaggaacactgcagcgcctgcccaaggtcatcgggaaccacagcctggtcaacgagctggccttcactcgccgcaagatgatggctgacgaggccctgggcagcggactggtcacacgggcgttcccagacaaagaggtcatgctggatgctgccttaacgctggcggacgagattttcag

SEQ ID NO: 5285 - DNA, 395 bp, Homo sapiens
ccacctcagaaaatctacactcttttacagaccattatgaaatatgtggtctcatgatagaatattataatcttcatagagtagatggggttgcagagaaatcagacatctgaactcttttccctttattacaatatacttgctctgtggcctaaagcaattcactgaacaattttgttagaaaactgcctcgaggttctacggagtaaggaagaacaggaaggttatattcatgttctcttgaagattggactgtgggctataacattcaaggagacaaaacaagatattatattaagagcctagtccaacatacaaaagaaaacaagtgactatattactccaggggcaacattgcaaaggattacatttaacatatttgtagaagtttccaa

SEQ ID NO: 5286 - DNA, 445 bp, Homo sapiens
  misc_feature (1)...(445): n = A,T,C or G
accttctctcgcggccgggggaccgcagcgcggggctagcccggagacccggccaccggcctggggcgccttcacgccgtctcggagcggataatgcggtgagcaggcaccacgccggcagactcggctggatctgcgcacagcggcagggattgcgtgcgcccgcgggaggcccggggcagcggctgggatcctcagcggcggccggtttgtcctggttgtggtcaagactggatgatgtaactggctctctaggaagcctcacttggccgtaacctcaggaaggttctctttgaccccatctcatttcgaagccacttctgaagccacttgagaaaaatgatgtgacagttcctatcataaaggattcagaaacatataccatctgtgaagaaagtggcctttctccttttgggcaatagaattctcatggaatctctaaaan

SEQ ID NO: 5287 - DNA, 424 bp, Homo sapiens
tagaagactaccagtccccaaagatgtatattccaagcaaagaaatttgtatgaattaaaccgtttatataaacacatccatcctgagttaagaaaaaacttagaaaaagattatatcagtgaagtttctgagattgtttctagtcaaatgaactcagggagttcagtctcagcagatgtgcaacaagcccggtatgtttttgaaaacacaaatgacagttctcaaaaagatctgaactcagaaagagaatacttggaatgggatgaaattctgaagggagaggtgcagtccattagatggatctttgagaatcaaccattggattccatcaacaatggctctcctgatgaaggtgatatttccaggggcattgctgatcaagaaatcattgctggtggcgatgtgaaatataccacatggatg

SEQ ID NO: 5288 - DNA, 409 bp, Homo sapiens
  misc_feature (1)...(409): n = A,T,C or G
ctgcacatcaacaaggcgggcagcagccagggcgacactgagtcgccatcccacgagaagctggtggactccaccttcaccccgagcagctactcgtccaccggctccaacgccaacatcaacaacgccaacaacaccgccctgggtcgcctccctcgccccgccggctaccccagcacggtcagcactgtggagggccacgggccccccttgtcccctgccatccgggtgcaggaggtggcgtggaagctcatctccaacaggtgccactcccgggagagccaggcaaccttctaggtaacgaccacatctacggcgannnanaaaggaaaaaaaagaggaggggcacggaacaaccannnccgggggcccccttaaaaaacacccggggggggaccacatctccccc

SEQ ID NO: 5289 - DNA, 395 bp, Homo sapiens
acaagacagaaggcccttacaagaaggtgacattgttaatgtggatatcactctttatcgcaatggttatcatggggacctgaatgagacattttttgttggagaagtggatgatggagcacggaaacttgttcagaccacatatgagtgcctgatgcaagccattgatgcagtgaagcctggtgttcggtacagagaattgggaaacattatccagaagcatgcccaagcaaatgggttttcagttgttcgaagctattgtgggcatggaatccacaagctttttcatacagctcccaatgtaccccactatgctaaaaataaagcagttggagtgatgaagtcgggccatgtatttacaattgagccaatgatttgtgaagataagataggac

SEQ ID NO: 5290 - DNA, 421 bp, Homo sapiens
  misc_feature (1)...(421): n = A,T,C or G
aaaatgccttaattttatggattagttctcttatagtagacaggcagctatatgcagcaaaaccaataaagttatttttcaactttcatagttgtaaaatatcttataacagaatacaaaacagctaagaaaacatgccacattttattttagcattttcaaataatttgtttttggtgtaagcacaggataaaaaaggagagcgtcaaagaaaagagacataacacctaacattcataaaaattaacaaagtatattttggatgatgtttttacaggaaatattttaaataagttggtagaacttttaaaatggtactgtattagctaataaaatattcagtacaaatatatgtttggatttatgcattanaaaactaataaaattatttccaacttttaaaaaaaaaaaaaaaaggggc

SEQ ID NO: 5291 - DNA, 392 bp, Homo sapiens
  misc_feature (1)...(392): n = A,T,C or G
taggaattatatccttcttgctcatcagatgatgatacgcccgagcagatgccaacacagcagccattcgagcaatcctatacaaccgtatcggcgatatcggtttcatcctcgccttagcatgatttatcctacactccaactcatgagacccacaacaaatagccattttacctcacccctcggacagcaaaaaatacctatatttatcccatattcaactaaaaaaggcctgatttttggggggggggaatattatatagaccccgggggggcacactgatctgcggtggtataaaaaacttctctttttttgtataagggataaaaaaaaaacgtttaggctgtgtgtggggactcaccttttttgtgggggagattagaaaagacan

SEQ ID NO: 5292 - DNA, 387 bp, Homo sapiens
cttctccctctctctatctccacagatcccttcctaagaggaggctcctgctaaaacttcatcatctcaagatgacctgccacttcacccaaggagggtaaggagctgggaccagagacgccaattcctgccttctagatcctgggcaagctcttgcctgtgacagtgtatttgccaacatggcacccaaaaagaagattgtcaaaaagaacaaaggagatatcaatgagatgactataatcgtagaagatagccacctaaacaaactgaatgctttgaatgggctcctagagggaggcaatggccttagctgcatttcttctgaactaacagatgcttcttatggccccaacctcttggaaggtttaagtaaaatgcggcaggaga

SEQ ID NO: 5293 - DNA, 406 bp, Homo sapiens
tcagccagcgatgctgtgctagaaatgctgaacgagatgtcctgcaggatataacctgaggagacaaagataggctagagtgagcaccttgaacagatacttactgatcttggccttgagaaaaagagaggcgggaagaggactgattggtaattagagctgctgtctggcctaaacccagctcaatacctcactgtatctgttaatagcagagaaaagactctctggaggaaaataatgctgacttcagtctctacgttcttctatacacaaagtccagtgtaatacaaattacaagccacaggaataacatgaaaatatgactgaagatcaagaagaaaaatagataatagcagcagacccataagtgattcagatgttgaaatctacagtcaaggacttgaaa

SEQ ID NO: 5294 - DNA, 459 bp, Homo sapiens
  misc_feature (1)...(459): n = A,T,C or G
aaaaaaaaagatatgtaggctgggtgaagtagctcacacctgtaattccagtactttgggaggctgaagcaggaggatcacttgaggccaggagttcgagaccagcctggccaacatggcaaaaccccatctctaccaaaaaatacaaaaattatctgggcatggtggcacacgcctgtaatcccagctattagggagactgaggcatgagaatcacttgaatctgggagacggagtttgcaatgagctgagatcgtgatactgaactccaacctgggcaacagagccagactccgtctcaaaaaacaaacaaacaaaagataacgtagataagcaaaaagatgaaaaatagtatcaataagaattccatcattctgtaataaccatcattaaaaattggctgggtgtggtggctcacaccctgtatcccagcactttgngaggccgaggcaagtgaan

SEQ ID NO: 5295 - DNA, 410 bp, Homo sapiens
taataggcaggattgtacaatgagcaactatcagattattcctttcagtggttcttatggcatctaaattactgaataaattattaatccattaatcagtgaatcaaattatgattacaattatcaaatgaatgctcaccattaattgaaaactgttttgtgaaacatgtctacccataaaagtagcattctataaatactattaaacaacttagctatattatttttaagtattaaattatatgtcaagcagttaaagtgaatttcatagtaaaagtaaggcatgtttctgagcaacattgataatttcttaatttgcacatttcttcttattttggtacttggaatatagtgcgagatattttatttctaaattttggtgtatcttctattacataaatgcattgaca

SEQ ID NO: 5296 - DNA, 419 bp, Homo sapiens
cggacgcgtgggcgagctgctctaagaagggaacccccaaatttaattaaagccttaagcacaattaattaaaagtgaaacgtaattgtacaagcagttaatcacccaccatagggcatgattaacaaagcaacctttcccttcccccgagtgattttgcgaaacccccttttcccttcagcttgcttagatgttccaaatttagaaagcttaaggcggcctacagaaaaaggaaaaaaggccacaaaagttccctctcactttcagtaaaaataaataaaacagcagctgcccccgagtgaaaatgcaaaaaccccttttaccttaaaaaaaataaaaaagatgggggggcccttttataaaagccccctgggggccaaaaaataaaggggcgaagaagttttctctctctttcttta

SEQ ID NO: 5297 - DNA, 456 bp, Homo sapiens
  misc_feature (1)...(456): n = A,T,C or G
agtaatccaggtcggtttctatctacttcaaattcctccctgtacgaaaggacaagagaaataaggcctacttcacaaagcgccttcccccgtaaatgatatcatctcaacttagtattatacccacacccacccaagaacagggtttaaaaaaaaaaaaaaaaaaaaaaaaaaaaaaaaaaagggggggggccctttaaaaaaaacccttggggggcccaaatttaaccggggtgggaaaaaaataattttttcttttaaggggggtaaaaaaaaacccccctgggaatttttgggaaaaaaccttttttttggggggggaataaatgggcccaccccccccccaaaaattaaacctttgggggaaaaaaaaaatttttaagggggaaagggggaaaacccacctctaagtctttggtgataagaaatatggggcnnnnntctgggaccaatctg

SEQ ID NO: 5298 - DNA, 387 bp, Homo sapiens
cccacgcgtacggtggaattcttctcgggaggcagtgctgggtcctttccaccatggcacctaagaaagcaaagaagagagccgggggtgccaactccaacgtgttctccatgttcgaacagacccaaatccaggaatttaaggaggccttcactatcatggaccagaacagggatggcttcattgacaagaacgatctgagagacacctttgctgcccttgggcgagtgaacgtgaaaaatgaagaaattgatgaaatgatcaaggaggctccgggtccaattaactttactgtgttcctcacaatgtttggggagaaacttaagggagcggaccctgaggaaaccattctcaacgcattcaaagtgtttgaccctgaaggcaaag

SEQ ID NO: 5299 - DNA, 457 bp, Homo sapiens
  misc_feature (1)...(457): n = A,T,C or G
cagagcgcgagacccagcctaaagagagccttgagccagcgtgggaggccgctgccgtcgcgcgccttggattttctgttccttttttttttttttttaaacttctggcaaaaacacccccagccataaccccaaaaaaacataattacaaacggggcccctttgccccaaaatgggcctaagcactaaaaacgggacaattttgaactaaaggacccccccaccgggaaaaaacgggctggctttttttttgccaaaggggtttaaacccaaacaacatggttgtggaaaggccaggctggggttgcccaattgggaacttgggggcaactgaccttgtgttggtttgaagggggggggttaatacacctggggatcaagggctggttctttctttaatacaaaaactctgttggagaccaaccctttttatttcaacttttgaaaaagttggccn

SEQ ID NO: 5300 - DNA, 412 bp, Homo sapiens
cggacgcgtggggaccgagatggagaaaccctgtctctactaaaaatacaaaattagctgggtgtggtagcgcatgcctgtaatcccagctactcatgaggctgaggcaggagaatcgcttgaacccaggaggcggaagttgcagcgagccaagattgcgccattgcactccagcctgggcaacaagagcaaaactccatcctaaaaaaaaaaaagattgttgaagtgcaaatagtgatttgctagctgcatgtgctcgcttgattggaattgagaactgaagcattttgtagtatatgaagtaacgatgagctatttattggaattcaaaactgaagcattttgtagtgcatgaagaaactaataaatcatcctacttcttctgtatattcaattttaaaattttggatgt

SEQ ID NO: 5301 - DNA, 473 bp, Homo sapiens
  misc_feature (1)...(473): n = A,T,C or G
gggancctgaaccgtggatcgcctcggaccgcccggattcccggtcgaccacgcgtgccttttcctcgctggagcagctatgttgcggtgaataccctgaaccccaaggccgaggtggcccgagcgcaggcggcgctggcggtcaacatcagcgcagcgcggggtctgcaggacgtgctaaggaccaacctggggcccaagggcaccatgaagatgctcgtttctggcgctggagacatcaaacttactaaagacggcaatgtgctgcttcacgaaatgcaaattcaacacccaacagcttccttaatagcaaaggtagcaacagcccaggatgatataactggtgatggtacgacttctaatgtcctaatcattggagagctgctgaaacaggcggatctctacatttctgaaggccttcatcctagaataatcactgaaggatttgaagctgcaaaggaaaaggcccttcn

SEQ ID NO: 5302 - DNA, 424 bp, Homo sapiens
catttataaagcatatcatggctgtgtatagttgccgtttaaaaattgtaatcgaccagcaatattttcagtattttggtgtttttttctattaacctttcatgtttttcatcttccaattaatatttgggggggaggggtttcaaatttatacgaattatgcaataccaagttttgcctatgtaggtagtgcttttagctgtattggttattataggtaagtacacagatttaaaaaaaaaataatgtatgcttttttgtttgtttgtttgttttaattgaccaaagtgggtactgctatttttgcagtgtgatgaggtccttttgtgtactgagagatggacaggggattttttttaatatacatatatatatattctggggtgggtgggaggatttttaacactttgcagtgtagctgtga

SEQ ID NO: 5303 - DNA, 427 bp, Homo sapiens
atctgcactcagcagtttacacctgctagggtgttcaaaggtcagtgctatagaaattcagtatctggcatcgttggttttcttggctttgtgcttgttaaacctggtatttctactgatacagtatttgtgtaggtttctcagagtgttcagtttgatatactctaaaatagtaagcaatgcttttttttccagggtgtcaaattgagaaccaggtagatccccaccacctacagtaaaaaggaccctaaagtaaattggttgaagaaattagatcccaaagattcttggtgaattttgaagtcttcatcagtatatccatattaaaacgagatgaccgaagccaaagtaattatgggctgacaggacaactggatcagtttcattaaaaagggcaaacttgaagataaatcttttgactccagct

SEQ ID NO: 5304 - DNA, 465 bp, Homo sapiens
  misc_feature (1)...(465): n = A,T,C or G
ttttgtatatggtgtaagataatggtctaactttattattttgcatatggatatccagttttcccagcactatttgttgaaaagacgttccttattgaatggttttggcatcctattaaaaattaacttatgatgttggctgtaggttaaatactaaaagaaggtaaaaaactaaactaaaaaaagaaaaagaaaaattgatcatatttgtaaggctttatttttagactctcggtttatttcattcgtctctatgtctatccttatgctagnaccacactgttttggttactgtaagttttgaaatcaggaagtgtgaatccttcaactttgttctatttcaagacagttttggctatttggggttccttgagattcataagaattttagaatgcaattttctatttttttaaaaaactactattggattttgatagggattgcgttgaatttgtaggttggtt

SEQ ID NO: 5305 - DNA, 421 bp, Homo sapiens
acacggggaaccagtgctttgagtgccacgttttctggtgcgagcctaatgctggtaacgtgtctgaggcggtgcaggccgcctgcatgttacgatatcagaagtgcttggtagccaggccgccttctcagaaagttcgaccacctccaccgccagcagattcagtaaccagaagagtcacaaccaatgtaaaacgaggggtcttatccctcattgacactttgaaacagaaacgccctgtcaccgaaatgccatagctgcacatgcaaaaggactcggctatttacctgaagattgactagctacactaaagaaaatgaactccgccatccgaccttccatccagttgctgatgctttgtcttcagagaatttacccttaaccaagcagtgttagacaagcatgttctctcgtcttgcca

SEQ ID NO: 5306 - DNA, 413 bp, Homo sapiens
cggacgcgtgggaaaacttttaattaaaaagtaaactttaatgtcgaaaatgcaaacttggggaggacagaaagataacacacaaggctgtcacttcatacttggatggctgcacagcagacgcgcagaggcactcctcacttcccagacggggcggcggccaggcagaggggctccttacttcccagatggggcggcggacgcccggccgggaacatattttgttaaaagctcttcgaagaggaactctgtgtgagcgtgttaggatgacacaatagagaattttctttcctcttacagtggtggcccagcttgccgatctcaagcttaatactgagtcctacttcctgataatgtgtcagaaaccttaaacatgcttatacatataatttgtcaaaatcataaactctaga

SEQ ID NO: 5307 - DNA, 390 bp, Homo sapiens
caggcaggcaggcaagagaccggcagctggggagccaagcagggctggggatgctcacttgtcttttctccttccagggctgctggagagccagaggctggcagcgactatgtgaaggtaggaggggctggccaggggttggtcagaggacactgaaggtctcagagcctgctccattacgggtgggcagagcccttcctcaagccttgttaggagccagacctcactgtgtattcccaggaggggaggttctcggagtcgaggcagcatttggatccagtttcattctcagcaccttcttcctacaccagccattattctttcctggccccaaactcagggcaacccaatatttgatatcatctgaccccactcacttgccagctggag

SEQ ID NO: 5308 - DNA, 385 bp, Homo sapiens
gaagatggcggactcggtggctagccgatgaggtggccgcggggggaacccggcccccgggccccgagaccgactgagggagcgacctgcgcagggcccggggagtcatggtctccatcacccaactccatgcttcgagtcctgctctctgctcagacctcccctgctcggctgtctggcctgctgctgatccctccagtacagccctgctgtttggggcccagcaaatggggggaccggcctgttggaggaggccccagtgcaggtcctgtgcaaggactgcagcggcttctggaacaggcgaagagccctggggagctgctgcgctggctgggccagaaccccagcaaggtgcgcgcccaccactactcggtggcgcttggca

SEQ ID NO: 5309 - DNA, 426 bp, Homo sapiens
  misc_feature (1)...(426): n = A,T,C or G
ctggggttgagggaagactggtctaggtgctgctcctgaacttggtctctgagccatggcttcccatagacactcaggtccctccagctacaaggtgggcaccatggcggagaagtttgactgccactactgcagggatcccttgcaggggaagaagtatgtgcaaaaggatggccaccactgctgcctgaaatgctttgacaagttctgtgccaacacctgtgtggaatgccgcaagcccatcggtgcggactccaaggaggtgcactataagaaccgcttctggcatgacacctgcttccgctgtgccaagtgccttcaccccttggccaatgagacctttgtggccaaggacaacaagatcctgtgcaacaagtgcaccactcgggaggactcccccaagtgcaaggggtgcttcaaggccan

SEQ ID NO: 5310 - DNA, 427 bp, Homo sapiens
  misc_feature (1)...(427): n = A,T,C or G
cgctgaaaaagccccataagcgagatcctttgcagaatttccctggaagtgaaggcaaaaccctgctgaagcagccagacctgtgtggtagaagggaggggatggtggtcccagagagctttttgggtttagaaaagacctttgctgaagctcgtttcatatcagcacaacagaaaaatggtgtggtgatgccagaccatgggaaaagaagagacaatcgttttcattgtgatctcattaaaggagacttaaaggacaaatcttttaaacagagtcacaagcctctcaggtccacagatgtgtcccagaggcatctggacaacacatgagctgccacctcccctggagtggggcagtcagcacctggcacaaggaaggagatagtgcccaagtgcaatggctccctaatcaaagtaaactataatcn

SEQ ID NO: 5311 - DNA, 428 bp, Homo sapiens
  misc_feature (1)...(428): n = A,T,C or G
atgaaatcctggttagcggaggcatcggggccctggtgcggctaaagtctctccaaggtgacaagctggaagtcagcttgaaaaacaatgtggtgagtgtcaacaaggagcctgttgccgagcctgacatcatggccacaaatggcgtggtccatgtcatcaccaatgttctgcagcctccagccaccccgcagtcactttctttgtaacaacttccgttgctgccatcgtaaactgacacagtgtttataacgtgtacatacattaacttattacctcattttgttatttttcgaaacaaagccctgtggaagaaaatggaaaacttgaagaagcattaaagtcattctgttaagctgcgannnntnctnnnnacttgttcttccctaccacttttaaaatatactctggggggctcctttttatgg

SEQ ID NO: 5312 - DNA, 389 bp, Homo sapiens
  misc_feature (1)...(389): n = A,T,C or G
tctgtctgcacagttggtcctaggctggcttctgaggacttgaatttcaagagggttccctaactggtaatcatggtttactgtatctagactatggaaataatgtggcttatcctgctattctttttgtgagtctggaaatttcacacatgctaggcagagtacacatatgtgaccagccaagataaaaactgtgtttcttgggaagtcacataggttgttgtattttcattaagggggaaagaaggtagtctgtgtgatcctcatggaaggcacagcacataaggaagccggtacatggatttttccagactctgtcagtgtcttttgccattgagatctttctactatatatccatactatgttacagnaataaatcttagccatt

SEQ ID NO: 5313 - DNA, 387 bp, Homo sapiens
aagaaaacctgatcttcttttttggggcaaacattaacaacattgacatctgattacccatgatactctcaagatcttattctttaacaaaaaggtggggaaataaaaacaccataaaagcggccgggtgcagtggctcacgcctgtaatcccagcactttgggaggccgaggtgggcggatcatgaggtcaggaggtgagaccagcctggccaatatggagaagccctgtctctgctaaaaatacaaaaattggccgggcgtggtggcgggcgcctgtggtcccagctactcgggaggctgaggcagaagaacccctggaacccgggaggcagaggttgcagtgagccgagatggcgccactgcactccagcctgggtgatagagg

SEQ ID NO: 5314 - DNA, 389 bp, Homo sapiens
cactccacacgagaaaacctgaatgctggcaactttaacttcccttctgaaggacatctggtacgaagcactggtcccggcgggagctttgccaagcacatggtagcccagtgtgtctcaccaaagggacctcttgcttgttcgagaacatacttttttggagctactcatgttccttacttgggtggtgacagcaagctgcccaagaaaactgaacaaatgctattgtcccagatatatgctgctgttattgaggctgttttggctggcattgcatgttatgctaaaacttccagtctaacaaaggccaaggaggtagcagagcaaactctgggatctgggttagattcctttgagttgattccgtttaaggcagccctgcgctccaa

SEQ ID NO: 5315 - DNA, 415 bp, Homo sapiens
aaaaagattattgaaactatgccaatgactgagaaagttgaagaattgctgcgtgtcataggtccattttatgaaattgtcgaggacaaaaagagtggcaggagttctgatataacctcaggttggactattttacctatttttaaattcatcaactgatatattatgcacatattaatatttgtatctctgattttttttcttactttcacgcgccagtccgactggagaaaatctctaaatgtttagaaggtaggaatcatgaaatcatgtaaaagttttgtttaaaatttacatgtcaaaagaattctgcacaaacttacagaacttacaatcttgtcacccaggagttttcattccaggcaaacacattgtatgaagttccaaaacattataaacccttaaaattttaacc

SEQ ID NO: 5316 - DNA, 424 bp, Homo sapiens
aagccaacaggatccgacccggagttttgtgacaaatgcaagacccccaggtctacttagagcaaagctagtagaggaggcagctaggcgtggctctcattccttgccacagaatggattataagtcgagcctgatccaggatgggaatcccatggagaacttggagaagcagctgatctgccctatctgcctggagatgtttaccaagccagtgggcatcttgccgtgccagcacaacctgtgccggaagtgtgccaatgacatcttccaggctgcaaatccctactggaccagccggggcagctcagtgtccatgtctggaggccgtttccgctgccccacctgccgccacgaggtgatcatggatcgtcacggagtgtacggcctgcagaggaacctgctggtggagaacatcatcgacag

SEQ ID NO: 5317 - DNA, 495 bp, Homo sapiens
  misc_feature (1)...(495): n = A,T,C or G
aggtccggnntnnagnancctggtagcttccgaagactgagatcctcgacgaccccgcgntcgncgnagagccccagctgtttatcctgttttcctgttttactttgtcatcagttggatgattctcacctttactcctcagtaaatcaggaatgggaaattaaaaaccagtgaattgaaagcacatctgaaagatgcaattcaccatggagctttgtctctggcccttatttgtctaattttggaggtatttgataactgagtaggtgaggagattaaaagggagccatatagcactgtcaccccttatttgaggaactgatgtttgaaaggctgttcttttctctcttaatgtcatttctttaaaaatacatgtgcatactacacacagtatataatgcctccttaaggcatgatggagtcaccgtggtccatttgggtgacaaccagtgacttgggaagcacatagatacatcttacaagttgaatagagtn

SEQ ID NO: 5318 - DNA, 471 bp, Homo sapiens
  misc_feature (1)...(471): n = A,T,C or G
gcgccccnacctgatcactgaaggcntcgcgacgaacttccgggncgacccacgcgtccgcggacgcgtgggcggacgcgtgggctcagaacaggctgtgagtgcttgaagccacacacctttgattaaaggtggaacagaaaatgagtccaggtctggcccccagagcccatgctctttctactctgccattcttccttttatctcccctgatcttagtgtctactgtagaacctctcccattggttctagacattttgcgttttgaaatcatatcccgggccggagcactatgatgtgagactatctgggagcccttgaccctggcattggataccagtggactggcctccatcaccagggttaagtagaactctttgaaaactcctccctgactccctgcagccagggccagctattattccctggtgtgttgacctggtggaagtcactctggtcctgcaggtgctg

SEQ ID NO: 5319 - DNA, 534 bp, Homo sapiens
  misc_feature (1)...(534): n = A,T,C or G
ngcgttgatccgtgaccgtccggattcccggtcgacccacgcgtccgaaatcaaagaatcttgaagatgacactttgtcagaatgtaaacaggtgtctgataaagctgtttctctccagcgaaagcttcggaaagaacagtcattgcattatggttcggttcttcttataactgaattaccagaggatggttgtactgaagaagatgtgagaaaattatttcaaccatttgggaaagtgaatgatgtcctaattgttccatatagaaaagaggcttacctagaaatggaatttaaagaggcaattactgcaattatgaagtacattgaaacaacacctcttacgataaaaggaaaaagtgtgaaaatatgtgttccaggaaagaaaaaagcacagaacaaagaggtgaagaaaaagactttagagtcaaagaaagtatctgcatctaccttataaagagatgcagatgcttcanaagctgttgaaattgttacttcaacttctgctgagtcggnggatcagactcagcagctgg

SEQ ID NO: 5320 - DNA, 410 bp, Homo sapiens
  misc_feature (1)...(410): n = A,T,C or G
ctgactcttacctccctctctcctactcctgctcgcatctgctatagtggaggccggagcaggaaaaaaaaaaaatatataagtaaataaaaaaaaaaaaacaaataggggggccggccctttaaaaaaaaccccggggggccccaacttttcccgttgtaggaaaaaatattttttctttttttaagggggtaattaaaactccgccggggattttttaaaaaaaacacttttttttgggggggcaaattggttgacaaccccccccaaaaaattaactccctctgggaaaaaaaaaaattttaaggggtatagggtggaaaaccccccctcaaccccctgtttaaaaaaatttggganancctaacaaacacaaaatattttagcacgcgcgcttgtataccaccaca

SEQ ID NO: 5321 - DNA, 416 bp, Homo sapiens
  misc_feature (1)...(416): n = A,T,C or G
tgacatttcaattcatctctgctaatgaaaagggttctttctcttgggggaaatgtgtgtgtcagttctgtcagctgcaagttcttgtataatgaagtcaatgccatcaggccaaggaaataaaataattgcttaccttaaaaatcaaaaaaaaaaaaaaggggggcccttttaaaagaacccttggggggcccaaatttaacgggggatggaaaggtaaaacttttttctttatggggggccaaataaaaccctccttgggatttttggaaaagaaccttttttttggggggggaaaaaattggcccaacctccctccaaaatttaaagccttaagggaaaaaaaaaatttttaaggggaaaagggggaaaaacaacctcaataccctggctgttaaaaaaaatgngnnncnngn

SEQ ID NO: 5322 - DNA, 406 bp, Homo sapiens
cccacgcgtccgccgagacgcactgggggccggatgaatcctgcttatctgtgaaatgcagttaacacatcagctggacctatttcccgaatgcagggtaacccttctgttatttaaagatgtaaaaaatgcgggagacttgagaagaaaggccatggaaggcaccatcgatggatcactgataaatcctacagtgtttcactcttgttgcccaggctggagtgcaatggcgcgatcttggctcacggcaacctctgcctcccgggttcaagcaattgtcctgcctcagcctcctgagttgctgggattacagattggtgatccatttccaatacctgggggaggcaaacaaagcagttcacctctacaaactgggaaaaatgaagacaagaactctatctactga

SEQ ID NO: 5323 - DNA, 491 bp, Homo sapiens
  misc_feature (1)...(491): n = A,T,C or G
agacaactaaaccctccgaannccaatttgcgagcancagccncggaanttnngggnagaaccacccgtccggccgcctcgagcgcggtcctagcgttcagcggacgctcgcggcctcgatctctggactcgtcacctgcccctccccctcccgccgccgtcacccaggaaaccggccgcaatcgccggccgacctgaagctggtttcatggcagcctcaaagaaggcagttttggggccattggtgggggcggtggaccagggcaccagttcgacgcgctttttggttttcaattcaaaaacagctgaactacttagtcatcatcaagtagaaataaaacaagagttcccaagagaaggatgggtggaacaggaccctaaggaaattctacattctgtctatgagtgtatagagaaaacatgtgagaaacttggacagctcaatattgatatttccaacataaaagctattggtgtcagcaaccagaggg

SEQ ID NO: 5324 - DNA, 411 bp, Homo sapiens
agacttcagaccggaccaaccccaacttcctgttcatgtgctcggtggagtcggccgccagaactcaccccgaatcccacgtgctggtcctgatgaaagggcttccgggtggcaacgcctctctgccccggcacctgggcatctcacttctgagctgcttcccgaatgtccagatgctcccgctggacctgcgggagctgttccgggacacacccctggccgactggtacgcggccgtgcaggggcgctgggagccctacctgctgcccgtgctctccgacgcctccaggatcgcactcatgtggaagttcggcggcatctacctggacacggacttcattgttctcaagaacctgcggaacctgaccaacgtgctgggcacccagtcccgctacgtcctcaacggcgcgg

SEQ ID NO: 5325 - DNA, 500 bp, Homo sapiens
  misc_feature (1)...(500): n = A,T,C or G
aggtccggnntnnnagnacctaggangtgacgannactgaggatctccggaacgacccacgcgnncgaaaaaaagaagacgaaggttgtttactccttcttcaagttctgtggaggccagttggattcaaagatattagtgttatgaaaagcccttttagaagagcacacatgaatttaatttattgagataggccattttatgtgtaagtttagtttctgacctttgttgaagtcacagaaaatgatgtggctcaattttggtgtttaaatcaatgtgcacaagggcatgaatgaaaactgggtaggctgacaagccatgcaaacgaaaatgaagctatttacccaggatgccatgatcactctcagcatccaggcacctgaaggaatccttccccttctggcacgaggagccctcaatcagtggacttcagagctttcttgtgttatgggcaaaggtactccaattgcaaactgtgtgaaatttattttcctgttatg

SEQ ID NO: 5326 - DNA, 487 bp, Homo sapiens
  misc_feature (1)...(487): n = A,T,C or G
ggaccctgaagaactttgaannctagnnggctngnancaacnccaannnngggngacccacgcgtccgcggacgcgtgggagaaaatttgataggagtttgtttttttctatttataggccaagcgataccacgtataaatattatgaatcatggctgttccttagtgcctagttgtttataaaccatgggaaagaatgaaatcattgaccaaatgagacagggtaacagtcttccctgggagtaaagagactagcagtctctattgacatatattttaggcctggcctccaaaataaatttaccctcagaagtgatgtatttgtgtccagggctaccgagcctaatctttggctgcctctgtgttattctaagatgtaattgtccatgtcatctaaatttgtaataattctttaatatgatagtggttcagtgaacaaacattctgcttgctgcatttcttctgagtgagtaattccctgacaact

SEQ ID NO: 5327 - DNA, 497 bp, Homo sapiens
  misc_feature (1)...(497): n = A,T,C or G
aggtccggnatanagnacctaggtcctgcgaannactgagaccctcggaagaccccgcgntcgnctgtgcgaagcactgtgtatccacagtaaaggagcaacactaacttgttgtgagggagaactggaggagaggcggtgacatttgaactgtttggaatgcgcctgcaggagcttgccagcagaggaggctgctggggttgctgagggtgcagatgtggccttgtcaaaggataccatgtgcttggggaacgtcaaggccagagtcagcatgcctggagcagacgtgtcccggggtcaatgacagatgagcctctgcctcgagggaggtagaggctgattagttctaataatgtagacacaaacttgcacgagtgctacatattttttgggaacggatagtagaatgcatgtttaaaataattaggagacagagtgtctggccacttctgttggtgtgaacagtcctaagtgtctccccaaccgccgccttcaan

SEQ ID NO: 5328 - DNA, 472 bp, Homo sapiens
  misc_feature (1)...(472): n = A,T,C or G
natggccccctttnnnggaacttangancgtctnncnntgnggtaggaacgncccggtttgngagccatatagtctgtcacagntgtctaattcagttatagtcaatagctaaacaagtaagcatggctgtggtttgataaaactctatttacaaaaacaagcagcagataggatttggtccatgggctttagtttgataacctctgctccatagcagggatcacacacattttctgtgtaggatcagacagtagatatttgggctctgcaggccacatggtctcctgtcacaactgctcaactctgctgctacagcctggaagcagcacaatcaaggtgtaaatcactgtgtggctgaagccaacaaaactttatttacagacaccaaaacttaaatttcatataattttcatgttgaaaatattcttttcacttttttcaaccctttaaaatttttttaaattctagatg

SEQ ID NO: 5329 - DNA, 413 bp, Homo sapiens
cggacgcgtgggctaggctggagtgcagtggtgcaaccacagctcactgcaccttcaaatgctggagctcaagcaatcctcttacctccgcttcccaagcagctgggaccacagatgtatcctccactcctcgctggccaccatcctgctgcccaacagaagaagctcttctgtctccgatttcctgaacggtctaaggaccaggaagaaacaggctcctgccagcaccgacagcaacgaaaatgttcccacggagatcaggatgacttgctgaagctcagtggaggctaaaaagaggacacgaaagtgaacagaatgatcttcctacgcacaacacaaacgtcagttaatgttccatccatgctgcttaaagagcattcctgtcctagtaaaatgggcaagtccctctaccc

SEQ ID NO: 5330 - DNA, 408 bp, Homo sapiens
ctttctattagctcttagtaagattacacatgcaagcatccccgttccagtgagttcaccctctaaatcaccacgatcaaaagggacaagcatcaagcacgcagcaatgcagctcaaaacgcttagcctagccacacccccacgggaaacagcagttattaacctttagcaataaacgaaagtttaactaagctatactaaccccagggttggtcaatttcgtgccagccaccgcggtcacacgattaacccaagtcaatagaagccggcgtaaagagtgttttagatcaccccctccccaataaagctaaaactcacctgagttgtaaaaaactcaaaaaaaaaaaaaaaaagggggggccgttttaaaggacccttgggggggccaaagttaacgcgggcttgcaa

SEQ ID NO: 5331 - DNA, 455 bp, Homo sapiens
  misc_feature (1)...(455): n = A,T,C or G
atttagggggaataaaactgacttttagaaatattatgtttgagatgctgagtgttataaaggccgtatgttgaaaagcatttggaaatgaaaatatacacttagagaagtcttggctaaaggcacaaatttgggattcattggtatataagtaatatttaaagtgtgaatgaaaccgtctaggaaaaaaaaattaaggtagagtaaataaaaggctaacttctgatgagtagccagtgagaaaaaatcaagaggaagtaatcaactacagccaatctgctaataagccaacttataatggtggctgagtacagatcattggatttagcaacatgaaaataatcaatcatcttcataaaagctgtttcattagattaaagggagaaaaagccttattagaatctgaaaataattggaggtgaatgaaaatattaaatgtagaanaatctttcaag

SEQ ID NO: 5332 - DNA, 465 bp, Homo sapiens
acttactgcgggaaacatggctgcattgagcggagtccgctgtctgacccgagcgctggtctccgccgggaaccctggggcatggagaggtctgagtacctcggccgcggagcacgctgaatcacccatccttgccgaggacgtgagggtggagggctccttttccgtgacacatgcttccgggagacggagaggggcctgagctgatgcacgccgtcaaggatgtgttcaaagctgccgctgtcccagatgagtgccaggagcaccacctgagtgaggtgcagaatatggcatctgaggagaagctggagcaggtgctgagttccatgaaggagaacaaagtggccatcattggaaagattcataccccgatggagtataagggggagctagcctcctatgatagcggctgaggcgtaagttggacttatttgccaacgtagtccatgtgaagtcacttcctgg

SEQ ID NO: 5333 - DNA, 403 bp, Homo sapiens
accccggccactggagccactcatcatttccgacggatgggccggaggggccgccggccgccccagccagggtctcggtagcctgcaaggagagaaagaggtgggagcagcccgcgcggggccctgcgtcttgcataggcgcttctggtaaaatcactcctttatctcacataatgagttggcgctggatcgctgcgtcctcaggtggggctcgaatcgtgacttttagagaaatagggtttctttcttttttttttttttaccaccttgggttttaaggggcgcggatttggatgcagacttccccctggggctggggagggcacaccccaaagttttggtgggccttgagcctccccccccaacccttttttttcgtgggaccctgtatattttgggcgat

SEQ ID NO: 5334 - DNA, 419 bp, Homo sapiens
ctctggggctgacccgggaagtcggggtctcctttttcttctgtctttctgcgtcctactagcaggtttgtgcaggggaaactcagtggagaggaagatatatatccccttaaataaaacagctccctgtgttcgcctgctcaacgccactcatcagattggctgccagtcttcaattagtggagacacaggggttatccacgtagtagagaaagaggaggacctacagtgggtattgactgatggccccaaccccccttacatggttctgctggagagcaagcattttaccagggatttaatggagaagctgaaagggagaaccagccgaattgctggtcttgcagtgtccttgaccaagcccagtcctgcctcaggcttctcttctagtgtacagtgcccaaatgatgggtttggtg

SEQ ID NO: 5335 - DNA, 445 bp, Homo sapiens
gaggtcgctgcggcggtgggaaatgctggcgcgcgcggcgcggtgcactggggcccttttgctgaggggctctctactggcgtttggccgcgctccgcgccgcgcctcctctggattgccccgaaacaccgtggtactgttcgtgccgcagcaggaggcctgggtggtggagcgaatgggccgattccaccggatcctggagcctggtttgaacatcctcatccctgtgttagaccggatccgatatgtgcagagtctcaaggaaattgtcatcaacgtgcctgagcagtcggctgtgactctcgacaatgtaactctgcaaatcgatggagtcctttacctgcgcatcatggacccttacaaggcaagctacggtgtggaggaccctgagtatgccgtcacccagctagctcatacaaccatgagatcagagctcggcgtactg

SEQ ID NO: 5336 - DNA, 445 bp, Homo sapiens
  misc_feature (1)...(445): n = A,T,C or G
cgtttattgatccccataacaacctatgaggataaatatttaagccacatgaaaatgccaaaattcaacttttgttgattttcaaaaatactaagtctatatggttcaatctaacattactgttataatttcacagataaggaaagtgaggtacaaagaaattaaataatctgctcaaactttaatgatgatgattattattaagtgatcaaactcatagcatctaatttcattgttggccacttcagtctatgctttagggaagaagccactataccttgttagggtggggatacgggtacaaaaatctaactcgtagattagaatctgctaaacatacttctgtctcttggtagaaatgtgtaaagtccttgaaaagtgaaacaaaatattttctacatttgtactctactccatgcgtagcanagtatgaagggcattttat

SEQ ID NO: 5337 - DNA, 471 bp, Homo sapiens
  misc_feature (1)...(471): n = A,T,C or G
cccacgcgtncggttaaggccaagcttgctcagcacgtcaaaccagaggaacatgaacaggttaagagcagattagaacagaaatcaggagaacttgggaagaagatcactgagttaacattgaaaaatcagacactacaaaaggaaattgaaaaagtttatttggataataagctcctcaaggagcaagcacataacttaacaattgaaatgaaaaatcattatgttcctttaaaagtaagtgaagacatgaaaaagtcacatgatgcaattattgatgatcttaatagaaagcttttagatgtaacacaaaaatatacagaaaagaagttggaaatggagaaattgctactggaaaatgacagcttaagtaaggatgtaagccgcctagaaactgtgtttgtacctcctgagaaacatgaaaaagagataatagctctgaaatccaatattgttgaacttaagaaacag

SEQ ID NO: 5338 - DNA, 401 bp, Homo sapiens
  misc_feature (1)...(401): n = A,T,C or G
cggacgcgtgggcggacgcgtgggctagttctagatcgcgagcggccgccctttttttttttttttttttttttaaaaaaaaaaggggttttattgggttaacccggggggggggaaacccccaaccctaaaaacccccccccctccccccccaaaggggggggaataacgggggggaccccccccccccgccttaaaatggcttttttaaaacccttaattttggacaaaaccaatgtcctaaaaaaaaggggaaaaaacggaaacttttttttttaaaattttggtaaaaaaaaaaaaaaaacggggggggttttgaaccggaacctttaaaccttggttaaaaaaaagggcaaaagggaaaccccggttggaaaaaaaatttcccacctaaaaaaggn

SEQ ID NO: 5339 - DNA, 430 bp, Homo sapiens
gatttgatggcgtgatgtctcacagaaagttctccgctcccagacatgggtccctcggcttcctgcctcggaagcgcagcagcaggcatcgtgggaaggtgaagagcttccctaaggatgacccgtccaagccggtccacctcacagccttcctgggatacaaggctggcatgactcacatcgtgcgggaagtcgacaggccgggatccaaggtgaacaaaaaggaggtggtggaggctgtgaccattgtacagacaccacccatggtggttgtgggcattgtgggctacgtggaaacccctcgaggcctccggaccttcaagactgtctttgctgagcacatcagtgatgaatgcaagaggccgttctataagaattggcataaatctaacaagaaggcctttaccaagtactgcatgaaatggcaggg

SEQ ID NO: 5340 - DNA, 399 bp, Homo sapiens
acgagctacctaagaacagctaaaagagcacacccgtctatgtagcaaaatagtgggaagatttataggtagaggcgacaaacctaccgagcctggtgatagctggttgtccaagatagaatcttagttcaactttaaatttgcccacagaacccacaaaaaaaaaaaaaaaaaaaaaaaaaaaaaaaaaaaaaaaaaaagggggggggggcttttaaaaaaattttggggggggccaaatcttcccggggggggggggaaaaattttttttttttttgggggggggataataacccccttgggggttttttggaaaaaaccctttttttgggggggggcgaatggggcccccccccccccccaaaattttagcttgggggggaaaaaaaaattttttt

SEQ ID NO: 5341 - DNA, 428 bp, Homo sapiens
  misc_feature (1)...(428): n = A,T,C or G
nagctggcctggctncnnngggaaaatttagncnnngcatggacnntnngggtagagccacccgnnccggggtgaactagaggagaagagggtgactgggcggtttacatttgcgggagaagcaaagggacgactgagggaataatcaggagaccactgaggcgtgaagtactaggcgtgcgataactgaaggaattacctggctggtgtttgcttgttctggagtgatcttctgactggaaaagaactatgtcatggatcaaggaaggagagctgtcactttgggagcggttctgtgccaacatcataaaggcaggcccaatgccgaaacacattgcattcataatggacgggaaccgtcgctatgccaagaaatgccaggtggagcggcaggaaggccacttcacaggcttcaaacaagctagctt

SEQ ID NO: 5342 - DNA, 413 bp, Homo sapiens
cggacgcgtgggtttgtatgtcaacttggctgggatatggtgtttggtcagtatcagtctagatattgctgggatatggtgggattggcttggatatggtgtttggtcagatatcagtctagatattgctgtgaagatattctttagatgtgattaacgtttaaatcagtagactttgagtaaagcagtaaagcagattaccctccataacgtggctggcctcctccaatcagccgaaaaccttaagagcaaaaactgatgtttcctgaagaagcagcatttctgccctaagaggactgtaacagagaaactcttaagttttcagtatgcagattttaggtttaagtctgcaacatcaggccaagcgcggtggctcacgcctgtaatcccagcactttgggatgctgaggtgg

SEQ ID NO: 5343 - DNA, 475 bp, Homo sapiens
  misc_feature (1)...(475): n = A,T,C or G
acgacactatttttgaagactatgagaaattgcttcagtctgagaattatgttactaagagacagtctttaaagctgctaggggagctgatcctggaccgtcacaactttgccatcatgacaaagtatatcagcaagccggagaacctgaaactcatgatgaacctccttcgggataaaagtcccaacatccagtttgaagcctttcatgtttttaaggtgtttgtggccagtcctcacaaaacacagcctattgtggagatcctgttaaaaaatcagcccaaactcattgagtttctgagcagcttccaaaaagaaaggacggatgatgagcagttcgctgacgagaagaactacttgattaaacagatccgagacttgaagaaaacggccccttgaagagctccccggcccctgtcacagtcagtcgtctcatttgtccagtntgtacagtgtgtcatttcagaaagtcatat

SEQ ID NO: 5344 - DNA, 425 bp, Homo sapiens
gaaagaaaaatgaaagaaagatagaaaaattagctgggtgtggtggcgtacgcctgtagtcccaagtcccagctactcgggaggctgagacaggagaatcgcttatcactggagtccaggaggcagagagtgcagtgatatctcaccattgtactccagcctgggtgacagagagagacatagtctcagaaaacggaaaaaaaaaaaaagagagagggggtttcaccatgtggcccatcctgaggtcaaactcccgacctcaggggatccacccgcatcaccctccttaagggctggaataataggcatgacccaccggggtcagccgaaaaggcacatactctctccattcttcctccatgcgtacgcccatttttgccttggttgcccacctctgaccacaatccagaactaaccactccatt

SEQ ID NO: 5345 - DNA, 403 bp, Homo sapiens
ctttagaagaaaagacacataccaaccagagaggttcacctttgtatacaaaacacaacccccaggaacagttttcagaaaacaatgctcttgacctgcctgtggaacccaatgaacattatgatcccccctttaacatcagtaagctcctgacccccatcatacccagcaagcacgccctggattcagcagacagccagccagcagagcgaaccccatcacccccaggacagctaaacggataccaagagaaggagcccagtgaatgtcagtctcgagacagctacaagtccaaagcccctagcctgctgttcaacctcaaggacgtgcggaagcgtgttaagagcacatacagttcctcacctctcttgaaagtgcttgatgagaaaactagaggtaaggt

SEQ ID NO: 5346 - DNA, 417 bp, Homo sapiens
cctcgctgctccagcctctggggcgcattccaaccttccagcctgcgaccttcggagaaaaaaaattacttattttcttgccccatacataccttgaggcgagcaaaaaaattaaattttaaccatgagggaaatcgtgcacatccaggctggtcagtgtggcaaccagatcggtgccaagttctgggaggtgatcagtgatgaacatggcatcgaccccaccggcacctaccacggggacagcgacctgcagctggaccgcatctctgtgtactacaatgaagccacaggtggcaaatatgttcctcgtgccatcctggtggatctagaacctgggaccatggactctgttcgctcaggtccttttggccagatctttagaccagacaactttgtatttggtcagtctggggcagg

SEQ ID NO: 5347 - DNA, 407 bp, Homo sapiens
cggcagacagataccagaggcagaaagaaattacaatctcctaaaaaagaagctggcaagcctttttaatcgggaaattagatgcataatcccagagaagacacactaccagaaaagatttgagagactctctgattctctaactgggctgattggtgaaggccttccttgtataaagctagtctgtaatgacagagagatggctgtttttcagatgcccaaatgccagcaaaaaacaaaagggcatctgaaaaaaaaaaccaaaaaaaaaaaaaaaaaagggggggcccgtttaaaagaatccttgggggggccaaggttaacgggggctgggaaggtataagttttttccttatgggggggggatttaaaacctccttgggaaccttgggaagggacccttattt

SEQ ID NO: 5348 - DNA, 400 bp, Homo sapiens
aattctcctgcctcagcctccctagtagctgggatgacaggcgcctgccatcatgcctgactaatttttgtatttttagtagagacggcgtttcaccatgttggccaggctggtctcaaactcctgacctcaggtgatccgcctacctcagcctcccaaagtgctgggattacaggcgtgatccaccacacctggcccttgcaatcttctactttaaggtttgcagagataaaccaataaatccacaccgtacatctgcaatatgaattcaagaaaggaaatagtaccttcaatacttaaaaatagtcttccacaaaaaatactttatttctgatctatacaaattttcagaaggttattttctttatcattgctaaactgatgacttaccatgggatgg

SEQ ID NO: 5349 - DNA, 406 bp, Homo sapiens
  misc_feature (1)...(406): n = A,T,C or G
cggacgcgtgggctccttctgctcaagatatcacagttgagcactgatctttctcactggtctggtgttactgccctgagtgggctgtgagatgaccatcacggtagtccacgccctgaggttctactgcttccaggaatcatgttcaaagggtacccctgtctacacttctagacatcccaaacctcccacggccttaccaccgtcaaaggaacaattcttcaactcaaaaacactaccctttttatctctctgggatgatctcacatgaagccccccaacacgtatggcagagactgaaaactcanataaatacctaaaaagatggggcaaataatgttaatgagcatagtgggtcagctttaagagataacaggggctggacaccgtggctcgcgcctgaaan

SEQ ID NO: 5350 - DNA, 468 bp, Homo sapiens
  misc_feature (1)...(468): n = A,T,C or G
agcccccctatatngctacagacattgcgccggacctcccgggttgacccacgcgtccgcccacgcgtccgcatgaacattgtattgcagcatattgattttgccattcaacatggagaagacctagaatttaaagaaccaaaggaacgtgaagatgagtcttcctctatgtttgacgaatattttcaagaatgccaggatgaatgaagagtttactaaaagtaaccatctaaagagcttgtggccaaaccagcagaacattcttctcttcaaaggatgcaatagtagaaagctacttattttaatgaaaaaaagtaaaacttcgttctttatcagcctcatgcctgaatcaaatttttaattattctgaaactgctgctgtttaaagtggaatcttttagtattataacagcatcactttagattttgtaagtcaaaattgaaatgaatgcacatagatttatatat

SEQ ID NO: 5351 - DNA, 403 bp, Homo sapiens
  misc_feature (1)...(403): n = A,T,C or G
cccacgcgtncgcatgaacattgtattgctgcatattgattttgccattcaatatggagaagacctagaatttaaagaaccaaaggaacgtgaagatgagtcttcctctatgtttgacgaatattttcaagaatgccaggatgaatgaagagtttactaaaagtaaccatctaaagagcttgtggccaaaccagcagaacattcttctcttcaaaggatgcaatagtagaaagctacttattttaatgaaaaaaagtaaaacttcgttctttatcagcctcatgcctgaatcaaatttttaattattctgaaactgctgctgtttaaagtggaatcttttagtattataacagcatcactttagattttgtaagtcaaaattgaaatgaatgcacatagattt

SEQ ID NO: 5352 - DNA, 432 bp, Homo sapiens
caaaaatataaaatgatacttctttaagtaatacatatatccaagattgatgagggtgaatttcaagagaacaaaagaaattaacttgtaccactatccttgtgcttctaagtaaaatgaaatgaaaaacagctccacagggaatagggctaccttctggctcttgagcaccgactcctttcttagcccccgtgcctcaattgcttaggtttattatcttgattatttatatcctttctacccataagaacttaagctccttcagacgggggtctgtctgtttgggcactaatgtatcagaacacttagaacagtgctgggaacacaataagttctccagtctactagtgagtacataaacttacagctcacctttaaagccataagcattttctaagattattcagaccggactgactgactaggaaacta

SEQ ID NO: 5353 - DNA, 405 bp, Homo sapiens
  misc_feature (1)...(405): n = A,T,C or G
cccacgcgtgcgactgaaaggaatacctcagaagagatgcttcattgagtgttcattaaaccacacatgtattttgtatttattttacatttaaattcccacagcaaatagaaaataatttatcatacttgtacaattaactgaagaattgataataactgaatgtgaaacatcaataaagaccacttaatgctngaagaaaaaaaaacaaacggagaaataagaataaaaataaaaattaaaataaaaaaaaaaatnggggggggggtttttttaataatactcttggggggggaactgtttttcgcggggagaaaaatattttttttttccttttgggggcggaaaaaaaaaccgcctgggattttttaaaaaaaatttttttttggggggggaaaaaaaata

SEQ ID NO: 5354 - DNA, 408 bp, Homo sapiens
  misc_feature (1)...(408): n = A,T,C or G
ggacagctggaaagagcatttctgtgactacactgaagatgaattgaatgaaattcttaacggcatggatgaagtactggatagcccagaagacctagaaaagaaacgaatctgccgcatcatcacccgagacttcccacagtactttgcagtggtgtctcgtatcaaacaggacagcaatctgattggcccagaaggaggtgtactgagcagcacagtggtgccccaggtgcaggccgtcttcccagagggggcactcaccaagcggatccgcgtaggcctgcaggctcaacctatgcacagtgagctggttaagaagatcctaggcaacaaagctaccttcagccctatagtcactttggaacctagaagaagaaaattccacaaaccaattaccatgaccattcn

SEQ ID NO: 5355 - DNA, 432 bp, Homo sapiens
ctcctctgctgaaattactttcataacccatttgtttttacttatctaagcaatcatagtgtgaataactgctattgtgttacagagccgcttctgtttatagcctcctgtgtgtttatttaagaacaaattatctttgagctgcttggtctaatcaggacatatgaatccttccttcttctgtcccttgatctctcccttcctcctttctttcctccctccctcctgctttctctttgaccctccctccttctccctctttctttaaagatcttatggcagttgggctaaagaaagggatgttcttcaatcctgacccttatcttaagatgtctattcagccaggaaagaagagcagtttccccacctgtgcccatcacgggcaggagagacggtctactatcattagttacaccaccaatccaatttggg

SEQ ID NO: 5356 - DNA, 420 bp, Homo sapiens
cccacgcgtccgcccacgcgtacggccgcggagcctgggctgcggctgtcatggacgcctgggtccgcttcagtgctcagagccaagcccgggagcggctgtgtagggccgcccagtatgcttgctctcttcttggccatgcgctgcagaggcatggagccagtcctgagttacagaaacagattcgacaactggagagccacctgagccttggaagaaagcttctacgcctgggtaactcagcagatgcccttgagtcagccaaaagagctgttcacctatcagatgttgtcctgagattctgcatcactgttagtcacctcaatcgagccttgtacttcgcctgtgacaatgtcctgtgggctggaaagtctggactggctccccgtgtggatcaggagaagtgggcccagcgttcat

SEQ ID NO: 5357 - DNA, 422 bp, Homo sapiens
  misc_feature (1)...(422): n = A,T,C or G
agccaagatggaacacggagccaagtagaacctctcttcactcacagaggtcacatcttcctagatggaaatgggatggaccctgctcctttggtcaccacccacacctggcatccctgcagaccaaggactttgttatcagcaacaaatgatgcctctctgcatgtgtgggactgggtggacctttgtgccccccgctgacaccagcatctttccatctaggcctctacaaaggggaggagctgctgtagtagcaagggtgctgatgtaggactcaagtgactaccactccctgttaccagctgtgtggccttgggcaagtctgccagcgtcacttagcctcagtttccttatctgtaaaatgaggatagtaagaactacctcgtagtgatattgcgaaggctagaagaaacgcatggcan

SEQ ID NO: 5358 - DNA, 385 bp, Homo sapiens
actttgctgcttgctcagctcctctgtaacacagggatggcagcacctgtcttgctgggctggggaggtcatggatgttacatttaccgtgcctgacggttcccagcccgtaaaccagagcggtgaagctctgggttgtgagagccttggatgcacagagtggcggagacaccattgcgggcactcagagcactccctcctgactcgtgggagtgatgccagcgccctgcttggttttccacaagttgctctcgccttcccgaggggctggggtggcaatggtgagtgggtcatcgttggccttggaaagcgctttggttctcacacttggacagggctgtctctcatgttccaggaagccacagggaaaaaatagcctgttata

SEQ ID NO: 5359 - DNA, 396 bp, Homo sapiens
ctttccatttggcttctcacctgtgaaatacaataatagcccctcctgaagataaaatcattcagaaacagagcaataattctgactcattaacttctacctactcaaaaaagtctgccatgatgatggaccgaagtgaggctttttaacccacaagtaacctttttatttttttgagacagtcttgctctgtctgtcacccaggctggagtgcagtggcatgatcttgggacactgcagccttgacttcctgggctcaaatgagcctcccacctcagcctcccatgtggatggaaccacaggccccgcccaccatgcctggctatttttttgttgagctgggcatctcgctatgtttcccaggctaggcttgaactgctcagctcatgcaggctg

SEQ ID NO: 5360 - DNA, 416 bp, Homo sapiens
agccaagatggaacacggagccaagtagaacctctcttcactcacagaggtcacatcttcctagatggaaatgggatggaccctgctcctttggtcaccacccacacctggcatccctgcagaccaaggactttgttatcagcaacaaatgatgcctctctgcatgtgtgggactgggtggacctttgtgccccccgctgacaccagcatctttccatctaggcctctagaaaggggaggagctgctgtagtagcaagggtgctgatgtaggactcaagtgactaccagtccctgttaccagctgtgtggccttgggcaagtctgccagcgtcacttaacctcagtttccttatctgtaaaatgaggatagtaagaactacctcgtagtgatattgcgaaggatagaagaaacgca

SEQ ID NO: 5361 - DNA, 503 bp, Homo sapiens
  misc_feature (1)...(503): n = A,T,C or G
attgacgccgtggtaccgcgccgaattgctccggaattccaggctcgacgcacgcgtgcggacttattaagatgcatttgggtagtgccagaccgggggttggtacattatagcttgctgactggatgtgccatgctgactctttttatataagaagttttattggaacacagccacgcccattgatttacatattggttaacagagaccatatgacctacacaccctaaaatatttaccactttgcgcttcgcaagcattttgctggctactgctgtggacaccaattttaatttaggtagataaacttttttgtagcttctgagggtttgcattaatttgctcatgcatataggttggtggaagtgctttctgtttcttctaccaaaccatatctcacaggcgtataacttcatgcctgagtttctgtgtggacctctatagtgagagagnatttacatacttctttgcggcagcatgaatttcanaaatctcaacgcttn

SEQ ID NO: 5362 - DNA, 447 bp, Homo sapiens
  misc_feature (1)...(447): n = A,T,C or G
caacttacaatagcatcatgaagtgtgacattgatatccgcaaggacctgtatgccaacaatgtcttatctggaggcaccactatgtaccctggtattgctgatcgtatgcagaaggaaatcactgctctggctcctagcaccatgaagattaagattattgctccccctgagcgtaaatactctgtctggattgggggctccatcctggcctctctgtccaccttccagcaaatgtggattagcaagcaagagtacgatgaggcaggcccatccattgtccaccgcaaatgcttctaagatgccttctctctccatctaccttccagtcaggatgacggtattatgcttcttggagtcttccaaaccaccttccctcatctttcatcaatcattggacagnttgtttacacacgtgcaatttgtttgtgcttctaatatttattgg

SEQ ID NO: 5363 - DNA, 417 bp, Homo sapiens
cacgcaacagcatgatgcctgaggtagaagtatgatagttgaactttattgtgctctagaaaaagcaataaacccttctgcaaacttcataagatagcacagtaaaaggaactctacaccaagaggacattttcccttcaaaataacaaagcagaacacaaagtaaatcaaagcatataaacggagaaaggaattccgttgcctttgaaattgaactccagaaataatttacttaaaaagagttcctcagatatagcttgaagtctaaagacaatcattgatcatcaactggtattctcttactccatcagcactccagatacaaagcaagagaaagcccagagtaaaaaatttaaatggacaatatttcatctgcaacctggaaagtcttctatgcttggctgtgtattgactatc

SEQ ID NO: 5364 - DNA, 453 bp, Homo sapiens
agagaatccacactggagagaaaccttacaaatgtaatgagtgtggcaaggtcttcagtcacaagtcatccctagtaaatcactggagaattcatactggagagaaaccttacaaatgtaatgagtgtggcaaggtcttcagtcacaagtcatccctagtaaatcactggagaatccacactggagagaaaccttacaaatgtaatgaatgtggcaaggtcttcagtcgcaattcataccttgcccaacatctgataattcatgccggtgagaaaccttataagtgtgatgaatgtgacaaagcattcagtcaaaattcacatcttgtacaacatcacagaatccatactggagagaaaccttacaaatgtgatgaatgtggcaaagtcttcaatcaaaattcataccttgcatatcattggagaattcatactggagaaaaagcttataaat

SEQ ID NO: 5365 - DNA, 271 bp, Homo sapiens
ttgggcaccacctcttgtacttgctgtctgaaaaaacacctgactagtacagctgagatcttggcttctcaacagggcaaagataccaggcctgctgctgaggtcactgccacttctcacatgctgcttaagggagcacaaataaaggtattcgatttttaaaaaaaaaaaaaaaaaaagggcggccgttttaaaggacccctaggggggccaaagtttacccgggaatgcaaggcaaaaagtctttccctaaagggaggggtattaaaac

SEQ ID NO: 5366 - DNA, 419 bp, Homo sapiens
aaattttatcagcataaagctgtcaccaccatttgcacactgtccgggttctttcccagcacacagtgacttgtggcctactgagcctaattatttactgtctgacattttatagaagtttaccaagcgtgatctaaggtgtgaagagcctctgcttgtcccctgatctgttcccgtcctaggtataatttattaattacacttcttcagtgtgtgtagctgtgcacaggaaatgaatcctgcatgctgttagcggcgagagttcctcctcagggccgttgaggcgtcgctgcagaggcccagccggaaccttcagaggccctgggaacacacagctatgttgccagaacatccctgaagagccgagagtctgctccggattttcaaaccacactgtcagaaatgctttgcaacgctga

SEQ ID NO: 5367 - DNA, 446 bp, Homo sapiens
agctttcagtccactggcgagtctgaatggaaagatactaattatacactcaacacagattccttggactgggccttatatgaccacctaatggatttccttgccgaccgaggggtggacaacacttttgcagatgagctggtggagctcagcacagccctggagcaccaggagtacattacttttcttgaagacctcaagagttttgtcaagagccagtagagcagacagatgctgaaagccatagtttcatggcaggctttggccagtgaacaaatcctactctgaagctagacatgtgctttgaaatgattatcatcctaatatcatgggggaaaaaataccaaatttaaattatatgttttgtgttctcatttattatcatttttttctgtacaaatctattatttctagatttttggataacatgatagacataaaattgg

SEQ ID NO: 5368 - DNA, 410 bp, Homo sapiens
agcaactagaccaactgatacccaggactgtgaattaccatcatgtcatcctcccccagctgccccggaaacgaggagaagcacatacagtgcaccaagaacccagtggcgatttgggtcttggaccccatgctcagccacttgtgggaaaggtacccggatgagatacgtcagctgccgagatgagaatggctctgtggctgacgagagtgcctgtgctaccctgcctagaccagtggcaaaggaagaatgttctgtgacaccctgtgggcaatggaaggccttggactggagctcttgctctgtgacctgtgggcaaggtagggcaacccggcaagtgatgtgtgtcaactacagtgaccacgtgatcgatcggagtgagtgtgaccaggattatatcccagaaactg

SEQ ID NO: 5369 - DNA, 505 bp, Homo sapiens
  misc_feature (1)...(505): n = A,T,C or G
cccacgcgtccgatcccataacactgagctcaaaacccatagcccagaatttgaagctcaaagttccaaattccaggaaggtgcggagatgcttctgaaccccgaggaaaagagtcctttgaatatctccgtaggagttcaccccctggactccttcactcaggggtttggggagcagcccacaggggacctgcccatagggccaccttttgagatgcccacaggggccctgctgtctacaccgcagtttgagatgcttcagaatcccctgggtctcacaggagcccttcgaggtccaggtcggcggggtggccgggccaggggtgggcagggccctcggcctaacatctgcggcatctgcgggaagagcttcgggcggngctccaccctgatccagcaccagcgcatccacaccggtgagaagccctacanatgtgaggnctgagcaagggcttctccanagctttgactcataaaacaccgcgcaccacactgcgaggggccg

SEQ ID NO: 5370 - DNA, 406 bp, Homo sapiens
  misc_feature (1)...(406): n = A,T,C or G
tgccagcaaagccccatgctggagcctgtgtaacatctccttgggaggaagcagaataaagcaattttccttgaagccgaaaaaaaaaaaaaaaaaaaaaaaaaaaaaaaaaagggggggcccctaaaaaaaaaccccgggggggccaaaaataaccgggggggggaaaaaaaaattttttccccttaagggggggttaaaaaaacccccctggggatttttgaaaaaaaaccctattttgggggggggaaaaaatgggcaaacccccccaaaaaaattaaaaccctcaaggaaaaaaaaaaattttaaaggggaaaagggggaaaaaaacccgaaaatccctggggggaaaaagatgagnnnnnnnnnnnaaaaactaacantttgtgtagaattataaaaaaca

SEQ ID NO: 5371 - DNA, 434 bp, Homo sapiens
gcgcaaaaatatcccccggcttgtgagtggatgggtaaaacctatcatcataggtcgtcatgcttatggggatcaatacagagcagctgattttgttgttcctgggcctggaaaagtagagataacctacacaccaagtgacggaacccaaaaggtgacatacctggtacataactttgaagaaggtggtggtgttgccatggggatgtataatcaagataagtcaattgaagattttgcacacagttccttccaaatggctctgtctaagggttggcctttgtatctgagcaccaaaaacactattctgaagaaatatgatgggcgttttaaagacatctttcaggagatatatgacaagcagtacaagtcccagtttgaagctcaaaagatctggtatgagcataggctcatcgacgacatggtggcccaag

SEQ ID NO: 5372 - DNA, 408 bp, Homo sapiens
  misc_feature (1)...(408): n = A,T,C or G
tgagccaccacgcccggccagagacggggtttcaccgtgtcagtcaggatggtctcgatctcctgacctcgtgatctgcctgcctcggcctcccaaagtgctgggattacaggcgtgagccaccacgccaggccaggaaattgtattgtttaggaatgcgtactaatgagtgatacaaataagaaattgcatgagaatggtggtgacctttggtgaggagagaagaggctgctggggtgatggttgtgctctctctccaccaggatggtataccgttaactttgcatatttcctttatatttattcatccagctatattttatattttacatactttttctgcacattttatttcacaatataaaaaggtntaaaaatacacacacactgactcctatatggagatta

SEQ ID NO: 5373 - DNA, 452 bp, Homo sapiens
  misc_feature (1)...(452): n = A,T,C or G
cccacgcgtncggcagagactcttcttccactgctttctctcatgggctacttcaaagacaaggaacccctaacagcgtacaattacaaaaaacaaatgcatcggaagttccgaagtggtctcattgtaccttatgcctcgaacctgatatttgtgctttaccactgtgaaaatgctaagactcctaaagaacaattccgagtgcagatgttattaaatgaaaaggtgttacctttggcttactcacaagaaactgtttcattttatgaagatctgaagaaccactacaaggacatccttcagagttgtcaaaccagtgaagaatgtgaattagcaagggctaacagtacatctgatgaactatgagtaactgaagaacatttttaattctttatgaatctgcaatgagtgattacatgcttgtaataggtaggcaattcctttgatacagg

SEQ ID NO: 5374 - DNA, 452 bp, Homo sapiens
gcgctagttctaggatcgcgagcggccaggagtttgagatgagcctgggcaacatagcaagaccctatctcgaggaaaaaaattttttttaattggccgggcatggtggcacatgcttgtagtcccagctactagggaagctgaggcaggaagatcacttgagcccaggaggtcgcggctgcagtgggcccagattgcaccactgcactccagctgagcagcaaagcgagacctgtctctgaaaaaaaaaaaaaaaaaaaaaaaaggccttccggggggggttcctcgttaaaaaccctccgggggccccagcccccaaaattttgtgcccccccggaaaaggccttaataaaatcccacttttcccaggggaaaacttttttgggggaaaatggccccccggttttggggccattctccacccaaggacgtgttttttggggccccccttt

SEQ ID NO: 5375 - DNA, 450 bp, Homo sapiens
  misc_feature (1)...(450): n = A,T,C or G
tggggggaagcactgattcccagttagggggtgcctaactgagcagtagggatagaaggtgtgaacctgggagtgcttttataaattattttccttgtagattttatttttaatttatctctgngacctgccacggagaggggagagagagagagatgctgttgagcacatgacaaaatataataaaatggatgattcaaaaaaaaaaaaaaaaaaggggggggccgttttaaatgtcccttgggggggccaaattttacgggggctggcaaggntttgtttttttccttttggggggcctttttttaacctccctgggaattttgggaaagaacctttcttttggggggggaacttattggcccaacctcccaccaaattttaaaggctttagggaaaatttaaaattttaaggggaaaaaggggaaaacccccctcatttgctgcggt

SEQ ID NO: 5376 - DNA, 399 bp, Homo sapiens
attattgacgaactggctacagtaccatgcctctcagccagcccgtgtgtataatatgaagaccaaatgatagaactgtactgttttctgggccagtgagccagaaattgattaaggctttctttggtaggtaaatctagagtttatacagtgtacatgtacatagtaaagtatttttgattaacaatgtattttaataacatatctaaagtcatcatgaactggcttgtacatttttaaattcttactctggagcaacctactgtctaagcagttttgtaaatgtactggtaattgtacaatacttgcattccagagttaaaatgtttactgtaaatttttgttcttttaaagactacctgggacctgatttattgaaatttttctctttaaaaacat

SEQ ID NO: 5377 - DNA, 487 bp, Homo sapiens
  misc_feature (1)...(487): n = A,T,C or G
cgggggnaattgatngcccgtcngatcgccctcagaaccggcccggaattaccgcggcgacccacgcgtgcggagtcagaaaactccccagctaaactttcgtaagacttcatacaacacaatactctatactgtgatgatcacagctgccaaggctacctaaaagaagacagttatctcatatttggctgccagctccttatctttccctgcaccactacccacaggctactccctgaactgctgggataatggaatacgttctgtacctcactcgctcagctataagaagagcctcaaccattgaaatgcctcaacaagcacgtcaaaagctacagaatctatttatcaatttctgtctcatcttaatatgtctcttgctgatctgtatcatcgcgatgcttctctgaagttctgctacaacctctagatctgcagcttgccacatcagcttaaaatctgtcatcccatgcagacaggaaaacaa

SEQ ID NO: 5378 - DNA, 423 bp, Homo sapiens
gcattggagatttgaggtgatactaaaaatatctcatgggttgatatttcagtttttttccctcctctgaatcccagaaatttctggactaagctccccttatgtgcattagtggagagatgaagagaatgcacctttacatgccctgcagtctgacccagaggctctccataaaattggattgaattgaatataccttatgtttgtgaacaaaaatatagcatttgttgcacagtgcacagttttttttttctcctctgaatcttccagtaaagaatggcaatccttgcaaagaccttcctattagttttgggaatcagcagatggtgtccgacatgcacttaatttgttttttccttccccccaactctggccccatcttttttaggccctgctattttgctgggctgagcagtattcctg

SEQ ID NO: 5379 - DNA, 394 bp, Homo sapiens
acgaccacgcgtacggtggaattcttctcgggaggcagtgctgggtcctttccaccatggcacctaggagagcaaagaagagagccgggggtgccaactccaacgtgttctccatgttcgaacagacccaaatccaggaatttaaggaggccttcactatcatggaccacaacagggatggcttcattgacaagaacgatctgagagacacctttgctgcccttgggcgagtgaacgtgaaaaatgaagaaattgatgaaatgatcaaggaggctccgggtccaattaactttactgtgctcctcacaatgtttggggagaaacttaagggagcggaccctgaggaaaccattctcaacgcattcaaagtgtttgaccctgaaggcaaaggggt

SEQ ID NO: 5380 - DNA, 467 bp, Homo sapiens
  misc_feature (1)...(467): n = A,T,C or G
cggacgcgtgggccaggcagcccagctgaaggcagtaagctcggctcacagtcgcaggagagttctggggtacacgggcaaaggggcttgagaaggcccggaggcgaagccgaagagaagcaactgtgccccggagaagagaagctcgcccattccagactgggaaccagctttcagtgaagatggcagggccagaactgttgctcgactccaacatccgcctctgggtggtcctacccatcgttatcatcactttcttcgtaggcatgatccgccactacgtgtccatcctgctgcagagcgacaagaagctcacccaggaacaagtatctgacagtcaagtcctaattcgaagcagagtcctcagggaaaatggaaaatacattcccaaacagtctttcttgacacgaaaatattatttcaacaacccagaggatggattnttcaaaanaactaaacggaaggan

SEQ ID NO: 5381 - DNA, 469 bp, Homo sapiens
caacaggctgccgctgaggagctggagctggtggggactgggccgcaatggacaagctgaagaaagtgctgagcgggcagaacacggaggaccggagcggcctgtccgaggttgttgaggcatcttcattaagctggagtaccaggataaaaggcttcattgcgtgttttgctataggaattctctgctcactgctgggtactgttctgctgtgggtgcccaagaagggactacacctcttcgcagtgttttatacctttggtaatatcgcatcaattgggagtaccatcttcctcatgggaccagtgaaacagctgaagcgaatgtttgagcctactcgtttgattgcaactatcatggtgctggtgtgttttgcacttaccctgtgttctgccttttggtggcataacaagggacttgcacttatcttctgcattttgcagtctttggcatttgacgtggtacagcc

SEQ ID NO: 5382 - DNA, 392 bp, Homo sapiens
cccacgcgtccgccacagaccaagcccgaaaggatgcccggaagagagaattaaagaagaacaaaaaacagcgcatgatggttcgagctgcagttttaaagatgaaggatccaaaacagataatccgagacatggagaaattggatgaaatggagtttaacccagtgcaacagccacaattaaatgagaaagtactgaaagacaagcgtaaaaagctgcgtgaaacctttgaacgtattctacgactctatgaaaaagagaatccagatatttacaaagaattgagaaagctagaagtagaatatgaacagaagagggctcaacttatccaatattttgatgctgtcaagaatgctcagcatgtggaagtggagagtattcctttgccagat

SEQ ID NO: 5383 - DNA, 379 bp, Homo sapiens
tacatctttaataagcatcaattatgtgcctgttctaggtctcgagaattcagcagggacaaagtagagggcccttgttttatcctttgaatctgtaaaagaagctaacctcataatgtgacatgaggggcactagccctgcaatggcggcaaaatttcaccattagactttcattctttgaacaaagctgtttatcttattctaaaatgcaaatgtgcttgagcacagtaaagctttgtcattcatggtcataaacaattttgggtaaatttatttatatgatgagttccaatatgacaacccaagcttatctagatgagttttgtggcatccttgataggggcttttatagacaggaaaaattactaaggggatact

SEQ ID NO: 5384 - DNA, 425 bp, Homo sapiens
  misc_feature (1)...(425): n = A,T,C or G
aaaacgcgatctgatcagacattacccaaaggaagacatatacatggccaataagtatattcttaaaatgctcaacattaactatgcatacagaaacgctaatcagaaccacaatgagatatcatctcatcctaattaaggtgactattttcaaaaagactgacaatatgacagccgtgggggttcatatctgcaatcctaacactttgacaggccatggcaggggaattgcttgagttcacatgtttgagatctgcgcaacatattgagactctgtctctaaaaagcatatcgagactctgtctctacaaaaaaattttaaaaagttgaaattatctgggcgtggtggcacatgccactaggtagtcccagctactcgaggttgctgcacctcatgcgttcaaggctacagagagccatgattn

SEQ ID NO: 5385 - DNA, 555 bp, Homo sapiens
  misc_feature (1)...(555): n = A,T,C or G
tgagaggtgcccagccacaaggtaaaatgatagaacgagaagctaaagtactactaagagtatttaanaaaggggggtttgaggcctctgtgacgcctgcggnaccggcgccggatnaccggggcgacccacgcgtccgagaaaaaagagctctgggaaagaaattatatgacagcagataggcaaataaataaacacaaggggggaaattgaggatgaggaagctcctagaaagtaggacaaagaaccagacacagagaagaggagagaaatgataagaaaatcagataatcaatccactgggcccaacatccaatcaagagagacacaaaagaggaggaaatttaaaaattggatatacagatactgagaactgacgaacttaaatttccaaattgaaaatatttcatgtgtattcagcgcatgtgtagcccgcaccaaggcacattgctgtggaatttcaggacaccagagaagaggctgaaaggttccagagaagaaccaacaatgttacataggaagggattaagaatcacaaagaaattcgacttctag

SEQ ID NO: 5386 - DNA, 423 bp, Homo sapiens
caaaaccatcttgttatagccagtgtgcagctgcctgatgatgatgctcagtttgatgcatcacactacgacagagagaaaggagaatttggaggttttggttcagttagtggaaaaattgaaatataagtcaagatcaaccatgaaggaaaagtaaacagggcccgttatatgccccagaacccttgtatcatcacaacaaagactccttccagtgatattcttgtctttgactatacaaaacatacttctaaaccagatccttctggagaatgcaacccagacttgcgtctgcgtggacatcataaggaaggctatgggctttcttggaacctaaatctcagagggcacttacttagtgcttcagatgaccacaccatctgcctgtgggacatcagtgccgttccaaaagagggaaaagtg

SEQ ID NO: 5387 - DNA, 411 bp, Homo sapiens
  misc_feature (1)...(411): n = A,T,C or G
gcagtgcaaatatccaagaagaggaagtttgtcgctgatggcatcttcaaagctgaactgaatgagtttcttactcgggagctggctgaagatggctactctggagttgaggtgcgagttacaccaaccaggacagaaatcattatcttagccaccagaacacagaatgttcttggtgagaagggccggcggattcgggaactgactgctgtagttcagaagaggtttggctttccagagggcagtgtagagctttatgctgaaaaggtggccactagaggtctgtgtgccattgcccaggcagagtctctgcgttacaaactcctangagggcttgctgtgcggagggcctgctatggtgtgctgcggttcatcatggagagtggggccaaaggctgcgaggttgtggtg

SEQ ID NO: 5388 - DNA, 473 bp, Homo sapiens
ctttaaataaaaatattttctaggccgggtacggtggctctcgcctgtaataccagcactttgggaacccaaggcaggcagattccttgaggtcaggagttcaagagcagcctggccaacatggtgaaaccctgtctctactaagaatacaaaaattagccgggcatggtggtgggcacctgtaatcccagctagtcagaggccgaggcaggagaatcgcttgaacctgggagatggaggttgcagtgagccaagatcgcaccactgcacaccagcctgggcaacagaaccatctcaaaaaaaaaaaaaaaaaatggttcaagtttcccccccaaaaaccccaataaaaggacttttattttcctaaaaaggagttttttttaccccaaggttaacccttagctttttttcatggaaaccaactaaaatttaggggctggccgaggggcctaacccctgtagggcctgtgggg

SEQ ID NO: 5389 - DNA, 449 bp, Homo sapiens
  misc_feature (1)...(449): n = A,T,C or G
tgcatctaagtcatgtttactgcatattgcagtccactaaatgtgcaatagcattatgtctaacaaatatacaaaccttaatttaaaaatatttactgttcaaaatgctgacacagaaacgcaaagtgagcacatgctgttggaaaatggtgccaaatagacttgcctgatgccaggctgctacaaaccttcaatttaaaaaaaaaaaaacagtattcacaaagcatagtaaaatgaggtatgcctgtattgctctttctgaaggggggtgatataaaccatctctaaaaaatgtttctaccctaaagatttccccagtacagtcagctctccgtaactgtggtctccacatttaaatccaaccagccttggataggaaatatttgaaaaaagaaattgcattggtattgaacacgtacagacctttttttcttgccattattccctan

SEQ ID NO: 5390 - DNA, 447 bp, Homo sapiens
  misc_feature (1)...(447): n = A,T,C or G
tgtgcgananaaacaggttagcctgcgattgaccaccgtattcacgggccgacccacgcgtccgcggacgcgtgggggaagacaccactgaaaatatgattaagccctgaagtttgtcagggcaggaaacacatgggaatctgggagaagagaggttcaggctgaggaaagggcatgttcaagggcccagaagtgggagcatgcttttatcagaggctgtgtgcaagcctggctagagtgtaatgagtgaggtgaggaagaggagagaacaagttctgagaggtcgctagattgtaaaaacctatcaggccattgtgagggctttggatttcactcaaaatgagactgaagccatttgcggttnttgccagtgaagagacacaatctggtgttttaacaagattcctctggtagtcatatgtagtaaaatagaccaatgtgtgtgat

SEQ ID NO: 5391 - DNA, 371 bp, Homo sapiens
tgcagtggcgcgatctcggttctctgcaagctccacctgccaggagaatcgcttgaacccaggaggcggagattgcaatgagcagagattgtgccattgcactccagcccgggcaatagtgtgagactctgtctcaaaaaaaaaaaaaaaaaaagaattggggtttgggtttgggggttgtttaaactcgggaatttttttattttttgaaataaaaactgggccacgggctttcccgggggggggggttttaaccaaagccaaaaaagtttccctccccctgttaaaaaagggggtcaatttccctccttcaaagccaggggctgaaccacaaaaacaaaaaacggctaaaatttaataaaaccccccag

SEQ ID NO: 5392 - DNA, 396 bp, Homo sapiens
tccttggaagctgctgcggggaactgaaacggttctcataggcaggcacaaagacttctctaggaccccctacaatgctttacgtttgcctcgtgctttatatttcacaaagtgcttacacataacacgaccctcctcactcgacctggtgagatgggtagcattttgtggaagattccgagactcaagtttgagagactcacccaaggttatccagatctctttgaatcttgttcctgtcaactgacttattagtgccatctcctaattctgtgtcaacttgacaagcctgctgtctttcccttcatccaagttgccaataaaaatgctcaacaaggcagagtgctttagcaagacctggagagatctcctacaggtttatcttttaaaaaccgg

SEQ ID NO: 5393 - DNA, 416 bp, Homo sapiens
  misc_feature (1)...(416): n = A,T,C or G
cccacgcgtccggtgtaatttgcgcgcctgctgccttccttggatgtggtagccggttctcaggctccctctccggaatcgaaccctgattccccgtcacccgtggtcaccatggtaggcacggtgactaccatataaagttgatagggcagacgttcgaatgggtcgtcgccgccacggggggcgtgcgatcgggccgaggttatctagagtcaccaaagccgccggcgcccgccccccggtcggggccggagaggggctgaccgggttggttttgatctgataaatgcacgcatcccccccgcgaagggggtcagcgcccgtcggcatgtattanctctagaattaccacagttatccaagtaggagaggagcgagcgaccaaaggaaccataactgatttaatgagccattcn

SEQ ID NO: 5394 - DNA, 473 bp, Homo sapiens
cgggggctgcttctctattatgctctgtgcttctccctgtcaaaggcttcagcccacaccgtggagctaaacaatatgtttggccagatccagtcgcctggttatccagactcctatcccagtgattcagaggtgacttggaatatcactgtcccagatgggtttcggatcaagctttacttcatgcacttcaacttggaatcctcctacctttgtgaatatgactatgtgaaggtagaaactgaggaccaggtgctggcaaccttctgtggcagggagaccacagacacagagcagactcccggccaggaggtggtcctctcccctggctccttcatgtccatcactttccggtcagatttctccaatgaggagcgtttcacaggctttgatgcccactacatggctgtggatgtggacgagtgcaaggagagggaggacgaggagctgtcctgtgaccactactgccacaa

SEQ ID NO: 5395 - DNA, 427 bp, Homo sapiens
  misc_feature (1)...(427): n = A,T,C or G
ctcaggcacaaagaagttaaataacttgccgggcggtggctcacccctgtaatcccagcactttgggaggccaaagcaggcggatcacctgaggacatgaggttgagaccagccgggccaacatggtgcaacctcgtctttactaaaaatacaaaaacaaaaattagccaggggtggtggtatgcacctgcagtcccagcaacatgggaggctgaacaggagaatcgcttgaacccgcgacagggaggttgtgatgagccaaggtcatgccactgcactccagcctgggagacagagcaagactccatctcaaaaacaaaaacaaaacaaaacaacaacaaaaaaagaagttaaataacttgtttaagatcacacagctagtgcagttaccccctctcagtaattatgtttggcaaatatgaaatan

SEQ ID NO: 5396 - DNA, 473 bp, Homo sapiens
acaagaaaaggccgaattgcagtgtctccatcagcagtttgctctccatgggcacacgatgacaaaatatcctgaagcgaaccactagtctgacctcagtagcaggattggaagcttcatgccatgggagctgtcaagaaaggcatcccaaagagaactgaaatttaaaaataataatagaccttcaggaacaggtgatttgaagatattaaagctagaaattggaactagaaaatcaaaagaattcaaggcatcttaacgtgacagttgaactcatttgattatacttaaaaaagtttattgcagttattgactctcaatttttttttttttttttttttgagggcaggggggcctttgttgttcattggggcctaatttttccaggctaaaaaaatcctcccacctcagcttccagaaaagttggaactacaggggcatgccacaccctgaaaattttttttcccccaata

SEQ ID NO: 5397 - DNA, 465 bp, Homo sapiens
  misc_feature (1)...(465): n = A,T,C or G
gggaccnnnnnttcagatatccgtagacctggcaccgacnccggattgaccacgcgtccaggcgtccgggagggtcaggtcgtttctgcgcgggcttccggttctgctactgctgctgctcttcctcgggccctgggccgctgcgagccacggcggcaagtactcgcgggagaagaaccagcccaagccgtccccgaaacgcgagtccggagaggagttgcgcatggagaagttgaaccagctgtgggagatggcccagcgactgcatcttcctcccgtgaggctggccgagctccacgctgatctgaagatacaggagagggacgaactcgcctggaagaaactaaagcttgacggcttggacgaagatggggagaaggaagcgagactcatacgcaacctcaatgtcatcttggccaagtatggtctggacggaaagaatgacgctcggcatgtgaccagcan

SEQ ID NO: 5398 - DNA, 471 bp, Homo sapiens
  misc_feature (1)...(471): n = A,T,C or G
ttggaagtaagaaccgaagctgaatccggcttgcttttttacatggctcgcatcaatcatgctgattttgcaacagttcagctgagaaatggattgccctacttcagctatgacttggggagtggggacacccacaccatgatccccaccaaaatcaatgatggccagtggcacaagattaagataatgagaagtaagcaagaaggaattctttatgtagatggggcttccaacagaaccatcagtcccaaaaaaagccgacatcctggatgtcgtgggaatgctgtatgttggtgggttacccatcaactacactacccgaagaattggtccagtgacctatagcattgatggctgcgtcaggaatctccacatggcagaggcccctgccgatctggaacaacccacctccagcttccatgttgggacatgttttgcaaatgctcagaggggaacatattttgacggaan

SEQ ID NO: 5399 - DNA, 400 bp, Homo sapiens
ggctcgaatcagacgcctctcaatgcaccctctgtatcattcctgggtgattgcagctggtcagggcaacaacgaagtgtccatgtgggacatggagactggtgacagaagatttactctctgggccagcagtgcaccaccactttctgaattacagccttctcctcatagcgtccatggtatctactgtagtcctgcagatggaaatcctatcctactaacagctggctcagatatgaaaataaggttttgggacttggcttacccagaaaggtcctatgttgttgcaggaagtactagttccccatctgtgtcctactacaggaaaataattgaaggcactgaagttgtccaggaaattcagaataagcagaaagtaggaccaagtgatgacacccct

SEQ ID NO: 5400 - DNA, 472 bp, Homo sapiens
  misc_feature (1)...(472): n = A,T,C or G
aacatggcggcggccgtaaggagcatgggtagagccttgatacatcatcaaaggcatagcctttccaagatggattatcagacatcactttgttcttgttctgtaaacatccgagtgcccaacagacattttgctgctgctacaaagtctgcaaagaaaacaaaaaaaggtgctaaagaaaaaacaccagatgagaaaaaagatgaaatagaaaaaataaaagcatatccctatatggaaggcgaacctgaggatgatgtctatttaaaacgcttatacccgagacagatatatgaggtggagaaagctgttcacttacttaagaaatttcaaattcttgactttactagtccaaagcaaagtgtttatcttgatttgacactggatatggcactgcgaaagaagaaaaacgtggagccatttaccagngttcttagtttgccatacccatttgcttccgaatcaataaaga

SEQ ID NO: 5401 - DNA, 473 bp, Homo sapiens
  misc_feature (1)...(473): n = A,T,C or G
agagggnccnnnnncaactaaaactgacggcatcgcaacggacnncccgggnngacccacgcgtccgaaaagaattctagagtgaaagtttcatgaatataagaagcaagacaaggaagtggcttatgcttaaggccttaaaggcaaccactgtgacaatccagccattctctggagaattcagcagaaagccagttggaagtaatgttttctgtttgtttttctcttttttgccctcctggctataatgagaaacccaagaaaataagtctttccattgcaggacagctaaattgcacaagcattcaaatttctcccctttgactcatactctgtcatctctattttggcttccacttttggagaaggtctccaccccctaccccggccctctcctcactgccccatgctttgagtgcaaacactccagattttcaaccttctcccctccatttcccacttctctttcccan

SEQ ID NO: 5402 - DNA, 422 bp, Homo sapiens
cgccaagtgaagcctcgcttccctcccgcggcgaccagggcccgagccgagagtagcagttgtagctacccgcccagaaactagacacaatgtgcgacgaagacgagaccaccgccctcgtgtgcgacaatggctccggcctggtgaaagccggcttcgccggggatgacgcccctagggccgtgttcccgtccatcgtgggccgcccccgacaccagggcgtcatggtcggtatgggtcagaaagattcctacgtgggcgacgaggctcagagcaagagaggtatcctgaccctgaagtaccctatcgagcacggcatcatcaccaactgggatgacatggagaagatctggcaccacaccttctacaacgagcttcgcgtggctcccgaggagcaccccaccctgctcaccgaggccccc

SEQ ID NO: 5403 - DNA, 473 bp, Homo sapiens
  misc_feature (1)...(473): n = A,T,C or G
agagctcgnnnnncactgatnactgagagacatcggcacggaccccccgggtcgacccacgcgtccgggcgggagccggctctcgggcggaggcgctgaagtttccttcccgccgcgctctcaccccgggctggcgccccgtgccatgcgggagcgctggggcggcggggcaacatgaagggcggcgacagggcttacacccgaggtccctctttggggtggctctttgctaagagctgctgttgcttcccgtgtagagatgcatactctcattcctcaagcgagaatggaggcaagtccgagtccgtagccaacctgcaggcccagccctccctgaactccatccacagttgcccgggtcccaagcgctccaccaacactcttaagaagtggctgacgagtcctgagcgtcggctcaacagcgggaaggcagatggaaacatcaaaaagcagaagaaagttcgcgatggtcg

SEQ ID NO: 5404 - DNA, 400 bp, Homo sapiens
cgagaagcggcggggcggcgggccggcggtcggtgcgcaaagccaggcagcgcaggtatagccaggctggagaaaagaagctgccaccatggttgcactttcactgaagatcaccattgggaatgtggtgaagacgatgcagtttgagccgtctaccatggtgtacgacgcctgccgcatcattcgtgagcggatcccagaggccccagctggtcctcccagcgactttgggctctttctgtcagatgatgaccccaaaaagggtatatggctggaggctgggaaagctttggactactacatgctccgaaatggggacactatggagtacaggaagaaacagagacccctgaagatccgtatgctggatggaactgtgaagacgatcatggtggatgac

SEQ ID NO: 5405 - DNA, 401 bp, Homo sapiens
catacacccatatacaacagatccaagactggctgacttcatttgaaatggttgaatctgctgtgtaataaagtggttcaaccatgattaggaactgaaatttagtagaagagggaaaaggagttaatgtaacaaattattttagctacaaaccccggtaatagagcacttgggggatgggatggggtgggttggtgagacaatcagaatggtaaattgattaaatgctcctaaccctgtaattttgtgcatagagcaccctatgctgtggaaataactgttcttagatttcattgtaactggactgttcaggttgcccagagggaaagaacattcctaattctaataaaataaacttttattttgttattccattagttacttatgtttatttttatagg

SEQ ID NO: 5406 - DNA, 401 bp, Homo sapiens
ctagttctgatcgcgagcggccgctcgcgatctataactagtgtggcagtgcctgtagtcccagctactcgggaggctgaggcaggagaatggcgtgaacccgggaggcggagcttgcagtgagccgagattgcgccactgcactccagcctgggccacagagcaagactccgtctcaaaaaaaaaaaaaaaaaaaaagggggggcctttttaaagaacccttggggggcccaaatttaaccggggatggcaaggaataatttttttccttatggggggcctttttaaaccctacttgggaattttggaaaggaaccttttttttggggggggaactaattggcccaacccccctccagaatttaaaggctttagggaaaaaaaaaatttttaaggggtat

SEQ ID NO: 5407 - DNA, 410 bp, Homo sapiens
  misc_feature (1)...(410): n = A,T,C or G
gctcatgcctgtcatcccagcatttgggaggctgaggcaggcagatcacctgaggccaggagttcgagaccagcctggctggctagcatggtgagaccgtctctactaaaaatgcaaaaattaacagggcacggtggcatgcgcctgtggtcccagctactcgggaggctgaggcaggagaatcgcttgaatccgggaggcgaaggttgcagtgagctgagattgtgctgctgcactccagcctgggagacagagcgagactctgtcttaaaaaaaaaaaaaggaggggaatttttttttaagttttgaaacactgccctactttatttattaaaatctaaggctgttacaatcaagtcgttgcagggtttggatcacctgtaagttaggtatgcctaccaaacatccan

SEQ ID NO: 5408 - DNA, 401 bp, Homo sapiens
attgaaagaaaactggatgaagatatttactcctattgtggaacatttgggacttcagatacgctttaacttgaaatcaaggaatgtagaaatcaggacttgtaaagaaaccaaggatgttagtgctctgacaaaagcagctgattttgtgaaagcttttattctcggctttcaggtggaggatgcacttgccctcatcaggttggatgacctcttcctagagtcttttgaaattacagatgttaaacccctaaagggagaccatctatccagggcaataggaagaatcgctggcaaaggaggaaaaaccaaattcaccatagagaatgtgacacggacaaggatagttttggctgatgtgaaagttcacatccttggctccttccaaaatatcaagatgg

SEQ ID NO: 5409 - DNA, 430 bp, Homo sapiens
  misc_feature (1)...(430): n = A,T,C or G
cctgcctccagctctgcctccccctgagtctcccccaaaggtgcagccagaacccgaacccgaacccgggctgcttttggaagtggaggagccagggacggaggaggagcgtggggctgacacagctcccaccctggcccctgaagcgctcccctcccagggagaggtggagagggaaggggaaagccctgcggcagggccccctccccaggagcttgttgaagaagagccctctgctcccccaaccctgttggaagaggagactgaggatgggagtgacaaggtgcagcccccaccagagacacctgcagaagaagagatggagacagagacagaggccgaagctctccagganaaggagcaggatgacacagctgccatgctggccgacttcatcgattgtccccctgatgatgagaagccaccacct

SEQ ID NO: 5410 - DNA, 405 bp, Homo sapiens
cttcctggctgctgaagcgggttaaggtctgagggtcttgtggggccacggcgctgatcaccaggtgtttggcttggtcggttcttatttctcgcctggcaatggcgacgtacacctgcataacttgccgggtggcgttccgcgacgcggacatgcagcgggcccactataagacggactggcaccgctacaacctgcggcggaaggtggccagcatggccccagtgaccgccgagggcttccaggagcgagtgcgggcgcagcgggccgtcgcggaggaggagagcaagggctcggccacctactgcaccgtttgcagtaagaagtttgcctctttcaacgcctacgagaaccacctcaagtcccggcgtcacgttgagctggagaagaagccgtgcaggcagt

SEQ ID NO: 5411 - DNA, 492 bp, Homo sapiens
  misc_feature (1)...(492): n = A,T,C or G
taaggaagagcctcgnggaaatgagagccatgcgagggncgacccacgcgtccgggcctaggggaataaacaggagacagacagtgattatgttccggacctcatacactctcccctattaatcatattctaccaattgatcacctgaaagaaaatgcacaggtgagccctttcagcctattgcaatagggaaaacttttcttaatgaggaacatcccaaagacaaggaaagagacctcgggttgtatagaggcaggactccaaaggaggtggctgtcctcttgaatccaaaccaggggacccatgttgggcttgcgcgcttctcgccaggacacggcccagaggaggagaccagaaggcgtataagaccccggagaagaggactggcgccctctagaggatgacgcgacacaataccaccatgagagagtgaggaacttgacctttccttttgcagtcaccacagcaaagtcaaaaaacagaaagacaacg

SEQ ID NO: 5412 - DNA, 429 bp, Homo sapiens
cacagtcaaagcggctctagctctgataacacagatagaggaatgtccaggtcatcttcacccagaggagaagcctcatcattgaatggagaatctcattaaagtttattttctccaatttcttagtcacttctgtcctaccatgcaaatacacagattatgccaagaggtaccacattttcatgacagatacattcatgcacaatccataatttgagttttacataaaatagaaatttgttagaatttgttagattttattgcaatgatgcctaccaaacatttccagacttaacattttggtctctgcagttaagtgccatgaaaatgtggttgaattattcattatgcagtgttattgggaagtgtattttcacttttagtttagtgaattctaacacataattcttgaattctctactattggcg

SEQ ID NO: 5413 - DNA, 475 bp, Homo sapiens
acaggtcctacaacgtgactttaaaaagacagcagaaagcaaaaatgtcccattggaacgagaagccactagtaaaaatgaccaaaataactgccctgtgaaaccctgttacctcaatatcttggaagatgagcaacctttaaatagtgctgcccataaagagtcacctcctactgttgattcaactcaacagcctaaccctttgccgttacgtttacctgaaatggaacccttagtgcctagagtcaaagaagttaaatctgctcaggaaactcctgaaagctctctggctggaagtcctgatactgaatctccagtgttagtgaatgactatgaagcagaatctggtaatataagtcaaaagtctgatgaagaagattttgtaaaagttgaagatttaccactgaaactgacaatatattcagaggcagatctaagaaagagaatggtagaagaagaacagagaaaccatttg

SEQ ID NO: 5414 - DNA, 445 bp, Homo sapiens
tgggcagatcacgaggtcaggagatcgagaccaacctggctaacacagtgaaaccctgtctctacttaaaaaaaaaaaaaaaattccaaaaatttagctgggcatgggggggggcacctgtagtcccacctacttgaaaggctgaggcaggaaaatggcatgaacccaggagggggagcttgcagtgagctgaaatcgtgccactgcactccagcctgggcaacaaagtgagactccgtctaaaaaaaaaaaaaacagcaccttgccaatgttttttgggttaattaataaaagtttaaaaatattcaaataaaaatcccagggggtcttttttttttggggaggaagtagaaaaatttgtttttaaggtttatagggaaaaaccaaacgggaggattatcccagtaattcctggaaaagaaagagtgaaaaatataaagctttg

SEQ ID NO: 5415 - DNA, 414 bp, Homo sapiens
tcataaatcatggacaaatggcacctagaatgccaccatgtagccatatcgtgagtagtgaaatgtaattagcaggccaagtggaaactgaatttgttatctgacatgaactgtaaggaaacaatggtaaacagaccctaaatggaagttcagattaacattctggagagtgtgagagccccagtggtaaaatttcatgtacactcactgtgtcctgttcctagtggctggcaagctaaattatttctgatctaatatttttaaccaattagaattttattcattaatttaatcatttattaaattaacattaaataagcctttacaaagagctaggttctctgctagactatagcagaaaactataaagactaaaaaggaaaacaagacagatttcctactcataaggagctg

SEQ ID NO: 5416 - DNA, 411 bp, Homo sapiens
ttcaggtaaggagtaaggaaagtcactggcccttctccaagtgctgtgcaggtgcaaaagttatttaattttctgtttctctcttgaatgaatatgctacctatttggtggtataacacgtaaactcattcatattaaatgtcaatacatgctttaatgttttaatcaataaatgtactaaataatttaaatttacaagggattttggaaacagatccaactttaagcatggcaggaaattgatatttggacaaggaatgttagcacattcttagatcatactcagatttaaggtaagactactctatttttcaaaccaatctaggtatataaaaccaaatctagttagaatgagaatactaaattaaacataagtttgttattcagatattccatgtagaactgtgggat

SEQ ID NO: 5417 - DNA, 494 bp, Homo sapiens
  misc_feature (1)...(494): n = A,T,C or G
nttttaaagcctcggaatttgaccgccattgcagggnccacccacgcgtccgcactaggagagtttcctctgccccccttttaaaaaatgtcttcaggcctaacaaatgttaacatctattggtatgaatttttttccttccacagtgtgaccttggagatacctcatcatatcacacaaaggtgagctttttagaaacctgtcttgttattctagctaagtactttgcaagatatcaagctcagtgttaggtcacagctctagacatcataagctgtattgtgcctactaaaatattgaagcaaattatttgtattttctttgttccttaagactctcataattcttaaatgattgagaatctcaaagagtatgtgtttatattgattatattgatatttagtgtggtagaattatacaattgaaattttttcaaaatctatttttagtttcgatttcacagccttaccactgttgatattatgggctagata

SEQ ID NO: 5418 - DNA, 420 bp, Homo sapiens
  misc_feature (1)...(420): n = A,T,C or G
atttataattttaccagaatatacaactaacaattcaacagtgatgttctttgcatttgtggggagatgtgtgatgttcttggttttctggtttggaatggaacgtttatagccttgcctgtaaaaatgtgccccagcacttaattagtgaccgtttgaatccatatgtagtcccattggtgctaatgagagtagctgctgtgaaacaggaataaaatgtgtctgttcacggaggtgcggtgtggatgcacctacaaggccaactctctgatcagggtgagggagagatggaagaattaacagatctaaagttggcctttgttgtctcaaattgggtttgtacacacatgcatgcatgtgtgtatacaactgtaatctggaacttcaggaagtaaaattatttgaagtttcttagtaaan

SEQ ID NO: 5419 - DNA, 425 bp, Homo sapiens
acctttgttgctttgtgaaattgtgttcttgtgccctgcctgagctgccagtgcctttgtacagcaggtataggcacagccagctggtgccttgtgcccggtgacttgccaagtgggtgctcactcactacagcagcaaacttcagcaaatgtgttttaactaataacgttcatactagcgatgaaaacatatgtatgtgtttcctatgcccatggcagacataattagttgatcatggtatgtgttcatgctgagcctgatcatccttttaagcatcacattcttggcatctacagtcagacactcaagcttagtaggcaagataaaacgtatgagctatccttggctctaaatgtgtctgtgttaactttctcccaatatgttgtgggaaataataaatacgataaattattgcggtgtttaa

SEQ ID NO: 5420 - DNA, 451 bp, Homo sapiens
gtgcgagaaccacctgatagcctgcggtttgactaccgttttcccgggccgacccacgcgtccgatcatggtgacccttcctataggacactaaaggagactcagccatggttctctcccaaaggttctgaaggataccttgcagccacctatccaactgtcggccagaccagtccccgagccaggaaatccatgagcctggacatggggcaaccttctcaggccaacactaagaagttgcttggaacaaggaaaagttttgatcacttgatatcagacacaaaggctcctaaaaggcaagaaatggaatcagggatcacaacaccccccaaaatgaggagagtagcagaaactgattatgaaatggaaactcagaggatttcctcatcacaacagcacccacatttacgtaaagtttcagtgtctgaatcaaatgttctcttggatgaaa

SEQ ID NO: 5421 - DNA, 100 bp, Homo sapiens
  misc_feature (1)...(100): n = A,T,C or G
aatttatgtcccatatggaatattttttattatttttatttcaattgggtagtgcatgtctttaccctcaattaagttaatattgtcactaagaancggc

SEQ ID NO: 5422 - DNA, 443 bp, Homo sapiens
  misc_feature (1)...(443): n = A,T,C or G
cagatgtatttttcttgtgatttttattttgaatcatatattgtaaattgtgtataaatgaagatgctgaatagttctgtttccacttggcatttcaagtctgatatcaggtgtctgtacagggttttgatttctttcccttgtataactacacaacaatcctacagtgtaacatatggaatcattttgaatagacttgtgtgctataagctttcagcaggtcctctgtctctagaataagcatgttgtttattttcagataatcagaaataagtgtgctgacaagctggacacaatctgggtgtgcccagcttacctttctttctgatgtttaaattgaaggctgcagccaatggaatatgttcagcttgttttccttggcttcctagattaaaaaaaaataataaagcatagttctttattaactntaggatattgttcan

SEQ ID NO: 5423 - DNA, 397 bp, Homo sapiens
  misc_feature (1)...(397): n = A,T,C or G
nccgcgtccgcggacgcgtgggtgcattcgcgctggttttcaagagtgtccactacccaggagaagccgttgccacacggagaggcagccccctgctcatcggagtccggagcaaatacaagctctccacagaacagatccctatcttatacaggacgtgcactctggagaatgtgaagaatatctgtaagacacggatgaagaggctggacagctccgcctgcctgcatgctgtgggcgacaaggccgaggaattcttctttgcttctgatgcaagcgctatcatagagcacaccaaccgggtcatcttcctggaggacgatgacatcgccgcagtggctgatgggaaactctccattcaccgggtcaagcgctcggccagtgatgacccatctca

SEQ ID NO: 5424 - DNA, 432 bp, Homo sapiens
  misc_feature (1)...(432): n = A,T,C or G
ctccccccgagcgccgctccggctgcaccgcgctcgctccgagtttcaggctcgtgctaagctagcgccgtcgtcgtctcccttcagtcgccatcatgattatctaccgggacctcatcagccacgatgagatgttctccgacatctacaagatccgggagatcgcggacgggttgtgcctggaggtggaggggaagatggtcagtaggacagaaggtaacattgatgactcgctcattggtggaaatgcctccgctgaaggccccgagggcgaaggtaccgaaagcacagtaatcactggtgtcgatattgtcatgaaccatcacctgcaggaaacaagtttcacaaaagaagcctacaagaagtacatcanagattacatgaaatncatcaaaggggaaacttgtagaacagagaccagaaagagtaaan

SEQ ID NO: 5425 - DNA, 413 bp, Homo sapiens
  misc_feature (1)...(413): n = A,T,C or G
cccacgcgtccgagagaagcctgtctgtacttcattcaaaaagccaaaatagagagtatacagtcctagagaattcctctatttgttcagatctcatagatgacccccaggtattgtcttttgacatccagcagtccaaggtattgagacatattactggaagtaagaaatattactataattgagaactacagcttttaagattgtacttttatcttaaaagggtggtagttttccctaaaatacttattatgtaagggtcattagacaaatgtcttgaagtagacatggaatttatgaatggttctttatcatttctcttccccctttttggcatcctggcttgcctccagttttaggtcctttagtttgcttctgtaagcaacgggaacacctgctgagggggctctttn

SEQ ID NO: 5426 - DNA, 420 bp, Homo sapiens
  misc_feature (1)...(420): n = A,T,C or G
acgaactatatatgtattatagttgctgccatagagttgatggtttttaattatctggaaccagcaatcatttaaaataaaccatattaagtttagtatgctggtattgtttattcattttatatgaatattcattgaaaatatatacacaatatatgtaatacacagcacttgattacaaaatgtaatttaattatattattgctggcagcattcagttaagagggtactttaaaaaatagaagtcagctttcacatctgatttctgtatgggctgtacttggttaacttgattttagaaaaaggactaacagaattgctaaagaaatgcatccaataaatgaaaaacagtaggaagatcaaatgttnttgtcaaatatattcacaacttgaccagattagctgtcctgtttgaatgca

SEQ ID NO: 5427 - DNA, 408 bp, Homo sapiens
ctctgaagacatgcctccaacaatataagaacacatacaaacttattattgtaaagcactggaaaactctaaatactcattcacagaacagtgggtgaagaaactttggtacattcgcgcaatggagcactaggcaactatagaaaacaataaggaagacctctttggaccaatatgatgcgactgctgaatatattgttaagagaaaaaaaggcaacggcaaaagagtatcttcaagaatcactgagagctgggaacagctcatgttctggggaggaggctgagccggacatggggctttgggggtgtgattgactgcaggcgcgcttgccttgcggcagcagaaaaatgatgcaccagtgatcaagccgcctcttatatatggcactcagatcaacatcatacatt

SEQ ID NO: 5428 - DNA, 387 bp, Homo sapiens
gaagagggcggcgacggtggttgtgactgagcggagcccggtgacaggatgttggtgttggtattaggagatctgcacatcccacaccggtgcaacagtttgccagctaaattcaaaaaactcctggtgccaggaaaaattcagcacattctctgcacaggaaacctttgcaccaaagagagttatgactatctcaagactctggctggtgatgttcatattgtgagaggagacttcgatgagaatctgaattatccagaacagaaagttgtgactgttggacagttcaaaattggtctgatccatggacatcaagttattccatggggagatatggccagcttagccctgttgcagaggcaatttgatgtggacattcttatctcg

SEQ ID NO: 5429 - DNA, 457 bp, Homo sapiens
  misc_feature (1)...(457): n = A,T,C or G
gattgtgaaggcaaaagatgaaccatccagcctagtctctggatgcataagctccaagtgtggaggagacccggagagaaaagcagactgttctctgtgtttacctgtaagcacaggccgcaacctgccatgctgtttttaaatgcccaagagctggtgacaagagggtttccctttgccatctggacctgattgccttagaggtaaagattcaatacccttaagaagttagattctaaaagattataaattggtgccactgcttttgattgcaattgatcaatttccggatagagattgcacaatccatgaagacacacaacactctcagaagtcactgctccatgctgtgcccctcatccctgcctgggagctcggtatctctgcctcccaccttgctaaccagcacctctgccttcactcagagcgctcaggacatnagctgtagccactcaaa

SEQ ID NO: 5430 - DNA, 471 bp, Homo sapiens
  misc_feature (1)...(471): n = A,T,C or G
tgtcggcannaaaagagagcagctgagcggancnncannnaannnnngggncgacccacgcgtgcgtacaaccatggtgtctaaagatataggaatgaattgtttgtgaaatgtattcaagcctatggagtgagatgattttttgcatcattcaaacatgcagaagatgtttaaaaataaaaaaaaaactgctttatcctcctgtcagcaccccctcccacccctgcaacaaagacttgctttaaatagatttcagctatgcagaaaaatttaccttatgcttccatatttttaaattttgttttttaagctttgcacttttgtttagactcgctaaagttatattagtctgttatgaccacagagttatatgtgtgtcgatcaaaagtggtctcaaaatatttttttaagaaaaaaagcaaacacaatgtattgctgataatcagtttggaccagttttttaaggtcata

SEQ ID NO: 5431 - DNA, 408 bp, Homo sapiens
tcgcagtgccttgaatatacaagcattcattcagtagatatatgaatgaatggattaaagggtgatttcttatattcagatgattcttaaccagtaagggtcctgaacagcagtgcatattaatgttaactcaaaacttaatggcaaatttataaataaacctgaaacctcttacatagccaaatacaaatgtatcagtctacctaggaaagatggttaggtacttgctcataaacagttatatgtttatgatttaacaaaatgattttactgttcataaattgtgcttttgaaatgaaatgtatcaaatttcttttcaatgatgttttgacttggaatttaaagcaaacagaaagagaataatgacttatctctttgagtattaagctgacttattctcttgctatt

SEQ ID NO: 5432 - DNA, 402 bp, Homo sapiens
ataacacttggttctatccttgtattgctgaaagaggcacagagagattaaaaaaaaaaagccttgaaacaccaacatcactcttcctccatcccacaggagtggcaatatgggctggaaagcatttctgtgtgctgcggtagggagagtaaaaaaaggggaggcattgaactcaccgctgccttgttaacgcacgaaaaaaaaaaccccccactaaaacccatgaaatccctcttattaaaaataaaaaaaaacccgggggcgggcctataaaagactcccgggggggaccatactgagccgaataaaaaaaaaaaaaacctcccccctttagggggggacttataaagcgccccgggggttttttggaagaaccaccccattggggggggaaaaagagat

SEQ ID NO: 5433 - DNA, 474 bp, Homo sapiens
  misc_feature (1)...(474): n = A,T,C or G
cgtgcggcatnnaatcctgatcgagtcnancggcancgcaannnngggnnganccacgcgtccgtgacagctaacactaacatagcacttactatggaccatgcactgttctatgcattttttacctgcataaactaaggtagtccttgtaatcttatgtgttatgtgctattattctctccagtgtacagatggggaaactgagggcagagaaagtaagcatcccattacttgggtccctccaaggccacaggactgcagccaggcgcggtggctcacgcctgtaatcccagcactttgggaggccaaggcgggtggatcacctgaggtcaggagttcgagaccagcctggccaacatggtgaaatcccgtctcccctataaatacaaaaaaaaaaaaaaaattaaaaattataaaaaaaataaaaataaaaaaaaaaattcaccctcctttcctctgcgcttaatgtctggg

SEQ ID NO: 5434 - DNA, 472 bp, Homo sapiens
  misc_feature (1)...(472): n = A,T,C or G
tgtgggcanattatggatcgacatgcagcgacacngcannggaannnnngggncgacccacgcgttcggtgccatgcaaaagccttttttttaagatgaaggaaatattttatgtaaagagcaactcagcaggagacagaactaaaactactacttacatctaacagacacactacaagttgaatcaatttgaaaatcatgtttttatgcttccatagggaacattttggttatttaaattgttcataatgtcccatatttcacctgttcagtgtatactgtactttgcaatcatctttccttttttcacattggtaaaaataagtggcatccataggatcatgatttttaatttgttgcctctgaagatttcactccatcaagatctgccaatcttcaatattctggctaaatcttggtatgtggattttaaacagtcactccgtttcaaagtctgtctttccttatagag

SEQ ID NO: 5435 - DNA, 476 bp, Homo sapiens
  misc_feature (1)...(476): n = A,T,C or G
ctaatgcccgccctacggatcgctctgcggaaccgcgnccggaaccccgggtcgacccacgcgtccggtaactttatatataccatcttatgttatagttttttgggaatcctatcttttgtgacttaaatagctaaatttcatgacatagtagagaaccattagtaaatatgaagattttatttctgtggggacttttgccagcatgtaaaaataactatttattttaatgaatataaaaattggtttttttctactcttcatgaaaacctcatgtgcaaaaatagcgaattttacctccgttcttctcttctgaagcagtgaaataattttatttttaaaatactggaaaagccttctaaaatgttaaaacacagatatttttatcctaccaaactcttctttgccaaatatgacattatagttcatgattttcctatatttgccagattaaatatttaaaatccaagctgttn

SEQ ID NO: 5436 - DNA, 418 bp, Homo sapiens
aatgcttttagattaaaatgaaggtgacttaaacagtttaaagtttagtttaaaagttgtaggtgattaaaataatttgaaggcgatcttttaaaaagagattaaaccgaaggtgattaaaagaccttgaaatccatgacgcagggagaattgcgtcatttaaagcctagttaacgcatttactaaacgcagacgaaaatggaaagattaattgggagtggtaggatgaaacaatttggagaagatagaagtttgaagtggaaaactggaagacagaagtacgggaaggcgaagaaaagaatagagaagatagggaaattagaagataaaaacatacttttagaagaaaaaagataaatttaaacctgaaaagtaggaagcagaaaaaaaaaaaaaaggggcggccgttttaaaggat

SEQ ID NO: 5437 - DNA, 468 bp, Homo sapiens
  misc_feature (1)...(468): n = A,T,C or G
gtgggatnnttattgatcgactcgaacggcanngcaannnngggnnganccacgcgtccgctgatttggaaaccagaggaaaggcgctgttttcaccgaattagaatcgcgggaaaatagagaagagtttgtttgaaggtctcgcgagatcgaccttcccgcttcctgtggttgtggccgctgtgctgtggggagcggccccgacccgggggctcattcgagcgacctcggaccacaatgccagcatggactttgcagaccttccagctctgtttggggctaccttgagccaggagggcctccaggggttccttgtggaggctcacccagacaatgcctgcagccccattgccccaccacccccagccccggtcaatgggtcagtctttattgcgctgcttcgaagattcgactgcaactttgacctcaaggtcctaaatgcccagaaggctggatatggtgccgctg

SEQ ID NO: 5438 - DNA, 419 bp, Homo sapiens
caccttactaccagacaaccttagccaaaccatttacccaaataaagtataggcgatagaaattgaaacctggcgcaatagatatagtaccgcaagggaaagatgaaaaattataaccaagcataacatagcaaggactaacccctataccttctgcataatgaattaactagaaataactttgcaaggagagccaaaaaaaaaaaaaagggggggccgttttaaagaacccttgggggggccaaagttaacgcgggcttgcaacgaaatatttttttccttatagggagccgtataaaaacctacttgggaattttggaaaagaaccttttctttgggggggggacatattggaacaacctccctacaaaaattaaaggctttagggaaaatataaaattttaaggggtaaaaggggt

SEQ ID NO: 5439 - DNA, 406 bp, Homo sapiens
accgaggaccagcgcaacgatgagaaggcgcagcgtgaggccaacaaaaagatcgagaagcagctgcagaaggacaagcaggtctaccgggccacgcaccgcctgctgctgctgggtgctggagaatctggtaaaagcaccattgtgaagcagatgaggatcctgcatgttaatgggtttaatggagagggcggcgaagaggacccgcaggctgcaaggagcaacagcgatggtgagaaggcaaccaaagtgcaggacatcaaaaacaacctgaaagaggcgattgaaaccattgtggccgccatgagcaacctggtgccccccgtggagctggccaaccccgagaaccagttcagagtggactacattctgagtgtgatgaacgtgcctgactttgacttccctt

SEQ ID NO: 5440 - DNA, 479 bp, Homo sapiens
  misc_feature (1)...(479): n = A,T,C or G
gggccgcccatagatcnccnttcggatagatccccgatttgccgggncgacccacgcgtccggtaattgctcaagaatacagtcatgaaaagacttacttcccatgtctttgtggagcctatggtagggtagttaagtagataaaaacatcttatgatgtggagatgttattgcaaggaattgtttagtaaatagtttcaaatatggctgaaaataagagattaaaattaaagttaattgagttcaataactcaaatagtttattgaggcattactatgggttttgaggcagttgttttagggagttatggcaacagaagctatattagtacatcagtaagaggaaagaaggacatcaatatttaatgtacagtcccctccgtatatgcaggggattggttacaaatccatctataccagaatccatgcatactcaagtcctctggaatccacatataggaaaactcagtcctgactan

SEQ ID NO: 5441 - DNA, 468 bp, Homo sapiens
  misc_feature (1)...(468): n = A,T,C or G
gtgggatnnaaccgaccgagtcgancggcanggcannnnngggnngacccacgcgtccgcacctctctctctgggcctctaatgccctgccctctccattgtccctaatttatagctttgggccttattttctggcttctgggcaaggcacagtggaatatcatgaactaagtgctctagagtctgtttcaagctagtgtagcccgtgaatttcctgcaccctccatatcacactgcaagtcctccggactcctgggacatggattgggaggaagtcctatttggacagaatgtgcagccaatagcatgaatttgaactgtccccaagggctgcttagaagtgcagagatgcagggtagagaagagaactgtttgtattagtccattttcacactgctgagaaagacatacccaagaccgggcaatttacaaaagaaagaggtttaatggactcacagttccacgtgg

SEQ ID NO: 5442 - DNA, 475 bp, Homo sapiens
  misc_feature (1)...(475): n = A,T,C or G
gcccgccattgatcgcctgcngactgatcacgattgcccgggncgacccacgcgtgcgtattacttttaattgaatgggaaagcgtaacactaagtatgcagtctattatgaaatcatgttgacaactaagtttcttttcaaaatttttgaggccgagcacttctgtaatcctagcactttgggaggctaaggtgggcggatcacctgaagtcaggagttcgagaccagcctggccaacatggtgaaactccgtctctactaaaaatacaaaaattagccgggcatggtagcatgcgcctgtaatcccagttacttgggaggctgaagcaggagaatcgcttgaacccaggaggcggaggttgcagtgagccaaaatggtgtcactgcactccagcctgggcaacagagtgagactgtctctnnaaaaaaaaaaaaaaaaagggagctngggttttttgttttattacttttttt

SEQ ID NO: 5443 - DNA, 404 bp, Homo sapiens
  misc_feature (1)...(404): n = A,T,C or G
agacacacgagcatatttcacctccgctaccataatcatcgctatccccaccggcgtcaaagtatttagctgactcgccacactccacggaagcaatatgaaatgataaaaaaaaaaaaaaaaaaaaaaaaaaaaaaaggggggggccctttaaaaaaacccttgggggggccaaatttaaccggggggggaaaagaaaaatttttttccttaaaggggggggtataaaaaccccccggggaattttggaaaagaacccttttttgggggggggaaaaaatggggaaaacccccccaaaaaaattaaagcctttagggaaaaaaaaaaattttaaaggggaaaaggggaaaaaaaaccccaaaatccttggggtaaaaaaaaatggggnnnnnnnnnnnnnncn

SEQ ID NO: 5444 - DNA, 470 bp, Homo sapiens
  misc_feature (1)...(470): n = A,T,C or G
agccgccatgatgcctcggatgataccgtgggcagggcgacccacgcgtncggggtggcatggtgctggcttaacgacggacacacggaaaaacggaacagagtagggtccagagacaaaccttcacacttgtagtccgttgattttcagcaagggtgatgcacattcaatgggagagaaagtctatttgacaaacggtggggggtcaactgcatagtcatgtgcaaaagcatggatttatgttccacctcacaccagatgcagaaattaacttagatgaatcaatgacctaaacctcatagaaaacacagaggcagccatcatcaggaccttggattaggtaatggttcattagcaatgacatcaaaagcacaagctacaaaaaaaaaaaaaaaaaaaaatccgggcttcgaaaaaaaaaaccatcccaacccctgaaaaaaaaaaataaaaaaacaaaaggggggcgg

SEQ ID NO: 5445 - DNA, 409 bp, Homo sapiens
  misc_feature (1)...(409): n = A,T,C or G
aaagctaacatttcatacaagatagcttcagaccaaattcaaattgaatttgaataaattagaaatactgtgcatacataaccttcttgtgcaccatgagtatttggaaagttaatccttgtttttgtcgtgtctataaaggaagaacaaaacaaaataaaaacagagccctagagaaatgctgttactttttatttttacacccatcagatttaaggaaaagactttttagccattataatctagtggttggaaggaatgaagaagcttttttagtaataggtccagatatgagtgctaaaaataaagatgatagcatgttcttctgtcttccatagttattacaactatgagagcctcccaagtcatcttatcaactcaactcccttttttttgtcttaatgttgcn

SEQ ID NO: 5446 - DNA, 392 bp, Homo sapiens
cgtaatcagacttatctatttttgcttttgttgttttgtgcttttggtgtcatatccaagaaatcattgccaaagccaatgtcaagaagctttttccctgttttcttctaagagttttgtagtttaaggacttacattgaaatctttaattcatattgagttgatttttatatacagtgtgagataagcgtccaatttcattcctctgcatgtggatatctagttttcccaataccatttatttgaagagattatcttttcttcactgtgtgttcttggcataattgtcaaaactcacttgtcctcatgtgtgggtttattactaggttctgtcttctgttccaatagtttatatgtctggttttatactggtaccatactggtttgattac

SEQ ID NO: 5447 - DNA, 460 bp, Homo sapiens
  misc_feature (1)...(460): n = A,T,C or G
caggggagcgacggccggggcagaagttgagaccacccagcagaggagctaggccagtccatctgcatttgtcacccaagaactcttaccatgaagaccctcctactgttggcagtgatcatgatctttggcctactgcaggcccatgggaatttggtgaatttccacagaatgatcaagttgacgacaggaaaggaagccgcactcagttatggcttctacggctgccactgtggcgtgggtggcagaggatcccccaaggatgcaacggatcgctgctgtgtcactcatgactgttgctacaaacgtctggagaaacgtggatgtggcaccaaatttctgagctacaagtttagcaactcggggagcagaatcacctgtgcaaaacaggactcctgcagaagtcaactgtgtgagtgtgataaggctgctgccacctgttttgctagaaacaagacan

SEQ ID NO: 5448 - DNA, 459 bp, Homo sapiens
  misc_feature (1)...(459): n = A,T,C or G
cggacgcgtgggtgatcacgaaagtggttttcccaaggcgaggtttatccattgcactccggatgtgctgacccctgcgatttccccaaatgtgggaaactcgactgcataatttgtggtagtgggggactgcgttcgcgctntcccctgccttactggaagttgaaaggtagctgttattatgatcggcgctgggtctggatgtgtggtgttcaaaacacgggctgctgggcagttcgctttcgttttcacgtttttgtgggggtagggcgattgctgcttttttctcaccccgcgggggatcctttagtaacgcgccaattatactgtgggtttatgttctccagggtattggcgtgaaaacgacacgatctcgtgctttctccangccaaagccgcgttnttcctgcaagtttggggtgtgtagaggaataagccacaactgctttctcttccctg

SEQ ID NO: 5449 - DNA, 391 bp, Homo sapiens
ccttctccgcaccagggaagccccacccaccagaagccaagatgtccagcaagcgggccaaagccaagaccaccaagaagcggccacagcgggccacatccaatgtcttcgcaatgtttgaccagtcccagatccaggagtttaaggaggctttcaacatgattgaccagaaccgtgatggcttcattgacaaggaggacctgcacgacatgctggcctcgctggggaagaaccccacagacgaatacctggagggcatgatgagcgaggccccggggcccatcaacttcaccatgttcctcaccatgtttggggagaagctgaacggcacggaccccgaggatgtgattcgcaacgcctttgcctgcttcgacgaggaagcctcaggttt

SEQ ID NO: 5450 - DNA, 469 bp, Homo sapiens
  misc_feature (1)...(469): n = A,T,C or G
ctatgatcgccttcggatagatccccgtatgcccgggncgacccacgcgtncgaatagggctgctgagcagctctgaaagttcagctgacatcggaaatcatttatttgtagcagagtcaatcagcatggttattcaattttctcaggaactcttggcagcccaggaggaggaggagagcaaacagatggtaggactgatttggtaatgggattggcaaggcagctgcgagagaaggttaaagaagggaagaaatcaattgcacccatgaaagtgtgttgaaaatggtttatcagggggatcaaaattagggagagaaggaagtcaagccaggaaggattagacactgccaattcagggaagagtgaagccatggaggtcattagcctttgaagcttaagaggaggttttgtgagcatgagtgagtgggataggtgatgagagaggaaaatttcacaattttagatatn

SEQ ID NO: 5451 - DNA, 461 bp, Homo sapiens
  misc_feature (1)...(461): n = A,T,C or G
cccacgcgtccgcattatgctaaatgaaataagccagacacagaaagaaaaatattgcgtgatctcacttatatgtggaatcaagaaaaaaaaggttaaatatatagagatagagaataaaacagtaattactaaggtcaggataaggtggaggaaatgagatgtaggtcaaaggatgcaaagtagtaaatatgcaggatgaacaagtgaaaagatcaaagatcaaatgtacaacatgaggactatagttaatacatattgtatattgngttcaggattttttgctaaatgagtagattatacctgctcttgccaatgggggaataatcagtaactatgtgagatgatggggtggttcattgttccactatagntttactatatatatanatatggttcatttaacattgtgntgtataccttaatatagacaataaaatttatttaaaacatatcaaaaa

SEQ ID NO: 5452 - DNA, 466 bp, Homo sapiens
  misc_feature (1)...(466): n = A,T,C or G
ttaaacaataaattaatatactatatatgttctagggatattgcacataatatatttaggacttagaatatttaggttaaactggacaagaaaatccttgagttcttttattttgtgcctagaactaggcacgaatgtggaacatgagtaaaatatgtcattataattggctatgtttattgttgctaaagagatttaaccaacataagtggcggacagggttgacactgcggcatgtgaggaggccacaaaaccttctgtaagcaggagtttgaatgccaaattgcacccataagaagagaagccctaaggaggccctgtatatagttaggtatatgtttataaaaatagccttgcttatcactccacagatgaatcagcagttgtcttgcacagttaaaaatggagcataatttcctttcangagtgaggactaccatccanactaattttatttcaatattgn

SEQ ID NO: 5453 - DNA, 515 bp, Homo sapiens
  misc_feature (1)...(515): n = A,T,C or G
atttcccctaaaggagtggacattgtcatggaccctctgggtgggtcagatactgccaagggctacaacctcctgaaacccatgggcaaagtcgtcacctatggaatggccaacctgctgacgggccccaaacggaacctgatggccctggcccggacatggtggaatcagttcagcgtgacagctctgcagctgctgcaggccaaccgggctgtgtgtggcttccacctgggctacctggatggtgaggtggagctggtcagtggtgtggtggcccgcctcctggctctgtacaaccagggccacatcaagccccacattgactcagtctggccctttgagaaggtggctgatgccatgaaacagatgcaggagaagaagaatgtgggcaaggtcctcctggttccagggccagagaaggagaactagggcangtggctgtgagaccctanagaccagcgaangggagaagttggaaagctacgttctgtggcaccagacttgatttcagcttn

SEQ ID NO: 5454 - DNA, 514 bp, Homo sapiens
  misc_feature (1)...(514): n = A,T,C or G
gagccgagccgacccgccccgccgacgaaccccctgaagctgtgccaagatgtgtgacgactaggagaccaccgccctggggtgcgacaacggctctgggctggtgaaggccggctttgcgggcgatgacgcgccccgcgctgtcttcccgtgcatcgtgggccgcccgcggcaccagggagttatggtgggtatgggtcacaacgactcctacgtaggtgatgaagcccagagcaagagaggcatcctgaccctgaagtatcccatcgagcatggtatcctcaaccaactggacacatggagaagatctggcaccacaccttctacaatgagctccgtgtggctcccgaggagcaccccaccctgctcacagaggccccgctgaaccccaaggccaaccgggagaagatgactcanatcatgtgtgagaccctttaagtgtccctgcatgcgggccatccaggcagtgctatccctgtatgcttctgggcgaccacaggcatttgtcttgact

SEQ ID NO: 5455 - DNA, 393 bp, Homo sapiens
  misc_feature (1)...(393): n = A,T,C or G
gagaagctgtgattccccccatctacagcaggaggtcaggaccacgcccctggcctctccccactcccccatcctcctccctgggtggctgcctgattatccctcaggcagggcctctcagtccttgtgggtctgtgtcacctccatctcagtcttggcctggctatgaggggaggaggaatgggagagggggctcaggggccaataaactctgccttgagtcaaaaaaaaaaaaaaaaaaaaaaaagggggcggccctttaaaaagatcccttggggggcccaaatttacccgggccgggaaaggtatagttttttcccttaggggggggcaattaaaacccccctggggatttttggaaaggaacctttctttggggggggaaaaaaatan

SEQ ID NO: 5456 - DNA, 392 bp, Homo sapiens
  misc_feature (1)...(392): n = A,T,C or G
atcaataaaacaatagagatggttagattcagtccatcctccagttgaacagtgagcatttctagtagtgaaaagtcagaccaaataatactcttctttatgtctcctaaatttattctcagcatttaactcgtatgaattggagtattctagtccaatttgtcttcctgcttctctaggttacaaacatgtgagagatatcaaagtccactaagaaataaaagcggttaccagcatactcatttgtagtccaccaataagtgtgtgtatataaatctgatatacaataattcaaggaaaaaacagacagatgcttcctcaatttaaaatattttaccatgattaagatttttccatatgtttaaaatcaagaacaaaatttaaatatttcn

SEQ ID NO: 5457 - DNA, 451 bp, Homo sapiens
  misc_feature (1)...(451): n = A,T,C or G
natgatcccctgcggccntggcgccggaaccccgggtcgacccacgcgtccgcggacgcgtgggcagcactttgggaggccaagagggggcgaatcaccttaagtcaggaattcaagaccagcctagccaacatgacgaaatcccgtcactactaaaaatacaaaaattagccaggtgtggtggtaggcacctgtaatcccagcgacaagggaggctgaggcaggagagtcacttgaacccagaaggcagaagttgcagtgagccgagatagtgccactgcactccagtctgggtgacagagggagactctgtctcagaaaaaaaaaaagaagaagaagaaaagttgttgaacaatgattttctatttttatcattacctctgcagttattagctggaatttttctgtataatggaaatggaatcctacactactacatagtagcttaaaa

SEQ ID NO: 5458 - DNA, 462 bp, Homo sapiens
  misc_feature (1)...(462): n = A,T,C or G
tgatgagagnaaaaccctgatagcctgcagctgatcaccgtattaccgggccgacccacgcgtgcgaagtgagtgaacgaagaggactcagtgggaagtgaggttacagggagaaattcagaagccaggttgcatattaaatacagtaatacaggctgggtgcagtggctcatgcctgtaatcccagcactttgggaggccaagatcggaggatcacctgaggtcaggaattcaagtccagcctggccaacatggtgaaataccatctctactacaaatagaataattagctgggtgtggtggggcacgcctataatcctatccactcaggtggtggaggcaggagcattgcttgaaccaagaagcggaggttgcagtgagccaagattgcgccactgcactccagccctggtgacagagtatgactcagtctcagaaaattaagtagaatgaaccattatc

SEQ ID NO: 5459 - DNA, 391 bp, Homo sapiens
acaaagacctctcacagactgtggctgggaggagtttgggatggttacagagtaagttcaaaattctccgtgggaccaagttgggtgggacattttctggtctgtagtcaagagcaggggtcctgtagtttgccacttgaatgaaagcttgcctgctgaaaagggtgctcctcaatcttgggctttagcaaagtttcacaattgcctccctggatctcaaagctctcttaaaggcacttatttttgagatggggtttcactacataacccaggttggtcttaaaattttgtcctgaagcaattctccaaccttactgtaccatgttgctgtcattacagatgttaaccatgatgcctggttccctcattaagatatttttgtcacggatgg

SEQ ID NO: 5460 - DNA, 467 bp, Homo sapiens
  misc_feature (1)...(467): n = A,T,C or G
attttgtaataattaaactttgatgttgagaaatcacaactttattgtacacttcattgcaacttgaaattcatggtcttaaagtgagatttgaatttctattgagcgcctttaaaaaagtaataccaaaccataaagttaaaatctatgtatattgagtcatatctaaaaccacgtataaacataaattgtatttcctgttttaattccaggggaagtactgtttgggaaagctattattaggtaaatgttttacaaattactgtttctcactttcagtcataccctaatgatcccagcaagataatgtcctgtcttctaagatgtgcatcaagcctggtacatactgaaaaccctataagggcctggataatttttgtttgattattcattgaagaaacatttattttccaattgtgtgaagtttttgactggtaataaaagaatctggcaaccatcanaaaaaa

SEQ ID NO: 5461 - DNA, 385 bp, Homo sapiens
gctgatttgcgcatcaggtagtcgcggctctactctcaacggtggcgagctgcagtatccaagtgccccgtccccgttgccataacagcagtacacaacccctccttcccctcgcccgcttgctaaacagtccttccctctcgggaccaagggcctctccagaactgcttctgattgagcaaaaacagggtctgaacccctttgctaaagcgaattgagtgggagggttggagactgcgctttaagctggtgtaccagaaggcccaaggaaattggcccactggggggggaaaagtagaagaaatgaatggagcagggattaccgatggcgcaatgggagctgacaagataggaggaagaattggaggaggactgagcttatctg

SEQ ID NO: 5462 - DNA, 392 bp, Homo sapiens
gcgaacatggctgaaagaagacgaggtggccctacgtgtagcggggtgggtggcaggcaggacccagtctccggcagtggcggctgcaactttccagagtatgagcttcccgagctaaatacgcgcgctttccatgtgggcgcctttggggagctgtggcggggccgtctgcgcggggccggggacttgtcgctgagggagccgccggcatccgctctgcctgggagccaggcagctgactccgaccgggaggatgccgcggtggccagggatctggactgcagcctggaggcggcggctgaactgagggcggagtgcggccttgataaactgaaatgccttgaggacggtgaggatccataagtcattgcggagaatactgacctggtgac

SEQ ID NO: 5463 - DNA, 461 bp, Homo sapiens
  misc_feature (1)...(461): n = A,T,C or G
tgtacgggtcgacttacgcgtacggaattgagtgataaaatggctctttgaaaagtagattttgtnnncttgttgtaannnnnnnnnnttttttcacggcaaagtggtcatttcttgagatggttctttcacaacacacaagaatnnngnttgggnngggnggggggtgttttttttttttnngggggggggggtttttgggggtggctccctcaaaagtgggggaaagggcgagaaaggatcagattgatctgggatcagctttgagcctgagttcagtgaatagcctcatgggcatctcatggaattgatgcatttgctgtggcatatttaaattttgttcaaaagatttgaagcaagaccttgcaaagactcttaacattactgttcagcttgcttagattgtgttaacagttcatttaacaaagatccgttttaactctgaacaaaagcaacccaga

SEQ ID NO: 5464 - DNA, 462 bp, Homo sapiens
  misc_feature (1)...(462): n = A,T,C or G
aaatgaaagcaatgacattaggcatctggattttggacctagagccgatgctgagctatgccatgccaactcaaggccttgctgtttgctggttcctcagcttggaatgaagtacatgcttcctttctgtctgctactcctaattcaaaattcaactcagatgttgttttctttaatctcccaagtctaatttaaatactcttcttttgtttttcctaacagttatcagcatattttaattgtgggtttttttcttctgtttcatctcatcaattgtaagcatcacaaggggtggacagtgtttgattctattttgtctttcccagcactcagcacagtaccttgtgcatgcctgttttgtagtaaatatttactgaaggaataaagtaactgagcagtattagaaaagattattttaactttttgacatgaaattattgtatgtttgggattctttcanaa

SEQ ID NO: 5465 - DNA, 433 bp, Homo sapiens
  misc_feature (1)...(433): n = A,T,C or G
ggagccgctnnncntncnccccgaaacttgnnnnacccgnagnnnncnctnnngntnagggnaccaccacccgtgcggggggatatctgagccatttctctgtgggcttttgtttttcaaagactgggcaggttgttgttgaggtgtgtgtgggctgccacgattttgtggaagtataatactttgtcattatgagatgtcgtctctcggtgcctcctttgtgcaaattaaatttgatgacttgcagttttttgaaaactgcggtggaggaagttttgggagtgtttatcgagccaaatggatatcacaggacaaggaggtggctgtacagaagctcctcaaaataaagaaagaggcagaaatactcagtgtcctcagtcacagaaacatcatccagttttatggagtaattcttgaacctcccaactatgtg

SEQ ID NO: 5466 - DNA, 282 bp, Homo sapiens
gagagccgggtgcgagcggcggcagcacgaggggaaaagagctgagcggagaccaaagtcagccgggagacagtgggtctgtgagagaccgaatagaggggctggggccacgagcgccattgacaagcaatggggaagaaacagaaaaacaagagcgaagacagcaccaaggatgacattgatcttgatgccttggctgcagaaatagaaggagctggtgctgccaaagaacaggagcctcaaaagtcaaaagggaaaaagaaaaaaaaaaaaaaaaggggg

SEQ ID NO: 5467 - DNA, 399 bp, Homo sapiens
  misc_feature (1)...(399): n = A,T,C or G
ggaagatggcggcggccgttccacagcgggcgtggaccgtggagcagctgcgcagtgagcagctgcccaagaaggacattatcaagtttctgcaggaacacggttcagattcgtttcttgcagaacataaattattaggaaacattaaaaatgtggccaagacagctaacaaggaccacttggttacagcctataaccatctttttgaaactaagcgttttaagggtactgaaagtataagtaaagtgtctgagcaagtaaaaaatgtgaagcttaatgaagataaacccaaagaaaccaagtctgaagagaccctggatgagggtccaccaaaatatactaaatctgttctgaaaaagggagataaaaccaactttcccaaaaagggagatgttgttn

SEQ ID NO: 5468 - DNA, 392 bp, Homo sapiens
  misc_feature (1)...(392): n = A,T,C or G
gcaagcgcaccccctggcgggggattctgttgttcggaccccctggcacagggaaatcctacctggccaaagccgtggcaacagaggccaacaactccaccttcttctctgtgtcctcctcagatctgatgtccaagtggctgggggagagtgaaaagctggtcaagaacctgtttgagctggccaggcagcacaagccctccatcatcttcatcgatgaggtggattccctctgcgggtcccgaaatgaaaatgagagtgaggccgcccggaggatcaaaacggagttcttggtccagatgcagggggtggggaataacaatgatgggactctggttcttggagccacaaacatcccatgggtgttggattcggccatcacgaggaggatn

SEQ ID NO: 5469 - DNA, 393 bp, Homo sapiens
cggacgcgtggggtcagccgcatcttcttttgcgtcgccagccgagccacatcgctcatacaccatggggaaggtgaaggtcggagtcaacggatttggtcgtattgggcgcctggtcaccagggctgcttttaactctggtaaagtggatattgttgccatcaatgaccccttcattgacctcaactacatggtttacatgttccaatatgattccacccatggcaaattccatggcaccgtcaaggctgagaacgggaagcttgtcatcaatggaaatcccatcaccatcttccaggagcgagatccctccaaaatcaagtggggcgatgctggcgctgagtacgtcgtggagtccactggcgtcttcaccaccatggagaaggctggggc

SEQ ID NO: 5470 - DNA, 405 bp, Homo sapiens
ttcggctgaccaagagccgggacctgttcgtctctacgagctggaaaaccatgaggcagtctccaccttgatggagaggccaggcgggagaactaccgcagcaggtgggcgtacggactgcttggcgcatggcacccgcctggcaagtgctagaactaatgctattcttctggaataagatgccaatgatgtggtggctagaaatgcaacttgtataaaacaaaaatgggagagagagaggtattaaacaaataccccccttaaaaaaaaaaaaaaaaaagaaaaaacataaaaaaaaggggggggccctttttaaaaattctttggggggcccaaatttagggggggtaggaaaataaatttttttttccttaaggggggggtaataaaaccctcgggggaaat

SEQ ID NO: 5471 - DNA, 418 bp, Homo sapiens
gaattcttctcaggaggcagggctgggtcctttccaccatggcacctaagaaagcaaagaagagagccgggggtgccaactccaacgtgttctccatgttcgaacagacccaaatccaggaatttaaggaggccttcactatcatggaccagaacagggatggcttcattgacaagaacgatctgagagacacctttgctgcccttgggcgagtgaacgtgaaaaatgaagaaattgatgaaatgatcaaggaggctccgggtccaattaactttactgtgttcctcacaatgtttggggagaaacttaagggagcggaccctgaggaaaccattctcaacgcattcaaagtgtttgaccctgaaggcaaaggggtgctgaaggctgattacgttcgggaaatgctgaccacgcacgg

SEQ ID NO: 5472 - DNA, 469 bp, Homo sapiens
cccacgcgtccgatccgcacgaaggtccaagtccaagtcctcgtcggtctccagatctcgttcgcggtccaggtcccggtctcggtccaggagtcctcccccagtgtccaagagggaatccaaatccaggtcgcgatcgaagagtccccccaagtctcctgaagaggaaggagcggtgtcctcttaagaaaatgctgcggtctcctgtttgataaaagaatattggccagtattgcagattttaactgatttggctgatcctccagggaccagtttctgtgggcgtgtattggagcagatgtatcggcaagcagtgtaaacggaggacttggggaaaaaggaccacatagtccatcgaagaagagtccttggaacaagcaactggctattgaaaaggcgcagttgtgtagcagttgagtaatgctggttagctgttaaggtggcgtgttgcaatgcaaagtgcttgctt

SEQ ID NO: 5473 - DNA, 473 bp, Homo sapiens
  misc_feature (1)...(473): n = A,T,C or G
gctcatgtgtgctggctgcatggtgctggggaggccacagccagcccttcctctgcacctgcctcctctgggatgtgcatgtgtgtgtacgtgcttgtggtcatgacgcgtgccatttagagctctcagagcagggcagattgctgggctctggtggccagtgtctgtctgtgagggcaggaaggagagctgcacattgagaacaaaggagggacctgaggtggagagaggcccagcaccccaaatctctgccatcacacggtcggggagcccatacattctgcaacaaccagggacttcacaggagccttgttttcaatttgctaacaggtgcataatccctgtgctccttaagcctcatggccttcctacatttccactntatttggttgtttgtttatttatttttgagacagtctcgccctgtcacccaggctggagtgcagtggcacgatctcagctcactgcaaccn

SEQ ID NO: 5474 - DNA, 461 bp, Homo sapiens
  misc_feature (1)...(461): n = A,T,C or G
acgaaagtggctttaacatatctgaacacacaatagctaagacccaaactgggattagataccccactatgcttagccctaaacctcaacagttaaatcaacaaaactgctcgccagaacactacgagccacagcttaaaactcaaaggacctggcggtgcttcntaaaaaaaaaaaaaaaaaaaaaaaaaaaaaaaaaagaaaaaaaaaggggggggggcgtttttaaaaaaaccttggggggggccaaattatgggggggggggaaaaaaaaattttttttttttagggggggggtaaaaaaagccggctgggggtttttggaaaaaaacctttttttgggggggggagaatgggggcccccccccccccagaaattatcgtgccttggggaaaaaaaaaatttttgggggggagggggggaaaacaccggccctttgtggtgggggaggaaaaattcn

SEQ ID NO: 5475 - DNA, 468 bp, Homo sapiens
  misc_feature (1)...(468): n = A,T,C or G
ataggtgttatgatagtctctgattaatcaatctagtatgaattattttacaagtgttgtcctgtttcatatctttgaagtagtagtgaaattgtaggccattttcttataacatttcagttacttttcagttaattattcctttaaaaagaaaatacagcagaacctcactgtagcattctttactgcagagcaaaattcaatttaagatgggcttctctgaggtccacatcatggcagttcatttactcttgtgccaaatggcaacaccacgtctaaagcagtttcacagcatggtcccctacaatgttataccaaggctctgatgtatttcttttagtagtttctaagtgtaaaatttattctaaatgtttttatggctattatctatttcatcagttattgaattaagaatgattttcattacttgagtggganttgtgagttaatgacaagtgaataatcaan

SEQ ID NO: 5476 - DNA, 422 bp, Homo sapiens
cccacgcgtccgcccacgcgtccgctcgcctgcagctcttgggttttttgtggcttccttcgttattggagccaggcctacaccccagcaaccatgtccaagggacctgcagttggtattgatcttggcaccacctactcttgtgtgggtgttttccagcacggaaaagtcgagataattgccaatgatcagggaaaccgaaccactccaagctatgtcgcctttacggacactgaacggttgatcggtgatgccgcaaagaatcaagttgcaatgaaccctaccaacacagtttttgatgccaaacgtctgattggacgcagatttgatgatgctgttgtccagtctgatatgaaacattggccctttatggtggtgaatgatgctggcaggcccaaggtccaagtagaatacaagggaga

SEQ ID NO: 5477 - DNA, 428 bp, Homo sapiens
  misc_feature (1)...(428): n = A,T,C or G
cccacgcgtncgcccacgcgtccgcgaagaaggaagctcctgcccctcctaaagctgaagccaaagcgaaggctttaaaggccaagaaggcagtgttgaaaggtgtccacagccacaaaaagaagaagatccgcacgtcacccaccttccggcggccgaagacactgcgactccggagacagcccaaatatcctcggaagagcgctcccaggagaaacaagcttgaccactatgctatcatcaagtttccgctgaccactgagtctgccatgaagaagatagaagacaacaacacacttgtgttcattgtggatgttaaagccaacaagcaccagattaaacaggctgtgaagaagctgtatgacattgatgtggccaaggtcaacaccctgattcggcctgatggagagaagaatgatatgttcgat

SEQ ID NO: 5478 - DNA, 427 bp, Homo sapiens
  misc_feature (1)...(427): n = A,T,C or G
atacattttttaaaggactttctcttttctgctnnnnnnnctattttttccgtattggcatatctaaaactgaacttcccttccatattatttccctcgcttcacttacccaatccattcaactggaaccacatttctcatcactccagcttgaacctagtattcctgcctctcctcctcacactcaaaatctaattgattaaaaagttctttttttttttgatacggagtcttgctttgttgcccaggctggagtgcannnanccaaaanggggccactgttctcatgactgggcaacggagccagactttgtgtatttaatactcaaaaacaaattctccctgttccaaaacaaattttttttttaggaaaaaacggtgggtttgcccccccaatagagggaatattctacaaaaggccccccct

SEQ ID NO: 5479 - DNA, 468 bp, Homo sapiens
ccagaaggcacagatcattcatggggatgtataaccgaaacctttcctctccaccgcctggggatcttcactttcgcagtctacgactgcctgtgactccagaaagacaaactgcagattggccaagatggggaaactgaggcagagaagccaagacatgtgctaaaggtcatgcaggctatgaatggagctggaatgtgaacgcaggccatatgaccccagagcccatgttcttgaacccttagaaagacagcagcaacacacctggtgcagcagctgcttagttggagtggctgacaaggttggcagaggatcccgttcctcccgtggagtggctgccatgatactgcctgcactgaagctgctcctatttctgaaatatgtattggtatttttttccctgcatgttgaacattatactcttctgttctttcgcattctcttcttccctttccgatgacttctagg

SEQ ID NO: 5480 - DNA, 471 bp, Homo sapiens
  misc_feature (1)...(471): n = A,T,C or G
ataaaaatcagaataaggatgggaatgaagataattgagagttatgagaaagtcaaaacctaatccaaggaatctaaggattacagtaatatgatacaggagcagacacacaaaatggccattataagaaagaaacaacctgatctgatacagctgaaatacacactgccagaatttcctaatacaatcacaagaattaaaagcagaataggccaagttgaggaaagaatctcagacctcaaagattagttggttctctgaagtaactcagataaaaataaagaaaaaaagaattaaaaagaaggaacaaaatctctgagaaatatgggattatatggagagaccaaatctatgactcactgaattccctgaaagggagggaaagaaaacaagcaaccgggaaatgtatttgagaatattatccataaaaatttcttcagtctcactagagaggctaacattcanattcan

SEQ ID NO: 5481 - DNA, 426 bp, Homo sapiens
cccacgcgtccggtaagattacacatgcaagcatccccgttccagtgagttcaccctctaaatcaccacgatcaaaagggacaagcatcaagcacgcagcaatgcagctcaaaacgcttagcctagccacacccccacgggaaacagcagtgattaacctttagcaataaacgaaagtttaactaagctatactaaccccagggttggtcaatttcgtgccagccaccgcggtcacacgattaacccaaaaaaaaaaaaaaagggggggccgttttaaagaatccttgggggggccaaagttaacgcgggcaggcaaggaaaaagttttttccttatggggggccgaataaaaacctacttggggattttgggaaaggacctttattttgggggggggacaaaatgggaaacctccctacaaaaat

SEQ ID NO: 5482 - DNA, 455 bp, Homo sapiens
cccaggcccgcttgcctgggttccatggcctccgatctcccctggacaccagctccgtcctctatactgccgtgcagcccaatgagggtgacaacgactatatcatccccctgcctgaccccaaacccgaggttgctgacgagggcccactggagggttcccccagcctagccagctccaccctgaatgaagtcaacacctcctcaaccatctcctgtgacagccccctggagccccaggacgaaccagagccagagccccagcttgagctccaggtggagccggagccagagctggaacagttgccggattcggggtgccctgcgcctcgggcggaagcagaggatagcttcctgtagggggctggcccctaccctgccctgcctgaagctccccccctgccagcacccagcatatcctggcctggcctgaccgggcttcctgtcagccaggcg

SEQ ID NO: 5483 - DNA, 424 bp, Homo sapiens
acgccatgttggggtttgtgggtcgggtggccgctgctccggcctccggggccttgcggagactcaccccttcagcgtcgctgcccccagctcagctcttactgcgggccgctccgacggcggtccatcctgtcagggactatgcggcgcaaacatctccttcgccaaaagcaggcgccgccaccgggcgcatcgaggcggtcattggcgcagcggtggacgtccagtttgatgagggactaccaccaattctaaatgccctggaagtgcaaggcagggagaccagactggttttggaggtggcccaacatttgggtgagagcacagcaaggactattgctatggatggtacagaaggcttggctagaggccagaaagtactggattctggtgcaccaatcataagtcctggtggtcctgagac

SEQ ID NO: 5484 - DNA, 402 bp, Homo sapiens
  misc_feature (1)...(402): n = A,T,C or G
cagagcaggaganagcgaatctcttcatcccaacccaggctgtggtcgccatcatcgggaagaagggggcgcacatcaaacagctggcgagattcgccggagcctctcctgaactcccacgacgctatcccttttagttgaactaacataggtgaacgtgttcaaagccaagcaaaatgcacaccctttttctgtggcaaatcatctctgtacatgtgtgtacatattagaaagggaagatgttaagatatgtggcctgtgggttacacagggtgcctgcagcggtaatatattttaaaaataatatatcatataactcaactaactccaatttttaatcaattattaatttttttttctttttaaagagaaagcaggcttttgtagactctaaagaataag

SEQ ID NO: 5485 - DNA, 380 bp, Homo sapiens
  misc_feature (1)...(380): n = A,T,C or G
acagcacgtgtccccgcacactcagacctggctgttcaccgcacattcagtttcaggggcaattaatgcttctattagtgaactaacctctctgctttcattaccacctggcaggaaatagcattttctctgtgtttcagaaatacctacacttttccattgtaaagagccaaactcattcaatatttttatagaaaactggtcatgaaatacaccaacctttggaattgaagtttaaacagaaggaaaatatgaattttcccccgtttcttccactcgggattctggctgggcttcagccagaatggatacatttggattgcagagaatcctgagacaacccagaggagcccctgggggcagcagggaggctcactccn

SEQ ID NO: 5486 - DNA, 426 bp, Homo sapiens
  misc_feature (1)...(426): n = A,T,C or G
agaacacctgtactttgcttactgaaagattnnnnnnttaaagaaggaaagttgccatttacctgtttaacaaatctgcacatcctgcacatgttccccagaatgtaaaataaaaaaagtttaaataaaaaaggaaagttgtcctttattgttaacatgatccattacatgaatataacataaataattatcttttttaataaatttctattgtattagatcagagagcagtcttttggaaagtattatagatacattactgtagaatttacaaactcattgtaatacaatgtatttaattttcagaatatgattatctgaatggcattgacatgattattgttcccattttcagatgaacactgacttcaagtccaatgatatattcactatgccattttattgacttttccttgtaaagcaacg

SEQ ID NO: 5487 - DNA, 409 bp, Homo sapiens
gaaccgaggtggggagtccgccagagctcccagactgcgagcacgcgagccgccgcagccgtcacccgcgccgcgtcacggctcccgggcccgccctcctctgacccctcccctctctccgtttccccctctccccctcctccgccgaccgagcagtgacttaagcaacggagcgcggtgaagctcatttttctccttcctcgcagccgcgccagggagctcgcggcgcgcggcccctgtcctccggcccgagatgaatcctgcggcagaagccgagttcaacatcctcctggccaccgactcctacaaggttactcactataaacaatatccacccaacacaagcaaagtttattcctactttgaatgccgtgaaaagaagacagaaaactcccaattaagggaaagg

SEQ ID NO: 5488 - DNA, 404 bp, Homo sapiens
  misc_feature (1)...(404): n = A,T,C or G
gcagctttagattgttctggtttttgtgtgcttacaaacaggactcctcatctgtttttaagagggaaatctgagttttcaaggaaagccgaatacagttgccaagttgccagtcaaagaaacaatgtcaacacctgctcatagagatggaattcctaacccggaatattgcccttgaattacaacgagaaaaagaacacttcttattcctgtagcacctcttcaagtgagatggcagaccacctcaggatggaaatgtatttcttcatccccctctctacttccctgtgacctcctgcaaataagggagagacaaagagaagagcagaagaacagaagaatggagtggcaaagagaagagaaggagtgactgaacattgacaagactttggttggggatggtn

SEQ ID NO: 5489 - DNA, 459 bp, Homo sapiens
acttgtaaacaaatgtttcttaaaaatgtgtaagaactaatactcctgcatacaaattttagttgattactctccttagttttaatggaataataatgttttattgtcattatctgatggacatgattactgcagatattttatcatgttggcattatgatttagtagaattttaccgtttaattcttaaatatacacagaaacactgctcagagtcctctgggcaataatatctggtacagatgcatgagggaaaaagagcaaagctattactgttaggagtgtctggtcacttaaatctttcacacatcaggggaagaatagatttcttagtgctgaaaagcacaatgatgacttgcatattatagatttgtgattacattaaaacttaaaatttcacaaatctataatatgcaggtcatcactgtgaaaactatacgtttgcaaaagccttaaatt

SEQ ID NO: 5490 - DNA, 462 bp, Homo sapiens
taaagaacaagcaagctacataaaaacaattatttgattaatgttcaccatgaggcacactttctagagcaagaatccagtgttatttttgtttctcactggcctagcaccaaaacaaaataggtactcaataaatatttttgaattagtgaaatcagtttgaattcacagactttgattcataactagagttttaaaagattggttcaagttatgccttgtcattttgaattcttctggaaaattagtaagatgcttgatgagaagagatgcctatattttaaaaagtgcagtaagtatgaatctggactttctgtatctgccagccaaatgttggctggcattttactatattttatatatatatatatatttaatatattttaatgtatttttctaggcttttctctatgcatacacagtgcgcacacacataaaatatatgcttgttttttcaaaagg

SEQ ID NO: 5491 - DNA, 388 bp, Homo sapiens
cccttttcaagtttacttagaaattttaaattgtattattgctgattcaatttgcatcattctaattgctcatcctctttggcagtggattaattcactgttgggttaatatgcatctcatgaaatgatatcttttcattcctttgtatacctgtattaggtcagtatacgctttccatgaaatatatttgcatttctaatatagtttacatttattaagttataacgtatgacatttttcccaatatcattttttatacattttaattacttaatgttttaagagttctcttccagagttttgcttttcaattacgtttaaagactgtgaataacaaacacttaggctgggcgctgtggcttacgcctcgtataccaacactttgga

SEQ ID NO: 5492 - DNA, 390 bp, Homo sapiens
gcggcggcagggctgagccagcgacgccctccattcactctccgcgcccgttctccggctgtcctcccgttccgctgcccgccctgccaccatgacggaacaggccatctccttcgccaaagacttcttggccggaggcatcgccgccgccatctccaagacggccgtggctccgatcgagcgggtcaagctgctgctgcaggtccagcacgccagcaagcagatcgccgccgacaagcagtacaagggcatcgtggactgcattgtccgcatccccaaggagcagggcgtgctgtccttctggaggggcaaccttgccaacgtcattcgctacttccccactcaagccctcaacttcgccttcaaggataagtacaagcagatcttcct

SEQ ID NO: 5493 - DNA, 475 bp, Homo sapiens
  misc_feature (1)...(475): n = A,T,C or G
tgctgtgatanttatggaaagactancgtacggcaangcaannnnaggatcgacccacgcgatcgggagtatgggccaaagaagtcaaggccaggtacttactcccatagagactgagaagggggacattcatgtgaactacttaggcagttccatctgttcttaataacttatattctaattttaaatagttgagaaatatataaaaggatcaaaagtaatatcaaacacctggatcttccccatctagaagtagcaagtgttaacaattatatttgctttagcccctttgtgtttaagaaataaaacagtagaaaccccctctgctctccccacagatctcttttccccaccctcagtgcaaccactgtcttaaagatggcatcttttcttctgatccttgtttttatactttaagagctcatgcattacttgtctaaacatagaattgttttatgttgtttaaaaacttacn

SEQ ID NO: 5494 - DNA, 478 bp, Homo sapiens
  misc_feature (1)...(478): n = A,T,C or G
natgatgccgtgngaagtgatgaccttccgggacgacccacgcgtccgctctcgcgatcccgcgcccagcttgaattcaacaagaatttaaaacaggtgtgctttcgtgtccaacaaccgtcgtatctacagcgatgcttagagaacaattaaggccagttgacagtaaagaacaatcagtgtgtatttgaagtccatgctgagagagcatcaatcttctggcagctgcaagactgacctatcaaccgaggcatttcttcattccctgccattgtctcctcctcttgagatcgccatcaggcacagtcacttttctacaaacaggcaataggactcccgctgccaccctgcccagattttactcctctactgctgataaagngagcaaagatacgtggcacttcctgaacccaaatactcttctgagctgattctaaatccacacagaatcaacctaccttctattacctccttccag

SEQ ID NO: 5495 - DNA, 407 bp, Homo sapiens
cagagaaggagcttgccatgcccggggaggacctgaagttcaacctaatcttgcggcagccaatgatcttagagaaaggccagcgtttcaccctgcgagatggcaaccggactattggcaccggtctagtcaccaacacgctggccatgactgaggaggagaagaatatcaaatggggttgagtgtgcagatctctgctcagcttcccttgcgtttaaggcctgccctagccagggctccctcctgcttccagtaccctctcatggcataggctgcaacccagcagagggcagctagatggacatttcccctgctcggaagggttggcctgcctggctggggaggtcagtaaactttgaatagtaaaaaaaaaaaaaaggggcggccgttctaaaggatccctcggg

SEQ ID NO: 5496 - DNA, 449 bp, Homo sapiens
  misc_feature (1)...(449): n = A,T,C or G
ctggtctcgaactcctgacctcaggtgatccacccacctcggcctcccaaagtgctgggatgacaggcgtgagccaccgcgcccggccaaaataactctttaaaggtttatattatccagatatgaggattatcaactttctcaggaaagagattgaggggttttacaggaacaacatgctccgaaaatgaagttttaaaggcttctgggttgtatggcagatttgtagcctcgtgtggcttcaccccagatgtgaaggtttgggaagtctgctttggaaagaagggggagttccaggaggtggtgcgagccttcgaactaaagggccactccgcggctgtgcactcgtttgctttctccaacgactcacggaggatggcttctgtctccaaggatggtacatggaaactgtgggacacagatgtggaatacaagaagaagcaggaccn

SEQ ID NO: 5497 - DNA, 473 bp, Homo sapiens
  misc_feature (1)...(473): n = A,T,C or G
caagacactaacaaaggctcctgctgtgacatgtctgttagggtggcactcaagatgaaaactacttcaactaaaagccgaccacttgaacaagaaccagaagagtgtgttaattgcacagatgaatgccgagtgcttggtcattctgacaggtgctggatgccacagttccctgcagccaatcaggctgaaaatgcagattaccgcacaaatctctttgtacctacagttgaagctaatgttgagactgagacttacgaaactgtgaatcccactgggaaaaagactttttgtacatttggaaaagacaagcgagagcacactattctcattgccaacgttaaaccttatttaaaagccaaacgtgccctgagccctctcctccaagaggtcccctcagcatcaagcagcccaaccaaggcgtgcatcgagccttgcacctcaacaaaaggctccttggatggctgtgaagn

SEQ ID NO: 5498 - DNA, 458 bp, Homo sapiens
cggaccggggggatcgtcagtatttaatcagatcacatctttcgtgagtacaagctagtggtccttggttcaggaggcgttgggaagtctgctctgacagttcagtttgttcagggaatttttgttgaaaaatatgacccaacgatagaagattcctacagaaagcaagttgaagtcgattgccaacagtgtatgctcgaaatcctggatactgcagggacagagcaatttacagcaatgagggatttgtatatgaagaacggccaaggttttgcactagtatattctattacagctcagtccacgtttaacgacttacaggacctgagggaacagattttacgggttaaggacacggaagatgttccaatgattttggttggcaataaatgtgacctggaagatgagcgagtagttggcaaagagcagggccagatattatcagacagtggtgtaac

(The sequence listing continues in the following parts.)

What is claimed is:

1. An isolated polynucleotide comprising a sequence selected from the group consisting of SEQ ID NOs: 1-38,043.

2. The isolated polynucleotide of claim 1, comprising a sequence selected from the group consisting of SEQ ID NOs: 1-2,898.

3. The isolated polynucleotide of claim 1, comprising a sequence selected from the group consisting of SEQ ID NOs: 2,899-6,209.

4. The isolated polynucleotide of claim 1, comprising a sequence selected from the group consisting of SEQ ID NOs: 6,210-7,461.

5. The isolated polynucleotide of claim 1, comprising a sequence selected from the group consisting of SEQ ID NOs: 7,462-7,600.

6. The isolated polynucleotide of claim 1, comprising a sequence selected from the group consisting of SEQ ID NOs: 7,601-8,832.

7. The isolated polynucleotide of claim 1, comprising a sequence selected from the group consisting of SEQ ID NOs: 8,833-16,193.

8. The isolated polynucleotide of claim 1, comprising a sequence selected from the group consisting of SEQ ID NOs: 16,194-16,826.

9. The isolated polynucleotide of claim 1, comprising a sequence selected from the group consisting of SEQ ID NOs: 16,827-17,921.

10. The isolated polynucleotide of claim 1, comprising a sequence selected from the group consisting of SEQ ID NOs: 17,922-19,079.

11. The isolated polynucleotide of claim 1, comprising a sequence selected from the group consisting of SEQ ID NOs: 19,080-25,845.

12. The isolated polynucleotide of claim 1, comprising a sequence selected from the group consisting of SEQ ID NOs: 25,846-29,678.

13. The isolated polynucleotide of claim 1, comprising a sequence selected from the group consisting of SEQ ID NOs: 29,679-29,996.

14. The isolated polynucleotide of claim 1, comprising a sequence selected from the group consisting of SEQ ID NOs: 29,997-30,320.

15. The isolated polynucleotide of claim 1, comprising a sequence selected from the group consisting of SEQ ID NOs: 30,321-32,898.

16. The isolated polynucleotide of claim 1, comprising a sequence selected from the group consisting of SEQ ID NOs: 32,899-33,149.

17. The isolated polynucleotide of claim 1, comprising a sequence selected from the group consisting of SEQ ID NOs: 33,150-35,079.

18. The isolated polynucleotide of claim 1, comprising a sequence selected from the group consisting of SEQ ID NOs: 35,080-35,618.

19. The isolated polynucleotide of claim 1, comprising a sequence selected from the group consisting of SEQ ID NOs: 35,619-37,389.

20. The isolated polynucleotide of claim 1, comprising a sequence selected from the group consisting of SEQ ID NOs: 37,390-37,807.

21. The isolated polynucleotide of claim 1, comprising a sequence selected from the group consisting of SEQ ID NOs: 37,808-38,043.

22. A purified polypeptide comprising a sequence corresponding to a reading frame of a polynucleotide selected from the group consisting of SEQ ID NOs:1-38,043.

23. The purified polypeptide of claim 22, comprising a sequence corresponding to a reading frame of a polynucleotide selected from the group consisting of SEQ ID NOs: 1-2,898.

24. The purified polypeptide of claim 22, comprising a sequence corresponding to a reading frame of a polynucleotide selected from the group consisting of SEQ ID NOs: 2,899-6,209.

25. The purified polypeptide of claim 22, comprising a sequence corresponding to a reading frame of a polynucleotide selected from the group consisting of SEQ ID NOs: 6,210-7,461.

26. The purified polypeptide of claim 22, comprising a sequence corresponding to a reading frame of a polynucleotide selected from the group consisting of SEQ ID NOs: 7,462-7,600.

27. The purified polypeptide of claim 22, comprising a sequence corresponding to a reading frame of a polynucleotide selected from the group consisting of SEQ ID NOs: 7,601-8,832.

28. The purified polypeptide of claim 22, comprising a sequence corresponding to a reading frame of a polynucleotide selected from the group consisting of SEQ ID NOs: 8,833-16,193.

29. The purified polypeptide of claim 22, comprising a sequence corresponding to a reading frame of a polynucleotide selected from the group consisting of SEQ ID NOs: 16,194-16,826.

30. The purified polypeptide of claim 22, comprising a sequence corresponding to a reading frame of a polynucleotide selected from the group consisting of SEQ ID NOs: 16,827-17,921.

31. The purified polypeptide of claim 22, comprising a sequence corresponding to a reading frame of a polynucleotide selected from the group consisting of SEQ ID NOs: 17,922-19,079.

32. The purified polypeptide of claim 22, comprising a sequence corresponding to a reading frame of a polynucleotide selected from the group consisting of SEQ ID NOs: 19,080-25,845.

33. The purified polypeptide of claim 22, comprising a sequence corresponding to a reading frame of a polynucleotide selected from the group consisting of SEQ ID NOs: 25,846-29,678.

34. The purified polypeptide of claim 22, comprising a sequence corresponding to a reading frame of a polynucleotide selected from the group consisting of SEQ ID NOs: 29,679-29,996.

35. The purified polypeptide of claim 22, comprising a sequence corresponding to a reading frame of a polynucleotide selected from the group consisting of SEQ ID NOs: 29,997-30,320.

36. The purified polypeptide of claim 22, comprising a sequence corresponding to a reading frame of a polynucleotide selected from the group consisting of SEQ ID NOs: 30,321-32,898.

37. The purified polypeptide of claim 22, comprising a sequence corresponding to a reading frame of a polynucleotide selected from the group consisting of SEQ ID NOs: 32,899-33,149.

38. The purified polypeptide of claim 22, comprising a sequence corresponding to a reading frame of a polynucleotide selected from the group consisting of SEQ ID NOs: 33,150-35,079.

39. The purified polypeptide of claim 22, comprising a sequence corresponding to a reading frame of a polynucleotide selected from the group consisting of SEQ ID NOs: 35,080-35,618.

40. The purified polypeptide of claim 22, comprising a sequence corresponding to a reading frame of a polynucleotide selected from the group consisting of SEQ ID NOs: 35,619-37,389.

41. The purified polypeptide of claim 22, comprising a sequence corresponding to a reading frame of a polynucleotide selected from the group consisting of SEQ ID NOs: 37,390-37,807.

42. The purified polypeptide of claim 22, comprising a sequence corresponding to a reading frame of a polynucleotide selected from the group consisting of SEQ ID NOs: 37,808-38,043.
